United States Patent Application Publication US 2018/0305689 A1 - sequence listing, part 39

SEQ ID NO: 562722 - RNA, 19 nt, Artificial Sequence
  Description of Artificial Sequence: Synthetic oligonucleotide
  Antisense strand to SEQ ID NO: 562721
uaugauacacuggaauggc

SEQ ID NO: 562723 - RNA, 19 nt, Artificial Sequence
  Description of Artificial Sequence: Synthetic oligonucleotide
  Sense strand starting at position 495 of SEQ ID NO: 318438
guaucauaccuuuguggaa

SEQ ID NO: 562724 - RNA, 19 nt, Artificial Sequence
  Description of Artificial Sequence: Synthetic oligonucleotide
  Antisense strand to SEQ ID NO: 562723
uuccacaaagguaugauac

SEQ ID NO: 562725 - RNA, 19 nt, Artificial Sequence
  Description of Artificial Sequence: Synthetic oligonucleotide
  Sense strand starting at position 1376 of SEQ ID NO: 318438
gaguaaauauaguuuguag

SEQ ID NO: 562726 - RNA, 19 nt, Artificial Sequence
  Description of Artificial Sequence: Synthetic oligonucleotide
  Antisense strand to SEQ ID NO: 562725
cuacaaacuauauuuacuc

SEQ ID NO: 562727 - RNA, 19 nt, Artificial Sequence
  Description of Artificial Sequence: Synthetic oligonucleotide
  Sense strand starting at position 2074 of SEQ ID NO: 318438
gacucacgucucuaagaca

SEQ ID NO: 562728 - RNA, 19 nt, Artificial Sequence
  Description of Artificial Sequence: Synthetic oligonucleotide
  Antisense strand to SEQ ID NO: 562727
ugucuuagagacgugaguc

SEQ ID NO: 562729 - RNA, 19 nt, Artificial Sequence
  Description of Artificial Sequence: Synthetic oligonucleotide
  Sense strand starting at position 2370 of SEQ ID NO: 318438
caacuuugcgacggaaaug

SEQ ID NO: 562730 - RNA, 19 nt, Artificial Sequence
  Description of Artificial Sequence: Synthetic oligonucleotide
  Antisense strand to SEQ ID NO: 562729
cauuuccgucgcaaaguug

SEQ ID NO: 562731 - RNA, 19 nt, Artificial Sequence
  Description of Artificial Sequence: Synthetic oligonucleotide
  Sense strand starting at position 2371 of SEQ ID NO: 318438
aacuuugcgacggaaaugu

SEQ ID NO: 562732 - RNA, 19 nt, Artificial Sequence
  Description of Artificial Sequence: Synthetic oligonucleotide
  Antisense strand to SEQ ID NO: 562731
acauuuccgucgcaaaguu

SEQ ID NO: 562733 - RNA, 19 nt, Artificial Sequence
  Description of Artificial Sequence: Synthetic oligonucleotide
  Sense strand starting at position 2382 of SEQ ID NO: 318438
ggaaaugugucaucgaaag

SEQ ID NO: 562734 - RNA, 19 nt, Artificial Sequence
  Description of Artificial Sequence: Synthetic oligonucleotide
  Antisense strand to SEQ ID NO: 562733
cuuucgaugacacauuucc

SEQ ID NO: 562735 - RNA, 19 nt, Artificial Sequence
  Description of Artificial Sequence: Synthetic oligonucleotide
  Sense strand starting at position 2893 of SEQ ID NO: 318438
ucugguauuucguuuguaa

SEQ ID NO: 562736 - RNA, 19 nt, Artificial Sequence
  Description of Artificial Sequence: Synthetic oligonucleotide
  Antisense strand to SEQ ID NO: 562735
uuacaaacgaaauaccaga

SEQ ID NO: 562737 - RNA, 19 nt, Artificial Sequence
  Description of Artificial Sequence: Synthetic oligonucleotide
  Sense strand starting at position 2933 of SEQ ID NO: 318438
caggguuggccuugggauu

SEQ ID NO: 562738 - RNA, 19 nt, Artificial Sequence
  Description of Artificial Sequence: Synthetic oligonucleotide
  Antisense strand to SEQ ID NO: 562737
aaucccaaggccaacccug

SEQ ID NO: 562739 - RNA, 19 nt, Artificial Sequence
  Description of Artificial Sequence: Synthetic oligonucleotide
  Sense strand starting at position 2985 of SEQ ID NO: 318438
ccgguagagucauuaaugg

SEQ ID NO: 562740 - RNA, 19 nt, Artificial Sequence
  Description of Artificial Sequence: Synthetic oligonucleotide
  Antisense strand to SEQ ID NO: 562739
ccauuaaugacucuaccgg

SEQ ID NO: 562741 - RNA, 19 nt, Artificial Sequence
  Description of Artificial Sequence: Synthetic oligonucleotide
  Sense strand starting at position 2990 of SEQ ID NO: 318438
agagucauuaaugguggau

SEQ ID NO: 562742 - RNA, 19 nt, Artificial Sequence
  Description of Artificial Sequence: Synthetic oligonucleotide
  Antisense strand to SEQ ID NO: 562741
auccaccauuaaugacucu

SEQ ID NO: 562743 - RNA, 19 nt, Artificial Sequence
  Description of Artificial Sequence: Synthetic oligonucleotide
  Sense strand starting at position 3059 of SEQ ID NO: 318438
ugauaaacgccucagauua

SEQ ID NO: 562744 - RNA, 19 nt, Artificial Sequence
  Description of Artificial Sequence: Synthetic oligonucleotide
  Antisense strand to SEQ ID NO: 562743
uaaucugaggcguuuauca

SEQ ID NO: 562745 - RNA, 19 nt, Artificial Sequence
  Description of Artificial Sequence: Synthetic oligonucleotide
  Sense strand starting at position 3084 of SEQ ID NO: 318438
gguaaacgaguucagaugu

SEQ ID NO: 562746 - RNA, 19 nt, Artificial Sequence
  Description of Artificial Sequence: Synthetic oligonucleotide
  Antisense strand to SEQ ID NO: 562745
acaucugaacucguuuacc

SEQ ID NO: 562747 - RNA, 19 nt, Artificial Sequence
  Description of Artificial Sequence: Synthetic oligonucleotide
  Sense strand starting at position 3239 of SEQ ID NO: 318438
gcauguuaucagugaaggg

SEQ ID NO: 562748 - RNA, 19 nt, Artificial Sequence
  Description of Artificial Sequence: Synthetic oligonucleotide
  Antisense strand to SEQ ID NO: 562747
cccuucacugauaacaugc

SEQ ID NO: 562749 - RNA, 19 nt, Artificial Sequence
  Description of Artificial Sequence: Synthetic oligonucleotide
  Sense strand starting at position 3243 of SEQ ID NO: 318438
guuaucagugaagggaauu

SEQ ID NO: 562750 - RNA, 19 nt, Artificial Sequence
  Description of Artificial Sequence: Synthetic oligonucleotide
  Antisense strand to SEQ ID NO: 562749
aauucccuucacugauaac

SEQ ID NO: 562751 - RNA, 19 nt, Artificial Sequence
  Description of Artificial Sequence: Synthetic oligonucleotide
  Sense strand starting at position 3270 of SEQ ID NO: 318438
gcauaacgacuuuaacgaa

SEQ ID NO: 562752 - RNA, 19 nt, Artificial Sequence
  Description of Artificial Sequence: Synthetic oligonucleotide
  Antisense strand to SEQ ID NO: 562751
uucguuaaagucguuaugc

SEQ ID NO: 562753 - RNA, 19 nt, Artificial Sequence
  Description of Artificial Sequence: Synthetic oligonucleotide
  Sense strand starting at position 3301 of SEQ ID NO: 318438
ccguuuaguccugaaagug

SEQ ID NO: 562754 - RNA, 19 nt, Artificial Sequence
  Description of Artificial Sequence: Synthetic oligonucleotide
  Antisense strand to SEQ ID NO: 562753
cacuuucaggacuaaacgg

SEQ ID NO: 562755 - RNA, 19 nt, Artificial Sequence
  Description of Artificial Sequence: Synthetic oligonucleotide
  Sense strand starting at position 3309 of SEQ ID NO: 318438
uccugaaaguguuuaucaa

SEQ ID NO: 562756 - RNA, 19 nt, Artificial Sequence
  Description of Artificial Sequence: Synthetic oligonucleotide
  Antisense strand to SEQ ID NO: 562755
uugauaaacacuuucagga

SEQ ID NO: 562757 - RNA, 19 nt, Artificial Sequence
  Description of Artificial Sequence: Synthetic oligonucleotide
  Sense strand starting at position 3310 of SEQ ID NO: 318438
ccugaaaguguuuaucaaa

SEQ ID NO: 562758 - RNA, 19 nt, Artificial Sequence
  Description of Artificial Sequence: Synthetic oligonucleotide
  Antisense strand to SEQ ID NO: 562757
uuugauaaacacuuucagg

SEQ ID NO: 562759 - RNA, 19 nt, Artificial Sequence
  Description of Artificial Sequence: Synthetic oligonucleotide
  Sense strand starting at position 3389 of SEQ ID NO: 318438
uuaagacucuuugugggaa

SEQ ID NO: 562760 - RNA, 19 nt, Artificial Sequence
  Description of Artificial Sequence: Synthetic oligonucleotide
  Antisense strand to SEQ ID NO: 562759
uucccacaaagagucuuaa

SEQ ID NO: 562761 - RNA, 19 nt, Artificial Sequence
  Description of Artificial Sequence: Synthetic oligonucleotide
  Sense strand starting at position 3454 of SEQ ID NO: 318438
acaagacaugucuguuucu

SEQ ID NO: 562762 - RNA, 19 nt, Artificial Sequence
  Description of Artificial Sequence: Synthetic oligonucleotide
  Antisense strand to SEQ ID NO: 562761
agaaacagacaugucuugu

SEQ ID NO: 562763 - RNA, 19 nt, Artificial Sequence
  Description of Artificial Sequence: Synthetic oligonucleotide
  Sense strand starting at position 3457 of SEQ ID NO: 318438
agacaugucuguuucugag

SEQ ID NO: 562764 - RNA, 19 nt, Artificial Sequence
  Description of Artificial Sequence: Synthetic oligonucleotide
  Antisense strand to SEQ ID NO: 562763
cucagaaacagacaugucu

SEQ ID NO: 562765 - RNA, 19 nt, Artificial Sequence
  Description of Artificial Sequence: Synthetic oligonucleotide
  Sense strand starting at position 3467 of SEQ ID NO: 318438
guuucugagaggugcagau

SEQ ID NO: 562766 - RNA, 19 nt, Artificial Sequence
  Description of Artificial Sequence: Synthetic oligonucleotide
  Antisense strand to SEQ ID NO: 562765
aucugcaccucucagaaac

SEQ ID NO: 562767 - RNA, 19 nt, Artificial Sequence
  Description of Artificial Sequence: Synthetic oligonucleotide
  Sense strand starting at position 3469 of SEQ ID NO: 318438
uucugagaggugcagauua

SEQ ID NO: 562768 - RNA, 19 nt, Artificial Sequence
  Description of Artificial Sequence: Synthetic oligonucleotide
  Antisense strand to SEQ ID NO: 562767
uaaucugcaccucucagaa

SEQ ID NO: 562769 - RNA, 19 nt, Artificial Sequence
  Description of Artificial Sequence: Synthetic oligonucleotide
  Sense strand starting at position 3517 of SEQ ID NO: 318438
agauuccuuaagcggaaga

SEQ ID NO: 562770 - RNA, 19 nt, Artificial Sequence
  Description of Artificial Sequence: Synthetic oligonucleotide
  Antisense strand to SEQ ID NO: 562769
ucuuccgcuuaaggaaucu

SEQ ID NO: 562771 - RNA, 19 nt, Artificial Sequence
  Description of Artificial Sequence: Synthetic oligonucleotide
  Sense strand starting at position 3519 of SEQ ID NO: 318438
auuccuuaagcggaagauu

SEQ ID NO: 562772 - RNA, 19 nt, Artificial Sequence
  Description of Artificial Sequence: Synthetic oligonucleotide
  Antisense strand to SEQ ID NO: 562771
aaucuuccgcuuaaggaau

SEQ ID NO: 562773 - RNA, 19 nt, Artificial Sequence
  Description of Artificial Sequence: Synthetic oligonucleotide
  Sense strand starting at position 3574 of SEQ ID NO: 318438
guuauuaagucauugucaa

SEQ ID NO: 562774 - RNA, 19 nt, Artificial Sequence
  Description of Artificial Sequence: Synthetic oligonucleotide
  Antisense strand to SEQ ID NO: 562773
uugacaaugacuuaauaac

SEQ ID NO: 562775 - RNA, 19 nt, Artificial Sequence
  Description of Artificial Sequence: Synthetic oligonucleotide
  Sense strand starting at position 3638 of SEQ ID NO: 318438
ucagacuugguguauuaua

SEQ ID NO: 562776 - RNA, 19 nt, Artificial Sequence
  Description of Artificial Sequence: Synthetic oligonucleotide
  Antisense strand to SEQ ID NO: 562775
uauaauacaccaagucuga

SEQ ID NO: 562777 - RNA, 19 nt, Artificial Sequence
  Description of Artificial Sequence: Synthetic oligonucleotide
  Sense strand starting at position 3648 of SEQ ID NO: 318438
uguauuauaguggacuuga

SEQ ID NO: 562778 - RNA, 19 nt, Artificial Sequence
  Description of Artificial Sequence: Synthetic oligonucleotide
  Antisense strand to SEQ ID NO: 562777
ucaaguccacuauaauaca

SEQ ID NO: 562779 - RNA, 19 nt, Artificial Sequence
  Description of Artificial Sequence: Synthetic oligonucleotide
  Sense strand starting at position 3695 of SEQ ID NO: 318438
acuggauuaucccuguuau

SEQ ID NO: 562780 - RNA, 19 nt, Artificial Sequence
  Description of Artificial Sequence: Synthetic oligonucleotide
  Antisense strand to SEQ ID NO: 562779
auaacagggauaauccagu

SEQ ID NO: 562781 - RNA, 19 nt, Artificial Sequence
  Description of Artificial Sequence: Synthetic oligonucleotide
  Sense strand starting at position 3696 of SEQ ID NO: 318438
cuggauuaucccuguuauc

SEQ ID NO: 562782 - RNA, 19 nt, Artificial Sequence
  Description of Artificial Sequence: Synthetic oligonucleotide
  Antisense strand to SEQ ID NO: 562781
gauaacagggauaauccag

SEQ ID NO: 562783 - RNA, 19 nt, Artificial Sequence
  Description of Artificial Sequence: Synthetic oligonucleotide
  Sense strand starting at position 3742 of SEQ ID NO: 318438
guuaaaucugaauagcuga

SEQ ID NO: 562784 - RNA, 19 nt, Artificial Sequence
  Description of Artificial Sequence: Synthetic oligonucleotide
  Antisense strand to SEQ ID NO: 562783
ucagcuauucagauuuaac

SEQ ID NO: 562785 - RNA, 19 nt, Artificial Sequence
  Description of Artificial Sequence: Synthetic oligonucleotide
  Sense strand starting at position 3854 of SEQ ID NO: 318438
aagggaauauguguuguau

SEQ ID NO: 562786 - RNA, 19 nt, Artificial Sequence
  Description of Artificial Sequence: Synthetic oligonucleotide
  Antisense strand to SEQ ID NO: 562785
auacaacacauauucccuu

SEQ ID NO: 562787 - RNA, 19 nt, Artificial Sequence
  Description of Artificial Sequence: Synthetic oligonucleotide
  Sense strand starting at position 3884 of SEQ ID NO: 318438
agaguauguacauauaugu

SEQ ID NO: 562788 - RNA, 19 nt, Artificial Sequence
  Description of Artificial Sequence: Synthetic oligonucleotide
  Antisense strand to SEQ ID NO: 562787
acauauauguacauacucu

SEQ ID NO: 562789 - RNA, 19 nt, Artificial Sequence
  Description of Artificial Sequence: Synthetic oligonucleotide
  Sense strand starting at position 3956 of SEQ ID NO: 318438
agugguuaucucuagggaa

SEQ ID NO: 562790 - RNA, 19 nt, Artificial Sequence
  Description of Artificial Sequence: Synthetic oligonucleotide
  Antisense strand to SEQ ID NO: 562789
uucccuagagauaaccacu

SEQ ID NO: 562791 - RNA, 19 nt, Artificial Sequence
  Description of Artificial Sequence: Synthetic oligonucleotide
  Sense strand starting at position 3958 of SEQ ID NO: 318438
ugguuaucucuagggaagg

SEQ ID NO: 562792 - RNA, 19 nt, Artificial Sequence
  Description of Artificial Sequence: Synthetic oligonucleotide
  Antisense strand to SEQ ID NO: 562791
ccuucccuagagauaacca

SEQ ID NO: 562793 - RNA, 19 nt, Artificial Sequence
  Description of Artificial Sequence: Synthetic oligonucleotide
  Sense strand starting at position 280 of SEQ ID NO: 318439
ugagcuauuuauuagacaa

SEQ ID NO: 562794 - RNA, 19 nt, Artificial Sequence
  Description of Artificial Sequence: Synthetic oligonucleotide
  Antisense strand to SEQ ID NO: 562793
uugucuaauaaauagcuca

SEQ ID NO: 562795 - RNA, 19 nt, Artificial Sequence
  Description of Artificial Sequence: Synthetic oligonucleotide
  Sense strand starting at position 282 of SEQ ID NO: 318439
agcuauuuauuagacaaug

SEQ ID NO: 562796 - RNA, 19 nt, Artificial Sequence
  Description of Artificial Sequence: Synthetic oligonucleotide
  Antisense strand to SEQ ID NO: 562795
cauugucuaauaaauagcu

SEQ ID NO: 562797 - RNA, 19 nt, Artificial Sequence
  Description of Artificial Sequence: Synthetic oligonucleotide
  Sense strand starting at position 299 of SEQ ID NO: 318439
uguuccucucuugaagaaa

SEQ ID NO: 562798 - RNA, 19 nt, Artificial Sequence
  Description of Artificial Sequence: Synthetic oligonucleotide
  Antisense strand to SEQ ID NO: 562797
uuucuucaagagaggaaca

SEQ ID NO: 562799 - RNA, 19 nt, Artificial Sequence
  Description of Artificial Sequence: Synthetic oligonucleotide
  Sense strand starting at position 325 of SEQ ID NO: 318439
agaaguuggagcugaaagu

SEQ ID NO: 562800 - RNA, 19 nt, Artificial Sequence
  Description of Artificial Sequence: Synthetic oligonucleotide
  Antisense strand to SEQ ID NO: 562799
acuuucagcuccaacuucu

SEQ ID NO: 562801 - RNA, 19 nt, Artificial Sequence
  Description of Artificial Sequence: Synthetic oligonucleotide
  Sense strand starting at position 367 of SEQ ID NO: 318439
gcuuauaaauacuuuacga

SEQ ID NO: 562802 - RNA, 19 nt, Artificial Sequence
  Description of Artificial Sequence: Synthetic oligonucleotide
  Antisense strand to SEQ ID NO: 562801
ucguaaaguauuuauaagc

SEQ ID NO: 562803 - RNA, 19 nt, Artificial Sequence
  Description of Artificial Sequence: Synthetic oligonucleotide
  Sense strand starting at position 375 of SEQ ID NO: 318439
auacuuuacgaaugcuaag

SEQ ID NO: 562804 - RNA, 19 nt, Artificial Sequence
  Description of Artificial Sequence: Synthetic oligonucleotide
  Antisense strand to SEQ ID NO: 562803
cuuagcauucguaaaguau

SEQ ID NO: 562805 - RNA, 19 nt, Artificial Sequence
  Description of Artificial Sequence: Synthetic oligonucleotide
  Sense strand starting at position 427 of SEQ ID NO: 318439
gaauauuaucggcagugga

SEQ ID NO: 562806 - RNA, 19 nt, Artificial Sequence
  Description of Artificial Sequence: Synthetic oligonucleotide
  Antisense strand to SEQ ID NO: 562805
uccacugccgauaauauuc

SEQ ID NO: 562807 - RNA, 19 nt, Artificial Sequence
  Description of Artificial Sequence: Synthetic oligonucleotide
  Sense strand starting at position 430 of SEQ ID NO: 318439
uauuaucggcaguggauua

SEQ ID NO: 562808 - RNA, 19 nt, Artificial Sequence
  Description of Artificial Sequence: Synthetic oligonucleotide
  Antisense strand to SEQ ID NO: 562807
uaauccacugccgauaaua

SEQ ID NO: 562809 - RNA, 19 nt, Artificial Sequence
  Description of Artificial Sequence: Synthetic oligonucleotide
  Sense strand starting at position 750 of SEQ ID NO: 318439
ggaaauagcuacccugcau

SEQ ID NO: 562810 - RNA, 19 nt, Artificial Sequence
  Description of Artificial Sequence: Synthetic oligonucleotide
  Antisense strand to SEQ ID NO: 562809
augcaggguagcuauuucc

SEQ ID NO: 562811 - RNA, 19 nt, Artificial Sequence
  Description of Artificial Sequence: Synthetic oligonucleotide
  Sense strand starting at position 803 of SEQ ID NO: 318439
cccuaucuugcugagaacu

SEQ ID NO: 562812 - RNA, 19 nt, Artificial Sequence
  Description of Artificial Sequence: Synthetic oligonucleotide
  Antisense strand to SEQ ID NO: 562811
aguucucagcaagauaggg

SEQ ID NO: 562813 - RNA, 19 nt, Artificial Sequence
  Description of Artificial Sequence: Synthetic oligonucleotide
  Sense strand starting at position 1040 of SEQ ID NO: 318439
gauacucggcucuauuacu

SEQ ID NO: 562814 - RNA, 19 nt, Artificial Sequence
  Description of Artificial Sequence: Synthetic oligonucleotide
  Antisense strand to SEQ ID NO: 562813
aguaauagagccgaguauc

SEQ ID NO: 562815 - RNA, 19 nt, Artificial Sequence
  Description of Artificial Sequence: Synthetic oligonucleotide
  Sense strand starting at position 1046 of SEQ ID NO: 318439
cggcucuauuacuuugaua

SEQ ID NO: 562816 - RNA, 19 nt, Artificial Sequence
  Description of Artificial Sequence: Synthetic oligonucleotide
  Antisense strand to SEQ ID NO: 562815
uaucaaaguaauagagccg

SEQ ID NO: 562817 - RNA, 19 nt, Artificial Sequence
  Description of Artificial Sequence: Synthetic oligonucleotide
  Sense strand starting at position 1048 of SEQ ID NO: 318439
gcucuauuacuuugauagc

SEQ ID NO: 562818 - RNA, 19 nt, Artificial Sequence
  Description of Artificial Sequence: Synthetic oligonucleotide
  Antisense strand to SEQ ID NO: 562817
gcuaucaaaguaauagagc

SEQ ID NO: 562819 - RNA, 19 nt, Artificial Sequence
  Description of Artificial Sequence: Synthetic oligonucleotide
  Sense strand starting at position 1057 of SEQ ID NO: 318439
cuuugauagcaguaauaag

SEQ ID NO: 562820 - RNA, 19 nt, Artificial Sequence
  Description of Artificial Sequence: Synthetic oligonucleotide
  Antisense strand to SEQ ID NO: 562819
cuuauuacugcuaucaaag

SEQ ID NO: 562821 - RNA, 19 nt, Artificial Sequence
  Description of Artificial Sequence: Synthetic oligonucleotide
  Sense strand starting at position 1129 of SEQ ID NO: 318439
gccauuccaguguaucaua

SEQ ID NO: 562822 - RNA, 19 nt, Artificial Sequence
  Description of Artificial Sequence: Synthetic oligonucleotide
  Antisense strand to SEQ ID NO: 562821
uaugauacacuggaauggc

SEQ ID NO: 562823 - RNA, 19 nt, Artificial Sequence
  Description of Artificial Sequence: Synthetic oligonucleotide
  Sense strand starting at position 1140 of SEQ ID NO: 318439
guaucauaccuuuguggaa

SEQ ID NO: 562824 - RNA, 19 nt, Artificial Sequence
  Description of Artificial Sequence: Synthetic oligonucleotide
  Antisense strand to SEQ ID NO: 562823
uuccacaaagguaugauac

SEQ ID NO: 562825 - RNA, 19 nt, Artificial Sequence
  Description of Artificial Sequence: Synthetic oligonucleotide
  Sense strand starting at position 2021 of SEQ ID NO: 318439
gaguaaauauaguuuguag

SEQ ID NO: 562826 - RNA, 19 nt, Artificial Sequence
  Description of Artificial Sequence: Synthetic oligonucleotide
  Antisense strand to SEQ ID NO: 562825
cuacaaacuauauuuacuc

SEQ ID NO: 562827 - RNA, 19 nt, Artificial Sequence
  Description of Artificial Sequence: Synthetic oligonucleotide
  Sense strand starting at position 2719 of SEQ ID NO: 318439
gacucacgucucuaagaca

SEQ ID NO: 562828 - RNA, 19 nt, Artificial Sequence
  Description of Artificial Sequence: Synthetic oligonucleotide
  Antisense strand to SEQ ID NO: 562827
ugucuuagagacgugaguc

SEQ ID NO: 562829 - RNA, 19 nt, Artificial Sequence
  Description of Artificial Sequence: Synthetic oligonucleotide
  Sense strand starting at position 2985 of SEQ ID NO: 318439
gaaguaccgacccgaguua

SEQ ID NO: 562830 - RNA, 19 nt, Artificial Sequence
  Description of Artificial Sequence: Synthetic oligonucleotide
  Antisense strand to SEQ ID NO: 562829
uaacucgggucgguacuuc

SEQ ID NO: 562831 - RNA, 19 nt, Artificial Sequence
  Description of Artificial Sequence: Synthetic oligonucleotide
  Sense strand starting at position 3014 of SEQ ID NO: 318439
ccaacuuugcgacggaaau

SEQ ID NO: 562832 - RNA, 19 nt, Artificial Sequence
  Description of Artificial Sequence: Synthetic oligonucleotide
  Antisense strand to SEQ ID NO: 562831
auuuccgucgcaaaguugg

SEQ ID NO: 562833 - RNA, 19 nt, Artificial Sequence
  Description of Artificial Sequence: Synthetic oligonucleotide
  Sense strand starting at position 3015 of SEQ ID NO: 318439
caacuuugcgacggaaaug

SEQ ID NO: 562834 - RNA, 19 nt, Artificial Sequence
  Description of Artificial Sequence: Synthetic oligonucleotide
  Antisense strand to SEQ ID NO: 562833
cauuuccgucgcaaaguug

SEQ ID NO: 562835 - RNA, 19 nt, Artificial Sequence
  Description of Artificial Sequence: Synthetic oligonucleotide
  Sense strand starting at position 3016 of SEQ ID NO: 318439
aacuuugcgacggaaaugu

SEQ ID NO: 562836 - RNA, 19 nt, Artificial Sequence
  Description of Artificial Sequence: Synthetic oligonucleotide
  Antisense strand to SEQ ID NO: 562835
acauuuccgucgcaaaguu

SEQ ID NO: 562837 - RNA, 19 nt, Artificial Sequence
  Description of Artificial Sequence: Synthetic oligonucleotide
  Sense strand starting at position 3027 of SEQ ID NO: 318439
ggaaaugugucaucgaaag

SEQ ID NO: 562838 - RNA, 19 nt, Artificial Sequence
  Description of Artificial Sequence: Synthetic oligonucleotide
  Antisense strand to SEQ ID NO: 562837
cuuucgaugacacauuucc

SEQ ID NO: 562839 - RNA, 19 nt, Artificial Sequence
  Description of Artificial Sequence: Synthetic oligonucleotide
  Sense strand starting at position 3211 of SEQ ID NO: 318439
ggaccauguugcuuccgaa

SEQ ID NO: 562840 - RNA, 19 nt, Artificial Sequence
  Description of Artificial Sequence: Synthetic oligonucleotide
  Antisense strand to SEQ ID NO: 562839
uucggaagcaacauggucc

SEQ ID NO: 562841 - RNA, 19 nt, Artificial Sequence
  Description of Artificial Sequence: Synthetic oligonucleotide
  Sense strand starting at position 3519 of SEQ ID NO: 318439
ccugcuuagucuuucugaa

SEQ ID NO: 562842 - RNA, 19 nt, Artificial Sequence
  Description of Artificial Sequence: Synthetic oligonucleotide
  Antisense strand to SEQ ID NO: 562841
uucagaaagacuaagcagg

SEQ ID NO: 562843 - RNA, 19 nt, Artificial Sequence
  Description of Artificial Sequence: Synthetic oligonucleotide
  Sense strand starting at position 3538 of SEQ ID NO: 318439
ucugguauuucguuuguaa

SEQ ID NO: 562844 - RNA, 19 nt, Artificial Sequence
  Description of Artificial Sequence: Synthetic oligonucleotide
  Antisense strand to SEQ ID NO: 562843
uuacaaacgaaauaccaga

SEQ ID NO: 562845 - RNA, 19 nt, Artificial Sequence
  Description of Artificial Sequence: Synthetic oligonucleotide
  Sense strand starting at position 3578 of SEQ ID NO: 318439
caggguuggccuugggauu

SEQ ID NO: 562846 - RNA, 19 nt, Artificial Sequence
  Description of Artificial Sequence: Synthetic oligonucleotide
  Antisense strand to SEQ ID NO: 562845
aaucccaaggccaacccug

SEQ ID NO: 562847 - RNA, 19 nt, Artificial Sequence
  Description of Artificial Sequence: Synthetic oligonucleotide
  Sense strand starting at position 3630 of SEQ ID NO: 318439
ccgguagagucauuaaugg

SEQ ID NO: 562848 - RNA, 19 nt, Artificial Sequence
  Description of Artificial Sequence: Synthetic oligonucleotide
  Antisense strand to SEQ ID NO: 562847
ccauuaaugacucuaccgg

SEQ ID NO: 562849 - RNA, 19 nt, Artificial Sequence
  Description of Artificial Sequence: Synthetic oligonucleotide
  Sense strand starting at position 3635 of SEQ ID NO: 318439
agagucauuaaugguggau

SEQ ID NO: 562850 - RNA, 19 nt, Artificial Sequence
  Description of Artificial Sequence: Synthetic oligonucleotide
  Antisense strand to SEQ ID NO: 562849
auccaccauuaaugacucu

SEQ ID NO: 562851 - RNA, 19 nt, Artificial Sequence
  Description of Artificial Sequence: Synthetic oligonucleotide
  Sense strand starting at position 3704 of SEQ ID NO: 318439
ugauaaacgccucagauua

SEQ ID NO: 562852 - RNA, 19 nt, Artificial Sequence
  Description of Artificial Sequence: Synthetic oligonucleotide
  Antisense strand to SEQ ID NO: 562851
uaaucugaggcguuuauca

SEQ ID NO: 562853 - RNA, 19 nt, Artificial Sequence
  Description of Artificial Sequence: Synthetic oligonucleotide
  Sense strand starting at position 3716 of SEQ ID NO: 318439
cagauuagauuucgguaaa

SEQ ID NO: 562854 - RNA, 19 nt, Artificial Sequence
  Description of Artificial Sequence: Synthetic oligonucleotide
  Antisense strand to SEQ ID NO: 562853
uuuaccgaaaucuaaucug

SEQ ID NO: 562855 - RNA, 19 nt, Artificial Sequence
  Description of Artificial Sequence: Synthetic oligonucleotide
  Sense strand starting at position 3717 of SEQ ID NO: 318439
agauuagauuucgguaaac

SEQ ID NO: 562856 - RNA, 19 nt, Artificial Sequence
  Description of Artificial Sequence: Synthetic oligonucleotide
  Antisense strand to SEQ ID NO: 562855
guuuaccgaaaucuaaucu

SEQ ID NO: 562857 - RNA, 19 nt, Artificial Sequence
  Description of Artificial Sequence: Synthetic oligonucleotide
  Sense strand starting at position 3729 of SEQ ID NO: 318439
gguaaacgaguucagaugu

SEQ ID NO: 562858 - RNA, 19 nt, Artificial Sequence
  Description of Artificial Sequence: Synthetic oligonucleotide
  Antisense strand to SEQ ID NO: 562857
acaucugaacucguuuacc

SEQ ID NO: 562859 - RNA, 19 nt, Artificial Sequence
  Description of Artificial Sequence: Synthetic oligonucleotide
  Sense strand starting at position 3758 of SEQ ID NO: 318439
acgaaauugcuguaugcuu

SEQ ID NO: 562860 - RNA, 19 nt, Artificial Sequence
  Description of Artificial Sequence: Synthetic oligonucleotide
  Antisense strand to SEQ ID NO: 562859
aagcauacagcaauuucgu

SEQ ID NO: 562861 - RNA, 19 nt, Artificial Sequence
  Description of Artificial Sequence: Synthetic oligonucleotide
  Sense strand starting at position 3884 of SEQ ID NO: 318439
gcauguuaucagugaaggg

SEQ ID NO: 562862 - RNA, 19 nt, Artificial Sequence
  Description of Artificial Sequence: Synthetic oligonucleotide
  Antisense strand to SEQ ID NO: 562861
cccuucacugauaacaugc

SEQ ID NO: 562863 - RNA, 19 nt, Artificial Sequence
  Description of Artificial Sequence: Synthetic oligonucleotide
  Sense strand starting at position 3888 of SEQ ID NO: 318439
guuaucagugaagggaauu

SEQ ID NO: 562864 - RNA, 19 nt, Artificial Sequence
  Description of Artificial Sequence: Synthetic oligonucleotide
  Antisense strand to SEQ ID NO: 562863
aauucccuucacugauaac

SEQ ID NO: 562865 - RNA, 19 nt, Artificial Sequence
  Description of Artificial Sequence: Synthetic oligonucleotide
  Sense strand starting at position 3915 of SEQ ID NO: 318439
gcauaacgacuuuaacgaa

SEQ ID NO: 562866 - RNA, 19 nt, Artificial Sequence
  Description of Artificial Sequence: Synthetic oligonucleotide
  Antisense strand to SEQ ID NO: 562865
uucguuaaagucguuaugc

SEQ ID NO: 562867 - RNA, 19 nt, Artificial Sequence
  Description of Artificial Sequence: Synthetic oligonucleotide
  Sense strand starting at position 3946 of SEQ ID NO: 318439
ccguuuaguccugaaagug

SEQ ID NO: 562868 - RNA, 19 nt, Artificial Sequence
  Description of Artificial Sequence: Synthetic oligonucleotide
  Antisense strand to SEQ ID NO: 562867
cacuuucaggacuaaacgg

SEQ ID NO: 562869 - RNA, 19 nt, Artificial Sequence
  Description of Artificial Sequence: Synthetic oligonucleotide
  Sense strand starting at position 3954 of SEQ ID NO: 318439
uccugaaaguguuuaucaa

SEQ ID NO: 562870 - RNA, 19 nt, Artificial Sequence
  Description of Artificial Sequence: Synthetic oligonucleotide
  Antisense strand to SEQ ID NO: 562869
uugauaaacacuuucagga

SEQ ID NO: 562871 - RNA, 19 nt, Artificial Sequence
  Description of Artificial Sequence: Synthetic oligonucleotide
  Sense strand starting at position 3955 of SEQ ID NO: 318439
ccugaaaguguuuaucaaa

SEQ ID NO: 562872 - RNA, 19 nt, Artificial Sequence
  Description of Artificial Sequence: Synthetic oligonucleotide
  Antisense strand to SEQ ID NO: 562871
uuugauaaacacuuucagg

SEQ ID NO: 562873 - RNA, 19 nt, Artificial Sequence
  Description of Artificial Sequence: Synthetic oligonucleotide
  Sense strand starting at position 147 of SEQ ID NO: 318440
gauacucggcucuauuacu

SEQ ID NO: 562874 - RNA, 19 nt, Artificial Sequence
  Description of Artificial Sequence: Synthetic oligonucleotide
  Antisense strand to SEQ ID NO: 562873
aguaauagagccgaguauc

SEQ ID NO: 562875 - RNA, 19 nt, Artificial Sequence
  Description of Artificial Sequence: Synthetic oligonucleotide
  Sense strand starting at position 164 of SEQ ID NO: 318440
cuuugauagcaguaauaag

SEQ ID NO: 562876 - RNA, 19 nt, Artificial Sequence
  Description of Artificial Sequence: Synthetic oligonucleotide
  Antisense strand to SEQ ID NO: 562875
cuuauuacugcuaucaaag

SEQ ID NO: 562877 - RNA, 19 nt, Artificial Sequence
  Description of Artificial Sequence: Synthetic oligonucleotide
  Sense strand starting at position 236 of SEQ ID NO: 318440
gccauuccaguguaucaua

SEQ ID NO: 562878 - RNA, 19 nt, Artificial Sequence
  Description of Artificial Sequence: Synthetic oligonucleotide
  Antisense strand to SEQ ID NO: 562877
uaugauacacuggaauggc

SEQ ID NO: 562879 - RNA, 19 nt, Artificial Sequence
  Description of Artificial Sequence: Synthetic oligonucleotide
  Sense strand starting at position 247 of SEQ ID NO: 318440
guaucauaccuuuguggaa

SEQ ID NO: 562880 - RNA, 19 nt, Artificial Sequence
  Description of Artificial Sequence: Synthetic oligonucleotide
  Antisense strand to SEQ ID NO: 562879
uuccacaaagguaugauac

SEQ ID NO: 562881 - RNA, 19 nt, Artificial Sequence
  Description of Artificial Sequence: Synthetic oligonucleotide
  Sense strand starting at position 1128 of SEQ ID NO: 318440
gaguaaauauaguuuguag

SEQ ID NO: 562882 - RNA, 19 nt, Artificial Sequence
  Description of Artificial Sequence: Synthetic oligonucleotide
  Antisense strand to SEQ ID NO: 562881
cuacaaacuauauuuacuc

SEQ ID NO: 562883 - RNA, 19 nt, Artificial Sequence
  Description of Artificial Sequence: Synthetic oligonucleotide
  Sense strand starting at position 1826 of SEQ ID NO: 318440
gacucacgucucuaagaca

SEQ ID NO: 562884 - RNA, 19 nt, Artificial Sequence
  Description of Artificial Sequence: Synthetic oligonucleotide
  Antisense strand to SEQ ID NO: 562883
ugucuuagagacgugaguc

SEQ ID NO: 562885 - RNA, 19 nt, Artificial Sequence
  Description of Artificial Sequence: Synthetic oligonucleotide
  Sense strand starting at position 2121 of SEQ ID NO: 318440
ccaacuuugcgacggaaau

SEQ ID NO: 562886 - RNA, 19 nt, Artificial Sequence
  Description of Artificial Sequence: Synthetic oligonucleotide
  Antisense strand to SEQ ID NO: 562885
auuuccgucgcaaaguugg

SEQ ID NO: 562887 - RNA, 19 nt, Artificial Sequence
  Description of Artificial Sequence: Synthetic oligonucleotide
  Sense strand starting at position 2122 of SEQ ID NO: 318440
caacuuugcgacggaaaug

SEQ ID NO: 562888 - RNA, 19 nt, Artificial Sequence
  Description of Artificial Sequence: Synthetic oligonucleotide
  Antisense strand to SEQ ID NO: 562887
cauuuccgucgcaaaguug

SEQ ID NO: 562889 - RNA, 19 nt, Artificial Sequence
  Description of Artificial Sequence: Synthetic oligonucleotide
  Sense strand starting at position 2123 of SEQ ID NO: 318440
aacuuugcgacggaaaugu

SEQ ID NO: 562890 - RNA, 19 nt, Artificial Sequence
  Description of Artificial Sequence: Synthetic oligonucleotide
  Antisense strand to SEQ ID NO: 562889
acauuuccgucgcaaaguu

SEQ ID NO: 562891 - RNA, 19 nt, Artificial Sequence
  Description of Artificial Sequence: Synthetic oligonucleotide
  Sense strand starting at position 2134 of SEQ ID NO: 318440
ggaaaugugucaucgaaag

SEQ ID NO: 562892 - RNA, 19 nt, Artificial Sequence
  Description of Artificial Sequence: Synthetic oligonucleotide
  Antisense strand to SEQ ID NO: 562891
cuuucgaugacacauuucc

SEQ ID NO: 562893 - RNA, 19 nt, Artificial Sequence
  Description of Artificial Sequence: Synthetic oligonucleotide
  Sense strand starting at position 2645 of SEQ ID NO: 318440
ucugguauuucguuuguaa

SEQ ID NO: 562894 - RNA, 19 nt, Artificial Sequence
  Description of Artificial Sequence: Synthetic oligonucleotide
  Antisense strand to SEQ ID NO: 562893
uuacaaacgaaauaccaga

SEQ ID NO: 562895 - RNA, 19 nt, Artificial Sequence
  Description of Artificial Sequence: Synthetic oligonucleotide
  Sense strand starting at position 2685 of SEQ ID NO: 318440
caggguuggccuugggauu

SEQ ID NO: 562896 - RNA, 19 nt, Artificial Sequence
  Description of Artificial Sequence: Synthetic oligonucleotide
  Antisense strand to SEQ ID NO: 562895
aaucccaaggccaacccug

SEQ ID NO: 562897 - RNA, 19 nt, Artificial Sequence
  Description of Artificial Sequence: Synthetic oligonucleotide
  Sense strand starting at position 2737 of SEQ ID NO: 318440
ccgguagagucauuaaugg

SEQ ID NO: 562898 - RNA, 19 nt, Artificial Sequence
  Description of Artificial Sequence: Synthetic oligonucleotide
  Antisense strand to SEQ ID NO: 562897
ccauuaaugacucuaccgg

SEQ ID NO: 562899 - RNA, 19 nt, Artificial Sequence
  Description of Artificial Sequence: Synthetic oligonucleotide
  Sense strand starting at position 2742 of SEQ ID NO: 318440
agagucauuaaugguggau

SEQ ID NO: 562900 - RNA, 19 nt, Artificial Sequence
  Description of Artificial Sequence: Synthetic oligonucleotide
  Antisense strand to SEQ ID NO: 562899
auccaccauuaaugacucu

SEQ ID NO: 562901 - RNA, 19 nt, Artificial Sequence
  Description of Artificial Sequence: Synthetic oligonucleotide
  Sense strand starting at position 2811 of SEQ ID NO: 318440
ugauaaacgccucagauua

SEQ ID NO: 562902 - RNA, 19 nt, Artificial Sequence
  Description of Artificial Sequence: Synthetic oligonucleotide
  Antisense strand to SEQ ID NO: 562901
uaaucugaggcguuuauca

SEQ ID NO: 562903 - RNA, 19 nt, Artificial Sequence
  Description of Artificial Sequence: Synthetic oligonucleotide
  Sense strand starting at position 2836 of SEQ ID NO: 318440
gguaaacgaguucagaugu

SEQ ID NO: 562904 - RNA, 19 nt, Artificial Sequence
  Description of Artificial Sequence: Synthetic oligonucleotide
  Antisense strand to SEQ ID NO: 562903
acaucugaacucguuuacc

SEQ ID NO: 562905 - RNA, 19 nt, Artificial Sequence
  Description of Artificial Sequence: Synthetic oligonucleotide
  Sense strand starting at position 2991 of SEQ ID NO: 318440
gcauguuaucagugaaggg

SEQ ID NO: 562906 - RNA, 19 nt, Artificial Sequence
  Description of Artificial Sequence: Synthetic oligonucleotide
  Antisense strand to SEQ ID NO: 562905
cccuucacugauaacaugc

SEQ ID NO: 562907 - RNA, 19 nt, Artificial Sequence
  Description of Artificial Sequence: Synthetic oligonucleotide
  Sense strand starting at position 2995 of SEQ ID NO: 318440
guuaucagugaagggaauu

SEQ ID NO: 562908 - RNA, 19 nt, Artificial Sequence
  Description of Artificial Sequence: Synthetic oligonucleotide
  Antisense strand to SEQ ID NO: 562907
aauucccuucacugauaac

SEQ ID NO: 562909 - RNA, 19 nt, Artificial Sequence
  Description of Artificial Sequence: Synthetic oligonucleotide
  Sense strand starting at position 3022 of SEQ ID NO: 318440
gcauaacgacuuuaacgaa

SEQ ID NO: 562910 - RNA, 19 nt, Artificial Sequence
  Description of Artificial Sequence: Synthetic oligonucleotide
  Antisense strand to SEQ ID NO: 562909
uucguuaaagucguuaugc

SEQ ID NO: 562911 - RNA, 19 nt, Artificial Sequence
  Description of Artificial Sequence: Synthetic oligonucleotide
  Sense strand starting at position 3053 of SEQ ID NO: 318440
ccguuuaguccugaaagug

SEQ ID NO: 562912 - RNA, 19 nt, Artificial Sequence
  Description of Artificial Sequence: Synthetic oligonucleotide
  Antisense strand to SEQ ID NO: 562911
cacuuucaggacuaaacgg

SEQ ID NO: 562913 - RNA, 19 nt, Artificial Sequence
  Description of Artificial Sequence: Synthetic oligonucleotide
  Sense strand starting at position 3061 of SEQ ID NO: 318440
uccugaaaguguuuaucaa

SEQ ID NO: 562914 - RNA, 19 nt, Artificial Sequence
  Description of Artificial Sequence: Synthetic oligonucleotide
  Antisense strand to SEQ ID NO: 562913
uugauaaacacuuucagga

SEQ ID NO: 562915 - RNA, 19 nt, Artificial Sequence
  Description of Artificial Sequence: Synthetic oligonucleotide
  Sense strand starting at position 3062 of SEQ ID NO: 318440
ccugaaaguguuuaucaaa

SEQ ID NO: 562916 - RNA, 19 nt, Artificial Sequence
  Description of Artificial Sequence: Synthetic oligonucleotide
  Antisense strand to SEQ ID NO: 562915
uuugauaaacacuuucagg

SEQ ID NO: 562917 - RNA, 19 nt, Artificial Sequence
  Description of Artificial Sequence: Synthetic oligonucleotide
  Sense strand starting at position 3141 of SEQ ID NO: 318440
uuaagacucuuugugggaa

SEQ ID NO: 562918 - RNA, 19 nt, Artificial Sequence
  Description of Artificial Sequence: Synthetic oligonucleotide
  Antisense strand to SEQ ID NO: 562917
uucccacaaagagucuuaa

SEQ ID NO: 562919 - RNA, 19 nt, Artificial Sequence
  Description of Artificial Sequence: Synthetic oligonucleotide
  Sense strand starting at position 3206 of SEQ ID NO: 318440
acaagacaugucuguuucu

SEQ ID NO: 562920 - RNA, 19 nt, Artificial Sequence
  Description of Artificial Sequence: Synthetic oligonucleotide
  Antisense strand to SEQ ID NO: 562919
agaaacagacaugucuugu

SEQ ID NO: 562921 - RNA, 19 nt, Artificial Sequence
  Description of Artificial Sequence: Synthetic oligonucleotide
  Sense strand starting at position 3209 of SEQ ID NO: 318440
agacaugucuguuucugag

SEQ ID NO: 562922 - RNA, 19 nt, Artificial Sequence
  Description of Artificial Sequence: Synthetic oligonucleotide
  Antisense strand to SEQ ID NO: 562921
cucagaaacagacaugucu

SEQ ID NO: 562923 - RNA, 19 nt, Artificial Sequence
  Description of Artificial Sequence: Synthetic oligonucleotide
  Sense strand starting at position 3219 of SEQ ID NO: 318440
guuucugagaggugcagau

SEQ ID NO: 562924 - RNA, 19 nt, Artificial Sequence
  Description of Artificial Sequence: Synthetic oligonucleotide
  Antisense strand to SEQ ID NO: 562923
aucugcaccucucagaaac

SEQ ID NO: 562925 - RNA, 19 nt, Artificial Sequence
  Description of Artificial Sequence: Synthetic oligonucleotide
  Sense strand starting at position 3221 of SEQ ID NO: 318440
uucugagaggugcagauua

SEQ ID NO: 562926 - RNA, 19 nt, Artificial Sequence
  Description of Artificial Sequence: Synthetic oligonucleotide
  Antisense strand to SEQ ID NO: 562925
uaaucugcaccucucagaa

SEQ ID NO: 562927 - RNA, 19 nt, Artificial Sequence
  Description of Artificial Sequence: Synthetic oligonucleotide
  Sense strand starting at position 3269 of SEQ ID NO: 318440
agauuccuuaagcggaaga

SEQ ID NO: 562928 - RNA, 19 nt, Artificial Sequence
  Description of Artificial Sequence: Synthetic oligonucleotide
  Antisense strand to SEQ ID NO: 562927
ucuuccgcuuaaggaaucu

SEQ ID NO: 562929 - RNA, 19 nt, Artificial Sequence
  Description of Artificial Sequence: Synthetic oligonucleotide
  Sense strand starting at position 3271 of SEQ ID NO: 318440
auuccuuaagcggaagauu

SEQ ID NO: 562930 - RNA, 19 nt, Artificial Sequence
  Description of Artificial Sequence: Synthetic oligonucleotide
  Antisense strand to SEQ ID NO: 562929
aaucuuccgcuuaaggaau

SEQ ID NO: 562931 - RNA, 19 nt, Artificial Sequence
  Description of Artificial Sequence: Synthetic oligonucleotide
  Sense strand starting at position 3326 of SEQ ID NO: 318440
guuauuaagucauugucaa

SEQ ID NO: 562932 - RNA, 19 nt, Artificial Sequence
  Description of Artificial Sequence: Synthetic oligonucleotide
  Antisense strand to SEQ ID NO: 562931
uugacaaugacuuaauaac

SEQ ID NO: 562933 - RNA, 19 nt, Artificial Sequence
  Description of Artificial Sequence: Synthetic oligonucleotide
  Sense strand starting at position 3386 of SEQ ID NO: 318440
ggguucagacuugguguau

SEQ ID NO: 562934 - RNA, 19 nt, Artificial Sequence
  Description of Artificial Sequence: Synthetic oligonucleotide
  Antisense strand to SEQ ID NO: 562933
auacaccaagucugaaccc

SEQ ID NO: 562935 - RNA, 19 nt, Artificial Sequence
  Description of Artificial Sequence: Synthetic oligonucleotide
  Sense strand starting at position 3390 of SEQ ID NO: 318440
ucagacuugguguauuaua

SEQ ID NO: 562936 - RNA, 19 nt, Artificial Sequence
  Description of Artificial Sequence: Synthetic oligonucleotide
  Antisense strand to SEQ ID NO: 562935
uauaauacaccaagucuga

SEQ ID NO: 562937 - RNA, 19 nt, Artificial Sequence
  Description of Artificial Sequence: Synthetic oligonucleotide
  Sense strand starting at position 3400 of SEQ ID NO: 318440
uguauuauaguggacuuga

SEQ ID NO: 562938 - RNA, 19 nt, Artificial Sequence
  Description of Artificial Sequence: Synthetic oligonucleotide
  Antisense strand to SEQ ID NO: 562937
ucaaguccacuauaauaca

SEQ ID NO: 562939 - RNA, 19 nt, Artificial Sequence
  Description of Artificial Sequence: Synthetic oligonucleotide
  Sense strand starting at position 3447 of SEQ ID NO: 318440
acuggauuaucccuguuau

SEQ ID NO: 562940 - RNA, 19 nt, Artificial Sequence
  Description of Artificial Sequence: Synthetic oligonucleotide
  Antisense strand to SEQ ID NO: 562939
auaacagggauaauccagu

SEQ ID NO: 562941 - RNA, 19 nt, Artificial Sequence
  Description of Artificial Sequence: Synthetic oligonucleotide
  Sense strand starting at position 3448 of SEQ ID NO: 318440
cuggauuaucccuguuauc

SEQ ID NO: 562942 - RNA, 19 nt, Artificial Sequence
  Description of Artificial Sequence: Synthetic oligonucleotide
  Antisense strand to SEQ ID NO: 562941
gauaacagggauaauccag

SEQ ID NO: 562943 - RNA, 19 nt, Artificial Sequence
  Description of Artificial Sequence: Synthetic oligonucleotide
  Sense strand starting at position 3494 of SEQ ID NO: 318440
guuaaaucugaauagcuga

SEQ ID NO: 562944 - RNA, 19 nt, Artificial Sequence
  Description of Artificial Sequence: Synthetic oligonucleotide
  Antisense strand to SEQ ID NO: 562943
ucagcuauucagauuuaac

SEQ ID NO: 562945 - RNA, 19 nt, Artificial Sequence
  Description of Artificial Sequence: Synthetic oligonucleotide
  Sense strand starting at position 3606 of SEQ ID NO: 318440
aagggaauauguguuguau

SEQ ID NO: 562946 - RNA, 19 nt, Artificial Sequence
  Description of Artificial Sequence: Synthetic oligonucleotide
  Antisense strand to SEQ ID NO: 562945
auacaacacauauucccuu

SEQ ID NO: 562947 - RNA, 19 nt, Artificial Sequence
  Description of Artificial Sequence: Synthetic oligonucleotide
  Sense strand starting at position 3636 of SEQ ID NO: 318440
agaguauguacauauaugu

SEQ ID NO: 562948 - RNA, 19 nt, Artificial Sequence
  Description of Artificial Sequence: Synthetic oligonucleotide
  Antisense strand to SEQ ID NO: 562947
acauauauguacauacucu

SEQ ID NO: 562949 - RNA, 19 nt, Artificial Sequence
  Description of Artificial Sequence: Synthetic oligonucleotide
  Sense strand starting at position 3708 of SEQ ID NO: 318440
agugguuaucucuagggaa

SEQ ID NO: 562950 - RNA, 19 nt, Artificial Sequence
  Description of Artificial Sequence: Synthetic oligonucleotide
  Antisense strand to SEQ ID NO: 562949
uucccuagagauaaccacu

SEQ ID NO: 562951 - RNA, 19 nt, Artificial Sequence
  Description of Artificial Sequence: Synthetic oligonucleotide
  Sense strand starting at position 3710 of SEQ ID NO: 318440
ugguuaucucuagggaagg

SEQ ID NO: 562952 - RNA, 19 nt, Artificial Sequence
  Description of Artificial Sequence: Synthetic oligonucleotide
  Antisense strand to SEQ ID NO: 562951
ccuucccuagagauaacca

SEQ ID NO: 562953 - RNA, 19 nt, Artificial Sequence
  Description of Artificial Sequence: Synthetic oligonucleotide
  Sense strand starting at position 117 of SEQ ID NO: 318441
ugcauacuugucuacuuga

SEQ ID NO: 562954 - RNA, 19 nt, Artificial Sequence
  Description of Artificial Sequence: Synthetic oligonucleotide
  Antisense strand to SEQ ID NO: 562953
ucaaguagacaaguaugca

SEQ ID NO: 562955 - RNA, 19 nt, Artificial Sequence
  Description of Artificial Sequence: Synthetic oligonucleotide
  Sense strand starting at position 210 of SEQ ID NO: 318441
uuuaaacucucuguaggau

SEQ ID NO: 562956 - RNA, 19 nt, Artificial Sequence
  Description of Artificial Sequence: Synthetic oligonucleotide
  Antisense strand to SEQ ID NO: 562955
auccuacagagaguuuaaa

SEQ ID NO: 562957 - RNA, 19 nt, Artificial Sequence
  Description of Artificial Sequence: Synthetic oligonucleotide
  Sense strand starting at position 211 of SEQ ID NO: 318441
uuaaacucucuguaggauu

SEQ ID NO: 562958 - RNA, 19 nt, Artificial Sequence
  Description of Artificial Sequence: Synthetic oligonucleotide
  Antisense strand to SEQ ID NO: 562957
aauccuacagagaguuuaa

SEQ ID NO: 562959 - RNA, 19 nt, Artificial Sequence
  Description of Artificial Sequence: Synthetic oligonucleotide
  Sense strand starting at position 213 of SEQ ID NO: 318441
aaacucucuguaggauuga

SEQ ID NO: 562960 - RNA, 19 nt, Artificial Sequence
  Description of Artificial Sequence: Synthetic oligonucleotide
  Antisense strand to SEQ ID NO: 562959
ucaauccuacagagaguuu

SEQ ID NO: 562961 - RNA, 19 nt, Artificial Sequence
  Description of Artificial Sequence: Synthetic oligonucleotide
  Sense strand starting at position 311 of SEQ ID NO: 318441
agaguaauauaucugccuu

SEQ ID NO: 562962 - RNA, 19 nt, Artificial Sequence
  Description of Artificial Sequence: Synthetic oligonucleotide
  Antisense strand to SEQ ID NO: 562961
aaggcagauauauuacucu

SEQ ID NO: 562963 - RNA, 19 nt, Artificial Sequence
  Description of Artificial Sequence: Synthetic oligonucleotide
  Sense strand starting at position 381 of SEQ ID NO: 318441
uccguaucagcuugaagac

SEQ ID NO: 562964 - RNA, 19 nt, Artificial Sequence
  Description of Artificial Sequence: Synthetic oligonucleotide
  Antisense strand to SEQ ID NO: 562963
gucuucaagcugauacgga

SEQ ID NO: 562965 - RNA, 19 nt, Artificial Sequence
  Description of Artificial Sequence: Synthetic oligonucleotide
  Sense strand starting at position 382 of SEQ ID NO: 318441
ccguaucagcuugaagacu

SEQ ID NO: 562966 - RNA, 19 nt, Artificial Sequence
  Description of Artificial Sequence: Synthetic oligonucleotide
  Antisense strand to SEQ ID NO: 562965
agucuucaagcugauacgg

SEQ ID NO: 562967 - RNA, 19 nt, Artificial Sequence
  Description of Artificial Sequence: Synthetic oligonucleotide
  Sense strand starting at position 402 of SEQ ID NO: 318441
agugaagauauaggccaaa

SEQ ID NO: 562968 - RNA, 19 nt, Artificial Sequence
  Description of Artificial Sequence: Synthetic oligonucleotide
  Antisense strand to SEQ ID NO: 562967
uuuggccuauaucuucacu

SEQ ID NO: 562969 - RNA, 19 nt, Artificial Sequence
  Description of Artificial Sequence: Synthetic oligonucleotide
  Sense strand starting at position 422 of SEQ ID NO: 318441
aucauaacguaaucuguaa

SEQ ID NO: 562970 - RNA, 19 nt, Artificial Sequence
  Description of Artificial Sequence: Synthetic oligonucleotide
  Antisense strand to SEQ ID NO: 562969
uuacagauuacguuaugau

SEQ ID NO: 562971 - RNA, 19 nt, Artificial Sequence
  Description of Artificial Sequence: Synthetic oligonucleotide
  Sense strand starting at position 429 of SEQ ID NO: 318441
cguaaucuguaauuaugac

SEQ ID NO: 562972 - RNA, 19 nt, Artificial Sequence
  Description of Artificial Sequence: Synthetic oligonucleotide
  Antisense strand to SEQ ID NO: 562971
gucauaauuacagauuacg

SEQ ID NO: 562973 - RNA, 19 nt, Artificial Sequence
  Description of Artificial Sequence: Synthetic oligonucleotide
  Sense strand starting at position 435 of SEQ ID NO: 318441
cuguaauuaugacuggauu

SEQ ID NO: 562974 - RNA, 19 nt, Artificial Sequence
  Description of Artificial Sequence: Synthetic oligonucleotide
  Antisense strand to SEQ ID NO: 562973
aauccagucauaauuacag

SEQ ID NO: 562975 - RNA, 19 nt, Artificial Sequence
  Description of Artificial Sequence: Synthetic oligonucleotide
  Sense strand starting at position 436 of SEQ ID NO: 318441
uguaauuaugacuggauua

SEQ ID NO: 562976 - RNA, 19 nt, Artificial Sequence
  Description of Artificial Sequence: Synthetic oligonucleotide
  Antisense strand to SEQ ID NO: 562975
uaauccagucauaauuaca

SEQ ID NO: 562977 - RNA, 19 nt, Artificial Sequence
  Description of Artificial Sequence: Synthetic oligonucleotide
  Sense strand starting at position 489 of SEQ ID NO: 318441
uuauaauugaggcaggcuu

SEQ ID NO: 562978 - RNA, 19 nt, Artificial Sequence
  Description of Artificial Sequence: Synthetic oligonucleotide
  Antisense strand to SEQ ID NO: 562977
aagccugccucaauuauaa

SEQ ID NO: 562979 - RNA, 19 nt, Artificial Sequence
  Description of Artificial Sequence: Synthetic oligonucleotide
  Sense strand starting at position 527 of SEQ ID NO: 318441
cucagaaaugccugggaau

SEQ ID NO: 562980 - RNA, 19 nt, Artificial Sequence
  Description of Artificial Sequence: Synthetic oligonucleotide
  Antisense strand to SEQ ID NO: 562979
auucccaggcauuucugag

SEQ ID NO: 562981 - RNA, 19 nt, Artificial Sequence
  Description of Artificial Sequence: Synthetic oligonucleotide
  Sense strand starting at position 541 of SEQ ID NO: 318441
ggaaugguuggguguggua

SEQ ID NO: 562982 - RNA, 19 nt, Artificial Sequence
  Description of Artificial Sequence: Synthetic oligonucleotide
  Antisense strand to SEQ ID NO: 562981
uaccacacccaaccauucc

SEQ ID NO: 562983 - RNA, 19 nt, Artificial Sequence
  Description of Artificial Sequence: Synthetic oligonucleotide
  Sense strand starting at position 1029 of SEQ ID NO: 318441
ugagcuauuuauuagacaa

SEQ ID NO: 562984 - RNA, 19 nt, Artificial Sequence
  Description of Artificial Sequence: Synthetic oligonucleotide
  Antisense strand to SEQ ID NO: 562983
uugucuaauaaauagcuca

SEQ ID NO: 562985 - RNA, 19 nt, Artificial Sequence
  Description of Artificial Sequence: Synthetic oligonucleotide
  Sense strand starting at position 1031 of SEQ ID NO: 318441
agcuauuuauuagacaaug

SEQ ID NO: 562986 - RNA, 19 nt, Artificial Sequence
  Description of Artificial Sequence: Synthetic oligonucleotide
  Antisense strand to SEQ ID NO: 562985
cauugucuaauaaauagcu

SEQ ID NO: 562987 - RNA, 19 nt, Artificial Sequence
  Description of Artificial Sequence: Synthetic oligonucleotide
  Sense strand starting at position 1048 of SEQ ID NO: 318441
uguuccucucuugaagaaa

SEQ ID NO: 562988 - RNA, 19 nt, Artificial Sequence
  Description of Artificial Sequence: Synthetic oligonucleotide
  Antisense strand to SEQ ID NO: 562987
uuucuucaagagaggaaca

SEQ ID NO: 562989 - RNA, 19 nt, Artificial Sequence
  Description of Artificial Sequence: Synthetic oligonucleotide
  Sense strand starting at position 1074 of SEQ ID NO: 318441
agaaguuggagcugaaagu

SEQ ID NO: 562990 - RNA, 19 nt, Artificial Sequence
  Description of Artificial Sequence: Synthetic oligonucleotide
  Antisense strand to SEQ ID NO: 562989
acuuucagcuccaacuucu

SEQ ID NO: 562991 - RNA, 19 nt, Artificial Sequence
  Description of Artificial Sequence: Synthetic oligonucleotide
  Sense strand starting at position 1116 of SEQ ID NO: 318441
gcuuauaaauacuuuacga

SEQ ID NO: 562992 - RNA, 19 nt, Artificial Sequence
  Description of Artificial Sequence: Synthetic oligonucleotide
  Antisense strand to SEQ ID NO: 562991
ucguaaaguauuuauaagc

SEQ ID NO: 562993 - RNA, 19 nt, Artificial Sequence
  Description of Artificial Sequence: Synthetic oligonucleotide
  Sense strand starting at position 1124 of SEQ ID NO: 318441
auacuuuacgaaugcuaag

SEQ ID NO: 562994 - RNA, 19 nt, Artificial Sequence
  Description of Artificial Sequence: Synthetic oligonucleotide
  Antisense strand to SEQ ID NO: 562993
cuuagcauucguaaaguau

SEQ ID NO: 562995 - RNA, 19 nt, Artificial Sequence
  Description of Artificial Sequence: Synthetic oligonucleotide
  Sense strand starting at position 1176 of SEQ ID NO: 318441
gaauauuaucggcagugga

SEQ ID NO: 562996 - RNA, 19 nt, Artificial Sequence
  Description of Artificial Sequence: Synthetic oligonucleotide
  Antisense strand to SEQ ID NO: 562995
uccacugccgauaauauuc

SEQ ID NO: 562997 - RNA, 19 nt, Artificial Sequence
  Description of Artificial Sequence: Synthetic oligonucleotide
  Sense strand starting at position 1179 of SEQ ID NO: 318441
uauuaucggcaguggauua

SEQ ID NO: 562998 - RNA, 19 nt, Artificial Sequence
  Description of Artificial Sequence: Synthetic oligonucleotide
  Antisense strand to SEQ ID NO: 562997
uaauccacugccgauaaua

SEQ ID NO: 562999 - RNA, 19 nt, Artificial Sequence
  Description of Artificial Sequence: Synthetic oligonucleotide
  Sense strand starting at position 1499 of SEQ ID NO: 318441
ggaaauagcuacccugcau

SEQ ID NO: 563000 - RNA, 19 nt, Artificial Sequence
  Description of Artificial Sequence: Synthetic oligonucleotide
  Antisense strand to SEQ ID NO: 562999
augcaggguagcuauuucc

SEQ ID NO: 563001 - RNA, 19 nt, Artificial Sequence
  Description of Artificial Sequence: Synthetic oligonucleotide
  Sense strand starting at position 1552 of SEQ ID NO: 318441
cccuaucuugcugagaacu

SEQ ID NO: 563002 - RNA, 19 nt, Artificial Sequence
  Description of Artificial Sequence: Synthetic oligonucleotide
  Antisense strand to SEQ ID NO: 563001
aguucucagcaagauaggg

SEQ ID NO: 563003 - RNA, 19 nt, Artificial Sequence
  Description of Artificial Sequence: Synthetic oligonucleotide
  Sense strand starting at position 1789 of SEQ ID NO: 318441
gauacucggcucuauuacu

SEQ ID NO: 563004 - RNA, 19 nt, Artificial Sequence
  Description of Artificial Sequence: Synthetic oligonucleotide
  Antisense strand to SEQ ID NO: 563003
aguaauagagccgaguauc

SEQ ID NO: 563005 - RNA, 19 nt, Artificial Sequence
  Description of Artificial Sequence: Synthetic oligonucleotide
  Sense strand starting at position 1795 of SEQ ID NO: 318441
cggcucuauuacuuugaua

SEQ ID NO: 563006 - RNA, 19 nt, Artificial Sequence
  Description of Artificial Sequence: Synthetic oligonucleotide
  Antisense strand to SEQ ID NO: 563005
uaucaaaguaauagagccg

SEQ ID NO: 563007 - RNA, 19 nt, Artificial Sequence
  Description of Artificial Sequence: Synthetic oligonucleotide
  Sense strand starting at position 1797 of SEQ ID NO: 318441
gcucuauuacuuugauagc

SEQ ID NO: 563008 - RNA, 19 nt, Artificial Sequence
  Description of Artificial Sequence: Synthetic oligonucleotide
  Antisense strand to SEQ ID NO: 563007
gcuaucaaaguaauagagc

SEQ ID NO: 563009 - RNA, 19 nt, Artificial Sequence
  Description of Artificial Sequence: Synthetic oligonucleotide
  Sense strand starting at position 1806 of SEQ ID NO: 318441
cuuugauagcaguaauaag

SEQ ID NO: 563010 - RNA, 19 nt, Artificial Sequence
  Description of Artificial Sequence: Synthetic oligonucleotide
  Antisense strand to SEQ ID NO: 563009
cuuauuacugcuaucaaag

SEQ ID NO: 563011 - RNA, 19 nt, Artificial Sequence
  Description of Artificial Sequence: Synthetic oligonucleotide
  Sense strand starting at position 1878 of SEQ ID NO: 318441
gccauuccaguguaucaua

SEQ ID NO: 563012 - RNA, 19 nt, Artificial Sequence
  Description of Artificial Sequence: Synthetic oligonucleotide
  Antisense strand to SEQ ID NO: 563011
uaugauacacuggaauggc

SEQ ID NO: 563013 - RNA, 19 nt, Artificial Sequence
  Description of Artificial Sequence: Synthetic oligonucleotide
  Sense strand starting at position 1889 of SEQ ID NO: 318441
guaucauaccuuuguggaa

SEQ ID NO: 563014 - RNA, 19 nt, Artificial Sequence
  Description of Artificial Sequence: Synthetic oligonucleotide
  Antisense strand to SEQ ID NO: 563013
uuccacaaagguaugauac

SEQ ID NO: 563015 - RNA, 19 nt, Artificial Sequence
  Description of Artificial Sequence: Synthetic oligonucleotide
  Sense strand starting at position 2770 of SEQ ID NO: 318441
gaguaaauauaguuuguag

SEQ ID NO: 563016 - RNA, 19 nt, Artificial Sequence
  Description of Artificial Sequence: Synthetic oligonucleotide
  Antisense strand to SEQ ID NO: 563015
cuacaaacuauauuuacuc

SEQ ID NO: 563017 - RNA, 19 nt, Artificial Sequence
  Description of Artificial Sequence: Synthetic oligonucleotide
  Sense strand starting at position 2777 of SEQ ID NO: 318441
uauaguuuguagcucgaaa

SEQ ID NO: 563018 - RNA, 19 nt, Artificial Sequence
  Description of Artificial Sequence: Synthetic oligonucleotide
  Antisense strand to SEQ ID NO: 563017
uuucgagcuacaaacuaua

SEQ ID NO: 563019 - RNA, 19 nt, Artificial Sequence
  Description of Artificial Sequence: Synthetic oligonucleotide
  Sense strand starting at position 3468 of SEQ ID NO: 318441
gacucacgucucuaagaca

SEQ ID NO: 563020 - RNA, 19 nt, Artificial Sequence
  Description of Artificial Sequence: Synthetic oligonucleotide
  Antisense strand to SEQ ID NO: 563019
ugucuuagagacgugaguc

SEQ ID NO: 563021 - RNA, 19 nt, Artificial Sequence
  Description of Artificial Sequence: Synthetic oligonucleotide
  Sense strand starting at position 3734 of SEQ ID NO: 318441
gaaguaccgacccgaguua

SEQ ID NO: 563022 - RNA, 19 nt, Artificial Sequence
  Description of Artificial Sequence: Synthetic oligonucleotide
  Antisense strand to SEQ ID NO: 563021
uaacucgggucgguacuuc

SEQ ID NO: 563023 - RNA, 19 nt, Artificial Sequence
  Description of Artificial Sequence: Synthetic oligonucleotide
  Sense strand starting at position 3763 of SEQ ID NO: 318441
ccaacuuugcgacggaaau

SEQ ID NO: 563024 - RNA, 19 nt, Artificial Sequence
  Description of Artificial Sequence: Synthetic oligonucleotide
  Antisense strand to SEQ ID NO: 563023
auuuccgucgcaaaguugg

SEQ ID NO: 563025 - RNA, 19 nt, Artificial Sequence
  Description of Artificial Sequence: Synthetic oligonucleotide
  Sense strand starting at position 3764 of SEQ ID NO: 318441
caacuuugcgacggaaaug

SEQ ID NO: 563026 - RNA, 19 nt, Artificial Sequence
  Description of Artificial Sequence: Synthetic oligonucleotide
  Antisense strand to SEQ ID NO: 563025
cauuuccgucgcaaaguug

SEQ ID NO: 563027 - RNA, 19 nt, Artificial Sequence
  Description of Artificial Sequence: Synthetic oligonucleotide
  Sense strand starting at position 3765 of SEQ ID NO: 318441
aacuuugcgacggaaaugu

SEQ ID NO: 563028 - RNA, 19 nt, Artificial Sequence
  Description of Artificial Sequence: Synthetic oligonucleotide
  Antisense strand to SEQ ID NO: 563027
acauuuccgucgcaaaguu

SEQ ID NO: 563029 - RNA, 19 nt, Artificial Sequence
  Description of Artificial Sequence: Synthetic oligonucleotide
  Sense strand starting at position 3776 of SEQ ID NO: 318441
ggaaaugugucaucgaaag

SEQ ID NO: 563030 - RNA, 19 nt, Artificial Sequence
  Description of Artificial Sequence: Synthetic oligonucleotide
  Antisense strand to SEQ ID NO: 563029
cuuucgaugacacauuucc

SEQ ID NO: 563031 - RNA, 19 nt, Artificial Sequence
  Description of Artificial Sequence: Synthetic oligonucleotide
  Sense strand starting at position 3960 of SEQ ID NO: 318441
ggaccauguugcuuccgaa

SEQ ID NO: 563032 - RNA, 19 nt, Artificial Sequence
  Description of Artificial Sequence: Synthetic oligonucleotide
  Antisense strand to SEQ ID NO: 563031
uucggaagcaacauggucc

SEQ ID NO: 563033 - RNA, 19 nt, Artificial Sequence
  Description of Artificial Sequence: Synthetic oligonucleotide
  Sense strand starting at position 3 of SEQ ID NO: 318442
aucauaacguaaucuguaa

SEQ ID NO: 563034 - RNA, 19 nt, Artificial Sequence
  Description of Artificial Sequence: Synthetic oligonucleotide
  Antisense strand to SEQ ID NO: 563033
uuacagauuacguuaugau

SEQ ID NO: 563035 - RNA, 19 nt, Artificial Sequence
  Description of Artificial Sequence: Synthetic oligonucleotide
  Sense strand starting at position 10 of SEQ ID NO: 318442
cguaaucuguaauuaugac

SEQ ID NO: 563036 - RNA, 19 nt, Artificial Sequence
  Description of Artificial Sequence: Synthetic oligonucleotide
  Antisense strand to SEQ ID NO: 563035
gucauaauuacagauuacg

SEQ ID NO: 563037 - RNA, 19 nt, Artificial Sequence
  Description of Artificial Sequence: Synthetic oligonucleotide
  Sense strand starting at position 16 of SEQ ID NO: 318442
cuguaauuaugacuggauu

SEQ ID NO: 563038 - RNA, 19 nt, Artificial Sequence
  Description of Artificial Sequence: Synthetic oligonucleotide
  Antisense strand to SEQ ID NO: 563037
aauccagucauaauuacag

SEQ ID NO: 563039 - RNA, 19 nt, Artificial Sequence
  Description of Artificial Sequence: Synthetic oligonucleotide
  Sense strand starting at position 17 of SEQ ID NO: 318442
uguaauuaugacuggauua

SEQ ID NO: 563040 - RNA, 19 nt, Artificial Sequence
  Description of Artificial Sequence: Synthetic oligonucleotide
  Antisense strand to SEQ ID NO: 563039
uaauccagucauaauuaca

SEQ ID NO: 563041 - RNA, 19 nt, Artificial Sequence
  Description of Artificial Sequence: Synthetic oligonucleotide
  Sense strand starting at position 70 of SEQ ID NO: 318442
uuauaauugaggcaggcuu

SEQ ID NO: 563042 - RNA, 19 nt, Artificial Sequence
  Description of Artificial Sequence: Synthetic oligonucleotide
  Antisense strand to SEQ ID NO: 563041
aagccugccucaauuauaa

SEQ ID NO: 563043 - RNA, 19 nt, Artificial Sequence
  Description of Artificial Sequence: Synthetic oligonucleotide
  Sense strand starting at position 108 of SEQ ID NO: 318442
cucagaaaugccugggaau

SEQ ID NO: 563044 - RNA, 19 nt, Artificial Sequence
  Description of Artificial Sequence: Synthetic oligonucleotide
  Antisense strand to SEQ ID NO: 563043
auucccaggcauuucugag

SEQ ID NO: 563045 - RNA, 19 nt, Artificial Sequence
  Description of Artificial Sequence: Synthetic oligonucleotide
  Sense strand starting at position 122 of SEQ ID NO: 318442
ggaaugguuggguguggua

SEQ ID NO: 563046 - RNA, 19 nt, Artificial Sequence
  Description of Artificial Sequence: Synthetic oligonucleotide
  Antisense strand to SEQ ID NO: 563045
uaccacacccaaccauucc

SEQ ID NO: 563047 - RNA, 19 nt, Artificial Sequence
  Description of Artificial Sequence: Synthetic oligonucleotide
  Sense strand starting at position 610 of SEQ ID NO: 318442
ugagcuauuuauuagacaa

SEQ ID NO: 563048 - RNA, 19 nt, Artificial Sequence
  Description of Artificial Sequence: Synthetic oligonucleotide
  Antisense strand to SEQ ID NO: 563047
uugucuaauaaauagcuca

SEQ ID NO: 563049 - RNA, 19 nt, Artificial Sequence
  Description of Artificial Sequence: Synthetic oligonucleotide
  Sense strand starting at position 612 of SEQ ID NO: 318442
agcuauuuauuagacaaug

SEQ ID NO: 563050 - RNA, 19 nt, Artificial Sequence
  Description of Artificial Sequence: Synthetic oligonucleotide
  Antisense strand to SEQ ID NO: 563049
cauugucuaauaaauagcu

SEQ ID NO: 563051 - RNA, 19 nt, Artificial Sequence
  Description of Artificial Sequence: Synthetic oligonucleotide
  Sense strand starting at position 629 of SEQ ID NO: 318442
uguuccucucuugaagaaa

SEQ ID NO: 563052 - RNA, 19 nt, Artificial Sequence
  Description of Artificial Sequence: Synthetic oligonucleotide
  Antisense strand to SEQ ID NO: 563051
uuucuucaagagaggaaca

SEQ ID NO: 563053 - RNA, 19 nt, Artificial Sequence
  Description of Artificial Sequence: Synthetic oligonucleotide
  Sense strand starting at position 655 of SEQ ID NO: 318442
agaaguuggagcugaaagu

SEQ ID NO: 563054 - RNA, 19 nt, Artificial Sequence
  Description of Artificial Sequence: Synthetic oligonucleotide
  Antisense strand to SEQ ID NO: 563053
acuuucagcuccaacuucu

SEQ ID NO: 563055 - RNA, 19 nt, Artificial Sequence
  Description of Artificial Sequence: Synthetic oligonucleotide
  Sense strand starting at position 697 of SEQ ID NO: 318442
gcuuauaaauacuuuacga

SEQ ID NO: 563056 - RNA, 19 nt, Artificial Sequence
  Description of Artificial Sequence: Synthetic oligonucleotide
  Antisense strand to SEQ ID NO: 563055
ucguaaaguauuuauaagc

SEQ ID NO: 563057 - RNA, 19 nt, Artificial Sequence
  Description of Artificial Sequence: Synthetic oligonucleotide
  Sense strand starting at position 705 of SEQ ID NO: 318442
auacuuuacgaaugcuaag

SEQ ID NO: 563058 - RNA, 19 nt, Artificial Sequence
  Description of Artificial Sequence: Synthetic oligonucleotide
  Antisense strand to SEQ ID NO: 563057
cuuagcauucguaaaguau

SEQ ID NO: 563059 - RNA, 19 nt, Artificial Sequence
  Description of Artificial Sequence: Synthetic oligonucleotide
  Sense strand starting at position 757 of SEQ ID NO: 318442
gaauauuaucggcagugga

SEQ ID NO: 563060 - RNA, 19 nt, Artificial Sequence
  Description of Artificial Sequence: Synthetic oligonucleotide
  Antisense strand to SEQ ID NO: 563059
uccacugccgauaauauuc

SEQ ID NO: 563061 - RNA, 19 nt, Artificial Sequence
  Description of Artificial Sequence: Synthetic oligonucleotide
  Sense strand starting at position 760 of SEQ ID NO: 318442
uauuaucggcaguggauua

SEQ ID NO: 563062 - RNA, 19 nt, Artificial Sequence
  Description of Artificial Sequence: Synthetic oligonucleotide
  Antisense strand to SEQ ID NO: 563061
uaauccacugccgauaaua

SEQ ID NO: 563063 - RNA, 19 nt, Artificial Sequence
  Description of Artificial Sequence: Synthetic oligonucleotide
  Sense strand starting at position 1080 of SEQ ID NO: 318442
ggaaauagcuacccugcau

SEQ ID NO: 563064 - RNA, 19 nt, Artificial Sequence
  Description of Artificial Sequence: Synthetic oligonucleotide
  Antisense strand to SEQ ID NO: 563063
augcaggguagcuauuucc

SEQ ID NO: 563065 - RNA, 19 nt, Artificial Sequence
  Description of Artificial Sequence: Synthetic oligonucleotide
  Sense strand starting at position 1133 of SEQ ID NO: 318442
cccuaucuugcugagaacu

SEQ ID NO: 563066 - RNA, 19 nt, Artificial Sequence
  Description of Artificial Sequence: Synthetic oligonucleotide
  Antisense strand to SEQ ID NO: 563065
aguucucagcaagauaggg

SEQ ID NO: 563067 - RNA, 19 nt, Artificial Sequence
  Description of Artificial Sequence: Synthetic oligonucleotide
  Sense strand starting at position 1370 of SEQ ID NO: 318442
gauacucggcucuauuacu

SEQ ID NO: 563068 - RNA, 19 nt, Artificial Sequence
  Description of Artificial Sequence: Synthetic oligonucleotide
  Antisense strand to SEQ ID NO: 563067
aguaauagagccgaguauc

SEQ ID NO: 563069 - RNA, 19 nt, Artificial Sequence
  Description of Artificial Sequence: Synthetic oligonucleotide
  Sense strand starting at position 1376 of SEQ ID NO: 318442
cggcucuauuacuuugaua

SEQ ID NO: 563070 - RNA, 19 nt, Artificial Sequence
  Description of Artificial Sequence: Synthetic oligonucleotide
  Antisense strand to SEQ ID NO: 563069
uaucaaaguaauagagccg

SEQ ID NO: 563071 - RNA, 19 nt, Artificial Sequence
  Description of Artificial Sequence: Synthetic oligonucleotide
  Sense strand starting at position 1378 of SEQ ID NO: 318442
gcucuauuacuuugauagc

SEQ ID NO: 563072 - RNA, 19 nt, Artificial Sequence
  Description of Artificial Sequence: Synthetic oligonucleotide
  Antisense strand to SEQ ID NO: 563071
gcuaucaaaguaauagagc

SEQ ID NO: 563073 - RNA, 19 nt, Artificial Sequence
  Description of Artificial Sequence: Synthetic oligonucleotide
  Sense strand starting at position 1387 of SEQ ID NO: 318442
cuuugauagcaguaauaag

SEQ ID NO: 563074 - RNA, 19 nt, Artificial Sequence
  Description of Artificial Sequence: Synthetic oligonucleotide
  Antisense strand to SEQ ID NO: 563073
cuuauuacugcuaucaaag

SEQ ID NO: 563075 - RNA, 19 nt, Artificial Sequence
  Description of Artificial Sequence: Synthetic oligonucleotide
  Sense strand starting at position 1457 of SEQ ID NO: 318442
uggccauuccaguguauca

SEQ ID NO: 563076 - RNA, 19 nt, Artificial Sequence
  Description of Artificial Sequence: Synthetic oligonucleotide
  Antisense strand to SEQ ID NO: 563075
ugauacacuggaauggcca

SEQ ID NO: 563077 - RNA, 19 nt, Artificial Sequence
  Description of Artificial Sequence: Synthetic oligonucleotide
  Sense strand starting at position 1459 of SEQ ID NO: 318442
gccauuccaguguaucaua

SEQ ID NO: 563078 - RNA, 19 nt, Artificial Sequence
  Description of Artificial Sequence: Synthetic oligonucleotide
  Antisense strand to SEQ ID NO: 563077
uaugauacacuggaauggc

SEQ ID NO: 563079 - RNA, 19 nt, Artificial Sequence
  Description of Artificial Sequence: Synthetic oligonucleotide
  Sense strand starting at position 1470 of SEQ ID NO: 318442
guaucauaccuuuguggaa

SEQ ID NO: 563080 - RNA, 19 nt, Artificial Sequence
  Description of Artificial Sequence: Synthetic oligonucleotide
  Antisense strand to SEQ ID NO: 563079
uuccacaaagguaugauac

SEQ ID NO: 563081 - RNA, 19 nt, Artificial Sequence
  Description of Artificial Sequence: Synthetic oligonucleotide
  Sense strand starting at position 2351 of SEQ ID NO: 318442
gaguaaauauaguuuguag

SEQ ID NO: 563082 - RNA, 19 nt, Artificial Sequence
  Description of Artificial Sequence: Synthetic oligonucleotide
  Antisense strand to SEQ ID NO: 563081
cuacaaacuauauuuacuc

SEQ ID NO: 563083 - RNA, 19 nt, Artificial Sequence
  Description of Artificial Sequence: Synthetic oligonucleotide
  Sense strand starting at position 2353 of SEQ ID NO: 318442
guaaauauaguuuguagcu

SEQ ID NO: 563084 - RNA, 19 nt, Artificial Sequence
  Description of Artificial Sequence: Synthetic oligonucleotide
  Antisense strand to SEQ ID NO: 563083
agcuacaaacuauauuuac

SEQ ID NO: 563085 - RNA, 19 nt, Artificial Sequence
  Description of Artificial Sequence: Synthetic oligonucleotide
  Sense strand starting at position 2358 of SEQ ID NO: 318442
uauaguuuguagcucgaaa

SEQ ID NO: 563086 - RNA, 19 nt, Artificial Sequence
  Description of Artificial Sequence: Synthetic oligonucleotide
  Antisense strand to SEQ ID NO: 563085
uuucgagcuacaaacuaua

SEQ ID NO: 563087 - RNA, 19 nt, Artificial Sequence
  Description of Artificial Sequence: Synthetic oligonucleotide
  Sense strand starting at position 2360 of SEQ ID NO: 318442
uaguuuguagcucgaaaua

SEQ ID NO: 563088 - RNA, 19 nt, Artificial Sequence
  Description of Artificial Sequence: Synthetic oligonucleotide
  Antisense strand to SEQ ID NO: 563087
uauuucgagcuacaaacua

SEQ ID NO: 563089 - RNA, 19 nt, Artificial Sequence
  Description of Artificial Sequence: Synthetic oligonucleotide
  Sense strand starting at position 3049 of SEQ ID NO: 318442
gacucacgucucuaagaca

SEQ ID NO: 563090 - RNA, 19 nt, Artificial Sequence
  Description of Artificial Sequence: Synthetic oligonucleotide
  Antisense strand to SEQ ID NO: 563089
ugucuuagagacgugaguc

SEQ ID NO: 563091 - RNA, 19 nt, Artificial Sequence
  Description of Artificial Sequence: Synthetic oligonucleotide
  Sense strand starting at position 3315 of SEQ ID NO: 318442
gaaguaccgacccgaguua

SEQ ID NO: 563092 - RNA, 19 nt, Artificial Sequence
  Description of Artificial Sequence: Synthetic oligonucleotide
  Antisense strand to SEQ ID NO: 563091
uaacucgggucgguacuuc

SEQ ID NO: 563093 - RNA, 19 nt, Artificial Sequence
  Description of Artificial Sequence: Synthetic oligonucleotide
  Sense strand starting at position 3344 of SEQ ID NO: 318442
ccaacuuugcgacggaaau

SEQ ID NO: 563094 - RNA, 19 nt, Artificial Sequence
  Description of Artificial Sequence: Synthetic oligonucleotide
  Antisense strand to SEQ ID NO: 563093
auuuccgucgcaaaguugg

SEQ ID NO: 563095 - RNA, 19 nt, Artificial Sequence
  Description of Artificial Sequence: Synthetic oligonucleotide
  Sense strand starting at position 3345 of SEQ ID NO: 318442
caacuuugcgacggaaaug

SEQ ID NO: 563096 - RNA, 19 nt, Artificial Sequence
  Description of Artificial Sequence: Synthetic oligonucleotide
  Antisense strand to SEQ ID NO: 563095
cauuuccgucgcaaaguug

SEQ ID NO: 563097 - RNA, 19 nt, Artificial Sequence
  Description of Artificial Sequence: Synthetic oligonucleotide
  Sense strand starting at position 3346 of SEQ ID NO: 318442
aacuuugcgacggaaaugu

SEQ ID NO: 563098 - RNA, 19 nt, Artificial Sequence
  Description of Artificial Sequence: Synthetic oligonucleotide
  Antisense strand to SEQ ID NO: 563097
acauuuccgucgcaaaguu

SEQ ID NO: 563099 - RNA, 19 nt, Artificial Sequence
  Description of Artificial Sequence: Synthetic oligonucleotide
  Sense strand starting at position 3357 of SEQ ID NO: 318442
ggaaaugugucaucgaaag

SEQ ID NO: 563100 - RNA, 19 nt, Artificial Sequence
  Description of Artificial Sequence: Synthetic oligonucleotide
  Antisense strand to SEQ ID NO: 563099
cuuucgaugacacauuucc

SEQ ID NO: 563101 - RNA, 19 nt, Artificial Sequence
  Description of Artificial Sequence: Synthetic oligonucleotide
  Sense strand starting at position 3541 of SEQ ID NO: 318442
ggaccauguugcuuccgaa

SEQ ID NO: 563102 - RNA, 19 nt, Artificial Sequence
  Description of Artificial Sequence: Synthetic oligonucleotide
  Antisense strand to SEQ ID NO: 563101
uucggaagcaacauggucc

SEQ ID NO: 563103 - RNA, 19 nt, Artificial Sequence
  Description of Artificial Sequence: Synthetic oligonucleotide
  Sense strand starting at position 3849 of SEQ ID NO: 318442
ccugcuuagucuuucugaa

SEQ ID NO: 563104 - RNA, 19 nt, Artificial Sequence
  Description of Artificial Sequence: Synthetic oligonucleotide
  Antisense strand to SEQ ID NO: 563103
uucagaaagacuaagcagg

SEQ ID NO: 563105 - RNA, 19 nt, Artificial Sequence
  Description of Artificial Sequence: Synthetic oligonucleotide
  Sense strand starting at position 3868 of SEQ ID NO: 318442
ucugguauuucguuuguaa

SEQ ID NO: 563106 - RNA, 19 nt, Artificial Sequence
  Description of Artificial Sequence: Synthetic oligonucleotide
  Antisense strand to SEQ ID NO: 563105
uuacaaacgaaauaccaga

SEQ ID NO: 563107 - RNA, 19 nt, Artificial Sequence
  Description of Artificial Sequence: Synthetic oligonucleotide
  Sense strand starting at position 3908 of SEQ ID NO: 318442
caggguuggccuugggauu

SEQ ID NO: 563108 - RNA, 19 nt, Artificial Sequence
  Description of Artificial Sequence: Synthetic oligonucleotide
  Antisense strand to SEQ ID NO: 563107
aaucccaaggccaacccug

SEQ ID NO: 563109 - RNA, 19 nt, Artificial Sequence
  Description of Artificial Sequence: Synthetic oligonucleotide
  Sense strand starting at position 3960 of SEQ ID NO: 318442
ccgguagagucauuaaugg

SEQ ID NO: 563110 - RNA, 19 nt, Artificial Sequence
  Description of Artificial Sequence: Synthetic oligonucleotide
  Antisense strand to SEQ ID NO: 563109
ccauuaaugacucuaccgg

SEQ ID NO: 563111 - RNA, 19 nt, Artificial Sequence
  Description of Artificial Sequence: Synthetic oligonucleotide
  Sense strand starting at position 3965 of SEQ ID NO: 318442
agagucauuaaugguggau

SEQ ID NO: 563112 - RNA, 19 nt, Artificial Sequence
  Description of Artificial Sequence: Synthetic oligonucleotide
  Antisense strand to SEQ ID NO: 563111
auccaccauuaaugacucu

SEQ ID NO: 563113 - RNA, 19 nt, Artificial Sequence
  Description of Artificial Sequence: Synthetic oligonucleotide
  Sense strand starting at position 66 of SEQ ID NO: 318443
gauacucggcucuauuacu

SEQ ID NO: 563114 - RNA, 19 nt, Artificial Sequence
  Description of Artificial Sequence: Synthetic oligonucleotide
  Antisense strand to SEQ ID NO: 563113
aguaauagagccgaguauc

SEQ ID NO: 563115 - RNA, 19 nt, Artificial Sequence
  Description of Artificial Sequence: Synthetic oligonucleotide
  Sense strand starting at position 83 of SEQ ID NO: 318443
cuuugauagcaguaauaag

SEQ ID NO: 563116 - RNA, 19 nt, Artificial Sequence
  Description of Artificial Sequence: Synthetic oligonucleotide
  Antisense strand to SEQ ID NO: 563115
cuuauuacugcuaucaaag

SEQ ID NO: 563117 - RNA, 19 nt, Artificial Sequence
  Description of Artificial Sequence: Synthetic oligonucleotide
  Sense strand starting at position 155 of SEQ ID NO: 318443
gccauuccaguguaucaua

SEQ ID NO: 563118 - RNA, 19 nt, Artificial Sequence
  Description of Artificial Sequence: Synthetic oligonucleotide
  Antisense strand to SEQ ID NO: 563117
uaugauacacuggaauggc

SEQ ID NO: 563119 - RNA, 19 nt, Artificial Sequence
  Description of Artificial Sequence: Synthetic oligonucleotide
  Sense strand starting at position 166 of SEQ ID NO: 318443
guaucauaccuuuguggaa

SEQ ID NO: 563120 - RNA, 19 nt, Artificial Sequence
  Description of Artificial Sequence: Synthetic oligonucleotide
  Antisense strand to SEQ ID NO: 563119
uuccacaaagguaugauac

SEQ ID NO: 563121 - RNA, 19 nt, Artificial Sequence
  Description of Artificial Sequence: Synthetic oligonucleotide
  Sense strand starting at position 1047 of SEQ ID NO: 318443
gaguaaauauaguuuguag

SEQ ID NO: 563122 - RNA, 19 nt, Artificial Sequence
  Description of Artificial Sequence: Synthetic oligonucleotide
  Antisense strand to SEQ ID NO: 563121
cuacaaacuauauuuacuc

SEQ ID NO: 563123 - RNA, 19 nt, Artificial Sequence
  Description of Artificial Sequence: Synthetic oligonucleotide
  Sense strand starting at position 1745 of SEQ ID NO: 318443
gacucacgucucuaagaca

SEQ ID NO: 563124 - RNA, 19 nt, Artificial Sequence
  Description of Artificial Sequence: Synthetic oligonucleotide
  Antisense strand to SEQ ID NO: 563123
ugucuuagagacgugaguc

SEQ ID NO: 563125 - RNA, 19 nt, Artificial Sequence
  Description of Artificial Sequence: Synthetic oligonucleotide
  Sense strand starting at position 2041 of SEQ ID NO: 318443
caacuuugcgacggaaaug

SEQ ID NO: 563126 - RNA, 19 nt, Artificial Sequence
  Description of Artificial Sequence: Synthetic oligonucleotide
  Antisense strand to SEQ ID NO: 563125
cauuuccgucgcaaaguug

SEQ ID NO: 563127 - RNA, 19 nt, Artificial Sequence
  Description of Artificial Sequence: Synthetic oligonucleotide
  Sense strand starting at position 2042 of SEQ ID NO: 318443
aacuuugcgacggaaaugu

SEQ ID NO: 563128 - RNA, 19 nt, Artificial Sequence
  Description of Artificial Sequence: Synthetic oligonucleotide
  Antisense strand to SEQ ID NO: 563127
acauuuccgucgcaaaguu

SEQ ID NO: 563129 - RNA, 19 nt, Artificial Sequence
  Description of Artificial Sequence: Synthetic oligonucleotide
  Sense strand starting at position 2053 of SEQ ID NO: 318443
ggaaaugugucaucgaaag

SEQ ID NO: 563130 - RNA, 19 nt, Artificial Sequence
  Description of Artificial Sequence: Synthetic oligonucleotide
  Antisense strand to SEQ ID NO: 563129
cuuucgaugacacauuucc

SEQ ID NO: 563131 - RNA, 19 nt, Artificial Sequence
  Description of Artificial Sequence: Synthetic oligonucleotide
  Sense strand starting at position 2564 of SEQ ID NO: 318443
ucugguauuucguuuguaa

SEQ ID NO: 563132 - RNA, 19 nt, Artificial Sequence
  Description of Artificial Sequence: Synthetic oligonucleotide
  Antisense strand to SEQ ID NO: 563131
uuacaaacgaaauaccaga

SEQ ID NO: 563133 - RNA, 19 nt, Artificial Sequence
  Description of Artificial Sequence: Synthetic oligonucleotide
  Sense strand starting at position 2604 of SEQ ID NO: 318443
caggguuggccuugggauu

SEQ ID NO: 563134 - RNA, 19 nt, Artificial Sequence
  Description of Artificial Sequence: Synthetic oligonucleotide
  Antisense strand to SEQ ID NO: 563133
aaucccaaggccaacccug

SEQ ID NO: 563135 - RNA, 19 nt, Artificial Sequence
  Description of Artificial Sequence: Synthetic oligonucleotide
  Sense strand starting at position 2656 of SEQ ID NO: 318443
ccgguagagucauuaaugg

SEQ ID NO: 563136 - RNA, 19 nt, Artificial Sequence
  Description of Artificial Sequence: Synthetic oligonucleotide
  Antisense strand to SEQ ID NO: 563135
ccauuaaugacucuaccgg

SEQ ID NO: 563137 - RNA, 19 nt, Artificial Sequence
  Description of Artificial Sequence: Synthetic oligonucleotide
  Sense strand starting at position 2661 of SEQ ID NO: 318443
agagucauuaaugguggau

SEQ ID NO: 563138 - RNA, 19 nt, Artificial Sequence
  Description of Artificial Sequence: Synthetic oligonucleotide
  Antisense strand to SEQ ID NO: 563137
auccaccauuaaugacucu

SEQ ID NO: 563139 - RNA, 19 nt, Artificial Sequence
  Description of Artificial Sequence: Synthetic oligonucleotide
  Sense strand starting at position 2730 of SEQ ID NO: 318443
ugauaaacgccucagauua

SEQ ID NO: 563140 - RNA, 19 nt, Artificial Sequence
  Description of Artificial Sequence: Synthetic oligonucleotide
  Antisense strand to SEQ ID NO: 563139
uaaucugaggcguuuauca

SEQ ID NO: 563141 - RNA, 19 nt, Artificial Sequence
  Description of Artificial Sequence: Synthetic oligonucleotide
  Sense strand starting at position 2755 of SEQ ID NO: 318443
gguaaacgaguucagaugu

SEQ ID NO: 563142 - RNA, 19 nt, Artificial Sequence
  Description of Artificial Sequence: Synthetic oligonucleotide
  Antisense strand to SEQ ID NO: 563141
acaucugaacucguuuacc

SEQ ID NO: 563143 - RNA, 19 nt, Artificial Sequence
  Description of Artificial Sequence: Synthetic oligonucleotide
  Sense strand starting at position 2910 of SEQ ID NO: 318443
gcauguuaucagugaaggg

SEQ ID NO: 563144 - RNA, 19 nt, Artificial Sequence
  Description of Artificial Sequence: Synthetic oligonucleotide
  Antisense strand to SEQ ID NO: 563143
cccuucacugauaacaugc

SEQ ID NO: 563145 - RNA, 19 nt, Artificial Sequence
  Description of Artificial Sequence: Synthetic oligonucleotide
  Sense strand starting at position 2914 of SEQ ID NO: 318443
guuaucagugaagggaauu

SEQ ID NO: 563146 - RNA, 19 nt, Artificial Sequence
  Description of Artificial Sequence: Synthetic oligonucleotide
  Antisense strand to SEQ ID NO: 563145
aauucccuucacugauaac

SEQ ID NO: 563147 - RNA, 19 nt, Artificial Sequence
  Description of Artificial Sequence: Synthetic oligonucleotide
  Sense strand starting at position 2941 of SEQ ID NO: 318443
gcauaacgacuuuaacgaa

SEQ ID NO: 563148 - RNA, 19 nt, Artificial Sequence
  Description of Artificial Sequence: Synthetic oligonucleotide
  Antisense strand to SEQ ID NO: 563147
uucguuaaagucguuaugc

SEQ ID NO: 563149 - RNA, 19 nt, Artificial Sequence
  Description of Artificial Sequence: Synthetic oligonucleotide
  Sense strand starting at position 2972 of SEQ ID NO: 318443
ccguuuaguccugaaagug

SEQ ID NO: 563150 - RNA, 19 nt, Artificial Sequence
  Description of Artificial Sequence: Synthetic oligonucleotide
  Antisense strand to SEQ ID NO: 563149
cacuuucaggacuaaacgg

SEQ ID NO: 563151 - RNA, 19 nt, Artificial Sequence
  Description of Artificial Sequence: Synthetic oligonucleotide
  Sense strand starting at position 2980 of SEQ ID NO: 318443
uccugaaaguguuuaucaa

SEQ ID NO: 563152 - RNA, 19 nt, Artificial Sequence
  Description of Artificial Sequence: Synthetic oligonucleotide
  Antisense strand to SEQ ID NO: 563151
uugauaaacacuuucagga

SEQ ID NO: 563153 - RNA, 19 nt, Artificial Sequence
  Description of Artificial Sequence: Synthetic oligonucleotide
  Sense strand starting at position 2981 of SEQ ID NO: 318443
ccugaaaguguuuaucaaa

SEQ ID NO: 563154 - RNA, 19 nt, Artificial Sequence
  Description of Artificial Sequence: Synthetic oligonucleotide
  Antisense strand to SEQ ID NO: 563153
uuugauaaacacuuucagg

SEQ ID NO: 563155 - RNA, 19 nt, Artificial Sequence
  Description of Artificial Sequence: Synthetic oligonucleotide
  Sense strand starting at position 3060 of SEQ ID NO: 318443
uuaagacucuuugugggaa

SEQ ID NO: 563156 - RNA, 19 nt, Artificial Sequence
  Description of Artificial Sequence: Synthetic oligonucleotide
  Antisense strand to SEQ ID NO: 563155
uucccacaaagagucuuaa

SEQ ID NO: 563157 - RNA, 19 nt, Artificial Sequence
  Description of Artificial Sequence: Synthetic oligonucleotide
  Sense strand starting at position 3125 of SEQ ID NO: 318443
acaagacaugucuguuucu

SEQ ID NO: 563158 - RNA, 19 nt, Artificial Sequence
  Description of Artificial Sequence: Synthetic oligonucleotide
  Antisense strand to SEQ ID NO: 563157
agaaacagacaugucuugu

SEQ ID NO: 563159 - RNA, 19 nt, Artificial Sequence
  Description of Artificial Sequence: Synthetic oligonucleotide
  Sense strand starting at position 3128 of SEQ ID NO: 318443
agacaugucuguuucugag

SEQ ID NO: 563160 - RNA, 19 nt, Artificial Sequence
  Description of Artificial Sequence: Synthetic oligonucleotide
  Antisense strand to SEQ ID NO: 563159
cucagaaacagacaugucu

SEQ ID NO: 563161 - RNA, 19 nt, Artificial Sequence
  Description of Artificial Sequence: Synthetic oligonucleotide
  Sense strand starting at position 3138 of SEQ ID NO: 318443
guuucugagaggugcagau

SEQ ID NO: 563162 - RNA, 19 nt, Artificial Sequence
  Description of Artificial Sequence: Synthetic oligonucleotide
  Antisense strand to SEQ ID NO: 563161
aucugcaccucucagaaac

SEQ ID NO: 563163 - RNA, 19 nt, Artificial Sequence
  Description of Artificial Sequence: Synthetic oligonucleotide
  Sense strand starting at position 3140 of SEQ ID NO: 318443
uucugagaggugcagauua

SEQ ID NO: 563164 - RNA, 19 nt, Artificial Sequence
  Description of Artificial Sequence: Synthetic oligonucleotide
  Antisense strand to SEQ ID NO: 563163
uaaucugcaccucucagaa

SEQ ID NO: 563165 - RNA, 19 nt, Artificial Sequence
  Description of Artificial Sequence: Synthetic oligonucleotide
  Sense strand starting at position 3188 of SEQ ID NO: 318443
agauuccuuaagcggaaga

SEQ ID NO: 563166 - RNA, 19 nt, Artificial Sequence
  Description of Artificial Sequence: Synthetic oligonucleotide
  Antisense strand to SEQ ID NO: 563165
ucuuccgcuuaaggaaucu

SEQ ID NO: 563167 - RNA, 19 nt, Artificial Sequence
  Description of Artificial Sequence: Synthetic oligonucleotide
  Sense strand starting at position 3190 of SEQ ID NO: 318443
auuccuuaagcggaagauu

SEQ ID NO: 563168 - RNA, 19 nt, Artificial Sequence
  Description of Artificial Sequence: Synthetic oligonucleotide
  Antisense strand to SEQ ID NO: 563167
aaucuuccgcuuaaggaau

SEQ ID NO: 563169 - RNA, 19 nt, Artificial Sequence
  Description of Artificial Sequence: Synthetic oligonucleotide
  Sense strand starting at position 3245 of SEQ ID NO: 318443
guuauuaagucauugucaa

SEQ ID NO: 563170 - RNA, 19 nt, Artificial Sequence
  Description of Artificial Sequence: Synthetic oligonucleotide
  Antisense strand to SEQ ID NO: 563169
uugacaaugacuuaauaac

SEQ ID NO: 563171 - RNA, 19 nt, Artificial Sequence
  Description of Artificial Sequence: Synthetic oligonucleotide
  Sense strand starting at position 3309 of SEQ ID NO: 318443
ucagacuugguguauuaua

SEQ ID NO: 563172 - RNA, 19 nt, Artificial Sequence
  Description of Artificial Sequence: Synthetic oligonucleotide
  Antisense strand to SEQ ID NO: 563171
uauaauacaccaagucuga

SEQ ID NO: 563173 - RNA, 19 nt, Artificial Sequence
  Description of Artificial Sequence: Synthetic oligonucleotide
  Sense strand starting at position 3319 of SEQ ID NO: 318443
uguauuauaguggacuuga

SEQ ID NO: 563174 - RNA, 19 nt, Artificial Sequence
  Description of Artificial Sequence: Synthetic oligonucleotide
  Antisense strand to SEQ ID NO: 563173
ucaaguccacuauaauaca

SEQ ID NO: 563175 - RNA, 19 nt, Artificial Sequence
  Description of Artificial Sequence: Synthetic oligonucleotide
  Sense strand starting at position 3366 of SEQ ID NO: 318443
acuggauuaucccuguuau

SEQ ID NO: 563176 - RNA, 19 nt, Artificial Sequence
  Description of Artificial Sequence: Synthetic oligonucleotide
  Antisense strand to SEQ ID NO: 563175
auaacagggauaauccagu

SEQ ID NO: 563177 - RNA, 19 nt, Artificial Sequence
  Description of Artificial Sequence: Synthetic oligonucleotide
  Sense strand starting at position 3367 of SEQ ID NO: 318443
cuggauuaucccuguuauc

SEQ ID NO: 563178 - RNA, 19 nt, Artificial Sequence
  Description of Artificial Sequence: Synthetic oligonucleotide
  Antisense strand to SEQ ID NO: 563177
gauaacagggauaauccag

SEQ ID NO: 563179 - RNA, 19 nt, Artificial Sequence
  Description of Artificial Sequence: Synthetic oligonucleotide
  Sense strand starting at position 3413 of SEQ ID NO: 318443
guuaaaucugaauagcuga

SEQ ID NO: 563180 - RNA, 19 nt, Artificial Sequence
  Description of Artificial Sequence: Synthetic oligonucleotide
  Antisense strand to SEQ ID NO: 563179
ucagcuauucagauuuaac

SEQ ID NO: 563181 - RNA, 19 nt, Artificial Sequence
  Description of Artificial Sequence: Synthetic oligonucleotide
  Sense strand starting at position 3525 of SEQ ID NO: 318443
aagggaauauguguuguau

SEQ ID NO: 563182 - RNA, 19 nt, Artificial Sequence
  Description of Artificial Sequence: Synthetic oligonucleotide
  Antisense strand to SEQ ID NO: 563181
auacaacacauauucccuu

SEQ ID NO: 563183 - RNA, 19 nt, Artificial Sequence
  Description of Artificial Sequence: Synthetic oligonucleotide
  Sense strand starting at position 3555 of SEQ ID NO: 318443
agaguauguacauauaugu

SEQ ID NO: 563184 - RNA, 19 nt, Artificial Sequence
  Description of Artificial Sequence: Synthetic oligonucleotide
  Antisense strand to SEQ ID NO: 563183
acauauauguacauacucu

SEQ ID NO: 563185 - RNA, 19 nt, Artificial Sequence
  Description of Artificial Sequence: Synthetic oligonucleotide
  Sense strand starting at position 3627 of SEQ ID NO: 318443
agugguuaucucuagggaa

SEQ ID NO: 563186 - RNA, 19 nt, Artificial Sequence
  Description of Artificial Sequence: Synthetic oligonucleotide
  Antisense strand to SEQ ID NO: 563185
uucccuagagauaaccacu

SEQ ID NO: 563187 - RNA, 19 nt, Artificial Sequence
  Description of Artificial Sequence: Synthetic oligonucleotide
  Sense strand starting at position 3629 of SEQ ID NO: 318443
ugguuaucucuagggaagg

SEQ ID NO: 563188 - RNA, 19 nt, Artificial Sequence
  Description of Artificial Sequence: Synthetic oligonucleotide
  Antisense strand to SEQ ID NO: 563187
ccuucccuagagauaacca

SEQ ID NO: 563189 - RNA, 19 nt, Artificial Sequence
  Description of Artificial Sequence: Synthetic oligonucleotide
  Sense strand starting at position 3961 of SEQ ID NO: 318443
ggaguuugagcuuagccua

SEQ ID NO: 563190 - RNA, 19 nt, Artificial Sequence
  Description of Artificial Sequence: Synthetic oligonucleotide
  Antisense strand to SEQ ID NO: 563189
uaggcuaagcucaaacucc

SEQ ID NO: 563191 - RNA, 19 nt, Artificial Sequence
  Description of Artificial Sequence: Synthetic oligonucleotide
  Sense strand starting at position 3966 of SEQ ID NO: 318443
uugagcuuagccuaagcaa

SEQ ID NO: 563192 - RNA, 19 nt, Artificial Sequence
  Description of Artificial Sequence: Synthetic oligonucleotide
  Antisense strand to SEQ ID NO: 563191
uugcuuaggcuaagcucaa

SEQ ID NO: 563193 - RNA, 19 nt, Artificial Sequence
  Description of Artificial Sequence: Synthetic oligonucleotide
  Sense strand starting at position 613 of SEQ ID NO: 318444
gaguaaauauaguuuguag

SEQ ID NO: 563194 - RNA, 19 nt, Artificial Sequence
  Description of Artificial Sequence: Synthetic oligonucleotide
  Antisense strand to SEQ ID NO: 563193
cuacaaacuauauuuacuc

SEQ ID NO: 563195 - RNA, 19 nt, Artificial Sequence
  Description of Artificial Sequence: Synthetic oligonucleotide
  Sense strand starting at position 1311 of SEQ ID NO: 318444
gacucacgucucuaagaca

SEQ ID NO: 563196 - RNA, 19 nt, Artificial Sequence
  Description of Artificial Sequence: Synthetic oligonucleotide
  Antisense strand to SEQ ID NO: 563195
ugucuuagagacgugaguc

SEQ ID NO: 563197 - RNA, 19 nt, Artificial Sequence
  Description of Artificial Sequence: Synthetic oligonucleotide
  Sense strand starting at position 1606 of SEQ ID NO: 318444
ccaacuuugcgacggaaau

SEQ ID NO: 563198 - RNA, 19 nt, Artificial Sequence
  Description of Artificial Sequence: Synthetic oligonucleotide
  Antisense strand to SEQ ID NO: 563197
auuuccgucgcaaaguugg

SEQ ID NO: 563199 - RNA, 19 nt, Artificial Sequence
  Description of Artificial Sequence: Synthetic oligonucleotide
  Sense strand starting at position 1607 of SEQ ID NO: 318444
caacuuugcgacggaaaug

SEQ ID NO: 563200 - RNA, 19 nt, Artificial Sequence
  Description of Artificial Sequence: Synthetic oligonucleotide
  Antisense strand to SEQ ID NO: 563199
cauuuccgucgcaaaguug

SEQ ID NO: 563201 - RNA, 19 nt, Artificial Sequence
  Description of Artificial Sequence: Synthetic oligonucleotide
  Sense strand starting at position 1608 of SEQ ID NO: 318444
aacuuugcgacggaaaugu

SEQ ID NO: 563202 - RNA, 19 nt, Artificial Sequence
  Description of Artificial Sequence: Synthetic oligonucleotide
  Antisense strand to SEQ ID NO: 563201
acauuuccgucgcaaaguu

SEQ ID NO: 563203 - RNA, 19 nt, Artificial Sequence
  Description of Artificial Sequence: Synthetic oligonucleotide
  Sense strand starting at position 1619 of SEQ ID NO: 318444
ggaaaugugucaucgaaag

SEQ ID NO: 563204 - RNA, 19 nt, Artificial Sequence
  Description of Artificial Sequence: Synthetic oligonucleotide
  Antisense strand to SEQ ID NO: 563203
cuuucgaugacacauuucc

SEQ ID NO: 563205 - RNA, 19 nt, Artificial Sequence
  Description of Artificial Sequence: Synthetic oligonucleotide
  Sense strand starting at position 2130 of SEQ ID NO: 318444
ucugguauuucguuuguaa

SEQ ID NO: 563206 - RNA, 19 nt, Artificial Sequence
  Description of Artificial Sequence: Synthetic oligonucleotide
  Antisense strand to SEQ ID NO: 563205
uuacaaacgaaauaccaga

SEQ ID NO: 563207 - RNA, 19 nt, Artificial Sequence
  Description of Artificial Sequence: Synthetic oligonucleotide
  Sense strand starting at position 2170 of SEQ ID NO: 318444
caggguuggccuugggauu

SEQ ID NO: 563208 - RNA, 19 nt, Artificial Sequence
  Description of Artificial Sequence: Synthetic oligonucleotide
  Antisense strand to SEQ ID NO: 563207
aaucccaaggccaacccug

SEQ ID NO: 563209 - RNA, 19 nt, Artificial Sequence
  Description of Artificial Sequence: Synthetic oligonucleotide
  Sense strand starting at position 2222 of SEQ ID NO: 318444
ccgguagagucauuaaugg

SEQ ID NO: 563210 - RNA, 19 nt, Artificial Sequence
  Description of Artificial Sequence: Synthetic oligonucleotide
  Antisense strand to SEQ ID NO: 563209
ccauuaaugacucuaccgg

SEQ ID NO: 563211 - RNA, 19 nt, Artificial Sequence
  Description of Artificial Sequence: Synthetic oligonucleotide
  Sense strand starting at position 2227 of SEQ ID NO: 318444
agagucauuaaugguggau

SEQ ID NO: 563212 - RNA, 19 nt, Artificial Sequence
  Description of Artificial Sequence: Synthetic oligonucleotide
  Antisense strand to SEQ ID NO: 563211
auccaccauuaaugacucu

SEQ ID NO: 563213 - RNA, 19 nt, Artificial Sequence
  Description of Artificial Sequence: Synthetic oligonucleotide
  Sense strand starting at position 2296 of SEQ ID NO: 318444
ugauaaacgccucagauua

SEQ ID NO: 563214 - RNA, 19 nt, Artificial Sequence
  Description of Artificial Sequence: Synthetic oligonucleotide
  Antisense strand to SEQ ID NO: 563213
uaaucugaggcguuuauca

SEQ ID NO: 563215 - RNA, 19 nt, Artificial Sequence
  Description of Artificial Sequence: Synthetic oligonucleotide
  Sense strand starting at position 2321 of SEQ ID NO: 318444
gguaaacgaguucagaugu

SEQ ID NO: 563216 - RNA, 19 nt, Artificial Sequence
  Description of Artificial Sequence: Synthetic oligonucleotide
  Antisense strand to SEQ ID NO: 563215
acaucugaacucguuuacc

SEQ ID NO: 563217 - RNA, 19 nt, Artificial Sequence
  Description of Artificial Sequence: Synthetic oligonucleotide
  Sense strand starting at position 2476 of SEQ ID NO: 318444
gcauguuaucagugaaggg

SEQ ID NO: 563218 - RNA, 19 nt, Artificial Sequence
  Description of Artificial Sequence: Synthetic oligonucleotide
  Antisense strand to SEQ ID NO: 563217
cccuucacugauaacaugc

SEQ ID NO: 563219 - RNA, 19 nt, Artificial Sequence
  Description of Artificial Sequence: Synthetic oligonucleotide
  Sense strand starting at position 2480 of SEQ ID NO: 318444
guuaucagugaagggaauu

SEQ ID NO: 563220 - RNA, 19 nt, Artificial Sequence
  Description of Artificial Sequence: Synthetic oligonucleotide
  Antisense strand to SEQ ID NO: 563219
aauucccuucacugauaac

SEQ ID NO: 563221 - RNA, 19 nt, Artificial Sequence
  Description of Artificial Sequence: Synthetic oligonucleotide
  Sense strand starting at position 2507 of SEQ ID NO: 318444
gcauaacgacuuuaacgaa

SEQ ID NO: 563222 - RNA, 19 nt, Artificial Sequence
  Description of Artificial Sequence: Synthetic oligonucleotide
  Antisense strand to SEQ ID NO: 563221
uucguuaaagucguuaugc

SEQ ID NO: 563223 - RNA, 19 nt, Artificial Sequence
  Description of Artificial Sequence: Synthetic oligonucleotide
  Sense strand starting at position 2538 of SEQ ID NO: 318444
ccguuuaguccugaaagug

SEQ ID NO: 563224 - RNA, 19 nt, Artificial Sequence
  Description of Artificial Sequence: Synthetic oligonucleotide
  Antisense strand to SEQ ID NO: 563223
cacuuucaggacuaaacgg

SEQ ID NO: 563225 - RNA, 19 nt, Artificial Sequence
  Description of Artificial Sequence: Synthetic oligonucleotide
  Sense strand starting at position 2546 of SEQ ID NO: 318444
uccugaaaguguuuaucaa

SEQ ID NO: 563226 - RNA, 19 nt, Artificial Sequence
  Description of Artificial Sequence: Synthetic oligonucleotide
  Antisense strand to SEQ ID NO: 563225
uugauaaacacuuucagga

SEQ ID NO: 563227 - RNA, 19 nt, Artificial Sequence
  Description of Artificial Sequence: Synthetic oligonucleotide
  Sense strand starting at position 2547 of SEQ ID NO: 318444
ccugaaaguguuuaucaaa

SEQ ID NO: 563228 - RNA, 19 nt, Artificial Sequence
  Description of Artificial Sequence: Synthetic oligonucleotide
  Antisense strand to SEQ ID NO: 563227
uuugauaaacacuuucagg

SEQ ID NO: 563229 - RNA, 19 nt, Artificial Sequence
  Description of Artificial Sequence: Synthetic oligonucleotide
  Sense strand starting at position 2626 of SEQ ID NO: 318444
uuaagacucuuugugggaa

SEQ ID NO: 563230 - RNA, 19 nt, Artificial Sequence
  Description of Artificial Sequence: Synthetic oligonucleotide
  Antisense strand to SEQ ID NO: 563229
uucccacaaagagucuuaa

SEQ ID NO: 563231 - RNA, 19 nt, Artificial Sequence
  Description of Artificial Sequence: Synthetic oligonucleotide
  Sense strand starting at position 2691 of SEQ ID NO: 318444
acaagacaugucuguuucu

SEQ ID NO: 563232 - RNA, 19 nt, Artificial Sequence
  Description of Artificial Sequence: Synthetic oligonucleotide
  Antisense strand to SEQ ID NO: 563231
agaaacagacaugucuugu

SEQ ID NO: 563233 - RNA, 19 nt, Artificial Sequence
  Description of Artificial Sequence: Synthetic oligonucleotide
  Sense strand starting at position 2694 of SEQ ID NO: 318444
agacaugucuguuucugag

SEQ ID NO: 563234 - RNA, 19 nt, Artificial Sequence
  Description of Artificial Sequence: Synthetic oligonucleotide
  Antisense strand to SEQ ID NO: 563233
cucagaaacagacaugucu

SEQ ID NO: 563235 - RNA, 19 nt, Artificial Sequence
  Description of Artificial Sequence: Synthetic oligonucleotide
  Sense strand starting at position 2704 of SEQ ID NO: 318444
guuucugagaggugcagau

SEQ ID NO: 563236 - RNA, 19 nt, Artificial Sequence
  Description of Artificial Sequence: Synthetic oligonucleotide
  Antisense strand to SEQ ID NO: 563235
aucugcaccucucagaaac

SEQ ID NO: 563237 - RNA, 19 nt, Artificial Sequence
  Description of Artificial Sequence: Synthetic oligonucleotide
  Sense strand starting at position 2706 of SEQ ID NO: 318444
uucugagaggugcagauua

SEQ ID NO: 563238 - RNA, 19 nt, Artificial Sequence
  Description of Artificial Sequence: Synthetic oligonucleotide
  Antisense strand to SEQ ID NO: 563237
uaaucugcaccucucagaa

SEQ ID NO: 563239 - RNA, 19 nt, Artificial Sequence
  Description of Artificial Sequence: Synthetic oligonucleotide
  Sense strand starting at position 2754 of SEQ ID NO: 318444
agauuccuuaagcggaaga

SEQ ID NO: 563240 - RNA, 19 nt, Artificial Sequence
  Description of Artificial Sequence: Synthetic oligonucleotide
  Antisense strand to SEQ ID NO: 563239
ucuuccgcuuaaggaaucu

SEQ ID NO: 563241 - RNA, 19 nt, Artificial Sequence
  Description of Artificial Sequence: Synthetic oligonucleotide
  Sense strand starting at position 2756 of SEQ ID NO: 318444
auuccuuaagcggaagauu

SEQ ID NO: 563242 - RNA, 19 nt, Artificial Sequence
  Description of Artificial Sequence: Synthetic oligonucleotide
  Antisense strand to SEQ ID NO: 563241
aaucuuccgcuuaaggaau

SEQ ID NO: 563243 - RNA, 19 nt, Artificial Sequence
  Description of Artificial Sequence: Synthetic oligonucleotide
  Sense strand starting at position 2811 of SEQ ID NO: 318444
guuauuaagucauugucaa

SEQ ID NO: 563244 - RNA, 19 nt, Artificial Sequence
  Description of Artificial Sequence: Synthetic oligonucleotide
  Antisense strand to SEQ ID NO: 563243
uugacaaugacuuaauaac

SEQ ID NO: 563245 - RNA, 19 nt, Artificial Sequence
  Description of Artificial Sequence: Synthetic oligonucleotide
  Sense strand starting at position 2875 of SEQ ID NO: 318444
ucagacuugguguauuaua

SEQ ID NO: 563246 - RNA, 19 nt, Artificial Sequence
  Description of Artificial Sequence: Synthetic oligonucleotide
  Antisense strand to SEQ ID NO: 563245
uauaauacaccaagucuga

SEQ ID NO: 563247 - RNA, 19 nt, Artificial Sequence
  Description of Artificial Sequence: Synthetic oligonucleotide
  Sense strand starting at position 2885 of SEQ ID NO: 318444
uguauuauaguggacuuga

SEQ ID NO: 563248 - RNA, 19 nt, Artificial Sequence
  Description of Artificial Sequence: Synthetic oligonucleotide
  Antisense strand to SEQ ID NO: 563247
ucaaguccacuauaauaca

SEQ ID NO: 563249 - RNA, 19 nt, Artificial Sequence
  Description of Artificial Sequence: Synthetic oligonucleotide
  Sense strand starting at position 2932 of SEQ ID NO: 318444
acuggauuaucccuguuau

SEQ ID NO: 563250 - RNA, 19 nt, Artificial Sequence
  Description of Artificial Sequence: Synthetic oligonucleotide
  Antisense strand to SEQ ID NO: 563249
auaacagggauaauccagu

SEQ ID NO: 563251 - RNA, 19 nt, Artificial Sequence
  Description of Artificial Sequence: Synthetic oligonucleotide
  Sense strand starting at position 2933 of SEQ ID NO: 318444
cuggauuaucccuguuauc

SEQ ID NO: 563252 - RNA, 19 nt, Artificial Sequence
  Description of Artificial Sequence: Synthetic oligonucleotide
  Antisense strand to SEQ ID NO: 563251
gauaacagggauaauccag

SEQ ID NO: 563253 - RNA, 19 nt, Artificial Sequence
  Description of Artificial Sequence: Synthetic oligonucleotide
  Sense strand starting at position 2979 of SEQ ID NO: 318444
guuaaaucugaauagcuga

SEQ ID NO: 563254 - RNA, 19 nt, Artificial Sequence
  Description of Artificial Sequence: Synthetic oligonucleotide
  Antisense strand to SEQ ID NO: 563253
ucagcuauucagauuuaac

SEQ ID NO: 563255 - RNA, 19 nt, Artificial Sequence
  Description of Artificial Sequence: Synthetic oligonucleotide
  Sense strand starting at position 3091 of SEQ ID NO: 318444
aagggaauauguguuguau

SEQ ID NO: 563256 - RNA, 19 nt, Artificial Sequence
  Description of Artificial Sequence: Synthetic oligonucleotide
  Antisense strand to SEQ ID NO: 563255
auacaacacauauucccuu

SEQ ID NO: 563257 - RNA, 19 nt, Artificial Sequence
  Description of Artificial Sequence: Synthetic oligonucleotide
  Sense strand starting at position 3121 of SEQ ID NO: 318444
agaguauguacauauaugu

SEQ ID NO: 563258 - RNA, 19 nt, Artificial Sequence
  Description of Artificial Sequence: Synthetic oligonucleotide
  Antisense strand to SEQ ID NO: 563257
acauauauguacauacucu

SEQ ID NO: 563259 - RNA, 19 nt, Artificial Sequence
  Description of Artificial Sequence: Synthetic oligonucleotide
  Sense strand starting at position 3193 of SEQ ID NO: 318444
agugguuaucucuagggaa

SEQ ID NO: 563260 - RNA, 19 nt, Artificial Sequence
  Description of Artificial Sequence: Synthetic oligonucleotide
  Antisense strand to SEQ ID NO: 563259
uucccuagagauaaccacu

SEQ ID NO: 563261 - RNA, 19 nt, Artificial Sequence
  Description of Artificial Sequence: Synthetic oligonucleotide
  Sense strand starting at position 3195 of SEQ ID NO: 318444
ugguuaucucuagggaagg

SEQ ID NO: 563262 - RNA, 19 nt, Artificial Sequence
  Description of Artificial Sequence: Synthetic oligonucleotide
  Antisense strand to SEQ ID NO: 563261
ccuucccuagagauaacca

SEQ ID NO: 563263 - RNA, 19 nt, Artificial Sequence
  Description of Artificial Sequence: Synthetic oligonucleotide
  Sense strand starting at position 3527 of SEQ ID NO: 318444
ggaguuugagcuuagccua

SEQ ID NO: 563264 - RNA, 19 nt, Artificial Sequence
  Description of Artificial Sequence: Synthetic oligonucleotide
  Antisense strand to SEQ ID NO: 563263
uaggcuaagcucaaacucc

SEQ ID NO: 563265 - RNA, 19 nt, Artificial Sequence
  Description of Artificial Sequence: Synthetic oligonucleotide
  Sense strand starting at position 3532 of SEQ ID NO: 318444
uugagcuuagccuaagcaa

SEQ ID NO: 563266 - RNA, 19 nt, Artificial Sequence
  Description of Artificial Sequence: Synthetic oligonucleotide
  Antisense strand to SEQ ID NO: 563265
uugcuuaggcuaagcucaa

SEQ ID NO: 563267 - RNA, 19 nt, Artificial Sequence
  Description of Artificial Sequence: Synthetic oligonucleotide
  Sense strand starting at position 3708 of SEQ ID NO: 318444
agagauaucuugucuuuaa

SEQ ID NO: 563268 - RNA, 19 nt, Artificial Sequence
  Description of Artificial Sequence: Synthetic oligonucleotide
  Antisense strand to SEQ ID NO: 563267
uuaaagacaagauaucucu

SEQ ID NO: 563269 - RNA, 19 nt, Artificial Sequence
  Description of Artificial Sequence: Synthetic oligonucleotide
  Sense strand starting at position 3751 of SEQ ID NO: 318444
uuguaauugauucgaggug

SEQ ID NO: 563270 - RNA, 19 nt, Artificial Sequence
  Description of Artificial Sequence: Synthetic oligonucleotide
  Antisense strand to SEQ ID NO: 563269
caccucgaaucaauuacaa

SEQ ID NO: 563271 - RNA, 19 nt, Artificial Sequence
  Description of Artificial Sequence: Synthetic oligonucleotide
  Sense strand starting at position 3756 of SEQ ID NO: 318444
auugauucgagguggcuaa

SEQ ID NO: 563272 - RNA, 19 nt, Artificial Sequence
  Description of Artificial Sequence: Synthetic oligonucleotide
  Antisense strand to SEQ ID NO: 563271
uuagccaccucgaaucaau

SEQ ID NO: 563273 - RNA, 19 nt, Artificial Sequence
  Description of Artificial Sequence: Synthetic oligonucleotide
  Sense strand starting at position 130 of SEQ ID NO: 318445
ucccaaacggcucggauua

SEQ ID NO: 563274 - RNA, 19 nt, Artificial Sequence
  Description of Artificial Sequence: Synthetic oligonucleotide
  Antisense strand to SEQ ID NO: 563273
uaauccgagccguuuggga

SEQ ID NO: 563275 - RNA, 19 nt, Artificial Sequence
  Description of Artificial Sequence: Synthetic oligonucleotide
  Sense strand starting at position 610 of SEQ ID NO: 318445
ggcagccaguccucauaaa

SEQ ID NO: 563276 - RNA, 19 nt, Artificial Sequence
  Description of Artificial Sequence: Synthetic oligonucleotide
  Antisense strand to SEQ ID NO: 563275
uuuaugaggacuggcugcc

SEQ ID NO: 563277 - RNA, 19 nt, Artificial Sequence
  Description of Artificial Sequence: Synthetic oligonucleotide
  Sense strand starting at position 666 of SEQ ID NO: 318445
guacaauccuaaguacaua

SEQ ID NO: 563278 - RNA, 19 nt, Artificial Sequence
  Description of Artificial Sequence: Synthetic oligonucleotide
  Antisense strand to SEQ ID NO: 563277
uauguacuuaggauuguac

SEQ ID NO: 563279 - RNA, 19 nt, Artificial Sequence
  Description of Artificial Sequence: Synthetic oligonucleotide
  Sense strand starting at position 834 of SEQ ID NO: 318445
gccacuauuccugaccaga

SEQ ID NO: 563280 - RNA, 19 nt, Artificial Sequence
  Description of Artificial Sequence: Synthetic oligonucleotide
  Antisense strand to SEQ ID NO: 563279
ucuggucaggaauaguggc

SEQ ID NO: 563281 - RNA, 19 nt, Artificial Sequence
  Description of Artificial Sequence: Synthetic oligonucleotide
  Sense strand starting at position 859 of SEQ ID NO: 318445
cuugguuauucuuuccauu

SEQ ID NO: 563282 - RNA, 19 nt, Artificial Sequence
  Description of Artificial Sequence: Synthetic oligonucleotide
  Antisense strand to SEQ ID NO: 563281
aauggaaagaauaaccaag

SEQ ID NO: 563283 - RNA, 19 nt, Artificial Sequence
  Description of Artificial Sequence: Synthetic oligonucleotide
  Sense strand starting at position 1022 of SEQ ID NO: 318445
cauguauuaugucuggaca

SEQ ID NO: 563284 - RNA, 19 nt, Artificial Sequence
  Description of Artificial Sequence: Synthetic oligonucleotide
  Antisense strand to SEQ ID NO: 563283
uguccagacauaauacaug

SEQ ID NO: 563285 - RNA, 19 nt, Artificial Sequence
  Description of Artificial Sequence: Synthetic oligonucleotide
  Sense strand starting at position 1023 of SEQ ID NO: 318445
auguauuaugucuggacag

SEQ ID NO: 563286 - RNA, 19 nt, Artificial Sequence
  Description of Artificial Sequence: Synthetic oligonucleotide
  Antisense strand to SEQ ID NO: 563285
cuguccagacauaauacau

SEQ ID NO: 563287 - RNA, 19 nt, Artificial Sequence
  Description of Artificial Sequence: Synthetic oligonucleotide
  Sense strand starting at position 1025 of SEQ ID NO: 318445
guauuaugucuggacaguu

SEQ ID NO: 563288 - RNA, 19 nt, Artificial Sequence
  Description of Artificial Sequence: Synthetic oligonucleotide
  Antisense strand to SEQ ID NO: 563287
aacuguccagacauaauac

SEQ ID NO: 563289 - RNA, 19 nt, Artificial Sequence
  Description of Artificial Sequence: Synthetic oligonucleotide
  Sense strand starting at position 1050 of SEQ ID NO: 318445
cuuggaaacucuuuaguca

SEQ ID NO: 563290 - RNA, 19 nt, Artificial Sequence
  Description of Artificial Sequence: Synthetic oligonucleotide
  Antisense strand to SEQ ID NO: 563289
ugacuaaagaguuuccaag

SEQ ID NO: 563291 - RNA, 19 nt, Artificial Sequence
  Description of Artificial Sequence: Synthetic oligonucleotide
  Sense strand starting at position 1051 of SEQ ID NO: 318445
uuggaaacucuuuagucau

SEQ ID NO: 563292 - RNA, 19 nt, Artificial Sequence
  Description of Artificial Sequence: Synthetic oligonucleotide
  Antisense strand to SEQ ID NO: 563291
augacuaaagaguuuccaa

SEQ ID NO: 563293 - RNA, 19 nt, Artificial Sequence
  Description of Artificial Sequence: Synthetic oligonucleotide
  Sense strand starting at position 1053 of SEQ ID NO: 318445
ggaaacucuuuagucaugu

SEQ ID NO: 563294 - RNA, 19 nt, Artificial Sequence
  Description of Artificial Sequence: Synthetic oligonucleotide
  Antisense strand to SEQ ID NO: 563293
acaugacuaaagaguuucc

SEQ ID NO: 563295 - RNA, 19 nt, Artificial Sequence
  Description of Artificial Sequence: Synthetic oligonucleotide
  Sense strand starting at position 1061 of SEQ ID NO: 318445
uuuagucauguauguauca

SEQ ID NO: 563296 - RNA, 19 nt, Artificial Sequence
  Description of Artificial Sequence: Synthetic oligonucleotide
  Antisense strand to SEQ ID NO: 563295
ugauacauacaugacuaaa

SEQ ID NO: 563297 - RNA, 19 nt, Artificial Sequence
  Description of Artificial Sequence: Synthetic oligonucleotide
  Sense strand starting at position 1062 of SEQ ID NO: 318445
uuagucauguauguaucau

SEQ ID NO: 563298 - RNA, 19 nt, Artificial Sequence
  Description of Artificial Sequence: Synthetic oligonucleotide
  Antisense strand to SEQ ID NO: 563297
augauacauacaugacuaa

SEQ ID NO: 563299 - RNA, 19 nt, Artificial Sequence
  Description of Artificial Sequence: Synthetic oligonucleotide
  Sense strand starting at position 1096 of SEQ ID NO: 318445
ggaauucuuguaugggaca

SEQ ID NO: 563300 - RNA, 19 nt, Artificial Sequence
  Description of Artificial Sequence: Synthetic oligonucleotide
  Antisense strand to SEQ ID NO: 563299
ugucccauacaagaauucc

SEQ ID NO: 563301 - RNA, 19 nt, Artificial Sequence
  Description of Artificial Sequence: Synthetic oligonucleotide
  Sense strand starting at position 1124 of SEQ ID NO: 318445
aagugaaugcuaugcuuug

SEQ ID NO: 563302 - RNA, 19 nt, Artificial Sequence
  Description of Artificial Sequence: Synthetic oligonucleotide
  Antisense strand to SEQ ID NO: 563301
caaagcauagcauucacuu

SEQ ID NO: 563303 - RNA, 19 nt, Artificial Sequence
  Description of Artificial Sequence: Synthetic oligonucleotide
  Sense strand starting at position 1125 of SEQ ID NO: 318445
agugaaugcuaugcuuuga

SEQ ID NO: 563304 - RNA, 19 nt, Artificial Sequence
  Description of Artificial Sequence: Synthetic oligonucleotide
  Antisense strand to SEQ ID NO: 563303
ucaaagcauagcauucacu

SEQ ID NO: 563305 - RNA, 19 nt, Artificial Sequence
  Description of Artificial Sequence: Synthetic oligonucleotide
  Sense strand starting at position 1391 of SEQ ID NO: 318445
uaaggagaguucucaacuu

SEQ ID NO: 563306 - RNA, 19 nt, Artificial Sequence
  Description of Artificial Sequence: Synthetic oligonucleotide
  Antisense strand to SEQ ID NO: 563305
aaguugagaacucuccuua

SEQ ID NO: 563307 - RNA, 19 nt, Artificial Sequence
  Description of Artificial Sequence: Synthetic oligonucleotide
  Sense strand starting at position 1429 of SEQ ID NO: 318445
gauguagcgaccuguaaac

SEQ ID NO: 563308 - RNA, 19 nt, Artificial Sequence
  Description of Artificial Sequence: Synthetic oligonucleotide
  Antisense strand to SEQ ID NO: 563307
guuuacaggucgcuacauc

SEQ ID NO: 563309 - RNA, 19 nt, Artificial Sequence
  Description of Artificial Sequence: Synthetic oligonucleotide
  Sense strand starting at position 2091 of SEQ ID NO: 318445
agcggacuuccggaucuuu

SEQ ID NO: 563310 - RNA, 19 nt, Artificial Sequence
  Description of Artificial Sequence: Synthetic oligonucleotide
  Antisense strand to SEQ ID NO: 563309
aaagauccggaaguccgcu

SEQ ID NO: 563311 - RNA, 19 nt, Artificial Sequence
  Description of Artificial Sequence: Synthetic oligonucleotide
  Sense strand starting at position 2293 of SEQ ID NO: 318445
ucucucuaacguucgugua

SEQ ID NO: 563312 - RNA, 19 nt, Artificial Sequence
  Description of Artificial Sequence: Synthetic oligonucleotide
  Antisense strand to SEQ ID NO: 563311
uacacgaacguuagagaga

SEQ ID NO: 563313 - RNA, 19 nt, Artificial Sequence
  Description of Artificial Sequence: Synthetic oligonucleotide
  Sense strand starting at position 2297 of SEQ ID NO: 318445
ucuaacguucguguaguaa

SEQ ID NO: 563314 - RNA, 19 nt, Artificial Sequence
  Description of Artificial Sequence: Synthetic oligonucleotide
  Antisense strand to SEQ ID NO: 563313
uuacuacacgaacguuaga

SEQ ID NO: 563315 - RNA, 19 nt, Artificial Sequence
  Description of Artificial Sequence: Synthetic oligonucleotide
  Sense strand starting at position 2335 of SEQ ID NO: 318445
augugaugacgccauugca

SEQ ID NO: 563316 - RNA, 19 nt, Artificial Sequence
  Description of Artificial Sequence: Synthetic oligonucleotide
  Antisense strand to SEQ ID NO: 563315
ugcaauggcgucaucacau

SEQ ID NO: 563317 - RNA, 19 nt, Artificial Sequence
  Description of Artificial Sequence: Synthetic oligonucleotide
  Sense strand starting at position 2367 of SEQ ID NO: 318445
gaaugugcgcauguguauu

SEQ ID NO: 563318 - RNA, 19 nt, Artificial Sequence
  Description of Artificial Sequence: Synthetic oligonucleotide
  Antisense strand to SEQ ID NO: 563317
aauacacaugcgcacauuc

SEQ ID NO: 563319 - RNA, 19 nt, Artificial Sequence
  Description of Artificial Sequence: Synthetic oligonucleotide
  Sense strand starting at position 2377 of SEQ ID NO: 318445
auguguauucuugcgcuua

SEQ ID NO: 563320 - RNA, 19 nt, Artificial Sequence
  Description of Artificial Sequence: Synthetic oligonucleotide
  Antisense strand to SEQ ID NO: 563319
uaagcgcaagaauacacau

SEQ ID NO: 563321 - RNA, 19 nt, Artificial Sequence
  Description of Artificial Sequence: Synthetic oligonucleotide
  Sense strand starting at position 2529 of SEQ ID NO: 318445
gcagucugcaaauaugaag

SEQ ID NO: 563322 - RNA, 19 nt, Artificial Sequence
  Description of Artificial Sequence: Synthetic oligonucleotide
  Antisense strand to SEQ ID NO: 563321
cuucauauuugcagacugc

SEQ ID NO: 563323 - RNA, 19 nt, Artificial Sequence
  Description of Artificial Sequence: Synthetic oligonucleotide
  Sense strand starting at position 2572 of SEQ ID NO: 318445
cagugcucccagcaauaga

SEQ ID NO: 563324 - RNA, 19 nt, Artificial Sequence
  Description of Artificial Sequence: Synthetic oligonucleotide
  Antisense strand to SEQ ID NO: 563323
ucuauugcugggagcacug

SEQ ID NO: 563325 - RNA, 19 nt, Artificial Sequence
  Description of Artificial Sequence: Synthetic oligonucleotide
  Sense strand starting at position 2637 of SEQ ID NO: 318445
cugagaauauugcuuucuu

SEQ ID NO: 563326 - RNA, 19 nt, Artificial Sequence
  Description of Artificial Sequence: Synthetic oligonucleotide
  Antisense strand to SEQ ID NO: 563325
aagaaagcaauauucucag

SEQ ID NO: 563327 - RNA, 19 nt, Artificial Sequence
  Description of Artificial Sequence: Synthetic oligonucleotide
  Sense strand starting at position 2638 of SEQ ID NO: 318445
ugagaauauugcuuucuug

SEQ ID NO: 563328 - RNA, 19 nt, Artificial Sequence
  Description of Artificial Sequence: Synthetic oligonucleotide
  Antisense strand to SEQ ID NO: 563327
caagaaagcaauauucuca

SEQ ID NO: 563329 - RNA, 19 nt, Artificial Sequence
  Description of Artificial Sequence: Synthetic oligonucleotide
  Sense strand starting at position 2807 of SEQ ID NO: 318445
uaggaaauguuucuccagu

SEQ ID NO: 563330 - RNA, 19 nt, Artificial Sequence
  Description of Artificial Sequence: Synthetic oligonucleotide
  Antisense strand to SEQ ID NO: 563329
acuggagaaacauuuccua

SEQ ID NO: 563331 - RNA, 19 nt, Artificial Sequence
  Description of Artificial Sequence: Synthetic oligonucleotide
  Sense strand starting at position 2808 of SEQ ID NO: 318445
aggaaauguuucuccaguc

SEQ ID NO: 563332 - RNA, 19 nt, Artificial Sequence
  Description of Artificial Sequence: Synthetic oligonucleotide
  Antisense strand to SEQ ID NO: 563331
gacuggagaaacauuuccu

SEQ ID NO: 563333 - RNA, 19 nt, Artificial Sequence
  Description of Artificial Sequence: Synthetic oligonucleotide
  Sense strand starting at position 2809 of SEQ ID NO: 318445
ggaaauguuucuccaguca

SEQ ID NO: 563334 - RNA, 19 nt, Artificial Sequence
  Description of Artificial Sequence: Synthetic oligonucleotide
  Antisense strand to SEQ ID NO: 563333
ugacuggagaaacauuucc

SEQ ID NO: 563335 - RNA, 19 nt, Artificial Sequence
  Description of Artificial Sequence: Synthetic oligonucleotide
  Sense strand starting at position 2905 of SEQ ID NO: 318445
gagaaauagucucuugcug

SEQ ID NO: 563336 - RNA, 19 nt, Artificial Sequence
  Description of Artificial Sequence: Synthetic oligonucleotide
  Antisense strand to SEQ ID NO: 563335
cagcaagagacuauuucuc

SEQ ID NO: 563337 - RNA, 19 nt, Artificial Sequence
  Description of Artificial Sequence: Synthetic oligonucleotide
  Sense strand starting at position 2917 of SEQ ID NO: 318445
cuugcuguaccagguuaaa

SEQ ID NO: 563338 - RNA, 19 nt, Artificial Sequence
  Description of Artificial Sequence: Synthetic oligonucleotide
  Antisense strand to SEQ ID NO: 563337
uuuaaccugguacagcaag

SEQ ID NO: 563339 - RNA, 19 nt, Artificial Sequence
  Description of Artificial Sequence: Synthetic oligonucleotide
  Sense strand starting at position 2942 of SEQ ID NO: 318445
cggaaagugucaguuauua

SEQ ID NO: 563340 - RNA, 19 nt, Artificial Sequence
  Description of Artificial Sequence: Synthetic oligonucleotide
  Antisense strand to SEQ ID NO: 563339
uaauaacugacacuuuccg

SEQ ID NO: 563341 - RNA, 19 nt, Artificial Sequence
  Description of Artificial Sequence: Synthetic oligonucleotide
  Sense strand starting at position 3006 of SEQ ID NO: 318445
aggaaugucuuacuuggca

SEQ ID NO: 563342 - RNA, 19 nt, Artificial Sequence
  Description of Artificial Sequence: Synthetic oligonucleotide
  Antisense strand to SEQ ID NO: 563341
ugccaaguaagacauuccu

SEQ ID NO: 563343 - RNA, 19 nt, Artificial Sequence
  Description of Artificial Sequence: Synthetic oligonucleotide
  Sense strand starting at position 3704 of SEQ ID NO: 318445
gucacugaccaguaugcau

SEQ ID NO: 563344 - RNA, 19 nt, Artificial Sequence
  Description of Artificial Sequence: Synthetic oligonucleotide
  Antisense strand to SEQ ID NO: 563343
augcauacuggucagugac

SEQ ID NO: 563345 - RNA, 19 nt, Artificial Sequence
  Description of Artificial Sequence: Synthetic oligonucleotide
  Sense strand starting at position 3847 of SEQ ID NO: 318445
uugaacugcccaugagaaa

SEQ ID NO: 563346 - RNA, 19 nt, Artificial Sequence
  Description of Artificial Sequence: Synthetic oligonucleotide
  Antisense strand to SEQ ID NO: 563345
uuucucaugggcaguucaa

SEQ ID NO: 563347 - RNA, 19 nt, Artificial Sequence
  Description of Artificial Sequence: Synthetic oligonucleotide
  Sense strand starting at position 3856 of SEQ ID NO: 318445
ccaugagaaagauguaggu

SEQ ID NO: 563348 - RNA, 19 nt, Artificial Sequence
  Description of Artificial Sequence: Synthetic oligonucleotide
  Antisense strand to SEQ ID NO: 563347
accuacaucuuucucaugg

SEQ ID NO: 563349 - RNA, 19 nt, Artificial Sequence
  Description of Artificial Sequence: Synthetic oligonucleotide
  Sense strand starting at position 3929 of SEQ ID NO: 318445
ugaugugaggucgaacagu

SEQ ID NO: 563350 - RNA, 19 nt, Artificial Sequence
  Description of Artificial Sequence: Synthetic oligonucleotide
  Antisense strand to SEQ ID NO: 563349
acuguucgaccucacauca

SEQ ID NO: 563351 - RNA, 19 nt, Artificial Sequence
  Description of Artificial Sequence: Synthetic oligonucleotide
  Sense strand starting at position 3968 of SEQ ID NO: 318445
ccacuccugucuguggaaa

SEQ ID NO: 563352 - RNA, 19 nt, Artificial Sequence
  Description of Artificial Sequence: Synthetic oligonucleotide
  Antisense strand to SEQ ID NO: 563351
uuuccacagacaggagugg

SEQ ID NO: 563353 - RNA, 19 nt, Artificial Sequence
  Description of Artificial Sequence: Synthetic oligonucleotide
  Sense strand starting at position 90 of SEQ ID NO: 318446
aguuguucuuaaccuccaa

SEQ ID NO: 563354 - RNA, 19 nt, Artificial Sequence
  Description of Artificial Sequence: Synthetic oligonucleotide
  Antisense strand to SEQ ID NO: 563353
uuggagguuaagaacaacu

SEQ ID NO: 563355 - RNA, 19 nt, Artificial Sequence
  Description of Artificial Sequence: Synthetic oligonucleotide
  Sense strand starting at position 145 of SEQ ID NO: 318446
cguguaccugccuagaaca

SEQ ID NO: 563356 - RNA, 19 nt, Artificial Sequence
  Description of Artificial Sequence: Synthetic oligonucleotide
  Antisense strand to SEQ ID NO: 563355
uguucuaggcagguacacg

SEQ ID NO: 563357 - RNA, 19 nt, Artificial Sequence
  Description of Artificial Sequence: Synthetic oligonucleotide
  Sense strand starting at position 155 of SEQ ID NO: 318446
ccuagaacaugcuuugaaa

SEQ ID NO: 563358 - RNA, 19 nt, Artificial Sequence
  Description of Artificial Sequence: Synthetic oligonucleotide
  Antisense strand to SEQ ID NO: 563357
uuucaaagcauguucuagg

SEQ ID NO: 563359 - RNA, 19 nt, Artificial Sequence
  Description of Artificial Sequence: Synthetic oligonucleotide
  Sense strand starting at position 380 of SEQ ID NO: 318446
ugaagcaucucagugaaug

SEQ ID NO: 563360 - RNA, 19 nt, Artificial Sequence
  Description of Artificial Sequence: Synthetic oligonucleotide
  Antisense strand to SEQ ID NO: 563359
cauucacugagaugcuuca

SEQ ID NO: 563361 - RNA, 19 nt, Artificial Sequence
  Description of Artificial Sequence: Synthetic oligonucleotide
  Sense strand starting at position 381 of SEQ ID NO: 318446
gaagcaucucagugaaugg

SEQ ID NO: 563362 - RNA, 19 nt, Artificial Sequence
  Description of Artificial Sequence: Synthetic oligonucleotide
  Antisense strand to SEQ ID NO: 563361
ccauucacugagaugcuuc

SEQ ID NO: 563363 - RNA, 19 nt, Artificial Sequence
  Description of Artificial Sequence: Synthetic oligonucleotide
  Sense strand starting at position 385 of SEQ ID NO: 318446
caucucagugaauggagau

SEQ ID NO: 563364 - RNA, 19 nt, Artificial Sequence
  Description of Artificial Sequence: Synthetic oligonucleotide
  Antisense strand to SEQ ID NO: 563363
aucuccauucacugagaug

SEQ ID NO: 563365 - RNA, 19 nt, Artificial Sequence
  Description of Artificial Sequence: Synthetic oligonucleotide
  Sense strand starting at position 541 of SEQ ID NO: 318446
cuuguuaggcaucauuaag

SEQ ID NO: 563366 - RNA, 19 nt, Artificial Sequence
  Description of Artificial Sequence: Synthetic oligonucleotide
  Antisense strand to SEQ ID NO: 563365
cuuaaugaugccuaacaag

SEQ ID NO: 563367 - RNA, 19 nt, Artificial Sequence
  Description of Artificial Sequence: Synthetic oligonucleotide
  Sense strand starting at position 947 of SEQ ID NO: 318446
cucaacauuucugggagua

SEQ ID NO: 563368 - RNA, 19 nt, Artificial Sequence
  Description of Artificial Sequence: Synthetic oligonucleotide
  Antisense strand to SEQ ID NO: 563367
uacucccagaaauguugag

SEQ ID NO: 563369 - RNA, 19 nt, Artificial Sequence
  Description of Artificial Sequence: Synthetic oligonucleotide
  Sense strand starting at position 959 of SEQ ID NO: 318446
gggaguaaaguugggcuua

SEQ ID NO: 563370 - RNA, 19 nt, Artificial Sequence
  Description of Artificial Sequence: Synthetic oligonucleotide
  Antisense strand to SEQ ID NO: 563369
uaagcccaacuuuacuccc

SEQ ID NO: 563371 - RNA, 19 nt, Artificial Sequence
  Description of Artificial Sequence: Synthetic oligonucleotide
  Sense strand starting at position 1137 of SEQ ID NO: 318446
gcgaaacucaaaggaguua

SEQ ID NO: 563372 - RNA, 19 nt, Artificial Sequence
  Description of Artificial Sequence: Synthetic oligonucleotide
  Antisense strand to SEQ ID NO: 563371
uaacuccuuugaguuucgc

SEQ ID NO: 563373 - RNA, 19 nt, Artificial Sequence
  Description of Artificial Sequence: Synthetic oligonucleotide
  Sense strand starting at position 2592 of SEQ ID NO: 318446
gugguaguggcgaguguuu

SEQ ID NO: 563374 - RNA, 19 nt, Artificial Sequence
  Description of Artificial Sequence: Synthetic oligonucleotide
  Antisense strand to SEQ ID NO: 563373
aaacacucgccacuaccac

SEQ ID NO: 563375 - RNA, 19 nt, Artificial Sequence
  Description of Artificial Sequence: Synthetic oligonucleotide
  Sense strand starting at position 2697 of SEQ ID NO: 318446
ucacguucuccggacugaa

SEQ ID NO: 563376 - RNA, 19 nt, Artificial Sequence
  Description of Artificial Sequence: Synthetic oligonucleotide
  Antisense strand to SEQ ID NO: 563375
uucaguccggagaacguga

SEQ ID NO: 563377 - RNA, 19 nt, Artificial Sequence
  Description of Artificial Sequence: Synthetic oligonucleotide
  Sense strand starting at position 2713 of SEQ ID NO: 318446
gaaccaauugguugaagug

SEQ ID NO: 563378 - RNA, 19 nt, Artificial Sequence
  Description of Artificial Sequence: Synthetic oligonucleotide
  Antisense strand to SEQ ID NO: 563377
cacuucaaccaauugguuc

SEQ ID NO: 563379 - RNA, 19 nt, Artificial Sequence
  Description of Artificial Sequence: Synthetic oligonucleotide
  Sense strand starting at position 2823 of SEQ ID NO: 318446
ugaacugacaggcgagauu

SEQ ID NO: 563380 - RNA, 19 nt, Artificial Sequence
  Description of Artificial Sequence: Synthetic oligonucleotide
  Antisense strand to SEQ ID NO: 563379
aaucucgccugucaguuca

SEQ ID NO: 563381 - RNA, 19 nt, Artificial Sequence
  Description of Artificial Sequence: Synthetic oligonucleotide
  Sense strand starting at position 2835 of SEQ ID NO: 318446
cgagauugcgcaugggaac

SEQ ID NO: 563382 - RNA, 19 nt, Artificial Sequence
  Description of Artificial Sequence: Synthetic oligonucleotide
  Antisense strand to SEQ ID NO: 563381
guucccaugcgcaaucucg

SEQ ID NO: 563383 - RNA, 19 nt, Artificial Sequence
  Description of Artificial Sequence: Synthetic oligonucleotide
  Sense strand starting at position 3116 of SEQ ID NO: 318446
uccuuugcucagggaagaa

SEQ ID NO: 563384 - RNA, 19 nt, Artificial Sequence
  Description of Artificial Sequence: Synthetic oligonucleotide
  Antisense strand to SEQ ID NO: 563383
uucuucccugagcaaagga

SEQ ID NO: 563385 - RNA, 19 nt, Artificial Sequence
  Description of Artificial Sequence: Synthetic oligonucleotide
  Sense strand starting at position 3160 of SEQ ID NO: 318446
gaguucuuucugggaucua

SEQ ID NO: 563386 - RNA, 19 nt, Artificial Sequence
  Description of Artificial Sequence: Synthetic oligonucleotide
  Antisense strand to SEQ ID NO: 563385
uagaucccagaaagaacuc

SEQ ID NO: 563387 - RNA, 19 nt, Artificial Sequence
  Description of Artificial Sequence: Synthetic oligonucleotide
  Sense strand starting at position 3170 of SEQ ID NO: 318446
ugggaucuacuguaaguca

SEQ ID NO: 563388 - RNA, 19 nt, Artificial Sequence
  Description of Artificial Sequence: Synthetic oligonucleotide
  Antisense strand to SEQ ID NO: 563387
ugacuuacaguagauccca

SEQ ID NO: 563389 - RNA, 19 nt, Artificial Sequence
  Description of Artificial Sequence: Synthetic oligonucleotide
  Sense strand starting at position 3258 of SEQ ID NO: 318446
acgugucagcuacauacua

SEQ ID NO: 563390 - RNA, 19 nt, Artificial Sequence
  Description of Artificial Sequence: Synthetic oligonucleotide
  Antisense strand to SEQ ID NO: 563389
uaguauguagcugacacgu

SEQ ID NO: 563391 - RNA, 19 nt, Artificial Sequence
  Description of Artificial Sequence: Synthetic oligonucleotide
  Sense strand starting at position 3375 of SEQ ID NO: 318446
aguugaacuugacaaacaa

SEQ ID NO: 563392 - RNA, 19 nt, Artificial Sequence
  Description of Artificial Sequence: Synthetic oligonucleotide
  Antisense strand to SEQ ID NO: 563391
uuguuugucaaguucaacu

SEQ ID NO: 563393 - RNA, 19 nt, Artificial Sequence
  Description of Artificial Sequence: Synthetic oligonucleotide
  Sense strand starting at position 3447 of SEQ ID NO: 318446
uccuuagccaagugaggaa

SEQ ID NO: 563394 - RNA, 19 nt, Artificial Sequence
  Description of Artificial Sequence: Synthetic oligonucleotide
  Antisense strand to SEQ ID NO: 563393
uuccucacuuggcuaagga

SEQ ID NO: 563395 - RNA, 19 nt, Artificial Sequence
  Description of Artificial Sequence: Synthetic oligonucleotide
  Sense strand starting at position 3596 of SEQ ID NO: 318446
ucgugauucuuguuaauga

SEQ ID NO: 563396 - RNA, 19 nt, Artificial Sequence
  Description of Artificial Sequence: Synthetic oligonucleotide
  Antisense strand to SEQ ID NO: 563395
ucauuaacaagaaucacga

SEQ ID NO: 563397 - RNA, 19 nt, Artificial Sequence
  Description of Artificial Sequence: Synthetic oligonucleotide
  Sense strand starting at position 3612 of SEQ ID NO: 318446
ugacauauuguaggguauu

SEQ ID NO: 563398 - RNA, 19 nt, Artificial Sequence
  Description of Artificial Sequence: Synthetic oligonucleotide
  Antisense strand to SEQ ID NO: 563397
aauacccuacaauauguca

SEQ ID NO: 563399 - RNA, 19 nt, Artificial Sequence
  Description of Artificial Sequence: Synthetic oligonucleotide
  Sense strand starting at position 3638 of SEQ ID NO: 318446
aacauuacugccugugagu

SEQ ID NO: 563400 - RNA, 19 nt, Artificial Sequence
  Description of Artificial Sequence: Synthetic oligonucleotide
  Antisense strand to SEQ ID NO: 563399
acucacaggcaguaauguu

SEQ ID NO: 563401 - RNA, 19 nt, Artificial Sequence
  Description of Artificial Sequence: Synthetic oligonucleotide
  Sense strand starting at position 3675 of SEQ ID NO: 318446
aggucagucugguucaagu

SEQ ID NO: 563402 - RNA, 19 nt, Artificial Sequence
  Description of Artificial Sequence: Synthetic oligonucleotide
  Antisense strand to SEQ ID NO: 563401
acuugaaccagacugaccu

SEQ ID NO: 563403 - RNA, 19 nt, Artificial Sequence
  Description of Artificial Sequence: Synthetic oligonucleotide
  Sense strand starting at position 3720 of SEQ ID NO: 318446
gagcaugguacagguagau

SEQ ID NO: 563404 - RNA, 19 nt, Artificial Sequence
  Description of Artificial Sequence: Synthetic oligonucleotide
  Antisense strand to SEQ ID NO: 563403
aucuaccuguaccaugcuc

SEQ ID NO: 563405 - RNA, 19 nt, Artificial Sequence
  Description of Artificial Sequence: Synthetic oligonucleotide
  Sense strand starting at position 3735 of SEQ ID NO: 318446
agaugaugcugucuuggaa

SEQ ID NO: 563406 - RNA, 19 nt, Artificial Sequence
  Description of Artificial Sequence: Synthetic oligonucleotide
  Antisense strand to SEQ ID NO: 563405
uuccaagacagcaucaucu

SEQ ID NO: 563407 - RNA, 19 nt, Artificial Sequence
  Description of Artificial Sequence: Synthetic oligonucleotide
  Sense strand starting at position 3738 of SEQ ID NO: 318446
ugaugcugucuuggaaauu

SEQ ID NO: 563408 - RNA, 19 nt, Artificial Sequence
  Description of Artificial Sequence: Synthetic oligonucleotide
  Antisense strand to SEQ ID NO: 563407
aauuuccaagacagcauca

SEQ ID NO: 563409 - RNA, 19 nt, Artificial Sequence
  Description of Artificial Sequence: Synthetic oligonucleotide
  Sense strand starting at position 3739 of SEQ ID NO: 318446
gaugcugucuuggaaauuu

SEQ ID NO: 563410 - RNA, 19 nt, Artificial Sequence
  Description of Artificial Sequence: Synthetic oligonucleotide
  Antisense strand to SEQ ID NO: 563409
aaauuuccaagacagcauc

SEQ ID NO: 563411 - RNA, 19 nt, Artificial Sequence
  Description of Artificial Sequence: Synthetic oligonucleotide
  Sense strand starting at position 3748 of SEQ ID NO: 318446
uuggaaauuugacaugugu

SEQ ID NO: 563412 - RNA, 19 nt, Artificial Sequence
  Description of Artificial Sequence: Synthetic oligonucleotide
  Antisense strand to SEQ ID NO: 563411
acacaugucaaauuuccaa

SEQ ID NO: 563413 - RNA, 19 nt, Artificial Sequence
  Description of Artificial Sequence: Synthetic oligonucleotide
  Sense strand starting at position 3754 of SEQ ID NO: 318446
auuugacauguguguauuc

SEQ ID NO: 563414 - RNA, 19 nt, Artificial Sequence
  Description of Artificial Sequence: Synthetic oligonucleotide
  Antisense strand to SEQ ID NO: 563413
gaauacacacaugucaaau

SEQ ID NO: 563415 - RNA, 19 nt, Artificial Sequence
  Description of Artificial Sequence: Synthetic oligonucleotide
  Sense strand starting at position 3763 of SEQ ID NO: 318446
guguguauucuguaggaac

SEQ ID NO: 563416 - RNA, 19 nt, Artificial Sequence
  Description of Artificial Sequence: Synthetic oligonucleotide
  Antisense strand to SEQ ID NO: 563415
guuccuacagaauacacac

SEQ ID NO: 563417 - RNA, 19 nt, Artificial Sequence
  Description of Artificial Sequence: Synthetic oligonucleotide
  Sense strand starting at position 3765 of SEQ ID NO: 318446
guguauucuguaggaacag

SEQ ID NO: 563418 - RNA, 19 nt, Artificial Sequence
  Description of Artificial Sequence: Synthetic oligonucleotide
  Antisense strand to SEQ ID NO: 563417
cuguuccuacagaauacac

SEQ ID NO: 563419 - RNA, 19 nt, Artificial Sequence
  Description of Artificial Sequence: Synthetic oligonucleotide
  Sense strand starting at position 3841 of SEQ ID NO: 318446
aggcacaucugacuuugau

SEQ ID NO: 563420 - RNA, 19 nt, Artificial Sequence
  Description of Artificial Sequence: Synthetic oligonucleotide
  Antisense strand to SEQ ID NO: 563419
aucaaagucagaugugccu

SEQ ID NO: 563421 - RNA, 19 nt, Artificial Sequence
  Description of Artificial Sequence: Synthetic oligonucleotide
  Sense strand starting at position 3939 of SEQ ID NO: 318446
ucccauaggugguuuguau

SEQ ID NO: 563422 - RNA, 19 nt, Artificial Sequence
  Description of Artificial Sequence: Synthetic oligonucleotide
  Antisense strand to SEQ ID NO: 563421
auacaaaccaccuauggga

SEQ ID NO: 563423 - RNA, 19 nt, Artificial Sequence
  Description of Artificial Sequence: Synthetic oligonucleotide
  Sense strand starting at position 3947 of SEQ ID NO: 318446
gugguuuguauaugauucu

SEQ ID NO: 563424 - RNA, 19 nt, Artificial Sequence
  Description of Artificial Sequence: Synthetic oligonucleotide
  Antisense strand to SEQ ID NO: 563423
agaaucauauacaaaccac

SEQ ID NO: 563425 - RNA, 19 nt, Artificial Sequence
  Description of Artificial Sequence: Synthetic oligonucleotide
  Sense strand starting at position 3953 of SEQ ID NO: 318446
uguauaugauucuccuuag

SEQ ID NO: 563426 - RNA, 19 nt, Artificial Sequence
  Description of Artificial Sequence: Synthetic oligonucleotide
  Antisense strand to SEQ ID NO: 563425
cuaaggagaaucauauaca

SEQ ID NO: 563427 - RNA, 19 nt, Artificial Sequence
  Description of Artificial Sequence: Synthetic oligonucleotide
  Sense strand starting at position 3954 of SEQ ID NO: 318446
guauaugauucuccuuagu

SEQ ID NO: 563428 - RNA, 19 nt, Artificial Sequence
  Description of Artificial Sequence: Synthetic oligonucleotide
  Antisense strand to SEQ ID NO: 563427
acuaaggagaaucauauac

SEQ ID NO: 563429 - RNA, 19 nt, Artificial Sequence
  Description of Artificial Sequence: Synthetic oligonucleotide
  Sense strand starting at position 3956 of SEQ ID NO: 318446
auaugauucuccuuaguuu

SEQ ID NO: 563430 - RNA, 19 nt, Artificial Sequence
  Description of Artificial Sequence: Synthetic oligonucleotide
  Antisense strand to SEQ ID NO: 563429
aaacuaaggagaaucauau

SEQ ID NO: 563431 - RNA, 19 nt, Artificial Sequence
  Description of Artificial Sequence: Synthetic oligonucleotide
  Sense strand starting at position 3959 of SEQ ID NO: 318446
ugauucuccuuaguuuaca

SEQ ID NO: 563432 - RNA, 19 nt, Artificial Sequence
  Description of Artificial Sequence: Synthetic oligonucleotide
  Antisense strand to SEQ ID NO: 563431
uguaaacuaaggagaauca

SEQ ID NO: 563433 - RNA, 19 nt, Artificial Sequence
  Description of Artificial Sequence: Synthetic oligonucleotide
  Sense strand starting at position 219 of SEQ ID NO: 318447
acuggaccuucuuagauuu

SEQ ID NO: 563434 - RNA, 19 nt, Artificial Sequence
  Description of Artificial Sequence: Synthetic oligonucleotide
  Antisense strand to SEQ ID NO: 563433
aaaucuaagaagguccagu

SEQ ID NO: 563435 - RNA, 19 nt, Artificial Sequence
  Description of Artificial Sequence: Synthetic oligonucleotide
  Sense strand starting at position 238 of SEQ ID NO: 318447
cuauaucagugaguucuca

SEQ ID NO: 563436 - RNA, 19 nt, Artificial Sequence
  Description of Artificial Sequence: Synthetic oligonucleotide
  Antisense strand to SEQ ID NO: 563435
ugagaacucacugauauag

SEQ ID NO: 563437 - RNA, 19 nt, Artificial Sequence
  Description of Artificial Sequence: Synthetic oligonucleotide
  Sense strand starting at position 242 of SEQ ID NO: 318447
aucagugaguucucaaaca

SEQ ID NO: 563438 - RNA, 19 nt, Artificial Sequence
  Description of Artificial Sequence: Synthetic oligonucleotide
  Antisense strand to SEQ ID NO: 563437
uguuugagaacucacugau

SEQ ID NO: 563439 - RNA, 19 nt, Artificial Sequence
  Description of Artificial Sequence: Synthetic oligonucleotide
  Sense strand starting at position 289 of SEQ ID NO: 318447
cuuaacugucacuguacaa

SEQ ID NO: 563440 - RNA, 19 nt, Artificial Sequence
  Description of Artificial Sequence: Synthetic oligonucleotide
  Antisense strand to SEQ ID NO: 563439
uuguacagugacaguuaag

SEQ ID NO: 563441 - RNA, 19 nt, Artificial Sequence
  Description of Artificial Sequence: Synthetic oligonucleotide
  Sense strand starting at position 576 of SEQ ID NO: 318447
ucuugugggacucagcaau

SEQ ID NO: 563442 - RNA, 19 nt, Artificial Sequence
  Description of Artificial Sequence: Synthetic oligonucleotide
  Antisense strand to SEQ ID NO: 563441
auugcugagucccacaaga

SEQ ID NO: 563443 - RNA, 19 nt, Artificial Sequence
  Description of Artificial Sequence: Synthetic oligonucleotide
  Sense strand starting at position 596 of SEQ ID NO: 318447
cugaguugagcugaaucuu

SEQ ID NO: 563444 - RNA, 19 nt, Artificial Sequence
  Description of Artificial Sequence: Synthetic oligonucleotide
  Antisense strand to SEQ ID NO: 563443
aagauucagcucaacucag

SEQ ID NO: 563445 - RNA, 19 nt, Artificial Sequence
  Description of Artificial Sequence: Synthetic oligonucleotide
  Sense strand starting at position 605 of SEQ ID NO: 318447
gcugaaucuuaagcaauca

SEQ ID NO: 563446 - RNA, 19 nt, Artificial Sequence
  Description of Artificial Sequence: Synthetic oligonucleotide
  Antisense strand to SEQ ID NO: 563445
ugauugcuuaagauucagc

SEQ ID NO: 563447 - RNA, 19 nt, Artificial Sequence
  Description of Artificial Sequence: Synthetic oligonucleotide
  Sense strand starting at position 726 of SEQ ID NO: 318447
uggauucuacaagguaguu

SEQ ID NO: 563448 - RNA, 19 nt, Artificial Sequence
  Description of Artificial Sequence: Synthetic oligonucleotide
  Antisense strand to SEQ ID NO: 563447
aacuaccuuguagaaucca

SEQ ID NO: 563449 - RNA, 19 nt, Artificial Sequence
  Description of Artificial Sequence: Synthetic oligonucleotide
  Sense strand starting at position 758 of SEQ ID NO: 318447
agucaagauugcucaucua

SEQ ID NO: 563450 - RNA, 19 nt, Artificial Sequence
  Description of Artificial Sequence: Synthetic oligonucleotide
  Antisense strand to SEQ ID NO: 563449
uagaugagcaaucuugacu

SEQ ID NO: 563451 - RNA, 19 nt, Artificial Sequence
  Description of Artificial Sequence: Synthetic oligonucleotide
  Sense strand starting at position 824 of SEQ ID NO: 318447
uuuagaaacuugccugagu

SEQ ID NO: 563452 - RNA, 19 nt, Artificial Sequence
  Description of Artificial Sequence: Synthetic oligonucleotide
  Antisense strand to SEQ ID NO: 563451
acucaggcaaguuucuaaa

SEQ ID NO: 563453 - RNA, 19 nt, Artificial Sequence
  Description of Artificial Sequence: Synthetic oligonucleotide
  Sense strand starting at position 826 of SEQ ID NO: 318447
uagaaacuugccugaguca

SEQ ID NO: 563454 - RNA, 19 nt, Artificial Sequence
  Description of Artificial Sequence: Synthetic oligonucleotide
  Antisense strand to SEQ ID NO: 563453
ugacucaggcaaguuucua

SEQ ID NO: 563455 - RNA, 19 nt, Artificial Sequence
  Description of Artificial Sequence: Synthetic oligonucleotide
  Sense strand starting at position 888 of SEQ ID NO: 318447
ugacuaguggcugaauguu

SEQ ID NO: 563456 - RNA, 19 nt, Artificial Sequence
  Description of Artificial Sequence: Synthetic oligonucleotide
  Antisense strand to SEQ ID NO: 563455
aacauucagccacuaguca

SEQ ID NO: 563457 - RNA, 19 nt, Artificial Sequence
  Description of Artificial Sequence: Synthetic oligonucleotide
  Sense strand starting at position 978 of SEQ ID NO: 318447
ugaauuucuuagcaaugaa

SEQ ID NO: 563458 - RNA, 19 nt, Artificial Sequence
  Description of Artificial Sequence: Synthetic oligonucleotide
  Antisense strand to SEQ ID NO: 563457
uucauugcuaagaaauuca

SEQ ID NO: 563459 - RNA, 19 nt, Artificial Sequence
  Description of Artificial Sequence: Synthetic oligonucleotide
  Sense strand starting at position 1060 of SEQ ID NO: 318447
cugacaguccauuguauca

SEQ ID NO: 563460 - RNA, 19 nt, Artificial Sequence
  Description of Artificial Sequence: Synthetic oligonucleotide
  Antisense strand to SEQ ID NO: 563459
ugauacaauggacugucag

SEQ ID NO: 563461 - RNA, 19 nt, Artificial Sequence
  Description of Artificial Sequence: Synthetic oligonucleotide
  Sense strand starting at position 1195 of SEQ ID NO: 318447
agcaaugcccuauacaguu

SEQ ID NO: 563462 - RNA, 19 nt, Artificial Sequence
  Description of Artificial Sequence: Synthetic oligonucleotide
  Antisense strand to SEQ ID NO: 563461
aacuguauagggcauugcu

SEQ ID NO: 563463 - RNA, 19 nt, Artificial Sequence
  Description of Artificial Sequence: Synthetic oligonucleotide
  Sense strand starting at position 1524 of SEQ ID NO: 318447
augugaaaguuuccaucac

SEQ ID NO: 563464 - RNA, 19 nt, Artificial Sequence
  Description of Artificial Sequence: Synthetic oligonucleotide
  Antisense strand to SEQ ID NO: 563463
gugauggaaacuuucacau

SEQ ID NO: 563465 - RNA, 19 nt, Artificial Sequence
  Description of Artificial Sequence: Synthetic oligonucleotide
  Sense strand starting at position 1642 of SEQ ID NO: 318447
acacguuuaccacaguuaa

SEQ ID NO: 563466 - RNA, 19 nt, Artificial Sequence
  Description of Artificial Sequence: Synthetic oligonucleotide
  Antisense strand to SEQ ID NO: 563465
uuaacugugguaaacgugu

SEQ ID NO: 563467 - RNA, 19 nt, Artificial Sequence
  Description of Artificial Sequence: Synthetic oligonucleotide
  Sense strand starting at position 2220 of SEQ ID NO: 318447
aggaacuuccuugguugaa

SEQ ID NO: 563468 - RNA, 19 nt, Artificial Sequence
  Description of Artificial Sequence: Synthetic oligonucleotide
  Antisense strand to SEQ ID NO: 563467
uucaaccaaggaaguuccu

SEQ ID NO: 563469 - RNA, 19 nt, Artificial Sequence
  Description of Artificial Sequence: Synthetic oligonucleotide
  Sense strand starting at position 2221 of SEQ ID NO: 318447
ggaacuuccuugguugaau

SEQ ID NO: 563470 - RNA, 19 nt, Artificial Sequence
  Description of Artificial Sequence: Synthetic oligonucleotide
  Antisense strand to SEQ ID NO: 563469
auucaaccaaggaaguucc

SEQ ID NO: 563471 - RNA, 19 nt, Artificial Sequence
  Description of Artificial Sequence: Synthetic oligonucleotide
  Sense strand starting at position 2222 of SEQ ID NO: 318447
gaacuuccuugguugaauc

SEQ ID NO: 563472 - RNA, 19 nt, Artificial Sequence
  Description of Artificial Sequence: Synthetic oligonucleotide
  Antisense strand to SEQ ID NO: 563471
gauucaaccaaggaaguuc

SEQ ID NO: 563473 - RNA, 19 nt, Artificial Sequence
  Description of Artificial Sequence: Synthetic oligonucleotide
  Sense strand starting at position 2288 of SEQ ID NO: 318447
ggaacacacuugucagagu

SEQ ID NO: 563474 - RNA, 19 nt, Artificial Sequence
  Description of Artificial Sequence: Synthetic oligonucleotide
  Antisense strand to SEQ ID NO: 563473
acucugacaaguguguucc

SEQ ID NO: 563475 - RNA, 19 nt, Artificial Sequence
  Description of Artificial Sequence: Synthetic oligonucleotide
  Sense strand starting at position 2459 of SEQ ID NO: 318447
guugcuagaaaguggaaau

SEQ ID NO: 563476 - RNA, 19 nt, Artificial Sequence
  Description of Artificial Sequence: Synthetic oligonucleotide
  Antisense strand to SEQ ID NO: 563475
auuuccacuuucuagcaac

SEQ ID NO: 563477 - RNA, 19 nt, Artificial Sequence
  Description of Artificial Sequence: Synthetic oligonucleotide
  Sense strand starting at position 2975 of SEQ ID NO: 318447
ggcaacaguggguaagauu

SEQ ID NO: 563478 - RNA, 19 nt, Artificial Sequence
  Description of Artificial Sequence: Synthetic oligonucleotide
  Antisense strand to SEQ ID NO: 563477
aaucuuacccacuguugcc

SEQ ID NO: 563479 - RNA, 19 nt, Artificial Sequence
  Description of Artificial Sequence: Synthetic oligonucleotide
  Sense strand starting at position 3018 of SEQ ID NO: 318447
guggguguuguguuaguuu

SEQ ID NO: 563480 - RNA, 19 nt, Artificial Sequence
  Description of Artificial Sequence: Synthetic oligonucleotide
  Antisense strand to SEQ ID NO: 563479
aaacuaacacaacacccac

SEQ ID NO: 563481 - RNA, 19 nt, Artificial Sequence
  Description of Artificial Sequence: Synthetic oligonucleotide
  Sense strand starting at position 3041 of SEQ ID NO: 318447
guguauuugucuuuggcuu

SEQ ID NO: 563482 - RNA, 19 nt, Artificial Sequence
  Description of Artificial Sequence: Synthetic oligonucleotide
  Antisense strand to SEQ ID NO: 563481
aagccaaagacaaauacac

SEQ ID NO: 563483 - RNA, 19 nt, Artificial Sequence
  Description of Artificial Sequence: Synthetic oligonucleotide
  Sense strand starting at position 3042 of SEQ ID NO: 318447
uguauuugucuuuggcuuu

SEQ ID NO: 563484 - RNA, 19 nt, Artificial Sequence
  Description of Artificial Sequence: Synthetic oligonucleotide
  Antisense strand to SEQ ID NO: 563483
aaagccaaagacaaauaca

SEQ ID NO: 563485 - RNA, 19 nt, Artificial Sequence
  Description of Artificial Sequence: Synthetic oligonucleotide
  Sense strand starting at position 3108 of SEQ ID NO: 318447
ugaagaggauuagauaaau

SEQ ID NO: 563486 - RNA, 19 nt, Artificial Sequence
  Description of Artificial Sequence: Synthetic oligonucleotide
  Antisense strand to SEQ ID NO: 563485
auuuaucuaauccucuuca

SEQ ID NO: 563487 - RNA, 19 nt, Artificial Sequence
  Description of Artificial Sequence: Synthetic oligonucleotide
  Sense strand starting at position 3158 of SEQ ID NO: 318447
gggauuaaccgccaaacug

SEQ ID NO: 563488 - RNA, 19 nt, Artificial Sequence
  Description of Artificial Sequence: Synthetic oligonucleotide
  Antisense strand to SEQ ID NO: 563487
caguuuggcgguuaauccc

SEQ ID NO: 563489 - RNA, 19 nt, Artificial Sequence
  Description of Artificial Sequence: Synthetic oligonucleotide
  Sense strand starting at position 3172 of SEQ ID NO: 318447
aacugagugucuuccuaga

SEQ ID NO: 563490 - RNA, 19 nt, Artificial Sequence
  Description of Artificial Sequence: Synthetic oligonucleotide
  Antisense strand to SEQ ID NO: 563489
ucuaggaagacacucaguu

SEQ ID NO: 563491 - RNA, 19 nt, Artificial Sequence
  Description of Artificial Sequence: Synthetic oligonucleotide
  Sense strand starting at position 3292 of SEQ ID NO: 318447
augguaacucuagaagcau

SEQ ID NO: 563492 - RNA, 19 nt, Artificial Sequence
  Description of Artificial Sequence: Synthetic oligonucleotide
  Antisense strand to SEQ ID NO: 563491
augcuucuagaguuaccau

SEQ ID NO: 563493 - RNA, 19 nt, Artificial Sequence
  Description of Artificial Sequence: Synthetic oligonucleotide
  Sense strand starting at position 3429 of SEQ ID NO: 318447
gugccagcugucucagcau

SEQ ID NO: 563494 - RNA, 19 nt, Artificial Sequence
  Description of Artificial Sequence: Synthetic oligonucleotide
  Antisense strand to SEQ ID NO: 563493
augcugagacagcuggcac

SEQ ID NO: 563495 - RNA, 19 nt, Artificial Sequence
  Description of Artificial Sequence: Synthetic oligonucleotide
  Sense strand starting at position 3462 of SEQ ID NO: 318447
gaugaaucaugaguaaacg

SEQ ID NO: 563496 - RNA, 19 nt, Artificial Sequence
  Description of Artificial Sequence: Synthetic oligonucleotide
  Antisense strand to SEQ ID NO: 563495
cguuuacucaugauucauc

SEQ ID NO: 563497 - RNA, 19 nt, Artificial Sequence
  Description of Artificial Sequence: Synthetic oligonucleotide
  Sense strand starting at position 3559 of SEQ ID NO: 318447
aaccuauguugaguaaagu

SEQ ID NO: 563498 - RNA, 19 nt, Artificial Sequence
  Description of Artificial Sequence: Synthetic oligonucleotide
  Antisense strand to SEQ ID NO: 563497
acuuuacucaacauagguu

SEQ ID NO: 563499 - RNA, 19 nt, Artificial Sequence
  Description of Artificial Sequence: Synthetic oligonucleotide
  Sense strand starting at position 3565 of SEQ ID NO: 318447
uguugaguaaagugacauc

SEQ ID NO: 563500 - RNA, 19 nt, Artificial Sequence
  Description of Artificial Sequence: Synthetic oligonucleotide
  Antisense strand to SEQ ID NO: 563499
gaugucacuuuacucaaca

SEQ ID NO: 563501 - RNA, 19 nt, Artificial Sequence
  Description of Artificial Sequence: Synthetic oligonucleotide
  Sense strand starting at position 3627 of SEQ ID NO: 318447
ccauuaaaucaggaugcuu

SEQ ID NO: 563502 - RNA, 19 nt, Artificial Sequence
  Description of Artificial Sequence: Synthetic oligonucleotide
  Antisense strand to SEQ ID NO: 563501
aagcauccugauuuaaugg

SEQ ID NO: 563503 - RNA, 19 nt, Artificial Sequence
  Description of Artificial Sequence: Synthetic oligonucleotide
  Sense strand starting at position 3669 of SEQ ID NO: 318447
cugaauuagcugcacaaca

SEQ ID NO: 563504 - RNA, 19 nt, Artificial Sequence
  Description of Artificial Sequence: Synthetic oligonucleotide
  Antisense strand to SEQ ID NO: 563503
uguugugcagcuaauucag

SEQ ID NO: 563505 - RNA, 19 nt, Artificial Sequence
  Description of Artificial Sequence: Synthetic oligonucleotide
  Sense strand starting at position 3791 of SEQ ID NO: 318447
gcagaaauauuagucaguu

SEQ ID NO: 563506 - RNA, 19 nt, Artificial Sequence
  Description of Artificial Sequence: Synthetic oligonucleotide
  Antisense strand to SEQ ID NO: 563505
aacugacuaauauuucugc

SEQ ID NO: 563507 - RNA, 19 nt, Artificial Sequence
  Description of Artificial Sequence: Synthetic oligonucleotide
  Sense strand starting at position 3895 of SEQ ID NO: 318447
aauggauguuacguugaua

SEQ ID NO: 563508 - RNA, 19 nt, Artificial Sequence
  Description of Artificial Sequence: Synthetic oligonucleotide
  Antisense strand to SEQ ID NO: 563507
uaucaacguaacauccauu

SEQ ID NO: 563509 - RNA, 19 nt, Artificial Sequence
  Description of Artificial Sequence: Synthetic oligonucleotide
  Sense strand starting at position 3898 of SEQ ID NO: 318447
ggauguuacguugauaaau

SEQ ID NO: 563510 - RNA, 19 nt, Artificial Sequence
  Description of Artificial Sequence: Synthetic oligonucleotide
  Antisense strand to SEQ ID NO: 563509
auuuaucaacguaacaucc

SEQ ID NO: 563511 - RNA, 19 nt, Artificial Sequence
  Description of Artificial Sequence: Synthetic oligonucleotide
  Sense strand starting at position 3930 of SEQ ID NO: 318447
agcagagauguacaugcuu

SEQ ID NO: 563512 - RNA, 19 nt, Artificial Sequence
  Description of Artificial Sequence: Synthetic oligonucleotide
  Antisense strand to SEQ ID NO: 563511
aagcauguacaucucugcu

SEQ ID NO: 563513 - RNA, 19 nt, Artificial Sequence
  Description of Artificial Sequence: Synthetic oligonucleotide
  Sense strand starting at position 217 of SEQ ID NO: 318448
ugaagcaucucagugaaug

SEQ ID NO: 563514 - RNA, 19 nt, Artificial Sequence
  Description of Artificial Sequence: Synthetic oligonucleotide
  Antisense strand to SEQ ID NO: 563513
cauucacugagaugcuuca

SEQ ID NO: 563515 - RNA, 19 nt, Artificial Sequence
  Description of Artificial Sequence: Synthetic oligonucleotide
  Sense strand starting at position 218 of SEQ ID NO: 318448
gaagcaucucagugaaugg

SEQ ID NO: 563516 - RNA, 19 nt, Artificial Sequence
  Description of Artificial Sequence: Synthetic oligonucleotide
  Antisense strand to SEQ ID NO: 563515
ccauucacugagaugcuuc

SEQ ID NO: 563517 - RNA, 19 nt, Artificial Sequence
  Description of Artificial Sequence: Synthetic oligonucleotide
  Sense strand starting at position 222 of SEQ ID NO: 318448
caucucagugaauggagau

SEQ ID NO: 563518 - RNA, 19 nt, Artificial Sequence
  Description of Artificial Sequence: Synthetic oligonucleotide
  Antisense strand to SEQ ID NO: 563517
aucuccauucacugagaug

SEQ ID NO: 563519 - RNA, 19 nt, Artificial Sequence
  Description of Artificial Sequence: Synthetic oligonucleotide
  Sense strand starting at position 378 of SEQ ID NO: 318448
cuuguuaggcaucauuaag

SEQ ID NO: 563520 - RNA, 19 nt, Artificial Sequence
  Description of Artificial Sequence: Synthetic oligonucleotide
  Antisense strand to SEQ ID NO: 563519
cuuaaugaugccuaacaag

SEQ ID NO: 563521 - RNA, 19 nt, Artificial Sequence
  Description of Artificial Sequence: Synthetic oligonucleotide
  Sense strand starting at position 542 of SEQ ID NO: 318448
gugagacucucuucgcuaa

SEQ ID NO: 563522 - RNA, 19 nt, Artificial Sequence
  Description of Artificial Sequence: Synthetic oligonucleotide
  Antisense strand to SEQ ID NO: 563521
uuagcgaagagagucucac

SEQ ID NO: 563523 - RNA, 19 nt, Artificial Sequence
  Description of Artificial Sequence: Synthetic oligonucleotide
  Sense strand starting at position 784 of SEQ ID NO: 318448
cucaacauuucugggagua

SEQ ID NO: 563524 - RNA, 19 nt, Artificial Sequence
  Description of Artificial Sequence: Synthetic oligonucleotide
  Antisense strand to SEQ ID NO: 563523
uacucccagaaauguugag

SEQ ID NO: 563525 - RNA, 19 nt, Artificial Sequence
  Description of Artificial Sequence: Synthetic oligonucleotide
  Sense strand starting at position 796 of SEQ ID NO: 318448
gggaguaaaguugggcuua

SEQ ID NO: 563526 - RNA, 19 nt, Artificial Sequence
  Description of Artificial Sequence: Synthetic oligonucleotide
  Antisense strand to SEQ ID NO: 563525
uaagcccaacuuuacuccc

SEQ ID NO: 563527 - RNA, 19 nt, Artificial Sequence
  Description of Artificial Sequence: Synthetic oligonucleotide
  Sense strand starting at position 974 of SEQ ID NO: 318448
gcgaaacucaaaggaguua

SEQ ID NO: 563528 - RNA, 19 nt, Artificial Sequence
  Description of Artificial Sequence: Synthetic oligonucleotide
  Antisense strand to SEQ ID NO: 563527
uaacuccuuugaguuucgc

SEQ ID NO: 563529 - RNA, 19 nt, Artificial Sequence
  Description of Artificial Sequence: Synthetic oligonucleotide
  Sense strand starting at position 2429 of SEQ ID NO: 318448
gugguaguggcgaguguuu

SEQ ID NO: 563530 - RNA, 19 nt, Artificial Sequence
  Description of Artificial Sequence: Synthetic oligonucleotide
  Antisense strand to SEQ ID NO: 563529
aaacacucgccacuaccac

SEQ ID NO: 563531 - RNA, 19 nt, Artificial Sequence
  Description of Artificial Sequence: Synthetic oligonucleotide
  Sense strand starting at position 2534 of SEQ ID NO: 318448
ucacguucuccggacugaa

SEQ ID NO: 563532 - RNA, 19 nt, Artificial Sequence
  Description of Artificial Sequence: Synthetic oligonucleotide
  Antisense strand to SEQ ID NO: 563531
uucaguccggagaacguga

SEQ ID NO: 563533 - RNA, 19 nt, Artificial Sequence
  Description of Artificial Sequence: Synthetic oligonucleotide
  Sense strand starting at position 2550 of SEQ ID NO: 318448
gaaccaauugguugaagug

SEQ ID NO: 563534 - RNA, 19 nt, Artificial Sequence
  Description of Artificial Sequence: Synthetic oligonucleotide
  Antisense strand to SEQ ID NO: 563533
cacuucaaccaauugguuc

SEQ ID NO: 563535 - RNA, 19 nt, Artificial Sequence
  Description of Artificial Sequence: Synthetic oligonucleotide
  Sense strand starting at position 2660 of SEQ ID NO: 318448
ugaacugacaggcgagauu

SEQ ID NO: 563536 - RNA, 19 nt, Artificial Sequence
  Description of Artificial Sequence: Synthetic oligonucleotide
  Antisense strand to SEQ ID NO: 563535
aaucucgccugucaguuca

SEQ ID NO: 563537 - RNA, 19 nt, Artificial Sequence
  Description of Artificial Sequence: Synthetic oligonucleotide
  Sense strand starting at position 2672 of SEQ ID NO: 318448
cgagauugcgcaugggaac

SEQ ID NO: 563538 - RNA, 19 nt, Artificial Sequence
  Description of Artificial Sequence: Synthetic oligonucleotide
  Antisense strand to SEQ ID NO: 563537
guucccaugcgcaaucucg

SEQ ID NO: 563539 - RNA, 19 nt, Artificial Sequence
  Description of Artificial Sequence: Synthetic oligonucleotide
  Sense strand starting at position 2953 of SEQ ID NO: 318448
uccuuugcucagggaagaa

SEQ ID NO: 563540 - RNA, 19 nt, Artificial Sequence
  Description of Artificial Sequence: Synthetic oligonucleotide
  Antisense strand to SEQ ID NO: 563539
uucuucccugagcaaagga

SEQ ID NO: 563541 - RNA, 19 nt, Artificial Sequence
  Description of Artificial Sequence: Synthetic oligonucleotide
  Sense strand starting at position 2997 of SEQ ID NO: 318448
gaguucuuucugggaucua

SEQ ID NO: 563542 - RNA, 19 nt, Artificial Sequence
  Description of Artificial Sequence: Synthetic oligonucleotide
  Antisense strand to SEQ ID NO: 563541
uagaucccagaaagaacuc

SEQ ID NO: 563543 - RNA, 19 nt, Artificial Sequence
  Description of Artificial Sequence: Synthetic oligonucleotide
  Sense strand starting at position 3007 of SEQ ID NO: 318448
ugggaucuacuguaaguca

SEQ ID NO: 563544 - RNA, 19 nt, Artificial Sequence
  Description of Artificial Sequence: Synthetic oligonucleotide
  Antisense strand to SEQ ID NO: 563543
ugacuuacaguagauccca

SEQ ID NO: 563545 - RNA, 19 nt, Artificial Sequence
  Description of Artificial Sequence: Synthetic oligonucleotide
  Sense strand starting at position 3095 of SEQ ID NO: 318448
acgugucagcuacauacua

SEQ ID NO: 563546 - RNA, 19 nt, Artificial Sequence
  Description of Artificial Sequence: Synthetic oligonucleotide
  Antisense strand to SEQ ID NO: 563545
uaguauguagcugacacgu

SEQ ID NO: 563547 - RNA, 19 nt, Artificial Sequence
  Description of Artificial Sequence: Synthetic oligonucleotide
  Sense strand starting at position 3212 of SEQ ID NO: 318448
aguugaacuugacaaacaa

SEQ ID NO: 563548 - RNA, 19 nt, Artificial Sequence
  Description of Artificial Sequence: Synthetic oligonucleotide
  Antisense strand to SEQ ID NO: 563547
uuguuugucaaguucaacu

SEQ ID NO: 563549 - RNA, 19 nt, Artificial Sequence
  Description of Artificial Sequence: Synthetic oligonucleotide
  Sense strand starting at position 3284 of SEQ ID NO: 318448
uccuuagccaagugaggaa

SEQ ID NO: 563550 - RNA, 19 nt, Artificial Sequence
  Description of Artificial Sequence: Synthetic oligonucleotide
  Antisense strand to SEQ ID NO: 563549
uuccucacuuggcuaagga

SEQ ID NO: 563551 - RNA, 19 nt, Artificial Sequence
  Description of Artificial Sequence: Synthetic oligonucleotide
  Sense strand starting at position 3406 of SEQ ID NO: 318448
gcuggcaauuucuacaaua

SEQ ID NO: 563552 - RNA, 19 nt, Artificial Sequence
  Description of Artificial Sequence: Synthetic oligonucleotide
  Antisense strand to SEQ ID NO: 563551
uauuguagaaauugccagc

SEQ ID NO: 563553 - RNA, 19 nt, Artificial Sequence
  Description of Artificial Sequence: Synthetic oligonucleotide
  Sense strand starting at position 3433 of SEQ ID NO: 318448
ucgugauucuuguuaauga

SEQ ID NO: 563554 - RNA, 19 nt, Artificial Sequence
  Description of Artificial Sequence: Synthetic oligonucleotide
  Antisense strand to SEQ ID NO: 563553
ucauuaacaagaaucacga

SEQ ID NO: 563555 - RNA, 19 nt, Artificial Sequence
  Description of Artificial Sequence: Synthetic oligonucleotide
  Sense strand starting at position 3449 of SEQ ID NO: 318448
ugacauauuguaggguauu

SEQ ID NO: 563556 - RNA, 19 nt, Artificial Sequence
  Description of Artificial Sequence: Synthetic oligonucleotide
  Antisense strand to SEQ ID NO: 563555
aauacccuacaauauguca

SEQ ID NO: 563557 - RNA, 19 nt, Artificial Sequence
  Description of Artificial Sequence: Synthetic oligonucleotide
  Sense strand starting at position 3475 of SEQ ID NO: 318448
aacauuacugccugugagu

SEQ ID NO: 563558 - RNA, 19 nt, Artificial Sequence
  Description of Artificial Sequence: Synthetic oligonucleotide
  Antisense strand to SEQ ID NO: 563557
acucacaggcaguaauguu

SEQ ID NO: 563559 - RNA, 19 nt, Artificial Sequence
  Description of Artificial Sequence: Synthetic oligonucleotide
  Sense strand starting at position 3512 of SEQ ID NO: 318448
aggucagucugguucaagu

SEQ ID NO: 563560 - RNA, 19 nt, Artificial Sequence
  Description of Artificial Sequence: Synthetic oligonucleotide
  Antisense strand to SEQ ID NO: 563559
acuugaaccagacugaccu

SEQ ID NO: 563561 - RNA, 19 nt, Artificial Sequence
  Description of Artificial Sequence: Synthetic oligonucleotide
  Sense strand starting at position 3557 of SEQ ID NO: 318448
gagcaugguacagguagau

SEQ ID NO: 563562 - RNA, 19 nt, Artificial Sequence
  Description of Artificial Sequence: Synthetic oligonucleotide
  Antisense strand to SEQ ID NO: 563561
aucuaccuguaccaugcuc

SEQ ID NO: 563563 - RNA, 19 nt, Artificial Sequence
  Description of Artificial Sequence: Synthetic oligonucleotide
  Sense strand starting at position 3572 of SEQ ID NO: 318448
agaugaugcugucuuggaa

SEQ ID NO: 563564 - RNA, 19 nt, Artificial Sequence
  Description of Artificial Sequence: Synthetic oligonucleotide
  Antisense strand to SEQ ID NO: 563563
uuccaagacagcaucaucu

SEQ ID NO: 563565 - RNA, 19 nt, Artificial Sequence
  Description of Artificial Sequence: Synthetic oligonucleotide
  Sense strand starting at position 3575 of SEQ ID NO: 318448
ugaugcugucuuggaaauu

SEQ ID NO: 563566 - RNA, 19 nt, Artificial Sequence
  Description of Artificial Sequence: Synthetic oligonucleotide
  Antisense strand to SEQ ID NO: 563565
aauuuccaagacagcauca

SEQ ID NO: 563567 - RNA, 19 nt, Artificial Sequence
  Description of Artificial Sequence: Synthetic oligonucleotide
  Sense strand starting at position 3576 of SEQ ID NO: 318448
gaugcugucuuggaaauuu

SEQ ID NO: 563568 - RNA, 19 nt, Artificial Sequence
  Description of Artificial Sequence: Synthetic oligonucleotide
  Antisense strand to SEQ ID NO: 563567
aaauuuccaagacagcauc

SEQ ID NO: 563569 - RNA, 19 nt, Artificial Sequence
  Description of Artificial Sequence: Synthetic oligonucleotide
  Sense strand starting at position 3585 of SEQ ID NO: 318448
uuggaaauuugacaugugu

SEQ ID NO: 563570 - RNA, 19 nt, Artificial Sequence
  Description of Artificial Sequence: Synthetic oligonucleotide
  Antisense strand to SEQ ID NO: 563569
acacaugucaaauuuccaa

SEQ ID NO: 563571 - RNA, 19 nt, Artificial Sequence
  Description of Artificial Sequence: Synthetic oligonucleotide
  Sense strand starting at position 3591 of SEQ ID NO: 318448
auuugacauguguguauuc

SEQ ID NO: 563572 - RNA, 19 nt, Artificial Sequence
  Description of Artificial Sequence: Synthetic oligonucleotide
  Antisense strand to SEQ ID NO: 563571
gaauacacacaugucaaau

SEQ ID NO: 563573 - RNA, 19 nt, Artificial Sequence
  Description of Artificial Sequence: Synthetic oligonucleotide
  Sense strand starting at position 3600 of SEQ ID NO: 318448
guguguauucuguaggaac

SEQ ID NO: 563574 - RNA, 19 nt, Artificial Sequence
  Description of Artificial Sequence: Synthetic oligonucleotide
  Antisense strand to SEQ ID NO: 563573
guuccuacagaauacacac

SEQ ID NO: 563575 - RNA, 19 nt, Artificial Sequence
  Description of Artificial Sequence: Synthetic oligonucleotide
  Sense strand starting at position 3602 of SEQ ID NO: 318448
guguauucuguaggaacag

SEQ ID NO: 563576 - RNA, 19 nt, Artificial Sequence
  Description of Artificial Sequence: Synthetic oligonucleotide
  Antisense strand to SEQ ID NO: 563575
cuguuccuacagaauacac

SEQ ID NO: 563577 - RNA, 19 nt, Artificial Sequence
  Description of Artificial Sequence: Synthetic oligonucleotide
  Sense strand starting at position 3678 of SEQ ID NO: 318448
aggcacaucugacuuugau

SEQ ID NO: 563578 - RNA, 19 nt, Artificial Sequence
  Description of Artificial Sequence: Synthetic oligonucleotide
  Antisense strand to SEQ ID NO: 563577
aucaaagucagaugugccu

SEQ ID NO: 563579 - RNA, 19 nt, Artificial Sequence
  Description of Artificial Sequence: Synthetic oligonucleotide
  Sense strand starting at position 3776 of SEQ ID NO: 318448
ucccauaggugguuuguau

SEQ ID NO: 563580 - RNA, 19 nt, Artificial Sequence
  Description of Artificial Sequence: Synthetic oligonucleotide
  Antisense strand to SEQ ID NO: 563579
auacaaaccaccuauggga

SEQ ID NO: 563581 - RNA, 19 nt, Artificial Sequence
  Description of Artificial Sequence: Synthetic oligonucleotide
  Sense strand starting at position 3784 of SEQ ID NO: 318448
gugguuuguauaugauucu

SEQ ID NO: 563582 - RNA, 19 nt, Artificial Sequence
  Description of Artificial Sequence: Synthetic oligonucleotide
  Antisense strand to SEQ ID NO: 563581
agaaucauauacaaaccac

SEQ ID NO: 563583 - RNA, 19 nt, Artificial Sequence
  Description of Artificial Sequence: Synthetic oligonucleotide
  Sense strand starting at position 3790 of SEQ ID NO: 318448
uguauaugauucuccuuag

SEQ ID NO: 563584 - RNA, 19 nt, Artificial Sequence
  Description of Artificial Sequence: Synthetic oligonucleotide
  Antisense strand to SEQ ID NO: 563583
cuaaggagaaucauauaca

SEQ ID NO: 563585 - RNA, 19 nt, Artificial Sequence
  Description of Artificial Sequence: Synthetic oligonucleotide
  Sense strand starting at position 3791 of SEQ ID NO: 318448
guauaugauucuccuuagu

SEQ ID NO: 563586 - RNA, 19 nt, Artificial Sequence
  Description of Artificial Sequence: Synthetic oligonucleotide
  Antisense strand to SEQ ID NO: 563585
acuaaggagaaucauauac

SEQ ID NO: 563587 - RNA, 19 nt, Artificial Sequence
  Description of Artificial Sequence: Synthetic oligonucleotide
  Sense strand starting at position 3793 of SEQ ID NO: 318448
auaugauucuccuuaguuu

SEQ ID NO: 563588 - RNA, 19 nt, Artificial Sequence
  Description of Artificial Sequence: Synthetic oligonucleotide
  Antisense strand to SEQ ID NO: 563587
aaacuaaggagaaucauau

SEQ ID NO: 563589 - RNA, 19 nt, Artificial Sequence
  Description of Artificial Sequence: Synthetic oligonucleotide
  Sense strand starting at position 3796 of SEQ ID NO: 318448
ugauucuccuuaguuuaca

SEQ ID NO: 563590 - RNA, 19 nt, Artificial Sequence
  Description of Artificial Sequence: Synthetic oligonucleotide
  Antisense strand to SEQ ID NO: 563589
uguaaacuaaggagaauca

SEQ ID NO: 563591 - RNA, 19 nt, Artificial Sequence
  Description of Artificial Sequence: Synthetic oligonucleotide
  Sense strand starting at position 3835 of SEQ ID NO: 318448
caagucuaacucuggauga

SEQ ID NO: 563592 - RNA, 19 nt, Artificial Sequence
  Description of Artificial Sequence: Synthetic oligonucleotide
  Antisense strand to SEQ ID NO: 563591
ucauccagaguuagacuug

SEQ ID NO: 563593 - RNA, 19 nt, Artificial Sequence
  Description of Artificial Sequence: Synthetic oligonucleotide
  Sense strand starting at position 38 of SEQ ID NO: 318449
uagugaggaaucugagguu

SEQ ID NO: 563594 - RNA, 19 nt, Artificial Sequence
  Description of Artificial Sequence: Synthetic oligonucleotide
  Antisense strand to SEQ ID NO: 563593
aaccucagauuccucacua

SEQ ID NO: 563595 - RNA, 19 nt, Artificial Sequence
  Description of Artificial Sequence: Synthetic oligonucleotide
  Sense strand starting at position 62 of SEQ ID NO: 318449
gaguaagagacuuguccag

SEQ ID NO: 563596 - RNA, 19 nt, Artificial Sequence
  Description of Artificial Sequence: Synthetic oligonucleotide
  Antisense strand to SEQ ID NO: 563595
cuggacaagucucuuacuc

SEQ ID NO: 563597 - RNA, 19 nt, Artificial Sequence
  Description of Artificial Sequence: Synthetic oligonucleotide
  Sense strand starting at position 64 of SEQ ID NO: 318449
guaagagacuuguccagag

SEQ ID NO: 563598 - RNA, 19 nt, Artificial Sequence
  Description of Artificial Sequence: Synthetic oligonucleotide
  Antisense strand to SEQ ID NO: 563597
cucuggacaagucucuuac

SEQ ID NO: 563599 - RNA, 19 nt, Artificial Sequence
  Description of Artificial Sequence: Synthetic oligonucleotide
  Sense strand starting at position 118 of SEQ ID NO: 318449
agcuacucccuagauuguu

SEQ ID NO: 563600 - RNA, 19 nt, Artificial Sequence
  Description of Artificial Sequence: Synthetic oligonucleotide
  Antisense strand to SEQ ID NO: 563599
aacaaucuagggaguagcu

SEQ ID NO: 563601 - RNA, 19 nt, Artificial Sequence
  Description of Artificial Sequence: Synthetic oligonucleotide
  Sense strand starting at position 501 of SEQ ID NO: 318449
cuugaaucagacugccuua

SEQ ID NO: 563602 - RNA, 19 nt, Artificial Sequence
  Description of Artificial Sequence: Synthetic oligonucleotide
  Antisense strand to SEQ ID NO: 563601
uaaggcagucugauucaag

SEQ ID NO: 563603 - RNA, 19 nt, Artificial Sequence
  Description of Artificial Sequence: Synthetic oligonucleotide
  Sense strand starting at position 531 of SEQ ID NO: 318449
gguucuagaacguaaaguu

SEQ ID NO: 563604 - RNA, 19 nt, Artificial Sequence
  Description of Artificial Sequence: Synthetic oligonucleotide
  Antisense strand to SEQ ID NO: 563603
aacuuuacguucuagaacc

SEQ ID NO: 563605 - RNA, 19 nt, Artificial Sequence
  Description of Artificial Sequence: Synthetic oligonucleotide
  Sense strand starting at position 676 of SEQ ID NO: 318449
uuaguauaccucuggacau

SEQ ID NO: 563606 - RNA, 19 nt, Artificial Sequence
  Description of Artificial Sequence: Synthetic oligonucleotide
  Antisense strand to SEQ ID NO: 563605
auguccagagguauacuaa

SEQ ID NO: 563607 - RNA, 19 nt, Artificial Sequence
  Description of Artificial Sequence: Synthetic oligonucleotide
  Sense strand starting at position 738 of SEQ ID NO: 318449
ucauaugguugauuaacaa

SEQ ID NO: 563608 - RNA, 19 nt, Artificial Sequence
  Description of Artificial Sequence: Synthetic oligonucleotide
  Antisense strand to SEQ ID NO: 563607
uuguuaaucaaccauauga

SEQ ID NO: 563609 - RNA, 19 nt, Artificial Sequence
  Description of Artificial Sequence: Synthetic oligonucleotide
  Sense strand starting at position 864 of SEQ ID NO: 318449
auuguugggcuccauuaua

SEQ ID NO: 563610 - RNA, 19 nt, Artificial Sequence
  Description of Artificial Sequence: Synthetic oligonucleotide
  Antisense strand to SEQ ID NO: 563609
uauaauggagcccaacaau

SEQ ID NO: 563611 - RNA, 19 nt, Artificial Sequence
  Description of Artificial Sequence: Synthetic oligonucleotide
  Sense strand starting at position 976 of SEQ ID NO: 318449
ugccaaaucccagagcuuu

SEQ ID NO: 563612 - RNA, 19 nt, Artificial Sequence
  Description of Artificial Sequence: Synthetic oligonucleotide
  Antisense strand to SEQ ID NO: 563611
aaagcucugggauuuggca

SEQ ID NO: 563613 - RNA, 19 nt, Artificial Sequence
  Description of Artificial Sequence: Synthetic oligonucleotide
  Sense strand starting at position 1000 of SEQ ID NO: 318449
guguuauuacaguggauuu

SEQ ID NO: 563614 - RNA, 19 nt, Artificial Sequence
  Description of Artificial Sequence: Synthetic oligonucleotide
  Antisense strand to SEQ ID NO: 563613
aaauccacuguaauaacac

SEQ ID NO: 563615 - RNA, 19 nt, Artificial Sequence
  Description of Artificial Sequence: Synthetic oligonucleotide
  Sense strand starting at position 1213 of SEQ ID NO: 318449
ccuagauucccuuggaaua

SEQ ID NO: 563616 - RNA, 19 nt, Artificial Sequence
  Description of Artificial Sequence: Synthetic oligonucleotide
  Antisense strand to SEQ ID NO: 563615
uauuccaagggaaucuagg

SEQ ID NO: 563617 - RNA, 19 nt, Artificial Sequence
  Description of Artificial Sequence: Synthetic oligonucleotide
  Sense strand starting at position 1214 of SEQ ID NO: 318449
cuagauucccuuggaauag

SEQ ID NO: 563618 - RNA, 19 nt, Artificial Sequence
  Description of Artificial Sequence: Synthetic oligonucleotide
  Antisense strand to SEQ ID NO: 563617
cuauuccaagggaaucuag

SEQ ID NO: 563619 - RNA, 19 nt, Artificial Sequence
  Description of Artificial Sequence: Synthetic oligonucleotide
  Sense strand starting at position 1243 of SEQ ID NO: 318449
uuguuaaccuggucacaaa

SEQ ID NO: 563620 - RNA, 19 nt, Artificial Sequence
  Description of Artificial Sequence: Synthetic oligonucleotide
  Antisense strand to SEQ ID NO: 563619
uuugugaccagguuaacaa

SEQ ID NO: 563621 - RNA, 19 nt, Artificial Sequence
  Description of Artificial Sequence: Synthetic oligonucleotide
  Sense strand starting at position 1279 of SEQ ID NO: 318449
ugcugaauugggcaacauu

SEQ ID NO: 563622 - RNA, 19 nt, Artificial Sequence
  Description of Artificial Sequence: Synthetic oligonucleotide
  Antisense strand to SEQ ID NO: 563621
aauguugcccaauucagca

SEQ ID NO: 563623 - RNA, 19 nt, Artificial Sequence
  Description of Artificial Sequence: Synthetic oligonucleotide
  Sense strand starting at position 1603 of SEQ ID NO: 318449
uuaucagggcaguaaguua

SEQ ID NO: 563624 - RNA, 19 nt, Artificial Sequence
  Description of Artificial Sequence: Synthetic oligonucleotide
  Antisense strand to SEQ ID NO: 563623
uaacuuacugcccugauaa

SEQ ID NO: 563625 - RNA, 19 nt, Artificial Sequence
  Description of Artificial Sequence: Synthetic oligonucleotide
  Sense strand starting at position 1656 of SEQ ID NO: 318449
gccagaaguagguaugcaa

SEQ ID NO: 563626 - RNA, 19 nt, Artificial Sequence
  Description of Artificial Sequence: Synthetic oligonucleotide
  Antisense strand to SEQ ID NO: 563625
uugcauaccuacuucuggc

SEQ ID NO: 563627 - RNA, 19 nt, Artificial Sequence
  Description of Artificial Sequence: Synthetic oligonucleotide
  Sense strand starting at position 1660 of SEQ ID NO: 318449
gaaguagguaugcaaguua

SEQ ID NO: 563628 - RNA, 19 nt, Artificial Sequence
  Description of Artificial Sequence: Synthetic oligonucleotide
  Antisense strand to SEQ ID NO: 563627
uaacuugcauaccuacuuc

SEQ ID NO: 563629 - RNA, 19 nt, Artificial Sequence
  Description of Artificial Sequence: Synthetic oligonucleotide
  Sense strand starting at position 1786 of SEQ ID NO: 318449
auuaccucgccugaaauga

SEQ ID NO: 563630 - RNA, 19 nt, Artificial Sequence
  Description of Artificial Sequence: Synthetic oligonucleotide
  Antisense strand to SEQ ID NO: 563629
ucauuucaggcgagguaau

SEQ ID NO: 563631 - RNA, 19 nt, Artificial Sequence
  Description of Artificial Sequence: Synthetic oligonucleotide
  Sense strand starting at position 2170 of SEQ ID NO: 318449
cagagaguugaacacguuu

SEQ ID NO: 563632 - RNA, 19 nt, Artificial Sequence
  Description of Artificial Sequence: Synthetic oligonucleotide
  Antisense strand to SEQ ID NO: 563631
aaacguguucaacucucug

SEQ ID NO: 563633 - RNA, 19 nt, Artificial Sequence
  Description of Artificial Sequence: Synthetic oligonucleotide
  Sense strand starting at position 2316 of SEQ ID NO: 318449
acugauucuuccuuugaag

SEQ ID NO: 563634 - RNA, 19 nt, Artificial Sequence
  Description of Artificial Sequence: Synthetic oligonucleotide
  Antisense strand to SEQ ID NO: 563633
cuucaaaggaagaaucagu

SEQ ID NO: 563635 - RNA, 19 nt, Artificial Sequence
  Description of Artificial Sequence: Synthetic oligonucleotide
  Sense strand starting at position 2327 of SEQ ID NO: 318449
cuuugaagauguuuaaugu

SEQ ID NO: 563636 - RNA, 19 nt, Artificial Sequence
  Description of Artificial Sequence: Synthetic oligonucleotide
  Antisense strand to SEQ ID NO: 563635
acauuaaacaucuucaaag

SEQ ID NO: 563637 - RNA, 19 nt, Artificial Sequence
  Description of Artificial Sequence: Synthetic oligonucleotide
  Sense strand starting at position 2502 of SEQ ID NO: 318449
guaguuuauuaacccaaca

SEQ ID NO: 563638 - RNA, 19 nt, Artificial Sequence
  Description of Artificial Sequence: Synthetic oligonucleotide
  Antisense strand to SEQ ID NO: 563637
uguuggguuaauaaacuac

SEQ ID NO: 563639 - RNA, 19 nt, Artificial Sequence
  Description of Artificial Sequence: Synthetic oligonucleotide
  Sense strand starting at position 2706 of SEQ ID NO: 318449
ggacauauguagguuucca

SEQ ID NO: 563640 - RNA, 19 nt, Artificial Sequence
  Description of Artificial Sequence: Synthetic oligonucleotide
  Antisense strand to SEQ ID NO: 563639
uggaaaccuacauaugucc

SEQ ID NO: 563641 - RNA, 19 nt, Artificial Sequence
  Description of Artificial Sequence: Synthetic oligonucleotide
  Sense strand starting at position 2710 of SEQ ID NO: 318449
auauguagguuuccaaaua

SEQ ID NO: 563642 - RNA, 19 nt, Artificial Sequence
  Description of Artificial Sequence: Synthetic oligonucleotide
  Antisense strand to SEQ ID NO: 563641
uauuuggaaaccuacauau

SEQ ID NO: 563643 - RNA, 19 nt, Artificial Sequence
  Description of Artificial Sequence: Synthetic oligonucleotide
  Sense strand starting at position 2731 of SEQ ID NO: 318449
guauucucuccugauugga

SEQ ID NO: 563644 - RNA, 19 nt, Artificial Sequence
  Description of Artificial Sequence: Synthetic oligonucleotide
  Antisense strand to SEQ ID NO: 563643
uccaaucaggagagaauac

SEQ ID NO: 563645 - RNA, 19 nt, Artificial Sequence
  Description of Artificial Sequence: Synthetic oligonucleotide
  Sense strand starting at position 2733 of SEQ ID NO: 318449
auucucuccugauuggauu

SEQ ID NO: 563646 - RNA, 19 nt, Artificial Sequence
  Description of Artificial Sequence: Synthetic oligonucleotide
  Antisense strand to SEQ ID NO: 563645
aauccaaucaggagagaau

SEQ ID NO: 563647 - RNA, 19 nt, Artificial Sequence
  Description of Artificial Sequence: Synthetic oligonucleotide
  Sense strand starting at position 2747 of SEQ ID NO: 318449
ggauuacaacuugggucau

SEQ ID NO: 563648 - RNA, 19 nt, Artificial Sequence
  Description of Artificial Sequence: Synthetic oligonucleotide
  Antisense strand to SEQ ID NO: 563647
augacccaaguuguaaucc

SEQ ID NO: 563649 - RNA, 19 nt, Artificial Sequence
  Description of Artificial Sequence: Synthetic oligonucleotide
  Sense strand starting at position 2791 of SEQ ID NO: 318449
uugggaagguggucaguua

SEQ ID NO: 563650 - RNA, 19 nt, Artificial Sequence
  Description of Artificial Sequence: Synthetic oligonucleotide
  Antisense strand to SEQ ID NO: 563649
uaacugaccaccuucccaa

SEQ ID NO: 563651 - RNA, 19 nt, Artificial Sequence
  Description of Artificial Sequence: Synthetic oligonucleotide
  Sense strand starting at position 2792 of SEQ ID NO: 318449
ugggaagguggucaguuaa

SEQ ID NO: 563652 - RNA, 19 nt, Artificial Sequence
  Description of Artificial Sequence: Synthetic oligonucleotide
  Antisense strand to SEQ ID NO: 563651
uuaacugaccaccuuccca

SEQ ID NO: 563653 - RNA, 19 nt, Artificial Sequence
  Description of Artificial Sequence: Synthetic oligonucleotide
  Sense strand starting at position 2810 of SEQ ID NO: 318449
acagcugaggagugguaaa

SEQ ID NO: 563654 - RNA, 19 nt, Artificial Sequence
  Description of Artificial Sequence: Synthetic oligonucleotide
  Antisense strand to SEQ ID NO: 563653
uuuaccacuccucagcugu

SEQ ID NO: 563655 - RNA, 19 nt, Artificial Sequence
  Description of Artificial Sequence: Synthetic oligonucleotide
  Sense strand starting at position 2845 of SEQ ID NO: 318449
acgauauacuuccuagaag

SEQ ID NO: 563656 - RNA, 19 nt, Artificial Sequence
  Description of Artificial Sequence: Synthetic oligonucleotide
  Antisense strand to SEQ ID NO: 563655
cuucuaggaaguauaucgu

SEQ ID NO: 563657 - RNA, 19 nt, Artificial Sequence
  Description of Artificial Sequence: Synthetic oligonucleotide
  Sense strand starting at position 3271 of SEQ ID NO: 318449
acuggaccuucuuagauuu

SEQ ID NO: 563658 - RNA, 19 nt, Artificial Sequence
  Description of Artificial Sequence: Synthetic oligonucleotide
  Antisense strand to SEQ ID NO: 563657
aaaucuaagaagguccagu

SEQ ID NO: 563659 - RNA, 19 nt, Artificial Sequence
  Description of Artificial Sequence: Synthetic oligonucleotide
  Sense strand starting at position 3294 of SEQ ID NO: 318449
aucagugaguucucaaaca

SEQ ID NO: 563660 - RNA, 19 nt, Artificial Sequence
  Description of Artificial Sequence: Synthetic oligonucleotide
  Antisense strand to SEQ ID NO: 563659
uguuugagaacucacugau

SEQ ID NO: 563661 - RNA, 19 nt, Artificial Sequence
  Description of Artificial Sequence: Synthetic oligonucleotide
  Sense strand starting at position 3628 of SEQ ID NO: 318449
ucuugugggacucagcaau

SEQ ID NO: 563662 - RNA, 19 nt, Artificial Sequence
  Description of Artificial Sequence: Synthetic oligonucleotide
  Antisense strand to SEQ ID NO: 563661
auugcugagucccacaaga

SEQ ID NO: 563663 - RNA, 19 nt, Artificial Sequence
  Description of Artificial Sequence: Synthetic oligonucleotide
  Sense strand starting at position 3648 of SEQ ID NO: 318449
cugaguugagcugaaucuu

SEQ ID NO: 563664 - RNA, 19 nt, Artificial Sequence
  Description of Artificial Sequence: Synthetic oligonucleotide
  Antisense strand to SEQ ID NO: 563663
aagauucagcucaacucag

SEQ ID NO: 563665 - RNA, 19 nt, Artificial Sequence
  Description of Artificial Sequence: Synthetic oligonucleotide
  Sense strand starting at position 3657 of SEQ ID NO: 318449
gcugaaucuuaagcaauca

SEQ ID NO: 563666 - RNA, 19 nt, Artificial Sequence
  Description of Artificial Sequence: Synthetic oligonucleotide
  Antisense strand to SEQ ID NO: 563665
ugauugcuuaagauucagc

SEQ ID NO: 563667 - RNA, 19 nt, Artificial Sequence
  Description of Artificial Sequence: Synthetic oligonucleotide
  Sense strand starting at position 3778 of SEQ ID NO: 318449
uggauucuacaagguaguu

SEQ ID NO: 563668 - RNA, 19 nt, Artificial Sequence
  Description of Artificial Sequence: Synthetic oligonucleotide
  Antisense strand to SEQ ID NO: 563667
aacuaccuuguagaaucca

SEQ ID NO: 563669 - RNA, 19 nt, Artificial Sequence
  Description of Artificial Sequence: Synthetic oligonucleotide
  Sense strand starting at position 3878 of SEQ ID NO: 318449
uagaaacuugccugaguca

SEQ ID NO: 563670 - RNA, 19 nt, Artificial Sequence
  Description of Artificial Sequence: Synthetic oligonucleotide
  Antisense strand to SEQ ID NO: 563669
ugacucaggcaaguuucua

SEQ ID NO: 563671 - RNA, 19 nt, Artificial Sequence
  Description of Artificial Sequence: Synthetic oligonucleotide
  Sense strand starting at position 3940 of SEQ ID NO: 318449
ugacuaguggcugaauguu

SEQ ID NO: 563672 - RNA, 19 nt, Artificial Sequence
  Description of Artificial Sequence: Synthetic oligonucleotide
  Antisense strand to SEQ ID NO: 563671
aacauucagccacuaguca

SEQ ID NO: 563673 - RNA, 19 nt, Artificial Sequence
  Description of Artificial Sequence: Synthetic oligonucleotide
  Sense strand starting at position 1 of SEQ ID NO: 318450
uuaagcugucuacaggaau

SEQ ID NO: 563674 - RNA, 19 nt, Artificial Sequence
  Description of Artificial Sequence: Synthetic oligonucleotide
  Antisense strand to SEQ ID NO: 563673
auuccuguagacagcuuaa

SEQ ID NO: 563675 - RNA, 19 nt, Artificial Sequence
  Description of Artificial Sequence: Synthetic oligonucleotide
  Sense strand starting at position 4 of SEQ ID NO: 318450
agcugucuacaggaaugua

SEQ ID NO: 563676 - RNA, 19 nt, Artificial Sequence
  Description of Artificial Sequence: Synthetic oligonucleotide
  Antisense strand to SEQ ID NO: 563675
uacauuccuguagacagcu

SEQ ID NO: 563677 - RNA, 19 nt, Artificial Sequence
  Description of Artificial Sequence: Synthetic oligonucleotide
  Sense strand starting at position 14 of SEQ ID NO: 318450
aggaauguacugugaagua

SEQ ID NO: 563678 - RNA, 19 nt, Artificial Sequence
  Description of Artificial Sequence: Synthetic oligonucleotide
  Antisense strand to SEQ ID NO: 563677
uacuucacaguacauuccu

SEQ ID NO: 563679 - RNA, 19 nt, Artificial Sequence
  Description of Artificial Sequence: Synthetic oligonucleotide
  Sense strand starting at position 19 of SEQ ID NO: 318450
uguacugugaaguacuuau

SEQ ID NO: 563680 - RNA, 19 nt, Artificial Sequence
  Description of Artificial Sequence: Synthetic oligonucleotide
  Antisense strand to SEQ ID NO: 563679
auaaguacuucacaguaca

SEQ ID NO: 563681 - RNA, 19 nt, Artificial Sequence
  Description of Artificial Sequence: Synthetic oligonucleotide
  Sense strand starting at position 23 of SEQ ID NO: 318450
cugugaaguacuuauguug

SEQ ID NO: 563682 - RNA, 19 nt, Artificial Sequence
  Description of Artificial Sequence: Synthetic oligonucleotide
  Antisense strand to SEQ ID NO: 563681
caacauaaguacuucacag

SEQ ID NO: 563683 - RNA, 19 nt, Artificial Sequence
  Description of Artificial Sequence: Synthetic oligonucleotide
  Sense strand starting at position 26 of SEQ ID NO: 318450
ugaaguacuuauguuggaa

SEQ ID NO: 563684 - RNA, 19 nt, Artificial Sequence
  Description of Artificial Sequence: Synthetic oligonucleotide
  Antisense strand to SEQ ID NO: 563683
uuccaacauaaguacuuca

SEQ ID NO: 563685 - RNA, 19 nt, Artificial Sequence
  Description of Artificial Sequence: Synthetic oligonucleotide
  Sense strand starting at position 40 of SEQ ID NO: 318450
uggaauguacugugaagua

SEQ ID NO: 563686 - RNA, 19 nt, Artificial Sequence
  Description of Artificial Sequence: Synthetic oligonucleotide
  Antisense strand to SEQ ID NO: 563685
uacuucacaguacauucca

SEQ ID NO: 563687 - RNA, 19 nt, Artificial Sequence
  Description of Artificial Sequence: Synthetic oligonucleotide
  Sense strand starting at position 52 of SEQ ID NO: 318450
ugaaguacauuccugcaaa

SEQ ID NO: 563688 - RNA, 19 nt, Artificial Sequence
  Description of Artificial Sequence: Synthetic oligonucleotide
  Antisense strand to SEQ ID NO: 563687
uuugcaggaauguacuuca

SEQ ID NO: 563689 - RNA, 19 nt, Artificial Sequence
  Description of Artificial Sequence: Synthetic oligonucleotide
  Sense strand starting at position 69 of SEQ ID NO: 318450
aaaccaauauggguaguuu

SEQ ID NO: 563690 - RNA, 19 nt, Artificial Sequence
  Description of Artificial Sequence: Synthetic oligonucleotide
  Antisense strand to SEQ ID NO: 563689
aaacuacccauauugguuu

SEQ ID NO: 563691 - RNA, 19 nt, Artificial Sequence
  Description of Artificial Sequence: Synthetic oligonucleotide
  Sense strand starting at position 165 of SEQ ID NO: 318450
aucaccuuuccauguauga

SEQ ID NO: 563692 - RNA, 19 nt, Artificial Sequence
  Description of Artificial Sequence: Synthetic oligonucleotide
  Antisense strand to SEQ ID NO: 563691
ucauacauggaaaggugau

SEQ ID NO: 563693 - RNA, 19 nt, Artificial Sequence
  Description of Artificial Sequence: Synthetic oligonucleotide
  Sense strand starting at position 235 of SEQ ID NO: 318450
gggcucugugaacaucuga

SEQ ID NO: 563694 - RNA, 19 nt, Artificial Sequence
  Description of Artificial Sequence: Synthetic oligonucleotide
  Antisense strand to SEQ ID NO: 563693
ucagauguucacagagccc

SEQ ID NO: 563695 - RNA, 19 nt, Artificial Sequence
  Description of Artificial Sequence: Synthetic oligonucleotide
  Sense strand starting at position 284 of SEQ ID NO: 318450
guaagauucuuccugugaa

SEQ ID NO: 563696 - RNA, 19 nt, Artificial Sequence
  Description of Artificial Sequence: Synthetic oligonucleotide
  Antisense strand to SEQ ID NO: 563695
uucacaggaagaaucuuac

SEQ ID NO: 563697 - RNA, 19 nt, Artificial Sequence
  Description of Artificial Sequence: Synthetic oligonucleotide
  Sense strand starting at position 361 of SEQ ID NO: 318450
uuagaaauggcaugaaguc

SEQ ID NO: 563698 - RNA, 19 nt, Artificial Sequence
  Description of Artificial Sequence: Synthetic oligonucleotide
  Antisense strand to SEQ ID NO: 563697
gacuucaugccauuucuaa

SEQ ID NO: 563699 - RNA, 19 nt, Artificial Sequence
  Description of Artificial Sequence: Synthetic oligonucleotide
  Sense strand starting at position 413 of SEQ ID NO: 318450
ucuagaacugucgauuauc

SEQ ID NO: 563700 - RNA, 19 nt, Artificial Sequence
  Description of Artificial Sequence: Synthetic oligonucleotide
  Antisense strand to SEQ ID NO: 563699
gauaaucgacaguucuaga

SEQ ID NO: 563701 - RNA, 19 nt, Artificial Sequence
  Description of Artificial Sequence: Synthetic oligonucleotide
  Sense strand starting at position 418 of SEQ ID NO: 318450
aacugucgauuaucagaca

SEQ ID NO: 563702 - RNA, 19 nt, Artificial Sequence
  Description of Artificial Sequence: Synthetic oligonucleotide
  Antisense strand to SEQ ID NO: 563701
ugucugauaaucgacaguu

SEQ ID NO: 563703 - RNA, 19 nt, Artificial Sequence
  Description of Artificial Sequence: Synthetic oligonucleotide
  Sense strand starting at position 487 of SEQ ID NO: 318450
aguuauaaaucagugugau

SEQ ID NO: 563704 - RNA, 19 nt, Artificial Sequence
  Description of Artificial Sequence: Synthetic oligonucleotide
  Antisense strand to SEQ ID NO: 563703
aucacacugauuuauaacu

SEQ ID NO: 563705 - RNA, 19 nt, Artificial Sequence
  Description of Artificial Sequence: Synthetic oligonucleotide
  Sense strand starting at position 488 of SEQ ID NO: 318450
guuauaaaucagugugauc

SEQ ID NO: 563706 - RNA, 19 nt, Artificial Sequence
  Description of Artificial Sequence: Synthetic oligonucleotide
  Antisense strand to SEQ ID NO: 563705
gaucacacugauuuauaac

SEQ ID NO: 563707 - RNA, 19 nt, Artificial Sequence
  Description of Artificial Sequence: Synthetic oligonucleotide
  Sense strand starting at position 773 of SEQ ID NO: 318450
gacugcaaguucccugaga

SEQ ID NO: 563708 - RNA, 19 nt, Artificial Sequence
  Description of Artificial Sequence: Synthetic oligonucleotide
  Antisense strand to SEQ ID NO: 563707
ucucagggaacuugcaguc

SEQ ID NO: 563709 - RNA, 19 nt, Artificial Sequence
  Description of Artificial Sequence: Synthetic oligonucleotide
  Sense strand starting at position 843 of SEQ ID NO: 318450
guaggcgcucaauaauuaa

SEQ ID NO: 563710 - RNA, 19 nt, Artificial Sequence
  Description of Artificial Sequence: Synthetic oligonucleotide
  Antisense strand to SEQ ID NO: 563709
uuaauuauugagcgccuac

SEQ ID NO: 563711 - RNA, 19 nt, Artificial Sequence
  Description of Artificial Sequence: Synthetic oligonucleotide
  Sense strand starting at position 846 of SEQ ID NO: 318450
ggcgcucaauaauuaauaa

SEQ ID NO: 563712 - RNA, 19 nt, Artificial Sequence
  Description of Artificial Sequence: Synthetic oligonucleotide
  Antisense strand to SEQ ID NO: 563711
uuauuaauuauugagcgcc

SEQ ID NO: 563713 - RNA, 19 nt, Artificial Sequence
  Description of Artificial Sequence: Synthetic oligonucleotide
  Sense strand starting at position 1011 of SEQ ID NO: 318450
ucacuuguacuguaauucu

SEQ ID NO: 563714 - RNA, 19 nt, Artificial Sequence
  Description of Artificial Sequence: Synthetic oligonucleotide
  Antisense strand to SEQ ID NO: 563713
agaauuacaguacaaguga

SEQ ID NO: 563715 - RNA, 19 nt, Artificial Sequence
  Description of Artificial Sequence: Synthetic oligonucleotide
  Sense strand starting at position 1037 of SEQ ID NO: 318450
cuguaugagggcgaggaua

SEQ ID NO: 563716 - RNA, 19 nt, Artificial Sequence
  Description of Artificial Sequence: Synthetic oligonucleotide
  Antisense strand to SEQ ID NO: 563715
uauccucgcccucauacag

SEQ ID NO: 563717 - RNA, 19 nt, Artificial Sequence
  Description of Artificial Sequence: Synthetic oligonucleotide
  Sense strand starting at position 1050 of SEQ ID NO: 318450
aggauaguaagaugucauc

SEQ ID NO: 563718 - RNA, 19 nt, Artificial Sequence
  Description of Artificial Sequence: Synthetic oligonucleotide
  Antisense strand to SEQ ID NO: 563717
gaugacaucuuacuauccu

SEQ ID NO: 563719 - RNA, 19 nt, Artificial Sequence
  Description of Artificial Sequence: Synthetic oligonucleotide
  Sense strand starting at position 1085 of SEQ ID NO: 318450
uuccacaaugcuugagaca

SEQ ID NO: 563720 - RNA, 19 nt, Artificial Sequence
  Description of Artificial Sequence: Synthetic oligonucleotide
  Antisense strand to SEQ ID NO: 563719
ugucucaagcauuguggaa

SEQ ID NO: 563721 - RNA, 19 nt, Artificial Sequence
  Description of Artificial Sequence: Synthetic oligonucleotide
  Sense strand starting at position 1303 of SEQ ID NO: 318450
gucuccucuggccaauuaa

SEQ ID NO: 563722 - RNA, 19 nt, Artificial Sequence
  Description of Artificial Sequence: Synthetic oligonucleotide
  Antisense strand to SEQ ID NO: 563721
uuaauuggccagaggagac

SEQ ID NO: 563723 - RNA, 19 nt, Artificial Sequence
  Description of Artificial Sequence: Synthetic oligonucleotide
  Sense strand starting at position 2225 of SEQ ID NO: 318450
cguggacccugacucauaa

SEQ ID NO: 563724 - RNA, 19 nt, Artificial Sequence
  Description of Artificial Sequence: Synthetic oligonucleotide
  Antisense strand to SEQ ID NO: 563723
uuaugagucaggguccacg

SEQ ID NO: 563725 - RNA, 19 nt, Artificial Sequence
  Description of Artificial Sequence: Synthetic oligonucleotide
  Sense strand starting at position 2524 of SEQ ID NO: 318450
ucauucuuugucugcauuu

SEQ ID NO: 563726 - RNA, 19 nt, Artificial Sequence
  Description of Artificial Sequence: Synthetic oligonucleotide
  Antisense strand to SEQ ID NO: 563725
aaaugcagacaaagaauga

SEQ ID NO: 563727 - RNA, 19 nt, Artificial Sequence
  Description of Artificial Sequence: Synthetic oligonucleotide
  Sense strand starting at position 2576 of SEQ ID NO: 318450
auuccacugcaaugagaau

SEQ ID NO: 563728 - RNA, 19 nt, Artificial Sequence
  Description of Artificial Sequence: Synthetic oligonucleotide
  Antisense strand to SEQ ID NO: 563727
auucucauugcaguggaau

SEQ ID NO: 563729 - RNA, 19 nt, Artificial Sequence
  Description of Artificial Sequence: Synthetic oligonucleotide
  Sense strand starting at position 2587 of SEQ ID NO: 318450
augagaauuuauuggagca

SEQ ID NO: 563730 - RNA, 19 nt, Artificial Sequence
  Description of Artificial Sequence: Synthetic oligonucleotide
  Antisense strand to SEQ ID NO: 563729
ugcuccaauaaauucucau

SEQ ID NO: 563731 - RNA, 19 nt, Artificial Sequence
  Description of Artificial Sequence: Synthetic oligonucleotide
  Sense strand starting at position 2603 of SEQ ID NO: 318450
gcagaauugggucaaaguu

SEQ ID NO: 563732 - RNA, 19 nt, Artificial Sequence
  Description of Artificial Sequence: Synthetic oligonucleotide
  Antisense strand to SEQ ID NO: 563731
aacuuugacccaauucugc

SEQ ID NO: 563733 - RNA, 19 nt, Artificial Sequence
  Description of Artificial Sequence: Synthetic oligonucleotide
  Sense strand starting at position 2685 of SEQ ID NO: 318450
uguaguauuuaagagggaa

SEQ ID NO: 563734 - RNA, 19 nt, Artificial Sequence
  Description of Artificial Sequence: Synthetic oligonucleotide
  Antisense strand to SEQ ID NO: 563733
uucccucuuaaauacuaca

SEQ ID NO: 563735 - RNA, 19 nt, Artificial Sequence
  Description of Artificial Sequence: Synthetic oligonucleotide
  Sense strand starting at position 3009 of SEQ ID NO: 318450
uugugcuugaugucgcuaa

SEQ ID NO: 563736 - RNA, 19 nt, Artificial Sequence
  Description of Artificial Sequence: Synthetic oligonucleotide
  Antisense strand to SEQ ID NO: 563735
uuagcgacaucaagcacaa

SEQ ID NO: 563737 - RNA, 19 nt, Artificial Sequence
  Description of Artificial Sequence: Synthetic oligonucleotide
  Sense strand starting at position 3011 of SEQ ID NO: 318450
gugcuugaugucgcuaagu

SEQ ID NO: 563738 - RNA, 19 nt, Artificial Sequence
  Description of Artificial Sequence: Synthetic oligonucleotide
  Antisense strand to SEQ ID NO: 563737
acuuagcgacaucaagcac

SEQ ID NO: 563739 - RNA, 19 nt, Artificial Sequence
  Description of Artificial Sequence: Synthetic oligonucleotide
  Sense strand starting at position 3045 of SEQ ID NO: 318450
uguuguauuuauccugcuu

SEQ ID NO: 563740 - RNA, 19 nt, Artificial Sequence
  Description of Artificial Sequence: Synthetic oligonucleotide
  Antisense strand to SEQ ID NO: 563739
aagcaggauaaauacaaca

SEQ ID NO: 563741 - RNA, 19 nt, Artificial Sequence
  Description of Artificial Sequence: Synthetic oligonucleotide
  Sense strand starting at position 3069 of SEQ ID NO: 318450
ucauaaagcucuuuaagug

SEQ ID NO: 563742 - RNA, 19 nt, Artificial Sequence
  Description of Artificial Sequence: Synthetic oligonucleotide
  Antisense strand to SEQ ID NO: 563741
cacuuaaagagcuuuauga

SEQ ID NO: 563743 - RNA, 19 nt, Artificial Sequence
  Description of Artificial Sequence: Synthetic oligonucleotide
  Sense strand starting at position 3073 of SEQ ID NO: 318450
aaagcucuuuaagugugaa

SEQ ID NO: 563744 - RNA, 19 nt, Artificial Sequence
  Description of Artificial Sequence: Synthetic oligonucleotide
  Antisense strand to SEQ ID NO: 563743
uucacacuuaaagagcuuu

SEQ ID NO: 563745 - RNA, 19 nt, Artificial Sequence
  Description of Artificial Sequence: Synthetic oligonucleotide
  Sense strand starting at position 3125 of SEQ ID NO: 318450
ggucacuaguucuuuaaau

SEQ ID NO: 563746 - RNA, 19 nt, Artificial Sequence
  Description of Artificial Sequence: Synthetic oligonucleotide
  Antisense strand to SEQ ID NO: 563745
auuuaaagaacuagugacc

SEQ ID NO: 563747 - RNA, 19 nt, Artificial Sequence
  Description of Artificial Sequence: Synthetic oligonucleotide
  Sense strand starting at position 3126 of SEQ ID NO: 318450
gucacuaguucuuuaaaua

SEQ ID NO: 563748 - RNA, 19 nt, Artificial Sequence
  Description of Artificial Sequence: Synthetic oligonucleotide
  Antisense strand to SEQ ID NO: 563747
uauuuaaagaacuagugac

SEQ ID NO: 563749 - RNA, 19 nt, Artificial Sequence
  Description of Artificial Sequence: Synthetic oligonucleotide
  Sense strand starting at position 3416 of SEQ ID NO: 318450
auuccaaggcuuugaugaa

SEQ ID NO: 563750 - RNA, 19 nt, Artificial Sequence
  Description of Artificial Sequence: Synthetic oligonucleotide
  Antisense strand to SEQ ID NO: 563749
uucaucaaagccuuggaau

SEQ ID NO: 563751 - RNA, 19 nt, Artificial Sequence
  Description of Artificial Sequence: Synthetic oligonucleotide
  Sense strand starting at position 3428 of SEQ ID NO: 318450
ugaugaaauucuuugucuu

SEQ ID NO: 563752 - RNA, 19 nt, Artificial Sequence
  Description of Artificial Sequence: Synthetic oligonucleotide
  Antisense strand to SEQ ID NO: 563751
aagacaaagaauuucauca

SEQ ID NO: 563753 - RNA, 19 nt, Artificial Sequence
  Description of Artificial Sequence: Synthetic oligonucleotide
  Sense strand starting at position 46 of SEQ ID NO: 318451
agucuagaaguuuauacau

SEQ ID NO: 563754 - RNA, 19 nt, Artificial Sequence
  Description of Artificial Sequence: Synthetic oligonucleotide
  Antisense strand to SEQ ID NO: 563753
auguauaaacuucuagacu

SEQ ID NO: 563755 - RNA, 19 nt, Artificial Sequence
  Description of Artificial Sequence: Synthetic oligonucleotide
  Sense strand starting at position 288 of SEQ ID NO: 318451
ugacacauuccaggacuuu

SEQ ID NO: 563756 - RNA, 19 nt, Artificial Sequence
  Description of Artificial Sequence: Synthetic oligonucleotide
  Antisense strand to SEQ ID NO: 563755
aaaguccuggaauguguca

SEQ ID NO: 563757 - RNA, 19 nt, Artificial Sequence
  Description of Artificial Sequence: Synthetic oligonucleotide
  Sense strand starting at position 427 of SEQ ID NO: 318451
agagcaugaagucauguua

SEQ ID NO: 563758 - RNA, 19 nt, Artificial Sequence
  Description of Artificial Sequence: Synthetic oligonucleotide
  Antisense strand to SEQ ID NO: 563757
uaacaugacuucaugcucu

SEQ ID NO: 563759 - RNA, 19 nt, Artificial Sequence
  Description of Artificial Sequence: Synthetic oligonucleotide
  Sense strand starting at position 630 of SEQ ID NO: 318451
agaucuauccuagguuauu

SEQ ID NO: 563760 - RNA, 19 nt, Artificial Sequence
  Description of Artificial Sequence: Synthetic oligonucleotide
  Antisense strand to SEQ ID NO: 563759
aauaaccuaggauagaucu

SEQ ID NO: 563761 - RNA, 19 nt, Artificial Sequence
  Description of Artificial Sequence: Synthetic oligonucleotide
  Sense strand starting at position 631 of SEQ ID NO: 318451
gaucuauccuagguuauug

SEQ ID NO: 563762 - RNA, 19 nt, Artificial Sequence
  Description of Artificial Sequence: Synthetic oligonucleotide
  Antisense strand to SEQ ID NO: 563761
caauaaccuaggauagauc

SEQ ID NO: 563763 - RNA, 19 nt, Artificial Sequence
  Description of Artificial Sequence: Synthetic oligonucleotide
  Sense strand starting at position 667 of SEQ ID NO: 318451
ucuggugaauccuuaaccu

SEQ ID NO: 563764 - RNA, 19 nt, Artificial Sequence
  Description of Artificial Sequence: Synthetic oligonucleotide
  Antisense strand to SEQ ID NO: 563763
agguuaaggauucaccaga

SEQ ID NO: 563765 - RNA, 19 nt, Artificial Sequence
  Description of Artificial Sequence: Synthetic oligonucleotide
  Sense strand starting at position 682 of SEQ ID NO: 318451
accucuguggagugaugau

SEQ ID NO: 563766 - RNA, 19 nt, Artificial Sequence
  Description of Artificial Sequence: Synthetic oligonucleotide
  Antisense strand to SEQ ID NO: 563765
aucaucacuccacagaggu

SEQ ID NO: 563767 - RNA, 19 nt, Artificial Sequence
  Description of Artificial Sequence: Synthetic oligonucleotide
  Sense strand starting at position 697 of SEQ ID NO: 318451
ugaugucauccaugagaga

SEQ ID NO: 563768 - RNA, 19 nt, Artificial Sequence
  Description of Artificial Sequence: Synthetic oligonucleotide
  Antisense strand to SEQ ID NO: 563767
ucucucauggaugacauca

SEQ ID NO: 563769 - RNA, 19 nt, Artificial Sequence
  Description of Artificial Sequence: Synthetic oligonucleotide
  Sense strand starting at position 865 of SEQ ID NO: 318451
ggagguagauaguuuaguu

SEQ ID NO: 563770 - RNA, 19 nt, Artificial Sequence
  Description of Artificial Sequence: Synthetic oligonucleotide
  Antisense strand to SEQ ID NO: 563769
aacuaaacuaucuaccucc

SEQ ID NO: 563771 - RNA, 19 nt, Artificial Sequence
  Description of Artificial Sequence: Synthetic oligonucleotide
  Sense strand starting at position 872 of SEQ ID NO: 318451
gauaguuuaguuugaauga

SEQ ID NO: 563772 - RNA, 19 nt, Artificial Sequence
  Description of Artificial Sequence: Synthetic oligonucleotide
  Antisense strand to SEQ ID NO: 563771
ucauucaaacuaaacuauc

SEQ ID NO: 563773 - RNA, 19 nt, Artificial Sequence
  Description of Artificial Sequence: Synthetic oligonucleotide
  Sense strand starting at position 931 of SEQ ID NO: 318451
uccagaugucccuggacca

SEQ ID NO: 563774 - RNA, 19 nt, Artificial Sequence
  Description of Artificial Sequence: Synthetic oligonucleotide
  Antisense strand to SEQ ID NO: 563773
ugguccagggacaucugga

SEQ ID NO: 563775 - RNA, 19 nt, Artificial Sequence
  Description of Artificial Sequence: Synthetic oligonucleotide
  Sense strand starting at position 1064 of SEQ ID NO: 318451
uagagaaagcuccaggcua

SEQ ID NO: 563776 - RNA, 19 nt, Artificial Sequence
  Description of Artificial Sequence: Synthetic oligonucleotide
  Antisense strand to SEQ ID NO: 563775
uagccuggagcuuucucua

SEQ ID NO: 563777 - RNA, 19 nt, Artificial Sequence
  Description of Artificial Sequence: Synthetic oligonucleotide
  Sense strand starting at position 1066 of SEQ ID NO: 318451
gagaaagcuccaggcuaac

SEQ ID NO: 563778 - RNA, 19 nt, Artificial Sequence
  Description of Artificial Sequence: Synthetic oligonucleotide
  Antisense strand to SEQ ID NO: 563777
guuagccuggagcuuucuc

SEQ ID NO: 563779 - RNA, 19 nt, Artificial Sequence
  Description of Artificial Sequence: Synthetic oligonucleotide
  Sense strand starting at position 1186 of SEQ ID NO: 318451
uggcuagaaguuuaagcau

SEQ ID NO: 563780 - RNA, 19 nt, Artificial Sequence
  Description of Artificial Sequence: Synthetic oligonucleotide
  Antisense strand to SEQ ID NO: 563779
augcuuaaacuucuagcca

SEQ ID NO: 563781 - RNA, 19 nt, Artificial Sequence
  Description of Artificial Sequence: Synthetic oligonucleotide
  Sense strand starting at position 1520 of SEQ ID NO: 318451
auggcugugacucaaggau

SEQ ID NO: 563782 - RNA, 19 nt, Artificial Sequence
  Description of Artificial Sequence: Synthetic oligonucleotide
  Antisense strand to SEQ ID NO: 563781
auccuugagucacagccau

SEQ ID NO: 563783 - RNA, 19 nt, Artificial Sequence
  Description of Artificial Sequence: Synthetic oligonucleotide
  Sense strand starting at position 1894 of SEQ ID NO: 318451
uuuagagaaggcugcuaaa

SEQ ID NO: 563784 - RNA, 19 nt, Artificial Sequence
  Description of Artificial Sequence: Synthetic oligonucleotide
  Antisense strand to SEQ ID NO: 563783
uuuagcagccuucucuaaa

SEQ ID NO: 563785 - RNA, 19 nt, Artificial Sequence
  Description of Artificial Sequence: Synthetic oligonucleotide
  Sense strand starting at position 2048 of SEQ ID NO: 318451
gggcuaggaugauuagcau

SEQ ID NO: 563786 - RNA, 19 nt, Artificial Sequence
  Description of Artificial Sequence: Synthetic oligonucleotide
  Antisense strand to SEQ ID NO: 563785
augcuaaucauccuagccc

SEQ ID NO: 563787 - RNA, 19 nt, Artificial Sequence
  Description of Artificial Sequence: Synthetic oligonucleotide
  Sense strand starting at position 2202 of SEQ ID NO: 318451
agcugaaagcaggaguuua

SEQ ID NO: 563788 - RNA, 19 nt, Artificial Sequence
  Description of Artificial Sequence: Synthetic oligonucleotide
  Antisense strand to SEQ ID NO: 563787
uaaacuccugcuuucagcu

SEQ ID NO: 563789 - RNA, 19 nt, Artificial Sequence
  Description of Artificial Sequence: Synthetic oligonucleotide
  Sense strand starting at position 2217 of SEQ ID NO: 318451
uuuauacugcaaggacauu

SEQ ID NO: 563790 - RNA, 19 nt, Artificial Sequence
  Description of Artificial Sequence: Synthetic oligonucleotide
  Antisense strand to SEQ ID NO: 563789
aauguccuugcaguauaaa

SEQ ID NO: 563791 - RNA, 19 nt, Artificial Sequence
  Description of Artificial Sequence: Synthetic oligonucleotide
  Sense strand starting at position 2277 of SEQ ID NO: 318451
uaaugagcucauggaaaug

SEQ ID NO: 563792 - RNA, 19 nt, Artificial Sequence
  Description of Artificial Sequence: Synthetic oligonucleotide
  Antisense strand to SEQ ID NO: 563791
cauuuccaugagcucauua

SEQ ID NO: 563793 - RNA, 19 nt, Artificial Sequence
  Description of Artificial Sequence: Synthetic oligonucleotide
  Sense strand starting at position 2516 of SEQ ID NO: 318451
uuuccuuacuguuuggaaa

SEQ ID NO: 563794 - RNA, 19 nt, Artificial Sequence
  Description of Artificial Sequence: Synthetic oligonucleotide
  Antisense strand to SEQ ID NO: 563793
uuuccaaacaguaaggaaa

SEQ ID NO: 563795 - RNA, 19 nt, Artificial Sequence
  Description of Artificial Sequence: Synthetic oligonucleotide
  Sense strand starting at position 2517 of SEQ ID NO: 318451
uuccuuacuguuuggaaac

SEQ ID NO: 563796 - RNA, 19 nt, Artificial Sequence
  Description of Artificial Sequence: Synthetic oligonucleotide
  Antisense strand to SEQ ID NO: 563795
guuuccaaacaguaaggaa

SEQ ID NO: 563797 - RNA, 19 nt, Artificial Sequence
  Description of Artificial Sequence: Synthetic oligonucleotide
  Sense strand starting at position 2565 of SEQ ID NO: 318451
gagagcuugccauaacuga

SEQ ID NO: 563798 - RNA, 19 nt, Artificial Sequence
  Description of Artificial Sequence: Synthetic oligonucleotide
  Antisense strand to SEQ ID NO: 563797
ucaguuauggcaagcucuc

SEQ ID NO: 563799 - RNA, 19 nt, Artificial Sequence
  Description of Artificial Sequence: Synthetic oligonucleotide
  Sense strand starting at position 2680 of SEQ ID NO: 318451
agcuguuuagccucgaagu

SEQ ID NO: 563800 - RNA, 19 nt, Artificial Sequence
  Description of Artificial Sequence: Synthetic oligonucleotide
  Antisense strand to SEQ ID NO: 563799
acuucgaggcuaaacagcu

SEQ ID NO: 563801 - RNA, 19 nt, Artificial Sequence
  Description of Artificial Sequence: Synthetic oligonucleotide
  Sense strand starting at position 2828 of SEQ ID NO: 318451
uauagucugguuuaugaaa

SEQ ID NO: 563802 - RNA, 19 nt, Artificial Sequence
  Description of Artificial Sequence: Synthetic oligonucleotide
  Antisense strand to SEQ ID NO: 563801
uuucauaaaccagacuaua

SEQ ID NO: 563803 - RNA, 19 nt, Artificial Sequence
  Description of Artificial Sequence: Synthetic oligonucleotide
  Sense strand starting at position 2851 of SEQ ID NO: 318451
uuaugaaguaggugauuga

SEQ ID NO: 563804 - RNA, 19 nt, Artificial Sequence
  Description of Artificial Sequence: Synthetic oligonucleotide
  Antisense strand to SEQ ID NO: 563803
ucaaucaccuacuucauaa

SEQ ID NO: 563805 - RNA, 19 nt, Artificial Sequence
  Description of Artificial Sequence: Synthetic oligonucleotide
  Sense strand starting at position 2854 of SEQ ID NO: 318451
ugaaguaggugauugaucu

SEQ ID NO: 563806 - RNA, 19 nt, Artificial Sequence
  Description of Artificial Sequence: Synthetic oligonucleotide
  Antisense strand to SEQ ID NO: 563805
agaucaaucaccuacuuca

SEQ ID NO: 563807 - RNA, 19 nt, Artificial Sequence
  Description of Artificial Sequence: Synthetic oligonucleotide
  Sense strand starting at position 2855 of SEQ ID NO: 318451
gaaguaggugauugaucuu

SEQ ID NO: 563808 - RNA, 19 nt, Artificial Sequence
  Description of Artificial Sequence: Synthetic oligonucleotide
  Antisense strand to SEQ ID NO: 563807
aagaucaaucaccuacuuc

SEQ ID NO: 563809 - RNA, 19 nt, Artificial Sequence
  Description of Artificial Sequence: Synthetic oligonucleotide
  Sense strand starting at position 2976 of SEQ ID NO: 318451
agagucuuguuauuggaga

SEQ ID NO: 563810 - RNA, 19 nt, Artificial Sequence
  Description of Artificial Sequence: Synthetic oligonucleotide
  Antisense strand to SEQ ID NO: 563809
ucuccaauaacaagacucu

SEQ ID NO: 563811 - RNA, 19 nt, Artificial Sequence
  Description of Artificial Sequence: Synthetic oligonucleotide
  Sense strand starting at position 2981 of SEQ ID NO: 318451
cuuguuauuggagagucau

SEQ ID NO: 563812 - RNA, 19 nt, Artificial Sequence
  Description of Artificial Sequence: Synthetic oligonucleotide
  Antisense strand to SEQ ID NO: 563811
augacucuccaauaacaag

SEQ ID NO: 563813 - RNA, 19 nt, Artificial Sequence
  Description of Artificial Sequence: Synthetic oligonucleotide
  Sense strand starting at position 3070 of SEQ ID NO: 318451
uuuccugaauauguaaagu

SEQ ID NO: 563814 - RNA, 19 nt, Artificial Sequence
  Description of Artificial Sequence: Synthetic oligonucleotide
  Antisense strand to SEQ ID NO: 563813
acuuuacauauucaggaaa

SEQ ID NO: 563815 - RNA, 19 nt, Artificial Sequence
  Description of Artificial Sequence: Synthetic oligonucleotide
  Sense strand starting at position 3105 of SEQ ID NO: 318451
aguuauguaccucacuaau

SEQ ID NO: 563816 - RNA, 19 nt, Artificial Sequence
  Description of Artificial Sequence: Synthetic oligonucleotide
  Antisense strand to SEQ ID NO: 563815
auuagugagguacauaacu

SEQ ID NO: 563817 - RNA, 19 nt, Artificial Sequence
  Description of Artificial Sequence: Synthetic oligonucleotide
  Sense strand starting at position 3345 of SEQ ID NO: 318451
uuauuacaccacuggaguu

SEQ ID NO: 563818 - RNA, 19 nt, Artificial Sequence
  Description of Artificial Sequence: Synthetic oligonucleotide
  Antisense strand to SEQ ID NO: 563817
aacuccagugguguaauaa

SEQ ID NO: 563819 - RNA, 19 nt, Artificial Sequence
  Description of Artificial Sequence: Synthetic oligonucleotide
  Sense strand starting at position 3449 of SEQ ID NO: 318451
gauagucacgcacauaaca

SEQ ID NO: 563820 - RNA, 19 nt, Artificial Sequence
  Description of Artificial Sequence: Synthetic oligonucleotide
  Antisense strand to SEQ ID NO: 563819
uguuaugugcgugacuauc

SEQ ID NO: 563821 - RNA, 19 nt, Artificial Sequence
  Description of Artificial Sequence: Synthetic oligonucleotide
  Sense strand starting at position 3484 of SEQ ID NO: 318451
ugauguaauuaagcaucca

SEQ ID NO: 563822 - RNA, 19 nt, Artificial Sequence
  Description of Artificial Sequence: Synthetic oligonucleotide
  Antisense strand to SEQ ID NO: 563821
uggaugcuuaauuacauca

SEQ ID NO: 563823 - RNA, 19 nt, Artificial Sequence
  Description of Artificial Sequence: Synthetic oligonucleotide
  Sense strand starting at position 3641 of SEQ ID NO: 318451
agagaaauguugcuuggag

SEQ ID NO: 563824 - RNA, 19 nt, Artificial Sequence
  Description of Artificial Sequence: Synthetic oligonucleotide
  Antisense strand to SEQ ID NO: 563823
cuccaagcaacauuucucu

SEQ ID NO: 563825 - RNA, 19 nt, Artificial Sequence
  Description of Artificial Sequence: Synthetic oligonucleotide
  Sense strand starting at position 3642 of SEQ ID NO: 318451
gagaaauguugcuuggaga

SEQ ID NO: 563826 - RNA, 19 nt, Artificial Sequence
  Description of Artificial Sequence: Synthetic oligonucleotide
  Antisense strand to SEQ ID NO: 563825
ucuccaagcaacauuucuc

SEQ ID NO: 563827 - RNA, 19 nt, Artificial Sequence
  Description of Artificial Sequence: Synthetic oligonucleotide
  Sense strand starting at position 3643 of SEQ ID NO: 318451
agaaauguugcuuggagau

SEQ ID NO: 563828 - RNA, 19 nt, Artificial Sequence
  Description of Artificial Sequence: Synthetic oligonucleotide
  Antisense strand to SEQ ID NO: 563827
aucuccaagcaacauuucu

SEQ ID NO: 563829 - RNA, 19 nt, Artificial Sequence
  Description of Artificial Sequence: Synthetic oligonucleotide
  Sense strand starting at position 3649 of SEQ ID NO: 318451
guugcuuggagaugaacau

SEQ ID NO: 563830 - RNA, 19 nt, Artificial Sequence
  Description of Artificial Sequence: Synthetic oligonucleotide
  Antisense strand to SEQ ID NO: 563829
auguucaucuccaagcaac

SEQ ID NO: 563831 - RNA, 19 nt, Artificial Sequence
  Description of Artificial Sequence: Synthetic oligonucleotide
  Sense strand starting at position 3883 of SEQ ID NO: 318451
ugaaacaaauguuugcuaa

SEQ ID NO: 563832 - RNA, 19 nt, Artificial Sequence
  Description of Artificial Sequence: Synthetic oligonucleotide
  Antisense strand to SEQ ID NO: 563831
uuagcaaacauuuguuuca

SEQ ID NO: 563833 - RNA, 19 nt, Artificial Sequence
  Description of Artificial Sequence: Synthetic oligonucleotide
  Sense strand starting at position 549 of SEQ ID NO: 318452
guaagccuuguauaauacu

SEQ ID NO: 563834 - RNA, 19 nt, Artificial Sequence
  Description of Artificial Sequence: Synthetic oligonucleotide
  Antisense strand to SEQ ID NO: 563833
aguauuauacaaggcuuac

SEQ ID NO: 563835 - RNA, 19 nt, Artificial Sequence
  Description of Artificial Sequence: Synthetic oligonucleotide
  Sense strand starting at position 574 of SEQ ID NO: 318452
ugcuauaaaggcuguaaga

SEQ ID NO: 563836 - RNA, 19 nt, Artificial Sequence
  Description of Artificial Sequence: Synthetic oligonucleotide
  Antisense strand to SEQ ID NO: 563835
ucuuacagccuuuauagca

SEQ ID NO: 563837 - RNA, 19 nt, Artificial Sequence
  Description of Artificial Sequence: Synthetic oligonucleotide
  Sense strand starting at position 590 of SEQ ID NO: 318452
agauaauucgccuacugaa

SEQ ID NO: 563838 - RNA, 19 nt, Artificial Sequence
  Description of Artificial Sequence: Synthetic oligonucleotide
  Antisense strand to SEQ ID NO: 563837
uucaguaggcgaauuaucu

SEQ ID NO: 563839 - RNA, 19 nt, Artificial Sequence
  Description of Artificial Sequence: Synthetic oligonucleotide
  Sense strand starting at position 708 of SEQ ID NO: 318452
gguagaauuuguguuguuc

SEQ ID NO: 563840 - RNA, 19 nt, Artificial Sequence
  Description of Artificial Sequence: Synthetic oligonucleotide
  Antisense strand to SEQ ID NO: 563839
gaacaacacaaauucuacc

SEQ ID NO: 563841 - RNA, 19 nt, Artificial Sequence
  Description of Artificial Sequence: Synthetic oligonucleotide
  Sense strand starting at position 712 of SEQ ID NO: 318452
gaauuuguguuguuccuau

SEQ ID NO: 563842 - RNA, 19 nt, Artificial Sequence
  Description of Artificial Sequence: Synthetic oligonucleotide
  Antisense strand to SEQ ID NO: 563841
auaggaacaacacaaauuc

SEQ ID NO: 563843 - RNA, 19 nt, Artificial Sequence
  Description of Artificial Sequence: Synthetic oligonucleotide
  Sense strand starting at position 780 of SEQ ID NO: 318452
uugugaccugaauaauugu

SEQ ID NO: 563844 - RNA, 19 nt, Artificial Sequence
  Description of Artificial Sequence: Synthetic oligonucleotide
  Antisense strand to SEQ ID NO: 563843
acaauuauucaggucacaa

SEQ ID NO: 563845 - RNA, 19 nt, Artificial Sequence
  Description of Artificial Sequence: Synthetic oligonucleotide
  Sense strand starting at position 786 of SEQ ID NO: 318452
ccugaauaauugucacgac

SEQ ID NO: 563846 - RNA, 19 nt, Artificial Sequence
  Description of Artificial Sequence: Synthetic oligonucleotide
  Antisense strand to SEQ ID NO: 563845
gucgugacaauuauucagg

SEQ ID NO: 563847 - RNA, 19 nt, Artificial Sequence
  Description of Artificial Sequence: Synthetic oligonucleotide
  Sense strand starting at position 970 of SEQ ID NO: 318452
augucccacuuguuauaga

SEQ ID NO: 563848 - RNA, 19 nt, Artificial Sequence
  Description of Artificial Sequence: Synthetic oligonucleotide
  Antisense strand to SEQ ID NO: 563847
ucuauaacaagugggacau

SEQ ID NO: 563849 - RNA, 19 nt, Artificial Sequence
  Description of Artificial Sequence: Synthetic oligonucleotide
  Sense strand starting at position 1025 of SEQ ID NO: 318452
agcauucuaccgggauaag

SEQ ID NO: 563850 - RNA, 19 nt, Artificial Sequence
  Description of Artificial Sequence: Synthetic oligonucleotide
  Antisense strand to SEQ ID NO: 563849
cuuaucccgguagaaugcu

SEQ ID NO: 563851 - RNA, 19 nt, Artificial Sequence
  Description of Artificial Sequence: Synthetic oligonucleotide
  Sense strand starting at position 1127 of SEQ ID NO: 318452
cuguuaacucgacacagca

SEQ ID NO: 563852 - RNA, 19 nt, Artificial Sequence
  Description of Artificial Sequence: Synthetic oligonucleotide
  Antisense strand to SEQ ID NO: 563851
ugcugugucgaguuaacag

SEQ ID NO: 563853 - RNA, 19 nt, Artificial Sequence
  Description of Artificial Sequence: Synthetic oligonucleotide
  Sense strand starting at position 1522 of SEQ ID NO: 318452
ggguuaagaccgcaucaca

SEQ ID NO: 563854 - RNA, 19 nt, Artificial Sequence
  Description of Artificial Sequence: Synthetic oligonucleotide
  Antisense strand to SEQ ID NO: 563853
ugugaugcggucuuaaccc

SEQ ID NO: 563855 - RNA, 19 nt, Artificial Sequence
  Description of Artificial Sequence: Synthetic oligonucleotide
  Sense strand starting at position 1681 of SEQ ID NO: 318452
ugucuacuggacugugaga

SEQ ID NO: 563856 - RNA, 19 nt, Artificial Sequence
  Description of Artificial Sequence: Synthetic oligonucleotide
  Antisense strand to SEQ ID NO: 563855
ucucacaguccaguagaca

SEQ ID NO: 563857 - RNA, 19 nt, Artificial Sequence
  Description of Artificial Sequence: Synthetic oligonucleotide
  Sense strand starting at position 1896 of SEQ ID NO: 318452
gaacuucgcgccguaacaa

SEQ ID NO: 563858 - RNA, 19 nt, Artificial Sequence
  Description of Artificial Sequence: Synthetic oligonucleotide
  Antisense strand to SEQ ID NO: 563857
uuguuacggcgcgaaguuc

SEQ ID NO: 563859 - RNA, 19 nt, Artificial Sequence
  Description of Artificial Sequence: Synthetic oligonucleotide
  Sense strand starting at position 2098 of SEQ ID NO: 318452
gaguaagucguuuccugcu

SEQ ID NO: 563860 - RNA, 19 nt, Artificial Sequence
  Description of Artificial Sequence: Synthetic oligonucleotide
  Antisense strand to SEQ ID NO: 563859
agcaggaaacgacuuacuc

SEQ ID NO: 563861 - RNA, 19 nt, Artificial Sequence
  Description of Artificial Sequence: Synthetic oligonucleotide
  Sense strand starting at position 2111 of SEQ ID NO: 318452
ccugcugucgucgugagau

SEQ ID NO: 563862 - RNA, 19 nt, Artificial Sequence
  Description of Artificial Sequence: Synthetic oligonucleotide
  Antisense strand to SEQ ID NO: 563861
aucucacgacgacagcagg

SEQ ID NO: 563863 - RNA, 19 nt, Artificial Sequence
  Description of Artificial Sequence: Synthetic oligonucleotide
  Sense strand starting at position 2198 of SEQ ID NO: 318452
ucuccauccguuggagaca

SEQ ID NO: 563864 - RNA, 19 nt, Artificial Sequence
  Description of Artificial Sequence: Synthetic oligonucleotide
  Antisense strand to SEQ ID NO: 563863
ugucuccaacggauggaga

SEQ ID NO: 563865 - RNA, 19 nt, Artificial Sequence
  Description of Artificial Sequence: Synthetic oligonucleotide
  Sense strand starting at position 2274 of SEQ ID NO: 318452
ggcguucugacuggagaga

SEQ ID NO: 563866 - RNA, 19 nt, Artificial Sequence
  Description of Artificial Sequence: Synthetic oligonucleotide
  Antisense strand to SEQ ID NO: 563865
ucucuccagucagaacgcc

SEQ ID NO: 563867 - RNA, 19 nt, Artificial Sequence
  Description of Artificial Sequence: Synthetic oligonucleotide
  Sense strand starting at position 2275 of SEQ ID NO: 318452
gcguucugacuggagagaa

SEQ ID NO: 563868 - RNA, 19 nt, Artificial Sequence
  Description of Artificial Sequence: Synthetic oligonucleotide
  Antisense strand to SEQ ID NO: 563867
uucucuccagucagaacgc

SEQ ID NO: 563869 - RNA, 19 nt, Artificial Sequence
  Description of Artificial Sequence: Synthetic oligonucleotide
  Sense strand starting at position 2289 of SEQ ID NO: 318452
gagaacuguugugcccaaa

SEQ ID NO: 563870 - RNA, 19 nt, Artificial Sequence
  Description of Artificial Sequence: Synthetic oligonucleotide
  Antisense strand to SEQ ID NO: 563869
uuugggcacaacaguucuc

SEQ ID NO: 563871 - RNA, 19 nt, Artificial Sequence
  Description of Artificial Sequence: Synthetic oligonucleotide
  Sense strand starting at position 2409 of SEQ ID NO: 318452
gaaggaauuccacgcacac

SEQ ID NO: 563872 - RNA, 19 nt, Artificial Sequence
  Description of Artificial Sequence: Synthetic oligonucleotide
  Antisense strand to SEQ ID NO: 563871
gugugcguggaauuccuuc

SEQ ID NO: 563873 - RNA, 19 nt, Artificial Sequence
  Description of Artificial Sequence: Synthetic oligonucleotide
  Sense strand starting at position 2462 of SEQ ID NO: 318452
gaaagcugccgacagagaa

SEQ ID NO: 563874 - RNA, 19 nt, Artificial Sequence
  Description of Artificial Sequence: Synthetic oligonucleotide
  Antisense strand to SEQ ID NO: 563873
uucucugucggcagcuuuc

SEQ ID NO: 563875 - RNA, 19 nt, Artificial Sequence
  Description of Artificial Sequence: Synthetic oligonucleotide
  Sense strand starting at position 2474 of SEQ ID NO: 318452
cagagaagugcuugaucua

SEQ ID NO: 563876 - RNA, 19 nt, Artificial Sequence
  Description of Artificial Sequence: Synthetic oligonucleotide
  Antisense strand to SEQ ID NO: 563875
uagaucaagcacuucucug

SEQ ID NO: 563877 - RNA, 19 nt, Artificial Sequence
  Description of Artificial Sequence: Synthetic oligonucleotide
  Sense strand starting at position 2475 of SEQ ID NO: 318452
agagaagugcuugaucuau

SEQ ID NO: 563878 - RNA, 19 nt, Artificial Sequence
  Description of Artificial Sequence: Synthetic oligonucleotide
  Antisense strand to SEQ ID NO: 563877
auagaucaagcacuucucu

SEQ ID NO: 563879 - RNA, 19 nt, Artificial Sequence
  Description of Artificial Sequence: Synthetic oligonucleotide
  Sense strand starting at position 2477 of SEQ ID NO: 318452
agaagugcuugaucuauuc

SEQ ID NO: 563880 - RNA, 19 nt, Artificial Sequence
  Description of Artificial Sequence: Synthetic oligonucleotide
  Antisense strand to SEQ ID NO: 563879
gaauagaucaagcacuucu

SEQ ID NO: 563881 - RNA, 19 nt, Artificial Sequence
  Description of Artificial Sequence: Synthetic oligonucleotide
  Sense strand starting at position 2573 of SEQ ID NO: 318452
cacgauuaccuuugaguca

SEQ ID NO: 563882 - RNA, 19 nt, Artificial Sequence
  Description of Artificial Sequence: Synthetic oligonucleotide
  Antisense strand to SEQ ID NO: 563881
ugacucaaagguaaucgug

SEQ ID NO: 563883 - RNA, 19 nt, Artificial Sequence
  Description of Artificial Sequence: Synthetic oligonucleotide
  Sense strand starting at position 2599 of SEQ ID NO: 318452
agauuuagacugcguucuu

SEQ ID NO: 563884 - RNA, 19 nt, Artificial Sequence
  Description of Artificial Sequence: Synthetic oligonucleotide
  Antisense strand to SEQ ID NO: 563883
aagaacgcagucuaaaucu

SEQ ID NO: 563885 - RNA, 19 nt, Artificial Sequence
  Description of Artificial Sequence: Synthetic oligonucleotide
  Sense strand starting at position 2749 of SEQ ID NO: 318452
acugcucccuugguaagaa

SEQ ID NO: 563886 - RNA, 19 nt, Artificial Sequence
  Description of Artificial Sequence: Synthetic oligonucleotide
  Antisense strand to SEQ ID NO: 563885
uucuuaccaagggagcagu

SEQ ID NO: 563887 - RNA, 19 nt, Artificial Sequence
  Description of Artificial Sequence: Synthetic oligonucleotide
  Sense strand starting at position 2932 of SEQ ID NO: 318452
ccuugauggcuguaacuac

SEQ ID NO: 563888 - RNA, 19 nt, Artificial Sequence
  Description of Artificial Sequence: Synthetic oligonucleotide
  Antisense strand to SEQ ID NO: 563887
guaguuacagccaucaagg

SEQ ID NO: 563889 - RNA, 19 nt, Artificial Sequence
  Description of Artificial Sequence: Synthetic oligonucleotide
  Sense strand starting at position 2953 of SEQ ID NO: 318452
cuagguacaccuugguauu

SEQ ID NO: 563890 - RNA, 19 nt, Artificial Sequence
  Description of Artificial Sequence: Synthetic oligonucleotide
  Antisense strand to SEQ ID NO: 563889
aauaccaagguguaccuag

SEQ ID NO: 563891 - RNA, 19 nt, Artificial Sequence
  Description of Artificial Sequence: Synthetic oligonucleotide
  Sense strand starting at position 3010 of SEQ ID NO: 318452
gauuuaugauuaugacaug

SEQ ID NO: 563892 - RNA, 19 nt, Artificial Sequence
  Description of Artificial Sequence: Synthetic oligonucleotide
  Antisense strand to SEQ ID NO: 563891
caugucauaaucauaaauc

SEQ ID NO: 563893 - RNA, 19 nt, Artificial Sequence
  Description of Artificial Sequence: Synthetic oligonucleotide
  Sense strand starting at position 3234 of SEQ ID NO: 318452
aaacuuuaccagcgaagug

SEQ ID NO: 563894 - RNA, 19 nt, Artificial Sequence
  Description of Artificial Sequence: Synthetic oligonucleotide
  Antisense strand to SEQ ID NO: 563893
cacuucgcugguaaaguuu

SEQ ID NO: 563895 - RNA, 19 nt, Artificial Sequence
  Description of Artificial Sequence: Synthetic oligonucleotide
  Sense strand starting at position 3454 of SEQ ID NO: 318452
gcaugaucaccaugaacuu

SEQ ID NO: 563896 - RNA, 19 nt, Artificial Sequence
  Description of Artificial Sequence: Synthetic oligonucleotide
  Antisense strand to SEQ ID NO: 563895
aaguucauggugaucaugc

SEQ ID NO: 563897 - RNA, 19 nt, Artificial Sequence
  Description of Artificial Sequence: Synthetic oligonucleotide
  Sense strand starting at position 3518 of SEQ ID NO: 318452
gaccucuucuaguuaagug

SEQ ID NO: 563898 - RNA, 19 nt, Artificial Sequence
  Description of Artificial Sequence: Synthetic oligonucleotide
  Antisense strand to SEQ ID NO: 563897
cacuuaacuagaagagguc

SEQ ID NO: 563899 - RNA, 19 nt, Artificial Sequence
  Description of Artificial Sequence: Synthetic oligonucleotide
  Sense strand starting at position 3526 of SEQ ID NO: 318452
cuaguuaagugacuugaag

SEQ ID NO: 563900 - RNA, 19 nt, Artificial Sequence
  Description of Artificial Sequence: Synthetic oligonucleotide
  Antisense strand to SEQ ID NO: 563899
cuucaagucacuuaacuag

SEQ ID NO: 563901 - RNA, 19 nt, Artificial Sequence
  Description of Artificial Sequence: Synthetic oligonucleotide
  Sense strand starting at position 3528 of SEQ ID NO: 318452
aguuaagugacuugaaguu

SEQ ID NO: 563902 - RNA, 19 nt, Artificial Sequence
  Description of Artificial Sequence: Synthetic oligonucleotide
  Antisense strand to SEQ ID NO: 563901
aacuucaagucacuuaacu

SEQ ID NO: 563903 - RNA, 19 nt, Artificial Sequence
  Description of Artificial Sequence: Synthetic oligonucleotide
  Sense strand starting at position 3620 of SEQ ID NO: 318452
ucuuaagauuacgcgagaa

SEQ ID NO: 563904 - RNA, 19 nt, Artificial Sequence
  Description of Artificial Sequence: Synthetic oligonucleotide
  Antisense strand to SEQ ID NO: 563903
uucucgcguaaucuuaaga

SEQ ID NO: 563905 - RNA, 19 nt, Artificial Sequence
  Description of Artificial Sequence: Synthetic oligonucleotide
  Sense strand starting at position 3781 of SEQ ID NO: 318452
uaguaagauuacgugagaa

SEQ ID NO: 563906 - RNA, 19 nt, Artificial Sequence
  Description of Artificial Sequence: Synthetic oligonucleotide
  Antisense strand to SEQ ID NO: 563905
uucucacguaaucuuacua

SEQ ID NO: 563907 - RNA, 19 nt, Artificial Sequence
  Description of Artificial Sequence: Synthetic oligonucleotide
  Sense strand starting at position 3827 of SEQ ID NO: 318452
guaugaagcacuuaguaug

SEQ ID NO: 563908 - RNA, 19 nt, Artificial Sequence
  Description of Artificial Sequence: Synthetic oligonucleotide
  Antisense strand to SEQ ID NO: 563907
cauacuaagugcuucauac

SEQ ID NO: 563909 - RNA, 19 nt, Artificial Sequence
  Description of Artificial Sequence: Synthetic oligonucleotide
  Sense strand starting at position 3832 of SEQ ID NO: 318452
aagcacuuaguaugagaaa

SEQ ID NO: 563910 - RNA, 19 nt, Artificial Sequence
  Description of Artificial Sequence: Synthetic oligonucleotide
  Antisense strand to SEQ ID NO: 563909
uuucucauacuaagugcuu

SEQ ID NO: 563911 - RNA, 19 nt, Artificial Sequence
  Description of Artificial Sequence: Synthetic oligonucleotide
  Sense strand starting at position 3883 of SEQ ID NO: 318452
ccgagcacuccuuauuauu

SEQ ID NO: 563912 - RNA, 19 nt, Artificial Sequence
  Description of Artificial Sequence: Synthetic oligonucleotide
  Antisense strand to SEQ ID NO: 563911
aauaauaaggagugcucgg

SEQ ID NO: 563913 - RNA, 19 nt, Artificial Sequence
  Description of Artificial Sequence: Synthetic oligonucleotide
  Sense strand starting at position 371 of SEQ ID NO: 318453
caggaaucggaguaaguau

SEQ ID NO: 563914 - RNA, 19 nt, Artificial Sequence
  Description of Artificial Sequence: Synthetic oligonucleotide
  Antisense strand to SEQ ID NO: 563913
auacuuacuccgauuccug

SEQ ID NO: 563915 - RNA, 19 nt, Artificial Sequence
  Description of Artificial Sequence: Synthetic oligonucleotide
  Sense strand starting at position 394 of SEQ ID NO: 318453
ugggauaugccucaugucu

SEQ ID NO: 563916 - RNA, 19 nt, Artificial Sequence
  Description of Artificial Sequence: Synthetic oligonucleotide
  Antisense strand to SEQ ID NO: 563915
agacaugaggcauauccca

SEQ ID NO: 563917 - RNA, 19 nt, Artificial Sequence
  Description of Artificial Sequence: Synthetic oligonucleotide
  Sense strand starting at position 409 of SEQ ID NO: 318453
gucucauaucccuaguucu

SEQ ID NO: 563918 - RNA, 19 nt, Artificial Sequence
  Description of Artificial Sequence: Synthetic oligonucleotide
  Antisense strand to SEQ ID NO: 563917
agaacuagggauaugagac

SEQ ID NO: 563919 - RNA, 19 nt, Artificial Sequence
  Description of Artificial Sequence: Synthetic oligonucleotide
  Sense strand starting at position 428 of SEQ ID NO: 318453
uuucuuuggcucgauaaac

SEQ ID NO: 563920 - RNA, 19 nt, Artificial Sequence
  Description of Artificial Sequence: Synthetic oligonucleotide
  Antisense strand to SEQ ID NO: 563919
guuuaucgagccaaagaaa

SEQ ID NO: 563921 - RNA, 19 nt, Artificial Sequence
  Description of Artificial Sequence: Synthetic oligonucleotide
  Sense strand starting at position 456 of SEQ ID NO: 318453
uagcaagaguaguuaaguu

SEQ ID NO: 563922 - RNA, 19 nt, Artificial Sequence
  Description of Artificial Sequence: Synthetic oligonucleotide
  Antisense strand to SEQ ID NO: 563921
aacuuaacuacucuugcua

SEQ ID NO: 563923 - RNA, 19 nt, Artificial Sequence
  Description of Artificial Sequence: Synthetic oligonucleotide
  Sense strand starting at position 531 of SEQ ID NO: 318453
acccaaauguccuuuguca

SEQ ID NO: 563924 - RNA, 19 nt, Artificial Sequence
  Description of Artificial Sequence: Synthetic oligonucleotide
  Antisense strand to SEQ ID NO: 563923
ugacaaaggacauuugggu

SEQ ID NO: 563925 - RNA, 19 nt, Artificial Sequence
  Description of Artificial Sequence: Synthetic oligonucleotide
  Sense strand starting at position 533 of SEQ ID NO: 318453
ccaaauguccuuugucaca

SEQ ID NO: 563926 - RNA, 19 nt, Artificial Sequence
  Description of Artificial Sequence: Synthetic oligonucleotide
  Antisense strand to SEQ ID NO: 563925
ugugacaaaggacauuugg

SEQ ID NO: 563927 - RNA, 19 nt, Artificial Sequence
  Description of Artificial Sequence: Synthetic oligonucleotide
  Sense strand starting at position 578 of SEQ ID NO: 318453
ucacccuuucugggacuaa

SEQ ID NO: 563928 - RNA, 19 nt, Artificial Sequence
  Description of Artificial Sequence: Synthetic oligonucleotide
  Antisense strand to SEQ ID NO: 563927
uuagucccagaaaggguga

SEQ ID NO: 563929 - RNA, 19 nt, Artificial Sequence
  Description of Artificial Sequence: Synthetic oligonucleotide
  Sense strand starting at position 655 of SEQ ID NO: 318453
ggcuuuguaguuuaacauc

SEQ ID NO: 563930 - RNA, 19 nt, Artificial Sequence
  Description of Artificial Sequence: Synthetic oligonucleotide
  Antisense strand to SEQ ID NO: 563929
gauguuaaacuacaaagcc

SEQ ID NO: 563931 - RNA, 19 nt, Artificial Sequence
  Description of Artificial Sequence: Synthetic oligonucleotide
  Sense strand starting at position 738 of SEQ ID NO: 318453
gggaguuccucaccugaaa

SEQ ID NO: 563932 - RNA, 19 nt, Artificial Sequence
  Description of Artificial Sequence: Synthetic oligonucleotide
  Antisense strand to SEQ ID NO: 563931
uuucaggugaggaacuccc

SEQ ID NO: 563933 - RNA, 19 nt, Artificial Sequence
  Description of Artificial Sequence: Synthetic oligonucleotide
  Sense strand starting at position 927 of SEQ ID NO: 318453
auguaaagagcuugccaau

SEQ ID NO: 563934 - RNA, 19 nt, Artificial Sequence
  Description of Artificial Sequence: Synthetic oligonucleotide
  Antisense strand to SEQ ID NO: 563933
auuggcaagcucuuuacau

SEQ ID NO: 563935 - RNA, 19 nt, Artificial Sequence
  Description of Artificial Sequence: Synthetic oligonucleotide
  Sense strand starting at position 967 of SEQ ID NO: 318453
ugugacugcugauuaagua

SEQ ID NO: 563936 - RNA, 19 nt, Artificial Sequence
  Description of Artificial Sequence: Synthetic oligonucleotide
  Antisense strand to SEQ ID NO: 563935
uacuuaaucagcagucaca

SEQ ID NO: 563937 - RNA, 19 nt, Artificial Sequence
  Description of Artificial Sequence: Synthetic oligonucleotide
  Sense strand starting at position 968 of SEQ ID NO: 318453
gugacugcugauuaaguau

SEQ ID NO: 563938 - RNA, 19 nt, Artificial Sequence
  Description of Artificial Sequence: Synthetic oligonucleotide
  Antisense strand to SEQ ID NO: 563937
auacuuaaucagcagucac

SEQ ID NO: 563939 - RNA, 19 nt, Artificial Sequence
  Description of Artificial Sequence: Synthetic oligonucleotide
  Sense strand starting at position 1000 of SEQ ID NO: 318453
gacagaguacugugaacua

SEQ ID NO: 563940 - RNA, 19 nt, Artificial Sequence
  Description of Artificial Sequence: Synthetic oligonucleotide
  Antisense strand to SEQ ID NO: 563939
uaguucacaguacucuguc

SEQ ID NO: 563941 - RNA, 19 nt, Artificial Sequence
  Description of Artificial Sequence: Synthetic oligonucleotide
  Sense strand starting at position 1492 of SEQ ID NO: 318453
cucaguaacccgggaagaa

SEQ ID NO: 563942 - RNA, 19 nt, Artificial Sequence
  Description of Artificial Sequence: Synthetic oligonucleotide
  Antisense strand to SEQ ID NO: 563941
uucuucccggguuacugag

SEQ ID NO: 563943 - RNA, 19 nt, Artificial Sequence
  Description of Artificial Sequence: Synthetic oligonucleotide
  Sense strand starting at position 1533 of SEQ ID NO: 318453
gacccagagcucugaaugu

SEQ ID NO: 563944 - RNA, 19 nt, Artificial Sequence
  Description of Artificial Sequence: Synthetic oligonucleotide
  Antisense strand to SEQ ID NO: 563943
acauucagagcucuggguc

SEQ ID NO: 563945 - RNA, 19 nt, Artificial Sequence
  Description of Artificial Sequence: Synthetic oligonucleotide
  Sense strand starting at position 1736 of SEQ ID NO: 318453
uuugaaaugaugggugcuu

SEQ ID NO: 563946 - RNA, 19 nt, Artificial Sequence
  Description of Artificial Sequence: Synthetic oligonucleotide
  Antisense strand to SEQ ID NO: 563945
aagcacccaucauuucaaa

SEQ ID NO: 563947 - RNA, 19 nt, Artificial Sequence
  Description of Artificial Sequence: Synthetic oligonucleotide
  Sense strand starting at position 2480 of SEQ ID NO: 318453
cuaggaaggcaaugugaua

SEQ ID NO: 563948 - RNA, 19 nt, Artificial Sequence
  Description of Artificial Sequence: Synthetic oligonucleotide
  Antisense strand to SEQ ID NO: 563947
uaucacauugccuuccuag

SEQ ID NO: 563949 - RNA, 19 nt, Artificial Sequence
  Description of Artificial Sequence: Synthetic oligonucleotide
  Sense strand starting at position 2495 of SEQ ID NO: 318453
gauagagugacuuggguga

SEQ ID NO: 563950 - RNA, 19 nt, Artificial Sequence
  Description of Artificial Sequence: Synthetic oligonucleotide
  Antisense strand to SEQ ID NO: 563949
ucacccaagucacucuauc

SEQ ID NO: 563951 - RNA, 19 nt, Artificial Sequence
  Description of Artificial Sequence: Synthetic oligonucleotide
  Sense strand starting at position 2499 of SEQ ID NO: 318453
gagugacuugggugagaga

SEQ ID NO: 563952 - RNA, 19 nt, Artificial Sequence
  Description of Artificial Sequence: Synthetic oligonucleotide
  Antisense strand to SEQ ID NO: 563951
ucucucacccaagucacuc

SEQ ID NO: 563953 - RNA, 19 nt, Artificial Sequence
  Description of Artificial Sequence: Synthetic oligonucleotide
  Sense strand starting at position 2600 of SEQ ID NO: 318453
auaucauaacgauguacaa

SEQ ID NO: 563954 - RNA, 19 nt, Artificial Sequence
  Description of Artificial Sequence: Synthetic oligonucleotide
  Antisense strand to SEQ ID NO: 563953
uuguacaucguuaugauau

SEQ ID NO: 563955 - RNA, 19 nt, Artificial Sequence
  Description of Artificial Sequence: Synthetic oligonucleotide
  Sense strand starting at position 2698 of SEQ ID NO: 318453
uuaucauuugcaugugugu

SEQ ID NO: 563956 - RNA, 19 nt, Artificial Sequence
  Description of Artificial Sequence: Synthetic oligonucleotide
  Antisense strand to SEQ ID NO: 563955
acacacaugcaaaugauaa

SEQ ID NO: 563957 - RNA, 19 nt, Artificial Sequence
  Description of Artificial Sequence: Synthetic oligonucleotide
  Sense strand starting at position 2746 of SEQ ID NO: 318453
cgcgugugugcugugaaca

SEQ ID NO: 563958 - RNA, 19 nt, Artificial Sequence
  Description of Artificial Sequence: Synthetic oligonucleotide
  Antisense strand to SEQ ID NO: 563957
uguucacagcacacacgcg

SEQ ID NO: 563959 - RNA, 19 nt, Artificial Sequence
  Description of Artificial Sequence: Synthetic oligonucleotide
  Sense strand starting at position 2758 of SEQ ID NO: 318453
gugaacauuuaagaucuau

SEQ ID NO: 563960 - RNA, 19 nt, Artificial Sequence
  Description of Artificial Sequence: Synthetic oligonucleotide
  Antisense strand to SEQ ID NO: 563959
auagaucuuaaauguucac

SEQ ID NO: 563961 - RNA, 19 nt, Artificial Sequence
  Description of Artificial Sequence: Synthetic oligonucleotide
  Sense strand starting at position 2775 of SEQ ID NO: 318453
auucucauccugggaaaca

SEQ ID NO: 563962 - RNA, 19 nt, Artificial Sequence
  Description of Artificial Sequence: Synthetic oligonucleotide
  Antisense strand to SEQ ID NO: 563961
uguuucccaggaugagaau

SEQ ID NO: 563963 - RNA, 19 nt, Artificial Sequence
  Description of Artificial Sequence: Synthetic oligonucleotide
  Sense strand starting at position 2939 of SEQ ID NO: 318453
guacucugccuggaugaca

SEQ ID NO: 563964 - RNA, 19 nt, Artificial Sequence
  Description of Artificial Sequence: Synthetic oligonucleotide
  Antisense strand to SEQ ID NO: 563963
ugucauccaggcagaguac

SEQ ID NO: 563965 - RNA, 19 nt, Artificial Sequence
  Description of Artificial Sequence: Synthetic oligonucleotide
  Sense strand starting at position 3075 of SEQ ID NO: 318453
uuguaacuuugagcaacau

SEQ ID NO: 563966 - RNA, 19 nt, Artificial Sequence
  Description of Artificial Sequence: Synthetic oligonucleotide
  Antisense strand to SEQ ID NO: 563965
auguugcucaaaguuacaa

SEQ ID NO: 563967 - RNA, 19 nt, Artificial Sequence
  Description of Artificial Sequence: Synthetic oligonucleotide
  Sense strand starting at position 3176 of SEQ ID NO: 318453
auauacaugggcuaaugua

SEQ ID NO: 563968 - RNA, 19 nt, Artificial Sequence
  Description of Artificial Sequence: Synthetic oligonucleotide
  Antisense strand to SEQ ID NO: 563967
uacauuagcccauguauau

SEQ ID NO: 563969 - RNA, 19 nt, Artificial Sequence
  Description of Artificial Sequence: Synthetic oligonucleotide
  Sense strand starting at position 3215 of SEQ ID NO: 318453
ggcuuauugcaccaacaua

SEQ ID NO: 563970 - RNA, 19 nt, Artificial Sequence
  Description of Artificial Sequence: Synthetic oligonucleotide
  Antisense strand to SEQ ID NO: 563969
uauguuggugcaauaagcc

SEQ ID NO: 563971 - RNA, 19 nt, Artificial Sequence
  Description of Artificial Sequence: Synthetic oligonucleotide
  Sense strand starting at position 3332 of SEQ ID NO: 318453
acagcaaaccugggauaua

SEQ ID NO: 563972 - RNA, 19 nt, Artificial Sequence
  Description of Artificial Sequence: Synthetic oligonucleotide
  Antisense strand to SEQ ID NO: 563971
uauaucccagguuugcugu

SEQ ID NO: 563973 - RNA, 19 nt, Artificial Sequence
  Description of Artificial Sequence: Synthetic oligonucleotide
  Sense strand starting at position 3335 of SEQ ID NO: 318453
gcaaaccugggauauaugu

SEQ ID NO: 563974 - RNA, 19 nt, Artificial Sequence
  Description of Artificial Sequence: Synthetic oligonucleotide
  Antisense strand to SEQ ID NO: 563973
acauauaucccagguuugc

SEQ ID NO: 563975 - RNA, 19 nt, Artificial Sequence
  Description of Artificial Sequence: Synthetic oligonucleotide
  Sense strand starting at position 3367 of SEQ ID NO: 318453
ggaccuuaauuaucuuguu

SEQ ID NO: 563976 - RNA, 19 nt, Artificial Sequence
  Description of Artificial Sequence: Synthetic oligonucleotide
  Antisense strand to SEQ ID NO: 563975
aacaagauaauuaaggucc

SEQ ID NO: 563977 - RNA, 19 nt, Artificial Sequence
  Description of Artificial Sequence: Synthetic oligonucleotide
  Sense strand starting at position 3436 of SEQ ID NO: 318453
cgcuuccgugccucauaaa

SEQ ID NO: 563978 - RNA, 19 nt, Artificial Sequence
  Description of Artificial Sequence: Synthetic oligonucleotide
  Antisense strand to SEQ ID NO: 563977
uuuaugaggcacggaagcg

SEQ ID NO: 563979 - RNA, 19 nt, Artificial Sequence
  Description of Artificial Sequence: Synthetic oligonucleotide
  Sense strand starting at position 3692 of SEQ ID NO: 318453
gaggcaggauuguuuaaac

SEQ ID NO: 563980 - RNA, 19 nt, Artificial Sequence
  Description of Artificial Sequence: Synthetic oligonucleotide
  Antisense strand to SEQ ID NO: 563979
guuuaaacaauccugccuc

SEQ ID NO: 563981 - RNA, 19 nt, Artificial Sequence
  Description of Artificial Sequence: Synthetic oligonucleotide
  Sense strand starting at position 3703 of SEQ ID NO: 318453
guuuaaacccaagaguuug

SEQ ID NO: 563982 - RNA, 19 nt, Artificial Sequence
  Description of Artificial Sequence: Synthetic oligonucleotide
  Antisense strand to SEQ ID NO: 563981
caaacucuuggguuuaaac

SEQ ID NO: 563983 - RNA, 19 nt, Artificial Sequence
  Description of Artificial Sequence: Synthetic oligonucleotide
  Sense strand starting at position 3917 of SEQ ID NO: 318453
aguuuagcuuguccaauuu

SEQ ID NO: 563984 - RNA, 19 nt, Artificial Sequence
  Description of Artificial Sequence: Synthetic oligonucleotide
  Antisense strand to SEQ ID NO: 563983
aaauuggacaagcuaaacu

SEQ ID NO: 563985 - RNA, 19 nt, Artificial Sequence
  Description of Artificial Sequence: Synthetic oligonucleotide
  Sense strand starting at position 3936 of SEQ ID NO: 318453
auggaacaugucggccaua

SEQ ID NO: 563986 - RNA, 19 nt, Artificial Sequence
  Description of Artificial Sequence: Synthetic oligonucleotide
  Antisense strand to SEQ ID NO: 563985
uauggccgacauguuccau

SEQ ID NO: 563987 - RNA, 19 nt, Artificial Sequence
  Description of Artificial Sequence: Synthetic oligonucleotide
  Sense strand starting at position 3937 of SEQ ID NO: 318453
uggaacaugucggccauau

SEQ ID NO: 563988 - RNA, 19 nt, Artificial Sequence
  Description of Artificial Sequence: Synthetic oligonucleotide
  Antisense strand to SEQ ID NO: 563987
auauggccgacauguucca

SEQ ID NO: 563989 - RNA, 19 nt, Artificial Sequence
  Description of Artificial Sequence: Synthetic oligonucleotide
  Sense strand starting at position 3939 of SEQ ID NO: 318453
gaacaugucggccauauug

SEQ ID NO: 563990 - RNA, 19 nt, Artificial Sequence
  Description of Artificial Sequence: Synthetic oligonucleotide
  Antisense strand to SEQ ID NO: 563989
caauauggccgacauguuc

SEQ ID NO: 563991 - RNA, 19 nt, Artificial Sequence
  Description of Artificial Sequence: Synthetic oligonucleotide
  Sense strand starting at position 3975 of SEQ ID NO: 318453
guccucuuuguccaauuaa

SEQ ID NO: 563992 - RNA, 19 nt, Artificial Sequence
  Description of Artificial Sequence: Synthetic oligonucleotide
  Antisense strand to SEQ ID NO: 563991
uuaauuggacaaagaggac

SEQ ID NO: 563993 - RNA, 19 nt, Artificial Sequence
  Description of Artificial Sequence: Synthetic oligonucleotide
  Sense strand starting at position 312 of SEQ ID NO: 318454
gggucaauuaaggguuaua

SEQ ID NO: 563994 - RNA, 19 nt, Artificial Sequence
  Description of Artificial Sequence: Synthetic oligonucleotide
  Antisense strand to SEQ ID NO: 563993
uauaacccuuaauugaccc

SEQ ID NO: 563995 - RNA, 19 nt, Artificial Sequence
  Description of Artificial Sequence: Synthetic oligonucleotide
  Sense strand starting at position 627 of SEQ ID NO: 318454
guggcaagccuauggaaga

SEQ ID NO: 563996 - RNA, 19 nt, Artificial Sequence
  Description of Artificial Sequence: Synthetic oligonucleotide
  Antisense strand to SEQ ID NO: 563995
ucuuccauaggcuugccac

SEQ ID NO: 563997 - RNA, 19 nt, Artificial Sequence
  Description of Artificial Sequence: Synthetic oligonucleotide
  Sense strand starting at position 646 of SEQ ID NO: 318454
agauacauuguuggaauau

SEQ ID NO: 563998 - RNA, 19 nt, Artificial Sequence
  Description of Artificial Sequence: Synthetic oligonucleotide
  Antisense strand to SEQ ID NO: 563997
auauuccaacaauguaucu

SEQ ID NO: 563999 - RNA, 19 nt, Artificial Sequence
  Description of Artificial Sequence: Synthetic oligonucleotide
  Sense strand starting at position 655 of SEQ ID NO: 318454
guuggaauauaggcucuua

SEQ ID NO: 564000 - RNA, 19 nt, Artificial Sequence
  Description of Artificial Sequence: Synthetic oligonucleotide
  Antisense strand to SEQ ID NO: 563999
uaagagccuauauuccaac

SEQ ID NO: 564001 - RNA, 19 nt, Artificial Sequence
  Description of Artificial Sequence: Synthetic oligonucleotide
  Sense strand starting at position 717 of SEQ ID NO: 318454
ccaaguucucauuaaguga

SEQ ID NO: 564002 - RNA, 19 nt, Artificial Sequence
  Description of Artificial Sequence: Synthetic oligonucleotide
  Antisense strand to SEQ ID NO: 564001
ucacuuaaugagaacuugg

SEQ ID NO: 564003 - RNA, 19 nt, Artificial Sequence
  Description of Artificial Sequence: Synthetic oligonucleotide
  Sense strand starting at position 760 of SEQ ID NO: 318454
ugcuuucucuaaucagaag

SEQ ID NO: 564004 - RNA, 19 nt, Artificial Sequence
  Description of Artificial Sequence: Synthetic oligonucleotide
  Antisense strand to SEQ ID NO: 564003
cuucugauuagagaaagca

SEQ ID NO: 564005 - RNA, 19 nt, Artificial Sequence
  Description of Artificial Sequence: Synthetic oligonucleotide
  Sense strand starting at position 836 of SEQ ID NO: 318454
auaguacucguuuaaacac

SEQ ID NO: 564006 - RNA, 19 nt, Artificial Sequence
  Description of Artificial Sequence: Synthetic oligonucleotide
  Antisense strand to SEQ ID NO: 564005
guguuuaaacgaguacuau

SEQ ID NO: 564007 - RNA, 19 nt, Artificial Sequence
  Description of Artificial Sequence: Synthetic oligonucleotide
  Sense strand starting at position 917 of SEQ ID NO: 318454
cacuaugacugccuuggua

SEQ ID NO: 564008 - RNA, 19 nt, Artificial Sequence
  Description of Artificial Sequence: Synthetic oligonucleotide
  Antisense strand to SEQ ID NO: 564007
uaccaaggcagucauagug

SEQ ID NO: 564009 - RNA, 19 nt, Artificial Sequence
  Description of Artificial Sequence: Synthetic oligonucleotide
  Sense strand starting at position 993 of SEQ ID NO: 318454
uccgguucucauuagauac

SEQ ID NO: 564010 - RNA, 19 nt, Artificial Sequence
  Description of Artificial Sequence: Synthetic oligonucleotide
  Antisense strand to SEQ ID NO: 564009
guaucuaaugagaaccgga

SEQ ID NO: 564011 - RNA, 19 nt, Artificial Sequence
  Description of Artificial Sequence: Synthetic oligonucleotide
  Sense strand starting at position 1085 of SEQ ID NO: 318454
guaguaugccuguaaggaa

SEQ ID NO: 564012 - RNA, 19 nt, Artificial Sequence
  Description of Artificial Sequence: Synthetic oligonucleotide
  Antisense strand to SEQ ID NO: 564011
uuccuuacaggcauacuac

SEQ ID NO: 564013 - RNA, 19 nt, Artificial Sequence
  Description of Artificial Sequence: Synthetic oligonucleotide
  Sense strand starting at position 1092 of SEQ ID NO: 318454
gccuguaaggaagauaagu

SEQ ID NO: 564014 - RNA, 19 nt, Artificial Sequence
  Description of Artificial Sequence: Synthetic oligonucleotide
  Antisense strand to SEQ ID NO: 564013
acuuaucuuccuuacaggc

SEQ ID NO: 564015 - RNA, 19 nt, Artificial Sequence
  Description of Artificial Sequence: Synthetic oligonucleotide
  Sense strand starting at position 2356 of SEQ ID NO: 318454
ggagcucucagugagugaa

SEQ ID NO: 564016 - RNA, 19 nt, Artificial Sequence
  Description of Artificial Sequence: Synthetic oligonucleotide
  Antisense strand to SEQ ID NO: 564015
uucacucacugagagcucc

SEQ ID NO: 564017 - RNA, 19 nt, Artificial Sequence
  Description of Artificial Sequence: Synthetic oligonucleotide
  Sense strand starting at position 2647 of SEQ ID NO: 318454
uuguuugaugggcgggaga

SEQ ID NO: 564018 - RNA, 19 nt, Artificial Sequence
  Description of Artificial Sequence: Synthetic oligonucleotide
  Antisense strand to SEQ ID NO: 564017
ucucccgcccaucaaacaa

SEQ ID NO: 564019 - RNA, 19 nt, Artificial Sequence
  Description of Artificial Sequence: Synthetic oligonucleotide
  Sense strand starting at position 2648 of SEQ ID NO: 318454
uguuugaugggcgggagaa

SEQ ID NO: 564020 - RNA, 19 nt, Artificial Sequence
  Description of Artificial Sequence: Synthetic oligonucleotide
  Antisense strand to SEQ ID NO: 564019
uucucccgcccaucaaaca

SEQ ID NO: 564021 - RNA, 19 nt, Artificial Sequence
  Description of Artificial Sequence: Synthetic oligonucleotide
  Sense strand starting at position 2690 of SEQ ID NO: 318454
gggugcuuggcgcuguuaa

SEQ ID NO: 564022 - RNA, 19 nt, Artificial Sequence
  Description of Artificial Sequence: Synthetic oligonucleotide
  Antisense strand to SEQ ID NO: 564021
uuaacagcgccaagcaccc

SEQ ID NO: 564023 - RNA, 19 nt, Artificial Sequence
  Description of Artificial Sequence: Synthetic oligonucleotide
  Sense strand starting at position 2692 of SEQ ID NO: 318454
gugcuuggcgcuguuaaag

SEQ ID NO: 564024 - RNA, 19 nt, Artificial Sequence
  Description of Artificial Sequence: Synthetic oligonucleotide
  Antisense strand to SEQ ID NO: 564023
cuuuaacagcgccaagcac

SEQ ID NO: 564025 - RNA, 19 nt, Artificial Sequence
  Description of Artificial Sequence: Synthetic oligonucleotide
  Sense strand starting at position 2777 of SEQ ID NO: 318454
cccagaaacuaguuccgua

SEQ ID NO: 564026 - RNA, 19 nt, Artificial Sequence
  Description of Artificial Sequence: Synthetic oligonucleotide
  Antisense strand to SEQ ID NO: 564025
uacggaacuaguuucuggg

SEQ ID NO: 564027 - RNA, 19 nt, Artificial Sequence
  Description of Artificial Sequence: Synthetic oligonucleotide
  Sense strand starting at position 2995 of SEQ ID NO: 318454
ggugaagaauuugaguaga

SEQ ID NO: 564028 - RNA, 19 nt, Artificial Sequence
  Description of Artificial Sequence: Synthetic oligonucleotide
  Antisense strand to SEQ ID NO: 564027
ucuacucaaauucuucacc

SEQ ID NO: 564029 - RNA, 19 nt, Artificial Sequence
  Description of Artificial Sequence: Synthetic oligonucleotide
  Sense strand starting at position 3010 of SEQ ID NO: 318454
uagaaauagugguuaugaa

SEQ ID NO: 564030 - RNA, 19 nt, Artificial Sequence
  Description of Artificial Sequence: Synthetic oligonucleotide
  Antisense strand to SEQ ID NO: 564029
uucauaaccacuauuucua

SEQ ID NO: 564031 - RNA, 19 nt, Artificial Sequence
  Description of Artificial Sequence: Synthetic oligonucleotide
  Sense strand starting at position 3018 of SEQ ID NO: 318454
gugguuaugaaguaagauu

SEQ ID NO: 564032 - RNA, 19 nt, Artificial Sequence
  Description of Artificial Sequence: Synthetic oligonucleotide
  Antisense strand to SEQ ID NO: 564031
aaucuuacuucauaaccac

SEQ ID NO: 564033 - RNA, 19 nt, Artificial Sequence
  Description of Artificial Sequence: Synthetic oligonucleotide
  Sense strand starting at position 3041 of SEQ ID NO: 318454
ccaguauuugcauacguuu

SEQ ID NO: 564034 - RNA, 19 nt, Artificial Sequence
  Description of Artificial Sequence: Synthetic oligonucleotide
  Antisense strand to SEQ ID NO: 564033
aaacguaugcaaauacugg

SEQ ID NO: 564035 - RNA, 19 nt, Artificial Sequence
  Description of Artificial Sequence: Synthetic oligonucleotide
  Sense strand starting at position 3093 of SEQ ID NO: 318454
ccauuauaagucuguugga

SEQ ID NO: 564036 - RNA, 19 nt, Artificial Sequence
  Description of Artificial Sequence: Synthetic oligonucleotide
  Antisense strand to SEQ ID NO: 564035
uccaacagacuuauaaugg

SEQ ID NO: 564037 - RNA, 19 nt, Artificial Sequence
  Description of Artificial Sequence: Synthetic oligonucleotide
  Sense strand starting at position 3094 of SEQ ID NO: 318454
cauuauaagucuguuggau

SEQ ID NO: 564038 - RNA, 19 nt, Artificial Sequence
  Description of Artificial Sequence: Synthetic oligonucleotide
  Antisense strand to SEQ ID NO: 564037
auccaacagacuuauaaug

SEQ ID NO: 564039 - RNA, 19 nt, Artificial Sequence
  Description of Artificial Sequence: Synthetic oligonucleotide
  Sense strand starting at position 3100 of SEQ ID NO: 318454
aagucuguuggauacugau

SEQ ID NO: 564040 - RNA, 19 nt, Artificial Sequence
  Description of Artificial Sequence: Synthetic oligonucleotide
  Antisense strand to SEQ ID NO: 564039
aucaguauccaacagacuu

SEQ ID NO: 564041 - RNA, 19 nt, Artificial Sequence
  Description of Artificial Sequence: Synthetic oligonucleotide
  Sense strand starting at position 3190 of SEQ ID NO: 318454
ggacgugauccacaaugca

SEQ ID NO: 564042 - RNA, 19 nt, Artificial Sequence
  Description of Artificial Sequence: Synthetic oligonucleotide
  Antisense strand to SEQ ID NO: 564041
ugcauuguggaucacgucc

SEQ ID NO: 564043 - RNA, 19 nt, Artificial Sequence
  Description of Artificial Sequence: Synthetic oligonucleotide
  Sense strand starting at position 3223 of SEQ ID NO: 318454
gucaaaugucaagaauguc

SEQ ID NO: 564044 - RNA, 19 nt, Artificial Sequence
  Description of Artificial Sequence: Synthetic oligonucleotide
  Antisense strand to SEQ ID NO: 564043
gacauucuugacauuugac

SEQ ID NO: 564045 - RNA, 19 nt, Artificial Sequence
  Description of Artificial Sequence: Synthetic oligonucleotide
  Sense strand starting at position 3229 of SEQ ID NO: 318454
ugucaagaaugucccagaa

SEQ ID NO: 564046 - RNA, 19 nt, Artificial Sequence
  Description of Artificial Sequence: Synthetic oligonucleotide
  Antisense strand to SEQ ID NO: 564045
uucugggacauucuugaca

SEQ ID NO: 564047 - RNA, 19 nt, Artificial Sequence
  Description of Artificial Sequence: Synthetic oligonucleotide
  Sense strand starting at position 3242 of SEQ ID NO: 318454
ccagaaugcuaguuauaau

SEQ ID NO: 564048 - RNA, 19 nt, Artificial Sequence
  Description of Artificial Sequence: Synthetic oligonucleotide
  Antisense strand to SEQ ID NO: 564047
auuauaacuagcauucugg

SEQ ID NO: 564049 - RNA, 19 nt, Artificial Sequence
  Description of Artificial Sequence: Synthetic oligonucleotide
  Sense strand starting at position 3313 of SEQ ID NO: 318454
uaaggagaaggguguuauu

SEQ ID NO: 564050 - RNA, 19 nt, Artificial Sequence
  Description of Artificial Sequence: Synthetic oligonucleotide
  Antisense strand to SEQ ID NO: 564049
aauaacacccuucuccuua

SEQ ID NO: 564051 - RNA, 19 nt, Artificial Sequence
  Description of Artificial Sequence: Synthetic oligonucleotide
  Sense strand starting at position 3378 of SEQ ID NO: 318454
ggagcuucccaugguuuga

SEQ ID NO: 564052 - RNA, 19 nt, Artificial Sequence
  Description of Artificial Sequence: Synthetic oligonucleotide
  Antisense strand to SEQ ID NO: 564051
ucaaaccaugggaagcucc

SEQ ID NO: 564053 - RNA, 19 nt, Artificial Sequence
  Description of Artificial Sequence: Synthetic oligonucleotide
  Sense strand starting at position 3380 of SEQ ID NO: 318454
agcuucccaugguuugaaa

SEQ ID NO: 564054 - RNA, 19 nt, Artificial Sequence
  Description of Artificial Sequence: Synthetic oligonucleotide
  Antisense strand to SEQ ID NO: 564053
uuucaaaccaugggaagcu

SEQ ID NO: 564055 - RNA, 19 nt, Artificial Sequence
  Description of Artificial Sequence: Synthetic oligonucleotide
  Sense strand starting at position 3382 of SEQ ID NO: 318454
cuucccaugguuugaaauu

SEQ ID NO: 564056 - RNA, 19 nt, Artificial Sequence
  Description of Artificial Sequence: Synthetic oligonucleotide
  Antisense strand to SEQ ID NO: 564055
aauuucaaaccaugggaag

SEQ ID NO: 564057 - RNA, 19 nt, Artificial Sequence
  Description of Artificial Sequence: Synthetic oligonucleotide
  Sense strand starting at position 3408 of SEQ ID NO: 318454
uuguuaaauucucccagga

SEQ ID NO: 564058 - RNA, 19 nt, Artificial Sequence
  Description of Artificial Sequence: Synthetic oligonucleotide
  Antisense strand to SEQ ID NO: 564057
uccugggagaauuuaacaa

SEQ ID NO: 564059 - RNA, 19 nt, Artificial Sequence
  Description of Artificial Sequence: Synthetic oligonucleotide
  Sense strand starting at position 3412 of SEQ ID NO: 318454
uaaauucucccaggaguga

SEQ ID NO: 564060 - RNA, 19 nt, Artificial Sequence
  Description of Artificial Sequence: Synthetic oligonucleotide
  Antisense strand to SEQ ID NO: 564059
ucacuccugggagaauuua

SEQ ID NO: 564061 - RNA, 19 nt, Artificial Sequence
  Description of Artificial Sequence: Synthetic oligonucleotide
  Sense strand starting at position 3447 of SEQ ID NO: 318454
auuggauauugaucuuuga

SEQ ID NO: 564062 - RNA, 19 nt, Artificial Sequence
  Description of Artificial Sequence: Synthetic oligonucleotide
  Antisense strand to SEQ ID NO: 564061
ucaaagaucaauauccaau

SEQ ID NO: 564063 - RNA, 19 nt, Artificial Sequence
  Description of Artificial Sequence: Synthetic oligonucleotide
  Sense strand starting at position 3451 of SEQ ID NO: 318454
gauauugaucuuugagauc

SEQ ID NO: 564064 - RNA, 19 nt, Artificial Sequence
  Description of Artificial Sequence: Synthetic oligonucleotide
  Antisense strand to SEQ ID NO: 564063
gaucucaaagaucaauauc

SEQ ID NO: 564065 - RNA, 19 nt, Artificial Sequence
  Description of Artificial Sequence: Synthetic oligonucleotide
  Sense strand starting at position 3478 of SEQ ID NO: 318454
cugugcuaaggaugaucaa

SEQ ID NO: 564066 - RNA, 19 nt, Artificial Sequence
  Description of Artificial Sequence: Synthetic oligonucleotide
  Antisense strand to SEQ ID NO: 564065
uugaucauccuuagcacag

SEQ ID NO: 564067 - RNA, 19 nt, Artificial Sequence
  Description of Artificial Sequence: Synthetic oligonucleotide
  Sense strand starting at position 3481 of SEQ ID NO: 318454
ugcuaaggaugaucaaacu

SEQ ID NO: 564068 - RNA, 19 nt, Artificial Sequence
  Description of Artificial Sequence: Synthetic oligonucleotide
  Antisense strand to SEQ ID NO: 564067
aguuugaucauccuuagca

SEQ ID NO: 564069 - RNA, 19 nt, Artificial Sequence
  Description of Artificial Sequence: Synthetic oligonucleotide
  Sense strand starting at position 3727 of SEQ ID NO: 318454
gagcuagaguucucaaagu

SEQ ID NO: 564070 - RNA, 19 nt, Artificial Sequence
  Description of Artificial Sequence: Synthetic oligonucleotide
  Antisense strand to SEQ ID NO: 564069
acuuugagaacucuagcuc

SEQ ID NO: 564071 - RNA, 19 nt, Artificial Sequence
  Description of Artificial Sequence: Synthetic oligonucleotide
  Sense strand starting at position 3949 of SEQ ID NO: 318454
gucauucauuaggugggua

SEQ ID NO: 564072 - RNA, 19 nt, Artificial Sequence
  Description of Artificial Sequence: Synthetic oligonucleotide
  Antisense strand to SEQ ID NO: 564071
uacccaccuaaugaaugac

SEQ ID NO: 564073 - RNA, 19 nt, Artificial Sequence
  Description of Artificial Sequence: Synthetic oligonucleotide
  Sense strand starting at position 50 of SEQ ID NO: 318455
agacuugaauccuuuauug

SEQ ID NO: 564074 - RNA, 19 nt, Artificial Sequence
  Description of Artificial Sequence: Synthetic oligonucleotide
  Antisense strand to SEQ ID NO: 564073
caauaaaggauucaagucu

SEQ ID NO: 564075 - RNA, 19 nt, Artificial Sequence
  Description of Artificial Sequence: Synthetic oligonucleotide
  Sense strand starting at position 289 of SEQ ID NO: 318455
cguggcuuacggcuguaau

SEQ ID NO: 564076 - RNA, 19 nt, Artificial Sequence
  Description of Artificial Sequence: Synthetic oligonucleotide
  Antisense strand to SEQ ID NO: 564075
auuacagccguaagccacg

SEQ ID NO: 564077 - RNA, 19 nt, Artificial Sequence
  Description of Artificial Sequence: Synthetic oligonucleotide
  Sense strand starting at position 349 of SEQ ID NO: 318455
ucaggaguucgacaucagu

SEQ ID NO: 564078 - RNA, 19 nt, Artificial Sequence
  Description of Artificial Sequence: Synthetic oligonucleotide
  Antisense strand to SEQ ID NO: 564077
acugaugucgaacuccuga

SEQ ID NO: 564079 - RNA, 19 nt, Artificial Sequence
  Description of Artificial Sequence: Synthetic oligonucleotide
  Sense strand starting at position 359 of SEQ ID NO: 318455
gacaucaguuuggccauau

SEQ ID NO: 564080 - RNA, 19 nt, Artificial Sequence
  Description of Artificial Sequence: Synthetic oligonucleotide
  Antisense strand to SEQ ID NO: 564079
auauggccaaacugauguc

SEQ ID NO: 564081 - RNA, 19 nt, Artificial Sequence
  Description of Artificial Sequence: Synthetic oligonucleotide
  Sense strand starting at position 377 of SEQ ID NO: 318455
uggcgaaauuucgucucua

SEQ ID NO: 564082 - RNA, 19 nt, Artificial Sequence
  Description of Artificial Sequence: Synthetic oligonucleotide
  Antisense strand to SEQ ID NO: 564081
uagagacgaaauuucgcca

SEQ ID NO: 564083 - RNA, 19 nt, Artificial Sequence
  Description of Artificial Sequence: Synthetic oligonucleotide
  Sense strand starting at position 378 of SEQ ID NO: 318455
ggcgaaauuucgucucuau

SEQ ID NO: 564084 - RNA, 19 nt, Artificial Sequence
  Description of Artificial Sequence: Synthetic oligonucleotide
  Antisense strand to SEQ ID NO: 564083
auagagacgaaauuucgcc

SEQ ID NO: 564085 - RNA, 19 nt, Artificial Sequence
  Description of Artificial Sequence: Synthetic oligonucleotide
  Sense strand starting at position 590 of SEQ ID NO: 318455
cucugaauuguccagagug

SEQ ID NO: 564086 - RNA, 19 nt, Artificial Sequence
  Description of Artificial Sequence: Synthetic oligonucleotide
  Antisense strand to SEQ ID NO: 564085
cacucuggacaauucagag

SEQ ID NO: 564087 - RNA, 19 nt, Artificial Sequence
  Description of Artificial Sequence: Synthetic oligonucleotide
  Sense strand starting at position 592 of SEQ ID NO: 318455
cugaauuguccagagugac

SEQ ID NO: 564088 - RNA, 19 nt, Artificial Sequence
  Description of Artificial Sequence: Synthetic oligonucleotide
  Antisense strand to SEQ ID NO: 564087
gucacucuggacaauucag

SEQ ID NO: 564089 - RNA, 19 nt, Artificial Sequence
  Description of Artificial Sequence: Synthetic oligonucleotide
  Sense strand starting at position 983 of SEQ ID NO: 318455
gggucaauuaaggguuaua

SEQ ID NO: 564090 - RNA, 19 nt, Artificial Sequence
  Description of Artificial Sequence: Synthetic oligonucleotide
  Antisense strand to SEQ ID NO: 564089
uauaacccuuaauugaccc

SEQ ID NO: 564091 - RNA, 19 nt, Artificial Sequence
  Description of Artificial Sequence: Synthetic oligonucleotide
  Sense strand starting at position 1286 of SEQ ID NO: 318455
cguuaauauuaaguggcaa

SEQ ID NO: 564092 - RNA, 19 nt, Artificial Sequence
  Description of Artificial Sequence: Synthetic oligonucleotide
  Antisense strand to SEQ ID NO: 564091
uugccacuuaauauuaacg

SEQ ID NO: 564093 - RNA, 19 nt, Artificial Sequence
  Description of Artificial Sequence: Synthetic oligonucleotide
  Sense strand starting at position 1298 of SEQ ID NO: 318455
guggcaagccuauggaaga

SEQ ID NO: 564094 - RNA, 19 nt, Artificial Sequence
  Description of Artificial Sequence: Synthetic oligonucleotide
  Antisense strand to SEQ ID NO: 564093
ucuuccauaggcuugccac

SEQ ID NO: 564095 - RNA, 19 nt, Artificial Sequence
  Description of Artificial Sequence: Synthetic oligonucleotide
  Sense strand starting at position 1317 of SEQ ID NO: 318455
agauacauuguuggaauau

SEQ ID NO: 564096 - RNA, 19 nt, Artificial Sequence
  Description of Artificial Sequence: Synthetic oligonucleotide
  Antisense strand to SEQ ID NO: 564095
auauuccaacaauguaucu

SEQ ID NO: 564097 - RNA, 19 nt, Artificial Sequence
  Description of Artificial Sequence: Synthetic oligonucleotide
  Sense strand starting at position 1326 of SEQ ID NO: 318455
guuggaauauaggcucuua

SEQ ID NO: 564098 - RNA, 19 nt, Artificial Sequence
  Description of Artificial Sequence: Synthetic oligonucleotide
  Antisense strand to SEQ ID NO: 564097
uaagagccuauauuccaac

SEQ ID NO: 564099 - RNA, 19 nt, Artificial Sequence
  Description of Artificial Sequence: Synthetic oligonucleotide
  Sense strand starting at position 1388 of SEQ ID NO: 318455
ccaaguucucauuaaguga

SEQ ID NO: 564100 - RNA, 19 nt, Artificial Sequence
  Description of Artificial Sequence: Synthetic oligonucleotide
  Antisense strand to SEQ ID NO: 564099
ucacuuaaugagaacuugg

SEQ ID NO: 564101 - RNA, 19 nt, Artificial Sequence
  Description of Artificial Sequence: Synthetic oligonucleotide
  Sense strand starting at position 1431 of SEQ ID NO: 318455
ugcuuucucuaaucagaag

SEQ ID NO: 564102 - RNA, 19 nt, Artificial Sequence
  Description of Artificial Sequence: Synthetic oligonucleotide
  Antisense strand to SEQ ID NO: 564101
cuucugauuagagaaagca

SEQ ID NO: 564103 - RNA, 19 nt, Artificial Sequence
  Description of Artificial Sequence: Synthetic oligonucleotide
  Sense strand starting at position 1451 of SEQ ID NO: 318455
ugggcugugcacugaaaua

SEQ ID NO: 564104 - RNA, 19 nt, Artificial Sequence
  Description of Artificial Sequence: Synthetic oligonucleotide
  Antisense strand to SEQ ID NO: 564103
uauuucagugcacagccca

SEQ ID NO: 564105 - RNA, 19 nt, Artificial Sequence
  Description of Artificial Sequence: Synthetic oligonucleotide
  Sense strand starting at position 1507 of SEQ ID NO: 318455
auaguacucguuuaaacac

SEQ ID NO: 564106 - RNA, 19 nt, Artificial Sequence
  Description of Artificial Sequence: Synthetic oligonucleotide
  Antisense strand to SEQ ID NO: 564105
guguuuaaacgaguacuau

SEQ ID NO: 564107 - RNA, 19 nt, Artificial Sequence
  Description of Artificial Sequence: Synthetic oligonucleotide
  Sense strand starting at position 1588 of SEQ ID NO: 318455
cacuaugacugccuuggua

SEQ ID NO: 564108 - RNA, 19 nt, Artificial Sequence
  Description of Artificial Sequence: Synthetic oligonucleotide
  Antisense strand to SEQ ID NO: 564107
uaccaaggcagucauagug

SEQ ID NO: 564109 - RNA, 19 nt, Artificial Sequence
  Description of Artificial Sequence: Synthetic oligonucleotide
  Sense strand starting at position 1664 of SEQ ID NO: 318455
uccgguucucauuagauac

SEQ ID NO: 564110 - RNA, 19 nt, Artificial Sequence
  Description of Artificial Sequence: Synthetic oligonucleotide
  Antisense strand to SEQ ID NO: 564109
guaucuaaugagaaccgga

SEQ ID NO: 564111 - RNA, 19 nt, Artificial Sequence
  Description of Artificial Sequence: Synthetic oligonucleotide
  Sense strand starting at position 1756 of SEQ ID NO: 318455
guaguaugccuguaaggaa

SEQ ID NO: 564112 - RNA, 19 nt, Artificial Sequence
  Description of Artificial Sequence: Synthetic oligonucleotide
  Antisense strand to SEQ ID NO: 564111
uuccuuacaggcauacuac

SEQ ID NO: 564113 - RNA, 19 nt, Artificial Sequence
  Description of Artificial Sequence: Synthetic oligonucleotide
  Sense strand starting at position 1763 of SEQ ID NO: 318455
gccuguaaggaagauaagu

SEQ ID NO: 564114 - RNA, 19 nt, Artificial Sequence
  Description of Artificial Sequence: Synthetic oligonucleotide
  Antisense strand to SEQ ID NO: 564113
acuuaucuuccuuacaggc

SEQ ID NO: 564115 - RNA, 19 nt, Artificial Sequence
  Description of Artificial Sequence: Synthetic oligonucleotide
  Sense strand starting at position 3026 of SEQ ID NO: 318455
uggagcucucagugaguga

SEQ ID NO: 564116 - RNA, 19 nt, Artificial Sequence
  Description of Artificial Sequence: Synthetic oligonucleotide
  Antisense strand to SEQ ID NO: 564115
ucacucacugagagcucca

SEQ ID NO: 564117 - RNA, 19 nt, Artificial Sequence
  Description of Artificial Sequence: Synthetic oligonucleotide
  Sense strand starting at position 3027 of SEQ ID NO: 318455
ggagcucucagugagugaa

SEQ ID NO: 564118 - RNA, 19 nt, Artificial Sequence
  Description of Artificial Sequence: Synthetic oligonucleotide
  Antisense strand to SEQ ID NO: 564117
uucacucacugagagcucc

SEQ ID NO: 564119 - RNA, 19 nt, Artificial Sequence
  Description of Artificial Sequence: Synthetic oligonucleotide
  Sense strand starting at position 3318 of SEQ ID NO: 318455
uuguuugaugggcgggaga

SEQ ID NO: 564120 - RNA, 19 nt, Artificial Sequence
  Description of Artificial Sequence: Synthetic oligonucleotide
  Antisense strand to SEQ ID NO: 564119
ucucccgcccaucaaacaa

SEQ ID NO: 564121 - RNA, 19 nt, Artificial Sequence
  Description of Artificial Sequence: Synthetic oligonucleotide
  Sense strand starting at position 3319 of SEQ ID NO: 318455
uguuugaugggcgggagaa

SEQ ID NO: 564122 - RNA, 19 nt, Artificial Sequence
  Description of Artificial Sequence: Synthetic oligonucleotide
  Antisense strand to SEQ ID NO: 564121
uucucccgcccaucaaaca

SEQ ID NO: 564123 - RNA, 19 nt, Artificial Sequence
  Description of Artificial Sequence: Synthetic oligonucleotide
  Sense strand starting at position 3361 of SEQ ID NO: 318455
gggugcuuggcgcuguuaa

SEQ ID NO: 564124 - RNA, 19 nt, Artificial Sequence
  Description of Artificial Sequence: Synthetic oligonucleotide
  Antisense strand to SEQ ID NO: 564123
uuaacagcgccaagcaccc

SEQ ID NO: 564125 - RNA, 19 nt, Artificial Sequence
  Description of Artificial Sequence: Synthetic oligonucleotide
  Sense strand starting at position 3363 of SEQ ID NO: 318455
gugcuuggcgcuguuaaag

SEQ ID NO: 564126 - RNA, 19 nt, Artificial Sequence
  Description of Artificial Sequence: Synthetic oligonucleotide
  Antisense strand to SEQ ID NO: 564125
cuuuaacagcgccaagcac

SEQ ID NO: 564127 - RNA, 19 nt, Artificial Sequence
  Description of Artificial Sequence: Synthetic oligonucleotide
  Sense strand starting at position 3372 of SEQ ID NO: 318455
gcuguuaaagccggagaga

SEQ ID NO: 564128 - RNA, 19 nt, Artificial Sequence
  Description of Artificial Sequence: Synthetic oligonucleotide
  Antisense strand to SEQ ID NO: 564127
ucucuccggcuuuaacagc

SEQ ID NO: 564129 - RNA, 19 nt, Artificial Sequence
  Description of Artificial Sequence: Synthetic oligonucleotide
  Sense strand starting at position 3448 of SEQ ID NO: 318455
cccagaaacuaguuccgua

SEQ ID NO: 564130 - RNA, 19 nt, Artificial Sequence
  Description of Artificial Sequence: Synthetic oligonucleotide
  Antisense strand to SEQ ID NO: 564129
uacggaacuaguuucuggg

SEQ ID NO: 564131 - RNA, 19 nt, Artificial Sequence
  Description of Artificial Sequence: Synthetic oligonucleotide
  Sense strand starting at position 3666 of SEQ ID NO: 318455
ggugaagaauuugaguaga

SEQ ID NO: 564132 - RNA, 19 nt, Artificial Sequence
  Description of Artificial Sequence: Synthetic oligonucleotide
  Antisense strand to SEQ ID NO: 564131
ucuacucaaauucuucacc

SEQ ID NO: 564133 - RNA, 19 nt, Artificial Sequence
  Description of Artificial Sequence: Synthetic oligonucleotide
  Sense strand starting at position 3681 of SEQ ID NO: 318455
uagaaauagugguuaugaa

SEQ ID NO: 564134 - RNA, 19 nt, Artificial Sequence
  Description of Artificial Sequence: Synthetic oligonucleotide
  Antisense strand to SEQ ID NO: 564133
uucauaaccacuauuucua

SEQ ID NO: 564135 - RNA, 19 nt, Artificial Sequence
  Description of Artificial Sequence: Synthetic oligonucleotide
  Sense strand starting at position 3689 of SEQ ID NO: 318455
gugguuaugaaguaagauu

SEQ ID NO: 564136 - RNA, 19 nt, Artificial Sequence
  Description of Artificial Sequence: Synthetic oligonucleotide
  Antisense strand to SEQ ID NO: 564135
aaucuuacuucauaaccac

SEQ ID NO: 564137 - RNA, 19 nt, Artificial Sequence
  Description of Artificial Sequence: Synthetic oligonucleotide
  Sense strand starting at position 3712 of SEQ ID NO: 318455
ccaguauuugcauacguuu

SEQ ID NO: 564138 - RNA, 19 nt, Artificial Sequence
  Description of Artificial Sequence: Synthetic oligonucleotide
  Antisense strand to SEQ ID NO: 564137
aaacguaugcaaauacugg

SEQ ID NO: 564139 - RNA, 19 nt, Artificial Sequence
  Description of Artificial Sequence: Synthetic oligonucleotide
  Sense strand starting at position 3764 of SEQ ID NO: 318455
ccauuauaagucuguugga

SEQ ID NO: 564140 - RNA, 19 nt, Artificial Sequence
  Description of Artificial Sequence: Synthetic oligonucleotide
  Antisense strand to SEQ ID NO: 564139
uccaacagacuuauaaugg

SEQ ID NO: 564141 - RNA, 19 nt, Artificial Sequence
  Description of Artificial Sequence: Synthetic oligonucleotide
  Sense strand starting at position 3765 of SEQ ID NO: 318455
cauuauaagucuguuggau

SEQ ID NO: 564142 - RNA, 19 nt, Artificial Sequence
  Description of Artificial Sequence: Synthetic oligonucleotide
  Antisense strand to SEQ ID NO: 564141
auccaacagacuuauaaug

SEQ ID NO: 564143 - RNA, 19 nt, Artificial Sequence
  Description of Artificial Sequence: Synthetic oligonucleotide
  Sense strand starting at position 3771 of SEQ ID NO: 318455
aagucuguuggauacugau

SEQ ID NO: 564144 - RNA, 19 nt, Artificial Sequence
  Description of Artificial Sequence: Synthetic oligonucleotide
  Antisense strand to SEQ ID NO: 564143
aucaguauccaacagacuu

SEQ ID NO: 564145 - RNA, 19 nt, Artificial Sequence
  Description of Artificial Sequence: Synthetic oligonucleotide
  Sense strand starting at position 3861 of SEQ ID NO: 318455
ggacgugauccacaaugca

SEQ ID NO: 564146 - RNA, 19 nt, Artificial Sequence
  Description of Artificial Sequence: Synthetic oligonucleotide
  Antisense strand to SEQ ID NO: 564145
ugcauuguggaucacgucc

SEQ ID NO: 564147 - RNA, 19 nt, Artificial Sequence
  Description of Artificial Sequence: Synthetic oligonucleotide
  Sense strand starting at position 3894 of SEQ ID NO: 318455
gucaaaugucaagaauguc

SEQ ID NO: 564148 - RNA, 19 nt, Artificial Sequence
  Description of Artificial Sequence: Synthetic oligonucleotide
  Antisense strand to SEQ ID NO: 564147
gacauucuugacauuugac

SEQ ID NO: 564149 - RNA, 19 nt, Artificial Sequence
  Description of Artificial Sequence: Synthetic oligonucleotide
  Sense strand starting at position 3900 of SEQ ID NO: 318455
ugucaagaaugucccagaa

SEQ ID NO: 564150 - RNA, 19 nt, Artificial Sequence
  Description of Artificial Sequence: Synthetic oligonucleotide
  Antisense strand to SEQ ID NO: 564149
uucugggacauucuugaca

SEQ ID NO: 564151 - RNA, 19 nt, Artificial Sequence
  Description of Artificial Sequence: Synthetic oligonucleotide
  Sense strand starting at position 3913 of SEQ ID NO: 318455
ccagaaugcuaguuauaau

SEQ ID NO: 564152 - RNA, 19 nt, Artificial Sequence
  Description of Artificial Sequence: Synthetic oligonucleotide
  Antisense strand to SEQ ID NO: 564151
auuauaacuagcauucugg

SEQ ID NO: 564153 - RNA, 19 nt, Artificial Sequence
  Description of Artificial Sequence: Synthetic oligonucleotide
  Sense strand starting at position 15 of SEQ ID NO: 318456
ccugcacacccguggaaau

SEQ ID NO: 564154 - RNA, 19 nt, Artificial Sequence
  Description of Artificial Sequence: Synthetic oligonucleotide
  Antisense strand to SEQ ID NO: 564153
auuuccacgggugugcagg

SEQ ID NO: 564155 - RNA, 19 nt, Artificial Sequence
  Description of Artificial Sequence: Synthetic oligonucleotide
  Sense strand starting at position 67 of SEQ ID NO: 318456
cgguguggaugcagucauu

SEQ ID NO: 564156 - RNA, 19 nt, Artificial Sequence
  Description of Artificial Sequence: Synthetic oligonucleotide
  Antisense strand to SEQ ID NO: 564155
aaugacugcauccacaccg

SEQ ID NO: 564157 - RNA, 19 nt, Artificial Sequence
  Description of Artificial Sequence: Synthetic oligonucleotide
  Sense strand starting at position 76 of SEQ ID NO: 318456
ugcagucauucugaaacuc

SEQ ID NO: 564158 - RNA, 19 nt, Artificial Sequence
  Description of Artificial Sequence: Synthetic oligonucleotide
  Antisense strand to SEQ ID NO: 564157
gaguuucagaaugacugca

SEQ ID NO: 564159 - RNA, 19 nt, Artificial Sequence
  Description of Artificial Sequence: Synthetic oligonucleotide
  Sense strand starting at position 100 of SEQ ID NO: 318456
gggugcauuguggagcuaa

SEQ ID NO: 564160 - RNA, 19 nt, Artificial Sequence
  Description of Artificial Sequence: Synthetic oligonucleotide
  Antisense strand to SEQ ID NO: 564159
uuagcuccacaaugcaccc

SEQ ID NO: 564161 - RNA, 19 nt, Artificial Sequence
  Description of Artificial Sequence: Synthetic oligonucleotide
  Sense strand starting at position 101 of SEQ ID NO: 318456
ggugcauuguggagcuaag

SEQ ID NO: 564162 - RNA, 19 nt, Artificial Sequence
  Description of Artificial Sequence: Synthetic oligonucleotide
  Antisense strand to SEQ ID NO: 564161
cuuagcuccacaaugcacc

SEQ ID NO: 564163 - RNA, 19 nt, Artificial Sequence
  Description of Artificial Sequence: Synthetic oligonucleotide
  Sense strand starting at position 149 of SEQ ID NO: 318456
gaauaagguucucacugca

SEQ ID NO: 564164 - RNA, 19 nt, Artificial Sequence
  Description of Artificial Sequence: Synthetic oligonucleotide
  Antisense strand to SEQ ID NO: 564163
ugcagugagaaccuuauuc

SEQ ID NO: 564165 - RNA, 19 nt, Artificial Sequence
  Description of Artificial Sequence: Synthetic oligonucleotide
  Sense strand starting at position 152 of SEQ ID NO: 318456
uaagguucucacugcagga

SEQ ID NO: 564166 - RNA, 19 nt, Artificial Sequence
  Description of Artificial Sequence: Synthetic oligonucleotide
  Antisense strand to SEQ ID NO: 564165
uccugcagugagaaccuua

SEQ ID NO: 564167 - RNA, 19 nt, Artificial Sequence
  Description of Artificial Sequence: Synthetic oligonucleotide
  Sense strand starting at position 156 of SEQ ID NO: 318456
guucucacugcaggagaaa

SEQ ID NO: 564168 - RNA, 19 nt, Artificial Sequence
  Description of Artificial Sequence: Synthetic oligonucleotide
  Antisense strand to SEQ ID NO: 564167
uuucuccugcagugagaac

SEQ ID NO: 564169 - RNA, 19 nt, Artificial Sequence
  Description of Artificial Sequence: Synthetic oligonucleotide
  Sense strand starting at position 795 of SEQ ID NO: 318456
cgcauaagaucuuggccau

SEQ ID NO: 564170 - RNA, 19 nt, Artificial Sequence
  Description of Artificial Sequence: Synthetic oligonucleotide
  Antisense strand to SEQ ID NO: 564169
auggccaagaucuuaugcg

SEQ ID NO: 564171 - RNA, 19 nt, Artificial Sequence
  Description of Artificial Sequence: Synthetic oligonucleotide
  Sense strand starting at position 796 of SEQ ID NO: 318456
gcauaagaucuuggccaug

SEQ ID NO: 564172 - RNA, 19 nt, Artificial Sequence
  Description of Artificial Sequence: Synthetic oligonucleotide
  Antisense strand to SEQ ID NO: 564171
cauggccaagaucuuaugc

SEQ ID NO: 564173 - RNA, 19 nt, Artificial Sequence
  Description of Artificial Sequence: Synthetic oligonucleotide
  Sense strand starting at position 825 of SEQ ID NO: 318456
ugccuuugauuucuuguuu

SEQ ID NO: 564174 - RNA, 19 nt, Artificial Sequence
  Description of Artificial Sequence: Synthetic oligonucleotide
  Antisense strand to SEQ ID NO: 564173
aaacaagaaaucaaaggca

SEQ ID NO: 564175 - RNA, 19 nt, Artificial Sequence
  Description of Artificial Sequence: Synthetic oligonucleotide
  Sense strand starting at position 913 of SEQ ID NO: 318456
caaugaauguggccaguga

SEQ ID NO: 564176 - RNA, 19 nt, Artificial Sequence
  Description of Artificial Sequence: Synthetic oligonucleotide
  Antisense strand to SEQ ID NO: 564175
ucacuggccacauucauug

SEQ ID NO: 564177 - RNA, 19 nt, Artificial Sequence
  Description of Artificial Sequence: Synthetic oligonucleotide
  Sense strand starting at position 1080 of SEQ ID NO: 318456
ggcagagcuucccaggacu

SEQ ID NO: 564178 - RNA, 19 nt, Artificial Sequence
  Description of Artificial Sequence: Synthetic oligonucleotide
  Antisense strand to SEQ ID NO: 564177
aguccugggaagcucugcc

SEQ ID NO: 564179 - RNA, 19 nt, Artificial Sequence
  Description of Artificial Sequence: Synthetic oligonucleotide
  Sense strand starting at position 1200 of SEQ ID NO: 318456
cucugucuuucccacaguu

SEQ ID NO: 564180 - RNA, 19 nt, Artificial Sequence
  Description of Artificial Sequence: Synthetic oligonucleotide
  Antisense strand to SEQ ID NO: 564179
aacugugggaaagacagag

SEQ ID NO: 564181 - RNA, 19 nt, Artificial Sequence
  Description of Artificial Sequence: Synthetic oligonucleotide
  Sense strand starting at position 1411 of SEQ ID NO: 318456
gcugguccuuuccucaaau

SEQ ID NO: 564182 - RNA, 19 nt, Artificial Sequence
  Description of Artificial Sequence: Synthetic oligonucleotide
  Antisense strand to SEQ ID NO: 564181
auuugaggaaaggaccagc

SEQ ID NO: 564183 - RNA, 19 nt, Artificial Sequence
  Description of Artificial Sequence: Synthetic oligonucleotide
  Sense strand starting at position 1558 of SEQ ID NO: 318456
ggguggaggcuuuggucua

SEQ ID NO: 564184 - RNA, 19 nt, Artificial Sequence
  Description of Artificial Sequence: Synthetic oligonucleotide
  Antisense strand to SEQ ID NO: 564183
uagaccaaagccuccaccc

SEQ ID NO: 564185 - RNA, 19 nt, Artificial Sequence
  Description of Artificial Sequence: Synthetic oligonucleotide
  Sense strand starting at position 1593 of SEQ ID NO: 318456
cacucuagcggcugaaaga

SEQ ID NO: 564186 - RNA, 19 nt, Artificial Sequence
  Description of Artificial Sequence: Synthetic oligonucleotide
  Antisense strand to SEQ ID NO: 564185
ucuuucagccgcuagagug

SEQ ID NO: 564187 - RNA, 19 nt, Artificial Sequence
  Description of Artificial Sequence: Synthetic oligonucleotide
  Sense strand starting at position 2547 of SEQ ID NO: 318456
ggaggauggcgaugcauga

SEQ ID NO: 564188 - RNA, 19 nt, Artificial Sequence
  Description of Artificial Sequence: Synthetic oligonucleotide
  Antisense strand to SEQ ID NO: 564187
ucaugcaucgccauccucc

SEQ ID NO: 564189 - RNA, 19 nt, Artificial Sequence
  Description of Artificial Sequence: Synthetic oligonucleotide
  Sense strand starting at position 2616 of SEQ ID NO: 318456
ugaacugggucuucaguga

SEQ ID NO: 564190 - RNA, 19 nt, Artificial Sequence
  Description of Artificial Sequence: Synthetic oligonucleotide
  Antisense strand to SEQ ID NO: 564189
ucacugaagacccaguuca

SEQ ID NO: 564191 - RNA, 19 nt, Artificial Sequence
  Description of Artificial Sequence: Synthetic oligonucleotide
  Sense strand starting at position 2642 of SEQ ID NO: 318456
ccugguuggucccagcaua

SEQ ID NO: 564192 - RNA, 19 nt, Artificial Sequence
  Description of Artificial Sequence: Synthetic oligonucleotide
  Antisense strand to SEQ ID NO: 564191
uaugcugggaccaaccagg

SEQ ID NO: 564193 - RNA, 19 nt, Artificial Sequence
  Description of Artificial Sequence: Synthetic oligonucleotide
  Sense strand starting at position 3168 of SEQ ID NO: 318456
ugcugauugguccguuuca

SEQ ID NO: 564194 - RNA, 19 nt, Artificial Sequence
  Description of Artificial Sequence: Synthetic oligonucleotide
  Antisense strand to SEQ ID NO: 564193
ugaaacggaccaaucagca

SEQ ID NO: 564195 - RNA, 19 nt, Artificial Sequence
  Description of Artificial Sequence: Synthetic oligonucleotide
  Sense strand starting at position 3321 of SEQ ID NO: 318456
ggaccugccugaugagaug

SEQ ID NO: 564196 - RNA, 19 nt, Artificial Sequence
  Description of Artificial Sequence: Synthetic oligonucleotide
  Antisense strand to SEQ ID NO: 564195
caucucaucaggcaggucc

SEQ ID NO: 564197 - RNA, 19 nt, Artificial Sequence
  Description of Artificial Sequence: Synthetic oligonucleotide
  Sense strand starting at position 3402 of SEQ ID NO: 318456
agguuuacugcuuagagga

SEQ ID NO: 564198 - RNA, 19 nt, Artificial Sequence
  Description of Artificial Sequence: Synthetic oligonucleotide
  Antisense strand to SEQ ID NO: 564197
uccucuaagcaguaaaccu

SEQ ID NO: 564199 - RNA, 19 nt, Artificial Sequence
  Description of Artificial Sequence: Synthetic oligonucleotide
  Sense strand starting at position 3404 of SEQ ID NO: 318456
guuuacugcuuagaggaau

SEQ ID NO: 564200 - RNA, 19 nt, Artificial Sequence
  Description of Artificial Sequence: Synthetic oligonucleotide
  Antisense strand to SEQ ID NO: 564199
auuccucuaagcaguaaac

SEQ ID NO: 564201 - RNA, 19 nt, Artificial Sequence
  Description of Artificial Sequence: Synthetic oligonucleotide
  Sense strand starting at position 3439 of SEQ ID NO: 318456
uuaaccuaugugcauagaa

SEQ ID NO: 564202 - RNA, 19 nt, Artificial Sequence
  Description of Artificial Sequence: Synthetic oligonucleotide
  Antisense strand to SEQ ID NO: 564201
uucuaugcacauagguuaa

SEQ ID NO: 564203 - RNA, 19 nt, Artificial Sequence
  Description of Artificial Sequence: Synthetic oligonucleotide
  Sense strand starting at position 3476 of SEQ ID NO: 318456
ccagucuuucuguggcaga

SEQ ID NO: 564204 - RNA, 19 nt, Artificial Sequence
  Description of Artificial Sequence: Synthetic oligonucleotide
  Antisense strand to SEQ ID NO: 564203
ucugccacagaaagacugg

SEQ ID NO: 564205 - RNA, 19 nt, Artificial Sequence
  Description of Artificial Sequence: Synthetic oligonucleotide
  Sense strand starting at position 3477 of SEQ ID NO: 318456
cagucuuucuguggcagaa

SEQ ID NO: 564206 - RNA, 19 nt, Artificial Sequence
  Description of Artificial Sequence: Synthetic oligonucleotide
  Antisense strand to SEQ ID NO: 564205
uucugccacagaaagacug

SEQ ID NO: 564207 - RNA, 19 nt, Artificial Sequence
  Description of Artificial Sequence: Synthetic oligonucleotide
  Sense strand starting at position 3479 of SEQ ID NO: 318456
gucuuucuguggcagaaug

SEQ ID NO: 564208 - RNA, 19 nt, Artificial Sequence
  Description of Artificial Sequence: Synthetic oligonucleotide
  Antisense strand to SEQ ID NO: 564207
cauucugccacagaaagac

SEQ ID NO: 564209 - RNA, 19 nt, Artificial Sequence
  Description of Artificial Sequence: Synthetic oligonucleotide
  Sense strand starting at position 3522 of SEQ ID NO: 318456
ggcacagcugccugauagu

SEQ ID NO: 564210 - RNA, 19 nt, Artificial Sequence
  Description of Artificial Sequence: Synthetic oligonucleotide
  Antisense strand to SEQ ID NO: 564209
acuaucaggcagcugugcc

SEQ ID NO: 564211 - RNA, 19 nt, Artificial Sequence
  Description of Artificial Sequence: Synthetic oligonucleotide
  Sense strand starting at position 3659 of SEQ ID NO: 318456
gaguuaguccugugucagc

SEQ ID NO: 564212 - RNA, 19 nt, Artificial Sequence
  Description of Artificial Sequence: Synthetic oligonucleotide
  Antisense strand to SEQ ID NO: 564211
gcugacacaggacuaacuc

SEQ ID NO: 564213 - RNA, 19 nt, Artificial Sequence
  Description of Artificial Sequence: Synthetic oligonucleotide
  Sense strand starting at position 3661 of SEQ ID NO: 318456
guuaguccugugucagcuu

SEQ ID NO: 564214 - RNA, 19 nt, Artificial Sequence
  Description of Artificial Sequence: Synthetic oligonucleotide
  Antisense strand to SEQ ID NO: 564213
aagcugacacaggacuaac

SEQ ID NO: 564215 - RNA, 19 nt, Artificial Sequence
  Description of Artificial Sequence: Synthetic oligonucleotide
  Sense strand starting at position 3664 of SEQ ID NO: 318456
aguccugugucagcuuuga

SEQ ID NO: 564216 - RNA, 19 nt, Artificial Sequence
  Description of Artificial Sequence: Synthetic oligonucleotide
  Antisense strand to SEQ ID NO: 564215
ucaaagcugacacaggacu

SEQ ID NO: 564217 - RNA, 19 nt, Artificial Sequence
  Description of Artificial Sequence: Synthetic oligonucleotide
  Sense strand starting at position 3668 of SEQ ID NO: 318456
cugugucagcuuugaggau

SEQ ID NO: 564218 - RNA, 19 nt, Artificial Sequence
  Description of Artificial Sequence: Synthetic oligonucleotide
  Antisense strand to SEQ ID NO: 564217
auccucaaagcugacacag

SEQ ID NO: 564219 - RNA, 19 nt, Artificial Sequence
  Description of Artificial Sequence: Synthetic oligonucleotide
  Sense strand starting at position 3674 of SEQ ID NO: 318456
cagcuuugaggauggagua

SEQ ID NO: 564220 - RNA, 19 nt, Artificial Sequence
  Description of Artificial Sequence: Synthetic oligonucleotide
  Antisense strand to SEQ ID NO: 564219
uacuccauccucaaagcug

SEQ ID NO: 564221 - RNA, 19 nt, Artificial Sequence
  Description of Artificial Sequence: Synthetic oligonucleotide
  Sense strand starting at position 3675 of SEQ ID NO: 318456
agcuuugaggauggaguaa

SEQ ID NO: 564222 - RNA, 19 nt, Artificial Sequence
  Description of Artificial Sequence: Synthetic oligonucleotide
  Antisense strand to SEQ ID NO: 564221
uuacuccauccucaaagcu

SEQ ID NO: 564223 - RNA, 19 nt, Artificial Sequence
  Description of Artificial Sequence: Synthetic oligonucleotide
  Sense strand starting at position 3715 of SEQ ID NO: 318456
gaaggcuguuccuggaaga

SEQ ID NO: 564224 - RNA, 19 nt, Artificial Sequence
  Description of Artificial Sequence: Synthetic oligonucleotide
  Antisense strand to SEQ ID NO: 564223
ucuuccaggaacagccuuc

SEQ ID NO: 564225 - RNA, 19 nt, Artificial Sequence
  Description of Artificial Sequence: Synthetic oligonucleotide
  Sense strand starting at position 3716 of SEQ ID NO: 318456
aaggcuguuccuggaagaa

SEQ ID NO: 564226 - RNA, 19 nt, Artificial Sequence
  Description of Artificial Sequence: Synthetic oligonucleotide
  Antisense strand to SEQ ID NO: 564225
uucuuccaggaacagccuu

SEQ ID NO: 564227 - RNA, 19 nt, Artificial Sequence
  Description of Artificial Sequence: Synthetic oligonucleotide
  Sense strand starting at position 3816 of SEQ ID NO: 318456
agggcauacagauguauua

SEQ ID NO: 564228 - RNA, 19 nt, Artificial Sequence
  Description of Artificial Sequence: Synthetic oligonucleotide
  Antisense strand to SEQ ID NO: 564227
uaauacaucuguaugcccu

SEQ ID NO: 564229 - RNA, 19 nt, Artificial Sequence
  Description of Artificial Sequence: Synthetic oligonucleotide
  Sense strand starting at position 3823 of SEQ ID NO: 318456
acagauguauuagaaugaa

SEQ ID NO: 564230 - RNA, 19 nt, Artificial Sequence
  Description of Artificial Sequence: Synthetic oligonucleotide
  Antisense strand to SEQ ID NO: 564229
uucauucuaauacaucugu

SEQ ID NO: 564231 - RNA, 19 nt, Artificial Sequence
  Description of Artificial Sequence: Synthetic oligonucleotide
  Sense strand starting at position 3826 of SEQ ID NO: 318456
gauguauuagaaugaaugu

SEQ ID NO: 564232 - RNA, 19 nt, Artificial Sequence
  Description of Artificial Sequence: Synthetic oligonucleotide
  Antisense strand to SEQ ID NO: 564231
acauucauucuaauacauc

SEQ ID NO: 564233 - RNA, 19 nt, Artificial Sequence
  Description of Artificial Sequence: Synthetic oligonucleotide
  Sense strand starting at position 29 of SEQ ID NO: 318457
uaugaauuguaacagguaa

SEQ ID NO: 564234 - RNA, 19 nt, Artificial Sequence
  Description of Artificial Sequence: Synthetic oligonucleotide
  Antisense strand to SEQ ID NO: 564233
uuaccuguuacaauucaua

SEQ ID NO: 564235 - RNA, 19 nt, Artificial Sequence
  Description of Artificial Sequence: Synthetic oligonucleotide
  Sense strand starting at position 381 of SEQ ID NO: 318457
ucuauaaaguuggaaauca

SEQ ID NO: 564236 - RNA, 19 nt, Artificial Sequence
  Description of Artificial Sequence: Synthetic oligonucleotide
  Antisense strand to SEQ ID NO: 564235
ugauuuccaacuuuauaga

SEQ ID NO: 564237 - RNA, 19 nt, Artificial Sequence
  Description of Artificial Sequence: Synthetic oligonucleotide
  Sense strand starting at position 405 of SEQ ID NO: 318457
ucaaaugacucugaacaag

SEQ ID NO: 564238 - RNA, 19 nt, Artificial Sequence
  Description of Artificial Sequence: Synthetic oligonucleotide
  Antisense strand to SEQ ID NO: 564237
cuuguucagagucauuuga

SEQ ID NO: 564239 - RNA, 19 nt, Artificial Sequence
  Description of Artificial Sequence: Synthetic oligonucleotide
  Sense strand starting at position 484 of SEQ ID NO: 318457
aucacuuaagucuguuaau

SEQ ID NO: 564240 - RNA, 19 nt, Artificial Sequence
  Description of Artificial Sequence: Synthetic oligonucleotide
  Antisense strand to SEQ ID NO: 564239
auuaacagacuuaagugau

SEQ ID NO: 564241 - RNA, 19 nt, Artificial Sequence
  Description of Artificial Sequence: Synthetic oligonucleotide
  Sense strand starting at position 485 of SEQ ID NO: 318457
ucacuuaagucuguuaaug

SEQ ID NO: 564242 - RNA, 19 nt, Artificial Sequence
  Description of Artificial Sequence: Synthetic oligonucleotide
  Antisense strand to SEQ ID NO: 564241
cauuaacagacuuaaguga

SEQ ID NO: 564243 - RNA, 19 nt, Artificial Sequence
  Description of Artificial Sequence: Synthetic oligonucleotide
  Sense strand starting at position 587 of SEQ ID NO: 318457
ggguuagguaggcaucuua

SEQ ID NO: 564244 - RNA, 19 nt, Artificial Sequence
  Description of Artificial Sequence: Synthetic oligonucleotide
  Antisense strand to SEQ ID NO: 564243
uaagaugccuaccuaaccc

SEQ ID NO: 564245 - RNA, 19 nt, Artificial Sequence
  Description of Artificial Sequence: Synthetic oligonucleotide
  Sense strand starting at position 596 of SEQ ID NO: 318457
aggcaucuuacggaucacu

SEQ ID NO: 564246 - RNA, 19 nt, Artificial Sequence
  Description of Artificial Sequence: Synthetic oligonucleotide
  Antisense strand to SEQ ID NO: 564245
agugauccguaagaugccu

SEQ ID NO: 564247 - RNA, 19 nt, Artificial Sequence
  Description of Artificial Sequence: Synthetic oligonucleotide
  Sense strand starting at position 651 of SEQ ID NO: 318457
gguagaugcugucugaucu

SEQ ID NO: 564248 - RNA, 19 nt, Artificial Sequence
  Description of Artificial Sequence: Synthetic oligonucleotide
  Antisense strand to SEQ ID NO: 564247
agaucagacagcaucuacc

SEQ ID NO: 564249 - RNA, 19 nt, Artificial Sequence
  Description of Artificial Sequence: Synthetic oligonucleotide
  Sense strand starting at position 655 of SEQ ID NO: 318457
gaugcugucugaucugaac

SEQ ID NO: 564250 - RNA, 19 nt, Artificial Sequence
  Description of Artificial Sequence: Synthetic oligonucleotide
  Antisense strand to SEQ ID NO: 564249
guucagaucagacagcauc

SEQ ID NO: 564251 - RNA, 19 nt, Artificial Sequence
  Description of Artificial Sequence: Synthetic oligonucleotide
  Sense strand starting at position 807 of SEQ ID NO: 318457
accaaacggugauuggaaa

SEQ ID NO: 564252 - RNA, 19 nt, Artificial Sequence
  Description of Artificial Sequence: Synthetic oligonucleotide
  Antisense strand to SEQ ID NO: 564251
uuuccaaucaccguuuggu

SEQ ID NO: 564253 - RNA, 19 nt, Artificial Sequence
  Description of Artificial Sequence: Synthetic oligonucleotide
  Sense strand starting at position 832 of SEQ ID NO: 318457
aacuuuguguuugcaggaa

SEQ ID NO: 564254 - RNA, 19 nt, Artificial Sequence
  Description of Artificial Sequence: Synthetic oligonucleotide
  Antisense strand to SEQ ID NO: 564253
uuccugcaaacacaaaguu

SEQ ID NO: 564255 - RNA, 19 nt, Artificial Sequence
  Description of Artificial Sequence: Synthetic oligonucleotide
  Sense strand starting at position 836 of SEQ ID NO: 318457
uuguguuugcaggaaugag

SEQ ID NO: 564256 - RNA, 19 nt, Artificial Sequence
  Description of Artificial Sequence: Synthetic oligonucleotide
  Antisense strand to SEQ ID NO: 564255
cucauuccugcaaacacaa

SEQ ID NO: 564257 - RNA, 19 nt, Artificial Sequence
  Description of Artificial Sequence: Synthetic oligonucleotide
  Sense strand starting at position 859 of SEQ ID NO: 318457
ugggaucacuaagacuuaa

SEQ ID NO: 564258 - RNA, 19 nt, Artificial Sequence
  Description of Artificial Sequence: Synthetic oligonucleotide
  Antisense strand to SEQ ID NO: 564257
uuaagucuuagugauccca

SEQ ID NO: 564259 - RNA, 19 nt, Artificial Sequence
  Description of Artificial Sequence: Synthetic oligonucleotide
  Sense strand starting at position 1025 of SEQ ID NO: 318457
gcaagaauguggcuaccaa

SEQ ID NO: 564260 - RNA, 19 nt, Artificial Sequence
  Description of Artificial Sequence: Synthetic oligonucleotide
  Antisense strand to SEQ ID NO: 564259
uugguagccacauucuugc

SEQ ID NO: 564261 - RNA, 19 nt, Artificial Sequence
  Description of Artificial Sequence: Synthetic oligonucleotide
  Sense strand starting at position 1159 of SEQ ID NO: 318457
gaaagugucuguccggcuu

SEQ ID NO: 564262 - RNA, 19 nt, Artificial Sequence
  Description of Artificial Sequence: Synthetic oligonucleotide
  Antisense strand to SEQ ID NO: 564261
aagccggacagacacuuuc

SEQ ID NO: 564263 - RNA, 19 nt, Artificial Sequence
  Description of Artificial Sequence: Synthetic oligonucleotide
  Sense strand starting at position 1200 of SEQ ID NO: 318457
ccaaccaguggucaaacau

SEQ ID NO: 564264 - RNA, 19 nt, Artificial Sequence
  Description of Artificial Sequence: Synthetic oligonucleotide
  Antisense strand to SEQ ID NO: 564263
auguuugaccacugguugg

SEQ ID NO: 564265 - RNA, 19 nt, Artificial Sequence
  Description of Artificial Sequence: Synthetic oligonucleotide
  Sense strand starting at position 1248 of SEQ ID NO: 318457
ccggguauggcagaaauca

SEQ ID NO: 564266 - RNA, 19 nt, Artificial Sequence
  Description of Artificial Sequence: Synthetic oligonucleotide
  Antisense strand to SEQ ID NO: 564265
ugauuucugccauacccgg

SEQ ID NO: 564267 - RNA, 19 nt, Artificial Sequence
  Description of Artificial Sequence: Synthetic oligonucleotide
  Sense strand starting at position 1282 of SEQ ID NO: 318457
guuaguuccgucuugccaa

SEQ ID NO: 564268 - RNA, 19 nt, Artificial Sequence
  Description of Artificial Sequence: Synthetic oligonucleotide
  Antisense strand to SEQ ID NO: 564267
uuggcaagacggaacuaac

SEQ ID NO: 564269 - RNA, 19 nt, Artificial Sequence
  Description of Artificial Sequence: Synthetic oligonucleotide
  Sense strand starting at position 1317 of SEQ ID NO: 318457
gucaauacaugucaccaga

SEQ ID NO: 564270 - RNA, 19 nt, Artificial Sequence
  Description of Artificial Sequence: Synthetic oligonucleotide
  Antisense strand to SEQ ID NO: 564269
ucuggugacauguauugac

SEQ ID NO: 564271 - RNA, 19 nt, Artificial Sequence
  Description of Artificial Sequence: Synthetic oligonucleotide
  Sense strand starting at position 1365 of SEQ ID NO: 318457
gcaauagaugguuggcaga

SEQ ID NO: 564272 - RNA, 19 nt, Artificial Sequence
  Description of Artificial Sequence: Synthetic oligonucleotide
  Antisense strand to SEQ ID NO: 564271
ucugccaaccaucuauugc

SEQ ID NO: 564273 - RNA, 19 nt, Artificial Sequence
  Description of Artificial Sequence: Synthetic oligonucleotide
  Sense strand starting at position 1367 of SEQ ID NO: 318457
aauagaugguuggcagaga

SEQ ID NO: 564274 - RNA, 19 nt, Artificial Sequence
  Description of Artificial Sequence: Synthetic oligonucleotide
  Antisense strand to SEQ ID NO: 564273
ucucugccaaccaucuauu

SEQ ID NO: 564275 - RNA, 19 nt, Artificial Sequence
  Description of Artificial Sequence: Synthetic oligonucleotide
  Sense strand starting at position 1368 of SEQ ID NO: 318457
auagaugguuggcagagaa

SEQ ID NO: 564276 - RNA, 19 nt, Artificial Sequence
  Description of Artificial Sequence: Synthetic oligonucleotide
  Antisense strand to SEQ ID NO: 564275
uucucugccaaccaucuau

SEQ ID NO: 564277 - RNA, 19 nt, Artificial Sequence
  Description of Artificial Sequence: Synthetic oligonucleotide
  Sense strand starting at position 1399 of SEQ ID NO: 318457
cgaccucuaccaggguaau

SEQ ID NO: 564278 - RNA, 19 nt, Artificial Sequence
  Description of Artificial Sequence: Synthetic oligonucleotide
  Antisense strand to SEQ ID NO: 564277
auuacccugguagaggucg

SEQ ID NO: 564279 - RNA, 19 nt, Artificial Sequence
  Description of Artificial Sequence: Synthetic oligonucleotide
  Sense strand starting at position 2384 of SEQ ID NO: 318457
cuguaaucggcuuggagac

SEQ ID NO: 564280 - RNA, 19 nt, Artificial Sequence
  Description of Artificial Sequence: Synthetic oligonucleotide
  Antisense strand to SEQ ID NO: 564279
gucuccaagccgauuacag

SEQ ID NO: 564281 - RNA, 19 nt, Artificial Sequence
  Description of Artificial Sequence: Synthetic oligonucleotide
  Sense strand starting at position 2391 of SEQ ID NO: 318457
cggcuuggagaccgauuua

SEQ ID NO: 564282 - RNA, 19 nt, Artificial Sequence
  Description of Artificial Sequence: Synthetic oligonucleotide
  Antisense strand to SEQ ID NO: 564281
uaaaucggucuccaagccg

SEQ ID NO: 564283 - RNA, 19 nt, Artificial Sequence
  Description of Artificial Sequence: Synthetic oligonucleotide
  Sense strand starting at position 2839 of SEQ ID NO: 318457
gugcguucccgcgcacaaa

SEQ ID NO: 564284 - RNA, 19 nt, Artificial Sequence
  Description of Artificial Sequence: Synthetic oligonucleotide
  Antisense strand to SEQ ID NO: 564283
uuugugcgcgggaacgcac

SEQ ID NO: 564285 - RNA, 19 nt, Artificial Sequence
  Description of Artificial Sequence: Synthetic oligonucleotide
  Sense strand starting at position 2909 of SEQ ID NO: 318457
gugauaugcucacuuacac

SEQ ID NO: 564286 - RNA, 19 nt, Artificial Sequence
  Description of Artificial Sequence: Synthetic oligonucleotide
  Antisense strand to SEQ ID NO: 564285
guguaagugagcauaucac

SEQ ID NO: 564287 - RNA, 19 nt, Artificial Sequence
  Description of Artificial Sequence: Synthetic oligonucleotide
  Sense strand starting at position 3140 of SEQ ID NO: 318457
acguauucgcacgaaucca

SEQ ID NO: 564288 - RNA, 19 nt, Artificial Sequence
  Description of Artificial Sequence: Synthetic oligonucleotide
  Antisense strand to SEQ ID NO: 564287
uggauucgugcgaauacgu

SEQ ID NO: 564289 - RNA, 19 nt, Artificial Sequence
  Description of Artificial Sequence: Synthetic oligonucleotide
  Sense strand starting at position 3215 of SEQ ID NO: 318457
guacguucccauggcagua

SEQ ID NO: 564290 - RNA, 19 nt, Artificial Sequence
  Description of Artificial Sequence: Synthetic oligonucleotide
  Antisense strand to SEQ ID NO: 564289
uacugccaugggaacguac

SEQ ID NO: 564291 - RNA, 19 nt, Artificial Sequence
  Description of Artificial Sequence: Synthetic oligonucleotide
  Sense strand starting at position 3289 of SEQ ID NO: 318457
ccugcauuguaguauuuaa

SEQ ID NO: 564292 - RNA, 19 nt, Artificial Sequence
  Description of Artificial Sequence: Synthetic oligonucleotide
  Antisense strand to SEQ ID NO: 564291
uuaaauacuacaaugcagg

SEQ ID NO: 564293 - RNA, 19 nt, Artificial Sequence
  Description of Artificial Sequence: Synthetic oligonucleotide
  Sense strand starting at position 3335 of SEQ ID NO: 318457
gcccaaguguucccggaaa

SEQ ID NO: 564294 - RNA, 19 nt, Artificial Sequence
  Description of Artificial Sequence: Synthetic oligonucleotide
  Antisense strand to SEQ ID NO: 564293
uuuccgggaacacuugggc

SEQ ID NO: 564295 - RNA, 19 nt, Artificial Sequence
  Description of Artificial Sequence: Synthetic oligonucleotide
  Sense strand starting at position 3337 of SEQ ID NO: 318457
ccaaguguucccggaaagg

SEQ ID NO: 564296 - RNA, 19 nt, Artificial Sequence
  Description of Artificial Sequence: Synthetic oligonucleotide
  Antisense strand to SEQ ID NO: 564295
ccuuuccgggaacacuugg

SEQ ID NO: 564297 - RNA, 19 nt, Artificial Sequence
  Description of Artificial Sequence: Synthetic oligonucleotide
  Sense strand starting at position 3363 of SEQ ID NO: 318457
ugccgaaguucuuucggaa

SEQ ID NO: 564298 - RNA, 19 nt, Artificial Sequence
  Description of Artificial Sequence: Synthetic oligonucleotide
  Antisense strand to SEQ ID NO: 564297
uuccgaaagaacuucggca

SEQ ID NO: 564299 - RNA, 19 nt, Artificial Sequence
  Description of Artificial Sequence: Synthetic oligonucleotide
  Sense strand starting at position 3398 of SEQ ID NO: 318457
gugguaagaugcuaaauuu

SEQ ID NO: 564300 - RNA, 19 nt, Artificial Sequence
  Description of Artificial Sequence: Synthetic oligonucleotide
  Antisense strand to SEQ ID NO: 564299
aaauuuagcaucuuaccac

SEQ ID NO: 564301 - RNA, 19 nt, Artificial Sequence
  Description of Artificial Sequence: Synthetic oligonucleotide
  Sense strand starting at position 3509 of SEQ ID NO: 318457
aggcucaucguuuguagga

SEQ ID NO: 564302 - RNA, 19 nt, Artificial Sequence
  Description of Artificial Sequence: Synthetic oligonucleotide
  Antisense strand to SEQ ID NO: 564301
uccuacaaacgaugagccu

SEQ ID NO: 564303 - RNA, 19 nt, Artificial Sequence
  Description of Artificial Sequence: Synthetic oligonucleotide
  Sense strand starting at position 3790 of SEQ ID NO: 318457
gggugaugagucuacgaca

SEQ ID NO: 564304 - RNA, 19 nt, Artificial Sequence
  Description of Artificial Sequence: Synthetic oligonucleotide
  Antisense strand to SEQ ID NO: 564303
ugucguagacucaucaccc

SEQ ID NO: 564305 - RNA, 19 nt, Artificial Sequence
  Description of Artificial Sequence: Synthetic oligonucleotide
  Sense strand starting at position 3793 of SEQ ID NO: 318457
ugaugagucuacgacaaua

SEQ ID NO: 564306 - RNA, 19 nt, Artificial Sequence
  Description of Artificial Sequence: Synthetic oligonucleotide
  Antisense strand to SEQ ID NO: 564305
uauugucguagacucauca

SEQ ID NO: 564307 - RNA, 19 nt, Artificial Sequence
  Description of Artificial Sequence: Synthetic oligonucleotide
  Sense strand starting at position 3879 of SEQ ID NO: 318457
agugcuguuucugcagaau

SEQ ID NO: 564308 - RNA, 19 nt, Artificial Sequence
  Description of Artificial Sequence: Synthetic oligonucleotide
  Antisense strand to SEQ ID NO: 564307
auucugcagaaacagcacu

SEQ ID NO: 564309 - RNA, 19 nt, Artificial Sequence
  Description of Artificial Sequence: Synthetic oligonucleotide
  Sense strand starting at position 3882 of SEQ ID NO: 318457
gcuguuucugcagaauauu

SEQ ID NO: 564310 - RNA, 19 nt, Artificial Sequence
  Description of Artificial Sequence: Synthetic oligonucleotide
  Antisense strand to SEQ ID NO: 564309
aauauucugcagaaacagc

SEQ ID NO: 564311 - RNA, 19 nt, Artificial Sequence
  Description of Artificial Sequence: Synthetic oligonucleotide
  Sense strand starting at position 3974 of SEQ ID NO: 318457
acaaguauauaguagggaa

SEQ ID NO: 564312 - RNA, 19 nt, Artificial Sequence
  Description of Artificial Sequence: Synthetic oligonucleotide
  Antisense strand to SEQ ID NO: 564311
uucccuacuauauacuugu

SEQ ID NO: 564313 - RNA, 19 nt, Artificial Sequence
  Description of Artificial Sequence: Synthetic oligonucleotide
  Sense strand starting at position 70 of SEQ ID NO: 318458
aggcuaauuugguagagaa

SEQ ID NO: 564314 - RNA, 19 nt, Artificial Sequence
  Description of Artificial Sequence: Synthetic oligonucleotide
  Antisense strand to SEQ ID NO: 564313
uucucuaccaaauuagccu

SEQ ID NO: 564315 - RNA, 19 nt, Artificial Sequence
  Description of Artificial Sequence: Synthetic oligonucleotide
  Sense strand starting at position 156 of SEQ ID NO: 318458
uucuuuggucuauaauaga

SEQ ID NO: 564316 - RNA, 19 nt, Artificial Sequence
  Description of Artificial Sequence: Synthetic oligonucleotide
  Antisense strand to SEQ ID NO: 564315
ucuauuauagaccaaagaa

SEQ ID NO: 564317 - RNA, 19 nt, Artificial Sequence
  Description of Artificial Sequence: Synthetic oligonucleotide
  Sense strand starting at position 246 of SEQ ID NO: 318458
caagaaaugugucuggaaa

SEQ ID NO: 564318 - RNA, 19 nt, Artificial Sequence
  Description of Artificial Sequence: Synthetic oligonucleotide
  Antisense strand to SEQ ID NO: 564317
uuuccagacacauuucuug

SEQ ID NO: 564319 - RNA, 19 nt, Artificial Sequence
  Description of Artificial Sequence: Synthetic oligonucleotide
  Sense strand starting at position 247 of SEQ ID NO: 318458
aagaaaugugucuggaaau

SEQ ID NO: 564320 - RNA, 19 nt, Artificial Sequence
  Description of Artificial Sequence: Synthetic oligonucleotide
  Antisense strand to SEQ ID NO: 564319
auuuccagacacauuucuu

SEQ ID NO: 564321 - RNA, 19 nt, Artificial Sequence
  Description of Artificial Sequence: Synthetic oligonucleotide
  Sense strand starting at position 257 of SEQ ID NO: 318458
ucuggaaaucccuggcauc

SEQ ID NO: 564322 - RNA, 19 nt, Artificial Sequence
  Description of Artificial Sequence: Synthetic oligonucleotide
  Antisense strand to SEQ ID NO: 564321
gaugccagggauuuccaga

SEQ ID NO: 564323 - RNA, 19 nt, Artificial Sequence
  Description of Artificial Sequence: Synthetic oligonucleotide
  Sense strand starting at position 500 of SEQ ID NO: 318458
agaugcugucucuacagaa

SEQ ID NO: 564324 - RNA, 19 nt, Artificial Sequence
  Description of Artificial Sequence: Synthetic oligonucleotide
  Antisense strand to SEQ ID NO: 564323
uucuguagagacagcaucu

SEQ ID NO: 564325 - RNA, 19 nt, Artificial Sequence
  Description of Artificial Sequence: Synthetic oligonucleotide
  Sense strand starting at position 540 of SEQ ID NO: 318458
ucuaaugcuagguaaguga

SEQ ID NO: 564326 - RNA, 19 nt, Artificial Sequence
  Description of Artificial Sequence: Synthetic oligonucleotide
  Antisense strand to SEQ ID NO: 564325
ucacuuaccuagcauuaga

SEQ ID NO: 564327 - RNA, 19 nt, Artificial Sequence
  Description of Artificial Sequence: Synthetic oligonucleotide
  Sense strand starting at position 727 of SEQ ID NO: 318458
ugccaaugcccggaauaua

SEQ ID NO: 564328 - RNA, 19 nt, Artificial Sequence
  Description of Artificial Sequence: Synthetic oligonucleotide
  Antisense strand to SEQ ID NO: 564327
uauauuccgggcauuggca

SEQ ID NO: 564329 - RNA, 19 nt, Artificial Sequence
  Description of Artificial Sequence: Synthetic oligonucleotide
  Sense strand starting at position 903 of SEQ ID NO: 318458
gggaaugcuuacuuuaaag

SEQ ID NO: 564330 - RNA, 19 nt, Artificial Sequence
  Description of Artificial Sequence: Synthetic oligonucleotide
  Antisense strand to SEQ ID NO: 564329
cuuuaaaguaagcauuccc

SEQ ID NO: 564331 - RNA, 19 nt, Artificial Sequence
  Description of Artificial Sequence: Synthetic oligonucleotide
  Sense strand starting at position 961 of SEQ ID NO: 318458
caggaaaccuaguuucuag

SEQ ID NO: 564332 - RNA, 19 nt, Artificial Sequence
  Description of Artificial Sequence: Synthetic oligonucleotide
  Antisense strand to SEQ ID NO: 564331
cuagaaacuagguuuccug

SEQ ID NO: 564333 - RNA, 19 nt, Artificial Sequence
  Description of Artificial Sequence: Synthetic oligonucleotide
  Sense strand starting at position 1082 of SEQ ID NO: 318458
ucaccuucuggucaacaga

SEQ ID NO: 564334 - RNA, 19 nt, Artificial Sequence
  Description of Artificial Sequence: Synthetic oligonucleotide
  Antisense strand to SEQ ID NO: 564333
ucuguugaccagaagguga

SEQ ID NO: 564335 - RNA, 19 nt, Artificial Sequence
  Description of Artificial Sequence: Synthetic oligonucleotide
  Sense strand starting at position 1098 of SEQ ID NO: 318458
agaccuauuuccuagguaa

SEQ ID NO: 564336 - RNA, 19 nt, Artificial Sequence
  Description of Artificial Sequence: Synthetic oligonucleotide
  Antisense strand to SEQ ID NO: 564335
uuaccuaggaaauaggucu

SEQ ID NO: 564337 - RNA, 19 nt, Artificial Sequence
  Description of Artificial Sequence: Synthetic oligonucleotide
  Sense strand starting at position 1109 of SEQ ID NO: 318458
cuagguaaaugcucaacaa

SEQ ID NO: 564338 - RNA, 19 nt, Artificial Sequence
  Description of Artificial Sequence: Synthetic oligonucleotide
  Antisense strand to SEQ ID NO: 564337
uuguugagcauuuaccuag

SEQ ID NO: 564339 - RNA, 19 nt, Artificial Sequence
  Description of Artificial Sequence: Synthetic oligonucleotide
  Sense strand starting at position 1189 of SEQ ID NO: 318458
acaugacaguucuuugcaa

SEQ ID NO: 564340 - RNA, 19 nt, Artificial Sequence
  Description of Artificial Sequence: Synthetic oligonucleotide
  Antisense strand to SEQ ID NO: 564339
uugcaaagaacugucaugu

SEQ ID NO: 564341 - RNA, 19 nt, Artificial Sequence
  Description of Artificial Sequence: Synthetic oligonucleotide
  Sense strand starting at position 1213 of SEQ ID NO: 318458
ccagcacuucgcguuagua

SEQ ID NO: 564342 - RNA, 19 nt, Artificial Sequence
  Description of Artificial Sequence: Synthetic oligonucleotide
  Antisense strand to SEQ ID NO: 564341
uacuaacgcgaagugcugg

SEQ ID NO: 564343 - RNA, 19 nt, Artificial Sequence
  Description of Artificial Sequence: Synthetic oligonucleotide
  Sense strand starting at position 1214 of SEQ ID NO: 318458
cagcacuucgcguuaguaa

SEQ ID NO: 564344 - RNA, 19 nt, Artificial Sequence
  Description of Artificial Sequence: Synthetic oligonucleotide
  Antisense strand to SEQ ID NO: 564343
uuacuaacgcgaagugcug

SEQ ID NO: 564345 - RNA, 19 nt, Artificial Sequence
  Description of Artificial Sequence: Synthetic oligonucleotide
  Sense strand starting at position 1359 of SEQ ID NO: 318458
ccaagacaugucuggcaca

SEQ ID NO: 564346 - RNA, 19 nt, Artificial Sequence
  Description of Artificial Sequence: Synthetic oligonucleotide
  Antisense strand to SEQ ID NO: 564345
ugugccagacaugucuugg

SEQ ID NO: 564347 - RNA, 19 nt, Artificial Sequence
  Description of Artificial Sequence: Synthetic oligonucleotide
  Sense strand starting at position 1896 of SEQ ID NO: 318458
guagcuguagcuuccgaau

SEQ ID NO: 564348 - RNA, 19 nt, Artificial Sequence
  Description of Artificial Sequence: Synthetic oligonucleotide
  Antisense strand to SEQ ID NO: 564347
auucggaagcuacagcuac

SEQ ID NO: 564349 - RNA, 19 nt, Artificial Sequence
  Description of Artificial Sequence: Synthetic oligonucleotide
  Sense strand starting at position 2145 of SEQ ID NO: 318458
uuaacaauugggcgaaaga

SEQ ID NO: 564350 - RNA, 19 nt, Artificial Sequence
  Description of Artificial Sequence: Synthetic oligonucleotide
  Antisense strand to SEQ ID NO: 564349
ucuuucgcccaauuguuaa

SEQ ID NO: 564351 - RNA, 19 nt, Artificial Sequence
  Description of Artificial Sequence: Synthetic oligonucleotide
  Sense strand starting at position 2256 of SEQ ID NO: 318458
ugcgguuccagugucuuau

SEQ ID NO: 564352 - RNA, 19 nt, Artificial Sequence
  Description of Artificial Sequence: Synthetic oligonucleotide
  Antisense strand to SEQ ID NO: 564351
auaagacacuggaaccgca

SEQ ID NO: 564353 - RNA, 19 nt, Artificial Sequence
  Description of Artificial Sequence: Synthetic oligonucleotide
  Sense strand starting at position 2257 of SEQ ID NO: 318458
gcgguuccagugucuuauu

SEQ ID NO: 564354 - RNA, 19 nt, Artificial Sequence
  Description of Artificial Sequence: Synthetic oligonucleotide
  Antisense strand to SEQ ID NO: 564353
aauaagacacuggaaccgc

SEQ ID NO: 564355 - RNA, 19 nt, Artificial Sequence
  Description of Artificial Sequence: Synthetic oligonucleotide
  Sense strand starting at position 2258 of SEQ ID NO: 318458
cgguuccagugucuuauuu

SEQ ID NO: 564356 - RNA, 19 nt, Artificial Sequence
  Description of Artificial Sequence: Synthetic oligonucleotide
  Antisense strand to SEQ ID NO: 564355
aaauaagacacuggaaccg

SEQ ID NO: 564357 - RNA, 19 nt, Artificial Sequence
  Description of Artificial Sequence: Synthetic oligonucleotide
  Sense strand starting at position 2262 of SEQ ID NO: 318458
uccagugucuuauuuauuc

SEQ ID NO: 564358 - RNA, 19 nt, Artificial Sequence
  Description of Artificial Sequence: Synthetic oligonucleotide
  Antisense strand to SEQ ID NO: 564357
gaauaaauaagacacugga

SEQ ID NO: 564359 - RNA, 19 nt, Artificial Sequence
  Description of Artificial Sequence: Synthetic oligonucleotide
  Sense strand starting at position 2267 of SEQ ID NO: 318458
ugucuuauuuauucgcaua

SEQ ID NO: 564360 - RNA, 19 nt, Artificial Sequence
  Description of Artificial Sequence: Synthetic oligonucleotide
  Antisense strand to SEQ ID NO: 564359
uaugcgaauaaauaagaca

SEQ ID NO: 564361 - RNA, 19 nt, Artificial Sequence
  Description of Artificial Sequence: Synthetic oligonucleotide
  Sense strand starting at position 2404 of SEQ ID NO: 318458
cgaauuacagaacgucuaa

SEQ ID NO: 564362 - RNA, 19 nt, Artificial Sequence
  Description of Artificial Sequence: Synthetic oligonucleotide
  Antisense strand to SEQ ID NO: 564361
uuagacguucuguaauucg

SEQ ID NO: 564363 - RNA, 19 nt, Artificial Sequence
  Description of Artificial Sequence: Synthetic oligonucleotide
  Sense strand starting at position 2500 of SEQ ID NO: 318458
cgugguugaccugaaauuc

SEQ ID NO: 564364 - RNA, 19 nt, Artificial Sequence
  Description of Artificial Sequence: Synthetic oligonucleotide
  Antisense strand to SEQ ID NO: 564363
gaauuucaggucaaccacg

SEQ ID NO: 564365 - RNA, 19 nt, Artificial Sequence
  Description of Artificial Sequence: Synthetic oligonucleotide
  Sense strand starting at position 3040 of SEQ ID NO: 318458
ucacuaauuuguguucugu

SEQ ID NO: 564366 - RNA, 19 nt, Artificial Sequence
  Description of Artificial Sequence: Synthetic oligonucleotide
  Antisense strand to SEQ ID NO: 564365
acagaacacaaauuaguga

SEQ ID NO: 564367 - RNA, 19 nt, Artificial Sequence
  Description of Artificial Sequence: Synthetic oligonucleotide
  Sense strand starting at position 3048 of SEQ ID NO: 318458
uuguguucugucccuaguu

SEQ ID NO: 564368 - RNA, 19 nt, Artificial Sequence
  Description of Artificial Sequence: Synthetic oligonucleotide
  Antisense strand to SEQ ID NO: 564367
aacuagggacagaacacaa

SEQ ID NO: 564369 - RNA, 19 nt, Artificial Sequence
  Description of Artificial Sequence: Synthetic oligonucleotide
  Sense strand starting at position 3191 of SEQ ID NO: 318458
uuguauuacugaguagaau

SEQ ID NO: 564370 - RNA, 19 nt, Artificial Sequence
  Description of Artificial Sequence: Synthetic oligonucleotide
  Antisense strand to SEQ ID NO: 564369
auucuacucaguaauacaa

SEQ ID NO: 564371 - RNA, 19 nt, Artificial Sequence
  Description of Artificial Sequence: Synthetic oligonucleotide
  Sense strand starting at position 3192 of SEQ ID NO: 318458
uguauuacugaguagaauu

SEQ ID NO: 564372 - RNA, 19 nt, Artificial Sequence
  Description of Artificial Sequence: Synthetic oligonucleotide
  Antisense strand to SEQ ID NO: 564371
aauucuacucaguaauaca

SEQ ID NO: 564373 - RNA, 19 nt, Artificial Sequence
  Description of Artificial Sequence: Synthetic oligonucleotide
  Sense strand starting at position 3356 of SEQ ID NO: 318458
aaugccuuagagugagauu

SEQ ID NO: 564374 - RNA, 19 nt, Artificial Sequence
  Description of Artificial Sequence: Synthetic oligonucleotide
  Antisense strand to SEQ ID NO: 564373
aaucucacucuaaggcauu

SEQ ID NO: 564375 - RNA, 19 nt, Artificial Sequence
  Description of Artificial Sequence: Synthetic oligonucleotide
  Sense strand starting at position 3357 of SEQ ID NO: 318458
augccuuagagugagauua

SEQ ID NO: 564376 - RNA, 19 nt, Artificial Sequence
  Description of Artificial Sequence: Synthetic oligonucleotide
  Antisense strand to SEQ ID NO: 564375
uaaucucacucuaaggcau

SEQ ID NO: 564377 - RNA, 19 nt, Artificial Sequence
  Description of Artificial Sequence: Synthetic oligonucleotide
  Sense strand starting at position 3367 of SEQ ID NO: 318458
gugagauuauuugaucaua

SEQ ID NO: 564378 - RNA, 19 nt, Artificial Sequence
  Description of Artificial Sequence: Synthetic oligonucleotide
  Antisense strand to SEQ ID NO: 564377
uaugaucaaauaaucucac

SEQ ID NO: 564379 - RNA, 19 nt, Artificial Sequence
  Description of Artificial Sequence: Synthetic oligonucleotide
  Sense strand starting at position 3408 of SEQ ID NO: 318458
auaagaaaguccuuggguu

SEQ ID NO: 564380 - RNA, 19 nt, Artificial Sequence
  Description of Artificial Sequence: Synthetic oligonucleotide
  Antisense strand to SEQ ID NO: 564379
aacccaaggacuuucuuau

SEQ ID NO: 564381 - RNA, 19 nt, Artificial Sequence
  Description of Artificial Sequence: Synthetic oligonucleotide
  Sense strand starting at position 3409 of SEQ ID NO: 318458
uaagaaaguccuuggguuu

SEQ ID NO: 564382 - RNA, 19 nt, Artificial Sequence
  Description of Artificial Sequence: Synthetic oligonucleotide
  Antisense strand to SEQ ID NO: 564381
aaacccaaggacuuucuua

SEQ ID NO: 564383 - RNA, 19 nt, Artificial Sequence
  Description of Artificial Sequence: Synthetic oligonucleotide
  Sense strand starting at position 3410 of SEQ ID NO: 318458
aagaaaguccuuggguuua

SEQ ID NO: 564384 - RNA, 19 nt, Artificial Sequence
  Description of Artificial Sequence: Synthetic oligonucleotide
  Antisense strand to SEQ ID NO: 564383
uaaacccaaggacuuucuu

SEQ ID NO: 564385 - RNA, 19 nt, Artificial Sequence
  Description of Artificial Sequence: Synthetic oligonucleotide
  Sense strand starting at position 3412 of SEQ ID NO: 318458
gaaaguccuuggguuuauc

SEQ ID NO: 564386 - RNA, 19 nt, Artificial Sequence
  Description of Artificial Sequence: Synthetic oligonucleotide
  Antisense strand to SEQ ID NO: 564385
gauaaacccaaggacuuuc

SEQ ID NO: 564387 - RNA, 19 nt, Artificial Sequence
  Description of Artificial Sequence: Synthetic oligonucleotide
  Sense strand starting at position 3415 of SEQ ID NO: 318458
aguccuuggguuuaucuga

SEQ ID NO: 564388 - RNA, 19 nt, Artificial Sequence
  Description of Artificial Sequence: Synthetic oligonucleotide
  Antisense strand to SEQ ID NO: 564387
ucagauaaacccaaggacu

SEQ ID NO: 564389 - RNA, 19 nt, Artificial Sequence
  Description of Artificial Sequence: Synthetic oligonucleotide
  Sense strand starting at position 3759 of SEQ ID NO: 318458
gcaaaucaugcauaauggu

SEQ ID NO: 564390 - RNA, 19 nt, Artificial Sequence
  Description of Artificial Sequence: Synthetic oligonucleotide
  Antisense strand to SEQ ID NO: 564389
accauuaugcaugauuugc

SEQ ID NO: 564391 - RNA, 19 nt, Artificial Sequence
  Description of Artificial Sequence: Synthetic oligonucleotide
  Sense strand starting at position 3767 of SEQ ID NO: 318458
ugcauaaugguauacuuaa

SEQ ID NO: 564392 - RNA, 19 nt, Artificial Sequence
  Description of Artificial Sequence: Synthetic oligonucleotide
  Antisense strand to SEQ ID NO: 564391
uuaaguauaccauuaugca

SEQ ID NO: 564393 - RNA, 19 nt, Artificial Sequence
  Description of Artificial Sequence: Synthetic oligonucleotide
  Sense strand starting at position 89 of SEQ ID NO: 318459
agggaaguagcuugacacu

SEQ ID NO: 564394 - RNA, 19 nt, Artificial Sequence
  Description of Artificial Sequence: Synthetic oligonucleotide
  Antisense strand to SEQ ID NO: 564393
agugucaagcuacuucccu

SEQ ID NO: 564395 - RNA, 19 nt, Artificial Sequence
  Description of Artificial Sequence: Synthetic oligonucleotide
  Sense strand starting at position 254 of SEQ ID NO: 318459
agcagaaagcucuaaccuu

SEQ ID NO: 564396 - RNA, 19 nt, Artificial Sequence
  Description of Artificial Sequence: Synthetic oligonucleotide
  Antisense strand to SEQ ID NO: 564395
aagguuagagcuuucugcu

SEQ ID NO: 564397 - RNA, 19 nt, Artificial Sequence
  Description of Artificial Sequence: Synthetic oligonucleotide
  Sense strand starting at position 712 of SEQ ID NO: 318459
guugauacaucuguuaccu

SEQ ID NO: 564398 - RNA, 19 nt, Artificial Sequence
  Description of Artificial Sequence: Synthetic oligonucleotide
  Antisense strand to SEQ ID NO: 564397
agguaacagauguaucaac

SEQ ID NO: 564399 - RNA, 19 nt, Artificial Sequence
  Description of Artificial Sequence: Synthetic oligonucleotide
  Sense strand starting at position 1258 of SEQ ID NO: 318459
accaauaaucgcuauacag

SEQ ID NO: 564400 - RNA, 19 nt, Artificial Sequence
  Description of Artificial Sequence: Synthetic oligonucleotide
  Antisense strand to SEQ ID NO: 564399
cuguauagcgauuauuggu

SEQ ID NO: 564401 - RNA, 19 nt, Artificial Sequence
  Description of Artificial Sequence: Synthetic oligonucleotide
  Sense strand starting at position 1295 of SEQ ID NO: 318459
ccgcuucugcccucauauu

SEQ ID NO: 564402 - RNA, 19 nt, Artificial Sequence
  Description of Artificial Sequence: Synthetic oligonucleotide
  Antisense strand to SEQ ID NO: 564401
aauaugagggcagaagcgg

SEQ ID NO: 564403 - RNA, 19 nt, Artificial Sequence
  Description of Artificial Sequence: Synthetic oligonucleotide
  Sense strand starting at position 1296 of SEQ ID NO: 318459
cgcuucugcccucauauuu

SEQ ID NO: 564404 - RNA, 19 nt, Artificial Sequence
  Description of Artificial Sequence: Synthetic oligonucleotide
  Antisense strand to SEQ ID NO: 564403
aaauaugagggcagaagcg

SEQ ID NO: 564405 - RNA, 19 nt, Artificial Sequence
  Description of Artificial Sequence: Synthetic oligonucleotide
  Sense strand starting at position 1349 of SEQ ID NO: 318459
ucagucccggaauaauaau

SEQ ID NO: 564406 - RNA, 19 nt, Artificial Sequence
  Description of Artificial Sequence: Synthetic oligonucleotide
  Antisense strand to SEQ ID NO: 564405
auuauuauuccgggacuga

SEQ ID NO: 564407 - RNA, 19 nt, Artificial Sequence
  Description of Artificial Sequence: Synthetic oligonucleotide
  Sense strand starting at position 1517 of SEQ ID NO: 318459
cccgauauuugcguuugaa

SEQ ID NO: 564408 - RNA, 19 nt, Artificial Sequence
  Description of Artificial Sequence: Synthetic oligonucleotide
  Antisense strand to SEQ ID NO: 564407
uucaaacgcaaauaucggg

SEQ ID NO: 564409 - RNA, 19 nt, Artificial Sequence
  Description of Artificial Sequence: Synthetic oligonucleotide
  Sense strand starting at position 2158 of SEQ ID NO: 318459
gagauauagcaagguaggu

SEQ ID NO: 564410 - RNA, 19 nt, Artificial Sequence
  Description of Artificial Sequence: Synthetic oligonucleotide
  Antisense strand to SEQ ID NO: 564409
accuaccuugcuauaucuc

SEQ ID NO: 564411 - RNA, 19 nt, Artificial Sequence
  Description of Artificial Sequence: Synthetic oligonucleotide
  Sense strand starting at position 2176 of SEQ ID NO: 318459
uggagagcuuaagugaacu

SEQ ID NO: 564412 - RNA, 19 nt, Artificial Sequence
  Description of Artificial Sequence: Synthetic oligonucleotide
  Antisense strand to SEQ ID NO: 564411
aguucacuuaagcucucca

SEQ ID NO: 564413 - RNA, 19 nt, Artificial Sequence
  Description of Artificial Sequence: Synthetic oligonucleotide
  Sense strand starting at position 2186 of SEQ ID NO: 318459
aagugaacuccuggugcaa

SEQ ID NO: 564414 - RNA, 19 nt, Artificial Sequence
  Description of Artificial Sequence: Synthetic oligonucleotide
  Antisense strand to SEQ ID NO: 564413
uugcaccaggaguucacuu

SEQ ID NO: 564415 - RNA, 19 nt, Artificial Sequence
  Description of Artificial Sequence: Synthetic oligonucleotide
  Sense strand starting at position 2201 of SEQ ID NO: 318459
gcaagaugguaucuuggaa

SEQ ID NO: 564416 - RNA, 19 nt, Artificial Sequence
  Description of Artificial Sequence: Synthetic oligonucleotide
  Antisense strand to SEQ ID NO: 564415
uuccaagauaccaucuugc

SEQ ID NO: 564417 - RNA, 19 nt, Artificial Sequence
  Description of Artificial Sequence: Synthetic oligonucleotide
  Sense strand starting at position 2381 of SEQ ID NO: 318459
cccgaaaugacucagcugu

SEQ ID NO: 564418 - RNA, 19 nt, Artificial Sequence
  Description of Artificial Sequence: Synthetic oligonucleotide
  Antisense strand to SEQ ID NO: 564417
acagcugagucauuucggg

SEQ ID NO: 564419 - RNA, 19 nt, Artificial Sequence
  Description of Artificial Sequence: Synthetic oligonucleotide
  Sense strand starting at position 2383 of SEQ ID NO: 318459
cgaaaugacucagcuguag

SEQ ID NO: 564420 - RNA, 19 nt, Artificial Sequence
  Description of Artificial Sequence: Synthetic oligonucleotide
  Antisense strand to SEQ ID NO: 564419
cuacagcugagucauuucg

SEQ ID NO: 564421 - RNA, 19 nt, Artificial Sequence
  Description of Artificial Sequence: Synthetic oligonucleotide
  Sense strand starting at position 2387 of SEQ ID NO: 318459
augacucagcuguaguaaa

SEQ ID NO: 564422 - RNA, 19 nt, Artificial Sequence
  Description of Artificial Sequence: Synthetic oligonucleotide
  Antisense strand to SEQ ID NO: 564421
uuuacuacagcugagucau

SEQ ID NO: 564423 - RNA, 19 nt, Artificial Sequence
  Description of Artificial Sequence: Synthetic oligonucleotide
  Sense strand starting at position 2398 of SEQ ID NO: 318459
guaguaaaucugcaacaca

SEQ ID NO: 564424 - RNA, 19 nt, Artificial Sequence
  Description of Artificial Sequence: Synthetic oligonucleotide
  Antisense strand to SEQ ID NO: 564423
uguguugcagauuuacuac

SEQ ID NO: 564425 - RNA, 19 nt, Artificial Sequence
  Description of Artificial Sequence: Synthetic oligonucleotide
  Sense strand starting at position 2418 of SEQ ID NO: 318459
cgugcaauacguucacguu

SEQ ID NO: 564426 - RNA, 19 nt, Artificial Sequence
  Description of Artificial Sequence: Synthetic oligonucleotide
  Antisense strand to SEQ ID NO: 564425
aacgugaacguauugcacg

SEQ ID NO: 564427 - RNA, 19 nt, Artificial Sequence
  Description of Artificial Sequence: Synthetic oligonucleotide
  Sense strand starting at position 2495 of SEQ ID NO: 318459
ggcacucacguuuguauuu

SEQ ID NO: 564428 - RNA, 19 nt, Artificial Sequence
  Description of Artificial Sequence: Synthetic oligonucleotide
  Antisense strand to SEQ ID NO: 564427
aaauacaaacgugagugcc

SEQ ID NO: 564429 - RNA, 19 nt, Artificial Sequence
  Description of Artificial Sequence: Synthetic oligonucleotide
  Sense strand starting at position 2524 of SEQ ID NO: 318459
ugcuuuaauuacgcagaau

SEQ ID NO: 564430 - RNA, 19 nt, Artificial Sequence
  Description of Artificial Sequence: Synthetic oligonucleotide
  Antisense strand to SEQ ID NO: 564429
auucugcguaauuaaagca

SEQ ID NO: 564431 - RNA, 19 nt, Artificial Sequence
  Description of Artificial Sequence: Synthetic oligonucleotide
  Sense strand starting at position 2527 of SEQ ID NO: 318459
uuuaauuacgcagaauguu

SEQ ID NO: 564432 - RNA, 19 nt, Artificial Sequence
  Description of Artificial Sequence: Synthetic oligonucleotide
  Antisense strand to SEQ ID NO: 564431
aacauucugcguaauuaaa

SEQ ID NO: 564433 - RNA, 19 nt, Artificial Sequence
  Description of Artificial Sequence: Synthetic oligonucleotide
  Sense strand starting at position 2535 of SEQ ID NO: 318459
cgcagaauguuucugacaa

SEQ ID NO: 564434 - RNA, 19 nt, Artificial Sequence
  Description of Artificial Sequence: Synthetic oligonucleotide
  Antisense strand to SEQ ID NO: 564433
uugucagaaacauucugcg

SEQ ID NO: 564435 - RNA, 19 nt, Artificial Sequence
  Description of Artificial Sequence: Synthetic oligonucleotide
  Sense strand starting at position 2560 of SEQ ID NO: 318459
cuuggaauccaguaaucgu

SEQ ID NO: 564436 - RNA, 19 nt, Artificial Sequence
  Description of Artificial Sequence: Synthetic oligonucleotide
  Antisense strand to SEQ ID NO: 564435
acgauuacuggauuccaag

SEQ ID NO: 564437 - RNA, 19 nt, Artificial Sequence
  Description of Artificial Sequence: Synthetic oligonucleotide
  Sense strand starting at position 2563 of SEQ ID NO: 318459
ggaauccaguaaucgucau

SEQ ID NO: 564438 - RNA, 19 nt, Artificial Sequence
  Description of Artificial Sequence: Synthetic oligonucleotide
  Antisense strand to SEQ ID NO: 564437
augacgauuacuggauucc

SEQ ID NO: 564439 - RNA, 19 nt, Artificial Sequence
  Description of Artificial Sequence: Synthetic oligonucleotide
  Sense strand starting at position 2651 of SEQ ID NO: 318459
uugcuuuauuuaggaagaa

SEQ ID NO: 564440 - RNA, 19 nt, Artificial Sequence
  Description of Artificial Sequence: Synthetic oligonucleotide
  Antisense strand to SEQ ID NO: 564439
uucuuccuaaauaaagcaa

SEQ ID NO: 564441 - RNA, 19 nt, Artificial Sequence
  Description of Artificial Sequence: Synthetic oligonucleotide
  Sense strand starting at position 2652 of SEQ ID NO: 318459
ugcuuuauuuaggaagaaa

SEQ ID NO: 564442 - RNA, 19 nt, Artificial Sequence
  Description of Artificial Sequence: Synthetic oligonucleotide
  Antisense strand to SEQ ID NO: 564441
uuucuuccuaaauaaagca

SEQ ID NO: 564443 - RNA, 19 nt, Artificial Sequence
  Description of Artificial Sequence: Synthetic oligonucleotide
  Sense strand starting at position 2819 of SEQ ID NO: 318459
uacuuucuaguaggugaga

SEQ ID NO: 564444 - RNA, 19 nt, Artificial Sequence
  Description of Artificial Sequence: Synthetic oligonucleotide
  Antisense strand to SEQ ID NO: 564443
ucucaccuacuagaaagua

SEQ ID NO: 564445 - RNA, 19 nt, Artificial Sequence
  Description of Artificial Sequence: Synthetic oligonucleotide
  Sense strand starting at position 2820 of SEQ ID NO: 318459
acuuucuaguaggugagaa

SEQ ID NO: 564446 - RNA, 19 nt, Artificial Sequence
  Description of Artificial Sequence: Synthetic oligonucleotide
  Antisense strand to SEQ ID NO: 564445
uucucaccuacuagaaagu

SEQ ID NO: 564447 - RNA, 19 nt, Artificial Sequence
  Description of Artificial Sequence: Synthetic oligonucleotide
  Sense strand starting at position 2821 of SEQ ID NO: 318459
cuuucuaguaggugagaaa

SEQ ID NO: 564448 - RNA, 19 nt, Artificial Sequence
  Description of Artificial Sequence: Synthetic oligonucleotide
  Antisense strand to SEQ ID NO: 564447
uuucucaccuacuagaaag

SEQ ID NO: 564449 - RNA, 19 nt, Artificial Sequence
  Description of Artificial Sequence: Synthetic oligonucleotide
  Sense strand starting at position 2832 of SEQ ID NO: 318459
gugagaaauucuuucugga

SEQ ID NO: 564450 - RNA, 19 nt, Artificial Sequence
  Description of Artificial Sequence: Synthetic oligonucleotide
  Antisense strand to SEQ ID NO: 564449
uccagaaagaauuucucac

SEQ ID NO: 564451 - RNA, 19 nt, Artificial Sequence
  Description of Artificial Sequence: Synthetic oligonucleotide
  Sense strand starting at position 2834 of SEQ ID NO: 318459
gagaaauucuuucuggagu

SEQ ID NO: 564452 - RNA, 19 nt, Artificial Sequence
  Description of Artificial Sequence: Synthetic oligonucleotide
  Antisense strand to SEQ ID NO: 564451
acuccagaaagaauuucuc

SEQ ID NO: 564453 - RNA, 19 nt, Artificial Sequence
  Description of Artificial Sequence: Synthetic oligonucleotide
  Sense strand starting at position 2945 of SEQ ID NO: 318459
gaguccaaugcugagcaaa

SEQ ID NO: 564454 - RNA, 19 nt, Artificial Sequence
  Description of Artificial Sequence: Synthetic oligonucleotide
  Antisense strand to SEQ ID NO: 564453
uuugcucagcauuggacuc

SEQ ID NO: 564455 - RNA, 19 nt, Artificial Sequence
  Description of Artificial Sequence: Synthetic oligonucleotide
  Sense strand starting at position 3116 of SEQ ID NO: 318459
ggcaaacuucugcaaagga

SEQ ID NO: 564456 - RNA, 19 nt, Artificial Sequence
  Description of Artificial Sequence: Synthetic oligonucleotide
  Antisense strand to SEQ ID NO: 564455
uccuuugcagaaguuugcc

SEQ ID NO: 564457 - RNA, 19 nt, Artificial Sequence
  Description of Artificial Sequence: Synthetic oligonucleotide
  Sense strand starting at position 3160 of SEQ ID NO: 318459
ugagccuugagguaucuau

SEQ ID NO: 564458 - RNA, 19 nt, Artificial Sequence
  Description of Artificial Sequence: Synthetic oligonucleotide
  Antisense strand to SEQ ID NO: 564457
auagauaccucaaggcuca

SEQ ID NO: 564459 - RNA, 19 nt, Artificial Sequence
  Description of Artificial Sequence: Synthetic oligonucleotide
  Sense strand starting at position 3164 of SEQ ID NO: 318459
ccuugagguaucuauggca

SEQ ID NO: 564460 - RNA, 19 nt, Artificial Sequence
  Description of Artificial Sequence: Synthetic oligonucleotide
  Antisense strand to SEQ ID NO: 564459
ugccauagauaccucaagg

SEQ ID NO: 564461 - RNA, 19 nt, Artificial Sequence
  Description of Artificial Sequence: Synthetic oligonucleotide
  Sense strand starting at position 3179 of SEQ ID NO: 318459
ggcaacuacucgucauaca

SEQ ID NO: 564462 - RNA, 19 nt, Artificial Sequence
  Description of Artificial Sequence: Synthetic oligonucleotide
  Antisense strand to SEQ ID NO: 564461
uguaugacgaguaguugcc

SEQ ID NO: 564463 - RNA, 19 nt, Artificial Sequence
  Description of Artificial Sequence: Synthetic oligonucleotide
  Sense strand starting at position 3180 of SEQ ID NO: 318459
gcaacuacucgucauacaa

SEQ ID NO: 564464 - RNA, 19 nt, Artificial Sequence
  Description of Artificial Sequence: Synthetic oligonucleotide
  Antisense strand to SEQ ID NO: 564463
uuguaugacgaguaguugc

SEQ ID NO: 564465 - RNA, 19 nt, Artificial Sequence
  Description of Artificial Sequence: Synthetic oligonucleotide
  Sense strand starting at position 3193 of SEQ ID NO: 318459
auacaaugucuuggcuuaa

SEQ ID NO: 564466 - RNA, 19 nt, Artificial Sequence
  Description of Artificial Sequence: Synthetic oligonucleotide
  Antisense strand to SEQ ID NO: 564465
uuaagccaagacauuguau

SEQ ID NO: 564467 - RNA, 19 nt, Artificial Sequence
  Description of Artificial Sequence: Synthetic oligonucleotide
  Sense strand starting at position 3229 of SEQ ID NO: 318459
auguaaauggaaugauugu

SEQ ID NO: 564468 - RNA, 19 nt, Artificial Sequence
  Description of Artificial Sequence: Synthetic oligonucleotide
  Antisense strand to SEQ ID NO: 564467
acaaucauuccauuuacau

SEQ ID NO: 564469 - RNA, 19 nt, Artificial Sequence
  Description of Artificial Sequence: Synthetic oligonucleotide
  Sense strand starting at position 3238 of SEQ ID NO: 318459
gaaugauuguggcuguauu

SEQ ID NO: 564470 - RNA, 19 nt, Artificial Sequence
  Description of Artificial Sequence: Synthetic oligonucleotide
  Antisense strand to SEQ ID NO: 564469
aauacagccacaaucauuc

SEQ ID NO: 564471 - RNA, 19 nt, Artificial Sequence
  Description of Artificial Sequence: Synthetic oligonucleotide
  Sense strand starting at position 3239 of SEQ ID NO: 318459
aaugauuguggcuguauua

SEQ ID NO: 564472 - RNA, 19 nt, Artificial Sequence
  Description of Artificial Sequence: Synthetic oligonucleotide
  Antisense strand to SEQ ID NO: 564471
uaauacagccacaaucauu

SEQ ID NO: 564473 - RNA, 19 nt, Artificial Sequence
  Description of Artificial Sequence: Synthetic oligonucleotide
  Sense strand starting at position 256 of SEQ ID NO: 318460
gcgccaugauccuugguua

SEQ ID NO: 564474 - RNA, 19 nt, Artificial Sequence
  Description of Artificial Sequence: Synthetic oligonucleotide
  Antisense strand to SEQ ID NO: 564473
uaaccaaggaucauggcgc

SEQ ID NO: 564475 - RNA, 19 nt, Artificial Sequence
  Description of Artificial Sequence: Synthetic oligonucleotide
  Sense strand starting at position 259 of SEQ ID NO: 318460
ccaugauccuugguuacac

SEQ ID NO: 564476 - RNA, 19 nt, Artificial Sequence
  Description of Artificial Sequence: Synthetic oligonucleotide
  Antisense strand to SEQ ID NO: 564475
guguaaccaaggaucaugg

SEQ ID NO: 564477 - RNA, 19 nt, Artificial Sequence
  Description of Artificial Sequence: Synthetic oligonucleotide
  Sense strand starting at position 278 of SEQ ID NO: 318460
acaaauaugucauggagac

SEQ ID NO: 564478 - RNA, 19 nt, Artificial Sequence
  Description of Artificial Sequence: Synthetic oligonucleotide
  Antisense strand to SEQ ID NO: 564477
gucuccaugacauauuugu

SEQ ID NO: 564479 - RNA, 19 nt, Artificial Sequence
  Description of Artificial Sequence: Synthetic oligonucleotide
  Sense strand starting at position 279 of SEQ ID NO: 318460
caaauaugucauggagacu

SEQ ID NO: 564480 - RNA, 19 nt, Artificial Sequence
  Description of Artificial Sequence: Synthetic oligonucleotide
  Antisense strand to SEQ ID NO: 564479
agucuccaugacauauuug

SEQ ID NO: 564481 - RNA, 19 nt, Artificial Sequence
  Description of Artificial Sequence: Synthetic oligonucleotide
  Sense strand starting at position 1182 of SEQ ID NO: 318460
cacuuuguccuccgagcau

SEQ ID NO: 564482 - RNA, 19 nt, Artificial Sequence
  Description of Artificial Sequence: Synthetic oligonucleotide
  Antisense strand to SEQ ID NO: 564481
augcucggaggacaaagug

SEQ ID NO: 564483 - RNA, 19 nt, Artificial Sequence
  Description of Artificial Sequence: Synthetic oligonucleotide
  Sense strand starting at position 1195 of SEQ ID NO: 318460
gagcauuucugcuucccga

SEQ ID NO: 564484 - RNA, 19 nt, Artificial Sequence
  Description of Artificial Sequence: Synthetic oligonucleotide
  Antisense strand to SEQ ID NO: 564483
ucgggaagcagaaaugcuc

SEQ ID NO: 564485 - RNA, 19 nt, Artificial Sequence
  Description of Artificial Sequence: Synthetic oligonucleotide
  Sense strand starting at position 1547 of SEQ ID NO: 318460
gggugaggucccugggaag

SEQ ID NO: 564486 - RNA, 19 nt, Artificial Sequence
  Description of Artificial Sequence: Synthetic oligonucleotide
  Antisense strand to SEQ ID NO: 564485
cuucccagggaccucaccc

SEQ ID NO: 564487 - RNA, 19 nt, Artificial Sequence
  Description of Artificial Sequence: Synthetic oligonucleotide
  Sense strand starting at position 1674 of SEQ ID NO: 318460
gcacgaagcuucggagaag

SEQ ID NO: 564488 - RNA, 19 nt, Artificial Sequence
  Description of Artificial Sequence: Synthetic oligonucleotide
  Antisense strand to SEQ ID NO: 564487
cuucuccgaagcuucgugc

SEQ ID NO: 564489 - RNA, 19 nt, Artificial Sequence
  Description of Artificial Sequence: Synthetic oligonucleotide
  Sense strand starting at position 1675 of SEQ ID NO: 318460
cacgaagcuucggagaagu

SEQ ID NO: 564490 - RNA, 19 nt, Artificial Sequence
  Description of Artificial Sequence: Synthetic oligonucleotide
  Antisense strand to SEQ ID NO: 564489
acuucuccgaagcuucgug

SEQ ID NO: 564491 - RNA, 19 nt, Artificial Sequence
  Description of Artificial Sequence: Synthetic oligonucleotide
  Sense strand starting at position 1986 of SEQ ID NO: 318460
ggcgguggcggcucuuaaa

SEQ ID NO: 564492 - RNA, 19 nt, Artificial Sequence
  Description of Artificial Sequence: Synthetic oligonucleotide
  Antisense strand to SEQ ID NO: 564491
uuuaagagccgccaccgcc

SEQ ID NO: 564493 - RNA, 19 nt, Artificial Sequence
  Description of Artificial Sequence: Synthetic oligonucleotide
  Sense strand starting at position 2152 of SEQ ID NO: 318460
cguggaggucuccaugguu

SEQ ID NO: 564494 - RNA, 19 nt, Artificial Sequence
  Description of Artificial Sequence: Synthetic oligonucleotide
  Antisense strand to SEQ ID NO: 564493
aaccauggagaccuccacg

SEQ ID NO: 564495 - RNA, 19 nt, Artificial Sequence
  Description of Artificial Sequence: Synthetic oligonucleotide
  Sense strand starting at position 2155 of SEQ ID NO: 318460
ggaggucuccaugguuaca

SEQ ID NO: 564496 - RNA, 19 nt, Artificial Sequence
  Description of Artificial Sequence: Synthetic oligonucleotide
  Antisense strand to SEQ ID NO: 564495
uguaaccauggagaccucc

SEQ ID NO: 564497 - RNA, 19 nt, Artificial Sequence
  Description of Artificial Sequence: Synthetic oligonucleotide
  Sense strand starting at position 2165 of SEQ ID NO: 318460
augguuacauccugaaauc

SEQ ID NO: 564498 - RNA, 19 nt, Artificial Sequence
  Description of Artificial Sequence: Synthetic oligonucleotide
  Antisense strand to SEQ ID NO: 564497
gauuucaggauguaaccau

SEQ ID NO: 564499 - RNA, 19 nt, Artificial Sequence
  Description of Artificial Sequence: Synthetic oligonucleotide
  Sense strand starting at position 2263 of SEQ ID NO: 318460
gccagugaauccucuugac

SEQ ID NO: 564500 - RNA, 19 nt, Artificial Sequence
  Description of Artificial Sequence: Synthetic oligonucleotide
  Antisense strand to SEQ ID NO: 564499
gucaagaggauucacuggc

SEQ ID NO: 564501 - RNA, 19 nt, Artificial Sequence
  Description of Artificial Sequence: Synthetic oligonucleotide
  Sense strand starting at position 2266 of SEQ ID NO: 318460
agugaauccucuugaccac

SEQ ID NO: 564502 - RNA, 19 nt, Artificial Sequence
  Description of Artificial Sequence: Synthetic oligonucleotide
  Antisense strand to SEQ ID NO: 564501
guggucaagaggauucacu

SEQ ID NO: 564503 - RNA, 19 nt, Artificial Sequence
  Description of Artificial Sequence: Synthetic oligonucleotide
  Sense strand starting at position 2344 of SEQ ID NO: 318460
ggcucaauaaucuguugag

SEQ ID NO: 564504 - RNA, 19 nt, Artificial Sequence
  Description of Artificial Sequence: Synthetic oligonucleotide
  Antisense strand to SEQ ID NO: 564503
cucaacagauuauugagcc

SEQ ID NO: 564505 - RNA, 19 nt, Artificial Sequence
  Description of Artificial Sequence: Synthetic oligonucleotide
  Sense strand starting at position 2345 of SEQ ID NO: 318460
gcucaauaaucuguugaga

SEQ ID NO: 564506 - RNA, 19 nt, Artificial Sequence
  Description of Artificial Sequence: Synthetic oligonucleotide
  Antisense strand to SEQ ID NO: 564505
ucucaacagauuauugagc

SEQ ID NO: 564507 - RNA, 19 nt, Artificial Sequence
  Description of Artificial Sequence: Synthetic oligonucleotide
  Sense strand starting at position 2347 of SEQ ID NO: 318460
ucaauaaucuguugagagu

SEQ ID NO: 564508 - RNA, 19 nt, Artificial Sequence
  Description of Artificial Sequence: Synthetic oligonucleotide
  Antisense strand to SEQ ID NO: 564507
acucucaacagauuauuga

SEQ ID NO: 564509 - RNA, 19 nt, Artificial Sequence
  Description of Artificial Sequence: Synthetic oligonucleotide
  Sense strand starting at position 2348 of SEQ ID NO: 318460
caauaaucuguugagaguc

SEQ ID NO: 564510 - RNA, 19 nt, Artificial Sequence
  Description of Artificial Sequence: Synthetic oligonucleotide
  Antisense strand to SEQ ID NO: 564509
gacucucaacagauuauug

SEQ ID NO: 564511 - RNA, 19 nt, Artificial Sequence
  Description of Artificial Sequence: Synthetic oligonucleotide
  Sense strand starting at position 2378 of SEQ ID NO: 318460
aagucaugcugcuaagaug

SEQ ID NO: 564512 - RNA, 19 nt, Artificial Sequence
  Description of Artificial Sequence: Synthetic oligonucleotide
  Antisense strand to SEQ ID NO: 564511
caucuuagcagcaugacuu

SEQ ID NO: 564513 - RNA, 19 nt, Artificial Sequence
  Description of Artificial Sequence: Synthetic oligonucleotide
  Sense strand starting at position 2905 of SEQ ID NO: 318460
ggaacagagcuuuaugcuc

SEQ ID NO: 564514 - RNA, 19 nt, Artificial Sequence
  Description of Artificial Sequence: Synthetic oligonucleotide
  Antisense strand to SEQ ID NO: 564513
gagcauaaagcucuguucc

SEQ ID NO: 564515 - RNA, 19 nt, Artificial Sequence
  Description of Artificial Sequence: Synthetic oligonucleotide
  Sense strand starting at position 2910 of SEQ ID NO: 318460
agagcuuuaugcucucaau

SEQ ID NO: 564516 - RNA, 19 nt, Artificial Sequence
  Description of Artificial Sequence: Synthetic oligonucleotide
  Antisense strand to SEQ ID NO: 564515
auugagagcauaaagcucu

SEQ ID NO: 564517 - RNA, 19 nt, Artificial Sequence
  Description of Artificial Sequence: Synthetic oligonucleotide
  Sense strand starting at position 2913 of SEQ ID NO: 318460
gcuuuaugcucucaaugug

SEQ ID NO: 564518 - RNA, 19 nt, Artificial Sequence
  Description of Artificial Sequence: Synthetic oligonucleotide
  Antisense strand to SEQ ID NO: 564517
cacauugagagcauaaagc

SEQ ID NO: 564519 - RNA, 19 nt, Artificial Sequence
  Description of Artificial Sequence: Synthetic oligonucleotide
  Sense strand starting at position 2916 of SEQ ID NO: 318460
uuaugcucucaaugugguu

SEQ ID NO: 564520 - RNA, 19 nt, Artificial Sequence
  Description of Artificial Sequence: Synthetic oligonucleotide
  Antisense strand to SEQ ID NO: 564519
aaccacauugagagcauaa

SEQ ID NO: 564521 - RNA, 19 nt, Artificial Sequence
  Description of Artificial Sequence: Synthetic oligonucleotide
  Sense strand starting at position 2921 of SEQ ID NO: 318460
cucucaaugugguuacuga

SEQ ID NO: 564522 - RNA, 19 nt, Artificial Sequence
  Description of Artificial Sequence: Synthetic oligonucleotide
  Antisense strand to SEQ ID NO: 564521
ucaguaaccacauugagag

SEQ ID NO: 564523 - RNA, 19 nt, Artificial Sequence
  Description of Artificial Sequence: Synthetic oligonucleotide
  Sense strand starting at position 2925 of SEQ ID NO: 318460
caaugugguuacugacaac

SEQ ID NO: 564524 - RNA, 19 nt, Artificial Sequence
  Description of Artificial Sequence: Synthetic oligonucleotide
  Antisense strand to SEQ ID NO: 564523
guugucaguaaccacauug

SEQ ID NO: 564525 - RNA, 19 nt, Artificial Sequence
  Description of Artificial Sequence: Synthetic oligonucleotide
  Sense strand starting at position 3026 of SEQ ID NO: 318460
ggcagugaauguccugauu

SEQ ID NO: 564526 - RNA, 19 nt, Artificial Sequence
  Description of Artificial Sequence: Synthetic oligonucleotide
  Antisense strand to SEQ ID NO: 564525
aaucaggacauucacugcc

SEQ ID NO: 564527 - RNA, 19 nt, Artificial Sequence
  Description of Artificial Sequence: Synthetic oligonucleotide
  Sense strand starting at position 3028 of SEQ ID NO: 318460
cagugaauguccugauucu

SEQ ID NO: 564528 - RNA, 19 nt, Artificial Sequence
  Description of Artificial Sequence: Synthetic oligonucleotide
  Antisense strand to SEQ ID NO: 564527
agaaucaggacauucacug

SEQ ID NO: 564529 - RNA, 19 nt, Artificial Sequence
  Description of Artificial Sequence: Synthetic oligonucleotide
  Sense strand starting at position 3029 of SEQ ID NO: 318460
agugaauguccugauucua

SEQ ID NO: 564530 - RNA, 19 nt, Artificial Sequence
  Description of Artificial Sequence: Synthetic oligonucleotide
  Antisense strand to SEQ ID NO: 564529
uagaaucaggacauucacu

SEQ ID NO: 564531 - RNA, 19 nt, Artificial Sequence
  Description of Artificial Sequence: Synthetic oligonucleotide
  Sense strand starting at position 3186 of SEQ ID NO: 318460
ccuuuauguugaguuguaa

SEQ ID NO: 564532 - RNA, 19 nt, Artificial Sequence
  Description of Artificial Sequence: Synthetic oligonucleotide
  Antisense strand to SEQ ID NO: 564531
uuacaacucaacauaaagg

SEQ ID NO: 564533 - RNA, 19 nt, Artificial Sequence
  Description of Artificial Sequence: Synthetic oligonucleotide
  Sense strand starting at position 3190 of SEQ ID NO: 318460
uauguugaguuguaauccu

SEQ ID NO: 564534 - RNA, 19 nt, Artificial Sequence
  Description of Artificial Sequence: Synthetic oligonucleotide
  Antisense strand to SEQ ID NO: 564533
aggauuacaacucaacaua

SEQ ID NO: 564535 - RNA, 19 nt, Artificial Sequence
  Description of Artificial Sequence: Synthetic oligonucleotide
  Sense strand starting at position 3198 of SEQ ID NO: 318460
guuguaauccuucggguga

SEQ ID NO: 564536 - RNA, 19 nt, Artificial Sequence
  Description of Artificial Sequence: Synthetic oligonucleotide
  Antisense strand to SEQ ID NO: 564535
ucacccgaaggauuacaac

SEQ ID NO: 564537 - RNA, 19 nt, Artificial Sequence
  Description of Artificial Sequence: Synthetic oligonucleotide
  Sense strand starting at position 3232 of SEQ ID NO: 318460
gugcccaucugggcugaaa

SEQ ID NO: 564538 - RNA, 19 nt, Artificial Sequence
  Description of Artificial Sequence: Synthetic oligonucleotide
  Antisense strand to SEQ ID NO: 564537
uuucagcccagaugggcac

SEQ ID NO: 564539 - RNA, 19 nt, Artificial Sequence
  Description of Artificial Sequence: Synthetic oligonucleotide
  Sense strand starting at position 3297 of SEQ ID NO: 318460
agcucaguaucccugaaca

SEQ ID NO: 564540 - RNA, 19 nt, Artificial Sequence
  Description of Artificial Sequence: Synthetic oligonucleotide
  Antisense strand to SEQ ID NO: 564539
uguucagggauacugagcu

SEQ ID NO: 564541 - RNA, 19 nt, Artificial Sequence
  Description of Artificial Sequence: Synthetic oligonucleotide
  Sense strand starting at position 3463 of SEQ ID NO: 318460
uggaaugcagucuguuauc

SEQ ID NO: 564542 - RNA, 19 nt, Artificial Sequence
  Description of Artificial Sequence: Synthetic oligonucleotide
  Antisense strand to SEQ ID NO: 564541
gauaacagacugcauucca

SEQ ID NO: 564543 - RNA, 19 nt, Artificial Sequence
  Description of Artificial Sequence: Synthetic oligonucleotide
  Sense strand starting at position 3553 of SEQ ID NO: 318460
gaucuauggccacacguuu

SEQ ID NO: 564544 - RNA, 19 nt, Artificial Sequence
  Description of Artificial Sequence: Synthetic oligonucleotide
  Antisense strand to SEQ ID NO: 564543
aaacguguggccauagauc

SEQ ID NO: 564545 - RNA, 19 nt, Artificial Sequence
  Description of Artificial Sequence: Synthetic oligonucleotide
  Sense strand starting at position 3584 of SEQ ID NO: 318460
caggcugccugcuuaagaa

SEQ ID NO: 564546 - RNA, 19 nt, Artificial Sequence
  Description of Artificial Sequence: Synthetic oligonucleotide
  Antisense strand to SEQ ID NO: 564545
uucuuaagcaggcagccug

SEQ ID NO: 564547 - RNA, 19 nt, Artificial Sequence
  Description of Artificial Sequence: Synthetic oligonucleotide
  Sense strand starting at position 3866 of SEQ ID NO: 318460
guagcacagucaugaagac

SEQ ID NO: 564548 - RNA, 19 nt, Artificial Sequence
  Description of Artificial Sequence: Synthetic oligonucleotide
  Antisense strand to SEQ ID NO: 564547
gucuucaugacugugcuac

SEQ ID NO: 564549 - RNA, 19 nt, Artificial Sequence
  Description of Artificial Sequence: Synthetic oligonucleotide
  Sense strand starting at position 3915 of SEQ ID NO: 318460
cucccaaucugauguugau

SEQ ID NO: 564550 - RNA, 19 nt, Artificial Sequence
  Description of Artificial Sequence: Synthetic oligonucleotide
  Antisense strand to SEQ ID NO: 564549
aucaacaucagauugggag

SEQ ID NO: 564551 - RNA, 19 nt, Artificial Sequence
  Description of Artificial Sequence: Synthetic oligonucleotide
  Sense strand starting at position 3940 of SEQ ID NO: 318460
aggguugguacacgaauaa

SEQ ID NO: 564552 - RNA, 19 nt, Artificial Sequence
  Description of Artificial Sequence: Synthetic oligonucleotide
  Antisense strand to SEQ ID NO: 564551
uuauucguguaccaacccu

SEQ ID NO: 564553 - RNA, 19 nt, Artificial Sequence
  Description of Artificial Sequence: Synthetic oligonucleotide
  Sense strand starting at position 255 of SEQ ID NO: 318461
uuauauaaccaaggagcua

SEQ ID NO: 564554 - RNA, 19 nt, Artificial Sequence
  Description of Artificial Sequence: Synthetic oligonucleotide
  Antisense strand to SEQ ID NO: 564553
uagcuccuugguuauauaa

SEQ ID NO: 564555 - RNA, 19 nt, Artificial Sequence
  Description of Artificial Sequence: Synthetic oligonucleotide
  Sense strand starting at position 268 of SEQ ID NO: 318461
gagcuauaucauggagcau

SEQ ID NO: 564556 - RNA, 19 nt, Artificial Sequence
  Description of Artificial Sequence: Synthetic oligonucleotide
  Antisense strand to SEQ ID NO: 564555
augcuccaugauauagcuc

SEQ ID NO: 564557 - RNA, 19 nt, Artificial Sequence
  Description of Artificial Sequence: Synthetic oligonucleotide
  Sense strand starting at position 326 of SEQ ID NO: 318461
ccaaguuugucuguaacau

SEQ ID NO: 564558 - RNA, 19 nt, Artificial Sequence
  Description of Artificial Sequence: Synthetic oligonucleotide
  Antisense strand to SEQ ID NO: 564557
auguuacagacaaacuugg

SEQ ID NO: 564559 - RNA, 19 nt, Artificial Sequence
  Description of Artificial Sequence: Synthetic oligonucleotide
  Sense strand starting at position 327 of SEQ ID NO: 318461
caaguuugucuguaacaug

SEQ ID NO: 564560 - RNA, 19 nt, Artificial Sequence
  Description of Artificial Sequence: Synthetic oligonucleotide
  Antisense strand to SEQ ID NO: 564559
cauguuacagacaaacuug

SEQ ID NO: 564561 - RNA, 19 nt, Artificial Sequence
  Description of Artificial Sequence: Synthetic oligonucleotide
  Sense strand starting at position 440 of SEQ ID NO: 318461
acucucuaggugcauaaau

SEQ ID NO: 564562 - RNA, 19 nt, Artificial Sequence
  Description of Artificial Sequence: Synthetic oligonucleotide
  Antisense strand to SEQ ID NO: 564561
auuuaugcaccuagagagu

SEQ ID NO: 564563 - RNA, 19 nt, Artificial Sequence
  Description of Artificial Sequence: Synthetic oligonucleotide
  Sense strand starting at position 442 of SEQ ID NO: 318461
ucucuaggugcauaaauau

SEQ ID NO: 564564 - RNA, 19 nt, Artificial Sequence
  Description of Artificial Sequence: Synthetic oligonucleotide
  Antisense strand to SEQ ID NO: 564563
auauuuaugcaccuagaga

SEQ ID NO: 564565 - RNA, 19 nt, Artificial Sequence
  Description of Artificial Sequence: Synthetic oligonucleotide
  Sense strand starting at position 555 of SEQ ID NO: 318461
gugguagcgcuuuccuguu

SEQ ID NO: 564566 - RNA, 19 nt, Artificial Sequence
  Description of Artificial Sequence: Synthetic oligonucleotide
  Antisense strand to SEQ ID NO: 564565
aacaggaaagcgcuaccac

SEQ ID NO: 564567 - RNA, 19 nt, Artificial Sequence
  Description of Artificial Sequence: Synthetic oligonucleotide
  Sense strand starting at position 560 of SEQ ID NO: 318461
agcgcuuuccuguuagugu

SEQ ID NO: 564568 - RNA, 19 nt, Artificial Sequence
  Description of Artificial Sequence: Synthetic oligonucleotide
  Antisense strand to SEQ ID NO: 564567
acacuaacaggaaagcgcu

SEQ ID NO: 564569 - RNA, 19 nt, Artificial Sequence
  Description of Artificial Sequence: Synthetic oligonucleotide
  Sense strand starting at position 629 of SEQ ID NO: 318461
ugggcuaaucgucaagaga

SEQ ID NO: 564570 - RNA, 19 nt, Artificial Sequence
  Description of Artificial Sequence: Synthetic oligonucleotide
  Antisense strand to SEQ ID NO: 564569
ucucuugacgauuagccca

SEQ ID NO: 564571 - RNA, 19 nt, Artificial Sequence
  Description of Artificial Sequence: Synthetic oligonucleotide
  Sense strand starting at position 632 of SEQ ID NO: 318461
gcuaaucgucaagagauag

SEQ ID NO: 564572 - RNA, 19 nt, Artificial Sequence
  Description of Artificial Sequence: Synthetic oligonucleotide
  Antisense strand to SEQ ID NO: 564571
cuaucucuugacgauuagc

SEQ ID NO: 564573 - RNA, 19 nt, Artificial Sequence
  Description of Artificial Sequence: Synthetic oligonucleotide
  Sense strand starting at position 638 of SEQ ID NO: 318461
cgucaagagauagggauua

SEQ ID NO: 564574 - RNA, 19 nt, Artificial Sequence
  Description of Artificial Sequence: Synthetic oligonucleotide
  Antisense strand to SEQ ID NO: 564573
uaaucccuaucucuugacg

SEQ ID NO: 564575 - RNA, 19 nt, Artificial Sequence
  Description of Artificial Sequence: Synthetic oligonucleotide
  Sense strand starting at position 814 of SEQ ID NO: 318461
gggugugucacuuacgaga

SEQ ID NO: 564576 - RNA, 19 nt, Artificial Sequence
  Description of Artificial Sequence: Synthetic oligonucleotide
  Antisense strand to SEQ ID NO: 564575
ucucguaagugacacaccc

SEQ ID NO: 564577 - RNA, 19 nt, Artificial Sequence
  Description of Artificial Sequence: Synthetic oligonucleotide
  Sense strand starting at position 1023 of SEQ ID NO: 318461
uccucucgacucgauuaaa

SEQ ID NO: 564578 - RNA, 19 nt, Artificial Sequence
  Description of Artificial Sequence: Synthetic oligonucleotide
  Antisense strand to SEQ ID NO: 564577
uuuaaucgagucgagagga

SEQ ID NO: 564579 - RNA, 19 nt, Artificial Sequence
  Description of Artificial Sequence: Synthetic oligonucleotide
  Sense strand starting at position 1026 of SEQ ID NO: 318461
ucucgacucgauuaaagga

SEQ ID NO: 564580 - RNA, 19 nt, Artificial Sequence
  Description of Artificial Sequence: Synthetic oligonucleotide
  Antisense strand to SEQ ID NO: 564579
uccuuuaaucgagucgaga

SEQ ID NO: 564581 - RNA, 19 nt, Artificial Sequence
  Description of Artificial Sequence: Synthetic oligonucleotide
  Sense strand starting at position 1034 of SEQ ID NO: 318461
cgauuaaaggagcgagaaa

SEQ ID NO: 564582 - RNA, 19 nt, Artificial Sequence
  Description of Artificial Sequence: Synthetic oligonucleotide
  Antisense strand to SEQ ID NO: 564581
uuucucgcuccuuuaaucg

SEQ ID NO: 564583 - RNA, 19 nt, Artificial Sequence
  Description of Artificial Sequence: Synthetic oligonucleotide
  Sense strand starting at position 1089 of SEQ ID NO: 318461
gggcuaugccuugaagucu

SEQ ID NO: 564584 - RNA, 19 nt, Artificial Sequence
  Description of Artificial Sequence: Synthetic oligonucleotide
  Antisense strand to SEQ ID NO: 564583
agacuucaaggcauagccc

SEQ ID NO: 564585 - RNA, 19 nt, Artificial Sequence
  Description of Artificial Sequence: Synthetic oligonucleotide
  Sense strand starting at position 1595 of SEQ ID NO: 318461
ccagccugaucccugaaua

SEQ ID NO: 564586 - RNA, 19 nt, Artificial Sequence
  Description of Artificial Sequence: Synthetic oligonucleotide
  Antisense strand to SEQ ID NO: 564585
uauucagggaucaggcugg

SEQ ID NO: 564587 - RNA, 19 nt, Artificial Sequence
  Description of Artificial Sequence: Synthetic oligonucleotide
  Sense strand starting at position 2324 of SEQ ID NO: 318461
aauugaaauguuugagcau

SEQ ID NO: 564588 - RNA, 19 nt, Artificial Sequence
  Description of Artificial Sequence: Synthetic oligonucleotide
  Antisense strand to SEQ ID NO: 564587
augcucaaacauuucaauu

SEQ ID NO: 564589 - RNA, 19 nt, Artificial Sequence
  Description of Artificial Sequence: Synthetic oligonucleotide
  Sense strand starting at position 2331 of SEQ ID NO: 318461
auguuugagcaucgugaaa

SEQ ID NO: 564590 - RNA, 19 nt, Artificial Sequence
  Description of Artificial Sequence: Synthetic oligonucleotide
  Antisense strand to SEQ ID NO: 564589
uuucacgaugcucaaacau

SEQ ID NO: 564591 - RNA, 19 nt, Artificial Sequence
  Description of Artificial Sequence: Synthetic oligonucleotide
  Sense strand starting at position 2346 of SEQ ID NO: 318461
gaaagaacucuuuggaagc

SEQ ID NO: 564592 - RNA, 19 nt, Artificial Sequence
  Description of Artificial Sequence: Synthetic oligonucleotide
  Antisense strand to SEQ ID NO: 564591
gcuuccaaagaguucuuuc

SEQ ID NO: 564593 - RNA, 19 nt, Artificial Sequence
  Description of Artificial Sequence: Synthetic oligonucleotide
  Sense strand starting at position 2521 of SEQ ID NO: 318461
cguugucuuggugucugau

SEQ ID NO: 564594 - RNA, 19 nt, Artificial Sequence
  Description of Artificial Sequence: Synthetic oligonucleotide
  Antisense strand to SEQ ID NO: 564593
aucagacaccaagacaacg

SEQ ID NO: 564595 - RNA, 19 nt, Artificial Sequence
  Description of Artificial Sequence: Synthetic oligonucleotide
  Sense strand starting at position 2553 of SEQ ID NO: 318461
uccaaauucucucugugga

SEQ ID NO: 564596 - RNA, 19 nt, Artificial Sequence
  Description of Artificial Sequence: Synthetic oligonucleotide
  Antisense strand to SEQ ID NO: 564595
uccacagagagaauuugga

SEQ ID NO: 564597 - RNA, 19 nt, Artificial Sequence
  Description of Artificial Sequence: Synthetic oligonucleotide
  Sense strand starting at position 2671 of SEQ ID NO: 318461
gaaugaguuggccaugcuc

SEQ ID NO: 564598 - RNA, 19 nt, Artificial Sequence
  Description of Artificial Sequence: Synthetic oligonucleotide
  Antisense strand to SEQ ID NO: 564597
gagcauggccaacucauuc

SEQ ID NO: 564599 - RNA, 19 nt, Artificial Sequence
  Description of Artificial Sequence: Synthetic oligonucleotide
  Sense strand starting at position 2774 of SEQ ID NO: 318461
ugcacacugcugcagaauu

SEQ ID NO: 564600 - RNA, 19 nt, Artificial Sequence
  Description of Artificial Sequence: Synthetic oligonucleotide
  Antisense strand to SEQ ID NO: 564599
aauucugcagcagugugca

SEQ ID NO: 564601 - RNA, 19 nt, Artificial Sequence
  Description of Artificial Sequence: Synthetic oligonucleotide
  Sense strand starting at position 3128 of SEQ ID NO: 318461
guuaauucucaauguggca

SEQ ID NO: 564602 - RNA, 19 nt, Artificial Sequence
  Description of Artificial Sequence: Synthetic oligonucleotide
  Antisense strand to SEQ ID NO: 564601
ugccacauugagaauuaac

SEQ ID NO: 564603 - RNA, 19 nt, Artificial Sequence
  Description of Artificial Sequence: Synthetic oligonucleotide
  Sense strand starting at position 3170 of SEQ ID NO: 318461
gugcgucaaguugugcuau

SEQ ID NO: 564604 - RNA, 19 nt, Artificial Sequence
  Description of Artificial Sequence: Synthetic oligonucleotide
  Antisense strand to SEQ ID NO: 564603
auagcacaacuugacgcac

SEQ ID NO: 564605 - RNA, 19 nt, Artificial Sequence
  Description of Artificial Sequence: Synthetic oligonucleotide
  Sense strand starting at position 3173 of SEQ ID NO: 318461
cgucaaguugugcuauguu

SEQ ID NO: 564606 - RNA, 19 nt, Artificial Sequence
  Description of Artificial Sequence: Synthetic oligonucleotide
  Antisense strand to SEQ ID NO: 564605
aacauagcacaacuugacg

SEQ ID NO: 564607 - RNA, 19 nt, Artificial Sequence
  Description of Artificial Sequence: Synthetic oligonucleotide
  Sense strand starting at position 3215 of SEQ ID NO: 318461
uuccuaucugccugaagga

SEQ ID NO: 564608 - RNA, 19 nt, Artificial Sequence
  Description of Artificial Sequence: Synthetic oligonucleotide
  Antisense strand to SEQ ID NO: 564607
uccuucaggcagauaggaa

SEQ ID NO: 564609 - RNA, 19 nt, Artificial Sequence
  Description of Artificial Sequence: Synthetic oligonucleotide
  Sense strand starting at position 3303 of SEQ ID NO: 318461
cuugcugugccucagacaa

SEQ ID NO: 564610 - RNA, 19 nt, Artificial Sequence
  Description of Artificial Sequence: Synthetic oligonucleotide
  Antisense strand to SEQ ID NO: 564609
uugucugaggcacagcaag

SEQ ID NO: 564611 - RNA, 19 nt, Artificial Sequence
  Description of Artificial Sequence: Synthetic oligonucleotide
  Sense strand starting at position 3424 of SEQ ID NO: 318461
aguagcaaugucuagagau

SEQ ID NO: 564612 - RNA, 19 nt, Artificial Sequence
  Description of Artificial Sequence: Synthetic oligonucleotide
  Antisense strand to SEQ ID NO: 564611
aucucuagacauugcuacu

SEQ ID NO: 564613 - RNA, 19 nt, Artificial Sequence
  Description of Artificial Sequence: Synthetic oligonucleotide
  Sense strand starting at position 3426 of SEQ ID NO: 318461
uagcaaugucuagagauac

SEQ ID NO: 564614 - RNA, 19 nt, Artificial Sequence
  Description of Artificial Sequence: Synthetic oligonucleotide
  Antisense strand to SEQ ID NO: 564613
guaucucuagacauugcua

SEQ ID NO: 564615 - RNA, 19 nt, Artificial Sequence
  Description of Artificial Sequence: Synthetic oligonucleotide
  Sense strand starting at position 3437 of SEQ ID NO: 318461
agagauacuuucguuguga

SEQ ID NO: 564616 - RNA, 19 nt, Artificial Sequence
  Description of Artificial Sequence: Synthetic oligonucleotide
  Antisense strand to SEQ ID NO: 564615
ucacaacgaaaguaucucu

SEQ ID NO: 564617 - RNA, 19 nt, Artificial Sequence
  Description of Artificial Sequence: Synthetic oligonucleotide
  Sense strand starting at position 3438 of SEQ ID NO: 318461
gagauacuuucguugugaa

SEQ ID NO: 564618 - RNA, 19 nt, Artificial Sequence
  Description of Artificial Sequence: Synthetic oligonucleotide
  Antisense strand to SEQ ID NO: 564617
uucacaacgaaaguaucuc

SEQ ID NO: 564619 - RNA, 19 nt, Artificial Sequence
  Description of Artificial Sequence: Synthetic oligonucleotide
  Sense strand starting at position 3439 of SEQ ID NO: 318461
agauacuuucguugugaaa

SEQ ID NO: 564620 - RNA, 19 nt, Artificial Sequence
  Description of Artificial Sequence: Synthetic oligonucleotide
  Antisense strand to SEQ ID NO: 564619
uuucacaacgaaaguaucu

SEQ ID NO: 564621 - RNA, 19 nt, Artificial Sequence
  Description of Artificial Sequence: Synthetic oligonucleotide
  Sense strand starting at position 3451 of SEQ ID NO: 318461
ugugaaacagauugucaca

SEQ ID NO: 564622 - RNA, 19 nt, Artificial Sequence
  Description of Artificial Sequence: Synthetic oligonucleotide
  Antisense strand to SEQ ID NO: 564621
ugugacaaucuguuucaca

SEQ ID NO: 564623 - RNA, 19 nt, Artificial Sequence
  Description of Artificial Sequence: Synthetic oligonucleotide
  Sense strand starting at position 3498 of SEQ ID NO: 318461
cuagcaucuagugguuaga

SEQ ID NO: 564624 - RNA, 19 nt, Artificial Sequence
  Description of Artificial Sequence: Synthetic oligonucleotide
  Antisense strand to SEQ ID NO: 564623
ucuaaccacuagaugcuag

SEQ ID NO: 564625 - RNA, 19 nt, Artificial Sequence
  Description of Artificial Sequence: Synthetic oligonucleotide
  Sense strand starting at position 3500 of SEQ ID NO: 318461
agcaucuagugguuagaga

SEQ ID NO: 564626 - RNA, 19 nt, Artificial Sequence
  Description of Artificial Sequence: Synthetic oligonucleotide
  Antisense strand to SEQ ID NO: 564625
ucucuaaccacuagaugcu

SEQ ID NO: 564627 - RNA, 19 nt, Artificial Sequence
  Description of Artificial Sequence: Synthetic oligonucleotide
  Sense strand starting at position 3501 of SEQ ID NO: 318461
gcaucuagugguuagagac

SEQ ID NO: 564628 - RNA, 19 nt, Artificial Sequence
  Description of Artificial Sequence: Synthetic oligonucleotide
  Antisense strand to SEQ ID NO: 564627
gucucuaaccacuagaugc

SEQ ID NO: 564629 - RNA, 19 nt, Artificial Sequence
  Description of Artificial Sequence: Synthetic oligonucleotide
  Sense strand starting at position 3583 of SEQ ID NO: 318461
cccaaaugucaauaaugug

SEQ ID NO: 564630 - RNA, 19 nt, Artificial Sequence
  Description of Artificial Sequence: Synthetic oligonucleotide
  Antisense strand to SEQ ID NO: 564629
cacauuauugacauuuggg

SEQ ID NO: 564631 - RNA, 19 nt, Artificial Sequence
  Description of Artificial Sequence: Synthetic oligonucleotide
  Sense strand starting at position 3752 of SEQ ID NO: 318461
auuuauuacugucuggcau

SEQ ID NO: 564632 - RNA, 19 nt, Artificial Sequence
  Description of Artificial Sequence: Synthetic oligonucleotide
  Antisense strand to SEQ ID NO: 564631
augccagacaguaauaaau

SEQ ID NO: 564633 - RNA, 19 nt, Artificial Sequence
  Description of Artificial Sequence: Synthetic oligonucleotide
  Sense strand starting at position 166 of SEQ ID NO: 318462
gaaagagauuggcaaggaa

SEQ ID NO: 564634 - RNA, 19 nt, Artificial Sequence
  Description of Artificial Sequence: Synthetic oligonucleotide
  Antisense strand to SEQ ID NO: 564633
uuccuugccaaucucuuuc

SEQ ID NO: 564635 - RNA, 19 nt, Artificial Sequence
  Description of Artificial Sequence: Synthetic oligonucleotide
  Sense strand starting at position 185 of SEQ ID NO: 318462
gcaggaaugagucagcuuu

SEQ ID NO: 564636 - RNA, 19 nt, Artificial Sequence
  Description of Artificial Sequence: Synthetic oligonucleotide
  Antisense strand to SEQ ID NO: 564635
aaagcugacucauuccugc

SEQ ID NO: 564637 - RNA, 19 nt, Artificial Sequence
  Description of Artificial Sequence: Synthetic oligonucleotide
  Sense strand starting at position 207 of SEQ ID NO: 318462
ggaauauuaccugguggcu

SEQ ID NO: 564638 - RNA, 19 nt, Artificial Sequence
  Description of Artificial Sequence: Synthetic oligonucleotide
  Antisense strand to SEQ ID NO: 564637
agccaccagguaauauucc

SEQ ID NO: 564639 - RNA, 19 nt, Artificial Sequence
  Description of Artificial Sequence: Synthetic oligonucleotide
  Sense strand starting at position 232 of SEQ ID NO: 318462
auuuauugcuuaggacaua

SEQ ID NO: 564640 - RNA, 19 nt, Artificial Sequence
  Description of Artificial Sequence: Synthetic oligonucleotide
  Antisense strand to SEQ ID NO: 564639
uauguccuaagcaauaaau

SEQ ID NO: 564641 - RNA, 19 nt, Artificial Sequence
  Description of Artificial Sequence: Synthetic oligonucleotide
  Sense strand starting at position 439 of SEQ ID NO: 318462
cagguuugaucaggauuug

SEQ ID NO: 564642 - RNA, 19 nt, Artificial Sequence
  Description of Artificial Sequence: Synthetic oligonucleotide
  Antisense strand to SEQ ID NO: 564641
caaauccugaucaaaccug

SEQ ID NO: 564643 - RNA, 19 nt, Artificial Sequence
  Description of Artificial Sequence: Synthetic oligonucleotide
  Sense strand starting at position 2376 of SEQ ID NO: 318462
gcauuacggucucuauaag

SEQ ID NO: 564644 - RNA, 19 nt, Artificial Sequence
  Description of Artificial Sequence: Synthetic oligonucleotide
  Antisense strand to SEQ ID NO: 564643
cuuauagagaccguaaugc

SEQ ID NO: 564645 - RNA, 19 nt, Artificial Sequence
  Description of Artificial Sequence: Synthetic oligonucleotide
  Sense strand starting at position 2377 of SEQ ID NO: 318462
cauuacggucucuauaaga

SEQ ID NO: 564646 - RNA, 19 nt, Artificial Sequence
  Description of Artificial Sequence: Synthetic oligonucleotide
  Antisense strand to SEQ ID NO: 564645
ucuuauagagaccguaaug

SEQ ID NO: 564647 - RNA, 19 nt, Artificial Sequence
  Description of Artificial Sequence: Synthetic oligonucleotide
  Sense strand starting at position 2391 of SEQ ID NO: 318462
uaagaagaugaucgugagu

SEQ ID NO: 564648 - RNA, 19 nt, Artificial Sequence
  Description of Artificial Sequence: Synthetic oligonucleotide
  Antisense strand to SEQ ID NO: 564647
acucacgaucaucuucuua

SEQ ID NO: 564649 - RNA, 19 nt, Artificial Sequence
  Description of Artificial Sequence: Synthetic oligonucleotide
  Sense strand starting at position 2445 of SEQ ID NO: 318462
agcuguggccguagggaua

SEQ ID NO: 564650 - RNA, 19 nt, Artificial Sequence
  Description of Artificial Sequence: Synthetic oligonucleotide
  Antisense strand to SEQ ID NO: 564649
uaucccuacggccacagcu

SEQ ID NO: 564651 - RNA, 19 nt, Artificial Sequence
  Description of Artificial Sequence: Synthetic oligonucleotide
  Sense strand starting at position 2531 of SEQ ID NO: 318462
ccaggaguaccuugaaagu

SEQ ID NO: 564652 - RNA, 19 nt, Artificial Sequence
  Description of Artificial Sequence: Synthetic oligonucleotide
  Antisense strand to SEQ ID NO: 564651
acuuucaagguacuccugg

SEQ ID NO: 564653 - RNA, 19 nt, Artificial Sequence
  Description of Artificial Sequence: Synthetic oligonucleotide
  Sense strand starting at position 2567 of SEQ ID NO: 318462
gcguccucugcuuaaugga

SEQ ID NO: 564654 - RNA, 19 nt, Artificial Sequence
  Description of Artificial Sequence: Synthetic oligonucleotide
  Antisense strand to SEQ ID NO: 564653
uccauuaagcagaggacgc

SEQ ID NO: 564655 - RNA, 19 nt, Artificial Sequence
  Description of Artificial Sequence: Synthetic oligonucleotide
  Sense strand starting at position 2718 of SEQ ID NO: 318462
gggccuuggccucaggaau

SEQ ID NO: 564656 - RNA, 19 nt, Artificial Sequence
  Description of Artificial Sequence: Synthetic oligonucleotide
  Antisense strand to SEQ ID NO: 564655
auuccugaggccaaggccc

SEQ ID NO: 564657 - RNA, 19 nt, Artificial Sequence
  Description of Artificial Sequence: Synthetic oligonucleotide
  Sense strand starting at position 2749 of SEQ ID NO: 318462
agcggauaucacuguauca

SEQ ID NO: 564658 - RNA, 19 nt, Artificial Sequence
  Description of Artificial Sequence: Synthetic oligonucleotide
  Antisense strand to SEQ ID NO: 564657
ugauacagugauauccgcu

SEQ ID NO: 564659 - RNA, 19 nt, Artificial Sequence
  Description of Artificial Sequence: Synthetic oligonucleotide
  Sense strand starting at position 2849 of SEQ ID NO: 318462
cgaugcugccgucuuugua

SEQ ID NO: 564660 - RNA, 19 nt, Artificial Sequence
  Description of Artificial Sequence: Synthetic oligonucleotide
  Antisense strand to SEQ ID NO: 564659
uacaaagacggcagcaucg

SEQ ID NO: 564661 - RNA, 19 nt, Artificial Sequence
  Description of Artificial Sequence: Synthetic oligonucleotide
  Sense strand starting at position 2850 of SEQ ID NO: 318462
gaugcugccgucuuuguaa

SEQ ID NO: 564662 - RNA, 19 nt, Artificial Sequence
  Description of Artificial Sequence: Synthetic oligonucleotide
  Antisense strand to SEQ ID NO: 564661
uuacaaagacggcagcauc

SEQ ID NO: 564663 - RNA, 19 nt, Artificial Sequence
  Description of Artificial Sequence: Synthetic oligonucleotide
  Sense strand starting at position 2858 of SEQ ID NO: 318462
cgucuuuguaaauguguau

SEQ ID NO: 564664 - RNA, 19 nt, Artificial Sequence
  Description of Artificial Sequence: Synthetic oligonucleotide
  Antisense strand to SEQ ID NO: 564663
auacacauuuacaaagacg

SEQ ID NO: 564665 - RNA, 19 nt, Artificial Sequence
  Description of Artificial Sequence: Synthetic oligonucleotide
  Sense strand starting at position 2883 of SEQ ID NO: 318462
guggaacagaggcgauauu

SEQ ID NO: 564666 - RNA, 19 nt, Artificial Sequence
  Description of Artificial Sequence: Synthetic oligonucleotide
  Antisense strand to SEQ ID NO: 564665
aauaucgccucuguuccac

SEQ ID NO: 564667 - RNA, 19 nt, Artificial Sequence
  Description of Artificial Sequence: Synthetic oligonucleotide
  Sense strand starting at position 2933 of SEQ ID NO: 318462
cuacaugguucugcuuaau

SEQ ID NO: 564668 - RNA, 19 nt, Artificial Sequence
  Description of Artificial Sequence: Synthetic oligonucleotide
  Antisense strand to SEQ ID NO: 564667
auuaagcagaaccauguag

SEQ ID NO: 564669 - RNA, 19 nt, Artificial Sequence
  Description of Artificial Sequence: Synthetic oligonucleotide
  Sense strand starting at position 2942 of SEQ ID NO: 318462
ucugcuuaaucgcuaucca

SEQ ID NO: 564670 - RNA, 19 nt, Artificial Sequence
  Description of Artificial Sequence: Synthetic oligonucleotide
  Antisense strand to SEQ ID NO: 564669
uggauagcgauuaagcaga

SEQ ID NO: 564671 - RNA, 19 nt, Artificial Sequence
  Description of Artificial Sequence: Synthetic oligonucleotide
  Sense strand starting at position 3010 of SEQ ID NO: 318462
auggcugugauaugggaua

SEQ ID NO: 564672 - RNA, 19 nt, Artificial Sequence
  Description of Artificial Sequence: Synthetic oligonucleotide
  Antisense strand to SEQ ID NO: 564671
uaucccauaucacagccau

SEQ ID NO: 564673 - RNA, 19 nt, Artificial Sequence
  Description of Artificial Sequence: Synthetic oligonucleotide
  Sense strand starting at position 3021 of SEQ ID NO: 318462
augggauaguaacaguuaa

SEQ ID NO: 564674 - RNA, 19 nt, Artificial Sequence
  Description of Artificial Sequence: Synthetic oligonucleotide
  Antisense strand to SEQ ID NO: 564673
uuaacuguuacuaucccau

SEQ ID NO: 564675 - RNA, 19 nt, Artificial Sequence
  Description of Artificial Sequence: Synthetic oligonucleotide
  Sense strand starting at position 3267 of SEQ ID NO: 318462
uacagugaucuaugaucag

SEQ ID NO: 564676 - RNA, 19 nt, Artificial Sequence
  Description of Artificial Sequence: Synthetic oligonucleotide
  Antisense strand to SEQ ID NO: 564675
cugaucauagaucacugua

SEQ ID NO: 564677 - RNA, 19 nt, Artificial Sequence
  Description of Artificial Sequence: Synthetic oligonucleotide
  Sense strand starting at position 3348 of SEQ ID NO: 318462
caggcuuuauguguugcua

SEQ ID NO: 564678 - RNA, 19 nt, Artificial Sequence
  Description of Artificial Sequence: Synthetic oligonucleotide
  Antisense strand to SEQ ID NO: 564677
uagcaacacauaaagccug

SEQ ID NO: 564679 - RNA, 19 nt, Artificial Sequence
  Description of Artificial Sequence: Synthetic oligonucleotide
  Sense strand starting at position 3352 of SEQ ID NO: 318462
cuuuauguguugcuaggga

SEQ ID NO: 564680 - RNA, 19 nt, Artificial Sequence
  Description of Artificial Sequence: Synthetic oligonucleotide
  Antisense strand to SEQ ID NO: 564679
ucccuagcaacacauaaag

SEQ ID NO: 564681 - RNA, 19 nt, Artificial Sequence
  Description of Artificial Sequence: Synthetic oligonucleotide
  Sense strand starting at position 3357 of SEQ ID NO: 318462
uguguugcuagggaaacua

SEQ ID NO: 564682 - RNA, 19 nt, Artificial Sequence
  Description of Artificial Sequence: Synthetic oligonucleotide
  Antisense strand to SEQ ID NO: 564681
uaguuucccuagcaacaca

SEQ ID NO: 564683 - RNA, 19 nt, Artificial Sequence
  Description of Artificial Sequence: Synthetic oligonucleotide
  Sense strand starting at position 3365 of SEQ ID NO: 318462
uagggaaacuagugaacaa

SEQ ID NO: 564684 - RNA, 19 nt, Artificial Sequence
  Description of Artificial Sequence: Synthetic oligonucleotide
  Antisense strand to SEQ ID NO: 564683
uuguucacuaguuucccua

SEQ ID NO: 564685 - RNA, 19 nt, Artificial Sequence
  Description of Artificial Sequence: Synthetic oligonucleotide
  Sense strand starting at position 3375 of SEQ ID NO: 318462
agugaacaauaugaaugaa

SEQ ID NO: 564686 - RNA, 19 nt, Artificial Sequence
  Description of Artificial Sequence: Synthetic oligonucleotide
  Antisense strand to SEQ ID NO: 564685
uucauucauauuguucacu

SEQ ID NO: 564687 - RNA, 19 nt, Artificial Sequence
  Description of Artificial Sequence: Synthetic oligonucleotide
  Sense strand starting at position 3452 of SEQ ID NO: 318462
gauguuagugcaggaaucu

SEQ ID NO: 564688 - RNA, 19 nt, Artificial Sequence
  Description of Artificial Sequence: Synthetic oligonucleotide
  Antisense strand to SEQ ID NO: 564687
agauuccugcacuaacauc

SEQ ID NO: 564689 - RNA, 19 nt, Artificial Sequence
  Description of Artificial Sequence: Synthetic oligonucleotide
  Sense strand starting at position 3453 of SEQ ID NO: 318462
auguuagugcaggaaucua

SEQ ID NO: 564690 - RNA, 19 nt, Artificial Sequence
  Description of Artificial Sequence: Synthetic oligonucleotide
  Antisense strand to SEQ ID NO: 564689
uagauuccugcacuaacau

SEQ ID NO: 564691 - RNA, 19 nt, Artificial Sequence
  Description of Artificial Sequence: Synthetic oligonucleotide
  Sense strand starting at position 3478 of SEQ ID NO: 318462
uugagauuguuugccugua

SEQ ID NO: 564692 - RNA, 19 nt, Artificial Sequence
  Description of Artificial Sequence: Synthetic oligonucleotide
  Antisense strand to SEQ ID NO: 564691
uacaggcaaacaaucucaa

SEQ ID NO: 564693 - RNA, 19 nt, Artificial Sequence
  Description of Artificial Sequence: Synthetic oligonucleotide
  Sense strand starting at position 3479 of SEQ ID NO: 318462
ugagauuguuugccuguau

SEQ ID NO: 564694 - RNA, 19 nt, Artificial Sequence
  Description of Artificial Sequence: Synthetic oligonucleotide
  Antisense strand to SEQ ID NO: 564693
auacaggcaaacaaucuca

SEQ ID NO: 564695 - RNA, 19 nt, Artificial Sequence
  Description of Artificial Sequence: Synthetic oligonucleotide
  Sense strand starting at position 3480 of SEQ ID NO: 318462
gagauuguuugccuguaug

SEQ ID NO: 564696 - RNA, 19 nt, Artificial Sequence
  Description of Artificial Sequence: Synthetic oligonucleotide
  Antisense strand to SEQ ID NO: 564695
cauacaggcaaacaaucuc

SEQ ID NO: 564697 - RNA, 19 nt, Artificial Sequence
  Description of Artificial Sequence: Synthetic oligonucleotide
  Sense strand starting at position 3613 of SEQ ID NO: 318462
guugacauauaucccauau

SEQ ID NO: 564698 - RNA, 19 nt, Artificial Sequence
  Description of Artificial Sequence: Synthetic oligonucleotide
  Antisense strand to SEQ ID NO: 564697
auaugggauauaugucaac

SEQ ID NO: 564699 - RNA, 19 nt, Artificial Sequence
  Description of Artificial Sequence: Synthetic oligonucleotide
  Sense strand starting at position 3742 of SEQ ID NO: 318462
uggaucagggcucaaaguu

SEQ ID NO: 564700 - RNA, 19 nt, Artificial Sequence
  Description of Artificial Sequence: Synthetic oligonucleotide
  Antisense strand to SEQ ID NO: 564699
aacuuugagcccugaucca

SEQ ID NO: 564701 - RNA, 19 nt, Artificial Sequence
  Description of Artificial Sequence: Synthetic oligonucleotide
  Sense strand starting at position 3825 of SEQ ID NO: 318462
uguaauaacuuaccugguu

SEQ ID NO: 564702 - RNA, 19 nt, Artificial Sequence
  Description of Artificial Sequence: Synthetic oligonucleotide
  Antisense strand to SEQ ID NO: 564701
aaccagguaaguuauuaca

SEQ ID NO: 564703 - RNA, 19 nt, Artificial Sequence
  Description of Artificial Sequence: Synthetic oligonucleotide
  Sense strand starting at position 3826 of SEQ ID NO: 318462
guaauaacuuaccugguua

SEQ ID NO: 564704 - RNA, 19 nt, Artificial Sequence
  Description of Artificial Sequence: Synthetic oligonucleotide
  Antisense strand to SEQ ID NO: 564703
uaaccagguaaguuauuac

SEQ ID NO: 564705 - RNA, 19 nt, Artificial Sequence
  Description of Artificial Sequence: Synthetic oligonucleotide
  Sense strand starting at position 3845 of SEQ ID NO: 318462
aucggagucucucuacuga

SEQ ID NO: 564706 - RNA, 19 nt, Artificial Sequence
  Description of Artificial Sequence: Synthetic oligonucleotide
  Antisense strand to SEQ ID NO: 564705
ucaguagagagacuccgau

SEQ ID NO: 564707 - RNA, 19 nt, Artificial Sequence
  Description of Artificial Sequence: Synthetic oligonucleotide
  Sense strand starting at position 3861 of SEQ ID NO: 318462
ugacuuaaggauuguggga

SEQ ID NO: 564708 - RNA, 19 nt, Artificial Sequence
  Description of Artificial Sequence: Synthetic oligonucleotide
  Antisense strand to SEQ ID NO: 564707
ucccacaauccuuaaguca

SEQ ID NO: 564709 - RNA, 19 nt, Artificial Sequence
  Description of Artificial Sequence: Synthetic oligonucleotide
  Sense strand starting at position 3903 of SEQ ID NO: 318462
ucauauagucuccaggacu

SEQ ID NO: 564710 - RNA, 19 nt, Artificial Sequence
  Description of Artificial Sequence: Synthetic oligonucleotide
  Antisense strand to SEQ ID NO: 564709
aguccuggagacuauauga

SEQ ID NO: 564711 - RNA, 19 nt, Artificial Sequence
  Description of Artificial Sequence: Synthetic oligonucleotide
  Sense strand starting at position 3925 of SEQ ID NO: 318462
uucaguauggguggucuga

SEQ ID NO: 564712 - RNA, 19 nt, Artificial Sequence
  Description of Artificial Sequence: Synthetic oligonucleotide
  Antisense strand to SEQ ID NO: 564711
ucagaccacccauacugaa

SEQ ID NO: 564713 - RNA, 19 nt, Artificial Sequence
  Description of Artificial Sequence: Synthetic oligonucleotide
  Sense strand starting at position 146 of SEQ ID NO: 318463
cgacaaacuggugaacuuu

SEQ ID NO: 564714 - RNA, 19 nt, Artificial Sequence
  Description of Artificial Sequence: Synthetic oligonucleotide
  Antisense strand to SEQ ID NO: 564713
aaaguucaccaguuugucg

SEQ ID NO: 564715 - RNA, 19 nt, Artificial Sequence
  Description of Artificial Sequence: Synthetic oligonucleotide
  Sense strand starting at position 570 of SEQ ID NO: 318463
agucguuguguuucauguu

SEQ ID NO: 564716 - RNA, 19 nt, Artificial Sequence
  Description of Artificial Sequence: Synthetic oligonucleotide
  Antisense strand to SEQ ID NO: 564715
aacaugaaacacaacgacu

SEQ ID NO: 564717 - RNA, 19 nt, Artificial Sequence
  Description of Artificial Sequence: Synthetic oligonucleotide
  Sense strand starting at position 634 of SEQ ID NO: 318463
aggugcuaacuccauauaa

SEQ ID NO: 564718 - RNA, 19 nt, Artificial Sequence
  Description of Artificial Sequence: Synthetic oligonucleotide
  Antisense strand to SEQ ID NO: 564717
uuauauggaguuagcaccu

SEQ ID NO: 564719 - RNA, 19 nt, Artificial Sequence
  Description of Artificial Sequence: Synthetic oligonucleotide
  Sense strand starting at position 669 of SEQ ID NO: 318463
aauggauacucggucacua

SEQ ID NO: 564720 - RNA, 19 nt, Artificial Sequence
  Description of Artificial Sequence: Synthetic oligonucleotide
  Antisense strand to SEQ ID NO: 564719
uagugaccgaguauccauu

SEQ ID NO: 564721 - RNA, 19 nt, Artificial Sequence
  Description of Artificial Sequence: Synthetic oligonucleotide
  Sense strand starting at position 671 of SEQ ID NO: 318463
uggauacucggucacuauu

SEQ ID NO: 564722 - RNA, 19 nt, Artificial Sequence
  Description of Artificial Sequence: Synthetic oligonucleotide
  Antisense strand to SEQ ID NO: 564721
aauagugaccgaguaucca

SEQ ID NO: 564723 - RNA, 19 nt, Artificial Sequence
  Description of Artificial Sequence: Synthetic oligonucleotide
  Sense strand starting at position 674 of SEQ ID NO: 318463
auacucggucacuauuaga

SEQ ID NO: 564724 - RNA, 19 nt, Artificial Sequence
  Description of Artificial Sequence: Synthetic oligonucleotide
  Antisense strand to SEQ ID NO: 564723
ucuaauagugaccgaguau

SEQ ID NO: 564725 - RNA, 19 nt, Artificial Sequence
  Description of Artificial Sequence: Synthetic oligonucleotide
  Sense strand starting at position 2209 of SEQ ID NO: 318463
ggcagaugacccugguuga

SEQ ID NO: 564726 - RNA, 19 nt, Artificial Sequence
  Description of Artificial Sequence: Synthetic oligonucleotide
  Antisense strand to SEQ ID NO: 564725
ucaaccagggucaucugcc

SEQ ID NO: 564727 - RNA, 19 nt, Artificial Sequence
  Description of Artificial Sequence: Synthetic oligonucleotide
  Sense strand starting at position 2226 of SEQ ID NO: 318463
gauagagaucucuggccaa

SEQ ID NO: 564728 - RNA, 19 nt, Artificial Sequence
  Description of Artificial Sequence: Synthetic oligonucleotide
  Antisense strand to SEQ ID NO: 564727
uuggccagagaucucuauc

SEQ ID NO: 564729 - RNA, 19 nt, Artificial Sequence
  Description of Artificial Sequence: Synthetic oligonucleotide
  Sense strand starting at position 2280 of SEQ ID NO: 318463
acucguguacuugacaaau

SEQ ID NO: 564730 - RNA, 19 nt, Artificial Sequence
  Description of Artificial Sequence: Synthetic oligonucleotide
  Antisense strand to SEQ ID NO: 564729
auuugucaaguacacgagu

SEQ ID NO: 564731 - RNA, 19 nt, Artificial Sequence
  Description of Artificial Sequence: Synthetic oligonucleotide
  Sense strand starting at position 2286 of SEQ ID NO: 318463
guacuugacaaauguggau

SEQ ID NO: 564732 - RNA, 19 nt, Artificial Sequence
  Description of Artificial Sequence: Synthetic oligonucleotide
  Antisense strand to SEQ ID NO: 564731
auccacauuugucaaguac

SEQ ID NO: 564733 - RNA, 19 nt, Artificial Sequence
  Description of Artificial Sequence: Synthetic oligonucleotide
  Sense strand starting at position 2298 of SEQ ID NO: 318463
uguggauagcaucaguuua

SEQ ID NO: 564734 - RNA, 19 nt, Artificial Sequence
  Description of Artificial Sequence: Synthetic oligonucleotide
  Antisense strand to SEQ ID NO: 564733
uaaacugaugcuauccaca

SEQ ID NO: 564735 - RNA, 19 nt, Artificial Sequence
  Description of Artificial Sequence: Synthetic oligonucleotide
  Sense strand starting at position 2300 of SEQ ID NO: 318463
uggauagcaucaguuuacu

SEQ ID NO: 564736 - RNA, 19 nt, Artificial Sequence
  Description of Artificial Sequence: Synthetic oligonucleotide
  Antisense strand to SEQ ID NO: 564735
aguaaacugaugcuaucca

SEQ ID NO: 564737 - RNA, 19 nt, Artificial Sequence
  Description of Artificial Sequence: Synthetic oligonucleotide
  Sense strand starting at position 2436 of SEQ ID NO: 318463
cauguauaaggauguuaag

SEQ ID NO: 564738 - RNA, 19 nt, Artificial Sequence
  Description of Artificial Sequence: Synthetic oligonucleotide
  Antisense strand to SEQ ID NO: 564737
cuuaacauccuuauacaug

SEQ ID NO: 564739 - RNA, 19 nt, Artificial Sequence
  Description of Artificial Sequence: Synthetic oligonucleotide
  Sense strand starting at position 2642 of SEQ ID NO: 318463
ggagaaucgcuuugaaucc

SEQ ID NO: 564740 - RNA, 19 nt, Artificial Sequence
  Description of Artificial Sequence: Synthetic oligonucleotide
  Antisense strand to SEQ ID NO: 564739
ggauucaaagcgauucucc

SEQ ID NO: 564741 - RNA, 19 nt, Artificial Sequence
  Description of Artificial Sequence: Synthetic oligonucleotide
  Sense strand starting at position 2756 of SEQ ID NO: 318463
auugcugugaaguagugaa

SEQ ID NO: 564742 - RNA, 19 nt, Artificial Sequence
  Description of Artificial Sequence: Synthetic oligonucleotide
  Antisense strand to SEQ ID NO: 564741
uucacuacuucacagcaau

SEQ ID NO: 564743 - RNA, 19 nt, Artificial Sequence
  Description of Artificial Sequence: Synthetic oligonucleotide
  Sense strand starting at position 2848 of SEQ ID NO: 318463
cguagcuguguacuguaua

SEQ ID NO: 564744 - RNA, 19 nt, Artificial Sequence
  Description of Artificial Sequence: Synthetic oligonucleotide
  Antisense strand to SEQ ID NO: 564743
uauacaguacacagcuacg

SEQ ID NO: 564745 - RNA, 19 nt, Artificial Sequence
  Description of Artificial Sequence: Synthetic oligonucleotide
  Sense strand starting at position 2853 of SEQ ID NO: 318463
cuguguacuguauacucaa

SEQ ID NO: 564746 - RNA, 19 nt, Artificial Sequence
  Description of Artificial Sequence: Synthetic oligonucleotide
  Antisense strand to SEQ ID NO: 564745
uugaguauacaguacacag

SEQ ID NO: 564747 - RNA, 19 nt, Artificial Sequence
  Description of Artificial Sequence: Synthetic oligonucleotide
  Sense strand starting at position 2900 of SEQ ID NO: 318463
aaaggcaaagcguagaaua

SEQ ID NO: 564748 - RNA, 19 nt, Artificial Sequence
  Description of Artificial Sequence: Synthetic oligonucleotide
  Antisense strand to SEQ ID NO: 564747
uauucuacgcuuugccuuu

SEQ ID NO: 564749 - RNA, 19 nt, Artificial Sequence
  Description of Artificial Sequence: Synthetic oligonucleotide
  Sense strand starting at position 3092 of SEQ ID NO: 318463
auuguacuucccugaauug

SEQ ID NO: 564750 - RNA, 19 nt, Artificial Sequence
  Description of Artificial Sequence: Synthetic oligonucleotide
  Antisense strand to SEQ ID NO: 564749
caauucagggaaguacaau

SEQ ID NO: 564751 - RNA, 19 nt, Artificial Sequence
  Description of Artificial Sequence: Synthetic oligonucleotide
  Sense strand starting at position 3093 of SEQ ID NO: 318463
uuguacuucccugaauuga

SEQ ID NO: 564752 - RNA, 19 nt, Artificial Sequence
  Description of Artificial Sequence: Synthetic oligonucleotide
  Antisense strand to SEQ ID NO: 564751
ucaauucagggaaguacaa

SEQ ID NO: 564753 - RNA, 19 nt, Artificial Sequence
  Description of Artificial Sequence: Synthetic oligonucleotide
  Sense strand starting at position 3143 of SEQ ID NO: 318463
ccucauauuuguguuccga

SEQ ID NO: 564754 - RNA, 19 nt, Artificial Sequence
  Description of Artificial Sequence: Synthetic oligonucleotide
  Antisense strand to SEQ ID NO: 564753
ucggaacacaaauaugagg

SEQ ID NO: 564755 - RNA, 19 nt, Artificial Sequence
  Description of Artificial Sequence: Synthetic oligonucleotide
  Sense strand starting at position 3170 of SEQ ID NO: 318463
acuagaugagccuaaguuu

SEQ ID NO: 564756 - RNA, 19 nt, Artificial Sequence
  Description of Artificial Sequence: Synthetic oligonucleotide
  Antisense strand to SEQ ID NO: 564755
aaacuuaggcucaucuagu

SEQ ID NO: 564757 - RNA, 19 nt, Artificial Sequence
  Description of Artificial Sequence: Synthetic oligonucleotide
  Sense strand starting at position 3268 of SEQ ID NO: 318463
ucguaaugcccagucugua

SEQ ID NO: 564758 - RNA, 19 nt, Artificial Sequence
  Description of Artificial Sequence: Synthetic oligonucleotide
  Antisense strand to SEQ ID NO: 564757
uacagacugggcauuacga

SEQ ID NO: 564759 - RNA, 19 nt, Artificial Sequence
  Description of Artificial Sequence: Synthetic oligonucleotide
  Sense strand starting at position 3269 of SEQ ID NO: 318463
cguaaugcccagucuguau

SEQ ID NO: 564760 - RNA, 19 nt, Artificial Sequence
  Description of Artificial Sequence: Synthetic oligonucleotide
  Antisense strand to SEQ ID NO: 564759
auacagacugggcauuacg

SEQ ID NO: 564761 - RNA, 19 nt, Artificial Sequence
  Description of Artificial Sequence: Synthetic oligonucleotide
  Sense strand starting at position 3357 of SEQ ID NO: 318463
uuaacuuccugagugauuc

SEQ ID NO: 564762 - RNA, 19 nt, Artificial Sequence
  Description of Artificial Sequence: Synthetic oligonucleotide
  Antisense strand to SEQ ID NO: 564761
gaaucacucaggaaguuaa

SEQ ID NO: 564763 - RNA, 19 nt, Artificial Sequence
  Description of Artificial Sequence: Synthetic oligonucleotide
  Sense strand starting at position 3367 of SEQ ID NO: 318463
gagugauuccagugugaac

SEQ ID NO: 564764 - RNA, 19 nt, Artificial Sequence
  Description of Artificial Sequence: Synthetic oligonucleotide
  Antisense strand to SEQ ID NO: 564763
guucacacuggaaucacuc

SEQ ID NO: 564765 - RNA, 19 nt, Artificial Sequence
  Description of Artificial Sequence: Synthetic oligonucleotide
  Sense strand starting at position 3378 of SEQ ID NO: 318463
gugugaacccaagguugaa

SEQ ID NO: 564766 - RNA, 19 nt, Artificial Sequence
  Description of Artificial Sequence: Synthetic oligonucleotide
  Antisense strand to SEQ ID NO: 564765
uucaaccuuggguucacac

SEQ ID NO: 564767 - RNA, 19 nt, Artificial Sequence
  Description of Artificial Sequence: Synthetic oligonucleotide
  Sense strand starting at position 3418 of SEQ ID NO: 318463
uggugacauagugaucuca

SEQ ID NO: 564768 - RNA, 19 nt, Artificial Sequence
  Description of Artificial Sequence: Synthetic oligonucleotide
  Antisense strand to SEQ ID NO: 564767
ugagaucacuaugucacca

SEQ ID NO: 564769 - RNA, 19 nt, Artificial Sequence
  Description of Artificial Sequence: Synthetic oligonucleotide
  Sense strand starting at position 3420 of SEQ ID NO: 318463
gugacauagugaucucagg

SEQ ID NO: 564770 - RNA, 19 nt, Artificial Sequence
  Description of Artificial Sequence: Synthetic oligonucleotide
  Antisense strand to SEQ ID NO: 564769
ccugagaucacuaugucac

SEQ ID NO: 564771 - RNA, 19 nt, Artificial Sequence
  Description of Artificial Sequence: Synthetic oligonucleotide
  Sense strand starting at position 3496 of SEQ ID NO: 318463
cucagugugcuauauaaau

SEQ ID NO: 564772 - RNA, 19 nt, Artificial Sequence
  Description of Artificial Sequence: Synthetic oligonucleotide
  Antisense strand to SEQ ID NO: 564771
auuuauauagcacacugag

SEQ ID NO: 564773 - RNA, 19 nt, Artificial Sequence
  Description of Artificial Sequence: Synthetic oligonucleotide
  Sense strand starting at position 3545 of SEQ ID NO: 318463
gaaguugaauagcucagaa

SEQ ID NO: 564774 - RNA, 19 nt, Artificial Sequence
  Description of Artificial Sequence: Synthetic oligonucleotide
  Antisense strand to SEQ ID NO: 564773
uucugagcuauucaacuuc

SEQ ID NO: 564775 - RNA, 19 nt, Artificial Sequence
  Description of Artificial Sequence: Synthetic oligonucleotide
  Sense strand starting at position 3566 of SEQ ID NO: 318463
auuuguuuccagugcuagu

SEQ ID NO: 564776 - RNA, 19 nt, Artificial Sequence
  Description of Artificial Sequence: Synthetic oligonucleotide
  Antisense strand to SEQ ID NO: 564775
acuagcacuggaaacaaau

SEQ ID NO: 564777 - RNA, 19 nt, Artificial Sequence
  Description of Artificial Sequence: Synthetic oligonucleotide
  Sense strand starting at position 3567 of SEQ ID NO: 318463
uuuguuuccagugcuaguu

SEQ ID NO: 564778 - RNA, 19 nt, Artificial Sequence
  Description of Artificial Sequence: Synthetic oligonucleotide
  Antisense strand to SEQ ID NO: 564777
aacuagcacuggaaacaaa

SEQ ID NO: 564779 - RNA, 19 nt, Artificial Sequence
  Description of Artificial Sequence: Synthetic oligonucleotide
  Sense strand starting at position 3700 of SEQ ID NO: 318463
uuugauguaucaguuauca

SEQ ID NO: 564780 - RNA, 19 nt, Artificial Sequence
  Description of Artificial Sequence: Synthetic oligonucleotide
  Antisense strand to SEQ ID NO: 564779
ugauaacugauacaucaaa

SEQ ID NO: 564781 - RNA, 19 nt, Artificial Sequence
  Description of Artificial Sequence: Synthetic oligonucleotide
  Sense strand starting at position 3758 of SEQ ID NO: 318463
aucuguuagucaucccaaa

SEQ ID NO: 564782 - RNA, 19 nt, Artificial Sequence
  Description of Artificial Sequence: Synthetic oligonucleotide
  Antisense strand to SEQ ID NO: 564781
uuugggaugacuaacagau

SEQ ID NO: 564783 - RNA, 19 nt, Artificial Sequence
  Description of Artificial Sequence: Synthetic oligonucleotide
  Sense strand starting at position 3816 of SEQ ID NO: 318463
cuugucaucgaaggauuaa

SEQ ID NO: 564784 - RNA, 19 nt, Artificial Sequence
  Description of Artificial Sequence: Synthetic oligonucleotide
  Antisense strand to SEQ ID NO: 564783
uuaauccuucgaugacaag

SEQ ID NO: 564785 - RNA, 19 nt, Artificial Sequence
  Description of Artificial Sequence: Synthetic oligonucleotide
  Sense strand starting at position 3871 of SEQ ID NO: 318463
gucauauucugggcauuaa

SEQ ID NO: 564786 - RNA, 19 nt, Artificial Sequence
  Description of Artificial Sequence: Synthetic oligonucleotide
  Antisense strand to SEQ ID NO: 564785
uuaaugcccagaauaugac

SEQ ID NO: 564787 - RNA, 19 nt, Artificial Sequence
  Description of Artificial Sequence: Synthetic oligonucleotide
  Sense strand starting at position 3872 of SEQ ID NO: 318463
ucauauucugggcauuaaa

SEQ ID NO: 564788 - RNA, 19 nt, Artificial Sequence
  Description of Artificial Sequence: Synthetic oligonucleotide
  Antisense strand to SEQ ID NO: 564787
uuuaaugcccagaauauga

SEQ ID NO: 564789 - RNA, 19 nt, Artificial Sequence
  Description of Artificial Sequence: Synthetic oligonucleotide
  Sense strand starting at position 3940 of SEQ ID NO: 318463
ugaagaccucaguaguuau

SEQ ID NO: 564790 - RNA, 19 nt, Artificial Sequence
  Description of Artificial Sequence: Synthetic oligonucleotide
  Antisense strand to SEQ ID NO: 564789
auaacuacugaggucuuca

SEQ ID NO: 564791 - RNA, 19 nt, Artificial Sequence
  Description of Artificial Sequence: Synthetic oligonucleotide
  Sense strand starting at position 3943 of SEQ ID NO: 318463
agaccucaguaguuauaca

SEQ ID NO: 564792 - RNA, 19 nt, Artificial Sequence
  Description of Artificial Sequence: Synthetic oligonucleotide
  Antisense strand to SEQ ID NO: 564791
uguauaacuacugaggucu

SEQ ID NO: 564793 - RNA, 19 nt, Artificial Sequence
  Description of Artificial Sequence: Synthetic oligonucleotide
  Sense strand starting at position 44 of SEQ ID NO: 318464
cgacaaacuggugaacuuu

SEQ ID NO: 564794 - RNA, 19 nt, Artificial Sequence
  Description of Artificial Sequence: Synthetic oligonucleotide
  Antisense strand to SEQ ID NO: 564793
aaaguucaccaguuugucg

SEQ ID NO: 564795 - RNA, 19 nt, Artificial Sequence
  Description of Artificial Sequence: Synthetic oligonucleotide
  Sense strand starting at position 468 of SEQ ID NO: 318464
agucguuguguuucauguu

SEQ ID NO: 564796 - RNA, 19 nt, Artificial Sequence
  Description of Artificial Sequence: Synthetic oligonucleotide
  Antisense strand to SEQ ID NO: 564795
aacaugaaacacaacgacu

SEQ ID NO: 564797 - RNA, 19 nt, Artificial Sequence
  Description of Artificial Sequence: Synthetic oligonucleotide
  Sense strand starting at position 532 of SEQ ID NO: 318464
aggugcuaacuccauauaa

SEQ ID NO: 564798 - RNA, 19 nt, Artificial Sequence
  Description of Artificial Sequence: Synthetic oligonucleotide
  Antisense strand to SEQ ID NO: 564797
uuauauggaguuagcaccu

SEQ ID NO: 564799 - RNA, 19 nt, Artificial Sequence
  Description of Artificial Sequence: Synthetic oligonucleotide
  Sense strand starting at position 567 of SEQ ID NO: 318464
aauggauacucggucacua

SEQ ID NO: 564800 - RNA, 19 nt, Artificial Sequence
  Description of Artificial Sequence: Synthetic oligonucleotide
  Antisense strand to SEQ ID NO: 564799
uagugaccgaguauccauu

SEQ ID NO: 564801 - RNA, 19 nt, Artificial Sequence
  Description of Artificial Sequence: Synthetic oligonucleotide
  Sense strand starting at position 569 of SEQ ID NO: 318464
uggauacucggucacuauu

SEQ ID NO: 564802 - RNA, 19 nt, Artificial Sequence
  Description of Artificial Sequence: Synthetic oligonucleotide
  Antisense strand to SEQ ID NO: 564801
aauagugaccgaguaucca

SEQ ID NO: 564803 - RNA, 19 nt, Artificial Sequence
  Description of Artificial Sequence: Synthetic oligonucleotide
  Sense strand starting at position 572 of SEQ ID NO: 318464
auacucggucacuauuaga

SEQ ID NO: 564804 - RNA, 19 nt, Artificial Sequence
  Description of Artificial Sequence: Synthetic oligonucleotide
  Antisense strand to SEQ ID NO: 564803
ucuaauagugaccgaguau

SEQ ID NO: 564805 - RNA, 19 nt, Artificial Sequence
  Description of Artificial Sequence: Synthetic oligonucleotide
  Sense strand starting at position 2107 of SEQ ID NO: 318464
ggcagaugacccugguuga

SEQ ID NO: 564806 - RNA, 19 nt, Artificial Sequence
  Description of Artificial Sequence: Synthetic oligonucleotide
  Antisense strand to SEQ ID NO: 564805
ucaaccagggucaucugcc

SEQ ID NO: 564807 - RNA, 19 nt, Artificial Sequence
  Description of Artificial Sequence: Synthetic oligonucleotide
  Sense strand starting at position 2124 of SEQ ID NO: 318464
gauagagaucucuggccaa

SEQ ID NO: 564808 - RNA, 19 nt, Artificial Sequence
  Description of Artificial Sequence: Synthetic oligonucleotide
  Antisense strand to SEQ ID NO: 564807
uuggccagagaucucuauc

SEQ ID NO: 564809 - RNA, 19 nt, Artificial Sequence
  Description of Artificial Sequence: Synthetic oligonucleotide
  Sense strand starting at position 2178 of SEQ ID NO: 318464
acucguguacuugacaaau

SEQ ID NO: 564810 - RNA, 19 nt, Artificial Sequence
  Description of Artificial Sequence: Synthetic oligonucleotide
  Antisense strand to SEQ ID NO: 564809
auuugucaaguacacgagu

SEQ ID NO: 564811 - RNA, 19 nt, Artificial Sequence
  Description of Artificial Sequence: Synthetic oligonucleotide
  Sense strand starting at position 2184 of SEQ ID NO: 318464
guacuugacaaauguggau

SEQ ID NO: 564812 - RNA, 19 nt, Artificial Sequence
  Description of Artificial Sequence: Synthetic oligonucleotide
  Antisense strand to SEQ ID NO: 564811
auccacauuugucaaguac

SEQ ID NO: 564813 - RNA, 19 nt, Artificial Sequence
  Description of Artificial Sequence: Synthetic oligonucleotide
  Sense strand starting at position 2196 of SEQ ID NO: 318464
uguggauagcaucaguuua

SEQ ID NO: 564814 - RNA, 19 nt, Artificial Sequence
  Description of Artificial Sequence: Synthetic oligonucleotide
  Antisense strand to SEQ ID NO: 564813
uaaacugaugcuauccaca

SEQ ID NO: 564815 - RNA, 19 nt, Artificial Sequence
  Description of Artificial Sequence: Synthetic oligonucleotide
  Sense strand starting at position 2198 of SEQ ID NO: 318464
uggauagcaucaguuuacu

SEQ ID NO: 564816 - RNA, 19 nt, Artificial Sequence
  Description of Artificial Sequence: Synthetic oligonucleotide
  Antisense strand to SEQ ID NO: 564815
aguaaacugaugcuaucca

SEQ ID NO: 564817 - RNA, 19 nt, Artificial Sequence
  Description of Artificial Sequence: Synthetic oligonucleotide
  Sense strand starting at position 2334 of SEQ ID NO: 318464
cauguauaaggauguuaag

SEQ ID NO: 564818 - RNA, 19 nt, Artificial Sequence
  Description of Artificial Sequence: Synthetic oligonucleotide
  Antisense strand to SEQ ID NO: 564817
cuuaacauccuuauacaug

SEQ ID NO: 564819 - RNA, 19 nt, Artificial Sequence
  Description of Artificial Sequence: Synthetic oligonucleotide
  Sense strand starting at position 2540 of SEQ ID NO: 318464
ggagaaucgcuuugaaucc

SEQ ID NO: 564820 - RNA, 19 nt, Artificial Sequence
  Description of Artificial Sequence: Synthetic oligonucleotide
  Antisense strand to SEQ ID NO: 564819
ggauucaaagcgauucucc

SEQ ID NO: 564821 - RNA, 19 nt, Artificial Sequence
  Description of Artificial Sequence: Synthetic oligonucleotide
  Sense strand starting at position 2654 of SEQ ID NO: 318464
auugcugugaaguagugaa

SEQ ID NO: 564822 - RNA, 19 nt, Artificial Sequence
  Description of Artificial Sequence: Synthetic oligonucleotide
  Antisense strand to SEQ ID NO: 564821
uucacuacuucacagcaau

SEQ ID NO: 564823 - RNA, 19 nt, Artificial Sequence
  Description of Artificial Sequence: Synthetic oligonucleotide
  Sense strand starting at position 2746 of SEQ ID NO: 318464
cguagcuguguacuguaua

SEQ ID NO: 564824 - RNA, 19 nt, Artificial Sequence
  Description of Artificial Sequence: Synthetic oligonucleotide
  Antisense strand to SEQ ID NO: 564823
uauacaguacacagcuacg

SEQ ID NO: 564825 - RNA, 19 nt, Artificial Sequence
  Description of Artificial Sequence: Synthetic oligonucleotide
  Sense strand starting at position 2751 of SEQ ID NO: 318464
cuguguacuguauacucaa

SEQ ID NO: 564826 - RNA, 19 nt, Artificial Sequence
  Description of Artificial Sequence: Synthetic oligonucleotide
  Antisense strand to SEQ ID NO: 564825
uugaguauacaguacacag

SEQ ID NO: 564827 - RNA, 19 nt, Artificial Sequence
  Description of Artificial Sequence: Synthetic oligonucleotide
  Sense strand starting at position 2798 of SEQ ID NO: 318464
aaaggcaaagcguagaaua

SEQ ID NO: 564828 - RNA, 19 nt, Artificial Sequence
  Description of Artificial Sequence: Synthetic oligonucleotide
  Antisense strand to SEQ ID NO: 564827
uauucuacgcuuugccuuu

SEQ ID NO: 564829 - RNA, 19 nt, Artificial Sequence
  Description of Artificial Sequence: Synthetic oligonucleotide
  Sense strand starting at position 2990 of SEQ ID NO: 318464
auuguacuucccugaauug

SEQ ID NO: 564830 - RNA, 19 nt, Artificial Sequence
  Description of Artificial Sequence: Synthetic oligonucleotide
  Antisense strand to SEQ ID NO: 564829
caauucagggaaguacaau

SEQ ID NO: 564831 - RNA, 19 nt, Artificial Sequence
  Description of Artificial Sequence: Synthetic oligonucleotide
  Sense strand starting at position 2991 of SEQ ID NO: 318464
uuguacuucccugaauuga

SEQ ID NO: 564832 - RNA, 19 nt, Artificial Sequence
  Description of Artificial Sequence: Synthetic oligonucleotide
  Antisense strand to SEQ ID NO: 564831
ucaauucagggaaguacaa

SEQ ID NO: 564833 - RNA, 19 nt, Artificial Sequence
  Description of Artificial Sequence: Synthetic oligonucleotide
  Sense strand starting at position 3041 of SEQ ID NO: 318464
ccucauauuuguguuccga

SEQ ID NO: 564834 - RNA, 19 nt, Artificial Sequence
  Description of Artificial Sequence: Synthetic oligonucleotide
  Antisense strand to SEQ ID NO: 564833
ucggaacacaaauaugagg

SEQ ID NO: 564835 - RNA, 19 nt, Artificial Sequence
  Description of Artificial Sequence: Synthetic oligonucleotide
  Sense strand starting at position 3068 of SEQ ID NO: 318464
acuagaugagccuaaguuu

SEQ ID NO: 564836 - RNA, 19 nt, Artificial Sequence
  Description of Artificial Sequence: Synthetic oligonucleotide
  Antisense strand to SEQ ID NO: 564835
aaacuuaggcucaucuagu

SEQ ID NO: 564837 - RNA, 19 nt, Artificial Sequence
  Description of Artificial Sequence: Synthetic oligonucleotide
  Sense strand starting at position 3166 of SEQ ID NO: 318464
ucguaaugcccagucugua

SEQ ID NO: 564838 - RNA, 19 nt, Artificial Sequence
  Description of Artificial Sequence: Synthetic oligonucleotide
  Antisense strand to SEQ ID NO: 564837
uacagacugggcauuacga

SEQ ID NO: 564839 - RNA, 19 nt, Artificial Sequence
  Description of Artificial Sequence: Synthetic oligonucleotide
  Sense strand starting at position 3167 of SEQ ID NO: 318464
cguaaugcccagucuguau

SEQ ID NO: 564840 - RNA, 19 nt, Artificial Sequence
  Description of Artificial Sequence: Synthetic oligonucleotide
  Antisense strand to SEQ ID NO: 564839
auacagacugggcauuacg

SEQ ID NO: 564841 - RNA, 19 nt, Artificial Sequence
  Description of Artificial Sequence: Synthetic oligonucleotide
  Sense strand starting at position 3255 of SEQ ID NO: 318464
uuaacuuccugagugauuc

SEQ ID NO: 564842 - RNA, 19 nt, Artificial Sequence
  Description of Artificial Sequence: Synthetic oligonucleotide
  Antisense strand to SEQ ID NO: 564841
gaaucacucaggaaguuaa

SEQ ID NO: 564843 - RNA, 19 nt, Artificial Sequence
  Description of Artificial Sequence: Synthetic oligonucleotide
  Sense strand starting at position 3276 of SEQ ID NO: 318464
gugugaacccaagguugaa

SEQ ID NO: 564844 - RNA, 19 nt, Artificial Sequence
  Description of Artificial Sequence: Synthetic oligonucleotide
  Antisense strand to SEQ ID NO: 564843
uucaaccuuggguucacac

SEQ ID NO: 564845 - RNA, 19 nt, Artificial Sequence
  Description of Artificial Sequence: Synthetic oligonucleotide
  Sense strand starting at position 3316 of SEQ ID NO: 318464
uggugacauagugaucuca

SEQ ID NO: 564846 - RNA, 19 nt, Artificial Sequence
  Description of Artificial Sequence: Synthetic oligonucleotide
  Antisense strand to SEQ ID NO: 564845
ugagaucacuaugucacca

SEQ ID NO: 564847 - RNA, 19 nt, Artificial Sequence
  Description of Artificial Sequence: Synthetic oligonucleotide
  Sense strand starting at position 3318 of SEQ ID NO: 318464
gugacauagugaucucagg

SEQ ID NO: 564848 - RNA, 19 nt, Artificial Sequence
  Description of Artificial Sequence: Synthetic oligonucleotide
  Antisense strand to SEQ ID NO: 564847
ccugagaucacuaugucac

SEQ ID NO: 564849 - RNA, 19 nt, Artificial Sequence
  Description of Artificial Sequence: Synthetic oligonucleotide
  Sense strand starting at position 3394 of SEQ ID NO: 318464
cucagugugcuauauaaau

SEQ ID NO: 564850 - RNA, 19 nt, Artificial Sequence
  Description of Artificial Sequence: Synthetic oligonucleotide
  Antisense strand to SEQ ID NO: 564849
auuuauauagcacacugag

SEQ ID NO: 564851 - RNA, 19 nt, Artificial Sequence
  Description of Artificial Sequence: Synthetic oligonucleotide
  Sense strand starting at position 3443 of SEQ ID NO: 318464
gaaguugaauagcucagaa

SEQ ID NO: 564852 - RNA, 19 nt, Artificial Sequence
  Description of Artificial Sequence: Synthetic oligonucleotide
  Antisense strand to SEQ ID NO: 564851
uucugagcuauucaacuuc

SEQ ID NO: 564853 - RNA, 19 nt, Artificial Sequence
  Description of Artificial Sequence: Synthetic oligonucleotide
  Sense strand starting at position 3464 of SEQ ID NO: 318464
auuuguuuccagugcuagu

SEQ ID NO: 564854 - RNA, 19 nt, Artificial Sequence
  Description of Artificial Sequence: Synthetic oligonucleotide
  Antisense strand to SEQ ID NO: 564853
acuagcacuggaaacaaau

SEQ ID NO: 564855 - RNA, 19 nt, Artificial Sequence
  Description of Artificial Sequence: Synthetic oligonucleotide
  Sense strand starting at position 3465 of SEQ ID NO: 318464
uuuguuuccagugcuaguu

SEQ ID NO: 564856 - RNA, 19 nt, Artificial Sequence
  Description of Artificial Sequence: Synthetic oligonucleotide
  Antisense strand to SEQ ID NO: 564855
aacuagcacuggaaacaaa

SEQ ID NO: 564857 - RNA, 19 nt, Artificial Sequence
  Description of Artificial Sequence: Synthetic oligonucleotide
  Sense strand starting at position 3598 of SEQ ID NO: 318464
uuugauguaucaguuauca

SEQ ID NO: 564858 - RNA, 19 nt, Artificial Sequence
  Description of Artificial Sequence: Synthetic oligonucleotide
  Antisense strand to SEQ ID NO: 564857
ugauaacugauacaucaaa

SEQ ID NO: 564859 - RNA, 19 nt, Artificial Sequence
  Description of Artificial Sequence: Synthetic oligonucleotide
  Sense strand starting at position 3656 of SEQ ID NO: 318464
aucuguuagucaucccaaa

SEQ ID NO: 564860 - RNA, 19 nt, Artificial Sequence
  Description of Artificial Sequence: Synthetic oligonucleotide
  Antisense strand to SEQ ID NO: 564859
uuugggaugacuaacagau

SEQ ID NO: 564861 - RNA, 19 nt, Artificial Sequence
  Description of Artificial Sequence: Synthetic oligonucleotide
  Sense strand starting at position 3714 of SEQ ID NO: 318464
cuugucaucgaaggauuaa

SEQ ID NO: 564862 - RNA, 19 nt, Artificial Sequence
  Description of Artificial Sequence: Synthetic oligonucleotide
  Antisense strand to SEQ ID NO: 564861
uuaauccuucgaugacaag

SEQ ID NO: 564863 - RNA, 19 nt, Artificial Sequence
  Description of Artificial Sequence: Synthetic oligonucleotide
  Sense strand starting at position 3769 of SEQ ID NO: 318464
gucauauucugggcauuaa

SEQ ID NO: 564864 - RNA, 19 nt, Artificial Sequence
  Description of Artificial Sequence: Synthetic oligonucleotide
  Antisense strand to SEQ ID NO: 564863
uuaaugcccagaauaugac

SEQ ID NO: 564865 - RNA, 19 nt, Artificial Sequence
  Description of Artificial Sequence: Synthetic oligonucleotide
  Sense strand starting at position 3770 of SEQ ID NO: 318464
ucauauucugggcauuaaa

SEQ ID NO: 564866 - RNA, 19 nt, Artificial Sequence
  Description of Artificial Sequence: Synthetic oligonucleotide
  Antisense strand to SEQ ID NO: 564865
uuuaaugcccagaauauga

SEQ ID NO: 564867 - RNA, 19 nt, Artificial Sequence
  Description of Artificial Sequence: Synthetic oligonucleotide
  Sense strand starting at position 3838 of SEQ ID NO: 318464
ugaagaccucaguaguuau

SEQ ID NO: 564868 - RNA, 19 nt, Artificial Sequence
  Description of Artificial Sequence: Synthetic oligonucleotide
  Antisense strand to SEQ ID NO: 564867
auaacuacugaggucuuca

SEQ ID NO: 564869 - RNA, 19 nt, Artificial Sequence
  Description of Artificial Sequence: Synthetic oligonucleotide
  Sense strand starting at position 3841 of SEQ ID NO: 318464
agaccucaguaguuauaca

SEQ ID NO: 564870 - RNA, 19 nt, Artificial Sequence
  Description of Artificial Sequence: Synthetic oligonucleotide
  Antisense strand to SEQ ID NO: 564869
uguauaacuacugaggucu

SEQ ID NO: 564871 - RNA, 19 nt, Artificial Sequence
  Description of Artificial Sequence: Synthetic oligonucleotide
  Sense strand starting at position 3950 of SEQ ID NO: 318464
agcuauaauggaggucaga

SEQ ID NO: 564872 - RNA, 19 nt, Artificial Sequence
  Description of Artificial Sequence: Synthetic oligonucleotide
  Antisense strand to SEQ ID NO: 564871
ucugaccuccauuauagcu

SEQ ID NO: 564873 - RNA, 19 nt, Artificial Sequence
  Description of Artificial Sequence: Synthetic oligonucleotide
  Sense strand starting at position 142 of SEQ ID NO: 318465
cggagaauccagcaaagca

SEQ ID NO: 564874 - RNA, 19 nt, Artificial Sequence
  Description of Artificial Sequence: Synthetic oligonucleotide
  Antisense strand to SEQ ID NO: 564873
ugcuuugcuggauucuccg

SEQ ID NO: 564875 - RNA, 19 nt, Artificial Sequence
  Description of Artificial Sequence: Synthetic oligonucleotide
  Sense strand starting at position 175 of SEQ ID NO: 318465
cgugcaaguggacagaauu

SEQ ID NO: 564876 - RNA, 19 nt, Artificial Sequence
  Description of Artificial Sequence: Synthetic oligonucleotide
  Antisense strand to SEQ ID NO: 564875
aauucuguccacuugcacg

SEQ ID NO: 564877 - RNA, 19 nt, Artificial Sequence
  Description of Artificial Sequence: Synthetic oligonucleotide
  Sense strand starting at position 268 of SEQ ID NO: 318465
uuaacuguucuccaguuaa

SEQ ID NO: 564878 - RNA, 19 nt, Artificial Sequence
  Description of Artificial Sequence: Synthetic oligonucleotide
  Antisense strand to SEQ ID NO: 564877
uuaacuggagaacaguuaa

SEQ ID NO: 564879 - RNA, 19 nt, Artificial Sequence
  Description of Artificial Sequence: Synthetic oligonucleotide
  Sense strand starting at position 316 of SEQ ID NO: 318465
agaaucucugacugcuuaa

SEQ ID NO: 564880 - RNA, 19 nt, Artificial Sequence
  Description of Artificial Sequence: Synthetic oligonucleotide
  Antisense strand to SEQ ID NO: 564879
uuaagcagucagagauucu

SEQ ID NO: 564881 - RNA, 19 nt, Artificial Sequence
  Description of Artificial Sequence: Synthetic oligonucleotide
  Sense strand starting at position 349 of SEQ ID NO: 318465
uugcgauuugugcaauccu

SEQ ID NO: 564882 - RNA, 19 nt, Artificial Sequence
  Description of Artificial Sequence: Synthetic oligonucleotide
  Antisense strand to SEQ ID NO: 564881
aggauugcacaaaucgcaa

SEQ ID NO: 564883 - RNA, 19 nt, Artificial Sequence
  Description of Artificial Sequence: Synthetic oligonucleotide
  Sense strand starting at position 466 of SEQ ID NO: 318465
gugguuuguacuuacauca

SEQ ID NO: 564884 - RNA, 19 nt, Artificial Sequence
  Description of Artificial Sequence: Synthetic oligonucleotide
  Antisense strand to SEQ ID NO: 564883
ugauguaaguacaaaccac

SEQ ID NO: 564885 - RNA, 19 nt, Artificial Sequence
  Description of Artificial Sequence: Synthetic oligonucleotide
  Sense strand starting at position 523 of SEQ ID NO: 318465
gcguuagaacaguaaggaa

SEQ ID NO: 564886 - RNA, 19 nt, Artificial Sequence
  Description of Artificial Sequence: Synthetic oligonucleotide
  Antisense strand to SEQ ID NO: 564885
uuccuuacuguucuaacgc

SEQ ID NO: 564887 - RNA, 19 nt, Artificial Sequence
  Description of Artificial Sequence: Synthetic oligonucleotide
  Sense strand starting at position 893 of SEQ ID NO: 318465
gagguaaugcgcuuccugu

SEQ ID NO: 564888 - RNA, 19 nt, Artificial Sequence
  Description of Artificial Sequence: Synthetic oligonucleotide
  Antisense strand to SEQ ID NO: 564887
acaggaagcgcauuaccuc

SEQ ID NO: 564889 - RNA, 19 nt, Artificial Sequence
  Description of Artificial Sequence: Synthetic oligonucleotide
  Sense strand starting at position 901 of SEQ ID NO: 318465
gcgcuuccuguccauuuau

SEQ ID NO: 564890 - RNA, 19 nt, Artificial Sequence
  Description of Artificial Sequence: Synthetic oligonucleotide
  Antisense strand to SEQ ID NO: 564889
auaaauggacaggaagcgc

SEQ ID NO: 564891 - RNA, 19 nt, Artificial Sequence
  Description of Artificial Sequence: Synthetic oligonucleotide
  Sense strand starting at position 910 of SEQ ID NO: 318465
guccauuuaucucaggaaa

SEQ ID NO: 564892 - RNA, 19 nt, Artificial Sequence
  Description of Artificial Sequence: Synthetic oligonucleotide
  Antisense strand to SEQ ID NO: 564891
uuuccugagauaaauggac

SEQ ID NO: 564893 - RNA, 19 nt, Artificial Sequence
  Description of Artificial Sequence: Synthetic oligonucleotide
  Sense strand starting at position 1125 of SEQ ID NO: 318465
cagccuagucugggaaacu

SEQ ID NO: 564894 - RNA, 19 nt, Artificial Sequence
  Description of Artificial Sequence: Synthetic oligonucleotide
  Antisense strand to SEQ ID NO: 564893
aguuucccagacuaggcug

SEQ ID NO: 564895 - RNA, 19 nt, Artificial Sequence
  Description of Artificial Sequence: Synthetic oligonucleotide
  Sense strand starting at position 1421 of SEQ ID NO: 318465
gagcguaaacuaggaucua

SEQ ID NO: 564896 - RNA, 19 nt, Artificial Sequence
  Description of Artificial Sequence: Synthetic oligonucleotide
  Antisense strand to SEQ ID NO: 564895
uagauccuaguuuacgcuc

SEQ ID NO: 564897 - RNA, 19 nt, Artificial Sequence
  Description of Artificial Sequence: Synthetic oligonucleotide
  Sense strand starting at position 1454 of SEQ ID NO: 318465
uggagaaucaaaugugguc

SEQ ID NO: 564898 - RNA, 19 nt, Artificial Sequence
  Description of Artificial Sequence: Synthetic oligonucleotide
  Antisense strand to SEQ ID NO: 564897
gaccacauuugauucucca

SEQ ID NO: 564899 - RNA, 19 nt, Artificial Sequence
  Description of Artificial Sequence: Synthetic oligonucleotide
  Sense strand starting at position 1459 of SEQ ID NO: 318465
aaucaaaugugguccuaga

SEQ ID NO: 564900 - RNA, 19 nt, Artificial Sequence
  Description of Artificial Sequence: Synthetic oligonucleotide
  Antisense strand to SEQ ID NO: 564899
ucuaggaccacauuugauu

SEQ ID NO: 564901 - RNA, 19 nt, Artificial Sequence
  Description of Artificial Sequence: Synthetic oligonucleotide
  Sense strand starting at position 1470 of SEQ ID NO: 318465
guccuagaucuguaaguug

SEQ ID NO: 564902 - RNA, 19 nt, Artificial Sequence
  Description of Artificial Sequence: Synthetic oligonucleotide
  Antisense strand to SEQ ID NO: 564901
caacuuacagaucuaggac

SEQ ID NO: 564903 - RNA, 19 nt, Artificial Sequence
  Description of Artificial Sequence: Synthetic oligonucleotide
  Sense strand starting at position 1508 of SEQ ID NO: 318465
gcgucagagcuuucucacu

SEQ ID NO: 564904 - RNA, 19 nt, Artificial Sequence
  Description of Artificial Sequence: Synthetic oligonucleotide
  Antisense strand to SEQ ID NO: 564903
agugagaaagcucugacgc

SEQ ID NO: 564905 - RNA, 19 nt, Artificial Sequence
  Description of Artificial Sequence: Synthetic oligonucleotide
  Sense strand starting at position 2433 of SEQ ID NO: 318465
ccuuucucuccguaaauga

SEQ ID NO: 564906 - RNA, 19 nt, Artificial Sequence
  Description of Artificial Sequence: Synthetic oligonucleotide
  Antisense strand to SEQ ID NO: 564905
ucauuuacggagagaaagg

SEQ ID NO: 564907 - RNA, 19 nt, Artificial Sequence
  Description of Artificial Sequence: Synthetic oligonucleotide
  Sense strand starting at position 2440 of SEQ ID NO: 318465
cuccguaaaugauccuuaa

SEQ ID NO: 564908 - RNA, 19 nt, Artificial Sequence
  Description of Artificial Sequence: Synthetic oligonucleotide
  Antisense strand to SEQ ID NO: 564907
uuaaggaucauuuacggag

SEQ ID NO: 564909 - RNA, 19 nt, Artificial Sequence
  Description of Artificial Sequence: Synthetic oligonucleotide
  Sense strand starting at position 2453 of SEQ ID NO: 318465
ccuuaagggucuuccaagu

SEQ ID NO: 564910 - RNA, 19 nt, Artificial Sequence
  Description of Artificial Sequence: Synthetic oligonucleotide
  Antisense strand to SEQ ID NO: 564909
acuuggaagacccuuaagg

SEQ ID NO: 564911 - RNA, 19 nt, Artificial Sequence
  Description of Artificial Sequence: Synthetic oligonucleotide
  Sense strand starting at position 2508 of SEQ ID NO: 318465
uggacuuucgccgaaauaa

SEQ ID NO: 564912 - RNA, 19 nt, Artificial Sequence
  Description of Artificial Sequence: Synthetic oligonucleotide
  Antisense strand to SEQ ID NO: 564911
uuauuucggcgaaagucca

SEQ ID NO: 564913 - RNA, 19 nt, Artificial Sequence
  Description of Artificial Sequence: Synthetic oligonucleotide
  Sense strand starting at position 2524 of SEQ ID NO: 318465
uaaggaauccagcgaucuu

SEQ ID NO: 564914 - RNA, 19 nt, Artificial Sequence
  Description of Artificial Sequence: Synthetic oligonucleotide
  Antisense strand to SEQ ID NO: 564913
aagaucgcuggauuccuua

SEQ ID NO: 564915 - RNA, 19 nt, Artificial Sequence
  Description of Artificial Sequence: Synthetic oligonucleotide
  Sense strand starting at position 2568 of SEQ ID NO: 318465
gccuuuacagcuuaagaaa

SEQ ID NO: 564916 - RNA, 19 nt, Artificial Sequence
  Description of Artificial Sequence: Synthetic oligonucleotide
  Antisense strand to SEQ ID NO: 564915
uuucuuaagcuguaaaggc

SEQ ID NO: 564917 - RNA, 19 nt, Artificial Sequence
  Description of Artificial Sequence: Synthetic oligonucleotide
  Sense strand starting at position 2656 of SEQ ID NO: 318465
guguguuacaaagaaugag

SEQ ID NO: 564918 - RNA, 19 nt, Artificial Sequence
  Description of Artificial Sequence: Synthetic oligonucleotide
  Antisense strand to SEQ ID NO: 564917
cucauucuuuguaacacac

SEQ ID NO: 564919 - RNA, 19 nt, Artificial Sequence
  Description of Artificial Sequence: Synthetic oligonucleotide
  Sense strand starting at position 2668 of SEQ ID NO: 318465
gaaugagcccacgaaaugu

SEQ ID NO: 564920 - RNA, 19 nt, Artificial Sequence
  Description of Artificial Sequence: Synthetic oligonucleotide
  Antisense strand to SEQ ID NO: 564919
acauuucgugggcucauuc

SEQ ID NO: 564921 - RNA, 19 nt, Artificial Sequence
  Description of Artificial Sequence: Synthetic oligonucleotide
  Sense strand starting at position 2676 of SEQ ID NO: 318465
ccacgaaauguucgaggga

SEQ ID NO: 564922 - RNA, 19 nt, Artificial Sequence
  Description of Artificial Sequence: Synthetic oligonucleotide
  Antisense strand to SEQ ID NO: 564921
ucccucgaacauuucgugg

SEQ ID NO: 564923 - RNA, 19 nt, Artificial Sequence
  Description of Artificial Sequence: Synthetic oligonucleotide
  Sense strand starting at position 2679 of SEQ ID NO: 318465
cgaaauguucgagggagga

SEQ ID NO: 564924 - RNA, 19 nt, Artificial Sequence
  Description of Artificial Sequence: Synthetic oligonucleotide
  Antisense strand to SEQ ID NO: 564923
uccucccucgaacauuucg

SEQ ID NO: 564925 - RNA, 19 nt, Artificial Sequence
  Description of Artificial Sequence: Synthetic oligonucleotide
  Sense strand starting at position 2742 of SEQ ID NO: 318465
gggauuaacuuucuaccuu

SEQ ID NO: 564926 - RNA, 19 nt, Artificial Sequence
  Description of Artificial Sequence: Synthetic oligonucleotide
  Antisense strand to SEQ ID NO: 564925
aagguagaaaguuaauccc

SEQ ID NO: 564927 - RNA, 19 nt, Artificial Sequence
  Description of Artificial Sequence: Synthetic oligonucleotide
  Sense strand starting at position 2822 of SEQ ID NO: 318465
gcuaauuggcgcguucaac

SEQ ID NO: 564928 - RNA, 19 nt, Artificial Sequence
  Description of Artificial Sequence: Synthetic oligonucleotide
  Antisense strand to SEQ ID NO: 564927
guugaacgcgccaauuagc

SEQ ID NO: 564929 - RNA, 19 nt, Artificial Sequence
  Description of Artificial Sequence: Synthetic oligonucleotide
  Sense strand starting at position 2830 of SEQ ID NO: 318465
gcgcguucaacgccuggaa

SEQ ID NO: 564930 - RNA, 19 nt, Artificial Sequence
  Description of Artificial Sequence: Synthetic oligonucleotide
  Antisense strand to SEQ ID NO: 564929
uuccaggcguugaacgcgc

SEQ ID NO: 564931 - RNA, 19 nt, Artificial Sequence
  Description of Artificial Sequence: Synthetic oligonucleotide
  Sense strand starting at position 2917 of SEQ ID NO: 318465
cuccuuaggcaagaaucua

SEQ ID NO: 564932 - RNA, 19 nt, Artificial Sequence
  Description of Artificial Sequence: Synthetic oligonucleotide
  Antisense strand to SEQ ID NO: 564931
uagauucuugccuaaggag

SEQ ID NO: 564933 - RNA, 19 nt, Artificial Sequence
  Description of Artificial Sequence: Synthetic oligonucleotide
  Sense strand starting at position 3135 of SEQ ID NO: 318465
ggauguguaagaggcauua

SEQ ID NO: 564934 - RNA, 19 nt, Artificial Sequence
  Description of Artificial Sequence: Synthetic oligonucleotide
  Antisense strand to SEQ ID NO: 564933
uaaugccucuuacacaucc

SEQ ID NO: 564935 - RNA, 19 nt, Artificial Sequence
  Description of Artificial Sequence: Synthetic oligonucleotide
  Sense strand starting at position 3137 of SEQ ID NO: 318465
auguguaagaggcauuaau

SEQ ID NO: 564936 - RNA, 19 nt, Artificial Sequence
  Description of Artificial Sequence: Synthetic oligonucleotide
  Antisense strand to SEQ ID NO: 564935
auuaaugccucuuacacau

SEQ ID NO: 564937 - RNA, 19 nt, Artificial Sequence
  Description of Artificial Sequence: Synthetic oligonucleotide
  Sense strand starting at position 3182 of SEQ ID NO: 318465
ucuuaaauucgaugacaau

SEQ ID NO: 564938 - RNA, 19 nt, Artificial Sequence
  Description of Artificial Sequence: Synthetic oligonucleotide
  Antisense strand to SEQ ID NO: 564937
auugucaucgaauuuaaga

SEQ ID NO: 564939 - RNA, 19 nt, Artificial Sequence
  Description of Artificial Sequence: Synthetic oligonucleotide
  Sense strand starting at position 3472 of SEQ ID NO: 318465
agcuuugauuuagaaacua

SEQ ID NO: 564940 - RNA, 19 nt, Artificial Sequence
  Description of Artificial Sequence: Synthetic oligonucleotide
  Antisense strand to SEQ ID NO: 564939
uaguuucuaaaucaaagcu

SEQ ID NO: 564941 - RNA, 19 nt, Artificial Sequence
  Description of Artificial Sequence: Synthetic oligonucleotide
  Sense strand starting at position 3644 of SEQ ID NO: 318465
uaagcugaacgguacauaa

SEQ ID NO: 564942 - RNA, 19 nt, Artificial Sequence
  Description of Artificial Sequence: Synthetic oligonucleotide
  Antisense strand to SEQ ID NO: 564941
uuauguaccguucagcuua

SEQ ID NO: 564943 - RNA, 19 nt, Artificial Sequence
  Description of Artificial Sequence: Synthetic oligonucleotide
  Sense strand starting at position 3646 of SEQ ID NO: 318465
agcugaacgguacauaaau

SEQ ID NO: 564944 - RNA, 19 nt, Artificial Sequence
  Description of Artificial Sequence: Synthetic oligonucleotide
  Antisense strand to SEQ ID NO: 564943
auuuauguaccguucagcu

SEQ ID NO: 564945 - RNA, 19 nt, Artificial Sequence
  Description of Artificial Sequence: Synthetic oligonucleotide
  Sense strand starting at position 3712 of SEQ ID NO: 318465
auaaauauugcucagugga

SEQ ID NO: 564946 - RNA, 19 nt, Artificial Sequence
  Description of Artificial Sequence: Synthetic oligonucleotide
  Antisense strand to SEQ ID NO: 564945
uccacugagcaauauuuau

SEQ ID NO: 564947 - RNA, 19 nt, Artificial Sequence
  Description of Artificial Sequence: Synthetic oligonucleotide
  Sense strand starting at position 3714 of SEQ ID NO: 318465
aaauauugcucaguggaac

SEQ ID NO: 564948 - RNA, 19 nt, Artificial Sequence
  Description of Artificial Sequence: Synthetic oligonucleotide
  Antisense strand to SEQ ID NO: 564947
guuccacugagcaauauuu

SEQ ID NO: 564949 - RNA, 19 nt, Artificial Sequence
  Description of Artificial Sequence: Synthetic oligonucleotide
  Sense strand starting at position 3736 of SEQ ID NO: 318465
gaggcuaacuugucaauca

SEQ ID NO: 564950 - RNA, 19 nt, Artificial Sequence
  Description of Artificial Sequence: Synthetic oligonucleotide
  Antisense strand to SEQ ID NO: 564949
ugauugacaaguuagccuc

SEQ ID NO: 564951 - RNA, 19 nt, Artificial Sequence
  Description of Artificial Sequence: Synthetic oligonucleotide
  Sense strand starting at position 3771 of SEQ ID NO: 318465
aucagaucauacguuuaau

SEQ ID NO: 564952 - RNA, 19 nt, Artificial Sequence
  Description of Artificial Sequence: Synthetic oligonucleotide
  Antisense strand to SEQ ID NO: 564951
auuaaacguaugaucugau

SEQ ID NO: 564953 - RNA, 19 nt, Artificial Sequence
  Description of Artificial Sequence: Synthetic oligonucleotide
  Sense strand starting at position 118 of SEQ ID NO: 318466
aucugugacccucgggauu

SEQ ID NO: 564954 - RNA, 19 nt, Artificial Sequence
  Description of Artificial Sequence: Synthetic oligonucleotide
  Antisense strand to SEQ ID NO: 564953
aaucccgagggucacagau

SEQ ID NO: 564955 - RNA, 19 nt, Artificial Sequence
  Description of Artificial Sequence: Synthetic oligonucleotide
  Sense strand starting at position 195 of SEQ ID NO: 318466
ugugacaguucugagagga

SEQ ID NO: 564956 - RNA, 19 nt, Artificial Sequence
  Description of Artificial Sequence: Synthetic oligonucleotide
  Antisense strand to SEQ ID NO: 564955
uccucucagaacugucaca

SEQ ID NO: 564957 - RNA, 19 nt, Artificial Sequence
  Description of Artificial Sequence: Synthetic oligonucleotide
  Sense strand starting at position 222 of SEQ ID NO: 318466
gucugugggcuugauggaa

SEQ ID NO: 564958 - RNA, 19 nt, Artificial Sequence
  Description of Artificial Sequence: Synthetic oligonucleotide
  Antisense strand to SEQ ID NO: 564957
uuccaucaagcccacagac

SEQ ID NO: 564959 - RNA, 19 nt, Artificial Sequence
  Description of Artificial Sequence: Synthetic oligonucleotide
  Sense strand starting at position 367 of SEQ ID NO: 318466
ggcacugucccagaagcau

SEQ ID NO: 564960 - RNA, 19 nt, Artificial Sequence
  Description of Artificial Sequence: Synthetic oligonucleotide
  Antisense strand to SEQ ID NO: 564959
augcuucugggacagugcc

SEQ ID NO: 564961 - RNA, 19 nt, Artificial Sequence
  Description of Artificial Sequence: Synthetic oligonucleotide
  Sense strand starting at position 466 of SEQ ID NO: 318466
aagugucaugccugugaca

SEQ ID NO: 564962 - RNA, 19 nt, Artificial Sequence
  Description of Artificial Sequence: Synthetic oligonucleotide
  Antisense strand to SEQ ID NO: 564961
ugucacaggcaugacacuu

SEQ ID NO: 564963 - RNA, 19 nt, Artificial Sequence
  Description of Artificial Sequence: Synthetic oligonucleotide
  Sense strand starting at position 468 of SEQ ID NO: 318466
gugucaugccugugacaug

SEQ ID NO: 564964 - RNA, 19 nt, Artificial Sequence
  Description of Artificial Sequence: Synthetic oligonucleotide
  Antisense strand to SEQ ID NO: 564963
caugucacaggcaugacac

SEQ ID NO: 564965 - RNA, 19 nt, Artificial Sequence
  Description of Artificial Sequence: Synthetic oligonucleotide
  Sense strand starting at position 709 of SEQ ID NO: 318466
gcaggagaucuuugaauug

SEQ ID NO: 564966 - RNA, 19 nt, Artificial Sequence
  Description of Artificial Sequence: Synthetic oligonucleotide
  Antisense strand to SEQ ID NO: 564965
caauucaaagaucuccugc

SEQ ID NO: 564967 - RNA, 19 nt, Artificial Sequence
  Description of Artificial Sequence: Synthetic oligonucleotide
  Sense strand starting at position 744 of SEQ ID NO: 318466
gggcacugggcugacaauu

SEQ ID NO: 564968 - RNA, 19 nt, Artificial Sequence
  Description of Artificial Sequence: Synthetic oligonucleotide
  Antisense strand to SEQ ID NO: 564967
aauugucagcccagugccc

SEQ ID NO: 564969 - RNA, 19 nt, Artificial Sequence
  Description of Artificial Sequence: Synthetic oligonucleotide
  Sense strand starting at position 922 of SEQ ID NO: 318466
gaacccaggucucuauaga

SEQ ID NO: 564970 - RNA, 19 nt, Artificial Sequence
  Description of Artificial Sequence: Synthetic oligonucleotide
  Antisense strand to SEQ ID NO: 564969
ucuauagagaccuggguuc

SEQ ID NO: 564971 - RNA, 19 nt, Artificial Sequence
  Description of Artificial Sequence: Synthetic oligonucleotide
  Sense strand starting at position 1017 of SEQ ID NO: 318466
gagggacucuuccaaguga

SEQ ID NO: 564972 - RNA, 19 nt, Artificial Sequence
  Description of Artificial Sequence: Synthetic oligonucleotide
  Antisense strand to SEQ ID NO: 564971
ucacuuggaagagucccuc

SEQ ID NO: 564973 - RNA, 19 nt, Artificial Sequence
  Description of Artificial Sequence: Synthetic oligonucleotide
  Sense strand starting at position 1080 of SEQ ID NO: 318466
ccaucugcugaaugaauga

SEQ ID NO: 564974 - RNA, 19 nt, Artificial Sequence
  Description of Artificial Sequence: Synthetic oligonucleotide
  Antisense strand to SEQ ID NO: 564973
ucauucauucagcagaugg

SEQ ID NO: 564975 - RNA, 19 nt, Artificial Sequence
  Description of Artificial Sequence: Synthetic oligonucleotide
  Sense strand starting at position 1299 of SEQ ID NO: 318466
gcaggaagccucuggagua

SEQ ID NO: 564976 - RNA, 19 nt, Artificial Sequence
  Description of Artificial Sequence: Synthetic oligonucleotide
  Antisense strand to SEQ ID NO: 564975
uacuccagaggcuuccugc

SEQ ID NO: 564977 - RNA, 19 nt, Artificial Sequence
  Description of Artificial Sequence: Synthetic oligonucleotide
  Sense strand starting at position 1987 of SEQ ID NO: 318466
caggaagugucucuauaga

SEQ ID NO: 564978 - RNA, 19 nt, Artificial Sequence
  Description of Artificial Sequence: Synthetic oligonucleotide
  Antisense strand to SEQ ID NO: 564977
ucuauagagacacuuccug

SEQ ID NO: 564979 - RNA, 19 nt, Artificial Sequence
  Description of Artificial Sequence: Synthetic oligonucleotide
  Sense strand starting at position 2225 of SEQ ID NO: 318466
acagcacacgaguaaacau

SEQ ID NO: 564980 - RNA, 19 nt, Artificial Sequence
  Description of Artificial Sequence: Synthetic oligonucleotide
  Antisense strand to SEQ ID NO: 564979
auguuuacucgugugcugu

SEQ ID NO: 564981 - RNA, 19 nt, Artificial Sequence
  Description of Artificial Sequence: Synthetic oligonucleotide
  Sense strand starting at position 2321 of SEQ ID NO: 318466
guguacuuuacucggcaca

SEQ ID NO: 564982 - RNA, 19 nt, Artificial Sequence
  Description of Artificial Sequence: Synthetic oligonucleotide
  Antisense strand to SEQ ID NO: 564981
ugugccgaguaaaguacac

SEQ ID NO: 564983 - RNA, 19 nt, Artificial Sequence
  Description of Artificial Sequence: Synthetic oligonucleotide
  Sense strand starting at position 2323 of SEQ ID NO: 318466
guacuuuacucggcacaca

SEQ ID NO: 564984 - RNA, 19 nt, Artificial Sequence
  Description of Artificial Sequence: Synthetic oligonucleotide
  Antisense strand to SEQ ID NO: 564983
ugugugccgaguaaaguac

SEQ ID NO: 564985 - RNA, 19 nt, Artificial Sequence
  Description of Artificial Sequence: Synthetic oligonucleotide
  Sense strand starting at position 2467 of SEQ ID NO: 318466
ugugcagacagauggauaa

SEQ ID NO: 564986 - RNA, 19 nt, Artificial Sequence
  Description of Artificial Sequence: Synthetic oligonucleotide
  Antisense strand to SEQ ID NO: 564985
uuauccaucugucugcaca

SEQ ID NO: 564987 - RNA, 19 nt, Artificial Sequence
  Description of Artificial Sequence: Synthetic oligonucleotide
  Sense strand starting at position 2598 of SEQ ID NO: 318466
ugaagaggugcaugugaca

SEQ ID NO: 564988 - RNA, 19 nt, Artificial Sequence
  Description of Artificial Sequence: Synthetic oligonucleotide
  Antisense strand to SEQ ID NO: 564987
ugucacaugcaccucuuca

SEQ ID NO: 564989 - RNA, 19 nt, Artificial Sequence
  Description of Artificial Sequence: Synthetic oligonucleotide
  Sense strand starting at position 2633 of SEQ ID NO: 318466
ggacauauguauuccgaca

SEQ ID NO: 564990 - RNA, 19 nt, Artificial Sequence
  Description of Artificial Sequence: Synthetic oligonucleotide
  Antisense strand to SEQ ID NO: 564989
ugucggaauacauaugucc

SEQ ID NO: 564991 - RNA, 19 nt, Artificial Sequence
  Description of Artificial Sequence: Synthetic oligonucleotide
  Sense strand starting at position 2646 of SEQ ID NO: 318466
ccgacacuccagugacaua

SEQ ID NO: 564992 - RNA, 19 nt, Artificial Sequence
  Description of Artificial Sequence: Synthetic oligonucleotide
  Antisense strand to SEQ ID NO: 564991
uaugucacuggagugucgg

SEQ ID NO: 564993 - RNA, 19 nt, Artificial Sequence
  Description of Artificial Sequence: Synthetic oligonucleotide
  Sense strand starting at position 2653 of SEQ ID NO: 318466
uccagugacauauguguaa

SEQ ID NO: 564994 - RNA, 19 nt, Artificial Sequence
  Description of Artificial Sequence: Synthetic oligonucleotide
  Antisense strand to SEQ ID NO: 564993
uuacacauaugucacugga

SEQ ID NO: 564995 - RNA, 19 nt, Artificial Sequence
  Description of Artificial Sequence: Synthetic oligonucleotide
  Sense strand starting at position 2657 of SEQ ID NO: 318466
gugacauauguguaagcag

SEQ ID NO: 564996 - RNA, 19 nt, Artificial Sequence
  Description of Artificial Sequence: Synthetic oligonucleotide
  Antisense strand to SEQ ID NO: 564995
cugcuuacacauaugucac

SEQ ID NO: 564997 - RNA, 19 nt, Artificial Sequence
  Description of Artificial Sequence: Synthetic oligonucleotide
  Sense strand starting at position 2660 of SEQ ID NO: 318466
acauauguguaagcagaua

SEQ ID NO: 564998 - RNA, 19 nt, Artificial Sequence
  Description of Artificial Sequence: Synthetic oligonucleotide
  Antisense strand to SEQ ID NO: 564997
uaucugcuuacacauaugu

SEQ ID NO: 564999 - RNA, 19 nt, Artificial Sequence
  Description of Artificial Sequence: Synthetic oligonucleotide
  Sense strand starting at position 2665 of SEQ ID NO: 318466
uguguaagcagauaugaug

SEQ ID NO: 565000 - RNA, 19 nt, Artificial Sequence
  Description of Artificial Sequence: Synthetic oligonucleotide
  Antisense strand to SEQ ID NO: 564999
caucauaucugcuuacaca

SEQ ID NO: 565001 - RNA, 19 nt, Artificial Sequence
  Description of Artificial Sequence: Synthetic oligonucleotide
  Sense strand starting at position 2720 of SEQ ID NO: 318466
cuauaucuguggccaaaga

SEQ ID NO: 565002 - RNA, 19 nt, Artificial Sequence
  Description of Artificial Sequence: Synthetic oligonucleotide
  Antisense strand to SEQ ID NO: 565001
ucuuuggccacagauauag

SEQ ID NO: 565003 - RNA, 19 nt, Artificial Sequence
  Description of Artificial Sequence: Synthetic oligonucleotide
  Sense strand starting at position 2885 of SEQ ID NO: 318466
cacaucugguaucuagaga

SEQ ID NO: 565004 - RNA, 19 nt, Artificial Sequence
  Description of Artificial Sequence: Synthetic oligonucleotide
  Antisense strand to SEQ ID NO: 565003
ucucuagauaccagaugug

SEQ ID NO: 565005 - RNA, 19 nt, Artificial Sequence
  Description of Artificial Sequence: Synthetic oligonucleotide
  Sense strand starting at position 2938 of SEQ ID NO: 318466
uugccaugcccucacgaua

SEQ ID NO: 565006 - RNA, 19 nt, Artificial Sequence
  Description of Artificial Sequence: Synthetic oligonucleotide
  Antisense strand to SEQ ID NO: 565005
uaucgugagggcauggcaa

SEQ ID NO: 565007 - RNA, 19 nt, Artificial Sequence
  Description of Artificial Sequence: Synthetic oligonucleotide
  Sense strand starting at position 3142 of SEQ ID NO: 318466
gcauguaguguuggcugaa

SEQ ID NO: 565008 - RNA, 19 nt, Artificial Sequence
  Description of Artificial Sequence: Synthetic oligonucleotide
  Antisense strand to SEQ ID NO: 565007
uucagccaacacuacaugc

SEQ ID NO: 565009 - RNA, 19 nt, Artificial Sequence
  Description of Artificial Sequence: Synthetic oligonucleotide
  Sense strand starting at position 3143 of SEQ ID NO: 318466
cauguaguguuggcugaag

SEQ ID NO: 565010 - RNA, 19 nt, Artificial Sequence
  Description of Artificial Sequence: Synthetic oligonucleotide
  Antisense strand to SEQ ID NO: 565009
cuucagccaacacuacaug

SEQ ID NO: 565011 - RNA, 19 nt, Artificial Sequence
  Description of Artificial Sequence: Synthetic oligonucleotide
  Sense strand starting at position 3405 of SEQ ID NO: 318466
agaguccugcucuguuacu

SEQ ID NO: 565012 - RNA, 19 nt, Artificial Sequence
  Description of Artificial Sequence: Synthetic oligonucleotide
  Antisense strand to SEQ ID NO: 565011
aguaacagagcaggacucu

SEQ ID NO: 565013 - RNA, 19 nt, Artificial Sequence
  Description of Artificial Sequence: Synthetic oligonucleotide
  Sense strand starting at position 3436 of SEQ ID NO: 318466
aguguaguggcaggaucua

SEQ ID NO: 565014 - RNA, 19 nt, Artificial Sequence
  Description of Artificial Sequence: Synthetic oligonucleotide
  Antisense strand to SEQ ID NO: 565013
uagauccugccacuacacu

SEQ ID NO: 565015 - RNA, 19 nt, Artificial Sequence
  Description of Artificial Sequence: Synthetic oligonucleotide
  Sense strand starting at position 3528 of SEQ ID NO: 318466
ggugcaugucaacgugacu

SEQ ID NO: 565016 - RNA, 19 nt, Artificial Sequence
  Description of Artificial Sequence: Synthetic oligonucleotide
  Antisense strand to SEQ ID NO: 565015
agucacguugacaugcacc

SEQ ID NO: 565017 - RNA, 19 nt, Artificial Sequence
  Description of Artificial Sequence: Synthetic oligonucleotide
  Sense strand starting at position 3534 of SEQ ID NO: 318466
ugucaacgugacuguguaa

SEQ ID NO: 565018 - RNA, 19 nt, Artificial Sequence
  Description of Artificial Sequence: Synthetic oligonucleotide
  Antisense strand to SEQ ID NO: 565017
uuacacagucacguugaca

SEQ ID NO: 565019 - RNA, 19 nt, Artificial Sequence
  Description of Artificial Sequence: Synthetic oligonucleotide
  Sense strand starting at position 3537 of SEQ ID NO: 318466
caacgugacuguguaauuu

SEQ ID NO: 565020 - RNA, 19 nt, Artificial Sequence
  Description of Artificial Sequence: Synthetic oligonucleotide
  Antisense strand to SEQ ID NO: 565019
aaauuacacagucacguug

SEQ ID NO: 565021 - RNA, 19 nt, Artificial Sequence
  Description of Artificial Sequence: Synthetic oligonucleotide
  Sense strand starting at position 3682 of SEQ ID NO: 318466
gcuagucuuucugcaggga

SEQ ID NO: 565022 - RNA, 19 nt, Artificial Sequence
  Description of Artificial Sequence: Synthetic oligonucleotide
  Antisense strand to SEQ ID NO: 565021
ucccugcagaaagacuagc

SEQ ID NO: 565023 - RNA, 19 nt, Artificial Sequence
  Description of Artificial Sequence: Synthetic oligonucleotide
  Sense strand starting at position 3685 of SEQ ID NO: 318466
agucuuucugcagggacaa

SEQ ID NO: 565024 - RNA, 19 nt, Artificial Sequence
  Description of Artificial Sequence: Synthetic oligonucleotide
  Antisense strand to SEQ ID NO: 565023
uugucccugcagaaagacu

SEQ ID NO: 565025 - RNA, 19 nt, Artificial Sequence
  Description of Artificial Sequence: Synthetic oligonucleotide
  Sense strand starting at position 3861 of SEQ ID NO: 318466
ugcagucagauguggacau

SEQ ID NO: 565026 - RNA, 19 nt, Artificial Sequence
  Description of Artificial Sequence: Synthetic oligonucleotide
  Antisense strand to SEQ ID NO: 565025
auguccacaucugacugca

SEQ ID NO: 565027 - RNA, 19 nt, Artificial Sequence
  Description of Artificial Sequence: Synthetic oligonucleotide
  Sense strand starting at position 3865 of SEQ ID NO: 318466
gucagauguggacauguga

SEQ ID NO: 565028 - RNA, 19 nt, Artificial Sequence
  Description of Artificial Sequence: Synthetic oligonucleotide
  Antisense strand to SEQ ID NO: 565027
ucacauguccacaucugac

SEQ ID NO: 565029 - RNA, 19 nt, Artificial Sequence
  Description of Artificial Sequence: Synthetic oligonucleotide
  Sense strand starting at position 3909 of SEQ ID NO: 318466
ugggaugacaugugucauu

SEQ ID NO: 565030 - RNA, 19 nt, Artificial Sequence
  Description of Artificial Sequence: Synthetic oligonucleotide
  Antisense strand to SEQ ID NO: 565029
aaugacacaugucauccca

SEQ ID NO: 565031 - RNA, 19 nt, Artificial Sequence
  Description of Artificial Sequence: Synthetic oligonucleotide
  Sense strand starting at position 3931 of SEQ ID NO: 318466
gagccaaggcuuugaagaa

SEQ ID NO: 565032 - RNA, 19 nt, Artificial Sequence
  Description of Artificial Sequence: Synthetic oligonucleotide
  Antisense strand to SEQ ID NO: 565031
uucuucaaagccuuggcuc

SEQ ID NO: 565033 - RNA, 19 nt, Artificial Sequence
  Description of Artificial Sequence: Synthetic oligonucleotide
  Sense strand starting at position 27 of SEQ ID NO: 318467
augcaucauguauauggau

SEQ ID NO: 565034 - RNA, 19 nt, Artificial Sequence
  Description of Artificial Sequence: Synthetic oligonucleotide
  Antisense strand to SEQ ID NO: 565033
auccauauacaugaugcau

SEQ ID NO: 565035 - RNA, 19 nt, Artificial Sequence
  Description of Artificial Sequence: Synthetic oligonucleotide
  Sense strand starting at position 59 of SEQ ID NO: 318467
cgagucuccuacccugaga

SEQ ID NO: 565036 - RNA, 19 nt, Artificial Sequence
  Description of Artificial Sequence: Synthetic oligonucleotide
  Antisense strand to SEQ ID NO: 565035
ucucaggguaggagacucg

SEQ ID NO: 565037 - RNA, 19 nt, Artificial Sequence
  Description of Artificial Sequence: Synthetic oligonucleotide
  Sense strand starting at position 281 of SEQ ID NO: 318467
aucagaaaguuuccuguuu

SEQ ID NO: 565038 - RNA, 19 nt, Artificial Sequence
  Description of Artificial Sequence: Synthetic oligonucleotide
  Antisense strand to SEQ ID NO: 565037
aaacaggaaacuuucugau

SEQ ID NO: 565039 - RNA, 19 nt, Artificial Sequence
  Description of Artificial Sequence: Synthetic oligonucleotide
  Sense strand starting at position 293 of SEQ ID NO: 318467
ccuguuucggaguacauaa

SEQ ID NO: 565040 - RNA, 19 nt, Artificial Sequence
  Description of Artificial Sequence: Synthetic oligonucleotide
  Antisense strand to SEQ ID NO: 565039
uuauguacuccgaaacagg

SEQ ID NO: 565041 - RNA, 19 nt, Artificial Sequence
  Description of Artificial Sequence: Synthetic oligonucleotide
  Sense strand starting at position 366 of SEQ ID NO: 318467
cuaggaauuguuuaaagca

SEQ ID NO: 565042 - RNA, 19 nt, Artificial Sequence
  Description of Artificial Sequence: Synthetic oligonucleotide
  Antisense strand to SEQ ID NO: 565041
ugcuuuaaacaauuccuag

SEQ ID NO: 565043 - RNA, 19 nt, Artificial Sequence
  Description of Artificial Sequence: Synthetic oligonucleotide
  Sense strand starting at position 491 of SEQ ID NO: 318467
cagacucaguuucugaaga

SEQ ID NO: 565044 - RNA, 19 nt, Artificial Sequence
  Description of Artificial Sequence: Synthetic oligonucleotide
  Antisense strand to SEQ ID NO: 565043
ucuucagaaacugagucug

SEQ ID NO: 565045 - RNA, 19 nt, Artificial Sequence
  Description of Artificial Sequence: Synthetic oligonucleotide
  Sense strand starting at position 658 of SEQ ID NO: 318467
ggguguaauaggcaaacca

SEQ ID NO: 565046 - RNA, 19 nt, Artificial Sequence
  Description of Artificial Sequence: Synthetic oligonucleotide
  Antisense strand to SEQ ID NO: 565045
ugguuugccuauuacaccc

SEQ ID NO: 565047 - RNA, 19 nt, Artificial Sequence
  Description of Artificial Sequence: Synthetic oligonucleotide
  Sense strand starting at position 1077 of SEQ ID NO: 318467
ucaggcaaaugauuaacau

SEQ ID NO: 565048 - RNA, 19 nt, Artificial Sequence
  Description of Artificial Sequence: Synthetic oligonucleotide
  Antisense strand to SEQ ID NO: 565047
auguuaaucauuugccuga

SEQ ID NO: 565049 - RNA, 19 nt, Artificial Sequence
  Description of Artificial Sequence: Synthetic oligonucleotide
  Sense strand starting at position 1994 of SEQ ID NO: 318467
ggaauacuaaugugaucug

SEQ ID NO: 565050 - RNA, 19 nt, Artificial Sequence
  Description of Artificial Sequence: Synthetic oligonucleotide
  Antisense strand to SEQ ID NO: 565049
cagaucacauuaguauucc

SEQ ID NO: 565051 - RNA, 19 nt, Artificial Sequence
  Description of Artificial Sequence: Synthetic oligonucleotide
  Sense strand starting at position 2003 of SEQ ID NO: 318467
augugaucuguccaugcaa

SEQ ID NO: 565052 - RNA, 19 nt, Artificial Sequence
  Description of Artificial Sequence: Synthetic oligonucleotide
  Antisense strand to SEQ ID NO: 565051
uugcauggacagaucacau

SEQ ID NO: 565053 - RNA, 19 nt, Artificial Sequence
  Description of Artificial Sequence: Synthetic oligonucleotide
  Sense strand starting at position 2357 of SEQ ID NO: 318467
gcagaaugcacagaggcau

SEQ ID NO: 565054 - RNA, 19 nt, Artificial Sequence
  Description of Artificial Sequence: Synthetic oligonucleotide
  Antisense strand to SEQ ID NO: 565053
augccucugugcauucugc

SEQ ID NO: 565055 - RNA, 19 nt, Artificial Sequence
  Description of Artificial Sequence: Synthetic oligonucleotide
  Sense strand starting at position 2498 of SEQ ID NO: 318467
agagaucucccuggacacu

SEQ ID NO: 565056 - RNA, 19 nt, Artificial Sequence
  Description of Artificial Sequence: Synthetic oligonucleotide
  Antisense strand to SEQ ID NO: 565055
aguguccagggagaucucu

SEQ ID NO: 565057 - RNA, 19 nt, Artificial Sequence
  Description of Artificial Sequence: Synthetic oligonucleotide
  Sense strand starting at position 2589 of SEQ ID NO: 318467
gaugauucuugugugaaag

SEQ ID NO: 565058 - RNA, 19 nt, Artificial Sequence
  Description of Artificial Sequence: Synthetic oligonucleotide
  Antisense strand to SEQ ID NO: 565057
cuuucacacaagaaucauc

SEQ ID NO: 565059 - RNA, 19 nt, Artificial Sequence
  Description of Artificial Sequence: Synthetic oligonucleotide
  Sense strand starting at position 2590 of SEQ ID NO: 318467
augauucuugugugaaagg

SEQ ID NO: 565060 - RNA, 19 nt, Artificial Sequence
  Description of Artificial Sequence: Synthetic oligonucleotide
  Antisense strand to SEQ ID NO: 565059
ccuuucacacaagaaucau

SEQ ID NO: 565061 - RNA, 19 nt, Artificial Sequence
  Description of Artificial Sequence: Synthetic oligonucleotide
  Sense strand starting at position 2614 of SEQ ID NO: 318467
gggugaggcccucagccau

SEQ ID NO: 565062 - RNA, 19 nt, Artificial Sequence
  Description of Artificial Sequence: Synthetic oligonucleotide
  Antisense strand to SEQ ID NO: 565061
auggcugagggccucaccc

SEQ ID NO: 565063 - RNA, 19 nt, Artificial Sequence
  Description of Artificial Sequence: Synthetic oligonucleotide
  Sense strand starting at position 2650 of SEQ ID NO: 318467
acugacaucuuccuaaggu

SEQ ID NO: 565064 - RNA, 19 nt, Artificial Sequence
  Description of Artificial Sequence: Synthetic oligonucleotide
  Antisense strand to SEQ ID NO: 565063
accuuaggaagaugucagu

SEQ ID NO: 565065 - RNA, 19 nt, Artificial Sequence
  Description of Artificial Sequence: Synthetic oligonucleotide
  Sense strand starting at position 2664 of SEQ ID NO: 318467
aagguucuucugggaggaa

SEQ ID NO: 565066 - RNA, 19 nt, Artificial Sequence
  Description of Artificial Sequence: Synthetic oligonucleotide
  Antisense strand to SEQ ID NO: 565065
uuccucccagaagaaccuu

SEQ ID NO: 565067 - RNA, 19 nt, Artificial Sequence
  Description of Artificial Sequence: Synthetic oligonucleotide
  Sense strand starting at position 2723 of SEQ ID NO: 318467
gcuuguucuccugaaugau

SEQ ID NO: 565068 - RNA, 19 nt, Artificial Sequence
  Description of Artificial Sequence: Synthetic oligonucleotide
  Antisense strand to SEQ ID NO: 565067
aucauucaggagaacaagc

SEQ ID NO: 565069 - RNA, 19 nt, Artificial Sequence
  Description of Artificial Sequence: Synthetic oligonucleotide
  Sense strand starting at position 2741 of SEQ ID NO: 318467
uuuguuuggagagggagau

SEQ ID NO: 565070 - RNA, 19 nt, Artificial Sequence
  Description of Artificial Sequence: Synthetic oligonucleotide
  Antisense strand to SEQ ID NO: 565069
aucucccucuccaaacaaa

SEQ ID NO: 565071 - RNA, 19 nt, Artificial Sequence
  Description of Artificial Sequence: Synthetic oligonucleotide
  Sense strand starting at position 2874 of SEQ ID NO: 318467
cugaaauagccaggaaggu

SEQ ID NO: 565072 - RNA, 19 nt, Artificial Sequence
  Description of Artificial Sequence: Synthetic oligonucleotide
  Antisense strand to SEQ ID NO: 565071
accuuccuggcuauuucag

SEQ ID NO: 565073 - RNA, 19 nt, Artificial Sequence
  Description of Artificial Sequence: Synthetic oligonucleotide
  Sense strand starting at position 2965 of SEQ ID NO: 318467
agaguuauuuggucuuugu

SEQ ID NO: 565074 - RNA, 19 nt, Artificial Sequence
  Description of Artificial Sequence: Synthetic oligonucleotide
  Antisense strand to SEQ ID NO: 565073
acaaagaccaaauaacucu

SEQ ID NO: 565075 - RNA, 19 nt, Artificial Sequence
  Description of Artificial Sequence: Synthetic oligonucleotide
  Sense strand starting at position 3015 of SEQ ID NO: 318467
cuuagaaauugccugaguu

SEQ ID NO: 565076 - RNA, 19 nt, Artificial Sequence
  Description of Artificial Sequence: Synthetic oligonucleotide
  Antisense strand to SEQ ID NO: 565075
aacucaggcaauuucuaag

SEQ ID NO: 565077 - RNA, 19 nt, Artificial Sequence
  Description of Artificial Sequence: Synthetic oligonucleotide
  Sense strand starting at position 3016 of SEQ ID NO: 318467
uuagaaauugccugaguua

SEQ ID NO: 565078 - RNA, 19 nt, Artificial Sequence
  Description of Artificial Sequence: Synthetic oligonucleotide
  Antisense strand to SEQ ID NO: 565077
uaacucaggcaauuucuaa

SEQ ID NO: 565079 - RNA, 19 nt, Artificial Sequence
  Description of Artificial Sequence: Synthetic oligonucleotide
  Sense strand starting at position 3017 of SEQ ID NO: 318467
uagaaauugccugaguuau

SEQ ID NO: 565080 - RNA, 19 nt, Artificial Sequence
  Description of Artificial Sequence: Synthetic oligonucleotide
  Antisense strand to SEQ ID NO: 565079
auaacucaggcaauuucua

SEQ ID NO: 565081 - RNA, 19 nt, Artificial Sequence
  Description of Artificial Sequence: Synthetic oligonucleotide
  Sense strand starting at position 3019 of SEQ ID NO: 318467
gaaauugccugaguuauua

SEQ ID NO: 565082 - RNA, 19 nt, Artificial Sequence
  Description of Artificial Sequence: Synthetic oligonucleotide
  Antisense strand to SEQ ID NO: 565081
uaauaacucaggcaauuuc

SEQ ID NO: 565083 - RNA, 19 nt, Artificial Sequence
  Description of Artificial Sequence: Synthetic oligonucleotide
  Sense strand starting at position 3044 of SEQ ID NO: 318467
gccaucuugucaccagaaa

SEQ ID NO: 565084 - RNA, 19 nt, Artificial Sequence
  Description of Artificial Sequence: Synthetic oligonucleotide
  Antisense strand to SEQ ID NO: 565083
uuucuggugacaagauggc

SEQ ID NO: 565085 - RNA, 19 nt, Artificial Sequence
  Description of Artificial Sequence: Synthetic oligonucleotide
  Sense strand starting at position 3062 of SEQ ID NO: 318467
agaccaagccuugauuagu

SEQ ID NO: 565086 - RNA, 19 nt, Artificial Sequence
  Description of Artificial Sequence: Synthetic oligonucleotide
  Antisense strand to SEQ ID NO: 565085
acuaaucaaggcuuggucu

SEQ ID NO: 565087 - RNA, 19 nt, Artificial Sequence
  Description of Artificial Sequence: Synthetic oligonucleotide
  Sense strand starting at position 3287 of SEQ ID NO: 318467
auggaaguuccauguccuu

SEQ ID NO: 565088 - RNA, 19 nt, Artificial Sequence
  Description of Artificial Sequence: Synthetic oligonucleotide
  Antisense strand to SEQ ID NO: 565087
aaggacauggaacuuccau

SEQ ID NO: 565089 - RNA, 19 nt, Artificial Sequence
  Description of Artificial Sequence: Synthetic oligonucleotide
  Sense strand starting at position 3349 of SEQ ID NO: 318467
ucaguuguauccuuuagaa

SEQ ID NO: 565090 - RNA, 19 nt, Artificial Sequence
  Description of Artificial Sequence: Synthetic oligonucleotide
  Antisense strand to SEQ ID NO: 565089
uucuaaaggauacaacuga

SEQ ID NO: 565091 - RNA, 19 nt, Artificial Sequence
  Description of Artificial Sequence: Synthetic oligonucleotide
  Sense strand starting at position 3351 of SEQ ID NO: 318467
aguuguauccuuuagaaua

SEQ ID NO: 565092 - RNA, 19 nt, Artificial Sequence
  Description of Artificial Sequence: Synthetic oligonucleotide
  Antisense strand to SEQ ID NO: 565091
uauucuaaaggauacaacu

SEQ ID NO: 565093 - RNA, 19 nt, Artificial Sequence
  Description of Artificial Sequence: Synthetic oligonucleotide
  Sense strand starting at position 3361 of SEQ ID NO: 318467
uuuagaauagacugcuaau

SEQ ID NO: 565094 - RNA, 19 nt, Artificial Sequence
  Description of Artificial Sequence: Synthetic oligonucleotide
  Antisense strand to SEQ ID NO: 565093
auuagcagucuauucuaaa

SEQ ID NO: 565095 - RNA, 19 nt, Artificial Sequence
  Description of Artificial Sequence: Synthetic oligonucleotide
  Sense strand starting at position 3432 of SEQ ID NO: 318467
aucugagaaggugguuaua

SEQ ID NO: 565096 - RNA, 19 nt, Artificial Sequence
  Description of Artificial Sequence: Synthetic oligonucleotide
  Antisense strand to SEQ ID NO: 565095
uauaaccaccuucucagau

SEQ ID NO: 565097 - RNA, 19 nt, Artificial Sequence
  Description of Artificial Sequence: Synthetic oligonucleotide
  Sense strand starting at position 3458 of SEQ ID NO: 318467
cugaauuugucgccaagau

SEQ ID NO: 565098 - RNA, 19 nt, Artificial Sequence
  Description of Artificial Sequence: Synthetic oligonucleotide
  Antisense strand to SEQ ID NO: 565097
aucuuggcgacaaauucag

SEQ ID NO: 565099 - RNA, 19 nt, Artificial Sequence
  Description of Artificial Sequence: Synthetic oligonucleotide
  Sense strand starting at position 3588 of SEQ ID NO: 318467
uaguuagugccagaaauga

SEQ ID NO: 565100 - RNA, 19 nt, Artificial Sequence
  Description of Artificial Sequence: Synthetic oligonucleotide
  Antisense strand to SEQ ID NO: 565099
ucauuucuggcacuaacua

SEQ ID NO: 565101 - RNA, 19 nt, Artificial Sequence
  Description of Artificial Sequence: Synthetic oligonucleotide
  Sense strand starting at position 3604 of SEQ ID NO: 318467
ugaguuguaggccaccuaa

SEQ ID NO: 565102 - RNA, 19 nt, Artificial Sequence
  Description of Artificial Sequence: Synthetic oligonucleotide
  Antisense strand to SEQ ID NO: 565101
uuagguggccuacaacuca

SEQ ID NO: 565103 - RNA, 19 nt, Artificial Sequence
  Description of Artificial Sequence: Synthetic oligonucleotide
  Sense strand starting at position 3626 of SEQ ID NO: 318467
guguuagagaguuggagaa

SEQ ID NO: 565104 - RNA, 19 nt, Artificial Sequence
  Description of Artificial Sequence: Synthetic oligonucleotide
  Antisense strand to SEQ ID NO: 565103
uucuccaacucucuaacac

SEQ ID NO: 565105 - RNA, 19 nt, Artificial Sequence
  Description of Artificial Sequence: Synthetic oligonucleotide
  Sense strand starting at position 3667 of SEQ ID NO: 318467
guauuugggugggaaggaa

SEQ ID NO: 565106 - RNA, 19 nt, Artificial Sequence
  Description of Artificial Sequence: Synthetic oligonucleotide
  Antisense strand to SEQ ID NO: 565105
uuccuucccacccaaauac

SEQ ID NO: 565107 - RNA, 19 nt, Artificial Sequence
  Description of Artificial Sequence: Synthetic oligonucleotide
  Sense strand starting at position 3701 of SEQ ID NO: 318467
uggaucacugaguggauau

SEQ ID NO: 565108 - RNA, 19 nt, Artificial Sequence
  Description of Artificial Sequence: Synthetic oligonucleotide
  Antisense strand to SEQ ID NO: 565107
auauccacucagugaucca

SEQ ID NO: 565109 - RNA, 19 nt, Artificial Sequence
  Description of Artificial Sequence: Synthetic oligonucleotide
  Sense strand starting at position 3702 of SEQ ID NO: 318467
ggaucacugaguggauauu

SEQ ID NO: 565110 - RNA, 19 nt, Artificial Sequence
  Description of Artificial Sequence: Synthetic oligonucleotide
  Antisense strand to SEQ ID NO: 565109
aauauccacucagugaucc

SEQ ID NO: 565111 - RNA, 19 nt, Artificial Sequence
  Description of Artificial Sequence: Synthetic oligonucleotide
  Sense strand starting at position 3773 of SEQ ID NO: 318467
ggaauuuagugacaccaug

SEQ ID NO: 565112 - RNA, 19 nt, Artificial Sequence
  Description of Artificial Sequence: Synthetic oligonucleotide
  Antisense strand to SEQ ID NO: 565111
cauggugucacuaaauucc

SEQ ID NO: 565113 - RNA, 19 nt, Artificial Sequence
  Description of Artificial Sequence: Synthetic oligonucleotide
  Sense strand starting at position 6 of SEQ ID NO: 318468
aggagcuaaucucucuuau

SEQ ID NO: 565114 - RNA, 19 nt, Artificial Sequence
  Description of Artificial Sequence: Synthetic oligonucleotide
  Antisense strand to SEQ ID NO: 565113
auaagagagauuagcuccu

SEQ ID NO: 565115 - RNA, 19 nt, Artificial Sequence
  Description of Artificial Sequence: Synthetic oligonucleotide
  Sense strand starting at position 123 of SEQ ID NO: 318468
cugucucuggagcaaugua

SEQ ID NO: 565116 - RNA, 19 nt, Artificial Sequence
  Description of Artificial Sequence: Synthetic oligonucleotide
  Antisense strand to SEQ ID NO: 565115
uacauugcuccagagacag

SEQ ID NO: 565117 - RNA, 19 nt, Artificial Sequence
  Description of Artificial Sequence: Synthetic oligonucleotide
  Sense strand starting at position 176 of SEQ ID NO: 318468
uguauauguguacacaaga

SEQ ID NO: 565118 - RNA, 19 nt, Artificial Sequence
  Description of Artificial Sequence: Synthetic oligonucleotide
  Antisense strand to SEQ ID NO: 565117
ucuuguguacacauauaca

SEQ ID NO: 565119 - RNA, 19 nt, Artificial Sequence
  Description of Artificial Sequence: Synthetic oligonucleotide
  Sense strand starting at position 545 of SEQ ID NO: 318468
uugcaaugcuuauuugauu

SEQ ID NO: 565120 - RNA, 19 nt, Artificial Sequence
  Description of Artificial Sequence: Synthetic oligonucleotide
  Antisense strand to SEQ ID NO: 565119
aaucaaauaagcauugcaa

SEQ ID NO: 565121 - RNA, 19 nt, Artificial Sequence
  Description of Artificial Sequence: Synthetic oligonucleotide
  Sense strand starting at position 833 of SEQ ID NO: 318468
gagucuucuggugauggau

SEQ ID NO: 565122 - RNA, 19 nt, Artificial Sequence
  Description of Artificial Sequence: Synthetic oligonucleotide
  Antisense strand to SEQ ID NO: 565121
auccaucaccagaagacuc

SEQ ID NO: 565123 - RNA, 19 nt, Artificial Sequence
  Description of Artificial Sequence: Synthetic oligonucleotide
  Sense strand starting at position 968 of SEQ ID NO: 318468
uuaaccagucaauggaauu

SEQ ID NO: 565124 - RNA, 19 nt, Artificial Sequence
  Description of Artificial Sequence: Synthetic oligonucleotide
  Antisense strand to SEQ ID NO: 565123
aauuccauugacugguuaa

SEQ ID NO: 565125 - RNA, 19 nt, Artificial Sequence
  Description of Artificial Sequence: Synthetic oligonucleotide
  Sense strand starting at position 994 of SEQ ID NO: 318468
gcuaucuacagugauuggu

SEQ ID NO: 565126 - RNA, 19 nt, Artificial Sequence
  Description of Artificial Sequence: Synthetic oligonucleotide
  Antisense strand to SEQ ID NO: 565125
accaaucacuguagauagc

SEQ ID NO: 565127 - RNA, 19 nt, Artificial Sequence
  Description of Artificial Sequence: Synthetic oligonucleotide
  Sense strand starting at position 996 of SEQ ID NO: 318468
uaucuacagugauugguuu

SEQ ID NO: 565128 - RNA, 19 nt, Artificial Sequence
  Description of Artificial Sequence: Synthetic oligonucleotide
  Antisense strand to SEQ ID NO: 565127
aaaccaaucacuguagaua

SEQ ID NO: 565129 - RNA, 19 nt, Artificial Sequence
  Description of Artificial Sequence: Synthetic oligonucleotide
  Sense strand starting at position 997 of SEQ ID NO: 318468
aucuacagugauugguuua

SEQ ID NO: 565130 - RNA, 19 nt, Artificial Sequence
  Description of Artificial Sequence: Synthetic oligonucleotide
  Antisense strand to SEQ ID NO: 565129
uaaaccaaucacuguagau

SEQ ID NO: 565131 - RNA, 19 nt, Artificial Sequence
  Description of Artificial Sequence: Synthetic oligonucleotide
  Sense strand starting at position 1028 of SEQ ID NO: 318468
guccaaacagaaugaaguu

SEQ ID NO: 565132 - RNA, 19 nt, Artificial Sequence
  Description of Artificial Sequence: Synthetic oligonucleotide
  Antisense strand to SEQ ID NO: 565131
aacuucauucuguuuggac

SEQ ID NO: 565133 - RNA, 19 nt, Artificial Sequence
  Description of Artificial Sequence: Synthetic oligonucleotide
  Sense strand starting at position 1253 of SEQ ID NO: 318468
gguacaauccuuugagcca

SEQ ID NO: 565134 - RNA, 19 nt, Artificial Sequence
  Description of Artificial Sequence: Synthetic oligonucleotide
  Antisense strand to SEQ ID NO: 565133
uggcucaaaggauuguacc

SEQ ID NO: 565135 - RNA, 19 nt, Artificial Sequence
  Description of Artificial Sequence: Synthetic oligonucleotide
  Sense strand starting at position 1279 of SEQ ID NO: 318468
uccuuuaugguuuaagcca

SEQ ID NO: 565136 - RNA, 19 nt, Artificial Sequence
  Description of Artificial Sequence: Synthetic oligonucleotide
  Antisense strand to SEQ ID NO: 565135
uggcuuaaaccauaaagga

SEQ ID NO: 565137 - RNA, 19 nt, Artificial Sequence
  Description of Artificial Sequence: Synthetic oligonucleotide
  Sense strand starting at position 1300 of SEQ ID NO: 318468
gaaugagguuaucuauuac

SEQ ID NO: 565138 - RNA, 19 nt, Artificial Sequence
  Description of Artificial Sequence: Synthetic oligonucleotide
  Antisense strand to SEQ ID NO: 565137
guaauagauaaccucauuc

SEQ ID NO: 565139 - RNA, 19 nt, Artificial Sequence
  Description of Artificial Sequence: Synthetic oligonucleotide
  Sense strand starting at position 1373 of SEQ ID NO: 318468
uguaauuuguuucuugcaa

SEQ ID NO: 565140 - RNA, 19 nt, Artificial Sequence
  Description of Artificial Sequence: Synthetic oligonucleotide
  Antisense strand to SEQ ID NO: 565139
uugcaagaaacaaauuaca

SEQ ID NO: 565141 - RNA, 19 nt, Artificial Sequence
  Description of Artificial Sequence: Synthetic oligonucleotide
  Sense strand starting at position 1374 of SEQ ID NO: 318468
guaauuuguuucuugcaac

SEQ ID NO: 565142 - RNA, 19 nt, Artificial Sequence
  Description of Artificial Sequence: Synthetic oligonucleotide
  Antisense strand to SEQ ID NO: 565141
guugcaagaaacaaauuac

SEQ ID NO: 565143 - RNA, 19 nt, Artificial Sequence
  Description of Artificial Sequence: Synthetic oligonucleotide
  Sense strand starting at position 1412 of SEQ ID NO: 318468
agcacucuuggauagcauu

SEQ ID NO: 565144 - RNA, 19 nt, Artificial Sequence
  Description of Artificial Sequence: Synthetic oligonucleotide
  Antisense strand to SEQ ID NO: 565143
aaugcuauccaagagugcu

SEQ ID NO: 565145 - RNA, 19 nt, Artificial Sequence
  Description of Artificial Sequence: Synthetic oligonucleotide
  Sense strand starting at position 1636 of SEQ ID NO: 318468
aucguaauugcauauagau

SEQ ID NO: 565146 - RNA, 19 nt, Artificial Sequence
  Description of Artificial Sequence: Synthetic oligonucleotide
  Antisense strand to SEQ ID NO: 565145
aucuauaugcaauuacgau

SEQ ID NO: 565147 - RNA, 19 nt, Artificial Sequence
  Description of Artificial Sequence: Synthetic oligonucleotide
  Sense strand starting at position 1638 of SEQ ID NO: 318468
cguaauugcauauagauag

SEQ ID NO: 565148 - RNA, 19 nt, Artificial Sequence
  Description of Artificial Sequence: Synthetic oligonucleotide
  Antisense strand to SEQ ID NO: 565147
cuaucuauaugcaauuacg

SEQ ID NO: 565149 - RNA, 19 nt, Artificial Sequence
  Description of Artificial Sequence: Synthetic oligonucleotide
  Sense strand starting at position 1655 of SEQ ID NO: 318468
aggcauaugauaugguaua

SEQ ID NO: 565150 - RNA, 19 nt, Artificial Sequence
  Description of Artificial Sequence: Synthetic oligonucleotide
  Antisense strand to SEQ ID NO: 565149
uauaccauaucauaugccu

SEQ ID NO: 565151 - RNA, 19 nt, Artificial Sequence
  Description of Artificial Sequence: Synthetic oligonucleotide
  Sense strand starting at position 1719 of SEQ ID NO: 318468
uguuuccggcaauauuaaa

SEQ ID NO: 565152 - RNA, 19 nt, Artificial Sequence
  Description of Artificial Sequence: Synthetic oligonucleotide
  Antisense strand to SEQ ID NO: 565151
uuuaauauugccggaaaca

SEQ ID NO: 565153 - RNA, 19 nt, Artificial Sequence
  Description of Artificial Sequence: Synthetic oligonucleotide
  Sense strand starting at position 2051 of SEQ ID NO: 318468
gucucuuucugacuaacag

SEQ ID NO: 565154 - RNA, 19 nt, Artificial Sequence
  Description of Artificial Sequence: Synthetic oligonucleotide
  Antisense strand to SEQ ID NO: 565153
cuguuagucagaaagagac

SEQ ID NO: 565155 - RNA, 19 nt, Artificial Sequence
  Description of Artificial Sequence: Synthetic oligonucleotide
  Sense strand starting at position 2160 of SEQ ID NO: 318468
aauugagcuguuggaacaa

SEQ ID NO: 565156 - RNA, 19 nt, Artificial Sequence
  Description of Artificial Sequence: Synthetic oligonucleotide
  Antisense strand to SEQ ID NO: 565155
uuguuccaacagcucaauu

SEQ ID NO: 565157 - RNA, 19 nt, Artificial Sequence
  Description of Artificial Sequence: Synthetic oligonucleotide
  Sense strand starting at position 2289 of SEQ ID NO: 318468
auauuagggcccuaguaua

SEQ ID NO: 565158 - RNA, 19 nt, Artificial Sequence
  Description of Artificial Sequence: Synthetic oligonucleotide
  Antisense strand to SEQ ID NO: 565157
uauacuagggcccuaauau

SEQ ID NO: 565159 - RNA, 19 nt, Artificial Sequence
  Description of Artificial Sequence: Synthetic oligonucleotide
  Sense strand starting at position 2302 of SEQ ID NO: 318468
aguauaaugugauuagaga

SEQ ID NO: 565160 - RNA, 19 nt, Artificial Sequence
  Description of Artificial Sequence: Synthetic oligonucleotide
  Antisense strand to SEQ ID NO: 565159
ucucuaaucacauuauacu

SEQ ID NO: 565161 - RNA, 19 nt, Artificial Sequence
  Description of Artificial Sequence: Synthetic oligonucleotide
  Sense strand starting at position 2351 of SEQ ID NO: 318468
uuugucucagucuaaagau

SEQ ID NO: 565162 - RNA, 19 nt, Artificial Sequence
  Description of Artificial Sequence: Synthetic oligonucleotide
  Antisense strand to SEQ ID NO: 565161
aucuuuagacugagacaaa

SEQ ID NO: 565163 - RNA, 19 nt, Artificial Sequence
  Description of Artificial Sequence: Synthetic oligonucleotide
  Sense strand starting at position 2366 of SEQ ID NO: 318468
agauucuuccuuuauuguu

SEQ ID NO: 565164 - RNA, 19 nt, Artificial Sequence
  Description of Artificial Sequence: Synthetic oligonucleotide
  Antisense strand to SEQ ID NO: 565163
aacaauaaaggaagaaucu

SEQ ID NO: 565165 - RNA, 19 nt, Artificial Sequence
  Description of Artificial Sequence: Synthetic oligonucleotide
  Sense strand starting at position 2380 of SEQ ID NO: 318468
uuguuugcuguggcuaauu

SEQ ID NO: 565166 - RNA, 19 nt, Artificial Sequence
  Description of Artificial Sequence: Synthetic oligonucleotide
  Antisense strand to SEQ ID NO: 565165
aauuagccacagcaaacaa

SEQ ID NO: 565167 - RNA, 19 nt, Artificial Sequence
  Description of Artificial Sequence: Synthetic oligonucleotide
  Sense strand starting at position 2382 of SEQ ID NO: 318468
guuugcuguggcuaauuua

SEQ ID NO: 565168 - RNA, 19 nt, Artificial Sequence
  Description of Artificial Sequence: Synthetic oligonucleotide
  Antisense strand to SEQ ID NO: 565167
uaaauuagccacagcaaac

SEQ ID NO: 565169 - RNA, 19 nt, Artificial Sequence
  Description of Artificial Sequence: Synthetic oligonucleotide
  Sense strand starting at position 2385 of SEQ ID NO: 318468
ugcuguggcuaauuuauga

SEQ ID NO: 565170 - RNA, 19 nt, Artificial Sequence
  Description of Artificial Sequence: Synthetic oligonucleotide
  Antisense strand to SEQ ID NO: 565169
ucauaaauuagccacagca

SEQ ID NO: 565171 - RNA, 19 nt, Artificial Sequence
  Description of Artificial Sequence: Synthetic oligonucleotide
  Sense strand starting at position 2390 of SEQ ID NO: 318468
uggcuaauuuaugaaagac

SEQ ID NO: 565172 - RNA, 19 nt, Artificial Sequence
  Description of Artificial Sequence: Synthetic oligonucleotide
  Antisense strand to SEQ ID NO: 565171
gucuuucauaaauuagcca

SEQ ID NO: 565173 - RNA, 19 nt, Artificial Sequence
  Description of Artificial Sequence: Synthetic oligonucleotide
  Sense strand starting at position 2523 of SEQ ID NO: 318468
ucuaaaguccuguguauuu

SEQ ID NO: 565174 - RNA, 19 nt, Artificial Sequence
  Description of Artificial Sequence: Synthetic oligonucleotide
  Antisense strand to SEQ ID NO: 565173
aaauacacaggacuuuaga

SEQ ID NO: 565175 - RNA, 19 nt, Artificial Sequence
  Description of Artificial Sequence: Synthetic oligonucleotide
  Sense strand starting at position 2528 of SEQ ID NO: 318468
aguccuguguauuucucua

SEQ ID NO: 565176 - RNA, 19 nt, Artificial Sequence
  Description of Artificial Sequence: Synthetic oligonucleotide
  Antisense strand to SEQ ID NO: 565175
uagagaaauacacaggacu

SEQ ID NO: 565177 - RNA, 19 nt, Artificial Sequence
  Description of Artificial Sequence: Synthetic oligonucleotide
  Sense strand starting at position 2530 of SEQ ID NO: 318468
uccuguguauuucucuauu

SEQ ID NO: 565178 - RNA, 19 nt, Artificial Sequence
  Description of Artificial Sequence: Synthetic oligonucleotide
  Antisense strand to SEQ ID NO: 565177
aauagagaaauacacagga

SEQ ID NO: 565179 - RNA, 19 nt, Artificial Sequence
  Description of Artificial Sequence: Synthetic oligonucleotide
  Sense strand starting at position 2754 of SEQ ID NO: 318468
augucuuaaugaguuaacu

SEQ ID NO: 565180 - RNA, 19 nt, Artificial Sequence
  Description of Artificial Sequence: Synthetic oligonucleotide
  Antisense strand to SEQ ID NO: 565179
aguuaacucauuaagacau

SEQ ID NO: 565181 - RNA, 19 nt, Artificial Sequence
  Description of Artificial Sequence: Synthetic oligonucleotide
  Sense strand starting at position 2990 of SEQ ID NO: 318468
gucgaugagcaagaguuga

SEQ ID NO: 565182 - RNA, 19 nt, Artificial Sequence
  Description of Artificial Sequence: Synthetic oligonucleotide
  Antisense strand to SEQ ID NO: 565181
ucaacucuugcucaucgac

SEQ ID NO: 565183 - RNA, 19 nt, Artificial Sequence
  Description of Artificial Sequence: Synthetic oligonucleotide
  Sense strand starting at position 2994 of SEQ ID NO: 318468
augagcaagaguugaucua

SEQ ID NO: 565184 - RNA, 19 nt, Artificial Sequence
  Description of Artificial Sequence: Synthetic oligonucleotide
  Antisense strand to SEQ ID NO: 565183
uagaucaacucuugcucau

SEQ ID NO: 565185 - RNA, 19 nt, Artificial Sequence
  Description of Artificial Sequence: Synthetic oligonucleotide
  Sense strand starting at position 3548 of SEQ ID NO: 318468
ugaagauaaugucuuaauc

SEQ ID NO: 565186 - RNA, 19 nt, Artificial Sequence
  Description of Artificial Sequence: Synthetic oligonucleotide
  Antisense strand to SEQ ID NO: 565185
gauuaagacauuaucuuca

SEQ ID NO: 565187 - RNA, 19 nt, Artificial Sequence
  Description of Artificial Sequence: Synthetic oligonucleotide
  Sense strand starting at position 3676 of SEQ ID NO: 318468
guggcucauaggcagauau

SEQ ID NO: 565188 - RNA, 19 nt, Artificial Sequence
  Description of Artificial Sequence: Synthetic oligonucleotide
  Antisense strand to SEQ ID NO: 565187
auaucugccuaugagccac

SEQ ID NO: 565189 - RNA, 19 nt, Artificial Sequence
  Description of Artificial Sequence: Synthetic oligonucleotide
  Sense strand starting at position 3858 of SEQ ID NO: 318468
ucagaauacucuguucuag

SEQ ID NO: 565190 - RNA, 19 nt, Artificial Sequence
  Description of Artificial Sequence: Synthetic oligonucleotide
  Antisense strand to SEQ ID NO: 565189
cuagaacagaguauucuga

SEQ ID NO: 565191 - RNA, 19 nt, Artificial Sequence
  Description of Artificial Sequence: Synthetic oligonucleotide
  Sense strand starting at position 3920 of SEQ ID NO: 318468
cuacuuacugugcaauaga

SEQ ID NO: 565192 - RNA, 19 nt, Artificial Sequence
  Description of Artificial Sequence: Synthetic oligonucleotide
  Antisense strand to SEQ ID NO: 565191
ucuauugcacaguaaguag

SEQ ID NO: 565193 - RNA, 19 nt, Artificial Sequence
  Description of Artificial Sequence: Synthetic oligonucleotide
  Sense strand starting at position 21 of SEQ ID NO: 318469
uucuguuauguggaacuuu

SEQ ID NO: 565194 - RNA, 19 nt, Artificial Sequence
  Description of Artificial Sequence: Synthetic oligonucleotide
  Antisense strand to SEQ ID NO: 565193
aaaguuccacauaacagaa

SEQ ID NO: 565195 - RNA, 19 nt, Artificial Sequence
  Description of Artificial Sequence: Synthetic oligonucleotide
  Sense strand starting at position 77 of SEQ ID NO: 318469
uuagaauggcgugauacuu

SEQ ID NO: 565196 - RNA, 19 nt, Artificial Sequence
  Description of Artificial Sequence: Synthetic oligonucleotide
  Antisense strand to SEQ ID NO: 565195
aaguaucacgccauucuaa

SEQ ID NO: 565197 - RNA, 19 nt, Artificial Sequence
  Description of Artificial Sequence: Synthetic oligonucleotide
  Sense strand starting at position 223 of SEQ ID NO: 318469
acguaacuccaauaucagu

SEQ ID NO: 565198 - RNA, 19 nt, Artificial Sequence
  Description of Artificial Sequence: Synthetic oligonucleotide
  Antisense strand to SEQ ID NO: 565197
acugauauuggaguuacgu

SEQ ID NO: 565199 - RNA, 19 nt, Artificial Sequence
  Description of Artificial Sequence: Synthetic oligonucleotide
  Sense strand starting at position 312 of SEQ ID NO: 318469
auuuauaugugucagaaag

SEQ ID NO: 565200 - RNA, 19 nt, Artificial Sequence
  Description of Artificial Sequence: Synthetic oligonucleotide
  Antisense strand to SEQ ID NO: 565199
cuuucugacacauauaaau

SEQ ID NO: 565201 - RNA, 19 nt, Artificial Sequence
  Description of Artificial Sequence: Synthetic oligonucleotide
  Sense strand starting at position 458 of SEQ ID NO: 318469
auuucugauuuaugaguca

SEQ ID NO: 565202 - RNA, 19 nt, Artificial Sequence
  Description of Artificial Sequence: Synthetic oligonucleotide
  Antisense strand to SEQ ID NO: 565201
ugacucauaaaucagaaau

SEQ ID NO: 565203 - RNA, 19 nt, Artificial Sequence
  Description of Artificial Sequence: Synthetic oligonucleotide
  Sense strand starting at position 598 of SEQ ID NO: 318469
cgcuuuccagaggaacuau

SEQ ID NO: 565204 - RNA, 19 nt, Artificial Sequence
  Description of Artificial Sequence: Synthetic oligonucleotide
  Antisense strand to SEQ ID NO: 565203
auaguuccucuggaaagcg

SEQ ID NO: 565205 - RNA, 19 nt, Artificial Sequence
  Description of Artificial Sequence: Synthetic oligonucleotide
  Sense strand starting at position 609 of SEQ ID NO: 318469
ggaacuauuucugaacugu

SEQ ID NO: 565206 - RNA, 19 nt, Artificial Sequence
  Description of Artificial Sequence: Synthetic oligonucleotide
  Antisense strand to SEQ ID NO: 565205
acaguucagaaauaguucc

SEQ ID NO: 565207 - RNA, 19 nt, Artificial Sequence
  Description of Artificial Sequence: Synthetic oligonucleotide
  Sense strand starting at position 656 of SEQ ID NO: 318469
gagcuuugagagggaugua

SEQ ID NO: 565208 - RNA, 19 nt, Artificial Sequence
  Description of Artificial Sequence: Synthetic oligonucleotide
  Antisense strand to SEQ ID NO: 565207
uacaucccucucaaagcuc

SEQ ID NO: 565209 - RNA, 19 nt, Artificial Sequence
  Description of Artificial Sequence: Synthetic oligonucleotide
  Sense strand starting at position 657 of SEQ ID NO: 318469
agcuuugagagggauguau

SEQ ID NO: 565210 - RNA, 19 nt, Artificial Sequence
  Description of Artificial Sequence: Synthetic oligonucleotide
  Antisense strand to SEQ ID NO: 565209
auacaucccucucaaagcu

SEQ ID NO: 565211 - RNA, 19 nt, Artificial Sequence
  Description of Artificial Sequence: Synthetic oligonucleotide
  Sense strand starting at position 868 of SEQ ID NO: 318469
cuaagaguguucucugaca

SEQ ID NO: 565212 - RNA, 19 nt, Artificial Sequence
  Description of Artificial Sequence: Synthetic oligonucleotide
  Antisense strand to SEQ ID NO: 565211
ugucagagaacacucuuag

SEQ ID NO: 565213 - RNA, 19 nt, Artificial Sequence
  Description of Artificial Sequence: Synthetic oligonucleotide
  Sense strand starting at position 870 of SEQ ID NO: 318469
aagaguguucucugacagg

SEQ ID NO: 565214 - RNA, 19 nt, Artificial Sequence
  Description of Artificial Sequence: Synthetic oligonucleotide
  Antisense strand to SEQ ID NO: 565213
ccugucagagaacacucuu

SEQ ID NO: 565215 - RNA, 19 nt, Artificial Sequence
  Description of Artificial Sequence: Synthetic oligonucleotide
  Sense strand starting at position 2345 of SEQ ID NO: 318469
cagaaagaguucuuuguuc

SEQ ID NO: 565216 - RNA, 19 nt, Artificial Sequence
  Description of Artificial Sequence: Synthetic oligonucleotide
  Antisense strand to SEQ ID NO: 565215
gaacaaagaacucuuucug

SEQ ID NO: 565217 - RNA, 19 nt, Artificial Sequence
  Description of Artificial Sequence: Synthetic oligonucleotide
  Sense strand starting at position 2415 of SEQ ID NO: 318469
aagcuauauuuagcguauu

SEQ ID NO: 565218 - RNA, 19 nt, Artificial Sequence
  Description of Artificial Sequence: Synthetic oligonucleotide
  Antisense strand to SEQ ID NO: 565217
aauacgcuaaauauagcuu

SEQ ID NO: 565219 - RNA, 19 nt, Artificial Sequence
  Description of Artificial Sequence: Synthetic oligonucleotide
  Sense strand starting at position 2529 of SEQ ID NO: 318469
augccaguuuacuuggaga

SEQ ID NO: 565220 - RNA, 19 nt, Artificial Sequence
  Description of Artificial Sequence: Synthetic oligonucleotide
  Antisense strand to SEQ ID NO: 565219
ucuccaaguaaacuggcau

SEQ ID NO: 565221 - RNA, 19 nt, Artificial Sequence
  Description of Artificial Sequence: Synthetic oligonucleotide
  Sense strand starting at position 2557 of SEQ ID NO: 318469
acacguuauggccacauau

SEQ ID NO: 565222 - RNA, 19 nt, Artificial Sequence
  Description of Artificial Sequence: Synthetic oligonucleotide
  Antisense strand to SEQ ID NO: 565221
auauguggccauaacgugu

SEQ ID NO: 565223 - RNA, 19 nt, Artificial Sequence
  Description of Artificial Sequence: Synthetic oligonucleotide
  Sense strand starting at position 2619 of SEQ ID NO: 318469
augcaaagauacuuuagau

SEQ ID NO: 565224 - RNA, 19 nt, Artificial Sequence
  Description of Artificial Sequence: Synthetic oligonucleotide
  Antisense strand to SEQ ID NO: 565223
aucuaaaguaucuuugcau

SEQ ID NO: 565225 - RNA, 19 nt, Artificial Sequence
  Description of Artificial Sequence: Synthetic oligonucleotide
  Sense strand starting at position 2644 of SEQ ID NO: 318469
auaauaaugcacugaagua

SEQ ID NO: 565226 - RNA, 19 nt, Artificial Sequence
  Description of Artificial Sequence: Synthetic oligonucleotide
  Antisense strand to SEQ ID NO: 565225
uacuucagugcauuauuau

SEQ ID NO: 565227 - RNA, 19 nt, Artificial Sequence
  Description of Artificial Sequence: Synthetic oligonucleotide
  Sense strand starting at position 2667 of SEQ ID NO: 318469
cuaugaauaucccuaacgu

SEQ ID NO: 565228 - RNA, 19 nt, Artificial Sequence
  Description of Artificial Sequence: Synthetic oligonucleotide
  Antisense strand to SEQ ID NO: 565227
acguuagggauauucauag

SEQ ID NO: 565229 - RNA, 19 nt, Artificial Sequence
  Description of Artificial Sequence: Synthetic oligonucleotide
  Sense strand starting at position 2668 of SEQ ID NO: 318469
uaugaauaucccuaacgug

SEQ ID NO: 565230 - RNA, 19 nt, Artificial Sequence
  Description of Artificial Sequence: Synthetic oligonucleotide
  Antisense strand to SEQ ID NO: 565229
cacguuagggauauucaua

SEQ ID NO: 565231 - RNA, 19 nt, Artificial Sequence
  Description of Artificial Sequence: Synthetic oligonucleotide
  Sense strand starting at position 2760 of SEQ ID NO: 318469
ggguuagacuccuccauac

SEQ ID NO: 565232 - RNA, 19 nt, Artificial Sequence
  Description of Artificial Sequence: Synthetic oligonucleotide
  Antisense strand to SEQ ID NO: 565231
guauggaggagucuaaccc

SEQ ID NO: 565233 - RNA, 19 nt, Artificial Sequence
  Description of Artificial Sequence: Synthetic oligonucleotide
  Sense strand starting at position 2762 of SEQ ID NO: 318469
guuagacuccuccauacag

SEQ ID NO: 565234 - RNA, 19 nt, Artificial Sequence
  Description of Artificial Sequence: Synthetic oligonucleotide
  Antisense strand to SEQ ID NO: 565233
cuguauggaggagucuaac

SEQ ID NO: 565235 - RNA, 19 nt, Artificial Sequence
  Description of Artificial Sequence: Synthetic oligonucleotide
  Sense strand starting at position 2919 of SEQ ID NO: 318469
uauugaguagggcaguaaa

SEQ ID NO: 565236 - RNA, 19 nt, Artificial Sequence
  Description of Artificial Sequence: Synthetic oligonucleotide
  Antisense strand to SEQ ID NO: 565235
uuuacugcccuacucaaua

SEQ ID NO: 565237 - RNA, 19 nt, Artificial Sequence
  Description of Artificial Sequence: Synthetic oligonucleotide
  Sense strand starting at position 2980 of SEQ ID NO: 318469
gguugaaaguaguuuaaua

SEQ ID NO: 565238 - RNA, 19 nt, Artificial Sequence
  Description of Artificial Sequence: Synthetic oligonucleotide
  Antisense strand to SEQ ID NO: 565237
uauuaaacuacuuucaacc

SEQ ID NO: 565239 - RNA, 19 nt, Artificial Sequence
  Description of Artificial Sequence: Synthetic oligonucleotide
  Sense strand starting at position 3026 of SEQ ID NO: 318469
gggagauauucuuuaugug

SEQ ID NO: 565240 - RNA, 19 nt, Artificial Sequence
  Description of Artificial Sequence: Synthetic oligonucleotide
  Antisense strand to SEQ ID NO: 565239
cacauaaagaauaucuccc

SEQ ID NO: 565241 - RNA, 19 nt, Artificial Sequence
  Description of Artificial Sequence: Synthetic oligonucleotide
  Sense strand starting at position 3087 of SEQ ID NO: 318469
uacgauuucucuuugaguc

SEQ ID NO: 565242 - RNA, 19 nt, Artificial Sequence
  Description of Artificial Sequence: Synthetic oligonucleotide
  Antisense strand to SEQ ID NO: 565241
gacucaaagagaaaucgua

SEQ ID NO: 565243 - RNA, 19 nt, Artificial Sequence
  Description of Artificial Sequence: Synthetic oligonucleotide
  Sense strand starting at position 3088 of SEQ ID NO: 318469
acgauuucucuuugagucu

SEQ ID NO: 565244 - RNA, 19 nt, Artificial Sequence
  Description of Artificial Sequence: Synthetic oligonucleotide
  Antisense strand to SEQ ID NO: 565243
agacucaaagagaaaucgu

SEQ ID NO: 565245 - RNA, 19 nt, Artificial Sequence
  Description of Artificial Sequence: Synthetic oligonucleotide
  Sense strand starting at position 3095 of SEQ ID NO: 318469
cucuuugagucucuagaac

SEQ ID NO: 565246 - RNA, 19 nt, Artificial Sequence
  Description of Artificial Sequence: Synthetic oligonucleotide
  Antisense strand to SEQ ID NO: 565245
guucuagagacucaaagag

SEQ ID NO: 565247 - RNA, 19 nt, Artificial Sequence
  Description of Artificial Sequence: Synthetic oligonucleotide
  Sense strand starting at position 3196 of SEQ ID NO: 318469
uccggaaacccauaaguca

SEQ ID NO: 565248 - RNA, 19 nt, Artificial Sequence
  Description of Artificial Sequence: Synthetic oligonucleotide
  Antisense strand to SEQ ID NO: 565247
ugacuuauggguuuccgga

SEQ ID NO: 565249 - RNA, 19 nt, Artificial Sequence
  Description of Artificial Sequence: Synthetic oligonucleotide
  Sense strand starting at position 3255 of SEQ ID NO: 318469
gugguauacacauguaaug

SEQ ID NO: 565250 - RNA, 19 nt, Artificial Sequence
  Description of Artificial Sequence: Synthetic oligonucleotide
  Antisense strand to SEQ ID NO: 565249
cauuacauguguauaccac

SEQ ID NO: 565251 - RNA, 19 nt, Artificial Sequence
  Description of Artificial Sequence: Synthetic oligonucleotide
  Sense strand starting at position 3535 of SEQ ID NO: 318469
uugcaugaggugcauauau

SEQ ID NO: 565252 - RNA, 19 nt, Artificial Sequence
  Description of Artificial Sequence: Synthetic oligonucleotide
  Antisense strand to SEQ ID NO: 565251
auauaugcaccucaugcaa

SEQ ID NO: 565253 - RNA, 19 nt, Artificial Sequence
  Description of Artificial Sequence: Synthetic oligonucleotide
  Sense strand starting at position 3537 of SEQ ID NO: 318469
gcaugaggugcauauauag

SEQ ID NO: 565254 - RNA, 19 nt, Artificial Sequence
  Description of Artificial Sequence: Synthetic oligonucleotide
  Antisense strand to SEQ ID NO: 565253
cuauauaugcaccucaugc

SEQ ID NO: 565255 - RNA, 19 nt, Artificial Sequence
  Description of Artificial Sequence: Synthetic oligonucleotide
  Sense strand starting at position 3586 of SEQ ID NO: 318469
gcuagaacauuguuaacua

SEQ ID NO: 565256 - RNA, 19 nt, Artificial Sequence
  Description of Artificial Sequence: Synthetic oligonucleotide
  Antisense strand to SEQ ID NO: 565255
uaguuaacaauguucuagc

SEQ ID NO: 565257 - RNA, 19 nt, Artificial Sequence
  Description of Artificial Sequence: Synthetic oligonucleotide
  Sense strand starting at position 3724 of SEQ ID NO: 318469
acaacuuggaagugucaga

SEQ ID NO: 565258 - RNA, 19 nt, Artificial Sequence
  Description of Artificial Sequence: Synthetic oligonucleotide
  Antisense strand to SEQ ID NO: 565257
ucugacacuuccaaguugu

SEQ ID NO: 565259 - RNA, 19 nt, Artificial Sequence
  Description of Artificial Sequence: Synthetic oligonucleotide
  Sense strand starting at position 3768 of SEQ ID NO: 318469
uuaguuacucaauagguga

SEQ ID NO: 565260 - RNA, 19 nt, Artificial Sequence
  Description of Artificial Sequence: Synthetic oligonucleotide
  Antisense strand to SEQ ID NO: 565259
ucaccuauugaguaacuaa

SEQ ID NO: 565261 - RNA, 19 nt, Artificial Sequence
  Description of Artificial Sequence: Synthetic oligonucleotide
  Sense strand starting at position 3826 of SEQ ID NO: 318469
acauaagacuuggucauug

SEQ ID NO: 565262 - RNA, 19 nt, Artificial Sequence
  Description of Artificial Sequence: Synthetic oligonucleotide
  Antisense strand to SEQ ID NO: 565261
caaugaccaagucuuaugu

SEQ ID NO: 565263 - RNA, 19 nt, Artificial Sequence
  Description of Artificial Sequence: Synthetic oligonucleotide
  Sense strand starting at position 3830 of SEQ ID NO: 318469
aagacuuggucauugaccu

SEQ ID NO: 565264 - RNA, 19 nt, Artificial Sequence
  Description of Artificial Sequence: Synthetic oligonucleotide
  Antisense strand to SEQ ID NO: 565263
aggucaaugaccaagucuu

SEQ ID NO: 565265 - RNA, 19 nt, Artificial Sequence
  Description of Artificial Sequence: Synthetic oligonucleotide
  Sense strand starting at position 3831 of SEQ ID NO: 318469
agacuuggucauugaccuu

SEQ ID NO: 565266 - RNA, 19 nt, Artificial Sequence
  Description of Artificial Sequence: Synthetic oligonucleotide
  Antisense strand to SEQ ID NO: 565265
aaggucaaugaccaagucu

SEQ ID NO: 565267 - RNA, 19 nt, Artificial Sequence
  Description of Artificial Sequence: Synthetic oligonucleotide
  Sense strand starting at position 3901 of SEQ ID NO: 318469
aagagaguucuuggaccuc

SEQ ID NO: 565268 - RNA, 19 nt, Artificial Sequence
  Description of Artificial Sequence: Synthetic oligonucleotide
  Antisense strand to SEQ ID NO: 565267
gagguccaagaacucucuu

SEQ ID NO: 565269 - RNA, 19 nt, Artificial Sequence
  Description of Artificial Sequence: Synthetic oligonucleotide
  Sense strand starting at position 3912 of SEQ ID NO: 318469
uggaccuccagcgaagaau

SEQ ID NO: 565270 - RNA, 19 nt, Artificial Sequence
  Description of Artificial Sequence: Synthetic oligonucleotide
  Antisense strand to SEQ ID NO: 565269
auucuucgcuggaggucca

SEQ ID NO: 565271 - RNA, 19 nt, Artificial Sequence
  Description of Artificial Sequence: Synthetic oligonucleotide
  Sense strand starting at position 3923 of SEQ ID NO: 318469
cgaagaauucagggcaagu

SEQ ID NO: 565272 - RNA, 19 nt, Artificial Sequence
  Description of Artificial Sequence: Synthetic oligonucleotide
  Antisense strand to SEQ ID NO: 565271
acuugcccugaauucuucg

SEQ ID NO: 565273 - RNA, 19 nt, Artificial Sequence
  Description of Artificial Sequence: Synthetic oligonucleotide
  Sense strand starting at position 193 of SEQ ID NO: 318470
agaaguuauccuuguuagg

SEQ ID NO: 565274 - RNA, 19 nt, Artificial Sequence
  Description of Artificial Sequence: Synthetic oligonucleotide
  Antisense strand to SEQ ID NO: 565273
ccuaacaaggauaacuucu

SEQ ID NO: 565275 - RNA, 19 nt, Artificial Sequence
  Description of Artificial Sequence: Synthetic oligonucleotide
  Sense strand starting at position 195 of SEQ ID NO: 318470
aaguuauccuuguuaggaa

SEQ ID NO: 565276 - RNA, 19 nt, Artificial Sequence
  Description of Artificial Sequence: Synthetic oligonucleotide
  Antisense strand to SEQ ID NO: 565275
uuccuaacaaggauaacuu

SEQ ID NO: 565277 - RNA, 19 nt, Artificial Sequence
  Description of Artificial Sequence: Synthetic oligonucleotide
  Sense strand starting at position 259 of SEQ ID NO: 318470
auagucaaguuuccaaaca

SEQ ID NO: 565278 - RNA, 19 nt, Artificial Sequence
  Description of Artificial Sequence: Synthetic oligonucleotide
  Antisense strand to SEQ ID NO: 565277
uguuuggaaacuugacuau

SEQ ID NO: 565279 - RNA, 19 nt, Artificial Sequence
  Description of Artificial Sequence: Synthetic oligonucleotide
  Sense strand starting at position 348 of SEQ ID NO: 318470
uggaaauuagugcauugau

SEQ ID NO: 565280 - RNA, 19 nt, Artificial Sequence
  Description of Artificial Sequence: Synthetic oligonucleotide
  Antisense strand to SEQ ID NO: 565279
aucaaugcacuaauuucca

SEQ ID NO: 565281 - RNA, 19 nt, Artificial Sequence
  Description of Artificial Sequence: Synthetic oligonucleotide
  Sense strand starting at position 357 of SEQ ID NO: 318470
gugcauugauaaucuaauu

SEQ ID NO: 565282 - RNA, 19 nt, Artificial Sequence
  Description of Artificial Sequence: Synthetic oligonucleotide
  Antisense strand to SEQ ID NO: 565281
aauuagauuaucaaugcac

SEQ ID NO: 565283 - RNA, 19 nt, Artificial Sequence
  Description of Artificial Sequence: Synthetic oligonucleotide
  Sense strand starting at position 420 of SEQ ID NO: 318470
uuuagaaacugucuuguaa

SEQ ID NO: 565284 - RNA, 19 nt, Artificial Sequence
  Description of Artificial Sequence: Synthetic oligonucleotide
  Antisense strand to SEQ ID NO: 565283
uuacaagacaguuucuaaa

SEQ ID NO: 565285 - RNA, 19 nt, Artificial Sequence
  Description of Artificial Sequence: Synthetic oligonucleotide
  Sense strand starting at position 627 of SEQ ID NO: 318470
ggagcccagcuuuaacaaa

SEQ ID NO: 565286 - RNA, 19 nt, Artificial Sequence
  Description of Artificial Sequence: Synthetic oligonucleotide
  Antisense strand to SEQ ID NO: 565285
uuuguuaaagcugggcucc

SEQ ID NO: 565287 - RNA, 19 nt, Artificial Sequence
  Description of Artificial Sequence: Synthetic oligonucleotide
  Sense strand starting at position 654 of SEQ ID NO: 318470
gauaacagucauuacguca

SEQ ID NO: 565288 - RNA, 19 nt, Artificial Sequence
  Description of Artificial Sequence: Synthetic oligonucleotide
  Antisense strand to SEQ ID NO: 565287
ugacguaaugacuguuauc

SEQ ID NO: 565289 - RNA, 19 nt, Artificial Sequence
  Description of Artificial Sequence: Synthetic oligonucleotide
  Sense strand starting at position 659 of SEQ ID NO: 318470
cagucauuacgucagguac

SEQ ID NO: 565290 - RNA, 19 nt, Artificial Sequence
  Description of Artificial Sequence: Synthetic oligonucleotide
  Antisense strand to SEQ ID NO: 565289
guaccugacguaaugacug

SEQ ID NO: 565291 - RNA, 19 nt, Artificial Sequence
  Description of Artificial Sequence: Synthetic oligonucleotide
  Sense strand starting at position 814 of SEQ ID NO: 318470
gaaauaugacuucgucgga

SEQ ID NO: 565292 - RNA, 19 nt, Artificial Sequence
  Description of Artificial Sequence: Synthetic oligonucleotide
  Antisense strand to SEQ ID NO: 565291
uccgacgaagucauauuuc

SEQ ID NO: 565293 - RNA, 19 nt, Artificial Sequence
  Description of Artificial Sequence: Synthetic oligonucleotide
  Sense strand starting at position 815 of SEQ ID NO: 318470
aaauaugacuucgucggaa

SEQ ID NO: 565294 - RNA, 19 nt, Artificial Sequence
  Description of Artificial Sequence: Synthetic oligonucleotide
  Antisense strand to SEQ ID NO: 565293
uuccgacgaagucauauuu

SEQ ID NO: 565295 - RNA, 19 nt, Artificial Sequence
  Description of Artificial Sequence: Synthetic oligonucleotide
  Sense strand starting at position 829 of SEQ ID NO: 318470
cggaaucaguaggcucaau

SEQ ID NO: 565296 - RNA, 19 nt, Artificial Sequence
  Description of Artificial Sequence: Synthetic oligonucleotide
  Antisense strand to SEQ ID NO: 565295
auugagccuacugauuccg

SEQ ID NO: 565297 - RNA, 19 nt, Artificial Sequence
  Description of Artificial Sequence: Synthetic oligonucleotide
  Sense strand starting at position 849 of SEQ ID NO: 318470
cuguuuaccguggaagaga

SEQ ID NO: 565298 - RNA, 19 nt, Artificial Sequence
  Description of Artificial Sequence: Synthetic oligonucleotide
  Antisense strand to SEQ ID NO: 565297
ucucuuccacgguaaacag

SEQ ID NO: 565299 - RNA, 19 nt, Artificial Sequence
  Description of Artificial Sequence: Synthetic oligonucleotide
  Sense strand starting at position 869 of SEQ ID NO: 318470
aagaaucuuguacguaacu

SEQ ID NO: 565300 - RNA, 19 nt, Artificial Sequence
  Description of Artificial Sequence: Synthetic oligonucleotide
  Antisense strand to SEQ ID NO: 565299
aguuacguacaagauucuu

SEQ ID NO: 565301 - RNA, 19 nt, Artificial Sequence
  Description of Artificial Sequence: Synthetic oligonucleotide
  Sense strand starting at position 870 of SEQ ID NO: 318470
agaaucuuguacguaacua

SEQ ID NO: 565302 - RNA, 19 nt, Artificial Sequence
  Description of Artificial Sequence: Synthetic oligonucleotide
  Antisense strand to SEQ ID NO: 565301
uaguuacguacaagauucu

SEQ ID NO: 565303 - RNA, 19 nt, Artificial Sequence
  Description of Artificial Sequence: Synthetic oligonucleotide
  Sense strand starting at position 911 of SEQ ID NO: 318470
ucgaauaaacucuaguacu

SEQ ID NO: 565304 - RNA, 19 nt, Artificial Sequence
  Description of Artificial Sequence: Synthetic oligonucleotide
  Antisense strand to SEQ ID NO: 565303
aguacuagaguuuauucga

SEQ ID NO: 565305 - RNA, 19 nt, Artificial Sequence
  Description of Artificial Sequence: Synthetic oligonucleotide
  Sense strand starting at position 919 of SEQ ID NO: 318470
acucuaguacuguaaguga

SEQ ID NO: 565306 - RNA, 19 nt, Artificial Sequence
  Description of Artificial Sequence: Synthetic oligonucleotide
  Antisense strand to SEQ ID NO: 565305
ucacuuacaguacuagagu

SEQ ID NO: 565307 - RNA, 19 nt, Artificial Sequence
  Description of Artificial Sequence: Synthetic oligonucleotide
  Sense strand starting at position 941 of SEQ ID NO: 318470
aggaaacacuggcuaguaa

SEQ ID NO: 565308 - RNA, 19 nt, Artificial Sequence
  Description of Artificial Sequence: Synthetic oligonucleotide
  Antisense strand to SEQ ID NO: 565307
uuacuagccaguguuuccu

SEQ ID NO: 565309 - RNA, 19 nt, Artificial Sequence
  Description of Artificial Sequence: Synthetic oligonucleotide
  Sense strand starting at position 1927 of SEQ ID NO: 318470
cucggagguucuucagaga

SEQ ID NO: 565310 - RNA, 19 nt, Artificial Sequence
  Description of Artificial Sequence: Synthetic oligonucleotide
  Antisense strand to SEQ ID NO: 565309
ucucugaagaaccuccgag

SEQ ID NO: 565311 - RNA, 19 nt, Artificial Sequence
  Description of Artificial Sequence: Synthetic oligonucleotide
  Sense strand starting at position 1954 of SEQ ID NO: 318470
ggccgaucgccgccauauu

SEQ ID NO: 565312 - RNA, 19 nt, Artificial Sequence
  Description of Artificial Sequence: Synthetic oligonucleotide
  Antisense strand to SEQ ID NO: 565311
aauauggcggcgaucggcc

SEQ ID NO: 565313 - RNA, 19 nt, Artificial Sequence
  Description of Artificial Sequence: Synthetic oligonucleotide
  Sense strand starting at position 2209 of SEQ ID NO: 318470
ggcaguucccacgaggaaa

SEQ ID NO: 565314 - RNA, 19 nt, Artificial Sequence
  Description of Artificial Sequence: Synthetic oligonucleotide
  Antisense strand to SEQ ID NO: 565313
uuuccucgugggaacugcc

SEQ ID NO: 565315 - RNA, 19 nt, Artificial Sequence
  Description of Artificial Sequence: Synthetic oligonucleotide
  Sense strand starting at position 2238 of SEQ ID NO: 318470
ugcgaguuggcaguguaga

SEQ ID NO: 565316 - RNA, 19 nt, Artificial Sequence
  Description of Artificial Sequence: Synthetic oligonucleotide
  Antisense strand to SEQ ID NO: 565315
ucuacacugccaacucgca

SEQ ID NO: 565317 - RNA, 19 nt, Artificial Sequence
  Description of Artificial Sequence: Synthetic oligonucleotide
  Sense strand starting at position 2278 of SEQ ID NO: 318470
gcggaagccgucguccaaa

SEQ ID NO: 565318 - RNA, 19 nt, Artificial Sequence
  Description of Artificial Sequence: Synthetic oligonucleotide
  Antisense strand to SEQ ID NO: 565317
uuuggacgacggcuuccgc

SEQ ID NO: 565319 - RNA, 19 nt, Artificial Sequence
  Description of Artificial Sequence: Synthetic oligonucleotide
  Sense strand starting at position 2456 of SEQ ID NO: 318470
uuagacuccuuuccuggaa

SEQ ID NO: 565320 - RNA, 19 nt, Artificial Sequence
  Description of Artificial Sequence: Synthetic oligonucleotide
  Antisense strand to SEQ ID NO: 565319
uuccaggaaaggagucuaa

SEQ ID NO: 565321 - RNA, 19 nt, Artificial Sequence
  Description of Artificial Sequence: Synthetic oligonucleotide
  Sense strand starting at position 2787 of SEQ ID NO: 318470
gcagguguuguggauuaau

SEQ ID NO: 565322 - RNA, 19 nt, Artificial Sequence
  Description of Artificial Sequence: Synthetic oligonucleotide
  Antisense strand to SEQ ID NO: 565321
auuaauccacaacaccugc

SEQ ID NO: 565323 - RNA, 19 nt, Artificial Sequence
  Description of Artificial Sequence: Synthetic oligonucleotide
  Sense strand starting at position 2790 of SEQ ID NO: 318470
gguguuguggauuaaucua

SEQ ID NO: 565324 - RNA, 19 nt, Artificial Sequence
  Description of Artificial Sequence: Synthetic oligonucleotide
  Antisense strand to SEQ ID NO: 565323
uagauuaauccacaacacc

SEQ ID NO: 565325 - RNA, 19 nt, Artificial Sequence
  Description of Artificial Sequence: Synthetic oligonucleotide
  Sense strand starting at position 2846 of SEQ ID NO: 318470
ucuagaaacugcuuaguua

SEQ ID NO: 565326 - RNA, 19 nt, Artificial Sequence
  Description of Artificial Sequence: Synthetic oligonucleotide
  Antisense strand to SEQ ID NO: 565325
uaacuaagcaguuucuaga

SEQ ID NO: 565327 - RNA, 19 nt, Artificial Sequence
  Description of Artificial Sequence: Synthetic oligonucleotide
  Sense strand starting at position 2847 of SEQ ID NO: 318470
cuagaaacugcuuaguuaa

SEQ ID NO: 565328 - RNA, 19 nt, Artificial Sequence
  Description of Artificial Sequence: Synthetic oligonucleotide
  Antisense strand to SEQ ID NO: 565327
uuaacuaagcaguuucuag

SEQ ID NO: 565329 - RNA, 19 nt, Artificial Sequence
  Description of Artificial Sequence: Synthetic oligonucleotide
  Sense strand starting at position 2998 of SEQ ID NO: 318470
agcgauuuguccucuccag

SEQ ID NO: 565330 - RNA, 19 nt, Artificial Sequence
  Description of Artificial Sequence: Synthetic oligonucleotide
  Antisense strand to SEQ ID NO: 565329
cuggagaggacaaaucgcu

SEQ ID NO: 565331 - RNA, 19 nt, Artificial Sequence
  Description of Artificial Sequence: Synthetic oligonucleotide
  Sense strand starting at position 3036 of SEQ ID NO: 318470
auuccaugagacugaaagu

SEQ ID NO: 565332 - RNA, 19 nt, Artificial Sequence
  Description of Artificial Sequence: Synthetic oligonucleotide
  Antisense strand to SEQ ID NO: 565331
acuuucagucucauggaau

SEQ ID NO: 565333 - RNA, 19 nt, Artificial Sequence
  Description of Artificial Sequence: Synthetic oligonucleotide
  Sense strand starting at position 3154 of SEQ ID NO: 318470
augaguaagugcccuggau

SEQ ID NO: 565334 - RNA, 19 nt, Artificial Sequence
  Description of Artificial Sequence: Synthetic oligonucleotide
  Antisense strand to SEQ ID NO: 565333
auccagggcacuuacucau

SEQ ID NO: 565335 - RNA, 19 nt, Artificial Sequence
  Description of Artificial Sequence: Synthetic oligonucleotide
  Sense strand starting at position 3156 of SEQ ID NO: 318470
gaguaagugcccuggauuu

SEQ ID NO: 565336 - RNA, 19 nt, Artificial Sequence
  Description of Artificial Sequence: Synthetic oligonucleotide
  Antisense strand to SEQ ID NO: 565335
aaauccagggcacuuacuc

SEQ ID NO: 565337 - RNA, 19 nt, Artificial Sequence
  Description of Artificial Sequence: Synthetic oligonucleotide
  Sense strand starting at position 3246 of SEQ ID NO: 318470
uguuaauaagagugaacau

SEQ ID NO: 565338 - RNA, 19 nt, Artificial Sequence
  Description of Artificial Sequence: Synthetic oligonucleotide
  Antisense strand to SEQ ID NO: 565337
auguucacucuuauuaaca

SEQ ID NO: 565339 - RNA, 19 nt, Artificial Sequence
  Description of Artificial Sequence: Synthetic oligonucleotide
  Sense strand starting at position 3328 of SEQ ID NO: 318470
gagguagacuuaguaauag

SEQ ID NO: 565340 - RNA, 19 nt, Artificial Sequence
  Description of Artificial Sequence: Synthetic oligonucleotide
  Antisense strand to SEQ ID NO: 565339
cuauuacuaagucuaccuc

SEQ ID NO: 565341 - RNA, 19 nt, Artificial Sequence
  Description of Artificial Sequence: Synthetic oligonucleotide
  Sense strand starting at position 3455 of SEQ ID NO: 318470
uauguacauguauguugaa

SEQ ID NO: 565342 - RNA, 19 nt, Artificial Sequence
  Description of Artificial Sequence: Synthetic oligonucleotide
  Antisense strand to SEQ ID NO: 565341
uucaacauacauguacaua

SEQ ID NO: 565343 - RNA, 19 nt, Artificial Sequence
  Description of Artificial Sequence: Synthetic oligonucleotide
  Sense strand starting at position 3456 of SEQ ID NO: 318470
auguacauguauguugaaa

SEQ ID NO: 565344 - RNA, 19 nt, Artificial Sequence
  Description of Artificial Sequence: Synthetic oligonucleotide
  Antisense strand to SEQ ID NO: 565343
uuucaacauacauguacau

SEQ ID NO: 565345 - RNA, 19 nt, Artificial Sequence
  Description of Artificial Sequence: Synthetic oligonucleotide
  Sense strand starting at position 3551 of SEQ ID NO: 318470
ucuuguuugcuugucucua

SEQ ID NO: 565346 - RNA, 19 nt, Artificial Sequence
  Description of Artificial Sequence: Synthetic oligonucleotide
  Antisense strand to SEQ ID NO: 565345
uagagacaagcaaacaaga

SEQ ID NO: 565347 - RNA, 19 nt, Artificial Sequence
  Description of Artificial Sequence: Synthetic oligonucleotide
  Sense strand starting at position 3642 of SEQ ID NO: 318470
aaaguagcaucaucuggaa

SEQ ID NO: 565348 - RNA, 19 nt, Artificial Sequence
  Description of Artificial Sequence: Synthetic oligonucleotide
  Antisense strand to SEQ ID NO: 565347
uuccagaugaugcuacuuu

SEQ ID NO: 565349 - RNA, 19 nt, Artificial Sequence
  Description of Artificial Sequence: Synthetic oligonucleotide
  Sense strand starting at position 3853 of SEQ ID NO: 318470
aagcgugcucccuccguua

SEQ ID NO: 565350 - RNA, 19 nt, Artificial Sequence
  Description of Artificial Sequence: Synthetic oligonucleotide
  Antisense strand to SEQ ID NO: 565349
uaacggagggagcacgcuu

SEQ ID NO: 565351 - RNA, 19 nt, Artificial Sequence
  Description of Artificial Sequence: Synthetic oligonucleotide
  Sense strand starting at position 3933 of SEQ ID NO: 318470
aaacuugaggucuggcaga

SEQ ID NO: 565352 - RNA, 19 nt, Artificial Sequence
  Description of Artificial Sequence: Synthetic oligonucleotide
  Antisense strand to SEQ ID NO: 565351
ucugccagaccucaaguuu

SEQ ID NO: 565353 - RNA, 19 nt, Artificial Sequence
  Description of Artificial Sequence: Synthetic oligonucleotide
  Sense strand starting at position 13 of SEQ ID NO: 318471
ggccuauauuuaggaauga

SEQ ID NO: 565354 - RNA, 19 nt, Artificial Sequence
  Description of Artificial Sequence: Synthetic oligonucleotide
  Antisense strand to SEQ ID NO: 565353
ucauuccuaaauauaggcc

SEQ ID NO: 565355 - RNA, 19 nt, Artificial Sequence
  Description of Artificial Sequence: Synthetic oligonucleotide
  Sense strand starting at position 14 of SEQ ID NO: 318471
gccuauauuuaggaaugaa

SEQ ID NO: 565356 - RNA, 19 nt, Artificial Sequence
  Description of Artificial Sequence: Synthetic oligonucleotide
  Antisense strand to SEQ ID NO: 565355
uucauuccuaaauauaggc

SEQ ID NO: 565357 - RNA, 19 nt, Artificial Sequence
  Description of Artificial Sequence: Synthetic oligonucleotide
  Sense strand starting at position 101 of SEQ ID NO: 318471
uaucacugagcaggagaua

SEQ ID NO: 565358 - RNA, 19 nt, Artificial Sequence
  Description of Artificial Sequence: Synthetic oligonucleotide
  Antisense strand to SEQ ID NO: 565357
uaucuccugcucagugaua

SEQ ID NO: 565359 - RNA, 19 nt, Artificial Sequence
  Description of Artificial Sequence: Synthetic oligonucleotide
  Sense strand starting at position 277 of SEQ ID NO: 318471
cugagaccggaaugucaua

SEQ ID NO: 565360 - RNA, 19 nt, Artificial Sequence
  Description of Artificial Sequence: Synthetic oligonucleotide
  Antisense strand to SEQ ID NO: 565359
uaugacauuccggucucag

SEQ ID NO: 565361 - RNA, 19 nt, Artificial Sequence
  Description of Artificial Sequence: Synthetic oligonucleotide
  Sense strand starting at position 282 of SEQ ID NO: 318471
accggaaugucauauuuaa

SEQ ID NO: 565362 - RNA, 19 nt, Artificial Sequence
  Description of Artificial Sequence: Synthetic oligonucleotide
  Antisense strand to SEQ ID NO: 565361
uuaaauaugacauuccggu

SEQ ID NO: 565363 - RNA, 19 nt, Artificial Sequence
  Description of Artificial Sequence: Synthetic oligonucleotide
  Sense strand starting at position 500 of SEQ ID NO: 318471
aggaaugagugugcugaga

SEQ ID NO: 565364 - RNA, 19 nt, Artificial Sequence
  Description of Artificial Sequence: Synthetic oligonucleotide
  Antisense strand to SEQ ID NO: 565363
ucucagcacacucauuccu

SEQ ID NO: 565365 - RNA, 19 nt, Artificial Sequence
  Description of Artificial Sequence: Synthetic oligonucleotide
  Sense strand starting at position 530 of SEQ ID NO: 318471
gaagguaucuuuccgaagu

SEQ ID NO: 565366 - RNA, 19 nt, Artificial Sequence
  Description of Artificial Sequence: Synthetic oligonucleotide
  Antisense strand to SEQ ID NO: 565365
acuucggaaagauaccuuc

SEQ ID NO: 565367 - RNA, 19 nt, Artificial Sequence
  Description of Artificial Sequence: Synthetic oligonucleotide
  Sense strand starting at position 536 of SEQ ID NO: 318471
aucuuuccgaagugauagu

SEQ ID NO: 565368 - RNA, 19 nt, Artificial Sequence
  Description of Artificial Sequence: Synthetic oligonucleotide
  Antisense strand to SEQ ID NO: 565367
acuaucacuucggaaagau

SEQ ID NO: 565369 - RNA, 19 nt, Artificial Sequence
  Description of Artificial Sequence: Synthetic oligonucleotide
  Sense strand starting at position 537 of SEQ ID NO: 318471
ucuuuccgaagugauagua

SEQ ID NO: 565370 - RNA, 19 nt, Artificial Sequence
  Description of Artificial Sequence: Synthetic oligonucleotide
  Antisense strand to SEQ ID NO: 565369
uacuaucacuucggaaaga

SEQ ID NO: 565371 - RNA, 19 nt, Artificial Sequence
  Description of Artificial Sequence: Synthetic oligonucleotide
  Sense strand starting at position 607 of SEQ ID NO: 318471
aguaaacauugucuuccaa

SEQ ID NO: 565372 - RNA, 19 nt, Artificial Sequence
  Description of Artificial Sequence: Synthetic oligonucleotide
  Antisense strand to SEQ ID NO: 565371
uuggaagacaauguuuacu

SEQ ID NO: 565373 - RNA, 19 nt, Artificial Sequence
  Description of Artificial Sequence: Synthetic oligonucleotide
  Sense strand starting at position 768 of SEQ ID NO: 318471
auagguaguccuuaucaug

SEQ ID NO: 565374 - RNA, 19 nt, Artificial Sequence
  Description of Artificial Sequence: Synthetic oligonucleotide
  Antisense strand to SEQ ID NO: 565373
caugauaaggacuaccuau

SEQ ID NO: 565375 - RNA, 19 nt, Artificial Sequence
  Description of Artificial Sequence: Synthetic oligonucleotide
  Sense strand starting at position 954 of SEQ ID NO: 318471
ggcucuguaguacauaauu

SEQ ID NO: 565376 - RNA, 19 nt, Artificial Sequence
  Description of Artificial Sequence: Synthetic oligonucleotide
  Antisense strand to SEQ ID NO: 565375
aauuauguacuacagagcc

SEQ ID NO: 565377 - RNA, 19 nt, Artificial Sequence
  Description of Artificial Sequence: Synthetic oligonucleotide
  Sense strand starting at position 1311 of SEQ ID NO: 318471
uuucguuuacuugaugauc

SEQ ID NO: 565378 - RNA, 19 nt, Artificial Sequence
  Description of Artificial Sequence: Synthetic oligonucleotide
  Antisense strand to SEQ ID NO: 565377
gaucaucaaguaaacgaaa

SEQ ID NO: 565379 - RNA, 19 nt, Artificial Sequence
  Description of Artificial Sequence: Synthetic oligonucleotide
  Sense strand starting at position 1341 of SEQ ID NO: 318471
cuccacuugucuguuugaa

SEQ ID NO: 565380 - RNA, 19 nt, Artificial Sequence
  Description of Artificial Sequence: Synthetic oligonucleotide
  Antisense strand to SEQ ID NO: 565379
uucaaacagacaaguggag

SEQ ID NO: 565381 - RNA, 19 nt, Artificial Sequence
  Description of Artificial Sequence: Synthetic oligonucleotide
  Sense strand starting at position 1343 of SEQ ID NO: 318471
ccacuugucuguuugaaca

SEQ ID NO: 565382 - RNA, 19 nt, Artificial Sequence
  Description of Artificial Sequence: Synthetic oligonucleotide
  Antisense strand to SEQ ID NO: 565381
uguucaaacagacaagugg

SEQ ID NO: 565383 - RNA, 19 nt, Artificial Sequence
  Description of Artificial Sequence: Synthetic oligonucleotide
  Sense strand starting at position 1393 of SEQ ID NO: 318471
cgacaaauauguguugacu

SEQ ID NO: 565384 - RNA, 19 nt, Artificial Sequence
  Description of Artificial Sequence: Synthetic oligonucleotide
  Antisense strand to SEQ ID NO: 565383
agucaacacauauuugucg

SEQ ID NO: 565385 - RNA, 19 nt, Artificial Sequence
  Description of Artificial Sequence: Synthetic oligonucleotide
  Sense strand starting at position 1399 of SEQ ID NO: 318471
auauguguugacugaauga

SEQ ID NO: 565386 - RNA, 19 nt, Artificial Sequence
  Description of Artificial Sequence: Synthetic oligonucleotide
  Antisense strand to SEQ ID NO: 565385
ucauucagucaacacauau

SEQ ID NO: 565387 - RNA, 19 nt, Artificial Sequence
  Description of Artificial Sequence: Synthetic oligonucleotide
  Sense strand starting at position 1422 of SEQ ID NO: 318471
gaaagacugcuaugcgacu

SEQ ID NO: 565388 - RNA, 19 nt, Artificial Sequence
  Description of Artificial Sequence: Synthetic oligonucleotide
  Antisense strand to SEQ ID NO: 565387
agucgcauagcagucuuuc

SEQ ID NO: 565389 - RNA, 19 nt, Artificial Sequence
  Description of Artificial Sequence: Synthetic oligonucleotide
  Sense strand starting at position 1938 of SEQ ID NO: 318471
gcguaaggcaggucguuau

SEQ ID NO: 565390 - RNA, 19 nt, Artificial Sequence
  Description of Artificial Sequence: Synthetic oligonucleotide
  Antisense strand to SEQ ID NO: 565389
auaacgaccugccuuacgc

SEQ ID NO: 565391 - RNA, 19 nt, Artificial Sequence
  Description of Artificial Sequence: Synthetic oligonucleotide
  Sense strand starting at position 1969 of SEQ ID NO: 318471
gcgcuuuacagcgccagau

SEQ ID NO: 565392 - RNA, 19 nt, Artificial Sequence
  Description of Artificial Sequence: Synthetic oligonucleotide
  Antisense strand to SEQ ID NO: 565391
aucuggcgcuguaaagcgc

SEQ ID NO: 565393 - RNA, 19 nt, Artificial Sequence
  Description of Artificial Sequence: Synthetic oligonucleotide
  Sense strand starting at position 2010 of SEQ ID NO: 318471
uaguauagguccuuguuaa

SEQ ID NO: 565394 - RNA, 19 nt, Artificial Sequence
  Description of Artificial Sequence: Synthetic oligonucleotide
  Antisense strand to SEQ ID NO: 565393
uuaacaaggaccuauacua

SEQ ID NO: 565395 - RNA, 19 nt, Artificial Sequence
  Description of Artificial Sequence: Synthetic oligonucleotide
  Sense strand starting at position 2011 of SEQ ID NO: 318471
aguauagguccuuguuaau

SEQ ID NO: 565396 - RNA, 19 nt, Artificial Sequence
  Description of Artificial Sequence: Synthetic oligonucleotide
  Antisense strand to SEQ ID NO: 565395
auuaacaaggaccuauacu

SEQ ID NO: 565397 - RNA, 19 nt, Artificial Sequence
  Description of Artificial Sequence: Synthetic oligonucleotide
  Sense strand starting at position 2020 of SEQ ID NO: 318471
ccuuguuaauaguuagaag

SEQ ID NO: 565398 - RNA, 19 nt, Artificial Sequence
  Description of Artificial Sequence: Synthetic oligonucleotide
  Antisense strand to SEQ ID NO: 565397
cuucuaacuauuaacaagg

SEQ ID NO: 565399 - RNA, 19 nt, Artificial Sequence
  Description of Artificial Sequence: Synthetic oligonucleotide
  Sense strand starting at position 2069 of SEQ ID NO: 318471
cuacuuguaugucuuauga

SEQ ID NO: 565400 - RNA, 19 nt, Artificial Sequence
  Description of Artificial Sequence: Synthetic oligonucleotide
  Antisense strand to SEQ ID NO: 565399
ucauaagacauacaaguag

SEQ ID NO: 565401 - RNA, 19 nt, Artificial Sequence
  Description of Artificial Sequence: Synthetic oligonucleotide
  Sense strand starting at position 2155 of SEQ ID NO: 318471
gaguguagauauucucuac

SEQ ID NO: 565402 - RNA, 19 nt, Artificial Sequence
  Description of Artificial Sequence: Synthetic oligonucleotide
  Antisense strand to SEQ ID NO: 565401
guagagaauaucuacacuc

SEQ ID NO: 565403 - RNA, 19 nt, Artificial Sequence
  Description of Artificial Sequence: Synthetic oligonucleotide
  Sense strand starting at position 2237 of SEQ ID NO: 318471
agagcaaagugguuacuua

SEQ ID NO: 565404 - RNA, 19 nt, Artificial Sequence
  Description of Artificial Sequence: Synthetic oligonucleotide
  Antisense strand to SEQ ID NO: 565403
uaaguaaccacuuugcucu

SEQ ID NO: 565405 - RNA, 19 nt, Artificial Sequence
  Description of Artificial Sequence: Synthetic oligonucleotide
  Sense strand starting at position 2238 of SEQ ID NO: 318471
gagcaaagugguuacuuaa

SEQ ID NO: 565406 - RNA, 19 nt, Artificial Sequence
  Description of Artificial Sequence: Synthetic oligonucleotide
  Antisense strand to SEQ ID NO: 565405
uuaaguaaccacuuugcuc

SEQ ID NO: 565407 - RNA, 19 nt, Artificial Sequence
  Description of Artificial Sequence: Synthetic oligonucleotide
  Sense strand starting at position 2286 of SEQ ID NO: 318471
cuucuacucuaggcaaagu

SEQ ID NO: 565408 - RNA, 19 nt, Artificial Sequence
  Description of Artificial Sequence: Synthetic oligonucleotide
  Antisense strand to SEQ ID NO: 565407
acuuugccuagaguagaag

SEQ ID NO: 565409 - RNA, 19 nt, Artificial Sequence
  Description of Artificial Sequence: Synthetic oligonucleotide
  Sense strand starting at position 2368 of SEQ ID NO: 318471
gguaaaguggacuguaauc

SEQ ID NO: 565410 - RNA, 19 nt, Artificial Sequence
  Description of Artificial Sequence: Synthetic oligonucleotide
  Antisense strand to SEQ ID NO: 565409
gauuacaguccacuuuacc

SEQ ID NO: 565411 - RNA, 19 nt, Artificial Sequence
  Description of Artificial Sequence: Synthetic oligonucleotide
  Sense strand starting at position 2476 of SEQ ID NO: 318471
cucuuagguuggucuagga

SEQ ID NO: 565412 - RNA, 19 nt, Artificial Sequence
  Description of Artificial Sequence: Synthetic oligonucleotide
  Antisense strand to SEQ ID NO: 565411
uccuagaccaaccuaagag

SEQ ID NO: 565413 - RNA, 19 nt, Artificial Sequence
  Description of Artificial Sequence: Synthetic oligonucleotide
  Sense strand starting at position 2592 of SEQ ID NO: 318471
gauaguucgggcugaccua

SEQ ID NO: 565414 - RNA, 19 nt, Artificial Sequence
  Description of Artificial Sequence: Synthetic oligonucleotide
  Antisense strand to SEQ ID NO: 565413
uaggucagcccgaacuauc

SEQ ID NO: 565415 - RNA, 19 nt, Artificial Sequence
  Description of Artificial Sequence: Synthetic oligonucleotide
  Sense strand starting at position 2676 of SEQ ID NO: 318471
cugcaacuccucgauauuc

SEQ ID NO: 565416 - RNA, 19 nt, Artificial Sequence
  Description of Artificial Sequence: Synthetic oligonucleotide
  Antisense strand to SEQ ID NO: 565415
gaauaucgaggaguugcag

SEQ ID NO: 565417 - RNA, 19 nt, Artificial Sequence
  Description of Artificial Sequence: Synthetic oligonucleotide
  Sense strand starting at position 2725 of SEQ ID NO: 318471
gcaugucuuugauuaacca

SEQ ID NO: 565418 - RNA, 19 nt, Artificial Sequence
  Description of Artificial Sequence: Synthetic oligonucleotide
  Antisense strand to SEQ ID NO: 565417
ugguuaaucaaagacaugc

SEQ ID NO: 565419 - RNA, 19 nt, Artificial Sequence
  Description of Artificial Sequence: Synthetic oligonucleotide
  Sense strand starting at position 3190 of SEQ ID NO: 318471
aaguauuuagggugucugu

SEQ ID NO: 565420 - RNA, 19 nt, Artificial Sequence
  Description of Artificial Sequence: Synthetic oligonucleotide
  Antisense strand to SEQ ID NO: 565419
acagacacccuaaauacuu

SEQ ID NO: 565421 - RNA, 19 nt, Artificial Sequence
  Description of Artificial Sequence: Synthetic oligonucleotide
  Sense strand starting at position 3199 of SEQ ID NO: 318471
gggugucugucauccaaau

SEQ ID NO: 565422 - RNA, 19 nt, Artificial Sequence
  Description of Artificial Sequence: Synthetic oligonucleotide
  Antisense strand to SEQ ID NO: 565421
auuuggaugacagacaccc

SEQ ID NO: 565423 - RNA, 19 nt, Artificial Sequence
  Description of Artificial Sequence: Synthetic oligonucleotide
  Sense strand starting at position 3255 of SEQ ID NO: 318471
acuaucaagcagugaauau

SEQ ID NO: 565424 - RNA, 19 nt, Artificial Sequence
  Description of Artificial Sequence: Synthetic oligonucleotide
  Antisense strand to SEQ ID NO: 565423
auauucacugcuugauagu

SEQ ID NO: 565425 - RNA, 19 nt, Artificial Sequence
  Description of Artificial Sequence: Synthetic oligonucleotide
  Sense strand starting at position 3291 of SEQ ID NO: 318471
ccauguuuguaaccuuuaa

SEQ ID NO: 565426 - RNA, 19 nt, Artificial Sequence
  Description of Artificial Sequence: Synthetic oligonucleotide
  Antisense strand to SEQ ID NO: 565425
uuaaagguuacaaacaugg

SEQ ID NO: 565427 - RNA, 19 nt, Artificial Sequence
  Description of Artificial Sequence: Synthetic oligonucleotide
  Sense strand starting at position 3913 of SEQ ID NO: 318471
cuuauauacuuagugaugu

SEQ ID NO: 565428 - RNA, 19 nt, Artificial Sequence
  Description of Artificial Sequence: Synthetic oligonucleotide
  Antisense strand to SEQ ID NO: 565427
acaucacuaaguauauaag

SEQ ID NO: 565429 - RNA, 19 nt, Artificial Sequence
  Description of Artificial Sequence: Synthetic oligonucleotide
  Sense strand starting at position 3921 of SEQ ID NO: 318471
cuuagugauguugagcaau

SEQ ID NO: 565430 - RNA, 19 nt, Artificial Sequence
  Description of Artificial Sequence: Synthetic oligonucleotide
  Antisense strand to SEQ ID NO: 565429
auugcucaacaucacuaag

SEQ ID NO: 565431 - RNA, 19 nt, Artificial Sequence
  Description of Artificial Sequence: Synthetic oligonucleotide
  Sense strand starting at position 3956 of SEQ ID NO: 318471
ggccauuuguaugcaaaua

SEQ ID NO: 565432 - RNA, 19 nt, Artificial Sequence
  Description of Artificial Sequence: Synthetic oligonucleotide
  Antisense strand to SEQ ID NO: 565431
uauuugcauacaaauggcc

SEQ ID NO: 565433 - RNA, 19 nt, Artificial Sequence
  Description of Artificial Sequence: Synthetic oligonucleotide
  Sense strand starting at position 191 of SEQ ID NO: 318472
aguuaauaggguugcuuaa

SEQ ID NO: 565434 - RNA, 19 nt, Artificial Sequence
  Description of Artificial Sequence: Synthetic oligonucleotide
  Antisense strand to SEQ ID NO: 565433
uuaagcaacccuauuaacu

SEQ ID NO: 565435 - RNA, 19 nt, Artificial Sequence
  Description of Artificial Sequence: Synthetic oligonucleotide
  Sense strand starting at position 243 of SEQ ID NO: 318472
aucuguuucccaggccaga

SEQ ID NO: 565436 - RNA, 19 nt, Artificial Sequence
  Description of Artificial Sequence: Synthetic oligonucleotide
  Antisense strand to SEQ ID NO: 565435
ucuggccugggaaacagau

SEQ ID NO: 565437 - RNA, 19 nt, Artificial Sequence
  Description of Artificial Sequence: Synthetic oligonucleotide
  Sense strand starting at position 256 of SEQ ID NO: 318472
gccagagugcugugguaca

SEQ ID NO: 565438 - RNA, 19 nt, Artificial Sequence
  Description of Artificial Sequence: Synthetic oligonucleotide
  Antisense strand to SEQ ID NO: 565437
uguaccacagcacucuggc

SEQ ID NO: 565439 - RNA, 19 nt, Artificial Sequence
  Description of Artificial Sequence: Synthetic oligonucleotide
  Sense strand starting at position 430 of SEQ ID NO: 318472
ucuccuuuguguuuauuua

SEQ ID NO: 565440 - RNA, 19 nt, Artificial Sequence
  Description of Artificial Sequence: Synthetic oligonucleotide
  Antisense strand to SEQ ID NO: 565439
uaaauaaacacaaaggaga

SEQ ID NO: 565441 - RNA, 19 nt, Artificial Sequence
  Description of Artificial Sequence: Synthetic oligonucleotide
  Sense strand starting at position 839 of SEQ ID NO: 318472
ccagguuggucuugaagug

SEQ ID NO: 565442 - RNA, 19 nt, Artificial Sequence
  Description of Artificial Sequence: Synthetic oligonucleotide
  Antisense strand to SEQ ID NO: 565441
cacuucaagaccaaccugg

SEQ ID NO: 565443 - RNA, 19 nt, Artificial Sequence
  Description of Artificial Sequence: Synthetic oligonucleotide
  Sense strand starting at position 1142 of SEQ ID NO: 318472
gcuuucuguuccuugacua

SEQ ID NO: 565444 - RNA, 19 nt, Artificial Sequence
  Description of Artificial Sequence: Synthetic oligonucleotide
  Antisense strand to SEQ ID NO: 565443
uagucaaggaacagaaagc

SEQ ID NO: 565445 - RNA, 19 nt, Artificial Sequence
  Description of Artificial Sequence: Synthetic oligonucleotide
  Sense strand starting at position 1143 of SEQ ID NO: 318472
cuuucuguuccuugacuau

SEQ ID NO: 565446 - RNA, 19 nt, Artificial Sequence
  Description of Artificial Sequence: Synthetic oligonucleotide
  Antisense strand to SEQ ID NO: 565445
auagucaaggaacagaaag

SEQ ID NO: 565447 - RNA, 19 nt, Artificial Sequence
  Description of Artificial Sequence: Synthetic oligonucleotide
  Sense strand starting at position 1155 of SEQ ID NO: 318472
ugacuauacucucaguuga

SEQ ID NO: 565448 - RNA, 19 nt, Artificial Sequence
  Description of Artificial Sequence: Synthetic oligonucleotide
  Antisense strand to SEQ ID NO: 565447
ucaacugagaguauaguca

SEQ ID NO: 565449 - RNA, 19 nt, Artificial Sequence
  Description of Artificial Sequence: Synthetic oligonucleotide
  Sense strand starting at position 1157 of SEQ ID NO: 318472
acuauacucucaguugauu

SEQ ID NO: 565450 - RNA, 19 nt, Artificial Sequence
  Description of Artificial Sequence: Synthetic oligonucleotide
  Antisense strand to SEQ ID NO: 565449
aaucaacugagaguauagu

SEQ ID NO: 565451 - RNA, 19 nt, Artificial Sequence
  Description of Artificial Sequence: Synthetic oligonucleotide
  Sense strand starting at position 1166 of SEQ ID NO: 318472
ucaguugauuucugcccua

SEQ ID NO: 565452 - RNA, 19 nt, Artificial Sequence
  Description of Artificial Sequence: Synthetic oligonucleotide
  Antisense strand to SEQ ID NO: 565451
uagggcagaaaucaacuga

SEQ ID NO: 565453 - RNA, 19 nt, Artificial Sequence
  Description of Artificial Sequence: Synthetic oligonucleotide
  Sense strand starting at position 1228 of SEQ ID NO: 318472
cccguaucuuccuaagccu

SEQ ID NO: 565454 - RNA, 19 nt, Artificial Sequence
  Description of Artificial Sequence: Synthetic oligonucleotide
  Antisense strand to SEQ ID NO: 565453
aggcuuaggaagauacggg

SEQ ID NO: 565455 - RNA, 19 nt, Artificial Sequence
  Description of Artificial Sequence: Synthetic oligonucleotide
  Sense strand starting at position 1285 of SEQ ID NO: 318472
cagagaugcucugcuagac

SEQ ID NO: 565456 - RNA, 19 nt, Artificial Sequence
  Description of Artificial Sequence: Synthetic oligonucleotide
  Antisense strand to SEQ ID NO: 565455
gucuagcagagcaucucug

SEQ ID NO: 565457 - RNA, 19 nt, Artificial Sequence
  Description of Artificial Sequence: Synthetic oligonucleotide
  Sense strand starting at position 1297 of SEQ ID NO: 318472
gcuagaccacaguaucuaa

SEQ ID NO: 565458 - RNA, 19 nt, Artificial Sequence
  Description of Artificial Sequence: Synthetic oligonucleotide
  Antisense strand to SEQ ID NO: 565457
uuagauacuguggucuagc

SEQ ID NO: 565459 - RNA, 19 nt, Artificial Sequence
  Description of Artificial Sequence: Synthetic oligonucleotide
  Sense strand starting at position 1389 of SEQ ID NO: 318472
acuauacaguccuacuuga

SEQ ID NO: 565460 - RNA, 19 nt, Artificial Sequence
  Description of Artificial Sequence: Synthetic oligonucleotide
  Antisense strand to SEQ ID NO: 565459
ucaaguaggacuguauagu

SEQ ID NO: 565461 - RNA, 19 nt, Artificial Sequence
  Description of Artificial Sequence: Synthetic oligonucleotide
  Sense strand starting at position 1488 of SEQ ID NO: 318472
cugggaguuucacccgcau

SEQ ID NO: 565462 - RNA, 19 nt, Artificial Sequence
  Description of Artificial Sequence: Synthetic oligonucleotide
  Antisense strand to SEQ ID NO: 565461
augcgggugaaacucccag

SEQ ID NO: 565463 - RNA, 19 nt, Artificial Sequence
  Description of Artificial Sequence: Synthetic oligonucleotide
  Sense strand starting at position 1762 of SEQ ID NO: 318472
ggcuuagucguggguagca

SEQ ID NO: 565464 - RNA, 19 nt, Artificial Sequence
  Description of Artificial Sequence: Synthetic oligonucleotide
  Antisense strand to SEQ ID NO: 565463
ugcuacccacgacuaagcc

SEQ ID NO: 565465 - RNA, 19 nt, Artificial Sequence
  Description of Artificial Sequence: Synthetic oligonucleotide
  Sense strand starting at position 2150 of SEQ ID NO: 318472
ggucguuuccagguuccga

SEQ ID NO: 565466 - RNA, 19 nt, Artificial Sequence
  Description of Artificial Sequence: Synthetic oligonucleotide
  Antisense strand to SEQ ID NO: 565465
ucggaaccuggaaacgacc

SEQ ID NO: 565467 - RNA, 19 nt, Artificial Sequence
  Description of Artificial Sequence: Synthetic oligonucleotide
  Sense strand starting at position 2316 of SEQ ID NO: 318472
ccaagugguuacgcuuaca

SEQ ID NO: 565468 - RNA, 19 nt, Artificial Sequence
  Description of Artificial Sequence: Synthetic oligonucleotide
  Antisense strand to SEQ ID NO: 565467
uguaagcguaaccacuugg

SEQ ID NO: 565469 - RNA, 19 nt, Artificial Sequence
  Description of Artificial Sequence: Synthetic oligonucleotide
  Sense strand starting at position 2449 of SEQ ID NO: 318472
aggaguuugccugucguuu

SEQ ID NO: 565470 - RNA, 19 nt, Artificial Sequence
  Description of Artificial Sequence: Synthetic oligonucleotide
  Antisense strand to SEQ ID NO: 565469
aaacgacaggcaaacuccu

SEQ ID NO: 565471 - RNA, 19 nt, Artificial Sequence
  Description of Artificial Sequence: Synthetic oligonucleotide
  Sense strand starting at position 2450 of SEQ ID NO: 318472
ggaguuugccugucguuug

SEQ ID NO: 565472 - RNA, 19 nt, Artificial Sequence
  Description of Artificial Sequence: Synthetic oligonucleotide
  Antisense strand to SEQ ID NO: 565471
caaacgacaggcaaacucc

SEQ ID NO: 565473 - RNA, 19 nt, Artificial Sequence
  Description of Artificial Sequence: Synthetic oligonucleotide
  Sense strand starting at position 2457 of SEQ ID NO: 318472
gccugucguuugcauguua

SEQ ID NO: 565474 - RNA, 19 nt, Artificial Sequence
  Description of Artificial Sequence: Synthetic oligonucleotide
  Antisense strand to SEQ ID NO: 565473
uaacaugcaaacgacaggc

SEQ ID NO: 565475 - RNA, 19 nt, Artificial Sequence
  Description of Artificial Sequence: Synthetic oligonucleotide
  Sense strand starting at position 2460 of SEQ ID NO: 318472
ugucguuugcauguuaaug

SEQ ID NO: 565476 - RNA, 19 nt, Artificial Sequence
  Description of Artificial Sequence: Synthetic oligonucleotide
  Antisense strand to SEQ ID NO: 565475
cauuaacaugcaaacgaca

SEQ ID NO: 565477 - RNA, 19 nt, Artificial Sequence
  Description of Artificial Sequence: Synthetic oligonucleotide
  Sense strand starting at position 2468 of SEQ ID NO: 318472
gcauguuaaugcgggugaa

SEQ ID NO: 565478 - RNA, 19 nt, Artificial Sequence
  Description of Artificial Sequence: Synthetic oligonucleotide
  Antisense strand to SEQ ID NO: 565477
uucacccgcauuaacaugc

SEQ ID NO: 565479 - RNA, 19 nt, Artificial Sequence
  Description of Artificial Sequence: Synthetic oligonucleotide
  Sense strand starting at position 2469 of SEQ ID NO: 318472
cauguuaaugcgggugaaa

SEQ ID NO: 565480 - RNA, 19 nt, Artificial Sequence
  Description of Artificial Sequence: Synthetic oligonucleotide
  Antisense strand to SEQ ID NO: 565479
uuucacccgcauuaacaug

SEQ ID NO: 565481 - RNA, 19 nt, Artificial Sequence
  Description of Artificial Sequence: Synthetic oligonucleotide
  Sense strand starting at position 2471 of SEQ ID NO: 318472
uguuaaugcgggugaaacu

SEQ ID NO: 565482 - RNA, 19 nt, Artificial Sequence
  Description of Artificial Sequence: Synthetic oligonucleotide
  Antisense strand to SEQ ID NO: 565481
aguuucacccgcauuaaca

SEQ ID NO: 565483 - RNA, 19 nt, Artificial Sequence
  Description of Artificial Sequence: Synthetic oligonucleotide
  Sense strand starting at position 2586 of SEQ ID NO: 318472
ugugaacaggcuuagggau

SEQ ID NO: 565484 - RNA, 19 nt, Artificial Sequence
  Description of Artificial Sequence: Synthetic oligonucleotide
  Antisense strand to SEQ ID NO: 565483
aucccuaagccuguucaca

SEQ ID NO: 565485 - RNA, 19 nt, Artificial Sequence
  Description of Artificial Sequence: Synthetic oligonucleotide
  Sense strand starting at position 2617 of SEQ ID NO: 318472
cuagaaaucucaggagaac

SEQ ID NO: 565486 - RNA, 19 nt, Artificial Sequence
  Description of Artificial Sequence: Synthetic oligonucleotide
  Antisense strand to SEQ ID NO: 565485
guucuccugagauuucuag

SEQ ID NO: 565487 - RNA, 19 nt, Artificial Sequence
  Description of Artificial Sequence: Synthetic oligonucleotide
  Sense strand starting at position 2641 of SEQ ID NO: 318472
gcucuugaaauaugaagug

SEQ ID NO: 565488 - RNA, 19 nt, Artificial Sequence
  Description of Artificial Sequence: Synthetic oligonucleotide
  Antisense strand to SEQ ID NO: 565487
cacuucauauuucaagagc

SEQ ID NO: 565489 - RNA, 19 nt, Artificial Sequence
  Description of Artificial Sequence: Synthetic oligonucleotide
  Sense strand starting at position 2646 of SEQ ID NO: 318472
ugaaauaugaagugaugcu

SEQ ID NO: 565490 - RNA, 19 nt, Artificial Sequence
  Description of Artificial Sequence: Synthetic oligonucleotide
  Antisense strand to SEQ ID NO: 565489
agcaucacuucauauuuca

SEQ ID NO: 565491 - RNA, 19 nt, Artificial Sequence
  Description of Artificial Sequence: Synthetic oligonucleotide
  Sense strand starting at position 3141 of SEQ ID NO: 318472
ccuguagucccaugauccu

SEQ ID NO: 565492 - RNA, 19 nt, Artificial Sequence
  Description of Artificial Sequence: Synthetic oligonucleotide
  Antisense strand to SEQ ID NO: 565491
aggaucaugggacuacagg

SEQ ID NO: 565493 - RNA, 19 nt, Artificial Sequence
  Description of Artificial Sequence: Synthetic oligonucleotide
  Sense strand starting at position 3641 of SEQ ID NO: 318472
ccaagcuucgagcgauugu

SEQ ID NO: 565494 - RNA, 19 nt, Artificial Sequence
  Description of Artificial Sequence: Synthetic oligonucleotide
  Antisense strand to SEQ ID NO: 565493
acaaucgcucgaagcuugg

SEQ ID NO: 565495 - RNA, 19 nt, Artificial Sequence
  Description of Artificial Sequence: Synthetic oligonucleotide
  Sense strand starting at position 3663 of SEQ ID NO: 318472
gccucagcuccaugaguaa

SEQ ID NO: 565496 - RNA, 19 nt, Artificial Sequence
  Description of Artificial Sequence: Synthetic oligonucleotide
  Antisense strand to SEQ ID NO: 565495
uuacucauggagcugaggc

SEQ ID NO: 565497 - RNA, 19 nt, Artificial Sequence
  Description of Artificial Sequence: Synthetic oligonucleotide
  Sense strand starting at position 3670 of SEQ ID NO: 318472
cuccaugaguaacagauua

SEQ ID NO: 565498 - RNA, 19 nt, Artificial Sequence
  Description of Artificial Sequence: Synthetic oligonucleotide
  Antisense strand to SEQ ID NO: 565497
uaaucuguuacucauggag

SEQ ID NO: 565499 - RNA, 19 nt, Artificial Sequence
  Description of Artificial Sequence: Synthetic oligonucleotide
  Sense strand starting at position 10 of SEQ ID NO: 318473
agaggcuaccauuguuagu

SEQ ID NO: 565500 - RNA, 19 nt, Artificial Sequence
  Description of Artificial Sequence: Synthetic oligonucleotide
  Antisense strand to SEQ ID NO: 565499
acuaacaaugguagccucu

SEQ ID NO: 565501 - RNA, 19 nt, Artificial Sequence
  Description of Artificial Sequence: Synthetic oligonucleotide
  Sense strand starting at position 23 of SEQ ID NO: 318473
guuaguugccagucuggca

SEQ ID NO: 565502 - RNA, 19 nt, Artificial Sequence
  Description of Artificial Sequence: Synthetic oligonucleotide
  Antisense strand to SEQ ID NO: 565501
ugccagacuggcaacuaac

SEQ ID NO: 565503 - RNA, 19 nt, Artificial Sequence
  Description of Artificial Sequence: Synthetic oligonucleotide
  Sense strand starting at position 306 of SEQ ID NO: 318473
agcuuagcacuuuggcaua

SEQ ID NO: 565504 - RNA, 19 nt, Artificial Sequence
  Description of Artificial Sequence: Synthetic oligonucleotide
  Antisense strand to SEQ ID NO: 565503
uaugccaaagugcuaagcu

SEQ ID NO: 565505 - RNA, 19 nt, Artificial Sequence
  Description of Artificial Sequence: Synthetic oligonucleotide
  Sense strand starting at position 311 of SEQ ID NO: 318473
agcacuuuggcauacaaau

SEQ ID NO: 565506 - RNA, 19 nt, Artificial Sequence
  Description of Artificial Sequence: Synthetic oligonucleotide
  Antisense strand to SEQ ID NO: 565505
auuuguaugccaaagugcu

SEQ ID NO: 565507 - RNA, 19 nt, Artificial Sequence
  Description of Artificial Sequence: Synthetic oligonucleotide
  Sense strand starting at position 358 of SEQ ID NO: 318473
guaucuuaagaguguacaa

SEQ ID NO: 565508 - RNA, 19 nt, Artificial Sequence
  Description of Artificial Sequence: Synthetic oligonucleotide
  Antisense strand to SEQ ID NO: 565507
uuguacacucuuaagauac

SEQ ID NO: 565509 - RNA, 19 nt, Artificial Sequence
  Description of Artificial Sequence: Synthetic oligonucleotide
  Sense strand starting at position 410 of SEQ ID NO: 318473
aggucauccuaacaugaac

SEQ ID NO: 565510 - RNA, 19 nt, Artificial Sequence
  Description of Artificial Sequence: Synthetic oligonucleotide
  Antisense strand to SEQ ID NO: 565509
guucauguuaggaugaccu

SEQ ID NO: 565511 - RNA, 19 nt, Artificial Sequence
  Description of Artificial Sequence: Synthetic oligonucleotide
  Sense strand starting at position 457 of SEQ ID NO: 318473
cagcauucucagggugaca

SEQ ID NO: 565512 - RNA, 19 nt, Artificial Sequence
  Description of Artificial Sequence: Synthetic oligonucleotide
  Antisense strand to SEQ ID NO: 565511
ugucacccugagaaugcug

SEQ ID NO: 565513 - RNA, 19 nt, Artificial Sequence
  Description of Artificial Sequence: Synthetic oligonucleotide
  Sense strand starting at position 459 of SEQ ID NO: 318473
gcauucucagggugacaau

SEQ ID NO: 565514 - RNA, 19 nt, Artificial Sequence
  Description of Artificial Sequence: Synthetic oligonucleotide
  Antisense strand to SEQ ID NO: 565513
auugucacccugagaaugc

SEQ ID NO: 565515 - RNA, 19 nt, Artificial Sequence
  Description of Artificial Sequence: Synthetic oligonucleotide
  Sense strand starting at position 536 of SEQ ID NO: 318473
aaucauauuccacgaugug

SEQ ID NO: 565516 - RNA, 19 nt, Artificial Sequence
  Description of Artificial Sequence: Synthetic oligonucleotide
  Antisense strand to SEQ ID NO: 565515
cacaucguggaauaugauu

SEQ ID NO: 565517 - RNA, 19 nt, Artificial Sequence
  Description of Artificial Sequence: Synthetic oligonucleotide
  Sense strand starting at position 539 of SEQ ID NO: 318473
cauauuccacgaugugcaa

SEQ ID NO: 565518 - RNA, 19 nt, Artificial Sequence
  Description of Artificial Sequence: Synthetic oligonucleotide
  Antisense strand to SEQ ID NO: 565517
uugcacaucguggaauaug

SEQ ID NO: 565519 - RNA, 19 nt, Artificial Sequence
  Description of Artificial Sequence: Synthetic oligonucleotide
  Sense strand starting at position 650 of SEQ ID NO: 318473
ugacauuaagccgaauggu

SEQ ID NO: 565520 - RNA, 19 nt, Artificial Sequence
  Description of Artificial Sequence: Synthetic oligonucleotide
  Antisense strand to SEQ ID NO: 565519
accauucggcuuaauguca

SEQ ID NO: 565521 - RNA, 19 nt, Artificial Sequence
  Description of Artificial Sequence: Synthetic oligonucleotide
  Sense strand starting at position 754 of SEQ ID NO: 318473
agugucagauccucauaau

SEQ ID NO: 565522 - RNA, 19 nt, Artificial Sequence
  Description of Artificial Sequence: Synthetic oligonucleotide
  Antisense strand to SEQ ID NO: 565521
auuaugaggaucugacacu

SEQ ID NO: 565523 - RNA, 19 nt, Artificial Sequence
  Description of Artificial Sequence: Synthetic oligonucleotide
  Sense strand starting at position 755 of SEQ ID NO: 318473
gugucagauccucauaaug

SEQ ID NO: 565524 - RNA, 19 nt, Artificial Sequence
  Description of Artificial Sequence: Synthetic oligonucleotide
  Antisense strand to SEQ ID NO: 565523
cauuaugaggaucugacac

SEQ ID NO: 565525 - RNA, 19 nt, Artificial Sequence
  Description of Artificial Sequence: Synthetic oligonucleotide
  Sense strand starting at position 757 of SEQ ID NO: 318473
gucagauccucauaaugug

SEQ ID NO: 565526 - RNA, 19 nt, Artificial Sequence
  Description of Artificial Sequence: Synthetic oligonucleotide
  Antisense strand to SEQ ID NO: 565525
cacauuaugaggaucugac

SEQ ID NO: 565527 - RNA, 19 nt, Artificial Sequence
  Description of Artificial Sequence: Synthetic oligonucleotide
  Sense strand starting at position 942 of SEQ ID NO: 318473
cagccuuaaguccgugauu

SEQ ID NO: 565528 - RNA, 19 nt, Artificial Sequence
  Description of Artificial Sequence: Synthetic oligonucleotide
  Antisense strand to SEQ ID NO: 565527
aaucacggacuuaaggcug

SEQ ID NO: 565529 - RNA, 19 nt, Artificial Sequence
  Description of Artificial Sequence: Synthetic oligonucleotide
  Sense strand starting at position 943 of SEQ ID NO: 318473
agccuuaaguccgugauuu

SEQ ID NO: 565530 - RNA, 19 nt, Artificial Sequence
  Description of Artificial Sequence: Synthetic oligonucleotide
  Antisense strand to SEQ ID NO: 565529
aaaucacggacuuaaggcu

SEQ ID NO: 565531 - RNA, 19 nt, Artificial Sequence
  Description of Artificial Sequence: Synthetic oligonucleotide
  Sense strand starting at position 944 of SEQ ID NO: 318473
gccuuaaguccgugauuug

SEQ ID NO: 565532 - RNA, 19 nt, Artificial Sequence
  Description of Artificial Sequence: Synthetic oligonucleotide
  Antisense strand to SEQ ID NO: 565531
caaaucacggacuuaaggc

SEQ ID NO: 565533 - RNA, 19 nt, Artificial Sequence
  Description of Artificial Sequence: Synthetic oligonucleotide
  Sense strand starting at position 1090 of SEQ ID NO: 318473
gcugccugaacgcaaagau

SEQ ID NO: 565534 - RNA, 19 nt, Artificial Sequence
  Description of Artificial Sequence: Synthetic oligonucleotide
  Antisense strand to SEQ ID NO: 565533
aucuuugcguucaggcagc

SEQ ID NO: 565535 - RNA, 19 nt, Artificial Sequence
  Description of Artificial Sequence: Synthetic oligonucleotide
  Sense strand starting at position 2156 of SEQ ID NO: 318473
gcugguuguuucucuguca

SEQ ID NO: 565536 - RNA, 19 nt, Artificial Sequence
  Description of Artificial Sequence: Synthetic oligonucleotide
  Antisense strand to SEQ ID NO: 565535
ugacagagaaacaaccagc

SEQ ID NO: 565537 - RNA, 19 nt, Artificial Sequence
  Description of Artificial Sequence: Synthetic oligonucleotide
  Sense strand starting at position 2165 of SEQ ID NO: 318473
uucucugucaggcgugaua

SEQ ID NO: 565538 - RNA, 19 nt, Artificial Sequence
  Description of Artificial Sequence: Synthetic oligonucleotide
  Antisense strand to SEQ ID NO: 565537
uaucacgccugacagagaa

SEQ ID NO: 565539 - RNA, 19 nt, Artificial Sequence
  Description of Artificial Sequence: Synthetic oligonucleotide
  Sense strand starting at position 2217 of SEQ ID NO: 318473
gacguauggaaauguguga

SEQ ID NO: 565540 - RNA, 19 nt, Artificial Sequence
  Description of Artificial Sequence: Synthetic oligonucleotide
  Antisense strand to SEQ ID NO: 565539
ucacacauuuccauacguc

SEQ ID NO: 565541 - RNA, 19 nt, Artificial Sequence
  Description of Artificial Sequence: Synthetic oligonucleotide
  Sense strand starting at position 2221 of SEQ ID NO: 318473
uauggaaaugugugagaac

SEQ ID NO: 565542 - RNA, 19 nt, Artificial Sequence
  Description of Artificial Sequence: Synthetic oligonucleotide
  Antisense strand to SEQ ID NO: 565541
guucucacacauuuccaua

SEQ ID NO: 565543 - RNA, 19 nt, Artificial Sequence
  Description of Artificial Sequence: Synthetic oligonucleotide
  Sense strand starting at position 2222 of SEQ ID NO: 318473
auggaaaugugugagaaca

SEQ ID NO: 565544 - RNA, 19 nt, Artificial Sequence
  Description of Artificial Sequence: Synthetic oligonucleotide
  Antisense strand to SEQ ID NO: 565543
uguucucacacauuuccau

SEQ ID NO: 565545 - RNA, 19 nt, Artificial Sequence
  Description of Artificial Sequence: Synthetic oligonucleotide
  Sense strand starting at position 2224 of SEQ ID NO: 318473
ggaaaugugugagaacaga

SEQ ID NO: 565546 - RNA, 19 nt, Artificial Sequence
  Description of Artificial Sequence: Synthetic oligonucleotide
  Antisense strand to SEQ ID NO: 565545
ucuguucucacacauuucc

SEQ ID NO: 565547 - RNA, 19 nt, Artificial Sequence
  Description of Artificial Sequence: Synthetic oligonucleotide
  Sense strand starting at position 2312 of SEQ ID NO: 318473
acgucaugcgguugacauc

SEQ ID NO: 565548 - RNA, 19 nt, Artificial Sequence
  Description of Artificial Sequence: Synthetic oligonucleotide
  Antisense strand to SEQ ID NO: 565547
gaugucaaccgcaugacgu

SEQ ID NO: 565549 - RNA, 19 nt, Artificial Sequence
  Description of Artificial Sequence: Synthetic oligonucleotide
  Sense strand starting at position 2318 of SEQ ID NO: 318473
ugcgguugacaucauggau

SEQ ID NO: 565550 - RNA, 19 nt, Artificial Sequence
  Description of Artificial Sequence: Synthetic oligonucleotide
  Antisense strand to SEQ ID NO: 565549
auccaugaugucaaccgca

SEQ ID NO: 565551 - RNA, 19 nt, Artificial Sequence
  Description of Artificial Sequence: Synthetic oligonucleotide
  Sense strand starting at position 2473 of SEQ ID NO: 318473
gugguuuccggaugaggcu

SEQ ID NO: 565552 - RNA, 19 nt, Artificial Sequence
  Description of Artificial Sequence: Synthetic oligonucleotide
  Antisense strand to SEQ ID NO: 565551
agccucauccggaaaccac

SEQ ID NO: 565553 - RNA, 19 nt, Artificial Sequence
  Description of Artificial Sequence: Synthetic oligonucleotide
  Sense strand starting at position 2525 of SEQ ID NO: 318473
guaagaagugggcaaccua

SEQ ID NO: 565554 - RNA, 19 nt, Artificial Sequence
  Description of Artificial Sequence: Synthetic oligonucleotide
  Antisense strand to SEQ ID NO: 565553
uagguugcccacuucuuac

SEQ ID NO: 565555 - RNA, 19 nt, Artificial Sequence
  Description of Artificial Sequence: Synthetic oligonucleotide
  Sense strand starting at position 2591 of SEQ ID NO: 318473
gucuaaugccgcccugauc

SEQ ID NO: 565556 - RNA, 19 nt, Artificial Sequence
  Description of Artificial Sequence: Synthetic oligonucleotide
  Antisense strand to SEQ ID NO: 565555
gaucagggcggcauuagac

SEQ ID NO: 565557 - RNA, 19 nt, Artificial Sequence
  Description of Artificial Sequence: Synthetic oligonucleotide
  Sense strand starting at position 2857 of SEQ ID NO: 318473
agauacacaucgcuauaaa

SEQ ID NO: 565558 - RNA, 19 nt, Artificial Sequence
  Description of Artificial Sequence: Synthetic oligonucleotide
  Antisense strand to SEQ ID NO: 565557
uuuauagcgauguguaucu

SEQ ID NO: 565559 - RNA, 19 nt, Artificial Sequence
  Description of Artificial Sequence: Synthetic oligonucleotide
  Sense strand starting at position 3016 of SEQ ID NO: 318473
uggagucagcuuugcacaa

SEQ ID NO: 565560 - RNA, 19 nt, Artificial Sequence
  Description of Artificial Sequence: Synthetic oligonucleotide
  Antisense strand to SEQ ID NO: 565559
uugugcaaagcugacucca

SEQ ID NO: 565561 - RNA, 19 nt, Artificial Sequence
  Description of Artificial Sequence: Synthetic oligonucleotide
  Sense strand starting at position 3020 of SEQ ID NO: 318473
gucagcuuugcacaaccaa

SEQ ID NO: 565562 - RNA, 19 nt, Artificial Sequence
  Description of Artificial Sequence: Synthetic oligonucleotide
  Antisense strand to SEQ ID NO: 565561
uugguugugcaaagcugac

SEQ ID NO: 565563 - RNA, 19 nt, Artificial Sequence
  Description of Artificial Sequence: Synthetic oligonucleotide
  Sense strand starting at position 3085 of SEQ ID NO: 318473
gaggcacuguuuccaggaa

SEQ ID NO: 565564 - RNA, 19 nt, Artificial Sequence
  Description of Artificial Sequence: Synthetic oligonucleotide
  Antisense strand to SEQ ID NO: 565563
uuccuggaaacagugccuc

SEQ ID NO: 565565 - RNA, 19 nt, Artificial Sequence
  Description of Artificial Sequence: Synthetic oligonucleotide
  Sense strand starting at position 3086 of SEQ ID NO: 318473
aggcacuguuuccaggaaa

SEQ ID NO: 565566 - RNA, 19 nt, Artificial Sequence
  Description of Artificial Sequence: Synthetic oligonucleotide
  Antisense strand to SEQ ID NO: 565565
uuuccuggaaacagugccu

SEQ ID NO: 565567 - RNA, 19 nt, Artificial Sequence
  Description of Artificial Sequence: Synthetic oligonucleotide
  Sense strand starting at position 3460 of SEQ ID NO: 318473
auugaugacuuggcagaca

SEQ ID NO: 565568 - RNA, 19 nt, Artificial Sequence
  Description of Artificial Sequence: Synthetic oligonucleotide
  Antisense strand to SEQ ID NO: 565567
ugucugccaagucaucaau

SEQ ID NO: 565569 - RNA, 19 nt, Artificial Sequence
  Description of Artificial Sequence: Synthetic oligonucleotide
  Sense strand starting at position 3575 of SEQ ID NO: 318473
uuacuuauccucggcaagu

SEQ ID NO: 565570 - RNA, 19 nt, Artificial Sequence
  Description of Artificial Sequence: Synthetic oligonucleotide
  Antisense strand to SEQ ID NO: 565569
acuugccgaggauaaguaa

SEQ ID NO: 565571 - RNA, 19 nt, Artificial Sequence
  Description of Artificial Sequence: Synthetic oligonucleotide
  Sense strand starting at position 3576 of SEQ ID NO: 318473
uacuuauccucggcaagua

SEQ ID NO: 565572 - RNA, 19 nt, Artificial Sequence
  Description of Artificial Sequence: Synthetic oligonucleotide
  Antisense strand to SEQ ID NO: 565571
uacuugccgaggauaagua

SEQ ID NO: 565573 - RNA, 19 nt, Artificial Sequence
  Description of Artificial Sequence: Synthetic oligonucleotide
  Sense strand starting at position 3637 of SEQ ID NO: 318473
gcaccuaaagagugcucua

SEQ ID NO: 565574 - RNA, 19 nt, Artificial Sequence
  Description of Artificial Sequence: Synthetic oligonucleotide
  Antisense strand to SEQ ID NO: 565573
uagagcacucuuuaggugc

SEQ ID NO: 565575 - RNA, 19 nt, Artificial Sequence
  Description of Artificial Sequence: Synthetic oligonucleotide
  Sense strand starting at position 3640 of SEQ ID NO: 318473
ccuaaagagugcucuaauc

SEQ ID NO: 565576 - RNA, 19 nt, Artificial Sequence
  Description of Artificial Sequence: Synthetic oligonucleotide
  Antisense strand to SEQ ID NO: 565575
gauuagagcacucuuuagg

SEQ ID NO: 565577 - RNA, 19 nt, Artificial Sequence
  Description of Artificial Sequence: Synthetic oligonucleotide
  Sense strand starting at position 3642 of SEQ ID NO: 318473
uaaagagugcucuaaucug

SEQ ID NO: 565578 - RNA, 19 nt, Artificial Sequence
  Description of Artificial Sequence: Synthetic oligonucleotide
  Antisense strand to SEQ ID NO: 565577
cagauuagagcacucuuua

SEQ ID NO: 565579 - RNA, 19 nt, Artificial Sequence
  Description of Artificial Sequence: Synthetic oligonucleotide
  Sense strand starting at position 59 of SEQ ID NO: 318474
ccguuuaccuucucagaaa

SEQ ID NO: 565580 - RNA, 19 nt, Artificial Sequence
  Description of Artificial Sequence: Synthetic oligonucleotide
  Antisense strand to SEQ ID NO: 565579
uuucugagaagguaaacgg

SEQ ID NO: 565581 - RNA, 19 nt, Artificial Sequence
  Description of Artificial Sequence: Synthetic oligonucleotide
  Sense strand starting at position 148 of SEQ ID NO: 318474
accgcauuuaucgaguagu

SEQ ID NO: 565582 - RNA, 19 nt, Artificial Sequence
  Description of Artificial Sequence: Synthetic oligonucleotide
  Antisense strand to SEQ ID NO: 565581
acuacucgauaaaugcggu

SEQ ID NO: 565583 - RNA, 19 nt, Artificial Sequence
  Description of Artificial Sequence: Synthetic oligonucleotide
  Sense strand starting at position 154 of SEQ ID NO: 318474
uuuaucgaguaguuaggau

SEQ ID NO: 565584 - RNA, 19 nt, Artificial Sequence
  Description of Artificial Sequence: Synthetic oligonucleotide
  Antisense strand to SEQ ID NO: 565583
auccuaacuacucgauaaa

SEQ ID NO: 565585 - RNA, 19 nt, Artificial Sequence
  Description of Artificial Sequence: Synthetic oligonucleotide
  Sense strand starting at position 186 of SEQ ID NO: 318474
ugauaaaugcucuacguaa

SEQ ID NO: 565586 - RNA, 19 nt, Artificial Sequence
  Description of Artificial Sequence: Synthetic oligonucleotide
  Antisense strand to SEQ ID NO: 565585
uuacguagagcauuuauca

SEQ ID NO: 565587 - RNA, 19 nt, Artificial Sequence
  Description of Artificial Sequence: Synthetic oligonucleotide
  Sense strand starting at position 188 of SEQ ID NO: 318474
auaaaugcucuacguaaau

SEQ ID NO: 565588 - RNA, 19 nt, Artificial Sequence
  Description of Artificial Sequence: Synthetic oligonucleotide
  Antisense strand to SEQ ID NO: 565587
auuuacguagagcauuuau

SEQ ID NO: 565589 - RNA, 19 nt, Artificial Sequence
  Description of Artificial Sequence: Synthetic oligonucleotide
  Sense strand starting at position 219 of SEQ ID NO: 318474
cuguaaucuuaugauuuag

SEQ ID NO: 565590 - RNA, 19 nt, Artificial Sequence
  Description of Artificial Sequence: Synthetic oligonucleotide
  Antisense strand to SEQ ID NO: 565589
cuaaaucauaagauuacag

SEQ ID NO: 565591 - RNA, 19 nt, Artificial Sequence
  Description of Artificial Sequence: Synthetic oligonucleotide
  Sense strand starting at position 230 of SEQ ID NO: 318474
ugauuuagcuaccauuugu

SEQ ID NO: 565592 - RNA, 19 nt, Artificial Sequence
  Description of Artificial Sequence: Synthetic oligonucleotide
  Antisense strand to SEQ ID NO: 565591
acaaaugguagcuaaauca

SEQ ID NO: 565593 - RNA, 19 nt, Artificial Sequence
  Description of Artificial Sequence: Synthetic oligonucleotide
  Sense strand starting at position 274 of SEQ ID NO: 318474
uugagacuuaggugcaaga

SEQ ID NO: 565594 - RNA, 19 nt, Artificial Sequence
  Description of Artificial Sequence: Synthetic oligonucleotide
  Antisense strand to SEQ ID NO: 565593
ucuugcaccuaagucucaa

SEQ ID NO: 565595 - RNA, 19 nt, Artificial Sequence
  Description of Artificial Sequence: Synthetic oligonucleotide
  Sense strand starting at position 308 of SEQ ID NO: 318474
caugauuaucgucaggcua

SEQ ID NO: 565596 - RNA, 19 nt, Artificial Sequence
  Description of Artificial Sequence: Synthetic oligonucleotide
  Antisense strand to SEQ ID NO: 565595
uagccugacgauaaucaug

SEQ ID NO: 565597 - RNA, 19 nt, Artificial Sequence
  Description of Artificial Sequence: Synthetic oligonucleotide
  Sense strand starting at position 871 of SEQ ID NO: 318474
gguguuucuugggugauga

SEQ ID NO: 565598 - RNA, 19 nt, Artificial Sequence
  Description of Artificial Sequence: Synthetic oligonucleotide
  Antisense strand to SEQ ID NO: 565597
ucaucacccaagaaacacc

SEQ ID NO: 565599 - RNA, 19 nt, Artificial Sequence
  Description of Artificial Sequence: Synthetic oligonucleotide
  Sense strand starting at position 872 of SEQ ID NO: 318474
guguuucuugggugaugaa

SEQ ID NO: 565600 - RNA, 19 nt, Artificial Sequence
  Description of Artificial Sequence: Synthetic oligonucleotide
  Antisense strand to SEQ ID NO: 565599
uucaucacccaagaaacac

SEQ ID NO: 565601 - RNA, 19 nt, Artificial Sequence
  Description of Artificial Sequence: Synthetic oligonucleotide
  Sense strand starting at position 873 of SEQ ID NO: 318474
uguuucuugggugaugaaa

SEQ ID NO: 565602 - RNA, 19 nt, Artificial Sequence
  Description of Artificial Sequence: Synthetic oligonucleotide
  Antisense strand to SEQ ID NO: 565601
uuucaucacccaagaaaca

SEQ ID NO: 565603 - RNA, 19 nt, Artificial Sequence
  Description of Artificial Sequence: Synthetic oligonucleotide
  Sense strand starting at position 896 of SEQ ID NO: 318474
uguggaauuagagagcagu

SEQ ID NO: 565604 - RNA, 19 nt, Artificial Sequence
  Description of Artificial Sequence: Synthetic oligonucleotide
  Antisense strand to SEQ ID NO: 565603
acugcucucuaauuccaca

SEQ ID NO: 565605 - RNA, 19 nt, Artificial Sequence
  Description of Artificial Sequence: Synthetic oligonucleotide
  Sense strand starting at position 924 of SEQ ID NO: 318474
auaacuuugugaguguacu

SEQ ID NO: 565606 - RNA, 19 nt, Artificial Sequence
  Description of Artificial Sequence: Synthetic oligonucleotide
  Antisense strand to SEQ ID NO: 565605
aguacacucacaaaguuau

SEQ ID NO: 565607 - RNA, 19 nt, Artificial Sequence
  Description of Artificial Sequence: Synthetic oligonucleotide
  Sense strand starting at position 932 of SEQ ID NO: 318474
gugaguguacuagaaacca

SEQ ID NO: 565608 - RNA, 19 nt, Artificial Sequence
  Description of Artificial Sequence: Synthetic oligonucleotide
  Antisense strand to SEQ ID NO: 565607
ugguuucuaguacacucac

SEQ ID NO: 565609 - RNA, 19 nt, Artificial Sequence
  Description of Artificial Sequence: Synthetic oligonucleotide
  Sense strand starting at position 1032 of SEQ ID NO: 318474
ccguucucagcgcuuaagu

SEQ ID NO: 565610 - RNA, 19 nt, Artificial Sequence
  Description of Artificial Sequence: Synthetic oligonucleotide
  Antisense strand to SEQ ID NO: 565609
acuuaagcgcugagaacgg

SEQ ID NO: 565611 - RNA, 19 nt, Artificial Sequence
  Description of Artificial Sequence: Synthetic oligonucleotide
  Sense strand starting at position 1040 of SEQ ID NO: 318474
agcgcuuaaguggaauaca

SEQ ID NO: 565612 - RNA, 19 nt, Artificial Sequence
  Description of Artificial Sequence: Synthetic oligonucleotide
  Antisense strand to SEQ ID NO: 565611
uguauuccacuuaagcgcu

SEQ ID NO: 565613 - RNA, 19 nt, Artificial Sequence
  Description of Artificial Sequence: Synthetic oligonucleotide
  Sense strand starting at position 1056 of SEQ ID NO: 318474
acagaaauguuggcuccuu

SEQ ID NO: 565614 - RNA, 19 nt, Artificial Sequence
  Description of Artificial Sequence: Synthetic oligonucleotide
  Antisense strand to SEQ ID NO: 565613
aaggagccaacauuucugu

SEQ ID NO: 565615 - RNA, 19 nt, Artificial Sequence
  Description of Artificial Sequence: Synthetic oligonucleotide
  Sense strand starting at position 1159 of SEQ ID NO: 318474
gaguaacuugcagagcuaa

SEQ ID NO: 565616 - RNA, 19 nt, Artificial Sequence
  Description of Artificial Sequence: Synthetic oligonucleotide
  Antisense strand to SEQ ID NO: 565615
uuagcucugcaaguuacuc

SEQ ID NO: 565617 - RNA, 19 nt, Artificial Sequence
  Description of Artificial Sequence: Synthetic oligonucleotide
  Sense strand starting at position 1314 of SEQ ID NO: 318474
ugcucuuaagaaugauaca

SEQ ID NO: 565618 - RNA, 19 nt, Artificial Sequence
  Description of Artificial Sequence: Synthetic oligonucleotide
  Antisense strand to SEQ ID NO: 565617
uguaucauucuuaagagca

SEQ ID NO: 565619 - RNA, 19 nt, Artificial Sequence
  Description of Artificial Sequence: Synthetic oligonucleotide
  Sense strand starting at position 1406 of SEQ ID NO: 318474
auacuacucgagugaugag

SEQ ID NO: 565620 - RNA, 19 nt, Artificial Sequence
  Description of Artificial Sequence: Synthetic oligonucleotide
  Antisense strand to SEQ ID NO: 565619
cucaucacucgaguaguau

SEQ ID NO: 565621 - RNA, 19 nt, Artificial Sequence
  Description of Artificial Sequence: Synthetic oligonucleotide
  Sense strand starting at position 1407 of SEQ ID NO: 318474
uacuacucgagugaugagu

SEQ ID NO: 565622 - RNA, 19 nt, Artificial Sequence
  Description of Artificial Sequence: Synthetic oligonucleotide
  Antisense strand to SEQ ID NO: 565621
acucaucacucgaguagua

SEQ ID NO: 565623 - RNA, 19 nt, Artificial Sequence
  Description of Artificial Sequence: Synthetic oligonucleotide
  Sense strand starting at position 1636 of SEQ ID NO: 318474
gucuuauacccaggagaga

SEQ ID NO: 565624 - RNA, 19 nt, Artificial Sequence
  Description of Artificial Sequence: Synthetic oligonucleotide
  Antisense strand to SEQ ID NO: 565623
ucucuccuggguauaagac

SEQ ID NO: 565625 - RNA, 19 nt, Artificial Sequence
  Description of Artificial Sequence: Synthetic oligonucleotide
  Sense strand starting at position 2135 of SEQ ID NO: 318474
acuaaagauuuagagucaa

SEQ ID NO: 565626 - RNA, 19 nt, Artificial Sequence
  Description of Artificial Sequence: Synthetic oligonucleotide
  Antisense strand to SEQ ID NO: 565625
uugacucuaaaucuuuagu

SEQ ID NO: 565627 - RNA, 19 nt, Artificial Sequence
  Description of Artificial Sequence: Synthetic oligonucleotide
  Sense strand starting at position 2510 of SEQ ID NO: 318474
ugaagucagguguauuaua

SEQ ID NO: 565628 - RNA, 19 nt, Artificial Sequence
  Description of Artificial Sequence: Synthetic oligonucleotide
  Antisense strand to SEQ ID NO: 565627
uauaauacaccugacuuca

SEQ ID NO: 565629 - RNA, 19 nt, Artificial Sequence
  Description of Artificial Sequence: Synthetic oligonucleotide
  Sense strand starting at position 2943 of SEQ ID NO: 318474
ucacccagugacgaaauau

SEQ ID NO: 565630 - RNA, 19 nt, Artificial Sequence
  Description of Artificial Sequence: Synthetic oligonucleotide
  Antisense strand to SEQ ID NO: 565629
auauuucgucacuggguga

SEQ ID NO: 565631 - RNA, 19 nt, Artificial Sequence
  Description of Artificial Sequence: Synthetic oligonucleotide
  Sense strand starting at position 2953 of SEQ ID NO: 318474
acgaaauauuaagucuagu

SEQ ID NO: 565632 - RNA, 19 nt, Artificial Sequence
  Description of Artificial Sequence: Synthetic oligonucleotide
  Antisense strand to SEQ ID NO: 565631
acuagacuuaauauuucgu

SEQ ID NO: 565633 - RNA, 19 nt, Artificial Sequence
  Description of Artificial Sequence: Synthetic oligonucleotide
  Sense strand starting at position 3141 of SEQ ID NO: 318474
guuugcuaaagaugaugga

SEQ ID NO: 565634 - RNA, 19 nt, Artificial Sequence
  Description of Artificial Sequence: Synthetic oligonucleotide
  Antisense strand to SEQ ID NO: 565633
uccaucaucuuuagcaaac

SEQ ID NO: 565635 - RNA, 19 nt, Artificial Sequence
  Description of Artificial Sequence: Synthetic oligonucleotide
  Sense strand starting at position 3167 of SEQ ID NO: 318474
agguuuggccaguaucaca

SEQ ID NO: 565636 - RNA, 19 nt, Artificial Sequence
  Description of Artificial Sequence: Synthetic oligonucleotide
  Antisense strand to SEQ ID NO: 565635
ugugauacuggccaaaccu

SEQ ID NO: 565637 - RNA, 19 nt, Artificial Sequence
  Description of Artificial Sequence: Synthetic oligonucleotide
  Sense strand starting at position 3290 of SEQ ID NO: 318474
uaguucuggccuuaagaac

SEQ ID NO: 565638 - RNA, 19 nt, Artificial Sequence
  Description of Artificial Sequence: Synthetic oligonucleotide
  Antisense strand to SEQ ID NO: 565637
guucuuaaggccagaacua

SEQ ID NO: 565639 - RNA, 19 nt, Artificial Sequence
  Description of Artificial Sequence: Synthetic oligonucleotide
  Sense strand starting at position 3328 of SEQ ID NO: 318474
gaaguuaggauucgaguuu

SEQ ID NO: 565640 - RNA, 19 nt, Artificial Sequence
  Description of Artificial Sequence: Synthetic oligonucleotide
  Antisense strand to SEQ ID NO: 565639
aaacucgaauccuaacuuc

SEQ ID NO: 565641 - RNA, 19 nt, Artificial Sequence
  Description of Artificial Sequence: Synthetic oligonucleotide
  Sense strand starting at position 3334 of SEQ ID NO: 318474
aggauucgaguuuaugacu

SEQ ID NO: 565642 - RNA, 19 nt, Artificial Sequence
  Description of Artificial Sequence: Synthetic oligonucleotide
  Antisense strand to SEQ ID NO: 565641
agucauaaacucgaauccu

SEQ ID NO: 565643 - RNA, 19 nt, Artificial Sequence
  Description of Artificial Sequence: Synthetic oligonucleotide
  Sense strand starting at position 3609 of SEQ ID NO: 318474
cgaaacuuugcugaacuca

SEQ ID NO: 565644 - RNA, 19 nt, Artificial Sequence
  Description of Artificial Sequence: Synthetic oligonucleotide
  Antisense strand to SEQ ID NO: 565643
ugaguucagcaaaguuucg

SEQ ID NO: 565645 - RNA, 19 nt, Artificial Sequence
  Description of Artificial Sequence: Synthetic oligonucleotide
  Sense strand starting at position 3783 of SEQ ID NO: 318474
acagaagugucccugacuu

SEQ ID NO: 565646 - RNA, 19 nt, Artificial Sequence
  Description of Artificial Sequence: Synthetic oligonucleotide
  Antisense strand to SEQ ID NO: 565645
aagucagggacacuucugu

SEQ ID NO: 565647 - RNA, 19 nt, Artificial Sequence
  Description of Artificial Sequence: Synthetic oligonucleotide
  Sense strand starting at position 3785 of SEQ ID NO: 318474
agaagugucccugacuucu

SEQ ID NO: 565648 - RNA, 19 nt, Artificial Sequence
  Description of Artificial Sequence: Synthetic oligonucleotide
  Antisense strand to SEQ ID NO: 565647
agaagucagggacacuucu

SEQ ID NO: 565649 - RNA, 19 nt, Artificial Sequence
  Description of Artificial Sequence: Synthetic oligonucleotide
  Sense strand starting at position 3816 of SEQ ID NO: 318474
gucauuguguauuugcuca

SEQ ID NO: 565650 - RNA, 19 nt, Artificial Sequence
  Description of Artificial Sequence: Synthetic oligonucleotide
  Antisense strand to SEQ ID NO: 565649
ugagcaaauacacaaugac

SEQ ID NO: 565651 - RNA, 19 nt, Artificial Sequence
  Description of Artificial Sequence: Synthetic oligonucleotide
  Sense strand starting at position 3820 of SEQ ID NO: 318474
uuguguauuugcucaucau

SEQ ID NO: 565652 - RNA, 19 nt, Artificial Sequence
  Description of Artificial Sequence: Synthetic oligonucleotide
  Antisense strand to SEQ ID NO: 565651
augaugagcaaauacacaa

SEQ ID NO: 565653 - RNA, 19 nt, Artificial Sequence
  Description of Artificial Sequence: Synthetic oligonucleotide
  Sense strand starting at position 3823 of SEQ ID NO: 318474
uguauuugcucaucaugua

SEQ ID NO: 565654 - RNA, 19 nt, Artificial Sequence
  Description of Artificial Sequence: Synthetic oligonucleotide
  Antisense strand to SEQ ID NO: 565653
uacaugaugagcaaauaca

SEQ ID NO: 565655 - RNA, 19 nt, Artificial Sequence
  Description of Artificial Sequence: Synthetic oligonucleotide
  Sense strand starting at position 3830 of SEQ ID NO: 318474
gcucaucauguagaucuua

SEQ ID NO: 565656 - RNA, 19 nt, Artificial Sequence
  Description of Artificial Sequence: Synthetic oligonucleotide
  Antisense strand to SEQ ID NO: 565655
uaagaucuacaugaugagc

SEQ ID NO: 565657 - RNA, 19 nt, Artificial Sequence
  Description of Artificial Sequence: Synthetic oligonucleotide
  Sense strand starting at position 3866 of SEQ ID NO: 318474
gggccucugaaacauuguu

SEQ ID NO: 565658 - RNA, 19 nt, Artificial Sequence
  Description of Artificial Sequence: Synthetic oligonucleotide
  Antisense strand to SEQ ID NO: 565657
aacaauguuucagaggccc

SEQ ID NO: 565659 - RNA, 19 nt, Artificial Sequence
  Description of Artificial Sequence: Synthetic oligonucleotide
  Sense strand starting at position 247 of SEQ ID NO: 318475
augaucacugcuuaaguca

SEQ ID NO: 565660 - RNA, 19 nt, Artificial Sequence
  Description of Artificial Sequence: Synthetic oligonucleotide
  Antisense strand to SEQ ID NO: 565659
ugacuuaagcagugaucau

SEQ ID NO: 565661 - RNA, 19 nt, Artificial Sequence
  Description of Artificial Sequence: Synthetic oligonucleotide
  Sense strand starting at position 333 of SEQ ID NO: 318475
gagccaugugguuaaagga

SEQ ID NO: 565662 - RNA, 19 nt, Artificial Sequence
  Description of Artificial Sequence: Synthetic oligonucleotide
  Antisense strand to SEQ ID NO: 565661
uccuuuaaccacauggcuc

SEQ ID NO: 565663 - RNA, 19 nt, Artificial Sequence
  Description of Artificial Sequence: Synthetic oligonucleotide
  Sense strand starting at position 576 of SEQ ID NO: 318475
augaauuaagccugccagu

SEQ ID NO: 565664 - RNA, 19 nt, Artificial Sequence
  Description of Artificial Sequence: Synthetic oligonucleotide
  Antisense strand to SEQ ID NO: 565663
acuggcaggcuuaauucau

SEQ ID NO: 565665 - RNA, 19 nt, Artificial Sequence
  Description of Artificial Sequence: Synthetic oligonucleotide
  Sense strand starting at position 592 of SEQ ID NO: 318475
aguggcacucaagguuaau

SEQ ID NO: 565666 - RNA, 19 nt, Artificial Sequence
  Description of Artificial Sequence: Synthetic oligonucleotide
  Antisense strand to SEQ ID NO: 565665
auuaaccuugagugccacu

SEQ ID NO: 565667 - RNA, 19 nt, Artificial Sequence
  Description of Artificial Sequence: Synthetic oligonucleotide
  Sense strand starting at position 673 of SEQ ID NO: 318475
uucuaaaugcuuuagagcu

SEQ ID NO: 565668 - RNA, 19 nt, Artificial Sequence
  Description of Artificial Sequence: Synthetic oligonucleotide
  Antisense strand to SEQ ID NO: 565667
agcucuaaagcauuuagaa

SEQ ID NO: 565669 - RNA, 19 nt, Artificial Sequence
  Description of Artificial Sequence: Synthetic oligonucleotide
  Sense strand starting at position 679 of SEQ ID NO: 318475
augcuuuagagcuaggcuu

SEQ ID NO: 565670 - RNA, 19 nt, Artificial Sequence
  Description of Artificial Sequence: Synthetic oligonucleotide
  Antisense strand to SEQ ID NO: 565669
aagccuagcucuaaagcau

SEQ ID NO: 565671 - RNA, 19 nt, Artificial Sequence
  Description of Artificial Sequence: Synthetic oligonucleotide
  Sense strand starting at position 718 of SEQ ID NO: 318475
aagggaguguggucuauag

SEQ ID NO: 565672 - RNA, 19 nt, Artificial Sequence
  Description of Artificial Sequence: Synthetic oligonucleotide
  Antisense strand to SEQ ID NO: 565671
cuauagaccacacucccuu

SEQ ID NO: 565673 - RNA, 19 nt, Artificial Sequence
  Description of Artificial Sequence: Synthetic oligonucleotide
  Sense strand starting at position 720 of SEQ ID NO: 318475
gggaguguggucuauagau

SEQ ID NO: 565674 - RNA, 19 nt, Artificial Sequence
  Description of Artificial Sequence: Synthetic oligonucleotide
  Antisense strand to SEQ ID NO: 565673
aucuauagaccacacuccc

SEQ ID NO: 565675 - RNA, 19 nt, Artificial Sequence
  Description of Artificial Sequence: Synthetic oligonucleotide
  Sense strand starting at position 726 of SEQ ID NO: 318475
guggucuauagaugggcua

SEQ ID NO: 565676 - RNA, 19 nt, Artificial Sequence
  Description of Artificial Sequence: Synthetic oligonucleotide
  Antisense strand to SEQ ID NO: 565675
uagcccaucuauagaccac

SEQ ID NO: 565677 - RNA, 19 nt, Artificial Sequence
  Description of Artificial Sequence: Synthetic oligonucleotide
  Sense strand starting at position 812 of SEQ ID NO: 318475
cagauucucggauguguaa

SEQ ID NO: 565678 - RNA, 19 nt, Artificial Sequence
  Description of Artificial Sequence: Synthetic oligonucleotide
  Antisense strand to SEQ ID NO: 565677
uuacacauccgagaaucug

SEQ ID NO: 565679 - RNA, 19 nt, Artificial Sequence
  Description of Artificial Sequence: Synthetic oligonucleotide
  Sense strand starting at position 814 of SEQ ID NO: 318475
gauucucggauguguaacu

SEQ ID NO: 565680 - RNA, 19 nt, Artificial Sequence
  Description of Artificial Sequence: Synthetic oligonucleotide
  Antisense strand to SEQ ID NO: 565679
aguuacacauccgagaauc

SEQ ID NO: 565681 - RNA, 19 nt, Artificial Sequence
  Description of Artificial Sequence: Synthetic oligonucleotide
  Sense strand starting at position 1032 of SEQ ID NO: 318475
guuaguguucuccaucuga

SEQ ID NO: 565682 - RNA, 19 nt, Artificial Sequence
  Description of Artificial Sequence: Synthetic oligonucleotide
  Antisense strand to SEQ ID NO: 565681
ucagauggagaacacuaac

SEQ ID NO: 565683 - RNA, 19 nt, Artificial Sequence
  Description of Artificial Sequence: Synthetic oligonucleotide
  Sense strand starting at position 1061 of SEQ ID NO: 318475
gaaucuucugaggagcugu

SEQ ID NO: 565684 - RNA, 19 nt, Artificial Sequence
  Description of Artificial Sequence: Synthetic oligonucleotide
  Antisense strand to SEQ ID NO: 565683
acagcuccucagaagauuc

SEQ ID NO: 565685 - RNA, 19 nt, Artificial Sequence
  Description of Artificial Sequence: Synthetic oligonucleotide
  Sense strand starting at position 2108 of SEQ ID NO: 318475
ccguuuaccuucucagaaa

SEQ ID NO: 565686 - RNA, 19 nt, Artificial Sequence
  Description of Artificial Sequence: Synthetic oligonucleotide
  Antisense strand to SEQ ID NO: 565685
uuucugagaagguaaacgg

SEQ ID NO: 565687 - RNA, 19 nt, Artificial Sequence
  Description of Artificial Sequence: Synthetic oligonucleotide
  Sense strand starting at position 2197 of SEQ ID NO: 318475
accgcauuuaucgaguagu

SEQ ID NO: 565688 - RNA, 19 nt, Artificial Sequence
  Description of Artificial Sequence: Synthetic oligonucleotide
  Antisense strand to SEQ ID NO: 565687
acuacucgauaaaugcggu

SEQ ID NO: 565689 - RNA, 19 nt, Artificial Sequence
  Description of Artificial Sequence: Synthetic oligonucleotide
  Sense strand starting at position 2203 of SEQ ID NO: 318475
uuuaucgaguaguuaggau

SEQ ID NO: 565690 - RNA, 19 nt, Artificial Sequence
  Description of Artificial Sequence: Synthetic oligonucleotide
  Antisense strand to SEQ ID NO: 565689
auccuaacuacucgauaaa

SEQ ID NO: 565691 - RNA, 19 nt, Artificial Sequence
  Description of Artificial Sequence: Synthetic oligonucleotide
  Sense strand starting at position 2235 of SEQ ID NO: 318475
ugauaaaugcucuacguaa

SEQ ID NO: 565692 - RNA, 19 nt, Artificial Sequence
  Description of Artificial Sequence: Synthetic oligonucleotide
  Antisense strand to SEQ ID NO: 565691
uuacguagagcauuuauca

SEQ ID NO: 565693 - RNA, 19 nt, Artificial Sequence
  Description of Artificial Sequence: Synthetic oligonucleotide
  Sense strand starting at position 2237 of SEQ ID NO: 318475
auaaaugcucuacguaaau

SEQ ID NO: 565694 - RNA, 19 nt, Artificial Sequence
  Description of Artificial Sequence: Synthetic oligonucleotide
  Antisense strand to SEQ ID NO: 565693
auuuacguagagcauuuau

SEQ ID NO: 565695 - RNA, 19 nt, Artificial Sequence
  Description of Artificial Sequence: Synthetic oligonucleotide
  Sense strand starting at position 2268 of SEQ ID NO: 318475
cuguaaucuuaugauuuag

SEQ ID NO: 565696 - RNA, 19 nt, Artificial Sequence
  Description of Artificial Sequence: Synthetic oligonucleotide
  Antisense strand to SEQ ID NO: 565695
cuaaaucauaagauuacag

SEQ ID NO: 565697 - RNA, 19 nt, Artificial Sequence
  Description of Artificial Sequence: Synthetic oligonucleotide
  Sense strand starting at position 2279 of SEQ ID NO: 318475
ugauuuagcuaccauuugu

SEQ ID NO: 565698 - RNA, 19 nt, Artificial Sequence
  Description of Artificial Sequence: Synthetic oligonucleotide
  Antisense strand to SEQ ID NO: 565697
acaaaugguagcuaaauca

SEQ ID NO: 565699 - RNA, 19 nt, Artificial Sequence
  Description of Artificial Sequence: Synthetic oligonucleotide
  Sense strand starting at position 2323 of SEQ ID NO: 318475
uugagacuuaggugcaaga

SEQ ID NO: 565700 - RNA, 19 nt, Artificial Sequence
  Description of Artificial Sequence: Synthetic oligonucleotide
  Antisense strand to SEQ ID NO: 565699
ucuugcaccuaagucucaa

SEQ ID NO: 565701 - RNA, 19 nt, Artificial Sequence
  Description of Artificial Sequence: Synthetic oligonucleotide
  Sense strand starting at position 2356 of SEQ ID NO: 318475
acaugauuaucgucaggcu

SEQ ID NO: 565702 - RNA, 19 nt, Artificial Sequence
  Description of Artificial Sequence: Synthetic oligonucleotide
  Antisense strand to SEQ ID NO: 565701
agccugacgauaaucaugu

SEQ ID NO: 565703 - RNA, 19 nt, Artificial Sequence
  Description of Artificial Sequence: Synthetic oligonucleotide
  Sense strand starting at position 2357 of SEQ ID NO: 318475
caugauuaucgucaggcua

SEQ ID NO: 565704 - RNA, 19 nt, Artificial Sequence
  Description of Artificial Sequence: Synthetic oligonucleotide
  Antisense strand to SEQ ID NO: 565703
uagccugacgauaaucaug

SEQ ID NO: 565705 - RNA, 19 nt, Artificial Sequence
  Description of Artificial Sequence: Synthetic oligonucleotide
  Sense strand starting at position 2920 of SEQ ID NO: 318475
gguguuucuugggugauga

SEQ ID NO: 565706 - RNA, 19 nt, Artificial Sequence
  Description of Artificial Sequence: Synthetic oligonucleotide
  Antisense strand to SEQ ID NO: 565705
ucaucacccaagaaacacc

SEQ ID NO: 565707 - RNA, 19 nt, Artificial Sequence
  Description of Artificial Sequence: Synthetic oligonucleotide
  Sense strand starting at position 2921 of SEQ ID NO: 318475
guguuucuugggugaugaa

SEQ ID NO: 565708 - RNA, 19 nt, Artificial Sequence
  Description of Artificial Sequence: Synthetic oligonucleotide
  Antisense strand to SEQ ID NO: 565707
uucaucacccaagaaacac

SEQ ID NO: 565709 - RNA, 19 nt, Artificial Sequence
  Description of Artificial Sequence: Synthetic oligonucleotide
  Sense strand starting at position 2922 of SEQ ID NO: 318475
uguuucuugggugaugaaa

SEQ ID NO: 565710 - RNA, 19 nt, Artificial Sequence
  Description of Artificial Sequence: Synthetic oligonucleotide
  Antisense strand to SEQ ID NO: 565709
uuucaucacccaagaaaca

SEQ ID NO: 565711 - RNA, 19 nt, Artificial Sequence
  Description of Artificial Sequence: Synthetic oligonucleotide
  Sense strand starting at position 2945 of SEQ ID NO: 318475
uguggaauuagagagcagu

SEQ ID NO: 565712 - RNA, 19 nt, Artificial Sequence
  Description of Artificial Sequence: Synthetic oligonucleotide
  Antisense strand to SEQ ID NO: 565711
acugcucucuaauuccaca

SEQ ID NO: 565713 - RNA, 19 nt, Artificial Sequence
  Description of Artificial Sequence: Synthetic oligonucleotide
  Sense strand starting at position 2958 of SEQ ID NO: 318475
agcagugauaguuguauaa

SEQ ID NO: 565714 - RNA, 19 nt, Artificial Sequence
  Description of Artificial Sequence: Synthetic oligonucleotide
  Antisense strand to SEQ ID NO: 565713
uuauacaacuaucacugcu

SEQ ID NO: 565715 - RNA, 19 nt, Artificial Sequence
  Description of Artificial Sequence: Synthetic oligonucleotide
  Sense strand starting at position 2973 of SEQ ID NO: 318475
auaacuuugugaguguacu

SEQ ID NO: 565716 - RNA, 19 nt, Artificial Sequence
  Description of Artificial Sequence: Synthetic oligonucleotide
  Antisense strand to SEQ ID NO: 565715
aguacacucacaaaguuau

SEQ ID NO: 565717 - RNA, 19 nt, Artificial Sequence
  Description of Artificial Sequence: Synthetic oligonucleotide
  Sense strand starting at position 2974 of SEQ ID NO: 318475
uaacuuugugaguguacua

SEQ ID NO: 565718 - RNA, 19 nt, Artificial Sequence
  Description of Artificial Sequence: Synthetic oligonucleotide
  Antisense strand to SEQ ID NO: 565717
uaguacacucacaaaguua

SEQ ID NO: 565719 - RNA, 19 nt, Artificial Sequence
  Description of Artificial Sequence: Synthetic oligonucleotide
  Sense strand starting at position 2981 of SEQ ID NO: 318475
gugaguguacuagaaacca

SEQ ID NO: 565720 - RNA, 19 nt, Artificial Sequence
  Description of Artificial Sequence: Synthetic oligonucleotide
  Antisense strand to SEQ ID NO: 565719
ugguuucuaguacacucac

SEQ ID NO: 565721 - RNA, 19 nt, Artificial Sequence
  Description of Artificial Sequence: Synthetic oligonucleotide
  Sense strand starting at position 3081 of SEQ ID NO: 318475
ccguucucagcgcuuaagu

SEQ ID NO: 565722 - RNA, 19 nt, Artificial Sequence
  Description of Artificial Sequence: Synthetic oligonucleotide
  Antisense strand to SEQ ID NO: 565721
acuuaagcgcugagaacgg

SEQ ID NO: 565723 - RNA, 19 nt, Artificial Sequence
  Description of Artificial Sequence: Synthetic oligonucleotide
  Sense strand starting at position 3089 of SEQ ID NO: 318475
agcgcuuaaguggaauaca

SEQ ID NO: 565724 - RNA, 19 nt, Artificial Sequence
  Description of Artificial Sequence: Synthetic oligonucleotide
  Antisense strand to SEQ ID NO: 565723
uguauuccacuuaagcgcu

SEQ ID NO: 565725 - RNA, 19 nt, Artificial Sequence
  Description of Artificial Sequence: Synthetic oligonucleotide
  Sense strand starting at position 3105 of SEQ ID NO: 318475
acagaaauguuggcuccuu

SEQ ID NO: 565726 - RNA, 19 nt, Artificial Sequence
  Description of Artificial Sequence: Synthetic oligonucleotide
  Antisense strand to SEQ ID NO: 565725
aaggagccaacauuucugu

SEQ ID NO: 565727 - RNA, 19 nt, Artificial Sequence
  Description of Artificial Sequence: Synthetic oligonucleotide
  Sense strand starting at position 3208 of SEQ ID NO: 318475
gaguaacuugcagagcuaa

SEQ ID NO: 565728 - RNA, 19 nt, Artificial Sequence
  Description of Artificial Sequence: Synthetic oligonucleotide
  Antisense strand to SEQ ID NO: 565727
uuagcucugcaaguuacuc

SEQ ID NO: 565729 - RNA, 19 nt, Artificial Sequence
  Description of Artificial Sequence: Synthetic oligonucleotide
  Sense strand starting at position 3363 of SEQ ID NO: 318475
ugcucuuaagaaugauaca

SEQ ID NO: 565730 - RNA, 19 nt, Artificial Sequence
  Description of Artificial Sequence: Synthetic oligonucleotide
  Antisense strand to SEQ ID NO: 565729
uguaucauucuuaagagca

SEQ ID NO: 565731 - RNA, 19 nt, Artificial Sequence
  Description of Artificial Sequence: Synthetic oligonucleotide
  Sense strand starting at position 3455 of SEQ ID NO: 318475
auacuacucgagugaugag

SEQ ID NO: 565732 - RNA, 19 nt, Artificial Sequence
  Description of Artificial Sequence: Synthetic oligonucleotide
  Antisense strand to SEQ ID NO: 565731
cucaucacucgaguaguau

SEQ ID NO: 565733 - RNA, 19 nt, Artificial Sequence
  Description of Artificial Sequence: Synthetic oligonucleotide
  Sense strand starting at position 3456 of SEQ ID NO: 318475
uacuacucgagugaugagu

SEQ ID NO: 565734 - RNA, 19 nt, Artificial Sequence
  Description of Artificial Sequence: Synthetic oligonucleotide
  Antisense strand to SEQ ID NO: 565733
acucaucacucgaguagua

SEQ ID NO: 565735 - RNA, 19 nt, Artificial Sequence
  Description of Artificial Sequence: Synthetic oligonucleotide
  Sense strand starting at position 3672 of SEQ ID NO: 318475
aauuauguaguuggucuua

SEQ ID NO: 565736 - RNA, 19 nt, Artificial Sequence
  Description of Artificial Sequence: Synthetic oligonucleotide
  Antisense strand to SEQ ID NO: 565735
uaagaccaacuacauaauu

SEQ ID NO: 565737 - RNA, 19 nt, Artificial Sequence
  Description of Artificial Sequence: Synthetic oligonucleotide
  Sense strand starting at position 3685 of SEQ ID NO: 318475
gucuuauacccaggagaga

SEQ ID NO: 565738 - RNA, 19 nt, Artificial Sequence
  Description of Artificial Sequence: Synthetic oligonucleotide
  Antisense strand to SEQ ID NO: 565737
ucucuccuggguauaagac

SEQ ID NO: 565739 - RNA, 19 nt, Artificial Sequence
  Description of Artificial Sequence: Synthetic oligonucleotide
  Sense strand starting at position 508 of SEQ ID NO: 318476
augaucacugcuuaaguca

SEQ ID NO: 565740 - RNA, 19 nt, Artificial Sequence
  Description of Artificial Sequence: Synthetic oligonucleotide
  Antisense strand to SEQ ID NO: 565739
ugacuuaagcagugaucau

SEQ ID NO: 565741 - RNA, 19 nt, Artificial Sequence
  Description of Artificial Sequence: Synthetic oligonucleotide
  Sense strand starting at position 594 of SEQ ID NO: 318476
gagccaugugguuaaagga

SEQ ID NO: 565742 - RNA, 19 nt, Artificial Sequence
  Description of Artificial Sequence: Synthetic oligonucleotide
  Antisense strand to SEQ ID NO: 565741
uccuuuaaccacauggcuc

SEQ ID NO: 565743 - RNA, 19 nt, Artificial Sequence
  Description of Artificial Sequence: Synthetic oligonucleotide
  Sense strand starting at position 837 of SEQ ID NO: 318476
augaauuaagccugccagu

SEQ ID NO: 565744 - RNA, 19 nt, Artificial Sequence
  Description of Artificial Sequence: Synthetic oligonucleotide
  Antisense strand to SEQ ID NO: 565743
acuggcaggcuuaauucau

SEQ ID NO: 565745 - RNA, 19 nt, Artificial Sequence
  Description of Artificial Sequence: Synthetic oligonucleotide
  Sense strand starting at position 853 of SEQ ID NO: 318476
aguggcacucaagguuaau

SEQ ID NO: 565746 - RNA, 19 nt, Artificial Sequence
  Description of Artificial Sequence: Synthetic oligonucleotide
  Antisense strand to SEQ ID NO: 565745
auuaaccuugagugccacu

SEQ ID NO: 565747 - RNA, 19 nt, Artificial Sequence
  Description of Artificial Sequence: Synthetic oligonucleotide
  Sense strand starting at position 934 of SEQ ID NO: 318476
uucuaaaugcuuuagagcu

SEQ ID NO: 565748 - RNA, 19 nt, Artificial Sequence
  Description of Artificial Sequence: Synthetic oligonucleotide
  Antisense strand to SEQ ID NO: 565747
agcucuaaagcauuuagaa

SEQ ID NO: 565749 - RNA, 19 nt, Artificial Sequence
  Description of Artificial Sequence: Synthetic oligonucleotide
  Sense strand starting at position 940 of SEQ ID NO: 318476
augcuuuagagcuaggcuu

SEQ ID NO: 565750 - RNA, 19 nt, Artificial Sequence
  Description of Artificial Sequence: Synthetic oligonucleotide
  Antisense strand to SEQ ID NO: 565749
aagccuagcucuaaagcau

SEQ ID NO: 565751 - RNA, 19 nt, Artificial Sequence
  Description of Artificial Sequence: Synthetic oligonucleotide
  Sense strand starting at position 979 of SEQ ID NO: 318476
aagggaguguggucuauag

SEQ ID NO: 565752 - RNA, 19 nt, Artificial Sequence
  Description of Artificial Sequence: Synthetic oligonucleotide
  Antisense strand to SEQ ID NO: 565751
cuauagaccacacucccuu

SEQ ID NO: 565753 - RNA, 19 nt, Artificial Sequence
  Description of Artificial Sequence: Synthetic oligonucleotide
  Sense strand starting at position 981 of SEQ ID NO: 318476
gggaguguggucuauagau

SEQ ID NO: 565754 - RNA, 19 nt, Artificial Sequence
  Description of Artificial Sequence: Synthetic oligonucleotide
  Antisense strand to SEQ ID NO: 565753
aucuauagaccacacuccc

SEQ ID NO: 565755 - RNA, 19 nt, Artificial Sequence
  Description of Artificial Sequence: Synthetic oligonucleotide
  Sense strand starting at position 987 of SEQ ID NO: 318476
guggucuauagaugggcua

SEQ ID NO: 565756 - RNA, 19 nt, Artificial Sequence
  Description of Artificial Sequence: Synthetic oligonucleotide
  Antisense strand to SEQ ID NO: 565755
uagcccaucuauagaccac

SEQ ID NO: 565757 - RNA, 19 nt, Artificial Sequence
  Description of Artificial Sequence: Synthetic oligonucleotide
  Sense strand starting at position 1073 of SEQ ID NO: 318476
cagauucucggauguguaa

SEQ ID NO: 565758 - RNA, 19 nt, Artificial Sequence
  Description of Artificial Sequence: Synthetic oligonucleotide
  Antisense strand to SEQ ID NO: 565757
uuacacauccgagaaucug

SEQ ID NO: 565759 - RNA, 19 nt, Artificial Sequence
  Description of Artificial Sequence: Synthetic oligonucleotide
  Sense strand starting at position 1075 of SEQ ID NO: 318476
gauucucggauguguaacu

SEQ ID NO: 565760 - RNA, 19 nt, Artificial Sequence
  Description of Artificial Sequence: Synthetic oligonucleotide
  Antisense strand to SEQ ID NO: 565759
aguuacacauccgagaauc

SEQ ID NO: 565761 - RNA, 19 nt, Artificial Sequence
  Description of Artificial Sequence: Synthetic oligonucleotide
  Sense strand starting at position 1293 of SEQ ID NO: 318476
guuaguguucuccaucuga

SEQ ID NO: 565762 - RNA, 19 nt, Artificial Sequence
  Description of Artificial Sequence: Synthetic oligonucleotide
  Antisense strand to SEQ ID NO: 565761
ucagauggagaacacuaac

SEQ ID NO: 565763 - RNA, 19 nt, Artificial Sequence
  Description of Artificial Sequence: Synthetic oligonucleotide
  Sense strand starting at position 1322 of SEQ ID NO: 318476
gaaucuucugaggagcugu

SEQ ID NO: 565764 - RNA, 19 nt, Artificial Sequence
  Description of Artificial Sequence: Synthetic oligonucleotide
  Antisense strand to SEQ ID NO: 565763
acagcuccucagaagauuc

SEQ ID NO: 565765 - RNA, 19 nt, Artificial Sequence
  Description of Artificial Sequence: Synthetic oligonucleotide
  Sense strand starting at position 2369 of SEQ ID NO: 318476
ccguuuaccuucucagaaa

SEQ ID NO: 565766 - RNA, 19 nt, Artificial Sequence
  Description of Artificial Sequence: Synthetic oligonucleotide
  Antisense strand to SEQ ID NO: 565765
uuucugagaagguaaacgg

SEQ ID NO: 565767 - RNA, 19 nt, Artificial Sequence
  Description of Artificial Sequence: Synthetic oligonucleotide
  Sense strand starting at position 2458 of SEQ ID NO: 318476
accgcauuuaucgaguagu

SEQ ID NO: 565768 - RNA, 19 nt, Artificial Sequence
  Description of Artificial Sequence: Synthetic oligonucleotide
  Antisense strand to SEQ ID NO: 565767
acuacucgauaaaugcggu

SEQ ID NO: 565769 - RNA, 19 nt, Artificial Sequence
  Description of Artificial Sequence: Synthetic oligonucleotide
  Sense strand starting at position 2464 of SEQ ID NO: 318476
uuuaucgaguaguuaggau

SEQ ID NO: 565770 - RNA, 19 nt, Artificial Sequence
  Description of Artificial Sequence: Synthetic oligonucleotide
  Antisense strand to SEQ ID NO: 565769
auccuaacuacucgauaaa

SEQ ID NO: 565771 - RNA, 19 nt, Artificial Sequence
  Description of Artificial Sequence: Synthetic oligonucleotide
  Sense strand starting at position 2496 of SEQ ID NO: 318476
ugauaaaugcucuacguaa

SEQ ID NO: 565772 - RNA, 19 nt, Artificial Sequence
  Description of Artificial Sequence: Synthetic oligonucleotide
  Antisense strand to SEQ ID NO: 565771
uuacguagagcauuuauca

SEQ ID NO: 565773 - RNA, 19 nt, Artificial Sequence
  Description of Artificial Sequence: Synthetic oligonucleotide
  Sense strand starting at position 2498 of SEQ ID NO: 318476
auaaaugcucuacguaaau

SEQ ID NO: 565774 - RNA, 19 nt, Artificial Sequence
  Description of Artificial Sequence: Synthetic oligonucleotide
  Antisense strand to SEQ ID NO: 565773
auuuacguagagcauuuau

SEQ ID NO: 565775 - RNA, 19 nt, Artificial Sequence
  Description of Artificial Sequence: Synthetic oligonucleotide
  Sense strand starting at position 2529 of SEQ ID NO: 318476
cuguaaucuuaugauuuag

SEQ ID NO: 565776 - RNA, 19 nt, Artificial Sequence
  Description of Artificial Sequence: Synthetic oligonucleotide
  Antisense strand to SEQ ID NO: 565775
cuaaaucauaagauuacag

SEQ ID NO: 565777 - RNA, 19 nt, Artificial Sequence
  Description of Artificial Sequence: Synthetic oligonucleotide
  Sense strand starting at position 2540 of SEQ ID NO: 318476
ugauuuagcuaccauuugu

SEQ ID NO: 565778 - RNA, 19 nt, Artificial Sequence
  Description of Artificial Sequence: Synthetic oligonucleotide
  Antisense strand to SEQ ID NO: 565777
acaaaugguagcuaaauca

SEQ ID NO: 565779 - RNA, 19 nt, Artificial Sequence
  Description of Artificial Sequence: Synthetic oligonucleotide
  Sense strand starting at position 2584 of SEQ ID NO: 318476
uugagacuuaggugcaaga

SEQ ID NO: 565780 - RNA, 19 nt, Artificial Sequence
  Description of Artificial Sequence: Synthetic oligonucleotide
  Antisense strand to SEQ ID NO: 565779
ucuugcaccuaagucucaa

SEQ ID NO: 565781 - RNA, 19 nt, Artificial Sequence
  Description of Artificial Sequence: Synthetic oligonucleotide
  Sense strand starting at position 2617 of SEQ ID NO: 318476
acaugauuaucgucaggcu

SEQ ID NO: 565782 - RNA, 19 nt, Artificial Sequence
  Description of Artificial Sequence: Synthetic oligonucleotide
  Antisense strand to SEQ ID NO: 565781
agccugacgauaaucaugu

SEQ ID NO: 565783 - RNA, 19 nt, Artificial Sequence
  Description of Artificial Sequence: Synthetic oligonucleotide
  Sense strand starting at position 2618 of SEQ ID NO: 318476
caugauuaucgucaggcua

SEQ ID NO: 565784 - RNA, 19 nt, Artificial Sequence
  Description of Artificial Sequence: Synthetic oligonucleotide
  Antisense strand to SEQ ID NO: 565783
uagccugacgauaaucaug

SEQ ID NO: 565785 - RNA, 19 nt, Artificial Sequence
  Description of Artificial Sequence: Synthetic oligonucleotide
  Sense strand starting at position 3181 of SEQ ID NO: 318476
gguguuucuugggugauga

SEQ ID NO: 565786 - RNA, 19 nt, Artificial Sequence
  Description of Artificial Sequence: Synthetic oligonucleotide
  Antisense strand to SEQ ID NO: 565785
ucaucacccaagaaacacc

SEQ ID NO: 565787 - RNA, 19 nt, Artificial Sequence
  Description of Artificial Sequence: Synthetic oligonucleotide
  Sense strand starting at position 3182 of SEQ ID NO: 318476
guguuucuugggugaugaa

SEQ ID NO: 565788 - RNA, 19 nt, Artificial Sequence
  Description of Artificial Sequence: Synthetic oligonucleotide
  Antisense strand to SEQ ID NO: 565787
uucaucacccaagaaacac

SEQ ID NO: 565789 - RNA, 19 nt, Artificial Sequence
  Description of Artificial Sequence: Synthetic oligonucleotide
  Sense strand starting at position 3183 of SEQ ID NO: 318476
uguuucuugggugaugaaa

SEQ ID NO: 565790 - RNA, 19 nt, Artificial Sequence
  Description of Artificial Sequence: Synthetic oligonucleotide
  Antisense strand to SEQ ID NO: 565789
uuucaucacccaagaaaca

SEQ ID NO: 565791 - RNA, 19 nt, Artificial Sequence
  Description of Artificial Sequence: Synthetic oligonucleotide
  Sense strand starting at position 3206 of SEQ ID NO: 318476
uguggaauuagagagcagu

SEQ ID NO: 565792 - RNA, 19 nt, Artificial Sequence
  Description of Artificial Sequence: Synthetic oligonucleotide
  Antisense strand to SEQ ID NO: 565791
acugcucucuaauuccaca

SEQ ID NO: 565793 - RNA, 19 nt, Artificial Sequence
  Description of Artificial Sequence: Synthetic oligonucleotide
  Sense strand starting at position 3219 of SEQ ID NO: 318476
agcagugauaguuguauaa

SEQ ID NO: 565794 - RNA, 19 nt, Artificial Sequence
  Description of Artificial Sequence: Synthetic oligonucleotide
  Antisense strand to SEQ ID NO: 565793
uuauacaacuaucacugcu

SEQ ID NO: 565795 - RNA, 19 nt, Artificial Sequence
  Description of Artificial Sequence: Synthetic oligonucleotide
  Sense strand starting at position 3234 of SEQ ID NO: 318476
auaacuuugugaguguacu

SEQ ID NO: 565796 - RNA, 19 nt, Artificial Sequence
  Description of Artificial Sequence: Synthetic oligonucleotide
  Antisense strand to SEQ ID NO: 565795
aguacacucacaaaguuau

SEQ ID NO: 565797 - RNA, 19 nt, Artificial Sequence
  Description of Artificial Sequence: Synthetic oligonucleotide
  Sense strand starting at position 3235 of SEQ ID NO: 318476
uaacuuugugaguguacua

SEQ ID NO: 565798 - RNA, 19 nt, Artificial Sequence
  Description of Artificial Sequence: Synthetic oligonucleotide
  Antisense strand to SEQ ID NO: 565797
uaguacacucacaaaguua

SEQ ID NO: 565799 - RNA, 19 nt, Artificial Sequence
  Description of Artificial Sequence: Synthetic oligonucleotide
  Sense strand starting at position 3242 of SEQ ID NO: 318476
gugaguguacuagaaacca

SEQ ID NO: 565800 - RNA, 19 nt, Artificial Sequence
  Description of Artificial Sequence: Synthetic oligonucleotide
  Antisense strand to SEQ ID NO: 565799
ugguuucuaguacacucac

SEQ ID NO: 565801 - RNA, 19 nt, Artificial Sequence
  Description of Artificial Sequence: Synthetic oligonucleotide
  Sense strand starting at position 3342 of SEQ ID NO: 318476
ccguucucagcgcuuaagu

SEQ ID NO: 565802 - RNA, 19 nt, Artificial Sequence
  Description of Artificial Sequence: Synthetic oligonucleotide
  Antisense strand to SEQ ID NO: 565801
acuuaagcgcugagaacgg

SEQ ID NO: 565803 - RNA, 19 nt, Artificial Sequence
  Description of Artificial Sequence: Synthetic oligonucleotide
  Sense strand starting at position 3350 of SEQ ID NO: 318476
agcgcuuaaguggaauaca

SEQ ID NO: 565804 - RNA, 19 nt, Artificial Sequence
  Description of Artificial Sequence: Synthetic oligonucleotide
  Antisense strand to SEQ ID NO: 565803
uguauuccacuuaagcgcu

SEQ ID NO: 565805 - RNA, 19 nt, Artificial Sequence
  Description of Artificial Sequence: Synthetic oligonucleotide
  Sense strand starting at position 3366 of SEQ ID NO: 318476
acagaaauguuggcuccuu

SEQ ID NO: 565806 - RNA, 19 nt, Artificial Sequence
  Description of Artificial Sequence: Synthetic oligonucleotide
  Antisense strand to SEQ ID NO: 565805
aaggagccaacauuucugu

SEQ ID NO: 565807 - RNA, 19 nt, Artificial Sequence
  Description of Artificial Sequence: Synthetic oligonucleotide
  Sense strand starting at position 3469 of SEQ ID NO: 318476
gaguaacuugcagagcuaa

SEQ ID NO: 565808 - RNA, 19 nt, Artificial Sequence
  Description of Artificial Sequence: Synthetic oligonucleotide
  Antisense strand to SEQ ID NO: 565807
uuagcucugcaaguuacuc

SEQ ID NO: 565809 - RNA, 19 nt, Artificial Sequence
  Description of Artificial Sequence: Synthetic oligonucleotide
  Sense strand starting at position 3624 of SEQ ID NO: 318476
ugcucuuaagaaugauaca

SEQ ID NO: 565810 - RNA, 19 nt, Artificial Sequence
  Description of Artificial Sequence: Synthetic oligonucleotide
  Antisense strand to SEQ ID NO: 565809
uguaucauucuuaagagca

SEQ ID NO: 565811 - RNA, 19 nt, Artificial Sequence
  Description of Artificial Sequence: Synthetic oligonucleotide
  Sense strand starting at position 3716 of SEQ ID NO: 318476
auacuacucgagugaugag

SEQ ID NO: 565812 - RNA, 19 nt, Artificial Sequence
  Description of Artificial Sequence: Synthetic oligonucleotide
  Antisense strand to SEQ ID NO: 565811
cucaucacucgaguaguau

SEQ ID NO: 565813 - RNA, 19 nt, Artificial Sequence
  Description of Artificial Sequence: Synthetic oligonucleotide
  Sense strand starting at position 3717 of SEQ ID NO: 318476
uacuacucgagugaugagu

SEQ ID NO: 565814 - RNA, 19 nt, Artificial Sequence
  Description of Artificial Sequence: Synthetic oligonucleotide
  Antisense strand to SEQ ID NO: 565813
acucaucacucgaguagua

SEQ ID NO: 565815 - RNA, 19 nt, Artificial Sequence
  Description of Artificial Sequence: Synthetic oligonucleotide
  Sense strand starting at position 3933 of SEQ ID NO: 318476
aauuauguaguuggucuua

SEQ ID NO: 565816 - RNA, 19 nt, Artificial Sequence
  Description of Artificial Sequence: Synthetic oligonucleotide
  Antisense strand to SEQ ID NO: 565815
uaagaccaacuacauaauu

SEQ ID NO: 565817 - RNA, 19 nt, Artificial Sequence
  Description of Artificial Sequence: Synthetic oligonucleotide
  Sense strand starting at position 3946 of SEQ ID NO: 318476
gucuuauacccaggagaga

SEQ ID NO: 565818 - RNA, 19 nt, Artificial Sequence
  Description of Artificial Sequence: Synthetic oligonucleotide
  Antisense strand to SEQ ID NO: 565817
ucucuccuggguauaagac

SEQ ID NO: 565819 - RNA, 19 nt, Artificial Sequence
  Description of Artificial Sequence: Synthetic oligonucleotide
  Sense strand starting at position 98 of SEQ ID NO: 318477
augcguuugaacuacagua

SEQ ID NO: 565820 - RNA, 19 nt, Artificial Sequence
  Description of Artificial Sequence: Synthetic oligonucleotide
  Antisense strand to SEQ ID NO: 565819
uacuguaguucaaacgcau

SEQ ID NO: 565821 - RNA, 19 nt, Artificial Sequence
  Description of Artificial Sequence: Synthetic oligonucleotide
  Sense strand starting at position 400 of SEQ ID NO: 318477
agcaguauuggagggagaa

SEQ ID NO: 565822 - RNA, 19 nt, Artificial Sequence
  Description of Artificial Sequence: Synthetic oligonucleotide
  Antisense strand to SEQ ID NO: 565821
uucucccuccaauacugcu

SEQ ID NO: 565823 - RNA, 19 nt, Artificial Sequence
  Description of Artificial Sequence: Synthetic oligonucleotide
  Sense strand starting at position 401 of SEQ ID NO: 318477
gcaguauuggagggagaag

SEQ ID NO: 565824 - RNA, 19 nt, Artificial Sequence
  Description of Artificial Sequence: Synthetic oligonucleotide
  Antisense strand to SEQ ID NO: 565823
cuucucccuccaauacugc

SEQ ID NO: 565825 - RNA, 19 nt, Artificial Sequence
  Description of Artificial Sequence: Synthetic oligonucleotide
  Sense strand starting at position 1014 of SEQ ID NO: 318477
ccuccaaugcuagggagaa

SEQ ID NO: 565826 - RNA, 19 nt, Artificial Sequence
  Description of Artificial Sequence: Synthetic oligonucleotide
  Antisense strand to SEQ ID NO: 565825
uucucccuagcauuggagg

SEQ ID NO: 565827 - RNA, 19 nt, Artificial Sequence
  Description of Artificial Sequence: Synthetic oligonucleotide
  Sense strand starting at position 1844 of SEQ ID NO: 318477
ggugcauucgcaguagcaa

SEQ ID NO: 565828 - RNA, 19 nt, Artificial Sequence
  Description of Artificial Sequence: Synthetic oligonucleotide
  Antisense strand to SEQ ID NO: 565827
uugcuacugcgaaugcacc

SEQ ID NO: 565829 - RNA, 19 nt, Artificial Sequence
  Description of Artificial Sequence: Synthetic oligonucleotide
  Sense strand starting at position 1976 of SEQ ID NO: 318477
ggaguaagugacuggauga

SEQ ID NO: 565830 - RNA, 19 nt, Artificial Sequence
  Description of Artificial Sequence: Synthetic oligonucleotide
  Antisense strand to SEQ ID NO: 565829
ucauccagucacuuacucc

SEQ ID NO: 565831 - RNA, 19 nt, Artificial Sequence
  Description of Artificial Sequence: Synthetic oligonucleotide
  Sense strand starting at position 1977 of SEQ ID NO: 318477
gaguaagugacuggaugaa

SEQ ID NO: 565832 - RNA, 19 nt, Artificial Sequence
  Description of Artificial Sequence: Synthetic oligonucleotide
  Antisense strand to SEQ ID NO: 565831
uucauccagucacuuacuc

SEQ ID NO: 565833 - RNA, 19 nt, Artificial Sequence
  Description of Artificial Sequence: Synthetic oligonucleotide
  Sense strand starting at position 1993 of SEQ ID NO: 318477
gaaugaaugcauuggaacu

SEQ ID NO: 565834 - RNA, 19 nt, Artificial Sequence
  Description of Artificial Sequence: Synthetic oligonucleotide
  Antisense strand to SEQ ID NO: 565833
aguuccaaugcauucauuc

SEQ ID NO: 565835 - RNA, 19 nt, Artificial Sequence
  Description of Artificial Sequence: Synthetic oligonucleotide
  Sense strand starting at position 2040 of SEQ ID NO: 318477
ucccaugguuugguacaaa

SEQ ID NO: 565836 - RNA, 19 nt, Artificial Sequence
  Description of Artificial Sequence: Synthetic oligonucleotide
  Antisense strand to SEQ ID NO: 565835
uuuguaccaaaccauggga

SEQ ID NO: 565837 - RNA, 19 nt, Artificial Sequence
  Description of Artificial Sequence: Synthetic oligonucleotide
  Sense strand starting at position 2103 of SEQ ID NO: 318477
cuugucuuggucuaagguu

SEQ ID NO: 565838 - RNA, 19 nt, Artificial Sequence
  Description of Artificial Sequence: Synthetic oligonucleotide
  Antisense strand to SEQ ID NO: 565837
aaccuuagaccaagacaag

SEQ ID NO: 565839 - RNA, 19 nt, Artificial Sequence
  Description of Artificial Sequence: Synthetic oligonucleotide
  Sense strand starting at position 2245 of SEQ ID NO: 318477
aggaacuguugcccagaau

SEQ ID NO: 565840 - RNA, 19 nt, Artificial Sequence
  Description of Artificial Sequence: Synthetic oligonucleotide
  Antisense strand to SEQ ID NO: 565839
auucugggcaacaguuccu

SEQ ID NO: 565841 - RNA, 19 nt, Artificial Sequence
  Description of Artificial Sequence: Synthetic oligonucleotide
  Sense strand starting at position 2246 of SEQ ID NO: 318477
ggaacuguugcccagaaua

SEQ ID NO: 565842 - RNA, 19 nt, Artificial Sequence
  Description of Artificial Sequence: Synthetic oligonucleotide
  Antisense strand to SEQ ID NO: 565841
uauucugggcaacaguucc

SEQ ID NO: 565843 - RNA, 19 nt, Artificial Sequence
  Description of Artificial Sequence: Synthetic oligonucleotide
  Sense strand starting at position 2523 of SEQ ID NO: 318477
cacccagugauggguaaga

SEQ ID NO: 565844 - RNA, 19 nt, Artificial Sequence
  Description of Artificial Sequence: Synthetic oligonucleotide
  Antisense strand to SEQ ID NO: 565843
ucuuacccaucacugggug

SEQ ID NO: 565845 - RNA, 19 nt, Artificial Sequence
  Description of Artificial Sequence: Synthetic oligonucleotide
  Sense strand starting at position 2555 of SEQ ID NO: 318477
cugggucaugcugaaauug

SEQ ID NO: 565846 - RNA, 19 nt, Artificial Sequence
  Description of Artificial Sequence: Synthetic oligonucleotide
  Antisense strand to SEQ ID NO: 565845
caauuucagcaugacccag

SEQ ID NO: 565847 - RNA, 19 nt, Artificial Sequence
  Description of Artificial Sequence: Synthetic oligonucleotide
  Sense strand starting at position 2608 of SEQ ID NO: 318477
aauguacuguaaucucgau

SEQ ID NO: 565848 - RNA, 19 nt, Artificial Sequence
  Description of Artificial Sequence: Synthetic oligonucleotide
  Antisense strand to SEQ ID NO: 565847
aucgagauuacaguacauu

SEQ ID NO: 565849 - RNA, 19 nt, Artificial Sequence
  Description of Artificial Sequence: Synthetic oligonucleotide
  Sense strand starting at position 2635 of SEQ ID NO: 318477
ugaggacccuccuuguaaa

SEQ ID NO: 565850 - RNA, 19 nt, Artificial Sequence
  Description of Artificial Sequence: Synthetic oligonucleotide
  Antisense strand to SEQ ID NO: 565849
uuuacaaggaggguccuca

SEQ ID NO: 565851 - RNA, 19 nt, Artificial Sequence
  Description of Artificial Sequence: Synthetic oligonucleotide
  Sense strand starting at position 2636 of SEQ ID NO: 318477
gaggacccuccuuguaaau

SEQ ID NO: 565852 - RNA, 19 nt, Artificial Sequence
  Description of Artificial Sequence: Synthetic oligonucleotide
  Antisense strand to SEQ ID NO: 565851
auuuacaaggaggguccuc

SEQ ID NO: 565853 - RNA, 19 nt, Artificial Sequence
  Description of Artificial Sequence: Synthetic oligonucleotide
  Sense strand starting at position 2670 of SEQ ID NO: 318477
cugcccuuugaaugguaaa

SEQ ID NO: 565854 - RNA, 19 nt, Artificial Sequence
  Description of Artificial Sequence: Synthetic oligonucleotide
  Antisense strand to SEQ ID NO: 565853
uuuaccauucaaagggcag

SEQ ID NO: 565855 - RNA, 19 nt, Artificial Sequence
  Description of Artificial Sequence: Synthetic oligonucleotide
  Sense strand starting at position 2708 of SEQ ID NO: 318477
uuguauccugcugaaauug

SEQ ID NO: 565856 - RNA, 19 nt, Artificial Sequence
  Description of Artificial Sequence: Synthetic oligonucleotide
  Antisense strand to SEQ ID NO: 565855
caauuucagcaggauacaa

SEQ ID NO: 565857 - RNA, 19 nt, Artificial Sequence
  Description of Artificial Sequence: Synthetic oligonucleotide
  Sense strand starting at position 2728 of SEQ ID NO: 318477
gaaagcaagcucuguauuu

SEQ ID NO: 565858 - RNA, 19 nt, Artificial Sequence
  Description of Artificial Sequence: Synthetic oligonucleotide
  Antisense strand to SEQ ID NO: 565857
aaauacagagcuugcuuuc

SEQ ID NO: 565859 - RNA, 19 nt, Artificial Sequence
  Description of Artificial Sequence: Synthetic oligonucleotide
  Sense strand starting at position 2751 of SEQ ID NO: 318477
aaugcaaucccuggaggua

SEQ ID NO: 565860 - RNA, 19 nt, Artificial Sequence
  Description of Artificial Sequence: Synthetic oligonucleotide
  Antisense strand to SEQ ID NO: 565859
uaccuccagggauugcauu

SEQ ID NO: 565861 - RNA, 19 nt, Artificial Sequence
  Description of Artificial Sequence: Synthetic oligonucleotide
  Sense strand starting at position 2752 of SEQ ID NO: 318477
augcaaucccuggagguau

SEQ ID NO: 565862 - RNA, 19 nt, Artificial Sequence
  Description of Artificial Sequence: Synthetic oligonucleotide
  Antisense strand to SEQ ID NO: 565861
auaccuccagggauugcau

SEQ ID NO: 565863 - RNA, 19 nt, Artificial Sequence
  Description of Artificial Sequence: Synthetic oligonucleotide
  Sense strand starting at position 2808 of SEQ ID NO: 318477
uuugauagcucuguaggaa

SEQ ID NO: 565864 - RNA, 19 nt, Artificial Sequence
  Description of Artificial Sequence: Synthetic oligonucleotide
  Antisense strand to SEQ ID NO: 565863
uuccuacagagcuaucaaa

SEQ ID NO: 565865 - RNA, 19 nt, Artificial Sequence
  Description of Artificial Sequence: Synthetic oligonucleotide
  Sense strand starting at position 2809 of SEQ ID NO: 318477
uugauagcucuguaggaau

SEQ ID NO: 565866 - RNA, 19 nt, Artificial Sequence
  Description of Artificial Sequence: Synthetic oligonucleotide
  Antisense strand to SEQ ID NO: 565865
auuccuacagagcuaucaa

SEQ ID NO: 565867 - RNA, 19 nt, Artificial Sequence
  Description of Artificial Sequence: Synthetic oligonucleotide
  Sense strand starting at position 2811 of SEQ ID NO: 318477
gauagcucuguaggaauca

SEQ ID NO: 565868 - RNA, 19 nt, Artificial Sequence
  Description of Artificial Sequence: Synthetic oligonucleotide
  Antisense strand to SEQ ID NO: 565867
ugauuccuacagagcuauc

SEQ ID NO: 565869 - RNA, 19 nt, Artificial Sequence
  Description of Artificial Sequence: Synthetic oligonucleotide
  Sense strand starting at position 2820 of SEQ ID NO: 318477
guaggaaucaaguguuuaa

SEQ ID NO: 565870 - RNA, 19 nt, Artificial Sequence
  Description of Artificial Sequence: Synthetic oligonucleotide
  Antisense strand to SEQ ID NO: 565869
uuaaacacuugauuccuac

SEQ ID NO: 565871 - RNA, 19 nt, Artificial Sequence
  Description of Artificial Sequence: Synthetic oligonucleotide
  Sense strand starting at position 2844 of SEQ ID NO: 318477
gugggaauuguguacauaa

SEQ ID NO: 565872 - RNA, 19 nt, Artificial Sequence
  Description of Artificial Sequence: Synthetic oligonucleotide
  Antisense strand to SEQ ID NO: 565871
uuauguacacaauucccac

SEQ ID NO: 565873 - RNA, 19 nt, Artificial Sequence
  Description of Artificial Sequence: Synthetic oligonucleotide
  Sense strand starting at position 2933 of SEQ ID NO: 318477
agugaugcaguucaugagu

SEQ ID NO: 565874 - RNA, 19 nt, Artificial Sequence
  Description of Artificial Sequence: Synthetic oligonucleotide
  Antisense strand to SEQ ID NO: 565873
acucaugaacugcaucacu

SEQ ID NO: 565875 - RNA, 19 nt, Artificial Sequence
  Description of Artificial Sequence: Synthetic oligonucleotide
  Sense strand starting at position 2954 of SEQ ID NO: 318477
cuuaaucuagccugguaag

SEQ ID NO: 565876 - RNA, 19 nt, Artificial Sequence
  Description of Artificial Sequence: Synthetic oligonucleotide
  Antisense strand to SEQ ID NO: 565875
cuuaccaggcuagauuaag

SEQ ID NO: 565877 - RNA, 19 nt, Artificial Sequence
  Description of Artificial Sequence: Synthetic oligonucleotide
  Sense strand starting at position 3068 of SEQ ID NO: 318477
uuuacaucugacugaguca

SEQ ID NO: 565878 - RNA, 19 nt, Artificial Sequence
  Description of Artificial Sequence: Synthetic oligonucleotide
  Antisense strand to SEQ ID NO: 565877
ugacucagucagauguaaa

SEQ ID NO: 565879 - RNA, 19 nt, Artificial Sequence
  Description of Artificial Sequence: Synthetic oligonucleotide
  Sense strand starting at position 3209 of SEQ ID NO: 318477
gaaguaugguugcuggauu

SEQ ID NO: 565880 - RNA, 19 nt, Artificial Sequence
  Description of Artificial Sequence: Synthetic oligonucleotide
  Antisense strand to SEQ ID NO: 565879
aauccagcaaccauacuuc

SEQ ID NO: 565881 - RNA, 19 nt, Artificial Sequence
  Description of Artificial Sequence: Synthetic oligonucleotide
  Sense strand starting at position 3566 of SEQ ID NO: 318477
ggaaguauucuggacuugu

SEQ ID NO: 565882 - RNA, 19 nt, Artificial Sequence
  Description of Artificial Sequence: Synthetic oligonucleotide
  Antisense strand to SEQ ID NO: 565881
acaaguccagaauacuucc

SEQ ID NO: 565883 - RNA, 19 nt, Artificial Sequence
  Description of Artificial Sequence: Synthetic oligonucleotide
  Sense strand starting at position 3679 of SEQ ID NO: 318477
ugguaaugaaaggguuacu

SEQ ID NO: 565884 - RNA, 19 nt, Artificial Sequence
  Description of Artificial Sequence: Synthetic oligonucleotide
  Antisense strand to SEQ ID NO: 565883
aguaacccuuucauuacca

SEQ ID NO: 565885 - RNA, 19 nt, Artificial Sequence
  Description of Artificial Sequence: Synthetic oligonucleotide
  Sense strand starting at position 3684 of SEQ ID NO: 318477
augaaaggguuacugcuau

SEQ ID NO: 565886 - RNA, 19 nt, Artificial Sequence
  Description of Artificial Sequence: Synthetic oligonucleotide
  Antisense strand to SEQ ID NO: 565885
auagcaguaacccuuucau

SEQ ID NO: 565887 - RNA, 19 nt, Artificial Sequence
  Description of Artificial Sequence: Synthetic oligonucleotide
  Sense strand starting at position 3711 of SEQ ID NO: 318477
ugcuaauccaguuauggga

SEQ ID NO: 565888 - RNA, 19 nt, Artificial Sequence
  Description of Artificial Sequence: Synthetic oligonucleotide
  Antisense strand to SEQ ID NO: 565887
ucccauaacuggauuagca

SEQ ID NO: 565889 - RNA, 19 nt, Artificial Sequence
  Description of Artificial Sequence: Synthetic oligonucleotide
  Sense strand starting at position 3742 of SEQ ID NO: 318477
gccagaagcagguaauuaa

SEQ ID NO: 565890 - RNA, 19 nt, Artificial Sequence
  Description of Artificial Sequence: Synthetic oligonucleotide
  Antisense strand to SEQ ID NO: 565889
uuaauuaccugcuucuggc

SEQ ID NO: 565891 - RNA, 19 nt, Artificial Sequence
  Description of Artificial Sequence: Synthetic oligonucleotide
  Sense strand starting at position 3815 of SEQ ID NO: 318477
ucgagagcagcucaaauaa

SEQ ID NO: 565892 - RNA, 19 nt, Artificial Sequence
  Description of Artificial Sequence: Synthetic oligonucleotide
  Antisense strand to SEQ ID NO: 565891
uuauuugagcugcucucga

SEQ ID NO: 565893 - RNA, 19 nt, Artificial Sequence
  Description of Artificial Sequence: Synthetic oligonucleotide
  Sense strand starting at position 3837 of SEQ ID NO: 318477
agcucaaucaaguguagag

SEQ ID NO: 565894 - RNA, 19 nt, Artificial Sequence
  Description of Artificial Sequence: Synthetic oligonucleotide
  Antisense strand to SEQ ID NO: 565893
cucuacacuugauugagcu

SEQ ID NO: 565895 - RNA, 19 nt, Artificial Sequence
  Description of Artificial Sequence: Synthetic oligonucleotide
  Sense strand starting at position 3918 of SEQ ID NO: 318477
ccuuaaguaccuggaagaa

SEQ ID NO: 565896 - RNA, 19 nt, Artificial Sequence
  Description of Artificial Sequence: Synthetic oligonucleotide
  Antisense strand to SEQ ID NO: 565895
uucuuccagguacuuaagg

SEQ ID NO: 565897 - RNA, 19 nt, Artificial Sequence
  Description of Artificial Sequence: Synthetic oligonucleotide
  Sense strand starting at position 3978 of SEQ ID NO: 318477
gaacuuacccagggugcua

SEQ ID NO: 565898 - RNA, 19 nt, Artificial Sequence
  Description of Artificial Sequence: Synthetic oligonucleotide
  Antisense strand to SEQ ID NO: 565897
uagcacccuggguaaguuc

SEQ ID NO: 565899 - RNA, 19 nt, Artificial Sequence
  Description of Artificial Sequence: Synthetic oligonucleotide
  Sense strand starting at position 2 of SEQ ID NO: 318478
ggucccgaaagcugucaau

SEQ ID NO: 565900 - RNA, 19 nt, Artificial Sequence
  Description of Artificial Sequence: Synthetic oligonucleotide
  Antisense strand to SEQ ID NO: 565899
auugacagcuuucgggacc

SEQ ID NO: 565901 - RNA, 19 nt, Artificial Sequence
  Description of Artificial Sequence: Synthetic oligonucleotide
  Sense strand starting at position 97 of SEQ ID NO: 318478
agaauuaaauacgcccaaa

SEQ ID NO: 565902 - RNA, 19 nt, Artificial Sequence
  Description of Artificial Sequence: Synthetic oligonucleotide
  Antisense strand to SEQ ID NO: 565901
uuugggcguauuuaauucu

SEQ ID NO: 565903 - RNA, 19 nt, Artificial Sequence
  Description of Artificial Sequence: Synthetic oligonucleotide
  Sense strand starting at position 133 of SEQ ID NO: 318478
ugcauuuauuucuauacgu

SEQ ID NO: 565904 - RNA, 19 nt, Artificial Sequence
  Description of Artificial Sequence: Synthetic oligonucleotide
  Antisense strand to SEQ ID NO: 565903
acguauagaaauaaaugca

SEQ ID NO: 565905 - RNA, 19 nt, Artificial Sequence
  Description of Artificial Sequence: Synthetic oligonucleotide
  Sense strand starting at position 143 of SEQ ID NO: 318478
ucuauacgugaauguuauu

SEQ ID NO: 565906 - RNA, 19 nt, Artificial Sequence
  Description of Artificial Sequence: Synthetic oligonucleotide
  Antisense strand to SEQ ID NO: 565905
aauaacauucacguauaga

SEQ ID NO: 565907 - RNA, 19 nt, Artificial Sequence
  Description of Artificial Sequence: Synthetic oligonucleotide
  Sense strand starting at position 174 of SEQ ID NO: 318478
uggcaagcuggucauguau

SEQ ID NO: 565908 - RNA, 19 nt, Artificial Sequence
  Description of Artificial Sequence: Synthetic oligonucleotide
  Antisense strand to SEQ ID NO: 565907
auacaugaccagcuugcca

SEQ ID NO: 565909 - RNA, 19 nt, Artificial Sequence
  Description of Artificial Sequence: Synthetic oligonucleotide
  Sense strand starting at position 284 of SEQ ID NO: 318478
agcacaugauaguuaucaa

SEQ ID NO: 565910 - RNA, 19 nt, Artificial Sequence
  Description of Artificial Sequence: Synthetic oligonucleotide
  Antisense strand to SEQ ID NO: 565909
uugauaacuaucaugugcu

SEQ ID NO: 565911 - RNA, 19 nt, Artificial Sequence
  Description of Artificial Sequence: Synthetic oligonucleotide
  Sense strand starting at position 495 of SEQ ID NO: 318478
uuuauccuguuccagauuu

SEQ ID NO: 565912 - RNA, 19 nt, Artificial Sequence
  Description of Artificial Sequence: Synthetic oligonucleotide
  Antisense strand to SEQ ID NO: 565911
aaaucuggaacaggauaaa

SEQ ID NO: 565913 - RNA, 19 nt, Artificial Sequence
  Description of Artificial Sequence: Synthetic oligonucleotide
  Sense strand starting at position 526 of SEQ ID NO: 318478
ggcuaaucagcauauccua

SEQ ID NO: 565914 - RNA, 19 nt, Artificial Sequence
  Description of Artificial Sequence: Synthetic oligonucleotide
  Antisense strand to SEQ ID NO: 565913
uaggauaugcugauuagcc

SEQ ID NO: 565915 - RNA, 19 nt, Artificial Sequence
  Description of Artificial Sequence: Synthetic oligonucleotide
  Sense strand starting at position 734 of SEQ ID NO: 318478
cugggaaaguaauauccaa

SEQ ID NO: 565916 - RNA, 19 nt, Artificial Sequence
  Description of Artificial Sequence: Synthetic oligonucleotide
  Antisense strand to SEQ ID NO: 565915
uuggauauuacuuucccag

SEQ ID NO: 565917 - RNA, 19 nt, Artificial Sequence
  Description of Artificial Sequence: Synthetic oligonucleotide
  Sense strand starting at position 752 of SEQ ID NO: 318478
acaugaugugucugcaggu

SEQ ID NO: 565918 - RNA, 19 nt, Artificial Sequence
  Description of Artificial Sequence: Synthetic oligonucleotide
  Antisense strand to SEQ ID NO: 565917
accugcagacacaucaugu

SEQ ID NO: 565919 - RNA, 19 nt, Artificial Sequence
  Description of Artificial Sequence: Synthetic oligonucleotide
  Sense strand starting at position 753 of SEQ ID NO: 318478
caugaugugucugcaggua

SEQ ID NO: 565920 - RNA, 19 nt, Artificial Sequence
  Description of Artificial Sequence: Synthetic oligonucleotide
  Antisense strand to SEQ ID NO: 565919
uaccugcagacacaucaug

SEQ ID NO: 565921 - RNA, 19 nt, Artificial Sequence
  Description of Artificial Sequence: Synthetic oligonucleotide
  Sense strand starting at position 758 of SEQ ID NO: 318478
ugugucugcagguaacaua

SEQ ID NO: 565922 - RNA, 19 nt, Artificial Sequence
  Description of Artificial Sequence: Synthetic oligonucleotide
  Antisense strand to SEQ ID NO: 565921
uauguuaccugcagacaca

SEQ ID NO: 565923 - RNA, 19 nt, Artificial Sequence
  Description of Artificial Sequence: Synthetic oligonucleotide
  Sense strand starting at position 891 of SEQ ID NO: 318478
aggagaccucaaugaguuc

SEQ ID NO: 565924 - RNA, 19 nt, Artificial Sequence
  Description of Artificial Sequence: Synthetic oligonucleotide
  Antisense strand to SEQ ID NO: 565923
gaacucauugaggucuccu

SEQ ID NO: 565925 - RNA, 19 nt, Artificial Sequence
  Description of Artificial Sequence: Synthetic oligonucleotide
  Sense strand starting at position 935 of SEQ ID NO: 318478
agcagcaauccguaauuau

SEQ ID NO: 565926 - RNA, 19 nt, Artificial Sequence
  Description of Artificial Sequence: Synthetic oligonucleotide
  Antisense strand to SEQ ID NO: 565925
auaauuacggauugcugcu

SEQ ID NO: 565927 - RNA, 19 nt, Artificial Sequence
  Description of Artificial Sequence: Synthetic oligonucleotide
  Sense strand starting at position 938 of SEQ ID NO: 318478
agcaauccguaauuaugaa

SEQ ID NO: 565928 - RNA, 19 nt, Artificial Sequence
  Description of Artificial Sequence: Synthetic oligonucleotide
  Antisense strand to SEQ ID NO: 565927
uucauaauuacggauugcu

SEQ ID NO: 565929 - RNA, 19 nt, Artificial Sequence
  Description of Artificial Sequence: Synthetic oligonucleotide
  Sense strand starting at position 962 of SEQ ID NO: 318478
uaaugucuuguagaaguau

SEQ ID NO: 565930 - RNA, 19 nt, Artificial Sequence
  Description of Artificial Sequence: Synthetic oligonucleotide
  Antisense strand to SEQ ID NO: 565929
auacuucuacaagacauua

SEQ ID NO: 565931 - RNA, 19 nt, Artificial Sequence
  Description of Artificial Sequence: Synthetic oligonucleotide
  Sense strand starting at position 976 of SEQ ID NO: 318478
aguauaaugcuguacaguu

SEQ ID NO: 565932 - RNA, 19 nt, Artificial Sequence
  Description of Artificial Sequence: Synthetic oligonucleotide
  Antisense strand to SEQ ID NO: 565931
aacuguacagcauuauacu

SEQ ID NO: 565933 - RNA, 19 nt, Artificial Sequence
  Description of Artificial Sequence: Synthetic oligonucleotide
  Sense strand starting at position 1085 of SEQ ID NO: 318478
ccaaacaaaucguccugaa

SEQ ID NO: 565934 - RNA, 19 nt, Artificial Sequence
  Description of Artificial Sequence: Synthetic oligonucleotide
  Antisense strand to SEQ ID NO: 565933
uucaggacgauuuguuugg

SEQ ID NO: 565935 - RNA, 19 nt, Artificial Sequence
  Description of Artificial Sequence: Synthetic oligonucleotide
  Sense strand starting at position 1130 of SEQ ID NO: 318478
acagcuaaucucugaagaa

SEQ ID NO: 565936 - RNA, 19 nt, Artificial Sequence
  Description of Artificial Sequence: Synthetic oligonucleotide
  Antisense strand to SEQ ID NO: 565935
uucuucagagauuagcugu

SEQ ID NO: 565937 - RNA, 19 nt, Artificial Sequence
  Description of Artificial Sequence: Synthetic oligonucleotide
  Sense strand starting at position 1425 of SEQ ID NO: 318478
ucgggcuguccaucgguua

SEQ ID NO: 565938 - RNA, 19 nt, Artificial Sequence
  Description of Artificial Sequence: Synthetic oligonucleotide
  Antisense strand to SEQ ID NO: 565937
uaaccgauggacagcccga

SEQ ID NO: 565939 - RNA, 19 nt, Artificial Sequence
  Description of Artificial Sequence: Synthetic oligonucleotide
  Sense strand starting at position 1445 of SEQ ID NO: 318478
gaugguaggccucacugaa

SEQ ID NO: 565940 - RNA, 19 nt, Artificial Sequence
  Description of Artificial Sequence: Synthetic oligonucleotide
  Antisense strand to SEQ ID NO: 565939
uucagugaggccuaccauc

SEQ ID NO: 565941 - RNA, 19 nt, Artificial Sequence
  Description of Artificial Sequence: Synthetic oligonucleotide
  Sense strand starting at position 1618 of SEQ ID NO: 318478
uguaccugaucuccacaua

SEQ ID NO: 565942 - RNA, 19 nt, Artificial Sequence
  Description of Artificial Sequence: Synthetic oligonucleotide
  Antisense strand to SEQ ID NO: 565941
uauguggagaucagguaca

SEQ ID NO: 565943 - RNA, 19 nt, Artificial Sequence
  Description of Artificial Sequence: Synthetic oligonucleotide
  Sense strand starting at position 1641 of SEQ ID NO: 318478
acuagcaauucugugguuu

SEQ ID NO: 565944 - RNA, 19 nt, Artificial Sequence
  Description of Artificial Sequence: Synthetic oligonucleotide
  Antisense strand to SEQ ID NO: 565943
aaaccacagaauugcuagu

SEQ ID NO: 565945 - RNA, 19 nt, Artificial Sequence
  Description of Artificial Sequence: Synthetic oligonucleotide
  Sense strand starting at position 1685 of SEQ ID NO: 318478
cagggagucuacucugaau

SEQ ID NO: 565946 - RNA, 19 nt, Artificial Sequence
  Description of Artificial Sequence: Synthetic oligonucleotide
  Antisense strand to SEQ ID NO: 565945
auucagaguagacucccug

SEQ ID NO: 565947 - RNA, 19 nt, Artificial Sequence
  Description of Artificial Sequence: Synthetic oligonucleotide
  Sense strand starting at position 1687 of SEQ ID NO: 318478
gggagucuacucugaauac

SEQ ID NO: 565948 - RNA, 19 nt, Artificial Sequence
  Description of Artificial Sequence: Synthetic oligonucleotide
  Antisense strand to SEQ ID NO: 565947
guauucagaguagacuccc

SEQ ID NO: 565949 - RNA, 19 nt, Artificial Sequence
  Description of Artificial Sequence: Synthetic oligonucleotide
  Sense strand starting at position 1895 of SEQ ID NO: 318478
agacuaguuuccucuuuac

SEQ ID NO: 565950 - RNA, 19 nt, Artificial Sequence
  Description of Artificial Sequence: Synthetic oligonucleotide
  Antisense strand to SEQ ID NO: 565949
guaaagaggaaacuagucu

SEQ ID NO: 565951 - RNA, 19 nt, Artificial Sequence
  Description of Artificial Sequence: Synthetic oligonucleotide
  Sense strand starting at position 2010 of SEQ ID NO: 318478
agaucucagaugcguuuga

SEQ ID NO: 565952 - RNA, 19 nt, Artificial Sequence
  Description of Artificial Sequence: Synthetic oligonucleotide
  Antisense strand to SEQ ID NO: 565951
ucaaacgcaucugagaucu

SEQ ID NO: 565953 - RNA, 19 nt, Artificial Sequence
  Description of Artificial Sequence: Synthetic oligonucleotide
  Sense strand starting at position 2011 of SEQ ID NO: 318478
gaucucagaugcguuugaa

SEQ ID NO: 565954 - RNA, 19 nt, Artificial Sequence
  Description of Artificial Sequence: Synthetic oligonucleotide
  Antisense strand to SEQ ID NO: 565953
uucaaacgcaucugagauc

SEQ ID NO: 565955 - RNA, 19 nt, Artificial Sequence
  Description of Artificial Sequence: Synthetic oligonucleotide
  Sense strand starting at position 2014 of SEQ ID NO: 318478
cucagaugcguuugaacua

SEQ ID NO: 565956 - RNA, 19 nt, Artificial Sequence
  Description of Artificial Sequence: Synthetic oligonucleotide
  Antisense strand to SEQ ID NO: 565955
uaguucaaacgcaucugag

SEQ ID NO: 565957 - RNA, 19 nt, Artificial Sequence
  Description of Artificial Sequence: Synthetic oligonucleotide
  Sense strand starting at position 2019 of SEQ ID NO: 318478
augcguuugaacuacagua

SEQ ID NO: 565958 - RNA, 19 nt, Artificial Sequence
  Description of Artificial Sequence: Synthetic oligonucleotide
  Antisense strand to SEQ ID NO: 565957
uacuguaguucaaacgcau

SEQ ID NO: 565959 - RNA, 19 nt, Artificial Sequence
  Description of Artificial Sequence: Synthetic oligonucleotide
  Sense strand starting at position 2267 of SEQ ID NO: 318478
gggaacucauuccagaaag

SEQ ID NO: 565960 - RNA, 19 nt, Artificial Sequence
  Description of Artificial Sequence: Synthetic oligonucleotide
  Antisense strand to SEQ ID NO: 565959
cuuucuggaaugaguuccc

SEQ ID NO: 565961 - RNA, 19 nt, Artificial Sequence
  Description of Artificial Sequence: Synthetic oligonucleotide
  Sense strand starting at position 2321 of SEQ ID NO: 318478
agcaguauuggagggagaa

SEQ ID NO: 565962 - RNA, 19 nt, Artificial Sequence
  Description of Artificial Sequence: Synthetic oligonucleotide
  Antisense strand to SEQ ID NO: 565961
uucucccuccaauacugcu

SEQ ID NO: 565963 - RNA, 19 nt, Artificial Sequence
  Description of Artificial Sequence: Synthetic oligonucleotide
  Sense strand starting at position 2322 of SEQ ID NO: 318478
gcaguauuggagggagaag

SEQ ID NO: 565964 - RNA, 19 nt, Artificial Sequence
  Description of Artificial Sequence: Synthetic oligonucleotide
  Antisense strand to SEQ ID NO: 565963
cuucucccuccaauacugc

SEQ ID NO: 565965 - RNA, 19 nt, Artificial Sequence
  Description of Artificial Sequence: Synthetic oligonucleotide
  Sense strand starting at position 2935 of SEQ ID NO: 318478
ccuccaaugcuagggagaa

SEQ ID NO: 565966 - RNA, 19 nt, Artificial Sequence
  Description of Artificial Sequence: Synthetic oligonucleotide
  Antisense strand to SEQ ID NO: 565965
uucucccuagcauuggagg

SEQ ID NO: 565967 - RNA, 19 nt, Artificial Sequence
  Description of Artificial Sequence: Synthetic oligonucleotide
  Sense strand starting at position 3765 of SEQ ID NO: 318478
ggugcauucgcaguagcaa

SEQ ID NO: 565968 - RNA, 19 nt, Artificial Sequence
  Description of Artificial Sequence: Synthetic oligonucleotide
  Antisense strand to SEQ ID NO: 565967
uugcuacugcgaaugcacc

SEQ ID NO: 565969 - RNA, 19 nt, Artificial Sequence
  Description of Artificial Sequence: Synthetic oligonucleotide
  Sense strand starting at position 3777 of SEQ ID NO: 318478
guagcaaugaugcgagaau

SEQ ID NO: 565970 - RNA, 19 nt, Artificial Sequence
  Description of Artificial Sequence: Synthetic oligonucleotide
  Antisense strand to SEQ ID NO: 565969
auucucgcaucauugcuac

SEQ ID NO: 565971 - RNA, 19 nt, Artificial Sequence
  Description of Artificial Sequence: Synthetic oligonucleotide
  Sense strand starting at position 3897 of SEQ ID NO: 318478
ggaguaagugacuggauga

SEQ ID NO: 565972 - RNA, 19 nt, Artificial Sequence
  Description of Artificial Sequence: Synthetic oligonucleotide
  Antisense strand to SEQ ID NO: 565971
ucauccagucacuuacucc

SEQ ID NO: 565973 - RNA, 19 nt, Artificial Sequence
  Description of Artificial Sequence: Synthetic oligonucleotide
  Sense strand starting at position 3898 of SEQ ID NO: 318478
gaguaagugacuggaugaa

SEQ ID NO: 565974 - RNA, 19 nt, Artificial Sequence
  Description of Artificial Sequence: Synthetic oligonucleotide
  Antisense strand to SEQ ID NO: 565973
uucauccagucacuuacuc

SEQ ID NO: 565975 - RNA, 19 nt, Artificial Sequence
  Description of Artificial Sequence: Synthetic oligonucleotide
  Sense strand starting at position 3914 of SEQ ID NO: 318478
gaaugaaugcauuggaacu

SEQ ID NO: 565976 - RNA, 19 nt, Artificial Sequence
  Description of Artificial Sequence: Synthetic oligonucleotide
  Antisense strand to SEQ ID NO: 565975
aguuccaaugcauucauuc

SEQ ID NO: 565977 - RNA, 19 nt, Artificial Sequence
  Description of Artificial Sequence: Synthetic oligonucleotide
  Sense strand starting at position 3961 of SEQ ID NO: 318478
ucccaugguuugguacaaa

SEQ ID NO: 565978 - RNA, 19 nt, Artificial Sequence
  Description of Artificial Sequence: Synthetic oligonucleotide
  Antisense strand to SEQ ID NO: 565977
uuuguaccaaaccauggga

SEQ ID NO: 565979 - RNA, 19 nt, Artificial Sequence
  Description of Artificial Sequence: Synthetic oligonucleotide
  Sense strand starting at position 128 of SEQ ID NO: 318479
aggagcuauuacugauuua

SEQ ID NO: 565980 - RNA, 19 nt, Artificial Sequence
  Description of Artificial Sequence: Synthetic oligonucleotide
  Antisense strand to SEQ ID NO: 565979
uaaaucaguaauagcuccu

SEQ ID NO: 565981 - RNA, 19 nt, Artificial Sequence
  Description of Artificial Sequence: Synthetic oligonucleotide
  Sense strand starting at position 367 of SEQ ID NO: 318479
aguccauuagcagaauggu

SEQ ID NO: 565982 - RNA, 19 nt, Artificial Sequence
  Description of Artificial Sequence: Synthetic oligonucleotide
  Antisense strand to SEQ ID NO: 565981
accauucugcuaauggacu

SEQ ID NO: 565983 - RNA, 19 nt, Artificial Sequence
  Description of Artificial Sequence: Synthetic oligonucleotide
  Sense strand starting at position 370 of SEQ ID NO: 318479
ccauuagcagaaugguaca

SEQ ID NO: 565984 - RNA, 19 nt, Artificial Sequence
  Description of Artificial Sequence: Synthetic oligonucleotide
  Antisense strand to SEQ ID NO: 565983
uguaccauucugcuaaugg

SEQ ID NO: 565985 - RNA, 19 nt, Artificial Sequence
  Description of Artificial Sequence: Synthetic oligonucleotide
  Sense strand starting at position 383 of SEQ ID NO: 318479
gguacauguucccucuuua

SEQ ID NO: 565986 - RNA, 19 nt, Artificial Sequence
  Description of Artificial Sequence: Synthetic oligonucleotide
  Antisense strand to SEQ ID NO: 565985
uaaagagggaacauguacc

SEQ ID NO: 565987 - RNA, 19 nt, Artificial Sequence
  Description of Artificial Sequence: Synthetic oligonucleotide
  Sense strand starting at position 486 of SEQ ID NO: 318479
ggucccgaaagcugucaau

SEQ ID NO: 565988 - RNA, 19 nt, Artificial Sequence
  Description of Artificial Sequence: Synthetic oligonucleotide
  Antisense strand to SEQ ID NO: 565987
auugacagcuuucgggacc

SEQ ID NO: 565989 - RNA, 19 nt, Artificial Sequence
  Description of Artificial Sequence: Synthetic oligonucleotide
  Sense strand starting at position 581 of SEQ ID NO: 318479
agaauuaaauacgcccaaa

SEQ ID NO: 565990 - RNA, 19 nt, Artificial Sequence
  Description of Artificial Sequence: Synthetic oligonucleotide
  Antisense strand to SEQ ID NO: 565989
uuugggcguauuuaauucu

SEQ ID NO: 565991 - RNA, 19 nt, Artificial Sequence
  Description of Artificial Sequence: Synthetic oligonucleotide
  Sense strand starting at position 617 of SEQ ID NO: 318479
ugcauuuauuucuauacgu

SEQ ID NO: 565992 - RNA, 19 nt, Artificial Sequence
  Description of Artificial Sequence: Synthetic oligonucleotide
  Antisense strand to SEQ ID NO: 565991
acguauagaaauaaaugca

SEQ ID NO: 565993 - RNA, 19 nt, Artificial Sequence
  Description of Artificial Sequence: Synthetic oligonucleotide
  Sense strand starting at position 627 of SEQ ID NO: 318479
ucuauacgugaauguuauu

SEQ ID NO: 565994 - RNA, 19 nt, Artificial Sequence
  Description of Artificial Sequence: Synthetic oligonucleotide
  Antisense strand to SEQ ID NO: 565993
aauaacauucacguauaga

SEQ ID NO: 565995 - RNA, 19 nt, Artificial Sequence
  Description of Artificial Sequence: Synthetic oligonucleotide
  Sense strand starting at position 658 of SEQ ID NO: 318479
uggcaagcuggucauguau

SEQ ID NO: 565996 - RNA, 19 nt, Artificial Sequence
  Description of Artificial Sequence: Synthetic oligonucleotide
  Antisense strand to SEQ ID NO: 565995
auacaugaccagcuugcca

SEQ ID NO: 565997 - RNA, 19 nt, Artificial Sequence
  Description of Artificial Sequence: Synthetic oligonucleotide
  Sense strand starting at position 768 of SEQ ID NO: 318479
agcacaugauaguuaucaa

SEQ ID NO: 565998 - RNA, 19 nt, Artificial Sequence
  Description of Artificial Sequence: Synthetic oligonucleotide
  Antisense strand to SEQ ID NO: 565997
uugauaacuaucaugugcu

SEQ ID NO: 565999 - RNA, 19 nt, Artificial Sequence
  Description of Artificial Sequence: Synthetic oligonucleotide
  Sense strand starting at position 979 of SEQ ID NO: 318479
uuuauccuguuccagauuu

SEQ ID NO: 566000 - RNA, 19 nt, Artificial Sequence
  Description of Artificial Sequence: Synthetic oligonucleotide
  Antisense strand to SEQ ID NO: 565999
aaaucuggaacaggauaaa

SEQ ID NO: 566001 - RNA, 19 nt, Artificial Sequence
  Description of Artificial Sequence: Synthetic oligonucleotide
  Sense strand starting at position 1010 of SEQ ID NO: 318479
ggcuaaucagcauauccua

SEQ ID NO: 566002 - RNA, 19 nt, Artificial Sequence
  Description of Artificial Sequence: Synthetic oligonucleotide
  Antisense strand to SEQ ID NO: 566001
uaggauaugcugauuagcc

SEQ ID NO: 566003 - RNA, 19 nt, Artificial Sequence
  Description of Artificial Sequence: Synthetic oligonucleotide
  Sense strand starting at position 1218 of SEQ ID NO: 318479
cugggaaaguaauauccaa

SEQ ID NO: 566004 - RNA, 19 nt, Artificial Sequence
  Description of Artificial Sequence: Synthetic oligonucleotide
  Antisense strand to SEQ ID NO: 566003
uuggauauuacuuucccag

SEQ ID NO: 566005 - RNA, 19 nt, Artificial Sequence
  Description of Artificial Sequence: Synthetic oligonucleotide
  Sense strand starting at position 1236 of SEQ ID NO: 318479
acaugaugugucugcaggu

SEQ ID NO: 566006 - RNA, 19 nt, Artificial Sequence
  Description of Artificial Sequence: Synthetic oligonucleotide
  Antisense strand to SEQ ID NO: 566005
accugcagacacaucaugu

SEQ ID NO: 566007 - RNA, 19 nt, Artificial Sequence
  Description of Artificial Sequence: Synthetic oligonucleotide
  Sense strand starting at position 1237 of SEQ ID NO: 318479
caugaugugucugcaggua

SEQ ID NO: 566008 - RNA, 19 nt, Artificial Sequence
  Description of Artificial Sequence: Synthetic oligonucleotide
  Antisense strand to SEQ ID NO: 566007
uaccugcagacacaucaug

SEQ ID NO: 566009 - RNA, 19 nt, Artificial Sequence
  Description of Artificial Sequence: Synthetic oligonucleotide
  Sense strand starting at position 1242 of SEQ ID NO: 318479
ugugucugcagguaacaua

SEQ ID NO: 566010 - RNA, 19 nt, Artificial Sequence
  Description of Artificial Sequence: Synthetic oligonucleotide
  Antisense strand to SEQ ID NO: 566009
uauguuaccugcagacaca

SEQ ID NO: 566011 - RNA, 19 nt, Artificial Sequence
  Description of Artificial Sequence: Synthetic oligonucleotide
  Sense strand starting at position 1375 of SEQ ID NO: 318479
aggagaccucaaugaguuc

SEQ ID NO: 566012 - RNA, 19 nt, Artificial Sequence
  Description of Artificial Sequence: Synthetic oligonucleotide
  Antisense strand to SEQ ID NO: 566011
gaacucauugaggucuccu

SEQ ID NO: 566013 - RNA, 19 nt, Artificial Sequence
  Description of Artificial Sequence: Synthetic oligonucleotide
  Sense strand starting at position 1419 of SEQ ID NO: 318479
agcagcaauccguaauuau

SEQ ID NO: 566014 - RNA, 19 nt, Artificial Sequence
  Description of Artificial Sequence: Synthetic oligonucleotide
  Antisense strand to SEQ ID NO: 566013
auaauuacggauugcugcu

SEQ ID NO: 566015 - RNA, 19 nt, Artificial Sequence
  Description of Artificial Sequence: Synthetic oligonucleotide
  Sense strand starting at position 1422 of SEQ ID NO: 318479
agcaauccguaauuaugaa

SEQ ID NO: 566016 - RNA, 19 nt, Artificial Sequence
  Description of Artificial Sequence: Synthetic oligonucleotide
  Antisense strand to SEQ ID NO: 566015
uucauaauuacggauugcu

SEQ ID NO: 566017 - RNA, 19 nt, Artificial Sequence
  Description of Artificial Sequence: Synthetic oligonucleotide
  Sense strand starting at position 1446 of SEQ ID NO: 318479
uaaugucuuguagaaguau

SEQ ID NO: 566018 - RNA, 19 nt, Artificial Sequence
  Description of Artificial Sequence: Synthetic oligonucleotide
  Antisense strand to SEQ ID NO: 566017
auacuucuacaagacauua

SEQ ID NO: 566019 - RNA, 19 nt, Artificial Sequence
  Description of Artificial Sequence: Synthetic oligonucleotide
  Sense strand starting at position 1460 of SEQ ID NO: 318479
aguauaaugcuguacaguu

SEQ ID NO: 566020 - RNA, 19 nt, Artificial Sequence
  Description of Artificial Sequence: Synthetic oligonucleotide
  Antisense strand to SEQ ID NO: 566019
aacuguacagcauuauacu

SEQ ID NO: 566021 - RNA, 19 nt, Artificial Sequence
  Description of Artificial Sequence: Synthetic oligonucleotide
  Sense strand starting at position 1569 of SEQ ID NO: 318479
ccaaacaaaucguccugaa

SEQ ID NO: 566022 - RNA, 19 nt, Artificial Sequence
  Description of Artificial Sequence: Synthetic oligonucleotide
  Antisense strand to SEQ ID NO: 566021
uucaggacgauuuguuugg

SEQ ID NO: 566023 - RNA, 19 nt, Artificial Sequence
  Description of Artificial Sequence: Synthetic oligonucleotide
  Sense strand starting at position 1614 of SEQ ID NO: 318479
acagcuaaucucugaagaa

SEQ ID NO: 566024 - RNA, 19 nt, Artificial Sequence
  Description of Artificial Sequence: Synthetic oligonucleotide
  Antisense strand to SEQ ID NO: 566023
uucuucagagauuagcugu

SEQ ID NO: 566025 - RNA, 19 nt, Artificial Sequence
  Description of Artificial Sequence: Synthetic oligonucleotide
  Sense strand starting at position 1909 of SEQ ID NO: 318479
ucgggcuguccaucgguua

SEQ ID NO: 566026 - RNA, 19 nt, Artificial Sequence
  Description of Artificial Sequence: Synthetic oligonucleotide
  Antisense strand to SEQ ID NO: 566025
uaaccgauggacagcccga

SEQ ID NO: 566027 - RNA, 19 nt, Artificial Sequence
  Description of Artificial Sequence: Synthetic oligonucleotide
  Sense strand starting at position 1929 of SEQ ID NO: 318479
gaugguaggccucacugaa

SEQ ID NO: 566028 - RNA, 19 nt, Artificial Sequence
  Description of Artificial Sequence: Synthetic oligonucleotide
  Antisense strand to SEQ ID NO: 566027
uucagugaggccuaccauc

SEQ ID NO: 566029 - RNA, 19 nt, Artificial Sequence
  Description of Artificial Sequence: Synthetic oligonucleotide
  Sense strand starting at position 2102 of SEQ ID NO: 318479
uguaccugaucuccacaua

SEQ ID NO: 566030 - RNA, 19 nt, Artificial Sequence
  Description of Artificial Sequence: Synthetic oligonucleotide
  Antisense strand to SEQ ID NO: 566029
uauguggagaucagguaca

SEQ ID NO: 566031 - RNA, 19 nt, Artificial Sequence
  Description of Artificial Sequence: Synthetic oligonucleotide
  Sense strand starting at position 2125 of SEQ ID NO: 318479
acuagcaauucugugguuu

SEQ ID NO: 566032 - RNA, 19 nt, Artificial Sequence
  Description of Artificial Sequence: Synthetic oligonucleotide
  Antisense strand to SEQ ID NO: 566031
aaaccacagaauugcuagu

SEQ ID NO: 566033 - RNA, 19 nt, Artificial Sequence
  Description of Artificial Sequence: Synthetic oligonucleotide
  Sense strand starting at position 2126 of SEQ ID NO: 318479
cuagcaauucugugguuuc

SEQ ID NO: 566034 - RNA, 19 nt, Artificial Sequence
  Description of Artificial Sequence: Synthetic oligonucleotide
  Antisense strand to SEQ ID NO: 566033
gaaaccacagaauugcuag

SEQ ID NO: 566035 - RNA, 19 nt, Artificial Sequence
  Description of Artificial Sequence: Synthetic oligonucleotide
  Sense strand starting at position 2129 of SEQ ID NO: 318479
gcaauucugugguuucuca

SEQ ID NO: 566036 - RNA, 19 nt, Artificial Sequence
  Description of Artificial Sequence: Synthetic oligonucleotide
  Antisense strand to SEQ ID NO: 566035
ugagaaaccacagaauugc

SEQ ID NO: 566037 - RNA, 19 nt, Artificial Sequence
  Description of Artificial Sequence: Synthetic oligonucleotide
  Sense strand starting at position 2169 of SEQ ID NO: 318479
cagggagucuacucugaau

SEQ ID NO: 566038 - RNA, 19 nt, Artificial Sequence
  Description of Artificial Sequence: Synthetic oligonucleotide
  Antisense strand to SEQ ID NO: 566037
auucagaguagacucccug

SEQ ID NO: 566039 - RNA, 19 nt, Artificial Sequence
  Description of Artificial Sequence: Synthetic oligonucleotide
  Sense strand starting at position 2171 of SEQ ID NO: 318479
gggagucuacucugaauac

SEQ ID NO: 566040 - RNA, 19 nt, Artificial Sequence
  Description of Artificial Sequence: Synthetic oligonucleotide
  Antisense strand to SEQ ID NO: 566039
guauucagaguagacuccc

SEQ ID NO: 566041 - RNA, 19 nt, Artificial Sequence
  Description of Artificial Sequence: Synthetic oligonucleotide
  Sense strand starting at position 2379 of SEQ ID NO: 318479
agacuaguuuccucuuuac

SEQ ID NO: 566042 - RNA, 19 nt, Artificial Sequence
  Description of Artificial Sequence: Synthetic oligonucleotide
  Antisense strand to SEQ ID NO: 566041
guaaagaggaaacuagucu

SEQ ID NO: 566043 - RNA, 19 nt, Artificial Sequence
  Description of Artificial Sequence: Synthetic oligonucleotide
  Sense strand starting at position 2494 of SEQ ID NO: 318479
agaucucagaugcguuuga

SEQ ID NO: 566044 - RNA, 19 nt, Artificial Sequence
  Description of Artificial Sequence: Synthetic oligonucleotide
  Antisense strand to SEQ ID NO: 566043
ucaaacgcaucugagaucu

SEQ ID NO: 566045 - RNA, 19 nt, Artificial Sequence
  Description of Artificial Sequence: Synthetic oligonucleotide
  Sense strand starting at position 2495 of SEQ ID NO: 318479
gaucucagaugcguuugaa

SEQ ID NO: 566046 - RNA, 19 nt, Artificial Sequence
  Description of Artificial Sequence: Synthetic oligonucleotide
  Antisense strand to SEQ ID NO: 566045
uucaaacgcaucugagauc

SEQ ID NO: 566047 - RNA, 19 nt, Artificial Sequence
  Description of Artificial Sequence: Synthetic oligonucleotide
  Sense strand starting at position 2498 of SEQ ID NO: 318479
cucagaugcguuugaacua

SEQ ID NO: 566048 - RNA, 19 nt, Artificial Sequence
  Description of Artificial Sequence: Synthetic oligonucleotide
  Antisense strand to SEQ ID NO: 566047
uaguucaaacgcaucugag

SEQ ID NO: 566049 - RNA, 19 nt, Artificial Sequence
  Description of Artificial Sequence: Synthetic oligonucleotide
  Sense strand starting at position 2503 of SEQ ID NO: 318479
augcguuugaacuacagua

SEQ ID NO: 566050 - RNA, 19 nt, Artificial Sequence
  Description of Artificial Sequence: Synthetic oligonucleotide
  Antisense strand to SEQ ID NO: 566049
uacuguaguucaaacgcau

SEQ ID NO: 566051 - RNA, 19 nt, Artificial Sequence
  Description of Artificial Sequence: Synthetic oligonucleotide
  Sense strand starting at position 2751 of SEQ ID NO: 318479
gggaacucauuccagaaag

SEQ ID NO: 566052 - RNA, 19 nt, Artificial Sequence
  Description of Artificial Sequence: Synthetic oligonucleotide
  Antisense strand to SEQ ID NO: 566051
cuuucuggaaugaguuccc

SEQ ID NO: 566053 - RNA, 19 nt, Artificial Sequence
  Description of Artificial Sequence: Synthetic oligonucleotide
  Sense strand starting at position 2805 of SEQ ID NO: 318479
agcaguauuggagggagaa

SEQ ID NO: 566054 - RNA, 19 nt, Artificial Sequence
  Description of Artificial Sequence: Synthetic oligonucleotide
  Antisense strand to SEQ ID NO: 566053
uucucccuccaauacugcu

SEQ ID NO: 566055 - RNA, 19 nt, Artificial Sequence
  Description of Artificial Sequence: Synthetic oligonucleotide
  Sense strand starting at position 2806 of SEQ ID NO: 318479
gcaguauuggagggagaag

SEQ ID NO: 566056 - RNA, 19 nt, Artificial Sequence
  Description of Artificial Sequence: Synthetic oligonucleotide
  Antisense strand to SEQ ID NO: 566055
cuucucccuccaauacugc

SEQ ID NO: 566057 - RNA, 19 nt, Artificial Sequence
  Description of Artificial Sequence: Synthetic oligonucleotide
  Sense strand starting at position 3419 of SEQ ID NO: 318479
ccuccaaugcuagggagaa

SEQ ID NO: 566058 - RNA, 19 nt, Artificial Sequence
  Description of Artificial Sequence: Synthetic oligonucleotide
  Antisense strand to SEQ ID NO: 566057
uucucccuagcauuggagg

SEQ ID NO: 566059 - RNA, 19 nt, Artificial Sequence
  Description of Artificial Sequence: Synthetic oligonucleotide
  Sense strand starting at position 2 of SEQ ID NO: 318480
ucgggcuguccaucgguua

SEQ ID NO: 566060 - RNA, 19 nt, Artificial Sequence
  Description of Artificial Sequence: Synthetic oligonucleotide
  Antisense strand to SEQ ID NO: 566059
uaaccgauggacagcccga

SEQ ID NO: 566061 - RNA, 19 nt, Artificial Sequence
  Description of Artificial Sequence: Synthetic oligonucleotide
  Sense strand starting at position 22 of SEQ ID NO: 318480
gaugguaggccucacugaa

SEQ ID NO: 566062 - RNA, 19 nt, Artificial Sequence
  Description of Artificial Sequence: Synthetic oligonucleotide
  Antisense strand to SEQ ID NO: 566061
uucagugaggccuaccauc

SEQ ID NO: 566063 - RNA, 19 nt, Artificial Sequence
  Description of Artificial Sequence: Synthetic oligonucleotide
  Sense strand starting at position 195 of SEQ ID NO: 318480
uguaccugaucuccacaua

SEQ ID NO: 566064 - RNA, 19 nt, Artificial Sequence
  Description of Artificial Sequence: Synthetic oligonucleotide
  Antisense strand to SEQ ID NO: 566063
uauguggagaucagguaca

SEQ ID NO: 566065 - RNA, 19 nt, Artificial Sequence
  Description of Artificial Sequence: Synthetic oligonucleotide
  Sense strand starting at position 262 of SEQ ID NO: 318480
cagggagucuacucugaau

SEQ ID NO: 566066 - RNA, 19 nt, Artificial Sequence
  Description of Artificial Sequence: Synthetic oligonucleotide
  Antisense strand to SEQ ID NO: 566065
auucagaguagacucccug

SEQ ID NO: 566067 - RNA, 19 nt, Artificial Sequence
  Description of Artificial Sequence: Synthetic oligonucleotide
  Sense strand starting at position 264 of SEQ ID NO: 318480
gggagucuacucugaauac

SEQ ID NO: 566068 - RNA, 19 nt, Artificial Sequence
  Description of Artificial Sequence: Synthetic oligonucleotide
  Antisense strand to SEQ ID NO: 566067
guauucagaguagacuccc

SEQ ID NO: 566069 - RNA, 19 nt, Artificial Sequence
  Description of Artificial Sequence: Synthetic oligonucleotide
  Sense strand starting at position 472 of SEQ ID NO: 318480
agacuaguuuccucuuuac

SEQ ID NO: 566070 - RNA, 19 nt, Artificial Sequence
  Description of Artificial Sequence: Synthetic oligonucleotide
  Antisense strand to SEQ ID NO: 566069
guaaagaggaaacuagucu

SEQ ID NO: 566071 - RNA, 19 nt, Artificial Sequence
  Description of Artificial Sequence: Synthetic oligonucleotide
  Sense strand starting at position 587 of SEQ ID NO: 318480
agaucucagaugcguuuga

SEQ ID NO: 566072 - RNA, 19 nt, Artificial Sequence
  Description of Artificial Sequence: Synthetic oligonucleotide
  Antisense strand to SEQ ID NO: 566071
ucaaacgcaucugagaucu

SEQ ID NO: 566073 - RNA, 19 nt, Artificial Sequence
  Description of Artificial Sequence: Synthetic oligonucleotide
  Sense strand starting at position 588 of SEQ ID NO: 318480
gaucucagaugcguuugaa

SEQ ID NO: 566074 - RNA, 19 nt, Artificial Sequence
  Description of Artificial Sequence: Synthetic oligonucleotide
  Antisense strand to SEQ ID NO: 566073
uucaaacgcaucugagauc

SEQ ID NO: 566075 - RNA, 19 nt, Artificial Sequence
  Description of Artificial Sequence: Synthetic oligonucleotide
  Sense strand starting at position 596 of SEQ ID NO: 318480
augcguuugaacuacagua

SEQ ID NO: 566076 - RNA, 19 nt, Artificial Sequence
  Description of Artificial Sequence: Synthetic oligonucleotide
  Antisense strand to SEQ ID NO: 566075
uacuguaguucaaacgcau

SEQ ID NO: 566077 - RNA, 19 nt, Artificial Sequence
  Description of Artificial Sequence: Synthetic oligonucleotide
  Sense strand starting at position 898 of SEQ ID NO: 318480
agcaguauuggagggagaa

SEQ ID NO: 566078 - RNA, 19 nt, Artificial Sequence
  Description of Artificial Sequence: Synthetic oligonucleotide
  Antisense strand to SEQ ID NO: 566077
uucucccuccaauacugcu

SEQ ID NO: 566079 - RNA, 19 nt, Artificial Sequence
  Description of Artificial Sequence: Synthetic oligonucleotide
  Sense strand starting at position 899 of SEQ ID NO: 318480
gcaguauuggagggagaag

SEQ ID NO: 566080 - RNA, 19 nt, Artificial Sequence
  Description of Artificial Sequence: Synthetic oligonucleotide
  Antisense strand to SEQ ID NO: 566079
cuucucccuccaauacugc

SEQ ID NO: 566081 - RNA, 19 nt, Artificial Sequence
  Description of Artificial Sequence: Synthetic oligonucleotide
  Sense strand starting at position 1512 of SEQ ID NO: 318480
ccuccaaugcuagggagaa

SEQ ID NO: 566082 - RNA, 19 nt, Artificial Sequence
  Description of Artificial Sequence: Synthetic oligonucleotide
  Antisense strand to SEQ ID NO: 566081
uucucccuagcauuggagg

SEQ ID NO: 566083 - RNA, 19 nt, Artificial Sequence
  Description of Artificial Sequence: Synthetic oligonucleotide
  Sense strand starting at position 2342 of SEQ ID NO: 318480
ggugcauucgcaguagcaa

SEQ ID NO: 566084 - RNA, 19 nt, Artificial Sequence
  Description of Artificial Sequence: Synthetic oligonucleotide
  Antisense strand to SEQ ID NO: 566083
uugcuacugcgaaugcacc

SEQ ID NO: 566085 - RNA, 19 nt, Artificial Sequence
  Description of Artificial Sequence: Synthetic oligonucleotide
  Sense strand starting at position 2474 of SEQ ID NO: 318480
ggaguaagugacuggauga

SEQ ID NO: 566086 - RNA, 19 nt, Artificial Sequence
  Description of Artificial Sequence: Synthetic oligonucleotide
  Antisense strand to SEQ ID NO: 566085
ucauccagucacuuacucc

SEQ ID NO: 566087 - RNA, 19 nt, Artificial Sequence
  Description of Artificial Sequence: Synthetic oligonucleotide
  Sense strand starting at position 2475 of SEQ ID NO: 318480
gaguaagugacuggaugaa

SEQ ID NO: 566088 - RNA, 19 nt, Artificial Sequence
  Description of Artificial Sequence: Synthetic oligonucleotide
  Antisense strand to SEQ ID NO: 566087
uucauccagucacuuacuc

SEQ ID NO: 566089 - RNA, 19 nt, Artificial Sequence
  Description of Artificial Sequence: Synthetic oligonucleotide
  Sense strand starting at position 2491 of SEQ ID NO: 318480
gaaugaaugcauuggaacu

SEQ ID NO: 566090 - RNA, 19 nt, Artificial Sequence
  Description of Artificial Sequence: Synthetic oligonucleotide
  Antisense strand to SEQ ID NO: 566089
aguuccaaugcauucauuc

SEQ ID NO: 566091 - RNA, 19 nt, Artificial Sequence
  Description of Artificial Sequence: Synthetic oligonucleotide
  Sense strand starting at position 2538 of SEQ ID NO: 318480
ucccaugguuugguacaaa

SEQ ID NO: 566092 - RNA, 19 nt, Artificial Sequence
  Description of Artificial Sequence: Synthetic oligonucleotide
  Antisense strand to SEQ ID NO: 566091
uuuguaccaaaccauggga

SEQ ID NO: 566093 - RNA, 19 nt, Artificial Sequence
  Description of Artificial Sequence: Synthetic oligonucleotide
  Sense strand starting at position 2601 of SEQ ID NO: 318480
cuugucuuggucuaagguu

SEQ ID NO: 566094 - RNA, 19 nt, Artificial Sequence
  Description of Artificial Sequence: Synthetic oligonucleotide
  Antisense strand to SEQ ID NO: 566093
aaccuuagaccaagacaag

SEQ ID NO: 566095 - RNA, 19 nt, Artificial Sequence
  Description of Artificial Sequence: Synthetic oligonucleotide
  Sense strand starting at position 2743 of SEQ ID NO: 318480
aggaacuguugcccagaau

SEQ ID NO: 566096 - RNA, 19 nt, Artificial Sequence
  Description of Artificial Sequence: Synthetic oligonucleotide
  Antisense strand to SEQ ID NO: 566095
auucugggcaacaguuccu

SEQ ID NO: 566097 - RNA, 19 nt, Artificial Sequence
  Description of Artificial Sequence: Synthetic oligonucleotide
  Sense strand starting at position 2744 of SEQ ID NO: 318480
ggaacuguugcccagaaua

SEQ ID NO: 566098 - RNA, 19 nt, Artificial Sequence
  Description of Artificial Sequence: Synthetic oligonucleotide
  Antisense strand to SEQ ID NO: 566097
uauucugggcaacaguucc

SEQ ID NO: 566099 - RNA, 19 nt, Artificial Sequence
  Description of Artificial Sequence: Synthetic oligonucleotide
  Sense strand starting at position 3021 of SEQ ID NO: 318480
cacccagugauggguaaga

SEQ ID NO: 566100 - RNA, 19 nt, Artificial Sequence
  Description of Artificial Sequence: Synthetic oligonucleotide
  Antisense strand to SEQ ID NO: 566099
ucuuacccaucacugggug

SEQ ID NO: 566101 - RNA, 19 nt, Artificial Sequence
  Description of Artificial Sequence: Synthetic oligonucleotide
  Sense strand starting at position 3053 of SEQ ID NO: 318480
cugggucaugcugaaauug

SEQ ID NO: 566102 - RNA, 19 nt, Artificial Sequence
  Description of Artificial Sequence: Synthetic oligonucleotide
  Antisense strand to SEQ ID NO: 566101
caauuucagcaugacccag

SEQ ID NO: 566103 - RNA, 19 nt, Artificial Sequence
  Description of Artificial Sequence: Synthetic oligonucleotide
  Sense strand starting at position 3106 of SEQ ID NO: 318480
aauguacuguaaucucgau

SEQ ID NO: 566104 - RNA, 19 nt, Artificial Sequence
  Description of Artificial Sequence: Synthetic oligonucleotide
  Antisense strand to SEQ ID NO: 566103
aucgagauuacaguacauu

SEQ ID NO: 566105 - RNA, 19 nt, Artificial Sequence
  Description of Artificial Sequence: Synthetic oligonucleotide
  Sense strand starting at position 3133 of SEQ ID NO: 318480
ugaggacccuccuuguaaa

SEQ ID NO: 566106 - RNA, 19 nt, Artificial Sequence
  Description of Artificial Sequence: Synthetic oligonucleotide
  Antisense strand to SEQ ID NO: 566105
uuuacaaggaggguccuca

SEQ ID NO: 566107 - RNA, 19 nt, Artificial Sequence
  Description of Artificial Sequence: Synthetic oligonucleotide
  Sense strand starting at position 3134 of SEQ ID NO: 318480
gaggacccuccuuguaaau

SEQ ID NO: 566108 - RNA, 19 nt, Artificial Sequence
  Description of Artificial Sequence: Synthetic oligonucleotide
  Antisense strand to SEQ ID NO: 566107
auuuacaaggaggguccuc

SEQ ID NO: 566109 - RNA, 19 nt, Artificial Sequence
  Description of Artificial Sequence: Synthetic oligonucleotide
  Sense strand starting at position 3168 of SEQ ID NO: 318480
cugcccuuugaaugguaaa

SEQ ID NO: 566110 - RNA, 19 nt, Artificial Sequence
  Description of Artificial Sequence: Synthetic oligonucleotide
  Antisense strand to SEQ ID NO: 566109
uuuaccauucaaagggcag

SEQ ID NO: 566111 - RNA, 19 nt, Artificial Sequence
  Description of Artificial Sequence: Synthetic oligonucleotide
  Sense strand starting at position 3206 of SEQ ID NO: 318480
uuguauccugcugaaauug

SEQ ID NO: 566112 - RNA, 19 nt, Artificial Sequence
  Description of Artificial Sequence: Synthetic oligonucleotide
  Antisense strand to SEQ ID NO: 566111
caauuucagcaggauacaa

SEQ ID NO: 566113 - RNA, 19 nt, Artificial Sequence
  Description of Artificial Sequence: Synthetic oligonucleotide
  Sense strand starting at position 3226 of SEQ ID NO: 318480
gaaagcaagcucuguauuu

SEQ ID NO: 566114 - RNA, 19 nt, Artificial Sequence
  Description of Artificial Sequence: Synthetic oligonucleotide
  Antisense strand to SEQ ID NO: 566113
aaauacagagcuugcuuuc

SEQ ID NO: 566115 - RNA, 19 nt, Artificial Sequence
  Description of Artificial Sequence: Synthetic oligonucleotide
  Sense strand starting at position 3249 of SEQ ID NO: 318480
aaugcaaucccuggaggua

SEQ ID NO: 566116 - RNA, 19 nt, Artificial Sequence
  Description of Artificial Sequence: Synthetic oligonucleotide
  Antisense strand to SEQ ID NO: 566115
uaccuccagggauugcauu

SEQ ID NO: 566117 - RNA, 19 nt, Artificial Sequence
  Description of Artificial Sequence: Synthetic oligonucleotide
  Sense strand starting at position 3250 of SEQ ID NO: 318480
augcaaucccuggagguau

SEQ ID NO: 566118 - RNA, 19 nt, Artificial Sequence
  Description of Artificial Sequence: Synthetic oligonucleotide
  Antisense strand to SEQ ID NO: 566117
auaccuccagggauugcau

SEQ ID NO: 566119 - RNA, 19 nt, Artificial Sequence
  Description of Artificial Sequence: Synthetic oligonucleotide
  Sense strand starting at position 3306 of SEQ ID NO: 318480
uuugauagcucuguaggaa

SEQ ID NO: 566120 - RNA, 19 nt, Artificial Sequence
  Description of Artificial Sequence: Synthetic oligonucleotide
  Antisense strand to SEQ ID NO: 566119
uuccuacagagcuaucaaa

SEQ ID NO: 566121 - RNA, 19 nt, Artificial Sequence
  Description of Artificial Sequence: Synthetic oligonucleotide
  Sense strand starting at position 3307 of SEQ ID NO: 318480
uugauagcucuguaggaau

SEQ ID NO: 566122 - RNA, 19 nt, Artificial Sequence
  Description of Artificial Sequence: Synthetic oligonucleotide
  Antisense strand to SEQ ID NO: 566121
auuccuacagagcuaucaa

SEQ ID NO: 566123 - RNA, 19 nt, Artificial Sequence
  Description of Artificial Sequence: Synthetic oligonucleotide
  Sense strand starting at position 3309 of SEQ ID NO: 318480
gauagcucuguaggaauca

SEQ ID NO: 566124 - RNA, 19 nt, Artificial Sequence
  Description of Artificial Sequence: Synthetic oligonucleotide
  Antisense strand to SEQ ID NO: 566123
ugauuccuacagagcuauc

SEQ ID NO: 566125 - RNA, 19 nt, Artificial Sequence
  Description of Artificial Sequence: Synthetic oligonucleotide
  Sense strand starting at position 3318 of SEQ ID NO: 318480
guaggaaucaaguguuuaa

SEQ ID NO: 566126 - RNA, 19 nt, Artificial Sequence
  Description of Artificial Sequence: Synthetic oligonucleotide
  Antisense strand to SEQ ID NO: 566125
uuaaacacuugauuccuac

SEQ ID NO: 566127 - RNA, 19 nt, Artificial Sequence
  Description of Artificial Sequence: Synthetic oligonucleotide
  Sense strand starting at position 3342 of SEQ ID NO: 318480
gugggaauuguguacauaa

SEQ ID NO: 566128 - RNA, 19 nt, Artificial Sequence
  Description of Artificial Sequence: Synthetic oligonucleotide
  Antisense strand to SEQ ID NO: 566127
uuauguacacaauucccac

SEQ ID NO: 566129 - RNA, 19 nt, Artificial Sequence
  Description of Artificial Sequence: Synthetic oligonucleotide
  Sense strand starting at position 3431 of SEQ ID NO: 318480
agugaugcaguucaugagu

SEQ ID NO: 566130 - RNA, 19 nt, Artificial Sequence
  Description of Artificial Sequence: Synthetic oligonucleotide
  Antisense strand to SEQ ID NO: 566129
acucaugaacugcaucacu

SEQ ID NO: 566131 - RNA, 19 nt, Artificial Sequence
  Description of Artificial Sequence: Synthetic oligonucleotide
  Sense strand starting at position 3452 of SEQ ID NO: 318480
cuuaaucuagccugguaag

SEQ ID NO: 566132 - RNA, 19 nt, Artificial Sequence
  Description of Artificial Sequence: Synthetic oligonucleotide
  Antisense strand to SEQ ID NO: 566131
cuuaccaggcuagauuaag

SEQ ID NO: 566133 - RNA, 19 nt, Artificial Sequence
  Description of Artificial Sequence: Synthetic oligonucleotide
  Sense strand starting at position 3566 of SEQ ID NO: 318480
uuuacaucugacugaguca

SEQ ID NO: 566134 - RNA, 19 nt, Artificial Sequence
  Description of Artificial Sequence: Synthetic oligonucleotide
  Antisense strand to SEQ ID NO: 566133
ugacucagucagauguaaa

SEQ ID NO: 566135 - RNA, 19 nt, Artificial Sequence
  Description of Artificial Sequence: Synthetic oligonucleotide
  Sense strand starting at position 3707 of SEQ ID NO: 318480
gaaguaugguugcuggauu

SEQ ID NO: 566136 - RNA, 19 nt, Artificial Sequence
  Description of Artificial Sequence: Synthetic oligonucleotide
  Antisense strand to SEQ ID NO: 566135
aauccagcaaccauacuuc

SEQ ID NO: 566137 - RNA, 19 nt, Artificial Sequence
  Description of Artificial Sequence: Synthetic oligonucleotide
  Sense strand starting at position 3953 of SEQ ID NO: 318480
gcuggucucuaacuggauu

SEQ ID NO: 566138 - RNA, 19 nt, Artificial Sequence
  Description of Artificial Sequence: Synthetic oligonucleotide
  Antisense strand to SEQ ID NO: 566137
aauccaguuagagaccagc

SEQ ID NO: 566139 - RNA, 19 nt, Artificial Sequence
  Description of Artificial Sequence: Synthetic oligonucleotide
  Sense strand starting at position 189 of SEQ ID NO: 318481
aguccauuagcagaauggu

SEQ ID NO: 566140 - RNA, 19 nt, Artificial Sequence
  Description of Artificial Sequence: Synthetic oligonucleotide
  Antisense strand to SEQ ID NO: 566139
accauucugcuaauggacu

SEQ ID NO: 566141 - RNA, 19 nt, Artificial Sequence
  Description of Artificial Sequence: Synthetic oligonucleotide
  Sense strand starting at position 192 of SEQ ID NO: 318481
ccauuagcagaaugguaca

SEQ ID NO: 566142 - RNA, 19 nt, Artificial Sequence
  Description of Artificial Sequence: Synthetic oligonucleotide
  Antisense strand to SEQ ID NO: 566141
uguaccauucugcuaaugg

SEQ ID NO: 566143 - RNA, 19 nt, Artificial Sequence
  Description of Artificial Sequence: Synthetic oligonucleotide
  Sense strand starting at position 205 of SEQ ID NO: 318481
gguacauguucccucuuua

SEQ ID NO: 566144 - RNA, 19 nt, Artificial Sequence
  Description of Artificial Sequence: Synthetic oligonucleotide
  Antisense strand to SEQ ID NO: 566143
uaaagagggaacauguacc

SEQ ID NO: 566145 - RNA, 19 nt, Artificial Sequence
  Description of Artificial Sequence: Synthetic oligonucleotide
  Sense strand starting at position 308 of SEQ ID NO: 318481
ggucccgaaagcugucaau

SEQ ID NO: 566146 - RNA, 19 nt, Artificial Sequence
  Description of Artificial Sequence: Synthetic oligonucleotide
  Antisense strand to SEQ ID NO: 566145
auugacagcuuucgggacc

SEQ ID NO: 566147 - RNA, 19 nt, Artificial Sequence
  Description of Artificial Sequence: Synthetic oligonucleotide
  Sense strand starting at position 403 of SEQ ID NO: 318481
agaauuaaauacgcccaaa

SEQ ID NO: 566148 - RNA, 19 nt, Artificial Sequence
  Description of Artificial Sequence: Synthetic oligonucleotide
  Antisense strand to SEQ ID NO: 566147
uuugggcguauuuaauucu

SEQ ID NO: 566149 - RNA, 19 nt, Artificial Sequence
  Description of Artificial Sequence: Synthetic oligonucleotide
  Sense strand starting at position 439 of SEQ ID NO: 318481
ugcauuuauuucuauacgu

SEQ ID NO: 566150 - RNA, 19 nt, Artificial Sequence
  Description of Artificial Sequence: Synthetic oligonucleotide
  Antisense strand to SEQ ID NO: 566149
acguauagaaauaaaugca

SEQ ID NO: 566151 - RNA, 19 nt, Artificial Sequence
  Description of Artificial Sequence: Synthetic oligonucleotide
  Sense strand starting at position 449 of SEQ ID NO: 318481
ucuauacgugaauguuauu

SEQ ID NO: 566152 - RNA, 19 nt, Artificial Sequence
  Description of Artificial Sequence: Synthetic oligonucleotide
  Antisense strand to SEQ ID NO: 566151
aauaacauucacguauaga

SEQ ID NO: 566153 - RNA, 19 nt, Artificial Sequence
  Description of Artificial Sequence: Synthetic oligonucleotide
  Sense strand starting at position 480 of SEQ ID NO: 318481
uggcaagcuggucauguau

SEQ ID NO: 566154 - RNA, 19 nt, Artificial Sequence
  Description of Artificial Sequence: Synthetic oligonucleotide
  Antisense strand to SEQ ID NO: 566153
auacaugaccagcuugcca

SEQ ID NO: 566155 - RNA, 19 nt, Artificial Sequence
  Description of Artificial Sequence: Synthetic oligonucleotide
  Sense strand starting at position 590 of SEQ ID NO: 318481
agcacaugauaguuaucaa

SEQ ID NO: 566156 - RNA, 19 nt, Artificial Sequence
  Description of Artificial Sequence: Synthetic oligonucleotide
  Antisense strand to SEQ ID NO: 566155
uugauaacuaucaugugcu

SEQ ID NO: 566157 - RNA, 19 nt, Artificial Sequence
  Description of Artificial Sequence: Synthetic oligonucleotide
  Sense strand starting at position 801 of SEQ ID NO: 318481
uuuauccuguuccagauuu

SEQ ID NO: 566158 - RNA, 19 nt, Artificial Sequence
  Description of Artificial Sequence: Synthetic oligonucleotide
  Antisense strand to SEQ ID NO: 566157
aaaucuggaacaggauaaa

SEQ ID NO: 566159 - RNA, 19 nt, Artificial Sequence
  Description of Artificial Sequence: Synthetic oligonucleotide
  Sense strand starting at position 832 of SEQ ID NO: 318481
ggcuaaucagcauauccua

SEQ ID NO: 566160 - RNA, 19 nt, Artificial Sequence
  Description of Artificial Sequence: Synthetic oligonucleotide
  Antisense strand to SEQ ID NO: 566159
uaggauaugcugauuagcc

SEQ ID NO: 566161 - RNA, 19 nt, Artificial Sequence
  Description of Artificial Sequence: Synthetic oligonucleotide
  Sense strand starting at position 1040 of SEQ ID NO: 318481
cugggaaaguaauauccaa

SEQ ID NO: 566162 - RNA, 19 nt, Artificial Sequence
  Description of Artificial Sequence: Synthetic oligonucleotide
  Antisense strand to SEQ ID NO: 566161
uuggauauuacuuucccag

SEQ ID NO: 566163 - RNA, 19 nt, Artificial Sequence
  Description of Artificial Sequence: Synthetic oligonucleotide
  Sense strand starting at position 1058 of SEQ ID NO: 318481
acaugaugugucugcaggu

SEQ ID NO: 566164 - RNA, 19 nt, Artificial Sequence
  Description of Artificial Sequence: Synthetic oligonucleotide
  Antisense strand to SEQ ID NO: 566163
accugcagacacaucaugu

SEQ ID NO: 566165 - RNA, 19 nt, Artificial Sequence
  Description of Artificial Sequence: Synthetic oligonucleotide
  Sense strand starting at position 1059 of SEQ ID NO: 318481
caugaugugucugcaggua

SEQ ID NO: 566166 - RNA, 19 nt, Artificial Sequence
  Description of Artificial Sequence: Synthetic oligonucleotide
  Antisense strand to SEQ ID NO: 566165
uaccugcagacacaucaug

SEQ ID NO: 566167 - RNA, 19 nt, Artificial Sequence
  Description of Artificial Sequence: Synthetic oligonucleotide
  Sense strand starting at position 1064 of SEQ ID NO: 318481
ugugucugcagguaacaua

SEQ ID NO: 566168 - RNA, 19 nt, Artificial Sequence
  Description of Artificial Sequence: Synthetic oligonucleotide
  Antisense strand to SEQ ID NO: 566167
uauguuaccugcagacaca

SEQ ID NO: 566169 - RNA, 19 nt, Artificial Sequence
  Description of Artificial Sequence: Synthetic oligonucleotide
  Sense strand starting at position 1197 of SEQ ID NO: 318481
aggagaccucaaugaguuc

SEQ ID NO: 566170 - RNA, 19 nt, Artificial Sequence
  Description of Artificial Sequence: Synthetic oligonucleotide
  Antisense strand to SEQ ID NO: 566169
gaacucauugaggucuccu

SEQ ID NO: 566171 - RNA, 19 nt, Artificial Sequence
  Description of Artificial Sequence: Synthetic oligonucleotide
  Sense strand starting at position 1241 of SEQ ID NO: 318481
agcagcaauccguaauuau

SEQ ID NO: 566172 - RNA, 19 nt, Artificial Sequence
  Description of Artificial Sequence: Synthetic oligonucleotide
  Antisense strand to SEQ ID NO: 566171
auaauuacggauugcugcu

SEQ ID NO: 566173 - RNA, 19 nt, Artificial Sequence
  Description of Artificial Sequence: Synthetic oligonucleotide
  Sense strand starting at position 1244 of SEQ ID NO: 318481
agcaauccguaauuaugaa

SEQ ID NO: 566174 - RNA, 19 nt, Artificial Sequence
  Description of Artificial Sequence: Synthetic oligonucleotide
  Antisense strand to SEQ ID NO: 566173
uucauaauuacggauugcu

SEQ ID NO: 566175 - RNA, 19 nt, Artificial Sequence
  Description of Artificial Sequence: Synthetic oligonucleotide
  Sense strand starting at position 1268 of SEQ ID NO: 318481
uaaugucuuguagaaguau

SEQ ID NO: 566176 - RNA, 19 nt, Artificial Sequence
  Description of Artificial Sequence: Synthetic oligonucleotide
  Antisense strand to SEQ ID NO: 566175
auacuucuacaagacauua

SEQ ID NO: 566177 - RNA, 19 nt, Artificial Sequence
  Description of Artificial Sequence: Synthetic oligonucleotide
  Sense strand starting at position 1282 of SEQ ID NO: 318481
aguauaaugcuguacaguu

SEQ ID NO: 566178 - RNA, 19 nt, Artificial Sequence
  Description of Artificial Sequence: Synthetic oligonucleotide
  Antisense strand to SEQ ID NO: 566177
aacuguacagcauuauacu

SEQ ID NO: 566179 - RNA, 19 nt, Artificial Sequence
  Description of Artificial Sequence: Synthetic oligonucleotide
  Sense strand starting at position 1391 of SEQ ID NO: 318481
ccaaacaaaucguccugaa

SEQ ID NO: 566180 - RNA, 19 nt, Artificial Sequence
  Description of Artificial Sequence: Synthetic oligonucleotide
  Antisense strand to SEQ ID NO: 566179
uucaggacgauuuguuugg

SEQ ID NO: 566181 - RNA, 19 nt, Artificial Sequence
  Description of Artificial Sequence: Synthetic oligonucleotide
  Sense strand starting at position 1436 of SEQ ID NO: 318481
acagcuaaucucugaagaa

SEQ ID NO: 566182 - RNA, 19 nt, Artificial Sequence
  Description of Artificial Sequence: Synthetic oligonucleotide
  Antisense strand to SEQ ID NO: 566181
uucuucagagauuagcugu

SEQ ID NO: 566183 - RNA, 19 nt, Artificial Sequence
  Description of Artificial Sequence: Synthetic oligonucleotide
  Sense strand starting at position 1731 of SEQ ID NO: 318481
ucgggcuguccaucgguua

SEQ ID NO: 566184 - RNA, 19 nt, Artificial Sequence
  Description of Artificial Sequence: Synthetic oligonucleotide
  Antisense strand to SEQ ID NO: 566183
uaaccgauggacagcccga

SEQ ID NO: 566185 - RNA, 19 nt, Artificial Sequence
  Description of Artificial Sequence: Synthetic oligonucleotide
  Sense strand starting at position 1751 of SEQ ID NO: 318481
gaugguaggccucacugaa

SEQ ID NO: 566186 - RNA, 19 nt, Artificial Sequence
  Description of Artificial Sequence: Synthetic oligonucleotide
  Antisense strand to SEQ ID NO: 566185
uucagugaggccuaccauc

SEQ ID NO: 566187 - RNA, 19 nt, Artificial Sequence
  Description of Artificial Sequence: Synthetic oligonucleotide
  Sense strand starting at position 1924 of SEQ ID NO: 318481
uguaccugaucuccacaua

SEQ ID NO: 566188 - RNA, 19 nt, Artificial Sequence
  Description of Artificial Sequence: Synthetic oligonucleotide
  Antisense strand to SEQ ID NO: 566187
uauguggagaucagguaca

SEQ ID NO: 566189 - RNA, 19 nt, Artificial Sequence
  Description of Artificial Sequence: Synthetic oligonucleotide
  Sense strand starting at position 1947 of SEQ ID NO: 318481
acuagcaauucugugguuu

SEQ ID NO: 566190 - RNA, 19 nt, Artificial Sequence
  Description of Artificial Sequence: Synthetic oligonucleotide
  Antisense strand to SEQ ID NO: 566189
aaaccacagaauugcuagu

SEQ ID NO: 566191 - RNA, 19 nt, Artificial Sequence
  Description of Artificial Sequence: Synthetic oligonucleotide
  Sense strand starting at position 1948 of SEQ ID NO: 318481
cuagcaauucugugguuuc

SEQ ID NO: 566192 - RNA, 19 nt, Artificial Sequence
  Description of Artificial Sequence: Synthetic oligonucleotide
  Antisense strand to SEQ ID NO: 566191
gaaaccacagaauugcuag

SEQ ID NO: 566193 - RNA, 19 nt, Artificial Sequence
  Description of Artificial Sequence: Synthetic oligonucleotide
  Sense strand starting at position 1951 of SEQ ID NO: 318481
gcaauucugugguuucuca

SEQ ID NO: 566194 - RNA, 19 nt, Artificial Sequence
  Description of Artificial Sequence: Synthetic oligonucleotide
  Antisense strand to SEQ ID NO: 566193
ugagaaaccacagaauugc

SEQ ID NO: 566195 - RNA, 19 nt, Artificial Sequence
  Description of Artificial Sequence: Synthetic oligonucleotide
  Sense strand starting at position 1991 of SEQ ID NO: 318481
cagggagucuacucugaau

SEQ ID NO: 566196 - RNA, 19 nt, Artificial Sequence
  Description of Artificial Sequence: Synthetic oligonucleotide
  Antisense strand to SEQ ID NO: 566195
auucagaguagacucccug

SEQ ID NO: 566197 - RNA, 19 nt, Artificial Sequence
  Description of Artificial Sequence: Synthetic oligonucleotide
  Sense strand starting at position 1993 of SEQ ID NO: 318481
gggagucuacucugaauac

SEQ ID NO: 566198 - RNA, 19 nt, Artificial Sequence
  Description of Artificial Sequence: Synthetic oligonucleotide
  Antisense strand to SEQ ID NO: 566197
guauucagaguagacuccc

SEQ ID NO: 566199 - RNA, 19 nt, Artificial Sequence
  Description of Artificial Sequence: Synthetic oligonucleotide
  Sense strand starting at position 1994 of SEQ ID NO: 318481
ggagucuacucugaauaca

SEQ ID NO: 566200 - RNA, 19 nt, Artificial Sequence
  Description of Artificial Sequence: Synthetic oligonucleotide
  Antisense strand to SEQ ID NO: 566199
uguauucagaguagacucc

SEQ ID NO: 566201 - RNA, 19 nt, Artificial Sequence
  Description of Artificial Sequence: Synthetic oligonucleotide
  Sense strand starting at position 2201 of SEQ ID NO: 318481
agacuaguuuccucuuuac

SEQ ID NO: 566202 - RNA, 19 nt, Artificial Sequence
  Description of Artificial Sequence: Synthetic oligonucleotide
  Antisense strand to SEQ ID NO: 566201
guaaagaggaaacuagucu

SEQ ID NO: 566203 - RNA, 19 nt, Artificial Sequence
  Description of Artificial Sequence: Synthetic oligonucleotide
  Sense strand starting at position 2316 of SEQ ID NO: 318481
agaucucagaugcguuuga

SEQ ID NO: 566204 - RNA, 19 nt, Artificial Sequence
  Description of Artificial Sequence: Synthetic oligonucleotide
  Antisense strand to SEQ ID NO: 566203
ucaaacgcaucugagaucu

SEQ ID NO: 566205 - RNA, 19 nt, Artificial Sequence
  Description of Artificial Sequence: Synthetic oligonucleotide
  Sense strand starting at position 2317 of SEQ ID NO: 318481
gaucucagaugcguuugaa

SEQ ID NO: 566206 - RNA, 19 nt, Artificial Sequence
  Description of Artificial Sequence: Synthetic oligonucleotide
  Antisense strand to SEQ ID NO: 566205
uucaaacgcaucugagauc

SEQ ID NO: 566207 - RNA, 19 nt, Artificial Sequence
  Description of Artificial Sequence: Synthetic oligonucleotide
  Sense strand starting at position 2320 of SEQ ID NO: 318481
cucagaugcguuugaacua

SEQ ID NO: 566208 - RNA, 19 nt, Artificial Sequence
  Description of Artificial Sequence: Synthetic oligonucleotide
  Antisense strand to SEQ ID NO: 566207
uaguucaaacgcaucugag

SEQ ID NO: 566209 - RNA, 19 nt, Artificial Sequence
  Description of Artificial Sequence: Synthetic oligonucleotide
  Sense strand starting at position 2325 of SEQ ID NO: 318481
augcguuugaacuacagua

SEQ ID NO: 566210 - RNA, 19 nt, Artificial Sequence
  Description of Artificial Sequence: Synthetic oligonucleotide
  Antisense strand to SEQ ID NO: 566209
uacuguaguucaaacgcau

SEQ ID NO: 566211 - RNA, 19 nt, Artificial Sequence
  Description of Artificial Sequence: Synthetic oligonucleotide
  Sense strand starting at position 2573 of SEQ ID NO: 318481
gggaacucauuccagaaag

SEQ ID NO: 566212 - RNA, 19 nt, Artificial Sequence
  Description of Artificial Sequence: Synthetic oligonucleotide
  Antisense strand to SEQ ID NO: 566211
cuuucuggaaugaguuccc

SEQ ID NO: 566213 - RNA, 19 nt, Artificial Sequence
  Description of Artificial Sequence: Synthetic oligonucleotide
  Sense strand starting at position 2627 of SEQ ID NO: 318481
agcaguauuggagggagaa

SEQ ID NO: 566214 - RNA, 19 nt, Artificial Sequence
  Description of Artificial Sequence: Synthetic oligonucleotide
  Antisense strand to SEQ ID NO: 566213
uucucccuccaauacugcu

SEQ ID NO: 566215 - RNA, 19 nt, Artificial Sequence
  Description of Artificial Sequence: Synthetic oligonucleotide
  Sense strand starting at position 2628 of SEQ ID NO: 318481
gcaguauuggagggagaag

SEQ ID NO: 566216 - RNA, 19 nt, Artificial Sequence
  Description of Artificial Sequence: Synthetic oligonucleotide
  Antisense strand to SEQ ID NO: 566215
cuucucccuccaauacugc

SEQ ID NO: 566217 - RNA, 19 nt, Artificial Sequence
  Description of Artificial Sequence: Synthetic oligonucleotide
  Sense strand starting at position 3241 of SEQ ID NO: 318481
ccuccaaugcuagggagaa

SEQ ID NO: 566218 - RNA, 19 nt, Artificial Sequence
  Description of Artificial Sequence: Synthetic oligonucleotide
  Antisense strand to SEQ ID NO: 566217
uucucccuagcauuggagg

SEQ ID NO: 566219 - RNA, 19 nt, Artificial Sequence
  Description of Artificial Sequence: Synthetic oligonucleotide
  Sense strand starting at position 3 of SEQ ID NO: 318482
gccaaauggaggugguaua

SEQ ID NO: 566220 - RNA, 19 nt, Artificial Sequence
  Description of Artificial Sequence: Synthetic oligonucleotide
  Antisense strand to SEQ ID NO: 566219
uauaccaccuccauuuggc

SEQ ID NO: 566221 - RNA, 19 nt, Artificial Sequence
  Description of Artificial Sequence: Synthetic oligonucleotide
  Sense strand starting at position 4 of SEQ ID NO: 318482
ccaaauggaggugguauaa

SEQ ID NO: 566222 - RNA, 19 nt, Artificial Sequence
  Description of Artificial Sequence: Synthetic oligonucleotide
  Antisense strand to SEQ ID NO: 566221
uuauaccaccuccauuugg

SEQ ID NO: 566223 - RNA, 19 nt, Artificial Sequence
  Description of Artificial Sequence: Synthetic oligonucleotide
  Sense strand starting at position 29 of SEQ ID NO: 318482
gagaacuguguuuauucca

SEQ ID NO: 566224 - RNA, 19 nt, Artificial Sequence
  Description of Artificial Sequence: Synthetic oligonucleotide
  Antisense strand to SEQ ID NO: 566223
uggaauaaacacaguucuc

SEQ ID NO: 566225 - RNA, 19 nt, Artificial Sequence
  Description of Artificial Sequence: Synthetic oligonucleotide
  Sense strand starting at position 37 of SEQ ID NO: 318482
uguuuauuccaugaaagca

SEQ ID NO: 566226 - RNA, 19 nt, Artificial Sequence
  Description of Artificial Sequence: Synthetic oligonucleotide
  Antisense strand to SEQ ID NO: 566225
ugcuuucauggaauaaaca

SEQ ID NO: 566227 - RNA, 19 nt, Artificial Sequence
  Description of Artificial Sequence: Synthetic oligonucleotide
  Sense strand starting at position 85 of SEQ ID NO: 318482
guacuauguaguuagcaaa

SEQ ID NO: 566228 - RNA, 19 nt, Artificial Sequence
  Description of Artificial Sequence: Synthetic oligonucleotide
  Antisense strand to SEQ ID NO: 566227
uuugcuaacuacauaguac

SEQ ID NO: 566229 - RNA, 19 nt, Artificial Sequence
  Description of Artificial Sequence: Synthetic oligonucleotide
  Sense strand starting at position 175 of SEQ ID NO: 318482
ucagguagcuaugucauau

SEQ ID NO: 566230 - RNA, 19 nt, Artificial Sequence
  Description of Artificial Sequence: Synthetic oligonucleotide
  Antisense strand to SEQ ID NO: 566229
auaugacauagcuaccuga

SEQ ID NO: 566231 - RNA, 19 nt, Artificial Sequence
  Description of Artificial Sequence: Synthetic oligonucleotide
  Sense strand starting at position 222 of SEQ ID NO: 318482
auugcauucuugccuggaa

SEQ ID NO: 566232 - RNA, 19 nt, Artificial Sequence
  Description of Artificial Sequence: Synthetic oligonucleotide
  Antisense strand to SEQ ID NO: 566231
uuccaggcaagaaugcaau

SEQ ID NO: 566233 - RNA, 19 nt, Artificial Sequence
  Description of Artificial Sequence: Synthetic oligonucleotide
  Sense strand starting at position 224 of SEQ ID NO: 318482
ugcauucuugccuggaaga

SEQ ID NO: 566234 - RNA, 19 nt, Artificial Sequence
  Description of Artificial Sequence: Synthetic oligonucleotide
  Antisense strand to SEQ ID NO: 566233
ucuuccaggcaagaaugca

SEQ ID NO: 566235 - RNA, 19 nt, Artificial Sequence
  Description of Artificial Sequence: Synthetic oligonucleotide
  Sense strand starting at position 225 of SEQ ID NO: 318482
gcauucuugccuggaagaa

SEQ ID NO: 566236 - RNA, 19 nt, Artificial Sequence
  Description of Artificial Sequence: Synthetic oligonucleotide
  Antisense strand to SEQ ID NO: 566235
uucuuccaggcaagaaugc

SEQ ID NO: 566237 - RNA, 19 nt, Artificial Sequence
  Description of Artificial Sequence: Synthetic oligonucleotide
  Sense strand starting at position 256 of SEQ ID NO: 318482
guaugaggugcuuauuaaa

SEQ ID NO: 566238 - RNA, 19 nt, Artificial Sequence
  Description of Artificial Sequence: Synthetic oligonucleotide
  Antisense strand to SEQ ID NO: 566237
uuuaauaagcaccucauac

SEQ ID NO: 566239 - RNA, 19 nt, Artificial Sequence
  Description of Artificial Sequence: Synthetic oligonucleotide
  Sense strand starting at position 278 of SEQ ID NO: 318482
gcuggugucgguccucaga

SEQ ID NO: 566240 - RNA, 19 nt, Artificial Sequence
  Description of Artificial Sequence: Synthetic oligonucleotide
  Antisense strand to SEQ ID NO: 566239
ucugaggaccgacaccagc

SEQ ID NO: 566241 - RNA, 19 nt, Artificial Sequence
  Description of Artificial Sequence: Synthetic oligonucleotide
  Sense strand starting at position 309 of SEQ ID NO: 318482
agugcuaauuaagucuauu

SEQ ID NO: 566242 - RNA, 19 nt, Artificial Sequence
  Description of Artificial Sequence: Synthetic oligonucleotide
  Antisense strand to SEQ ID NO: 566241
aauagacuuaauuagcacu

SEQ ID NO: 566243 - RNA, 19 nt, Artificial Sequence
  Description of Artificial Sequence: Synthetic oligonucleotide
  Sense strand starting at position 491 of SEQ ID NO: 318482
ugguaaauuguugaugguu

SEQ ID NO: 566244 - RNA, 19 nt, Artificial Sequence
  Description of Artificial Sequence: Synthetic oligonucleotide
  Antisense strand to SEQ ID NO: 566243
aaccaucaacaauuuacca

SEQ ID NO: 566245 - RNA, 19 nt, Artificial Sequence
  Description of Artificial Sequence: Synthetic oligonucleotide
  Sense strand starting at position 496 of SEQ ID NO: 318482
aauuguugaugguuccaga

SEQ ID NO: 566246 - RNA, 19 nt, Artificial Sequence
  Description of Artificial Sequence: Synthetic oligonucleotide
  Antisense strand to SEQ ID NO: 566245
ucuggaaccaucaacaauu

SEQ ID NO: 566247 - RNA, 19 nt, Artificial Sequence
  Description of Artificial Sequence: Synthetic oligonucleotide
  Sense strand starting at position 623 of SEQ ID NO: 318482
ucaaauauuccgggaaacc

SEQ ID NO: 566248 - RNA, 19 nt, Artificial Sequence
  Description of Artificial Sequence: Synthetic oligonucleotide
  Antisense strand to SEQ ID NO: 566247
gguuucccggaauauuuga

SEQ ID NO: 566249 - RNA, 19 nt, Artificial Sequence
  Description of Artificial Sequence: Synthetic oligonucleotide
  Sense strand starting at position 692 of SEQ ID NO: 318482
ugccauugucaccaaagua

SEQ ID NO: 566250 - RNA, 19 nt, Artificial Sequence
  Description of Artificial Sequence: Synthetic oligonucleotide
  Antisense strand to SEQ ID NO: 566249
uacuuuggugacaauggca

SEQ ID NO: 566251 - RNA, 19 nt, Artificial Sequence
  Description of Artificial Sequence: Synthetic oligonucleotide
  Sense strand starting at position 820 of SEQ ID NO: 318482
aacugaaguguuuaugauc

SEQ ID NO: 566252 - RNA, 19 nt, Artificial Sequence
  Description of Artificial Sequence: Synthetic oligonucleotide
  Antisense strand to SEQ ID NO: 566251
gaucauaaacacuucaguu

SEQ ID NO: 566253 - RNA, 19 nt, Artificial Sequence
  Description of Artificial Sequence: Synthetic oligonucleotide
  Sense strand starting at position 1007 of SEQ ID NO: 318482
ggacaacucuagucagaca

SEQ ID NO: 566254 - RNA, 19 nt, Artificial Sequence
  Description of Artificial Sequence: Synthetic oligonucleotide
  Antisense strand to SEQ ID NO: 566253
ugucugacuagaguugucc

SEQ ID NO: 566255 - RNA, 19 nt, Artificial Sequence
  Description of Artificial Sequence: Synthetic oligonucleotide
  Sense strand starting at position 1048 of SEQ ID NO: 318482
aggauugacugcuuaguuu

SEQ ID NO: 566256 - RNA, 19 nt, Artificial Sequence
  Description of Artificial Sequence: Synthetic oligonucleotide
  Antisense strand to SEQ ID NO: 566255
aaacuaagcagucaauccu

SEQ ID NO: 566257 - RNA, 19 nt, Artificial Sequence
  Description of Artificial Sequence: Synthetic oligonucleotide
  Sense strand starting at position 1138 of SEQ ID NO: 318482
gcauaaugcuccuuugaag

SEQ ID NO: 566258 - RNA, 19 nt, Artificial Sequence
  Description of Artificial Sequence: Synthetic oligonucleotide
  Antisense strand to SEQ ID NO: 566257
cuucaaaggagcauuaugc

SEQ ID NO: 566259 - RNA, 19 nt, Artificial Sequence
  Description of Artificial Sequence: Synthetic oligonucleotide
  Sense strand starting at position 1149 of SEQ ID NO: 318482
cuuugaaguuaacuaauga

SEQ ID NO: 566260 - RNA, 19 nt, Artificial Sequence
  Description of Artificial Sequence: Synthetic oligonucleotide
  Antisense strand to SEQ ID NO: 566259
ucauuaguuaacuucaaag

SEQ ID NO: 566261 - RNA, 19 nt, Artificial Sequence
  Description of Artificial Sequence: Synthetic oligonucleotide
  Sense strand starting at position 1239 of SEQ ID NO: 318482
gguggaauauauguguuag

SEQ ID NO: 566262 - RNA, 19 nt, Artificial Sequence
  Description of Artificial Sequence: Synthetic oligonucleotide
  Antisense strand to SEQ ID NO: 566261
cuaacacauauauuccacc

SEQ ID NO: 566263 - RNA, 19 nt, Artificial Sequence
  Description of Artificial Sequence: Synthetic oligonucleotide
  Sense strand starting at position 1240 of SEQ ID NO: 318482
guggaauauauguguuagu

SEQ ID NO: 566264 - RNA, 19 nt, Artificial Sequence
  Description of Artificial Sequence: Synthetic oligonucleotide
  Antisense strand to SEQ ID NO: 566263
acuaacacauauauuccac

SEQ ID NO: 566265 - RNA, 19 nt, Artificial Sequence
  Description of Artificial Sequence: Synthetic oligonucleotide
  Sense strand starting at position 1440 of SEQ ID NO: 318482
gagggaaucggccguggaa

SEQ ID NO: 566266 - RNA, 19 nt, Artificial Sequence
  Description of Artificial Sequence: Synthetic oligonucleotide
  Antisense strand to SEQ ID NO: 566265
uuccacggccgauucccuc

SEQ ID NO: 566267 - RNA, 19 nt, Artificial Sequence
  Description of Artificial Sequence: Synthetic oligonucleotide
  Sense strand starting at position 2265 of SEQ ID NO: 318482
cagaaauuaucccuguggu

SEQ ID NO: 566268 - RNA, 19 nt, Artificial Sequence
  Description of Artificial Sequence: Synthetic oligonucleotide
  Antisense strand to SEQ ID NO: 566267
accacagggauaauuucug

SEQ ID NO: 566269 - RNA, 19 nt, Artificial Sequence
  Description of Artificial Sequence: Synthetic oligonucleotide
  Sense strand starting at position 2266 of SEQ ID NO: 318482
agaaauuaucccugugguc

SEQ ID NO: 566270 - RNA, 19 nt, Artificial Sequence
  Description of Artificial Sequence: Synthetic oligonucleotide
  Antisense strand to SEQ ID NO: 566269
gaccacagggauaauuucu

SEQ ID NO: 566271 - RNA, 19 nt, Artificial Sequence
  Description of Artificial Sequence: Synthetic oligonucleotide
  Sense strand starting at position 2485 of SEQ ID NO: 318482
accgaugugcaaggagauu

SEQ ID NO: 566272 - RNA, 19 nt, Artificial Sequence
  Description of Artificial Sequence: Synthetic oligonucleotide
  Antisense strand to SEQ ID NO: 566271
aaucuccuugcacaucggu

SEQ ID NO: 566273 - RNA, 19 nt, Artificial Sequence
  Description of Artificial Sequence: Synthetic oligonucleotide
  Sense strand starting at position 2560 of SEQ ID NO: 318482
gaugacuggcgguaaauca

SEQ ID NO: 566274 - RNA, 19 nt, Artificial Sequence
  Description of Artificial Sequence: Synthetic oligonucleotide
  Antisense strand to SEQ ID NO: 566273
ugauuuaccgccagucauc

SEQ ID NO: 566275 - RNA, 19 nt, Artificial Sequence
  Description of Artificial Sequence: Synthetic oligonucleotide
  Sense strand starting at position 2692 of SEQ ID NO: 318482
auuaguuggcuugaggaga

SEQ ID NO: 566276 - RNA, 19 nt, Artificial Sequence
  Description of Artificial Sequence: Synthetic oligonucleotide
  Antisense strand to SEQ ID NO: 566275
ucuccucaagccaacuaau

SEQ ID NO: 566277 - RNA, 19 nt, Artificial Sequence
  Description of Artificial Sequence: Synthetic oligonucleotide
  Sense strand starting at position 2789 of SEQ ID NO: 318482
ugaaguggcuuacuuggaa

SEQ ID NO: 566278 - RNA, 19 nt, Artificial Sequence
  Description of Artificial Sequence: Synthetic oligonucleotide
  Antisense strand to SEQ ID NO: 566277
uuccaaguaagccacuuca

SEQ ID NO: 566279 - RNA, 19 nt, Artificial Sequence
  Description of Artificial Sequence: Synthetic oligonucleotide
  Sense strand starting at position 2792 of SEQ ID NO: 318482
aguggcuuacuuggaaacu

SEQ ID NO: 566280 - RNA, 19 nt, Artificial Sequence
  Description of Artificial Sequence: Synthetic oligonucleotide
  Antisense strand to SEQ ID NO: 566279
aguuuccaaguaagccacu

SEQ ID NO: 566281 - RNA, 19 nt, Artificial Sequence
  Description of Artificial Sequence: Synthetic oligonucleotide
  Sense strand starting at position 2801 of SEQ ID NO: 318482
cuuggaaacuuguccuaag

SEQ ID NO: 566282 - RNA, 19 nt, Artificial Sequence
  Description of Artificial Sequence: Synthetic oligonucleotide
  Antisense strand to SEQ ID NO: 566281
cuuaggacaaguuuccaag

SEQ ID NO: 566283 - RNA, 19 nt, Artificial Sequence
  Description of Artificial Sequence: Synthetic oligonucleotide
  Sense strand starting at position 2802 of SEQ ID NO: 318482
uuggaaacuuguccuaaga

SEQ ID NO: 566284 - RNA, 19 nt, Artificial Sequence
  Description of Artificial Sequence: Synthetic oligonucleotide
  Antisense strand to SEQ ID NO: 566283
ucuuaggacaaguuuccaa

SEQ ID NO: 566285 - RNA, 19 nt, Artificial Sequence
  Description of Artificial Sequence: Synthetic oligonucleotide
  Sense strand starting at position 3444 of SEQ ID NO: 318482
gagcucucaguuuaaugga

SEQ ID NO: 566286 - RNA, 19 nt, Artificial Sequence
  Description of Artificial Sequence: Synthetic oligonucleotide
  Antisense strand to SEQ ID NO: 566285
uccauuaaacugagagcuc

SEQ ID NO: 566287 - RNA, 19 nt, Artificial Sequence
  Description of Artificial Sequence: Synthetic oligonucleotide
  Sense strand starting at position 3543 of SEQ ID NO: 318482
ggaggugauuuaugaagau

SEQ ID NO: 566288 - RNA, 19 nt, Artificial Sequence
  Description of Artificial Sequence: Synthetic oligonucleotide
  Antisense strand to SEQ ID NO: 566287
aucuucauaaaucaccucc

SEQ ID NO: 566289 - RNA, 19 nt, Artificial Sequence
  Description of Artificial Sequence: Synthetic oligonucleotide
  Sense strand starting at position 3713 of SEQ ID NO: 318482
auucuuucucaggaagcaa

SEQ ID NO: 566290 - RNA, 19 nt, Artificial Sequence
  Description of Artificial Sequence: Synthetic oligonucleotide
  Antisense strand to SEQ ID NO: 566289
uugcuuccugagaaagaau

SEQ ID NO: 566291 - RNA, 19 nt, Artificial Sequence
  Description of Artificial Sequence: Synthetic oligonucleotide
  Sense strand starting at position 3725 of SEQ ID NO: 318482
gaagcaauuggaggaugua

SEQ ID NO: 566292 - RNA, 19 nt, Artificial Sequence
  Description of Artificial Sequence: Synthetic oligonucleotide
  Antisense strand to SEQ ID NO: 566291
uacauccuccaauugcuuc

SEQ ID NO: 566293 - RNA, 19 nt, Artificial Sequence
  Description of Artificial Sequence: Synthetic oligonucleotide
  Sense strand starting at position 3859 of SEQ ID NO: 318482
ggauccugcaaagauguua

SEQ ID NO: 566294 - RNA, 19 nt, Artificial Sequence
  Description of Artificial Sequence: Synthetic oligonucleotide
  Antisense strand to SEQ ID NO: 566293
uaacaucuuugcaggaucc

SEQ ID NO: 566295 - RNA, 19 nt, Artificial Sequence
  Description of Artificial Sequence: Synthetic oligonucleotide
  Sense strand starting at position 3931 of SEQ ID NO: 318482
gggagacuauuucggauua

SEQ ID NO: 566296 - RNA, 19 nt, Artificial Sequence
  Description of Artificial Sequence: Synthetic oligonucleotide
  Antisense strand to SEQ ID NO: 566295
uaauccgaaauagucuccc

SEQ ID NO: 566297 - RNA, 19 nt, Artificial Sequence
  Description of Artificial Sequence: Synthetic oligonucleotide
  Sense strand starting at position 3932 of SEQ ID NO: 318482
ggagacuauuucggauuac

SEQ ID NO: 566298 - RNA, 19 nt, Artificial Sequence
  Description of Artificial Sequence: Synthetic oligonucleotide
  Antisense strand to SEQ ID NO: 566297
guaauccgaaauagucucc

SEQ ID NO: 566299 - RNA, 19 nt, Artificial Sequence
  Description of Artificial Sequence: Synthetic oligonucleotide
  Sense strand starting at position 16 of SEQ ID NO: 318483
aguggauccugguucuuua

SEQ ID NO: 566300 - RNA, 19 nt, Artificial Sequence
  Description of Artificial Sequence: Synthetic oligonucleotide
  Antisense strand to SEQ ID NO: 566299
uaaagaaccaggauccacu

SEQ ID NO: 566301 - RNA, 19 nt, Artificial Sequence
  Description of Artificial Sequence: Synthetic oligonucleotide
  Sense strand starting at position 191 of SEQ ID NO: 318483
ccauaacuccuguggcauc

SEQ ID NO: 566302 - RNA, 19 nt, Artificial Sequence
  Description of Artificial Sequence: Synthetic oligonucleotide
  Antisense strand to SEQ ID NO: 566301
gaugccacaggaguuaugg

SEQ ID NO: 566303 - RNA, 19 nt, Artificial Sequence
  Description of Artificial Sequence: Synthetic oligonucleotide
  Sense strand starting at position 289 of SEQ ID NO: 318483
ucuuuagcucuguaguaca

SEQ ID NO: 566304 - RNA, 19 nt, Artificial Sequence
  Description of Artificial Sequence: Synthetic oligonucleotide
  Antisense strand to SEQ ID NO: 566303
uguacuacagagcuaaaga

SEQ ID NO: 566305 - RNA, 19 nt, Artificial Sequence
  Description of Artificial Sequence: Synthetic oligonucleotide
  Sense strand starting at position 427 of SEQ ID NO: 318483
cacggagcucugugugaac

SEQ ID NO: 566306 - RNA, 19 nt, Artificial Sequence
  Description of Artificial Sequence: Synthetic oligonucleotide
  Antisense strand to SEQ ID NO: 566305
guucacacagagcuccgug

SEQ ID NO: 566307 - RNA, 19 nt, Artificial Sequence
  Description of Artificial Sequence: Synthetic oligonucleotide
  Sense strand starting at position 575 of SEQ ID NO: 318483
cccugaccuuggucuaaga

SEQ ID NO: 566308 - RNA, 19 nt, Artificial Sequence
  Description of Artificial Sequence: Synthetic oligonucleotide
  Antisense strand to SEQ ID NO: 566307
ucuuagaccaaggucaggg

SEQ ID NO: 566309 - RNA, 19 nt, Artificial Sequence
  Description of Artificial Sequence: Synthetic oligonucleotide
  Sense strand starting at position 598 of SEQ ID NO: 318483
cagggaucuguuugcagga

SEQ ID NO: 566310 - RNA, 19 nt, Artificial Sequence
  Description of Artificial Sequence: Synthetic oligonucleotide
  Antisense strand to SEQ ID NO: 566309
uccugcaaacagaucccug

SEQ ID NO: 566311 - RNA, 19 nt, Artificial Sequence
  Description of Artificial Sequence: Synthetic oligonucleotide
  Sense strand starting at position 599 of SEQ ID NO: 318483
agggaucuguuugcaggaa

SEQ ID NO: 566312 - RNA, 19 nt, Artificial Sequence
  Description of Artificial Sequence: Synthetic oligonucleotide
  Antisense strand to SEQ ID NO: 566311
uuccugcaaacagaucccu

SEQ ID NO: 566313 - RNA, 19 nt, Artificial Sequence
  Description of Artificial Sequence: Synthetic oligonucleotide
  Sense strand starting at position 818 of SEQ ID NO: 318483
ccuagugaccuuggucaag

SEQ ID NO: 566314 - RNA, 19 nt, Artificial Sequence
  Description of Artificial Sequence: Synthetic oligonucleotide
  Antisense strand to SEQ ID NO: 566313
cuugaccaaggucacuagg

SEQ ID NO: 566315 - RNA, 19 nt, Artificial Sequence
  Description of Artificial Sequence: Synthetic oligonucleotide
  Sense strand starting at position 820 of SEQ ID NO: 318483
uagugaccuuggucaagga

SEQ ID NO: 566316 - RNA, 19 nt, Artificial Sequence
  Description of Artificial Sequence: Synthetic oligonucleotide
  Antisense strand to SEQ ID NO: 566315
uccuugaccaaggucacua

SEQ ID NO: 566317 - RNA, 19 nt, Artificial Sequence
  Description of Artificial Sequence: Synthetic oligonucleotide
  Sense strand starting at position 824 of SEQ ID NO: 318483
gaccuuggucaaggaaauc

SEQ ID NO: 566318 - RNA, 19 nt, Artificial Sequence
  Description of Artificial Sequence: Synthetic oligonucleotide
  Antisense strand to SEQ ID NO: 566317
gauuuccuugaccaagguc

SEQ ID NO: 566319 - RNA, 19 nt, Artificial Sequence
  Description of Artificial Sequence: Synthetic oligonucleotide
  Sense strand starting at position 835 of SEQ ID NO: 318483
aggaaaucccuuugcuucu

SEQ ID NO: 566320 - RNA, 19 nt, Artificial Sequence
  Description of Artificial Sequence: Synthetic oligonucleotide
  Antisense strand to SEQ ID NO: 566319
agaagcaaagggauuuccu

SEQ ID NO: 566321 - RNA, 19 nt, Artificial Sequence
  Description of Artificial Sequence: Synthetic oligonucleotide
  Sense strand starting at position 1198 of SEQ ID NO: 318483
gacuuuaagagccgaggau

SEQ ID NO: 566322 - RNA, 19 nt, Artificial Sequence
  Description of Artificial Sequence: Synthetic oligonucleotide
  Antisense strand to SEQ ID NO: 566321
auccucggcucuuaaaguc

SEQ ID NO: 566323 - RNA, 19 nt, Artificial Sequence
  Description of Artificial Sequence: Synthetic oligonucleotide
  Sense strand starting at position 1606 of SEQ ID NO: 318483
cugucuggauccuuuaaga

SEQ ID NO: 566324 - RNA, 19 nt, Artificial Sequence
  Description of Artificial Sequence: Synthetic oligonucleotide
  Antisense strand to SEQ ID NO: 566323
ucuuaaaggauccagacag

SEQ ID NO: 566325 - RNA, 19 nt, Artificial Sequence
  Description of Artificial Sequence: Synthetic oligonucleotide
  Sense strand starting at position 2147 of SEQ ID NO: 318483
gccgcauauccugacauaa

SEQ ID NO: 566326 - RNA, 19 nt, Artificial Sequence
  Description of Artificial Sequence: Synthetic oligonucleotide
  Antisense strand to SEQ ID NO: 566325
uuaugucaggauaugcggc

SEQ ID NO: 566327 - RNA, 19 nt, Artificial Sequence
  Description of Artificial Sequence: Synthetic oligonucleotide
  Sense strand starting at position 2210 of SEQ ID NO: 318483
cgaacuugcuaugcaaacu

SEQ ID NO: 566328 - RNA, 19 nt, Artificial Sequence
  Description of Artificial Sequence: Synthetic oligonucleotide
  Antisense strand to SEQ ID NO: 566327
aguuugcauagcaaguucg

SEQ ID NO: 566329 - RNA, 19 nt, Artificial Sequence
  Description of Artificial Sequence: Synthetic oligonucleotide
  Sense strand starting at position 2256 of SEQ ID NO: 318483
aguuucccugccgaagaaa

SEQ ID NO: 566330 - RNA, 19 nt, Artificial Sequence
  Description of Artificial Sequence: Synthetic oligonucleotide
  Antisense strand to SEQ ID NO: 566329
uuucuucggcagggaaacu

SEQ ID NO: 566331 - RNA, 19 nt, Artificial Sequence
  Description of Artificial Sequence: Synthetic oligonucleotide
  Sense strand starting at position 2634 of SEQ ID NO: 318483
gcugacgucacagagacau

SEQ ID NO: 566332 - RNA, 19 nt, Artificial Sequence
  Description of Artificial Sequence: Synthetic oligonucleotide
  Antisense strand to SEQ ID NO: 566331
augucucugugacgucagc

SEQ ID NO: 566333 - RNA, 19 nt, Artificial Sequence
  Description of Artificial Sequence: Synthetic oligonucleotide
  Sense strand starting at position 2817 of SEQ ID NO: 318483
cagugaagcgucuauacuu

SEQ ID NO: 566334 - RNA, 19 nt, Artificial Sequence
  Description of Artificial Sequence: Synthetic oligonucleotide
  Antisense strand to SEQ ID NO: 566333
aaguauagacgcuucacug

SEQ ID NO: 566335 - RNA, 19 nt, Artificial Sequence
  Description of Artificial Sequence: Synthetic oligonucleotide
  Sense strand starting at position 2963 of SEQ ID NO: 318483
gugugaaccuaauccaaag

SEQ ID NO: 566336 - RNA, 19 nt, Artificial Sequence
  Description of Artificial Sequence: Synthetic oligonucleotide
  Antisense strand to SEQ ID NO: 566335
cuuuggauuagguucacac

SEQ ID NO: 566337 - RNA, 19 nt, Artificial Sequence
  Description of Artificial Sequence: Synthetic oligonucleotide
  Sense strand starting at position 3042 of SEQ ID NO: 318483
ggguauuaccuccaccaca

SEQ ID NO: 566338 - RNA, 19 nt, Artificial Sequence
  Description of Artificial Sequence: Synthetic oligonucleotide
  Antisense strand to SEQ ID NO: 566337
ugugguggagguaauaccc

SEQ ID NO: 566339 - RNA, 19 nt, Artificial Sequence
  Description of Artificial Sequence: Synthetic oligonucleotide
  Sense strand starting at position 3103 of SEQ ID NO: 318483
gcuggaacaggucgaauaa

SEQ ID NO: 566340 - RNA, 19 nt, Artificial Sequence
  Description of Artificial Sequence: Synthetic oligonucleotide
  Antisense strand to SEQ ID NO: 566339
uuauucgaccuguuccagc

SEQ ID NO: 566341 - RNA, 19 nt, Artificial Sequence
  Description of Artificial Sequence: Synthetic oligonucleotide
  Sense strand starting at position 3123 of SEQ ID NO: 318483
gaauauugggugcaugcau

SEQ ID NO: 566342 - RNA, 19 nt, Artificial Sequence
  Description of Artificial Sequence: Synthetic oligonucleotide
  Antisense strand to SEQ ID NO: 566341
augcaugcacccaauauuc

SEQ ID NO: 566343 - RNA, 19 nt, Artificial Sequence
  Description of Artificial Sequence: Synthetic oligonucleotide
  Sense strand starting at position 3368 of SEQ ID NO: 318483
guucuaacaguauguauca

SEQ ID NO: 566344 - RNA, 19 nt, Artificial Sequence
  Description of Artificial Sequence: Synthetic oligonucleotide
  Antisense strand to SEQ ID NO: 566343
ugauacauacuguuagaac

SEQ ID NO: 566345 - RNA, 19 nt, Artificial Sequence
  Description of Artificial Sequence: Synthetic oligonucleotide
  Sense strand starting at position 3380 of SEQ ID NO: 318483
uguaucagguuucuuuaau

SEQ ID NO: 566346 - RNA, 19 nt, Artificial Sequence
  Description of Artificial Sequence: Synthetic oligonucleotide
  Antisense strand to SEQ ID NO: 566345
auuaaagaaaccugauaca

SEQ ID NO: 566347 - RNA, 19 nt, Artificial Sequence
  Description of Artificial Sequence: Synthetic oligonucleotide
  Sense strand starting at position 3381 of SEQ ID NO: 318483
guaucagguuucuuuaauu

SEQ ID NO: 566348 - RNA, 19 nt, Artificial Sequence
  Description of Artificial Sequence: Synthetic oligonucleotide
  Antisense strand to SEQ ID NO: 566347
aauuaaagaaaccugauac

SEQ ID NO: 566349 - RNA, 19 nt, Artificial Sequence
  Description of Artificial Sequence: Synthetic oligonucleotide
  Sense strand starting at position 3386 of SEQ ID NO: 318483
agguuucuuuaauuggaca

SEQ ID NO: 566350 - RNA, 19 nt, Artificial Sequence
  Description of Artificial Sequence: Synthetic oligonucleotide
  Antisense strand to SEQ ID NO: 566349
uguccaauuaaagaaaccu

SEQ ID NO: 566351 - RNA, 19 nt, Artificial Sequence
  Description of Artificial Sequence: Synthetic oligonucleotide
  Sense strand starting at position 3452 of SEQ ID NO: 318483
uaacaauuguccuuaggga

SEQ ID NO: 566352 - RNA, 19 nt, Artificial Sequence
  Description of Artificial Sequence: Synthetic oligonucleotide
  Antisense strand to SEQ ID NO: 566351
ucccuaaggacaauuguua

SEQ ID NO: 566353 - RNA, 19 nt, Artificial Sequence
  Description of Artificial Sequence: Synthetic oligonucleotide
  Sense strand starting at position 3480 of SEQ ID NO: 318483
gggagaaguugggucagua

SEQ ID NO: 566354 - RNA, 19 nt, Artificial Sequence
  Description of Artificial Sequence: Synthetic oligonucleotide
  Antisense strand to SEQ ID NO: 566353
uacugacccaacuucuccc

SEQ ID NO: 566355 - RNA, 19 nt, Artificial Sequence
  Description of Artificial Sequence: Synthetic oligonucleotide
  Sense strand starting at position 3484 of SEQ ID NO: 318483
gaaguugggucaguaggau

SEQ ID NO: 566356 - RNA, 19 nt, Artificial Sequence
  Description of Artificial Sequence: Synthetic oligonucleotide
  Antisense strand to SEQ ID NO: 566355
auccuacugacccaacuuc

SEQ ID NO: 566357 - RNA, 19 nt, Artificial Sequence
  Description of Artificial Sequence: Synthetic oligonucleotide
  Sense strand starting at position 3665 of SEQ ID NO: 318483
aacagacauguuuauggca

SEQ ID NO: 566358 - RNA, 19 nt, Artificial Sequence
  Description of Artificial Sequence: Synthetic oligonucleotide
  Antisense strand to SEQ ID NO: 566357
ugccauaaacaugucuguu

SEQ ID NO: 566359 - RNA, 19 nt, Artificial Sequence
  Description of Artificial Sequence: Synthetic oligonucleotide
  Sense strand starting at position 3673 of SEQ ID NO: 318483
uguuuauggcaauguuuag

SEQ ID NO: 566360 - RNA, 19 nt, Artificial Sequence
  Description of Artificial Sequence: Synthetic oligonucleotide
  Antisense strand to SEQ ID NO: 566359
cuaaacauugccauaaaca

SEQ ID NO: 566361 - RNA, 19 nt, Artificial Sequence
  Description of Artificial Sequence: Synthetic oligonucleotide
  Sense strand starting at position 3685 of SEQ ID NO: 318483
uguuuagaccagcaaugau

SEQ ID NO: 566362 - RNA, 19 nt, Artificial Sequence
  Description of Artificial Sequence: Synthetic oligonucleotide
  Antisense strand to SEQ ID NO: 566361
aucauugcuggucuaaaca

SEQ ID NO: 566363 - RNA, 19 nt, Artificial Sequence
  Description of Artificial Sequence: Synthetic oligonucleotide
  Sense strand starting at position 3751 of SEQ ID NO: 318483
ucggcagaucucuaagcaa

SEQ ID NO: 566364 - RNA, 19 nt, Artificial Sequence
  Description of Artificial Sequence: Synthetic oligonucleotide
  Antisense strand to SEQ ID NO: 566363
uugcuuagagaucugccga

SEQ ID NO: 566365 - RNA, 19 nt, Artificial Sequence
  Description of Artificial Sequence: Synthetic oligonucleotide
  Sense strand starting at position 3843 of SEQ ID NO: 318483
auuacaugugcaugagaau

SEQ ID NO: 566366 - RNA, 19 nt, Artificial Sequence
  Description of Artificial Sequence: Synthetic oligonucleotide
  Antisense strand to SEQ ID NO: 566365
auucucaugcacauguaau

SEQ ID NO: 566367 - RNA, 19 nt, Artificial Sequence
  Description of Artificial Sequence: Synthetic oligonucleotide
  Sense strand starting at position 3844 of SEQ ID NO: 318483
uuacaugugcaugagaaua

SEQ ID NO: 566368 - RNA, 19 nt, Artificial Sequence
  Description of Artificial Sequence: Synthetic oligonucleotide
  Antisense strand to SEQ ID NO: 566367
uauucucaugcacauguaa

SEQ ID NO: 566369 - RNA, 19 nt, Artificial Sequence
  Description of Artificial Sequence: Synthetic oligonucleotide
  Sense strand starting at position 3849 of SEQ ID NO: 318483
ugugcaugagaauaagugu

SEQ ID NO: 566370 - RNA, 19 nt, Artificial Sequence
  Description of Artificial Sequence: Synthetic oligonucleotide
  Antisense strand to SEQ ID NO: 566369
acacuuauucucaugcaca

SEQ ID NO: 566371 - RNA, 19 nt, Artificial Sequence
  Description of Artificial Sequence: Synthetic oligonucleotide
  Sense strand starting at position 3855 of SEQ ID NO: 318483
ugagaauaaguguggcuau

SEQ ID NO: 566372 - RNA, 19 nt, Artificial Sequence
  Description of Artificial Sequence: Synthetic oligonucleotide
  Antisense strand to SEQ ID NO: 566371
auagccacacuuauucuca

SEQ ID NO: 566373 - RNA, 19 nt, Artificial Sequence
  Description of Artificial Sequence: Synthetic oligonucleotide
  Sense strand starting at position 3858 of SEQ ID NO: 318483
gaauaaguguggcuauaca

SEQ ID NO: 566374 - RNA, 19 nt, Artificial Sequence
  Description of Artificial Sequence: Synthetic oligonucleotide
  Antisense strand to SEQ ID NO: 566373
uguauagccacacuuauuc

SEQ ID NO: 566375 - RNA, 19 nt, Artificial Sequence
  Description of Artificial Sequence: Synthetic oligonucleotide
  Sense strand starting at position 3872 of SEQ ID NO: 318483
auacaagguuaugucuuua

SEQ ID NO: 566376 - RNA, 19 nt, Artificial Sequence
  Description of Artificial Sequence: Synthetic oligonucleotide
  Antisense strand to SEQ ID NO: 566375
uaaagacauaaccuuguau

SEQ ID NO: 566377 - RNA, 19 nt, Artificial Sequence
  Description of Artificial Sequence: Synthetic oligonucleotide
  Sense strand starting at position 3877 of SEQ ID NO: 318483
agguuaugucuuuacccag

SEQ ID NO: 566378 - RNA, 19 nt, Artificial Sequence
  Description of Artificial Sequence: Synthetic oligonucleotide
  Antisense strand to SEQ ID NO: 566377
cuggguaaagacauaaccu

SEQ ID NO: 566379 - RNA, 19 nt, Artificial Sequence
  Description of Artificial Sequence: Synthetic oligonucleotide
  Sense strand starting at position 51 of SEQ ID NO: 318484
agccaaggcguccaagaaa

SEQ ID NO: 566380 - RNA, 19 nt, Artificial Sequence
  Description of Artificial Sequence: Synthetic oligonucleotide
  Antisense strand to SEQ ID NO: 566379
uuucuuggacgccuuggcu

SEQ ID NO: 566381 - RNA, 19 nt, Artificial Sequence
  Description of Artificial Sequence: Synthetic oligonucleotide
  Sense strand starting at position 204 of SEQ ID NO: 318484
aagaauguaugucuguguu

SEQ ID NO: 566382 - RNA, 19 nt, Artificial Sequence
  Description of Artificial Sequence: Synthetic oligonucleotide
  Antisense strand to SEQ ID NO: 566381
aacacagacauacauucuu

SEQ ID NO: 566383 - RNA, 19 nt, Artificial Sequence
  Description of Artificial Sequence: Synthetic oligonucleotide
  Sense strand starting at position 941 of SEQ ID NO: 318484
ccucuaagaucuguugacu

SEQ ID NO: 566384 - RNA, 19 nt, Artificial Sequence
  Description of Artificial Sequence: Synthetic oligonucleotide
  Antisense strand to SEQ ID NO: 566383
agucaacagaucuuagagg

SEQ ID NO: 566385 - RNA, 19 nt, Artificial Sequence
  Description of Artificial Sequence: Synthetic oligonucleotide
  Sense strand starting at position 944 of SEQ ID NO: 318484
cuaagaucuguugacuugu

SEQ ID NO: 566386 - RNA, 19 nt, Artificial Sequence
  Description of Artificial Sequence: Synthetic oligonucleotide
  Antisense strand to SEQ ID NO: 566385
acaagucaacagaucuuag

SEQ ID NO: 566387 - RNA, 19 nt, Artificial Sequence
  Description of Artificial Sequence: Synthetic oligonucleotide
  Sense strand starting at position 946 of SEQ ID NO: 318484
aagaucuguugacuuguaa

SEQ ID NO: 566388 - RNA, 19 nt, Artificial Sequence
  Description of Artificial Sequence: Synthetic oligonucleotide
  Antisense strand to SEQ ID NO: 566387
uuacaagucaacagaucuu

SEQ ID NO: 566389 - RNA, 19 nt, Artificial Sequence
  Description of Artificial Sequence: Synthetic oligonucleotide
  Sense strand starting at position 968 of SEQ ID NO: 318484
ugagauuaugaaugucugu

SEQ ID NO: 566390 - RNA, 19 nt, Artificial Sequence
  Description of Artificial Sequence: Synthetic oligonucleotide
  Antisense strand to SEQ ID NO: 566389
acagacauucauaaucuca

SEQ ID NO: 566391 - RNA, 19 nt, Artificial Sequence
  Description of Artificial Sequence: Synthetic oligonucleotide
  Sense strand starting at position 977 of SEQ ID NO: 318484
gaaugucuguuccuggcaa

SEQ ID NO: 566392 - RNA, 19 nt, Artificial Sequence
  Description of Artificial Sequence: Synthetic oligonucleotide
  Antisense strand to SEQ ID NO: 566391
uugccaggaacagacauuc

SEQ ID NO: 566393 - RNA, 19 nt, Artificial Sequence
  Description of Artificial Sequence: Synthetic oligonucleotide
  Sense strand starting at position 1045 of SEQ ID NO: 318484
gacaguuuacccugagcac

SEQ ID NO: 566394 - RNA, 19 nt, Artificial Sequence
  Description of Artificial Sequence: Synthetic oligonucleotide
  Antisense strand to SEQ ID NO: 566393
gugcucaggguaaacuguc

SEQ ID NO: 566395 - RNA, 19 nt, Artificial Sequence
  Description of Artificial Sequence: Synthetic oligonucleotide
  Sense strand starting at position 1046 of SEQ ID NO: 318484
acaguuuacccugagcacu

SEQ ID NO: 566396 - RNA, 19 nt, Artificial Sequence
  Description of Artificial Sequence: Synthetic oligonucleotide
  Antisense strand to SEQ ID NO: 566395
agugcucaggguaaacugu

SEQ ID NO: 566397 - RNA, 19 nt, Artificial Sequence
  Description of Artificial Sequence: Synthetic oligonucleotide
  Sense strand starting at position 1054 of SEQ ID NO: 318484
cccugagcacucuagggau

SEQ ID NO: 566398 - RNA, 19 nt, Artificial Sequence
  Description of Artificial Sequence: Synthetic oligonucleotide
  Antisense strand to SEQ ID NO: 566397
aucccuagagugcucaggg

SEQ ID NO: 566399 - RNA, 19 nt, Artificial Sequence
  Description of Artificial Sequence: Synthetic oligonucleotide
  Sense strand starting at position 1056 of SEQ ID NO: 318484
cugagcacucuagggauga

SEQ ID NO: 566400 - RNA, 19 nt, Artificial Sequence
  Description of Artificial Sequence: Synthetic oligonucleotide
  Antisense strand to SEQ ID NO: 566399
ucaucccuagagugcucag

SEQ ID NO: 566401 - RNA, 19 nt, Artificial Sequence
  Description of Artificial Sequence: Synthetic oligonucleotide
  Sense strand starting at position 1066 of SEQ ID NO: 318484
uagggaugaugaccucagu

SEQ ID NO: 566402 - RNA, 19 nt, Artificial Sequence
  Description of Artificial Sequence: Synthetic oligonucleotide
  Antisense strand to SEQ ID NO: 566401
acugaggucaucaucccua

SEQ ID NO: 566403 - RNA, 19 nt, Artificial Sequence
  Description of Artificial Sequence: Synthetic oligonucleotide
  Sense strand starting at position 1118 of SEQ ID NO: 318484
accagcucuggguauacau

SEQ ID NO: 566404 - RNA, 19 nt, Artificial Sequence
  Description of Artificial Sequence: Synthetic oligonucleotide
  Antisense strand to SEQ ID NO: 566403
auguauacccagagcuggu

SEQ ID NO: 566405 - RNA, 19 nt, Artificial Sequence
  Description of Artificial Sequence: Synthetic oligonucleotide
  Sense strand starting at position 1144 of SEQ ID NO: 318484
agaggacucucugcagaug

SEQ ID NO: 566406 - RNA, 19 nt, Artificial Sequence
  Description of Artificial Sequence: Synthetic oligonucleotide
  Antisense strand to SEQ ID NO: 566405
caucugcagagaguccucu

SEQ ID NO: 566407 - RNA, 19 nt, Artificial Sequence
  Description of Artificial Sequence: Synthetic oligonucleotide
  Sense strand starting at position 1178 of SEQ ID NO: 318484
auauuccucuuuguaaagu

SEQ ID NO: 566408 - RNA, 19 nt, Artificial Sequence
  Description of Artificial Sequence: Synthetic oligonucleotide
  Antisense strand to SEQ ID NO: 566407
acuuuacaaagaggaauau

SEQ ID NO: 566409 - RNA, 19 nt, Artificial Sequence
  Description of Artificial Sequence: Synthetic oligonucleotide
  Sense strand starting at position 1260 of SEQ ID NO: 318484
augcaauuacuuuguuaag

SEQ ID NO: 566410 - RNA, 19 nt, Artificial Sequence
  Description of Artificial Sequence: Synthetic oligonucleotide
  Antisense strand to SEQ ID NO: 566409
cuuaacaaaguaauugcau

SEQ ID NO: 566411 - RNA, 19 nt, Artificial Sequence
  Description of Artificial Sequence: Synthetic oligonucleotide
  Sense strand starting at position 1261 of SEQ ID NO: 318484
ugcaauuacuuuguuaagu

SEQ ID NO: 566412 - RNA, 19 nt, Artificial Sequence
  Description of Artificial Sequence: Synthetic oligonucleotide
  Antisense strand to SEQ ID NO: 566411
acuuaacaaaguaauugca

SEQ ID NO: 566413 - RNA, 19 nt, Artificial Sequence
  Description of Artificial Sequence: Synthetic oligonucleotide
  Sense strand starting at position 1262 of SEQ ID NO: 318484
gcaauuacuuuguuaaguu

SEQ ID NO: 566414 - RNA, 19 nt, Artificial Sequence
  Description of Artificial Sequence: Synthetic oligonucleotide
  Antisense strand to SEQ ID NO: 566413
aacuuaacaaaguaauugc

SEQ ID NO: 566415 - RNA, 19 nt, Artificial Sequence
  Description of Artificial Sequence: Synthetic oligonucleotide
  Sense strand starting at position 1326 of SEQ ID NO: 318484
uuacguuguagguaaguga

SEQ ID NO: 566416 - RNA, 19 nt, Artificial Sequence
  Description of Artificial Sequence: Synthetic oligonucleotide
  Antisense strand to SEQ ID NO: 566415
ucacuuaccuacaacguaa

SEQ ID NO: 566417 - RNA, 19 nt, Artificial Sequence
  Description of Artificial Sequence: Synthetic oligonucleotide
  Sense strand starting at position 1362 of SEQ ID NO: 318484
cgggucucauagucgauaa

SEQ ID NO: 566418 - RNA, 19 nt, Artificial Sequence
  Description of Artificial Sequence: Synthetic oligonucleotide
  Antisense strand to SEQ ID NO: 566417
uuaucgacuaugagacccg

SEQ ID NO: 566419 - RNA, 19 nt, Artificial Sequence
  Description of Artificial Sequence: Synthetic oligonucleotide
  Sense strand starting at position 1363 of SEQ ID NO: 318484
gggucucauagucgauaaa

SEQ ID NO: 566420 - RNA, 19 nt, Artificial Sequence
  Description of Artificial Sequence: Synthetic oligonucleotide
  Antisense strand to SEQ ID NO: 566419
uuuaucgacuaugagaccc

SEQ ID NO: 566421 - RNA, 19 nt, Artificial Sequence
  Description of Artificial Sequence: Synthetic oligonucleotide
  Sense strand starting at position 1382 of SEQ ID NO: 318484
ucgaaaugguuccuagaua

SEQ ID NO: 566422 - RNA, 19 nt, Artificial Sequence
  Description of Artificial Sequence: Synthetic oligonucleotide
  Antisense strand to SEQ ID NO: 566421
uaucuaggaaccauuucga

SEQ ID NO: 566423 - RNA, 19 nt, Artificial Sequence
  Description of Artificial Sequence: Synthetic oligonucleotide
  Sense strand starting at position 1415 of SEQ ID NO: 318484
agaugucaccaaugcuaag

SEQ ID NO: 566424 - RNA, 19 nt, Artificial Sequence
  Description of Artificial Sequence: Synthetic oligonucleotide
  Antisense strand to SEQ ID NO: 566423
cuuagcauuggugacaucu

SEQ ID NO: 566425 - RNA, 19 nt, Artificial Sequence
  Description of Artificial Sequence: Synthetic oligonucleotide
  Sense strand starting at position 2389 of SEQ ID NO: 318484
uaagccaucccguagugaa

SEQ ID NO: 566426 - RNA, 19 nt, Artificial Sequence
  Description of Artificial Sequence: Synthetic oligonucleotide
  Antisense strand to SEQ ID NO: 566425
uucacuacgggauggcuua

SEQ ID NO: 566427 - RNA, 19 nt, Artificial Sequence
  Description of Artificial Sequence: Synthetic oligonucleotide
  Sense strand starting at position 2399 of SEQ ID NO: 318484
cguagugaaccugaguucu

SEQ ID NO: 566428 - RNA, 19 nt, Artificial Sequence
  Description of Artificial Sequence: Synthetic oligonucleotide
  Antisense strand to SEQ ID NO: 566427
agaacucagguucacuacg

SEQ ID NO: 566429 - RNA, 19 nt, Artificial Sequence
  Description of Artificial Sequence: Synthetic oligonucleotide
  Sense strand starting at position 2401 of SEQ ID NO: 318484
uagugaaccugaguucuua

SEQ ID NO: 566430 - RNA, 19 nt, Artificial Sequence
  Description of Artificial Sequence: Synthetic oligonucleotide
  Antisense strand to SEQ ID NO: 566429
uaagaacucagguucacua

SEQ ID NO: 566431 - RNA, 19 nt, Artificial Sequence
  Description of Artificial Sequence: Synthetic oligonucleotide
  Sense strand starting at position 2509 of SEQ ID NO: 318484
cuggcucuaggaggaaaua

SEQ ID NO: 566432 - RNA, 19 nt, Artificial Sequence
  Description of Artificial Sequence: Synthetic oligonucleotide
  Antisense strand to SEQ ID NO: 566431
uauuuccuccuagagccag

SEQ ID NO: 566433 - RNA, 19 nt, Artificial Sequence
  Description of Artificial Sequence: Synthetic oligonucleotide
  Sense strand starting at position 2546 of SEQ ID NO: 318484
agccucgagucgaaggaua

SEQ ID NO: 566434 - RNA, 19 nt, Artificial Sequence
  Description of Artificial Sequence: Synthetic oligonucleotide
  Antisense strand to SEQ ID NO: 566433
uauccuucgacucgaggcu

SEQ ID NO: 566435 - RNA, 19 nt, Artificial Sequence
  Description of Artificial Sequence: Synthetic oligonucleotide
  Sense strand starting at position 2893 of SEQ ID NO: 318484
auuuaaaguugaugacagu

SEQ ID NO: 566436 - RNA, 19 nt, Artificial Sequence
  Description of Artificial Sequence: Synthetic oligonucleotide
  Antisense strand to SEQ ID NO: 566435
acugucaucaacuuuaaau

SEQ ID NO: 566437 - RNA, 19 nt, Artificial Sequence
  Description of Artificial Sequence: Synthetic oligonucleotide
  Sense strand starting at position 3216 of SEQ ID NO: 318484
aggaaucuucuauguuguu

SEQ ID NO: 566438 - RNA, 19 nt, Artificial Sequence
  Description of Artificial Sequence: Synthetic oligonucleotide
  Antisense strand to SEQ ID NO: 566437
aacaacauagaagauuccu

SEQ ID NO: 566439 - RNA, 19 nt, Artificial Sequence
  Description of Artificial Sequence: Synthetic oligonucleotide
  Sense strand starting at position 3221 of SEQ ID NO: 318484
ucuucuauguuguugagag

SEQ ID NO: 566440 - RNA, 19 nt, Artificial Sequence
  Description of Artificial Sequence: Synthetic oligonucleotide
  Antisense strand to SEQ ID NO: 566439
cucucaacaacauagaaga

SEQ ID NO: 566441 - RNA, 19 nt, Artificial Sequence
  Description of Artificial Sequence: Synthetic oligonucleotide
  Sense strand starting at position 3228 of SEQ ID NO: 318484
uguuguugagagggauguu

SEQ ID NO: 566442 - RNA, 19 nt, Artificial Sequence
  Description of Artificial Sequence: Synthetic oligonucleotide
  Antisense strand to SEQ ID NO: 566441
aacaucccucucaacaaca

SEQ ID NO: 566443 - RNA, 19 nt, Artificial Sequence
  Description of Artificial Sequence: Synthetic oligonucleotide
  Sense strand starting at position 3229 of SEQ ID NO: 318484
guuguugagagggauguua

SEQ ID NO: 566444 - RNA, 19 nt, Artificial Sequence
  Description of Artificial Sequence: Synthetic oligonucleotide
  Antisense strand to SEQ ID NO: 566443
uaacaucccucucaacaac

SEQ ID NO: 566445 - RNA, 19 nt, Artificial Sequence
  Description of Artificial Sequence: Synthetic oligonucleotide
  Sense strand starting at position 3231 of SEQ ID NO: 318484
uguugagagggauguuaau

SEQ ID NO: 566446 - RNA, 19 nt, Artificial Sequence
  Description of Artificial Sequence: Synthetic oligonucleotide
  Antisense strand to SEQ ID NO: 566445
auuaacaucccucucaaca

SEQ ID NO: 566447 - RNA, 19 nt, Artificial Sequence
  Description of Artificial Sequence: Synthetic oligonucleotide
  Sense strand starting at position 3237 of SEQ ID NO: 318484
gagggauguuaauuaguac

SEQ ID NO: 566448 - RNA, 19 nt, Artificial Sequence
  Description of Artificial Sequence: Synthetic oligonucleotide
  Antisense strand to SEQ ID NO: 566447
guacuaauuaacaucccuc

SEQ ID NO: 566449 - RNA, 19 nt, Artificial Sequence
  Description of Artificial Sequence: Synthetic oligonucleotide
  Sense strand starting at position 3240 of SEQ ID NO: 318484
ggauguuaauuaguaccuu

SEQ ID NO: 566450 - RNA, 19 nt, Artificial Sequence
  Description of Artificial Sequence: Synthetic oligonucleotide
  Antisense strand to SEQ ID NO: 566449
aagguacuaauuaacaucc

SEQ ID NO: 566451 - RNA, 19 nt, Artificial Sequence
  Description of Artificial Sequence: Synthetic oligonucleotide
  Sense strand starting at position 3244 of SEQ ID NO: 318484
guuaauuaguaccuuuaug

SEQ ID NO: 566452 - RNA, 19 nt, Artificial Sequence
  Description of Artificial Sequence: Synthetic oligonucleotide
  Antisense strand to SEQ ID NO: 566451
cauaaagguacuaauuaac

SEQ ID NO: 566453 - RNA, 19 nt, Artificial Sequence
  Description of Artificial Sequence: Synthetic oligonucleotide
  Sense strand starting at position 3292 of SEQ ID NO: 318484
augaucgugcaauauuacu

SEQ ID NO: 566454 - RNA, 19 nt, Artificial Sequence
  Description of Artificial Sequence: Synthetic oligonucleotide
  Antisense strand to SEQ ID NO: 566453
aguaauauugcacgaucau

SEQ ID NO: 566455 - RNA, 19 nt, Artificial Sequence
  Description of Artificial Sequence: Synthetic oligonucleotide
  Sense strand starting at position 3303 of SEQ ID NO: 318484
auauuacuucugggaacuu

SEQ ID NO: 566456 - RNA, 19 nt, Artificial Sequence
  Description of Artificial Sequence: Synthetic oligonucleotide
  Antisense strand to SEQ ID NO: 566455
aaguucccagaaguaauau

SEQ ID NO: 566457 - RNA, 19 nt, Artificial Sequence
  Description of Artificial Sequence: Synthetic oligonucleotide
  Sense strand starting at position 3464 of SEQ ID NO: 318484
gucaaacaaucugcauagu

SEQ ID NO: 566458 - RNA, 19 nt, Artificial Sequence
  Description of Artificial Sequence: Synthetic oligonucleotide
  Antisense strand to SEQ ID NO: 566457
acuaugcagauuguuugac

SEQ ID NO: 566459 - RNA, 19 nt, Artificial Sequence
  Description of Artificial Sequence: Synthetic oligonucleotide
  Sense strand starting at position 20 of SEQ ID NO: 318485
gcaucaaugggcuaaaggu

SEQ ID NO: 566460 - RNA, 19 nt, Artificial Sequence
  Description of Artificial Sequence: Synthetic oligonucleotide
  Antisense strand to SEQ ID NO: 566459
accuuuagcccauugaugc

SEQ ID NO: 566461 - RNA, 19 nt, Artificial Sequence
  Description of Artificial Sequence: Synthetic oligonucleotide
  Sense strand starting at position 30 of SEQ ID NO: 318485
gcuaaagguagaugauuau

SEQ ID NO: 566462 - RNA, 19 nt, Artificial Sequence
  Description of Artificial Sequence: Synthetic oligonucleotide
  Antisense strand to SEQ ID NO: 566461
auaaucaucuaccuuuagc

SEQ ID NO: 566463 - RNA, 19 nt, Artificial Sequence
  Description of Artificial Sequence: Synthetic oligonucleotide
  Sense strand starting at position 54 of SEQ ID NO: 318485
auaugugaggcuugagcuu

SEQ ID NO: 566464 - RNA, 19 nt, Artificial Sequence
  Description of Artificial Sequence: Synthetic oligonucleotide
  Antisense strand to SEQ ID NO: 566463
aagcucaagccucacauau

SEQ ID NO: 566465 - RNA, 19 nt, Artificial Sequence
  Description of Artificial Sequence: Synthetic oligonucleotide
  Sense strand starting at position 171 of SEQ ID NO: 318485
guugaaacugcugaucaua

SEQ ID NO: 566466 - RNA, 19 nt, Artificial Sequence
  Description of Artificial Sequence: Synthetic oligonucleotide
  Antisense strand to SEQ ID NO: 566465
uaugaucagcaguuucaac

SEQ ID NO: 566467 - RNA, 19 nt, Artificial Sequence
  Description of Artificial Sequence: Synthetic oligonucleotide
  Sense strand starting at position 179 of SEQ ID NO: 318485
ugcugaucauaccucugaa

SEQ ID NO: 566468 - RNA, 19 nt, Artificial Sequence
  Description of Artificial Sequence: Synthetic oligonucleotide
  Antisense strand to SEQ ID NO: 566467
uucagagguaugaucagca

SEQ ID NO: 566469 - RNA, 19 nt, Artificial Sequence
  Description of Artificial Sequence: Synthetic oligonucleotide
  Sense strand starting at position 307 of SEQ ID NO: 318485
gccucaucaccuuauguca

SEQ ID NO: 566470 - RNA, 19 nt, Artificial Sequence
  Description of Artificial Sequence: Synthetic oligonucleotide
  Antisense strand to SEQ ID NO: 566469
ugacauaaggugaugaggc

SEQ ID NO: 566471 - RNA, 19 nt, Artificial Sequence
  Description of Artificial Sequence: Synthetic oligonucleotide
  Sense strand starting at position 347 of SEQ ID NO: 318485
cucuuaacugagugaggga

SEQ ID NO: 566472 - RNA, 19 nt, Artificial Sequence
  Description of Artificial Sequence: Synthetic oligonucleotide
  Antisense strand to SEQ ID NO: 566471
ucccucacucaguuaagag

SEQ ID NO: 566473 - RNA, 19 nt, Artificial Sequence
  Description of Artificial Sequence: Synthetic oligonucleotide
  Sense strand starting at position 418 of SEQ ID NO: 318485
gcuugucacaacugugaag

SEQ ID NO: 566474 - RNA, 19 nt, Artificial Sequence
  Description of Artificial Sequence: Synthetic oligonucleotide
  Antisense strand to SEQ ID NO: 566473
cuucacaguugugacaagc

SEQ ID NO: 566475 - RNA, 19 nt, Artificial Sequence
  Description of Artificial Sequence: Synthetic oligonucleotide
  Sense strand starting at position 588 of SEQ ID NO: 318485
acgugaucuccaugagaac

SEQ ID NO: 566476 - RNA, 19 nt, Artificial Sequence
  Description of Artificial Sequence: Synthetic oligonucleotide
  Antisense strand to SEQ ID NO: 566475
guucucauggagaucacgu

SEQ ID NO: 566477 - RNA, 19 nt, Artificial Sequence
  Description of Artificial Sequence: Synthetic oligonucleotide
  Sense strand starting at position 589 of SEQ ID NO: 318485
cgugaucuccaugagaaca

SEQ ID NO: 566478 - RNA, 19 nt, Artificial Sequence
  Description of Artificial Sequence: Synthetic oligonucleotide
  Antisense strand to SEQ ID NO: 566477
uguucucauggagaucacg

SEQ ID NO: 566479 - RNA, 19 nt, Artificial Sequence
  Description of Artificial Sequence: Synthetic oligonucleotide
  Sense strand starting at position 603 of SEQ ID NO: 318485
gaacaagggccucgucaau

SEQ ID NO: 566480 - RNA, 19 nt, Artificial Sequence
  Description of Artificial Sequence: Synthetic oligonucleotide
  Antisense strand to SEQ ID NO: 566479
auugacgaggcccuuguuc

SEQ ID NO: 566481 - RNA, 19 nt, Artificial Sequence
  Description of Artificial Sequence: Synthetic oligonucleotide
  Sense strand starting at position 614 of SEQ ID NO: 318485
ucgucaaucuuguccuaga

SEQ ID NO: 566482 - RNA, 19 nt, Artificial Sequence
  Description of Artificial Sequence: Synthetic oligonucleotide
  Antisense strand to SEQ ID NO: 566481
ucuaggacaagauugacga

SEQ ID NO: 566483 - RNA, 19 nt, Artificial Sequence
  Description of Artificial Sequence: Synthetic oligonucleotide
  Sense strand starting at position 615 of SEQ ID NO: 318485
cgucaaucuuguccuagaa

SEQ ID NO: 566484 - RNA, 19 nt, Artificial Sequence
  Description of Artificial Sequence: Synthetic oligonucleotide
  Antisense strand to SEQ ID NO: 566483
uucuaggacaagauugacg

SEQ ID NO: 566485 - RNA, 19 nt, Artificial Sequence
  Description of Artificial Sequence: Synthetic oligonucleotide
  Sense strand starting at position 628 of SEQ ID NO: 318485
cuagaacaaucucugguaa

SEQ ID NO: 566486 - RNA, 19 nt, Artificial Sequence
  Description of Artificial Sequence: Synthetic oligonucleotide
  Antisense strand to SEQ ID NO: 566485
uuaccagagauuguucuag

SEQ ID NO: 566487 - RNA, 19 nt, Artificial Sequence
  Description of Artificial Sequence: Synthetic oligonucleotide
  Sense strand starting at position 639 of SEQ ID NO: 318485
ucugguaagugcuccauaa

SEQ ID NO: 566488 - RNA, 19 nt, Artificial Sequence
  Description of Artificial Sequence: Synthetic oligonucleotide
  Antisense strand to SEQ ID NO: 566487
uuauggagcacuuaccaga

SEQ ID NO: 566489 - RNA, 19 nt, Artificial Sequence
  Description of Artificial Sequence: Synthetic oligonucleotide
  Sense strand starting at position 662 of SEQ ID NO: 318485
uccuuugaggaaugaaucu

SEQ ID NO: 566490 - RNA, 19 nt, Artificial Sequence
  Description of Artificial Sequence: Synthetic oligonucleotide
  Antisense strand to SEQ ID NO: 566489
agauucauuccucaaagga

SEQ ID NO: 566491 - RNA, 19 nt, Artificial Sequence
  Description of Artificial Sequence: Synthetic oligonucleotide
  Sense strand starting at position 1289 of SEQ ID NO: 318485
ucacacuacuuuccagagu

SEQ ID NO: 566492 - RNA, 19 nt, Artificial Sequence
  Description of Artificial Sequence: Synthetic oligonucleotide
  Antisense strand to SEQ ID NO: 566491
acucuggaaaguaguguga

SEQ ID NO: 566493 - RNA, 19 nt, Artificial Sequence
  Description of Artificial Sequence: Synthetic oligonucleotide
  Sense strand starting at position 1305 of SEQ ID NO: 318485
aguccugaggcaugugagu

SEQ ID NO: 566494 - RNA, 19 nt, Artificial Sequence
  Description of Artificial Sequence: Synthetic oligonucleotide
  Antisense strand to SEQ ID NO: 566493
acucacaugccucaggacu

SEQ ID NO: 566495 - RNA, 19 nt, Artificial Sequence
  Description of Artificial Sequence: Synthetic oligonucleotide
  Sense strand starting at position 1623 of SEQ ID NO: 318485
gggccuguucucgacccaa

SEQ ID NO: 566496 - RNA, 19 nt, Artificial Sequence
  Description of Artificial Sequence: Synthetic oligonucleotide
  Antisense strand to SEQ ID NO: 566495
uugggucgagaacaggccc

SEQ ID NO: 566497 - RNA, 19 nt, Artificial Sequence
  Description of Artificial Sequence: Synthetic oligonucleotide
  Sense strand starting at position 1717 of SEQ ID NO: 318485
augcgacuagucugacuau

SEQ ID NO: 566498 - RNA, 19 nt, Artificial Sequence
  Description of Artificial Sequence: Synthetic oligonucleotide
  Antisense strand to SEQ ID NO: 566497
auagucagacuagucgcau

SEQ ID NO: 566499 - RNA, 19 nt, Artificial Sequence
  Description of Artificial Sequence: Synthetic oligonucleotide
  Sense strand starting at position 1720 of SEQ ID NO: 318485
cgacuagucugacuaucac

SEQ ID NO: 566500 - RNA, 19 nt, Artificial Sequence
  Description of Artificial Sequence: Synthetic oligonucleotide
  Antisense strand to SEQ ID NO: 566499
gugauagucagacuagucg

SEQ ID NO: 566501 - RNA, 19 nt, Artificial Sequence
  Description of Artificial Sequence: Synthetic oligonucleotide
  Sense strand starting at position 1760 of SEQ ID NO: 318485
ggucgcaugcccgucuaaa

SEQ ID NO: 566502 - RNA, 19 nt, Artificial Sequence
  Description of Artificial Sequence: Synthetic oligonucleotide
  Antisense strand to SEQ ID NO: 566501
uuuagacgggcaugcgacc

SEQ ID NO: 566503 - RNA, 19 nt, Artificial Sequence
  Description of Artificial Sequence: Synthetic oligonucleotide
  Sense strand starting at position 1761 of SEQ ID NO: 318485
gucgcaugcccgucuaaag

SEQ ID NO: 566504 - RNA, 19 nt, Artificial Sequence
  Description of Artificial Sequence: Synthetic oligonucleotide
  Antisense strand to SEQ ID NO: 566503
cuuuagacgggcaugcgac

SEQ ID NO: 566505 - RNA, 19 nt, Artificial Sequence
  Description of Artificial Sequence: Synthetic oligonucleotide
  Sense strand starting at position 1928 of SEQ ID NO: 318485
gguagaguucacuguccga

SEQ ID NO: 566506 - RNA, 19 nt, Artificial Sequence
  Description of Artificial Sequence: Synthetic oligonucleotide
  Antisense strand to SEQ ID NO: 566505
ucggacagugaacucuacc

SEQ ID NO: 566507 - RNA, 19 nt, Artificial Sequence
  Description of Artificial Sequence: Synthetic oligonucleotide
  Sense strand starting at position 1931 of SEQ ID NO: 318485
agaguucacuguccgagaa

SEQ ID NO: 566508 - RNA, 19 nt, Artificial Sequence
  Description of Artificial Sequence: Synthetic oligonucleotide
  Antisense strand to SEQ ID NO: 566507
uucucggacagugaacucu

SEQ ID NO: 566509 - RNA, 19 nt, Artificial Sequence
  Description of Artificial Sequence: Synthetic oligonucleotide
  Sense strand starting at position 2508 of SEQ ID NO: 318485
uuucuaucucugggacuaa

SEQ ID NO: 566510 - RNA, 19 nt, Artificial Sequence
  Description of Artificial Sequence: Synthetic oligonucleotide
  Antisense strand to SEQ ID NO: 566509
uuagucccagagauagaaa

SEQ ID NO: 566511 - RNA, 19 nt, Artificial Sequence
  Description of Artificial Sequence: Synthetic oligonucleotide
  Sense strand starting at position 2894 of SEQ ID NO: 318485
cucucuucggguuaagaac

SEQ ID NO: 566512 - RNA, 19 nt, Artificial Sequence
  Description of Artificial Sequence: Synthetic oligonucleotide
  Antisense strand to SEQ ID NO: 566511
guucuuaacccgaagagag

SEQ ID NO: 566513 - RNA, 19 nt, Artificial Sequence
  Description of Artificial Sequence: Synthetic oligonucleotide
  Sense strand starting at position 2918 of SEQ ID NO: 318485
ggguuuauucuaugcaagg

SEQ ID NO: 566514 - RNA, 19 nt, Artificial Sequence
  Description of Artificial Sequence: Synthetic oligonucleotide
  Antisense strand to SEQ ID NO: 566513
ccuugcauagaauaaaccc

SEQ ID NO: 566515 - RNA, 19 nt, Artificial Sequence
  Description of Artificial Sequence: Synthetic oligonucleotide
  Sense strand starting at position 2919 of SEQ ID NO: 318485
gguuuauucuaugcaaggu

SEQ ID NO: 566516 - RNA, 19 nt, Artificial Sequence
  Description of Artificial Sequence: Synthetic oligonucleotide
  Antisense strand to SEQ ID NO: 566515
accuugcauagaauaaacc

SEQ ID NO: 566517 - RNA, 19 nt, Artificial Sequence
  Description of Artificial Sequence: Synthetic oligonucleotide
  Sense strand starting at position 2923 of SEQ ID NO: 318485
uauucuaugcaagguguua

SEQ ID NO: 566518 - RNA, 19 nt, Artificial Sequence
  Description of Artificial Sequence: Synthetic oligonucleotide
  Antisense strand to SEQ ID NO: 566517
uaacaccuugcauagaaua

SEQ ID NO: 566519 - RNA, 19 nt, Artificial Sequence
  Description of Artificial Sequence: Synthetic oligonucleotide
  Sense strand starting at position 2979 of SEQ ID NO: 318485
uauguugaacgacaacuua

SEQ ID NO: 566520 - RNA, 19 nt, Artificial Sequence
  Description of Artificial Sequence: Synthetic oligonucleotide
  Antisense strand to SEQ ID NO: 566519
uaaguugucguucaacaua

SEQ ID NO: 566521 - RNA, 19 nt, Artificial Sequence
  Description of Artificial Sequence: Synthetic oligonucleotide
  Sense strand starting at position 3028 of SEQ ID NO: 318485
gagggaagaugucuugcaa

SEQ ID NO: 566522 - RNA, 19 nt, Artificial Sequence
  Description of Artificial Sequence: Synthetic oligonucleotide
  Antisense strand to SEQ ID NO: 566521
uugcaagacaucuucccuc

SEQ ID NO: 566523 - RNA, 19 nt, Artificial Sequence
  Description of Artificial Sequence: Synthetic oligonucleotide
  Sense strand starting at position 3088 of SEQ ID NO: 318485
guuuaucaguguucccuga

SEQ ID NO: 566524 - RNA, 19 nt, Artificial Sequence
  Description of Artificial Sequence: Synthetic oligonucleotide
  Antisense strand to SEQ ID NO: 566523
ucagggaacacugauaaac

SEQ ID NO: 566525 - RNA, 19 nt, Artificial Sequence
  Description of Artificial Sequence: Synthetic oligonucleotide
  Sense strand starting at position 3090 of SEQ ID NO: 318485
uuaucaguguucccugaca

SEQ ID NO: 566526 - RNA, 19 nt, Artificial Sequence
  Description of Artificial Sequence: Synthetic oligonucleotide
  Antisense strand to SEQ ID NO: 566525
ugucagggaacacugauaa

SEQ ID NO: 566527 - RNA, 19 nt, Artificial Sequence
  Description of Artificial Sequence: Synthetic oligonucleotide
  Sense strand starting at position 3092 of SEQ ID NO: 318485
aucaguguucccugacaug

SEQ ID NO: 566528 - RNA, 19 nt, Artificial Sequence
  Description of Artificial Sequence: Synthetic oligonucleotide
  Antisense strand to SEQ ID NO: 566527
caugucagggaacacugau

SEQ ID NO: 566529 - RNA, 19 nt, Artificial Sequence
  Description of Artificial Sequence: Synthetic oligonucleotide
  Sense strand starting at position 3103 of SEQ ID NO: 318485
cugacauguaguggugaca

SEQ ID NO: 566530 - RNA, 19 nt, Artificial Sequence
  Description of Artificial Sequence: Synthetic oligonucleotide
  Antisense strand to SEQ ID NO: 566529
ugucaccacuacaugucag

SEQ ID NO: 566531 - RNA, 19 nt, Artificial Sequence
  Description of Artificial Sequence: Synthetic oligonucleotide
  Sense strand starting at position 3177 of SEQ ID NO: 318485
uagaguuucgcucuuguuc

SEQ ID NO: 566532 - RNA, 19 nt, Artificial Sequence
  Description of Artificial Sequence: Synthetic oligonucleotide
  Antisense strand to SEQ ID NO: 566531
gaacaagagcgaaacucua

SEQ ID NO: 566533 - RNA, 19 nt, Artificial Sequence
  Description of Artificial Sequence: Synthetic oligonucleotide
  Sense strand starting at position 3723 of SEQ ID NO: 318485
gucagagguucuucuuaga

SEQ ID NO: 566534 - RNA, 19 nt, Artificial Sequence
  Description of Artificial Sequence: Synthetic oligonucleotide
  Antisense strand to SEQ ID NO: 566533
ucuaagaagaaccucugac

SEQ ID NO: 566535 - RNA, 19 nt, Artificial Sequence
  Description of Artificial Sequence: Synthetic oligonucleotide
  Sense strand starting at position 3737 of SEQ ID NO: 318485
uuagaauaguccuuaggug

SEQ ID NO: 566536 - RNA, 19 nt, Artificial Sequence
  Description of Artificial Sequence: Synthetic oligonucleotide
  Antisense strand to SEQ ID NO: 566535
caccuaaggacuauucuaa

SEQ ID NO: 566537 - RNA, 19 nt, Artificial Sequence
  Description of Artificial Sequence: Synthetic oligonucleotide
  Sense strand starting at position 3738 of SEQ ID NO: 318485
uagaauaguccuuaggugu

SEQ ID NO: 566538 - RNA, 19 nt, Artificial Sequence
  Description of Artificial Sequence: Synthetic oligonucleotide
  Antisense strand to SEQ ID NO: 566537
acaccuaaggacuauucua

SEQ ID NO: 566539 - RNA, 19 nt, Artificial Sequence
  Description of Artificial Sequence: Synthetic oligonucleotide
  Sense strand starting at position 41 of SEQ ID NO: 318486
guaucaauagcugagaauu

SEQ ID NO: 566540 - RNA, 19 nt, Artificial Sequence
  Description of Artificial Sequence: Synthetic oligonucleotide
  Antisense strand to SEQ ID NO: 566539
aauucucagcuauugauac

SEQ ID NO: 566541 - RNA, 19 nt, Artificial Sequence
  Description of Artificial Sequence: Synthetic oligonucleotide
  Sense strand starting at position 86 of SEQ ID NO: 318486
gagcaccagcuuuauaguu

SEQ ID NO: 566542 - RNA, 19 nt, Artificial Sequence
  Description of Artificial Sequence: Synthetic oligonucleotide
  Antisense strand to SEQ ID NO: 566541
aacuauaaagcuggugcuc

SEQ ID NO: 566543 - RNA, 19 nt, Artificial Sequence
  Description of Artificial Sequence: Synthetic oligonucleotide
  Sense strand starting at position 117 of SEQ ID NO: 318486
uucugaaucuuagcugaga

SEQ ID NO: 566544 - RNA, 19 nt, Artificial Sequence
  Description of Artificial Sequence: Synthetic oligonucleotide
  Antisense strand to SEQ ID NO: 566543
ucucagcuaagauucagaa

SEQ ID NO: 566545 - RNA, 19 nt, Artificial Sequence
  Description of Artificial Sequence: Synthetic oligonucleotide
  Sense strand starting at position 120 of SEQ ID NO: 318486
ugaaucuuagcugagaucu

SEQ ID NO: 566546 - RNA, 19 nt, Artificial Sequence
  Description of Artificial Sequence: Synthetic oligonucleotide
  Antisense strand to SEQ ID NO: 566545
agaucucagcuaagauuca

SEQ ID NO: 566547 - RNA, 19 nt, Artificial Sequence
  Description of Artificial Sequence: Synthetic oligonucleotide
  Sense strand starting at position 131 of SEQ ID NO: 318486
ugagaucuuagauggguua

SEQ ID NO: 566548 - RNA, 19 nt, Artificial Sequence
  Description of Artificial Sequence: Synthetic oligonucleotide
  Antisense strand to SEQ ID NO: 566547
uaacccaucuaagaucuca

SEQ ID NO: 566549 - RNA, 19 nt, Artificial Sequence
  Description of Artificial Sequence: Synthetic oligonucleotide
  Sense strand starting at position 133 of SEQ ID NO: 318486
agaucuuagauggguuaau

SEQ ID NO: 566550 - RNA, 19 nt, Artificial Sequence
  Description of Artificial Sequence: Synthetic oligonucleotide
  Antisense strand to SEQ ID NO: 566549
auuaacccaucuaagaucu

SEQ ID NO: 566551 - RNA, 19 nt, Artificial Sequence
  Description of Artificial Sequence: Synthetic oligonucleotide
  Sense strand starting at position 134 of SEQ ID NO: 318486
gaucuuagauggguuaauc

SEQ ID NO: 566552 - RNA, 19 nt, Artificial Sequence
  Description of Artificial Sequence: Synthetic oligonucleotide
  Antisense strand to SEQ ID NO: 566551
gauuaacccaucuaagauc

SEQ ID NO: 566553 - RNA, 19 nt, Artificial Sequence
  Description of Artificial Sequence: Synthetic oligonucleotide
  Sense strand starting at position 142 of SEQ ID NO: 318486
auggguuaaucucuuagaa

SEQ ID NO: 566554 - RNA, 19 nt, Artificial Sequence
  Description of Artificial Sequence: Synthetic oligonucleotide
  Antisense strand to SEQ ID NO: 566553
uucuaagagauuaacccau

SEQ ID NO: 566555 - RNA, 19 nt, Artificial Sequence
  Description of Artificial Sequence: Synthetic oligonucleotide
  Sense strand starting at position 445 of SEQ ID NO: 318486
uuauacuacuguuuaguga

SEQ ID NO: 566556 - RNA, 19 nt, Artificial Sequence
  Description of Artificial Sequence: Synthetic oligonucleotide
  Antisense strand to SEQ ID NO: 566555
ucacuaaacaguaguauaa

SEQ ID NO: 566557 - RNA, 19 nt, Artificial Sequence
  Description of Artificial Sequence: Synthetic oligonucleotide
  Sense strand starting at position 489 of SEQ ID NO: 318486
aacugaugucaagguuaca

SEQ ID NO: 566558 - RNA, 19 nt, Artificial Sequence
  Description of Artificial Sequence: Synthetic oligonucleotide
  Antisense strand to SEQ ID NO: 566557
uguaaccuugacaucaguu

SEQ ID NO: 566559 - RNA, 19 nt, Artificial Sequence
  Description of Artificial Sequence: Synthetic oligonucleotide
  Sense strand starting at position 556 of SEQ ID NO: 318486
cgagauuauccuggguaac

SEQ ID NO: 566560 - RNA, 19 nt, Artificial Sequence
  Description of Artificial Sequence: Synthetic oligonucleotide
  Antisense strand to SEQ ID NO: 566559
guuacccaggauaaucucg

SEQ ID NO: 566561 - RNA, 19 nt, Artificial Sequence
  Description of Artificial Sequence: Synthetic oligonucleotide
  Sense strand starting at position 798 of SEQ ID NO: 318486
cccaguaaccaucagggua

SEQ ID NO: 566562 - RNA, 19 nt, Artificial Sequence
  Description of Artificial Sequence: Synthetic oligonucleotide
  Antisense strand to SEQ ID NO: 566561
uacccugaugguuacuggg

SEQ ID NO: 566563 - RNA, 19 nt, Artificial Sequence
  Description of Artificial Sequence: Synthetic oligonucleotide
  Sense strand starting at position 866 of SEQ ID NO: 318486
accaauuaugaucgaacau

SEQ ID NO: 566564 - RNA, 19 nt, Artificial Sequence
  Description of Artificial Sequence: Synthetic oligonucleotide
  Antisense strand to SEQ ID NO: 566563
auguucgaucauaauuggu

SEQ ID NO: 566565 - RNA, 19 nt, Artificial Sequence
  Description of Artificial Sequence: Synthetic oligonucleotide
  Sense strand starting at position 898 of SEQ ID NO: 318486
gaaucugcgguauacaauu

SEQ ID NO: 566566 - RNA, 19 nt, Artificial Sequence
  Description of Artificial Sequence: Synthetic oligonucleotide
  Antisense strand to SEQ ID NO: 566565
aauuguauaccgcagauuc

SEQ ID NO: 566567 - RNA, 19 nt, Artificial Sequence
  Description of Artificial Sequence: Synthetic oligonucleotide
  Sense strand starting at position 934 of SEQ ID NO: 318486
accaguuccggugguauuu

SEQ ID NO: 566568 - RNA, 19 nt, Artificial Sequence
  Description of Artificial Sequence: Synthetic oligonucleotide
  Antisense strand to SEQ ID NO: 566567
aaauaccaccggaacuggu

SEQ ID NO: 566569 - RNA, 19 nt, Artificial Sequence
  Description of Artificial Sequence: Synthetic oligonucleotide
  Sense strand starting at position 1063 of SEQ ID NO: 318486
accucaucggcauacagau

SEQ ID NO: 566570 - RNA, 19 nt, Artificial Sequence
  Description of Artificial Sequence: Synthetic oligonucleotide
  Antisense strand to SEQ ID NO: 566569
aucuguaugccgaugaggu

SEQ ID NO: 566571 - RNA, 19 nt, Artificial Sequence
  Description of Artificial Sequence: Synthetic oligonucleotide
  Sense strand starting at position 1073 of SEQ ID NO: 318486
cauacagauguacgaguuu

SEQ ID NO: 566572 - RNA, 19 nt, Artificial Sequence
  Description of Artificial Sequence: Synthetic oligonucleotide
  Antisense strand to SEQ ID NO: 566571
aaacucguacaucuguaug

SEQ ID NO: 566573 - RNA, 19 nt, Artificial Sequence
  Description of Artificial Sequence: Synthetic oligonucleotide
  Sense strand starting at position 1372 of SEQ ID NO: 318486
acucgaguucuccgggaaa

SEQ ID NO: 566574 - RNA, 19 nt, Artificial Sequence
  Description of Artificial Sequence: Synthetic oligonucleotide
  Antisense strand to SEQ ID NO: 566573
uuucccggagaacucgagu

SEQ ID NO: 566575 - RNA, 19 nt, Artificial Sequence
  Description of Artificial Sequence: Synthetic oligonucleotide
  Sense strand starting at position 1375 of SEQ ID NO: 318486
cgaguucuccgggaaacca

SEQ ID NO: 566576 - RNA, 19 nt, Artificial Sequence
  Description of Artificial Sequence: Synthetic oligonucleotide
  Antisense strand to SEQ ID NO: 566575
ugguuucccggagaacucg

SEQ ID NO: 566577 - RNA, 19 nt, Artificial Sequence
  Description of Artificial Sequence: Synthetic oligonucleotide
  Sense strand starting at position 1413 of SEQ ID NO: 318486
ggcaaucguaaagaucgaa

SEQ ID NO: 566578 - RNA, 19 nt, Artificial Sequence
  Description of Artificial Sequence: Synthetic oligonucleotide
  Antisense strand to SEQ ID NO: 566577
uucgaucuuuacgauugcc

SEQ ID NO: 566579 - RNA, 19 nt, Artificial Sequence
  Description of Artificial Sequence: Synthetic oligonucleotide
  Sense strand starting at position 1416 of SEQ ID NO: 318486
aaucguaaagaucgaaacu

SEQ ID NO: 566580 - RNA, 19 nt, Artificial Sequence
  Description of Artificial Sequence: Synthetic oligonucleotide
  Antisense strand to SEQ ID NO: 566579
aguuucgaucuuuacgauu

SEQ ID NO: 566581 - RNA, 19 nt, Artificial Sequence
  Description of Artificial Sequence: Synthetic oligonucleotide
  Sense strand starting at position 1555 of SEQ ID NO: 318486
gccagagagcaucaccaau

SEQ ID NO: 566582 - RNA, 19 nt, Artificial Sequence
  Description of Artificial Sequence: Synthetic oligonucleotide
  Antisense strand to SEQ ID NO: 566581
auuggugaugcucucuggc

SEQ ID NO: 566583 - RNA, 19 nt, Artificial Sequence
  Description of Artificial Sequence: Synthetic oligonucleotide
  Sense strand starting at position 1647 of SEQ ID NO: 318486
gugaaaggucuccaaaggu

SEQ ID NO: 566584 - RNA, 19 nt, Artificial Sequence
  Description of Artificial Sequence: Synthetic oligonucleotide
  Antisense strand to SEQ ID NO: 566583
accuuuggagaccuuucac

SEQ ID NO: 566585 - RNA, 19 nt, Artificial Sequence
  Description of Artificial Sequence: Synthetic oligonucleotide
  Sense strand starting at position 1701 of SEQ ID NO: 318486
ccacaauuacggcgggaua

SEQ ID NO: 566586 - RNA, 19 nt, Artificial Sequence
  Description of Artificial Sequence: Synthetic oligonucleotide
  Antisense strand to SEQ ID NO: 566585
uaucccgccguaauugugg

SEQ ID NO: 566587 - RNA, 19 nt, Artificial Sequence
  Description of Artificial Sequence: Synthetic oligonucleotide
  Sense strand starting at position 1939 of SEQ ID NO: 318486
aggcacuuccgcuauauca

SEQ ID NO: 566588 - RNA, 19 nt, Artificial Sequence
  Description of Artificial Sequence: Synthetic oligonucleotide
  Antisense strand to SEQ ID NO: 566587
ugauauagcggaagugccu

SEQ ID NO: 566589 - RNA, 19 nt, Artificial Sequence
  Description of Artificial Sequence: Synthetic oligonucleotide
  Sense strand starting at position 1964 of SEQ ID NO: 318486
gaagcuuccgcccagggaa

SEQ ID NO: 566590 - RNA, 19 nt, Artificial Sequence
  Description of Artificial Sequence: Synthetic oligonucleotide
  Antisense strand to SEQ ID NO: 566589
uucccugggcggaagcuuc

SEQ ID NO: 566591 - RNA, 19 nt, Artificial Sequence
  Description of Artificial Sequence: Synthetic oligonucleotide
  Sense strand starting at position 2078 of SEQ ID NO: 318486
cgcguuucagugccggaaa

SEQ ID NO: 566592 - RNA, 19 nt, Artificial Sequence
  Description of Artificial Sequence: Synthetic oligonucleotide
  Antisense strand to SEQ ID NO: 566591
uuuccggcacugaaacgcg

SEQ ID NO: 566593 - RNA, 19 nt, Artificial Sequence
  Description of Artificial Sequence: Synthetic oligonucleotide
  Sense strand starting at position 2257 of SEQ ID NO: 318486
guugcuauaccgucgauua

SEQ ID NO: 566594 - RNA, 19 nt, Artificial Sequence
  Description of Artificial Sequence: Synthetic oligonucleotide
  Antisense strand to SEQ ID NO: 566593
uaaucgacgguauagcaac

SEQ ID NO: 566595 - RNA, 19 nt, Artificial Sequence
  Description of Artificial Sequence: Synthetic oligonucleotide
  Sense strand starting at position 2494 of SEQ ID NO: 318486
ggagcuggagcuuagaaua

SEQ ID NO: 566596 - RNA, 19 nt, Artificial Sequence
  Description of Artificial Sequence: Synthetic oligonucleotide
  Antisense strand to SEQ ID NO: 566595
uauucuaagcuccagcucc

SEQ ID NO: 566597 - RNA, 19 nt, Artificial Sequence
  Description of Artificial Sequence: Synthetic oligonucleotide
  Sense strand starting at position 2557 of SEQ ID NO: 318486
guaaaucagaggcaaguua

SEQ ID NO: 566598 - RNA, 19 nt, Artificial Sequence
  Description of Artificial Sequence: Synthetic oligonucleotide
  Antisense strand to SEQ ID NO: 566597
uaacuugccucugauuuac

SEQ ID NO: 566599 - RNA, 19 nt, Artificial Sequence
  Description of Artificial Sequence: Synthetic oligonucleotide
  Sense strand starting at position 2963 of SEQ ID NO: 318486
gcugcuuuccguucuagga

SEQ ID NO: 566600 - RNA, 19 nt, Artificial Sequence
  Description of Artificial Sequence: Synthetic oligonucleotide
  Antisense strand to SEQ ID NO: 566599
uccuagaacggaaagcagc

SEQ ID NO: 566601 - RNA, 19 nt, Artificial Sequence
  Description of Artificial Sequence: Synthetic oligonucleotide
  Sense strand starting at position 2971 of SEQ ID NO: 318486
ccguucuaggagggagaau

SEQ ID NO: 566602 - RNA, 19 nt, Artificial Sequence
  Description of Artificial Sequence: Synthetic oligonucleotide
  Antisense strand to SEQ ID NO: 566601
auucucccuccuagaacgg

SEQ ID NO: 566603 - RNA, 19 nt, Artificial Sequence
  Description of Artificial Sequence: Synthetic oligonucleotide
  Sense strand starting at position 3087 of SEQ ID NO: 318486
cguuucuguggguuaaguu

SEQ ID NO: 566604 - RNA, 19 nt, Artificial Sequence
  Description of Artificial Sequence: Synthetic oligonucleotide
  Antisense strand to SEQ ID NO: 566603
aacuuaacccacagaaacg

SEQ ID NO: 566605 - RNA, 19 nt, Artificial Sequence
  Description of Artificial Sequence: Synthetic oligonucleotide
  Sense strand starting at position 3174 of SEQ ID NO: 318486
uguaccugugaugaaguua

SEQ ID NO: 566606 - RNA, 19 nt, Artificial Sequence
  Description of Artificial Sequence: Synthetic oligonucleotide
  Antisense strand to SEQ ID NO: 566605
uaacuucaucacagguaca

SEQ ID NO: 566607 - RNA, 19 nt, Artificial Sequence
  Description of Artificial Sequence: Synthetic oligonucleotide
  Sense strand starting at position 3304 of SEQ ID NO: 318486
cuuauuguccuguacucaa

SEQ ID NO: 566608 - RNA, 19 nt, Artificial Sequence
  Description of Artificial Sequence: Synthetic oligonucleotide
  Antisense strand to SEQ ID NO: 566607
uugaguacaggacaauaag

SEQ ID NO: 566609 - RNA, 19 nt, Artificial Sequence
  Description of Artificial Sequence: Synthetic oligonucleotide
  Sense strand starting at position 3698 of SEQ ID NO: 318486
ccuaauuuauucguagguu

SEQ ID NO: 566610 - RNA, 19 nt, Artificial Sequence
  Description of Artificial Sequence: Synthetic oligonucleotide
  Antisense strand to SEQ ID NO: 566609
aaccuacgaauaaauuagg

SEQ ID NO: 566611 - RNA, 19 nt, Artificial Sequence
  Description of Artificial Sequence: Synthetic oligonucleotide
  Sense strand starting at position 3721 of SEQ ID NO: 318486
ggauuaauaccuuguuauc

SEQ ID NO: 566612 - RNA, 19 nt, Artificial Sequence
  Description of Artificial Sequence: Synthetic oligonucleotide
  Antisense strand to SEQ ID NO: 566611
gauaacaagguauuaaucc

SEQ ID NO: 566613 - RNA, 19 nt, Artificial Sequence
  Description of Artificial Sequence: Synthetic oligonucleotide
  Sense strand starting at position 3730 of SEQ ID NO: 318486
ccuuguuaucuuuggagac

SEQ ID NO: 566614 - RNA, 19 nt, Artificial Sequence
  Description of Artificial Sequence: Synthetic oligonucleotide
  Antisense strand to SEQ ID NO: 566613
gucuccaaagauaacaagg

SEQ ID NO: 566615 - RNA, 19 nt, Artificial Sequence
  Description of Artificial Sequence: Synthetic oligonucleotide
  Sense strand starting at position 3782 of SEQ ID NO: 318486
aaaugaggucaguguagaa

SEQ ID NO: 566616 - RNA, 19 nt, Artificial Sequence
  Description of Artificial Sequence: Synthetic oligonucleotide
  Antisense strand to SEQ ID NO: 566615
uucuacacugaccucauuu

SEQ ID NO: 566617 - RNA, 19 nt, Artificial Sequence
  Description of Artificial Sequence: Synthetic oligonucleotide
  Sense strand starting at position 3858 of SEQ ID NO: 318486
gucucuuuacuccagacau

SEQ ID NO: 566618 - RNA, 19 nt, Artificial Sequence
  Description of Artificial Sequence: Synthetic oligonucleotide
  Antisense strand to SEQ ID NO: 566617
augucuggaguaaagagac

SEQ ID NO: 566619 - RNA, 19 nt, Artificial Sequence
  Description of Artificial Sequence: Synthetic oligonucleotide
  Sense strand starting at position 178 of SEQ ID NO: 318487
ggcaaaguaccaugagaag

SEQ ID NO: 566620 - RNA, 19 nt, Artificial Sequence
  Description of Artificial Sequence: Synthetic oligonucleotide
  Antisense strand to SEQ ID NO: 566619
cuucucaugguacuuugcc

SEQ ID NO: 566621 - RNA, 19 nt, Artificial Sequence
  Description of Artificial Sequence: Synthetic oligonucleotide
  Sense strand starting at position 245 of SEQ ID NO: 318487
gauagaagccuagggaucu

SEQ ID NO: 566622 - RNA, 19 nt, Artificial Sequence
  Description of Artificial Sequence: Synthetic oligonucleotide
  Antisense strand to SEQ ID NO: 566621
agaucccuaggcuucuauc

SEQ ID NO: 566623 - RNA, 19 nt, Artificial Sequence
  Description of Artificial Sequence: Synthetic oligonucleotide
  Sense strand starting at position 373 of SEQ ID NO: 318487
gcuugauuccugcaugaac

SEQ ID NO: 566624 - RNA, 19 nt, Artificial Sequence
  Description of Artificial Sequence: Synthetic oligonucleotide
  Antisense strand to SEQ ID NO: 566623
guucaugcaggaaucaagc

SEQ ID NO: 566625 - RNA, 19 nt, Artificial Sequence
  Description of Artificial Sequence: Synthetic oligonucleotide
  Sense strand starting at position 375 of SEQ ID NO: 318487
uugauuccugcaugaacuc

SEQ ID NO: 566626 - RNA, 19 nt, Artificial Sequence
  Description of Artificial Sequence: Synthetic oligonucleotide
  Antisense strand to SEQ ID NO: 566625
gaguucaugcaggaaucaa

SEQ ID NO: 566627 - RNA, 19 nt, Artificial Sequence
  Description of Artificial Sequence: Synthetic oligonucleotide
  Sense strand starting at position 384 of SEQ ID NO: 318487
gcaugaacuccucagcuua

SEQ ID NO: 566628 - RNA, 19 nt, Artificial Sequence
  Description of Artificial Sequence: Synthetic oligonucleotide
  Antisense strand to SEQ ID NO: 566627
uaagcugaggaguucaugc

SEQ ID NO: 566629 - RNA, 19 nt, Artificial Sequence
  Description of Artificial Sequence: Synthetic oligonucleotide
  Sense strand starting at position 386 of SEQ ID NO: 318487
augaacuccucagcuuaga

SEQ ID NO: 566630 - RNA, 19 nt, Artificial Sequence
  Description of Artificial Sequence: Synthetic oligonucleotide
  Antisense strand to SEQ ID NO: 566629
ucuaagcugaggaguucau

SEQ ID NO: 566631 - RNA, 19 nt, Artificial Sequence
  Description of Artificial Sequence: Synthetic oligonucleotide
  Sense strand starting at position 710 of SEQ ID NO: 318487
gaggaaggcgggugagaau

SEQ ID NO: 566632 - RNA, 19 nt, Artificial Sequence
  Description of Artificial Sequence: Synthetic oligonucleotide
  Antisense strand to SEQ ID NO: 566631
auucucacccgccuuccuc

SEQ ID NO: 566633 - RNA, 19 nt, Artificial Sequence
  Description of Artificial Sequence: Synthetic oligonucleotide
  Sense strand starting at position 860 of SEQ ID NO: 318487
gaagauagagagugucuca

SEQ ID NO: 566634 - RNA, 19 nt, Artificial Sequence
  Description of Artificial Sequence: Synthetic oligonucleotide
  Antisense strand to SEQ ID NO: 566633
ugagacacucucuaucuuc

SEQ ID NO: 566635 - RNA, 19 nt, Artificial Sequence
  Description of Artificial Sequence: Synthetic oligonucleotide
  Sense strand starting at position 919 of SEQ ID NO: 318487
gaaacaacguguccugacu

SEQ ID NO: 566636 - RNA, 19 nt, Artificial Sequence
  Description of Artificial Sequence: Synthetic oligonucleotide
  Antisense strand to SEQ ID NO: 566635
agucaggacacguuguuuc

SEQ ID NO: 566637 - RNA, 19 nt, Artificial Sequence
  Description of Artificial Sequence: Synthetic oligonucleotide
  Sense strand starting at position 1094 of SEQ ID NO: 318487
gguguacgaaguuaaaugu

SEQ ID NO: 566638 - RNA, 19 nt, Artificial Sequence
  Description of Artificial Sequence: Synthetic oligonucleotide
  Antisense strand to SEQ ID NO: 566637
acauuuaacuucguacacc

SEQ ID NO: 566639 - RNA, 19 nt, Artificial Sequence
  Description of Artificial Sequence: Synthetic oligonucleotide
  Sense strand starting at position 1191 of SEQ ID NO: 318487
aaaguucugccucgagaag

SEQ ID NO: 566640 - RNA, 19 nt, Artificial Sequence
  Description of Artificial Sequence: Synthetic oligonucleotide
  Antisense strand to SEQ ID NO: 566639
cuucucgaggcagaacuuu

SEQ ID NO: 566641 - RNA, 19 nt, Artificial Sequence
  Description of Artificial Sequence: Synthetic oligonucleotide
  Sense strand starting at position 1211 of SEQ ID NO: 318487
auagaaaggcuccagcaua

SEQ ID NO: 566642 - RNA, 19 nt, Artificial Sequence
  Description of Artificial Sequence: Synthetic oligonucleotide
  Antisense strand to SEQ ID NO: 566641
uaugcuggagccuuucuau

SEQ ID NO: 566643 - RNA, 19 nt, Artificial Sequence
  Description of Artificial Sequence: Synthetic oligonucleotide
  Sense strand starting at position 1328 of SEQ ID NO: 318487
cagaguggucaucaggagu

SEQ ID NO: 566644 - RNA, 19 nt, Artificial Sequence
  Description of Artificial Sequence: Synthetic oligonucleotide
  Antisense strand to SEQ ID NO: 566643
acuccugaugaccacucug

SEQ ID NO: 566645 - RNA, 19 nt, Artificial Sequence
  Description of Artificial Sequence: Synthetic oligonucleotide
  Sense strand starting at position 1331 of SEQ ID NO: 318487
aguggucaucaggaguaua

SEQ ID NO: 566646 - RNA, 19 nt, Artificial Sequence
  Description of Artificial Sequence: Synthetic oligonucleotide
  Antisense strand to SEQ ID NO: 566645
uauacuccugaugaccacu

SEQ ID NO: 566647 - RNA, 19 nt, Artificial Sequence
  Description of Artificial Sequence: Synthetic oligonucleotide
  Sense strand starting at position 1429 of SEQ ID NO: 318487
cggaaagaaucgcccagau

SEQ ID NO: 566648 - RNA, 19 nt, Artificial Sequence
  Description of Artificial Sequence: Synthetic oligonucleotide
  Antisense strand to SEQ ID NO: 566647
aucugggcgauucuuuccg

SEQ ID NO: 566649 - RNA, 19 nt, Artificial Sequence
  Description of Artificial Sequence: Synthetic oligonucleotide
  Sense strand starting at position 1483 of SEQ ID NO: 318487
gcuuuccuucuuugaauga

SEQ ID NO: 566650 - RNA, 19 nt, Artificial Sequence
  Description of Artificial Sequence: Synthetic oligonucleotide
  Antisense strand to SEQ ID NO: 566649
ucauucaaagaaggaaagc

SEQ ID NO: 566651 - RNA, 19 nt, Artificial Sequence
  Description of Artificial Sequence: Synthetic oligonucleotide
  Sense strand starting at position 1578 of SEQ ID NO: 318487
gccugcgaucaccaagaaa

SEQ ID NO: 566652 - RNA, 19 nt, Artificial Sequence
  Description of Artificial Sequence: Synthetic oligonucleotide
  Antisense strand to SEQ ID NO: 566651
uuucuuggugaucgcaggc

SEQ ID NO: 566653 - RNA, 19 nt, Artificial Sequence
  Description of Artificial Sequence: Synthetic oligonucleotide
  Sense strand starting at position 1850 of SEQ ID NO: 318487
cucgguucccacggaaaga

SEQ ID NO: 566654 - RNA, 19 nt, Artificial Sequence
  Description of Artificial Sequence: Synthetic oligonucleotide
  Antisense strand to SEQ ID NO: 566653
ucuuuccgugggaaccgag

SEQ ID NO: 566655 - RNA, 19 nt, Artificial Sequence
  Description of Artificial Sequence: Synthetic oligonucleotide
  Sense strand starting at position 2026 of SEQ ID NO: 318487
gaaguauaccucugagguc

SEQ ID NO: 566656 - RNA, 19 nt, Artificial Sequence
  Description of Artificial Sequence: Synthetic oligonucleotide
  Antisense strand to SEQ ID NO: 566655
gaccucagagguauacuuc

SEQ ID NO: 566657 - RNA, 19 nt, Artificial Sequence
  Description of Artificial Sequence: Synthetic oligonucleotide
  Sense strand starting at position 2065 of SEQ ID NO: 318487
ggaagacgccggcauuauu

SEQ ID NO: 566658 - RNA, 19 nt, Artificial Sequence
  Description of Artificial Sequence: Synthetic oligonucleotide
  Antisense strand to SEQ ID NO: 566657
aauaaugccggcgucuucc

SEQ ID NO: 566659 - RNA, 19 nt, Artificial Sequence
  Description of Artificial Sequence: Synthetic oligonucleotide
  Sense strand starting at position 2095 of SEQ ID NO: 318487
guuuaagacucgucauaag

SEQ ID NO: 566660 - RNA, 19 nt, Artificial Sequence
  Description of Artificial Sequence: Synthetic oligonucleotide
  Antisense strand to SEQ ID NO: 566659
cuuaugacgagucuuaaac

SEQ ID NO: 566661 - RNA, 19 nt, Artificial Sequence
  Description of Artificial Sequence: Synthetic oligonucleotide
  Sense strand starting at position 2115 of SEQ ID NO: 318487
aaagacgguuuauuacuua

SEQ ID NO: 566662 - RNA, 19 nt, Artificial Sequence
  Description of Artificial Sequence: Synthetic oligonucleotide
  Antisense strand to SEQ ID NO: 566661
uaaguaauaaaccgucuuu

SEQ ID NO: 566663 - RNA, 19 nt, Artificial Sequence
  Description of Artificial Sequence: Synthetic oligonucleotide
  Sense strand starting at position 2120 of SEQ ID NO: 318487
cgguuuauuacuuaaggga

SEQ ID NO: 566664 - RNA, 19 nt, Artificial Sequence
  Description of Artificial Sequence: Synthetic oligonucleotide
  Antisense strand to SEQ ID NO: 566663
ucccuuaaguaauaaaccg

SEQ ID NO: 566665 - RNA, 19 nt, Artificial Sequence
  Description of Artificial Sequence: Synthetic oligonucleotide
  Sense strand starting at position 2376 of SEQ ID NO: 318487
cggccuguggucccaguua

SEQ ID NO: 566666 - RNA, 19 nt, Artificial Sequence
  Description of Artificial Sequence: Synthetic oligonucleotide
  Antisense strand to SEQ ID NO: 566665
uaacugggaccacaggccg

SEQ ID NO: 566667 - RNA, 19 nt, Artificial Sequence
  Description of Artificial Sequence: Synthetic oligonucleotide
  Sense strand starting at position 2651 of SEQ ID NO: 318487
ugcagaaggguuuggaauu

SEQ ID NO: 566668 - RNA, 19 nt, Artificial Sequence
  Description of Artificial Sequence: Synthetic oligonucleotide
  Antisense strand to SEQ ID NO: 566667
aauuccaaacccuucugca

SEQ ID NO: 566669 - RNA, 19 nt, Artificial Sequence
  Description of Artificial Sequence: Synthetic oligonucleotide
  Sense strand starting at position 2931 of SEQ ID NO: 318487
ugacuaggguggucuggau

SEQ ID NO: 566670 - RNA, 19 nt, Artificial Sequence
  Description of Artificial Sequence: Synthetic oligonucleotide
  Antisense strand to SEQ ID NO: 566669
auccagaccacccuaguca

SEQ ID NO: 566671 - RNA, 19 nt, Artificial Sequence
  Description of Artificial Sequence: Synthetic oligonucleotide
  Sense strand starting at position 3059 of SEQ ID NO: 318487
ggagaauaugucggagcug

SEQ ID NO: 566672 - RNA, 19 nt, Artificial Sequence
  Description of Artificial Sequence: Synthetic oligonucleotide
  Antisense strand to SEQ ID NO: 566671
cagcuccgacauauucucc

SEQ ID NO: 566673 - RNA, 19 nt, Artificial Sequence
  Description of Artificial Sequence: Synthetic oligonucleotide
  Sense strand starting at position 3636 of SEQ ID NO: 318487
cauugcauuucuucgauga

SEQ ID NO: 566674 - RNA, 19 nt, Artificial Sequence
  Description of Artificial Sequence: Synthetic oligonucleotide
  Antisense strand to SEQ ID NO: 566673
ucaucgaagaaaugcaaug

SEQ ID NO: 566675 - RNA, 19 nt, Artificial Sequence
  Description of Artificial Sequence: Synthetic oligonucleotide
  Sense strand starting at position 3637 of SEQ ID NO: 318487
auugcauuucuucgaugau

SEQ ID NO: 566676 - RNA, 19 nt, Artificial Sequence
  Description of Artificial Sequence: Synthetic oligonucleotide
  Antisense strand to SEQ ID NO: 566675
aucaucgaagaaaugcaau

SEQ ID NO: 566677 - RNA, 19 nt, Artificial Sequence
  Description of Artificial Sequence: Synthetic oligonucleotide
  Sense strand starting at position 3664 of SEQ ID NO: 318487
ucagacaucucuuuacgga

SEQ ID NO: 566678 - RNA, 19 nt, Artificial Sequence
  Description of Artificial Sequence: Synthetic oligonucleotide
  Antisense strand to SEQ ID NO: 566677
uccguaaagagaugucuga

SEQ ID NO: 566679 - RNA, 19 nt, Artificial Sequence
  Description of Artificial Sequence: Synthetic oligonucleotide
  Sense strand starting at position 3665 of SEQ ID NO: 318487
cagacaucucuuuacggau

SEQ ID NO: 566680 - RNA, 19 nt, Artificial Sequence
  Description of Artificial Sequence: Synthetic oligonucleotide
  Antisense strand to SEQ ID NO: 566679
auccguaaagagaugucug

SEQ ID NO: 566681 - RNA, 19 nt, Artificial Sequence
  Description of Artificial Sequence: Synthetic oligonucleotide
  Sense strand starting at position 3694 of SEQ ID NO: 318487
auuugcaucucuucuguga

SEQ ID NO: 566682 - RNA, 19 nt, Artificial Sequence
  Description of Artificial Sequence: Synthetic oligonucleotide
  Antisense strand to SEQ ID NO: 566681
ucacagaagagaugcaaau

SEQ ID NO: 566683 - RNA, 19 nt, Artificial Sequence
  Description of Artificial Sequence: Synthetic oligonucleotide
  Sense strand starting at position 3698 of SEQ ID NO: 318487
gcaucucuucugugaaaug

SEQ ID NO: 566684 - RNA, 19 nt, Artificial Sequence
  Description of Artificial Sequence: Synthetic oligonucleotide
  Antisense strand to SEQ ID NO: 566683
cauuucacagaagagaugc

SEQ ID NO: 566685 - RNA, 19 nt, Artificial Sequence
  Description of Artificial Sequence: Synthetic oligonucleotide
  Sense strand starting at position 3707 of SEQ ID NO: 318487
cugugaaaugucuguauuu

SEQ ID NO: 566686 - RNA, 19 nt, Artificial Sequence
  Description of Artificial Sequence: Synthetic oligonucleotide
  Antisense strand to SEQ ID NO: 566685
aaauacagacauuucacag

SEQ ID NO: 566687 - RNA, 19 nt, Artificial Sequence
  Description of Artificial Sequence: Synthetic oligonucleotide
  Sense strand starting at position 3754 of SEQ ID NO: 318487
ugagcuucccaguauguua

SEQ ID NO: 566688 - RNA, 19 nt, Artificial Sequence
  Description of Artificial Sequence: Synthetic oligonucleotide
  Antisense strand to SEQ ID NO: 566687
uaacauacugggaagcuca

SEQ ID NO: 566689 - RNA, 19 nt, Artificial Sequence
  Description of Artificial Sequence: Synthetic oligonucleotide
  Sense strand starting at position 3761 of SEQ ID NO: 318487
cccaguauguuagcagaga

SEQ ID NO: 566690 - RNA, 19 nt, Artificial Sequence
  Description of Artificial Sequence: Synthetic oligonucleotide
  Antisense strand to SEQ ID NO: 566689
ucucugcuaacauacuggg

SEQ ID NO: 566691 - RNA, 19 nt, Artificial Sequence
  Description of Artificial Sequence: Synthetic oligonucleotide
  Sense strand starting at position 3800 of SEQ ID NO: 318487
uuccgcuuugauuaagagu

SEQ ID NO: 566692 - RNA, 19 nt, Artificial Sequence
  Description of Artificial Sequence: Synthetic oligonucleotide
  Antisense strand to SEQ ID NO: 566691
acucuuaaucaaagcggaa

SEQ ID NO: 566693 - RNA, 19 nt, Artificial Sequence
  Description of Artificial Sequence: Synthetic oligonucleotide
  Sense strand starting at position 3860 of SEQ ID NO: 318487
ggagcaagccuugaucuua

SEQ ID NO: 566694 - RNA, 19 nt, Artificial Sequence
  Description of Artificial Sequence: Synthetic oligonucleotide
  Antisense strand to SEQ ID NO: 566693
uaagaucaaggcuugcucc

SEQ ID NO: 566695 - RNA, 19 nt, Artificial Sequence
  Description of Artificial Sequence: Synthetic oligonucleotide
  Sense strand starting at position 3872 of SEQ ID NO: 318487
gaucuuauggcugaaggca

SEQ ID NO: 566696 - RNA, 19 nt, Artificial Sequence
  Description of Artificial Sequence: Synthetic oligonucleotide
  Antisense strand to SEQ ID NO: 566695
ugccuucagccauaagauc

SEQ ID NO: 566697 - RNA, 19 nt, Artificial Sequence
  Description of Artificial Sequence: Synthetic oligonucleotide
  Sense strand starting at position 3925 of SEQ ID NO: 318487
agggaagccuaucuuuauc

SEQ ID NO: 566698 - RNA, 19 nt, Artificial Sequence
  Description of Artificial Sequence: Synthetic oligonucleotide
  Antisense strand to SEQ ID NO: 566697
gauaaagauaggcuucccu

SEQ ID NO: 566699 - RNA, 19 nt, Artificial Sequence
  Description of Artificial Sequence: Synthetic oligonucleotide
  Sense strand starting at position 9 of SEQ ID NO: 318488
ggguacaaaggcugugauu

SEQ ID NO: 566700 - RNA, 19 nt, Artificial Sequence
  Description of Artificial Sequence: Synthetic oligonucleotide
  Antisense strand to SEQ ID NO: 566699
aaucacagccuuuguaccc

SEQ ID NO: 566701 - RNA, 19 nt, Artificial Sequence
  Description of Artificial Sequence: Synthetic oligonucleotide
  Sense strand starting at position 72 of SEQ ID NO: 318488
ggcagaauuuggcuguuug

SEQ ID NO: 566702 - RNA, 19 nt, Artificial Sequence
  Description of Artificial Sequence: Synthetic oligonucleotide
  Antisense strand to SEQ ID NO: 566701
caaacagccaaauucugcc

SEQ ID NO: 566703 - RNA, 19 nt, Artificial Sequence
  Description of Artificial Sequence: Synthetic oligonucleotide
  Sense strand starting at position 178 of SEQ ID NO: 318488
augagaaacuguuucuauc

SEQ ID NO: 566704 - RNA, 19 nt, Artificial Sequence
  Description of Artificial Sequence: Synthetic oligonucleotide
  Antisense strand to SEQ ID NO: 566703
gauagaaacaguuucucau

SEQ ID NO: 566705 - RNA, 19 nt, Artificial Sequence
  Description of Artificial Sequence: Synthetic oligonucleotide
  Sense strand starting at position 372 of SEQ ID NO: 318488
gaggaucuaugccuagaac

SEQ ID NO: 566706 - RNA, 19 nt, Artificial Sequence
  Description of Artificial Sequence: Synthetic oligonucleotide
  Antisense strand to SEQ ID NO: 566705
guucuaggcauagauccuc

SEQ ID NO: 566707 - RNA, 19 nt, Artificial Sequence
  Description of Artificial Sequence: Synthetic oligonucleotide
  Sense strand starting at position 375 of SEQ ID NO: 318488
gaucuaugccuagaacguc

SEQ ID NO: 566708 - RNA, 19 nt, Artificial Sequence
  Description of Artificial Sequence: Synthetic oligonucleotide
  Antisense strand to SEQ ID NO: 566707
gacguucuaggcauagauc

SEQ ID NO: 566709 - RNA, 19 nt, Artificial Sequence
  Description of Artificial Sequence: Synthetic oligonucleotide
  Sense strand starting at position 884 of SEQ ID NO: 318488
ucucaaucuuagguguaug

SEQ ID NO: 566710 - RNA, 19 nt, Artificial Sequence
  Description of Artificial Sequence: Synthetic oligonucleotide
  Antisense strand to SEQ ID NO: 566709
cauacaccuaagauugaga

SEQ ID NO: 566711 - RNA, 19 nt, Artificial Sequence
  Description of Artificial Sequence: Synthetic oligonucleotide
  Sense strand starting at position 892 of SEQ ID NO: 318488
uuagguguaugaccucaau

SEQ ID NO: 566712 - RNA, 19 nt, Artificial Sequence
  Description of Artificial Sequence: Synthetic oligonucleotide
  Antisense strand to SEQ ID NO: 566711
auugaggucauacaccuaa

SEQ ID NO: 566713 - RNA, 19 nt, Artificial Sequence
  Description of Artificial Sequence: Synthetic oligonucleotide
  Sense strand starting at position 895 of SEQ ID NO: 318488
gguguaugaccucaauuaa

SEQ ID NO: 566714 - RNA, 19 nt, Artificial Sequence
  Description of Artificial Sequence: Synthetic oligonucleotide
  Antisense strand to SEQ ID NO: 566713
uuaauugaggucauacacc

SEQ ID NO: 566715 - RNA, 19 nt, Artificial Sequence
  Description of Artificial Sequence: Synthetic oligonucleotide
  Sense strand starting at position 947 of SEQ ID NO: 318488
uuaucaagucgauaaaguu

SEQ ID NO: 566716 - RNA, 19 nt, Artificial Sequence
  Description of Artificial Sequence: Synthetic oligonucleotide
  Antisense strand to SEQ ID NO: 566715
aacuuuaucgacuugauaa

SEQ ID NO: 566717 - RNA, 19 nt, Artificial Sequence
  Description of Artificial Sequence: Synthetic oligonucleotide
  Sense strand starting at position 977 of SEQ ID NO: 318488
acgugccauuuacuuauaa

SEQ ID NO: 566718 - RNA, 19 nt, Artificial Sequence
  Description of Artificial Sequence: Synthetic oligonucleotide
  Antisense strand to SEQ ID NO: 566717
uuauaaguaaauggcacgu

SEQ ID NO: 566719 - RNA, 19 nt, Artificial Sequence
  Description of Artificial Sequence: Synthetic oligonucleotide
  Sense strand starting at position 1062 of SEQ ID NO: 318488
ccaggccaacguuaaauua

SEQ ID NO: 566720 - RNA, 19 nt, Artificial Sequence
  Description of Artificial Sequence: Synthetic oligonucleotide
  Antisense strand to SEQ ID NO: 566719
uaauuuaacguuggccugg

SEQ ID NO: 566721 - RNA, 19 nt, Artificial Sequence
  Description of Artificial Sequence: Synthetic oligonucleotide
  Sense strand starting at position 1226 of SEQ ID NO: 318488
ugucucgaauuccuauaau

SEQ ID NO: 566722 - RNA, 19 nt, Artificial Sequence
  Description of Artificial Sequence: Synthetic oligonucleotide
  Antisense strand to SEQ ID NO: 566721
auuauaggaauucgagaca

SEQ ID NO: 566723 - RNA, 19 nt, Artificial Sequence
  Description of Artificial Sequence: Synthetic oligonucleotide
  Sense strand starting at position 1506 of SEQ ID NO: 318488
ucgccucaccuggaauaaa

SEQ ID NO: 566724 - RNA, 19 nt, Artificial Sequence
  Description of Artificial Sequence: Synthetic oligonucleotide
  Antisense strand to SEQ ID NO: 566723
uuuauuccaggugaggcga

SEQ ID NO: 566725 - RNA, 19 nt, Artificial Sequence
  Description of Artificial Sequence: Synthetic oligonucleotide
  Sense strand starting at position 1532 of SEQ ID NO: 318488
gccgauuggcucucguacu

SEQ ID NO: 566726 - RNA, 19 nt, Artificial Sequence
  Description of Artificial Sequence: Synthetic oligonucleotide
  Antisense strand to SEQ ID NO: 566725
aguacgagagccaaucggc

SEQ ID NO: 566727 - RNA, 19 nt, Artificial Sequence
  Description of Artificial Sequence: Synthetic oligonucleotide
  Sense strand starting at position 1602 of SEQ ID NO: 318488
cuaauaaacguucgaagag

SEQ ID NO: 566728 - RNA, 19 nt, Artificial Sequence
  Description of Artificial Sequence: Synthetic oligonucleotide
  Antisense strand to SEQ ID NO: 566727
cucuucgaacguuuauuag

SEQ ID NO: 566729 - RNA, 19 nt, Artificial Sequence
  Description of Artificial Sequence: Synthetic oligonucleotide
  Sense strand starting at position 1628 of SEQ ID NO: 318488
gagaauguguucucccgaa

SEQ ID NO: 566730 - RNA, 19 nt, Artificial Sequence
  Description of Artificial Sequence: Synthetic oligonucleotide
  Antisense strand to SEQ ID NO: 566729
uucgggagaacacauucuc

SEQ ID NO: 566731 - RNA, 19 nt, Artificial Sequence
  Description of Artificial Sequence: Synthetic oligonucleotide
  Sense strand starting at position 1632 of SEQ ID NO: 318488
auguguucucccgaaggac

SEQ ID NO: 566732 - RNA, 19 nt, Artificial Sequence
  Description of Artificial Sequence: Synthetic oligonucleotide
  Antisense strand to SEQ ID NO: 566731
guccuucgggagaacacau

SEQ ID NO: 566733 - RNA, 19 nt, Artificial Sequence
  Description of Artificial Sequence: Synthetic oligonucleotide
  Sense strand starting at position 2067 of SEQ ID NO: 318488
ucacuuuccugagccagaa

SEQ ID NO: 566734 - RNA, 19 nt, Artificial Sequence
  Description of Artificial Sequence: Synthetic oligonucleotide
  Antisense strand to SEQ ID NO: 566733
uucuggcucaggaaaguga

SEQ ID NO: 566735 - RNA, 19 nt, Artificial Sequence
  Description of Artificial Sequence: Synthetic oligonucleotide
  Sense strand starting at position 2085 of SEQ ID NO: 318488
aucugcgucuuauuuaauu

SEQ ID NO: 566736 - RNA, 19 nt, Artificial Sequence
  Description of Artificial Sequence: Synthetic oligonucleotide
  Antisense strand to SEQ ID NO: 566735
aauuaaauaagacgcagau

SEQ ID NO: 566737 - RNA, 19 nt, Artificial Sequence
  Description of Artificial Sequence: Synthetic oligonucleotide
  Sense strand starting at position 2294 of SEQ ID NO: 318488
ugagcugaaucuuugugga

SEQ ID NO: 566738 - RNA, 19 nt, Artificial Sequence
  Description of Artificial Sequence: Synthetic oligonucleotide
  Antisense strand to SEQ ID NO: 566737
uccacaaagauucagcuca

SEQ ID NO: 566739 - RNA, 19 nt, Artificial Sequence
  Description of Artificial Sequence: Synthetic oligonucleotide
  Sense strand starting at position 2299 of SEQ ID NO: 318488
ugaaucuuuguggagugga

SEQ ID NO: 566740 - RNA, 19 nt, Artificial Sequence
  Description of Artificial Sequence: Synthetic oligonucleotide
  Antisense strand to SEQ ID NO: 566739
uccacuccacaaagauuca

SEQ ID NO: 566741 - RNA, 19 nt, Artificial Sequence
  Description of Artificial Sequence: Synthetic oligonucleotide
  Sense strand starting at position 2351 of SEQ ID NO: 318488
uuagacuucugagccuuaa

SEQ ID NO: 566742 - RNA, 19 nt, Artificial Sequence
  Description of Artificial Sequence: Synthetic oligonucleotide
  Antisense strand to SEQ ID NO: 566741
uuaaggcucagaagucuaa

SEQ ID NO: 566743 - RNA, 19 nt, Artificial Sequence
  Description of Artificial Sequence: Synthetic oligonucleotide
  Sense strand starting at position 2458 of SEQ ID NO: 318488
ggccuuuaacccuaaaguu

SEQ ID NO: 566744 - RNA, 19 nt, Artificial Sequence
  Description of Artificial Sequence: Synthetic oligonucleotide
  Antisense strand to SEQ ID NO: 566743
aacuuuaggguuaaaggcc

SEQ ID NO: 566745 - RNA, 19 nt, Artificial Sequence
  Description of Artificial Sequence: Synthetic oligonucleotide
  Sense strand starting at position 2490 of SEQ ID NO: 318488
acuggcgagucauuuacuu

SEQ ID NO: 566746 - RNA, 19 nt, Artificial Sequence
  Description of Artificial Sequence: Synthetic oligonucleotide
  Antisense strand to SEQ ID NO: 566745
aaguaaaugacucgccagu

SEQ ID NO: 566747 - RNA, 19 nt, Artificial Sequence
  Description of Artificial Sequence: Synthetic oligonucleotide
  Sense strand starting at position 2859 of SEQ ID NO: 318488
agaugaacuagcugugaga

SEQ ID NO: 566748 - RNA, 19 nt, Artificial Sequence
  Description of Artificial Sequence: Synthetic oligonucleotide
  Antisense strand to SEQ ID NO: 566747
ucucacagcuaguucaucu

SEQ ID NO: 566749 - RNA, 19 nt, Artificial Sequence
  Description of Artificial Sequence: Synthetic oligonucleotide
  Sense strand starting at position 2877 of SEQ ID NO: 318488
agguuucugggauauuggu

SEQ ID NO: 566750 - RNA, 19 nt, Artificial Sequence
  Description of Artificial Sequence: Synthetic oligonucleotide
  Antisense strand to SEQ ID NO: 566749
accaauaucccagaaaccu

SEQ ID NO: 566751 - RNA, 19 nt, Artificial Sequence
  Description of Artificial Sequence: Synthetic oligonucleotide
  Sense strand starting at position 2953 of SEQ ID NO: 318488
cgggaauauggcgguuaaa

SEQ ID NO: 566752 - RNA, 19 nt, Artificial Sequence
  Description of Artificial Sequence: Synthetic oligonucleotide
  Antisense strand to SEQ ID NO: 566751
uuuaaccgccauauucccg

SEQ ID NO: 566753 - RNA, 19 nt, Artificial Sequence
  Description of Artificial Sequence: Synthetic oligonucleotide
  Sense strand starting at position 2956 of SEQ ID NO: 318488
gaauauggcgguuaaauua

SEQ ID NO: 566754 - RNA, 19 nt, Artificial Sequence
  Description of Artificial Sequence: Synthetic oligonucleotide
  Antisense strand to SEQ ID NO: 566753
uaauuuaaccgccauauuc

SEQ ID NO: 566755 - RNA, 19 nt, Artificial Sequence
  Description of Artificial Sequence: Synthetic oligonucleotide
  Sense strand starting at position 2982 of SEQ ID NO: 318488
gaagguuucugcucugaua

SEQ ID NO: 566756 - RNA, 19 nt, Artificial Sequence
  Description of Artificial Sequence: Synthetic oligonucleotide
  Antisense strand to SEQ ID NO: 566755
uaucagagcagaaaccuuc

SEQ ID NO: 566757 - RNA, 19 nt, Artificial Sequence
  Description of Artificial Sequence: Synthetic oligonucleotide
  Sense strand starting at position 3575 of SEQ ID NO: 318488
aggacuguaggaugugaga

SEQ ID NO: 566758 - RNA, 19 nt, Artificial Sequence
  Description of Artificial Sequence: Synthetic oligonucleotide
  Antisense strand to SEQ ID NO: 566757
ucucacauccuacaguccu

SEQ ID NO: 566759 - RNA, 19 nt, Artificial Sequence
  Description of Artificial Sequence: Synthetic oligonucleotide
  Sense strand starting at position 3577 of SEQ ID NO: 318488
gacuguaggaugugagaga

SEQ ID NO: 566760 - RNA, 19 nt, Artificial Sequence
  Description of Artificial Sequence: Synthetic oligonucleotide
  Antisense strand to SEQ ID NO: 566759
ucucucacauccuacaguc

SEQ ID NO: 566761 - RNA, 19 nt, Artificial Sequence
  Description of Artificial Sequence: Synthetic oligonucleotide
  Sense strand starting at position 3661 of SEQ ID NO: 318488
ugaguugggugaguuccaa

SEQ ID NO: 566762 - RNA, 19 nt, Artificial Sequence
  Description of Artificial Sequence: Synthetic oligonucleotide
  Antisense strand to SEQ ID NO: 566761
uuggaacucacccaacuca

SEQ ID NO: 566763 - RNA, 19 nt, Artificial Sequence
  Description of Artificial Sequence: Synthetic oligonucleotide
  Sense strand starting at position 3670 of SEQ ID NO: 318488
ugaguuccaaagugggaaa

SEQ ID NO: 566764 - RNA, 19 nt, Artificial Sequence
  Description of Artificial Sequence: Synthetic oligonucleotide
  Antisense strand to SEQ ID NO: 566763
uuucccacuuuggaacuca

SEQ ID NO: 566765 - RNA, 19 nt, Artificial Sequence
  Description of Artificial Sequence: Synthetic oligonucleotide
  Sense strand starting at position 3672 of SEQ ID NO: 318488
aguuccaaagugggaaaua

SEQ ID NO: 566766 - RNA, 19 nt, Artificial Sequence
  Description of Artificial Sequence: Synthetic oligonucleotide
  Antisense strand to SEQ ID NO: 566765
uauuucccacuuuggaacu

SEQ ID NO: 566767 - RNA, 19 nt, Artificial Sequence
  Description of Artificial Sequence: Synthetic oligonucleotide
  Sense strand starting at position 3758 of SEQ ID NO: 318488
gucaaacauccagggaugu

SEQ ID NO: 566768 - RNA, 19 nt, Artificial Sequence
  Description of Artificial Sequence: Synthetic oligonucleotide
  Antisense strand to SEQ ID NO: 566767
acaucccuggauguuugac

SEQ ID NO: 566769 - RNA, 19 nt, Artificial Sequence
  Description of Artificial Sequence: Synthetic oligonucleotide
  Sense strand starting at position 3771 of SEQ ID NO: 318488
ggaugugaaguggacaguu

SEQ ID NO: 566770 - RNA, 19 nt, Artificial Sequence
  Description of Artificial Sequence: Synthetic oligonucleotide
  Antisense strand to SEQ ID NO: 566769
aacuguccacuucacaucc

SEQ ID NO: 566771 - RNA, 19 nt, Artificial Sequence
  Description of Artificial Sequence: Synthetic oligonucleotide
  Sense strand starting at position 3788 of SEQ ID NO: 318488
uuggauauaugauaagaag

SEQ ID NO: 566772 - RNA, 19 nt, Artificial Sequence
  Description of Artificial Sequence: Synthetic oligonucleotide
  Antisense strand to SEQ ID NO: 566771
cuucuuaucauauauccaa

SEQ ID NO: 566773 - RNA, 19 nt, Artificial Sequence
  Description of Artificial Sequence: Synthetic oligonucleotide
  Sense strand starting at position 3855 of SEQ ID NO: 318488
gagauagcuuaggugauga

SEQ ID NO: 566774 - RNA, 19 nt, Artificial Sequence
  Description of Artificial Sequence: Synthetic oligonucleotide
  Antisense strand to SEQ ID NO: 566773
ucaucaccuaagcuaucuc

SEQ ID NO: 566775 - RNA, 19 nt, Artificial Sequence
  Description of Artificial Sequence: Synthetic oligonucleotide
  Sense strand starting at position 3913 of SEQ ID NO: 318488
aguuuagugguacagaaga

SEQ ID NO: 566776 - RNA, 19 nt, Artificial Sequence
  Description of Artificial Sequence: Synthetic oligonucleotide
  Antisense strand to SEQ ID NO: 566775
ucuucuguaccacuaaacu

SEQ ID NO: 566777 - RNA, 19 nt, Artificial Sequence
  Description of Artificial Sequence: Synthetic oligonucleotide
  Sense strand starting at position 3961 of SEQ ID NO: 318488
aagaguggccaauguuaca

SEQ ID NO: 566778 - RNA, 19 nt, Artificial Sequence
  Description of Artificial Sequence: Synthetic oligonucleotide
  Antisense strand to SEQ ID NO: 566777
uguaacauuggccacucuu

SEQ ID NO: 566779 - RNA, 19 nt, Artificial Sequence
  Description of Artificial Sequence: Synthetic oligonucleotide
  Sense strand starting at position 246 of SEQ ID NO: 318489
ccuuuaggaucuuccaaag

SEQ ID NO: 566780 - RNA, 19 nt, Artificial Sequence
  Description of Artificial Sequence: Synthetic oligonucleotide
  Antisense strand to SEQ ID NO: 566779
cuuuggaagauccuaaagg

SEQ ID NO: 566781 - RNA, 19 nt, Artificial Sequence
  Description of Artificial Sequence: Synthetic oligonucleotide
  Sense strand starting at position 380 of SEQ ID NO: 318489
accuguuaccuggagucuu

SEQ ID NO: 566782 - RNA, 19 nt, Artificial Sequence
  Description of Artificial Sequence: Synthetic oligonucleotide
  Antisense strand to SEQ ID NO: 566781
aagacuccagguaacaggu

SEQ ID NO: 566783 - RNA, 19 nt, Artificial Sequence
  Description of Artificial Sequence: Synthetic oligonucleotide
  Sense strand starting at position 861 of SEQ ID NO: 318489
agcaaauuagguuaacuuu

SEQ ID NO: 566784 - RNA, 19 nt, Artificial Sequence
  Description of Artificial Sequence: Synthetic oligonucleotide
  Antisense strand to SEQ ID NO: 566783
aaaguuaaccuaauuugcu

SEQ ID NO: 566785 - RNA, 19 nt, Artificial Sequence
  Description of Artificial Sequence: Synthetic oligonucleotide
  Sense strand starting at position 1416 of SEQ ID NO: 318489
augucuggcgcugaugaaa

SEQ ID NO: 566786 - RNA, 19 nt, Artificial Sequence
  Description of Artificial Sequence: Synthetic oligonucleotide
  Antisense strand to SEQ ID NO: 566785
uuucaucagcgccagacau

SEQ ID NO: 566787 - RNA, 19 nt, Artificial Sequence
  Description of Artificial Sequence: Synthetic oligonucleotide
  Sense strand starting at position 2351 of SEQ ID NO: 318489
guuggagucaaaugaauuc

SEQ ID NO: 566788 - RNA, 19 nt, Artificial Sequence
  Description of Artificial Sequence: Synthetic oligonucleotide
  Antisense strand to SEQ ID NO: 566787
gaauucauuugacuccaac

SEQ ID NO: 566789 - RNA, 19 nt, Artificial Sequence
  Description of Artificial Sequence: Synthetic oligonucleotide
  Sense strand starting at position 2406 of SEQ ID NO: 318489
uugccuugaggguguaaua

SEQ ID NO: 566790 - RNA, 19 nt, Artificial Sequence
  Description of Artificial Sequence: Synthetic oligonucleotide
  Antisense strand to SEQ ID NO: 566789
uauuacacccucaaggcaa

SEQ ID NO: 566791 - RNA, 19 nt, Artificial Sequence
  Description of Artificial Sequence: Synthetic oligonucleotide
  Sense strand starting at position 2420 of SEQ ID NO: 318489
uaauaaagacugugugcaa

SEQ ID NO: 566792 - RNA, 19 nt, Artificial Sequence
  Description of Artificial Sequence: Synthetic oligonucleotide
  Antisense strand to SEQ ID NO: 566791
uugcacacagucuuuauua

SEQ ID NO: 566793 - RNA, 19 nt, Artificial Sequence
  Description of Artificial Sequence: Synthetic oligonucleotide
  Sense strand starting at position 2421 of SEQ ID NO: 318489
aauaaagacugugugcaau

SEQ ID NO: 566794 - RNA, 19 nt, Artificial Sequence
  Description of Artificial Sequence: Synthetic oligonucleotide
  Antisense strand to SEQ ID NO: 566793
auugcacacagucuuuauu

SEQ ID NO: 566795 - RNA, 19 nt, Artificial Sequence
  Description of Artificial Sequence: Synthetic oligonucleotide
  Sense strand starting at position 2423 of SEQ ID NO: 318489
uaaagacugugugcaauua

SEQ ID NO: 566796 - RNA, 19 nt, Artificial Sequence
  Description of Artificial Sequence: Synthetic oligonucleotide
  Antisense strand to SEQ ID NO: 566795
uaauugcacacagucuuua

SEQ ID NO: 566797 - RNA, 19 nt, Artificial Sequence
  Description of Artificial Sequence: Synthetic oligonucleotide
  Sense strand starting at position 2424 of SEQ ID NO: 318489
aaagacugugugcaauuau

SEQ ID NO: 566798 - RNA, 19 nt, Artificial Sequence
  Description of Artificial Sequence: Synthetic oligonucleotide
  Antisense strand to SEQ ID NO: 566797
auaauugcacacagucuuu

SEQ ID NO: 566799 - RNA, 19 nt, Artificial Sequence
  Description of Artificial Sequence: Synthetic oligonucleotide
  Sense strand starting at position 2433 of SEQ ID NO: 318489
gugcaauuaucaucagaua

SEQ ID NO: 566800 - RNA, 19 nt, Artificial Sequence
  Description of Artificial Sequence: Synthetic oligonucleotide
  Antisense strand to SEQ ID NO: 566799
uaucugaugauaauugcac

SEQ ID NO: 566801 - RNA, 19 nt, Artificial Sequence
  Description of Artificial Sequence: Synthetic oligonucleotide
  Sense strand starting at position 2465 of SEQ ID NO: 318489
gccaaaugcucucugaaac

SEQ ID NO: 566802 - RNA, 19 nt, Artificial Sequence
  Description of Artificial Sequence: Synthetic oligonucleotide
  Antisense strand to SEQ ID NO: 566801
guuucagagagcauuuggc

SEQ ID NO: 566803 - RNA, 19 nt, Artificial Sequence
  Description of Artificial Sequence: Synthetic oligonucleotide
  Sense strand starting at position 2487 of SEQ ID NO: 318489
guaagcugguauccuagaa

SEQ ID NO: 566804 - RNA, 19 nt, Artificial Sequence
  Description of Artificial Sequence: Synthetic oligonucleotide
  Antisense strand to SEQ ID NO: 566803
uucuaggauaccagcuuac

SEQ ID NO: 566805 - RNA, 19 nt, Artificial Sequence
  Description of Artificial Sequence: Synthetic oligonucleotide
  Sense strand starting at position 2491 of SEQ ID NO: 318489
gcugguauccuagaaacua

SEQ ID NO: 566806 - RNA, 19 nt, Artificial Sequence
  Description of Artificial Sequence: Synthetic oligonucleotide
  Antisense strand to SEQ ID NO: 566805
uaguuucuaggauaccagc

SEQ ID NO: 566807 - RNA, 19 nt, Artificial Sequence
  Description of Artificial Sequence: Synthetic oligonucleotide
  Sense strand starting at position 2589 of SEQ ID NO: 318489
cguuuacauugucuuggaa

SEQ ID NO: 566808 - RNA, 19 nt, Artificial Sequence
  Description of Artificial Sequence: Synthetic oligonucleotide
  Antisense strand to SEQ ID NO: 566807
uuccaagacaauguaaacg

SEQ ID NO: 566809 - RNA, 19 nt, Artificial Sequence
  Description of Artificial Sequence: Synthetic oligonucleotide
  Sense strand starting at position 2592 of SEQ ID NO: 318489
uuacauugucuuggaaaua

SEQ ID NO: 566810 - RNA, 19 nt, Artificial Sequence
  Description of Artificial Sequence: Synthetic oligonucleotide
  Antisense strand to SEQ ID NO: 566809
uauuuccaagacaauguaa

SEQ ID NO: 566811 - RNA, 19 nt, Artificial Sequence
  Description of Artificial Sequence: Synthetic oligonucleotide
  Sense strand starting at position 2704 of SEQ ID NO: 318489
gcuaguauuucuucuguga

SEQ ID NO: 566812 - RNA, 19 nt, Artificial Sequence
  Description of Artificial Sequence: Synthetic oligonucleotide
  Antisense strand to SEQ ID NO: 566811
ucacagaagaaauacuagc

SEQ ID NO: 566813 - RNA, 19 nt, Artificial Sequence
  Description of Artificial Sequence: Synthetic oligonucleotide
  Sense strand starting at position 2720 of SEQ ID NO: 318489
ugaauugcuugcucaauug

SEQ ID NO: 566814 - RNA, 19 nt, Artificial Sequence
  Description of Artificial Sequence: Synthetic oligonucleotide
  Antisense strand to SEQ ID NO: 566813
caauugagcaagcaauuca

SEQ ID NO: 566815 - RNA, 19 nt, Artificial Sequence
  Description of Artificial Sequence: Synthetic oligonucleotide
  Sense strand starting at position 2763 of SEQ ID NO: 318489
uugucuuacugaccuguau

SEQ ID NO: 566816 - RNA, 19 nt, Artificial Sequence
  Description of Artificial Sequence: Synthetic oligonucleotide
  Antisense strand to SEQ ID NO: 566815
auacaggucaguaagacaa

SEQ ID NO: 566817 - RNA, 19 nt, Artificial Sequence
  Description of Artificial Sequence: Synthetic oligonucleotide
  Sense strand starting at position 2847 of SEQ ID NO: 318489
gcauauuuauacguacuau

SEQ ID NO: 566818 - RNA, 19 nt, Artificial Sequence
  Description of Artificial Sequence: Synthetic oligonucleotide
  Antisense strand to SEQ ID NO: 566817
auaguacguauaaauaugc

SEQ ID NO: 566819 - RNA, 19 nt, Artificial Sequence
  Description of Artificial Sequence: Synthetic oligonucleotide
  Sense strand starting at position 2887 of SEQ ID NO: 318489
guuaaaucugaacgauaau

SEQ ID NO: 566820 - RNA, 19 nt, Artificial Sequence
  Description of Artificial Sequence: Synthetic oligonucleotide
  Antisense strand to SEQ ID NO: 566819
auuaucguucagauuuaac

SEQ ID NO: 566821 - RNA, 19 nt, Artificial Sequence
  Description of Artificial Sequence: Synthetic oligonucleotide
  Sense strand starting at position 2901 of SEQ ID NO: 318489
auaauauuauggccgugaa

SEQ ID NO: 566822 - RNA, 19 nt, Artificial Sequence
  Description of Artificial Sequence: Synthetic oligonucleotide
  Antisense strand to SEQ ID NO: 566821
uucacggccauaauauuau

SEQ ID NO: 566823 - RNA, 19 nt, Artificial Sequence
  Description of Artificial Sequence: Synthetic oligonucleotide
  Sense strand starting at position 2902 of SEQ ID NO: 318489
uaauauuauggccgugaac

SEQ ID NO: 566824 - RNA, 19 nt, Artificial Sequence
  Description of Artificial Sequence: Synthetic oligonucleotide
  Antisense strand to SEQ ID NO: 566823
guucacggccauaauauua

SEQ ID NO: 566825 - RNA, 19 nt, Artificial Sequence
  Description of Artificial Sequence: Synthetic oligonucleotide
  Sense strand starting at position 2919 of SEQ ID NO: 318489
acuuguaguaaaggucuua

SEQ ID NO: 566826 - RNA, 19 nt, Artificial Sequence
  Description of Artificial Sequence: Synthetic oligonucleotide
  Antisense strand to SEQ ID NO: 566825
uaagaccuuuacuacaagu

SEQ ID NO: 566827 - RNA, 19 nt, Artificial Sequence
  Description of Artificial Sequence: Synthetic oligonucleotide
  Sense strand starting at position 2948 of SEQ ID NO: 318489
gagacauccugggacuaaa

SEQ ID NO: 566828 - RNA, 19 nt, Artificial Sequence
  Description of Artificial Sequence: Synthetic oligonucleotide
  Antisense strand to SEQ ID NO: 566827
uuuagucccaggaugucuc

SEQ ID NO: 566829 - RNA, 19 nt, Artificial Sequence
  Description of Artificial Sequence: Synthetic oligonucleotide
  Sense strand starting at position 3049 of SEQ ID NO: 318489
gguuguggagaggguuaaa

SEQ ID NO: 566830 - RNA, 19 nt, Artificial Sequence
  Description of Artificial Sequence: Synthetic oligonucleotide
  Antisense strand to SEQ ID NO: 566829
uuuaacccucuccacaacc

SEQ ID NO: 566831 - RNA, 19 nt, Artificial Sequence
  Description of Artificial Sequence: Synthetic oligonucleotide
  Sense strand starting at position 3393 of SEQ ID NO: 318489
augucuggccaguauaauu

SEQ ID NO: 566832 - RNA, 19 nt, Artificial Sequence
  Description of Artificial Sequence: Synthetic oligonucleotide
  Antisense strand to SEQ ID NO: 566831
aauuauacuggccagacau

SEQ ID NO: 566833 - RNA, 19 nt, Artificial Sequence
  Description of Artificial Sequence: Synthetic oligonucleotide
  Sense strand starting at position 3423 of SEQ ID NO: 318489
ucgagagaagccuauguau

SEQ ID NO: 566834 - RNA, 19 nt, Artificial Sequence
  Description of Artificial Sequence: Synthetic oligonucleotide
  Antisense strand to SEQ ID NO: 566833
auacauaggcuucucucga

SEQ ID NO: 566835 - RNA, 19 nt, Artificial Sequence
  Description of Artificial Sequence: Synthetic oligonucleotide
  Sense strand starting at position 3425 of SEQ ID NO: 318489
gagagaagccuauguauua

SEQ ID NO: 566836 - RNA, 19 nt, Artificial Sequence
  Description of Artificial Sequence: Synthetic oligonucleotide
  Antisense strand to SEQ ID NO: 566835
uaauacauaggcuucucuc

SEQ ID NO: 566837 - RNA, 19 nt, Artificial Sequence
  Description of Artificial Sequence: Synthetic oligonucleotide
  Sense strand starting at position 3426 of SEQ ID NO: 318489
agagaagccuauguauuau

SEQ ID NO: 566838 - RNA, 19 nt, Artificial Sequence
  Description of Artificial Sequence: Synthetic oligonucleotide
  Antisense strand to SEQ ID NO: 566837
auaauacauaggcuucucu

SEQ ID NO: 566839 - RNA, 19 nt, Artificial Sequence
  Description of Artificial Sequence: Synthetic oligonucleotide
  Sense strand starting at position 3463 of SEQ ID NO: 318489
uguaauggaugauuggcaa

SEQ ID NO: 566840 - RNA, 19 nt, Artificial Sequence
  Description of Artificial Sequence: Synthetic oligonucleotide
  Antisense strand to SEQ ID NO: 566839
uugccaaucauccauuaca

SEQ ID NO: 566841 - RNA, 19 nt, Artificial Sequence
  Description of Artificial Sequence: Synthetic oligonucleotide
  Sense strand starting at position 3516 of SEQ ID NO: 318489
gggagaaacucugaagaca

SEQ ID NO: 566842 - RNA, 19 nt, Artificial Sequence
  Description of Artificial Sequence: Synthetic oligonucleotide
  Antisense strand to SEQ ID NO: 566841
ugucuucagaguuucuccc

SEQ ID NO: 566843 - RNA, 19 nt, Artificial Sequence
  Description of Artificial Sequence: Synthetic oligonucleotide
  Sense strand starting at position 3589 of SEQ ID NO: 318489
ccaguucuaucaucuagug

SEQ ID NO: 566844 - RNA, 19 nt, Artificial Sequence
  Description of Artificial Sequence: Synthetic oligonucleotide
  Antisense strand to SEQ ID NO: 566843
cacuagaugauagaacugg

SEQ ID NO: 566845 - RNA, 19 nt, Artificial Sequence
  Description of Artificial Sequence: Synthetic oligonucleotide
  Sense strand starting at position 3591 of SEQ ID NO: 318489
aguucuaucaucuaguggu

SEQ ID NO: 566846 - RNA, 19 nt, Artificial Sequence
  Description of Artificial Sequence: Synthetic oligonucleotide
  Antisense strand to SEQ ID NO: 566845
accacuagaugauagaacu

SEQ ID NO: 566847 - RNA, 19 nt, Artificial Sequence
  Description of Artificial Sequence: Synthetic oligonucleotide
  Sense strand starting at position 3597 of SEQ ID NO: 318489
aucaucuaguggucuugaa

SEQ ID NO: 566848 - RNA, 19 nt, Artificial Sequence
  Description of Artificial Sequence: Synthetic oligonucleotide
  Antisense strand to SEQ ID NO: 566847
uucaagaccacuagaugau

SEQ ID NO: 566849 - RNA, 19 nt, Artificial Sequence
  Description of Artificial Sequence: Synthetic oligonucleotide
  Sense strand starting at position 3601 of SEQ ID NO: 318489
ucuaguggucuugaaauug

SEQ ID NO: 566850 - RNA, 19 nt, Artificial Sequence
  Description of Artificial Sequence: Synthetic oligonucleotide
  Antisense strand to SEQ ID NO: 566849
caauuucaagaccacuaga

SEQ ID NO: 566851 - RNA, 19 nt, Artificial Sequence
  Description of Artificial Sequence: Synthetic oligonucleotide
  Sense strand starting at position 3649 of SEQ ID NO: 318489
uagguaugcccagauguuu

SEQ ID NO: 566852 - RNA, 19 nt, Artificial Sequence
  Description of Artificial Sequence: Synthetic oligonucleotide
  Antisense strand to SEQ ID NO: 566851
aaacaucugggcauaccua

SEQ ID NO: 566853 - RNA, 19 nt, Artificial Sequence
  Description of Artificial Sequence: Synthetic oligonucleotide
  Sense strand starting at position 3814 of SEQ ID NO: 318489
cgcccuugaugauuaagua

SEQ ID NO: 566854 - RNA, 19 nt, Artificial Sequence
  Description of Artificial Sequence: Synthetic oligonucleotide
  Antisense strand to SEQ ID NO: 566853
uacuuaaucaucaagggcg

SEQ ID NO: 566855 - RNA, 19 nt, Artificial Sequence
  Description of Artificial Sequence: Synthetic oligonucleotide
  Sense strand starting at position 3815 of SEQ ID NO: 318489
gcccuugaugauuaaguaa

SEQ ID NO: 566856 - RNA, 19 nt, Artificial Sequence
  Description of Artificial Sequence: Synthetic oligonucleotide
  Antisense strand to SEQ ID NO: 566855
uuacuuaaucaucaagggc

SEQ ID NO: 566857 - RNA, 19 nt, Artificial Sequence
  Description of Artificial Sequence: Synthetic oligonucleotide
  Sense strand starting at position 3818 of SEQ ID NO: 318489
cuugaugauuaaguaauca

SEQ ID NO: 566858 - RNA, 19 nt, Artificial Sequence
  Description of Artificial Sequence: Synthetic oligonucleotide
  Antisense strand to SEQ ID NO: 566857
ugauuacuuaaucaucaag

SEQ ID NO: 566859 - RNA, 19 nt, Artificial Sequence
  Description of Artificial Sequence: Synthetic oligonucleotide
  Sense strand starting at position 213 of SEQ ID NO: 318490
cuaugaugcuccuuggaag

SEQ ID NO: 566860 - RNA, 19 nt, Artificial Sequence
  Description of Artificial Sequence: Synthetic oligonucleotide
  Antisense strand to SEQ ID NO: 566859
cuuccaaggagcaucauag

SEQ ID NO: 566861 - RNA, 19 nt, Artificial Sequence
  Description of Artificial Sequence: Synthetic oligonucleotide
  Sense strand starting at position 355 of SEQ ID NO: 318490
cgcuguaaucgaggaacaa

SEQ ID NO: 566862 - RNA, 19 nt, Artificial Sequence
  Description of Artificial Sequence: Synthetic oligonucleotide
  Antisense strand to SEQ ID NO: 566861
uuguuccucgauuacagcg

SEQ ID NO: 566863 - RNA, 19 nt, Artificial Sequence
  Description of Artificial Sequence: Synthetic oligonucleotide
  Sense strand starting at position 356 of SEQ ID NO: 318490
gcuguaaucgaggaacaag

SEQ ID NO: 566864 - RNA, 19 nt, Artificial Sequence
  Description of Artificial Sequence: Synthetic oligonucleotide
  Antisense strand to SEQ ID NO: 566863
cuuguuccucgauuacagc

SEQ ID NO: 566865 - RNA, 19 nt, Artificial Sequence
  Description of Artificial Sequence: Synthetic oligonucleotide
  Sense strand starting at position 1097 of SEQ ID NO: 318490
auaugcgugcuguuguauu

SEQ ID NO: 566866 - RNA, 19 nt, Artificial Sequence
  Description of Artificial Sequence: Synthetic oligonucleotide
  Antisense strand to SEQ ID NO: 566865
aauacaacagcacgcauau

SEQ ID NO: 566867 - RNA, 19 nt, Artificial Sequence
  Description of Artificial Sequence: Synthetic oligonucleotide
  Sense strand starting at position 1107 of SEQ ID NO: 318490
uguuguauuggauagcaca

SEQ ID NO: 566868 - RNA, 19 nt, Artificial Sequence
  Description of Artificial Sequence: Synthetic oligonucleotide
  Antisense strand to SEQ ID NO: 566867
ugugcuauccaauacaaca

SEQ ID NO: 566869 - RNA, 19 nt, Artificial Sequence
  Description of Artificial Sequence: Synthetic oligonucleotide
  Sense strand starting at position 1220 of SEQ ID NO: 318490
uuaagagaucaucggguga

SEQ ID NO: 566870 - RNA, 19 nt, Artificial Sequence
  Description of Artificial Sequence: Synthetic oligonucleotide
  Antisense strand to SEQ ID NO: 566869
ucacccgaugaucucuuaa

SEQ ID NO: 566871 - RNA, 19 nt, Artificial Sequence
  Description of Artificial Sequence: Synthetic oligonucleotide
  Sense strand starting at position 1224 of SEQ ID NO: 318490
gagaucaucgggugacuuu

SEQ ID NO: 566872 - RNA, 19 nt, Artificial Sequence
  Description of Artificial Sequence: Synthetic oligonucleotide
  Antisense strand to SEQ ID NO: 566871
aaagucacccgaugaucuc

SEQ ID NO: 566873 - RNA, 19 nt, Artificial Sequence
  Description of Artificial Sequence: Synthetic oligonucleotide
  Sense strand starting at position 1225 of SEQ ID NO: 318490
agaucaucgggugacuuua

SEQ ID NO: 566874 - RNA, 19 nt, Artificial Sequence
  Description of Artificial Sequence: Synthetic oligonucleotide
  Antisense strand to SEQ ID NO: 566873
uaaagucacccgaugaucu

SEQ ID NO: 566875 - RNA, 19 nt, Artificial Sequence
  Description of Artificial Sequence: Synthetic oligonucleotide
  Sense strand starting at position 1227 of SEQ ID NO: 318490
aucaucgggugacuuuaaa

SEQ ID NO: 566876 - RNA, 19 nt, Artificial Sequence
  Description of Artificial Sequence: Synthetic oligonucleotide
  Antisense strand to SEQ ID NO: 566875
uuuaaagucacccgaugau

SEQ ID NO: 566877 - RNA, 19 nt, Artificial Sequence
  Description of Artificial Sequence: Synthetic oligonucleotide
  Sense strand starting at position 1436 of SEQ ID NO: 318490
uaguuagugggagagcaua

SEQ ID NO: 566878 - RNA, 19 nt, Artificial Sequence
  Description of Artificial Sequence: Synthetic oligonucleotide
  Antisense strand to SEQ ID NO: 566877
uaugcucucccacuaacua

SEQ ID NO: 566879 - RNA, 19 nt, Artificial Sequence
  Description of Artificial Sequence: Synthetic oligonucleotide
  Sense strand starting at position 1988 of SEQ ID NO: 318490
gccaucuuggccgugucau

SEQ ID NO: 566880 - RNA, 19 nt, Artificial Sequence
  Description of Artificial Sequence: Synthetic oligonucleotide
  Antisense strand to SEQ ID NO: 566879
augacacggccaagauggc

SEQ ID NO: 566881 - RNA, 19 nt, Artificial Sequence
  Description of Artificial Sequence: Synthetic oligonucleotide
  Sense strand starting at position 2111 of SEQ ID NO: 318490
uuucgaaagguucgggaaa

SEQ ID NO: 566882 - RNA, 19 nt, Artificial Sequence
  Description of Artificial Sequence: Synthetic oligonucleotide
  Antisense strand to SEQ ID NO: 566881
uuucccgaaccuuucgaaa

SEQ ID NO: 566883 - RNA, 19 nt, Artificial Sequence
  Description of Artificial Sequence: Synthetic oligonucleotide
  Sense strand starting at position 2200 of SEQ ID NO: 318490
cuugaacuuucuccgagga

SEQ ID NO: 566884 - RNA, 19 nt, Artificial Sequence
  Description of Artificial Sequence: Synthetic oligonucleotide
  Antisense strand to SEQ ID NO: 566883
uccucggagaaaguucaag

SEQ ID NO: 566885 - RNA, 19 nt, Artificial Sequence
  Description of Artificial Sequence: Synthetic oligonucleotide
  Sense strand starting at position 2204 of SEQ ID NO: 318490
aacuuucuccgaggacagu

SEQ ID NO: 566886 - RNA, 19 nt, Artificial Sequence
  Description of Artificial Sequence: Synthetic oligonucleotide
  Antisense strand to SEQ ID NO: 566885
acuguccucggagaaaguu

SEQ ID NO: 566887 - RNA, 19 nt, Artificial Sequence
  Description of Artificial Sequence: Synthetic oligonucleotide
  Sense strand starting at position 2205 of SEQ ID NO: 318490
acuuucuccgaggacaguu

SEQ ID NO: 566888 - RNA, 19 nt, Artificial Sequence
  Description of Artificial Sequence: Synthetic oligonucleotide
  Antisense strand to SEQ ID NO: 566887
aacuguccucggagaaagu

SEQ ID NO: 566889 - RNA, 19 nt, Artificial Sequence
  Description of Artificial Sequence: Synthetic oligonucleotide
  Sense strand starting at position 2337 of SEQ ID NO: 318490
uguagcacucauuagaaca

SEQ ID NO: 566890 - RNA, 19 nt, Artificial Sequence
  Description of Artificial Sequence: Synthetic oligonucleotide
  Antisense strand to SEQ ID NO: 566889
uguucuaaugagugcuaca

SEQ ID NO: 566891 - RNA, 19 nt, Artificial Sequence
  Description of Artificial Sequence: Synthetic oligonucleotide
  Sense strand starting at position 2460 of SEQ ID NO: 318490
acgauaguggacuggaaau

SEQ ID NO: 566892 - RNA, 19 nt, Artificial Sequence
  Description of Artificial Sequence: Synthetic oligonucleotide
  Antisense strand to SEQ ID NO: 566891
auuuccaguccacuaucgu

SEQ ID NO: 566893 - RNA, 19 nt, Artificial Sequence
  Description of Artificial Sequence: Synthetic oligonucleotide
  Sense strand starting at position 2480 of SEQ ID NO: 318490
agagguggcuucuccuauu

SEQ ID NO: 566894 - RNA, 19 nt, Artificial Sequence
  Description of Artificial Sequence: Synthetic oligonucleotide
  Antisense strand to SEQ ID NO: 566893
aauaggagaagccaccucu

SEQ ID NO: 566895 - RNA, 19 nt, Artificial Sequence
  Description of Artificial Sequence: Synthetic oligonucleotide
  Sense strand starting at position 2489 of SEQ ID NO: 318490
uucuccuauugauuaguua

SEQ ID NO: 566896 - RNA, 19 nt, Artificial Sequence
  Description of Artificial Sequence: Synthetic oligonucleotide
  Antisense strand to SEQ ID NO: 566895
uaacuaaucaauaggagaa

SEQ ID NO: 566897 - RNA, 19 nt, Artificial Sequence
  Description of Artificial Sequence: Synthetic oligonucleotide
  Sense strand starting at position 2492 of SEQ ID NO: 318490
uccuauugauuaguuaagu

SEQ ID NO: 566898 - RNA, 19 nt, Artificial Sequence
  Description of Artificial Sequence: Synthetic oligonucleotide
  Antisense strand to SEQ ID NO: 566897
acuuaacuaaucaauagga

SEQ ID NO: 566899 - RNA, 19 nt, Artificial Sequence
  Description of Artificial Sequence: Synthetic oligonucleotide
  Sense strand starting at position 2497 of SEQ ID NO: 318490
uugauuaguuaagugggau

SEQ ID NO: 566900 - RNA, 19 nt, Artificial Sequence
  Description of Artificial Sequence: Synthetic oligonucleotide
  Antisense strand to SEQ ID NO: 566899
aucccacuuaacuaaucaa

SEQ ID NO: 566901 - RNA, 19 nt, Artificial Sequence
  Description of Artificial Sequence: Synthetic oligonucleotide
  Sense strand starting at position 2498 of SEQ ID NO: 318490
ugauuaguuaagugggaua

SEQ ID NO: 566902 - RNA, 19 nt, Artificial Sequence
  Description of Artificial Sequence: Synthetic oligonucleotide
  Antisense strand to SEQ ID NO: 566901
uaucccacuuaacuaauca

SEQ ID NO: 566903 - RNA, 19 nt, Artificial Sequence
  Description of Artificial Sequence: Synthetic oligonucleotide
  Sense strand starting at position 2500 of SEQ ID NO: 318490
auuaguuaagugggauaac

SEQ ID NO: 566904 - RNA, 19 nt, Artificial Sequence
  Description of Artificial Sequence: Synthetic oligonucleotide
  Antisense strand to SEQ ID NO: 566903
guuaucccacuuaacuaau

SEQ ID NO: 566905 - RNA, 19 nt, Artificial Sequence
  Description of Artificial Sequence: Synthetic oligonucleotide
  Sense strand starting at position 2557 of SEQ ID NO: 318490
gaccacauggcagauguua

SEQ ID NO: 566906 - RNA, 19 nt, Artificial Sequence
  Description of Artificial Sequence: Synthetic oligonucleotide
  Antisense strand to SEQ ID NO: 566905
uaacaucugccaugugguc

SEQ ID NO: 566907 - RNA, 19 nt, Artificial Sequence
  Description of Artificial Sequence: Synthetic oligonucleotide
  Sense strand starting at position 2575 of SEQ ID NO: 318490
agcgauugugacuacuauc

SEQ ID NO: 566908 - RNA, 19 nt, Artificial Sequence
  Description of Artificial Sequence: Synthetic oligonucleotide
  Antisense strand to SEQ ID NO: 566907
gauaguagucacaaucgcu

SEQ ID NO: 566909 - RNA, 19 nt, Artificial Sequence
  Description of Artificial Sequence: Synthetic oligonucleotide
  Sense strand starting at position 2583 of SEQ ID NO: 318490
ugacuacuaucucugguau

SEQ ID NO: 566910 - RNA, 19 nt, Artificial Sequence
  Description of Artificial Sequence: Synthetic oligonucleotide
  Antisense strand to SEQ ID NO: 566909
auaccagagauaguaguca

SEQ ID NO: 566911 - RNA, 19 nt, Artificial Sequence
  Description of Artificial Sequence: Synthetic oligonucleotide
  Sense strand starting at position 2615 of SEQ ID NO: 318490
cuggguaagucacuauaca

SEQ ID NO: 566912 - RNA, 19 nt, Artificial Sequence
  Description of Artificial Sequence: Synthetic oligonucleotide
  Antisense strand to SEQ ID NO: 566911
uguauagugacuuacccag

SEQ ID NO: 566913 - RNA, 19 nt, Artificial Sequence
  Description of Artificial Sequence: Synthetic oligonucleotide
  Sense strand starting at position 2616 of SEQ ID NO: 318490
uggguaagucacuauacac

SEQ ID NO: 566914 - RNA, 19 nt, Artificial Sequence
  Description of Artificial Sequence: Synthetic oligonucleotide
  Antisense strand to SEQ ID NO: 566913
guguauagugacuuaccca

SEQ ID NO: 566915 - RNA, 19 nt, Artificial Sequence
  Description of Artificial Sequence: Synthetic oligonucleotide
  Sense strand starting at position 3130 of SEQ ID NO: 318490
uuuagcuuucucuggaauc

SEQ ID NO: 566916 - RNA, 19 nt, Artificial Sequence
  Description of Artificial Sequence: Synthetic oligonucleotide
  Antisense strand to SEQ ID NO: 566915
gauuccagagaaagcuaaa

SEQ ID NO: 566917 - RNA, 19 nt, Artificial Sequence
  Description of Artificial Sequence: Synthetic oligonucleotide
  Sense strand starting at position 3149 of SEQ ID NO: 318490
acuggaauauuugguaacu

SEQ ID NO: 566918 - RNA, 19 nt, Artificial Sequence
  Description of Artificial Sequence: Synthetic oligonucleotide
  Antisense strand to SEQ ID NO: 566917
aguuaccaaauauuccagu

SEQ ID NO: 566919 - RNA, 19 nt, Artificial Sequence
  Description of Artificial Sequence: Synthetic oligonucleotide
  Sense strand starting at position 3151 of SEQ ID NO: 318490
uggaauauuugguaacuca

SEQ ID NO: 566920 - RNA, 19 nt, Artificial Sequence
  Description of Artificial Sequence: Synthetic oligonucleotide
  Antisense strand to SEQ ID NO: 566919
ugaguuaccaaauauucca

SEQ ID NO: 566921 - RNA, 19 nt, Artificial Sequence
  Description of Artificial Sequence: Synthetic oligonucleotide
  Sense strand starting at position 3159 of SEQ ID NO: 318490
uugguaacucauggcauau

SEQ ID NO: 566922 - RNA, 19 nt, Artificial Sequence
  Description of Artificial Sequence: Synthetic oligonucleotide
  Antisense strand to SEQ ID NO: 566921
auaugccaugaguuaccaa

SEQ ID NO: 566923 - RNA, 19 nt, Artificial Sequence
  Description of Artificial Sequence: Synthetic oligonucleotide
  Sense strand starting at position 3171 of SEQ ID NO: 318490
ggcauauucccagauggca

SEQ ID NO: 566924 - RNA, 19 nt, Artificial Sequence
  Description of Artificial Sequence: Synthetic oligonucleotide
  Antisense strand to SEQ ID NO: 566923
ugccaucugggaauaugcc

SEQ ID NO: 566925 - RNA, 19 nt, Artificial Sequence
  Description of Artificial Sequence: Synthetic oligonucleotide
  Sense strand starting at position 3280 of SEQ ID NO: 318490
ugauaugucuggucccuga

SEQ ID NO: 566926 - RNA, 19 nt, Artificial Sequence
  Description of Artificial Sequence: Synthetic oligonucleotide
  Antisense strand to SEQ ID NO: 566925
ucagggaccagacauauca

SEQ ID NO: 566927 - RNA, 19 nt, Artificial Sequence
  Description of Artificial Sequence: Synthetic oligonucleotide
  Sense strand starting at position 3283 of SEQ ID NO: 318490
uaugucuggucccugaaag

SEQ ID NO: 566928 - RNA, 19 nt, Artificial Sequence
  Description of Artificial Sequence: Synthetic oligonucleotide
  Antisense strand to SEQ ID NO: 566927
cuuucagggaccagacaua

SEQ ID NO: 566929 - RNA, 19 nt, Artificial Sequence
  Description of Artificial Sequence: Synthetic oligonucleotide
  Sense strand starting at position 3284 of SEQ ID NO: 318490
augucuggucccugaaagg

SEQ ID NO: 566930 - RNA, 19 nt, Artificial Sequence
  Description of Artificial Sequence: Synthetic oligonucleotide
  Antisense strand to SEQ ID NO: 566929
ccuuucagggaccagacau

SEQ ID NO: 566931 - RNA, 19 nt, Artificial Sequence
  Description of Artificial Sequence: Synthetic oligonucleotide
  Sense strand starting at position 3302 of SEQ ID NO: 318490
gccaguucucagugaaggg

SEQ ID NO: 566932 - RNA, 19 nt, Artificial Sequence
  Description of Artificial Sequence: Synthetic oligonucleotide
  Antisense strand to SEQ ID NO: 566931
cccuucacugagaacuggc

SEQ ID NO: 566933 - RNA, 19 nt, Artificial Sequence
  Description of Artificial Sequence: Synthetic oligonucleotide
  Sense strand starting at position 3303 of SEQ ID NO: 318490
ccaguucucagugaaggga

SEQ ID NO: 566934 - RNA, 19 nt, Artificial Sequence
  Description of Artificial Sequence: Synthetic oligonucleotide
  Antisense strand to SEQ ID NO: 566933
ucccuucacugagaacugg

SEQ ID NO: 566935 - RNA, 19 nt, Artificial Sequence
  Description of Artificial Sequence: Synthetic oligonucleotide
  Sense strand starting at position 3346 of SEQ ID NO: 318490
gggaauuuguggaguuggu

SEQ ID NO: 566936 - RNA, 19 nt, Artificial Sequence
  Description of Artificial Sequence: Synthetic oligonucleotide
  Antisense strand to SEQ ID NO: 566935
accaacuccacaaauuccc

SEQ ID NO: 566937 - RNA, 19 nt, Artificial Sequence
  Description of Artificial Sequence: Synthetic oligonucleotide
  Sense strand starting at position 3365 of SEQ ID NO: 318490
guuugaguuguguaaugac

SEQ ID NO: 566938 - RNA, 19 nt, Artificial Sequence
  Description of Artificial Sequence: Synthetic oligonucleotide
  Antisense strand to SEQ ID NO: 566937
gucauuacacaacucaaac

SEQ ID NO: 566939 - RNA, 19 nt, Artificial Sequence
  Description of Artificial Sequence: Synthetic oligonucleotide
  Sense strand starting at position 2005 of SEQ ID NO: 318491
ccgcucaauugugcgauuu

SEQ ID NO: 566940 - RNA, 19 nt, Artificial Sequence
  Description of Artificial Sequence: Synthetic oligonucleotide
  Antisense strand to SEQ ID NO: 566939
aaaucgcacaauugagcgg

SEQ ID NO: 566941 - RNA, 19 nt, Artificial Sequence
  Description of Artificial Sequence: Synthetic oligonucleotide
  Sense strand starting at position 2006 of SEQ ID NO: 318491
cgcucaauugugcgauuug

SEQ ID NO: 566942 - RNA, 19 nt, Artificial Sequence
  Description of Artificial Sequence: Synthetic oligonucleotide
  Antisense strand to SEQ ID NO: 566941
caaaucgcacaauugagcg

SEQ ID NO: 566943 - RNA, 19 nt, Artificial Sequence
  Description of Artificial Sequence: Synthetic oligonucleotide
  Sense strand starting at position 2054 of SEQ ID NO: 318491
auccguuuccucugggacu

SEQ ID NO: 566944 - RNA, 19 nt, Artificial Sequence
  Description of Artificial Sequence: Synthetic oligonucleotide
  Antisense strand to SEQ ID NO: 566943
agucccagaggaaacggau

SEQ ID NO: 566945 - RNA, 19 nt, Artificial Sequence
  Description of Artificial Sequence: Synthetic oligonucleotide
  Sense strand starting at position 2082 of SEQ ID NO: 318491
agguuuccguccuuggaga

SEQ ID NO: 566946 - RNA, 19 nt, Artificial Sequence
  Description of Artificial Sequence: Synthetic oligonucleotide
  Antisense strand to SEQ ID NO: 566945
ucuccaaggacggaaaccu

SEQ ID NO: 566947 - RNA, 19 nt, Artificial Sequence
  Description of Artificial Sequence: Synthetic oligonucleotide
  Sense strand starting at position 2084 of SEQ ID NO: 318491
guuuccguccuuggagaga

SEQ ID NO: 566948 - RNA, 19 nt, Artificial Sequence
  Description of Artificial Sequence: Synthetic oligonucleotide
  Antisense strand to SEQ ID NO: 566947
ucucuccaaggacggaaac

SEQ ID NO: 566949 - RNA, 19 nt, Artificial Sequence
  Description of Artificial Sequence: Synthetic oligonucleotide
  Sense strand starting at position 2387 of SEQ ID NO: 318491
caggaagggucuuaagagu

SEQ ID NO: 566950 - RNA, 19 nt, Artificial Sequence
  Description of Artificial Sequence: Synthetic oligonucleotide
  Antisense strand to SEQ ID NO: 566949
acucuuaagacccuuccug

SEQ ID NO: 566951 - RNA, 19 nt, Artificial Sequence
  Description of Artificial Sequence: Synthetic oligonucleotide
  Sense strand starting at position 2421 of SEQ ID NO: 318491
aggagaaagucggcuuuga

SEQ ID NO: 566952 - RNA, 19 nt, Artificial Sequence
  Description of Artificial Sequence: Synthetic oligonucleotide
  Antisense strand to SEQ ID NO: 566951
ucaaagccgacuuucuccu

SEQ ID NO: 566953 - RNA, 19 nt, Artificial Sequence
  Description of Artificial Sequence: Synthetic oligonucleotide
  Sense strand starting at position 2439 of SEQ ID NO: 318491
acgugaguuucuucuuccu

SEQ ID NO: 566954 - RNA, 19 nt, Artificial Sequence
  Description of Artificial Sequence: Synthetic oligonucleotide
  Antisense strand to SEQ ID NO: 566953
aggaagaagaaacucacgu

SEQ ID NO: 566955 - RNA, 19 nt, Artificial Sequence
  Description of Artificial Sequence: Synthetic oligonucleotide
  Sense strand starting at position 2441 of SEQ ID NO: 318491
gugaguuucuucuuccuuu

SEQ ID NO: 566956 - RNA, 19 nt, Artificial Sequence
  Description of Artificial Sequence: Synthetic oligonucleotide
  Antisense strand to SEQ ID NO: 566955
aaaggaagaagaaacucac

SEQ ID NO: 566957 - RNA, 19 nt, Artificial Sequence
  Description of Artificial Sequence: Synthetic oligonucleotide
  Sense strand starting at position 2529 of SEQ ID NO: 318491
uauuccauuuggugaggaa

SEQ ID NO: 566958 - RNA, 19 nt, Artificial Sequence
  Description of Artificial Sequence: Synthetic oligonucleotide
  Antisense strand to SEQ ID NO: 566957
uuccucaccaaauggaaua

SEQ ID NO: 566959 - RNA, 19 nt, Artificial Sequence
  Description of Artificial Sequence: Synthetic oligonucleotide
  Sense strand starting at position 2532 of SEQ ID NO: 318491
uccauuuggugaggaauug

SEQ ID NO: 566960 - RNA, 19 nt, Artificial Sequence
  Description of Artificial Sequence: Synthetic oligonucleotide
  Antisense strand to SEQ ID NO: 566959
caauuccucaccaaaugga

SEQ ID NO: 566961 - RNA, 19 nt, Artificial Sequence
  Description of Artificial Sequence: Synthetic oligonucleotide
  Sense strand starting at position 2585 of SEQ ID NO: 318491
ucuugaaaguaauaacagu

SEQ ID NO: 566962 - RNA, 19 nt, Artificial Sequence
  Description of Artificial Sequence: Synthetic oligonucleotide
  Antisense strand to SEQ ID NO: 566961
acuguuauuacuuucaaga

SEQ ID NO: 566963 - RNA, 19 nt, Artificial Sequence
  Description of Artificial Sequence: Synthetic oligonucleotide
  Sense strand starting at position 2632 of SEQ ID NO: 318491
uggguacuuauuggauaca

SEQ ID NO: 566964 - RNA, 19 nt, Artificial Sequence
  Description of Artificial Sequence: Synthetic oligonucleotide
  Antisense strand to SEQ ID NO: 566963
uguauccaauaaguaccca

SEQ ID NO: 566965 - RNA, 19 nt, Artificial Sequence
  Description of Artificial Sequence: Synthetic oligonucleotide
  Sense strand starting at position 2696 of SEQ ID NO: 318491
gcaguaccuguguuuguca

SEQ ID NO: 566966 - RNA, 19 nt, Artificial Sequence
  Description of Artificial Sequence: Synthetic oligonucleotide
  Antisense strand to SEQ ID NO: 566965
ugacaaacacagguacugc

SEQ ID NO: 566967 - RNA, 19 nt, Artificial Sequence
  Description of Artificial Sequence: Synthetic oligonucleotide
  Sense strand starting at position 2699 of SEQ ID NO: 318491
guaccuguguuugucagga

SEQ ID NO: 566968 - RNA, 19 nt, Artificial Sequence
  Description of Artificial Sequence: Synthetic oligonucleotide
  Antisense strand to SEQ ID NO: 566967
uccugacaaacacagguac

SEQ ID NO: 566969 - RNA, 19 nt, Artificial Sequence
  Description of Artificial Sequence: Synthetic oligonucleotide
  Sense strand starting at position 2726 of SEQ ID NO: 318491
gggucuucacauggcagaa

SEQ ID NO: 566970 - RNA, 19 nt, Artificial Sequence
  Description of Artificial Sequence: Synthetic oligonucleotide
  Antisense strand to SEQ ID NO: 566969
uucugccaugugaagaccc

SEQ ID NO: 566971 - RNA, 19 nt, Artificial Sequence
  Description of Artificial Sequence: Synthetic oligonucleotide
  Sense strand starting at position 2738 of SEQ ID NO: 318491
ggcagaagucugggcucaa

SEQ ID NO: 566972 - RNA, 19 nt, Artificial Sequence
  Description of Artificial Sequence: Synthetic oligonucleotide
  Antisense strand to SEQ ID NO: 566971
uugagcccagacuucugcc

SEQ ID NO: 566973 - RNA, 19 nt, Artificial Sequence
  Description of Artificial Sequence: Synthetic oligonucleotide
  Sense strand starting at position 2739 of SEQ ID NO: 318491
gcagaagucugggcucaag

SEQ ID NO: 566974 - RNA, 19 nt, Artificial Sequence
  Description of Artificial Sequence: Synthetic oligonucleotide
  Antisense strand to SEQ ID NO: 566973
cuugagcccagacuucugc

SEQ ID NO: 566975 - RNA, 19 nt, Artificial Sequence
  Description of Artificial Sequence: Synthetic oligonucleotide
  Sense strand starting at position 2768 of SEQ ID NO: 318491
acuuuaauguauucugaga

SEQ ID NO: 566976 - RNA, 19 nt, Artificial Sequence
  Description of Artificial Sequence: Synthetic oligonucleotide
  Antisense strand to SEQ ID NO: 566975
ucucagaauacauuaaagu

SEQ ID NO: 566977 - RNA, 19 nt, Artificial Sequence
  Description of Artificial Sequence: Synthetic oligonucleotide
  Sense strand starting at position 2773 of SEQ ID NO: 318491
aauguauucugagagguga

SEQ ID NO: 566978 - RNA, 19 nt, Artificial Sequence
  Description of Artificial Sequence: Synthetic oligonucleotide
  Antisense strand to SEQ ID NO: 566977
ucaccucucagaauacauu

SEQ ID NO: 566979 - RNA, 19 nt, Artificial Sequence
  Description of Artificial Sequence: Synthetic oligonucleotide
  Sense strand starting at position 2775 of SEQ ID NO: 318491
uguauucugagaggugaca

SEQ ID NO: 566980 - RNA, 19 nt, Artificial Sequence
  Description of Artificial Sequence: Synthetic oligonucleotide
  Antisense strand to SEQ ID NO: 566979
ugucaccucucagaauaca

SEQ ID NO: 566981 - RNA, 19 nt, Artificial Sequence
  Description of Artificial Sequence: Synthetic oligonucleotide
  Sense strand starting at position 2867 of SEQ ID NO: 318491
auuguuugaucacauacag

SEQ ID NO: 566982 - RNA, 19 nt, Artificial Sequence
  Description of Artificial Sequence: Synthetic oligonucleotide
  Antisense strand to SEQ ID NO: 566981
cuguaugugaucaaacaau

SEQ ID NO: 566983 - RNA, 19 nt, Artificial Sequence
  Description of Artificial Sequence: Synthetic oligonucleotide
  Sense strand starting at position 2886 of SEQ ID NO: 318491
gccacagucucuuuaccua

SEQ ID NO: 566984 - RNA, 19 nt, Artificial Sequence
  Description of Artificial Sequence: Synthetic oligonucleotide
  Antisense strand to SEQ ID NO: 566983
uagguaaagagacuguggc

SEQ ID NO: 566985 - RNA, 19 nt, Artificial Sequence
  Description of Artificial Sequence: Synthetic oligonucleotide
  Sense strand starting at position 2889 of SEQ ID NO: 318491
acagucucuuuaccuagau

SEQ ID NO: 566986 - RNA, 19 nt, Artificial Sequence
  Description of Artificial Sequence: Synthetic oligonucleotide
  Antisense strand to SEQ ID NO: 566985
aucuagguaaagagacugu

SEQ ID NO: 566987 - RNA, 19 nt, Artificial Sequence
  Description of Artificial Sequence: Synthetic oligonucleotide
  Sense strand starting at position 3025 of SEQ ID NO: 318491
uaaggacucuuccaaggga

SEQ ID NO: 566988 - RNA, 19 nt, Artificial Sequence
  Description of Artificial Sequence: Synthetic oligonucleotide
  Antisense strand to SEQ ID NO: 566987
ucccuuggaagaguccuua

SEQ ID NO: 566989 - RNA, 19 nt, Artificial Sequence
  Description of Artificial Sequence: Synthetic oligonucleotide
  Sense strand starting at position 3085 of SEQ ID NO: 318491
acauaaaugccaggucaau

SEQ ID NO: 566990 - RNA, 19 nt, Artificial Sequence
  Description of Artificial Sequence: Synthetic oligonucleotide
  Antisense strand to SEQ ID NO: 566989
auugaccuggcauuuaugu

SEQ ID NO: 566991 - RNA, 19 nt, Artificial Sequence
  Description of Artificial Sequence: Synthetic oligonucleotide
  Sense strand starting at position 3102 of SEQ ID NO: 318491
aucgcucugguguaaauua

SEQ ID NO: 566992 - RNA, 19 nt, Artificial Sequence
  Description of Artificial Sequence: Synthetic oligonucleotide
  Antisense strand to SEQ ID NO: 566991
uaauuuacaccagagcgau

SEQ ID NO: 566993 - RNA, 19 nt, Artificial Sequence
  Description of Artificial Sequence: Synthetic oligonucleotide
  Sense strand starting at position 3158 of SEQ ID NO: 318491
ccucuuggucugggacuaa

SEQ ID NO: 566994 - RNA, 19 nt, Artificial Sequence
  Description of Artificial Sequence: Synthetic oligonucleotide
  Antisense strand to SEQ ID NO: 566993
uuagucccagaccaagagg

SEQ ID NO: 566995 - RNA, 19 nt, Artificial Sequence
  Description of Artificial Sequence: Synthetic oligonucleotide
  Sense strand starting at position 3189 of SEQ ID NO: 318491
guuucuuaagcauaauugu

SEQ ID NO: 566996 - RNA, 19 nt, Artificial Sequence
  Description of Artificial Sequence: Synthetic oligonucleotide
  Antisense strand to SEQ ID NO: 566995
acaauuaugcuuaagaaac

SEQ ID NO: 566997 - RNA, 19 nt, Artificial Sequence
  Description of Artificial Sequence: Synthetic oligonucleotide
  Sense strand starting at position 3207 of SEQ ID NO: 318491
uccucacuccuggaguacu

SEQ ID NO: 566998 - RNA, 19 nt, Artificial Sequence
  Description of Artificial Sequence: Synthetic oligonucleotide
  Antisense strand to SEQ ID NO: 566997
aguacuccaggagugagga

SEQ ID NO: 566999 - RNA, 19 nt, Artificial Sequence
  Description of Artificial Sequence: Synthetic oligonucleotide
  Sense strand starting at position 3498 of SEQ ID NO: 318491
gaguaagggcuuuaguaaa

SEQ ID NO: 567000 - RNA, 19 nt, Artificial Sequence
  Description of Artificial Sequence: Synthetic oligonucleotide
  Antisense strand to SEQ ID NO: 566999
uuuacuaaagcccuuacuc

SEQ ID NO: 567001 - RNA, 19 nt, Artificial Sequence
  Description of Artificial Sequence: Synthetic oligonucleotide
  Sense strand starting at position 3538 of SEQ ID NO: 318491
cuccuuugaucaguucuua

SEQ ID NO: 567002 - RNA, 19 nt, Artificial Sequence
  Description of Artificial Sequence: Synthetic oligonucleotide
  Antisense strand to SEQ ID NO: 567001
uaagaacugaucaaaggag

SEQ ID NO: 567003 - RNA, 19 nt, Artificial Sequence
  Description of Artificial Sequence: Synthetic oligonucleotide
  Sense strand starting at position 3546 of SEQ ID NO: 318491
aucaguucuuaccuggaga

SEQ ID NO: 567004 - RNA, 19 nt, Artificial Sequence
  Description of Artificial Sequence: Synthetic oligonucleotide
  Antisense strand to SEQ ID NO: 567003
ucuccagguaagaacugau

SEQ ID NO: 567005 - RNA, 19 nt, Artificial Sequence
  Description of Artificial Sequence: Synthetic oligonucleotide
  Sense strand starting at position 3548 of SEQ ID NO: 318491
caguucuuaccuggagauc

SEQ ID NO: 567006 - RNA, 19 nt, Artificial Sequence
  Description of Artificial Sequence: Synthetic oligonucleotide
  Antisense strand to SEQ ID NO: 567005
gaucuccagguaagaacug

SEQ ID NO: 567007 - RNA, 19 nt, Artificial Sequence
  Description of Artificial Sequence: Synthetic oligonucleotide
  Sense strand starting at position 3574 of SEQ ID NO: 318491
cccugaggauuccucccaa

SEQ ID NO: 567008 - RNA, 19 nt, Artificial Sequence
  Description of Artificial Sequence: Synthetic oligonucleotide
  Antisense strand to SEQ ID NO: 567007
uugggaggaauccucaggg

SEQ ID NO: 567009 - RNA, 19 nt, Artificial Sequence
  Description of Artificial Sequence: Synthetic oligonucleotide
  Sense strand starting at position 3596 of SEQ ID NO: 318491
acagguuauuucuauggau

SEQ ID NO: 567010 - RNA, 19 nt, Artificial Sequence
  Description of Artificial Sequence: Synthetic oligonucleotide
  Antisense strand to SEQ ID NO: 567009
auccauagaaauaaccugu

SEQ ID NO: 567011 - RNA, 19 nt, Artificial Sequence
  Description of Artificial Sequence: Synthetic oligonucleotide
  Sense strand starting at position 3599 of SEQ ID NO: 318491
gguuauuucuauggaugac

SEQ ID NO: 567012 - RNA, 19 nt, Artificial Sequence
  Description of Artificial Sequence: Synthetic oligonucleotide
  Antisense strand to SEQ ID NO: 567011
gucauccauagaaauaacc

SEQ ID NO: 567013 - RNA, 19 nt, Artificial Sequence
  Description of Artificial Sequence: Synthetic oligonucleotide
  Sense strand starting at position 3605 of SEQ ID NO: 318491
uucuauggaugacuauuau

SEQ ID NO: 567014 - RNA, 19 nt, Artificial Sequence
  Description of Artificial Sequence: Synthetic oligonucleotide
  Antisense strand to SEQ ID NO: 567013
auaauagucauccauagaa

SEQ ID NO: 567015 - RNA, 19 nt, Artificial Sequence
  Description of Artificial Sequence: Synthetic oligonucleotide
  Sense strand starting at position 3779 of SEQ ID NO: 318491
ccugaaagcucucugcugu

SEQ ID NO: 567016 - RNA, 19 nt, Artificial Sequence
  Description of Artificial Sequence: Synthetic oligonucleotide
  Antisense strand to SEQ ID NO: 567015
acagcagagagcuuucagg

SEQ ID NO: 567017 - RNA, 19 nt, Artificial Sequence
  Description of Artificial Sequence: Synthetic oligonucleotide
  Sense strand starting at position 3780 of SEQ ID NO: 318491
cugaaagcucucugcuguu

SEQ ID NO: 567018 - RNA, 19 nt, Artificial Sequence
  Description of Artificial Sequence: Synthetic oligonucleotide
  Antisense strand to SEQ ID NO: 567017
aacagcagagagcuuucag

SEQ ID NO: 567019 - RNA, 19 nt, Artificial Sequence
  Description of Artificial Sequence: Synthetic oligonucleotide
  Sense strand starting at position 100 of SEQ ID NO: 318492
uucugcuuucugcugugua

SEQ ID NO: 567020 - RNA, 19 nt, Artificial Sequence
  Description of Artificial Sequence: Synthetic oligonucleotide
  Antisense strand to SEQ ID NO: 567019
uacacagcagaaagcagaa

SEQ ID NO: 567021 - RNA, 19 nt, Artificial Sequence
  Description of Artificial Sequence: Synthetic oligonucleotide
  Sense strand starting at position 110 of SEQ ID NO: 318492
ugcuguguacuuuauauuu

SEQ ID NO: 567022 - RNA, 19 nt, Artificial Sequence
  Description of Artificial Sequence: Synthetic oligonucleotide
  Antisense strand to SEQ ID NO: 567021
aaauauaaaguacacagca

SEQ ID NO: 567023 - RNA, 19 nt, Artificial Sequence
  Description of Artificial Sequence: Synthetic oligonucleotide
  Sense strand starting at position 201 of SEQ ID NO: 318492
cuuacucuacuuuguguua

SEQ ID NO: 567024 - RNA, 19 nt, Artificial Sequence
  Description of Artificial Sequence: Synthetic oligonucleotide
  Antisense strand to SEQ ID NO: 567023
uaacacaaaguagaguaag

SEQ ID NO: 567025 - RNA, 19 nt, Artificial Sequence
  Description of Artificial Sequence: Synthetic oligonucleotide
  Sense strand starting at position 202 of SEQ ID NO: 318492
uuacucuacuuuguguuau

SEQ ID NO: 567026 - RNA, 19 nt, Artificial Sequence
  Description of Artificial Sequence: Synthetic oligonucleotide
  Antisense strand to SEQ ID NO: 567025
auaacacaaaguagaguaa

SEQ ID NO: 567027 - RNA, 19 nt, Artificial Sequence
  Description of Artificial Sequence: Synthetic oligonucleotide
  Sense strand starting at position 444 of SEQ ID NO: 318492
uggccagaaaccugaguau

SEQ ID NO: 567028 - RNA, 19 nt, Artificial Sequence
  Description of Artificial Sequence: Synthetic oligonucleotide
  Antisense strand to SEQ ID NO: 567027
auacucagguuucuggcca

SEQ ID NO: 567029 - RNA, 19 nt, Artificial Sequence
  Description of Artificial Sequence: Synthetic oligonucleotide
  Sense strand starting at position 447 of SEQ ID NO: 318492
ccagaaaccugaguaugau

SEQ ID NO: 567030 - RNA, 19 nt, Artificial Sequence
  Description of Artificial Sequence: Synthetic oligonucleotide
  Antisense strand to SEQ ID NO: 567029
aucauacucagguuucugg

SEQ ID NO: 567031 - RNA, 19 nt, Artificial Sequence
  Description of Artificial Sequence: Synthetic oligonucleotide
  Sense strand starting at position 509 of SEQ ID NO: 318492
gguuguaucuccucacucu

SEQ ID NO: 567032 - RNA, 19 nt, Artificial Sequence
  Description of Artificial Sequence: Synthetic oligonucleotide
  Antisense strand to SEQ ID NO: 567031
agagugaggagauacaacc

SEQ ID NO: 567033 - RNA, 19 nt, Artificial Sequence
  Description of Artificial Sequence: Synthetic oligonucleotide
  Sense strand starting at position 570 of SEQ ID NO: 318492
ugucacuucuggccugaau

SEQ ID NO: 567034 - RNA, 19 nt, Artificial Sequence
  Description of Artificial Sequence: Synthetic oligonucleotide
  Antisense strand to SEQ ID NO: 567033
auucaggccagaagugaca

SEQ ID NO: 567035 - RNA, 19 nt, Artificial Sequence
  Description of Artificial Sequence: Synthetic oligonucleotide
  Sense strand starting at position 572 of SEQ ID NO: 318492
ucacuucuggccugaauua

SEQ ID NO: 567036 - RNA, 19 nt, Artificial Sequence
  Description of Artificial Sequence: Synthetic oligonucleotide
  Antisense strand to SEQ ID NO: 567035
uaauucaggccagaaguga

SEQ ID NO: 567037 - RNA, 19 nt, Artificial Sequence
  Description of Artificial Sequence: Synthetic oligonucleotide
  Sense strand starting at position 584 of SEQ ID NO: 318492
ugaauuacugcaugagauc

SEQ ID NO: 567038 - RNA, 19 nt, Artificial Sequence
  Description of Artificial Sequence: Synthetic oligonucleotide
  Antisense strand to SEQ ID NO: 567037
gaucucaugcaguaauuca

SEQ ID NO: 567039 - RNA, 19 nt, Artificial Sequence
  Description of Artificial Sequence: Synthetic oligonucleotide
  Sense strand starting at position 816 of SEQ ID NO: 318492
gugccaguccuccagggaa

SEQ ID NO: 567040 - RNA, 19 nt, Artificial Sequence
  Description of Artificial Sequence: Synthetic oligonucleotide
  Antisense strand to SEQ ID NO: 567039
uucccuggaggacuggcac

SEQ ID NO: 567041 - RNA, 19 nt, Artificial Sequence
  Description of Artificial Sequence: Synthetic oligonucleotide
  Sense strand starting at position 882 of SEQ ID NO: 318492
ccuguaucaccucaugcuu

SEQ ID NO: 567042 - RNA, 19 nt, Artificial Sequence
  Description of Artificial Sequence: Synthetic oligonucleotide
  Antisense strand to SEQ ID NO: 567041
aagcaugaggugauacagg

SEQ ID NO: 567043 - RNA, 19 nt, Artificial Sequence
  Description of Artificial Sequence: Synthetic oligonucleotide
  Sense strand starting at position 939 of SEQ ID NO: 318492
aauaguagccaacguuaau

SEQ ID NO: 567044 - RNA, 19 nt, Artificial Sequence
  Description of Artificial Sequence: Synthetic oligonucleotide
  Antisense strand to SEQ ID NO: 567043
auuaacguuggcuacuauu

SEQ ID NO: 567045 - RNA, 19 nt, Artificial Sequence
  Description of Artificial Sequence: Synthetic oligonucleotide
  Sense strand starting at position 1394 of SEQ ID NO: 318492
cugugcaggcuucaggaaa

SEQ ID NO: 567046 - RNA, 19 nt, Artificial Sequence
  Description of Artificial Sequence: Synthetic oligonucleotide
  Antisense strand to SEQ ID NO: 567045
uuuccugaagccugcacag

SEQ ID NO: 567047 - RNA, 19 nt, Artificial Sequence
  Description of Artificial Sequence: Synthetic oligonucleotide
  Sense strand starting at position 1471 of SEQ ID NO: 318492
gggucuuuggccuggacaa

SEQ ID NO: 567048 - RNA, 19 nt, Artificial Sequence
  Description of Artificial Sequence: Synthetic oligonucleotide
  Antisense strand to SEQ ID NO: 567047
uuguccaggccaaagaccc

SEQ ID NO: 567049 - RNA, 19 nt, Artificial Sequence
  Description of Artificial Sequence: Synthetic oligonucleotide
  Sense strand starting at position 1472 of SEQ ID NO: 318492
ggucuuuggccuggacaag

SEQ ID NO: 567050 - RNA, 19 nt, Artificial Sequence
  Description of Artificial Sequence: Synthetic oligonucleotide
  Antisense strand to SEQ ID NO: 567049
cuuguccaggccaaagacc

SEQ ID NO: 567051 - RNA, 19 nt, Artificial Sequence
  Description of Artificial Sequence: Synthetic oligonucleotide
  Sense strand starting at position 1473 of SEQ ID NO: 318492
gucuuuggccuggacaaga

SEQ ID NO: 567052 - RNA, 19 nt, Artificial Sequence
  Description of Artificial Sequence: Synthetic oligonucleotide
  Antisense strand to SEQ ID NO: 567051
ucuuguccaggccaaagac

SEQ ID NO: 567053 - RNA, 19 nt, Artificial Sequence
  Description of Artificial Sequence: Synthetic oligonucleotide
  Sense strand starting at position 1499 of SEQ ID NO: 318492
acuugaauuucucaaggug

SEQ ID NO: 567054 - RNA, 19 nt, Artificial Sequence
  Description of Artificial Sequence: Synthetic oligonucleotide
  Antisense strand to SEQ ID NO: 567053
caccuugagaaauucaagu

SEQ ID NO: 567055 - RNA, 19 nt, Artificial Sequence
  Description of Artificial Sequence: Synthetic oligonucleotide
  Sense strand starting at position 1562 of SEQ ID NO: 318492
gccagaaugaacuaagugu

SEQ ID NO: 567056 - RNA, 19 nt, Artificial Sequence
  Description of Artificial Sequence: Synthetic oligonucleotide
  Antisense strand to SEQ ID NO: 567055
acacuuaguucauucuggc

SEQ ID NO: 567057 - RNA, 19 nt, Artificial Sequence
  Description of Artificial Sequence: Synthetic oligonucleotide
  Sense strand starting at position 1569 of SEQ ID NO: 318492
ugaacuaaguguucuuuag

SEQ ID NO: 567058 - RNA, 19 nt, Artificial Sequence
  Description of Artificial Sequence: Synthetic oligonucleotide
  Antisense strand to SEQ ID NO: 567057
cuaaagaacacuuaguuca

SEQ ID NO: 567059 - RNA, 19 nt, Artificial Sequence
  Description of Artificial Sequence: Synthetic oligonucleotide
  Sense strand starting at position 1573 of SEQ ID NO: 318492
cuaaguguucuuuagggca

SEQ ID NO: 567060 - RNA, 19 nt, Artificial Sequence
  Description of Artificial Sequence: Synthetic oligonucleotide
  Antisense strand to SEQ ID NO: 567059
ugcccuaaagaacacuuag

SEQ ID NO: 567061 - RNA, 19 nt, Artificial Sequence
  Description of Artificial Sequence: Synthetic oligonucleotide
  Sense strand starting at position 1578 of SEQ ID NO: 318492
uguucuuuagggcaaggaa

SEQ ID NO: 567062 - RNA, 19 nt, Artificial Sequence
  Description of Artificial Sequence: Synthetic oligonucleotide
  Antisense strand to SEQ ID NO: 567061
uuccuugcccuaaagaaca

SEQ ID NO: 567063 - RNA, 19 nt, Artificial Sequence
  Description of Artificial Sequence: Synthetic oligonucleotide
  Sense strand starting at position 2047 of SEQ ID NO: 318492
agguuuaauuuaggaccua

SEQ ID NO: 567064 - RNA, 19 nt, Artificial Sequence
  Description of Artificial Sequence: Synthetic oligonucleotide
  Antisense strand to SEQ ID NO: 567063
uagguccuaaauuaaaccu

SEQ ID NO: 567065 - RNA, 19 nt, Artificial Sequence
  Description of Artificial Sequence: Synthetic oligonucleotide
  Sense strand starting at position 2048 of SEQ ID NO: 318492
gguuuaauuuaggaccuaa

SEQ ID NO: 567066 - RNA, 19 nt, Artificial Sequence
  Description of Artificial Sequence: Synthetic oligonucleotide
  Antisense strand to SEQ ID NO: 567065
uuagguccuaaauuaaacc

SEQ ID NO: 567067 - RNA, 19 nt, Artificial Sequence
  Description of Artificial Sequence: Synthetic oligonucleotide
  Sense strand starting at position 2059 of SEQ ID NO: 318492
ggaccuaaagcugguauau

SEQ ID NO: 567068 - RNA, 19 nt, Artificial Sequence
  Description of Artificial Sequence: Synthetic oligonucleotide
  Antisense strand to SEQ ID NO: 567067
auauaccagcuuuaggucc

SEQ ID NO: 567069 - RNA, 19 nt, Artificial Sequence
  Description of Artificial Sequence: Synthetic oligonucleotide
  Sense strand starting at position 2070 of SEQ ID NO: 318492
ugguauauugcugaguaaa

SEQ ID NO: 567070 - RNA, 19 nt, Artificial Sequence
  Description of Artificial Sequence: Synthetic oligonucleotide
  Antisense strand to SEQ ID NO: 567069
uuuacucagcaauauacca

SEQ ID NO: 567071 - RNA, 19 nt, Artificial Sequence
  Description of Artificial Sequence: Synthetic oligonucleotide
  Sense strand starting at position 2101 of SEQ ID NO: 318492
gcaccaagucucuaacgaa

SEQ ID NO: 567072 - RNA, 19 nt, Artificial Sequence
  Description of Artificial Sequence: Synthetic oligonucleotide
  Antisense strand to SEQ ID NO: 567071
uucguuagagacuuggugc

SEQ ID NO: 567073 - RNA, 19 nt, Artificial Sequence
  Description of Artificial Sequence: Synthetic oligonucleotide
  Sense strand starting at position 2424 of SEQ ID NO: 318492
aaagaaacugcuugugauc

SEQ ID NO: 567074 - RNA, 19 nt, Artificial Sequence
  Description of Artificial Sequence: Synthetic oligonucleotide
  Antisense strand to SEQ ID NO: 567073
gaucacaagcaguuucuuu

SEQ ID NO: 567075 - RNA, 19 nt, Artificial Sequence
  Description of Artificial Sequence: Synthetic oligonucleotide
  Sense strand starting at position 2524 of SEQ ID NO: 318492
accaguaugugacuggaaa

SEQ ID NO: 567076 - RNA, 19 nt, Artificial Sequence
  Description of Artificial Sequence: Synthetic oligonucleotide
  Antisense strand to SEQ ID NO: 567075
uuuccagucacauacuggu

SEQ ID NO: 567077 - RNA, 19 nt, Artificial Sequence
  Description of Artificial Sequence: Synthetic oligonucleotide
  Sense strand starting at position 2926 of SEQ ID NO: 318492
acagcaugcuaucuauagu

SEQ ID NO: 567078 - RNA, 19 nt, Artificial Sequence
  Description of Artificial Sequence: Synthetic oligonucleotide
  Antisense strand to SEQ ID NO: 567077
acuauagauagcaugcugu

SEQ ID NO: 567079 - RNA, 19 nt, Artificial Sequence
  Description of Artificial Sequence: Synthetic oligonucleotide
  Sense strand starting at position 2929 of SEQ ID NO: 318492
gcaugcuaucuauaguuaa

SEQ ID NO: 567080 - RNA, 19 nt, Artificial Sequence
  Description of Artificial Sequence: Synthetic oligonucleotide
  Antisense strand to SEQ ID NO: 567079
uuaacuauagauagcaugc

SEQ ID NO: 567081 - RNA, 19 nt, Artificial Sequence
  Description of Artificial Sequence: Synthetic oligonucleotide
  Sense strand starting at position 2951 of SEQ ID NO: 318492
caauauaucguguaucgaa

SEQ ID NO: 567082 - RNA, 19 nt, Artificial Sequence
  Description of Artificial Sequence: Synthetic oligonucleotide
  Antisense strand to SEQ ID NO: 567081
uucgauacacgauauauug

SEQ ID NO: 567083 - RNA, 19 nt, Artificial Sequence
  Description of Artificial Sequence: Synthetic oligonucleotide
  Sense strand starting at position 2983 of SEQ ID NO: 318492
guagauguuaagugucuuu

SEQ ID NO: 567084 - RNA, 19 nt, Artificial Sequence
  Description of Artificial Sequence: Synthetic oligonucleotide
  Antisense strand to SEQ ID NO: 567083
aaagacacuuaacaucuac

SEQ ID NO: 567085 - RNA, 19 nt, Artificial Sequence
  Description of Artificial Sequence: Synthetic oligonucleotide
  Sense strand starting at position 2986 of SEQ ID NO: 318492
gauguuaagugucuuuauc

SEQ ID NO: 567086 - RNA, 19 nt, Artificial Sequence
  Description of Artificial Sequence: Synthetic oligonucleotide
  Antisense strand to SEQ ID NO: 567085
gauaaagacacuuaacauc

SEQ ID NO: 567087 - RNA, 19 nt, Artificial Sequence
  Description of Artificial Sequence: Synthetic oligonucleotide
  Sense strand starting at position 2988 of SEQ ID NO: 318492
uguuaagugucuuuaucac

SEQ ID NO: 567088 - RNA, 19 nt, Artificial Sequence
  Description of Artificial Sequence: Synthetic oligonucleotide
  Antisense strand to SEQ ID NO: 567087
gugauaaagacacuuaaca

SEQ ID NO: 567089 - RNA, 19 nt, Artificial Sequence
  Description of Artificial Sequence: Synthetic oligonucleotide
  Sense strand starting at position 3039 of SEQ ID NO: 318492
agucaaauagcuugacuua

SEQ ID NO: 567090 - RNA, 19 nt, Artificial Sequence
  Description of Artificial Sequence: Synthetic oligonucleotide
  Antisense strand to SEQ ID NO: 567089
uaagucaagcuauuugacu

SEQ ID NO: 567091 - RNA, 19 nt, Artificial Sequence
  Description of Artificial Sequence: Synthetic oligonucleotide
  Sense strand starting at position 3040 of SEQ ID NO: 318492
gucaaauagcuugacuuaa

SEQ ID NO: 567092 - RNA, 19 nt, Artificial Sequence
  Description of Artificial Sequence: Synthetic oligonucleotide
  Antisense strand to SEQ ID NO: 567091
uuaagucaagcuauuugac

SEQ ID NO: 567093 - RNA, 19 nt, Artificial Sequence
  Description of Artificial Sequence: Synthetic oligonucleotide
  Sense strand starting at position 3545 of SEQ ID NO: 318492
ggccaaagauauguucuga

SEQ ID NO: 567094 - RNA, 19 nt, Artificial Sequence
  Description of Artificial Sequence: Synthetic oligonucleotide
  Antisense strand to SEQ ID NO: 567093
ucagaacauaucuuuggcc

SEQ ID NO: 567095 - RNA, 19 nt, Artificial Sequence
  Description of Artificial Sequence: Synthetic oligonucleotide
  Sense strand starting at position 3561 of SEQ ID NO: 318492
ugaagauugaaacgucucu

SEQ ID NO: 567096 - RNA, 19 nt, Artificial Sequence
  Description of Artificial Sequence: Synthetic oligonucleotide
  Antisense strand to SEQ ID NO: 567095
agagacguuucaaucuuca

SEQ ID NO: 567097 - RNA, 19 nt, Artificial Sequence
  Description of Artificial Sequence: Synthetic oligonucleotide
  Sense strand starting at position 3592 of SEQ ID NO: 318492
acuacucuuggccagguau

SEQ ID NO: 567098 - RNA, 19 nt, Artificial Sequence
  Description of Artificial Sequence: Synthetic oligonucleotide
  Antisense strand to SEQ ID NO: 567097
auaccuggccaagaguagu

SEQ ID NO: 567099 - RNA, 19 nt, Artificial Sequence
  Description of Artificial Sequence: Synthetic oligonucleotide
  Sense strand starting at position 61 of SEQ ID NO: 318493
auguauagggcuuggaagu

SEQ ID NO: 567100 - RNA, 19 nt, Artificial Sequence
  Description of Artificial Sequence: Synthetic oligonucleotide
  Antisense strand to SEQ ID NO: 567099
acuuccaagcccuauacau

SEQ ID NO: 567101 - RNA, 19 nt, Artificial Sequence
  Description of Artificial Sequence: Synthetic oligonucleotide
  Sense strand starting at position 62 of SEQ ID NO: 318493
uguauagggcuuggaagua

SEQ ID NO: 567102 - RNA, 19 nt, Artificial Sequence
  Description of Artificial Sequence: Synthetic oligonucleotide
  Antisense strand to SEQ ID NO: 567101
uacuuccaagcccuauaca

SEQ ID NO: 567103 - RNA, 19 nt, Artificial Sequence
  Description of Artificial Sequence: Synthetic oligonucleotide
  Sense strand starting at position 239 of SEQ ID NO: 318493
uggagaaauucugauucua

SEQ ID NO: 567104 - RNA, 19 nt, Artificial Sequence
  Description of Artificial Sequence: Synthetic oligonucleotide
  Antisense strand to SEQ ID NO: 567103
uagaaucagaauuucucca

SEQ ID NO: 567105 - RNA, 19 nt, Artificial Sequence
  Description of Artificial Sequence: Synthetic oligonucleotide
  Sense strand starting at position 291 of SEQ ID NO: 318493
gcuagucuaccugaauauu

SEQ ID NO: 567106 - RNA, 19 nt, Artificial Sequence
  Description of Artificial Sequence: Synthetic oligonucleotide
  Antisense strand to SEQ ID NO: 567105
aauauucagguagacuagc

SEQ ID NO: 567107 - RNA, 19 nt, Artificial Sequence
  Description of Artificial Sequence: Synthetic oligonucleotide
  Sense strand starting at position 353 of SEQ ID NO: 318493
ucacuuaaggcuuguagca

SEQ ID NO: 567108 - RNA, 19 nt, Artificial Sequence
  Description of Artificial Sequence: Synthetic oligonucleotide
  Antisense strand to SEQ ID NO: 567107
ugcuacaagccuuaaguga

SEQ ID NO: 567109 - RNA, 19 nt, Artificial Sequence
  Description of Artificial Sequence: Synthetic oligonucleotide
  Sense strand starting at position 392 of SEQ ID NO: 318493
uucuuaauugguugacaau

SEQ ID NO: 567110 - RNA, 19 nt, Artificial Sequence
  Description of Artificial Sequence: Synthetic oligonucleotide
  Antisense strand to SEQ ID NO: 567109
auugucaaccaauuaagaa

SEQ ID NO: 567111 - RNA, 19 nt, Artificial Sequence
  Description of Artificial Sequence: Synthetic oligonucleotide
  Sense strand starting at position 433 of SEQ ID NO: 318493
acuagaaguggugaaguca

SEQ ID NO: 567112 - RNA, 19 nt, Artificial Sequence
  Description of Artificial Sequence: Synthetic oligonucleotide
  Antisense strand to SEQ ID NO: 567111
ugacuucaccacuucuagu

SEQ ID NO: 567113 - RNA, 19 nt, Artificial Sequence
  Description of Artificial Sequence: Synthetic oligonucleotide
  Sense strand starting at position 577 of SEQ ID NO: 318493
agucacaucgacugcaaga

SEQ ID NO: 567114 - RNA, 19 nt, Artificial Sequence
  Description of Artificial Sequence: Synthetic oligonucleotide
  Antisense strand to SEQ ID NO: 567113
ucuugcagucgaugugacu

SEQ ID NO: 567115 - RNA, 19 nt, Artificial Sequence
  Description of Artificial Sequence: Synthetic oligonucleotide
  Sense strand starting at position 619 of SEQ ID NO: 318493
ggccuuauuucugccacau

SEQ ID NO: 567116 - RNA, 19 nt, Artificial Sequence
  Description of Artificial Sequence: Synthetic oligonucleotide
  Antisense strand to SEQ ID NO: 567115
auguggcagaaauaaggcc

SEQ ID NO: 567117 - RNA, 19 nt, Artificial Sequence
  Description of Artificial Sequence: Synthetic oligonucleotide
  Sense strand starting at position 734 of SEQ ID NO: 318493
ccuuucucugucugaagga

SEQ ID NO: 567118 - RNA, 19 nt, Artificial Sequence
  Description of Artificial Sequence: Synthetic oligonucleotide
  Antisense strand to SEQ ID NO: 567117
uccuucagacagagaaagg

SEQ ID NO: 567119 - RNA, 19 nt, Artificial Sequence
  Description of Artificial Sequence: Synthetic oligonucleotide
  Sense strand starting at position 896 of SEQ ID NO: 318493
ggaaacugcuguccaaucu

SEQ ID NO: 567120 - RNA, 19 nt, Artificial Sequence
  Description of Artificial Sequence: Synthetic oligonucleotide
  Antisense strand to SEQ ID NO: 567119
agauuggacagcaguuucc

SEQ ID NO: 567121 - RNA, 19 nt, Artificial Sequence
  Description of Artificial Sequence: Synthetic oligonucleotide
  Sense strand starting at position 905 of SEQ ID NO: 318493
uguccaaucuuuccaggca

SEQ ID NO: 567122 - RNA, 19 nt, Artificial Sequence
  Description of Artificial Sequence: Synthetic oligonucleotide
  Antisense strand to SEQ ID NO: 567121
ugccuggaaagauuggaca

SEQ ID NO: 567123 - RNA, 19 nt, Artificial Sequence
  Description of Artificial Sequence: Synthetic oligonucleotide
  Sense strand starting at position 955 of SEQ ID NO: 318493
cccggaucuggguagaauc

SEQ ID NO: 567124 - RNA, 19 nt, Artificial Sequence
  Description of Artificial Sequence: Synthetic oligonucleotide
  Antisense strand to SEQ ID NO: 567123
gauucuacccagauccggg

SEQ ID NO: 567125 - RNA, 19 nt, Artificial Sequence
  Description of Artificial Sequence: Synthetic oligonucleotide
  Sense strand starting at position 2461 of SEQ ID NO: 318493
ccagucauggcgggaaaga

SEQ ID NO: 567126 - RNA, 19 nt, Artificial Sequence
  Description of Artificial Sequence: Synthetic oligonucleotide
  Antisense strand to SEQ ID NO: 567125
ucuuucccgccaugacugg

SEQ ID NO: 567127 - RNA, 19 nt, Artificial Sequence
  Description of Artificial Sequence: Synthetic oligonucleotide
  Sense strand starting at position 2843 of SEQ ID NO: 318493
gcuguaguucuauugcuuu

SEQ ID NO: 567128 - RNA, 19 nt, Artificial Sequence
  Description of Artificial Sequence: Synthetic oligonucleotide
  Antisense strand to SEQ ID NO: 567127
aaagcaauagaacuacagc

SEQ ID NO: 567129 - RNA, 19 nt, Artificial Sequence
  Description of Artificial Sequence: Synthetic oligonucleotide
  Sense strand starting at position 2958 of SEQ ID NO: 318493
uaggauaugcucuggucca

SEQ ID NO: 567130 - RNA, 19 nt, Artificial Sequence
  Description of Artificial Sequence: Synthetic oligonucleotide
  Antisense strand to SEQ ID NO: 567129
uggaccagagcauauccua

SEQ ID NO: 567131 - RNA, 19 nt, Artificial Sequence
  Description of Artificial Sequence: Synthetic oligonucleotide
  Sense strand starting at position 3056 of SEQ ID NO: 318493
cguguaauuauguagggcu

SEQ ID NO: 567132 - RNA, 19 nt, Artificial Sequence
  Description of Artificial Sequence: Synthetic oligonucleotide
  Antisense strand to SEQ ID NO: 567131
agcccuacauaauuacacg

SEQ ID NO: 567133 - RNA, 19 nt, Artificial Sequence
  Description of Artificial Sequence: Synthetic oligonucleotide
  Sense strand starting at position 3113 of SEQ ID NO: 318493
uuaggugauagguaagcaa

SEQ ID NO: 567134 - RNA, 19 nt, Artificial Sequence
  Description of Artificial Sequence: Synthetic oligonucleotide
  Antisense strand to SEQ ID NO: 567133
uugcuuaccuaucaccuaa

SEQ ID NO: 567135 - RNA, 19 nt, Artificial Sequence
  Description of Artificial Sequence: Synthetic oligonucleotide
  Sense strand starting at position 3134 of SEQ ID NO: 318493
guuaguacuagagggcaua

SEQ ID NO: 567136 - RNA, 19 nt, Artificial Sequence
  Description of Artificial Sequence: Synthetic oligonucleotide
  Antisense strand to SEQ ID NO: 567135
uaugcccucuaguacuaac

SEQ ID NO: 567137 - RNA, 19 nt, Artificial Sequence
  Description of Artificial Sequence: Synthetic oligonucleotide
  Sense strand starting at position 3197 of SEQ ID NO: 318493
caguuuccauguuuagaag

SEQ ID NO: 567138 - RNA, 19 nt, Artificial Sequence
  Description of Artificial Sequence: Synthetic oligonucleotide
  Antisense strand to SEQ ID NO: 567137
cuucuaaacauggaaacug

SEQ ID NO: 567139 - RNA, 19 nt, Artificial Sequence
  Description of Artificial Sequence: Synthetic oligonucleotide
  Sense strand starting at position 3238 of SEQ ID NO: 318493
uuugcucaguggccauaaa

SEQ ID NO: 567140 - RNA, 19 nt, Artificial Sequence
  Description of Artificial Sequence: Synthetic oligonucleotide
  Antisense strand to SEQ ID NO: 567139
uuuauggccacugagcaaa

SEQ ID NO: 567141 - RNA, 19 nt, Artificial Sequence
  Description of Artificial Sequence: Synthetic oligonucleotide
  Sense strand starting at position 3239 of SEQ ID NO: 318493
uugcucaguggccauaaau

SEQ ID NO: 567142 - RNA, 19 nt, Artificial Sequence
  Description of Artificial Sequence: Synthetic oligonucleotide
  Antisense strand to SEQ ID NO: 567141
auuuauggccacugagcaa

SEQ ID NO: 567143 - RNA, 19 nt, Artificial Sequence
  Description of Artificial Sequence: Synthetic oligonucleotide
  Sense strand starting at position 3295 of SEQ ID NO: 318493
gacagccaucgucggaaau

SEQ ID NO: 567144 - RNA, 19 nt, Artificial Sequence
  Description of Artificial Sequence: Synthetic oligonucleotide
  Antisense strand to SEQ ID NO: 567143
auuuccgacgauggcuguc

SEQ ID NO: 567145 - RNA, 19 nt, Artificial Sequence
  Description of Artificial Sequence: Synthetic oligonucleotide
  Sense strand starting at position 3296 of SEQ ID NO: 318493
acagccaucgucggaaaua

SEQ ID NO: 567146 - RNA, 19 nt, Artificial Sequence
  Description of Artificial Sequence: Synthetic oligonucleotide
  Antisense strand to SEQ ID NO: 567145
uauuuccgacgauggcugu

SEQ ID NO: 567147 - RNA, 19 nt, Artificial Sequence
  Description of Artificial Sequence: Synthetic oligonucleotide
  Sense strand starting at position 3331 of SEQ ID NO: 318493
uaugaaguacagugauguu

SEQ ID NO: 567148 - RNA, 19 nt, Artificial Sequence
  Description of Artificial Sequence: Synthetic oligonucleotide
  Antisense strand to SEQ ID NO: 567147
aacaucacuguacuucaua

SEQ ID NO: 567149 - RNA, 19 nt, Artificial Sequence
  Description of Artificial Sequence: Synthetic oligonucleotide
  Sense strand starting at position 3406 of SEQ ID NO: 318493
ggaagugguuaaguaaacu

SEQ ID NO: 567150 - RNA, 19 nt, Artificial Sequence
  Description of Artificial Sequence: Synthetic oligonucleotide
  Antisense strand to SEQ ID NO: 567149
aguuuacuuaaccacuucc

SEQ ID NO: 567151 - RNA, 19 nt, Artificial Sequence
  Description of Artificial Sequence: Synthetic oligonucleotide
  Sense strand starting at position 3439 of SEQ ID NO: 318493
gaaagagauugugcaguua

SEQ ID NO: 567152 - RNA, 19 nt, Artificial Sequence
  Description of Artificial Sequence: Synthetic oligonucleotide
  Antisense strand to SEQ ID NO: 567151
uaacugcacaaucucuuuc

SEQ ID NO: 567153 - RNA, 19 nt, Artificial Sequence
  Description of Artificial Sequence: Synthetic oligonucleotide
  Sense strand starting at position 3451 of SEQ ID NO: 318493
gcaguuagcauuugaggua

SEQ ID NO: 567154 - RNA, 19 nt, Artificial Sequence
  Description of Artificial Sequence: Synthetic oligonucleotide
  Antisense strand to SEQ ID NO: 567153
uaccucaaaugcuaacugc

SEQ ID NO: 567155 - RNA, 19 nt, Artificial Sequence
  Description of Artificial Sequence: Synthetic oligonucleotide
  Sense strand starting at position 3603 of SEQ ID NO: 318493
ggauacgaugucuguacau

SEQ ID NO: 567156 - RNA, 19 nt, Artificial Sequence
  Description of Artificial Sequence: Synthetic oligonucleotide
  Antisense strand to SEQ ID NO: 567155
auguacagacaucguaucc

SEQ ID NO: 567157 - RNA, 19 nt, Artificial Sequence
  Description of Artificial Sequence: Synthetic oligonucleotide
  Sense strand starting at position 3605 of SEQ ID NO: 318493
auacgaugucuguacaucu

SEQ ID NO: 567158 - RNA, 19 nt, Artificial Sequence
  Description of Artificial Sequence: Synthetic oligonucleotide
  Antisense strand to SEQ ID NO: 567157
agauguacagacaucguau

SEQ ID NO: 567159 - RNA, 19 nt, Artificial Sequence
  Description of Artificial Sequence: Synthetic oligonucleotide
  Sense strand starting at position 3613 of SEQ ID NO: 318493
ucuguacaucuauguuuaa

SEQ ID NO: 567160 - RNA, 19 nt, Artificial Sequence
  Description of Artificial Sequence: Synthetic oligonucleotide
  Antisense strand to SEQ ID NO: 567159
uuaaacauagauguacaga

SEQ ID NO: 567161 - RNA, 19 nt, Artificial Sequence
  Description of Artificial Sequence: Synthetic oligonucleotide
  Sense strand starting at position 3614 of SEQ ID NO: 318493
cuguacaucuauguuuaaa

SEQ ID NO: 567162 - RNA, 19 nt, Artificial Sequence
  Description of Artificial Sequence: Synthetic oligonucleotide
  Antisense strand to SEQ ID NO: 567161
uuuaaacauagauguacag

SEQ ID NO: 567163 - RNA, 19 nt, Artificial Sequence
  Description of Artificial Sequence: Synthetic oligonucleotide
  Sense strand starting at position 3696 of SEQ ID NO: 318493
gcaggaauauggcugauau

SEQ ID NO: 567164 - RNA, 19 nt, Artificial Sequence
  Description of Artificial Sequence: Synthetic oligonucleotide
  Antisense strand to SEQ ID NO: 567163
auaucagccauauuccugc

SEQ ID NO: 567165 - RNA, 19 nt, Artificial Sequence
  Description of Artificial Sequence: Synthetic oligonucleotide
  Sense strand starting at position 3697 of SEQ ID NO: 318493
caggaauauggcugauauu

SEQ ID NO: 567166 - RNA, 19 nt, Artificial Sequence
  Description of Artificial Sequence: Synthetic oligonucleotide
  Antisense strand to SEQ ID NO: 567165
aauaucagccauauuccug

SEQ ID NO: 567167 - RNA, 19 nt, Artificial Sequence
  Description of Artificial Sequence: Synthetic oligonucleotide
  Sense strand starting at position 3819 of SEQ ID NO: 318493
auaggagucuucccucaga

SEQ ID NO: 567168 - RNA, 19 nt, Artificial Sequence
  Description of Artificial Sequence: Synthetic oligonucleotide
  Antisense strand to SEQ ID NO: 567167
ucugagggaagacuccuau

SEQ ID NO: 567169 - RNA, 19 nt, Artificial Sequence
  Description of Artificial Sequence: Synthetic oligonucleotide
  Sense strand starting at position 3822 of SEQ ID NO: 318493
ggagucuucccucagaguu

SEQ ID NO: 567170 - RNA, 19 nt, Artificial Sequence
  Description of Artificial Sequence: Synthetic oligonucleotide
  Antisense strand to SEQ ID NO: 567169
aacucugagggaagacucc

SEQ ID NO: 567171 - RNA, 19 nt, Artificial Sequence
  Description of Artificial Sequence: Synthetic oligonucleotide
  Sense strand starting at position 3858 of SEQ ID NO: 318493
aguaaauuguuguugaacu

SEQ ID NO: 567172 - RNA, 19 nt, Artificial Sequence
  Description of Artificial Sequence: Synthetic oligonucleotide
  Antisense strand to SEQ ID NO: 567171
aguucaacaacaauuuacu

SEQ ID NO: 567173 - RNA, 19 nt, Artificial Sequence
  Description of Artificial Sequence: Synthetic oligonucleotide
  Sense strand starting at position 3868 of SEQ ID NO: 318493
uguugaacucauuauguau

SEQ ID NO: 567174 - RNA, 19 nt, Artificial Sequence
  Description of Artificial Sequence: Synthetic oligonucleotide
  Antisense strand to SEQ ID NO: 567173
auacauaaugaguucaaca

SEQ ID NO: 567175 - RNA, 19 nt, Artificial Sequence
  Description of Artificial Sequence: Synthetic oligonucleotide
  Sense strand starting at position 3889 of SEQ ID NO: 318493
caaguauaggguuggcuau

SEQ ID NO: 567176 - RNA, 19 nt, Artificial Sequence
  Description of Artificial Sequence: Synthetic oligonucleotide
  Antisense strand to SEQ ID NO: 567175
auagccaacccuauacuug

SEQ ID NO: 567177 - RNA, 19 nt, Artificial Sequence
  Description of Artificial Sequence: Synthetic oligonucleotide
  Sense strand starting at position 3890 of SEQ ID NO: 318493
aaguauaggguuggcuaua

SEQ ID NO: 567178 - RNA, 19 nt, Artificial Sequence
  Description of Artificial Sequence: Synthetic oligonucleotide
  Antisense strand to SEQ ID NO: 567177
uauagccaacccuauacuu

SEQ ID NO: 567179 - RNA, 19 nt, Artificial Sequence
  Description of Artificial Sequence: Synthetic oligonucleotide
  Sense strand starting at position 281 of SEQ ID NO: 318494
ucauuucuguuagacucau

SEQ ID NO: 567180 - RNA, 19 nt, Artificial Sequence
  Description of Artificial Sequence: Synthetic oligonucleotide
  Antisense strand to SEQ ID NO: 567179
augagucuaacagaaauga

SEQ ID NO: 567181 - RNA, 19 nt, Artificial Sequence
  Description of Artificial Sequence: Synthetic oligonucleotide
  Sense strand starting at position 390 of SEQ ID NO: 318494
cuuuguaauuacugacagu

SEQ ID NO: 567182 - RNA, 19 nt, Artificial Sequence
  Description of Artificial Sequence: Synthetic oligonucleotide
  Antisense strand to SEQ ID NO: 567181
acugucaguaauuacaaag

SEQ ID NO: 567183 - RNA, 19 nt, Artificial Sequence
  Description of Artificial Sequence: Synthetic oligonucleotide
  Sense strand starting at position 393 of SEQ ID NO: 318494
uguaauuacugacagugca

SEQ ID NO: 567184 - RNA, 19 nt, Artificial Sequence
  Description of Artificial Sequence: Synthetic oligonucleotide
  Antisense strand to SEQ ID NO: 567183
ugcacugucaguaauuaca

SEQ ID NO: 567185 - RNA, 19 nt, Artificial Sequence
  Description of Artificial Sequence: Synthetic oligonucleotide
  Sense strand starting at position 403 of SEQ ID NO: 318494
gacagugcaucucugacau

SEQ ID NO: 567186 - RNA, 19 nt, Artificial Sequence
  Description of Artificial Sequence: Synthetic oligonucleotide
  Antisense strand to SEQ ID NO: 567185
augucagagaugcacuguc

SEQ ID NO: 567187 - RNA, 19 nt, Artificial Sequence
  Description of Artificial Sequence: Synthetic oligonucleotide
  Sense strand starting at position 407 of SEQ ID NO: 318494
gugcaucucugacauuucu

SEQ ID NO: 567188 - RNA, 19 nt, Artificial Sequence
  Description of Artificial Sequence: Synthetic oligonucleotide
  Antisense strand to SEQ ID NO: 567187
agaaaugucagagaugcac

SEQ ID NO: 567189 - RNA, 19 nt, Artificial Sequence
  Description of Artificial Sequence: Synthetic oligonucleotide
  Sense strand starting at position 540 of SEQ ID NO: 318494
aguagauaaucauguugcu

SEQ ID NO: 567190 - RNA, 19 nt, Artificial Sequence
  Description of Artificial Sequence: Synthetic oligonucleotide
  Antisense strand to SEQ ID NO: 567189
agcaacaugauuaucuacu

SEQ ID NO: 567191 - RNA, 19 nt, Artificial Sequence
  Description of Artificial Sequence: Synthetic oligonucleotide
  Sense strand starting at position 608 of SEQ ID NO: 318494
gugccuuacucauaguagu

SEQ ID NO: 567192 - RNA, 19 nt, Artificial Sequence
  Description of Artificial Sequence: Synthetic oligonucleotide
  Antisense strand to SEQ ID NO: 567191
acuacuaugaguaaggcac

SEQ ID NO: 567193 - RNA, 19 nt, Artificial Sequence
  Description of Artificial Sequence: Synthetic oligonucleotide
  Sense strand starting at position 611 of SEQ ID NO: 318494
ccuuacucauaguagucaa

SEQ ID NO: 567194 - RNA, 19 nt, Artificial Sequence
  Description of Artificial Sequence: Synthetic oligonucleotide
  Antisense strand to SEQ ID NO: 567193
uugacuacuaugaguaagg

SEQ ID NO: 567195 - RNA, 19 nt, Artificial Sequence
  Description of Artificial Sequence: Synthetic oligonucleotide
  Sense strand starting at position 686 of SEQ ID NO: 318494
auacuuuaacacggaauau

SEQ ID NO: 567196 - RNA, 19 nt, Artificial Sequence
  Description of Artificial Sequence: Synthetic oligonucleotide
  Antisense strand to SEQ ID NO: 567195
auauuccguguuaaaguau

SEQ ID NO: 567197 - RNA, 19 nt, Artificial Sequence
  Description of Artificial Sequence: Synthetic oligonucleotide
  Sense strand starting at position 719 of SEQ ID NO: 318494
gacacuuaguaauauagag

SEQ ID NO: 567198 - RNA, 19 nt, Artificial Sequence
  Description of Artificial Sequence: Synthetic oligonucleotide
  Antisense strand to SEQ ID NO: 567197
cucuauauuacuaaguguc

SEQ ID NO: 567199 - RNA, 19 nt, Artificial Sequence
  Description of Artificial Sequence: Synthetic oligonucleotide
  Sense strand starting at position 728 of SEQ ID NO: 318494
uaauauagaggcugaugua

SEQ ID NO: 567200 - RNA, 19 nt, Artificial Sequence
  Description of Artificial Sequence: Synthetic oligonucleotide
  Antisense strand to SEQ ID NO: 567199
uacaucagccucuauauua

SEQ ID NO: 567201 - RNA, 19 nt, Artificial Sequence
  Description of Artificial Sequence: Synthetic oligonucleotide
  Sense strand starting at position 731 of SEQ ID NO: 318494
uauagaggcugauguaaga

SEQ ID NO: 567202 - RNA, 19 nt, Artificial Sequence
  Description of Artificial Sequence: Synthetic oligonucleotide
  Antisense strand to SEQ ID NO: 567201
ucuuacaucagccucuaua

SEQ ID NO: 567203 - RNA, 19 nt, Artificial Sequence
  Description of Artificial Sequence: Synthetic oligonucleotide
  Sense strand starting at position 829 of SEQ ID NO: 318494
accuuaaauugcugacgaa

SEQ ID NO: 567204 - RNA, 19 nt, Artificial Sequence
  Description of Artificial Sequence: Synthetic oligonucleotide
  Antisense strand to SEQ ID NO: 567203
uucgucagcaauuuaaggu

SEQ ID NO: 567205 - RNA, 19 nt, Artificial Sequence
  Description of Artificial Sequence: Synthetic oligonucleotide
  Sense strand starting at position 830 of SEQ ID NO: 318494
ccuuaaauugcugacgaau

SEQ ID NO: 567206 - RNA, 19 nt, Artificial Sequence
  Description of Artificial Sequence: Synthetic oligonucleotide
  Antisense strand to SEQ ID NO: 567205
auucgucagcaauuuaagg

SEQ ID NO: 567207 - RNA, 19 nt, Artificial Sequence
  Description of Artificial Sequence: Synthetic oligonucleotide
  Sense strand starting at position 832 of SEQ ID NO: 318494
uuaaauugcugacgaauuu

SEQ ID NO: 567208 - RNA, 19 nt, Artificial Sequence
  Description of Artificial Sequence: Synthetic oligonucleotide
  Antisense strand to SEQ ID NO: 567207
aaauucgucagcaauuuaa

SEQ ID NO: 567209 - RNA, 19 nt, Artificial Sequence
  Description of Artificial Sequence: Synthetic oligonucleotide
  Sense strand starting at position 860 of SEQ ID NO: 318494
agcuaacaaugucaaaguu

SEQ ID NO: 567210 - RNA, 19 nt, Artificial Sequence
  Description of Artificial Sequence: Synthetic oligonucleotide
  Antisense strand to SEQ ID NO: 567209
aacuuugacauuguuagcu

SEQ ID NO: 567211 - RNA, 19 nt, Artificial Sequence
  Description of Artificial Sequence: Synthetic oligonucleotide
  Sense strand starting at position 1440 of SEQ ID NO: 318494
gggacuuugggcuacggaa

SEQ ID NO: 567212 - RNA, 19 nt, Artificial Sequence
  Description of Artificial Sequence: Synthetic oligonucleotide
  Antisense strand to SEQ ID NO: 567211
uuccguagcccaaaguccc

SEQ ID NO: 567213 - RNA, 19 nt, Artificial Sequence
  Description of Artificial Sequence: Synthetic oligonucleotide
  Sense strand starting at position 1459 of SEQ ID NO: 318494
aacguuaaccaguacuagu

SEQ ID NO: 567214 - RNA, 19 nt, Artificial Sequence
  Description of Artificial Sequence: Synthetic oligonucleotide
  Antisense strand to SEQ ID NO: 567213
acuaguacugguuaacguu

SEQ ID NO: 567215 - RNA, 19 nt, Artificial Sequence
  Description of Artificial Sequence: Synthetic oligonucleotide
  Sense strand starting at position 2063 of SEQ ID NO: 318494
ggcagucuugccgccaauu

SEQ ID NO: 567216 - RNA, 19 nt, Artificial Sequence
  Description of Artificial Sequence: Synthetic oligonucleotide
  Antisense strand to SEQ ID NO: 567215
aauuggcggcaagacugcc

SEQ ID NO: 567217 - RNA, 19 nt, Artificial Sequence
  Description of Artificial Sequence: Synthetic oligonucleotide
  Sense strand starting at position 2835 of SEQ ID NO: 318494
aguacacgugcuuauugaa

SEQ ID NO: 567218 - RNA, 19 nt, Artificial Sequence
  Description of Artificial Sequence: Synthetic oligonucleotide
  Antisense strand to SEQ ID NO: 567217
uucaauaagcacguguacu

SEQ ID NO: 567219 - RNA, 19 nt, Artificial Sequence
  Description of Artificial Sequence: Synthetic oligonucleotide
  Sense strand starting at position 2874 of SEQ ID NO: 318494
uguuauuugugcuuauuga

SEQ ID NO: 567220 - RNA, 19 nt, Artificial Sequence
  Description of Artificial Sequence: Synthetic oligonucleotide
  Antisense strand to SEQ ID NO: 567219
ucaauaagcacaaauaaca

SEQ ID NO: 567221 - RNA, 19 nt, Artificial Sequence
  Description of Artificial Sequence: Synthetic oligonucleotide
  Sense strand starting at position 2915 of SEQ ID NO: 318494
guagcuacguaccagauaa

SEQ ID NO: 567222 - RNA, 19 nt, Artificial Sequence
  Description of Artificial Sequence: Synthetic oligonucleotide
  Antisense strand to SEQ ID NO: 567221
uuaucugguacguagcuac

SEQ ID NO: 567223 - RNA, 19 nt, Artificial Sequence
  Description of Artificial Sequence: Synthetic oligonucleotide
  Sense strand starting at position 2925 of SEQ ID NO: 318494
accagauaauguguuggau

SEQ ID NO: 567224 - RNA, 19 nt, Artificial Sequence
  Description of Artificial Sequence: Synthetic oligonucleotide
  Antisense strand to SEQ ID NO: 567223
auccaacacauuaucuggu

SEQ ID NO: 567225 - RNA, 19 nt, Artificial Sequence
  Description of Artificial Sequence: Synthetic oligonucleotide
  Sense strand starting at position 2928 of SEQ ID NO: 318494
agauaauguguuggaugcu

SEQ ID NO: 567226 - RNA, 19 nt, Artificial Sequence
  Description of Artificial Sequence: Synthetic oligonucleotide
  Antisense strand to SEQ ID NO: 567225
agcauccaacacauuaucu

SEQ ID NO: 567227 - RNA, 19 nt, Artificial Sequence
  Description of Artificial Sequence: Synthetic oligonucleotide
  Sense strand starting at position 3419 of SEQ ID NO: 318494
aaggaauccucccauguag

SEQ ID NO: 567228 - RNA, 19 nt, Artificial Sequence
  Description of Artificial Sequence: Synthetic oligonucleotide
  Antisense strand to SEQ ID NO: 567227
cuacaugggaggauuccuu

SEQ ID NO: 567229 - RNA, 19 nt, Artificial Sequence
  Description of Artificial Sequence: Synthetic oligonucleotide
  Sense strand starting at position 3583 of SEQ ID NO: 318494
acaggaguguagucagaua

SEQ ID NO: 567230 - RNA, 19 nt, Artificial Sequence
  Description of Artificial Sequence: Synthetic oligonucleotide
  Antisense strand to SEQ ID NO: 567229
uaucugacuacacuccugu

SEQ ID NO: 567231 - RNA, 19 nt, Artificial Sequence
  Description of Artificial Sequence: Synthetic oligonucleotide
  Sense strand starting at position 3588 of SEQ ID NO: 318494
aguguagucagauagucag

SEQ ID NO: 567232 - RNA, 19 nt, Artificial Sequence
  Description of Artificial Sequence: Synthetic oligonucleotide
  Antisense strand to SEQ ID NO: 567231
cugacuaucugacuacacu

SEQ ID NO: 567233 - RNA, 19 nt, Artificial Sequence
  Description of Artificial Sequence: Synthetic oligonucleotide
  Sense strand starting at position 3591 of SEQ ID NO: 318494
guagucagauagucagcau

SEQ ID NO: 567234 - RNA, 19 nt, Artificial Sequence
  Description of Artificial Sequence: Synthetic oligonucleotide
  Antisense strand to SEQ ID NO: 567233
augcugacuaucugacuac

SEQ ID NO: 567235 - RNA, 19 nt, Artificial Sequence
  Description of Artificial Sequence: Synthetic oligonucleotide
  Sense strand starting at position 6 of SEQ ID NO: 318495
aacaacuccuggguuuaga

SEQ ID NO: 567236 - RNA, 19 nt, Artificial Sequence
  Description of Artificial Sequence: Synthetic oligonucleotide
  Antisense strand to SEQ ID NO: 567235
ucuaaacccaggaguuguu

SEQ ID NO: 567237 - RNA, 19 nt, Artificial Sequence
  Description of Artificial Sequence: Synthetic oligonucleotide
  Sense strand starting at position 63 of SEQ ID NO: 318495
gugucauggcaauaucaga

SEQ ID NO: 567238 - RNA, 19 nt, Artificial Sequence
  Description of Artificial Sequence: Synthetic oligonucleotide
  Antisense strand to SEQ ID NO: 567237
ucugauauugccaugacac

SEQ ID NO: 567239 - RNA, 19 nt, Artificial Sequence
  Description of Artificial Sequence: Synthetic oligonucleotide
  Sense strand starting at position 93 of SEQ ID NO: 318495
gacagucugggcuaagaug

SEQ ID NO: 567240 - RNA, 19 nt, Artificial Sequence
  Description of Artificial Sequence: Synthetic oligonucleotide
  Antisense strand to SEQ ID NO: 567239
caucuuagcccagacuguc

SEQ ID NO: 567241 - RNA, 19 nt, Artificial Sequence
  Description of Artificial Sequence: Synthetic oligonucleotide
  Sense strand starting at position 199 of SEQ ID NO: 318495
ucgucagaugcugaauaaa

SEQ ID NO: 567242 - RNA, 19 nt, Artificial Sequence
  Description of Artificial Sequence: Synthetic oligonucleotide
  Antisense strand to SEQ ID NO: 567241
uuuauucagcaucugacga

SEQ ID NO: 567243 - RNA, 19 nt, Artificial Sequence
  Description of Artificial Sequence: Synthetic oligonucleotide
  Sense strand starting at position 214 of SEQ ID NO: 318495
uaaacagcgucagugaauu

SEQ ID NO: 567244 - RNA, 19 nt, Artificial Sequence
  Description of Artificial Sequence: Synthetic oligonucleotide
  Antisense strand to SEQ ID NO: 567243
aauucacugacgcuguuua

SEQ ID NO: 567245 - RNA, 19 nt, Artificial Sequence
  Description of Artificial Sequence: Synthetic oligonucleotide
  Sense strand starting at position 220 of SEQ ID NO: 318495
gcgucagugaauuaucuga

SEQ ID NO: 567246 - RNA, 19 nt, Artificial Sequence
  Description of Artificial Sequence: Synthetic oligonucleotide
  Antisense strand to SEQ ID NO: 567245
ucagauaauucacugacgc

SEQ ID NO: 567247 - RNA, 19 nt, Artificial Sequence
  Description of Artificial Sequence: Synthetic oligonucleotide
  Sense strand starting at position 222 of SEQ ID NO: 318495
gucagugaauuaucugaau

SEQ ID NO: 567248 - RNA, 19 nt, Artificial Sequence
  Description of Artificial Sequence: Synthetic oligonucleotide
  Antisense strand to SEQ ID NO: 567247
auucagauaauucacugac

SEQ ID NO: 567249 - RNA, 19 nt, Artificial Sequence
  Description of Artificial Sequence: Synthetic oligonucleotide
  Sense strand starting at position 310 of SEQ ID NO: 318495
uaugaacggucucuuuaga

SEQ ID NO: 567250 - RNA, 19 nt, Artificial Sequence
  Description of Artificial Sequence: Synthetic oligonucleotide
  Antisense strand to SEQ ID NO: 567249
ucuaaagagaccguucaua

SEQ ID NO: 567251 - RNA, 19 nt, Artificial Sequence
  Description of Artificial Sequence: Synthetic oligonucleotide
  Sense strand starting at position 494 of SEQ ID NO: 318495
aacagugacugagucuaau

SEQ ID NO: 567252 - RNA, 19 nt, Artificial Sequence
  Description of Artificial Sequence: Synthetic oligonucleotide
  Antisense strand to SEQ ID NO: 567251
auuagacucagucacuguu

SEQ ID NO: 567253 - RNA, 19 nt, Artificial Sequence
  Description of Artificial Sequence: Synthetic oligonucleotide
  Sense strand starting at position 497 of SEQ ID NO: 318495
agugacugagucuaauucu

SEQ ID NO: 567254 - RNA, 19 nt, Artificial Sequence
  Description of Artificial Sequence: Synthetic oligonucleotide
  Antisense strand to SEQ ID NO: 567253
agaauuagacucagucacu

SEQ ID NO: 567255 - RNA, 19 nt, Artificial Sequence
  Description of Artificial Sequence: Synthetic oligonucleotide
  Sense strand starting at position 530 of SEQ ID NO: 318495
ugagucgaguugucaauaa

SEQ ID NO: 567256 - RNA, 19 nt, Artificial Sequence
  Description of Artificial Sequence: Synthetic oligonucleotide
  Antisense strand to SEQ ID NO: 567255
uuauugacaacucgacuca

SEQ ID NO: 567257 - RNA, 19 nt, Artificial Sequence
  Description of Artificial Sequence: Synthetic oligonucleotide
  Sense strand starting at position 534 of SEQ ID NO: 318495
ucgaguugucaauaauaau

SEQ ID NO: 567258 - RNA, 19 nt, Artificial Sequence
  Description of Artificial Sequence: Synthetic oligonucleotide
  Antisense strand to SEQ ID NO: 567257
auuauuauugacaacucga

SEQ ID NO: 567259 - RNA, 19 nt, Artificial Sequence
  Description of Artificial Sequence: Synthetic oligonucleotide
  Sense strand starting at position 596 of SEQ ID NO: 318495
auuuaauaaucagagcaga

SEQ ID NO: 567260 - RNA, 19 nt, Artificial Sequence
  Description of Artificial Sequence: Synthetic oligonucleotide
  Antisense strand to SEQ ID NO: 567259
ucugcucugauuauuaaau

SEQ ID NO: 567261 - RNA, 19 nt, Artificial Sequence
  Description of Artificial Sequence: Synthetic oligonucleotide
  Sense strand starting at position 627 of SEQ ID NO: 318495
cuuccaggauucuuaauga

SEQ ID NO: 567262 - RNA, 19 nt, Artificial Sequence
  Description of Artificial Sequence: Synthetic oligonucleotide
  Antisense strand to SEQ ID NO: 567261
ucauuaagaauccuggaag

SEQ ID NO: 567263 - RNA, 19 nt, Artificial Sequence
  Description of Artificial Sequence: Synthetic oligonucleotide
  Sense strand starting at position 687 of SEQ ID NO: 318495
agaagugacacuuguguga

SEQ ID NO: 567264 - RNA, 19 nt, Artificial Sequence
  Description of Artificial Sequence: Synthetic oligonucleotide
  Antisense strand to SEQ ID NO: 567263
ucacacaagugucacuucu

SEQ ID NO: 567265 - RNA, 19 nt, Artificial Sequence
  Description of Artificial Sequence: Synthetic oligonucleotide
  Sense strand starting at position 694 of SEQ ID NO: 318495
acacuugugugaccacaaa

SEQ ID NO: 567266 - RNA, 19 nt, Artificial Sequence
  Description of Artificial Sequence: Synthetic oligonucleotide
  Antisense strand to SEQ ID NO: 567265
uuuguggucacacaagugu

SEQ ID NO: 567267 - RNA, 19 nt, Artificial Sequence
  Description of Artificial Sequence: Synthetic oligonucleotide
  Sense strand starting at position 865 of SEQ ID NO: 318495
gagaguuauuuagauguug

SEQ ID NO: 567268 - RNA, 19 nt, Artificial Sequence
  Description of Artificial Sequence: Synthetic oligonucleotide
  Antisense strand to SEQ ID NO: 567267
caacaucuaaauaacucuc

SEQ ID NO: 567269 - RNA, 19 nt, Artificial Sequence
  Description of Artificial Sequence: Synthetic oligonucleotide
  Sense strand starting at position 893 of SEQ ID NO: 318495
aaacgcagacgaugaauau

SEQ ID NO: 567270 - RNA, 19 nt, Artificial Sequence
  Description of Artificial Sequence: Synthetic oligonucleotide
  Antisense strand to SEQ ID NO: 567269
auauucaucgucugcguuu

SEQ ID NO: 567271 - RNA, 19 nt, Artificial Sequence
  Description of Artificial Sequence: Synthetic oligonucleotide
  Sense strand starting at position 1002 of SEQ ID NO: 318495
aggaaaugguauccucaca

SEQ ID NO: 567272 - RNA, 19 nt, Artificial Sequence
  Description of Artificial Sequence: Synthetic oligonucleotide
  Antisense strand to SEQ ID NO: 567271
ugugaggauaccauuuccu

SEQ ID NO: 567273 - RNA, 19 nt, Artificial Sequence
  Description of Artificial Sequence: Synthetic oligonucleotide
  Sense strand starting at position 1215 of SEQ ID NO: 318495
gugguauuugggugcaaca

SEQ ID NO: 567274 - RNA, 19 nt, Artificial Sequence
  Description of Artificial Sequence: Synthetic oligonucleotide
  Antisense strand to SEQ ID NO: 567273
uguugcacccaaauaccac

SEQ ID NO: 567275 - RNA, 19 nt, Artificial Sequence
  Description of Artificial Sequence: Synthetic oligonucleotide
  Sense strand starting at position 2524 of SEQ ID NO: 318495
ugcuaaaucacggagagca

SEQ ID NO: 567276 - RNA, 19 nt, Artificial Sequence
  Description of Artificial Sequence: Synthetic oligonucleotide
  Antisense strand to SEQ ID NO: 567275
ugcucuccgugauuuagca

SEQ ID NO: 567277 - RNA, 19 nt, Artificial Sequence
  Description of Artificial Sequence: Synthetic oligonucleotide
  Sense strand starting at position 2695 of SEQ ID NO: 318495
gaucaaggcccucgaguau

SEQ ID NO: 567278 - RNA, 19 nt, Artificial Sequence
  Description of Artificial Sequence: Synthetic oligonucleotide
  Antisense strand to SEQ ID NO: 567277
auacucgagggccuugauc

SEQ ID NO: 567279 - RNA, 19 nt, Artificial Sequence
  Description of Artificial Sequence: Synthetic oligonucleotide
  Sense strand starting at position 2707 of SEQ ID NO: 318495
cgaguauuaacuugagcau

SEQ ID NO: 567280 - RNA, 19 nt, Artificial Sequence
  Description of Artificial Sequence: Synthetic oligonucleotide
  Antisense strand to SEQ ID NO: 567279
augcucaaguuaauacucg

SEQ ID NO: 567281 - RNA, 19 nt, Artificial Sequence
  Description of Artificial Sequence: Synthetic oligonucleotide
  Sense strand starting at position 2708 of SEQ ID NO: 318495
gaguauuaacuugagcauu

SEQ ID NO: 567282 - RNA, 19 nt, Artificial Sequence
  Description of Artificial Sequence: Synthetic oligonucleotide
  Antisense strand to SEQ ID NO: 567281
aaugcucaaguuaauacuc

SEQ ID NO: 567283 - RNA, 19 nt, Artificial Sequence
  Description of Artificial Sequence: Synthetic oligonucleotide
  Sense strand starting at position 3208 of SEQ ID NO: 318495
gcuacagggagccagaauu

SEQ ID NO: 567284 - RNA, 19 nt, Artificial Sequence
  Description of Artificial Sequence: Synthetic oligonucleotide
  Antisense strand to SEQ ID NO: 567283
aauucuggcucccuguagc

SEQ ID NO: 567285 - RNA, 19 nt, Artificial Sequence
  Description of Artificial Sequence: Synthetic oligonucleotide
  Sense strand starting at position 3289 of SEQ ID NO: 318495
gggagcuugcucuaugcaa

SEQ ID NO: 567286 - RNA, 19 nt, Artificial Sequence
  Description of Artificial Sequence: Synthetic oligonucleotide
  Antisense strand to SEQ ID NO: 567285
uugcauagagcaagcuccc

SEQ ID NO: 567287 - RNA, 19 nt, Artificial Sequence
  Description of Artificial Sequence: Synthetic oligonucleotide
  Sense strand starting at position 3378 of SEQ ID NO: 318495
guuguaaucucccuuugac

SEQ ID NO: 567288 - RNA, 19 nt, Artificial Sequence
  Description of Artificial Sequence: Synthetic oligonucleotide
  Antisense strand to SEQ ID NO: 567287
gucaaagggagauuacaac

SEQ ID NO: 567289 - RNA, 19 nt, Artificial Sequence
  Description of Artificial Sequence: Synthetic oligonucleotide
  Sense strand starting at position 3396 of SEQ ID NO: 318495
cgggauucagguugggaua

SEQ ID NO: 567290 - RNA, 19 nt, Artificial Sequence
  Description of Artificial Sequence: Synthetic oligonucleotide
  Antisense strand to SEQ ID NO: 567289
uaucccaaccugaaucccg

SEQ ID NO: 567291 - RNA, 19 nt, Artificial Sequence
  Description of Artificial Sequence: Synthetic oligonucleotide
  Sense strand starting at position 3431 of SEQ ID NO: 318495
cuucuagguagucaacgaa

SEQ ID NO: 567292 - RNA, 19 nt, Artificial Sequence
  Description of Artificial Sequence: Synthetic oligonucleotide
  Antisense strand to SEQ ID NO: 567291
uucguugacuaccuagaag

SEQ ID NO: 567293 - RNA, 19 nt, Artificial Sequence
  Description of Artificial Sequence: Synthetic oligonucleotide
  Sense strand starting at position 3434 of SEQ ID NO: 318495
cuagguagucaacgaagau

SEQ ID NO: 567294 - RNA, 19 nt, Artificial Sequence
  Description of Artificial Sequence: Synthetic oligonucleotide
  Antisense strand to SEQ ID NO: 567293
aucuucguugacuaccuag

SEQ ID NO: 567295 - RNA, 19 nt, Artificial Sequence
  Description of Artificial Sequence: Synthetic oligonucleotide
  Sense strand starting at position 3435 of SEQ ID NO: 318495
uagguagucaacgaagaug

SEQ ID NO: 567296 - RNA, 19 nt, Artificial Sequence
  Description of Artificial Sequence: Synthetic oligonucleotide
  Antisense strand to SEQ ID NO: 567295
caucuucguugacuaccua

SEQ ID NO: 567297 - RNA, 19 nt, Artificial Sequence
  Description of Artificial Sequence: Synthetic oligonucleotide
  Sense strand starting at position 3457 of SEQ ID NO: 318495
acuaguaaaugacaacaga

SEQ ID NO: 567298 - RNA, 19 nt, Artificial Sequence
  Description of Artificial Sequence: Synthetic oligonucleotide
  Antisense strand to SEQ ID NO: 567297
ucuguugucauuuacuagu

SEQ ID NO: 567299 - RNA, 19 nt, Artificial Sequence
  Description of Artificial Sequence: Synthetic oligonucleotide
  Sense strand starting at position 3487 of SEQ ID NO: 318495
acagcagagcuguacgauu

SEQ ID NO: 567300 - RNA, 19 nt, Artificial Sequence
  Description of Artificial Sequence: Synthetic oligonucleotide
  Antisense strand to SEQ ID NO: 567299
aaucguacagcucugcugu

SEQ ID NO: 567301 - RNA, 19 nt, Artificial Sequence
  Description of Artificial Sequence: Synthetic oligonucleotide
  Sense strand starting at position 3522 of SEQ ID NO: 318495
gcaagcagucuguuguacu

SEQ ID NO: 567302 - RNA, 19 nt, Artificial Sequence
  Description of Artificial Sequence: Synthetic oligonucleotide
  Antisense strand to SEQ ID NO: 567301
aguacaacagacugcuugc

SEQ ID NO: 567303 - RNA, 19 nt, Artificial Sequence
  Description of Artificial Sequence: Synthetic oligonucleotide
  Sense strand starting at position 3579 of SEQ ID NO: 318495
uaacuuagugcucagugua

SEQ ID NO: 567304 - RNA, 19 nt, Artificial Sequence
  Description of Artificial Sequence: Synthetic oligonucleotide
  Antisense strand to SEQ ID NO: 567303
uacacugagcacuaaguua

SEQ ID NO: 567305 - RNA, 19 nt, Artificial Sequence
  Description of Artificial Sequence: Synthetic oligonucleotide
  Sense strand starting at position 3654 of SEQ ID NO: 318495
ugagucuguaaaggauuau

SEQ ID NO: 567306 - RNA, 19 nt, Artificial Sequence
  Description of Artificial Sequence: Synthetic oligonucleotide
  Antisense strand to SEQ ID NO: 567305
auaauccuuuacagacuca

SEQ ID NO: 567307 - RNA, 19 nt, Artificial Sequence
  Description of Artificial Sequence: Synthetic oligonucleotide
  Sense strand starting at position 3704 of SEQ ID NO: 318495
guguccugcauguauauuu

SEQ ID NO: 567308 - RNA, 19 nt, Artificial Sequence
  Description of Artificial Sequence: Synthetic oligonucleotide
  Antisense strand to SEQ ID NO: 567307
aaauauacaugcaggacac

SEQ ID NO: 567309 - RNA, 19 nt, Artificial Sequence
  Description of Artificial Sequence: Synthetic oligonucleotide
  Sense strand starting at position 3731 of SEQ ID NO: 318495
acaaauauugguugaacgu

SEQ ID NO: 567310 - RNA, 19 nt, Artificial Sequence
  Description of Artificial Sequence: Synthetic oligonucleotide
  Antisense strand to SEQ ID NO: 567309
acguucaaccaauauuugu

SEQ ID NO: 567311 - RNA, 19 nt, Artificial Sequence
  Description of Artificial Sequence: Synthetic oligonucleotide
  Sense strand starting at position 3759 of SEQ ID NO: 318495
caaggaggcucaguauguu

SEQ ID NO: 567312 - RNA, 19 nt, Artificial Sequence
  Description of Artificial Sequence: Synthetic oligonucleotide
  Antisense strand to SEQ ID NO: 567311
aacauacugagccuccuug

SEQ ID NO: 567313 - RNA, 19 nt, Artificial Sequence
  Description of Artificial Sequence: Synthetic oligonucleotide
  Sense strand starting at position 3950 of SEQ ID NO: 318495
cgcauugcaggauggaaau

SEQ ID NO: 567314 - RNA, 19 nt, Artificial Sequence
  Description of Artificial Sequence: Synthetic oligonucleotide
  Antisense strand to SEQ ID NO: 567313
auuuccauccugcaaugcg

SEQ ID NO: 567315 - RNA, 19 nt, Artificial Sequence
  Description of Artificial Sequence: Synthetic oligonucleotide
  Sense strand starting at position 16 of SEQ ID NO: 318496
ccaccugaggcagaguuau

SEQ ID NO: 567316 - RNA, 19 nt, Artificial Sequence
  Description of Artificial Sequence: Synthetic oligonucleotide
  Antisense strand to SEQ ID NO: 567315
auaacucugccucaggugg

SEQ ID NO: 567317 - RNA, 19 nt, Artificial Sequence
  Description of Artificial Sequence: Synthetic oligonucleotide
  Sense strand starting at position 138 of SEQ ID NO: 318496
guggucucuccgcuagagu

SEQ ID NO: 567318 - RNA, 19 nt, Artificial Sequence
  Description of Artificial Sequence: Synthetic oligonucleotide
  Antisense strand to SEQ ID NO: 567317
acucuagcggagagaccac

SEQ ID NO: 567319 - RNA, 19 nt, Artificial Sequence
  Description of Artificial Sequence: Synthetic oligonucleotide
  Sense strand starting at position 139 of SEQ ID NO: 318496
uggucucuccgcuagagua

SEQ ID NO: 567320 - RNA, 19 nt, Artificial Sequence
  Description of Artificial Sequence: Synthetic oligonucleotide
  Antisense strand to SEQ ID NO: 567319
uacucuagcggagagacca

SEQ ID NO: 567321 - RNA, 19 nt, Artificial Sequence
  Description of Artificial Sequence: Synthetic oligonucleotide
  Sense strand starting at position 141 of SEQ ID NO: 318496
gucucuccgcuagaguaga

SEQ ID NO: 567322 - RNA, 19 nt, Artificial Sequence
  Description of Artificial Sequence: Synthetic oligonucleotide
  Antisense strand to SEQ ID NO: 567321
ucuacucuagcggagagac

SEQ ID NO: 567323 - RNA, 19 nt, Artificial Sequence
  Description of Artificial Sequence: Synthetic oligonucleotide
  Sense strand starting at position 162 of SEQ ID NO: 318496
gaaucaaagucacuagguu

SEQ ID NO: 567324 - RNA, 19 nt, Artificial Sequence
  Description of Artificial Sequence: Synthetic oligonucleotide
  Antisense strand to SEQ ID NO: 567323
aaccuagugacuuugauuc

SEQ ID NO: 567325 - RNA, 19 nt, Artificial Sequence
  Description of Artificial Sequence: Synthetic oligonucleotide
  Sense strand starting at position 323 of SEQ ID NO: 318496
ggcuuuggugcguuugcau

SEQ ID NO: 567326 - RNA, 19 nt, Artificial Sequence
  Description of Artificial Sequence: Synthetic oligonucleotide
  Antisense strand to SEQ ID NO: 567325
augcaaacgcaccaaagcc

SEQ ID NO: 567327 - RNA, 19 nt, Artificial Sequence
  Description of Artificial Sequence: Synthetic oligonucleotide
  Sense strand starting at position 336 of SEQ ID NO: 318496
uugcauucucgccagucuu

SEQ ID NO: 567328 - RNA, 19 nt, Artificial Sequence
  Description of Artificial Sequence: Synthetic oligonucleotide
  Antisense strand to SEQ ID NO: 567327
aagacuggcgagaaugcaa

SEQ ID NO: 567329 - RNA, 19 nt, Artificial Sequence
  Description of Artificial Sequence: Synthetic oligonucleotide
  Sense strand starting at position 346 of SEQ ID NO: 318496
gccagucuucaaggaguag

SEQ ID NO: 567330 - RNA, 19 nt, Artificial Sequence
  Description of Artificial Sequence: Synthetic oligonucleotide
  Antisense strand to SEQ ID NO: 567329
cuacuccuugaagacuggc

SEQ ID NO: 567331 - RNA, 19 nt, Artificial Sequence
  Description of Artificial Sequence: Synthetic oligonucleotide
  Sense strand starting at position 404 of SEQ ID NO: 318496
ggaagaaagaccugccagu

SEQ ID NO: 567332 - RNA, 19 nt, Artificial Sequence
  Description of Artificial Sequence: Synthetic oligonucleotide
  Antisense strand to SEQ ID NO: 567331
acuggcaggucuuucuucc

SEQ ID NO: 567333 - RNA, 19 nt, Artificial Sequence
  Description of Artificial Sequence: Synthetic oligonucleotide
  Sense strand starting at position 436 of SEQ ID NO: 318496
ccgguuuaccucugauacu

SEQ ID NO: 567334 - RNA, 19 nt, Artificial Sequence
  Description of Artificial Sequence: Synthetic oligonucleotide
  Antisense strand to SEQ ID NO: 567333
aguaucagagguaaaccgg

SEQ ID NO: 567335 - RNA, 19 nt, Artificial Sequence
  Description of Artificial Sequence: Synthetic oligonucleotide
  Sense strand starting at position 437 of SEQ ID NO: 318496
cgguuuaccucugauacug

SEQ ID NO: 567336 - RNA, 19 nt, Artificial Sequence
  Description of Artificial Sequence: Synthetic oligonucleotide
  Antisense strand to SEQ ID NO: 567335
caguaucagagguaaaccg

SEQ ID NO: 567337 - RNA, 19 nt, Artificial Sequence
  Description of Artificial Sequence: Synthetic oligonucleotide
  Sense strand starting at position 618 of SEQ ID NO: 318496
ugcucuuaaccacguuuau

SEQ ID NO: 567338 - RNA, 19 nt, Artificial Sequence
  Description of Artificial Sequence: Synthetic oligonucleotide
  Antisense strand to SEQ ID NO: 567337
auaaacgugguuaagagca

SEQ ID NO: 567339 - RNA, 19 nt, Artificial Sequence
  Description of Artificial Sequence: Synthetic oligonucleotide
  Sense strand starting at position 711 of SEQ ID NO: 318496
cuuguccucagguguagau

SEQ ID NO: 567340 - RNA, 19 nt, Artificial Sequence
  Description of Artificial Sequence: Synthetic oligonucleotide
  Antisense strand to SEQ ID NO: 567339
aucuacaccugaggacaag

SEQ ID NO: 567341 - RNA, 19 nt, Artificial Sequence
  Description of Artificial Sequence: Synthetic oligonucleotide
  Sense strand starting at position 1010 of SEQ ID NO: 318496
gggaaacagcccugacgua

SEQ ID NO: 567342 - RNA, 19 nt, Artificial Sequence
  Description of Artificial Sequence: Synthetic oligonucleotide
  Antisense strand to SEQ ID NO: 567341
uacgucagggcuguuuccc

SEQ ID NO: 567343 - RNA, 19 nt, Artificial Sequence
  Description of Artificial Sequence: Synthetic oligonucleotide
  Sense strand starting at position 1326 of SEQ ID NO: 318496
ggccgagcccacuaagaaa

SEQ ID NO: 567344 - RNA, 19 nt, Artificial Sequence
  Description of Artificial Sequence: Synthetic oligonucleotide
  Antisense strand to SEQ ID NO: 567343
uuucuuagugggcucggcc

SEQ ID NO: 567345 - RNA, 19 nt, Artificial Sequence
  Description of Artificial Sequence: Synthetic oligonucleotide
  Sense strand starting at position 2588 of SEQ ID NO: 318496
ccugguuuguuccugaguu

SEQ ID NO: 567346 - RNA, 19 nt, Artificial Sequence
  Description of Artificial Sequence: Synthetic oligonucleotide
  Antisense strand to SEQ ID NO: 567345
aacucaggaacaaaccagg

SEQ ID NO: 567347 - RNA, 19 nt, Artificial Sequence
  Description of Artificial Sequence: Synthetic oligonucleotide
  Sense strand starting at position 2589 of SEQ ID NO: 318496
cugguuuguuccugaguuu

SEQ ID NO: 567348 - RNA, 19 nt, Artificial Sequence
  Description of Artificial Sequence: Synthetic oligonucleotide
  Antisense strand to SEQ ID NO: 567347
aaacucaggaacaaaccag

SEQ ID NO: 567349 - RNA, 19 nt, Artificial Sequence
  Description of Artificial Sequence: Synthetic oligonucleotide
  Sense strand starting at position 2590 of SEQ ID NO: 318496
ugguuuguuccugaguuuc

SEQ ID NO: 567350 - RNA, 19 nt, Artificial Sequence
  Description of Artificial Sequence: Synthetic oligonucleotide
  Antisense strand to SEQ ID NO: 567349
gaaacucaggaacaaacca

SEQ ID NO: 567351 - RNA, 19 nt, Artificial Sequence
  Description of Artificial Sequence: Synthetic oligonucleotide
  Sense strand starting at position 2596 of SEQ ID NO: 318496
guuccugaguuucucuaaa

SEQ ID NO: 567352 - RNA, 19 nt, Artificial Sequence
  Description of Artificial Sequence: Synthetic oligonucleotide
  Antisense strand to SEQ ID NO: 567351
uuuagagaaacucaggaac

SEQ ID NO: 567353 - RNA, 19 nt, Artificial Sequence
  Description of Artificial Sequence: Synthetic oligonucleotide
  Sense strand starting at position 2598 of SEQ ID NO: 318496
uccugaguuucucuaaaug

SEQ ID NO: 567354 - RNA, 19 nt, Artificial Sequence
  Description of Artificial Sequence: Synthetic oligonucleotide
  Antisense strand to SEQ ID NO: 567353
cauuuagagaaacucagga

SEQ ID NO: 567355 - RNA, 19 nt, Artificial Sequence
  Description of Artificial Sequence: Synthetic oligonucleotide
  Sense strand starting at position 2624 of SEQ ID NO: 318496
ucgucugucaccugcagaa

SEQ ID NO: 567356 - RNA, 19 nt, Artificial Sequence
  Description of Artificial Sequence: Synthetic oligonucleotide
  Antisense strand to SEQ ID NO: 567355
uucugcaggugacagacga

SEQ ID NO: 567357 - RNA, 19 nt, Artificial Sequence
  Description of Artificial Sequence: Synthetic oligonucleotide
  Sense strand starting at position 2626 of SEQ ID NO: 318496
gucugucaccugcagaagu

SEQ ID NO: 567358 - RNA, 19 nt, Artificial Sequence
  Description of Artificial Sequence: Synthetic oligonucleotide
  Antisense strand to SEQ ID NO: 567357
acuucugcaggugacagac

SEQ ID NO: 567359 - RNA, 19 nt, Artificial Sequence
  Description of Artificial Sequence: Synthetic oligonucleotide
  Sense strand starting at position 2628 of SEQ ID NO: 318496
cugucaccugcagaaguau

SEQ ID NO: 567360 - RNA, 19 nt, Artificial Sequence
  Description of Artificial Sequence: Synthetic oligonucleotide
  Antisense strand to SEQ ID NO: 567359
auacuucugcaggugacag

SEQ ID NO: 567361 - RNA, 19 nt, Artificial Sequence
  Description of Artificial Sequence: Synthetic oligonucleotide
  Sense strand starting at position 2745 of SEQ ID NO: 318496
ggcauugagcacugaguga

SEQ ID NO: 567362 - RNA, 19 nt, Artificial Sequence
  Description of Artificial Sequence: Synthetic oligonucleotide
  Antisense strand to SEQ ID NO: 567361
ucacucagugcucaaugcc

SEQ ID NO: 567363 - RNA, 19 nt, Artificial Sequence
  Description of Artificial Sequence: Synthetic oligonucleotide
  Sense strand starting at position 2882 of SEQ ID NO: 318496
caggcaguguccuggaauu

SEQ ID NO: 567364 - RNA, 19 nt, Artificial Sequence
  Description of Artificial Sequence: Synthetic oligonucleotide
  Antisense strand to SEQ ID NO: 567363
aauuccaggacacugccug

SEQ ID NO: 567365 - RNA, 19 nt, Artificial Sequence
  Description of Artificial Sequence: Synthetic oligonucleotide
  Sense strand starting at position 3083 of SEQ ID NO: 318496
ucuggaguuugguuguguu

SEQ ID NO: 567366 - RNA, 19 nt, Artificial Sequence
  Description of Artificial Sequence: Synthetic oligonucleotide
  Antisense strand to SEQ ID NO: 567365
aacacaaccaaacuccaga

SEQ ID NO: 567367 - RNA, 19 nt, Artificial Sequence
  Description of Artificial Sequence: Synthetic oligonucleotide
  Sense strand starting at position 3101 of SEQ ID NO: 318496
uuuguuggucaucauggaa

SEQ ID NO: 567368 - RNA, 19 nt, Artificial Sequence
  Description of Artificial Sequence: Synthetic oligonucleotide
  Antisense strand to SEQ ID NO: 567367
uuccaugaugaccaacaaa

SEQ ID NO: 567369 - RNA, 19 nt, Artificial Sequence
  Description of Artificial Sequence: Synthetic oligonucleotide
  Sense strand starting at position 3104 of SEQ ID NO: 318496
guuggucaucauggaagua

SEQ ID NO: 567370 - RNA, 19 nt, Artificial Sequence
  Description of Artificial Sequence: Synthetic oligonucleotide
  Antisense strand to SEQ ID NO: 567369
uacuuccaugaugaccaac

SEQ ID NO: 567371 - RNA, 19 nt, Artificial Sequence
  Description of Artificial Sequence: Synthetic oligonucleotide
  Sense strand starting at position 3380 of SEQ ID NO: 318496
aggugaucuugguucacug

SEQ ID NO: 567372 - RNA, 19 nt, Artificial Sequence
  Description of Artificial Sequence: Synthetic oligonucleotide
  Antisense strand to SEQ ID NO: 567371
cagugaaccaagaucaccu

SEQ ID NO: 567373 - RNA, 19 nt, Artificial Sequence
  Description of Artificial Sequence: Synthetic oligonucleotide
  Sense strand starting at position 3778 of SEQ ID NO: 318496
ggcacacuccauuagcauu

SEQ ID NO: 567374 - RNA, 19 nt, Artificial Sequence
  Description of Artificial Sequence: Synthetic oligonucleotide
  Antisense strand to SEQ ID NO: 567373
aaugcuaauggagugugcc

SEQ ID NO: 567375 - RNA, 19 nt, Artificial Sequence
  Description of Artificial Sequence: Synthetic oligonucleotide
  Sense strand starting at position 3801 of SEQ ID NO: 318496
auauucuaauguugugcaa

SEQ ID NO: 567376 - RNA, 19 nt, Artificial Sequence
  Description of Artificial Sequence: Synthetic oligonucleotide
  Antisense strand to SEQ ID NO: 567375
uugcacaacauuagaauau

SEQ ID NO: 567377 - RNA, 19 nt, Artificial Sequence
  Description of Artificial Sequence: Synthetic oligonucleotide
  Sense strand starting at position 3803 of SEQ ID NO: 318496
auucuaauguugugcaaac

SEQ ID NO: 567378 - RNA, 19 nt, Artificial Sequence
  Description of Artificial Sequence: Synthetic oligonucleotide
  Antisense strand to SEQ ID NO: 567377
guuugcacaacauuagaau

SEQ ID NO: 567379 - RNA, 19 nt, Artificial Sequence
  Description of Artificial Sequence: Synthetic oligonucleotide
  Sense strand starting at position 3804 of SEQ ID NO: 318496
uucuaauguugugcaaaca

SEQ ID NO: 567380 - RNA, 19 nt, Artificial Sequence
  Description of Artificial Sequence: Synthetic oligonucleotide
  Antisense strand to SEQ ID NO: 567379
uguuugcacaacauuagaa

SEQ ID NO: 567381 - RNA, 19 nt, Artificial Sequence
  Description of Artificial Sequence: Synthetic oligonucleotide
  Sense strand starting at position 3805 of SEQ ID NO: 318496
ucuaauguugugcaaacau

SEQ ID NO: 567382 - RNA, 19 nt, Artificial Sequence
  Description of Artificial Sequence: Synthetic oligonucleotide
  Antisense strand to SEQ ID NO: 567381
auguuugcacaacauuaga

SEQ ID NO: 567383 - RNA, 19 nt, Artificial Sequence
  Description of Artificial Sequence: Synthetic oligonucleotide
  Sense strand starting at position 3864 of SEQ ID NO: 318496
cugaaacucugagccuauu

SEQ ID NO: 567384 - RNA, 19 nt, Artificial Sequence
  Description of Artificial Sequence: Synthetic oligonucleotide
  Antisense strand to SEQ ID NO: 567383
aauaggcucagaguuucag

SEQ ID NO: 567385 - RNA, 19 nt, Artificial Sequence
  Description of Artificial Sequence: Synthetic oligonucleotide
  Sense strand starting at position 3971 of SEQ ID NO: 318496
aguggaaucgggcaguguu

SEQ ID NO: 567386 - RNA, 19 nt, Artificial Sequence
  Description of Artificial Sequence: Synthetic oligonucleotide
  Antisense strand to SEQ ID NO: 567385
aacacugcccgauuccacu

SEQ ID NO: 567387 - RNA, 19 nt, Artificial Sequence
  Description of Artificial Sequence: Synthetic oligonucleotide
  Sense strand starting at position 3972 of SEQ ID NO: 318496
guggaaucgggcaguguuu

SEQ ID NO: 567388 - RNA, 19 nt, Artificial Sequence
  Description of Artificial Sequence: Synthetic oligonucleotide
  Antisense strand to SEQ ID NO: 567387
aaacacugcccgauuccac

SEQ ID NO: 567389 - RNA, 19 nt, Artificial Sequence
  Description of Artificial Sequence: Synthetic oligonucleotide
  Sense strand starting at position 69 of SEQ ID NO: 318497
gaaagagugcugcaggaau

SEQ ID NO: 567390 - RNA, 19 nt, Artificial Sequence
  Description of Artificial Sequence: Synthetic oligonucleotide
  Antisense strand to SEQ ID NO: 567389
auuccugcagcacucuuuc

SEQ ID NO: 567391 - RNA, 19 nt, Artificial Sequence
  Description of Artificial Sequence: Synthetic oligonucleotide
  Sense strand starting at position 106 of SEQ ID NO: 318497
gagcuaugucuugaggcaa

SEQ ID NO: 567392 - RNA, 19 nt, Artificial Sequence
  Description of Artificial Sequence: Synthetic oligonucleotide
  Antisense strand to SEQ ID NO: 567391
uugccucaagacauagcuc

SEQ ID NO: 567393 - RNA, 19 nt, Artificial Sequence
  Description of Artificial Sequence: Synthetic oligonucleotide
  Sense strand starting at position 329 of SEQ ID NO: 318497
uaaaguguuggaugucaca

SEQ ID NO: 567394 - RNA, 19 nt, Artificial Sequence
  Description of Artificial Sequence: Synthetic oligonucleotide
  Antisense strand to SEQ ID NO: 567393
ugugacauccaacacuuua

SEQ ID NO: 567395 - RNA, 19 nt, Artificial Sequence
  Description of Artificial Sequence: Synthetic oligonucleotide
  Sense strand starting at position 440 of SEQ ID NO: 318497
aagauaacuuucccguaga

SEQ ID NO: 567396 - RNA, 19 nt, Artificial Sequence
  Description of Artificial Sequence: Synthetic oligonucleotide
  Antisense strand to SEQ ID NO: 567395
ucuacgggaaaguuaucuu

SEQ ID NO: 567397 - RNA, 19 nt, Artificial Sequence
  Description of Artificial Sequence: Synthetic oligonucleotide
  Sense strand starting at position 443 of SEQ ID NO: 318497
auaacuuucccguagaaga

SEQ ID NO: 567398 - RNA, 19 nt, Artificial Sequence
  Description of Artificial Sequence: Synthetic oligonucleotide
  Antisense strand to SEQ ID NO: 567397
ucuucuacgggaaaguuau

SEQ ID NO: 567399 - RNA, 19 nt, Artificial Sequence
  Description of Artificial Sequence: Synthetic oligonucleotide
  Sense strand starting at position 445 of SEQ ID NO: 318497
aacuuucccguagaagaug

SEQ ID NO: 567400 - RNA, 19 nt, Artificial Sequence
  Description of Artificial Sequence: Synthetic oligonucleotide
  Antisense strand to SEQ ID NO: 567399
caucuucuacgggaaaguu

SEQ ID NO: 567401 - RNA, 19 nt, Artificial Sequence
  Description of Artificial Sequence: Synthetic oligonucleotide
  Sense strand starting at position 753 of SEQ ID NO: 318497
ugccacuuugcccauagau

SEQ ID NO: 567402 - RNA, 19 nt, Artificial Sequence
  Description of Artificial Sequence: Synthetic oligonucleotide
  Antisense strand to SEQ ID NO: 567401
aucuaugggcaaaguggca

SEQ ID NO: 567403 - RNA, 19 nt, Artificial Sequence
  Description of Artificial Sequence: Synthetic oligonucleotide
  Sense strand starting at position 769 of SEQ ID NO: 318497
gauaccugucccuggacau

SEQ ID NO: 567404 - RNA, 19 nt, Artificial Sequence
  Description of Artificial Sequence: Synthetic oligonucleotide
  Antisense strand to SEQ ID NO: 567403
auguccagggacagguauc

SEQ ID NO: 567405 - RNA, 19 nt, Artificial Sequence
  Description of Artificial Sequence: Synthetic oligonucleotide
  Sense strand starting at position 770 of SEQ ID NO: 318497
auaccugucccuggacauu

SEQ ID NO: 567406 - RNA, 19 nt, Artificial Sequence
  Description of Artificial Sequence: Synthetic oligonucleotide
  Antisense strand to SEQ ID NO: 567405
aauguccagggacagguau

SEQ ID NO: 567407 - RNA, 19 nt, Artificial Sequence
  Description of Artificial Sequence: Synthetic oligonucleotide
  Sense strand starting at position 1010 of SEQ ID NO: 318497
aguggcuaucaugaaaucu

SEQ ID NO: 567408 - RNA, 19 nt, Artificial Sequence
  Description of Artificial Sequence: Synthetic oligonucleotide
  Antisense strand to SEQ ID NO: 567407
agauuucaugauagccacu

SEQ ID NO: 567409 - RNA, 19 nt, Artificial Sequence
  Description of Artificial Sequence: Synthetic oligonucleotide
  Sense strand starting at position 1173 of SEQ ID NO: 318497
gaguucuaucuggauaucu

SEQ ID NO: 567410 - RNA, 19 nt, Artificial Sequence
  Description of Artificial Sequence: Synthetic oligonucleotide
  Antisense strand to SEQ ID NO: 567409
agauauccagauagaacuc

SEQ ID NO: 567411 - RNA, 19 nt, Artificial Sequence
  Description of Artificial Sequence: Synthetic oligonucleotide
  Sense strand starting at position 1175 of SEQ ID NO: 318497
guucuaucuggauaucuca

SEQ ID NO: 567412 - RNA, 19 nt, Artificial Sequence
  Description of Artificial Sequence: Synthetic oligonucleotide
  Antisense strand to SEQ ID NO: 567411
ugagauauccagauagaac

SEQ ID NO: 567413 - RNA, 19 nt, Artificial Sequence
  Description of Artificial Sequence: Synthetic oligonucleotide
  Sense strand starting at position 1185 of SEQ ID NO: 318497
gauaucucacaguacguuu

SEQ ID NO: 567414 - RNA, 19 nt, Artificial Sequence
  Description of Artificial Sequence: Synthetic oligonucleotide
  Antisense strand to SEQ ID NO: 567413
aaacguacugugagauauc

SEQ ID NO: 567415 - RNA, 19 nt, Artificial Sequence
  Description of Artificial Sequence: Synthetic oligonucleotide
  Sense strand starting at position 1201 of SEQ ID NO: 318497
uuuacaguagucuagaauu

SEQ ID NO: 567416 - RNA, 19 nt, Artificial Sequence
  Description of Artificial Sequence: Synthetic oligonucleotide
  Antisense strand to SEQ ID NO: 567415
aauucuagacuacuguaaa

SEQ ID NO: 567417 - RNA, 19 nt, Artificial Sequence
  Description of Artificial Sequence: Synthetic oligonucleotide
  Sense strand starting at position 1207 of SEQ ID NO: 318497
guagucuagaauuauagua

SEQ ID NO: 567418 - RNA, 19 nt, Artificial Sequence
  Description of Artificial Sequence: Synthetic oligonucleotide
  Antisense strand to SEQ ID NO: 567417
uacuauaauucuagacuac

SEQ ID NO: 567419 - RNA, 19 nt, Artificial Sequence
  Description of Artificial Sequence: Synthetic oligonucleotide
  Sense strand starting at position 1347 of SEQ ID NO: 318497
aauauccauugaguggaua

SEQ ID NO: 567420 - RNA, 19 nt, Artificial Sequence
  Description of Artificial Sequence: Synthetic oligonucleotide
  Antisense strand to SEQ ID NO: 567419
uauccacucaauggauauu

SEQ ID NO: 567421 - RNA, 19 nt, Artificial Sequence
  Description of Artificial Sequence: Synthetic oligonucleotide
  Sense strand starting at position 1348 of SEQ ID NO: 318497
auauccauugaguggauaa

SEQ ID NO: 567422 - RNA, 19 nt, Artificial Sequence
  Description of Artificial Sequence: Synthetic oligonucleotide
  Antisense strand to SEQ ID NO: 567421
uuauccacucaauggauau

SEQ ID NO: 567423 - RNA, 19 nt, Artificial Sequence
  Description of Artificial Sequence: Synthetic oligonucleotide
  Sense strand starting at position 1373 of SEQ ID NO: 318497
gaauguagcuaucucagga

SEQ ID NO: 567424 - RNA, 19 nt, Artificial Sequence
  Description of Artificial Sequence: Synthetic oligonucleotide
  Antisense strand to SEQ ID NO: 567423
uccugagauagcuacauuc

SEQ ID NO: 567425 - RNA, 19 nt, Artificial Sequence
  Description of Artificial Sequence: Synthetic oligonucleotide
  Sense strand starting at position 1510 of SEQ ID NO: 318497
aacgaauggugaccaauau

SEQ ID NO: 567426 - RNA, 19 nt, Artificial Sequence
  Description of Artificial Sequence: Synthetic oligonucleotide
  Antisense strand to SEQ ID NO: 567425
auauuggucaccauucguu

SEQ ID NO: 567427 - RNA, 19 nt, Artificial Sequence
  Description of Artificial Sequence: Synthetic oligonucleotide
  Sense strand starting at position 1521 of SEQ ID NO: 318497
accaauauccagcagugaa

SEQ ID NO: 567428 - RNA, 19 nt, Artificial Sequence
  Description of Artificial Sequence: Synthetic oligonucleotide
  Antisense strand to SEQ ID NO: 567427
uucacugcuggauauuggu

SEQ ID NO: 567429 - RNA, 19 nt, Artificial Sequence
  Description of Artificial Sequence: Synthetic oligonucleotide
  Sense strand starting at position 1571 of SEQ ID NO: 318497
cuaacuuccuauguaggau

SEQ ID NO: 567430 - RNA, 19 nt, Artificial Sequence
  Description of Artificial Sequence: Synthetic oligonucleotide
  Antisense strand to SEQ ID NO: 567429
auccuacauaggaaguuag

SEQ ID NO: 567431 - RNA, 19 nt, Artificial Sequence
  Description of Artificial Sequence: Synthetic oligonucleotide
  Sense strand starting at position 1577 of SEQ ID NO: 318497
uccuauguaggauguauua

SEQ ID NO: 567432 - RNA, 19 nt, Artificial Sequence
  Description of Artificial Sequence: Synthetic oligonucleotide
  Antisense strand to SEQ ID NO: 567431
uaauacauccuacauagga

SEQ ID NO: 567433 - RNA, 19 nt, Artificial Sequence
  Description of Artificial Sequence: Synthetic oligonucleotide
  Sense strand starting at position 1601 of SEQ ID NO: 318497
cuuauauugggcuagagcu

SEQ ID NO: 567434 - RNA, 19 nt, Artificial Sequence
  Description of Artificial Sequence: Synthetic oligonucleotide
  Antisense strand to SEQ ID NO: 567433
agcucuagcccaauauaag

SEQ ID NO: 567435 - RNA, 19 nt, Artificial Sequence
  Description of Artificial Sequence: Synthetic oligonucleotide
  Sense strand starting at position 1603 of SEQ ID NO: 318497
uauauugggcuagagcuua

SEQ ID NO: 567436 - RNA, 19 nt, Artificial Sequence
  Description of Artificial Sequence: Synthetic oligonucleotide
  Antisense strand to SEQ ID NO: 567435
uaagcucuagcccaauaua

SEQ ID NO: 567437 - RNA, 19 nt, Artificial Sequence
  Description of Artificial Sequence: Synthetic oligonucleotide
  Sense strand starting at position 1689 of SEQ ID NO: 318497
ugcaaauaugugcaauuau

SEQ ID NO: 567438 - RNA, 19 nt, Artificial Sequence
  Description of Artificial Sequence: Synthetic oligonucleotide
  Antisense strand to SEQ ID NO: 567437
auaauugcacauauuugca

SEQ ID NO: 567439 - RNA, 19 nt, Artificial Sequence
  Description of Artificial Sequence: Synthetic oligonucleotide
  Sense strand starting at position 1841 of SEQ ID NO: 318497
uccaguuacuuaccagagu

SEQ ID NO: 567440 - RNA, 19 nt, Artificial Sequence
  Description of Artificial Sequence: Synthetic oligonucleotide
  Antisense strand to SEQ ID NO: 567439
acucugguaaguaacugga

SEQ ID NO: 567441 - RNA, 19 nt, Artificial Sequence
  Description of Artificial Sequence: Synthetic oligonucleotide
  Sense strand starting at position 1844 of SEQ ID NO: 318497
aguuacuuaccagaguaac

SEQ ID NO: 567442 - RNA, 19 nt, Artificial Sequence
  Description of Artificial Sequence: Synthetic oligonucleotide
  Antisense strand to SEQ ID NO: 567441
guuacucugguaaguaacu

SEQ ID NO: 567443 - RNA, 19 nt, Artificial Sequence
  Description of Artificial Sequence: Synthetic oligonucleotide
  Sense strand starting at position 2143 of SEQ ID NO: 318497
guguguucccaugagaaac

SEQ ID NO: 567444 - RNA, 19 nt, Artificial Sequence
  Description of Artificial Sequence: Synthetic oligonucleotide
  Antisense strand to SEQ ID NO: 567443
guuucucaugggaacacac

SEQ ID NO: 567445 - RNA, 19 nt, Artificial Sequence
  Description of Artificial Sequence: Synthetic oligonucleotide
  Sense strand starting at position 2242 of SEQ ID NO: 318497
acgaauccuucuccuggaa

SEQ ID NO: 567446 - RNA, 19 nt, Artificial Sequence
  Description of Artificial Sequence: Synthetic oligonucleotide
  Antisense strand to SEQ ID NO: 567445
uuccaggagaaggauucgu

SEQ ID NO: 567447 - RNA, 19 nt, Artificial Sequence
  Description of Artificial Sequence: Synthetic oligonucleotide
  Sense strand starting at position 2349 of SEQ ID NO: 318497
auuuaaaguuuggagaauc

SEQ ID NO: 567448 - RNA, 19 nt, Artificial Sequence
  Description of Artificial Sequence: Synthetic oligonucleotide
  Antisense strand to SEQ ID NO: 567447
gauucuccaaacuuuaaau

SEQ ID NO: 567449 - RNA, 19 nt, Artificial Sequence
  Description of Artificial Sequence: Synthetic oligonucleotide
  Sense strand starting at position 2410 of SEQ ID NO: 318497
gccacucugguauaauaca

SEQ ID NO: 567450 - RNA, 19 nt, Artificial Sequence
  Description of Artificial Sequence: Synthetic oligonucleotide
  Antisense strand to SEQ ID NO: 567449
uguauuauaccagaguggc

SEQ ID NO: 567451 - RNA, 19 nt, Artificial Sequence
  Description of Artificial Sequence: Synthetic oligonucleotide
  Sense strand starting at position 2689 of SEQ ID NO: 318497
ggauauugguccucucauc

SEQ ID NO: 567452 - RNA, 19 nt, Artificial Sequence
  Description of Artificial Sequence: Synthetic oligonucleotide
  Antisense strand to SEQ ID NO: 567451
gaugagaggaccaauaucc

SEQ ID NO: 567453 - RNA, 19 nt, Artificial Sequence
  Description of Artificial Sequence: Synthetic oligonucleotide
  Sense strand starting at position 2834 of SEQ ID NO: 318497
uggcuacaggaguaguaau

SEQ ID NO: 567454 - RNA, 19 nt, Artificial Sequence
  Description of Artificial Sequence: Synthetic oligonucleotide
  Antisense strand to SEQ ID NO: 567453
auuacuacuccuguagcca

SEQ ID NO: 567455 - RNA, 19 nt, Artificial Sequence
  Description of Artificial Sequence: Synthetic oligonucleotide
  Sense strand starting at position 2921 of SEQ ID NO: 318497
gcagaaguccuggaguucu

SEQ ID NO: 567456 - RNA, 19 nt, Artificial Sequence
  Description of Artificial Sequence: Synthetic oligonucleotide
  Antisense strand to SEQ ID NO: 567455
agaacuccaggacuucugc

SEQ ID NO: 567457 - RNA, 19 nt, Artificial Sequence
  Description of Artificial Sequence: Synthetic oligonucleotide
  Sense strand starting at position 3147 of SEQ ID NO: 318497
gggcuuuauuuguccucau

SEQ ID NO: 567458 - RNA, 19 nt, Artificial Sequence
  Description of Artificial Sequence: Synthetic oligonucleotide
  Antisense strand to SEQ ID NO: 567457
augaggacaaauaaagccc

SEQ ID NO: 567459 - RNA, 19 nt, Artificial Sequence
  Description of Artificial Sequence: Synthetic oligonucleotide
  Sense strand starting at position 3148 of SEQ ID NO: 318497
ggcuuuauuuguccucauc

SEQ ID NO: 567460 - RNA, 19 nt, Artificial Sequence
  Description of Artificial Sequence: Synthetic oligonucleotide
  Antisense strand to SEQ ID NO: 567459
gaugaggacaaauaaagcc

SEQ ID NO: 567461 - RNA, 19 nt, Artificial Sequence
  Description of Artificial Sequence: Synthetic oligonucleotide
  Sense strand starting at position 3615 of SEQ ID NO: 318497
ggaguaauuuaccagacca

SEQ ID NO: 567462 - RNA, 19 nt, Artificial Sequence
  Description of Artificial Sequence: Synthetic oligonucleotide
  Antisense strand to SEQ ID NO: 567461
uggucugguaaauuacucc

SEQ ID NO: 567463 - RNA, 19 nt, Artificial Sequence
  Description of Artificial Sequence: Synthetic oligonucleotide
  Sense strand starting at position 3688 of SEQ ID NO: 318497
gccuauaugcaggaguauu

SEQ ID NO: 567464 - RNA, 19 nt, Artificial Sequence
  Description of Artificial Sequence: Synthetic oligonucleotide
  Antisense strand to SEQ ID NO: 567463
aauacuccugcauauaggc

SEQ ID NO: 567465 - RNA, 19 nt, Artificial Sequence
  Description of Artificial Sequence: Synthetic oligonucleotide
  Sense strand starting at position 3748 of SEQ ID NO: 318497
gcuggaaaguuucuuaauu

SEQ ID NO: 567466 - RNA, 19 nt, Artificial Sequence
  Description of Artificial Sequence: Synthetic oligonucleotide
  Antisense strand to SEQ ID NO: 567465
aauuaagaaacuuuccagc

SEQ ID NO: 567467 - RNA, 19 nt, Artificial Sequence
  Description of Artificial Sequence: Synthetic oligonucleotide
  Sense strand starting at position 3814 of SEQ ID NO: 318497
cucaaucagguuugaggau

SEQ ID NO: 567468 - RNA, 19 nt, Artificial Sequence
  Description of Artificial Sequence: Synthetic oligonucleotide
  Antisense strand to SEQ ID NO: 567467
auccucaaaccugauugag

SEQ ID NO: 567469 - RNA, 19 nt, Artificial Sequence
  Description of Artificial Sequence: Synthetic oligonucleotide
  Sense strand starting at position 18 of SEQ ID NO: 318498
gucugauaaguucgucacu

SEQ ID NO: 567470 - RNA, 19 nt, Artificial Sequence
  Description of Artificial Sequence: Synthetic oligonucleotide
  Antisense strand to SEQ ID NO: 567469
agugacgaacuuaucagac

SEQ ID NO: 567471 - RNA, 19 nt, Artificial Sequence
  Description of Artificial Sequence: Synthetic oligonucleotide
  Sense strand starting at position 19 of SEQ ID NO: 318498
ucugauaaguucgucacuu

SEQ ID NO: 567472 - RNA, 19 nt, Artificial Sequence
  Description of Artificial Sequence: Synthetic oligonucleotide
  Antisense strand to SEQ ID NO: 567471
aagugacgaacuuaucaga

SEQ ID NO: 567473 - RNA, 19 nt, Artificial Sequence
  Description of Artificial Sequence: Synthetic oligonucleotide
  Sense strand starting at position 20 of SEQ ID NO: 318498
cugauaaguucgucacuug

SEQ ID NO: 567474 - RNA, 19 nt, Artificial Sequence
  Description of Artificial Sequence: Synthetic oligonucleotide
  Antisense strand to SEQ ID NO: 567473
caagugacgaacuuaucag

SEQ ID NO: 567475 - RNA, 19 nt, Artificial Sequence
  Description of Artificial Sequence: Synthetic oligonucleotide
  Sense strand starting at position 21 of SEQ ID NO: 318498
ugauaaguucgucacuuga

SEQ ID NO: 567476 - RNA, 19 nt, Artificial Sequence
  Description of Artificial Sequence: Synthetic oligonucleotide
  Antisense strand to SEQ ID NO: 567475
ucaagugacgaacuuauca

SEQ ID NO: 567477 - RNA, 19 nt, Artificial Sequence
  Description of Artificial Sequence: Synthetic oligonucleotide
  Sense strand starting at position 23 of SEQ ID NO: 318498
auaaguucgucacuugaaa

SEQ ID NO: 567478 - RNA, 19 nt, Artificial Sequence
  Description of Artificial Sequence: Synthetic oligonucleotide
  Antisense strand to SEQ ID NO: 567477
uuucaagugacgaacuuau

SEQ ID NO: 567479 - RNA, 19 nt, Artificial Sequence
  Description of Artificial Sequence: Synthetic oligonucleotide
  Sense strand starting at position 107 of SEQ ID NO: 318498
ucuggacuuuacugaaauu

SEQ ID NO: 567480 - RNA, 19 nt, Artificial Sequence
  Description of Artificial Sequence: Synthetic oligonucleotide
  Antisense strand to SEQ ID NO: 567479
aauuucaguaaaguccaga

SEQ ID NO: 567481 - RNA, 19 nt, Artificial Sequence
  Description of Artificial Sequence: Synthetic oligonucleotide
  Sense strand starting at position 204 of SEQ ID NO: 318498
uuaugcuguuccuucguaa

SEQ ID NO: 567482 - RNA, 19 nt, Artificial Sequence
  Description of Artificial Sequence: Synthetic oligonucleotide
  Antisense strand to SEQ ID NO: 567481
uuacgaaggaacagcauaa

SEQ ID NO: 567483 - RNA, 19 nt, Artificial Sequence
  Description of Artificial Sequence: Synthetic oligonucleotide
  Sense strand starting at position 207 of SEQ ID NO: 318498
ugcuguuccuucguaaacu

SEQ ID NO: 567484 - RNA, 19 nt, Artificial Sequence
  Description of Artificial Sequence: Synthetic oligonucleotide
  Antisense strand to SEQ ID NO: 567483
aguuuacgaaggaacagca

SEQ ID NO: 567485 - RNA, 19 nt, Artificial Sequence
  Description of Artificial Sequence: Synthetic oligonucleotide
  Sense strand starting at position 250 of SEQ ID NO: 318498
aucugaaaugccgauaaau

SEQ ID NO: 567486 - RNA, 19 nt, Artificial Sequence
  Description of Artificial Sequence: Synthetic oligonucleotide
  Antisense strand to SEQ ID NO: 567485
auuuaucggcauuucagau

SEQ ID NO: 567487 - RNA, 19 nt, Artificial Sequence
  Description of Artificial Sequence: Synthetic oligonucleotide
  Sense strand starting at position 252 of SEQ ID NO: 318498
cugaaaugccgauaaauau

SEQ ID NO: 567488 - RNA, 19 nt, Artificial Sequence
  Description of Artificial Sequence: Synthetic oligonucleotide
  Antisense strand to SEQ ID NO: 567487
auauuuaucggcauuucag

SEQ ID NO: 567489 - RNA, 19 nt, Artificial Sequence
  Description of Artificial Sequence: Synthetic oligonucleotide
  Sense strand starting at position 271 of SEQ ID NO: 318498
gcugcuugcaggcagaauu

SEQ ID NO: 567490 - RNA, 19 nt, Artificial Sequence
  Description of Artificial Sequence: Synthetic oligonucleotide
  Antisense strand to SEQ ID NO: 567489
aauucugccugcaagcagc

SEQ ID NO: 567491 - RNA, 19 nt, Artificial Sequence
  Description of Artificial Sequence: Synthetic oligonucleotide
  Sense strand starting at position 404 of SEQ ID NO: 318498
agggucuuagucugcagaa

SEQ ID NO: 567492 - RNA, 19 nt, Artificial Sequence
  Description of Artificial Sequence: Synthetic oligonucleotide
  Antisense strand to SEQ ID NO: 567491
uucugcagacuaagacccu

SEQ ID NO: 567493 - RNA, 19 nt, Artificial Sequence
  Description of Artificial Sequence: Synthetic oligonucleotide
  Sense strand starting at position 405 of SEQ ID NO: 318498
gggucuuagucugcagaag

SEQ ID NO: 567494 - RNA, 19 nt, Artificial Sequence
  Description of Artificial Sequence: Synthetic oligonucleotide
  Antisense strand to SEQ ID NO: 567493
cuucugcagacuaagaccc

SEQ ID NO: 567495 - RNA, 19 nt, Artificial Sequence
  Description of Artificial Sequence: Synthetic oligonucleotide
  Sense strand starting at position 584 of SEQ ID NO: 318498
ggucucugcucagucagua

SEQ ID NO: 567496 - RNA, 19 nt, Artificial Sequence
  Description of Artificial Sequence: Synthetic oligonucleotide
  Antisense strand to SEQ ID NO: 567495
uacugacugagcagagacc

SEQ ID NO: 567497 - RNA, 19 nt, Artificial Sequence
  Description of Artificial Sequence: Synthetic oligonucleotide
  Sense strand starting at position 650 of SEQ ID NO: 318498
gcaggauggcuguaugacu

SEQ ID NO: 567498 - RNA, 19 nt, Artificial Sequence
  Description of Artificial Sequence: Synthetic oligonucleotide
  Antisense strand to SEQ ID NO: 567497
agucauacagccauccugc

SEQ ID NO: 567499 - RNA, 19 nt, Artificial Sequence
  Description of Artificial Sequence: Synthetic oligonucleotide
  Sense strand starting at position 763 of SEQ ID NO: 318498
augccuugguuccuauuga

SEQ ID NO: 567500 - RNA, 19 nt, Artificial Sequence
  Description of Artificial Sequence: Synthetic oligonucleotide
  Antisense strand to SEQ ID NO: 567499
ucaauaggaaccaaggcau

SEQ ID NO: 567501 - RNA, 19 nt, Artificial Sequence
  Description of Artificial Sequence: Synthetic oligonucleotide
  Sense strand starting at position 898 of SEQ ID NO: 318498
gaaggccgauucuuaagau

SEQ ID NO: 567502 - RNA, 19 nt, Artificial Sequence
  Description of Artificial Sequence: Synthetic oligonucleotide
  Antisense strand to SEQ ID NO: 567501
aucuuaagaaucggccuuc

SEQ ID NO: 567503 - RNA, 19 nt, Artificial Sequence
  Description of Artificial Sequence: Synthetic oligonucleotide
  Sense strand starting at position 910 of SEQ ID NO: 318498
uuaagaugcaaucguagag

SEQ ID NO: 567504 - RNA, 19 nt, Artificial Sequence
  Description of Artificial Sequence: Synthetic oligonucleotide
  Antisense strand to SEQ ID NO: 567503
cucuacgauugcaucuuaa

SEQ ID NO: 567505 - RNA, 19 nt, Artificial Sequence
  Description of Artificial Sequence: Synthetic oligonucleotide
  Sense strand starting at position 1068 of SEQ ID NO: 318498
cugagcucuccgccugagu

SEQ ID NO: 567506 - RNA, 19 nt, Artificial Sequence
  Description of Artificial Sequence: Synthetic oligonucleotide
  Antisense strand to SEQ ID NO: 567505
acucaggcggagagcucag

SEQ ID NO: 567507 - RNA, 19 nt, Artificial Sequence
  Description of Artificial Sequence: Synthetic oligonucleotide
  Sense strand starting at position 1069 of SEQ ID NO: 318498
ugagcucuccgccugaguu

SEQ ID NO: 567508 - RNA, 19 nt, Artificial Sequence
  Description of Artificial Sequence: Synthetic oligonucleotide
  Antisense strand to SEQ ID NO: 567507
aacucaggcggagagcuca

SEQ ID NO: 567509 - RNA, 19 nt, Artificial Sequence
  Description of Artificial Sequence: Synthetic oligonucleotide
  Sense strand starting at position 1070 of SEQ ID NO: 318498
gagcucuccgccugaguuu

SEQ ID NO: 567510 - RNA, 19 nt, Artificial Sequence
  Description of Artificial Sequence: Synthetic oligonucleotide
  Antisense strand to SEQ ID NO: 567509
aaacucaggcggagagcuc

SEQ ID NO: 567511 - RNA, 19 nt, Artificial Sequence
  Description of Artificial Sequence: Synthetic oligonucleotide
  Sense strand starting at position 1161 of SEQ ID NO: 318498
aguagaagcccuuaacuua

SEQ ID NO: 567512 - RNA, 19 nt, Artificial Sequence
  Description of Artificial Sequence: Synthetic oligonucleotide
  Antisense strand to SEQ ID NO: 567511
uaaguuaagggcuucuacu

SEQ ID NO: 567513 - RNA, 19 nt, Artificial Sequence
  Description of Artificial Sequence: Synthetic oligonucleotide
  Sense strand starting at position 1210 of SEQ ID NO: 318498
gcgcuuucuggaaaggcga

SEQ ID NO: 567514 - RNA, 19 nt, Artificial Sequence
  Description of Artificial Sequence: Synthetic oligonucleotide
  Antisense strand to SEQ ID NO: 567513
ucgccuuuccagaaagcgc

SEQ ID NO: 567515 - RNA, 19 nt, Artificial Sequence
  Description of Artificial Sequence: Synthetic oligonucleotide
  Sense strand starting at position 2299 of SEQ ID NO: 318498
uccgaccucuuguuuauua

SEQ ID NO: 567516 - RNA, 19 nt, Artificial Sequence
  Description of Artificial Sequence: Synthetic oligonucleotide
  Antisense strand to SEQ ID NO: 567515
uaauaaacaagaggucgga

SEQ ID NO: 567517 - RNA, 19 nt, Artificial Sequence
  Description of Artificial Sequence: Synthetic oligonucleotide
  Sense strand starting at position 2300 of SEQ ID NO: 318498
ccgaccucuuguuuauuau

SEQ ID NO: 567518 - RNA, 19 nt, Artificial Sequence
  Description of Artificial Sequence: Synthetic oligonucleotide
  Antisense strand to SEQ ID NO: 567517
auaauaaacaagaggucgg

SEQ ID NO: 567519 - RNA, 19 nt, Artificial Sequence
  Description of Artificial Sequence: Synthetic oligonucleotide
  Sense strand starting at position 2301 of SEQ ID NO: 318498
cgaccucuuguuuauuaua

SEQ ID NO: 567520 - RNA, 19 nt, Artificial Sequence
  Description of Artificial Sequence: Synthetic oligonucleotide
  Antisense strand to SEQ ID NO: 567519
uauaauaaacaagaggucg

SEQ ID NO: 567521 - RNA, 19 nt, Artificial Sequence
  Description of Artificial Sequence: Synthetic oligonucleotide
  Sense strand starting at position 2355 of SEQ ID NO: 318498
uguguuuguggaggucaca

SEQ ID NO: 567522 - RNA, 19 nt, Artificial Sequence
  Description of Artificial Sequence: Synthetic oligonucleotide
  Antisense strand to SEQ ID NO: 567521
ugugaccuccacaaacaca

SEQ ID NO: 567523 - RNA, 19 nt, Artificial Sequence
  Description of Artificial Sequence: Synthetic oligonucleotide
  Sense strand starting at position 2388 of SEQ ID NO: 318498
aagugacucuacuuuguga

SEQ ID NO: 567524 - RNA, 19 nt, Artificial Sequence
  Description of Artificial Sequence: Synthetic oligonucleotide
  Antisense strand to SEQ ID NO: 567523
ucacaaaguagagucacuu

SEQ ID NO: 567525 - RNA, 19 nt, Artificial Sequence
  Description of Artificial Sequence: Synthetic oligonucleotide
  Sense strand starting at position 2390 of SEQ ID NO: 318498
gugacucuacuuugugaaa

SEQ ID NO: 567526 - RNA, 19 nt, Artificial Sequence
  Description of Artificial Sequence: Synthetic oligonucleotide
  Antisense strand to SEQ ID NO: 567525
uuucacaaaguagagucac

SEQ ID NO: 567527 - RNA, 19 nt, Artificial Sequence
  Description of Artificial Sequence: Synthetic oligonucleotide
  Sense strand starting at position 2419 of SEQ ID NO: 318498
ucguguagguacucaguaa

SEQ ID NO: 567528 - RNA, 19 nt, Artificial Sequence
  Description of Artificial Sequence: Synthetic oligonucleotide
  Antisense strand to SEQ ID NO: 567527
uuacugaguaccuacacga

SEQ ID NO: 567529 - RNA, 19 nt, Artificial Sequence
  Description of Artificial Sequence: Synthetic oligonucleotide
  Sense strand starting at position 2420 of SEQ ID NO: 318498
cguguagguacucaguaaa

SEQ ID NO: 567530 - RNA, 19 nt, Artificial Sequence
  Description of Artificial Sequence: Synthetic oligonucleotide
  Antisense strand to SEQ ID NO: 567529
uuuacugaguaccuacacg

SEQ ID NO: 567531 - RNA, 19 nt, Artificial Sequence
  Description of Artificial Sequence: Synthetic oligonucleotide
  Sense strand starting at position 2430 of SEQ ID NO: 318498
cucaguaaaucaguaaauu

SEQ ID NO: 567532 - RNA, 19 nt, Artificial Sequence
  Description of Artificial Sequence: Synthetic oligonucleotide
  Antisense strand to SEQ ID NO: 567531
aauuuacugauuuacugag

SEQ ID NO: 567533 - RNA, 19 nt, Artificial Sequence
  Description of Artificial Sequence: Synthetic oligonucleotide
  Sense strand starting at position 2441 of SEQ ID NO: 318498
aguaaauucuuacuaacgu

SEQ ID NO: 567534 - RNA, 19 nt, Artificial Sequence
  Description of Artificial Sequence: Synthetic oligonucleotide
  Antisense strand to SEQ ID NO: 567533
acguuaguaagaauuuacu

SEQ ID NO: 567535 - RNA, 19 nt, Artificial Sequence
  Description of Artificial Sequence: Synthetic oligonucleotide
  Sense strand starting at position 2442 of SEQ ID NO: 318498
guaaauucuuacuaacguu

SEQ ID NO: 567536 - RNA, 19 nt, Artificial Sequence
  Description of Artificial Sequence: Synthetic oligonucleotide
  Antisense strand to SEQ ID NO: 567535
aacguuaguaagaauuuac

SEQ ID NO: 567537 - RNA, 19 nt, Artificial Sequence
  Description of Artificial Sequence: Synthetic oligonucleotide
  Sense strand starting at position 2501 of SEQ ID NO: 318498
agcagagaacucuguaauc

SEQ ID NO: 567538 - RNA, 19 nt, Artificial Sequence
  Description of Artificial Sequence: Synthetic oligonucleotide
  Antisense strand to SEQ ID NO: 567537
gauuacagaguucucugcu

SEQ ID NO: 567539 - RNA, 19 nt, Artificial Sequence
  Description of Artificial Sequence: Synthetic oligonucleotide
  Sense strand starting at position 2608 of SEQ ID NO: 318498
agucuuccuucugaucaga

SEQ ID NO: 567540 - RNA, 19 nt, Artificial Sequence
  Description of Artificial Sequence: Synthetic oligonucleotide
  Antisense strand to SEQ ID NO: 567539
ucugaucagaaggaagacu

SEQ ID NO: 567541 - RNA, 19 nt, Artificial Sequence
  Description of Artificial Sequence: Synthetic oligonucleotide
  Sense strand starting at position 2610 of SEQ ID NO: 318498
ucuuccuucugaucagaag

SEQ ID NO: 567542 - RNA, 19 nt, Artificial Sequence
  Description of Artificial Sequence: Synthetic oligonucleotide
  Antisense strand to SEQ ID NO: 567541
cuucugaucagaaggaaga

SEQ ID NO: 567543 - RNA, 19 nt, Artificial Sequence
  Description of Artificial Sequence: Synthetic oligonucleotide
  Sense strand starting at position 2686 of SEQ ID NO: 318498
auaugaaaguguccggugu

SEQ ID NO: 567544 - RNA, 19 nt, Artificial Sequence
  Description of Artificial Sequence: Synthetic oligonucleotide
  Antisense strand to SEQ ID NO: 567543
acaccggacacuuucauau

SEQ ID NO: 567545 - RNA, 19 nt, Artificial Sequence
  Description of Artificial Sequence: Synthetic oligonucleotide
  Sense strand starting at position 2719 of SEQ ID NO: 318498
cgaguugauucuguaucuu

SEQ ID NO: 567546 - RNA, 19 nt, Artificial Sequence
  Description of Artificial Sequence: Synthetic oligonucleotide
  Antisense strand to SEQ ID NO: 567545
aagauacagaaucaacucg

SEQ ID NO: 567547 - RNA, 19 nt, Artificial Sequence
  Description of Artificial Sequence: Synthetic oligonucleotide
  Sense strand starting at position 2787 of SEQ ID NO: 318498
acgugaggaauugguuuaa

SEQ ID NO: 567548 - RNA, 19 nt, Artificial Sequence
  Description of Artificial Sequence: Synthetic oligonucleotide
  Antisense strand to SEQ ID NO: 567547
uuaaaccaauuccucacgu

SEQ ID NO: 567549 - RNA, 19 nt, Artificial Sequence
  Description of Artificial Sequence: Synthetic oligonucleotide
  Sense strand starting at position 96 of SEQ ID NO: 318499
ggaucaggccuguaauuac

SEQ ID NO: 567550 - RNA, 19 nt, Artificial Sequence
  Description of Artificial Sequence: Synthetic oligonucleotide
  Antisense strand to SEQ ID NO: 567549
guaauuacaggccugaucc

SEQ ID NO: 567551 - RNA, 19 nt, Artificial Sequence
  Description of Artificial Sequence: Synthetic oligonucleotide
  Sense strand starting at position 254 of SEQ ID NO: 318499
ggaacaaaugucuguugga

SEQ ID NO: 567552 - RNA, 19 nt, Artificial Sequence
  Description of Artificial Sequence: Synthetic oligonucleotide
  Antisense strand to SEQ ID NO: 567551
uccaacagacauuuguucc

SEQ ID NO: 567553 - RNA, 19 nt, Artificial Sequence
  Description of Artificial Sequence: Synthetic oligonucleotide
  Sense strand starting at position 255 of SEQ ID NO: 318499
gaacaaaugucuguuggac

SEQ ID NO: 567554 - RNA, 19 nt, Artificial Sequence
  Description of Artificial Sequence: Synthetic oligonucleotide
  Antisense strand to SEQ ID NO: 567553
guccaacagacauuuguuc

SEQ ID NO: 567555 - RNA, 19 nt, Artificial Sequence
  Description of Artificial Sequence: Synthetic oligonucleotide
  Sense strand starting at position 264 of SEQ ID NO: 318499
ucuguuggacuguaucaaa

SEQ ID NO: 567556 - RNA, 19 nt, Artificial Sequence
  Description of Artificial Sequence: Synthetic oligonucleotide
  Antisense strand to SEQ ID NO: 567555
uuugauacaguccaacaga

SEQ ID NO: 567557 - RNA, 19 nt, Artificial Sequence
  Description of Artificial Sequence: Synthetic oligonucleotide
  Sense strand starting at position 291 of SEQ ID NO: 318499
gugacaguaucucuaauac

SEQ ID NO: 567558 - RNA, 19 nt, Artificial Sequence
  Description of Artificial Sequence: Synthetic oligonucleotide
  Antisense strand to SEQ ID NO: 567557
guauuagagauacugucac

SEQ ID NO: 567559 - RNA, 19 nt, Artificial Sequence
  Description of Artificial Sequence: Synthetic oligonucleotide
  Sense strand starting at position 467 of SEQ ID NO: 318499
uucucauccucaguguaaa

SEQ ID NO: 567560 - RNA, 19 nt, Artificial Sequence
  Description of Artificial Sequence: Synthetic oligonucleotide
  Antisense strand to SEQ ID NO: 567559
uuuacacugaggaugagaa

SEQ ID NO: 567561 - RNA, 19 nt, Artificial Sequence
  Description of Artificial Sequence: Synthetic oligonucleotide
  Sense strand starting at position 468 of SEQ ID NO: 318499
ucucauccucaguguaaau

SEQ ID NO: 567562 - RNA, 19 nt, Artificial Sequence
  Description of Artificial Sequence: Synthetic oligonucleotide
  Antisense strand to SEQ ID NO: 567561
auuuacacugaggaugaga

SEQ ID NO: 567563 - RNA, 19 nt, Artificial Sequence
  Description of Artificial Sequence: Synthetic oligonucleotide
  Sense strand starting at position 470 of SEQ ID NO: 318499
ucauccucaguguaaaugu

SEQ ID NO: 567564 - RNA, 19 nt, Artificial Sequence
  Description of Artificial Sequence: Synthetic oligonucleotide
  Antisense strand to SEQ ID NO: 567563
acauuuacacugaggauga

SEQ ID NO: 567565 - RNA, 19 nt, Artificial Sequence
  Description of Artificial Sequence: Synthetic oligonucleotide
  Sense strand starting at position 516 of SEQ ID NO: 318499
uguacauaaucuguuacca

SEQ ID NO: 567566 - RNA, 19 nt, Artificial Sequence
  Description of Artificial Sequence: Synthetic oligonucleotide
  Antisense strand to SEQ ID NO: 567565
ugguaacagauuauguaca

SEQ ID NO: 567567 - RNA, 19 nt, Artificial Sequence
  Description of Artificial Sequence: Synthetic oligonucleotide
  Sense strand starting at position 546 of SEQ ID NO: 318499
aagaaugguuaacucagua

SEQ ID NO: 567568 - RNA, 19 nt, Artificial Sequence
  Description of Artificial Sequence: Synthetic oligonucleotide
  Antisense strand to SEQ ID NO: 567567
uacugaguuaaccauucuu

SEQ ID NO: 567569 - RNA, 19 nt, Artificial Sequence
  Description of Artificial Sequence: Synthetic oligonucleotide
  Sense strand starting at position 608 of SEQ ID NO: 318499
auaguugccuacucacaga

SEQ ID NO: 567570 - RNA, 19 nt, Artificial Sequence
  Description of Artificial Sequence: Synthetic oligonucleotide
  Antisense strand to SEQ ID NO: 567569
ucugugaguaggcaacuau

SEQ ID NO: 567571 - RNA, 19 nt, Artificial Sequence
  Description of Artificial Sequence: Synthetic oligonucleotide
  Sense strand starting at position 644 of SEQ ID NO: 318499
uagagccaucuuuguaaag

SEQ ID NO: 567572 - RNA, 19 nt, Artificial Sequence
  Description of Artificial Sequence: Synthetic oligonucleotide
  Antisense strand to SEQ ID NO: 567571
cuuuacaaagauggcucua

SEQ ID NO: 567573 - RNA, 19 nt, Artificial Sequence
  Description of Artificial Sequence: Synthetic oligonucleotide
  Sense strand starting at position 645 of SEQ ID NO: 318499
agagccaucuuuguaaaga

SEQ ID NO: 567574 - RNA, 19 nt, Artificial Sequence
  Description of Artificial Sequence: Synthetic oligonucleotide
  Antisense strand to SEQ ID NO: 567573
ucuuuacaaagauggcucu

SEQ ID NO: 567575 - RNA, 19 nt, Artificial Sequence
  Description of Artificial Sequence: Synthetic oligonucleotide
  Sense strand starting at position 713 of SEQ ID NO: 318499
gucuguauucuccaacuuc

SEQ ID NO: 567576 - RNA, 19 nt, Artificial Sequence
  Description of Artificial Sequence: Synthetic oligonucleotide
  Antisense strand to SEQ ID NO: 567575
gaaguuggagaauacagac

SEQ ID NO: 567577 - RNA, 19 nt, Artificial Sequence
  Description of Artificial Sequence: Synthetic oligonucleotide
  Sense strand starting at position 764 of SEQ ID NO: 318499
guucuuuagcauuauucua

SEQ ID NO: 567578 - RNA, 19 nt, Artificial Sequence
  Description of Artificial Sequence: Synthetic oligonucleotide
  Antisense strand to SEQ ID NO: 567577
uagaauaaugcuaaagaac

SEQ ID NO: 567579 - RNA, 19 nt, Artificial Sequence
  Description of Artificial Sequence: Synthetic oligonucleotide
  Sense strand starting at position 801 of SEQ ID NO: 318499
accaaagauuuguaaguaa

SEQ ID NO: 567580 - RNA, 19 nt, Artificial Sequence
  Description of Artificial Sequence: Synthetic oligonucleotide
  Antisense strand to SEQ ID NO: 567579
uuacuuacaaaucuuuggu

SEQ ID NO: 567581 - RNA, 19 nt, Artificial Sequence
  Description of Artificial Sequence: Synthetic oligonucleotide
  Sense strand starting at position 812 of SEQ ID NO: 318499
guaaguaaauugguaagua

SEQ ID NO: 567582 - RNA, 19 nt, Artificial Sequence
  Description of Artificial Sequence: Synthetic oligonucleotide
  Antisense strand to SEQ ID NO: 567581
uacuuaccaauuuacuuac

SEQ ID NO: 567583 - RNA, 19 nt, Artificial Sequence
  Description of Artificial Sequence: Synthetic oligonucleotide
  Sense strand starting at position 832 of SEQ ID NO: 318499
gcaaucugucggcagaaag

SEQ ID NO: 567584 - RNA, 19 nt, Artificial Sequence
  Description of Artificial Sequence: Synthetic oligonucleotide
  Antisense strand to SEQ ID NO: 567583
cuuucugccgacagauugc

SEQ ID NO: 567585 - RNA, 19 nt, Artificial Sequence
  Description of Artificial Sequence: Synthetic oligonucleotide
  Sense strand starting at position 975 of SEQ ID NO: 318499
uguagacucuugucagaga

SEQ ID NO: 567586 - RNA, 19 nt, Artificial Sequence
  Description of Artificial Sequence: Synthetic oligonucleotide
  Antisense strand to SEQ ID NO: 567585
ucucugacaagagucuaca

SEQ ID NO: 567587 - RNA, 19 nt, Artificial Sequence
  Description of Artificial Sequence: Synthetic oligonucleotide
  Sense strand starting at position 1019 of SEQ ID NO: 318499
uccaaaugcuguccagaca

SEQ ID NO: 567588 - RNA, 19 nt, Artificial Sequence
  Description of Artificial Sequence: Synthetic oligonucleotide
  Antisense strand to SEQ ID NO: 567587
ugucuggacagcauuugga

SEQ ID NO: 567589 - RNA, 19 nt, Artificial Sequence
  Description of Artificial Sequence: Synthetic oligonucleotide
  Sense strand starting at position 1020 of SEQ ID NO: 318499
ccaaaugcuguccagacau

SEQ ID NO: 567590 - RNA, 19 nt, Artificial Sequence
  Description of Artificial Sequence: Synthetic oligonucleotide
  Antisense strand to SEQ ID NO: 567589
augucuggacagcauuugg

SEQ ID NO: 567591 - RNA, 19 nt, Artificial Sequence
  Description of Artificial Sequence: Synthetic oligonucleotide
  Sense strand starting at position 1052 of SEQ ID NO: 318499
aggagauccucccuucuau

SEQ ID NO: 567592 - RNA, 19 nt, Artificial Sequence
  Description of Artificial Sequence: Synthetic oligonucleotide
  Antisense strand to SEQ ID NO: 567591
auagaagggaggaucuccu

SEQ ID NO: 567593 - RNA, 19 nt, Artificial Sequence
  Description of Artificial Sequence: Synthetic oligonucleotide
  Sense strand starting at position 1100 of SEQ ID NO: 318499
agcuguuguagguacaauu

SEQ ID NO: 567594 - RNA, 19 nt, Artificial Sequence
  Description of Artificial Sequence: Synthetic oligonucleotide
  Antisense strand to SEQ ID NO: 567593
aauuguaccuacaacagcu

SEQ ID NO: 567595 - RNA, 19 nt, Artificial Sequence
  Description of Artificial Sequence: Synthetic oligonucleotide
  Sense strand starting at position 1110 of SEQ ID NO: 318499
gguacaauucugggaaggu

SEQ ID NO: 567596 - RNA, 19 nt, Artificial Sequence
  Description of Artificial Sequence: Synthetic oligonucleotide
  Antisense strand to SEQ ID NO: 567595
accuucccagaauuguacc

SEQ ID NO: 567597 - RNA, 19 nt, Artificial Sequence
  Description of Artificial Sequence: Synthetic oligonucleotide
  Sense strand starting at position 1254 of SEQ ID NO: 318499
cauccugcucucuaggaga

SEQ ID NO: 567598 - RNA, 19 nt, Artificial Sequence
  Description of Artificial Sequence: Synthetic oligonucleotide
  Antisense strand to SEQ ID NO: 567597
ucuccuagagagcaggaug

SEQ ID NO: 567599 - RNA, 19 nt, Artificial Sequence
  Description of Artificial Sequence: Synthetic oligonucleotide
  Sense strand starting at position 2442 of SEQ ID NO: 318499
uucgucuucguguuucaga

SEQ ID NO: 567600 - RNA, 19 nt, Artificial Sequence
  Description of Artificial Sequence: Synthetic oligonucleotide
  Antisense strand to SEQ ID NO: 567599
ucugaaacacgaagacgaa

SEQ ID NO: 567601 - RNA, 19 nt, Artificial Sequence
  Description of Artificial Sequence: Synthetic oligonucleotide
  Sense strand starting at position 2444 of SEQ ID NO: 318499
cgucuucguguuucagaug

SEQ ID NO: 567602 - RNA, 19 nt, Artificial Sequence
  Description of Artificial Sequence: Synthetic oligonucleotide
  Antisense strand to SEQ ID NO: 567601
caucugaaacacgaagacg

SEQ ID NO: 567603 - RNA, 19 nt, Artificial Sequence
  Description of Artificial Sequence: Synthetic oligonucleotide
  Sense strand starting at position 2491 of SEQ ID NO: 318499
gguuaaauauguguacaug

SEQ ID NO: 567604 - RNA, 19 nt, Artificial Sequence
  Description of Artificial Sequence: Synthetic oligonucleotide
  Antisense strand to SEQ ID NO: 567603
cauguacacauauuuaacc

SEQ ID NO: 567605 - RNA, 19 nt, Artificial Sequence
  Description of Artificial Sequence: Synthetic oligonucleotide
  Sense strand starting at position 2492 of SEQ ID NO: 318499
guuaaauauguguacaugu

SEQ ID NO: 567606 - RNA, 19 nt, Artificial Sequence
  Description of Artificial Sequence: Synthetic oligonucleotide
  Antisense strand to SEQ ID NO: 567605
acauguacacauauuuaac

SEQ ID NO: 567607 - RNA, 19 nt, Artificial Sequence
  Description of Artificial Sequence: Synthetic oligonucleotide
  Sense strand starting at position 2507 of SEQ ID NO: 318499
auguuaauagugugaucaa

SEQ ID NO: 567608 - RNA, 19 nt, Artificial Sequence
  Description of Artificial Sequence: Synthetic oligonucleotide
  Antisense strand to SEQ ID NO: 567607
uugaucacacuauuaacau

SEQ ID NO: 567609 - RNA, 19 nt, Artificial Sequence
  Description of Artificial Sequence: Synthetic oligonucleotide
  Sense strand starting at position 2516 of SEQ ID NO: 318499
gugugaucaagccaagaag

SEQ ID NO: 567610 - RNA, 19 nt, Artificial Sequence
  Description of Artificial Sequence: Synthetic oligonucleotide
  Antisense strand to SEQ ID NO: 567609
cuucuuggcuugaucacac

SEQ ID NO: 567611 - RNA, 19 nt, Artificial Sequence
  Description of Artificial Sequence: Synthetic oligonucleotide
  Sense strand starting at position 2541 of SEQ ID NO: 318499
uuugucuuugacuggagga

SEQ ID NO: 567612 - RNA, 19 nt, Artificial Sequence
  Description of Artificial Sequence: Synthetic oligonucleotide
  Antisense strand to SEQ ID NO: 567611
uccuccagucaaagacaaa

SEQ ID NO: 567613 - RNA, 19 nt, Artificial Sequence
  Description of Artificial Sequence: Synthetic oligonucleotide
  Sense strand starting at position 2543 of SEQ ID NO: 318499
ugucuuugacuggaggacu

SEQ ID NO: 567614 - RNA, 19 nt, Artificial Sequence
  Description of Artificial Sequence: Synthetic oligonucleotide
  Antisense strand to SEQ ID NO: 567613
aguccuccagucaaagaca

SEQ ID NO: 567615 - RNA, 19 nt, Artificial Sequence
  Description of Artificial Sequence: Synthetic oligonucleotide
  Sense strand starting at position 2650 of SEQ ID NO: 318499
cuucuaagaguuuacagua

SEQ ID NO: 567616 - RNA, 19 nt, Artificial Sequence
  Description of Artificial Sequence: Synthetic oligonucleotide
  Antisense strand to SEQ ID NO: 567615
uacuguaaacucuuagaag

SEQ ID NO: 567617 - RNA, 19 nt, Artificial Sequence
  Description of Artificial Sequence: Synthetic oligonucleotide
  Sense strand starting at position 2793 of SEQ ID NO: 318499
augauugaguaaucaucuu

SEQ ID NO: 567618 - RNA, 19 nt, Artificial Sequence
  Description of Artificial Sequence: Synthetic oligonucleotide
  Antisense strand to SEQ ID NO: 567617
aagaugauuacucaaucau

SEQ ID NO: 567619 - RNA, 19 nt, Artificial Sequence
  Description of Artificial Sequence: Synthetic oligonucleotide
  Sense strand starting at position 2911 of SEQ ID NO: 318499
uucgaaaccucagugugaa

SEQ ID NO: 567620 - RNA, 19 nt, Artificial Sequence
  Description of Artificial Sequence: Synthetic oligonucleotide
  Antisense strand to SEQ ID NO: 567619
uucacacugagguuucgaa

SEQ ID NO: 567621 - RNA, 19 nt, Artificial Sequence
  Description of Artificial Sequence: Synthetic oligonucleotide
  Sense strand starting at position 2912 of SEQ ID NO: 318499
ucgaaaccucagugugaag

SEQ ID NO: 567622 - RNA, 19 nt, Artificial Sequence
  Description of Artificial Sequence: Synthetic oligonucleotide
  Antisense strand to SEQ ID NO: 567621
cuucacacugagguuucga

SEQ ID NO: 567623 - RNA, 19 nt, Artificial Sequence
  Description of Artificial Sequence: Synthetic oligonucleotide
  Sense strand starting at position 2914 of SEQ ID NO: 318499
gaaaccucagugugaagua

SEQ ID NO: 567624 - RNA, 19 nt, Artificial Sequence
  Description of Artificial Sequence: Synthetic oligonucleotide
  Antisense strand to SEQ ID NO: 567623
uacuucacacugagguuuc

SEQ ID NO: 567625 - RNA, 19 nt, Artificial Sequence
  Description of Artificial Sequence: Synthetic oligonucleotide
  Sense strand starting at position 2921 of SEQ ID NO: 318499
cagugugaaguacaucuua

SEQ ID NO: 567626 - RNA, 19 nt, Artificial Sequence
  Description of Artificial Sequence: Synthetic oligonucleotide
  Antisense strand to SEQ ID NO: 567625
uaagauguacuucacacug

SEQ ID NO: 567627 - RNA, 19 nt, Artificial Sequence
  Description of Artificial Sequence: Synthetic oligonucleotide
  Sense strand starting at position 3644 of SEQ ID NO: 318499
agaauaaaccacuguguca

SEQ ID NO: 567628 - RNA, 19 nt, Artificial Sequence
  Description of Artificial Sequence: Synthetic oligonucleotide
  Antisense strand to SEQ ID NO: 567627
ugacacagugguuuauucu

SEQ ID NO: 567629 - RNA, 19 nt, Artificial Sequence
  Description of Artificial Sequence: Synthetic oligonucleotide
  Sense strand starting at position 59 of SEQ ID NO: 318500
agcucuucucgguaagcua

SEQ ID NO: 567630 - RNA, 19 nt, Artificial Sequence
  Description of Artificial Sequence: Synthetic oligonucleotide
  Antisense strand to SEQ ID NO: 567629
uagcuuaccgagaagagcu

SEQ ID NO: 567631 - RNA, 19 nt, Artificial Sequence
  Description of Artificial Sequence: Synthetic oligonucleotide
  Sense strand starting at position 66 of SEQ ID NO: 318500
cucgguaagcuagacguaa

SEQ ID NO: 567632 - RNA, 19 nt, Artificial Sequence
  Description of Artificial Sequence: Synthetic oligonucleotide
  Antisense strand to SEQ ID NO: 567631
uuacgucuagcuuaccgag

SEQ ID NO: 567633 - RNA, 19 nt, Artificial Sequence
  Description of Artificial Sequence: Synthetic oligonucleotide
  Sense strand starting at position 202 of SEQ ID NO: 318500
uucgauuucuuucugagua

SEQ ID NO: 567634 - RNA, 19 nt, Artificial Sequence
  Description of Artificial Sequence: Synthetic oligonucleotide
  Antisense strand to SEQ ID NO: 567633
uacucagaaagaaaucgaa

SEQ ID NO: 567635 - RNA, 19 nt, Artificial Sequence
  Description of Artificial Sequence: Synthetic oligonucleotide
  Sense strand starting at position 204 of SEQ ID NO: 318500
cgauuucuuucugaguaaa

SEQ ID NO: 567636 - RNA, 19 nt, Artificial Sequence
  Description of Artificial Sequence: Synthetic oligonucleotide
  Antisense strand to SEQ ID NO: 567635
uuuacucagaaagaaaucg

SEQ ID NO: 567637 - RNA, 19 nt, Artificial Sequence
  Description of Artificial Sequence: Synthetic oligonucleotide
  Sense strand starting at position 207 of SEQ ID NO: 318500
uuucuuucugaguaaaugu

SEQ ID NO: 567638 - RNA, 19 nt, Artificial Sequence
  Description of Artificial Sequence: Synthetic oligonucleotide
  Antisense strand to SEQ ID NO: 567637
acauuuacucagaaagaaa

SEQ ID NO: 567639 - RNA, 19 nt, Artificial Sequence
  Description of Artificial Sequence: Synthetic oligonucleotide
  Sense strand starting at position 222 of SEQ ID NO: 318500
auguaacagucacaaggaa

SEQ ID NO: 567640 - RNA, 19 nt, Artificial Sequence
  Description of Artificial Sequence: Synthetic oligonucleotide
  Antisense strand to SEQ ID NO: 567639
uuccuugugacuguuacau

SEQ ID NO: 567641 - RNA, 19 nt, Artificial Sequence
  Description of Artificial Sequence: Synthetic oligonucleotide
  Sense strand starting at position 291 of SEQ ID NO: 318500
agaccuuucuaguuagagc

SEQ ID NO: 567642 - RNA, 19 nt, Artificial Sequence
  Description of Artificial Sequence: Synthetic oligonucleotide
  Antisense strand to SEQ ID NO: 567641
gcucuaacuagaaaggucu

SEQ ID NO: 567643 - RNA, 19 nt, Artificial Sequence
  Description of Artificial Sequence: Synthetic oligonucleotide
  Sense strand starting at position 306 of SEQ ID NO: 318500
gagcauuuaugucuggcca

SEQ ID NO: 567644 - RNA, 19 nt, Artificial Sequence
  Description of Artificial Sequence: Synthetic oligonucleotide
  Antisense strand to SEQ ID NO: 567643
uggccagacauaaaugcuc

SEQ ID NO: 567645 - RNA, 19 nt, Artificial Sequence
  Description of Artificial Sequence: Synthetic oligonucleotide
  Sense strand starting at position 408 of SEQ ID NO: 318500
augaaauuauugcaagauc

SEQ ID NO: 567646 - RNA, 19 nt, Artificial Sequence
  Description of Artificial Sequence: Synthetic oligonucleotide
  Antisense strand to SEQ ID NO: 567645
gaucuugcaauaauuucau

SEQ ID NO: 567647 - RNA, 19 nt, Artificial Sequence
  Description of Artificial Sequence: Synthetic oligonucleotide
  Sense strand starting at position 419 of SEQ ID NO: 318500
gcaagaucugccugguucu

SEQ ID NO: 567648 - RNA, 19 nt, Artificial Sequence
  Description of Artificial Sequence: Synthetic oligonucleotide
  Antisense strand to SEQ ID NO: 567647
agaaccaggcagaucuugc

SEQ ID NO: 567649 - RNA, 19 nt, Artificial Sequence
  Description of Artificial Sequence: Synthetic oligonucleotide
  Sense strand starting at position 708 of SEQ ID NO: 318500
gggaaucacuccuccacga

SEQ ID NO: 567650 - RNA, 19 nt, Artificial Sequence
  Description of Artificial Sequence: Synthetic oligonucleotide
  Antisense strand to SEQ ID NO: 567649
ucguggaggagugauuccc

SEQ ID NO: 567651 - RNA, 19 nt, Artificial Sequence
  Description of Artificial Sequence: Synthetic oligonucleotide
  Sense strand starting at position 1273 of SEQ ID NO: 318500
gacugacggucguccuaau

SEQ ID NO: 567652 - RNA, 19 nt, Artificial Sequence
  Description of Artificial Sequence: Synthetic oligonucleotide
  Antisense strand to SEQ ID NO: 567651
auuaggacgaccgucaguc

SEQ ID NO: 567653 - RNA, 19 nt, Artificial Sequence
  Description of Artificial Sequence: Synthetic oligonucleotide
  Sense strand starting at position 1716 of SEQ ID NO: 318500
ggcaaaguuggguguccaa

SEQ ID NO: 567654 - RNA, 19 nt, Artificial Sequence
  Description of Artificial Sequence: Synthetic oligonucleotide
  Antisense strand to SEQ ID NO: 567653
uuggacacccaacuuugcc

SEQ ID NO: 567655 - RNA, 19 nt, Artificial Sequence
  Description of Artificial Sequence: Synthetic oligonucleotide
  Sense strand starting at position 2476 of SEQ ID NO: 318500
gaacucgaacuuugugauu

SEQ ID NO: 567656 - RNA, 19 nt, Artificial Sequence
  Description of Artificial Sequence: Synthetic oligonucleotide
  Antisense strand to SEQ ID NO: 567655
aaucacaaaguucgaguuc

SEQ ID NO: 567657 - RNA, 19 nt, Artificial Sequence
  Description of Artificial Sequence: Synthetic oligonucleotide
  Sense strand starting at position 2495 of SEQ ID NO: 318500
uuguucuuucugugugaca

SEQ ID NO: 567658 - RNA, 19 nt, Artificial Sequence
  Description of Artificial Sequence: Synthetic oligonucleotide
  Antisense strand to SEQ ID NO: 567657
ugucacacagaaagaacaa

SEQ ID NO: 567659 - RNA, 19 nt, Artificial Sequence
  Description of Artificial Sequence: Synthetic oligonucleotide
  Sense strand starting at position 2496 of SEQ ID NO: 318500
uguucuuucugugugacau

SEQ ID NO: 567660 - RNA, 19 nt, Artificial Sequence
  Description of Artificial Sequence: Synthetic oligonucleotide
  Antisense strand to SEQ ID NO: 567659
augucacacagaaagaaca

SEQ ID NO: 567661 - RNA, 19 nt, Artificial Sequence
  Description of Artificial Sequence: Synthetic oligonucleotide
  Sense strand starting at position 2497 of SEQ ID NO: 318500
guucuuucugugugacauc

SEQ ID NO: 567662 - RNA, 19 nt, Artificial Sequence
  Description of Artificial Sequence: Synthetic oligonucleotide
  Antisense strand to SEQ ID NO: 567661
gaugucacacagaaagaac

SEQ ID NO: 567663 - RNA, 19 nt, Artificial Sequence
  Description of Artificial Sequence: Synthetic oligonucleotide
  Sense strand starting at position 2506 of SEQ ID NO: 318500
gugugacauccucauccgu

SEQ ID NO: 567664 - RNA, 19 nt, Artificial Sequence
  Description of Artificial Sequence: Synthetic oligonucleotide
  Antisense strand to SEQ ID NO: 567663
acggaugaggaugucacac

SEQ ID NO: 567665 - RNA, 19 nt, Artificial Sequence
  Description of Artificial Sequence: Synthetic oligonucleotide
  Sense strand starting at position 2519 of SEQ ID NO: 318500
auccguucugagggagaaa

SEQ ID NO: 567666 - RNA, 19 nt, Artificial Sequence
  Description of Artificial Sequence: Synthetic oligonucleotide
  Antisense strand to SEQ ID NO: 567665
uuucucccucagaacggau

SEQ ID NO: 567667 - RNA, 19 nt, Artificial Sequence
  Description of Artificial Sequence: Synthetic oligonucleotide
  Sense strand starting at position 2557 of SEQ ID NO: 318500
gagucagucguugcggguu

SEQ ID NO: 567668 - RNA, 19 nt, Artificial Sequence
  Description of Artificial Sequence: Synthetic oligonucleotide
  Antisense strand to SEQ ID NO: 567667
aacccgcaacgacugacuc

SEQ ID NO: 567669 - RNA, 19 nt, Artificial Sequence
  Description of Artificial Sequence: Synthetic oligonucleotide
  Sense strand starting at position 2606 of SEQ ID NO: 318500
cggcuaguucgggucgauu

SEQ ID NO: 567670 - RNA, 19 nt, Artificial Sequence
  Description of Artificial Sequence: Synthetic oligonucleotide
  Antisense strand to SEQ ID NO: 567669
aaucgacccgaacuagccg

SEQ ID NO: 567671 - RNA, 19 nt, Artificial Sequence
  Description of Artificial Sequence: Synthetic oligonucleotide
  Sense strand starting at position 2617 of SEQ ID NO: 318500
ggucgauuucagcgggauu

SEQ ID NO: 567672 - RNA, 19 nt, Artificial Sequence
  Description of Artificial Sequence: Synthetic oligonucleotide
  Antisense strand to SEQ ID NO: 567671
aaucccgcugaaaucgacc

SEQ ID NO: 567673 - RNA, 19 nt, Artificial Sequence
  Description of Artificial Sequence: Synthetic oligonucleotide
  Sense strand starting at position 2628 of SEQ ID NO: 318500
gcgggauuaagucaaggaa

SEQ ID NO: 567674 - RNA, 19 nt, Artificial Sequence
  Description of Artificial Sequence: Synthetic oligonucleotide
  Antisense strand to SEQ ID NO: 567673
uuccuugacuuaaucccgc

SEQ ID NO: 567675 - RNA, 19 nt, Artificial Sequence
  Description of Artificial Sequence: Synthetic oligonucleotide
  Sense strand starting at position 2647 of SEQ ID NO: 318500
augaacaaaucugacgaau

SEQ ID NO: 567676 - RNA, 19 nt, Artificial Sequence
  Description of Artificial Sequence: Synthetic oligonucleotide
  Antisense strand to SEQ ID NO: 567675
auucgucagauuuguucau

SEQ ID NO: 567677 - RNA, 19 nt, Artificial Sequence
  Description of Artificial Sequence: Synthetic oligonucleotide
  Sense strand starting at position 2698 of SEQ ID NO: 318500
cacgcugagcguuaagaga

SEQ ID NO: 567678 - RNA, 19 nt, Artificial Sequence
  Description of Artificial Sequence: Synthetic oligonucleotide
  Antisense strand to SEQ ID NO: 567677
ucucuuaacgcucagcgug

SEQ ID NO: 567679 - RNA, 19 nt, Artificial Sequence
  Description of Artificial Sequence: Synthetic oligonucleotide
  Sense strand starting at position 2714 of SEQ ID NO: 318500
agagaagucccguaugguc

SEQ ID NO: 567680 - RNA, 19 nt, Artificial Sequence
  Description of Artificial Sequence: Synthetic oligonucleotide
  Antisense strand to SEQ ID NO: 567679
gaccauacgggacuucucu

SEQ ID NO: 567681 - RNA, 19 nt, Artificial Sequence
  Description of Artificial Sequence: Synthetic oligonucleotide
  Sense strand starting at position 2716 of SEQ ID NO: 318500
agaagucccguauggucaa

SEQ ID NO: 567682 - RNA, 19 nt, Artificial Sequence
  Description of Artificial Sequence: Synthetic oligonucleotide
  Antisense strand to SEQ ID NO: 567681
uugaccauacgggacuucu

SEQ ID NO: 567683 - RNA, 19 nt, Artificial Sequence
  Description of Artificial Sequence: Synthetic oligonucleotide
  Sense strand starting at position 2743 of SEQ ID NO: 318500
guccaauucugugucaauu

SEQ ID NO: 567684 - RNA, 19 nt, Artificial Sequence
  Description of Artificial Sequence: Synthetic oligonucleotide
  Antisense strand to SEQ ID NO: 567683
aauugacacagaauuggac

SEQ ID NO: 567685 - RNA, 19 nt, Artificial Sequence
  Description of Artificial Sequence: Synthetic oligonucleotide
  Sense strand starting at position 2791 of SEQ ID NO: 318500
gggccuuacuaaguacuca

SEQ ID NO: 567686 - RNA, 19 nt, Artificial Sequence
  Description of Artificial Sequence: Synthetic oligonucleotide
  Antisense strand to SEQ ID NO: 567685
ugaguacuuaguaaggccc

SEQ ID NO: 567687 - RNA, 19 nt, Artificial Sequence
  Description of Artificial Sequence: Synthetic oligonucleotide
  Sense strand starting at position 2847 of SEQ ID NO: 318500
uuugaagacguguauaauu

SEQ ID NO: 567688 - RNA, 19 nt, Artificial Sequence
  Description of Artificial Sequence: Synthetic oligonucleotide
  Antisense strand to SEQ ID NO: 567687
aauuauacacgucuucaaa

SEQ ID NO: 567689 - RNA, 19 nt, Artificial Sequence
  Description of Artificial Sequence: Synthetic oligonucleotide
  Sense strand starting at position 2852 of SEQ ID NO: 318500
agacguguauaauuggaca

SEQ ID NO: 567690 - RNA, 19 nt, Artificial Sequence
  Description of Artificial Sequence: Synthetic oligonucleotide
  Antisense strand to SEQ ID NO: 567689
uguccaauuauacacgucu

SEQ ID NO: 567691 - RNA, 19 nt, Artificial Sequence
  Description of Artificial Sequence: Synthetic oligonucleotide
  Sense strand starting at position 2854 of SEQ ID NO: 318500
acguguauaauuggacacu

SEQ ID NO: 567692 - RNA, 19 nt, Artificial Sequence
  Description of Artificial Sequence: Synthetic oligonucleotide
  Antisense strand to SEQ ID NO: 567691
aguguccaauuauacacgu

SEQ ID NO: 567693 - RNA, 19 nt, Artificial Sequence
  Description of Artificial Sequence: Synthetic oligonucleotide
  Sense strand starting at position 2950 of SEQ ID NO: 318500
gguaaaguuauaggaguau

SEQ ID NO: 567694 - RNA, 19 nt, Artificial Sequence
  Description of Artificial Sequence: Synthetic oligonucleotide
  Antisense strand to SEQ ID NO: 567693
auacuccuauaacuuuacc

SEQ ID NO: 567695 - RNA, 19 nt, Artificial Sequence
  Description of Artificial Sequence: Synthetic oligonucleotide
  Sense strand starting at position 3104 of SEQ ID NO: 318500
ugaggaaaugugugaauug

SEQ ID NO: 567696 - RNA, 19 nt, Artificial Sequence
  Description of Artificial Sequence: Synthetic oligonucleotide
  Antisense strand to SEQ ID NO: 567695
caauucacacauuuccuca

SEQ ID NO: 567697 - RNA, 19 nt, Artificial Sequence
  Description of Artificial Sequence: Synthetic oligonucleotide
  Sense strand starting at position 3300 of SEQ ID NO: 318500
gugucauagcucgcacagu

SEQ ID NO: 567698 - RNA, 19 nt, Artificial Sequence
  Description of Artificial Sequence: Synthetic oligonucleotide
  Antisense strand to SEQ ID NO: 567697
acugugcgagcuaugacac

SEQ ID NO: 567699 - RNA, 19 nt, Artificial Sequence
  Description of Artificial Sequence: Synthetic oligonucleotide
  Sense strand starting at position 3420 of SEQ ID NO: 318500
uuccgaagguuucuaugaa

SEQ ID NO: 567700 - RNA, 19 nt, Artificial Sequence
  Description of Artificial Sequence: Synthetic oligonucleotide
  Antisense strand to SEQ ID NO: 567699
uucauagaaaccuucggaa

SEQ ID NO: 567701 - RNA, 19 nt, Artificial Sequence
  Description of Artificial Sequence: Synthetic oligonucleotide
  Sense strand starting at position 3475 of SEQ ID NO: 318500
gggugaucuggcugucuug

SEQ ID NO: 567702 - RNA, 19 nt, Artificial Sequence
  Description of Artificial Sequence: Synthetic oligonucleotide
  Antisense strand to SEQ ID NO: 567701
caagacagccagaucaccc

SEQ ID NO: 567703 - RNA, 19 nt, Artificial Sequence
  Description of Artificial Sequence: Synthetic oligonucleotide
  Sense strand starting at position 3534 of SEQ ID NO: 318500
gaggaagugucaguagcug

SEQ ID NO: 567704 - RNA, 19 nt, Artificial Sequence
  Description of Artificial Sequence: Synthetic oligonucleotide
  Antisense strand to SEQ ID NO: 567703
cagcuacugacacuuccuc

SEQ ID NO: 567705 - RNA, 19 nt, Artificial Sequence
  Description of Artificial Sequence: Synthetic oligonucleotide
  Sense strand starting at position 3702 of SEQ ID NO: 318500
agacauuccgauuaucuug

SEQ ID NO: 567706 - RNA, 19 nt, Artificial Sequence
  Description of Artificial Sequence: Synthetic oligonucleotide
  Antisense strand to SEQ ID NO: 567705
caagauaaucggaaugucu

SEQ ID NO: 567707 - RNA, 19 nt, Artificial Sequence
  Description of Artificial Sequence: Synthetic oligonucleotide
  Sense strand starting at position 3931 of SEQ ID NO: 318500
gaacauugccguuaauacu

SEQ ID NO: 567708 - RNA, 19 nt, Artificial Sequence
  Description of Artificial Sequence: Synthetic oligonucleotide
  Antisense strand to SEQ ID NO: 567707
aguauuaacggcaauguuc

SEQ ID NO: 567709 - RNA, 19 nt, Artificial Sequence
  Description of Artificial Sequence: Synthetic oligonucleotide
  Sense strand starting at position 572 of SEQ ID NO: 318501
cggacacuuauucgagcaa

SEQ ID NO: 567710 - RNA, 19 nt, Artificial Sequence
  Description of Artificial Sequence: Synthetic oligonucleotide
  Antisense strand to SEQ ID NO: 567709
uugcucgaauaaguguccg

SEQ ID NO: 567711 - RNA, 19 nt, Artificial Sequence
  Description of Artificial Sequence: Synthetic oligonucleotide
  Sense strand starting at position 629 of SEQ ID NO: 318501
ccaggaucucaccgagaga

SEQ ID NO: 567712 - RNA, 19 nt, Artificial Sequence
  Description of Artificial Sequence: Synthetic oligonucleotide
  Antisense strand to SEQ ID NO: 567711
ucucucggugagauccugg

SEQ ID NO: 567713 - RNA, 19 nt, Artificial Sequence
  Description of Artificial Sequence: Synthetic oligonucleotide
  Sense strand starting at position 1324 of SEQ ID NO: 318501
uuaguaauccauuaucgag

SEQ ID NO: 567714 - RNA, 19 nt, Artificial Sequence
  Description of Artificial Sequence: Synthetic oligonucleotide
  Antisense strand to SEQ ID NO: 567713
cucgauaauggauuacuaa

SEQ ID NO: 567715 - RNA, 19 nt, Artificial Sequence
  Description of Artificial Sequence: Synthetic oligonucleotide
  Sense strand starting at position 1388 of SEQ ID NO: 318501
uugucauuccuacaugugu

SEQ ID NO: 567716 - RNA, 19 nt, Artificial Sequence
  Description of Artificial Sequence: Synthetic oligonucleotide
  Antisense strand to SEQ ID NO: 567715
acacauguaggaaugacaa

SEQ ID NO: 567717 - RNA, 19 nt, Artificial Sequence
  Description of Artificial Sequence: Synthetic oligonucleotide
  Sense strand starting at position 1434 of SEQ ID NO: 318501
ggcgacuacuuucugggau

SEQ ID NO: 567718 - RNA, 19 nt, Artificial Sequence
  Description of Artificial Sequence: Synthetic oligonucleotide
  Antisense strand to SEQ ID NO: 567717
aucccagaaaguagucgcc

SEQ ID NO: 567719 - RNA, 19 nt, Artificial Sequence
  Description of Artificial Sequence: Synthetic oligonucleotide
  Sense strand starting at position 1437 of SEQ ID NO: 318501
gacuacuuucugggaugca

SEQ ID NO: 567720 - RNA, 19 nt, Artificial Sequence
  Description of Artificial Sequence: Synthetic oligonucleotide
  Antisense strand to SEQ ID NO: 567719
ugcaucccagaaaguaguc

SEQ ID NO: 567721 - RNA, 19 nt, Artificial Sequence
  Description of Artificial Sequence: Synthetic oligonucleotide
  Sense strand starting at position 1627 of SEQ ID NO: 318501
guggugucugcgccgauua

SEQ ID NO: 567722 - RNA, 19 nt, Artificial Sequence
  Description of Artificial Sequence: Synthetic oligonucleotide
  Antisense strand to SEQ ID NO: 567721
uaaucggcgcagacaccac

SEQ ID NO: 567723 - RNA, 19 nt, Artificial Sequence
  Description of Artificial Sequence: Synthetic oligonucleotide
  Sense strand starting at position 1883 of SEQ ID NO: 318501
gcucacuacuccucuguca

SEQ ID NO: 567724 - RNA, 19 nt, Artificial Sequence
  Description of Artificial Sequence: Synthetic oligonucleotide
  Antisense strand to SEQ ID NO: 567723
ugacagaggaguagugagc

SEQ ID NO: 567725 - RNA, 19 nt, Artificial Sequence
  Description of Artificial Sequence: Synthetic oligonucleotide
  Sense strand starting at position 2009 of SEQ ID NO: 318501
aaaggagagcuguggugua

SEQ ID NO: 567726 - RNA, 19 nt, Artificial Sequence
  Description of Artificial Sequence: Synthetic oligonucleotide
  Antisense strand to SEQ ID NO: 567725
uacaccacagcucuccuuu

SEQ ID NO: 567727 - RNA, 19 nt, Artificial Sequence
  Description of Artificial Sequence: Synthetic oligonucleotide
  Sense strand starting at position 2014 of SEQ ID NO: 318501
agagcugugguguauguga

SEQ ID NO: 567728 - RNA, 19 nt, Artificial Sequence
  Description of Artificial Sequence: Synthetic oligonucleotide
  Antisense strand to SEQ ID NO: 567727
ucacauacaccacagcucu

SEQ ID NO: 567729 - RNA, 19 nt, Artificial Sequence
  Description of Artificial Sequence: Synthetic oligonucleotide
  Sense strand starting at position 2111 of SEQ ID NO: 318501
gcuuccuuccaccaggauu

SEQ ID NO: 567730 - RNA, 19 nt, Artificial Sequence
  Description of Artificial Sequence: Synthetic oligonucleotide
  Antisense strand to SEQ ID NO: 567729
aauccugguggaaggaagc

SEQ ID NO: 567731 - RNA, 19 nt, Artificial Sequence
  Description of Artificial Sequence: Synthetic oligonucleotide
  Sense strand starting at position 2308 of SEQ ID NO: 318501
gcaggagcgaguuacaaga

SEQ ID NO: 567732 - RNA, 19 nt, Artificial Sequence
  Description of Artificial Sequence: Synthetic oligonucleotide
  Antisense strand to SEQ ID NO: 567731
ucuuguaacucgcuccugc

SEQ ID NO: 567733 - RNA, 19 nt, Artificial Sequence
  Description of Artificial Sequence: Synthetic oligonucleotide
  Sense strand starting at position 2405 of SEQ ID NO: 318501
ugauuacuguuaucaagag

SEQ ID NO: 567734 - RNA, 19 nt, Artificial Sequence
  Description of Artificial Sequence: Synthetic oligonucleotide
  Antisense strand to SEQ ID NO: 567733
cucuugauaacaguaauca

SEQ ID NO: 567735 - RNA, 19 nt, Artificial Sequence
  Description of Artificial Sequence: Synthetic oligonucleotide
  Sense strand starting at position 2411 of SEQ ID NO: 318501
cuguuaucaagagguagau

SEQ ID NO: 567736 - RNA, 19 nt, Artificial Sequence
  Description of Artificial Sequence: Synthetic oligonucleotide
  Antisense strand to SEQ ID NO: 567735
aucuaccucuugauaacag

SEQ ID NO: 567737 - RNA, 19 nt, Artificial Sequence
  Description of Artificial Sequence: Synthetic oligonucleotide
  Sense strand starting at position 2446 of SEQ ID NO: 318501
gcucuacguaguuagauga

SEQ ID NO: 567738 - RNA, 19 nt, Artificial Sequence
  Description of Artificial Sequence: Synthetic oligonucleotide
  Antisense strand to SEQ ID NO: 567737
ucaucuaacuacguagagc

SEQ ID NO: 567739 - RNA, 19 nt, Artificial Sequence
  Description of Artificial Sequence: Synthetic oligonucleotide
  Sense strand starting at position 2450 of SEQ ID NO: 318501
uacguaguuagaugaauug

SEQ ID NO: 567740 - RNA, 19 nt, Artificial Sequence
  Description of Artificial Sequence: Synthetic oligonucleotide
  Antisense strand to SEQ ID NO: 567739
caauucaucuaacuacgua

SEQ ID NO: 567741 - RNA, 19 nt, Artificial Sequence
  Description of Artificial Sequence: Synthetic oligonucleotide
  Sense strand starting at position 2457 of SEQ ID NO: 318501
uuagaugaauuggauagaa

SEQ ID NO: 567742 - RNA, 19 nt, Artificial Sequence
  Description of Artificial Sequence: Synthetic oligonucleotide
  Antisense strand to SEQ ID NO: 567741
uucuauccaauucaucuaa

SEQ ID NO: 567743 - RNA, 19 nt, Artificial Sequence
  Description of Artificial Sequence: Synthetic oligonucleotide
  Sense strand starting at position 2516 of SEQ ID NO: 318501
gcuauuaauuacgcacaua

SEQ ID NO: 567744 - RNA, 19 nt, Artificial Sequence
  Description of Artificial Sequence: Synthetic oligonucleotide
  Antisense strand to SEQ ID NO: 567743
uaugugcguaauuaauagc

SEQ ID NO: 567745 - RNA, 19 nt, Artificial Sequence
  Description of Artificial Sequence: Synthetic oligonucleotide
  Sense strand starting at position 2540 of SEQ ID NO: 318501
guuaauaaagcaugugaag

SEQ ID NO: 567746 - RNA, 19 nt, Artificial Sequence
  Description of Artificial Sequence: Synthetic oligonucleotide
  Antisense strand to SEQ ID NO: 567745
cuucacaugcuuuauuaac

SEQ ID NO: 567747 - RNA, 19 nt, Artificial Sequence
  Description of Artificial Sequence: Synthetic oligonucleotide
  Sense strand starting at position 2951 of SEQ ID NO: 318501
agucgcaaccuuuaaacaa

SEQ ID NO: 567748 - RNA, 19 nt, Artificial Sequence
  Description of Artificial Sequence: Synthetic oligonucleotide
  Antisense strand to SEQ ID NO: 567747
uuguuuaaagguugcgacu

SEQ ID NO: 567749 - RNA, 19 nt, Artificial Sequence
  Description of Artificial Sequence: Synthetic oligonucleotide
  Sense strand starting at position 2986 of SEQ ID NO: 318501
ccagcaguucucggagaga

SEQ ID NO: 567750 - RNA, 19 nt, Artificial Sequence
  Description of Artificial Sequence: Synthetic oligonucleotide
  Antisense strand to SEQ ID NO: 567749
ucucuccgagaacugcugg

SEQ ID NO: 567751 - RNA, 19 nt, Artificial Sequence
  Description of Artificial Sequence: Synthetic oligonucleotide
  Sense strand starting at position 2989 of SEQ ID NO: 318501
gcaguucucggagagauau

SEQ ID NO: 567752 - RNA, 19 nt, Artificial Sequence
  Description of Artificial Sequence: Synthetic oligonucleotide
  Antisense strand to SEQ ID NO: 567751
auaucucuccgagaacugc

SEQ ID NO: 567753 - RNA, 19 nt, Artificial Sequence
  Description of Artificial Sequence: Synthetic oligonucleotide
  Sense strand starting at position 3000 of SEQ ID NO: 318501
agagauauuuacuagucau

SEQ ID NO: 567754 - RNA, 19 nt, Artificial Sequence
  Description of Artificial Sequence: Synthetic oligonucleotide
  Antisense strand to SEQ ID NO: 567753
augacuaguaaauaucucu

SEQ ID NO: 567755 - RNA, 19 nt, Artificial Sequence
  Description of Artificial Sequence: Synthetic oligonucleotide
  Sense strand starting at position 3006 of SEQ ID NO: 318501
auuuacuagucauggaguu

SEQ ID NO: 567756 - RNA, 19 nt, Artificial Sequence
  Description of Artificial Sequence: Synthetic oligonucleotide
  Antisense strand to SEQ ID NO: 567755
aacuccaugacuaguaaau

SEQ ID NO: 567757 - RNA, 19 nt, Artificial Sequence
  Description of Artificial Sequence: Synthetic oligonucleotide
  Sense strand starting at position 3016 of SEQ ID NO: 318501
cauggaguuggcugagaaa

SEQ ID NO: 567758 - RNA, 19 nt, Artificial Sequence
  Description of Artificial Sequence: Synthetic oligonucleotide
  Antisense strand to SEQ ID NO: 567757
uuucucagccaacuccaug

SEQ ID NO: 567759 - RNA, 19 nt, Artificial Sequence
  Description of Artificial Sequence: Synthetic oligonucleotide
  Sense strand starting at position 3068 of SEQ ID NO: 318501
uaggccgaguuucuuuaua

SEQ ID NO: 567760 - RNA, 19 nt, Artificial Sequence
  Description of Artificial Sequence: Synthetic oligonucleotide
  Antisense strand to SEQ ID NO: 567759
uauaaagaaacucggccua

SEQ ID NO: 567761 - RNA, 19 nt, Artificial Sequence
  Description of Artificial Sequence: Synthetic oligonucleotide
  Sense strand starting at position 3070 of SEQ ID NO: 318501
ggccgaguuucuuuauauu

SEQ ID NO: 567762 - RNA, 19 nt, Artificial Sequence
  Description of Artificial Sequence: Synthetic oligonucleotide
  Antisense strand to SEQ ID NO: 567761
aauauaaagaaacucggcc

SEQ ID NO: 567763 - RNA, 19 nt, Artificial Sequence
  Description of Artificial Sequence: Synthetic oligonucleotide
  Sense strand starting at position 3152 of SEQ ID NO: 318501
ucgcuucucuaaguacaga

SEQ ID NO: 567764 - RNA, 19 nt, Artificial Sequence
  Description of Artificial Sequence: Synthetic oligonucleotide
  Antisense strand to SEQ ID NO: 567763
ucuguacuuagagaagcga

SEQ ID NO: 567765 - RNA, 19 nt, Artificial Sequence
  Description of Artificial Sequence: Synthetic oligonucleotide
  Sense strand starting at position 3166 of SEQ ID NO: 318501
acagacaucugcuuaagag

SEQ ID NO: 567766 - RNA, 19 nt, Artificial Sequence
  Description of Artificial Sequence: Synthetic oligonucleotide
  Antisense strand to SEQ ID NO: 567765
cucuuaagcagaugucugu

SEQ ID NO: 567767 - RNA, 19 nt, Artificial Sequence
  Description of Artificial Sequence: Synthetic oligonucleotide
  Sense strand starting at position 3256 of SEQ ID NO: 318501
uagggagaaugguaggaaa

SEQ ID NO: 567768 - RNA, 19 nt, Artificial Sequence
  Description of Artificial Sequence: Synthetic oligonucleotide
  Antisense strand to SEQ ID NO: 567767
uuuccuaccauucucccua

SEQ ID NO: 567769 - RNA, 19 nt, Artificial Sequence
  Description of Artificial Sequence: Synthetic oligonucleotide
  Sense strand starting at position 3332 of SEQ ID NO: 318501
cccaccuuucucgggcaaa

SEQ ID NO: 567770 - RNA, 19 nt, Artificial Sequence
  Description of Artificial Sequence: Synthetic oligonucleotide
  Antisense strand to SEQ ID NO: 567769
uuugcccgagaaagguggg

SEQ ID NO: 567771 - RNA, 19 nt, Artificial Sequence
  Description of Artificial Sequence: Synthetic oligonucleotide
  Sense strand starting at position 3500 of SEQ ID NO: 318501
caggacgucuccucagaau

SEQ ID NO: 567772 - RNA, 19 nt, Artificial Sequence
  Description of Artificial Sequence: Synthetic oligonucleotide
  Antisense strand to SEQ ID NO: 567771
auucugaggagacguccug

SEQ ID NO: 567773 - RNA, 19 nt, Artificial Sequence
  Description of Artificial Sequence: Synthetic oligonucleotide
  Sense strand starting at position 3758 of SEQ ID NO: 318501
cgccgauuuacaugcuaau

SEQ ID NO: 567774 - RNA, 19 nt, Artificial Sequence
  Description of Artificial Sequence: Synthetic oligonucleotide
  Antisense strand to SEQ ID NO: 567773
auuagcauguaaaucggcg

SEQ ID NO: 567775 - RNA, 19 nt, Artificial Sequence
  Description of Artificial Sequence: Synthetic oligonucleotide
  Sense strand starting at position 3770 of SEQ ID NO: 318501
ugcuaauugugucugggaa

SEQ ID NO: 567776 - RNA, 19 nt, Artificial Sequence
  Description of Artificial Sequence: Synthetic oligonucleotide
  Antisense strand to SEQ ID NO: 567775
uucccagacacaauuagca

SEQ ID NO: 567777 - RNA, 19 nt, Artificial Sequence
  Description of Artificial Sequence: Synthetic oligonucleotide
  Sense strand starting at position 3771 of SEQ ID NO: 318501
gcuaauugugucugggaaa

SEQ ID NO: 567778 - RNA, 19 nt, Artificial Sequence
  Description of Artificial Sequence: Synthetic oligonucleotide
  Antisense strand to SEQ ID NO: 567777
uuucccagacacaauuagc

SEQ ID NO: 567779 - RNA, 19 nt, Artificial Sequence
  Description of Artificial Sequence: Synthetic oligonucleotide
  Sense strand starting at position 3791 of SEQ ID NO: 318501
guucuuaaauuggcagaau

SEQ ID NO: 567780 - RNA, 19 nt, Artificial Sequence
  Description of Artificial Sequence: Synthetic oligonucleotide
  Antisense strand to SEQ ID NO: 567779
auucugccaauuuaagaac

SEQ ID NO: 567781 - RNA, 19 nt, Artificial Sequence
  Description of Artificial Sequence: Synthetic oligonucleotide
  Sense strand starting at position 3846 of SEQ ID NO: 318501
aaauuaauuucggguuuag

SEQ ID NO: 567782 - RNA, 19 nt, Artificial Sequence
  Description of Artificial Sequence: Synthetic oligonucleotide
  Antisense strand to SEQ ID NO: 567781
cuaaacccgaaauuaauuu

SEQ ID NO: 567783 - RNA, 19 nt, Artificial Sequence
  Description of Artificial Sequence: Synthetic oligonucleotide
  Sense strand starting at position 3863 of SEQ ID NO: 318501
agcuccuucccuuagagaa

SEQ ID NO: 567784 - RNA, 19 nt, Artificial Sequence
  Description of Artificial Sequence: Synthetic oligonucleotide
  Antisense strand to SEQ ID NO: 567783
uucucuaagggaaggagcu

SEQ ID NO: 567785 - RNA, 19 nt, Artificial Sequence
  Description of Artificial Sequence: Synthetic oligonucleotide
  Sense strand starting at position 3904 of SEQ ID NO: 318501
uugcuuuauggauauauug

SEQ ID NO: 567786 - RNA, 19 nt, Artificial Sequence
  Description of Artificial Sequence: Synthetic oligonucleotide
  Antisense strand to SEQ ID NO: 567785
caauauauccauaaagcaa

SEQ ID NO: 567787 - RNA, 19 nt, Artificial Sequence
  Description of Artificial Sequence: Synthetic oligonucleotide
  Sense strand starting at position 3943 of SEQ ID NO: 318501
ucaggauauuguuuaaagg

SEQ ID NO: 567788 - RNA, 19 nt, Artificial Sequence
  Description of Artificial Sequence: Synthetic oligonucleotide
  Antisense strand to SEQ ID NO: 567787
ccuuuaaacaauauccuga

SEQ ID NO: 567789 - RNA, 19 nt, Artificial Sequence
  Description of Artificial Sequence: Synthetic oligonucleotide
  Sense strand starting at position 11 of SEQ ID NO: 318502
auuccucuagaaugguauu

SEQ ID NO: 567790 - RNA, 19 nt, Artificial Sequence
  Description of Artificial Sequence: Synthetic oligonucleotide
  Antisense strand to SEQ ID NO: 567789
aauaccauucuagaggaau

SEQ ID NO: 567791 - RNA, 19 nt, Artificial Sequence
  Description of Artificial Sequence: Synthetic oligonucleotide
  Sense strand starting at position 14 of SEQ ID NO: 318502
ccucuagaaugguauuuac

SEQ ID NO: 567792 - RNA, 19 nt, Artificial Sequence
  Description of Artificial Sequence: Synthetic oligonucleotide
  Antisense strand to SEQ ID NO: 567791
guaaauaccauucuagagg

SEQ ID NO: 567793 - RNA, 19 nt, Artificial Sequence
  Description of Artificial Sequence: Synthetic oligonucleotide
  Sense strand starting at position 185 of SEQ ID NO: 318502
uggcuaagaguuuagguaa

SEQ ID NO: 567794 - RNA, 19 nt, Artificial Sequence
  Description of Artificial Sequence: Synthetic oligonucleotide
  Antisense strand to SEQ ID NO: 567793
uuaccuaaacucuuagcca

SEQ ID NO: 567795 - RNA, 19 nt, Artificial Sequence
  Description of Artificial Sequence: Synthetic oligonucleotide
  Sense strand starting at position 188 of SEQ ID NO: 318502
cuaagaguuuagguaacuu

SEQ ID NO: 567796 - RNA, 19 nt, Artificial Sequence
  Description of Artificial Sequence: Synthetic oligonucleotide
  Antisense strand to SEQ ID NO: 567795
aaguuaccuaaacucuuag

SEQ ID NO: 567797 - RNA, 19 nt, Artificial Sequence
  Description of Artificial Sequence: Synthetic oligonucleotide
  Sense strand starting at position 196 of SEQ ID NO: 318502
uuagguaacuugucuauga

SEQ ID NO: 567798 - RNA, 19 nt, Artificial Sequence
  Description of Artificial Sequence: Synthetic oligonucleotide
  Antisense strand to SEQ ID NO: 567797
ucauagacaaguuaccuaa

SEQ ID NO: 567799 - RNA, 19 nt, Artificial Sequence
  Description of Artificial Sequence: Synthetic oligonucleotide
  Sense strand starting at position 197 of SEQ ID NO: 318502
uagguaacuugucuaugau

SEQ ID NO: 567800 - RNA, 19 nt, Artificial Sequence
  Description of Artificial Sequence: Synthetic oligonucleotide
  Antisense strand to SEQ ID NO: 567799
aucauagacaaguuaccua

SEQ ID NO: 567801 - RNA, 19 nt, Artificial Sequence
  Description of Artificial Sequence: Synthetic oligonucleotide
  Sense strand starting at position 198 of SEQ ID NO: 318502
agguaacuugucuaugauc

SEQ ID NO: 567802 - RNA, 19 nt, Artificial Sequence
  Description of Artificial Sequence: Synthetic oligonucleotide
  Antisense strand to SEQ ID NO: 567801
gaucauagacaaguuaccu

SEQ ID NO: 567803 - RNA, 19 nt, Artificial Sequence
  Description of Artificial Sequence: Synthetic oligonucleotide
  Sense strand starting at position 203 of SEQ ID NO: 318502
acuugucuaugaucacaca

SEQ ID NO: 567804 - RNA, 19 nt, Artificial Sequence
  Description of Artificial Sequence: Synthetic oligonucleotide
  Antisense strand to SEQ ID NO: 567803
ugugugaucauagacaagu

SEQ ID NO: 567805 - RNA, 19 nt, Artificial Sequence
  Description of Artificial Sequence: Synthetic oligonucleotide
  Sense strand starting at position 313 of SEQ ID NO: 318502
uuagauagaucaccuugua

SEQ ID NO: 567806 - RNA, 19 nt, Artificial Sequence
  Description of Artificial Sequence: Synthetic oligonucleotide
  Antisense strand to SEQ ID NO: 567805
uacaaggugaucuaucuaa

SEQ ID NO: 567807 - RNA, 19 nt, Artificial Sequence
  Description of Artificial Sequence: Synthetic oligonucleotide
  Sense strand starting at position 355 of SEQ ID NO: 318502
uuguuuaugcacuaagaug

SEQ ID NO: 567808 - RNA, 19 nt, Artificial Sequence
  Description of Artificial Sequence: Synthetic oligonucleotide
  Antisense strand to SEQ ID NO: 567807
caucuuagugcauaaacaa

SEQ ID NO: 567809 - RNA, 19 nt, Artificial Sequence
  Description of Artificial Sequence: Synthetic oligonucleotide
  Sense strand starting at position 434 of SEQ ID NO: 318502
cucuguuuccuagaccaca

SEQ ID NO: 567810 - RNA, 19 nt, Artificial Sequence
  Description of Artificial Sequence: Synthetic oligonucleotide
  Antisense strand to SEQ ID NO: 567809
uguggucuaggaaacagag

SEQ ID NO: 567811 - RNA, 19 nt, Artificial Sequence
  Description of Artificial Sequence: Synthetic oligonucleotide
  Sense strand starting at position 462 of SEQ ID NO: 318502
guuacagaaccuuggcaaa

SEQ ID NO: 567812 - RNA, 19 nt, Artificial Sequence
  Description of Artificial Sequence: Synthetic oligonucleotide
  Antisense strand to SEQ ID NO: 567811
uuugccaagguucuguaac

SEQ ID NO: 567813 - RNA, 19 nt, Artificial Sequence
  Description of Artificial Sequence: Synthetic oligonucleotide
  Sense strand starting at position 850 of SEQ ID NO: 318502
caaguagcugaauggugaa

SEQ ID NO: 567814 - RNA, 19 nt, Artificial Sequence
  Description of Artificial Sequence: Synthetic oligonucleotide
  Antisense strand to SEQ ID NO: 567813
uucaccauucagcuacuug

SEQ ID NO: 567815 - RNA, 19 nt, Artificial Sequence
  Description of Artificial Sequence: Synthetic oligonucleotide
  Sense strand starting at position 902 of SEQ ID NO: 318502
cauuuagguuuaugaugaa

SEQ ID NO: 567816 - RNA, 19 nt, Artificial Sequence
  Description of Artificial Sequence: Synthetic oligonucleotide
  Antisense strand to SEQ ID NO: 567815
uucaucauaaaccuaaaug

SEQ ID NO: 567817 - RNA, 19 nt, Artificial Sequence
  Description of Artificial Sequence: Synthetic oligonucleotide
  Sense strand starting at position 926 of SEQ ID NO: 318502
aacccauuggcagagaguu

SEQ ID NO: 567818 - RNA, 19 nt, Artificial Sequence
  Description of Artificial Sequence: Synthetic oligonucleotide
  Antisense strand to SEQ ID NO: 567817
aacucucugccaauggguu

SEQ ID NO: 567819 - RNA, 19 nt, Artificial Sequence
  Description of Artificial Sequence: Synthetic oligonucleotide
  Sense strand starting at position 939 of SEQ ID NO: 318502
agaguuguagcuuaagagu

SEQ ID NO: 567820 - RNA, 19 nt, Artificial Sequence
  Description of Artificial Sequence: Synthetic oligonucleotide
  Antisense strand to SEQ ID NO: 567819
acucuuaagcuacaacucu

SEQ ID NO: 567821 - RNA, 19 nt, Artificial Sequence
  Description of Artificial Sequence: Synthetic oligonucleotide
  Sense strand starting at position 967 of SEQ ID NO: 318502
cggauuucuucugucauua

SEQ ID NO: 567822 - RNA, 19 nt, Artificial Sequence
  Description of Artificial Sequence: Synthetic oligonucleotide
  Antisense strand to SEQ ID NO: 567821
uaaugacagaagaaauccg

SEQ ID NO: 567823 - RNA, 19 nt, Artificial Sequence
  Description of Artificial Sequence: Synthetic oligonucleotide
  Sense strand starting at position 1032 of SEQ ID NO: 318502
accguaaaccuuugauaau

SEQ ID NO: 567824 - RNA, 19 nt, Artificial Sequence
  Description of Artificial Sequence: Synthetic oligonucleotide
  Antisense strand to SEQ ID NO: 567823
auuaucaaagguuuacggu

SEQ ID NO: 567825 - RNA, 19 nt, Artificial Sequence
  Description of Artificial Sequence: Synthetic oligonucleotide
  Sense strand starting at position 1044 of SEQ ID NO: 318502
ugauaauuauaguugucag

SEQ ID NO: 567826 - RNA, 19 nt, Artificial Sequence
  Description of Artificial Sequence: Synthetic oligonucleotide
  Antisense strand to SEQ ID NO: 567825
cugacaacuauaauuauca

SEQ ID NO: 567827 - RNA, 19 nt, Artificial Sequence
  Description of Artificial Sequence: Synthetic oligonucleotide
  Sense strand starting at position 1107 of SEQ ID NO: 318502
ccuggaagcugauccaaua

SEQ ID NO: 567828 - RNA, 19 nt, Artificial Sequence
  Description of Artificial Sequence: Synthetic oligonucleotide
  Antisense strand to SEQ ID NO: 567827
uauuggaucagcuuccagg

SEQ ID NO: 567829 - RNA, 19 nt, Artificial Sequence
  Description of Artificial Sequence: Synthetic oligonucleotide
  Sense strand starting at position 1236 of SEQ ID NO: 318502
gcaggauauguacaaacuu

SEQ ID NO: 567830 - RNA, 19 nt, Artificial Sequence
  Description of Artificial Sequence: Synthetic oligonucleotide
  Antisense strand to SEQ ID NO: 567829
aaguuuguacauauccugc

SEQ ID NO: 567831 - RNA, 19 nt, Artificial Sequence
  Description of Artificial Sequence: Synthetic oligonucleotide
  Sense strand starting at position 1494 of SEQ ID NO: 318502
acacuagaaugagcauauu

SEQ ID NO: 567832 - RNA, 19 nt, Artificial Sequence
  Description of Artificial Sequence: Synthetic oligonucleotide
  Antisense strand to SEQ ID NO: 567831
aauaugcucauucuagugu

SEQ ID NO: 567833 - RNA, 19 nt, Artificial Sequence
  Description of Artificial Sequence: Synthetic oligonucleotide
  Sense strand starting at position 1898 of SEQ ID NO: 318502
cgaaguuccuacuuacaca

SEQ ID NO: 567834 - RNA, 19 nt, Artificial Sequence
  Description of Artificial Sequence: Synthetic oligonucleotide
  Antisense strand to SEQ ID NO: 567833
uguguaaguaggaacuucg

SEQ ID NO: 567835 - RNA, 19 nt, Artificial Sequence
  Description of Artificial Sequence: Synthetic oligonucleotide
  Sense strand starting at position 1979 of SEQ ID NO: 318502
agcagcacacucugauauu

SEQ ID NO: 567836 - RNA, 19 nt, Artificial Sequence
  Description of Artificial Sequence: Synthetic oligonucleotide
  Antisense strand to SEQ ID NO: 567835
aauaucagagugugcugcu

SEQ ID NO: 567837 - RNA, 19 nt, Artificial Sequence
  Description of Artificial Sequence: Synthetic oligonucleotide
  Sense strand starting at position 2024 of SEQ ID NO: 318502
ucagguauaguccaaaguu

SEQ ID NO: 567838 - RNA, 19 nt, Artificial Sequence
  Description of Artificial Sequence: Synthetic oligonucleotide
  Antisense strand to SEQ ID NO: 567837
aacuuuggacuauaccuga

SEQ ID NO: 567839 - RNA, 19 nt, Artificial Sequence
  Description of Artificial Sequence: Synthetic oligonucleotide
  Sense strand starting at position 2085 of SEQ ID NO: 318502
cugagcugauuguuaucaa

SEQ ID NO: 567840 - RNA, 19 nt, Artificial Sequence
  Description of Artificial Sequence: Synthetic oligonucleotide
  Antisense strand to SEQ ID NO: 567839
uugauaacaaucagcucag

SEQ ID NO: 567841 - RNA, 19 nt, Artificial Sequence
  Description of Artificial Sequence: Synthetic oligonucleotide
  Sense strand starting at position 2088 of SEQ ID NO: 318502
agcugauuguuaucaacuu

SEQ ID NO: 567842 - RNA, 19 nt, Artificial Sequence
  Description of Artificial Sequence: Synthetic oligonucleotide
  Antisense strand to SEQ ID NO: 567841
aaguugauaacaaucagcu

SEQ ID NO: 567843 - RNA, 19 nt, Artificial Sequence
  Description of Artificial Sequence: Synthetic oligonucleotide
  Sense strand starting at position 2192 of SEQ ID NO: 318502
ccuagaaucuaggauuuaa

SEQ ID NO: 567844 - RNA, 19 nt, Artificial Sequence
  Description of Artificial Sequence: Synthetic oligonucleotide
  Antisense strand to SEQ ID NO: 567843
uuaaauccuagauucuagg

SEQ ID NO: 567845 - RNA, 19 nt, Artificial Sequence
  Description of Artificial Sequence: Synthetic oligonucleotide
  Sense strand starting at position 2309 of SEQ ID NO: 318502
gcgaauuaugcugcugcuu

SEQ ID NO: 567846 - RNA, 19 nt, Artificial Sequence
  Description of Artificial Sequence: Synthetic oligonucleotide
  Antisense strand to SEQ ID NO: 567845
aagcagcagcauaauucgc

SEQ ID NO: 567847 - RNA, 19 nt, Artificial Sequence
  Description of Artificial Sequence: Synthetic oligonucleotide
  Sense strand starting at position 2310 of SEQ ID NO: 318502
cgaauuaugcugcugcuuu

SEQ ID NO: 567848 - RNA, 19 nt, Artificial Sequence
  Description of Artificial Sequence: Synthetic oligonucleotide
  Antisense strand to SEQ ID NO: 567847
aaagcagcagcauaauucg

SEQ ID NO: 567849 - RNA, 19 nt, Artificial Sequence
  Description of Artificial Sequence: Synthetic oligonucleotide
  Sense strand starting at position 2415 of SEQ ID NO: 318502
gugugaccuuuguuagaaa

SEQ ID NO: 567850 - RNA, 19 nt, Artificial Sequence
  Description of Artificial Sequence: Synthetic oligonucleotide
  Antisense strand to SEQ ID NO: 567849
uuucuaacaaaggucacac

SEQ ID NO: 567851 - RNA, 19 nt, Artificial Sequence
  Description of Artificial Sequence: Synthetic oligonucleotide
  Sense strand starting at position 2486 of SEQ ID NO: 318502
gucgauuguguucuauguu

SEQ ID NO: 567852 - RNA, 19 nt, Artificial Sequence
  Description of Artificial Sequence: Synthetic oligonucleotide
  Antisense strand to SEQ ID NO: 567851
aacauagaacacaaucgac

SEQ ID NO: 567853 - RNA, 19 nt, Artificial Sequence
  Description of Artificial Sequence: Synthetic oligonucleotide
  Sense strand starting at position 2493 of SEQ ID NO: 318502
guguucuauguuuauaacu

SEQ ID NO: 567854 - RNA, 19 nt, Artificial Sequence
  Description of Artificial Sequence: Synthetic oligonucleotide
  Antisense strand to SEQ ID NO: 567853
aguuauaaacauagaacac

SEQ ID NO: 567855 - RNA, 19 nt, Artificial Sequence
  Description of Artificial Sequence: Synthetic oligonucleotide
  Sense strand starting at position 2581 of SEQ ID NO: 318502
uuccuaucugagggaaauc

SEQ ID NO: 567856 - RNA, 19 nt, Artificial Sequence
  Description of Artificial Sequence: Synthetic oligonucleotide
  Antisense strand to SEQ ID NO: 567855
gauuucccucagauaggaa

SEQ ID NO: 567857 - RNA, 19 nt, Artificial Sequence
  Description of Artificial Sequence: Synthetic oligonucleotide
  Sense strand starting at position 2718 of SEQ ID NO: 318502
aaagguaguaguuggacau

SEQ ID NO: 567858 - RNA, 19 nt, Artificial Sequence
  Description of Artificial Sequence: Synthetic oligonucleotide
  Antisense strand to SEQ ID NO: 567857
auguccaacuacuaccuuu

SEQ ID NO: 567859 - RNA, 19 nt, Artificial Sequence
  Description of Artificial Sequence: Synthetic oligonucleotide
  Sense strand starting at position 2722 of SEQ ID NO: 318502
guaguaguuggacauggaa

SEQ ID NO: 567860 - RNA, 19 nt, Artificial Sequence
  Description of Artificial Sequence: Synthetic oligonucleotide
  Antisense strand to SEQ ID NO: 567859
uuccauguccaacuacuac

SEQ ID NO: 567861 - RNA, 19 nt, Artificial Sequence
  Description of Artificial Sequence: Synthetic oligonucleotide
  Sense strand starting at position 2725 of SEQ ID NO: 318502
guaguuggacauggaaaga

SEQ ID NO: 567862 - RNA, 19 nt, Artificial Sequence
  Description of Artificial Sequence: Synthetic oligonucleotide
  Antisense strand to SEQ ID NO: 567861
ucuuuccauguccaacuac

SEQ ID NO: 567863 - RNA, 19 nt, Artificial Sequence
  Description of Artificial Sequence: Synthetic oligonucleotide
  Sense strand starting at position 2873 of SEQ ID NO: 318502
augucauuccuagauagca

SEQ ID NO: 567864 - RNA, 19 nt, Artificial Sequence
  Description of Artificial Sequence: Synthetic oligonucleotide
  Antisense strand to SEQ ID NO: 567863
ugcuaucuaggaaugacau

SEQ ID NO: 567865 - RNA, 19 nt, Artificial Sequence
  Description of Artificial Sequence: Synthetic oligonucleotide
  Sense strand starting at position 3045 of SEQ ID NO: 318502
uuaggagguuaccauuuga

SEQ ID NO: 567866 - RNA, 19 nt, Artificial Sequence
  Description of Artificial Sequence: Synthetic oligonucleotide
  Antisense strand to SEQ ID NO: 567865
ucaaaugguaaccuccuaa

SEQ ID NO: 567867 - RNA, 19 nt, Artificial Sequence
  Description of Artificial Sequence: Synthetic oligonucleotide
  Sense strand starting at position 3204 of SEQ ID NO: 318502
agauauuccucccuguagu

SEQ ID NO: 567868 - RNA, 19 nt, Artificial Sequence
  Description of Artificial Sequence: Synthetic oligonucleotide
  Antisense strand to SEQ ID NO: 567867
acuacagggaggaauaucu

SEQ ID NO: 567869 - RNA, 19 nt, Artificial Sequence
  Description of Artificial Sequence: Synthetic oligonucleotide
  Sense strand starting at position 19 of SEQ ID NO: 318503
uuuauuguguccuuaccau

SEQ ID NO: 567870 - RNA, 19 nt, Artificial Sequence
  Description of Artificial Sequence: Synthetic oligonucleotide
  Antisense strand to SEQ ID NO: 567869
augguaaggacacaauaaa

SEQ ID NO: 567871 - RNA, 19 nt, Artificial Sequence
  Description of Artificial Sequence: Synthetic oligonucleotide
  Sense strand starting at position 67 of SEQ ID NO: 318503
uggauucucuuguugaauc

SEQ ID NO: 567872 - RNA, 19 nt, Artificial Sequence
  Description of Artificial Sequence: Synthetic oligonucleotide
  Antisense strand to SEQ ID NO: 567871
gauucaacaagagaaucca

SEQ ID NO: 567873 - RNA, 19 nt, Artificial Sequence
  Description of Artificial Sequence: Synthetic oligonucleotide
  Sense strand starting at position 123 of SEQ ID NO: 318503
ccauuauacgcaugagagc

SEQ ID NO: 567874 - RNA, 19 nt, Artificial Sequence
  Description of Artificial Sequence: Synthetic oligonucleotide
  Antisense strand to SEQ ID NO: 567873
gcucucaugcguauaaugg

SEQ ID NO: 567875 - RNA, 19 nt, Artificial Sequence
  Description of Artificial Sequence: Synthetic oligonucleotide
  Sense strand starting at position 287 of SEQ ID NO: 318503
agacauaacuuucugguca

SEQ ID NO: 567876 - RNA, 19 nt, Artificial Sequence
  Description of Artificial Sequence: Synthetic oligonucleotide
  Antisense strand to SEQ ID NO: 567875
ugaccagaaaguuaugucu

SEQ ID NO: 567877 - RNA, 19 nt, Artificial Sequence
  Description of Artificial Sequence: Synthetic oligonucleotide
  Sense strand starting at position 410 of SEQ ID NO: 318503
gcccuccuccgguacauaa

SEQ ID NO: 567878 - RNA, 19 nt, Artificial Sequence
  Description of Artificial Sequence: Synthetic oligonucleotide
  Antisense strand to SEQ ID NO: 567877
uuauguaccggaggagggc

SEQ ID NO: 567879 - RNA, 19 nt, Artificial Sequence
  Description of Artificial Sequence: Synthetic oligonucleotide
  Sense strand starting at position 450 of SEQ ID NO: 318503
cgaagugaaucucugagua

SEQ ID NO: 567880 - RNA, 19 nt, Artificial Sequence
  Description of Artificial Sequence: Synthetic oligonucleotide
  Antisense strand to SEQ ID NO: 567879
uacucagagauucacuucg

SEQ ID NO: 567881 - RNA, 19 nt, Artificial Sequence
  Description of Artificial Sequence: Synthetic oligonucleotide
  Sense strand starting at position 479 of SEQ ID NO: 318503
ugaaucuguuccucaugua

SEQ ID NO: 567882 - RNA, 19 nt, Artificial Sequence
  Description of Artificial Sequence: Synthetic oligonucleotide
  Antisense strand to SEQ ID NO: 567881
uacaugaggaacagauuca

SEQ ID NO: 567883 - RNA, 19 nt, Artificial Sequence
  Description of Artificial Sequence: Synthetic oligonucleotide
  Sense strand starting at position 575 of SEQ ID NO: 318503
gagcuccugcuuuagucau

SEQ ID NO: 567884 - RNA, 19 nt, Artificial Sequence
  Description of Artificial Sequence: Synthetic oligonucleotide
  Antisense strand to SEQ ID NO: 567883
augacuaaagcaggagcuc

SEQ ID NO: 567885 - RNA, 19 nt, Artificial Sequence
  Description of Artificial Sequence: Synthetic oligonucleotide
  Sense strand starting at position 718 of SEQ ID NO: 318503
gaaccaauucguuaucguu

SEQ ID NO: 567886 - RNA, 19 nt, Artificial Sequence
  Description of Artificial Sequence: Synthetic oligonucleotide
  Antisense strand to SEQ ID NO: 567885
aacgauaacgaauugguuc

SEQ ID NO: 567887 - RNA, 19 nt, Artificial Sequence
  Description of Artificial Sequence: Synthetic oligonucleotide
  Sense strand starting at position 954 of SEQ ID NO: 318503
ccgcgagugaauuaugaaa

SEQ ID NO: 567888 - RNA, 19 nt, Artificial Sequence
  Description of Artificial Sequence: Synthetic oligonucleotide
  Antisense strand to SEQ ID NO: 567887
uuucauaauucacucgcgg

SEQ ID NO: 567889 - RNA, 19 nt, Artificial Sequence
  Description of Artificial Sequence: Synthetic oligonucleotide
  Sense strand starting at position 966 of SEQ ID NO: 318503
uaugaaagccuuuaguaag

SEQ ID NO: 567890 - RNA, 19 nt, Artificial Sequence
  Description of Artificial Sequence: Synthetic oligonucleotide
  Antisense strand to SEQ ID NO: 567889
cuuacuaaaggcuuucaua

SEQ ID NO: 567891 - RNA, 19 nt, Artificial Sequence
  Description of Artificial Sequence: Synthetic oligonucleotide
  Sense strand starting at position 1241 of SEQ ID NO: 318503
gacucaagucugcaacugu

SEQ ID NO: 567892 - RNA, 19 nt, Artificial Sequence
  Description of Artificial Sequence: Synthetic oligonucleotide
  Antisense strand to SEQ ID NO: 567891
acaguugcagacuugaguc

SEQ ID NO: 567893 - RNA, 19 nt, Artificial Sequence
  Description of Artificial Sequence: Synthetic oligonucleotide
  Sense strand starting at position 1271 of SEQ ID NO: 318503
gugggagacucucucggau

SEQ ID NO: 567894 - RNA, 19 nt, Artificial Sequence
  Description of Artificial Sequence: Synthetic oligonucleotide
  Antisense strand to SEQ ID NO: 567893
auccgagagagucucccac

SEQ ID NO: 567895 - RNA, 19 nt, Artificial Sequence
  Description of Artificial Sequence: Synthetic oligonucleotide
  Sense strand starting at position 1875 of SEQ ID NO: 318503
uggccacuuccuggaaacu

SEQ ID NO: 567896 - RNA, 19 nt, Artificial Sequence
  Description of Artificial Sequence: Synthetic oligonucleotide
  Antisense strand to SEQ ID NO: 567895
aguuuccaggaaguggcca

SEQ ID NO: 567897 - RNA, 19 nt, Artificial Sequence
  Description of Artificial Sequence: Synthetic oligonucleotide
  Sense strand starting at position 2190 of SEQ ID NO: 318503
uggaaagccuuucccguaa

SEQ ID NO: 567898 - RNA, 19 nt, Artificial Sequence
  Description of Artificial Sequence: Synthetic oligonucleotide
  Antisense strand to SEQ ID NO: 567897
uuacgggaaaggcuuucca

SEQ ID NO: 567899 - RNA, 19 nt, Artificial Sequence
  Description of Artificial Sequence: Synthetic oligonucleotide
  Sense strand starting at position 2657 of SEQ ID NO: 318503
acguucucuccgcuaaugu

SEQ ID NO: 567900 - RNA, 19 nt, Artificial Sequence
  Description of Artificial Sequence: Synthetic oligonucleotide
  Antisense strand to SEQ ID NO: 567899
acauuagcggagagaacgu

SEQ ID NO: 567901 - RNA, 19 nt, Artificial Sequence
  Description of Artificial Sequence: Synthetic oligonucleotide
  Sense strand starting at position 2735 of SEQ ID NO: 318503
ucuguauccuucucacuga

SEQ ID NO: 567902 - RNA, 19 nt, Artificial Sequence
  Description of Artificial Sequence: Synthetic oligonucleotide
  Antisense strand to SEQ ID NO: 567901
ucagugagaaggauacaga

SEQ ID NO: 567903 - RNA, 19 nt, Artificial Sequence
  Description of Artificial Sequence: Synthetic oligonucleotide
  Sense strand starting at position 2823 of SEQ ID NO: 318503
cugcucuuucugggaaugu

SEQ ID NO: 567904 - RNA, 19 nt, Artificial Sequence
  Description of Artificial Sequence: Synthetic oligonucleotide
  Antisense strand to SEQ ID NO: 567903
acauucccagaaagagcag

SEQ ID NO: 567905 - RNA, 19 nt, Artificial Sequence
  Description of Artificial Sequence: Synthetic oligonucleotide
  Sense strand starting at position 2951 of SEQ ID NO: 318503
ucagaaacuugugcugacu

SEQ ID NO: 567906 - RNA, 19 nt, Artificial Sequence
  Description of Artificial Sequence: Synthetic oligonucleotide
  Antisense strand to SEQ ID NO: 567905
agucagcacaaguuucuga

SEQ ID NO: 567907 - RNA, 19 nt, Artificial Sequence
  Description of Artificial Sequence: Synthetic oligonucleotide
  Sense strand starting at position 2954 of SEQ ID NO: 318503
gaaacuugugcugacugga

SEQ ID NO: 567908 - RNA, 19 nt, Artificial Sequence
  Description of Artificial Sequence: Synthetic oligonucleotide
  Antisense strand to SEQ ID NO: 567907
uccagucagcacaaguuuc

SEQ ID NO: 567909 - RNA, 19 nt, Artificial Sequence
  Description of Artificial Sequence: Synthetic oligonucleotide
  Sense strand starting at position 2985 of SEQ ID NO: 318503
ccacguucgacuuagcaca

SEQ ID NO: 567910 - RNA, 19 nt, Artificial Sequence
  Description of Artificial Sequence: Synthetic oligonucleotide
  Antisense strand to SEQ ID NO: 567909
ugugcuaagucgaacgugg

SEQ ID NO: 567911 - RNA, 19 nt, Artificial Sequence
  Description of Artificial Sequence: Synthetic oligonucleotide
  Sense strand starting at position 3166 of SEQ ID NO: 318503
gcuguuucccaugcuguau

SEQ ID NO: 567912 - RNA, 19 nt, Artificial Sequence
  Description of Artificial Sequence: Synthetic oligonucleotide
  Antisense strand to SEQ ID NO: 567911
auacagcaugggaaacagc

SEQ ID NO: 567913 - RNA, 19 nt, Artificial Sequence
  Description of Artificial Sequence: Synthetic oligonucleotide
  Sense strand starting at position 3240 of SEQ ID NO: 318503
gcaaaccuuccugguggaa

SEQ ID NO: 567914 - RNA, 19 nt, Artificial Sequence
  Description of Artificial Sequence: Synthetic oligonucleotide
  Antisense strand to SEQ ID NO: 567913
uuccaccaggaagguuugc

SEQ ID NO: 567915 - RNA, 19 nt, Artificial Sequence
  Description of Artificial Sequence: Synthetic oligonucleotide
  Sense strand starting at position 3456 of SEQ ID NO: 318503
gagaauguguggucaauac

SEQ ID NO: 567916 - RNA, 19 nt, Artificial Sequence
  Description of Artificial Sequence: Synthetic oligonucleotide
  Antisense strand to SEQ ID NO: 567915
guauugaccacacauucuc

SEQ ID NO: 567917 - RNA, 19 nt, Artificial Sequence
  Description of Artificial Sequence: Synthetic oligonucleotide
  Sense strand starting at position 3460 of SEQ ID NO: 318503
auguguggucaauacugaa

SEQ ID NO: 567918 - RNA, 19 nt, Artificial Sequence
  Description of Artificial Sequence: Synthetic oligonucleotide
  Antisense strand to SEQ ID NO: 567917
uucaguauugaccacacau

SEQ ID NO: 567919 - RNA, 19 nt, Artificial Sequence
  Description of Artificial Sequence: Synthetic oligonucleotide
  Sense strand starting at position 3479 of SEQ ID NO: 318503
uugaucauccuagacugua

SEQ ID NO: 567920 - RNA, 19 nt, Artificial Sequence
  Description of Artificial Sequence: Synthetic oligonucleotide
  Antisense strand to SEQ ID NO: 567919
uacagucuaggaugaucaa

SEQ ID NO: 567921 - RNA, 19 nt, Artificial Sequence
  Description of Artificial Sequence: Synthetic oligonucleotide
  Sense strand starting at position 3559 of SEQ ID NO: 318503
auggcaguucugcauuaca

SEQ ID NO: 567922 - RNA, 19 nt, Artificial Sequence
  Description of Artificial Sequence: Synthetic oligonucleotide
  Antisense strand to SEQ ID NO: 567921
uguaaugcagaacugccau

SEQ ID NO: 567923 - RNA, 19 nt, Artificial Sequence
  Description of Artificial Sequence: Synthetic oligonucleotide
  Sense strand starting at position 3562 of SEQ ID NO: 318503
gcaguucugcauuacaacu

SEQ ID NO: 567924 - RNA, 19 nt, Artificial Sequence
  Description of Artificial Sequence: Synthetic oligonucleotide
  Antisense strand to SEQ ID NO: 567923
aguuguaaugcagaacugc

SEQ ID NO: 567925 - RNA, 19 nt, Artificial Sequence
  Description of Artificial Sequence: Synthetic oligonucleotide
  Sense strand starting at position 3572 of SEQ ID NO: 318503
auuacaacucucugggacu

SEQ ID NO: 567926 - RNA, 19 nt, Artificial Sequence
  Description of Artificial Sequence: Synthetic oligonucleotide
  Antisense strand to SEQ ID NO: 567925
agucccagagaguuguaau

SEQ ID NO: 567927 - RNA, 19 nt, Artificial Sequence
  Description of Artificial Sequence: Synthetic oligonucleotide
  Sense strand starting at position 3729 of SEQ ID NO: 318503
cacucugcucuguaggagu

SEQ ID NO: 567928 - RNA, 19 nt, Artificial Sequence
  Description of Artificial Sequence: Synthetic oligonucleotide
  Antisense strand to SEQ ID NO: 567927
acuccuacagagcagagug

SEQ ID NO: 567929 - RNA, 19 nt, Artificial Sequence
  Description of Artificial Sequence: Synthetic oligonucleotide
  Sense strand starting at position 3731 of SEQ ID NO: 318503
cucugcucuguaggaguaa

SEQ ID NO: 567930 - RNA, 19 nt, Artificial Sequence
  Description of Artificial Sequence: Synthetic oligonucleotide
  Antisense strand to SEQ ID NO: 567929
uuacuccuacagagcagag

SEQ ID NO: 567931 - RNA, 19 nt, Artificial Sequence
  Description of Artificial Sequence: Synthetic oligonucleotide
  Sense strand starting at position 3830 of SEQ ID NO: 318503
gagaauuaucuaugagggc

SEQ ID NO: 567932 - RNA, 19 nt, Artificial Sequence
  Description of Artificial Sequence: Synthetic oligonucleotide
  Antisense strand to SEQ ID NO: 567931
gcccucauagauaauucuc

SEQ ID NO: 567933 - RNA, 19 nt, Artificial Sequence
  Description of Artificial Sequence: Synthetic oligonucleotide
  Sense strand starting at position 3834 of SEQ ID NO: 318503
auuaucuaugagggcucaa

SEQ ID NO: 567934 - RNA, 19 nt, Artificial Sequence
  Description of Artificial Sequence: Synthetic oligonucleotide
  Antisense strand to SEQ ID NO: 567933
uugagcccucauagauaau

SEQ ID NO: 567935 - RNA, 19 nt, Artificial Sequence
  Description of Artificial Sequence: Synthetic oligonucleotide
  Sense strand starting at position 3882 of SEQ ID NO: 318503
ggcaaaguguuauuucuua

SEQ ID NO: 567936 - RNA, 19 nt, Artificial Sequence
  Description of Artificial Sequence: Synthetic oligonucleotide
  Antisense strand to SEQ ID NO: 567935
uaagaaauaacacuuugcc

SEQ ID NO: 567937 - RNA, 19 nt, Artificial Sequence
  Description of Artificial Sequence: Synthetic oligonucleotide
  Sense strand starting at position 3904 of SEQ ID NO: 318503
cagcauuucugaguguuuc

SEQ ID NO: 567938 - RNA, 19 nt, Artificial Sequence
  Description of Artificial Sequence: Synthetic oligonucleotide
  Antisense strand to SEQ ID NO: 567937
gaaacacucagaaaugcug

SEQ ID NO: 567939 - RNA, 19 nt, Artificial Sequence
  Description of Artificial Sequence: Synthetic oligonucleotide
  Sense strand starting at position 3908 of SEQ ID NO: 318503
auuucugaguguuucguau

SEQ ID NO: 567940 - RNA, 19 nt, Artificial Sequence
  Description of Artificial Sequence: Synthetic oligonucleotide
  Antisense strand to SEQ ID NO: 567939
auacgaaacacucagaaau

SEQ ID NO: 567941 - RNA, 19 nt, Artificial Sequence
  Description of Artificial Sequence: Synthetic oligonucleotide
  Sense strand starting at position 3914 of SEQ ID NO: 318503
gaguguuucguauacaccu

SEQ ID NO: 567942 - RNA, 19 nt, Artificial Sequence
  Description of Artificial Sequence: Synthetic oligonucleotide
  Antisense strand to SEQ ID NO: 567941
agguguauacgaaacacuc

SEQ ID NO: 567943 - RNA, 19 nt, Artificial Sequence
  Description of Artificial Sequence: Synthetic oligonucleotide
  Sense strand starting at position 3920 of SEQ ID NO: 318503
uucguauacaccuagaggu

SEQ ID NO: 567944 - RNA, 19 nt, Artificial Sequence
  Description of Artificial Sequence: Synthetic oligonucleotide
  Antisense strand to SEQ ID NO: 567943
accucuagguguauacgaa

SEQ ID NO: 567945 - RNA, 19 nt, Artificial Sequence
  Description of Artificial Sequence: Synthetic oligonucleotide
  Sense strand starting at position 3922 of SEQ ID NO: 318503
cguauacaccuagagguua

SEQ ID NO: 567946 - RNA, 19 nt, Artificial Sequence
  Description of Artificial Sequence: Synthetic oligonucleotide
  Antisense strand to SEQ ID NO: 567945
uaaccucuagguguauacg

SEQ ID NO: 567947 - RNA, 19 nt, Artificial Sequence
  Description of Artificial Sequence: Synthetic oligonucleotide
  Sense strand starting at position 3967 of SEQ ID NO: 318503
uggucucaccgucaaauaa

SEQ ID NO: 567948 - RNA, 19 nt, Artificial Sequence
  Description of Artificial Sequence: Synthetic oligonucleotide
  Antisense strand to SEQ ID NO: 567947
uuauuugacggugagacca

SEQ ID NO: 567949 - RNA, 19 nt, Artificial Sequence
  Description of Artificial Sequence: Synthetic oligonucleotide
  Sense strand starting at position 224 of SEQ ID NO: 318504
gaaccaauucguuaucguu

SEQ ID NO: 567950 - RNA, 19 nt, Artificial Sequence
  Description of Artificial Sequence: Synthetic oligonucleotide
  Antisense strand to SEQ ID NO: 567949
aacgauaacgaauugguuc

SEQ ID NO: 567951 - RNA, 19 nt, Artificial Sequence
  Description of Artificial Sequence: Synthetic oligonucleotide
  Sense strand starting at position 460 of SEQ ID NO: 318504
ccgcgagugaauuaugaaa

SEQ ID NO: 567952 - RNA, 19 nt, Artificial Sequence
  Description of Artificial Sequence: Synthetic oligonucleotide
  Antisense strand to SEQ ID NO: 567951
uuucauaauucacucgcgg

SEQ ID NO: 567953 - RNA, 19 nt, Artificial Sequence
  Description of Artificial Sequence: Synthetic oligonucleotide
  Sense strand starting at position 472 of SEQ ID NO: 318504
uaugaaagccuuuaguaag

SEQ ID NO: 567954 - RNA, 19 nt, Artificial Sequence
  Description of Artificial Sequence: Synthetic oligonucleotide
  Antisense strand to SEQ ID NO: 567953
cuuacuaaaggcuuucaua

SEQ ID NO: 567955 - RNA, 19 nt, Artificial Sequence
  Description of Artificial Sequence: Synthetic oligonucleotide
  Sense strand starting at position 747 of SEQ ID NO: 318504
gacucaagucugcaacugu

SEQ ID NO: 567956 - RNA, 19 nt, Artificial Sequence
  Description of Artificial Sequence: Synthetic oligonucleotide
  Antisense strand to SEQ ID NO: 567955
acaguugcagacuugaguc

SEQ ID NO: 567957 - RNA, 19 nt, Artificial Sequence
  Description of Artificial Sequence: Synthetic oligonucleotide
  Sense strand starting at position 777 of SEQ ID NO: 318504
gugggagacucucucggau

SEQ ID NO: 567958 - RNA, 19 nt, Artificial Sequence
  Description of Artificial Sequence: Synthetic oligonucleotide
  Antisense strand to SEQ ID NO: 567957
auccgagagagucucccac

SEQ ID NO: 567959 - RNA, 19 nt, Artificial Sequence
  Description of Artificial Sequence: Synthetic oligonucleotide
  Sense strand starting at position 1381 of SEQ ID NO: 318504
uggccacuuccuggaaacu

SEQ ID NO: 567960 - RNA, 19 nt, Artificial Sequence
  Description of Artificial Sequence: Synthetic oligonucleotide
  Antisense strand to SEQ ID NO: 567959
aguuuccaggaaguggcca

SEQ ID NO: 567961 - RNA, 19 nt, Artificial Sequence
  Description of Artificial Sequence: Synthetic oligonucleotide
  Sense strand starting at position 1696 of SEQ ID NO: 318504
uggaaagccuuucccguaa

SEQ ID NO: 567962 - RNA, 19 nt, Artificial Sequence
  Description of Artificial Sequence: Synthetic oligonucleotide
  Antisense strand to SEQ ID NO: 567961
uuacgggaaaggcuuucca

SEQ ID NO: 567963 - RNA, 19 nt, Artificial Sequence
  Description of Artificial Sequence: Synthetic oligonucleotide
  Sense strand starting at position 2163 of SEQ ID NO: 318504
acguucucuccgcuaaugu

SEQ ID NO: 567964 - RNA, 19 nt, Artificial Sequence
  Description of Artificial Sequence: Synthetic oligonucleotide
  Antisense strand to SEQ ID NO: 567963
acauuagcggagagaacgu

SEQ ID NO: 567965 - RNA, 19 nt, Artificial Sequence
  Description of Artificial Sequence: Synthetic oligonucleotide
  Sense strand starting at position 2241 of SEQ ID NO: 318504
ucuguauccuucucacuga

SEQ ID NO: 567966 - RNA, 19 nt, Artificial Sequence
  Description of Artificial Sequence: Synthetic oligonucleotide
  Antisense strand to SEQ ID NO: 567965
ucagugagaaggauacaga

SEQ ID NO: 567967 - RNA, 19 nt, Artificial Sequence
  Description of Artificial Sequence: Synthetic oligonucleotide
  Sense strand starting at position 2457 of SEQ ID NO: 318504
ucagaaacuugugcugacu

SEQ ID NO: 567968 - RNA, 19 nt, Artificial Sequence
  Description of Artificial Sequence: Synthetic oligonucleotide
  Antisense strand to SEQ ID NO: 567967
agucagcacaaguuucuga

SEQ ID NO: 567969 - RNA, 19 nt, Artificial Sequence
  Description of Artificial Sequence: Synthetic oligonucleotide
  Sense strand starting at position 2460 of SEQ ID NO: 318504
gaaacuugugcugacugga

SEQ ID NO: 567970 - RNA, 19 nt, Artificial Sequence
  Description of Artificial Sequence: Synthetic oligonucleotide
  Antisense strand to SEQ ID NO: 567969
uccagucagcacaaguuuc

SEQ ID NO: 567971 - RNA, 19 nt, Artificial Sequence
  Description of Artificial Sequence: Synthetic oligonucleotide
  Sense strand starting at position 2491 of SEQ ID NO: 318504
ccacguucgacuuagcaca

SEQ ID NO: 567972 - RNA, 19 nt, Artificial Sequence
  Description of Artificial Sequence: Synthetic oligonucleotide
  Antisense strand to SEQ ID NO: 567971
ugugcuaagucgaacgugg

SEQ ID NO: 567973 - RNA, 19 nt, Artificial Sequence
  Description of Artificial Sequence: Synthetic oligonucleotide
  Sense strand starting at position 2672 of SEQ ID NO: 318504
gcuguuucccaugcuguau

SEQ ID NO: 567974 - RNA, 19 nt, Artificial Sequence
  Description of Artificial Sequence: Synthetic oligonucleotide
  Antisense strand to SEQ ID NO: 567973
auacagcaugggaaacagc

SEQ ID NO: 567975 - RNA, 19 nt, Artificial Sequence
  Description of Artificial Sequence: Synthetic oligonucleotide
  Sense strand starting at position 2746 of SEQ ID NO: 318504
gcaaaccuuccugguggaa

SEQ ID NO: 567976 - RNA, 19 nt, Artificial Sequence
  Description of Artificial Sequence: Synthetic oligonucleotide
  Antisense strand to SEQ ID NO: 567975
uuccaccaggaagguuugc

SEQ ID NO: 567977 - RNA, 19 nt, Artificial Sequence
  Description of Artificial Sequence: Synthetic oligonucleotide
  Sense strand starting at position 2962 of SEQ ID NO: 318504
gagaauguguggucaauac

SEQ ID NO: 567978 - RNA, 19 nt, Artificial Sequence
  Description of Artificial Sequence: Synthetic oligonucleotide
  Antisense strand to SEQ ID NO: 567977
guauugaccacacauucuc

SEQ ID NO: 567979 - RNA, 19 nt, Artificial Sequence
  Description of Artificial Sequence: Synthetic oligonucleotide
  Sense strand starting at position 2966 of SEQ ID NO: 318504
auguguggucaauacugaa

SEQ ID NO: 567980 - RNA, 19 nt, Artificial Sequence
  Description of Artificial Sequence: Synthetic oligonucleotide
  Antisense strand to SEQ ID NO: 567979
uucaguauugaccacacau

SEQ ID NO: 567981 - RNA, 19 nt, Artificial Sequence
  Description of Artificial Sequence: Synthetic oligonucleotide
  Sense strand starting at position 2985 of SEQ ID NO: 318504
uugaucauccuagacugua

SEQ ID NO: 567982 - RNA, 19 nt, Artificial Sequence
  Description of Artificial Sequence: Synthetic oligonucleotide
  Antisense strand to SEQ ID NO: 567981
uacagucuaggaugaucaa

SEQ ID NO: 567983 - RNA, 19 nt, Artificial Sequence
  Description of Artificial Sequence: Synthetic oligonucleotide
  Sense strand starting at position 3065 of SEQ ID NO: 318504
auggcaguucugcauuaca

SEQ ID NO: 567984 - RNA, 19 nt, Artificial Sequence
  Description of Artificial Sequence: Synthetic oligonucleotide
  Antisense strand to SEQ ID NO: 567983
uguaaugcagaacugccau

SEQ ID NO: 567985 - RNA, 19 nt, Artificial Sequence
  Description of Artificial Sequence: Synthetic oligonucleotide
  Sense strand starting at position 3068 of SEQ ID NO: 318504
gcaguucugcauuacaacu

SEQ ID NO: 567986 - RNA, 19 nt, Artificial Sequence
  Description of Artificial Sequence: Synthetic oligonucleotide
  Antisense strand to SEQ ID NO: 567985
aguuguaaugcagaacugc

SEQ ID NO: 567987 - RNA, 19 nt, Artificial Sequence
  Description of Artificial Sequence: Synthetic oligonucleotide
  Sense strand starting at position 3078 of SEQ ID NO: 318504
auuacaacucucugggacu

SEQ ID NO: 567988 - RNA, 19 nt, Artificial Sequence
  Description of Artificial Sequence: Synthetic oligonucleotide
  Antisense strand to SEQ ID NO: 567987
agucccagagaguuguaau

SEQ ID NO: 567989 - RNA, 19 nt, Artificial Sequence
  Description of Artificial Sequence: Synthetic oligonucleotide
  Sense strand starting at position 3235 of SEQ ID NO: 318504
cacucugcucuguaggagu

SEQ ID NO: 567990 - RNA, 19 nt, Artificial Sequence
  Description of Artificial Sequence: Synthetic oligonucleotide
  Antisense strand to SEQ ID NO: 567989
acuccuacagagcagagug

SEQ ID NO: 567991 - RNA, 19 nt, Artificial Sequence
  Description of Artificial Sequence: Synthetic oligonucleotide
  Sense strand starting at position 3336 of SEQ ID NO: 318504
gagaauuaucuaugagggc

SEQ ID NO: 567992 - RNA, 19 nt, Artificial Sequence
  Description of Artificial Sequence: Synthetic oligonucleotide
  Antisense strand to SEQ ID NO: 567991
gcccucauagauaauucuc

SEQ ID NO: 567993 - RNA, 19 nt, Artificial Sequence
  Description of Artificial Sequence: Synthetic oligonucleotide
  Sense strand starting at position 3340 of SEQ ID NO: 318504
auuaucuaugagggcucaa

SEQ ID NO: 567994 - RNA, 19 nt, Artificial Sequence
  Description of Artificial Sequence: Synthetic oligonucleotide
  Antisense strand to SEQ ID NO: 567993
uugagcccucauagauaau

SEQ ID NO: 567995 - RNA, 19 nt, Artificial Sequence
  Description of Artificial Sequence: Synthetic oligonucleotide
  Sense strand starting at position 3388 of SEQ ID NO: 318504
ggcaaaguguuauuucuua

SEQ ID NO: 567996 - RNA, 19 nt, Artificial Sequence
  Description of Artificial Sequence: Synthetic oligonucleotide
  Antisense strand to SEQ ID NO: 567995
uaagaaauaacacuuugcc

SEQ ID NO: 567997 - RNA, 19 nt, Artificial Sequence
  Description of Artificial Sequence: Synthetic oligonucleotide
  Sense strand starting at position 3410 of SEQ ID NO: 318504
cagcauuucugaguguuuc

SEQ ID NO: 567998 - RNA, 19 nt, Artificial Sequence
  Description of Artificial Sequence: Synthetic oligonucleotide
  Antisense strand to SEQ ID NO: 567997
gaaacacucagaaaugcug

SEQ ID NO: 567999 - RNA, 19 nt, Artificial Sequence
  Description of Artificial Sequence: Synthetic oligonucleotide
  Sense strand starting at position 3414 of SEQ ID NO: 318504
auuucugaguguuucguau

SEQ ID NO: 568000 - RNA, 19 nt, Artificial Sequence
  Description of Artificial Sequence: Synthetic oligonucleotide
  Antisense strand to SEQ ID NO: 567999
auacgaaacacucagaaau

SEQ ID NO: 568001 - RNA, 19 nt, Artificial Sequence
  Description of Artificial Sequence: Synthetic oligonucleotide
  Sense strand starting at position 3420 of SEQ ID NO: 318504
gaguguuucguauacaccu

SEQ ID NO: 568002 - RNA, 19 nt, Artificial Sequence
  Description of Artificial Sequence: Synthetic oligonucleotide
  Antisense strand to SEQ ID NO: 568001
agguguauacgaaacacuc

SEQ ID NO: 568003 - RNA, 19 nt, Artificial Sequence
  Description of Artificial Sequence: Synthetic oligonucleotide
  Sense strand starting at position 3426 of SEQ ID NO: 318504
uucguauacaccuagaggu

SEQ ID NO: 568004 - RNA, 19 nt, Artificial Sequence
  Description of Artificial Sequence: Synthetic oligonucleotide
  Antisense strand to SEQ ID NO: 568003
accucuagguguauacgaa

SEQ ID NO: 568005 - RNA, 19 nt, Artificial Sequence
  Description of Artificial Sequence: Synthetic oligonucleotide
  Sense strand starting at position 3428 of SEQ ID NO: 318504
cguauacaccuagagguua

SEQ ID NO: 568006 - RNA, 19 nt, Artificial Sequence
  Description of Artificial Sequence: Synthetic oligonucleotide
  Antisense strand to SEQ ID NO: 568005
uaaccucuagguguauacg

SEQ ID NO: 568007 - RNA, 19 nt, Artificial Sequence
  Description of Artificial Sequence: Synthetic oligonucleotide
  Sense strand starting at position 3473 of SEQ ID NO: 318504
uggucucaccgucaaauaa

SEQ ID NO: 568008 - RNA, 19 nt, Artificial Sequence
  Description of Artificial Sequence: Synthetic oligonucleotide
  Antisense strand to SEQ ID NO: 568007
uuauuugacggugagacca

SEQ ID NO: 568009 - RNA, 19 nt, Artificial Sequence
  Description of Artificial Sequence: Synthetic oligonucleotide
  Sense strand starting at position 3500 of SEQ ID NO: 318504
ugcugaguuccauacacag

SEQ ID NO: 568010 - RNA, 19 nt, Artificial Sequence
  Description of Artificial Sequence: Synthetic oligonucleotide
  Antisense strand to SEQ ID NO: 568009
cuguguauggaacucagca

SEQ ID NO: 568011 - RNA, 19 nt, Artificial Sequence
  Description of Artificial Sequence: Synthetic oligonucleotide
  Sense strand starting at position 3528 of SEQ ID NO: 318504
uguagaaguccucagcuuu

SEQ ID NO: 568012 - RNA, 19 nt, Artificial Sequence
  Description of Artificial Sequence: Synthetic oligonucleotide
  Antisense strand to SEQ ID NO: 568011
aaagcugaggacuucuaca

SEQ ID NO: 568013 - RNA, 19 nt, Artificial Sequence
  Description of Artificial Sequence: Synthetic oligonucleotide
  Sense strand starting at position 3620 of SEQ ID NO: 318504
gucucuacccugcauacau

SEQ ID NO: 568014 - RNA, 19 nt, Artificial Sequence
  Description of Artificial Sequence: Synthetic oligonucleotide
  Antisense strand to SEQ ID NO: 568013
auguaugcaggguagagac

SEQ ID NO: 568015 - RNA, 19 nt, Artificial Sequence
  Description of Artificial Sequence: Synthetic oligonucleotide
  Sense strand starting at position 3845 of SEQ ID NO: 318504
aagauauuguguuugugag

SEQ ID NO: 568016 - RNA, 19 nt, Artificial Sequence
  Description of Artificial Sequence: Synthetic oligonucleotide
  Antisense strand to SEQ ID NO: 568015
cucacaaacacaauaucuu

SEQ ID NO: 568017 - RNA, 19 nt, Artificial Sequence
  Description of Artificial Sequence: Synthetic oligonucleotide
  Sense strand starting at position 3846 of SEQ ID NO: 318504
agauauuguguuugugaga

SEQ ID NO: 568018 - RNA, 19 nt, Artificial Sequence
  Description of Artificial Sequence: Synthetic oligonucleotide
  Antisense strand to SEQ ID NO: 568017
ucucacaaacacaauaucu

SEQ ID NO: 568019 - RNA, 19 nt, Artificial Sequence
  Description of Artificial Sequence: Synthetic oligonucleotide
  Sense strand starting at position 3847 of SEQ ID NO: 318504
gauauuguguuugugagaa

SEQ ID NO: 568020 - RNA, 19 nt, Artificial Sequence
  Description of Artificial Sequence: Synthetic oligonucleotide
  Antisense strand to SEQ ID NO: 568019
uucucacaaacacaauauc

SEQ ID NO: 568021 - RNA, 19 nt, Artificial Sequence
  Description of Artificial Sequence: Synthetic oligonucleotide
  Sense strand starting at position 3912 of SEQ ID NO: 318504
aggcaauuuguguaugugu

SEQ ID NO: 568022 - RNA, 19 nt, Artificial Sequence
  Description of Artificial Sequence: Synthetic oligonucleotide
  Antisense strand to SEQ ID NO: 568021
acacauacacaaauugccu

SEQ ID NO: 568023 - RNA, 19 nt, Artificial Sequence
  Description of Artificial Sequence: Synthetic oligonucleotide
  Sense strand starting at position 3914 of SEQ ID NO: 318504
gcaauuuguguauguguau

SEQ ID NO: 568024 - RNA, 19 nt, Artificial Sequence
  Description of Artificial Sequence: Synthetic oligonucleotide
  Antisense strand to SEQ ID NO: 568023
auacacauacacaaauugc

SEQ ID NO: 568025 - RNA, 19 nt, Artificial Sequence
  Description of Artificial Sequence: Synthetic oligonucleotide
  Sense strand starting at position 3960 of SEQ ID NO: 318504
ucugauguacaaugcaaau

SEQ ID NO: 568026 - RNA, 19 nt, Artificial Sequence
  Description of Artificial Sequence: Synthetic oligonucleotide
  Antisense strand to SEQ ID NO: 568025
auuugcauuguacaucaga

SEQ ID NO: 568027 - RNA, 19 nt, Artificial Sequence
  Description of Artificial Sequence: Synthetic oligonucleotide
  Sense strand starting at position 3978 of SEQ ID NO: 318504
ugguaucacagacgacauu

SEQ ID NO: 568028 - RNA, 19 nt, Artificial Sequence
  Description of Artificial Sequence: Synthetic oligonucleotide
  Antisense strand to SEQ ID NO: 568027
aaugucgucugugauacca

SEQ ID NO: 568029 - RNA, 19 nt, Artificial Sequence
  Description of Artificial Sequence: Synthetic oligonucleotide
  Sense strand starting at position 180 of SEQ ID NO: 318509
aggaaaucacagugugauc

SEQ ID NO: 568030 - RNA, 19 nt, Artificial Sequence
  Description of Artificial Sequence: Synthetic oligonucleotide
  Antisense strand to SEQ ID NO: 568029
gaucacacugugauuuccu

SEQ ID NO: 568031 - RNA, 19 nt, Artificial Sequence
  Description of Artificial Sequence: Synthetic oligonucleotide
  Sense strand starting at position 185 of SEQ ID NO: 318509
aucacagugugaucaccau

SEQ ID NO: 568032 - RNA, 19 nt, Artificial Sequence
  Description of Artificial Sequence: Synthetic oligonucleotide
  Antisense strand to SEQ ID NO: 568031
auggugaucacacugugau

SEQ ID NO: 568033 - RNA, 19 nt, Artificial Sequence
  Description of Artificial Sequence: Synthetic oligonucleotide
  Sense strand starting at position 448 of SEQ ID NO: 318509
ccuaaagagcuguaucauu

SEQ ID NO: 568034 - RNA, 19 nt, Artificial Sequence
  Description of Artificial Sequence: Synthetic oligonucleotide
  Antisense strand to SEQ ID NO: 568033
aaugauacagcucuuuagg

SEQ ID NO: 568035 - RNA, 19 nt, Artificial Sequence
  Description of Artificial Sequence: Synthetic oligonucleotide
  Sense strand starting at position 453 of SEQ ID NO: 318509
agagcuguaucauuacuac

SEQ ID NO: 568036 - RNA, 19 nt, Artificial Sequence
  Description of Artificial Sequence: Synthetic oligonucleotide
  Antisense strand to SEQ ID NO: 568035
guaguaaugauacagcucu

SEQ ID NO: 568037 - RNA, 19 nt, Artificial Sequence
  Description of Artificial Sequence: Synthetic oligonucleotide
  Sense strand starting at position 459 of SEQ ID NO: 318509
guaucauuacuacguaaua

SEQ ID NO: 568038 - RNA, 19 nt, Artificial Sequence
  Description of Artificial Sequence: Synthetic oligonucleotide
  Antisense strand to SEQ ID NO: 568037
uauuacguaguaaugauac

SEQ ID NO: 568039 - RNA, 19 nt, Artificial Sequence
  Description of Artificial Sequence: Synthetic oligonucleotide
  Sense strand starting at position 485 of SEQ ID NO: 318509
ucgcaucauauuggagaaa

SEQ ID NO: 568040 - RNA, 19 nt, Artificial Sequence
  Description of Artificial Sequence: Synthetic oligonucleotide
  Antisense strand to SEQ ID NO: 568039
uuucuccaauaugaugcga

SEQ ID NO: 568041 - RNA, 19 nt, Artificial Sequence
  Description of Artificial Sequence: Synthetic oligonucleotide
  Sense strand starting at position 708 of SEQ ID NO: 318509
ugccaagcacaguauuaga

SEQ ID NO: 568042 - RNA, 19 nt, Artificial Sequence
  Description of Artificial Sequence: Synthetic oligonucleotide
  Antisense strand to SEQ ID NO: 568041
ucuaauacugugcuuggca

SEQ ID NO: 568043 - RNA, 19 nt, Artificial Sequence
  Description of Artificial Sequence: Synthetic oligonucleotide
  Sense strand starting at position 768 of SEQ ID NO: 318509
gacagauuaucugccagua

SEQ ID NO: 568044 - RNA, 19 nt, Artificial Sequence
  Description of Artificial Sequence: Synthetic oligonucleotide
  Antisense strand to SEQ ID NO: 568043
uacuggcagauaaucuguc

SEQ ID NO: 568045 - RNA, 19 nt, Artificial Sequence
  Description of Artificial Sequence: Synthetic oligonucleotide
  Sense strand starting at position 883 of SEQ ID NO: 318509
ccaggaugcucccuagagu

SEQ ID NO: 568046 - RNA, 19 nt, Artificial Sequence
  Description of Artificial Sequence: Synthetic oligonucleotide
  Antisense strand to SEQ ID NO: 568045
acucuagggagcauccugg

SEQ ID NO: 568047 - RNA, 19 nt, Artificial Sequence
  Description of Artificial Sequence: Synthetic oligonucleotide
  Sense strand starting at position 938 of SEQ ID NO: 318509
uaccgaaacgcugauaauc

SEQ ID NO: 568048 - RNA, 19 nt, Artificial Sequence
  Description of Artificial Sequence: Synthetic oligonucleotide
  Antisense strand to SEQ ID NO: 568047
gauuaucagcguuucggua

SEQ ID NO: 568049 - RNA, 19 nt, Artificial Sequence
  Description of Artificial Sequence: Synthetic oligonucleotide
  Sense strand starting at position 947 of SEQ ID NO: 318509
gcugauaauccacauguaa

SEQ ID NO: 568050 - RNA, 19 nt, Artificial Sequence
  Description of Artificial Sequence: Synthetic oligonucleotide
  Antisense strand to SEQ ID NO: 568049
uuacauguggauuaucagc

SEQ ID NO: 568051 - RNA, 19 nt, Artificial Sequence
  Description of Artificial Sequence: Synthetic oligonucleotide
  Sense strand starting at position 1048 of SEQ ID NO: 318509
agggcuaagacguacuaau

SEQ ID NO: 568052 - RNA, 19 nt, Artificial Sequence
  Description of Artificial Sequence: Synthetic oligonucleotide
  Antisense strand to SEQ ID NO: 568051
auuaguacgucuuagcccu

SEQ ID NO: 568053 - RNA, 19 nt, Artificial Sequence
  Description of Artificial Sequence: Synthetic oligonucleotide
  Sense strand starting at position 1116 of SEQ ID NO: 318509
uagguuuaaauaggcgaga

SEQ ID NO: 568054 - RNA, 19 nt, Artificial Sequence
  Description of Artificial Sequence: Synthetic oligonucleotide
  Antisense strand to SEQ ID NO: 568053
ucucgccuauuuaaaccua

SEQ ID NO: 568055 - RNA, 19 nt, Artificial Sequence
  Description of Artificial Sequence: Synthetic oligonucleotide
  Sense strand starting at position 1119 of SEQ ID NO: 318509
guuuaaauaggcgagaguu

SEQ ID NO: 568056 - RNA, 19 nt, Artificial Sequence
  Description of Artificial Sequence: Synthetic oligonucleotide
  Antisense strand to SEQ ID NO: 568055
aacucucgccuauuuaaac

SEQ ID NO: 568057 - RNA, 19 nt, Artificial Sequence
  Description of Artificial Sequence: Synthetic oligonucleotide
  Sense strand starting at position 1121 of SEQ ID NO: 318509
uuaaauaggcgagaguuaa

SEQ ID NO: 568058 - RNA, 19 nt, Artificial Sequence
  Description of Artificial Sequence: Synthetic oligonucleotide
  Antisense strand to SEQ ID NO: 568057
uuaacucucgccuauuuaa

SEQ ID NO: 568059 - RNA, 19 nt, Artificial Sequence
  Description of Artificial Sequence: Synthetic oligonucleotide
  Sense strand starting at position 1154 of SEQ ID NO: 318509
caaguuuauuugcaaagag

SEQ ID NO: 568060 - RNA, 19 nt, Artificial Sequence
  Description of Artificial Sequence: Synthetic oligonucleotide
  Antisense strand to SEQ ID NO: 568059
cucuuugcaaauaaacuug

SEQ ID NO: 568061 - RNA, 19 nt, Artificial Sequence
  Description of Artificial Sequence: Synthetic oligonucleotide
  Sense strand starting at position 1220 of SEQ ID NO: 318509
ccaggguugggucgggaaa

SEQ ID NO: 568062 - RNA, 19 nt, Artificial Sequence
  Description of Artificial Sequence: Synthetic oligonucleotide
  Antisense strand to SEQ ID NO: 568061
uuucccgacccaacccugg

SEQ ID NO: 568063 - RNA, 19 nt, Artificial Sequence
  Description of Artificial Sequence: Synthetic oligonucleotide
  Sense strand starting at position 1221 of SEQ ID NO: 318509
caggguugggucgggaaau

SEQ ID NO: 568064 - RNA, 19 nt, Artificial Sequence
  Description of Artificial Sequence: Synthetic oligonucleotide
  Antisense strand to SEQ ID NO: 568063
auuucccgacccaacccug

SEQ ID NO: 568065 - RNA, 19 nt, Artificial Sequence
  Description of Artificial Sequence: Synthetic oligonucleotide
  Sense strand starting at position 1293 of SEQ ID NO: 318509
gaagucaggcuucgagaca

SEQ ID NO: 568066 - RNA, 19 nt, Artificial Sequence
  Description of Artificial Sequence: Synthetic oligonucleotide
  Antisense strand to SEQ ID NO: 568065
ugucucgaagccugacuuc

SEQ ID NO: 568067 - RNA, 19 nt, Artificial Sequence
  Description of Artificial Sequence: Synthetic oligonucleotide
  Sense strand starting at position 1936 of SEQ ID NO: 318509
cucacacuugaacgaagau

SEQ ID NO: 568068 - RNA, 19 nt, Artificial Sequence
  Description of Artificial Sequence: Synthetic oligonucleotide
  Antisense strand to SEQ ID NO: 568067
aucuucguucaagugugag

SEQ ID NO: 568069 - RNA, 19 nt, Artificial Sequence
  Description of Artificial Sequence: Synthetic oligonucleotide
  Sense strand starting at position 2270 of SEQ ID NO: 318509
cgccuucggauccagagaa

SEQ ID NO: 568070 - RNA, 19 nt, Artificial Sequence
  Description of Artificial Sequence: Synthetic oligonucleotide
  Antisense strand to SEQ ID NO: 568069
uucucuggauccgaaggcg

SEQ ID NO: 568071 - RNA, 19 nt, Artificial Sequence
  Description of Artificial Sequence: Synthetic oligonucleotide
  Sense strand starting at position 2411 of SEQ ID NO: 318509
acgagauccuuguuccuga

SEQ ID NO: 568072 - RNA, 19 nt, Artificial Sequence
  Description of Artificial Sequence: Synthetic oligonucleotide
  Antisense strand to SEQ ID NO: 568071
ucaggaacaaggaucucgu

SEQ ID NO: 568073 - RNA, 19 nt, Artificial Sequence
  Description of Artificial Sequence: Synthetic oligonucleotide
  Sense strand starting at position 2412 of SEQ ID NO: 318509
cgagauccuuguuccugaa

SEQ ID NO: 568074 - RNA, 19 nt, Artificial Sequence
  Description of Artificial Sequence: Synthetic oligonucleotide
  Antisense strand to SEQ ID NO: 568073
uucaggaacaaggaucucg

SEQ ID NO: 568075 - RNA, 19 nt, Artificial Sequence
  Description of Artificial Sequence: Synthetic oligonucleotide
  Sense strand starting at position 2414 of SEQ ID NO: 318509
agauccuuguuccugaaau

SEQ ID NO: 568076 - RNA, 19 nt, Artificial Sequence
  Description of Artificial Sequence: Synthetic oligonucleotide
  Antisense strand to SEQ ID NO: 568075
auuucaggaacaaggaucu

SEQ ID NO: 568077 - RNA, 19 nt, Artificial Sequence
  Description of Artificial Sequence: Synthetic oligonucleotide
  Sense strand starting at position 2533 of SEQ ID NO: 318509
auggcacuuggugagagau

SEQ ID NO: 568078 - RNA, 19 nt, Artificial Sequence
  Description of Artificial Sequence: Synthetic oligonucleotide
  Antisense strand to SEQ ID NO: 568077
aucucucaccaagugccau

SEQ ID NO: 568079 - RNA, 19 nt, Artificial Sequence
  Description of Artificial Sequence: Synthetic oligonucleotide
  Sense strand starting at position 2571 of SEQ ID NO: 318509
ugccuuccugaauauugau

SEQ ID NO: 568080 - RNA, 19 nt, Artificial Sequence
  Description of Artificial Sequence: Synthetic oligonucleotide
  Antisense strand to SEQ ID NO: 568079
aucaauauucaggaaggca

SEQ ID NO: 568081 - RNA, 19 nt, Artificial Sequence
  Description of Artificial Sequence: Synthetic oligonucleotide
  Sense strand starting at position 2674 of SEQ ID NO: 318509
uugcuuguuccauacagaa

SEQ ID NO: 568082 - RNA, 19 nt, Artificial Sequence
  Description of Artificial Sequence: Synthetic oligonucleotide
  Antisense strand to SEQ ID NO: 568081
uucuguauggaacaagcaa

SEQ ID NO: 568083 - RNA, 19 nt, Artificial Sequence
  Description of Artificial Sequence: Synthetic oligonucleotide
  Sense strand starting at position 3061 of SEQ ID NO: 318509
auauuucuguuagugcgau

SEQ ID NO: 568084 - RNA, 19 nt, Artificial Sequence
  Description of Artificial Sequence: Synthetic oligonucleotide
  Antisense strand to SEQ ID NO: 568083
aucgcacuaacagaaauau

SEQ ID NO: 568085 - RNA, 19 nt, Artificial Sequence
  Description of Artificial Sequence: Synthetic oligonucleotide
  Sense strand starting at position 3104 of SEQ ID NO: 318509
ucaaauaagcauuaccgua

SEQ ID NO: 568086 - RNA, 19 nt, Artificial Sequence
  Description of Artificial Sequence: Synthetic oligonucleotide
  Antisense strand to SEQ ID NO: 568085
uacgguaaugcuuauuuga

SEQ ID NO: 568087 - RNA, 19 nt, Artificial Sequence
  Description of Artificial Sequence: Synthetic oligonucleotide
  Sense strand starting at position 3212 of SEQ ID NO: 318509
cuggaauccacucgucuga

SEQ ID NO: 568088 - RNA, 19 nt, Artificial Sequence
  Description of Artificial Sequence: Synthetic oligonucleotide
  Antisense strand to SEQ ID NO: 568087
ucagacgaguggauuccag

SEQ ID NO: 568089 - RNA, 19 nt, Artificial Sequence
  Description of Artificial Sequence: Synthetic oligonucleotide
  Sense strand starting at position 3214 of SEQ ID NO: 318509
ggaauccacucgucugauc

SEQ ID NO: 568090 - RNA, 19 nt, Artificial Sequence
  Description of Artificial Sequence: Synthetic oligonucleotide
  Antisense strand to SEQ ID NO: 568089
gaucagacgaguggauucc

SEQ ID NO: 568091 - RNA, 19 nt, Artificial Sequence
  Description of Artificial Sequence: Synthetic oligonucleotide
  Sense strand starting at position 3264 of SEQ ID NO: 318509
agggacucguuuccagaca

SEQ ID NO: 568092 - RNA, 19 nt, Artificial Sequence
  Description of Artificial Sequence: Synthetic oligonucleotide
  Antisense strand to SEQ ID NO: 568091
ugucuggaaacgagucccu

SEQ ID NO: 568093 - RNA, 19 nt, Artificial Sequence
  Description of Artificial Sequence: Synthetic oligonucleotide
  Sense strand starting at position 3277 of SEQ ID NO: 318509
cagacagagcucuggcaaa

SEQ ID NO: 568094 - RNA, 19 nt, Artificial Sequence
  Description of Artificial Sequence: Synthetic oligonucleotide
  Antisense strand to SEQ ID NO: 568093
uuugccagagcucugucug

SEQ ID NO: 568095 - RNA, 19 nt, Artificial Sequence
  Description of Artificial Sequence: Synthetic oligonucleotide
  Sense strand starting at position 3308 of SEQ ID NO: 318509
gcagcuuaggaguagaaga

SEQ ID NO: 568096 - RNA, 19 nt, Artificial Sequence
  Description of Artificial Sequence: Synthetic oligonucleotide
  Antisense strand to SEQ ID NO: 568095
ucuucuacuccuaagcugc

SEQ ID NO: 568097 - RNA, 19 nt, Artificial Sequence
  Description of Artificial Sequence: Synthetic oligonucleotide
  Sense strand starting at position 3388 of SEQ ID NO: 318509
gaugcaggcguuuagagaa

SEQ ID NO: 568098 - RNA, 19 nt, Artificial Sequence
  Description of Artificial Sequence: Synthetic oligonucleotide
  Antisense strand to SEQ ID NO: 568097
uucucuaaacgccugcauc

SEQ ID NO: 568099 - RNA, 19 nt, Artificial Sequence
  Description of Artificial Sequence: Synthetic oligonucleotide
  Sense strand starting at position 3528 of SEQ ID NO: 318509
aucugugacucaucagaag

SEQ ID NO: 568100 - RNA, 19 nt, Artificial Sequence
  Description of Artificial Sequence: Synthetic oligonucleotide
  Antisense strand to SEQ ID NO: 568099
cuucugaugagucacagau

SEQ ID NO: 568101 - RNA, 19 nt, Artificial Sequence
  Description of Artificial Sequence: Synthetic oligonucleotide
  Sense strand starting at position 3702 of SEQ ID NO: 318509
aggcgcgaaaucuacaaau

SEQ ID NO: 568102 - RNA, 19 nt, Artificial Sequence
  Description of Artificial Sequence: Synthetic oligonucleotide
  Antisense strand to SEQ ID NO: 568101
auuuguagauuucgcgccu

SEQ ID NO: 568103 - RNA, 19 nt, Artificial Sequence
  Description of Artificial Sequence: Synthetic oligonucleotide
  Sense strand starting at position 3759 of SEQ ID NO: 318509
uagggaaauugacucgacu

SEQ ID NO: 568104 - RNA, 19 nt, Artificial Sequence
  Description of Artificial Sequence: Synthetic oligonucleotide
  Antisense strand to SEQ ID NO: 568103
agucgagucaauuucccua

SEQ ID NO: 568105 - RNA, 19 nt, Artificial Sequence
  Description of Artificial Sequence: Synthetic oligonucleotide
  Sense strand starting at position 3899 of SEQ ID NO: 318509
cccaaauuaugacuguaga

SEQ ID NO: 568106 - RNA, 19 nt, Artificial Sequence
  Description of Artificial Sequence: Synthetic oligonucleotide
  Antisense strand to SEQ ID NO: 568105
ucuacagucauaauuuggg

SEQ ID NO: 568107 - RNA, 19 nt, Artificial Sequence
  Description of Artificial Sequence: Synthetic oligonucleotide
  Sense strand starting at position 3962 of SEQ ID NO: 318509
caagcugguuauucugaga

SEQ ID NO: 568108 - RNA, 19 nt, Artificial Sequence
  Description of Artificial Sequence: Synthetic oligonucleotide
  Antisense strand to SEQ ID NO: 568107
ucucagaauaaccagcuug

SEQ ID NO: 568109 - RNA, 19 nt, Artificial Sequence
  Description of Artificial Sequence: Synthetic oligonucleotide
  Sense strand starting at position 164 of SEQ ID NO: 318510
gguuccuggccuuaaggaa

SEQ ID NO: 568110 - RNA, 19 nt, Artificial Sequence
  Description of Artificial Sequence: Synthetic oligonucleotide
  Antisense strand to SEQ ID NO: 568109
uuccuuaaggccaggaacc

SEQ ID NO: 568111 - RNA, 19 nt, Artificial Sequence
  Description of Artificial Sequence: Synthetic oligonucleotide
  Sense strand starting at position 235 of SEQ ID NO: 318510
aauuguuugagggaguucu

SEQ ID NO: 568112 - RNA, 19 nt, Artificial Sequence
  Description of Artificial Sequence: Synthetic oligonucleotide
  Antisense strand to SEQ ID NO: 568111
agaacucccucaaacaauu

SEQ ID NO: 568113 - RNA, 19 nt, Artificial Sequence
  Description of Artificial Sequence: Synthetic oligonucleotide
  Sense strand starting at position 245 of SEQ ID NO: 318510
gggaguucuaguuagcuaa

SEQ ID NO: 568114 - RNA, 19 nt, Artificial Sequence
  Description of Artificial Sequence: Synthetic oligonucleotide
  Antisense strand to SEQ ID NO: 568113
uuagcuaacuagaacuccc

SEQ ID NO: 568115 - RNA, 19 nt, Artificial Sequence
  Description of Artificial Sequence: Synthetic oligonucleotide
  Sense strand starting at position 281 of SEQ ID NO: 318510
ccaaguagucaguacuuau

SEQ ID NO: 568116 - RNA, 19 nt, Artificial Sequence
  Description of Artificial Sequence: Synthetic oligonucleotide
  Antisense strand to SEQ ID NO: 568115
auaaguacugacuacuugg

SEQ ID NO: 568117 - RNA, 19 nt, Artificial Sequence
  Description of Artificial Sequence: Synthetic oligonucleotide
  Sense strand starting at position 284 of SEQ ID NO: 318510
aguagucaguacuuaugaa

SEQ ID NO: 568118 - RNA, 19 nt, Artificial Sequence
  Description of Artificial Sequence: Synthetic oligonucleotide
  Antisense strand to SEQ ID NO: 568117
uucauaaguacugacuacu

SEQ ID NO: 568119 - RNA, 19 nt, Artificial Sequence
  Description of Artificial Sequence: Synthetic oligonucleotide
  Sense strand starting at position 285 of SEQ ID NO: 318510
guagucaguacuuaugaaa

SEQ ID NO: 568120 - RNA, 19 nt, Artificial Sequence
  Description of Artificial Sequence: Synthetic oligonucleotide
  Antisense strand to SEQ ID NO: 568119
uuucauaaguacugacuac

SEQ ID NO: 568121 - RNA, 19 nt, Artificial Sequence
  Description of Artificial Sequence: Synthetic oligonucleotide
  Sense strand starting at position 296 of SEQ ID NO: 318510
uuaugaaaggcccauucua

SEQ ID NO: 568122 - RNA, 19 nt, Artificial Sequence
  Description of Artificial Sequence: Synthetic oligonucleotide
  Antisense strand to SEQ ID NO: 568121
uagaaugggccuuucauaa

SEQ ID NO: 568123 - RNA, 19 nt, Artificial Sequence
  Description of Artificial Sequence: Synthetic oligonucleotide
  Sense strand starting at position 469 of SEQ ID NO: 318510
agcugaaugucaucacaau

SEQ ID NO: 568124 - RNA, 19 nt, Artificial Sequence
  Description of Artificial Sequence: Synthetic oligonucleotide
  Antisense strand to SEQ ID NO: 568123
auugugaugacauucagcu

SEQ ID NO: 568125 - RNA, 19 nt, Artificial Sequence
  Description of Artificial Sequence: Synthetic oligonucleotide
  Sense strand starting at position 470 of SEQ ID NO: 318510
gcugaaugucaucacaaug

SEQ ID NO: 568126 - RNA, 19 nt, Artificial Sequence
  Description of Artificial Sequence: Synthetic oligonucleotide
  Antisense strand to SEQ ID NO: 568125
cauugugaugacauucagc

SEQ ID NO: 568127 - RNA, 19 nt, Artificial Sequence
  Description of Artificial Sequence: Synthetic oligonucleotide
  Sense strand starting at position 690 of SEQ ID NO: 318510
acgguuccgagucaugaua

SEQ ID NO: 568128 - RNA, 19 nt, Artificial Sequence
  Description of Artificial Sequence: Synthetic oligonucleotide
  Antisense strand to SEQ ID NO: 568127
uaucaugacucggaaccgu

SEQ ID NO: 568129 - RNA, 19 nt, Artificial Sequence
  Description of Artificial Sequence: Synthetic oligonucleotide
  Sense strand starting at position 760 of SEQ ID NO: 318510
ucccuauuugucggacacu

SEQ ID NO: 568130 - RNA, 19 nt, Artificial Sequence
  Description of Artificial Sequence: Synthetic oligonucleotide
  Antisense strand to SEQ ID NO: 568129
aguguccgacaaauaggga

SEQ ID NO: 568131 - RNA, 19 nt, Artificial Sequence
  Description of Artificial Sequence: Synthetic oligonucleotide
  Sense strand starting at position 905 of SEQ ID NO: 318510
ggcguucugcccguucuua

SEQ ID NO: 568132 - RNA, 19 nt, Artificial Sequence
  Description of Artificial Sequence: Synthetic oligonucleotide
  Antisense strand to SEQ ID NO: 568131
uaagaacgggcagaacgcc

SEQ ID NO: 568133 - RNA, 19 nt, Artificial Sequence
  Description of Artificial Sequence: Synthetic oligonucleotide
  Sense strand starting at position 906 of SEQ ID NO: 318510
gcguucugcccguucuuaa

SEQ ID NO: 568134 - RNA, 19 nt, Artificial Sequence
  Description of Artificial Sequence: Synthetic oligonucleotide
  Antisense strand to SEQ ID NO: 568133
uuaagaacgggcagaacgc

SEQ ID NO: 568135 - RNA, 19 nt, Artificial Sequence
  Description of Artificial Sequence: Synthetic oligonucleotide
  Sense strand starting at position 965 of SEQ ID NO: 318510
cuucuuuaaccacgugaag

SEQ ID NO: 568136 - RNA, 19 nt, Artificial Sequence
  Description of Artificial Sequence: Synthetic oligonucleotide
  Antisense strand to SEQ ID NO: 568135
cuucacgugguuaaagaag

SEQ ID NO: 568137 - RNA, 19 nt, Artificial Sequence
  Description of Artificial Sequence: Synthetic oligonucleotide
  Sense strand starting at position 980 of SEQ ID NO: 318510
gaaguacuuguaugaacua

SEQ ID NO: 568138 - RNA, 19 nt, Artificial Sequence
  Description of Artificial Sequence: Synthetic oligonucleotide
  Antisense strand to SEQ ID NO: 568137
uaguucauacaaguacuuc

SEQ ID NO: 568139 - RNA, 19 nt, Artificial Sequence
  Description of Artificial Sequence: Synthetic oligonucleotide
  Sense strand starting at position 2161 of SEQ ID NO: 318510
gcgugaacccguguuccca

SEQ ID NO: 568140 - RNA, 19 nt, Artificial Sequence
  Description of Artificial Sequence: Synthetic oligonucleotide
  Antisense strand to SEQ ID NO: 568139
ugggaacacggguucacgc

SEQ ID NO: 568141 - RNA, 19 nt, Artificial Sequence
  Description of Artificial Sequence: Synthetic oligonucleotide
  Sense strand starting at position 2296 of SEQ ID NO: 318510
auggacaaauguuucugaa

SEQ ID NO: 568142 - RNA, 19 nt, Artificial Sequence
  Description of Artificial Sequence: Synthetic oligonucleotide
  Antisense strand to SEQ ID NO: 568141
uucagaaacauuuguccau

SEQ ID NO: 568143 - RNA, 19 nt, Artificial Sequence
  Description of Artificial Sequence: Synthetic oligonucleotide
  Sense strand starting at position 2316 of SEQ ID NO: 318510
aacagcuuuguugaggaau

SEQ ID NO: 568144 - RNA, 19 nt, Artificial Sequence
  Description of Artificial Sequence: Synthetic oligonucleotide
  Antisense strand to SEQ ID NO: 568143
auuccucaacaaagcuguu

SEQ ID NO: 568145 - RNA, 19 nt, Artificial Sequence
  Description of Artificial Sequence: Synthetic oligonucleotide
  Sense strand starting at position 2319 of SEQ ID NO: 318510
agcuuuguugaggaauggu

SEQ ID NO: 568146 - RNA, 19 nt, Artificial Sequence
  Description of Artificial Sequence: Synthetic oligonucleotide
  Antisense strand to SEQ ID NO: 568145
accauuccucaacaaagcu

SEQ ID NO: 568147 - RNA, 19 nt, Artificial Sequence
  Description of Artificial Sequence: Synthetic oligonucleotide
  Sense strand starting at position 2368 of SEQ ID NO: 318510
ugaacaauuugauagguuu

SEQ ID NO: 568148 - RNA, 19 nt, Artificial Sequence
  Description of Artificial Sequence: Synthetic oligonucleotide
  Antisense strand to SEQ ID NO: 568147
aaaccuaucaaauuguuca

SEQ ID NO: 568149 - RNA, 19 nt, Artificial Sequence
  Description of Artificial Sequence: Synthetic oligonucleotide
  Sense strand starting at position 2498 of SEQ ID NO: 318510
cuagaaguucugcaucugu

SEQ ID NO: 568150 - RNA, 19 nt, Artificial Sequence
  Description of Artificial Sequence: Synthetic oligonucleotide
  Antisense strand to SEQ ID NO: 568149
acagaugcagaacuucuag

SEQ ID NO: 568151 - RNA, 19 nt, Artificial Sequence
  Description of Artificial Sequence: Synthetic oligonucleotide
  Sense strand starting at position 2506 of SEQ ID NO: 318510
ucugcaucuguguucguga

SEQ ID NO: 568152 - RNA, 19 nt, Artificial Sequence
  Description of Artificial Sequence: Synthetic oligonucleotide
  Antisense strand to SEQ ID NO: 568151
ucacgaacacagaugcaga

SEQ ID NO: 568153 - RNA, 19 nt, Artificial Sequence
  Description of Artificial Sequence: Synthetic oligonucleotide
  Sense strand starting at position 2511 of SEQ ID NO: 318510
aucuguguucgugagagau

SEQ ID NO: 568154 - RNA, 19 nt, Artificial Sequence
  Description of Artificial Sequence: Synthetic oligonucleotide
  Antisense strand to SEQ ID NO: 568153
aucucucacgaacacagau

SEQ ID NO: 568155 - RNA, 19 nt, Artificial Sequence
  Description of Artificial Sequence: Synthetic oligonucleotide
  Sense strand starting at position 2515 of SEQ ID NO: 318510
guguucgugagagauauug

SEQ ID NO: 568156 - RNA, 19 nt, Artificial Sequence
  Description of Artificial Sequence: Synthetic oligonucleotide
  Antisense strand to SEQ ID NO: 568155
caauaucucucacgaacac

SEQ ID NO: 568157 - RNA, 19 nt, Artificial Sequence
  Description of Artificial Sequence: Synthetic oligonucleotide
  Sense strand starting at position 2517 of SEQ ID NO: 318510
guucgugagagauauuguu

SEQ ID NO: 568158 - RNA, 19 nt, Artificial Sequence
  Description of Artificial Sequence: Synthetic oligonucleotide
  Antisense strand to SEQ ID NO: 568157
aacaauaucucucacgaac

SEQ ID NO: 568159 - RNA, 19 nt, Artificial Sequence
  Description of Artificial Sequence: Synthetic oligonucleotide
  Sense strand starting at position 2523 of SEQ ID NO: 318510
gagagauauuguuucguag

SEQ ID NO: 568160 - RNA, 19 nt, Artificial Sequence
  Description of Artificial Sequence: Synthetic oligonucleotide
  Antisense strand to SEQ ID NO: 568159
cuacgaaacaauaucucuc

SEQ ID NO: 568161 - RNA, 19 nt, Artificial Sequence
  Description of Artificial Sequence: Synthetic oligonucleotide
  Sense strand starting at position 2782 of SEQ ID NO: 318510
acagauaaauacguuggua

SEQ ID NO: 568162 - RNA, 19 nt, Artificial Sequence
  Description of Artificial Sequence: Synthetic oligonucleotide
  Antisense strand to SEQ ID NO: 568161
uaccaacguauuuaucugu

SEQ ID NO: 568163 - RNA, 19 nt, Artificial Sequence
  Description of Artificial Sequence: Synthetic oligonucleotide
  Sense strand starting at position 2784 of SEQ ID NO: 318510
agauaaauacguugguauc

SEQ ID NO: 568164 - RNA, 19 nt, Artificial Sequence
  Description of Artificial Sequence: Synthetic oligonucleotide
  Antisense strand to SEQ ID NO: 568163
gauaccaacguauuuaucu

SEQ ID NO: 568165 - RNA, 19 nt, Artificial Sequence
  Description of Artificial Sequence: Synthetic oligonucleotide
  Sense strand starting at position 2785 of SEQ ID NO: 318510
gauaaauacguugguauca

SEQ ID NO: 568166 - RNA, 19 nt, Artificial Sequence
  Description of Artificial Sequence: Synthetic oligonucleotide
  Antisense strand to SEQ ID NO: 568165
ugauaccaacguauuuauc

SEQ ID NO: 568167 - RNA, 19 nt, Artificial Sequence
  Description of Artificial Sequence: Synthetic oligonucleotide
  Sense strand starting at position 2786 of SEQ ID NO: 318510
auaaauacguugguaucau

SEQ ID NO: 568168 - RNA, 19 nt, Artificial Sequence
  Description of Artificial Sequence: Synthetic oligonucleotide
  Antisense strand to SEQ ID NO: 568167
augauaccaacguauuuau

SEQ ID NO: 568169 - RNA, 19 nt, Artificial Sequence
  Description of Artificial Sequence: Synthetic oligonucleotide
  Sense strand starting at position 2808 of SEQ ID NO: 318510
cucuauucuuugccugaga

SEQ ID NO: 568170 - RNA, 19 nt, Artificial Sequence
  Description of Artificial Sequence: Synthetic oligonucleotide
  Antisense strand to SEQ ID NO: 568169
ucucaggcaaagaauagag

SEQ ID NO: 568171 - RNA, 19 nt, Artificial Sequence
  Description of Artificial Sequence: Synthetic oligonucleotide
  Sense strand starting at position 2809 of SEQ ID NO: 318510
ucuauucuuugccugagag

SEQ ID NO: 568172 - RNA, 19 nt, Artificial Sequence
  Description of Artificial Sequence: Synthetic oligonucleotide
  Antisense strand to SEQ ID NO: 568171
cucucaggcaaagaauaga

SEQ ID NO: 568173 - RNA, 19 nt, Artificial Sequence
  Description of Artificial Sequence: Synthetic oligonucleotide
  Sense strand starting at position 2811 of SEQ ID NO: 318510
uauucuuugccugagagug

SEQ ID NO: 568174 - RNA, 19 nt, Artificial Sequence
  Description of Artificial Sequence: Synthetic oligonucleotide
  Antisense strand to SEQ ID NO: 568173
cacucucaggcaaagaaua

SEQ ID NO: 568175 - RNA, 19 nt, Artificial Sequence
  Description of Artificial Sequence: Synthetic oligonucleotide
  Sense strand starting at position 3213 of SEQ ID NO: 318510
gcgggacuaauuuguucua

SEQ ID NO: 568176 - RNA, 19 nt, Artificial Sequence
  Description of Artificial Sequence: Synthetic oligonucleotide
  Antisense strand to SEQ ID NO: 568175
uagaacaaauuagucccgc

SEQ ID NO: 568177 - RNA, 19 nt, Artificial Sequence
  Description of Artificial Sequence: Synthetic oligonucleotide
  Sense strand starting at position 3339 of SEQ ID NO: 318510
uugauaauuuggcauaauc

SEQ ID NO: 568178 - RNA, 19 nt, Artificial Sequence
  Description of Artificial Sequence: Synthetic oligonucleotide
  Antisense strand to SEQ ID NO: 568177
gauuaugccaaauuaucaa

SEQ ID NO: 568179 - RNA, 19 nt, Artificial Sequence
  Description of Artificial Sequence: Synthetic oligonucleotide
  Sense strand starting at position 3390 of SEQ ID NO: 318510
ucaguuccaggauguauua

SEQ ID NO: 568180 - RNA, 19 nt, Artificial Sequence
  Description of Artificial Sequence: Synthetic oligonucleotide
  Antisense strand to SEQ ID NO: 568179
uaauacauccuggaacuga

SEQ ID NO: 568181 - RNA, 19 nt, Artificial Sequence
  Description of Artificial Sequence: Synthetic oligonucleotide
  Sense strand starting at position 3614 of SEQ ID NO: 318510
aguuucuuaaaguagguua

SEQ ID NO: 568182 - RNA, 19 nt, Artificial Sequence
  Description of Artificial Sequence: Synthetic oligonucleotide
  Antisense strand to SEQ ID NO: 568181
uaaccuacuuuaagaaacu

SEQ ID NO: 568183 - RNA, 19 nt, Artificial Sequence
  Description of Artificial Sequence: Synthetic oligonucleotide
  Sense strand starting at position 3625 of SEQ ID NO: 318510
guagguuauuaggucacua

SEQ ID NO: 568184 - RNA, 19 nt, Artificial Sequence
  Description of Artificial Sequence: Synthetic oligonucleotide
  Antisense strand to SEQ ID NO: 568183
uagugaccuaauaaccuac

SEQ ID NO: 568185 - RNA, 19 nt, Artificial Sequence
  Description of Artificial Sequence: Synthetic oligonucleotide
  Sense strand starting at position 3627 of SEQ ID NO: 318510
agguuauuaggucacuaau

SEQ ID NO: 568186 - RNA, 19 nt, Artificial Sequence
  Description of Artificial Sequence: Synthetic oligonucleotide
  Antisense strand to SEQ ID NO: 568185
auuagugaccuaauaaccu

SEQ ID NO: 568187 - RNA, 19 nt, Artificial Sequence
  Description of Artificial Sequence: Synthetic oligonucleotide
  Sense strand starting at position 3944 of SEQ ID NO: 318510
cccauauugguuuaagucu

SEQ ID NO: 568188 - RNA, 19 nt, Artificial Sequence
  Description of Artificial Sequence: Synthetic oligonucleotide
  Antisense strand to SEQ ID NO: 568187
agacuuaaaccaauauggg

SEQ ID NO: 568189 - RNA, 19 nt, Artificial Sequence
  Description of Artificial Sequence: Synthetic oligonucleotide
  Sense strand starting at position 8 of SEQ ID NO: 318511
acauccauguggccugaaa

SEQ ID NO: 568190 - RNA, 19 nt, Artificial Sequence
  Description of Artificial Sequence: Synthetic oligonucleotide
  Antisense strand to SEQ ID NO: 568189
uuucaggccacauggaugu

SEQ ID NO: 568191 - RNA, 19 nt, Artificial Sequence
  Description of Artificial Sequence: Synthetic oligonucleotide
  Sense strand starting at position 19 of SEQ ID NO: 318511
gccugaaagccucaaucua

SEQ ID NO: 568192 - RNA, 19 nt, Artificial Sequence
  Description of Artificial Sequence: Synthetic oligonucleotide
  Antisense strand to SEQ ID NO: 568191
uagauugaggcuuucaggc

SEQ ID NO: 568193 - RNA, 19 nt, Artificial Sequence
  Description of Artificial Sequence: Synthetic oligonucleotide
  Sense strand starting at position 442 of SEQ ID NO: 318511
aaaggaucugcuugagguc

SEQ ID NO: 568194 - RNA, 19 nt, Artificial Sequence
  Description of Artificial Sequence: Synthetic oligonucleotide
  Antisense strand to SEQ ID NO: 568193
gaccucaagcagauccuuu

SEQ ID NO: 568195 - RNA, 19 nt, Artificial Sequence
  Description of Artificial Sequence: Synthetic oligonucleotide
  Sense strand starting at position 668 of SEQ ID NO: 318511
ucuagaagucaacgcagaa

SEQ ID NO: 568196 - RNA, 19 nt, Artificial Sequence
  Description of Artificial Sequence: Synthetic oligonucleotide
  Antisense strand to SEQ ID NO: 568195
uucugcguugacuucuaga

SEQ ID NO: 568197 - RNA, 19 nt, Artificial Sequence
  Description of Artificial Sequence: Synthetic oligonucleotide
  Sense strand starting at position 971 of SEQ ID NO: 318511
aaacccagaguuuguguua

SEQ ID NO: 568198 - RNA, 19 nt, Artificial Sequence
  Description of Artificial Sequence: Synthetic oligonucleotide
  Antisense strand to SEQ ID NO: 568197
uaacacaaacucuggguuu

SEQ ID NO: 568199 - RNA, 19 nt, Artificial Sequence
  Description of Artificial Sequence: Synthetic oligonucleotide
  Sense strand starting at position 974 of SEQ ID NO: 318511
cccagaguuuguguuacaa

SEQ ID NO: 568200 - RNA, 19 nt, Artificial Sequence
  Description of Artificial Sequence: Synthetic oligonucleotide
  Antisense strand to SEQ ID NO: 568199
uuguaacacaaacucuggg

SEQ ID NO: 568201 - RNA, 19 nt, Artificial Sequence
  Description of Artificial Sequence: Synthetic oligonucleotide
  Sense strand starting at position 1079 of SEQ ID NO: 318511
cucagauggccuuggacua

SEQ ID NO: 568202 - RNA, 19 nt, Artificial Sequence
  Description of Artificial Sequence: Synthetic oligonucleotide
  Antisense strand to SEQ ID NO: 568201
uaguccaaggccaucugag

SEQ ID NO: 568203 - RNA, 19 nt, Artificial Sequence
  Description of Artificial Sequence: Synthetic oligonucleotide
  Sense strand starting at position 1080 of SEQ ID NO: 318511
ucagauggccuuggacuau

SEQ ID NO: 568204 - RNA, 19 nt, Artificial Sequence
  Description of Artificial Sequence: Synthetic oligonucleotide
  Antisense strand to SEQ ID NO: 568203
auaguccaaggccaucuga

SEQ ID NO: 568205 - RNA, 19 nt, Artificial Sequence
  Description of Artificial Sequence: Synthetic oligonucleotide
  Sense strand starting at position 1238 of SEQ ID NO: 318511
uuaguagacuguuuauugu

SEQ ID NO: 568206 - RNA, 19 nt, Artificial Sequence
  Description of Artificial Sequence: Synthetic oligonucleotide
  Antisense strand to SEQ ID NO: 568205
acaauaaacagucuacuaa

SEQ ID NO: 568207 - RNA, 19 nt, Artificial Sequence
  Description of Artificial Sequence: Synthetic oligonucleotide
  Sense strand starting at position 1241 of SEQ ID NO: 318511
guagacuguuuauugucau

SEQ ID NO: 568208 - RNA, 19 nt, Artificial Sequence
  Description of Artificial Sequence: Synthetic oligonucleotide
  Antisense strand to SEQ ID NO: 568207
augacaauaaacagucuac

SEQ ID NO: 568209 - RNA, 19 nt, Artificial Sequence
  Description of Artificial Sequence: Synthetic oligonucleotide
  Sense strand starting at position 1254 of SEQ ID NO: 318511
ugucauucugggcagguua

SEQ ID NO: 568210 - RNA, 19 nt, Artificial Sequence
  Description of Artificial Sequence: Synthetic oligonucleotide
  Antisense strand to SEQ ID NO: 568209
uaaccugcccagaaugaca

SEQ ID NO: 568211 - RNA, 19 nt, Artificial Sequence
  Description of Artificial Sequence: Synthetic oligonucleotide
  Sense strand starting at position 1267 of SEQ ID NO: 318511
agguuagagaccugugaca

SEQ ID NO: 568212 - RNA, 19 nt, Artificial Sequence
  Description of Artificial Sequence: Synthetic oligonucleotide
  Antisense strand to SEQ ID NO: 568211
ugucacaggucucuaaccu

SEQ ID NO: 568213 - RNA, 19 nt, Artificial Sequence
  Description of Artificial Sequence: Synthetic oligonucleotide
  Sense strand starting at position 1269 of SEQ ID NO: 318511
guuagagaccugugacaga

SEQ ID NO: 568214 - RNA, 19 nt, Artificial Sequence
  Description of Artificial Sequence: Synthetic oligonucleotide
  Antisense strand to SEQ ID NO: 568213
ucugucacaggucucuaac

SEQ ID NO: 568215 - RNA, 19 nt, Artificial Sequence
  Description of Artificial Sequence: Synthetic oligonucleotide
  Sense strand starting at position 1276 of SEQ ID NO: 318511
accugugacagacgugaaa

SEQ ID NO: 568216 - RNA, 19 nt, Artificial Sequence
  Description of Artificial Sequence: Synthetic oligonucleotide
  Antisense strand to SEQ ID NO: 568215
uuucacgucugucacaggu

SEQ ID NO: 568217 - RNA, 19 nt, Artificial Sequence
  Description of Artificial Sequence: Synthetic oligonucleotide
  Sense strand starting at position 1278 of SEQ ID NO: 318511
cugugacagacgugaaagu

SEQ ID NO: 568218 - RNA, 19 nt, Artificial Sequence
  Description of Artificial Sequence: Synthetic oligonucleotide
  Antisense strand to SEQ ID NO: 568217
acuuucacgucugucacag

SEQ ID NO: 568219 - RNA, 19 nt, Artificial Sequence
  Description of Artificial Sequence: Synthetic oligonucleotide
  Sense strand starting at position 2195 of SEQ ID NO: 318511
uuggguuucccuuaaggga

SEQ ID NO: 568220 - RNA, 19 nt, Artificial Sequence
  Description of Artificial Sequence: Synthetic oligonucleotide
  Antisense strand to SEQ ID NO: 568219
ucccuuaagggaaacccaa

SEQ ID NO: 568221 - RNA, 19 nt, Artificial Sequence
  Description of Artificial Sequence: Synthetic oligonucleotide
  Sense strand starting at position 2209 of SEQ ID NO: 318511
agggacugcuucuuuauca

SEQ ID NO: 568222 - RNA, 19 nt, Artificial Sequence
  Description of Artificial Sequence: Synthetic oligonucleotide
  Antisense strand to SEQ ID NO: 568221
ugauaaagaagcagucccu

SEQ ID NO: 568223 - RNA, 19 nt, Artificial Sequence
  Description of Artificial Sequence: Synthetic oligonucleotide
  Sense strand starting at position 2210 of SEQ ID NO: 318511
gggacugcuucuuuaucau

SEQ ID NO: 568224 - RNA, 19 nt, Artificial Sequence
  Description of Artificial Sequence: Synthetic oligonucleotide
  Antisense strand to SEQ ID NO: 568223
augauaaagaagcaguccc

SEQ ID NO: 568225 - RNA, 19 nt, Artificial Sequence
  Description of Artificial Sequence: Synthetic oligonucleotide
  Sense strand starting at position 2270 of SEQ ID NO: 318511
cgcagucauuuacccaauu

SEQ ID NO: 568226 - RNA, 19 nt, Artificial Sequence
  Description of Artificial Sequence: Synthetic oligonucleotide
  Antisense strand to SEQ ID NO: 568225
aauuggguaaaugacugcg

SEQ ID NO: 568227 - RNA, 19 nt, Artificial Sequence
  Description of Artificial Sequence: Synthetic oligonucleotide
  Sense strand starting at position 2339 of SEQ ID NO: 318511
agugccacgaccugauuua

SEQ ID NO: 568228 - RNA, 19 nt, Artificial Sequence
  Description of Artificial Sequence: Synthetic oligonucleotide
  Antisense strand to SEQ ID NO: 568227
uaaaucaggucguggcacu

SEQ ID NO: 568229 - RNA, 19 nt, Artificial Sequence
  Description of Artificial Sequence: Synthetic oligonucleotide
  Sense strand starting at position 2384 of SEQ ID NO: 318511
gcgcacucugucuucuuua

SEQ ID NO: 568230 - RNA, 19 nt, Artificial Sequence
  Description of Artificial Sequence: Synthetic oligonucleotide
  Antisense strand to SEQ ID NO: 568229
uaaagaagacagagugcgc

SEQ ID NO: 568231 - RNA, 19 nt, Artificial Sequence
  Description of Artificial Sequence: Synthetic oligonucleotide
  Sense strand starting at position 2754 of SEQ ID NO: 318511
ggcagagugacuuguccug

SEQ ID NO: 568232 - RNA, 19 nt, Artificial Sequence
  Description of Artificial Sequence: Synthetic oligonucleotide
  Antisense strand to SEQ ID NO: 568231
caggacaagucacucugcc

SEQ ID NO: 568233 - RNA, 19 nt, Artificial Sequence
  Description of Artificial Sequence: Synthetic oligonucleotide
  Sense strand starting at position 2761 of SEQ ID NO: 318511
ugacuuguccugcagauac

SEQ ID NO: 568234 - RNA, 19 nt, Artificial Sequence
  Description of Artificial Sequence: Synthetic oligonucleotide
  Antisense strand to SEQ ID NO: 568233
guaucugcaggacaaguca

SEQ ID NO: 568235 - RNA, 19 nt, Artificial Sequence
  Description of Artificial Sequence: Synthetic oligonucleotide
  Sense strand starting at position 2763 of SEQ ID NO: 318511
acuuguccugcagauacaa

SEQ ID NO: 568236 - RNA, 19 nt, Artificial Sequence
  Description of Artificial Sequence: Synthetic oligonucleotide
  Antisense strand to SEQ ID NO: 568235
uuguaucugcaggacaagu

SEQ ID NO: 568237 - RNA, 19 nt, Artificial Sequence
  Description of Artificial Sequence: Synthetic oligonucleotide
  Sense strand starting at position 2863 of SEQ ID NO: 318511
aguugccauccauguagaa

SEQ ID NO: 568238 - RNA, 19 nt, Artificial Sequence
  Description of Artificial Sequence: Synthetic oligonucleotide
  Antisense strand to SEQ ID NO: 568237
uucuacauggauggcaacu

SEQ ID NO: 568239 - RNA, 19 nt, Artificial Sequence
  Description of Artificial Sequence: Synthetic oligonucleotide
  Sense strand starting at position 2875 of SEQ ID NO: 318511
uguagaaaccugcacaugu

SEQ ID NO: 568240 - RNA, 19 nt, Artificial Sequence
  Description of Artificial Sequence: Synthetic oligonucleotide
  Antisense strand to SEQ ID NO: 568239
acaugugcagguuucuaca

SEQ ID NO: 568241 - RNA, 19 nt, Artificial Sequence
  Description of Artificial Sequence: Synthetic oligonucleotide
  Sense strand starting at position 2905 of SEQ ID NO: 318511
gugaguuggcaucacaggu

SEQ ID NO: 568242 - RNA, 19 nt, Artificial Sequence
  Description of Artificial Sequence: Synthetic oligonucleotide
  Antisense strand to SEQ ID NO: 568241
accugugaugccaacucac

SEQ ID NO: 568243 - RNA, 19 nt, Artificial Sequence
  Description of Artificial Sequence: Synthetic oligonucleotide
  Sense strand starting at position 2928 of SEQ ID NO: 318511
ggacaaagguuagauauuc

SEQ ID NO: 568244 - RNA, 19 nt, Artificial Sequence
  Description of Artificial Sequence: Synthetic oligonucleotide
  Antisense strand to SEQ ID NO: 568243
gaauaucuaaccuuugucc

SEQ ID NO: 568245 - RNA, 19 nt, Artificial Sequence
  Description of Artificial Sequence: Synthetic oligonucleotide
  Sense strand starting at position 3007 of SEQ ID NO: 318511
guggauuaaugauccaaac

SEQ ID NO: 568246 - RNA, 19 nt, Artificial Sequence
  Description of Artificial Sequence: Synthetic oligonucleotide
  Antisense strand to SEQ ID NO: 568245
guuuggaucauuaauccac

SEQ ID NO: 568247 - RNA, 19 nt, Artificial Sequence
  Description of Artificial Sequence: Synthetic oligonucleotide
  Sense strand starting at position 3262 of SEQ ID NO: 318511
gaaguuuaagccuggacaa

SEQ ID NO: 568248 - RNA, 19 nt, Artificial Sequence
  Description of Artificial Sequence: Synthetic oligonucleotide
  Antisense strand to SEQ ID NO: 568247
uuguccaggcuuaaacuuc

SEQ ID NO: 568249 - RNA, 19 nt, Artificial Sequence
  Description of Artificial Sequence: Synthetic oligonucleotide
  Sense strand starting at position 3264 of SEQ ID NO: 318511
aguuuaagccuggacaaca

SEQ ID NO: 568250 - RNA, 19 nt, Artificial Sequence
  Description of Artificial Sequence: Synthetic oligonucleotide
  Antisense strand to SEQ ID NO: 568249
uguuguccaggcuuaaacu

SEQ ID NO: 568251 - RNA, 19 nt, Artificial Sequence
  Description of Artificial Sequence: Synthetic oligonucleotide
  Sense strand starting at position 3332 of SEQ ID NO: 318511
uggcguauggucccagcua

SEQ ID NO: 568252 - RNA, 19 nt, Artificial Sequence
  Description of Artificial Sequence: Synthetic oligonucleotide
  Antisense strand to SEQ ID NO: 568251
uagcugggaccauacgcca

SEQ ID NO: 568253 - RNA, 19 nt, Artificial Sequence
  Description of Artificial Sequence: Synthetic oligonucleotide
  Sense strand starting at position 3533 of SEQ ID NO: 318511
gcuugugagcaaggagaua

SEQ ID NO: 568254 - RNA, 19 nt, Artificial Sequence
  Description of Artificial Sequence: Synthetic oligonucleotide
  Antisense strand to SEQ ID NO: 568253
uaucuccuugcucacaagc

SEQ ID NO: 568255 - RNA, 19 nt, Artificial Sequence
  Description of Artificial Sequence: Synthetic oligonucleotide
  Sense strand starting at position 3663 of SEQ ID NO: 318511
uugacuaguugccugcaga

SEQ ID NO: 568256 - RNA, 19 nt, Artificial Sequence
  Description of Artificial Sequence: Synthetic oligonucleotide
  Antisense strand to SEQ ID NO: 568255
ucugcaggcaacuagucaa

SEQ ID NO: 568257 - RNA, 19 nt, Artificial Sequence
  Description of Artificial Sequence: Synthetic oligonucleotide
  Sense strand starting at position 3664 of SEQ ID NO: 318511
ugacuaguugccugcagaa

SEQ ID NO: 568258 - RNA, 19 nt, Artificial Sequence
  Description of Artificial Sequence: Synthetic oligonucleotide
  Antisense strand to SEQ ID NO: 568257
uucugcaggcaacuaguca

SEQ ID NO: 568259 - RNA, 19 nt, Artificial Sequence
  Description of Artificial Sequence: Synthetic oligonucleotide
  Sense strand starting at position 3666 of SEQ ID NO: 318511
acuaguugccugcagaaug

SEQ ID NO: 568260 - RNA, 19 nt, Artificial Sequence
  Description of Artificial Sequence: Synthetic oligonucleotide
  Antisense strand to SEQ ID NO: 568259
cauucugcaggcaacuagu

SEQ ID NO: 568261 - RNA, 19 nt, Artificial Sequence
  Description of Artificial Sequence: Synthetic oligonucleotide
  Sense strand starting at position 3689 of SEQ ID NO: 318511
uguggagagguuuaguaga

SEQ ID NO: 568262 - RNA, 19 nt, Artificial Sequence
  Description of Artificial Sequence: Synthetic oligonucleotide
  Antisense strand to SEQ ID NO: 568261
ucuacuaaaccucuccaca

SEQ ID NO: 568263 - RNA, 19 nt, Artificial Sequence
  Description of Artificial Sequence: Synthetic oligonucleotide
  Sense strand starting at position 3691 of SEQ ID NO: 318511
uggagagguuuaguagaua

SEQ ID NO: 568264 - RNA, 19 nt, Artificial Sequence
  Description of Artificial Sequence: Synthetic oligonucleotide
  Antisense strand to SEQ ID NO: 568263
uaucuacuaaaccucucca

SEQ ID NO: 568265 - RNA, 19 nt, Artificial Sequence
  Description of Artificial Sequence: Synthetic oligonucleotide
  Sense strand starting at position 3709 of SEQ ID NO: 318511
acaaaugugucaguugucu

SEQ ID NO: 568266 - RNA, 19 nt, Artificial Sequence
  Description of Artificial Sequence: Synthetic oligonucleotide
  Antisense strand to SEQ ID NO: 568265
agacaacugacacauuugu

SEQ ID NO: 568267 - RNA, 19 nt, Artificial Sequence
  Description of Artificial Sequence: Synthetic oligonucleotide
  Sense strand starting at position 3820 of SEQ ID NO: 318511
ggagguucugcugaccuga

SEQ ID NO: 568268 - RNA, 19 nt, Artificial Sequence
  Description of Artificial Sequence: Synthetic oligonucleotide
  Antisense strand to SEQ ID NO: 568267
ucaggucagcagaaccucc

SEQ ID NO: 568269 - RNA, 19 nt, Artificial Sequence
  Description of Artificial Sequence: Synthetic oligonucleotide
  Sense strand starting at position 175 of SEQ ID NO: 318512
cuaggucuuaugcagagga

SEQ ID NO: 568270 - RNA, 19 nt, Artificial Sequence
  Description of Artificial Sequence: Synthetic oligonucleotide
  Antisense strand to SEQ ID NO: 568269
uccucugcauaagaccuag

SEQ ID NO: 568271 - RNA, 19 nt, Artificial Sequence
  Description of Artificial Sequence: Synthetic oligonucleotide
  Sense strand starting at position 252 of SEQ ID NO: 318512
uuagcuacuuguuuaaaga

SEQ ID NO: 568272 - RNA, 19 nt, Artificial Sequence
  Description of Artificial Sequence: Synthetic oligonucleotide
  Antisense strand to SEQ ID NO: 568271
ucuuuaaacaaguagcuaa

SEQ ID NO: 568273 - RNA, 19 nt, Artificial Sequence
  Description of Artificial Sequence: Synthetic oligonucleotide
  Sense strand starting at position 260 of SEQ ID NO: 318512
uuguuuaaagauuguagga

SEQ ID NO: 568274 - RNA, 19 nt, Artificial Sequence
  Description of Artificial Sequence: Synthetic oligonucleotide
  Antisense strand to SEQ ID NO: 568273
uccuacaaucuuuaaacaa

SEQ ID NO: 568275 - RNA, 19 nt, Artificial Sequence
  Description of Artificial Sequence: Synthetic oligonucleotide
  Sense strand starting at position 337 of SEQ ID NO: 318512
ucagcuacucaagaaguau

SEQ ID NO: 568276 - RNA, 19 nt, Artificial Sequence
  Description of Artificial Sequence: Synthetic oligonucleotide
  Antisense strand to SEQ ID NO: 568275
auacuucuugaguagcuga

SEQ ID NO: 568277 - RNA, 19 nt, Artificial Sequence
  Description of Artificial Sequence: Synthetic oligonucleotide
  Sense strand starting at position 557 of SEQ ID NO: 318512
auagcuuuccuaugagagg

SEQ ID NO: 568278 - RNA, 19 nt, Artificial Sequence
  Description of Artificial Sequence: Synthetic oligonucleotide
  Antisense strand to SEQ ID NO: 568277
ccucucauaggaaagcuau

SEQ ID NO: 568279 - RNA, 19 nt, Artificial Sequence
  Description of Artificial Sequence: Synthetic oligonucleotide
  Sense strand starting at position 582 of SEQ ID NO: 318512
ucuauacugcaauagaguu

SEQ ID NO: 568280 - RNA, 19 nt, Artificial Sequence
  Description of Artificial Sequence: Synthetic oligonucleotide
  Antisense strand to SEQ ID NO: 568279
aacucuauugcaguauaga

SEQ ID NO: 568281 - RNA, 19 nt, Artificial Sequence
  Description of Artificial Sequence: Synthetic oligonucleotide
  Sense strand starting at position 747 of SEQ ID NO: 318512
gucucuguccuuuaagaag

SEQ ID NO: 568282 - RNA, 19 nt, Artificial Sequence
  Description of Artificial Sequence: Synthetic oligonucleotide
  Antisense strand to SEQ ID NO: 568281
cuucuuaaaggacagagac

SEQ ID NO: 568283 - RNA, 19 nt, Artificial Sequence
  Description of Artificial Sequence: Synthetic oligonucleotide
  Sense strand starting at position 913 of SEQ ID NO: 318512
agcauaauucuaggcaaau

SEQ ID NO: 568284 - RNA, 19 nt, Artificial Sequence
  Description of Artificial Sequence: Synthetic oligonucleotide
  Antisense strand to SEQ ID NO: 568283
auuugccuagaauuaugcu

SEQ ID NO: 568285 - RNA, 19 nt, Artificial Sequence
  Description of Artificial Sequence: Synthetic oligonucleotide
  Sense strand starting at position 914 of SEQ ID NO: 318512
gcauaauucuaggcaaaua

SEQ ID NO: 568286 - RNA, 19 nt, Artificial Sequence
  Description of Artificial Sequence: Synthetic oligonucleotide
  Antisense strand to SEQ ID NO: 568285
uauuugccuagaauuaugc

SEQ ID NO: 568287 - RNA, 19 nt, Artificial Sequence
  Description of Artificial Sequence: Synthetic oligonucleotide
  Sense strand starting at position 926 of SEQ ID NO: 318512
gcaaauauaucacugacag

SEQ ID NO: 568288 - RNA, 19 nt, Artificial Sequence
  Description of Artificial Sequence: Synthetic oligonucleotide
  Antisense strand to SEQ ID NO: 568287
cugucagugauauauuugc

SEQ ID NO: 568289 - RNA, 19 nt, Artificial Sequence
  Description of Artificial Sequence: Synthetic oligonucleotide
  Sense strand starting at position 1002 of SEQ ID NO: 318512
acacauaucuguuucgaca

SEQ ID NO: 568290 - RNA, 19 nt, Artificial Sequence
  Description of Artificial Sequence: Synthetic oligonucleotide
  Antisense strand to SEQ ID NO: 568289
ugucgaaacagauaugugu

SEQ ID NO: 568291 - RNA, 19 nt, Artificial Sequence
  Description of Artificial Sequence: Synthetic oligonucleotide
  Sense strand starting at position 1373 of SEQ ID NO: 318512
augccaacuguuuacauga

SEQ ID NO: 568292 - RNA, 19 nt, Artificial Sequence
  Description of Artificial Sequence: Synthetic oligonucleotide
  Antisense strand to SEQ ID NO: 568291
ucauguaaacaguuggcau

SEQ ID NO: 568293 - RNA, 19 nt, Artificial Sequence
  Description of Artificial Sequence: Synthetic oligonucleotide
  Sense strand starting at position 1985 of SEQ ID NO: 318512
ggagauaaguccucucuuu

SEQ ID NO: 568294 - RNA, 19 nt, Artificial Sequence
  Description of Artificial Sequence: Synthetic oligonucleotide
  Antisense strand to SEQ ID NO: 568293
aaagagaggacuuaucucc

SEQ ID NO: 568295 - RNA, 19 nt, Artificial Sequence
  Description of Artificial Sequence: Synthetic oligonucleotide
  Sense strand starting at position 2082 of SEQ ID NO: 318512
cuugccaguccugauaaca

SEQ ID NO: 568296 - RNA, 19 nt, Artificial Sequence
  Description of Artificial Sequence: Synthetic oligonucleotide
  Antisense strand to SEQ ID NO: 568295
uguuaucaggacuggcaag

SEQ ID NO: 568297 - RNA, 19 nt, Artificial Sequence
  Description of Artificial Sequence: Synthetic oligonucleotide
  Sense strand starting at position 2102 of SEQ ID NO: 318512
gcuuauuacagcugagaga

SEQ ID NO: 568298 - RNA, 19 nt, Artificial Sequence
  Description of Artificial Sequence: Synthetic oligonucleotide
  Antisense strand to SEQ ID NO: 568297
ucucucagcuguaauaagc

SEQ ID NO: 568299 - RNA, 19 nt, Artificial Sequence
  Description of Artificial Sequence: Synthetic oligonucleotide
  Sense strand starting at position 2109 of SEQ ID NO: 318512
acagcugagagauguaaau

SEQ ID NO: 568300 - RNA, 19 nt, Artificial Sequence
  Description of Artificial Sequence: Synthetic oligonucleotide
  Antisense strand to SEQ ID NO: 568299
auuuacaucucucagcugu

SEQ ID NO: 568301 - RNA, 19 nt, Artificial Sequence
  Description of Artificial Sequence: Synthetic oligonucleotide
  Sense strand starting at position 2374 of SEQ ID NO: 318512
guguguuaugguuauggaa

SEQ ID NO: 568302 - RNA, 19 nt, Artificial Sequence
  Description of Artificial Sequence: Synthetic oligonucleotide
  Antisense strand to SEQ ID NO: 568301
uuccauaaccauaacacac

SEQ ID NO: 568303 - RNA, 19 nt, Artificial Sequence
  Description of Artificial Sequence: Synthetic oligonucleotide
  Sense strand starting at position 2799 of SEQ ID NO: 318512
ggauguuguaaguaauagg

SEQ ID NO: 568304 - RNA, 19 nt, Artificial Sequence
  Description of Artificial Sequence: Synthetic oligonucleotide
  Antisense strand to SEQ ID NO: 568303
ccuauuacuuacaacaucc

SEQ ID NO: 568305 - RNA, 19 nt, Artificial Sequence
  Description of Artificial Sequence: Synthetic oligonucleotide
  Sense strand starting at position 2832 of SEQ ID NO: 318512
ugaguuuagcaucaaauua

SEQ ID NO: 568306 - RNA, 19 nt, Artificial Sequence
  Description of Artificial Sequence: Synthetic oligonucleotide
  Antisense strand to SEQ ID NO: 568305
uaauuugaugcuaaacuca

SEQ ID NO: 568307 - RNA, 19 nt, Artificial Sequence
  Description of Artificial Sequence: Synthetic oligonucleotide
  Sense strand starting at position 2855 of SEQ ID NO: 318512
gggcacuuugagcaggauu

SEQ ID NO: 568308 - RNA, 19 nt, Artificial Sequence
  Description of Artificial Sequence: Synthetic oligonucleotide
  Antisense strand to SEQ ID NO: 568307
aauccugcucaaagugccc

SEQ ID NO: 568309 - RNA, 19 nt, Artificial Sequence
  Description of Artificial Sequence: Synthetic oligonucleotide
  Sense strand starting at position 2955 of SEQ ID NO: 318512
agaaucagaucuuuggagu

SEQ ID NO: 568310 - RNA, 19 nt, Artificial Sequence
  Description of Artificial Sequence: Synthetic oligonucleotide
  Antisense strand to SEQ ID NO: 568309
acuccaaagaucugauucu

SEQ ID NO: 568311 - RNA, 19 nt, Artificial Sequence
  Description of Artificial Sequence: Synthetic oligonucleotide
  Sense strand starting at position 2956 of SEQ ID NO: 318512
gaaucagaucuuuggaguu

SEQ ID NO: 568312 - RNA, 19 nt, Artificial Sequence
  Description of Artificial Sequence: Synthetic oligonucleotide
  Antisense strand to SEQ ID NO: 568311
aacuccaaagaucugauuc

SEQ ID NO: 568313 - RNA, 19 nt, Artificial Sequence
  Description of Artificial Sequence: Synthetic oligonucleotide
  Sense strand starting at position 3080 of SEQ ID NO: 318512
caguuaauaccagagcuga

SEQ ID NO: 568314 - RNA, 19 nt, Artificial Sequence
  Description of Artificial Sequence: Synthetic oligonucleotide
  Antisense strand to SEQ ID NO: 568313
ucagcucugguauuaacug

SEQ ID NO: 568315 - RNA, 19 nt, Artificial Sequence
  Description of Artificial Sequence: Synthetic oligonucleotide
  Sense strand starting at position 3186 of SEQ ID NO: 318512
aucagauagccugggucua

SEQ ID NO: 568316 - RNA, 19 nt, Artificial Sequence
  Description of Artificial Sequence: Synthetic oligonucleotide
  Antisense strand to SEQ ID NO: 568315
uagacccaggcuaucugau

SEQ ID NO: 568317 - RNA, 19 nt, Artificial Sequence
  Description of Artificial Sequence: Synthetic oligonucleotide
  Sense strand starting at position 3187 of SEQ ID NO: 318512
ucagauagccugggucuaa

SEQ ID NO: 568318 - RNA, 19 nt, Artificial Sequence
  Description of Artificial Sequence: Synthetic oligonucleotide
  Antisense strand to SEQ ID NO: 568317
uuagacccaggcuaucuga

SEQ ID NO: 568319 - RNA, 19 nt, Artificial Sequence
  Description of Artificial Sequence: Synthetic oligonucleotide
  Sense strand starting at position 3188 of SEQ ID NO: 318512
cagauagccugggucuaau

SEQ ID NO: 568320 - RNA, 19 nt, Artificial Sequence
  Description of Artificial Sequence: Synthetic oligonucleotide
  Antisense strand to SEQ ID NO: 568319
auuagacccaggcuaucug

SEQ ID NO: 568321 - RNA, 19 nt, Artificial Sequence
  Description of Artificial Sequence: Synthetic oligonucleotide
  Sense strand starting at position 3306 of SEQ ID NO: 318512
cugguagaauuguuaagga

SEQ ID NO: 568322 - RNA, 19 nt, Artificial Sequence
  Description of Artificial Sequence: Synthetic oligonucleotide
  Antisense strand to SEQ ID NO: 568321
uccuuaacaauucuaccag

SEQ ID NO: 568323 - RNA, 19 nt, Artificial Sequence
  Description of Artificial Sequence: Synthetic oligonucleotide
  Sense strand starting at position 3329 of SEQ ID NO: 318512
gugagauaaucuguguaaa

SEQ ID NO: 568324 - RNA, 19 nt, Artificial Sequence
  Description of Artificial Sequence: Synthetic oligonucleotide
  Antisense strand to SEQ ID NO: 568323
uuuacacagauuaucucac

SEQ ID NO: 568325 - RNA, 19 nt, Artificial Sequence
  Description of Artificial Sequence: Synthetic oligonucleotide
  Sense strand starting at position 3454 of SEQ ID NO: 318512
gugugaguucuagaauaaa

SEQ ID NO: 568326 - RNA, 19 nt, Artificial Sequence
  Description of Artificial Sequence: Synthetic oligonucleotide
  Antisense strand to SEQ ID NO: 568325
uuuauucuagaacucacac

SEQ ID NO: 568327 - RNA, 19 nt, Artificial Sequence
  Description of Artificial Sequence: Synthetic oligonucleotide
  Sense strand starting at position 3471 of SEQ ID NO: 318512
aaguauuugaguggcuagu

SEQ ID NO: 568328 - RNA, 19 nt, Artificial Sequence
  Description of Artificial Sequence: Synthetic oligonucleotide
  Antisense strand to SEQ ID NO: 568327
acuagccacucaaauacuu

SEQ ID NO: 568329 - RNA, 19 nt, Artificial Sequence
  Description of Artificial Sequence: Synthetic oligonucleotide
  Sense strand starting at position 3473 of SEQ ID NO: 318512
guauuugaguggcuaguuu

SEQ ID NO: 568330 - RNA, 19 nt, Artificial Sequence
  Description of Artificial Sequence: Synthetic oligonucleotide
  Antisense strand to SEQ ID NO: 568329
aaacuagccacucaaauac

SEQ ID NO: 568331 - RNA, 19 nt, Artificial Sequence
  Description of Artificial Sequence: Synthetic oligonucleotide
  Sense strand starting at position 3539 of SEQ ID NO: 318512
gagaacuguccugaagccu

SEQ ID NO: 568332 - RNA, 19 nt, Artificial Sequence
  Description of Artificial Sequence: Synthetic oligonucleotide
  Antisense strand to SEQ ID NO: 568331
aggcuucaggacaguucuc

SEQ ID NO: 568333 - RNA, 19 nt, Artificial Sequence
  Description of Artificial Sequence: Synthetic oligonucleotide
  Sense strand starting at position 3616 of SEQ ID NO: 318512
ugaagucuuuccuugagau

SEQ ID NO: 568334 - RNA, 19 nt, Artificial Sequence
  Description of Artificial Sequence: Synthetic oligonucleotide
  Antisense strand to SEQ ID NO: 568333
aucucaaggaaagacuuca

SEQ ID NO: 568335 - RNA, 19 nt, Artificial Sequence
  Description of Artificial Sequence: Synthetic oligonucleotide
  Sense strand starting at position 3617 of SEQ ID NO: 318512
gaagucuuuccuugagauu

SEQ ID NO: 568336 - RNA, 19 nt, Artificial Sequence
  Description of Artificial Sequence: Synthetic oligonucleotide
  Antisense strand to SEQ ID NO: 568335
aaucucaaggaaagacuuc

SEQ ID NO: 568337 - RNA, 19 nt, Artificial Sequence
  Description of Artificial Sequence: Synthetic oligonucleotide
  Sense strand starting at position 3659 of SEQ ID NO: 318512
gagaucaaaucugcaguca

SEQ ID NO: 568338 - RNA, 19 nt, Artificial Sequence
  Description of Artificial Sequence: Synthetic oligonucleotide
  Antisense strand to SEQ ID NO: 568337
ugacugcagauuugaucuc

SEQ ID NO: 568339 - RNA, 19 nt, Artificial Sequence
  Description of Artificial Sequence: Synthetic oligonucleotide
  Sense strand starting at position 3678 of SEQ ID NO: 318512
guuacaugaggcugaacaa

SEQ ID NO: 568340 - RNA, 19 nt, Artificial Sequence
  Description of Artificial Sequence: Synthetic oligonucleotide
  Antisense strand to SEQ ID NO: 568339
uuguucagccucauguaac

SEQ ID NO: 568341 - RNA, 19 nt, Artificial Sequence
  Description of Artificial Sequence: Synthetic oligonucleotide
  Sense strand starting at position 3697 of SEQ ID NO: 318512
agugucauuccagagaacu

SEQ ID NO: 568342 - RNA, 19 nt, Artificial Sequence
  Description of Artificial Sequence: Synthetic oligonucleotide
  Antisense strand to SEQ ID NO: 568341
aguucucuggaaugacacu

SEQ ID NO: 568343 - RNA, 19 nt, Artificial Sequence
  Description of Artificial Sequence: Synthetic oligonucleotide
  Sense strand starting at position 3705 of SEQ ID NO: 318512
uccagagaacugggcuuua

SEQ ID NO: 568344 - RNA, 19 nt, Artificial Sequence
  Description of Artificial Sequence: Synthetic oligonucleotide
  Antisense strand to SEQ ID NO: 568343
uaaagcccaguucucugga

SEQ ID NO: 568345 - RNA, 19 nt, Artificial Sequence
  Description of Artificial Sequence: Synthetic oligonucleotide
  Sense strand starting at position 3715 of SEQ ID NO: 318512
ugggcuuuauaccuuaaga

SEQ ID NO: 568346 - RNA, 19 nt, Artificial Sequence
  Description of Artificial Sequence: Synthetic oligonucleotide
  Antisense strand to SEQ ID NO: 568345
ucuuaagguauaaagccca

SEQ ID NO: 568347 - RNA, 19 nt, Artificial Sequence
  Description of Artificial Sequence: Synthetic oligonucleotide
  Sense strand starting at position 3717 of SEQ ID NO: 318512
ggcuuuauaccuuaagagc

SEQ ID NO: 568348 - RNA, 19 nt, Artificial Sequence
  Description of Artificial Sequence: Synthetic oligonucleotide
  Antisense strand to SEQ ID NO: 568347
gcucuuaagguauaaagcc

SEQ ID NO: 568349 - RNA, 19 nt, Artificial Sequence
  Description of Artificial Sequence: Synthetic oligonucleotide
  Sense strand starting at position 396 of SEQ ID NO: 318513
uccucuuaauuuguuguua

SEQ ID NO: 568350 - RNA, 19 nt, Artificial Sequence
  Description of Artificial Sequence: Synthetic oligonucleotide
  Antisense strand to SEQ ID NO: 568349
uaacaacaaauuaagagga

SEQ ID NO: 568351 - RNA, 19 nt, Artificial Sequence
  Description of Artificial Sequence: Synthetic oligonucleotide
  Sense strand starting at position 446 of SEQ ID NO: 318513
auacgauaaccuuauaguc

SEQ ID NO: 568352 - RNA, 19 nt, Artificial Sequence
  Description of Artificial Sequence: Synthetic oligonucleotide
  Antisense strand to SEQ ID NO: 568351
gacuauaagguuaucguau

SEQ ID NO: 568353 - RNA, 19 nt, Artificial Sequence
  Description of Artificial Sequence: Synthetic oligonucleotide
  Sense strand starting at position 467 of SEQ ID NO: 318513
gccucuccucuugaaagau

SEQ ID NO: 568354 - RNA, 19 nt, Artificial Sequence
  Description of Artificial Sequence: Synthetic oligonucleotide
  Antisense strand to SEQ ID NO: 568353
aucuuucaagaggagaggc

SEQ ID NO: 568355 - RNA, 19 nt, Artificial Sequence
  Description of Artificial Sequence: Synthetic oligonucleotide
  Sense strand starting at position 619 of SEQ ID NO: 318513
gguguaaguguccaucuga

SEQ ID NO: 568356 - RNA, 19 nt, Artificial Sequence
  Description of Artificial Sequence: Synthetic oligonucleotide
  Antisense strand to SEQ ID NO: 568355
ucagauggacacuuacacc

SEQ ID NO: 568357 - RNA, 19 nt, Artificial Sequence
  Description of Artificial Sequence: Synthetic oligonucleotide
  Sense strand starting at position 669 of SEQ ID NO: 318513
aaaccaggugcuugauaga

SEQ ID NO: 568358 - RNA, 19 nt, Artificial Sequence
  Description of Artificial Sequence: Synthetic oligonucleotide
  Antisense strand to SEQ ID NO: 568357
ucuaucaagcaccugguuu

SEQ ID NO: 568359 - RNA, 19 nt, Artificial Sequence
  Description of Artificial Sequence: Synthetic oligonucleotide
  Sense strand starting at position 676 of SEQ ID NO: 318513
gugcuugauagaugacauu

SEQ ID NO: 568360 - RNA, 19 nt, Artificial Sequence
  Description of Artificial Sequence: Synthetic oligonucleotide
  Antisense strand to SEQ ID NO: 568359
aaugucaucuaucaagcac

SEQ ID NO: 568361 - RNA, 19 nt, Artificial Sequence
  Description of Artificial Sequence: Synthetic oligonucleotide
  Sense strand starting at position 765 of SEQ ID NO: 318513
ucaggaaagucauaaauua

SEQ ID NO: 568362 - RNA, 19 nt, Artificial Sequence
  Description of Artificial Sequence: Synthetic oligonucleotide
  Antisense strand to SEQ ID NO: 568361
uaauuuaugacuuuccuga

SEQ ID NO: 568363 - RNA, 19 nt, Artificial Sequence
  Description of Artificial Sequence: Synthetic oligonucleotide
  Sense strand starting at position 795 of SEQ ID NO: 318513
uggguuauaaaguguauua

SEQ ID NO: 568364 - RNA, 19 nt, Artificial Sequence
  Description of Artificial Sequence: Synthetic oligonucleotide
  Antisense strand to SEQ ID NO: 568363
uaauacacuuuauaaccca

SEQ ID NO: 568365 - RNA, 19 nt, Artificial Sequence
  Description of Artificial Sequence: Synthetic oligonucleotide
  Sense strand starting at position 884 of SEQ ID NO: 318513
aaguauugugaagguaauu

SEQ ID NO: 568366 - RNA, 19 nt, Artificial Sequence
  Description of Artificial Sequence: Synthetic oligonucleotide
  Antisense strand to SEQ ID NO: 568365
aauuaccuucacaauacuu

SEQ ID NO: 568367 - RNA, 19 nt, Artificial Sequence
  Description of Artificial Sequence: Synthetic oligonucleotide
  Sense strand starting at position 917 of SEQ ID NO: 318513
auuaauacccagugguaua

SEQ ID NO: 568368 - RNA, 19 nt, Artificial Sequence
  Description of Artificial Sequence: Synthetic oligonucleotide
  Antisense strand to SEQ ID NO: 568367
uauaccacuggguauuaau

SEQ ID NO: 568369 - RNA, 19 nt, Artificial Sequence
  Description of Artificial Sequence: Synthetic oligonucleotide
  Sense strand starting at position 924 of SEQ ID NO: 318513
cccagugguauacgaguau

SEQ ID NO: 568370 - RNA, 19 nt, Artificial Sequence
  Description of Artificial Sequence: Synthetic oligonucleotide
  Antisense strand to SEQ ID NO: 568369
auacucguauaccacuggg

SEQ ID NO: 568371 - RNA, 19 nt, Artificial Sequence
  Description of Artificial Sequence: Synthetic oligonucleotide
  Sense strand starting at position 928 of SEQ ID NO: 318513
gugguauacgaguauguua

SEQ ID NO: 568372 - RNA, 19 nt, Artificial Sequence
  Description of Artificial Sequence: Synthetic oligonucleotide
  Antisense strand to SEQ ID NO: 568371
uaacauacucguauaccac

SEQ ID NO: 568373 - RNA, 19 nt, Artificial Sequence
  Description of Artificial Sequence: Synthetic oligonucleotide
  Sense strand starting at position 930 of SEQ ID NO: 318513
gguauacgaguauguuaaa

SEQ ID NO: 568374 - RNA, 19 nt, Artificial Sequence
  Description of Artificial Sequence: Synthetic oligonucleotide
  Antisense strand to SEQ ID NO: 568373
uuuaacauacucguauacc

SEQ ID NO: 568375 - RNA, 19 nt, Artificial Sequence
  Description of Artificial Sequence: Synthetic oligonucleotide
  Sense strand starting at position 931 of SEQ ID NO: 318513
guauacgaguauguuaaau

SEQ ID NO: 568376 - RNA, 19 nt, Artificial Sequence
  Description of Artificial Sequence: Synthetic oligonucleotide
  Antisense strand to SEQ ID NO: 568375
auuuaacauacucguauac

SEQ ID NO: 568377 - RNA, 19 nt, Artificial Sequence
  Description of Artificial Sequence: Synthetic oligonucleotide
  Sense strand starting at position 993 of SEQ ID NO: 318513
cuuagacugucacugcaua

SEQ ID NO: 568378 - RNA, 19 nt, Artificial Sequence
  Description of Artificial Sequence: Synthetic oligonucleotide
  Antisense strand to SEQ ID NO: 568377
uaugcagugacagucuaag

SEQ ID NO: 568379 - RNA, 19 nt, Artificial Sequence
  Description of Artificial Sequence: Synthetic oligonucleotide
  Sense strand starting at position 1168 of SEQ ID NO: 318513
agaguuauuugaugaggaa

SEQ ID NO: 568380 - RNA, 19 nt, Artificial Sequence
  Description of Artificial Sequence: Synthetic oligonucleotide
  Antisense strand to SEQ ID NO: 568379
uuccucaucaaauaacucu

SEQ ID NO: 568381 - RNA, 19 nt, Artificial Sequence
  Description of Artificial Sequence: Synthetic oligonucleotide
  Sense strand starting at position 1171 of SEQ ID NO: 318513
guuauuugaugaggaaaca

SEQ ID NO: 568382 - RNA, 19 nt, Artificial Sequence
  Description of Artificial Sequence: Synthetic oligonucleotide
  Antisense strand to SEQ ID NO: 568381
uguuuccucaucaaauaac

SEQ ID NO: 568383 - RNA, 19 nt, Artificial Sequence
  Description of Artificial Sequence: Synthetic oligonucleotide
  Sense strand starting at position 1182 of SEQ ID NO: 318513
aggaaacacauucgcgaaa

SEQ ID NO: 568384 - RNA, 19 nt, Artificial Sequence
  Description of Artificial Sequence: Synthetic oligonucleotide
  Antisense strand to SEQ ID NO: 568383
uuucgcgaauguguuuccu

SEQ ID NO: 568385 - RNA, 19 nt, Artificial Sequence
  Description of Artificial Sequence: Synthetic oligonucleotide
  Sense strand starting at position 1185 of SEQ ID NO: 318513
aaacacauucgcgaaaggu

SEQ ID NO: 568386 - RNA, 19 nt, Artificial Sequence
  Description of Artificial Sequence: Synthetic oligonucleotide
  Antisense strand to SEQ ID NO: 568385
accuuucgcgaauguguuu

SEQ ID NO: 568387 - RNA, 19 nt, Artificial Sequence
  Description of Artificial Sequence: Synthetic oligonucleotide
  Sense strand starting at position 1195 of SEQ ID NO: 318513
gcgaaagguuauucaagug

SEQ ID NO: 568388 - RNA, 19 nt, Artificial Sequence
  Description of Artificial Sequence: Synthetic oligonucleotide
  Antisense strand to SEQ ID NO: 568387
cacuugaauaaccuuucgc

SEQ ID NO: 568389 - RNA, 19 nt, Artificial Sequence
  Description of Artificial Sequence: Synthetic oligonucleotide
  Sense strand starting at position 1211 of SEQ ID NO: 318513
guggugagugucguucuua

SEQ ID NO: 568390 - RNA, 19 nt, Artificial Sequence
  Description of Artificial Sequence: Synthetic oligonucleotide
  Antisense strand to SEQ ID NO: 568389
uaagaacgacacucaccac

SEQ ID NO: 568391 - RNA, 19 nt, Artificial Sequence
  Description of Artificial Sequence: Synthetic oligonucleotide
  Sense strand starting at position 1265 of SEQ ID NO: 318513
ucaggaaaucgcugcccaa

SEQ ID NO: 568392 - RNA, 19 nt, Artificial Sequence
  Description of Artificial Sequence: Synthetic oligonucleotide
  Antisense strand to SEQ ID NO: 568391
uugggcagcgauuuccuga

SEQ ID NO: 568393 - RNA, 19 nt, Artificial Sequence
  Description of Artificial Sequence: Synthetic oligonucleotide
  Sense strand starting at position 1278 of SEQ ID NO: 318513
gcccaagucgauggauacu

SEQ ID NO: 568394 - RNA, 19 nt, Artificial Sequence
  Description of Artificial Sequence: Synthetic oligonucleotide
  Antisense strand to SEQ ID NO: 568393
aguauccaucgacuugggc

SEQ ID NO: 568395 - RNA, 19 nt, Artificial Sequence
  Description of Artificial Sequence: Synthetic oligonucleotide
  Sense strand starting at position 1323 of SEQ ID NO: 318513
ggcugugcucucguggaca

SEQ ID NO: 568396 - RNA, 19 nt, Artificial Sequence
  Description of Artificial Sequence: Synthetic oligonucleotide
  Antisense strand to SEQ ID NO: 568395
uguccacgagagcacagcc

SEQ ID NO: 568397 - RNA, 19 nt, Artificial Sequence
  Description of Artificial Sequence: Synthetic oligonucleotide
  Sense strand starting at position 1420 of SEQ ID NO: 318513
auggcugauuuccaccaaa

SEQ ID NO: 568398 - RNA, 19 nt, Artificial Sequence
  Description of Artificial Sequence: Synthetic oligonucleotide
  Antisense strand to SEQ ID NO: 568397
uuugguggaaaucagccau

SEQ ID NO: 568399 - RNA, 19 nt, Artificial Sequence
  Description of Artificial Sequence: Synthetic oligonucleotide
  Sense strand starting at position 2583 of SEQ ID NO: 318513
augcaaauaguuuggauaa

SEQ ID NO: 568400 - RNA, 19 nt, Artificial Sequence
  Description of Artificial Sequence: Synthetic oligonucleotide
  Antisense strand to SEQ ID NO: 568399
uuauccaaacuauuugcau

SEQ ID NO: 568401 - RNA, 19 nt, Artificial Sequence
  Description of Artificial Sequence: Synthetic oligonucleotide
  Sense strand starting at position 2709 of SEQ ID NO: 318513
gcauuccaaucguuuaaca

SEQ ID NO: 568402 - RNA, 19 nt, Artificial Sequence
  Description of Artificial Sequence: Synthetic oligonucleotide
  Antisense strand to SEQ ID NO: 568401
uguuaaacgauuggaaugc

SEQ ID NO: 568403 - RNA, 19 nt, Artificial Sequence
  Description of Artificial Sequence: Synthetic oligonucleotide
  Sense strand starting at position 2826 of SEQ ID NO: 318513
ugccucuugccggugcaaa

SEQ ID NO: 568404 - RNA, 19 nt, Artificial Sequence
  Description of Artificial Sequence: Synthetic oligonucleotide
  Antisense strand to SEQ ID NO: 568403
uuugcaccggcaagaggca

SEQ ID NO: 568405 - RNA, 19 nt, Artificial Sequence
  Description of Artificial Sequence: Synthetic oligonucleotide
  Sense strand starting at position 2828 of SEQ ID NO: 318513
ccucuugccggugcaaauu

SEQ ID NO: 568406 - RNA, 19 nt, Artificial Sequence
  Description of Artificial Sequence: Synthetic oligonucleotide
  Antisense strand to SEQ ID NO: 568405
aauuugcaccggcaagagg

SEQ ID NO: 568407 - RNA, 19 nt, Artificial Sequence
  Description of Artificial Sequence: Synthetic oligonucleotide
  Sense strand starting at position 2974 of SEQ ID NO: 318513
ggaauuaaauucuuugcac

SEQ ID NO: 568408 - RNA, 19 nt, Artificial Sequence
  Description of Artificial Sequence: Synthetic oligonucleotide
  Antisense strand to SEQ ID NO: 568407
gugcaaagaauuuaauucc

SEQ ID NO: 568409 - RNA, 19 nt, Artificial Sequence
  Description of Artificial Sequence: Synthetic oligonucleotide
  Sense strand starting at position 2977 of SEQ ID NO: 318513
auuaaauucuuugcacgga

SEQ ID NO: 568410 - RNA, 19 nt, Artificial Sequence
  Description of Artificial Sequence: Synthetic oligonucleotide
  Antisense strand to SEQ ID NO: 568409
uccgugcaaagaauuuaau

SEQ ID NO: 568411 - RNA, 19 nt, Artificial Sequence
  Description of Artificial Sequence: Synthetic oligonucleotide
  Sense strand starting at position 3193 of SEQ ID NO: 318513
gagcuuuguguugcucagu

SEQ ID NO: 568412 - RNA, 19 nt, Artificial Sequence
  Description of Artificial Sequence: Synthetic oligonucleotide
  Antisense strand to SEQ ID NO: 568411
acugagcaacacaaagcuc

SEQ ID NO: 568413 - RNA, 19 nt, Artificial Sequence
  Description of Artificial Sequence: Synthetic oligonucleotide
  Sense strand starting at position 3233 of SEQ ID NO: 318513
aggcgacagugguuaauua

SEQ ID NO: 568414 - RNA, 19 nt, Artificial Sequence
  Description of Artificial Sequence: Synthetic oligonucleotide
  Antisense strand to SEQ ID NO: 568413
uaauuaaccacugucgccu

SEQ ID NO: 568415 - RNA, 19 nt, Artificial Sequence
  Description of Artificial Sequence: Synthetic oligonucleotide
  Sense strand starting at position 3237 of SEQ ID NO: 318513
gacagugguuaauuacaaa

SEQ ID NO: 568416 - RNA, 19 nt, Artificial Sequence
  Description of Artificial Sequence: Synthetic oligonucleotide
  Antisense strand to SEQ ID NO: 568415
uuuguaauuaaccacuguc

SEQ ID NO: 568417 - RNA, 19 nt, Artificial Sequence
  Description of Artificial Sequence: Synthetic oligonucleotide
  Sense strand starting at position 3266 of SEQ ID NO: 318513
ggugauuggugaccauauu

SEQ ID NO: 568418 - RNA, 19 nt, Artificial Sequence
  Description of Artificial Sequence: Synthetic oligonucleotide
  Antisense strand to SEQ ID NO: 568417
aauauggucaccaaucacc

SEQ ID NO: 568419 - RNA, 19 nt, Artificial Sequence
  Description of Artificial Sequence: Synthetic oligonucleotide
  Sense strand starting at position 3310 of SEQ ID NO: 318513
ccaggcugcaaucgauaua

SEQ ID NO: 568420 - RNA, 19 nt, Artificial Sequence
  Description of Artificial Sequence: Synthetic oligonucleotide
  Antisense strand to SEQ ID NO: 568419
uauaucgauugcagccugg

SEQ ID NO: 568421 - RNA, 19 nt, Artificial Sequence
  Description of Artificial Sequence: Synthetic oligonucleotide
  Sense strand starting at position 3313 of SEQ ID NO: 318513
ggcugcaaucgauauagcu

SEQ ID NO: 568422 - RNA, 19 nt, Artificial Sequence
  Description of Artificial Sequence: Synthetic oligonucleotide
  Antisense strand to SEQ ID NO: 568421
agcuauaucgauugcagcc

SEQ ID NO: 568423 - RNA, 19 nt, Artificial Sequence
  Description of Artificial Sequence: Synthetic oligonucleotide
  Sense strand starting at position 3800 of SEQ ID NO: 318513
ugugguauaucugucuaua

SEQ ID NO: 568424 - RNA, 19 nt, Artificial Sequence
  Description of Artificial Sequence: Synthetic oligonucleotide
  Antisense strand to SEQ ID NO: 568423
uauagacagauauaccaca

SEQ ID NO: 568425 - RNA, 19 nt, Artificial Sequence
  Description of Artificial Sequence: Synthetic oligonucleotide
  Sense strand starting at position 3802 of SEQ ID NO: 318513
ugguauaucugucuauauu

SEQ ID NO: 568426 - RNA, 19 nt, Artificial Sequence
  Description of Artificial Sequence: Synthetic oligonucleotide
  Antisense strand to SEQ ID NO: 568425
aauauagacagauauacca

SEQ ID NO: 568427 - RNA, 19 nt, Artificial Sequence
  Description of Artificial Sequence: Synthetic oligonucleotide
  Sense strand starting at position 3884 of SEQ ID NO: 318513
auaggcuaggugcauaaau

SEQ ID NO: 568428 - RNA, 19 nt, Artificial Sequence
  Description of Artificial Sequence: Synthetic oligonucleotide
  Antisense strand to SEQ ID NO: 568427
auuuaugcaccuagccuau

SEQ ID NO: 568429 - RNA, 19 nt, Artificial Sequence
  Description of Artificial Sequence: Synthetic oligonucleotide
  Sense strand starting at position 71 of SEQ ID NO: 318514
gccugauaugggcgugaua

SEQ ID NO: 568430 - RNA, 19 nt, Artificial Sequence
  Description of Artificial Sequence: Synthetic oligonucleotide
  Antisense strand to SEQ ID NO: 568429
uaucacgcccauaucaggc

SEQ ID NO: 568431 - RNA, 19 nt, Artificial Sequence
  Description of Artificial Sequence: Synthetic oligonucleotide
  Sense strand starting at position 74 of SEQ ID NO: 318514
ugauaugggcgugauagga

SEQ ID NO: 568432 - RNA, 19 nt, Artificial Sequence
  Description of Artificial Sequence: Synthetic oligonucleotide
  Antisense strand to SEQ ID NO: 568431
uccuaucacgcccauauca

SEQ ID NO: 568433 - RNA, 19 nt, Artificial Sequence
  Description of Artificial Sequence: Synthetic oligonucleotide
  Sense strand starting at position 178 of SEQ ID NO: 318514
gggagguggcauggagaau

SEQ ID NO: 568434 - RNA, 19 nt, Artificial Sequence
  Description of Artificial Sequence: Synthetic oligonucleotide
  Antisense strand to SEQ ID NO: 568433
auucuccaugccaccuccc

SEQ ID NO: 568435 - RNA, 19 nt, Artificial Sequence
  Description of Artificial Sequence: Synthetic oligonucleotide
  Sense strand starting at position 211 of SEQ ID NO: 318514
aguugccauguuggugaaa

SEQ ID NO: 568436 - RNA, 19 nt, Artificial Sequence
  Description of Artificial Sequence: Synthetic oligonucleotide
  Antisense strand to SEQ ID NO: 568435
uuucaccaacauggcaacu

SEQ ID NO: 568437 - RNA, 19 nt, Artificial Sequence
  Description of Artificial Sequence: Synthetic oligonucleotide
  Sense strand starting at position 402 of SEQ ID NO: 318514
gccacagguccaggaaaua

SEQ ID NO: 568438 - RNA, 19 nt, Artificial Sequence
  Description of Artificial Sequence: Synthetic oligonucleotide
  Antisense strand to SEQ ID NO: 568437
uauuuccuggaccuguggc

SEQ ID NO: 568439 - RNA, 19 nt, Artificial Sequence
  Description of Artificial Sequence: Synthetic oligonucleotide
  Sense strand starting at position 433 of SEQ ID NO: 318514
cuggcuaagggcugaauaa

SEQ ID NO: 568440 - RNA, 19 nt, Artificial Sequence
  Description of Artificial Sequence: Synthetic oligonucleotide
  Antisense strand to SEQ ID NO: 568439
uuauucagcccuuagccag

SEQ ID NO: 568441 - RNA, 19 nt, Artificial Sequence
  Description of Artificial Sequence: Synthetic oligonucleotide
  Sense strand starting at position 570 of SEQ ID NO: 318514
gcagaucuacuuuguaaga

SEQ ID NO: 568442 - RNA, 19 nt, Artificial Sequence
  Description of Artificial Sequence: Synthetic oligonucleotide
  Antisense strand to SEQ ID NO: 568441
ucuuacaaaguagaucugc

SEQ ID NO: 568443 - RNA, 19 nt, Artificial Sequence
  Description of Artificial Sequence: Synthetic oligonucleotide
  Sense strand starting at position 678 of SEQ ID NO: 318514
guucuauacuucuuuguua

SEQ ID NO: 568444 - RNA, 19 nt, Artificial Sequence
  Description of Artificial Sequence: Synthetic oligonucleotide
  Antisense strand to SEQ ID NO: 568443
uaacaaagaaguauagaac

SEQ ID NO: 568445 - RNA, 19 nt, Artificial Sequence
  Description of Artificial Sequence: Synthetic oligonucleotide
  Sense strand starting at position 681 of SEQ ID NO: 318514
cuauacuucuuuguuagga

SEQ ID NO: 568446 - RNA, 19 nt, Artificial Sequence
  Description of Artificial Sequence: Synthetic oligonucleotide
  Antisense strand to SEQ ID NO: 568445
uccuaacaaagaaguauag

SEQ ID NO: 568447 - RNA, 19 nt, Artificial Sequence
  Description of Artificial Sequence: Synthetic oligonucleotide
  Sense strand starting at position 1113 of SEQ ID NO: 318514
ccauguuccagagggagau

SEQ ID NO: 568448 - RNA, 19 nt, Artificial Sequence
  Description of Artificial Sequence: Synthetic oligonucleotide
  Antisense strand to SEQ ID NO: 568447
aucucccucuggaacaugg

SEQ ID NO: 568449 - RNA, 19 nt, Artificial Sequence
  Description of Artificial Sequence: Synthetic oligonucleotide
  Sense strand starting at position 1210 of SEQ ID NO: 318514
ggcguagccacucaaauga

SEQ ID NO: 568450 - RNA, 19 nt, Artificial Sequence
  Description of Artificial Sequence: Synthetic oligonucleotide
  Antisense strand to SEQ ID NO: 568449
ucauuugaguggcuacgcc

SEQ ID NO: 568451 - RNA, 19 nt, Artificial Sequence
  Description of Artificial Sequence: Synthetic oligonucleotide
  Sense strand starting at position 1225 of SEQ ID NO: 318514
augauccauucccagagau

SEQ ID NO: 568452 - RNA, 19 nt, Artificial Sequence
  Description of Artificial Sequence: Synthetic oligonucleotide
  Antisense strand to SEQ ID NO: 568451
aucucugggaauggaucau

SEQ ID NO: 568453 - RNA, 19 nt, Artificial Sequence
  Description of Artificial Sequence: Synthetic oligonucleotide
  Sense strand starting at position 2229 of SEQ ID NO: 318514
ccguucacugauugacgua

SEQ ID NO: 568454 - RNA, 19 nt, Artificial Sequence
  Description of Artificial Sequence: Synthetic oligonucleotide
  Antisense strand to SEQ ID NO: 568453
uacgucaaucagugaacgg

SEQ ID NO: 568455 - RNA, 19 nt, Artificial Sequence
  Description of Artificial Sequence: Synthetic oligonucleotide
  Sense strand starting at position 2382 of SEQ ID NO: 318514
uugggucucuucgucuaua

SEQ ID NO: 568456 - RNA, 19 nt, Artificial Sequence
  Description of Artificial Sequence: Synthetic oligonucleotide
  Antisense strand to SEQ ID NO: 568455
uauagacgaagagacccaa

SEQ ID NO: 568457 - RNA, 19 nt, Artificial Sequence
  Description of Artificial Sequence: Synthetic oligonucleotide
  Sense strand starting at position 2383 of SEQ ID NO: 318514
ugggucucuucgucuauaa

SEQ ID NO: 568458 - RNA, 19 nt, Artificial Sequence
  Description of Artificial Sequence: Synthetic oligonucleotide
  Antisense strand to SEQ ID NO: 568457
uuauagacgaagagaccca

SEQ ID NO: 568459 - RNA, 19 nt, Artificial Sequence
  Description of Artificial Sequence: Synthetic oligonucleotide
  Sense strand starting at position 2385 of SEQ ID NO: 318514
ggucucuucgucuauaaua

SEQ ID NO: 568460 - RNA, 19 nt, Artificial Sequence
  Description of Artificial Sequence: Synthetic oligonucleotide
  Antisense strand to SEQ ID NO: 568459
uauuauagacgaagagacc

SEQ ID NO: 568461 - RNA, 19 nt, Artificial Sequence
  Description of Artificial Sequence: Synthetic oligonucleotide
  Sense strand starting at position 2387 of SEQ ID NO: 318514
ucucuucgucuauaauaug

SEQ ID NO: 568462 - RNA, 19 nt, Artificial Sequence
  Description of Artificial Sequence: Synthetic oligonucleotide
  Antisense strand to SEQ ID NO: 568461
cauauuauagacgaagaga

SEQ ID NO: 568463 - RNA, 19 nt, Artificial Sequence
  Description of Artificial Sequence: Synthetic oligonucleotide
  Sense strand starting at position 2398 of SEQ ID NO: 318514
auaauaugagccuaguagu

SEQ ID NO: 568464 - RNA, 19 nt, Artificial Sequence
  Description of Artificial Sequence: Synthetic oligonucleotide
  Antisense strand to SEQ ID NO: 568463
acuacuaggcucauauuau

SEQ ID NO: 568465 - RNA, 19 nt, Artificial Sequence
  Description of Artificial Sequence: Synthetic oligonucleotide
  Sense strand starting at position 2490 of SEQ ID NO: 318514
guagcacgugucaguagua

SEQ ID NO: 568466 - RNA, 19 nt, Artificial Sequence
  Description of Artificial Sequence: Synthetic oligonucleotide
  Antisense strand to SEQ ID NO: 568465
uacuacugacacgugcuac

SEQ ID NO: 568467 - RNA, 19 nt, Artificial Sequence
  Description of Artificial Sequence: Synthetic oligonucleotide
  Sense strand starting at position 2533 of SEQ ID NO: 318514
cgggauuaagugcauguga

SEQ ID NO: 568468 - RNA, 19 nt, Artificial Sequence
  Description of Artificial Sequence: Synthetic oligonucleotide
  Antisense strand to SEQ ID NO: 568467
ucacaugcacuuaaucccg

SEQ ID NO: 568469 - RNA, 19 nt, Artificial Sequence
  Description of Artificial Sequence: Synthetic oligonucleotide
  Sense strand starting at position 2535 of SEQ ID NO: 318514
ggauuaagugcaugugaag

SEQ ID NO: 568470 - RNA, 19 nt, Artificial Sequence
  Description of Artificial Sequence: Synthetic oligonucleotide
  Antisense strand to SEQ ID NO: 568469
cuucacaugcacuuaaucc

SEQ ID NO: 568471 - RNA, 19 nt, Artificial Sequence
  Description of Artificial Sequence: Synthetic oligonucleotide
  Sense strand starting at position 2563 of SEQ ID NO: 318514
agugcaguccaugguauga

SEQ ID NO: 568472 - RNA, 19 nt, Artificial Sequence
  Description of Artificial Sequence: Synthetic oligonucleotide
  Antisense strand to SEQ ID NO: 568471
ucauaccauggacugcacu

SEQ ID NO: 568473 - RNA, 19 nt, Artificial Sequence
  Description of Artificial Sequence: Synthetic oligonucleotide
  Sense strand starting at position 2578 of SEQ ID NO: 318514
augagugcuggcguuccua

SEQ ID NO: 568474 - RNA, 19 nt, Artificial Sequence
  Description of Artificial Sequence: Synthetic oligonucleotide
  Antisense strand to SEQ ID NO: 568473
uaggaacgccagcacucau

SEQ ID NO: 568475 - RNA, 19 nt, Artificial Sequence
  Description of Artificial Sequence: Synthetic oligonucleotide
  Sense strand starting at position 2614 of SEQ ID NO: 318514
ggugauucaggaggagcaa

SEQ ID NO: 568476 - RNA, 19 nt, Artificial Sequence
  Description of Artificial Sequence: Synthetic oligonucleotide
  Antisense strand to SEQ ID NO: 568475
uugcuccuccugaaucacc

SEQ ID NO: 568477 - RNA, 19 nt, Artificial Sequence
  Description of Artificial Sequence: Synthetic oligonucleotide
  Sense strand starting at position 2714 of SEQ ID NO: 318514
gugcaauguaauugccaug

SEQ ID NO: 568478 - RNA, 19 nt, Artificial Sequence
  Description of Artificial Sequence: Synthetic oligonucleotide
  Antisense strand to SEQ ID NO: 568477
cauggcaauuacauugcac

SEQ ID NO: 568479 - RNA, 19 nt, Artificial Sequence
  Description of Artificial Sequence: Synthetic oligonucleotide
  Sense strand starting at position 2719 of SEQ ID NO: 318514
auguaauugccauggaagc

SEQ ID NO: 568480 - RNA, 19 nt, Artificial Sequence
  Description of Artificial Sequence: Synthetic oligonucleotide
  Antisense strand to SEQ ID NO: 568479
gcuuccauggcaauuacau

SEQ ID NO: 568481 - RNA, 19 nt, Artificial Sequence
  Description of Artificial Sequence: Synthetic oligonucleotide
  Sense strand starting at position 2720 of SEQ ID NO: 318514
uguaauugccauggaagca

SEQ ID NO: 568482 - RNA, 19 nt, Artificial Sequence
  Description of Artificial Sequence: Synthetic oligonucleotide
  Antisense strand to SEQ ID NO: 568481
ugcuuccauggcaauuaca

SEQ ID NO: 568483 - RNA, 19 nt, Artificial Sequence
  Description of Artificial Sequence: Synthetic oligonucleotide
  Sense strand starting at position 2721 of SEQ ID NO: 318514
guaauugccauggaagcaa

SEQ ID NO: 568484 - RNA, 19 nt, Artificial Sequence
  Description of Artificial Sequence: Synthetic oligonucleotide
  Antisense strand to SEQ ID NO: 568483
uugcuuccauggcaauuac

SEQ ID NO: 568485 - RNA, 19 nt, Artificial Sequence
  Description of Artificial Sequence: Synthetic oligonucleotide
  Sense strand starting at position 2755 of SEQ ID NO: 318514
ggguggugacuauguguga

SEQ ID NO: 568486 - RNA, 19 nt, Artificial Sequence
  Description of Artificial Sequence: Synthetic oligonucleotide
  Antisense strand to SEQ ID NO: 568485
ucacacauagucaccaccc

SEQ ID NO: 568487 - RNA, 19 nt, Artificial Sequence
  Description of Artificial Sequence: Synthetic oligonucleotide
  Sense strand starting at position 2886 of SEQ ID NO: 318514
ggcagacucuaggaggaaa

SEQ ID NO: 568488 - RNA, 19 nt, Artificial Sequence
  Description of Artificial Sequence: Synthetic oligonucleotide
  Antisense strand to SEQ ID NO: 568487
uuuccuccuagagucugcc

SEQ ID NO: 568489 - RNA, 19 nt, Artificial Sequence
  Description of Artificial Sequence: Synthetic oligonucleotide
  Sense strand starting at position 2989 of SEQ ID NO: 318514
agaagaaugugccuuacag

SEQ ID NO: 568490 - RNA, 19 nt, Artificial Sequence
  Description of Artificial Sequence: Synthetic oligonucleotide
  Antisense strand to SEQ ID NO: 568489
cuguaaggcacauucuucu

SEQ ID NO: 568491 - RNA, 19 nt, Artificial Sequence
  Description of Artificial Sequence: Synthetic oligonucleotide
  Sense strand starting at position 3008 of SEQ ID NO: 318514
gaauuacaucagugaaggu

SEQ ID NO: 568492 - RNA, 19 nt, Artificial Sequence
  Description of Artificial Sequence: Synthetic oligonucleotide
  Antisense strand to SEQ ID NO: 568491
accuucacugauguaauuc

SEQ ID NO: 568493 - RNA, 19 nt, Artificial Sequence
  Description of Artificial Sequence: Synthetic oligonucleotide
  Sense strand starting at position 3075 of SEQ ID NO: 318514
guggaucucacacguugaa

SEQ ID NO: 568494 - RNA, 19 nt, Artificial Sequence
  Description of Artificial Sequence: Synthetic oligonucleotide
  Antisense strand to SEQ ID NO: 568493
uucaacgugugagauccac

SEQ ID NO: 568495 - RNA, 19 nt, Artificial Sequence
  Description of Artificial Sequence: Synthetic oligonucleotide
  Sense strand starting at position 3169 of SEQ ID NO: 318514
aggagauguuggcugaaug

SEQ ID NO: 568496 - RNA, 19 nt, Artificial Sequence
  Description of Artificial Sequence: Synthetic oligonucleotide
  Antisense strand to SEQ ID NO: 568495
cauucagccaacaucuccu

SEQ ID NO: 568497 - RNA, 19 nt, Artificial Sequence
  Description of Artificial Sequence: Synthetic oligonucleotide
  Sense strand starting at position 3170 of SEQ ID NO: 318514
ggagauguuggcugaauga

SEQ ID NO: 568498 - RNA, 19 nt, Artificial Sequence
  Description of Artificial Sequence: Synthetic oligonucleotide
  Antisense strand to SEQ ID NO: 568497
ucauucagccaacaucucc

SEQ ID NO: 568499 - RNA, 19 nt, Artificial Sequence
  Description of Artificial Sequence: Synthetic oligonucleotide
  Sense strand starting at position 3353 of SEQ ID NO: 318514
gggcuuauccaggguagga

SEQ ID NO: 568500 - RNA, 19 nt, Artificial Sequence
  Description of Artificial Sequence: Synthetic oligonucleotide
  Antisense strand to SEQ ID NO: 568499
uccuacccuggauaagccc

SEQ ID NO: 568501 - RNA, 19 nt, Artificial Sequence
  Description of Artificial Sequence: Synthetic oligonucleotide
  Sense strand starting at position 3445 of SEQ ID NO: 318514
cucugacuuccuugccaga

SEQ ID NO: 568502 - RNA, 19 nt, Artificial Sequence
  Description of Artificial Sequence: Synthetic oligonucleotide
  Antisense strand to SEQ ID NO: 568501
ucuggcaaggaagucagag

SEQ ID NO: 568503 - RNA, 19 nt, Artificial Sequence
  Description of Artificial Sequence: Synthetic oligonucleotide
  Sense strand starting at position 3447 of SEQ ID NO: 318514
cugacuuccuugccagacu

SEQ ID NO: 568504 - RNA, 19 nt, Artificial Sequence
  Description of Artificial Sequence: Synthetic oligonucleotide
  Antisense strand to SEQ ID NO: 568503
agucuggcaaggaagucag

SEQ ID NO: 568505 - RNA, 19 nt, Artificial Sequence
  Description of Artificial Sequence: Synthetic oligonucleotide
  Sense strand starting at position 3777 of SEQ ID NO: 318514
cguauacauugacccuuua

SEQ ID NO: 568506 - RNA, 19 nt, Artificial Sequence
  Description of Artificial Sequence: Synthetic oligonucleotide
  Antisense strand to SEQ ID NO: 568505
uaaagggucaauguauacg

SEQ ID NO: 568507 - RNA, 19 nt, Artificial Sequence
  Description of Artificial Sequence: Synthetic oligonucleotide
  Sense strand starting at position 3858 of SEQ ID NO: 318514
auguaauuccuguaaggca

SEQ ID NO: 568508 - RNA, 19 nt, Artificial Sequence
  Description of Artificial Sequence: Synthetic oligonucleotide
  Antisense strand to SEQ ID NO: 568507
ugccuuacaggaauuacau

SEQ ID NO: 568509 - RNA, 19 nt, Artificial Sequence
  Description of Artificial Sequence: Synthetic oligonucleotide
  Sense strand starting at position 76 of SEQ ID NO: 318515
auuagauaggcucagguuu

SEQ ID NO: 568510 - RNA, 19 nt, Artificial Sequence
  Description of Artificial Sequence: Synthetic oligonucleotide
  Antisense strand to SEQ ID NO: 568509
aaaccugagccuaucuaau

SEQ ID NO: 568511 - RNA, 19 nt, Artificial Sequence
  Description of Artificial Sequence: Synthetic oligonucleotide
  Sense strand starting at position 153 of SEQ ID NO: 318515
agcagcacucuggaaugua

SEQ ID NO: 568512 - RNA, 19 nt, Artificial Sequence
  Description of Artificial Sequence: Synthetic oligonucleotide
  Antisense strand to SEQ ID NO: 568511
uacauuccagagugcugcu

SEQ ID NO: 568513 - RNA, 19 nt, Artificial Sequence
  Description of Artificial Sequence: Synthetic oligonucleotide
  Sense strand starting at position 178 of SEQ ID NO: 318515
agaagauaaucucuagcuc

SEQ ID NO: 568514 - RNA, 19 nt, Artificial Sequence
  Description of Artificial Sequence: Synthetic oligonucleotide
  Antisense strand to SEQ ID NO: 568513
gagcuagagauuaucuucu

SEQ ID NO: 568515 - RNA, 19 nt, Artificial Sequence
  Description of Artificial Sequence: Synthetic oligonucleotide
  Sense strand starting at position 913 of SEQ ID NO: 318515
gcuugcugugaggaucaga

SEQ ID NO: 568516 - RNA, 19 nt, Artificial Sequence
  Description of Artificial Sequence: Synthetic oligonucleotide
  Antisense strand to SEQ ID NO: 568515
ucugauccucacagcaagc

SEQ ID NO: 568517 - RNA, 19 nt, Artificial Sequence
  Description of Artificial Sequence: Synthetic oligonucleotide
  Sense strand starting at position 943 of SEQ ID NO: 318515
gcacaagacugacugcuua

SEQ ID NO: 568518 - RNA, 19 nt, Artificial Sequence
  Description of Artificial Sequence: Synthetic oligonucleotide
  Antisense strand to SEQ ID NO: 568517
uaagcagucagucuugugc

SEQ ID NO: 568519 - RNA, 19 nt, Artificial Sequence
  Description of Artificial Sequence: Synthetic oligonucleotide
  Sense strand starting at position 989 of SEQ ID NO: 318515
gauaaacuggccugcugaa

SEQ ID NO: 568520 - RNA, 19 nt, Artificial Sequence
  Description of Artificial Sequence: Synthetic oligonucleotide
  Antisense strand to SEQ ID NO: 568519
uucagcaggccaguuuauc

SEQ ID NO: 568521 - RNA, 19 nt, Artificial Sequence
  Description of Artificial Sequence: Synthetic oligonucleotide
  Sense strand starting at position 1068 of SEQ ID NO: 318515
gggaaagcuccuggacagu

SEQ ID NO: 568522 - RNA, 19 nt, Artificial Sequence
  Description of Artificial Sequence: Synthetic oligonucleotide
  Antisense strand to SEQ ID NO: 568521
acuguccaggagcuuuccc

SEQ ID NO: 568523 - RNA, 19 nt, Artificial Sequence
  Description of Artificial Sequence: Synthetic oligonucleotide
  Sense strand starting at position 1116 of SEQ ID NO: 318515
acgcaauuucugugaagcu

SEQ ID NO: 568524 - RNA, 19 nt, Artificial Sequence
  Description of Artificial Sequence: Synthetic oligonucleotide
  Antisense strand to SEQ ID NO: 568523
agcuucacagaaauugcgu

SEQ ID NO: 568525 - RNA, 19 nt, Artificial Sequence
  Description of Artificial Sequence: Synthetic oligonucleotide
  Sense strand starting at position 1183 of SEQ ID NO: 318515
ccacaugcagauuaguuua

SEQ ID NO: 568526 - RNA, 19 nt, Artificial Sequence
  Description of Artificial Sequence: Synthetic oligonucleotide
  Antisense strand to SEQ ID NO: 568525
uaaacuaaucugcaugugg

SEQ ID NO: 568527 - RNA, 19 nt, Artificial Sequence
  Description of Artificial Sequence: Synthetic oligonucleotide
  Sense strand starting at position 1191 of SEQ ID NO: 318515
agauuaguuuaggugggua

SEQ ID NO: 568528 - RNA, 19 nt, Artificial Sequence
  Description of Artificial Sequence: Synthetic oligonucleotide
  Antisense strand to SEQ ID NO: 568527
uacccaccuaaacuaaucu

SEQ ID NO: 568529 - RNA, 19 nt, Artificial Sequence
  Description of Artificial Sequence: Synthetic oligonucleotide
  Sense strand starting at position 1196 of SEQ ID NO: 318515
aguuuagguggguaaguuu

SEQ ID NO: 568530 - RNA, 19 nt, Artificial Sequence
  Description of Artificial Sequence: Synthetic oligonucleotide
  Antisense strand to SEQ ID NO: 568529
aaacuuacccaccuaaacu

SEQ ID NO: 568531 - RNA, 19 nt, Artificial Sequence
  Description of Artificial Sequence: Synthetic oligonucleotide
  Sense strand starting at position 1204 of SEQ ID NO: 318515
uggguaaguuuaucugaau

SEQ ID NO: 568532 - RNA, 19 nt, Artificial Sequence
  Description of Artificial Sequence: Synthetic oligonucleotide
  Antisense strand to SEQ ID NO: 568531
auucagauaaacuuaccca

SEQ ID NO: 568533 - RNA, 19 nt, Artificial Sequence
  Description of Artificial Sequence: Synthetic oligonucleotide
  Sense strand starting at position 1205 of SEQ ID NO: 318515
ggguaaguuuaucugaauc

SEQ ID NO: 568534 - RNA, 19 nt, Artificial Sequence
  Description of Artificial Sequence: Synthetic oligonucleotide
  Antisense strand to SEQ ID NO: 568533
gauucagauaaacuuaccc

SEQ ID NO: 568535 - RNA, 19 nt, Artificial Sequence
  Description of Artificial Sequence: Synthetic oligonucleotide
  Sense strand starting at position 1225 of SEQ ID NO: 318515
caugcagauguagaauuau

SEQ ID NO: 568536 - RNA, 19 nt, Artificial Sequence
  Description of Artificial Sequence: Synthetic oligonucleotide
  Antisense strand to SEQ ID NO: 568535
auaauucuacaucugcaug

SEQ ID NO: 568537 - RNA, 19 nt, Artificial Sequence
  Description of Artificial Sequence: Synthetic oligonucleotide
  Sense strand starting at position 1269 of SEQ ID NO: 318515
ugauucuagcaauguacaa

SEQ ID NO: 568538 - RNA, 19 nt, Artificial Sequence
  Description of Artificial Sequence: Synthetic oligonucleotide
  Antisense strand to SEQ ID NO: 568537
uuguacauugcuagaauca

SEQ ID NO: 568539 - RNA, 19 nt, Artificial Sequence
  Description of Artificial Sequence: Synthetic oligonucleotide
  Sense strand starting at position 1597 of SEQ ID NO: 318515
guacuuguuccagaaacaa

SEQ ID NO: 568540 - RNA, 19 nt, Artificial Sequence
  Description of Artificial Sequence: Synthetic oligonucleotide
  Antisense strand to SEQ ID NO: 568539
uuguuucuggaacaaguac

SEQ ID NO: 568541 - RNA, 19 nt, Artificial Sequence
  Description of Artificial Sequence: Synthetic oligonucleotide
  Sense strand starting at position 1714 of SEQ ID NO: 318515
cccagagguuuggcgagaa

SEQ ID NO: 568542 - RNA, 19 nt, Artificial Sequence
  Description of Artificial Sequence: Synthetic oligonucleotide
  Antisense strand to SEQ ID NO: 568541
uucucgccaaaccucuggg

SEQ ID NO: 568543 - RNA, 19 nt, Artificial Sequence
  Description of Artificial Sequence: Synthetic oligonucleotide
  Sense strand starting at position 2094 of SEQ ID NO: 318515
aguuguuaacuuuaugauc

SEQ ID NO: 568544 - RNA, 19 nt, Artificial Sequence
  Description of Artificial Sequence: Synthetic oligonucleotide
  Antisense strand to SEQ ID NO: 568543
gaucauaaaguuaacaacu

SEQ ID NO: 568545 - RNA, 19 nt, Artificial Sequence
  Description of Artificial Sequence: Synthetic oligonucleotide
  Sense strand starting at position 2225 of SEQ ID NO: 318515
uguaguauccaaggaguca

SEQ ID NO: 568546 - RNA, 19 nt, Artificial Sequence
  Description of Artificial Sequence: Synthetic oligonucleotide
  Antisense strand to SEQ ID NO: 568545
ugacuccuuggauacuaca

SEQ ID NO: 568547 - RNA, 19 nt, Artificial Sequence
  Description of Artificial Sequence: Synthetic oligonucleotide
  Sense strand starting at position 2226 of SEQ ID NO: 318515
guaguauccaaggagucag

SEQ ID NO: 568548 - RNA, 19 nt, Artificial Sequence
  Description of Artificial Sequence: Synthetic oligonucleotide
  Antisense strand to SEQ ID NO: 568547
cugacuccuuggauacuac

SEQ ID NO: 568549 - RNA, 19 nt, Artificial Sequence
  Description of Artificial Sequence: Synthetic oligonucleotide
  Sense strand starting at position 2300 of SEQ ID NO: 318515
aggauuuccugggaagguc

SEQ ID NO: 568550 - RNA, 19 nt, Artificial Sequence
  Description of Artificial Sequence: Synthetic oligonucleotide
  Antisense strand to SEQ ID NO: 568549
gaccuucccaggaaauccu

SEQ ID NO: 568551 - RNA, 19 nt, Artificial Sequence
  Description of Artificial Sequence: Synthetic oligonucleotide
  Sense strand starting at position 2473 of SEQ ID NO: 318515
cguauauacacauacguga

SEQ ID NO: 568552 - RNA, 19 nt, Artificial Sequence
  Description of Artificial Sequence: Synthetic oligonucleotide
  Antisense strand to SEQ ID NO: 568551
ucacguauguguauauacg

SEQ ID NO: 568553 - RNA, 19 nt, Artificial Sequence
  Description of Artificial Sequence: Synthetic oligonucleotide
  Sense strand starting at position 2644 of SEQ ID NO: 318515
uuacaaagguauccgauua

SEQ ID NO: 568554 - RNA, 19 nt, Artificial Sequence
  Description of Artificial Sequence: Synthetic oligonucleotide
  Antisense strand to SEQ ID NO: 568553
uaaucggauaccuuuguaa

SEQ ID NO: 568555 - RNA, 19 nt, Artificial Sequence
  Description of Artificial Sequence: Synthetic oligonucleotide
  Sense strand starting at position 2649 of SEQ ID NO: 318515
aagguauccgauuaaguga

SEQ ID NO: 568556 - RNA, 19 nt, Artificial Sequence
  Description of Artificial Sequence: Synthetic oligonucleotide
  Antisense strand to SEQ ID NO: 568555
ucacuuaaucggauaccuu

SEQ ID NO: 568557 - RNA, 19 nt, Artificial Sequence
  Description of Artificial Sequence: Synthetic oligonucleotide
  Sense strand starting at position 2652 of SEQ ID NO: 318515
guauccgauuaagugaaua

SEQ ID NO: 568558 - RNA, 19 nt, Artificial Sequence
  Description of Artificial Sequence: Synthetic oligonucleotide
  Antisense strand to SEQ ID NO: 568557
uauucacuuaaucggauac

SEQ ID NO: 568559 - RNA, 19 nt, Artificial Sequence
  Description of Artificial Sequence: Synthetic oligonucleotide
  Sense strand starting at position 2687 of SEQ ID NO: 318515
caggguaguccuuaucugu

SEQ ID NO: 568560 - RNA, 19 nt, Artificial Sequence
  Description of Artificial Sequence: Synthetic oligonucleotide
  Antisense strand to SEQ ID NO: 568559
acagauaaggacuacccug

SEQ ID NO: 568561 - RNA, 19 nt, Artificial Sequence
  Description of Artificial Sequence: Synthetic oligonucleotide
  Sense strand starting at position 2706 of SEQ ID NO: 318515
gucaaccacuguucuaaau

SEQ ID NO: 568562 - RNA, 19 nt, Artificial Sequence
  Description of Artificial Sequence: Synthetic oligonucleotide
  Antisense strand to SEQ ID NO: 568561
auuuagaacagugguugac

SEQ ID NO: 568563 - RNA, 19 nt, Artificial Sequence
  Description of Artificial Sequence: Synthetic oligonucleotide
  Sense strand starting at position 2790 of SEQ ID NO: 318515
ucaucuugcagaugaggga

SEQ ID NO: 568564 - RNA, 19 nt, Artificial Sequence
  Description of Artificial Sequence: Synthetic oligonucleotide
  Antisense strand to SEQ ID NO: 568563
ucccucaucugcaagauga

SEQ ID NO: 568565 - RNA, 19 nt, Artificial Sequence
  Description of Artificial Sequence: Synthetic oligonucleotide
  Sense strand starting at position 2843 of SEQ ID NO: 318515
gggagucacagcuagcaga

SEQ ID NO: 568566 - RNA, 19 nt, Artificial Sequence
  Description of Artificial Sequence: Synthetic oligonucleotide
  Antisense strand to SEQ ID NO: 568565
ucugcuagcugugacuccc

SEQ ID NO: 568567 - RNA, 19 nt, Artificial Sequence
  Description of Artificial Sequence: Synthetic oligonucleotide
  Sense strand starting at position 2882 of SEQ ID NO: 318515
uaacaaugucauggaguga

SEQ ID NO: 568568 - RNA, 19 nt, Artificial Sequence
  Description of Artificial Sequence: Synthetic oligonucleotide
  Antisense strand to SEQ ID NO: 568567
ucacuccaugacauuguua

SEQ ID NO: 568569 - RNA, 19 nt, Artificial Sequence
  Description of Artificial Sequence: Synthetic oligonucleotide
  Sense strand starting at position 2886 of SEQ ID NO: 318515
aaugucauggagugauaua

SEQ ID NO: 568570 - RNA, 19 nt, Artificial Sequence
  Description of Artificial Sequence: Synthetic oligonucleotide
  Antisense strand to SEQ ID NO: 568569
uauaucacuccaugacauu

SEQ ID NO: 568571 - RNA, 19 nt, Artificial Sequence
  Description of Artificial Sequence: Synthetic oligonucleotide
  Sense strand starting at position 3202 of SEQ ID NO: 318515
aggugaagaggugguucaa

SEQ ID NO: 568572 - RNA, 19 nt, Artificial Sequence
  Description of Artificial Sequence: Synthetic oligonucleotide
  Antisense strand to SEQ ID NO: 568571
uugaaccaccucuucaccu

SEQ ID NO: 568573 - RNA, 19 nt, Artificial Sequence
  Description of Artificial Sequence: Synthetic oligonucleotide
  Sense strand starting at position 3679 of SEQ ID NO: 318515
aaagaaacuggguguucuu

SEQ ID NO: 568574 - RNA, 19 nt, Artificial Sequence
  Description of Artificial Sequence: Synthetic oligonucleotide
  Antisense strand to SEQ ID NO: 568573
aagaacacccaguuucuuu

SEQ ID NO: 568575 - RNA, 19 nt, Artificial Sequence
  Description of Artificial Sequence: Synthetic oligonucleotide
  Sense strand starting at position 3719 of SEQ ID NO: 318515
auaucuucucucuagacgu

SEQ ID NO: 568576 - RNA, 19 nt, Artificial Sequence
  Description of Artificial Sequence: Synthetic oligonucleotide
  Antisense strand to SEQ ID NO: 568575
acgucuagagagaagauau

SEQ ID NO: 568577 - RNA, 19 nt, Artificial Sequence
  Description of Artificial Sequence: Synthetic oligonucleotide
  Sense strand starting at position 3721 of SEQ ID NO: 318515
aucuucucucuagacguaa

SEQ ID NO: 568578 - RNA, 19 nt, Artificial Sequence
  Description of Artificial Sequence: Synthetic oligonucleotide
  Antisense strand to SEQ ID NO: 568577
uuacgucuagagagaagau

SEQ ID NO: 568579 - RNA, 19 nt, Artificial Sequence
  Description of Artificial Sequence: Synthetic oligonucleotide
  Sense strand starting at position 3725 of SEQ ID NO: 318515
ucucucuagacguaaggau

SEQ ID NO: 568580 - RNA, 19 nt, Artificial Sequence
  Description of Artificial Sequence: Synthetic oligonucleotide
  Antisense strand to SEQ ID NO: 568579
auccuuacgucuagagaga

SEQ ID NO: 568581 - RNA, 19 nt, Artificial Sequence
  Description of Artificial Sequence: Synthetic oligonucleotide
  Sense strand starting at position 3753 of SEQ ID NO: 318515
uuauuaugcagagaguguu

SEQ ID NO: 568582 - RNA, 19 nt, Artificial Sequence
  Description of Artificial Sequence: Synthetic oligonucleotide
  Antisense strand to SEQ ID NO: 568581
aacacucucugcauaauaa

SEQ ID NO: 568583 - RNA, 19 nt, Artificial Sequence
  Description of Artificial Sequence: Synthetic oligonucleotide
  Sense strand starting at position 3759 of SEQ ID NO: 318515
ugcagagaguguucagaca

SEQ ID NO: 568584 - RNA, 19 nt, Artificial Sequence
  Description of Artificial Sequence: Synthetic oligonucleotide
  Antisense strand to SEQ ID NO: 568583
ugucugaacacucucugca

SEQ ID NO: 568585 - RNA, 19 nt, Artificial Sequence
  Description of Artificial Sequence: Synthetic oligonucleotide
  Sense strand starting at position 3902 of SEQ ID NO: 318515
ggagccgaugguuaucuau

SEQ ID NO: 568586 - RNA, 19 nt, Artificial Sequence
  Description of Artificial Sequence: Synthetic oligonucleotide
  Antisense strand to SEQ ID NO: 568585
auagauaaccaucggcucc

SEQ ID NO: 568587 - RNA, 19 nt, Artificial Sequence
  Description of Artificial Sequence: Synthetic oligonucleotide
  Sense strand starting at position 3904 of SEQ ID NO: 318515
agccgaugguuaucuauuu

SEQ ID NO: 568588 - RNA, 19 nt, Artificial Sequence
  Description of Artificial Sequence: Synthetic oligonucleotide
  Antisense strand to SEQ ID NO: 568587
aaauagauaaccaucggcu

SEQ ID NO: 568589 - RNA, 19 nt, Artificial Sequence
  Description of Artificial Sequence: Synthetic oligonucleotide
  Sense strand starting at position 90 of SEQ ID NO: 318516
ucuguucuacaggaaaucu

SEQ ID NO: 568590 - RNA, 19 nt, Artificial Sequence
  Description of Artificial Sequence: Synthetic oligonucleotide
  Antisense strand to SEQ ID NO: 568589
agauuuccuguagaacaga

SEQ ID NO: 568591 - RNA, 19 nt, Artificial Sequence
  Description of Artificial Sequence: Synthetic oligonucleotide
  Sense strand starting at position 98 of SEQ ID NO: 318516
acaggaaaucuuuggcuga

SEQ ID NO: 568592 - RNA, 19 nt, Artificial Sequence
  Description of Artificial Sequence: Synthetic oligonucleotide
  Antisense strand to SEQ ID NO: 568591
ucagccaaagauuuccugu

SEQ ID NO: 568593 - RNA, 19 nt, Artificial Sequence
  Description of Artificial Sequence: Synthetic oligonucleotide
  Sense strand starting at position 100 of SEQ ID NO: 318516
aggaaaucuuuggcugaag

SEQ ID NO: 568594 - RNA, 19 nt, Artificial Sequence
  Description of Artificial Sequence: Synthetic oligonucleotide
  Antisense strand to SEQ ID NO: 568593
cuucagccaaagauuuccu

SEQ ID NO: 568595 - RNA, 19 nt, Artificial Sequence
  Description of Artificial Sequence: Synthetic oligonucleotide
  Sense strand starting at position 102 of SEQ ID NO: 318516
gaaaucuuuggcugaagga

SEQ ID NO: 568596 - RNA, 19 nt, Artificial Sequence
  Description of Artificial Sequence: Synthetic oligonucleotide
  Antisense strand to SEQ ID NO: 568595
uccuucagccaaagauuuc

SEQ ID NO: 568597 - RNA, 19 nt, Artificial Sequence
  Description of Artificial Sequence: Synthetic oligonucleotide
  Sense strand starting at position 362 of SEQ ID NO: 318516
accacagcucuaugaagaa

SEQ ID NO: 568598 - RNA, 19 nt, Artificial Sequence
  Description of Artificial Sequence: Synthetic oligonucleotide
  Antisense strand to SEQ ID NO: 568597
uucuucauagagcuguggu

SEQ ID NO: 568599 - RNA, 19 nt, Artificial Sequence
  Description of Artificial Sequence: Synthetic oligonucleotide
  Sense strand starting at position 431 of SEQ ID NO: 318516
aguuaaauaaguugucgag

SEQ ID NO: 568600 - RNA, 19 nt, Artificial Sequence
  Description of Artificial Sequence: Synthetic oligonucleotide
  Antisense strand to SEQ ID NO: 568599
cucgacaacuuauuuaacu

SEQ ID NO: 568601 - RNA, 19 nt, Artificial Sequence
  Description of Artificial Sequence: Synthetic oligonucleotide
  Sense strand starting at position 435 of SEQ ID NO: 318516
aaauaaguugucgaggcaa

SEQ ID NO: 568602 - RNA, 19 nt, Artificial Sequence
  Description of Artificial Sequence: Synthetic oligonucleotide
  Antisense strand to SEQ ID NO: 568601
uugccucgacaacuuauuu

SEQ ID NO: 568603 - RNA, 19 nt, Artificial Sequence
  Description of Artificial Sequence: Synthetic oligonucleotide
  Sense strand starting at position 497 of SEQ ID NO: 318516
ccaagugaguagccaagau

SEQ ID NO: 568604 - RNA, 19 nt, Artificial Sequence
  Description of Artificial Sequence: Synthetic oligonucleotide
  Antisense strand to SEQ ID NO: 568603
aucuuggcuacucacuugg

SEQ ID NO: 568605 - RNA, 19 nt, Artificial Sequence
  Description of Artificial Sequence: Synthetic oligonucleotide
  Sense strand starting at position 501 of SEQ ID NO: 318516
gugaguagccaagaugaca

SEQ ID NO: 568606 - RNA, 19 nt, Artificial Sequence
  Description of Artificial Sequence: Synthetic oligonucleotide
  Antisense strand to SEQ ID NO: 568605
ugucaucuuggcuacucac

SEQ ID NO: 568607 - RNA, 19 nt, Artificial Sequence
  Description of Artificial Sequence: Synthetic oligonucleotide
  Sense strand starting at position 865 of SEQ ID NO: 318516
agaagaaaguugucuguca

SEQ ID NO: 568608 - RNA, 19 nt, Artificial Sequence
  Description of Artificial Sequence: Synthetic oligonucleotide
  Antisense strand to SEQ ID NO: 568607
ugacagacaacuuucuucu

SEQ ID NO: 568609 - RNA, 19 nt, Artificial Sequence
  Description of Artificial Sequence: Synthetic oligonucleotide
  Sense strand starting at position 866 of SEQ ID NO: 318516
gaagaaaguugucugucag

SEQ ID NO: 568610 - RNA, 19 nt, Artificial Sequence
  Description of Artificial Sequence: Synthetic oligonucleotide
  Antisense strand to SEQ ID NO: 568609
cugacagacaacuuucuuc

SEQ ID NO: 568611 - RNA, 19 nt, Artificial Sequence
  Description of Artificial Sequence: Synthetic oligonucleotide
  Sense strand starting at position 874 of SEQ ID NO: 318516
uugucugucagagaguaga

SEQ ID NO: 568612 - RNA, 19 nt, Artificial Sequence
  Description of Artificial Sequence: Synthetic oligonucleotide
  Antisense strand to SEQ ID NO: 568611
ucuacucucugacagacaa

SEQ ID NO: 568613 - RNA, 19 nt, Artificial Sequence
  Description of Artificial Sequence: Synthetic oligonucleotide
  Sense strand starting at position 982 of SEQ ID NO: 318516
gaaugauuccuuggagcaa

SEQ ID NO: 568614 - RNA, 19 nt, Artificial Sequence
  Description of Artificial Sequence: Synthetic oligonucleotide
  Antisense strand to SEQ ID NO: 568613
uugcuccaaggaaucauuc

SEQ ID NO: 568615 - RNA, 19 nt, Artificial Sequence
  Description of Artificial Sequence: Synthetic oligonucleotide
  Sense strand starting at position 986 of SEQ ID NO: 318516
gauuccuuggagcaauguu

SEQ ID NO: 568616 - RNA, 19 nt, Artificial Sequence
  Description of Artificial Sequence: Synthetic oligonucleotide
  Antisense strand to SEQ ID NO: 568615
aacauugcuccaaggaauc

SEQ ID NO: 568617 - RNA, 19 nt, Artificial Sequence
  Description of Artificial Sequence: Synthetic oligonucleotide
  Sense strand starting at position 1238 of SEQ ID NO: 318516
ucacucucccaugaguuga

SEQ ID NO: 568618 - RNA, 19 nt, Artificial Sequence
  Description of Artificial Sequence: Synthetic oligonucleotide
  Antisense strand to SEQ ID NO: 568617
ucaacucaugggagaguga

SEQ ID NO: 568619 - RNA, 19 nt, Artificial Sequence
  Description of Artificial Sequence: Synthetic oligonucleotide
  Sense strand starting at position 1243 of SEQ ID NO: 318516
cucccaugaguugacaauu

SEQ ID NO: 568620 - RNA, 19 nt, Artificial Sequence
  Description of Artificial Sequence: Synthetic oligonucleotide
  Antisense strand to SEQ ID NO: 568619
aauugucaacucaugggag

SEQ ID NO: 568621 - RNA, 19 nt, Artificial Sequence
  Description of Artificial Sequence: Synthetic oligonucleotide
  Sense strand starting at position 1253 of SEQ ID NO: 318516
uugacaauuucuuagagca

SEQ ID NO: 568622 - RNA, 19 nt, Artificial Sequence
  Description of Artificial Sequence: Synthetic oligonucleotide
  Antisense strand to SEQ ID NO: 568621
ugcucuaagaaauugucaa

SEQ ID NO: 568623 - RNA, 19 nt, Artificial Sequence
  Description of Artificial Sequence: Synthetic oligonucleotide
  Sense strand starting at position 2536 of SEQ ID NO: 318516
gggagagguuggucaauag

SEQ ID NO: 568624 - RNA, 19 nt, Artificial Sequence
  Description of Artificial Sequence: Synthetic oligonucleotide
  Antisense strand to SEQ ID NO: 568623
cuauugaccaaccucuccc

SEQ ID NO: 568625 - RNA, 19 nt, Artificial Sequence
  Description of Artificial Sequence: Synthetic oligonucleotide
  Sense strand starting at position 2540 of SEQ ID NO: 318516
gagguuggucaauagguaa

SEQ ID NO: 568626 - RNA, 19 nt, Artificial Sequence
  Description of Artificial Sequence: Synthetic oligonucleotide
  Antisense strand to SEQ ID NO: 568625
uuaccuauugaccaaccuc

SEQ ID NO: 568627 - RNA, 19 nt, Artificial Sequence
  Description of Artificial Sequence: Synthetic oligonucleotide
  Sense strand starting at position 2771 of SEQ ID NO: 318516
gcccauaaauguguagaau

SEQ ID NO: 568628 - RNA, 19 nt, Artificial Sequence
  Description of Artificial Sequence: Synthetic oligonucleotide
  Antisense strand to SEQ ID NO: 568627
auucuacacauuuaugggc

SEQ ID NO: 568629 - RNA, 19 nt, Artificial Sequence
  Description of Artificial Sequence: Synthetic oligonucleotide
  Sense strand starting at position 2829 of SEQ ID NO: 318516
acagcaagucuacagguau

SEQ ID NO: 568630 - RNA, 19 nt, Artificial Sequence
  Description of Artificial Sequence: Synthetic oligonucleotide
  Antisense strand to SEQ ID NO: 568629
auaccuguagacuugcugu

SEQ ID NO: 568631 - RNA, 19 nt, Artificial Sequence
  Description of Artificial Sequence: Synthetic oligonucleotide
  Sense strand starting at position 2919 of SEQ ID NO: 318516
uugacacuguggcuaaauu

SEQ ID NO: 568632 - RNA, 19 nt, Artificial Sequence
  Description of Artificial Sequence: Synthetic oligonucleotide
  Antisense strand to SEQ ID NO: 568631
aauuuagccacagugucaa

SEQ ID NO: 568633 - RNA, 19 nt, Artificial Sequence
  Description of Artificial Sequence: Synthetic oligonucleotide
  Sense strand starting at position 2985 of SEQ ID NO: 318516
gcugaaugccagcaaggua

SEQ ID NO: 568634 - RNA, 19 nt, Artificial Sequence
  Description of Artificial Sequence: Synthetic oligonucleotide
  Antisense strand to SEQ ID NO: 568633
uaccuugcuggcauucagc

SEQ ID NO: 568635 - RNA, 19 nt, Artificial Sequence
  Description of Artificial Sequence: Synthetic oligonucleotide
  Sense strand starting at position 3012 of SEQ ID NO: 318516
gcaugacugcucuaacaac

SEQ ID NO: 568636 - RNA, 19 nt, Artificial Sequence
  Description of Artificial Sequence: Synthetic oligonucleotide
  Antisense strand to SEQ ID NO: 568635
guuguuagagcagucaugc

SEQ ID NO: 568637 - RNA, 19 nt, Artificial Sequence
  Description of Artificial Sequence: Synthetic oligonucleotide
  Sense strand starting at position 3224 of SEQ ID NO: 318516
ucaaguuuauauucugaga

SEQ ID NO: 568638 - RNA, 19 nt, Artificial Sequence
  Description of Artificial Sequence: Synthetic oligonucleotide
  Antisense strand to SEQ ID NO: 568637
ucucagaauauaaacuuga

SEQ ID NO: 568639 - RNA, 19 nt, Artificial Sequence
  Description of Artificial Sequence: Synthetic oligonucleotide
  Sense strand starting at position 3426 of SEQ ID NO: 318516
aggcucucacuguacauua

SEQ ID NO: 568640 - RNA, 19 nt, Artificial Sequence
  Description of Artificial Sequence: Synthetic oligonucleotide
  Antisense strand to SEQ ID NO: 568639
uaauguacagugagagccu

SEQ ID NO: 568641 - RNA, 19 nt, Artificial Sequence
  Description of Artificial Sequence: Synthetic oligonucleotide
  Sense strand starting at position 3428 of SEQ ID NO: 318516
gcucucacuguacauuauu

SEQ ID NO: 568642 - RNA, 19 nt, Artificial Sequence
  Description of Artificial Sequence: Synthetic oligonucleotide
  Antisense strand to SEQ ID NO: 568641
aauaauguacagugagagc

SEQ ID NO: 568643 - RNA, 19 nt, Artificial Sequence
  Description of Artificial Sequence: Synthetic oligonucleotide
  Sense strand starting at position 3468 of SEQ ID NO: 318516
cccauaauguaggcaucau

SEQ ID NO: 568644 - RNA, 19 nt, Artificial Sequence
  Description of Artificial Sequence: Synthetic oligonucleotide
  Antisense strand to SEQ ID NO: 568643
augaugccuacauuauggg

SEQ ID NO: 568645 - RNA, 19 nt, Artificial Sequence
  Description of Artificial Sequence: Synthetic oligonucleotide
  Sense strand starting at position 3488 of SEQ ID NO: 318516
ucuacuuuguaagugagga

SEQ ID NO: 568646 - RNA, 19 nt, Artificial Sequence
  Description of Artificial Sequence: Synthetic oligonucleotide
  Antisense strand to SEQ ID NO: 568645
uccucacuuacaaaguaga

SEQ ID NO: 568647 - RNA, 19 nt, Artificial Sequence
  Description of Artificial Sequence: Synthetic oligonucleotide
  Sense strand starting at position 3489 of SEQ ID NO: 318516
cuacuuuguaagugaggaa

SEQ ID NO: 568648 - RNA, 19 nt, Artificial Sequence
  Description of Artificial Sequence: Synthetic oligonucleotide
  Antisense strand to SEQ ID NO: 568647
uuccucacuuacaaaguag

SEQ ID NO: 568649 - RNA, 19 nt, Artificial Sequence
  Description of Artificial Sequence: Synthetic oligonucleotide
  Sense strand starting at position 3588 of SEQ ID NO: 318516
aggucuaguugauuccaca

SEQ ID NO: 568650 - RNA, 19 nt, Artificial Sequence
  Description of Artificial Sequence: Synthetic oligonucleotide
  Antisense strand to SEQ ID NO: 568649
uguggaaucaacuagaccu

SEQ ID NO: 568651 - RNA, 19 nt, Artificial Sequence
  Description of Artificial Sequence: Synthetic oligonucleotide
  Sense strand starting at position 3620 of SEQ ID NO: 318516
acguuucugauacauggga

SEQ ID NO: 568652 - RNA, 19 nt, Artificial Sequence
  Description of Artificial Sequence: Synthetic oligonucleotide
  Antisense strand to SEQ ID NO: 568651
ucccauguaucagaaacgu

SEQ ID NO: 568653 - RNA, 19 nt, Artificial Sequence
  Description of Artificial Sequence: Synthetic oligonucleotide
  Sense strand starting at position 3622 of SEQ ID NO: 318516
guuucugauacaugggaua

SEQ ID NO: 568654 - RNA, 19 nt, Artificial Sequence
  Description of Artificial Sequence: Synthetic oligonucleotide
  Antisense strand to SEQ ID NO: 568653
uaucccauguaucagaaac

SEQ ID NO: 568655 - RNA, 19 nt, Artificial Sequence
  Description of Artificial Sequence: Synthetic oligonucleotide
  Sense strand starting at position 3646 of SEQ ID NO: 318516
uggguucucccaugacuac

SEQ ID NO: 568656 - RNA, 19 nt, Artificial Sequence
  Description of Artificial Sequence: Synthetic oligonucleotide
  Antisense strand to SEQ ID NO: 568655
guagucaugggagaaccca

SEQ ID NO: 568657 - RNA, 19 nt, Artificial Sequence
  Description of Artificial Sequence: Synthetic oligonucleotide
  Sense strand starting at position 3647 of SEQ ID NO: 318516
ggguucucccaugacuacu

SEQ ID NO: 568658 - RNA, 19 nt, Artificial Sequence
  Description of Artificial Sequence: Synthetic oligonucleotide
  Antisense strand to SEQ ID NO: 568657
aguagucaugggagaaccc

SEQ ID NO: 568659 - RNA, 19 nt, Artificial Sequence
  Description of Artificial Sequence: Synthetic oligonucleotide
  Sense strand starting at position 3780 of SEQ ID NO: 318516
gggucucucugaucacauu

SEQ ID NO: 568660 - RNA, 19 nt, Artificial Sequence
  Description of Artificial Sequence: Synthetic oligonucleotide
  Antisense strand to SEQ ID NO: 568659
aaugugaucagagagaccc

SEQ ID NO: 568661 - RNA, 19 nt, Artificial Sequence
  Description of Artificial Sequence: Synthetic oligonucleotide
  Sense strand starting at position 3842 of SEQ ID NO: 318516
aucuacuucccauacguuu

SEQ ID NO: 568662 - RNA, 19 nt, Artificial Sequence
  Description of Artificial Sequence: Synthetic oligonucleotide
  Antisense strand to SEQ ID NO: 568661
aaacguaugggaaguagau

SEQ ID NO: 568663 - RNA, 19 nt, Artificial Sequence
  Description of Artificial Sequence: Synthetic oligonucleotide
  Sense strand starting at position 3864 of SEQ ID NO: 318516
auguguuucccuuacugaa

SEQ ID NO: 568664 - RNA, 19 nt, Artificial Sequence
  Description of Artificial Sequence: Synthetic oligonucleotide
  Antisense strand to SEQ ID NO: 568663
uucaguaagggaaacacau

SEQ ID NO: 568665 - RNA, 19 nt, Artificial Sequence
  Description of Artificial Sequence: Synthetic oligonucleotide
  Sense strand starting at position 3935 of SEQ ID NO: 318516
ggacaagaguuucuuuaga

SEQ ID NO: 568666 - RNA, 19 nt, Artificial Sequence
  Description of Artificial Sequence: Synthetic oligonucleotide
  Antisense strand to SEQ ID NO: 568665
ucuaaagaaacucuugucc

SEQ ID NO: 568667 - RNA, 19 nt, Artificial Sequence
  Description of Artificial Sequence: Synthetic oligonucleotide
  Sense strand starting at position 3970 of SEQ ID NO: 318516
cugggauguacuugaaagu

SEQ ID NO: 568668 - RNA, 19 nt, Artificial Sequence
  Description of Artificial Sequence: Synthetic oligonucleotide
  Antisense strand to SEQ ID NO: 568667
acuuucaaguacaucccag

SEQ ID NO: 568669 - RNA, 19 nt, Artificial Sequence
  Description of Artificial Sequence: Synthetic oligonucleotide
  Sense strand starting at position 294 of SEQ ID NO: 318517
gugggcauuugauguauac

SEQ ID NO: 568670 - RNA, 19 nt, Artificial Sequence
  Description of Artificial Sequence: Synthetic oligonucleotide
  Antisense strand to SEQ ID NO: 568669
guauacaucaaaugcccac

SEQ ID NO: 568671 - RNA, 19 nt, Artificial Sequence
  Description of Artificial Sequence: Synthetic oligonucleotide
  Sense strand starting at position 304 of SEQ ID NO: 318517
gauguauacuugucaccug

SEQ ID NO: 568672 - RNA, 19 nt, Artificial Sequence
  Description of Artificial Sequence: Synthetic oligonucleotide
  Antisense strand to SEQ ID NO: 568671
caggugacaaguauacauc

SEQ ID NO: 568673 - RNA, 19 nt, Artificial Sequence
  Description of Artificial Sequence: Synthetic oligonucleotide
  Sense strand starting at position 305 of SEQ ID NO: 318517
auguauacuugucaccuga

SEQ ID NO: 568674 - RNA, 19 nt, Artificial Sequence
  Description of Artificial Sequence: Synthetic oligonucleotide
  Antisense strand to SEQ ID NO: 568673
ucaggugacaaguauacau

SEQ ID NO: 568675 - RNA, 19 nt, Artificial Sequence
  Description of Artificial Sequence: Synthetic oligonucleotide
  Sense strand starting at position 307 of SEQ ID NO: 318517
guauacuugucaccugaau

SEQ ID NO: 568676 - RNA, 19 nt, Artificial Sequence
  Description of Artificial Sequence: Synthetic oligonucleotide
  Antisense strand to SEQ ID NO: 568675
auucaggugacaaguauac

SEQ ID NO: 568677 - RNA, 19 nt, Artificial Sequence
  Description of Artificial Sequence: Synthetic oligonucleotide
  Sense strand starting at position 465 of SEQ ID NO: 318517
cauggugucugugacaagu

SEQ ID NO: 568678 - RNA, 19 nt, Artificial Sequence
  Description of Artificial Sequence: Synthetic oligonucleotide
  Antisense strand to SEQ ID NO: 568677
acuugucacagacaccaug

SEQ ID NO: 568679 - RNA, 19 nt, Artificial Sequence
  Description of Artificial Sequence: Synthetic oligonucleotide
  Sense strand starting at position 467 of SEQ ID NO: 318517
uggugucugugacaaguca

SEQ ID NO: 568680 - RNA, 19 nt, Artificial Sequence
  Description of Artificial Sequence: Synthetic oligonucleotide
  Antisense strand to SEQ ID NO: 568679
ugacuugucacagacacca

SEQ ID NO: 568681 - RNA, 19 nt, Artificial Sequence
  Description of Artificial Sequence: Synthetic oligonucleotide
  Sense strand starting at position 496 of SEQ ID NO: 318517
gggauguggcucuggaguu

SEQ ID NO: 568682 - RNA, 19 nt, Artificial Sequence
  Description of Artificial Sequence: Synthetic oligonucleotide
  Antisense strand to SEQ ID NO: 568681
aacuccagagccacauccc

SEQ ID NO: 568683 - RNA, 19 nt, Artificial Sequence
  Description of Artificial Sequence: Synthetic oligonucleotide
  Sense strand starting at position 580 of SEQ ID NO: 318517
aagacaguuuccgguggau

SEQ ID NO: 568684 - RNA, 19 nt, Artificial Sequence
  Description of Artificial Sequence: Synthetic oligonucleotide
  Antisense strand to SEQ ID NO: 568683
auccaccggaaacugucuu

SEQ ID NO: 568685 - RNA, 19 nt, Artificial Sequence
  Description of Artificial Sequence: Synthetic oligonucleotide
  Sense strand starting at position 582 of SEQ ID NO: 318517
gacaguuuccgguggauaa

SEQ ID NO: 568686 - RNA, 19 nt, Artificial Sequence
  Description of Artificial Sequence: Synthetic oligonucleotide
  Antisense strand to SEQ ID NO: 568685
uuauccaccggaaacuguc

SEQ ID NO: 568687 - RNA, 19 nt, Artificial Sequence
  Description of Artificial Sequence: Synthetic oligonucleotide
  Sense strand starting at position 583 of SEQ ID NO: 318517
acaguuuccgguggauaaa

SEQ ID NO: 568688 - RNA, 19 nt, Artificial Sequence
  Description of Artificial Sequence: Synthetic oligonucleotide
  Antisense strand to SEQ ID NO: 568687
uuuauccaccggaaacugu

SEQ ID NO: 568689 - RNA, 19 nt, Artificial Sequence
  Description of Artificial Sequence: Synthetic oligonucleotide
  Sense strand starting at position 677 of SEQ ID NO: 318517
aacgaaugaucaggauuua

SEQ ID NO: 568690 - RNA, 19 nt, Artificial Sequence
  Description of Artificial Sequence: Synthetic oligonucleotide
  Antisense strand to SEQ ID NO: 568689
uaaauccugaucauucguu

SEQ ID NO: 568691 - RNA, 19 nt, Artificial Sequence
  Description of Artificial Sequence: Synthetic oligonucleotide
  Sense strand starting at position 768 of SEQ ID NO: 318517
cgggucuucccucaguacu

SEQ ID NO: 568692 - RNA, 19 nt, Artificial Sequence
  Description of Artificial Sequence: Synthetic oligonucleotide
  Antisense strand to SEQ ID NO: 568691
aguacugagggaagacccg

SEQ ID NO: 568693 - RNA, 19 nt, Artificial Sequence
  Description of Artificial Sequence: Synthetic oligonucleotide
  Sense strand starting at position 817 of SEQ ID NO: 318517
cagacugaguuccugggua

SEQ ID NO: 568694 - RNA, 19 nt, Artificial Sequence
  Description of Artificial Sequence: Synthetic oligonucleotide
  Antisense strand to SEQ ID NO: 568693
uacccaggaacucagucug

SEQ ID NO: 568695 - RNA, 19 nt, Artificial Sequence
  Description of Artificial Sequence: Synthetic oligonucleotide
  Sense strand starting at position 819 of SEQ ID NO: 318517
gacugaguuccuggguacu

SEQ ID NO: 568696 - RNA, 19 nt, Artificial Sequence
  Description of Artificial Sequence: Synthetic oligonucleotide
  Antisense strand to SEQ ID NO: 568695
aguacccaggaacucaguc

SEQ ID NO: 568697 - RNA, 19 nt, Artificial Sequence
  Description of Artificial Sequence: Synthetic oligonucleotide
  Sense strand starting at position 882 of SEQ ID NO: 318517
gcggacguucugggaaguu

SEQ ID NO: 568698 - RNA, 19 nt, Artificial Sequence
  Description of Artificial Sequence: Synthetic oligonucleotide
  Antisense strand to SEQ ID NO: 568697
aacuucccagaacguccgc

SEQ ID NO: 568699 - RNA, 19 nt, Artificial Sequence
  Description of Artificial Sequence: Synthetic oligonucleotide
  Sense strand starting at position 983 of SEQ ID NO: 318517
cgagugugcgacugguuua

SEQ ID NO: 568700 - RNA, 19 nt, Artificial Sequence
  Description of Artificial Sequence: Synthetic oligonucleotide
  Antisense strand to SEQ ID NO: 568699
uaaaccagucgcacacucg

SEQ ID NO: 568701 - RNA, 19 nt, Artificial Sequence
  Description of Artificial Sequence: Synthetic oligonucleotide
  Sense strand starting at position 1331 of SEQ ID NO: 318517
ccggcuucuccagaugcuu

SEQ ID NO: 568702 - RNA, 19 nt, Artificial Sequence
  Description of Artificial Sequence: Synthetic oligonucleotide
  Antisense strand to SEQ ID NO: 568701
aagcaucuggagaagccgg

SEQ ID NO: 568703 - RNA, 19 nt, Artificial Sequence
  Description of Artificial Sequence: Synthetic oligonucleotide
  Sense strand starting at position 1339 of SEQ ID NO: 318517
uccagaugcuuggcgacaa

SEQ ID NO: 568704 - RNA, 19 nt, Artificial Sequence
  Description of Artificial Sequence: Synthetic oligonucleotide
  Antisense strand to SEQ ID NO: 568703
uugucgccaagcaucugga

SEQ ID NO: 568705 - RNA, 19 nt, Artificial Sequence
  Description of Artificial Sequence: Synthetic oligonucleotide
  Sense strand starting at position 1340 of SEQ ID NO: 318517
ccagaugcuuggcgacaaa

SEQ ID NO: 568706 - RNA, 19 nt, Artificial Sequence
  Description of Artificial Sequence: Synthetic oligonucleotide
  Antisense strand to SEQ ID NO: 568705
uuugucgccaagcaucugg

SEQ ID NO: 568707 - RNA, 19 nt, Artificial Sequence
  Description of Artificial Sequence: Synthetic oligonucleotide
  Sense strand starting at position 2355 of SEQ ID NO: 318517
uggacuugugugcaccuua

SEQ ID NO: 568708 - RNA, 19 nt, Artificial Sequence
  Description of Artificial Sequence: Synthetic oligonucleotide
  Antisense strand to SEQ ID NO: 568707
uaaggugcacacaagucca

SEQ ID NO: 568709 - RNA, 19 nt, Artificial Sequence
  Description of Artificial Sequence: Synthetic oligonucleotide
  Sense strand starting at position 2367 of SEQ ID NO: 318517
caccuuagcuguccugagu

SEQ ID NO: 568710 - RNA, 19 nt, Artificial Sequence
  Description of Artificial Sequence: Synthetic oligonucleotide
  Antisense strand to SEQ ID NO: 568709
acucaggacagcuaaggug

SEQ ID NO: 568711 - RNA, 19 nt, Artificial Sequence
  Description of Artificial Sequence: Synthetic oligonucleotide
  Sense strand starting at position 2376 of SEQ ID NO: 318517
uguccugaguguguccuua

SEQ ID NO: 568712 - RNA, 19 nt, Artificial Sequence
  Description of Artificial Sequence: Synthetic oligonucleotide
  Antisense strand to SEQ ID NO: 568711
uaaggacacacucaggaca

SEQ ID NO: 568713 - RNA, 19 nt, Artificial Sequence
  Description of Artificial Sequence: Synthetic oligonucleotide
  Sense strand starting at position 2380 of SEQ ID NO: 318517
cugaguguguccuuaggga

SEQ ID NO: 568714 - RNA, 19 nt, Artificial Sequence
  Description of Artificial Sequence: Synthetic oligonucleotide
  Antisense strand to SEQ ID NO: 568713
ucccuaaggacacacucag

SEQ ID NO: 568715 - RNA, 19 nt, Artificial Sequence
  Description of Artificial Sequence: Synthetic oligonucleotide
  Sense strand starting at position 2395 of SEQ ID NO: 318517
gggagcuggacauaugcau

SEQ ID NO: 568716 - RNA, 19 nt, Artificial Sequence
  Description of Artificial Sequence: Synthetic oligonucleotide
  Antisense strand to SEQ ID NO: 568715
augcauauguccagcuccc

SEQ ID NO: 568717 - RNA, 19 nt, Artificial Sequence
  Description of Artificial Sequence: Synthetic oligonucleotide
  Sense strand starting at position 2574 of SEQ ID NO: 318517
caagaaaugcuccguuccu

SEQ ID NO: 568718 - RNA, 19 nt, Artificial Sequence
  Description of Artificial Sequence: Synthetic oligonucleotide
  Antisense strand to SEQ ID NO: 568717
aggaacggagcauuucuug

SEQ ID NO: 568719 - RNA, 19 nt, Artificial Sequence
  Description of Artificial Sequence: Synthetic oligonucleotide
  Sense strand starting at position 2702 of SEQ ID NO: 318517
guguccucccaugguagua

SEQ ID NO: 568720 - RNA, 19 nt, Artificial Sequence
  Description of Artificial Sequence: Synthetic oligonucleotide
  Antisense strand to SEQ ID NO: 568719
uacuaccaugggaggacac

SEQ ID NO: 568721 - RNA, 19 nt, Artificial Sequence
  Description of Artificial Sequence: Synthetic oligonucleotide
  Sense strand starting at position 2712 of SEQ ID NO: 318517
augguaguaucccuggcaa

SEQ ID NO: 568722 - RNA, 19 nt, Artificial Sequence
  Description of Artificial Sequence: Synthetic oligonucleotide
  Antisense strand to SEQ ID NO: 568721
uugccagggauacuaccau

SEQ ID NO: 568723 - RNA, 19 nt, Artificial Sequence
  Description of Artificial Sequence: Synthetic oligonucleotide
  Sense strand starting at position 2714 of SEQ ID NO: 318517
gguaguaucccuggcaaau

SEQ ID NO: 568724 - RNA, 19 nt, Artificial Sequence
  Description of Artificial Sequence: Synthetic oligonucleotide
  Antisense strand to SEQ ID NO: 568723
auuugccagggauacuacc

SEQ ID NO: 568725 - RNA, 19 nt, Artificial Sequence
  Description of Artificial Sequence: Synthetic oligonucleotide
  Sense strand starting at position 2733 of SEQ ID NO: 318517
aaagguuuauugguguuaa

SEQ ID NO: 568726 - RNA, 19 nt, Artificial Sequence
  Description of Artificial Sequence: Synthetic oligonucleotide
  Antisense strand to SEQ ID NO: 568725
uuaacaccaauaaaccuuu

SEQ ID NO: 568727 - RNA, 19 nt, Artificial Sequence
  Description of Artificial Sequence: Synthetic oligonucleotide
  Sense strand starting at position 2734 of SEQ ID NO: 318517
aagguuuauugguguuaau

SEQ ID NO: 568728 - RNA, 19 nt, Artificial Sequence
  Description of Artificial Sequence: Synthetic oligonucleotide
  Antisense strand to SEQ ID NO: 568727
auuaacaccaauaaaccuu

SEQ ID NO: 568729 - RNA, 19 nt, Artificial Sequence
  Description of Artificial Sequence: Synthetic oligonucleotide
  Sense strand starting at position 2737 of SEQ ID NO: 318517
guuuauugguguuaauaac

SEQ ID NO: 568730 - RNA, 19 nt, Artificial Sequence
  Description of Artificial Sequence: Synthetic oligonucleotide
  Antisense strand to SEQ ID NO: 568729
guuauuaacaccaauaaac

SEQ ID NO: 568731 - RNA, 19 nt, Artificial Sequence
  Description of Artificial Sequence: Synthetic oligonucleotide
  Sense strand starting at position 2746 of SEQ ID NO: 318517
uguuaauaaccaggacucu

SEQ ID NO: 568732 - RNA, 19 nt, Artificial Sequence
  Description of Artificial Sequence: Synthetic oligonucleotide
  Antisense strand to SEQ ID NO: 568731
agaguccugguuauuaaca

SEQ ID NO: 568733 - RNA, 19 nt, Artificial Sequence
  Description of Artificial Sequence: Synthetic oligonucleotide
  Sense strand starting at position 2763 of SEQ ID NO: 318517
cugaacucuggccaagagu

SEQ ID NO: 568734 - RNA, 19 nt, Artificial Sequence
  Description of Artificial Sequence: Synthetic oligonucleotide
  Antisense strand to SEQ ID NO: 568733
acucuuggccagaguucag

SEQ ID NO: 568735 - RNA, 19 nt, Artificial Sequence
  Description of Artificial Sequence: Synthetic oligonucleotide
  Sense strand starting at position 2834 of SEQ ID NO: 318517
gggucuucuuggguucgga

SEQ ID NO: 568736 - RNA, 19 nt, Artificial Sequence
  Description of Artificial Sequence: Synthetic oligonucleotide
  Antisense strand to SEQ ID NO: 568735
uccgaacccaagaagaccc

SEQ ID NO: 568737 - RNA, 19 nt, Artificial Sequence
  Description of Artificial Sequence: Synthetic oligonucleotide
  Sense strand starting at position 2949 of SEQ ID NO: 318517
agcgcuaggcuuuaagaca

SEQ ID NO: 568738 - RNA, 19 nt, Artificial Sequence
  Description of Artificial Sequence: Synthetic oligonucleotide
  Antisense strand to SEQ ID NO: 568737
ugucuuaaagccuagcgcu

SEQ ID NO: 568739 - RNA, 19 nt, Artificial Sequence
  Description of Artificial Sequence: Synthetic oligonucleotide
  Sense strand starting at position 2957 of SEQ ID NO: 318517
gcuuuaagacagugccuaa

SEQ ID NO: 568740 - RNA, 19 nt, Artificial Sequence
  Description of Artificial Sequence: Synthetic oligonucleotide
  Antisense strand to SEQ ID NO: 568739
uuaggcacugucuuaaagc

SEQ ID NO: 568741 - RNA, 19 nt, Artificial Sequence
  Description of Artificial Sequence: Synthetic oligonucleotide
  Sense strand starting at position 2978 of SEQ ID NO: 318517
accuuucggcuuugaaaga

SEQ ID NO: 568742 - RNA, 19 nt, Artificial Sequence
  Description of Artificial Sequence: Synthetic oligonucleotide
  Antisense strand to SEQ ID NO: 568741
ucuuucaaagccgaaaggu

SEQ ID NO: 568743 - RNA, 19 nt, Artificial Sequence
  Description of Artificial Sequence: Synthetic oligonucleotide
  Sense strand starting at position 3064 of SEQ ID NO: 318517
ccggaucucugcucacuga

SEQ ID NO: 568744 - RNA, 19 nt, Artificial Sequence
  Description of Artificial Sequence: Synthetic oligonucleotide
  Antisense strand to SEQ ID NO: 568743
ucagugagcagagauccgg

SEQ ID NO: 568745 - RNA, 19 nt, Artificial Sequence
  Description of Artificial Sequence: Synthetic oligonucleotide
  Sense strand starting at position 3859 of SEQ ID NO: 318517
agcgauucuuauuaaccca

SEQ ID NO: 568746 - RNA, 19 nt, Artificial Sequence
  Description of Artificial Sequence: Synthetic oligonucleotide
  Antisense strand to SEQ ID NO: 568745
uggguuaauaagaaucgcu

SEQ ID NO: 568747 - RNA, 19 nt, Artificial Sequence
  Description of Artificial Sequence: Synthetic oligonucleotide
  Sense strand starting at position 3939 of SEQ ID NO: 318517
ggaugcaguccagagcgau

SEQ ID NO: 568748 - RNA, 19 nt, Artificial Sequence
  Description of Artificial Sequence: Synthetic oligonucleotide
  Antisense strand to SEQ ID NO: 568747
aucgcucuggacugcaucc

SEQ ID NO: 568749 - RNA, 19 nt, Artificial Sequence
  Description of Artificial Sequence: Synthetic oligonucleotide
  Sense strand starting at position 56 of SEQ ID NO: 318518
uggccaguucuuuggccua

SEQ ID NO: 568750 - RNA, 19 nt, Artificial Sequence
  Description of Artificial Sequence: Synthetic oligonucleotide
  Antisense strand to SEQ ID NO: 568749
uaggccaaagaacuggcca

SEQ ID NO: 568751 - RNA, 19 nt, Artificial Sequence
  Description of Artificial Sequence: Synthetic oligonucleotide
  Sense strand starting at position 464 of SEQ ID NO: 318518
gguaacucugcaggauaca

SEQ ID NO: 568752 - RNA, 19 nt, Artificial Sequence
  Description of Artificial Sequence: Synthetic oligonucleotide
  Antisense strand to SEQ ID NO: 568751
uguauccugcagaguuacc

SEQ ID NO: 568753 - RNA, 19 nt, Artificial Sequence
  Description of Artificial Sequence: Synthetic oligonucleotide
  Sense strand starting at position 465 of SEQ ID NO: 318518
guaacucugcaggauacau

SEQ ID NO: 568754 - RNA, 19 nt, Artificial Sequence
  Description of Artificial Sequence: Synthetic oligonucleotide
  Antisense strand to SEQ ID NO: 568753
auguauccugcagaguuac

SEQ ID NO: 568755 - RNA, 19 nt, Artificial Sequence
  Description of Artificial Sequence: Synthetic oligonucleotide
  Sense strand starting at position 695 of SEQ ID NO: 318518
ccgugucucucaccuggaa

SEQ ID NO: 568756 - RNA, 19 nt, Artificial Sequence
  Description of Artificial Sequence: Synthetic oligonucleotide
  Antisense strand to SEQ ID NO: 568755
uuccaggugagagacacgg

SEQ ID NO: 568757 - RNA, 19 nt, Artificial Sequence
  Description of Artificial Sequence: Synthetic oligonucleotide
  Sense strand starting at position 697 of SEQ ID NO: 318518
gugucucucaccuggaaag

SEQ ID NO: 568758 - RNA, 19 nt, Artificial Sequence
  Description of Artificial Sequence: Synthetic oligonucleotide
  Antisense strand to SEQ ID NO: 568757
cuuuccaggugagagacac

SEQ ID NO: 568759 - RNA, 19 nt, Artificial Sequence
  Description of Artificial Sequence: Synthetic oligonucleotide
  Sense strand starting at position 699 of SEQ ID NO: 318518
gucucucaccuggaaaguu

SEQ ID NO: 568760 - RNA, 19 nt, Artificial Sequence
  Description of Artificial Sequence: Synthetic oligonucleotide
  Antisense strand to SEQ ID NO: 568759
aacuuuccaggugagagac

SEQ ID NO: 568761 - RNA, 19 nt, Artificial Sequence
  Description of Artificial Sequence: Synthetic oligonucleotide
  Sense strand starting at position 708 of SEQ ID NO: 318518
cuggaaaguuuggucugaa

SEQ ID NO: 568762 - RNA, 19 nt, Artificial Sequence
  Description of Artificial Sequence: Synthetic oligonucleotide
  Antisense strand to SEQ ID NO: 568761
uucagaccaaacuuuccag

SEQ ID NO: 568763 - RNA, 19 nt, Artificial Sequence
  Description of Artificial Sequence: Synthetic oligonucleotide
  Sense strand starting at position 709 of SEQ ID NO: 318518
uggaaaguuuggucugaaa

SEQ ID NO: 568764 - RNA, 19 nt, Artificial Sequence
  Description of Artificial Sequence: Synthetic oligonucleotide
  Antisense strand to SEQ ID NO: 568763
uuucagaccaaacuuucca

SEQ ID NO: 568765 - RNA, 19 nt, Artificial Sequence
  Description of Artificial Sequence: Synthetic oligonucleotide
  Sense strand starting at position 711 of SEQ ID NO: 318518
gaaaguuuggucugaaaca

SEQ ID NO: 568766 - RNA, 19 nt, Artificial Sequence
  Description of Artificial Sequence: Synthetic oligonucleotide
  Antisense strand to SEQ ID NO: 568765
uguuucagaccaaacuuuc

SEQ ID NO: 568767 - RNA, 19 nt, Artificial Sequence
  Description of Artificial Sequence: Synthetic oligonucleotide
  Sense strand starting at position 712 of SEQ ID NO: 318518
aaaguuuggucugaaacaa

SEQ ID NO: 568768 - RNA, 19 nt, Artificial Sequence
  Description of Artificial Sequence: Synthetic oligonucleotide
  Antisense strand to SEQ ID NO: 568767
uuguuucagaccaaacuuu

SEQ ID NO: 568769 - RNA, 19 nt, Artificial Sequence
  Description of Artificial Sequence: Synthetic oligonucleotide
  Sense strand starting at position 770 of SEQ ID NO: 318518
gggugaacagucgacugaa

SEQ ID NO: 568770 - RNA, 19 nt, Artificial Sequence
  Description of Artificial Sequence: Synthetic oligonucleotide
  Antisense strand to SEQ ID NO: 568769
uucagucgacuguucaccc

SEQ ID NO: 568771 - RNA, 19 nt, Artificial Sequence
  Description of Artificial Sequence: Synthetic oligonucleotide
  Sense strand starting at position 773 of SEQ ID NO: 318518
ugaacagucgacugaaaug

SEQ ID NO: 568772 - RNA, 19 nt, Artificial Sequence
  Description of Artificial Sequence: Synthetic oligonucleotide
  Antisense strand to SEQ ID NO: 568771
cauuucagucgacuguuca

SEQ ID NO: 568773 - RNA, 19 nt, Artificial Sequence
  Description of Artificial Sequence: Synthetic oligonucleotide
  Sense strand starting at position 783 of SEQ ID NO: 318518
acugaaauguggcucaagu

SEQ ID NO: 568774 - RNA, 19 nt, Artificial Sequence
  Description of Artificial Sequence: Synthetic oligonucleotide
  Antisense strand to SEQ ID NO: 568773
acuugagccacauuucagu

SEQ ID NO: 568775 - RNA, 19 nt, Artificial Sequence
  Description of Artificial Sequence: Synthetic oligonucleotide
  Sense strand starting at position 785 of SEQ ID NO: 318518
ugaaauguggcucaaguuu

SEQ ID NO: 568776 - RNA, 19 nt, Artificial Sequence
  Description of Artificial Sequence: Synthetic oligonucleotide
  Antisense strand to SEQ ID NO: 568775
aaacuugagccacauuuca

SEQ ID NO: 568777 - RNA, 19 nt, Artificial Sequence
  Description of Artificial Sequence: Synthetic oligonucleotide
  Sense strand starting at position 861 of SEQ ID NO: 318518
uggguauggucccuccuga

SEQ ID NO: 568778 - RNA, 19 nt, Artificial Sequence
  Description of Artificial Sequence: Synthetic oligonucleotide
  Antisense strand to SEQ ID NO: 568777
ucaggagggaccauaccca

SEQ ID NO: 568779 - RNA, 19 nt, Artificial Sequence
  Description of Artificial Sequence: Synthetic oligonucleotide
  Sense strand starting at position 2020 of SEQ ID NO: 318518
cagagucaccuugggauca

SEQ ID NO: 568780 - RNA, 19 nt, Artificial Sequence
  Description of Artificial Sequence: Synthetic oligonucleotide
  Antisense strand to SEQ ID NO: 568779
ugaucccaaggugacucug

SEQ ID NO: 568781 - RNA, 19 nt, Artificial Sequence
  Description of Artificial Sequence: Synthetic oligonucleotide
  Sense strand starting at position 2022 of SEQ ID NO: 318518
gagucaccuugggaucaga

SEQ ID NO: 568782 - RNA, 19 nt, Artificial Sequence
  Description of Artificial Sequence: Synthetic oligonucleotide
  Antisense strand to SEQ ID NO: 568781
ucugaucccaaggugacuc

SEQ ID NO: 568783 - RNA, 19 nt, Artificial Sequence
  Description of Artificial Sequence: Synthetic oligonucleotide
  Sense strand starting at position 2186 of SEQ ID NO: 318518
cugagaauguacccauguu

SEQ ID NO: 568784 - RNA, 19 nt, Artificial Sequence
  Description of Artificial Sequence: Synthetic oligonucleotide
  Antisense strand to SEQ ID NO: 568783
aacauggguacauucucag

SEQ ID NO: 568785 - RNA, 19 nt, Artificial Sequence
  Description of Artificial Sequence: Synthetic oligonucleotide
  Sense strand starting at position 2254 of SEQ ID NO: 318518
uuggcuucuccaugugauc

SEQ ID NO: 568786 - RNA, 19 nt, Artificial Sequence
  Description of Artificial Sequence: Synthetic oligonucleotide
  Antisense strand to SEQ ID NO: 568785
gaucacauggagaagccaa

SEQ ID NO: 568787 - RNA, 19 nt, Artificial Sequence
  Description of Artificial Sequence: Synthetic oligonucleotide
  Sense strand starting at position 2265 of SEQ ID NO: 318518
augugaucuuucccugaua

SEQ ID NO: 568788 - RNA, 19 nt, Artificial Sequence
  Description of Artificial Sequence: Synthetic oligonucleotide
  Antisense strand to SEQ ID NO: 568787
uaucagggaaagaucacau

SEQ ID NO: 568789 - RNA, 19 nt, Artificial Sequence
  Description of Artificial Sequence: Synthetic oligonucleotide
  Sense strand starting at position 2266 of SEQ ID NO: 318518
ugugaucuuucccugauaa

SEQ ID NO: 568790 - RNA, 19 nt, Artificial Sequence
  Description of Artificial Sequence: Synthetic oligonucleotide
  Antisense strand to SEQ ID NO: 568789
uuaucagggaaagaucaca

SEQ ID NO: 568791 - RNA, 19 nt, Artificial Sequence
  Description of Artificial Sequence: Synthetic oligonucleotide
  Sense strand starting at position 2267 of SEQ ID NO: 318518
gugaucuuucccugauaaa

SEQ ID NO: 568792 - RNA, 19 nt, Artificial Sequence
  Description of Artificial Sequence: Synthetic oligonucleotide
  Antisense strand to SEQ ID NO: 568791
uuuaucagggaaagaucac

SEQ ID NO: 568793 - RNA, 19 nt, Artificial Sequence
  Description of Artificial Sequence: Synthetic oligonucleotide
  Sense strand starting at position 2404 of SEQ ID NO: 318518
uguuccaggugcuuuauau

SEQ ID NO: 568794 - RNA, 19 nt, Artificial Sequence
  Description of Artificial Sequence: Synthetic oligonucleotide
  Antisense strand to SEQ ID NO: 568793
auauaaagcaccuggaaca

SEQ ID NO: 568795 - RNA, 19 nt, Artificial Sequence
  Description of Artificial Sequence: Synthetic oligonucleotide
  Sense strand starting at position 2443 of SEQ ID NO: 318518
gcaacugcugucugcauuu

SEQ ID NO: 568796 - RNA, 19 nt, Artificial Sequence
  Description of Artificial Sequence: Synthetic oligonucleotide
  Antisense strand to SEQ ID NO: 568795
aaaugcagacagcaguugc

SEQ ID NO: 568797 - RNA, 19 nt, Artificial Sequence
  Description of Artificial Sequence: Synthetic oligonucleotide
  Sense strand starting at position 2528 of SEQ ID NO: 318518
gcagaagccugccuggaau

SEQ ID NO: 568798 - RNA, 19 nt, Artificial Sequence
  Description of Artificial Sequence: Synthetic oligonucleotide
  Antisense strand to SEQ ID NO: 568797
auuccaggcaggcuucugc

SEQ ID NO: 568799 - RNA, 19 nt, Artificial Sequence
  Description of Artificial Sequence: Synthetic oligonucleotide
  Sense strand starting at position 2701 of SEQ ID NO: 318518
acacuauuggcagauucca

SEQ ID NO: 568800 - RNA, 19 nt, Artificial Sequence
  Description of Artificial Sequence: Synthetic oligonucleotide
  Antisense strand to SEQ ID NO: 568799
uggaaucugccaauagugu

SEQ ID NO: 568801 - RNA, 19 nt, Artificial Sequence
  Description of Artificial Sequence: Synthetic oligonucleotide
  Sense strand starting at position 2748 of SEQ ID NO: 318518
cugccuuucgucuaggaau

SEQ ID NO: 568802 - RNA, 19 nt, Artificial Sequence
  Description of Artificial Sequence: Synthetic oligonucleotide
  Antisense strand to SEQ ID NO: 568801
auuccuagacgaaaggcag

SEQ ID NO: 568803 - RNA, 19 nt, Artificial Sequence
  Description of Artificial Sequence: Synthetic oligonucleotide
  Sense strand starting at position 2750 of SEQ ID NO: 318518
gccuuucgucuaggaauga

SEQ ID NO: 568804 - RNA, 19 nt, Artificial Sequence
  Description of Artificial Sequence: Synthetic oligonucleotide
  Antisense strand to SEQ ID NO: 568803
ucauuccuagacgaaaggc

SEQ ID NO: 568805 - RNA, 19 nt, Artificial Sequence
  Description of Artificial Sequence: Synthetic oligonucleotide
  Sense strand starting at position 3000 of SEQ ID NO: 318518
gcauacagucaauguuaaa

SEQ ID NO: 568806 - RNA, 19 nt, Artificial Sequence
  Description of Artificial Sequence: Synthetic oligonucleotide
  Antisense strand to SEQ ID NO: 568805
uuuaacauugacuguaugc

SEQ ID NO: 568807 - RNA, 19 nt, Artificial Sequence
  Description of Artificial Sequence: Synthetic oligonucleotide
  Sense strand starting at position 3341 of SEQ ID NO: 318518
ccaaauauuugcugaaugu

SEQ ID NO: 568808 - RNA, 19 nt, Artificial Sequence
  Description of Artificial Sequence: Synthetic oligonucleotide
  Antisense strand to SEQ ID NO: 568807
acauucagcaaauauuugg

SEQ ID NO: 568809 - RNA, 19 nt, Artificial Sequence
  Description of Artificial Sequence: Synthetic oligonucleotide
  Sense strand starting at position 3351 of SEQ ID NO: 318518
gcugaaugucaagggaaau

SEQ ID NO: 568810 - RNA, 19 nt, Artificial Sequence
  Description of Artificial Sequence: Synthetic oligonucleotide
  Antisense strand to SEQ ID NO: 568809
auuucccuugacauucagc

SEQ ID NO: 568811 - RNA, 19 nt, Artificial Sequence
  Description of Artificial Sequence: Synthetic oligonucleotide
  Sense strand starting at position 3415 of SEQ ID NO: 318518
ggaagagaguuccuuagcu

SEQ ID NO: 568812 - RNA, 19 nt, Artificial Sequence
  Description of Artificial Sequence: Synthetic oligonucleotide
  Antisense strand to SEQ ID NO: 568811
agcuaaggaacucucuucc

SEQ ID NO: 568813 - RNA, 19 nt, Artificial Sequence
  Description of Artificial Sequence: Synthetic oligonucleotide
  Sense strand starting at position 3417 of SEQ ID NO: 318518
aagagaguuccuuagcuuc

SEQ ID NO: 568814 - RNA, 19 nt, Artificial Sequence
  Description of Artificial Sequence: Synthetic oligonucleotide
  Antisense strand to SEQ ID NO: 568813
gaagcuaaggaacucucuu

SEQ ID NO: 568815 - RNA, 19 nt, Artificial Sequence
  Description of Artificial Sequence: Synthetic oligonucleotide
  Sense strand starting at position 3529 of SEQ ID NO: 318518
augcaauauuagguacgaa

SEQ ID NO: 568816 - RNA, 19 nt, Artificial Sequence
  Description of Artificial Sequence: Synthetic oligonucleotide
  Antisense strand to SEQ ID NO: 568815
uucguaccuaauauugcau

SEQ ID NO: 568817 - RNA, 19 nt, Artificial Sequence
  Description of Artificial Sequence: Synthetic oligonucleotide
  Sense strand starting at position 3533 of SEQ ID NO: 318518
aauauuagguacgaacaga

SEQ ID NO: 568818 - RNA, 19 nt, Artificial Sequence
  Description of Artificial Sequence: Synthetic oligonucleotide
  Antisense strand to SEQ ID NO: 568817
ucuguucguaccuaauauu

SEQ ID NO: 568819 - RNA, 19 nt, Artificial Sequence
  Description of Artificial Sequence: Synthetic oligonucleotide
  Sense strand starting at position 3623 of SEQ ID NO: 318518
guaagaguugagugggugu

SEQ ID NO: 568820 - RNA, 19 nt, Artificial Sequence
  Description of Artificial Sequence: Synthetic oligonucleotide
  Antisense strand to SEQ ID NO: 568819
acacccacucaacucuuac

SEQ ID NO: 568821 - RNA, 19 nt, Artificial Sequence
  Description of Artificial Sequence: Synthetic oligonucleotide
  Sense strand starting at position 3646 of SEQ ID NO: 318518
gggucaggguaagagaaau

SEQ ID NO: 568822 - RNA, 19 nt, Artificial Sequence
  Description of Artificial Sequence: Synthetic oligonucleotide
  Antisense strand to SEQ ID NO: 568821
auuucucuuacccugaccc

SEQ ID NO: 568823 - RNA, 19 nt, Artificial Sequence
  Description of Artificial Sequence: Synthetic oligonucleotide
  Sense strand starting at position 3913 of SEQ ID NO: 318518
ggguuagugguaggaggau

SEQ ID NO: 568824 - RNA, 19 nt, Artificial Sequence
  Description of Artificial Sequence: Synthetic oligonucleotide
  Antisense strand to SEQ ID NO: 568823
auccuccuaccacuaaccc

SEQ ID NO: 568825 - RNA, 19 nt, Artificial Sequence
  Description of Artificial Sequence: Synthetic oligonucleotide
  Sense strand starting at position 3927 of SEQ ID NO: 318518
aggauaugguguuuccuaa

SEQ ID NO: 568826 - RNA, 19 nt, Artificial Sequence
  Description of Artificial Sequence: Synthetic oligonucleotide
  Antisense strand to SEQ ID NO: 568825
uuaggaaacaccauauccu

SEQ ID NO: 568827 - RNA, 19 nt, Artificial Sequence
  Description of Artificial Sequence: Synthetic oligonucleotide
  Sense strand starting at position 3962 of SEQ ID NO: 318518
cuacaacauucccaggaga

SEQ ID NO: 568828 - RNA, 19 nt, Artificial Sequence
  Description of Artificial Sequence: Synthetic oligonucleotide
  Antisense strand to SEQ ID NO: 568827
ucuccugggaauguuguag

SEQ ID NO: 568829 - RNA, 19 nt, Artificial Sequence
  Description of Artificial Sequence: Synthetic oligonucleotide
  Sense strand starting at position 119 of SEQ ID NO: 318519
cacaguuggccucaguaga

SEQ ID NO: 568830 - RNA, 19 nt, Artificial Sequence
  Description of Artificial Sequence: Synthetic oligonucleotide
  Antisense strand to SEQ ID NO: 568829
ucuacugaggccaacugug

SEQ ID NO: 568831 - RNA, 19 nt, Artificial Sequence
  Description of Artificial Sequence: Synthetic oligonucleotide
  Sense strand starting at position 137 of SEQ ID NO: 318519
agaaguaauagcuggccuu

SEQ ID NO: 568832 - RNA, 19 nt, Artificial Sequence
  Description of Artificial Sequence: Synthetic oligonucleotide
  Antisense strand to SEQ ID NO: 568831
aaggccagcuauuacuucu

SEQ ID NO: 568833 - RNA, 19 nt, Artificial Sequence
  Description of Artificial Sequence: Synthetic oligonucleotide
  Sense strand starting at position 419 of SEQ ID NO: 318519
aguucugacccauguuaua

SEQ ID NO: 568834 - RNA, 19 nt, Artificial Sequence
  Description of Artificial Sequence: Synthetic oligonucleotide
  Antisense strand to SEQ ID NO: 568833
uauaacaugggucagaacu

SEQ ID NO: 568835 - RNA, 19 nt, Artificial Sequence
  Description of Artificial Sequence: Synthetic oligonucleotide
  Sense strand starting at position 979 of SEQ ID NO: 318519
uacuuaguuuggguuaacu

SEQ ID NO: 568836 - RNA, 19 nt, Artificial Sequence
  Description of Artificial Sequence: Synthetic oligonucleotide
  Antisense strand to SEQ ID NO: 568835
aguuaacccaaacuaagua

SEQ ID NO: 568837 - RNA, 19 nt, Artificial Sequence
  Description of Artificial Sequence: Synthetic oligonucleotide
  Sense strand starting at position 981 of SEQ ID NO: 318519
cuuaguuuggguuaacuua

SEQ ID NO: 568838 - RNA, 19 nt, Artificial Sequence
  Description of Artificial Sequence: Synthetic oligonucleotide
  Antisense strand to SEQ ID NO: 568837
uaaguuaacccaaacuaag

SEQ ID NO: 568839 - RNA, 19 nt, Artificial Sequence
  Description of Artificial Sequence: Synthetic oligonucleotide
  Sense strand starting at position 1036 of SEQ ID NO: 318519
gguuuauugaggugggaaa

SEQ ID NO: 568840 - RNA, 19 nt, Artificial Sequence
  Description of Artificial Sequence: Synthetic oligonucleotide
  Antisense strand to SEQ ID NO: 568839
uuucccaccucaauaaacc

SEQ ID NO: 568841 - RNA, 19 nt, Artificial Sequence
  Description of Artificial Sequence: Synthetic oligonucleotide
  Sense strand starting at position 1037 of SEQ ID NO: 318519
guuuauugaggugggaaag

SEQ ID NO: 568842 - RNA, 19 nt, Artificial Sequence
  Description of Artificial Sequence: Synthetic oligonucleotide
  Antisense strand to SEQ ID NO: 568841
cuuucccaccucaauaaac

SEQ ID NO: 568843 - RNA, 19 nt, Artificial Sequence
  Description of Artificial Sequence: Synthetic oligonucleotide
  Sense strand starting at position 1185 of SEQ ID NO: 318519
gccucacacguguuagcau

SEQ ID NO: 568844 - RNA, 19 nt, Artificial Sequence
  Description of Artificial Sequence: Synthetic oligonucleotide
  Antisense strand to SEQ ID NO: 568843
augcuaacacgugugaggc

SEQ ID NO: 568845 - RNA, 19 nt, Artificial Sequence
  Description of Artificial Sequence: Synthetic oligonucleotide
  Sense strand starting at position 1194 of SEQ ID NO: 318519
guguuagcauuuccugauu

SEQ ID NO: 568846 - RNA, 19 nt, Artificial Sequence
  Description of Artificial Sequence: Synthetic oligonucleotide
  Antisense strand to SEQ ID NO: 568845
aaucaggaaaugcuaacac

SEQ ID NO: 568847 - RNA, 19 nt, Artificial Sequence
  Description of Artificial Sequence: Synthetic oligonucleotide
  Sense strand starting at position 1350 of SEQ ID NO: 318519
cgcaccaucuuaucggaaa

SEQ ID NO: 568848 - RNA, 19 nt, Artificial Sequence
  Description of Artificial Sequence: Synthetic oligonucleotide
  Antisense strand to SEQ ID NO: 568847
uuuccgauaagauggugcg

SEQ ID NO: 568849 - RNA, 19 nt, Artificial Sequence
  Description of Artificial Sequence: Synthetic oligonucleotide
  Sense strand starting at position 1481 of SEQ ID NO: 318519
gcaauaagagagugacaau

SEQ ID NO: 568850 - RNA, 19 nt, Artificial Sequence
  Description of Artificial Sequence: Synthetic oligonucleotide
  Antisense strand to SEQ ID NO: 568849
auugucacucucuuauugc

SEQ ID NO: 568851 - RNA, 19 nt, Artificial Sequence
  Description of Artificial Sequence: Synthetic oligonucleotide
  Sense strand starting at position 1484 of SEQ ID NO: 318519
auaagagagugacaauaau

SEQ ID NO: 568852 - RNA, 19 nt, Artificial Sequence
  Description of Artificial Sequence: Synthetic oligonucleotide
  Antisense strand to SEQ ID NO: 568851
auuauugucacucucuuau

SEQ ID NO: 568853 - RNA, 19 nt, Artificial Sequence
  Description of Artificial Sequence: Synthetic oligonucleotide
  Sense strand starting at position 1661 of SEQ ID NO: 318519
ugccaauaaagaggugaau

SEQ ID NO: 568854 - RNA, 19 nt, Artificial Sequence
  Description of Artificial Sequence: Synthetic oligonucleotide
  Antisense strand to SEQ ID NO: 568853
auucaccucuuuauuggca

SEQ ID NO: 568855 - RNA, 19 nt, Artificial Sequence
  Description of Artificial Sequence: Synthetic oligonucleotide
  Sense strand starting at position 2248 of SEQ ID NO: 318519
uuucuuucuagcggaagga

SEQ ID NO: 568856 - RNA, 19 nt, Artificial Sequence
  Description of Artificial Sequence: Synthetic oligonucleotide
  Antisense strand to SEQ ID NO: 568855
uccuuccgcuagaaagaaa

SEQ ID NO: 568857 - RNA, 19 nt, Artificial Sequence
  Description of Artificial Sequence: Synthetic oligonucleotide
  Sense strand starting at position 2309 of SEQ ID NO: 318519
aaguucuugugacucaguu

SEQ ID NO: 568858 - RNA, 19 nt, Artificial Sequence
  Description of Artificial Sequence: Synthetic oligonucleotide
  Antisense strand to SEQ ID NO: 568857
aacugagucacaagaacuu

SEQ ID NO: 568859 - RNA, 19 nt, Artificial Sequence
  Description of Artificial Sequence: Synthetic oligonucleotide
  Sense strand starting at position 2834 of SEQ ID NO: 318519
gcaggaucuuggcuuauca

SEQ ID NO: 568860 - RNA, 19 nt, Artificial Sequence
  Description of Artificial Sequence: Synthetic oligonucleotide
  Antisense strand to SEQ ID NO: 568859
ugauaagccaagauccugc

SEQ ID NO: 568861 - RNA, 19 nt, Artificial Sequence
  Description of Artificial Sequence: Synthetic oligonucleotide
  Sense strand starting at position 2836 of SEQ ID NO: 318519
aggaucuuggcuuaucaca

SEQ ID NO: 568862 - RNA, 19 nt, Artificial Sequence
  Description of Artificial Sequence: Synthetic oligonucleotide
  Antisense strand to SEQ ID NO: 568861
ugugauaagccaagauccu

SEQ ID NO: 568863 - RNA, 19 nt, Artificial Sequence
  Description of Artificial Sequence: Synthetic oligonucleotide
  Sense strand starting at position 2996 of SEQ ID NO: 318519
uggugucaacgcaguugua

SEQ ID NO: 568864 - RNA, 19 nt, Artificial Sequence
  Description of Artificial Sequence: Synthetic oligonucleotide
  Antisense strand to SEQ ID NO: 568863
uacaacugcguugacacca

SEQ ID NO: 568865 - RNA, 19 nt, Artificial Sequence
  Description of Artificial Sequence: Synthetic oligonucleotide
  Sense strand starting at position 2998 of SEQ ID NO: 318519
gugucaacgcaguuguaau

SEQ ID NO: 568866 - RNA, 19 nt, Artificial Sequence
  Description of Artificial Sequence: Synthetic oligonucleotide
  Antisense strand to SEQ ID NO: 568865
auuacaacugcguugacac

SEQ ID NO: 568867 - RNA, 19 nt, Artificial Sequence
  Description of Artificial Sequence: Synthetic oligonucleotide
  Sense strand starting at position 3030 of SEQ ID NO: 318519
ugaauaucaugcuuucugu

SEQ ID NO: 568868 - RNA, 19 nt, Artificial Sequence
  Description of Artificial Sequence: Synthetic oligonucleotide
  Antisense strand to SEQ ID NO: 568867
acagaaagcaugauauuca

SEQ ID NO: 568869 - RNA, 19 nt, Artificial Sequence
  Description of Artificial Sequence: Synthetic oligonucleotide
  Sense strand starting at position 3082 of SEQ ID NO: 318519
aacguccucugagcagaau

SEQ ID NO: 568870 - RNA, 19 nt, Artificial Sequence
  Description of Artificial Sequence: Synthetic oligonucleotide
  Antisense strand to SEQ ID NO: 568869
auucugcucagaggacguu

SEQ ID NO: 568871 - RNA, 19 nt, Artificial Sequence
  Description of Artificial Sequence: Synthetic oligonucleotide
  Sense strand starting at position 3179 of SEQ ID NO: 318519
gugguagaacugggaguua

SEQ ID NO: 568872 - RNA, 19 nt, Artificial Sequence
  Description of Artificial Sequence: Synthetic oligonucleotide
  Antisense strand to SEQ ID NO: 568871
uaacucccaguucuaccac

SEQ ID NO: 568873 - RNA, 19 nt, Artificial Sequence
  Description of Artificial Sequence: Synthetic oligonucleotide
  Sense strand starting at position 3205 of SEQ ID NO: 318519
auuuaagugucuccaaugu

SEQ ID NO: 568874 - RNA, 19 nt, Artificial Sequence
  Description of Artificial Sequence: Synthetic oligonucleotide
  Antisense strand to SEQ ID NO: 568873
acauuggagacacuuaaau

SEQ ID NO: 568875 - RNA, 19 nt, Artificial Sequence
  Description of Artificial Sequence: Synthetic oligonucleotide
  Sense strand starting at position 3340 of SEQ ID NO: 318519
ggucauucaugaguggaga

SEQ ID NO: 568876 - RNA, 19 nt, Artificial Sequence
  Description of Artificial Sequence: Synthetic oligonucleotide
  Antisense strand to SEQ ID NO: 568875
ucuccacucaugaaugacc

SEQ ID NO: 568877 - RNA, 19 nt, Artificial Sequence
  Description of Artificial Sequence: Synthetic oligonucleotide
  Sense strand starting at position 3341 of SEQ ID NO: 318519
gucauucaugaguggagaa

SEQ ID NO: 568878 - RNA, 19 nt, Artificial Sequence
  Description of Artificial Sequence: Synthetic oligonucleotide
  Antisense strand to SEQ ID NO: 568877
uucuccacucaugaaugac

SEQ ID NO: 568879 - RNA, 19 nt, Artificial Sequence
  Description of Artificial Sequence: Synthetic oligonucleotide
  Sense strand starting at position 3444 of SEQ ID NO: 318519
ccauguacucuaugagcuu

SEQ ID NO: 568880 - RNA, 19 nt, Artificial Sequence
  Description of Artificial Sequence: Synthetic oligonucleotide
  Antisense strand to SEQ ID NO: 568879
aagcucauagaguacaugg

SEQ ID NO: 568881 - RNA, 19 nt, Artificial Sequence
  Description of Artificial Sequence: Synthetic oligonucleotide
  Sense strand starting at position 3475 of SEQ ID NO: 318519
uuaccuucuugauuauguu

SEQ ID NO: 568882 - RNA, 19 nt, Artificial Sequence
  Description of Artificial Sequence: Synthetic oligonucleotide
  Antisense strand to SEQ ID NO: 568881
aacauaaucaagaagguaa

SEQ ID NO: 568883 - RNA, 19 nt, Artificial Sequence
  Description of Artificial Sequence: Synthetic oligonucleotide
  Sense strand starting at position 3530 of SEQ ID NO: 318519
ugagcaaaccuugguuacu

SEQ ID NO: 568884 - RNA, 19 nt, Artificial Sequence
  Description of Artificial Sequence: Synthetic oligonucleotide
  Antisense strand to SEQ ID NO: 568883
aguaaccaagguuugcuca

SEQ ID NO: 568885 - RNA, 19 nt, Artificial Sequence
  Description of Artificial Sequence: Synthetic oligonucleotide
  Sense strand starting at position 3531 of SEQ ID NO: 318519
gagcaaaccuugguuacua

SEQ ID NO: 568886 - RNA, 19 nt, Artificial Sequence
  Description of Artificial Sequence: Synthetic oligonucleotide
  Antisense strand to SEQ ID NO: 568885
uaguaaccaagguuugcuc

SEQ ID NO: 568887 - RNA, 19 nt, Artificial Sequence
  Description of Artificial Sequence: Synthetic oligonucleotide
  Sense strand starting at position 3541 of SEQ ID NO: 318519
ugguuacuaguaugggaag

SEQ ID NO: 568888 - RNA, 19 nt, Artificial Sequence
  Description of Artificial Sequence: Synthetic oligonucleotide
  Antisense strand to SEQ ID NO: 568887
cuucccauacuaguaacca

SEQ ID NO: 568889 - RNA, 19 nt, Artificial Sequence
  Description of Artificial Sequence: Synthetic oligonucleotide
  Sense strand starting at position 3574 of SEQ ID NO: 318519
ugggcaguaguucagugaa

SEQ ID NO: 568890 - RNA, 19 nt, Artificial Sequence
  Description of Artificial Sequence: Synthetic oligonucleotide
  Antisense strand to SEQ ID NO: 568889
uucacugaacuacugccca

SEQ ID NO: 568891 - RNA, 19 nt, Artificial Sequence
  Description of Artificial Sequence: Synthetic oligonucleotide
  Sense strand starting at position 3576 of SEQ ID NO: 318519
ggcaguaguucagugaaua

SEQ ID NO: 568892 - RNA, 19 nt, Artificial Sequence
  Description of Artificial Sequence: Synthetic oligonucleotide
  Antisense strand to SEQ ID NO: 568891
uauucacugaacuacugcc

SEQ ID NO: 568893 - RNA, 19 nt, Artificial Sequence
  Description of Artificial Sequence: Synthetic oligonucleotide
  Sense strand starting at position 3577 of SEQ ID NO: 318519
gcaguaguucagugaauag

SEQ ID NO: 568894 - RNA, 19 nt, Artificial Sequence
  Description of Artificial Sequence: Synthetic oligonucleotide
  Antisense strand to SEQ ID NO: 568893
cuauucacugaacuacugc

SEQ ID NO: 568895 - RNA, 19 nt, Artificial Sequence
  Description of Artificial Sequence: Synthetic oligonucleotide
  Sense strand starting at position 3631 of SEQ ID NO: 318519
agggccugauuuggaaaga

SEQ ID NO: 568896 - RNA, 19 nt, Artificial Sequence
  Description of Artificial Sequence: Synthetic oligonucleotide
  Antisense strand to SEQ ID NO: 568895
ucuuuccaaaucaggcccu

SEQ ID NO: 568897 - RNA, 19 nt, Artificial Sequence
  Description of Artificial Sequence: Synthetic oligonucleotide
  Sense strand starting at position 3779 of SEQ ID NO: 318519
agugauaaauuagagaaug

SEQ ID NO: 568898 - RNA, 19 nt, Artificial Sequence
  Description of Artificial Sequence: Synthetic oligonucleotide
  Antisense strand to SEQ ID NO: 568897
cauucucuaauuuaucacu

SEQ ID NO: 568899 - RNA, 19 nt, Artificial Sequence
  Description of Artificial Sequence: Synthetic oligonucleotide
  Sense strand starting at position 3813 of SEQ ID NO: 318519
auaagacuggcacgaguua

SEQ ID NO: 568900 - RNA, 19 nt, Artificial Sequence
  Description of Artificial Sequence: Synthetic oligonucleotide
  Antisense strand to SEQ ID NO: 568899
uaacucgugccagucuuau

SEQ ID NO: 568901 - RNA, 19 nt, Artificial Sequence
  Description of Artificial Sequence: Synthetic oligonucleotide
  Sense strand starting at position 3845 of SEQ ID NO: 318519
aauaaagugcuacaagagu

SEQ ID NO: 568902 - RNA, 19 nt, Artificial Sequence
  Description of Artificial Sequence: Synthetic oligonucleotide
  Antisense strand to SEQ ID NO: 568901
acucuuguagcacuuuauu

SEQ ID NO: 568903 - RNA, 19 nt, Artificial Sequence
  Description of Artificial Sequence: Synthetic oligonucleotide
  Sense strand starting at position 3911 of SEQ ID NO: 318519
aaaugaaugcuugggccaa

SEQ ID NO: 568904 - RNA, 19 nt, Artificial Sequence
  Description of Artificial Sequence: Synthetic oligonucleotide
  Antisense strand to SEQ ID NO: 568903
uuggcccaagcauucauuu

SEQ ID NO: 568905 - RNA, 19 nt, Artificial Sequence
  Description of Artificial Sequence: Synthetic oligonucleotide
  Sense strand starting at position 3913 of SEQ ID NO: 318519
augaaugcuugggccaaga

SEQ ID NO: 568906 - RNA, 19 nt, Artificial Sequence
  Description of Artificial Sequence: Synthetic oligonucleotide
  Antisense strand to SEQ ID NO: 568905
ucuuggcccaagcauucau

SEQ ID NO: 568907 - RNA, 19 nt, Artificial Sequence
  Description of Artificial Sequence: Synthetic oligonucleotide
  Sense strand starting at position 3915 of SEQ ID NO: 318519
gaaugcuugggccaagaga

SEQ ID NO: 568908 - RNA, 19 nt, Artificial Sequence
  Description of Artificial Sequence: Synthetic oligonucleotide
  Antisense strand to SEQ ID NO: 568907
ucucuuggcccaagcauuc

SEQ ID NO: 568909 - RNA, 19 nt, Artificial Sequence
  Description of Artificial Sequence: Synthetic oligonucleotide
  Sense strand starting at position 211 of SEQ ID NO: 318520
uuugcaugauugccaaaua

SEQ ID NO: 568910 - RNA, 19 nt, Artificial Sequence
  Description of Artificial Sequence: Synthetic oligonucleotide
  Antisense strand to SEQ ID NO: 568909
uauuuggcaaucaugcaaa

SEQ ID NO: 568911 - RNA, 19 nt, Artificial Sequence
  Description of Artificial Sequence: Synthetic oligonucleotide
  Sense strand starting at position 444 of SEQ ID NO: 318520
auacuuauugugcaucuau

SEQ ID NO: 568912 - RNA, 19 nt, Artificial Sequence
  Description of Artificial Sequence: Synthetic oligonucleotide
  Antisense strand to SEQ ID NO: 568911
auagaugcacaauaaguau

SEQ ID NO: 568913 - RNA, 19 nt, Artificial Sequence
  Description of Artificial Sequence: Synthetic oligonucleotide
  Sense strand starting at position 457 of SEQ ID NO: 318520
aucuauuauguccgauaca

SEQ ID NO: 568914 - RNA, 19 nt, Artificial Sequence
  Description of Artificial Sequence: Synthetic oligonucleotide
  Antisense strand to SEQ ID NO: 568913
uguaucggacauaauagau

SEQ ID NO: 568915 - RNA, 19 nt, Artificial Sequence
  Description of Artificial Sequence: Synthetic oligonucleotide
  Sense strand starting at position 480 of SEQ ID NO: 318520
gccacagcccuagauauau

SEQ ID NO: 568916 - RNA, 19 nt, Artificial Sequence
  Description of Artificial Sequence: Synthetic oligonucleotide
  Antisense strand to SEQ ID NO: 568915
auauaucuagggcuguggc

SEQ ID NO: 568917 - RNA, 19 nt, Artificial Sequence
  Description of Artificial Sequence: Synthetic oligonucleotide
  Sense strand starting at position 555 of SEQ ID NO: 318520
ucaugagcugccuaacuca

SEQ ID NO: 568918 - RNA, 19 nt, Artificial Sequence
  Description of Artificial Sequence: Synthetic oligonucleotide
  Antisense strand to SEQ ID NO: 568917
ugaguuaggcagcucauga

SEQ ID NO: 568919 - RNA, 19 nt, Artificial Sequence
  Description of Artificial Sequence: Synthetic oligonucleotide
  Sense strand starting at position 654 of SEQ ID NO: 318520
auucuauagugaucaucua

SEQ ID NO: 568920 - RNA, 19 nt, Artificial Sequence
  Description of Artificial Sequence: Synthetic oligonucleotide
  Antisense strand to SEQ ID NO: 568919
uagaugaucacuauagaau

SEQ ID NO: 568921 - RNA, 19 nt, Artificial Sequence
  Description of Artificial Sequence: Synthetic oligonucleotide
  Sense strand starting at position 716 of SEQ ID NO: 318520
agguuuagggacuguaaac

SEQ ID NO: 568922 - RNA, 19 nt, Artificial Sequence
  Description of Artificial Sequence: Synthetic oligonucleotide
  Antisense strand to SEQ ID NO: 568921
guuuacagucccuaaaccu

SEQ ID NO: 568923 - RNA, 19 nt, Artificial Sequence
  Description of Artificial Sequence: Synthetic oligonucleotide
  Sense strand starting at position 770 of SEQ ID NO: 318520
aaacgucuugaacgaguau

SEQ ID NO: 568924 - RNA, 19 nt, Artificial Sequence
  Description of Artificial Sequence: Synthetic oligonucleotide
  Antisense strand to SEQ ID NO: 568923
auacucguucaagacguuu

SEQ ID NO: 568925 - RNA, 19 nt, Artificial Sequence
  Description of Artificial Sequence: Synthetic oligonucleotide
  Sense strand starting at position 771 of SEQ ID NO: 318520
aacgucuugaacgaguauu

SEQ ID NO: 568926 - RNA, 19 nt, Artificial Sequence
  Description of Artificial Sequence: Synthetic oligonucleotide
  Antisense strand to SEQ ID NO: 568925
aauacucguucaagacguu

SEQ ID NO: 568927 - RNA, 19 nt, Artificial Sequence
  Description of Artificial Sequence: Synthetic oligonucleotide
  Sense strand starting at position 801 of SEQ ID NO: 318520
caugguaaacuguaugauc

SEQ ID NO: 568928 - RNA, 19 nt, Artificial Sequence
  Description of Artificial Sequence: Synthetic oligonucleotide
  Antisense strand to SEQ ID NO: 568927
gaucauacaguuuaccaug

SEQ ID NO: 568929 - RNA, 19 nt, Artificial Sequence
  Description of Artificial Sequence: Synthetic oligonucleotide
  Sense strand starting at position 803 of SEQ ID NO: 318520
ugguaaacuguaugaucua

SEQ ID NO: 568930 - RNA, 19 nt, Artificial Sequence
  Description of Artificial Sequence: Synthetic oligonucleotide
  Antisense strand to SEQ ID NO: 568929
uagaucauacaguuuacca

SEQ ID NO: 568931 - RNA, 19 nt, Artificial Sequence
  Description of Artificial Sequence: Synthetic oligonucleotide
  Sense strand starting at position 927 of SEQ ID NO: 318520
uugaguagguccucaacaa

SEQ ID NO: 568932 - RNA, 19 nt, Artificial Sequence
  Description of Artificial Sequence: Synthetic oligonucleotide
  Antisense strand to SEQ ID NO: 568931
uuguugaggaccuacucaa

SEQ ID NO: 568933 - RNA, 19 nt, Artificial Sequence
  Description of Artificial Sequence: Synthetic oligonucleotide
  Sense strand starting at position 928 of SEQ ID NO: 318520
ugaguagguccucaacaac

SEQ ID NO: 568934 - RNA, 19 nt, Artificial Sequence
  Description of Artificial Sequence: Synthetic oligonucleotide
  Antisense strand to SEQ ID NO: 568933
guuguugaggaccuacuca

SEQ ID NO: 568935 - RNA, 19 nt, Artificial Sequence
  Description of Artificial Sequence: Synthetic oligonucleotide
  Sense strand starting at position 1052 of SEQ ID NO: 318520
gaugcaggauucucgaaag

SEQ ID NO: 568936 - RNA, 19 nt, Artificial Sequence
  Description of Artificial Sequence: Synthetic oligonucleotide
  Antisense strand to SEQ ID NO: 568935
cuuucgagaauccugcauc

SEQ ID NO: 568937 - RNA, 19 nt, Artificial Sequence
  Description of Artificial Sequence: Synthetic oligonucleotide
  Sense strand starting at position 1058 of SEQ ID NO: 318520
ggauucucgaaaggcagau

SEQ ID NO: 568938 - RNA, 19 nt, Artificial Sequence
  Description of Artificial Sequence: Synthetic oligonucleotide
  Antisense strand to SEQ ID NO: 568937
aucugccuuucgagaaucc

SEQ ID NO: 568939 - RNA, 19 nt, Artificial Sequence
  Description of Artificial Sequence: Synthetic oligonucleotide
  Sense strand starting at position 1062 of SEQ ID NO: 318520
ucucgaaaggcagauaauu

SEQ ID NO: 568940 - RNA, 19 nt, Artificial Sequence
  Description of Artificial Sequence: Synthetic oligonucleotide
  Antisense strand to SEQ ID NO: 568939
aauuaucugccuuucgaga

SEQ ID NO: 568941 - RNA, 19 nt, Artificial Sequence
  Description of Artificial Sequence: Synthetic oligonucleotide
  Sense strand starting at position 2210 of SEQ ID NO: 318520
cgacgaaagcgugaaguga

SEQ ID NO: 568942 - RNA, 19 nt, Artificial Sequence
  Description of Artificial Sequence: Synthetic oligonucleotide
  Antisense strand to SEQ ID NO: 568941
ucacuucacgcuuucgucg

SEQ ID NO: 568943 - RNA, 19 nt, Artificial Sequence
  Description of Artificial Sequence: Synthetic oligonucleotide
  Sense strand starting at position 2397 of SEQ ID NO: 318520
ccauguguaucuguaggau

SEQ ID NO: 568944 - RNA, 19 nt, Artificial Sequence
  Description of Artificial Sequence: Synthetic oligonucleotide
  Antisense strand to SEQ ID NO: 568943
auccuacagauacacaugg

SEQ ID NO: 568945 - RNA, 19 nt, Artificial Sequence
  Description of Artificial Sequence: Synthetic oligonucleotide
  Sense strand starting at position 2521 of SEQ ID NO: 318520
caauaugugucucucagga

SEQ ID NO: 568946 - RNA, 19 nt, Artificial Sequence
  Description of Artificial Sequence: Synthetic oligonucleotide
  Antisense strand to SEQ ID NO: 568945
uccugagagacacauauug

SEQ ID NO: 568947 - RNA, 19 nt, Artificial Sequence
  Description of Artificial Sequence: Synthetic oligonucleotide
  Sense strand starting at position 2526 of SEQ ID NO: 318520
ugugucucucaggaguuua

SEQ ID NO: 568948 - RNA, 19 nt, Artificial Sequence
  Description of Artificial Sequence: Synthetic oligonucleotide
  Antisense strand to SEQ ID NO: 568947
uaaacuccugagagacaca

SEQ ID NO: 568949 - RNA, 19 nt, Artificial Sequence
  Description of Artificial Sequence: Synthetic oligonucleotide
  Sense strand starting at position 2539 of SEQ ID NO: 318520
aguuuaaacugagauuuag

SEQ ID NO: 568950 - RNA, 19 nt, Artificial Sequence
  Description of Artificial Sequence: Synthetic oligonucleotide
  Antisense strand to SEQ ID NO: 568949
cuaaaucucaguuuaaacu

SEQ ID NO: 568951 - RNA, 19 nt, Artificial Sequence
  Description of Artificial Sequence: Synthetic oligonucleotide
  Sense strand starting at position 2600 of SEQ ID NO: 318520
uguguugggccauacauaa

SEQ ID NO: 568952 - RNA, 19 nt, Artificial Sequence
  Description of Artificial Sequence: Synthetic oligonucleotide
  Antisense strand to SEQ ID NO: 568951
uuauguauggcccaacaca

SEQ ID NO: 568953 - RNA, 19 nt, Artificial Sequence
  Description of Artificial Sequence: Synthetic oligonucleotide
  Sense strand starting at position 2678 of SEQ ID NO: 318520
aauguuaaacagggaguua

SEQ ID NO: 568954 - RNA, 19 nt, Artificial Sequence
  Description of Artificial Sequence: Synthetic oligonucleotide
  Antisense strand to SEQ ID NO: 568953
uaacucccuguuuaacauu

SEQ ID NO: 568955 - RNA, 19 nt, Artificial Sequence
  Description of Artificial Sequence: Synthetic oligonucleotide
  Sense strand starting at position 2693 of SEQ ID NO: 318520
guuaaacaaguuugacgua

SEQ ID NO: 568956 - RNA, 19 nt, Artificial Sequence
  Description of Artificial Sequence: Synthetic oligonucleotide
  Antisense strand to SEQ ID NO: 568955
uacgucaaacuuguuuaac

SEQ ID NO: 568957 - RNA, 19 nt, Artificial Sequence
  Description of Artificial Sequence: Synthetic oligonucleotide
  Sense strand starting at position 2698 of SEQ ID NO: 318520
acaaguuugacguagacag

SEQ ID NO: 568958 - RNA, 19 nt, Artificial Sequence
  Description of Artificial Sequence: Synthetic oligonucleotide
  Antisense strand to SEQ ID NO: 568957
cugucuacgucaaacuugu

SEQ ID NO: 568959 - RNA, 19 nt, Artificial Sequence
  Description of Artificial Sequence: Synthetic oligonucleotide
  Sense strand starting at position 2700 of SEQ ID NO: 318520
aaguuugacguagacaguu

SEQ ID NO: 568960 - RNA, 19 nt, Artificial Sequence
  Description of Artificial Sequence: Synthetic oligonucleotide
  Antisense strand to SEQ ID NO: 568959
aacugucuacgucaaacuu

SEQ ID NO: 568961 - RNA, 19 nt, Artificial Sequence
  Description of Artificial Sequence: Synthetic oligonucleotide
  Sense strand starting at position 2781 of SEQ ID NO: 318520
ggccaugaauaauuagaug

SEQ ID NO: 568962 - RNA, 19 nt, Artificial Sequence
  Description of Artificial Sequence: Synthetic oligonucleotide
  Antisense strand to SEQ ID NO: 568961
caucuaauuauucauggcc

SEQ ID NO: 568963 - RNA, 19 nt, Artificial Sequence
  Description of Artificial Sequence: Synthetic oligonucleotide
  Sense strand starting at position 2786 of SEQ ID NO: 318520
ugaauaauuagauguugug

SEQ ID NO: 568964 - RNA, 19 nt, Artificial Sequence
  Description of Artificial Sequence: Synthetic oligonucleotide
  Antisense strand to SEQ ID NO: 568963
cacaacaucuaauuauuca

SEQ ID NO: 568965 - RNA, 19 nt, Artificial Sequence
  Description of Artificial Sequence: Synthetic oligonucleotide
  Sense strand starting at position 2801 of SEQ ID NO: 318520
ugugaauaagcagaaguua

SEQ ID NO: 568966 - RNA, 19 nt, Artificial Sequence
  Description of Artificial Sequence: Synthetic oligonucleotide
  Antisense strand to SEQ ID NO: 568965
uaacuucugcuuauucaca

SEQ ID NO: 568967 - RNA, 19 nt, Artificial Sequence
  Description of Artificial Sequence: Synthetic oligonucleotide
  Sense strand starting at position 2846 of SEQ ID NO: 318520
agaggaaucgguggguagu

SEQ ID NO: 568968 - RNA, 19 nt, Artificial Sequence
  Description of Artificial Sequence: Synthetic oligonucleotide
  Antisense strand to SEQ ID NO: 568967
acuacccaccgauuccucu

SEQ ID NO: 568969 - RNA, 19 nt, Artificial Sequence
  Description of Artificial Sequence: Synthetic oligonucleotide
  Sense strand starting at position 2847 of SEQ ID NO: 318520
gaggaaucgguggguaguu

SEQ ID NO: 568970 - RNA, 19 nt, Artificial Sequence
  Description of Artificial Sequence: Synthetic oligonucleotide
  Antisense strand to SEQ ID NO: 568969
aacuacccaccgauuccuc

SEQ ID NO: 568971 - RNA, 19 nt, Artificial Sequence
  Description of Artificial Sequence: Synthetic oligonucleotide
  Sense strand starting at position 3021 of SEQ ID NO: 318520
ggaauuuguuccuaaagga

SEQ ID NO: 568972 - RNA, 19 nt, Artificial Sequence
  Description of Artificial Sequence: Synthetic oligonucleotide
  Antisense strand to SEQ ID NO: 568971
uccuuuaggaacaaauucc

SEQ ID NO: 568973 - RNA, 19 nt, Artificial Sequence
  Description of Artificial Sequence: Synthetic oligonucleotide
  Sense strand starting at position 3029 of SEQ ID NO: 318520
uuccuaaaggaaugguuau

SEQ ID NO: 568974 - RNA, 19 nt, Artificial Sequence
  Description of Artificial Sequence: Synthetic oligonucleotide
  Antisense strand to SEQ ID NO: 568973
auaaccauuccuuuaggaa

SEQ ID NO: 568975 - RNA, 19 nt, Artificial Sequence
  Description of Artificial Sequence: Synthetic oligonucleotide
  Sense strand starting at position 3087 of SEQ ID NO: 318520
cacuuuggugagcaucaga

SEQ ID NO: 568976 - RNA, 19 nt, Artificial Sequence
  Description of Artificial Sequence: Synthetic oligonucleotide
  Antisense strand to SEQ ID NO: 568975
ucugaugcucaccaaagug

SEQ ID NO: 568977 - RNA, 19 nt, Artificial Sequence
  Description of Artificial Sequence: Synthetic oligonucleotide
  Sense strand starting at position 3110 of SEQ ID NO: 318520
ccuagaguguuuguuaaga

SEQ ID NO: 568978 - RNA, 19 nt, Artificial Sequence
  Description of Artificial Sequence: Synthetic oligonucleotide
  Antisense strand to SEQ ID NO: 568977
ucuuaacaaacacucuagg

SEQ ID NO: 568979 - RNA, 19 nt, Artificial Sequence
  Description of Artificial Sequence: Synthetic oligonucleotide
  Sense strand starting at position 3599 of SEQ ID NO: 318520
ccuugugauaacgaguucu

SEQ ID NO: 568980 - RNA, 19 nt, Artificial Sequence
  Description of Artificial Sequence: Synthetic oligonucleotide
  Antisense strand to SEQ ID NO: 568979
agaacucguuaucacaagg

SEQ ID NO: 568981 - RNA, 19 nt, Artificial Sequence
  Description of Artificial Sequence: Synthetic oligonucleotide
  Sense strand starting at position 3609 of SEQ ID NO: 318520
acgaguucucuugagaucu

SEQ ID NO: 568982 - RNA, 19 nt, Artificial Sequence
  Description of Artificial Sequence: Synthetic oligonucleotide
  Antisense strand to SEQ ID NO: 568981
agaucucaagagaacucgu

SEQ ID NO: 568983 - RNA, 19 nt, Artificial Sequence
  Description of Artificial Sequence: Synthetic oligonucleotide
  Sense strand starting at position 3692 of SEQ ID NO: 318520
uucgccuuccgucuugaua

SEQ ID NO: 568984 - RNA, 19 nt, Artificial Sequence
  Description of Artificial Sequence: Synthetic oligonucleotide
  Antisense strand to SEQ ID NO: 568983
uaucaagacggaaggcgaa

SEQ ID NO: 568985 - RNA, 19 nt, Artificial Sequence
  Description of Artificial Sequence: Synthetic oligonucleotide
  Sense strand starting at position 3708 of SEQ ID NO: 318520
auaguaagguuccugagac

SEQ ID NO: 568986 - RNA, 19 nt, Artificial Sequence
  Description of Artificial Sequence: Synthetic oligonucleotide
  Antisense strand to SEQ ID NO: 568985
gucucaggaaccuuacuau

SEQ ID NO: 568987 - RNA, 19 nt, Artificial Sequence
  Description of Artificial Sequence: Synthetic oligonucleotide
  Sense strand starting at position 3833 of SEQ ID NO: 318520
gcaauucgagaaugaacua

SEQ ID NO: 568988 - RNA, 19 nt, Artificial Sequence
  Description of Artificial Sequence: Synthetic oligonucleotide
  Antisense strand to SEQ ID NO: 568987
uaguucauucucgaauugc

SEQ ID NO: 568989 - RNA, 19 nt, Artificial Sequence
  Description of Artificial Sequence: Synthetic oligonucleotide
  Sense strand starting at position 534 of SEQ ID NO: 318521
ucuuguagucccuaaauga

SEQ ID NO: 568990 - RNA, 19 nt, Artificial Sequence
  Description of Artificial Sequence: Synthetic oligonucleotide
  Antisense strand to SEQ ID NO: 568989
ucauuuagggacuacaaga

SEQ ID NO: 568991 - RNA, 19 nt, Artificial Sequence
  Description of Artificial Sequence: Synthetic oligonucleotide
  Sense strand starting at position 859 of SEQ ID NO: 318521
ccacaaugccaagaguaua

SEQ ID NO: 568992 - RNA, 19 nt, Artificial Sequence
  Description of Artificial Sequence: Synthetic oligonucleotide
  Antisense strand to SEQ ID NO: 568991
uauacucuuggcauugugg

SEQ ID NO: 568993 - RNA, 19 nt, Artificial Sequence
  Description of Artificial Sequence: Synthetic oligonucleotide
  Sense strand starting at position 995 of SEQ ID NO: 318521
auggguaggguccaguaau

SEQ ID NO: 568994 - RNA, 19 nt, Artificial Sequence
  Description of Artificial Sequence: Synthetic oligonucleotide
  Antisense strand to SEQ ID NO: 568993
auuacuggacccuacccau

SEQ ID NO: 568995 - RNA, 19 nt, Artificial Sequence
  Description of Artificial Sequence: Synthetic oligonucleotide
  Sense strand starting at position 1058 of SEQ ID NO: 318521
agugauagcuagcuaacca

SEQ ID NO: 568996 - RNA, 19 nt, Artificial Sequence
  Description of Artificial Sequence: Synthetic oligonucleotide
  Antisense strand to SEQ ID NO: 568995
ugguuagcuagcuaucacu

SEQ ID NO: 568997 - RNA, 19 nt, Artificial Sequence
  Description of Artificial Sequence: Synthetic oligonucleotide
  Sense strand starting at position 1164 of SEQ ID NO: 318521
cuacuacaucuuggagauu

SEQ ID NO: 568998 - RNA, 19 nt, Artificial Sequence
  Description of Artificial Sequence: Synthetic oligonucleotide
  Antisense strand to SEQ ID NO: 568997
aaucuccaagauguaguag

SEQ ID NO: 568999 - RNA, 19 nt, Artificial Sequence
  Description of Artificial Sequence: Synthetic oligonucleotide
  Sense strand starting at position 1355 of SEQ ID NO: 318521
aucaguaacaucgacguaa

SEQ ID NO: 569000 - RNA, 19 nt, Artificial Sequence
  Description of Artificial Sequence: Synthetic oligonucleotide
  Antisense strand to SEQ ID NO: 568999
uuacgucgauguuacugau

SEQ ID NO: 569001 - RNA, 19 nt, Artificial Sequence
  Description of Artificial Sequence: Synthetic oligonucleotide
  Sense strand starting at position 1359 of SEQ ID NO: 318521
guaacaucgacguaaggga

SEQ ID NO: 569002 - RNA, 19 nt, Artificial Sequence
  Description of Artificial Sequence: Synthetic oligonucleotide
  Antisense strand to SEQ ID NO: 569001
ucccuuacgucgauguuac

SEQ ID NO: 569003 - RNA, 19 nt, Artificial Sequence
  Description of Artificial Sequence: Synthetic oligonucleotide
  Sense strand starting at position 1527 of SEQ ID NO: 318521
uuccuaagagaguaguguu

SEQ ID NO: 569004 - RNA, 19 nt, Artificial Sequence
  Description of Artificial Sequence: Synthetic oligonucleotide
  Antisense strand to SEQ ID NO: 569003
aacacuacucucuuaggaa

SEQ ID NO: 569005 - RNA, 19 nt, Artificial Sequence
  Description of Artificial Sequence: Synthetic oligonucleotide
  Sense strand starting at position 2053 of SEQ ID NO: 318521
ccgagaagcccggaucgaa

SEQ ID NO: 569006 - RNA, 19 nt, Artificial Sequence
  Description of Artificial Sequence: Synthetic oligonucleotide
  Antisense strand to SEQ ID NO: 569005
uucgauccgggcuucucgg

SEQ ID NO: 569007 - RNA, 19 nt, Artificial Sequence
  Description of Artificial Sequence: Synthetic oligonucleotide
  Sense strand starting at position 2407 of SEQ ID NO: 318521
gcugcuuguccugaggaaa

SEQ ID NO: 569008 - RNA, 19 nt, Artificial Sequence
  Description of Artificial Sequence: Synthetic oligonucleotide
  Antisense strand to SEQ ID NO: 569007
uuuccucaggacaagcagc

SEQ ID NO: 569009 - RNA, 19 nt, Artificial Sequence
  Description of Artificial Sequence: Synthetic oligonucleotide
  Sense strand starting at position 2695 of SEQ ID NO: 318521
acgaguacugaguggaguu

SEQ ID NO: 569010 - RNA, 19 nt, Artificial Sequence
  Description of Artificial Sequence: Synthetic oligonucleotide
  Antisense strand to SEQ ID NO: 569009
aacuccacucaguacucgu

SEQ ID NO: 569011 - RNA, 19 nt, Artificial Sequence
  Description of Artificial Sequence: Synthetic oligonucleotide
  Sense strand starting at position 2849 of SEQ ID NO: 318521
acugguuacguguaaucua

SEQ ID NO: 569012 - RNA, 19 nt, Artificial Sequence
  Description of Artificial Sequence: Synthetic oligonucleotide
  Antisense strand to SEQ ID NO: 569011
uagauuacacguaaccagu

SEQ ID NO: 569013 - RNA, 19 nt, Artificial Sequence
  Description of Artificial Sequence: Synthetic oligonucleotide
  Sense strand starting at position 2968 of SEQ ID NO: 318521
augagcaggccacauauua

SEQ ID NO: 569014 - RNA, 19 nt, Artificial Sequence
  Description of Artificial Sequence: Synthetic oligonucleotide
  Antisense strand to SEQ ID NO: 569013
uaauauguggccugcucau

SEQ ID NO: 569015 - RNA, 19 nt, Artificial Sequence
  Description of Artificial Sequence: Synthetic oligonucleotide
  Sense strand starting at position 3077 of SEQ ID NO: 318521
cugagcauuuauguguaua

SEQ ID NO: 569016 - RNA, 19 nt, Artificial Sequence
  Description of Artificial Sequence: Synthetic oligonucleotide
  Antisense strand to SEQ ID NO: 569015
uauacacauaaaugcucag

SEQ ID NO: 569017 - RNA, 19 nt, Artificial Sequence
  Description of Artificial Sequence: Synthetic oligonucleotide
  Sense strand starting at position 3104 of SEQ ID NO: 318521
uauuuaguaugugucugau

SEQ ID NO: 569018 - RNA, 19 nt, Artificial Sequence
  Description of Artificial Sequence: Synthetic oligonucleotide
  Antisense strand to SEQ ID NO: 569017
aucagacacauacuaaaua

SEQ ID NO: 569019 - RNA, 19 nt, Artificial Sequence
  Description of Artificial Sequence: Synthetic oligonucleotide
  Sense strand starting at position 3106 of SEQ ID NO: 318521
uuuaguaugugucugauaa

SEQ ID NO: 569020 - RNA, 19 nt, Artificial Sequence
  Description of Artificial Sequence: Synthetic oligonucleotide
  Antisense strand to SEQ ID NO: 569019
uuaucagacacauacuaaa

SEQ ID NO: 569021 - RNA, 19 nt, Artificial Sequence
  Description of Artificial Sequence: Synthetic oligonucleotide
  Sense strand starting at position 3107 of SEQ ID NO: 318521
uuaguaugugucugauaag

SEQ ID NO: 569022 - RNA, 19 nt, Artificial Sequence
  Description of Artificial Sequence: Synthetic oligonucleotide
  Antisense strand to SEQ ID NO: 569021
cuuaucagacacauacuaa

SEQ ID NO: 569023 - RNA, 19 nt, Artificial Sequence
  Description of Artificial Sequence: Synthetic oligonucleotide
  Sense strand starting at position 3182 of SEQ ID NO: 318521
augucagagauagguauua

SEQ ID NO: 569024 - RNA, 19 nt, Artificial Sequence
  Description of Artificial Sequence: Synthetic oligonucleotide
  Antisense strand to SEQ ID NO: 569023
uaauaccuaucucugacau

SEQ ID NO: 569025 - RNA, 19 nt, Artificial Sequence
  Description of Artificial Sequence: Synthetic oligonucleotide
  Sense strand starting at position 3274 of SEQ ID NO: 318521
acaguuuaacaggguaauc

SEQ ID NO: 569026 - RNA, 19 nt, Artificial Sequence
  Description of Artificial Sequence: Synthetic oligonucleotide
  Antisense strand to SEQ ID NO: 569025
gauuacccuguuaaacugu

SEQ ID NO: 569027 - RNA, 19 nt, Artificial Sequence
  Description of Artificial Sequence: Synthetic oligonucleotide
  Sense strand starting at position 3279 of SEQ ID NO: 318521
uuaacaggguaaucuaauu

SEQ ID NO: 569028 - RNA, 19 nt, Artificial Sequence
  Description of Artificial Sequence: Synthetic oligonucleotide
  Antisense strand to SEQ ID NO: 569027
aauuagauuacccuguuaa

SEQ ID NO: 569029 - RNA, 19 nt, Artificial Sequence
  Description of Artificial Sequence: Synthetic oligonucleotide
  Sense strand starting at position 3319 of SEQ ID NO: 318521
cauggauggugucuggaaa

SEQ ID NO: 569030 - RNA, 19 nt, Artificial Sequence
  Description of Artificial Sequence: Synthetic oligonucleotide
  Antisense strand to SEQ ID NO: 569029
uuuccagacaccauccaug

SEQ ID NO: 569031 - RNA, 19 nt, Artificial Sequence
  Description of Artificial Sequence: Synthetic oligonucleotide
  Sense strand starting at position 3320 of SEQ ID NO: 318521
auggauggugucuggaaau

SEQ ID NO: 569032 - RNA, 19 nt, Artificial Sequence
  Description of Artificial Sequence: Synthetic oligonucleotide
  Antisense strand to SEQ ID NO: 569031
auuuccagacaccauccau

SEQ ID NO: 569033 - RNA, 19 nt, Artificial Sequence
  Description of Artificial Sequence: Synthetic oligonucleotide
  Sense strand starting at position 3326 of SEQ ID NO: 318521
ggugucuggaaauguaaca

SEQ ID NO: 569034 - RNA, 19 nt, Artificial Sequence
  Description of Artificial Sequence: Synthetic oligonucleotide
  Antisense strand to SEQ ID NO: 569033
uguuacauuuccagacacc

SEQ ID NO: 569035 - RNA, 19 nt, Artificial Sequence
  Description of Artificial Sequence: Synthetic oligonucleotide
  Sense strand starting at position 3372 of SEQ ID NO: 318521
aggaguuaacucugugaag

SEQ ID NO: 569036 - RNA, 19 nt, Artificial Sequence
  Description of Artificial Sequence: Synthetic oligonucleotide
  Antisense strand to SEQ ID NO: 569035
cuucacagaguuaacuccu

SEQ ID NO: 569037 - RNA, 19 nt, Artificial Sequence
  Description of Artificial Sequence: Synthetic oligonucleotide
  Sense strand starting at position 3373 of SEQ ID NO: 318521
ggaguuaacucugugaagc

SEQ ID NO: 569038 - RNA, 19 nt, Artificial Sequence
  Description of Artificial Sequence: Synthetic oligonucleotide
  Antisense strand to SEQ ID NO: 569037
gcuucacagaguuaacucc

SEQ ID NO: 569039 - RNA, 19 nt, Artificial Sequence
  Description of Artificial Sequence: Synthetic oligonucleotide
  Sense strand starting at position 3374 of SEQ ID NO: 318521
gaguuaacucugugaagca

SEQ ID NO: 569040 - RNA, 19 nt, Artificial Sequence
  Description of Artificial Sequence: Synthetic oligonucleotide
  Antisense strand to SEQ ID NO: 569039
ugcuucacagaguuaacuc

SEQ ID NO: 569041 - RNA, 19 nt, Artificial Sequence
  Description of Artificial Sequence: Synthetic oligonucleotide
  Sense strand starting at position 3571 of SEQ ID NO: 318521
uucuuugcccugcgauuua

SEQ ID NO: 569042 - RNA, 19 nt, Artificial Sequence
  Description of Artificial Sequence: Synthetic oligonucleotide
  Antisense strand to SEQ ID NO: 569041
uaaaucgcagggcaaagaa

SEQ ID NO: 569043 - RNA, 19 nt, Artificial Sequence
  Description of Artificial Sequence: Synthetic oligonucleotide
  Sense strand starting at position 3576 of SEQ ID NO: 318521
ugcccugcgauuuauugua

SEQ ID NO: 569044 - RNA, 19 nt, Artificial Sequence
  Description of Artificial Sequence: Synthetic oligonucleotide
  Antisense strand to SEQ ID NO: 569043
uacaauaaaucgcagggca

SEQ ID NO: 569045 - RNA, 19 nt, Artificial Sequence
  Description of Artificial Sequence: Synthetic oligonucleotide
  Sense strand starting at position 3578 of SEQ ID NO: 318521
cccugcgauuuauuguagu

SEQ ID NO: 569046 - RNA, 19 nt, Artificial Sequence
  Description of Artificial Sequence: Synthetic oligonucleotide
  Antisense strand to SEQ ID NO: 569045
acuacaauaaaucgcaggg

SEQ ID NO: 569047 - RNA, 19 nt, Artificial Sequence
  Description of Artificial Sequence: Synthetic oligonucleotide
  Sense strand starting at position 3591 of SEQ ID NO: 318521
uguaguguuagcuacagag

SEQ ID NO: 569048 - RNA, 19 nt, Artificial Sequence
  Description of Artificial Sequence: Synthetic oligonucleotide
  Antisense strand to SEQ ID NO: 569047
cucuguagcuaacacuaca

SEQ ID NO: 569049 - RNA, 19 nt, Artificial Sequence
  Description of Artificial Sequence: Synthetic oligonucleotide
  Sense strand starting at position 3593 of SEQ ID NO: 318521
uaguguuagcuacagaguu

SEQ ID NO: 569050 - RNA, 19 nt, Artificial Sequence
  Description of Artificial Sequence: Synthetic oligonucleotide
  Antisense strand to SEQ ID NO: 569049
aacucuguagcuaacacua

SEQ ID NO: 569051 - RNA, 19 nt, Artificial Sequence
  Description of Artificial Sequence: Synthetic oligonucleotide
  Sense strand starting at position 3595 of SEQ ID NO: 318521
guguuagcuacagaguuag

SEQ ID NO: 569052 - RNA, 19 nt, Artificial Sequence
  Description of Artificial Sequence: Synthetic oligonucleotide
  Antisense strand to SEQ ID NO: 569051
cuaacucuguagcuaacac

SEQ ID NO: 569053 - RNA, 19 nt, Artificial Sequence
  Description of Artificial Sequence: Synthetic oligonucleotide
  Sense strand starting at position 3607 of SEQ ID NO: 318521
gaguuagcauacuuguaau

SEQ ID NO: 569054 - RNA, 19 nt, Artificial Sequence
  Description of Artificial Sequence: Synthetic oligonucleotide
  Antisense strand to SEQ ID NO: 569053
auuacaaguaugcuaacuc

SEQ ID NO: 569055 - RNA, 19 nt, Artificial Sequence
  Description of Artificial Sequence: Synthetic oligonucleotide
  Sense strand starting at position 3712 of SEQ ID NO: 318521
ugacauuccucugaauuug

SEQ ID NO: 569056 - RNA, 19 nt, Artificial Sequence
  Description of Artificial Sequence: Synthetic oligonucleotide
  Antisense strand to SEQ ID NO: 569055
caaauucagaggaauguca

SEQ ID NO: 569057 - RNA, 19 nt, Artificial Sequence
  Description of Artificial Sequence: Synthetic oligonucleotide
  Sense strand starting at position 3733 of SEQ ID NO: 318521
ccgauagucauuuguugua

SEQ ID NO: 569058 - RNA, 19 nt, Artificial Sequence
  Description of Artificial Sequence: Synthetic oligonucleotide
  Antisense strand to SEQ ID NO: 569057
uacaacaaaugacuaucgg

SEQ ID NO: 569059 - RNA, 19 nt, Artificial Sequence
  Description of Artificial Sequence: Synthetic oligonucleotide
  Sense strand starting at position 3735 of SEQ ID NO: 318521
gauagucauuuguuguauu

SEQ ID NO: 569060 - RNA, 19 nt, Artificial Sequence
  Description of Artificial Sequence: Synthetic oligonucleotide
  Antisense strand to SEQ ID NO: 569059
aauacaacaaaugacuauc

SEQ ID NO: 569061 - RNA, 19 nt, Artificial Sequence
  Description of Artificial Sequence: Synthetic oligonucleotide
  Sense strand starting at position 3788 of SEQ ID NO: 318521
acccuuucucaagguguca

SEQ ID NO: 569062 - RNA, 19 nt, Artificial Sequence
  Description of Artificial Sequence: Synthetic oligonucleotide
  Antisense strand to SEQ ID NO: 569061
ugacaccuugagaaagggu

SEQ ID NO: 569063 - RNA, 19 nt, Artificial Sequence
  Description of Artificial Sequence: Synthetic oligonucleotide
  Sense strand starting at position 3801 of SEQ ID NO: 318521
gugucaauccuugacagua

SEQ ID NO: 569064 - RNA, 19 nt, Artificial Sequence
  Description of Artificial Sequence: Synthetic oligonucleotide
  Antisense strand to SEQ ID NO: 569063
uacugucaaggauugacac

SEQ ID NO: 569065 - RNA, 19 nt, Artificial Sequence
  Description of Artificial Sequence: Synthetic oligonucleotide
  Sense strand starting at position 3910 of SEQ ID NO: 318521
guuggcaauuuauacauuu

SEQ ID NO: 569066 - RNA, 19 nt, Artificial Sequence
  Description of Artificial Sequence: Synthetic oligonucleotide
  Antisense strand to SEQ ID NO: 569065
aaauguauaaauugccaac

SEQ ID NO: 569067 - RNA, 19 nt, Artificial Sequence
  Description of Artificial Sequence: Synthetic oligonucleotide
  Sense strand starting at position 3932 of SEQ ID NO: 318521
uggauucucugacccuauu

SEQ ID NO: 569068 - RNA, 19 nt, Artificial Sequence
  Description of Artificial Sequence: Synthetic oligonucleotide
  Antisense strand to SEQ ID NO: 569067
aauagggucagagaaucca

SEQ ID NO: 569069 - RNA, 19 nt, Artificial Sequence
  Description of Artificial Sequence: Synthetic oligonucleotide
  Sense strand starting at position 60 of SEQ ID NO: 318522
uguaucauuuggcauuuaa

SEQ ID NO: 569070 - RNA, 19 nt, Artificial Sequence
  Description of Artificial Sequence: Synthetic oligonucleotide
  Antisense strand to SEQ ID NO: 569069
uuaaaugccaaaugauaca

SEQ ID NO: 569071 - RNA, 19 nt, Artificial Sequence
  Description of Artificial Sequence: Synthetic oligonucleotide
  Sense strand starting at position 116 of SEQ ID NO: 318522
gacccauuacaucgguuaa

SEQ ID NO: 569072 - RNA, 19 nt, Artificial Sequence
  Description of Artificial Sequence: Synthetic oligonucleotide
  Antisense strand to SEQ ID NO: 569071
uuaaccgauguaauggguc

SEQ ID NO: 569073 - RNA, 19 nt, Artificial Sequence
  Description of Artificial Sequence: Synthetic oligonucleotide
  Sense strand starting at position 153 of SEQ ID NO: 318522
cugagacaauugucgccaa

SEQ ID NO: 569074 - RNA, 19 nt, Artificial Sequence
  Description of Artificial Sequence: Synthetic oligonucleotide
  Antisense strand to SEQ ID NO: 569073
uuggcgacaauugucucag

SEQ ID NO: 569075 - RNA, 19 nt, Artificial Sequence
  Description of Artificial Sequence: Synthetic oligonucleotide
  Sense strand starting at position 255 of SEQ ID NO: 318522
acucauccauaguuggaga

SEQ ID NO: 569076 - RNA, 19 nt, Artificial Sequence
  Description of Artificial Sequence: Synthetic oligonucleotide
  Antisense strand to SEQ ID NO: 569075
ucuccaacuauggaugagu

SEQ ID NO: 569077 - RNA, 19 nt, Artificial Sequence
  Description of Artificial Sequence: Synthetic oligonucleotide
  Sense strand starting at position 257 of SEQ ID NO: 318522
ucauccauaguuggagaga

SEQ ID NO: 569078 - RNA, 19 nt, Artificial Sequence
  Description of Artificial Sequence: Synthetic oligonucleotide
  Antisense strand to SEQ ID NO: 569077
ucucuccaacuauggauga

SEQ ID NO: 569079 - RNA, 19 nt, Artificial Sequence
  Description of Artificial Sequence: Synthetic oligonucleotide
  Sense strand starting at position 320 of SEQ ID NO: 318522
guugcuuagcgcuugccaa

SEQ ID NO: 569080 - RNA, 19 nt, Artificial Sequence
  Description of Artificial Sequence: Synthetic oligonucleotide
  Antisense strand to SEQ ID NO: 569079
uuggcaagcgcuaagcaac

SEQ ID NO: 569081 - RNA, 19 nt, Artificial Sequence
  Description of Artificial Sequence: Synthetic oligonucleotide
  Sense strand starting at position 322 of SEQ ID NO: 318522
ugcuuagcgcuugccaaua

SEQ ID NO: 569082 - RNA, 19 nt, Artificial Sequence
  Description of Artificial Sequence: Synthetic oligonucleotide
  Antisense strand to SEQ ID NO: 569081
uauuggcaagcgcuaagca

SEQ ID NO: 569083 - RNA, 19 nt, Artificial Sequence
  Description of Artificial Sequence: Synthetic oligonucleotide
  Sense strand starting at position 343 of SEQ ID NO: 318522
gcaguugucccugcuuaau

SEQ ID NO: 569084 - RNA, 19 nt, Artificial Sequence
  Description of Artificial Sequence: Synthetic oligonucleotide
  Antisense strand to SEQ ID NO: 569083
auuaagcagggacaacugc

SEQ ID NO: 569085 - RNA, 19 nt, Artificial Sequence
  Description of Artificial Sequence: Synthetic oligonucleotide
  Sense strand starting at position 382 of SEQ ID NO: 318522
ggacccuuccugugacaag

SEQ ID NO: 569086 - RNA, 19 nt, Artificial Sequence
  Description of Artificial Sequence: Synthetic oligonucleotide
  Antisense strand to SEQ ID NO: 569085
cuugucacaggaagggucc

SEQ ID NO: 569087 - RNA, 19 nt, Artificial Sequence
  Description of Artificial Sequence: Synthetic oligonucleotide
  Sense strand starting at position 499 of SEQ ID NO: 318522
ugaaaugaacagugcagaa

SEQ ID NO: 569088 - RNA, 19 nt, Artificial Sequence
  Description of Artificial Sequence: Synthetic oligonucleotide
  Antisense strand to SEQ ID NO: 569087
uucugcacuguucauuuca

SEQ ID NO: 569089 - RNA, 19 nt, Artificial Sequence
  Description of Artificial Sequence: Synthetic oligonucleotide
  Sense strand starting at position 594 of SEQ ID NO: 318522
caagauaagugcuuaguca

SEQ ID NO: 569090 - RNA, 19 nt, Artificial Sequence
  Description of Artificial Sequence: Synthetic oligonucleotide
  Antisense strand to SEQ ID NO: 569089
ugacuaagcacuuaucuug

SEQ ID NO: 569091 - RNA, 19 nt, Artificial Sequence
  Description of Artificial Sequence: Synthetic oligonucleotide
  Sense strand starting at position 595 of SEQ ID NO: 318522
aagauaagugcuuagucau

SEQ ID NO: 569092 - RNA, 19 nt, Artificial Sequence
  Description of Artificial Sequence: Synthetic oligonucleotide
  Antisense strand to SEQ ID NO: 569091
augacuaagcacuuaucuu

SEQ ID NO: 569093 - RNA, 19 nt, Artificial Sequence
  Description of Artificial Sequence: Synthetic oligonucleotide
  Sense strand starting at position 611 of SEQ ID NO: 318522
cauagucaaguuuguggau

SEQ ID NO: 569094 - RNA, 19 nt, Artificial Sequence
  Description of Artificial Sequence: Synthetic oligonucleotide
  Antisense strand to SEQ ID NO: 569093
auccacaaacuugacuaug

SEQ ID NO: 569095 - RNA, 19 nt, Artificial Sequence
  Description of Artificial Sequence: Synthetic oligonucleotide
  Sense strand starting at position 612 of SEQ ID NO: 318522
auagucaaguuuguggauu

SEQ ID NO: 569096 - RNA, 19 nt, Artificial Sequence
  Description of Artificial Sequence: Synthetic oligonucleotide
  Antisense strand to SEQ ID NO: 569095
aauccacaaacuugacuau

SEQ ID NO: 569097 - RNA, 19 nt, Artificial Sequence
  Description of Artificial Sequence: Synthetic oligonucleotide
  Sense strand starting at position 618 of SEQ ID NO: 318522
aaguuuguggauuggguua

SEQ ID NO: 569098 - RNA, 19 nt, Artificial Sequence
  Description of Artificial Sequence: Synthetic oligonucleotide
  Antisense strand to SEQ ID NO: 569097
uaacccaauccacaaacuu

SEQ ID NO: 569099 - RNA, 19 nt, Artificial Sequence
  Description of Artificial Sequence: Synthetic oligonucleotide
  Sense strand starting at position 623 of SEQ ID NO: 318522
uguggauuggguuacucuu

SEQ ID NO: 569100 - RNA, 19 nt, Artificial Sequence
  Description of Artificial Sequence: Synthetic oligonucleotide
  Antisense strand to SEQ ID NO: 569099
aagaguaacccaauccaca

SEQ ID NO: 569101 - RNA, 19 nt, Artificial Sequence
  Description of Artificial Sequence: Synthetic oligonucleotide
  Sense strand starting at position 625 of SEQ ID NO: 318522
uggauuggguuacucuuaa

SEQ ID NO: 569102 - RNA, 19 nt, Artificial Sequence
  Description of Artificial Sequence: Synthetic oligonucleotide
  Antisense strand to SEQ ID NO: 569101
uuaagaguaacccaaucca

SEQ ID NO: 569103 - RNA, 19 nt, Artificial Sequence
  Description of Artificial Sequence: Synthetic oligonucleotide
  Sense strand starting at position 672 of SEQ ID NO: 318522
uggucaaucgguuaaucug

SEQ ID NO: 569104 - RNA, 19 nt, Artificial Sequence
  Description of Artificial Sequence: Synthetic oligonucleotide
  Antisense strand to SEQ ID NO: 569103
cagauuaaccgauugacca

SEQ ID NO: 569105 - RNA, 19 nt, Artificial Sequence
  Description of Artificial Sequence: Synthetic oligonucleotide
  Sense strand starting at position 675 of SEQ ID NO: 318522
ucaaucgguuaaucuguaa

SEQ ID NO: 569106 - RNA, 19 nt, Artificial Sequence
  Description of Artificial Sequence: Synthetic oligonucleotide
  Antisense strand to SEQ ID NO: 569105
uuacagauuaaccgauuga

SEQ ID NO: 569107 - RNA, 19 nt, Artificial Sequence
  Description of Artificial Sequence: Synthetic oligonucleotide
  Sense strand starting at position 973 of SEQ ID NO: 318522
gguauuguucuaugaaacg

SEQ ID NO: 569108 - RNA, 19 nt, Artificial Sequence
  Description of Artificial Sequence: Synthetic oligonucleotide
  Antisense strand to SEQ ID NO: 569107
cguuucauagaacaauacc

SEQ ID NO: 569109 - RNA, 19 nt, Artificial Sequence
  Description of Artificial Sequence: Synthetic oligonucleotide
  Sense strand starting at position 979 of SEQ ID NO: 318522
guucuaugaaacggauaca

SEQ ID NO: 569110 - RNA, 19 nt, Artificial Sequence
  Description of Artificial Sequence: Synthetic oligonucleotide
  Antisense strand to SEQ ID NO: 569109
uguauccguuucauagaac

SEQ ID NO: 569111 - RNA, 19 nt, Artificial Sequence
  Description of Artificial Sequence: Synthetic oligonucleotide
  Sense strand starting at position 1102 of SEQ ID NO: 318522
gccagauaccuagaguuaa

SEQ ID NO: 569112 - RNA, 19 nt, Artificial Sequence
  Description of Artificial Sequence: Synthetic oligonucleotide
  Antisense strand to SEQ ID NO: 569111
uuaacucuagguaucuggc

SEQ ID NO: 569113 - RNA, 19 nt, Artificial Sequence
  Description of Artificial Sequence: Synthetic oligonucleotide
  Sense strand starting at position 2211 of SEQ ID NO: 318522
cccuaagccgagugaaaga

SEQ ID NO: 569114 - RNA, 19 nt, Artificial Sequence
  Description of Artificial Sequence: Synthetic oligonucleotide
  Antisense strand to SEQ ID NO: 569113
ucuuucacucggcuuaggg

SEQ ID NO: 569115 - RNA, 19 nt, Artificial Sequence
  Description of Artificial Sequence: Synthetic oligonucleotide
  Sense strand starting at position 2361 of SEQ ID NO: 318522
gcguguguucauuccugag

SEQ ID NO: 569116 - RNA, 19 nt, Artificial Sequence
  Description of Artificial Sequence: Synthetic oligonucleotide
  Antisense strand to SEQ ID NO: 569115
cucaggaaugaacacacgc

SEQ ID NO: 569117 - RNA, 19 nt, Artificial Sequence
  Description of Artificial Sequence: Synthetic oligonucleotide
  Sense strand starting at position 2503 of SEQ ID NO: 318522
guaacccuccgaggugaaa

SEQ ID NO: 569118 - RNA, 19 nt, Artificial Sequence
  Description of Artificial Sequence: Synthetic oligonucleotide
  Antisense strand to SEQ ID NO: 569117
uuucaccucggaggguuac

SEQ ID NO: 569119 - RNA, 19 nt, Artificial Sequence
  Description of Artificial Sequence: Synthetic oligonucleotide
  Sense strand starting at position 2567 of SEQ ID NO: 318522
cgguuaaguggcagagcua

SEQ ID NO: 569120 - RNA, 19 nt, Artificial Sequence
  Description of Artificial Sequence: Synthetic oligonucleotide
  Antisense strand to SEQ ID NO: 569119
uagcucugccacuuaaccg

SEQ ID NO: 569121 - RNA, 19 nt, Artificial Sequence
  Description of Artificial Sequence: Synthetic oligonucleotide
  Sense strand starting at position 2611 of SEQ ID NO: 318522
ggugcuguuagcccuuauu

SEQ ID NO: 569122 - RNA, 19 nt, Artificial Sequence
  Description of Artificial Sequence: Synthetic oligonucleotide
  Antisense strand to SEQ ID NO: 569121
aauaagggcuaacagcacc

SEQ ID NO: 569123 - RNA, 19 nt, Artificial Sequence
  Description of Artificial Sequence: Synthetic oligonucleotide
  Sense strand starting at position 2818 of SEQ ID NO: 318522
ggacguaacucuucucuag

SEQ ID NO: 569124 - RNA, 19 nt, Artificial Sequence
  Description of Artificial Sequence: Synthetic oligonucleotide
  Antisense strand to SEQ ID NO: 569123
cuagagaagaguuacgucc

SEQ ID NO: 569125 - RNA, 19 nt, Artificial Sequence
  Description of Artificial Sequence: Synthetic oligonucleotide
  Sense strand starting at position 2844 of SEQ ID NO: 318522
ccaggaaggcuuugaugag

SEQ ID NO: 569126 - RNA, 19 nt, Artificial Sequence
  Description of Artificial Sequence: Synthetic oligonucleotide
  Antisense strand to SEQ ID NO: 569125
cucaucaaagccuuccugg

SEQ ID NO: 569127 - RNA, 19 nt, Artificial Sequence
  Description of Artificial Sequence: Synthetic oligonucleotide
  Sense strand starting at position 2853 of SEQ ID NO: 318522
cuuugaugaggucgaugga

SEQ ID NO: 569128 - RNA, 19 nt, Artificial Sequence
  Description of Artificial Sequence: Synthetic oligonucleotide
  Antisense strand to SEQ ID NO: 569127
uccaucgaccucaucaaag

SEQ ID NO: 569129 - RNA, 19 nt, Artificial Sequence
  Description of Artificial Sequence: Synthetic oligonucleotide
  Sense strand starting at position 2856 of SEQ ID NO: 318522
ugaugaggucgauggaaug

SEQ ID NO: 569130 - RNA, 19 nt, Artificial Sequence
  Description of Artificial Sequence: Synthetic oligonucleotide
  Antisense strand to SEQ ID NO: 569129
cauuccaucgaccucauca

SEQ ID NO: 569131 - RNA, 19 nt, Artificial Sequence
  Description of Artificial Sequence: Synthetic oligonucleotide
  Sense strand starting at position 2918 of SEQ ID NO: 318522
uguucugcucgggaacauu

SEQ ID NO: 569132 - RNA, 19 nt, Artificial Sequence
  Description of Artificial Sequence: Synthetic oligonucleotide
  Antisense strand to SEQ ID NO: 569131
aauguucccgagcagaaca

SEQ ID NO: 569133 - RNA, 19 nt, Artificial Sequence
  Description of Artificial Sequence: Synthetic oligonucleotide
  Sense strand starting at position 2990 of SEQ ID NO: 318522
ugaugauaucccugacacc

SEQ ID NO: 569134 - RNA, 19 nt, Artificial Sequence
  Description of Artificial Sequence: Synthetic oligonucleotide
  Antisense strand to SEQ ID NO: 569133
ggugucagggauaucauca

SEQ ID NO: 569135 - RNA, 19 nt, Artificial Sequence
  Description of Artificial Sequence: Synthetic oligonucleotide
  Sense strand starting at position 3407 of SEQ ID NO: 318522
uuccaaauaugucugagaa

SEQ ID NO: 569136 - RNA, 19 nt, Artificial Sequence
  Description of Artificial Sequence: Synthetic oligonucleotide
  Antisense strand to SEQ ID NO: 569135
uucucagacauauuuggaa

SEQ ID NO: 569137 - RNA, 19 nt, Artificial Sequence
  Description of Artificial Sequence: Synthetic oligonucleotide
  Sense strand starting at position 3408 of SEQ ID NO: 318522
uccaaauaugucugagaac

SEQ ID NO: 569138 - RNA, 19 nt, Artificial Sequence
  Description of Artificial Sequence: Synthetic oligonucleotide
  Antisense strand to SEQ ID NO: 569137
guucucagacauauuugga

SEQ ID NO: 569139 - RNA, 19 nt, Artificial Sequence
  Description of Artificial Sequence: Synthetic oligonucleotide
  Sense strand starting at position 3795 of SEQ ID NO: 318522
uggugcuauauguauagau

SEQ ID NO: 569140 - RNA, 19 nt, Artificial Sequence
  Description of Artificial Sequence: Synthetic oligonucleotide
  Antisense strand to SEQ ID NO: 569139
aucuauacauauagcacca

SEQ ID NO: 569141 - RNA, 19 nt, Artificial Sequence
  Description of Artificial Sequence: Synthetic oligonucleotide
  Sense strand starting at position 3797 of SEQ ID NO: 318522
gugcuauauguauagauua

SEQ ID NO: 569142 - RNA, 19 nt, Artificial Sequence
  Description of Artificial Sequence: Synthetic oligonucleotide
  Antisense strand to SEQ ID NO: 569141
uaaucuauacauauagcac

SEQ ID NO: 569143 - RNA, 19 nt, Artificial Sequence
  Description of Artificial Sequence: Synthetic oligonucleotide
  Sense strand starting at position 3805 of SEQ ID NO: 318522
uguauagauuaucucagga

SEQ ID NO: 569144 - RNA, 19 nt, Artificial Sequence
  Description of Artificial Sequence: Synthetic oligonucleotide
  Antisense strand to SEQ ID NO: 569143
uccugagauaaucuauaca

SEQ ID NO: 569145 - RNA, 19 nt, Artificial Sequence
  Description of Artificial Sequence: Synthetic oligonucleotide
  Sense strand starting at position 3834 of SEQ ID NO: 318522
agaaauuggucaccucaga

SEQ ID NO: 569146 - RNA, 19 nt, Artificial Sequence
  Description of Artificial Sequence: Synthetic oligonucleotide
  Antisense strand to SEQ ID NO: 569145
ucugaggugaccaauuucu

SEQ ID NO: 569147 - RNA, 19 nt, Artificial Sequence
  Description of Artificial Sequence: Synthetic oligonucleotide
  Sense strand starting at position 3866 of SEQ ID NO: 318522
gucacugagggauggguua

SEQ ID NO: 569148 - RNA, 19 nt, Artificial Sequence
  Description of Artificial Sequence: Synthetic oligonucleotide
  Antisense strand to SEQ ID NO: 569147
uaacccaucccucagugac

SEQ ID NO: 569149 - RNA, 19 nt, Artificial Sequence
  Description of Artificial Sequence: Synthetic oligonucleotide
  Sense strand starting at position 80 of SEQ ID NO: 318523
agcaaauauuugcuguauu

SEQ ID NO: 569150 - RNA, 19 nt, Artificial Sequence
  Description of Artificial Sequence: Synthetic oligonucleotide
  Antisense strand to SEQ ID NO: 569149
aauacagcaaauauuugcu

SEQ ID NO: 569151 - RNA, 19 nt, Artificial Sequence
  Description of Artificial Sequence: Synthetic oligonucleotide
  Sense strand starting at position 408 of SEQ ID NO: 318523
cgaugaaugacuggauguu

SEQ ID NO: 569152 - RNA, 19 nt, Artificial Sequence
  Description of Artificial Sequence: Synthetic oligonucleotide
  Antisense strand to SEQ ID NO: 569151
aacauccagucauucaucg

SEQ ID NO: 569153 - RNA, 19 nt, Artificial Sequence
  Description of Artificial Sequence: Synthetic oligonucleotide
  Sense strand starting at position 463 of SEQ ID NO: 318523
cggguugggugauuaaaca

SEQ ID NO: 569154 - RNA, 19 nt, Artificial Sequence
  Description of Artificial Sequence: Synthetic oligonucleotide
  Antisense strand to SEQ ID NO: 569153
uguuuaaucacccaacccg

SEQ ID NO: 569155 - RNA, 19 nt, Artificial Sequence
  Description of Artificial Sequence: Synthetic oligonucleotide
  Sense strand starting at position 484 of SEQ ID NO: 318523
uagugucagcaguaaugga

SEQ ID NO: 569156 - RNA, 19 nt, Artificial Sequence
  Description of Artificial Sequence: Synthetic oligonucleotide
  Antisense strand to SEQ ID NO: 569155
uccauuacugcugacacua

SEQ ID NO: 569157 - RNA, 19 nt, Artificial Sequence
  Description of Artificial Sequence: Synthetic oligonucleotide
  Sense strand starting at position 683 of SEQ ID NO: 318523
ucuguuaaacggugaaacu

SEQ ID NO: 569158 - RNA, 19 nt, Artificial Sequence
  Description of Artificial Sequence: Synthetic oligonucleotide
  Antisense strand to SEQ ID NO: 569157
aguuucaccguuuaacaga

SEQ ID NO: 569159 - RNA, 19 nt, Artificial Sequence
  Description of Artificial Sequence: Synthetic oligonucleotide
  Sense strand starting at position 744 of SEQ ID NO: 318523
gcaggaaugucuucucaug

SEQ ID NO: 569160 - RNA, 19 nt, Artificial Sequence
  Description of Artificial Sequence: Synthetic oligonucleotide
  Antisense strand to SEQ ID NO: 569159
caugagaagacauuccugc

SEQ ID NO: 569161 - RNA, 19 nt, Artificial Sequence
  Description of Artificial Sequence: Synthetic oligonucleotide
  Sense strand starting at position 750 of SEQ ID NO: 318523
augucuucucauggguuaa

SEQ ID NO: 569162 - RNA, 19 nt, Artificial Sequence
  Description of Artificial Sequence: Synthetic oligonucleotide
  Antisense strand to SEQ ID NO: 569161
uuaacccaugagaagacau

SEQ ID NO: 569163 - RNA, 19 nt, Artificial Sequence
  Description of Artificial Sequence: Synthetic oligonucleotide
  Sense strand starting at position 779 of SEQ ID NO: 318523
gugauuaugcaccagaaca

SEQ ID NO: 569164 - RNA, 19 nt, Artificial Sequence
  Description of Artificial Sequence: Synthetic oligonucleotide
  Antisense strand to SEQ ID NO: 569163
uguucuggugcauaaucac

SEQ ID NO: 569165 - RNA, 19 nt, Artificial Sequence
  Description of Artificial Sequence: Synthetic oligonucleotide
  Sense strand starting at position 915 of SEQ ID NO: 318523
ugcuaaagaucucugaaca

SEQ ID NO: 569166 - RNA, 19 nt, Artificial Sequence
  Description of Artificial Sequence: Synthetic oligonucleotide
  Antisense strand to SEQ ID NO: 569165
uguucagagaucuuuagca

SEQ ID NO: 569167 - RNA, 19 nt, Artificial Sequence
  Description of Artificial Sequence: Synthetic oligonucleotide
  Sense strand starting at position 916 of SEQ ID NO: 318523
gcuaaagaucucugaacaa

SEQ ID NO: 569168 - RNA, 19 nt, Artificial Sequence
  Description of Artificial Sequence: Synthetic oligonucleotide
  Antisense strand to SEQ ID NO: 569167
uuguucagagaucuuuagc

SEQ ID NO: 569169 - RNA, 19 nt, Artificial Sequence
  Description of Artificial Sequence: Synthetic oligonucleotide
  Sense strand starting at position 990 of SEQ ID NO: 318523
ucauguccuuaccuggaaa

SEQ ID NO: 569170 - RNA, 19 nt, Artificial Sequence
  Description of Artificial Sequence: Synthetic oligonucleotide
  Antisense strand to SEQ ID NO: 569169
uuuccagguaaggacauga

SEQ ID NO: 569171 - RNA, 19 nt, Artificial Sequence
  Description of Artificial Sequence: Synthetic oligonucleotide
  Sense strand starting at position 992 of SEQ ID NO: 318523
auguccuuaccuggaaagu

SEQ ID NO: 569172 - RNA, 19 nt, Artificial Sequence
  Description of Artificial Sequence: Synthetic oligonucleotide
  Antisense strand to SEQ ID NO: 569171
acuuuccagguaaggacau

SEQ ID NO: 569173 - RNA, 19 nt, Artificial Sequence
  Description of Artificial Sequence: Synthetic oligonucleotide
  Sense strand starting at position 993 of SEQ ID NO: 318523
uguccuuaccuggaaaguu

SEQ ID NO: 569174 - RNA, 19 nt, Artificial Sequence
  Description of Artificial Sequence: Synthetic oligonucleotide
  Antisense strand to SEQ ID NO: 569173
aacuuuccagguaaggaca

SEQ ID NO: 569175 - RNA, 19 nt, Artificial Sequence
  Description of Artificial Sequence: Synthetic oligonucleotide
  Sense strand starting at position 1479 of SEQ ID NO: 318523
ugcagaaggccucaagaau

SEQ ID NO: 569176 - RNA, 19 nt, Artificial Sequence
  Description of Artificial Sequence: Synthetic oligonucleotide
  Antisense strand to SEQ ID NO: 569175
auucuugaggccuucugca

SEQ ID NO: 569177 - RNA, 19 nt, Artificial Sequence
  Description of Artificial Sequence: Synthetic oligonucleotide
  Sense strand starting at position 1492 of SEQ ID NO: 318523
aagaauuucucccagugga

SEQ ID NO: 569178 - RNA, 19 nt, Artificial Sequence
  Description of Artificial Sequence: Synthetic oligonucleotide
  Antisense strand to SEQ ID NO: 569177
uccacugggagaaauucuu

SEQ ID NO: 569179 - RNA, 19 nt, Artificial Sequence
  Description of Artificial Sequence: Synthetic oligonucleotide
  Sense strand starting at position 1536 of SEQ ID NO: 318523
gcaaucauacacugauuga

SEQ ID NO: 569180 - RNA, 19 nt, Artificial Sequence
  Description of Artificial Sequence: Synthetic oligonucleotide
  Antisense strand to SEQ ID NO: 569179
ucaaucaguguaugauugc

SEQ ID NO: 569181 - RNA, 19 nt, Artificial Sequence
  Description of Artificial Sequence: Synthetic oligonucleotide
  Sense strand starting at position 1687 of SEQ ID NO: 318523
aauauuagccaguagcgau

SEQ ID NO: 569182 - RNA, 19 nt, Artificial Sequence
  Description of Artificial Sequence: Synthetic oligonucleotide
  Antisense strand to SEQ ID NO: 569181
aucgcuacuggcuaauauu

SEQ ID NO: 569183 - RNA, 19 nt, Artificial Sequence
  Description of Artificial Sequence: Synthetic oligonucleotide
  Sense strand starting at position 1701 of SEQ ID NO: 318523
gcgauauucgcggccuaaa

SEQ ID NO: 569184 - RNA, 19 nt, Artificial Sequence
  Description of Artificial Sequence: Synthetic oligonucleotide
  Antisense strand to SEQ ID NO: 569183
uuuaggccgcgaauaucgc

SEQ ID NO: 569185 - RNA, 19 nt, Artificial Sequence
  Description of Artificial Sequence: Synthetic oligonucleotide
  Sense strand starting at position 2059 of SEQ ID NO: 318523
gcuuuacccgccuucgaga

SEQ ID NO: 569186 - RNA, 19 nt, Artificial Sequence
  Description of Artificial Sequence: Synthetic oligonucleotide
  Antisense strand to SEQ ID NO: 569185
ucucgaaggcggguaaagc

SEQ ID NO: 569187 - RNA, 19 nt, Artificial Sequence
  Description of Artificial Sequence: Synthetic oligonucleotide
  Sense strand starting at position 2590 of SEQ ID NO: 318523
acgggauccuuccuuuauc

SEQ ID NO: 569188 - RNA, 19 nt, Artificial Sequence
  Description of Artificial Sequence: Synthetic oligonucleotide
  Antisense strand to SEQ ID NO: 569187
gauaaaggaaggaucccgu

SEQ ID NO: 569189 - RNA, 19 nt, Artificial Sequence
  Description of Artificial Sequence: Synthetic oligonucleotide
  Sense strand starting at position 2593 of SEQ ID NO: 318523
ggauccuuccuuuaucugu

SEQ ID NO: 569190 - RNA, 19 nt, Artificial Sequence
  Description of Artificial Sequence: Synthetic oligonucleotide
  Antisense strand to SEQ ID NO: 569189
acagauaaaggaaggaucc

SEQ ID NO: 569191 - RNA, 19 nt, Artificial Sequence
  Description of Artificial Sequence: Synthetic oligonucleotide
  Sense strand starting at position 2646 of SEQ ID NO: 318523
acgagagacaaugguuuaa

SEQ ID NO: 569192 - RNA, 19 nt, Artificial Sequence
  Description of Artificial Sequence: Synthetic oligonucleotide
  Antisense strand to SEQ ID NO: 569191
uuaaaccauugucucucgu

SEQ ID NO: 569193 - RNA, 19 nt, Artificial Sequence
  Description of Artificial Sequence: Synthetic oligonucleotide
  Sense strand starting at position 2898 of SEQ ID NO: 318523
ccuaucucugcugagaaga

SEQ ID NO: 569194 - RNA, 19 nt, Artificial Sequence
  Description of Artificial Sequence: Synthetic oligonucleotide
  Antisense strand to SEQ ID NO: 569193
ucuucucagcagagauagg

SEQ ID NO: 569195 - RNA, 19 nt, Artificial Sequence
  Description of Artificial Sequence: Synthetic oligonucleotide
  Sense strand starting at position 2937 of SEQ ID NO: 318523
gggagcgugacauauucca

SEQ ID NO: 569196 - RNA, 19 nt, Artificial Sequence
  Description of Artificial Sequence: Synthetic oligonucleotide
  Antisense strand to SEQ ID NO: 569195
uggaauaugucacgcuccc

SEQ ID NO: 569197 - RNA, 19 nt, Artificial Sequence
  Description of Artificial Sequence: Synthetic oligonucleotide
  Sense strand starting at position 2944 of SEQ ID NO: 318523
ugacauauuccagguacaa

SEQ ID NO: 569198 - RNA, 19 nt, Artificial Sequence
  Description of Artificial Sequence: Synthetic oligonucleotide
  Antisense strand to SEQ ID NO: 569197
uuguaccuggaauauguca

SEQ ID NO: 569199 - RNA, 19 nt, Artificial Sequence
  Description of Artificial Sequence: Synthetic oligonucleotide
  Sense strand starting at position 2957 of SEQ ID NO: 318523
guacaaugaccaugcgaaa

SEQ ID NO: 569200 - RNA, 19 nt, Artificial Sequence
  Description of Artificial Sequence: Synthetic oligonucleotide
  Antisense strand to SEQ ID NO: 569199
uuucgcauggucauuguac

SEQ ID NO: 569201 - RNA, 19 nt, Artificial Sequence
  Description of Artificial Sequence: Synthetic oligonucleotide
  Sense strand starting at position 2970 of SEQ ID NO: 318523
gcgaaauccauugggcaaa

SEQ ID NO: 569202 - RNA, 19 nt, Artificial Sequence
  Description of Artificial Sequence: Synthetic oligonucleotide
  Antisense strand to SEQ ID NO: 569201
uuugcccaauggauuucgc

SEQ ID NO: 569203 - RNA, 19 nt, Artificial Sequence
  Description of Artificial Sequence: Synthetic oligonucleotide
  Sense strand starting at position 3137 of SEQ ID NO: 318523
cccucugguuuccuugaaa

SEQ ID NO: 569204 - RNA, 19 nt, Artificial Sequence
  Description of Artificial Sequence: Synthetic oligonucleotide
  Antisense strand to SEQ ID NO: 569203
uuucaaggaaaccagaggg

SEQ ID NO: 569205 - RNA, 19 nt, Artificial Sequence
  Description of Artificial Sequence: Synthetic oligonucleotide
  Sense strand starting at position 3271 of SEQ ID NO: 318523
uagcucguucuugaaagau

SEQ ID NO: 569206 - RNA, 19 nt, Artificial Sequence
  Description of Artificial Sequence: Synthetic oligonucleotide
  Antisense strand to SEQ ID NO: 569205
aucuuucaagaacgagcua

SEQ ID NO: 569207 - RNA, 19 nt, Artificial Sequence
  Description of Artificial Sequence: Synthetic oligonucleotide
  Sense strand starting at position 3277 of SEQ ID NO: 318523
guucuugaaagaugagauu

SEQ ID NO: 569208 - RNA, 19 nt, Artificial Sequence
  Description of Artificial Sequence: Synthetic oligonucleotide
  Antisense strand to SEQ ID NO: 569207
aaucucaucuuucaagaac

SEQ ID NO: 569209 - RNA, 19 nt, Artificial Sequence
  Description of Artificial Sequence: Synthetic oligonucleotide
  Sense strand starting at position 3283 of SEQ ID NO: 318523
gaaagaugagauuggugua

SEQ ID NO: 569210 - RNA, 19 nt, Artificial Sequence
  Description of Artificial Sequence: Synthetic oligonucleotide
  Antisense strand to SEQ ID NO: 569209
uacaccaaucucaucuuuc

SEQ ID NO: 569211 - RNA, 19 nt, Artificial Sequence
  Description of Artificial Sequence: Synthetic oligonucleotide
  Sense strand starting at position 3344 of SEQ ID NO: 318523
ugcagaauccuaggcuaag

SEQ ID NO: 569212 - RNA, 19 nt, Artificial Sequence
  Description of Artificial Sequence: Synthetic oligonucleotide
  Antisense strand to SEQ ID NO: 569211
cuuagccuaggauucugca

SEQ ID NO: 569213 - RNA, 19 nt, Artificial Sequence
  Description of Artificial Sequence: Synthetic oligonucleotide
  Sense strand starting at position 3425 of SEQ ID NO: 318523
gaaagugaccuuuauguua

SEQ ID NO: 569214 - RNA, 19 nt, Artificial Sequence
  Description of Artificial Sequence: Synthetic oligonucleotide
  Antisense strand to SEQ ID NO: 569213
uaacauaaaggucacuuuc

SEQ ID NO: 569215 - RNA, 19 nt, Artificial Sequence
  Description of Artificial Sequence: Synthetic oligonucleotide
  Sense strand starting at position 3438 of SEQ ID NO: 318523
auguuacuuuggcuaagga

SEQ ID NO: 569216 - RNA, 19 nt, Artificial Sequence
  Description of Artificial Sequence: Synthetic oligonucleotide
  Antisense strand to SEQ ID NO: 569215
uccuuagccaaaguaacau

SEQ ID NO: 569217 - RNA, 19 nt, Artificial Sequence
  Description of Artificial Sequence: Synthetic oligonucleotide
  Sense strand starting at position 3457 of SEQ ID NO: 318523
gaaagcauuugccuuuguu

SEQ ID NO: 569218 - RNA, 19 nt, Artificial Sequence
  Description of Artificial Sequence: Synthetic oligonucleotide
  Antisense strand to SEQ ID NO: 569217
aacaaaggcaaaugcuuuc

SEQ ID NO: 569219 - RNA, 19 nt, Artificial Sequence
  Description of Artificial Sequence: Synthetic oligonucleotide
  Sense strand starting at position 3460 of SEQ ID NO: 318523
agcauuugccuuuguuuga

SEQ ID NO: 569220 - RNA, 19 nt, Artificial Sequence
  Description of Artificial Sequence: Synthetic oligonucleotide
  Antisense strand to SEQ ID NO: 569219
ucaaacaaaggcaaaugcu

SEQ ID NO: 569221 - RNA, 19 nt, Artificial Sequence
  Description of Artificial Sequence: Synthetic oligonucleotide
  Sense strand starting at position 3461 of SEQ ID NO: 318523
gcauuugccuuuguuugaa

SEQ ID NO: 569222 - RNA, 19 nt, Artificial Sequence
  Description of Artificial Sequence: Synthetic oligonucleotide
  Antisense strand to SEQ ID NO: 569221
uucaaacaaaggcaaaugc

SEQ ID NO: 569223 - RNA, 19 nt, Artificial Sequence
  Description of Artificial Sequence: Synthetic oligonucleotide
  Sense strand starting at position 3484 of SEQ ID NO: 318523
cguccuuucccugaagauu

SEQ ID NO: 569224 - RNA, 19 nt, Artificial Sequence
  Description of Artificial Sequence: Synthetic oligonucleotide
  Antisense strand to SEQ ID NO: 569223
aaucuucagggaaaggacg

SEQ ID NO: 569225 - RNA, 19 nt, Artificial Sequence
  Description of Artificial Sequence: Synthetic oligonucleotide
  Sense strand starting at position 3702 of SEQ ID NO: 318523
agguuuaaucgaugagaug

SEQ ID NO: 569226 - RNA, 19 nt, Artificial Sequence
  Description of Artificial Sequence: Synthetic oligonucleotide
  Antisense strand to SEQ ID NO: 569225
caucucaucgauuaaaccu

SEQ ID NO: 569227 - RNA, 19 nt, Artificial Sequence
  Description of Artificial Sequence: Synthetic oligonucleotide
  Sense strand starting at position 3768 of SEQ ID NO: 318523
cuaggaguuaccugggaac

SEQ ID NO: 569228 - RNA, 19 nt, Artificial Sequence
  Description of Artificial Sequence: Synthetic oligonucleotide
  Antisense strand to SEQ ID NO: 569227
guucccagguaacuccuag

SEQ ID NO: 569229 - RNA, 19 nt, Artificial Sequence
  Description of Artificial Sequence: Synthetic oligonucleotide
  Sense strand starting at position 6 of SEQ ID NO: 318524
guaugaaaucacuguauga

SEQ ID NO: 569230 - RNA, 19 nt, Artificial Sequence
  Description of Artificial Sequence: Synthetic oligonucleotide
  Antisense strand to SEQ ID NO: 569229
ucauacagugauuucauac

SEQ ID NO: 569231 - RNA, 19 nt, Artificial Sequence
  Description of Artificial Sequence: Synthetic oligonucleotide
  Sense strand starting at position 10 of SEQ ID NO: 318524
gaaaucacuguaugagauc

SEQ ID NO: 569232 - RNA, 19 nt, Artificial Sequence
  Description of Artificial Sequence: Synthetic oligonucleotide
  Antisense strand to SEQ ID NO: 569231
gaucucauacagugauuuc

SEQ ID NO: 569233 - RNA, 19 nt, Artificial Sequence
  Description of Artificial Sequence: Synthetic oligonucleotide
  Sense strand starting at position 70 of SEQ ID NO: 318524
uuguccaaacugugaucau

SEQ ID NO: 569234 - RNA, 19 nt, Artificial Sequence
  Description of Artificial Sequence: Synthetic oligonucleotide
  Antisense strand to SEQ ID NO: 569233
augaucacaguuuggacaa

SEQ ID NO: 569235 - RNA, 19 nt, Artificial Sequence
  Description of Artificial Sequence: Synthetic oligonucleotide
  Sense strand starting at position 128 of SEQ ID NO: 318524
ccaucaauguagucauuac

SEQ ID NO: 569236 - RNA, 19 nt, Artificial Sequence
  Description of Artificial Sequence: Synthetic oligonucleotide
  Antisense strand to SEQ ID NO: 569235
guaaugacuacauugaugg

SEQ ID NO: 569237 - RNA, 19 nt, Artificial Sequence
  Description of Artificial Sequence: Synthetic oligonucleotide
  Sense strand starting at position 166 of SEQ ID NO: 318524
ucaaguaaucccggcucau

SEQ ID NO: 569238 - RNA, 19 nt, Artificial Sequence
  Description of Artificial Sequence: Synthetic oligonucleotide
  Antisense strand to SEQ ID NO: 569237
augagccgggauuacuuga

SEQ ID NO: 569239 - RNA, 19 nt, Artificial Sequence
  Description of Artificial Sequence: Synthetic oligonucleotide
  Sense strand starting at position 240 of SEQ ID NO: 318524
gacauugaacgcugaagaa

SEQ ID NO: 569240 - RNA, 19 nt, Artificial Sequence
  Description of Artificial Sequence: Synthetic oligonucleotide
  Antisense strand to SEQ ID NO: 569239
uucuucagcguucaauguc

SEQ ID NO: 569241 - RNA, 19 nt, Artificial Sequence
  Description of Artificial Sequence: Synthetic oligonucleotide
  Sense strand starting at position 262 of SEQ ID NO: 318524
agucuuaugugaccauaaa

SEQ ID NO: 569242 - RNA, 19 nt, Artificial Sequence
  Description of Artificial Sequence: Synthetic oligonucleotide
  Antisense strand to SEQ ID NO: 569241
uuuauggucacauaagacu

SEQ ID NO: 569243 - RNA, 19 nt, Artificial Sequence
  Description of Artificial Sequence: Synthetic oligonucleotide
  Sense strand starting at position 331 of SEQ ID NO: 318524
aguguaacugcuuauggca

SEQ ID NO: 569244 - RNA, 19 nt, Artificial Sequence
  Description of Artificial Sequence: Synthetic oligonucleotide
  Antisense strand to SEQ ID NO: 569243
ugccauaagcaguuacacu

SEQ ID NO: 569245 - RNA, 19 nt, Artificial Sequence
  Description of Artificial Sequence: Synthetic oligonucleotide
  Sense strand starting at position 368 of SEQ ID NO: 318524
cuggucauccucuacagaa

SEQ ID NO: 569246 - RNA, 19 nt, Artificial Sequence
  Description of Artificial Sequence: Synthetic oligonucleotide
  Antisense strand to SEQ ID NO: 569245
uucuguagaggaugaccag

SEQ ID NO: 569247 - RNA, 19 nt, Artificial Sequence
  Description of Artificial Sequence: Synthetic oligonucleotide
  Sense strand starting at position 488 of SEQ ID NO: 318524
gaguuaugccauuauuagg

SEQ ID NO: 569248 - RNA, 19 nt, Artificial Sequence
  Description of Artificial Sequence: Synthetic oligonucleotide
  Antisense strand to SEQ ID NO: 569247
ccuaauaauggcauaacuc

SEQ ID NO: 569249 - RNA, 19 nt, Artificial Sequence
  Description of Artificial Sequence: Synthetic oligonucleotide
  Sense strand starting at position 529 of SEQ ID NO: 318524
ucucuaugauccuuuguau

SEQ ID NO: 569250 - RNA, 19 nt, Artificial Sequence
  Description of Artificial Sequence: Synthetic oligonucleotide
  Antisense strand to SEQ ID NO: 569249
auacaaaggaucauagaga

SEQ ID NO: 569251 - RNA, 19 nt, Artificial Sequence
  Description of Artificial Sequence: Synthetic oligonucleotide
  Sense strand starting at position 532 of SEQ ID NO: 318524
cuaugauccuuuguauauu

SEQ ID NO: 569252 - RNA, 19 nt, Artificial Sequence
  Description of Artificial Sequence: Synthetic oligonucleotide
  Antisense strand to SEQ ID NO: 569251
aauauacaaaggaucauag

SEQ ID NO: 569253 - RNA, 19 nt, Artificial Sequence
  Description of Artificial Sequence: Synthetic oligonucleotide
  Sense strand starting at position 645 of SEQ ID NO: 318524
cccuaauaggcguacauaa

SEQ ID NO: 569254 - RNA, 19 nt, Artificial Sequence
  Description of Artificial Sequence: Synthetic oligonucleotide
  Antisense strand to SEQ ID NO: 569253
uuauguacgccuauuaggg

SEQ ID NO: 569255 - RNA, 19 nt, Artificial Sequence
  Description of Artificial Sequence: Synthetic oligonucleotide
  Sense strand starting at position 695 of SEQ ID NO: 318524
gaugguaggugcucuccaa

SEQ ID NO: 569256 - RNA, 19 nt, Artificial Sequence
  Description of Artificial Sequence: Synthetic oligonucleotide
  Antisense strand to SEQ ID NO: 569255
uuggagagcaccuaccauc

SEQ ID NO: 569257 - RNA, 19 nt, Artificial Sequence
  Description of Artificial Sequence: Synthetic oligonucleotide
  Sense strand starting at position 710 of SEQ ID NO: 318524
ccaaccucucucgagagau

SEQ ID NO: 569258 - RNA, 19 nt, Artificial Sequence
  Description of Artificial Sequence: Synthetic oligonucleotide
  Antisense strand to SEQ ID NO: 569257
aucucucgagagagguugg

SEQ ID NO: 569259 - RNA, 19 nt, Artificial Sequence
  Description of Artificial Sequence: Synthetic oligonucleotide
  Sense strand starting at position 720 of SEQ ID NO: 318524
ucgagagauccucacugca

SEQ ID NO: 569260 - RNA, 19 nt, Artificial Sequence
  Description of Artificial Sequence: Synthetic oligonucleotide
  Antisense strand to SEQ ID NO: 569259
ugcagugaggaucucucga

SEQ ID NO: 569261 - RNA, 19 nt, Artificial Sequence
  Description of Artificial Sequence: Synthetic oligonucleotide
  Sense strand starting at position 722 of SEQ ID NO: 318524
gagagauccucacugcaca

SEQ ID NO: 569262 - RNA, 19 nt, Artificial Sequence
  Description of Artificial Sequence: Synthetic oligonucleotide
  Antisense strand to SEQ ID NO: 569261
ugugcagugaggaucucuc

SEQ ID NO: 569263 - RNA, 19 nt, Artificial Sequence
  Description of Artificial Sequence: Synthetic oligonucleotide
  Sense strand starting at position 723 of SEQ ID NO: 318524
agagauccucacugcacau

SEQ ID NO: 569264 - RNA, 19 nt, Artificial Sequence
  Description of Artificial Sequence: Synthetic oligonucleotide
  Antisense strand to SEQ ID NO: 569263
augugcagugaggaucucu

SEQ ID NO: 569265 - RNA, 19 nt, Artificial Sequence
  Description of Artificial Sequence: Synthetic oligonucleotide
  Sense strand starting at position 779 of SEQ ID NO: 318524
gagggauggugacuguuga

SEQ ID NO: 569266 - RNA, 19 nt, Artificial Sequence
  Description of Artificial Sequence: Synthetic oligonucleotide
  Antisense strand to SEQ ID NO: 569265
ucaacagucaccaucccuc

SEQ ID NO: 569267 - RNA, 19 nt, Artificial Sequence
  Description of Artificial Sequence: Synthetic oligonucleotide
  Sense strand starting at position 865 of SEQ ID NO: 318524
uccgguaucacguaacuag

SEQ ID NO: 569268 - RNA, 19 nt, Artificial Sequence
  Description of Artificial Sequence: Synthetic oligonucleotide
  Antisense strand to SEQ ID NO: 569267
cuaguuacgugauaccgga

SEQ ID NO: 569269 - RNA, 19 nt, Artificial Sequence
  Description of Artificial Sequence: Synthetic oligonucleotide
  Sense strand starting at position 914 of SEQ ID NO: 318524
aguuaacauuccucggcaa

SEQ ID NO: 569270 - RNA, 19 nt, Artificial Sequence
  Description of Artificial Sequence: Synthetic oligonucleotide
  Antisense strand to SEQ ID NO: 569269
uugccgaggaauguuaacu

SEQ ID NO: 569271 - RNA, 19 nt, Artificial Sequence
  Description of Artificial Sequence: Synthetic oligonucleotide
  Sense strand starting at position 915 of SEQ ID NO: 318524
guuaacauuccucggcaau

SEQ ID NO: 569272 - RNA, 19 nt, Artificial Sequence
  Description of Artificial Sequence: Synthetic oligonucleotide
  Antisense strand to SEQ ID NO: 569271
auugccgaggaauguuaac

SEQ ID NO: 569273 - RNA, 19 nt, Artificial Sequence
  Description of Artificial Sequence: Synthetic oligonucleotide
  Sense strand starting at position 916 of SEQ ID NO: 318524
uuaacauuccucggcaauu

SEQ ID NO: 569274 - RNA, 19 nt, Artificial Sequence
  Description of Artificial Sequence: Synthetic oligonucleotide
  Antisense strand to SEQ ID NO: 569273
aauugccgaggaauguuaa

SEQ ID NO: 569275 - RNA, 19 nt, Artificial Sequence
  Description of Artificial Sequence: Synthetic oligonucleotide
  Sense strand starting at position 947 of SEQ ID NO: 318524
gcugaauccagagaugcca

SEQ ID NO: 569276 - RNA, 19 nt, Artificial Sequence
  Description of Artificial Sequence: Synthetic oligonucleotide
  Antisense strand to SEQ ID NO: 569275
uggcaucucuggauucagc

SEQ ID NO: 569277 - RNA, 19 nt, Artificial Sequence
  Description of Artificial Sequence: Synthetic oligonucleotide
  Sense strand starting at position 2866 of SEQ ID NO: 318524
cgcgaaucuccgcucguaa

SEQ ID NO: 569278 - RNA, 19 nt, Artificial Sequence
  Description of Artificial Sequence: Synthetic oligonucleotide
  Antisense strand to SEQ ID NO: 569277
uuacgagcggagauucgcg

SEQ ID NO: 569279 - RNA, 19 nt, Artificial Sequence
  Description of Artificial Sequence: Synthetic oligonucleotide
  Sense strand starting at position 2867 of SEQ ID NO: 318524
gcgaaucuccgcucguaac

SEQ ID NO: 569280 - RNA, 19 nt, Artificial Sequence
  Description of Artificial Sequence: Synthetic oligonucleotide
  Antisense strand to SEQ ID NO: 569279
guuacgagcggagauucgc

SEQ ID NO: 569281 - RNA, 19 nt, Artificial Sequence
  Description of Artificial Sequence: Synthetic oligonucleotide
  Sense strand starting at position 2982 of SEQ ID NO: 318524
aucaguuccaguugugaug

SEQ ID NO: 569282 - RNA, 19 nt, Artificial Sequence
  Description of Artificial Sequence: Synthetic oligonucleotide
  Antisense strand to SEQ ID NO: 569281
caucacaacuggaacugau

SEQ ID NO: 569283 - RNA, 19 nt, Artificial Sequence
  Description of Artificial Sequence: Synthetic oligonucleotide
  Sense strand starting at position 3063 of SEQ ID NO: 318524
aagggagcuucuuugagac

SEQ ID NO: 569284 - RNA, 19 nt, Artificial Sequence
  Description of Artificial Sequence: Synthetic oligonucleotide
  Antisense strand to SEQ ID NO: 569283
gucucaaagaagcucccuu

SEQ ID NO: 569285 - RNA, 19 nt, Artificial Sequence
  Description of Artificial Sequence: Synthetic oligonucleotide
  Sense strand starting at position 3133 of SEQ ID NO: 318524
ugcagcucaucucucagaa

SEQ ID NO: 569286 - RNA, 19 nt, Artificial Sequence
  Description of Artificial Sequence: Synthetic oligonucleotide
  Antisense strand to SEQ ID NO: 569285
uucugagagaugagcugca

SEQ ID NO: 569287 - RNA, 19 nt, Artificial Sequence
  Description of Artificial Sequence: Synthetic oligonucleotide
  Sense strand starting at position 3149 of SEQ ID NO: 318524
gaauacaaugccggcaaua

SEQ ID NO: 569288 - RNA, 19 nt, Artificial Sequence
  Description of Artificial Sequence: Synthetic oligonucleotide
  Antisense strand to SEQ ID NO: 569287
uauugccggcauuguauuc

SEQ ID NO: 569289 - RNA, 19 nt, Artificial Sequence
  Description of Artificial Sequence: Synthetic oligonucleotide
  Sense strand starting at position 3178 of SEQ ID NO: 318524
gaguccuuaccaggagguu

SEQ ID NO: 569290 - RNA, 19 nt, Artificial Sequence
  Description of Artificial Sequence: Synthetic oligonucleotide
  Antisense strand to SEQ ID NO: 569289
aaccuccugguaaggacuc

SEQ ID NO: 569291 - RNA, 19 nt, Artificial Sequence
  Description of Artificial Sequence: Synthetic oligonucleotide
  Sense strand starting at position 3190 of SEQ ID NO: 318524
ggagguuucugcgugauuu

SEQ ID NO: 569292 - RNA, 19 nt, Artificial Sequence
  Description of Artificial Sequence: Synthetic oligonucleotide
  Antisense strand to SEQ ID NO: 569291
aaaucacgcagaaaccucc

SEQ ID NO: 569293 - RNA, 19 nt, Artificial Sequence
  Description of Artificial Sequence: Synthetic oligonucleotide
  Sense strand starting at position 3191 of SEQ ID NO: 318524
gagguuucugcgugauuug

SEQ ID NO: 569294 - RNA, 19 nt, Artificial Sequence
  Description of Artificial Sequence: Synthetic oligonucleotide
  Antisense strand to SEQ ID NO: 569293
caaaucacgcagaaaccuc

SEQ ID NO: 569295 - RNA, 19 nt, Artificial Sequence
  Description of Artificial Sequence: Synthetic oligonucleotide
  Sense strand starting at position 3216 of SEQ ID NO: 318524
gcagaauuccucugcuuau

SEQ ID NO: 569296 - RNA, 19 nt, Artificial Sequence
  Description of Artificial Sequence: Synthetic oligonucleotide
  Antisense strand to SEQ ID NO: 569295
auaagcagaggaauucugc

SEQ ID NO: 569297 - RNA, 19 nt, Artificial Sequence
  Description of Artificial Sequence: Synthetic oligonucleotide
  Sense strand starting at position 3265 of SEQ ID NO: 318524
cuaguuucucuucgguaaa

SEQ ID NO: 569298 - RNA, 19 nt, Artificial Sequence
  Description of Artificial Sequence: Synthetic oligonucleotide
  Antisense strand to SEQ ID NO: 569297
uuuaccgaagagaaacuag

SEQ ID NO: 569299 - RNA, 19 nt, Artificial Sequence
  Description of Artificial Sequence: Synthetic oligonucleotide
  Sense strand starting at position 3288 of SEQ ID NO: 318524
aagggaauauaacuguguu

SEQ ID NO: 569300 - RNA, 19 nt, Artificial Sequence
  Description of Artificial Sequence: Synthetic oligonucleotide
  Antisense strand to SEQ ID NO: 569299
aacacaguuauauucccuu

SEQ ID NO: 569301 - RNA, 19 nt, Artificial Sequence
  Description of Artificial Sequence: Synthetic oligonucleotide
  Sense strand starting at position 3289 of SEQ ID NO: 318524
agggaauauaacuguguuc

SEQ ID NO: 569302 - RNA, 19 nt, Artificial Sequence
  Description of Artificial Sequence: Synthetic oligonucleotide
  Antisense strand to SEQ ID NO: 569301
gaacacaguuauauucccu

SEQ ID NO: 569303 - RNA, 19 nt, Artificial Sequence
  Description of Artificial Sequence: Synthetic oligonucleotide
  Sense strand starting at position 3311 of SEQ ID NO: 318524
cuuucuuagcagcagaaau

SEQ ID NO: 569304 - RNA, 19 nt, Artificial Sequence
  Description of Artificial Sequence: Synthetic oligonucleotide
  Antisense strand to SEQ ID NO: 569303
auuucugcugcuaagaaag

SEQ ID NO: 569305 - RNA, 19 nt, Artificial Sequence
  Description of Artificial Sequence: Synthetic oligonucleotide
  Sense strand starting at position 3340 of SEQ ID NO: 318524
auagauuaugcccaaaguc

SEQ ID NO: 569306 - RNA, 19 nt, Artificial Sequence
  Description of Artificial Sequence: Synthetic oligonucleotide
  Antisense strand to SEQ ID NO: 569305
gacuuugggcauaaucuau

SEQ ID NO: 569307 - RNA, 19 nt, Artificial Sequence
  Description of Artificial Sequence: Synthetic oligonucleotide
  Sense strand starting at position 3768 of SEQ ID NO: 318524
cuugaaacaugaugaaaga

SEQ ID NO: 569308 - RNA, 19 nt, Artificial Sequence
  Description of Artificial Sequence: Synthetic oligonucleotide
  Antisense strand to SEQ ID NO: 569307
ucuuucaucauguuucaag

SEQ ID NO: 569309 - RNA, 19 nt, Artificial Sequence
  Description of Artificial Sequence: Synthetic oligonucleotide
  Sense strand starting at position 13 of SEQ ID NO: 318525
accucugugggcugaagau

SEQ ID NO: 569310 - RNA, 19 nt, Artificial Sequence
  Description of Artificial Sequence: Synthetic oligonucleotide
  Antisense strand to SEQ ID NO: 569309
aucuucagcccacagaggu

SEQ ID NO: 569311 - RNA, 19 nt, Artificial Sequence
  Description of Artificial Sequence: Synthetic oligonucleotide
  Sense strand starting at position 102 of SEQ ID NO: 318525
ggcccuuucuguggaagua

SEQ ID NO: 569312 - RNA, 19 nt, Artificial Sequence
  Description of Artificial Sequence: Synthetic oligonucleotide
  Antisense strand to SEQ ID NO: 569311
uacuuccacagaaagggcc

SEQ ID NO: 569313 - RNA, 19 nt, Artificial Sequence
  Description of Artificial Sequence: Synthetic oligonucleotide
  Sense strand starting at position 149 of SEQ ID NO: 318525
gugcaaguucucugccagu

SEQ ID NO: 569314 - RNA, 19 nt, Artificial Sequence
  Description of Artificial Sequence: Synthetic oligonucleotide
  Antisense strand to SEQ ID NO: 569313
acuggcagagaacuugcac

SEQ ID NO: 569315 - RNA, 19 nt, Artificial Sequence
  Description of Artificial Sequence: Synthetic oligonucleotide
  Sense strand starting at position 151 of SEQ ID NO: 318525
gcaaguucucugccaguuc

SEQ ID NO: 569316 - RNA, 19 nt, Artificial Sequence
  Description of Artificial Sequence: Synthetic oligonucleotide
  Antisense strand to SEQ ID NO: 569315
gaacuggcagagaacuugc

SEQ ID NO: 569317 - RNA, 19 nt, Artificial Sequence
  Description of Artificial Sequence: Synthetic oligonucleotide
  Sense strand starting at position 159 of SEQ ID NO: 318525
ucugccaguucggagaaau

SEQ ID NO: 569318 - RNA, 19 nt, Artificial Sequence
  Description of Artificial Sequence: Synthetic oligonucleotide
  Antisense strand to SEQ ID NO: 569317
auuucuccgaacuggcaga

SEQ ID NO: 569319 - RNA, 19 nt, Artificial Sequence
  Description of Artificial Sequence: Synthetic oligonucleotide
  Sense strand starting at position 170 of SEQ ID NO: 318525
ggagaaaucucccaaguuc

SEQ ID NO: 569320 - RNA, 19 nt, Artificial Sequence
  Description of Artificial Sequence: Synthetic oligonucleotide
  Antisense strand to SEQ ID NO: 569319
gaacuugggagauuucucc

SEQ ID NO: 569321 - RNA, 19 nt, Artificial Sequence
  Description of Artificial Sequence: Synthetic oligonucleotide
  Sense strand starting at position 381 of SEQ ID NO: 318525
gcucaacagccuugagagu

SEQ ID NO: 569322 - RNA, 19 nt, Artificial Sequence
  Description of Artificial Sequence: Synthetic oligonucleotide
  Antisense strand to SEQ ID NO: 569321
acucucaaggcuguugagc

SEQ ID NO: 569323 - RNA, 19 nt, Artificial Sequence
  Description of Artificial Sequence: Synthetic oligonucleotide
  Sense strand starting at position 913 of SEQ ID NO: 318525
ccggacuugucccuggaca

SEQ ID NO: 569324 - RNA, 19 nt, Artificial Sequence
  Description of Artificial Sequence: Synthetic oligonucleotide
  Antisense strand to SEQ ID NO: 569323
uguccagggacaaguccgg

SEQ ID NO: 569325 - RNA, 19 nt, Artificial Sequence
  Description of Artificial Sequence: Synthetic oligonucleotide
  Sense strand starting at position 914 of SEQ ID NO: 318525
cggacuugucccuggacag

SEQ ID NO: 569326 - RNA, 19 nt, Artificial Sequence
  Description of Artificial Sequence: Synthetic oligonucleotide
  Antisense strand to SEQ ID NO: 569325
cuguccagggacaaguccg

SEQ ID NO: 569327 - RNA, 19 nt, Artificial Sequence
  Description of Artificial Sequence: Synthetic oligonucleotide
  Sense strand starting at position 915 of SEQ ID NO: 318525
ggacuugucccuggacaga

SEQ ID NO: 569328 - RNA, 19 nt, Artificial Sequence
  Description of Artificial Sequence: Synthetic oligonucleotide
  Antisense strand to SEQ ID NO: 569327
ucuguccagggacaagucc

SEQ ID NO: 569329 - RNA, 19 nt, Artificial Sequence
  Description of Artificial Sequence: Synthetic oligonucleotide
  Sense strand starting at position 1040 of SEQ ID NO: 318525
ccggacaccuucucagaga

SEQ ID NO: 569330 - RNA, 19 nt, Artificial Sequence
  Description of Artificial Sequence: Synthetic oligonucleotide
  Antisense strand to SEQ ID NO: 569329
ucucugagaagguguccgg

SEQ ID NO: 569331 - RNA, 19 nt, Artificial Sequence
  Description of Artificial Sequence: Synthetic oligonucleotide
  Sense strand starting at position 1195 of SEQ ID NO: 318525
aagugaaagugcuagaaac

SEQ ID NO: 569332 - RNA, 19 nt, Artificial Sequence
  Description of Artificial Sequence: Synthetic oligonucleotide
  Antisense strand to SEQ ID NO: 569331
guuucuagcacuuucacuu

SEQ ID NO: 569333 - RNA, 19 nt, Artificial Sequence
  Description of Artificial Sequence: Synthetic oligonucleotide
  Sense strand starting at position 1197 of SEQ ID NO: 318525
gugaaagugcuagaaaccu

SEQ ID NO: 569334 - RNA, 19 nt, Artificial Sequence
  Description of Artificial Sequence: Synthetic oligonucleotide
  Antisense strand to SEQ ID NO: 569333
agguuucuagcacuuucac

SEQ ID NO: 569335 - RNA, 19 nt, Artificial Sequence
  Description of Artificial Sequence: Synthetic oligonucleotide
  Sense strand starting at position 1205 of SEQ ID NO: 318525
gcuagaaaccuccagauuc

SEQ ID NO: 569336 - RNA, 19 nt, Artificial Sequence
  Description of Artificial Sequence: Synthetic oligonucleotide
  Antisense strand to SEQ ID NO: 569335
gaaucuggagguuucuagc

SEQ ID NO: 569337 - RNA, 19 nt, Artificial Sequence
  Description of Artificial Sequence: Synthetic oligonucleotide
  Sense strand starting at position 2961 of SEQ ID NO: 318525
gguggaguuccagaaccca

SEQ ID NO: 569338 - RNA, 19 nt, Artificial Sequence
  Description of Artificial Sequence: Synthetic oligonucleotide
  Antisense strand to SEQ ID NO: 569337
uggguucuggaacuccacc

SEQ ID NO: 569339 - RNA, 19 nt, Artificial Sequence
  Description of Artificial Sequence: Synthetic oligonucleotide
  Sense strand starting at position 3048 of SEQ ID NO: 318525
ggaacaaucagauguccgu

SEQ ID NO: 569340 - RNA, 19 nt, Artificial Sequence
  Description of Artificial Sequence: Synthetic oligonucleotide
  Antisense strand to SEQ ID NO: 569339
acggacaucugauuguucc

SEQ ID NO: 569341 - RNA, 19 nt, Artificial Sequence
  Description of Artificial Sequence: Synthetic oligonucleotide
  Sense strand starting at position 3051 of SEQ ID NO: 318525
acaaucagauguccgucaa

SEQ ID NO: 569342 - RNA, 19 nt, Artificial Sequence
  Description of Artificial Sequence: Synthetic oligonucleotide
  Antisense strand to SEQ ID NO: 569341
uugacggacaucugauugu

SEQ ID NO: 569343 - RNA, 19 nt, Artificial Sequence
  Description of Artificial Sequence: Synthetic oligonucleotide
  Sense strand starting at position 3052 of SEQ ID NO: 318525
caaucagauguccgucaau

SEQ ID NO: 569344 - RNA, 19 nt, Artificial Sequence
  Description of Artificial Sequence: Synthetic oligonucleotide
  Antisense strand to SEQ ID NO: 569343
auugacggacaucugauug

SEQ ID NO: 569345 - RNA, 19 nt, Artificial Sequence
  Description of Artificial Sequence: Synthetic oligonucleotide
  Sense strand starting at position 3102 of SEQ ID NO: 318525
ggugcaaugagucagccuu

SEQ ID NO: 569346 - RNA, 19 nt, Artificial Sequence
  Description of Artificial Sequence: Synthetic oligonucleotide
  Antisense strand to SEQ ID NO: 569345
aaggcugacucauugcacc

SEQ ID NO: 569347 - RNA, 19 nt, Artificial Sequence
  Description of Artificial Sequence: Synthetic oligonucleotide
  Sense strand starting at position 3104 of SEQ ID NO: 318525
ugcaaugagucagccuuua

SEQ ID NO: 569348 - RNA, 19 nt, Artificial Sequence
  Description of Artificial Sequence: Synthetic oligonucleotide
  Antisense strand to SEQ ID NO: 569347
uaaaggcugacucauugca

SEQ ID NO: 569349 - RNA, 19 nt, Artificial Sequence
  Description of Artificial Sequence: Synthetic oligonucleotide
  Sense strand starting at position 3193 of SEQ ID NO: 318525
agccucuugucacguggaa

SEQ ID NO: 569350 - RNA, 19 nt, Artificial Sequence
  Description of Artificial Sequence: Synthetic oligonucleotide
  Antisense strand to SEQ ID NO: 569349
uuccacgugacaagaggcu

SEQ ID NO: 569351 - RNA, 19 nt, Artificial Sequence
  Description of Artificial Sequence: Synthetic oligonucleotide
  Sense strand starting at position 3237 of SEQ ID NO: 318525
agccgcuugccugucuaau

SEQ ID NO: 569352 - RNA, 19 nt, Artificial Sequence
  Description of Artificial Sequence: Synthetic oligonucleotide
  Antisense strand to SEQ ID NO: 569351
auuagacaggcaagcggcu

SEQ ID NO: 569353 - RNA, 19 nt, Artificial Sequence
  Description of Artificial Sequence: Synthetic oligonucleotide
  Sense strand starting at position 3238 of SEQ ID NO: 318525
gccgcuugccugucuaauc

SEQ ID NO: 569354 - RNA, 19 nt, Artificial Sequence
  Description of Artificial Sequence: Synthetic oligonucleotide
  Antisense strand to SEQ ID NO: 569353
gauuagacaggcaagcggc

SEQ ID NO: 569355 - RNA, 19 nt, Artificial Sequence
  Description of Artificial Sequence: Synthetic oligonucleotide
  Sense strand starting at position 3407 of SEQ ID NO: 318525
uggacucuucugggcagaa

SEQ ID NO: 569356 - RNA, 19 nt, Artificial Sequence
  Description of Artificial Sequence: Synthetic oligonucleotide
  Antisense strand to SEQ ID NO: 569355
uucugcccagaagagucca

SEQ ID NO: 569357 - RNA, 19 nt, Artificial Sequence
  Description of Artificial Sequence: Synthetic oligonucleotide
  Sense strand starting at position 3408 of SEQ ID NO: 318525
ggacucuucugggcagaag

SEQ ID NO: 569358 - RNA, 19 nt, Artificial Sequence
  Description of Artificial Sequence: Synthetic oligonucleotide
  Antisense strand to SEQ ID NO: 569357
cuucugcccagaagagucc

SEQ ID NO: 569359 - RNA, 19 nt, Artificial Sequence
  Description of Artificial Sequence: Synthetic oligonucleotide
  Sense strand starting at position 3669 of SEQ ID NO: 318525
gagggcuggcuuugcuaaa

SEQ ID NO: 569360 - RNA, 19 nt, Artificial Sequence
  Description of Artificial Sequence: Synthetic oligonucleotide
  Antisense strand to SEQ ID NO: 569359
uuuagcaaagccagcccuc

SEQ ID NO: 569361 - RNA, 19 nt, Artificial Sequence
  Description of Artificial Sequence: Synthetic oligonucleotide
  Sense strand starting at position 3818 of SEQ ID NO: 318525
agcgcuauucccgaggguu

SEQ ID NO: 569362 - RNA, 19 nt, Artificial Sequence
  Description of Artificial Sequence: Synthetic oligonucleotide
  Antisense strand to SEQ ID NO: 569361
aacccucgggaauagcgcu

SEQ ID NO: 569363 - RNA, 19 nt, Artificial Sequence
  Description of Artificial Sequence: Synthetic oligonucleotide
  Sense strand starting at position 3819 of SEQ ID NO: 318525
gcgcuauucccgaggguug

SEQ ID NO: 569364 - RNA, 19 nt, Artificial Sequence
  Description of Artificial Sequence: Synthetic oligonucleotide
  Antisense strand to SEQ ID NO: 569363
caacccucgggaauagcgc

SEQ ID NO: 569365 - RNA, 19 nt, Artificial Sequence
  Description of Artificial Sequence: Synthetic oligonucleotide
  Sense strand starting at position 115 of SEQ ID NO: 318526
ugcauaaucucagcaggaa

SEQ ID NO: 569366 - RNA, 19 nt, Artificial Sequence
  Description of Artificial Sequence: Synthetic oligonucleotide
  Antisense strand to SEQ ID NO: 569365
uuccugcugagauuaugca

SEQ ID NO: 569367 - RNA, 19 nt, Artificial Sequence
  Description of Artificial Sequence: Synthetic oligonucleotide
  Sense strand starting at position 116 of SEQ ID NO: 318526
gcauaaucucagcaggaau

SEQ ID NO: 569368 - RNA, 19 nt, Artificial Sequence
  Description of Artificial Sequence: Synthetic oligonucleotide
  Antisense strand to SEQ ID NO: 569367
auuccugcugagauuaugc

SEQ ID NO: 569369 - RNA, 19 nt, Artificial Sequence
  Description of Artificial Sequence: Synthetic oligonucleotide
  Sense strand starting at position 168 of SEQ ID NO: 318526
gguugcagugugcauauuu

SEQ ID NO: 569370 - RNA, 19 nt, Artificial Sequence
  Description of Artificial Sequence: Synthetic oligonucleotide
  Antisense strand to SEQ ID NO: 569369
aaauaugcacacugcaacc

SEQ ID NO: 569371 - RNA, 19 nt, Artificial Sequence
  Description of Artificial Sequence: Synthetic oligonucleotide
  Sense strand starting at position 200 of SEQ ID NO: 318526
gugagaaaugugcauaaau

SEQ ID NO: 569372 - RNA, 19 nt, Artificial Sequence
  Description of Artificial Sequence: Synthetic oligonucleotide
  Antisense strand to SEQ ID NO: 569371
auuuaugcacauuucucac

SEQ ID NO: 569373 - RNA, 19 nt, Artificial Sequence
  Description of Artificial Sequence: Synthetic oligonucleotide
  Sense strand starting at position 293 of SEQ ID NO: 318526
gcuagaucugacugagaac

SEQ ID NO: 569374 - RNA, 19 nt, Artificial Sequence
  Description of Artificial Sequence: Synthetic oligonucleotide
  Antisense strand to SEQ ID NO: 569373
guucucagucagaucuagc

SEQ ID NO: 569375 - RNA, 19 nt, Artificial Sequence
  Description of Artificial Sequence: Synthetic oligonucleotide
  Sense strand starting at position 360 of SEQ ID NO: 318526
guacacaaucaguaaaugu

SEQ ID NO: 569376 - RNA, 19 nt, Artificial Sequence
  Description of Artificial Sequence: Synthetic oligonucleotide
  Antisense strand to SEQ ID NO: 569375
acauuuacugauuguguac

SEQ ID NO: 569377 - RNA, 19 nt, Artificial Sequence
  Description of Artificial Sequence: Synthetic oligonucleotide
  Sense strand starting at position 368 of SEQ ID NO: 318526
ucaguaaauguccaauuga

SEQ ID NO: 569378 - RNA, 19 nt, Artificial Sequence
  Description of Artificial Sequence: Synthetic oligonucleotide
  Antisense strand to SEQ ID NO: 569377
ucaauuggacauuuacuga

SEQ ID NO: 569379 - RNA, 19 nt, Artificial Sequence
  Description of Artificial Sequence: Synthetic oligonucleotide
  Sense strand starting at position 431 of SEQ ID NO: 318526
cuguauacaugguugaaag

SEQ ID NO: 569380 - RNA, 19 nt, Artificial Sequence
  Description of Artificial Sequence: Synthetic oligonucleotide
  Antisense strand to SEQ ID NO: 569379
cuuucaaccauguauacag

SEQ ID NO: 569381 - RNA, 19 nt, Artificial Sequence
  Description of Artificial Sequence: Synthetic oligonucleotide
  Sense strand starting at position 433 of SEQ ID NO: 318526
guauacaugguugaaagca

SEQ ID NO: 569382 - RNA, 19 nt, Artificial Sequence
  Description of Artificial Sequence: Synthetic oligonucleotide
  Antisense strand to SEQ ID NO: 569381
ugcuuucaaccauguauac

SEQ ID NO: 569383 - RNA, 19 nt, Artificial Sequence
  Description of Artificial Sequence: Synthetic oligonucleotide
  Sense strand starting at position 502 of SEQ ID NO: 318526
uguuacaugcaguaaagua

SEQ ID NO: 569384 - RNA, 19 nt, Artificial Sequence
  Description of Artificial Sequence: Synthetic oligonucleotide
  Antisense strand to SEQ ID NO: 569383
uacuuuacugcauguaaca

SEQ ID NO: 569385 - RNA, 19 nt, Artificial Sequence
  Description of Artificial Sequence: Synthetic oligonucleotide
  Sense strand starting at position 597 of SEQ ID NO: 318526
cccacaguacaugggaaau

SEQ ID NO: 569386 - RNA, 19 nt, Artificial Sequence
  Description of Artificial Sequence: Synthetic oligonucleotide
  Antisense strand to SEQ ID NO: 569385
auuucccauguacuguggg

SEQ ID NO: 569387 - RNA, 19 nt, Artificial Sequence
  Description of Artificial Sequence: Synthetic oligonucleotide
  Sense strand starting at position 727 of SEQ ID NO: 318526
caaguagaaguaugaagua

SEQ ID NO: 569388 - RNA, 19 nt, Artificial Sequence
  Description of Artificial Sequence: Synthetic oligonucleotide
  Antisense strand to SEQ ID NO: 569387
uacuucauacuucuacuug

SEQ ID NO: 569389 - RNA, 19 nt, Artificial Sequence
  Description of Artificial Sequence: Synthetic oligonucleotide
  Sense strand starting at position 732 of SEQ ID NO: 318526
agaaguaugaaguaguguu

SEQ ID NO: 569390 - RNA, 19 nt, Artificial Sequence
  Description of Artificial Sequence: Synthetic oligonucleotide
  Antisense strand to SEQ ID NO: 569389
aacacuacuucauacuucu

SEQ ID NO: 569391 - RNA, 19 nt, Artificial Sequence
  Description of Artificial Sequence: Synthetic oligonucleotide
  Sense strand starting at position 772 of SEQ ID NO: 318526
ggaaucuuccgaggaaacu

SEQ ID NO: 569392 - RNA, 19 nt, Artificial Sequence
  Description of Artificial Sequence: Synthetic oligonucleotide
  Antisense strand to SEQ ID NO: 569391
aguuuccucggaagauucc

SEQ ID NO: 569393 - RNA, 19 nt, Artificial Sequence
  Description of Artificial Sequence: Synthetic oligonucleotide
  Sense strand starting at position 783 of SEQ ID NO: 318526
aggaaacuaucgcugacuu

SEQ ID NO: 569394 - RNA, 19 nt, Artificial Sequence
  Description of Artificial Sequence: Synthetic oligonucleotide
  Antisense strand to SEQ ID NO: 569393
aagucagcgauaguuuccu

SEQ ID NO: 569395 - RNA, 19 nt, Artificial Sequence
  Description of Artificial Sequence: Synthetic oligonucleotide
  Sense strand starting at position 926 of SEQ ID NO: 318526
aaucucuuuccugguggaa

SEQ ID NO: 569396 - RNA, 19 nt, Artificial Sequence
  Description of Artificial Sequence: Synthetic oligonucleotide
  Antisense strand to SEQ ID NO: 569395
uuccaccaggaaagagauu

SEQ ID NO: 569397 - RNA, 19 nt, Artificial Sequence
  Description of Artificial Sequence: Synthetic oligonucleotide
  Sense strand starting at position 942 of SEQ ID NO: 318526
gaaaucagcuguucugaaa

SEQ ID NO: 569398 - RNA, 19 nt, Artificial Sequence
  Description of Artificial Sequence: Synthetic oligonucleotide
  Antisense strand to SEQ ID NO: 569397
uuucagaacagcugauuuc

SEQ ID NO: 569399 - RNA, 19 nt, Artificial Sequence
  Description of Artificial Sequence: Synthetic oligonucleotide
  Sense strand starting at position 1251 of SEQ ID NO: 318526
uggauuaaaugcuuaggga

SEQ ID NO: 569400 - RNA, 19 nt, Artificial Sequence
  Description of Artificial Sequence: Synthetic oligonucleotide
  Antisense strand to SEQ ID NO: 569399
ucccuaagcauuuaaucca

SEQ ID NO: 569401 - RNA, 19 nt, Artificial Sequence
  Description of Artificial Sequence: Synthetic oligonucleotide
  Sense strand starting at position 1421 of SEQ ID NO: 318526
augacucaacuccgaauua

SEQ ID NO: 569402 - RNA, 19 nt, Artificial Sequence
  Description of Artificial Sequence: Synthetic oligonucleotide
  Antisense strand to SEQ ID NO: 569401
uaauucggaguugagucau

SEQ ID NO: 569403 - RNA, 19 nt, Artificial Sequence
  Description of Artificial Sequence: Synthetic oligonucleotide
  Sense strand starting at position 1556 of SEQ ID NO: 318526
aauacaucggcagagaagu

SEQ ID NO: 569404 - RNA, 19 nt, Artificial Sequence
  Description of Artificial Sequence: Synthetic oligonucleotide
  Antisense strand to SEQ ID NO: 569403
acuucucugccgauguauu

SEQ ID NO: 569405 - RNA, 19 nt, Artificial Sequence
  Description of Artificial Sequence: Synthetic oligonucleotide
  Sense strand starting at position 2017 of SEQ ID NO: 318526
gcugaaagucuugauuaga

SEQ ID NO: 569406 - RNA, 19 nt, Artificial Sequence
  Description of Artificial Sequence: Synthetic oligonucleotide
  Antisense strand to SEQ ID NO: 569405
ucuaaucaagacuuucagc

SEQ ID NO: 569407 - RNA, 19 nt, Artificial Sequence
  Description of Artificial Sequence: Synthetic oligonucleotide
  Sense strand starting at position 2178 of SEQ ID NO: 318526
aacugacguuucuugggaa

SEQ ID NO: 569408 - RNA, 19 nt, Artificial Sequence
  Description of Artificial Sequence: Synthetic oligonucleotide
  Antisense strand to SEQ ID NO: 569407
uucccaagaaacgucaguu

SEQ ID NO: 569409 - RNA, 19 nt, Artificial Sequence
  Description of Artificial Sequence: Synthetic oligonucleotide
  Sense strand starting at position 2206 of SEQ ID NO: 318526
ugcagacaaguauguagaa

SEQ ID NO: 569410 - RNA, 19 nt, Artificial Sequence
  Description of Artificial Sequence: Synthetic oligonucleotide
  Antisense strand to SEQ ID NO: 569409
uucuacauacuugucugca

SEQ ID NO: 569411 - RNA, 19 nt, Artificial Sequence
  Description of Artificial Sequence: Synthetic oligonucleotide
  Sense strand starting at position 2207 of SEQ ID NO: 318526
gcagacaaguauguagaaa

SEQ ID NO: 569412 - RNA, 19 nt, Artificial Sequence
  Description of Artificial Sequence: Synthetic oligonucleotide
  Antisense strand to SEQ ID NO: 569411
uuucuacauacuugucugc

SEQ ID NO: 569413 - RNA, 19 nt, Artificial Sequence
  Description of Artificial Sequence: Synthetic oligonucleotide
  Sense strand starting at position 2546 of SEQ ID NO: 318526
uucucauugccuugagaag

SEQ ID NO: 569414 - RNA, 19 nt, Artificial Sequence
  Description of Artificial Sequence: Synthetic oligonucleotide
  Antisense strand to SEQ ID NO: 569413
cuucucaaggcaaugagaa

SEQ ID NO: 569415 - RNA, 19 nt, Artificial Sequence
  Description of Artificial Sequence: Synthetic oligonucleotide
  Sense strand starting at position 2647 of SEQ ID NO: 318526
ugaggugacuuauucccaa

SEQ ID NO: 569416 - RNA, 19 nt, Artificial Sequence
  Description of Artificial Sequence: Synthetic oligonucleotide
  Antisense strand to SEQ ID NO: 569415
uugggaauaagucaccuca

SEQ ID NO: 569417 - RNA, 19 nt, Artificial Sequence
  Description of Artificial Sequence: Synthetic oligonucleotide
  Sense strand starting at position 2723 of SEQ ID NO: 318526
agaaucacagccugagguu

SEQ ID NO: 569418 - RNA, 19 nt, Artificial Sequence
  Description of Artificial Sequence: Synthetic oligonucleotide
  Antisense strand to SEQ ID NO: 569417
aaccucaggcugugauucu

SEQ ID NO: 569419 - RNA, 19 nt, Artificial Sequence
  Description of Artificial Sequence: Synthetic oligonucleotide
  Sense strand starting at position 2724 of SEQ ID NO: 318526
gaaucacagccugagguuu

SEQ ID NO: 569420 - RNA, 19 nt, Artificial Sequence
  Description of Artificial Sequence: Synthetic oligonucleotide
  Antisense strand to SEQ ID NO: 569419
aaaccucaggcugugauuc

SEQ ID NO: 569421 - RNA, 19 nt, Artificial Sequence
  Description of Artificial Sequence: Synthetic oligonucleotide
  Sense strand starting at position 2899 of SEQ ID NO: 318526
aacagcuacugguuggaaa

SEQ ID NO: 569422 - RNA, 19 nt, Artificial Sequence
  Description of Artificial Sequence: Synthetic oligonucleotide
  Antisense strand to SEQ ID NO: 569421
uuuccaaccaguagcuguu

SEQ ID NO: 569423 - RNA, 19 nt, Artificial Sequence
  Description of Artificial Sequence: Synthetic oligonucleotide
  Sense strand starting at position 2910 of SEQ ID NO: 318526
guuggaaagcaauggugaa

SEQ ID NO: 569424 - RNA, 19 nt, Artificial Sequence
  Description of Artificial Sequence: Synthetic oligonucleotide
  Antisense strand to SEQ ID NO: 569423
uucaccauugcuuuccaac

SEQ ID NO: 569425 - RNA, 19 nt, Artificial Sequence
  Description of Artificial Sequence: Synthetic oligonucleotide
  Sense strand starting at position 2911 of SEQ ID NO: 318526
uuggaaagcaauggugaau

SEQ ID NO: 569426 - RNA, 19 nt, Artificial Sequence
  Description of Artificial Sequence: Synthetic oligonucleotide
  Antisense strand to SEQ ID NO: 569425
auucaccauugcuuuccaa

SEQ ID NO: 569427 - RNA, 19 nt, Artificial Sequence
  Description of Artificial Sequence: Synthetic oligonucleotide
  Sense strand starting at position 3186 of SEQ ID NO: 318526
agggcaagaacuugucuua

SEQ ID NO: 569428 - RNA, 19 nt, Artificial Sequence
  Description of Artificial Sequence: Synthetic oligonucleotide
  Antisense strand to SEQ ID NO: 569427
uaagacaaguucuugcccu

SEQ ID NO: 569429 - RNA, 19 nt, Artificial Sequence
  Description of Artificial Sequence: Synthetic oligonucleotide
  Sense strand starting at position 3348 of SEQ ID NO: 318526
gccauuucucaaugccaug

SEQ ID NO: 569430 - RNA, 19 nt, Artificial Sequence
  Description of Artificial Sequence: Synthetic oligonucleotide
  Antisense strand to SEQ ID NO: 569429
cauggcauugagaaauggc

SEQ ID NO: 569431 - RNA, 19 nt, Artificial Sequence
  Description of Artificial Sequence: Synthetic oligonucleotide
  Sense strand starting at position 3409 of SEQ ID NO: 318526
gagccaugaguuuaggauu

SEQ ID NO: 569432 - RNA, 19 nt, Artificial Sequence
  Description of Artificial Sequence: Synthetic oligonucleotide
  Antisense strand to SEQ ID NO: 569431
aauccuaaacucauggcuc

SEQ ID NO: 569433 - RNA, 19 nt, Artificial Sequence
  Description of Artificial Sequence: Synthetic oligonucleotide
  Sense strand starting at position 3600 of SEQ ID NO: 318526
ccacacuuugguuagcaua

SEQ ID NO: 569434 - RNA, 19 nt, Artificial Sequence
  Description of Artificial Sequence: Synthetic oligonucleotide
  Antisense strand to SEQ ID NO: 569433
uaugcuaaccaaagugugg

SEQ ID NO: 569435 - RNA, 19 nt, Artificial Sequence
  Description of Artificial Sequence: Synthetic oligonucleotide
  Sense strand starting at position 3706 of SEQ ID NO: 318526
ucaguuuguguagacauua

SEQ ID NO: 569436 - RNA, 19 nt, Artificial Sequence
  Description of Artificial Sequence: Synthetic oligonucleotide
  Antisense strand to SEQ ID NO: 569435
uaaugucuacacaaacuga

SEQ ID NO: 569437 - RNA, 19 nt, Artificial Sequence
  Description of Artificial Sequence: Synthetic oligonucleotide
  Sense strand starting at position 3865 of SEQ ID NO: 318526
ggaauuacuucuuuaagca

SEQ ID NO: 569438 - RNA, 19 nt, Artificial Sequence
  Description of Artificial Sequence: Synthetic oligonucleotide
  Antisense strand to SEQ ID NO: 569437
ugcuuaaagaaguaauucc

SEQ ID NO: 569439 - RNA, 19 nt, Artificial Sequence
  Description of Artificial Sequence: Synthetic oligonucleotide
  Sense strand starting at position 3888 of SEQ ID NO: 318526
uuucucuuucuggaaagcu

SEQ ID NO: 569440 - RNA, 19 nt, Artificial Sequence
  Description of Artificial Sequence: Synthetic oligonucleotide
  Antisense strand to SEQ ID NO: 569439
agcuuuccagaaagagaaa

SEQ ID NO: 569441 - RNA, 19 nt, Artificial Sequence
  Description of Artificial Sequence: Synthetic oligonucleotide
  Sense strand starting at position 3896 of SEQ ID NO: 318526
ucuggaaagcuauagcaaa

SEQ ID NO: 569442 - RNA, 19 nt, Artificial Sequence
  Description of Artificial Sequence: Synthetic oligonucleotide
  Antisense strand to SEQ ID NO: 569441
uuugcuauagcuuuccaga

SEQ ID NO: 569443 - RNA, 19 nt, Artificial Sequence
  Description of Artificial Sequence: Synthetic oligonucleotide
  Sense strand starting at position 3937 of SEQ ID NO: 318526
gguuuccucaacgcguauu

SEQ ID NO: 569444 - RNA, 19 nt, Artificial Sequence
  Description of Artificial Sequence: Synthetic oligonucleotide
  Antisense strand to SEQ ID NO: 569443
aauacgcguugaggaaacc

SEQ ID NO: 569445 - RNA, 19 nt, Artificial Sequence
  Description of Artificial Sequence: Synthetic oligonucleotide
  Sense strand starting at position 50 of SEQ ID NO: 318527
gccuuagaaugcuuacuau

SEQ ID NO: 569446 - RNA, 19 nt, Artificial Sequence
  Description of Artificial Sequence: Synthetic oligonucleotide
  Antisense strand to SEQ ID NO: 569445
auaguaagcauucuaaggc

SEQ ID NO: 569447 - RNA, 19 nt, Artificial Sequence
  Description of Artificial Sequence: Synthetic oligonucleotide
  Sense strand starting at position 72 of SEQ ID NO: 318527
cucacuguccuccgaauaa

SEQ ID NO: 569448 - RNA, 19 nt, Artificial Sequence
  Description of Artificial Sequence: Synthetic oligonucleotide
  Antisense strand to SEQ ID NO: 569447
uuauucggaggacagugag

SEQ ID NO: 569449 - RNA, 19 nt, Artificial Sequence
  Description of Artificial Sequence: Synthetic oligonucleotide
  Sense strand starting at position 93 of SEQ ID NO: 318527
ucagcuccucaguauacau

SEQ ID NO: 569450 - RNA, 19 nt, Artificial Sequence
  Description of Artificial Sequence: Synthetic oligonucleotide
  Antisense strand to SEQ ID NO: 569449
auguauacugaggagcuga

SEQ ID NO: 569451 - RNA, 19 nt, Artificial Sequence
  Description of Artificial Sequence: Synthetic oligonucleotide
  Sense strand starting at position 139 of SEQ ID NO: 318527
ggccauuucuagucucauu

SEQ ID NO: 569452 - RNA, 19 nt, Artificial Sequence
  Description of Artificial Sequence: Synthetic oligonucleotide
  Antisense strand to SEQ ID NO: 569451
aaugagacuagaaauggcc

SEQ ID NO: 569453 - RNA, 19 nt, Artificial Sequence
  Description of Artificial Sequence: Synthetic oligonucleotide
  Sense strand starting at position 144 of SEQ ID NO: 318527
uuucuagucucauuuguca

SEQ ID NO: 569454 - RNA, 19 nt, Artificial Sequence
  Description of Artificial Sequence: Synthetic oligonucleotide
  Antisense strand to SEQ ID NO: 569453
ugacaaaugagacuagaaa

SEQ ID NO: 569455 - RNA, 19 nt, Artificial Sequence
  Description of Artificial Sequence: Synthetic oligonucleotide
  Sense strand starting at position 184 of SEQ ID NO: 318527
cagccacuccgauauauga

SEQ ID NO: 569456 - RNA, 19 nt, Artificial Sequence
  Description of Artificial Sequence: Synthetic oligonucleotide
  Antisense strand to SEQ ID NO: 569455
ucauauaucggaguggcug

SEQ ID NO: 569457 - RNA, 19 nt, Artificial Sequence
  Description of Artificial Sequence: Synthetic oligonucleotide
  Sense strand starting at position 186 of SEQ ID NO: 318527
gccacuccgauauaugaga

SEQ ID NO: 569458 - RNA, 19 nt, Artificial Sequence
  Description of Artificial Sequence: Synthetic oligonucleotide
  Antisense strand to SEQ ID NO: 569457
ucucauauaucggaguggc

SEQ ID NO: 569459 - RNA, 19 nt, Artificial Sequence
  Description of Artificial Sequence: Synthetic oligonucleotide
  Sense strand starting at position 391 of SEQ ID NO: 318527
uauugcuaaccaggguuaa

SEQ ID NO: 569460 - RNA, 19 nt, Artificial Sequence
  Description of Artificial Sequence: Synthetic oligonucleotide
  Antisense strand to SEQ ID NO: 569459
uuaacccugguuagcaaua

SEQ ID NO: 569461 - RNA, 19 nt, Artificial Sequence
  Description of Artificial Sequence: Synthetic oligonucleotide
  Sense strand starting at position 392 of SEQ ID NO: 318527
auugcuaaccaggguuaau

SEQ ID NO: 569462 - RNA, 19 nt, Artificial Sequence
  Description of Artificial Sequence: Synthetic oligonucleotide
  Antisense strand to SEQ ID NO: 569461
auuaacccugguuagcaau

SEQ ID NO: 569463 - RNA, 19 nt, Artificial Sequence
  Description of Artificial Sequence: Synthetic oligonucleotide
  Sense strand starting at position 652 of SEQ ID NO: 318527
gcaacagcuccaugaggau

SEQ ID NO: 569464 - RNA, 19 nt, Artificial Sequence
  Description of Artificial Sequence: Synthetic oligonucleotide
  Antisense strand to SEQ ID NO: 569463
auccucauggagcuguugc

SEQ ID NO: 569465 - RNA, 19 nt, Artificial Sequence
  Description of Artificial Sequence: Synthetic oligonucleotide
  Sense strand starting at position 664 of SEQ ID NO: 318527
ugaggaugcucuccucaga

SEQ ID NO: 569466 - RNA, 19 nt, Artificial Sequence
  Description of Artificial Sequence: Synthetic oligonucleotide
  Antisense strand to SEQ ID NO: 569465
ucugaggagagcauccuca

SEQ ID NO: 569467 - RNA, 19 nt, Artificial Sequence
  Description of Artificial Sequence: Synthetic oligonucleotide
  Sense strand starting at position 703 of SEQ ID NO: 318527
agguccuuaccagauguga

SEQ ID NO: 569468 - RNA, 19 nt, Artificial Sequence
  Description of Artificial Sequence: Synthetic oligonucleotide
  Antisense strand to SEQ ID NO: 569467
ucacaucugguaaggaccu

SEQ ID NO: 569469 - RNA, 19 nt, Artificial Sequence
  Description of Artificial Sequence: Synthetic oligonucleotide
  Sense strand starting at position 705 of SEQ ID NO: 318527
guccuuaccagaugugaag

SEQ ID NO: 569470 - RNA, 19 nt, Artificial Sequence
  Description of Artificial Sequence: Synthetic oligonucleotide
  Antisense strand to SEQ ID NO: 569469
cuucacaucugguaaggac

SEQ ID NO: 569471 - RNA, 19 nt, Artificial Sequence
  Description of Artificial Sequence: Synthetic oligonucleotide
  Sense strand starting at position 712 of SEQ ID NO: 318527
ccagaugugaagcagcaaa

SEQ ID NO: 569472 - RNA, 19 nt, Artificial Sequence
  Description of Artificial Sequence: Synthetic oligonucleotide
  Antisense strand to SEQ ID NO: 569471
uuugcugcuucacaucugg

SEQ ID NO: 569473 - RNA, 19 nt, Artificial Sequence
  Description of Artificial Sequence: Synthetic oligonucleotide
  Sense strand starting at position 925 of SEQ ID NO: 318527
ugcugucuuagagaaacug

SEQ ID NO: 569474 - RNA, 19 nt, Artificial Sequence
  Description of Artificial Sequence: Synthetic oligonucleotide
  Antisense strand to SEQ ID NO: 569473
caguuucucuaagacagca

SEQ ID NO: 569475 - RNA, 19 nt, Artificial Sequence
  Description of Artificial Sequence: Synthetic oligonucleotide
  Sense strand starting at position 997 of SEQ ID NO: 318527
uccugaugccuccagaagu

SEQ ID NO: 569476 - RNA, 19 nt, Artificial Sequence
  Description of Artificial Sequence: Synthetic oligonucleotide
  Antisense strand to SEQ ID NO: 569475
acuucuggaggcaucagga

SEQ ID NO: 569477 - RNA, 19 nt, Artificial Sequence
  Description of Artificial Sequence: Synthetic oligonucleotide
  Sense strand starting at position 1011 of SEQ ID NO: 318527
gaagucuguggccagggaa

SEQ ID NO: 569478 - RNA, 19 nt, Artificial Sequence
  Description of Artificial Sequence: Synthetic oligonucleotide
  Antisense strand to SEQ ID NO: 569477
uucccuggccacagacuuc

SEQ ID NO: 569479 - RNA, 19 nt, Artificial Sequence
  Description of Artificial Sequence: Synthetic oligonucleotide
  Sense strand starting at position 1154 of SEQ ID NO: 318527
acaucuagguucuuaggaa

SEQ ID NO: 569480 - RNA, 19 nt, Artificial Sequence
  Description of Artificial Sequence: Synthetic oligonucleotide
  Antisense strand to SEQ ID NO: 569479
uuccuaagaaccuagaugu

SEQ ID NO: 569481 - RNA, 19 nt, Artificial Sequence
  Description of Artificial Sequence: Synthetic oligonucleotide
  Sense strand starting at position 1274 of SEQ ID NO: 318527
gcgugaguccuauucuuuc

SEQ ID NO: 569482 - RNA, 19 nt, Artificial Sequence
  Description of Artificial Sequence: Synthetic oligonucleotide
  Antisense strand to SEQ ID NO: 569481
gaaagaauaggacucacgc

SEQ ID NO: 569483 - RNA, 19 nt, Artificial Sequence
  Description of Artificial Sequence: Synthetic oligonucleotide
  Sense strand starting at position 2478 of SEQ ID NO: 318527
gucgguucccgggaaacuu

SEQ ID NO: 569484 - RNA, 19 nt, Artificial Sequence
  Description of Artificial Sequence: Synthetic oligonucleotide
  Antisense strand to SEQ ID NO: 569483
aaguuucccgggaaccgac

SEQ ID NO: 569485 - RNA, 19 nt, Artificial Sequence
  Description of Artificial Sequence: Synthetic oligonucleotide
  Sense strand starting at position 2656 of SEQ ID NO: 318527
ccucaucuugcacagggaa

SEQ ID NO: 569486 - RNA, 19 nt, Artificial Sequence
  Description of Artificial Sequence: Synthetic oligonucleotide
  Antisense strand to SEQ ID NO: 569485
uucccugugcaagaugagg

SEQ ID NO: 569487 - RNA, 19 nt, Artificial Sequence
  Description of Artificial Sequence: Synthetic oligonucleotide
  Sense strand starting at position 2707 of SEQ ID NO: 318527
gucacacuacgucagagau

SEQ ID NO: 569488 - RNA, 19 nt, Artificial Sequence
  Description of Artificial Sequence: Synthetic oligonucleotide
  Antisense strand to SEQ ID NO: 569487
aucucugacguagugugac

SEQ ID NO: 569489 - RNA, 19 nt, Artificial Sequence
  Description of Artificial Sequence: Synthetic oligonucleotide
  Sense strand starting at position 3240 of SEQ ID NO: 318527
gagcucaccucuuuggaga

SEQ ID NO: 569490 - RNA, 19 nt, Artificial Sequence
  Description of Artificial Sequence: Synthetic oligonucleotide
  Antisense strand to SEQ ID NO: 569489
ucuccaaagaggugagcuc

SEQ ID NO: 569491 - RNA, 19 nt, Artificial Sequence
  Description of Artificial Sequence: Synthetic oligonucleotide
  Sense strand starting at position 3241 of SEQ ID NO: 318527
agcucaccucuuuggagau

SEQ ID NO: 569492 - RNA, 19 nt, Artificial Sequence
  Description of Artificial Sequence: Synthetic oligonucleotide
  Antisense strand to SEQ ID NO: 569491
aucuccaaagaggugagcu

SEQ ID NO: 569493 - RNA, 19 nt, Artificial Sequence
  Description of Artificial Sequence: Synthetic oligonucleotide
  Sense strand starting at position 3383 of SEQ ID NO: 318527
ucaguuuccuaccuguaau

SEQ ID NO: 569494 - RNA, 19 nt, Artificial Sequence
  Description of Artificial Sequence: Synthetic oligonucleotide
  Antisense strand to SEQ ID NO: 569493
auuacagguaggaaacuga

SEQ ID NO: 569495 - RNA, 19 nt, Artificial Sequence
  Description of Artificial Sequence: Synthetic oligonucleotide
  Sense strand starting at position 3386 of SEQ ID NO: 318527
guuuccuaccuguaauaag

SEQ ID NO: 569496 - RNA, 19 nt, Artificial Sequence
  Description of Artificial Sequence: Synthetic oligonucleotide
  Antisense strand to SEQ ID NO: 569495
cuuauuacagguaggaaac

SEQ ID NO: 569497 - RNA, 19 nt, Artificial Sequence
  Description of Artificial Sequence: Synthetic oligonucleotide
  Sense strand starting at position 3491 of SEQ ID NO: 318527
aaguauccuucuucgaaug

SEQ ID NO: 569498 - RNA, 19 nt, Artificial Sequence
  Description of Artificial Sequence: Synthetic oligonucleotide
  Antisense strand to SEQ ID NO: 569497
cauucgaagaaggauacuu

SEQ ID NO: 569499 - RNA, 19 nt, Artificial Sequence
  Description of Artificial Sequence: Synthetic oligonucleotide
  Sense strand starting at position 3492 of SEQ ID NO: 318527
aguauccuucuucgaauga

SEQ ID NO: 569500 - RNA, 19 nt, Artificial Sequence
  Description of Artificial Sequence: Synthetic oligonucleotide
  Antisense strand to SEQ ID NO: 569499
ucauucgaagaaggauacu

SEQ ID NO: 569501 - RNA, 19 nt, Artificial Sequence
  Description of Artificial Sequence: Synthetic oligonucleotide
  Sense strand starting at position 3496 of SEQ ID NO: 318527
uccuucuucgaaugauaua

SEQ ID NO: 569502 - RNA, 19 nt, Artificial Sequence
  Description of Artificial Sequence: Synthetic oligonucleotide
  Antisense strand to SEQ ID NO: 569501
uauaucauucgaagaagga

SEQ ID NO: 569503 - RNA, 19 nt, Artificial Sequence
  Description of Artificial Sequence: Synthetic oligonucleotide
  Sense strand starting at position 3596 of SEQ ID NO: 318527
uauauaaggucguuuauuc

SEQ ID NO: 569504 - RNA, 19 nt, Artificial Sequence
  Description of Artificial Sequence: Synthetic oligonucleotide
  Antisense strand to SEQ ID NO: 569503
gaauaaacgaccuuauaua

SEQ ID NO: 569505 - RNA, 19 nt, Artificial Sequence
  Description of Artificial Sequence: Synthetic oligonucleotide
  Sense strand starting at position 3607 of SEQ ID NO: 318527
guuuauucugaguaaugau

SEQ ID NO: 569506 - RNA, 19 nt, Artificial Sequence
  Description of Artificial Sequence: Synthetic oligonucleotide
  Antisense strand to SEQ ID NO: 569505
aucauuacucagaauaaac

SEQ ID NO: 569507 - RNA, 19 nt, Artificial Sequence
  Description of Artificial Sequence: Synthetic oligonucleotide
  Sense strand starting at position 3681 of SEQ ID NO: 318527
gccaacauagacugugaaa

SEQ ID NO: 569508 - RNA, 19 nt, Artificial Sequence
  Description of Artificial Sequence: Synthetic oligonucleotide
  Antisense strand to SEQ ID NO: 569507
uuucacagucuauguuggc

SEQ ID NO: 569509 - RNA, 19 nt, Artificial Sequence
  Description of Artificial Sequence: Synthetic oligonucleotide
  Sense strand starting at position 3694 of SEQ ID NO: 318527
gugaaauugagaugguuau

SEQ ID NO: 569510 - RNA, 19 nt, Artificial Sequence
  Description of Artificial Sequence: Synthetic oligonucleotide
  Antisense strand to SEQ ID NO: 569509
auaaccaucucaauuucac

SEQ ID NO: 569511 - RNA, 19 nt, Artificial Sequence
  Description of Artificial Sequence: Synthetic oligonucleotide
  Sense strand starting at position 3695 of SEQ ID NO: 318527
ugaaauugagaugguuauu

SEQ ID NO: 569512 - RNA, 19 nt, Artificial Sequence
  Description of Artificial Sequence: Synthetic oligonucleotide
  Antisense strand to SEQ ID NO: 569511
aauaaccaucucaauuuca

SEQ ID NO: 569513 - RNA, 19 nt, Artificial Sequence
  Description of Artificial Sequence: Synthetic oligonucleotide
  Sense strand starting at position 3700 of SEQ ID NO: 318527
uugagaugguuauuggcga

SEQ ID NO: 569514 - RNA, 19 nt, Artificial Sequence
  Description of Artificial Sequence: Synthetic oligonucleotide
  Antisense strand to SEQ ID NO: 569513
ucgccaauaaccaucucaa

SEQ ID NO: 569515 - RNA, 19 nt, Artificial Sequence
  Description of Artificial Sequence: Synthetic oligonucleotide
  Sense strand starting at position 3707 of SEQ ID NO: 318527
gguuauuggcgaugaccaa

SEQ ID NO: 569516 - RNA, 19 nt, Artificial Sequence
  Description of Artificial Sequence: Synthetic oligonucleotide
  Antisense strand to SEQ ID NO: 569515
uuggucaucgccaauaacc

SEQ ID NO: 569517 - RNA, 19 nt, Artificial Sequence
  Description of Artificial Sequence: Synthetic oligonucleotide
  Sense strand starting at position 3714 of SEQ ID NO: 318527
ggcgaugaccaagaucagu

SEQ ID NO: 569518 - RNA, 19 nt, Artificial Sequence
  Description of Artificial Sequence: Synthetic oligonucleotide
  Antisense strand to SEQ ID NO: 569517
acugaucuuggucaucgcc

SEQ ID NO: 569519 - RNA, 19 nt, Artificial Sequence
  Description of Artificial Sequence: Synthetic oligonucleotide
  Sense strand starting at position 3751 of SEQ ID NO: 318527
ccuaguggagccuaagaau

SEQ ID NO: 569520 - RNA, 19 nt, Artificial Sequence
  Description of Artificial Sequence: Synthetic oligonucleotide
  Antisense strand to SEQ ID NO: 569519
auucuuaggcuccacuagg

SEQ ID NO: 569521 - RNA, 19 nt, Artificial Sequence
  Description of Artificial Sequence: Synthetic oligonucleotide
  Sense strand starting at position 3789 of SEQ ID NO: 318527
cugagccugucuuuauuga

SEQ ID NO: 569522 - RNA, 19 nt, Artificial Sequence
  Description of Artificial Sequence: Synthetic oligonucleotide
  Antisense strand to SEQ ID NO: 569521
ucaauaaagacaggcucag

SEQ ID NO: 569523 - RNA, 19 nt, Artificial Sequence
  Description of Artificial Sequence: Synthetic oligonucleotide
  Sense strand starting at position 3790 of SEQ ID NO: 318527
ugagccugucuuuauugaa

SEQ ID NO: 569524 - RNA, 19 nt, Artificial Sequence
  Description of Artificial Sequence: Synthetic oligonucleotide
  Antisense strand to SEQ ID NO: 569523
uucaauaaagacaggcuca

SEQ ID NO: 569525 - RNA, 19 nt, Artificial Sequence
  Description of Artificial Sequence: Synthetic oligonucleotide
  Sense strand starting at position 59 of SEQ ID NO: 318528
gcgaauuggucaucugcac

SEQ ID NO: 569526 - RNA, 19 nt, Artificial Sequence
  Description of Artificial Sequence: Synthetic oligonucleotide
  Antisense strand to SEQ ID NO: 569525
gugcagaugaccaauucgc

SEQ ID NO: 569527 - RNA, 19 nt, Artificial Sequence
  Description of Artificial Sequence: Synthetic oligonucleotide
  Sense strand starting at position 124 of SEQ ID NO: 318528
cucaaugcugcugaaacuu

SEQ ID NO: 569528 - RNA, 19 nt, Artificial Sequence
  Description of Artificial Sequence: Synthetic oligonucleotide
  Antisense strand to SEQ ID NO: 569527
aaguuucagcagcauugag

SEQ ID NO: 569529 - RNA, 19 nt, Artificial Sequence
  Description of Artificial Sequence: Synthetic oligonucleotide
  Sense strand starting at position 317 of SEQ ID NO: 318528
gaccuaaggcuguaugcuu

SEQ ID NO: 569530 - RNA, 19 nt, Artificial Sequence
  Description of Artificial Sequence: Synthetic oligonucleotide
  Antisense strand to SEQ ID NO: 569529
aagcauacagccuuagguc

SEQ ID NO: 569531 - RNA, 19 nt, Artificial Sequence
  Description of Artificial Sequence: Synthetic oligonucleotide
  Sense strand starting at position 322 of SEQ ID NO: 318528
aaggcuguaugcuuuaacu

SEQ ID NO: 569532 - RNA, 19 nt, Artificial Sequence
  Description of Artificial Sequence: Synthetic oligonucleotide
  Antisense strand to SEQ ID NO: 569531
aguuaaagcauacagccuu

SEQ ID NO: 569533 - RNA, 19 nt, Artificial Sequence
  Description of Artificial Sequence: Synthetic oligonucleotide
  Sense strand starting at position 324 of SEQ ID NO: 318528
ggcuguaugcuuuaacuaa

SEQ ID NO: 569534 - RNA, 19 nt, Artificial Sequence
  Description of Artificial Sequence: Synthetic oligonucleotide
  Antisense strand to SEQ ID NO: 569533
uuaguuaaagcauacagcc

SEQ ID NO: 569535 - RNA, 19 nt, Artificial Sequence
  Description of Artificial Sequence: Synthetic oligonucleotide
  Sense strand starting at position 349 of SEQ ID NO: 318528
ccgacagccuugccucaua

SEQ ID NO: 569536 - RNA, 19 nt, Artificial Sequence
  Description of Artificial Sequence: Synthetic oligonucleotide
  Antisense strand to SEQ ID NO: 569535
uaugaggcaaggcugucgg

SEQ ID NO: 569537 - RNA, 19 nt, Artificial Sequence
  Description of Artificial Sequence: Synthetic oligonucleotide
  Sense strand starting at position 360 of SEQ ID NO: 318528
gccucauaauaccugagaa

SEQ ID NO: 569538 - RNA, 19 nt, Artificial Sequence
  Description of Artificial Sequence: Synthetic oligonucleotide
  Antisense strand to SEQ ID NO: 569537
uucucagguauuaugaggc

SEQ ID NO: 569539 - RNA, 19 nt, Artificial Sequence
  Description of Artificial Sequence: Synthetic oligonucleotide
  Sense strand starting at position 419 of SEQ ID NO: 318528
augaauggaucuuaaagag

SEQ ID NO: 569540 - RNA, 19 nt, Artificial Sequence
  Description of Artificial Sequence: Synthetic oligonucleotide
  Antisense strand to SEQ ID NO: 569539
cucuuuaagauccauucau

SEQ ID NO: 569541 - RNA, 19 nt, Artificial Sequence
  Description of Artificial Sequence: Synthetic oligonucleotide
  Sense strand starting at position 864 of SEQ ID NO: 318528
ggaagaggcaguuguauac

SEQ ID NO: 569542 - RNA, 19 nt, Artificial Sequence
  Description of Artificial Sequence: Synthetic oligonucleotide
  Antisense strand to SEQ ID NO: 569541
guauacaacugccucuucc

SEQ ID NO: 569543 - RNA, 19 nt, Artificial Sequence
  Description of Artificial Sequence: Synthetic oligonucleotide
  Sense strand starting at position 868 of SEQ ID NO: 318528
gaggcaguuguauacacau

SEQ ID NO: 569544 - RNA, 19 nt, Artificial Sequence
  Description of Artificial Sequence: Synthetic oligonucleotide
  Antisense strand to SEQ ID NO: 569543
auguguauacaacugccuc

SEQ ID NO: 569545 - RNA, 19 nt, Artificial Sequence
  Description of Artificial Sequence: Synthetic oligonucleotide
  Sense strand starting at position 1024 of SEQ ID NO: 318528
agaguaaguccuggacaca

SEQ ID NO: 569546 - RNA, 19 nt, Artificial Sequence
  Description of Artificial Sequence: Synthetic oligonucleotide
  Antisense strand to SEQ ID NO: 569545
uguguccaggacuuacucu

SEQ ID NO: 569547 - RNA, 19 nt, Artificial Sequence
  Description of Artificial Sequence: Synthetic oligonucleotide
  Sense strand starting at position 1168 of SEQ ID NO: 318528
ccucgugaagcguucccaa

SEQ ID NO: 569548 - RNA, 19 nt, Artificial Sequence
  Description of Artificial Sequence: Synthetic oligonucleotide
  Antisense strand to SEQ ID NO: 569547
uugggaacgcuucacgagg

SEQ ID NO: 569549 - RNA, 19 nt, Artificial Sequence
  Description of Artificial Sequence: Synthetic oligonucleotide
  Sense strand starting at position 2323 of SEQ ID NO: 318528
cacagauaguugcucuuga

SEQ ID NO: 569550 - RNA, 19 nt, Artificial Sequence
  Description of Artificial Sequence: Synthetic oligonucleotide
  Antisense strand to SEQ ID NO: 569549
ucaagagcaacuaucugug

SEQ ID NO: 569551 - RNA, 19 nt, Artificial Sequence
  Description of Artificial Sequence: Synthetic oligonucleotide
  Sense strand starting at position 2388 of SEQ ID NO: 318528
acuguuaacuacccuagua

SEQ ID NO: 569552 - RNA, 19 nt, Artificial Sequence
  Description of Artificial Sequence: Synthetic oligonucleotide
  Antisense strand to SEQ ID NO: 569551
uacuaggguaguuaacagu

SEQ ID NO: 569553 - RNA, 19 nt, Artificial Sequence
  Description of Artificial Sequence: Synthetic oligonucleotide
  Sense strand starting at position 2390 of SEQ ID NO: 318528
uguuaacuacccuaguaga

SEQ ID NO: 569554 - RNA, 19 nt, Artificial Sequence
  Description of Artificial Sequence: Synthetic oligonucleotide
  Antisense strand to SEQ ID NO: 569553
ucuacuaggguaguuaaca

SEQ ID NO: 569555 - RNA, 19 nt, Artificial Sequence
  Description of Artificial Sequence: Synthetic oligonucleotide
  Sense strand starting at position 2519 of SEQ ID NO: 318528
gauccuagccuaggguuaa

SEQ ID NO: 569556 - RNA, 19 nt, Artificial Sequence
  Description of Artificial Sequence: Synthetic oligonucleotide
  Antisense strand to SEQ ID NO: 569555
uuaacccuaggcuaggauc

SEQ ID NO: 569557 - RNA, 19 nt, Artificial Sequence
  Description of Artificial Sequence: Synthetic oligonucleotide
  Sense strand starting at position 2523 of SEQ ID NO: 318528
cuagccuaggguuaaauau

SEQ ID NO: 569558 - RNA, 19 nt, Artificial Sequence
  Description of Artificial Sequence: Synthetic oligonucleotide
  Antisense strand to SEQ ID NO: 569557
auauuuaacccuaggcuag

SEQ ID NO: 569559 - RNA, 19 nt, Artificial Sequence
  Description of Artificial Sequence: Synthetic oligonucleotide
  Sense strand starting at position 2552 of SEQ ID NO: 318528
uuaguuauuuccgugcaga

SEQ ID NO: 569560 - RNA, 19 nt, Artificial Sequence
  Description of Artificial Sequence: Synthetic oligonucleotide
  Antisense strand to SEQ ID NO: 569559
ucugcacggaaauaacuaa

SEQ ID NO: 569561 - RNA, 19 nt, Artificial Sequence
  Description of Artificial Sequence: Synthetic oligonucleotide
  Sense strand starting at position 2553 of SEQ ID NO: 318528
uaguuauuuccgugcagag

SEQ ID NO: 569562 - RNA, 19 nt, Artificial Sequence
  Description of Artificial Sequence: Synthetic oligonucleotide
  Antisense strand to SEQ ID NO: 569561
cucugcacggaaauaacua

SEQ ID NO: 569563 - RNA, 19 nt, Artificial Sequence
  Description of Artificial Sequence: Synthetic oligonucleotide
  Sense strand starting at position 2555 of SEQ ID NO: 318528
guuauuuccgugcagaguu

SEQ ID NO: 569564 - RNA, 19 nt, Artificial Sequence
  Description of Artificial Sequence: Synthetic oligonucleotide
  Antisense strand to SEQ ID NO: 569563
aacucugcacggaaauaac

SEQ ID NO: 569565 - RNA, 19 nt, Artificial Sequence
  Description of Artificial Sequence: Synthetic oligonucleotide
  Sense strand starting at position 2626 of SEQ ID NO: 318528
agcaauguuccauaggaua

SEQ ID NO: 569566 - RNA, 19 nt, Artificial Sequence
  Description of Artificial Sequence: Synthetic oligonucleotide
  Antisense strand to SEQ ID NO: 569565
uauccuauggaacauugcu

SEQ ID NO: 569567 - RNA, 19 nt, Artificial Sequence
  Description of Artificial Sequence: Synthetic oligonucleotide
  Sense strand starting at position 2647 of SEQ ID NO: 318528
gagcuacauuuguuauguu

SEQ ID NO: 569568 - RNA, 19 nt, Artificial Sequence
  Description of Artificial Sequence: Synthetic oligonucleotide
  Antisense strand to SEQ ID NO: 569567
aacauaacaaauguagcuc

SEQ ID NO: 569569 - RNA, 19 nt, Artificial Sequence
  Description of Artificial Sequence: Synthetic oligonucleotide
  Sense strand starting at position 2648 of SEQ ID NO: 318528
agcuacauuuguuauguua

SEQ ID NO: 569570 - RNA, 19 nt, Artificial Sequence
  Description of Artificial Sequence: Synthetic oligonucleotide
  Antisense strand to SEQ ID NO: 569569
uaacauaacaaauguagcu

SEQ ID NO: 569571 - RNA, 19 nt, Artificial Sequence
  Description of Artificial Sequence: Synthetic oligonucleotide
  Sense strand starting at position 2650 of SEQ ID NO: 318528
cuacauuuguuauguuaac

SEQ ID NO: 569572 - RNA, 19 nt, Artificial Sequence
  Description of Artificial Sequence: Synthetic oligonucleotide
  Antisense strand to SEQ ID NO: 569571
guuaacauaacaaauguag

SEQ ID NO: 569573 - RNA, 19 nt, Artificial Sequence
  Description of Artificial Sequence: Synthetic oligonucleotide
  Sense strand starting at position 2807 of SEQ ID NO: 318528
guaacugguuguccuguau

SEQ ID NO: 569574 - RNA, 19 nt, Artificial Sequence
  Description of Artificial Sequence: Synthetic oligonucleotide
  Antisense strand to SEQ ID NO: 569573
auacaggacaaccaguuac

SEQ ID NO: 569575 - RNA, 19 nt, Artificial Sequence
  Description of Artificial Sequence: Synthetic oligonucleotide
  Sense strand starting at position 3060 of SEQ ID NO: 318528
aaaggaauccaguguguau

SEQ ID NO: 569576 - RNA, 19 nt, Artificial Sequence
  Description of Artificial Sequence: Synthetic oligonucleotide
  Antisense strand to SEQ ID NO: 569575
auacacacuggauuccuuu

SEQ ID NO: 569577 - RNA, 19 nt, Artificial Sequence
  Description of Artificial Sequence: Synthetic oligonucleotide
  Sense strand starting at position 3404 of SEQ ID NO: 318528
ugcugaauuacagacguga

SEQ ID NO: 569578 - RNA, 19 nt, Artificial Sequence
  Description of Artificial Sequence: Synthetic oligonucleotide
  Antisense strand to SEQ ID NO: 569577
ucacgucuguaauucagca

SEQ ID NO: 569579 - RNA, 19 nt, Artificial Sequence
  Description of Artificial Sequence: Synthetic oligonucleotide
  Sense strand starting at position 3470 of SEQ ID NO: 318528
uguagcuauugguuaucuu

SEQ ID NO: 569580 - RNA, 19 nt, Artificial Sequence
  Description of Artificial Sequence: Synthetic oligonucleotide
  Antisense strand to SEQ ID NO: 569579
aagauaaccaauagcuaca

SEQ ID NO: 569581 - RNA, 19 nt, Artificial Sequence
  Description of Artificial Sequence: Synthetic oligonucleotide
  Sense strand starting at position 3471 of SEQ ID NO: 318528
guagcuauugguuaucuua

SEQ ID NO: 569582 - RNA, 19 nt, Artificial Sequence
  Description of Artificial Sequence: Synthetic oligonucleotide
  Antisense strand to SEQ ID NO: 569581
uaagauaaccaauagcuac

SEQ ID NO: 569583 - RNA, 19 nt, Artificial Sequence
  Description of Artificial Sequence: Synthetic oligonucleotide
  Sense strand starting at position 3473 of SEQ ID NO: 318528
agcuauugguuaucuuauu

SEQ ID NO: 569584 - RNA, 19 nt, Artificial Sequence
  Description of Artificial Sequence: Synthetic oligonucleotide
  Antisense strand to SEQ ID NO: 569583
aauaagauaaccaauagcu

SEQ ID NO: 569585 - RNA, 19 nt, Artificial Sequence
  Description of Artificial Sequence: Synthetic oligonucleotide
  Sense strand starting at position 3478 of SEQ ID NO: 318528
uugguuaucuuauuggaca

SEQ ID NO: 569586 - RNA, 19 nt, Artificial Sequence
  Description of Artificial Sequence: Synthetic oligonucleotide
  Antisense strand to SEQ ID NO: 569585
uguccaauaagauaaccaa

SEQ ID NO: 569587 - RNA, 19 nt, Artificial Sequence
  Description of Artificial Sequence: Synthetic oligonucleotide
  Sense strand starting at position 3565 of SEQ ID NO: 318528
auaguaguggcuuagugau

SEQ ID NO: 569588 - RNA, 19 nt, Artificial Sequence
  Description of Artificial Sequence: Synthetic oligonucleotide
  Antisense strand to SEQ ID NO: 569587
aucacuaagccacuacuau

SEQ ID NO: 569589 - RNA, 19 nt, Artificial Sequence
  Description of Artificial Sequence: Synthetic oligonucleotide
  Sense strand starting at position 3567 of SEQ ID NO: 318528
aguaguggcuuagugauag

SEQ ID NO: 569590 - RNA, 19 nt, Artificial Sequence
  Description of Artificial Sequence: Synthetic oligonucleotide
  Antisense strand to SEQ ID NO: 569589
cuaucacuaagccacuacu

SEQ ID NO: 569591 - RNA, 19 nt, Artificial Sequence
  Description of Artificial Sequence: Synthetic oligonucleotide
  Sense strand starting at position 3610 of SEQ ID NO: 318528
acaauauaauguguugagu

SEQ ID NO: 569592 - RNA, 19 nt, Artificial Sequence
  Description of Artificial Sequence: Synthetic oligonucleotide
  Antisense strand to SEQ ID NO: 569591
acucaacacauuauauugu

SEQ ID NO: 569593 - RNA, 19 nt, Artificial Sequence
  Description of Artificial Sequence: Synthetic oligonucleotide
  Sense strand starting at position 3763 of SEQ ID NO: 318528
uaaagauguuaucacagga

SEQ ID NO: 569594 - RNA, 19 nt, Artificial Sequence
  Description of Artificial Sequence: Synthetic oligonucleotide
  Antisense strand to SEQ ID NO: 569593
uccugugauaacaucuuua

SEQ ID NO: 569595 - RNA, 19 nt, Artificial Sequence
  Description of Artificial Sequence: Synthetic oligonucleotide
  Sense strand starting at position 3768 of SEQ ID NO: 318528
auguuaucacaggacuugu

SEQ ID NO: 569596 - RNA, 19 nt, Artificial Sequence
  Description of Artificial Sequence: Synthetic oligonucleotide
  Antisense strand to SEQ ID NO: 569595
acaaguccugugauaacau

SEQ ID NO: 569597 - RNA, 19 nt, Artificial Sequence
  Description of Artificial Sequence: Synthetic oligonucleotide
  Sense strand starting at position 3778 of SEQ ID NO: 318528
aggacuuguuuguuucuuu

SEQ ID NO: 569598 - RNA, 19 nt, Artificial Sequence
  Description of Artificial Sequence: Synthetic oligonucleotide
  Antisense strand to SEQ ID NO: 569597
aaagaaacaaacaaguccu

SEQ ID NO: 569599 - RNA, 19 nt, Artificial Sequence
  Description of Artificial Sequence: Synthetic oligonucleotide
  Sense strand starting at position 3779 of SEQ ID NO: 318528
ggacuuguuuguuucuuua

SEQ ID NO: 569600 - RNA, 19 nt, Artificial Sequence
  Description of Artificial Sequence: Synthetic oligonucleotide
  Antisense strand to SEQ ID NO: 569599
uaaagaaacaaacaagucc

SEQ ID NO: 569601 - RNA, 19 nt, Artificial Sequence
  Description of Artificial Sequence: Synthetic oligonucleotide
  Sense strand starting at position 3823 of SEQ ID NO: 318528
ccugaagauggaugguuau

SEQ ID NO: 569602 - RNA, 19 nt, Artificial Sequence
  Description of Artificial Sequence: Synthetic oligonucleotide
  Antisense strand to SEQ ID NO: 569601
auaaccauccaucuucagg

SEQ ID NO: 569603 - RNA, 19 nt, Artificial Sequence
  Description of Artificial Sequence: Synthetic oligonucleotide
  Sense strand starting at position 3868 of SEQ ID NO: 318528
cuaacaucuuaugugaagu

SEQ ID NO: 569604 - RNA, 19 nt, Artificial Sequence
  Description of Artificial Sequence: Synthetic oligonucleotide
  Antisense strand to SEQ ID NO: 569603
acuucacauaagauguuag

SEQ ID NO: 569605 - RNA, 19 nt, Artificial Sequence
  Description of Artificial Sequence: Synthetic oligonucleotide
  Sense strand starting at position 306 of SEQ ID NO: 318529
aggguacaaucccuuaaac

SEQ ID NO: 569606 - RNA, 19 nt, Artificial Sequence
  Description of Artificial Sequence: Synthetic oligonucleotide
  Antisense strand to SEQ ID NO: 569605
guuuaagggauuguacccu

SEQ ID NO: 569607 - RNA, 19 nt, Artificial Sequence
  Description of Artificial Sequence: Synthetic oligonucleotide
  Sense strand starting at position 327 of SEQ ID NO: 318529
gcagaugccuggucuuuga

SEQ ID NO: 569608 - RNA, 19 nt, Artificial Sequence
  Description of Artificial Sequence: Synthetic oligonucleotide
  Antisense strand to SEQ ID NO: 569607
ucaaagaccaggcaucugc

SEQ ID NO: 569609 - RNA, 19 nt, Artificial Sequence
  Description of Artificial Sequence: Synthetic oligonucleotide
  Sense strand starting at position 330 of SEQ ID NO: 318529
gaugccuggucuuugaagu

SEQ ID NO: 569610 - RNA, 19 nt, Artificial Sequence
  Description of Artificial Sequence: Synthetic oligonucleotide
  Antisense strand to SEQ ID NO: 569609
acuucaaagaccaggcauc

SEQ ID NO: 569611 - RNA, 19 nt, Artificial Sequence
  Description of Artificial Sequence: Synthetic oligonucleotide
  Sense strand starting at position 341 of SEQ ID NO: 318529
uuugaagugugccuagauc

SEQ ID NO: 569612 - RNA, 19 nt, Artificial Sequence
  Description of Artificial Sequence: Synthetic oligonucleotide
  Antisense strand to SEQ ID NO: 569611
gaucuaggcacacuucaaa

SEQ ID NO: 569613 - RNA, 19 nt, Artificial Sequence
  Description of Artificial Sequence: Synthetic oligonucleotide
  Sense strand starting at position 347 of SEQ ID NO: 318529
gugugccuagaucaagauu

SEQ ID NO: 569614 - RNA, 19 nt, Artificial Sequence
  Description of Artificial Sequence: Synthetic oligonucleotide
  Antisense strand to SEQ ID NO: 569613
aaucuugaucuaggcacac

SEQ ID NO: 569615 - RNA, 19 nt, Artificial Sequence
  Description of Artificial Sequence: Synthetic oligonucleotide
  Sense strand starting at position 550 of SEQ ID NO: 318529
cacgguggucuggaugaga

SEQ ID NO: 569616 - RNA, 19 nt, Artificial Sequence
  Description of Artificial Sequence: Synthetic oligonucleotide
  Antisense strand to SEQ ID NO: 569615
ucucauccagaccaccgug

SEQ ID NO: 569617 - RNA, 19 nt, Artificial Sequence
  Description of Artificial Sequence: Synthetic oligonucleotide
  Sense strand starting at position 552 of SEQ ID NO: 318529
cgguggucuggaugagagu

SEQ ID NO: 569618 - RNA, 19 nt, Artificial Sequence
  Description of Artificial Sequence: Synthetic oligonucleotide
  Antisense strand to SEQ ID NO: 569617
acucucauccagaccaccg

SEQ ID NO: 569619 - RNA, 19 nt, Artificial Sequence
  Description of Artificial Sequence: Synthetic oligonucleotide
  Sense strand starting at position 600 of SEQ ID NO: 318529
cgaugagcugacuaaccau

SEQ ID NO: 569620 - RNA, 19 nt, Artificial Sequence
  Description of Artificial Sequence: Synthetic oligonucleotide
  Antisense strand to SEQ ID NO: 569619
augguuagucagcucaucg

SEQ ID NO: 569621 - RNA, 19 nt, Artificial Sequence
  Description of Artificial Sequence: Synthetic oligonucleotide
  Sense strand starting at position 1177 of SEQ ID NO: 318529
gcacguccucgaucuugua

SEQ ID NO: 569622 - RNA, 19 nt, Artificial Sequence
  Description of Artificial Sequence: Synthetic oligonucleotide
  Antisense strand to SEQ ID NO: 569621
uacaagaucgaggacgugc

SEQ ID NO: 569623 - RNA, 19 nt, Artificial Sequence
  Description of Artificial Sequence: Synthetic oligonucleotide
  Sense strand starting at position 1246 of SEQ ID NO: 318529
ugguuucaugcuggaggca

SEQ ID NO: 569624 - RNA, 19 nt, Artificial Sequence
  Description of Artificial Sequence: Synthetic oligonucleotide
  Antisense strand to SEQ ID NO: 569623
ugccuccagcaugaaacca

SEQ ID NO: 569625 - RNA, 19 nt, Artificial Sequence
  Description of Artificial Sequence: Synthetic oligonucleotide
  Sense strand starting at position 1264 of SEQ ID NO: 318529
agcagagauaaguagcuua

SEQ ID NO: 569626 - RNA, 19 nt, Artificial Sequence
  Description of Artificial Sequence: Synthetic oligonucleotide
  Antisense strand to SEQ ID NO: 569625
uaagcuacuuaucucugcu

SEQ ID NO: 569627 - RNA, 19 nt, Artificial Sequence
  Description of Artificial Sequence: Synthetic oligonucleotide
  Sense strand starting at position 1343 of SEQ ID NO: 318529
guggcuugucagcaacuga

SEQ ID NO: 569628 - RNA, 19 nt, Artificial Sequence
  Description of Artificial Sequence: Synthetic oligonucleotide
  Antisense strand to SEQ ID NO: 569627
ucaguugcugacaagccac

SEQ ID NO: 569629 - RNA, 19 nt, Artificial Sequence
  Description of Artificial Sequence: Synthetic oligonucleotide
  Sense strand starting at position 1439 of SEQ ID NO: 318529
cauugcuucccgcagggau

SEQ ID NO: 569630 - RNA, 19 nt, Artificial Sequence
  Description of Artificial Sequence: Synthetic oligonucleotide
  Antisense strand to SEQ ID NO: 569629
aucccugcgggaagcaaug

SEQ ID NO: 569631 - RNA, 19 nt, Artificial Sequence
  Description of Artificial Sequence: Synthetic oligonucleotide
  Sense strand starting at position 1564 of SEQ ID NO: 318529
ggcucaagacuguggacaa

SEQ ID NO: 569632 - RNA, 19 nt, Artificial Sequence
  Description of Artificial Sequence: Synthetic oligonucleotide
  Antisense strand to SEQ ID NO: 569631
uuguccacagucuugagcc

SEQ ID NO: 569633 - RNA, 19 nt, Artificial Sequence
  Description of Artificial Sequence: Synthetic oligonucleotide
  Sense strand starting at position 1625 of SEQ ID NO: 318529
ugucacuggccgggagauu

SEQ ID NO: 569634 - RNA, 19 nt, Artificial Sequence
  Description of Artificial Sequence: Synthetic oligonucleotide
  Antisense strand to SEQ ID NO: 569633
aaucucccggccagugaca

SEQ ID NO: 569635 - RNA, 19 nt, Artificial Sequence
  Description of Artificial Sequence: Synthetic oligonucleotide
  Sense strand starting at position 1626 of SEQ ID NO: 318529
gucacuggccgggagauua

SEQ ID NO: 569636 - RNA, 19 nt, Artificial Sequence
  Description of Artificial Sequence: Synthetic oligonucleotide
  Antisense strand to SEQ ID NO: 569635
uaaucucccggccagugac

SEQ ID NO: 569637 - RNA, 19 nt, Artificial Sequence
  Description of Artificial Sequence: Synthetic oligonucleotide
  Sense strand starting at position 1740 of SEQ ID NO: 318529
uugggacagucacucuuau

SEQ ID NO: 569638 - RNA, 19 nt, Artificial Sequence
  Description of Artificial Sequence: Synthetic oligonucleotide
  Antisense strand to SEQ ID NO: 569637
auaagagugacugucccaa

SEQ ID NO: 569639 - RNA, 19 nt, Artificial Sequence
  Description of Artificial Sequence: Synthetic oligonucleotide
  Sense strand starting at position 1968 of SEQ ID NO: 318529
ggaggacuuuacuccacau

SEQ ID NO: 569640 - RNA, 19 nt, Artificial Sequence
  Description of Artificial Sequence: Synthetic oligonucleotide
  Antisense strand to SEQ ID NO: 569639
auguggaguaaaguccucc

SEQ ID NO: 569641 - RNA, 19 nt, Artificial Sequence
  Description of Artificial Sequence: Synthetic oligonucleotide
  Sense strand starting at position 1984 of SEQ ID NO: 318529
cauaucaggcauuguuuga

SEQ ID NO: 569642 - RNA, 19 nt, Artificial Sequence
  Description of Artificial Sequence: Synthetic oligonucleotide
  Antisense strand to SEQ ID NO: 569641
ucaaacaaugccugauaug

SEQ ID NO: 569643 - RNA, 19 nt, Artificial Sequence
  Description of Artificial Sequence: Synthetic oligonucleotide
  Sense strand starting at position 1988 of SEQ ID NO: 318529
ucaggcauuguuugaagua

SEQ ID NO: 569644 - RNA, 19 nt, Artificial Sequence
  Description of Artificial Sequence: Synthetic oligonucleotide
  Antisense strand to SEQ ID NO: 569643
uacuucaaacaaugccuga

SEQ ID NO: 569645 - RNA, 19 nt, Artificial Sequence
  Description of Artificial Sequence: Synthetic oligonucleotide
  Sense strand starting at position 2000 of SEQ ID NO: 318529
ugaaguaaaucuguaacca

SEQ ID NO: 569646 - RNA, 19 nt, Artificial Sequence
  Description of Artificial Sequence: Synthetic oligonucleotide
  Antisense strand to SEQ ID NO: 569645
ugguuacagauuuacuuca

SEQ ID NO: 569647 - RNA, 19 nt, Artificial Sequence
  Description of Artificial Sequence: Synthetic oligonucleotide
  Sense strand starting at position 2004 of SEQ ID NO: 318529
guaaaucuguaaccagaug

SEQ ID NO: 569648 - RNA, 19 nt, Artificial Sequence
  Description of Artificial Sequence: Synthetic oligonucleotide
  Antisense strand to SEQ ID NO: 569647
caucugguuacagauuuac

SEQ ID NO: 569649 - RNA, 19 nt, Artificial Sequence
  Description of Artificial Sequence: Synthetic oligonucleotide
  Sense strand starting at position 2024 of SEQ ID NO: 318529
ccagcucuggauugcgaaa

SEQ ID NO: 569650 - RNA, 19 nt, Artificial Sequence
  Description of Artificial Sequence: Synthetic oligonucleotide
  Antisense strand to SEQ ID NO: 569649
uuucgcaauccagagcugg

SEQ ID NO: 569651 - RNA, 19 nt, Artificial Sequence
  Description of Artificial Sequence: Synthetic oligonucleotide
  Sense strand starting at position 2153 of SEQ ID NO: 318529
cuguucuuguuucccaaga

SEQ ID NO: 569652 - RNA, 19 nt, Artificial Sequence
  Description of Artificial Sequence: Synthetic oligonucleotide
  Antisense strand to SEQ ID NO: 569651
ucuugggaaacaagaacag

SEQ ID NO: 569653 - RNA, 19 nt, Artificial Sequence
  Description of Artificial Sequence: Synthetic oligonucleotide
  Sense strand starting at position 2325 of SEQ ID NO: 318529
uagucauucucguuauuga

SEQ ID NO: 569654 - RNA, 19 nt, Artificial Sequence
  Description of Artificial Sequence: Synthetic oligonucleotide
  Antisense strand to SEQ ID NO: 569653
ucaauaacgagaaugacua

SEQ ID NO: 569655 - RNA, 19 nt, Artificial Sequence
  Description of Artificial Sequence: Synthetic oligonucleotide
  Sense strand starting at position 2326 of SEQ ID NO: 318529
agucauucucguuauugag

SEQ ID NO: 569656 - RNA, 19 nt, Artificial Sequence
  Description of Artificial Sequence: Synthetic oligonucleotide
  Antisense strand to SEQ ID NO: 569655
cucaauaacgagaaugacu

SEQ ID NO: 569657 - RNA, 19 nt, Artificial Sequence
  Description of Artificial Sequence: Synthetic oligonucleotide
  Sense strand starting at position 2328 of SEQ ID NO: 318529
ucauucucguuauugagga

SEQ ID NO: 569658 - RNA, 19 nt, Artificial Sequence
  Description of Artificial Sequence: Synthetic oligonucleotide
  Antisense strand to SEQ ID NO: 569657
uccucaauaacgagaauga

SEQ ID NO: 569659 - RNA, 19 nt, Artificial Sequence
  Description of Artificial Sequence: Synthetic oligonucleotide
  Sense strand starting at position 2330 of SEQ ID NO: 318529
auucucguuauugaggaau

SEQ ID NO: 569660 - RNA, 19 nt, Artificial Sequence
  Description of Artificial Sequence: Synthetic oligonucleotide
  Antisense strand to SEQ ID NO: 569659
auuccucaauaacgagaau

SEQ ID NO: 569661 - RNA, 19 nt, Artificial Sequence
  Description of Artificial Sequence: Synthetic oligonucleotide
  Sense strand starting at position 2342 of SEQ ID NO: 318529
gaggaauggccuuggccuu

SEQ ID NO: 569662 - RNA, 19 nt, Artificial Sequence
  Description of Artificial Sequence: Synthetic oligonucleotide
  Antisense strand to SEQ ID NO: 569661
aaggccaaggccauuccuc

SEQ ID NO: 569663 - RNA, 19 nt, Artificial Sequence
  Description of Artificial Sequence: Synthetic oligonucleotide
  Sense strand starting at position 2476 of SEQ ID NO: 318529
gauagcaaguuugcagaaa

SEQ ID NO: 569664 - RNA, 19 nt, Artificial Sequence
  Description of Artificial Sequence: Synthetic oligonucleotide
  Antisense strand to SEQ ID NO: 569663
uuucugcaaacuugcuauc

SEQ ID NO: 569665 - RNA, 19 nt, Artificial Sequence
  Description of Artificial Sequence: Synthetic oligonucleotide
  Sense strand starting at position 2695 of SEQ ID NO: 318529
augugaggccuuuauucca

SEQ ID NO: 569666 - RNA, 19 nt, Artificial Sequence
  Description of Artificial Sequence: Synthetic oligonucleotide
  Antisense strand to SEQ ID NO: 569665
uggaauaaaggccucacau

SEQ ID NO: 569667 - RNA, 19 nt, Artificial Sequence
  Description of Artificial Sequence: Synthetic oligonucleotide
  Sense strand starting at position 2760 of SEQ ID NO: 318529
gggccuuucuaugcaccaa

SEQ ID NO: 569668 - RNA, 19 nt, Artificial Sequence
  Description of Artificial Sequence: Synthetic oligonucleotide
  Antisense strand to SEQ ID NO: 569667
uuggugcauagaaaggccc

SEQ ID NO: 569669 - RNA, 19 nt, Artificial Sequence
  Description of Artificial Sequence: Synthetic oligonucleotide
  Sense strand starting at position 3480 of SEQ ID NO: 318529
ccugaaagcuuaguggguu

SEQ ID NO: 569670 - RNA, 19 nt, Artificial Sequence
  Description of Artificial Sequence: Synthetic oligonucleotide
  Antisense strand to SEQ ID NO: 569669
aacccacuaagcuuucagg

SEQ ID NO: 569671 - RNA, 19 nt, Artificial Sequence
  Description of Artificial Sequence: Synthetic oligonucleotide
  Sense strand starting at position 3749 of SEQ ID NO: 318529
ccuucuguugucuaaguuu

SEQ ID NO: 569672 - RNA, 19 nt, Artificial Sequence
  Description of Artificial Sequence: Synthetic oligonucleotide
  Antisense strand to SEQ ID NO: 569671
aaacuuagacaacagaagg

SEQ ID NO: 569673 - RNA, 19 nt, Artificial Sequence
  Description of Artificial Sequence: Synthetic oligonucleotide
  Sense strand starting at position 3790 of SEQ ID NO: 318529
gggauuagauugucuuccu

SEQ ID NO: 569674 - RNA, 19 nt, Artificial Sequence
  Description of Artificial Sequence: Synthetic oligonucleotide
  Antisense strand to SEQ ID NO: 569673
aggaagacaaucuaauccc

SEQ ID NO: 569675 - RNA, 19 nt, Artificial Sequence
  Description of Artificial Sequence: Synthetic oligonucleotide
  Sense strand starting at position 3791 of SEQ ID NO: 318529
ggauuagauugucuuccug

SEQ ID NO: 569676 - RNA, 19 nt, Artificial Sequence
  Description of Artificial Sequence: Synthetic oligonucleotide
  Antisense strand to SEQ ID NO: 569675
caggaagacaaucuaaucc

SEQ ID NO: 569677 - RNA, 19 nt, Artificial Sequence
  Description of Artificial Sequence: Synthetic oligonucleotide
  Sense strand starting at position 3793 of SEQ ID NO: 318529
auuagauugucuuccugca

SEQ ID NO: 569678 - RNA, 19 nt, Artificial Sequence
  Description of Artificial Sequence: Synthetic oligonucleotide
  Antisense strand to SEQ ID NO: 569677
ugcaggaagacaaucuaau

SEQ ID NO: 569679 - RNA, 19 nt, Artificial Sequence
  Description of Artificial Sequence: Synthetic oligonucleotide
  Sense strand starting at position 3851 of SEQ ID NO: 318529
ggguuagaauguucugucu

SEQ ID NO: 569680 - RNA, 19 nt, Artificial Sequence
  Description of Artificial Sequence: Synthetic oligonucleotide
  Antisense strand to SEQ ID NO: 569679
agacagaacauucuaaccc

SEQ ID NO: 569681 - RNA, 19 nt, Artificial Sequence
  Description of Artificial Sequence: Synthetic oligonucleotide
  Sense strand starting at position 3877 of SEQ ID NO: 318529
agggcuuggccagaucaga

SEQ ID NO: 569682 - RNA, 19 nt, Artificial Sequence
  Description of Artificial Sequence: Synthetic oligonucleotide
  Antisense strand to SEQ ID NO: 569681
ucugaucuggccaagcccu

SEQ ID NO: 569683 - RNA, 19 nt, Artificial Sequence
  Description of Artificial Sequence: Synthetic oligonucleotide
  Sense strand starting at position 3964 of SEQ ID NO: 318529
agggcuucuuuacuaagga

SEQ ID NO: 569684 - RNA, 19 nt, Artificial Sequence
  Description of Artificial Sequence: Synthetic oligonucleotide
  Antisense strand to SEQ ID NO: 569683
uccuuaguaaagaagcccu

SEQ ID NO: 569685 - RNA, 19 nt, Artificial Sequence
  Description of Artificial Sequence: Synthetic oligonucleotide
  Sense strand starting at position 100 of SEQ ID NO: 318530
acuugaaccgccuaaugua

SEQ ID NO: 569686 - RNA, 19 nt, Artificial Sequence
  Description of Artificial Sequence: Synthetic oligonucleotide
  Antisense strand to SEQ ID NO: 569685
uacauuaggcgguucaagu

SEQ ID NO: 569687 - RNA, 19 nt, Artificial Sequence
  Description of Artificial Sequence: Synthetic oligonucleotide
  Sense strand starting at position 112 of SEQ ID NO: 318530
uaauguagugcgcauguua

SEQ ID NO: 569688 - RNA, 19 nt, Artificial Sequence
  Description of Artificial Sequence: Synthetic oligonucleotide
  Antisense strand to SEQ ID NO: 569687
uaacaugcgcacuacauua

SEQ ID NO: 569689 - RNA, 19 nt, Artificial Sequence
  Description of Artificial Sequence: Synthetic oligonucleotide
  Sense strand starting at position 121 of SEQ ID NO: 318530
gcgcauguuaagcagacuu

SEQ ID NO: 569690 - RNA, 19 nt, Artificial Sequence
  Description of Artificial Sequence: Synthetic oligonucleotide
  Antisense strand to SEQ ID NO: 569689
aagucugcuuaacaugcgc

SEQ ID NO: 569691 - RNA, 19 nt, Artificial Sequence
  Description of Artificial Sequence: Synthetic oligonucleotide
  Sense strand starting at position 123 of SEQ ID NO: 318530
gcauguuaagcagacuuua

SEQ ID NO: 569692 - RNA, 19 nt, Artificial Sequence
  Description of Artificial Sequence: Synthetic oligonucleotide
  Antisense strand to SEQ ID NO: 569691
uaaagucugcuuaacaugc

SEQ ID NO: 569693 - RNA, 19 nt, Artificial Sequence
  Description of Artificial Sequence: Synthetic oligonucleotide
  Sense strand starting at position 457 of SEQ ID NO: 318530
gagugauccuaaguaauca

SEQ ID NO: 569694 - RNA, 19 nt, Artificial Sequence
  Description of Artificial Sequence: Synthetic oligonucleotide
  Antisense strand to SEQ ID NO: 569693
ugauuacuuaggaucacuc

SEQ ID NO: 569695 - RNA, 19 nt, Artificial Sequence
  Description of Artificial Sequence: Synthetic oligonucleotide
  Sense strand starting at position 521 of SEQ ID NO: 318530
gcugauauuugagauuaua

SEQ ID NO: 569696 - RNA, 19 nt, Artificial Sequence
  Description of Artificial Sequence: Synthetic oligonucleotide
  Antisense strand to SEQ ID NO: 569695
uauaaucucaaauaucagc

SEQ ID NO: 569697 - RNA, 19 nt, Artificial Sequence
  Description of Artificial Sequence: Synthetic oligonucleotide
  Sense strand starting at position 754 of SEQ ID NO: 318530
gaggcccuuccauaaaguu

SEQ ID NO: 569698 - RNA, 19 nt, Artificial Sequence
  Description of Artificial Sequence: Synthetic oligonucleotide
  Antisense strand to SEQ ID NO: 569697
aacuuuauggaagggccuc

SEQ ID NO: 569699 - RNA, 19 nt, Artificial Sequence
  Description of Artificial Sequence: Synthetic oligonucleotide
  Sense strand starting at position 769 of SEQ ID NO: 318530
aguuaagauuuaggguaga

SEQ ID NO: 569700 - RNA, 19 nt, Artificial Sequence
  Description of Artificial Sequence: Synthetic oligonucleotide
  Antisense strand to SEQ ID NO: 569699
ucuacccuaaaucuuaacu

SEQ ID NO: 569701 - RNA, 19 nt, Artificial Sequence
  Description of Artificial Sequence: Synthetic oligonucleotide
  Sense strand starting at position 826 of SEQ ID NO: 318530
auuagacaguggucuugua

SEQ ID NO: 569702 - RNA, 19 nt, Artificial Sequence
  Description of Artificial Sequence: Synthetic oligonucleotide
  Antisense strand to SEQ ID NO: 569701
uacaagaccacugucuaau

SEQ ID NO: 569703 - RNA, 19 nt, Artificial Sequence
  Description of Artificial Sequence: Synthetic oligonucleotide
  Sense strand starting at position 836 of SEQ ID NO: 318530
ggucuuguacucugcugaa

SEQ ID NO: 569704 - RNA, 19 nt, Artificial Sequence
  Description of Artificial Sequence: Synthetic oligonucleotide
  Antisense strand to SEQ ID NO: 569703
uucagcagaguacaagacc

SEQ ID NO: 569705 - RNA, 19 nt, Artificial Sequence
  Description of Artificial Sequence: Synthetic oligonucleotide
  Sense strand starting at position 848 of SEQ ID NO: 318530
ugcugaacccugugaugaa

SEQ ID NO: 569706 - RNA, 19 nt, Artificial Sequence
  Description of Artificial Sequence: Synthetic oligonucleotide
  Antisense strand to SEQ ID NO: 569705
uucaucacaggguucagca

SEQ ID NO: 569707 - RNA, 19 nt, Artificial Sequence
  Description of Artificial Sequence: Synthetic oligonucleotide
  Sense strand starting at position 849 of SEQ ID NO: 318530
gcugaacccugugaugaac

SEQ ID NO: 569708 - RNA, 19 nt, Artificial Sequence
  Description of Artificial Sequence: Synthetic oligonucleotide
  Antisense strand to SEQ ID NO: 569707
guucaucacaggguucagc

SEQ ID NO: 569709 - RNA, 19 nt, Artificial Sequence
  Description of Artificial Sequence: Synthetic oligonucleotide
  Sense strand starting at position 915 of SEQ ID NO: 318530
ucaguaugcuuccaacugu

SEQ ID NO: 569710 - RNA, 19 nt, Artificial Sequence
  Description of Artificial Sequence: Synthetic oligonucleotide
  Antisense strand to SEQ ID NO: 569709
acaguuggaagcauacuga

SEQ ID NO: 569711 - RNA, 19 nt, Artificial Sequence
  Description of Artificial Sequence: Synthetic oligonucleotide
  Sense strand starting at position 951 of SEQ ID NO: 318530
gcuguauucguaggccaca

SEQ ID NO: 569712 - RNA, 19 nt, Artificial Sequence
  Description of Artificial Sequence: Synthetic oligonucleotide
  Antisense strand to SEQ ID NO: 569711
uguggccuacgaauacagc

SEQ ID NO: 569713 - RNA, 19 nt, Artificial Sequence
  Description of Artificial Sequence: Synthetic oligonucleotide
  Sense strand starting at position 952 of SEQ ID NO: 318530
cuguauucguaggccacaa

SEQ ID NO: 569714 - RNA, 19 nt, Artificial Sequence
  Description of Artificial Sequence: Synthetic oligonucleotide
  Antisense strand to SEQ ID NO: 569713
uuguggccuacgaauacag

SEQ ID NO: 569715 - RNA, 19 nt, Artificial Sequence
  Description of Artificial Sequence: Synthetic oligonucleotide
  Sense strand starting at position 986 of SEQ ID NO: 318530
cagggauugcucgaaucau

SEQ ID NO: 569716 - RNA, 19 nt, Artificial Sequence
  Description of Artificial Sequence: Synthetic oligonucleotide
  Antisense strand to SEQ ID NO: 569715
augauucgagcaaucccug

SEQ ID NO: 569717 - RNA, 19 nt, Artificial Sequence
  Description of Artificial Sequence: Synthetic oligonucleotide
  Sense strand starting at position 995 of SEQ ID NO: 318530
cucgaaucauaguagcuuu

SEQ ID NO: 569718 - RNA, 19 nt, Artificial Sequence
  Description of Artificial Sequence: Synthetic oligonucleotide
  Antisense strand to SEQ ID NO: 569717
aaagcuacuaugauucgag

SEQ ID NO: 569719 - RNA, 19 nt, Artificial Sequence
  Description of Artificial Sequence: Synthetic oligonucleotide
  Sense strand starting at position 1058 of SEQ ID NO: 318530
uuaagaggguaccaauaaa

SEQ ID NO: 569720 - RNA, 19 nt, Artificial Sequence
  Description of Artificial Sequence: Synthetic oligonucleotide
  Antisense strand to SEQ ID NO: 569719
uuuauugguacccucuuaa

SEQ ID NO: 569721 - RNA, 19 nt, Artificial Sequence
  Description of Artificial Sequence: Synthetic oligonucleotide
  Sense strand starting at position 1079 of SEQ ID NO: 318530
cugccuguuucccauacau

SEQ ID NO: 569722 - RNA, 19 nt, Artificial Sequence
  Description of Artificial Sequence: Synthetic oligonucleotide
  Antisense strand to SEQ ID NO: 569721
auguaugggaaacaggcag

SEQ ID NO: 569723 - RNA, 19 nt, Artificial Sequence
  Description of Artificial Sequence: Synthetic oligonucleotide
  Sense strand starting at position 1210 of SEQ ID NO: 318530
uuugaucucccugacgcaa

SEQ ID NO: 569724 - RNA, 19 nt, Artificial Sequence
  Description of Artificial Sequence: Synthetic oligonucleotide
  Antisense strand to SEQ ID NO: 569723
uugcgucagggagaucaaa

SEQ ID NO: 569725 - RNA, 19 nt, Artificial Sequence
  Description of Artificial Sequence: Synthetic oligonucleotide
  Sense strand starting at position 1232 of SEQ ID NO: 318530
acgaucggcucaguucaua

SEQ ID NO: 569726 - RNA, 19 nt, Artificial Sequence
  Description of Artificial Sequence: Synthetic oligonucleotide
  Antisense strand to SEQ ID NO: 569725
uaugaacugagccgaucgu

SEQ ID NO: 569727 - RNA, 19 nt, Artificial Sequence
  Description of Artificial Sequence: Synthetic oligonucleotide
  Sense strand starting at position 1266 of SEQ ID NO: 318530
gaaauaacccgguacuucu

SEQ ID NO: 569728 - RNA, 19 nt, Artificial Sequence
  Description of Artificial Sequence: Synthetic oligonucleotide
  Antisense strand to SEQ ID NO: 569727
agaaguaccggguuauuuc

SEQ ID NO: 569729 - RNA, 19 nt, Artificial Sequence
  Description of Artificial Sequence: Synthetic oligonucleotide
  Sense strand starting at position 1286 of SEQ ID NO: 318530
gaaguagaguacucgagag

SEQ ID NO: 569730 - RNA, 19 nt, Artificial Sequence
  Description of Artificial Sequence: Synthetic oligonucleotide
  Antisense strand to SEQ ID NO: 569729
cucucgaguacucuacuuc

SEQ ID NO: 569731 - RNA, 19 nt, Artificial Sequence
  Description of Artificial Sequence: Synthetic oligonucleotide
  Sense strand starting at position 1288 of SEQ ID NO: 318530
aguagaguacucgagaguc

SEQ ID NO: 569732 - RNA, 19 nt, Artificial Sequence
  Description of Artificial Sequence: Synthetic oligonucleotide
  Antisense strand to SEQ ID NO: 569731
gacucucgaguacucuacu

SEQ ID NO: 569733 - RNA, 19 nt, Artificial Sequence
  Description of Artificial Sequence: Synthetic oligonucleotide
  Sense strand starting at position 1290 of SEQ ID NO: 318530
uagaguacucgagagucca

SEQ ID NO: 569734 - RNA, 19 nt, Artificial Sequence
  Description of Artificial Sequence: Synthetic oligonucleotide
  Antisense strand to SEQ ID NO: 569733
uggacucucgaguacucua

SEQ ID NO: 569735 - RNA, 19 nt, Artificial Sequence
  Description of Artificial Sequence: Synthetic oligonucleotide
  Sense strand starting at position 1298 of SEQ ID NO: 318530
ucgagaguccaugguagaa

SEQ ID NO: 569736 - RNA, 19 nt, Artificial Sequence
  Description of Artificial Sequence: Synthetic oligonucleotide
  Antisense strand to SEQ ID NO: 569735
uucuaccauggacucucga

SEQ ID NO: 569737 - RNA, 19 nt, Artificial Sequence
  Description of Artificial Sequence: Synthetic oligonucleotide
  Sense strand starting at position 1653 of SEQ ID NO: 318530
agcguaugucuucaggaag

SEQ ID NO: 569738 - RNA, 19 nt, Artificial Sequence
  Description of Artificial Sequence: Synthetic oligonucleotide
  Antisense strand to SEQ ID NO: 569737
cuuccugaagacauacgcu

SEQ ID NO: 569739 - RNA, 19 nt, Artificial Sequence
  Description of Artificial Sequence: Synthetic oligonucleotide
  Sense strand starting at position 2497 of SEQ ID NO: 318530
uucgauaaauucuugcaau

SEQ ID NO: 569740 - RNA, 19 nt, Artificial Sequence
  Description of Artificial Sequence: Synthetic oligonucleotide
  Antisense strand to SEQ ID NO: 569739
auugcaagaauuuaucgaa

SEQ ID NO: 569741 - RNA, 19 nt, Artificial Sequence
  Description of Artificial Sequence: Synthetic oligonucleotide
  Sense strand starting at position 2498 of SEQ ID NO: 318530
ucgauaaauucuugcaauu

SEQ ID NO: 569742 - RNA, 19 nt, Artificial Sequence
  Description of Artificial Sequence: Synthetic oligonucleotide
  Antisense strand to SEQ ID NO: 569741
aauugcaagaauuuaucga

SEQ ID NO: 569743 - RNA, 19 nt, Artificial Sequence
  Description of Artificial Sequence: Synthetic oligonucleotide
  Sense strand starting at position 2509 of SEQ ID NO: 318530
uugcaauuauggccgggaa

SEQ ID NO: 569744 - RNA, 19 nt, Artificial Sequence
  Description of Artificial Sequence: Synthetic oligonucleotide
  Antisense strand to SEQ ID NO: 569743
uucccggccauaauugcaa

SEQ ID NO: 569745 - RNA, 19 nt, Artificial Sequence
  Description of Artificial Sequence: Synthetic oligonucleotide
  Sense strand starting at position 2511 of SEQ ID NO: 318530
gcaauuauggccgggaacu

SEQ ID NO: 569746 - RNA, 19 nt, Artificial Sequence
  Description of Artificial Sequence: Synthetic oligonucleotide
  Antisense strand to SEQ ID NO: 569745
aguucccggccauaauugc

SEQ ID NO: 569747 - RNA, 19 nt, Artificial Sequence
  Description of Artificial Sequence: Synthetic oligonucleotide
  Sense strand starting at position 2512 of SEQ ID NO: 318530
caauuauggccgggaacuc

SEQ ID NO: 569748 - RNA, 19 nt, Artificial Sequence
  Description of Artificial Sequence: Synthetic oligonucleotide
  Antisense strand to SEQ ID NO: 569747
gaguucccggccauaauug

SEQ ID NO: 569749 - RNA, 19 nt, Artificial Sequence
  Description of Artificial Sequence: Synthetic oligonucleotide
  Sense strand starting at position 2969 of SEQ ID NO: 318530
uugaauagacccugaauuc

SEQ ID NO: 569750 - RNA, 19 nt, Artificial Sequence
  Description of Artificial Sequence: Synthetic oligonucleotide
  Antisense strand to SEQ ID NO: 569749
gaauucagggucuauucaa

SEQ ID NO: 569751 - RNA, 19 nt, Artificial Sequence
  Description of Artificial Sequence: Synthetic oligonucleotide
  Sense strand starting at position 3476 of SEQ ID NO: 318530
cgccguguccacuuacaga

SEQ ID NO: 569752 - RNA, 19 nt, Artificial Sequence
  Description of Artificial Sequence: Synthetic oligonucleotide
  Antisense strand to SEQ ID NO: 569751
ucuguaaguggacacggcg

SEQ ID NO: 569753 - RNA, 19 nt, Artificial Sequence
  Description of Artificial Sequence: Synthetic oligonucleotide
  Sense strand starting at position 3631 of SEQ ID NO: 318530
cuguaaguauccuuaguca

SEQ ID NO: 569754 - RNA, 19 nt, Artificial Sequence
  Description of Artificial Sequence: Synthetic oligonucleotide
  Antisense strand to SEQ ID NO: 569753
ugacuaaggauacuuacag

SEQ ID NO: 569755 - RNA, 19 nt, Artificial Sequence
  Description of Artificial Sequence: Synthetic oligonucleotide
  Sense strand starting at position 3772 of SEQ ID NO: 318530
agaacaaucucuugggucu

SEQ ID NO: 569756 - RNA, 19 nt, Artificial Sequence
  Description of Artificial Sequence: Synthetic oligonucleotide
  Antisense strand to SEQ ID NO: 569755
agacccaagagauuguucu

SEQ ID NO: 569757 - RNA, 19 nt, Artificial Sequence
  Description of Artificial Sequence: Synthetic oligonucleotide
  Sense strand starting at position 3819 of SEQ ID NO: 318530
cgaucugaggguugcuaca

SEQ ID NO: 569758 - RNA, 19 nt, Artificial Sequence
  Description of Artificial Sequence: Synthetic oligonucleotide
  Antisense strand to SEQ ID NO: 569757
uguagcaacccucagaucg

SEQ ID NO: 569759 - RNA, 19 nt, Artificial Sequence
  Description of Artificial Sequence: Synthetic oligonucleotide
  Sense strand starting at position 3826 of SEQ ID NO: 318530
aggguugcuacaugagaga

SEQ ID NO: 569760 - RNA, 19 nt, Artificial Sequence
  Description of Artificial Sequence: Synthetic oligonucleotide
  Antisense strand to SEQ ID NO: 569759
ucucucauguagcaacccu

SEQ ID NO: 569761 - RNA, 19 nt, Artificial Sequence
  Description of Artificial Sequence: Synthetic oligonucleotide
  Sense strand starting at position 3956 of SEQ ID NO: 318530
gcuacugcuuuccugcaga

SEQ ID NO: 569762 - RNA, 19 nt, Artificial Sequence
  Description of Artificial Sequence: Synthetic oligonucleotide
  Antisense strand to SEQ ID NO: 569761
ucugcaggaaagcaguagc

SEQ ID NO: 569763 - RNA, 19 nt, Artificial Sequence
  Description of Artificial Sequence: Synthetic oligonucleotide
  Sense strand starting at position 3967 of SEQ ID NO: 318530
ccugcagagcuggagaaau

SEQ ID NO: 569764 - RNA, 19 nt, Artificial Sequence
  Description of Artificial Sequence: Synthetic oligonucleotide
  Antisense strand to SEQ ID NO: 569763
auuucuccagcucugcagg

SEQ ID NO: 569765 - RNA, 19 nt, Artificial Sequence
  Description of Artificial Sequence: Synthetic oligonucleotide
  Sense strand starting at position 451 of SEQ ID NO: 318531
agguguuaggaagguuuaa

SEQ ID NO: 569766 - RNA, 19 nt, Artificial Sequence
  Description of Artificial Sequence: Synthetic oligonucleotide
  Antisense strand to SEQ ID NO: 569765
uuaaaccuuccuaacaccu

SEQ ID NO: 569767 - RNA, 19 nt, Artificial Sequence
  Description of Artificial Sequence: Synthetic oligonucleotide
  Sense strand starting at position 489 of SEQ ID NO: 318531
cucuuaggugucuaucuuu

SEQ ID NO: 569768 - RNA, 19 nt, Artificial Sequence
  Description of Artificial Sequence: Synthetic oligonucleotide
  Antisense strand to SEQ ID NO: 569767
aaagauagacaccuaagag

SEQ ID NO: 569769 - RNA, 19 nt, Artificial Sequence
  Description of Artificial Sequence: Synthetic oligonucleotide
  Sense strand starting at position 569 of SEQ ID NO: 318531
ggaacuccuccucauugua

SEQ ID NO: 569770 - RNA, 19 nt, Artificial Sequence
  Description of Artificial Sequence: Synthetic oligonucleotide
  Antisense strand to SEQ ID NO: 569769
uacaaugaggaggaguucc

SEQ ID NO: 569771 - RNA, 19 nt, Artificial Sequence
  Description of Artificial Sequence: Synthetic oligonucleotide
  Sense strand starting at position 635 of SEQ ID NO: 318531
uaugacaauuagcuaggua

SEQ ID NO: 569772 - RNA, 19 nt, Artificial Sequence
  Description of Artificial Sequence: Synthetic oligonucleotide
  Antisense strand to SEQ ID NO: 569771
uaccuagcuaauugucaua

SEQ ID NO: 569773 - RNA, 19 nt, Artificial Sequence
  Description of Artificial Sequence: Synthetic oligonucleotide
  Sense strand starting at position 638 of SEQ ID NO: 318531
gacaauuagcuagguaagu

SEQ ID NO: 569774 - RNA, 19 nt, Artificial Sequence
  Description of Artificial Sequence: Synthetic oligonucleotide
  Antisense strand to SEQ ID NO: 569773
acuuaccuagcuaauuguc

SEQ ID NO: 569775 - RNA, 19 nt, Artificial Sequence
  Description of Artificial Sequence: Synthetic oligonucleotide
  Sense strand starting at position 647 of SEQ ID NO: 318531
cuagguaagucaucuaucu

SEQ ID NO: 569776 - RNA, 19 nt, Artificial Sequence
  Description of Artificial Sequence: Synthetic oligonucleotide
  Antisense strand to SEQ ID NO: 569775
agauagaugacuuaccuag

SEQ ID NO: 569777 - RNA, 19 nt, Artificial Sequence
  Description of Artificial Sequence: Synthetic oligonucleotide
  Sense strand starting at position 739 of SEQ ID NO: 318531
agucaaagucgaggaaaua

SEQ ID NO: 569778 - RNA, 19 nt, Artificial Sequence
  Description of Artificial Sequence: Synthetic oligonucleotide
  Antisense strand to SEQ ID NO: 569777
uauuuccucgacuuugacu

SEQ ID NO: 569779 - RNA, 19 nt, Artificial Sequence
  Description of Artificial Sequence: Synthetic oligonucleotide
  Sense strand starting at position 1126 of SEQ ID NO: 318531
cuaugugucccauacagga

SEQ ID NO: 569780 - RNA, 19 nt, Artificial Sequence
  Description of Artificial Sequence: Synthetic oligonucleotide
  Antisense strand to SEQ ID NO: 569779
uccuguaugggacacauag

SEQ ID NO: 569781 - RNA, 19 nt, Artificial Sequence
  Description of Artificial Sequence: Synthetic oligonucleotide
  Sense strand starting at position 1194 of SEQ ID NO: 318531
aguuguucagauuacgagu

SEQ ID NO: 569782 - RNA, 19 nt, Artificial Sequence
  Description of Artificial Sequence: Synthetic oligonucleotide
  Antisense strand to SEQ ID NO: 569781
acucguaaucugaacaacu

SEQ ID NO: 569783 - RNA, 19 nt, Artificial Sequence
  Description of Artificial Sequence: Synthetic oligonucleotide
  Sense strand starting at position 1371 of SEQ ID NO: 318531
cucagaccaucaguugaga

SEQ ID NO: 569784 - RNA, 19 nt, Artificial Sequence
  Description of Artificial Sequence: Synthetic oligonucleotide
  Antisense strand to SEQ ID NO: 569783
ucucaacugauggucugag

SEQ ID NO: 569785 - RNA, 19 nt, Artificial Sequence
  Description of Artificial Sequence: Synthetic oligonucleotide
  Sense strand starting at position 1461 of SEQ ID NO: 318531
ggagaauucguuugugagg

SEQ ID NO: 569786 - RNA, 19 nt, Artificial Sequence
  Description of Artificial Sequence: Synthetic oligonucleotide
  Antisense strand to SEQ ID NO: 569785
ccucacaaacgaauucucc

SEQ ID NO: 569787 - RNA, 19 nt, Artificial Sequence
  Description of Artificial Sequence: Synthetic oligonucleotide
  Sense strand starting at position 1462 of SEQ ID NO: 318531
gagaauucguuugugagga

SEQ ID NO: 569788 - RNA, 19 nt, Artificial Sequence
  Description of Artificial Sequence: Synthetic oligonucleotide
  Antisense strand to SEQ ID NO: 569787
uccucacaaacgaauucuc

SEQ ID NO: 569789 - RNA, 19 nt, Artificial Sequence
  Description of Artificial Sequence: Synthetic oligonucleotide
  Sense strand starting at position 2075 of SEQ ID NO: 318531
ggaagucuucggagcacgu

SEQ ID NO: 569790 - RNA, 19 nt, Artificial Sequence
  Description of Artificial Sequence: Synthetic oligonucleotide
  Antisense strand to SEQ ID NO: 569789
acgugcuccgaagacuucc

SEQ ID NO: 569791 - RNA, 19 nt, Artificial Sequence
  Description of Artificial Sequence: Synthetic oligonucleotide
  Sense strand starting at position 2191 of SEQ ID NO: 318531
ugggaauaugguuguggga

SEQ ID NO: 569792 - RNA, 19 nt, Artificial Sequence
  Description of Artificial Sequence: Synthetic oligonucleotide
  Antisense strand to SEQ ID NO: 569791
ucccacaaccauauuccca

SEQ ID NO: 569793 - RNA, 19 nt, Artificial Sequence
  Description of Artificial Sequence: Synthetic oligonucleotide
  Sense strand starting at position 2334 of SEQ ID NO: 318531
ugagaucccggccagaaau

SEQ ID NO: 569794 - RNA, 19 nt, Artificial Sequence
  Description of Artificial Sequence: Synthetic oligonucleotide
  Antisense strand to SEQ ID NO: 569793
auuucuggccgggaucuca

SEQ ID NO: 569795 - RNA, 19 nt, Artificial Sequence
  Description of Artificial Sequence: Synthetic oligonucleotide
  Sense strand starting at position 2435 of SEQ ID NO: 318531
guuggaguuguggaggguu

SEQ ID NO: 569796 - RNA, 19 nt, Artificial Sequence
  Description of Artificial Sequence: Synthetic oligonucleotide
  Antisense strand to SEQ ID NO: 569795
aacccuccacaacuccaac

SEQ ID NO: 569797 - RNA, 19 nt, Artificial Sequence
  Description of Artificial Sequence: Synthetic oligonucleotide
  Sense strand starting at position 2437 of SEQ ID NO: 318531
uggaguuguggaggguuaa

SEQ ID NO: 569798 - RNA, 19 nt, Artificial Sequence
  Description of Artificial Sequence: Synthetic oligonucleotide
  Antisense strand to SEQ ID NO: 569797
uuaacccuccacaacucca

SEQ ID NO: 569799 - RNA, 19 nt, Artificial Sequence
  Description of Artificial Sequence: Synthetic oligonucleotide
  Sense strand starting at position 2438 of SEQ ID NO: 318531
ggaguuguggaggguuaau

SEQ ID NO: 569800 - RNA, 19 nt, Artificial Sequence
  Description of Artificial Sequence: Synthetic oligonucleotide
  Antisense strand to SEQ ID NO: 569799
auuaacccuccacaacucc

SEQ ID NO: 569801 - RNA, 19 nt, Artificial Sequence
  Description of Artificial Sequence: Synthetic oligonucleotide
  Sense strand starting at position 2614 of SEQ ID NO: 318531
cgaauacuguccuccugga

SEQ ID NO: 569802 - RNA, 19 nt, Artificial Sequence
  Description of Artificial Sequence: Synthetic oligonucleotide
  Antisense strand to SEQ ID NO: 569801
uccaggaggacaguauucg

SEQ ID NO: 569803 - RNA, 19 nt, Artificial Sequence
  Description of Artificial Sequence: Synthetic oligonucleotide
  Sense strand starting at position 2698 of SEQ ID NO: 318531
uucugaugugucuaaauca

SEQ ID NO: 569804 - RNA, 19 nt, Artificial Sequence
  Description of Artificial Sequence: Synthetic oligonucleotide
  Antisense strand to SEQ ID NO: 569803
ugauuuagacacaucagaa

SEQ ID NO: 569805 - RNA, 19 nt, Artificial Sequence
  Description of Artificial Sequence: Synthetic oligonucleotide
  Sense strand starting at position 2860 of SEQ ID NO: 318531
ggaagacuuccaugguuuc

SEQ ID NO: 569806 - RNA, 19 nt, Artificial Sequence
  Description of Artificial Sequence: Synthetic oligonucleotide
  Antisense strand to SEQ ID NO: 569805
gaaaccauggaagucuucc

SEQ ID NO: 569807 - RNA, 19 nt, Artificial Sequence
  Description of Artificial Sequence: Synthetic oligonucleotide
  Sense strand starting at position 2908 of SEQ ID NO: 318531
ccaggauuccuagagcuuu

SEQ ID NO: 569808 - RNA, 19 nt, Artificial Sequence
  Description of Artificial Sequence: Synthetic oligonucleotide
  Antisense strand to SEQ ID NO: 569807
aaagcucuaggaauccugg

SEQ ID NO: 569809 - RNA, 19 nt, Artificial Sequence
  Description of Artificial Sequence: Synthetic oligonucleotide
  Sense strand starting at position 2952 of SEQ ID NO: 318531
cucgaucuuccagaugcga

SEQ ID NO: 569810 - RNA, 19 nt, Artificial Sequence
  Description of Artificial Sequence: Synthetic oligonucleotide
  Antisense strand to SEQ ID NO: 569809
ucgcaucuggaagaucgag

SEQ ID NO: 569811 - RNA, 19 nt, Artificial Sequence
  Description of Artificial Sequence: Synthetic oligonucleotide
  Sense strand starting at position 2963 of SEQ ID NO: 318531
agaugcgaaccuugauuga

SEQ ID NO: 569812 - RNA, 19 nt, Artificial Sequence
  Description of Artificial Sequence: Synthetic oligonucleotide
  Antisense strand to SEQ ID NO: 569811
ucaaucaagguucgcaucu

SEQ ID NO: 569813 - RNA, 19 nt, Artificial Sequence
  Description of Artificial Sequence: Synthetic oligonucleotide
  Sense strand starting at position 2973 of SEQ ID NO: 318531
cuugauugagagugauaau

SEQ ID NO: 569814 - RNA, 19 nt, Artificial Sequence
  Description of Artificial Sequence: Synthetic oligonucleotide
  Antisense strand to SEQ ID NO: 569813
auuaucacucucaaucaag

SEQ ID NO: 569815 - RNA, 19 nt, Artificial Sequence
  Description of Artificial Sequence: Synthetic oligonucleotide
  Sense strand starting at position 3096 of SEQ ID NO: 318531
uuugauagcguacauuaaa

SEQ ID NO: 569816 - RNA, 19 nt, Artificial Sequence
  Description of Artificial Sequence: Synthetic oligonucleotide
  Antisense strand to SEQ ID NO: 569815
uuuaauguacgcuaucaaa

SEQ ID NO: 569817 - RNA, 19 nt, Artificial Sequence
  Description of Artificial Sequence: Synthetic oligonucleotide
  Sense strand starting at position 3157 of SEQ ID NO: 318531
auuugauugcgaugcagcu

SEQ ID NO: 569818 - RNA, 19 nt, Artificial Sequence
  Description of Artificial Sequence: Synthetic oligonucleotide
  Antisense strand to SEQ ID NO: 569817
agcugcaucgcaaucaaau

SEQ ID NO: 569819 - RNA, 19 nt, Artificial Sequence
  Description of Artificial Sequence: Synthetic oligonucleotide
  Sense strand starting at position 3189 of SEQ ID NO: 318531
ugagucucuugacuguaua

SEQ ID NO: 569820 - RNA, 19 nt, Artificial Sequence
  Description of Artificial Sequence: Synthetic oligonucleotide
  Antisense strand to SEQ ID NO: 569819
uauacagucaagagacuca

SEQ ID NO: 569821 - RNA, 19 nt, Artificial Sequence
  Description of Artificial Sequence: Synthetic oligonucleotide
  Sense strand starting at position 3190 of SEQ ID NO: 318531
gagucucuugacuguauaa

SEQ ID NO: 569822 - RNA, 19 nt, Artificial Sequence
  Description of Artificial Sequence: Synthetic oligonucleotide
  Antisense strand to SEQ ID NO: 569821
uuauacagucaagagacuc

SEQ ID NO: 569823 - RNA, 19 nt, Artificial Sequence
  Description of Artificial Sequence: Synthetic oligonucleotide
  Sense strand starting at position 3307 of SEQ ID NO: 318531
auggaacaguagcuuuaau

SEQ ID NO: 569824 - RNA, 19 nt, Artificial Sequence
  Description of Artificial Sequence: Synthetic oligonucleotide
  Antisense strand to SEQ ID NO: 569823
auuaaagcuacuguuccau

SEQ ID NO: 569825 - RNA, 19 nt, Artificial Sequence
  Description of Artificial Sequence: Synthetic oligonucleotide
  Sense strand starting at position 3376 of SEQ ID NO: 318531
aggacauguagaggcaauu

SEQ ID NO: 569826 - RNA, 19 nt, Artificial Sequence
  Description of Artificial Sequence: Synthetic oligonucleotide
  Antisense strand to SEQ ID NO: 569825
aauugccucuacauguccu

SEQ ID NO: 569827 - RNA, 19 nt, Artificial Sequence
  Description of Artificial Sequence: Synthetic oligonucleotide
  Sense strand starting at position 3512 of SEQ ID NO: 318531
auugucuuuccaggugaga

SEQ ID NO: 569828 - RNA, 19 nt, Artificial Sequence
  Description of Artificial Sequence: Synthetic oligonucleotide
  Antisense strand to SEQ ID NO: 569827
ucucaccuggaaagacaau

SEQ ID NO: 569829 - RNA, 19 nt, Artificial Sequence
  Description of Artificial Sequence: Synthetic oligonucleotide
  Sense strand starting at position 3514 of SEQ ID NO: 318531
ugucuuuccaggugagaag

SEQ ID NO: 569830 - RNA, 19 nt, Artificial Sequence
  Description of Artificial Sequence: Synthetic oligonucleotide
  Antisense strand to SEQ ID NO: 569829
cuucucaccuggaaagaca

SEQ ID NO: 569831 - RNA, 19 nt, Artificial Sequence
  Description of Artificial Sequence: Synthetic oligonucleotide
  Sense strand starting at position 3515 of SEQ ID NO: 318531
gucuuuccaggugagaaga

SEQ ID NO: 569832 - RNA, 19 nt, Artificial Sequence
  Description of Artificial Sequence: Synthetic oligonucleotide
  Antisense strand to SEQ ID NO: 569831
ucuucucaccuggaaagac

SEQ ID NO: 569833 - RNA, 19 nt, Artificial Sequence
  Description of Artificial Sequence: Synthetic oligonucleotide
  Sense strand starting at position 3543 of SEQ ID NO: 318531
ucauuaauuucugaaguga

SEQ ID NO: 569834 - RNA, 19 nt, Artificial Sequence
  Description of Artificial Sequence: Synthetic oligonucleotide
  Antisense strand to SEQ ID NO: 569833
ucacuucagaaauuaauga

SEQ ID NO: 569835 - RNA, 19 nt, Artificial Sequence
  Description of Artificial Sequence: Synthetic oligonucleotide
  Sense strand starting at position 3676 of SEQ ID NO: 318531
auguuucuggcauggauaa

SEQ ID NO: 569836 - RNA, 19 nt, Artificial Sequence
  Description of Artificial Sequence: Synthetic oligonucleotide
  Antisense strand to SEQ ID NO: 569835
uuauccaugccagaaacau

SEQ ID NO: 569837 - RNA, 19 nt, Artificial Sequence
  Description of Artificial Sequence: Synthetic oligonucleotide
  Sense strand starting at position 3678 of SEQ ID NO: 318531
guuucuggcauggauaaca

SEQ ID NO: 569838 - RNA, 19 nt, Artificial Sequence
  Description of Artificial Sequence: Synthetic oligonucleotide
  Antisense strand to SEQ ID NO: 569837
uguuauccaugccagaaac

SEQ ID NO: 569839 - RNA, 19 nt, Artificial Sequence
  Description of Artificial Sequence: Synthetic oligonucleotide
  Sense strand starting at position 3793 of SEQ ID NO: 318531
aguguauauccauacaguu

SEQ ID NO: 569840 - RNA, 19 nt, Artificial Sequence
  Description of Artificial Sequence: Synthetic oligonucleotide
  Antisense strand to SEQ ID NO: 569839
aacuguauggauauacacu

SEQ ID NO: 569841 - RNA, 19 nt, Artificial Sequence
  Description of Artificial Sequence: Synthetic oligonucleotide
  Sense strand starting at position 3801 of SEQ ID NO: 318531
uccauacaguuguuuaaca

SEQ ID NO: 569842 - RNA, 19 nt, Artificial Sequence
  Description of Artificial Sequence: Synthetic oligonucleotide
  Antisense strand to SEQ ID NO: 569841
uguuaaacaacuguaugga

SEQ ID NO: 569843 - RNA, 19 nt, Artificial Sequence
  Description of Artificial Sequence: Synthetic oligonucleotide
  Sense strand starting at position 3802 of SEQ ID NO: 318531
ccauacaguuguuuaacaa

SEQ ID NO: 569844 - RNA, 19 nt, Artificial Sequence
  Description of Artificial Sequence: Synthetic oligonucleotide
  Antisense strand to SEQ ID NO: 569843
uuguuaaacaacuguaugg

SEQ ID NO: 569845 - RNA, 19 nt, Artificial Sequence
  Description of Artificial Sequence: Synthetic oligonucleotide
  Sense strand starting at position 102 of SEQ ID NO: 318532
aaacaaauuuauggugaug

SEQ ID NO: 569846 - RNA, 19 nt, Artificial Sequence
  Description of Artificial Sequence: Synthetic oligonucleotide
  Antisense strand to SEQ ID NO: 569845
caucaccauaaauuuguuu

SEQ ID NO: 569847 - RNA, 19 nt, Artificial Sequence
  Description of Artificial Sequence: Synthetic oligonucleotide
  Sense strand starting at position 104 of SEQ ID NO: 318532
acaaauuuauggugauggu

SEQ ID NO: 569848 - RNA, 19 nt, Artificial Sequence
  Description of Artificial Sequence: Synthetic oligonucleotide
  Antisense strand to SEQ ID NO: 569847
accaucaccauaaauuugu

SEQ ID NO: 569849 - RNA, 19 nt, Artificial Sequence
  Description of Artificial Sequence: Synthetic oligonucleotide
  Sense strand starting at position 120 of SEQ ID NO: 318532
gguugcaccucuuuguaaa

SEQ ID NO: 569850 - RNA, 19 nt, Artificial Sequence
  Description of Artificial Sequence: Synthetic oligonucleotide
  Antisense strand to SEQ ID NO: 569849
uuuacaaagaggugcaacc

SEQ ID NO: 569851 - RNA, 19 nt, Artificial Sequence
  Description of Artificial Sequence: Synthetic oligonucleotide
  Sense strand starting at position 612 of SEQ ID NO: 318532
cgcugaaugguggaauaau

SEQ ID NO: 569852 - RNA, 19 nt, Artificial Sequence
  Description of Artificial Sequence: Synthetic oligonucleotide
  Antisense strand to SEQ ID NO: 569851
auuauuccaccauucagcg

SEQ ID NO: 569853 - RNA, 19 nt, Artificial Sequence
  Description of Artificial Sequence: Synthetic oligonucleotide
  Sense strand starting at position 621 of SEQ ID NO: 318532
guggaauaauuguccaguc

SEQ ID NO: 569854 - RNA, 19 nt, Artificial Sequence
  Description of Artificial Sequence: Synthetic oligonucleotide
  Antisense strand to SEQ ID NO: 569853
gacuggacaauuauuccac

SEQ ID NO: 569855 - RNA, 19 nt, Artificial Sequence
  Description of Artificial Sequence: Synthetic oligonucleotide
  Sense strand starting at position 622 of SEQ ID NO: 318532
uggaauaauuguccaguca

SEQ ID NO: 569856 - RNA, 19 nt, Artificial Sequence
  Description of Artificial Sequence: Synthetic oligonucleotide
  Antisense strand to SEQ ID NO: 569855
ugacuggacaauuauucca

SEQ ID NO: 569857 - RNA, 19 nt, Artificial Sequence
  Description of Artificial Sequence: Synthetic oligonucleotide
  Sense strand starting at position 859 of SEQ ID NO: 318532
gauccaaucugguuuguug

SEQ ID NO: 569858 - RNA, 19 nt, Artificial Sequence
  Description of Artificial Sequence: Synthetic oligonucleotide
  Antisense strand to SEQ ID NO: 569857
caacaaaccagauuggauc

SEQ ID NO: 569859 - RNA, 19 nt, Artificial Sequence
  Description of Artificial Sequence: Synthetic oligonucleotide
  Sense strand starting at position 1239 of SEQ ID NO: 318532
gcaauaagugcuccucgca

SEQ ID NO: 569860 - RNA, 19 nt, Artificial Sequence
  Description of Artificial Sequence: Synthetic oligonucleotide
  Antisense strand to SEQ ID NO: 569859
ugcgaggagcacuuauugc

SEQ ID NO: 569861 - RNA, 19 nt, Artificial Sequence
  Description of Artificial Sequence: Synthetic oligonucleotide
  Sense strand starting at position 1505 of SEQ ID NO: 318532
ugacgagcuguuuaaucau

SEQ ID NO: 569862 - RNA, 19 nt, Artificial Sequence
  Description of Artificial Sequence: Synthetic oligonucleotide
  Antisense strand to SEQ ID NO: 569861
augauuaaacagcucguca

SEQ ID NO: 569863 - RNA, 19 nt, Artificial Sequence
  Description of Artificial Sequence: Synthetic oligonucleotide
  Sense strand starting at position 1508 of SEQ ID NO: 318532
cgagcuguuuaaucauuac

SEQ ID NO: 569864 - RNA, 19 nt, Artificial Sequence
  Description of Artificial Sequence: Synthetic oligonucleotide
  Antisense strand to SEQ ID NO: 569863
guaaugauuaaacagcucg

SEQ ID NO: 569865 - RNA, 19 nt, Artificial Sequence
  Description of Artificial Sequence: Synthetic oligonucleotide
  Sense strand starting at position 1701 of SEQ ID NO: 318532
gaggcaaaguuuccucaga

SEQ ID NO: 569866 - RNA, 19 nt, Artificial Sequence
  Description of Artificial Sequence: Synthetic oligonucleotide
  Antisense strand to SEQ ID NO: 569865
ucugaggaaacuuugccuc

SEQ ID NO: 569867 - RNA, 19 nt, Artificial Sequence
  Description of Artificial Sequence: Synthetic oligonucleotide
  Sense strand starting at position 1703 of SEQ ID NO: 318532
ggcaaaguuuccucagagc

SEQ ID NO: 569868 - RNA, 19 nt, Artificial Sequence
  Description of Artificial Sequence: Synthetic oligonucleotide
  Antisense strand to SEQ ID NO: 569867
gcucugaggaaacuuugcc

SEQ ID NO: 569869 - RNA, 19 nt, Artificial Sequence
  Description of Artificial Sequence: Synthetic oligonucleotide
  Sense strand starting at position 2059 of SEQ ID NO: 318532
acagcacucuggguggaua

SEQ ID NO: 569870 - RNA, 19 nt, Artificial Sequence
  Description of Artificial Sequence: Synthetic oligonucleotide
  Antisense strand to SEQ ID NO: 569869
uauccacccagagugcugu

SEQ ID NO: 569871 - RNA, 19 nt, Artificial Sequence
  Description of Artificial Sequence: Synthetic oligonucleotide
  Sense strand starting at position 2060 of SEQ ID NO: 318532
cagcacucuggguggauaa

SEQ ID NO: 569872 - RNA, 19 nt, Artificial Sequence
  Description of Artificial Sequence: Synthetic oligonucleotide
  Antisense strand to SEQ ID NO: 569871
uuauccacccagagugcug

SEQ ID NO: 569873 - RNA, 19 nt, Artificial Sequence
  Description of Artificial Sequence: Synthetic oligonucleotide
  Sense strand starting at position 2093 of SEQ ID NO: 318532
cggcucaucccagacacaa

SEQ ID NO: 569874 - RNA, 19 nt, Artificial Sequence
  Description of Artificial Sequence: Synthetic oligonucleotide
  Antisense strand to SEQ ID NO: 569873
uugugucugggaugagccg

SEQ ID NO: 569875 - RNA, 19 nt, Artificial Sequence
  Description of Artificial Sequence: Synthetic oligonucleotide
  Sense strand starting at position 2119 of SEQ ID NO: 318532
agggucaucaagugaaauu

SEQ ID NO: 569876 - RNA, 19 nt, Artificial Sequence
  Description of Artificial Sequence: Synthetic oligonucleotide
  Antisense strand to SEQ ID NO: 569875
aauuucacuugaugacccu

SEQ ID NO: 569877 - RNA, 19 nt, Artificial Sequence
  Description of Artificial Sequence: Synthetic oligonucleotide
  Sense strand starting at position 2267 of SEQ ID NO: 318532
ugacaaugcugauuccaau

SEQ ID NO: 569878 - RNA, 19 nt, Artificial Sequence
  Description of Artificial Sequence: Synthetic oligonucleotide
  Antisense strand to SEQ ID NO: 569877
auuggaaucagcauuguca

SEQ ID NO: 569879 - RNA, 19 nt, Artificial Sequence
  Description of Artificial Sequence: Synthetic oligonucleotide
  Sense strand starting at position 2392 of SEQ ID NO: 318532
cagggucaugucuaacuuu

SEQ ID NO: 569880 - RNA, 19 nt, Artificial Sequence
  Description of Artificial Sequence: Synthetic oligonucleotide
  Antisense strand to SEQ ID NO: 569879
aaaguuagacaugacccug

SEQ ID NO: 569881 - RNA, 19 nt, Artificial Sequence
  Description of Artificial Sequence: Synthetic oligonucleotide
  Sense strand starting at position 2566 of SEQ ID NO: 318532
ccgugcucacuggagaagu

SEQ ID NO: 569882 - RNA, 19 nt, Artificial Sequence
  Description of Artificial Sequence: Synthetic oligonucleotide
  Antisense strand to SEQ ID NO: 569881
acuucuccagugagcacgg

SEQ ID NO: 569883 - RNA, 19 nt, Artificial Sequence
  Description of Artificial Sequence: Synthetic oligonucleotide
  Sense strand starting at position 2611 of SEQ ID NO: 318532
uuacaaugagagugucuuu

SEQ ID NO: 569884 - RNA, 19 nt, Artificial Sequence
  Description of Artificial Sequence: Synthetic oligonucleotide
  Antisense strand to SEQ ID NO: 569883
aaagacacucucauuguaa

SEQ ID NO: 569885 - RNA, 19 nt, Artificial Sequence
  Description of Artificial Sequence: Synthetic oligonucleotide
  Sense strand starting at position 2614 of SEQ ID NO: 318532
caaugagagugucuuuccu

SEQ ID NO: 569886 - RNA, 19 nt, Artificial Sequence
  Description of Artificial Sequence: Synthetic oligonucleotide
  Antisense strand to SEQ ID NO: 569885
aggaaagacacucucauug

SEQ ID NO: 569887 - RNA, 19 nt, Artificial Sequence
  Description of Artificial Sequence: Synthetic oligonucleotide
  Sense strand starting at position 2658 of SEQ ID NO: 318532
cccagcguucugcuaguuu

SEQ ID NO: 569888 - RNA, 19 nt, Artificial Sequence
  Description of Artificial Sequence: Synthetic oligonucleotide
  Antisense strand to SEQ ID NO: 569887
aaacuagcagaacgcuggg

SEQ ID NO: 569889 - RNA, 19 nt, Artificial Sequence
  Description of Artificial Sequence: Synthetic oligonucleotide
  Sense strand starting at position 2694 of SEQ ID NO: 318532
gugggucucagccaagaca

SEQ ID NO: 569890 - RNA, 19 nt, Artificial Sequence
  Description of Artificial Sequence: Synthetic oligonucleotide
  Antisense strand to SEQ ID NO: 569889
ugucuuggcugagacccac

SEQ ID NO: 569891 - RNA, 19 nt, Artificial Sequence
  Description of Artificial Sequence: Synthetic oligonucleotide
  Sense strand starting at position 2719 of SEQ ID NO: 318532
gguugacaagaauggugaa

SEQ ID NO: 569892 - RNA, 19 nt, Artificial Sequence
  Description of Artificial Sequence: Synthetic oligonucleotide
  Antisense strand to SEQ ID NO: 569891
uucaccauucuugucaacc

SEQ ID NO: 569893 - RNA, 19 nt, Artificial Sequence
  Description of Artificial Sequence: Synthetic oligonucleotide
  Sense strand starting at position 2799 of SEQ ID NO: 318532
ugucacgucauccagguua

SEQ ID NO: 569894 - RNA, 19 nt, Artificial Sequence
  Description of Artificial Sequence: Synthetic oligonucleotide
  Antisense strand to SEQ ID NO: 569893
uaaccuggaugacgugaca

SEQ ID NO: 569895 - RNA, 19 nt, Artificial Sequence
  Description of Artificial Sequence: Synthetic oligonucleotide
  Sense strand starting at position 2801 of SEQ ID NO: 318532
ucacgucauccagguuaau

SEQ ID NO: 569896 - RNA, 19 nt, Artificial Sequence
  Description of Artificial Sequence: Synthetic oligonucleotide
  Antisense strand to SEQ ID NO: 569895
auuaaccuggaugacguga

SEQ ID NO: 569897 - RNA, 19 nt, Artificial Sequence
  Description of Artificial Sequence: Synthetic oligonucleotide
  Sense strand starting at position 2804 of SEQ ID NO: 318532
cgucauccagguuaauaug

SEQ ID NO: 569898 - RNA, 19 nt, Artificial Sequence
  Description of Artificial Sequence: Synthetic oligonucleotide
  Antisense strand to SEQ ID NO: 569897
cauauuaaccuggaugacg

SEQ ID NO: 569899 - RNA, 19 nt, Artificial Sequence
  Description of Artificial Sequence: Synthetic oligonucleotide
  Sense strand starting at position 3165 of SEQ ID NO: 318532
cccugucaugcccgggaua

SEQ ID NO: 569900 - RNA, 19 nt, Artificial Sequence
  Description of Artificial Sequence: Synthetic oligonucleotide
  Antisense strand to SEQ ID NO: 569899
uaucccgggcaugacaggg

SEQ ID NO: 569901 - RNA, 19 nt, Artificial Sequence
  Description of Artificial Sequence: Synthetic oligonucleotide
  Sense strand starting at position 3166 of SEQ ID NO: 318532
ccugucaugcccgggauau

SEQ ID NO: 569902 - RNA, 19 nt, Artificial Sequence
  Description of Artificial Sequence: Synthetic oligonucleotide
  Antisense strand to SEQ ID NO: 569901
auaucccgggcaugacagg

SEQ ID NO: 569903 - RNA, 19 nt, Artificial Sequence
  Description of Artificial Sequence: Synthetic oligonucleotide
  Sense strand starting at position 3167 of SEQ ID NO: 318532
cugucaugcccgggauaua

SEQ ID NO: 569904 - RNA, 19 nt, Artificial Sequence
  Description of Artificial Sequence: Synthetic oligonucleotide
  Antisense strand to SEQ ID NO: 569903
uauaucccgggcaugacag

SEQ ID NO: 569905 - RNA, 19 nt, Artificial Sequence
  Description of Artificial Sequence: Synthetic oligonucleotide
  Sense strand starting at position 3168 of SEQ ID NO: 318532
ugucaugcccgggauauau

SEQ ID NO: 569906 - RNA, 19 nt, Artificial Sequence
  Description of Artificial Sequence: Synthetic oligonucleotide
  Antisense strand to SEQ ID NO: 569905
auauaucccgggcaugaca

SEQ ID NO: 569907 - RNA, 19 nt, Artificial Sequence
  Description of Artificial Sequence: Synthetic oligonucleotide
  Sense strand starting at position 3178 of SEQ ID NO: 318532
gggauauaugccuagggcu

SEQ ID NO: 569908 - RNA, 19 nt, Artificial Sequence
  Description of Artificial Sequence: Synthetic oligonucleotide
  Antisense strand to SEQ ID NO: 569907
agcccuaggcauauauccc

SEQ ID NO: 569909 - RNA, 19 nt, Artificial Sequence
  Description of Artificial Sequence: Synthetic oligonucleotide
  Sense strand starting at position 3200 of SEQ ID NO: 318532
augagaaaugcaggucucu

SEQ ID NO: 569910 - RNA, 19 nt, Artificial Sequence
  Description of Artificial Sequence: Synthetic oligonucleotide
  Antisense strand to SEQ ID NO: 569909
agagaccugcauuucucau

SEQ ID NO: 569911 - RNA, 19 nt, Artificial Sequence
  Description of Artificial Sequence: Synthetic oligonucleotide
  Sense strand starting at position 3205 of SEQ ID NO: 318532
aaaugcaggucucugaaga

SEQ ID NO: 569912 - RNA, 19 nt, Artificial Sequence
  Description of Artificial Sequence: Synthetic oligonucleotide
  Antisense strand to SEQ ID NO: 569911
ucuucagagaccugcauuu

SEQ ID NO: 569913 - RNA, 19 nt, Artificial Sequence
  Description of Artificial Sequence: Synthetic oligonucleotide
  Sense strand starting at position 3346 of SEQ ID NO: 318532
cugugucagcaccaauuga

SEQ ID NO: 569914 - RNA, 19 nt, Artificial Sequence
  Description of Artificial Sequence: Synthetic oligonucleotide
  Antisense strand to SEQ ID NO: 569913
ucaauuggugcugacacag

SEQ ID NO: 569915 - RNA, 19 nt, Artificial Sequence
  Description of Artificial Sequence: Synthetic oligonucleotide
  Sense strand starting at position 3356 of SEQ ID NO: 318532
accaauugaggaggucuua

SEQ ID NO: 569916 - RNA, 19 nt, Artificial Sequence
  Description of Artificial Sequence: Synthetic oligonucleotide
  Antisense strand to SEQ ID NO: 569915
uaagaccuccucaauuggu

SEQ ID NO: 569917 - RNA, 19 nt, Artificial Sequence
  Description of Artificial Sequence: Synthetic oligonucleotide
  Sense strand starting at position 3423 of SEQ ID NO: 318532
gaaagcugcugcuugaacu

SEQ ID NO: 569918 - RNA, 19 nt, Artificial Sequence
  Description of Artificial Sequence: Synthetic oligonucleotide
  Antisense strand to SEQ ID NO: 569917
aguucaagcagcagcuuuc

SEQ ID NO: 569919 - RNA, 19 nt, Artificial Sequence
  Description of Artificial Sequence: Synthetic oligonucleotide
  Sense strand starting at position 3484 of SEQ ID NO: 318532
augaauuacugugcuccau

SEQ ID NO: 569920 - RNA, 19 nt, Artificial Sequence
  Description of Artificial Sequence: Synthetic oligonucleotide
  Antisense strand to SEQ ID NO: 569919
auggagcacaguaauucau

SEQ ID NO: 569921 - RNA, 19 nt, Artificial Sequence
  Description of Artificial Sequence: Synthetic oligonucleotide
  Sense strand starting at position 3725 of SEQ ID NO: 318532
gcauucuacacucgggaga

SEQ ID NO: 569922 - RNA, 19 nt, Artificial Sequence
  Description of Artificial Sequence: Synthetic oligonucleotide
  Antisense strand to SEQ ID NO: 569921
ucucccgaguguagaaugc

SEQ ID NO: 569923 - RNA, 19 nt, Artificial Sequence
  Description of Artificial Sequence: Synthetic oligonucleotide
  Sense strand starting at position 3915 of SEQ ID NO: 318532
gauagcauuuguuaacuag

SEQ ID NO: 569924 - RNA, 19 nt, Artificial Sequence
  Description of Artificial Sequence: Synthetic oligonucleotide
  Antisense strand to SEQ ID NO: 569923
cuaguuaacaaaugcuauc

SEQ ID NO: 569925 - RNA, 19 nt, Artificial Sequence
  Description of Artificial Sequence: Synthetic oligonucleotide
  Sense strand starting at position 285 of SEQ ID NO: 318533
gguggaagguuugcuugaa

SEQ ID NO: 569926 - RNA, 19 nt, Artificial Sequence
  Description of Artificial Sequence: Synthetic oligonucleotide
  Antisense strand to SEQ ID NO: 569925
uucaagcaaaccuuccacc

SEQ ID NO: 569927 - RNA, 19 nt, Artificial Sequence
  Description of Artificial Sequence: Synthetic oligonucleotide
  Sense strand starting at position 286 of SEQ ID NO: 318533
guggaagguuugcuugaac

SEQ ID NO: 569928 - RNA, 19 nt, Artificial Sequence
  Description of Artificial Sequence: Synthetic oligonucleotide
  Antisense strand to SEQ ID NO: 569927
guucaagcaaaccuuccac

SEQ ID NO: 569929 - RNA, 19 nt, Artificial Sequence
  Description of Artificial Sequence: Synthetic oligonucleotide
  Sense strand starting at position 289 of SEQ ID NO: 318533
gaagguuugcuugaaccca

SEQ ID NO: 569930 - RNA, 19 nt, Artificial Sequence
  Description of Artificial Sequence: Synthetic oligonucleotide
  Antisense strand to SEQ ID NO: 569929
uggguucaagcaaaccuuc

SEQ ID NO: 569931 - RNA, 19 nt, Artificial Sequence
  Description of Artificial Sequence: Synthetic oligonucleotide
  Sense strand starting at position 593 of SEQ ID NO: 318533
ugcugaacgagugagcuua

SEQ ID NO: 569932 - RNA, 19 nt, Artificial Sequence
  Description of Artificial Sequence: Synthetic oligonucleotide
  Antisense strand to SEQ ID NO: 569931
uaagcucacucguucagca

SEQ ID NO: 569933 - RNA, 19 nt, Artificial Sequence
  Description of Artificial Sequence: Synthetic oligonucleotide
  Sense strand starting at position 622 of SEQ ID NO: 318533
uggagaaucacuggaugug

SEQ ID NO: 569934 - RNA, 19 nt, Artificial Sequence
  Description of Artificial Sequence: Synthetic oligonucleotide
  Antisense strand to SEQ ID NO: 569933
cacauccagugauucucca

SEQ ID NO: 569935 - RNA, 19 nt, Artificial Sequence
  Description of Artificial Sequence: Synthetic oligonucleotide
  Sense strand starting at position 634 of SEQ ID NO: 318533
ggauguguucuggaaguca

SEQ ID NO: 569936 - RNA, 19 nt, Artificial Sequence
  Description of Artificial Sequence: Synthetic oligonucleotide
  Antisense strand to SEQ ID NO: 569935
ugacuuccagaacacaucc

SEQ ID NO: 569937 - RNA, 19 nt, Artificial Sequence
  Description of Artificial Sequence: Synthetic oligonucleotide
  Sense strand starting at position 756 of SEQ ID NO: 318533
ggguaacauuaccuaacuu

SEQ ID NO: 569938 - RNA, 19 nt, Artificial Sequence
  Description of Artificial Sequence: Synthetic oligonucleotide
  Antisense strand to SEQ ID NO: 569937
aaguuagguaauguuaccc

SEQ ID NO: 569939 - RNA, 19 nt, Artificial Sequence
  Description of Artificial Sequence: Synthetic oligonucleotide
  Sense strand starting at position 975 of SEQ ID NO: 318533
ucuaguauugcauaucaca

SEQ ID NO: 569940 - RNA, 19 nt, Artificial Sequence
  Description of Artificial Sequence: Synthetic oligonucleotide
  Antisense strand to SEQ ID NO: 569939
ugugauaugcaauacuaga

SEQ ID NO: 569941 - RNA, 19 nt, Artificial Sequence
  Description of Artificial Sequence: Synthetic oligonucleotide
  Sense strand starting at position 983 of SEQ ID NO: 318533
ugcauaucacauuaguugu

SEQ ID NO: 569942 - RNA, 19 nt, Artificial Sequence
  Description of Artificial Sequence: Synthetic oligonucleotide
  Antisense strand to SEQ ID NO: 569941
acaacuaaugugauaugca

SEQ ID NO: 569943 - RNA, 19 nt, Artificial Sequence
  Description of Artificial Sequence: Synthetic oligonucleotide
  Sense strand starting at position 986 of SEQ ID NO: 318533
auaucacauuaguuguaga

SEQ ID NO: 569944 - RNA, 19 nt, Artificial Sequence
  Description of Artificial Sequence: Synthetic oligonucleotide
  Antisense strand to SEQ ID NO: 569943
ucuacaacuaaugugauau

SEQ ID NO: 569945 - RNA, 19 nt, Artificial Sequence
  Description of Artificial Sequence: Synthetic oligonucleotide
  Sense strand starting at position 1074 of SEQ ID NO: 318533
uuaaguucugaauguuucu

SEQ ID NO: 569946 - RNA, 19 nt, Artificial Sequence
  Description of Artificial Sequence: Synthetic oligonucleotide
  Antisense strand to SEQ ID NO: 569945
agaaacauucagaacuuaa

SEQ ID NO: 569947 - RNA, 19 nt, Artificial Sequence
  Description of Artificial Sequence: Synthetic oligonucleotide
  Sense strand starting at position 1087 of SEQ ID NO: 318533
guuucuaacucacugugau

SEQ ID NO: 569948 - RNA, 19 nt, Artificial Sequence
  Description of Artificial Sequence: Synthetic oligonucleotide
  Antisense strand to SEQ ID NO: 569947
aucacagugaguuagaaac

SEQ ID NO: 569949 - RNA, 19 nt, Artificial Sequence
  Description of Artificial Sequence: Synthetic oligonucleotide
  Sense strand starting at position 1137 of SEQ ID NO: 318533
gauagucuaugaguuugga

SEQ ID NO: 569950 - RNA, 19 nt, Artificial Sequence
  Description of Artificial Sequence: Synthetic oligonucleotide
  Antisense strand to SEQ ID NO: 569949
uccaaacucauagacuauc

SEQ ID NO: 569951 - RNA, 19 nt, Artificial Sequence
  Description of Artificial Sequence: Synthetic oligonucleotide
  Sense strand starting at position 1140 of SEQ ID NO: 318533
agucuaugaguuuggagag

SEQ ID NO: 569952 - RNA, 19 nt, Artificial Sequence
  Description of Artificial Sequence: Synthetic oligonucleotide
  Antisense strand to SEQ ID NO: 569951
cucuccaaacucauagacu

SEQ ID NO: 569953 - RNA, 19 nt, Artificial Sequence
  Description of Artificial Sequence: Synthetic oligonucleotide
  Sense strand starting at position 1183 of SEQ ID NO: 318533
aaagacuugcuguguauuu

SEQ ID NO: 569954 - RNA, 19 nt, Artificial Sequence
  Description of Artificial Sequence: Synthetic oligonucleotide
  Antisense strand to SEQ ID NO: 569953
aaauacacagcaagucuuu

SEQ ID NO: 569955 - RNA, 19 nt, Artificial Sequence
  Description of Artificial Sequence: Synthetic oligonucleotide
  Sense strand starting at position 1411 of SEQ ID NO: 318533
cucgaucccuauuccagau

SEQ ID NO: 569956 - RNA, 19 nt, Artificial Sequence
  Description of Artificial Sequence: Synthetic oligonucleotide
  Antisense strand to SEQ ID NO: 569955
aucuggaauagggaucgag

SEQ ID NO: 569957 - RNA, 19 nt, Artificial Sequence
  Description of Artificial Sequence: Synthetic oligonucleotide
  Sense strand starting at position 1423 of SEQ ID NO: 318533
uccagauaucuagguucga

SEQ ID NO: 569958 - RNA, 19 nt, Artificial Sequence
  Description of Artificial Sequence: Synthetic oligonucleotide
  Antisense strand to SEQ ID NO: 569957
ucgaaccuagauaucugga

SEQ ID NO: 569959 - RNA, 19 nt, Artificial Sequence
  Description of Artificial Sequence: Synthetic oligonucleotide
  Sense strand starting at position 1424 of SEQ ID NO: 318533
ccagauaucuagguucgag

SEQ ID NO: 569960 - RNA, 19 nt, Artificial Sequence
  Description of Artificial Sequence: Synthetic oligonucleotide
  Antisense strand to SEQ ID NO: 569959
cucgaaccuagauaucugg

SEQ ID NO: 569961 - RNA, 19 nt, Artificial Sequence
  Description of Artificial Sequence: Synthetic oligonucleotide
  Sense strand starting at position 1432 of SEQ ID NO: 318533
cuagguucgagacggauca

SEQ ID NO: 569962 - RNA, 19 nt, Artificial Sequence
  Description of Artificial Sequence: Synthetic oligonucleotide
  Antisense strand to SEQ ID NO: 569961
ugauccgucucgaaccuag

SEQ ID NO: 569963 - RNA, 19 nt, Artificial Sequence
  Description of Artificial Sequence: Synthetic oligonucleotide
  Sense strand starting at position 1597 of SEQ ID NO: 318533
cgggaaauaaccugacgca

SEQ ID NO: 569964 - RNA, 19 nt, Artificial Sequence
  Description of Artificial Sequence: Synthetic oligonucleotide
  Antisense strand to SEQ ID NO: 569963
ugcgucagguuauuucccg

SEQ ID NO: 569965 - RNA, 19 nt, Artificial Sequence
  Description of Artificial Sequence: Synthetic oligonucleotide
  Sense strand starting at position 2336 of SEQ ID NO: 318533
gccuuuguagaacgggaaa

SEQ ID NO: 569966 - RNA, 19 nt, Artificial Sequence
  Description of Artificial Sequence: Synthetic oligonucleotide
  Antisense strand to SEQ ID NO: 569965
uuucccguucuacaaaggc

SEQ ID NO: 569967 - RNA, 19 nt, Artificial Sequence
  Description of Artificial Sequence: Synthetic oligonucleotide
  Sense strand starting at position 2338 of SEQ ID NO: 318533
cuuuguagaacgggaaauu

SEQ ID NO: 569968 - RNA, 19 nt, Artificial Sequence
  Description of Artificial Sequence: Synthetic oligonucleotide
  Antisense strand to SEQ ID NO: 569967
aauuucccguucuacaaag

SEQ ID NO: 569969 - RNA, 19 nt, Artificial Sequence
  Description of Artificial Sequence: Synthetic oligonucleotide
  Sense strand starting at position 2376 of SEQ ID NO: 318533
gagcuccuagaauguuaga

SEQ ID NO: 569970 - RNA, 19 nt, Artificial Sequence
  Description of Artificial Sequence: Synthetic oligonucleotide
  Antisense strand to SEQ ID NO: 569969
ucuaacauucuaggagcuc

SEQ ID NO: 569971 - RNA, 19 nt, Artificial Sequence
  Description of Artificial Sequence: Synthetic oligonucleotide
  Sense strand starting at position 2394 of SEQ ID NO: 318533
aggcucuugccucacuaua

SEQ ID NO: 569972 - RNA, 19 nt, Artificial Sequence
  Description of Artificial Sequence: Synthetic oligonucleotide
  Antisense strand to SEQ ID NO: 569971
uauagugaggcaagagccu

SEQ ID NO: 569973 - RNA, 19 nt, Artificial Sequence
  Description of Artificial Sequence: Synthetic oligonucleotide
  Sense strand starting at position 2570 of SEQ ID NO: 318533
cgaaccuugucucuauaaa

SEQ ID NO: 569974 - RNA, 19 nt, Artificial Sequence
  Description of Artificial Sequence: Synthetic oligonucleotide
  Antisense strand to SEQ ID NO: 569973
uuuauagagacaagguucg

SEQ ID NO: 569975 - RNA, 19 nt, Artificial Sequence
  Description of Artificial Sequence: Synthetic oligonucleotide
  Sense strand starting at position 2629 of SEQ ID NO: 318533
aaauccuuaguggguuuaa

SEQ ID NO: 569976 - RNA, 19 nt, Artificial Sequence
  Description of Artificial Sequence: Synthetic oligonucleotide
  Antisense strand to SEQ ID NO: 569975
uuaaacccacuaaggauuu

SEQ ID NO: 569977 - RNA, 19 nt, Artificial Sequence
  Description of Artificial Sequence: Synthetic oligonucleotide
  Sense strand starting at position 2630 of SEQ ID NO: 318533
aauccuuaguggguuuaau

SEQ ID NO: 569978 - RNA, 19 nt, Artificial Sequence
  Description of Artificial Sequence: Synthetic oligonucleotide
  Antisense strand to SEQ ID NO: 569977
auuaaacccacuaaggauu

SEQ ID NO: 569979 - RNA, 19 nt, Artificial Sequence
  Description of Artificial Sequence: Synthetic oligonucleotide
  Sense strand starting at position 2766 of SEQ ID NO: 318533
gcuuguucucuuuagggac

SEQ ID NO: 569980 - RNA, 19 nt, Artificial Sequence
  Description of Artificial Sequence: Synthetic oligonucleotide
  Antisense strand to SEQ ID NO: 569979
gucccuaaagagaacaagc

SEQ ID NO: 569981 - RNA, 19 nt, Artificial Sequence
  Description of Artificial Sequence: Synthetic oligonucleotide
  Sense strand starting at position 2791 of SEQ ID NO: 318533
auugguucuggccaucaga

SEQ ID NO: 569982 - RNA, 19 nt, Artificial Sequence
  Description of Artificial Sequence: Synthetic oligonucleotide
  Antisense strand to SEQ ID NO: 569981
ucugauggccagaaccaau

SEQ ID NO: 569983 - RNA, 19 nt, Artificial Sequence
  Description of Artificial Sequence: Synthetic oligonucleotide
  Sense strand starting at position 2927 of SEQ ID NO: 318533
uuaauuaucugccucgaac

SEQ ID NO: 569984 - RNA, 19 nt, Artificial Sequence
  Description of Artificial Sequence: Synthetic oligonucleotide
  Antisense strand to SEQ ID NO: 569983
guucgaggcagauaauuaa

SEQ ID NO: 569985 - RNA, 19 nt, Artificial Sequence
  Description of Artificial Sequence: Synthetic oligonucleotide
  Sense strand starting at position 2947 of SEQ ID NO: 318533
ggccacuauugaguaugua

SEQ ID NO: 569986 - RNA, 19 nt, Artificial Sequence
  Description of Artificial Sequence: Synthetic oligonucleotide
  Antisense strand to SEQ ID NO: 569985
uacauacucaauaguggcc

SEQ ID NO: 569987 - RNA, 19 nt, Artificial Sequence
  Description of Artificial Sequence: Synthetic oligonucleotide
  Sense strand starting at position 2948 of SEQ ID NO: 318533
gccacuauugaguauguau

SEQ ID NO: 569988 - RNA, 19 nt, Artificial Sequence
  Description of Artificial Sequence: Synthetic oligonucleotide
  Antisense strand to SEQ ID NO: 569987
auacauacucaauaguggc

SEQ ID NO: 569989 - RNA, 19 nt, Artificial Sequence
  Description of Artificial Sequence: Synthetic oligonucleotide
  Sense strand starting at position 3172 of SEQ ID NO: 318533
auaagcugucuugggaauc

SEQ ID NO: 569990 - RNA, 19 nt, Artificial Sequence
  Description of Artificial Sequence: Synthetic oligonucleotide
  Antisense strand to SEQ ID NO: 569989
gauucccaagacagcuuau

SEQ ID NO: 569991 - RNA, 19 nt, Artificial Sequence
  Description of Artificial Sequence: Synthetic oligonucleotide
  Sense strand starting at position 3332 of SEQ ID NO: 318533
uaaggcaaucaguguaaag

SEQ ID NO: 569992 - RNA, 19 nt, Artificial Sequence
  Description of Artificial Sequence: Synthetic oligonucleotide
  Antisense strand to SEQ ID NO: 569991
cuuuacacugauugccuua

SEQ ID NO: 569993 - RNA, 19 nt, Artificial Sequence
  Description of Artificial Sequence: Synthetic oligonucleotide
  Sense strand starting at position 3334 of SEQ ID NO: 318533
aggcaaucaguguaaagua

SEQ ID NO: 569994 - RNA, 19 nt, Artificial Sequence
  Description of Artificial Sequence: Synthetic oligonucleotide
  Antisense strand to SEQ ID NO: 569993
uacuuuacacugauugccu

SEQ ID NO: 569995 - RNA, 19 nt, Artificial Sequence
  Description of Artificial Sequence: Synthetic oligonucleotide
  Sense strand starting at position 3355 of SEQ ID NO: 318533
uuguuuaagcccuaaagac

SEQ ID NO: 569996 - RNA, 19 nt, Artificial Sequence
  Description of Artificial Sequence: Synthetic oligonucleotide
  Antisense strand to SEQ ID NO: 569995
gucuuuagggcuuaaacaa

SEQ ID NO: 569997 - RNA, 19 nt, Artificial Sequence
  Description of Artificial Sequence: Synthetic oligonucleotide
  Sense strand starting at position 3393 of SEQ ID NO: 318533
acaguuucuggauguuuau

SEQ ID NO: 569998 - RNA, 19 nt, Artificial Sequence
  Description of Artificial Sequence: Synthetic oligonucleotide
  Antisense strand to SEQ ID NO: 569997
auaaacauccagaaacugu

SEQ ID NO: 569999 - RNA, 19 nt, Artificial Sequence
  Description of Artificial Sequence: Synthetic oligonucleotide
  Sense strand starting at position 3523 of SEQ ID NO: 318533
cagagauguuaggugaucu

SEQ ID NO: 570000 - RNA, 19 nt, Artificial Sequence
  Description of Artificial Sequence: Synthetic oligonucleotide
  Antisense strand to SEQ ID NO: 569999
agaucaccuaacaucucug

SEQ ID NO: 570001 - RNA, 19 nt, Artificial Sequence
  Description of Artificial Sequence: Synthetic oligonucleotide
  Sense strand starting at position 3524 of SEQ ID NO: 318533
agagauguuaggugaucug

SEQ ID NO: 570002 - RNA, 19 nt, Artificial Sequence
  Description of Artificial Sequence: Synthetic oligonucleotide
  Antisense strand to SEQ ID NO: 570001
cagaucaccuaacaucucu

SEQ ID NO: 570003 - RNA, 19 nt, Artificial Sequence
  Description of Artificial Sequence: Synthetic oligonucleotide
  Sense strand starting at position 3758 of SEQ ID NO: 318533
gccaaauuuggccgggcau

SEQ ID NO: 570004 - RNA, 19 nt, Artificial Sequence
  Description of Artificial Sequence: Synthetic oligonucleotide
  Antisense strand to SEQ ID NO: 570003
augcccggccaaauuuggc

SEQ ID NO: 570005 - RNA, 19 nt, Artificial Sequence
  Description of Artificial Sequence: Synthetic oligonucleotide
  Sense strand starting at position 42 of SEQ ID NO: 318534
ucauuaugguccuugcaau

SEQ ID NO: 570006 - RNA, 19 nt, Artificial Sequence
  Description of Artificial Sequence: Synthetic oligonucleotide
  Antisense strand to SEQ ID NO: 570005
auugcaaggaccauaauga

SEQ ID NO: 570007 - RNA, 19 nt, Artificial Sequence
  Description of Artificial Sequence: Synthetic oligonucleotide
  Sense strand starting at position 43 of SEQ ID NO: 318534
cauuaugguccuugcaaug

SEQ ID NO: 570008 - RNA, 19 nt, Artificial Sequence
  Description of Artificial Sequence: Synthetic oligonucleotide
  Antisense strand to SEQ ID NO: 570007
cauugcaaggaccauaaug

SEQ ID NO: 570009 - RNA, 19 nt, Artificial Sequence
  Description of Artificial Sequence: Synthetic oligonucleotide
  Sense strand starting at position 94 of SEQ ID NO: 318534
ugaagaagacucugcauaa

SEQ ID NO: 570010 - RNA, 19 nt, Artificial Sequence
  Description of Artificial Sequence: Synthetic oligonucleotide
  Antisense strand to SEQ ID NO: 570009
uuaugcagagucuucuuca

SEQ ID NO: 570011 - RNA, 19 nt, Artificial Sequence
  Description of Artificial Sequence: Synthetic oligonucleotide
  Sense strand starting at position 242 of SEQ ID NO: 318534
auacguguagccuaagaug

SEQ ID NO: 570012 - RNA, 19 nt, Artificial Sequence
  Description of Artificial Sequence: Synthetic oligonucleotide
  Antisense strand to SEQ ID NO: 570011
caucuuaggcuacacguau

SEQ ID NO: 570013 - RNA, 19 nt, Artificial Sequence
  Description of Artificial Sequence: Synthetic oligonucleotide
  Sense strand starting at position 250 of SEQ ID NO: 318534
agccuaagauguccuaacu

SEQ ID NO: 570014 - RNA, 19 nt, Artificial Sequence
  Description of Artificial Sequence: Synthetic oligonucleotide
  Antisense strand to SEQ ID NO: 570013
aguuaggacaucuuaggcu

SEQ ID NO: 570015 - RNA, 19 nt, Artificial Sequence
  Description of Artificial Sequence: Synthetic oligonucleotide
  Sense strand starting at position 503 of SEQ ID NO: 318534
uguagucaucccugauaaa

SEQ ID NO: 570016 - RNA, 19 nt, Artificial Sequence
  Description of Artificial Sequence: Synthetic oligonucleotide
  Antisense strand to SEQ ID NO: 570015
uuuaucagggaugacuaca

SEQ ID NO: 570017 - RNA, 19 nt, Artificial Sequence
  Description of Artificial Sequence: Synthetic oligonucleotide
  Sense strand starting at position 504 of SEQ ID NO: 318534
guagucaucccugauaaag

SEQ ID NO: 570018 - RNA, 19 nt, Artificial Sequence
  Description of Artificial Sequence: Synthetic oligonucleotide
  Antisense strand to SEQ ID NO: 570017
cuuuaucagggaugacuac

SEQ ID NO: 570019 - RNA, 19 nt, Artificial Sequence
  Description of Artificial Sequence: Synthetic oligonucleotide
  Sense strand starting at position 621 of SEQ ID NO: 318534
cuguguguucuugcacuca

SEQ ID NO: 570020 - RNA, 19 nt, Artificial Sequence
  Description of Artificial Sequence: Synthetic oligonucleotide
  Antisense strand to SEQ ID NO: 570019
ugagugcaagaacacacag

SEQ ID NO: 570021 - RNA, 19 nt, Artificial Sequence
  Description of Artificial Sequence: Synthetic oligonucleotide
  Sense strand starting at position 732 of SEQ ID NO: 318534
ggaggagacaguuguuaaa

SEQ ID NO: 570022 - RNA, 19 nt, Artificial Sequence
  Description of Artificial Sequence: Synthetic oligonucleotide
  Antisense strand to SEQ ID NO: 570021
uuuaacaacugucuccucc

SEQ ID NO: 570023 - RNA, 19 nt, Artificial Sequence
  Description of Artificial Sequence: Synthetic oligonucleotide
  Sense strand starting at position 743 of SEQ ID NO: 318534
uuguuaaaccagcauagaa

SEQ ID NO: 570024 - RNA, 19 nt, Artificial Sequence
  Description of Artificial Sequence: Synthetic oligonucleotide
  Antisense strand to SEQ ID NO: 570023
uucuaugcugguuuaacaa

SEQ ID NO: 570025 - RNA, 19 nt, Artificial Sequence
  Description of Artificial Sequence: Synthetic oligonucleotide
  Sense strand starting at position 815 of SEQ ID NO: 318534
aguuacgaauuauccuaaa

SEQ ID NO: 570026 - RNA, 19 nt, Artificial Sequence
  Description of Artificial Sequence: Synthetic oligonucleotide
  Antisense strand to SEQ ID NO: 570025
uuuaggauaauucguaacu

SEQ ID NO: 570027 - RNA, 19 nt, Artificial Sequence
  Description of Artificial Sequence: Synthetic oligonucleotide
  Sense strand starting at position 2199 of SEQ ID NO: 318534
aguguauucuccuccgaaa

SEQ ID NO: 570028 - RNA, 19 nt, Artificial Sequence
  Description of Artificial Sequence: Synthetic oligonucleotide
  Antisense strand to SEQ ID NO: 570027
uuucggaggagaauacacu

SEQ ID NO: 570029 - RNA, 19 nt, Artificial Sequence
  Description of Artificial Sequence: Synthetic oligonucleotide
  Sense strand starting at position 2201 of SEQ ID NO: 318534
uguauucuccuccgaaaca

SEQ ID NO: 570030 - RNA, 19 nt, Artificial Sequence
  Description of Artificial Sequence: Synthetic oligonucleotide
  Antisense strand to SEQ ID NO: 570029
uguuucggaggagaauaca

SEQ ID NO: 570031 - RNA, 19 nt, Artificial Sequence
  Description of Artificial Sequence: Synthetic oligonucleotide
  Sense strand starting at position 2521 of SEQ ID NO: 318534
gcugauaagguauaacagu

SEQ ID NO: 570032 - RNA, 19 nt, Artificial Sequence
  Description of Artificial Sequence: Synthetic oligonucleotide
  Antisense strand to SEQ ID NO: 570031
acuguuauaccuuaucagc

SEQ ID NO: 570033 - RNA, 19 nt, Artificial Sequence
  Description of Artificial Sequence: Synthetic oligonucleotide
  Sense strand starting at position 2543 of SEQ ID NO: 318534
gcacaaaggucauccauug

SEQ ID NO: 570034 - RNA, 19 nt, Artificial Sequence
  Description of Artificial Sequence: Synthetic oligonucleotide
  Antisense strand to SEQ ID NO: 570033
caauggaugaccuuugugc

SEQ ID NO: 570035 - RNA, 19 nt, Artificial Sequence
  Description of Artificial Sequence: Synthetic oligonucleotide
  Sense strand starting at position 2722 of SEQ ID NO: 318534
auuguacuguucuuuacaa

SEQ ID NO: 570036 - RNA, 19 nt, Artificial Sequence
  Description of Artificial Sequence: Synthetic oligonucleotide
  Antisense strand to SEQ ID NO: 570035
uuguaaagaacaguacaau

SEQ ID NO: 570037 - RNA, 19 nt, Artificial Sequence
  Description of Artificial Sequence: Synthetic oligonucleotide
  Sense strand starting at position 2723 of SEQ ID NO: 318534
uuguacuguucuuuacaaa

SEQ ID NO: 570038 - RNA, 19 nt, Artificial Sequence
  Description of Artificial Sequence: Synthetic oligonucleotide
  Antisense strand to SEQ ID NO: 570037
uuuguaaagaacaguacaa

SEQ ID NO: 570039 - RNA, 19 nt, Artificial Sequence
  Description of Artificial Sequence: Synthetic oligonucleotide
  Sense strand starting at position 2784 of SEQ ID NO: 318534
auauuagaacucuaucguu

SEQ ID NO: 570040 - RNA, 19 nt, Artificial Sequence
  Description of Artificial Sequence: Synthetic oligonucleotide
  Antisense strand to SEQ ID NO: 570039
aacgauagaguucuaauau

SEQ ID NO: 570041 - RNA, 19 nt, Artificial Sequence
  Description of Artificial Sequence: Synthetic oligonucleotide
  Sense strand starting at position 2789 of SEQ ID NO: 318534
agaacucuaucguuagaga

SEQ ID NO: 570042 - RNA, 19 nt, Artificial Sequence
  Description of Artificial Sequence: Synthetic oligonucleotide
  Antisense strand to SEQ ID NO: 570041
ucucuaacgauagaguucu

SEQ ID NO: 570043 - RNA, 19 nt, Artificial Sequence
  Description of Artificial Sequence: Synthetic oligonucleotide
  Sense strand starting at position 2794 of SEQ ID NO: 318534
ucuaucguuagagagcuaa

SEQ ID NO: 570044 - RNA, 19 nt, Artificial Sequence
  Description of Artificial Sequence: Synthetic oligonucleotide
  Antisense strand to SEQ ID NO: 570043
uuagcucucuaacgauaga

SEQ ID NO: 570045 - RNA, 19 nt, Artificial Sequence
  Description of Artificial Sequence: Synthetic oligonucleotide
  Sense strand starting at position 2798 of SEQ ID NO: 318534
ucguuagagagcuaagaca

SEQ ID NO: 570046 - RNA, 19 nt, Artificial Sequence
  Description of Artificial Sequence: Synthetic oligonucleotide
  Antisense strand to SEQ ID NO: 570045
ugucuuagcucucuaacga

SEQ ID NO: 570047 - RNA, 19 nt, Artificial Sequence
  Description of Artificial Sequence: Synthetic oligonucleotide
  Sense strand starting at position 2854 of SEQ ID NO: 318534
uugagagcuucagucgaua

SEQ ID NO: 570048 - RNA, 19 nt, Artificial Sequence
  Description of Artificial Sequence: Synthetic oligonucleotide
  Antisense strand to SEQ ID NO: 570047
uaucgacugaagcucucaa

SEQ ID NO: 570049 - RNA, 19 nt, Artificial Sequence
  Description of Artificial Sequence: Synthetic oligonucleotide
  Sense strand starting at position 2863 of SEQ ID NO: 318534
ucagucgauauucguauuu

SEQ ID NO: 570050 - RNA, 19 nt, Artificial Sequence
  Description of Artificial Sequence: Synthetic oligonucleotide
  Antisense strand to SEQ ID NO: 570049
aaauacgaauaucgacuga

SEQ ID NO: 570051 - RNA, 19 nt, Artificial Sequence
  Description of Artificial Sequence: Synthetic oligonucleotide
  Sense strand starting at position 2899 of SEQ ID NO: 318534
uuauaaugcuauuugcagu

SEQ ID NO: 570052 - RNA, 19 nt, Artificial Sequence
  Description of Artificial Sequence: Synthetic oligonucleotide
  Antisense strand to SEQ ID NO: 570051
acugcaaauagcauuauaa

SEQ ID NO: 570053 - RNA, 19 nt, Artificial Sequence
  Description of Artificial Sequence: Synthetic oligonucleotide
  Sense strand starting at position 3024 of SEQ ID NO: 318534
aaguuaguggaaugguuaa

SEQ ID NO: 570054 - RNA, 19 nt, Artificial Sequence
  Description of Artificial Sequence: Synthetic oligonucleotide
  Antisense strand to SEQ ID NO: 570053
uuaaccauuccacuaacuu

SEQ ID NO: 570055 - RNA, 19 nt, Artificial Sequence
  Description of Artificial Sequence: Synthetic oligonucleotide
  Sense strand starting at position 3152 of SEQ ID NO: 318534
gugaguauaaaugguuaau

SEQ ID NO: 570056 - RNA, 19 nt, Artificial Sequence
  Description of Artificial Sequence: Synthetic oligonucleotide
  Antisense strand to SEQ ID NO: 570055
auuaaccauuuauacucac

SEQ ID NO: 570057 - RNA, 19 nt, Artificial Sequence
  Description of Artificial Sequence: Synthetic oligonucleotide
  Sense strand starting at position 3154 of SEQ ID NO: 318534
gaguauaaaugguuaauug

SEQ ID NO: 570058 - RNA, 19 nt, Artificial Sequence
  Description of Artificial Sequence: Synthetic oligonucleotide
  Antisense strand to SEQ ID NO: 570057
caauuaaccauuuauacuc

SEQ ID NO: 570059 - RNA, 19 nt, Artificial Sequence
  Description of Artificial Sequence: Synthetic oligonucleotide
  Sense strand starting at position 3230 of SEQ ID NO: 318534
ucauguucugcagauggau

SEQ ID NO: 570060 - RNA, 19 nt, Artificial Sequence
  Description of Artificial Sequence: Synthetic oligonucleotide
  Antisense strand to SEQ ID NO: 570059
auccaucugcagaacauga

SEQ ID NO: 570061 - RNA, 19 nt, Artificial Sequence
  Description of Artificial Sequence: Synthetic oligonucleotide
  Sense strand starting at position 3242 of SEQ ID NO: 318534
gauggauucuggcuaaccu

SEQ ID NO: 570062 - RNA, 19 nt, Artificial Sequence
  Description of Artificial Sequence: Synthetic oligonucleotide
  Antisense strand to SEQ ID NO: 570061
agguuagccagaauccauc

SEQ ID NO: 570063 - RNA, 19 nt, Artificial Sequence
  Description of Artificial Sequence: Synthetic oligonucleotide
  Sense strand starting at position 3300 of SEQ ID NO: 318534
cgagcuccaguuuauuaau

SEQ ID NO: 570064 - RNA, 19 nt, Artificial Sequence
  Description of Artificial Sequence: Synthetic oligonucleotide
  Antisense strand to SEQ ID NO: 570063
auuaauaaacuggagcucg

SEQ ID NO: 570065 - RNA, 19 nt, Artificial Sequence
  Description of Artificial Sequence: Synthetic oligonucleotide
  Sense strand starting at position 3549 of SEQ ID NO: 318534
cucuucuagcuuuagucua

SEQ ID NO: 570066 - RNA, 19 nt, Artificial Sequence
  Description of Artificial Sequence: Synthetic oligonucleotide
  Antisense strand to SEQ ID NO: 570065
uagacuaaagcuagaagag

SEQ ID NO: 570067 - RNA, 19 nt, Artificial Sequence
  Description of Artificial Sequence: Synthetic oligonucleotide
  Sense strand starting at position 3614 of SEQ ID NO: 318534
uggagcaguuggucucaga

SEQ ID NO: 570068 - RNA, 19 nt, Artificial Sequence
  Description of Artificial Sequence: Synthetic oligonucleotide
  Antisense strand to SEQ ID NO: 570067
ucugagaccaacugcucca

SEQ ID NO: 570069 - RNA, 19 nt, Artificial Sequence
  Description of Artificial Sequence: Synthetic oligonucleotide
  Sense strand starting at position 3688 of SEQ ID NO: 318534
gaaagauaggcguggcauu

SEQ ID NO: 570070 - RNA, 19 nt, Artificial Sequence
  Description of Artificial Sequence: Synthetic oligonucleotide
  Antisense strand to SEQ ID NO: 570069
aaugccacgccuaucuuuc

SEQ ID NO: 570071 - RNA, 19 nt, Artificial Sequence
  Description of Artificial Sequence: Synthetic oligonucleotide
  Sense strand starting at position 3689 of SEQ ID NO: 318534
aaagauaggcguggcauuu

SEQ ID NO: 570072 - RNA, 19 nt, Artificial Sequence
  Description of Artificial Sequence: Synthetic oligonucleotide
  Antisense strand to SEQ ID NO: 570071
aaaugccacgccuaucuuu

SEQ ID NO: 570073 - RNA, 19 nt, Artificial Sequence
  Description of Artificial Sequence: Synthetic oligonucleotide
  Sense strand starting at position 3831 of SEQ ID NO: 318534
gagcuuguuugacuuauua

SEQ ID NO: 570074 - RNA, 19 nt, Artificial Sequence
  Description of Artificial Sequence: Synthetic oligonucleotide
  Antisense strand to SEQ ID NO: 570073
uaauaagucaaacaagcuc

SEQ ID NO: 570075 - RNA, 19 nt, Artificial Sequence
  Description of Artificial Sequence: Synthetic oligonucleotide
  Sense strand starting at position 3833 of SEQ ID NO: 318534
gcuuguuugacuuauuagg

SEQ ID NO: 570076 - RNA, 19 nt, Artificial Sequence
  Description of Artificial Sequence: Synthetic oligonucleotide
  Antisense strand to SEQ ID NO: 570075
ccuaauaagucaaacaagc

SEQ ID NO: 570077 - RNA, 19 nt, Artificial Sequence
  Description of Artificial Sequence: Synthetic oligonucleotide
  Sense strand starting at position 3835 of SEQ ID NO: 318534
uuguuugacuuauuaggaa

SEQ ID NO: 570078 - RNA, 19 nt, Artificial Sequence
  Description of Artificial Sequence: Synthetic oligonucleotide
  Antisense strand to SEQ ID NO: 570077
uuccuaauaagucaaacaa

SEQ ID NO: 570079 - RNA, 19 nt, Artificial Sequence
  Description of Artificial Sequence: Synthetic oligonucleotide
  Sense strand starting at position 3875 of SEQ ID NO: 318534
ugggccagacuuuguacua

SEQ ID NO: 570080 - RNA, 19 nt, Artificial Sequence
  Description of Artificial Sequence: Synthetic oligonucleotide
  Antisense strand to SEQ ID NO: 570079
uaguacaaagucuggccca

SEQ ID NO: 570081 - RNA, 19 nt, Artificial Sequence
  Description of Artificial Sequence: Synthetic oligonucleotide
  Sense strand starting at position 3876 of SEQ ID NO: 318534
gggccagacuuuguacuaa

SEQ ID NO: 570082 - RNA, 19 nt, Artificial Sequence
  Description of Artificial Sequence: Synthetic oligonucleotide
  Antisense strand to SEQ ID NO: 570081
uuaguacaaagucuggccc

SEQ ID NO: 570083 - RNA, 19 nt, Artificial Sequence
  Description of Artificial Sequence: Synthetic oligonucleotide
  Sense strand starting at position 3973 of SEQ ID NO: 318534
uguauauuccuauauuagc

SEQ ID NO: 570084 - RNA, 19 nt, Artificial Sequence
  Description of Artificial Sequence: Synthetic oligonucleotide
  Antisense strand to SEQ ID NO: 570083
gcuaauauaggaauauaca

SEQ ID NO: 570085 - RNA, 19 nt, Artificial Sequence
  Description of Artificial Sequence: Synthetic oligonucleotide
  Sense strand starting at position 39 of SEQ ID NO: 318535
ucauuaugguccuugcaau

SEQ ID NO: 570086 - RNA, 19 nt, Artificial Sequence
  Description of Artificial Sequence: Synthetic oligonucleotide
  Antisense strand to SEQ ID NO: 570085
auugcaaggaccauaauga

SEQ ID NO: 570087 - RNA, 19 nt, Artificial Sequence
  Description of Artificial Sequence: Synthetic oligonucleotide
  Sense strand starting at position 40 of SEQ ID NO: 318535
cauuaugguccuugcaaug

SEQ ID NO: 570088 - RNA, 19 nt, Artificial Sequence
  Description of Artificial Sequence: Synthetic oligonucleotide
  Antisense strand to SEQ ID NO: 570087
cauugcaaggaccauaaug

SEQ ID NO: 570089 - RNA, 19 nt, Artificial Sequence
  Description of Artificial Sequence: Synthetic oligonucleotide
  Sense strand starting at position 91 of SEQ ID NO: 318535
ugaagaagacucugcauaa

SEQ ID NO: 570090 - RNA, 19 nt, Artificial Sequence
  Description of Artificial Sequence: Synthetic oligonucleotide
  Antisense strand to SEQ ID NO: 570089
uuaugcagagucuucuuca

SEQ ID NO: 570091 - RNA, 19 nt, Artificial Sequence
  Description of Artificial Sequence: Synthetic oligonucleotide
  Sense strand starting at position 239 of SEQ ID NO: 318535
auacguguagccuaagaug

SEQ ID NO: 570092 - RNA, 19 nt, Artificial Sequence
  Description of Artificial Sequence: Synthetic oligonucleotide
  Antisense strand to SEQ ID NO: 570091
caucuuaggcuacacguau

SEQ ID NO: 570093 - RNA, 19 nt, Artificial Sequence
  Description of Artificial Sequence: Synthetic oligonucleotide
  Sense strand starting at position 247 of SEQ ID NO: 318535
agccuaagauguccuaacu

SEQ ID NO: 570094 - RNA, 19 nt, Artificial Sequence
  Description of Artificial Sequence: Synthetic oligonucleotide
  Antisense strand to SEQ ID NO: 570093
aguuaggacaucuuaggcu

SEQ ID NO: 570095 - RNA, 19 nt, Artificial Sequence
  Description of Artificial Sequence: Synthetic oligonucleotide
  Sense strand starting at position 500 of SEQ ID NO: 318535
uguagucaucccugauaaa

SEQ ID NO: 570096 - RNA, 19 nt, Artificial Sequence
  Description of Artificial Sequence: Synthetic oligonucleotide
  Antisense strand to SEQ ID NO: 570095
uuuaucagggaugacuaca

SEQ ID NO: 570097 - RNA, 19 nt, Artificial Sequence
  Description of Artificial Sequence: Synthetic oligonucleotide
  Sense strand starting at position 501 of SEQ ID NO: 318535
guagucaucccugauaaag

SEQ ID NO: 570098 - RNA, 19 nt, Artificial Sequence
  Description of Artificial Sequence: Synthetic oligonucleotide
  Antisense strand to SEQ ID NO: 570097
cuuuaucagggaugacuac

SEQ ID NO: 570099 - RNA, 19 nt, Artificial Sequence
  Description of Artificial Sequence: Synthetic oligonucleotide
  Sense strand starting at position 618 of SEQ ID NO: 318535
cuguguguucuugcacuca

SEQ ID NO: 570100 - RNA, 19 nt, Artificial Sequence
  Description of Artificial Sequence: Synthetic oligonucleotide
  Antisense strand to SEQ ID NO: 570099
ugagugcaagaacacacag

SEQ ID NO: 570101 - RNA, 19 nt, Artificial Sequence
  Description of Artificial Sequence: Synthetic oligonucleotide
  Sense strand starting at position 729 of SEQ ID NO: 318535
ggaggagacaguuguuaaa

SEQ ID NO: 570102 - RNA, 19 nt, Artificial Sequence
  Description of Artificial Sequence: Synthetic oligonucleotide
  Antisense strand to SEQ ID NO: 570101
uuuaacaacugucuccucc

SEQ ID NO: 570103 - RNA, 19 nt, Artificial Sequence
  Description of Artificial Sequence: Synthetic oligonucleotide
  Sense strand starting at position 740 of SEQ ID NO: 318535
uuguuaaaccagcauagaa

SEQ ID NO: 570104 - RNA, 19 nt, Artificial Sequence
  Description of Artificial Sequence: Synthetic oligonucleotide
  Antisense strand to SEQ ID NO: 570103
uucuaugcugguuuaacaa

SEQ ID NO: 570105 - RNA, 19 nt, Artificial Sequence
  Description of Artificial Sequence: Synthetic oligonucleotide
  Sense strand starting at position 812 of SEQ ID NO: 318535
aguuacgaauuauccuaaa

SEQ ID NO: 570106 - RNA, 19 nt, Artificial Sequence
  Description of Artificial Sequence: Synthetic oligonucleotide
  Antisense strand to SEQ ID NO: 570105
uuuaggauaauucguaacu

SEQ ID NO: 570107 - RNA, 19 nt, Artificial Sequence
  Description of Artificial Sequence: Synthetic oligonucleotide
  Sense strand starting at position 2196 of SEQ ID NO: 318535
aguguauucuccuccgaaa

SEQ ID NO: 570108 - RNA, 19 nt, Artificial Sequence
  Description of Artificial Sequence: Synthetic oligonucleotide
  Antisense strand to SEQ ID NO: 570107
uuucggaggagaauacacu

SEQ ID NO: 570109 - RNA, 19 nt, Artificial Sequence
  Description of Artificial Sequence: Synthetic oligonucleotide
  Sense strand starting at position 2198 of SEQ ID NO: 318535
uguauucuccuccgaaaca

SEQ ID NO: 570110 - RNA, 19 nt, Artificial Sequence
  Description of Artificial Sequence: Synthetic oligonucleotide
  Antisense strand to SEQ ID NO: 570109
uguuucggaggagaauaca

SEQ ID NO: 570111 - RNA, 19 nt, Artificial Sequence
  Description of Artificial Sequence: Synthetic oligonucleotide
  Sense strand starting at position 2518 of SEQ ID NO: 318535
gcugauaagguauaacagu

SEQ ID NO: 570112 - RNA, 19 nt, Artificial Sequence
  Description of Artificial Sequence: Synthetic oligonucleotide
  Antisense strand to SEQ ID NO: 570111
acuguuauaccuuaucagc

SEQ ID NO: 570113 - RNA, 19 nt, Artificial Sequence
  Description of Artificial Sequence: Synthetic oligonucleotide
  Sense strand starting at position 2540 of SEQ ID NO: 318535
gcacaaaggucauccauug

SEQ ID NO: 570114 - RNA, 19 nt, Artificial Sequence
  Description of Artificial Sequence: Synthetic oligonucleotide
  Antisense strand to SEQ ID NO: 570113
caauggaugaccuuugugc

SEQ ID NO: 570115 - RNA, 19 nt, Artificial Sequence
  Description of Artificial Sequence: Synthetic oligonucleotide
  Sense strand starting at position 2719 of SEQ ID NO: 318535
auuguacuguucuuuacaa

SEQ ID NO: 570116 - RNA, 19 nt, Artificial Sequence
  Description of Artificial Sequence: Synthetic oligonucleotide
  Antisense strand to SEQ ID NO: 570115
uuguaaagaacaguacaau

SEQ ID NO: 570117 - RNA, 19 nt, Artificial Sequence
  Description of Artificial Sequence: Synthetic oligonucleotide
  Sense strand starting at position 2720 of SEQ ID NO: 318535
uuguacuguucuuuacaaa

SEQ ID NO: 570118 - RNA, 19 nt, Artificial Sequence
  Description of Artificial Sequence: Synthetic oligonucleotide
  Antisense strand to SEQ ID NO: 570117
uuuguaaagaacaguacaa

SEQ ID NO: 570119 - RNA, 19 nt, Artificial Sequence
  Description of Artificial Sequence: Synthetic oligonucleotide
  Sense strand starting at position 2781 of SEQ ID NO: 318535
auauuagaacucuaucguu

SEQ ID NO: 570120 - RNA, 19 nt, Artificial Sequence
  Description of Artificial Sequence: Synthetic oligonucleotide
  Antisense strand to SEQ ID NO: 570119
aacgauagaguucuaauau

SEQ ID NO: 570121 - RNA, 19 nt, Artificial Sequence
  Description of Artificial Sequence: Synthetic oligonucleotide
  Sense strand starting at position 2786 of SEQ ID NO: 318535
agaacucuaucguuagaga

SEQ ID NO: 570122 - RNA, 19 nt, Artificial Sequence
  Description of Artificial Sequence: Synthetic oligonucleotide
  Antisense strand to SEQ ID NO: 570121
ucucuaacgauagaguucu

SEQ ID NO: 570123 - RNA, 19 nt, Artificial Sequence
  Description of Artificial Sequence: Synthetic oligonucleotide
  Sense strand starting at position 2791 of SEQ ID NO: 318535
ucuaucguuagagagcuaa

SEQ ID NO: 570124 - RNA, 19 nt, Artificial Sequence
  Description of Artificial Sequence: Synthetic oligonucleotide
  Antisense strand to SEQ ID NO: 570123
uuagcucucuaacgauaga

SEQ ID NO: 570125 - RNA, 19 nt, Artificial Sequence
  Description of Artificial Sequence: Synthetic oligonucleotide
  Sense strand starting at position 2795 of SEQ ID NO: 318535
ucguuagagagcuaagaca

SEQ ID NO: 570126 - RNA, 19 nt, Artificial Sequence
  Description of Artificial Sequence: Synthetic oligonucleotide
  Antisense strand to SEQ ID NO: 570125
ugucuuagcucucuaacga

SEQ ID NO: 570127 - RNA, 19 nt, Artificial Sequence
  Description of Artificial Sequence: Synthetic oligonucleotide
  Sense strand starting at position 2851 of SEQ ID NO: 318535
uugagagcuucagucgaua

SEQ ID NO: 570128 - RNA, 19 nt, Artificial Sequence
  Description of Artificial Sequence: Synthetic oligonucleotide
  Antisense strand to SEQ ID NO: 570127
uaucgacugaagcucucaa

SEQ ID NO: 570129 - RNA, 19 nt, Artificial Sequence
  Description of Artificial Sequence: Synthetic oligonucleotide
  Sense strand starting at position 2860 of SEQ ID NO: 318535
ucagucgauauucguauuu

SEQ ID NO: 570130 - RNA, 19 nt, Artificial Sequence
  Description of Artificial Sequence: Synthetic oligonucleotide
  Antisense strand to SEQ ID NO: 570129
aaauacgaauaucgacuga

SEQ ID NO: 570131 - RNA, 19 nt, Artificial Sequence
  Description of Artificial Sequence: Synthetic oligonucleotide
  Sense strand starting at position 2896 of SEQ ID NO: 318535
uuauaaugcuauuugcagu

SEQ ID NO: 570132 - RNA, 19 nt, Artificial Sequence
  Description of Artificial Sequence: Synthetic oligonucleotide
  Antisense strand to SEQ ID NO: 570131
acugcaaauagcauuauaa

SEQ ID NO: 570133 - RNA, 19 nt, Artificial Sequence
  Description of Artificial Sequence: Synthetic oligonucleotide
  Sense strand starting at position 3021 of SEQ ID NO: 318535
aaguuaguggaaugguuaa

SEQ ID NO: 570134 - RNA, 19 nt, Artificial Sequence
  Description of Artificial Sequence: Synthetic oligonucleotide
  Antisense strand to SEQ ID NO: 570133
uuaaccauuccacuaacuu

SEQ ID NO: 570135 - RNA, 19 nt, Artificial Sequence
  Description of Artificial Sequence: Synthetic oligonucleotide
  Sense strand starting at position 3149 of SEQ ID NO: 318535
gugaguauaaaugguuaau

SEQ ID NO: 570136 - RNA, 19 nt, Artificial Sequence
  Description of Artificial Sequence: Synthetic oligonucleotide
  Antisense strand to SEQ ID NO: 570135
auuaaccauuuauacucac

SEQ ID NO: 570137 - RNA, 19 nt, Artificial Sequence
  Description of Artificial Sequence: Synthetic oligonucleotide
  Sense strand starting at position 3151 of SEQ ID NO: 318535
gaguauaaaugguuaauug

SEQ ID NO: 570138 - RNA, 19 nt, Artificial Sequence
  Description of Artificial Sequence: Synthetic oligonucleotide
  Antisense strand to SEQ ID NO: 570137
caauuaaccauuuauacuc

SEQ ID NO: 570139 - RNA, 19 nt, Artificial Sequence
  Description of Artificial Sequence: Synthetic oligonucleotide
  Sense strand starting at position 3227 of SEQ ID NO: 318535
ucauguucugcagauggau

SEQ ID NO: 570140 - RNA, 19 nt, Artificial Sequence
  Description of Artificial Sequence: Synthetic oligonucleotide
  Antisense strand to SEQ ID NO: 570139
auccaucugcagaacauga

SEQ ID NO: 570141 - RNA, 19 nt, Artificial Sequence
  Description of Artificial Sequence: Synthetic oligonucleotide
  Sense strand starting at position 3239 of SEQ ID NO: 318535
gauggauucuggcuaaccu

SEQ ID NO: 570142 - RNA, 19 nt, Artificial Sequence
  Description of Artificial Sequence: Synthetic oligonucleotide
  Antisense strand to SEQ ID NO: 570141
agguuagccagaauccauc

SEQ ID NO: 570143 - RNA, 19 nt, Artificial Sequence
  Description of Artificial Sequence: Synthetic oligonucleotide
  Sense strand starting at position 3297 of SEQ ID NO: 318535
cgagcuccaguuuauuaau

SEQ ID NO: 570144 - RNA, 19 nt, Artificial Sequence
  Description of Artificial Sequence: Synthetic oligonucleotide
  Antisense strand to SEQ ID NO: 570143
auuaauaaacuggagcucg

SEQ ID NO: 570145 - RNA, 19 nt, Artificial Sequence
  Description of Artificial Sequence: Synthetic oligonucleotide
  Sense strand starting at position 3546 of SEQ ID NO: 318535
cucuucuagcuuuagucua

SEQ ID NO: 570146 - RNA, 19 nt, Artificial Sequence
  Description of Artificial Sequence: Synthetic oligonucleotide
  Antisense strand to SEQ ID NO: 570145
uagacuaaagcuagaagag

SEQ ID NO: 570147 - RNA, 19 nt, Artificial Sequence
  Description of Artificial Sequence: Synthetic oligonucleotide
  Sense strand starting at position 3611 of SEQ ID NO: 318535
uggagcaguuggucucaga

SEQ ID NO: 570148 - RNA, 19 nt, Artificial Sequence
  Description of Artificial Sequence: Synthetic oligonucleotide
  Antisense strand to SEQ ID NO: 570147
ucugagaccaacugcucca

SEQ ID NO: 570149 - RNA, 19 nt, Artificial Sequence
  Description of Artificial Sequence: Synthetic oligonucleotide
  Sense strand starting at position 3685 of SEQ ID NO: 318535
gaaagauaggcguggcauu

SEQ ID NO: 570150 - RNA, 19 nt, Artificial Sequence
  Description of Artificial Sequence: Synthetic oligonucleotide
  Antisense strand to SEQ ID NO: 570149
aaugccacgccuaucuuuc

SEQ ID NO: 570151 - RNA, 19 nt, Artificial Sequence
  Description of Artificial Sequence: Synthetic oligonucleotide
  Sense strand starting at position 3686 of SEQ ID NO: 318535
aaagauaggcguggcauuu

SEQ ID NO: 570152 - RNA, 19 nt, Artificial Sequence
  Description of Artificial Sequence: Synthetic oligonucleotide
  Antisense strand to SEQ ID NO: 570151
aaaugccacgccuaucuuu

SEQ ID NO: 570153 - RNA, 19 nt, Artificial Sequence
  Description of Artificial Sequence: Synthetic oligonucleotide
  Sense strand starting at position 3828 of SEQ ID NO: 318535
gagcuuguuugacuuauua

SEQ ID NO: 570154 - RNA, 19 nt, Artificial Sequence
  Description of Artificial Sequence: Synthetic oligonucleotide
  Antisense strand to SEQ ID NO: 570153
uaauaagucaaacaagcuc

SEQ ID NO: 570155 - RNA, 19 nt, Artificial Sequence
  Description of Artificial Sequence: Synthetic oligonucleotide
  Sense strand starting at position 3830 of SEQ ID NO: 318535
gcuuguuugacuuauuagg

SEQ ID NO: 570156 - RNA, 19 nt, Artificial Sequence
  Description of Artificial Sequence: Synthetic oligonucleotide
  Antisense strand to SEQ ID NO: 570155
ccuaauaagucaaacaagc

SEQ ID NO: 570157 - RNA, 19 nt, Artificial Sequence
  Description of Artificial Sequence: Synthetic oligonucleotide
  Sense strand starting at position 3832 of SEQ ID NO: 318535
uuguuugacuuauuaggaa

SEQ ID NO: 570158 - RNA, 19 nt, Artificial Sequence
  Description of Artificial Sequence: Synthetic oligonucleotide
  Antisense strand to SEQ ID NO: 570157
uuccuaauaagucaaacaa

SEQ ID NO: 570159 - RNA, 19 nt, Artificial Sequence
  Description of Artificial Sequence: Synthetic oligonucleotide
  Sense strand starting at position 3872 of SEQ ID NO: 318535
ugggccagacuuuguacua

SEQ ID NO: 570160 - RNA, 19 nt, Artificial Sequence
  Description of Artificial Sequence: Synthetic oligonucleotide
  Antisense strand to SEQ ID NO: 570159
uaguacaaagucuggccca

SEQ ID NO: 570161 - RNA, 19 nt, Artificial Sequence
  Description of Artificial Sequence: Synthetic oligonucleotide
  Sense strand starting at position 3873 of SEQ ID NO: 318535
gggccagacuuuguacuaa

SEQ ID NO: 570162 - RNA, 19 nt, Artificial Sequence
  Description of Artificial Sequence: Synthetic oligonucleotide
  Antisense strand to SEQ ID NO: 570161
uuaguacaaagucuggccc

SEQ ID NO: 570163 - RNA, 19 nt, Artificial Sequence
  Description of Artificial Sequence: Synthetic oligonucleotide
  Sense strand starting at position 3970 of SEQ ID NO: 318535
uguauauuccuauauuagc

SEQ ID NO: 570164 - RNA, 19 nt, Artificial Sequence
  Description of Artificial Sequence: Synthetic oligonucleotide
  Antisense strand to SEQ ID NO: 570163
gcuaauauaggaauauaca

SEQ ID NO: 570165 - RNA, 19 nt, Artificial Sequence
  Description of Artificial Sequence: Synthetic oligonucleotide
  Sense strand starting at position 190 of SEQ ID NO: 318536
uuaaucuacuguccauagu

SEQ ID NO: 570166 - RNA, 19 nt, Artificial Sequence
  Description of Artificial Sequence: Synthetic oligonucleotide
  Antisense strand to SEQ ID NO: 570165
acuauggacaguagauuaa

SEQ ID NO: 570167 - RNA, 19 nt, Artificial Sequence
  Description of Artificial Sequence: Synthetic oligonucleotide
  Sense strand starting at position 271 of SEQ ID NO: 318536
accagaauugccuauugca

SEQ ID NO: 570168 - RNA, 19 nt, Artificial Sequence
  Description of Artificial Sequence: Synthetic oligonucleotide
  Antisense strand to SEQ ID NO: 570167
ugcaauaggcaauucuggu

SEQ ID NO: 570169 - RNA, 19 nt, Artificial Sequence
  Description of Artificial Sequence: Synthetic oligonucleotide
  Sense strand starting at position 595 of SEQ ID NO: 318536
gguggaguaugucuauaau

SEQ ID NO: 570170 - RNA, 19 nt, Artificial Sequence
  Description of Artificial Sequence: Synthetic oligonucleotide
  Antisense strand to SEQ ID NO: 570169
auuauagacauacuccacc

SEQ ID NO: 570171 - RNA, 19 nt, Artificial Sequence
  Description of Artificial Sequence: Synthetic oligonucleotide
  Sense strand starting at position 841 of SEQ ID NO: 318536
augggaagaacucguuaaa

SEQ ID NO: 570172 - RNA, 19 nt, Artificial Sequence
  Description of Artificial Sequence: Synthetic oligonucleotide
  Antisense strand to SEQ ID NO: 570171
uuuaacgaguucuucccau

SEQ ID NO: 570173 - RNA, 19 nt, Artificial Sequence
  Description of Artificial Sequence: Synthetic oligonucleotide
  Sense strand starting at position 915 of SEQ ID NO: 318536
uuucgacacuaucucagaa

SEQ ID NO: 570174 - RNA, 19 nt, Artificial Sequence
  Description of Artificial Sequence: Synthetic oligonucleotide
  Antisense strand to SEQ ID NO: 570173
uucugagauagugucgaaa

SEQ ID NO: 570175 - RNA, 19 nt, Artificial Sequence
  Description of Artificial Sequence: Synthetic oligonucleotide
  Sense strand starting at position 927 of SEQ ID NO: 318536
cucagaacuuaggaaggau

SEQ ID NO: 570176 - RNA, 19 nt, Artificial Sequence
  Description of Artificial Sequence: Synthetic oligonucleotide
  Antisense strand to SEQ ID NO: 570175
auccuuccuaaguucugag

SEQ ID NO: 570177 - RNA, 19 nt, Artificial Sequence
  Description of Artificial Sequence: Synthetic oligonucleotide
  Sense strand starting at position 986 of SEQ ID NO: 318536
uucggguuggugggagaau

SEQ ID NO: 570178 - RNA, 19 nt, Artificial Sequence
  Description of Artificial Sequence: Synthetic oligonucleotide
  Antisense strand to SEQ ID NO: 570177
auucucccaccaacccgaa

SEQ ID NO: 570179 - RNA, 19 nt, Artificial Sequence
  Description of Artificial Sequence: Synthetic oligonucleotide
  Sense strand starting at position 1047 of SEQ ID NO: 318536
ugcuuugcuguuuagauuu

SEQ ID NO: 570180 - RNA, 19 nt, Artificial Sequence
  Description of Artificial Sequence: Synthetic oligonucleotide
  Antisense strand to SEQ ID NO: 570179
aaaucuaaacagcaaagca

SEQ ID NO: 570181 - RNA, 19 nt, Artificial Sequence
  Description of Artificial Sequence: Synthetic oligonucleotide
  Sense strand starting at position 1131 of SEQ ID NO: 318536
ccucgaugugcucaguuaa

SEQ ID NO: 570182 - RNA, 19 nt, Artificial Sequence
  Description of Artificial Sequence: Synthetic oligonucleotide
  Antisense strand to SEQ ID NO: 570181
uuaacugagcacaucgagg

SEQ ID NO: 570183 - RNA, 19 nt, Artificial Sequence
  Description of Artificial Sequence: Synthetic oligonucleotide
  Sense strand starting at position 1195 of SEQ ID NO: 318536
uuugguuucgucgccugaa

SEQ ID NO: 570184 - RNA, 19 nt, Artificial Sequence
  Description of Artificial Sequence: Synthetic oligonucleotide
  Antisense strand to SEQ ID NO: 570183
uucaggcgacgaaaccaaa

SEQ ID NO: 570185 - RNA, 19 nt, Artificial Sequence
  Description of Artificial Sequence: Synthetic oligonucleotide
  Sense strand starting at position 1267 of SEQ ID NO: 318536
uuaaguagucgccagacua

SEQ ID NO: 570186 - RNA, 19 nt, Artificial Sequence
  Description of Artificial Sequence: Synthetic oligonucleotide
  Antisense strand to SEQ ID NO: 570185
uagucuggcgacuacuuaa

SEQ ID NO: 570187 - RNA, 19 nt, Artificial Sequence
  Description of Artificial Sequence: Synthetic oligonucleotide
  Sense strand starting at position 1306 of SEQ ID NO: 318536
gagaaaggcuucucacaga

SEQ ID NO: 570188 - RNA, 19 nt, Artificial Sequence
  Description of Artificial Sequence: Synthetic oligonucleotide
  Antisense strand to SEQ ID NO: 570187
ucugugagaagccuuucuc

SEQ ID NO: 570189 - RNA, 19 nt, Artificial Sequence
  Description of Artificial Sequence: Synthetic oligonucleotide
  Sense strand starting at position 2048 of SEQ ID NO: 318536
ccacguugugucgcauuga

SEQ ID NO: 570190 - RNA, 19 nt, Artificial Sequence
  Description of Artificial Sequence: Synthetic oligonucleotide
  Antisense strand to SEQ ID NO: 570189
ucaaugcgacacaacgugg

SEQ ID NO: 570191 - RNA, 19 nt, Artificial Sequence
  Description of Artificial Sequence: Synthetic oligonucleotide
  Sense strand starting at position 2108 of SEQ ID NO: 318536
gcacuuaccugucccuaca

SEQ ID NO: 570192 - RNA, 19 nt, Artificial Sequence
  Description of Artificial Sequence: Synthetic oligonucleotide
  Antisense strand to SEQ ID NO: 570191
uguagggacagguaagugc

SEQ ID NO: 570193 - RNA, 19 nt, Artificial Sequence
  Description of Artificial Sequence: Synthetic oligonucleotide
  Sense strand starting at position 2154 of SEQ ID NO: 318536
agcggauuccuguagggca

SEQ ID NO: 570194 - RNA, 19 nt, Artificial Sequence
  Description of Artificial Sequence: Synthetic oligonucleotide
  Antisense strand to SEQ ID NO: 570193
ugcccuacaggaauccgcu

SEQ ID NO: 570195 - RNA, 19 nt, Artificial Sequence
  Description of Artificial Sequence: Synthetic oligonucleotide
  Sense strand starting at position 2230 of SEQ ID NO: 318536
uuuccucugcguuagggau

SEQ ID NO: 570196 - RNA, 19 nt, Artificial Sequence
  Description of Artificial Sequence: Synthetic oligonucleotide
  Antisense strand to SEQ ID NO: 570195
aucccuaacgcagaggaaa

SEQ ID NO: 570197 - RNA, 19 nt, Artificial Sequence
  Description of Artificial Sequence: Synthetic oligonucleotide
  Sense strand starting at position 2537 of SEQ ID NO: 318536
ccgcacucggccuagagau

SEQ ID NO: 570198 - RNA, 19 nt, Artificial Sequence
  Description of Artificial Sequence: Synthetic oligonucleotide
  Antisense strand to SEQ ID NO: 570197
aucucuaggccgagugcgg

SEQ ID NO: 570199 - RNA, 19 nt, Artificial Sequence
  Description of Artificial Sequence: Synthetic oligonucleotide
  Sense strand starting at position 2550 of SEQ ID NO: 318536
agagauucuuaaucuaggu

SEQ ID NO: 570200 - RNA, 19 nt, Artificial Sequence
  Description of Artificial Sequence: Synthetic oligonucleotide
  Antisense strand to SEQ ID NO: 570199
accuagauuaagaaucucu

SEQ ID NO: 570201 - RNA, 19 nt, Artificial Sequence
  Description of Artificial Sequence: Synthetic oligonucleotide
  Sense strand starting at position 2725 of SEQ ID NO: 318536
uuugaacaaugccuuugau

SEQ ID NO: 570202 - RNA, 19 nt, Artificial Sequence
  Description of Artificial Sequence: Synthetic oligonucleotide
  Antisense strand to SEQ ID NO: 570201
aucaaaggcauuguucaaa

SEQ ID NO: 570203 - RNA, 19 nt, Artificial Sequence
  Description of Artificial Sequence: Synthetic oligonucleotide
  Sense strand starting at position 2728 of SEQ ID NO: 318536
gaacaaugccuuugaugga

SEQ ID NO: 570204 - RNA, 19 nt, Artificial Sequence
  Description of Artificial Sequence: Synthetic oligonucleotide
  Antisense strand to SEQ ID NO: 570203
uccaucaaaggcauuguuc

SEQ ID NO: 570205 - RNA, 19 nt, Artificial Sequence
  Description of Artificial Sequence: Synthetic oligonucleotide
  Sense strand starting at position 2755 of SEQ ID NO: 318536
aggagaaacuaguauugac

SEQ ID NO: 570206 - RNA, 19 nt, Artificial Sequence
  Description of Artificial Sequence: Synthetic oligonucleotide
  Antisense strand to SEQ ID NO: 570205
gucaauacuaguuucuccu

SEQ ID NO: 570207 - RNA, 19 nt, Artificial Sequence
  Description of Artificial Sequence: Synthetic oligonucleotide
  Sense strand starting at position 2900 of SEQ ID NO: 318536
auucuuauccugggcaaca

SEQ ID NO: 570208 - RNA, 19 nt, Artificial Sequence
  Description of Artificial Sequence: Synthetic oligonucleotide
  Antisense strand to SEQ ID NO: 570207
uguugcccaggauaagaau

SEQ ID NO: 570209 - RNA, 19 nt, Artificial Sequence
  Description of Artificial Sequence: Synthetic oligonucleotide
  Sense strand starting at position 3040 of SEQ ID NO: 318536
ugcaauaaggcaugaucau

SEQ ID NO: 570210 - RNA, 19 nt, Artificial Sequence
  Description of Artificial Sequence: Synthetic oligonucleotide
  Antisense strand to SEQ ID NO: 570209
augaucaugccuuauugca

SEQ ID NO: 570211 - RNA, 19 nt, Artificial Sequence
  Description of Artificial Sequence: Synthetic oligonucleotide
  Sense strand starting at position 3041 of SEQ ID NO: 318536
gcaauaaggcaugaucaug

SEQ ID NO: 570212 - RNA, 19 nt, Artificial Sequence
  Description of Artificial Sequence: Synthetic oligonucleotide
  Antisense strand to SEQ ID NO: 570211
caugaucaugccuuauugc

SEQ ID NO: 570213 - RNA, 19 nt, Artificial Sequence
  Description of Artificial Sequence: Synthetic oligonucleotide
  Sense strand starting at position 3087 of SEQ ID NO: 318536
gcaagaccgucucuggaaa

SEQ ID NO: 570214 - RNA, 19 nt, Artificial Sequence
  Description of Artificial Sequence: Synthetic oligonucleotide
  Antisense strand to SEQ ID NO: 570213
uuuccagagacggucuugc

SEQ ID NO: 570215 - RNA, 19 nt, Artificial Sequence
  Description of Artificial Sequence: Synthetic oligonucleotide
  Sense strand starting at position 3131 of SEQ ID NO: 318536
aggauucuucuuugccaca

SEQ ID NO: 570216 - RNA, 19 nt, Artificial Sequence
  Description of Artificial Sequence: Synthetic oligonucleotide
  Antisense strand to SEQ ID NO: 570215
uguggcaaagaagaauccu

SEQ ID NO: 570217 - RNA, 19 nt, Artificial Sequence
  Description of Artificial Sequence: Synthetic oligonucleotide
  Sense strand starting at position 3183 of SEQ ID NO: 318536
ggaggaaggugacugcuuu

SEQ ID NO: 570218 - RNA, 19 nt, Artificial Sequence
  Description of Artificial Sequence: Synthetic oligonucleotide
  Antisense strand to SEQ ID NO: 570217
aaagcagucaccuuccucc

SEQ ID NO: 570219 - RNA, 19 nt, Artificial Sequence
  Description of Artificial Sequence: Synthetic oligonucleotide
  Sense strand starting at position 3255 of SEQ ID NO: 318536
cuggaauccaacuguguga

SEQ ID NO: 570220 - RNA, 19 nt, Artificial Sequence
  Description of Artificial Sequence: Synthetic oligonucleotide
  Antisense strand to SEQ ID NO: 570219
ucacacaguuggauuccag

SEQ ID NO: 570221 - RNA, 19 nt, Artificial Sequence
  Description of Artificial Sequence: Synthetic oligonucleotide
  Sense strand starting at position 3303 of SEQ ID NO: 318536
uuguuaaguguugcugcaa

SEQ ID NO: 570222 - RNA, 19 nt, Artificial Sequence
  Description of Artificial Sequence: Synthetic oligonucleotide
  Antisense strand to SEQ ID NO: 570221
uugcagcaacacuuaacaa

SEQ ID NO: 570223 - RNA, 19 nt, Artificial Sequence
  Description of Artificial Sequence: Synthetic oligonucleotide
  Sense strand starting at position 3363 of SEQ ID NO: 318536
uuuaaauucugccugugaa

SEQ ID NO: 570224 - RNA, 19 nt, Artificial Sequence
  Description of Artificial Sequence: Synthetic oligonucleotide
  Antisense strand to SEQ ID NO: 570223
uucacaggcagaauuuaaa

SEQ ID NO: 570225 - RNA, 19 nt, Artificial Sequence
  Description of Artificial Sequence: Synthetic oligonucleotide
  Sense strand starting at position 3364 of SEQ ID NO: 318536
uuaaauucugccugugaaa

SEQ ID NO: 570226 - RNA, 19 nt, Artificial Sequence
  Description of Artificial Sequence: Synthetic oligonucleotide
  Antisense strand to SEQ ID NO: 570225
uuucacaggcagaauuuaa

SEQ ID NO: 570227 - RNA, 19 nt, Artificial Sequence
  Description of Artificial Sequence: Synthetic oligonucleotide
  Sense strand starting at position 3376 of SEQ ID NO: 318536
ugugaaacuguguaaucca

SEQ ID NO: 570228 - RNA, 19 nt, Artificial Sequence
  Description of Artificial Sequence: Synthetic oligonucleotide
  Antisense strand to SEQ ID NO: 570227
uggauuacacaguuucaca

SEQ ID NO: 570229 - RNA, 19 nt, Artificial Sequence
  Description of Artificial Sequence: Synthetic oligonucleotide
  Sense strand starting at position 3383 of SEQ ID NO: 318536
cuguguaauccaggcacau

SEQ ID NO: 570230 - RNA, 19 nt, Artificial Sequence
  Description of Artificial Sequence: Synthetic oligonucleotide
  Antisense strand to SEQ ID NO: 570229
augugccuggauuacacag

SEQ ID NO: 570231 - RNA, 19 nt, Artificial Sequence
  Description of Artificial Sequence: Synthetic oligonucleotide
  Sense strand starting at position 3416 of SEQ ID NO: 318536
cagguaguguuaccugaaa

SEQ ID NO: 570232 - RNA, 19 nt, Artificial Sequence
  Description of Artificial Sequence: Synthetic oligonucleotide
  Antisense strand to SEQ ID NO: 570231
uuucagguaacacuaccug

SEQ ID NO: 570233 - RNA, 19 nt, Artificial Sequence
  Description of Artificial Sequence: Synthetic oligonucleotide
  Sense strand starting at position 3490 of SEQ ID NO: 318536
gaggcaaguccauacagua

SEQ ID NO: 570234 - RNA, 19 nt, Artificial Sequence
  Description of Artificial Sequence: Synthetic oligonucleotide
  Antisense strand to SEQ ID NO: 570233
uacuguauggacuugccuc

SEQ ID NO: 570235 - RNA, 19 nt, Artificial Sequence
  Description of Artificial Sequence: Synthetic oligonucleotide
  Sense strand starting at position 3888 of SEQ ID NO: 318536
ugggaaugcagccgaguaa

SEQ ID NO: 570236 - RNA, 19 nt, Artificial Sequence
  Description of Artificial Sequence: Synthetic oligonucleotide
  Antisense strand to SEQ ID NO: 570235
uuacucggcugcauuccca

SEQ ID NO: 570237 - RNA, 19 nt, Artificial Sequence
  Description of Artificial Sequence: Synthetic oligonucleotide
  Sense strand starting at position 3943 of SEQ ID NO: 318536
ggaggcacucugggucaaa

SEQ ID NO: 570238 - RNA, 19 nt, Artificial Sequence
  Description of Artificial Sequence: Synthetic oligonucleotide
  Antisense strand to SEQ ID NO: 570237
uuugacccagagugccucc

SEQ ID NO: 570239 - RNA, 19 nt, Artificial Sequence
  Description of Artificial Sequence: Synthetic oligonucleotide
  Sense strand starting at position 3970 of SEQ ID NO: 318536
acaaguaggacuggguauu

SEQ ID NO: 570240 - RNA, 19 nt, Artificial Sequence
  Description of Artificial Sequence: Synthetic oligonucleotide
  Antisense strand to SEQ ID NO: 570239
aauacccaguccuacuugu

SEQ ID NO: 570241 - RNA, 19 nt, Artificial Sequence
  Description of Artificial Sequence: Synthetic oligonucleotide
  Sense strand starting at position 3971 of SEQ ID NO: 318536
caaguaggacuggguauua

SEQ ID NO: 570242 - RNA, 19 nt, Artificial Sequence
  Description of Artificial Sequence: Synthetic oligonucleotide
  Antisense strand to SEQ ID NO: 570241
uaauacccaguccuacuug

SEQ ID NO: 570243 - RNA, 19 nt, Artificial Sequence
  Description of Artificial Sequence: Synthetic oligonucleotide
  Sense strand starting at position 3982 of SEQ ID NO: 318536
ggguauuauaaagguuauu

SEQ ID NO: 570244 - RNA, 19 nt, Artificial Sequence
  Description of Artificial Sequence: Synthetic oligonucleotide
  Antisense strand to SEQ ID NO: 570243
aauaaccuuuauaauaccc

SEQ ID NO: 570245 - RNA, 19 nt, Artificial Sequence
  Description of Artificial Sequence: Synthetic oligonucleotide
  Sense strand starting at position 803 of SEQ ID NO: 318537
ggcgcaugauuccaaauac

SEQ ID NO: 570246 - RNA, 19 nt, Artificial Sequence
  Description of Artificial Sequence: Synthetic oligonucleotide
  Antisense strand to SEQ ID NO: 570245
guauuuggaaucaugcgcc

SEQ ID NO: 570247 - RNA, 19 nt, Artificial Sequence
  Description of Artificial Sequence: Synthetic oligonucleotide
  Sense strand starting at position 1016 of SEQ ID NO: 318537
uggugaggugaucauucau

SEQ ID NO: 570248 - RNA, 19 nt, Artificial Sequence
  Description of Artificial Sequence: Synthetic oligonucleotide
  Antisense strand to SEQ ID NO: 570247
augaaugaucaccucacca

SEQ ID NO: 570249 - RNA, 19 nt, Artificial Sequence
  Description of Artificial Sequence: Synthetic oligonucleotide
  Sense strand starting at position 1051 of SEQ ID NO: 318537
caaugaguauuauugagcu

SEQ ID NO: 570250 - RNA, 19 nt, Artificial Sequence
  Description of Artificial Sequence: Synthetic oligonucleotide
  Antisense strand to SEQ ID NO: 570249
agcucaauaauacucauug

SEQ ID NO: 570251 - RNA, 19 nt, Artificial Sequence
  Description of Artificial Sequence: Synthetic oligonucleotide
  Sense strand starting at position 1055 of SEQ ID NO: 318537
gaguauuauugagcucuag

SEQ ID NO: 570252 - RNA, 19 nt, Artificial Sequence
  Description of Artificial Sequence: Synthetic oligonucleotide
  Antisense strand to SEQ ID NO: 570251
cuagagcucaauaauacuc

SEQ ID NO: 570253 - RNA, 19 nt, Artificial Sequence
  Description of Artificial Sequence: Synthetic oligonucleotide
  Sense strand starting at position 1084 of SEQ ID NO: 318537
gaaccagaggcuuggauau

SEQ ID NO: 570254 - RNA, 19 nt, Artificial Sequence
  Description of Artificial Sequence: Synthetic oligonucleotide
  Antisense strand to SEQ ID NO: 570253
auauccaagccucugguuc

SEQ ID NO: 570255 - RNA, 19 nt, Artificial Sequence
  Description of Artificial Sequence: Synthetic oligonucleotide
  Sense strand starting at position 1096 of SEQ ID NO: 318537
uggauauagcauugauaaa

SEQ ID NO: 570256 - RNA, 19 nt, Artificial Sequence
  Description of Artificial Sequence: Synthetic oligonucleotide
  Antisense strand to SEQ ID NO: 570255
uuuaucaaugcuauaucca

SEQ ID NO: 570257 - RNA, 19 nt, Artificial Sequence
  Description of Artificial Sequence: Synthetic oligonucleotide
  Sense strand starting at position 1427 of SEQ ID NO: 318537
ccaggagucuuggcuauug

SEQ ID NO: 570258 - RNA, 19 nt, Artificial Sequence
  Description of Artificial Sequence: Synthetic oligonucleotide
  Antisense strand to SEQ ID NO: 570257
caauagccaagacuccugg

SEQ ID NO: 570259 - RNA, 19 nt, Artificial Sequence
  Description of Artificial Sequence: Synthetic oligonucleotide
  Sense strand starting at position 1447 of SEQ ID NO: 318537
gguggagugcccugaucug

SEQ ID NO: 570260 - RNA, 19 nt, Artificial Sequence
  Description of Artificial Sequence: Synthetic oligonucleotide
  Antisense strand to SEQ ID NO: 570259
cagaucagggcacuccacc

SEQ ID NO: 570261 - RNA, 19 nt, Artificial Sequence
  Description of Artificial Sequence: Synthetic oligonucleotide
  Sense strand starting at position 1512 of SEQ ID NO: 318537
gugugaagaguugaauuca

SEQ ID NO: 570262 - RNA, 19 nt, Artificial Sequence
  Description of Artificial Sequence: Synthetic oligonucleotide
  Antisense strand to SEQ ID NO: 570261
ugaauucaacucuucacac

SEQ ID NO: 570263 - RNA, 19 nt, Artificial Sequence
  Description of Artificial Sequence: Synthetic oligonucleotide
  Sense strand starting at position 1804 of SEQ ID NO: 318537
ccgcgauuggcuggacuga

SEQ ID NO: 570264 - RNA, 19 nt, Artificial Sequence
  Description of Artificial Sequence: Synthetic oligonucleotide
  Antisense strand to SEQ ID NO: 570263
ucaguccagccaaucgcgg

SEQ ID NO: 570265 - RNA, 19 nt, Artificial Sequence
  Description of Artificial Sequence: Synthetic oligonucleotide
  Sense strand starting at position 1813 of SEQ ID NO: 318537
gcuggacugacauguuaua

SEQ ID NO: 570266 - RNA, 19 nt, Artificial Sequence
  Description of Artificial Sequence: Synthetic oligonucleotide
  Antisense strand to SEQ ID NO: 570265
uauaacaugucaguccagc

SEQ ID NO: 570267 - RNA, 19 nt, Artificial Sequence
  Description of Artificial Sequence: Synthetic oligonucleotide
  Sense strand starting at position 1935 of SEQ ID NO: 318537
cugggcucaccuuagaauu

SEQ ID NO: 570268 - RNA, 19 nt, Artificial Sequence
  Description of Artificial Sequence: Synthetic oligonucleotide
  Antisense strand to SEQ ID NO: 570267
aauucuaaggugagcccag

SEQ ID NO: 570269 - RNA, 19 nt, Artificial Sequence
  Description of Artificial Sequence: Synthetic oligonucleotide
  Sense strand starting at position 1937 of SEQ ID NO: 318537
gggcucaccuuagaauucu

SEQ ID NO: 570270 - RNA, 19 nt, Artificial Sequence
  Description of Artificial Sequence: Synthetic oligonucleotide
  Antisense strand to SEQ ID NO: 570269
agaauucuaaggugagccc

SEQ ID NO: 570271 - RNA, 19 nt, Artificial Sequence
  Description of Artificial Sequence: Synthetic oligonucleotide
  Sense strand starting at position 2023 of SEQ ID NO: 318537
cuuuauacucuugggucaa

SEQ ID NO: 570272 - RNA, 19 nt, Artificial Sequence
  Description of Artificial Sequence: Synthetic oligonucleotide
  Antisense strand to SEQ ID NO: 570271
uugacccaagaguauaaag

SEQ ID NO: 570273 - RNA, 19 nt, Artificial Sequence
  Description of Artificial Sequence: Synthetic oligonucleotide
  Sense strand starting at position 2024 of SEQ ID NO: 318537
uuuauacucuugggucaag

SEQ ID NO: 570274 - RNA, 19 nt, Artificial Sequence
  Description of Artificial Sequence: Synthetic oligonucleotide
  Antisense strand to SEQ ID NO: 570273
cuugacccaagaguauaaa

SEQ ID NO: 570275 - RNA, 19 nt, Artificial Sequence
  Description of Artificial Sequence: Synthetic oligonucleotide
  Sense strand starting at position 2097 of SEQ ID NO: 318537
cccugagauuccucccagu

SEQ ID NO: 570276 - RNA, 19 nt, Artificial Sequence
  Description of Artificial Sequence: Synthetic oligonucleotide
  Antisense strand to SEQ ID NO: 570275
acugggaggaaucucaggg

SEQ ID NO: 570277 - RNA, 19 nt, Artificial Sequence
  Description of Artificial Sequence: Synthetic oligonucleotide
  Sense strand starting at position 2100 of SEQ ID NO: 318537
ugagauuccucccaguuaa

SEQ ID NO: 570278 - RNA, 19 nt, Artificial Sequence
  Description of Artificial Sequence: Synthetic oligonucleotide
  Antisense strand to SEQ ID NO: 570277
uuaacugggaggaaucuca

SEQ ID NO: 570279 - RNA, 19 nt, Artificial Sequence
  Description of Artificial Sequence: Synthetic oligonucleotide
  Sense strand starting at position 2142 of SEQ ID NO: 318537
gggaaucuauggucagguu

SEQ ID NO: 570280 - RNA, 19 nt, Artificial Sequence
  Description of Artificial Sequence: Synthetic oligonucleotide
  Antisense strand to SEQ ID NO: 570279
aaccugaccauagauuccc

SEQ ID NO: 570281 - RNA, 19 nt, Artificial Sequence
  Description of Artificial Sequence: Synthetic oligonucleotide
  Sense strand starting at position 2516 of SEQ ID NO: 318537
gucucuaaugcccgaccau

SEQ ID NO: 570282 - RNA, 19 nt, Artificial Sequence
  Description of Artificial Sequence: Synthetic oligonucleotide
  Antisense strand to SEQ ID NO: 570281
auggucgggcauuagagac

SEQ ID NO: 570283 - RNA, 19 nt, Artificial Sequence
  Description of Artificial Sequence: Synthetic oligonucleotide
  Sense strand starting at position 2542 of SEQ ID NO: 318537
ggaugugagucugagugaa

SEQ ID NO: 570284 - RNA, 19 nt, Artificial Sequence
  Description of Artificial Sequence: Synthetic oligonucleotide
  Antisense strand to SEQ ID NO: 570283
uucacucagacucacaucc

SEQ ID NO: 570285 - RNA, 19 nt, Artificial Sequence
  Description of Artificial Sequence: Synthetic oligonucleotide
  Sense strand starting at position 2544 of SEQ ID NO: 318537
augugagucugagugaaug

SEQ ID NO: 570286 - RNA, 19 nt, Artificial Sequence
  Description of Artificial Sequence: Synthetic oligonucleotide
  Antisense strand to SEQ ID NO: 570285
cauucacucagacucacau

SEQ ID NO: 570287 - RNA, 19 nt, Artificial Sequence
  Description of Artificial Sequence: Synthetic oligonucleotide
  Sense strand starting at position 2842 of SEQ ID NO: 318537
gguucaugcccagguagga

SEQ ID NO: 570288 - RNA, 19 nt, Artificial Sequence
  Description of Artificial Sequence: Synthetic oligonucleotide
  Antisense strand to SEQ ID NO: 570287
uccuaccugggcaugaacc

SEQ ID NO: 570289 - RNA, 19 nt, Artificial Sequence
  Description of Artificial Sequence: Synthetic oligonucleotide
  Sense strand starting at position 2858 of SEQ ID NO: 318537
ggagggugucgcugaguca

SEQ ID NO: 570290 - RNA, 19 nt, Artificial Sequence
  Description of Artificial Sequence: Synthetic oligonucleotide
  Antisense strand to SEQ ID NO: 570289
ugacucagcgacacccucc

SEQ ID NO: 570291 - RNA, 19 nt, Artificial Sequence
  Description of Artificial Sequence: Synthetic oligonucleotide
  Sense strand starting at position 2877 of SEQ ID NO: 318537
cggaaaugcaaucaguucu

SEQ ID NO: 570292 - RNA, 19 nt, Artificial Sequence
  Description of Artificial Sequence: Synthetic oligonucleotide
  Antisense strand to SEQ ID NO: 570291
agaacugauugcauuuccg

SEQ ID NO: 570293 - RNA, 19 nt, Artificial Sequence
  Description of Artificial Sequence: Synthetic oligonucleotide
  Sense strand starting at position 2894 of SEQ ID NO: 318537
cucaguucuugugucagaa

SEQ ID NO: 570294 - RNA, 19 nt, Artificial Sequence
  Description of Artificial Sequence: Synthetic oligonucleotide
  Antisense strand to SEQ ID NO: 570293
uucugacacaagaacugag

SEQ ID NO: 570295 - RNA, 19 nt, Artificial Sequence
  Description of Artificial Sequence: Synthetic oligonucleotide
  Sense strand starting at position 2907 of SEQ ID NO: 318537
ucagaaucucuggguccuu

SEQ ID NO: 570296 - RNA, 19 nt, Artificial Sequence
  Description of Artificial Sequence: Synthetic oligonucleotide
  Antisense strand to SEQ ID NO: 570295
aaggacccagagauucuga

SEQ ID NO: 570297 - RNA, 19 nt, Artificial Sequence
  Description of Artificial Sequence: Synthetic oligonucleotide
  Sense strand starting at position 2939 of SEQ ID NO: 318537
cuguuaaugucacaucgag

SEQ ID NO: 570298 - RNA, 19 nt, Artificial Sequence
  Description of Artificial Sequence: Synthetic oligonucleotide
  Antisense strand to SEQ ID NO: 570297
cucgaugugacauuaacag

SEQ ID NO: 570299 - RNA, 19 nt, Artificial Sequence
  Description of Artificial Sequence: Synthetic oligonucleotide
  Sense strand starting at position 2951 of SEQ ID NO: 318537
caucgagugucuccaccua

SEQ ID NO: 570300 - RNA, 19 nt, Artificial Sequence
  Description of Artificial Sequence: Synthetic oligonucleotide
  Antisense strand to SEQ ID NO: 570299
uagguggagacacucgaug

SEQ ID NO: 570301 - RNA, 19 nt, Artificial Sequence
  Description of Artificial Sequence: Synthetic oligonucleotide
  Sense strand starting at position 3016 of SEQ ID NO: 318537
gugaccuguuucucuccau

SEQ ID NO: 570302 - RNA, 19 nt, Artificial Sequence
  Description of Artificial Sequence: Synthetic oligonucleotide
  Antisense strand to SEQ ID NO: 570301
auggagagaaacaggucac

SEQ ID NO: 570303 - RNA, 19 nt, Artificial Sequence
  Description of Artificial Sequence: Synthetic oligonucleotide
  Sense strand starting at position 3017 of SEQ ID NO: 318537
ugaccuguuucucuccauu

SEQ ID NO: 570304 - RNA, 19 nt, Artificial Sequence
  Description of Artificial Sequence: Synthetic oligonucleotide
  Antisense strand to SEQ ID NO: 570303
aauggagagaaacagguca

SEQ ID NO: 570305 - RNA, 19 nt, Artificial Sequence
  Description of Artificial Sequence: Synthetic oligonucleotide
  Sense strand starting at position 3187 of SEQ ID NO: 318537
gaggcaguuagcuaucgau

SEQ ID NO: 570306 - RNA, 19 nt, Artificial Sequence
  Description of Artificial Sequence: Synthetic oligonucleotide
  Antisense strand to SEQ ID NO: 570305
aucgauagcuaacugccuc

SEQ ID NO: 570307 - RNA, 19 nt, Artificial Sequence
  Description of Artificial Sequence: Synthetic oligonucleotide
  Sense strand starting at position 3278 of SEQ ID NO: 318537
gggcuacagcccuagugaa

SEQ ID NO: 570308 - RNA, 19 nt, Artificial Sequence
  Description of Artificial Sequence: Synthetic oligonucleotide
  Antisense strand to SEQ ID NO: 570307
uucacuagggcuguagccc

SEQ ID NO: 570309 - RNA, 19 nt, Artificial Sequence
  Description of Artificial Sequence: Synthetic oligonucleotide
  Sense strand starting at position 3327 of SEQ ID NO: 318537
gcuguugggacucauacaa

SEQ ID NO: 570310 - RNA, 19 nt, Artificial Sequence
  Description of Artificial Sequence: Synthetic oligonucleotide
  Antisense strand to SEQ ID NO: 570309
uuguaugagucccaacagc

SEQ ID NO: 570311 - RNA, 19 nt, Artificial Sequence
  Description of Artificial Sequence: Synthetic oligonucleotide
  Sense strand starting at position 3558 of SEQ ID NO: 318537
gggugucucgcguugagaa

SEQ ID NO: 570312 - RNA, 19 nt, Artificial Sequence
  Description of Artificial Sequence: Synthetic oligonucleotide
  Antisense strand to SEQ ID NO: 570311
uucucaacgcgagacaccc

SEQ ID NO: 570313 - RNA, 19 nt, Artificial Sequence
  Description of Artificial Sequence: Synthetic oligonucleotide
  Sense strand starting at position 3559 of SEQ ID NO: 318537
ggugucucgcguugagaaa

SEQ ID NO: 570314 - RNA, 19 nt, Artificial Sequence
  Description of Artificial Sequence: Synthetic oligonucleotide
  Antisense strand to SEQ ID NO: 570313
uuucucaacgcgagacacc

SEQ ID NO: 570315 - RNA, 19 nt, Artificial Sequence
  Description of Artificial Sequence: Synthetic oligonucleotide
  Sense strand starting at position 3560 of SEQ ID NO: 318537
gugucucgcguugagaaag

SEQ ID NO: 570316 - RNA, 19 nt, Artificial Sequence
  Description of Artificial Sequence: Synthetic oligonucleotide
  Antisense strand to SEQ ID NO: 570315
cuuucucaacgcgagacac

SEQ ID NO: 570317 - RNA, 19 nt, Artificial Sequence
  Description of Artificial Sequence: Synthetic oligonucleotide
  Sense strand starting at position 3656 of SEQ ID NO: 318537
cgagcaguuggcucugcaa

SEQ ID NO: 570318 - RNA, 19 nt, Artificial Sequence
  Description of Artificial Sequence: Synthetic oligonucleotide
  Antisense strand to SEQ ID NO: 570317
uugcagagccaacugcucg

SEQ ID NO: 570319 - RNA, 19 nt, Artificial Sequence
  Description of Artificial Sequence: Synthetic oligonucleotide
  Sense strand starting at position 3854 of SEQ ID NO: 318537
ccaggagcucccugaucuu

SEQ ID NO: 570320 - RNA, 19 nt, Artificial Sequence
  Description of Artificial Sequence: Synthetic oligonucleotide
  Antisense strand to SEQ ID NO: 570319
aagaucagggagcuccugg

SEQ ID NO: 570321 - RNA, 19 nt, Artificial Sequence
  Description of Artificial Sequence: Synthetic oligonucleotide
  Sense strand starting at position 3874 of SEQ ID NO: 318537
ugcuguuagccaucucugu

SEQ ID NO: 570322 - RNA, 19 nt, Artificial Sequence
  Description of Artificial Sequence: Synthetic oligonucleotide
  Antisense strand to SEQ ID NO: 570321
acagagauggcuaacagca

SEQ ID NO: 570323 - RNA, 19 nt, Artificial Sequence
  Description of Artificial Sequence: Synthetic oligonucleotide
  Sense strand starting at position 3945 of SEQ ID NO: 318537
ucccaagugcucuguccau

SEQ ID NO: 570324 - RNA, 19 nt, Artificial Sequence
  Description of Artificial Sequence: Synthetic oligonucleotide
  Antisense strand to SEQ ID NO: 570323
auggacagagcacuuggga

SEQ ID NO: 570325 - RNA, 19 nt, Artificial Sequence
  Description of Artificial Sequence: Synthetic oligonucleotide
  Sense strand starting at position 263 of SEQ ID NO: 318538
cgagccauccugcagagaa

SEQ ID NO: 570326 - RNA, 19 nt, Artificial Sequence
  Description of Artificial Sequence: Synthetic oligonucleotide
  Antisense strand to SEQ ID NO: 570325
uucucugcaggauggcucg

SEQ ID NO: 570327 - RNA, 19 nt, Artificial Sequence
  Description of Artificial Sequence: Synthetic oligonucleotide
  Sense strand starting at position 327 of SEQ ID NO: 318538
ggcuacucaagcugggauu

SEQ ID NO: 570328 - RNA, 19 nt, Artificial Sequence
  Description of Artificial Sequence: Synthetic oligonucleotide
  Antisense strand to SEQ ID NO: 570327
aaucccagcuugaguagcc

SEQ ID NO: 570329 - RNA, 19 nt, Artificial Sequence
  Description of Artificial Sequence: Synthetic oligonucleotide
  Sense strand starting at position 376 of SEQ ID NO: 318538
cuggacaaccgugguauuu

SEQ ID NO: 570330 - RNA, 19 nt, Artificial Sequence
  Description of Artificial Sequence: Synthetic oligonucleotide
  Antisense strand to SEQ ID NO: 570329
aaauaccacgguuguccag

SEQ ID NO: 570331 - RNA, 19 nt, Artificial Sequence
  Description of Artificial Sequence: Synthetic oligonucleotide
  Sense strand starting at position 438 of SEQ ID NO: 318538
agcaguucugaucacacaa

SEQ ID NO: 570332 - RNA, 19 nt, Artificial Sequence
  Description of Artificial Sequence: Synthetic oligonucleotide
  Antisense strand to SEQ ID NO: 570331
uugugugaucagaacugcu

SEQ ID NO: 570333 - RNA, 19 nt, Artificial Sequence
  Description of Artificial Sequence: Synthetic oligonucleotide
  Sense strand starting at position 472 of SEQ ID NO: 318538
gucagaaagcuccaaccau

SEQ ID NO: 570334 - RNA, 19 nt, Artificial Sequence
  Description of Artificial Sequence: Synthetic oligonucleotide
  Antisense strand to SEQ ID NO: 570333
augguuggagcuuucugac

SEQ ID NO: 570335 - RNA, 19 nt, Artificial Sequence
  Description of Artificial Sequence: Synthetic oligonucleotide
  Sense strand starting at position 769 of SEQ ID NO: 318538
ucacuugcugaagaaaucu

SEQ ID NO: 570336 - RNA, 19 nt, Artificial Sequence
  Description of Artificial Sequence: Synthetic oligonucleotide
  Antisense strand to SEQ ID NO: 570335
agauuucuucagcaaguga

SEQ ID NO: 570337 - RNA, 19 nt, Artificial Sequence
  Description of Artificial Sequence: Synthetic oligonucleotide
  Sense strand starting at position 811 of SEQ ID NO: 318538
agagcauguugggcaauaa

SEQ ID NO: 570338 - RNA, 19 nt, Artificial Sequence
  Description of Artificial Sequence: Synthetic oligonucleotide
  Antisense strand to SEQ ID NO: 570337
uuauugcccaacaugcucu

SEQ ID NO: 570339 - RNA, 19 nt, Artificial Sequence
  Description of Artificial Sequence: Synthetic oligonucleotide
  Sense strand starting at position 812 of SEQ ID NO: 318538
gagcauguugggcaauaaa

SEQ ID NO: 570340 - RNA, 19 nt, Artificial Sequence
  Description of Artificial Sequence: Synthetic oligonucleotide
  Antisense strand to SEQ ID NO: 570339
uuuauugcccaacaugcuc

SEQ ID NO: 570341 - RNA, 19 nt, Artificial Sequence
  Description of Artificial Sequence: Synthetic oligonucleotide
  Sense strand starting at position 1023 of SEQ ID NO: 318538
ccaucagaagcugggaauu

SEQ ID NO: 570342 - RNA, 19 nt, Artificial Sequence
  Description of Artificial Sequence: Synthetic oligonucleotide
  Antisense strand to SEQ ID NO: 570341
aauucccagcuucugaugg

SEQ ID NO: 570343 - RNA, 19 nt, Artificial Sequence
  Description of Artificial Sequence: Synthetic oligonucleotide
  Sense strand starting at position 1089 of SEQ ID NO: 318538
cugagauggcaguggcaaa

SEQ ID NO: 570344 - RNA, 19 nt, Artificial Sequence
  Description of Artificial Sequence: Synthetic oligonucleotide
  Antisense strand to SEQ ID NO: 570343
uuugccacugccaucucag

SEQ ID NO: 570345 - RNA, 19 nt, Artificial Sequence
  Description of Artificial Sequence: Synthetic oligonucleotide
  Sense strand starting at position 1215 of SEQ ID NO: 318538
gcaagcaguauguaggaaa

SEQ ID NO: 570346 - RNA, 19 nt, Artificial Sequence
  Description of Artificial Sequence: Synthetic oligonucleotide
  Antisense strand to SEQ ID NO: 570345
uuuccuacauacugcuugc

SEQ ID NO: 570347 - RNA, 19 nt, Artificial Sequence
  Description of Artificial Sequence: Synthetic oligonucleotide
  Sense strand starting at position 1294 of SEQ ID NO: 318538
uuaugagcuccuugaaagu

SEQ ID NO: 570348 - RNA, 19 nt, Artificial Sequence
  Description of Artificial Sequence: Synthetic oligonucleotide
  Antisense strand to SEQ ID NO: 570347
acuuucaaggagcucauaa

SEQ ID NO: 570349 - RNA, 19 nt, Artificial Sequence
  Description of Artificial Sequence: Synthetic oligonucleotide
  Sense strand starting at position 1304 of SEQ ID NO: 318538
cuugaaagucgugaccagu

SEQ ID NO: 570350 - RNA, 19 nt, Artificial Sequence
  Description of Artificial Sequence: Synthetic oligonucleotide
  Antisense strand to SEQ ID NO: 570349
acuggucacgacuuucaag

SEQ ID NO: 570351 - RNA, 19 nt, Artificial Sequence
  Description of Artificial Sequence: Synthetic oligonucleotide
  Sense strand starting at position 1356 of SEQ ID NO: 318538
uuaguaaauguguggguaa

SEQ ID NO: 570352 - RNA, 19 nt, Artificial Sequence
  Description of Artificial Sequence: Synthetic oligonucleotide
  Antisense strand to SEQ ID NO: 570351
uuacccacacauuuacuaa

SEQ ID NO: 570353 - RNA, 19 nt, Artificial Sequence
  Description of Artificial Sequence: Synthetic oligonucleotide
  Sense strand starting at position 1358 of SEQ ID NO: 318538
aguaaauguguggguaaug

SEQ ID NO: 570354 - RNA, 19 nt, Artificial Sequence
  Description of Artificial Sequence: Synthetic oligonucleotide
  Antisense strand to SEQ ID NO: 570353
cauuacccacacauuuacu

SEQ ID NO: 570355 - RNA, 19 nt, Artificial Sequence
  Description of Artificial Sequence: Synthetic oligonucleotide
  Sense strand starting at position 1412 of SEQ ID NO: 318538
ggcaguuuccuggacaauu

SEQ ID NO: 570356 - RNA, 19 nt, Artificial Sequence
  Description of Artificial Sequence: Synthetic oligonucleotide
  Antisense strand to SEQ ID NO: 570355
aauuguccaggaaacugcc

SEQ ID NO: 570357 - RNA, 19 nt, Artificial Sequence
  Description of Artificial Sequence: Synthetic oligonucleotide
  Sense strand starting at position 1569 of SEQ ID NO: 318538
gaucgcauauaaguaugaa

SEQ ID NO: 570358 - RNA, 19 nt, Artificial Sequence
  Description of Artificial Sequence: Synthetic oligonucleotide
  Antisense strand to SEQ ID NO: 570357
uucauacuuauaugcgauc

SEQ ID NO: 570359 - RNA, 19 nt, Artificial Sequence
  Description of Artificial Sequence: Synthetic oligonucleotide
  Sense strand starting at position 1572 of SEQ ID NO: 318538
cgcauauaaguaugaaauu

SEQ ID NO: 570360 - RNA, 19 nt, Artificial Sequence
  Description of Artificial Sequence: Synthetic oligonucleotide
  Antisense strand to SEQ ID NO: 570359
aauuucauacuuauaugcg

SEQ ID NO: 570361 - RNA, 19 nt, Artificial Sequence
  Description of Artificial Sequence: Synthetic oligonucleotide
  Sense strand starting at position 1598 of SEQ ID NO: 318538
uaugcaaaggaguguuuga

SEQ ID NO: 570362 - RNA, 19 nt, Artificial Sequence
  Description of Artificial Sequence: Synthetic oligonucleotide
  Antisense strand to SEQ ID NO: 570361
ucaaacacuccuuugcaua

SEQ ID NO: 570363 - RNA, 19 nt, Artificial Sequence
  Description of Artificial Sequence: Synthetic oligonucleotide
  Sense strand starting at position 1606 of SEQ ID NO: 318538
ggaguguuugaaugagggu

SEQ ID NO: 570364 - RNA, 19 nt, Artificial Sequence
  Description of Artificial Sequence: Synthetic oligonucleotide
  Antisense strand to SEQ ID NO: 570363
acccucauucaaacacucc

SEQ ID NO: 570365 - RNA, 19 nt, Artificial Sequence
  Description of Artificial Sequence: Synthetic oligonucleotide
  Sense strand starting at position 1628 of SEQ ID NO: 318538
gugaguguccgugugauug

SEQ ID NO: 570366 - RNA, 19 nt, Artificial Sequence
  Description of Artificial Sequence: Synthetic oligonucleotide
  Antisense strand to SEQ ID NO: 570365
caaucacacggacacucac

SEQ ID NO: 570367 - RNA, 19 nt, Artificial Sequence
  Description of Artificial Sequence: Synthetic oligonucleotide
  Sense strand starting at position 1651 of SEQ ID NO: 318538
caucgugucacugggaaga

SEQ ID NO: 570368 - RNA, 19 nt, Artificial Sequence
  Description of Artificial Sequence: Synthetic oligonucleotide
  Antisense strand to SEQ ID NO: 570367
ucuucccagugacacgaug

SEQ ID NO: 570369 - RNA, 19 nt, Artificial Sequence
  Description of Artificial Sequence: Synthetic oligonucleotide
  Sense strand starting at position 1692 of SEQ ID NO: 318538
ggguaaagugaggaguguu

SEQ ID NO: 570370 - RNA, 19 nt, Artificial Sequence
  Description of Artificial Sequence: Synthetic oligonucleotide
  Antisense strand to SEQ ID NO: 570369
aacacuccucacuuuaccc

SEQ ID NO: 570371 - RNA, 19 nt, Artificial Sequence
  Description of Artificial Sequence: Synthetic oligonucleotide
  Sense strand starting at position 1695 of SEQ ID NO: 318538
uaaagugaggaguguuuaa

SEQ ID NO: 570372 - RNA, 19 nt, Artificial Sequence
  Description of Artificial Sequence: Synthetic oligonucleotide
  Antisense strand to SEQ ID NO: 570371
uuaaacacuccucacuuua

SEQ ID NO: 570373 - RNA, 19 nt, Artificial Sequence
  Description of Artificial Sequence: Synthetic oligonucleotide
  Sense strand starting at position 1699 of SEQ ID NO: 318538
gugaggaguguuuaagggu

SEQ ID NO: 570374 - RNA, 19 nt, Artificial Sequence
  Description of Artificial Sequence: Synthetic oligonucleotide
  Antisense strand to SEQ ID NO: 570373
acccuuaaacacuccucac

SEQ ID NO: 570375 - RNA, 19 nt, Artificial Sequence
  Description of Artificial Sequence: Synthetic oligonucleotide
  Sense strand starting at position 1705 of SEQ ID NO: 318538
aguguuuaagggugaaugu

SEQ ID NO: 570376 - RNA, 19 nt, Artificial Sequence
  Description of Artificial Sequence: Synthetic oligonucleotide
  Antisense strand to SEQ ID NO: 570375
acauucacccuuaaacacu

SEQ ID NO: 570377 - RNA, 19 nt, Artificial Sequence
  Description of Artificial Sequence: Synthetic oligonucleotide
  Sense strand starting at position 1706 of SEQ ID NO: 318538
guguuuaagggugaauguu

SEQ ID NO: 570378 - RNA, 19 nt, Artificial Sequence
  Description of Artificial Sequence: Synthetic oligonucleotide
  Antisense strand to SEQ ID NO: 570377
aacauucacccuuaaacac

SEQ ID NO: 570379 - RNA, 19 nt, Artificial Sequence
  Description of Artificial Sequence: Synthetic oligonucleotide
  Sense strand starting at position 1736 of SEQ ID NO: 318538
gcuaguaacggguucguga

SEQ ID NO: 570380 - RNA, 19 nt, Artificial Sequence
  Description of Artificial Sequence: Synthetic oligonucleotide
  Antisense strand to SEQ ID NO: 570379
ucacgaacccguuacuagc

SEQ ID NO: 570381 - RNA, 19 nt, Artificial Sequence
  Description of Artificial Sequence: Synthetic oligonucleotide
  Sense strand starting at position 1869 of SEQ ID NO: 318538
gggacauccucacuccuga

SEQ ID NO: 570382 - RNA, 19 nt, Artificial Sequence
  Description of Artificial Sequence: Synthetic oligonucleotide
  Antisense strand to SEQ ID NO: 570381
ucaggagugaggauguccc

SEQ ID NO: 570383 - RNA, 19 nt, Artificial Sequence
  Description of Artificial Sequence: Synthetic oligonucleotide
  Sense strand starting at position 2586 of SEQ ID NO: 318538
ggguuaugcugggcaagga

SEQ ID NO: 570384 - RNA, 19 nt, Artificial Sequence
  Description of Artificial Sequence: Synthetic oligonucleotide
  Antisense strand to SEQ ID NO: 570383
uccuugcccagcauaaccc

SEQ ID NO: 570385 - RNA, 19 nt, Artificial Sequence
  Description of Artificial Sequence: Synthetic oligonucleotide
  Sense strand starting at position 2587 of SEQ ID NO: 318538
gguuaugcugggcaaggau

SEQ ID NO: 570386 - RNA, 19 nt, Artificial Sequence
  Description of Artificial Sequence: Synthetic oligonucleotide
  Antisense strand to SEQ ID NO: 570385
auccuugcccagcauaacc

SEQ ID NO: 570387 - RNA, 19 nt, Artificial Sequence
  Description of Artificial Sequence: Synthetic oligonucleotide
  Sense strand starting at position 2616 of SEQ ID NO: 318538
ccaucauucuggucaacug

SEQ ID NO: 570388 - RNA, 19 nt, Artificial Sequence
  Description of Artificial Sequence: Synthetic oligonucleotide
  Antisense strand to SEQ ID NO: 570387
caguugaccagaaugaugg

SEQ ID NO: 570389 - RNA, 19 nt, Artificial Sequence
  Description of Artificial Sequence: Synthetic oligonucleotide
  Sense strand starting at position 2728 of SEQ ID NO: 318538
gggauaccucucuguguag

SEQ ID NO: 570390 - RNA, 19 nt, Artificial Sequence
  Description of Artificial Sequence: Synthetic oligonucleotide
  Antisense strand to SEQ ID NO: 570389
cuacacagagagguauccc

SEQ ID NO: 570391 - RNA, 19 nt, Artificial Sequence
  Description of Artificial Sequence: Synthetic oligonucleotide
  Sense strand starting at position 2849 of SEQ ID NO: 318538
ggauuaugacagcauguua

SEQ ID NO: 570392 - RNA, 19 nt, Artificial Sequence
  Description of Artificial Sequence: Synthetic oligonucleotide
  Antisense strand to SEQ ID NO: 570391
uaacaugcugucauaaucc

SEQ ID NO: 570393 - RNA, 19 nt, Artificial Sequence
  Description of Artificial Sequence: Synthetic oligonucleotide
  Sense strand starting at position 2856 of SEQ ID NO: 318538
gacagcauguuauucugaa

SEQ ID NO: 570394 - RNA, 19 nt, Artificial Sequence
  Description of Artificial Sequence: Synthetic oligonucleotide
  Antisense strand to SEQ ID NO: 570393
uucagaauaacaugcuguc

SEQ ID NO: 570395 - RNA, 19 nt, Artificial Sequence
  Description of Artificial Sequence: Synthetic oligonucleotide
  Sense strand starting at position 2857 of SEQ ID NO: 318538
acagcauguuauucugaac

SEQ ID NO: 570396 - RNA, 19 nt, Artificial Sequence
  Description of Artificial Sequence: Synthetic oligonucleotide
  Antisense strand to SEQ ID NO: 570395
guucagaauaacaugcugu

SEQ ID NO: 570397 - RNA, 19 nt, Artificial Sequence
  Description of Artificial Sequence: Synthetic oligonucleotide
  Sense strand starting at position 2908 of SEQ ID NO: 318538
gguguuccuguagaugacu

SEQ ID NO: 570398 - RNA, 19 nt, Artificial Sequence
  Description of Artificial Sequence: Synthetic oligonucleotide
  Antisense strand to SEQ ID NO: 570397
agucaucuacaggaacacc

SEQ ID NO: 570399 - RNA, 19 nt, Artificial Sequence
  Description of Artificial Sequence: Synthetic oligonucleotide
  Sense strand starting at position 3481 of SEQ ID NO: 318538
ucuagaccuuggccauuaa

SEQ ID NO: 570400 - RNA, 19 nt, Artificial Sequence
  Description of Artificial Sequence: Synthetic oligonucleotide
  Antisense strand to SEQ ID NO: 570399
uuaauggccaaggucuaga

SEQ ID NO: 570401 - RNA, 19 nt, Artificial Sequence
  Description of Artificial Sequence: Synthetic oligonucleotide
  Sense strand starting at position 3936 of SEQ ID NO: 318538
ugagucacacuuuauguua

SEQ ID NO: 570402 - RNA, 19 nt, Artificial Sequence
  Description of Artificial Sequence: Synthetic oligonucleotide
  Antisense strand to SEQ ID NO: 570401
uaacauaaagugugacuca

SEQ ID NO: 570403 - RNA, 19 nt, Artificial Sequence
  Description of Artificial Sequence: Synthetic oligonucleotide
  Sense strand starting at position 3958 of SEQ ID NO: 318538
uaauauguccugggcucua

SEQ ID NO: 570404 - RNA, 19 nt, Artificial Sequence
  Description of Artificial Sequence: Synthetic oligonucleotide
  Antisense strand to SEQ ID NO: 570403
uagagcccaggacauauua

SEQ ID NO: 570405 - RNA, 19 nt, Artificial Sequence
  Description of Artificial Sequence: Synthetic oligonucleotide
  Sense strand starting at position 107 of SEQ ID NO: 318539
ggcgaauauaaacgauaca

SEQ ID NO: 570406 - RNA, 19 nt, Artificial Sequence
  Description of Artificial Sequence: Synthetic oligonucleotide
  Antisense strand to SEQ ID NO: 570405
uguaucguuuauauucgcc

SEQ ID NO: 570407 - RNA, 19 nt, Artificial Sequence
  Description of Artificial Sequence: Synthetic oligonucleotide
  Sense strand starting at position 274 of SEQ ID NO: 318539
aguuaauuacuguaaacga

SEQ ID NO: 570408 - RNA, 19 nt, Artificial Sequence
  Description of Artificial Sequence: Synthetic oligonucleotide
  Antisense strand to SEQ ID NO: 570407
ucguuuacaguaauuaacu

SEQ ID NO: 570409 - RNA, 19 nt, Artificial Sequence
  Description of Artificial Sequence: Synthetic oligonucleotide
  Sense strand starting at position 310 of SEQ ID NO: 318539
agaagagggcccugaucau

SEQ ID NO: 570410 - RNA, 19 nt, Artificial Sequence
  Description of Artificial Sequence: Synthetic oligonucleotide
  Antisense strand to SEQ ID NO: 570409
augaucagggcccucuucu

SEQ ID NO: 570411 - RNA, 19 nt, Artificial Sequence
  Description of Artificial Sequence: Synthetic oligonucleotide
  Sense strand starting at position 369 of SEQ ID NO: 318539
guuaguauuuagcuuagac

SEQ ID NO: 570412 - RNA, 19 nt, Artificial Sequence
  Description of Artificial Sequence: Synthetic oligonucleotide
  Antisense strand to SEQ ID NO: 570411
gucuaagcuaaauacuaac

SEQ ID NO: 570413 - RNA, 19 nt, Artificial Sequence
  Description of Artificial Sequence: Synthetic oligonucleotide
  Sense strand starting at position 373 of SEQ ID NO: 318539
guauuuagcuuagacauaa

SEQ ID NO: 570414 - RNA, 19 nt, Artificial Sequence
  Description of Artificial Sequence: Synthetic oligonucleotide
  Antisense strand to SEQ ID NO: 570413
uuaugucuaagcuaaauac

SEQ ID NO: 570415 - RNA, 19 nt, Artificial Sequence
  Description of Artificial Sequence: Synthetic oligonucleotide
  Sense strand starting at position 448 of SEQ ID NO: 318539
ggaaacugcuuccuacaca

SEQ ID NO: 570416 - RNA, 19 nt, Artificial Sequence
  Description of Artificial Sequence: Synthetic oligonucleotide
  Antisense strand to SEQ ID NO: 570415
uguguaggaagcaguuucc

SEQ ID NO: 570417 - RNA, 19 nt, Artificial Sequence
  Description of Artificial Sequence: Synthetic oligonucleotide
  Sense strand starting at position 471 of SEQ ID NO: 318539
gauuaagucuuguugcaag

SEQ ID NO: 570418 - RNA, 19 nt, Artificial Sequence
  Description of Artificial Sequence: Synthetic oligonucleotide
  Antisense strand to SEQ ID NO: 570417
cuugcaacaagacuuaauc

SEQ ID NO: 570419 - RNA, 19 nt, Artificial Sequence
  Description of Artificial Sequence: Synthetic oligonucleotide
  Sense strand starting at position 489 of SEQ ID NO: 318539
ggcugauacucaguguaca

SEQ ID NO: 570420 - RNA, 19 nt, Artificial Sequence
  Description of Artificial Sequence: Synthetic oligonucleotide
  Antisense strand to SEQ ID NO: 570419
uguacacugaguaucagcc

SEQ ID NO: 570421 - RNA, 19 nt, Artificial Sequence
  Description of Artificial Sequence: Synthetic oligonucleotide
  Sense strand starting at position 490 of SEQ ID NO: 318539
gcugauacucaguguacac

SEQ ID NO: 570422 - RNA, 19 nt, Artificial Sequence
  Description of Artificial Sequence: Synthetic oligonucleotide
  Antisense strand to SEQ ID NO: 570421
guguacacugaguaucagc

SEQ ID NO: 570423 - RNA, 19 nt, Artificial Sequence
  Description of Artificial Sequence: Synthetic oligonucleotide
  Sense strand starting at position 759 of SEQ ID NO: 318539
cacugucuagacugagaaa

SEQ ID NO: 570424 - RNA, 19 nt, Artificial Sequence
  Description of Artificial Sequence: Synthetic oligonucleotide
  Antisense strand to SEQ ID NO: 570423
uuucucagucuagacagug

SEQ ID NO: 570425 - RNA, 19 nt, Artificial Sequence
  Description of Artificial Sequence: Synthetic oligonucleotide
  Sense strand starting at position 783 of SEQ ID NO: 318539
acgcgagucacuuaagguu

SEQ ID NO: 570426 - RNA, 19 nt, Artificial Sequence
  Description of Artificial Sequence: Synthetic oligonucleotide
  Antisense strand to SEQ ID NO: 570425
aaccuuaagugacucgcgu

SEQ ID NO: 570427 - RNA, 19 nt, Artificial Sequence
  Description of Artificial Sequence: Synthetic oligonucleotide
  Sense strand starting at position 957 of SEQ ID NO: 318539
agcaaaggucuuuacauuc

SEQ ID NO: 570428 - RNA, 19 nt, Artificial Sequence
  Description of Artificial Sequence: Synthetic oligonucleotide
  Antisense strand to SEQ ID NO: 570427
gaauguaaagaccuuugcu

SEQ ID NO: 570429 - RNA, 19 nt, Artificial Sequence
  Description of Artificial Sequence: Synthetic oligonucleotide
  Sense strand starting at position 1058 of SEQ ID NO: 318539
uuuggugugacuuacauag

SEQ ID NO: 570430 - RNA, 19 nt, Artificial Sequence
  Description of Artificial Sequence: Synthetic oligonucleotide
  Antisense strand to SEQ ID NO: 570429
cuauguaagucacaccaaa

SEQ ID NO: 570431 - RNA, 19 nt, Artificial Sequence
  Description of Artificial Sequence: Synthetic oligonucleotide
  Sense strand starting at position 1060 of SEQ ID NO: 318539
uggugugacuuacauagaa

SEQ ID NO: 570432 - RNA, 19 nt, Artificial Sequence
  Description of Artificial Sequence: Synthetic oligonucleotide
  Antisense strand to SEQ ID NO: 570431
uucuauguaagucacacca

SEQ ID NO: 570433 - RNA, 19 nt, Artificial Sequence
  Description of Artificial Sequence: Synthetic oligonucleotide
  Sense strand starting at position 1101 of SEQ ID NO: 318539
ccuacagaaggaugaguuu

SEQ ID NO: 570434 - RNA, 19 nt, Artificial Sequence
  Description of Artificial Sequence: Synthetic oligonucleotide
  Antisense strand to SEQ ID NO: 570433
aaacucauccuucuguagg

SEQ ID NO: 570435 - RNA, 19 nt, Artificial Sequence
  Description of Artificial Sequence: Synthetic oligonucleotide
  Sense strand starting at position 1107 of SEQ ID NO: 318539
gaaggaugaguuugcagaa

SEQ ID NO: 570436 - RNA, 19 nt, Artificial Sequence
  Description of Artificial Sequence: Synthetic oligonucleotide
  Antisense strand to SEQ ID NO: 570435
uucugcaaacucauccuuc

SEQ ID NO: 570437 - RNA, 19 nt, Artificial Sequence
  Description of Artificial Sequence: Synthetic oligonucleotide
  Sense strand starting at position 1108 of SEQ ID NO: 318539
aaggaugaguuugcagaaa

SEQ ID NO: 570438 - RNA, 19 nt, Artificial Sequence
  Description of Artificial Sequence: Synthetic oligonucleotide
  Antisense strand to SEQ ID NO: 570437
uuucugcaaacucauccuu

SEQ ID NO: 570439 - RNA, 19 nt, Artificial Sequence
  Description of Artificial Sequence: Synthetic oligonucleotide
  Sense strand starting at position 1292 of SEQ ID NO: 318539
gcugaagcuuaggaacauu

SEQ ID NO: 570440 - RNA, 19 nt, Artificial Sequence
  Description of Artificial Sequence: Synthetic oligonucleotide
  Antisense strand to SEQ ID NO: 570439
aauguuccuaagcuucagc

SEQ ID NO: 570441 - RNA, 19 nt, Artificial Sequence
  Description of Artificial Sequence: Synthetic oligonucleotide
  Sense strand starting at position 1332 of SEQ ID NO: 318539
cgggucuccgauuaacuca

SEQ ID NO: 570442 - RNA, 19 nt, Artificial Sequence
  Description of Artificial Sequence: Synthetic oligonucleotide
  Antisense strand to SEQ ID NO: 570441
ugaguuaaucggagacccg

SEQ ID NO: 570443 - RNA, 19 nt, Artificial Sequence
  Description of Artificial Sequence: Synthetic oligonucleotide
  Sense strand starting at position 1339 of SEQ ID NO: 318539
ccgauuaacucacuggaug

SEQ ID NO: 570444 - RNA, 19 nt, Artificial Sequence
  Description of Artificial Sequence: Synthetic oligonucleotide
  Antisense strand to SEQ ID NO: 570443
cauccagugaguuaaucgg

SEQ ID NO: 570445 - RNA, 19 nt, Artificial Sequence
  Description of Artificial Sequence: Synthetic oligonucleotide
  Sense strand starting at position 1340 of SEQ ID NO: 318539
cgauuaacucacuggauga

SEQ ID NO: 570446 - RNA, 19 nt, Artificial Sequence
  Description of Artificial Sequence: Synthetic oligonucleotide
  Antisense strand to SEQ ID NO: 570445
ucauccagugaguuaaucg

SEQ ID NO: 570447 - RNA, 19 nt, Artificial Sequence
  Description of Artificial Sequence: Synthetic oligonucleotide
  Sense strand starting at position 1472 of SEQ ID NO: 318539
ccauuaugagccugucuca

SEQ ID NO: 570448 - RNA, 19 nt, Artificial Sequence
  Description of Artificial Sequence: Synthetic oligonucleotide
  Antisense strand to SEQ ID NO: 570447
ugagacaggcucauaaugg

SEQ ID NO: 570449 - RNA, 19 nt, Artificial Sequence
  Description of Artificial Sequence: Synthetic oligonucleotide
  Sense strand starting at position 2174 of SEQ ID NO: 318539
ugaacagggcauugaucuu

SEQ ID NO: 570450 - RNA, 19 nt, Artificial Sequence
  Description of Artificial Sequence: Synthetic oligonucleotide
  Antisense strand to SEQ ID NO: 570449
aagaucaaugcccuguuca

SEQ ID NO: 570451 - RNA, 19 nt, Artificial Sequence
  Description of Artificial Sequence: Synthetic oligonucleotide
  Sense strand starting at position 2181 of SEQ ID NO: 318539
ggcauugaucuugggcaug

SEQ ID NO: 570452 - RNA, 19 nt, Artificial Sequence
  Description of Artificial Sequence: Synthetic oligonucleotide
  Antisense strand to SEQ ID NO: 570451
caugcccaagaucaaugcc

SEQ ID NO: 570453 - RNA, 19 nt, Artificial Sequence
  Description of Artificial Sequence: Synthetic oligonucleotide
  Sense strand starting at position 2217 of SEQ ID NO: 318539
agagcacugucccuugagu

SEQ ID NO: 570454 - RNA, 19 nt, Artificial Sequence
  Description of Artificial Sequence: Synthetic oligonucleotide
  Antisense strand to SEQ ID NO: 570453
acucaagggacagugcucu

SEQ ID NO: 570455 - RNA, 19 nt, Artificial Sequence
  Description of Artificial Sequence: Synthetic oligonucleotide
  Sense strand starting at position 2228 of SEQ ID NO: 318539
ccuugaguuguggguuugu

SEQ ID NO: 570456 - RNA, 19 nt, Artificial Sequence
  Description of Artificial Sequence: Synthetic oligonucleotide
  Antisense strand to SEQ ID NO: 570455
acaaacccacaacucaagg

SEQ ID NO: 570457 - RNA, 19 nt, Artificial Sequence
  Description of Artificial Sequence: Synthetic oligonucleotide
  Sense strand starting at position 2233 of SEQ ID NO: 318539
aguuguggguuugugaaau

SEQ ID NO: 570458 - RNA, 19 nt, Artificial Sequence
  Description of Artificial Sequence: Synthetic oligonucleotide
  Antisense strand to SEQ ID NO: 570457
auuucacaaacccacaacu

SEQ ID NO: 570459 - RNA, 19 nt, Artificial Sequence
  Description of Artificial Sequence: Synthetic oligonucleotide
  Sense strand starting at position 2239 of SEQ ID NO: 318539
ggguuugugaaauauugcu

SEQ ID NO: 570460 - RNA, 19 nt, Artificial Sequence
  Description of Artificial Sequence: Synthetic oligonucleotide
  Antisense strand to SEQ ID NO: 570459
agcaauauuucacaaaccc

SEQ ID NO: 570461 - RNA, 19 nt, Artificial Sequence
  Description of Artificial Sequence: Synthetic oligonucleotide
  Sense strand starting at position 2283 of SEQ ID NO: 318539
uuuacacaucucgaugagu

SEQ ID NO: 570462 - RNA, 19 nt, Artificial Sequence
  Description of Artificial Sequence: Synthetic oligonucleotide
  Antisense strand to SEQ ID NO: 570461
acucaucgagauguguaaa

SEQ ID NO: 570463 - RNA, 19 nt, Artificial Sequence
  Description of Artificial Sequence: Synthetic oligonucleotide
  Sense strand starting at position 2285 of SEQ ID NO: 318539
uacacaucucgaugaguuu

SEQ ID NO: 570464 - RNA, 19 nt, Artificial Sequence
  Description of Artificial Sequence: Synthetic oligonucleotide
  Antisense strand to SEQ ID NO: 570463
aaacucaucgagaugugua

SEQ ID NO: 570465 - RNA, 19 nt, Artificial Sequence
  Description of Artificial Sequence: Synthetic oligonucleotide
  Sense strand starting at position 2288 of SEQ ID NO: 318539
acaucucgaugaguuugua

SEQ ID NO: 570466 - RNA, 19 nt, Artificial Sequence
  Description of Artificial Sequence: Synthetic oligonucleotide
  Antisense strand to SEQ ID NO: 570465
uacaaacucaucgagaugu

SEQ ID NO: 570467 - RNA, 19 nt, Artificial Sequence
  Description of Artificial Sequence: Synthetic oligonucleotide
  Sense strand starting at position 2291 of SEQ ID NO: 318539
ucucgaugaguuuguauug

SEQ ID NO: 570468 - RNA, 19 nt, Artificial Sequence
  Description of Artificial Sequence: Synthetic oligonucleotide
  Antisense strand to SEQ ID NO: 570467
caauacaaacucaucgaga

SEQ ID NO: 570469 - RNA, 19 nt, Artificial Sequence
  Description of Artificial Sequence: Synthetic oligonucleotide
  Sense strand starting at position 2380 of SEQ ID NO: 318539
gugguugcuacuggaaaug

SEQ ID NO: 570470 - RNA, 19 nt, Artificial Sequence
  Description of Artificial Sequence: Synthetic oligonucleotide
  Antisense strand to SEQ ID NO: 570469
cauuuccaguagcaaccac

SEQ ID NO: 570471 - RNA, 19 nt, Artificial Sequence
  Description of Artificial Sequence: Synthetic oligonucleotide
  Sense strand starting at position 2483 of SEQ ID NO: 318539
uuguauuaucuaggcuucu

SEQ ID NO: 570472 - RNA, 19 nt, Artificial Sequence
  Description of Artificial Sequence: Synthetic oligonucleotide
  Antisense strand to SEQ ID NO: 570471
agaagccuagauaauacaa

SEQ ID NO: 570473 - RNA, 19 nt, Artificial Sequence
  Description of Artificial Sequence: Synthetic oligonucleotide
  Sense strand starting at position 2505 of SEQ ID NO: 318539
uuuaccuccuuguuacaga

SEQ ID NO: 570474 - RNA, 19 nt, Artificial Sequence
  Description of Artificial Sequence: Synthetic oligonucleotide
  Antisense strand to SEQ ID NO: 570473
ucuguaacaaggagguaaa

SEQ ID NO: 570475 - RNA, 19 nt, Artificial Sequence
  Description of Artificial Sequence: Synthetic oligonucleotide
  Sense strand starting at position 2582 of SEQ ID NO: 318539
cagagaagaucauuguuua

SEQ ID NO: 570476 - RNA, 19 nt, Artificial Sequence
  Description of Artificial Sequence: Synthetic oligonucleotide
  Antisense strand to SEQ ID NO: 570475
uaaacaaugaucuucucug

SEQ ID NO: 570477 - RNA, 19 nt, Artificial Sequence
  Description of Artificial Sequence: Synthetic oligonucleotide
  Sense strand starting at position 3074 of SEQ ID NO: 318539
agacaaaguugcgcucuua

SEQ ID NO: 570478 - RNA, 19 nt, Artificial Sequence
  Description of Artificial Sequence: Synthetic oligonucleotide
  Antisense strand to SEQ ID NO: 570477
uaagagcgcaacuuugucu

SEQ ID NO: 570479 - RNA, 19 nt, Artificial Sequence
  Description of Artificial Sequence: Synthetic oligonucleotide
  Sense strand starting at position 3348 of SEQ ID NO: 318539
ccaguccuaugcuucgaaa

SEQ ID NO: 570480 - RNA, 19 nt, Artificial Sequence
  Description of Artificial Sequence: Synthetic oligonucleotide
  Antisense strand to SEQ ID NO: 570479
uuucgaagcauaggacugg

SEQ ID NO: 570481 - RNA, 19 nt, Artificial Sequence
  Description of Artificial Sequence: Synthetic oligonucleotide
  Sense strand starting at position 3350 of SEQ ID NO: 318539
aguccuaugcuucgaaaca

SEQ ID NO: 570482 - RNA, 19 nt, Artificial Sequence
  Description of Artificial Sequence: Synthetic oligonucleotide
  Antisense strand to SEQ ID NO: 570481
uguuucgaagcauaggacu

SEQ ID NO: 570483 - RNA, 19 nt, Artificial Sequence
  Description of Artificial Sequence: Synthetic oligonucleotide
  Sense strand starting at position 3827 of SEQ ID NO: 318539
uugccaacauauuggauaa

SEQ ID NO: 570484 - RNA, 19 nt, Artificial Sequence
  Description of Artificial Sequence: Synthetic oligonucleotide
  Antisense strand to SEQ ID NO: 570483
uuauccaauauguuggcaa

SEQ ID NO: 570485 - RNA, 19 nt, Artificial Sequence
  Description of Artificial Sequence: Synthetic oligonucleotide
  Sense strand starting at position 247 of SEQ ID NO: 318540
cuuggacugucaucuuauu

SEQ ID NO: 570486 - RNA, 19 nt, Artificial Sequence
  Description of Artificial Sequence: Synthetic oligonucleotide
  Antisense strand to SEQ ID NO: 570485
aauaagaugacaguccaag

SEQ ID NO: 570487 - RNA, 19 nt, Artificial Sequence
  Description of Artificial Sequence: Synthetic oligonucleotide
  Sense strand starting at position 406 of SEQ ID NO: 318540
ggaauucgagucuggguga

SEQ ID NO: 570488 - RNA, 19 nt, Artificial Sequence
  Description of Artificial Sequence: Synthetic oligonucleotide
  Antisense strand to SEQ ID NO: 570487
ucacccagacucgaauucc

SEQ ID NO: 570489 - RNA, 19 nt, Artificial Sequence
  Description of Artificial Sequence: Synthetic oligonucleotide
  Sense strand starting at position 444 of SEQ ID NO: 318540
cgcuuacucagcccguuau

SEQ ID NO: 570490 - RNA, 19 nt, Artificial Sequence
  Description of Artificial Sequence: Synthetic oligonucleotide
  Antisense strand to SEQ ID NO: 570489
auaacgggcugaguaagcg

SEQ ID NO: 570491 - RNA, 19 nt, Artificial Sequence
  Description of Artificial Sequence: Synthetic oligonucleotide
  Sense strand starting at position 513 of SEQ ID NO: 318540
uccuuugauccuuaaguug

SEQ ID NO: 570492 - RNA, 19 nt, Artificial Sequence
  Description of Artificial Sequence: Synthetic oligonucleotide
  Antisense strand to SEQ ID NO: 570491
caacuuaaggaucaaagga

SEQ ID NO: 570493 - RNA, 19 nt, Artificial Sequence
  Description of Artificial Sequence: Synthetic oligonucleotide
  Sense strand starting at position 520 of SEQ ID NO: 318540
auccuuaaguugcugaaau

SEQ ID NO: 570494 - RNA, 19 nt, Artificial Sequence
  Description of Artificial Sequence: Synthetic oligonucleotide
  Antisense strand to SEQ ID NO: 570493
auuucagcaacuuaaggau

SEQ ID NO: 570495 - RNA, 19 nt, Artificial Sequence
  Description of Artificial Sequence: Synthetic oligonucleotide
  Sense strand starting at position 522 of SEQ ID NO: 318540
ccuuaaguugcugaaauug

SEQ ID NO: 570496 - RNA, 19 nt, Artificial Sequence
  Description of Artificial Sequence: Synthetic oligonucleotide
  Antisense strand to SEQ ID NO: 570495
caauuucagcaacuuaagg

SEQ ID NO: 570497 - RNA, 19 nt, Artificial Sequence
  Description of Artificial Sequence: Synthetic oligonucleotide
  Sense strand starting at position 590 of SEQ ID NO: 318540
aaggccucugacugagaaa

SEQ ID NO: 570498 - RNA, 19 nt, Artificial Sequence
  Description of Artificial Sequence: Synthetic oligonucleotide
  Antisense strand to SEQ ID NO: 570497
uuucucagucagaggccuu

SEQ ID NO: 570499 - RNA, 19 nt, Artificial Sequence
  Description of Artificial Sequence: Synthetic oligonucleotide
  Sense strand starting at position 661 of SEQ ID NO: 318540
ggucacuaauacuuagcaa

SEQ ID NO: 570500 - RNA, 19 nt, Artificial Sequence
  Description of Artificial Sequence: Synthetic oligonucleotide
  Antisense strand to SEQ ID NO: 570499
uugcuaaguauuagugacc

SEQ ID NO: 570501 - RNA, 19 nt, Artificial Sequence
  Description of Artificial Sequence: Synthetic oligonucleotide
  Sense strand starting at position 816 of SEQ ID NO: 318540
agaaacacauccuccgauu

SEQ ID NO: 570502 - RNA, 19 nt, Artificial Sequence
  Description of Artificial Sequence: Synthetic oligonucleotide
  Antisense strand to SEQ ID NO: 570501
aaucggaggauguguuucu

SEQ ID NO: 570503 - RNA, 19 nt, Artificial Sequence
  Description of Artificial Sequence: Synthetic oligonucleotide
  Sense strand starting at position 1277 of SEQ ID NO: 318540
aggaaauacuuagugguca

SEQ ID NO: 570504 - RNA, 19 nt, Artificial Sequence
  Description of Artificial Sequence: Synthetic oligonucleotide
  Antisense strand to SEQ ID NO: 570503
ugaccacuaaguauuuccu

SEQ ID NO: 570505 - RNA, 19 nt, Artificial Sequence
  Description of Artificial Sequence: Synthetic oligonucleotide
  Sense strand starting at position 1281 of SEQ ID NO: 318540
aauacuuaguggucaguga

SEQ ID NO: 570506 - RNA, 19 nt, Artificial Sequence
  Description of Artificial Sequence: Synthetic oligonucleotide
  Antisense strand to SEQ ID NO: 570505
ucacugaccacuaaguauu

SEQ ID NO: 570507 - RNA, 19 nt, Artificial Sequence
  Description of Artificial Sequence: Synthetic oligonucleotide
  Sense strand starting at position 1335 of SEQ ID NO: 318540
ccuccaaguaguuagggau

SEQ ID NO: 570508 - RNA, 19 nt, Artificial Sequence
  Description of Artificial Sequence: Synthetic oligonucleotide
  Antisense strand to SEQ ID NO: 570507
aucccuaacuacuuggagg

SEQ ID NO: 570509 - RNA, 19 nt, Artificial Sequence
  Description of Artificial Sequence: Synthetic oligonucleotide
  Sense strand starting at position 1449 of SEQ ID NO: 318540
caguaugugguccagggua

SEQ ID NO: 570510 - RNA, 19 nt, Artificial Sequence
  Description of Artificial Sequence: Synthetic oligonucleotide
  Antisense strand to SEQ ID NO: 570509
uacccuggaccacauacug

SEQ ID NO: 570511 - RNA, 19 nt, Artificial Sequence
  Description of Artificial Sequence: Synthetic oligonucleotide
  Sense strand starting at position 1931 of SEQ ID NO: 318540
caggaaggugucuagugua

SEQ ID NO: 570512 - RNA, 19 nt, Artificial Sequence
  Description of Artificial Sequence: Synthetic oligonucleotide
  Antisense strand to SEQ ID NO: 570511
uacacuagacaccuuccug

SEQ ID NO: 570513 - RNA, 19 nt, Artificial Sequence
  Description of Artificial Sequence: Synthetic oligonucleotide
  Sense strand starting at position 2276 of SEQ ID NO: 318540
aacugagguuucuugaagu

SEQ ID NO: 570514 - RNA, 19 nt, Artificial Sequence
  Description of Artificial Sequence: Synthetic oligonucleotide
  Antisense strand to SEQ ID NO: 570513
acuucaagaaaccucaguu

SEQ ID NO: 570515 - RNA, 19 nt, Artificial Sequence
  Description of Artificial Sequence: Synthetic oligonucleotide
  Sense strand starting at position 2299 of SEQ ID NO: 318540
gaaucugcccgaggucaga

SEQ ID NO: 570516 - RNA, 19 nt, Artificial Sequence
  Description of Artificial Sequence: Synthetic oligonucleotide
  Antisense strand to SEQ ID NO: 570515
ucugaccucgggcagauuc

SEQ ID NO: 570517 - RNA, 19 nt, Artificial Sequence
  Description of Artificial Sequence: Synthetic oligonucleotide
  Sense strand starting at position 2312 of SEQ ID NO: 318540
gucagauagcuagaaagug

SEQ ID NO: 570518 - RNA, 19 nt, Artificial Sequence
  Description of Artificial Sequence: Synthetic oligonucleotide
  Antisense strand to SEQ ID NO: 570517
cacuuucuagcuaucugac

SEQ ID NO: 570519 - RNA, 19 nt, Artificial Sequence
  Description of Artificial Sequence: Synthetic oligonucleotide
  Sense strand starting at position 2461 of SEQ ID NO: 318540
cacagucugcuguaagaca

SEQ ID NO: 570520 - RNA, 19 nt, Artificial Sequence
  Description of Artificial Sequence: Synthetic oligonucleotide
  Antisense strand to SEQ ID NO: 570519
ugucuuacagcagacugug

SEQ ID NO: 570521 - RNA, 19 nt, Artificial Sequence
  Description of Artificial Sequence: Synthetic oligonucleotide
  Sense strand starting at position 2521 of SEQ ID NO: 318540
gggacagucacucagucau

SEQ ID NO: 570522 - RNA, 19 nt, Artificial Sequence
  Description of Artificial Sequence: Synthetic oligonucleotide
  Antisense strand to SEQ ID NO: 570521
augacugagugacuguccc

SEQ ID NO: 570523 - RNA, 19 nt, Artificial Sequence
  Description of Artificial Sequence: Synthetic oligonucleotide
  Sense strand starting at position 2527 of SEQ ID NO: 318540
gucacucagucaucucuaa

SEQ ID NO: 570524 - RNA, 19 nt, Artificial Sequence
  Description of Artificial Sequence: Synthetic oligonucleotide
  Antisense strand to SEQ ID NO: 570523
uuagagaugacugagugac

SEQ ID NO: 570525 - RNA, 19 nt, Artificial Sequence
  Description of Artificial Sequence: Synthetic oligonucleotide
  Sense strand starting at position 2566 of SEQ ID NO: 318540
ggcuccauggagugaguaa

SEQ ID NO: 570526 - RNA, 19 nt, Artificial Sequence
  Description of Artificial Sequence: Synthetic oligonucleotide
  Antisense strand to SEQ ID NO: 570525
uuacucacuccauggagcc

SEQ ID NO: 570527 - RNA, 19 nt, Artificial Sequence
  Description of Artificial Sequence: Synthetic oligonucleotide
  Sense strand starting at position 2567 of SEQ ID NO: 318540
gcuccauggagugaguaaa

SEQ ID NO: 570528 - RNA, 19 nt, Artificial Sequence
  Description of Artificial Sequence: Synthetic oligonucleotide
  Antisense strand to SEQ ID NO: 570527
uuuacucacuccauggagc

SEQ ID NO: 570529 - RNA, 19 nt, Artificial Sequence
  Description of Artificial Sequence: Synthetic oligonucleotide
  Sense strand starting at position 2582 of SEQ ID NO: 318540
uaaagaguguucuucugga

SEQ ID NO: 570530 - RNA, 19 nt, Artificial Sequence
  Description of Artificial Sequence: Synthetic oligonucleotide
  Antisense strand to SEQ ID NO: 570529
uccagaagaacacucuuua

SEQ ID NO: 570531 - RNA, 19 nt, Artificial Sequence
  Description of Artificial Sequence: Synthetic oligonucleotide
  Sense strand starting at position 2609 of SEQ ID NO: 318540
agaggcugagauuguauga

SEQ ID NO: 570532 - RNA, 19 nt, Artificial Sequence
  Description of Artificial Sequence: Synthetic oligonucleotide
  Antisense strand to SEQ ID NO: 570531
ucauacaaucucagccucu

SEQ ID NO: 570533 - RNA, 19 nt, Artificial Sequence
  Description of Artificial Sequence: Synthetic oligonucleotide
  Sense strand starting at position 2638 of SEQ ID NO: 318540
caguuugcugggcaagaua

SEQ ID NO: 570534 - RNA, 19 nt, Artificial Sequence
  Description of Artificial Sequence: Synthetic oligonucleotide
  Antisense strand to SEQ ID NO: 570533
uaucuugcccagcaaacug

SEQ ID NO: 570535 - RNA, 19 nt, Artificial Sequence
  Description of Artificial Sequence: Synthetic oligonucleotide
  Sense strand starting at position 2883 of SEQ ID NO: 318540
uucuuaagggcuuauuaca

SEQ ID NO: 570536 - RNA, 19 nt, Artificial Sequence
  Description of Artificial Sequence: Synthetic oligonucleotide
  Antisense strand to SEQ ID NO: 570535
uguaauaagcccuuaagaa

SEQ ID NO: 570537 - RNA, 19 nt, Artificial Sequence
  Description of Artificial Sequence: Synthetic oligonucleotide
  Sense strand starting at position 2906 of SEQ ID NO: 318540
acaagcuuugcuuagcuaa

SEQ ID NO: 570538 - RNA, 19 nt, Artificial Sequence
  Description of Artificial Sequence: Synthetic oligonucleotide
  Antisense strand to SEQ ID NO: 570537
uuagcuaagcaaagcuugu

SEQ ID NO: 570539 - RNA, 19 nt, Artificial Sequence
  Description of Artificial Sequence: Synthetic oligonucleotide
  Sense strand starting at position 3351 of SEQ ID NO: 318540
gcuucuuguccugaaucaa

SEQ ID NO: 570540 - RNA, 19 nt, Artificial Sequence
  Description of Artificial Sequence: Synthetic oligonucleotide
  Antisense strand to SEQ ID NO: 570539
uugauucaggacaagaagc

SEQ ID NO: 570541 - RNA, 19 nt, Artificial Sequence
  Description of Artificial Sequence: Synthetic oligonucleotide
  Sense strand starting at position 3370 of SEQ ID NO: 318540
cugaaacacuugcugugau

SEQ ID NO: 570542 - RNA, 19 nt, Artificial Sequence
  Description of Artificial Sequence: Synthetic oligonucleotide
  Antisense strand to SEQ ID NO: 570541
aucacagcaaguguuucag

SEQ ID NO: 570543 - RNA, 19 nt, Artificial Sequence
  Description of Artificial Sequence: Synthetic oligonucleotide
  Sense strand starting at position 3390 of SEQ ID NO: 318540
ugagaaguguuauucccuu

SEQ ID NO: 570544 - RNA, 19 nt, Artificial Sequence
  Description of Artificial Sequence: Synthetic oligonucleotide
  Antisense strand to SEQ ID NO: 570543
aagggaauaacacuucuca

SEQ ID NO: 570545 - RNA, 19 nt, Artificial Sequence
  Description of Artificial Sequence: Synthetic oligonucleotide
  Sense strand starting at position 3419 of SEQ ID NO: 318540
auuacauggcaguauuacu

SEQ ID NO: 570546 - RNA, 19 nt, Artificial Sequence
  Description of Artificial Sequence: Synthetic oligonucleotide
  Antisense strand to SEQ ID NO: 570545
aguaauacugccauguaau

SEQ ID NO: 570547 - RNA, 19 nt, Artificial Sequence
  Description of Artificial Sequence: Synthetic oligonucleotide
  Sense strand starting at position 3432 of SEQ ID NO: 318540
auuacuggucugugaagua

SEQ ID NO: 570548 - RNA, 19 nt, Artificial Sequence
  Description of Artificial Sequence: Synthetic oligonucleotide
  Antisense strand to SEQ ID NO: 570547
uacuucacagaccaguaau

SEQ ID NO: 570549 - RNA, 19 nt, Artificial Sequence
  Description of Artificial Sequence: Synthetic oligonucleotide
  Sense strand starting at position 3505 of SEQ ID NO: 318540
uuuguaaucucagauuuga

SEQ ID NO: 570550 - RNA, 19 nt, Artificial Sequence
  Description of Artificial Sequence: Synthetic oligonucleotide
  Antisense strand to SEQ ID NO: 570549
ucaaaucugagauuacaaa

SEQ ID NO: 570551 - RNA, 19 nt, Artificial Sequence
  Description of Artificial Sequence: Synthetic oligonucleotide
  Sense strand starting at position 3553 of SEQ ID NO: 318540
cgagcaaggucaguaauaa

SEQ ID NO: 570552 - RNA, 19 nt, Artificial Sequence
  Description of Artificial Sequence: Synthetic oligonucleotide
  Antisense strand to SEQ ID NO: 570551
uuauuacugaccuugcucg

SEQ ID NO: 570553 - RNA, 19 nt, Artificial Sequence
  Description of Artificial Sequence: Synthetic oligonucleotide
  Sense strand starting at position 3563 of SEQ ID NO: 318540
caguaauaagauuguugag

SEQ ID NO: 570554 - RNA, 19 nt, Artificial Sequence
  Description of Artificial Sequence: Synthetic oligonucleotide
  Antisense strand to SEQ ID NO: 570553
cucaacaaucuuauuacug

SEQ ID NO: 570555 - RNA, 19 nt, Artificial Sequence
  Description of Artificial Sequence: Synthetic oligonucleotide
  Sense strand starting at position 3565 of SEQ ID NO: 318540
guaauaagauuguugagga

SEQ ID NO: 570556 - RNA, 19 nt, Artificial Sequence
  Description of Artificial Sequence: Synthetic oligonucleotide
  Antisense strand to SEQ ID NO: 570555
uccucaacaaucuuauuac

SEQ ID NO: 570557 - RNA, 19 nt, Artificial Sequence
  Description of Artificial Sequence: Synthetic oligonucleotide
  Sense strand starting at position 3761 of SEQ ID NO: 318540
cucauugcaccacauguua

SEQ ID NO: 570558 - RNA, 19 nt, Artificial Sequence
  Description of Artificial Sequence: Synthetic oligonucleotide
  Antisense strand to SEQ ID NO: 570557
uaacauguggugcaaugag

SEQ ID NO: 570559 - RNA, 19 nt, Artificial Sequence
  Description of Artificial Sequence: Synthetic oligonucleotide
  Sense strand starting at position 3891 of SEQ ID NO: 318540
guggcaacccuuggaaaga

SEQ ID NO: 570560 - RNA, 19 nt, Artificial Sequence
  Description of Artificial Sequence: Synthetic oligonucleotide
  Antisense strand to SEQ ID NO: 570559
ucuuuccaaggguugccac

SEQ ID NO: 570561 - RNA, 19 nt, Artificial Sequence
  Description of Artificial Sequence: Synthetic oligonucleotide
  Sense strand starting at position 3949 of SEQ ID NO: 318540
uggauacuagauuguagau

SEQ ID NO: 570562 - RNA, 19 nt, Artificial Sequence
  Description of Artificial Sequence: Synthetic oligonucleotide
  Antisense strand to SEQ ID NO: 570561
aucuacaaucuaguaucca

SEQ ID NO: 570563 - RNA, 19 nt, Artificial Sequence
  Description of Artificial Sequence: Synthetic oligonucleotide
  Sense strand starting at position 3958 of SEQ ID NO: 318540
gauuguagaugacuuccaa

SEQ ID NO: 570564 - RNA, 19 nt, Artificial Sequence
  Description of Artificial Sequence: Synthetic oligonucleotide
  Antisense strand to SEQ ID NO: 570563
uuggaagucaucuacaauc

SEQ ID NO: 570565 - RNA, 19 nt, Artificial Sequence
  Description of Artificial Sequence: Synthetic oligonucleotide
  Sense strand starting at position 78 of SEQ ID NO: 318541
cccauugagugguuacauu

SEQ ID NO: 570566 - RNA, 19 nt, Artificial Sequence
  Description of Artificial Sequence: Synthetic oligonucleotide
  Antisense strand to SEQ ID NO: 570565
aauguaaccacucaauggg

SEQ ID NO: 570567 - RNA, 19 nt, Artificial Sequence
  Description of Artificial Sequence: Synthetic oligonucleotide
  Sense strand starting at position 355 of SEQ ID NO: 318541
gugugugcacgaguuguau

SEQ ID NO: 570568 - RNA, 19 nt, Artificial Sequence
  Description of Artificial Sequence: Synthetic oligonucleotide
  Antisense strand to SEQ ID NO: 570567
auacaacucgugcacacac

SEQ ID NO: 570569 - RNA, 19 nt, Artificial Sequence
  Description of Artificial Sequence: Synthetic oligonucleotide
  Sense strand starting at position 527 of SEQ ID NO: 318541
gggauugucaucgauaauc

SEQ ID NO: 570570 - RNA, 19 nt, Artificial Sequence
  Description of Artificial Sequence: Synthetic oligonucleotide
  Antisense strand to SEQ ID NO: 570569
gauuaucgaugacaauccc

SEQ ID NO: 570571 - RNA, 19 nt, Artificial Sequence
  Description of Artificial Sequence: Synthetic oligonucleotide
  Sense strand starting at position 529 of SEQ ID NO: 318541
gauugucaucgauaaucuc

SEQ ID NO: 570572 - RNA, 19 nt, Artificial Sequence
  Description of Artificial Sequence: Synthetic oligonucleotide
  Antisense strand to SEQ ID NO: 570571
gagauuaucgaugacaauc

SEQ ID NO: 570573 - RNA, 19 nt, Artificial Sequence
  Description of Artificial Sequence: Synthetic oligonucleotide
  Sense strand starting at position 557 of SEQ ID NO: 318541
acaguuguuaccgaucuga

SEQ ID NO: 570574 - RNA, 19 nt, Artificial Sequence
  Description of Artificial Sequence: Synthetic oligonucleotide
  Antisense strand to SEQ ID NO: 570573
ucagaucgguaacaacugu

SEQ ID NO: 570575 - RNA, 19 nt, Artificial Sequence
  Description of Artificial Sequence: Synthetic oligonucleotide
  Sense strand starting at position 561 of SEQ ID NO: 318541
uuguuaccgaucugaugau

SEQ ID NO: 570576 - RNA, 19 nt, Artificial Sequence
  Description of Artificial Sequence: Synthetic oligonucleotide
  Antisense strand to SEQ ID NO: 570575
aucaucagaucgguaacaa

SEQ ID NO: 570577 - RNA, 19 nt, Artificial Sequence
  Description of Artificial Sequence: Synthetic oligonucleotide
  Sense strand starting at position 581 of SEQ ID NO: 318541
accagauagcagugugauu

SEQ ID NO: 570578 - RNA, 19 nt, Artificial Sequence
  Description of Artificial Sequence: Synthetic oligonucleotide
  Antisense strand to SEQ ID NO: 570577
aaucacacugcuaucuggu

SEQ ID NO: 570579 - RNA, 19 nt, Artificial Sequence
  Description of Artificial Sequence: Synthetic oligonucleotide
  Sense strand starting at position 583 of SEQ ID NO: 318541
cagauagcagugugauuga

SEQ ID NO: 570580 - RNA, 19 nt, Artificial Sequence
  Description of Artificial Sequence: Synthetic oligonucleotide
  Antisense strand to SEQ ID NO: 570579
ucaaucacacugcuaucug

SEQ ID NO: 570581 - RNA, 19 nt, Artificial Sequence
  Description of Artificial Sequence: Synthetic oligonucleotide
  Sense strand starting at position 588 of SEQ ID NO: 318541
agcagugugauugacagua

SEQ ID NO: 570582 - RNA, 19 nt, Artificial Sequence
  Description of Artificial Sequence: Synthetic oligonucleotide
  Antisense strand to SEQ ID NO: 570581
uacugucaaucacacugcu

SEQ ID NO: 570583 - RNA, 19 nt, Artificial Sequence
  Description of Artificial Sequence: Synthetic oligonucleotide
  Sense strand starting at position 1024 of SEQ ID NO: 318541
gcaguaaagguggagacau

SEQ ID NO: 570584 - RNA, 19 nt, Artificial Sequence
  Description of Artificial Sequence: Synthetic oligonucleotide
  Antisense strand to SEQ ID NO: 570583
augucuccaccuuuacugc

SEQ ID NO: 570585 - RNA, 19 nt, Artificial Sequence
  Description of Artificial Sequence: Synthetic oligonucleotide
  Sense strand starting at position 1104 of SEQ ID NO: 318541
agaauaauggcagaugugu

SEQ ID NO: 570586 - RNA, 19 nt, Artificial Sequence
  Description of Artificial Sequence: Synthetic oligonucleotide
  Antisense strand to SEQ ID NO: 570585
acacaucugccauuauucu

SEQ ID NO: 570587 - RNA, 19 nt, Artificial Sequence
  Description of Artificial Sequence: Synthetic oligonucleotide
  Sense strand starting at position 1191 of SEQ ID NO: 318541
auaggaaacuguuccugga

SEQ ID NO: 570588 - RNA, 19 nt, Artificial Sequence
  Description of Artificial Sequence: Synthetic oligonucleotide
  Antisense strand to SEQ ID NO: 570587
uccaggaacaguuuccuau

SEQ ID NO: 570589 - RNA, 19 nt, Artificial Sequence
  Description of Artificial Sequence: Synthetic oligonucleotide
  Sense strand starting at position 1195 of SEQ ID NO: 318541
gaaacuguuccuggagaca

SEQ ID NO: 570590 - RNA, 19 nt, Artificial Sequence
  Description of Artificial Sequence: Synthetic oligonucleotide
  Antisense strand to SEQ ID NO: 570589
ugucuccaggaacaguuuc

SEQ ID NO: 570591 - RNA, 19 nt, Artificial Sequence
  Description of Artificial Sequence: Synthetic oligonucleotide
  Sense strand starting at position 1359 of SEQ ID NO: 318541
gcguguuaaggagauagau

SEQ ID NO: 570592 - RNA, 19 nt, Artificial Sequence
  Description of Artificial Sequence: Synthetic oligonucleotide
  Antisense strand to SEQ ID NO: 570591
aucuaucuccuuaacacgc

SEQ ID NO: 570593 - RNA, 19 nt, Artificial Sequence
  Description of Artificial Sequence: Synthetic oligonucleotide
  Sense strand starting at position 1476 of SEQ ID NO: 318541
gauggacauucucugaagu

SEQ ID NO: 570594 - RNA, 19 nt, Artificial Sequence
  Description of Artificial Sequence: Synthetic oligonucleotide
  Antisense strand to SEQ ID NO: 570593
acuucagagaauguccauc

SEQ ID NO: 570595 - RNA, 19 nt, Artificial Sequence
  Description of Artificial Sequence: Synthetic oligonucleotide
  Sense strand starting at position 1477 of SEQ ID NO: 318541
auggacauucucugaagua

SEQ ID NO: 570596 - RNA, 19 nt, Artificial Sequence
  Description of Artificial Sequence: Synthetic oligonucleotide
  Antisense strand to SEQ ID NO: 570595
uacuucagagaauguccau

SEQ ID NO: 570597 - RNA, 19 nt, Artificial Sequence
  Description of Artificial Sequence: Synthetic oligonucleotide
  Sense strand starting at position 1527 of SEQ ID NO: 318541
guccguuguccaaggaguu

SEQ ID NO: 570598 - RNA, 19 nt, Artificial Sequence
  Description of Artificial Sequence: Synthetic oligonucleotide
  Antisense strand to SEQ ID NO: 570597
aacuccuuggacaacggac

SEQ ID NO: 570599 - RNA, 19 nt, Artificial Sequence
  Description of Artificial Sequence: Synthetic oligonucleotide
  Sense strand starting at position 1614 of SEQ ID NO: 318541
ggguuaaggcucugaauga

SEQ ID NO: 570600 - RNA, 19 nt, Artificial Sequence
  Description of Artificial Sequence: Synthetic oligonucleotide
  Antisense strand to SEQ ID NO: 570599
ucauucagagccuuaaccc

SEQ ID NO: 570601 - RNA, 19 nt, Artificial Sequence
  Description of Artificial Sequence: Synthetic oligonucleotide
  Sense strand starting at position 1640 of SEQ ID NO: 318541
augggucuuucuccagaga

SEQ ID NO: 570602 - RNA, 19 nt, Artificial Sequence
  Description of Artificial Sequence: Synthetic oligonucleotide
  Antisense strand to SEQ ID NO: 570601
ucucuggagaaagacccau

SEQ ID NO: 570603 - RNA, 19 nt, Artificial Sequence
  Description of Artificial Sequence: Synthetic oligonucleotide
  Sense strand starting at position 1821 of SEQ ID NO: 318541
ucaggaugguccucaguuu

SEQ ID NO: 570604 - RNA, 19 nt, Artificial Sequence
  Description of Artificial Sequence: Synthetic oligonucleotide
  Antisense strand to SEQ ID NO: 570603
aaacugaggaccauccuga

SEQ ID NO: 570605 - RNA, 19 nt, Artificial Sequence
  Description of Artificial Sequence: Synthetic oligonucleotide
  Sense strand starting at position 1916 of SEQ ID NO: 318541
caaagugaacagugugacu

SEQ ID NO: 570606 - RNA, 19 nt, Artificial Sequence
  Description of Artificial Sequence: Synthetic oligonucleotide
  Antisense strand to SEQ ID NO: 570605
agucacacuguucacuuug

SEQ ID NO: 570607 - RNA, 19 nt, Artificial Sequence
  Description of Artificial Sequence: Synthetic oligonucleotide
  Sense strand starting at position 2067 of SEQ ID NO: 318541
agcagaauccugggaugca

SEQ ID NO: 570608 - RNA, 19 nt, Artificial Sequence
  Description of Artificial Sequence: Synthetic oligonucleotide
  Antisense strand to SEQ ID NO: 570607
ugcaucccaggauucugcu

SEQ ID NO: 570609 - RNA, 19 nt, Artificial Sequence
  Description of Artificial Sequence: Synthetic oligonucleotide
  Sense strand starting at position 2070 of SEQ ID NO: 318541
agaauccugggaugcagau

SEQ ID NO: 570610 - RNA, 19 nt, Artificial Sequence
  Description of Artificial Sequence: Synthetic oligonucleotide
  Antisense strand to SEQ ID NO: 570609
aucugcaucccaggauucu

SEQ ID NO: 570611 - RNA, 19 nt, Artificial Sequence
  Description of Artificial Sequence: Synthetic oligonucleotide
  Sense strand starting at position 2083 of SEQ ID NO: 318541
gcagauguggcccaacaga

SEQ ID NO: 570612 - RNA, 19 nt, Artificial Sequence
  Description of Artificial Sequence: Synthetic oligonucleotide
  Antisense strand to SEQ ID NO: 570611
ucuguugggccacaucugc

SEQ ID NO: 570613 - RNA, 19 nt, Artificial Sequence
  Description of Artificial Sequence: Synthetic oligonucleotide
  Sense strand starting at position 2164 of SEQ ID NO: 318541
augccaccugcucagaauu

SEQ ID NO: 570614 - RNA, 19 nt, Artificial Sequence
  Description of Artificial Sequence: Synthetic oligonucleotide
  Antisense strand to SEQ ID NO: 570613
aauucugagcagguggcau

SEQ ID NO: 570615 - RNA, 19 nt, Artificial Sequence
  Description of Artificial Sequence: Synthetic oligonucleotide
  Sense strand starting at position 2202 of SEQ ID NO: 318541
gccugccagugauuuggaa

SEQ ID NO: 570616 - RNA, 19 nt, Artificial Sequence
  Description of Artificial Sequence: Synthetic oligonucleotide
  Antisense strand to SEQ ID NO: 570615
uuccaaaucacuggcaggc

SEQ ID NO: 570617 - RNA, 19 nt, Artificial Sequence
  Description of Artificial Sequence: Synthetic oligonucleotide
  Sense strand starting at position 2206 of SEQ ID NO: 318541
gccagugauuuggaaggga

SEQ ID NO: 570618 - RNA, 19 nt, Artificial Sequence
  Description of Artificial Sequence: Synthetic oligonucleotide
  Antisense strand to SEQ ID NO: 570617
ucccuuccaaaucacuggc

SEQ ID NO: 570619 - RNA, 19 nt, Artificial Sequence
  Description of Artificial Sequence: Synthetic oligonucleotide
  Sense strand starting at position 2298 of SEQ ID NO: 318541
uucuccaugcugggaauau

SEQ ID NO: 570620 - RNA, 19 nt, Artificial Sequence
  Description of Artificial Sequence: Synthetic oligonucleotide
  Antisense strand to SEQ ID NO: 570619
auauucccagcauggagaa

SEQ ID NO: 570621 - RNA, 19 nt, Artificial Sequence
  Description of Artificial Sequence: Synthetic oligonucleotide
  Sense strand starting at position 2576 of SEQ ID NO: 318541
guaggucuuggguaagaaa

SEQ ID NO: 570622 - RNA, 19 nt, Artificial Sequence
  Description of Artificial Sequence: Synthetic oligonucleotide
  Antisense strand to SEQ ID NO: 570621
uuucuuacccaagaccuac

SEQ ID NO: 570623 - RNA, 19 nt, Artificial Sequence
  Description of Artificial Sequence: Synthetic oligonucleotide
  Sense strand starting at position 3196 of SEQ ID NO: 318541
aagagauauccugguuugg

SEQ ID NO: 570624 - RNA, 19 nt, Artificial Sequence
  Description of Artificial Sequence: Synthetic oligonucleotide
  Antisense strand to SEQ ID NO: 570623
ccaaaccaggauaucucuu

SEQ ID NO: 570625 - RNA, 19 nt, Artificial Sequence
  Description of Artificial Sequence: Synthetic oligonucleotide
  Sense strand starting at position 3198 of SEQ ID NO: 318541
gagauauccugguuuggau

SEQ ID NO: 570626 - RNA, 19 nt, Artificial Sequence
  Description of Artificial Sequence: Synthetic oligonucleotide
  Antisense strand to SEQ ID NO: 570625
auccaaaccaggauaucuc

SEQ ID NO: 570627 - RNA, 19 nt, Artificial Sequence
  Description of Artificial Sequence: Synthetic oligonucleotide
  Sense strand starting at position 3216 of SEQ ID NO: 318541
ugauaauuacauggucaca

SEQ ID NO: 570628 - RNA, 19 nt, Artificial Sequence
  Description of Artificial Sequence: Synthetic oligonucleotide
  Antisense strand to SEQ ID NO: 570627
ugugaccauguaauuauca

SEQ ID NO: 570629 - RNA, 19 nt, Artificial Sequence
  Description of Artificial Sequence: Synthetic oligonucleotide
  Sense strand starting at position 3232 of SEQ ID NO: 318541
acaccagagaugugguuaa

SEQ ID NO: 570630 - RNA, 19 nt, Artificial Sequence
  Description of Artificial Sequence: Synthetic oligonucleotide
  Antisense strand to SEQ ID NO: 570629
uuaaccacaucucuggugu

SEQ ID NO: 570631 - RNA, 19 nt, Artificial Sequence
  Description of Artificial Sequence: Synthetic oligonucleotide
  Sense strand starting at position 3286 of SEQ ID NO: 318541
gaucuuguaggcuauugua

SEQ ID NO: 570632 - RNA, 19 nt, Artificial Sequence
  Description of Artificial Sequence: Synthetic oligonucleotide
  Antisense strand to SEQ ID NO: 570631
uacaauagccuacaagauc

SEQ ID NO: 570633 - RNA, 19 nt, Artificial Sequence
  Description of Artificial Sequence: Synthetic oligonucleotide
  Sense strand starting at position 3515 of SEQ ID NO: 318541
ggcuuaaaccaggguggua

SEQ ID NO: 570634 - RNA, 19 nt, Artificial Sequence
  Description of Artificial Sequence: Synthetic oligonucleotide
  Antisense strand to SEQ ID NO: 570633
uaccacccugguuuaagcc

SEQ ID NO: 570635 - RNA, 19 nt, Artificial Sequence
  Description of Artificial Sequence: Synthetic oligonucleotide
  Sense strand starting at position 3743 of SEQ ID NO: 318541
cuuugauugcacguuuguu

SEQ ID NO: 570636 - RNA, 19 nt, Artificial Sequence
  Description of Artificial Sequence: Synthetic oligonucleotide
  Antisense strand to SEQ ID NO: 570635
aacaaacgugcaaucaaag

SEQ ID NO: 570637 - RNA, 19 nt, Artificial Sequence
  Description of Artificial Sequence: Synthetic oligonucleotide
  Sense strand starting at position 3744 of SEQ ID NO: 318541
uuugauugcacguuuguuu

SEQ ID NO: 570638 - RNA, 19 nt, Artificial Sequence
  Description of Artificial Sequence: Synthetic oligonucleotide
  Antisense strand to SEQ ID NO: 570637
aaacaaacgugcaaucaaa

SEQ ID NO: 570639 - RNA, 19 nt, Artificial Sequence
  Description of Artificial Sequence: Synthetic oligonucleotide
  Sense strand starting at position 3771 of SEQ ID NO: 318541
ugcacagauugcuuaugaa

SEQ ID NO: 570640 - RNA, 19 nt, Artificial Sequence
  Description of Artificial Sequence: Synthetic oligonucleotide
  Antisense strand to SEQ ID NO: 570639
uucauaagcaaucugugca

SEQ ID NO: 570641 - RNA, 19 nt, Artificial Sequence
  Description of Artificial Sequence: Synthetic oligonucleotide
  Sense strand starting at position 3821 of SEQ ID NO: 318541
ccucuuugugcugcuguaa

SEQ ID NO: 570642 - RNA, 19 nt, Artificial Sequence
  Description of Artificial Sequence: Synthetic oligonucleotide
  Antisense strand to SEQ ID NO: 570641
uuacagcagcacaaagagg

SEQ ID NO: 570643 - RNA, 19 nt, Artificial Sequence
  Description of Artificial Sequence: Synthetic oligonucleotide
  Sense strand starting at position 3822 of SEQ ID NO: 318541
cucuuugugcugcuguaaa

SEQ ID NO: 570644 - RNA, 19 nt, Artificial Sequence
  Description of Artificial Sequence: Synthetic oligonucleotide
  Antisense strand to SEQ ID NO: 570643
uuuacagcagcacaaagag

SEQ ID NO: 570645 - RNA, 19 nt, Artificial Sequence
  Description of Artificial Sequence: Synthetic oligonucleotide
  Sense strand starting at position 64 of SEQ ID NO: 318542
ggcuuaucagagcaccuga

SEQ ID NO: 570646 - RNA, 19 nt, Artificial Sequence
  Description of Artificial Sequence: Synthetic oligonucleotide
  Antisense strand to SEQ ID NO: 570645
ucaggugcucugauaagcc

SEQ ID NO: 570647 - RNA, 19 nt, Artificial Sequence
  Description of Artificial Sequence: Synthetic oligonucleotide
  Sense strand starting at position 78 of SEQ ID NO: 318542
ccugaaauguucucaguua

SEQ ID NO: 570648 - RNA, 19 nt, Artificial Sequence
  Description of Artificial Sequence: Synthetic oligonucleotide
  Antisense strand to SEQ ID NO: 570647
uaacugagaacauuucagg

SEQ ID NO: 570649 - RNA, 19 nt, Artificial Sequence
  Description of Artificial Sequence: Synthetic oligonucleotide
  Sense strand starting at position 135 of SEQ ID NO: 318542
ccggauucuccauguuaaa

SEQ ID NO: 570650 - RNA, 19 nt, Artificial Sequence
  Description of Artificial Sequence: Synthetic oligonucleotide
  Antisense strand to SEQ ID NO: 570649
uuuaacauggagaauccgg

SEQ ID NO: 570651 - RNA, 19 nt, Artificial Sequence
  Description of Artificial Sequence: Synthetic oligonucleotide
  Sense strand starting at position 155 of SEQ ID NO: 318542
ugcaaauagccauggaaau

SEQ ID NO: 570652 - RNA, 19 nt, Artificial Sequence
  Description of Artificial Sequence: Synthetic oligonucleotide
  Antisense strand to SEQ ID NO: 570651
auuuccauggcuauuugca

SEQ ID NO: 570653 - RNA, 19 nt, Artificial Sequence
  Description of Artificial Sequence: Synthetic oligonucleotide
  Sense strand starting at position 156 of SEQ ID NO: 318542
gcaaauagccauggaaaug

SEQ ID NO: 570654 - RNA, 19 nt, Artificial Sequence
  Description of Artificial Sequence: Synthetic oligonucleotide
  Antisense strand to SEQ ID NO: 570653
cauuuccauggcuauuugc

SEQ ID NO: 570655 - RNA, 19 nt, Artificial Sequence
  Description of Artificial Sequence: Synthetic oligonucleotide
  Sense strand starting at position 179 of SEQ ID NO: 318542
agacuaagucucugacaua

SEQ ID NO: 570656 - RNA, 19 nt, Artificial Sequence
  Description of Artificial Sequence: Synthetic oligonucleotide
  Antisense strand to SEQ ID NO: 570655
uaugucagagacuuagucu

SEQ ID NO: 570657 - RNA, 19 nt, Artificial Sequence
  Description of Artificial Sequence: Synthetic oligonucleotide
  Sense strand starting at position 317 of SEQ ID NO: 318542
gguuaagucugagugaauu

SEQ ID NO: 570658 - RNA, 19 nt, Artificial Sequence
  Description of Artificial Sequence: Synthetic oligonucleotide
  Antisense strand to SEQ ID NO: 570657
aauucacucagacuuaacc

SEQ ID NO: 570659 - RNA, 19 nt, Artificial Sequence
  Description of Artificial Sequence: Synthetic oligonucleotide
  Sense strand starting at position 342 of SEQ ID NO: 318542
cuggguaauacugggcaua

SEQ ID NO: 570660 - RNA, 19 nt, Artificial Sequence
  Description of Artificial Sequence: Synthetic oligonucleotide
  Antisense strand to SEQ ID NO: 570659
uaugcccaguauuacccag

SEQ ID NO: 570661 - RNA, 19 nt, Artificial Sequence
  Description of Artificial Sequence: Synthetic oligonucleotide
  Sense strand starting at position 344 of SEQ ID NO: 318542
ggguaauacugggcauaca

SEQ ID NO: 570662 - RNA, 19 nt, Artificial Sequence
  Description of Artificial Sequence: Synthetic oligonucleotide
  Antisense strand to SEQ ID NO: 570661
uguaugcccaguauuaccc

SEQ ID NO: 570663 - RNA, 19 nt, Artificial Sequence
  Description of Artificial Sequence: Synthetic oligonucleotide
  Sense strand starting at position 507 of SEQ ID NO: 318542
cagggcauaguccgagaau

SEQ ID NO: 570664 - RNA, 19 nt, Artificial Sequence
  Description of Artificial Sequence: Synthetic oligonucleotide
  Antisense strand to SEQ ID NO: 570663
auucucggacuaugcccug

SEQ ID NO: 570665 - RNA, 19 nt, Artificial Sequence
  Description of Artificial Sequence: Synthetic oligonucleotide
  Sense strand starting at position 510 of SEQ ID NO: 318542
ggcauaguccgagaauagc

SEQ ID NO: 570666 - RNA, 19 nt, Artificial Sequence
  Description of Artificial Sequence: Synthetic oligonucleotide
  Antisense strand to SEQ ID NO: 570665
gcuauucucggacuaugcc

SEQ ID NO: 570667 - RNA, 19 nt, Artificial Sequence
  Description of Artificial Sequence: Synthetic oligonucleotide
  Sense strand starting at position 526 of SEQ ID NO: 318542
agcagcaauccugaauaug

SEQ ID NO: 570668 - RNA, 19 nt, Artificial Sequence
  Description of Artificial Sequence: Synthetic oligonucleotide
  Antisense strand to SEQ ID NO: 570667
cauauucaggauugcugcu

SEQ ID NO: 570669 - RNA, 19 nt, Artificial Sequence
  Description of Artificial Sequence: Synthetic oligonucleotide
  Sense strand starting at position 576 of SEQ ID NO: 318542
ucuaucuuuggcuaccaga

SEQ ID NO: 570670 - RNA, 19 nt, Artificial Sequence
  Description of Artificial Sequence: Synthetic oligonucleotide
  Antisense strand to SEQ ID NO: 570669
ucugguagccaaagauaga

SEQ ID NO: 570671 - RNA, 19 nt, Artificial Sequence
  Description of Artificial Sequence: Synthetic oligonucleotide
  Sense strand starting at position 643 of SEQ ID NO: 318542
uggaauguagcacauauau

SEQ ID NO: 570672 - RNA, 19 nt, Artificial Sequence
  Description of Artificial Sequence: Synthetic oligonucleotide
  Antisense strand to SEQ ID NO: 570671
auauaugugcuacauucca

SEQ ID NO: 570673 - RNA, 19 nt, Artificial Sequence
  Description of Artificial Sequence: Synthetic oligonucleotide
  Sense strand starting at position 1029 of SEQ ID NO: 318542
aguuucucaaaguauggua

SEQ ID NO: 570674 - RNA, 19 nt, Artificial Sequence
  Description of Artificial Sequence: Synthetic oligonucleotide
  Antisense strand to SEQ ID NO: 570673
uaccauacuuugagaaacu

SEQ ID NO: 570675 - RNA, 19 nt, Artificial Sequence
  Description of Artificial Sequence: Synthetic oligonucleotide
  Sense strand starting at position 1031 of SEQ ID NO: 318542
uuucucaaaguaugguaau

SEQ ID NO: 570676 - RNA, 19 nt, Artificial Sequence
  Description of Artificial Sequence: Synthetic oligonucleotide
  Antisense strand to SEQ ID NO: 570675
auuaccauacuuugagaaa

SEQ ID NO: 570677 - RNA, 19 nt, Artificial Sequence
  Description of Artificial Sequence: Synthetic oligonucleotide
  Sense strand starting at position 1049 of SEQ ID NO: 318542
uauguaagaugauuguaag

SEQ ID NO: 570678 - RNA, 19 nt, Artificial Sequence
  Description of Artificial Sequence: Synthetic oligonucleotide
  Antisense strand to SEQ ID NO: 570677
cuuacaaucaucuuacaua

SEQ ID NO: 570679 - RNA, 19 nt, Artificial Sequence
  Description of Artificial Sequence: Synthetic oligonucleotide
  Sense strand starting at position 1050 of SEQ ID NO: 318542
auguaagaugauuguaagu

SEQ ID NO: 570680 - RNA, 19 nt, Artificial Sequence
  Description of Artificial Sequence: Synthetic oligonucleotide
  Antisense strand to SEQ ID NO: 570679
acuuacaaucaucuuacau

SEQ ID NO: 570681 - RNA, 19 nt, Artificial Sequence
  Description of Artificial Sequence: Synthetic oligonucleotide
  Sense strand starting at position 1061 of SEQ ID NO: 318542
uuguaaguagcacaagaau

SEQ ID NO: 570682 - RNA, 19 nt, Artificial Sequence
  Description of Artificial Sequence: Synthetic oligonucleotide
  Antisense strand to SEQ ID NO: 570681
auucuugugcuacuuacaa

SEQ ID NO: 570683 - RNA, 19 nt, Artificial Sequence
  Description of Artificial Sequence: Synthetic oligonucleotide
  Sense strand starting at position 1102 of SEQ ID NO: 318542
uauuuaaugcaaugcguau

SEQ ID NO: 570684 - RNA, 19 nt, Artificial Sequence
  Description of Artificial Sequence: Synthetic oligonucleotide
  Antisense strand to SEQ ID NO: 570683
auacgcauugcauuaaaua

SEQ ID NO: 570685 - RNA, 19 nt, Artificial Sequence
  Description of Artificial Sequence: Synthetic oligonucleotide
  Sense strand starting at position 1167 of SEQ ID NO: 318542
cuggguugaggcuaaauua

SEQ ID NO: 570686 - RNA, 19 nt, Artificial Sequence
  Description of Artificial Sequence: Synthetic oligonucleotide
  Antisense strand to SEQ ID NO: 570685
uaauuuagccucaacccag

SEQ ID NO: 570687 - RNA, 19 nt, Artificial Sequence
  Description of Artificial Sequence: Synthetic oligonucleotide
  Sense strand starting at position 1266 of SEQ ID NO: 318542
gucauaagguaacucuaaa

SEQ ID NO: 570688 - RNA, 19 nt, Artificial Sequence
  Description of Artificial Sequence: Synthetic oligonucleotide
  Antisense strand to SEQ ID NO: 570687
uuuagaguuaccuuaugac

SEQ ID NO: 570689 - RNA, 19 nt, Artificial Sequence
  Description of Artificial Sequence: Synthetic oligonucleotide
  Sense strand starting at position 1298 of SEQ ID NO: 318542
uggaaauaguuguccuaau

SEQ ID NO: 570690 - RNA, 19 nt, Artificial Sequence
  Description of Artificial Sequence: Synthetic oligonucleotide
  Antisense strand to SEQ ID NO: 570689
auuaggacaacuauuucca

SEQ ID NO: 570691 - RNA, 19 nt, Artificial Sequence
  Description of Artificial Sequence: Synthetic oligonucleotide
  Sense strand starting at position 1299 of SEQ ID NO: 318542
ggaaauaguuguccuaauc

SEQ ID NO: 570692 - RNA, 19 nt, Artificial Sequence
  Description of Artificial Sequence: Synthetic oligonucleotide
  Antisense strand to SEQ ID NO: 570691
gauuaggacaacuauuucc

SEQ ID NO: 570693 - RNA, 19 nt, Artificial Sequence
  Description of Artificial Sequence: Synthetic oligonucleotide
  Sense strand starting at position 1414 of SEQ ID NO: 318542
guuugaagguacuuacauu

SEQ ID NO: 570694 - RNA, 19 nt, Artificial Sequence
  Description of Artificial Sequence: Synthetic oligonucleotide
  Antisense strand to SEQ ID NO: 570693
aauguaaguaccuucaaac

SEQ ID NO: 570695 - RNA, 19 nt, Artificial Sequence
  Description of Artificial Sequence: Synthetic oligonucleotide
  Sense strand starting at position 1542 of SEQ ID NO: 318542
uaguuaugccaugauugua

SEQ ID NO: 570696 - RNA, 19 nt, Artificial Sequence
  Description of Artificial Sequence: Synthetic oligonucleotide
  Antisense strand to SEQ ID NO: 570695
uacaaucauggcauaacua

SEQ ID NO: 570697 - RNA, 19 nt, Artificial Sequence
  Description of Artificial Sequence: Synthetic oligonucleotide
  Sense strand starting at position 1612 of SEQ ID NO: 318542
ccauuuaaucuacgcaguu

SEQ ID NO: 570698 - RNA, 19 nt, Artificial Sequence
  Description of Artificial Sequence: Synthetic oligonucleotide
  Antisense strand to SEQ ID NO: 570697
aacugcguagauuaaaugg

SEQ ID NO: 570699 - RNA, 19 nt, Artificial Sequence
  Description of Artificial Sequence: Synthetic oligonucleotide
  Sense strand starting at position 1642 of SEQ ID NO: 318542
cagagaacuguuugaacuc

SEQ ID NO: 570700 - RNA, 19 nt, Artificial Sequence
  Description of Artificial Sequence: Synthetic oligonucleotide
  Antisense strand to SEQ ID NO: 570699
gaguucaaacaguucucug

SEQ ID NO: 570701 - RNA, 19 nt, Artificial Sequence
  Description of Artificial Sequence: Synthetic oligonucleotide
  Sense strand starting at position 1663 of SEQ ID NO: 318542
gccaacuuacuguaaugga

SEQ ID NO: 570702 - RNA, 19 nt, Artificial Sequence
  Description of Artificial Sequence: Synthetic oligonucleotide
  Antisense strand to SEQ ID NO: 570701
uccauuacaguaaguuggc

SEQ ID NO: 570703 - RNA, 19 nt, Artificial Sequence
  Description of Artificial Sequence: Synthetic oligonucleotide
  Sense strand starting at position 1708 of SEQ ID NO: 318542
ugucacaguggucaauuau

SEQ ID NO: 570704 - RNA, 19 nt, Artificial Sequence
  Description of Artificial Sequence: Synthetic oligonucleotide
  Antisense strand to SEQ ID NO: 570703
auaauugaccacugugaca

SEQ ID NO: 570705 - RNA, 19 nt, Artificial Sequence
  Description of Artificial Sequence: Synthetic oligonucleotide
  Sense strand starting at position 1849 of SEQ ID NO: 318542
ucugauggccacuauaaau

SEQ ID NO: 570706 - RNA, 19 nt, Artificial Sequence
  Description of Artificial Sequence: Synthetic oligonucleotide
  Antisense strand to SEQ ID NO: 570705
auuuauaguggccaucaga

SEQ ID NO: 570707 - RNA, 19 nt, Artificial Sequence
  Description of Artificial Sequence: Synthetic oligonucleotide
  Sense strand starting at position 2059 of SEQ ID NO: 318542
uaggguugcugauuaauug

SEQ ID NO: 570708 - RNA, 19 nt, Artificial Sequence
  Description of Artificial Sequence: Synthetic oligonucleotide
  Antisense strand to SEQ ID NO: 570707
caauuaaucagcaacccua

SEQ ID NO: 570709 - RNA, 19 nt, Artificial Sequence
  Description of Artificial Sequence: Synthetic oligonucleotide
  Sense strand starting at position 2276 of SEQ ID NO: 318542
guugaagacuuguuccauu

SEQ ID NO: 570710 - RNA, 19 nt, Artificial Sequence
  Description of Artificial Sequence: Synthetic oligonucleotide
  Antisense strand to SEQ ID NO: 570709
aauggaacaagucuucaac

SEQ ID NO: 570711 - RNA, 19 nt, Artificial Sequence
  Description of Artificial Sequence: Synthetic oligonucleotide
  Sense strand starting at position 2464 of SEQ ID NO: 318542
gugaauuaaugcuuagaag

SEQ ID NO: 570712 - RNA, 19 nt, Artificial Sequence
  Description of Artificial Sequence: Synthetic oligonucleotide
  Antisense strand to SEQ ID NO: 570711
cuucuaagcauuaauucac

SEQ ID NO: 570713 - RNA, 19 nt, Artificial Sequence
  Description of Artificial Sequence: Synthetic oligonucleotide
  Sense strand starting at position 2465 of SEQ ID NO: 318542
ugaauuaaugcuuagaagu

SEQ ID NO: 570714 - RNA, 19 nt, Artificial Sequence
  Description of Artificial Sequence: Synthetic oligonucleotide
  Antisense strand to SEQ ID NO: 570713
acuucuaagcauuaauuca

SEQ ID NO: 570715 - RNA, 19 nt, Artificial Sequence
  Description of Artificial Sequence: Synthetic oligonucleotide
  Sense strand starting at position 2586 of SEQ ID NO: 318542
gagucuucccaaugagagc

SEQ ID NO: 570716 - RNA, 19 nt, Artificial Sequence
  Description of Artificial Sequence: Synthetic oligonucleotide
  Antisense strand to SEQ ID NO: 570715
gcucucauugggaagacuc

SEQ ID NO: 570717 - RNA, 19 nt, Artificial Sequence
  Description of Artificial Sequence: Synthetic oligonucleotide
  Sense strand starting at position 3195 of SEQ ID NO: 318542
gauaguaguuauuccugau

SEQ ID NO: 570718 - RNA, 19 nt, Artificial Sequence
  Description of Artificial Sequence: Synthetic oligonucleotide
  Antisense strand to SEQ ID NO: 570717
aucaggaauaacuacuauc

SEQ ID NO: 570719 - RNA, 19 nt, Artificial Sequence
  Description of Artificial Sequence: Synthetic oligonucleotide
  Sense strand starting at position 3199 of SEQ ID NO: 318542
guaguuauuccugauggca

SEQ ID NO: 570720 - RNA, 19 nt, Artificial Sequence
  Description of Artificial Sequence: Synthetic oligonucleotide
  Antisense strand to SEQ ID NO: 570719
ugccaucaggaauaacuac

SEQ ID NO: 570721 - RNA, 19 nt, Artificial Sequence
  Description of Artificial Sequence: Synthetic oligonucleotide
  Sense strand starting at position 3360 of SEQ ID NO: 318542
gugucagugaccuggaaga

SEQ ID NO: 570722 - RNA, 19 nt, Artificial Sequence
  Description of Artificial Sequence: Synthetic oligonucleotide
  Antisense strand to SEQ ID NO: 570721
ucuuccaggucacugacac

SEQ ID NO: 570723 - RNA, 19 nt, Artificial Sequence
  Description of Artificial Sequence: Synthetic oligonucleotide
  Sense strand starting at position 3603 of SEQ ID NO: 318542
acauaaguccaagaguucu

SEQ ID NO: 570724 - RNA, 19 nt, Artificial Sequence
  Description of Artificial Sequence: Synthetic oligonucleotide
  Antisense strand to SEQ ID NO: 570723
agaacucuuggacuuaugu

SEQ ID NO: 570725 - RNA, 19 nt, Artificial Sequence
  Description of Artificial Sequence: Synthetic oligonucleotide
  Sense strand starting at position 150 of SEQ ID NO: 318543
aggcguuagccaccgcaau

SEQ ID NO: 570726 - RNA, 19 nt, Artificial Sequence
  Description of Artificial Sequence: Synthetic oligonucleotide
  Antisense strand to SEQ ID NO: 570725
auugcgguggcuaacgccu

SEQ ID NO: 570727 - RNA, 19 nt, Artificial Sequence
  Description of Artificial Sequence: Synthetic oligonucleotide
  Sense strand starting at position 181 of SEQ ID NO: 318543
cuaucuuaacacgaaguuu

SEQ ID NO: 570728 - RNA, 19 nt, Artificial Sequence
  Description of Artificial Sequence: Synthetic oligonucleotide
  Antisense strand to SEQ ID NO: 570727
aaacuucguguuaagauag

SEQ ID NO: 570729 - RNA, 19 nt, Artificial Sequence
  Description of Artificial Sequence: Synthetic oligonucleotide
  Sense strand starting at position 232 of SEQ ID NO: 318543
aaguuaggacauggguaau

SEQ ID NO: 570730 - RNA, 19 nt, Artificial Sequence
  Description of Artificial Sequence: Synthetic oligonucleotide
  Antisense strand to SEQ ID NO: 570729
auuacccauguccuaacuu

SEQ ID NO: 570731 - RNA, 19 nt, Artificial Sequence
  Description of Artificial Sequence: Synthetic oligonucleotide
  Sense strand starting at position 616 of SEQ ID NO: 318543
cugccuauccuacauaugu

SEQ ID NO: 570732 - RNA, 19 nt, Artificial Sequence
  Description of Artificial Sequence: Synthetic oligonucleotide
  Antisense strand to SEQ ID NO: 570731
acauauguaggauaggcag

SEQ ID NO: 570733 - RNA, 19 nt, Artificial Sequence
  Description of Artificial Sequence: Synthetic oligonucleotide
  Sense strand starting at position 631 of SEQ ID NO: 318543
augucagaucuuugucaug

SEQ ID NO: 570734 - RNA, 19 nt, Artificial Sequence
  Description of Artificial Sequence: Synthetic oligonucleotide
  Antisense strand to SEQ ID NO: 570733
caugacaaagaucugacau

SEQ ID NO: 570735 - RNA, 19 nt, Artificial Sequence
  Description of Artificial Sequence: Synthetic oligonucleotide
  Sense strand starting at position 633 of SEQ ID NO: 318543
gucagaucuuugucauguc

SEQ ID NO: 570736 - RNA, 19 nt, Artificial Sequence
  Description of Artificial Sequence: Synthetic oligonucleotide
  Antisense strand to SEQ ID NO: 570735
gacaugacaaagaucugac

SEQ ID NO: 570737 - RNA, 19 nt, Artificial Sequence
  Description of Artificial Sequence: Synthetic oligonucleotide
  Sense strand starting at position 640 of SEQ ID NO: 318543
cuuugucaugucugaaggu

SEQ ID NO: 570738 - RNA, 19 nt, Artificial Sequence
  Description of Artificial Sequence: Synthetic oligonucleotide
  Antisense strand to SEQ ID NO: 570737
accuucagacaugacaaag

SEQ ID NO: 570739 - RNA, 19 nt, Artificial Sequence
  Description of Artificial Sequence: Synthetic oligonucleotide
  Sense strand starting at position 1094 of SEQ ID NO: 318543
cgaguuugccauuaaaugg

SEQ ID NO: 570740 - RNA, 19 nt, Artificial Sequence
  Description of Artificial Sequence: Synthetic oligonucleotide
  Antisense strand to SEQ ID NO: 570739
ccauuuaauggcaaacucg

SEQ ID NO: 570741 - RNA, 19 nt, Artificial Sequence
  Description of Artificial Sequence: Synthetic oligonucleotide
  Sense strand starting at position 1124 of SEQ ID NO: 318543
ugaguagguuucuccaacu

SEQ ID NO: 570742 - RNA, 19 nt, Artificial Sequence
  Description of Artificial Sequence: Synthetic oligonucleotide
  Antisense strand to SEQ ID NO: 570741
aguuggagaaaccuacuca

SEQ ID NO: 570743 - RNA, 19 nt, Artificial Sequence
  Description of Artificial Sequence: Synthetic oligonucleotide
  Sense strand starting at position 1176 of SEQ ID NO: 318543
ggagaaugcgcuugacuag

SEQ ID NO: 570744 - RNA, 19 nt, Artificial Sequence
  Description of Artificial Sequence: Synthetic oligonucleotide
  Antisense strand to SEQ ID NO: 570743
cuagucaagcgcauucucc

SEQ ID NO: 570745 - RNA, 19 nt, Artificial Sequence
  Description of Artificial Sequence: Synthetic oligonucleotide
  Sense strand starting at position 1187 of SEQ ID NO: 318543
uugacuagcugcucucaaa

SEQ ID NO: 570746 - RNA, 19 nt, Artificial Sequence
  Description of Artificial Sequence: Synthetic oligonucleotide
  Antisense strand to SEQ ID NO: 570745
uuugagagcagcuagucaa

SEQ ID NO: 570747 - RNA, 19 nt, Artificial Sequence
  Description of Artificial Sequence: Synthetic oligonucleotide
  Sense strand starting at position 1215 of SEQ ID NO: 318543
cagcuuuacuaugcugaga

SEQ ID NO: 570748 - RNA, 19 nt, Artificial Sequence
  Description of Artificial Sequence: Synthetic oligonucleotide
  Antisense strand to SEQ ID NO: 570747
ucucagcauaguaaagcug

SEQ ID NO: 570749 - RNA, 19 nt, Artificial Sequence
  Description of Artificial Sequence: Synthetic oligonucleotide
  Sense strand starting at position 1218 of SEQ ID NO: 318543
cuuuacuaugcugagaugu

SEQ ID NO: 570750 - RNA, 19 nt, Artificial Sequence
  Description of Artificial Sequence: Synthetic oligonucleotide
  Antisense strand to SEQ ID NO: 570749
acaucucagcauaguaaag

SEQ ID NO: 570751 - RNA, 19 nt, Artificial Sequence
  Description of Artificial Sequence: Synthetic oligonucleotide
  Sense strand starting at position 1479 of SEQ ID NO: 318543
aaagaagggugcucccauu

SEQ ID NO: 570752 - RNA, 19 nt, Artificial Sequence
  Description of Artificial Sequence: Synthetic oligonucleotide
  Antisense strand to SEQ ID NO: 570751
aaugggagcacccuucuuu

SEQ ID NO: 570753 - RNA, 19 nt, Artificial Sequence
  Description of Artificial Sequence: Synthetic oligonucleotide
  Sense strand starting at position 1761 of SEQ ID NO: 318543
aaagaacuaucccagguga

SEQ ID NO: 570754 - RNA, 19 nt, Artificial Sequence
  Description of Artificial Sequence: Synthetic oligonucleotide
  Antisense strand to SEQ ID NO: 570753
ucaccugggauaguucuuu

SEQ ID NO: 570755 - RNA, 19 nt, Artificial Sequence
  Description of Artificial Sequence: Synthetic oligonucleotide
  Sense strand starting at position 1763 of SEQ ID NO: 318543
agaacuaucccaggugaca

SEQ ID NO: 570756 - RNA, 19 nt, Artificial Sequence
  Description of Artificial Sequence: Synthetic oligonucleotide
  Antisense strand to SEQ ID NO: 570755
ugucaccugggauaguucu

SEQ ID NO: 570757 - RNA, 19 nt, Artificial Sequence
  Description of Artificial Sequence: Synthetic oligonucleotide
  Sense strand starting at position 1852 of SEQ ID NO: 318543
gaguuugcuagacguggga

SEQ ID NO: 570758 - RNA, 19 nt, Artificial Sequence
  Description of Artificial Sequence: Synthetic oligonucleotide
  Antisense strand to SEQ ID NO: 570757
ucccacgucuagcaaacuc

SEQ ID NO: 570759 - RNA, 19 nt, Artificial Sequence
  Description of Artificial Sequence: Synthetic oligonucleotide
  Sense strand starting at position 1865 of SEQ ID NO: 318543
gugggaacgugaucuaccu

SEQ ID NO: 570760 - RNA, 19 nt, Artificial Sequence
  Description of Artificial Sequence: Synthetic oligonucleotide
  Antisense strand to SEQ ID NO: 570759
agguagaucacguucccac

SEQ ID NO: 570761 - RNA, 19 nt, Artificial Sequence
  Description of Artificial Sequence: Synthetic oligonucleotide
  Sense strand starting at position 1871 of SEQ ID NO: 318543
acgugaucuaccugagcag

SEQ ID NO: 570762 - RNA, 19 nt, Artificial Sequence
  Description of Artificial Sequence: Synthetic oligonucleotide
  Antisense strand to SEQ ID NO: 570761
cugcucagguagaucacgu

SEQ ID NO: 570763 - RNA, 19 nt, Artificial Sequence
  Description of Artificial Sequence: Synthetic oligonucleotide
  Sense strand starting at position 2362 of SEQ ID NO: 318543
uguuguaugaucugguuac

SEQ ID NO: 570764 - RNA, 19 nt, Artificial Sequence
  Description of Artificial Sequence: Synthetic oligonucleotide
  Antisense strand to SEQ ID NO: 570763
guaaccagaucauacaaca

SEQ ID NO: 570765 - RNA, 19 nt, Artificial Sequence
  Description of Artificial Sequence: Synthetic oligonucleotide
  Sense strand starting at position 2403 of SEQ ID NO: 318543
aagggaagcugguuugaaa

SEQ ID NO: 570766 - RNA, 19 nt, Artificial Sequence
  Description of Artificial Sequence: Synthetic oligonucleotide
  Antisense strand to SEQ ID NO: 570765
uuucaaaccagcuucccuu

SEQ ID NO: 570767 - RNA, 19 nt, Artificial Sequence
  Description of Artificial Sequence: Synthetic oligonucleotide
  Sense strand starting at position 2445 of SEQ ID NO: 318543
cuccgucgucuagauauuu

SEQ ID NO: 570768 - RNA, 19 nt, Artificial Sequence
  Description of Artificial Sequence: Synthetic oligonucleotide
  Antisense strand to SEQ ID NO: 570767
aaauaucuagacgacggag

SEQ ID NO: 570769 - RNA, 19 nt, Artificial Sequence
  Description of Artificial Sequence: Synthetic oligonucleotide
  Sense strand starting at position 2451 of SEQ ID NO: 318543
cgucuagauauuuggguuu

SEQ ID NO: 570770 - RNA, 19 nt, Artificial Sequence
  Description of Artificial Sequence: Synthetic oligonucleotide
  Antisense strand to SEQ ID NO: 570769
aaacccaaauaucuagacg

SEQ ID NO: 570771 - RNA, 19 nt, Artificial Sequence
  Description of Artificial Sequence: Synthetic oligonucleotide
  Sense strand starting at position 2489 of SEQ ID NO: 318543
gcaaauuagucucuaggcu

SEQ ID NO: 570772 - RNA, 19 nt, Artificial Sequence
  Description of Artificial Sequence: Synthetic oligonucleotide
  Antisense strand to SEQ ID NO: 570771
agccuagagacuaauuugc

SEQ ID NO: 570773 - RNA, 19 nt, Artificial Sequence
  Description of Artificial Sequence: Synthetic oligonucleotide
  Sense strand starting at position 2599 of SEQ ID NO: 318543
aauuaaugugcuuguuaug

SEQ ID NO: 570774 - RNA, 19 nt, Artificial Sequence
  Description of Artificial Sequence: Synthetic oligonucleotide
  Antisense strand to SEQ ID NO: 570773
cauaacaagcacauuaauu

SEQ ID NO: 570775 - RNA, 19 nt, Artificial Sequence
  Description of Artificial Sequence: Synthetic oligonucleotide
  Sense strand starting at position 2728 of SEQ ID NO: 318543
aagaaacagugucuguaau

SEQ ID NO: 570776 - RNA, 19 nt, Artificial Sequence
  Description of Artificial Sequence: Synthetic oligonucleotide
  Antisense strand to SEQ ID NO: 570775
auuacagacacuguuucuu

SEQ ID NO: 570777 - RNA, 19 nt, Artificial Sequence
  Description of Artificial Sequence: Synthetic oligonucleotide
  Sense strand starting at position 2729 of SEQ ID NO: 318543
agaaacagugucuguaaug

SEQ ID NO: 570778 - RNA, 19 nt, Artificial Sequence
  Description of Artificial Sequence: Synthetic oligonucleotide
  Antisense strand to SEQ ID NO: 570777
cauuacagacacuguuucu

SEQ ID NO: 570779 - RNA, 19 nt, Artificial Sequence
  Description of Artificial Sequence: Synthetic oligonucleotide
  Sense strand starting at position 2933 of SEQ ID NO: 318543
agucaagcuuacuugggau

SEQ ID NO: 570780 - RNA, 19 nt, Artificial Sequence
  Description of Artificial Sequence: Synthetic oligonucleotide
  Antisense strand to SEQ ID NO: 570779
aucccaaguaagcuugacu

SEQ ID NO: 570781 - RNA, 19 nt, Artificial Sequence
  Description of Artificial Sequence: Synthetic oligonucleotide
  Sense strand starting at position 3480 of SEQ ID NO: 318543
uggaaaugauaauaucucu

SEQ ID NO: 570782 - RNA, 19 nt, Artificial Sequence
  Description of Artificial Sequence: Synthetic oligonucleotide
  Antisense strand to SEQ ID NO: 570781
agagauauuaucauuucca

SEQ ID NO: 570783 - RNA, 19 nt, Artificial Sequence
  Description of Artificial Sequence: Synthetic oligonucleotide
  Sense strand starting at position 3509 of SEQ ID NO: 318543
aucacagcucuagaaaugu

SEQ ID NO: 570784 - RNA, 19 nt, Artificial Sequence
  Description of Artificial Sequence: Synthetic oligonucleotide
  Antisense strand to SEQ ID NO: 570783
acauuucuagagcugugau

SEQ ID NO: 570785 - RNA, 19 nt, Artificial Sequence
  Description of Artificial Sequence: Synthetic oligonucleotide
  Sense strand starting at position 3551 of SEQ ID NO: 318543
aggaaauagucccagagaa

SEQ ID NO: 570786 - RNA, 19 nt, Artificial Sequence
  Description of Artificial Sequence: Synthetic oligonucleotide
  Antisense strand to SEQ ID NO: 570785
uucucugggacuauuuccu

SEQ ID NO: 570787 - RNA, 19 nt, Artificial Sequence
  Description of Artificial Sequence: Synthetic oligonucleotide
  Sense strand starting at position 3569 of SEQ ID NO: 318543
auuuaagugccuuguacaa

SEQ ID NO: 570788 - RNA, 19 nt, Artificial Sequence
  Description of Artificial Sequence: Synthetic oligonucleotide
  Antisense strand to SEQ ID NO: 570787
uuguacaaggcacuuaaau

SEQ ID NO: 570789 - RNA, 19 nt, Artificial Sequence
  Description of Artificial Sequence: Synthetic oligonucleotide
  Sense strand starting at position 3576 of SEQ ID NO: 318543
ugccuuguacaaggcuaaa

SEQ ID NO: 570790 - RNA, 19 nt, Artificial Sequence
  Description of Artificial Sequence: Synthetic oligonucleotide
  Antisense strand to SEQ ID NO: 570789
uuuagccuuguacaaggca

SEQ ID NO: 570791 - RNA, 19 nt, Artificial Sequence
  Description of Artificial Sequence: Synthetic oligonucleotide
  Sense strand starting at position 3647 of SEQ ID NO: 318543
gccugcgugcucucaaaca

SEQ ID NO: 570792 - RNA, 19 nt, Artificial Sequence
  Description of Artificial Sequence: Synthetic oligonucleotide
  Antisense strand to SEQ ID NO: 570791
uguuugagagcacgcaggc

SEQ ID NO: 570793 - RNA, 19 nt, Artificial Sequence
  Description of Artificial Sequence: Synthetic oligonucleotide
  Sense strand starting at position 3661 of SEQ ID NO: 318543
aaacauugcgucuauuaug

SEQ ID NO: 570794 - RNA, 19 nt, Artificial Sequence
  Description of Artificial Sequence: Synthetic oligonucleotide
  Antisense strand to SEQ ID NO: 570793
cauaauagacgcaauguuu

SEQ ID NO: 570795 - RNA, 19 nt, Artificial Sequence
  Description of Artificial Sequence: Synthetic oligonucleotide
  Sense strand starting at position 3671 of SEQ ID NO: 318543
ucuauuauggagggcuuga

SEQ ID NO: 570796 - RNA, 19 nt, Artificial Sequence
  Description of Artificial Sequence: Synthetic oligonucleotide
  Antisense strand to SEQ ID NO: 570795
ucaagcccuccauaauaga

SEQ ID NO: 570797 - RNA, 19 nt, Artificial Sequence
  Description of Artificial Sequence: Synthetic oligonucleotide
  Sense strand starting at position 3711 of SEQ ID NO: 318543
aaugaauguugucuuuaag

SEQ ID NO: 570798 - RNA, 19 nt, Artificial Sequence
  Description of Artificial Sequence: Synthetic oligonucleotide
  Antisense strand to SEQ ID NO: 570797
cuuaaagacaacauucauu

SEQ ID NO: 570799 - RNA, 19 nt, Artificial Sequence
  Description of Artificial Sequence: Synthetic oligonucleotide
  Sense strand starting at position 3714 of SEQ ID NO: 318543
gaauguugucuuuaaggga

SEQ ID NO: 570800 - RNA, 19 nt, Artificial Sequence
  Description of Artificial Sequence: Synthetic oligonucleotide
  Antisense strand to SEQ ID NO: 570799
ucccuuaaagacaacauuc

SEQ ID NO: 570801 - RNA, 19 nt, Artificial Sequence
  Description of Artificial Sequence: Synthetic oligonucleotide
  Sense strand starting at position 3718 of SEQ ID NO: 318543
guugucuuuaagggagaua

SEQ ID NO: 570802 - RNA, 19 nt, Artificial Sequence
  Description of Artificial Sequence: Synthetic oligonucleotide
  Antisense strand to SEQ ID NO: 570801
uaucucccuuaaagacaac

SEQ ID NO: 570803 - RNA, 19 nt, Artificial Sequence
  Description of Artificial Sequence: Synthetic oligonucleotide
  Sense strand starting at position 3882 of SEQ ID NO: 318543
ugcauuccaggcugagaaa

SEQ ID NO: 570804 - RNA, 19 nt, Artificial Sequence
  Description of Artificial Sequence: Synthetic oligonucleotide
  Antisense strand to SEQ ID NO: 570803
uuucucagccuggaaugca

SEQ ID NO: 570805 - RNA, 19 nt, Artificial Sequence
  Description of Artificial Sequence: Synthetic oligonucleotide
  Sense strand starting at position 36 of SEQ ID NO: 318544
uguagaauuagagaguggu

SEQ ID NO: 570806 - RNA, 19 nt, Artificial Sequence
  Description of Artificial Sequence: Synthetic oligonucleotide
  Antisense strand to SEQ ID NO: 570805
accacucucuaauucuaca

SEQ ID NO: 570807 - RNA, 19 nt, Artificial Sequence
  Description of Artificial Sequence: Synthetic oligonucleotide
  Sense strand starting at position 303 of SEQ ID NO: 318544
caaagucuggcauauugaa

SEQ ID NO: 570808 - RNA, 19 nt, Artificial Sequence
  Description of Artificial Sequence: Synthetic oligonucleotide
  Antisense strand to SEQ ID NO: 570807
uucaauaugccagacuuug

SEQ ID NO: 570809 - RNA, 19 nt, Artificial Sequence
  Description of Artificial Sequence: Synthetic oligonucleotide
  Sense strand starting at position 556 of SEQ ID NO: 318544
cgcuguaaucguuuaccca

SEQ ID NO: 570810 - RNA, 19 nt, Artificial Sequence
  Description of Artificial Sequence: Synthetic oligonucleotide
  Antisense strand to SEQ ID NO: 570809
uggguaaacgauuacagcg

SEQ ID NO: 570811 - RNA, 19 nt, Artificial Sequence
  Description of Artificial Sequence: Synthetic oligonucleotide
  Sense strand starting at position 725 of SEQ ID NO: 318544
aguaauccuccuuagaguc

SEQ ID NO: 570812 - RNA, 19 nt, Artificial Sequence
  Description of Artificial Sequence: Synthetic oligonucleotide
  Antisense strand to SEQ ID NO: 570811
gacucuaaggaggauuacu

SEQ ID NO: 570813 - RNA, 19 nt, Artificial Sequence
  Description of Artificial Sequence: Synthetic oligonucleotide
  Sense strand starting at position 876 of SEQ ID NO: 318544
guuaaugaucuacaaaugu

SEQ ID NO: 570814 - RNA, 19 nt, Artificial Sequence
  Description of Artificial Sequence: Synthetic oligonucleotide
  Antisense strand to SEQ ID NO: 570813
acauuuguagaucauuaac

SEQ ID NO: 570815 - RNA, 19 nt, Artificial Sequence
  Description of Artificial Sequence: Synthetic oligonucleotide
  Sense strand starting at position 885 of SEQ ID NO: 318544
cuacaaaugugugcuauuu

SEQ ID NO: 570816 - RNA, 19 nt, Artificial Sequence
  Description of Artificial Sequence: Synthetic oligonucleotide
  Antisense strand to SEQ ID NO: 570815
aaauagcacacauuuguag

SEQ ID NO: 570817 - RNA, 19 nt, Artificial Sequence
  Description of Artificial Sequence: Synthetic oligonucleotide
  Sense strand starting at position 954 of SEQ ID NO: 318544
auuaauugguagcugauua

SEQ ID NO: 570818 - RNA, 19 nt, Artificial Sequence
  Description of Artificial Sequence: Synthetic oligonucleotide
  Antisense strand to SEQ ID NO: 570817
uaaucagcuaccaauuaau

SEQ ID NO: 570819 - RNA, 19 nt, Artificial Sequence
  Description of Artificial Sequence: Synthetic oligonucleotide
  Sense strand starting at position 965 of SEQ ID NO: 318544
gcugauuaauggcuagaaa

SEQ ID NO: 570820 - RNA, 19 nt, Artificial Sequence
  Description of Artificial Sequence: Synthetic oligonucleotide
  Antisense strand to SEQ ID NO: 570819
uuucuagccauuaaucagc

SEQ ID NO: 570821 - RNA, 19 nt, Artificial Sequence
  Description of Artificial Sequence: Synthetic oligonucleotide
  Sense strand starting at position 1018 of SEQ ID NO: 318544
uuugcaaugccagaaaggu

SEQ ID NO: 570822 - RNA, 19 nt, Artificial Sequence
  Description of Artificial Sequence: Synthetic oligonucleotide
  Antisense strand to SEQ ID NO: 570821
accuuucuggcauugcaaa

SEQ ID NO: 570823 - RNA, 19 nt, Artificial Sequence
  Description of Artificial Sequence: Synthetic oligonucleotide
  Sense strand starting at position 1027 of SEQ ID NO: 318544
ccagaaagguccucuugag

SEQ ID NO: 570824 - RNA, 19 nt, Artificial Sequence
  Description of Artificial Sequence: Synthetic oligonucleotide
  Antisense strand to SEQ ID NO: 570823
cucaagaggaccuuucugg

SEQ ID NO: 570825 - RNA, 19 nt, Artificial Sequence
  Description of Artificial Sequence: Synthetic oligonucleotide
  Sense strand starting at position 1113 of SEQ ID NO: 318544
uggauacacaggugacuua

SEQ ID NO: 570826 - RNA, 19 nt, Artificial Sequence
  Description of Artificial Sequence: Synthetic oligonucleotide
  Antisense strand to SEQ ID NO: 570825
uaagucaccuguguaucca

SEQ ID NO: 570827 - RNA, 19 nt, Artificial Sequence
  Description of Artificial Sequence: Synthetic oligonucleotide
  Sense strand starting at position 1120 of SEQ ID NO: 318544
acaggugacuuauuguaaa

SEQ ID NO: 570828 - RNA, 19 nt, Artificial Sequence
  Description of Artificial Sequence: Synthetic oligonucleotide
  Antisense strand to SEQ ID NO: 570827
uuuacaauaagucaccugu

SEQ ID NO: 570829 - RNA, 19 nt, Artificial Sequence
  Description of Artificial Sequence: Synthetic oligonucleotide
  Sense strand starting at position 1162 of SEQ ID NO: 318544
cagucaauuugauaagagu

SEQ ID NO: 570830 - RNA, 19 nt, Artificial Sequence
  Description of Artificial Sequence: Synthetic oligonucleotide
  Antisense strand to SEQ ID NO: 570829
acucuuaucaaauugacug

SEQ ID NO: 570831 - RNA, 19 nt, Artificial Sequence
  Description of Artificial Sequence: Synthetic oligonucleotide
  Sense strand starting at position 1188 of SEQ ID NO: 318544
agagcauaaugggcucaaa

SEQ ID NO: 570832 - RNA, 19 nt, Artificial Sequence
  Description of Artificial Sequence: Synthetic oligonucleotide
  Antisense strand to SEQ ID NO: 570831
uuugagcccauuaugcucu

SEQ ID NO: 570833 - RNA, 19 nt, Artificial Sequence
  Description of Artificial Sequence: Synthetic oligonucleotide
  Sense strand starting at position 1849 of SEQ ID NO: 318544
gccaucaucagcuagggau

SEQ ID NO: 570834 - RNA, 19 nt, Artificial Sequence
  Description of Artificial Sequence: Synthetic oligonucleotide
  Antisense strand to SEQ ID NO: 570833
aucccuagcugaugauggc

SEQ ID NO: 570835 - RNA, 19 nt, Artificial Sequence
  Description of Artificial Sequence: Synthetic oligonucleotide
  Sense strand starting at position 2131 of SEQ ID NO: 318544
gcccucuggcuccauaaga

SEQ ID NO: 570836 - RNA, 19 nt, Artificial Sequence
  Description of Artificial Sequence: Synthetic oligonucleotide
  Antisense strand to SEQ ID NO: 570835
ucuuauggagccagagggc

SEQ ID NO: 570837 - RNA, 19 nt, Artificial Sequence
  Description of Artificial Sequence: Synthetic oligonucleotide
  Sense strand starting at position 2141 of SEQ ID NO: 318544
uccauaagacguuggaaua

SEQ ID NO: 570838 - RNA, 19 nt, Artificial Sequence
  Description of Artificial Sequence: Synthetic oligonucleotide
  Antisense strand to SEQ ID NO: 570837
uauuccaacgucuuaugga

SEQ ID NO: 570839 - RNA, 19 nt, Artificial Sequence
  Description of Artificial Sequence: Synthetic oligonucleotide
  Sense strand starting at position 2142 of SEQ ID NO: 318544
ccauaagacguuggaauac

SEQ ID NO: 570840 - RNA, 19 nt, Artificial Sequence
  Description of Artificial Sequence: Synthetic oligonucleotide
  Antisense strand to SEQ ID NO: 570839
guauuccaacgucuuaugg

SEQ ID NO: 570841 - RNA, 19 nt, Artificial Sequence
  Description of Artificial Sequence: Synthetic oligonucleotide
  Sense strand starting at position 2168 of SEQ ID NO: 318544
aagggauccuccuuuguac

SEQ ID NO: 570842 - RNA, 19 nt, Artificial Sequence
  Description of Artificial Sequence: Synthetic oligonucleotide
  Antisense strand to SEQ ID NO: 570841
guacaaaggaggaucccuu

SEQ ID NO: 570843 - RNA, 19 nt, Artificial Sequence
  Description of Artificial Sequence: Synthetic oligonucleotide
  Sense strand starting at position 2272 of SEQ ID NO: 318544
guuauuacacgugaucaca

SEQ ID NO: 570844 - RNA, 19 nt, Artificial Sequence
  Description of Artificial Sequence: Synthetic oligonucleotide
  Antisense strand to SEQ ID NO: 570843
ugugaucacguguaauaac

SEQ ID NO: 570845 - RNA, 19 nt, Artificial Sequence
  Description of Artificial Sequence: Synthetic oligonucleotide
  Sense strand starting at position 2440 of SEQ ID NO: 318544
gcuauuaaacgugaucaca

SEQ ID NO: 570846 - RNA, 19 nt, Artificial Sequence
  Description of Artificial Sequence: Synthetic oligonucleotide
  Antisense strand to SEQ ID NO: 570845
ugugaucacguuuaauagc

SEQ ID NO: 570847 - RNA, 19 nt, Artificial Sequence
  Description of Artificial Sequence: Synthetic oligonucleotide
  Sense strand starting at position 2571 of SEQ ID NO: 318544
acacaugguuucucacaua

SEQ ID NO: 570848 - RNA, 19 nt, Artificial Sequence
  Description of Artificial Sequence: Synthetic oligonucleotide
  Antisense strand to SEQ ID NO: 570847
uaugugagaaaccaugugu

SEQ ID NO: 570849 - RNA, 19 nt, Artificial Sequence
  Description of Artificial Sequence: Synthetic oligonucleotide
  Sense strand starting at position 2858 of SEQ ID NO: 318544
guuauuacacauggucaca

SEQ ID NO: 570850 - RNA, 19 nt, Artificial Sequence
  Description of Artificial Sequence: Synthetic oligonucleotide
  Antisense strand to SEQ ID NO: 570849
ugugaccauguguaauaac

SEQ ID NO: 570851 - RNA, 19 nt, Artificial Sequence
  Description of Artificial Sequence: Synthetic oligonucleotide
  Sense strand starting at position 3001 of SEQ ID NO: 318544
gcuauugcacaugaucaca

SEQ ID NO: 570852 - RNA, 19 nt, Artificial Sequence
  Description of Artificial Sequence: Synthetic oligonucleotide
  Antisense strand to SEQ ID NO: 570851
ugugaucaugugcaauagc

SEQ ID NO: 570853 - RNA, 19 nt, Artificial Sequence
  Description of Artificial Sequence: Synthetic oligonucleotide
  Sense strand starting at position 3158 of SEQ ID NO: 318544
guuauuacacaugaucgga

SEQ ID NO: 570854 - RNA, 19 nt, Artificial Sequence
  Description of Artificial Sequence: Synthetic oligonucleotide
  Antisense strand to SEQ ID NO: 570853
uccgaucauguguaauaac

SEQ ID NO: 570855 - RNA, 19 nt, Artificial Sequence
  Description of Artificial Sequence: Synthetic oligonucleotide
  Sense strand starting at position 3202 of SEQ ID NO: 318544
gcuauuacacaugauugca

SEQ ID NO: 570856 - RNA, 19 nt, Artificial Sequence
  Description of Artificial Sequence: Synthetic oligonucleotide
  Antisense strand to SEQ ID NO: 570855
ugcaaucauguguaauagc

SEQ ID NO: 570857 - RNA, 19 nt, Artificial Sequence
  Description of Artificial Sequence: Synthetic oligonucleotide
  Sense strand starting at position 3351 of SEQ ID NO: 318544
ucucacagacguuauuaca

SEQ ID NO: 570858 - RNA, 19 nt, Artificial Sequence
  Description of Artificial Sequence: Synthetic oligonucleotide
  Antisense strand to SEQ ID NO: 570857
uguaauaacgucugugaga

SEQ ID NO: 570859 - RNA, 19 nt, Artificial Sequence
  Description of Artificial Sequence: Synthetic oligonucleotide
  Sense strand starting at position 3425 of SEQ ID NO: 318544
acacauggccgugagguaa

SEQ ID NO: 570860 - RNA, 19 nt, Artificial Sequence
  Description of Artificial Sequence: Synthetic oligonucleotide
  Antisense strand to SEQ ID NO: 570859
uuaccucacggccaugugu

SEQ ID NO: 570861 - RNA, 19 nt, Artificial Sequence
  Description of Artificial Sequence: Synthetic oligonucleotide
  Sense strand starting at position 3429 of SEQ ID NO: 318544
auggccgugagguaauaaa

SEQ ID NO: 570862 - RNA, 19 nt, Artificial Sequence
  Description of Artificial Sequence: Synthetic oligonucleotide
  Antisense strand to SEQ ID NO: 570861
uuuauuaccucacggccau

SEQ ID NO: 570863 - RNA, 19 nt, Artificial Sequence
  Description of Artificial Sequence: Synthetic oligonucleotide
  Sense strand starting at position 3454 of SEQ ID NO: 318544
uuacauagaguuugucaaa

SEQ ID NO: 570864 - RNA, 19 nt, Artificial Sequence
  Description of Artificial Sequence: Synthetic oligonucleotide
  Antisense strand to SEQ ID NO: 570863
uuugacaaacucuauguaa

SEQ ID NO: 570865 - RNA, 19 nt, Artificial Sequence
  Description of Artificial Sequence: Synthetic oligonucleotide
  Sense strand starting at position 3552 of SEQ ID NO: 318544
acagcucaggagugaaaua

SEQ ID NO: 570866 - RNA, 19 nt, Artificial Sequence
  Description of Artificial Sequence: Synthetic oligonucleotide
  Antisense strand to SEQ ID NO: 570865
uauuucacuccugagcugu

SEQ ID NO: 570867 - RNA, 19 nt, Artificial Sequence
  Description of Artificial Sequence: Synthetic oligonucleotide
  Sense strand starting at position 3631 of SEQ ID NO: 318544
cccugauauuucuccucgu

SEQ ID NO: 570868 - RNA, 19 nt, Artificial Sequence
  Description of Artificial Sequence: Synthetic oligonucleotide
  Antisense strand to SEQ ID NO: 570867
acgaggagaaauaucaggg

SEQ ID NO: 570869 - RNA, 19 nt, Artificial Sequence
  Description of Artificial Sequence: Synthetic oligonucleotide
  Sense strand starting at position 3634 of SEQ ID NO: 318544
ugauauuucuccucguggu

SEQ ID NO: 570870 - RNA, 19 nt, Artificial Sequence
  Description of Artificial Sequence: Synthetic oligonucleotide
  Antisense strand to SEQ ID NO: 570869
accacgaggagaaauauca

SEQ ID NO: 570871 - RNA, 19 nt, Artificial Sequence
  Description of Artificial Sequence: Synthetic oligonucleotide
  Sense strand starting at position 3635 of SEQ ID NO: 318544
gauauuucuccucguggua

SEQ ID NO: 570872 - RNA, 19 nt, Artificial Sequence
  Description of Artificial Sequence: Synthetic oligonucleotide
  Antisense strand to SEQ ID NO: 570871
uaccacgaggagaaauauc

SEQ ID NO: 570873 - RNA, 19 nt, Artificial Sequence
  Description of Artificial Sequence: Synthetic oligonucleotide
  Sense strand starting at position 3672 of SEQ ID NO: 318544
gagauaauucuggguuuau

SEQ ID NO: 570874 - RNA, 19 nt, Artificial Sequence
  Description of Artificial Sequence: Synthetic oligonucleotide
  Antisense strand to SEQ ID NO: 570873
auaaacccagaauuaucuc

SEQ ID NO: 570875 - RNA, 19 nt, Artificial Sequence
  Description of Artificial Sequence: Synthetic oligonucleotide
  Sense strand starting at position 3673 of SEQ ID NO: 318544
agauaauucuggguuuauu

SEQ ID NO: 570876 - RNA, 19 nt, Artificial Sequence
  Description of Artificial Sequence: Synthetic oligonucleotide
  Antisense strand to SEQ ID NO: 570875
aauaaacccagaauuaucu

SEQ ID NO: 570877 - RNA, 19 nt, Artificial Sequence
  Description of Artificial Sequence: Synthetic oligonucleotide
  Sense strand starting at position 3683 of SEQ ID NO: 318544
ggguuuauuccauauccug

SEQ ID NO: 570878 - RNA, 19 nt, Artificial Sequence
  Description of Artificial Sequence: Synthetic oligonucleotide
  Antisense strand to SEQ ID NO: 570877
caggauauggaauaaaccc

SEQ ID NO: 570879 - RNA, 19 nt, Artificial Sequence
  Description of Artificial Sequence: Synthetic oligonucleotide
  Sense strand starting at position 3700 of SEQ ID NO: 318544
uguguuugucuuugauuuc

SEQ ID NO: 570880 - RNA, 19 nt, Artificial Sequence
  Description of Artificial Sequence: Synthetic oligonucleotide
  Antisense strand to SEQ ID NO: 570879
gaaaucaaagacaaacaca

SEQ ID NO: 570881 - RNA, 19 nt, Artificial Sequence
  Description of Artificial Sequence: Synthetic oligonucleotide
  Sense strand starting at position 3802 of SEQ ID NO: 318544
auaaacauuugcuaaagga

SEQ ID NO: 570882 - RNA, 19 nt, Artificial Sequence
  Description of Artificial Sequence: Synthetic oligonucleotide
  Antisense strand to SEQ ID NO: 570881
uccuuuagcaaauguuuau

SEQ ID NO: 570883 - RNA, 19 nt, Artificial Sequence
  Description of Artificial Sequence: Synthetic oligonucleotide
  Sense strand starting at position 3858 of SEQ ID NO: 318544
gcugccugucugcucagau

SEQ ID NO: 570884 - RNA, 19 nt, Artificial Sequence
  Description of Artificial Sequence: Synthetic oligonucleotide
  Antisense strand to SEQ ID NO: 570883
aucugagcagacaggcagc

SEQ ID NO: 570885 - RNA, 19 nt, Artificial Sequence
  Description of Artificial Sequence: Synthetic oligonucleotide
  Sense strand starting at position 234 of SEQ ID NO: 318545
aggauaagaucucaaauga

SEQ ID NO: 570886 - RNA, 19 nt, Artificial Sequence
  Description of Artificial Sequence: Synthetic oligonucleotide
  Antisense strand to SEQ ID NO: 570885
ucauuugagaucuuauccu

SEQ ID NO: 570887 - RNA, 19 nt, Artificial Sequence
  Description of Artificial Sequence: Synthetic oligonucleotide
  Sense strand starting at position 254 of SEQ ID NO: 318545
gagaaauccaguggagagu

SEQ ID NO: 570888 - RNA, 19 nt, Artificial Sequence
  Description of Artificial Sequence: Synthetic oligonucleotide
  Antisense strand to SEQ ID NO: 570887
acucuccacuggauuucuc

SEQ ID NO: 570889 - RNA, 19 nt, Artificial Sequence
  Description of Artificial Sequence: Synthetic oligonucleotide
  Sense strand starting at position 405 of SEQ ID NO: 318545
aggauuaugcagugauuaa

SEQ ID NO: 570890 - RNA, 19 nt, Artificial Sequence
  Description of Artificial Sequence: Synthetic oligonucleotide
  Antisense strand to SEQ ID NO: 570889
uuaaucacugcauaauccu

SEQ ID NO: 570891 - RNA, 19 nt, Artificial Sequence
  Description of Artificial Sequence: Synthetic oligonucleotide
  Sense strand starting at position 412 of SEQ ID NO: 318545
ugcagugauuaagaccaca

SEQ ID NO: 570892 - RNA, 19 nt, Artificial Sequence
  Description of Artificial Sequence: Synthetic oligonucleotide
  Antisense strand to SEQ ID NO: 570891
uguggucuuaaucacugca

SEQ ID NO: 570893 - RNA, 19 nt, Artificial Sequence
  Description of Artificial Sequence: Synthetic oligonucleotide
  Sense strand starting at position 484 of SEQ ID NO: 318545
cuguaagaauuagaguaua

SEQ ID NO: 570894 - RNA, 19 nt, Artificial Sequence
  Description of Artificial Sequence: Synthetic oligonucleotide
  Antisense strand to SEQ ID NO: 570893
uauacucuaauucuuacag

SEQ ID NO: 570895 - RNA, 19 nt, Artificial Sequence
  Description of Artificial Sequence: Synthetic oligonucleotide
  Sense strand starting at position 546 of SEQ ID NO: 318545
ggauaauugugguacuauu

SEQ ID NO: 570896 - RNA, 19 nt, Artificial Sequence
  Description of Artificial Sequence: Synthetic oligonucleotide
  Antisense strand to SEQ ID NO: 570895
aauaguaccacaauuaucc

SEQ ID NO: 570897 - RNA, 19 nt, Artificial Sequence
  Description of Artificial Sequence: Synthetic oligonucleotide
  Sense strand starting at position 588 of SEQ ID NO: 318545
augagauacugugaagauc

SEQ ID NO: 570898 - RNA, 19 nt, Artificial Sequence
  Description of Artificial Sequence: Synthetic oligonucleotide
  Antisense strand to SEQ ID NO: 570897
gaucuucacaguaucucau

SEQ ID NO: 570899 - RNA, 19 nt, Artificial Sequence
  Description of Artificial Sequence: Synthetic oligonucleotide
  Sense strand starting at position 644 of SEQ ID NO: 318545
acagaacucucuuacgauu

SEQ ID NO: 570900 - RNA, 19 nt, Artificial Sequence
  Description of Artificial Sequence: Synthetic oligonucleotide
  Antisense strand to SEQ ID NO: 570899
aaucguaagagaguucugu

SEQ ID NO: 570901 - RNA, 19 nt, Artificial Sequence
  Description of Artificial Sequence: Synthetic oligonucleotide
  Sense strand starting at position 713 of SEQ ID NO: 318545
ucaugaguccuggguugga

SEQ ID NO: 570902 - RNA, 19 nt, Artificial Sequence
  Description of Artificial Sequence: Synthetic oligonucleotide
  Antisense strand to SEQ ID NO: 570901
uccaacccaggacucauga

SEQ ID NO: 570903 - RNA, 19 nt, Artificial Sequence
  Description of Artificial Sequence: Synthetic oligonucleotide
  Sense strand starting at position 723 of SEQ ID NO: 318545
uggguuggagccugaacua

SEQ ID NO: 570904 - RNA, 19 nt, Artificial Sequence
  Description of Artificial Sequence: Synthetic oligonucleotide
  Antisense strand to SEQ ID NO: 570903
uaguucaggcuccaaccca

SEQ ID NO: 570905 - RNA, 19 nt, Artificial Sequence
  Description of Artificial Sequence: Synthetic oligonucleotide
  Sense strand starting at position 939 of SEQ ID NO: 318545
ggucaccugcucuggagaa

SEQ ID NO: 570906 - RNA, 19 nt, Artificial Sequence
  Description of Artificial Sequence: Synthetic oligonucleotide
  Antisense strand to SEQ ID NO: 570905
uucuccagagcaggugacc

SEQ ID NO: 570907 - RNA, 19 nt, Artificial Sequence
  Description of Artificial Sequence: Synthetic oligonucleotide
  Sense strand starting at position 980 of SEQ ID NO: 318545
cugagaguucccugccgca

SEQ ID NO: 570908 - RNA, 19 nt, Artificial Sequence
  Description of Artificial Sequence: Synthetic oligonucleotide
  Antisense strand to SEQ ID NO: 570907
ugcggcagggaacucucag

SEQ ID NO: 570909 - RNA, 19 nt, Artificial Sequence
  Description of Artificial Sequence: Synthetic oligonucleotide
  Sense strand starting at position 1586 of SEQ ID NO: 318545
ggcaucauggaagguaaga

SEQ ID NO: 570910 - RNA, 19 nt, Artificial Sequence
  Description of Artificial Sequence: Synthetic oligonucleotide
  Antisense strand to SEQ ID NO: 570909
ucuuaccuuccaugaugcc

SEQ ID NO: 570911 - RNA, 19 nt, Artificial Sequence
  Description of Artificial Sequence: Synthetic oligonucleotide
  Sense strand starting at position 2151 of SEQ ID NO: 318545
gaguauuuguaagacuagu

SEQ ID NO: 570912 - RNA, 19 nt, Artificial Sequence
  Description of Artificial Sequence: Synthetic oligonucleotide
  Antisense strand to SEQ ID NO: 570911
acuagucuuacaaauacuc

SEQ ID NO: 570913 - RNA, 19 nt, Artificial Sequence
  Description of Artificial Sequence: Synthetic oligonucleotide
  Sense strand starting at position 2159 of SEQ ID NO: 318545
guaagacuagucuggccuu

SEQ ID NO: 570914 - RNA, 19 nt, Artificial Sequence
  Description of Artificial Sequence: Synthetic oligonucleotide
  Antisense strand to SEQ ID NO: 570913
aaggccagacuagucuuac

SEQ ID NO: 570915 - RNA, 19 nt, Artificial Sequence
  Description of Artificial Sequence: Synthetic oligonucleotide
  Sense strand starting at position 2221 of SEQ ID NO: 318545
augugcauuuccuguggua

SEQ ID NO: 570916 - RNA, 19 nt, Artificial Sequence
  Description of Artificial Sequence: Synthetic oligonucleotide
  Antisense strand to SEQ ID NO: 570915
uaccacaggaaaugcacau

SEQ ID NO: 570917 - RNA, 19 nt, Artificial Sequence
  Description of Artificial Sequence: Synthetic oligonucleotide
  Sense strand starting at position 2223 of SEQ ID NO: 318545
gugcauuuccugugguauc

SEQ ID NO: 570918 - RNA, 19 nt, Artificial Sequence
  Description of Artificial Sequence: Synthetic oligonucleotide
  Antisense strand to SEQ ID NO: 570917
gauaccacaggaaaugcac

SEQ ID NO: 570919 - RNA, 19 nt, Artificial Sequence
  Description of Artificial Sequence: Synthetic oligonucleotide
  Sense strand starting at position 2276 of SEQ ID NO: 318545
aggaguaaaugauuggcuu

SEQ ID NO: 570920 - RNA, 19 nt, Artificial Sequence
  Description of Artificial Sequence: Synthetic oligonucleotide
  Antisense strand to SEQ ID NO: 570919
aagccaaucauuuacuccu

SEQ ID NO: 570921 - RNA, 19 nt, Artificial Sequence
  Description of Artificial Sequence: Synthetic oligonucleotide
  Sense strand starting at position 2282 of SEQ ID NO: 318545
aaaugauuggcuugggucu

SEQ ID NO: 570922 - RNA, 19 nt, Artificial Sequence
  Description of Artificial Sequence: Synthetic oligonucleotide
  Antisense strand to SEQ ID NO: 570921
agacccaagccaaucauuu

SEQ ID NO: 570923 - RNA, 19 nt, Artificial Sequence
  Description of Artificial Sequence: Synthetic oligonucleotide
  Sense strand starting at position 2498 of SEQ ID NO: 318545
cccauuaaaugggauaaug

SEQ ID NO: 570924 - RNA, 19 nt, Artificial Sequence
  Description of Artificial Sequence: Synthetic oligonucleotide
  Antisense strand to SEQ ID NO: 570923
cauuaucccauuuaauggg

SEQ ID NO: 570925 - RNA, 19 nt, Artificial Sequence
  Description of Artificial Sequence: Synthetic oligonucleotide
  Sense strand starting at position 2523 of SEQ ID NO: 318545
gaccuagugucugagucuu

SEQ ID NO: 570926 - RNA, 19 nt, Artificial Sequence
  Description of Artificial Sequence: Synthetic oligonucleotide
  Antisense strand to SEQ ID NO: 570925
aagacucagacacuagguc

SEQ ID NO: 570927 - RNA, 19 nt, Artificial Sequence
  Description of Artificial Sequence: Synthetic oligonucleotide
  Sense strand starting at position 2525 of SEQ ID NO: 318545
ccuagugucugagucuuaa

SEQ ID NO: 570928 - RNA, 19 nt, Artificial Sequence
  Description of Artificial Sequence: Synthetic oligonucleotide
  Antisense strand to SEQ ID NO: 570927
uuaagacucagacacuagg

SEQ ID NO: 570929 - RNA, 19 nt, Artificial Sequence
  Description of Artificial Sequence: Synthetic oligonucleotide
  Sense strand starting at position 2529 of SEQ ID NO: 318545
gugucugagucuuaaauuc

SEQ ID NO: 570930 - RNA, 19 nt, Artificial Sequence
  Description of Artificial Sequence: Synthetic oligonucleotide
  Antisense strand to SEQ ID NO: 570929
gaauuuaagacucagacac

SEQ ID NO: 570931 - RNA, 19 nt, Artificial Sequence
  Description of Artificial Sequence: Synthetic oligonucleotide
  Sense strand starting at position 3032 of SEQ ID NO: 318545
gcuaacgagucuuaaauuc

SEQ ID NO: 570932 - RNA, 19 nt, Artificial Sequence
  Description of Artificial Sequence: Synthetic oligonucleotide
  Antisense strand to SEQ ID NO: 570931
gaauuuaagacucguuagc

SEQ ID NO: 570933 - RNA, 19 nt, Artificial Sequence
  Description of Artificial Sequence: Synthetic oligonucleotide
  Sense strand starting at position 3083 of SEQ ID NO: 318545
uuagcugugucccugggau

SEQ ID NO: 570934 - RNA, 19 nt, Artificial Sequence
  Description of Artificial Sequence: Synthetic oligonucleotide
  Antisense strand to SEQ ID NO: 570933
aucccagggacacagcuaa

SEQ ID NO: 570935 - RNA, 19 nt, Artificial Sequence
  Description of Artificial Sequence: Synthetic oligonucleotide
  Sense strand starting at position 3098 of SEQ ID NO: 318545
ggaucugcccugugaggau

SEQ ID NO: 570936 - RNA, 19 nt, Artificial Sequence
  Description of Artificial Sequence: Synthetic oligonucleotide
  Antisense strand to SEQ ID NO: 570935
auccucacagggcagaucc

SEQ ID NO: 570937 - RNA, 19 nt, Artificial Sequence
  Description of Artificial Sequence: Synthetic oligonucleotide
  Sense strand starting at position 3133 of SEQ ID NO: 318545
ggguguaagugaaggaguu

SEQ ID NO: 570938 - RNA, 19 nt, Artificial Sequence
  Description of Artificial Sequence: Synthetic oligonucleotide
  Antisense strand to SEQ ID NO: 570937
aacuccuucacuuacaccc

SEQ ID NO: 570939 - RNA, 19 nt, Artificial Sequence
  Description of Artificial Sequence: Synthetic oligonucleotide
  Sense strand starting at position 3143 of SEQ ID NO: 318545
gaaggaguuccuggagcua

SEQ ID NO: 570940 - RNA, 19 nt, Artificial Sequence
  Description of Artificial Sequence: Synthetic oligonucleotide
  Antisense strand to SEQ ID NO: 570939
uagcuccaggaacuccuuc

SEQ ID NO: 570941 - RNA, 19 nt, Artificial Sequence
  Description of Artificial Sequence: Synthetic oligonucleotide
  Sense strand starting at position 3148 of SEQ ID NO: 318545
aguuccuggagcuaaauga

SEQ ID NO: 570942 - RNA, 19 nt, Artificial Sequence
  Description of Artificial Sequence: Synthetic oligonucleotide
  Antisense strand to SEQ ID NO: 570941
ucauuuagcuccaggaacu

SEQ ID NO: 570943 - RNA, 19 nt, Artificial Sequence
  Description of Artificial Sequence: Synthetic oligonucleotide
  Sense strand starting at position 3179 of SEQ ID NO: 318545
gugguccauuauuugcaaa

SEQ ID NO: 570944 - RNA, 19 nt, Artificial Sequence
  Description of Artificial Sequence: Synthetic oligonucleotide
  Antisense strand to SEQ ID NO: 570943
uuugcaaauaauggaccac

SEQ ID NO: 570945 - RNA, 19 nt, Artificial Sequence
  Description of Artificial Sequence: Synthetic oligonucleotide
  Sense strand starting at position 3310 of SEQ ID NO: 318545
gcuuccuggucucuuguaa

SEQ ID NO: 570946 - RNA, 19 nt, Artificial Sequence
  Description of Artificial Sequence: Synthetic oligonucleotide
  Antisense strand to SEQ ID NO: 570945
uuacaagagaccaggaagc

SEQ ID NO: 570947 - RNA, 19 nt, Artificial Sequence
  Description of Artificial Sequence: Synthetic oligonucleotide
  Sense strand starting at position 3314 of SEQ ID NO: 318545
ccuggucucuuguaauaac

SEQ ID NO: 570948 - RNA, 19 nt, Artificial Sequence
  Description of Artificial Sequence: Synthetic oligonucleotide
  Antisense strand to SEQ ID NO: 570947
guuauuacaagagaccagg

SEQ ID NO: 570949 - RNA, 19 nt, Artificial Sequence
  Description of Artificial Sequence: Synthetic oligonucleotide
  Sense strand starting at position 3401 of SEQ ID NO: 318545
gcaguugagccacauuacu

SEQ ID NO: 570950 - RNA, 19 nt, Artificial Sequence
  Description of Artificial Sequence: Synthetic oligonucleotide
  Antisense strand to SEQ ID NO: 570949
aguaauguggcucaacugc

SEQ ID NO: 570951 - RNA, 19 nt, Artificial Sequence
  Description of Artificial Sequence: Synthetic oligonucleotide
  Sense strand starting at position 3490 of SEQ ID NO: 318545
ugucguggccugcaagauu

SEQ ID NO: 570952 - RNA, 19 nt, Artificial Sequence
  Description of Artificial Sequence: Synthetic oligonucleotide
  Antisense strand to SEQ ID NO: 570951
aaucuugcaggccacgaca

SEQ ID NO: 570953 - RNA, 19 nt, Artificial Sequence
  Description of Artificial Sequence: Synthetic oligonucleotide
  Sense strand starting at position 3608 of SEQ ID NO: 318545
ccuguuccugccugaggau

SEQ ID NO: 570954 - RNA, 19 nt, Artificial Sequence
  Description of Artificial Sequence: Synthetic oligonucleotide
  Antisense strand to SEQ ID NO: 570953
auccucaggcaggaacagg

SEQ ID NO: 570955 - RNA, 19 nt, Artificial Sequence
  Description of Artificial Sequence: Synthetic oligonucleotide
  Sense strand starting at position 3622 of SEQ ID NO: 318545
aggaucuuugcaggaucua

SEQ ID NO: 570956 - RNA, 19 nt, Artificial Sequence
  Description of Artificial Sequence: Synthetic oligonucleotide
  Antisense strand to SEQ ID NO: 570955
uagauccugcaaagauccu

SEQ ID NO: 570957 - RNA, 19 nt, Artificial Sequence
  Description of Artificial Sequence: Synthetic oligonucleotide
  Sense strand starting at position 3623 of SEQ ID NO: 318545
ggaucuuugcaggaucuau

SEQ ID NO: 570958 - RNA, 19 nt, Artificial Sequence
  Description of Artificial Sequence: Synthetic oligonucleotide
  Antisense strand to SEQ ID NO: 570957
auagauccugcaaagaucc

SEQ ID NO: 570959 - RNA, 19 nt, Artificial Sequence
  Description of Artificial Sequence: Synthetic oligonucleotide
  Sense strand starting at position 3690 of SEQ ID NO: 318545
ugaccuaggucucaucuca

SEQ ID NO: 570960 - RNA, 19 nt, Artificial Sequence
  Description of Artificial Sequence: Synthetic oligonucleotide
  Antisense strand to SEQ ID NO: 570959
ugagaugagaccuagguca

SEQ ID NO: 570961 - RNA, 19 nt, Artificial Sequence
  Description of Artificial Sequence: Synthetic oligonucleotide
  Sense strand starting at position 3697 of SEQ ID NO: 318545
ggucucaucucagacguua

SEQ ID NO: 570962 - RNA, 19 nt, Artificial Sequence
  Description of Artificial Sequence: Synthetic oligonucleotide
  Antisense strand to SEQ ID NO: 570961
uaacgucugagaugagacc

SEQ ID NO: 570963 - RNA, 19 nt, Artificial Sequence
  Description of Artificial Sequence: Synthetic oligonucleotide
  Sense strand starting at position 3962 of SEQ ID NO: 318545
uuguauugguagagacgga

SEQ ID NO: 570964 - RNA, 19 nt, Artificial Sequence
  Description of Artificial Sequence: Synthetic oligonucleotide
  Antisense strand to SEQ ID NO: 570963
uccgucucuaccaauacaa

SEQ ID NO: 570965 - RNA, 19 nt, Artificial Sequence
  Description of Artificial Sequence: Synthetic oligonucleotide
  Sense strand starting at position 95 of SEQ ID NO: 318546
cugaguuuaagggaggcua

SEQ ID NO: 570966 - RNA, 19 nt, Artificial Sequence
  Description of Artificial Sequence: Synthetic oligonucleotide
  Antisense strand to SEQ ID NO: 570965
uagccucccuuaaacucag

SEQ ID NO: 570967 - RNA, 19 nt, Artificial Sequence
  Description of Artificial Sequence: Synthetic oligonucleotide
  Sense strand starting at position 108 of SEQ ID NO: 318546
aggcuagugccagacacuu

SEQ ID NO: 570968 - RNA, 19 nt, Artificial Sequence
  Description of Artificial Sequence: Synthetic oligonucleotide
  Antisense strand to SEQ ID NO: 570967
aagugucuggcacuagccu

SEQ ID NO: 570969 - RNA, 19 nt, Artificial Sequence
  Description of Artificial Sequence: Synthetic oligonucleotide
  Sense strand starting at position 140 of SEQ ID NO: 318546
ggcgcuuagcaaugguaac

SEQ ID NO: 570970 - RNA, 19 nt, Artificial Sequence
  Description of Artificial Sequence: Synthetic oligonucleotide
  Antisense strand to SEQ ID NO: 570969
guuaccauugcuaagcgcc

SEQ ID NO: 570971 - RNA, 19 nt, Artificial Sequence
  Description of Artificial Sequence: Synthetic oligonucleotide
  Sense strand starting at position 141 of SEQ ID NO: 318546
gcgcuuagcaaugguaacu

SEQ ID NO: 570972 - RNA, 19 nt, Artificial Sequence
  Description of Artificial Sequence: Synthetic oligonucleotide
  Antisense strand to SEQ ID NO: 570971
aguuaccauugcuaagcgc

SEQ ID NO: 570973 - RNA, 19 nt, Artificial Sequence
  Description of Artificial Sequence: Synthetic oligonucleotide
  Sense strand starting at position 202 of SEQ ID NO: 318546
gcaagucaucggcgggcaa

SEQ ID NO: 570974 - RNA, 19 nt, Artificial Sequence
  Description of Artificial Sequence: Synthetic oligonucleotide
  Antisense strand to SEQ ID NO: 570973
uugcccgccgaugacuugc

SEQ ID NO: 570975 - RNA, 19 nt, Artificial Sequence
  Description of Artificial Sequence: Synthetic oligonucleotide
  Sense strand starting at position 526 of SEQ ID NO: 318546
ucuggugacucuuagcaga

SEQ ID NO: 570976 - RNA, 19 nt, Artificial Sequence
  Description of Artificial Sequence: Synthetic oligonucleotide
  Antisense strand to SEQ ID NO: 570975
ucugcuaagagucaccaga

SEQ ID NO: 570977 - RNA, 19 nt, Artificial Sequence
  Description of Artificial Sequence: Synthetic oligonucleotide
  Sense strand starting at position 528 of SEQ ID NO: 318546
uggugacucuuagcagauc

SEQ ID NO: 570978 - RNA, 19 nt, Artificial Sequence
  Description of Artificial Sequence: Synthetic oligonucleotide
  Antisense strand to SEQ ID NO: 570977
gaucugcuaagagucacca

SEQ ID NO: 570979 - RNA, 19 nt, Artificial Sequence
  Description of Artificial Sequence: Synthetic oligonucleotide
  Sense strand starting at position 600 of SEQ ID NO: 318546
gggcuuuggugcuuucaga

SEQ ID NO: 570980 - RNA, 19 nt, Artificial Sequence
  Description of Artificial Sequence: Synthetic oligonucleotide
  Antisense strand to SEQ ID NO: 570979
ucugaaagcaccaaagccc

SEQ ID NO: 570981 - RNA, 19 nt, Artificial Sequence
  Description of Artificial Sequence: Synthetic oligonucleotide
  Sense strand starting at position 629 of SEQ ID NO: 318546
aagggacucucaugaugag

SEQ ID NO: 570982 - RNA, 19 nt, Artificial Sequence
  Description of Artificial Sequence: Synthetic oligonucleotide
  Antisense strand to SEQ ID NO: 570981
cucaucaugagagucccuu

SEQ ID NO: 570983 - RNA, 19 nt, Artificial Sequence
  Description of Artificial Sequence: Synthetic oligonucleotide
  Sense strand starting at position 632 of SEQ ID NO: 318546
ggacucucaugaugagaag

SEQ ID NO: 570984 - RNA, 19 nt, Artificial Sequence
  Description of Artificial Sequence: Synthetic oligonucleotide
  Antisense strand to SEQ ID NO: 570983
cuucucaucaugagagucc

SEQ ID NO: 570985 - RNA, 19 nt, Artificial Sequence
  Description of Artificial Sequence: Synthetic oligonucleotide
  Sense strand starting at position 635 of SEQ ID NO: 318546
cucucaugaugagaagauc

SEQ ID NO: 570986 - RNA, 19 nt, Artificial Sequence
  Description of Artificial Sequence: Synthetic oligonucleotide
  Antisense strand to SEQ ID NO: 570985
gaucuucucaucaugagag

SEQ ID NO: 570987 - RNA, 19 nt, Artificial Sequence
  Description of Artificial Sequence: Synthetic oligonucleotide
  Sense strand starting at position 742 of SEQ ID NO: 318546
uuuccauuugugcgcauuu

SEQ ID NO: 570988 - RNA, 19 nt, Artificial Sequence
  Description of Artificial Sequence: Synthetic oligonucleotide
  Antisense strand to SEQ ID NO: 570987
aaaugcgcacaaauggaaa

SEQ ID NO: 570989 - RNA, 19 nt, Artificial Sequence
  Description of Artificial Sequence: Synthetic oligonucleotide
  Sense strand starting at position 751 of SEQ ID NO: 318546
gugcgcauuuccugcauuu

SEQ ID NO: 570990 - RNA, 19 nt, Artificial Sequence
  Description of Artificial Sequence: Synthetic oligonucleotide
  Antisense strand to SEQ ID NO: 570989
aaaugcaggaaaugcgcac

SEQ ID NO: 570991 - RNA, 19 nt, Artificial Sequence
  Description of Artificial Sequence: Synthetic oligonucleotide
  Sense strand starting at position 818 of SEQ ID NO: 318546
ggaguaaccuuauaacaag

SEQ ID NO: 570992 - RNA, 19 nt, Artificial Sequence
  Description of Artificial Sequence: Synthetic oligonucleotide
  Antisense strand to SEQ ID NO: 570991
cuuguuauaagguuacucc

SEQ ID NO: 570993 - RNA, 19 nt, Artificial Sequence
  Description of Artificial Sequence: Synthetic oligonucleotide
  Sense strand starting at position 965 of SEQ ID NO: 318546
cuggguguccaugcgugau

SEQ ID NO: 570994 - RNA, 19 nt, Artificial Sequence
  Description of Artificial Sequence: Synthetic oligonucleotide
  Antisense strand to SEQ ID NO: 570993
aucacgcauggacacccag

SEQ ID NO: 570995 - RNA, 19 nt, Artificial Sequence
  Description of Artificial Sequence: Synthetic oligonucleotide
  Sense strand starting at position 968 of SEQ ID NO: 318546
gguguccaugcgugauguu

SEQ ID NO: 570996 - RNA, 19 nt, Artificial Sequence
  Description of Artificial Sequence: Synthetic oligonucleotide
  Antisense strand to SEQ ID NO: 570995
aacaucacgcauggacacc

SEQ ID NO: 570997 - RNA, 19 nt, Artificial Sequence
  Description of Artificial Sequence: Synthetic oligonucleotide
  Sense strand starting at position 971 of SEQ ID NO: 318546
guccaugcgugauguugua

SEQ ID NO: 570998 - RNA, 19 nt, Artificial Sequence
  Description of Artificial Sequence: Synthetic oligonucleotide
  Antisense strand to SEQ ID NO: 570997
uacaacaucacgcauggac

SEQ ID NO: 570999 - RNA, 19 nt, Artificial Sequence
  Description of Artificial Sequence: Synthetic oligonucleotide
  Sense strand starting at position 1148 of SEQ ID NO: 318546
gguggugaguccaagguca

SEQ ID NO: 571000 - RNA, 19 nt, Artificial Sequence
  Description of Artificial Sequence: Synthetic oligonucleotide
  Antisense strand to SEQ ID NO: 570999
ugaccuuggacucaccacc

SEQ ID NO: 571001 - RNA, 19 nt, Artificial Sequence
  Description of Artificial Sequence: Synthetic oligonucleotide
  Sense strand starting at position 1155 of SEQ ID NO: 318546
aguccaaggucacuaaagu

SEQ ID NO: 571002 - RNA, 19 nt, Artificial Sequence
  Description of Artificial Sequence: Synthetic oligonucleotide
  Antisense strand to SEQ ID NO: 571001
acuuuagugaccuuggacu

SEQ ID NO: 571003 - RNA, 19 nt, Artificial Sequence
  Description of Artificial Sequence: Synthetic oligonucleotide
  Sense strand starting at position 1176 of SEQ ID NO: 318546
cccagacaguucugaacau

SEQ ID NO: 571004 - RNA, 19 nt, Artificial Sequence
  Description of Artificial Sequence: Synthetic oligonucleotide
  Antisense strand to SEQ ID NO: 571003
auguucagaacugucuggg

SEQ ID NO: 571005 - RNA, 19 nt, Artificial Sequence
  Description of Artificial Sequence: Synthetic oligonucleotide
  Sense strand starting at position 1292 of SEQ ID NO: 318546
gagcacaugucuggacaca

SEQ ID NO: 571006 - RNA, 19 nt, Artificial Sequence
  Description of Artificial Sequence: Synthetic oligonucleotide
  Antisense strand to SEQ ID NO: 571005
uguguccagacaugugcuc

SEQ ID NO: 571007 - RNA, 19 nt, Artificial Sequence
  Description of Artificial Sequence: Synthetic oligonucleotide
  Sense strand starting at position 1336 of SEQ ID NO: 318546
agcggauuguguguucuuu

SEQ ID NO: 571008 - RNA, 19 nt, Artificial Sequence
  Description of Artificial Sequence: Synthetic oligonucleotide
  Antisense strand to SEQ ID NO: 571007
aaagaacacacaauccgcu

SEQ ID NO: 571009 - RNA, 19 nt, Artificial Sequence
  Description of Artificial Sequence: Synthetic oligonucleotide
  Sense strand starting at position 1337 of SEQ ID NO: 318546
gcggauuguguguucuuua

SEQ ID NO: 571010 - RNA, 19 nt, Artificial Sequence
  Description of Artificial Sequence: Synthetic oligonucleotide
  Antisense strand to SEQ ID NO: 571009
uaaagaacacacaauccgc

SEQ ID NO: 571011 - RNA, 19 nt, Artificial Sequence
  Description of Artificial Sequence: Synthetic oligonucleotide
  Sense strand starting at position 1338 of SEQ ID NO: 318546
cggauuguguguucuuuaa

SEQ ID NO: 571012 - RNA, 19 nt, Artificial Sequence
  Description of Artificial Sequence: Synthetic oligonucleotide
  Antisense strand to SEQ ID NO: 571011
uuaaagaacacacaauccg

SEQ ID NO: 571013 - RNA, 19 nt, Artificial Sequence
  Description of Artificial Sequence: Synthetic oligonucleotide
  Sense strand starting at position 1340 of SEQ ID NO: 318546
gauuguguguucuuuaaag

SEQ ID NO: 571014 - RNA, 19 nt, Artificial Sequence
  Description of Artificial Sequence: Synthetic oligonucleotide
  Antisense strand to SEQ ID NO: 571013
cuuuaaagaacacacaauc

SEQ ID NO: 571015 - RNA, 19 nt, Artificial Sequence
  Description of Artificial Sequence: Synthetic oligonucleotide
  Sense strand starting at position 1595 of SEQ ID NO: 318546
ccugguuuccaggaggagu

SEQ ID NO: 571016 - RNA, 19 nt, Artificial Sequence
  Description of Artificial Sequence: Synthetic oligonucleotide
  Antisense strand to SEQ ID NO: 571015
acuccuccuggaaaccagg

SEQ ID NO: 571017 - RNA, 19 nt, Artificial Sequence
  Description of Artificial Sequence: Synthetic oligonucleotide
  Sense strand starting at position 2034 of SEQ ID NO: 318546
gccguuaauggguaacuca

SEQ ID NO: 571018 - RNA, 19 nt, Artificial Sequence
  Description of Artificial Sequence: Synthetic oligonucleotide
  Antisense strand to SEQ ID NO: 571017
ugaguuacccauuaacggc

SEQ ID NO: 571019 - RNA, 19 nt, Artificial Sequence
  Description of Artificial Sequence: Synthetic oligonucleotide
  Sense strand starting at position 2119 of SEQ ID NO: 318546
ugcucuguguuccaggcaa

SEQ ID NO: 571020 - RNA, 19 nt, Artificial Sequence
  Description of Artificial Sequence: Synthetic oligonucleotide
  Antisense strand to SEQ ID NO: 571019
uugccuggaacacagagca

SEQ ID NO: 571021 - RNA, 19 nt, Artificial Sequence
  Description of Artificial Sequence: Synthetic oligonucleotide
  Sense strand starting at position 2181 of SEQ ID NO: 318546
caaggacagccucaaguuu

SEQ ID NO: 571022 - RNA, 19 nt, Artificial Sequence
  Description of Artificial Sequence: Synthetic oligonucleotide
  Antisense strand to SEQ ID NO: 571021
aaacuugaggcuguccuug

SEQ ID NO: 571023 - RNA, 19 nt, Artificial Sequence
  Description of Artificial Sequence: Synthetic oligonucleotide
  Sense strand starting at position 2221 of SEQ ID NO: 318546
ucccaagacugaggcauau

SEQ ID NO: 571024 - RNA, 19 nt, Artificial Sequence
  Description of Artificial Sequence: Synthetic oligonucleotide
  Antisense strand to SEQ ID NO: 571023
auaugccucagucuuggga

SEQ ID NO: 571025 - RNA, 19 nt, Artificial Sequence
  Description of Artificial Sequence: Synthetic oligonucleotide
  Sense strand starting at position 277 of SEQ ID NO: 318547
cuggucucugggugucaga

SEQ ID NO: 571026 - RNA, 19 nt, Artificial Sequence
  Description of Artificial Sequence: Synthetic oligonucleotide
  Antisense strand to SEQ ID NO: 571025
ucugacacccagagaccag

SEQ ID NO: 571027 - RNA, 19 nt, Artificial Sequence
  Description of Artificial Sequence: Synthetic oligonucleotide
  Sense strand starting at position 359 of SEQ ID NO: 318547
uugcccuucugugcaaaga

SEQ ID NO: 571028 - RNA, 19 nt, Artificial Sequence
  Description of Artificial Sequence: Synthetic oligonucleotide
  Antisense strand to SEQ ID NO: 571027
ucuuugcacagaagggcaa

SEQ ID NO: 571029 - RNA, 19 nt, Artificial Sequence
  Description of Artificial Sequence: Synthetic oligonucleotide
  Sense strand starting at position 590 of SEQ ID NO: 318547
aggcuuuggugagcugaga

SEQ ID NO: 571030 - RNA, 19 nt, Artificial Sequence
  Description of Artificial Sequence: Synthetic oligonucleotide
  Antisense strand to SEQ ID NO: 571029
ucucagcucaccaaagccu

SEQ ID NO: 571031 - RNA, 19 nt, Artificial Sequence
  Description of Artificial Sequence: Synthetic oligonucleotide
  Sense strand starting at position 711 of SEQ ID NO: 318547
cccgcaaggcagugaucaa

SEQ ID NO: 571032 - RNA, 19 nt, Artificial Sequence
  Description of Artificial Sequence: Synthetic oligonucleotide
  Antisense strand to SEQ ID NO: 571031
uugaucacugccuugcggg

SEQ ID NO: 571033 - RNA, 19 nt, Artificial Sequence
  Description of Artificial Sequence: Synthetic oligonucleotide
  Sense strand starting at position 722 of SEQ ID NO: 318547
gugaucaacuccuugacaa

SEQ ID NO: 571034 - RNA, 19 nt, Artificial Sequence
  Description of Artificial Sequence: Synthetic oligonucleotide
  Antisense strand to SEQ ID NO: 571033
uugucaaggaguugaucac

SEQ ID NO: 571035 - RNA, 19 nt, Artificial Sequence
  Description of Artificial Sequence: Synthetic oligonucleotide
  Sense strand starting at position 747 of SEQ ID NO: 318547
aggcgaaacugauucagga

SEQ ID NO: 571036 - RNA, 19 nt, Artificial Sequence
  Description of Artificial Sequence: Synthetic oligonucleotide
  Antisense strand to SEQ ID NO: 571035
uccugaaucaguuucgccu

SEQ ID NO: 571037 - RNA, 19 nt, Artificial Sequence
  Description of Artificial Sequence: Synthetic oligonucleotide
  Sense strand starting at position 825 of SEQ ID NO: 318547
gcagcucuccauggugaga

SEQ ID NO: 571038 - RNA, 19 nt, Artificial Sequence
  Description of Artificial Sequence: Synthetic oligonucleotide
  Antisense strand to SEQ ID NO: 571037
ucucaccauggagagcugc

SEQ ID NO: 571039 - RNA, 19 nt, Artificial Sequence
  Description of Artificial Sequence: Synthetic oligonucleotide
  Sense strand starting at position 861 of SEQ ID NO: 318547
agggcagacuccucuaaac

SEQ ID NO: 571040 - RNA, 19 nt, Artificial Sequence
  Description of Artificial Sequence: Synthetic oligonucleotide
  Antisense strand to SEQ ID NO: 571039
guuuagaggagucugcccu

SEQ ID NO: 571041 - RNA, 19 nt, Artificial Sequence
  Description of Artificial Sequence: Synthetic oligonucleotide
  Sense strand starting at position 961 of SEQ ID NO: 318547
uggaccuuccgcugagaaa

SEQ ID NO: 571042 - RNA, 19 nt, Artificial Sequence
  Description of Artificial Sequence: Synthetic oligonucleotide
  Antisense strand to SEQ ID NO: 571041
uuucucagcggaaggucca

SEQ ID NO: 571043 - RNA, 19 nt, Artificial Sequence
  Description of Artificial Sequence: Synthetic oligonucleotide
  Sense strand starting at position 962 of SEQ ID NO: 318547
ggaccuuccgcugagaaag

SEQ ID NO: 571044 - RNA, 19 nt, Artificial Sequence
  Description of Artificial Sequence: Synthetic oligonucleotide
  Antisense strand to SEQ ID NO: 571043
cuuucucagcggaaggucc

SEQ ID NO: 571045 - RNA, 19 nt, Artificial Sequence
  Description of Artificial Sequence: Synthetic oligonucleotide
  Sense strand starting at position 974 of SEQ ID NO: 318547
gagaaagcagcagguuuau

SEQ ID NO: 571046 - RNA, 19 nt, Artificial Sequence
  Description of Artificial Sequence: Synthetic oligonucleotide
  Antisense strand to SEQ ID NO: 571045
auaaaccugcugcuuucuc

SEQ ID NO: 571047 - RNA, 19 nt, Artificial Sequence
  Description of Artificial Sequence: Synthetic oligonucleotide
  Sense strand starting at position 1461 of SEQ ID NO: 318547
gccagaacguuccaggacu

SEQ ID NO: 571048 - RNA, 19 nt, Artificial Sequence
  Description of Artificial Sequence: Synthetic oligonucleotide
  Antisense strand to SEQ ID NO: 571047
aguccuggaacguucuggc

SEQ ID NO: 571049 - RNA, 19 nt, Artificial Sequence
  Description of Artificial Sequence: Synthetic oligonucleotide
  Sense strand starting at position 2111 of SEQ ID NO: 318547
agggacuguuaaugccuua

SEQ ID NO: 571050 - RNA, 19 nt, Artificial Sequence
  Description of Artificial Sequence: Synthetic oligonucleotide
  Antisense strand to SEQ ID NO: 571049
uaaggcauuaacagucccu

SEQ ID NO: 571051 - RNA, 19 nt, Artificial Sequence
  Description of Artificial Sequence: Synthetic oligonucleotide
  Sense strand starting at position 2572 of SEQ ID NO: 318547
ugggauguggccugaauca

SEQ ID NO: 571052 - RNA, 19 nt, Artificial Sequence
  Description of Artificial Sequence: Synthetic oligonucleotide
  Antisense strand to SEQ ID NO: 571051
ugauucaggccacauccca

SEQ ID NO: 571053 - RNA, 19 nt, Artificial Sequence
  Description of Artificial Sequence: Synthetic oligonucleotide
  Sense strand starting at position 2830 of SEQ ID NO: 318547
gauggaggguccuguguca

SEQ ID NO: 571054 - RNA, 19 nt, Artificial Sequence
  Description of Artificial Sequence: Synthetic oligonucleotide
  Antisense strand to SEQ ID NO: 571053
ugacacaggacccuccauc

SEQ ID NO: 571055 - RNA, 19 nt, Artificial Sequence
  Description of Artificial Sequence: Synthetic oligonucleotide
  Sense strand starting at position 2835 of SEQ ID NO: 318547
aggguccugugucauggaa

SEQ ID NO: 571056 - RNA, 19 nt, Artificial Sequence
  Description of Artificial Sequence: Synthetic oligonucleotide
  Antisense strand to SEQ ID NO: 571055
uuccaugacacaggacccu

SEQ ID NO: 571057 - RNA, 19 nt, Artificial Sequence
  Description of Artificial Sequence: Synthetic oligonucleotide
  Sense strand starting at position 3096 of SEQ ID NO: 318547
gugggauucucuccugguu

SEQ ID NO: 571058 - RNA, 19 nt, Artificial Sequence
  Description of Artificial Sequence: Synthetic oligonucleotide
  Antisense strand to SEQ ID NO: 571057
aaccaggagagaaucccac

SEQ ID NO: 571059 - RNA, 19 nt, Artificial Sequence
  Description of Artificial Sequence: Synthetic oligonucleotide
  Sense strand starting at position 3499 of SEQ ID NO: 318547
caucgacauucgcugagua

SEQ ID NO: 571060 - RNA, 19 nt, Artificial Sequence
  Description of Artificial Sequence: Synthetic oligonucleotide
  Antisense strand to SEQ ID NO: 571059
uacucagcgaaugucgaug

SEQ ID NO: 571061 - RNA, 19 nt, Artificial Sequence
  Description of Artificial Sequence: Synthetic oligonucleotide
  Sense strand starting at position 3500 of SEQ ID NO: 318547
aucgacauucgcugaguaa

SEQ ID NO: 571062 - RNA, 19 nt, Artificial Sequence
  Description of Artificial Sequence: Synthetic oligonucleotide
  Antisense strand to SEQ ID NO: 571061
uuacucagcgaaugucgau

SEQ ID NO: 571063 - RNA, 19 nt, Artificial Sequence
  Description of Artificial Sequence: Synthetic oligonucleotide
  Sense strand starting at position 3501 of SEQ ID NO: 318547
ucgacauucgcugaguaau

SEQ ID NO: 571064 - RNA, 19 nt, Artificial Sequence
  Description of Artificial Sequence: Synthetic oligonucleotide
  Antisense strand to SEQ ID NO: 571063
auuacucagcgaaugucga

SEQ ID NO: 571065 - RNA, 19 nt, Artificial Sequence
  Description of Artificial Sequence: Synthetic oligonucleotide
  Sense strand starting at position 3504 of SEQ ID NO: 318547
acauucgcugaguaaugga

SEQ ID NO: 571066 - RNA, 19 nt, Artificial Sequence
  Description of Artificial Sequence: Synthetic oligonucleotide
  Antisense strand to SEQ ID NO: 571065
uccauuacucagcgaaugu

SEQ ID NO: 571067 - RNA, 19 nt, Artificial Sequence
  Description of Artificial Sequence: Synthetic oligonucleotide
  Sense strand starting at position 3507 of SEQ ID NO: 318547
uucgcugaguaauggagau

SEQ ID NO: 571068 - RNA, 19 nt, Artificial Sequence
  Description of Artificial Sequence: Synthetic oligonucleotide
  Antisense strand to SEQ ID NO: 571067
aucuccauuacucagcgaa

SEQ ID NO: 571069 - RNA, 19 nt, Artificial Sequence
  Description of Artificial Sequence: Synthetic oligonucleotide
  Sense strand starting at position 3509 of SEQ ID NO: 318547
cgcugaguaauggagauga

SEQ ID NO: 571070 - RNA, 19 nt, Artificial Sequence
  Description of Artificial Sequence: Synthetic oligonucleotide
  Antisense strand to SEQ ID NO: 571069
ucaucuccauuacucagcg

SEQ ID NO: 571071 - RNA, 19 nt, Artificial Sequence
  Description of Artificial Sequence: Synthetic oligonucleotide
  Sense strand starting at position 3537 of SEQ ID NO: 318547
gggcgucacucagagauga

SEQ ID NO: 571072 - RNA, 19 nt, Artificial Sequence
  Description of Artificial Sequence: Synthetic oligonucleotide
  Antisense strand to SEQ ID NO: 571071
ucaucucugagugacgccc

SEQ ID NO: 571073 - RNA, 19 nt, Artificial Sequence
  Description of Artificial Sequence: Synthetic oligonucleotide
  Sense strand starting at position 3545 of SEQ ID NO: 318547
cucagagaugagcgaguuu

SEQ ID NO: 571074 - RNA, 19 nt, Artificial Sequence
  Description of Artificial Sequence: Synthetic oligonucleotide
  Antisense strand to SEQ ID NO: 571073
aaacucgcucaucucugag

SEQ ID NO: 571075 - RNA, 19 nt, Artificial Sequence
  Description of Artificial Sequence: Synthetic oligonucleotide
  Sense strand starting at position 3620 of SEQ ID NO: 318547
agagaucacguuugcauuu

SEQ ID NO: 571076 - RNA, 19 nt, Artificial Sequence
  Description of Artificial Sequence: Synthetic oligonucleotide
  Antisense strand to SEQ ID NO: 571075
aaaugcaaacgugaucucu

SEQ ID NO: 571077 - RNA, 19 nt, Artificial Sequence
  Description of Artificial Sequence: Synthetic oligonucleotide
  Sense strand starting at position 3621 of SEQ ID NO: 318547
gagaucacguuugcauuua

SEQ ID NO: 571078 - RNA, 19 nt, Artificial Sequence
  Description of Artificial Sequence: Synthetic oligonucleotide
  Antisense strand to SEQ ID NO: 571077
uaaaugcaaacgugaucuc

SEQ ID NO: 571079 - RNA, 19 nt, Artificial Sequence
  Description of Artificial Sequence: Synthetic oligonucleotide
  Sense strand starting at position 3622 of SEQ ID NO: 318547
agaucacguuugcauuuaa

SEQ ID NO: 571080 - RNA, 19 nt, Artificial Sequence
  Description of Artificial Sequence: Synthetic oligonucleotide
  Antisense strand to SEQ ID NO: 571079
uuaaaugcaaacgugaucu

SEQ ID NO: 571081 - RNA, 19 nt, Artificial Sequence
  Description of Artificial Sequence: Synthetic oligonucleotide
  Sense strand starting at position 117 of SEQ ID NO: 318548
uagcguggcuuucuacuaa

SEQ ID NO: 571082 - RNA, 19 nt, Artificial Sequence
  Description of Artificial Sequence: Synthetic oligonucleotide
  Antisense strand to SEQ ID NO: 571081
uuaguagaaagccacgcua

SEQ ID NO: 571083 - RNA, 19 nt, Artificial Sequence
  Description of Artificial Sequence: Synthetic oligonucleotide
  Sense strand starting at position 121 of SEQ ID NO: 318548
guggcuuucuacuaacaau

SEQ ID NO: 571084 - RNA, 19 nt, Artificial Sequence
  Description of Artificial Sequence: Synthetic oligonucleotide
  Antisense strand to SEQ ID NO: 571083
auuguuaguagaaagccac

SEQ ID NO: 571085 - RNA, 19 nt, Artificial Sequence
  Description of Artificial Sequence: Synthetic oligonucleotide
  Sense strand starting at position 131 of SEQ ID NO: 318548
acuaacaaugcauggauau

SEQ ID NO: 571086 - RNA, 19 nt, Artificial Sequence
  Description of Artificial Sequence: Synthetic oligonucleotide
  Antisense strand to SEQ ID NO: 571085
auauccaugcauuguuagu

SEQ ID NO: 571087 - RNA, 19 nt, Artificial Sequence
  Description of Artificial Sequence: Synthetic oligonucleotide
  Sense strand starting at position 292 of SEQ ID NO: 318548
auggaauacaguugugauu

SEQ ID NO: 571088 - RNA, 19 nt, Artificial Sequence
  Description of Artificial Sequence: Synthetic oligonucleotide
  Antisense strand to SEQ ID NO: 571087
aaucacaacuguauuccau

SEQ ID NO: 571089 - RNA, 19 nt, Artificial Sequence
  Description of Artificial Sequence: Synthetic oligonucleotide
  Sense strand starting at position 294 of SEQ ID NO: 318548
ggaauacaguugugauuac

SEQ ID NO: 571090 - RNA, 19 nt, Artificial Sequence
  Description of Artificial Sequence: Synthetic oligonucleotide
  Antisense strand to SEQ ID NO: 571089
guaaucacaacuguauucc

SEQ ID NO: 571091 - RNA, 19 nt, Artificial Sequence
  Description of Artificial Sequence: Synthetic oligonucleotide
  Sense strand starting at position 295 of SEQ ID NO: 318548
gaauacaguugugauuaca

SEQ ID NO: 571092 - RNA, 19 nt, Artificial Sequence
  Description of Artificial Sequence: Synthetic oligonucleotide
  Antisense strand to SEQ ID NO: 571091
uguaaucacaacuguauuc

SEQ ID NO: 571093 - RNA, 19 nt, Artificial Sequence
  Description of Artificial Sequence: Synthetic oligonucleotide
  Sense strand starting at position 453 of SEQ ID NO: 318548
gagacagggucugacuauu

SEQ ID NO: 571094 - RNA, 19 nt, Artificial Sequence
  Description of Artificial Sequence: Synthetic oligonucleotide
  Antisense strand to SEQ ID NO: 571093
aauagucagacccugucuc

SEQ ID NO: 571095 - RNA, 19 nt, Artificial Sequence
  Description of Artificial Sequence: Synthetic oligonucleotide
  Sense strand starting at position 461 of SEQ ID NO: 318548
gucugacuauuguugccaa

SEQ ID NO: 571096 - RNA, 19 nt, Artificial Sequence
  Description of Artificial Sequence: Synthetic oligonucleotide
  Antisense strand to SEQ ID NO: 571095
uuggcaacaauagucagac

SEQ ID NO: 571097 - RNA, 19 nt, Artificial Sequence
  Description of Artificial Sequence: Synthetic oligonucleotide
  Sense strand starting at position 566 of SEQ ID NO: 318548
gggcuuguauuguuuauac

SEQ ID NO: 571098 - RNA, 19 nt, Artificial Sequence
  Description of Artificial Sequence: Synthetic oligonucleotide
  Antisense strand to SEQ ID NO: 571097
guauaaacaauacaagccc

SEQ ID NO: 571099 - RNA, 19 nt, Artificial Sequence
  Description of Artificial Sequence: Synthetic oligonucleotide
  Sense strand starting at position 747 of SEQ ID NO: 318548
gggcuucaucgcgggaacu

SEQ ID NO: 571100 - RNA, 19 nt, Artificial Sequence
  Description of Artificial Sequence: Synthetic oligonucleotide
  Antisense strand to SEQ ID NO: 571099
aguucccgcgaugaagccc

SEQ ID NO: 571101 - RNA, 19 nt, Artificial Sequence
  Description of Artificial Sequence: Synthetic oligonucleotide
  Sense strand starting at position 748 of SEQ ID NO: 318548
ggcuucaucgcgggaacua

SEQ ID NO: 571102 - RNA, 19 nt, Artificial Sequence
  Description of Artificial Sequence: Synthetic oligonucleotide
  Antisense strand to SEQ ID NO: 571101
uaguucccgcgaugaagcc

SEQ ID NO: 571103 - RNA, 19 nt, Artificial Sequence
  Description of Artificial Sequence: Synthetic oligonucleotide
  Sense strand starting at position 791 of SEQ ID NO: 318548
gggaaauccuguccaaacg

SEQ ID NO: 571104 - RNA, 19 nt, Artificial Sequence
  Description of Artificial Sequence: Synthetic oligonucleotide
  Antisense strand to SEQ ID NO: 571103
cguuuggacaggauuuccc

SEQ ID NO: 571105 - RNA, 19 nt, Artificial Sequence
  Description of Artificial Sequence: Synthetic oligonucleotide
  Sense strand starting at position 870 of SEQ ID NO: 318548
cagggcgacuucugucauu

SEQ ID NO: 571106 - RNA, 19 nt, Artificial Sequence
  Description of Artificial Sequence: Synthetic oligonucleotide
  Antisense strand to SEQ ID NO: 571105
aaugacagaagucgcccug

SEQ ID NO: 571107 - RNA, 19 nt, Artificial Sequence
  Description of Artificial Sequence: Synthetic oligonucleotide
  Sense strand starting at position 1125 of SEQ ID NO: 318548
augagcuaucacgagcuau

SEQ ID NO: 571108 - RNA, 19 nt, Artificial Sequence
  Description of Artificial Sequence: Synthetic oligonucleotide
  Antisense strand to SEQ ID NO: 571107
auagcucgugauagcucau

SEQ ID NO: 571109 - RNA, 19 nt, Artificial Sequence
  Description of Artificial Sequence: Synthetic oligonucleotide
  Sense strand starting at position 1573 of SEQ ID NO: 318548
aggguuaaguuccacgaga

SEQ ID NO: 571110 - RNA, 19 nt, Artificial Sequence
  Description of Artificial Sequence: Synthetic oligonucleotide
  Antisense strand to SEQ ID NO: 571109
ucucguggaacuuaacccu

SEQ ID NO: 571111 - RNA, 19 nt, Artificial Sequence
  Description of Artificial Sequence: Synthetic oligonucleotide
  Sense strand starting at position 1575 of SEQ ID NO: 318548
gguuaaguuccacgagaag

SEQ ID NO: 571112 - RNA, 19 nt, Artificial Sequence
  Description of Artificial Sequence: Synthetic oligonucleotide
  Antisense strand to SEQ ID NO: 571111
cuucucguggaacuuaacc

SEQ ID NO: 571113 - RNA, 19 nt, Artificial Sequence
  Description of Artificial Sequence: Synthetic oligonucleotide
  Sense strand starting at position 2024 of SEQ ID NO: 318548
cgggcucuuauccaguaga

SEQ ID NO: 571114 - RNA, 19 nt, Artificial Sequence
  Description of Artificial Sequence: Synthetic oligonucleotide
  Antisense strand to SEQ ID NO: 571113
ucuacuggauaagagcccg

SEQ ID NO: 571115 - RNA, 19 nt, Artificial Sequence
  Description of Artificial Sequence: Synthetic oligonucleotide
  Sense strand starting at position 2027 of SEQ ID NO: 318548
gcucuuauccaguagacag

SEQ ID NO: 571116 - RNA, 19 nt, Artificial Sequence
  Description of Artificial Sequence: Synthetic oligonucleotide
  Antisense strand to SEQ ID NO: 571115
cugucuacuggauaagagc

SEQ ID NO: 571117 - RNA, 19 nt, Artificial Sequence
  Description of Artificial Sequence: Synthetic oligonucleotide
  Sense strand starting at position 2233 of SEQ ID NO: 318548
ccgagacgucgcggaucua

SEQ ID NO: 571118 - RNA, 19 nt, Artificial Sequence
  Description of Artificial Sequence: Synthetic oligonucleotide
  Antisense strand to SEQ ID NO: 571117
uagauccgcgacgucucgg

SEQ ID NO: 571119 - RNA, 19 nt, Artificial Sequence
  Description of Artificial Sequence: Synthetic oligonucleotide
  Sense strand starting at position 2692 of SEQ ID NO: 318548
cucgcacucgccuaagaaa

SEQ ID NO: 571120 - RNA, 19 nt, Artificial Sequence
  Description of Artificial Sequence: Synthetic oligonucleotide
  Antisense strand to SEQ ID NO: 571119
uuucuuaggcgagugcgag

SEQ ID NO: 571121 - RNA, 19 nt, Artificial Sequence
  Description of Artificial Sequence: Synthetic oligonucleotide
  Sense strand starting at position 2780 of SEQ ID NO: 318548
aggcuuuccuuccgagaug

SEQ ID NO: 571122 - RNA, 19 nt, Artificial Sequence
  Description of Artificial Sequence: Synthetic oligonucleotide
  Antisense strand to SEQ ID NO: 571121
caucucggaaggaaagccu

SEQ ID NO: 571123 - RNA, 19 nt, Artificial Sequence
  Description of Artificial Sequence: Synthetic oligonucleotide
  Sense strand starting at position 3549 of SEQ ID NO: 318548
gggacuucaucgccaggga

SEQ ID NO: 571124 - RNA, 19 nt, Artificial Sequence
  Description of Artificial Sequence: Synthetic oligonucleotide
  Antisense strand to SEQ ID NO: 571123
ucccuggcgaugaaguccc

SEQ ID NO: 571125 - RNA, 19 nt, Artificial Sequence
  Description of Artificial Sequence: Synthetic oligonucleotide
  Sense strand starting at position 3745 of SEQ ID NO: 318548
agacuuugcaggugacuaa

SEQ ID NO: 571126 - RNA, 19 nt, Artificial Sequence
  Description of Artificial Sequence: Synthetic oligonucleotide
  Antisense strand to SEQ ID NO: 571125
uuagucaccugcaaagucu

SEQ ID NO: 571127 - RNA, 19 nt, Artificial Sequence
  Description of Artificial Sequence: Synthetic oligonucleotide
  Sense strand starting at position 52 of SEQ ID NO: 318549
ugagauaaagcuugcuaac

SEQ ID NO: 571128 - RNA, 19 nt, Artificial Sequence
  Description of Artificial Sequence: Synthetic oligonucleotide
  Antisense strand to SEQ ID NO: 571127
guuagcaagcuuuaucuca

SEQ ID NO: 571129 - RNA, 19 nt, Artificial Sequence
  Description of Artificial Sequence: Synthetic oligonucleotide
  Sense strand starting at position 197 of SEQ ID NO: 318549
ucacucaugucagugaaua

SEQ ID NO: 571130 - RNA, 19 nt, Artificial Sequence
  Description of Artificial Sequence: Synthetic oligonucleotide
  Antisense strand to SEQ ID NO: 571129
uauucacugacaugaguga

SEQ ID NO: 571131 - RNA, 19 nt, Artificial Sequence
  Description of Artificial Sequence: Synthetic oligonucleotide
  Sense strand starting at position 782 of SEQ ID NO: 318549
gaaugaacuuguccaaagu

SEQ ID NO: 571132 - RNA, 19 nt, Artificial Sequence
  Description of Artificial Sequence: Synthetic oligonucleotide
  Antisense strand to SEQ ID NO: 571131
acuuuggacaaguucauuc

SEQ ID NO: 571133 - RNA, 19 nt, Artificial Sequence
  Description of Artificial Sequence: Synthetic oligonucleotide
  Sense strand starting at position 810 of SEQ ID NO: 318549
aguggcagcggcagaaaua

SEQ ID NO: 571134 - RNA, 19 nt, Artificial Sequence
  Description of Artificial Sequence: Synthetic oligonucleotide
  Antisense strand to SEQ ID NO: 571133
uauuucugccgcugccacu

SEQ ID NO: 571135 - RNA, 19 nt, Artificial Sequence
  Description of Artificial Sequence: Synthetic oligonucleotide
  Sense strand starting at position 838 of SEQ ID NO: 318549
agaucugacuccuuaguua

SEQ ID NO: 571136 - RNA, 19 nt, Artificial Sequence
  Description of Artificial Sequence: Synthetic oligonucleotide
  Antisense strand to SEQ ID NO: 571135
uaacuaaggagucagaucu

SEQ ID NO: 571137 - RNA, 19 nt, Artificial Sequence
  Description of Artificial Sequence: Synthetic oligonucleotide
  Sense strand starting at position 849 of SEQ ID NO: 318549
cuuaguuaggacugguaca

SEQ ID NO: 571138 - RNA, 19 nt, Artificial Sequence
  Description of Artificial Sequence: Synthetic oligonucleotide
  Antisense strand to SEQ ID NO: 571137
uguaccaguccuaacuaag

SEQ ID NO: 571139 - RNA, 19 nt, Artificial Sequence
  Description of Artificial Sequence: Synthetic oligonucleotide
  Sense strand starting at position 850 of SEQ ID NO: 318549
uuaguuaggacugguacaa

SEQ ID NO: 571140 - RNA, 19 nt, Artificial Sequence
  Description of Artificial Sequence: Synthetic oligonucleotide
  Antisense strand to SEQ ID NO: 571139
uuguaccaguccuaacuaa

SEQ ID NO: 571141 - RNA, 19 nt, Artificial Sequence
  Description of Artificial Sequence: Synthetic oligonucleotide
  Sense strand starting at position 1157 of SEQ ID NO: 318549
ccggcuucaguauggauga

SEQ ID NO: 571142 - RNA, 19 nt, Artificial Sequence
  Description of Artificial Sequence: Synthetic oligonucleotide
  Antisense strand to SEQ ID NO: 571141
ucauccauacugaagccgg

SEQ ID NO: 571143 - RNA, 19 nt, Artificial Sequence
  Description of Artificial Sequence: Synthetic oligonucleotide
  Sense strand starting at position 1215 of SEQ ID NO: 318549
acgcucagguauuccaaua

SEQ ID NO: 571144 - RNA, 19 nt, Artificial Sequence
  Description of Artificial Sequence: Synthetic oligonucleotide
  Antisense strand to SEQ ID NO: 571143
uauuggaauaccugagcgu

SEQ ID NO: 571145 - RNA, 19 nt, Artificial Sequence
  Description of Artificial Sequence: Synthetic oligonucleotide
  Sense strand starting at position 2111 of SEQ ID NO: 318549
ggauaagaaucucuccucu

SEQ ID NO: 571146 - RNA, 19 nt, Artificial Sequence
  Description of Artificial Sequence: Synthetic oligonucleotide
  Antisense strand to SEQ ID NO: 571145
agaggagagauucuuaucc

SEQ ID NO: 571147 - RNA, 19 nt, Artificial Sequence
  Description of Artificial Sequence: Synthetic oligonucleotide
  Sense strand starting at position 2336 of SEQ ID NO: 318549
uggagagacaggugucguu

SEQ ID NO: 571148 - RNA, 19 nt, Artificial Sequence
  Description of Artificial Sequence: Synthetic oligonucleotide
  Antisense strand to SEQ ID NO: 571147
aacgacaccugucucucca

SEQ ID NO: 571149 - RNA, 19 nt, Artificial Sequence
  Description of Artificial Sequence: Synthetic oligonucleotide
  Sense strand starting at position 2458 of SEQ ID NO: 318549
ggaccuuuaggcuaguaga

SEQ ID NO: 571150 - RNA, 19 nt, Artificial Sequence
  Description of Artificial Sequence: Synthetic oligonucleotide
  Antisense strand to SEQ ID NO: 571149
ucuacuagccuaaaggucc

SEQ ID NO: 571151 - RNA, 19 nt, Artificial Sequence
  Description of Artificial Sequence: Synthetic oligonucleotide
  Sense strand starting at position 2552 of SEQ ID NO: 318549
gccacagugucacugugau

SEQ ID NO: 571152 - RNA, 19 nt, Artificial Sequence
  Description of Artificial Sequence: Synthetic oligonucleotide
  Antisense strand to SEQ ID NO: 571151
aucacagugacacuguggc

SEQ ID NO: 571153 - RNA, 19 nt, Artificial Sequence
  Description of Artificial Sequence: Synthetic oligonucleotide
  Sense strand starting at position 2558 of SEQ ID NO: 318549
gugucacugugaucuguga

SEQ ID NO: 571154 - RNA, 19 nt, Artificial Sequence
  Description of Artificial Sequence: Synthetic oligonucleotide
  Antisense strand to SEQ ID NO: 571153
ucacagaucacagugacac

SEQ ID NO: 571155 - RNA, 19 nt, Artificial Sequence
  Description of Artificial Sequence: Synthetic oligonucleotide
  Sense strand starting at position 2560 of SEQ ID NO: 318549
gucacugugaucugugacu

SEQ ID NO: 571156 - RNA, 19 nt, Artificial Sequence
  Description of Artificial Sequence: Synthetic oligonucleotide
  Antisense strand to SEQ ID NO: 571155
agucacagaucacagugac

SEQ ID NO: 571157 - RNA, 19 nt, Artificial Sequence
  Description of Artificial Sequence: Synthetic oligonucleotide
  Sense strand starting at position 2562 of SEQ ID NO: 318549
cacugugaucugugacuua

SEQ ID NO: 571158 - RNA, 19 nt, Artificial Sequence
  Description of Artificial Sequence: Synthetic oligonucleotide
  Antisense strand to SEQ ID NO: 571157
uaagucacagaucacagug

SEQ ID NO: 571159 - RNA, 19 nt, Artificial Sequence
  Description of Artificial Sequence: Synthetic oligonucleotide
  Sense strand starting at position 2565 of SEQ ID NO: 318549
ugugaucugugacuuagau

SEQ ID NO: 571160 - RNA, 19 nt, Artificial Sequence
  Description of Artificial Sequence: Synthetic oligonucleotide
  Antisense strand to SEQ ID NO: 571159
aucuaagucacagaucaca

SEQ ID NO: 571161 - RNA, 19 nt, Artificial Sequence
  Description of Artificial Sequence: Synthetic oligonucleotide
  Sense strand starting at position 2571 of SEQ ID NO: 318549
cugugacuuagaugauuag

SEQ ID NO: 571162 - RNA, 19 nt, Artificial Sequence
  Description of Artificial Sequence: Synthetic oligonucleotide
  Antisense strand to SEQ ID NO: 571161
cuaaucaucuaagucacag

SEQ ID NO: 571163 - RNA, 19 nt, Artificial Sequence
  Description of Artificial Sequence: Synthetic oligonucleotide
  Sense strand starting at position 2572 of SEQ ID NO: 318549
ugugacuuagaugauuagu

SEQ ID NO: 571164 - RNA, 19 nt, Artificial Sequence
  Description of Artificial Sequence: Synthetic oligonucleotide
  Antisense strand to SEQ ID NO: 571163
acuaaucaucuaagucaca

SEQ ID NO: 571165 - RNA, 19 nt, Artificial Sequence
  Description of Artificial Sequence: Synthetic oligonucleotide
  Sense strand starting at position 2574 of SEQ ID NO: 318549
ugacuuagaugauuaguaa

SEQ ID NO: 571166 - RNA, 19 nt, Artificial Sequence
  Description of Artificial Sequence: Synthetic oligonucleotide
  Antisense strand to SEQ ID NO: 571165
uuacuaaucaucuaaguca

SEQ ID NO: 571167 - RNA, 19 nt, Artificial Sequence
  Description of Artificial Sequence: Synthetic oligonucleotide
  Sense strand starting at position 2581 of SEQ ID NO: 318549
gaugauuaguaacugguuu

SEQ ID NO: 571168 - RNA, 19 nt, Artificial Sequence
  Description of Artificial Sequence: Synthetic oligonucleotide
  Antisense strand to SEQ ID NO: 571167
aaaccaguuacuaaucauc

SEQ ID NO: 571169 - RNA, 19 nt, Artificial Sequence
  Description of Artificial Sequence: Synthetic oligonucleotide
  Sense strand starting at position 2622 of SEQ ID NO: 318549
ucuggaaaguucuaauuuc

SEQ ID NO: 571170 - RNA, 19 nt, Artificial Sequence
  Description of Artificial Sequence: Synthetic oligonucleotide
  Antisense strand to SEQ ID NO: 571169
gaaauuagaacuuuccaga

SEQ ID NO: 571171 - RNA, 19 nt, Artificial Sequence
  Description of Artificial Sequence: Synthetic oligonucleotide
  Sense strand starting at position 2669 of SEQ ID NO: 318549
caugcauuguugccucaga

SEQ ID NO: 571172 - RNA, 19 nt, Artificial Sequence
  Description of Artificial Sequence: Synthetic oligonucleotide
  Antisense strand to SEQ ID NO: 571171
ucugaggcaacaaugcaug

SEQ ID NO: 571173 - RNA, 19 nt, Artificial Sequence
  Description of Artificial Sequence: Synthetic oligonucleotide
  Sense strand starting at position 2670 of SEQ ID NO: 318549
augcauuguugccucagaa

SEQ ID NO: 571174 - RNA, 19 nt, Artificial Sequence
  Description of Artificial Sequence: Synthetic oligonucleotide
  Antisense strand to SEQ ID NO: 571173
uucugaggcaacaaugcau

SEQ ID NO: 571175 - RNA, 19 nt, Artificial Sequence
  Description of Artificial Sequence: Synthetic oligonucleotide
  Sense strand starting at position 2726 of SEQ ID NO: 318549
aaaugaugagcuggagcaa

SEQ ID NO: 571176 - RNA, 19 nt, Artificial Sequence
  Description of Artificial Sequence: Synthetic oligonucleotide
  Antisense strand to SEQ ID NO: 571175
uugcuccagcucaucauuu

SEQ ID NO: 571177 - RNA, 19 nt, Artificial Sequence
  Description of Artificial Sequence: Synthetic oligonucleotide
  Sense strand starting at position 2753 of SEQ ID NO: 318549
guugguuugcugggacuga

SEQ ID NO: 571178 - RNA, 19 nt, Artificial Sequence
  Description of Artificial Sequence: Synthetic oligonucleotide
  Antisense strand to SEQ ID NO: 571177
ucagucccagcaaaccaac

SEQ ID NO: 571179 - RNA, 19 nt, Artificial Sequence
  Description of Artificial Sequence: Synthetic oligonucleotide
  Sense strand starting at position 2779 of SEQ ID NO: 318549
acacuagcggaucaguaua

SEQ ID NO: 571180 - RNA, 19 nt, Artificial Sequence
  Description of Artificial Sequence: Synthetic oligonucleotide
  Antisense strand to SEQ ID NO: 571179
uauacugauccgcuagugu

SEQ ID NO: 571181 - RNA, 19 nt, Artificial Sequence
  Description of Artificial Sequence: Synthetic oligonucleotide
  Sense strand starting at position 2781 of SEQ ID NO: 318549
acuagcggaucaguauaua

SEQ ID NO: 571182 - RNA, 19 nt, Artificial Sequence
  Description of Artificial Sequence: Synthetic oligonucleotide
  Antisense strand to SEQ ID NO: 571181
uauauacugauccgcuagu

SEQ ID NO: 571183 - RNA, 19 nt, Artificial Sequence
  Description of Artificial Sequence: Synthetic oligonucleotide
  Sense strand starting at position 2784 of SEQ ID NO: 318549
agcggaucaguauauacau

SEQ ID NO: 571184 - RNA, 19 nt, Artificial Sequence
  Description of Artificial Sequence: Synthetic oligonucleotide
  Antisense strand to SEQ ID NO: 571183
auguauauacugauccgcu

SEQ ID NO: 571185 - RNA, 19 nt, Artificial Sequence
  Description of Artificial Sequence: Synthetic oligonucleotide
  Sense strand starting at position 2857 of SEQ ID NO: 318549
acaucuguuuggcucacua

SEQ ID NO: 571186 - RNA, 19 nt, Artificial Sequence
  Description of Artificial Sequence: Synthetic oligonucleotide
  Antisense strand to SEQ ID NO: 571185
uagugagccaaacagaugu

SEQ ID NO: 571187 - RNA, 19 nt, Artificial Sequence
  Description of Artificial Sequence: Synthetic oligonucleotide
  Sense strand starting at position 2867 of SEQ ID NO: 318549
ggcucacuaucaguugaca

SEQ ID NO: 571188 - RNA, 19 nt, Artificial Sequence
  Description of Artificial Sequence: Synthetic oligonucleotide
  Antisense strand to SEQ ID NO: 571187
ugucaacugauagugagcc

SEQ ID NO: 571189 - RNA, 19 nt, Artificial Sequence
  Description of Artificial Sequence: Synthetic oligonucleotide
  Sense strand starting at position 2975 of SEQ ID NO: 318549
aagcauggacuuggguaaa

SEQ ID NO: 571190 - RNA, 19 nt, Artificial Sequence
  Description of Artificial Sequence: Synthetic oligonucleotide
  Antisense strand to SEQ ID NO: 571189
uuuacccaaguccaugcuu

SEQ ID NO: 571191 - RNA, 19 nt, Artificial Sequence
  Description of Artificial Sequence: Synthetic oligonucleotide
  Sense strand starting at position 3192 of SEQ ID NO: 318549
uacugugugcauuaugaag

SEQ ID NO: 571192 - RNA, 19 nt, Artificial Sequence
  Description of Artificial Sequence: Synthetic oligonucleotide
  Antisense strand to SEQ ID NO: 571191
cuucauaaugcacacagua

SEQ ID NO: 571193 - RNA, 19 nt, Artificial Sequence
  Description of Artificial Sequence: Synthetic oligonucleotide
  Sense strand starting at position 3246 of SEQ ID NO: 318549
ccaacugucugggaagaca

SEQ ID NO: 571194 - RNA, 19 nt, Artificial Sequence
  Description of Artificial Sequence: Synthetic oligonucleotide
  Antisense strand to SEQ ID NO: 571193
ugucuucccagacaguugg

SEQ ID NO: 571195 - RNA, 19 nt, Artificial Sequence
  Description of Artificial Sequence: Synthetic oligonucleotide
  Sense strand starting at position 3257 of SEQ ID NO: 318549
ggaagacauguuugugcau

SEQ ID NO: 571196 - RNA, 19 nt, Artificial Sequence
  Description of Artificial Sequence: Synthetic oligonucleotide
  Antisense strand to SEQ ID NO: 571195
augcacaaacaugucuucc

SEQ ID NO: 571197 - RNA, 19 nt, Artificial Sequence
  Description of Artificial Sequence: Synthetic oligonucleotide
  Sense strand starting at position 3353 of SEQ ID NO: 318549
gugggucauggcugggaaa

SEQ ID NO: 571198 - RNA, 19 nt, Artificial Sequence
  Description of Artificial Sequence: Synthetic oligonucleotide
  Antisense strand to SEQ ID NO: 571197
uuucccagccaugacccac

SEQ ID NO: 571199 - RNA, 19 nt, Artificial Sequence
  Description of Artificial Sequence: Synthetic oligonucleotide
  Sense strand starting at position 3430 of SEQ ID NO: 318549
ucacccaaggcuugucaau

SEQ ID NO: 571200 - RNA, 19 nt, Artificial Sequence
  Description of Artificial Sequence: Synthetic oligonucleotide
  Antisense strand to SEQ ID NO: 571199
auugacaagccuuggguga

SEQ ID NO: 571201 - RNA, 19 nt, Artificial Sequence
  Description of Artificial Sequence: Synthetic oligonucleotide
  Sense strand starting at position 3680 of SEQ ID NO: 318549
uuagcuucccuugagcaga

SEQ ID NO: 571202 - RNA, 19 nt, Artificial Sequence
  Description of Artificial Sequence: Synthetic oligonucleotide
  Antisense strand to SEQ ID NO: 571201
ucugcucaagggaagcuaa

SEQ ID NO: 571203 - RNA, 19 nt, Artificial Sequence
  Description of Artificial Sequence: Synthetic oligonucleotide
  Sense strand starting at position 3841 of SEQ ID NO: 318549
acaggaucaugucuauaac

SEQ ID NO: 571204 - RNA, 19 nt, Artificial Sequence
  Description of Artificial Sequence: Synthetic oligonucleotide
  Antisense strand to SEQ ID NO: 571203
guuauagacaugauccugu

SEQ ID NO: 571205 - RNA, 19 nt, Artificial Sequence
  Description of Artificial Sequence: Synthetic oligonucleotide
  Sense strand starting at position 3851 of SEQ ID NO: 318549
gucuauaaccuaggagucu

SEQ ID NO: 571206 - RNA, 19 nt, Artificial Sequence
  Description of Artificial Sequence: Synthetic oligonucleotide
  Antisense strand to SEQ ID NO: 571205
agacuccuagguuauagac

SEQ ID NO: 571207 - RNA, 19 nt, Artificial Sequence
  Description of Artificial Sequence: Synthetic oligonucleotide
  Sense strand starting at position 382 of SEQ ID NO: 318550
cagggugagcuuuaggacu

SEQ ID NO: 571208 - RNA, 19 nt, Artificial Sequence
  Description of Artificial Sequence: Synthetic oligonucleotide
  Antisense strand to SEQ ID NO: 571207
aguccuaaagcucacccug

SEQ ID NO: 571209 - RNA, 19 nt, Artificial Sequence
  Description of Artificial Sequence: Synthetic oligonucleotide
  Sense strand starting at position 450 of SEQ ID NO: 318550
ggcccuucucaaggaaauc

SEQ ID NO: 571210 - RNA, 19 nt, Artificial Sequence
  Description of Artificial Sequence: Synthetic oligonucleotide
  Antisense strand to SEQ ID NO: 571209
gauuuccuugagaagggcc

SEQ ID NO: 571211 - RNA, 19 nt, Artificial Sequence
  Description of Artificial Sequence: Synthetic oligonucleotide
  Sense strand starting at position 644 of SEQ ID NO: 318550
gagcccuuaugagacagaa

SEQ ID NO: 571212 - RNA, 19 nt, Artificial Sequence
  Description of Artificial Sequence: Synthetic oligonucleotide
  Antisense strand to SEQ ID NO: 571211
uucugucucauaagggcuc

SEQ ID NO: 571213 - RNA, 19 nt, Artificial Sequence
  Description of Artificial Sequence: Synthetic oligonucleotide
  Sense strand starting at position 692 of SEQ ID NO: 318550
gggagacccuggcauaaau

SEQ ID NO: 571214 - RNA, 19 nt, Artificial Sequence
  Description of Artificial Sequence: Synthetic oligonucleotide
  Antisense strand to SEQ ID NO: 571213
auuuaugccagggucuccc

SEQ ID NO: 571215 - RNA, 19 nt, Artificial Sequence
  Description of Artificial Sequence: Synthetic oligonucleotide
  Sense strand starting at position 888 of SEQ ID NO: 318550
guccaaagcugcucuggaa

SEQ ID NO: 571216 - RNA, 19 nt, Artificial Sequence
  Description of Artificial Sequence: Synthetic oligonucleotide
  Antisense strand to SEQ ID NO: 571215
uuccagagcagcuuuggac

SEQ ID NO: 571217 - RNA, 19 nt, Artificial Sequence
  Description of Artificial Sequence: Synthetic oligonucleotide
  Sense strand starting at position 1118 of SEQ ID NO: 318550
gguucauuggcgccgguua

SEQ ID NO: 571218 - RNA, 19 nt, Artificial Sequence
  Description of Artificial Sequence: Synthetic oligonucleotide
  Antisense strand to SEQ ID NO: 571217
uaaccggcgccaaugaacc

SEQ ID NO: 571219 - RNA, 19 nt, Artificial Sequence
  Description of Artificial Sequence: Synthetic oligonucleotide
  Sense strand starting at position 1119 of SEQ ID NO: 318550
guucauuggcgccgguuaa

SEQ ID NO: 571220 - RNA, 19 nt, Artificial Sequence
  Description of Artificial Sequence: Synthetic oligonucleotide
  Antisense strand to SEQ ID NO: 571219
uuaaccggcgccaaugaac

SEQ ID NO: 571221 - RNA, 19 nt, Artificial Sequence
  Description of Artificial Sequence: Synthetic oligonucleotide
  Sense strand starting at position 1222 of SEQ ID NO: 318550
ggaggauucugcuggguuu

SEQ ID NO: 571222 - RNA, 19 nt, Artificial Sequence
  Description of Artificial Sequence: Synthetic oligonucleotide
  Antisense strand to SEQ ID NO: 571221
aaacccagcagaauccucc

SEQ ID NO: 571223 - RNA, 19 nt, Artificial Sequence
  Description of Artificial Sequence: Synthetic oligonucleotide
  Sense strand starting at position 1225 of SEQ ID NO: 318550
ggauucugcuggguuucau

SEQ ID NO: 571224 - RNA, 19 nt, Artificial Sequence
  Description of Artificial Sequence: Synthetic oligonucleotide
  Antisense strand to SEQ ID NO: 571223
augaaacccagcagaaucc

SEQ ID NO: 571225 - RNA, 19 nt, Artificial Sequence
  Description of Artificial Sequence: Synthetic oligonucleotide
  Sense strand starting at position 1235 of SEQ ID NO: 318550
ggguuucaugcggguagca

SEQ ID NO: 571226 - RNA, 19 nt, Artificial Sequence
  Description of Artificial Sequence: Synthetic oligonucleotide
  Antisense strand to SEQ ID NO: 571225
ugcuacccgcaugaaaccc

SEQ ID NO: 571227 - RNA, 19 nt, Artificial Sequence
  Description of Artificial Sequence: Synthetic oligonucleotide
  Sense strand starting at position 2817 of SEQ ID NO: 318550
uggacuucuuucgcucaca

SEQ ID NO: 571228 - RNA, 19 nt, Artificial Sequence
  Description of Artificial Sequence: Synthetic oligonucleotide
  Antisense strand to SEQ ID NO: 571227
ugugagcgaaagaagucca

SEQ ID NO: 571229 - RNA, 19 nt, Artificial Sequence
  Description of Artificial Sequence: Synthetic oligonucleotide
  Sense strand starting at position 2818 of SEQ ID NO: 318550
ggacuucuuucgcucacaa

SEQ ID NO: 571230 - RNA, 19 nt, Artificial Sequence
  Description of Artificial Sequence: Synthetic oligonucleotide
  Antisense strand to SEQ ID NO: 571229
uugugagcgaaagaagucc

SEQ ID NO: 571231 - RNA, 19 nt, Artificial Sequence
  Description of Artificial Sequence: Synthetic oligonucleotide
  Sense strand starting at position 3237 of SEQ ID NO: 318550
cucgguuggcuccgggaau

SEQ ID NO: 571232 - RNA, 19 nt, Artificial Sequence
  Description of Artificial Sequence: Synthetic oligonucleotide
  Antisense strand to SEQ ID NO: 571231
auucccggagccaaccgag

SEQ ID NO: 571233 - RNA, 19 nt, Artificial Sequence
  Description of Artificial Sequence: Synthetic oligonucleotide
  Sense strand starting at position 3317 of SEQ ID NO: 318550
gggaaugucugcuccacga

SEQ ID NO: 571234 - RNA, 19 nt, Artificial Sequence
  Description of Artificial Sequence: Synthetic oligonucleotide
  Antisense strand to SEQ ID NO: 571233
ucguggagcagacauuccc

SEQ ID NO: 571235 - RNA, 19 nt, Artificial Sequence
  Description of Artificial Sequence: Synthetic oligonucleotide
  Sense strand starting at position 3321 of SEQ ID NO: 318550
augucugcuccacgagcaa

SEQ ID NO: 571236 - RNA, 19 nt, Artificial Sequence
  Description of Artificial Sequence: Synthetic oligonucleotide
  Antisense strand to SEQ ID NO: 571235
uugcucguggagcagacau

SEQ ID NO: 571237 - RNA, 19 nt, Artificial Sequence
  Description of Artificial Sequence: Synthetic oligonucleotide
  Sense strand starting at position 3349 of SEQ ID NO: 318550
gcauacaucccaggagcuu

SEQ ID NO: 571238 - RNA, 19 nt, Artificial Sequence
  Description of Artificial Sequence: Synthetic oligonucleotide
  Antisense strand to SEQ ID NO: 571237
aagcuccugggauguaugc

SEQ ID NO: 571239 - RNA, 19 nt, Artificial Sequence
  Description of Artificial Sequence: Synthetic oligonucleotide
  Sense strand starting at position 3487 of SEQ ID NO: 318550
ggaggauggaugugucuuc

SEQ ID NO: 571240 - RNA, 19 nt, Artificial Sequence
  Description of Artificial Sequence: Synthetic oligonucleotide
  Antisense strand to SEQ ID NO: 571239
gaagacacauccauccucc

SEQ ID NO: 571241 - RNA, 19 nt, Artificial Sequence
  Description of Artificial Sequence: Synthetic oligonucleotide
  Sense strand starting at position 3494 of SEQ ID NO: 318550
ggaugugucuucugacauc

SEQ ID NO: 571242 - RNA, 19 nt, Artificial Sequence
  Description of Artificial Sequence: Synthetic oligonucleotide
  Antisense strand to SEQ ID NO: 571241
gaugucagaagacacaucc

SEQ ID NO: 571243 - RNA, 19 nt, Artificial Sequence
  Description of Artificial Sequence: Synthetic oligonucleotide
  Sense strand starting at position 3497 of SEQ ID NO: 318550
ugugucuucugacaucuga

SEQ ID NO: 571244 - RNA, 19 nt, Artificial Sequence
  Description of Artificial Sequence: Synthetic oligonucleotide
  Antisense strand to SEQ ID NO: 571243
ucagaugucagaagacaca

SEQ ID NO: 571245 - RNA, 19 nt, Artificial Sequence
  Description of Artificial Sequence: Synthetic oligonucleotide
  Sense strand starting at position 3834 of SEQ ID NO: 318550
agccucuugucccagagaa

SEQ ID NO: 571246 - RNA, 19 nt, Artificial Sequence
  Description of Artificial Sequence: Synthetic oligonucleotide
  Antisense strand to SEQ ID NO: 571245
uucucugggacaagaggcu

SEQ ID NO: 571247 - RNA, 19 nt, Artificial Sequence
  Description of Artificial Sequence: Synthetic oligonucleotide
  Sense strand starting at position 3939 of SEQ ID NO: 318550
cgacguccucucugaagau

SEQ ID NO: 571248 - RNA, 19 nt, Artificial Sequence
  Description of Artificial Sequence: Synthetic oligonucleotide
  Antisense strand to SEQ ID NO: 571247
aucuucagagaggacgucg

SEQ ID NO: 571249 - RNA, 19 nt, Artificial Sequence
  Description of Artificial Sequence: Synthetic oligonucleotide
  Sense strand starting at position 3951 of SEQ ID NO: 318550
ugaagauguugcccuugca

SEQ ID NO: 571250 - RNA, 19 nt, Artificial Sequence
  Description of Artificial Sequence: Synthetic oligonucleotide
  Antisense strand to SEQ ID NO: 571249
ugcaagggcaacaucuuca

SEQ ID NO: 571251 - RNA, 19 nt, Artificial Sequence
  Description of Artificial Sequence: Synthetic oligonucleotide
  Sense strand starting at position 3980 of SEQ ID NO: 318550
aggccaaauuuccaccaga

SEQ ID NO: 571252 - RNA, 19 nt, Artificial Sequence
  Description of Artificial Sequence: Synthetic oligonucleotide
  Antisense strand to SEQ ID NO: 571251
ucugguggaaauuuggccu

SEQ ID NO: 571253 - RNA, 19 nt, Artificial Sequence
  Description of Artificial Sequence: Synthetic oligonucleotide
  Sense strand starting at position 10 of SEQ ID NO: 318551
uuuacuuguguccaacuuu

SEQ ID NO: 571254 - RNA, 19 nt, Artificial Sequence
  Description of Artificial Sequence: Synthetic oligonucleotide
  Antisense strand to SEQ ID NO: 571253
aaaguuggacacaaguaaa

SEQ ID NO: 571255 - RNA, 19 nt, Artificial Sequence
  Description of Artificial Sequence: Synthetic oligonucleotide
  Sense strand starting at position 41 of SEQ ID NO: 318551
uuccuuugacacugagaug

SEQ ID NO: 571256 - RNA, 19 nt, Artificial Sequence
  Description of Artificial Sequence: Synthetic oligonucleotide
  Antisense strand to SEQ ID NO: 571255
caucucagugucaaaggaa

SEQ ID NO: 571257 - RNA, 19 nt, Artificial Sequence
  Description of Artificial Sequence: Synthetic oligonucleotide
  Sense strand starting at position 202 of SEQ ID NO: 318551
auaaaugguuacuuagcau

SEQ ID NO: 571258 - RNA, 19 nt, Artificial Sequence
  Description of Artificial Sequence: Synthetic oligonucleotide
  Antisense strand to SEQ ID NO: 571257
augcuaaguaaccauuuau

SEQ ID NO: 571259 - RNA, 19 nt, Artificial Sequence
  Description of Artificial Sequence: Synthetic oligonucleotide
  Sense strand starting at position 280 of SEQ ID NO: 318551
auacuuaggcuuugacuua

SEQ ID NO: 571260 - RNA, 19 nt, Artificial Sequence
  Description of Artificial Sequence: Synthetic oligonucleotide
  Antisense strand to SEQ ID NO: 571259
uaagucaaagccuaaguau

SEQ ID NO: 571261 - RNA, 19 nt, Artificial Sequence
  Description of Artificial Sequence: Synthetic oligonucleotide
  Sense strand starting at position 357 of SEQ ID NO: 318551
gguuguauuucuuccaauu

SEQ ID NO: 571262 - RNA, 19 nt, Artificial Sequence
  Description of Artificial Sequence: Synthetic oligonucleotide
  Antisense strand to SEQ ID NO: 571261
aauuggaagaaauacaacc

SEQ ID NO: 571263 - RNA, 19 nt, Artificial Sequence
  Description of Artificial Sequence: Synthetic oligonucleotide
  Sense strand starting at position 400 of SEQ ID NO: 318551
auauucucggacuaugacu

SEQ ID NO: 571264 - RNA, 19 nt, Artificial Sequence
  Description of Artificial Sequence: Synthetic oligonucleotide
  Antisense strand to SEQ ID NO: 571263
agucauaguccgagaauau

SEQ ID NO: 571265 - RNA, 19 nt, Artificial Sequence
  Description of Artificial Sequence: Synthetic oligonucleotide
  Sense strand starting at position 848 of SEQ ID NO: 318551
acaugaaugucuguaucua

SEQ ID NO: 571266 - RNA, 19 nt, Artificial Sequence
  Description of Artificial Sequence: Synthetic oligonucleotide
  Antisense strand to SEQ ID NO: 571265
uagauacagacauucaugu

SEQ ID NO: 571267 - RNA, 19 nt, Artificial Sequence
  Description of Artificial Sequence: Synthetic oligonucleotide
  Sense strand starting at position 980 of SEQ ID NO: 318551
uuuaaagagugccuaggua

SEQ ID NO: 571268 - RNA, 19 nt, Artificial Sequence
  Description of Artificial Sequence: Synthetic oligonucleotide
  Antisense strand to SEQ ID NO: 571267
uaccuaggcacucuuuaaa

SEQ ID NO: 571269 - RNA, 19 nt, Artificial Sequence
  Description of Artificial Sequence: Synthetic oligonucleotide
  Sense strand starting at position 984 of SEQ ID NO: 318551
aagagugccuagguaaauu

SEQ ID NO: 571270 - RNA, 19 nt, Artificial Sequence
  Description of Artificial Sequence: Synthetic oligonucleotide
  Antisense strand to SEQ ID NO: 571269
aauuuaccuaggcacucuu

SEQ ID NO: 571271 - RNA, 19 nt, Artificial Sequence
  Description of Artificial Sequence: Synthetic oligonucleotide
  Sense strand starting at position 1034 of SEQ ID NO: 318551
ggguauaccuuucccaaag

SEQ ID NO: 571272 - RNA, 19 nt, Artificial Sequence
  Description of Artificial Sequence: Synthetic oligonucleotide
  Antisense strand to SEQ ID NO: 571271
cuuugggaaagguauaccc

SEQ ID NO: 571273 - RNA, 19 nt, Artificial Sequence
  Description of Artificial Sequence: Synthetic oligonucleotide
  Sense strand starting at position 1049 of SEQ ID NO: 318551
aaaggaagguucuuguaau

SEQ ID NO: 571274 - RNA, 19 nt, Artificial Sequence
  Description of Artificial Sequence: Synthetic oligonucleotide
  Antisense strand to SEQ ID NO: 571273
auuacaagaaccuuccuuu

SEQ ID NO: 571275 - RNA, 19 nt, Artificial Sequence
  Description of Artificial Sequence: Synthetic oligonucleotide
  Sense strand starting at position 1060 of SEQ ID NO: 318551
cuuguaaucuucccuguaa

SEQ ID NO: 571276 - RNA, 19 nt, Artificial Sequence
  Description of Artificial Sequence: Synthetic oligonucleotide
  Antisense strand to SEQ ID NO: 571275
uuacagggaagauuacaag

SEQ ID NO: 571277 - RNA, 19 nt, Artificial Sequence
  Description of Artificial Sequence: Synthetic oligonucleotide
  Sense strand starting at position 1061 of SEQ ID NO: 318551
uuguaaucuucccuguaag

SEQ ID NO: 571278 - RNA, 19 nt, Artificial Sequence
  Description of Artificial Sequence: Synthetic oligonucleotide
  Antisense strand to SEQ ID NO: 571277
cuuacagggaagauuacaa

SEQ ID NO: 571279 - RNA, 19 nt, Artificial Sequence
  Description of Artificial Sequence: Synthetic oligonucleotide
  Sense strand starting at position 1078 of SEQ ID NO: 318551
agucuugaauccgcuaaac

SEQ ID NO: 571280 - RNA, 19 nt, Artificial Sequence
  Description of Artificial Sequence: Synthetic oligonucleotide
  Antisense strand to SEQ ID NO: 571279
guuuagcggauucaagacu

SEQ ID NO: 571281 - RNA, 19 nt, Artificial Sequence
  Description of Artificial Sequence: Synthetic oligonucleotide
  Sense strand starting at position 1080 of SEQ ID NO: 318551
ucuugaauccgcuaaacug

SEQ ID NO: 571282 - RNA, 19 nt, Artificial Sequence
  Description of Artificial Sequence: Synthetic oligonucleotide
  Antisense strand to SEQ ID NO: 571281
caguuuagcggauucaaga

SEQ ID NO: 571283 - RNA, 19 nt, Artificial Sequence
  Description of Artificial Sequence: Synthetic oligonucleotide
  Sense strand starting at position 1134 of SEQ ID NO: 318551
aaguuugaacuguagugau

SEQ ID NO: 571284 - RNA, 19 nt, Artificial Sequence
  Description of Artificial Sequence: Synthetic oligonucleotide
  Antisense strand to SEQ ID NO: 571283
aucacuacaguucaaacuu

SEQ ID NO: 571285 - RNA, 19 nt, Artificial Sequence
  Description of Artificial Sequence: Synthetic oligonucleotide
  Sense strand starting at position 1193 of SEQ ID NO: 318551
uagguugaccuuggugaga

SEQ ID NO: 571286 - RNA, 19 nt, Artificial Sequence
  Description of Artificial Sequence: Synthetic oligonucleotide
  Antisense strand to SEQ ID NO: 571285
ucucaccaaggucaaccua

SEQ ID NO: 571287 - RNA, 19 nt, Artificial Sequence
  Description of Artificial Sequence: Synthetic oligonucleotide
  Sense strand starting at position 1389 of SEQ ID NO: 318551
gcagaaagccuccaggugu

SEQ ID NO: 571288 - RNA, 19 nt, Artificial Sequence
  Description of Artificial Sequence: Synthetic oligonucleotide
  Antisense strand to SEQ ID NO: 571287
acaccuggaggcuuucugc

SEQ ID NO: 571289 - RNA, 19 nt, Artificial Sequence
  Description of Artificial Sequence: Synthetic oligonucleotide
  Sense strand starting at position 1569 of SEQ ID NO: 318551
gcuccuguggcugagaauu

SEQ ID NO: 571290 - RNA, 19 nt, Artificial Sequence
  Description of Artificial Sequence: Synthetic oligonucleotide
  Antisense strand to SEQ ID NO: 571289
aauucucagccacaggagc

SEQ ID NO: 571291 - RNA, 19 nt, Artificial Sequence
  Description of Artificial Sequence: Synthetic oligonucleotide
  Sense strand starting at position 1577 of SEQ ID NO: 318551
ggcugagaauucucucuuu

SEQ ID NO: 571292 - RNA, 19 nt, Artificial Sequence
  Description of Artificial Sequence: Synthetic oligonucleotide
  Antisense strand to SEQ ID NO: 571291
aaagagagaauucucagcc

SEQ ID NO: 571293 - RNA, 19 nt, Artificial Sequence
  Description of Artificial Sequence: Synthetic oligonucleotide
  Sense strand starting at position 2161 of SEQ ID NO: 318551
gggagucucuggccauaag

SEQ ID NO: 571294 - RNA, 19 nt, Artificial Sequence
  Description of Artificial Sequence: Synthetic oligonucleotide
  Antisense strand to SEQ ID NO: 571293
cuuauggccagagacuccc

SEQ ID NO: 571295 - RNA, 19 nt, Artificial Sequence
  Description of Artificial Sequence: Synthetic oligonucleotide
  Sense strand starting at position 2214 of SEQ ID NO: 318551
guugcaucaggagauuguu

SEQ ID NO: 571296 - RNA, 19 nt, Artificial Sequence
  Description of Artificial Sequence: Synthetic oligonucleotide
  Antisense strand to SEQ ID NO: 571295
aacaaucuccugaugcaac

SEQ ID NO: 571297 - RNA, 19 nt, Artificial Sequence
  Description of Artificial Sequence: Synthetic oligonucleotide
  Sense strand starting at position 2297 of SEQ ID NO: 318551
gaaucaagacgucagaggu

SEQ ID NO: 571298 - RNA, 19 nt, Artificial Sequence
  Description of Artificial Sequence: Synthetic oligonucleotide
  Antisense strand to SEQ ID NO: 571297
accucugacgucuugauuc

SEQ ID NO: 571299 - RNA, 19 nt, Artificial Sequence
  Description of Artificial Sequence: Synthetic oligonucleotide
  Sense strand starting at position 2303 of SEQ ID NO: 318551
agacgucagagguauacuu

SEQ ID NO: 571300 - RNA, 19 nt, Artificial Sequence
  Description of Artificial Sequence: Synthetic oligonucleotide
  Antisense strand to SEQ ID NO: 571299
aaguauaccucugacgucu

SEQ ID NO: 571301 - RNA, 19 nt, Artificial Sequence
  Description of Artificial Sequence: Synthetic oligonucleotide
  Sense strand starting at position 2340 of SEQ ID NO: 318551
auaagacucuugccuguca

SEQ ID NO: 571302 - RNA, 19 nt, Artificial Sequence
  Description of Artificial Sequence: Synthetic oligonucleotide
  Antisense strand to SEQ ID NO: 571301
ugacaggcaagagucuuau

SEQ ID NO: 571303 - RNA, 19 nt, Artificial Sequence
  Description of Artificial Sequence: Synthetic oligonucleotide
  Sense strand starting at position 2571 of SEQ ID NO: 318551
ggguaugcccuauguaaag

SEQ ID NO: 571304 - RNA, 19 nt, Artificial Sequence
  Description of Artificial Sequence: Synthetic oligonucleotide
  Antisense strand to SEQ ID NO: 571303
cuuuacauagggcauaccc

SEQ ID NO: 571305 - RNA, 19 nt, Artificial Sequence
  Description of Artificial Sequence: Synthetic oligonucleotide
  Sense strand starting at position 2668 of SEQ ID NO: 318551
gugaauaggccuuauguuu

SEQ ID NO: 571306 - RNA, 19 nt, Artificial Sequence
  Description of Artificial Sequence: Synthetic oligonucleotide
  Antisense strand to SEQ ID NO: 571305
aaacauaaggccuauucac

SEQ ID NO: 571307 - RNA, 19 nt, Artificial Sequence
  Description of Artificial Sequence: Synthetic oligonucleotide
  Sense strand starting at position 2840 of SEQ ID NO: 318551
cuguauauugcauauguaa

SEQ ID NO: 571308 - RNA, 19 nt, Artificial Sequence
  Description of Artificial Sequence: Synthetic oligonucleotide
  Antisense strand to SEQ ID NO: 571307
uuacauaugcaauauacag

SEQ ID NO: 571309 - RNA, 19 nt, Artificial Sequence
  Description of Artificial Sequence: Synthetic oligonucleotide
  Sense strand starting at position 3116 of SEQ ID NO: 318551
gguacagugaaccgagauu

SEQ ID NO: 571310 - RNA, 19 nt, Artificial Sequence
  Description of Artificial Sequence: Synthetic oligonucleotide
  Antisense strand to SEQ ID NO: 571309
aaucucgguucacuguacc

SEQ ID NO: 571311 - RNA, 19 nt, Artificial Sequence
  Description of Artificial Sequence: Synthetic oligonucleotide
  Sense strand starting at position 3201 of SEQ ID NO: 318551
auaauacaugucuaacugu

SEQ ID NO: 571312 - RNA, 19 nt, Artificial Sequence
  Description of Artificial Sequence: Synthetic oligonucleotide
  Antisense strand to SEQ ID NO: 571311
acaguuagacauguauuau

SEQ ID NO: 571313 - RNA, 19 nt, Artificial Sequence
  Description of Artificial Sequence: Synthetic oligonucleotide
  Sense strand starting at position 3207 of SEQ ID NO: 318551
caugucuaacuguggaaua

SEQ ID NO: 571314 - RNA, 19 nt, Artificial Sequence
  Description of Artificial Sequence: Synthetic oligonucleotide
  Antisense strand to SEQ ID NO: 571313
uauuccacaguuagacaug

SEQ ID NO: 571315 - RNA, 19 nt, Artificial Sequence
  Description of Artificial Sequence: Synthetic oligonucleotide
  Sense strand starting at position 3260 of SEQ ID NO: 318551
ugugucaugguagguacaa

SEQ ID NO: 571316 - RNA, 19 nt, Artificial Sequence
  Description of Artificial Sequence: Synthetic oligonucleotide
  Antisense strand to SEQ ID NO: 571315
uuguaccuaccaugacaca

SEQ ID NO: 571317 - RNA, 19 nt, Artificial Sequence
  Description of Artificial Sequence: Synthetic oligonucleotide
  Sense strand starting at position 3261 of SEQ ID NO: 318551
gugucaugguagguacaau

SEQ ID NO: 571318 - RNA, 19 nt, Artificial Sequence
  Description of Artificial Sequence: Synthetic oligonucleotide
  Antisense strand to SEQ ID NO: 571317
auuguaccuaccaugacac

SEQ ID NO: 571319 - RNA, 19 nt, Artificial Sequence
  Description of Artificial Sequence: Synthetic oligonucleotide
  Sense strand starting at position 3262 of SEQ ID NO: 318551
ugucaugguagguacaauu

SEQ ID NO: 571320 - RNA, 19 nt, Artificial Sequence
  Description of Artificial Sequence: Synthetic oligonucleotide
  Antisense strand to SEQ ID NO: 571319
aauuguaccuaccaugaca

SEQ ID NO: 571321 - RNA, 19 nt, Artificial Sequence
  Description of Artificial Sequence: Synthetic oligonucleotide
  Sense strand starting at position 3506 of SEQ ID NO: 318551
uguguuuacuggguugaga

SEQ ID NO: 571322 - RNA, 19 nt, Artificial Sequence
  Description of Artificial Sequence: Synthetic oligonucleotide
  Antisense strand to SEQ ID NO: 571321
ucucaacccaguaaacaca

SEQ ID NO: 571323 - RNA, 19 nt, Artificial Sequence
  Description of Artificial Sequence: Synthetic oligonucleotide
  Sense strand starting at position 3508 of SEQ ID NO: 318551
uguuuacuggguugagaga

SEQ ID NO: 571324 - RNA, 19 nt, Artificial Sequence
  Description of Artificial Sequence: Synthetic oligonucleotide
  Antisense strand to SEQ ID NO: 571323
ucucucaacccaguaaaca

SEQ ID NO: 571325 - RNA, 19 nt, Artificial Sequence
  Description of Artificial Sequence: Synthetic oligonucleotide
  Sense strand starting at position 3537 of SEQ ID NO: 318551
auauguaucuuacuuugga

SEQ ID NO: 571326 - RNA, 19 nt, Artificial Sequence
  Description of Artificial Sequence: Synthetic oligonucleotide
  Antisense strand to SEQ ID NO: 571325
uccaaaguaagauacauau

SEQ ID NO: 571327 - RNA, 19 nt, Artificial Sequence
  Description of Artificial Sequence: Synthetic oligonucleotide
  Sense strand starting at position 3570 of SEQ ID NO: 318551
guuaccuguuuccucacaa

SEQ ID NO: 571328 - RNA, 19 nt, Artificial Sequence
  Description of Artificial Sequence: Synthetic oligonucleotide
  Antisense strand to SEQ ID NO: 571327
uugugaggaaacagguaac

SEQ ID NO: 571329 - RNA, 19 nt, Artificial Sequence
  Description of Artificial Sequence: Synthetic oligonucleotide
  Sense strand starting at position 3822 of SEQ ID NO: 318551
ugagguugcaaugaguacu

SEQ ID NO: 571330 - RNA, 19 nt, Artificial Sequence
  Description of Artificial Sequence: Synthetic oligonucleotide
  Antisense strand to SEQ ID NO: 571329
aguacucauugcaaccuca

SEQ ID NO: 571331 - RNA, 19 nt, Artificial Sequence
  Description of Artificial Sequence: Synthetic oligonucleotide
  Sense strand starting at position 3830 of SEQ ID NO: 318551
caaugaguacuccagcugu

SEQ ID NO: 571332 - RNA, 19 nt, Artificial Sequence
  Description of Artificial Sequence: Synthetic oligonucleotide
  Antisense strand to SEQ ID NO: 571331
acagcuggaguacucauug

SEQ ID NO: 571333 - RNA, 19 nt, Artificial Sequence
  Description of Artificial Sequence: Synthetic oligonucleotide
  Sense strand starting at position 74 of SEQ ID NO: 318552
agagaacagguuugucaaa

SEQ ID NO: 571334 - RNA, 19 nt, Artificial Sequence
  Description of Artificial Sequence: Synthetic oligonucleotide
  Antisense strand to SEQ ID NO: 571333
uuugacaaaccuguucucu

SEQ ID NO: 571335 - RNA, 19 nt, Artificial Sequence
  Description of Artificial Sequence: Synthetic oligonucleotide
  Sense strand starting at position 75 of SEQ ID NO: 318552
gagaacagguuugucaaau

SEQ ID NO: 571336 - RNA, 19 nt, Artificial Sequence
  Description of Artificial Sequence: Synthetic oligonucleotide
  Antisense strand to SEQ ID NO: 571335
auuugacaaaccuguucuc

SEQ ID NO: 571337 - RNA, 19 nt, Artificial Sequence
  Description of Artificial Sequence: Synthetic oligonucleotide
  Sense strand starting at position 76 of SEQ ID NO: 318552
agaacagguuugucaaauu

SEQ ID NO: 571338 - RNA, 19 nt, Artificial Sequence
  Description of Artificial Sequence: Synthetic oligonucleotide
  Antisense strand to SEQ ID NO: 571337
aauuugacaaaccuguucu

SEQ ID NO: 571339 - RNA, 19 nt, Artificial Sequence
  Description of Artificial Sequence: Synthetic oligonucleotide
  Sense strand starting at position 146 of SEQ ID NO: 318552
aggugagagcuguggucaa

SEQ ID NO: 571340 - RNA, 19 nt, Artificial Sequence
  Description of Artificial Sequence: Synthetic oligonucleotide
  Antisense strand to SEQ ID NO: 571339
uugaccacagcucucaccu

SEQ ID NO: 571341 - RNA, 19 nt, Artificial Sequence
  Description of Artificial Sequence: Synthetic oligonucleotide
  Sense strand starting at position 169 of SEQ ID NO: 318552
agaggcaugccaggucuaa

SEQ ID NO: 571342 - RNA, 19 nt, Artificial Sequence
  Description of Artificial Sequence: Synthetic oligonucleotide
  Antisense strand to SEQ ID NO: 571341
uuagaccuggcaugccucu

SEQ ID NO: 571343 - RNA, 19 nt, Artificial Sequence
  Description of Artificial Sequence: Synthetic oligonucleotide
  Sense strand starting at position 239 of SEQ ID NO: 318552
aguuuagauucucuuguau

SEQ ID NO: 571344 - RNA, 19 nt, Artificial Sequence
  Description of Artificial Sequence: Synthetic oligonucleotide
  Antisense strand to SEQ ID NO: 571343
auacaagagaaucuaaacu

SEQ ID NO: 571345 - RNA, 19 nt, Artificial Sequence
  Description of Artificial Sequence: Synthetic oligonucleotide
  Sense strand starting at position 406 of SEQ ID NO: 318552
cagaguuggugaccaaaca

SEQ ID NO: 571346 - RNA, 19 nt, Artificial Sequence
  Description of Artificial Sequence: Synthetic oligonucleotide
  Antisense strand to SEQ ID NO: 571345
uguuuggucaccaacucug

SEQ ID NO: 571347 - RNA, 19 nt, Artificial Sequence
  Description of Artificial Sequence: Synthetic oligonucleotide
  Sense strand starting at position 980 of SEQ ID NO: 318552
agacaaguaaucuggguca

SEQ ID NO: 571348 - RNA, 19 nt, Artificial Sequence
  Description of Artificial Sequence: Synthetic oligonucleotide
  Antisense strand to SEQ ID NO: 571347
ugacccagauuacuugucu

SEQ ID NO: 571349 - RNA, 19 nt, Artificial Sequence
  Description of Artificial Sequence: Synthetic oligonucleotide
  Sense strand starting at position 982 of SEQ ID NO: 318552
acaaguaaucugggucaac

SEQ ID NO: 571350 - RNA, 19 nt, Artificial Sequence
  Description of Artificial Sequence: Synthetic oligonucleotide
  Antisense strand to SEQ ID NO: 571349
guugacccagauuacuugu

SEQ ID NO: 571351 - RNA, 19 nt, Artificial Sequence
  Description of Artificial Sequence: Synthetic oligonucleotide
  Sense strand starting at position 983 of SEQ ID NO: 318552
caaguaaucugggucaacu

SEQ ID NO: 571352 - RNA, 19 nt, Artificial Sequence
  Description of Artificial Sequence: Synthetic oligonucleotide
  Antisense strand to SEQ ID NO: 571351
aguugacccagauuacuug

SEQ ID NO: 571353 - RNA, 19 nt, Artificial Sequence
  Description of Artificial Sequence: Synthetic oligonucleotide
  Sense strand starting at position 1161 of SEQ ID NO: 318552
agagacugauuugagcaau

SEQ ID NO: 571354 - RNA, 19 nt, Artificial Sequence
  Description of Artificial Sequence: Synthetic oligonucleotide
  Antisense strand to SEQ ID NO: 571353
auugcucaaaucagucucu

SEQ ID NO: 571355 - RNA, 19 nt, Artificial Sequence
  Description of Artificial Sequence: Synthetic oligonucleotide
  Sense strand starting at position 1300 of SEQ ID NO: 318552
gcuaaacuuugauccgaca

SEQ ID NO: 571356 - RNA, 19 nt, Artificial Sequence
  Description of Artificial Sequence: Synthetic oligonucleotide
  Antisense strand to SEQ ID NO: 571355
ugucggaucaaaguuuagc

SEQ ID NO: 571357 - RNA, 19 nt, Artificial Sequence
  Description of Artificial Sequence: Synthetic oligonucleotide
  Sense strand starting at position 1314 of SEQ ID NO: 318552
cgacaacgccuugagaagu

SEQ ID NO: 571358 - RNA, 19 nt, Artificial Sequence
  Description of Artificial Sequence: Synthetic oligonucleotide
  Antisense strand to SEQ ID NO: 571357
acuucucaaggcguugucg

SEQ ID NO: 571359 - RNA, 19 nt, Artificial Sequence
  Description of Artificial Sequence: Synthetic oligonucleotide
  Sense strand starting at position 1461 of SEQ ID NO: 318552
ucaggcucaccuugacaua

SEQ ID NO: 571360 - RNA, 19 nt, Artificial Sequence
  Description of Artificial Sequence: Synthetic oligonucleotide
  Antisense strand to SEQ ID NO: 571359
uaugucaaggugagccuga

SEQ ID NO: 571361 - RNA, 19 nt, Artificial Sequence
  Description of Artificial Sequence: Synthetic oligonucleotide
  Sense strand starting at position 1501 of SEQ ID NO: 318552
ucaugaagcagcgaauguu

SEQ ID NO: 571362 - RNA, 19 nt, Artificial Sequence
  Description of Artificial Sequence: Synthetic oligonucleotide
  Antisense strand to SEQ ID NO: 571361
aacauucgcugcuucauga

SEQ ID NO: 571363 - RNA, 19 nt, Artificial Sequence
  Description of Artificial Sequence: Synthetic oligonucleotide
  Sense strand starting at position 2012 of SEQ ID NO: 318552
ggguugacgguugagaacu

SEQ ID NO: 571364 - RNA, 19 nt, Artificial Sequence
  Description of Artificial Sequence: Synthetic oligonucleotide
  Antisense strand to SEQ ID NO: 571363
aguucucaaccgucaaccc

SEQ ID NO: 571365 - RNA, 19 nt, Artificial Sequence
  Description of Artificial Sequence: Synthetic oligonucleotide
  Sense strand starting at position 2336 of SEQ ID NO: 318552
aucagaaaucaauguccga

SEQ ID NO: 571366 - RNA, 19 nt, Artificial Sequence
  Description of Artificial Sequence: Synthetic oligonucleotide
  Antisense strand to SEQ ID NO: 571365
ucggacauugauuucugau

SEQ ID NO: 571367 - RNA, 19 nt, Artificial Sequence
  Description of Artificial Sequence: Synthetic oligonucleotide
  Sense strand starting at position 2340 of SEQ ID NO: 318552
gaaaucaauguccgacuga

SEQ ID NO: 571368 - RNA, 19 nt, Artificial Sequence
  Description of Artificial Sequence: Synthetic oligonucleotide
  Antisense strand to SEQ ID NO: 571367
ucagucggacauugauuuc

SEQ ID NO: 571369 - RNA, 19 nt, Artificial Sequence
  Description of Artificial Sequence: Synthetic oligonucleotide
  Sense strand starting at position 2353 of SEQ ID NO: 318552
gacugaauguccuuaagug

SEQ ID NO: 571370 - RNA, 19 nt, Artificial Sequence
  Description of Artificial Sequence: Synthetic oligonucleotide
  Antisense strand to SEQ ID NO: 571369
cacuuaaggacauucaguc

SEQ ID NO: 571371 - RNA, 19 nt, Artificial Sequence
  Description of Artificial Sequence: Synthetic oligonucleotide
  Sense strand starting at position 2354 of SEQ ID NO: 318552
acugaauguccuuaaguga

SEQ ID NO: 571372 - RNA, 19 nt, Artificial Sequence
  Description of Artificial Sequence: Synthetic oligonucleotide
  Antisense strand to SEQ ID NO: 571371
ucacuuaaggacauucagu

SEQ ID NO: 571373 - RNA, 19 nt, Artificial Sequence
  Description of Artificial Sequence: Synthetic oligonucleotide
  Sense strand starting at position 2357 of SEQ ID NO: 318552
gaauguccuuaagugaagu

SEQ ID NO: 571374 - RNA, 19 nt, Artificial Sequence
  Description of Artificial Sequence: Synthetic oligonucleotide
  Antisense strand to SEQ ID NO: 571373
acuucacuuaaggacauuc

SEQ ID NO: 571375 - RNA, 19 nt, Artificial Sequence
  Description of Artificial Sequence: Synthetic oligonucleotide
  Sense strand starting at position 2510 of SEQ ID NO: 318552
gaaagaauguaagcgaaga

SEQ ID NO: 571376 - RNA, 19 nt, Artificial Sequence
  Description of Artificial Sequence: Synthetic oligonucleotide
  Antisense strand to SEQ ID NO: 571375
ucuucgcuuacauucuuuc

SEQ ID NO: 571377 - RNA, 19 nt, Artificial Sequence
  Description of Artificial Sequence: Synthetic oligonucleotide
  Sense strand starting at position 2512 of SEQ ID NO: 318552
aagaauguaagcgaagagu

SEQ ID NO: 571378 - RNA, 19 nt, Artificial Sequence
  Description of Artificial Sequence: Synthetic oligonucleotide
  Antisense strand to SEQ ID NO: 571377
acucuucgcuuacauucuu

SEQ ID NO: 571379 - RNA, 19 nt, Artificial Sequence
  Description of Artificial Sequence: Synthetic oligonucleotide
  Sense strand starting at position 2515 of SEQ ID NO: 318552
aauguaagcgaagaguagu

SEQ ID NO: 571380 - RNA, 19 nt, Artificial Sequence
  Description of Artificial Sequence: Synthetic oligonucleotide
  Antisense strand to SEQ ID NO: 571379
acuacucuucgcuuacauu

SEQ ID NO: 571381 - RNA, 19 nt, Artificial Sequence
  Description of Artificial Sequence: Synthetic oligonucleotide
  Sense strand starting at position 2523 of SEQ ID NO: 318552
cgaagaguaguaggauaug

SEQ ID NO: 571382 - RNA, 19 nt, Artificial Sequence
  Description of Artificial Sequence: Synthetic oligonucleotide
  Antisense strand to SEQ ID NO: 571381
cauauccuacuacucuucg

SEQ ID NO: 571383 - RNA, 19 nt, Artificial Sequence
  Description of Artificial Sequence: Synthetic oligonucleotide
  Sense strand starting at position 2535 of SEQ ID NO: 318552
ggauaugaaacguggcuuu

SEQ ID NO: 571384 - RNA, 19 nt, Artificial Sequence
  Description of Artificial Sequence: Synthetic oligonucleotide
  Antisense strand to SEQ ID NO: 571383
aaagccacguuucauaucc

SEQ ID NO: 571385 - RNA, 19 nt, Artificial Sequence
  Description of Artificial Sequence: Synthetic oligonucleotide
  Sense strand starting at position 2611 of SEQ ID NO: 318552
agcucuuuaggccauguau

SEQ ID NO: 571386 - RNA, 19 nt, Artificial Sequence
  Description of Artificial Sequence: Synthetic oligonucleotide
  Antisense strand to SEQ ID NO: 571385
auacauggccuaaagagcu

SEQ ID NO: 571387 - RNA, 19 nt, Artificial Sequence
  Description of Artificial Sequence: Synthetic oligonucleotide
  Sense strand starting at position 2637 of SEQ ID NO: 318552
gggugacuuuccaggagag

SEQ ID NO: 571388 - RNA, 19 nt, Artificial Sequence
  Description of Artificial Sequence: Synthetic oligonucleotide
  Antisense strand to SEQ ID NO: 571387
cucuccuggaaagucaccc

SEQ ID NO: 571389 - RNA, 19 nt, Artificial Sequence
  Description of Artificial Sequence: Synthetic oligonucleotide
  Sense strand starting at position 2638 of SEQ ID NO: 318552
ggugacuuuccaggagaga

SEQ ID NO: 571390 - RNA, 19 nt, Artificial Sequence
  Description of Artificial Sequence: Synthetic oligonucleotide
  Antisense strand to SEQ ID NO: 571389
ucucuccuggaaagucacc

SEQ ID NO: 571391 - RNA, 19 nt, Artificial Sequence
  Description of Artificial Sequence: Synthetic oligonucleotide
  Sense strand starting at position 2677 of SEQ ID NO: 318552
uggauuagacauuguguug

SEQ ID NO: 571392 - RNA, 19 nt, Artificial Sequence
  Description of Artificial Sequence: Synthetic oligonucleotide
  Antisense strand to SEQ ID NO: 571391
caacacaaugucuaaucca

SEQ ID NO: 571393 - RNA, 19 nt, Artificial Sequence
  Description of Artificial Sequence: Synthetic oligonucleotide
  Sense strand starting at position 3224 of SEQ ID NO: 318552
agcagucauaaaggaagau

SEQ ID NO: 571394 - RNA, 19 nt, Artificial Sequence
  Description of Artificial Sequence: Synthetic oligonucleotide
  Antisense strand to SEQ ID NO: 571393
aucuuccuuuaugacugcu

SEQ ID NO: 571395 - RNA, 19 nt, Artificial Sequence
  Description of Artificial Sequence: Synthetic oligonucleotide
  Sense strand starting at position 3285 of SEQ ID NO: 318552
agcuuaacaguuuagaaac

SEQ ID NO: 571396 - RNA, 19 nt, Artificial Sequence
  Description of Artificial Sequence: Synthetic oligonucleotide
  Antisense strand to SEQ ID NO: 571395
guuucuaaacuguuaagcu

SEQ ID NO: 571397 - RNA, 19 nt, Artificial Sequence
  Description of Artificial Sequence: Synthetic oligonucleotide
  Sense strand starting at position 3325 of SEQ ID NO: 318552
gggagucuauacccguuua

SEQ ID NO: 571398 - RNA, 19 nt, Artificial Sequence
  Description of Artificial Sequence: Synthetic oligonucleotide
  Antisense strand to SEQ ID NO: 571397
uaaacggguauagacuccc

SEQ ID NO: 571399 - RNA, 19 nt, Artificial Sequence
  Description of Artificial Sequence: Synthetic oligonucleotide
  Sense strand starting at position 3335 of SEQ ID NO: 318552
acccguuuaccagaucuuu

SEQ ID NO: 571400 - RNA, 19 nt, Artificial Sequence
  Description of Artificial Sequence: Synthetic oligonucleotide
  Antisense strand to SEQ ID NO: 571399
aaagaucugguaaacgggu

SEQ ID NO: 571401 - RNA, 19 nt, Artificial Sequence
  Description of Artificial Sequence: Synthetic oligonucleotide
  Sense strand starting at position 3343 of SEQ ID NO: 318552
accagaucuuuguuuaagg

SEQ ID NO: 571402 - RNA, 19 nt, Artificial Sequence
  Description of Artificial Sequence: Synthetic oligonucleotide
  Antisense strand to SEQ ID NO: 571401
ccuuaaacaaagaucuggu

SEQ ID NO: 571403 - RNA, 19 nt, Artificial Sequence
  Description of Artificial Sequence: Synthetic oligonucleotide
  Sense strand starting at position 3366 of SEQ ID NO: 318552
agauuuggucgugguagac

SEQ ID NO: 571404 - RNA, 19 nt, Artificial Sequence
  Description of Artificial Sequence: Synthetic oligonucleotide
  Antisense strand to SEQ ID NO: 571403
gucuaccacgaccaaaucu

SEQ ID NO: 571405 - RNA, 19 nt, Artificial Sequence
  Description of Artificial Sequence: Synthetic oligonucleotide
  Sense strand starting at position 3494 of SEQ ID NO: 318552
cccuccagucugugacaaa

SEQ ID NO: 571406 - RNA, 19 nt, Artificial Sequence
  Description of Artificial Sequence: Synthetic oligonucleotide
  Antisense strand to SEQ ID NO: 571405
uuugucacagacuggaggg

SEQ ID NO: 571407 - RNA, 19 nt, Artificial Sequence
  Description of Artificial Sequence: Synthetic oligonucleotide
  Sense strand starting at position 3501 of SEQ ID NO: 318552
gucugugacaaagguuauc

SEQ ID NO: 571408 - RNA, 19 nt, Artificial Sequence
  Description of Artificial Sequence: Synthetic oligonucleotide
  Antisense strand to SEQ ID NO: 571407
gauaaccuuugucacagac

SEQ ID NO: 571409 - RNA, 19 nt, Artificial Sequence
  Description of Artificial Sequence: Synthetic oligonucleotide
  Sense strand starting at position 3506 of SEQ ID NO: 318552
ugacaaagguuaucuguua

SEQ ID NO: 571410 - RNA, 19 nt, Artificial Sequence
  Description of Artificial Sequence: Synthetic oligonucleotide
  Antisense strand to SEQ ID NO: 571409
uaacagauaaccuuuguca

SEQ ID NO: 571411 - RNA, 19 nt, Artificial Sequence
  Description of Artificial Sequence: Synthetic oligonucleotide
  Sense strand starting at position 3803 of SEQ ID NO: 318552
caauauaggugagucaaga

SEQ ID NO: 571412 - RNA, 19 nt, Artificial Sequence
  Description of Artificial Sequence: Synthetic oligonucleotide
  Antisense strand to SEQ ID NO: 571411
ucuugacucaccuauauug

SEQ ID NO: 571413 - RNA, 19 nt, Artificial Sequence
  Description of Artificial Sequence: Synthetic oligonucleotide
  Sense strand starting at position 31 of SEQ ID NO: 318553
gcucucacccuuuaggauu

SEQ ID NO: 571414 - RNA, 19 nt, Artificial Sequence
  Description of Artificial Sequence: Synthetic oligonucleotide
  Antisense strand to SEQ ID NO: 571413
aauccuaaagggugagagc

SEQ ID NO: 571415 - RNA, 19 nt, Artificial Sequence
  Description of Artificial Sequence: Synthetic oligonucleotide
  Sense strand starting at position 139 of SEQ ID NO: 318553
gaagacaguucugcugagu

SEQ ID NO: 571416 - RNA, 19 nt, Artificial Sequence
  Description of Artificial Sequence: Synthetic oligonucleotide
  Antisense strand to SEQ ID NO: 571415
acucagcagaacugucuuc

SEQ ID NO: 571417 - RNA, 19 nt, Artificial Sequence
  Description of Artificial Sequence: Synthetic oligonucleotide
  Sense strand starting at position 210 of SEQ ID NO: 318553
ggaggugacuagcaggaau

SEQ ID NO: 571418 - RNA, 19 nt, Artificial Sequence
  Description of Artificial Sequence: Synthetic oligonucleotide
  Antisense strand to SEQ ID NO: 571417
auuccugcuagucaccucc

SEQ ID NO: 571419 - RNA, 19 nt, Artificial Sequence
  Description of Artificial Sequence: Synthetic oligonucleotide
  Sense strand starting at position 212 of SEQ ID NO: 318553
aggugacuagcaggaauaa

SEQ ID NO: 571420 - RNA, 19 nt, Artificial Sequence
  Description of Artificial Sequence: Synthetic oligonucleotide
  Antisense strand to SEQ ID NO: 571419
uuauuccugcuagucaccu

SEQ ID NO: 571421 - RNA, 19 nt, Artificial Sequence
  Description of Artificial Sequence: Synthetic oligonucleotide
  Sense strand starting at position 237 of SEQ ID NO: 318553
cuaggacaaugcuugucau

SEQ ID NO: 571422 - RNA, 19 nt, Artificial Sequence
  Description of Artificial Sequence: Synthetic oligonucleotide
  Antisense strand to SEQ ID NO: 571421
augacaagcauuguccuag

SEQ ID NO: 571423 - RNA, 19 nt, Artificial Sequence
  Description of Artificial Sequence: Synthetic oligonucleotide
  Sense strand starting at position 240 of SEQ ID NO: 318553
ggacaaugcuugucaucac

SEQ ID NO: 571424 - RNA, 19 nt, Artificial Sequence
  Description of Artificial Sequence: Synthetic oligonucleotide
  Antisense strand to SEQ ID NO: 571423
gugaugacaagcauugucc

SEQ ID NO: 571425 - RNA, 19 nt, Artificial Sequence
  Description of Artificial Sequence: Synthetic oligonucleotide
  Sense strand starting at position 271 of SEQ ID NO: 318553
gccugaagucaagaaagca

SEQ ID NO: 571426 - RNA, 19 nt, Artificial Sequence
  Description of Artificial Sequence: Synthetic oligonucleotide
  Antisense strand to SEQ ID NO: 571425
ugcuuucuugacuucaggc

SEQ ID NO: 571427 - RNA, 19 nt, Artificial Sequence
  Description of Artificial Sequence: Synthetic oligonucleotide
  Sense strand starting at position 656 of SEQ ID NO: 318553
aggcugagugcgguuugua

SEQ ID NO: 571428 - RNA, 19 nt, Artificial Sequence
  Description of Artificial Sequence: Synthetic oligonucleotide
  Antisense strand to SEQ ID NO: 571427
uacaaaccgcacucagccu

SEQ ID NO: 571429 - RNA, 19 nt, Artificial Sequence
  Description of Artificial Sequence: Synthetic oligonucleotide
  Sense strand starting at position 657 of SEQ ID NO: 318553
ggcugagugcgguuuguaa

SEQ ID NO: 571430 - RNA, 19 nt, Artificial Sequence
  Description of Artificial Sequence: Synthetic oligonucleotide
  Antisense strand to SEQ ID NO: 571429
uuacaaaccgcacucagcc

SEQ ID NO: 571431 - RNA, 19 nt, Artificial Sequence
  Description of Artificial Sequence: Synthetic oligonucleotide
  Sense strand starting at position 658 of SEQ ID NO: 318553
gcugagugcgguuuguaag

SEQ ID NO: 571432 - RNA, 19 nt, Artificial Sequence
  Description of Artificial Sequence: Synthetic oligonucleotide
  Antisense strand to SEQ ID NO: 571431
cuuacaaaccgcacucagc

SEQ ID NO: 571433 - RNA, 19 nt, Artificial Sequence
  Description of Artificial Sequence: Synthetic oligonucleotide
  Sense strand starting at position 659 of SEQ ID NO: 318553
cugagugcgguuuguaaga

SEQ ID NO: 571434 - RNA, 19 nt, Artificial Sequence
  Description of Artificial Sequence: Synthetic oligonucleotide
  Antisense strand to SEQ ID NO: 571433
ucuuacaaaccgcacucag

SEQ ID NO: 571435 - RNA, 19 nt, Artificial Sequence
  Description of Artificial Sequence: Synthetic oligonucleotide
  Sense strand starting at position 678 of SEQ ID NO: 318553
uuauaacgcucggucucau

SEQ ID NO: 571436 - RNA, 19 nt, Artificial Sequence
  Description of Artificial Sequence: Synthetic oligonucleotide
  Antisense strand to SEQ ID NO: 571435
augagaccgagcguuauaa

SEQ ID NO: 571437 - RNA, 19 nt, Artificial Sequence
  Description of Artificial Sequence: Synthetic oligonucleotide
  Sense strand starting at position 744 of SEQ ID NO: 318553
ggcauuuauaaccgagcca

SEQ ID NO: 571438 - RNA, 19 nt, Artificial Sequence
  Description of Artificial Sequence: Synthetic oligonucleotide
  Antisense strand to SEQ ID NO: 571437
uggcucgguuauaaaugcc

SEQ ID NO: 571439 - RNA, 19 nt, Artificial Sequence
  Description of Artificial Sequence: Synthetic oligonucleotide
  Sense strand starting at position 839 of SEQ ID NO: 318553
cucugaaucuguccaguuc

SEQ ID NO: 571440 - RNA, 19 nt, Artificial Sequence
  Description of Artificial Sequence: Synthetic oligonucleotide
  Antisense strand to SEQ ID NO: 571439
gaacuggacagauucagag

SEQ ID NO: 571441 - RNA, 19 nt, Artificial Sequence
  Description of Artificial Sequence: Synthetic oligonucleotide
  Sense strand starting at position 848 of SEQ ID NO: 318553
uguccaguuccucagaagu

SEQ ID NO: 571442 - RNA, 19 nt, Artificial Sequence
  Description of Artificial Sequence: Synthetic oligonucleotide
  Antisense strand to SEQ ID NO: 571441
acuucugaggaacuggaca

SEQ ID NO: 571443 - RNA, 19 nt, Artificial Sequence
  Description of Artificial Sequence: Synthetic oligonucleotide
  Sense strand starting at position 921 of SEQ ID NO: 318553
ggcccauucugaucuccaa

SEQ ID NO: 571444 - RNA, 19 nt, Artificial Sequence
  Description of Artificial Sequence: Synthetic oligonucleotide
  Antisense strand to SEQ ID NO: 571443
uuggagaucagaaugggcc

SEQ ID NO: 571445 - RNA, 19 nt, Artificial Sequence
  Description of Artificial Sequence: Synthetic oligonucleotide
  Sense strand starting at position 1192 of SEQ ID NO: 318553
cgagaccucucuuuccaga

SEQ ID NO: 571446 - RNA, 19 nt, Artificial Sequence
  Description of Artificial Sequence: Synthetic oligonucleotide
  Antisense strand to SEQ ID NO: 571445
ucuggaaagagaggucucg

SEQ ID NO: 571447 - RNA, 19 nt, Artificial Sequence
  Description of Artificial Sequence: Synthetic oligonucleotide
  Sense strand starting at position 1246 of SEQ ID NO: 318553
gagggaucguauccaggaa

SEQ ID NO: 571448 - RNA, 19 nt, Artificial Sequence
  Description of Artificial Sequence: Synthetic oligonucleotide
  Antisense strand to SEQ ID NO: 571447
uuccuggauacgaucccuc

SEQ ID NO: 571449 - RNA, 19 nt, Artificial Sequence
  Description of Artificial Sequence: Synthetic oligonucleotide
  Sense strand starting at position 2101 of SEQ ID NO: 318553
cgcgucaugucgacuaagu

SEQ ID NO: 571450 - RNA, 19 nt, Artificial Sequence
  Description of Artificial Sequence: Synthetic oligonucleotide
  Antisense strand to SEQ ID NO: 571449
acuuagucgacaugacgcg

SEQ ID NO: 571451 - RNA, 19 nt, Artificial Sequence
  Description of Artificial Sequence: Synthetic oligonucleotide
  Sense strand starting at position 2102 of SEQ ID NO: 318553
gcgucaugucgacuaaguu

SEQ ID NO: 571452 - RNA, 19 nt, Artificial Sequence
  Description of Artificial Sequence: Synthetic oligonucleotide
  Antisense strand to SEQ ID NO: 571451
aacuuagucgacaugacgc

SEQ ID NO: 571453 - RNA, 19 nt, Artificial Sequence
  Description of Artificial Sequence: Synthetic oligonucleotide
  Sense strand starting at position 2103 of SEQ ID NO: 318553
cgucaugucgacuaaguug

SEQ ID NO: 571454 - RNA, 19 nt, Artificial Sequence
  Description of Artificial Sequence: Synthetic oligonucleotide
  Antisense strand to SEQ ID NO: 571453
caacuuagucgacaugacg

SEQ ID NO: 571455 - RNA, 19 nt, Artificial Sequence
  Description of Artificial Sequence: Synthetic oligonucleotide
  Sense strand starting at position 2309 of SEQ ID NO: 318553
agcugagcacucuacucau

SEQ ID NO: 571456 - RNA, 19 nt, Artificial Sequence
  Description of Artificial Sequence: Synthetic oligonucleotide
  Antisense strand to SEQ ID NO: 571455
augaguagagugcucagcu

SEQ ID NO: 571457 - RNA, 19 nt, Artificial Sequence
  Description of Artificial Sequence: Synthetic oligonucleotide
  Sense strand starting at position 2470 of SEQ ID NO: 318553
uaguacucauggcagagau

SEQ ID NO: 571458 - RNA, 19 nt, Artificial Sequence
  Description of Artificial Sequence: Synthetic oligonucleotide
  Antisense strand to SEQ ID NO: 571457
aucucugccaugaguacua

SEQ ID NO: 571459 - RNA, 19 nt, Artificial Sequence
  Description of Artificial Sequence: Synthetic oligonucleotide
  Sense strand starting at position 2500 of SEQ ID NO: 318553
ccugaagagccuugguuga

SEQ ID NO: 571460 - RNA, 19 nt, Artificial Sequence
  Description of Artificial Sequence: Synthetic oligonucleotide
  Antisense strand to SEQ ID NO: 571459
ucaaccaaggcucuucagg

SEQ ID NO: 571461 - RNA, 19 nt, Artificial Sequence
  Description of Artificial Sequence: Synthetic oligonucleotide
  Sense strand starting at position 2502 of SEQ ID NO: 318553
ugaagagccuugguugaca

SEQ ID NO: 571462 - RNA, 19 nt, Artificial Sequence
  Description of Artificial Sequence: Synthetic oligonucleotide
  Antisense strand to SEQ ID NO: 571461
ugucaaccaaggcucuuca

SEQ ID NO: 571463 - RNA, 19 nt, Artificial Sequence
  Description of Artificial Sequence: Synthetic oligonucleotide
  Sense strand starting at position 2510 of SEQ ID NO: 318553
cuugguugacaccaaugua

SEQ ID NO: 571464 - RNA, 19 nt, Artificial Sequence
  Description of Artificial Sequence: Synthetic oligonucleotide
  Antisense strand to SEQ ID NO: 571463
uacauuggugucaaccaag

SEQ ID NO: 571465 - RNA, 19 nt, Artificial Sequence
  Description of Artificial Sequence: Synthetic oligonucleotide
  Sense strand starting at position 2677 of SEQ ID NO: 318553
uugacaaugccuuguucca

SEQ ID NO: 571466 - RNA, 19 nt, Artificial Sequence
  Description of Artificial Sequence: Synthetic oligonucleotide
  Antisense strand to SEQ ID NO: 571465
uggaacaaggcauugucaa

SEQ ID NO: 571467 - RNA, 19 nt, Artificial Sequence
  Description of Artificial Sequence: Synthetic oligonucleotide
  Sense strand starting at position 2699 of SEQ ID NO: 318553
ucggguuucugcuuccuga

SEQ ID NO: 571468 - RNA, 19 nt, Artificial Sequence
  Description of Artificial Sequence: Synthetic oligonucleotide
  Antisense strand to SEQ ID NO: 571467
ucaggaagcagaaacccga

SEQ ID NO: 571469 - RNA, 19 nt, Artificial Sequence
  Description of Artificial Sequence: Synthetic oligonucleotide
  Sense strand starting at position 2733 of SEQ ID NO: 318553
ccaaucgugucaucucuga

SEQ ID NO: 571470 - RNA, 19 nt, Artificial Sequence
  Description of Artificial Sequence: Synthetic oligonucleotide
  Antisense strand to SEQ ID NO: 571469
ucagagaugacacgauugg

SEQ ID NO: 571471 - RNA, 19 nt, Artificial Sequence
  Description of Artificial Sequence: Synthetic oligonucleotide
  Sense strand starting at position 2737 of SEQ ID NO: 318553
ucgugucaucucugagccu

SEQ ID NO: 571472 - RNA, 19 nt, Artificial Sequence
  Description of Artificial Sequence: Synthetic oligonucleotide
  Antisense strand to SEQ ID NO: 571471
aggcucagagaugacacga

SEQ ID NO: 571473 - RNA, 19 nt, Artificial Sequence
  Description of Artificial Sequence: Synthetic oligonucleotide
  Sense strand starting at position 2907 of SEQ ID NO: 318553
uuaaauuggcuaggucuga

SEQ ID NO: 571474 - RNA, 19 nt, Artificial Sequence
  Description of Artificial Sequence: Synthetic oligonucleotide
  Antisense strand to SEQ ID NO: 571473
ucagaccuagccaauuuaa

SEQ ID NO: 571475 - RNA, 19 nt, Artificial Sequence
  Description of Artificial Sequence: Synthetic oligonucleotide
  Sense strand starting at position 2974 of SEQ ID NO: 318553
aaauacuuguaggaaugau

SEQ ID NO: 571476 - RNA, 19 nt, Artificial Sequence
  Description of Artificial Sequence: Synthetic oligonucleotide
  Antisense strand to SEQ ID NO: 571475
aucauuccuacaaguauuu

SEQ ID NO: 571477 - RNA, 19 nt, Artificial Sequence
  Description of Artificial Sequence: Synthetic oligonucleotide
  Sense strand starting at position 3029 of SEQ ID NO: 318553
gaggaaguauugcccagau

SEQ ID NO: 571478 - RNA, 19 nt, Artificial Sequence
  Description of Artificial Sequence: Synthetic oligonucleotide
  Antisense strand to SEQ ID NO: 571477
aucugggcaauacuuccuc

SEQ ID NO: 571479 - RNA, 19 nt, Artificial Sequence
  Description of Artificial Sequence: Synthetic oligonucleotide
  Sense strand starting at position 3078 of SEQ ID NO: 318553
cugaaugagcccugcauau

SEQ ID NO: 571480 - RNA, 19 nt, Artificial Sequence
  Description of Artificial Sequence: Synthetic oligonucleotide
  Antisense strand to SEQ ID NO: 571479
auaugcagggcucauucag

SEQ ID NO: 571481 - RNA, 19 nt, Artificial Sequence
  Description of Artificial Sequence: Synthetic oligonucleotide
  Sense strand starting at position 3343 of SEQ ID NO: 318553
gaauauauaguagaguugu

SEQ ID NO: 571482 - RNA, 19 nt, Artificial Sequence
  Description of Artificial Sequence: Synthetic oligonucleotide
  Antisense strand to SEQ ID NO: 571481
acaacucuacuauauauuc

SEQ ID NO: 571483 - RNA, 19 nt, Artificial Sequence
  Description of Artificial Sequence: Synthetic oligonucleotide
  Sense strand starting at position 3349 of SEQ ID NO: 318553
auaguagaguuguagauuu

SEQ ID NO: 571484 - RNA, 19 nt, Artificial Sequence
  Description of Artificial Sequence: Synthetic oligonucleotide
  Antisense strand to SEQ ID NO: 571483
aaaucuacaacucuacuau

SEQ ID NO: 571485 - RNA, 19 nt, Artificial Sequence
  Description of Artificial Sequence: Synthetic oligonucleotide
  Sense strand starting at position 3372 of SEQ ID NO: 318553
guauuauacuuagcagauu

SEQ ID NO: 571486 - RNA, 19 nt, Artificial Sequence
  Description of Artificial Sequence: Synthetic oligonucleotide
  Antisense strand to SEQ ID NO: 571485
aaucugcuaaguauaauac

SEQ ID NO: 571487 - RNA, 19 nt, Artificial Sequence
  Description of Artificial Sequence: Synthetic oligonucleotide
  Sense strand starting at position 3533 of SEQ ID NO: 318553
aacggcuuucuguacagau

SEQ ID NO: 571488 - RNA, 19 nt, Artificial Sequence
  Description of Artificial Sequence: Synthetic oligonucleotide
  Antisense strand to SEQ ID NO: 571487
aucuguacagaaagccguu

SEQ ID NO: 571489 - RNA, 19 nt, Artificial Sequence
  Description of Artificial Sequence: Synthetic oligonucleotide
  Sense strand starting at position 3602 of SEQ ID NO: 318553
cagggugacuucgguauuu

SEQ ID NO: 571490 - RNA, 19 nt, Artificial Sequence
  Description of Artificial Sequence: Synthetic oligonucleotide
  Antisense strand to SEQ ID NO: 571489
aaauaccgaagucacccug

SEQ ID NO: 571491 - RNA, 19 nt, Artificial Sequence
  Description of Artificial Sequence: Synthetic oligonucleotide
  Sense strand starting at position 3901 of SEQ ID NO: 318553
gccagacuguaucuuuaag

SEQ ID NO: 571492 - RNA, 19 nt, Artificial Sequence
  Description of Artificial Sequence: Synthetic oligonucleotide
  Antisense strand to SEQ ID NO: 571491
cuuaaagauacagucuggc

SEQ ID NO: 571493 - RNA, 19 nt, Artificial Sequence
  Description of Artificial Sequence: Synthetic oligonucleotide
  Sense strand starting at position 84 of SEQ ID NO: 318554
agagaaauacaaugcuagu

SEQ ID NO: 571494 - RNA, 19 nt, Artificial Sequence
  Description of Artificial Sequence: Synthetic oligonucleotide
  Antisense strand to SEQ ID NO: 571493
acuagcauuguauuucucu

SEQ ID NO: 571495 - RNA, 19 nt, Artificial Sequence
  Description of Artificial Sequence: Synthetic oligonucleotide
  Sense strand starting at position 95 of SEQ ID NO: 318554
augcuagucccacauguaa

SEQ ID NO: 571496 - RNA, 19 nt, Artificial Sequence
  Description of Artificial Sequence: Synthetic oligonucleotide
  Antisense strand to SEQ ID NO: 571495
uuacaugugggacuagcau

SEQ ID NO: 571497 - RNA, 19 nt, Artificial Sequence
  Description of Artificial Sequence: Synthetic oligonucleotide
  Sense strand starting at position 974 of SEQ ID NO: 318554
auaaacugauggccuaaau

SEQ ID NO: 571498 - RNA, 19 nt, Artificial Sequence
  Description of Artificial Sequence: Synthetic oligonucleotide
  Antisense strand to SEQ ID NO: 571497
auuuaggccaucaguuuau

SEQ ID NO: 571499 - RNA, 19 nt, Artificial Sequence
  Description of Artificial Sequence: Synthetic oligonucleotide
  Sense strand starting at position 1099 of SEQ ID NO: 318554
aguagauaggucugaugaa

SEQ ID NO: 571500 - RNA, 19 nt, Artificial Sequence
  Description of Artificial Sequence: Synthetic oligonucleotide
  Antisense strand to SEQ ID NO: 571499
uucaucagaccuaucuacu

SEQ ID NO: 571501 - RNA, 19 nt, Artificial Sequence
  Description of Artificial Sequence: Synthetic oligonucleotide
  Sense strand starting at position 1139 of SEQ ID NO: 318554
cagguucugagagguaaga

SEQ ID NO: 571502 - RNA, 19 nt, Artificial Sequence
  Description of Artificial Sequence: Synthetic oligonucleotide
  Antisense strand to SEQ ID NO: 571501
ucuuaccucucagaaccug

SEQ ID NO: 571503 - RNA, 19 nt, Artificial Sequence
  Description of Artificial Sequence: Synthetic oligonucleotide
  Sense strand starting at position 1149 of SEQ ID NO: 318554
gagguaagauccucagcca

SEQ ID NO: 571504 - RNA, 19 nt, Artificial Sequence
  Description of Artificial Sequence: Synthetic oligonucleotide
  Antisense strand to SEQ ID NO: 571503
uggcugaggaucuuaccuc

SEQ ID NO: 571505 - RNA, 19 nt, Artificial Sequence
  Description of Artificial Sequence: Synthetic oligonucleotide
  Sense strand starting at position 1150 of SEQ ID NO: 318554
agguaagauccucagccaa

SEQ ID NO: 571506 - RNA, 19 nt, Artificial Sequence
  Description of Artificial Sequence: Synthetic oligonucleotide
  Antisense strand to SEQ ID NO: 571505
uuggcugaggaucuuaccu

SEQ ID NO: 571507 - RNA, 19 nt, Artificial Sequence
  Description of Artificial Sequence: Synthetic oligonucleotide
  Sense strand starting at position 1152 of SEQ ID NO: 318554
guaagauccucagccaaga

SEQ ID NO: 571508 - RNA, 19 nt, Artificial Sequence
  Description of Artificial Sequence: Synthetic oligonucleotide
  Antisense strand to SEQ ID NO: 571507
ucuuggcugaggaucuuac

SEQ ID NO: 571509 - RNA, 19 nt, Artificial Sequence
  Description of Artificial Sequence: Synthetic oligonucleotide
  Sense strand starting at position 1165 of SEQ ID NO: 318554
ccaagaacacauuguagua

SEQ ID NO: 571510 - RNA, 19 nt, Artificial Sequence
  Description of Artificial Sequence: Synthetic oligonucleotide
  Antisense strand to SEQ ID NO: 571509
uacuacaauguguucuugg

SEQ ID NO: 571511 - RNA, 19 nt, Artificial Sequence
  Description of Artificial Sequence: Synthetic oligonucleotide
  Sense strand starting at position 1226 of SEQ ID NO: 318554
ucucuaaaccaguauguua

SEQ ID NO: 571512 - RNA, 19 nt, Artificial Sequence
  Description of Artificial Sequence: Synthetic oligonucleotide
  Antisense strand to SEQ ID NO: 571511
uaacauacugguuuagaga

SEQ ID NO: 571513 - RNA, 19 nt, Artificial Sequence
  Description of Artificial Sequence: Synthetic oligonucleotide
  Sense strand starting at position 1228 of SEQ ID NO: 318554
ucuaaaccaguauguuaua

SEQ ID NO: 571514 - RNA, 19 nt, Artificial Sequence
  Description of Artificial Sequence: Synthetic oligonucleotide
  Antisense strand to SEQ ID NO: 571513
uauaacauacugguuuaga

SEQ ID NO: 571515 - RNA, 19 nt, Artificial Sequence
  Description of Artificial Sequence: Synthetic oligonucleotide
  Sense strand starting at position 1239 of SEQ ID NO: 318554
auguuauacuuguccacag

SEQ ID NO: 571516 - RNA, 19 nt, Artificial Sequence
  Description of Artificial Sequence: Synthetic oligonucleotide
  Antisense strand to SEQ ID NO: 571515
cuguggacaaguauaacau

SEQ ID NO: 571517 - RNA, 19 nt, Artificial Sequence
  Description of Artificial Sequence: Synthetic oligonucleotide
  Sense strand starting at position 1240 of SEQ ID NO: 318554
uguuauacuuguccacaga

SEQ ID NO: 571518 - RNA, 19 nt, Artificial Sequence
  Description of Artificial Sequence: Synthetic oligonucleotide
  Antisense strand to SEQ ID NO: 571517
ucuguggacaaguauaaca

SEQ ID NO: 571519 - RNA, 19 nt, Artificial Sequence
  Description of Artificial Sequence: Synthetic oligonucleotide
  Sense strand starting at position 1241 of SEQ ID NO: 318554
guuauacuuguccacagaa

SEQ ID NO: 571520 - RNA, 19 nt, Artificial Sequence
  Description of Artificial Sequence: Synthetic oligonucleotide
  Antisense strand to SEQ ID NO: 571519
uucuguggacaaguauaac

SEQ ID NO: 571521 - RNA, 19 nt, Artificial Sequence
  Description of Artificial Sequence: Synthetic oligonucleotide
  Sense strand starting at position 1413 of SEQ ID NO: 318554
cacuguuuagcgcuuuacu

SEQ ID NO: 571522 - RNA, 19 nt, Artificial Sequence
  Description of Artificial Sequence: Synthetic oligonucleotide
  Antisense strand to SEQ ID NO: 571521
aguaaagcgcuaaacagug

SEQ ID NO: 571523 - RNA, 19 nt, Artificial Sequence
  Description of Artificial Sequence: Synthetic oligonucleotide
  Sense strand starting at position 1414 of SEQ ID NO: 318554
acuguuuagcgcuuuacuu

SEQ ID NO: 571524 - RNA, 19 nt, Artificial Sequence
  Description of Artificial Sequence: Synthetic oligonucleotide
  Antisense strand to SEQ ID NO: 571523
aaguaaagcgcuaaacagu

SEQ ID NO: 571525 - RNA, 19 nt, Artificial Sequence
  Description of Artificial Sequence: Synthetic oligonucleotide
  Sense strand starting at position 1415 of SEQ ID NO: 318554
cuguuuagcgcuuuacuua

SEQ ID NO: 571526 - RNA, 19 nt, Artificial Sequence
  Description of Artificial Sequence: Synthetic oligonucleotide
  Antisense strand to SEQ ID NO: 571525
uaaguaaagcgcuaaacag

SEQ ID NO: 571527 - RNA, 19 nt, Artificial Sequence
  Description of Artificial Sequence: Synthetic oligonucleotide
  Sense strand starting at position 1476 of SEQ ID NO: 318554
ucggaucaucucgacuuaa

SEQ ID NO: 571528 - RNA, 19 nt, Artificial Sequence
  Description of Artificial Sequence: Synthetic oligonucleotide
  Antisense strand to SEQ ID NO: 571527
uuaagucgagaugauccga

SEQ ID NO: 571529 - RNA, 19 nt, Artificial Sequence
  Description of Artificial Sequence: Synthetic oligonucleotide
  Sense strand starting at position 1532 of SEQ ID NO: 318554
ggaaauacagucugucaau

SEQ ID NO: 571530 - RNA, 19 nt, Artificial Sequence
  Description of Artificial Sequence: Synthetic oligonucleotide
  Antisense strand to SEQ ID NO: 571529
auugacagacuguauuucc

SEQ ID NO: 571531 - RNA, 19 nt, Artificial Sequence
  Description of Artificial Sequence: Synthetic oligonucleotide
  Sense strand starting at position 1646 of SEQ ID NO: 318554
gacuguuucccugaagacg

SEQ ID NO: 571532 - RNA, 19 nt, Artificial Sequence
  Description of Artificial Sequence: Synthetic oligonucleotide
  Antisense strand to SEQ ID NO: 571531
cgucuucagggaaacaguc

SEQ ID NO: 571533 - RNA, 19 nt, Artificial Sequence
  Description of Artificial Sequence: Synthetic oligonucleotide
  Sense strand starting at position 2070 of SEQ ID NO: 318554
cugcguaucgcgcuauuua

SEQ ID NO: 571534 - RNA, 19 nt, Artificial Sequence
  Description of Artificial Sequence: Synthetic oligonucleotide
  Antisense strand to SEQ ID NO: 571533
uaaauagcgcgauacgcag

SEQ ID NO: 571535 - RNA, 19 nt, Artificial Sequence
  Description of Artificial Sequence: Synthetic oligonucleotide
  Sense strand starting at position 2450 of SEQ ID NO: 318554
gaacauaaggcauguuauc

SEQ ID NO: 571536 - RNA, 19 nt, Artificial Sequence
  Description of Artificial Sequence: Synthetic oligonucleotide
  Antisense strand to SEQ ID NO: 571535
gauaacaugccuuauguuc

SEQ ID NO: 571537 - RNA, 19 nt, Artificial Sequence
  Description of Artificial Sequence: Synthetic oligonucleotide
  Sense strand starting at position 2753 of SEQ ID NO: 318554
uugcaauaccuggaguuua

SEQ ID NO: 571538 - RNA, 19 nt, Artificial Sequence
  Description of Artificial Sequence: Synthetic oligonucleotide
  Antisense strand to SEQ ID NO: 571537
uaaacuccagguauugcaa

SEQ ID NO: 571539 - RNA, 19 nt, Artificial Sequence
  Description of Artificial Sequence: Synthetic oligonucleotide
  Sense strand starting at position 2832 of SEQ ID NO: 318554
uagcgugaaagugaauaga

SEQ ID NO: 571540 - RNA, 19 nt, Artificial Sequence
  Description of Artificial Sequence: Synthetic oligonucleotide
  Antisense strand to SEQ ID NO: 571539
ucuauucacuuucacgcua

SEQ ID NO: 571541 - RNA, 19 nt, Artificial Sequence
  Description of Artificial Sequence: Synthetic oligonucleotide
  Sense strand starting at position 2913 of SEQ ID NO: 318554
aguguuaaggccuaauuag

SEQ ID NO: 571542 - RNA, 19 nt, Artificial Sequence
  Description of Artificial Sequence: Synthetic oligonucleotide
  Antisense strand to SEQ ID NO: 571541
cuaauuaggccuuaacacu

SEQ ID NO: 571543 - RNA, 19 nt, Artificial Sequence
  Description of Artificial Sequence: Synthetic oligonucleotide
  Sense strand starting at position 2949 of SEQ ID NO: 318554
gcgcaucucgaagaggaau

SEQ ID NO: 571544 - RNA, 19 nt, Artificial Sequence
  Description of Artificial Sequence: Synthetic oligonucleotide
  Antisense strand to SEQ ID NO: 571543
auuccucuucgagaugcgc

SEQ ID NO: 571545 - RNA, 19 nt, Artificial Sequence
  Description of Artificial Sequence: Synthetic oligonucleotide
  Sense strand starting at position 3072 of SEQ ID NO: 318554
gcuguuuguaaagaaggau

SEQ ID NO: 571546 - RNA, 19 nt, Artificial Sequence
  Description of Artificial Sequence: Synthetic oligonucleotide
  Antisense strand to SEQ ID NO: 571545
auccuucuuuacaaacagc

SEQ ID NO: 571547 - RNA, 19 nt, Artificial Sequence
  Description of Artificial Sequence: Synthetic oligonucleotide
  Sense strand starting at position 3081 of SEQ ID NO: 318554
aaagaaggauugggagaaa

SEQ ID NO: 571548 - RNA, 19 nt, Artificial Sequence
  Description of Artificial Sequence: Synthetic oligonucleotide
  Antisense strand to SEQ ID NO: 571547
uuucucccaauccuucuuu

SEQ ID NO: 571549 - RNA, 19 nt, Artificial Sequence
  Description of Artificial Sequence: Synthetic oligonucleotide
  Sense strand starting at position 3135 of SEQ ID NO: 318554
gguuuagcaauugaguauu

SEQ ID NO: 571550 - RNA, 19 nt, Artificial Sequence
  Description of Artificial Sequence: Synthetic oligonucleotide
  Antisense strand to SEQ ID NO: 571549
aauacucaauugcuaaacc

SEQ ID NO: 571551 - RNA, 19 nt, Artificial Sequence
  Description of Artificial Sequence: Synthetic oligonucleotide
  Sense strand starting at position 3141 of SEQ ID NO: 318554
gcaauugaguauuuccagu

SEQ ID NO: 571552 - RNA, 19 nt, Artificial Sequence
  Description of Artificial Sequence: Synthetic oligonucleotide
  Antisense strand to SEQ ID NO: 571551
acuggaaauacucaauugc

SEQ ID NO: 571553 - RNA, 19 nt, Artificial Sequence
  Description of Artificial Sequence: Synthetic oligonucleotide
  Sense strand starting at position 3176 of SEQ ID NO: 318554
cuggucugagggcaucauu

SEQ ID NO: 571554 - RNA, 19 nt, Artificial Sequence
  Description of Artificial Sequence: Synthetic oligonucleotide
  Antisense strand to SEQ ID NO: 571553
aaugaugcccucagaccag

SEQ ID NO: 571555 - RNA, 19 nt, Artificial Sequence
  Description of Artificial Sequence: Synthetic oligonucleotide
  Sense strand starting at position 3184 of SEQ ID NO: 318554
agggcaucauuaguaagaa

SEQ ID NO: 571556 - RNA, 19 nt, Artificial Sequence
  Description of Artificial Sequence: Synthetic oligonucleotide
  Antisense strand to SEQ ID NO: 571555
uucuuacuaaugaugcccu

SEQ ID NO: 571557 - RNA, 19 nt, Artificial Sequence
  Description of Artificial Sequence: Synthetic oligonucleotide
  Sense strand starting at position 3243 of SEQ ID NO: 318554
gcugcaugaccuuaggaga

SEQ ID NO: 571558 - RNA, 19 nt, Artificial Sequence
  Description of Artificial Sequence: Synthetic oligonucleotide
  Antisense strand to SEQ ID NO: 571557
ucuccuaaggucaugcagc

SEQ ID NO: 571559 - RNA, 19 nt, Artificial Sequence
  Description of Artificial Sequence: Synthetic oligonucleotide
  Sense strand starting at position 3258 of SEQ ID NO: 318554
gagaaacaaugcuuucugu

SEQ ID NO: 571560 - RNA, 19 nt, Artificial Sequence
  Description of Artificial Sequence: Synthetic oligonucleotide
  Antisense strand to SEQ ID NO: 571559
acagaaagcauuguuucuc

SEQ ID NO: 571561 - RNA, 19 nt, Artificial Sequence
  Description of Artificial Sequence: Synthetic oligonucleotide
  Sense strand starting at position 3364 of SEQ ID NO: 318554
ugugcagauuuagucuuaa

SEQ ID NO: 571562 - RNA, 19 nt, Artificial Sequence
  Description of Artificial Sequence: Synthetic oligonucleotide
  Antisense strand to SEQ ID NO: 571561
uuaagacuaaaucugcaca

SEQ ID NO: 571563 - RNA, 19 nt, Artificial Sequence
  Description of Artificial Sequence: Synthetic oligonucleotide
  Sense strand starting at position 3486 of SEQ ID NO: 318554
acaauaaagguaugcauau

SEQ ID NO: 571564 - RNA, 19 nt, Artificial Sequence
  Description of Artificial Sequence: Synthetic oligonucleotide
  Antisense strand to SEQ ID NO: 571563
auaugcauaccuuuauugu

SEQ ID NO: 571565 - RNA, 19 nt, Artificial Sequence
  Description of Artificial Sequence: Synthetic oligonucleotide
  Sense strand starting at position 3653 of SEQ ID NO: 318554
agaugaugaacuggcauau

SEQ ID NO: 571566 - RNA, 19 nt, Artificial Sequence
  Description of Artificial Sequence: Synthetic oligonucleotide
  Antisense strand to SEQ ID NO: 571565
auaugccaguucaucaucu

SEQ ID NO: 571567 - RNA, 19 nt, Artificial Sequence
  Description of Artificial Sequence: Synthetic oligonucleotide
  Sense strand starting at position 3675 of SEQ ID NO: 318554
gagaaccaugucuauguca

SEQ ID NO: 571568 - RNA, 19 nt, Artificial Sequence
  Description of Artificial Sequence: Synthetic oligonucleotide
  Antisense strand to SEQ ID NO: 571567
ugacauagacaugguucuc

SEQ ID NO: 571569 - RNA, 19 nt, Artificial Sequence
  Description of Artificial Sequence: Synthetic oligonucleotide
  Sense strand starting at position 3704 of SEQ ID NO: 318554
caagccuuucgugaaagag

SEQ ID NO: 571570 - RNA, 19 nt, Artificial Sequence
  Description of Artificial Sequence: Synthetic oligonucleotide
  Antisense strand to SEQ ID NO: 571569
cucuuucacgaaaggcuug

SEQ ID NO: 571571 - RNA, 19 nt, Artificial Sequence
  Description of Artificial Sequence: Synthetic oligonucleotide
  Sense strand starting at position 3708 of SEQ ID NO: 318554
ccuuucgugaaagaguaau

SEQ ID NO: 571572 - RNA, 19 nt, Artificial Sequence
  Description of Artificial Sequence: Synthetic oligonucleotide
  Antisense strand to SEQ ID NO: 571571
auuacucuuucacgaaagg

SEQ ID NO: 571573 - RNA, 19 nt, Artificial Sequence
  Description of Artificial Sequence: Synthetic oligonucleotide
  Sense strand starting at position 17 of SEQ ID NO: 318555
guaaauuaacagcaguaau

SEQ ID NO: 571574 - RNA, 19 nt, Artificial Sequence
  Description of Artificial Sequence: Synthetic oligonucleotide
  Antisense strand to SEQ ID NO: 571573
auuacugcuguuaauuuac

SEQ ID NO: 571575 - RNA, 19 nt, Artificial Sequence
  Description of Artificial Sequence: Synthetic oligonucleotide
  Sense strand starting at position 154 of SEQ ID NO: 318555
cuuuaugaagguuaaguuu

SEQ ID NO: 571576 - RNA, 19 nt, Artificial Sequence
  Description of Artificial Sequence: Synthetic oligonucleotide
  Antisense strand to SEQ ID NO: 571575
aaacuuaaccuucauaaag

SEQ ID NO: 571577 - RNA, 19 nt, Artificial Sequence
  Description of Artificial Sequence: Synthetic oligonucleotide
  Sense strand starting at position 266 of SEQ ID NO: 318555
guuauacaucugcaaauag

SEQ ID NO: 571578 - RNA, 19 nt, Artificial Sequence
  Description of Artificial Sequence: Synthetic oligonucleotide
  Antisense strand to SEQ ID NO: 571577
cuauuugcagauguauaac

SEQ ID NO: 571579 - RNA, 19 nt, Artificial Sequence
  Description of Artificial Sequence: Synthetic oligonucleotide
  Sense strand starting at position 387 of SEQ ID NO: 318555
ugcauuggcaucuagcaga

SEQ ID NO: 571580 - RNA, 19 nt, Artificial Sequence
  Description of Artificial Sequence: Synthetic oligonucleotide
  Antisense strand to SEQ ID NO: 571579
ucugcuagaugccaaugca

SEQ ID NO: 571581 - RNA, 19 nt, Artificial Sequence
  Description of Artificial Sequence: Synthetic oligonucleotide
  Sense strand starting at position 392 of SEQ ID NO: 318555
uggcaucuagcagaaauug

SEQ ID NO: 571582 - RNA, 19 nt, Artificial Sequence
  Description of Artificial Sequence: Synthetic oligonucleotide
  Antisense strand to SEQ ID NO: 571581
caauuucugcuagaugcca

SEQ ID NO: 571583 - RNA, 19 nt, Artificial Sequence
  Description of Artificial Sequence: Synthetic oligonucleotide
  Sense strand starting at position 666 of SEQ ID NO: 318555
acaggcaugaugugacaaa

SEQ ID NO: 571584 - RNA, 19 nt, Artificial Sequence
  Description of Artificial Sequence: Synthetic oligonucleotide
  Antisense strand to SEQ ID NO: 571583
uuugucacaucaugccugu

SEQ ID NO: 571585 - RNA, 19 nt, Artificial Sequence
  Description of Artificial Sequence: Synthetic oligonucleotide
  Sense strand starting at position 815 of SEQ ID NO: 318555
ccagcuggucaggaaacau

SEQ ID NO: 571586 - RNA, 19 nt, Artificial Sequence
  Description of Artificial Sequence: Synthetic oligonucleotide
  Antisense strand to SEQ ID NO: 571585
auguuuccugaccagcugg

SEQ ID NO: 571587 - RNA, 19 nt, Artificial Sequence
  Description of Artificial Sequence: Synthetic oligonucleotide
  Sense strand starting at position 825 of SEQ ID NO: 318555
aggaaacauugucuuuaca

SEQ ID NO: 571588 - RNA, 19 nt, Artificial Sequence
  Description of Artificial Sequence: Synthetic oligonucleotide
  Antisense strand to SEQ ID NO: 571587
uguaaagacaauguuuccu

SEQ ID NO: 571589 - RNA, 19 nt, Artificial Sequence
  Description of Artificial Sequence: Synthetic oligonucleotide
  Sense strand starting at position 977 of SEQ ID NO: 318555
aaguauccucgcccgaguu

SEQ ID NO: 571590 - RNA, 19 nt, Artificial Sequence
  Description of Artificial Sequence: Synthetic oligonucleotide
  Antisense strand to SEQ ID NO: 571589
aacucgggcgaggauacuu

SEQ ID NO: 571591 - RNA, 19 nt, Artificial Sequence
  Description of Artificial Sequence: Synthetic oligonucleotide
  Sense strand starting at position 1263 of SEQ ID NO: 318555
agaagaaauccuugcagug

SEQ ID NO: 571592 - RNA, 19 nt, Artificial Sequence
  Description of Artificial Sequence: Synthetic oligonucleotide
  Antisense strand to SEQ ID NO: 571591
cacugcaaggauuucuucu

SEQ ID NO: 571593 - RNA, 19 nt, Artificial Sequence
  Description of Artificial Sequence: Synthetic oligonucleotide
  Sense strand starting at position 1268 of SEQ ID NO: 318555
aaauccuugcaguggugaa

SEQ ID NO: 571594 - RNA, 19 nt, Artificial Sequence
  Description of Artificial Sequence: Synthetic oligonucleotide
  Antisense strand to SEQ ID NO: 571593
uucaccacugcaaggauuu

SEQ ID NO: 571595 - RNA, 19 nt, Artificial Sequence
  Description of Artificial Sequence: Synthetic oligonucleotide
  Sense strand starting at position 1361 of SEQ ID NO: 318555
uguaauucccaccgauaag

SEQ ID NO: 571596 - RNA, 19 nt, Artificial Sequence
  Description of Artificial Sequence: Synthetic oligonucleotide
  Antisense strand to SEQ ID NO: 571595
cuuaucggugggaauuaca

SEQ ID NO: 571597 - RNA, 19 nt, Artificial Sequence
  Description of Artificial Sequence: Synthetic oligonucleotide
  Sense strand starting at position 1383 of SEQ ID NO: 318555
ggauccuuaucuuugaaac

SEQ ID NO: 571598 - RNA, 19 nt, Artificial Sequence
  Description of Artificial Sequence: Synthetic oligonucleotide
  Antisense strand to SEQ ID NO: 571597
guuucaaagauaaggaucc

SEQ ID NO: 571599 - RNA, 19 nt, Artificial Sequence
  Description of Artificial Sequence: Synthetic oligonucleotide
  Sense strand starting at position 1512 of SEQ ID NO: 318555
gguacauccgaugaguuag

SEQ ID NO: 571600 - RNA, 19 nt, Artificial Sequence
  Description of Artificial Sequence: Synthetic oligonucleotide
  Antisense strand to SEQ ID NO: 571599
cuaacucaucggauguacc

SEQ ID NO: 571601 - RNA, 19 nt, Artificial Sequence
  Description of Artificial Sequence: Synthetic oligonucleotide
  Sense strand starting at position 2284 of SEQ ID NO: 318555
uuaaguaauuguccuugac

SEQ ID NO: 571602 - RNA, 19 nt, Artificial Sequence
  Description of Artificial Sequence: Synthetic oligonucleotide
  Antisense strand to SEQ ID NO: 571601
gucaaggacaauuacuuaa

SEQ ID NO: 571603 - RNA, 19 nt, Artificial Sequence
  Description of Artificial Sequence: Synthetic oligonucleotide
  Sense strand starting at position 2287 of SEQ ID NO: 318555
aguaauuguccuugacaca

SEQ ID NO: 571604 - RNA, 19 nt, Artificial Sequence
  Description of Artificial Sequence: Synthetic oligonucleotide
  Antisense strand to SEQ ID NO: 571603
ugugucaaggacaauuacu

SEQ ID NO: 571605 - RNA, 19 nt, Artificial Sequence
  Description of Artificial Sequence: Synthetic oligonucleotide
  Sense strand starting at position 2288 of SEQ ID NO: 318555
guaauuguccuugacacag

SEQ ID NO: 571606 - RNA, 19 nt, Artificial Sequence
  Description of Artificial Sequence: Synthetic oligonucleotide
  Antisense strand to SEQ ID NO: 571605
cugugucaaggacaauuac

SEQ ID NO: 571607 - RNA, 19 nt, Artificial Sequence
  Description of Artificial Sequence: Synthetic oligonucleotide
  Sense strand starting at position 2787 of SEQ ID NO: 318555
ccgucaguauuuccuagaa

SEQ ID NO: 571608 - RNA, 19 nt, Artificial Sequence
  Description of Artificial Sequence: Synthetic oligonucleotide
  Antisense strand to SEQ ID NO: 571607
uucuaggaaauacugacgg

SEQ ID NO: 571609 - RNA, 19 nt, Artificial Sequence
  Description of Artificial Sequence: Synthetic oligonucleotide
  Sense strand starting at position 2966 of SEQ ID NO: 318555
uuggaaugcucuuugacac

SEQ ID NO: 571610 - RNA, 19 nt, Artificial Sequence
  Description of Artificial Sequence: Synthetic oligonucleotide
  Antisense strand to SEQ ID NO: 571609
gugucaaagagcauuccaa

SEQ ID NO: 571611 - RNA, 19 nt, Artificial Sequence
  Description of Artificial Sequence: Synthetic oligonucleotide
  Sense strand starting at position 3086 of SEQ ID NO: 318555
agggucaucucaucugaca

SEQ ID NO: 571612 - RNA, 19 nt, Artificial Sequence
  Description of Artificial Sequence: Synthetic oligonucleotide
  Antisense strand to SEQ ID NO: 571611
ugucagaugagaugacccu

SEQ ID NO: 571613 - RNA, 19 nt, Artificial Sequence
  Description of Artificial Sequence: Synthetic oligonucleotide
  Sense strand starting at position 3179 of SEQ ID NO: 318555
ccagaagucucugcauuag

SEQ ID NO: 571614 - RNA, 19 nt, Artificial Sequence
  Description of Artificial Sequence: Synthetic oligonucleotide
  Antisense strand to SEQ ID NO: 571613
cuaaugcagagacuucugg

SEQ ID NO: 571615 - RNA, 19 nt, Artificial Sequence
  Description of Artificial Sequence: Synthetic oligonucleotide
  Sense strand starting at position 3203 of SEQ ID NO: 318555
gccaucugaaauggugaca

SEQ ID NO: 571616 - RNA, 19 nt, Artificial Sequence
  Description of Artificial Sequence: Synthetic oligonucleotide
  Antisense strand to SEQ ID NO: 571615
ugucaccauuucagauggc

SEQ ID NO: 571617 - RNA, 19 nt, Artificial Sequence
  Description of Artificial Sequence: Synthetic oligonucleotide
  Sense strand starting at position 3216 of SEQ ID NO: 318555
gugacagagggcuaguaaa

SEQ ID NO: 571618 - RNA, 19 nt, Artificial Sequence
  Description of Artificial Sequence: Synthetic oligonucleotide
  Antisense strand to SEQ ID NO: 571617
uuuacuagcccucugucac

SEQ ID NO: 571619 - RNA, 19 nt, Artificial Sequence
  Description of Artificial Sequence: Synthetic oligonucleotide
  Sense strand starting at position 3274 of SEQ ID NO: 318555
ugucuaguuccagagacca

SEQ ID NO: 571620 - RNA, 19 nt, Artificial Sequence
  Description of Artificial Sequence: Synthetic oligonucleotide
  Antisense strand to SEQ ID NO: 571619
uggucucuggaacuagaca

SEQ ID NO: 571621 - RNA, 19 nt, Artificial Sequence
  Description of Artificial Sequence: Synthetic oligonucleotide
  Sense strand starting at position 3333 of SEQ ID NO: 318555
agggaaaugugggaauaag

SEQ ID NO: 571622 - RNA, 19 nt, Artificial Sequence
  Description of Artificial Sequence: Synthetic oligonucleotide
  Antisense strand to SEQ ID NO: 571621
cuuauucccacauuucccu

SEQ ID NO: 571623 - RNA, 19 nt, Artificial Sequence
  Description of Artificial Sequence: Synthetic oligonucleotide
  Sense strand starting at position 3352 of SEQ ID NO: 318555
gacccaguguuggcagaua

SEQ ID NO: 571624 - RNA, 19 nt, Artificial Sequence
  Description of Artificial Sequence: Synthetic oligonucleotide
  Antisense strand to SEQ ID NO: 571623
uaucugccaacacuggguc

SEQ ID NO: 571625 - RNA, 19 nt, Artificial Sequence
  Description of Artificial Sequence: Synthetic oligonucleotide
  Sense strand starting at position 3360 of SEQ ID NO: 318555
guuggcagauauucugauu

SEQ ID NO: 571626 - RNA, 19 nt, Artificial Sequence
  Description of Artificial Sequence: Synthetic oligonucleotide
  Antisense strand to SEQ ID NO: 571625
aaucagaauaucugccaac

SEQ ID NO: 571627 - RNA, 19 nt, Artificial Sequence
  Description of Artificial Sequence: Synthetic oligonucleotide
  Sense strand starting at position 3381 of SEQ ID NO: 318555
ucaagcaaagcuggaaauu

SEQ ID NO: 571628 - RNA, 19 nt, Artificial Sequence
  Description of Artificial Sequence: Synthetic oligonucleotide
  Antisense strand to SEQ ID NO: 571627
aauuuccagcuuugcuuga

SEQ ID NO: 571629 - RNA, 19 nt, Artificial Sequence
  Description of Artificial Sequence: Synthetic oligonucleotide
  Sense strand starting at position 3644 of SEQ ID NO: 318555
gaaaguaaagucuguguac

SEQ ID NO: 571630 - RNA, 19 nt, Artificial Sequence
  Description of Artificial Sequence: Synthetic oligonucleotide
  Antisense strand to SEQ ID NO: 571629
guacacagacuuuacuuuc

SEQ ID NO: 571631 - RNA, 19 nt, Artificial Sequence
  Description of Artificial Sequence: Synthetic oligonucleotide
  Sense strand starting at position 3672 of SEQ ID NO: 318555
uugucacacucacugauua

SEQ ID NO: 571632 - RNA, 19 nt, Artificial Sequence
  Description of Artificial Sequence: Synthetic oligonucleotide
  Antisense strand to SEQ ID NO: 571631
uaaucagugagugugacaa

SEQ ID NO: 571633 - RNA, 19 nt, Artificial Sequence
  Description of Artificial Sequence: Synthetic oligonucleotide
  Sense strand starting at position 3673 of SEQ ID NO: 318555
ugucacacucacugauuau

SEQ ID NO: 571634 - RNA, 19 nt, Artificial Sequence
  Description of Artificial Sequence: Synthetic oligonucleotide
  Antisense strand to SEQ ID NO: 571633
auaaucagugagugugaca

SEQ ID NO: 571635 - RNA, 19 nt, Artificial Sequence
  Description of Artificial Sequence: Synthetic oligonucleotide
  Sense strand starting at position 3762 of SEQ ID NO: 318555
cccagaagugcauauaauc

SEQ ID NO: 571636 - RNA, 19 nt, Artificial Sequence
  Description of Artificial Sequence: Synthetic oligonucleotide
  Antisense strand to SEQ ID NO: 571635
gauuauaugcacuucuggg

SEQ ID NO: 571637 - RNA, 19 nt, Artificial Sequence
  Description of Artificial Sequence: Synthetic oligonucleotide
  Sense strand starting at position 3776 of SEQ ID NO: 318555
uaauccugccuuggaggau

SEQ ID NO: 571638 - RNA, 19 nt, Artificial Sequence
  Description of Artificial Sequence: Synthetic oligonucleotide
  Antisense strand to SEQ ID NO: 571637
auccuccaaggcaggauua

SEQ ID NO: 571639 - RNA, 19 nt, Artificial Sequence
  Description of Artificial Sequence: Synthetic oligonucleotide
  Sense strand starting at position 3811 of SEQ ID NO: 318555
cagaacugauguuugcaga

SEQ ID NO: 571640 - RNA, 19 nt, Artificial Sequence
  Description of Artificial Sequence: Synthetic oligonucleotide
  Antisense strand to SEQ ID NO: 571639
ucugcaaacaucaguucug

SEQ ID NO: 571641 - RNA, 19 nt, Artificial Sequence
  Description of Artificial Sequence: Synthetic oligonucleotide
  Sense strand starting at position 3828 of SEQ ID NO: 318555
gagugcuuuguugaacauu

SEQ ID NO: 571642 - RNA, 19 nt, Artificial Sequence
  Description of Artificial Sequence: Synthetic oligonucleotide
  Antisense strand to SEQ ID NO: 571641
aauguucaacaaagcacuc

SEQ ID NO: 571643 - RNA, 19 nt, Artificial Sequence
  Description of Artificial Sequence: Synthetic oligonucleotide
  Sense strand starting at position 3831 of SEQ ID NO: 318555
ugcuuuguugaacauuaua

SEQ ID NO: 571644 - RNA, 19 nt, Artificial Sequence
  Description of Artificial Sequence: Synthetic oligonucleotide
  Antisense strand to SEQ ID NO: 571643
uauaauguucaacaaagca

SEQ ID NO: 571645 - RNA, 19 nt, Artificial Sequence
  Description of Artificial Sequence: Synthetic oligonucleotide
  Sense strand starting at position 3953 of SEQ ID NO: 318555
cacuguacauacgucagaa

SEQ ID NO: 571646 - RNA, 19 nt, Artificial Sequence
  Description of Artificial Sequence: Synthetic oligonucleotide
  Antisense strand to SEQ ID NO: 571645
uucugacguauguacagug

SEQ ID NO: 571647 - RNA, 19 nt, Artificial Sequence
  Description of Artificial Sequence: Synthetic oligonucleotide
  Sense strand starting at position 3955 of SEQ ID NO: 318555
cuguacauacgucagaaga

SEQ ID NO: 571648 - RNA, 19 nt, Artificial Sequence
  Description of Artificial Sequence: Synthetic oligonucleotide
  Antisense strand to SEQ ID NO: 571647
ucuucugacguauguacag

SEQ ID NO: 571649 - RNA, 19 nt, Artificial Sequence
  Description of Artificial Sequence: Synthetic oligonucleotide
  Sense strand starting at position 3968 of SEQ ID NO: 318555
agaagaauuugugauuaca

SEQ ID NO: 571650 - RNA, 19 nt, Artificial Sequence
  Description of Artificial Sequence: Synthetic oligonucleotide
  Antisense strand to SEQ ID NO: 571649
uguaaucacaaauucuucu

SEQ ID NO: 571651 - RNA, 19 nt, Artificial Sequence
  Description of Artificial Sequence: Synthetic oligonucleotide
  Sense strand starting at position 3976 of SEQ ID NO: 318555
uugugauuacaagauuccu

SEQ ID NO: 571652 - RNA, 19 nt, Artificial Sequence
  Description of Artificial Sequence: Synthetic oligonucleotide
  Antisense strand to SEQ ID NO: 571651
aggaaucuuguaaucacaa

SEQ ID NO: 571653 - RNA, 19 nt, Artificial Sequence
  Description of Artificial Sequence: Synthetic oligonucleotide
  Sense strand starting at position 81 of SEQ ID NO: 318556
guggucauuccaggaaaca

SEQ ID NO: 571654 - RNA, 19 nt, Artificial Sequence
  Description of Artificial Sequence: Synthetic oligonucleotide
  Antisense strand to SEQ ID NO: 571653
uguuuccuggaaugaccac

SEQ ID NO: 571655 - RNA, 19 nt, Artificial Sequence
  Description of Artificial Sequence: Synthetic oligonucleotide
  Sense strand starting at position 121 of SEQ ID NO: 318556
uuugacauauccuuaguau

SEQ ID NO: 571656 - RNA, 19 nt, Artificial Sequence
  Description of Artificial Sequence: Synthetic oligonucleotide
  Antisense strand to SEQ ID NO: 571655
auacuaaggauaugucaaa

SEQ ID NO: 571657 - RNA, 19 nt, Artificial Sequence
  Description of Artificial Sequence: Synthetic oligonucleotide
  Sense strand starting at position 122 of SEQ ID NO: 318556
uugacauauccuuaguauu

SEQ ID NO: 571658 - RNA, 19 nt, Artificial Sequence
  Description of Artificial Sequence: Synthetic oligonucleotide
  Antisense strand to SEQ ID NO: 571657
aauacuaaggauaugucaa

SEQ ID NO: 571659 - RNA, 19 nt, Artificial Sequence
  Description of Artificial Sequence: Synthetic oligonucleotide
  Sense strand starting at position 269 of SEQ ID NO: 318556
augacaucgcauuaauaug

SEQ ID NO: 571660 - RNA, 19 nt, Artificial Sequence
  Description of Artificial Sequence: Synthetic oligonucleotide
  Antisense strand to SEQ ID NO: 571659
cauauuaaugcgaugucau

SEQ ID NO: 571661 - RNA, 19 nt, Artificial Sequence
  Description of Artificial Sequence: Synthetic oligonucleotide
  Sense strand starting at position 335 of SEQ ID NO: 318556
aggaccucuguuggaauaa

SEQ ID NO: 571662 - RNA, 19 nt, Artificial Sequence
  Description of Artificial Sequence: Synthetic oligonucleotide
  Antisense strand to SEQ ID NO: 571661
uuauuccaacagagguccu

SEQ ID NO: 571663 - RNA, 19 nt, Artificial Sequence
  Description of Artificial Sequence: Synthetic oligonucleotide
  Sense strand starting at position 442 of SEQ ID NO: 318556
aggauuaugugacuugagu

SEQ ID NO: 571664 - RNA, 19 nt, Artificial Sequence
  Description of Artificial Sequence: Synthetic oligonucleotide
  Antisense strand to SEQ ID NO: 571663
acucaagucacauaauccu

SEQ ID NO: 571665 - RNA, 19 nt, Artificial Sequence
  Description of Artificial Sequence: Synthetic oligonucleotide
  Sense strand starting at position 444 of SEQ ID NO: 318556
gauuaugugacuugaguga

SEQ ID NO: 571666 - RNA, 19 nt, Artificial Sequence
  Description of Artificial Sequence: Synthetic oligonucleotide
  Antisense strand to SEQ ID NO: 571665
ucacucaagucacauaauc

SEQ ID NO: 571667 - RNA, 19 nt, Artificial Sequence
  Description of Artificial Sequence: Synthetic oligonucleotide
  Sense strand starting at position 648 of SEQ ID NO: 318556
gguguuauuagugacccaa

SEQ ID NO: 571668 - RNA, 19 nt, Artificial Sequence
  Description of Artificial Sequence: Synthetic oligonucleotide
  Antisense strand to SEQ ID NO: 571667
uugggucacuaauaacacc

SEQ ID NO: 571669 - RNA, 19 nt, Artificial Sequence
  Description of Artificial Sequence: Synthetic oligonucleotide
  Sense strand starting at position 703 of SEQ ID NO: 318556
ugaguucuacuguacacau

SEQ ID NO: 571670 - RNA, 19 nt, Artificial Sequence
  Description of Artificial Sequence: Synthetic oligonucleotide
  Antisense strand to SEQ ID NO: 571669
auguguacaguagaacuca

SEQ ID NO: 571671 - RNA, 19 nt, Artificial Sequence
  Description of Artificial Sequence: Synthetic oligonucleotide
  Sense strand starting at position 718 of SEQ ID NO: 318556
acaucugagagacgguuua

SEQ ID NO: 571672 - RNA, 19 nt, Artificial Sequence
  Description of Artificial Sequence: Synthetic oligonucleotide
  Antisense strand to SEQ ID NO: 571671
uaaaccgucucucagaugu

SEQ ID NO: 571673 - RNA, 19 nt, Artificial Sequence
  Description of Artificial Sequence: Synthetic oligonucleotide
  Sense strand starting at position 731 of SEQ ID NO: 318556
gguuuaaauucuguacaau

SEQ ID NO: 571674 - RNA, 19 nt, Artificial Sequence
  Description of Artificial Sequence: Synthetic oligonucleotide
  Antisense strand to SEQ ID NO: 571673
auuguacagaauuuaaacc

SEQ ID NO: 571675 - RNA, 19 nt, Artificial Sequence
  Description of Artificial Sequence: Synthetic oligonucleotide
  Sense strand starting at position 745 of SEQ ID NO: 318556
acaauuggcuaguuggaaa

SEQ ID NO: 571676 - RNA, 19 nt, Artificial Sequence
  Description of Artificial Sequence: Synthetic oligonucleotide
  Antisense strand to SEQ ID NO: 571675
uuuccaacuagccaauugu

SEQ ID NO: 571677 - RNA, 19 nt, Artificial Sequence
  Description of Artificial Sequence: Synthetic oligonucleotide
  Sense strand starting at position 898 of SEQ ID NO: 318556
auacguuucuuccucauuu

SEQ ID NO: 571678 - RNA, 19 nt, Artificial Sequence
  Description of Artificial Sequence: Synthetic oligonucleotide
  Antisense strand to SEQ ID NO: 571677
aaaugaggaagaaacguau

SEQ ID NO: 571679 - RNA, 19 nt, Artificial Sequence
  Description of Artificial Sequence: Synthetic oligonucleotide
  Sense strand starting at position 929 of SEQ ID NO: 318556
gcaaaugcccuguaagaaa

SEQ ID NO: 571680 - RNA, 19 nt, Artificial Sequence
  Description of Artificial Sequence: Synthetic oligonucleotide
  Antisense strand to SEQ ID NO: 571679
uuucuuacagggcauuugc

SEQ ID NO: 571681 - RNA, 19 nt, Artificial Sequence
  Description of Artificial Sequence: Synthetic oligonucleotide
  Sense strand starting at position 1057 of SEQ ID NO: 318556
cagcguauccguuccuaga

SEQ ID NO: 571682 - RNA, 19 nt, Artificial Sequence
  Description of Artificial Sequence: Synthetic oligonucleotide
  Antisense strand to SEQ ID NO: 571681
ucuaggaacggauacgcug

SEQ ID NO: 571683 - RNA, 19 nt, Artificial Sequence
  Description of Artificial Sequence: Synthetic oligonucleotide
  Sense strand starting at position 1058 of SEQ ID NO: 318556
agcguauccguuccuagau

SEQ ID NO: 571684 - RNA, 19 nt, Artificial Sequence
  Description of Artificial Sequence: Synthetic oligonucleotide
  Antisense strand to SEQ ID NO: 571683
aucuaggaacggauacgcu

SEQ ID NO: 571685 - RNA, 19 nt, Artificial Sequence
  Description of Artificial Sequence: Synthetic oligonucleotide
  Sense strand starting at position 1335 of SEQ ID NO: 318556
ugccuaauacguuaaauau

SEQ ID NO: 571686 - RNA, 19 nt, Artificial Sequence
  Description of Artificial Sequence: Synthetic oligonucleotide
  Antisense strand to SEQ ID NO: 571685
auauuuaacguauuaggca

SEQ ID NO: 571687 - RNA, 19 nt, Artificial Sequence
  Description of Artificial Sequence: Synthetic oligonucleotide
  Sense strand starting at position 1437 of SEQ ID NO: 318556
cccaguagcgaauaaacaa

SEQ ID NO: 571688 - RNA, 19 nt, Artificial Sequence
  Description of Artificial Sequence: Synthetic oligonucleotide
  Antisense strand to SEQ ID NO: 571687
uuguuuauucgcuacuggg

SEQ ID NO: 571689 - RNA, 19 nt, Artificial Sequence
  Description of Artificial Sequence: Synthetic oligonucleotide
  Sense strand starting at position 2409 of SEQ ID NO: 318556
aaguguuuggcugagggaa

SEQ ID NO: 571690 - RNA, 19 nt, Artificial Sequence
  Description of Artificial Sequence: Synthetic oligonucleotide
  Antisense strand to SEQ ID NO: 571689
uucccucagccaaacacuu

SEQ ID NO: 571691 - RNA, 19 nt, Artificial Sequence
  Description of Artificial Sequence: Synthetic oligonucleotide
  Sense strand starting at position 2559 of SEQ ID NO: 318556
cucucuucugguuggacaa

SEQ ID NO: 571692 - RNA, 19 nt, Artificial Sequence
  Description of Artificial Sequence: Synthetic oligonucleotide
  Antisense strand to SEQ ID NO: 571691
uuguccaaccagaagagag

SEQ ID NO: 571693 - RNA, 19 nt, Artificial Sequence
  Description of Artificial Sequence: Synthetic oligonucleotide
  Sense strand starting at position 2560 of SEQ ID NO: 318556
ucucuucugguuggacaau

SEQ ID NO: 571694 - RNA, 19 nt, Artificial Sequence
  Description of Artificial Sequence: Synthetic oligonucleotide
  Antisense strand to SEQ ID NO: 571693
auuguccaaccagaagaga

SEQ ID NO: 571695 - RNA, 19 nt, Artificial Sequence
  Description of Artificial Sequence: Synthetic oligonucleotide
  Sense strand starting at position 2577 of SEQ ID NO: 318556
auaguuacauccuuacgaa

SEQ ID NO: 571696 - RNA, 19 nt, Artificial Sequence
  Description of Artificial Sequence: Synthetic oligonucleotide
  Antisense strand to SEQ ID NO: 571695
uucguaaggauguaacuau

SEQ ID NO: 571697 - RNA, 19 nt, Artificial Sequence
  Description of Artificial Sequence: Synthetic oligonucleotide
  Sense strand starting at position 2634 of SEQ ID NO: 318556
ccuuguuaccaagggacau

SEQ ID NO: 571698 - RNA, 19 nt, Artificial Sequence
  Description of Artificial Sequence: Synthetic oligonucleotide
  Antisense strand to SEQ ID NO: 571697
augucccuugguaacaagg

SEQ ID NO: 571699 - RNA, 19 nt, Artificial Sequence
  Description of Artificial Sequence: Synthetic oligonucleotide
  Sense strand starting at position 2776 of SEQ ID NO: 318556
ggcauagaguucccauaga

SEQ ID NO: 571700 - RNA, 19 nt, Artificial Sequence
  Description of Artificial Sequence: Synthetic oligonucleotide
  Antisense strand to SEQ ID NO: 571699
ucuaugggaacucuaugcc

SEQ ID NO: 571701 - RNA, 19 nt, Artificial Sequence
  Description of Artificial Sequence: Synthetic oligonucleotide
  Sense strand starting at position 2842 of SEQ ID NO: 318556
ugcagaaagggugaguuaa

SEQ ID NO: 571702 - RNA, 19 nt, Artificial Sequence
  Description of Artificial Sequence: Synthetic oligonucleotide
  Antisense strand to SEQ ID NO: 571701
uuaacucacccuuucugca

SEQ ID NO: 571703 - RNA, 19 nt, Artificial Sequence
  Description of Artificial Sequence: Synthetic oligonucleotide
  Sense strand starting at position 2884 of SEQ ID NO: 318556
cugaaagauuagcuaaucu

SEQ ID NO: 571704 - RNA, 19 nt, Artificial Sequence
  Description of Artificial Sequence: Synthetic oligonucleotide
  Antisense strand to SEQ ID NO: 571703
agauuagcuaaucuuucag

SEQ ID NO: 571705 - RNA, 19 nt, Artificial Sequence
  Description of Artificial Sequence: Synthetic oligonucleotide
  Sense strand starting at position 2888 of SEQ ID NO: 318556
aagauuagcuaaucugguu

SEQ ID NO: 571706 - RNA, 19 nt, Artificial Sequence
  Description of Artificial Sequence: Synthetic oligonucleotide
  Antisense strand to SEQ ID NO: 571705
aaccagauuagcuaaucuu

SEQ ID NO: 571707 - RNA, 19 nt, Artificial Sequence
  Description of Artificial Sequence: Synthetic oligonucleotide
  Sense strand starting at position 2905 of SEQ ID NO: 318556
uuugguuggugaccaaauu

SEQ ID NO: 571708 - RNA, 19 nt, Artificial Sequence
  Description of Artificial Sequence: Synthetic oligonucleotide
  Antisense strand to SEQ ID NO: 571707
aauuuggucaccaaccaaa

SEQ ID NO: 571709 - RNA, 19 nt, Artificial Sequence
  Description of Artificial Sequence: Synthetic oligonucleotide
  Sense strand starting at position 2924 of SEQ ID NO: 318556
uugugauugcuugcacugu

SEQ ID NO: 571710 - RNA, 19 nt, Artificial Sequence
  Description of Artificial Sequence: Synthetic oligonucleotide
  Antisense strand to SEQ ID NO: 571709
acagugcaagcaaucacaa

SEQ ID NO: 571711 - RNA, 19 nt, Artificial Sequence
  Description of Artificial Sequence: Synthetic oligonucleotide
  Sense strand starting at position 3031 of SEQ ID NO: 318556
guuuaacuaguuuagguaa

SEQ ID NO: 571712 - RNA, 19 nt, Artificial Sequence
  Description of Artificial Sequence: Synthetic oligonucleotide
  Antisense strand to SEQ ID NO: 571711
uuaccuaaacuaguuaaac

SEQ ID NO: 571713 - RNA, 19 nt, Artificial Sequence
  Description of Artificial Sequence: Synthetic oligonucleotide
  Sense strand starting at position 3060 of SEQ ID NO: 318556
acuguuauuuaccagggaa

SEQ ID NO: 571714 - RNA, 19 nt, Artificial Sequence
  Description of Artificial Sequence: Synthetic oligonucleotide
  Antisense strand to SEQ ID NO: 571713
uucccugguaaauaacagu

SEQ ID NO: 571715 - RNA, 19 nt, Artificial Sequence
  Description of Artificial Sequence: Synthetic oligonucleotide
  Sense strand starting at position 3256 of SEQ ID NO: 318556
uagacucagucacuggauu

SEQ ID NO: 571716 - RNA, 19 nt, Artificial Sequence
  Description of Artificial Sequence: Synthetic oligonucleotide
  Antisense strand to SEQ ID NO: 571715
aauccagugacugagucua

SEQ ID NO: 571717 - RNA, 19 nt, Artificial Sequence
  Description of Artificial Sequence: Synthetic oligonucleotide
  Sense strand starting at position 3268 of SEQ ID NO: 318556
cuggauugugugcacugaa

SEQ ID NO: 571718 - RNA, 19 nt, Artificial Sequence
  Description of Artificial Sequence: Synthetic oligonucleotide
  Antisense strand to SEQ ID NO: 571717
uucagugcacacaauccag

SEQ ID NO: 571719 - RNA, 19 nt, Artificial Sequence
  Description of Artificial Sequence: Synthetic oligonucleotide
  Sense strand starting at position 3343 of SEQ ID NO: 318556
gugggcagaauguauuauu

SEQ ID NO: 571720 - RNA, 19 nt, Artificial Sequence
  Description of Artificial Sequence: Synthetic oligonucleotide
  Antisense strand to SEQ ID NO: 571719
aauaauacauucugcccac

SEQ ID NO: 571721 - RNA, 19 nt, Artificial Sequence
  Description of Artificial Sequence: Synthetic oligonucleotide
  Sense strand starting at position 3625 of SEQ ID NO: 318556
gagugagcauuuccgucua

SEQ ID NO: 571722 - RNA, 19 nt, Artificial Sequence
  Description of Artificial Sequence: Synthetic oligonucleotide
  Antisense strand to SEQ ID NO: 571721
uagacggaaaugcucacuc

SEQ ID NO: 571723 - RNA, 19 nt, Artificial Sequence
  Description of Artificial Sequence: Synthetic oligonucleotide
  Sense strand starting at position 3627 of SEQ ID NO: 318556
gugagcauuuccgucuaag

SEQ ID NO: 571724 - RNA, 19 nt, Artificial Sequence
  Description of Artificial Sequence: Synthetic oligonucleotide
  Antisense strand to SEQ ID NO: 571723
cuuagacggaaaugcucac

SEQ ID NO: 571725 - RNA, 19 nt, Artificial Sequence
  Description of Artificial Sequence: Synthetic oligonucleotide
  Sense strand starting at position 3630 of SEQ ID NO: 318556
agcauuuccgucuaaguuc

SEQ ID NO: 571726 - RNA, 19 nt, Artificial Sequence
  Description of Artificial Sequence: Synthetic oligonucleotide
  Antisense strand to SEQ ID NO: 571725
gaacuuagacggaaaugcu

SEQ ID NO: 571727 - RNA, 19 nt, Artificial Sequence
  Description of Artificial Sequence: Synthetic oligonucleotide
  Sense strand starting at position 3671 of SEQ ID NO: 318556
aucauuagauucucauggu

SEQ ID NO: 571728 - RNA, 19 nt, Artificial Sequence
  Description of Artificial Sequence: Synthetic oligonucleotide
  Antisense strand to SEQ ID NO: 571727
accaugagaaucuaaugau

SEQ ID NO: 571729 - RNA, 19 nt, Artificial Sequence
  Description of Artificial Sequence: Synthetic oligonucleotide
  Sense strand starting at position 3840 of SEQ ID NO: 318556
ccuggaugccauuaagguu

SEQ ID NO: 571730 - RNA, 19 nt, Artificial Sequence
  Description of Artificial Sequence: Synthetic oligonucleotide
  Antisense strand to SEQ ID NO: 571729
aaccuuaauggcauccagg

SEQ ID NO: 571731 - RNA, 19 nt, Artificial Sequence
  Description of Artificial Sequence: Synthetic oligonucleotide
  Sense strand starting at position 3847 of SEQ ID NO: 318556
gccauuaagguuggagacu

SEQ ID NO: 571732 - RNA, 19 nt, Artificial Sequence
  Description of Artificial Sequence: Synthetic oligonucleotide
  Antisense strand to SEQ ID NO: 571731
agucuccaaccuuaauggc

SEQ ID NO: 571733 - RNA, 19 nt, Artificial Sequence
  Description of Artificial Sequence: Synthetic oligonucleotide
  Sense strand starting at position 130 of SEQ ID NO: 318557
cccucagugcuagaaaugu

SEQ ID NO: 571734 - RNA, 19 nt, Artificial Sequence
  Description of Artificial Sequence: Synthetic oligonucleotide
  Antisense strand to SEQ ID NO: 571733
acauuucuagcacugaggg

SEQ ID NO: 571735 - RNA, 19 nt, Artificial Sequence
  Description of Artificial Sequence: Synthetic oligonucleotide
  Sense strand starting at position 141 of SEQ ID NO: 318557
agaaauguuccauaguuug

SEQ ID NO: 571736 - RNA, 19 nt, Artificial Sequence
  Description of Artificial Sequence: Synthetic oligonucleotide
  Antisense strand to SEQ ID NO: 571735
caaacuauggaacauuucu

SEQ ID NO: 571737 - RNA, 19 nt, Artificial Sequence
  Description of Artificial Sequence: Synthetic oligonucleotide
  Sense strand starting at position 338 of SEQ ID NO: 318557
guccucuaucaauguauuu

SEQ ID NO: 571738 - RNA, 19 nt, Artificial Sequence
  Description of Artificial Sequence: Synthetic oligonucleotide
  Antisense strand to SEQ ID NO: 571737
aaauacauugauagaggac

SEQ ID NO: 571739 - RNA, 19 nt, Artificial Sequence
  Description of Artificial Sequence: Synthetic oligonucleotide
  Sense strand starting at position 440 of SEQ ID NO: 318557
gauugaguuugaguccuuu

SEQ ID NO: 571740 - RNA, 19 nt, Artificial Sequence
  Description of Artificial Sequence: Synthetic oligonucleotide
  Antisense strand to SEQ ID NO: 571739
aaaggacucaaacucaauc

SEQ ID NO: 571741 - RNA, 19 nt, Artificial Sequence
  Description of Artificial Sequence: Synthetic oligonucleotide
  Sense strand starting at position 899 of SEQ ID NO: 318557
ugggaaaugcugugguaaa

SEQ ID NO: 571742 - RNA, 19 nt, Artificial Sequence
  Description of Artificial Sequence: Synthetic oligonucleotide
  Antisense strand to SEQ ID NO: 571741
uuuaccacagcauuuccca

SEQ ID NO: 571743 - RNA, 19 nt, Artificial Sequence
  Description of Artificial Sequence: Synthetic oligonucleotide
  Sense strand starting at position 1067 of SEQ ID NO: 318557
gggucuggugucuauggaa

SEQ ID NO: 571744 - RNA, 19 nt, Artificial Sequence
  Description of Artificial Sequence: Synthetic oligonucleotide
  Antisense strand to SEQ ID NO: 571743
uuccauagacaccagaccc

SEQ ID NO: 571745 - RNA, 19 nt, Artificial Sequence
  Description of Artificial Sequence: Synthetic oligonucleotide
  Sense strand starting at position 1108 of SEQ ID NO: 318557
caugaugggugcccaugaa

SEQ ID NO: 571746 - RNA, 19 nt, Artificial Sequence
  Description of Artificial Sequence: Synthetic oligonucleotide
  Antisense strand to SEQ ID NO: 571745
uucaugggcacccaucaug

SEQ ID NO: 571747 - RNA, 19 nt, Artificial Sequence
  Description of Artificial Sequence: Synthetic oligonucleotide
  Sense strand starting at position 1282 of SEQ ID NO: 318557
agaauaaacccuugcucag

SEQ ID NO: 571748 - RNA, 19 nt, Artificial Sequence
  Description of Artificial Sequence: Synthetic oligonucleotide
  Antisense strand to SEQ ID NO: 571747
cugagcaaggguuuauucu

SEQ ID NO: 571749 - RNA, 19 nt, Artificial Sequence
  Description of Artificial Sequence: Synthetic oligonucleotide
  Sense strand starting at position 1340 of SEQ ID NO: 318557
aaaucagauggauguguuu

SEQ ID NO: 571750 - RNA, 19 nt, Artificial Sequence
  Description of Artificial Sequence: Synthetic oligonucleotide
  Antisense strand to SEQ ID NO: 571749
aaacacauccaucugauuu

SEQ ID NO: 571751 - RNA, 19 nt, Artificial Sequence
  Description of Artificial Sequence: Synthetic oligonucleotide
  Sense strand starting at position 1397 of SEQ ID NO: 318557
cuuucugggccucagauua

SEQ ID NO: 571752 - RNA, 19 nt, Artificial Sequence
  Description of Artificial Sequence: Synthetic oligonucleotide
  Antisense strand to SEQ ID NO: 571751
uaaucugaggcccagaaag

SEQ ID NO: 571753 - RNA, 19 nt, Artificial Sequence
  Description of Artificial Sequence: Synthetic oligonucleotide
  Sense strand starting at position 1411 of SEQ ID NO: 318557
gauuacccucugugaacga

SEQ ID NO: 571754 - RNA, 19 nt, Artificial Sequence
  Description of Artificial Sequence: Synthetic oligonucleotide
  Antisense strand to SEQ ID NO: 571753
ucguucacagaggguaauc

SEQ ID NO: 571755 - RNA, 19 nt, Artificial Sequence
  Description of Artificial Sequence: Synthetic oligonucleotide
  Sense strand starting at position 1418 of SEQ ID NO: 318557
cucugugaacgagguugau

SEQ ID NO: 571756 - RNA, 19 nt, Artificial Sequence
  Description of Artificial Sequence: Synthetic oligonucleotide
  Antisense strand to SEQ ID NO: 571755
aucaaccucguucacagag

SEQ ID NO: 571757 - RNA, 19 nt, Artificial Sequence
  Description of Artificial Sequence: Synthetic oligonucleotide
  Sense strand starting at position 1567 of SEQ ID NO: 318557
ucaggaguauuaucaguuc

SEQ ID NO: 571758 - RNA, 19 nt, Artificial Sequence
  Description of Artificial Sequence: Synthetic oligonucleotide
  Antisense strand to SEQ ID NO: 571757
gaacugauaauacuccuga

SEQ ID NO: 571759 - RNA, 19 nt, Artificial Sequence
  Description of Artificial Sequence: Synthetic oligonucleotide
  Sense strand starting at position 1634 of SEQ ID NO: 318557
agggauucagcagggaacu

SEQ ID NO: 571760 - RNA, 19 nt, Artificial Sequence
  Description of Artificial Sequence: Synthetic oligonucleotide
  Antisense strand to SEQ ID NO: 571759
aguucccugcugaaucccu

SEQ ID NO: 571761 - RNA, 19 nt, Artificial Sequence
  Description of Artificial Sequence: Synthetic oligonucleotide
  Sense strand starting at position 1635 of SEQ ID NO: 318557
gggauucagcagggaacua

SEQ ID NO: 571762 - RNA, 19 nt, Artificial Sequence
  Description of Artificial Sequence: Synthetic oligonucleotide
  Antisense strand to SEQ ID NO: 571761
uaguucccugcugaauccc

SEQ ID NO: 571763 - RNA, 19 nt, Artificial Sequence
  Description of Artificial Sequence: Synthetic oligonucleotide
  Sense strand starting at position 1663 of SEQ ID NO: 318557
cccaguccuccuggaacau

SEQ ID NO: 571764 - RNA, 19 nt, Artificial Sequence
  Description of Artificial Sequence: Synthetic oligonucleotide
  Antisense strand to SEQ ID NO: 571763
auguuccaggaggacuggg

SEQ ID NO: 571765 - RNA, 19 nt, Artificial Sequence
  Description of Artificial Sequence: Synthetic oligonucleotide
  Sense strand starting at position 1664 of SEQ ID NO: 318557
ccaguccuccuggaacaua

SEQ ID NO: 571766 - RNA, 19 nt, Artificial Sequence
  Description of Artificial Sequence: Synthetic oligonucleotide
  Antisense strand to SEQ ID NO: 571765
uauguuccaggaggacugg

SEQ ID NO: 571767 - RNA, 19 nt, Artificial Sequence
  Description of Artificial Sequence: Synthetic oligonucleotide
  Sense strand starting at position 1707 of SEQ ID NO: 318557
uuaauaagacagugucagu

SEQ ID NO: 571768 - RNA, 19 nt, Artificial Sequence
  Description of Artificial Sequence: Synthetic oligonucleotide
  Antisense strand to SEQ ID NO: 571767
acugacacugucuuauuaa

SEQ ID NO: 571769 - RNA, 19 nt, Artificial Sequence
  Description of Artificial Sequence: Synthetic oligonucleotide
  Sense strand starting at position 1787 of SEQ ID NO: 318557
gacgguuggguccaagauu

SEQ ID NO: 571770 - RNA, 19 nt, Artificial Sequence
  Description of Artificial Sequence: Synthetic oligonucleotide
  Antisense strand to SEQ ID NO: 571769
aaucuuggacccaaccguc

SEQ ID NO: 571771 - RNA, 19 nt, Artificial Sequence
  Description of Artificial Sequence: Synthetic oligonucleotide
  Sense strand starting at position 2079 of SEQ ID NO: 318557
ccaggcauccugcaaacau

SEQ ID NO: 571772 - RNA, 19 nt, Artificial Sequence
  Description of Artificial Sequence: Synthetic oligonucleotide
  Antisense strand to SEQ ID NO: 571771
auguuugcaggaugccugg

SEQ ID NO: 571773 - RNA, 19 nt, Artificial Sequence
  Description of Artificial Sequence: Synthetic oligonucleotide
  Sense strand starting at position 2089 of SEQ ID NO: 318557
ugcaaacauugaguucuga

SEQ ID NO: 571774 - RNA, 19 nt, Artificial Sequence
  Description of Artificial Sequence: Synthetic oligonucleotide
  Antisense strand to SEQ ID NO: 571773
ucagaacucaauguuugca

SEQ ID NO: 571775 - RNA, 19 nt, Artificial Sequence
  Description of Artificial Sequence: Synthetic oligonucleotide
  Sense strand starting at position 2555 of SEQ ID NO: 318557
cuguguacccucuaugaau

SEQ ID NO: 571776 - RNA, 19 nt, Artificial Sequence
  Description of Artificial Sequence: Synthetic oligonucleotide
  Antisense strand to SEQ ID NO: 571775
auucauagaggguacacag

SEQ ID NO: 571777 - RNA, 19 nt, Artificial Sequence
  Description of Artificial Sequence: Synthetic oligonucleotide
  Sense strand starting at position 2737 of SEQ ID NO: 318557
uagguuugcuuacuuagga

SEQ ID NO: 571778 - RNA, 19 nt, Artificial Sequence
  Description of Artificial Sequence: Synthetic oligonucleotide
  Antisense strand to SEQ ID NO: 571777
uccuaaguaagcaaaccua

SEQ ID NO: 571779 - RNA, 19 nt, Artificial Sequence
  Description of Artificial Sequence: Synthetic oligonucleotide
  Sense strand starting at position 2744 of SEQ ID NO: 318557
gcuuacuuaggacaauagu

SEQ ID NO: 571780 - RNA, 19 nt, Artificial Sequence
  Description of Artificial Sequence: Synthetic oligonucleotide
  Antisense strand to SEQ ID NO: 571779
acuauuguccuaaguaagc

SEQ ID NO: 571781 - RNA, 19 nt, Artificial Sequence
  Description of Artificial Sequence: Synthetic oligonucleotide
  Sense strand starting at position 2796 of SEQ ID NO: 318557
cuuugugcugcuucgugau

SEQ ID NO: 571782 - RNA, 19 nt, Artificial Sequence
  Description of Artificial Sequence: Synthetic oligonucleotide
  Antisense strand to SEQ ID NO: 571781
aucacgaagcagcacaaag

SEQ ID NO: 571783 - RNA, 19 nt, Artificial Sequence
  Description of Artificial Sequence: Synthetic oligonucleotide
  Sense strand starting at position 2963 of SEQ ID NO: 318557
auaguauaauucccuggaa

SEQ ID NO: 571784 - RNA, 19 nt, Artificial Sequence
  Description of Artificial Sequence: Synthetic oligonucleotide
  Antisense strand to SEQ ID NO: 571783
uuccagggaauuauacuau

SEQ ID NO: 571785 - RNA, 19 nt, Artificial Sequence
  Description of Artificial Sequence: Synthetic oligonucleotide
  Sense strand starting at position 3044 of SEQ ID NO: 318557
ugauauguguaugccauaa

SEQ ID NO: 571786 - RNA, 19 nt, Artificial Sequence
  Description of Artificial Sequence: Synthetic oligonucleotide
  Antisense strand to SEQ ID NO: 571785
uuauggcauacacauauca

SEQ ID NO: 571787 - RNA, 19 nt, Artificial Sequence
  Description of Artificial Sequence: Synthetic oligonucleotide
  Sense strand starting at position 3048 of SEQ ID NO: 318557
auguguaugccauaaugaa

SEQ ID NO: 571788 - RNA, 19 nt, Artificial Sequence
  Description of Artificial Sequence: Synthetic oligonucleotide
  Antisense strand to SEQ ID NO: 571787
uucauuauggcauacacau

SEQ ID NO: 571789 - RNA, 19 nt, Artificial Sequence
  Description of Artificial Sequence: Synthetic oligonucleotide
  Sense strand starting at position 3112 of SEQ ID NO: 318557
gacucuugcgaguaaaggu

SEQ ID NO: 571790 - RNA, 19 nt, Artificial Sequence
  Description of Artificial Sequence: Synthetic oligonucleotide
  Antisense strand to SEQ ID NO: 571789
accuuuacucgcaagaguc

SEQ ID NO: 571791 - RNA, 19 nt, Artificial Sequence
  Description of Artificial Sequence: Synthetic oligonucleotide
  Sense strand starting at position 3119 of SEQ ID NO: 318557
gcgaguaaaggugauauga

SEQ ID NO: 571792 - RNA, 19 nt, Artificial Sequence
  Description of Artificial Sequence: Synthetic oligonucleotide
  Antisense strand to SEQ ID NO: 571791
ucauaucaccuuuacucgc

SEQ ID NO: 571793 - RNA, 19 nt, Artificial Sequence
  Description of Artificial Sequence: Synthetic oligonucleotide
  Sense strand starting at position 3127 of SEQ ID NO: 318557
aggugauaugaacaugcuu

SEQ ID NO: 571794 - RNA, 19 nt, Artificial Sequence
  Description of Artificial Sequence: Synthetic oligonucleotide
  Antisense strand to SEQ ID NO: 571793
aagcauguucauaucaccu

SEQ ID NO: 571795 - RNA, 19 nt, Artificial Sequence
  Description of Artificial Sequence: Synthetic oligonucleotide
  Sense strand starting at position 3132 of SEQ ID NO: 318557
auaugaacaugcuuguaca

SEQ ID NO: 571796 - RNA, 19 nt, Artificial Sequence
  Description of Artificial Sequence: Synthetic oligonucleotide
  Antisense strand to SEQ ID NO: 571795
uguacaagcauguucauau

SEQ ID NO: 571797 - RNA, 19 nt, Artificial Sequence
  Description of Artificial Sequence: Synthetic oligonucleotide
  Sense strand starting at position 3218 of SEQ ID NO: 318557
agcaucauggcaugauagu

SEQ ID NO: 571798 - RNA, 19 nt, Artificial Sequence
  Description of Artificial Sequence: Synthetic oligonucleotide
  Antisense strand to SEQ ID NO: 571797
acuaucaugccaugaugcu

SEQ ID NO: 571799 - RNA, 19 nt, Artificial Sequence
  Description of Artificial Sequence: Synthetic oligonucleotide
  Sense strand starting at position 3219 of SEQ ID NO: 318557
gcaucauggcaugauaguu

SEQ ID NO: 571800 - RNA, 19 nt, Artificial Sequence
  Description of Artificial Sequence: Synthetic oligonucleotide
  Antisense strand to SEQ ID NO: 571799
aacuaucaugccaugaugc

SEQ ID NO: 571801 - RNA, 19 nt, Artificial Sequence
  Description of Artificial Sequence: Synthetic oligonucleotide
  Sense strand starting at position 3282 of SEQ ID NO: 318557
guacauucucauuaacagu

SEQ ID NO: 571802 - RNA, 19 nt, Artificial Sequence
  Description of Artificial Sequence: Synthetic oligonucleotide
  Antisense strand to SEQ ID NO: 571801
acuguuaaugagaauguac

SEQ ID NO: 571803 - RNA, 19 nt, Artificial Sequence
  Description of Artificial Sequence: Synthetic oligonucleotide
  Sense strand starting at position 3290 of SEQ ID NO: 318557
ucauuaacaguguaugagu

SEQ ID NO: 571804 - RNA, 19 nt, Artificial Sequence
  Description of Artificial Sequence: Synthetic oligonucleotide
  Antisense strand to SEQ ID NO: 571803
acucauacacuguuaauga

SEQ ID NO: 571805 - RNA, 19 nt, Artificial Sequence
  Description of Artificial Sequence: Synthetic oligonucleotide
  Sense strand starting at position 3299 of SEQ ID NO: 318557
guguaugagugauuugguu

SEQ ID NO: 571806 - RNA, 19 nt, Artificial Sequence
  Description of Artificial Sequence: Synthetic oligonucleotide
  Antisense strand to SEQ ID NO: 571805
aaccaaaucacucauacac

SEQ ID NO: 571807 - RNA, 19 nt, Artificial Sequence
  Description of Artificial Sequence: Synthetic oligonucleotide
  Sense strand starting at position 3307 of SEQ ID NO: 318557
gugauuugguuucuccuca

SEQ ID NO: 571808 - RNA, 19 nt, Artificial Sequence
  Description of Artificial Sequence: Synthetic oligonucleotide
  Antisense strand to SEQ ID NO: 571807
ugaggagaaaccaaaucac

SEQ ID NO: 571809 - RNA, 19 nt, Artificial Sequence
  Description of Artificial Sequence: Synthetic oligonucleotide
  Sense strand starting at position 3677 of SEQ ID NO: 318557
uuugacagguguuuaguaa

SEQ ID NO: 571810 - RNA, 19 nt, Artificial Sequence
  Description of Artificial Sequence: Synthetic oligonucleotide
  Antisense strand to SEQ ID NO: 571809
uuacuaaacaccugucaaa

SEQ ID NO: 571811 - RNA, 19 nt, Artificial Sequence
  Description of Artificial Sequence: Synthetic oligonucleotide
  Sense strand starting at position 3715 of SEQ ID NO: 318557
uguguauuucccugauagc

SEQ ID NO: 571812 - RNA, 19 nt, Artificial Sequence
  Description of Artificial Sequence: Synthetic oligonucleotide
  Antisense strand to SEQ ID NO: 571811
gcuaucagggaaauacaca

SEQ ID NO: 571813 - RNA, 19 nt, Artificial Sequence
  Description of Artificial Sequence: Synthetic oligonucleotide
  Sense strand starting at position 26 of SEQ ID NO: 318558
agugcagcugcauaaguaa

SEQ ID NO: 571814 - RNA, 19 nt, Artificial Sequence
  Description of Artificial Sequence: Synthetic oligonucleotide
  Antisense strand to SEQ ID NO: 571813
uuacuuaugcagcugcacu

SEQ ID NO: 571815 - RNA, 19 nt, Artificial Sequence
  Description of Artificial Sequence: Synthetic oligonucleotide
  Sense strand starting at position 285 of SEQ ID NO: 318558
acaacuacguccucaggaa

SEQ ID NO: 571816 - RNA, 19 nt, Artificial Sequence
  Description of Artificial Sequence: Synthetic oligonucleotide
  Antisense strand to SEQ ID NO: 571815
uuccugaggacguaguugu

SEQ ID NO: 571817 - RNA, 19 nt, Artificial Sequence
  Description of Artificial Sequence: Synthetic oligonucleotide
  Sense strand starting at position 286 of SEQ ID NO: 318558
caacuacguccucaggaaa

SEQ ID NO: 571818 - RNA, 19 nt, Artificial Sequence
  Description of Artificial Sequence: Synthetic oligonucleotide
  Antisense strand to SEQ ID NO: 571817
uuuccugaggacguaguug

SEQ ID NO: 571819 - RNA, 19 nt, Artificial Sequence
  Description of Artificial Sequence: Synthetic oligonucleotide
  Sense strand starting at position 349 of SEQ ID NO: 318558
ccaagauacuuugcucaug

SEQ ID NO: 571820 - RNA, 19 nt, Artificial Sequence
  Description of Artificial Sequence: Synthetic oligonucleotide
  Antisense strand to SEQ ID NO: 571819
caugagcaaaguaucuugg

SEQ ID NO: 571821 - RNA, 19 nt, Artificial Sequence
  Description of Artificial Sequence: Synthetic oligonucleotide
  Sense strand starting at position 379 of SEQ ID NO: 318558
uugcuuucugcacgcagaa

SEQ ID NO: 571822 - RNA, 19 nt, Artificial Sequence
  Description of Artificial Sequence: Synthetic oligonucleotide
  Antisense strand to SEQ ID NO: 571821
uucugcgugcagaaagcaa

SEQ ID NO: 571823 - RNA, 19 nt, Artificial Sequence
  Description of Artificial Sequence: Synthetic oligonucleotide
  Sense strand starting at position 644 of SEQ ID NO: 318558
gaggcuucccgagaaggca

SEQ ID NO: 571824 - RNA, 19 nt, Artificial Sequence
  Description of Artificial Sequence: Synthetic oligonucleotide
  Antisense strand to SEQ ID NO: 571823
ugccuucucgggaagccuc

SEQ ID NO: 571825 - RNA, 19 nt, Artificial Sequence
  Description of Artificial Sequence: Synthetic oligonucleotide
  Sense strand starting at position 2040 of SEQ ID NO: 318558
gccuaaauuugauauggug

SEQ ID NO: 571826 - RNA, 19 nt, Artificial Sequence
  Description of Artificial Sequence: Synthetic oligonucleotide
  Antisense strand to SEQ ID NO: 571825
caccauaucaaauuuaggc

SEQ ID NO: 571827 - RNA, 19 nt, Artificial Sequence
  Description of Artificial Sequence: Synthetic oligonucleotide
  Sense strand starting at position 2148 of SEQ ID NO: 318558
acgccaguuucuuaaggga

SEQ ID NO: 571828 - RNA, 19 nt, Artificial Sequence
  Description of Artificial Sequence: Synthetic oligonucleotide
  Antisense strand to SEQ ID NO: 571827
ucccuuaagaaacuggcgu

SEQ ID NO: 571829 - RNA, 19 nt, Artificial Sequence
  Description of Artificial Sequence: Synthetic oligonucleotide
  Sense strand starting at position 2255 of SEQ ID NO: 318558
gagauagugugggaaccua

SEQ ID NO: 571830 - RNA, 19 nt, Artificial Sequence
  Description of Artificial Sequence: Synthetic oligonucleotide
  Antisense strand to SEQ ID NO: 571829
uagguucccacacuaucuc

SEQ ID NO: 571831 - RNA, 19 nt, Artificial Sequence
  Description of Artificial Sequence: Synthetic oligonucleotide
  Sense strand starting at position 2443 of SEQ ID NO: 318558
ggaggacaaucuuaauaug

SEQ ID NO: 571832 - RNA, 19 nt, Artificial Sequence
  Description of Artificial Sequence: Synthetic oligonucleotide
  Antisense strand to SEQ ID NO: 571831
cauauuaagauuguccucc

SEQ ID NO: 571833 - RNA, 19 nt, Artificial Sequence
  Description of Artificial Sequence: Synthetic oligonucleotide
  Sense strand starting at position 2446 of SEQ ID NO: 318558
ggacaaucuuaauaugaca

SEQ ID NO: 571834 - RNA, 19 nt, Artificial Sequence
  Description of Artificial Sequence: Synthetic oligonucleotide
  Antisense strand to SEQ ID NO: 571833
ugucauauuaagauugucc

SEQ ID NO: 571835 - RNA, 19 nt, Artificial Sequence
  Description of Artificial Sequence: Synthetic oligonucleotide
  Sense strand starting at position 2489 of SEQ ID NO: 318558
gagaguuccuuugggugga

SEQ ID NO: 571836 - RNA, 19 nt, Artificial Sequence
  Description of Artificial Sequence: Synthetic oligonucleotide
  Antisense strand to SEQ ID NO: 571835
uccacccaaaggaacucuc

SEQ ID NO: 571837 - RNA, 19 nt, Artificial Sequence
  Description of Artificial Sequence: Synthetic oligonucleotide
  Sense strand starting at position 2492 of SEQ ID NO: 318558
aguuccuuuggguggacaa

SEQ ID NO: 571838 - RNA, 19 nt, Artificial Sequence
  Description of Artificial Sequence: Synthetic oligonucleotide
  Antisense strand to SEQ ID NO: 571837
uuguccacccaaaggaacu

SEQ ID NO: 571839 - RNA, 19 nt, Artificial Sequence
  Description of Artificial Sequence: Synthetic oligonucleotide
  Sense strand starting at position 2524 of SEQ ID NO: 318558
gugcccugcugugaacauu

SEQ ID NO: 571840 - RNA, 19 nt, Artificial Sequence
  Description of Artificial Sequence: Synthetic oligonucleotide
  Antisense strand to SEQ ID NO: 571839
aauguucacagcagggcac

SEQ ID NO: 571841 - RNA, 19 nt, Artificial Sequence
  Description of Artificial Sequence: Synthetic oligonucleotide
  Sense strand starting at position 2541 of SEQ ID NO: 318558
uuggcuucccucugggaca

SEQ ID NO: 571842 - RNA, 19 nt, Artificial Sequence
  Description of Artificial Sequence: Synthetic oligonucleotide
  Antisense strand to SEQ ID NO: 571841
ugucccagagggaagccaa

SEQ ID NO: 571843 - RNA, 19 nt, Artificial Sequence
  Description of Artificial Sequence: Synthetic oligonucleotide
  Sense strand starting at position 2542 of SEQ ID NO: 318558
uggcuucccucugggacaa

SEQ ID NO: 571844 - RNA, 19 nt, Artificial Sequence
  Description of Artificial Sequence: Synthetic oligonucleotide
  Antisense strand to SEQ ID NO: 571843
uugucccagagggaagcca

SEQ ID NO: 571845 - RNA, 19 nt, Artificial Sequence
  Description of Artificial Sequence: Synthetic oligonucleotide
  Sense strand starting at position 2855 of SEQ ID NO: 318558
cuuccuugguccucuauua

SEQ ID NO: 571846 - RNA, 19 nt, Artificial Sequence
  Description of Artificial Sequence: Synthetic oligonucleotide
  Antisense strand to SEQ ID NO: 571845
uaauagaggaccaaggaag

SEQ ID NO: 571847 - RNA, 19 nt, Artificial Sequence
  Description of Artificial Sequence: Synthetic oligonucleotide
  Sense strand starting at position 2917 of SEQ ID NO: 318558
guaauacucucuuagagag

SEQ ID NO: 571848 - RNA, 19 nt, Artificial Sequence
  Description of Artificial Sequence: Synthetic oligonucleotide
  Antisense strand to SEQ ID NO: 571847
cucucuaagagaguauuac

SEQ ID NO: 571849 - RNA, 19 nt, Artificial Sequence
  Description of Artificial Sequence: Synthetic oligonucleotide
  Sense strand starting at position 2966 of SEQ ID NO: 318558
gaaguuguagucuaaugac

SEQ ID NO: 571850 - RNA, 19 nt, Artificial Sequence
  Description of Artificial Sequence: Synthetic oligonucleotide
  Antisense strand to SEQ ID NO: 571849
gucauuagacuacaacuuc

SEQ ID NO: 571851 - RNA, 19 nt, Artificial Sequence
  Description of Artificial Sequence: Synthetic oligonucleotide
  Sense strand starting at position 2969 of SEQ ID NO: 318558
guuguagucuaaugacauu

SEQ ID NO: 571852 - RNA, 19 nt, Artificial Sequence
  Description of Artificial Sequence: Synthetic oligonucleotide
  Antisense strand to SEQ ID NO: 571851
aaugucauuagacuacaac

SEQ ID NO: 571853 - RNA, 19 nt, Artificial Sequence
  Description of Artificial Sequence: Synthetic oligonucleotide
  Sense strand starting at position 3348 of SEQ ID NO: 318558
ggaugcaauccauagcaaa

SEQ ID NO: 571854 - RNA, 19 nt, Artificial Sequence
  Description of Artificial Sequence: Synthetic oligonucleotide
  Antisense strand to SEQ ID NO: 571853
uuugcuauggauugcaucc

SEQ ID NO: 571855 - RNA, 19 nt, Artificial Sequence
  Description of Artificial Sequence: Synthetic oligonucleotide
  Sense strand starting at position 3447 of SEQ ID NO: 318558
ggaauaauaugacauauug

SEQ ID NO: 571856 - RNA, 19 nt, Artificial Sequence
  Description of Artificial Sequence: Synthetic oligonucleotide
  Antisense strand to SEQ ID NO: 571855
caauaugucauauuauucc

SEQ ID NO: 571857 - RNA, 19 nt, Artificial Sequence
  Description of Artificial Sequence: Synthetic oligonucleotide
  Sense strand starting at position 3491 of SEQ ID NO: 318558
ucgagucugucacccagua

SEQ ID NO: 571858 - RNA, 19 nt, Artificial Sequence
  Description of Artificial Sequence: Synthetic oligonucleotide
  Antisense strand to SEQ ID NO: 571857
uacugggugacagacucga

SEQ ID NO: 571859 - RNA, 19 nt, Artificial Sequence
  Description of Artificial Sequence: Synthetic oligonucleotide
  Sense strand starting at position 3561 of SEQ ID NO: 318558
guacaauuaugaugaguaa

SEQ ID NO: 571860 - RNA, 19 nt, Artificial Sequence
  Description of Artificial Sequence: Synthetic oligonucleotide
  Antisense strand to SEQ ID NO: 571859
uuacucaucauaauuguac

SEQ ID NO: 571861 - RNA, 19 nt, Artificial Sequence
  Description of Artificial Sequence: Synthetic oligonucleotide
  Sense strand starting at position 3615 of SEQ ID NO: 318558
auccuucuguuauaacguu

SEQ ID NO: 571862 - RNA, 19 nt, Artificial Sequence
  Description of Artificial Sequence: Synthetic oligonucleotide
  Antisense strand to SEQ ID NO: 571861
aacguuauaacagaaggau

SEQ ID NO: 571863 - RNA, 19 nt, Artificial Sequence
  Description of Artificial Sequence: Synthetic oligonucleotide
  Sense strand starting at position 3621 of SEQ ID NO: 318558
cuguuauaacguugaugag

SEQ ID NO: 571864 - RNA, 19 nt, Artificial Sequence
  Description of Artificial Sequence: Synthetic oligonucleotide
  Antisense strand to SEQ ID NO: 571863
cucaucaacguuauaacag

SEQ ID NO: 571865 - RNA, 19 nt, Artificial Sequence
  Description of Artificial Sequence: Synthetic oligonucleotide
  Sense strand starting at position 3728 of SEQ ID NO: 318558
cggucaguuuccucccaca

SEQ ID NO: 571866 - RNA, 19 nt, Artificial Sequence
  Description of Artificial Sequence: Synthetic oligonucleotide
  Antisense strand to SEQ ID NO: 571865
ugugggaggaaacugaccg

SEQ ID NO: 571867 - RNA, 19 nt, Artificial Sequence
  Description of Artificial Sequence: Synthetic oligonucleotide
  Sense strand starting at position 3748 of SEQ ID NO: 318558
cccgaagauaugcauguua

SEQ ID NO: 571868 - RNA, 19 nt, Artificial Sequence
  Description of Artificial Sequence: Synthetic oligonucleotide
  Antisense strand to SEQ ID NO: 571867
uaacaugcauaucuucggg

SEQ ID NO: 571869 - RNA, 19 nt, Artificial Sequence
  Description of Artificial Sequence: Synthetic oligonucleotide
  Sense strand starting at position 3750 of SEQ ID NO: 318558
cgaagauaugcauguuagg

SEQ ID NO: 571870 - RNA, 19 nt, Artificial Sequence
  Description of Artificial Sequence: Synthetic oligonucleotide
  Antisense strand to SEQ ID NO: 571869
ccuaacaugcauaucuucg

SEQ ID NO: 571871 - RNA, 19 nt, Artificial Sequence
  Description of Artificial Sequence: Synthetic oligonucleotide
  Sense strand starting at position 3753 of SEQ ID NO: 318558
agauaugcauguuaggcaa

SEQ ID NO: 571872 - RNA, 19 nt, Artificial Sequence
  Description of Artificial Sequence: Synthetic oligonucleotide
  Antisense strand to SEQ ID NO: 571871
uugccuaacaugcauaucu

SEQ ID NO: 571873 - RNA, 19 nt, Artificial Sequence
  Description of Artificial Sequence: Synthetic oligonucleotide
  Sense strand starting at position 3756 of SEQ ID NO: 318558
uaugcauguuaggcaaacu

SEQ ID NO: 571874 - RNA, 19 nt, Artificial Sequence
  Description of Artificial Sequence: Synthetic oligonucleotide
  Antisense strand to SEQ ID NO: 571873
aguuugccuaacaugcaua

SEQ ID NO: 571875 - RNA, 19 nt, Artificial Sequence
  Description of Artificial Sequence: Synthetic oligonucleotide
  Sense strand starting at position 3767 of SEQ ID NO: 318558
ggcaaacugcugugucuau

SEQ ID NO: 571876 - RNA, 19 nt, Artificial Sequence
  Description of Artificial Sequence: Synthetic oligonucleotide
  Antisense strand to SEQ ID NO: 571875
auagacacagcaguuugcc

SEQ ID NO: 571877 - RNA, 19 nt, Artificial Sequence
  Description of Artificial Sequence: Synthetic oligonucleotide
  Sense strand starting at position 3815 of SEQ ID NO: 318558
gggugagucugcucugcga

SEQ ID NO: 571878 - RNA, 19 nt, Artificial Sequence
  Description of Artificial Sequence: Synthetic oligonucleotide
  Antisense strand to SEQ ID NO: 571877
ucgcagagcagacucaccc

SEQ ID NO: 571879 - RNA, 19 nt, Artificial Sequence
  Description of Artificial Sequence: Synthetic oligonucleotide
  Sense strand starting at position 3817 of SEQ ID NO: 318558
gugagucugcucugcgaug

SEQ ID NO: 571880 - RNA, 19 nt, Artificial Sequence
  Description of Artificial Sequence: Synthetic oligonucleotide
  Antisense strand to SEQ ID NO: 571879
caucgcagagcagacucac

SEQ ID NO: 571881 - RNA, 19 nt, Artificial Sequence
  Description of Artificial Sequence: Synthetic oligonucleotide
  Sense strand starting at position 3962 of SEQ ID NO: 318558
cuuaaauguauguaugguu

SEQ ID NO: 571882 - RNA, 19 nt, Artificial Sequence
  Description of Artificial Sequence: Synthetic oligonucleotide
  Antisense strand to SEQ ID NO: 571881
aaccauacauacauuuaag

SEQ ID NO: 571883 - RNA, 19 nt, Artificial Sequence
  Description of Artificial Sequence: Synthetic oligonucleotide
  Sense strand starting at position 3270 of SEQ ID NO: 318559
augguaacucuguagaggu

SEQ ID NO: 571884 - RNA, 19 nt, Artificial Sequence
  Description of Artificial Sequence: Synthetic oligonucleotide
  Antisense strand to SEQ ID NO: 571883
accucuacagaguuaccau

SEQ ID NO: 571885 - RNA, 19 nt, Artificial Sequence
  Description of Artificial Sequence: Synthetic oligonucleotide
  Sense strand starting at position 3272 of SEQ ID NO: 318559
gguaacucuguagagguaa

SEQ ID NO: 571886 - RNA, 19 nt, Artificial Sequence
  Description of Artificial Sequence: Synthetic oligonucleotide
  Antisense strand to SEQ ID NO: 571885
uuaccucuacagaguuacc

SEQ ID NO: 571887 - RNA, 19 nt, Artificial Sequence
  Description of Artificial Sequence: Synthetic oligonucleotide
  Sense strand starting at position 3714 of SEQ ID NO: 318559
auuuaaaucucaugucagg

SEQ ID NO: 571888 - RNA, 19 nt, Artificial Sequence
  Description of Artificial Sequence: Synthetic oligonucleotide
  Antisense strand to SEQ ID NO: 571887
ccugacaugagauuuaaau

SEQ ID NO: 571889 - RNA, 19 nt, Artificial Sequence
  Description of Artificial Sequence: Synthetic oligonucleotide
  Sense strand starting at position 2450 of SEQ ID NO: 318560
ggcggcagauccuuaaaca

SEQ ID NO: 571890 - RNA, 19 nt, Artificial Sequence
  Description of Artificial Sequence: Synthetic oligonucleotide
  Antisense strand to SEQ ID NO: 571889
uguuuaaggaucugccgcc

SEQ ID NO: 571891 - RNA, 19 nt, Artificial Sequence
  Description of Artificial Sequence: Synthetic oligonucleotide
  Sense strand starting at position 2451 of SEQ ID NO: 318560
gcggcagauccuuaaacac

SEQ ID NO: 571892 - RNA, 19 nt, Artificial Sequence
  Description of Artificial Sequence: Synthetic oligonucleotide
  Antisense strand to SEQ ID NO: 571891
guguuuaaggaucugccgc

SEQ ID NO: 571893 - RNA, 19 nt, Artificial Sequence
  Description of Artificial Sequence: Synthetic oligonucleotide
  Sense strand starting at position 3280 of SEQ ID NO: 318560
augguaacuccguagaggu

SEQ ID NO: 571894 - RNA, 19 nt, Artificial Sequence
  Description of Artificial Sequence: Synthetic oligonucleotide
  Antisense strand to SEQ ID NO: 571893
accucuacggaguuaccau

SEQ ID NO: 571895 - RNA, 19 nt, Artificial Sequence
  Description of Artificial Sequence: Synthetic oligonucleotide
  Sense strand starting at position 3282 of SEQ ID NO: 318560
gguaacuccguagagguaa

SEQ ID NO: 571896 - RNA, 19 nt, Artificial Sequence
  Description of Artificial Sequence: Synthetic oligonucleotide
  Antisense strand to SEQ ID NO: 571895
uuaccucuacggaguuacc

SEQ ID NO: 571897 - RNA, 19 nt, Artificial Sequence
  Description of Artificial Sequence: Synthetic oligonucleotide
  Sense strand starting at position 3931 of SEQ ID NO: 318560
aacaaauuacguggacaua

SEQ ID NO: 571898 - RNA, 19 nt, Artificial Sequence
  Description of Artificial Sequence: Synthetic oligonucleotide
  Antisense strand to SEQ ID NO: 571897
uauguccacguaauuuguu

SEQ ID NO: 571899 - RNA, 19 nt, Artificial Sequence
  Description of Artificial Sequence: Synthetic oligonucleotide
  Sense strand starting at position 3270 of SEQ ID NO: 318561
augguaacucuguagaggu

SEQ ID NO: 571900 - RNA, 19 nt, Artificial Sequence
  Description of Artificial Sequence: Synthetic oligonucleotide
  Antisense strand to SEQ ID NO: 571899
accucuacagaguuaccau

SEQ ID NO: 571901 - RNA, 19 nt, Artificial Sequence
  Description of Artificial Sequence: Synthetic oligonucleotide
  Sense strand starting at position 3272 of SEQ ID NO: 318561
gguaacucuguagagguaa

SEQ ID NO: 571902 - RNA, 19 nt, Artificial Sequence
  Description of Artificial Sequence: Synthetic oligonucleotide
  Antisense strand to SEQ ID NO: 571901
uuaccucuacagaguuacc

SEQ ID NO: 571903 - RNA, 19 nt, Artificial Sequence
  Description of Artificial Sequence: Synthetic oligonucleotide
  Sense strand starting at position 3714 of SEQ ID NO: 318561
auuuaaaucucaugucagg

SEQ ID NO: 571904 - RNA, 19 nt, Artificial Sequence
  Description of Artificial Sequence: Synthetic oligonucleotide
  Antisense strand to SEQ ID NO: 571903
ccugacaugagauuuaaau

SEQ ID NO: 571905 - RNA, 19 nt, Artificial Sequence
  Description of Artificial Sequence: Synthetic oligonucleotide
  Sense strand starting at position 2450 of SEQ ID NO: 318562
ggcggcagauccuuaaaca

SEQ ID NO: 571906 - RNA, 19 nt, Artificial Sequence
  Description of Artificial Sequence: Synthetic oligonucleotide
  Antisense strand to SEQ ID NO: 571905
uguuuaaggaucugccgcc

SEQ ID NO: 571907 - RNA, 19 nt, Artificial Sequence
  Description of Artificial Sequence: Synthetic oligonucleotide
  Sense strand starting at position 2451 of SEQ ID NO: 318562
gcggcagauccuuaaacac

SEQ ID NO: 571908 - RNA, 19 nt, Artificial Sequence
  Description of Artificial Sequence: Synthetic oligonucleotide
  Antisense strand to SEQ ID NO: 571907
guguuuaaggaucugccgc

SEQ ID NO: 571909 - RNA, 19 nt, Artificial Sequence
  Description of Artificial Sequence: Synthetic oligonucleotide
  Sense strand starting at position 3280 of SEQ ID NO: 318562
augguaacuccguagaggu

SEQ ID NO: 571910 - RNA, 19 nt, Artificial Sequence
  Description of Artificial Sequence: Synthetic oligonucleotide
  Antisense strand to SEQ ID NO: 571909
accucuacggaguuaccau

SEQ ID NO: 571911 - RNA, 19 nt, Artificial Sequence
  Description of Artificial Sequence: Synthetic oligonucleotide
  Sense strand starting at position 3282 of SEQ ID NO: 318562
gguaacuccguagagguaa

SEQ ID NO: 571912 - RNA, 19 nt, Artificial Sequence
  Description of Artificial Sequence: Synthetic oligonucleotide
  Antisense strand to SEQ ID NO: 571911
uuaccucuacggaguuacc

SEQ ID NO: 571913 - RNA, 19 nt, Artificial Sequence
  Description of Artificial Sequence: Synthetic oligonucleotide
  Sense strand starting at position 3931 of SEQ ID NO: 318562
aacaaauuacguggacaua

SEQ ID NO: 571914 - RNA, 19 nt, Artificial Sequence
  Description of Artificial Sequence: Synthetic oligonucleotide
  Antisense strand to SEQ ID NO: 571913
uauguccacguaauuuguu

SEQ ID NO: 571915 - RNA, 19 nt, Artificial Sequence
  Description of Artificial Sequence: Synthetic oligonucleotide
  Sense strand starting at position 74 of SEQ ID NO: 318563
aaugguaaccgucaaauuc

SEQ ID NO: 571916 - RNA, 19 nt, Artificial Sequence
  Description of Artificial Sequence: Synthetic oligonucleotide
  Antisense strand to SEQ ID NO: 571915
gaauuugacgguuaccauu

SEQ ID NO: 571917 - RNA, 19 nt, Artificial Sequence
  Description of Artificial Sequence: Synthetic oligonucleotide
  Sense strand starting at position 91 of SEQ ID NO: 318563
ucaugaaugcagcaucauu

SEQ ID NO: 571918 - RNA, 19 nt, Artificial Sequence
  Description of Artificial Sequence: Synthetic oligonucleotide
  Antisense strand to SEQ ID NO: 571917
aaugaugcugcauucauga

SEQ ID NO: 571919 - RNA, 19 nt, Artificial Sequence
  Description of Artificial Sequence: Synthetic oligonucleotide
  Sense strand starting at position 300 of SEQ ID NO: 318563
uuuaguuauggguaauccu

SEQ ID NO: 571920 - RNA, 19 nt, Artificial Sequence
  Description of Artificial Sequence: Synthetic oligonucleotide
  Antisense strand to SEQ ID NO: 571919
aggauuacccauaacuaaa

SEQ ID NO: 571921 - RNA, 19 nt, Artificial Sequence
  Description of Artificial Sequence: Synthetic oligonucleotide
  Sense strand starting at position 307 of SEQ ID NO: 318563
auggguaauccucaguuaa

SEQ ID NO: 571922 - RNA, 19 nt, Artificial Sequence
  Description of Artificial Sequence: Synthetic oligonucleotide
  Antisense strand to SEQ ID NO: 571921
uuaacugaggauuacccau

SEQ ID NO: 571923 - RNA, 19 nt, Artificial Sequence
  Description of Artificial Sequence: Synthetic oligonucleotide
  Sense strand starting at position 309 of SEQ ID NO: 318563
ggguaauccucaguuaaua

SEQ ID NO: 571924 - RNA, 19 nt, Artificial Sequence
  Description of Artificial Sequence: Synthetic oligonucleotide
  Antisense strand to SEQ ID NO: 571923
uauuaacugaggauuaccc

SEQ ID NO: 571925 - RNA, 19 nt, Artificial Sequence
  Description of Artificial Sequence: Synthetic oligonucleotide
  Sense strand starting at position 350 of SEQ ID NO: 318563
gcgaucaguaccgaaauau

SEQ ID NO: 571926 - RNA, 19 nt, Artificial Sequence
  Description of Artificial Sequence: Synthetic oligonucleotide
  Antisense strand to SEQ ID NO: 571925
auauuucgguacugaucgc

SEQ ID NO: 571927 - RNA, 19 nt, Artificial Sequence
  Description of Artificial Sequence: Synthetic oligonucleotide
  Sense strand starting at position 383 of SEQ ID NO: 318563
agucuugaggacugcuuaa

SEQ ID NO: 571928 - RNA, 19 nt, Artificial Sequence
  Description of Artificial Sequence: Synthetic oligonucleotide
  Antisense strand to SEQ ID NO: 571927
uuaagcaguccucaagacu

SEQ ID NO: 571929 - RNA, 19 nt, Artificial Sequence
  Description of Artificial Sequence: Synthetic oligonucleotide
  Sense strand starting at position 437 of SEQ ID NO: 318563
auuuaacauugagaugcau

SEQ ID NO: 571930 - RNA, 19 nt, Artificial Sequence
  Description of Artificial Sequence: Synthetic oligonucleotide
  Antisense strand to SEQ ID NO: 571929
augcaucucaauguuaaau

SEQ ID NO: 571931 - RNA, 19 nt, Artificial Sequence
  Description of Artificial Sequence: Synthetic oligonucleotide
  Sense strand starting at position 479 of SEQ ID NO: 318563
cucccagauguguacacau

SEQ ID NO: 571932 - RNA, 19 nt, Artificial Sequence
  Description of Artificial Sequence: Synthetic oligonucleotide
  Antisense strand to SEQ ID NO: 571931
auguguacacaucugggag

SEQ ID NO: 571933 - RNA, 19 nt, Artificial Sequence
  Description of Artificial Sequence: Synthetic oligonucleotide
  Sense strand starting at position 481 of SEQ ID NO: 318563
cccagauguguacacauua

SEQ ID NO: 571934 - RNA, 19 nt, Artificial Sequence
  Description of Artificial Sequence: Synthetic oligonucleotide
  Antisense strand to SEQ ID NO: 571933
uaauguguacacaucuggg

SEQ ID NO: 571935 - RNA, 19 nt, Artificial Sequence
  Description of Artificial Sequence: Synthetic oligonucleotide
  Sense strand starting at position 486 of SEQ ID NO: 318563
auguguacacauuagcaua

SEQ ID NO: 571936 - RNA, 19 nt, Artificial Sequence
  Description of Artificial Sequence: Synthetic oligonucleotide
  Antisense strand to SEQ ID NO: 571935
uaugcuaauguguacacau

SEQ ID NO: 571937 - RNA, 19 nt, Artificial Sequence
  Description of Artificial Sequence: Synthetic oligonucleotide
  Sense strand starting at position 1105 of SEQ ID NO: 318563
ccaguaauggcucauaauu

SEQ ID NO: 571938 - RNA, 19 nt, Artificial Sequence
  Description of Artificial Sequence: Synthetic oligonucleotide
  Antisense strand to SEQ ID NO: 571937
aauuaugagccauuacugg

SEQ ID NO: 571939 - RNA, 19 nt, Artificial Sequence
  Description of Artificial Sequence: Synthetic oligonucleotide
  Sense strand starting at position 1159 of SEQ ID NO: 318563
aaauguggccuuugacaau

SEQ ID NO: 571940 - RNA, 19 nt, Artificial Sequence
  Description of Artificial Sequence: Synthetic oligonucleotide
  Antisense strand to SEQ ID NO: 571939
auugucaaaggccacauuu

SEQ ID NO: 571941 - RNA, 19 nt, Artificial Sequence
  Description of Artificial Sequence: Synthetic oligonucleotide
  Sense strand starting at position 1213 of SEQ ID NO: 318563
agaugaaagucaucgccaa

SEQ ID NO: 571942 - RNA, 19 nt, Artificial Sequence
  Description of Artificial Sequence: Synthetic oligonucleotide
  Antisense strand to SEQ ID NO: 571941
uuggcgaugacuuucaucu

SEQ ID NO: 571943 - RNA, 19 nt, Artificial Sequence
  Description of Artificial Sequence: Synthetic oligonucleotide
  Sense strand starting at position 1214 of SEQ ID NO: 318563
gaugaaagucaucgccaag

SEQ ID NO: 571944 - RNA, 19 nt, Artificial Sequence
  Description of Artificial Sequence: Synthetic oligonucleotide
  Antisense strand to SEQ ID NO: 571943
cuuggcgaugacuuucauc

SEQ ID NO: 571945 - RNA, 19 nt, Artificial Sequence
  Description of Artificial Sequence: Synthetic oligonucleotide
  Sense strand starting at position 1217 of SEQ ID NO: 318563
gaaagucaucgccaagaga

SEQ ID NO: 571946 - RNA, 19 nt, Artificial Sequence
  Description of Artificial Sequence: Synthetic oligonucleotide
  Antisense strand to SEQ ID NO: 571945
ucucuuggcgaugacuuuc

SEQ ID NO: 571947 - RNA, 19 nt, Artificial Sequence
  Description of Artificial Sequence: Synthetic oligonucleotide
  Sense strand starting at position 1220 of SEQ ID NO: 318563
agucaucgccaagagacaa

SEQ ID NO: 571948 - RNA, 19 nt, Artificial Sequence
  Description of Artificial Sequence: Synthetic oligonucleotide
  Antisense strand to SEQ ID NO: 571947
uugucucuuggcgaugacu

SEQ ID NO: 571949 - RNA, 19 nt, Artificial Sequence
  Description of Artificial Sequence: Synthetic oligonucleotide
  Sense strand starting at position 1412 of SEQ ID NO: 318563
guuguuaguacugucgcua

SEQ ID NO: 571950 - RNA, 19 nt, Artificial Sequence
  Description of Artificial Sequence: Synthetic oligonucleotide
  Antisense strand to SEQ ID NO: 571949
uagcgacaguacuaacaac

SEQ ID NO: 571951 - RNA, 19 nt, Artificial Sequence
  Description of Artificial Sequence: Synthetic oligonucleotide
  Sense strand starting at position 1413 of SEQ ID NO: 318563
uuguuaguacugucgcuau

SEQ ID NO: 571952 - RNA, 19 nt, Artificial Sequence
  Description of Artificial Sequence: Synthetic oligonucleotide
  Antisense strand to SEQ ID NO: 571951
auagcgacaguacuaacaa

SEQ ID NO: 571953 - RNA, 19 nt, Artificial Sequence
  Description of Artificial Sequence: Synthetic oligonucleotide
  Sense strand starting at position 1415 of SEQ ID NO: 318563
guuaguacugucgcuauua

SEQ ID NO: 571954 - RNA, 19 nt, Artificial Sequence
  Description of Artificial Sequence: Synthetic oligonucleotide
  Antisense strand to SEQ ID NO: 571953
uaauagcgacaguacuaac

SEQ ID NO: 571955 - RNA, 19 nt, Artificial Sequence
  Description of Artificial Sequence: Synthetic oligonucleotide
  Sense strand starting at position 2916 of SEQ ID NO: 318563
cuggaugaggcguaagcaa

SEQ ID NO: 571956 - RNA, 19 nt, Artificial Sequence
  Description of Artificial Sequence: Synthetic oligonucleotide
  Antisense strand to SEQ ID NO: 571955
uugcuuacgccucauccag

SEQ ID NO: 571957 - RNA, 19 nt, Artificial Sequence
  Description of Artificial Sequence: Synthetic oligonucleotide
  Sense strand starting at position 3048 of SEQ ID NO: 318563
uuaaauggucuuugagaaa

SEQ ID NO: 571958 - RNA, 19 nt, Artificial Sequence
  Description of Artificial Sequence: Synthetic oligonucleotide
  Antisense strand to SEQ ID NO: 571957
uuucucaaagaccauuuaa

SEQ ID NO: 571959 - RNA, 19 nt, Artificial Sequence
  Description of Artificial Sequence: Synthetic oligonucleotide
  Sense strand starting at position 3060 of SEQ ID NO: 318563
ugagaaaucucuuucccag

SEQ ID NO: 571960 - RNA, 19 nt, Artificial Sequence
  Description of Artificial Sequence: Synthetic oligonucleotide
  Antisense strand to SEQ ID NO: 571959
cugggaaagagauuucuca

SEQ ID NO: 571961 - RNA, 19 nt, Artificial Sequence
  Description of Artificial Sequence: Synthetic oligonucleotide
  Sense strand starting at position 3079 of SEQ ID NO: 318563
gcgagaugacuuggagaag

SEQ ID NO: 571962 - RNA, 19 nt, Artificial Sequence
  Description of Artificial Sequence: Synthetic oligonucleotide
  Antisense strand to SEQ ID NO: 571961
cuucuccaagucaucucgc

SEQ ID NO: 571963 - RNA, 19 nt, Artificial Sequence
  Description of Artificial Sequence: Synthetic oligonucleotide
  Sense strand starting at position 3221 of SEQ ID NO: 318563
augccuguuccagaggaca

SEQ ID NO: 571964 - RNA, 19 nt, Artificial Sequence
  Description of Artificial Sequence: Synthetic oligonucleotide
  Antisense strand to SEQ ID NO: 571963
uguccucuggaacaggcau

SEQ ID NO: 571965 - RNA, 19 nt, Artificial Sequence
  Description of Artificial Sequence: Synthetic oligonucleotide
  Sense strand starting at position 3223 of SEQ ID NO: 318563
gccuguuccagaggacaag

SEQ ID NO: 571966 - RNA, 19 nt, Artificial Sequence
  Description of Artificial Sequence: Synthetic oligonucleotide
  Antisense strand to SEQ ID NO: 571965
cuuguccucuggaacaggc

SEQ ID NO: 571967 - RNA, 19 nt, Artificial Sequence
  Description of Artificial Sequence: Synthetic oligonucleotide
  Sense strand starting at position 3354 of SEQ ID NO: 318563
cuggguaacuagccuaaga

SEQ ID NO: 571968 - RNA, 19 nt, Artificial Sequence
  Description of Artificial Sequence: Synthetic oligonucleotide
  Antisense strand to SEQ ID NO: 571967
ucuuaggcuaguuacccag

SEQ ID NO: 571969 - RNA, 19 nt, Artificial Sequence
  Description of Artificial Sequence: Synthetic oligonucleotide
  Sense strand starting at position 3356 of SEQ ID NO: 318563
ggguaacuagccuaagacu

SEQ ID NO: 571970 - RNA, 19 nt, Artificial Sequence
  Description of Artificial Sequence: Synthetic oligonucleotide
  Antisense strand to SEQ ID NO: 571969
agucuuaggcuaguuaccc

SEQ ID NO: 571971 - RNA, 19 nt, Artificial Sequence
  Description of Artificial Sequence: Synthetic oligonucleotide
  Sense strand starting at position 3410 of SEQ ID NO: 318563
agggcauagccggaguaau

SEQ ID NO: 571972 - RNA, 19 nt, Artificial Sequence
  Description of Artificial Sequence: Synthetic oligonucleotide
  Antisense strand to SEQ ID NO: 571971
auuacuccggcuaugcccu

SEQ ID NO: 571973 - RNA, 19 nt, Artificial Sequence
  Description of Artificial Sequence: Synthetic oligonucleotide
  Sense strand starting at position 3454 of SEQ ID NO: 318563
ggaccaucgucauugaaau

SEQ ID NO: 571974 - RNA, 19 nt, Artificial Sequence
  Description of Artificial Sequence: Synthetic oligonucleotide
  Antisense strand to SEQ ID NO: 571973
auuucaaugacgauggucc

SEQ ID NO: 571975 - RNA, 19 nt, Artificial Sequence
  Description of Artificial Sequence: Synthetic oligonucleotide
  Sense strand starting at position 3455 of SEQ ID NO: 318563
gaccaucgucauugaaaug

SEQ ID NO: 571976 - RNA, 19 nt, Artificial Sequence
  Description of Artificial Sequence: Synthetic oligonucleotide
  Antisense strand to SEQ ID NO: 571975
cauuucaaugacgaugguc

SEQ ID NO: 571977 - RNA, 19 nt, Artificial Sequence
  Description of Artificial Sequence: Synthetic oligonucleotide
  Sense strand starting at position 3460 of SEQ ID NO: 318563
ucgucauugaaaugaggac

SEQ ID NO: 571978 - RNA, 19 nt, Artificial Sequence
  Description of Artificial Sequence: Synthetic oligonucleotide
  Antisense strand to SEQ ID NO: 571977
guccucauuucaaugacga

SEQ ID NO: 571979 - RNA, 19 nt, Artificial Sequence
  Description of Artificial Sequence: Synthetic oligonucleotide
  Sense strand starting at position 3482 of SEQ ID NO: 318563
cuugaaugccagcagaaga

SEQ ID NO: 571980 - RNA, 19 nt, Artificial Sequence
  Description of Artificial Sequence: Synthetic oligonucleotide
  Antisense strand to SEQ ID NO: 571979
ucuucugcuggcauucaag

SEQ ID NO: 571981 - RNA, 19 nt, Artificial Sequence
  Description of Artificial Sequence: Synthetic oligonucleotide
  Sense strand starting at position 3589 of SEQ ID NO: 318563
gguguuguaauuuguuuau

SEQ ID NO: 571982 - RNA, 19 nt, Artificial Sequence
  Description of Artificial Sequence: Synthetic oligonucleotide
  Antisense strand to SEQ ID NO: 571981
auaaacaaauuacaacacc

SEQ ID NO: 571983 - RNA, 19 nt, Artificial Sequence
  Description of Artificial Sequence: Synthetic oligonucleotide
  Sense strand starting at position 3610 of SEQ ID NO: 318563
uaauuuaucguguguaagu

SEQ ID NO: 571984 - RNA, 19 nt, Artificial Sequence
  Description of Artificial Sequence: Synthetic oligonucleotide
  Antisense strand to SEQ ID NO: 571983
acuuacacacgauaaauua

SEQ ID NO: 571985 - RNA, 19 nt, Artificial Sequence
  Description of Artificial Sequence: Synthetic oligonucleotide
  Sense strand starting at position 3611 of SEQ ID NO: 318563
aauuuaucguguguaaguc

SEQ ID NO: 571986 - RNA, 19 nt, Artificial Sequence
  Description of Artificial Sequence: Synthetic oligonucleotide
  Antisense strand to SEQ ID NO: 571985
gacuuacacacgauaaauu

SEQ ID NO: 571987 - RNA, 19 nt, Artificial Sequence
  Description of Artificial Sequence: Synthetic oligonucleotide
  Sense strand starting at position 3617 of SEQ ID NO: 318563
ucguguguaagucuuaagu

SEQ ID NO: 571988 - RNA, 19 nt, Artificial Sequence
  Description of Artificial Sequence: Synthetic oligonucleotide
  Antisense strand to SEQ ID NO: 571987
acuuaagacuuacacacga

SEQ ID NO: 571989 - RNA, 19 nt, Artificial Sequence
  Description of Artificial Sequence: Synthetic oligonucleotide
  Sense strand starting at position 3794 of SEQ ID NO: 318563
uaguguaaacuucgagaaa

SEQ ID NO: 571990 - RNA, 19 nt, Artificial Sequence
  Description of Artificial Sequence: Synthetic oligonucleotide
  Antisense strand to SEQ ID NO: 571989
uuucucgaaguuuacacua

SEQ ID NO: 571991 - RNA, 19 nt, Artificial Sequence
  Description of Artificial Sequence: Synthetic oligonucleotide
  Sense strand starting at position 3852 of SEQ ID NO: 318563
ggugucacccuugacauga

SEQ ID NO: 571992 - RNA, 19 nt, Artificial Sequence
  Description of Artificial Sequence: Synthetic oligonucleotide
  Antisense strand to SEQ ID NO: 571991
ucaugucaagggugacacc

SEQ ID NO: 571993 - RNA, 19 nt, Artificial Sequence
  Description of Artificial Sequence: Synthetic oligonucleotide
  Sense strand starting at position 3953 of SEQ ID NO: 318563
ggaaucauuuauugaagaa

SEQ ID NO: 571994 - RNA, 19 nt, Artificial Sequence
  Description of Artificial Sequence: Synthetic oligonucleotide
  Antisense strand to SEQ ID NO: 571993
uucuucaauaaaugauucc

SEQ ID NO: 571995 - RNA, 19 nt, Artificial Sequence
  Description of Artificial Sequence: Synthetic oligonucleotide
  Sense strand starting at position 95 of SEQ ID NO: 318564
cccucuuauuacucaggga

SEQ ID NO: 571996 - RNA, 19 nt, Artificial Sequence
  Description of Artificial Sequence: Synthetic oligonucleotide
  Antisense strand to SEQ ID NO: 571995
ucccugaguaauaagaggg

SEQ ID NO: 571997 - RNA, 19 nt, Artificial Sequence
  Description of Artificial Sequence: Synthetic oligonucleotide
  Sense strand starting at position 98 of SEQ ID NO: 318564
ucuuauuacucagggauga

SEQ ID NO: 571998 - RNA, 19 nt, Artificial Sequence
  Description of Artificial Sequence: Synthetic oligonucleotide
  Antisense strand to SEQ ID NO: 571997
ucaucccugaguaauaaga

SEQ ID NO: 571999 - RNA, 19 nt, Artificial Sequence
  Description of Artificial Sequence: Synthetic oligonucleotide
  Sense strand starting at position 157 of SEQ ID NO: 318564
gcugaaaugcucuguauca

SEQ ID NO: 572000 - RNA, 19 nt, Artificial Sequence
  Description of Artificial Sequence: Synthetic oligonucleotide
  Antisense strand to SEQ ID NO: 571999
ugauacagagcauuucagc

SEQ ID NO: 572001 - RNA, 19 nt, Artificial Sequence
  Description of Artificial Sequence: Synthetic oligonucleotide
  Sense strand starting at position 158 of SEQ ID NO: 318564
cugaaaugcucuguaucac

SEQ ID NO: 572002 - RNA, 19 nt, Artificial Sequence
  Description of Artificial Sequence: Synthetic oligonucleotide
  Antisense strand to SEQ ID NO: 572001
gugauacagagcauuucag

SEQ ID NO: 572003 - RNA, 19 nt, Artificial Sequence
  Description of Artificial Sequence: Synthetic oligonucleotide
  Sense strand starting at position 321 of SEQ ID NO: 318564
ccuggccuuucuucugaua

SEQ ID NO: 572004 - RNA, 19 nt, Artificial Sequence
  Description of Artificial Sequence: Synthetic oligonucleotide
  Antisense strand to SEQ ID NO: 572003
uaucagaagaaaggccagg

SEQ ID NO: 572005 - RNA, 19 nt, Artificial Sequence
  Description of Artificial Sequence: Synthetic oligonucleotide
  Sense strand starting at position 546 of SEQ ID NO: 318564
gggcaagguacuuagaucu

SEQ ID NO: 572006 - RNA, 19 nt, Artificial Sequence
  Description of Artificial Sequence: Synthetic oligonucleotide
  Antisense strand to SEQ ID NO: 572005
agaucuaaguaccuugccc

SEQ ID NO: 572007 - RNA, 19 nt, Artificial Sequence
  Description of Artificial Sequence: Synthetic oligonucleotide
  Sense strand starting at position 553 of SEQ ID NO: 318564
guacuuagaucucugggaa

SEQ ID NO: 572008 - RNA, 19 nt, Artificial Sequence
  Description of Artificial Sequence: Synthetic oligonucleotide
  Antisense strand to SEQ ID NO: 572007
uucccagagaucuaaguac

SEQ ID NO: 572009 - RNA, 19 nt, Artificial Sequence
  Description of Artificial Sequence: Synthetic oligonucleotide
  Sense strand starting at position 579 of SEQ ID NO: 318564
uucccuuaccuguagaaug

SEQ ID NO: 572010 - RNA, 19 nt, Artificial Sequence
  Description of Artificial Sequence: Synthetic oligonucleotide
  Antisense strand to SEQ ID NO: 572009
cauucuacagguaagggaa

SEQ ID NO: 572011 - RNA, 19 nt, Artificial Sequence
  Description of Artificial Sequence: Synthetic oligonucleotide
  Sense strand starting at position 590 of SEQ ID NO: 318564
guagaaugggccgaagcau

SEQ ID NO: 572012 - RNA, 19 nt, Artificial Sequence
  Description of Artificial Sequence: Synthetic oligonucleotide
  Antisense strand to SEQ ID NO: 572011
augcuucggcccauucuac

SEQ ID NO: 572013 - RNA, 19 nt, Artificial Sequence
  Description of Artificial Sequence: Synthetic oligonucleotide
  Sense strand starting at position 601 of SEQ ID NO: 318564
cgaagcauuacaugaggaa

SEQ ID NO: 572014 - RNA, 19 nt, Artificial Sequence
  Description of Artificial Sequence: Synthetic oligonucleotide
  Antisense strand to SEQ ID NO: 572013
uuccucauguaaugcuucg

SEQ ID NO: 572015 - RNA, 19 nt, Artificial Sequence
  Description of Artificial Sequence: Synthetic oligonucleotide
  Sense strand starting at position 604 of SEQ ID NO: 318564
agcauuacaugaggaaaug

SEQ ID NO: 572016 - RNA, 19 nt, Artificial Sequence
  Description of Artificial Sequence: Synthetic oligonucleotide
  Antisense strand to SEQ ID NO: 572015
cauuuccucauguaaugcu

SEQ ID NO: 572017 - RNA, 19 nt, Artificial Sequence
  Description of Artificial Sequence: Synthetic oligonucleotide
  Sense strand starting at position 616 of SEQ ID NO: 318564
ggaaauggauguuaugaca

SEQ ID NO: 572018 - RNA, 19 nt, Artificial Sequence
  Description of Artificial Sequence: Synthetic oligonucleotide
  Antisense strand to SEQ ID NO: 572017
ugucauaacauccauuucc

SEQ ID NO: 572019 - RNA, 19 nt, Artificial Sequence
  Description of Artificial Sequence: Synthetic oligonucleotide
  Sense strand starting at position 619 of SEQ ID NO: 318564
aauggauguuaugacauuu

SEQ ID NO: 572020 - RNA, 19 nt, Artificial Sequence
  Description of Artificial Sequence: Synthetic oligonucleotide
  Antisense strand to SEQ ID NO: 572019
aaaugucauaacauccauu

SEQ ID NO: 572021 - RNA, 19 nt, Artificial Sequence
  Description of Artificial Sequence: Synthetic oligonucleotide
  Sense strand starting at position 642 of SEQ ID NO: 318564
caguacuuggcauacagaa

SEQ ID NO: 572022 - RNA, 19 nt, Artificial Sequence
  Description of Artificial Sequence: Synthetic oligonucleotide
  Antisense strand to SEQ ID NO: 572021
uucuguaugccaaguacug

SEQ ID NO: 572023 - RNA, 19 nt, Artificial Sequence
  Description of Artificial Sequence: Synthetic oligonucleotide
  Sense strand starting at position 1289 of SEQ ID NO: 318564
guccuagcguccuugaaac

SEQ ID NO: 572024 - RNA, 19 nt, Artificial Sequence
  Description of Artificial Sequence: Synthetic oligonucleotide
  Antisense strand to SEQ ID NO: 572023
guuucaaggacgcuaggac

SEQ ID NO: 572025 - RNA, 19 nt, Artificial Sequence
  Description of Artificial Sequence: Synthetic oligonucleotide
  Sense strand starting at position 1323 of SEQ ID NO: 318564
gggccacugccucgguuau

SEQ ID NO: 572026 - RNA, 19 nt, Artificial Sequence
  Description of Artificial Sequence: Synthetic oligonucleotide
  Antisense strand to SEQ ID NO: 572025
auaaccgaggcaguggccc

SEQ ID NO: 572027 - RNA, 19 nt, Artificial Sequence
  Description of Artificial Sequence: Synthetic oligonucleotide
  Sense strand starting at position 1379 of SEQ ID NO: 318564
gcuggguucggcgcgaaua

SEQ ID NO: 572028 - RNA, 19 nt, Artificial Sequence
  Description of Artificial Sequence: Synthetic oligonucleotide
  Antisense strand to SEQ ID NO: 572027
uauucgcgccgaacccagc

SEQ ID NO: 572029 - RNA, 19 nt, Artificial Sequence
  Description of Artificial Sequence: Synthetic oligonucleotide
  Sense strand starting at position 1571 of SEQ ID NO: 318564
accggagcauacucacaua

SEQ ID NO: 572030 - RNA, 19 nt, Artificial Sequence
  Description of Artificial Sequence: Synthetic oligonucleotide
  Antisense strand to SEQ ID NO: 572029
uaugugaguaugcuccggu

SEQ ID NO: 572031 - RNA, 19 nt, Artificial Sequence
  Description of Artificial Sequence: Synthetic oligonucleotide
  Sense strand starting at position 2105 of SEQ ID NO: 318564
gccguaagacucgcguagu

SEQ ID NO: 572032 - RNA, 19 nt, Artificial Sequence
  Description of Artificial Sequence: Synthetic oligonucleotide
  Antisense strand to SEQ ID NO: 572031
acuacgcgagucuuacggc

SEQ ID NO: 572033 - RNA, 19 nt, Artificial Sequence
  Description of Artificial Sequence: Synthetic oligonucleotide
  Sense strand starting at position 2496 of SEQ ID NO: 318564
gucauuacagcuuguaagu

SEQ ID NO: 572034 - RNA, 19 nt, Artificial Sequence
  Description of Artificial Sequence: Synthetic oligonucleotide
  Antisense strand to SEQ ID NO: 572033
acuuacaagcuguaaugac

SEQ ID NO: 572035 - RNA, 19 nt, Artificial Sequence
  Description of Artificial Sequence: Synthetic oligonucleotide
  Sense strand starting at position 2503 of SEQ ID NO: 318564
cagcuuguaaguugugaag

SEQ ID NO: 572036 - RNA, 19 nt, Artificial Sequence
  Description of Artificial Sequence: Synthetic oligonucleotide
  Antisense strand to SEQ ID NO: 572035
cuucacaacuuacaagcug

SEQ ID NO: 572037 - RNA, 19 nt, Artificial Sequence
  Description of Artificial Sequence: Synthetic oligonucleotide
  Sense strand starting at position 2518 of SEQ ID NO: 318564
gaagguaacggugauguaa

SEQ ID NO: 572038 - RNA, 19 nt, Artificial Sequence
  Description of Artificial Sequence: Synthetic oligonucleotide
  Antisense strand to SEQ ID NO: 572037
uuacaucaccguuaccuuc

SEQ ID NO: 572039 - RNA, 19 nt, Artificial Sequence
  Description of Artificial Sequence: Synthetic oligonucleotide
  Sense strand starting at position 2596 of SEQ ID NO: 318564
ggugaauuguagcagagac

SEQ ID NO: 572040 - RNA, 19 nt, Artificial Sequence
  Description of Artificial Sequence: Synthetic oligonucleotide
  Antisense strand to SEQ ID NO: 572039
gucucugcuacaauucacc

SEQ ID NO: 572041 - RNA, 19 nt, Artificial Sequence
  Description of Artificial Sequence: Synthetic oligonucleotide
  Sense strand starting at position 2827 of SEQ ID NO: 318564
uugguucuaugauagaauu

SEQ ID NO: 572042 - RNA, 19 nt, Artificial Sequence
  Description of Artificial Sequence: Synthetic oligonucleotide
  Antisense strand to SEQ ID NO: 572041
aauucuaucauagaaccaa

SEQ ID NO: 572043 - RNA, 19 nt, Artificial Sequence
  Description of Artificial Sequence: Synthetic oligonucleotide
  Sense strand starting at position 2835 of SEQ ID NO: 318564
augauagaauuaugcccaa

SEQ ID NO: 572044 - RNA, 19 nt, Artificial Sequence
  Description of Artificial Sequence: Synthetic oligonucleotide
  Antisense strand to SEQ ID NO: 572043
uugggcauaauucuaucau

SEQ ID NO: 572045 - RNA, 19 nt, Artificial Sequence
  Description of Artificial Sequence: Synthetic oligonucleotide
  Sense strand starting at position 3019 of SEQ ID NO: 318564
aggcacuguggccagaaau

SEQ ID NO: 572046 - RNA, 19 nt, Artificial Sequence
  Description of Artificial Sequence: Synthetic oligonucleotide
  Antisense strand to SEQ ID NO: 572045
auuucuggccacagugccu

SEQ ID NO: 572047 - RNA, 19 nt, Artificial Sequence
  Description of Artificial Sequence: Synthetic oligonucleotide
  Sense strand starting at position 3032 of SEQ ID NO: 318564
agaaaugcaggguguguaa

SEQ ID NO: 572048 - RNA, 19 nt, Artificial Sequence
  Description of Artificial Sequence: Synthetic oligonucleotide
  Antisense strand to SEQ ID NO: 572047
uuacacacccugcauuucu

SEQ ID NO: 572049 - RNA, 19 nt, Artificial Sequence
  Description of Artificial Sequence: Synthetic oligonucleotide
  Sense strand starting at position 3045 of SEQ ID NO: 318564
guguaagugacagguaauu

SEQ ID NO: 572050 - RNA, 19 nt, Artificial Sequence
  Description of Artificial Sequence: Synthetic oligonucleotide
  Antisense strand to SEQ ID NO: 572049
aauuaccugucacuuacac

SEQ ID NO: 572051 - RNA, 19 nt, Artificial Sequence
  Description of Artificial Sequence: Synthetic oligonucleotide
  Sense strand starting at position 3047 of SEQ ID NO: 318564
guaagugacagguaauuag

SEQ ID NO: 572052 - RNA, 19 nt, Artificial Sequence
  Description of Artificial Sequence: Synthetic oligonucleotide
  Antisense strand to SEQ ID NO: 572051
cuaauuaccugucacuuac

SEQ ID NO: 572053 - RNA, 19 nt, Artificial Sequence
  Description of Artificial Sequence: Synthetic oligonucleotide
  Sense strand starting at position 3161 of SEQ ID NO: 318564
ugcaaauuggcgcagacau

SEQ ID NO: 572054 - RNA, 19 nt, Artificial Sequence
  Description of Artificial Sequence: Synthetic oligonucleotide
  Antisense strand to SEQ ID NO: 572053
augucugcgccaauuugca

SEQ ID NO: 572055 - RNA, 19 nt, Artificial Sequence
  Description of Artificial Sequence: Synthetic oligonucleotide
  Sense strand starting at position 3264 of SEQ ID NO: 318564
gugcgacucuagccauaca

SEQ ID NO: 572056 - RNA, 19 nt, Artificial Sequence
  Description of Artificial Sequence: Synthetic oligonucleotide
  Antisense strand to SEQ ID NO: 572055
uguauggcuagagucgcac

SEQ ID NO: 572057 - RNA, 19 nt, Artificial Sequence
  Description of Artificial Sequence: Synthetic oligonucleotide
  Sense strand starting at position 3290 of SEQ ID NO: 318564
aaagauaccugugcaagga

SEQ ID NO: 572058 - RNA, 19 nt, Artificial Sequence
  Description of Artificial Sequence: Synthetic oligonucleotide
  Antisense strand to SEQ ID NO: 572057
uccuugcacagguaucuuu

SEQ ID NO: 572059 - RNA, 19 nt, Artificial Sequence
  Description of Artificial Sequence: Synthetic oligonucleotide
  Sense strand starting at position 3306 of SEQ ID NO: 318564
ggauguucacuguagcaug

SEQ ID NO: 572060 - RNA, 19 nt, Artificial Sequence
  Description of Artificial Sequence: Synthetic oligonucleotide
  Antisense strand to SEQ ID NO: 572059
caugcuacagugaacaucc

SEQ ID NO: 572061 - RNA, 19 nt, Artificial Sequence
  Description of Artificial Sequence: Synthetic oligonucleotide
  Sense strand starting at position 3414 of SEQ ID NO: 318564
ccacacuaugguuggcaaa

SEQ ID NO: 572062 - RNA, 19 nt, Artificial Sequence
  Description of Artificial Sequence: Synthetic oligonucleotide
  Antisense strand to SEQ ID NO: 572061
uuugccaaccauagugugg

SEQ ID NO: 572063 - RNA, 19 nt, Artificial Sequence
  Description of Artificial Sequence: Synthetic oligonucleotide
  Sense strand starting at position 3416 of SEQ ID NO: 318564
acacuaugguuggcaaaga

SEQ ID NO: 572064 - RNA, 19 nt, Artificial Sequence
  Description of Artificial Sequence: Synthetic oligonucleotide
  Antisense strand to SEQ ID NO: 572063
ucuuugccaaccauagugu

SEQ ID NO: 572065 - RNA, 19 nt, Artificial Sequence
  Description of Artificial Sequence: Synthetic oligonucleotide
  Sense strand starting at position 3417 of SEQ ID NO: 318564
cacuaugguuggcaaagau

SEQ ID NO: 572066 - RNA, 19 nt, Artificial Sequence
  Description of Artificial Sequence: Synthetic oligonucleotide
  Antisense strand to SEQ ID NO: 572065
aucuuugccaaccauagug

SEQ ID NO: 572067 - RNA, 19 nt, Artificial Sequence
  Description of Artificial Sequence: Synthetic oligonucleotide
  Sense strand starting at position 3470 of SEQ ID NO: 318564
ccaagauguggugguaagu

SEQ ID NO: 572068 - RNA, 19 nt, Artificial Sequence
  Description of Artificial Sequence: Synthetic oligonucleotide
  Antisense strand to SEQ ID NO: 572067
acuuaccaccacaucuugg

SEQ ID NO: 572069 - RNA, 19 nt, Artificial Sequence
  Description of Artificial Sequence: Synthetic oligonucleotide
  Sense strand starting at position 3476 of SEQ ID NO: 318564
uguggugguaagugugaga

SEQ ID NO: 572070 - RNA, 19 nt, Artificial Sequence
  Description of Artificial Sequence: Synthetic oligonucleotide
  Antisense strand to SEQ ID NO: 572069
ucucacacuuaccaccaca

SEQ ID NO: 572071 - RNA, 19 nt, Artificial Sequence
  Description of Artificial Sequence: Synthetic oligonucleotide
  Sense strand starting at position 3508 of SEQ ID NO: 318564
acuggaauguguggaauga

SEQ ID NO: 572072 - RNA, 19 nt, Artificial Sequence
  Description of Artificial Sequence: Synthetic oligonucleotide
  Antisense strand to SEQ ID NO: 572071
ucauuccacacauuccagu

SEQ ID NO: 572073 - RNA, 19 nt, Artificial Sequence
  Description of Artificial Sequence: Synthetic oligonucleotide
  Sense strand starting at position 3668 of SEQ ID NO: 318564
acacauauuuauggcuaga

SEQ ID NO: 572074 - RNA, 19 nt, Artificial Sequence
  Description of Artificial Sequence: Synthetic oligonucleotide
  Antisense strand to SEQ ID NO: 572073
ucuagccauaaauaugugu

SEQ ID NO: 572075 - RNA, 19 nt, Artificial Sequence
  Description of Artificial Sequence: Synthetic oligonucleotide
  Sense strand starting at position 2221 of SEQ ID NO: 318565
ggagguuucuacuccgaag

SEQ ID NO: 572076 - RNA, 19 nt, Artificial Sequence
  Description of Artificial Sequence: Synthetic oligonucleotide
  Antisense strand to SEQ ID NO: 572075
cuucggaguagaaaccucc

SEQ ID NO: 572077 - RNA, 19 nt, Artificial Sequence
  Description of Artificial Sequence: Synthetic oligonucleotide
  Sense strand starting at position 2233 of SEQ ID NO: 318565
uccgaagugaauuaucuga

SEQ ID NO: 572078 - RNA, 19 nt, Artificial Sequence
  Description of Artificial Sequence: Synthetic oligonucleotide
  Antisense strand to SEQ ID NO: 572077
ucagauaauucacuucgga

SEQ ID NO: 572079 - RNA, 19 nt, Artificial Sequence
  Description of Artificial Sequence: Synthetic oligonucleotide
  Sense strand starting at position 2235 of SEQ ID NO: 318565
cgaagugaauuaucugaga

SEQ ID NO: 572080 - RNA, 19 nt, Artificial Sequence
  Description of Artificial Sequence: Synthetic oligonucleotide
  Antisense strand to SEQ ID NO: 572079
ucucagauaauucacuucg

SEQ ID NO: 572081 - RNA, 19 nt, Artificial Sequence
  Description of Artificial Sequence: Synthetic oligonucleotide
  Sense strand starting at position 2240 of SEQ ID NO: 318565
ugaauuaucugagauuucu

SEQ ID NO: 572082 - RNA, 19 nt, Artificial Sequence
  Description of Artificial Sequence: Synthetic oligonucleotide
  Antisense strand to SEQ ID NO: 572081
agaaaucucagauaauuca

SEQ ID NO: 572083 - RNA, 19 nt, Artificial Sequence
  Description of Artificial Sequence: Synthetic oligonucleotide
  Sense strand starting at position 2295 of SEQ ID NO: 318565
uuagcauuugcaugccuga

SEQ ID NO: 572084 - RNA, 19 nt, Artificial Sequence
  Description of Artificial Sequence: Synthetic oligonucleotide
  Antisense strand to SEQ ID NO: 572083
ucaggcaugcaaaugcuaa

SEQ ID NO: 572085 - RNA, 19 nt, Artificial Sequence
  Description of Artificial Sequence: Synthetic oligonucleotide
  Sense strand starting at position 2298 of SEQ ID NO: 318565
gcauuugcaugccugauaa

SEQ ID NO: 572086 - RNA, 19 nt, Artificial Sequence
  Description of Artificial Sequence: Synthetic oligonucleotide
  Antisense strand to SEQ ID NO: 572085
uuaucaggcaugcaaaugc

SEQ ID NO: 572087 - RNA, 19 nt, Artificial Sequence
  Description of Artificial Sequence: Synthetic oligonucleotide
  Sense strand starting at position 2335 of SEQ ID NO: 318565
cucagugaaugcuccuaga

SEQ ID NO: 572088 - RNA, 19 nt, Artificial Sequence
  Description of Artificial Sequence: Synthetic oligonucleotide
  Antisense strand to SEQ ID NO: 572087
ucuaggagcauucacugag

SEQ ID NO: 572089 - RNA, 19 nt, Artificial Sequence
  Description of Artificial Sequence: Synthetic oligonucleotide
  Sense strand starting at position 2388 of SEQ ID NO: 318565
augcgaauuagugauugca

SEQ ID NO: 572090 - RNA, 19 nt, Artificial Sequence
  Description of Artificial Sequence: Synthetic oligonucleotide
  Antisense strand to SEQ ID NO: 572089
ugcaaucacuaauucgcau

SEQ ID NO: 572091 - RNA, 19 nt, Artificial Sequence
  Description of Artificial Sequence: Synthetic oligonucleotide
  Sense strand starting at position 2390 of SEQ ID NO: 318565
gcgaauuagugauugcacu

SEQ ID NO: 572092 - RNA, 19 nt, Artificial Sequence
  Description of Artificial Sequence: Synthetic oligonucleotide
  Antisense strand to SEQ ID NO: 572091
agugcaaucacuaauucgc

SEQ ID NO: 572093 - RNA, 19 nt, Artificial Sequence
  Description of Artificial Sequence: Synthetic oligonucleotide
  Sense strand starting at position 2391 of SEQ ID NO: 318565
cgaauuagugauugcacua

SEQ ID NO: 572094 - RNA, 19 nt, Artificial Sequence
  Description of Artificial Sequence: Synthetic oligonucleotide
  Antisense strand to SEQ ID NO: 572093
uagugcaaucacuaauucg

SEQ ID NO: 572095 - RNA, 19 nt, Artificial Sequence
  Description of Artificial Sequence: Synthetic oligonucleotide
  Sense strand starting at position 2517 of SEQ ID NO: 318565
aggugcugugauugacaaa

SEQ ID NO: 572096 - RNA, 19 nt, Artificial Sequence
  Description of Artificial Sequence: Synthetic oligonucleotide
  Antisense strand to SEQ ID NO: 572095
uuugucaaucacagcaccu

SEQ ID NO: 572097 - RNA, 19 nt, Artificial Sequence
  Description of Artificial Sequence: Synthetic oligonucleotide
  Sense strand starting at position 2639 of SEQ ID NO: 318565
auauauguagugcggugaa

SEQ ID NO: 572098 - RNA, 19 nt, Artificial Sequence
  Description of Artificial Sequence: Synthetic oligonucleotide
  Antisense strand to SEQ ID NO: 572097
uucaccgcacuacauauau

SEQ ID NO: 572099 - RNA, 19 nt, Artificial Sequence
  Description of Artificial Sequence: Synthetic oligonucleotide
  Sense strand starting at position 2642 of SEQ ID NO: 318565
uauguagugcggugaauga

SEQ ID NO: 572100 - RNA, 19 nt, Artificial Sequence
  Description of Artificial Sequence: Synthetic oligonucleotide
  Antisense strand to SEQ ID NO: 572099
ucauucaccgcacuacaua

SEQ ID NO: 572101 - RNA, 19 nt, Artificial Sequence
  Description of Artificial Sequence: Synthetic oligonucleotide
  Sense strand starting at position 2774 of SEQ ID NO: 318565
gggauuccaucauaaagua

SEQ ID NO: 572102 - RNA, 19 nt, Artificial Sequence
  Description of Artificial Sequence: Synthetic oligonucleotide
  Antisense strand to SEQ ID NO: 572101
uacuuuaugauggaauccc

SEQ ID NO: 572103 - RNA, 19 nt, Artificial Sequence
  Description of Artificial Sequence: Synthetic oligonucleotide
  Sense strand starting at position 2821 of SEQ ID NO: 318565
aacaauaucuggcagggua

SEQ ID NO: 572104 - RNA, 19 nt, Artificial Sequence
  Description of Artificial Sequence: Synthetic oligonucleotide
  Antisense strand to SEQ ID NO: 572103
uacccugccagauauuguu

SEQ ID NO: 572105 - RNA, 19 nt, Artificial Sequence
  Description of Artificial Sequence: Synthetic oligonucleotide
  Sense strand starting at position 2941 of SEQ ID NO: 318565
uaacaauugcaggguacau

SEQ ID NO: 572106 - RNA, 19 nt, Artificial Sequence
  Description of Artificial Sequence: Synthetic oligonucleotide
  Antisense strand to SEQ ID NO: 572105
auguacccugcaauuguua

SEQ ID NO: 572107 - RNA, 19 nt, Artificial Sequence
  Description of Artificial Sequence: Synthetic oligonucleotide
  Sense strand starting at position 2999 of SEQ ID NO: 318565
guaagaggucagugaccau

SEQ ID NO: 572108 - RNA, 19 nt, Artificial Sequence
  Description of Artificial Sequence: Synthetic oligonucleotide
  Antisense strand to SEQ ID NO: 572107
auggucacugaccucuuac

SEQ ID NO: 572109 - RNA, 19 nt, Artificial Sequence
  Description of Artificial Sequence: Synthetic oligonucleotide
  Sense strand starting at position 3215 of SEQ ID NO: 318565
ugaagacacuucuaauuga

SEQ ID NO: 572110 - RNA, 19 nt, Artificial Sequence
  Description of Artificial Sequence: Synthetic oligonucleotide
  Antisense strand to SEQ ID NO: 572109
ucaauuagaagugucuuca

SEQ ID NO: 572111 - RNA, 19 nt, Artificial Sequence
  Description of Artificial Sequence: Synthetic oligonucleotide
  Sense strand starting at position 3218 of SEQ ID NO: 318565
agacacuucuaauugaggu

SEQ ID NO: 572112 - RNA, 19 nt, Artificial Sequence
  Description of Artificial Sequence: Synthetic oligonucleotide
  Antisense strand to SEQ ID NO: 572111
accucaauuagaagugucu

SEQ ID NO: 572113 - RNA, 19 nt, Artificial Sequence
  Description of Artificial Sequence: Synthetic oligonucleotide
  Sense strand starting at position 3303 of SEQ ID NO: 318565
gccagaagaguguacaauu

SEQ ID NO: 572114 - RNA, 19 nt, Artificial Sequence
  Description of Artificial Sequence: Synthetic oligonucleotide
  Antisense strand to SEQ ID NO: 572113
aauuguacacucuucuggc

SEQ ID NO: 572115 - RNA, 19 nt, Artificial Sequence
  Description of Artificial Sequence: Synthetic oligonucleotide
  Sense strand starting at position 3321 of SEQ ID NO: 318565
uauucuaagggcuguggua

SEQ ID NO: 572116 - RNA, 19 nt, Artificial Sequence
  Description of Artificial Sequence: Synthetic oligonucleotide
  Antisense strand to SEQ ID NO: 572115
uaccacagcccuuagaaua

SEQ ID NO: 572117 - RNA, 19 nt, Artificial Sequence
  Description of Artificial Sequence: Synthetic oligonucleotide
  Sense strand starting at position 3323 of SEQ ID NO: 318565
uucuaagggcugugguauu

SEQ ID NO: 572118 - RNA, 19 nt, Artificial Sequence
  Description of Artificial Sequence: Synthetic oligonucleotide
  Antisense strand to SEQ ID NO: 572117
aauaccacagcccuuagaa

SEQ ID NO: 572119 - RNA, 19 nt, Artificial Sequence
  Description of Artificial Sequence: Synthetic oligonucleotide
  Sense strand starting at position 3334 of SEQ ID NO: 318565
gugguauuguaagcaucuu

SEQ ID NO: 572120 - RNA, 19 nt, Artificial Sequence
  Description of Artificial Sequence: Synthetic oligonucleotide
  Antisense strand to SEQ ID NO: 572119
aagaugcuuacaauaccac

SEQ ID NO: 572121 - RNA, 19 nt, Artificial Sequence
  Description of Artificial Sequence: Synthetic oligonucleotide
  Sense strand starting at position 3474 of SEQ ID NO: 318565
ugacuauucucacaguaag

SEQ ID NO: 572122 - RNA, 19 nt, Artificial Sequence
  Description of Artificial Sequence: Synthetic oligonucleotide
  Antisense strand to SEQ ID NO: 572121
cuuacugugagaauaguca

SEQ ID NO: 572123 - RNA, 19 nt, Artificial Sequence
  Description of Artificial Sequence: Synthetic oligonucleotide
  Sense strand starting at position 3596 of SEQ ID NO: 318565
gcuaaccuagaauauguaa

SEQ ID NO: 572124 - RNA, 19 nt, Artificial Sequence
  Description of Artificial Sequence: Synthetic oligonucleotide
  Antisense strand to SEQ ID NO: 572123
uuacauauucuagguuagc

SEQ ID NO: 572125 - RNA, 19 nt, Artificial Sequence
  Description of Artificial Sequence: Synthetic oligonucleotide
  Sense strand starting at position 3643 of SEQ ID NO: 318565
guucguuuaguaguuacuu

SEQ ID NO: 572126 - RNA, 19 nt, Artificial Sequence
  Description of Artificial Sequence: Synthetic oligonucleotide
  Antisense strand to SEQ ID NO: 572125
aaguaacuacuaaacgaac

SEQ ID NO: 572127 - RNA, 19 nt, Artificial Sequence
  Description of Artificial Sequence: Synthetic oligonucleotide
  Sense strand starting at position 3644 of SEQ ID NO: 318565
uucguuuaguaguuacuuu

SEQ ID NO: 572128 - RNA, 19 nt, Artificial Sequence
  Description of Artificial Sequence: Synthetic oligonucleotide
  Antisense strand to SEQ ID NO: 572127
aaaguaacuacuaaacgaa

SEQ ID NO: 572129 - RNA, 19 nt, Artificial Sequence
  Description of Artificial Sequence: Synthetic oligonucleotide
  Sense strand starting at position 3672 of SEQ ID NO: 318565
aguuaaguacaguaacuuu

SEQ ID NO: 572130 - RNA, 19 nt, Artificial Sequence
  Description of Artificial Sequence: Synthetic oligonucleotide
  Antisense strand to SEQ ID NO: 572129
aaaguuacuguacuuaacu

SEQ ID NO: 572131 - RNA, 19 nt, Artificial Sequence
  Description of Artificial Sequence: Synthetic oligonucleotide
  Sense strand starting at position 3681 of SEQ ID NO: 318565
caguaacuuugggcuuauu

SEQ ID NO: 572132 - RNA, 19 nt, Artificial Sequence
  Description of Artificial Sequence: Synthetic oligonucleotide
  Antisense strand to SEQ ID NO: 572131
aauaagcccaaaguuacug

SEQ ID NO: 572133 - RNA, 19 nt, Artificial Sequence
  Description of Artificial Sequence: Synthetic oligonucleotide
  Sense strand starting at position 3717 of SEQ ID NO: 318565
aggaguuuaaggugaugau

SEQ ID NO: 572134 - RNA, 19 nt, Artificial Sequence
  Description of Artificial Sequence: Synthetic oligonucleotide
  Antisense strand to SEQ ID NO: 572133
aucaucaccuuaaacuccu

SEQ ID NO: 572135 - RNA, 19 nt, Artificial Sequence
  Description of Artificial Sequence: Synthetic oligonucleotide
  Sense strand starting at position 3751 of SEQ ID NO: 318565
ugagcuacucuguagaaau

SEQ ID NO: 572136 - RNA, 19 nt, Artificial Sequence
  Description of Artificial Sequence: Synthetic oligonucleotide
  Antisense strand to SEQ ID NO: 572135
auuucuacagaguagcuca

SEQ ID NO: 572137 - RNA, 19 nt, Artificial Sequence
  Description of Artificial Sequence: Synthetic oligonucleotide
  Sense strand starting at position 3763 of SEQ ID NO: 318565
uagaaauggugguugagga

SEQ ID NO: 572138 - RNA, 19 nt, Artificial Sequence
  Description of Artificial Sequence: Synthetic oligonucleotide
  Antisense strand to SEQ ID NO: 572137
uccucaaccaccauuucua

SEQ ID NO: 572139 - RNA, 19 nt, Artificial Sequence
  Description of Artificial Sequence: Synthetic oligonucleotide
  Sense strand starting at position 3778 of SEQ ID NO: 318565
aggaauuauugggugucca

SEQ ID NO: 572140 - RNA, 19 nt, Artificial Sequence
  Description of Artificial Sequence: Synthetic oligonucleotide
  Antisense strand to SEQ ID NO: 572139
uggacacccaauaauuccu

SEQ ID NO: 572141 - RNA, 19 nt, Artificial Sequence
  Description of Artificial Sequence: Synthetic oligonucleotide
  Sense strand starting at position 3779 of SEQ ID NO: 318565
ggaauuauuggguguccaa

SEQ ID NO: 572142 - RNA, 19 nt, Artificial Sequence
  Description of Artificial Sequence: Synthetic oligonucleotide
  Antisense strand to SEQ ID NO: 572141
uuggacacccaauaauucc

SEQ ID NO: 572143 - RNA, 19 nt, Artificial Sequence
  Description of Artificial Sequence: Synthetic oligonucleotide
  Sense strand starting at position 3831 of SEQ ID NO: 318565
aggugcuuacuuuguagga

SEQ ID NO: 572144 - RNA, 19 nt, Artificial Sequence
  Description of Artificial Sequence: Synthetic oligonucleotide
  Antisense strand to SEQ ID NO: 572143
uccuacaaaguaagcaccu

SEQ ID NO: 572145 - RNA, 19 nt, Artificial Sequence
  Description of Artificial Sequence: Synthetic oligonucleotide
  Sense strand starting at position 3855 of SEQ ID NO: 318565
gugggaggccucugugcuu

SEQ ID NO: 572146 - RNA, 19 nt, Artificial Sequence
  Description of Artificial Sequence: Synthetic oligonucleotide
  Antisense strand to SEQ ID NO: 572145
aagcacagaggccucccac

SEQ ID NO: 572147 - RNA, 19 nt, Artificial Sequence
  Description of Artificial Sequence: Synthetic oligonucleotide
  Sense strand starting at position 3912 of SEQ ID NO: 318565
ucaugauguuuggcccuau

SEQ ID NO: 572148 - RNA, 19 nt, Artificial Sequence
  Description of Artificial Sequence: Synthetic oligonucleotide
  Antisense strand to SEQ ID NO: 572147
auagggccaaacaucauga

SEQ ID NO: 572149 - RNA, 19 nt, Artificial Sequence
  Description of Artificial Sequence: Synthetic oligonucleotide
  Sense strand starting at position 3959 of SEQ ID NO: 318565
ucuagagggucuuagauau

SEQ ID NO: 572150 - RNA, 19 nt, Artificial Sequence
  Description of Artificial Sequence: Synthetic oligonucleotide
  Antisense strand to SEQ ID NO: 572149
auaucuaagacccucuaga

SEQ ID NO: 572151 - RNA, 19 nt, Artificial Sequence
  Description of Artificial Sequence: Synthetic oligonucleotide
  Sense strand starting at position 3965 of SEQ ID NO: 318565
gggucuuagauauguagaa

SEQ ID NO: 572152 - RNA, 19 nt, Artificial Sequence
  Description of Artificial Sequence: Synthetic oligonucleotide
  Antisense strand to SEQ ID NO: 572151
uucuacauaucuaagaccc

SEQ ID NO: 572153 - RNA, 19 nt, Artificial Sequence
  Description of Artificial Sequence: Synthetic oligonucleotide
  Sense strand starting at position 3966 of SEQ ID NO: 318565
ggucuuagauauguagaaa

SEQ ID NO: 572154 - RNA, 19 nt, Artificial Sequence
  Description of Artificial Sequence: Synthetic oligonucleotide
  Antisense strand to SEQ ID NO: 572153
uuucuacauaucuaagacc

SEQ ID NO: 572155 - RNA, 19 nt, Artificial Sequence
  Description of Artificial Sequence: Synthetic oligonucleotide
  Sense strand starting at position 2217 of SEQ ID NO: 318566
ggagguuucuacuccgaag

SEQ ID NO: 572156 - RNA, 19 nt, Artificial Sequence
  Description of Artificial Sequence: Synthetic oligonucleotide
  Antisense strand to SEQ ID NO: 572155
cuucggaguagaaaccucc

SEQ ID NO: 572157 - RNA, 19 nt, Artificial Sequence
  Description of Artificial Sequence: Synthetic oligonucleotide
  Sense strand starting at position 2229 of SEQ ID NO: 318566
uccgaagugaauuaucuga

SEQ ID NO: 572158 - RNA, 19 nt, Artificial Sequence
  Description of Artificial Sequence: Synthetic oligonucleotide
  Antisense strand to SEQ ID NO: 572157
ucagauaauucacuucgga

SEQ ID NO: 572159 - RNA, 19 nt, Artificial Sequence
  Description of Artificial Sequence: Synthetic oligonucleotide
  Sense strand starting at position 2231 of SEQ ID NO: 318566
cgaagugaauuaucugaga

SEQ ID NO: 572160 - RNA, 19 nt, Artificial Sequence
  Description of Artificial Sequence: Synthetic oligonucleotide
  Antisense strand to SEQ ID NO: 572159
ucucagauaauucacuucg

SEQ ID NO: 572161 - RNA, 19 nt, Artificial Sequence
  Description of Artificial Sequence: Synthetic oligonucleotide
  Sense strand starting at position 2236 of SEQ ID NO: 318566
ugaauuaucugagauuucu

SEQ ID NO: 572162 - RNA, 19 nt, Artificial Sequence
  Description of Artificial Sequence: Synthetic oligonucleotide
  Antisense strand to SEQ ID NO: 572161
agaaaucucagauaauuca

SEQ ID NO: 572163 - RNA, 19 nt, Artificial Sequence
  Description of Artificial Sequence: Synthetic oligonucleotide
  Sense strand starting at position 2291 of SEQ ID NO: 318566
uuagcauuugcaugccuga

SEQ ID NO: 572164 - RNA, 19 nt, Artificial Sequence
  Description of Artificial Sequence: Synthetic oligonucleotide
  Antisense strand to SEQ ID NO: 572163
ucaggcaugcaaaugcuaa

SEQ ID NO: 572165 - RNA, 19 nt, Artificial Sequence
  Description of Artificial Sequence: Synthetic oligonucleotide
  Sense strand starting at position 2294 of SEQ ID NO: 318566
gcauuugcaugccugauaa

SEQ ID NO: 572166 - RNA, 19 nt, Artificial Sequence
  Description of Artificial Sequence: Synthetic oligonucleotide
  Antisense strand to SEQ ID NO: 572165
uuaucaggcaugcaaaugc

SEQ ID NO: 572167 - RNA, 19 nt, Artificial Sequence
  Description of Artificial Sequence: Synthetic oligonucleotide
  Sense strand starting at position 2331 of SEQ ID NO: 318566
cucagugaaugcuccuaga

SEQ ID NO: 572168 - RNA, 19 nt, Artificial Sequence
  Description of Artificial Sequence: Synthetic oligonucleotide
  Antisense strand to SEQ ID NO: 572167
ucuaggagcauucacugag

SEQ ID NO: 572169 - RNA, 19 nt, Artificial Sequence
  Description of Artificial Sequence: Synthetic oligonucleotide
  Sense strand starting at position 2384 of SEQ ID NO: 318566
augcgaauuagugauugca

SEQ ID NO: 572170 - RNA, 19 nt, Artificial Sequence
  Description of Artificial Sequence: Synthetic oligonucleotide
  Antisense strand to SEQ ID NO: 572169
ugcaaucacuaauucgcau

SEQ ID NO: 572171 - RNA, 19 nt, Artificial Sequence
  Description of Artificial Sequence: Synthetic oligonucleotide
  Sense strand starting at position 2386 of SEQ ID NO: 318566
gcgaauuagugauugcacu

SEQ ID NO: 572172 - RNA, 19 nt, Artificial Sequence
  Description of Artificial Sequence: Synthetic oligonucleotide
  Antisense strand to SEQ ID NO: 572171
agugcaaucacuaauucgc

SEQ ID NO: 572173 - RNA, 19 nt, Artificial Sequence
  Description of Artificial Sequence: Synthetic oligonucleotide
  Sense strand starting at position 2387 of SEQ ID NO: 318566
cgaauuagugauugcacua

SEQ ID NO: 572174 - RNA, 19 nt, Artificial Sequence
  Description of Artificial Sequence: Synthetic oligonucleotide
  Antisense strand to SEQ ID NO: 572173
uagugcaaucacuaauucg

SEQ ID NO: 572175 - RNA, 19 nt, Artificial Sequence
  Description of Artificial Sequence: Synthetic oligonucleotide
  Sense strand starting at position 2513 of SEQ ID NO: 318566
aggugcugugauugacaaa

SEQ ID NO: 572176 - RNA, 19 nt, Artificial Sequence
  Description of Artificial Sequence: Synthetic oligonucleotide
  Antisense strand to SEQ ID NO: 572175
uuugucaaucacagcaccu

SEQ ID NO: 572177 - RNA, 19 nt, Artificial Sequence
  Description of Artificial Sequence: Synthetic oligonucleotide
  Sense strand starting at position 2635 of SEQ ID NO: 318566
auauauguagugcggugaa

SEQ ID NO: 572178 - RNA, 19 nt, Artificial Sequence
  Description of Artificial Sequence: Synthetic oligonucleotide
  Antisense strand to SEQ ID NO: 572177
uucaccgcacuacauauau

SEQ ID NO: 572179 - RNA, 19 nt, Artificial Sequence
  Description of Artificial Sequence: Synthetic oligonucleotide
  Sense strand starting at position 2638 of SEQ ID NO: 318566
uauguagugcggugaauga

SEQ ID NO: 572180 - RNA, 19 nt, Artificial Sequence
  Description of Artificial Sequence: Synthetic oligonucleotide
  Antisense strand to SEQ ID NO: 572179
ucauucaccgcacuacaua

SEQ ID NO: 572181 - RNA, 19 nt, Artificial Sequence
  Description of Artificial Sequence: Synthetic oligonucleotide
  Sense strand starting at position 2770 of SEQ ID NO: 318566
gggauuccaucauaaagua

SEQ ID NO: 572182 - RNA, 19 nt, Artificial Sequence
  Description of Artificial Sequence: Synthetic oligonucleotide
  Antisense strand to SEQ ID NO: 572181
uacuuuaugauggaauccc

SEQ ID NO: 572183 - RNA, 19 nt, Artificial Sequence
  Description of Artificial Sequence: Synthetic oligonucleotide
  Sense strand starting at position 2817 of SEQ ID NO: 318566
aacaauaucuggcagggua

SEQ ID NO: 572184 - RNA, 19 nt, Artificial Sequence
  Description of Artificial Sequence: Synthetic oligonucleotide
  Antisense strand to SEQ ID NO: 572183
uacccugccagauauuguu

SEQ ID NO: 572185 - RNA, 19 nt, Artificial Sequence
  Description of Artificial Sequence: Synthetic oligonucleotide
  Sense strand starting at position 2937 of SEQ ID NO: 318566
uaacaauugcaggguacau

SEQ ID NO: 572186 - RNA, 19 nt, Artificial Sequence
  Description of Artificial Sequence: Synthetic oligonucleotide
  Antisense strand to SEQ ID NO: 572185
auguacccugcaauuguua

SEQ ID NO: 572187 - RNA, 19 nt, Artificial Sequence
  Description of Artificial Sequence: Synthetic oligonucleotide
  Sense strand starting at position 2995 of SEQ ID NO: 318566
guaagaggucagugaccau

SEQ ID NO: 572188 - RNA, 19 nt, Artificial Sequence
  Description of Artificial Sequence: Synthetic oligonucleotide
  Antisense strand to SEQ ID NO: 572187
auggucacugaccucuuac

SEQ ID NO: 572189 - RNA, 19 nt, Artificial Sequence
  Description of Artificial Sequence: Synthetic oligonucleotide
  Sense strand starting at position 3211 of SEQ ID NO: 318566
ugaagacacuucuaauuga

SEQ ID NO: 572190 - RNA, 19 nt, Artificial Sequence
  Description of Artificial Sequence: Synthetic oligonucleotide
  Antisense strand to SEQ ID NO: 572189
ucaauuagaagugucuuca

SEQ ID NO: 572191 - RNA, 19 nt, Artificial Sequence
  Description of Artificial Sequence: Synthetic oligonucleotide
  Sense strand starting at position 3214 of SEQ ID NO: 318566
agacacuucuaauugaggu

SEQ ID NO: 572192 - RNA, 19 nt, Artificial Sequence
  Description of Artificial Sequence: Synthetic oligonucleotide
  Antisense strand to SEQ ID NO: 572191
accucaauuagaagugucu

SEQ ID NO: 572193 - RNA, 19 nt, Artificial Sequence
  Description of Artificial Sequence: Synthetic oligonucleotide
  Sense strand starting at position 3299 of SEQ ID NO: 318566
gccagaagaguguacaauu

SEQ ID NO: 572194 - RNA, 19 nt, Artificial Sequence
  Description of Artificial Sequence: Synthetic oligonucleotide
  Antisense strand to SEQ ID NO: 572193
aauuguacacucuucuggc

SEQ ID NO: 572195 - RNA, 19 nt, Artificial Sequence
  Description of Artificial Sequence: Synthetic oligonucleotide
  Sense strand starting at position 3317 of SEQ ID NO: 318566
uauucuaagggcuguggua

SEQ ID NO: 572196 - RNA, 19 nt, Artificial Sequence
  Description of Artificial Sequence: Synthetic oligonucleotide
  Antisense strand to SEQ ID NO: 572195
uaccacagcccuuagaaua

SEQ ID NO: 572197 - RNA, 19 nt, Artificial Sequence
  Description of Artificial Sequence: Synthetic oligonucleotide
  Sense strand starting at position 3319 of SEQ ID NO: 318566
uucuaagggcugugguauu

SEQ ID NO: 572198 - RNA, 19 nt, Artificial Sequence
  Description of Artificial Sequence: Synthetic oligonucleotide
  Antisense strand to SEQ ID NO: 572197
aauaccacagcccuuagaa

SEQ ID NO: 572199 - RNA, 19 nt, Artificial Sequence
  Description of Artificial Sequence: Synthetic oligonucleotide
  Sense strand starting at position 3330 of SEQ ID NO: 318566
gugguauuguaagcaucuu

SEQ ID NO: 572200 - RNA, 19 nt, Artificial Sequence
  Description of Artificial Sequence: Synthetic oligonucleotide
  Antisense strand to SEQ ID NO: 572199
aagaugcuuacaauaccac

SEQ ID NO: 572201 - RNA, 19 nt, Artificial Sequence
  Description of Artificial Sequence: Synthetic oligonucleotide
  Sense strand starting at position 3470 of SEQ ID NO: 318566
ugacuauucucacaguaag

SEQ ID NO: 572202 - RNA, 19 nt, Artificial Sequence
  Description of Artificial Sequence: Synthetic oligonucleotide
  Antisense strand to SEQ ID NO: 572201
cuuacugugagaauaguca

SEQ ID NO: 572203 - RNA, 19 nt, Artificial Sequence
  Description of Artificial Sequence: Synthetic oligonucleotide
  Sense strand starting at position 3592 of SEQ ID NO: 318566
gcuaaccuagaauauguaa

SEQ ID NO: 572204 - RNA, 19 nt, Artificial Sequence
  Description of Artificial Sequence: Synthetic oligonucleotide
  Antisense strand to SEQ ID NO: 572203
uuacauauucuagguuagc

SEQ ID NO: 572205 - RNA, 19 nt, Artificial Sequence
  Description of Artificial Sequence: Synthetic oligonucleotide
  Sense strand starting at position 3639 of SEQ ID NO: 318566
guucguuuaguaguuacuu

SEQ ID NO: 572206 - RNA, 19 nt, Artificial Sequence
  Description of Artificial Sequence: Synthetic oligonucleotide
  Antisense strand to SEQ ID NO: 572205
aaguaacuacuaaacgaac

SEQ ID NO: 572207 - RNA, 19 nt, Artificial Sequence
  Description of Artificial Sequence: Synthetic oligonucleotide
  Sense strand starting at position 3640 of SEQ ID NO: 318566
uucguuuaguaguuacuuu

SEQ ID NO: 572208 - RNA, 19 nt, Artificial Sequence
  Description of Artificial Sequence: Synthetic oligonucleotide
  Antisense strand to SEQ ID NO: 572207
aaaguaacuacuaaacgaa

SEQ ID NO: 572209 - RNA, 19 nt, Artificial Sequence
  Description of Artificial Sequence: Synthetic oligonucleotide
  Sense strand starting at position 3668 of SEQ ID NO: 318566
aguuaaguacaguaacuuu

SEQ ID NO: 572210 - RNA, 19 nt, Artificial Sequence
  Description of Artificial Sequence: Synthetic oligonucleotide
  Antisense strand to SEQ ID NO: 572209
aaaguuacuguacuuaacu

SEQ ID NO: 572211 - RNA, 19 nt, Artificial Sequence
  Description of Artificial Sequence: Synthetic oligonucleotide
  Sense strand starting at position 3677 of SEQ ID NO: 318566
caguaacuuugggcuuauu

SEQ ID NO: 572212 - RNA, 19 nt, Artificial Sequence
  Description of Artificial Sequence: Synthetic oligonucleotide
  Antisense strand to SEQ ID NO: 572211
aauaagcccaaaguuacug

SEQ ID NO: 572213 - RNA, 19 nt, Artificial Sequence
  Description of Artificial Sequence: Synthetic oligonucleotide
  Sense strand starting at position 3713 of SEQ ID NO: 318566
aggaguuuaaggugaugau

SEQ ID NO: 572214 - RNA, 19 nt, Artificial Sequence
  Description of Artificial Sequence: Synthetic oligonucleotide
  Antisense strand to SEQ ID NO: 572213
aucaucaccuuaaacuccu

SEQ ID NO: 572215 - RNA, 19 nt, Artificial Sequence
  Description of Artificial Sequence: Synthetic oligonucleotide
  Sense strand starting at position 3747 of SEQ ID NO: 318566
ugagcuacucuguagaaau

SEQ ID NO: 572216 - RNA, 19 nt, Artificial Sequence
  Description of Artificial Sequence: Synthetic oligonucleotide
  Antisense strand to SEQ ID NO: 572215
auuucuacagaguagcuca

SEQ ID NO: 572217 - RNA, 19 nt, Artificial Sequence
  Description of Artificial Sequence: Synthetic oligonucleotide
  Sense strand starting at position 3759 of SEQ ID NO: 318566
uagaaauggugguugagga

SEQ ID NO: 572218 - RNA, 19 nt, Artificial Sequence
  Description of Artificial Sequence: Synthetic oligonucleotide
  Antisense strand to SEQ ID NO: 572217
uccucaaccaccauuucua

SEQ ID NO: 572219 - RNA, 19 nt, Artificial Sequence
  Description of Artificial Sequence: Synthetic oligonucleotide
  Sense strand starting at position 3774 of SEQ ID NO: 318566
aggaauuauugggugucca

SEQ ID NO: 572220 - RNA, 19 nt, Artificial Sequence
  Description of Artificial Sequence: Synthetic oligonucleotide
  Antisense strand to SEQ ID NO: 572219
uggacacccaauaauuccu

SEQ ID NO: 572221 - RNA, 19 nt, Artificial Sequence
  Description of Artificial Sequence: Synthetic oligonucleotide
  Sense strand starting at position 3775 of SEQ ID NO: 318566
ggaauuauuggguguccaa

SEQ ID NO: 572222 - RNA, 19 nt, Artificial Sequence
  Description of Artificial Sequence: Synthetic oligonucleotide
  Antisense strand to SEQ ID NO: 572221
uuggacacccaauaauucc

SEQ ID NO: 572223 - RNA, 19 nt, Artificial Sequence
  Description of Artificial Sequence: Synthetic oligonucleotide
  Sense strand starting at position 3827 of SEQ ID NO: 318566
aggugcuuacuuuguagga

SEQ ID NO: 572224 - RNA, 19 nt, Artificial Sequence
  Description of Artificial Sequence: Synthetic oligonucleotide
  Antisense strand to SEQ ID NO: 572223
uccuacaaaguaagcaccu

SEQ ID NO: 572225 - RNA, 19 nt, Artificial Sequence
  Description of Artificial Sequence: Synthetic oligonucleotide
  Sense strand starting at position 3851 of SEQ ID NO: 318566
gugggaggccucugugcuu

SEQ ID NO: 572226 - RNA, 19 nt, Artificial Sequence
  Description of Artificial Sequence: Synthetic oligonucleotide
  Antisense strand to SEQ ID NO: 572225
aagcacagaggccucccac

SEQ ID NO: 572227 - RNA, 19 nt, Artificial Sequence
  Description of Artificial Sequence: Synthetic oligonucleotide
  Sense strand starting at position 3908 of SEQ ID NO: 318566
ucaugauguuuggcccuau

SEQ ID NO: 572228 - RNA, 19 nt, Artificial Sequence
  Description of Artificial Sequence: Synthetic oligonucleotide
  Antisense strand to SEQ ID NO: 572227
auagggccaaacaucauga

SEQ ID NO: 572229 - RNA, 19 nt, Artificial Sequence
  Description of Artificial Sequence: Synthetic oligonucleotide
  Sense strand starting at position 3955 of SEQ ID NO: 318566
ucuagagggucuuagauau

SEQ ID NO: 572230 - RNA, 19 nt, Artificial Sequence
  Description of Artificial Sequence: Synthetic oligonucleotide
  Antisense strand to SEQ ID NO: 572229
auaucuaagacccucuaga

SEQ ID NO: 572231 - RNA, 19 nt, Artificial Sequence
  Description of Artificial Sequence: Synthetic oligonucleotide
  Sense strand starting at position 3961 of SEQ ID NO: 318566
gggucuuagauauguagaa

SEQ ID NO: 572232 - RNA, 19 nt, Artificial Sequence
  Description of Artificial Sequence: Synthetic oligonucleotide
  Antisense strand to SEQ ID NO: 572231
uucuacauaucuaagaccc

SEQ ID NO: 572233 - RNA, 19 nt, Artificial Sequence
  Description of Artificial Sequence: Synthetic oligonucleotide
  Sense strand starting at position 3962 of SEQ ID NO: 318566
ggucuuagauauguagaaa

SEQ ID NO: 572234 - RNA, 19 nt, Artificial Sequence
  Description of Artificial Sequence: Synthetic oligonucleotide
  Antisense strand to SEQ ID NO: 572233
uuucuacauaucuaagacc

SEQ ID NO: 572235 - RNA, 19 nt, Artificial Sequence
  Description of Artificial Sequence: Synthetic oligonucleotide
  Sense strand starting at position 77 of SEQ ID NO: 318567
ugcguuaaccaagauaaau

SEQ ID NO: 572236 - RNA, 19 nt, Artificial Sequence
  Description of Artificial Sequence: Synthetic oligonucleotide
  Antisense strand to SEQ ID NO: 572235
auuuaucuugguuaacgca

SEQ ID NO: 572237 - RNA, 19 nt, Artificial Sequence
  Description of Artificial Sequence: Synthetic oligonucleotide
  Sense strand starting at position 102 of SEQ ID NO: 318567
ugaucaaacuuugcagacu

SEQ ID NO: 572238 - RNA, 19 nt, Artificial Sequence
  Description of Artificial Sequence: Synthetic oligonucleotide
  Antisense strand to SEQ ID NO: 572237
agucugcaaaguuugauca

SEQ ID NO: 572239 - RNA, 19 nt, Artificial Sequence
  Description of Artificial Sequence: Synthetic oligonucleotide
  Sense strand starting at position 178 of SEQ ID NO: 318567
agauuauaguucuuucuac

SEQ ID NO: 572240 - RNA, 19 nt, Artificial Sequence
  Description of Artificial Sequence: Synthetic oligonucleotide
  Antisense strand to SEQ ID NO: 572239
guagaaagaacuauaaucu

SEQ ID NO: 572241 - RNA, 19 nt, Artificial Sequence
  Description of Artificial Sequence: Synthetic oligonucleotide
  Sense strand starting at position 367 of SEQ ID NO: 318567
gcuguauaguaaguagaaa

SEQ ID NO: 572242 - RNA, 19 nt, Artificial Sequence
  Description of Artificial Sequence: Synthetic oligonucleotide
  Antisense strand to SEQ ID NO: 572241
uuucuacuuacuauacagc

SEQ ID NO: 572243 - RNA, 19 nt, Artificial Sequence
  Description of Artificial Sequence: Synthetic oligonucleotide
  Sense strand starting at position 680 of SEQ ID NO: 318567
caauuagcagaaugugauc

SEQ ID NO: 572244 - RNA, 19 nt, Artificial Sequence
  Description of Artificial Sequence: Synthetic oligonucleotide
  Antisense strand to SEQ ID NO: 572243
gaucacauucugcuaauug

SEQ ID NO: 572245 - RNA, 19 nt, Artificial Sequence
  Description of Artificial Sequence: Synthetic oligonucleotide
  Sense strand starting at position 686 of SEQ ID NO: 318567
gcagaaugugaucagugcu

SEQ ID NO: 572246 - RNA, 19 nt, Artificial Sequence
  Description of Artificial Sequence: Synthetic oligonucleotide
  Antisense strand to SEQ ID NO: 572245
agcacugaucacauucugc

SEQ ID NO: 572247 - RNA, 19 nt, Artificial Sequence
  Description of Artificial Sequence: Synthetic oligonucleotide
  Sense strand starting at position 689 of SEQ ID NO: 318567
gaaugugaucagugcugaa

SEQ ID NO: 572248 - RNA, 19 nt, Artificial Sequence
  Description of Artificial Sequence: Synthetic oligonucleotide
  Antisense strand to SEQ ID NO: 572247
uucagcacugaucacauuc

SEQ ID NO: 572249 - RNA, 19 nt, Artificial Sequence
  Description of Artificial Sequence: Synthetic oligonucleotide
  Sense strand starting at position 832 of SEQ ID NO: 318567
gcaaguauagcccacagua

SEQ ID NO: 572250 - RNA, 19 nt, Artificial Sequence
  Description of Artificial Sequence: Synthetic oligonucleotide
  Antisense strand to SEQ ID NO: 572249
uacugugggcuauacuugc

SEQ ID NO: 572251 - RNA, 19 nt, Artificial Sequence
  Description of Artificial Sequence: Synthetic oligonucleotide
  Sense strand starting at position 852 of SEQ ID NO: 318567
acaauccucugggaaauuu

SEQ ID NO: 572252 - RNA, 19 nt, Artificial Sequence
  Description of Artificial Sequence: Synthetic oligonucleotide
  Antisense strand to SEQ ID NO: 572251
aaauuucccagaggauugu

SEQ ID NO: 572253 - RNA, 19 nt, Artificial Sequence
  Description of Artificial Sequence: Synthetic oligonucleotide
  Sense strand starting at position 994 of SEQ ID NO: 318567
gagggugcuuccuuugaca

SEQ ID NO: 572254 - RNA, 19 nt, Artificial Sequence
  Description of Artificial Sequence: Synthetic oligonucleotide
  Antisense strand to SEQ ID NO: 572253
ugucaaaggaagcacccuc

SEQ ID NO: 572255 - RNA, 19 nt, Artificial Sequence
  Description of Artificial Sequence: Synthetic oligonucleotide
  Sense strand starting at position 996 of SEQ ID NO: 318567
gggugcuuccuuugacaaa

SEQ ID NO: 572256 - RNA, 19 nt, Artificial Sequence
  Description of Artificial Sequence: Synthetic oligonucleotide
  Antisense strand to SEQ ID NO: 572255
uuugucaaaggaagcaccc

SEQ ID NO: 572257 - RNA, 19 nt, Artificial Sequence
  Description of Artificial Sequence: Synthetic oligonucleotide
  Sense strand starting at position 1128 of SEQ ID NO: 318567
agcaguuuccuggacuaau

SEQ ID NO: 572258 - RNA, 19 nt, Artificial Sequence
  Description of Artificial Sequence: Synthetic oligonucleotide
  Antisense strand to SEQ ID NO: 572257
auuaguccaggaaacugcu

SEQ ID NO: 572259 - RNA, 19 nt, Artificial Sequence
  Description of Artificial Sequence: Synthetic oligonucleotide
  Sense strand starting at position 2153 of SEQ ID NO: 318567
acuuauguggcagaaucuu

SEQ ID NO: 572260 - RNA, 19 nt, Artificial Sequence
  Description of Artificial Sequence: Synthetic oligonucleotide
  Antisense strand to SEQ ID NO: 572259
aagauucugccacauaagu

SEQ ID NO: 572261 - RNA, 19 nt, Artificial Sequence
  Description of Artificial Sequence: Synthetic oligonucleotide
  Sense strand starting at position 2199 of SEQ ID NO: 318567
gcgggacuaggcuaaauaa

SEQ ID NO: 572262 - RNA, 19 nt, Artificial Sequence
  Description of Artificial Sequence: Synthetic oligonucleotide
  Antisense strand to SEQ ID NO: 572261
uuauuuagccuagucccgc

SEQ ID NO: 572263 - RNA, 19 nt, Artificial Sequence
  Description of Artificial Sequence: Synthetic oligonucleotide
  Sense strand starting at position 2239 of SEQ ID NO: 318567
uuuaaaucuucuguaggaa

SEQ ID NO: 572264 - RNA, 19 nt, Artificial Sequence
  Description of Artificial Sequence: Synthetic oligonucleotide
  Antisense strand to SEQ ID NO: 572263
uuccuacagaagauuuaaa

SEQ ID NO: 572265 - RNA, 19 nt, Artificial Sequence
  Description of Artificial Sequence: Synthetic oligonucleotide
  Sense strand starting at position 2247 of SEQ ID NO: 318567
uucuguaggaagugguaga

SEQ ID NO: 572266 - RNA, 19 nt, Artificial Sequence
  Description of Artificial Sequence: Synthetic oligonucleotide
  Antisense strand to SEQ ID NO: 572265
ucuaccacuuccuacagaa

SEQ ID NO: 572267 - RNA, 19 nt, Artificial Sequence
  Description of Artificial Sequence: Synthetic oligonucleotide
  Sense strand starting at position 2318 of SEQ ID NO: 318567
aguauuggugagcgagaga

SEQ ID NO: 572268 - RNA, 19 nt, Artificial Sequence
  Description of Artificial Sequence: Synthetic oligonucleotide
  Antisense strand to SEQ ID NO: 572267
ucucucgcucaccaauacu

SEQ ID NO: 572269 - RNA, 19 nt, Artificial Sequence
  Description of Artificial Sequence: Synthetic oligonucleotide
  Sense strand starting at position 2392 of SEQ ID NO: 318567
uggaaauguucccuaucug

SEQ ID NO: 572270 - RNA, 19 nt, Artificial Sequence
  Description of Artificial Sequence: Synthetic oligonucleotide
  Antisense strand to SEQ ID NO: 572269
cagauagggaacauuucca

SEQ ID NO: 572271 - RNA, 19 nt, Artificial Sequence
  Description of Artificial Sequence: Synthetic oligonucleotide
  Sense strand starting at position 2393 of SEQ ID NO: 318567
ggaaauguucccuaucugu

SEQ ID NO: 572272 - RNA, 19 nt, Artificial Sequence
  Description of Artificial Sequence: Synthetic oligonucleotide
  Antisense strand to SEQ ID NO: 572271
acagauagggaacauuucc

SEQ ID NO: 572273 - RNA, 19 nt, Artificial Sequence
  Description of Artificial Sequence: Synthetic oligonucleotide
  Sense strand starting at position 2538 of SEQ ID NO: 318567
gccagugguuaccuauuua

SEQ ID NO: 572274 - RNA, 19 nt, Artificial Sequence
  Description of Artificial Sequence: Synthetic oligonucleotide
  Antisense strand to SEQ ID NO: 572273
uaaauagguaaccacuggc

SEQ ID NO: 572275 - RNA, 19 nt, Artificial Sequence
  Description of Artificial Sequence: Synthetic oligonucleotide
  Sense strand starting at position 2590 of SEQ ID NO: 318567
aauaauuucucgucugcga

SEQ ID NO: 572276 - RNA, 19 nt, Artificial Sequence
  Description of Artificial Sequence: Synthetic oligonucleotide
  Antisense strand to SEQ ID NO: 572275
ucgcagacgagaaauuauu

SEQ ID NO: 572277 - RNA, 19 nt, Artificial Sequence
  Description of Artificial Sequence: Synthetic oligonucleotide
  Sense strand starting at position 2592 of SEQ ID NO: 318567
uaauuucucgucugcgauu

SEQ ID NO: 572278 - RNA, 19 nt, Artificial Sequence
  Description of Artificial Sequence: Synthetic oligonucleotide
  Antisense strand to SEQ ID NO: 572277
aaucgcagacgagaaauua

SEQ ID NO: 572279 - RNA, 19 nt, Artificial Sequence
  Description of Artificial Sequence: Synthetic oligonucleotide
  Sense strand starting at position 2755 of SEQ ID NO: 318567
ggagucugucauggaucaa

SEQ ID NO: 572280 - RNA, 19 nt, Artificial Sequence
  Description of Artificial Sequence: Synthetic oligonucleotide
  Antisense strand to SEQ ID NO: 572279
uugauccaugacagacucc

SEQ ID NO: 572281 - RNA, 19 nt, Artificial Sequence
  Description of Artificial Sequence: Synthetic oligonucleotide
  Sense strand starting at position 2803 of SEQ ID NO: 318567
cuugacuugaggugauuau

SEQ ID NO: 572282 - RNA, 19 nt, Artificial Sequence
  Description of Artificial Sequence: Synthetic oligonucleotide
  Antisense strand to SEQ ID NO: 572281
auaaucaccucaagucaag

SEQ ID NO: 572283 - RNA, 19 nt, Artificial Sequence
  Description of Artificial Sequence: Synthetic oligonucleotide
  Sense strand starting at position 2847 of SEQ ID NO: 318567
ugucucuauuuauugcuua

SEQ ID NO: 572284 - RNA, 19 nt, Artificial Sequence
  Description of Artificial Sequence: Synthetic oligonucleotide
  Antisense strand to SEQ ID NO: 572283
uaagcaauaaauagagaca

SEQ ID NO: 572285 - RNA, 19 nt, Artificial Sequence
  Description of Artificial Sequence: Synthetic oligonucleotide
  Sense strand starting at position 2878 of SEQ ID NO: 318567
uuaugcuauggucauauau

SEQ ID NO: 572286 - RNA, 19 nt, Artificial Sequence
  Description of Artificial Sequence: Synthetic oligonucleotide
  Antisense strand to SEQ ID NO: 572285
auauaugaccauagcauaa

SEQ ID NO: 572287 - RNA, 19 nt, Artificial Sequence
  Description of Artificial Sequence: Synthetic oligonucleotide
  Sense strand starting at position 2934 of SEQ ID NO: 318567
ggugaaauauagguccuga

SEQ ID NO: 572288 - RNA, 19 nt, Artificial Sequence
  Description of Artificial Sequence: Synthetic oligonucleotide
  Antisense strand to SEQ ID NO: 572287
ucaggaccuauauuucacc

SEQ ID NO: 572289 - RNA, 19 nt, Artificial Sequence
  Description of Artificial Sequence: Synthetic oligonucleotide
  Sense strand starting at position 2939 of SEQ ID NO: 318567
aauauagguccugaugcuu

SEQ ID NO: 572290 - RNA, 19 nt, Artificial Sequence
  Description of Artificial Sequence: Synthetic oligonucleotide
  Antisense strand to SEQ ID NO: 572289
aagcaucaggaccuauauu

SEQ ID NO: 572291 - RNA, 19 nt, Artificial Sequence
  Description of Artificial Sequence: Synthetic oligonucleotide
  Sense strand starting at position 3006 of SEQ ID NO: 318567
uuaauugucccuuauguag

SEQ ID NO: 572292 - RNA, 19 nt, Artificial Sequence
  Description of Artificial Sequence: Synthetic oligonucleotide
  Antisense strand to SEQ ID NO: 572291
cuacauaagggacaauuaa

SEQ ID NO: 572293 - RNA, 19 nt, Artificial Sequence
  Description of Artificial Sequence: Synthetic oligonucleotide
  Sense strand starting at position 3301 of SEQ ID NO: 318567
aggaaaugaaguuguuauu

SEQ ID NO: 572294 - RNA, 19 nt, Artificial Sequence
  Description of Artificial Sequence: Synthetic oligonucleotide
  Antisense strand to SEQ ID NO: 572293
aauaacaacuucauuuccu

SEQ ID NO: 572295 - RNA, 19 nt, Artificial Sequence
  Description of Artificial Sequence: Synthetic oligonucleotide
  Sense strand starting at position 3404 of SEQ ID NO: 318567
gguagcauaccugaacuuu

SEQ ID NO: 572296 - RNA, 19 nt, Artificial Sequence
  Description of Artificial Sequence: Synthetic oligonucleotide
  Antisense strand to SEQ ID NO: 572295
aaaguucagguaugcuacc

SEQ ID NO: 572297 - RNA, 19 nt, Artificial Sequence
  Description of Artificial Sequence: Synthetic oligonucleotide
  Sense strand starting at position 3456 of SEQ ID NO: 318567
gggaauacaucaccuaggu

SEQ ID NO: 572298 - RNA, 19 nt, Artificial Sequence
  Description of Artificial Sequence: Synthetic oligonucleotide
  Antisense strand to SEQ ID NO: 572297
accuaggugauguauuccc

SEQ ID NO: 572299 - RNA, 19 nt, Artificial Sequence
  Description of Artificial Sequence: Synthetic oligonucleotide
  Sense strand starting at position 3497 of SEQ ID NO: 318567
uccuuagucucagugauuu

SEQ ID NO: 572300 - RNA, 19 nt, Artificial Sequence
  Description of Artificial Sequence: Synthetic oligonucleotide
  Antisense strand to SEQ ID NO: 572299
aaaucacugagacuaagga

SEQ ID NO: 572301 - RNA, 19 nt, Artificial Sequence
  Description of Artificial Sequence: Synthetic oligonucleotide
  Sense strand starting at position 3587 of SEQ ID NO: 318567
gccuaaacucuaugagcca

SEQ ID NO: 572302 - RNA, 19 nt, Artificial Sequence
  Description of Artificial Sequence: Synthetic oligonucleotide
  Antisense strand to SEQ ID NO: 572301
uggcucauagaguuuaggc

SEQ ID NO: 572303 - RNA, 19 nt, Artificial Sequence
  Description of Artificial Sequence: Synthetic oligonucleotide
  Sense strand starting at position 3603 of SEQ ID NO: 318567
ccagaacugcaauaauugu

SEQ ID NO: 572304 - RNA, 19 nt, Artificial Sequence
  Description of Artificial Sequence: Synthetic oligonucleotide
  Antisense strand to SEQ ID NO: 572303
acaauuauugcaguucugg

SEQ ID NO: 572305 - RNA, 19 nt, Artificial Sequence
  Description of Artificial Sequence: Synthetic oligonucleotide
  Sense strand starting at position 3720 of SEQ ID NO: 318567
auauccagauugcuaaagu

SEQ ID NO: 572306 - RNA, 19 nt, Artificial Sequence
  Description of Artificial Sequence: Synthetic oligonucleotide
  Antisense strand to SEQ ID NO: 572305
acuuuagcaaucuggauau

SEQ ID NO: 572307 - RNA, 19 nt, Artificial Sequence
  Description of Artificial Sequence: Synthetic oligonucleotide
  Sense strand starting at position 3729 of SEQ ID NO: 318567
uugcuaaaguauuugcaua

SEQ ID NO: 572308 - RNA, 19 nt, Artificial Sequence
  Description of Artificial Sequence: Synthetic oligonucleotide
  Antisense strand to SEQ ID NO: 572307
uaugcaaauacuuuagcaa

SEQ ID NO: 572309 - RNA, 19 nt, Artificial Sequence
  Description of Artificial Sequence: Synthetic oligonucleotide
  Sense strand starting at position 3799 of SEQ ID NO: 318567
ugaguucuacacugccuaa

SEQ ID NO: 572310 - RNA, 19 nt, Artificial Sequence
  Description of Artificial Sequence: Synthetic oligonucleotide
  Antisense strand to SEQ ID NO: 572309
uuaggcaguguagaacuca

SEQ ID NO: 572311 - RNA, 19 nt, Artificial Sequence
  Description of Artificial Sequence: Synthetic oligonucleotide
  Sense strand starting at position 3812 of SEQ ID NO: 318567
gccuaaauaucauuaguug

SEQ ID NO: 572312 - RNA, 19 nt, Artificial Sequence
  Description of Artificial Sequence: Synthetic oligonucleotide
  Antisense strand to SEQ ID NO: 572311
caacuaaugauauuuaggc

SEQ ID NO: 572313 - RNA, 19 nt, Artificial Sequence
  Description of Artificial Sequence: Synthetic oligonucleotide
  Sense strand starting at position 3813 of SEQ ID NO: 318567
ccuaaauaucauuaguugu

SEQ ID NO: 572314 - RNA, 19 nt, Artificial Sequence
  Description of Artificial Sequence: Synthetic oligonucleotide
  Antisense strand to SEQ ID NO: 572313
acaacuaaugauauuuagg

SEQ ID NO: 572315 - RNA, 19 nt, Artificial Sequence
  Description of Artificial Sequence: Synthetic oligonucleotide
  Sense strand starting at position 169 of SEQ ID NO: 318568
uacauaaagcuuugggaga

SEQ ID NO: 572316 - RNA, 19 nt, Artificial Sequence
  Description of Artificial Sequence: Synthetic oligonucleotide
  Antisense strand to SEQ ID NO: 572315
ucucccaaagcuuuaugua

SEQ ID NO: 572317 - RNA, 19 nt, Artificial Sequence
  Description of Artificial Sequence: Synthetic oligonucleotide
  Sense strand starting at position 196 of SEQ ID NO: 318568
gcucgucuaauagaagaaa

SEQ ID NO: 572318 - RNA, 19 nt, Artificial Sequence
  Description of Artificial Sequence: Synthetic oligonucleotide
  Antisense strand to SEQ ID NO: 572317
uuucuucuauuagacgagc

SEQ ID NO: 572319 - RNA, 19 nt, Artificial Sequence
  Description of Artificial Sequence: Synthetic oligonucleotide
  Sense strand starting at position 225 of SEQ ID NO: 318568
ggcaaugagccuuaauuau

SEQ ID NO: 572320 - RNA, 19 nt, Artificial Sequence
  Description of Artificial Sequence: Synthetic oligonucleotide
  Antisense strand to SEQ ID NO: 572319
auaauuaaggcucauugcc

SEQ ID NO: 572321 - RNA, 19 nt, Artificial Sequence
  Description of Artificial Sequence: Synthetic oligonucleotide
  Sense strand starting at position 257 of SEQ ID NO: 318568
gugcuuauuucugcaggua

SEQ ID NO: 572322 - RNA, 19 nt, Artificial Sequence
  Description of Artificial Sequence: Synthetic oligonucleotide
  Antisense strand to SEQ ID NO: 572321
uaccugcagaaauaagcac

SEQ ID NO: 572323 - RNA, 19 nt, Artificial Sequence
  Description of Artificial Sequence: Synthetic oligonucleotide
  Sense strand starting at position 260 of SEQ ID NO: 318568
cuuauuucugcagguaauu

SEQ ID NO: 572324 - RNA, 19 nt, Artificial Sequence
  Description of Artificial Sequence: Synthetic oligonucleotide
  Antisense strand to SEQ ID NO: 572323
aauuaccugcagaaauaag

SEQ ID NO: 572325 - RNA, 19 nt, Artificial Sequence
  Description of Artificial Sequence: Synthetic oligonucleotide
  Sense strand starting at position 385 of SEQ ID NO: 318568
ugguaagcccuccaugacu

SEQ ID NO: 572326 - RNA, 19 nt, Artificial Sequence
  Description of Artificial Sequence: Synthetic oligonucleotide
  Antisense strand to SEQ ID NO: 572325
agucauggagggcuuacca

SEQ ID NO: 572327 - RNA, 19 nt, Artificial Sequence
  Description of Artificial Sequence: Synthetic oligonucleotide
  Sense strand starting at position 404 of SEQ ID NO: 318568
guugauagugcugauggga

SEQ ID NO: 572328 - RNA, 19 nt, Artificial Sequence
  Description of Artificial Sequence: Synthetic oligonucleotide
  Antisense strand to SEQ ID NO: 572327
ucccaucagcacuaucaac

SEQ ID NO: 572329 - RNA, 19 nt, Artificial Sequence
  Description of Artificial Sequence: Synthetic oligonucleotide
  Sense strand starting at position 407 of SEQ ID NO: 318568
gauagugcugaugggagaa

SEQ ID NO: 572330 - RNA, 19 nt, Artificial Sequence
  Description of Artificial Sequence: Synthetic oligonucleotide
  Antisense strand to SEQ ID NO: 572329
uucucccaucagcacuauc

SEQ ID NO: 572331 - RNA, 19 nt, Artificial Sequence
  Description of Artificial Sequence: Synthetic oligonucleotide
  Sense strand starting at position 572 of SEQ ID NO: 318568
augugaaugcacuggaaag

SEQ ID NO: 572332 - RNA, 19 nt, Artificial Sequence
  Description of Artificial Sequence: Synthetic oligonucleotide
  Antisense strand to SEQ ID NO: 572331
cuuuccagugcauucacau

SEQ ID NO: 572333 - RNA, 19 nt, Artificial Sequence
  Description of Artificial Sequence: Synthetic oligonucleotide
  Sense strand starting at position 721 of SEQ ID NO: 318568
caccgacuuccuggacuau

SEQ ID NO: 572334 - RNA, 19 nt, Artificial Sequence
  Description of Artificial Sequence: Synthetic oligonucleotide
  Antisense strand to SEQ ID NO: 572333
auaguccaggaagucggug

SEQ ID NO: 572335 - RNA, 19 nt, Artificial Sequence
  Description of Artificial Sequence: Synthetic oligonucleotide
  Sense strand starting at position 722 of SEQ ID NO: 318568
accgacuuccuggacuauu

SEQ ID NO: 572336 - RNA, 19 nt, Artificial Sequence
  Description of Artificial Sequence: Synthetic oligonucleotide
  Antisense strand to SEQ ID NO: 572335
aauaguccaggaagucggu

SEQ ID NO: 572337 - RNA, 19 nt, Artificial Sequence
  Description of Artificial Sequence: Synthetic oligonucleotide
  Sense strand starting at position 769 of SEQ ID NO: 318568
cuuccuuugagaggguaau

SEQ ID NO: 572338 - RNA, 19 nt, Artificial Sequence
  Description of Artificial Sequence: Synthetic oligonucleotide
  Antisense strand to SEQ ID NO: 572337
auuacccucucaaaggaag

SEQ ID NO: 572339 - RNA, 19 nt, Artificial Sequence
  Description of Artificial Sequence: Synthetic oligonucleotide
  Sense strand starting at position 770 of SEQ ID NO: 318568
uuccuuugagaggguaauu

SEQ ID NO: 572340 - RNA, 19 nt, Artificial Sequence
  Description of Artificial Sequence: Synthetic oligonucleotide
  Antisense strand to SEQ ID NO: 572339
aauuacccucucaaaggaa

SEQ ID NO: 572341 - RNA, 19 nt, Artificial Sequence
  Description of Artificial Sequence: Synthetic oligonucleotide
  Sense strand starting at position 897 of SEQ ID NO: 318568
ugguguuuagcaagugugu

SEQ ID NO: 572342 - RNA, 19 nt, Artificial Sequence
  Description of Artificial Sequence: Synthetic oligonucleotide
  Antisense strand to SEQ ID NO: 572341
acacacuugcuaaacacca

SEQ ID NO: 572343 - RNA, 19 nt, Artificial Sequence
  Description of Artificial Sequence: Synthetic oligonucleotide
  Sense strand starting at position 908 of SEQ ID NO: 318568
aagugugugauugauguaa

SEQ ID NO: 572344 - RNA, 19 nt, Artificial Sequence
  Description of Artificial Sequence: Synthetic oligonucleotide
  Antisense strand to SEQ ID NO: 572343
uuacaucaaucacacacuu

SEQ ID NO: 572345 - RNA, 19 nt, Artificial Sequence
  Description of Artificial Sequence: Synthetic oligonucleotide
  Sense strand starting at position 912 of SEQ ID NO: 318568
gugugauugauguaaauaa

SEQ ID NO: 572346 - RNA, 19 nt, Artificial Sequence
  Description of Artificial Sequence: Synthetic oligonucleotide
  Antisense strand to SEQ ID NO: 572345
uuauuuacaucaaucacac

SEQ ID NO: 572347 - RNA, 19 nt, Artificial Sequence
  Description of Artificial Sequence: Synthetic oligonucleotide
  Sense strand starting at position 993 of SEQ ID NO: 318568
ggaaguaaauucuuccaag

SEQ ID NO: 572348 - RNA, 19 nt, Artificial Sequence
  Description of Artificial Sequence: Synthetic oligonucleotide
  Antisense strand to SEQ ID NO: 572347
cuuggaagaauuuacuucc

SEQ ID NO: 572349 - RNA, 19 nt, Artificial Sequence
  Description of Artificial Sequence: Synthetic oligonucleotide
  Sense strand starting at position 1042 of SEQ ID NO: 318568
agcaaugacuguccaggaa

SEQ ID NO: 572350 - RNA, 19 nt, Artificial Sequence
  Description of Artificial Sequence: Synthetic oligonucleotide
  Antisense strand to SEQ ID NO: 572349
uuccuggacagucauugcu

SEQ ID NO: 572351 - RNA, 19 nt, Artificial Sequence
  Description of Artificial Sequence: Synthetic oligonucleotide
  Sense strand starting at position 1196 of SEQ ID NO: 318568
accacaguccuagguauga

SEQ ID NO: 572352 - RNA, 19 nt, Artificial Sequence
  Description of Artificial Sequence: Synthetic oligonucleotide
  Antisense strand to SEQ ID NO: 572351
ucauaccuaggacuguggu

SEQ ID NO: 572353 - RNA, 19 nt, Artificial Sequence
  Description of Artificial Sequence: Synthetic oligonucleotide
  Sense strand starting at position 1200 of SEQ ID NO: 318568
caguccuagguaugaaaca

SEQ ID NO: 572354 - RNA, 19 nt, Artificial Sequence
  Description of Artificial Sequence: Synthetic oligonucleotide
  Antisense strand to SEQ ID NO: 572353
uguuucauaccuaggacug

SEQ ID NO: 572355 - RNA, 19 nt, Artificial Sequence
  Description of Artificial Sequence: Synthetic oligonucleotide
  Sense strand starting at position 1216 of SEQ ID NO: 318568
acaggugcucagcaaguaa

SEQ ID NO: 572356 - RNA, 19 nt, Artificial Sequence
  Description of Artificial Sequence: Synthetic oligonucleotide
  Antisense strand to SEQ ID NO: 572355
uuacuugcugagcaccugu

SEQ ID NO: 572357 - RNA, 19 nt, Artificial Sequence
  Description of Artificial Sequence: Synthetic oligonucleotide
  Sense strand starting at position 1440 of SEQ ID NO: 318568
gcagcugugccagaaagga

SEQ ID NO: 572358 - RNA, 19 nt, Artificial Sequence
  Description of Artificial Sequence: Synthetic oligonucleotide
  Antisense strand to SEQ ID NO: 572357
uccuuucuggcacagcugc

SEQ ID NO: 572359 - RNA, 19 nt, Artificial Sequence
  Description of Artificial Sequence: Synthetic oligonucleotide
  Sense strand starting at position 2107 of SEQ ID NO: 318568
aaaccugagucugcagaaa

SEQ ID NO: 572360 - RNA, 19 nt, Artificial Sequence
  Description of Artificial Sequence: Synthetic oligonucleotide
  Antisense strand to SEQ ID NO: 572359
uuucugcagacucagguuu

SEQ ID NO: 572361 - RNA, 19 nt, Artificial Sequence
  Description of Artificial Sequence: Synthetic oligonucleotide
  Sense strand starting at position 2207 of SEQ ID NO: 318568
ugauuugcaguuugcuaga

SEQ ID NO: 572362 - RNA, 19 nt, Artificial Sequence
  Description of Artificial Sequence: Synthetic oligonucleotide
  Antisense strand to SEQ ID NO: 572361
ucuagcaaacugcaaauca

SEQ ID NO: 572363 - RNA, 19 nt, Artificial Sequence
  Description of Artificial Sequence: Synthetic oligonucleotide
  Sense strand starting at position 2231 of SEQ ID NO: 318568
ccauuaagagauugccaga

SEQ ID NO: 572364 - RNA, 19 nt, Artificial Sequence
  Description of Artificial Sequence: Synthetic oligonucleotide
  Antisense strand to SEQ ID NO: 572363
ucuggcaaucucuuaaugg

SEQ ID NO: 572365 - RNA, 19 nt, Artificial Sequence
  Description of Artificial Sequence: Synthetic oligonucleotide
  Sense strand starting at position 2400 of SEQ ID NO: 318568
gaguuagacgucgaaucug

SEQ ID NO: 572366 - RNA, 19 nt, Artificial Sequence
  Description of Artificial Sequence: Synthetic oligonucleotide
  Antisense strand to SEQ ID NO: 572365
cagauucgacgucuaacuc

SEQ ID NO: 572367 - RNA, 19 nt, Artificial Sequence
  Description of Artificial Sequence: Synthetic oligonucleotide
  Sense strand starting at position 2405 of SEQ ID NO: 318568
agacgucgaaucugagaau

SEQ ID NO: 572368 - RNA, 19 nt, Artificial Sequence
  Description of Artificial Sequence: Synthetic oligonucleotide
  Antisense strand to SEQ ID NO: 572367
auucucagauucgacgucu

SEQ ID NO: 572369 - RNA, 19 nt, Artificial Sequence
  Description of Artificial Sequence: Synthetic oligonucleotide
  Sense strand starting at position 2444 of SEQ ID NO: 318568
gaaagugagcccgaaaguu

SEQ ID NO: 572370 - RNA, 19 nt, Artificial Sequence
  Description of Artificial Sequence: Synthetic oligonucleotide
  Antisense strand to SEQ ID NO: 572369
aacuuucgggcucacuuuc

SEQ ID NO: 572371 - RNA, 19 nt, Artificial Sequence
  Description of Artificial Sequence: Synthetic oligonucleotide
  Sense strand starting at position 2646 of SEQ ID NO: 318568
gaggcuugauuaucaaguu

SEQ ID NO: 572372 - RNA, 19 nt, Artificial Sequence
  Description of Artificial Sequence: Synthetic oligonucleotide
  Antisense strand to SEQ ID NO: 572371
aacuugauaaucaagccuc

SEQ ID NO: 572373 - RNA, 19 nt, Artificial Sequence
  Description of Artificial Sequence: Synthetic oligonucleotide
  Sense strand starting at position 2655 of SEQ ID NO: 318568
uuaucaaguuagucaagua

SEQ ID NO: 572374 - RNA, 19 nt, Artificial Sequence
  Description of Artificial Sequence: Synthetic oligonucleotide
  Antisense strand to SEQ ID NO: 572373
uacuugacuaacuugauaa

SEQ ID NO: 572375 - RNA, 19 nt, Artificial Sequence
  Description of Artificial Sequence: Synthetic oligonucleotide
  Sense strand starting at position 2730 of SEQ ID NO: 318568
acuuguaggucacugagaa

SEQ ID NO: 572376 - RNA, 19 nt, Artificial Sequence
  Description of Artificial Sequence: Synthetic oligonucleotide
  Antisense strand to SEQ ID NO: 572375
uucucagugaccuacaagu

SEQ ID NO: 572377 - RNA, 19 nt, Artificial Sequence
  Description of Artificial Sequence: Synthetic oligonucleotide
  Sense strand starting at position 2731 of SEQ ID NO: 318568
cuuguaggucacugagaag

SEQ ID NO: 572378 - RNA, 19 nt, Artificial Sequence
  Description of Artificial Sequence: Synthetic oligonucleotide
  Antisense strand to SEQ ID NO: 572377
cuucucagugaccuacaag

SEQ ID NO: 572379 - RNA, 19 nt, Artificial Sequence
  Description of Artificial Sequence: Synthetic oligonucleotide
  Sense strand starting at position 2948 of SEQ ID NO: 318568
acauuagucucaucugaag

SEQ ID NO: 572380 - RNA, 19 nt, Artificial Sequence
  Description of Artificial Sequence: Synthetic oligonucleotide
  Antisense strand to SEQ ID NO: 572379
cuucagaugagacuaaugu

SEQ ID NO: 572381 - RNA, 19 nt, Artificial Sequence
  Description of Artificial Sequence: Synthetic oligonucleotide
  Sense strand starting at position 2963 of SEQ ID NO: 318568
gaagauccguccuccuaac

SEQ ID NO: 572382 - RNA, 19 nt, Artificial Sequence
  Description of Artificial Sequence: Synthetic oligonucleotide
  Antisense strand to SEQ ID NO: 572381
guuaggaggacggaucuuc

SEQ ID NO: 572383 - RNA, 19 nt, Artificial Sequence
  Description of Artificial Sequence: Synthetic oligonucleotide
  Sense strand starting at position 3324 of SEQ ID NO: 318568
uacuauguucgguaucaca

SEQ ID NO: 572384 - RNA, 19 nt, Artificial Sequence
  Description of Artificial Sequence: Synthetic oligonucleotide
  Antisense strand to SEQ ID NO: 572383
ugugauaccgaacauagua

SEQ ID NO: 572385 - RNA, 19 nt, Artificial Sequence
  Description of Artificial Sequence: Synthetic oligonucleotide
  Sense strand starting at position 3861 of SEQ ID NO: 318568
uaggcagaaaugugugauu

SEQ ID NO: 572386 - RNA, 19 nt, Artificial Sequence
  Description of Artificial Sequence: Synthetic oligonucleotide
  Antisense strand to SEQ ID NO: 572385
aaucacacauuucugccua

SEQ ID NO: 572387 - RNA, 19 nt, Artificial Sequence
  Description of Artificial Sequence: Synthetic oligonucleotide
  Sense strand starting at position 3866 of SEQ ID NO: 318568
agaaaugugugauuccaug

SEQ ID NO: 572388 - RNA, 19 nt, Artificial Sequence
  Description of Artificial Sequence: Synthetic oligonucleotide
  Antisense strand to SEQ ID NO: 572387
cauggaaucacacauuucu

SEQ ID NO: 572389 - RNA, 19 nt, Artificial Sequence
  Description of Artificial Sequence: Synthetic oligonucleotide
  Sense strand starting at position 3872 of SEQ ID NO: 318568
gugugauuccaugaagguc

SEQ ID NO: 572390 - RNA, 19 nt, Artificial Sequence
  Description of Artificial Sequence: Synthetic oligonucleotide
  Antisense strand to SEQ ID NO: 572389
gaccuucauggaaucacac

SEQ ID NO: 572391 - RNA, 19 nt, Artificial Sequence
  Description of Artificial Sequence: Synthetic oligonucleotide
  Sense strand starting at position 3889 of SEQ ID NO: 318568
ucugauaaaugguccaaau

SEQ ID NO: 572392 - RNA, 19 nt, Artificial Sequence
  Description of Artificial Sequence: Synthetic oligonucleotide
  Antisense strand to SEQ ID NO: 572391
auuuggaccauuuaucaga

SEQ ID NO: 572393 - RNA, 19 nt, Artificial Sequence
  Description of Artificial Sequence: Synthetic oligonucleotide
  Sense strand starting at position 3930 of SEQ ID NO: 318568
cuaauagcuguguauaauu

SEQ ID NO: 572394 - RNA, 19 nt, Artificial Sequence
  Description of Artificial Sequence: Synthetic oligonucleotide
  Antisense strand to SEQ ID NO: 572393
aauuauacacagcuauuag

SEQ ID NO: 572395 - RNA, 19 nt, Artificial Sequence
  Description of Artificial Sequence: Synthetic oligonucleotide
  Sense strand starting at position 2133 of SEQ ID NO: 318569
ggguguguucccuagggac

SEQ ID NO: 572396 - RNA, 19 nt, Artificial Sequence
  Description of Artificial Sequence: Synthetic oligonucleotide
  Antisense strand to SEQ ID NO: 572395
gucccuagggaacacaccc

SEQ ID NO: 572397 - RNA, 19 nt, Artificial Sequence
  Description of Artificial Sequence: Synthetic oligonucleotide
  Sense strand starting at position 2315 of SEQ ID NO: 318569
ucaugagauuuacagcaaa

SEQ ID NO: 572398 - RNA, 19 nt, Artificial Sequence
  Description of Artificial Sequence: Synthetic oligonucleotide
  Antisense strand to SEQ ID NO: 572397
uuugcuguaaaucucauga

SEQ ID NO: 572399 - RNA, 19 nt, Artificial Sequence
  Description of Artificial Sequence: Synthetic oligonucleotide
  Sense strand starting at position 2359 of SEQ ID NO: 318569
acguuacucuagguuuaga

SEQ ID NO: 572400 - RNA, 19 nt, Artificial Sequence
  Description of Artificial Sequence: Synthetic oligonucleotide
  Antisense strand to SEQ ID NO: 572399
ucuaaaccuagaguaacgu

SEQ ID NO: 572401 - RNA, 19 nt, Artificial Sequence
  Description of Artificial Sequence: Synthetic oligonucleotide
  Sense strand starting at position 2368 of SEQ ID NO: 318569
uagguuuagagagacguuu

SEQ ID NO: 572402 - RNA, 19 nt, Artificial Sequence
  Description of Artificial Sequence: Synthetic oligonucleotide
  Antisense strand to SEQ ID NO: 572401
aaacgucucucuaaaccua

SEQ ID NO: 572403 - RNA, 19 nt, Artificial Sequence
  Description of Artificial Sequence: Synthetic oligonucleotide
  Sense strand starting at position 2399 of SEQ ID NO: 318569
uucucaugguaagagaaua

SEQ ID NO: 572404 - RNA, 19 nt, Artificial Sequence
  Description of Artificial Sequence: Synthetic oligonucleotide
  Antisense strand to SEQ ID NO: 572403
uauucucuuaccaugagaa

SEQ ID NO: 572405 - RNA, 19 nt, Artificial Sequence
  Description of Artificial Sequence: Synthetic oligonucleotide
  Sense strand starting at position 2566 of SEQ ID NO: 318569
guauguuuaugcuuuaaag

SEQ ID NO: 572406 - RNA, 19 nt, Artificial Sequence
  Description of Artificial Sequence: Synthetic oligonucleotide
  Antisense strand to SEQ ID NO: 572405
cuuuaaagcauaaacauac

SEQ ID NO: 572407 - RNA, 19 nt, Artificial Sequence
  Description of Artificial Sequence: Synthetic oligonucleotide
  Sense strand starting at position 2576 of SEQ ID NO: 318569
gcuuuaaaguaagaaagca

SEQ ID NO: 572408 - RNA, 19 nt, Artificial Sequence
  Description of Artificial Sequence: Synthetic oligonucleotide
  Antisense strand to SEQ ID NO: 572407
ugcuuucuuacuuuaaagc

SEQ ID NO: 572409 - RNA, 19 nt, Artificial Sequence
  Description of Artificial Sequence: Synthetic oligonucleotide
  Sense strand starting at position 2624 of SEQ ID NO: 318569
ucguuuguuccacagauag

SEQ ID NO: 572410 - RNA, 19 nt, Artificial Sequence
  Description of Artificial Sequence: Synthetic oligonucleotide
  Antisense strand to SEQ ID NO: 572409
cuaucuguggaacaaacga

SEQ ID NO: 572411 - RNA, 19 nt, Artificial Sequence
  Description of Artificial Sequence: Synthetic oligonucleotide
  Sense strand starting at position 2626 of SEQ ID NO: 318569
guuuguuccacagauaggu

SEQ ID NO: 572412 - RNA, 19 nt, Artificial Sequence
  Description of Artificial Sequence: Synthetic oligonucleotide
  Antisense strand to SEQ ID NO: 572411
accuaucuguggaacaaac

SEQ ID NO: 572413 - RNA, 19 nt, Artificial Sequence
  Description of Artificial Sequence: Synthetic oligonucleotide
  Sense strand starting at position 2641 of SEQ ID NO: 318569
agguauugagcacguaguu

SEQ ID NO: 572414 - RNA, 19 nt, Artificial Sequence
  Description of Artificial Sequence: Synthetic oligonucleotide
  Antisense strand to SEQ ID NO: 572413
aacuacgugcucaauaccu

SEQ ID NO: 572415 - RNA, 19 nt, Artificial Sequence
  Description of Artificial Sequence: Synthetic oligonucleotide
  Sense strand starting at position 2655 of SEQ ID NO: 318569
uaguuugugccaggacuuu

SEQ ID NO: 572416 - RNA, 19 nt, Artificial Sequence
  Description of Artificial Sequence: Synthetic oligonucleotide
  Antisense strand to SEQ ID NO: 572415
aaaguccuggcacaaacua

SEQ ID NO: 572417 - RNA, 19 nt, Artificial Sequence
  Description of Artificial Sequence: Synthetic oligonucleotide
  Sense strand starting at position 2688 of SEQ ID NO: 318569
uggcuaagaugcgucaguu

SEQ ID NO: 572418 - RNA, 19 nt, Artificial Sequence
  Description of Artificial Sequence: Synthetic oligonucleotide
  Antisense strand to SEQ ID NO: 572417
aacugacgcaucuuagcca

SEQ ID NO: 572419 - RNA, 19 nt, Artificial Sequence
  Description of Artificial Sequence: Synthetic oligonucleotide
  Sense strand starting at position 2692 of SEQ ID NO: 318569
uaagaugcgucaguuagca

SEQ ID NO: 572420 - RNA, 19 nt, Artificial Sequence
  Description of Artificial Sequence: Synthetic oligonucleotide
  Antisense strand to SEQ ID NO: 572419
ugcuaacugacgcaucuua

SEQ ID NO: 572421 - RNA, 19 nt, Artificial Sequence
  Description of Artificial Sequence: Synthetic oligonucleotide
  Sense strand starting at position 2700 of SEQ ID NO: 318569
gucaguuagcaagacagau

SEQ ID NO: 572422 - RNA, 19 nt, Artificial Sequence
  Description of Artificial Sequence: Synthetic oligonucleotide
  Antisense strand to SEQ ID NO: 572421
aucugucuugcuaacugac

SEQ ID NO: 572423 - RNA, 19 nt, Artificial Sequence
  Description of Artificial Sequence: Synthetic oligonucleotide
  Sense strand starting at position 2744 of SEQ ID NO: 318569
ucauguguuggaggagaac

SEQ ID NO: 572424 - RNA, 19 nt, Artificial Sequence
  Description of Artificial Sequence: Synthetic oligonucleotide
  Antisense strand to SEQ ID NO: 572423
guucuccuccaacacauga

SEQ ID NO: 572425 - RNA, 19 nt, Artificial Sequence
  Description of Artificial Sequence: Synthetic oligonucleotide
  Sense strand starting at position 2761 of SEQ ID NO: 318569
acagaagcauauggugaau

SEQ ID NO: 572426 - RNA, 19 nt, Artificial Sequence
  Description of Artificial Sequence: Synthetic oligonucleotide
  Antisense strand to SEQ ID NO: 572425
auucaccauaugcuucugu

SEQ ID NO: 572427 - RNA, 19 nt, Artificial Sequence
  Description of Artificial Sequence: Synthetic oligonucleotide
  Sense strand starting at position 2873 of SEQ ID NO: 318569
ucaggauaguacucguugu

SEQ ID NO: 572428 - RNA, 19 nt, Artificial Sequence
  Description of Artificial Sequence: Synthetic oligonucleotide
  Antisense strand to SEQ ID NO: 572427
acaacgaguacuauccuga

SEQ ID NO: 572429 - RNA, 19 nt, Artificial Sequence
  Description of Artificial Sequence: Synthetic oligonucleotide
  Sense strand starting at position 2877 of SEQ ID NO: 318569
gauaguacucguugugaaa

SEQ ID NO: 572430 - RNA, 19 nt, Artificial Sequence
  Description of Artificial Sequence: Synthetic oligonucleotide
  Antisense strand to SEQ ID NO: 572429
uuucacaacgaguacuauc

SEQ ID NO: 572431 - RNA, 19 nt, Artificial Sequence
  Description of Artificial Sequence: Synthetic oligonucleotide
  Sense strand starting at position 2888 of SEQ ID NO: 318569
uugugaaagugacauuuaa

SEQ ID NO: 572432 - RNA, 19 nt, Artificial Sequence
  Description of Artificial Sequence: Synthetic oligonucleotide
  Antisense strand to SEQ ID NO: 572431
uuaaaugucacuuucacaa

SEQ ID NO: 572433 - RNA, 19 nt, Artificial Sequence
  Description of Artificial Sequence: Synthetic oligonucleotide
  Sense strand starting at position 2945 of SEQ ID NO: 318569
ggaagagguuucuaguuga

SEQ ID NO: 572434 - RNA, 19 nt, Artificial Sequence
  Description of Artificial Sequence: Synthetic oligonucleotide
  Antisense strand to SEQ ID NO: 572433
ucaacuagaaaccucuucc

SEQ ID NO: 572435 - RNA, 19 nt, Artificial Sequence
  Description of Artificial Sequence: Synthetic oligonucleotide
  Sense strand starting at position 2949 of SEQ ID NO: 318569
gagguuucuaguugaggga

SEQ ID NO: 572436 - RNA, 19 nt, Artificial Sequence
  Description of Artificial Sequence: Synthetic oligonucleotide
  Antisense strand to SEQ ID NO: 572435
ucccucaacuagaaaccuc

SEQ ID NO: 572437 - RNA, 19 nt, Artificial Sequence
  Description of Artificial Sequence: Synthetic oligonucleotide
  Sense strand starting at position 2979 of SEQ ID NO: 318569
gagguagaaucaguuccuu

SEQ ID NO: 572438 - RNA, 19 nt, Artificial Sequence
  Description of Artificial Sequence: Synthetic oligonucleotide
  Antisense strand to SEQ ID NO: 572437
aaggaacugauucuaccuc

SEQ ID NO: 572439 - RNA, 19 nt, Artificial Sequence
  Description of Artificial Sequence: Synthetic oligonucleotide
  Sense strand starting at position 3412 of SEQ ID NO: 318569
gggcaaaugccuugacuuc

SEQ ID NO: 572440 - RNA, 19 nt, Artificial Sequence
  Description of Artificial Sequence: Synthetic oligonucleotide
  Antisense strand to SEQ ID NO: 572439
gaagucaaggcauuugccc

SEQ ID NO: 572441 - RNA, 19 nt, Artificial Sequence
  Description of Artificial Sequence: Synthetic oligonucleotide
  Sense strand starting at position 3413 of SEQ ID NO: 318569
ggcaaaugccuugacuucu

SEQ ID NO: 572442 - RNA, 19 nt, Artificial Sequence
  Description of Artificial Sequence: Synthetic oligonucleotide
  Antisense strand to SEQ ID NO: 572441
agaagucaaggcauuugcc

SEQ ID NO: 572443 - RNA, 19 nt, Artificial Sequence
  Description of Artificial Sequence: Synthetic oligonucleotide
  Sense strand starting at position 3447 of SEQ ID NO: 318569
cuugucuguaaaggaauga

SEQ ID NO: 572444 - RNA, 19 nt, Artificial Sequence
  Description of Artificial Sequence: Synthetic oligonucleotide
  Antisense strand to SEQ ID NO: 572443
ucauuccuuuacagacaag

SEQ ID NO: 572445 - RNA, 19 nt, Artificial Sequence
  Description of Artificial Sequence: Synthetic oligonucleotide
  Sense strand starting at position 3474 of SEQ ID NO: 318569
guacuuaccugcucagaug

SEQ ID NO: 572446 - RNA, 19 nt, Artificial Sequence
  Description of Artificial Sequence: Synthetic oligonucleotide
  Antisense strand to SEQ ID NO: 572445
caucugagcagguaaguac

SEQ ID NO: 572447 - RNA, 19 nt, Artificial Sequence
  Description of Artificial Sequence: Synthetic oligonucleotide
  Sense strand starting at position 3483 of SEQ ID NO: 318569
ugcucagaugguugagaga

SEQ ID NO: 572448 - RNA, 19 nt, Artificial Sequence
  Description of Artificial Sequence: Synthetic oligonucleotide
  Antisense strand to SEQ ID NO: 572447
ucucucaaccaucugagca

SEQ ID NO: 572449 - RNA, 19 nt, Artificial Sequence
  Description of Artificial Sequence: Synthetic oligonucleotide
  Sense strand starting at position 3486 of SEQ ID NO: 318569
ucagaugguugagagaauu

SEQ ID NO: 572450 - RNA, 19 nt, Artificial Sequence
  Description of Artificial Sequence: Synthetic oligonucleotide
  Antisense strand to SEQ ID NO: 572449
aauucucucaaccaucuga

SEQ ID NO: 572451 - RNA, 19 nt, Artificial Sequence
  Description of Artificial Sequence: Synthetic oligonucleotide
  Sense strand starting at position 3533 of SEQ ID NO: 318569
gcauaaugcuuggcuuaca

SEQ ID NO: 572452 - RNA, 19 nt, Artificial Sequence
  Description of Artificial Sequence: Synthetic oligonucleotide
  Antisense strand to SEQ ID NO: 572451
uguaagccaagcauuaugc

SEQ ID NO: 572453 - RNA, 19 nt, Artificial Sequence
  Description of Artificial Sequence: Synthetic oligonucleotide
  Sense strand starting at position 3536 of SEQ ID NO: 318569
uaaugcuuggcuuacagua

SEQ ID NO: 572454 - RNA, 19 nt, Artificial Sequence
  Description of Artificial Sequence: Synthetic oligonucleotide
  Antisense strand to SEQ ID NO: 572453
uacuguaagccaagcauua

SEQ ID NO: 572455 - RNA, 19 nt, Artificial Sequence
  Description of Artificial Sequence: Synthetic oligonucleotide
  Sense strand starting at position 3541 of SEQ ID NO: 318569
cuuggcuuacaguaaucau

SEQ ID NO: 572456 - RNA, 19 nt, Artificial Sequence
  Description of Artificial Sequence: Synthetic oligonucleotide
  Antisense strand to SEQ ID NO: 572455
augauuacuguaagccaag

SEQ ID NO: 572457 - RNA, 19 nt, Artificial Sequence
  Description of Artificial Sequence: Synthetic oligonucleotide
  Sense strand starting at position 3574 of SEQ ID NO: 318569
guaguauagucacuacuau

SEQ ID NO: 572458 - RNA, 19 nt, Artificial Sequence
  Description of Artificial Sequence: Synthetic oligonucleotide
  Antisense strand to SEQ ID NO: 572457
auaguagugacuauacuac

SEQ ID NO: 572459 - RNA, 19 nt, Artificial Sequence
  Description of Artificial Sequence: Synthetic oligonucleotide
  Sense strand starting at position 3730 of SEQ ID NO: 318569
uugugagcauuccucccaa

SEQ ID NO: 572460 - RNA, 19 nt, Artificial Sequence
  Description of Artificial Sequence: Synthetic oligonucleotide
  Antisense strand to SEQ ID NO: 572459
uugggaggaaugcucacaa

SEQ ID NO: 572461 - RNA, 19 nt, Artificial Sequence
  Description of Artificial Sequence: Synthetic oligonucleotide
  Sense strand starting at position 3874 of SEQ ID NO: 318569
aaugaugcuguugauauau

SEQ ID NO: 572462 - RNA, 19 nt, Artificial Sequence
  Description of Artificial Sequence: Synthetic oligonucleotide
  Antisense strand to SEQ ID NO: 572461
auauaucaacagcaucauu

SEQ ID NO: 572463 - RNA, 19 nt, Artificial Sequence
  Description of Artificial Sequence: Synthetic oligonucleotide
  Sense strand starting at position 3876 of SEQ ID NO: 318569
ugaugcuguugauauauaa

SEQ ID NO: 572464 - RNA, 19 nt, Artificial Sequence
  Description of Artificial Sequence: Synthetic oligonucleotide
  Antisense strand to SEQ ID NO: 572463
uuauauaucaacagcauca

SEQ ID NO: 572465 - RNA, 19 nt, Artificial Sequence
  Description of Artificial Sequence: Synthetic oligonucleotide
  Sense strand starting at position 3891 of SEQ ID NO: 318569
auaagacuuugugcaccuu

SEQ ID NO: 572466 - RNA, 19 nt, Artificial Sequence
  Description of Artificial Sequence: Synthetic oligonucleotide
  Antisense strand to SEQ ID NO: 572465
aaggugcacaaagucuuau

SEQ ID NO: 572467 - RNA, 19 nt, Artificial Sequence
  Description of Artificial Sequence: Synthetic oligonucleotide
  Sense strand starting at position 3903 of SEQ ID NO: 318569
gcaccuuucugaguaauuc

SEQ ID NO: 572468 - RNA, 19 nt, Artificial Sequence
  Description of Artificial Sequence: Synthetic oligonucleotide
  Antisense strand to SEQ ID NO: 572467
gaauuacucagaaaggugc

SEQ ID NO: 572469 - RNA, 19 nt, Artificial Sequence
  Description of Artificial Sequence: Synthetic oligonucleotide
  Sense strand starting at position 3911 of SEQ ID NO: 318569
cugaguaauuccuuaggau

SEQ ID NO: 572470 - RNA, 19 nt, Artificial Sequence
  Description of Artificial Sequence: Synthetic oligonucleotide
  Antisense strand to SEQ ID NO: 572469
auccuaaggaauuacucag

SEQ ID NO: 572471 - RNA, 19 nt, Artificial Sequence
  Description of Artificial Sequence: Synthetic oligonucleotide
  Sense strand starting at position 3925 of SEQ ID NO: 318569
aggauaggcuccuaggagu

SEQ ID NO: 572472 - RNA, 19 nt, Artificial Sequence
  Description of Artificial Sequence: Synthetic oligonucleotide
  Antisense strand to SEQ ID NO: 572471
acuccuaggagccuauccu

SEQ ID NO: 572473 - RNA, 19 nt, Artificial Sequence
  Description of Artificial Sequence: Synthetic oligonucleotide
  Sense strand starting at position 3931 of SEQ ID NO: 318569
ggcuccuaggaguagaauu

SEQ ID NO: 572474 - RNA, 19 nt, Artificial Sequence
  Description of Artificial Sequence: Synthetic oligonucleotide
  Antisense strand to SEQ ID NO: 572473
aauucuacuccuaggagcc

SEQ ID NO: 572475 - RNA, 19 nt, Artificial Sequence
  Description of Artificial Sequence: Synthetic oligonucleotide
  Sense strand starting at position 246 of SEQ ID NO: 318570
ccucuauaaucgguauaaa

SEQ ID NO: 572476 - RNA, 19 nt, Artificial Sequence
  Description of Artificial Sequence: Synthetic oligonucleotide
  Antisense strand to SEQ ID NO: 572475
uuuauaccgauuauagagg

SEQ ID NO: 572477 - RNA, 19 nt, Artificial Sequence
  Description of Artificial Sequence: Synthetic oligonucleotide
  Sense strand starting at position 247 of SEQ ID NO: 318570
cucuauaaucgguauaaac

SEQ ID NO: 572478 - RNA, 19 nt, Artificial Sequence
  Description of Artificial Sequence: Synthetic oligonucleotide
  Antisense strand to SEQ ID NO: 572477
guuuauaccgauuauagag

SEQ ID NO: 572479 - RNA, 19 nt, Artificial Sequence
  Description of Artificial Sequence: Synthetic oligonucleotide
  Sense strand starting at position 249 of SEQ ID NO: 318570
cuauaaucgguauaaacuu

SEQ ID NO: 572480 - RNA, 19 nt, Artificial Sequence
  Description of Artificial Sequence: Synthetic oligonucleotide
  Antisense strand to SEQ ID NO: 572479
aaguuuauaccgauuauag

SEQ ID NO: 572481 - RNA, 19 nt, Artificial Sequence
  Description of Artificial Sequence: Synthetic oligonucleotide
  Sense strand starting at position 257 of SEQ ID NO: 318570
gguauaaacuuuccuguuu

SEQ ID NO: 572482 - RNA, 19 nt, Artificial Sequence
  Description of Artificial Sequence: Synthetic oligonucleotide
  Antisense strand to SEQ ID NO: 572481
aaacaggaaaguuuauacc

SEQ ID NO: 572483 - RNA, 19 nt, Artificial Sequence
  Description of Artificial Sequence: Synthetic oligonucleotide
  Sense strand starting at position 258 of SEQ ID NO: 318570
guauaaacuuuccuguuua

SEQ ID NO: 572484 - RNA, 19 nt, Artificial Sequence
  Description of Artificial Sequence: Synthetic oligonucleotide
  Antisense strand to SEQ ID NO: 572483
uaaacaggaaaguuuauac

SEQ ID NO: 572485 - RNA, 19 nt, Artificial Sequence
  Description of Artificial Sequence: Synthetic oligonucleotide
  Sense strand starting at position 368 of SEQ ID NO: 318570
ucuugauuauuuguagcau

SEQ ID NO: 572486 - RNA, 19 nt, Artificial Sequence
  Description of Artificial Sequence: Synthetic oligonucleotide
  Antisense strand to SEQ ID NO: 572485
augcuacaaauaaucaaga

SEQ ID NO: 572487 - RNA, 19 nt, Artificial Sequence
  Description of Artificial Sequence: Synthetic oligonucleotide
  Sense strand starting at position 369 of SEQ ID NO: 318570
cuugauuauuuguagcaua

SEQ ID NO: 572488 - RNA, 19 nt, Artificial Sequence
  Description of Artificial Sequence: Synthetic oligonucleotide
  Antisense strand to SEQ ID NO: 572487
uaugcuacaaauaaucaag

SEQ ID NO: 572489 - RNA, 19 nt, Artificial Sequence
  Description of Artificial Sequence: Synthetic oligonucleotide
  Sense strand starting at position 405 of SEQ ID NO: 318570
gcugucuagcaagaauauu

SEQ ID NO: 572490 - RNA, 19 nt, Artificial Sequence
  Description of Artificial Sequence: Synthetic oligonucleotide
  Antisense strand to SEQ ID NO: 572489
aauauucuugcuagacagc

SEQ ID NO: 572491 - RNA, 19 nt, Artificial Sequence
  Description of Artificial Sequence: Synthetic oligonucleotide
  Sense strand starting at position 453 of SEQ ID NO: 318570
ucuaaauacugggccuuaa

SEQ ID NO: 572492 - RNA, 19 nt, Artificial Sequence
  Description of Artificial Sequence: Synthetic oligonucleotide
  Antisense strand to SEQ ID NO: 572491
uuaaggcccaguauuuaga

SEQ ID NO: 572493 - RNA, 19 nt, Artificial Sequence
  Description of Artificial Sequence: Synthetic oligonucleotide
  Sense strand starting at position 548 of SEQ ID NO: 318570
aagugauaccugugcagac

SEQ ID NO: 572494 - RNA, 19 nt, Artificial Sequence
  Description of Artificial Sequence: Synthetic oligonucleotide
  Antisense strand to SEQ ID NO: 572493
gucugcacagguaucacuu

SEQ ID NO: 572495 - RNA, 19 nt, Artificial Sequence
  Description of Artificial Sequence: Synthetic oligonucleotide
  Sense strand starting at position 549 of SEQ ID NO: 318570
agugauaccugugcagacu

SEQ ID NO: 572496 - RNA, 19 nt, Artificial Sequence
  Description of Artificial Sequence: Synthetic oligonucleotide
  Antisense strand to SEQ ID NO: 572495
agucugcacagguaucacu

SEQ ID NO: 572497 - RNA, 19 nt, Artificial Sequence
  Description of Artificial Sequence: Synthetic oligonucleotide
  Sense strand starting at position 560 of SEQ ID NO: 318570
ugcagacucugcccugaaa

SEQ ID NO: 572498 - RNA, 19 nt, Artificial Sequence
  Description of Artificial Sequence: Synthetic oligonucleotide
  Antisense strand to SEQ ID NO: 572497
uuucagggcagagucugca

SEQ ID NO: 572499 - RNA, 19 nt, Artificial Sequence
  Description of Artificial Sequence: Synthetic oligonucleotide
  Sense strand starting at position 820 of SEQ ID NO: 318570
ggcggagcucccugaaacu

SEQ ID NO: 572500 - RNA, 19 nt, Artificial Sequence
  Description of Artificial Sequence: Synthetic oligonucleotide
  Antisense strand to SEQ ID NO: 572499
aguuucagggagcuccgcc

SEQ ID NO: 572501 - RNA, 19 nt, Artificial Sequence
  Description of Artificial Sequence: Synthetic oligonucleotide
  Sense strand starting at position 863 of SEQ ID NO: 318570
uguggagcgucaaagggau

SEQ ID NO: 572502 - RNA, 19 nt, Artificial Sequence
  Description of Artificial Sequence: Synthetic oligonucleotide
  Antisense strand to SEQ ID NO: 572501
aucccuuugacgcuccaca

SEQ ID NO: 572503 - RNA, 19 nt, Artificial Sequence
  Description of Artificial Sequence: Synthetic oligonucleotide
  Sense strand starting at position 1883 of SEQ ID NO: 318570
ucgugcugaguccucgaau

SEQ ID NO: 572504 - RNA, 19 nt, Artificial Sequence
  Description of Artificial Sequence: Synthetic oligonucleotide
  Antisense strand to SEQ ID NO: 572503
auucgaggacucagcacga

SEQ ID NO: 572505 - RNA, 19 nt, Artificial Sequence
  Description of Artificial Sequence: Synthetic oligonucleotide
  Sense strand starting at position 1886 of SEQ ID NO: 318570
ugcugaguccucgaaucac

SEQ ID NO: 572506 - RNA, 19 nt, Artificial Sequence
  Description of Artificial Sequence: Synthetic oligonucleotide
  Antisense strand to SEQ ID NO: 572505
gugauucgaggacucagca

SEQ ID NO: 572507 - RNA, 19 nt, Artificial Sequence
  Description of Artificial Sequence: Synthetic oligonucleotide
  Sense strand starting at position 2052 of SEQ ID NO: 318570
gcugacauccagggaauga

SEQ ID NO: 572508 - RNA, 19 nt, Artificial Sequence
  Description of Artificial Sequence: Synthetic oligonucleotide
  Antisense strand to SEQ ID NO: 572507
ucauucccuggaugucagc

SEQ ID NO: 572509 - RNA, 19 nt, Artificial Sequence
  Description of Artificial Sequence: Synthetic oligonucleotide
  Sense strand starting at position 2162 of SEQ ID NO: 318570
aaucuuugccaagggagaa

SEQ ID NO: 572510 - RNA, 19 nt, Artificial Sequence
  Description of Artificial Sequence: Synthetic oligonucleotide
  Antisense strand to SEQ ID NO: 572509
uucucccuuggcaaagauu

SEQ ID NO: 572511 - RNA, 19 nt, Artificial Sequence
  Description of Artificial Sequence: Synthetic oligonucleotide
  Sense strand starting at position 2234 of SEQ ID NO: 318570
gaucuucgacuuuguguga

SEQ ID NO: 572512 - RNA, 19 nt, Artificial Sequence
  Description of Artificial Sequence: Synthetic oligonucleotide
  Antisense strand to SEQ ID NO: 572511
ucacacaaagucgaagauc

SEQ ID NO: 572513 - RNA, 19 nt, Artificial Sequence
  Description of Artificial Sequence: Synthetic oligonucleotide
  Sense strand starting at position 2237 of SEQ ID NO: 318570
cuucgacuuugugugauua

SEQ ID NO: 572514 - RNA, 19 nt, Artificial Sequence
  Description of Artificial Sequence: Synthetic oligonucleotide
  Antisense strand to SEQ ID NO: 572513
uaaucacacaaagucgaag

SEQ ID NO: 572515 - RNA, 19 nt, Artificial Sequence
  Description of Artificial Sequence: Synthetic oligonucleotide
  Sense strand starting at position 2241 of SEQ ID NO: 318570
gacuuugugugauuauugu

SEQ ID NO: 572516 - RNA, 19 nt, Artificial Sequence
  Description of Artificial Sequence: Synthetic oligonucleotide
  Antisense strand to SEQ ID NO: 572515
acaauaaucacacaaaguc

SEQ ID NO: 572517 - RNA, 19 nt, Artificial Sequence
  Description of Artificial Sequence: Synthetic oligonucleotide
  Sense strand starting at position 2248 of SEQ ID NO: 318570
ugugauuauugugcuaaag

SEQ ID NO: 572518 - RNA, 19 nt, Artificial Sequence
  Description of Artificial Sequence: Synthetic oligonucleotide
  Antisense strand to SEQ ID NO: 572517
cuuuagcacaauaaucaca

SEQ ID NO: 572519 - RNA, 19 nt, Artificial Sequence
  Description of Artificial Sequence: Synthetic oligonucleotide
  Sense strand starting at position 2387 of SEQ ID NO: 318570
gggauacugccguaacccu

SEQ ID NO: 572520 - RNA, 19 nt, Artificial Sequence
  Description of Artificial Sequence: Synthetic oligonucleotide
  Antisense strand to SEQ ID NO: 572519
aggguuacggcaguauccc

SEQ ID NO: 572521 - RNA, 19 nt, Artificial Sequence
  Description of Artificial Sequence: Synthetic oligonucleotide
  Sense strand starting at position 2395 of SEQ ID NO: 318570
gccguaacccuguaaauag

SEQ ID NO: 572522 - RNA, 19 nt, Artificial Sequence
  Description of Artificial Sequence: Synthetic oligonucleotide
  Antisense strand to SEQ ID NO: 572521
cuauuuacaggguuacggc

SEQ ID NO: 572523 - RNA, 19 nt, Artificial Sequence
  Description of Artificial Sequence: Synthetic oligonucleotide
  Sense strand starting at position 2640 of SEQ ID NO: 318570
gccauuaaauaguuauuga

SEQ ID NO: 572524 - RNA, 19 nt, Artificial Sequence
  Description of Artificial Sequence: Synthetic oligonucleotide
  Antisense strand to SEQ ID NO: 572523
ucaauaacuauuuaauggc

SEQ ID NO: 572525 - RNA, 19 nt, Artificial Sequence
  Description of Artificial Sequence: Synthetic oligonucleotide
  Sense strand starting at position 2651 of SEQ ID NO: 318570
guuauugagucuuuggguu

SEQ ID NO: 572526 - RNA, 19 nt, Artificial Sequence
  Description of Artificial Sequence: Synthetic oligonucleotide
  Antisense strand to SEQ ID NO: 572525
aacccaaagacucaauaac

SEQ ID NO: 572527 - RNA, 19 nt, Artificial Sequence
  Description of Artificial Sequence: Synthetic oligonucleotide
  Sense strand starting at position 2714 of SEQ ID NO: 318570
guuuaaacaugcucagcau

SEQ ID NO: 572528 - RNA, 19 nt, Artificial Sequence
  Description of Artificial Sequence: Synthetic oligonucleotide
  Antisense strand to SEQ ID NO: 572527
augcugagcauguuuaaac

SEQ ID NO: 572529 - RNA, 19 nt, Artificial Sequence
  Description of Artificial Sequence: Synthetic oligonucleotide
  Sense strand starting at position 2868 of SEQ ID NO: 318570
uugguuugcuuaccacaau

SEQ ID NO: 572530 - RNA, 19 nt, Artificial Sequence
  Description of Artificial Sequence: Synthetic oligonucleotide
  Antisense strand to SEQ ID NO: 572529
auugugguaagcaaaccaa

SEQ ID NO: 572531 - RNA, 19 nt, Artificial Sequence
  Description of Artificial Sequence: Synthetic oligonucleotide
  Sense strand starting at position 2907 of SEQ ID NO: 318570
ugaugauuccacugccucu

SEQ ID NO: 572532 - RNA, 19 nt, Artificial Sequence
  Description of Artificial Sequence: Synthetic oligonucleotide
  Antisense strand to SEQ ID NO: 572531
agaggcaguggaaucauca

SEQ ID NO: 572533 - RNA, 19 nt, Artificial Sequence
  Description of Artificial Sequence: Synthetic oligonucleotide
  Sense strand starting at position 2997 of SEQ ID NO: 318570
gaccauugagccuggcaua

SEQ ID NO: 572534 - RNA, 19 nt, Artificial Sequence
  Description of Artificial Sequence: Synthetic oligonucleotide
  Antisense strand to SEQ ID NO: 572533
uaugccaggcucaaugguc

SEQ ID NO: 572535 - RNA, 19 nt, Artificial Sequence
  Description of Artificial Sequence: Synthetic oligonucleotide
  Sense strand starting at position 2998 of SEQ ID NO: 318570
accauugagccuggcauau

SEQ ID NO: 572536 - RNA, 19 nt, Artificial Sequence
  Description of Artificial Sequence: Synthetic oligonucleotide
  Antisense strand to SEQ ID NO: 572535
auaugccaggcucaauggu

SEQ ID NO: 572537 - RNA, 19 nt, Artificial Sequence
  Description of Artificial Sequence: Synthetic oligonucleotide
  Sense strand starting at position 3120 of SEQ ID NO: 318570
gcuagacacuguuccaaau

SEQ ID NO: 572538 - RNA, 19 nt, Artificial Sequence
  Description of Artificial Sequence: Synthetic oligonucleotide
  Antisense strand to SEQ ID NO: 572537
auuuggaacagugucuagc

SEQ ID NO: 572539 - RNA, 19 nt, Artificial Sequence
  Description of Artificial Sequence: Synthetic oligonucleotide
  Sense strand starting at position 3167 of SEQ ID NO: 318570
guaggauuguguuuauuuc

SEQ ID NO: 572540 - RNA, 19 nt, Artificial Sequence
  Description of Artificial Sequence: Synthetic oligonucleotide
  Antisense strand to SEQ ID NO: 572539
gaaauaaacacaauccuac

SEQ ID NO: 572541 - RNA, 19 nt, Artificial Sequence
  Description of Artificial Sequence: Synthetic oligonucleotide
  Sense strand starting at position 3222 of SEQ ID NO: 318570
guauuaacauuugcugcau

SEQ ID NO: 572542 - RNA, 19 nt, Artificial Sequence
  Description of Artificial Sequence: Synthetic oligonucleotide
  Antisense strand to SEQ ID NO: 572541
augcagcaaauguuaauac

SEQ ID NO: 572543 - RNA, 19 nt, Artificial Sequence
  Description of Artificial Sequence: Synthetic oligonucleotide
  Sense strand starting at position 3272 of SEQ ID NO: 318570
uuuaucuugacguagauga

SEQ ID NO: 572544 - RNA, 19 nt, Artificial Sequence
  Description of Artificial Sequence: Synthetic oligonucleotide
  Antisense strand to SEQ ID NO: 572543
ucaucuacgucaagauaaa

SEQ ID NO: 572545 - RNA, 19 nt, Artificial Sequence
  Description of Artificial Sequence: Synthetic oligonucleotide
  Sense strand starting at position 3274 of SEQ ID NO: 318570
uaucuugacguagaugauu

SEQ ID NO: 572546 - RNA, 19 nt, Artificial Sequence
  Description of Artificial Sequence: Synthetic oligonucleotide
  Antisense strand to SEQ ID NO: 572545
aaucaucuacgucaagaua

SEQ ID NO: 572547 - RNA, 19 nt, Artificial Sequence
  Description of Artificial Sequence: Synthetic oligonucleotide
  Sense strand starting at position 3338 of SEQ ID NO: 318570
uguccaauccucugguaac

SEQ ID NO: 572548 - RNA, 19 nt, Artificial Sequence
  Description of Artificial Sequence: Synthetic oligonucleotide
  Antisense strand to SEQ ID NO: 572547
guuaccagaggauuggaca

SEQ ID NO: 572549 - RNA, 19 nt, Artificial Sequence
  Description of Artificial Sequence: Synthetic oligonucleotide
  Sense strand starting at position 3353 of SEQ ID NO: 318570
uaacaaauguggucaguag

SEQ ID NO: 572550 - RNA, 19 nt, Artificial Sequence
  Description of Artificial Sequence: Synthetic oligonucleotide
  Antisense strand to SEQ ID NO: 572549
cuacugaccacauuuguua

SEQ ID NO: 572551 - RNA, 19 nt, Artificial Sequence
  Description of Artificial Sequence: Synthetic oligonucleotide
  Sense strand starting at position 3357 of SEQ ID NO: 318570
aaauguggucaguaggagu

SEQ ID NO: 572552 - RNA, 19 nt, Artificial Sequence
  Description of Artificial Sequence: Synthetic oligonucleotide
  Antisense strand to SEQ ID NO: 572551
acuccuacugaccacauuu

SEQ ID NO: 572553 - RNA, 19 nt, Artificial Sequence
  Description of Artificial Sequence: Synthetic oligonucleotide
  Sense strand starting at position 3374 of SEQ ID NO: 318570
guucuuauaccuggcagau

SEQ ID NO: 572554 - RNA, 19 nt, Artificial Sequence
  Description of Artificial Sequence: Synthetic oligonucleotide
  Antisense strand to SEQ ID NO: 572553
aucugccagguauaagaac

SEQ ID NO: 572555 - RNA, 19 nt, Artificial Sequence
  Description of Artificial Sequence: Synthetic oligonucleotide
  Sense strand starting at position 20 of SEQ ID NO: 318571
cucgcauuccucggagagu

SEQ ID NO: 572556 - RNA, 19 nt, Artificial Sequence
  Description of Artificial Sequence: Synthetic oligonucleotide
  Antisense strand to SEQ ID NO: 572555
acucuccgaggaaugcgag

SEQ ID NO: 572557 - RNA, 19 nt, Artificial Sequence
  Description of Artificial Sequence: Synthetic oligonucleotide
  Sense strand starting at position 22 of SEQ ID NO: 318571
cgcauuccucggagaguga

SEQ ID NO: 572558 - RNA, 19 nt, Artificial Sequence
  Description of Artificial Sequence: Synthetic oligonucleotide
  Antisense strand to SEQ ID NO: 572557
ucacucuccgaggaaugcg

SEQ ID NO: 572559 - RNA, 19 nt, Artificial Sequence
  Description of Artificial Sequence: Synthetic oligonucleotide
  Sense strand starting at position 64 of SEQ ID NO: 318571
gugggugggacuuggagaa

SEQ ID NO: 572560 - RNA, 19 nt, Artificial Sequence
  Description of Artificial Sequence: Synthetic oligonucleotide
  Antisense strand to SEQ ID NO: 572559
uucuccaagucccacccac

SEQ ID NO: 572561 - RNA, 19 nt, Artificial Sequence
  Description of Artificial Sequence: Synthetic oligonucleotide
  Sense strand starting at position 95 of SEQ ID NO: 318571
ugauuccuucuccaggcaa

SEQ ID NO: 572562 - RNA, 19 nt, Artificial Sequence
  Description of Artificial Sequence: Synthetic oligonucleotide
  Antisense strand to SEQ ID NO: 572561
uugccuggagaaggaauca

SEQ ID NO: 572563 - RNA, 19 nt, Artificial Sequence
  Description of Artificial Sequence: Synthetic oligonucleotide
  Sense strand starting at position 148 of SEQ ID NO: 318571
aggcuaugucgauguggca

SEQ ID NO: 572564 - RNA, 19 nt, Artificial Sequence
  Description of Artificial Sequence: Synthetic oligonucleotide
  Antisense strand to SEQ ID NO: 572563
ugccacaucgacauagccu

SEQ ID NO: 572565 - RNA, 19 nt, Artificial Sequence
  Description of Artificial Sequence: Synthetic oligonucleotide
  Sense strand starting at position 164 of SEQ ID NO: 318571
gcagcugauagcugagagu

SEQ ID NO: 572566 - RNA, 19 nt, Artificial Sequence
  Description of Artificial Sequence: Synthetic oligonucleotide
  Antisense strand to SEQ ID NO: 572565
acucucagcuaucagcugc

SEQ ID NO: 572567 - RNA, 19 nt, Artificial Sequence
  Description of Artificial Sequence: Synthetic oligonucleotide
  Sense strand starting at position 274 of SEQ ID NO: 318571
cgucaugcccucuaaucca

SEQ ID NO: 572568 - RNA, 19 nt, Artificial Sequence
  Description of Artificial Sequence: Synthetic oligonucleotide
  Antisense strand to SEQ ID NO: 572567
uggauuagagggcaugacg

SEQ ID NO: 572569 - RNA, 19 nt, Artificial Sequence
  Description of Artificial Sequence: Synthetic oligonucleotide
  Sense strand starting at position 294 of SEQ ID NO: 318571
uugagaauaucuuaaagcu

SEQ ID NO: 572570 - RNA, 19 nt, Artificial Sequence
  Description of Artificial Sequence: Synthetic oligonucleotide
  Antisense strand to SEQ ID NO: 572569
agcuuuaagauauucucaa

SEQ ID NO: 572571 - RNA, 19 nt, Artificial Sequence
  Description of Artificial Sequence: Synthetic oligonucleotide
  Sense strand starting at position 422 of SEQ ID NO: 318571
gggcuuagagauggcuuga

SEQ ID NO: 572572 - RNA, 19 nt, Artificial Sequence
  Description of Artificial Sequence: Synthetic oligonucleotide
  Antisense strand to SEQ ID NO: 572571
ucaagccaucucuaagccc

SEQ ID NO: 572573 - RNA, 19 nt, Artificial Sequence
  Description of Artificial Sequence: Synthetic oligonucleotide
  Sense strand starting at position 458 of SEQ ID NO: 318571
cuccauagacccugguuaa

SEQ ID NO: 572574 - RNA, 19 nt, Artificial Sequence
  Description of Artificial Sequence: Synthetic oligonucleotide
  Antisense strand to SEQ ID NO: 572573
uuaaccagggucuauggag

SEQ ID NO: 572575 - RNA, 19 nt, Artificial Sequence
  Description of Artificial Sequence: Synthetic oligonucleotide
  Sense strand starting at position 461 of SEQ ID NO: 318571
cauagacccugguuaagaa

SEQ ID NO: 572576 - RNA, 19 nt, Artificial Sequence
  Description of Artificial Sequence: Synthetic oligonucleotide
  Antisense strand to SEQ ID NO: 572575
uucuuaaccagggucuaug

SEQ ID NO: 572577 - RNA, 19 nt, Artificial Sequence
  Description of Artificial Sequence: Synthetic oligonucleotide
  Sense strand starting at position 681 of SEQ ID NO: 318571
ucuaaagcauuacuagaga

SEQ ID NO: 572578 - RNA, 19 nt, Artificial Sequence
  Description of Artificial Sequence: Synthetic oligonucleotide
  Antisense strand to SEQ ID NO: 572577
ucucuaguaaugcuuuaga

SEQ ID NO: 572579 - RNA, 19 nt, Artificial Sequence
  Description of Artificial Sequence: Synthetic oligonucleotide
  Sense strand starting at position 726 of SEQ ID NO: 318571
cuguccuuuccugaggaaa

SEQ ID NO: 572580 - RNA, 19 nt, Artificial Sequence
  Description of Artificial Sequence: Synthetic oligonucleotide
  Antisense strand to SEQ ID NO: 572579
uuuccucaggaaaggacag

SEQ ID NO: 572581 - RNA, 19 nt, Artificial Sequence
  Description of Artificial Sequence: Synthetic oligonucleotide
  Sense strand starting at position 901 of SEQ ID NO: 318571
guggauuugucugaagaag

SEQ ID NO: 572582 - RNA, 19 nt, Artificial Sequence
  Description of Artificial Sequence: Synthetic oligonucleotide
  Antisense strand to SEQ ID NO: 572581
cuucuucagacaaauccac

SEQ ID NO: 572583 - RNA, 19 nt, Artificial Sequence
  Description of Artificial Sequence: Synthetic oligonucleotide
  Sense strand starting at position 941 of SEQ ID NO: 318571
gacacuagucuugggugga

SEQ ID NO: 572584 - RNA, 19 nt, Artificial Sequence
  Description of Artificial Sequence: Synthetic oligonucleotide
  Antisense strand to SEQ ID NO: 572583
uccacccaagacuaguguc

SEQ ID NO: 572585 - RNA, 19 nt, Artificial Sequence
  Description of Artificial Sequence: Synthetic oligonucleotide
  Sense strand starting at position 944 of SEQ ID NO: 318571
acuagucuuggguggauua

SEQ ID NO: 572586 - RNA, 19 nt, Artificial Sequence
  Description of Artificial Sequence: Synthetic oligonucleotide
  Antisense strand to SEQ ID NO: 572585
uaauccacccaagacuagu

SEQ ID NO: 572587 - RNA, 19 nt, Artificial Sequence
  Description of Artificial Sequence: Synthetic oligonucleotide
  Sense strand starting at position 1055 of SEQ ID NO: 318571
ccaugucuugguugacgau

SEQ ID NO: 572588 - RNA, 19 nt, Artificial Sequence
  Description of Artificial Sequence: Synthetic oligonucleotide
  Antisense strand to SEQ ID NO: 572587
aucgucaaccaagacaugg

SEQ ID NO: 572589 - RNA, 19 nt, Artificial Sequence
  Description of Artificial Sequence: Synthetic oligonucleotide
  Sense strand starting at position 1056 of SEQ ID NO: 318571
caugucuugguugacgaua

SEQ ID NO: 572590 - RNA, 19 nt, Artificial Sequence
  Description of Artificial Sequence: Synthetic oligonucleotide
  Antisense strand to SEQ ID NO: 572589
uaucgucaaccaagacaug

SEQ ID NO: 572591 - RNA, 19 nt, Artificial Sequence
  Description of Artificial Sequence: Synthetic oligonucleotide
  Sense strand starting at position 1061 of SEQ ID NO: 318571
cuugguugacgauaucuga

SEQ ID NO: 572592 - RNA, 19 nt, Artificial Sequence
  Description of Artificial Sequence: Synthetic oligonucleotide
  Antisense strand to SEQ ID NO: 572591
ucagauaucgucaaccaag

SEQ ID NO: 572593 - RNA, 19 nt, Artificial Sequence
  Description of Artificial Sequence: Synthetic oligonucleotide
  Sense strand starting at position 1064 of SEQ ID NO: 318571
gguugacgauaucugaugu

SEQ ID NO: 572594 - RNA, 19 nt, Artificial Sequence
  Description of Artificial Sequence: Synthetic oligonucleotide
  Antisense strand to SEQ ID NO: 572593
acaucagauaucgucaacc

SEQ ID NO: 572595 - RNA, 19 nt, Artificial Sequence
  Description of Artificial Sequence: Synthetic oligonucleotide
  Sense strand starting at position 1072 of SEQ ID NO: 318571
auaucugaugucuggguuu

SEQ ID NO: 572596 - RNA, 19 nt, Artificial Sequence
  Description of Artificial Sequence: Synthetic oligonucleotide
  Antisense strand to SEQ ID NO: 572595
aaacccagacaucagauau

SEQ ID NO: 572597 - RNA, 19 nt, Artificial Sequence
  Description of Artificial Sequence: Synthetic oligonucleotide
  Sense strand starting at position 1123 of SEQ ID NO: 318571
uguuuaccaucccaaggaa

SEQ ID NO: 572598 - RNA, 19 nt, Artificial Sequence
  Description of Artificial Sequence: Synthetic oligonucleotide
  Antisense strand to SEQ ID NO: 572597
uuccuugggaugguaaaca

SEQ ID NO: 572599 - RNA, 19 nt, Artificial Sequence
  Description of Artificial Sequence: Synthetic oligonucleotide
  Sense strand starting at position 1185 of SEQ ID NO: 318571
ggugccauuucaggcagaa

SEQ ID NO: 572600 - RNA, 19 nt, Artificial Sequence
  Description of Artificial Sequence: Synthetic oligonucleotide
  Antisense strand to SEQ ID NO: 572599
uucugccugaaauggcacc

SEQ ID NO: 572601 - RNA, 19 nt, Artificial Sequence
  Description of Artificial Sequence: Synthetic oligonucleotide
  Sense strand starting at position 1205 of SEQ ID NO: 318571
ggugcugaaauuuguguau

SEQ ID NO: 572602 - RNA, 19 nt, Artificial Sequence
  Description of Artificial Sequence: Synthetic oligonucleotide
  Antisense strand to SEQ ID NO: 572601
auacacaaauuucagcacc

SEQ ID NO: 572603 - RNA, 19 nt, Artificial Sequence
  Description of Artificial Sequence: Synthetic oligonucleotide
  Sense strand starting at position 1207 of SEQ ID NO: 318571
ugcugaaauuuguguauug

SEQ ID NO: 572604 - RNA, 19 nt, Artificial Sequence
  Description of Artificial Sequence: Synthetic oligonucleotide
  Antisense strand to SEQ ID NO: 572603
caauacacaaauuucagca

SEQ ID NO: 572605 - RNA, 19 nt, Artificial Sequence
  Description of Artificial Sequence: Synthetic oligonucleotide
  Sense strand starting at position 1252 of SEQ ID NO: 318571
ugaggagaauuagaggaaa

SEQ ID NO: 572606 - RNA, 19 nt, Artificial Sequence
  Description of Artificial Sequence: Synthetic oligonucleotide
  Antisense strand to SEQ ID NO: 572605
uuuccucuaauucuccuca

SEQ ID NO: 572607 - RNA, 19 nt, Artificial Sequence
  Description of Artificial Sequence: Synthetic oligonucleotide
  Sense strand starting at position 1274 of SEQ ID NO: 318571
gaaggcuucccagaggugu

SEQ ID NO: 572608 - RNA, 19 nt, Artificial Sequence
  Description of Artificial Sequence: Synthetic oligonucleotide
  Antisense strand to SEQ ID NO: 572607
acaccucugggaagccuuc

SEQ ID NO: 572609 - RNA, 19 nt, Artificial Sequence
  Description of Artificial Sequence: Synthetic oligonucleotide
  Sense strand starting at position 1280 of SEQ ID NO: 318571
uucccagagguguggauua

SEQ ID NO: 572610 - RNA, 19 nt, Artificial Sequence
  Description of Artificial Sequence: Synthetic oligonucleotide
  Antisense strand to SEQ ID NO: 572609
uaauccacaccucugggaa

SEQ ID NO: 572611 - RNA, 19 nt, Artificial Sequence
  Description of Artificial Sequence: Synthetic oligonucleotide
  Sense strand starting at position 1282 of SEQ ID NO: 318571
cccagagguguggauuaau

SEQ ID NO: 572612 - RNA, 19 nt, Artificial Sequence
  Description of Artificial Sequence: Synthetic oligonucleotide
  Antisense strand to SEQ ID NO: 572611
auuaauccacaccucuggg

SEQ ID NO: 572613 - RNA, 19 nt, Artificial Sequence
  Description of Artificial Sequence: Synthetic oligonucleotide
  Sense strand starting at position 3191 of SEQ ID NO: 318571
uuagcuuugugguuucuua

SEQ ID NO: 572614 - RNA, 19 nt, Artificial Sequence
  Description of Artificial Sequence: Synthetic oligonucleotide
  Antisense strand to SEQ ID NO: 572613
uaagaaaccacaaagcuaa

SEQ ID NO: 572615 - RNA, 19 nt, Artificial Sequence
  Description of Artificial Sequence: Synthetic oligonucleotide
  Sense strand starting at position 3195 of SEQ ID NO: 318571
cuuugugguuucuuaaauu

SEQ ID NO: 572616 - RNA, 19 nt, Artificial Sequence
  Description of Artificial Sequence: Synthetic oligonucleotide
  Antisense strand to SEQ ID NO: 572615
aauuuaagaaaccacaaag

SEQ ID NO: 572617 - RNA, 19 nt, Artificial Sequence
  Description of Artificial Sequence: Synthetic oligonucleotide
  Sense strand starting at position 3230 of SEQ ID NO: 318571
agacgaguuaagugcagaa

SEQ ID NO: 572618 - RNA, 19 nt, Artificial Sequence
  Description of Artificial Sequence: Synthetic oligonucleotide
  Antisense strand to SEQ ID NO: 572617
uucugcacuuaacucgucu

SEQ ID NO: 572619 - RNA, 19 nt, Artificial Sequence
  Description of Artificial Sequence: Synthetic oligonucleotide
  Sense strand starting at position 3232 of SEQ ID NO: 318571
acgaguuaagugcagaacu

SEQ ID NO: 572620 - RNA, 19 nt, Artificial Sequence
  Description of Artificial Sequence: Synthetic oligonucleotide
  Antisense strand to SEQ ID NO: 572619
aguucugcacuuaacucgu

SEQ ID NO: 572621 - RNA, 19 nt, Artificial Sequence
  Description of Artificial Sequence: Synthetic oligonucleotide
  Sense strand starting at position 3234 of SEQ ID NO: 318571
gaguuaagugcagaacuga

SEQ ID NO: 572622 - RNA, 19 nt, Artificial Sequence
  Description of Artificial Sequence: Synthetic oligonucleotide
  Antisense strand to SEQ ID NO: 572621
ucaguucugcacuuaacuc

SEQ ID NO: 572623 - RNA, 19 nt, Artificial Sequence
  Description of Artificial Sequence: Synthetic oligonucleotide
  Sense strand starting at position 3367 of SEQ ID NO: 318571
cacuuacaugagugguaca

SEQ ID NO: 572624 - RNA, 19 nt, Artificial Sequence
  Description of Artificial Sequence: Synthetic oligonucleotide
  Antisense strand to SEQ ID NO: 572623
uguaccacucauguaagug

SEQ ID NO: 572625 - RNA, 19 nt, Artificial Sequence
  Description of Artificial Sequence: Synthetic oligonucleotide
  Sense strand starting at position 3406 of SEQ ID NO: 318571
ggcuucagauugguggauu

SEQ ID NO: 572626 - RNA, 19 nt, Artificial Sequence
  Description of Artificial Sequence: Synthetic oligonucleotide
  Antisense strand to SEQ ID NO: 572625
aauccaccaaucugaagcc

SEQ ID NO: 572627 - RNA, 19 nt, Artificial Sequence
  Description of Artificial Sequence: Synthetic oligonucleotide
  Sense strand starting at position 3414 of SEQ ID NO: 318571
auugguggauuccugaaag

SEQ ID NO: 572628 - RNA, 19 nt, Artificial Sequence
  Description of Artificial Sequence: Synthetic oligonucleotide
  Antisense strand to SEQ ID NO: 572627
cuuucaggaauccaccaau

SEQ ID NO: 572629 - RNA, 19 nt, Artificial Sequence
  Description of Artificial Sequence: Synthetic oligonucleotide
  Sense strand starting at position 3456 of SEQ ID NO: 318571
ggguuugaauaccauggaa

SEQ ID NO: 572630 - RNA, 19 nt, Artificial Sequence
  Description of Artificial Sequence: Synthetic oligonucleotide
  Antisense strand to SEQ ID NO: 572629
uuccaugguauucaaaccc

SEQ ID NO: 572631 - RNA, 19 nt, Artificial Sequence
  Description of Artificial Sequence: Synthetic oligonucleotide
  Sense strand starting at position 3929 of SEQ ID NO: 318571
ugcccaguaucuuugcauu

SEQ ID NO: 572632 - RNA, 19 nt, Artificial Sequence
  Description of Artificial Sequence: Synthetic oligonucleotide
  Antisense strand to SEQ ID NO: 572631
aaugcaaagauacugggca

SEQ ID NO: 572633 - RNA, 19 nt, Artificial Sequence
  Description of Artificial Sequence: Synthetic oligonucleotide
  Sense strand starting at position 3948 of SEQ ID NO: 318571
ugcucuuaccucugccaga

SEQ ID NO: 572634 - RNA, 19 nt, Artificial Sequence
  Description of Artificial Sequence: Synthetic oligonucleotide
  Antisense strand to SEQ ID NO: 572633
ucuggcagagguaagagca

SEQ ID NO: 572635 - RNA, 19 nt, Artificial Sequence
  Description of Artificial Sequence: Synthetic oligonucleotide
  Sense strand starting at position 65 of SEQ ID NO: 318572
gggagauucuggccaccuu

SEQ ID NO: 572636 - RNA, 19 nt, Artificial Sequence
  Description of Artificial Sequence: Synthetic oligonucleotide
  Antisense strand to SEQ ID NO: 572635
aagguggccagaaucuccc

SEQ ID NO: 572637 - RNA, 19 nt, Artificial Sequence
  Description of Artificial Sequence: Synthetic oligonucleotide
  Sense strand starting at position 465 of SEQ ID NO: 318572
acuuaaugagccugccuaa

SEQ ID NO: 572638 - RNA, 19 nt, Artificial Sequence
  Description of Artificial Sequence: Synthetic oligonucleotide
  Antisense strand to SEQ ID NO: 572637
uuaggcaggcucauuaagu

SEQ ID NO: 572639 - RNA, 19 nt, Artificial Sequence
  Description of Artificial Sequence: Synthetic oligonucleotide
  Sense strand starting at position 563 of SEQ ID NO: 318572
uggaacucuucuuuacuga

SEQ ID NO: 572640 - RNA, 19 nt, Artificial Sequence
  Description of Artificial Sequence: Synthetic oligonucleotide
  Antisense strand to SEQ ID NO: 572639
ucaguaaagaagaguucca

SEQ ID NO: 572641 - RNA, 19 nt, Artificial Sequence
  Description of Artificial Sequence: Synthetic oligonucleotide
  Sense strand starting at position 689 of SEQ ID NO: 318572
caggaugaugcucguggua

SEQ ID NO: 572642 - RNA, 19 nt, Artificial Sequence
  Description of Artificial Sequence: Synthetic oligonucleotide
  Antisense strand to SEQ ID NO: 572641
uaccacgagcaucauccug

SEQ ID NO: 572643 - RNA, 19 nt, Artificial Sequence
  Description of Artificial Sequence: Synthetic oligonucleotide
  Sense strand starting at position 936 of SEQ ID NO: 318572
ggauguuagaccugagauc

SEQ ID NO: 572644 - RNA, 19 nt, Artificial Sequence
  Description of Artificial Sequence: Synthetic oligonucleotide
  Antisense strand to SEQ ID NO: 572643
gaucucaggucuaacaucc

SEQ ID NO: 572645 - RNA, 19 nt, Artificial Sequence
  Description of Artificial Sequence: Synthetic oligonucleotide
  Sense strand starting at position 947 of SEQ ID NO: 318572
cugagaucugacugcuaua

SEQ ID NO: 572646 - RNA, 19 nt, Artificial Sequence
  Description of Artificial Sequence: Synthetic oligonucleotide
  Antisense strand to SEQ ID NO: 572645
uauagcagucagaucucag

SEQ ID NO: 572647 - RNA, 19 nt, Artificial Sequence
  Description of Artificial Sequence: Synthetic oligonucleotide
  Sense strand starting at position 1114 of SEQ ID NO: 318572
agagcauuaggguagcaaa

SEQ ID NO: 572648 - RNA, 19 nt, Artificial Sequence
  Description of Artificial Sequence: Synthetic oligonucleotide
  Antisense strand to SEQ ID NO: 572647
uuugcuacccuaaugcucu

SEQ ID NO: 572649 - RNA, 19 nt, Artificial Sequence
  Description of Artificial Sequence: Synthetic oligonucleotide
  Sense strand starting at position 1246 of SEQ ID NO: 318572
ggagauacauccuaaccuu

SEQ ID NO: 572650 - RNA, 19 nt, Artificial Sequence
  Description of Artificial Sequence: Synthetic oligonucleotide
  Antisense strand to SEQ ID NO: 572649
aagguuaggauguaucucc

SEQ ID NO: 572651 - RNA, 19 nt, Artificial Sequence
  Description of Artificial Sequence: Synthetic oligonucleotide
  Sense strand starting at position 1338 of SEQ ID NO: 318572
gguaaucugugacugcaau

SEQ ID NO: 572652 - RNA, 19 nt, Artificial Sequence
  Description of Artificial Sequence: Synthetic oligonucleotide
  Antisense strand to SEQ ID NO: 572651
auugcagucacagauuacc

SEQ ID NO: 572653 - RNA, 19 nt, Artificial Sequence
  Description of Artificial Sequence: Synthetic oligonucleotide
  Sense strand starting at position 1339 of SEQ ID NO: 318572
guaaucugugacugcaaug

SEQ ID NO: 572654 - RNA, 19 nt, Artificial Sequence
  Description of Artificial Sequence: Synthetic oligonucleotide
  Antisense strand to SEQ ID NO: 572653
cauugcagucacagauuac

SEQ ID NO: 572655 - RNA, 19 nt, Artificial Sequence
  Description of Artificial Sequence: Synthetic oligonucleotide
  Sense strand starting at position 1397 of SEQ ID NO: 318572
agcuaaggcauguaaaguu

SEQ ID NO: 572656 - RNA, 19 nt, Artificial Sequence
  Description of Artificial Sequence: Synthetic oligonucleotide
  Antisense strand to SEQ ID NO: 572655
aacuuuacaugccuuagcu

SEQ ID NO: 572657 - RNA, 19 nt, Artificial Sequence
  Description of Artificial Sequence: Synthetic oligonucleotide
  Sense strand starting at position 1494 of SEQ ID NO: 318572
cgggaaugguguccauaau

SEQ ID NO: 572658 - RNA, 19 nt, Artificial Sequence
  Description of Artificial Sequence: Synthetic oligonucleotide
  Antisense strand to SEQ ID NO: 572657
auuauggacaccauucccg

SEQ ID NO: 572659 - RNA, 19 nt, Artificial Sequence
  Description of Artificial Sequence: Synthetic oligonucleotide
  Sense strand starting at position 1563 of SEQ ID NO: 318572
ugacgucaucuccacugaa

SEQ ID NO: 572660 - RNA, 19 nt, Artificial Sequence
  Description of Artificial Sequence: Synthetic oligonucleotide
  Antisense strand to SEQ ID NO: 572659
uucaguggagaugacguca

SEQ ID NO: 572661 - RNA, 19 nt, Artificial Sequence
  Description of Artificial Sequence: Synthetic oligonucleotide
  Sense strand starting at position 1643 of SEQ ID NO: 318572
gggagaauauggcuugauu

SEQ ID NO: 572662 - RNA, 19 nt, Artificial Sequence
  Description of Artificial Sequence: Synthetic oligonucleotide
  Antisense strand to SEQ ID NO: 572661
aaucaagccauauucuccc

SEQ ID NO: 572663 - RNA, 19 nt, Artificial Sequence
  Description of Artificial Sequence: Synthetic oligonucleotide
  Sense strand starting at position 1872 of SEQ ID NO: 318572
guggauuaguuccuccuga

SEQ ID NO: 572664 - RNA, 19 nt, Artificial Sequence
  Description of Artificial Sequence: Synthetic oligonucleotide
  Antisense strand to SEQ ID NO: 572663
ucaggaggaacuaauccac

SEQ ID NO: 572665 - RNA, 19 nt, Artificial Sequence
  Description of Artificial Sequence: Synthetic oligonucleotide
  Sense strand starting at position 1873 of SEQ ID NO: 318572
uggauuaguuccuccugag

SEQ ID NO: 572666 - RNA, 19 nt, Artificial Sequence
  Description of Artificial Sequence: Synthetic oligonucleotide
  Antisense strand to SEQ ID NO: 572665
cucaggaggaacuaaucca

SEQ ID NO: 572667 - RNA, 19 nt, Artificial Sequence
  Description of Artificial Sequence: Synthetic oligonucleotide
  Sense strand starting at position 1910 of SEQ ID NO: 318572
guugaucuaaagcgagaca

SEQ ID NO: 572668 - RNA, 19 nt, Artificial Sequence
  Description of Artificial Sequence: Synthetic oligonucleotide
  Antisense strand to SEQ ID NO: 572667
ugucucgcuuuagaucaac

SEQ ID NO: 572669 - RNA, 19 nt, Artificial Sequence
  Description of Artificial Sequence: Synthetic oligonucleotide
  Sense strand starting at position 2192 of SEQ ID NO: 318572
uugcgucuucuguuucuca

SEQ ID NO: 572670 - RNA, 19 nt, Artificial Sequence
  Description of Artificial Sequence: Synthetic oligonucleotide
  Antisense strand to SEQ ID NO: 572669
ugagaaacagaagacgcaa

SEQ ID NO: 572671 - RNA, 19 nt, Artificial Sequence
  Description of Artificial Sequence: Synthetic oligonucleotide
  Sense strand starting at position 2409 of SEQ ID NO: 318572
uccuccauuguaugagauu

SEQ ID NO: 572672 - RNA, 19 nt, Artificial Sequence
  Description of Artificial Sequence: Synthetic oligonucleotide
  Antisense strand to SEQ ID NO: 572671
aaucucauacaauggagga

SEQ ID NO: 572673 - RNA, 19 nt, Artificial Sequence
  Description of Artificial Sequence: Synthetic oligonucleotide
  Sense strand starting at position 2438 of SEQ ID NO: 318572
ggaacacacuuaguacuua

SEQ ID NO: 572674 - RNA, 19 nt, Artificial Sequence
  Description of Artificial Sequence: Synthetic oligonucleotide
  Antisense strand to SEQ ID NO: 572673
uaaguacuaaguguguucc

SEQ ID NO: 572675 - RNA, 19 nt, Artificial Sequence
  Description of Artificial Sequence: Synthetic oligonucleotide
  Sense strand starting at position 2466 of SEQ ID NO: 318572
agccuaagcacggaagaua

SEQ ID NO: 572676 - RNA, 19 nt, Artificial Sequence
  Description of Artificial Sequence: Synthetic oligonucleotide
  Antisense strand to SEQ ID NO: 572675
uaucuuccgugcuuaggcu

SEQ ID NO: 572677 - RNA, 19 nt, Artificial Sequence
  Description of Artificial Sequence: Synthetic oligonucleotide
  Sense strand starting at position 2553 of SEQ ID NO: 318572
ggcacuagagucugcacua

SEQ ID NO: 572678 - RNA, 19 nt, Artificial Sequence
  Description of Artificial Sequence: Synthetic oligonucleotide
  Antisense strand to SEQ ID NO: 572677
uagugcagacucuagugcc

SEQ ID NO: 572679 - RNA, 19 nt, Artificial Sequence
  Description of Artificial Sequence: Synthetic oligonucleotide
  Sense strand starting at position 2560 of SEQ ID NO: 318572
gagucugcacuagagucau

SEQ ID NO: 572680 - RNA, 19 nt, Artificial Sequence
  Description of Artificial Sequence: Synthetic oligonucleotide
  Antisense strand to SEQ ID NO: 572679
augacucuagugcagacuc

SEQ ID NO: 572681 - RNA, 19 nt, Artificial Sequence
  Description of Artificial Sequence: Synthetic oligonucleotide
  Sense strand starting at position 2741 of SEQ ID NO: 318572
agauuagguuuggagaaca

SEQ ID NO: 572682 - RNA, 19 nt, Artificial Sequence
  Description of Artificial Sequence: Synthetic oligonucleotide
  Antisense strand to SEQ ID NO: 572681
uguucuccaaaccuaaucu

SEQ ID NO: 572683 - RNA, 19 nt, Artificial Sequence
  Description of Artificial Sequence: Synthetic oligonucleotide
  Sense strand starting at position 2754 of SEQ ID NO: 318572
agaacaucagagcgaauau

SEQ ID NO: 572684 - RNA, 19 nt, Artificial Sequence
  Description of Artificial Sequence: Synthetic oligonucleotide
  Antisense strand to SEQ ID NO: 572683
auauucgcucugauguucu

SEQ ID NO: 572685 - RNA, 19 nt, Artificial Sequence
  Description of Artificial Sequence: Synthetic oligonucleotide
  Sense strand starting at position 2853 of SEQ ID NO: 318572
uuaccuaggcucuaugaga

SEQ ID NO: 572686 - RNA, 19 nt, Artificial Sequence
  Description of Artificial Sequence: Synthetic oligonucleotide
  Antisense strand to SEQ ID NO: 572685
ucucauagagccuagguaa

SEQ ID NO: 572687 - RNA, 19 nt, Artificial Sequence
  Description of Artificial Sequence: Synthetic oligonucleotide
  Sense strand starting at position 2861 of SEQ ID NO: 318572
gcucuaugagaaugagaau

SEQ ID NO: 572688 - RNA, 19 nt, Artificial Sequence
  Description of Artificial Sequence: Synthetic oligonucleotide
  Antisense strand to SEQ ID NO: 572687
auucucauucucauagagc

SEQ ID NO: 572689 - RNA, 19 nt, Artificial Sequence
  Description of Artificial Sequence: Synthetic oligonucleotide
  Sense strand starting at position 2864 of SEQ ID NO: 318572
cuaugagaaugagaaugaa

SEQ ID NO: 572690 - RNA, 19 nt, Artificial Sequence
  Description of Artificial Sequence: Synthetic oligonucleotide
  Antisense strand to SEQ ID NO: 572689
uucauucucauucucauag

SEQ ID NO: 572691 - RNA, 19 nt, Artificial Sequence
  Description of Artificial Sequence: Synthetic oligonucleotide
  Sense strand starting at position 2899 of SEQ ID NO: 318572
acucuaguaaguuguggaa

SEQ ID NO: 572692 - RNA, 19 nt, Artificial Sequence
  Description of Artificial Sequence: Synthetic oligonucleotide
  Antisense strand to SEQ ID NO: 572691
uuccacaacuuacuagagu

SEQ ID NO: 572693 - RNA, 19 nt, Artificial Sequence
  Description of Artificial Sequence: Synthetic oligonucleotide
  Sense strand starting at position 3265 of SEQ ID NO: 318572
ucauguucuuaaccaggau

SEQ ID NO: 572694 - RNA, 19 nt, Artificial Sequence
  Description of Artificial Sequence: Synthetic oligonucleotide
  Antisense strand to SEQ ID NO: 572693
auccugguuaagaacauga

SEQ ID NO: 572695 - RNA, 19 nt, Artificial Sequence
  Description of Artificial Sequence: Synthetic oligonucleotide
  Sense strand starting at position 3268 of SEQ ID NO: 318572
uguucuuaaccaggauguu

SEQ ID NO: 572696 - RNA, 19 nt, Artificial Sequence
  Description of Artificial Sequence: Synthetic oligonucleotide
  Antisense strand to SEQ ID NO: 572695
aacauccugguuaagaaca

SEQ ID NO: 572697 - RNA, 19 nt, Artificial Sequence
  Description of Artificial Sequence: Synthetic oligonucleotide
  Sense strand starting at position 3305 of SEQ ID NO: 318572
acgucauggguggaaguua

SEQ ID NO: 572698 - RNA, 19 nt, Artificial Sequence
  Description of Artificial Sequence: Synthetic oligonucleotide
  Antisense strand to SEQ ID NO: 572697
uaacuuccacccaugacgu

SEQ ID NO: 572699 - RNA, 19 nt, Artificial Sequence
  Description of Artificial Sequence: Synthetic oligonucleotide
  Sense strand starting at position 3306 of SEQ ID NO: 318572
cgucauggguggaaguuau

SEQ ID NO: 572700 - RNA, 19 nt, Artificial Sequence
  Description of Artificial Sequence: Synthetic oligonucleotide
  Antisense strand to SEQ ID NO: 572699
auaacuuccacccaugacg

SEQ ID NO: 572701 - RNA, 19 nt, Artificial Sequence
  Description of Artificial Sequence: Synthetic oligonucleotide
  Sense strand starting at position 3313 of SEQ ID NO: 318572
gguggaaguuauggaauuu

SEQ ID NO: 572702 - RNA, 19 nt, Artificial Sequence
  Description of Artificial Sequence: Synthetic oligonucleotide
  Antisense strand to SEQ ID NO: 572701
aaauuccauaacuuccacc

SEQ ID NO: 572703 - RNA, 19 nt, Artificial Sequence
  Description of Artificial Sequence: Synthetic oligonucleotide
  Sense strand starting at position 3354 of SEQ ID NO: 318572
cuauacuaacaaggaguuu

SEQ ID NO: 572704 - RNA, 19 nt, Artificial Sequence
  Description of Artificial Sequence: Synthetic oligonucleotide
  Antisense strand to SEQ ID NO: 572703
aaacuccuuguuaguauag

SEQ ID NO: 572705 - RNA, 19 nt, Artificial Sequence
  Description of Artificial Sequence: Synthetic oligonucleotide
  Sense strand starting at position 3385 of SEQ ID NO: 318572
accagugacuaugaaagga

SEQ ID NO: 572706 - RNA, 19 nt, Artificial Sequence
  Description of Artificial Sequence: Synthetic oligonucleotide
  Antisense strand to SEQ ID NO: 572705
uccuuucauagucacuggu

SEQ ID NO: 572707 - RNA, 19 nt, Artificial Sequence
  Description of Artificial Sequence: Synthetic oligonucleotide
  Sense strand starting at position 3406 of SEQ ID NO: 318572
cagaaagcucaggguaagu

SEQ ID NO: 572708 - RNA, 19 nt, Artificial Sequence
  Description of Artificial Sequence: Synthetic oligonucleotide
  Antisense strand to SEQ ID NO: 572707
acuuacccugagcuuucug

SEQ ID NO: 572709 - RNA, 19 nt, Artificial Sequence
  Description of Artificial Sequence: Synthetic oligonucleotide
  Sense strand starting at position 3408 of SEQ ID NO: 318572
gaaagcucaggguaaguca

SEQ ID NO: 572710 - RNA, 19 nt, Artificial Sequence
  Description of Artificial Sequence: Synthetic oligonucleotide
  Antisense strand to SEQ ID NO: 572709
ugacuuacccugagcuuuc

SEQ ID NO: 572711 - RNA, 19 nt, Artificial Sequence
  Description of Artificial Sequence: Synthetic oligonucleotide
  Sense strand starting at position 3479 of SEQ ID NO: 318572
ugugguucucucagcggga

SEQ ID NO: 572712 - RNA, 19 nt, Artificial Sequence
  Description of Artificial Sequence: Synthetic oligonucleotide
  Antisense strand to SEQ ID NO: 572711
ucccgcugagagaaccaca

SEQ ID NO: 572713 - RNA, 19 nt, Artificial Sequence
  Description of Artificial Sequence: Synthetic oligonucleotide
  Sense strand starting at position 3950 of SEQ ID NO: 318572
cuaucauacccaggugauu

SEQ ID NO: 572714 - RNA, 19 nt, Artificial Sequence
  Description of Artificial Sequence: Synthetic oligonucleotide
  Antisense strand to SEQ ID NO: 572713
aaucaccuggguaugauag

SEQ ID NO: 572715 - RNA, 19 nt, Artificial Sequence
  Description of Artificial Sequence: Synthetic oligonucleotide
  Sense strand starting at position 80 of SEQ ID NO: 318573
uucggaucucauuaccacu

SEQ ID NO: 572716 - RNA, 19 nt, Artificial Sequence
  Description of Artificial Sequence: Synthetic oligonucleotide
  Antisense strand to SEQ ID NO: 572715
agugguaaugagauccgaa

SEQ ID NO: 572717 - RNA, 19 nt, Artificial Sequence
  Description of Artificial Sequence: Synthetic oligonucleotide
  Sense strand starting at position 82 of SEQ ID NO: 318573
cggaucucauuaccacuaa

SEQ ID NO: 572718 - RNA, 19 nt, Artificial Sequence
  Description of Artificial Sequence: Synthetic oligonucleotide
  Antisense strand to SEQ ID NO: 572717
uuagugguaaugagauccg

SEQ ID NO: 572719 - RNA, 19 nt, Artificial Sequence
  Description of Artificial Sequence: Synthetic oligonucleotide
  Sense strand starting at position 166 of SEQ ID NO: 318573
cuguguuaccuauaaggga

SEQ ID NO: 572720 - RNA, 19 nt, Artificial Sequence
  Description of Artificial Sequence: Synthetic oligonucleotide
  Antisense strand to SEQ ID NO: 572719
ucccuuauagguaacacag

SEQ ID NO: 572721 - RNA, 19 nt, Artificial Sequence
  Description of Artificial Sequence: Synthetic oligonucleotide
  Sense strand starting at position 170 of SEQ ID NO: 318573
guuaccuauaagggaaagu

SEQ ID NO: 572722 - RNA, 19 nt, Artificial Sequence
  Description of Artificial Sequence: Synthetic oligonucleotide
  Antisense strand to SEQ ID NO: 572721
acuuucccuuauagguaac

SEQ ID NO: 572723 - RNA, 19 nt, Artificial Sequence
  Description of Artificial Sequence: Synthetic oligonucleotide
  Sense strand starting at position 564 of SEQ ID NO: 318573
gauuaagcucauuagcgga

SEQ ID NO: 572724 - RNA, 19 nt, Artificial Sequence
  Description of Artificial Sequence: Synthetic oligonucleotide
  Antisense strand to SEQ ID NO: 572723
uccgcuaaugagcuuaauc

SEQ ID NO: 572725 - RNA, 19 nt, Artificial Sequence
  Description of Artificial Sequence: Synthetic oligonucleotide
  Sense strand starting at position 586 of SEQ ID NO: 318573
gaucacgucguguuuaucu

SEQ ID NO: 572726 - RNA, 19 nt, Artificial Sequence
  Description of Artificial Sequence: Synthetic oligonucleotide
  Antisense strand to SEQ ID NO: 572725
agauaaacacgacgugauc

SEQ ID NO: 572727 - RNA, 19 nt, Artificial Sequence
  Description of Artificial Sequence: Synthetic oligonucleotide
  Sense strand starting at position 595 of SEQ ID NO: 318573
guguuuaucucuguauuuc

SEQ ID NO: 572728 - RNA, 19 nt, Artificial Sequence
  Description of Artificial Sequence: Synthetic oligonucleotide
  Antisense strand to SEQ ID NO: 572727
gaaauacagagauaaacac

SEQ ID NO: 572729 - RNA, 19 nt, Artificial Sequence
  Description of Artificial Sequence: Synthetic oligonucleotide
  Sense strand starting at position 606 of SEQ ID NO: 318573
uguauuuccucucuccagu

SEQ ID NO: 572730 - RNA, 19 nt, Artificial Sequence
  Description of Artificial Sequence: Synthetic oligonucleotide
  Antisense strand to SEQ ID NO: 572729
acuggagagaggaaauaca

SEQ ID NO: 572731 - RNA, 19 nt, Artificial Sequence
  Description of Artificial Sequence: Synthetic oligonucleotide
  Sense strand starting at position 634 of SEQ ID NO: 318573
uagugagguguuuacuaaa

SEQ ID NO: 572732 - RNA, 19 nt, Artificial Sequence
  Description of Artificial Sequence: Synthetic oligonucleotide
  Antisense strand to SEQ ID NO: 572731
uuuaguaaacaccucacua

SEQ ID NO: 572733 - RNA, 19 nt, Artificial Sequence
  Description of Artificial Sequence: Synthetic oligonucleotide
  Sense strand starting at position 673 of SEQ ID NO: 318573
gcaggcgugguuaaaguua

SEQ ID NO: 572734 - RNA, 19 nt, Artificial Sequence
  Description of Artificial Sequence: Synthetic oligonucleotide
  Antisense strand to SEQ ID NO: 572733
uaacuuuaaccacgccugc

SEQ ID NO: 572735 - RNA, 19 nt, Artificial Sequence
  Description of Artificial Sequence: Synthetic oligonucleotide
  Sense strand starting at position 703 of SEQ ID NO: 318573
ccuccuuuggaaugaaaua

SEQ ID NO: 572736 - RNA, 19 nt, Artificial Sequence
  Description of Artificial Sequence: Synthetic oligonucleotide
  Antisense strand to SEQ ID NO: 572735
uauuucauuccaaaggagg

SEQ ID NO: 572737 - RNA, 19 nt, Artificial Sequence
  Description of Artificial Sequence: Synthetic oligonucleotide
  Sense strand starting at position 779 of SEQ ID NO: 318573
gguuauauaccucauguuu

SEQ ID NO: 572738 - RNA, 19 nt, Artificial Sequence
  Description of Artificial Sequence: Synthetic oligonucleotide
  Antisense strand to SEQ ID NO: 572737
aaacaugagguauauaacc

SEQ ID NO: 572739 - RNA, 19 nt, Artificial Sequence
  Description of Artificial Sequence: Synthetic oligonucleotide
  Sense strand starting at position 785 of SEQ ID NO: 318573
auaccucauguuugacauu

SEQ ID NO: 572740 - RNA, 19 nt, Artificial Sequence
  Description of Artificial Sequence: Synthetic oligonucleotide
  Antisense strand to SEQ ID NO: 572739
aaugucaaacaugagguau

SEQ ID NO: 572741 - RNA, 19 nt, Artificial Sequence
  Description of Artificial Sequence: Synthetic oligonucleotide
  Sense strand starting at position 811 of SEQ ID NO: 318573
gucugacuucuggauaagu

SEQ ID NO: 572742 - RNA, 19 nt, Artificial Sequence
  Description of Artificial Sequence: Synthetic oligonucleotide
  Antisense strand to SEQ ID NO: 572741
acuuauccagaagucagac

SEQ ID NO: 572743 - RNA, 19 nt, Artificial Sequence
  Description of Artificial Sequence: Synthetic oligonucleotide
  Sense strand starting at position 822 of SEQ ID NO: 318573
ggauaaguggauuguuccu

SEQ ID NO: 572744 - RNA, 19 nt, Artificial Sequence
  Description of Artificial Sequence: Synthetic oligonucleotide
  Antisense strand to SEQ ID NO: 572743
aggaacaauccacuuaucc

SEQ ID NO: 572745 - RNA, 19 nt, Artificial Sequence
  Description of Artificial Sequence: Synthetic oligonucleotide
  Sense strand starting at position 928 of SEQ ID NO: 318573
aguaaauuagguuacaugu

SEQ ID NO: 572746 - RNA, 19 nt, Artificial Sequence
  Description of Artificial Sequence: Synthetic oligonucleotide
  Antisense strand to SEQ ID NO: 572745
acauguaaccuaauuuacu

SEQ ID NO: 572747 - RNA, 19 nt, Artificial Sequence
  Description of Artificial Sequence: Synthetic oligonucleotide
  Sense strand starting at position 941 of SEQ ID NO: 318573
acauguguucccuaaacaa

SEQ ID NO: 572748 - RNA, 19 nt, Artificial Sequence
  Description of Artificial Sequence: Synthetic oligonucleotide
  Antisense strand to SEQ ID NO: 572747
uuguuuagggaacacaugu

SEQ ID NO: 572749 - RNA, 19 nt, Artificial Sequence
  Description of Artificial Sequence: Synthetic oligonucleotide
  Sense strand starting at position 1133 of SEQ ID NO: 318573
uguuguauuuaucuuucca

SEQ ID NO: 572750 - RNA, 19 nt, Artificial Sequence
  Description of Artificial Sequence: Synthetic oligonucleotide
  Antisense strand to SEQ ID NO: 572749
uggaaagauaaauacaaca

SEQ ID NO: 572751 - RNA, 19 nt, Artificial Sequence
  Description of Artificial Sequence: Synthetic oligonucleotide
  Sense strand starting at position 1262 of SEQ ID NO: 318573
agguguuuacccuaaugac

SEQ ID NO: 572752 - RNA, 19 nt, Artificial Sequence
  Description of Artificial Sequence: Synthetic oligonucleotide
  Antisense strand to SEQ ID NO: 572751
gucauuaggguaaacaccu

SEQ ID NO: 572753 - RNA, 19 nt, Artificial Sequence
  Description of Artificial Sequence: Synthetic oligonucleotide
  Sense strand starting at position 1516 of SEQ ID NO: 318573
accugauuagacugugaua

SEQ ID NO: 572754 - RNA, 19 nt, Artificial Sequence
  Description of Artificial Sequence: Synthetic oligonucleotide
  Antisense strand to SEQ ID NO: 572753
uaucacagucuaaucaggu

SEQ ID NO: 572755 - RNA, 19 nt, Artificial Sequence
  Description of Artificial Sequence: Synthetic oligonucleotide
  Sense strand starting at position 1518 of SEQ ID NO: 318573
cugauuagacugugauaau

SEQ ID NO: 572756 - RNA, 19 nt, Artificial Sequence
  Description of Artificial Sequence: Synthetic oligonucleotide
  Antisense strand to SEQ ID NO: 572755
auuaucacagucuaaucag

SEQ ID NO: 572757 - RNA, 19 nt, Artificial Sequence
  Description of Artificial Sequence: Synthetic oligonucleotide
  Sense strand starting at position 1692 of SEQ ID NO: 318573
ccuagaugacucggaaagu

SEQ ID NO: 572758 - RNA, 19 nt, Artificial Sequence
  Description of Artificial Sequence: Synthetic oligonucleotide
  Antisense strand to SEQ ID NO: 572757
acuuuccgagucaucuagg

SEQ ID NO: 572759 - RNA, 19 nt, Artificial Sequence
  Description of Artificial Sequence: Synthetic oligonucleotide
  Sense strand starting at position 1757 of SEQ ID NO: 318573
cgcccuuuacaacaagauu

SEQ ID NO: 572760 - RNA, 19 nt, Artificial Sequence
  Description of Artificial Sequence: Synthetic oligonucleotide
  Antisense strand to SEQ ID NO: 572759
aaucuuguuguaaagggcg

SEQ ID NO: 572761 - RNA, 19 nt, Artificial Sequence
  Description of Artificial Sequence: Synthetic oligonucleotide
  Sense strand starting at position 1862 of SEQ ID NO: 318573
guuccuaguccuuaacaag

SEQ ID NO: 572762 - RNA, 19 nt, Artificial Sequence
  Description of Artificial Sequence: Synthetic oligonucleotide
  Antisense strand to SEQ ID NO: 572761
cuuguuaaggacuaggaac

SEQ ID NO: 572763 - RNA, 19 nt, Artificial Sequence
  Description of Artificial Sequence: Synthetic oligonucleotide
  Sense strand starting at position 2024 of SEQ ID NO: 318573
gcuacagaaucuucugaca

SEQ ID NO: 572764 - RNA, 19 nt, Artificial Sequence
  Description of Artificial Sequence: Synthetic oligonucleotide
  Antisense strand to SEQ ID NO: 572763
ugucagaagauucuguagc

SEQ ID NO: 572765 - RNA, 19 nt, Artificial Sequence
  Description of Artificial Sequence: Synthetic oligonucleotide
  Sense strand starting at position 2058 of SEQ ID NO: 318573
gaggaagaggaguguguuu

SEQ ID NO: 572766 - RNA, 19 nt, Artificial Sequence
  Description of Artificial Sequence: Synthetic oligonucleotide
  Antisense strand to SEQ ID NO: 572765
aaacacacuccucuuccuc

SEQ ID NO: 572767 - RNA, 19 nt, Artificial Sequence
  Description of Artificial Sequence: Synthetic oligonucleotide
  Sense strand starting at position 2122 of SEQ ID NO: 318573
uaaggaguucuaugauaua

SEQ ID NO: 572768 - RNA, 19 nt, Artificial Sequence
  Description of Artificial Sequence: Synthetic oligonucleotide
  Antisense strand to SEQ ID NO: 572767
uauaucauagaacuccuua

SEQ ID NO: 572769 - RNA, 19 nt, Artificial Sequence
  Description of Artificial Sequence: Synthetic oligonucleotide
  Sense strand starting at position 2153 of SEQ ID NO: 318573
ucccaaauucugcagugau

SEQ ID NO: 572770 - RNA, 19 nt, Artificial Sequence
  Description of Artificial Sequence: Synthetic oligonucleotide
  Antisense strand to SEQ ID NO: 572769
aucacugcagaauuuggga

SEQ ID NO: 572771 - RNA, 19 nt, Artificial Sequence
  Description of Artificial Sequence: Synthetic oligonucleotide
  Sense strand starting at position 2432 of SEQ ID NO: 318573
augucagaugaccauuagu

SEQ ID NO: 572772 - RNA, 19 nt, Artificial Sequence
  Description of Artificial Sequence: Synthetic oligonucleotide
  Antisense strand to SEQ ID NO: 572771
acuaauggucaucugacau

SEQ ID NO: 572773 - RNA, 19 nt, Artificial Sequence
  Description of Artificial Sequence: Synthetic oligonucleotide
  Sense strand starting at position 2488 of SEQ ID NO: 318573
agacuugauugacugccua

SEQ ID NO: 572774 - RNA, 19 nt, Artificial Sequence
  Description of Artificial Sequence: Synthetic oligonucleotide
  Antisense strand to SEQ ID NO: 572773
uaggcagucaaucaagucu

SEQ ID NO: 572775 - RNA, 19 nt, Artificial Sequence
  Description of Artificial Sequence: Synthetic oligonucleotide
  Sense strand starting at position 2852 of SEQ ID NO: 318573
aaugaaauaguugguuaac

SEQ ID NO: 572776 - RNA, 19 nt, Artificial Sequence
  Description of Artificial Sequence: Synthetic oligonucleotide
  Antisense strand to SEQ ID NO: 572775
guuaaccaacuauuucauu

SEQ ID NO: 572777 - RNA, 19 nt, Artificial Sequence
  Description of Artificial Sequence: Synthetic oligonucleotide
  Sense strand starting at position 2854 of SEQ ID NO: 318573
ugaaauaguugguuaaccu

SEQ ID NO: 572778 - RNA, 19 nt, Artificial Sequence
  Description of Artificial Sequence: Synthetic oligonucleotide
  Antisense strand to SEQ ID NO: 572777
agguuaaccaacuauuuca

SEQ ID NO: 572779 - RNA, 19 nt, Artificial Sequence
  Description of Artificial Sequence: Synthetic oligonucleotide
  Sense strand starting at position 2858 of SEQ ID NO: 318573
auaguugguuaaccugaau

SEQ ID NO: 572780 - RNA, 19 nt, Artificial Sequence
  Description of Artificial Sequence: Synthetic oligonucleotide
  Antisense strand to SEQ ID NO: 572779
auucagguuaaccaacuau

SEQ ID NO: 572781 - RNA, 19 nt, Artificial Sequence
  Description of Artificial Sequence: Synthetic oligonucleotide
  Sense strand starting at position 2998 of SEQ ID NO: 318573
ccaggauuccucuagcaug

SEQ ID NO: 572782 - RNA, 19 nt, Artificial Sequence
  Description of Artificial Sequence: Synthetic oligonucleotide
  Antisense strand to SEQ ID NO: 572781
caugcuagaggaauccugg

SEQ ID NO: 572783 - RNA, 19 nt, Artificial Sequence
  Description of Artificial Sequence: Synthetic oligonucleotide
  Sense strand starting at position 3133 of SEQ ID NO: 318573
ugacucucaugguuaagau

SEQ ID NO: 572784 - RNA, 19 nt, Artificial Sequence
  Description of Artificial Sequence: Synthetic oligonucleotide
  Antisense strand to SEQ ID NO: 572783
aucuuaaccaugagaguca

SEQ ID NO: 572785 - RNA, 19 nt, Artificial Sequence
  Description of Artificial Sequence: Synthetic oligonucleotide
  Sense strand starting at position 3270 of SEQ ID NO: 318573
caagauaguuggucaucag

SEQ ID NO: 572786 - RNA, 19 nt, Artificial Sequence
  Description of Artificial Sequence: Synthetic oligonucleotide
  Antisense strand to SEQ ID NO: 572785
cugaugaccaacuaucuug

SEQ ID NO: 572787 - RNA, 19 nt, Artificial Sequence
  Description of Artificial Sequence: Synthetic oligonucleotide
  Sense strand starting at position 3519 of SEQ ID NO: 318573
gcacuuaaagcauaagcaa

SEQ ID NO: 572788 - RNA, 19 nt, Artificial Sequence
  Description of Artificial Sequence: Synthetic oligonucleotide
  Antisense strand to SEQ ID NO: 572787
uugcuuaugcuuuaagugc

SEQ ID NO: 572789 - RNA, 19 nt, Artificial Sequence
  Description of Artificial Sequence: Synthetic oligonucleotide
  Sense strand starting at position 3595 of SEQ ID NO: 318573
ccagaaguagaguggugaa

SEQ ID NO: 572790 - RNA, 19 nt, Artificial Sequence
  Description of Artificial Sequence: Synthetic oligonucleotide
  Antisense strand to SEQ ID NO: 572789
uucaccacucuacuucugg

SEQ ID NO: 572791 - RNA, 19 nt, Artificial Sequence
  Description of Artificial Sequence: Synthetic oligonucleotide
  Sense strand starting at position 3885 of SEQ ID NO: 318573
uuaugacagcuguacagau

SEQ ID NO: 572792 - RNA, 19 nt, Artificial Sequence
  Description of Artificial Sequence: Synthetic oligonucleotide
  Antisense strand to SEQ ID NO: 572791
aucuguacagcugucauaa

SEQ ID NO: 572793 - RNA, 19 nt, Artificial Sequence
  Description of Artificial Sequence: Synthetic oligonucleotide
  Sense strand starting at position 3952 of SEQ ID NO: 318573
ugcacacagcuuugaagaa

SEQ ID NO: 572794 - RNA, 19 nt, Artificial Sequence
  Description of Artificial Sequence: Synthetic oligonucleotide
  Antisense strand to SEQ ID NO: 572793
uucuucaaagcugugugca

SEQ ID NO: 572795 - RNA, 19 nt, Artificial Sequence
  Description of Artificial Sequence: Synthetic oligonucleotide
  Sense strand starting at position 17 of SEQ ID NO: 318574
aacuuacauucguugagga

SEQ ID NO: 572796 - RNA, 19 nt, Artificial Sequence
  Description of Artificial Sequence: Synthetic oligonucleotide
  Antisense strand to SEQ ID NO: 572795
uccucaacgaauguaaguu

SEQ ID NO: 572797 - RNA, 19 nt, Artificial Sequence
  Description of Artificial Sequence: Synthetic oligonucleotide
  Sense strand starting at position 19 of SEQ ID NO: 318574
cuuacauucguugaggauu

SEQ ID NO: 572798 - RNA, 19 nt, Artificial Sequence
  Description of Artificial Sequence: Synthetic oligonucleotide
  Antisense strand to SEQ ID NO: 572797
aauccucaacgaauguaag

SEQ ID NO: 572799 - RNA, 19 nt, Artificial Sequence
  Description of Artificial Sequence: Synthetic oligonucleotide
  Sense strand starting at position 87 of SEQ ID NO: 318574
cuugaugagcuugaguuaa

SEQ ID NO: 572800 - RNA, 19 nt, Artificial Sequence
  Description of Artificial Sequence: Synthetic oligonucleotide
  Antisense strand to SEQ ID NO: 572799
uuaacucaagcucaucaag

SEQ ID NO: 572801 - RNA, 19 nt, Artificial Sequence
  Description of Artificial Sequence: Synthetic oligonucleotide
  Sense strand starting at position 91 of SEQ ID NO: 318574
augagcuugaguuaaguaa

SEQ ID NO: 572802 - RNA, 19 nt, Artificial Sequence
  Description of Artificial Sequence: Synthetic oligonucleotide
  Antisense strand to SEQ ID NO: 572801
uuacuuaacucaagcucau

SEQ ID NO: 572803 - RNA, 19 nt, Artificial Sequence
  Description of Artificial Sequence: Synthetic oligonucleotide
  Sense strand starting at position 168 of SEQ ID NO: 318574
ggcauauccagagaagcca

SEQ ID NO: 572804 - RNA, 19 nt, Artificial Sequence
  Description of Artificial Sequence: Synthetic oligonucleotide
  Antisense strand to SEQ ID NO: 572803
uggcuucucuggauaugcc

SEQ ID NO: 572805 - RNA, 19 nt, Artificial Sequence
  Description of Artificial Sequence: Synthetic oligonucleotide
  Sense strand starting at position 298 of SEQ ID NO: 318574
ugaauccuagucuauuagu

SEQ ID NO: 572806 - RNA, 19 nt, Artificial Sequence
  Description of Artificial Sequence: Synthetic oligonucleotide
  Antisense strand to SEQ ID NO: 572805
acuaauagacuaggauuca

SEQ ID NO: 572807 - RNA, 19 nt, Artificial Sequence
  Description of Artificial Sequence: Synthetic oligonucleotide
  Sense strand starting at position 348 of SEQ ID NO: 318574
aaguuacaaguaugauaag

SEQ ID NO: 572808 - RNA, 19 nt, Artificial Sequence
  Description of Artificial Sequence: Synthetic oligonucleotide
  Antisense strand to SEQ ID NO: 572807
cuuaucauacuuguaacuu

SEQ ID NO: 572809 - RNA, 19 nt, Artificial Sequence
  Description of Artificial Sequence: Synthetic oligonucleotide
  Sense strand starting at position 558 of SEQ ID NO: 318574
acuacuaaugugugacaga

SEQ ID NO: 572810 - RNA, 19 nt, Artificial Sequence
  Description of Artificial Sequence: Synthetic oligonucleotide
  Antisense strand to SEQ ID NO: 572809
ucugucacacauuaguagu

SEQ ID NO: 572811 - RNA, 19 nt, Artificial Sequence
  Description of Artificial Sequence: Synthetic oligonucleotide
  Sense strand starting at position 579 of SEQ ID NO: 318574
uugugcuuggugcuuuaua

SEQ ID NO: 572812 - RNA, 19 nt, Artificial Sequence
  Description of Artificial Sequence: Synthetic oligonucleotide
  Antisense strand to SEQ ID NO: 572811
uauaaagcaccaagcacaa

SEQ ID NO: 572813 - RNA, 19 nt, Artificial Sequence
  Description of Artificial Sequence: Synthetic oligonucleotide
  Sense strand starting at position 849 of SEQ ID NO: 318574
agcugaggcauagaaaguu

SEQ ID NO: 572814 - RNA, 19 nt, Artificial Sequence
  Description of Artificial Sequence: Synthetic oligonucleotide
  Antisense strand to SEQ ID NO: 572813
aacuuucuaugccucagcu

SEQ ID NO: 572815 - RNA, 19 nt, Artificial Sequence
  Description of Artificial Sequence: Synthetic oligonucleotide
  Sense strand starting at position 906 of SEQ ID NO: 318574
cgaagugugaugggaacua

SEQ ID NO: 572816 - RNA, 19 nt, Artificial Sequence
  Description of Artificial Sequence: Synthetic oligonucleotide
  Antisense strand to SEQ ID NO: 572815
uaguucccaucacacuucg

SEQ ID NO: 572817 - RNA, 19 nt, Artificial Sequence
  Description of Artificial Sequence: Synthetic oligonucleotide
  Sense strand starting at position 1135 of SEQ ID NO: 318574
caccuaaucgguuacugaa

SEQ ID NO: 572818 - RNA, 19 nt, Artificial Sequence
  Description of Artificial Sequence: Synthetic oligonucleotide
  Antisense strand to SEQ ID NO: 572817
uucaguaaccgauuaggug

SEQ ID NO: 572819 - RNA, 19 nt, Artificial Sequence
  Description of Artificial Sequence: Synthetic oligonucleotide
  Sense strand starting at position 1143 of SEQ ID NO: 318574
cgguuacugaaaggauuaa

SEQ ID NO: 572820 - RNA, 19 nt, Artificial Sequence
  Description of Artificial Sequence: Synthetic oligonucleotide
  Antisense strand to SEQ ID NO: 572819
uuaauccuuucaguaaccg

SEQ ID NO: 572821 - RNA, 19 nt, Artificial Sequence
  Description of Artificial Sequence: Synthetic oligonucleotide
  Sense strand starting at position 1229 of SEQ ID NO: 318574
gaaauauaacgcgagucau

SEQ ID NO: 572822 - RNA, 19 nt, Artificial Sequence
  Description of Artificial Sequence: Synthetic oligonucleotide
  Antisense strand to SEQ ID NO: 572821
augacucgcguuauauuuc

SEQ ID NO: 572823 - RNA, 19 nt, Artificial Sequence
  Description of Artificial Sequence: Synthetic oligonucleotide
  Sense strand starting at position 1561 of SEQ ID NO: 318574
ggugguccagcggaagaua

SEQ ID NO: 572824 - RNA, 19 nt, Artificial Sequence
  Description of Artificial Sequence: Synthetic oligonucleotide
  Antisense strand to SEQ ID NO: 572823
uaucuuccgcuggaccacc

SEQ ID NO: 572825 - RNA, 19 nt, Artificial Sequence
  Description of Artificial Sequence: Synthetic oligonucleotide
  Sense strand starting at position 1626 of SEQ ID NO: 318574
ggagauguuucagcuaaag

SEQ ID NO: 572826 - RNA, 19 nt, Artificial Sequence
  Description of Artificial Sequence: Synthetic oligonucleotide
  Antisense strand to SEQ ID NO: 572825
cuuuagcugaaacaucucc

SEQ ID NO: 572827 - RNA, 19 nt, Artificial Sequence
  Description of Artificial Sequence: Synthetic oligonucleotide
  Sense strand starting at position 2260 of SEQ ID NO: 318574
uggcguuaauauuuaaguu

SEQ ID NO: 572828 - RNA, 19 nt, Artificial Sequence
  Description of Artificial Sequence: Synthetic oligonucleotide
  Antisense strand to SEQ ID NO: 572827
aacuuaaauauuaacgcca

SEQ ID NO: 572829 - RNA, 19 nt, Artificial Sequence
  Description of Artificial Sequence: Synthetic oligonucleotide
  Sense strand starting at position 2286 of SEQ ID NO: 318574
uguguuaaaguuuacagau

SEQ ID NO: 572830 - RNA, 19 nt, Artificial Sequence
  Description of Artificial Sequence: Synthetic oligonucleotide
  Antisense strand to SEQ ID NO: 572829
aucuguaaacuuuaacaca

SEQ ID NO: 572831 - RNA, 19 nt, Artificial Sequence
  Description of Artificial Sequence: Synthetic oligonucleotide
  Sense strand starting at position 2296 of SEQ ID NO: 318574
uuuacagauuaucucaguu

SEQ ID NO: 572832 - RNA, 19 nt, Artificial Sequence
  Description of Artificial Sequence: Synthetic oligonucleotide
  Antisense strand to SEQ ID NO: 572831
aacugagauaaucuguaaa

SEQ ID NO: 572833 - RNA, 19 nt, Artificial Sequence
  Description of Artificial Sequence: Synthetic oligonucleotide
  Sense strand starting at position 2323 of SEQ ID NO: 318574
agccuuaugaggcagauau

SEQ ID NO: 572834 - RNA, 19 nt, Artificial Sequence
  Description of Artificial Sequence: Synthetic oligonucleotide
  Antisense strand to SEQ ID NO: 572833
auaucugccucauaaggcu

SEQ ID NO: 572835 - RNA, 19 nt, Artificial Sequence
  Description of Artificial Sequence: Synthetic oligonucleotide
  Sense strand starting at position 2599 of SEQ ID NO: 318574
uugagaacuuggcucuaac

SEQ ID NO: 572836 - RNA, 19 nt, Artificial Sequence
  Description of Artificial Sequence: Synthetic oligonucleotide
  Antisense strand to SEQ ID NO: 572835
guuagagccaaguucucaa

SEQ ID NO: 572837 - RNA, 19 nt, Artificial Sequence
  Description of Artificial Sequence: Synthetic oligonucleotide
  Sense strand starting at position 2653 of SEQ ID NO: 318574
uuggaucuucccuaucagu

SEQ ID NO: 572838 - RNA, 19 nt, Artificial Sequence
  Description of Artificial Sequence: Synthetic oligonucleotide
  Antisense strand to SEQ ID NO: 572837
acugauagggaagauccaa

SEQ ID NO: 572839 - RNA, 19 nt, Artificial Sequence
  Description of Artificial Sequence: Synthetic oligonucleotide
  Sense strand starting at position 2870 of SEQ ID NO: 318574
aggauuuggucccaaccaa

SEQ ID NO: 572840 - RNA, 19 nt, Artificial Sequence
  Description of Artificial Sequence: Synthetic oligonucleotide
  Antisense strand to SEQ ID NO: 572839
uugguugggaccaaauccu

SEQ ID NO: 572841 - RNA, 19 nt, Artificial Sequence
  Description of Artificial Sequence: Synthetic oligonucleotide
  Sense strand starting at position 2989 of SEQ ID NO: 318574
gcuugcucucauugauuug

SEQ ID NO: 572842 - RNA, 19 nt, Artificial Sequence
  Description of Artificial Sequence: Synthetic oligonucleotide
  Antisense strand to SEQ ID NO: 572841
caaaucaaugagagcaagc

SEQ ID NO: 572843 - RNA, 19 nt, Artificial Sequence
  Description of Artificial Sequence: Synthetic oligonucleotide
  Sense strand starting at position 2992 of SEQ ID NO: 318574
ugcucucauugauuugagu

SEQ ID NO: 572844 - RNA, 19 nt, Artificial Sequence
  Description of Artificial Sequence: Synthetic oligonucleotide
  Antisense strand to SEQ ID NO: 572843
acucaaaucaaugagagca

SEQ ID NO: 572845 - RNA, 19 nt, Artificial Sequence
  Description of Artificial Sequence: Synthetic oligonucleotide
  Sense strand starting at position 3072 of SEQ ID NO: 318574
acaauuucugccugagcua

SEQ ID NO: 572846 - RNA, 19 nt, Artificial Sequence
  Description of Artificial Sequence: Synthetic oligonucleotide
  Antisense strand to SEQ ID NO: 572845
uagcucaggcagaaauugu

SEQ ID NO: 572847 - RNA, 19 nt, Artificial Sequence
  Description of Artificial Sequence: Synthetic oligonucleotide
  Sense strand starting at position 3084 of SEQ ID NO: 318574
ugagcuaagccagacucaa

SEQ ID NO: 572848 - RNA, 19 nt, Artificial Sequence
  Description of Artificial Sequence: Synthetic oligonucleotide
  Antisense strand to SEQ ID NO: 572847
uugagucuggcuuagcuca

SEQ ID NO: 572849 - RNA, 19 nt, Artificial Sequence
  Description of Artificial Sequence: Synthetic oligonucleotide
  Sense strand starting at position 3108 of SEQ ID NO: 318574
ugaucugagcuuuaagauu

SEQ ID NO: 572850 - RNA, 19 nt, Artificial Sequence
  Description of Artificial Sequence: Synthetic oligonucleotide
  Antisense strand to SEQ ID NO: 572849
aaucuuaaagcucagauca

SEQ ID NO: 572851 - RNA, 19 nt, Artificial Sequence
  Description of Artificial Sequence: Synthetic oligonucleotide
  Sense strand starting at position 3116 of SEQ ID NO: 318574
gcuuuaagauuggcaacaa

SEQ ID NO: 572852 - RNA, 19 nt, Artificial Sequence
  Description of Artificial Sequence: Synthetic oligonucleotide
  Antisense strand to SEQ ID NO: 572851
uuguugccaaucuuaaagc

SEQ ID NO: 572853 - RNA, 19 nt, Artificial Sequence
  Description of Artificial Sequence: Synthetic oligonucleotide
  Sense strand starting at position 3157 of SEQ ID NO: 318574
agauuuaucugggacucca

SEQ ID NO: 572854 - RNA, 19 nt, Artificial Sequence
  Description of Artificial Sequence: Synthetic oligonucleotide
  Antisense strand to SEQ ID NO: 572853
uggagucccagauaaaucu

SEQ ID NO: 572855 - RNA, 19 nt, Artificial Sequence
  Description of Artificial Sequence: Synthetic oligonucleotide
  Sense strand starting at position 3205 of SEQ ID NO: 318574
acaccuauguucuuggaga

SEQ ID NO: 572856 - RNA, 19 nt, Artificial Sequence
  Description of Artificial Sequence: Synthetic oligonucleotide
  Antisense strand to SEQ ID NO: 572855
ucuccaagaacauaggugu

SEQ ID NO: 572857 - RNA, 19 nt, Artificial Sequence
  Description of Artificial Sequence: Synthetic oligonucleotide
  Sense strand starting at position 3207 of SEQ ID NO: 318574
accuauguucuuggagaaa

SEQ ID NO: 572858 - RNA, 19 nt, Artificial Sequence
  Description of Artificial Sequence: Synthetic oligonucleotide
  Antisense strand to SEQ ID NO: 572857
uuucuccaagaacauaggu

SEQ ID NO: 572859 - RNA, 19 nt, Artificial Sequence
  Description of Artificial Sequence: Synthetic oligonucleotide
  Sense strand starting at position 3376 of SEQ ID NO: 318574
gaagguauacccuauguua

SEQ ID NO: 572860 - RNA, 19 nt, Artificial Sequence
  Description of Artificial Sequence: Synthetic oligonucleotide
  Antisense strand to SEQ ID NO: 572859
uaacauaggguauaccuuc

SEQ ID NO: 572861 - RNA, 19 nt, Artificial Sequence
  Description of Artificial Sequence: Synthetic oligonucleotide
  Sense strand starting at position 3489 of SEQ ID NO: 318574
ugugguaaacucgacuauu

SEQ ID NO: 572862 - RNA, 19 nt, Artificial Sequence
  Description of Artificial Sequence: Synthetic oligonucleotide
  Antisense strand to SEQ ID NO: 572861
aauagucgaguuuaccaca

SEQ ID NO: 572863 - RNA, 19 nt, Artificial Sequence
  Description of Artificial Sequence: Synthetic oligonucleotide
  Sense strand starting at position 3499 of SEQ ID NO: 318574
ucgacuauugccuagaaga

SEQ ID NO: 572864 - RNA, 19 nt, Artificial Sequence
  Description of Artificial Sequence: Synthetic oligonucleotide
  Antisense strand to SEQ ID NO: 572863
ucuucuaggcaauagucga

SEQ ID NO: 572865 - RNA, 19 nt, Artificial Sequence
  Description of Artificial Sequence: Synthetic oligonucleotide
  Sense strand starting at position 3556 of SEQ ID NO: 318574
aacuuacagggcuguaaau

SEQ ID NO: 572866 - RNA, 19 nt, Artificial Sequence
  Description of Artificial Sequence: Synthetic oligonucleotide
  Antisense strand to SEQ ID NO: 572865
auuuacagcccuguaaguu

SEQ ID NO: 572867 - RNA, 19 nt, Artificial Sequence
  Description of Artificial Sequence: Synthetic oligonucleotide
  Sense strand starting at position 3613 of SEQ ID NO: 318574
ugugaagggagagguauau

SEQ ID NO: 572868 - RNA, 19 nt, Artificial Sequence
  Description of Artificial Sequence: Synthetic oligonucleotide
  Antisense strand to SEQ ID NO: 572867
auauaccucucccuucaca

SEQ ID NO: 572869 - RNA, 19 nt, Artificial Sequence
  Description of Artificial Sequence: Synthetic oligonucleotide
  Sense strand starting at position 3774 of SEQ ID NO: 318574
aaaggucauucuuuaggga

SEQ ID NO: 572870 - RNA, 19 nt, Artificial Sequence
  Description of Artificial Sequence: Synthetic oligonucleotide
  Antisense strand to SEQ ID NO: 572869
ucccuaaagaaugaccuuu

SEQ ID NO: 572871 - RNA, 19 nt, Artificial Sequence
  Description of Artificial Sequence: Synthetic oligonucleotide
  Sense strand starting at position 3833 of SEQ ID NO: 318574
agaugucacaagugaaaug

SEQ ID NO: 572872 - RNA, 19 nt, Artificial Sequence
  Description of Artificial Sequence: Synthetic oligonucleotide
  Antisense strand to SEQ ID NO: 572871
cauuucacuugugacaucu

SEQ ID NO: 572873 - RNA, 19 nt, Artificial Sequence
  Description of Artificial Sequence: Synthetic oligonucleotide
  Sense strand starting at position 3849 of SEQ ID NO: 318574
augaauucuagauggguuc

SEQ ID NO: 572874 - RNA, 19 nt, Artificial Sequence
  Description of Artificial Sequence: Synthetic oligonucleotide
  Antisense strand to SEQ ID NO: 572873
gaacccaucuagaauucau

SEQ ID NO: 572875 - RNA, 19 nt, Artificial Sequence
  Description of Artificial Sequence: Synthetic oligonucleotide
  Sense strand starting at position 347 of SEQ ID NO: 318575
cgacguccggcuaauguau

SEQ ID NO: 572876 - RNA, 19 nt, Artificial Sequence
  Description of Artificial Sequence: Synthetic oligonucleotide
  Antisense strand to SEQ ID NO: 572875
auacauuagccggacgucg

SEQ ID NO: 572877 - RNA, 19 nt, Artificial Sequence
  Description of Artificial Sequence: Synthetic oligonucleotide
  Sense strand starting at position 631 of SEQ ID NO: 318575
gcuaaauauuguccucagu

SEQ ID NO: 572878 - RNA, 19 nt, Artificial Sequence
  Description of Artificial Sequence: Synthetic oligonucleotide
  Antisense strand to SEQ ID NO: 572877
acugaggacaauauuuagc

SEQ ID NO: 572879 - RNA, 19 nt, Artificial Sequence
  Description of Artificial Sequence: Synthetic oligonucleotide
  Sense strand starting at position 709 of SEQ ID NO: 318575
gaaagaauuuauugcaguu

SEQ ID NO: 572880 - RNA, 19 nt, Artificial Sequence
  Description of Artificial Sequence: Synthetic oligonucleotide
  Antisense strand to SEQ ID NO: 572879
aacugcaauaaauucuuuc

SEQ ID NO: 572881 - RNA, 19 nt, Artificial Sequence
  Description of Artificial Sequence: Synthetic oligonucleotide
  Sense strand starting at position 734 of SEQ ID NO: 318575
gaguguguagaugguuauu

SEQ ID NO: 572882 - RNA, 19 nt, Artificial Sequence
  Description of Artificial Sequence: Synthetic oligonucleotide
  Antisense strand to SEQ ID NO: 572881
aauaaccaucuacacacuc

SEQ ID NO: 572883 - RNA, 19 nt, Artificial Sequence
  Description of Artificial Sequence: Synthetic oligonucleotide
  Sense strand starting at position 744 of SEQ ID NO: 318575
augguuauuugacaaagaa

SEQ ID NO: 572884 - RNA, 19 nt, Artificial Sequence
  Description of Artificial Sequence: Synthetic oligonucleotide
  Antisense strand to SEQ ID NO: 572883
uucuuugucaaauaaccau

SEQ ID NO: 572885 - RNA, 19 nt, Artificial Sequence
  Description of Artificial Sequence: Synthetic oligonucleotide
  Sense strand starting at position 769 of SEQ ID NO: 318575
ugagguuuaugccucaaga

SEQ ID NO: 572886 - RNA, 19 nt, Artificial Sequence
  Description of Artificial Sequence: Synthetic oligonucleotide
  Antisense strand to SEQ ID NO: 572885
ucuugaggcauaaaccuca

SEQ ID NO: 572887 - RNA, 19 nt, Artificial Sequence
  Description of Artificial Sequence: Synthetic oligonucleotide
  Sense strand starting at position 771 of SEQ ID NO: 318575
agguuuaugccucaagaaa

SEQ ID NO: 572888 - RNA, 19 nt, Artificial Sequence
  Description of Artificial Sequence: Synthetic oligonucleotide
  Antisense strand to SEQ ID NO: 572887
uuucuugaggcauaaaccu

SEQ ID NO: 572889 - RNA, 19 nt, Artificial Sequence
  Description of Artificial Sequence: Synthetic oligonucleotide
  Sense strand starting at position 796 of SEQ ID NO: 318575
aggagaugcuccgugcuaa

SEQ ID NO: 572890 - RNA, 19 nt, Artificial Sequence
  Description of Artificial Sequence: Synthetic oligonucleotide
  Antisense strand to SEQ ID NO: 572889
uuagcacggagcaucuccu

SEQ ID NO: 572891 - RNA, 19 nt, Artificial Sequence
  Description of Artificial Sequence: Synthetic oligonucleotide
  Sense strand starting at position 809 of SEQ ID NO: 318575
ugcuaaagauccucaugcu

SEQ ID NO: 572892 - RNA, 19 nt, Artificial Sequence
  Description of Artificial Sequence: Synthetic oligonucleotide
  Antisense strand to SEQ ID NO: 572891
agcaugaggaucuuuagca

SEQ ID NO: 572893 - RNA, 19 nt, Artificial Sequence
  Description of Artificial Sequence: Synthetic oligonucleotide
  Sense strand starting at position 816 of SEQ ID NO: 318575
gauccucaugcugagagua

SEQ ID NO: 572894 - RNA, 19 nt, Artificial Sequence
  Description of Artificial Sequence: Synthetic oligonucleotide
  Antisense strand to SEQ ID NO: 572893
uacucucagcaugaggauc

SEQ ID NO: 572895 - RNA, 19 nt, Artificial Sequence
  Description of Artificial Sequence: Synthetic oligonucleotide
  Sense strand starting at position 821 of SEQ ID NO: 318575
ucaugcugagaguauuaau

SEQ ID NO: 572896 - RNA, 19 nt, Artificial Sequence
  Description of Artificial Sequence: Synthetic oligonucleotide
  Antisense strand to SEQ ID NO: 572895
auuaauacucucagcauga

SEQ ID NO: 572897 - RNA, 19 nt, Artificial Sequence
  Description of Artificial Sequence: Synthetic oligonucleotide
  Sense strand starting at position 872 of SEQ ID NO: 318575
cuagcaacuucuguagaua

SEQ ID NO: 572898 - RNA, 19 nt, Artificial Sequence
  Description of Artificial Sequence: Synthetic oligonucleotide
  Antisense strand to SEQ ID NO: 572897
uaucuacagaaguugcuag

SEQ ID NO: 572899 - RNA, 19 nt, Artificial Sequence
  Description of Artificial Sequence: Synthetic oligonucleotide
  Sense strand starting at position 939 of SEQ ID NO: 318575
uaagcaaguucuucuggga

SEQ ID NO: 572900 - RNA, 19 nt, Artificial Sequence
  Description of Artificial Sequence: Synthetic oligonucleotide
  Antisense strand to SEQ ID NO: 572899
ucccagaagaacuugcuua

SEQ ID NO: 572901 - RNA, 19 nt, Artificial Sequence
  Description of Artificial Sequence: Synthetic oligonucleotide
  Sense strand starting at position 966 of SEQ ID NO: 318575
ugaaaugacuugcccugaa

SEQ ID NO: 572902 - RNA, 19 nt, Artificial Sequence
  Description of Artificial Sequence: Synthetic oligonucleotide
  Antisense strand to SEQ ID NO: 572901
uucagggcaagucauuuca

SEQ ID NO: 572903 - RNA, 19 nt, Artificial Sequence
  Description of Artificial Sequence: Synthetic oligonucleotide
  Sense strand starting at position 1048 of SEQ ID NO: 318575
ugaagaauuacagggcagu

SEQ ID NO: 572904 - RNA, 19 nt, Artificial Sequence
  Description of Artificial Sequence: Synthetic oligonucleotide
  Antisense strand to SEQ ID NO: 572903
acugcccuguaauucuuca

SEQ ID NO: 572905 - RNA, 19 nt, Artificial Sequence
  Description of Artificial Sequence: Synthetic oligonucleotide
  Sense strand starting at position 1101 of SEQ ID NO: 318575
gguugucagacuuggaaac

SEQ ID NO: 572906 - RNA, 19 nt, Artificial Sequence
  Description of Artificial Sequence: Synthetic oligonucleotide
  Antisense strand to SEQ ID NO: 572905
guuuccaagucugacaacc

SEQ ID NO: 572907 - RNA, 19 nt, Artificial Sequence
  Description of Artificial Sequence: Synthetic oligonucleotide
  Sense strand starting at position 1102 of SEQ ID NO: 318575
guugucagacuuggaaacu

SEQ ID NO: 572908 - RNA, 19 nt, Artificial Sequence
  Description of Artificial Sequence: Synthetic oligonucleotide
  Antisense strand to SEQ ID NO: 572907
aguuuccaagucugacaac

SEQ ID NO: 572909 - RNA, 19 nt, Artificial Sequence
  Description of Artificial Sequence: Synthetic oligonucleotide
  Sense strand starting at position 1158 of SEQ ID NO: 318575
ggugaauaaggucagcuuu

SEQ ID NO: 572910 - RNA, 19 nt, Artificial Sequence
  Description of Artificial Sequence: Synthetic oligonucleotide
  Antisense strand to SEQ ID NO: 572909
aaagcugaccuuauucacc

SEQ ID NO: 572911 - RNA, 19 nt, Artificial Sequence
  Description of Artificial Sequence: Synthetic oligonucleotide
  Sense strand starting at position 1184 of SEQ ID NO: 318575
agccaauagugaccagaaa

SEQ ID NO: 572912 - RNA, 19 nt, Artificial Sequence
  Description of Artificial Sequence: Synthetic oligonucleotide
  Antisense strand to SEQ ID NO: 572911
uuucuggucacuauuggcu

SEQ ID NO: 572913 - RNA, 19 nt, Artificial Sequence
  Description of Artificial Sequence: Synthetic oligonucleotide
  Sense strand starting at position 1198 of SEQ ID NO: 318575
agaaauagcuaguuuguga

SEQ ID NO: 572914 - RNA, 19 nt, Artificial Sequence
  Description of Artificial Sequence: Synthetic oligonucleotide
  Antisense strand to SEQ ID NO: 572913
ucacaaacuagcuauuucu

SEQ ID NO: 572915 - RNA, 19 nt, Artificial Sequence
  Description of Artificial Sequence: Synthetic oligonucleotide
  Sense strand starting at position 1201 of SEQ ID NO: 318575
aauagcuaguuugugauuu

SEQ ID NO: 572916 - RNA, 19 nt, Artificial Sequence
  Description of Artificial Sequence: Synthetic oligonucleotide
  Antisense strand to SEQ ID NO: 572915
aaaucacaaacuagcuauu

SEQ ID NO: 572917 - RNA, 19 nt, Artificial Sequence
  Description of Artificial Sequence: Synthetic oligonucleotide
  Sense strand starting at position 1296 of SEQ ID NO: 318575
uggucaguuaaguauggaa

SEQ ID NO: 572918 - RNA, 19 nt, Artificial Sequence
  Description of Artificial Sequence: Synthetic oligonucleotide
  Antisense strand to SEQ ID NO: 572917
uuccauacuuaacugacca

SEQ ID NO: 572919 - RNA, 19 nt, Artificial Sequence
  Description of Artificial Sequence: Synthetic oligonucleotide
  Sense strand starting at position 1512 of SEQ ID NO: 318575
acccucugauugccuagaa

SEQ ID NO: 572920 - RNA, 19 nt, Artificial Sequence
  Description of Artificial Sequence: Synthetic oligonucleotide
  Antisense strand to SEQ ID NO: 572919
uucuaggcaaucagagggu

SEQ ID NO: 572921 - RNA, 19 nt, Artificial Sequence
  Description of Artificial Sequence: Synthetic oligonucleotide
  Sense strand starting at position 2018 of SEQ ID NO: 318575
ggcgaaaggccuuagagaa

SEQ ID NO: 572922 - RNA, 19 nt, Artificial Sequence
  Description of Artificial Sequence: Synthetic oligonucleotide
  Antisense strand to SEQ ID NO: 572921
uucucuaaggccuuucgcc

SEQ ID NO: 572923 - RNA, 19 nt, Artificial Sequence
  Description of Artificial Sequence: Synthetic oligonucleotide
  Sense strand starting at position 2139 of SEQ ID NO: 318575
gggccugugagagaaguua

SEQ ID NO: 572924 - RNA, 19 nt, Artificial Sequence
  Description of Artificial Sequence: Synthetic oligonucleotide
  Antisense strand to SEQ ID NO: 572923
uaacuucucucacaggccc

SEQ ID NO: 572925 - RNA, 19 nt, Artificial Sequence
  Description of Artificial Sequence: Synthetic oligonucleotide
  Sense strand starting at position 2214 of SEQ ID NO: 318575
cuucuuaggugagcagaaa

SEQ ID NO: 572926 - RNA, 19 nt, Artificial Sequence
  Description of Artificial Sequence: Synthetic oligonucleotide
  Antisense strand to SEQ ID NO: 572925
uuucugcucaccuaagaag

SEQ ID NO: 572927 - RNA, 19 nt, Artificial Sequence
  Description of Artificial Sequence: Synthetic oligonucleotide
  Sense strand starting at position 2746 of SEQ ID NO: 318575
ucauuuauauacguuggua

SEQ ID NO: 572928 - RNA, 19 nt, Artificial Sequence
  Description of Artificial Sequence: Synthetic oligonucleotide
  Antisense strand to SEQ ID NO: 572927
uaccaacguauauaaauga

SEQ ID NO: 572929 - RNA, 19 nt, Artificial Sequence
  Description of Artificial Sequence: Synthetic oligonucleotide
  Sense strand starting at position 2749 of SEQ ID NO: 318575
uuuauauacguugguaaca

SEQ ID NO: 572930 - RNA, 19 nt, Artificial Sequence
  Description of Artificial Sequence: Synthetic oligonucleotide
  Antisense strand to SEQ ID NO: 572929
uguuaccaacguauauaaa

SEQ ID NO: 572931 - RNA, 19 nt, Artificial Sequence
  Description of Artificial Sequence: Synthetic oligonucleotide
  Sense strand starting at position 2750 of SEQ ID NO: 318575
uuauauacguugguaacau

SEQ ID NO: 572932 - RNA, 19 nt, Artificial Sequence
  Description of Artificial Sequence: Synthetic oligonucleotide
  Antisense strand to SEQ ID NO: 572931
auguuaccaacguauauaa

SEQ ID NO: 572933 - RNA, 19 nt, Artificial Sequence
  Description of Artificial Sequence: Synthetic oligonucleotide
  Sense strand starting at position 2936 of SEQ ID NO: 318575
agucucugguacucauaau

SEQ ID NO: 572934 - RNA, 19 nt, Artificial Sequence
  Description of Artificial Sequence: Synthetic oligonucleotide
  Antisense strand to SEQ ID NO: 572933
auuaugaguaccagagacu

SEQ ID NO: 572935 - RNA, 19 nt, Artificial Sequence
  Description of Artificial Sequence: Synthetic oligonucleotide
  Sense strand starting at position 3112 of SEQ ID NO: 318575
gacaaaugguauuccguua

SEQ ID NO: 572936 - RNA, 19 nt, Artificial Sequence
  Description of Artificial Sequence: Synthetic oligonucleotide
  Antisense strand to SEQ ID NO: 572935
uaacggaauaccauuuguc

SEQ ID NO: 572937 - RNA, 19 nt, Artificial Sequence
  Description of Artificial Sequence: Synthetic oligonucleotide
  Sense strand starting at position 3117 of SEQ ID NO: 318575
augguauuccguuauguau

SEQ ID NO: 572938 - RNA, 19 nt, Artificial Sequence
  Description of Artificial Sequence: Synthetic oligonucleotide
  Antisense strand to SEQ ID NO: 572937
auacauaacggaauaccau

SEQ ID NO: 572939 - RNA, 19 nt, Artificial Sequence
  Description of Artificial Sequence: Synthetic oligonucleotide
  Sense strand starting at position 3153 of SEQ ID NO: 318575
uuuccauuuguucgcugau

SEQ ID NO: 572940 - RNA, 19 nt, Artificial Sequence
  Description of Artificial Sequence: Synthetic oligonucleotide
  Antisense strand to SEQ ID NO: 572939
aucagcgaacaaauggaaa

SEQ ID NO: 572941 - RNA, 19 nt, Artificial Sequence
  Description of Artificial Sequence: Synthetic oligonucleotide
  Sense strand starting at position 3156 of SEQ ID NO: 318575
ccauuuguucgcugaugga

SEQ ID NO: 572942 - RNA, 19 nt, Artificial Sequence
  Description of Artificial Sequence: Synthetic oligonucleotide
  Antisense strand to SEQ ID NO: 572941
uccaucagcgaacaaaugg

SEQ ID NO: 572943 - RNA, 19 nt, Artificial Sequence
  Description of Artificial Sequence: Synthetic oligonucleotide
  Sense strand starting at position 3205 of SEQ ID NO: 318575
uugaauaguucugugauaa

SEQ ID NO: 572944 - RNA, 19 nt, Artificial Sequence
  Description of Artificial Sequence: Synthetic oligonucleotide
  Antisense strand to SEQ ID NO: 572943
uuaucacagaacuauucaa

SEQ ID NO: 572945 - RNA, 19 nt, Artificial Sequence
  Description of Artificial Sequence: Synthetic oligonucleotide
  Sense strand starting at position 3348 of SEQ ID NO: 318575
cuuccauaguggucauacu

SEQ ID NO: 572946 - RNA, 19 nt, Artificial Sequence
  Description of Artificial Sequence: Synthetic oligonucleotide
  Antisense strand to SEQ ID NO: 572945
aguaugaccacuauggaag

SEQ ID NO: 572947 - RNA, 19 nt, Artificial Sequence
  Description of Artificial Sequence: Synthetic oligonucleotide
  Sense strand starting at position 3639 of SEQ ID NO: 318575
uuguauguuguggauauga

SEQ ID NO: 572948 - RNA, 19 nt, Artificial Sequence
  Description of Artificial Sequence: Synthetic oligonucleotide
  Antisense strand to SEQ ID NO: 572947
ucauauccacaacauacaa

SEQ ID NO: 572949 - RNA, 19 nt, Artificial Sequence
  Description of Artificial Sequence: Synthetic oligonucleotide
  Sense strand starting at position 3641 of SEQ ID NO: 318575
guauguuguggauaugagu

SEQ ID NO: 572950 - RNA, 19 nt, Artificial Sequence
  Description of Artificial Sequence: Synthetic oligonucleotide
  Antisense strand to SEQ ID NO: 572949
acucauauccacaacauac

SEQ ID NO: 572951 - RNA, 19 nt, Artificial Sequence
  Description of Artificial Sequence: Synthetic oligonucleotide
  Sense strand starting at position 3933 of SEQ ID NO: 318575
uguguauguggugagaaau

SEQ ID NO: 572952 - RNA, 19 nt, Artificial Sequence
  Description of Artificial Sequence: Synthetic oligonucleotide
  Antisense strand to SEQ ID NO: 572951
auuucucaccacauacaca

SEQ ID NO: 572953 - RNA, 19 nt, Artificial Sequence
  Description of Artificial Sequence: Synthetic oligonucleotide
  Sense strand starting at position 3939 of SEQ ID NO: 318575
uguggugagaaauacuguu

SEQ ID NO: 572954 - RNA, 19 nt, Artificial Sequence
  Description of Artificial Sequence: Synthetic oligonucleotide
  Antisense strand to SEQ ID NO: 572953
aacaguauuucucaccaca

SEQ ID NO: 572955 - RNA, 19 nt, Artificial Sequence
  Description of Artificial Sequence: Synthetic oligonucleotide
  Sense strand starting at position 58 of SEQ ID NO: 318576
gcugucaaaugaguuacaa

SEQ ID NO: 572956 - RNA, 19 nt, Artificial Sequence
  Description of Artificial Sequence: Synthetic oligonucleotide
  Antisense strand to SEQ ID NO: 572955
uuguaacucauuugacagc

SEQ ID NO: 572957 - RNA, 19 nt, Artificial Sequence
  Description of Artificial Sequence: Synthetic oligonucleotide
  Sense strand starting at position 201 of SEQ ID NO: 318576
agaggauaaugccuuugca

SEQ ID NO: 572958 - RNA, 19 nt, Artificial Sequence
  Description of Artificial Sequence: Synthetic oligonucleotide
  Antisense strand to SEQ ID NO: 572957
ugcaaaggcauuauccucu

SEQ ID NO: 572959 - RNA, 19 nt, Artificial Sequence
  Description of Artificial Sequence: Synthetic oligonucleotide
  Sense strand starting at position 204 of SEQ ID NO: 318576
ggauaaugccuuugcauaa

SEQ ID NO: 572960 - RNA, 19 nt, Artificial Sequence
  Description of Artificial Sequence: Synthetic oligonucleotide
  Antisense strand to SEQ ID NO: 572959
uuaugcaaaggcauuaucc

SEQ ID NO: 572961 - RNA, 19 nt, Artificial Sequence
  Description of Artificial Sequence: Synthetic oligonucleotide
  Sense strand starting at position 303 of SEQ ID NO: 318576
augucaaauuugggaucaa

SEQ ID NO: 572962 - RNA, 19 nt, Artificial Sequence
  Description of Artificial Sequence: Synthetic oligonucleotide
  Antisense strand to SEQ ID NO: 572961
uugaucccaaauuugacau

SEQ ID NO: 572963 - RNA, 19 nt, Artificial Sequence
  Description of Artificial Sequence: Synthetic oligonucleotide
  Sense strand starting at position 304 of SEQ ID NO: 318576
ugucaaauuugggaucaac

SEQ ID NO: 572964 - RNA, 19 nt, Artificial Sequence
  Description of Artificial Sequence: Synthetic oligonucleotide
  Antisense strand to SEQ ID NO: 572963
guugaucccaaauuugaca

SEQ ID NO: 572965 - RNA, 19 nt, Artificial Sequence
  Description of Artificial Sequence: Synthetic oligonucleotide
  Sense strand starting at position 339 of SEQ ID NO: 318576
uuccuuauauugguguaau

SEQ ID NO: 572966 - RNA, 19 nt, Artificial Sequence
  Description of Artificial Sequence: Synthetic oligonucleotide
  Antisense strand to SEQ ID NO: 572965
auuacaccaauauaaggaa

SEQ ID NO: 572967 - RNA, 19 nt, Artificial Sequence
  Description of Artificial Sequence: Synthetic oligonucleotide
  Sense strand starting at position 342 of SEQ ID NO: 318576
cuuauauugguguaaucuu

SEQ ID NO: 572968 - RNA, 19 nt, Artificial Sequence
  Description of Artificial Sequence: Synthetic oligonucleotide
  Antisense strand to SEQ ID NO: 572967
aagauuacaccaauauaag

SEQ ID NO: 572969 - RNA, 19 nt, Artificial Sequence
  Description of Artificial Sequence: Synthetic oligonucleotide
  Sense strand starting at position 353 of SEQ ID NO: 318576
guaaucuuuccuuauugua

SEQ ID NO: 572970 - RNA, 19 nt, Artificial Sequence
  Description of Artificial Sequence: Synthetic oligonucleotide
  Antisense strand to SEQ ID NO: 572969
uacaauaaggaaagauuac

SEQ ID NO: 572971 - RNA, 19 nt, Artificial Sequence
  Description of Artificial Sequence: Synthetic oligonucleotide
  Sense strand starting at position 868 of SEQ ID NO: 318576
cugauagaccucuaagucu

SEQ ID NO: 572972 - RNA, 19 nt, Artificial Sequence
  Description of Artificial Sequence: Synthetic oligonucleotide
  Antisense strand to SEQ ID NO: 572971
agacuuagaggucuaucag

SEQ ID NO: 572973 - RNA, 19 nt, Artificial Sequence
  Description of Artificial Sequence: Synthetic oligonucleotide
  Sense strand starting at position 985 of SEQ ID NO: 318576
gagaaacguguuuacugga

SEQ ID NO: 572974 - RNA, 19 nt, Artificial Sequence
  Description of Artificial Sequence: Synthetic oligonucleotide
  Antisense strand to SEQ ID NO: 572973
uccaguaaacacguuucuc

SEQ ID NO: 572975 - RNA, 19 nt, Artificial Sequence
  Description of Artificial Sequence: Synthetic oligonucleotide
  Sense strand starting at position 990 of SEQ ID NO: 318576
acguguuuacuggaagaaa

SEQ ID NO: 572976 - RNA, 19 nt, Artificial Sequence
  Description of Artificial Sequence: Synthetic oligonucleotide
  Antisense strand to SEQ ID NO: 572975
uuucuuccaguaaacacgu

SEQ ID NO: 572977 - RNA, 19 nt, Artificial Sequence
  Description of Artificial Sequence: Synthetic oligonucleotide
  Sense strand starting at position 1016 of SEQ ID NO: 318576
uguuucuuguaaccuauga

SEQ ID NO: 572978 - RNA, 19 nt, Artificial Sequence
  Description of Artificial Sequence: Synthetic oligonucleotide
  Antisense strand to SEQ ID NO: 572977
ucauagguuacaagaaaca

SEQ ID NO: 572979 - RNA, 19 nt, Artificial Sequence
  Description of Artificial Sequence: Synthetic oligonucleotide
  Sense strand starting at position 1126 of SEQ ID NO: 318576
uauagaaugcuguggaaca

SEQ ID NO: 572980 - RNA, 19 nt, Artificial Sequence
  Description of Artificial Sequence: Synthetic oligonucleotide
  Antisense strand to SEQ ID NO: 572979
uguuccacagcauucuaua

SEQ ID NO: 572981 - RNA, 19 nt, Artificial Sequence
  Description of Artificial Sequence: Synthetic oligonucleotide
  Sense strand starting at position 1299 of SEQ ID NO: 318576
agauguguuguauaugucu

SEQ ID NO: 572982 - RNA, 19 nt, Artificial Sequence
  Description of Artificial Sequence: Synthetic oligonucleotide
  Antisense strand to SEQ ID NO: 572981
agacauauacaacacaucu

SEQ ID NO: 572983 - RNA, 19 nt, Artificial Sequence
  Description of Artificial Sequence: Synthetic oligonucleotide
  Sense strand starting at position 1307 of SEQ ID NO: 318576
uguauaugucuccagacuc

SEQ ID NO: 572984 - RNA, 19 nt, Artificial Sequence
  Description of Artificial Sequence: Synthetic oligonucleotide
  Antisense strand to SEQ ID NO: 572983
gagucuggagacauauaca

SEQ ID NO: 572985 - RNA, 19 nt, Artificial Sequence
  Description of Artificial Sequence: Synthetic oligonucleotide
  Sense strand starting at position 1441 of SEQ ID NO: 318576
uucuccaguucucuugaga

SEQ ID NO: 572986 - RNA, 19 nt, Artificial Sequence
  Description of Artificial Sequence: Synthetic oligonucleotide
  Antisense strand to SEQ ID NO: 572985
ucucaagagaacuggagaa

SEQ ID NO: 572987 - RNA, 19 nt, Artificial Sequence
  Description of Artificial Sequence: Synthetic oligonucleotide
  Sense strand starting at position 1444 of SEQ ID NO: 318576
uccaguucucuugagagca

SEQ ID NO: 572988 - RNA, 19 nt, Artificial Sequence
  Description of Artificial Sequence: Synthetic oligonucleotide
  Antisense strand to SEQ ID NO: 572987
ugcucucaagagaacugga

SEQ ID NO: 572989 - RNA, 19 nt, Artificial Sequence
  Description of Artificial Sequence: Synthetic oligonucleotide
  Sense strand starting at position 1454 of SEQ ID NO: 318576
uugagagcauagccauuau

SEQ ID NO: 572990 - RNA, 19 nt, Artificial Sequence
  Description of Artificial Sequence: Synthetic oligonucleotide
  Antisense strand to SEQ ID NO: 572989
auaauggcuaugcucucaa

SEQ ID NO: 572991 - RNA, 19 nt, Artificial Sequence
  Description of Artificial Sequence: Synthetic oligonucleotide
  Sense strand starting at position 1474 of SEQ ID NO: 318576
ucaaaucuuugguuuagag

SEQ ID NO: 572992 - RNA, 19 nt, Artificial Sequence
  Description of Artificial Sequence: Synthetic oligonucleotide
  Antisense strand to SEQ ID NO: 572991
cucuaaaccaaagauuuga

SEQ ID NO: 572993 - RNA, 19 nt, Artificial Sequence
  Description of Artificial Sequence: Synthetic oligonucleotide
  Sense strand starting at position 1600 of SEQ ID NO: 318576
acucuaggccuacaguauu

SEQ ID NO: 572994 - RNA, 19 nt, Artificial Sequence
  Description of Artificial Sequence: Synthetic oligonucleotide
  Antisense strand to SEQ ID NO: 572993
aauacuguaggccuagagu

SEQ ID NO: 572995 - RNA, 19 nt, Artificial Sequence
  Description of Artificial Sequence: Synthetic oligonucleotide
  Sense strand starting at position 1692 of SEQ ID NO: 318576
cuggauugaugacuugauc

SEQ ID NO: 572996 - RNA, 19 nt, Artificial Sequence
  Description of Artificial Sequence: Synthetic oligonucleotide
  Antisense strand to SEQ ID NO: 572995
gaucaagucaucaauccag

SEQ ID NO: 572997 - RNA, 19 nt, Artificial Sequence
  Description of Artificial Sequence: Synthetic oligonucleotide
  Sense strand starting at position 1771 of SEQ ID NO: 318576
cuaacauagucacuggauu

SEQ ID NO: 572998 - RNA, 19 nt, Artificial Sequence
  Description of Artificial Sequence: Synthetic oligonucleotide
  Antisense strand to SEQ ID NO: 572997
aauccagugacuauguuag

SEQ ID NO: 572999 - RNA, 19 nt, Artificial Sequence
  Description of Artificial Sequence: Synthetic oligonucleotide
  Sense strand starting at position 1785 of SEQ ID NO: 318576
ggauuagucugcucucaua

SEQ ID NO: 573000 - RNA, 19 nt, Artificial Sequence
  Description of Artificial Sequence: Synthetic oligonucleotide
  Antisense strand to SEQ ID NO: 572999
uaugagagcagacuaaucc

SEQ ID NO: 573001 - RNA, 19 nt, Artificial Sequence
  Description of Artificial Sequence: Synthetic oligonucleotide
  Sense strand starting at position 1824 of SEQ ID NO: 318576
aagacugcguacuuuauaa

SEQ ID NO: 573002 - RNA, 19 nt, Artificial Sequence
  Description of Artificial Sequence: Synthetic oligonucleotide
  Antisense strand to SEQ ID NO: 573001
uuauaaaguacgcagucuu

SEQ ID NO: 573003 - RNA, 19 nt, Artificial Sequence
  Description of Artificial Sequence: Synthetic oligonucleotide
  Sense strand starting at position 2161 of SEQ ID NO: 318576
gucaucaaaccacguuaaa

SEQ ID NO: 573004 - RNA, 19 nt, Artificial Sequence
  Description of Artificial Sequence: Synthetic oligonucleotide
  Antisense strand to SEQ ID NO: 573003
uuuaacgugguuugaugac

SEQ ID NO: 573005 - RNA, 19 nt, Artificial Sequence
  Description of Artificial Sequence: Synthetic oligonucleotide
  Sense strand starting at position 2234 of SEQ ID NO: 318576
auuaucaacuuguugaagu

SEQ ID NO: 573006 - RNA, 19 nt, Artificial Sequence
  Description of Artificial Sequence: Synthetic oligonucleotide
  Antisense strand to SEQ ID NO: 573005
acuucaacaaguugauaau

SEQ ID NO: 573007 - RNA, 19 nt, Artificial Sequence
  Description of Artificial Sequence: Synthetic oligonucleotide
  Sense strand starting at position 2328 of SEQ ID NO: 318576
auuguaaaguuuguacaga

SEQ ID NO: 573008 - RNA, 19 nt, Artificial Sequence
  Description of Artificial Sequence: Synthetic oligonucleotide
  Antisense strand to SEQ ID NO: 573007
ucuguacaaacuuuacaau

SEQ ID NO: 573009 - RNA, 19 nt, Artificial Sequence
  Description of Artificial Sequence: Synthetic oligonucleotide
  Sense strand starting at position 2391 of SEQ ID NO: 318576
uuuacauuaccuggguaca

SEQ ID NO: 573010 - RNA, 19 nt, Artificial Sequence
  Description of Artificial Sequence: Synthetic oligonucleotide
  Antisense strand to SEQ ID NO: 573009
uguacccagguaauguaaa

SEQ ID NO: 573011 - RNA, 19 nt, Artificial Sequence
  Description of Artificial Sequence: Synthetic oligonucleotide
  Sense strand starting at position 2392 of SEQ ID NO: 318576
uuacauuaccuggguacau

SEQ ID NO: 573012 - RNA, 19 nt, Artificial Sequence
  Description of Artificial Sequence: Synthetic oligonucleotide
  Antisense strand to SEQ ID NO: 573011
auguacccagguaauguaa

SEQ ID NO: 573013 - RNA, 19 nt, Artificial Sequence
  Description of Artificial Sequence: Synthetic oligonucleotide
  Sense strand starting at position 2537 of SEQ ID NO: 318576
cacauuuagugauuguguu

SEQ ID NO: 573014 - RNA, 19 nt, Artificial Sequence
  Description of Artificial Sequence: Synthetic oligonucleotide
  Antisense strand to SEQ ID NO: 573013
aacacaaucacuaaaugug

SEQ ID NO: 573015 - RNA, 19 nt, Artificial Sequence
  Description of Artificial Sequence: Synthetic oligonucleotide
  Sense strand starting at position 2538 of SEQ ID NO: 318576
acauuuagugauuguguuu

SEQ ID NO: 573016 - RNA, 19 nt, Artificial Sequence
  Description of Artificial Sequence: Synthetic oligonucleotide
  Antisense strand to SEQ ID NO: 573015
aaacacaaucacuaaaugu

SEQ ID NO: 573017 - RNA, 19 nt, Artificial Sequence
  Description of Artificial Sequence: Synthetic oligonucleotide
  Sense strand starting at position 2564 of SEQ ID NO: 318576
cucucugaucugugacaga

SEQ ID NO: 573018 - RNA, 19 nt, Artificial Sequence
  Description of Artificial Sequence: Synthetic oligonucleotide
  Antisense strand to SEQ ID NO: 573017
ucugucacagaucagagag

SEQ ID NO: 573019 - RNA, 19 nt, Artificial Sequence
  Description of Artificial Sequence: Synthetic oligonucleotide
  Sense strand starting at position 2621 of SEQ ID NO: 318576
auaacugauuguccuuagu

SEQ ID NO: 573020 - RNA, 19 nt, Artificial Sequence
  Description of Artificial Sequence: Synthetic oligonucleotide
  Antisense strand to SEQ ID NO: 573019
acuaaggacaaucaguuau

SEQ ID NO: 573021 - RNA, 19 nt, Artificial Sequence
  Description of Artificial Sequence: Synthetic oligonucleotide
  Sense strand starting at position 2693 of SEQ ID NO: 318576
ucauuaccuggacaaguuu

SEQ ID NO: 573022 - RNA, 19 nt, Artificial Sequence
  Description of Artificial Sequence: Synthetic oligonucleotide
  Antisense strand to SEQ ID NO: 573021
aaacuuguccagguaauga

SEQ ID NO: 573023 - RNA, 19 nt, Artificial Sequence
  Description of Artificial Sequence: Synthetic oligonucleotide
  Sense strand starting at position 2868 of SEQ ID NO: 318576
gacaucacccgugaugcua

SEQ ID NO: 573024 - RNA, 19 nt, Artificial Sequence
  Description of Artificial Sequence: Synthetic oligonucleotide
  Antisense strand to SEQ ID NO: 573023
uagcaucacgggugauguc

SEQ ID NO: 573025 - RNA, 19 nt, Artificial Sequence
  Description of Artificial Sequence: Synthetic oligonucleotide
  Sense strand starting at position 2952 of SEQ ID NO: 318576
gcccauuauuuggaagaaa

SEQ ID NO: 573026 - RNA, 19 nt, Artificial Sequence
  Description of Artificial Sequence: Synthetic oligonucleotide
  Antisense strand to SEQ ID NO: 573025
uuucuuccaaauaaugggc

SEQ ID NO: 573027 - RNA, 19 nt, Artificial Sequence
  Description of Artificial Sequence: Synthetic oligonucleotide
  Sense strand starting at position 3154 of SEQ ID NO: 318576
aagucucgugaauauguau

SEQ ID NO: 573028 - RNA, 19 nt, Artificial Sequence
  Description of Artificial Sequence: Synthetic oligonucleotide
  Antisense strand to SEQ ID NO: 573027
auacauauucacgagacuu

SEQ ID NO: 573029 - RNA, 19 nt, Artificial Sequence
  Description of Artificial Sequence: Synthetic oligonucleotide
  Sense strand starting at position 3157 of SEQ ID NO: 318576
ucucgugaauauguauuua

SEQ ID NO: 573030 - RNA, 19 nt, Artificial Sequence
  Description of Artificial Sequence: Synthetic oligonucleotide
  Antisense strand to SEQ ID NO: 573029
uaaauacauauucacgaga

SEQ ID NO: 573031 - RNA, 19 nt, Artificial Sequence
  Description of Artificial Sequence: Synthetic oligonucleotide
  Sense strand starting at position 3230 of SEQ ID NO: 318576
cagguuuggucauuccauu

SEQ ID NO: 573032 - RNA, 19 nt, Artificial Sequence
  Description of Artificial Sequence: Synthetic oligonucleotide
  Antisense strand to SEQ ID NO: 573031
aauggaaugaccaaaccug

SEQ ID NO: 573033 - RNA, 19 nt, Artificial Sequence
  Description of Artificial Sequence: Synthetic oligonucleotide
  Sense strand starting at position 3236 of SEQ ID NO: 318576
uggucauuccauuggguga

SEQ ID NO: 573034 - RNA, 19 nt, Artificial Sequence
  Description of Artificial Sequence: Synthetic oligonucleotide
  Antisense strand to SEQ ID NO: 573033
ucacccaauggaaugacca

SEQ ID NO: 573035 - RNA, 19 nt, Artificial Sequence
  Description of Artificial Sequence: Synthetic oligonucleotide
  Sense strand starting at position 66 of SEQ ID NO: 318577
ugauaagaauccuugugau

SEQ ID NO: 573036 - RNA, 19 nt, Artificial Sequence
  Description of Artificial Sequence: Synthetic oligonucleotide
  Antisense strand to SEQ ID NO: 573035
aucacaaggauucuuauca

SEQ ID NO: 573037 - RNA, 19 nt, Artificial Sequence
  Description of Artificial Sequence: Synthetic oligonucleotide
  Sense strand starting at position 88 of SEQ ID NO: 318577
auuguuccaccugaauagu

SEQ ID NO: 573038 - RNA, 19 nt, Artificial Sequence
  Description of Artificial Sequence: Synthetic oligonucleotide
  Antisense strand to SEQ ID NO: 573037
acuauucagguggaacaau

SEQ ID NO: 573039 - RNA, 19 nt, Artificial Sequence
  Description of Artificial Sequence: Synthetic oligonucleotide
  Sense strand starting at position 99 of SEQ ID NO: 318577
ugaauaguccaguauaauu

SEQ ID NO: 573040 - RNA, 19 nt, Artificial Sequence
  Description of Artificial Sequence: Synthetic oligonucleotide
  Antisense strand to SEQ ID NO: 573039
aauuauacuggacuauuca

SEQ ID NO: 573041 - RNA, 19 nt, Artificial Sequence
  Description of Artificial Sequence: Synthetic oligonucleotide
  Sense strand starting at position 237 of SEQ ID NO: 318577
cuauaauuagcagguaaca

SEQ ID NO: 573042 - RNA, 19 nt, Artificial Sequence
  Description of Artificial Sequence: Synthetic oligonucleotide
  Antisense strand to SEQ ID NO: 573041
uguuaccugcuaauuauag

SEQ ID NO: 573043 - RNA, 19 nt, Artificial Sequence
  Description of Artificial Sequence: Synthetic oligonucleotide
  Sense strand starting at position 477 of SEQ ID NO: 318577
uucucugcucuagaggauu

SEQ ID NO: 573044 - RNA, 19 nt, Artificial Sequence
  Description of Artificial Sequence: Synthetic oligonucleotide
  Antisense strand to SEQ ID NO: 573043
aauccucuagagcagagaa

SEQ ID NO: 573045 - RNA, 19 nt, Artificial Sequence
  Description of Artificial Sequence: Synthetic oligonucleotide
  Sense strand starting at position 508 of SEQ ID NO: 318577
acagaauagacacgagguu

SEQ ID NO: 573046 - RNA, 19 nt, Artificial Sequence
  Description of Artificial Sequence: Synthetic oligonucleotide
  Antisense strand to SEQ ID NO: 573045
aaccucgugucuauucugu

SEQ ID NO: 573047 - RNA, 19 nt, Artificial Sequence
  Description of Artificial Sequence: Synthetic oligonucleotide
  Sense strand starting at position 527 of SEQ ID NO: 318577
gugacuccaccauguagaa

SEQ ID NO: 573048 - RNA, 19 nt, Artificial Sequence
  Description of Artificial Sequence: Synthetic oligonucleotide
  Antisense strand to SEQ ID NO: 573047
uucuacaugguggagucac

SEQ ID NO: 573049 - RNA, 19 nt, Artificial Sequence
  Description of Artificial Sequence: Synthetic oligonucleotide
  Sense strand starting at position 706 of SEQ ID NO: 318577
uuagguuacucaccugaga

SEQ ID NO: 573050 - RNA, 19 nt, Artificial Sequence
  Description of Artificial Sequence: Synthetic oligonucleotide
  Antisense strand to SEQ ID NO: 573049
ucucaggugaguaaccuaa

SEQ ID NO: 573051 - RNA, 19 nt, Artificial Sequence
  Description of Artificial Sequence: Synthetic oligonucleotide
  Sense strand starting at position 813 of SEQ ID NO: 318577
ugauaaggccugugaacau

SEQ ID NO: 573052 - RNA, 19 nt, Artificial Sequence
  Description of Artificial Sequence: Synthetic oligonucleotide
  Antisense strand to SEQ ID NO: 573051
auguucacaggccuuauca

SEQ ID NO: 573053 - RNA, 19 nt, Artificial Sequence
  Description of Artificial Sequence: Synthetic oligonucleotide
  Sense strand starting at position 823 of SEQ ID NO: 318577
ugugaacaugcccaagauu

SEQ ID NO: 573054 - RNA, 19 nt, Artificial Sequence
  Description of Artificial Sequence: Synthetic oligonucleotide
  Antisense strand to SEQ ID NO: 573053
aaucuugggcauguucaca

SEQ ID NO: 573055 - RNA, 19 nt, Artificial Sequence
  Description of Artificial Sequence: Synthetic oligonucleotide
  Sense strand starting at position 826 of SEQ ID NO: 318577
gaacaugcccaagauuguu

SEQ ID NO: 573056 - RNA, 19 nt, Artificial Sequence
  Description of Artificial Sequence: Synthetic oligonucleotide
  Antisense strand to SEQ ID NO: 573055
aacaaucuugggcauguuc

SEQ ID NO: 573057 - RNA, 19 nt, Artificial Sequence
  Description of Artificial Sequence: Synthetic oligonucleotide
  Sense strand starting at position 952 of SEQ ID NO: 318577
ggaacucaggccugagaga

SEQ ID NO: 573058 - RNA, 19 nt, Artificial Sequence
  Description of Artificial Sequence: Synthetic oligonucleotide
  Antisense strand to SEQ ID NO: 573057
ucucucaggccugaguucc

SEQ ID NO: 573059 - RNA, 19 nt, Artificial Sequence
  Description of Artificial Sequence: Synthetic oligonucleotide
  Sense strand starting at position 1220 of SEQ ID NO: 318577
ugagguaacagguguaaac

SEQ ID NO: 573060 - RNA, 19 nt, Artificial Sequence
  Description of Artificial Sequence: Synthetic oligonucleotide
  Antisense strand to SEQ ID NO: 573059
guuuacaccuguuaccuca

SEQ ID NO: 573061 - RNA, 19 nt, Artificial Sequence
  Description of Artificial Sequence: Synthetic oligonucleotide
  Sense strand starting at position 1250 of SEQ ID NO: 318577
cuguacaaucuuggacaua

SEQ ID NO: 573062 - RNA, 19 nt, Artificial Sequence
  Description of Artificial Sequence: Synthetic oligonucleotide
  Antisense strand to SEQ ID NO: 573061
uauguccaagauuguacag

SEQ ID NO: 573063 - RNA, 19 nt, Artificial Sequence
  Description of Artificial Sequence: Synthetic oligonucleotide
  Sense strand starting at position 1279 of SEQ ID NO: 318577
acaugugauucccugagau

SEQ ID NO: 573064 - RNA, 19 nt, Artificial Sequence
  Description of Artificial Sequence: Synthetic oligonucleotide
  Antisense strand to SEQ ID NO: 573063
aucucagggaaucacaugu

SEQ ID NO: 573065 - RNA, 19 nt, Artificial Sequence
  Description of Artificial Sequence: Synthetic oligonucleotide
  Sense strand starting at position 1360 of SEQ ID NO: 318577
gucacaugggcucaaauau

SEQ ID NO: 573066 - RNA, 19 nt, Artificial Sequence
  Description of Artificial Sequence: Synthetic oligonucleotide
  Antisense strand to SEQ ID NO: 573065
auauuugagcccaugugac

SEQ ID NO: 573067 - RNA, 19 nt, Artificial Sequence
  Description of Artificial Sequence: Synthetic oligonucleotide
  Sense strand starting at position 1403 of SEQ ID NO: 318577
guuggucaugcuuaauaaa

SEQ ID NO: 573068 - RNA, 19 nt, Artificial Sequence
  Description of Artificial Sequence: Synthetic oligonucleotide
  Antisense strand to SEQ ID NO: 573067
uuuauuaagcaugaccaac

SEQ ID NO: 573069 - RNA, 19 nt, Artificial Sequence
  Description of Artificial Sequence: Synthetic oligonucleotide
  Sense strand starting at position 1481 of SEQ ID NO: 318577
augaccuugaauugaguga

SEQ ID NO: 573070 - RNA, 19 nt, Artificial Sequence
  Description of Artificial Sequence: Synthetic oligonucleotide
  Antisense strand to SEQ ID NO: 573069
ucacucaauucaaggucau

SEQ ID NO: 573071 - RNA, 19 nt, Artificial Sequence
  Description of Artificial Sequence: Synthetic oligonucleotide
  Sense strand starting at position 1485 of SEQ ID NO: 318577
ccuugaauugagugagaug

SEQ ID NO: 573072 - RNA, 19 nt, Artificial Sequence
  Description of Artificial Sequence: Synthetic oligonucleotide
  Antisense strand to SEQ ID NO: 573071
caucucacucaauucaagg

SEQ ID NO: 573073 - RNA, 19 nt, Artificial Sequence
  Description of Artificial Sequence: Synthetic oligonucleotide
  Sense strand starting at position 1507 of SEQ ID NO: 318577
gaaaucagaguuuggaguu

SEQ ID NO: 573074 - RNA, 19 nt, Artificial Sequence
  Description of Artificial Sequence: Synthetic oligonucleotide
  Antisense strand to SEQ ID NO: 573073
aacuccaaacucugauuuc

SEQ ID NO: 573075 - RNA, 19 nt, Artificial Sequence
  Description of Artificial Sequence: Synthetic oligonucleotide
  Sense strand starting at position 1521 of SEQ ID NO: 318577
gaguuagagagauggcagu

SEQ ID NO: 573076 - RNA, 19 nt, Artificial Sequence
  Description of Artificial Sequence: Synthetic oligonucleotide
  Antisense strand to SEQ ID NO: 573075
acugccaucucucuaacuc

SEQ ID NO: 573077 - RNA, 19 nt, Artificial Sequence
  Description of Artificial Sequence: Synthetic oligonucleotide
  Sense strand starting at position 1540 of SEQ ID NO: 318577
ucaaauucuugguuuaaug

SEQ ID NO: 573078 - RNA, 19 nt, Artificial Sequence
  Description of Artificial Sequence: Synthetic oligonucleotide
  Antisense strand to SEQ ID NO: 573077
cauuaaaccaagaauuuga

SEQ ID NO: 573079 - RNA, 19 nt, Artificial Sequence
  Description of Artificial Sequence: Synthetic oligonucleotide
  Sense strand starting at position 1551 of SEQ ID NO: 318577
guuuaaugucucugagaag

SEQ ID NO: 573080 - RNA, 19 nt, Artificial Sequence
  Description of Artificial Sequence: Synthetic oligonucleotide
  Antisense strand to SEQ ID NO: 573079
cuucucagagacauuaaac

SEQ ID NO: 573081 - RNA, 19 nt, Artificial Sequence
  Description of Artificial Sequence: Synthetic oligonucleotide
  Sense strand starting at position 1567 of SEQ ID NO: 318577
aaguguaggccucagaaag

SEQ ID NO: 573082 - RNA, 19 nt, Artificial Sequence
  Description of Artificial Sequence: Synthetic oligonucleotide
  Antisense strand to SEQ ID NO: 573081
cuuucugaggccuacacuu

SEQ ID NO: 573083 - RNA, 19 nt, Artificial Sequence
  Description of Artificial Sequence: Synthetic oligonucleotide
  Sense strand starting at position 1679 of SEQ ID NO: 318577
cuuugcuaggagugaaaua

SEQ ID NO: 573084 - RNA, 19 nt, Artificial Sequence
  Description of Artificial Sequence: Synthetic oligonucleotide
  Antisense strand to SEQ ID NO: 573083
uauuucacuccuagcaaag

SEQ ID NO: 573085 - RNA, 19 nt, Artificial Sequence
  Description of Artificial Sequence: Synthetic oligonucleotide
  Sense strand starting at position 1680 of SEQ ID NO: 318577
uuugcuaggagugaaauau

SEQ ID NO: 573086 - RNA, 19 nt, Artificial Sequence
  Description of Artificial Sequence: Synthetic oligonucleotide
  Antisense strand to SEQ ID NO: 573085
auauuucacuccuagcaaa

SEQ ID NO: 573087 - RNA, 19 nt, Artificial Sequence
  Description of Artificial Sequence: Synthetic oligonucleotide
  Sense strand starting at position 2159 of SEQ ID NO: 318577
uuggcaugaguuuacuuua

SEQ ID NO: 573088 - RNA, 19 nt, Artificial Sequence
  Description of Artificial Sequence: Synthetic oligonucleotide
  Antisense strand to SEQ ID NO: 573087
uaaaguaaacucaugccaa

SEQ ID NO: 573089 - RNA, 19 nt, Artificial Sequence
  Description of Artificial Sequence: Synthetic oligonucleotide
  Sense strand starting at position 2270 of SEQ ID NO: 318577
ugugauuucugguugugga

SEQ ID NO: 573090 - RNA, 19 nt, Artificial Sequence
  Description of Artificial Sequence: Synthetic oligonucleotide
  Antisense strand to SEQ ID NO: 573089
uccacaaccagaaaucaca

SEQ ID NO: 573091 - RNA, 19 nt, Artificial Sequence
  Description of Artificial Sequence: Synthetic oligonucleotide
  Sense strand starting at position 2271 of SEQ ID NO: 318577
gugauuucugguuguggau

SEQ ID NO: 573092 - RNA, 19 nt, Artificial Sequence
  Description of Artificial Sequence: Synthetic oligonucleotide
  Antisense strand to SEQ ID NO: 573091
auccacaaccagaaaucac

SEQ ID NO: 573093 - RNA, 19 nt, Artificial Sequence
  Description of Artificial Sequence: Synthetic oligonucleotide
  Sense strand starting at position 2337 of SEQ ID NO: 318577
gcagauuaaugaccuacca

SEQ ID NO: 573094 - RNA, 19 nt, Artificial Sequence
  Description of Artificial Sequence: Synthetic oligonucleotide
  Antisense strand to SEQ ID NO: 573093
ugguaggucauuaaucugc

SEQ ID NO: 573095 - RNA, 19 nt, Artificial Sequence
  Description of Artificial Sequence: Synthetic oligonucleotide
  Sense strand starting at position 2480 of SEQ ID NO: 318577
gucuuucuaggauauaauu

SEQ ID NO: 573096 - RNA, 19 nt, Artificial Sequence
  Description of Artificial Sequence: Synthetic oligonucleotide
  Antisense strand to SEQ ID NO: 573095
aauuauauccuagaaagac

SEQ ID NO: 573097 - RNA, 19 nt, Artificial Sequence
  Description of Artificial Sequence: Synthetic oligonucleotide
  Sense strand starting at position 2702 of SEQ ID NO: 318577
gcuugaauuccacagucug

SEQ ID NO: 573098 - RNA, 19 nt, Artificial Sequence
  Description of Artificial Sequence: Synthetic oligonucleotide
  Antisense strand to SEQ ID NO: 573097
cagacuguggaauucaagc

SEQ ID NO: 573099 - RNA, 19 nt, Artificial Sequence
  Description of Artificial Sequence: Synthetic oligonucleotide
  Sense strand starting at position 2713 of SEQ ID NO: 318577
acagucugacguuaauaau

SEQ ID NO: 573100 - RNA, 19 nt, Artificial Sequence
  Description of Artificial Sequence: Synthetic oligonucleotide
  Antisense strand to SEQ ID NO: 573099
auuauuaacgucagacugu

SEQ ID NO: 573101 - RNA, 19 nt, Artificial Sequence
  Description of Artificial Sequence: Synthetic oligonucleotide
  Sense strand starting at position 2911 of SEQ ID NO: 318577
cucuuuagacuccagugaa

SEQ ID NO: 573102 - RNA, 19 nt, Artificial Sequence
  Description of Artificial Sequence: Synthetic oligonucleotide
  Antisense strand to SEQ ID NO: 573101
uucacuggagucuaaagag

SEQ ID NO: 573103 - RNA, 19 nt, Artificial Sequence
  Description of Artificial Sequence: Synthetic oligonucleotide
  Sense strand starting at position 3284 of SEQ ID NO: 318577
uccugugagguauauacca

SEQ ID NO: 573104 - RNA, 19 nt, Artificial Sequence
  Description of Artificial Sequence: Synthetic oligonucleotide
  Antisense strand to SEQ ID NO: 573103
ugguauauaccucacagga

SEQ ID NO: 573105 - RNA, 19 nt, Artificial Sequence
  Description of Artificial Sequence: Synthetic oligonucleotide
  Sense strand starting at position 3525 of SEQ ID NO: 318577
ggaugccuuguauaacaca

SEQ ID NO: 573106 - RNA, 19 nt, Artificial Sequence
  Description of Artificial Sequence: Synthetic oligonucleotide
  Antisense strand to SEQ ID NO: 573105
uguguuauacaaggcaucc

SEQ ID NO: 573107 - RNA, 19 nt, Artificial Sequence
  Description of Artificial Sequence: Synthetic oligonucleotide
  Sense strand starting at position 3673 of SEQ ID NO: 318577
gaauauaggcucuguuaag

SEQ ID NO: 573108 - RNA, 19 nt, Artificial Sequence
  Description of Artificial Sequence: Synthetic oligonucleotide
  Antisense strand to SEQ ID NO: 573107
cuuaacagagccuauauuc

SEQ ID NO: 573109 - RNA, 19 nt, Artificial Sequence
  Description of Artificial Sequence: Synthetic oligonucleotide
  Sense strand starting at position 3729 of SEQ ID NO: 318577
uuguaaucacagugaagag

SEQ ID NO: 573110 - RNA, 19 nt, Artificial Sequence
  Description of Artificial Sequence: Synthetic oligonucleotide
  Antisense strand to SEQ ID NO: 573109
cucuucacugugauuacaa

SEQ ID NO: 573111 - RNA, 19 nt, Artificial Sequence
  Description of Artificial Sequence: Synthetic oligonucleotide
  Sense strand starting at position 3877 of SEQ ID NO: 318577
agauguaauuuagagacau

SEQ ID NO: 573112 - RNA, 19 nt, Artificial Sequence
  Description of Artificial Sequence: Synthetic oligonucleotide
  Antisense strand to SEQ ID NO: 573111
augucucuaaauuacaucu

SEQ ID NO: 573113 - RNA, 19 nt, Artificial Sequence
  Description of Artificial Sequence: Synthetic oligonucleotide
  Sense strand starting at position 3895 of SEQ ID NO: 318577
uuguaucuaguccaccaaa

SEQ ID NO: 573114 - RNA, 19 nt, Artificial Sequence
  Description of Artificial Sequence: Synthetic oligonucleotide
  Antisense strand to SEQ ID NO: 573113
uuugguggacuagauacaa

SEQ ID NO: 573115 - RNA, 19 nt, Artificial Sequence
  Description of Artificial Sequence: Synthetic oligonucleotide
  Sense strand starting at position 84 of SEQ ID NO: 318578
aggugcuaauacuucuaaa

SEQ ID NO: 573116 - RNA, 19 nt, Artificial Sequence
  Description of Artificial Sequence: Synthetic oligonucleotide
  Antisense strand to SEQ ID NO: 573115
uuuagaaguauuagcaccu

SEQ ID NO: 573117 - RNA, 19 nt, Artificial Sequence
  Description of Artificial Sequence: Synthetic oligonucleotide
  Sense strand starting at position 105 of SEQ ID NO: 318578
gaaggaauacagugaugca

SEQ ID NO: 573118 - RNA, 19 nt, Artificial Sequence
  Description of Artificial Sequence: Synthetic oligonucleotide
  Antisense strand to SEQ ID NO: 573117
ugcaucacuguauuccuuc

SEQ ID NO: 573119 - RNA, 19 nt, Artificial Sequence
  Description of Artificial Sequence: Synthetic oligonucleotide
  Sense strand starting at position 498 of SEQ ID NO: 318578
ggcaauugucaauacucuu

SEQ ID NO: 573120 - RNA, 19 nt, Artificial Sequence
  Description of Artificial Sequence: Synthetic oligonucleotide
  Antisense strand to SEQ ID NO: 573119
aagaguauugacaauugcc

SEQ ID NO: 573121 - RNA, 19 nt, Artificial Sequence
  Description of Artificial Sequence: Synthetic oligonucleotide
  Sense strand starting at position 637 of SEQ ID NO: 318578
acaaauaggccuugaagac

SEQ ID NO: 573122 - RNA, 19 nt, Artificial Sequence
  Description of Artificial Sequence: Synthetic oligonucleotide
  Antisense strand to SEQ ID NO: 573121
gucuucaaggccuauuugu

SEQ ID NO: 573123 - RNA, 19 nt, Artificial Sequence
  Description of Artificial Sequence: Synthetic oligonucleotide
  Sense strand starting at position 789 of SEQ ID NO: 318578
ugucuagggccugaaacua

SEQ ID NO: 573124 - RNA, 19 nt, Artificial Sequence
  Description of Artificial Sequence: Synthetic oligonucleotide
  Antisense strand to SEQ ID NO: 573123
uaguuucaggcccuagaca

SEQ ID NO: 573125 - RNA, 19 nt, Artificial Sequence
  Description of Artificial Sequence: Synthetic oligonucleotide
  Sense strand starting at position 867 of SEQ ID NO: 318578
ggcagaauaaacgaguucu

SEQ ID NO: 573126 - RNA, 19 nt, Artificial Sequence
  Description of Artificial Sequence: Synthetic oligonucleotide
  Antisense strand to SEQ ID NO: 573125
agaacucguuuauucugcc

SEQ ID NO: 573127 - RNA, 19 nt, Artificial Sequence
  Description of Artificial Sequence: Synthetic oligonucleotide
  Sense strand starting at position 1082 of SEQ ID NO: 318578
aggacuuagagcugguaau

SEQ ID NO: 573128 - RNA, 19 nt, Artificial Sequence
  Description of Artificial Sequence: Synthetic oligonucleotide
  Antisense strand to SEQ ID NO: 573127
auuaccagcucuaaguccu

SEQ ID NO: 573129 - RNA, 19 nt, Artificial Sequence
  Description of Artificial Sequence: Synthetic oligonucleotide
  Sense strand starting at position 1083 of SEQ ID NO: 318578
ggacuuagagcugguaauc

SEQ ID NO: 573130 - RNA, 19 nt, Artificial Sequence
  Description of Artificial Sequence: Synthetic oligonucleotide
  Antisense strand to SEQ ID NO: 573129
gauuaccagcucuaagucc

SEQ ID NO: 573131 - RNA, 19 nt, Artificial Sequence
  Description of Artificial Sequence: Synthetic oligonucleotide
  Sense strand starting at position 1093 of SEQ ID NO: 318578
cugguaaucuauguaugaa

SEQ ID NO: 573132 - RNA, 19 nt, Artificial Sequence
  Description of Artificial Sequence: Synthetic oligonucleotide
  Antisense strand to SEQ ID NO: 573131
uucauacauagauuaccag

SEQ ID NO: 573133 - RNA, 19 nt, Artificial Sequence
  Description of Artificial Sequence: Synthetic oligonucleotide
  Sense strand starting at position 1096 of SEQ ID NO: 318578
guaaucuauguaugaaaga

SEQ ID NO: 573134 - RNA, 19 nt, Artificial Sequence
  Description of Artificial Sequence: Synthetic oligonucleotide
  Antisense strand to SEQ ID NO: 573133
ucuuucauacauagauuac

SEQ ID NO: 573135 - RNA, 19 nt, Artificial Sequence
  Description of Artificial Sequence: Synthetic oligonucleotide
  Sense strand starting at position 1112 of SEQ ID NO: 318578
agaaauaagcaaugcugua

SEQ ID NO: 573136 - RNA, 19 nt, Artificial Sequence
  Description of Artificial Sequence: Synthetic oligonucleotide
  Antisense strand to SEQ ID NO: 573135
uacagcauugcuuauuucu

SEQ ID NO: 573137 - RNA, 19 nt, Artificial Sequence
  Description of Artificial Sequence: Synthetic oligonucleotide
  Sense strand starting at position 1197 of SEQ ID NO: 318578
ucaggaauucuugguagau

SEQ ID NO: 573138 - RNA, 19 nt, Artificial Sequence
  Description of Artificial Sequence: Synthetic oligonucleotide
  Antisense strand to SEQ ID NO: 573137
aucuaccaagaauuccuga

SEQ ID NO: 573139 - RNA, 19 nt, Artificial Sequence
  Description of Artificial Sequence: Synthetic oligonucleotide
  Sense strand starting at position 1198 of SEQ ID NO: 318578
caggaauucuugguagaua

SEQ ID NO: 573140 - RNA, 19 nt, Artificial Sequence
  Description of Artificial Sequence: Synthetic oligonucleotide
  Antisense strand to SEQ ID NO: 573139
uaucuaccaagaauuccug

SEQ ID NO: 573141 - RNA, 19 nt, Artificial Sequence
  Description of Artificial Sequence: Synthetic oligonucleotide
  Sense strand starting at position 1201 of SEQ ID NO: 318578
gaauucuugguagauaugu

SEQ ID NO: 573142 - RNA, 19 nt, Artificial Sequence
  Description of Artificial Sequence: Synthetic oligonucleotide
  Antisense strand to SEQ ID NO: 573141
acauaucuaccaagaauuc

SEQ ID NO: 573143 - RNA, 19 nt, Artificial Sequence
  Description of Artificial Sequence: Synthetic oligonucleotide
  Sense strand starting at position 1203 of SEQ ID NO: 318578
auucuugguagauauguga

SEQ ID NO: 573144 - RNA, 19 nt, Artificial Sequence
  Description of Artificial Sequence: Synthetic oligonucleotide
  Antisense strand to SEQ ID NO: 573143
ucacauaucuaccaagaau

SEQ ID NO: 573145 - RNA, 19 nt, Artificial Sequence
  Description of Artificial Sequence: Synthetic oligonucleotide
  Sense strand starting at position 1477 of SEQ ID NO: 318578
aaggucucugcccauugaa

SEQ ID NO: 573146 - RNA, 19 nt, Artificial Sequence
  Description of Artificial Sequence: Synthetic oligonucleotide
  Antisense strand to SEQ ID NO: 573145
uucaaugggcagagaccuu

SEQ ID NO: 573147 - RNA, 19 nt, Artificial Sequence
  Description of Artificial Sequence: Synthetic oligonucleotide
  Sense strand starting at position 1603 of SEQ ID NO: 318578
cucugaguauacucagagu

SEQ ID NO: 573148 - RNA, 19 nt, Artificial Sequence
  Description of Artificial Sequence: Synthetic oligonucleotide
  Antisense strand to SEQ ID NO: 573147
acucugaguauacucagag

SEQ ID NO: 573149 - RNA, 19 nt, Artificial Sequence
  Description of Artificial Sequence: Synthetic oligonucleotide
  Sense strand starting at position 1609 of SEQ ID NO: 318578
guauacucagaguauauau

SEQ ID NO: 573150 - RNA, 19 nt, Artificial Sequence
  Description of Artificial Sequence: Synthetic oligonucleotide
  Antisense strand to SEQ ID NO: 573149
auauauacucugaguauac

SEQ ID NO: 573151 - RNA, 19 nt, Artificial Sequence
  Description of Artificial Sequence: Synthetic oligonucleotide
  Sense strand starting at position 1783 of SEQ ID NO: 318578
gcaacacgucaauggauaa

SEQ ID NO: 573152 - RNA, 19 nt, Artificial Sequence
  Description of Artificial Sequence: Synthetic oligonucleotide
  Antisense strand to SEQ ID NO: 573151
uuauccauugacguguugc

SEQ ID NO: 573153 - RNA, 19 nt, Artificial Sequence
  Description of Artificial Sequence: Synthetic oligonucleotide
  Sense strand starting at position 2021 of SEQ ID NO: 318578
uuggaaugaugcucugaaa

SEQ ID NO: 573154 - RNA, 19 nt, Artificial Sequence
  Description of Artificial Sequence: Synthetic oligonucleotide
  Antisense strand to SEQ ID NO: 573153
uuucagagcaucauuccaa

SEQ ID NO: 573155 - RNA, 19 nt, Artificial Sequence
  Description of Artificial Sequence: Synthetic oligonucleotide
  Sense strand starting at position 2034 of SEQ ID NO: 318578
cugaaauauugucucaggu

SEQ ID NO: 573156 - RNA, 19 nt, Artificial Sequence
  Description of Artificial Sequence: Synthetic oligonucleotide
  Antisense strand to SEQ ID NO: 573155
accugagacaauauuucag

SEQ ID NO: 573157 - RNA, 19 nt, Artificial Sequence
  Description of Artificial Sequence: Synthetic oligonucleotide
  Sense strand starting at position 2139 of SEQ ID NO: 318578
uuguauccucaguacuaug

SEQ ID NO: 573158 - RNA, 19 nt, Artificial Sequence
  Description of Artificial Sequence: Synthetic oligonucleotide
  Antisense strand to SEQ ID NO: 573157
cauaguacugaggauacaa

SEQ ID NO: 573159 - RNA, 19 nt, Artificial Sequence
  Description of Artificial Sequence: Synthetic oligonucleotide
  Sense strand starting at position 2144 of SEQ ID NO: 318578
uccucaguacuauguauuu

SEQ ID NO: 573160 - RNA, 19 nt, Artificial Sequence
  Description of Artificial Sequence: Synthetic oligonucleotide
  Antisense strand to SEQ ID NO: 573159
aaauacauaguacugagga

SEQ ID NO: 573161 - RNA, 19 nt, Artificial Sequence
  Description of Artificial Sequence: Synthetic oligonucleotide
  Sense strand starting at position 2235 of SEQ ID NO: 318578
aaguauagagcucaguaac

SEQ ID NO: 573162 - RNA, 19 nt, Artificial Sequence
  Description of Artificial Sequence: Synthetic oligonucleotide
  Antisense strand to SEQ ID NO: 573161
guuacugagcucuauacuu

SEQ ID NO: 573163 - RNA, 19 nt, Artificial Sequence
  Description of Artificial Sequence: Synthetic oligonucleotide
  Sense strand starting at position 2249 of SEQ ID NO: 318578
guaacagaucuuugaauac

SEQ ID NO: 573164 - RNA, 19 nt, Artificial Sequence
  Description of Artificial Sequence: Synthetic oligonucleotide
  Antisense strand to SEQ ID NO: 573163
guauucaaagaucuguuac

SEQ ID NO: 573165 - RNA, 19 nt, Artificial Sequence
  Description of Artificial Sequence: Synthetic oligonucleotide
  Sense strand starting at position 2294 of SEQ ID NO: 318578
ugggcauaaguguauuauu

SEQ ID NO: 573166 - RNA, 19 nt, Artificial Sequence
  Description of Artificial Sequence: Synthetic oligonucleotide
  Antisense strand to SEQ ID NO: 573165
aauaauacacuuaugccca

SEQ ID NO: 573167 - RNA, 19 nt, Artificial Sequence
  Description of Artificial Sequence: Synthetic oligonucleotide
  Sense strand starting at position 2480 of SEQ ID NO: 318578
agaauaccucuuuggauua

SEQ ID NO: 573168 - RNA, 19 nt, Artificial Sequence
  Description of Artificial Sequence: Synthetic oligonucleotide
  Antisense strand to SEQ ID NO: 573167
uaauccaaagagguauucu

SEQ ID NO: 573169 - RNA, 19 nt, Artificial Sequence
  Description of Artificial Sequence: Synthetic oligonucleotide
  Sense strand starting at position 2530 of SEQ ID NO: 318578
ugucuauaccaaggaucuu

SEQ ID NO: 573170 - RNA, 19 nt, Artificial Sequence
  Description of Artificial Sequence: Synthetic oligonucleotide
  Antisense strand to SEQ ID NO: 573169
aagauccuugguauagaca

SEQ ID NO: 573171 - RNA, 19 nt, Artificial Sequence
  Description of Artificial Sequence: Synthetic oligonucleotide
  Sense strand starting at position 2553 of SEQ ID NO: 318578
uguugaaucccagacucuu

SEQ ID NO: 573172 - RNA, 19 nt, Artificial Sequence
  Description of Artificial Sequence: Synthetic oligonucleotide
  Antisense strand to SEQ ID NO: 573171
aagagucugggauucaaca

SEQ ID NO: 573173 - RNA, 19 nt, Artificial Sequence
  Description of Artificial Sequence: Synthetic oligonucleotide
  Sense strand starting at position 2891 of SEQ ID NO: 318578
gcagguguuacuuaagaca

SEQ ID NO: 573174 - RNA, 19 nt, Artificial Sequence
  Description of Artificial Sequence: Synthetic oligonucleotide
  Antisense strand to SEQ ID NO: 573173
ugucuuaaguaacaccugc

SEQ ID NO: 573175 - RNA, 19 nt, Artificial Sequence
  Description of Artificial Sequence: Synthetic oligonucleotide
  Sense strand starting at position 2923 of SEQ ID NO: 318578
agaguauucuacucucagg

SEQ ID NO: 573176 - RNA, 19 nt, Artificial Sequence
  Description of Artificial Sequence: Synthetic oligonucleotide
  Antisense strand to SEQ ID NO: 573175
ccugagaguagaauacucu

SEQ ID NO: 573177 - RNA, 19 nt, Artificial Sequence
  Description of Artificial Sequence: Synthetic oligonucleotide
  Sense strand starting at position 2966 of SEQ ID NO: 318578
augaaagguugccuaccau

SEQ ID NO: 573178 - RNA, 19 nt, Artificial Sequence
  Description of Artificial Sequence: Synthetic oligonucleotide
  Antisense strand to SEQ ID NO: 573177
augguaggcaaccuuucau

SEQ ID NO: 573179 - RNA, 19 nt, Artificial Sequence
  Description of Artificial Sequence: Synthetic oligonucleotide
  Sense strand starting at position 3054 of SEQ ID NO: 318578
ccuggcuuccuccagaaau

SEQ ID NO: 573180 - RNA, 19 nt, Artificial Sequence
  Description of Artificial Sequence: Synthetic oligonucleotide
  Antisense strand to SEQ ID NO: 573179
auuucuggaggaagccagg

SEQ ID NO: 573181 - RNA, 19 nt, Artificial Sequence
  Description of Artificial Sequence: Synthetic oligonucleotide
  Sense strand starting at position 3208 of SEQ ID NO: 318578
uucuaagaagcauguauua

SEQ ID NO: 573182 - RNA, 19 nt, Artificial Sequence
  Description of Artificial Sequence: Synthetic oligonucleotide
  Antisense strand to SEQ ID NO: 573181
uaauacaugcuucuuagaa

SEQ ID NO: 573183 - RNA, 19 nt, Artificial Sequence
  Description of Artificial Sequence: Synthetic oligonucleotide
  Sense strand starting at position 3410 of SEQ ID NO: 318578
gaggcaauagcaugagaaa

SEQ ID NO: 573184 - RNA, 19 nt, Artificial Sequence
  Description of Artificial Sequence: Synthetic oligonucleotide
  Antisense strand to SEQ ID NO: 573183
uuucucaugcuauugccuc

SEQ ID NO: 573185 - RNA, 19 nt, Artificial Sequence
  Description of Artificial Sequence: Synthetic oligonucleotide
  Sense strand starting at position 3535 of SEQ ID NO: 318578
ggaaacaucuaauaaagaa

SEQ ID NO: 573186 - RNA, 19 nt, Artificial Sequence
  Description of Artificial Sequence: Synthetic oligonucleotide
  Antisense strand to SEQ ID NO: 573185
uucuuuauuagauguuucc

SEQ ID NO: 573187 - RNA, 19 nt, Artificial Sequence
  Description of Artificial Sequence: Synthetic oligonucleotide
  Sense strand starting at position 3566 of SEQ ID NO: 318578
ggagguugcagugacagau

SEQ ID NO: 573188 - RNA, 19 nt, Artificial Sequence
  Description of Artificial Sequence: Synthetic oligonucleotide
  Antisense strand to SEQ ID NO: 573187
aucugucacugcaaccucc

SEQ ID NO: 573189 - RNA, 19 nt, Artificial Sequence
  Description of Artificial Sequence: Synthetic oligonucleotide
  Sense strand starting at position 3570 of SEQ ID NO: 318578
guugcagugacagaugaga

SEQ ID NO: 573190 - RNA, 19 nt, Artificial Sequence
  Description of Artificial Sequence: Synthetic oligonucleotide
  Antisense strand to SEQ ID NO: 573189
ucucaucugucacugcaac

SEQ ID NO: 573191 - RNA, 19 nt, Artificial Sequence
  Description of Artificial Sequence: Synthetic oligonucleotide
  Sense strand starting at position 3572 of SEQ ID NO: 318578
ugcagugacagaugagauc

SEQ ID NO: 573192 - RNA, 19 nt, Artificial Sequence
  Description of Artificial Sequence: Synthetic oligonucleotide
  Antisense strand to SEQ ID NO: 573191
gaucucaucugucacugca

SEQ ID NO: 573193 - RNA, 19 nt, Artificial Sequence
  Description of Artificial Sequence: Synthetic oligonucleotide
  Sense strand starting at position 3616 of SEQ ID NO: 318578
agccuugugccuguaguaa

SEQ ID NO: 573194 - RNA, 19 nt, Artificial Sequence
  Description of Artificial Sequence: Synthetic oligonucleotide
  Antisense strand to SEQ ID NO: 573193
uuacuacaggcacaaggcu

SEQ ID NO: 573195 - RNA, 19 nt, Artificial Sequence
  Description of Artificial Sequence: Synthetic oligonucleotide
  Sense strand starting at position 264 of SEQ ID NO: 318579
uaucauggcuuguugagau

SEQ ID NO: 573196 - RNA, 19 nt, Artificial Sequence
  Description of Artificial Sequence: Synthetic oligonucleotide
  Antisense strand to SEQ ID NO: 573195
aucucaacaagccaugaua

SEQ ID NO: 573197 - RNA, 19 nt, Artificial Sequence
  Description of Artificial Sequence: Synthetic oligonucleotide
  Sense strand starting at position 497 of SEQ ID NO: 318579
ccaguauaauauguuugua

SEQ ID NO: 573198 - RNA, 19 nt, Artificial Sequence
  Description of Artificial Sequence: Synthetic oligonucleotide
  Antisense strand to SEQ ID NO: 573197
uacaaacauauuauacugg

SEQ ID NO: 573199 - RNA, 19 nt, Artificial Sequence
  Description of Artificial Sequence: Synthetic oligonucleotide
  Sense strand starting at position 526 of SEQ ID NO: 318579
gaagguguuggccacaaac

SEQ ID NO: 573200 - RNA, 19 nt, Artificial Sequence
  Description of Artificial Sequence: Synthetic oligonucleotide
  Antisense strand to SEQ ID NO: 573199
guuuguggccaacaccuuc

SEQ ID NO: 573201 - RNA, 19 nt, Artificial Sequence
  Description of Artificial Sequence: Synthetic oligonucleotide
  Sense strand starting at position 528 of SEQ ID NO: 318579
agguguuggccacaaacca

SEQ ID NO: 573202 - RNA, 19 nt, Artificial Sequence
  Description of Artificial Sequence: Synthetic oligonucleotide
  Antisense strand to SEQ ID NO: 573201
ugguuuguggccaacaccu

SEQ ID NO: 573203 - RNA, 19 nt, Artificial Sequence
  Description of Artificial Sequence: Synthetic oligonucleotide
  Sense strand starting at position 708 of SEQ ID NO: 318579
ucuugauugcuuuaaugac

SEQ ID NO: 573204 - RNA, 19 nt, Artificial Sequence
  Description of Artificial Sequence: Synthetic oligonucleotide
  Antisense strand to SEQ ID NO: 573203
gucauuaaagcaaucaaga

SEQ ID NO: 573205 - RNA, 19 nt, Artificial Sequence
  Description of Artificial Sequence: Synthetic oligonucleotide
  Sense strand starting at position 846 of SEQ ID NO: 318579
aguuacaauuacuuuggaa

SEQ ID NO: 573206 - RNA, 19 nt, Artificial Sequence
  Description of Artificial Sequence: Synthetic oligonucleotide
  Antisense strand to SEQ ID NO: 573205
uuccaaaguaauuguaacu

SEQ ID NO: 573207 - RNA, 19 nt, Artificial Sequence
  Description of Artificial Sequence: Synthetic oligonucleotide
  Sense strand starting at position 916 of SEQ ID NO: 318579
guccuuucggaguaauaaa

SEQ ID NO: 573208 - RNA, 19 nt, Artificial Sequence
  Description of Artificial Sequence: Synthetic oligonucleotide
  Antisense strand to SEQ ID NO: 573207
uuuauuacuccgaaaggac

SEQ ID NO: 573209 - RNA, 19 nt, Artificial Sequence
  Description of Artificial Sequence: Synthetic oligonucleotide
  Sense strand starting at position 1031 of SEQ ID NO: 318579
gcauuacauuuauaggaua

SEQ ID NO: 573210 - RNA, 19 nt, Artificial Sequence
  Description of Artificial Sequence: Synthetic oligonucleotide
  Antisense strand to SEQ ID NO: 573209
uauccuauaaauguaaugc

SEQ ID NO: 573211 - RNA, 19 nt, Artificial Sequence
  Description of Artificial Sequence: Synthetic oligonucleotide
  Sense strand starting at position 1138 of SEQ ID NO: 318579
aaggucacaggcuauuaua

SEQ ID NO: 573212 - RNA, 19 nt, Artificial Sequence
  Description of Artificial Sequence: Synthetic oligonucleotide
  Antisense strand to SEQ ID NO: 573211
uauaauagccugugaccuu

SEQ ID NO: 573213 - RNA, 19 nt, Artificial Sequence
  Description of Artificial Sequence: Synthetic oligonucleotide
  Sense strand starting at position 1230 of SEQ ID NO: 318579
ucagacuaucuaugaguuu

SEQ ID NO: 573214 - RNA, 19 nt, Artificial Sequence
  Description of Artificial Sequence: Synthetic oligonucleotide
  Antisense strand to SEQ ID NO: 573213
aaacucauagauagucuga

SEQ ID NO: 573215 - RNA, 19 nt, Artificial Sequence
  Description of Artificial Sequence: Synthetic oligonucleotide
  Sense strand starting at position 1280 of SEQ ID NO: 318579
acguaagucuaggcaauuu

SEQ ID NO: 573216 - RNA, 19 nt, Artificial Sequence
  Description of Artificial Sequence: Synthetic oligonucleotide
  Antisense strand to SEQ ID NO: 573215
aaauugccuagacuuacgu

SEQ ID NO: 573217 - RNA, 19 nt, Artificial Sequence
  Description of Artificial Sequence: Synthetic oligonucleotide
  Sense strand starting at position 1291 of SEQ ID NO: 318579
ggcaauuuguguucucuua

SEQ ID NO: 573218 - RNA, 19 nt, Artificial Sequence
  Description of Artificial Sequence: Synthetic oligonucleotide
  Antisense strand to SEQ ID NO: 573217
uaagagaacacaaauugcc

SEQ ID NO: 573219 - RNA, 19 nt, Artificial Sequence
  Description of Artificial Sequence: Synthetic oligonucleotide
  Sense strand starting at position 1357 of SEQ ID NO: 318579
ucccucacucuuugggaga

SEQ ID NO: 573220 - RNA, 19 nt, Artificial Sequence
  Description of Artificial Sequence: Synthetic oligonucleotide
  Antisense strand to SEQ ID NO: 573219
ucucccaaagagugaggga

SEQ ID NO: 573221 - RNA, 19 nt, Artificial Sequence
  Description of Artificial Sequence: Synthetic oligonucleotide
  Sense strand starting at position 1425 of SEQ ID NO: 318579
agaagauaccacugcuuua

SEQ ID NO: 573222 - RNA, 19 nt, Artificial Sequence
  Description of Artificial Sequence: Synthetic oligonucleotide
  Antisense strand to SEQ ID NO: 573221
uaaagcagugguaucuucu

SEQ ID NO: 573223 - RNA, 19 nt, Artificial Sequence
  Description of Artificial Sequence: Synthetic oligonucleotide
  Sense strand starting at position 1635 of SEQ ID NO: 318579
ggaagaauuucucaugguu

SEQ ID NO: 573224 - RNA, 19 nt, Artificial Sequence
  Description of Artificial Sequence: Synthetic oligonucleotide
  Antisense strand to SEQ ID NO: 573223
aaccaugagaaauucuucc

SEQ ID NO: 573225 - RNA, 19 nt, Artificial Sequence
  Description of Artificial Sequence: Synthetic oligonucleotide
  Sense strand starting at position 1761 of SEQ ID NO: 318579
ggauuauacaugcauacgu

SEQ ID NO: 573226 - RNA, 19 nt, Artificial Sequence
  Description of Artificial Sequence: Synthetic oligonucleotide
  Antisense strand to SEQ ID NO: 573225
acguaugcauguauaaucc

SEQ ID NO: 573227 - RNA, 19 nt, Artificial Sequence
  Description of Artificial Sequence: Synthetic oligonucleotide
  Sense strand starting at position 1763 of SEQ ID NO: 318579
auuauacaugcauacguaa

SEQ ID NO: 573228 - RNA, 19 nt, Artificial Sequence
  Description of Artificial Sequence: Synthetic oligonucleotide
  Antisense strand to SEQ ID NO: 573227
uuacguaugcauguauaau

SEQ ID NO: 573229 - RNA, 19 nt, Artificial Sequence
  Description of Artificial Sequence: Synthetic oligonucleotide
  Sense strand starting at position 1839 of SEQ ID NO: 318579
uggcaagaggcuuagauua

SEQ ID NO: 573230 - RNA, 19 nt, Artificial Sequence
  Description of Artificial Sequence: Synthetic oligonucleotide
  Antisense strand to SEQ ID NO: 573229
uaaucuaagccucuugcca

SEQ ID NO: 573231 - RNA, 19 nt, Artificial Sequence
  Description of Artificial Sequence: Synthetic oligonucleotide
  Sense strand starting at position 2271 of SEQ ID NO: 318579
gauauacuaccucguagac

SEQ ID NO: 573232 - RNA, 19 nt, Artificial Sequence
  Description of Artificial Sequence: Synthetic oligonucleotide
  Antisense strand to SEQ ID NO: 573231
gucuacgagguaguauauc

SEQ ID NO: 573233 - RNA, 19 nt, Artificial Sequence
  Description of Artificial Sequence: Synthetic oligonucleotide
  Sense strand starting at position 2292 of SEQ ID NO: 318579
acauguuucugacuggacu

SEQ ID NO: 573234 - RNA, 19 nt, Artificial Sequence
  Description of Artificial Sequence: Synthetic oligonucleotide
  Antisense strand to SEQ ID NO: 573233
aguccagucagaaacaugu

SEQ ID NO: 573235 - RNA, 19 nt, Artificial Sequence
  Description of Artificial Sequence: Synthetic oligonucleotide
  Sense strand starting at position 2345 of SEQ ID NO: 318579
cagauugguuguccuacca

SEQ ID NO: 573236 - RNA, 19 nt, Artificial Sequence
  Description of Artificial Sequence: Synthetic oligonucleotide
  Antisense strand to SEQ ID NO: 573235
ugguaggacaaccaaucug

SEQ ID NO: 573237 - RNA, 19 nt, Artificial Sequence
  Description of Artificial Sequence: Synthetic oligonucleotide
  Sense strand starting at position 2354 of SEQ ID NO: 318579
uguccuaccagucagguau

SEQ ID NO: 573238 - RNA, 19 nt, Artificial Sequence
  Description of Artificial Sequence: Synthetic oligonucleotide
  Antisense strand to SEQ ID NO: 573237
auaccugacugguaggaca

SEQ ID NO: 573239 - RNA, 19 nt, Artificial Sequence
  Description of Artificial Sequence: Synthetic oligonucleotide
  Sense strand starting at position 2395 of SEQ ID NO: 318579
agagaaauccaggguuccu

SEQ ID NO: 573240 - RNA, 19 nt, Artificial Sequence
  Description of Artificial Sequence: Synthetic oligonucleotide
  Antisense strand to SEQ ID NO: 573239
aggaacccuggauuucucu

SEQ ID NO: 573241 - RNA, 19 nt, Artificial Sequence
  Description of Artificial Sequence: Synthetic oligonucleotide
  Sense strand starting at position 2404 of SEQ ID NO: 318579
caggguuccuguucugaag

SEQ ID NO: 573242 - RNA, 19 nt, Artificial Sequence
  Description of Artificial Sequence: Synthetic oligonucleotide
  Antisense strand to SEQ ID NO: 573241
cuucagaacaggaacccug

SEQ ID NO: 573243 - RNA, 19 nt, Artificial Sequence
  Description of Artificial Sequence: Synthetic oligonucleotide
  Sense strand starting at position 2452 of SEQ ID NO: 318579
auauguuagaguugaacga

SEQ ID NO: 573244 - RNA, 19 nt, Artificial Sequence
  Description of Artificial Sequence: Synthetic oligonucleotide
  Antisense strand to SEQ ID NO: 573243
ucguucaacucuaacauau

SEQ ID NO: 573245 - RNA, 19 nt, Artificial Sequence
  Description of Artificial Sequence: Synthetic oligonucleotide
  Sense strand starting at position 2710 of SEQ ID NO: 318579
cuucucaaucugcaggaua

SEQ ID NO: 573246 - RNA, 19 nt, Artificial Sequence
  Description of Artificial Sequence: Synthetic oligonucleotide
  Antisense strand to SEQ ID NO: 573245
uauccugcagauugagaag

SEQ ID NO: 573247 - RNA, 19 nt, Artificial Sequence
  Description of Artificial Sequence: Synthetic oligonucleotide
  Sense strand starting at position 2712 of SEQ ID NO: 318579
ucucaaucugcaggauauu

SEQ ID NO: 573248 - RNA, 19 nt, Artificial Sequence
  Description of Artificial Sequence: Synthetic oligonucleotide
  Antisense strand to SEQ ID NO: 573247
aauauccugcagauugaga

SEQ ID NO: 573249 - RNA, 19 nt, Artificial Sequence
  Description of Artificial Sequence: Synthetic oligonucleotide
  Sense strand starting at position 2783 of SEQ ID NO: 318579
auuggagacucaguuuaac

SEQ ID NO: 573250 - RNA, 19 nt, Artificial Sequence
  Description of Artificial Sequence: Synthetic oligonucleotide
  Antisense strand to SEQ ID NO: 573249
guuaaacugagucuccaau

SEQ ID NO: 573251 - RNA, 19 nt, Artificial Sequence
  Description of Artificial Sequence: Synthetic oligonucleotide
  Sense strand starting at position 3037 of SEQ ID NO: 318579
gcccuaauagcuuaagaaa

SEQ ID NO: 573252 - RNA, 19 nt, Artificial Sequence
  Description of Artificial Sequence: Synthetic oligonucleotide
  Antisense strand to SEQ ID NO: 573251
uuucuuaagcuauuagggc

SEQ ID NO: 573253 - RNA, 19 nt, Artificial Sequence
  Description of Artificial Sequence: Synthetic oligonucleotide
  Sense strand starting at position 3062 of SEQ ID NO: 318579
gaagaaacaugugaagaug

SEQ ID NO: 573254 - RNA, 19 nt, Artificial Sequence
  Description of Artificial Sequence: Synthetic oligonucleotide
  Antisense strand to SEQ ID NO: 573253
caucuucacauguuucuuc

SEQ ID NO: 573255 - RNA, 19 nt, Artificial Sequence
  Description of Artificial Sequence: Synthetic oligonucleotide
  Sense strand starting at position 3149 of SEQ ID NO: 318579
ucgagacuuuauccaauua

SEQ ID NO: 573256 - RNA, 19 nt, Artificial Sequence
  Description of Artificial Sequence: Synthetic oligonucleotide
  Antisense strand to SEQ ID NO: 573255
uaauuggauaaagucucga

SEQ ID NO: 573257 - RNA, 19 nt, Artificial Sequence
  Description of Artificial Sequence: Synthetic oligonucleotide
  Sense strand starting at position 3219 of SEQ ID NO: 318579
ggaguaugccaauauuaug

SEQ ID NO: 573258 - RNA, 19 nt, Artificial Sequence
  Description of Artificial Sequence: Synthetic oligonucleotide
  Antisense strand to SEQ ID NO: 573257
cauaauauuggcauacucc

SEQ ID NO: 573259 - RNA, 19 nt, Artificial Sequence
  Description of Artificial Sequence: Synthetic oligonucleotide
  Sense strand starting at position 3225 of SEQ ID NO: 318579
ugccaauauuaugagauuu

SEQ ID NO: 573260 - RNA, 19 nt, Artificial Sequence
  Description of Artificial Sequence: Synthetic oligonucleotide
  Antisense strand to SEQ ID NO: 573259
aaaucucauaauauuggca

SEQ ID NO: 573261 - RNA, 19 nt, Artificial Sequence
  Description of Artificial Sequence: Synthetic oligonucleotide
  Sense strand starting at position 3236 of SEQ ID NO: 318579
ugagauuuaucacagugag

SEQ ID NO: 573262 - RNA, 19 nt, Artificial Sequence
  Description of Artificial Sequence: Synthetic oligonucleotide
  Antisense strand to SEQ ID NO: 573261
cucacugugauaaaucuca

SEQ ID NO: 573263 - RNA, 19 nt, Artificial Sequence
  Description of Artificial Sequence: Synthetic oligonucleotide
  Sense strand starting at position 3250 of SEQ ID NO: 318579
gugagauaauacguccuuu

SEQ ID NO: 573264 - RNA, 19 nt, Artificial Sequence
  Description of Artificial Sequence: Synthetic oligonucleotide
  Antisense strand to SEQ ID NO: 573263
aaaggacguauuaucucac

SEQ ID NO: 573265 - RNA, 19 nt, Artificial Sequence
  Description of Artificial Sequence: Synthetic oligonucleotide
  Sense strand starting at position 3530 of SEQ ID NO: 318579
gagggugugugaguugaga

SEQ ID NO: 573266 - RNA, 19 nt, Artificial Sequence
  Description of Artificial Sequence: Synthetic oligonucleotide
  Antisense strand to SEQ ID NO: 573265
ucucaacucacacacccuc

SEQ ID NO: 573267 - RNA, 19 nt, Artificial Sequence
  Description of Artificial Sequence: Synthetic oligonucleotide
  Sense strand starting at position 3695 of SEQ ID NO: 318579
caaggucugcacuauuguu

SEQ ID NO: 573268 - RNA, 19 nt, Artificial Sequence
  Description of Artificial Sequence: Synthetic oligonucleotide
  Antisense strand to SEQ ID NO: 573267
aacaauagugcagaccuug

SEQ ID NO: 573269 - RNA, 19 nt, Artificial Sequence
  Description of Artificial Sequence: Synthetic oligonucleotide
  Sense strand starting at position 3722 of SEQ ID NO: 318579
gcuccuuuccaauggaaua

SEQ ID NO: 573270 - RNA, 19 nt, Artificial Sequence
  Description of Artificial Sequence: Synthetic oligonucleotide
  Antisense strand to SEQ ID NO: 573269
uauuccauuggaaaggagc

SEQ ID NO: 573271 - RNA, 19 nt, Artificial Sequence
  Description of Artificial Sequence: Synthetic oligonucleotide
  Sense strand starting at position 3806 of SEQ ID NO: 318579
uccaucauagcuuaaugga

SEQ ID NO: 573272 - RNA, 19 nt, Artificial Sequence
  Description of Artificial Sequence: Synthetic oligonucleotide
  Antisense strand to SEQ ID NO: 573271
uccauuaagcuaugaugga

SEQ ID NO: 573273 - RNA, 19 nt, Artificial Sequence
  Description of Artificial Sequence: Synthetic oligonucleotide
  Sense strand starting at position 3927 of SEQ ID NO: 318579
gguccaaaucuugaauugu

SEQ ID NO: 573274 - RNA, 19 nt, Artificial Sequence
  Description of Artificial Sequence: Synthetic oligonucleotide
  Antisense strand to SEQ ID NO: 573273
acaauucaagauuuggacc

SEQ ID NO: 573275 - RNA, 19 nt, Artificial Sequence
  Description of Artificial Sequence: Synthetic oligonucleotide
  Sense strand starting at position 155 of SEQ ID NO: 318580
gagauaguccuuuauaugu

SEQ ID NO: 573276 - RNA, 19 nt, Artificial Sequence
  Description of Artificial Sequence: Synthetic oligonucleotide
  Antisense strand to SEQ ID NO: 573275
acauauaaaggacuaucuc

SEQ ID NO: 573277 - RNA, 19 nt, Artificial Sequence
  Description of Artificial Sequence: Synthetic oligonucleotide
  Sense strand starting at position 302 of SEQ ID NO: 318580
uaucuaguaugucugugaa

SEQ ID NO: 573278 - RNA, 19 nt, Artificial Sequence
  Description of Artificial Sequence: Synthetic oligonucleotide
  Antisense strand to SEQ ID NO: 573277
uucacagacauacuagaua

SEQ ID NO: 573279 - RNA, 19 nt, Artificial Sequence
  Description of Artificial Sequence: Synthetic oligonucleotide
  Sense strand starting at position 331 of SEQ ID NO: 318580
uuugguaaacuguauuagu

SEQ ID NO: 573280 - RNA, 19 nt, Artificial Sequence
  Description of Artificial Sequence: Synthetic oligonucleotide
  Antisense strand to SEQ ID NO: 573279
acuaauacaguuuaccaaa

SEQ ID NO: 573281 - RNA, 19 nt, Artificial Sequence
  Description of Artificial Sequence: Synthetic oligonucleotide
  Sense strand starting at position 405 of SEQ ID NO: 318580
acaauugauuucugagacu

SEQ ID NO: 573282 - RNA, 19 nt, Artificial Sequence
  Description of Artificial Sequence: Synthetic oligonucleotide
  Antisense strand to SEQ ID NO: 573281
agucucagaaaucaauugu

SEQ ID NO: 573283 - RNA, 19 nt, Artificial Sequence
  Description of Artificial Sequence: Synthetic oligonucleotide
  Sense strand starting at position 408 of SEQ ID NO: 318580
auugauuucugagacuauc

SEQ ID NO: 573284 - RNA, 19 nt, Artificial Sequence
  Description of Artificial Sequence: Synthetic oligonucleotide
  Antisense strand to SEQ ID NO: 573283
gauagucucagaaaucaau

SEQ ID NO: 573285 - RNA, 19 nt, Artificial Sequence
  Description of Artificial Sequence: Synthetic oligonucleotide
  Sense strand starting at position 414 of SEQ ID NO: 318580
uucugagacuaucuuugca

SEQ ID NO: 573286 - RNA, 19 nt, Artificial Sequence
  Description of Artificial Sequence: Synthetic oligonucleotide
  Antisense strand to SEQ ID NO: 573285
ugcaaagauagucucagaa

SEQ ID NO: 573287 - RNA, 19 nt, Artificial Sequence
  Description of Artificial Sequence: Synthetic oligonucleotide
  Sense strand starting at position 418 of SEQ ID NO: 318580
gagacuaucuuugcagcua

SEQ ID NO: 573288 - RNA, 19 nt, Artificial Sequence
  Description of Artificial Sequence: Synthetic oligonucleotide
  Antisense strand to SEQ ID NO: 573287
uagcugcaaagauagucuc

SEQ ID NO: 573289 - RNA, 19 nt, Artificial Sequence
  Description of Artificial Sequence: Synthetic oligonucleotide
  Sense strand starting at position 473 of SEQ ID NO: 318580
ucagcaacugauugaacua

SEQ ID NO: 573290 - RNA, 19 nt, Artificial Sequence
  Description of Artificial Sequence: Synthetic oligonucleotide
  Antisense strand to SEQ ID NO: 573289
uaguucaaucaguugcuga

SEQ ID NO: 573291 - RNA, 19 nt, Artificial Sequence
  Description of Artificial Sequence: Synthetic oligonucleotide
  Sense strand starting at position 498 of SEQ ID NO: 318580
aagguuauuuggcuuuagu

SEQ ID NO: 573292 - RNA, 19 nt, Artificial Sequence
  Description of Artificial Sequence: Synthetic oligonucleotide
  Antisense strand to SEQ ID NO: 573291
acuaaagccaaauaaccuu

SEQ ID NO: 573293 - RNA, 19 nt, Artificial Sequence
  Description of Artificial Sequence: Synthetic oligonucleotide
  Sense strand starting at position 501 of SEQ ID NO: 318580
guuauuuggcuuuaguagu

SEQ ID NO: 573294 - RNA, 19 nt, Artificial Sequence
  Description of Artificial Sequence: Synthetic oligonucleotide
  Antisense strand to SEQ ID NO: 573293
acuacuaaagccaaauaac

SEQ ID NO: 573295 - RNA, 19 nt, Artificial Sequence
  Description of Artificial Sequence: Synthetic oligonucleotide
  Sense strand starting at position 588 of SEQ ID NO: 318580
uuguaauuaugaccagcua

SEQ ID NO: 573296 - RNA, 19 nt, Artificial Sequence
  Description of Artificial Sequence: Synthetic oligonucleotide
  Antisense strand to SEQ ID NO: 573295
uagcuggucauaauuacaa

SEQ ID NO: 573297 - RNA, 19 nt, Artificial Sequence
  Description of Artificial Sequence: Synthetic oligonucleotide
  Sense strand starting at position 878 of SEQ ID NO: 318580
ugcccuacaacgugaaaga

SEQ ID NO: 573298 - RNA, 19 nt, Artificial Sequence
  Description of Artificial Sequence: Synthetic oligonucleotide
  Antisense strand to SEQ ID NO: 573297
ucuuucacguuguagggca

SEQ ID NO: 573299 - RNA, 19 nt, Artificial Sequence
  Description of Artificial Sequence: Synthetic oligonucleotide
  Sense strand starting at position 894 of SEQ ID NO: 318580
agaguagaauaauaaggaa

SEQ ID NO: 573300 - RNA, 19 nt, Artificial Sequence
  Description of Artificial Sequence: Synthetic oligonucleotide
  Antisense strand to SEQ ID NO: 573299
uuccuuauuauucuacucu

SEQ ID NO: 573301 - RNA, 19 nt, Artificial Sequence
  Description of Artificial Sequence: Synthetic oligonucleotide
  Sense strand starting at position 897 of SEQ ID NO: 318580
guagaauaauaaggaagaa

SEQ ID NO: 573302 - RNA, 19 nt, Artificial Sequence
  Description of Artificial Sequence: Synthetic oligonucleotide
  Antisense strand to SEQ ID NO: 573301
uucuuccuuauuauucuac

SEQ ID NO: 573303 - RNA, 19 nt, Artificial Sequence
  Description of Artificial Sequence: Synthetic oligonucleotide
  Sense strand starting at position 974 of SEQ ID NO: 318580
aaguaugauugugcuuuga

SEQ ID NO: 573304 - RNA, 19 nt, Artificial Sequence
  Description of Artificial Sequence: Synthetic oligonucleotide
  Antisense strand to SEQ ID NO: 573303
ucaaagcacaaucauacuu

SEQ ID NO: 573305 - RNA, 19 nt, Artificial Sequence
  Description of Artificial Sequence: Synthetic oligonucleotide
  Sense strand starting at position 976 of SEQ ID NO: 318580
guaugauugugcuuugaac

SEQ ID NO: 573306 - RNA, 19 nt, Artificial Sequence
  Description of Artificial Sequence: Synthetic oligonucleotide
  Antisense strand to SEQ ID NO: 573305
guucaaagcacaaucauac

SEQ ID NO: 573307 - RNA, 19 nt, Artificial Sequence
  Description of Artificial Sequence: Synthetic oligonucleotide
  Sense strand starting at position 978 of SEQ ID NO: 318580
augauugugcuuugaaccu

SEQ ID NO: 573308 - RNA, 19 nt, Artificial Sequence
  Description of Artificial Sequence: Synthetic oligonucleotide
  Antisense strand to SEQ ID NO: 573307
agguucaaagcacaaucau

SEQ ID NO: 573309 - RNA, 19 nt, Artificial Sequence
  Description of Artificial Sequence: Synthetic oligonucleotide
  Sense strand starting at position 996 of SEQ ID NO: 318580
ucacuaaaguguccaaaga

SEQ ID NO: 573310 - RNA, 19 nt, Artificial Sequence
  Description of Artificial Sequence: Synthetic oligonucleotide
  Antisense strand to SEQ ID NO: 573309
ucuuuggacacuuuaguga

SEQ ID NO: 573311 - RNA, 19 nt, Artificial Sequence
  Description of Artificial Sequence: Synthetic oligonucleotide
  Sense strand starting at position 1051 of SEQ ID NO: 318580
acauauguuucugcauucu

SEQ ID NO: 573312 - RNA, 19 nt, Artificial Sequence
  Description of Artificial Sequence: Synthetic oligonucleotide
  Antisense strand to SEQ ID NO: 573311
agaaugcagaaacauaugu

SEQ ID NO: 573313 - RNA, 19 nt, Artificial Sequence
  Description of Artificial Sequence: Synthetic oligonucleotide
  Sense strand starting at position 1256 of SEQ ID NO: 318580
auuaaaugugauggcaaga

SEQ ID NO: 573314 - RNA, 19 nt, Artificial Sequence
  Description of Artificial Sequence: Synthetic oligonucleotide
  Antisense strand to SEQ ID NO: 573313
ucuugccaucacauuuaau

SEQ ID NO: 573315 - RNA, 19 nt, Artificial Sequence
  Description of Artificial Sequence: Synthetic oligonucleotide
  Sense strand starting at position 1343 of SEQ ID NO: 318580
guuccacaguuucuuauau

SEQ ID NO: 573316 - RNA, 19 nt, Artificial Sequence
  Description of Artificial Sequence: Synthetic oligonucleotide
  Antisense strand to SEQ ID NO: 573315
auauaagaaacuguggaac

SEQ ID NO: 573317 - RNA, 19 nt, Artificial Sequence
  Description of Artificial Sequence: Synthetic oligonucleotide
  Sense strand starting at position 1419 of SEQ ID NO: 318580
uucguacaugccuagaaua

SEQ ID NO: 573318 - RNA, 19 nt, Artificial Sequence
  Description of Artificial Sequence: Synthetic oligonucleotide
  Antisense strand to SEQ ID NO: 573317
uauucuaggcauguacgaa

SEQ ID NO: 573319 - RNA, 19 nt, Artificial Sequence
  Description of Artificial Sequence: Synthetic oligonucleotide
  Sense strand starting at position 1421 of SEQ ID NO: 318580
cguacaugccuagaauaua

SEQ ID NO: 573320 - RNA, 19 nt, Artificial Sequence
  Description of Artificial Sequence: Synthetic oligonucleotide
  Antisense strand to SEQ ID NO: 573319
uauauucuaggcauguacg

SEQ ID NO: 573321 - RNA, 19 nt, Artificial Sequence
  Description of Artificial Sequence: Synthetic oligonucleotide
  Sense strand starting at position 2069 of SEQ ID NO: 318580
gucugugguccaagugagu

SEQ ID NO: 573322 - RNA, 19 nt, Artificial Sequence
  Description of Artificial Sequence: Synthetic oligonucleotide
  Antisense strand to SEQ ID NO: 573321
acucacuuggaccacagac

SEQ ID NO: 573323 - RNA, 19 nt, Artificial Sequence
  Description of Artificial Sequence: Synthetic oligonucleotide
  Sense strand starting at position 2100 of SEQ ID NO: 318580
auggaaucuuggguguaac

SEQ ID NO: 573324 - RNA, 19 nt, Artificial Sequence
  Description of Artificial Sequence: Synthetic oligonucleotide
  Antisense strand to SEQ ID NO: 573323
guuacacccaagauuccau

SEQ ID NO: 573325 - RNA, 19 nt, Artificial Sequence
  Description of Artificial Sequence: Synthetic oligonucleotide
  Sense strand starting at position 2101 of SEQ ID NO: 318580
uggaaucuuggguguaacu

SEQ ID NO: 573326 - RNA, 19 nt, Artificial Sequence
  Description of Artificial Sequence: Synthetic oligonucleotide
  Antisense strand to SEQ ID NO: 573325
aguuacacccaagauucca

SEQ ID NO: 573327 - RNA, 19 nt, Artificial Sequence
  Description of Artificial Sequence: Synthetic oligonucleotide
  Sense strand starting at position 2188 of SEQ ID NO: 318580
acugcauuagaagaagcau

SEQ ID NO: 573328 - RNA, 19 nt, Artificial Sequence
  Description of Artificial Sequence: Synthetic oligonucleotide
  Antisense strand to SEQ ID NO: 573327
augcuucuucuaaugcagu

SEQ ID NO: 573329 - RNA, 19 nt, Artificial Sequence
  Description of Artificial Sequence: Synthetic oligonucleotide
  Sense strand starting at position 3044 of SEQ ID NO: 318580
augggaaauugcuuaaguc

SEQ ID NO: 573330 - RNA, 19 nt, Artificial Sequence
  Description of Artificial Sequence: Synthetic oligonucleotide
  Antisense strand to SEQ ID NO: 573329
gacuuaagcaauuucccau

SEQ ID NO: 573331 - RNA, 19 nt, Artificial Sequence
  Description of Artificial Sequence: Synthetic oligonucleotide
  Sense strand starting at position 3045 of SEQ ID NO: 318580
ugggaaauugcuuaaguca

SEQ ID NO: 573332 - RNA, 19 nt, Artificial Sequence
  Description of Artificial Sequence: Synthetic oligonucleotide
  Antisense strand to SEQ ID NO: 573331
ugacuuaagcaauuuccca

SEQ ID NO: 573333 - RNA, 19 nt, Artificial Sequence
  Description of Artificial Sequence: Synthetic oligonucleotide
  Sense strand starting at position 3048 of SEQ ID NO: 318580
gaaauugcuuaagucauga

SEQ ID NO: 573334 - RNA, 19 nt, Artificial Sequence
  Description of Artificial Sequence: Synthetic oligonucleotide
  Antisense strand to SEQ ID NO: 573333
ucaugacuuaagcaauuuc

SEQ ID NO: 573335 - RNA, 19 nt, Artificial Sequence
  Description of Artificial Sequence: Synthetic oligonucleotide
  Sense strand starting at position 3101 of SEQ ID NO: 318580
ugugaucuuuaaguauguu

SEQ ID NO: 573336 - RNA, 19 nt, Artificial Sequence
  Description of Artificial Sequence: Synthetic oligonucleotide
  Antisense strand to SEQ ID NO: 573335
aacauacuuaaagaucaca

SEQ ID NO: 573337 - RNA, 19 nt, Artificial Sequence
  Description of Artificial Sequence: Synthetic oligonucleotide
  Sense strand starting at position 3102 of SEQ ID NO: 318580
gugaucuuuaaguauguuu

SEQ ID NO: 573338 - RNA, 19 nt, Artificial Sequence
  Description of Artificial Sequence: Synthetic oligonucleotide
  Antisense strand to SEQ ID NO: 573337
aaacauacuuaaagaucac

SEQ ID NO: 573339 - RNA, 19 nt, Artificial Sequence
  Description of Artificial Sequence: Synthetic oligonucleotide
  Sense strand starting at position 3262 of SEQ ID NO: 318580
cuccuucugugacuagaau

SEQ ID NO: 573340 - RNA, 19 nt, Artificial Sequence
  Description of Artificial Sequence: Synthetic oligonucleotide
  Antisense strand to SEQ ID NO: 573339
auucuagucacagaaggag

SEQ ID NO: 573341 - RNA, 19 nt, Artificial Sequence
  Description of Artificial Sequence: Synthetic oligonucleotide
  Sense strand starting at position 3280 of SEQ ID NO: 318580
uguacagaauuagucuaau

SEQ ID NO: 573342 - RNA, 19 nt, Artificial Sequence
  Description of Artificial Sequence: Synthetic oligonucleotide
  Antisense strand to SEQ ID NO: 573341
auuagacuaauucuguaca

SEQ ID NO: 573343 - RNA, 19 nt, Artificial Sequence
  Description of Artificial Sequence: Synthetic oligonucleotide
  Sense strand starting at position 3359 of SEQ ID NO: 318580
ucaacauaacagugguagu

SEQ ID NO: 573344 - RNA, 19 nt, Artificial Sequence
  Description of Artificial Sequence: Synthetic oligonucleotide
  Antisense strand to SEQ ID NO: 573343
acuaccacuguuauguuga

SEQ ID NO: 573345 - RNA, 19 nt, Artificial Sequence
  Description of Artificial Sequence: Synthetic oligonucleotide
  Sense strand starting at position 3366 of SEQ ID NO: 318580
aacagugguagucgaucau

SEQ ID NO: 573346 - RNA, 19 nt, Artificial Sequence
  Description of Artificial Sequence: Synthetic oligonucleotide
  Antisense strand to SEQ ID NO: 573345
augaucgacuaccacuguu

SEQ ID NO: 573347 - RNA, 19 nt, Artificial Sequence
  Description of Artificial Sequence: Synthetic oligonucleotide
  Sense strand starting at position 3717 of SEQ ID NO: 318580
aaguauuggcucuggauag

SEQ ID NO: 573348 - RNA, 19 nt, Artificial Sequence
  Description of Artificial Sequence: Synthetic oligonucleotide
  Antisense strand to SEQ ID NO: 573347
cuauccagagccaauacuu

SEQ ID NO: 573349 - RNA, 19 nt, Artificial Sequence
  Description of Artificial Sequence: Synthetic oligonucleotide
  Sense strand starting at position 3789 of SEQ ID NO: 318580
ggucccuaaugauugaauu

SEQ ID NO: 573350 - RNA, 19 nt, Artificial Sequence
  Description of Artificial Sequence: Synthetic oligonucleotide
  Antisense strand to SEQ ID NO: 573349
aauucaaucauuagggacc

SEQ ID NO: 573351 - RNA, 19 nt, Artificial Sequence
  Description of Artificial Sequence: Synthetic oligonucleotide
  Sense strand starting at position 3790 of SEQ ID NO: 318580
gucccuaaugauugaauua

SEQ ID NO: 573352 - RNA, 19 nt, Artificial Sequence
  Description of Artificial Sequence: Synthetic oligonucleotide
  Antisense strand to SEQ ID NO: 573351
uaauucaaucauuagggac

SEQ ID NO: 573353 - RNA, 19 nt, Artificial Sequence
  Description of Artificial Sequence: Synthetic oligonucleotide
  Sense strand starting at position 3821 of SEQ ID NO: 318580
gguuucugaggccauauga

SEQ ID NO: 573354 - RNA, 19 nt, Artificial Sequence
  Description of Artificial Sequence: Synthetic oligonucleotide
  Antisense strand to SEQ ID NO: 573353
ucauauggccucagaaacc

SEQ ID NO: 573355 - RNA, 19 nt, Artificial Sequence
  Description of Artificial Sequence: Synthetic oligonucleotide
  Sense strand starting at position 78 of SEQ ID NO: 318581
cuguucugggugggaauaa

SEQ ID NO: 573356 - RNA, 19 nt, Artificial Sequence
  Description of Artificial Sequence: Synthetic oligonucleotide
  Antisense strand to SEQ ID NO: 573355
uuauucccacccagaacag

SEQ ID NO: 573357 - RNA, 19 nt, Artificial Sequence
  Description of Artificial Sequence: Synthetic oligonucleotide
  Sense strand starting at position 408 of SEQ ID NO: 318581
gaagucccagcucagauau

SEQ ID NO: 573358 - RNA, 19 nt, Artificial Sequence
  Description of Artificial Sequence: Synthetic oligonucleotide
  Antisense strand to SEQ ID NO: 573357
auaucugagcugggacuuc

SEQ ID NO: 573359 - RNA, 19 nt, Artificial Sequence
  Description of Artificial Sequence: Synthetic oligonucleotide
  Sense strand starting at position 460 of SEQ ID NO: 318581
guguuaucacuaugacaaa

SEQ ID NO: 573360 - RNA, 19 nt, Artificial Sequence
  Description of Artificial Sequence: Synthetic oligonucleotide
  Antisense strand to SEQ ID NO: 573359
uuugucauagugauaacac

SEQ ID NO: 573361 - RNA, 19 nt, Artificial Sequence
  Description of Artificial Sequence: Synthetic oligonucleotide
  Sense strand starting at position 673 of SEQ ID NO: 318581
aagauaaaugcugguaagu

SEQ ID NO: 573362 - RNA, 19 nt, Artificial Sequence
  Description of Artificial Sequence: Synthetic oligonucleotide
  Antisense strand to SEQ ID NO: 573361
acuuaccagcauuuaucuu

SEQ ID NO: 573363 - RNA, 19 nt, Artificial Sequence
  Description of Artificial Sequence: Synthetic oligonucleotide
  Sense strand starting at position 711 of SEQ ID NO: 318581
ucuagagccugugcaauuu

SEQ ID NO: 573364 - RNA, 19 nt, Artificial Sequence
  Description of Artificial Sequence: Synthetic oligonucleotide
  Antisense strand to SEQ ID NO: 573363
aaauugcacaggcucuaga

SEQ ID NO: 573365 - RNA, 19 nt, Artificial Sequence
  Description of Artificial Sequence: Synthetic oligonucleotide
  Sense strand starting at position 867 of SEQ ID NO: 318581
guaugucauauuuguuuag

SEQ ID NO: 573366 - RNA, 19 nt, Artificial Sequence
  Description of Artificial Sequence: Synthetic oligonucleotide
  Antisense strand to SEQ ID NO: 573365
cuaaacaaauaugacauac

SEQ ID NO: 573367 - RNA, 19 nt, Artificial Sequence
  Description of Artificial Sequence: Synthetic oligonucleotide
  Sense strand starting at position 884 of SEQ ID NO: 318581
aguugccuucuggagaaca

SEQ ID NO: 573368 - RNA, 19 nt, Artificial Sequence
  Description of Artificial Sequence: Synthetic oligonucleotide
  Antisense strand to SEQ ID NO: 573367
uguucuccagaaggcaacu

SEQ ID NO: 573369 - RNA, 19 nt, Artificial Sequence
  Description of Artificial Sequence: Synthetic oligonucleotide
  Sense strand starting at position 983 of SEQ ID NO: 318581
gacagucaauaguuauuga

SEQ ID NO: 573370 - RNA, 19 nt, Artificial Sequence
  Description of Artificial Sequence: Synthetic oligonucleotide
  Antisense strand to SEQ ID NO: 573369
ucaauaacuauugacuguc

SEQ ID NO: 573371 - RNA, 19 nt, Artificial Sequence
  Description of Artificial Sequence: Synthetic oligonucleotide
  Sense strand starting at position 986 of SEQ ID NO: 318581
agucaauaguuauugacau

SEQ ID NO: 573372 - RNA, 19 nt, Artificial Sequence
  Description of Artificial Sequence: Synthetic oligonucleotide
  Antisense strand to SEQ ID NO: 573371
augucaauaacuauugacu

SEQ ID NO: 573373 - RNA, 19 nt, Artificial Sequence
  Description of Artificial Sequence: Synthetic oligonucleotide
  Sense strand starting at position 1149 of SEQ ID NO: 318581
uuccuuuagcaaugagauu

SEQ ID NO: 573374 - RNA, 19 nt, Artificial Sequence
  Description of Artificial Sequence: Synthetic oligonucleotide
  Antisense strand to SEQ ID NO: 573373
aaucucauugcuaaaggaa

SEQ ID NO: 573375 - RNA, 19 nt, Artificial Sequence
  Description of Artificial Sequence: Synthetic oligonucleotide
  Sense strand starting at position 1217 of SEQ ID NO: 318581
uugaauggccaauggguua

SEQ ID NO: 573376 - RNA, 19 nt, Artificial Sequence
  Description of Artificial Sequence: Synthetic oligonucleotide
  Antisense strand to SEQ ID NO: 573375
uaacccauuggccauucaa

SEQ ID NO: 573377 - RNA, 19 nt, Artificial Sequence
  Description of Artificial Sequence: Synthetic oligonucleotide
  Sense strand starting at position 1280 of SEQ ID NO: 318581
auuuauugaucauggaaug

SEQ ID NO: 573378 - RNA, 19 nt, Artificial Sequence
  Description of Artificial Sequence: Synthetic oligonucleotide
  Antisense strand to SEQ ID NO: 573377
cauuccaugaucaauaaau

SEQ ID NO: 573379 - RNA, 19 nt, Artificial Sequence
  Description of Artificial Sequence: Synthetic oligonucleotide
  Sense strand starting at position 1281 of SEQ ID NO: 318581
uuuauugaucauggaaugu

SEQ ID NO: 573380 - RNA, 19 nt, Artificial Sequence
  Description of Artificial Sequence: Synthetic oligonucleotide
  Antisense strand to SEQ ID NO: 573379
acauuccaugaucaauaaa

SEQ ID NO: 573381 - RNA, 19 nt, Artificial Sequence
  Description of Artificial Sequence: Synthetic oligonucleotide
  Sense strand starting at position 1379 of SEQ ID NO: 318581
ccugaaggaucaucucuga

SEQ ID NO: 573382 - RNA, 19 nt, Artificial Sequence
  Description of Artificial Sequence: Synthetic oligonucleotide
  Antisense strand to SEQ ID NO: 573381
ucagagaugauccuucagg

SEQ ID NO: 573383 - RNA, 19 nt, Artificial Sequence
  Description of Artificial Sequence: Synthetic oligonucleotide
  Sense strand starting at position 1432 of SEQ ID NO: 318581
aauugaaugucuuuaugug

SEQ ID NO: 573384 - RNA, 19 nt, Artificial Sequence
  Description of Artificial Sequence: Synthetic oligonucleotide
  Antisense strand to SEQ ID NO: 573383
cacauaaagacauucaauu

SEQ ID NO: 573385 - RNA, 19 nt, Artificial Sequence
  Description of Artificial Sequence: Synthetic oligonucleotide
  Sense strand starting at position 1441 of SEQ ID NO: 318581
ucuuuaugugguuggaaac

SEQ ID NO: 573386 - RNA, 19 nt, Artificial Sequence
  Description of Artificial Sequence: Synthetic oligonucleotide
  Antisense strand to SEQ ID NO: 573385
guuuccaaccacauaaaga

SEQ ID NO: 573387 - RNA, 19 nt, Artificial Sequence
  Description of Artificial Sequence: Synthetic oligonucleotide
  Sense strand starting at position 1442 of SEQ ID NO: 318581
cuuuaugugguuggaaaca

SEQ ID NO: 573388 - RNA, 19 nt, Artificial Sequence
  Description of Artificial Sequence: Synthetic oligonucleotide
  Antisense strand to SEQ ID NO: 573387
uguuuccaaccacauaaag

SEQ ID NO: 573389 - RNA, 19 nt, Artificial Sequence
  Description of Artificial Sequence: Synthetic oligonucleotide
  Sense strand starting at position 1540 of SEQ ID NO: 318581
ccaaacugauuugggaaga

SEQ ID NO: 573390 - RNA, 19 nt, Artificial Sequence
  Description of Artificial Sequence: Synthetic oligonucleotide
  Antisense strand to SEQ ID NO: 573389
ucuucccaaaucaguuugg

SEQ ID NO: 573391 - RNA, 19 nt, Artificial Sequence
  Description of Artificial Sequence: Synthetic oligonucleotide
  Sense strand starting at position 1574 of SEQ ID NO: 318581
guaucuuugcacuaagaaa

SEQ ID NO: 573392 - RNA, 19 nt, Artificial Sequence
  Description of Artificial Sequence: Synthetic oligonucleotide
  Antisense strand to SEQ ID NO: 573391
uuucuuagugcaaagauac

SEQ ID NO: 573393 - RNA, 19 nt, Artificial Sequence
  Description of Artificial Sequence: Synthetic oligonucleotide
  Sense strand starting at position 1643 of SEQ ID NO: 318581
auggaagacuuacagagaa

SEQ ID NO: 573394 - RNA, 19 nt, Artificial Sequence
  Description of Artificial Sequence: Synthetic oligonucleotide
  Antisense strand to SEQ ID NO: 573393
uucucuguaagucuuccau

SEQ ID NO: 573395 - RNA, 19 nt, Artificial Sequence
  Description of Artificial Sequence: Synthetic oligonucleotide
  Sense strand starting at position 2242 of SEQ ID NO: 318581
gacuaaguaugagcuucuu

SEQ ID NO: 573396 - RNA, 19 nt, Artificial Sequence
  Description of Artificial Sequence: Synthetic oligonucleotide
  Antisense strand to SEQ ID NO: 573395
aagaagcucauacuuaguc

SEQ ID NO: 573397 - RNA, 19 nt, Artificial Sequence
  Description of Artificial Sequence: Synthetic oligonucleotide
  Sense strand starting at position 2255 of SEQ ID NO: 318581
cuucuugacuuaguuauga

SEQ ID NO: 573398 - RNA, 19 nt, Artificial Sequence
  Description of Artificial Sequence: Synthetic oligonucleotide
  Antisense strand to SEQ ID NO: 573397
ucauaacuaagucaagaag

SEQ ID NO: 573399 - RNA, 19 nt, Artificial Sequence
  Description of Artificial Sequence: Synthetic oligonucleotide
  Sense strand starting at position 2500 of SEQ ID NO: 318581
cuguauaaucuuggauaag

SEQ ID NO: 573400 - RNA, 19 nt, Artificial Sequence
  Description of Artificial Sequence: Synthetic oligonucleotide
  Antisense strand to SEQ ID NO: 573399
cuuauccaagauuauacag

SEQ ID NO: 573401 - RNA, 19 nt, Artificial Sequence
  Description of Artificial Sequence: Synthetic oligonucleotide
  Sense strand starting at position 2557 of SEQ ID NO: 318581
ugguuaugucgugauaaca

SEQ ID NO: 573402 - RNA, 19 nt, Artificial Sequence
  Description of Artificial Sequence: Synthetic oligonucleotide
  Antisense strand to SEQ ID NO: 573401
uguuaucacgacauaacca

SEQ ID NO: 573403 - RNA, 19 nt, Artificial Sequence
  Description of Artificial Sequence: Synthetic oligonucleotide
  Sense strand starting at position 2686 of SEQ ID NO: 318581
ugggcagagucaucacuau

SEQ ID NO: 573404 - RNA, 19 nt, Artificial Sequence
  Description of Artificial Sequence: Synthetic oligonucleotide
  Antisense strand to SEQ ID NO: 573403
auagugaugacucugccca

SEQ ID NO: 573405 - RNA, 19 nt, Artificial Sequence
  Description of Artificial Sequence: Synthetic oligonucleotide
  Sense strand starting at position 2704 of SEQ ID NO: 318581
uuuggaacacuguagucaa

SEQ ID NO: 573406 - RNA, 19 nt, Artificial Sequence
  Description of Artificial Sequence: Synthetic oligonucleotide
  Antisense strand to SEQ ID NO: 573405
uugacuacaguguuccaaa

SEQ ID NO: 573407 - RNA, 19 nt, Artificial Sequence
  Description of Artificial Sequence: Synthetic oligonucleotide
  Sense strand starting at position 2707 of SEQ ID NO: 318581
ggaacacuguagucaaggu

SEQ ID NO: 573408 - RNA, 19 nt, Artificial Sequence
  Description of Artificial Sequence: Synthetic oligonucleotide
  Antisense strand to SEQ ID NO: 573407
accuugacuacaguguucc

SEQ ID NO: 573409 - RNA, 19 nt, Artificial Sequence
  Description of Artificial Sequence: Synthetic oligonucleotide
  Sense strand starting at position 3277 of SEQ ID NO: 318581
gaacuagaauaguuggcaa

SEQ ID NO: 573410 - RNA, 19 nt, Artificial Sequence
  Description of Artificial Sequence: Synthetic oligonucleotide
  Antisense strand to SEQ ID NO: 573409
uugccaacuauucuaguuc

SEQ ID NO: 573411 - RNA, 19 nt, Artificial Sequence
  Description of Artificial Sequence: Synthetic oligonucleotide
  Sense strand starting at position 3280 of SEQ ID NO: 318581
cuagaauaguuggcaaaca

SEQ ID NO: 573412 - RNA, 19 nt, Artificial Sequence
  Description of Artificial Sequence: Synthetic oligonucleotide
  Antisense strand to SEQ ID NO: 573411
uguuugccaacuauucuag

SEQ ID NO: 573413 - RNA, 19 nt, Artificial Sequence
  Description of Artificial Sequence: Synthetic oligonucleotide
  Sense strand starting at position 3346 of SEQ ID NO: 318581
uguuguuagccacaauaga

SEQ ID NO: 573414 - RNA, 19 nt, Artificial Sequence
  Description of Artificial Sequence: Synthetic oligonucleotide
  Antisense strand to SEQ ID NO: 573413
ucuauuguggcuaacaaca

SEQ ID NO: 573415 - RNA, 19 nt, Artificial Sequence
  Description of Artificial Sequence: Synthetic oligonucleotide
  Sense strand starting at position 3469 of SEQ ID NO: 318581
cuaugaguugcugacauua

SEQ ID NO: 573416 - RNA, 19 nt, Artificial Sequence
  Description of Artificial Sequence: Synthetic oligonucleotide
  Antisense strand to SEQ ID NO: 573415
uaaugucagcaacucauag

SEQ ID NO: 573417 - RNA, 19 nt, Artificial Sequence
  Description of Artificial Sequence: Synthetic oligonucleotide
  Sense strand starting at position 3479 of SEQ ID NO: 318581
cugacauuagauuguaaac

SEQ ID NO: 573418 - RNA, 19 nt, Artificial Sequence
  Description of Artificial Sequence: Synthetic oligonucleotide
  Antisense strand to SEQ ID NO: 573417
guuuacaaucuaaugucag

SEQ ID NO: 573419 - RNA, 19 nt, Artificial Sequence
  Description of Artificial Sequence: Synthetic oligonucleotide
  Sense strand starting at position 3488 of SEQ ID NO: 318581
gauuguaaacuguauuguc

SEQ ID NO: 573420 - RNA, 19 nt, Artificial Sequence
  Description of Artificial Sequence: Synthetic oligonucleotide
  Antisense strand to SEQ ID NO: 573419
gacaauacaguuuacaauc

SEQ ID NO: 573421 - RNA, 19 nt, Artificial Sequence
  Description of Artificial Sequence: Synthetic oligonucleotide
  Sense strand starting at position 3537 of SEQ ID NO: 318581
gcuuauugaguuuaaggac

SEQ ID NO: 573422 - RNA, 19 nt, Artificial Sequence
  Description of Artificial Sequence: Synthetic oligonucleotide
  Antisense strand to SEQ ID NO: 573421
guccuuaaacucaauaagc

SEQ ID NO: 573423 - RNA, 19 nt, Artificial Sequence
  Description of Artificial Sequence: Synthetic oligonucleotide
  Sense strand starting at position 3701 of SEQ ID NO: 318581
uccuauaucuguuugggag

SEQ ID NO: 573424 - RNA, 19 nt, Artificial Sequence
  Description of Artificial Sequence: Synthetic oligonucleotide
  Antisense strand to SEQ ID NO: 573423
cucccaaacagauauagga

SEQ ID NO: 573425 - RNA, 19 nt, Artificial Sequence
  Description of Artificial Sequence: Synthetic oligonucleotide
  Sense strand starting at position 3709 of SEQ ID NO: 318581
cuguuugggaggcaaugua

SEQ ID NO: 573426 - RNA, 19 nt, Artificial Sequence
  Description of Artificial Sequence: Synthetic oligonucleotide
  Antisense strand to SEQ ID NO: 573425
uacauugccucccaaacag

SEQ ID NO: 573427 - RNA, 19 nt, Artificial Sequence
  Description of Artificial Sequence: Synthetic oligonucleotide
  Sense strand starting at position 3717 of SEQ ID NO: 318581
gaggcaauguaaucuagua

SEQ ID NO: 573428 - RNA, 19 nt, Artificial Sequence
  Description of Artificial Sequence: Synthetic oligonucleotide
  Antisense strand to SEQ ID NO: 573427
uacuagauuacauugccuc

SEQ ID NO: 573429 - RNA, 19 nt, Artificial Sequence
  Description of Artificial Sequence: Synthetic oligonucleotide
  Sense strand starting at position 3719 of SEQ ID NO: 318581
ggcaauguaaucuaguagu

SEQ ID NO: 573430 - RNA, 19 nt, Artificial Sequence
  Description of Artificial Sequence: Synthetic oligonucleotide
  Antisense strand to SEQ ID NO: 573429
acuacuagauuacauugcc

SEQ ID NO: 573431 - RNA, 19 nt, Artificial Sequence
  Description of Artificial Sequence: Synthetic oligonucleotide
  Sense strand starting at position 3725 of SEQ ID NO: 318581
guaaucuaguaguuaagag

SEQ ID NO: 573432 - RNA, 19 nt, Artificial Sequence
  Description of Artificial Sequence: Synthetic oligonucleotide
  Antisense strand to SEQ ID NO: 573431
cucuuaacuacuagauuac

SEQ ID NO: 573433 - RNA, 19 nt, Artificial Sequence
  Description of Artificial Sequence: Synthetic oligonucleotide
  Sense strand starting at position 3752 of SEQ ID NO: 318581
uugaguagaucccauuuag

SEQ ID NO: 573434 - RNA, 19 nt, Artificial Sequence
  Description of Artificial Sequence: Synthetic oligonucleotide
  Antisense strand to SEQ ID NO: 573433
cuaaaugggaucuacucaa

SEQ ID NO: 573435 - RNA, 19 nt, Artificial Sequence
  Description of Artificial Sequence: Synthetic oligonucleotide
  Sense strand starting at position 19 of SEQ ID NO: 318582
gucugagaggucuaggcau

SEQ ID NO: 573436 - RNA, 19 nt, Artificial Sequence
  Description of Artificial Sequence: Synthetic oligonucleotide
  Antisense strand to SEQ ID NO: 573435
augccuagaccucucagac

SEQ ID NO: 573437 - RNA, 19 nt, Artificial Sequence
  Description of Artificial Sequence: Synthetic oligonucleotide
  Sense strand starting at position 21 of SEQ ID NO: 318582
cugagaggucuaggcauga

SEQ ID NO: 573438 - RNA, 19 nt, Artificial Sequence
  Description of Artificial Sequence: Synthetic oligonucleotide
  Antisense strand to SEQ ID NO: 573437
ucaugccuagaccucucag

SEQ ID NO: 573439 - RNA, 19 nt, Artificial Sequence
  Description of Artificial Sequence: Synthetic oligonucleotide
  Sense strand starting at position 44 of SEQ ID NO: 318582
uuauuaauuguggacuauc

SEQ ID NO: 573440 - RNA, 19 nt, Artificial Sequence
  Description of Artificial Sequence: Synthetic oligonucleotide
  Antisense strand to SEQ ID NO: 573439
gauaguccacaauuaauaa

SEQ ID NO: 573441 - RNA, 19 nt, Artificial Sequence
  Description of Artificial Sequence: Synthetic oligonucleotide
  Sense strand starting at position 53 of SEQ ID NO: 318582
guggacuaucucuacuuga

SEQ ID NO: 573442 - RNA, 19 nt, Artificial Sequence
  Description of Artificial Sequence: Synthetic oligonucleotide
  Antisense strand to SEQ ID NO: 573441
ucaaguagagauaguccac

SEQ ID NO: 573443 - RNA, 19 nt, Artificial Sequence
  Description of Artificial Sequence: Synthetic oligonucleotide
  Sense strand starting at position 66 of SEQ ID NO: 318582
acuugaauagcuuggaaua

SEQ ID NO: 573444 - RNA, 19 nt, Artificial Sequence
  Description of Artificial Sequence: Synthetic oligonucleotide
  Antisense strand to SEQ ID NO: 573443
uauuccaagcuauucaagu

SEQ ID NO: 573445 - RNA, 19 nt, Artificial Sequence
  Description of Artificial Sequence: Synthetic oligonucleotide
  Sense strand starting at position 67 of SEQ ID NO: 318582
cuugaauagcuuggaauau

SEQ ID NO: 573446 - RNA, 19 nt, Artificial Sequence
  Description of Artificial Sequence: Synthetic oligonucleotide
  Antisense strand to SEQ ID NO: 573445
auauuccaagcuauucaag

SEQ ID NO: 573447 - RNA, 19 nt, Artificial Sequence
  Description of Artificial Sequence: Synthetic oligonucleotide
  Sense strand starting at position 204 of SEQ ID NO: 318582
ugcaaagauagguaugcau

SEQ ID NO: 573448 - RNA, 19 nt, Artificial Sequence
  Description of Artificial Sequence: Synthetic oligonucleotide
  Antisense strand to SEQ ID NO: 573447
augcauaccuaucuuugca

SEQ ID NO: 573449 - RNA, 19 nt, Artificial Sequence
  Description of Artificial Sequence: Synthetic oligonucleotide
  Sense strand starting at position 277 of SEQ ID NO: 318582
gccugaugauaaguauaug

SEQ ID NO: 573450 - RNA, 19 nt, Artificial Sequence
  Description of Artificial Sequence: Synthetic oligonucleotide
  Antisense strand to SEQ ID NO: 573449
cauauacuuaucaucaggc

SEQ ID NO: 573451 - RNA, 19 nt, Artificial Sequence
  Description of Artificial Sequence: Synthetic oligonucleotide
  Sense strand starting at position 280 of SEQ ID NO: 318582
ugaugauaaguauaugcca

SEQ ID NO: 573452 - RNA, 19 nt, Artificial Sequence
  Description of Artificial Sequence: Synthetic oligonucleotide
  Antisense strand to SEQ ID NO: 573451
uggcauauacuuaucauca

SEQ ID NO: 573453 - RNA, 19 nt, Artificial Sequence
  Description of Artificial Sequence: Synthetic oligonucleotide
  Sense strand starting at position 342 of SEQ ID NO: 318582
gacagaguuuaugugauac

SEQ ID NO: 573454 - RNA, 19 nt, Artificial Sequence
  Description of Artificial Sequence: Synthetic oligonucleotide
  Antisense strand to SEQ ID NO: 573453
guaucacauaaacucuguc

SEQ ID NO: 573455 - RNA, 19 nt, Artificial Sequence
  Description of Artificial Sequence: Synthetic oligonucleotide
  Sense strand starting at position 356 of SEQ ID NO: 318582
gauacucaacaaugugaug

SEQ ID NO: 573456 - RNA, 19 nt, Artificial Sequence
  Description of Artificial Sequence: Synthetic oligonucleotide
  Antisense strand to SEQ ID NO: 573455
caucacauuguugaguauc

SEQ ID NO: 573457 - RNA, 19 nt, Artificial Sequence
  Description of Artificial Sequence: Synthetic oligonucleotide
  Sense strand starting at position 565 of SEQ ID NO: 318582
guuaauaagcaacagaguu

SEQ ID NO: 573458 - RNA, 19 nt, Artificial Sequence
  Description of Artificial Sequence: Synthetic oligonucleotide
  Antisense strand to SEQ ID NO: 573457
aacucuguugcuuauuaac

SEQ ID NO: 573459 - RNA, 19 nt, Artificial Sequence
  Description of Artificial Sequence: Synthetic oligonucleotide
  Sense strand starting at position 577 of SEQ ID NO: 318582
cagaguuuagaguggaacu

SEQ ID NO: 573460 - RNA, 19 nt, Artificial Sequence
  Description of Artificial Sequence: Synthetic oligonucleotide
  Antisense strand to SEQ ID NO: 573459
aguuccacucuaaacucug

SEQ ID NO: 573461 - RNA, 19 nt, Artificial Sequence
  Description of Artificial Sequence: Synthetic oligonucleotide
  Sense strand starting at position 657 of SEQ ID NO: 318582
acuguaaccugagucauga

SEQ ID NO: 573462 - RNA, 19 nt, Artificial Sequence
  Description of Artificial Sequence: Synthetic oligonucleotide
  Antisense strand to SEQ ID NO: 573461
ucaugacucagguuacagu

SEQ ID NO: 573463 - RNA, 19 nt, Artificial Sequence
  Description of Artificial Sequence: Synthetic oligonucleotide
  Sense strand starting at position 718 of SEQ ID NO: 318582
caaagauaugugugaccca

SEQ ID NO: 573464 - RNA, 19 nt, Artificial Sequence
  Description of Artificial Sequence: Synthetic oligonucleotide
  Antisense strand to SEQ ID NO: 573463
ugggucacacauaucuuug

SEQ ID NO: 573465 - RNA, 19 nt, Artificial Sequence
  Description of Artificial Sequence: Synthetic oligonucleotide
  Sense strand starting at position 826 of SEQ ID NO: 318582
caagucuuggaauaauguu

SEQ ID NO: 573466 - RNA, 19 nt, Artificial Sequence
  Description of Artificial Sequence: Synthetic oligonucleotide
  Antisense strand to SEQ ID NO: 573465
aacauuauuccaagacuug

SEQ ID NO: 573467 - RNA, 19 nt, Artificial Sequence
  Description of Artificial Sequence: Synthetic oligonucleotide
  Sense strand starting at position 903 of SEQ ID NO: 318582
cuaaauuuguugcuagugu

SEQ ID NO: 573468 - RNA, 19 nt, Artificial Sequence
  Description of Artificial Sequence: Synthetic oligonucleotide
  Antisense strand to SEQ ID NO: 573467
acacuagcaacaaauuuag

SEQ ID NO: 573469 - RNA, 19 nt, Artificial Sequence
  Description of Artificial Sequence: Synthetic oligonucleotide
  Sense strand starting at position 950 of SEQ ID NO: 318582
uuagaaagaucugccuaca

SEQ ID NO: 573470 - RNA, 19 nt, Artificial Sequence
  Description of Artificial Sequence: Synthetic oligonucleotide
  Antisense strand to SEQ ID NO: 573469
uguaggcagaucuuucuaa

SEQ ID NO: 573471 - RNA, 19 nt, Artificial Sequence
  Description of Artificial Sequence: Synthetic oligonucleotide
  Sense strand starting at position 1207 of SEQ ID NO: 318582
uuugauuuaugcuuuagcu

SEQ ID NO: 573472 - RNA, 19 nt, Artificial Sequence
  Description of Artificial Sequence: Synthetic oligonucleotide
  Antisense strand to SEQ ID NO: 573471
agcuaaagcauaaaucaaa

SEQ ID NO: 573473 - RNA, 19 nt, Artificial Sequence
  Description of Artificial Sequence: Synthetic oligonucleotide
  Sense strand starting at position 1338 of SEQ ID NO: 318582
aguggaaucuagucaaaga

SEQ ID NO: 573474 - RNA, 19 nt, Artificial Sequence
  Description of Artificial Sequence: Synthetic oligonucleotide
  Antisense strand to SEQ ID NO: 573473
ucuuugacuagauuccacu

SEQ ID NO: 573475 - RNA, 19 nt, Artificial Sequence
  Description of Artificial Sequence: Synthetic oligonucleotide
  Sense strand starting at position 1368 of SEQ ID NO: 318582
ugccacgaugaaugagaau

SEQ ID NO: 573476 - RNA, 19 nt, Artificial Sequence
  Description of Artificial Sequence: Synthetic oligonucleotide
  Antisense strand to SEQ ID NO: 573475
auucucauucaucguggca

SEQ ID NO: 573477 - RNA, 19 nt, Artificial Sequence
  Description of Artificial Sequence: Synthetic oligonucleotide
  Sense strand starting at position 1482 of SEQ ID NO: 318582
guagaugacagauguugga

SEQ ID NO: 573478 - RNA, 19 nt, Artificial Sequence
  Description of Artificial Sequence: Synthetic oligonucleotide
  Antisense strand to SEQ ID NO: 573477
uccaacaucugucaucuac

SEQ ID NO: 573479 - RNA, 19 nt, Artificial Sequence
  Description of Artificial Sequence: Synthetic oligonucleotide
  Sense strand starting at position 1592 of SEQ ID NO: 318582
auaaaugaguucccuguaa

SEQ ID NO: 573480 - RNA, 19 nt, Artificial Sequence
  Description of Artificial Sequence: Synthetic oligonucleotide
  Antisense strand to SEQ ID NO: 573479
uuacagggaacucauuuau

SEQ ID NO: 573481 - RNA, 19 nt, Artificial Sequence
  Description of Artificial Sequence: Synthetic oligonucleotide
  Sense strand starting at position 1596 of SEQ ID NO: 318582
augaguucccuguaaaugg

SEQ ID NO: 573482 - RNA, 19 nt, Artificial Sequence
  Description of Artificial Sequence: Synthetic oligonucleotide
  Antisense strand to SEQ ID NO: 573481
ccauuuacagggaacucau

SEQ ID NO: 573483 - RNA, 19 nt, Artificial Sequence
  Description of Artificial Sequence: Synthetic oligonucleotide
  Sense strand starting at position 1604 of SEQ ID NO: 318582
ccuguaaauggugacauca

SEQ ID NO: 573484 - RNA, 19 nt, Artificial Sequence
  Description of Artificial Sequence: Synthetic oligonucleotide
  Antisense strand to SEQ ID NO: 573483
ugaugucaccauuuacagg

SEQ ID NO: 573485 - RNA, 19 nt, Artificial Sequence
  Description of Artificial Sequence: Synthetic oligonucleotide
  Sense strand starting at position 1639 of SEQ ID NO: 318582
ggaugauccucucccuaaa

SEQ ID NO: 573486 - RNA, 19 nt, Artificial Sequence
  Description of Artificial Sequence: Synthetic oligonucleotide
  Antisense strand to SEQ ID NO: 573485
uuuagggagaggaucaucc

SEQ ID NO: 573487 - RNA, 19 nt, Artificial Sequence
  Description of Artificial Sequence: Synthetic oligonucleotide
  Sense strand starting at position 1692 of SEQ ID NO: 318582
gacuuuagaugacuguuaa

SEQ ID NO: 573488 - RNA, 19 nt, Artificial Sequence
  Description of Artificial Sequence: Synthetic oligonucleotide
  Antisense strand to SEQ ID NO: 573487
uuaacagucaucuaaaguc

SEQ ID NO: 573489 - RNA, 19 nt, Artificial Sequence
  Description of Artificial Sequence: Synthetic oligonucleotide
  Sense strand starting at position 1693 of SEQ ID NO: 318582
acuuuagaugacuguuaac

SEQ ID NO: 573490 - RNA, 19 nt, Artificial Sequence
  Description of Artificial Sequence: Synthetic oligonucleotide
  Antisense strand to SEQ ID NO: 573489
guuaacagucaucuaaagu

SEQ ID NO: 573491 - RNA, 19 nt, Artificial Sequence
  Description of Artificial Sequence: Synthetic oligonucleotide
  Sense strand starting at position 1834 of SEQ ID NO: 318582
agaagacugcaugagcuau

SEQ ID NO: 573492 - RNA, 19 nt, Artificial Sequence
  Description of Artificial Sequence: Synthetic oligonucleotide
  Antisense strand to SEQ ID NO: 573491
auagcucaugcagucuucu

SEQ ID NO: 573493 - RNA, 19 nt, Artificial Sequence
  Description of Artificial Sequence: Synthetic oligonucleotide
  Sense strand starting at position 2131 of SEQ ID NO: 318582
uugugaaagacagguaauu

SEQ ID NO: 573494 - RNA, 19 nt, Artificial Sequence
  Description of Artificial Sequence: Synthetic oligonucleotide
  Antisense strand to SEQ ID NO: 573493
aauuaccugucuuucacaa

SEQ ID NO: 573495 - RNA, 19 nt, Artificial Sequence
  Description of Artificial Sequence: Synthetic oligonucleotide
  Sense strand starting at position 2486 of SEQ ID NO: 318582
auggaaguauuaguaucua

SEQ ID NO: 573496 - RNA, 19 nt, Artificial Sequence
  Description of Artificial Sequence: Synthetic oligonucleotide
  Antisense strand to SEQ ID NO: 573495
uagauacuaauacuuccau

SEQ ID NO: 573497 - RNA, 19 nt, Artificial Sequence
  Description of Artificial Sequence: Synthetic oligonucleotide
  Sense strand starting at position 2671 of SEQ ID NO: 318582
acaagcuauuuauccgcua

SEQ ID NO: 573498 - RNA, 19 nt, Artificial Sequence
  Description of Artificial Sequence: Synthetic oligonucleotide
  Antisense strand to SEQ ID NO: 573497
uagcggauaaauagcuugu

SEQ ID NO: 573499 - RNA, 19 nt, Artificial Sequence
  Description of Artificial Sequence: Synthetic oligonucleotide
  Sense strand starting at position 2674 of SEQ ID NO: 318582
agcuauuuauccgcuauaa

SEQ ID NO: 573500 - RNA, 19 nt, Artificial Sequence
  Description of Artificial Sequence: Synthetic oligonucleotide
  Antisense strand to SEQ ID NO: 573499
uuauagcggauaaauagcu

SEQ ID NO: 573501 - RNA, 19 nt, Artificial Sequence
  Description of Artificial Sequence: Synthetic oligonucleotide
  Sense strand starting at position 2676 of SEQ ID NO: 318582
cuauuuauccgcuauaagc

SEQ ID NO: 573502 - RNA, 19 nt, Artificial Sequence
  Description of Artificial Sequence: Synthetic oligonucleotide
  Antisense strand to SEQ ID NO: 573501
gcuuauagcggauaaauag

SEQ ID NO: 573503 - RNA, 19 nt, Artificial Sequence
  Description of Artificial Sequence: Synthetic oligonucleotide
  Sense strand starting at position 2809 of SEQ ID NO: 318582
ucucauguaguuugagaaa

SEQ ID NO: 573504 - RNA, 19 nt, Artificial Sequence
  Description of Artificial Sequence: Synthetic oligonucleotide
  Antisense strand to SEQ ID NO: 573503
uuucucaaacuacaugaga

SEQ ID NO: 573505 - RNA, 19 nt, Artificial Sequence
  Description of Artificial Sequence: Synthetic oligonucleotide
  Sense strand starting at position 3510 of SEQ ID NO: 318582
uguuguguccagaguugag

SEQ ID NO: 573506 - RNA, 19 nt, Artificial Sequence
  Description of Artificial Sequence: Synthetic oligonucleotide
  Antisense strand to SEQ ID NO: 573505
cucaacucuggacacaaca

SEQ ID NO: 573507 - RNA, 19 nt, Artificial Sequence
  Description of Artificial Sequence: Synthetic oligonucleotide
  Sense strand starting at position 3577 of SEQ ID NO: 318582
ggaaucacccugcaaaggu

SEQ ID NO: 573508 - RNA, 19 nt, Artificial Sequence
  Description of Artificial Sequence: Synthetic oligonucleotide
  Antisense strand to SEQ ID NO: 573507
accuuugcagggugauucc

SEQ ID NO: 573509 - RNA, 19 nt, Artificial Sequence
  Description of Artificial Sequence: Synthetic oligonucleotide
  Sense strand starting at position 3584 of SEQ ID NO: 318582
cccugcaaaggugaugaua

SEQ ID NO: 573510 - RNA, 19 nt, Artificial Sequence
  Description of Artificial Sequence: Synthetic oligonucleotide
  Antisense strand to SEQ ID NO: 573509
uaucaucaccuuugcaggg

SEQ ID NO: 573511 - RNA, 19 nt, Artificial Sequence
  Description of Artificial Sequence: Synthetic oligonucleotide
  Sense strand starting at position 3787 of SEQ ID NO: 318582
guaaguaguagucagggaa

SEQ ID NO: 573512 - RNA, 19 nt, Artificial Sequence
  Description of Artificial Sequence: Synthetic oligonucleotide
  Antisense strand to SEQ ID NO: 573511
uucccugacuacuacuuac

SEQ ID NO: 573513 - RNA, 19 nt, Artificial Sequence
  Description of Artificial Sequence: Synthetic oligonucleotide
  Sense strand starting at position 3790 of SEQ ID NO: 318582
aguaguagucagggaagag

SEQ ID NO: 573514 - RNA, 19 nt, Artificial Sequence
  Description of Artificial Sequence: Synthetic oligonucleotide
  Antisense strand to SEQ ID NO: 573513
cucuucccugacuacuacu

SEQ ID NO: 573515 - RNA, 19 nt, Artificial Sequence
  Description of Artificial Sequence: Synthetic oligonucleotide
  Sense strand starting at position 15 of SEQ ID NO: 318583
agugccuuugaacauuaaa

SEQ ID NO: 573516 - RNA, 19 nt, Artificial Sequence
  Description of Artificial Sequence: Synthetic oligonucleotide
  Antisense strand to SEQ ID NO: 573515
uuuaauguucaaaggcacu

SEQ ID NO: 573517 - RNA, 19 nt, Artificial Sequence
  Description of Artificial Sequence: Synthetic oligonucleotide
  Sense strand starting at position 18 of SEQ ID NO: 318583
gccuuugaacauuaaagcu

SEQ ID NO: 573518 - RNA, 19 nt, Artificial Sequence
  Description of Artificial Sequence: Synthetic oligonucleotide
  Antisense strand to SEQ ID NO: 573517
agcuuuaauguucaaaggc

SEQ ID NO: 573519 - RNA, 19 nt, Artificial Sequence
  Description of Artificial Sequence: Synthetic oligonucleotide
  Sense strand starting at position 50 of SEQ ID NO: 318583
cuguuaugccuugggcacu

SEQ ID NO: 573520 - RNA, 19 nt, Artificial Sequence
  Description of Artificial Sequence: Synthetic oligonucleotide
  Antisense strand to SEQ ID NO: 573519
agugcccaaggcauaacag

SEQ ID NO: 573521 - RNA, 19 nt, Artificial Sequence
  Description of Artificial Sequence: Synthetic oligonucleotide
  Sense strand starting at position 97 of SEQ ID NO: 318583
aggaauuccuaauguuaag

SEQ ID NO: 573522 - RNA, 19 nt, Artificial Sequence
  Description of Artificial Sequence: Synthetic oligonucleotide
  Antisense strand to SEQ ID NO: 573521
cuuaacauuaggaauuccu

SEQ ID NO: 573523 - RNA, 19 nt, Artificial Sequence
  Description of Artificial Sequence: Synthetic oligonucleotide
  Sense strand starting at position 219 of SEQ ID NO: 318583
augccaucugcuggaaaga

SEQ ID NO: 573524 - RNA, 19 nt, Artificial Sequence
  Description of Artificial Sequence: Synthetic oligonucleotide
  Antisense strand to SEQ ID NO: 573523
ucuuuccagcagauggcau

SEQ ID NO: 573525 - RNA, 19 nt, Artificial Sequence
  Description of Artificial Sequence: Synthetic oligonucleotide
  Sense strand starting at position 327 of SEQ ID NO: 318583
ucugcguguccgggaguaa

SEQ ID NO: 573526 - RNA, 19 nt, Artificial Sequence
  Description of Artificial Sequence: Synthetic oligonucleotide
  Antisense strand to SEQ ID NO: 573525
uuacucccggacacgcaga

SEQ ID NO: 573527 - RNA, 19 nt, Artificial Sequence
  Description of Artificial Sequence: Synthetic oligonucleotide
  Sense strand starting at position 330 of SEQ ID NO: 318583
gcguguccgggaguaacuu

SEQ ID NO: 573528 - RNA, 19 nt, Artificial Sequence
  Description of Artificial Sequence: Synthetic oligonucleotide
  Antisense strand to SEQ ID NO: 573527
aaguuacucccggacacgc

SEQ ID NO: 573529 - RNA, 19 nt, Artificial Sequence
  Description of Artificial Sequence: Synthetic oligonucleotide
  Sense strand starting at position 338 of SEQ ID NO: 318583
gggaguaacuuucuccacu

SEQ ID NO: 573530 - RNA, 19 nt, Artificial Sequence
  Description of Artificial Sequence: Synthetic oligonucleotide
  Antisense strand to SEQ ID NO: 573529
aguggagaaaguuacuccc

SEQ ID NO: 573531 - RNA, 19 nt, Artificial Sequence
  Description of Artificial Sequence: Synthetic oligonucleotide
  Sense strand starting at position 339 of SEQ ID NO: 318583
ggaguaacuuucuccacuc

SEQ ID NO: 573532 - RNA, 19 nt, Artificial Sequence
  Description of Artificial Sequence: Synthetic oligonucleotide
  Antisense strand to SEQ ID NO: 573531
gaguggagaaaguuacucc

SEQ ID NO: 573533 - RNA, 19 nt, Artificial Sequence
  Description of Artificial Sequence: Synthetic oligonucleotide
  Sense strand starting at position 445 of SEQ ID NO: 318583
ucaagauuccgagggucaa

SEQ ID NO: 573534 - RNA, 19 nt, Artificial Sequence
  Description of Artificial Sequence: Synthetic oligonucleotide
  Antisense strand to SEQ ID NO: 573533
uugacccucggaaucuuga

SEQ ID NO: 573535 - RNA, 19 nt, Artificial Sequence
  Description of Artificial Sequence: Synthetic oligonucleotide
  Sense strand starting at position 446 of SEQ ID NO: 318583
caagauuccgagggucaaa

SEQ ID NO: 573536 - RNA, 19 nt, Artificial Sequence
  Description of Artificial Sequence: Synthetic oligonucleotide
  Antisense strand to SEQ ID NO: 573535
uuugacccucggaaucuug

SEQ ID NO: 573537 - RNA, 19 nt, Artificial Sequence
  Description of Artificial Sequence: Synthetic oligonucleotide
  Sense strand starting at position 609 of SEQ ID NO: 318583
uagggauucuccugacaca

SEQ ID NO: 573538 - RNA, 19 nt, Artificial Sequence
  Description of Artificial Sequence: Synthetic oligonucleotide
  Antisense strand to SEQ ID NO: 573537
ugugucaggagaaucccua

SEQ ID NO: 573539 - RNA, 19 nt, Artificial Sequence
  Description of Artificial Sequence: Synthetic oligonucleotide
  Sense strand starting at position 744 of SEQ ID NO: 318583
acuggugaucugugcugua

SEQ ID NO: 573540 - RNA, 19 nt, Artificial Sequence
  Description of Artificial Sequence: Synthetic oligonucleotide
  Antisense strand to SEQ ID NO: 573539
uacagcacagaucaccagu

SEQ ID NO: 573541 - RNA, 19 nt, Artificial Sequence
  Description of Artificial Sequence: Synthetic oligonucleotide
  Sense strand starting at position 838 of SEQ ID NO: 318583
cuucgaaguucucuuuaaa

SEQ ID NO: 573542 - RNA, 19 nt, Artificial Sequence
  Description of Artificial Sequence: Synthetic oligonucleotide
  Antisense strand to SEQ ID NO: 573541
uuuaaagagaacuucgaag

SEQ ID NO: 573543 - RNA, 19 nt, Artificial Sequence
  Description of Artificial Sequence: Synthetic oligonucleotide
  Sense strand starting at position 841 of SEQ ID NO: 318583
cgaaguucucuuuaaaguu

SEQ ID NO: 573544 - RNA, 19 nt, Artificial Sequence
  Description of Artificial Sequence: Synthetic oligonucleotide
  Antisense strand to SEQ ID NO: 573543
aacuuuaaagagaacuucg

SEQ ID NO: 573545 - RNA, 19 nt, Artificial Sequence
  Description of Artificial Sequence: Synthetic oligonucleotide
  Sense strand starting at position 1100 of SEQ ID NO: 318583
acuggucauugucuaggaa

SEQ ID NO: 573546 - RNA, 19 nt, Artificial Sequence
  Description of Artificial Sequence: Synthetic oligonucleotide
  Antisense strand to SEQ ID NO: 573545
uuccuagacaaugaccagu

SEQ ID NO: 573547 - RNA, 19 nt, Artificial Sequence
  Description of Artificial Sequence: Synthetic oligonucleotide
  Sense strand starting at position 1101 of SEQ ID NO: 318583
cuggucauugucuaggaaa

SEQ ID NO: 573548 - RNA, 19 nt, Artificial Sequence
  Description of Artificial Sequence: Synthetic oligonucleotide
  Antisense strand to SEQ ID NO: 573547
uuuccuagacaaugaccag

SEQ ID NO: 573549 - RNA, 19 nt, Artificial Sequence
  Description of Artificial Sequence: Synthetic oligonucleotide
  Sense strand starting at position 1103 of SEQ ID NO: 318583
ggucauugucuaggaaauu

SEQ ID NO: 573550 - RNA, 19 nt, Artificial Sequence
  Description of Artificial Sequence: Synthetic oligonucleotide
  Antisense strand to SEQ ID NO: 573549
aauuuccuagacaaugacc

SEQ ID NO: 573551 - RNA, 19 nt, Artificial Sequence
  Description of Artificial Sequence: Synthetic oligonucleotide
  Sense strand starting at position 1104 of SEQ ID NO: 318583
gucauugucuaggaaauug

SEQ ID NO: 573552 - RNA, 19 nt, Artificial Sequence
  Description of Artificial Sequence: Synthetic oligonucleotide
  Antisense strand to SEQ ID NO: 573551
caauuuccuagacaaugac

SEQ ID NO: 573553 - RNA, 19 nt, Artificial Sequence
  Description of Artificial Sequence: Synthetic oligonucleotide
  Sense strand starting at position 1408 of SEQ ID NO: 318583
gggacucaucuacgaacga

SEQ ID NO: 573554 - RNA, 19 nt, Artificial Sequence
  Description of Artificial Sequence: Synthetic oligonucleotide
  Antisense strand to SEQ ID NO: 573553
ucguucguagaugaguccc

SEQ ID NO: 573555 - RNA, 19 nt, Artificial Sequence
  Description of Artificial Sequence: Synthetic oligonucleotide
  Sense strand starting at position 1698 of SEQ ID NO: 318583
agggaaaggucucccuuga

SEQ ID NO: 573556 - RNA, 19 nt, Artificial Sequence
  Description of Artificial Sequence: Synthetic oligonucleotide
  Antisense strand to SEQ ID NO: 573555
ucaagggagaccuuucccu

SEQ ID NO: 573557 - RNA, 19 nt, Artificial Sequence
  Description of Artificial Sequence: Synthetic oligonucleotide
  Sense strand starting at position 2120 of SEQ ID NO: 318583
cccggaacguggucauuca

SEQ ID NO: 573558 - RNA, 19 nt, Artificial Sequence
  Description of Artificial Sequence: Synthetic oligonucleotide
  Antisense strand to SEQ ID NO: 573557
ugaaugaccacguuccggg

SEQ ID NO: 573559 - RNA, 19 nt, Artificial Sequence
  Description of Artificial Sequence: Synthetic oligonucleotide
  Sense strand starting at position 3256 of SEQ ID NO: 318583
cgccuauguccugggucau

SEQ ID NO: 573560 - RNA, 19 nt, Artificial Sequence
  Description of Artificial Sequence: Synthetic oligonucleotide
  Antisense strand to SEQ ID NO: 573559
augacccaggacauaggcg

SEQ ID NO: 573561 - RNA, 19 nt, Artificial Sequence
  Description of Artificial Sequence: Synthetic oligonucleotide
  Sense strand starting at position 3257 of SEQ ID NO: 318583
gccuauguccugggucauu

SEQ ID NO: 573562 - RNA, 19 nt, Artificial Sequence
  Description of Artificial Sequence: Synthetic oligonucleotide
  Antisense strand to SEQ ID NO: 573561
aaugacccaggacauaggc

SEQ ID NO: 573563 - RNA, 19 nt, Artificial Sequence
  Description of Artificial Sequence: Synthetic oligonucleotide
  Sense strand starting at position 3279 of SEQ ID NO: 318583
aucuuaaugcagggcuaaa

SEQ ID NO: 573564 - RNA, 19 nt, Artificial Sequence
  Description of Artificial Sequence: Synthetic oligonucleotide
  Antisense strand to SEQ ID NO: 573563
uuuagcccugcauuaagau

SEQ ID NO: 573565 - RNA, 19 nt, Artificial Sequence
  Description of Artificial Sequence: Synthetic oligonucleotide
  Sense strand starting at position 3394 of SEQ ID NO: 318583
gccgucggguuaucuagau

SEQ ID NO: 573566 - RNA, 19 nt, Artificial Sequence
  Description of Artificial Sequence: Synthetic oligonucleotide
  Antisense strand to SEQ ID NO: 573565
aucuagauaacccgacggc

SEQ ID NO: 573567 - RNA, 19 nt, Artificial Sequence
  Description of Artificial Sequence: Synthetic oligonucleotide
  Sense strand starting at position 3398 of SEQ ID NO: 318583
ucggguuaucuagaucaaa

SEQ ID NO: 573568 - RNA, 19 nt, Artificial Sequence
  Description of Artificial Sequence: Synthetic oligonucleotide
  Antisense strand to SEQ ID NO: 573567
uuugaucuagauaacccga

SEQ ID NO: 573569 - RNA, 19 nt, Artificial Sequence
  Description of Artificial Sequence: Synthetic oligonucleotide
  Sense strand starting at position 3482 of SEQ ID NO: 318583
gagucagcauuccuuagga

SEQ ID NO: 573570 - RNA, 19 nt, Artificial Sequence
  Description of Artificial Sequence: Synthetic oligonucleotide
  Antisense strand to SEQ ID NO: 573569
uccuaaggaaugcugacuc

SEQ ID NO: 573571 - RNA, 19 nt, Artificial Sequence
  Description of Artificial Sequence: Synthetic oligonucleotide
  Sense strand starting at position 3484 of SEQ ID NO: 318583
gucagcauuccuuaggaaa

SEQ ID NO: 573572 - RNA, 19 nt, Artificial Sequence
  Description of Artificial Sequence: Synthetic oligonucleotide
  Antisense strand to SEQ ID NO: 573571
uuuccuaaggaaugcugac

SEQ ID NO: 573573 - RNA, 19 nt, Artificial Sequence
  Description of Artificial Sequence: Synthetic oligonucleotide
  Sense strand starting at position 3496 of SEQ ID NO: 318583
uaggaaagcuuccaagucu

SEQ ID NO: 573574 - RNA, 19 nt, Artificial Sequence
  Description of Artificial Sequence: Synthetic oligonucleotide
  Antisense strand to SEQ ID NO: 573573
agacuuggaagcuuuccua

SEQ ID NO: 573575 - RNA, 19 nt, Artificial Sequence
  Description of Artificial Sequence: Synthetic oligonucleotide
  Sense strand starting at position 3552 of SEQ ID NO: 318583
ggcaaaguuugauaaccac

SEQ ID NO: 573576 - RNA, 19 nt, Artificial Sequence
  Description of Artificial Sequence: Synthetic oligonucleotide
  Antisense strand to SEQ ID NO: 573575
gugguuaucaaacuuugcc

SEQ ID NO: 573577 - RNA, 19 nt, Artificial Sequence
  Description of Artificial Sequence: Synthetic oligonucleotide
  Sense strand starting at position 3574 of SEQ ID NO: 318583
ccugccauucccuggauaa

SEQ ID NO: 573578 - RNA, 19 nt, Artificial Sequence
  Description of Artificial Sequence: Synthetic oligonucleotide
  Antisense strand to SEQ ID NO: 573577
uuauccagggaauggcagg

SEQ ID NO: 573579 - RNA, 19 nt, Artificial Sequence
  Description of Artificial Sequence: Synthetic oligonucleotide
  Sense strand starting at position 3575 of SEQ ID NO: 318583
cugccauucccuggauaag

SEQ ID NO: 573580 - RNA, 19 nt, Artificial Sequence
  Description of Artificial Sequence: Synthetic oligonucleotide
  Antisense strand to SEQ ID NO: 573579
cuuauccagggaauggcag

SEQ ID NO: 573581 - RNA, 19 nt, Artificial Sequence
  Description of Artificial Sequence: Synthetic oligonucleotide
  Sense strand starting at position 3576 of SEQ ID NO: 318583
ugccauucccuggauaagu

SEQ ID NO: 573582 - RNA, 19 nt, Artificial Sequence
  Description of Artificial Sequence: Synthetic oligonucleotide
  Antisense strand to SEQ ID NO: 573581
acuuauccagggaauggca

SEQ ID NO: 573583 - RNA, 19 nt, Artificial Sequence
  Description of Artificial Sequence: Synthetic oligonucleotide
  Sense strand starting at position 3581 of SEQ ID NO: 318583
uucccuggauaagugaaua

SEQ ID NO: 573584 - RNA, 19 nt, Artificial Sequence
  Description of Artificial Sequence: Synthetic oligonucleotide
  Antisense strand to SEQ ID NO: 573583
uauucacuuauccagggaa

SEQ ID NO: 573585 - RNA, 19 nt, Artificial Sequence
  Description of Artificial Sequence: Synthetic oligonucleotide
  Sense strand starting at position 3826 of SEQ ID NO: 318583
accagcaauguuuggugaa

SEQ ID NO: 573586 - RNA, 19 nt, Artificial Sequence
  Description of Artificial Sequence: Synthetic oligonucleotide
  Antisense strand to SEQ ID NO: 573585
uucaccaaacauugcuggu

SEQ ID NO: 573587 - RNA, 19 nt, Artificial Sequence
  Description of Artificial Sequence: Synthetic oligonucleotide
  Sense strand starting at position 3828 of SEQ ID NO: 318583
cagcaauguuuggugaaau

SEQ ID NO: 573588 - RNA, 19 nt, Artificial Sequence
  Description of Artificial Sequence: Synthetic oligonucleotide
  Antisense strand to SEQ ID NO: 573587
auuucaccaaacauugcug

SEQ ID NO: 573589 - RNA, 19 nt, Artificial Sequence
  Description of Artificial Sequence: Synthetic oligonucleotide
  Sense strand starting at position 3887 of SEQ ID NO: 318583
aagugauacuggccuguca

SEQ ID NO: 573590 - RNA, 19 nt, Artificial Sequence
  Description of Artificial Sequence: Synthetic oligonucleotide
  Antisense strand to SEQ ID NO: 573589
ugacaggccaguaucacuu

SEQ ID NO: 573591 - RNA, 19 nt, Artificial Sequence
  Description of Artificial Sequence: Synthetic oligonucleotide
  Sense strand starting at position 3902 of SEQ ID NO: 318583
gucaccuuucucuguacaa

SEQ ID NO: 573592 - RNA, 19 nt, Artificial Sequence
  Description of Artificial Sequence: Synthetic oligonucleotide
  Antisense strand to SEQ ID NO: 573591
uuguacagagaaaggugac

SEQ ID NO: 573593 - RNA, 19 nt, Artificial Sequence
  Description of Artificial Sequence: Synthetic oligonucleotide
  Sense strand starting at position 3955 of SEQ ID NO: 318583
ucagaacaagucugaccau

SEQ ID NO: 573594 - RNA, 19 nt, Artificial Sequence
  Description of Artificial Sequence: Synthetic oligonucleotide
  Antisense strand to SEQ ID NO: 573593
auggucagacuuguucuga

SEQ ID NO: 573595 - RNA, 19 nt, Artificial Sequence
  Description of Artificial Sequence: Synthetic oligonucleotide
  Sense strand starting at position 16 of SEQ ID NO: 318584
agagauguuuaugcuccau

SEQ ID NO: 573596 - RNA, 19 nt, Artificial Sequence
  Description of Artificial Sequence: Synthetic oligonucleotide
  Antisense strand to SEQ ID NO: 573595
auggagcauaaacaucucu

SEQ ID NO: 573597 - RNA, 19 nt, Artificial Sequence
  Description of Artificial Sequence: Synthetic oligonucleotide
  Sense strand starting at position 18 of SEQ ID NO: 318584
agauguuuaugcuccauuu

SEQ ID NO: 573598 - RNA, 19 nt, Artificial Sequence
  Description of Artificial Sequence: Synthetic oligonucleotide
  Antisense strand to SEQ ID NO: 573597
aaauggagcauaaacaucu

SEQ ID NO: 573599 - RNA, 19 nt, Artificial Sequence
  Description of Artificial Sequence: Synthetic oligonucleotide
  Sense strand starting at position 20 of SEQ ID NO: 318584
auguuuaugcuccauuugu

SEQ ID NO: 573600 - RNA, 19 nt, Artificial Sequence
  Description of Artificial Sequence: Synthetic oligonucleotide
  Antisense strand to SEQ ID NO: 573599
acaaauggagcauaaacau

SEQ ID NO: 573601 - RNA, 19 nt, Artificial Sequence
  Description of Artificial Sequence: Synthetic oligonucleotide
  Sense strand starting at position 27 of SEQ ID NO: 318584
ugcuccauuugugugaaga

SEQ ID NO: 573602 - RNA, 19 nt, Artificial Sequence
  Description of Artificial Sequence: Synthetic oligonucleotide
  Antisense strand to SEQ ID NO: 573601
ucuucacacaaauggagca

SEQ ID NO: 573603 - RNA, 19 nt, Artificial Sequence
  Description of Artificial Sequence: Synthetic oligonucleotide
  Sense strand starting at position 28 of SEQ ID NO: 318584
gcuccauuugugugaagau

SEQ ID NO: 573604 - RNA, 19 nt, Artificial Sequence
  Description of Artificial Sequence: Synthetic oligonucleotide
  Antisense strand to SEQ ID NO: 573603
aucuucacacaaauggagc

SEQ ID NO: 573605 - RNA, 19 nt, Artificial Sequence
  Description of Artificial Sequence: Synthetic oligonucleotide
  Sense strand starting at position 29 of SEQ ID NO: 318584
cuccauuugugugaagauc

SEQ ID NO: 573606 - RNA, 19 nt, Artificial Sequence
  Description of Artificial Sequence: Synthetic oligonucleotide
  Antisense strand to SEQ ID NO: 573605
gaucuucacacaaauggag

SEQ ID NO: 573607 - RNA, 19 nt, Artificial Sequence
  Description of Artificial Sequence: Synthetic oligonucleotide
  Sense strand starting at position 65 of SEQ ID NO: 318584
ugugaaauccaccagugca

SEQ ID NO: 573608 - RNA, 19 nt, Artificial Sequence
  Description of Artificial Sequence: Synthetic oligonucleotide
  Antisense strand to SEQ ID NO: 573607
ugcacugguggauuucaca

SEQ ID NO: 573609 - RNA, 19 nt, Artificial Sequence
  Description of Artificial Sequence: Synthetic oligonucleotide
  Sense strand starting at position 182 of SEQ ID NO: 318584
ccgagagacuugucaggga

SEQ ID NO: 573610 - RNA, 19 nt, Artificial Sequence
  Description of Artificial Sequence: Synthetic oligonucleotide
  Antisense strand to SEQ ID NO: 573609
ucccugacaagucucucgg

SEQ ID NO: 573611 - RNA, 19 nt, Artificial Sequence
  Description of Artificial Sequence: Synthetic oligonucleotide
  Sense strand starting at position 186 of SEQ ID NO: 318584
gagacuugucagggagguu

SEQ ID NO: 573612 - RNA, 19 nt, Artificial Sequence
  Description of Artificial Sequence: Synthetic oligonucleotide
  Antisense strand to SEQ ID NO: 573611
aaccucccugacaagucuc

SEQ ID NO: 573613 - RNA, 19 nt, Artificial Sequence
  Description of Artificial Sequence: Synthetic oligonucleotide
  Sense strand starting at position 300 of SEQ ID NO: 318584
agagaaucacgccacugau

SEQ ID NO: 573614 - RNA, 19 nt, Artificial Sequence
  Description of Artificial Sequence: Synthetic oligonucleotide
  Antisense strand to SEQ ID NO: 573613
aucaguggcgugauucucu

SEQ ID NO: 573615 - RNA, 19 nt, Artificial Sequence
  Description of Artificial Sequence: Synthetic oligonucleotide
  Sense strand starting at position 443 of SEQ ID NO: 318584
cacagaggccuuggcaaua

SEQ ID NO: 573616 - RNA, 19 nt, Artificial Sequence
  Description of Artificial Sequence: Synthetic oligonucleotide
  Antisense strand to SEQ ID NO: 573615
uauugccaaggccucugug

SEQ ID NO: 573617 - RNA, 19 nt, Artificial Sequence
  Description of Artificial Sequence: Synthetic oligonucleotide
  Sense strand starting at position 448 of SEQ ID NO: 318584
aggccuuggcaauauggau

SEQ ID NO: 573618 - RNA, 19 nt, Artificial Sequence
  Description of Artificial Sequence: Synthetic oligonucleotide
  Antisense strand to SEQ ID NO: 573617
auccauauugccaaggccu

SEQ ID NO: 573619 - RNA, 19 nt, Artificial Sequence
  Description of Artificial Sequence: Synthetic oligonucleotide
  Sense strand starting at position 644 of SEQ ID NO: 318584
gagaaaccgucuucuugca

SEQ ID NO: 573620 - RNA, 19 nt, Artificial Sequence
  Description of Artificial Sequence: Synthetic oligonucleotide
  Antisense strand to SEQ ID NO: 573619
ugcaagaagacgguuucuc

SEQ ID NO: 573621 - RNA, 19 nt, Artificial Sequence
  Description of Artificial Sequence: Synthetic oligonucleotide
  Sense strand starting at position 646 of SEQ ID NO: 318584
gaaaccgucuucuugcaca

SEQ ID NO: 573622 - RNA, 19 nt, Artificial Sequence
  Description of Artificial Sequence: Synthetic oligonucleotide
  Antisense strand to SEQ ID NO: 573621
ugugcaagaagacgguuuc

SEQ ID NO: 573623 - RNA, 19 nt, Artificial Sequence
  Description of Artificial Sequence: Synthetic oligonucleotide
  Sense strand starting at position 1106 of SEQ ID NO: 318584
aaggcaguugcauagcaua

SEQ ID NO: 573624 - RNA, 19 nt, Artificial Sequence
  Description of Artificial Sequence: Synthetic oligonucleotide
  Antisense strand to SEQ ID NO: 573623
uaugcuaugcaacugccuu

SEQ ID NO: 573625 - RNA, 19 nt, Artificial Sequence
  Description of Artificial Sequence: Synthetic oligonucleotide
  Sense strand starting at position 1692 of SEQ ID NO: 318584
cuagaaauagcgcaccauu

SEQ ID NO: 573626 - RNA, 19 nt, Artificial Sequence
  Description of Artificial Sequence: Synthetic oligonucleotide
  Antisense strand to SEQ ID NO: 573625
aauggugcgcuauuucuag

SEQ ID NO: 573627 - RNA, 19 nt, Artificial Sequence
  Description of Artificial Sequence: Synthetic oligonucleotide
  Sense strand starting at position 2032 of SEQ ID NO: 318584
gccguucgcgauucuauga

SEQ ID NO: 573628 - RNA, 19 nt, Artificial Sequence
  Description of Artificial Sequence: Synthetic oligonucleotide
  Antisense strand to SEQ ID NO: 573627
ucauagaaucgcgaacggc

SEQ ID NO: 573629 - RNA, 19 nt, Artificial Sequence
  Description of Artificial Sequence: Synthetic oligonucleotide
  Sense strand starting at position 2033 of SEQ ID NO: 318584
ccguucgcgauucuaugaa

SEQ ID NO: 573630 - RNA, 19 nt, Artificial Sequence
  Description of Artificial Sequence: Synthetic oligonucleotide
  Antisense strand to SEQ ID NO: 573629
uucauagaaucgcgaacgg

SEQ ID NO: 573631 - RNA, 19 nt, Artificial Sequence
  Description of Artificial Sequence: Synthetic oligonucleotide
  Sense strand starting at position 2123 of SEQ ID NO: 318584
aucuuaacccgugauugcu

SEQ ID NO: 573632 - RNA, 19 nt, Artificial Sequence
  Description of Artificial Sequence: Synthetic oligonucleotide
  Antisense strand to SEQ ID NO: 573631
agcaaucacggguuaagau

SEQ ID NO: 573633 - RNA, 19 nt, Artificial Sequence
  Description of Artificial Sequence: Synthetic oligonucleotide
  Sense strand starting at position 2498 of SEQ ID NO: 318584
ggccuucucuugcucuaga

SEQ ID NO: 573634 - RNA, 19 nt, Artificial Sequence
  Description of Artificial Sequence: Synthetic oligonucleotide
  Antisense strand to SEQ ID NO: 573633
ucuagagcaagagaaggcc

SEQ ID NO: 573635 - RNA, 19 nt, Artificial Sequence
  Description of Artificial Sequence: Synthetic oligonucleotide
  Sense strand starting at position 2538 of SEQ ID NO: 318584
ggucuugaagcugcguuua

SEQ ID NO: 573636 - RNA, 19 nt, Artificial Sequence
  Description of Artificial Sequence: Synthetic oligonucleotide
  Antisense strand to SEQ ID NO: 573635
uaaacgcagcuucaagacc

SEQ ID NO: 573637 - RNA, 19 nt, Artificial Sequence
  Description of Artificial Sequence: Synthetic oligonucleotide
  Sense strand starting at position 2543 of SEQ ID NO: 318584
ugaagcugcguuuaccaaa

SEQ ID NO: 573638 - RNA, 19 nt, Artificial Sequence
  Description of Artificial Sequence: Synthetic oligonucleotide
  Antisense strand to SEQ ID NO: 573637
uuugguaaacgcagcuuca

SEQ ID NO: 573639 - RNA, 19 nt, Artificial Sequence
  Description of Artificial Sequence: Synthetic oligonucleotide
  Sense strand starting at position 2600 of SEQ ID NO: 318584
gugaggauuggugagugaa

SEQ ID NO: 573640 - RNA, 19 nt, Artificial Sequence
  Description of Artificial Sequence: Synthetic oligonucleotide
  Antisense strand to SEQ ID NO: 573639
uucacucaccaauccucac

SEQ ID NO: 573641 - RNA, 19 nt, Artificial Sequence
  Description of Artificial Sequence: Synthetic oligonucleotide
  Sense strand starting at position 2603 of SEQ ID NO: 318584
aggauuggugagugaaucu

SEQ ID NO: 573642 - RNA, 19 nt, Artificial Sequence
  Description of Artificial Sequence: Synthetic oligonucleotide
  Antisense strand to SEQ ID NO: 573641
agauucacucaccaauccu

SEQ ID NO: 573643 - RNA, 19 nt, Artificial Sequence
  Description of Artificial Sequence: Synthetic oligonucleotide
  Sense strand starting at position 3134 of SEQ ID NO: 318584
auccuuucuucgcuguuaa

SEQ ID NO: 573644 - RNA, 19 nt, Artificial Sequence
  Description of Artificial Sequence: Synthetic oligonucleotide
  Antisense strand to SEQ ID NO: 573643
uuaacagcgaagaaaggau

SEQ ID NO: 573645 - RNA, 19 nt, Artificial Sequence
  Description of Artificial Sequence: Synthetic oligonucleotide
  Sense strand starting at position 3318 of SEQ ID NO: 318584
uggcuuugaugcguggaua

SEQ ID NO: 573646 - RNA, 19 nt, Artificial Sequence
  Description of Artificial Sequence: Synthetic oligonucleotide
  Antisense strand to SEQ ID NO: 573645
uauccacgcaucaaagcca

SEQ ID NO: 573647 - RNA, 19 nt, Artificial Sequence
  Description of Artificial Sequence: Synthetic oligonucleotide
  Sense strand starting at position 3319 of SEQ ID NO: 318584
ggcuuugaugcguggauaa

SEQ ID NO: 573648 - RNA, 19 nt, Artificial Sequence
  Description of Artificial Sequence: Synthetic oligonucleotide
  Antisense strand to SEQ ID NO: 573647
uuauccacgcaucaaagcc

SEQ ID NO: 573649 - RNA, 19 nt, Artificial Sequence
  Description of Artificial Sequence: Synthetic oligonucleotide
  Sense strand starting at position 3321 of SEQ ID NO: 318584
cuuugaugcguggauaaga

SEQ ID NO: 573650 - RNA, 19 nt, Artificial Sequence
  Description of Artificial Sequence: Synthetic oligonucleotide
  Antisense strand to SEQ ID NO: 573649
ucuuauccacgcaucaaag

SEQ ID NO: 573651 - RNA, 19 nt, Artificial Sequence
  Description of Artificial Sequence: Synthetic oligonucleotide
  Sense strand starting at position 3361 of SEQ ID NO: 318584
ggcccugagucccuuguaa

SEQ ID NO: 573652 - RNA, 19 nt, Artificial Sequence
  Description of Artificial Sequence: Synthetic oligonucleotide
  Antisense strand to SEQ ID NO: 573651
uuacaagggacucagggcc

SEQ ID NO: 573653 - RNA, 19 nt, Artificial Sequence
  Description of Artificial Sequence: Synthetic oligonucleotide
  Sense strand starting at position 3443 of SEQ ID NO: 318584
ccacuauaggauugugcuu

SEQ ID NO: 573654 - RNA, 19 nt, Artificial Sequence
  Description of Artificial Sequence: Synthetic oligonucleotide
  Antisense strand to SEQ ID NO: 573653
aagcacaauccuauagugg

SEQ ID NO: 573655 - RNA, 19 nt, Artificial Sequence
  Description of Artificial Sequence: Synthetic oligonucleotide
  Sense strand starting at position 3463 of SEQ ID NO: 318584
gcuguugucagaggaacca

SEQ ID NO: 573656 - RNA, 19 nt, Artificial Sequence
  Description of Artificial Sequence: Synthetic oligonucleotide
  Antisense strand to SEQ ID NO: 573655
ugguuccucugacaacagc

SEQ ID NO: 573657 - RNA, 19 nt, Artificial Sequence
  Description of Artificial Sequence: Synthetic oligonucleotide
  Sense strand starting at position 3675 of SEQ ID NO: 318584
gcgagaccuuucucuaaga

SEQ ID NO: 573658 - RNA, 19 nt, Artificial Sequence
  Description of Artificial Sequence: Synthetic oligonucleotide
  Antisense strand to SEQ ID NO: 573657
ucuuagagaaaggucucgc

SEQ ID NO: 573659 - RNA, 19 nt, Artificial Sequence
  Description of Artificial Sequence: Synthetic oligonucleotide
  Sense strand starting at position 3676 of SEQ ID NO: 318584
cgagaccuuucucuaagac

SEQ ID NO: 573660 - RNA, 19 nt, Artificial Sequence
  Description of Artificial Sequence: Synthetic oligonucleotide
  Antisense strand to SEQ ID NO: 573659
gucuuagagaaaggucucg

SEQ ID NO: 573661 - RNA, 19 nt, Artificial Sequence
  Description of Artificial Sequence: Synthetic oligonucleotide
  Sense strand starting at position 3696 of SEQ ID NO: 318584
aagagaacucuucgccaga

SEQ ID NO: 573662 - RNA, 19 nt, Artificial Sequence
  Description of Artificial Sequence: Synthetic oligonucleotide
  Antisense strand to SEQ ID NO: 573661
ucuggcgaagaguucucuu

SEQ ID NO: 573663 - RNA, 19 nt, Artificial Sequence
  Description of Artificial Sequence: Synthetic oligonucleotide
  Sense strand starting at position 3697 of SEQ ID NO: 318584
agagaacucuucgccagaa

SEQ ID NO: 573664 - RNA, 19 nt, Artificial Sequence
  Description of Artificial Sequence: Synthetic oligonucleotide
  Antisense strand to SEQ ID NO: 573663
uucuggcgaagaguucucu

SEQ ID NO: 573665 - RNA, 19 nt, Artificial Sequence
  Description of Artificial Sequence: Synthetic oligonucleotide
  Sense strand starting at position 3698 of SEQ ID NO: 318584
gagaacucuucgccagaaa

SEQ ID NO: 573666 - RNA, 19 nt, Artificial Sequence
  Description of Artificial Sequence: Synthetic oligonucleotide
  Antisense strand to SEQ ID NO: 573665
uuucuggcgaagaguucuc

SEQ ID NO: 573667 - RNA, 19 nt, Artificial Sequence
  Description of Artificial Sequence: Synthetic oligonucleotide
  Sense strand starting at position 3721 of SEQ ID NO: 318584
gguacaguuguccaggacu

SEQ ID NO: 573668 - RNA, 19 nt, Artificial Sequence
  Description of Artificial Sequence: Synthetic oligonucleotide
  Antisense strand to SEQ ID NO: 573667
aguccuggacaacuguacc

SEQ ID NO: 573669 - RNA, 19 nt, Artificial Sequence
  Description of Artificial Sequence: Synthetic oligonucleotide
  Sense strand starting at position 3774 of SEQ ID NO: 318584
cucugucagcuguagaaac

SEQ ID NO: 573670 - RNA, 19 nt, Artificial Sequence
  Description of Artificial Sequence: Synthetic oligonucleotide
  Antisense strand to SEQ ID NO: 573669
guuucuacagcugacagag

SEQ ID NO: 573671 - RNA, 19 nt, Artificial Sequence
  Description of Artificial Sequence: Synthetic oligonucleotide
  Sense strand starting at position 3819 of SEQ ID NO: 318584
uauggaagagcugguaaau

SEQ ID NO: 573672 - RNA, 19 nt, Artificial Sequence
  Description of Artificial Sequence: Synthetic oligonucleotide
  Antisense strand to SEQ ID NO: 573671
auuuaccagcucuuccaua

SEQ ID NO: 573673 - RNA, 19 nt, Artificial Sequence
  Description of Artificial Sequence: Synthetic oligonucleotide
  Sense strand starting at position 3870 of SEQ ID NO: 318584
ggcuuuacuuugcuaccaa

SEQ ID NO: 573674 - RNA, 19 nt, Artificial Sequence
  Description of Artificial Sequence: Synthetic oligonucleotide
  Antisense strand to SEQ ID NO: 573673
uugguagcaaaguaaagcc

SEQ ID NO: 573675 - RNA, 19 nt, Artificial Sequence
  Description of Artificial Sequence: Synthetic oligonucleotide
  Sense strand starting at position 98 of SEQ ID NO: 318585
auccguaagcuccaaaugu

SEQ ID NO: 573676 - RNA, 19 nt, Artificial Sequence
  Description of Artificial Sequence: Synthetic oligonucleotide
  Antisense strand to SEQ ID NO: 573675
acauuuggagcuuacggau

SEQ ID NO: 573677 - RNA, 19 nt, Artificial Sequence
  Description of Artificial Sequence: Synthetic oligonucleotide
  Sense strand starting at position 279 of SEQ ID NO: 318585
gggagugacuccugauaac

SEQ ID NO: 573678 - RNA, 19 nt, Artificial Sequence
  Description of Artificial Sequence: Synthetic oligonucleotide
  Antisense strand to SEQ ID NO: 573677
guuaucaggagucacuccc

SEQ ID NO: 573679 - RNA, 19 nt, Artificial Sequence
  Description of Artificial Sequence: Synthetic oligonucleotide
  Sense strand starting at position 282 of SEQ ID NO: 318585
agugacuccugauaaccaa

SEQ ID NO: 573680 - RNA, 19 nt, Artificial Sequence
  Description of Artificial Sequence: Synthetic oligonucleotide
  Antisense strand to SEQ ID NO: 573679
uugguuaucaggagucacu

SEQ ID NO: 573681 - RNA, 19 nt, Artificial Sequence
  Description of Artificial Sequence: Synthetic oligonucleotide
  Sense strand starting at position 315 of SEQ ID NO: 318585
gucugcucacuguaacuga

SEQ ID NO: 573682 - RNA, 19 nt, Artificial Sequence
  Description of Artificial Sequence: Synthetic oligonucleotide
  Antisense strand to SEQ ID NO: 573681
ucaguuacagugagcagac

SEQ ID NO: 573683 - RNA, 19 nt, Artificial Sequence
  Description of Artificial Sequence: Synthetic oligonucleotide
  Sense strand starting at position 421 of SEQ ID NO: 318585
gugugugcuguucaccaca

SEQ ID NO: 573684 - RNA, 19 nt, Artificial Sequence
  Description of Artificial Sequence: Synthetic oligonucleotide
  Antisense strand to SEQ ID NO: 573683
uguggugaacagcacacac

SEQ ID NO: 573685 - RNA, 19 nt, Artificial Sequence
  Description of Artificial Sequence: Synthetic oligonucleotide
  Sense strand starting at position 468 of SEQ ID NO: 318585
ugagaacccucccaagaga

SEQ ID NO: 573686 - RNA, 19 nt, Artificial Sequence
  Description of Artificial Sequence: Synthetic oligonucleotide
  Antisense strand to SEQ ID NO: 573685
ucucuugggaggguucuca

SEQ ID NO: 573687 - RNA, 19 nt, Artificial Sequence
  Description of Artificial Sequence: Synthetic oligonucleotide
  Sense strand starting at position 515 of SEQ ID NO: 318585
ggacaucuccacuaguucu

SEQ ID NO: 573688 - RNA, 19 nt, Artificial Sequence
  Description of Artificial Sequence: Synthetic oligonucleotide
  Antisense strand to SEQ ID NO: 573687
agaacuaguggagaugucc

SEQ ID NO: 573689 - RNA, 19 nt, Artificial Sequence
  Description of Artificial Sequence: Synthetic oligonucleotide
  Sense strand starting at position 654 of SEQ ID NO: 318585
agagauguuuaugcuccau

SEQ ID NO: 573690 - RNA, 19 nt, Artificial Sequence
  Description of Artificial Sequence: Synthetic oligonucleotide
  Antisense strand to SEQ ID NO: 573689
auggagcauaaacaucucu

SEQ ID NO: 573691 - RNA, 19 nt, Artificial Sequence
  Description of Artificial Sequence: Synthetic oligonucleotide
  Sense strand starting at position 656 of SEQ ID NO: 318585
agauguuuaugcuccauuu

SEQ ID NO: 573692 - RNA, 19 nt, Artificial Sequence
  Description of Artificial Sequence: Synthetic oligonucleotide
  Antisense strand to SEQ ID NO: 573691
aaauggagcauaaacaucu

SEQ ID NO: 573693 - RNA, 19 nt, Artificial Sequence
  Description of Artificial Sequence: Synthetic oligonucleotide
  Sense strand starting at position 658 of SEQ ID NO: 318585
auguuuaugcuccauuugu

SEQ ID NO: 573694 - RNA, 19 nt, Artificial Sequence
  Description of Artificial Sequence: Synthetic oligonucleotide
  Antisense strand to SEQ ID NO: 573693
acaaauggagcauaaacau

SEQ ID NO: 573695 - RNA, 19 nt, Artificial Sequence
  Description of Artificial Sequence: Synthetic oligonucleotide
  Sense strand starting at position 665 of SEQ ID NO: 318585
ugcuccauuugugugaaga

SEQ ID NO: 573696 - RNA, 19 nt, Artificial Sequence
  Description of Artificial Sequence: Synthetic oligonucleotide
  Antisense strand to SEQ ID NO: 573695
ucuucacacaaauggagca

SEQ ID NO: 573697 - RNA, 19 nt, Artificial Sequence
  Description of Artificial Sequence: Synthetic oligonucleotide
  Sense strand starting at position 666 of SEQ ID NO: 318585
gcuccauuugugugaagau

SEQ ID NO: 573698 - RNA, 19 nt, Artificial Sequence
  Description of Artificial Sequence: Synthetic oligonucleotide
  Antisense strand to SEQ ID NO: 573697
aucuucacacaaauggagc

SEQ ID NO: 573699 - RNA, 19 nt, Artificial Sequence
  Description of Artificial Sequence: Synthetic oligonucleotide
  Sense strand starting at position 667 of SEQ ID NO: 318585
cuccauuugugugaagauc

SEQ ID NO: 573700 - RNA, 19 nt, Artificial Sequence
  Description of Artificial Sequence: Synthetic oligonucleotide
  Antisense strand to SEQ ID NO: 573699
gaucuucacacaaauggag

SEQ ID NO: 573701 - RNA, 19 nt, Artificial Sequence
  Description of Artificial Sequence: Synthetic oligonucleotide
  Sense strand starting at position 675 of SEQ ID NO: 318585
gugugaagaucuggagaac

SEQ ID NO: 573702 - RNA, 19 nt, Artificial Sequence
  Description of Artificial Sequence: Synthetic oligonucleotide
  Antisense strand to SEQ ID NO: 573701
guucuccagaucuucacac

SEQ ID NO: 573703 - RNA, 19 nt, Artificial Sequence
  Description of Artificial Sequence: Synthetic oligonucleotide
  Sense strand starting at position 703 of SEQ ID NO: 318585
ugugaaauccaccagugca

SEQ ID NO: 573704 - RNA, 19 nt, Artificial Sequence
  Description of Artificial Sequence: Synthetic oligonucleotide
  Antisense strand to SEQ ID NO: 573703
ugcacugguggauuucaca

SEQ ID NO: 573705 - RNA, 19 nt, Artificial Sequence
  Description of Artificial Sequence: Synthetic oligonucleotide
  Sense strand starting at position 820 of SEQ ID NO: 318585
ccgagagacuugucaggga

SEQ ID NO: 573706 - RNA, 19 nt, Artificial Sequence
  Description of Artificial Sequence: Synthetic oligonucleotide
  Antisense strand to SEQ ID NO: 573705
ucccugacaagucucucgg

SEQ ID NO: 573707 - RNA, 19 nt, Artificial Sequence
  Description of Artificial Sequence: Synthetic oligonucleotide
  Sense strand starting at position 824 of SEQ ID NO: 318585
gagacuugucagggagguu

SEQ ID NO: 573708 - RNA, 19 nt, Artificial Sequence
  Description of Artificial Sequence: Synthetic oligonucleotide
  Antisense strand to SEQ ID NO: 573707
aaccucccugacaagucuc

SEQ ID NO: 573709 - RNA, 19 nt, Artificial Sequence
  Description of Artificial Sequence: Synthetic oligonucleotide
  Sense strand starting at position 938 of SEQ ID NO: 318585
agagaaucacgccacugau

SEQ ID NO: 573710 - RNA, 19 nt, Artificial Sequence
  Description of Artificial Sequence: Synthetic oligonucleotide
  Antisense strand to SEQ ID NO: 573709
aucaguggcgugauucucu

SEQ ID NO: 573711 - RNA, 19 nt, Artificial Sequence
  Description of Artificial Sequence: Synthetic oligonucleotide
  Sense strand starting at position 1081 of SEQ ID NO: 318585
cacagaggccuuggcaaua

SEQ ID NO: 573712 - RNA, 19 nt, Artificial Sequence
  Description of Artificial Sequence: Synthetic oligonucleotide
  Antisense strand to SEQ ID NO: 573711
uauugccaaggccucugug

SEQ ID NO: 573713 - RNA, 19 nt, Artificial Sequence
  Description of Artificial Sequence: Synthetic oligonucleotide
  Sense strand starting at position 1086 of SEQ ID NO: 318585
aggccuuggcaauauggau

SEQ ID NO: 573714 - RNA, 19 nt, Artificial Sequence
  Description of Artificial Sequence: Synthetic oligonucleotide
  Antisense strand to SEQ ID NO: 573713
auccauauugccaaggccu

SEQ ID NO: 573715 - RNA, 19 nt, Artificial Sequence
  Description of Artificial Sequence: Synthetic oligonucleotide
  Sense strand starting at position 1282 of SEQ ID NO: 318585
gagaaaccgucuucuugca

SEQ ID NO: 573716 - RNA, 19 nt, Artificial Sequence
  Description of Artificial Sequence: Synthetic oligonucleotide
  Antisense strand to SEQ ID NO: 573715
ugcaagaagacgguuucuc

SEQ ID NO: 573717 - RNA, 19 nt, Artificial Sequence
  Description of Artificial Sequence: Synthetic oligonucleotide
  Sense strand starting at position 1284 of SEQ ID NO: 318585
gaaaccgucuucuugcaca

SEQ ID NO: 573718 - RNA, 19 nt, Artificial Sequence
  Description of Artificial Sequence: Synthetic oligonucleotide
  Antisense strand to SEQ ID NO: 573717
ugugcaagaagacgguuuc

SEQ ID NO: 573719 - RNA, 19 nt, Artificial Sequence
  Description of Artificial Sequence: Synthetic oligonucleotide
  Sense strand starting at position 1744 of SEQ ID NO: 318585
aaggcaguugcauagcaua

SEQ ID NO: 573720 - RNA, 19 nt, Artificial Sequence
  Description of Artificial Sequence: Synthetic oligonucleotide
  Antisense strand to SEQ ID NO: 573719
uaugcuaugcaacugccuu

SEQ ID NO: 573721 - RNA, 19 nt, Artificial Sequence
  Description of Artificial Sequence: Synthetic oligonucleotide
  Sense strand starting at position 2330 of SEQ ID NO: 318585
cuagaaauagcgcaccauu

SEQ ID NO: 573722 - RNA, 19 nt, Artificial Sequence
  Description of Artificial Sequence: Synthetic oligonucleotide
  Antisense strand to SEQ ID NO: 573721
aauggugcgcuauuucuag

SEQ ID NO: 573723 - RNA, 19 nt, Artificial Sequence
  Description of Artificial Sequence: Synthetic oligonucleotide
  Sense strand starting at position 2670 of SEQ ID NO: 318585
gccguucgcgauucuauga

SEQ ID NO: 573724 - RNA, 19 nt, Artificial Sequence
  Description of Artificial Sequence: Synthetic oligonucleotide
  Antisense strand to SEQ ID NO: 573723
ucauagaaucgcgaacggc

SEQ ID NO: 573725 - RNA, 19 nt, Artificial Sequence
  Description of Artificial Sequence: Synthetic oligonucleotide
  Sense strand starting at position 2671 of SEQ ID NO: 318585
ccguucgcgauucuaugaa

SEQ ID NO: 573726 - RNA, 19 nt, Artificial Sequence
  Description of Artificial Sequence: Synthetic oligonucleotide
  Antisense strand to SEQ ID NO: 573725
uucauagaaucgcgaacgg

SEQ ID NO: 573727 - RNA, 19 nt, Artificial Sequence
  Description of Artificial Sequence: Synthetic oligonucleotide
  Sense strand starting at position 2761 of SEQ ID NO: 318585
aucuuaacccgugauugcu

SEQ ID NO: 573728 - RNA, 19 nt, Artificial Sequence
  Description of Artificial Sequence: Synthetic oligonucleotide
  Antisense strand to SEQ ID NO: 573727
agcaaucacggguuaagau

SEQ ID NO: 573729 - RNA, 19 nt, Artificial Sequence
  Description of Artificial Sequence: Synthetic oligonucleotide
  Sense strand starting at position 3136 of SEQ ID NO: 318585
ggccuucucuugcucuaga

SEQ ID NO: 573730 - RNA, 19 nt, Artificial Sequence
  Description of Artificial Sequence: Synthetic oligonucleotide
  Antisense strand to SEQ ID NO: 573729
ucuagagcaagagaaggcc

SEQ ID NO: 573731 - RNA, 19 nt, Artificial Sequence
  Description of Artificial Sequence: Synthetic oligonucleotide
  Sense strand starting at position 3176 of SEQ ID NO: 318585
ggucuugaagcugcguuua

SEQ ID NO: 573732 - RNA, 19 nt, Artificial Sequence
  Description of Artificial Sequence: Synthetic oligonucleotide
  Antisense strand to SEQ ID NO: 573731
uaaacgcagcuucaagacc

SEQ ID NO: 573733 - RNA, 19 nt, Artificial Sequence
  Description of Artificial Sequence: Synthetic oligonucleotide
  Sense strand starting at position 3181 of SEQ ID NO: 318585
ugaagcugcguuuaccaaa

SEQ ID NO: 573734 - RNA, 19 nt, Artificial Sequence
  Description of Artificial Sequence: Synthetic oligonucleotide
  Antisense strand to SEQ ID NO: 573733
uuugguaaacgcagcuuca

SEQ ID NO: 573735 - RNA, 19 nt, Artificial Sequence
  Description of Artificial Sequence: Synthetic oligonucleotide
  Sense strand starting at position 3237 of SEQ ID NO: 318585
ggugaggauuggugaguga

SEQ ID NO: 573736 - RNA, 19 nt, Artificial Sequence
  Description of Artificial Sequence: Synthetic oligonucleotide
  Antisense strand to SEQ ID NO: 573735
ucacucaccaauccucacc

SEQ ID NO: 573737 - RNA, 19 nt, Artificial Sequence
  Description of Artificial Sequence: Synthetic oligonucleotide
  Sense strand starting at position 3238 of SEQ ID NO: 318585
gugaggauuggugagugaa

SEQ ID NO: 573738 - RNA, 19 nt, Artificial Sequence
  Description of Artificial Sequence: Synthetic oligonucleotide
  Antisense strand to SEQ ID NO: 573737
uucacucaccaauccucac

SEQ ID NO: 573739 - RNA, 19 nt, Artificial Sequence
  Description of Artificial Sequence: Synthetic oligonucleotide
  Sense strand starting at position 3241 of SEQ ID NO: 318585
aggauuggugagugaaucu

SEQ ID NO: 573740 - RNA, 19 nt, Artificial Sequence
  Description of Artificial Sequence: Synthetic oligonucleotide
  Antisense strand to SEQ ID NO: 573739
agauucacucaccaauccu

SEQ ID NO: 573741 - RNA, 19 nt, Artificial Sequence
  Description of Artificial Sequence: Synthetic oligonucleotide
  Sense strand starting at position 3771 of SEQ ID NO: 318585
gauccuuucuucgcuguua

SEQ ID NO: 573742 - RNA, 19 nt, Artificial Sequence
  Description of Artificial Sequence: Synthetic oligonucleotide
  Antisense strand to SEQ ID NO: 573741
uaacagcgaagaaaggauc

SEQ ID NO: 573743 - RNA, 19 nt, Artificial Sequence
  Description of Artificial Sequence: Synthetic oligonucleotide
  Sense strand starting at position 3772 of SEQ ID NO: 318585
auccuuucuucgcuguuaa

SEQ ID NO: 573744 - RNA, 19 nt, Artificial Sequence
  Description of Artificial Sequence: Synthetic oligonucleotide
  Antisense strand to SEQ ID NO: 573743
uuaacagcgaagaaaggau

SEQ ID NO: 573745 - RNA, 19 nt, Artificial Sequence
  Description of Artificial Sequence: Synthetic oligonucleotide
  Sense strand starting at position 3773 of SEQ ID NO: 318585
uccuuucuucgcuguuaau

SEQ ID NO: 573746 - RNA, 19 nt, Artificial Sequence
  Description of Artificial Sequence: Synthetic oligonucleotide
  Antisense strand to SEQ ID NO: 573745
auuaacagcgaagaaagga

SEQ ID NO: 573747 - RNA, 19 nt, Artificial Sequence
  Description of Artificial Sequence: Synthetic oligonucleotide
  Sense strand starting at position 3955 of SEQ ID NO: 318585
guggcuuugaugcguggau

SEQ ID NO: 573748 - RNA, 19 nt, Artificial Sequence
  Description of Artificial Sequence: Synthetic oligonucleotide
  Antisense strand to SEQ ID NO: 573747
auccacgcaucaaagccac

SEQ ID NO: 573749 - RNA, 19 nt, Artificial Sequence
  Description of Artificial Sequence: Synthetic oligonucleotide
  Sense strand starting at position 3956 of SEQ ID NO: 318585
uggcuuugaugcguggaua

SEQ ID NO: 573750 - RNA, 19 nt, Artificial Sequence
  Description of Artificial Sequence: Synthetic oligonucleotide
  Antisense strand to SEQ ID NO: 573749
uauccacgcaucaaagcca

SEQ ID NO: 573751 - RNA, 19 nt, Artificial Sequence
  Description of Artificial Sequence: Synthetic oligonucleotide
  Sense strand starting at position 3957 of SEQ ID NO: 318585
ggcuuugaugcguggauaa

SEQ ID NO: 573752 - RNA, 19 nt, Artificial Sequence
  Description of Artificial Sequence: Synthetic oligonucleotide
  Antisense strand to SEQ ID NO: 573751
uuauccacgcaucaaagcc

SEQ ID NO: 573753 - RNA, 19 nt, Artificial Sequence
  Description of Artificial Sequence: Synthetic oligonucleotide
  Sense strand starting at position 3959 of SEQ ID NO: 318585
cuuugaugcguggauaaga

SEQ ID NO: 573754 - RNA, 19 nt, Artificial Sequence
  Description of Artificial Sequence: Synthetic oligonucleotide
  Antisense strand to SEQ ID NO: 573753
ucuuauccacgcaucaaag

SEQ ID NO: 573755 - RNA, 19 nt, Artificial Sequence
  Description of Artificial Sequence: Synthetic oligonucleotide
  Sense strand starting at position 2039 of SEQ ID NO: 318586
accauuguggccuauccau

SEQ ID NO: 573756 - RNA, 19 nt, Artificial Sequence
  Description of Artificial Sequence: Synthetic oligonucleotide
  Antisense strand to SEQ ID NO: 573755
auggauaggccacaauggu

SEQ ID NO: 573757 - RNA, 19 nt, Artificial Sequence
  Description of Artificial Sequence: Synthetic oligonucleotide
  Sense strand starting at position 2061 of SEQ ID NO: 318586
gucugucuccuuuguguca

SEQ ID NO: 573758 - RNA, 19 nt, Artificial Sequence
  Description of Artificial Sequence: Synthetic oligonucleotide
  Antisense strand to SEQ ID NO: 573757
ugacacaaaggagacagac

SEQ ID NO: 573759 - RNA, 19 nt, Artificial Sequence
  Description of Artificial Sequence: Synthetic oligonucleotide
  Sense strand starting at position 2068 of SEQ ID NO: 318586
uccuuugugucacaaugga

SEQ ID NO: 573760 - RNA, 19 nt, Artificial Sequence
  Description of Artificial Sequence: Synthetic oligonucleotide
  Antisense strand to SEQ ID NO: 573759
uccauugugacacaaagga

SEQ ID NO: 573761 - RNA, 19 nt, Artificial Sequence
  Description of Artificial Sequence: Synthetic oligonucleotide
  Sense strand starting at position 2082 of SEQ ID NO: 318586
auggaagccucuuaaauuc

SEQ ID NO: 573762 - RNA, 19 nt, Artificial Sequence
  Description of Artificial Sequence: Synthetic oligonucleotide
  Antisense strand to SEQ ID NO: 573761
gaauuuaagaggcuuccau

SEQ ID NO: 573763 - RNA, 19 nt, Artificial Sequence
  Description of Artificial Sequence: Synthetic oligonucleotide
  Sense strand starting at position 2093 of SEQ ID NO: 318586
uuaaauuccugcccaguga

SEQ ID NO: 573764 - RNA, 19 nt, Artificial Sequence
  Description of Artificial Sequence: Synthetic oligonucleotide
  Antisense strand to SEQ ID NO: 573763
ucacugggcaggaauuuaa

SEQ ID NO: 573765 - RNA, 19 nt, Artificial Sequence
  Description of Artificial Sequence: Synthetic oligonucleotide
  Sense strand starting at position 2104 of SEQ ID NO: 318586
cccagugacuccugcauca

SEQ ID NO: 573766 - RNA, 19 nt, Artificial Sequence
  Description of Artificial Sequence: Synthetic oligonucleotide
  Antisense strand to SEQ ID NO: 573765
ugaugcaggagucacuggg

SEQ ID NO: 573767 - RNA, 19 nt, Artificial Sequence
  Description of Artificial Sequence: Synthetic oligonucleotide
  Sense strand starting at position 2223 of SEQ ID NO: 318586
gcacucaguuacuucucua

SEQ ID NO: 573768 - RNA, 19 nt, Artificial Sequence
  Description of Artificial Sequence: Synthetic oligonucleotide
  Antisense strand to SEQ ID NO: 573767
uagagaaguaacugagugc

SEQ ID NO: 573769 - RNA, 19 nt, Artificial Sequence
  Description of Artificial Sequence: Synthetic oligonucleotide
  Sense strand starting at position 2226 of SEQ ID NO: 318586
cucaguuacuucucuacgu

SEQ ID NO: 573770 - RNA, 19 nt, Artificial Sequence
  Description of Artificial Sequence: Synthetic oligonucleotide
  Antisense strand to SEQ ID NO: 573769
acguagagaaguaacugag

SEQ ID NO: 573771 - RNA, 19 nt, Artificial Sequence
  Description of Artificial Sequence: Synthetic oligonucleotide
  Sense strand starting at position 2300 of SEQ ID NO: 318586
ggacauugcugagaccagu

SEQ ID NO: 573772 - RNA, 19 nt, Artificial Sequence
  Description of Artificial Sequence: Synthetic oligonucleotide
  Antisense strand to SEQ ID NO: 573771
acuggucucagcaaugucc

SEQ ID NO: 573773 - RNA, 19 nt, Artificial Sequence
  Description of Artificial Sequence: Synthetic oligonucleotide
  Sense strand starting at position 2367 of SEQ ID NO: 318586
gcucccauucuaggagaga

SEQ ID NO: 573774 - RNA, 19 nt, Artificial Sequence
  Description of Artificial Sequence: Synthetic oligonucleotide
  Antisense strand to SEQ ID NO: 573773
ucucuccuagaaugggagc

SEQ ID NO: 573775 - RNA, 19 nt, Artificial Sequence
  Description of Artificial Sequence: Synthetic oligonucleotide
  Sense strand starting at position 2368 of SEQ ID NO: 318586
cucccauucuaggagagau

SEQ ID NO: 573776 - RNA, 19 nt, Artificial Sequence
  Description of Artificial Sequence: Synthetic oligonucleotide
  Antisense strand to SEQ ID NO: 573775
aucucuccuagaaugggag

SEQ ID NO: 573777 - RNA, 19 nt, Artificial Sequence
  Description of Artificial Sequence: Synthetic oligonucleotide
  Sense strand starting at position 2380 of SEQ ID NO: 318586
gagagaugugacuguaaga

SEQ ID NO: 573778 - RNA, 19 nt, Artificial Sequence
  Description of Artificial Sequence: Synthetic oligonucleotide
  Antisense strand to SEQ ID NO: 573777
ucuuacagucacaucucuc

SEQ ID NO: 573779 - RNA, 19 nt, Artificial Sequence
  Description of Artificial Sequence: Synthetic oligonucleotide
  Sense strand starting at position 2488 of SEQ ID NO: 318586
auucuacugcuccaagaag

SEQ ID NO: 573780 - RNA, 19 nt, Artificial Sequence
  Description of Artificial Sequence: Synthetic oligonucleotide
  Antisense strand to SEQ ID NO: 573779
cuucuuggagcaguagaau

SEQ ID NO: 573781 - RNA, 19 nt, Artificial Sequence
  Description of Artificial Sequence: Synthetic oligonucleotide
  Sense strand starting at position 2507 of SEQ ID NO: 318586
ggacuaucugaaugguuau

SEQ ID NO: 573782 - RNA, 19 nt, Artificial Sequence
  Description of Artificial Sequence: Synthetic oligonucleotide
  Antisense strand to SEQ ID NO: 573781
auaaccauucagauagucc

SEQ ID NO: 573783 - RNA, 19 nt, Artificial Sequence
  Description of Artificial Sequence: Synthetic oligonucleotide
  Sense strand starting at position 2510 of SEQ ID NO: 318586
cuaucugaaugguuauaau

SEQ ID NO: 573784 - RNA, 19 nt, Artificial Sequence
  Description of Artificial Sequence: Synthetic oligonucleotide
  Antisense strand to SEQ ID NO: 573783
auuauaaccauucagauag

SEQ ID NO: 573785 - RNA, 19 nt, Artificial Sequence
  Description of Artificial Sequence: Synthetic oligonucleotide
  Sense strand starting at position 2593 of SEQ ID NO: 318586
uggcaagcuuacucacaaa

SEQ ID NO: 573786 - RNA, 19 nt, Artificial Sequence
  Description of Artificial Sequence: Synthetic oligonucleotide
  Antisense strand to SEQ ID NO: 573785
uuugugaguaagcuugcca

SEQ ID NO: 573787 - RNA, 19 nt, Artificial Sequence
  Description of Artificial Sequence: Synthetic oligonucleotide
  Sense strand starting at position 2612 of SEQ ID NO: 318586
ucauuuacaucaggugaua

SEQ ID NO: 573788 - RNA, 19 nt, Artificial Sequence
  Description of Artificial Sequence: Synthetic oligonucleotide
  Antisense strand to SEQ ID NO: 573787
uaucaccugauguaaauga

SEQ ID NO: 573789 - RNA, 19 nt, Artificial Sequence
  Description of Artificial Sequence: Synthetic oligonucleotide
  Sense strand starting at position 2752 of SEQ ID NO: 318586
uucuaaaguguuugauuag

SEQ ID NO: 573790 - RNA, 19 nt, Artificial Sequence
  Description of Artificial Sequence: Synthetic oligonucleotide
  Antisense strand to SEQ ID NO: 573789
cuaaucaaacacuuuagaa

SEQ ID NO: 573791 - RNA, 19 nt, Artificial Sequence
  Description of Artificial Sequence: Synthetic oligonucleotide
  Sense strand starting at position 2753 of SEQ ID NO: 318586
ucuaaaguguuugauuaga

SEQ ID NO: 573792 - RNA, 19 nt, Artificial Sequence
  Description of Artificial Sequence: Synthetic oligonucleotide
  Antisense strand to SEQ ID NO: 573791
ucuaaucaaacacuuuaga

SEQ ID NO: 573793 - RNA, 19 nt, Artificial Sequence
  Description of Artificial Sequence: Synthetic oligonucleotide
  Sense strand starting at position 2755 of SEQ ID NO: 318586
uaaaguguuugauuagaag

SEQ ID NO: 573794 - RNA, 19 nt, Artificial Sequence
  Description of Artificial Sequence: Synthetic oligonucleotide
  Antisense strand to SEQ ID NO: 573793
cuucuaaucaaacacuuua

SEQ ID NO: 573795 - RNA, 19 nt, Artificial Sequence
  Description of Artificial Sequence: Synthetic oligonucleotide
  Sense strand starting at position 2897 of SEQ ID NO: 318586
gcaacacagcaagaucuau

SEQ ID NO: 573796 - RNA, 19 nt, Artificial Sequence
  Description of Artificial Sequence: Synthetic oligonucleotide
  Antisense strand to SEQ ID NO: 573795
auagaucuugcuguguugc

SEQ ID NO: 573797 - RNA, 19 nt, Artificial Sequence
  Description of Artificial Sequence: Synthetic oligonucleotide
  Sense strand starting at position 3263 of SEQ ID NO: 318586
uaaauucucuaguggguua

SEQ ID NO: 573798 - RNA, 19 nt, Artificial Sequence
  Description of Artificial Sequence: Synthetic oligonucleotide
  Antisense strand to SEQ ID NO: 573797
uaacccacuagagaauuua

SEQ ID NO: 573799 - RNA, 19 nt, Artificial Sequence
  Description of Artificial Sequence: Synthetic oligonucleotide
  Sense strand starting at position 3265 of SEQ ID NO: 318586
aauucucuaguggguuaua

SEQ ID NO: 573800 - RNA, 19 nt, Artificial Sequence
  Description of Artificial Sequence: Synthetic oligonucleotide
  Antisense strand to SEQ ID NO: 573799
uauaacccacuagagaauu

SEQ ID NO: 573801 - RNA, 19 nt, Artificial Sequence
  Description of Artificial Sequence: Synthetic oligonucleotide
  Sense strand starting at position 3268 of SEQ ID NO: 318586
ucucuaguggguuauagaa

SEQ ID NO: 573802 - RNA, 19 nt, Artificial Sequence
  Description of Artificial Sequence: Synthetic oligonucleotide
  Antisense strand to SEQ ID NO: 573801
uucuauaacccacuagaga

SEQ ID NO: 573803 - RNA, 19 nt, Artificial Sequence
  Description of Artificial Sequence: Synthetic oligonucleotide
  Sense strand starting at position 3270 of SEQ ID NO: 318586
ucuaguggguuauagaaag

SEQ ID NO: 573804 - RNA, 19 nt, Artificial Sequence
  Description of Artificial Sequence: Synthetic oligonucleotide
  Antisense strand to SEQ ID NO: 573803
cuuucuauaacccacuaga

SEQ ID NO: 573805 - RNA, 19 nt, Artificial Sequence
  Description of Artificial Sequence: Synthetic oligonucleotide
  Sense strand starting at position 3349 of SEQ ID NO: 318586
ggagucaggucuugugaau

SEQ ID NO: 573806 - RNA, 19 nt, Artificial Sequence
  Description of Artificial Sequence: Synthetic oligonucleotide
  Antisense strand to SEQ ID NO: 573805
auucacaagaccugacucc

SEQ ID NO: 573807 - RNA, 19 nt, Artificial Sequence
  Description of Artificial Sequence: Synthetic oligonucleotide
  Sense strand starting at position 3383 of SEQ ID NO: 318586
agaaacauuucuuguguau

SEQ ID NO: 573808 - RNA, 19 nt, Artificial Sequence
  Description of Artificial Sequence: Synthetic oligonucleotide
  Antisense strand to SEQ ID NO: 573807
auacacaagaaauguuucu

SEQ ID NO: 573809 - RNA, 19 nt, Artificial Sequence
  Description of Artificial Sequence: Synthetic oligonucleotide
  Sense strand starting at position 3389 of SEQ ID NO: 318586
auuucuuguguaugacuuu

SEQ ID NO: 573810 - RNA, 19 nt, Artificial Sequence
  Description of Artificial Sequence: Synthetic oligonucleotide
  Antisense strand to SEQ ID NO: 573809
aaagucauacacaagaaau

SEQ ID NO: 573811 - RNA, 19 nt, Artificial Sequence
  Description of Artificial Sequence: Synthetic oligonucleotide
  Sense strand starting at position 3453 of SEQ ID NO: 318586
ugcuuccagucuuaaggga

SEQ ID NO: 573812 - RNA, 19 nt, Artificial Sequence
  Description of Artificial Sequence: Synthetic oligonucleotide
  Antisense strand to SEQ ID NO: 573811
ucccuuaagacuggaagca

SEQ ID NO: 573813 - RNA, 19 nt, Artificial Sequence
  Description of Artificial Sequence: Synthetic oligonucleotide
  Sense strand starting at position 3602 of SEQ ID NO: 318586
aggccaucgucacugacua

SEQ ID NO: 573814 - RNA, 19 nt, Artificial Sequence
  Description of Artificial Sequence: Synthetic oligonucleotide
  Antisense strand to SEQ ID NO: 573813
uagucagugacgauggccu

SEQ ID NO: 573815 - RNA, 19 nt, Artificial Sequence
  Description of Artificial Sequence: Synthetic oligonucleotide
  Sense strand starting at position 3610 of SEQ ID NO: 318586
gucacugacuacucacaga

SEQ ID NO: 573816 - RNA, 19 nt, Artificial Sequence
  Description of Artificial Sequence: Synthetic oligonucleotide
  Antisense strand to SEQ ID NO: 573815
ucugugaguagucagugac

SEQ ID NO: 573817 - RNA, 19 nt, Artificial Sequence
  Description of Artificial Sequence: Synthetic oligonucleotide
  Sense strand starting at position 3864 of SEQ ID NO: 318586
ucuguaauguuucuaccuu

SEQ ID NO: 573818 - RNA, 19 nt, Artificial Sequence
  Description of Artificial Sequence: Synthetic oligonucleotide
  Antisense strand to SEQ ID NO: 573817
aagguagaaacauuacaga

SEQ ID NO: 573819 - RNA, 19 nt, Artificial Sequence
  Description of Artificial Sequence: Synthetic oligonucleotide
  Sense strand starting at position 3865 of SEQ ID NO: 318586
cuguaauguuucuaccuuu

SEQ ID NO: 573820 - RNA, 19 nt, Artificial Sequence
  Description of Artificial Sequence: Synthetic oligonucleotide
  Antisense strand to SEQ ID NO: 573819
aaagguagaaacauuacag

SEQ ID NO: 573821 - RNA, 19 nt, Artificial Sequence
  Description of Artificial Sequence: Synthetic oligonucleotide
  Sense strand starting at position 3897 of SEQ ID NO: 318586
uucuuucuggccuaauaga

SEQ ID NO: 573822 - RNA, 19 nt, Artificial Sequence
  Description of Artificial Sequence: Synthetic oligonucleotide
  Antisense strand to SEQ ID NO: 573821
ucuauuaggccagaaagaa

SEQ ID NO: 573823 - RNA, 19 nt, Artificial Sequence
  Description of Artificial Sequence: Synthetic oligonucleotide
  Sense strand starting at position 3905 of SEQ ID NO: 318586
ggccuaauagauuaucagu

SEQ ID NO: 573824 - RNA, 19 nt, Artificial Sequence
  Description of Artificial Sequence: Synthetic oligonucleotide
  Antisense strand to SEQ ID NO: 573823
acugauaaucuauuaggcc

SEQ ID NO: 573825 - RNA, 19 nt, Artificial Sequence
  Description of Artificial Sequence: Synthetic oligonucleotide
  Sense strand starting at position 3907 of SEQ ID NO: 318586
ccuaauagauuaucagugu

SEQ ID NO: 573826 - RNA, 19 nt, Artificial Sequence
  Description of Artificial Sequence: Synthetic oligonucleotide
  Antisense strand to SEQ ID NO: 573825
acacugauaaucuauuagg

SEQ ID NO: 573827 - RNA, 19 nt, Artificial Sequence
  Description of Artificial Sequence: Synthetic oligonucleotide
  Sense strand starting at position 3908 of SEQ ID NO: 318586
cuaauagauuaucaguguu

SEQ ID NO: 573828 - RNA, 19 nt, Artificial Sequence
  Description of Artificial Sequence: Synthetic oligonucleotide
  Antisense strand to SEQ ID NO: 573827
aacacugauaaucuauuag

SEQ ID NO: 573829 - RNA, 19 nt, Artificial Sequence
  Description of Artificial Sequence: Synthetic oligonucleotide
  Sense strand starting at position 3926 of SEQ ID NO: 318586
ucauguauguucccuagau

SEQ ID NO: 573830 - RNA, 19 nt, Artificial Sequence
  Description of Artificial Sequence: Synthetic oligonucleotide
  Antisense strand to SEQ ID NO: 573829
aucuagggaacauacauga

SEQ ID NO: 573831 - RNA, 19 nt, Artificial Sequence
  Description of Artificial Sequence: Synthetic oligonucleotide
  Sense strand starting at position 3928 of SEQ ID NO: 318586
auguauguucccuagauau

SEQ ID NO: 573832 - RNA, 19 nt, Artificial Sequence
  Description of Artificial Sequence: Synthetic oligonucleotide
  Antisense strand to SEQ ID NO: 573831
auaucuagggaacauacau

SEQ ID NO: 573833 - RNA, 19 nt, Artificial Sequence
  Description of Artificial Sequence: Synthetic oligonucleotide
  Sense strand starting at position 3930 of SEQ ID NO: 318586
guauguucccuagauauua

SEQ ID NO: 573834 - RNA, 19 nt, Artificial Sequence
  Description of Artificial Sequence: Synthetic oligonucleotide
  Antisense strand to SEQ ID NO: 573833
uaauaucuagggaacauac

SEQ ID NO: 573835 - RNA, 19 nt, Artificial Sequence
  Description of Artificial Sequence: Synthetic oligonucleotide
  Sense strand starting at position 4 of SEQ ID NO: 318587
cccagucucuaguucggaa

SEQ ID NO: 573836 - RNA, 19 nt, Artificial Sequence
  Description of Artificial Sequence: Synthetic oligonucleotide
  Antisense strand to SEQ ID NO: 573835
uuccgaacuagagacuggg

SEQ ID NO: 573837 - RNA, 19 nt, Artificial Sequence
  Description of Artificial Sequence: Synthetic oligonucleotide
  Sense strand starting at position 7 of SEQ ID NO: 318587
agucucuaguucggaaagu

SEQ ID NO: 573838 - RNA, 19 nt, Artificial Sequence
  Description of Artificial Sequence: Synthetic oligonucleotide
  Antisense strand to SEQ ID NO: 573837
acuuuccgaacuagagacu

SEQ ID NO: 573839 - RNA, 19 nt, Artificial Sequence
  Description of Artificial Sequence: Synthetic oligonucleotide
  Sense strand starting at position 8 of SEQ ID NO: 318587
gucucuaguucggaaaguu

SEQ ID NO: 573840 - RNA, 19 nt, Artificial Sequence
  Description of Artificial Sequence: Synthetic oligonucleotide
  Antisense strand to SEQ ID NO: 573839
aacuuuccgaacuagagac

SEQ ID NO: 573841 - RNA, 19 nt, Artificial Sequence
  Description of Artificial Sequence: Synthetic oligonucleotide
  Sense strand starting at position 44 of SEQ ID NO: 318587
ggagcccucuccuuuaaca

SEQ ID NO: 573842 - RNA, 19 nt, Artificial Sequence
  Description of Artificial Sequence: Synthetic oligonucleotide
  Antisense strand to SEQ ID NO: 573841
uguuaaaggagagggcucc

SEQ ID NO: 573843 - RNA, 19 nt, Artificial Sequence
  Description of Artificial Sequence: Synthetic oligonucleotide
  Sense strand starting at position 360 of SEQ ID NO: 318587
cugggccagucccuuuaua

SEQ ID NO: 573844 - RNA, 19 nt, Artificial Sequence
  Description of Artificial Sequence: Synthetic oligonucleotide
  Antisense strand to SEQ ID NO: 573843
uauaaagggacuggcccag

SEQ ID NO: 573845 - RNA, 19 nt, Artificial Sequence
  Description of Artificial Sequence: Synthetic oligonucleotide
  Sense strand starting at position 419 of SEQ ID NO: 318587
cugaaauuagaacgcaaau

SEQ ID NO: 573846 - RNA, 19 nt, Artificial Sequence
  Description of Artificial Sequence: Synthetic oligonucleotide
  Antisense strand to SEQ ID NO: 573845
auuugcguucuaauuucag

SEQ ID NO: 573847 - RNA, 19 nt, Artificial Sequence
  Description of Artificial Sequence: Synthetic oligonucleotide
  Sense strand starting at position 951 of SEQ ID NO: 318587
ccuagaaaggcccaucguu

SEQ ID NO: 573848 - RNA, 19 nt, Artificial Sequence
  Description of Artificial Sequence: Synthetic oligonucleotide
  Antisense strand to SEQ ID NO: 573847
aacgaugggccuuucuagg

SEQ ID NO: 573849 - RNA, 19 nt, Artificial Sequence
  Description of Artificial Sequence: Synthetic oligonucleotide
  Sense strand starting at position 1164 of SEQ ID NO: 318587
aggagauguugcugagaag

SEQ ID NO: 573850 - RNA, 19 nt, Artificial Sequence
  Description of Artificial Sequence: Synthetic oligonucleotide
  Antisense strand to SEQ ID NO: 573849
cuucucagcaacaucuccu

SEQ ID NO: 573851 - RNA, 19 nt, Artificial Sequence
  Description of Artificial Sequence: Synthetic oligonucleotide
  Sense strand starting at position 1167 of SEQ ID NO: 318587
agauguugcugagaagggu

SEQ ID NO: 573852 - RNA, 19 nt, Artificial Sequence
  Description of Artificial Sequence: Synthetic oligonucleotide
  Antisense strand to SEQ ID NO: 573851
acccuucucagcaacaucu

SEQ ID NO: 573853 - RNA, 19 nt, Artificial Sequence
  Description of Artificial Sequence: Synthetic oligonucleotide
  Sense strand starting at position 1535 of SEQ ID NO: 318587
cccugauaucugcagugag

SEQ ID NO: 573854 - RNA, 19 nt, Artificial Sequence
  Description of Artificial Sequence: Synthetic oligonucleotide
  Antisense strand to SEQ ID NO: 573853
cucacugcagauaucaggg

SEQ ID NO: 573855 - RNA, 19 nt, Artificial Sequence
  Description of Artificial Sequence: Synthetic oligonucleotide
  Sense strand starting at position 1584 of SEQ ID NO: 318587
guuccucuucccugaguac

SEQ ID NO: 573856 - RNA, 19 nt, Artificial Sequence
  Description of Artificial Sequence: Synthetic oligonucleotide
  Antisense strand to SEQ ID NO: 573855
guacucagggaagaggaac

SEQ ID NO: 573857 - RNA, 19 nt, Artificial Sequence
  Description of Artificial Sequence: Synthetic oligonucleotide
  Sense strand starting at position 1585 of SEQ ID NO: 318587
uuccucuucccugaguaca

SEQ ID NO: 573858 - RNA, 19 nt, Artificial Sequence
  Description of Artificial Sequence: Synthetic oligonucleotide
  Antisense strand to SEQ ID NO: 573857
uguacucagggaagaggaa

SEQ ID NO: 573859 - RNA, 19 nt, Artificial Sequence
  Description of Artificial Sequence: Synthetic oligonucleotide
  Sense strand starting at position 2854 of SEQ ID NO: 318587
ccgcacuuguucugccaga

SEQ ID NO: 573860 - RNA, 19 nt, Artificial Sequence
  Description of Artificial Sequence: Synthetic oligonucleotide
  Antisense strand to SEQ ID NO: 573859
ucuggcagaacaagugcgg

SEQ ID NO: 573861 - RNA, 19 nt, Artificial Sequence
  Description of Artificial Sequence: Synthetic oligonucleotide
  Sense strand starting at position 3015 of SEQ ID NO: 318587
ggcagaauucucuguaggu

SEQ ID NO: 573862 - RNA, 19 nt, Artificial Sequence
  Description of Artificial Sequence: Synthetic oligonucleotide
  Antisense strand to SEQ ID NO: 573861
accuacagagaauucugcc

SEQ ID NO: 573863 - RNA, 19 nt, Artificial Sequence
  Description of Artificial Sequence: Synthetic oligonucleotide
  Sense strand starting at position 3016 of SEQ ID NO: 318587
gcagaauucucuguaggua

SEQ ID NO: 573864 - RNA, 19 nt, Artificial Sequence
  Description of Artificial Sequence: Synthetic oligonucleotide
  Antisense strand to SEQ ID NO: 573863
uaccuacagagaauucugc

SEQ ID NO: 573865 - RNA, 19 nt, Artificial Sequence
  Description of Artificial Sequence: Synthetic oligonucleotide
  Sense strand starting at position 3017 of SEQ ID NO: 318587
cagaauucucuguagguag

SEQ ID NO: 573866 - RNA, 19 nt, Artificial Sequence
  Description of Artificial Sequence: Synthetic oligonucleotide
  Antisense strand to SEQ ID NO: 573865
cuaccuacagagaauucug

SEQ ID NO: 573867 - RNA, 19 nt, Artificial Sequence
  Description of Artificial Sequence: Synthetic oligonucleotide
  Sense strand starting at position 3140 of SEQ ID NO: 318587
gcucuuugagucgugggua

SEQ ID NO: 573868 - RNA, 19 nt, Artificial Sequence
  Description of Artificial Sequence: Synthetic oligonucleotide
  Antisense strand to SEQ ID NO: 573867
uacccacgacucaaagagc

SEQ ID NO: 573869 - RNA, 19 nt, Artificial Sequence
  Description of Artificial Sequence: Synthetic oligonucleotide
  Sense strand starting at position 3143 of SEQ ID NO: 318587
cuuugagucguggguagag

SEQ ID NO: 573870 - RNA, 19 nt, Artificial Sequence
  Description of Artificial Sequence: Synthetic oligonucleotide
  Antisense strand to SEQ ID NO: 573869
cucuacccacgacucaaag

SEQ ID NO: 573871 - RNA, 19 nt, Artificial Sequence
  Description of Artificial Sequence: Synthetic oligonucleotide
  Sense strand starting at position 3434 of SEQ ID NO: 318587
uaaggauccugugagguau

SEQ ID NO: 573872 - RNA, 19 nt, Artificial Sequence
  Description of Artificial Sequence: Synthetic oligonucleotide
  Antisense strand to SEQ ID NO: 573871
auaccucacaggauccuua

SEQ ID NO: 573873 - RNA, 19 nt, Artificial Sequence
  Description of Artificial Sequence: Synthetic oligonucleotide
  Sense strand starting at position 3438 of SEQ ID NO: 318587
gauccugugagguaugagu

SEQ ID NO: 573874 - RNA, 19 nt, Artificial Sequence
  Description of Artificial Sequence: Synthetic oligonucleotide
  Antisense strand to SEQ ID NO: 573873
acucauaccucacaggauc

SEQ ID NO: 573875 - RNA, 19 nt, Artificial Sequence
  Description of Artificial Sequence: Synthetic oligonucleotide
  Sense strand starting at position 3440 of SEQ ID NO: 318587
uccugugagguaugaguau

SEQ ID NO: 573876 - RNA, 19 nt, Artificial Sequence
  Description of Artificial Sequence: Synthetic oligonucleotide
  Antisense strand to SEQ ID NO: 573875
auacucauaccucacagga

SEQ ID NO: 573877 - RNA, 19 nt, Artificial Sequence
  Description of Artificial Sequence: Synthetic oligonucleotide
  Sense strand starting at position 3491 of SEQ ID NO: 318587
gucacuguuucugugguga

SEQ ID NO: 573878 - RNA, 19 nt, Artificial Sequence
  Description of Artificial Sequence: Synthetic oligonucleotide
  Antisense strand to SEQ ID NO: 573877
ucaccacagaaacagugac

SEQ ID NO: 573879 - RNA, 19 nt, Artificial Sequence
  Description of Artificial Sequence: Synthetic oligonucleotide
  Sense strand starting at position 3511 of SEQ ID NO: 318587
ccaguaguaccaggucuuu

SEQ ID NO: 573880 - RNA, 19 nt, Artificial Sequence
  Description of Artificial Sequence: Synthetic oligonucleotide
  Antisense strand to SEQ ID NO: 573879
aaagaccugguacuacugg

SEQ ID NO: 573881 - RNA, 19 nt, Artificial Sequence
  Description of Artificial Sequence: Synthetic oligonucleotide
  Sense strand starting at position 3547 of SEQ ID NO: 318587
cugggaaucugggcucuua

SEQ ID NO: 573882 - RNA, 19 nt, Artificial Sequence
  Description of Artificial Sequence: Synthetic oligonucleotide
  Antisense strand to SEQ ID NO: 573881
uaagagcccagauucccag

SEQ ID NO: 573883 - RNA, 19 nt, Artificial Sequence
  Description of Artificial Sequence: Synthetic oligonucleotide
  Sense strand starting at position 3577 of SEQ ID NO: 318587
cucguugucacauguagaa

SEQ ID NO: 573884 - RNA, 19 nt, Artificial Sequence
  Description of Artificial Sequence: Synthetic oligonucleotide
  Antisense strand to SEQ ID NO: 573883
uucuacaugugacaacgag

SEQ ID NO: 573885 - RNA, 19 nt, Artificial Sequence
  Description of Artificial Sequence: Synthetic oligonucleotide
  Sense strand starting at position 3771 of SEQ ID NO: 318587
ugggcaucauccuggaaac

SEQ ID NO: 573886 - RNA, 19 nt, Artificial Sequence
  Description of Artificial Sequence: Synthetic oligonucleotide
  Antisense strand to SEQ ID NO: 573885
guuuccaggaugaugccca

SEQ ID NO: 573887 - RNA, 19 nt, Artificial Sequence
  Description of Artificial Sequence: Synthetic oligonucleotide
  Sense strand starting at position 3853 of SEQ ID NO: 318587
ggcccaauuuccuaucuag

SEQ ID NO: 573888 - RNA, 19 nt, Artificial Sequence
  Description of Artificial Sequence: Synthetic oligonucleotide
  Antisense strand to SEQ ID NO: 573887
cuagauaggaaauugggcc

SEQ ID NO: 573889 - RNA, 19 nt, Artificial Sequence
  Description of Artificial Sequence: Synthetic oligonucleotide
  Sense strand starting at position 252 of SEQ ID NO: 318588
uugaacugaugagcucaaa

SEQ ID NO: 573890 - RNA, 19 nt, Artificial Sequence
  Description of Artificial Sequence: Synthetic oligonucleotide
  Antisense strand to SEQ ID NO: 573889
uuugagcucaucaguucaa

SEQ ID NO: 573891 - RNA, 19 nt, Artificial Sequence
  Description of Artificial Sequence: Synthetic oligonucleotide
  Sense strand starting at position 587 of SEQ ID NO: 318588
acgacaguuuccucuagaa

SEQ ID NO: 573892 - RNA, 19 nt, Artificial Sequence
  Description of Artificial Sequence: Synthetic oligonucleotide
  Antisense strand to SEQ ID NO: 573891
uucuagaggaaacugucgu

SEQ ID NO: 573893 - RNA, 19 nt, Artificial Sequence
  Description of Artificial Sequence: Synthetic oligonucleotide
  Sense strand starting at position 591 of SEQ ID NO: 318588
caguuuccucuagaaggcu

SEQ ID NO: 573894 - RNA, 19 nt, Artificial Sequence
  Description of Artificial Sequence: Synthetic oligonucleotide
  Antisense strand to SEQ ID NO: 573893
agccuucuagaggaaacug

SEQ ID NO: 573895 - RNA, 19 nt, Artificial Sequence
  Description of Artificial Sequence: Synthetic oligonucleotide
  Sense strand starting at position 600 of SEQ ID NO: 318588
cuagaaggcuccuauaagu

SEQ ID NO: 573896 - RNA, 19 nt, Artificial Sequence
  Description of Artificial Sequence: Synthetic oligonucleotide
  Antisense strand to SEQ ID NO: 573895
acuuauaggagccuucuag

SEQ ID NO: 573897 - RNA, 19 nt, Artificial Sequence
  Description of Artificial Sequence: Synthetic oligonucleotide
  Sense strand starting at position 619 of SEQ ID NO: 318588
cccagucucuaguucggaa

SEQ ID NO: 573898 - RNA, 19 nt, Artificial Sequence
  Description of Artificial Sequence: Synthetic oligonucleotide
  Antisense strand to SEQ ID NO: 573897
uuccgaacuagagacuggg

SEQ ID NO: 573899 - RNA, 19 nt, Artificial Sequence
  Description of Artificial Sequence: Synthetic oligonucleotide
  Sense strand starting at position 622 of SEQ ID NO: 318588
agucucuaguucggaaagu

SEQ ID NO: 573900 - RNA, 19 nt, Artificial Sequence
  Description of Artificial Sequence: Synthetic oligonucleotide
  Antisense strand to SEQ ID NO: 573899
acuuuccgaacuagagacu

SEQ ID NO: 573901 - RNA, 19 nt, Artificial Sequence
  Description of Artificial Sequence: Synthetic oligonucleotide
  Sense strand starting at position 623 of SEQ ID NO: 318588
gucucuaguucggaaaguu

SEQ ID NO: 573902 - RNA, 19 nt, Artificial Sequence
  Description of Artificial Sequence: Synthetic oligonucleotide
  Antisense strand to SEQ ID NO: 573901
aacuuuccgaacuagagac

SEQ ID NO: 573903 - RNA, 19 nt, Artificial Sequence
  Description of Artificial Sequence: Synthetic oligonucleotide
  Sense strand starting at position 659 of SEQ ID NO: 318588
ggagcccucuccuuuaaca

SEQ ID NO: 573904 - RNA, 19 nt, Artificial Sequence
  Description of Artificial Sequence: Synthetic oligonucleotide
  Antisense strand to SEQ ID NO: 573903
uguuaaaggagagggcucc

SEQ ID NO: 573905 - RNA, 19 nt, Artificial Sequence
  Description of Artificial Sequence: Synthetic oligonucleotide
  Sense strand starting at position 975 of SEQ ID NO: 318588
cugggccagucccuuuaua

SEQ ID NO: 573906 - RNA, 19 nt, Artificial Sequence
  Description of Artificial Sequence: Synthetic oligonucleotide
  Antisense strand to SEQ ID NO: 573905
uauaaagggacuggcccag

SEQ ID NO: 573907 - RNA, 19 nt, Artificial Sequence
  Description of Artificial Sequence: Synthetic oligonucleotide
  Sense strand starting at position 1034 of SEQ ID NO: 318588
cugaaauuagaacgcaaau

SEQ ID NO: 573908 - RNA, 19 nt, Artificial Sequence
  Description of Artificial Sequence: Synthetic oligonucleotide
  Antisense strand to SEQ ID NO: 573907
auuugcguucuaauuucag

SEQ ID NO: 573909 - RNA, 19 nt, Artificial Sequence
  Description of Artificial Sequence: Synthetic oligonucleotide
  Sense strand starting at position 1566 of SEQ ID NO: 318588
ccuagaaaggcccaucguu

SEQ ID NO: 573910 - RNA, 19 nt, Artificial Sequence
  Description of Artificial Sequence: Synthetic oligonucleotide
  Antisense strand to SEQ ID NO: 573909
aacgaugggccuuucuagg

SEQ ID NO: 573911 - RNA, 19 nt, Artificial Sequence
  Description of Artificial Sequence: Synthetic oligonucleotide
  Sense strand starting at position 1779 of SEQ ID NO: 318588
aggagauguugcugagaag

SEQ ID NO: 573912 - RNA, 19 nt, Artificial Sequence
  Description of Artificial Sequence: Synthetic oligonucleotide
  Antisense strand to SEQ ID NO: 573911
cuucucagcaacaucuccu

SEQ ID NO: 573913 - RNA, 19 nt, Artificial Sequence
  Description of Artificial Sequence: Synthetic oligonucleotide
  Sense strand starting at position 1782 of SEQ ID NO: 318588
agauguugcugagaagggu

SEQ ID NO: 573914 - RNA, 19 nt, Artificial Sequence
  Description of Artificial Sequence: Synthetic oligonucleotide
  Antisense strand to SEQ ID NO: 573913
acccuucucagcaacaucu

SEQ ID NO: 573915 - RNA, 19 nt, Artificial Sequence
  Description of Artificial Sequence: Synthetic oligonucleotide
  Sense strand starting at position 2150 of SEQ ID NO: 318588
cccugauaucugcagugag

SEQ ID NO: 573916 - RNA, 19 nt, Artificial Sequence
  Description of Artificial Sequence: Synthetic oligonucleotide
  Antisense strand to SEQ ID NO: 573915
cucacugcagauaucaggg

SEQ ID NO: 573917 - RNA, 19 nt, Artificial Sequence
  Description of Artificial Sequence: Synthetic oligonucleotide
  Sense strand starting at position 2199 of SEQ ID NO: 318588
guuccucuucccugaguac

SEQ ID NO: 573918 - RNA, 19 nt, Artificial Sequence
  Description of Artificial Sequence: Synthetic oligonucleotide
  Antisense strand to SEQ ID NO: 573917
guacucagggaagaggaac

SEQ ID NO: 573919 - RNA, 19 nt, Artificial Sequence
  Description of Artificial Sequence: Synthetic oligonucleotide
  Sense strand starting at position 2200 of SEQ ID NO: 318588
uuccucuucccugaguaca

SEQ ID NO: 573920 - RNA, 19 nt, Artificial Sequence
  Description of Artificial Sequence: Synthetic oligonucleotide
  Antisense strand to SEQ ID NO: 573919
uguacucagggaagaggaa

SEQ ID NO: 573921 - RNA, 19 nt, Artificial Sequence
  Description of Artificial Sequence: Synthetic oligonucleotide
  Sense strand starting at position 3469 of SEQ ID NO: 318588
ccgcacuuguucugccaga

SEQ ID NO: 573922 - RNA, 19 nt, Artificial Sequence
  Description of Artificial Sequence: Synthetic oligonucleotide
  Antisense strand to SEQ ID NO: 573921
ucuggcagaacaagugcgg

SEQ ID NO: 573923 - RNA, 19 nt, Artificial Sequence
  Description of Artificial Sequence: Synthetic oligonucleotide
  Sense strand starting at position 3630 of SEQ ID NO: 318588
ggcagaauucucuguaggu

SEQ ID NO: 573924 - RNA, 19 nt, Artificial Sequence
  Description of Artificial Sequence: Synthetic oligonucleotide
  Antisense strand to SEQ ID NO: 573923
accuacagagaauucugcc

SEQ ID NO: 573925 - RNA, 19 nt, Artificial Sequence
  Description of Artificial Sequence: Synthetic oligonucleotide
  Sense strand starting at position 3631 of SEQ ID NO: 318588
gcagaauucucuguaggua

SEQ ID NO: 573926 - RNA, 19 nt, Artificial Sequence
  Description of Artificial Sequence: Synthetic oligonucleotide
  Antisense strand to SEQ ID NO: 573925
uaccuacagagaauucugc

SEQ ID NO: 573927 - RNA, 19 nt, Artificial Sequence
  Description of Artificial Sequence: Synthetic oligonucleotide
  Sense strand starting at position 3632 of SEQ ID NO: 318588
cagaauucucuguagguag

SEQ ID NO: 573928 - RNA, 19 nt, Artificial Sequence
  Description of Artificial Sequence: Synthetic oligonucleotide
  Antisense strand to SEQ ID NO: 573927
cuaccuacagagaauucug

SEQ ID NO: 573929 - RNA, 19 nt, Artificial Sequence
  Description of Artificial Sequence: Synthetic oligonucleotide
  Sense strand starting at position 3755 of SEQ ID NO: 318588
gcucuuugagucgugggua

SEQ ID NO: 573930 - RNA, 19 nt, Artificial Sequence
  Description of Artificial Sequence: Synthetic oligonucleotide
  Antisense strand to SEQ ID NO: 573929
uacccacgacucaaagagc

SEQ ID NO: 573931 - RNA, 19 nt, Artificial Sequence
  Description of Artificial Sequence: Synthetic oligonucleotide
  Sense strand starting at position 3758 of SEQ ID NO: 318588
cuuugagucguggguagag

SEQ ID NO: 573932 - RNA, 19 nt, Artificial Sequence
  Description of Artificial Sequence: Synthetic oligonucleotide
  Antisense strand to SEQ ID NO: 573931
cucuacccacgacucaaag

SEQ ID NO: 573933 - RNA, 19 nt, Artificial Sequence
  Description of Artificial Sequence: Synthetic oligonucleotide
  Sense strand starting at position 229 of SEQ ID NO: 318589
cgucuucaacugugggaga

SEQ ID NO: 573934 - RNA, 19 nt, Artificial Sequence
  Description of Artificial Sequence: Synthetic oligonucleotide
  Antisense strand to SEQ ID NO: 573933
ucucccacaguugaagacg

SEQ ID NO: 573935 - RNA, 19 nt, Artificial Sequence
  Description of Artificial Sequence: Synthetic oligonucleotide
  Sense strand starting at position 283 of SEQ ID NO: 318589
ccacaaaggccuuagacuu

SEQ ID NO: 573936 - RNA, 19 nt, Artificial Sequence
  Description of Artificial Sequence: Synthetic oligonucleotide
  Antisense strand to SEQ ID NO: 573935
aagucuaaggccuuugugg

SEQ ID NO: 573937 - RNA, 19 nt, Artificial Sequence
  Description of Artificial Sequence: Synthetic oligonucleotide
  Sense strand starting at position 368 of SEQ ID NO: 318589
agacacguauuuguaugua

SEQ ID NO: 573938 - RNA, 19 nt, Artificial Sequence
  Description of Artificial Sequence: Synthetic oligonucleotide
  Antisense strand to SEQ ID NO: 573937
uacauacaaauacgugucu

SEQ ID NO: 573939 - RNA, 19 nt, Artificial Sequence
  Description of Artificial Sequence: Synthetic oligonucleotide
  Sense strand starting at position 376 of SEQ ID NO: 318589
auuuguauguagucuccau

SEQ ID NO: 573940 - RNA, 19 nt, Artificial Sequence
  Description of Artificial Sequence: Synthetic oligonucleotide
  Antisense strand to SEQ ID NO: 573939
auggagacuacauacaaau

SEQ ID NO: 573941 - RNA, 19 nt, Artificial Sequence
  Description of Artificial Sequence: Synthetic oligonucleotide
  Sense strand starting at position 380 of SEQ ID NO: 318589
guauguagucuccauuugu

SEQ ID NO: 573942 - RNA, 19 nt, Artificial Sequence
  Description of Artificial Sequence: Synthetic oligonucleotide
  Antisense strand to SEQ ID NO: 573941
acaaauggagacuacauac

SEQ ID NO: 573943 - RNA, 19 nt, Artificial Sequence
  Description of Artificial Sequence: Synthetic oligonucleotide
  Sense strand starting at position 384 of SEQ ID NO: 318589
guagucuccauuugugaca

SEQ ID NO: 573944 - RNA, 19 nt, Artificial Sequence
  Description of Artificial Sequence: Synthetic oligonucleotide
  Antisense strand to SEQ ID NO: 573943
ugucacaaauggagacuac

SEQ ID NO: 573945 - RNA, 19 nt, Artificial Sequence
  Description of Artificial Sequence: Synthetic oligonucleotide
  Sense strand starting at position 386 of SEQ ID NO: 318589
agucuccauuugugacaga

SEQ ID NO: 573946 - RNA, 19 nt, Artificial Sequence
  Description of Artificial Sequence: Synthetic oligonucleotide
  Antisense strand to SEQ ID NO: 573945
ucugucacaaauggagacu

SEQ ID NO: 573947 - RNA, 19 nt, Artificial Sequence
  Description of Artificial Sequence: Synthetic oligonucleotide
  Sense strand starting at position 387 of SEQ ID NO: 318589
gucuccauuugugacagau

SEQ ID NO: 573948 - RNA, 19 nt, Artificial Sequence
  Description of Artificial Sequence: Synthetic oligonucleotide
  Antisense strand to SEQ ID NO: 573947
aucugucacaaauggagac

SEQ ID NO: 573949 - RNA, 19 nt, Artificial Sequence
  Description of Artificial Sequence: Synthetic oligonucleotide
  Sense strand starting at position 389 of SEQ ID NO: 318589
cuccauuugugacagauac

SEQ ID NO: 573950 - RNA, 19 nt, Artificial Sequence
  Description of Artificial Sequence: Synthetic oligonucleotide
  Antisense strand to SEQ ID NO: 573949
guaucugucacaaauggag

SEQ ID NO: 573951 - RNA, 19 nt, Artificial Sequence
  Description of Artificial Sequence: Synthetic oligonucleotide
  Sense strand starting at position 415 of SEQ ID NO: 318589
cugaaauggcuuuaaagca

SEQ ID NO: 573952 - RNA, 19 nt, Artificial Sequence
  Description of Artificial Sequence: Synthetic oligonucleotide
  Antisense strand to SEQ ID NO: 573951
ugcuuuaaagccauuucag

SEQ ID NO: 573953 - RNA, 19 nt, Artificial Sequence
  Description of Artificial Sequence: Synthetic oligonucleotide
  Sense strand starting at position 587 of SEQ ID NO: 318589
ugauaugugccacaacacu

SEQ ID NO: 573954 - RNA, 19 nt, Artificial Sequence
  Description of Artificial Sequence: Synthetic oligonucleotide
  Antisense strand to SEQ ID NO: 573953
aguguuguggcacauauca

SEQ ID NO: 573955 - RNA, 19 nt, Artificial Sequence
  Description of Artificial Sequence: Synthetic oligonucleotide
  Sense strand starting at position 638 of SEQ ID NO: 318589
gcaagacuacauugucuga

SEQ ID NO: 573956 - RNA, 19 nt, Artificial Sequence
  Description of Artificial Sequence: Synthetic oligonucleotide
  Antisense strand to SEQ ID NO: 573955
ucagacaauguagucuugc

SEQ ID NO: 573957 - RNA, 19 nt, Artificial Sequence
  Description of Artificial Sequence: Synthetic oligonucleotide
  Sense strand starting at position 643 of SEQ ID NO: 318589
acuacauugucugauucua

SEQ ID NO: 573958 - RNA, 19 nt, Artificial Sequence
  Description of Artificial Sequence: Synthetic oligonucleotide
  Antisense strand to SEQ ID NO: 573957
uagaaucagacaauguagu

SEQ ID NO: 573959 - RNA, 19 nt, Artificial Sequence
  Description of Artificial Sequence: Synthetic oligonucleotide
  Sense strand starting at position 668 of SEQ ID NO: 318589
ugaaauguccaggauugca

SEQ ID NO: 573960 - RNA, 19 nt, Artificial Sequence
  Description of Artificial Sequence: Synthetic oligonucleotide
  Antisense strand to SEQ ID NO: 573959
ugcaauccuggacauuuca

SEQ ID NO: 573961 - RNA, 19 nt, Artificial Sequence
  Description of Artificial Sequence: Synthetic oligonucleotide
  Sense strand starting at position 723 of SEQ ID NO: 318589
uguggauaagagggugaua

SEQ ID NO: 573962 - RNA, 19 nt, Artificial Sequence
  Description of Artificial Sequence: Synthetic oligonucleotide
  Antisense strand to SEQ ID NO: 573961
uaucacccucuuauccaca

SEQ ID NO: 573963 - RNA, 19 nt, Artificial Sequence
  Description of Artificial Sequence: Synthetic oligonucleotide
  Sense strand starting at position 755 of SEQ ID NO: 318589
gcguuuauaaggugaugaa

SEQ ID NO: 573964 - RNA, 19 nt, Artificial Sequence
  Description of Artificial Sequence: Synthetic oligonucleotide
  Antisense strand to SEQ ID NO: 573963
uucaucaccuuauaaacgc

SEQ ID NO: 573965 - RNA, 19 nt, Artificial Sequence
  Description of Artificial Sequence: Synthetic oligonucleotide
  Sense strand starting at position 756 of SEQ ID NO: 318589
cguuuauaaggugaugaaa

SEQ ID NO: 573966 - RNA, 19 nt, Artificial Sequence
  Description of Artificial Sequence: Synthetic oligonucleotide
  Antisense strand to SEQ ID NO: 573965
uuucaucaccuuauaaacg

SEQ ID NO: 573967 - RNA, 19 nt, Artificial Sequence
  Description of Artificial Sequence: Synthetic oligonucleotide
  Sense strand starting at position 1087 of SEQ ID NO: 318589
ugaagaacguucucgucca

SEQ ID NO: 573968 - RNA, 19 nt, Artificial Sequence
  Description of Artificial Sequence: Synthetic oligonucleotide
  Antisense strand to SEQ ID NO: 573967
uggacgagaacguucuuca

SEQ ID NO: 573969 - RNA, 19 nt, Artificial Sequence
  Description of Artificial Sequence: Synthetic oligonucleotide
  Sense strand starting at position 1102 of SEQ ID NO: 318589
uccacuugccaaugggaaa

SEQ ID NO: 573970 - RNA, 19 nt, Artificial Sequence
  Description of Artificial Sequence: Synthetic oligonucleotide
  Antisense strand to SEQ ID NO: 573969
uuucccauuggcaagugga

SEQ ID NO: 573971 - RNA, 19 nt, Artificial Sequence
  Description of Artificial Sequence: Synthetic oligonucleotide
  Sense strand starting at position 1270 of SEQ ID NO: 318589
agggcauuaucugaaccca

SEQ ID NO: 573972 - RNA, 19 nt, Artificial Sequence
  Description of Artificial Sequence: Synthetic oligonucleotide
  Antisense strand to SEQ ID NO: 573971
uggguucagauaaugcccu

SEQ ID NO: 573973 - RNA, 19 nt, Artificial Sequence
  Description of Artificial Sequence: Synthetic oligonucleotide
  Sense strand starting at position 2277 of SEQ ID NO: 318589
ggccaugacucagcaauau

SEQ ID NO: 573974 - RNA, 19 nt, Artificial Sequence
  Description of Artificial Sequence: Synthetic oligonucleotide
  Antisense strand to SEQ ID NO: 573973
auauugcugagucauggcc

SEQ ID NO: 573975 - RNA, 19 nt, Artificial Sequence
  Description of Artificial Sequence: Synthetic oligonucleotide
  Sense strand starting at position 2286 of SEQ ID NO: 318589
ucagcaauauccucaguug

SEQ ID NO: 573976 - RNA, 19 nt, Artificial Sequence
  Description of Artificial Sequence: Synthetic oligonucleotide
  Antisense strand to SEQ ID NO: 573975
caacugaggauauugcuga

SEQ ID NO: 573977 - RNA, 19 nt, Artificial Sequence
  Description of Artificial Sequence: Synthetic oligonucleotide
  Sense strand starting at position 2488 of SEQ ID NO: 318589
uagcauacucggugacgga

SEQ ID NO: 573978 - RNA, 19 nt, Artificial Sequence
  Description of Artificial Sequence: Synthetic oligonucleotide
  Antisense strand to SEQ ID NO: 573977
uccgucaccgaguaugcua

SEQ ID NO: 573979 - RNA, 19 nt, Artificial Sequence
  Description of Artificial Sequence: Synthetic oligonucleotide
  Sense strand starting at position 2528 of SEQ ID NO: 318589
cagagaaguucccaguuua

SEQ ID NO: 573980 - RNA, 19 nt, Artificial Sequence
  Description of Artificial Sequence: Synthetic oligonucleotide
  Antisense strand to SEQ ID NO: 573979
uaaacugggaacuucucug

SEQ ID NO: 573981 - RNA, 19 nt, Artificial Sequence
  Description of Artificial Sequence: Synthetic oligonucleotide
  Sense strand starting at position 2539 of SEQ ID NO: 318589
ccaguuuaguaggagugga

SEQ ID NO: 573982 - RNA, 19 nt, Artificial Sequence
  Description of Artificial Sequence: Synthetic oligonucleotide
  Antisense strand to SEQ ID NO: 573981
uccacuccuacuaaacugg

SEQ ID NO: 573983 - RNA, 19 nt, Artificial Sequence
  Description of Artificial Sequence: Synthetic oligonucleotide
  Sense strand starting at position 2578 of SEQ ID NO: 318589
cagcuaaggucuccugagu

SEQ ID NO: 573984 - RNA, 19 nt, Artificial Sequence
  Description of Artificial Sequence: Synthetic oligonucleotide
  Antisense strand to SEQ ID NO: 573983
acucaggagaccuuagcug

SEQ ID NO: 573985 - RNA, 19 nt, Artificial Sequence
  Description of Artificial Sequence: Synthetic oligonucleotide
  Sense strand starting at position 2593 of SEQ ID NO: 318589
gagugucaguggucgccaa

SEQ ID NO: 573986 - RNA, 19 nt, Artificial Sequence
  Description of Artificial Sequence: Synthetic oligonucleotide
  Antisense strand to SEQ ID NO: 573985
uuggcgaccacugacacuc

SEQ ID NO: 573987 - RNA, 19 nt, Artificial Sequence
  Description of Artificial Sequence: Synthetic oligonucleotide
  Sense strand starting at position 2595 of SEQ ID NO: 318589
gugucaguggucgccaagu

SEQ ID NO: 573988 - RNA, 19 nt, Artificial Sequence
  Description of Artificial Sequence: Synthetic oligonucleotide
  Antisense strand to SEQ ID NO: 573987
acuuggcgaccacugacac

SEQ ID NO: 573989 - RNA, 19 nt, Artificial Sequence
  Description of Artificial Sequence: Synthetic oligonucleotide
  Sense strand starting at position 2597 of SEQ ID NO: 318589
gucaguggucgccaagugu

SEQ ID NO: 573990 - RNA, 19 nt, Artificial Sequence
  Description of Artificial Sequence: Synthetic oligonucleotide
  Antisense strand to SEQ ID NO: 573989
acacuuggcgaccacugac

SEQ ID NO: 573991 - RNA, 19 nt, Artificial Sequence
  Description of Artificial Sequence: Synthetic oligonucleotide
  Sense strand starting at position 2759 of SEQ ID NO: 318589
gcuuuaugccaccagagua

SEQ ID NO: 573992 - RNA, 19 nt, Artificial Sequence
  Description of Artificial Sequence: Synthetic oligonucleotide
  Antisense strand to SEQ ID NO: 573991
uacucugguggcauaaagc

SEQ ID NO: 573993 - RNA, 19 nt, Artificial Sequence
  Description of Artificial Sequence: Synthetic oligonucleotide
  Sense strand starting at position 2773 of SEQ ID NO: 318589
gaguaaccuguccgccaga

SEQ ID NO: 573994 - RNA, 19 nt, Artificial Sequence
  Description of Artificial Sequence: Synthetic oligonucleotide
  Antisense strand to SEQ ID NO: 573993
ucuggcggacagguuacuc

SEQ ID NO: 573995 - RNA, 19 nt, Artificial Sequence
  Description of Artificial Sequence: Synthetic oligonucleotide
  Sense strand starting at position 2776 of SEQ ID NO: 318589
uaaccuguccgccagaacu

SEQ ID NO: 573996 - RNA, 19 nt, Artificial Sequence
  Description of Artificial Sequence: Synthetic oligonucleotide
  Antisense strand to SEQ ID NO: 573995
aguucuggcggacagguua

SEQ ID NO: 573997 - RNA, 19 nt, Artificial Sequence
  Description of Artificial Sequence: Synthetic oligonucleotide
  Sense strand starting at position 3020 of SEQ ID NO: 318589
cugguccacaggugugaau

SEQ ID NO: 573998 - RNA, 19 nt, Artificial Sequence
  Description of Artificial Sequence: Synthetic oligonucleotide
  Antisense strand to SEQ ID NO: 573997
auucacaccuguggaccag

SEQ ID NO: 573999 - RNA, 19 nt, Artificial Sequence
  Description of Artificial Sequence: Synthetic oligonucleotide
  Sense strand starting at position 3023 of SEQ ID NO: 318589
guccacaggugugaaugau

SEQ ID NO: 574000 - RNA, 19 nt, Artificial Sequence
  Description of Artificial Sequence: Synthetic oligonucleotide
  Antisense strand to SEQ ID NO: 573999
aucauucacaccuguggac

SEQ ID NO: 574001 - RNA, 19 nt, Artificial Sequence
  Description of Artificial Sequence: Synthetic oligonucleotide
  Sense strand starting at position 3027 of SEQ ID NO: 318589
acaggugugaaugauccuu

SEQ ID NO: 574002 - RNA, 19 nt, Artificial Sequence
  Description of Artificial Sequence: Synthetic oligonucleotide
  Antisense strand to SEQ ID NO: 574001
aaggaucauucacaccugu

SEQ ID NO: 574003 - RNA, 19 nt, Artificial Sequence
  Description of Artificial Sequence: Synthetic oligonucleotide
  Sense strand starting at position 3376 of SEQ ID NO: 318589
gaacauagcuuugaggaag

SEQ ID NO: 574004 - RNA, 19 nt, Artificial Sequence
  Description of Artificial Sequence: Synthetic oligonucleotide
  Antisense strand to SEQ ID NO: 574003
cuuccucaaagcuauguuc

SEQ ID NO: 574005 - RNA, 19 nt, Artificial Sequence
  Description of Artificial Sequence: Synthetic oligonucleotide
  Sense strand starting at position 3457 of SEQ ID NO: 318589
uuugggaucgcgggaaguu

SEQ ID NO: 574006 - RNA, 19 nt, Artificial Sequence
  Description of Artificial Sequence: Synthetic oligonucleotide
  Antisense strand to SEQ ID NO: 574005
aacuucccgcgaucccaaa

SEQ ID NO: 574007 - RNA, 19 nt, Artificial Sequence
  Description of Artificial Sequence: Synthetic oligonucleotide
  Sense strand starting at position 3458 of SEQ ID NO: 318589
uugggaucgcgggaaguuu

SEQ ID NO: 574008 - RNA, 19 nt, Artificial Sequence
  Description of Artificial Sequence: Synthetic oligonucleotide
  Antisense strand to SEQ ID NO: 574007
aaacuucccgcgaucccaa

SEQ ID NO: 574009 - RNA, 19 nt, Artificial Sequence
  Description of Artificial Sequence: Synthetic oligonucleotide
  Sense strand starting at position 3740 of SEQ ID NO: 318589
ccaugaccgcugucguaau

SEQ ID NO: 574010 - RNA, 19 nt, Artificial Sequence
  Description of Artificial Sequence: Synthetic oligonucleotide
  Antisense strand to SEQ ID NO: 574009
auuacgacagcggucaugg

SEQ ID NO: 574011 - RNA, 19 nt, Artificial Sequence
  Description of Artificial Sequence: Synthetic oligonucleotide
  Sense strand starting at position 3786 of SEQ ID NO: 318589
ccaucucagugaccucuua

SEQ ID NO: 574012 - RNA, 19 nt, Artificial Sequence
  Description of Artificial Sequence: Synthetic oligonucleotide
  Antisense strand to SEQ ID NO: 574011
uaagaggucacugagaugg

SEQ ID NO: 574013 - RNA, 19 nt, Artificial Sequence
  Description of Artificial Sequence: Synthetic oligonucleotide
  Sense strand starting at position 7 of SEQ ID NO: 318590
uuggguagaagucagaguu

SEQ ID NO: 574014 - RNA, 19 nt, Artificial Sequence
  Description of Artificial Sequence: Synthetic oligonucleotide
  Antisense strand to SEQ ID NO: 574013
aacucugacuucuacccaa

SEQ ID NO: 574015 - RNA, 19 nt, Artificial Sequence
  Description of Artificial Sequence: Synthetic oligonucleotide
  Sense strand starting at position 13 of SEQ ID NO: 318590
agaagucagaguugcugau

SEQ ID NO: 574016 - RNA, 19 nt, Artificial Sequence
  Description of Artificial Sequence: Synthetic oligonucleotide
  Antisense strand to SEQ ID NO: 574015
aucagcaacucugacuucu

SEQ ID NO: 574017 - RNA, 19 nt, Artificial Sequence
  Description of Artificial Sequence: Synthetic oligonucleotide
  Sense strand starting at position 17 of SEQ ID NO: 318590
gucagaguugcugauuaac

SEQ ID NO: 574018 - RNA, 19 nt, Artificial Sequence
  Description of Artificial Sequence: Synthetic oligonucleotide
  Antisense strand to SEQ ID NO: 574017
guuaaucagcaacucugac

SEQ ID NO: 574019 - RNA, 19 nt, Artificial Sequence
  Description of Artificial Sequence: Synthetic oligonucleotide
  Sense strand starting at position 19 of SEQ ID NO: 318590
cagaguugcugauuaacau

SEQ ID NO: 574020 - RNA, 19 nt, Artificial Sequence
  Description of Artificial Sequence: Synthetic oligonucleotide
  Antisense strand to SEQ ID NO: 574019
auguuaaucagcaacucug

SEQ ID NO: 574021 - RNA, 19 nt, Artificial Sequence
  Description of Artificial Sequence: Synthetic oligonucleotide
  Sense strand starting at position 20 of SEQ ID NO: 318590
agaguugcugauuaacaua

SEQ ID NO: 574022 - RNA, 19 nt, Artificial Sequence
  Description of Artificial Sequence: Synthetic oligonucleotide
  Antisense strand to SEQ ID NO: 574021
uauguuaaucagcaacucu

SEQ ID NO: 574023 - RNA, 19 nt, Artificial Sequence
  Description of Artificial Sequence: Synthetic oligonucleotide
  Sense strand starting at position 62 of SEQ ID NO: 318590
agaauuaucuggccacaac

SEQ ID NO: 574024 - RNA, 19 nt, Artificial Sequence
  Description of Artificial Sequence: Synthetic oligonucleotide
  Antisense strand to SEQ ID NO: 574023
guuguggccagauaauucu

SEQ ID NO: 574025 - RNA, 19 nt, Artificial Sequence
  Description of Artificial Sequence: Synthetic oligonucleotide
  Sense strand starting at position 83 of SEQ ID NO: 318590
aucaauacugcugaguuua

SEQ ID NO: 574026 - RNA, 19 nt, Artificial Sequence
  Description of Artificial Sequence: Synthetic oligonucleotide
  Antisense strand to SEQ ID NO: 574025
uaaacucagcaguauugau

SEQ ID NO: 574027 - RNA, 19 nt, Artificial Sequence
  Description of Artificial Sequence: Synthetic oligonucleotide
  Sense strand starting at position 85 of SEQ ID NO: 318590
caauacugcugaguuuaag

SEQ ID NO: 574028 - RNA, 19 nt, Artificial Sequence
  Description of Artificial Sequence: Synthetic oligonucleotide
  Antisense strand to SEQ ID NO: 574027
cuuaaacucagcaguauug

SEQ ID NO: 574029 - RNA, 19 nt, Artificial Sequence
  Description of Artificial Sequence: Synthetic oligonucleotide
  Sense strand starting at position 88 of SEQ ID NO: 318590
uacugcugaguuuaagaaa

SEQ ID NO: 574030 - RNA, 19 nt, Artificial Sequence
  Description of Artificial Sequence: Synthetic oligonucleotide
  Antisense strand to SEQ ID NO: 574029
uuucuuaaacucagcagua

SEQ ID NO: 574031 - RNA, 19 nt, Artificial Sequence
  Description of Artificial Sequence: Synthetic oligonucleotide
  Sense strand starting at position 365 of SEQ ID NO: 318590
cucugaauuggccaaacuu

SEQ ID NO: 574032 - RNA, 19 nt, Artificial Sequence
  Description of Artificial Sequence: Synthetic oligonucleotide
  Antisense strand to SEQ ID NO: 574031
aaguuuggccaauucagag

SEQ ID NO: 574033 - RNA, 19 nt, Artificial Sequence
  Description of Artificial Sequence: Synthetic oligonucleotide
  Sense strand starting at position 554 of SEQ ID NO: 318590
cguggacuuccugaaagca

SEQ ID NO: 574034 - RNA, 19 nt, Artificial Sequence
  Description of Artificial Sequence: Synthetic oligonucleotide
  Antisense strand to SEQ ID NO: 574033
ugcuuucaggaaguccacg

SEQ ID NO: 574035 - RNA, 19 nt, Artificial Sequence
  Description of Artificial Sequence: Synthetic oligonucleotide
  Sense strand starting at position 615 of SEQ ID NO: 318590
ucaaacagugccugacuua

SEQ ID NO: 574036 - RNA, 19 nt, Artificial Sequence
  Description of Artificial Sequence: Synthetic oligonucleotide
  Antisense strand to SEQ ID NO: 574035
uaagucaggcacuguuuga

SEQ ID NO: 574037 - RNA, 19 nt, Artificial Sequence
  Description of Artificial Sequence: Synthetic oligonucleotide
  Sense strand starting at position 632 of SEQ ID NO: 318590
uauagaagugcucaguaaa

SEQ ID NO: 574038 - RNA, 19 nt, Artificial Sequence
  Description of Artificial Sequence: Synthetic oligonucleotide
  Antisense strand to SEQ ID NO: 574037
uuuacugagcacuucuaua

SEQ ID NO: 574039 - RNA, 19 nt, Artificial Sequence
  Description of Artificial Sequence: Synthetic oligonucleotide
  Sense strand starting at position 635 of SEQ ID NO: 318590
agaagugcucaguaaauaa

SEQ ID NO: 574040 - RNA, 19 nt, Artificial Sequence
  Description of Artificial Sequence: Synthetic oligonucleotide
  Antisense strand to SEQ ID NO: 574039
uuauuuacugagcacuucu

SEQ ID NO: 574041 - RNA, 19 nt, Artificial Sequence
  Description of Artificial Sequence: Synthetic oligonucleotide
  Sense strand starting at position 674 of SEQ ID NO: 318590
aacugugaagucugacgau

SEQ ID NO: 574042 - RNA, 19 nt, Artificial Sequence
  Description of Artificial Sequence: Synthetic oligonucleotide
  Antisense strand to SEQ ID NO: 574041
aucgucagacuucacaguu

SEQ ID NO: 574043 - RNA, 19 nt, Artificial Sequence
  Description of Artificial Sequence: Synthetic oligonucleotide
  Sense strand starting at position 681 of SEQ ID NO: 318590
aagucugacgauuaucaua

SEQ ID NO: 574044 - RNA, 19 nt, Artificial Sequence
  Description of Artificial Sequence: Synthetic oligonucleotide
  Antisense strand to SEQ ID NO: 574043
uaugauaaucgucagacuu

SEQ ID NO: 574045 - RNA, 19 nt, Artificial Sequence
  Description of Artificial Sequence: Synthetic oligonucleotide
  Sense strand starting at position 683 of SEQ ID NO: 318590
gucugacgauuaucauaua

SEQ ID NO: 574046 - RNA, 19 nt, Artificial Sequence
  Description of Artificial Sequence: Synthetic oligonucleotide
  Antisense strand to SEQ ID NO: 574045
uauaugauaaucgucagac

SEQ ID NO: 574047 - RNA, 19 nt, Artificial Sequence
  Description of Artificial Sequence: Synthetic oligonucleotide
  Sense strand starting at position 749 of SEQ ID NO: 318590
uggcaagagguauagguua

SEQ ID NO: 574048 - RNA, 19 nt, Artificial Sequence
  Description of Artificial Sequence: Synthetic oligonucleotide
  Antisense strand to SEQ ID NO: 574047
uaaccuauaccucuugcca

SEQ ID NO: 574049 - RNA, 19 nt, Artificial Sequence
  Description of Artificial Sequence: Synthetic oligonucleotide
  Sense strand starting at position 751 of SEQ ID NO: 318590
gcaagagguauagguuaac

SEQ ID NO: 574050 - RNA, 19 nt, Artificial Sequence
  Description of Artificial Sequence: Synthetic oligonucleotide
  Antisense strand to SEQ ID NO: 574049
guuaaccuauaccucuugc

SEQ ID NO: 574051 - RNA, 19 nt, Artificial Sequence
  Description of Artificial Sequence: Synthetic oligonucleotide
  Sense strand starting at position 805 of SEQ ID NO: 318590
aagccacaggucuggauaa

SEQ ID NO: 574052 - RNA, 19 nt, Artificial Sequence
  Description of Artificial Sequence: Synthetic oligonucleotide
  Antisense strand to SEQ ID NO: 574051
uuauccagaccuguggcuu

SEQ ID NO: 574053 - RNA, 19 nt, Artificial Sequence
  Description of Artificial Sequence: Synthetic oligonucleotide
  Sense strand starting at position 1529 of SEQ ID NO: 318590
acucgaaggcuccaucuaa

SEQ ID NO: 574054 - RNA, 19 nt, Artificial Sequence
  Description of Artificial Sequence: Synthetic oligonucleotide
  Antisense strand to SEQ ID NO: 574053
uuagauggagccuucgagu

SEQ ID NO: 574055 - RNA, 19 nt, Artificial Sequence
  Description of Artificial Sequence: Synthetic oligonucleotide
  Sense strand starting at position 1868 of SEQ ID NO: 318590
cucugagauuucguaggug

SEQ ID NO: 574056 - RNA, 19 nt, Artificial Sequence
  Description of Artificial Sequence: Synthetic oligonucleotide
  Antisense strand to SEQ ID NO: 574055
caccuacgaaaucucagag

SEQ ID NO: 574057 - RNA, 19 nt, Artificial Sequence
  Description of Artificial Sequence: Synthetic oligonucleotide
  Sense strand starting at position 1871 of SEQ ID NO: 318590
ugagauuucguagguguau

SEQ ID NO: 574058 - RNA, 19 nt, Artificial Sequence
  Description of Artificial Sequence: Synthetic oligonucleotide
  Antisense strand to SEQ ID NO: 574057
auacaccuacgaaaucuca

SEQ ID NO: 574059 - RNA, 19 nt, Artificial Sequence
  Description of Artificial Sequence: Synthetic oligonucleotide
  Sense strand starting at position 1872 of SEQ ID NO: 318590
gagauuucguagguguauu

SEQ ID NO: 574060 - RNA, 19 nt, Artificial Sequence
  Description of Artificial Sequence: Synthetic oligonucleotide
  Antisense strand to SEQ ID NO: 574059
aauacaccuacgaaaucuc

SEQ ID NO: 574061 - RNA, 19 nt, Artificial Sequence
  Description of Artificial Sequence: Synthetic oligonucleotide
  Sense strand starting at position 1873 of SEQ ID NO: 318590
agauuucguagguguauua

SEQ ID NO: 574062 - RNA, 19 nt, Artificial Sequence
  Description of Artificial Sequence: Synthetic oligonucleotide
  Antisense strand to SEQ ID NO: 574061
uaauacaccuacgaaaucu

SEQ ID NO: 574063 - RNA, 19 nt, Artificial Sequence
  Description of Artificial Sequence: Synthetic oligonucleotide
  Sense strand starting at position 1883 of SEQ ID NO: 318590
gguguauuacaucacaucu

SEQ ID NO: 574064 - RNA, 19 nt, Artificial Sequence
  Description of Artificial Sequence: Synthetic oligonucleotide
  Antisense strand to SEQ ID NO: 574063
agaugugauguaauacacc

SEQ ID NO: 574065 - RNA, 19 nt, Artificial Sequence
  Description of Artificial Sequence: Synthetic oligonucleotide
  Sense strand starting at position 1910 of SEQ ID NO: 318590
auuugacucuuguucguuu

SEQ ID NO: 574066 - RNA, 19 nt, Artificial Sequence
  Description of Artificial Sequence: Synthetic oligonucleotide
  Antisense strand to SEQ ID NO: 574065
aaacgaacaagagucaaau

SEQ ID NO: 574067 - RNA, 19 nt, Artificial Sequence
  Description of Artificial Sequence: Synthetic oligonucleotide
  Sense strand starting at position 2321 of SEQ ID NO: 318590
cccagucauccguauaaac

SEQ ID NO: 574068 - RNA, 19 nt, Artificial Sequence
  Description of Artificial Sequence: Synthetic oligonucleotide
  Antisense strand to SEQ ID NO: 574067
guuuauacggaugacuggg

SEQ ID NO: 574069 - RNA, 19 nt, Artificial Sequence
  Description of Artificial Sequence: Synthetic oligonucleotide
  Sense strand starting at position 2412 of SEQ ID NO: 318590
ggcuauaggccuugaggaa

SEQ ID NO: 574070 - RNA, 19 nt, Artificial Sequence
  Description of Artificial Sequence: Synthetic oligonucleotide
  Antisense strand to SEQ ID NO: 574069
uuccucaaggccuauagcc

SEQ ID NO: 574071 - RNA, 19 nt, Artificial Sequence
  Description of Artificial Sequence: Synthetic oligonucleotide
  Sense strand starting at position 2413 of SEQ ID NO: 318590
gcuauaggccuugaggaau

SEQ ID NO: 574072 - RNA, 19 nt, Artificial Sequence
  Description of Artificial Sequence: Synthetic oligonucleotide
  Antisense strand to SEQ ID NO: 574071
auuccucaaggccuauagc

SEQ ID NO: 574073 - RNA, 19 nt, Artificial Sequence
  Description of Artificial Sequence: Synthetic oligonucleotide
  Sense strand starting at position 2473 of SEQ ID NO: 318590
ccagccuucccagauaagu

SEQ ID NO: 574074 - RNA, 19 nt, Artificial Sequence
  Description of Artificial Sequence: Synthetic oligonucleotide
  Antisense strand to SEQ ID NO: 574073
acuuaucugggaaggcugg

SEQ ID NO: 574075 - RNA, 19 nt, Artificial Sequence
  Description of Artificial Sequence: Synthetic oligonucleotide
  Sense strand starting at position 2521 of SEQ ID NO: 318590
gccggaaggcaucaagaaa

SEQ ID NO: 574076 - RNA, 19 nt, Artificial Sequence
  Description of Artificial Sequence: Synthetic oligonucleotide
  Antisense strand to SEQ ID NO: 574075
uuucuugaugccuuccggc

SEQ ID NO: 574077 - RNA, 19 nt, Artificial Sequence
  Description of Artificial Sequence: Synthetic oligonucleotide
  Sense strand starting at position 2770 of SEQ ID NO: 318590
ucuagacucccugaaagcu

SEQ ID NO: 574078 - RNA, 19 nt, Artificial Sequence
  Description of Artificial Sequence: Synthetic oligonucleotide
  Antisense strand to SEQ ID NO: 574077
agcuuucagggagucuaga

SEQ ID NO: 574079 - RNA, 19 nt, Artificial Sequence
  Description of Artificial Sequence: Synthetic oligonucleotide
  Sense strand starting at position 2859 of SEQ ID NO: 318590
ucuagagcauucccaggua

SEQ ID NO: 574080 - RNA, 19 nt, Artificial Sequence
  Description of Artificial Sequence: Synthetic oligonucleotide
  Antisense strand to SEQ ID NO: 574079
uaccugggaaugcucuaga

SEQ ID NO: 574081 - RNA, 19 nt, Artificial Sequence
  Description of Artificial Sequence: Synthetic oligonucleotide
  Sense strand starting at position 3152 of SEQ ID NO: 318590
gggacuagucccuggcaaa

SEQ ID NO: 574082 - RNA, 19 nt, Artificial Sequence
  Description of Artificial Sequence: Synthetic oligonucleotide
  Antisense strand to SEQ ID NO: 574081
uuugccagggacuaguccc

SEQ ID NO: 574083 - RNA, 19 nt, Artificial Sequence
  Description of Artificial Sequence: Synthetic oligonucleotide
  Sense strand starting at position 3153 of SEQ ID NO: 318590
ggacuagucccuggcaaag

SEQ ID NO: 574084 - RNA, 19 nt, Artificial Sequence
  Description of Artificial Sequence: Synthetic oligonucleotide
  Antisense strand to SEQ ID NO: 574083
cuuugccagggacuagucc

SEQ ID NO: 574085 - RNA, 19 nt, Artificial Sequence
  Description of Artificial Sequence: Synthetic oligonucleotide
  Sense strand starting at position 3176 of SEQ ID NO: 318590
uucccuagucaaggguaaa

SEQ ID NO: 574086 - RNA, 19 nt, Artificial Sequence
  Description of Artificial Sequence: Synthetic oligonucleotide
  Antisense strand to SEQ ID NO: 574085
uuuacccuugacuagggaa

SEQ ID NO: 574087 - RNA, 19 nt, Artificial Sequence
  Description of Artificial Sequence: Synthetic oligonucleotide
  Sense strand starting at position 3177 of SEQ ID NO: 318590
ucccuagucaaggguaaag

SEQ ID NO: 574088 - RNA, 19 nt, Artificial Sequence
  Description of Artificial Sequence: Synthetic oligonucleotide
  Antisense strand to SEQ ID NO: 574087
cuuuacccuugacuaggga

SEQ ID NO: 574089 - RNA, 19 nt, Artificial Sequence
  Description of Artificial Sequence: Synthetic oligonucleotide
  Sense strand starting at position 3320 of SEQ ID NO: 318590
agcuuaaguggucauccua

SEQ ID NO: 574090 - RNA, 19 nt, Artificial Sequence
  Description of Artificial Sequence: Synthetic oligonucleotide
  Antisense strand to SEQ ID NO: 574089
uaggaugaccacuuaagcu

SEQ ID NO: 574091 - RNA, 19 nt, Artificial Sequence
  Description of Artificial Sequence: Synthetic oligonucleotide
  Sense strand starting at position 3671 of SEQ ID NO: 318590
accagugguguacaacuua

SEQ ID NO: 574092 - RNA, 19 nt, Artificial Sequence
  Description of Artificial Sequence: Synthetic oligonucleotide
  Antisense strand to SEQ ID NO: 574091
uaaguuguacaccacuggu

SEQ ID NO: 574093 - RNA, 19 nt, Artificial Sequence
  Description of Artificial Sequence: Synthetic oligonucleotide
  Sense strand starting at position 201 of SEQ ID NO: 318591
ccuuguaauggugacuuau

SEQ ID NO: 574094 - RNA, 19 nt, Artificial Sequence
  Description of Artificial Sequence: Synthetic oligonucleotide
  Antisense strand to SEQ ID NO: 574093
auaagucaccauuacaagg

SEQ ID NO: 574095 - RNA, 19 nt, Artificial Sequence
  Description of Artificial Sequence: Synthetic oligonucleotide
  Sense strand starting at position 222 of SEQ ID NO: 318591
cucuaauucuggccuagaa

SEQ ID NO: 574096 - RNA, 19 nt, Artificial Sequence
  Description of Artificial Sequence: Synthetic oligonucleotide
  Antisense strand to SEQ ID NO: 574095
uucuaggccagaauuagag

SEQ ID NO: 574097 - RNA, 19 nt, Artificial Sequence
  Description of Artificial Sequence: Synthetic oligonucleotide
  Sense strand starting at position 224 of SEQ ID NO: 318591
cuaauucuggccuagaaca

SEQ ID NO: 574098 - RNA, 19 nt, Artificial Sequence
  Description of Artificial Sequence: Synthetic oligonucleotide
  Antisense strand to SEQ ID NO: 574097
uguucuaggccagaauuag

SEQ ID NO: 574099 - RNA, 19 nt, Artificial Sequence
  Description of Artificial Sequence: Synthetic oligonucleotide
  Sense strand starting at position 473 of SEQ ID NO: 318591
uguaauuugucuuuccacu

SEQ ID NO: 574100 - RNA, 19 nt, Artificial Sequence
  Description of Artificial Sequence: Synthetic oligonucleotide
  Antisense strand to SEQ ID NO: 574099
aguggaaagacaaauuaca

SEQ ID NO: 574101 - RNA, 19 nt, Artificial Sequence
  Description of Artificial Sequence: Synthetic oligonucleotide
  Sense strand starting at position 556 of SEQ ID NO: 318591
guucucaagcuaggaagau

SEQ ID NO: 574102 - RNA, 19 nt, Artificial Sequence
  Description of Artificial Sequence: Synthetic oligonucleotide
  Antisense strand to SEQ ID NO: 574101
aucuuccuagcuugagaac

SEQ ID NO: 574103 - RNA, 19 nt, Artificial Sequence
  Description of Artificial Sequence: Synthetic oligonucleotide
  Sense strand starting at position 583 of SEQ ID NO: 318591
cagggcaaaugucuggaaa

SEQ ID NO: 574104 - RNA, 19 nt, Artificial Sequence
  Description of Artificial Sequence: Synthetic oligonucleotide
  Antisense strand to SEQ ID NO: 574103
uuuccagacauuugcccug

SEQ ID NO: 574105 - RNA, 19 nt, Artificial Sequence
  Description of Artificial Sequence: Synthetic oligonucleotide
  Sense strand starting at position 584 of SEQ ID NO: 318591
agggcaaaugucuggaaac

SEQ ID NO: 574106 - RNA, 19 nt, Artificial Sequence
  Description of Artificial Sequence: Synthetic oligonucleotide
  Antisense strand to SEQ ID NO: 574105
guuuccagacauuugcccu

SEQ ID NO: 574107 - RNA, 19 nt, Artificial Sequence
  Description of Artificial Sequence: Synthetic oligonucleotide
  Sense strand starting at position 644 of SEQ ID NO: 318591
uuggguagaagucagaguu

SEQ ID NO: 574108 - RNA, 19 nt, Artificial Sequence
  Description of Artificial Sequence: Synthetic oligonucleotide
  Antisense strand to SEQ ID NO: 574107
aacucugacuucuacccaa

SEQ ID NO: 574109 - RNA, 19 nt, Artificial Sequence
  Description of Artificial Sequence: Synthetic oligonucleotide
  Sense strand starting at position 654 of SEQ ID NO: 318591
gucagaguugcugauuaac

SEQ ID NO: 574110 - RNA, 19 nt, Artificial Sequence
  Description of Artificial Sequence: Synthetic oligonucleotide
  Antisense strand to SEQ ID NO: 574109
guuaaucagcaacucugac

SEQ ID NO: 574111 - RNA, 19 nt, Artificial Sequence
  Description of Artificial Sequence: Synthetic oligonucleotide
  Sense strand starting at position 656 of SEQ ID NO: 318591
cagaguugcugauuaacau

SEQ ID NO: 574112 - RNA, 19 nt, Artificial Sequence
  Description of Artificial Sequence: Synthetic oligonucleotide
  Antisense strand to SEQ ID NO: 574111
auguuaaucagcaacucug

SEQ ID NO: 574113 - RNA, 19 nt, Artificial Sequence
  Description of Artificial Sequence: Synthetic oligonucleotide
  Sense strand starting at position 657 of SEQ ID NO: 318591
agaguugcugauuaacaua

SEQ ID NO: 574114 - RNA, 19 nt, Artificial Sequence
  Description of Artificial Sequence: Synthetic oligonucleotide
  Antisense strand to SEQ ID NO: 574113
uauguuaaucagcaacucu

SEQ ID NO: 574115 - RNA, 19 nt, Artificial Sequence
  Description of Artificial Sequence: Synthetic oligonucleotide
  Sense strand starting at position 699 of SEQ ID NO: 318591
agaauuaucuggccacaac

SEQ ID NO: 574116 - RNA, 19 nt, Artificial Sequence
  Description of Artificial Sequence: Synthetic oligonucleotide
  Antisense strand to SEQ ID NO: 574115
guuguggccagauaauucu

SEQ ID NO: 574117 - RNA, 19 nt, Artificial Sequence
  Description of Artificial Sequence: Synthetic oligonucleotide
  Sense strand starting at position 720 of SEQ ID NO: 318591
aucaauacugcugaguuua

SEQ ID NO: 574118 - RNA, 19 nt, Artificial Sequence
  Description of Artificial Sequence: Synthetic oligonucleotide
  Antisense strand to SEQ ID NO: 574117
uaaacucagcaguauugau

SEQ ID NO: 574119 - RNA, 19 nt, Artificial Sequence
  Description of Artificial Sequence: Synthetic oligonucleotide
  Sense strand starting at position 722 of SEQ ID NO: 318591
caauacugcugaguuuaag

SEQ ID NO: 574120 - RNA, 19 nt, Artificial Sequence
  Description of Artificial Sequence: Synthetic oligonucleotide
  Antisense strand to SEQ ID NO: 574119
cuuaaacucagcaguauug

SEQ ID NO: 574121 - RNA, 19 nt, Artificial Sequence
  Description of Artificial Sequence: Synthetic oligonucleotide
  Sense strand starting at position 725 of SEQ ID NO: 318591
uacugcugaguuuaagaaa

SEQ ID NO: 574122 - RNA, 19 nt, Artificial Sequence
  Description of Artificial Sequence: Synthetic oligonucleotide
  Antisense strand to SEQ ID NO: 574121
uuucuuaaacucagcagua

SEQ ID NO: 574123 - RNA, 19 nt, Artificial Sequence
  Description of Artificial Sequence: Synthetic oligonucleotide
  Sense strand starting at position 1002 of SEQ ID NO: 318591
cucugaauuggccaaacuu

SEQ ID NO: 574124 - RNA, 19 nt, Artificial Sequence
  Description of Artificial Sequence: Synthetic oligonucleotide
  Antisense strand to SEQ ID NO: 574123
aaguuuggccaauucagag

SEQ ID NO: 574125 - RNA, 19 nt, Artificial Sequence
  Description of Artificial Sequence: Synthetic oligonucleotide
  Sense strand starting at position 1191 of SEQ ID NO: 318591
cguggacuuccugaaagca

SEQ ID NO: 574126 - RNA, 19 nt, Artificial Sequence
  Description of Artificial Sequence: Synthetic oligonucleotide
  Antisense strand to SEQ ID NO: 574125
ugcuuucaggaaguccacg

SEQ ID NO: 574127 - RNA, 19 nt, Artificial Sequence
  Description of Artificial Sequence: Synthetic oligonucleotide
  Sense strand starting at position 1269 of SEQ ID NO: 318591
uauagaagugcucaguaaa

SEQ ID NO: 574128 - RNA, 19 nt, Artificial Sequence
  Description of Artificial Sequence: Synthetic oligonucleotide
  Antisense strand to SEQ ID NO: 574127
uuuacugagcacuucuaua

SEQ ID NO: 574129 - RNA, 19 nt, Artificial Sequence
  Description of Artificial Sequence: Synthetic oligonucleotide
  Sense strand starting at position 1272 of SEQ ID NO: 318591
agaagugcucaguaaauaa

SEQ ID NO: 574130 - RNA, 19 nt, Artificial Sequence
  Description of Artificial Sequence: Synthetic oligonucleotide
  Antisense strand to SEQ ID NO: 574129
uuauuuacugagcacuucu

SEQ ID NO: 574131 - RNA, 19 nt, Artificial Sequence
  Description of Artificial Sequence: Synthetic oligonucleotide
  Sense strand starting at position 1318 of SEQ ID NO: 318591
aagucugacgauuaucaua

SEQ ID NO: 574132 - RNA, 19 nt, Artificial Sequence
  Description of Artificial Sequence: Synthetic oligonucleotide
  Antisense strand to SEQ ID NO: 574131
uaugauaaucgucagacuu

SEQ ID NO: 574133 - RNA, 19 nt, Artificial Sequence
  Description of Artificial Sequence: Synthetic oligonucleotide
  Sense strand starting at position 1320 of SEQ ID NO: 318591
gucugacgauuaucauaua

SEQ ID NO: 574134 - RNA, 19 nt, Artificial Sequence
  Description of Artificial Sequence: Synthetic oligonucleotide
  Antisense strand to SEQ ID NO: 574133
uauaugauaaucgucagac

SEQ ID NO: 574135 - RNA, 19 nt, Artificial Sequence
  Description of Artificial Sequence: Synthetic oligonucleotide
  Sense strand starting at position 1386 of SEQ ID NO: 318591
uggcaagagguauagguua

SEQ ID NO: 574136 - RNA, 19 nt, Artificial Sequence
  Description of Artificial Sequence: Synthetic oligonucleotide
  Antisense strand to SEQ ID NO: 574135
uaaccuauaccucuugcca

SEQ ID NO: 574137 - RNA, 19 nt, Artificial Sequence
  Description of Artificial Sequence: Synthetic oligonucleotide
  Sense strand starting at position 1388 of SEQ ID NO: 318591
gcaagagguauagguuaac

SEQ ID NO: 574138 - RNA, 19 nt, Artificial Sequence
  Description of Artificial Sequence: Synthetic oligonucleotide
  Antisense strand to SEQ ID NO: 574137
guuaaccuauaccucuugc

SEQ ID NO: 574139 - RNA, 19 nt, Artificial Sequence
  Description of Artificial Sequence: Synthetic oligonucleotide
  Sense strand starting at position 1442 of SEQ ID NO: 318591
aagccacaggucuggauaa

SEQ ID NO: 574140 - RNA, 19 nt, Artificial Sequence
  Description of Artificial Sequence: Synthetic oligonucleotide
  Antisense strand to SEQ ID NO: 574139
uuauccagaccuguggcuu

SEQ ID NO: 574141 - RNA, 19 nt, Artificial Sequence
  Description of Artificial Sequence: Synthetic oligonucleotide
  Sense strand starting at position 2166 of SEQ ID NO: 318591
acucgaaggcuccaucuaa

SEQ ID NO: 574142 - RNA, 19 nt, Artificial Sequence
  Description of Artificial Sequence: Synthetic oligonucleotide
  Antisense strand to SEQ ID NO: 574141
uuagauggagccuucgagu

SEQ ID NO: 574143 - RNA, 19 nt, Artificial Sequence
  Description of Artificial Sequence: Synthetic oligonucleotide
  Sense strand starting at position 2505 of SEQ ID NO: 318591
cucugagauuucguaggug

SEQ ID NO: 574144 - RNA, 19 nt, Artificial Sequence
  Description of Artificial Sequence: Synthetic oligonucleotide
  Antisense strand to SEQ ID NO: 574143
caccuacgaaaucucagag

SEQ ID NO: 574145 - RNA, 19 nt, Artificial Sequence
  Description of Artificial Sequence: Synthetic oligonucleotide
  Sense strand starting at position 2508 of SEQ ID NO: 318591
ugagauuucguagguguau

SEQ ID NO: 574146 - RNA, 19 nt, Artificial Sequence
  Description of Artificial Sequence: Synthetic oligonucleotide
  Antisense strand to SEQ ID NO: 574145
auacaccuacgaaaucuca

SEQ ID NO: 574147 - RNA, 19 nt, Artificial Sequence
  Description of Artificial Sequence: Synthetic oligonucleotide
  Sense strand starting at position 2509 of SEQ ID NO: 318591
gagauuucguagguguauu

SEQ ID NO: 574148 - RNA, 19 nt, Artificial Sequence
  Description of Artificial Sequence: Synthetic oligonucleotide
  Antisense strand to SEQ ID NO: 574147
aauacaccuacgaaaucuc

SEQ ID NO: 574149 - RNA, 19 nt, Artificial Sequence
  Description of Artificial Sequence: Synthetic oligonucleotide
  Sense strand starting at position 2510 of SEQ ID NO: 318591
agauuucguagguguauua

SEQ ID NO: 574150 - RNA, 19 nt, Artificial Sequence
  Description of Artificial Sequence: Synthetic oligonucleotide
  Antisense strand to SEQ ID NO: 574149
uaauacaccuacgaaaucu

SEQ ID NO: 574151 - RNA, 19 nt, Artificial Sequence
  Description of Artificial Sequence: Synthetic oligonucleotide
  Sense strand starting at position 2520 of SEQ ID NO: 318591
gguguauuacaucacaucu

SEQ ID NO: 574152 - RNA, 19 nt, Artificial Sequence
  Description of Artificial Sequence: Synthetic oligonucleotide
  Antisense strand to SEQ ID NO: 574151
agaugugauguaauacacc

SEQ ID NO: 574153 - RNA, 19 nt, Artificial Sequence
  Description of Artificial Sequence: Synthetic oligonucleotide
  Sense strand starting at position 2547 of SEQ ID NO: 318591
auuugacucuuguucguuu

SEQ ID NO: 574154 - RNA, 19 nt, Artificial Sequence
  Description of Artificial Sequence: Synthetic oligonucleotide
  Antisense strand to SEQ ID NO: 574153
aaacgaacaagagucaaau

SEQ ID NO: 574155 - RNA, 19 nt, Artificial Sequence
  Description of Artificial Sequence: Synthetic oligonucleotide
  Sense strand starting at position 3049 of SEQ ID NO: 318591
ggcuauaggccuugaggaa

SEQ ID NO: 574156 - RNA, 19 nt, Artificial Sequence
  Description of Artificial Sequence: Synthetic oligonucleotide
  Antisense strand to SEQ ID NO: 574155
uuccucaaggccuauagcc

SEQ ID NO: 574157 - RNA, 19 nt, Artificial Sequence
  Description of Artificial Sequence: Synthetic oligonucleotide
  Sense strand starting at position 3050 of SEQ ID NO: 318591
gcuauaggccuugaggaau

SEQ ID NO: 574158 - RNA, 19 nt, Artificial Sequence
  Description of Artificial Sequence: Synthetic oligonucleotide
  Antisense strand to SEQ ID NO: 574157
auuccucaaggccuauagc

SEQ ID NO: 574159 - RNA, 19 nt, Artificial Sequence
  Description of Artificial Sequence: Synthetic oligonucleotide
  Sense strand starting at position 3110 of SEQ ID NO: 318591
ccagccuucccagauaagu

SEQ ID NO: 574160 - RNA, 19 nt, Artificial Sequence
  Description of Artificial Sequence: Synthetic oligonucleotide
  Antisense strand to SEQ ID NO: 574159
acuuaucugggaaggcugg

SEQ ID NO: 574161 - RNA, 19 nt, Artificial Sequence
  Description of Artificial Sequence: Synthetic oligonucleotide
  Sense strand starting at position 3158 of SEQ ID NO: 318591
gccggaaggcaucaagaaa

SEQ ID NO: 574162 - RNA, 19 nt, Artificial Sequence
  Description of Artificial Sequence: Synthetic oligonucleotide
  Antisense strand to SEQ ID NO: 574161
uuucuugaugccuuccggc

SEQ ID NO: 574163 - RNA, 19 nt, Artificial Sequence
  Description of Artificial Sequence: Synthetic oligonucleotide
  Sense strand starting at position 3407 of SEQ ID NO: 318591
ucuagacucccugaaagcu

SEQ ID NO: 574164 - RNA, 19 nt, Artificial Sequence
  Description of Artificial Sequence: Synthetic oligonucleotide
  Antisense strand to SEQ ID NO: 574163
agcuuucagggagucuaga

SEQ ID NO: 574165 - RNA, 19 nt, Artificial Sequence
  Description of Artificial Sequence: Synthetic oligonucleotide
  Sense strand starting at position 3789 of SEQ ID NO: 318591
gggacuagucccuggcaaa

SEQ ID NO: 574166 - RNA, 19 nt, Artificial Sequence
  Description of Artificial Sequence: Synthetic oligonucleotide
  Antisense strand to SEQ ID NO: 574165
uuugccagggacuaguccc

SEQ ID NO: 574167 - RNA, 19 nt, Artificial Sequence
  Description of Artificial Sequence: Synthetic oligonucleotide
  Sense strand starting at position 3790 of SEQ ID NO: 318591
ggacuagucccuggcaaag

SEQ ID NO: 574168 - RNA, 19 nt, Artificial Sequence
  Description of Artificial Sequence: Synthetic oligonucleotide
  Antisense strand to SEQ ID NO: 574167
cuuugccagggacuagucc

SEQ ID NO: 574169 - RNA, 19 nt, Artificial Sequence
  Description of Artificial Sequence: Synthetic oligonucleotide
  Sense strand starting at position 3813 of SEQ ID NO: 318591
uucccuagucaaggguaaa

SEQ ID NO: 574170 - RNA, 19 nt, Artificial Sequence
  Description of Artificial Sequence: Synthetic oligonucleotide
  Antisense strand to SEQ ID NO: 574169
uuuacccuugacuagggaa

SEQ ID NO: 574171 - RNA, 19 nt, Artificial Sequence
  Description of Artificial Sequence: Synthetic oligonucleotide
  Sense strand starting at position 3814 of SEQ ID NO: 318591
ucccuagucaaggguaaag

SEQ ID NO: 574172 - RNA, 19 nt, Artificial Sequence
  Description of Artificial Sequence: Synthetic oligonucleotide
  Antisense strand to SEQ ID NO: 574171
cuuuacccuugacuaggga

SEQ ID NO: 574173 - RNA, 19 nt, Artificial Sequence
  Description of Artificial Sequence: Synthetic oligonucleotide
  Sense strand starting at position 16 of SEQ ID NO: 318592
agcaaagucugacuaauau

SEQ ID NO: 574174 - RNA, 19 nt, Artificial Sequence
  Description of Artificial Sequence: Synthetic oligonucleotide
  Antisense strand to SEQ ID NO: 574173
auauuagucagacuuugcu

SEQ ID NO: 574175 - RNA, 19 nt, Artificial Sequence
  Description of Artificial Sequence: Synthetic oligonucleotide
  Sense strand starting at position 110 of SEQ ID NO: 318592
ucacuaagccucugaugaa

SEQ ID NO: 574176 - RNA, 19 nt, Artificial Sequence
  Description of Artificial Sequence: Synthetic oligonucleotide
  Antisense strand to SEQ ID NO: 574175
uucaucagaggcuuaguga

SEQ ID NO: 574177 - RNA, 19 nt, Artificial Sequence
  Description of Artificial Sequence: Synthetic oligonucleotide
  Sense strand starting at position 150 of SEQ ID NO: 318592
agugcaagucaucaaagca

SEQ ID NO: 574178 - RNA, 19 nt, Artificial Sequence
  Description of Artificial Sequence: Synthetic oligonucleotide
  Antisense strand to SEQ ID NO: 574177
ugcuuugaugacuugcacu

SEQ ID NO: 574179 - RNA, 19 nt, Artificial Sequence
  Description of Artificial Sequence: Synthetic oligonucleotide
  Sense strand starting at position 347 of SEQ ID NO: 318592
cuuccugucucucugggaa

SEQ ID NO: 574180 - RNA, 19 nt, Artificial Sequence
  Description of Artificial Sequence: Synthetic oligonucleotide
  Antisense strand to SEQ ID NO: 574179
uucccagagagacaggaag

SEQ ID NO: 574181 - RNA, 19 nt, Artificial Sequence
  Description of Artificial Sequence: Synthetic oligonucleotide
  Sense strand starting at position 394 of SEQ ID NO: 318592
cagaaagguuggguaaacu

SEQ ID NO: 574182 - RNA, 19 nt, Artificial Sequence
  Description of Artificial Sequence: Synthetic oligonucleotide
  Antisense strand to SEQ ID NO: 574181
aguuuacccaaccuuucug

SEQ ID NO: 574183 - RNA, 19 nt, Artificial Sequence
  Description of Artificial Sequence: Synthetic oligonucleotide
  Sense strand starting at position 403 of SEQ ID NO: 318592
uggguaaacugcccauagu

SEQ ID NO: 574184 - RNA, 19 nt, Artificial Sequence
  Description of Artificial Sequence: Synthetic oligonucleotide
  Antisense strand to SEQ ID NO: 574183
acuaugggcaguuuaccca

SEQ ID NO: 574185 - RNA, 19 nt, Artificial Sequence
  Description of Artificial Sequence: Synthetic oligonucleotide
  Sense strand starting at position 652 of SEQ ID NO: 318592
uugaaagauuuagaaguca

SEQ ID NO: 574186 - RNA, 19 nt, Artificial Sequence
  Description of Artificial Sequence: Synthetic oligonucleotide
  Antisense strand to SEQ ID NO: 574185
ugacuucuaaaucuuucaa

SEQ ID NO: 574187 - RNA, 19 nt, Artificial Sequence
  Description of Artificial Sequence: Synthetic oligonucleotide
  Sense strand starting at position 676 of SEQ ID NO: 318592
aagacuucguuuguuuaag

SEQ ID NO: 574188 - RNA, 19 nt, Artificial Sequence
  Description of Artificial Sequence: Synthetic oligonucleotide
  Antisense strand to SEQ ID NO: 574187
cuuaaacaaacgaagucuu

SEQ ID NO: 574189 - RNA, 19 nt, Artificial Sequence
  Description of Artificial Sequence: Synthetic oligonucleotide
  Sense strand starting at position 752 of SEQ ID NO: 318592
caugaaagucucugaaagu

SEQ ID NO: 574190 - RNA, 19 nt, Artificial Sequence
  Description of Artificial Sequence: Synthetic oligonucleotide
  Antisense strand to SEQ ID NO: 574189
acuuucagagacuuucaug

SEQ ID NO: 574191 - RNA, 19 nt, Artificial Sequence
  Description of Artificial Sequence: Synthetic oligonucleotide
  Sense strand starting at position 786 of SEQ ID NO: 318592
gagaaacugcuaggcaguu

SEQ ID NO: 574192 - RNA, 19 nt, Artificial Sequence
  Description of Artificial Sequence: Synthetic oligonucleotide
  Antisense strand to SEQ ID NO: 574191
aacugccuagcaguuucuc

SEQ ID NO: 574193 - RNA, 19 nt, Artificial Sequence
  Description of Artificial Sequence: Synthetic oligonucleotide
  Sense strand starting at position 832 of SEQ ID NO: 318592
ugaucacuuggcugggaga

SEQ ID NO: 574194 - RNA, 19 nt, Artificial Sequence
  Description of Artificial Sequence: Synthetic oligonucleotide
  Antisense strand to SEQ ID NO: 574193
ucucccagccaagugauca

SEQ ID NO: 574195 - RNA, 19 nt, Artificial Sequence
  Description of Artificial Sequence: Synthetic oligonucleotide
  Sense strand starting at position 833 of SEQ ID NO: 318592
gaucacuuggcugggagaa

SEQ ID NO: 574196 - RNA, 19 nt, Artificial Sequence
  Description of Artificial Sequence: Synthetic oligonucleotide
  Antisense strand to SEQ ID NO: 574195
uucucccagccaagugauc

SEQ ID NO: 574197 - RNA, 19 nt, Artificial Sequence
  Description of Artificial Sequence: Synthetic oligonucleotide
  Sense strand starting at position 834 of SEQ ID NO: 318592
aucacuuggcugggagaaa

SEQ ID NO: 574198 - RNA, 19 nt, Artificial Sequence
  Description of Artificial Sequence: Synthetic oligonucleotide
  Antisense strand to SEQ ID NO: 574197
uuucucccagccaagugau

SEQ ID NO: 574199 - RNA, 19 nt, Artificial Sequence
  Description of Artificial Sequence: Synthetic oligonucleotide
  Sense strand starting at position 973 of SEQ ID NO: 318592
acagucgugaucuaaggga

SEQ ID NO: 574200 - RNA, 19 nt, Artificial Sequence
  Description of Artificial Sequence: Synthetic oligonucleotide
  Antisense strand to SEQ ID NO: 574199
ucccuuagaucacgacugu

SEQ ID NO: 574201 - RNA, 19 nt, Artificial Sequence
  Description of Artificial Sequence: Synthetic oligonucleotide
  Sense strand starting at position 977 of SEQ ID NO: 318592
ucgugaucuaagggaacaa

SEQ ID NO: 574202 - RNA, 19 nt, Artificial Sequence
  Description of Artificial Sequence: Synthetic oligonucleotide
  Antisense strand to SEQ ID NO: 574201
uuguucccuuagaucacga

SEQ ID NO: 574203 - RNA, 19 nt, Artificial Sequence
  Description of Artificial Sequence: Synthetic oligonucleotide
  Sense strand starting at position 1231 of SEQ ID NO: 318592
cugaguggcucuuuccaga

SEQ ID NO: 574204 - RNA, 19 nt, Artificial Sequence
  Description of Artificial Sequence: Synthetic oligonucleotide
  Antisense strand to SEQ ID NO: 574203
ucuggaaagagccacucag

SEQ ID NO: 574205 - RNA, 19 nt, Artificial Sequence
  Description of Artificial Sequence: Synthetic oligonucleotide
  Sense strand starting at position 1236 of SEQ ID NO: 318592
uggcucuuuccagaucagu

SEQ ID NO: 574206 - RNA, 19 nt, Artificial Sequence
  Description of Artificial Sequence: Synthetic oligonucleotide
  Antisense strand to SEQ ID NO: 574205
acugaucuggaaagagcca

SEQ ID NO: 574207 - RNA, 19 nt, Artificial Sequence
  Description of Artificial Sequence: Synthetic oligonucleotide
  Sense strand starting at position 1299 of SEQ ID NO: 318592
ccgcccuuuccagacgaau

SEQ ID NO: 574208 - RNA, 19 nt, Artificial Sequence
  Description of Artificial Sequence: Synthetic oligonucleotide
  Antisense strand to SEQ ID NO: 574207
auucgucuggaaagggcgg

SEQ ID NO: 574209 - RNA, 19 nt, Artificial Sequence
  Description of Artificial Sequence: Synthetic oligonucleotide
  Sense strand starting at position 2254 of SEQ ID NO: 318592
ggcuuauuccuggacgguc

SEQ ID NO: 574210 - RNA, 19 nt, Artificial Sequence
  Description of Artificial Sequence: Synthetic oligonucleotide
  Antisense strand to SEQ ID NO: 574209
gaccguccaggaauaagcc

SEQ ID NO: 574211 - RNA, 19 nt, Artificial Sequence
  Description of Artificial Sequence: Synthetic oligonucleotide
  Sense strand starting at position 2765 of SEQ ID NO: 318592
cuuuaagaauuacugguua

SEQ ID NO: 574212 - RNA, 19 nt, Artificial Sequence
  Description of Artificial Sequence: Synthetic oligonucleotide
  Antisense strand to SEQ ID NO: 574211
uaaccaguaauucuuaaag

SEQ ID NO: 574213 - RNA, 19 nt, Artificial Sequence
  Description of Artificial Sequence: Synthetic oligonucleotide
  Sense strand starting at position 2827 of SEQ ID NO: 318592
caggaugcuggagguuaaa

SEQ ID NO: 574214 - RNA, 19 nt, Artificial Sequence
  Description of Artificial Sequence: Synthetic oligonucleotide
  Antisense strand to SEQ ID NO: 574213
uuuaaccuccagcauccug

SEQ ID NO: 574215 - RNA, 19 nt, Artificial Sequence
  Description of Artificial Sequence: Synthetic oligonucleotide
  Sense strand starting at position 2893 of SEQ ID NO: 318592
gcguuucagcgguuuggau

SEQ ID NO: 574216 - RNA, 19 nt, Artificial Sequence
  Description of Artificial Sequence: Synthetic oligonucleotide
  Antisense strand to SEQ ID NO: 574215
auccaaaccgcugaaacgc

SEQ ID NO: 574217 - RNA, 19 nt, Artificial Sequence
  Description of Artificial Sequence: Synthetic oligonucleotide
  Sense strand starting at position 2894 of SEQ ID NO: 318592
cguuucagcgguuuggauu

SEQ ID NO: 574218 - RNA, 19 nt, Artificial Sequence
  Description of Artificial Sequence: Synthetic oligonucleotide
  Antisense strand to SEQ ID NO: 574217
aauccaaaccgcugaaacg

SEQ ID NO: 574219 - RNA, 19 nt, Artificial Sequence
  Description of Artificial Sequence: Synthetic oligonucleotide
  Sense strand starting at position 2947 of SEQ ID NO: 318592
ugaaauggucacggaggua

SEQ ID NO: 574220 - RNA, 19 nt, Artificial Sequence
  Description of Artificial Sequence: Synthetic oligonucleotide
  Antisense strand to SEQ ID NO: 574219
uaccuccgugaccauuuca

SEQ ID NO: 574221 - RNA, 19 nt, Artificial Sequence
  Description of Artificial Sequence: Synthetic oligonucleotide
  Sense strand starting at position 3140 of SEQ ID NO: 318592
guaguuacaucuuucuaaa

SEQ ID NO: 574222 - RNA, 19 nt, Artificial Sequence
  Description of Artificial Sequence: Synthetic oligonucleotide
  Antisense strand to SEQ ID NO: 574221
uuuagaaagauguaacuac

SEQ ID NO: 574223 - RNA, 19 nt, Artificial Sequence
  Description of Artificial Sequence: Synthetic oligonucleotide
  Sense strand starting at position 3224 of SEQ ID NO: 318592
gggcucaaacaguguggau

SEQ ID NO: 574224 - RNA, 19 nt, Artificial Sequence
  Description of Artificial Sequence: Synthetic oligonucleotide
  Antisense strand to SEQ ID NO: 574223
auccacacuguuugagccc

SEQ ID NO: 574225 - RNA, 19 nt, Artificial Sequence
  Description of Artificial Sequence: Synthetic oligonucleotide
  Sense strand starting at position 3231 of SEQ ID NO: 318592
aacaguguggauugcuuaa

SEQ ID NO: 574226 - RNA, 19 nt, Artificial Sequence
  Description of Artificial Sequence: Synthetic oligonucleotide
  Antisense strand to SEQ ID NO: 574225
uuaagcaauccacacuguu

SEQ ID NO: 574227 - RNA, 19 nt, Artificial Sequence
  Description of Artificial Sequence: Synthetic oligonucleotide
  Sense strand starting at position 3233 of SEQ ID NO: 318592
caguguggauugcuuaaau

SEQ ID NO: 574228 - RNA, 19 nt, Artificial Sequence
  Description of Artificial Sequence: Synthetic oligonucleotide
  Antisense strand to SEQ ID NO: 574227
auuuaagcaauccacacug

SEQ ID NO: 574229 - RNA, 19 nt, Artificial Sequence
  Description of Artificial Sequence: Synthetic oligonucleotide
  Sense strand starting at position 3375 of SEQ ID NO: 318592
uuuagaucaguuugaaacu

SEQ ID NO: 574230 - RNA, 19 nt, Artificial Sequence
  Description of Artificial Sequence: Synthetic oligonucleotide
  Antisense strand to SEQ ID NO: 574229
aguuucaaacugaucuaaa

SEQ ID NO: 574231 - RNA, 19 nt, Artificial Sequence
  Description of Artificial Sequence: Synthetic oligonucleotide
  Sense strand starting at position 3480 of SEQ ID NO: 318592
cggucagaaaguugaaguu

SEQ ID NO: 574232 - RNA, 19 nt, Artificial Sequence
  Description of Artificial Sequence: Synthetic oligonucleotide
  Antisense strand to SEQ ID NO: 574231
aacuucaacuuucugaccg

SEQ ID NO: 574233 - RNA, 19 nt, Artificial Sequence
  Description of Artificial Sequence: Synthetic oligonucleotide
  Sense strand starting at position 3550 of SEQ ID NO: 318592
uugggauauuaaucucuau

SEQ ID NO: 574234 - RNA, 19 nt, Artificial Sequence
  Description of Artificial Sequence: Synthetic oligonucleotide
  Antisense strand to SEQ ID NO: 574233
auagagauuaauaucccaa

SEQ ID NO: 574235 - RNA, 19 nt, Artificial Sequence
  Description of Artificial Sequence: Synthetic oligonucleotide
  Sense strand starting at position 3602 of SEQ ID NO: 318592
uguuaaagagcuuggguau

SEQ ID NO: 574236 - RNA, 19 nt, Artificial Sequence
  Description of Artificial Sequence: Synthetic oligonucleotide
  Antisense strand to SEQ ID NO: 574235
auacccaagcucuuuaaca

SEQ ID NO: 574237 - RNA, 19 nt, Artificial Sequence
  Description of Artificial Sequence: Synthetic oligonucleotide
  Sense strand starting at position 3603 of SEQ ID NO: 318592
guuaaagagcuuggguaua

SEQ ID NO: 574238 - RNA, 19 nt, Artificial Sequence
  Description of Artificial Sequence: Synthetic oligonucleotide
  Antisense strand to SEQ ID NO: 574237
uauacccaagcucuuuaac

SEQ ID NO: 574239 - RNA, 19 nt, Artificial Sequence
  Description of Artificial Sequence: Synthetic oligonucleotide
  Sense strand starting at position 3605 of SEQ ID NO: 318592
uaaagagcuuggguauacu

SEQ ID NO: 574240 - RNA, 19 nt, Artificial Sequence
  Description of Artificial Sequence: Synthetic oligonucleotide
  Antisense strand to SEQ ID NO: 574239
aguauacccaagcucuuua

SEQ ID NO: 574241 - RNA, 19 nt, Artificial Sequence
  Description of Artificial Sequence: Synthetic oligonucleotide
  Sense strand starting at position 3613 of SEQ ID NO: 318592
uuggguauacuuugcaaac

SEQ ID NO: 574242 - RNA, 19 nt, Artificial Sequence
  Description of Artificial Sequence: Synthetic oligonucleotide
  Antisense strand to SEQ ID NO: 574241
guuugcaaaguauacccaa

SEQ ID NO: 574243 - RNA, 19 nt, Artificial Sequence
  Description of Artificial Sequence: Synthetic oligonucleotide
  Sense strand starting at position 3614 of SEQ ID NO: 318592
uggguauacuuugcaaaca

SEQ ID NO: 574244 - RNA, 19 nt, Artificial Sequence
  Description of Artificial Sequence: Synthetic oligonucleotide
  Antisense strand to SEQ ID NO: 574243
uguuugcaaaguauaccca

SEQ ID NO: 574245 - RNA, 19 nt, Artificial Sequence
  Description of Artificial Sequence: Synthetic oligonucleotide
  Sense strand starting at position 3630 of SEQ ID NO: 318592
acauccuaauguucuagua

SEQ ID NO: 574246 - RNA, 19 nt, Artificial Sequence
  Description of Artificial Sequence: Synthetic oligonucleotide
  Antisense strand to SEQ ID NO: 574245
uacuagaacauuaggaugu

SEQ ID NO: 574247 - RNA, 19 nt, Artificial Sequence
  Description of Artificial Sequence: Synthetic oligonucleotide
  Sense strand starting at position 3753 of SEQ ID NO: 318592
agccucuuccuuuauguca

SEQ ID NO: 574248 - RNA, 19 nt, Artificial Sequence
  Description of Artificial Sequence: Synthetic oligonucleotide
  Antisense strand to SEQ ID NO: 574247
ugacauaaaggaagaggcu

SEQ ID NO: 574249 - RNA, 19 nt, Artificial Sequence
  Description of Artificial Sequence: Synthetic oligonucleotide
  Sense strand starting at position 3856 of SEQ ID NO: 318592
acagacuuagcuugacaac

SEQ ID NO: 574250 - RNA, 19 nt, Artificial Sequence
  Description of Artificial Sequence: Synthetic oligonucleotide
  Antisense strand to SEQ ID NO: 574249
guugucaagcuaagucugu

SEQ ID NO: 574251 - RNA, 19 nt, Artificial Sequence
  Description of Artificial Sequence: Synthetic oligonucleotide
  Sense strand starting at position 3868 of SEQ ID NO: 318592
ugacaacagucuccuggua

SEQ ID NO: 574252 - RNA, 19 nt, Artificial Sequence
  Description of Artificial Sequence: Synthetic oligonucleotide
  Antisense strand to SEQ ID NO: 574251
uaccaggagacuguuguca

SEQ ID NO: 574253 - RNA, 19 nt, Artificial Sequence
  Description of Artificial Sequence: Synthetic oligonucleotide
  Sense strand starting at position 67 of SEQ ID NO: 318593
cuuaaauugagauggcuga

SEQ ID NO: 574254 - RNA, 19 nt, Artificial Sequence
  Description of Artificial Sequence: Synthetic oligonucleotide
  Antisense strand to SEQ ID NO: 574253
ucagccaucucaauuuaag

SEQ ID NO: 574255 - RNA, 19 nt, Artificial Sequence
  Description of Artificial Sequence: Synthetic oligonucleotide
  Sense strand starting at position 68 of SEQ ID NO: 318593
uuaaauugagauggcugaa

SEQ ID NO: 574256 - RNA, 19 nt, Artificial Sequence
  Description of Artificial Sequence: Synthetic oligonucleotide
  Antisense strand to SEQ ID NO: 574255
uucagccaucucaauuuaa

SEQ ID NO: 574257 - RNA, 19 nt, Artificial Sequence
  Description of Artificial Sequence: Synthetic oligonucleotide
  Sense strand starting at position 188 of SEQ ID NO: 318593
accugaaucucgucacgaa

SEQ ID NO: 574258 - RNA, 19 nt, Artificial Sequence
  Description of Artificial Sequence: Synthetic oligonucleotide
  Antisense strand to SEQ ID NO: 574257
uucgugacgagauucaggu

SEQ ID NO: 574259 - RNA, 19 nt, Artificial Sequence
  Description of Artificial Sequence: Synthetic oligonucleotide
  Sense strand starting at position 189 of SEQ ID NO: 318593
ccugaaucucgucacgaau

SEQ ID NO: 574260 - RNA, 19 nt, Artificial Sequence
  Description of Artificial Sequence: Synthetic oligonucleotide
  Antisense strand to SEQ ID NO: 574259
auucgugacgagauucagg

SEQ ID NO: 574261 - RNA, 19 nt, Artificial Sequence
  Description of Artificial Sequence: Synthetic oligonucleotide
  Sense strand starting at position 192 of SEQ ID NO: 318593
gaaucucgucacgaauaua

SEQ ID NO: 574262 - RNA, 19 nt, Artificial Sequence
  Description of Artificial Sequence: Synthetic oligonucleotide
  Antisense strand to SEQ ID NO: 574261
uauauucgugacgagauuc

SEQ ID NO: 574263 - RNA, 19 nt, Artificial Sequence
  Description of Artificial Sequence: Synthetic oligonucleotide
  Sense strand starting at position 195 of SEQ ID NO: 318593
ucucgucacgaauauaaag

SEQ ID NO: 574264 - RNA, 19 nt, Artificial Sequence
  Description of Artificial Sequence: Synthetic oligonucleotide
  Antisense strand to SEQ ID NO: 574263
cuuuauauucgugacgaga

SEQ ID NO: 574265 - RNA, 19 nt, Artificial Sequence
  Description of Artificial Sequence: Synthetic oligonucleotide
  Sense strand starting at position 197 of SEQ ID NO: 318593
ucgucacgaauauaaagau

SEQ ID NO: 574266 - RNA, 19 nt, Artificial Sequence
  Description of Artificial Sequence: Synthetic oligonucleotide
  Antisense strand to SEQ ID NO: 574265
aucuuuauauucgugacga

SEQ ID NO: 574267 - RNA, 19 nt, Artificial Sequence
  Description of Artificial Sequence: Synthetic oligonucleotide
  Sense strand starting at position 269 of SEQ ID NO: 318593
cucagauuaugagucauau

SEQ ID NO: 574268 - RNA, 19 nt, Artificial Sequence
  Description of Artificial Sequence: Synthetic oligonucleotide
  Antisense strand to SEQ ID NO: 574267
auaugacucauaaucugag

SEQ ID NO: 574269 - RNA, 19 nt, Artificial Sequence
  Description of Artificial Sequence: Synthetic oligonucleotide
  Sense strand starting at position 322 of SEQ ID NO: 318593
augucacgacuuuagaauc

SEQ ID NO: 574270 - RNA, 19 nt, Artificial Sequence
  Description of Artificial Sequence: Synthetic oligonucleotide
  Antisense strand to SEQ ID NO: 574269
gauucuaaagucgugacau

SEQ ID NO: 574271 - RNA, 19 nt, Artificial Sequence
  Description of Artificial Sequence: Synthetic oligonucleotide
  Sense strand starting at position 373 of SEQ ID NO: 318593
ggagauaacuauuaauaca

SEQ ID NO: 574272 - RNA, 19 nt, Artificial Sequence
  Description of Artificial Sequence: Synthetic oligonucleotide
  Antisense strand to SEQ ID NO: 574271
uguauuaauaguuaucucc

SEQ ID NO: 574273 - RNA, 19 nt, Artificial Sequence
  Description of Artificial Sequence: Synthetic oligonucleotide
  Sense strand starting at position 390 of SEQ ID NO: 318593
cauggauuacuuggcauau

SEQ ID NO: 574274 - RNA, 19 nt, Artificial Sequence
  Description of Artificial Sequence: Synthetic oligonucleotide
  Antisense strand to SEQ ID NO: 574273
auaugccaaguaauccaug

SEQ ID NO: 574275 - RNA, 19 nt, Artificial Sequence
  Description of Artificial Sequence: Synthetic oligonucleotide
  Sense strand starting at position 391 of SEQ ID NO: 318593
auggauuacuuggcauauu

SEQ ID NO: 574276 - RNA, 19 nt, Artificial Sequence
  Description of Artificial Sequence: Synthetic oligonucleotide
  Antisense strand to SEQ ID NO: 574275
aauaugccaaguaauccau

SEQ ID NO: 574277 - RNA, 19 nt, Artificial Sequence
  Description of Artificial Sequence: Synthetic oligonucleotide
  Sense strand starting at position 415 of SEQ ID NO: 318593
gagacaguguuaucuaauu

SEQ ID NO: 574278 - RNA, 19 nt, Artificial Sequence
  Description of Artificial Sequence: Synthetic oligonucleotide
  Antisense strand to SEQ ID NO: 574277
aauuagauaacacugucuc

SEQ ID NO: 574279 - RNA, 19 nt, Artificial Sequence
  Description of Artificial Sequence: Synthetic oligonucleotide
  Sense strand starting at position 568 of SEQ ID NO: 318593
uucuguaugcaugaaauau

SEQ ID NO: 574280 - RNA, 19 nt, Artificial Sequence
  Description of Artificial Sequence: Synthetic oligonucleotide
  Antisense strand to SEQ ID NO: 574279
auauuucaugcauacagaa

SEQ ID NO: 574281 - RNA, 19 nt, Artificial Sequence
  Description of Artificial Sequence: Synthetic oligonucleotide
  Sense strand starting at position 658 of SEQ ID NO: 318593
augcaacagcacuguuaua

SEQ ID NO: 574282 - RNA, 19 nt, Artificial Sequence
  Description of Artificial Sequence: Synthetic oligonucleotide
  Antisense strand to SEQ ID NO: 574281
uauaacagugcuguugcau

SEQ ID NO: 574283 - RNA, 19 nt, Artificial Sequence
  Description of Artificial Sequence: Synthetic oligonucleotide
  Sense strand starting at position 708 of SEQ ID NO: 318593
cuaaaugcaucacuaggaa

SEQ ID NO: 574284 - RNA, 19 nt, Artificial Sequence
  Description of Artificial Sequence: Synthetic oligonucleotide
  Antisense strand to SEQ ID NO: 574283
uuccuagugaugcauuuag

SEQ ID NO: 574285 - RNA, 19 nt, Artificial Sequence
  Description of Artificial Sequence: Synthetic oligonucleotide
  Sense strand starting at position 854 of SEQ ID NO: 318593
aaaguuugugugcaagaau

SEQ ID NO: 574286 - RNA, 19 nt, Artificial Sequence
  Description of Artificial Sequence: Synthetic oligonucleotide
  Antisense strand to SEQ ID NO: 574285
auucuugcacacaaacuuu

SEQ ID NO: 574287 - RNA, 19 nt, Artificial Sequence
  Description of Artificial Sequence: Synthetic oligonucleotide
  Sense strand starting at position 857 of SEQ ID NO: 318593
guuugugugcaagaaugug

SEQ ID NO: 574288 - RNA, 19 nt, Artificial Sequence
  Description of Artificial Sequence: Synthetic oligonucleotide
  Antisense strand to SEQ ID NO: 574287
cacauucuugcacacaaac

SEQ ID NO: 574289 - RNA, 19 nt, Artificial Sequence
  Description of Artificial Sequence: Synthetic oligonucleotide
  Sense strand starting at position 862 of SEQ ID NO: 318593
ugugcaagaaugugaacaa

SEQ ID NO: 574290 - RNA, 19 nt, Artificial Sequence
  Description of Artificial Sequence: Synthetic oligonucleotide
  Antisense strand to SEQ ID NO: 574289
uuguucacauucuugcaca

SEQ ID NO: 574291 - RNA, 19 nt, Artificial Sequence
  Description of Artificial Sequence: Synthetic oligonucleotide
  Sense strand starting at position 907 of SEQ ID NO: 318593
aauaauaucguacgaggga

SEQ ID NO: 574292 - RNA, 19 nt, Artificial Sequence
  Description of Artificial Sequence: Synthetic oligonucleotide
  Antisense strand to SEQ ID NO: 574291
ucccucguacgauauuauu

SEQ ID NO: 574293 - RNA, 19 nt, Artificial Sequence
  Description of Artificial Sequence: Synthetic oligonucleotide
  Sense strand starting at position 910 of SEQ ID NO: 318593
aauaucguacgagggaaau

SEQ ID NO: 574294 - RNA, 19 nt, Artificial Sequence
  Description of Artificial Sequence: Synthetic oligonucleotide
  Antisense strand to SEQ ID NO: 574293
auuucccucguacgauauu

SEQ ID NO: 574295 - RNA, 19 nt, Artificial Sequence
  Description of Artificial Sequence: Synthetic oligonucleotide
  Sense strand starting at position 1001 of SEQ ID NO: 318593
auguauacgggagggauaa

SEQ ID NO: 574296 - RNA, 19 nt, Artificial Sequence
  Description of Artificial Sequence: Synthetic oligonucleotide
  Antisense strand to SEQ ID NO: 574295
uuaucccucccguauacau

SEQ ID NO: 574297 - RNA, 19 nt, Artificial Sequence
  Description of Artificial Sequence: Synthetic oligonucleotide
  Sense strand starting at position 1454 of SEQ ID NO: 318593
auucuaaauccuugguaag

SEQ ID NO: 574298 - RNA, 19 nt, Artificial Sequence
  Description of Artificial Sequence: Synthetic oligonucleotide
  Antisense strand to SEQ ID NO: 574297
cuuaccaaggauuuagaau

SEQ ID NO: 574299 - RNA, 19 nt, Artificial Sequence
  Description of Artificial Sequence: Synthetic oligonucleotide
  Sense strand starting at position 2099 of SEQ ID NO: 318593
ucguuucaccgccuggauu

SEQ ID NO: 574300 - RNA, 19 nt, Artificial Sequence
  Description of Artificial Sequence: Synthetic oligonucleotide
  Antisense strand to SEQ ID NO: 574299
aauccaggcggugaaacga

SEQ ID NO: 574301 - RNA, 19 nt, Artificial Sequence
  Description of Artificial Sequence: Synthetic oligonucleotide
  Sense strand starting at position 2185 of SEQ ID NO: 318593
ccggucucggauugggaaa

SEQ ID NO: 574302 - RNA, 19 nt, Artificial Sequence
  Description of Artificial Sequence: Synthetic oligonucleotide
  Antisense strand to SEQ ID NO: 574301
uuucccaauccgagaccgg

SEQ ID NO: 574303 - RNA, 19 nt, Artificial Sequence
  Description of Artificial Sequence: Synthetic oligonucleotide
  Sense strand starting at position 2286 of SEQ ID NO: 318593
agggcagccuuaucacaua

SEQ ID NO: 574304 - RNA, 19 nt, Artificial Sequence
  Description of Artificial Sequence: Synthetic oligonucleotide
  Antisense strand to SEQ ID NO: 574303
uaugugauaaggcugcccu

SEQ ID NO: 574305 - RNA, 19 nt, Artificial Sequence
  Description of Artificial Sequence: Synthetic oligonucleotide
  Sense strand starting at position 2338 of SEQ ID NO: 318593
guuggcaggcguccuaauu

SEQ ID NO: 574306 - RNA, 19 nt, Artificial Sequence
  Description of Artificial Sequence: Synthetic oligonucleotide
  Antisense strand to SEQ ID NO: 574305
aauuaggacgccugccaac

SEQ ID NO: 574307 - RNA, 19 nt, Artificial Sequence
  Description of Artificial Sequence: Synthetic oligonucleotide
  Sense strand starting at position 2385 of SEQ ID NO: 318593
guagguucagguugaauua

SEQ ID NO: 574308 - RNA, 19 nt, Artificial Sequence
  Description of Artificial Sequence: Synthetic oligonucleotide
  Antisense strand to SEQ ID NO: 574307
uaauucaaccugaaccuac

SEQ ID NO: 574309 - RNA, 19 nt, Artificial Sequence
  Description of Artificial Sequence: Synthetic oligonucleotide
  Sense strand starting at position 2474 of SEQ ID NO: 318593
agguguugauguuuauuga

SEQ ID NO: 574310 - RNA, 19 nt, Artificial Sequence
  Description of Artificial Sequence: Synthetic oligonucleotide
  Antisense strand to SEQ ID NO: 574309
ucaauaaacaucaacaccu

SEQ ID NO: 574311 - RNA, 19 nt, Artificial Sequence
  Description of Artificial Sequence: Synthetic oligonucleotide
  Sense strand starting at position 2523 of SEQ ID NO: 318593
gcacguaacagacaguuaa

SEQ ID NO: 574312 - RNA, 19 nt, Artificial Sequence
  Description of Artificial Sequence: Synthetic oligonucleotide
  Antisense strand to SEQ ID NO: 574311
uuaacugucuguuacgugc

SEQ ID NO: 574313 - RNA, 19 nt, Artificial Sequence
  Description of Artificial Sequence: Synthetic oligonucleotide
  Sense strand starting at position 2652 of SEQ ID NO: 318593
guaaguuggcaaggucaaa

SEQ ID NO: 574314 - RNA, 19 nt, Artificial Sequence
  Description of Artificial Sequence: Synthetic oligonucleotide
  Antisense strand to SEQ ID NO: 574313
uuugaccuugccaacuuac

SEQ ID NO: 574315 - RNA, 19 nt, Artificial Sequence
  Description of Artificial Sequence: Synthetic oligonucleotide
  Sense strand starting at position 2719 of SEQ ID NO: 318593
ugccauuugcacugguaac

SEQ ID NO: 574316 - RNA, 19 nt, Artificial Sequence
  Description of Artificial Sequence: Synthetic oligonucleotide
  Antisense strand to SEQ ID NO: 574315
guuaccagugcaaauggca

SEQ ID NO: 574317 - RNA, 19 nt, Artificial Sequence
  Description of Artificial Sequence: Synthetic oligonucleotide
  Sense strand starting at position 2985 of SEQ ID NO: 318593
ugaaaugguugucuccgga

SEQ ID NO: 574318 - RNA, 19 nt, Artificial Sequence
  Description of Artificial Sequence: Synthetic oligonucleotide
  Antisense strand to SEQ ID NO: 574317
uccggagacaaccauuuca

SEQ ID NO: 574319 - RNA, 19 nt, Artificial Sequence
  Description of Artificial Sequence: Synthetic oligonucleotide
  Sense strand starting at position 3083 of SEQ ID NO: 318593
acagcuugccaguacuuaa

SEQ ID NO: 574320 - RNA, 19 nt, Artificial Sequence
  Description of Artificial Sequence: Synthetic oligonucleotide
  Antisense strand to SEQ ID NO: 574319
uuaaguacuggcaagcugu

SEQ ID NO: 574321 - RNA, 19 nt, Artificial Sequence
  Description of Artificial Sequence: Synthetic oligonucleotide
  Sense strand starting at position 3249 of SEQ ID NO: 318593
ugguaugugcaagauagau

SEQ ID NO: 574322 - RNA, 19 nt, Artificial Sequence
  Description of Artificial Sequence: Synthetic oligonucleotide
  Antisense strand to SEQ ID NO: 574321
aucuaucuugcacauacca

SEQ ID NO: 574323 - RNA, 19 nt, Artificial Sequence
  Description of Artificial Sequence: Synthetic oligonucleotide
  Sense strand starting at position 3251 of SEQ ID NO: 318593
guaugugcaagauagauug

SEQ ID NO: 574324 - RNA, 19 nt, Artificial Sequence
  Description of Artificial Sequence: Synthetic oligonucleotide
  Antisense strand to SEQ ID NO: 574323
caaucuaucuugcacauac

SEQ ID NO: 574325 - RNA, 19 nt, Artificial Sequence
  Description of Artificial Sequence: Synthetic oligonucleotide
  Sense strand starting at position 3259 of SEQ ID NO: 318593
aagauagauugauggauuu

SEQ ID NO: 574326 - RNA, 19 nt, Artificial Sequence
  Description of Artificial Sequence: Synthetic oligonucleotide
  Antisense strand to SEQ ID NO: 574325
aaauccaucaaucuaucuu

SEQ ID NO: 574327 - RNA, 19 nt, Artificial Sequence
  Description of Artificial Sequence: Synthetic oligonucleotide
  Sense strand starting at position 3525 of SEQ ID NO: 318593
gucacuguggucuacuuga

SEQ ID NO: 574328 - RNA, 19 nt, Artificial Sequence
  Description of Artificial Sequence: Synthetic oligonucleotide
  Antisense strand to SEQ ID NO: 574327
ucaaguagaccacagugac

SEQ ID NO: 574329 - RNA, 19 nt, Artificial Sequence
  Description of Artificial Sequence: Synthetic oligonucleotide
  Sense strand starting at position 3715 of SEQ ID NO: 318593
auacauagauaggagaauu

SEQ ID NO: 574330 - RNA, 19 nt, Artificial Sequence
  Description of Artificial Sequence: Synthetic oligonucleotide
  Antisense strand to SEQ ID NO: 574329
aauucuccuaucuauguau

SEQ ID NO: 574331 - RNA, 19 nt, Artificial Sequence
  Description of Artificial Sequence: Synthetic oligonucleotide
  Sense strand starting at position 3887 of SEQ ID NO: 318593
uuaacauaaugggcuuaua

SEQ ID NO: 574332 - RNA, 19 nt, Artificial Sequence
  Description of Artificial Sequence: Synthetic oligonucleotide
  Antisense strand to SEQ ID NO: 574331
uauaagcccauuauguuaa

SEQ ID NO: 574333 - RNA, 19 nt, Artificial Sequence
  Description of Artificial Sequence: Synthetic oligonucleotide
  Sense strand starting at position 282 of SEQ ID NO: 318594
auauuacacguaugcaaca

SEQ ID NO: 574334 - RNA, 19 nt, Artificial Sequence
  Description of Artificial Sequence: Synthetic oligonucleotide
  Antisense strand to SEQ ID NO: 574333
uguugcauacguguaauau

SEQ ID NO: 574335 - RNA, 19 nt, Artificial Sequence
  Description of Artificial Sequence: Synthetic oligonucleotide
  Sense strand starting at position 324 of SEQ ID NO: 318594
ugugaaauacacuaccgua

SEQ ID NO: 574336 - RNA, 19 nt, Artificial Sequence
  Description of Artificial Sequence: Synthetic oligonucleotide
  Antisense strand to SEQ ID NO: 574335
uacgguaguguauuucaca

SEQ ID NO: 574337 - RNA, 19 nt, Artificial Sequence
  Description of Artificial Sequence: Synthetic oligonucleotide
  Sense strand starting at position 345 of SEQ ID NO: 318594
cuuccauauguuuaaguga

SEQ ID NO: 574338 - RNA, 19 nt, Artificial Sequence
  Description of Artificial Sequence: Synthetic oligonucleotide
  Antisense strand to SEQ ID NO: 574337
ucacuuaaacauauggaag

SEQ ID NO: 574339 - RNA, 19 nt, Artificial Sequence
  Description of Artificial Sequence: Synthetic oligonucleotide
  Sense strand starting at position 348 of SEQ ID NO: 318594
ccauauguuuaagugaaga

SEQ ID NO: 574340 - RNA, 19 nt, Artificial Sequence
  Description of Artificial Sequence: Synthetic oligonucleotide
  Antisense strand to SEQ ID NO: 574339
ucuucacuuaaacauaugg

SEQ ID NO: 574341 - RNA, 19 nt, Artificial Sequence
  Description of Artificial Sequence: Synthetic oligonucleotide
  Sense strand starting at position 608 of SEQ ID NO: 318594
uuccaaugccugcaggaua

SEQ ID NO: 574342 - RNA, 19 nt, Artificial Sequence
  Description of Artificial Sequence: Synthetic oligonucleotide
  Antisense strand to SEQ ID NO: 574341
uauccugcaggcauuggaa

SEQ ID NO: 574343 - RNA, 19 nt, Artificial Sequence
  Description of Artificial Sequence: Synthetic oligonucleotide
  Sense strand starting at position 684 of SEQ ID NO: 318594
cuuaaauugagauggcuga

SEQ ID NO: 574344 - RNA, 19 nt, Artificial Sequence
  Description of Artificial Sequence: Synthetic oligonucleotide
  Antisense strand to SEQ ID NO: 574343
ucagccaucucaauuuaag

SEQ ID NO: 574345 - RNA, 19 nt, Artificial Sequence
  Description of Artificial Sequence: Synthetic oligonucleotide
  Sense strand starting at position 685 of SEQ ID NO: 318594
uuaaauugagauggcugaa

SEQ ID NO: 574346 - RNA, 19 nt, Artificial Sequence
  Description of Artificial Sequence: Synthetic oligonucleotide
  Antisense strand to SEQ ID NO: 574345
uucagccaucucaauuuaa

SEQ ID NO: 574347 - RNA, 19 nt, Artificial Sequence
  Description of Artificial Sequence: Synthetic oligonucleotide
  Sense strand starting at position 805 of SEQ ID NO: 318594
accugaaucucgucacgaa

SEQ ID NO: 574348 - RNA, 19 nt, Artificial Sequence
  Description of Artificial Sequence: Synthetic oligonucleotide
  Antisense strand to SEQ ID NO: 574347
uucgugacgagauucaggu

SEQ ID NO: 574349 - RNA, 19 nt, Artificial Sequence
  Description of Artificial Sequence: Synthetic oligonucleotide
  Sense strand starting at position 806 of SEQ ID NO: 318594
ccugaaucucgucacgaau

SEQ ID NO: 574350 - RNA, 19 nt, Artificial Sequence
  Description of Artificial Sequence: Synthetic oligonucleotide
  Antisense strand to SEQ ID NO: 574349
auucgugacgagauucagg

SEQ ID NO: 574351 - RNA, 19 nt, Artificial Sequence
  Description of Artificial Sequence: Synthetic oligonucleotide
  Sense strand starting at position 809 of SEQ ID NO: 318594
gaaucucgucacgaauaua

SEQ ID NO: 574352 - RNA, 19 nt, Artificial Sequence
  Description of Artificial Sequence: Synthetic oligonucleotide
  Antisense strand to SEQ ID NO: 574351
uauauucgugacgagauuc

SEQ ID NO: 574353 - RNA, 19 nt, Artificial Sequence
  Description of Artificial Sequence: Synthetic oligonucleotide
  Sense strand starting at position 812 of SEQ ID NO: 318594
ucucgucacgaauauaaag

SEQ ID NO: 574354 - RNA, 19 nt, Artificial Sequence
  Description of Artificial Sequence: Synthetic oligonucleotide
  Antisense strand to SEQ ID NO: 574353
cuuuauauucgugacgaga

SEQ ID NO: 574355 - RNA, 19 nt, Artificial Sequence
  Description of Artificial Sequence: Synthetic oligonucleotide
  Sense strand starting at position 814 of SEQ ID NO: 318594
ucgucacgaauauaaagau

SEQ ID NO: 574356 - RNA, 19 nt, Artificial Sequence
  Description of Artificial Sequence: Synthetic oligonucleotide
  Antisense strand to SEQ ID NO: 574355
aucuuuauauucgugacga

SEQ ID NO: 574357 - RNA, 19 nt, Artificial Sequence
  Description of Artificial Sequence: Synthetic oligonucleotide
  Sense strand starting at position 886 of SEQ ID NO: 318594
cucagauuaugagucauau

SEQ ID NO: 574358 - RNA, 19 nt, Artificial Sequence
  Description of Artificial Sequence: Synthetic oligonucleotide
  Antisense strand to SEQ ID NO: 574357
auaugacucauaaucugag

SEQ ID NO: 574359 - RNA, 19 nt, Artificial Sequence
  Description of Artificial Sequence: Synthetic oligonucleotide
  Sense strand starting at position 939 of SEQ ID NO: 318594
augucacgacuuuagaauc

SEQ ID NO: 574360 - RNA, 19 nt, Artificial Sequence
  Description of Artificial Sequence: Synthetic oligonucleotide
  Antisense strand to SEQ ID NO: 574359
gauucuaaagucgugacau

SEQ ID NO: 574361 - RNA, 19 nt, Artificial Sequence
  Description of Artificial Sequence: Synthetic oligonucleotide
  Sense strand starting at position 990 of SEQ ID NO: 318594
ggagauaacuauuaauaca

SEQ ID NO: 574362 - RNA, 19 nt, Artificial Sequence
  Description of Artificial Sequence: Synthetic oligonucleotide
  Antisense strand to SEQ ID NO: 574361
uguauuaauaguuaucucc

SEQ ID NO: 574363 - RNA, 19 nt, Artificial Sequence
  Description of Artificial Sequence: Synthetic oligonucleotide
  Sense strand starting at position 1007 of SEQ ID NO: 318594
cauggauuacuuggcauau

SEQ ID NO: 574364 - RNA, 19 nt, Artificial Sequence
  Description of Artificial Sequence: Synthetic oligonucleotide
  Antisense strand to SEQ ID NO: 574363
auaugccaaguaauccaug

SEQ ID NO: 574365 - RNA, 19 nt, Artificial Sequence
  Description of Artificial Sequence: Synthetic oligonucleotide
  Sense strand starting at position 1008 of SEQ ID NO: 318594
auggauuacuuggcauauu

SEQ ID NO: 574366 - RNA, 19 nt, Artificial Sequence
  Description of Artificial Sequence: Synthetic oligonucleotide
  Antisense strand to SEQ ID NO: 574365
aauaugccaaguaauccau

SEQ ID NO: 574367 - RNA, 19 nt, Artificial Sequence
  Description of Artificial Sequence: Synthetic oligonucleotide
  Sense strand starting at position 1032 of SEQ ID NO: 318594
gagacaguguuaucuaauu

SEQ ID NO: 574368 - RNA, 19 nt, Artificial Sequence
  Description of Artificial Sequence: Synthetic oligonucleotide
  Antisense strand to SEQ ID NO: 574367
aauuagauaacacugucuc

SEQ ID NO: 574369 - RNA, 19 nt, Artificial Sequence
  Description of Artificial Sequence: Synthetic oligonucleotide
  Sense strand starting at position 1185 of SEQ ID NO: 318594
uucuguaugcaugaaauau

SEQ ID NO: 574370 - RNA, 19 nt, Artificial Sequence
  Description of Artificial Sequence: Synthetic oligonucleotide
  Antisense strand to SEQ ID NO: 574369
auauuucaugcauacagaa

SEQ ID NO: 574371 - RNA, 19 nt, Artificial Sequence
  Description of Artificial Sequence: Synthetic oligonucleotide
  Sense strand starting at position 1325 of SEQ ID NO: 318594
cuaaaugcaucacuaggaa

SEQ ID NO: 574372 - RNA, 19 nt, Artificial Sequence
  Description of Artificial Sequence: Synthetic oligonucleotide
  Antisense strand to SEQ ID NO: 574371
uuccuagugaugcauuuag

SEQ ID NO: 574373 - RNA, 19 nt, Artificial Sequence
  Description of Artificial Sequence: Synthetic oligonucleotide
  Sense strand starting at position 1471 of SEQ ID NO: 318594
aaaguuugugugcaagaau

SEQ ID NO: 574374 - RNA, 19 nt, Artificial Sequence
  Description of Artificial Sequence: Synthetic oligonucleotide
  Antisense strand to SEQ ID NO: 574373
auucuugcacacaaacuuu

SEQ ID NO: 574375 - RNA, 19 nt, Artificial Sequence
  Description of Artificial Sequence: Synthetic oligonucleotide
  Sense strand starting at position 1479 of SEQ ID NO: 318594
ugugcaagaaugugaacaa

SEQ ID NO: 574376 - RNA, 19 nt, Artificial Sequence
  Description of Artificial Sequence: Synthetic oligonucleotide
  Antisense strand to SEQ ID NO: 574375
uuguucacauucuugcaca

SEQ ID NO: 574377 - RNA, 19 nt, Artificial Sequence
  Description of Artificial Sequence: Synthetic oligonucleotide
  Sense strand starting at position 1524 of SEQ ID NO: 318594
aauaauaucguacgaggga

SEQ ID NO: 574378 - RNA, 19 nt, Artificial Sequence
  Description of Artificial Sequence: Synthetic oligonucleotide
  Antisense strand to SEQ ID NO: 574377
ucccucguacgauauuauu

SEQ ID NO: 574379 - RNA, 19 nt, Artificial Sequence
  Description of Artificial Sequence: Synthetic oligonucleotide
  Sense strand starting at position 1527 of SEQ ID NO: 318594
aauaucguacgagggaaau

SEQ ID NO: 574380 - RNA, 19 nt, Artificial Sequence
  Description of Artificial Sequence: Synthetic oligonucleotide
  Antisense strand to SEQ ID NO: 574379
auuucccucguacgauauu

SEQ ID NO: 574381 - RNA, 19 nt, Artificial Sequence
  Description of Artificial Sequence: Synthetic oligonucleotide
  Sense strand starting at position 1618 of SEQ ID NO: 318594
auguauacgggagggauaa

SEQ ID NO: 574382 - RNA, 19 nt, Artificial Sequence
  Description of Artificial Sequence: Synthetic oligonucleotide
  Antisense strand to SEQ ID NO: 574381
uuaucccucccguauacau

SEQ ID NO: 574383 - RNA, 19 nt, Artificial Sequence
  Description of Artificial Sequence: Synthetic oligonucleotide
  Sense strand starting at position 2071 of SEQ ID NO: 318594
auucuaaauccuugguaag

SEQ ID NO: 574384 - RNA, 19 nt, Artificial Sequence
  Description of Artificial Sequence: Synthetic oligonucleotide
  Antisense strand to SEQ ID NO: 574383
cuuaccaaggauuuagaau

SEQ ID NO: 574385 - RNA, 19 nt, Artificial Sequence
  Description of Artificial Sequence: Synthetic oligonucleotide
  Sense strand starting at position 2716 of SEQ ID NO: 318594
ucguuucaccgccuggauu

SEQ ID NO: 574386 - RNA, 19 nt, Artificial Sequence
  Description of Artificial Sequence: Synthetic oligonucleotide
  Antisense strand to SEQ ID NO: 574385
aauccaggcggugaaacga

SEQ ID NO: 574387 - RNA, 19 nt, Artificial Sequence
  Description of Artificial Sequence: Synthetic oligonucleotide
  Sense strand starting at position 2802 of SEQ ID NO: 318594
ccggucucggauugggaaa

SEQ ID NO: 574388 - RNA, 19 nt, Artificial Sequence
  Description of Artificial Sequence: Synthetic oligonucleotide
  Antisense strand to SEQ ID NO: 574387
uuucccaauccgagaccgg

SEQ ID NO: 574389 - RNA, 19 nt, Artificial Sequence
  Description of Artificial Sequence: Synthetic oligonucleotide
  Sense strand starting at position 2903 of SEQ ID NO: 318594
agggcagccuuaucacaua

SEQ ID NO: 574390 - RNA, 19 nt, Artificial Sequence
  Description of Artificial Sequence: Synthetic oligonucleotide
  Antisense strand to SEQ ID NO: 574389
uaugugauaaggcugcccu

SEQ ID NO: 574391 - RNA, 19 nt, Artificial Sequence
  Description of Artificial Sequence: Synthetic oligonucleotide
  Sense strand starting at position 2955 of SEQ ID NO: 318594
guuggcaggcguccuaauu

SEQ ID NO: 574392 - RNA, 19 nt, Artificial Sequence
  Description of Artificial Sequence: Synthetic oligonucleotide
  Antisense strand to SEQ ID NO: 574391
aauuaggacgccugccaac

SEQ ID NO: 574393 - RNA, 19 nt, Artificial Sequence
  Description of Artificial Sequence: Synthetic oligonucleotide
  Sense strand starting at position 3002 of SEQ ID NO: 318594
guagguucagguugaauua

SEQ ID NO: 574394 - RNA, 19 nt, Artificial Sequence
  Description of Artificial Sequence: Synthetic oligonucleotide
  Antisense strand to SEQ ID NO: 574393
uaauucaaccugaaccuac

SEQ ID NO: 574395 - RNA, 19 nt, Artificial Sequence
  Description of Artificial Sequence: Synthetic oligonucleotide
  Sense strand starting at position 3091 of SEQ ID NO: 318594
agguguugauguuuauuga

SEQ ID NO: 574396 - RNA, 19 nt, Artificial Sequence
  Description of Artificial Sequence: Synthetic oligonucleotide
  Antisense strand to SEQ ID NO: 574395
ucaauaaacaucaacaccu

SEQ ID NO: 574397 - RNA, 19 nt, Artificial Sequence
  Description of Artificial Sequence: Synthetic oligonucleotide
  Sense strand starting at position 3140 of SEQ ID NO: 318594
gcacguaacagacaguuaa

SEQ ID NO: 574398 - RNA, 19 nt, Artificial Sequence
  Description of Artificial Sequence: Synthetic oligonucleotide
  Antisense strand to SEQ ID NO: 574397
uuaacugucuguuacgugc

SEQ ID NO: 574399 - RNA, 19 nt, Artificial Sequence
  Description of Artificial Sequence: Synthetic oligonucleotide
  Sense strand starting at position 3269 of SEQ ID NO: 318594
guaaguuggcaaggucaaa

SEQ ID NO: 574400 - RNA, 19 nt, Artificial Sequence
  Description of Artificial Sequence: Synthetic oligonucleotide
  Antisense strand to SEQ ID NO: 574399
uuugaccuugccaacuuac

SEQ ID NO: 574401 - RNA, 19 nt, Artificial Sequence
  Description of Artificial Sequence: Synthetic oligonucleotide
  Sense strand starting at position 3336 of SEQ ID NO: 318594
ugccauuugcacugguaac

SEQ ID NO: 574402 - RNA, 19 nt, Artificial Sequence
  Description of Artificial Sequence: Synthetic oligonucleotide
  Antisense strand to SEQ ID NO: 574401
guuaccagugcaaauggca

SEQ ID NO: 574403 - RNA, 19 nt, Artificial Sequence
  Description of Artificial Sequence: Synthetic oligonucleotide
  Sense strand starting at position 3602 of SEQ ID NO: 318594
ugaaaugguugucuccgga

SEQ ID NO: 574404 - RNA, 19 nt, Artificial Sequence
  Description of Artificial Sequence: Synthetic oligonucleotide
  Antisense strand to SEQ ID NO: 574403
uccggagacaaccauuuca

SEQ ID NO: 574405 - RNA, 19 nt, Artificial Sequence
  Description of Artificial Sequence: Synthetic oligonucleotide
  Sense strand starting at position 3700 of SEQ ID NO: 318594
acagcuugccaguacuuaa

SEQ ID NO: 574406 - RNA, 19 nt, Artificial Sequence
  Description of Artificial Sequence: Synthetic oligonucleotide
  Antisense strand to SEQ ID NO: 574405
uuaaguacuggcaagcugu

SEQ ID NO: 574407 - RNA, 19 nt, Artificial Sequence
  Description of Artificial Sequence: Synthetic oligonucleotide
  Sense strand starting at position 3866 of SEQ ID NO: 318594
ugguaugugcaagauagau

SEQ ID NO: 574408 - RNA, 19 nt, Artificial Sequence
  Description of Artificial Sequence: Synthetic oligonucleotide
  Antisense strand to SEQ ID NO: 574407
aucuaucuugcacauacca

SEQ ID NO: 574409 - RNA, 19 nt, Artificial Sequence
  Description of Artificial Sequence: Synthetic oligonucleotide
  Sense strand starting at position 3868 of SEQ ID NO: 318594
guaugugcaagauagauug

SEQ ID NO: 574410 - RNA, 19 nt, Artificial Sequence
  Description of Artificial Sequence: Synthetic oligonucleotide
  Antisense strand to SEQ ID NO: 574409
caaucuaucuugcacauac

SEQ ID NO: 574411 - RNA, 19 nt, Artificial Sequence
  Description of Artificial Sequence: Synthetic oligonucleotide
  Sense strand starting at position 3876 of SEQ ID NO: 318594
aagauagauugauggauuu

SEQ ID NO: 574412 - RNA, 19 nt, Artificial Sequence
  Description of Artificial Sequence: Synthetic oligonucleotide
  Antisense strand to SEQ ID NO: 574411
aaauccaucaaucuaucuu

SEQ ID NO: 574413 - RNA, 19 nt, Artificial Sequence
  Description of Artificial Sequence: Synthetic oligonucleotide
  Sense strand starting at position 6 of SEQ ID NO: 318595
uaaguuauccuauacgaug

SEQ ID NO: 574414 - RNA, 19 nt, Artificial Sequence
  Description of Artificial Sequence: Synthetic oligonucleotide
  Antisense strand to SEQ ID NO: 574413
caucguauaggauaacuua

SEQ ID NO: 574415 - RNA, 19 nt, Artificial Sequence
  Description of Artificial Sequence: Synthetic oligonucleotide
  Sense strand starting at position 83 of SEQ ID NO: 318595
gucucauaauaggcaaauu

SEQ ID NO: 574416 - RNA, 19 nt, Artificial Sequence
  Description of Artificial Sequence: Synthetic oligonucleotide
  Antisense strand to SEQ ID NO: 574415
aauuugccuauuaugagac

SEQ ID NO: 574417 - RNA, 19 nt, Artificial Sequence
  Description of Artificial Sequence: Synthetic oligonucleotide
  Sense strand starting at position 102 of SEQ ID NO: 318595
acuugauuucuuugucccu

SEQ ID NO: 574418 - RNA, 19 nt, Artificial Sequence
  Description of Artificial Sequence: Synthetic oligonucleotide
  Antisense strand to SEQ ID NO: 574417
agggacaaagaaaucaagu

SEQ ID NO: 574419 - RNA, 19 nt, Artificial Sequence
  Description of Artificial Sequence: Synthetic oligonucleotide
  Sense strand starting at position 167 of SEQ ID NO: 318595
ugcaguugugaauauuaaa

SEQ ID NO: 574420 - RNA, 19 nt, Artificial Sequence
  Description of Artificial Sequence: Synthetic oligonucleotide
  Antisense strand to SEQ ID NO: 574419
uuuaauauucacaacugca

SEQ ID NO: 574421 - RNA, 19 nt, Artificial Sequence
  Description of Artificial Sequence: Synthetic oligonucleotide
  Sense strand starting at position 204 of SEQ ID NO: 318595
uugauauaguaucugacau

SEQ ID NO: 574422 - RNA, 19 nt, Artificial Sequence
  Description of Artificial Sequence: Synthetic oligonucleotide
  Antisense strand to SEQ ID NO: 574421
augucagauacuauaucaa

SEQ ID NO: 574423 - RNA, 19 nt, Artificial Sequence
  Description of Artificial Sequence: Synthetic oligonucleotide
  Sense strand starting at position 593 of SEQ ID NO: 318595
guguuuggugcccuuacuu

SEQ ID NO: 574424 - RNA, 19 nt, Artificial Sequence
  Description of Artificial Sequence: Synthetic oligonucleotide
  Antisense strand to SEQ ID NO: 574423
aaguaagggcaccaaacac

SEQ ID NO: 574425 - RNA, 19 nt, Artificial Sequence
  Description of Artificial Sequence: Synthetic oligonucleotide
  Sense strand starting at position 773 of SEQ ID NO: 318595
aggcuuaauaaagagugua

SEQ ID NO: 574426 - RNA, 19 nt, Artificial Sequence
  Description of Artificial Sequence: Synthetic oligonucleotide
  Antisense strand to SEQ ID NO: 574425
uacacucuuuauuaagccu

SEQ ID NO: 574427 - RNA, 19 nt, Artificial Sequence
  Description of Artificial Sequence: Synthetic oligonucleotide
  Sense strand starting at position 776 of SEQ ID NO: 318595
cuuaauaaagaguguacau

SEQ ID NO: 574428 - RNA, 19 nt, Artificial Sequence
  Description of Artificial Sequence: Synthetic oligonucleotide
  Antisense strand to SEQ ID NO: 574427
auguacacucuuuauuaag

SEQ ID NO: 574429 - RNA, 19 nt, Artificial Sequence
  Description of Artificial Sequence: Synthetic oligonucleotide
  Sense strand starting at position 787 of SEQ ID NO: 318595
guguacauuuccucucuca

SEQ ID NO: 574430 - RNA, 19 nt, Artificial Sequence
  Description of Artificial Sequence: Synthetic oligonucleotide
  Antisense strand to SEQ ID NO: 574429
ugagagaggaaauguacac

SEQ ID NO: 574431 - RNA, 19 nt, Artificial Sequence
  Description of Artificial Sequence: Synthetic oligonucleotide
  Sense strand starting at position 1048 of SEQ ID NO: 318595
uaaagugcgcugggaauuu

SEQ ID NO: 574432 - RNA, 19 nt, Artificial Sequence
  Description of Artificial Sequence: Synthetic oligonucleotide
  Antisense strand to SEQ ID NO: 574431
aaauucccagcgcacuuua

SEQ ID NO: 574433 - RNA, 19 nt, Artificial Sequence
  Description of Artificial Sequence: Synthetic oligonucleotide
  Sense strand starting at position 1117 of SEQ ID NO: 318595
gcaaucaguguucugcagu

SEQ ID NO: 574434 - RNA, 19 nt, Artificial Sequence
  Description of Artificial Sequence: Synthetic oligonucleotide
  Antisense strand to SEQ ID NO: 574433
acugcagaacacugauugc

SEQ ID NO: 574435 - RNA, 19 nt, Artificial Sequence
  Description of Artificial Sequence: Synthetic oligonucleotide
  Sense strand starting at position 1189 of SEQ ID NO: 318595
gguaguugaggacgagaaa

SEQ ID NO: 574436 - RNA, 19 nt, Artificial Sequence
  Description of Artificial Sequence: Synthetic oligonucleotide
  Antisense strand to SEQ ID NO: 574435
uuucucguccucaacuacc

SEQ ID NO: 574437 - RNA, 19 nt, Artificial Sequence
  Description of Artificial Sequence: Synthetic oligonucleotide
  Sense strand starting at position 1217 of SEQ ID NO: 318595
guaauuauucugcagaguu

SEQ ID NO: 574438 - RNA, 19 nt, Artificial Sequence
  Description of Artificial Sequence: Synthetic oligonucleotide
  Antisense strand to SEQ ID NO: 574437
aacucugcagaauaauuac

SEQ ID NO: 574439 - RNA, 19 nt, Artificial Sequence
  Description of Artificial Sequence: Synthetic oligonucleotide
  Sense strand starting at position 1262 of SEQ ID NO: 318595
gacauagaauuugagaguu

SEQ ID NO: 574440 - RNA, 19 nt, Artificial Sequence
  Description of Artificial Sequence: Synthetic oligonucleotide
  Antisense strand to SEQ ID NO: 574439
aacucucaaauucuauguc

SEQ ID NO: 574441 - RNA, 19 nt, Artificial Sequence
  Description of Artificial Sequence: Synthetic oligonucleotide
  Sense strand starting at position 1264 of SEQ ID NO: 318595
cauagaauuugagaguuag

SEQ ID NO: 574442 - RNA, 19 nt, Artificial Sequence
  Description of Artificial Sequence: Synthetic oligonucleotide
  Antisense strand to SEQ ID NO: 574441
cuaacucucaaauucuaug

SEQ ID NO: 574443 - RNA, 19 nt, Artificial Sequence
  Description of Artificial Sequence: Synthetic oligonucleotide
  Sense strand starting at position 1671 of SEQ ID NO: 318595
auguuuggaguguaaacuu

SEQ ID NO: 574444 - RNA, 19 nt, Artificial Sequence
  Description of Artificial Sequence: Synthetic oligonucleotide
  Antisense strand to SEQ ID NO: 574443
aaguuuacacuccaaacau

SEQ ID NO: 574445 - RNA, 19 nt, Artificial Sequence
  Description of Artificial Sequence: Synthetic oligonucleotide
  Sense strand starting at position 2101 of SEQ ID NO: 318595
uaguuugaucugcacacga

SEQ ID NO: 574446 - RNA, 19 nt, Artificial Sequence
  Description of Artificial Sequence: Synthetic oligonucleotide
  Antisense strand to SEQ ID NO: 574445
ucgugugcagaucaaacua

SEQ ID NO: 574447 - RNA, 19 nt, Artificial Sequence
  Description of Artificial Sequence: Synthetic oligonucleotide
  Sense strand starting at position 2103 of SEQ ID NO: 318595
guuugaucugcacacgaga

SEQ ID NO: 574448 - RNA, 19 nt, Artificial Sequence
  Description of Artificial Sequence: Synthetic oligonucleotide
  Antisense strand to SEQ ID NO: 574447
ucucgugugcagaucaaac

SEQ ID NO: 574449 - RNA, 19 nt, Artificial Sequence
  Description of Artificial Sequence: Synthetic oligonucleotide
  Sense strand starting at position 2106 of SEQ ID NO: 318595
ugaucugcacacgagagua

SEQ ID NO: 574450 - RNA, 19 nt, Artificial Sequence
  Description of Artificial Sequence: Synthetic oligonucleotide
  Antisense strand to SEQ ID NO: 574449
uacucucgugugcagauca

SEQ ID NO: 574451 - RNA, 19 nt, Artificial Sequence
  Description of Artificial Sequence: Synthetic oligonucleotide
  Sense strand starting at position 2116 of SEQ ID NO: 318595
acgagaguaguguaaacac

SEQ ID NO: 574452 - RNA, 19 nt, Artificial Sequence
  Description of Artificial Sequence: Synthetic oligonucleotide
  Antisense strand to SEQ ID NO: 574451
guguuuacacuacucucgu

SEQ ID NO: 574453 - RNA, 19 nt, Artificial Sequence
  Description of Artificial Sequence: Synthetic oligonucleotide
  Sense strand starting at position 2227 of SEQ ID NO: 318595
ccuggaguacauuggaaua

SEQ ID NO: 574454 - RNA, 19 nt, Artificial Sequence
  Description of Artificial Sequence: Synthetic oligonucleotide
  Antisense strand to SEQ ID NO: 574453
uauuccaauguacuccagg

SEQ ID NO: 574455 - RNA, 19 nt, Artificial Sequence
  Description of Artificial Sequence: Synthetic oligonucleotide
  Sense strand starting at position 2241 of SEQ ID NO: 318595
gaauaacccuucucagggu

SEQ ID NO: 574456 - RNA, 19 nt, Artificial Sequence
  Description of Artificial Sequence: Synthetic oligonucleotide
  Antisense strand to SEQ ID NO: 574455
acccugagaaggguuauuc

SEQ ID NO: 574457 - RNA, 19 nt, Artificial Sequence
  Description of Artificial Sequence: Synthetic oligonucleotide
  Sense strand starting at position 2518 of SEQ ID NO: 318595
aggugagagccucaucuag

SEQ ID NO: 574458 - RNA, 19 nt, Artificial Sequence
  Description of Artificial Sequence: Synthetic oligonucleotide
  Antisense strand to SEQ ID NO: 574457
cuagaugaggcucucaccu

SEQ ID NO: 574459 - RNA, 19 nt, Artificial Sequence
  Description of Artificial Sequence: Synthetic oligonucleotide
  Sense strand starting at position 2662 of SEQ ID NO: 318595
guugcaucgaaacacugau

SEQ ID NO: 574460 - RNA, 19 nt, Artificial Sequence
  Description of Artificial Sequence: Synthetic oligonucleotide
  Antisense strand to SEQ ID NO: 574459
aucaguguuucgaugcaac

SEQ ID NO: 574461 - RNA, 19 nt, Artificial Sequence
  Description of Artificial Sequence: Synthetic oligonucleotide
  Sense strand starting at position 3022 of SEQ ID NO: 318595
cgugcuuguggagaagaga

SEQ ID NO: 574462 - RNA, 19 nt, Artificial Sequence
  Description of Artificial Sequence: Synthetic oligonucleotide
  Antisense strand to SEQ ID NO: 574461
ucucuucuccacaagcacg

SEQ ID NO: 574463 - RNA, 19 nt, Artificial Sequence
  Description of Artificial Sequence: Synthetic oligonucleotide
  Sense strand starting at position 3130 of SEQ ID NO: 318595
accugagaugacugucagu

SEQ ID NO: 574464 - RNA, 19 nt, Artificial Sequence
  Description of Artificial Sequence: Synthetic oligonucleotide
  Antisense strand to SEQ ID NO: 574463
acugacagucaucucaggu

SEQ ID NO: 574465 - RNA, 19 nt, Artificial Sequence
  Description of Artificial Sequence: Synthetic oligonucleotide
  Sense strand starting at position 3190 of SEQ ID NO: 318595
gggaaagguuucucugauu

SEQ ID NO: 574466 - RNA, 19 nt, Artificial Sequence
  Description of Artificial Sequence: Synthetic oligonucleotide
  Antisense strand to SEQ ID NO: 574465
aaucagagaaaccuuuccc

SEQ ID NO: 574467 - RNA, 19 nt, Artificial Sequence
  Description of Artificial Sequence: Synthetic oligonucleotide
  Sense strand starting at position 3271 of SEQ ID NO: 318595
gagucuguuguggaauaag

SEQ ID NO: 574468 - RNA, 19 nt, Artificial Sequence
  Description of Artificial Sequence: Synthetic oligonucleotide
  Antisense strand to SEQ ID NO: 574467
cuuauuccacaacagacuc

SEQ ID NO: 574469 - RNA, 19 nt, Artificial Sequence
  Description of Artificial Sequence: Synthetic oligonucleotide
  Sense strand starting at position 3283 of SEQ ID NO: 318595
gaauaagugucaccugaau

SEQ ID NO: 574470 - RNA, 19 nt, Artificial Sequence
  Description of Artificial Sequence: Synthetic oligonucleotide
  Antisense strand to SEQ ID NO: 574469
auucaggugacacuuauuc

SEQ ID NO: 574471 - RNA, 19 nt, Artificial Sequence
  Description of Artificial Sequence: Synthetic oligonucleotide
  Sense strand starting at position 3310 of SEQ ID NO: 318595
ugagaccuagcuuauauca

SEQ ID NO: 574472 - RNA, 19 nt, Artificial Sequence
  Description of Artificial Sequence: Synthetic oligonucleotide
  Antisense strand to SEQ ID NO: 574471
ugauauaagcuaggucuca

SEQ ID NO: 574473 - RNA, 19 nt, Artificial Sequence
  Description of Artificial Sequence: Synthetic oligonucleotide
  Sense strand starting at position 3338 of SEQ ID NO: 318595
uuugaugaaucagcauauu

SEQ ID NO: 574474 - RNA, 19 nt, Artificial Sequence
  Description of Artificial Sequence: Synthetic oligonucleotide
  Antisense strand to SEQ ID NO: 574473
aauaugcugauucaucaaa

SEQ ID NO: 574475 - RNA, 19 nt, Artificial Sequence
  Description of Artificial Sequence: Synthetic oligonucleotide
  Sense strand starting at position 3372 of SEQ ID NO: 318595
ggaaguauauaguugaauu

SEQ ID NO: 574476 - RNA, 19 nt, Artificial Sequence
  Description of Artificial Sequence: Synthetic oligonucleotide
  Antisense strand to SEQ ID NO: 574475
aauucaacuauauacuucc

SEQ ID NO: 574477 - RNA, 19 nt, Artificial Sequence
  Description of Artificial Sequence: Synthetic oligonucleotide
  Sense strand starting at position 3587 of SEQ ID NO: 318595
ugaacuucuccugggcauu

SEQ ID NO: 574478 - RNA, 19 nt, Artificial Sequence
  Description of Artificial Sequence: Synthetic oligonucleotide
  Antisense strand to SEQ ID NO: 574477
aaugcccaggagaaguuca

SEQ ID NO: 574479 - RNA, 19 nt, Artificial Sequence
  Description of Artificial Sequence: Synthetic oligonucleotide
  Sense strand starting at position 3600 of SEQ ID NO: 318595
ggcauuguagauuaguaug

SEQ ID NO: 574480 - RNA, 19 nt, Artificial Sequence
  Description of Artificial Sequence: Synthetic oligonucleotide
  Antisense strand to SEQ ID NO: 574479
cauacuaaucuacaaugcc

SEQ ID NO: 574481 - RNA, 19 nt, Artificial Sequence
  Description of Artificial Sequence: Synthetic oligonucleotide
  Sense strand starting at position 3693 of SEQ ID NO: 318595
auguuucuugagggcaaua

SEQ ID NO: 574482 - RNA, 19 nt, Artificial Sequence
  Description of Artificial Sequence: Synthetic oligonucleotide
  Antisense strand to SEQ ID NO: 574481
uauugcccucaagaaacau

SEQ ID NO: 574483 - RNA, 19 nt, Artificial Sequence
  Description of Artificial Sequence: Synthetic oligonucleotide
  Sense strand starting at position 3695 of SEQ ID NO: 318595
guuucuugagggcaauauc

SEQ ID NO: 574484 - RNA, 19 nt, Artificial Sequence
  Description of Artificial Sequence: Synthetic oligonucleotide
  Antisense strand to SEQ ID NO: 574483
gauauugcccucaagaaac

SEQ ID NO: 574485 - RNA, 19 nt, Artificial Sequence
  Description of Artificial Sequence: Synthetic oligonucleotide
  Sense strand starting at position 3721 of SEQ ID NO: 318595
guuaauaaacacugguaga

SEQ ID NO: 574486 - RNA, 19 nt, Artificial Sequence
  Description of Artificial Sequence: Synthetic oligonucleotide
  Antisense strand to SEQ ID NO: 574485
ucuaccaguguuuauuaac

SEQ ID NO: 574487 - RNA, 19 nt, Artificial Sequence
  Description of Artificial Sequence: Synthetic oligonucleotide
  Sense strand starting at position 3786 of SEQ ID NO: 318595
uguuccucugucuaaucaa

SEQ ID NO: 574488 - RNA, 19 nt, Artificial Sequence
  Description of Artificial Sequence: Synthetic oligonucleotide
  Antisense strand to SEQ ID NO: 574487
uugauuagacagaggaaca

SEQ ID NO: 574489 - RNA, 19 nt, Artificial Sequence
  Description of Artificial Sequence: Synthetic oligonucleotide
  Sense strand starting at position 3803 of SEQ ID NO: 318595
aaguguugaccuuagcaaa

SEQ ID NO: 574490 - RNA, 19 nt, Artificial Sequence
  Description of Artificial Sequence: Synthetic oligonucleotide
  Antisense strand to SEQ ID NO: 574489
uuugcuaaggucaacacuu

SEQ ID NO: 574491 - RNA, 19 nt, Artificial Sequence
  Description of Artificial Sequence: Synthetic oligonucleotide
  Sense strand starting at position 3936 of SEQ ID NO: 318595
uuaguauuacuguauccuu

SEQ ID NO: 574492 - RNA, 19 nt, Artificial Sequence
  Description of Artificial Sequence: Synthetic oligonucleotide
  Antisense strand to SEQ ID NO: 574491
aaggauacaguaauacuaa

SEQ ID NO: 574493 - RNA, 19 nt, Artificial Sequence
  Description of Artificial Sequence: Synthetic oligonucleotide
  Sense strand starting at position 181 of SEQ ID NO: 318596
acuagacuucaguggugga

SEQ ID NO: 574494 - RNA, 19 nt, Artificial Sequence
  Description of Artificial Sequence: Synthetic oligonucleotide
  Antisense strand to SEQ ID NO: 574493
uccaccacugaagucuagu

SEQ ID NO: 574495 - RNA, 19 nt, Artificial Sequence
  Description of Artificial Sequence: Synthetic oligonucleotide
  Sense strand starting at position 245 of SEQ ID NO: 318596
acauaugugcuacacauga

SEQ ID NO: 574496 - RNA, 19 nt, Artificial Sequence
  Description of Artificial Sequence: Synthetic oligonucleotide
  Antisense strand to SEQ ID NO: 574495
ucauguguagcacauaugu

SEQ ID NO: 574497 - RNA, 19 nt, Artificial Sequence
  Description of Artificial Sequence: Synthetic oligonucleotide
  Sense strand starting at position 295 of SEQ ID NO: 318596
uuacauaaguguuuccaga

SEQ ID NO: 574498 - RNA, 19 nt, Artificial Sequence
  Description of Artificial Sequence: Synthetic oligonucleotide
  Antisense strand to SEQ ID NO: 574497
ucuggaaacacuuauguaa

SEQ ID NO: 574499 - RNA, 19 nt, Artificial Sequence
  Description of Artificial Sequence: Synthetic oligonucleotide
  Sense strand starting at position 302 of SEQ ID NO: 318596
aguguuuccagaggagaaa

SEQ ID NO: 574500 - RNA, 19 nt, Artificial Sequence
  Description of Artificial Sequence: Synthetic oligonucleotide
  Antisense strand to SEQ ID NO: 574499
uuucuccucuggaaacacu

SEQ ID NO: 574501 - RNA, 19 nt, Artificial Sequence
  Description of Artificial Sequence: Synthetic oligonucleotide
  Sense strand starting at position 514 of SEQ ID NO: 318596
guugaaaucccagggacau

SEQ ID NO: 574502 - RNA, 19 nt, Artificial Sequence
  Description of Artificial Sequence: Synthetic oligonucleotide
  Antisense strand to SEQ ID NO: 574501
augucccugggauuucaac

SEQ ID NO: 574503 - RNA, 19 nt, Artificial Sequence
  Description of Artificial Sequence: Synthetic oligonucleotide
  Sense strand starting at position 524 of SEQ ID NO: 318596
cagggacauuacucugauc

SEQ ID NO: 574504 - RNA, 19 nt, Artificial Sequence
  Description of Artificial Sequence: Synthetic oligonucleotide
  Antisense strand to SEQ ID NO: 574503
gaucagaguaaugucccug

SEQ ID NO: 574505 - RNA, 19 nt, Artificial Sequence
  Description of Artificial Sequence: Synthetic oligonucleotide
  Sense strand starting at position 526 of SEQ ID NO: 318596
gggacauuacucugaucuu

SEQ ID NO: 574506 - RNA, 19 nt, Artificial Sequence
  Description of Artificial Sequence: Synthetic oligonucleotide
  Antisense strand to SEQ ID NO: 574505
aagaucagaguaauguccc

SEQ ID NO: 574507 - RNA, 19 nt, Artificial Sequence
  Description of Artificial Sequence: Synthetic oligonucleotide
  Sense strand starting at position 682 of SEQ ID NO: 318596
aacugaaauccugacucgu

SEQ ID NO: 574508 - RNA, 19 nt, Artificial Sequence
  Description of Artificial Sequence: Synthetic oligonucleotide
  Antisense strand to SEQ ID NO: 574507
acgagucaggauuucaguu

SEQ ID NO: 574509 - RNA, 19 nt, Artificial Sequence
  Description of Artificial Sequence: Synthetic oligonucleotide
  Sense strand starting at position 750 of SEQ ID NO: 318596
acaaguucccaucagugaa

SEQ ID NO: 574510 - RNA, 19 nt, Artificial Sequence
  Description of Artificial Sequence: Synthetic oligonucleotide
  Antisense strand to SEQ ID NO: 574509
uucacugaugggaacuugu

SEQ ID NO: 574511 - RNA, 19 nt, Artificial Sequence
  Description of Artificial Sequence: Synthetic oligonucleotide
  Sense strand starting at position 754 of SEQ ID NO: 318596
guucccaucagugaagagu

SEQ ID NO: 574512 - RNA, 19 nt, Artificial Sequence
  Description of Artificial Sequence: Synthetic oligonucleotide
  Antisense strand to SEQ ID NO: 574511
acucuucacugaugggaac

SEQ ID NO: 574513 - RNA, 19 nt, Artificial Sequence
  Description of Artificial Sequence: Synthetic oligonucleotide
  Sense strand starting at position 865 of SEQ ID NO: 318596
cugaaucacugacugcaau

SEQ ID NO: 574514 - RNA, 19 nt, Artificial Sequence
  Description of Artificial Sequence: Synthetic oligonucleotide
  Antisense strand to SEQ ID NO: 574513
auugcagucagugauucag

SEQ ID NO: 574515 - RNA, 19 nt, Artificial Sequence
  Description of Artificial Sequence: Synthetic oligonucleotide
  Sense strand starting at position 866 of SEQ ID NO: 318596
ugaaucacugacugcaauu

SEQ ID NO: 574516 - RNA, 19 nt, Artificial Sequence
  Description of Artificial Sequence: Synthetic oligonucleotide
  Antisense strand to SEQ ID NO: 574515
aauugcagucagugauuca

SEQ ID NO: 574517 - RNA, 19 nt, Artificial Sequence
  Description of Artificial Sequence: Synthetic oligonucleotide
  Sense strand starting at position 887 of SEQ ID NO: 318596
ugugcaagaucccuaaaga

SEQ ID NO: 574518 - RNA, 19 nt, Artificial Sequence
  Description of Artificial Sequence: Synthetic oligonucleotide
  Antisense strand to SEQ ID NO: 574517
ucuuuagggaucuugcaca

SEQ ID NO: 574519 - RNA, 19 nt, Artificial Sequence
  Description of Artificial Sequence: Synthetic oligonucleotide
  Sense strand starting at position 888 of SEQ ID NO: 318596
gugcaagaucccuaaagac

SEQ ID NO: 574520 - RNA, 19 nt, Artificial Sequence
  Description of Artificial Sequence: Synthetic oligonucleotide
  Antisense strand to SEQ ID NO: 574519
gucuuuagggaucuugcac

SEQ ID NO: 574521 - RNA, 19 nt, Artificial Sequence
  Description of Artificial Sequence: Synthetic oligonucleotide
  Sense strand starting at position 984 of SEQ ID NO: 318596
acacauuguucuguaacac

SEQ ID NO: 574522 - RNA, 19 nt, Artificial Sequence
  Description of Artificial Sequence: Synthetic oligonucleotide
  Antisense strand to SEQ ID NO: 574521
guguuacagaacaaugugu

SEQ ID NO: 574523 - RNA, 19 nt, Artificial Sequence
  Description of Artificial Sequence: Synthetic oligonucleotide
  Sense strand starting at position 1019 of SEQ ID NO: 318596
gcucucuuacuugaguaua

SEQ ID NO: 574524 - RNA, 19 nt, Artificial Sequence
  Description of Artificial Sequence: Synthetic oligonucleotide
  Antisense strand to SEQ ID NO: 574523
uauacucaaguaagagagc

SEQ ID NO: 574525 - RNA, 19 nt, Artificial Sequence
  Description of Artificial Sequence: Synthetic oligonucleotide
  Sense strand starting at position 1024 of SEQ ID NO: 318596
cuuacuugaguauagguua

SEQ ID NO: 574526 - RNA, 19 nt, Artificial Sequence
  Description of Artificial Sequence: Synthetic oligonucleotide
  Antisense strand to SEQ ID NO: 574525
uaaccuauacucaaguaag

SEQ ID NO: 574527 - RNA, 19 nt, Artificial Sequence
  Description of Artificial Sequence: Synthetic oligonucleotide
  Sense strand starting at position 1027 of SEQ ID NO: 318596
acuugaguauagguuacua

SEQ ID NO: 574528 - RNA, 19 nt, Artificial Sequence
  Description of Artificial Sequence: Synthetic oligonucleotide
  Antisense strand to SEQ ID NO: 574527
uaguaaccuauacucaagu

SEQ ID NO: 574529 - RNA, 19 nt, Artificial Sequence
  Description of Artificial Sequence: Synthetic oligonucleotide
  Sense strand starting at position 1031 of SEQ ID NO: 318596
gaguauagguuacuagaaa

SEQ ID NO: 574530 - RNA, 19 nt, Artificial Sequence
  Description of Artificial Sequence: Synthetic oligonucleotide
  Antisense strand to SEQ ID NO: 574529
uuucuaguaaccuauacuc

SEQ ID NO: 574531 - RNA, 19 nt, Artificial Sequence
  Description of Artificial Sequence: Synthetic oligonucleotide
  Sense strand starting at position 1513 of SEQ ID NO: 318596
gcagguaauguguacugaa

SEQ ID NO: 574532 - RNA, 19 nt, Artificial Sequence
  Description of Artificial Sequence: Synthetic oligonucleotide
  Antisense strand to SEQ ID NO: 574531
uucaguacacauuaccugc

SEQ ID NO: 574533 - RNA, 19 nt, Artificial Sequence
  Description of Artificial Sequence: Synthetic oligonucleotide
  Sense strand starting at position 1614 of SEQ ID NO: 318596
cgcuuuacagacgagaaua

SEQ ID NO: 574534 - RNA, 19 nt, Artificial Sequence
  Description of Artificial Sequence: Synthetic oligonucleotide
  Antisense strand to SEQ ID NO: 574533
uauucucgucuguaaagcg

SEQ ID NO: 574535 - RNA, 19 nt, Artificial Sequence
  Description of Artificial Sequence: Synthetic oligonucleotide
  Sense strand starting at position 1626 of SEQ ID NO: 318596
gagaauauugaacguacag

SEQ ID NO: 574536 - RNA, 19 nt, Artificial Sequence
  Description of Artificial Sequence: Synthetic oligonucleotide
  Antisense strand to SEQ ID NO: 574535
cuguacguucaauauucuc

SEQ ID NO: 574537 - RNA, 19 nt, Artificial Sequence
  Description of Artificial Sequence: Synthetic oligonucleotide
  Sense strand starting at position 2140 of SEQ ID NO: 318596
acggaauugcgcguuccua

SEQ ID NO: 574538 - RNA, 19 nt, Artificial Sequence
  Description of Artificial Sequence: Synthetic oligonucleotide
  Antisense strand to SEQ ID NO: 574537
uaggaacgcgcaauuccgu

SEQ ID NO: 574539 - RNA, 19 nt, Artificial Sequence
  Description of Artificial Sequence: Synthetic oligonucleotide
  Sense strand starting at position 2141 of SEQ ID NO: 318596
cggaauugcgcguuccuau

SEQ ID NO: 574540 - RNA, 19 nt, Artificial Sequence
  Description of Artificial Sequence: Synthetic oligonucleotide
  Antisense strand to SEQ ID NO: 574539
auaggaacgcgcaauuccg

SEQ ID NO: 574541 - RNA, 19 nt, Artificial Sequence
  Description of Artificial Sequence: Synthetic oligonucleotide
  Sense strand starting at position 2142 of SEQ ID NO: 318596
ggaauugcgcguuccuaug

SEQ ID NO: 574542 - RNA, 19 nt, Artificial Sequence
  Description of Artificial Sequence: Synthetic oligonucleotide
  Antisense strand to SEQ ID NO: 574541
cauaggaacgcgcaauucc

SEQ ID NO: 574543 - RNA, 19 nt, Artificial Sequence
  Description of Artificial Sequence: Synthetic oligonucleotide
  Sense strand starting at position 2359 of SEQ ID NO: 318596
ugaucacuugaaugaacga

SEQ ID NO: 574544 - RNA, 19 nt, Artificial Sequence
  Description of Artificial Sequence: Synthetic oligonucleotide
  Antisense strand to SEQ ID NO: 574543
ucguucauucaagugauca

SEQ ID NO: 574545 - RNA, 19 nt, Artificial Sequence
  Description of Artificial Sequence: Synthetic oligonucleotide
  Sense strand starting at position 2409 of SEQ ID NO: 318596
uugugaagauuucugcuuu

SEQ ID NO: 574546 - RNA, 19 nt, Artificial Sequence
  Description of Artificial Sequence: Synthetic oligonucleotide
  Antisense strand to SEQ ID NO: 574545
aaagcagaaaucuucacaa

SEQ ID NO: 574547 - RNA, 19 nt, Artificial Sequence
  Description of Artificial Sequence: Synthetic oligonucleotide
  Sense strand starting at position 2586 of SEQ ID NO: 318596
gggaauggcuguuuauuag

SEQ ID NO: 574548 - RNA, 19 nt, Artificial Sequence
  Description of Artificial Sequence: Synthetic oligonucleotide
  Antisense strand to SEQ ID NO: 574547
cuaauaaacagccauuccc

SEQ ID NO: 574549 - RNA, 19 nt, Artificial Sequence
  Description of Artificial Sequence: Synthetic oligonucleotide
  Sense strand starting at position 2596 of SEQ ID NO: 318596
guuuauuagccggcaagca

SEQ ID NO: 574550 - RNA, 19 nt, Artificial Sequence
  Description of Artificial Sequence: Synthetic oligonucleotide
  Antisense strand to SEQ ID NO: 574549
ugcuugccggcuaauaaac

SEQ ID NO: 574551 - RNA, 19 nt, Artificial Sequence
  Description of Artificial Sequence: Synthetic oligonucleotide
  Sense strand starting at position 2625 of SEQ ID NO: 318596
aagggaguguguuugaauu

SEQ ID NO: 574552 - RNA, 19 nt, Artificial Sequence
  Description of Artificial Sequence: Synthetic oligonucleotide
  Antisense strand to SEQ ID NO: 574551
aauucaaacacacucccuu

SEQ ID NO: 574553 - RNA, 19 nt, Artificial Sequence
  Description of Artificial Sequence: Synthetic oligonucleotide
  Sense strand starting at position 2631 of SEQ ID NO: 318596
guguguuugaauuagguaa

SEQ ID NO: 574554 - RNA, 19 nt, Artificial Sequence
  Description of Artificial Sequence: Synthetic oligonucleotide
  Antisense strand to SEQ ID NO: 574553
uuaccuaauucaaacacac

SEQ ID NO: 574555 - RNA, 19 nt, Artificial Sequence
  Description of Artificial Sequence: Synthetic oligonucleotide
  Sense strand starting at position 2692 of SEQ ID NO: 318596
gucaaauggugguccaaga

SEQ ID NO: 574556 - RNA, 19 nt, Artificial Sequence
  Description of Artificial Sequence: Synthetic oligonucleotide
  Antisense strand to SEQ ID NO: 574555
ucuuggaccaccauuugac

SEQ ID NO: 574557 - RNA, 19 nt, Artificial Sequence
  Description of Artificial Sequence: Synthetic oligonucleotide
  Sense strand starting at position 2703 of SEQ ID NO: 318596
guccaagagcuuuacauaa

SEQ ID NO: 574558 - RNA, 19 nt, Artificial Sequence
  Description of Artificial Sequence: Synthetic oligonucleotide
  Antisense strand to SEQ ID NO: 574557
uuauguaaagcucuuggac

SEQ ID NO: 574559 - RNA, 19 nt, Artificial Sequence
  Description of Artificial Sequence: Synthetic oligonucleotide
  Sense strand starting at position 2960 of SEQ ID NO: 318596
uguggaaagugacuucaga

SEQ ID NO: 574560 - RNA, 19 nt, Artificial Sequence
  Description of Artificial Sequence: Synthetic oligonucleotide
  Antisense strand to SEQ ID NO: 574559
ucugaagucacuuuccaca

SEQ ID NO: 574561 - RNA, 19 nt, Artificial Sequence
  Description of Artificial Sequence: Synthetic oligonucleotide
  Sense strand starting at position 3440 of SEQ ID NO: 318596
gguguuuguuaauuuacua

SEQ ID NO: 574562 - RNA, 19 nt, Artificial Sequence
  Description of Artificial Sequence: Synthetic oligonucleotide
  Antisense strand to SEQ ID NO: 574561
uaguaaauuaacaaacacc

SEQ ID NO: 574563 - RNA, 19 nt, Artificial Sequence
  Description of Artificial Sequence: Synthetic oligonucleotide
  Sense strand starting at position 3483 of SEQ ID NO: 318596
cagagacauuagguuguca

SEQ ID NO: 574564 - RNA, 19 nt, Artificial Sequence
  Description of Artificial Sequence: Synthetic oligonucleotide
  Antisense strand to SEQ ID NO: 574563
ugacaaccuaaugucucug

SEQ ID NO: 574565 - RNA, 19 nt, Artificial Sequence
  Description of Artificial Sequence: Synthetic oligonucleotide
  Sense strand starting at position 3552 of SEQ ID NO: 318596
aguguauacacuggagcaa

SEQ ID NO: 574566 - RNA, 19 nt, Artificial Sequence
  Description of Artificial Sequence: Synthetic oligonucleotide
  Antisense strand to SEQ ID NO: 574565
uugcuccaguguauacacu

SEQ ID NO: 574567 - RNA, 19 nt, Artificial Sequence
  Description of Artificial Sequence: Synthetic oligonucleotide
  Sense strand starting at position 3788 of SEQ ID NO: 318596
ugagccuuugccgaagaaa

SEQ ID NO: 574568 - RNA, 19 nt, Artificial Sequence
  Description of Artificial Sequence: Synthetic oligonucleotide
  Antisense strand to SEQ ID NO: 574567
uuucuucggcaaaggcuca

SEQ ID NO: 574569 - RNA, 19 nt, Artificial Sequence
  Description of Artificial Sequence: Synthetic oligonucleotide
  Sense strand starting at position 3845 of SEQ ID NO: 318596
cugaacuccgcuuagaaua

SEQ ID NO: 574570 - RNA, 19 nt, Artificial Sequence
  Description of Artificial Sequence: Synthetic oligonucleotide
  Antisense strand to SEQ ID NO: 574569
uauucuaagcggaguucag

SEQ ID NO: 574571 - RNA, 19 nt, Artificial Sequence
  Description of Artificial Sequence: Synthetic oligonucleotide
  Sense strand starting at position 3955 of SEQ ID NO: 318596
guguuacaugaagguagau

SEQ ID NO: 574572 - RNA, 19 nt, Artificial Sequence
  Description of Artificial Sequence: Synthetic oligonucleotide
  Antisense strand to SEQ ID NO: 574571
aucuaccuucauguaacac

SEQ ID NO: 574573 - RNA, 19 nt, Artificial Sequence
  Description of Artificial Sequence: Synthetic oligonucleotide
  Sense strand starting at position 52 of SEQ ID NO: 318597
gcaaucuuccuggaugcuu

SEQ ID NO: 574574 - RNA, 19 nt, Artificial Sequence
  Description of Artificial Sequence: Synthetic oligonucleotide
  Antisense strand to SEQ ID NO: 574573
aagcauccaggaagauugc

SEQ ID NO: 574575 - RNA, 19 nt, Artificial Sequence
  Description of Artificial Sequence: Synthetic oligonucleotide
  Sense strand starting at position 109 of SEQ ID NO: 318597
uguacucaucaugggagaa

SEQ ID NO: 574576 - RNA, 19 nt, Artificial Sequence
  Description of Artificial Sequence: Synthetic oligonucleotide
  Antisense strand to SEQ ID NO: 574575
uucucccaugaugaguaca

SEQ ID NO: 574577 - RNA, 19 nt, Artificial Sequence
  Description of Artificial Sequence: Synthetic oligonucleotide
  Sense strand starting at position 110 of SEQ ID NO: 318597
guacucaucaugggagaau

SEQ ID NO: 574578 - RNA, 19 nt, Artificial Sequence
  Description of Artificial Sequence: Synthetic oligonucleotide
  Antisense strand to SEQ ID NO: 574577
auucucccaugaugaguac

SEQ ID NO: 574579 - RNA, 19 nt, Artificial Sequence
  Description of Artificial Sequence: Synthetic oligonucleotide
  Sense strand starting at position 148 of SEQ ID NO: 318597
ugucuuaaaucugucauau

SEQ ID NO: 574580 - RNA, 19 nt, Artificial Sequence
  Description of Artificial Sequence: Synthetic oligonucleotide
  Antisense strand to SEQ ID NO: 574579
auaugacagauuuaagaca

SEQ ID NO: 574581 - RNA, 19 nt, Artificial Sequence
  Description of Artificial Sequence: Synthetic oligonucleotide
  Sense strand starting at position 385 of SEQ ID NO: 318597
ggcucauuaagagacguua

SEQ ID NO: 574582 - RNA, 19 nt, Artificial Sequence
  Description of Artificial Sequence: Synthetic oligonucleotide
  Antisense strand to SEQ ID NO: 574581
uaacgucucuuaaugagcc

SEQ ID NO: 574583 - RNA, 19 nt, Artificial Sequence
  Description of Artificial Sequence: Synthetic oligonucleotide
  Sense strand starting at position 683 of SEQ ID NO: 318597
ugccauagacaauagcaua

SEQ ID NO: 574584 - RNA, 19 nt, Artificial Sequence
  Description of Artificial Sequence: Synthetic oligonucleotide
  Antisense strand to SEQ ID NO: 574583
uaugcuauugucuauggca

SEQ ID NO: 574585 - RNA, 19 nt, Artificial Sequence
  Description of Artificial Sequence: Synthetic oligonucleotide
  Sense strand starting at position 703 of SEQ ID NO: 318597
gugguaucacuagagcagu

SEQ ID NO: 574586 - RNA, 19 nt, Artificial Sequence
  Description of Artificial Sequence: Synthetic oligonucleotide
  Antisense strand to SEQ ID NO: 574585
acugcucuagugauaccac

SEQ ID NO: 574587 - RNA, 19 nt, Artificial Sequence
  Description of Artificial Sequence: Synthetic oligonucleotide
  Sense strand starting at position 768 of SEQ ID NO: 318597
ucaugcugccuagauauca

SEQ ID NO: 574588 - RNA, 19 nt, Artificial Sequence
  Description of Artificial Sequence: Synthetic oligonucleotide
  Antisense strand to SEQ ID NO: 574587
ugauaucuaggcagcauga

SEQ ID NO: 574589 - RNA, 19 nt, Artificial Sequence
  Description of Artificial Sequence: Synthetic oligonucleotide
  Sense strand starting at position 777 of SEQ ID NO: 318597
cuagauaucagauggguac

SEQ ID NO: 574590 - RNA, 19 nt, Artificial Sequence
  Description of Artificial Sequence: Synthetic oligonucleotide
  Antisense strand to SEQ ID NO: 574589
guacccaucugauaucuag

SEQ ID NO: 574591 - RNA, 19 nt, Artificial Sequence
  Description of Artificial Sequence: Synthetic oligonucleotide
  Sense strand starting at position 778 of SEQ ID NO: 318597
uagauaucagauggguacu

SEQ ID NO: 574592 - RNA, 19 nt, Artificial Sequence
  Description of Artificial Sequence: Synthetic oligonucleotide
  Antisense strand to SEQ ID NO: 574591
aguacccaucugauaucua

SEQ ID NO: 574593 - RNA, 19 nt, Artificial Sequence
  Description of Artificial Sequence: Synthetic oligonucleotide
  Sense strand starting at position 862 of SEQ ID NO: 318597
ucgagcaacuaaucagacu

SEQ ID NO: 574594 - RNA, 19 nt, Artificial Sequence
  Description of Artificial Sequence: Synthetic oligonucleotide
  Antisense strand to SEQ ID NO: 574593
agucugauuaguugcucga

SEQ ID NO: 574595 - RNA, 19 nt, Artificial Sequence
  Description of Artificial Sequence: Synthetic oligonucleotide
  Sense strand starting at position 936 of SEQ ID NO: 318597
ggcacaggucaaugggaaa

SEQ ID NO: 574596 - RNA, 19 nt, Artificial Sequence
  Description of Artificial Sequence: Synthetic oligonucleotide
  Antisense strand to SEQ ID NO: 574595
uuucccauugaccugugcc

SEQ ID NO: 574597 - RNA, 19 nt, Artificial Sequence
  Description of Artificial Sequence: Synthetic oligonucleotide
  Sense strand starting at position 1185 of SEQ ID NO: 318597
gucgucaucauugcuggua

SEQ ID NO: 574598 - RNA, 19 nt, Artificial Sequence
  Description of Artificial Sequence: Synthetic oligonucleotide
  Antisense strand to SEQ ID NO: 574597
uaccagcaaugaugacgac

SEQ ID NO: 574599 - RNA, 19 nt, Artificial Sequence
  Description of Artificial Sequence: Synthetic oligonucleotide
  Sense strand starting at position 1199 of SEQ ID NO: 318597
ugguacaccuaugcuauua

SEQ ID NO: 574600 - RNA, 19 nt, Artificial Sequence
  Description of Artificial Sequence: Synthetic oligonucleotide
  Antisense strand to SEQ ID NO: 574599
uaauagcauagguguacca

SEQ ID NO: 574601 - RNA, 19 nt, Artificial Sequence
  Description of Artificial Sequence: Synthetic oligonucleotide
  Sense strand starting at position 1210 of SEQ ID NO: 318597
ugcuauuauuugcuuaaug

SEQ ID NO: 574602 - RNA, 19 nt, Artificial Sequence
  Description of Artificial Sequence: Synthetic oligonucleotide
  Antisense strand to SEQ ID NO: 574601
cauuaagcaaauaauagca

SEQ ID NO: 574603 - RNA, 19 nt, Artificial Sequence
  Description of Artificial Sequence: Synthetic oligonucleotide
  Sense strand starting at position 1211 of SEQ ID NO: 318597
gcuauuauuugcuuaaugu

SEQ ID NO: 574604 - RNA, 19 nt, Artificial Sequence
  Description of Artificial Sequence: Synthetic oligonucleotide
  Antisense strand to SEQ ID NO: 574603
acauuaagcaaauaauagc

SEQ ID NO: 574605 - RNA, 19 nt, Artificial Sequence
  Description of Artificial Sequence: Synthetic oligonucleotide
  Sense strand starting at position 1390 of SEQ ID NO: 318597
auauaaaguguccgaggua

SEQ ID NO: 574606 - RNA, 19 nt, Artificial Sequence
  Description of Artificial Sequence: Synthetic oligonucleotide
  Antisense strand to SEQ ID NO: 574605
uaccucggacacuuuauau

SEQ ID NO: 574607 - RNA, 19 nt, Artificial Sequence
  Description of Artificial Sequence: Synthetic oligonucleotide
  Sense strand starting at position 1395 of SEQ ID NO: 318597
aaguguccgagguauuaaa

SEQ ID NO: 574608 - RNA, 19 nt, Artificial Sequence
  Description of Artificial Sequence: Synthetic oligonucleotide
  Antisense strand to SEQ ID NO: 574607
uuuaauaccucggacacuu

SEQ ID NO: 574609 - RNA, 19 nt, Artificial Sequence
  Description of Artificial Sequence: Synthetic oligonucleotide
  Sense strand starting at position 1472 of SEQ ID NO: 318597
uuucucacacugugauuau

SEQ ID NO: 574610 - RNA, 19 nt, Artificial Sequence
  Description of Artificial Sequence: Synthetic oligonucleotide
  Antisense strand to SEQ ID NO: 574609
auaaucacagugugagaaa

SEQ ID NO: 574611 - RNA, 19 nt, Artificial Sequence
  Description of Artificial Sequence: Synthetic oligonucleotide
  Sense strand starting at position 1475 of SEQ ID NO: 318597
cucacacugugauuauauu

SEQ ID NO: 574612 - RNA, 19 nt, Artificial Sequence
  Description of Artificial Sequence: Synthetic oligonucleotide
  Antisense strand to SEQ ID NO: 574611
aauauaaucacagugugag

SEQ ID NO: 574613 - RNA, 19 nt, Artificial Sequence
  Description of Artificial Sequence: Synthetic oligonucleotide
  Sense strand starting at position 1991 of SEQ ID NO: 318597
caggaucucuagucucuga

SEQ ID NO: 574614 - RNA, 19 nt, Artificial Sequence
  Description of Artificial Sequence: Synthetic oligonucleotide
  Antisense strand to SEQ ID NO: 574613
ucagagacuagagauccug

SEQ ID NO: 574615 - RNA, 19 nt, Artificial Sequence
  Description of Artificial Sequence: Synthetic oligonucleotide
  Sense strand starting at position 2024 of SEQ ID NO: 318597
uucccuucucgcgagagaa

SEQ ID NO: 574616 - RNA, 19 nt, Artificial Sequence
  Description of Artificial Sequence: Synthetic oligonucleotide
  Antisense strand to SEQ ID NO: 574615
uucucucgcgagaagggaa

SEQ ID NO: 574617 - RNA, 19 nt, Artificial Sequence
  Description of Artificial Sequence: Synthetic oligonucleotide
  Sense strand starting at position 2032 of SEQ ID NO: 318597
ucgcgagagaaucaugaaa

SEQ ID NO: 574618 - RNA, 19 nt, Artificial Sequence
  Description of Artificial Sequence: Synthetic oligonucleotide
  Antisense strand to SEQ ID NO: 574617
uuucaugauucucucgcga

SEQ ID NO: 574619 - RNA, 19 nt, Artificial Sequence
  Description of Artificial Sequence: Synthetic oligonucleotide
  Sense strand starting at position 2208 of SEQ ID NO: 318597
gaaucugugugguucagga

SEQ ID NO: 574620 - RNA, 19 nt, Artificial Sequence
  Description of Artificial Sequence: Synthetic oligonucleotide
  Antisense strand to SEQ ID NO: 574619
uccugaaccacacagauuc

SEQ ID NO: 574621 - RNA, 19 nt, Artificial Sequence
  Description of Artificial Sequence: Synthetic oligonucleotide
  Sense strand starting at position 2215 of SEQ ID NO: 318597
ugugguucaggaugcaaau

SEQ ID NO: 574622 - RNA, 19 nt, Artificial Sequence
  Description of Artificial Sequence: Synthetic oligonucleotide
  Antisense strand to SEQ ID NO: 574621
auuugcauccugaaccaca

SEQ ID NO: 574623 - RNA, 19 nt, Artificial Sequence
  Description of Artificial Sequence: Synthetic oligonucleotide
  Sense strand starting at position 2250 of SEQ ID NO: 318597
aggaaauacuccuuacguu

SEQ ID NO: 574624 - RNA, 19 nt, Artificial Sequence
  Description of Artificial Sequence: Synthetic oligonucleotide
  Antisense strand to SEQ ID NO: 574623
aacguaaggaguauuuccu

SEQ ID NO: 574625 - RNA, 19 nt, Artificial Sequence
  Description of Artificial Sequence: Synthetic oligonucleotide
  Sense strand starting at position 2251 of SEQ ID NO: 318597
ggaaauacuccuuacguuu

SEQ ID NO: 574626 - RNA, 19 nt, Artificial Sequence
  Description of Artificial Sequence: Synthetic oligonucleotide
  Antisense strand to SEQ ID NO: 574625
aaacguaaggaguauuucc

SEQ ID NO: 574627 - RNA, 19 nt, Artificial Sequence
  Description of Artificial Sequence: Synthetic oligonucleotide
  Sense strand starting at position 2353 of SEQ ID NO: 318597
agacguuguguuucagugu

SEQ ID NO: 574628 - RNA, 19 nt, Artificial Sequence
  Description of Artificial Sequence: Synthetic oligonucleotide
  Antisense strand to SEQ ID NO: 574627
acacugaaacacaacgucu

SEQ ID NO: 574629 - RNA, 19 nt, Artificial Sequence
  Description of Artificial Sequence: Synthetic oligonucleotide
  Sense strand starting at position 2368 of SEQ ID NO: 318597
gugugcucugcguuagaaa

SEQ ID NO: 574630 - RNA, 19 nt, Artificial Sequence
  Description of Artificial Sequence: Synthetic oligonucleotide
  Antisense strand to SEQ ID NO: 574629
uuucuaacgcagagcacac

SEQ ID NO: 574631 - RNA, 19 nt, Artificial Sequence
  Description of Artificial Sequence: Synthetic oligonucleotide
  Sense strand starting at position 2377 of SEQ ID NO: 318597
gcguuagaaacuuagcuau

SEQ ID NO: 574632 - RNA, 19 nt, Artificial Sequence
  Description of Artificial Sequence: Synthetic oligonucleotide
  Antisense strand to SEQ ID NO: 574631
auagcuaaguuucuaacgc

SEQ ID NO: 574633 - RNA, 19 nt, Artificial Sequence
  Description of Artificial Sequence: Synthetic oligonucleotide
  Sense strand starting at position 2379 of SEQ ID NO: 318597
guuagaaacuuagcuauuc

SEQ ID NO: 574634 - RNA, 19 nt, Artificial Sequence
  Description of Artificial Sequence: Synthetic oligonucleotide
  Antisense strand to SEQ ID NO: 574633
gaauagcuaaguuucuaac

SEQ ID NO: 574635 - RNA, 19 nt, Artificial Sequence
  Description of Artificial Sequence: Synthetic oligonucleotide
  Sense strand starting at position 2820 of SEQ ID NO: 318597
ggcaaauccgccugaaaga

SEQ ID NO: 574636 - RNA, 19 nt, Artificial Sequence
  Description of Artificial Sequence: Synthetic oligonucleotide
  Antisense strand to SEQ ID NO: 574635
ucuuucaggcggauuugcc

SEQ ID NO: 574637 - RNA, 19 nt, Artificial Sequence
  Description of Artificial Sequence: Synthetic oligonucleotide
  Sense strand starting at position 2821 of SEQ ID NO: 318597
gcaaauccgccugaaagaa

SEQ ID NO: 574638 - RNA, 19 nt, Artificial Sequence
  Description of Artificial Sequence: Synthetic oligonucleotide
  Antisense strand to SEQ ID NO: 574637
uucuuucaggcggauuugc

SEQ ID NO: 574639 - RNA, 19 nt, Artificial Sequence
  Description of Artificial Sequence: Synthetic oligonucleotide
  Sense strand starting at position 2874 of SEQ ID NO: 318597
uugugucacauuugguaau

SEQ ID NO: 574640 - RNA, 19 nt, Artificial Sequence
  Description of Artificial Sequence: Synthetic oligonucleotide
  Antisense strand to SEQ ID NO: 574639
auuaccaaaugugacacaa

SEQ ID NO: 574641 - RNA, 19 nt, Artificial Sequence
  Description of Artificial Sequence: Synthetic oligonucleotide
  Sense strand starting at position 3463 of SEQ ID NO: 318597
ggaagagucacacgucuca

SEQ ID NO: 574642 - RNA, 19 nt, Artificial Sequence
  Description of Artificial Sequence: Synthetic oligonucleotide
  Antisense strand to SEQ ID NO: 574641
ugagacgugugacucuucc

SEQ ID NO: 574643 - RNA, 19 nt, Artificial Sequence
  Description of Artificial Sequence: Synthetic oligonucleotide
  Sense strand starting at position 3824 of SEQ ID NO: 318597
ggugguucaggagguuuaa

SEQ ID NO: 574644 - RNA, 19 nt, Artificial Sequence
  Description of Artificial Sequence: Synthetic oligonucleotide
  Antisense strand to SEQ ID NO: 574643
uuaaaccuccugaaccacc

SEQ ID NO: 574645 - RNA, 19 nt, Artificial Sequence
  Description of Artificial Sequence: Synthetic oligonucleotide
  Sense strand starting at position 3936 of SEQ ID NO: 318597
agcuaauaucauugacgau

SEQ ID NO: 574646 - RNA, 19 nt, Artificial Sequence
  Description of Artificial Sequence: Synthetic oligonucleotide
  Antisense strand to SEQ ID NO: 574645
aucgucaaugauauuagcu

SEQ ID NO: 574647 - RNA, 19 nt, Artificial Sequence
  Description of Artificial Sequence: Synthetic oligonucleotide
  Sense strand starting at position 3937 of SEQ ID NO: 318597
gcuaauaucauugacgaug

SEQ ID NO: 574648 - RNA, 19 nt, Artificial Sequence
  Description of Artificial Sequence: Synthetic oligonucleotide
  Antisense strand to SEQ ID NO: 574647
caucgucaaugauauuagc

SEQ ID NO: 574649 - RNA, 19 nt, Artificial Sequence
  Description of Artificial Sequence: Synthetic oligonucleotide
  Sense strand starting at position 3955 of SEQ ID NO: 318597
gaucaaugauuagcuagua

SEQ ID NO: 574650 - RNA, 19 nt, Artificial Sequence
  Description of Artificial Sequence: Synthetic oligonucleotide
  Antisense strand to SEQ ID NO: 574649
uacuagcuaaucauugauc

SEQ ID NO: 574651 - RNA, 19 nt, Artificial Sequence
  Description of Artificial Sequence: Synthetic oligonucleotide
  Sense strand starting at position 3956 of SEQ ID NO: 318597
aucaaugauuagcuaguau

SEQ ID NO: 574652 - RNA, 19 nt, Artificial Sequence
  Description of Artificial Sequence: Synthetic oligonucleotide
  Antisense strand to SEQ ID NO: 574651
auacuagcuaaucauugau

SEQ ID NO: 574653 - RNA, 19 nt, Artificial Sequence
  Description of Artificial Sequence: Synthetic oligonucleotide
  Sense strand starting at position 95 of SEQ ID NO: 318598
cucuaaauccuaugggaau

SEQ ID NO: 574654 - RNA, 19 nt, Artificial Sequence
  Description of Artificial Sequence: Synthetic oligonucleotide
  Antisense strand to SEQ ID NO: 574653
auucccauaggauuuagag

SEQ ID NO: 574655 - RNA, 19 nt, Artificial Sequence
  Description of Artificial Sequence: Synthetic oligonucleotide
  Sense strand starting at position 248 of SEQ ID NO: 318598
agcuauuucugugcgcaag

SEQ ID NO: 574656 - RNA, 19 nt, Artificial Sequence
  Description of Artificial Sequence: Synthetic oligonucleotide
  Antisense strand to SEQ ID NO: 574655
cuugcgcacagaaauagcu

SEQ ID NO: 574657 - RNA, 19 nt, Artificial Sequence
  Description of Artificial Sequence: Synthetic oligonucleotide
  Sense strand starting at position 251 of SEQ ID NO: 318598
uauuucugugcgcaaggua

SEQ ID NO: 574658 - RNA, 19 nt, Artificial Sequence
  Description of Artificial Sequence: Synthetic oligonucleotide
  Antisense strand to SEQ ID NO: 574657
uaccuugcgcacagaaaua

SEQ ID NO: 574659 - RNA, 19 nt, Artificial Sequence
  Description of Artificial Sequence: Synthetic oligonucleotide
  Sense strand starting at position 366 of SEQ ID NO: 318598
cucagaguuuaagugguua

SEQ ID NO: 574660 - RNA, 19 nt, Artificial Sequence
  Description of Artificial Sequence: Synthetic oligonucleotide
  Antisense strand to SEQ ID NO: 574659
uaaccacuuaaacucugag

SEQ ID NO: 574661 - RNA, 19 nt, Artificial Sequence
  Description of Artificial Sequence: Synthetic oligonucleotide
  Sense strand starting at position 387 of SEQ ID NO: 318598
gggaaucacugaucuguug

SEQ ID NO: 574662 - RNA, 19 nt, Artificial Sequence
  Description of Artificial Sequence: Synthetic oligonucleotide
  Antisense strand to SEQ ID NO: 574661
caacagaucagugauuccc

SEQ ID NO: 574663 - RNA, 19 nt, Artificial Sequence
  Description of Artificial Sequence: Synthetic oligonucleotide
  Sense strand starting at position 396 of SEQ ID NO: 318598
ugaucuguugcacaguuua

SEQ ID NO: 574664 - RNA, 19 nt, Artificial Sequence
  Description of Artificial Sequence: Synthetic oligonucleotide
  Antisense strand to SEQ ID NO: 574663
uaaacugugcaacagauca

SEQ ID NO: 574665 - RNA, 19 nt, Artificial Sequence
  Description of Artificial Sequence: Synthetic oligonucleotide
  Sense strand starting at position 430 of SEQ ID NO: 318598
gguucuuccucagugauca

SEQ ID NO: 574666 - RNA, 19 nt, Artificial Sequence
  Description of Artificial Sequence: Synthetic oligonucleotide
  Antisense strand to SEQ ID NO: 574665
ugaucacugaggaagaacc

SEQ ID NO: 574667 - RNA, 19 nt, Artificial Sequence
  Description of Artificial Sequence: Synthetic oligonucleotide
  Sense strand starting at position 431 of SEQ ID NO: 318598
guucuuccucagugaucac

SEQ ID NO: 574668 - RNA, 19 nt, Artificial Sequence
  Description of Artificial Sequence: Synthetic oligonucleotide
  Antisense strand to SEQ ID NO: 574667
gugaucacugaggaagaac

SEQ ID NO: 574669 - RNA, 19 nt, Artificial Sequence
  Description of Artificial Sequence: Synthetic oligonucleotide
  Sense strand starting at position 434 of SEQ ID NO: 318598
cuuccucagugaucacagu

SEQ ID NO: 574670 - RNA, 19 nt, Artificial Sequence
  Description of Artificial Sequence: Synthetic oligonucleotide
  Antisense strand to SEQ ID NO: 574669
acugugaucacugaggaag

SEQ ID NO: 574671 - RNA, 19 nt, Artificial Sequence
  Description of Artificial Sequence: Synthetic oligonucleotide
  Sense strand starting at position 481 of SEQ ID NO: 318598
ccaaaucaccguuacaagu

SEQ ID NO: 574672 - RNA, 19 nt, Artificial Sequence
  Description of Artificial Sequence: Synthetic oligonucleotide
  Antisense strand to SEQ ID NO: 574671
acuuguaacggugauuugg

SEQ ID NO: 574673 - RNA, 19 nt, Artificial Sequence
  Description of Artificial Sequence: Synthetic oligonucleotide
  Sense strand starting at position 1396 of SEQ ID NO: 318598
gcucuaaaguuacuuugga

SEQ ID NO: 574674 - RNA, 19 nt, Artificial Sequence
  Description of Artificial Sequence: Synthetic oligonucleotide
  Antisense strand to SEQ ID NO: 574673
uccaaaguaacuuuagagc

SEQ ID NO: 574675 - RNA, 19 nt, Artificial Sequence
  Description of Artificial Sequence: Synthetic oligonucleotide
  Sense strand starting at position 1397 of SEQ ID NO: 318598
cucuaaaguuacuuuggaa

SEQ ID NO: 574676 - RNA, 19 nt, Artificial Sequence
  Description of Artificial Sequence: Synthetic oligonucleotide
  Antisense strand to SEQ ID NO: 574675
uuccaaaguaacuuuagag

SEQ ID NO: 574677 - RNA, 19 nt, Artificial Sequence
  Description of Artificial Sequence: Synthetic oligonucleotide
  Sense strand starting at position 1425 of SEQ ID NO: 318598
gcggguuauuucccucaau

SEQ ID NO: 574678 - RNA, 19 nt, Artificial Sequence
  Description of Artificial Sequence: Synthetic oligonucleotide
  Antisense strand to SEQ ID NO: 574677
auugagggaaauaacccgc

SEQ ID NO: 574679 - RNA, 19 nt, Artificial Sequence
  Description of Artificial Sequence: Synthetic oligonucleotide
  Sense strand starting at position 1426 of SEQ ID NO: 318598
cggguuauuucccucaauc

SEQ ID NO: 574680 - RNA, 19 nt, Artificial Sequence
  Description of Artificial Sequence: Synthetic oligonucleotide
  Antisense strand to SEQ ID NO: 574679
gauugagggaaauaacccg

SEQ ID NO: 574681 - RNA, 19 nt, Artificial Sequence
  Description of Artificial Sequence: Synthetic oligonucleotide
  Sense strand starting at position 2128 of SEQ ID NO: 318598
auuagaaacugcucuagaa

SEQ ID NO: 574682 - RNA, 19 nt, Artificial Sequence
  Description of Artificial Sequence: Synthetic oligonucleotide
  Antisense strand to SEQ ID NO: 574681
uucuagagcaguuucuaau

SEQ ID NO: 574683 - RNA, 19 nt, Artificial Sequence
  Description of Artificial Sequence: Synthetic oligonucleotide
  Sense strand starting at position 2403 of SEQ ID NO: 318598
gccgguacccacgauugau

SEQ ID NO: 574684 - RNA, 19 nt, Artificial Sequence
  Description of Artificial Sequence: Synthetic oligonucleotide
  Antisense strand to SEQ ID NO: 574683
aucaaucguggguaccggc

SEQ ID NO: 574685 - RNA, 19 nt, Artificial Sequence
  Description of Artificial Sequence: Synthetic oligonucleotide
  Sense strand starting at position 2766 of SEQ ID NO: 318598
ccagaucugccgcagaaga

SEQ ID NO: 574686 - RNA, 19 nt, Artificial Sequence
  Description of Artificial Sequence: Synthetic oligonucleotide
  Antisense strand to SEQ ID NO: 574685
ucuucugcggcagaucugg

SEQ ID NO: 574687 - RNA, 19 nt, Artificial Sequence
  Description of Artificial Sequence: Synthetic oligonucleotide
  Sense strand starting at position 2811 of SEQ ID NO: 318598
gguuuaacaguuuggguca

SEQ ID NO: 574688 - RNA, 19 nt, Artificial Sequence
  Description of Artificial Sequence: Synthetic oligonucleotide
  Antisense strand to SEQ ID NO: 574687
ugacccaaacuguuaaacc

SEQ ID NO: 574689 - RNA, 19 nt, Artificial Sequence
  Description of Artificial Sequence: Synthetic oligonucleotide
  Sense strand starting at position 2816 of SEQ ID NO: 318598
aacaguuugggucagugau

SEQ ID NO: 574690 - RNA, 19 nt, Artificial Sequence
  Description of Artificial Sequence: Synthetic oligonucleotide
  Antisense strand to SEQ ID NO: 574689
aucacugacccaaacuguu

SEQ ID NO: 574691 - RNA, 19 nt, Artificial Sequence
  Description of Artificial Sequence: Synthetic oligonucleotide
  Sense strand starting at position 2966 of SEQ ID NO: 318598
ccgagaauguuucuguauc

SEQ ID NO: 574692 - RNA, 19 nt, Artificial Sequence
  Description of Artificial Sequence: Synthetic oligonucleotide
  Antisense strand to SEQ ID NO: 574691
gauacagaaacauucucgg

SEQ ID NO: 574693 - RNA, 19 nt, Artificial Sequence
  Description of Artificial Sequence: Synthetic oligonucleotide
  Sense strand starting at position 2968 of SEQ ID NO: 318598
gagaauguuucuguaucca

SEQ ID NO: 574694 - RNA, 19 nt, Artificial Sequence
  Description of Artificial Sequence: Synthetic oligonucleotide
  Antisense strand to SEQ ID NO: 574693
uggauacagaaacauucuc

SEQ ID NO: 574695 - RNA, 19 nt, Artificial Sequence
  Description of Artificial Sequence: Synthetic oligonucleotide
  Sense strand starting at position 2972 of SEQ ID NO: 318598
auguuucuguauccaaauc

SEQ ID NO: 574696 - RNA, 19 nt, Artificial Sequence
  Description of Artificial Sequence: Synthetic oligonucleotide
  Antisense strand to SEQ ID NO: 574695
gauuuggauacagaaacau

SEQ ID NO: 574697 - RNA, 19 nt, Artificial Sequence
  Description of Artificial Sequence: Synthetic oligonucleotide
  Sense strand starting at position 3039 of SEQ ID NO: 318598
ucugguucccaguagaacu

SEQ ID NO: 574698 - RNA, 19 nt, Artificial Sequence
  Description of Artificial Sequence: Synthetic oligonucleotide
  Antisense strand to SEQ ID NO: 574697
aguucuacugggaaccaga

SEQ ID NO: 574699 - RNA, 19 nt, Artificial Sequence
  Description of Artificial Sequence: Synthetic oligonucleotide
  Sense strand starting at position 3047 of SEQ ID NO: 318598
ccaguagaacucugcauca

SEQ ID NO: 574700 - RNA, 19 nt, Artificial Sequence
  Description of Artificial Sequence: Synthetic oligonucleotide
  Antisense strand to SEQ ID NO: 574699
ugaugcagaguucuacugg

SEQ ID NO: 574701 - RNA, 19 nt, Artificial Sequence
  Description of Artificial Sequence: Synthetic oligonucleotide
  Sense strand starting at position 3049 of SEQ ID NO: 318598
aguagaacucugcaucauu

SEQ ID NO: 574702 - RNA, 19 nt, Artificial Sequence
  Description of Artificial Sequence: Synthetic oligonucleotide
  Antisense strand to SEQ ID NO: 574701
aaugaugcagaguucuacu

SEQ ID NO: 574703 - RNA, 19 nt, Artificial Sequence
  Description of Artificial Sequence: Synthetic oligonucleotide
  Sense strand starting at position 3073 of SEQ ID NO: 318598
uauugaaguccuugacugu

SEQ ID NO: 574704 - RNA, 19 nt, Artificial Sequence
  Description of Artificial Sequence: Synthetic oligonucleotide
  Antisense strand to SEQ ID NO: 574703
acagucaaggacuucaaua

SEQ ID NO: 574705 - RNA, 19 nt, Artificial Sequence
  Description of Artificial Sequence: Synthetic oligonucleotide
  Sense strand starting at position 3074 of SEQ ID NO: 318598
auugaaguccuugacugua

SEQ ID NO: 574706 - RNA, 19 nt, Artificial Sequence
  Description of Artificial Sequence: Synthetic oligonucleotide
  Antisense strand to SEQ ID NO: 574705
uacagucaaggacuucaau

SEQ ID NO: 574707 - RNA, 19 nt, Artificial Sequence
  Description of Artificial Sequence: Synthetic oligonucleotide
  Sense strand starting at position 3076 of SEQ ID NO: 318598
ugaaguccuugacuguaaa

SEQ ID NO: 574708 - RNA, 19 nt, Artificial Sequence
  Description of Artificial Sequence: Synthetic oligonucleotide
  Antisense strand to SEQ ID NO: 574707
uuuacagucaaggacuuca

SEQ ID NO: 574709 - RNA, 19 nt, Artificial Sequence
  Description of Artificial Sequence: Synthetic oligonucleotide
  Sense strand starting at position 3093 of SEQ ID NO: 318598
aaaucagacgggugcaaau

SEQ ID NO: 574710 - RNA, 19 nt, Artificial Sequence
  Description of Artificial Sequence: Synthetic oligonucleotide
  Antisense strand to SEQ ID NO: 574709
auuugcacccgucugauuu

SEQ ID NO: 574711 - RNA, 19 nt, Artificial Sequence
  Description of Artificial Sequence: Synthetic oligonucleotide
  Sense strand starting at position 3336 of SEQ ID NO: 318598
aagaaaugggugugagcau

SEQ ID NO: 574712 - RNA, 19 nt, Artificial Sequence
  Description of Artificial Sequence: Synthetic oligonucleotide
  Antisense strand to SEQ ID NO: 574711
augcucacacccauuucuu

SEQ ID NO: 574713 - RNA, 19 nt, Artificial Sequence
  Description of Artificial Sequence: Synthetic oligonucleotide
  Sense strand starting at position 3343 of SEQ ID NO: 318598
gggugugagcauugacaga

SEQ ID NO: 574714 - RNA, 19 nt, Artificial Sequence
  Description of Artificial Sequence: Synthetic oligonucleotide
  Antisense strand to SEQ ID NO: 574713
ucugucaaugcucacaccc

SEQ ID NO: 574715 - RNA, 19 nt, Artificial Sequence
  Description of Artificial Sequence: Synthetic oligonucleotide
  Sense strand starting at position 3574 of SEQ ID NO: 318598
gaagccauagagugugaua

SEQ ID NO: 574716 - RNA, 19 nt, Artificial Sequence
  Description of Artificial Sequence: Synthetic oligonucleotide
  Antisense strand to SEQ ID NO: 574715
uaucacacucuauggcuuc

SEQ ID NO: 574717 - RNA, 19 nt, Artificial Sequence
  Description of Artificial Sequence: Synthetic oligonucleotide
  Sense strand starting at position 3787 of SEQ ID NO: 318598
uucugucaguuucuaauga

SEQ ID NO: 574718 - RNA, 19 nt, Artificial Sequence
  Description of Artificial Sequence: Synthetic oligonucleotide
  Antisense strand to SEQ ID NO: 574717
ucauuagaaacugacagaa

SEQ ID NO: 574719 - RNA, 19 nt, Artificial Sequence
  Description of Artificial Sequence: Synthetic oligonucleotide
  Sense strand starting at position 3808 of SEQ ID NO: 318598
uacaguuauugggugguua

SEQ ID NO: 574720 - RNA, 19 nt, Artificial Sequence
  Description of Artificial Sequence: Synthetic oligonucleotide
  Antisense strand to SEQ ID NO: 574719
uaaccacccaauaacugua

SEQ ID NO: 574721 - RNA, 19 nt, Artificial Sequence
  Description of Artificial Sequence: Synthetic oligonucleotide
  Sense strand starting at position 3812 of SEQ ID NO: 318598
guuauugggugguuaggau

SEQ ID NO: 574722 - RNA, 19 nt, Artificial Sequence
  Description of Artificial Sequence: Synthetic oligonucleotide
  Antisense strand to SEQ ID NO: 574721
auccuaaccacccaauaac

SEQ ID NO: 574723 - RNA, 19 nt, Artificial Sequence
  Description of Artificial Sequence: Synthetic oligonucleotide
  Sense strand starting at position 3820 of SEQ ID NO: 318598
gugguuaggauauggcauu

SEQ ID NO: 574724 - RNA, 19 nt, Artificial Sequence
  Description of Artificial Sequence: Synthetic oligonucleotide
  Antisense strand to SEQ ID NO: 574723
aaugccauauccuaaccac

SEQ ID NO: 574725 - RNA, 19 nt, Artificial Sequence
  Description of Artificial Sequence: Synthetic oligonucleotide
  Sense strand starting at position 3857 of SEQ ID NO: 318598
ucuaaugaccugcaaugau

SEQ ID NO: 574726 - RNA, 19 nt, Artificial Sequence
  Description of Artificial Sequence: Synthetic oligonucleotide
  Antisense strand to SEQ ID NO: 574725
aucauugcaggucauuaga

SEQ ID NO: 574727 - RNA, 19 nt, Artificial Sequence
  Description of Artificial Sequence: Synthetic oligonucleotide
  Sense strand starting at position 3865 of SEQ ID NO: 318598
ccugcaaugauugggugau

SEQ ID NO: 574728 - RNA, 19 nt, Artificial Sequence
  Description of Artificial Sequence: Synthetic oligonucleotide
  Antisense strand to SEQ ID NO: 574727
aucacccaaucauugcagg

SEQ ID NO: 574729 - RNA, 19 nt, Artificial Sequence
  Description of Artificial Sequence: Synthetic oligonucleotide
  Sense strand starting at position 3936 of SEQ ID NO: 318598
cucaaauguguauaagguu

SEQ ID NO: 574730 - RNA, 19 nt, Artificial Sequence
  Description of Artificial Sequence: Synthetic oligonucleotide
  Antisense strand to SEQ ID NO: 574729
aaccuuauacacauuugag

SEQ ID NO: 574731 - RNA, 19 nt, Artificial Sequence
  Description of Artificial Sequence: Synthetic oligonucleotide
  Sense strand starting at position 3978 of SEQ ID NO: 318598
caagguuagcauuauguaa

SEQ ID NO: 574732 - RNA, 19 nt, Artificial Sequence
  Description of Artificial Sequence: Synthetic oligonucleotide
  Antisense strand to SEQ ID NO: 574731
uuacauaaugcuaaccuug

SEQ ID NO: 574733 - RNA, 19 nt, Artificial Sequence
  Description of Artificial Sequence: Synthetic oligonucleotide
  Sense strand starting at position 322 of SEQ ID NO: 318599
uauagauucguugaugcau

SEQ ID NO: 574734 - RNA, 19 nt, Artificial Sequence
  Description of Artificial Sequence: Synthetic oligonucleotide
  Antisense strand to SEQ ID NO: 574733
augcaucaacgaaucuaua

SEQ ID NO: 574735 - RNA, 19 nt, Artificial Sequence
  Description of Artificial Sequence: Synthetic oligonucleotide
  Sense strand starting at position 434 of SEQ ID NO: 318599
caaguccuucuguaaggau

SEQ ID NO: 574736 - RNA, 19 nt, Artificial Sequence
  Description of Artificial Sequence: Synthetic oligonucleotide
  Antisense strand to SEQ ID NO: 574735
auccuuacagaaggacuug

SEQ ID NO: 574737 - RNA, 19 nt, Artificial Sequence
  Description of Artificial Sequence: Synthetic oligonucleotide
  Sense strand starting at position 458 of SEQ ID NO: 318599
ugcaucuugcucgcuuaaa

SEQ ID NO: 574738 - RNA, 19 nt, Artificial Sequence
  Description of Artificial Sequence: Synthetic oligonucleotide
  Antisense strand to SEQ ID NO: 574737
uuuaagcgagcaagaugca

SEQ ID NO: 574739 - RNA, 19 nt, Artificial Sequence
  Description of Artificial Sequence: Synthetic oligonucleotide
  Sense strand starting at position 482 of SEQ ID NO: 318599
gcuuauuaccuagggagca

SEQ ID NO: 574740 - RNA, 19 nt, Artificial Sequence
  Description of Artificial Sequence: Synthetic oligonucleotide
  Antisense strand to SEQ ID NO: 574739
ugcucccuagguaauaagc

SEQ ID NO: 574741 - RNA, 19 nt, Artificial Sequence
  Description of Artificial Sequence: Synthetic oligonucleotide
  Sense strand starting at position 544 of SEQ ID NO: 318599
guguguuagcagucccauc

SEQ ID NO: 574742 - RNA, 19 nt, Artificial Sequence
  Description of Artificial Sequence: Synthetic oligonucleotide
  Antisense strand to SEQ ID NO: 574741
gaugggacugcuaacacac

SEQ ID NO: 574743 - RNA, 19 nt, Artificial Sequence
  Description of Artificial Sequence: Synthetic oligonucleotide
  Sense strand starting at position 651 of SEQ ID NO: 318599
gcaucucugcuggugugua

SEQ ID NO: 574744 - RNA, 19 nt, Artificial Sequence
  Description of Artificial Sequence: Synthetic oligonucleotide
  Antisense strand to SEQ ID NO: 574743
uacacaccagcagagaugc

SEQ ID NO: 574745 - RNA, 19 nt, Artificial Sequence
  Description of Artificial Sequence: Synthetic oligonucleotide
  Sense strand starting at position 839 of SEQ ID NO: 318599
gguggaaggaagugugaua

SEQ ID NO: 574746 - RNA, 19 nt, Artificial Sequence
  Description of Artificial Sequence: Synthetic oligonucleotide
  Antisense strand to SEQ ID NO: 574745
uaucacacuuccuuccacc

SEQ ID NO: 574747 - RNA, 19 nt, Artificial Sequence
  Description of Artificial Sequence: Synthetic oligonucleotide
  Sense strand starting at position 844 of SEQ ID NO: 318599
aaggaagugugauauuuag

SEQ ID NO: 574748 - RNA, 19 nt, Artificial Sequence
  Description of Artificial Sequence: Synthetic oligonucleotide
  Antisense strand to SEQ ID NO: 574747
cuaaauaucacacuuccuu

SEQ ID NO: 574749 - RNA, 19 nt, Artificial Sequence
  Description of Artificial Sequence: Synthetic oligonucleotide
  Sense strand starting at position 850 of SEQ ID NO: 318599
gugugauauuuagagaacu

SEQ ID NO: 574750 - RNA, 19 nt, Artificial Sequence
  Description of Artificial Sequence: Synthetic oligonucleotide
  Antisense strand to SEQ ID NO: 574749
aguucucuaaauaucacac

SEQ ID NO: 574751 - RNA, 19 nt, Artificial Sequence
  Description of Artificial Sequence: Synthetic oligonucleotide
  Sense strand starting at position 921 of SEQ ID NO: 318599
agaaauauagucuguguga

SEQ ID NO: 574752 - RNA, 19 nt, Artificial Sequence
  Description of Artificial Sequence: Synthetic oligonucleotide
  Antisense strand to SEQ ID NO: 574751
ucacacagacuauauuucu

SEQ ID NO: 574753 - RNA, 19 nt, Artificial Sequence
  Description of Artificial Sequence: Synthetic oligonucleotide
  Sense strand starting at position 922 of SEQ ID NO: 318599
gaaauauagucugugugaa

SEQ ID NO: 574754 - RNA, 19 nt, Artificial Sequence
  Description of Artificial Sequence: Synthetic oligonucleotide
  Antisense strand to SEQ ID NO: 574753
uucacacagacuauauuuc

SEQ ID NO: 574755 - RNA, 19 nt, Artificial Sequence
  Description of Artificial Sequence: Synthetic oligonucleotide
  Sense strand starting at position 923 of SEQ ID NO: 318599
aaauauagucugugugaag

SEQ ID NO: 574756 - RNA, 19 nt, Artificial Sequence
  Description of Artificial Sequence: Synthetic oligonucleotide
  Antisense strand to SEQ ID NO: 574755
cuucacacagacuauauuu

SEQ ID NO: 574757 - RNA, 19 nt, Artificial Sequence
  Description of Artificial Sequence: Synthetic oligonucleotide
  Sense strand starting at position 1015 of SEQ ID NO: 318599
gaaguauccuuagugguac

SEQ ID NO: 574758 - RNA, 19 nt, Artificial Sequence
  Description of Artificial Sequence: Synthetic oligonucleotide
  Antisense strand to SEQ ID NO: 574757
guaccacuaaggauacuuc

SEQ ID NO: 574759 - RNA, 19 nt, Artificial Sequence
  Description of Artificial Sequence: Synthetic oligonucleotide
  Sense strand starting at position 1168 of SEQ ID NO: 318599
ccaguaucuccuuagguga

SEQ ID NO: 574760 - RNA, 19 nt, Artificial Sequence
  Description of Artificial Sequence: Synthetic oligonucleotide
  Antisense strand to SEQ ID NO: 574759
ucaccuaaggagauacugg

SEQ ID NO: 574761 - RNA, 19 nt, Artificial Sequence
  Description of Artificial Sequence: Synthetic oligonucleotide
  Sense strand starting at position 1234 of SEQ ID NO: 318599
uugaguucugcccacagau

SEQ ID NO: 574762 - RNA, 19 nt, Artificial Sequence
  Description of Artificial Sequence: Synthetic oligonucleotide
  Antisense strand to SEQ ID NO: 574761
aucugugggcagaacucaa

SEQ ID NO: 574763 - RNA, 19 nt, Artificial Sequence
  Description of Artificial Sequence: Synthetic oligonucleotide
  Sense strand starting at position 1236 of SEQ ID NO: 318599
gaguucugcccacagauua

SEQ ID NO: 574764 - RNA, 19 nt, Artificial Sequence
  Description of Artificial Sequence: Synthetic oligonucleotide
  Antisense strand to SEQ ID NO: 574763
uaaucugugggcagaacuc

SEQ ID NO: 574765 - RNA, 19 nt, Artificial Sequence
  Description of Artificial Sequence: Synthetic oligonucleotide
  Sense strand starting at position 1550 of SEQ ID NO: 318599
gcauuuacccgaugaguug

SEQ ID NO: 574766 - RNA, 19 nt, Artificial Sequence
  Description of Artificial Sequence: Synthetic oligonucleotide
  Antisense strand to SEQ ID NO: 574765
caacucaucggguaaaugc

SEQ ID NO: 574767 - RNA, 19 nt, Artificial Sequence
  Description of Artificial Sequence: Synthetic oligonucleotide
  Sense strand starting at position 1559 of SEQ ID NO: 318599
cgaugaguugcgucuccug

SEQ ID NO: 574768 - RNA, 19 nt, Artificial Sequence
  Description of Artificial Sequence: Synthetic oligonucleotide
  Antisense strand to SEQ ID NO: 574767
caggagacgcaacucaucg

SEQ ID NO: 574769 - RNA, 19 nt, Artificial Sequence
  Description of Artificial Sequence: Synthetic oligonucleotide
  Sense strand starting at position 1626 of SEQ ID NO: 318599
cagacuuauugugcagauc

SEQ ID NO: 574770 - RNA, 19 nt, Artificial Sequence
  Description of Artificial Sequence: Synthetic oligonucleotide
  Antisense strand to SEQ ID NO: 574769
gaucugcacaauaagucug

SEQ ID NO: 574771 - RNA, 19 nt, Artificial Sequence
  Description of Artificial Sequence: Synthetic oligonucleotide
  Sense strand starting at position 1791 of SEQ ID NO: 318599
ccgggaucccgggaucaga

SEQ ID NO: 574772 - RNA, 19 nt, Artificial Sequence
  Description of Artificial Sequence: Synthetic oligonucleotide
  Antisense strand to SEQ ID NO: 574771
ucugaucccgggaucccgg

SEQ ID NO: 574773 - RNA, 19 nt, Artificial Sequence
  Description of Artificial Sequence: Synthetic oligonucleotide
  Sense strand starting at position 2007 of SEQ ID NO: 318599
ucccucuugcuaggagaua

SEQ ID NO: 574774 - RNA, 19 nt, Artificial Sequence
  Description of Artificial Sequence: Synthetic oligonucleotide
  Antisense strand to SEQ ID NO: 574773
uaucuccuagcaagaggga

SEQ ID NO: 574775 - RNA, 19 nt, Artificial Sequence
  Description of Artificial Sequence: Synthetic oligonucleotide
  Sense strand starting at position 2360 of SEQ ID NO: 318599
gguggauugcaagaagagu

SEQ ID NO: 574776 - RNA, 19 nt, Artificial Sequence
  Description of Artificial Sequence: Synthetic oligonucleotide
  Antisense strand to SEQ ID NO: 574775
acucuucuugcaauccacc

SEQ ID NO: 574777 - RNA, 19 nt, Artificial Sequence
  Description of Artificial Sequence: Synthetic oligonucleotide
  Sense strand starting at position 2583 of SEQ ID NO: 318599
caggauucugcaggaaaca

SEQ ID NO: 574778 - RNA, 19 nt, Artificial Sequence
  Description of Artificial Sequence: Synthetic oligonucleotide
  Antisense strand to SEQ ID NO: 574777
uguuuccugcagaauccug

SEQ ID NO: 574779 - RNA, 19 nt, Artificial Sequence
  Description of Artificial Sequence: Synthetic oligonucleotide
  Sense strand starting at position 2604 of SEQ ID NO: 318599
ugaugauagaggugucauu

SEQ ID NO: 574780 - RNA, 19 nt, Artificial Sequence
  Description of Artificial Sequence: Synthetic oligonucleotide
  Antisense strand to SEQ ID NO: 574779
aaugacaccucuaucauca

SEQ ID NO: 574781 - RNA, 19 nt, Artificial Sequence
  Description of Artificial Sequence: Synthetic oligonucleotide
  Sense strand starting at position 2679 of SEQ ID NO: 318599
cgcagaagucaaggaaacu

SEQ ID NO: 574782 - RNA, 19 nt, Artificial Sequence
  Description of Artificial Sequence: Synthetic oligonucleotide
  Antisense strand to SEQ ID NO: 574781
aguuuccuugacuucugcg

SEQ ID NO: 574783 - RNA, 19 nt, Artificial Sequence
  Description of Artificial Sequence: Synthetic oligonucleotide
  Sense strand starting at position 2988 of SEQ ID NO: 318599
cugaguaccucuccaccau

SEQ ID NO: 574784 - RNA, 19 nt, Artificial Sequence
  Description of Artificial Sequence: Synthetic oligonucleotide
  Antisense strand to SEQ ID NO: 574783
augguggagagguacucag

SEQ ID NO: 574785 - RNA, 19 nt, Artificial Sequence
  Description of Artificial Sequence: Synthetic oligonucleotide
  Sense strand starting at position 3028 of SEQ ID NO: 318599
gggagagaugcuugcuacu

SEQ ID NO: 574786 - RNA, 19 nt, Artificial Sequence
  Description of Artificial Sequence: Synthetic oligonucleotide
  Antisense strand to SEQ ID NO: 574785
aguagcaagcaucucuccc

SEQ ID NO: 574787 - RNA, 19 nt, Artificial Sequence
  Description of Artificial Sequence: Synthetic oligonucleotide
  Sense strand starting at position 3101 of SEQ ID NO: 318599
gcaccucuagcaugagaca

SEQ ID NO: 574788 - RNA, 19 nt, Artificial Sequence
  Description of Artificial Sequence: Synthetic oligonucleotide
  Antisense strand to SEQ ID NO: 574787
ugucucaugcuagaggugc

SEQ ID NO: 574789 - RNA, 19 nt, Artificial Sequence
  Description of Artificial Sequence: Synthetic oligonucleotide
  Sense strand starting at position 3180 of SEQ ID NO: 318599
aggguuucucuccaguuga

SEQ ID NO: 574790 - RNA, 19 nt, Artificial Sequence
  Description of Artificial Sequence: Synthetic oligonucleotide
  Antisense strand to SEQ ID NO: 574789
ucaacuggagagaaacccu

SEQ ID NO: 574791 - RNA, 19 nt, Artificial Sequence
  Description of Artificial Sequence: Synthetic oligonucleotide
  Sense strand starting at position 3200 of SEQ ID NO: 318599
uuccguguuccuucagguu

SEQ ID NO: 574792 - RNA, 19 nt, Artificial Sequence
  Description of Artificial Sequence: Synthetic oligonucleotide
  Antisense strand to SEQ ID NO: 574791
aaccugaaggaacacggaa

SEQ ID NO: 574793 - RNA, 19 nt, Artificial Sequence
  Description of Artificial Sequence: Synthetic oligonucleotide
  Sense strand starting at position 3394 of SEQ ID NO: 318599
ccauacuuccucuagaguu

SEQ ID NO: 574794 - RNA, 19 nt, Artificial Sequence
  Description of Artificial Sequence: Synthetic oligonucleotide
  Antisense strand to SEQ ID NO: 574793
aacucuagaggaaguaugg

SEQ ID NO: 574795 - RNA, 19 nt, Artificial Sequence
  Description of Artificial Sequence: Synthetic oligonucleotide
  Sense strand starting at position 3396 of SEQ ID NO: 318599
auacuuccucuagaguuua

SEQ ID NO: 574796 - RNA, 19 nt, Artificial Sequence
  Description of Artificial Sequence: Synthetic oligonucleotide
  Antisense strand to SEQ ID NO: 574795
uaaacucuagaggaaguau

SEQ ID NO: 574797 - RNA, 19 nt, Artificial Sequence
  Description of Artificial Sequence: Synthetic oligonucleotide
  Sense strand starting at position 3511 of SEQ ID NO: 318599
guuuauugacacuacaagu

SEQ ID NO: 574798 - RNA, 19 nt, Artificial Sequence
  Description of Artificial Sequence: Synthetic oligonucleotide
  Antisense strand to SEQ ID NO: 574797
acuuguagugucaauaaac

SEQ ID NO: 574799 - RNA, 19 nt, Artificial Sequence
  Description of Artificial Sequence: Synthetic oligonucleotide
  Sense strand starting at position 3552 of SEQ ID NO: 318599
uuuauugaugucuaggcaa

SEQ ID NO: 574800 - RNA, 19 nt, Artificial Sequence
  Description of Artificial Sequence: Synthetic oligonucleotide
  Antisense strand to SEQ ID NO: 574799
uugccuagacaucaauaaa

SEQ ID NO: 574801 - RNA, 19 nt, Artificial Sequence
  Description of Artificial Sequence: Synthetic oligonucleotide
  Sense strand starting at position 3554 of SEQ ID NO: 318599
uauugaugucuaggcaaau

SEQ ID NO: 574802 - RNA, 19 nt, Artificial Sequence
  Description of Artificial Sequence: Synthetic oligonucleotide
  Antisense strand to SEQ ID NO: 574801
auuugccuagacaucaaua

SEQ ID NO: 574803 - RNA, 19 nt, Artificial Sequence
  Description of Artificial Sequence: Synthetic oligonucleotide
  Sense strand starting at position 3555 of SEQ ID NO: 318599
auugaugucuaggcaaauc

SEQ ID NO: 574804 - RNA, 19 nt, Artificial Sequence
  Description of Artificial Sequence: Synthetic oligonucleotide
  Antisense strand to SEQ ID NO: 574803
gauuugccuagacaucaau

SEQ ID NO: 574805 - RNA, 19 nt, Artificial Sequence
  Description of Artificial Sequence: Synthetic oligonucleotide
  Sense strand starting at position 3710 of SEQ ID NO: 318599
agggaugcaugguuaggau

SEQ ID NO: 574806 - RNA, 19 nt, Artificial Sequence
  Description of Artificial Sequence: Synthetic oligonucleotide
  Antisense strand to SEQ ID NO: 574805
auccuaaccaugcaucccu

SEQ ID NO: 574807 - RNA, 19 nt, Artificial Sequence
  Description of Artificial Sequence: Synthetic oligonucleotide
  Sense strand starting at position 3801 of SEQ ID NO: 318599
acucucugucagggauaga

SEQ ID NO: 574808 - RNA, 19 nt, Artificial Sequence
  Description of Artificial Sequence: Synthetic oligonucleotide
  Antisense strand to SEQ ID NO: 574807
ucuaucccugacagagagu

SEQ ID NO: 574809 - RNA, 19 nt, Artificial Sequence
  Description of Artificial Sequence: Synthetic oligonucleotide
  Sense strand starting at position 3804 of SEQ ID NO: 318599
cucugucagggauagagua

SEQ ID NO: 574810 - RNA, 19 nt, Artificial Sequence
  Description of Artificial Sequence: Synthetic oligonucleotide
  Antisense strand to SEQ ID NO: 574809
uacucuaucccugacagag

SEQ ID NO: 574811 - RNA, 19 nt, Artificial Sequence
  Description of Artificial Sequence: Synthetic oligonucleotide
  Sense strand starting at position 3915 of SEQ ID NO: 318599
cuuagcaucuagucagaca

SEQ ID NO: 574812 - RNA, 19 nt, Artificial Sequence
  Description of Artificial Sequence: Synthetic oligonucleotide
  Antisense strand to SEQ ID NO: 574811
ugucugacuagaugcuaag

SEQ ID NO: 574813 - RNA, 19 nt, Artificial Sequence
  Description of Artificial Sequence: Synthetic oligonucleotide
  Sense strand starting at position 47 of SEQ ID NO: 318600
auuuacacgucagagagaa

SEQ ID NO: 574814 - RNA, 19 nt, Artificial Sequence
  Description of Artificial Sequence: Synthetic oligonucleotide
  Antisense strand to SEQ ID NO: 574813
uucucucugacguguaaau

SEQ ID NO: 574815 - RNA, 19 nt, Artificial Sequence
  Description of Artificial Sequence: Synthetic oligonucleotide
  Sense strand starting at position 135 of SEQ ID NO: 318600
uggccaaaugcugaguaau

SEQ ID NO: 574816 - RNA, 19 nt, Artificial Sequence
  Description of Artificial Sequence: Synthetic oligonucleotide
  Antisense strand to SEQ ID NO: 574815
auuacucagcauuuggcca

SEQ ID NO: 574817 - RNA, 19 nt, Artificial Sequence
  Description of Artificial Sequence: Synthetic oligonucleotide
  Sense strand starting at position 445 of SEQ ID NO: 318600
guacgacuaggucagaauu

SEQ ID NO: 574818 - RNA, 19 nt, Artificial Sequence
  Description of Artificial Sequence: Synthetic oligonucleotide
  Antisense strand to SEQ ID NO: 574817
aauucugaccuagucguac

SEQ ID NO: 574819 - RNA, 19 nt, Artificial Sequence
  Description of Artificial Sequence: Synthetic oligonucleotide
  Sense strand starting at position 469 of SEQ ID NO: 318600
guuaaagaaaugcagguau

SEQ ID NO: 574820 - RNA, 19 nt, Artificial Sequence
  Description of Artificial Sequence: Synthetic oligonucleotide
  Antisense strand to SEQ ID NO: 574819
auaccugcauuucuuuaac

SEQ ID NO: 574821 - RNA, 19 nt, Artificial Sequence
  Description of Artificial Sequence: Synthetic oligonucleotide
  Sense strand starting at position 471 of SEQ ID NO: 318600
uaaagaaaugcagguauca

SEQ ID NO: 574822 - RNA, 19 nt, Artificial Sequence
  Description of Artificial Sequence: Synthetic oligonucleotide
  Antisense strand to SEQ ID NO: 574821
ugauaccugcauuucuuua

SEQ ID NO: 574823 - RNA, 19 nt, Artificial Sequence
  Description of Artificial Sequence: Synthetic oligonucleotide
  Sense strand starting at position 486 of SEQ ID NO: 318600
aucagaacggucuaaccuu

SEQ ID NO: 574824 - RNA, 19 nt, Artificial Sequence
  Description of Artificial Sequence: Synthetic oligonucleotide
  Antisense strand to SEQ ID NO: 574823
aagguuagaccguucugau

SEQ ID NO: 574825 - RNA, 19 nt, Artificial Sequence
  Description of Artificial Sequence: Synthetic oligonucleotide
  Sense strand starting at position 505 of SEQ ID NO: 318600
gcauuacuugauuaauaug

SEQ ID NO: 574826 - RNA, 19 nt, Artificial Sequence
  Description of Artificial Sequence: Synthetic oligonucleotide
  Antisense strand to SEQ ID NO: 574825
cauauuaaucaaguaaugc

SEQ ID NO: 574827 - RNA, 19 nt, Artificial Sequence
  Description of Artificial Sequence: Synthetic oligonucleotide
  Sense strand starting at position 634 of SEQ ID NO: 318600
ucagcauaugcuugauuuc

SEQ ID NO: 574828 - RNA, 19 nt, Artificial Sequence
  Description of Artificial Sequence: Synthetic oligonucleotide
  Antisense strand to SEQ ID NO: 574827
gaaaucaagcauaugcuga

SEQ ID NO: 574829 - RNA, 19 nt, Artificial Sequence
  Description of Artificial Sequence: Synthetic oligonucleotide
  Sense strand starting at position 777 of SEQ ID NO: 318600
uaugaauagugagccaacu

SEQ ID NO: 574830 - RNA, 19 nt, Artificial Sequence
  Description of Artificial Sequence: Synthetic oligonucleotide
  Antisense strand to SEQ ID NO: 574829
aguuggcucacuauucaua

SEQ ID NO: 574831 - RNA, 19 nt, Artificial Sequence
  Description of Artificial Sequence: Synthetic oligonucleotide
  Sense strand starting at position 1029 of SEQ ID NO: 318600
gguguaaaugggcauacuu

SEQ ID NO: 574832 - RNA, 19 nt, Artificial Sequence
  Description of Artificial Sequence: Synthetic oligonucleotide
  Antisense strand to SEQ ID NO: 574831
aaguaugcccauuuacacc

SEQ ID NO: 574833 - RNA, 19 nt, Artificial Sequence
  Description of Artificial Sequence: Synthetic oligonucleotide
  Sense strand starting at position 1031 of SEQ ID NO: 318600
uguaaaugggcauacuuua

SEQ ID NO: 574834 - RNA, 19 nt, Artificial Sequence
  Description of Artificial Sequence: Synthetic oligonucleotide
  Antisense strand to SEQ ID NO: 574833
uaaaguaugcccauuuaca

SEQ ID NO: 574835 - RNA, 19 nt, Artificial Sequence
  Description of Artificial Sequence: Synthetic oligonucleotide
  Sense strand starting at position 1046 of SEQ ID NO: 318600
uuuagauaucuugaggucu

SEQ ID NO: 574836 - RNA, 19 nt, Artificial Sequence
  Description of Artificial Sequence: Synthetic oligonucleotide
  Antisense strand to SEQ ID NO: 574835
agaccucaagauaucuaaa

SEQ ID NO: 574837 - RNA, 19 nt, Artificial Sequence
  Description of Artificial Sequence: Synthetic oligonucleotide
  Sense strand starting at position 1057 of SEQ ID NO: 318600
ugaggucuuccauaaguga

SEQ ID NO: 574838 - RNA, 19 nt, Artificial Sequence
  Description of Artificial Sequence: Synthetic oligonucleotide
  Antisense strand to SEQ ID NO: 574837
ucacuuauggaagaccuca

SEQ ID NO: 574839 - RNA, 19 nt, Artificial Sequence
  Description of Artificial Sequence: Synthetic oligonucleotide
  Sense strand starting at position 1060 of SEQ ID NO: 318600
ggucuuccauaagugagaa

SEQ ID NO: 574840 - RNA, 19 nt, Artificial Sequence
  Description of Artificial Sequence: Synthetic oligonucleotide
  Antisense strand to SEQ ID NO: 574839
uucucacuuauggaagacc

SEQ ID NO: 574841 - RNA, 19 nt, Artificial Sequence
  Description of Artificial Sequence: Synthetic oligonucleotide
  Sense strand starting at position 1073 of SEQ ID NO: 318600
ugagaauaguagcuuaaug

SEQ ID NO: 574842 - RNA, 19 nt, Artificial Sequence
  Description of Artificial Sequence: Synthetic oligonucleotide
  Antisense strand to SEQ ID NO: 574841
cauuaagcuacuauucuca

SEQ ID NO: 574843 - RNA, 19 nt, Artificial Sequence
  Description of Artificial Sequence: Synthetic oligonucleotide
  Sense strand starting at position 1075 of SEQ ID NO: 318600
agaauaguagcuuaauguc

SEQ ID NO: 574844 - RNA, 19 nt, Artificial Sequence
  Description of Artificial Sequence: Synthetic oligonucleotide
  Antisense strand to SEQ ID NO: 574843
gacauuaagcuacuauucu

SEQ ID NO: 574845 - RNA, 19 nt, Artificial Sequence
  Description of Artificial Sequence: Synthetic oligonucleotide
  Sense strand starting at position 2344 of SEQ ID NO: 318600
uuguccugugaucacuuaa

SEQ ID NO: 574846 - RNA, 19 nt, Artificial Sequence
  Description of Artificial Sequence: Synthetic oligonucleotide
  Antisense strand to SEQ ID NO: 574845
uuaagugaucacaggacaa

SEQ ID NO: 574847 - RNA, 19 nt, Artificial Sequence
  Description of Artificial Sequence: Synthetic oligonucleotide
  Sense strand starting at position 2351 of SEQ ID NO: 318600
gugaucacuuaauugugaa

SEQ ID NO: 574848 - RNA, 19 nt, Artificial Sequence
  Description of Artificial Sequence: Synthetic oligonucleotide
  Antisense strand to SEQ ID NO: 574847
uucacaauuaagugaucac

SEQ ID NO: 574849 - RNA, 19 nt, Artificial Sequence
  Description of Artificial Sequence: Synthetic oligonucleotide
  Sense strand starting at position 2636 of SEQ ID NO: 318600
ugaauugaccuuuagccaa

SEQ ID NO: 574850 - RNA, 19 nt, Artificial Sequence
  Description of Artificial Sequence: Synthetic oligonucleotide
  Antisense strand to SEQ ID NO: 574849
uuggcuaaaggucaauuca

SEQ ID NO: 574851 - RNA, 19 nt, Artificial Sequence
  Description of Artificial Sequence: Synthetic oligonucleotide
  Sense strand starting at position 2796 of SEQ ID NO: 318600
ggaguuuccaucuacucga

SEQ ID NO: 574852 - RNA, 19 nt, Artificial Sequence
  Description of Artificial Sequence: Synthetic oligonucleotide
  Antisense strand to SEQ ID NO: 574851
ucgaguagauggaaacucc

SEQ ID NO: 574853 - RNA, 19 nt, Artificial Sequence
  Description of Artificial Sequence: Synthetic oligonucleotide
  Sense strand starting at position 2859 of SEQ ID NO: 318600
augggaugcuuggcaaaca

SEQ ID NO: 574854 - RNA, 19 nt, Artificial Sequence
  Description of Artificial Sequence: Synthetic oligonucleotide
  Antisense strand to SEQ ID NO: 574853
uguuugccaagcaucccau

SEQ ID NO: 574855 - RNA, 19 nt, Artificial Sequence
  Description of Artificial Sequence: Synthetic oligonucleotide
  Sense strand starting at position 2954 of SEQ ID NO: 318600
uaagauacguaguuugaga

SEQ ID NO: 574856 - RNA, 19 nt, Artificial Sequence
  Description of Artificial Sequence: Synthetic oligonucleotide
  Antisense strand to SEQ ID NO: 574855
ucucaaacuacguaucuua

SEQ ID NO: 574857 - RNA, 19 nt, Artificial Sequence
  Description of Artificial Sequence: Synthetic oligonucleotide
  Sense strand starting at position 3100 of SEQ ID NO: 318600
aguuauuauuggccgauuu

SEQ ID NO: 574858 - RNA, 19 nt, Artificial Sequence
  Description of Artificial Sequence: Synthetic oligonucleotide
  Antisense strand to SEQ ID NO: 574857
aaaucggccaauaauaacu

SEQ ID NO: 574859 - RNA, 19 nt, Artificial Sequence
  Description of Artificial Sequence: Synthetic oligonucleotide
  Sense strand starting at position 3101 of SEQ ID NO: 318600
guuauuauuggccgauuua

SEQ ID NO: 574860 - RNA, 19 nt, Artificial Sequence
  Description of Artificial Sequence: Synthetic oligonucleotide
  Antisense strand to SEQ ID NO: 574859
uaaaucggccaauaauaac

SEQ ID NO: 574861 - RNA, 19 nt, Artificial Sequence
  Description of Artificial Sequence: Synthetic oligonucleotide
  Sense strand starting at position 3176 of SEQ ID NO: 318600
uuucgugugacauaauaga

SEQ ID NO: 574862 - RNA, 19 nt, Artificial Sequence
  Description of Artificial Sequence: Synthetic oligonucleotide
  Antisense strand to SEQ ID NO: 574861
ucuauuaugucacacgaaa

SEQ ID NO: 574863 - RNA, 19 nt, Artificial Sequence
  Description of Artificial Sequence: Synthetic oligonucleotide
  Sense strand starting at position 3195 of SEQ ID NO: 318600
agaguucuucguguguugu

SEQ ID NO: 574864 - RNA, 19 nt, Artificial Sequence
  Description of Artificial Sequence: Synthetic oligonucleotide
  Antisense strand to SEQ ID NO: 574863
acaacacacgaagaacucu

SEQ ID NO: 574865 - RNA, 19 nt, Artificial Sequence
  Description of Artificial Sequence: Synthetic oligonucleotide
  Sense strand starting at position 3198 of SEQ ID NO: 318600
guucuucguguguuguaaa

SEQ ID NO: 574866 - RNA, 19 nt, Artificial Sequence
  Description of Artificial Sequence: Synthetic oligonucleotide
  Antisense strand to SEQ ID NO: 574865
uuuacaacacacgaagaac

SEQ ID NO: 574867 - RNA, 19 nt, Artificial Sequence
  Description of Artificial Sequence: Synthetic oligonucleotide
  Sense strand starting at position 3205 of SEQ ID NO: 318600
guguguuguaaagcuccuu

SEQ ID NO: 574868 - RNA, 19 nt, Artificial Sequence
  Description of Artificial Sequence: Synthetic oligonucleotide
  Antisense strand to SEQ ID NO: 574867
aaggagcuuuacaacacac

SEQ ID NO: 574869 - RNA, 19 nt, Artificial Sequence
  Description of Artificial Sequence: Synthetic oligonucleotide
  Sense strand starting at position 3230 of SEQ ID NO: 318600
aggaauuauuggccaauua

SEQ ID NO: 574870 - RNA, 19 nt, Artificial Sequence
  Description of Artificial Sequence: Synthetic oligonucleotide
  Antisense strand to SEQ ID NO: 574869
uaauuggccaauaauuccu

SEQ ID NO: 574871 - RNA, 19 nt, Artificial Sequence
  Description of Artificial Sequence: Synthetic oligonucleotide
  Sense strand starting at position 3266 of SEQ ID NO: 318600
gauggaugaauacguagau

SEQ ID NO: 574872 - RNA, 19 nt, Artificial Sequence
  Description of Artificial Sequence: Synthetic oligonucleotide
  Antisense strand to SEQ ID NO: 574871
aucuacguauucauccauc

SEQ ID NO: 574873 - RNA, 19 nt, Artificial Sequence
  Description of Artificial Sequence: Synthetic oligonucleotide
  Sense strand starting at position 3267 of SEQ ID NO: 318600
auggaugaauacguagaua

SEQ ID NO: 574874 - RNA, 19 nt, Artificial Sequence
  Description of Artificial Sequence: Synthetic oligonucleotide
  Antisense strand to SEQ ID NO: 574873
uaucuacguauucauccau

SEQ ID NO: 574875 - RNA, 19 nt, Artificial Sequence
  Description of Artificial Sequence: Synthetic oligonucleotide
  Sense strand starting at position 3428 of SEQ ID NO: 318600
ugcuuaauuacugagugga

SEQ ID NO: 574876 - RNA, 19 nt, Artificial Sequence
  Description of Artificial Sequence: Synthetic oligonucleotide
  Antisense strand to SEQ ID NO: 574875
uccacucaguaauuaagca

SEQ ID NO: 574877 - RNA, 19 nt, Artificial Sequence
  Description of Artificial Sequence: Synthetic oligonucleotide
  Sense strand starting at position 3430 of SEQ ID NO: 318600
cuuaauuacugaguggaga

SEQ ID NO: 574878 - RNA, 19 nt, Artificial Sequence
  Description of Artificial Sequence: Synthetic oligonucleotide
  Antisense strand to SEQ ID NO: 574877
ucuccacucaguaauuaag

SEQ ID NO: 574879 - RNA, 19 nt, Artificial Sequence
  Description of Artificial Sequence: Synthetic oligonucleotide
  Sense strand starting at position 3591 of SEQ ID NO: 318600
aggguuuacacagguuuaa

SEQ ID NO: 574880 - RNA, 19 nt, Artificial Sequence
  Description of Artificial Sequence: Synthetic oligonucleotide
  Antisense strand to SEQ ID NO: 574879
uuaaaccuguguaaacccu

SEQ ID NO: 574881 - RNA, 19 nt, Artificial Sequence
  Description of Artificial Sequence: Synthetic oligonucleotide
  Sense strand starting at position 3619 of SEQ ID NO: 318600
ggaauaaauccacguaucu

SEQ ID NO: 574882 - RNA, 19 nt, Artificial Sequence
  Description of Artificial Sequence: Synthetic oligonucleotide
  Antisense strand to SEQ ID NO: 574881
agauacguggauuuauucc

SEQ ID NO: 574883 - RNA, 19 nt, Artificial Sequence
  Description of Artificial Sequence: Synthetic oligonucleotide
  Sense strand starting at position 3687 of SEQ ID NO: 318600
uggauacuuugcucaacag

SEQ ID NO: 574884 - RNA, 19 nt, Artificial Sequence
  Description of Artificial Sequence: Synthetic oligonucleotide
  Antisense strand to SEQ ID NO: 574883
cuguugagcaaaguaucca

SEQ ID NO: 574885 - RNA, 19 nt, Artificial Sequence
  Description of Artificial Sequence: Synthetic oligonucleotide
  Sense strand starting at position 3688 of SEQ ID NO: 318600
ggauacuuugcucaacagu

SEQ ID NO: 574886 - RNA, 19 nt, Artificial Sequence
  Description of Artificial Sequence: Synthetic oligonucleotide
  Antisense strand to SEQ ID NO: 574885
acuguugagcaaaguaucc

SEQ ID NO: 574887 - RNA, 19 nt, Artificial Sequence
  Description of Artificial Sequence: Synthetic oligonucleotide
  Sense strand starting at position 3889 of SEQ ID NO: 318600
cuugguuagaaugaaguuu

SEQ ID NO: 574888 - RNA, 19 nt, Artificial Sequence
  Description of Artificial Sequence: Synthetic oligonucleotide
  Antisense strand to SEQ ID NO: 574887
aaacuucauucuaaccaag

SEQ ID NO: 574889 - RNA, 19 nt, Artificial Sequence
  Description of Artificial Sequence: Synthetic oligonucleotide
  Sense strand starting at position 3895 of SEQ ID NO: 318600
uagaaugaaguuuggguaa

SEQ ID NO: 574890 - RNA, 19 nt, Artificial Sequence
  Description of Artificial Sequence: Synthetic oligonucleotide
  Antisense strand to SEQ ID NO: 574889
uuacccaaacuucauucua

SEQ ID NO: 574891 - RNA, 19 nt, Artificial Sequence
  Description of Artificial Sequence: Synthetic oligonucleotide
  Sense strand starting at position 3983 of SEQ ID NO: 318600
auacaucaucuggagcuau

SEQ ID NO: 574892 - RNA, 19 nt, Artificial Sequence
  Description of Artificial Sequence: Synthetic oligonucleotide
  Antisense strand to SEQ ID NO: 574891
auagcuccagaugauguau

SEQ ID NO: 574893 - RNA, 19 nt, Artificial Sequence
  Description of Artificial Sequence: Synthetic oligonucleotide
  Sense strand starting at position 27 of SEQ ID NO: 318601
gaaaguucgcaaugccauu

SEQ ID NO: 574894 - RNA, 19 nt, Artificial Sequence
  Description of Artificial Sequence: Synthetic oligonucleotide
  Antisense strand to SEQ ID NO: 574893
aauggcauugcgaacuuuc

SEQ ID NO: 574895 - RNA, 19 nt, Artificial Sequence
  Description of Artificial Sequence: Synthetic oligonucleotide
  Sense strand starting at position 41 of SEQ ID NO: 318601
ccauuugucucgccggcaa

SEQ ID NO: 574896 - RNA, 19 nt, Artificial Sequence
  Description of Artificial Sequence: Synthetic oligonucleotide
  Antisense strand to SEQ ID NO: 574895
uugccggcgagacaaaugg

SEQ ID NO: 574897 - RNA, 19 nt, Artificial Sequence
  Description of Artificial Sequence: Synthetic oligonucleotide
  Sense strand starting at position 55 of SEQ ID NO: 318601
ggcaaaguucugggauguc

SEQ ID NO: 574898 - RNA, 19 nt, Artificial Sequence
  Description of Artificial Sequence: Synthetic oligonucleotide
  Antisense strand to SEQ ID NO: 574897
gacaucccagaacuuugcc

SEQ ID NO: 574899 - RNA, 19 nt, Artificial Sequence
  Description of Artificial Sequence: Synthetic oligonucleotide
  Sense strand starting at position 65 of SEQ ID NO: 318601
ugggaugucgggcaucuuu

SEQ ID NO: 574900 - RNA, 19 nt, Artificial Sequence
  Description of Artificial Sequence: Synthetic oligonucleotide
  Antisense strand to SEQ ID NO: 574899
aaagaugcccgacauccca

SEQ ID NO: 574901 - RNA, 19 nt, Artificial Sequence
  Description of Artificial Sequence: Synthetic oligonucleotide
  Sense strand starting at position 258 of SEQ ID NO: 318601
gcgucagacgcugcuucau

SEQ ID NO: 574902 - RNA, 19 nt, Artificial Sequence
  Description of Artificial Sequence: Synthetic oligonucleotide
  Antisense strand to SEQ ID NO: 574901
augaagcagcgucugacgc

SEQ ID NO: 574903 - RNA, 19 nt, Artificial Sequence
  Description of Artificial Sequence: Synthetic oligonucleotide
  Sense strand starting at position 412 of SEQ ID NO: 318601
gugccaucccaagaguuug

SEQ ID NO: 574904 - RNA, 19 nt, Artificial Sequence
  Description of Artificial Sequence: Synthetic oligonucleotide
  Antisense strand to SEQ ID NO: 574903
caaacucuugggauggcac

SEQ ID NO: 574905 - RNA, 19 nt, Artificial Sequence
  Description of Artificial Sequence: Synthetic oligonucleotide
  Sense strand starting at position 684 of SEQ ID NO: 318601
cacacaugguucuugguau

SEQ ID NO: 574906 - RNA, 19 nt, Artificial Sequence
  Description of Artificial Sequence: Synthetic oligonucleotide
  Antisense strand to SEQ ID NO: 574905
auaccaagaaccaugugug

SEQ ID NO: 574907 - RNA, 19 nt, Artificial Sequence
  Description of Artificial Sequence: Synthetic oligonucleotide
  Sense strand starting at position 924 of SEQ ID NO: 318601
cagggauggugccucaaau

SEQ ID NO: 574908 - RNA, 19 nt, Artificial Sequence
  Description of Artificial Sequence: Synthetic oligonucleotide
  Antisense strand to SEQ ID NO: 574907
auuugaggcaccaucccug

SEQ ID NO: 574909 - RNA, 19 nt, Artificial Sequence
  Description of Artificial Sequence: Synthetic oligonucleotide
  Sense strand starting at position 937 of SEQ ID NO: 318601
ucaaauaucccuggaagcu

SEQ ID NO: 574910 - RNA, 19 nt, Artificial Sequence
  Description of Artificial Sequence: Synthetic oligonucleotide
  Antisense strand to SEQ ID NO: 574909
agcuuccagggauauuuga

SEQ ID NO: 574911 - RNA, 19 nt, Artificial Sequence
  Description of Artificial Sequence: Synthetic oligonucleotide
  Sense strand starting at position 955 of SEQ ID NO: 318601
ucuggugucacuugaauga

SEQ ID NO: 574912 - RNA, 19 nt, Artificial Sequence
  Description of Artificial Sequence: Synthetic oligonucleotide
  Antisense strand to SEQ ID NO: 574911
ucauucaagugacaccaga

SEQ ID NO: 574913 - RNA, 19 nt, Artificial Sequence
  Description of Artificial Sequence: Synthetic oligonucleotide
  Sense strand starting at position 1202 of SEQ ID NO: 318601
gggcaauggucgaaaggac

SEQ ID NO: 574914 - RNA, 19 nt, Artificial Sequence
  Description of Artificial Sequence: Synthetic oligonucleotide
  Antisense strand to SEQ ID NO: 574913
guccuuucgaccauugccc

SEQ ID NO: 574915 - RNA, 19 nt, Artificial Sequence
  Description of Artificial Sequence: Synthetic oligonucleotide
  Sense strand starting at position 1209 of SEQ ID NO: 318601
ggucgaaaggacuguacaa

SEQ ID NO: 574916 - RNA, 19 nt, Artificial Sequence
  Description of Artificial Sequence: Synthetic oligonucleotide
  Antisense strand to SEQ ID NO: 574915
uuguacaguccuuucgacc

SEQ ID NO: 574917 - RNA, 19 nt, Artificial Sequence
  Description of Artificial Sequence: Synthetic oligonucleotide
  Sense strand starting at position 1267 of SEQ ID NO: 318601
gacggugugcucugggaca

SEQ ID NO: 574918 - RNA, 19 nt, Artificial Sequence
  Description of Artificial Sequence: Synthetic oligonucleotide
  Antisense strand to SEQ ID NO: 574917
ugucccagagcacaccguc

SEQ ID NO: 574919 - RNA, 19 nt, Artificial Sequence
  Description of Artificial Sequence: Synthetic oligonucleotide
  Sense strand starting at position 1316 of SEQ ID NO: 318601
cccacaucggguugggaaa

SEQ ID NO: 574920 - RNA, 19 nt, Artificial Sequence
  Description of Artificial Sequence: Synthetic oligonucleotide
  Antisense strand to SEQ ID NO: 574919
uuucccaacccgauguggg

SEQ ID NO: 574921 - RNA, 19 nt, Artificial Sequence
  Description of Artificial Sequence: Synthetic oligonucleotide
  Sense strand starting at position 1327 of SEQ ID NO: 318601
uugggaaaguuuccucuuu

SEQ ID NO: 574922 - RNA, 19 nt, Artificial Sequence
  Description of Artificial Sequence: Synthetic oligonucleotide
  Antisense strand to SEQ ID NO: 574921
aaagaggaaacuuucccaa

SEQ ID NO: 574923 - RNA, 19 nt, Artificial Sequence
  Description of Artificial Sequence: Synthetic oligonucleotide
  Sense strand starting at position 1398 of SEQ ID NO: 318601
agcaguuuccuaggcacaa

SEQ ID NO: 574924 - RNA, 19 nt, Artificial Sequence
  Description of Artificial Sequence: Synthetic oligonucleotide
  Antisense strand to SEQ ID NO: 574923
uugugccuaggaaacugcu

SEQ ID NO: 574925 - RNA, 19 nt, Artificial Sequence
  Description of Artificial Sequence: Synthetic oligonucleotide
  Sense strand starting at position 1399 of SEQ ID NO: 318601
gcaguuuccuaggcacaau

SEQ ID NO: 574926 - RNA, 19 nt, Artificial Sequence
  Description of Artificial Sequence: Synthetic oligonucleotide
  Antisense strand to SEQ ID NO: 574925
auugugccuaggaaacugc

SEQ ID NO: 574927 - RNA, 19 nt, Artificial Sequence
  Description of Artificial Sequence: Synthetic oligonucleotide
  Sense strand starting at position 1402 of SEQ ID NO: 318601
guuuccuaggcacaaugau

SEQ ID NO: 574928 - RNA, 19 nt, Artificial Sequence
  Description of Artificial Sequence: Synthetic oligonucleotide
  Antisense strand to SEQ ID NO: 574927
aucauugugccuaggaaac

SEQ ID NO: 574929 - RNA, 19 nt, Artificial Sequence
  Description of Artificial Sequence: Synthetic oligonucleotide
  Sense strand starting at position 1448 of SEQ ID NO: 318601
aauuccuggccuugugaca

SEQ ID NO: 574930 - RNA, 19 nt, Artificial Sequence
  Description of Artificial Sequence: Synthetic oligonucleotide
  Antisense strand to SEQ ID NO: 574929
ugucacaaggccaggaauu

SEQ ID NO: 574931 - RNA, 19 nt, Artificial Sequence
  Description of Artificial Sequence: Synthetic oligonucleotide
  Sense strand starting at position 1459 of SEQ ID NO: 318601
uugugacacuuugcauuaa

SEQ ID NO: 574932 - RNA, 19 nt, Artificial Sequence
  Description of Artificial Sequence: Synthetic oligonucleotide
  Antisense strand to SEQ ID NO: 574931
uuaaugcaaagugucacaa

SEQ ID NO: 574933 - RNA, 19 nt, Artificial Sequence
  Description of Artificial Sequence: Synthetic oligonucleotide
  Sense strand starting at position 1516 of SEQ ID NO: 318601
gauacaguauuuggucuga

SEQ ID NO: 574934 - RNA, 19 nt, Artificial Sequence
  Description of Artificial Sequence: Synthetic oligonucleotide
  Antisense strand to SEQ ID NO: 574933
ucagaccaaauacuguauc

SEQ ID NO: 574935 - RNA, 19 nt, Artificial Sequence
  Description of Artificial Sequence: Synthetic oligonucleotide
  Sense strand starting at position 1521 of SEQ ID NO: 318601
aguauuuggucugagcaac

SEQ ID NO: 574936 - RNA, 19 nt, Artificial Sequence
  Description of Artificial Sequence: Synthetic oligonucleotide
  Antisense strand to SEQ ID NO: 574935
guugcucagaccaaauacu

SEQ ID NO: 574937 - RNA, 19 nt, Artificial Sequence
  Description of Artificial Sequence: Synthetic oligonucleotide
  Sense strand starting at position 1833 of SEQ ID NO: 318601
ccagucauccgauggaagu

SEQ ID NO: 574938 - RNA, 19 nt, Artificial Sequence
  Description of Artificial Sequence: Synthetic oligonucleotide
  Antisense strand to SEQ ID NO: 574937
acuuccaucggaugacugg

SEQ ID NO: 574939 - RNA, 19 nt, Artificial Sequence
  Description of Artificial Sequence: Synthetic oligonucleotide
  Sense strand starting at position 1834 of SEQ ID NO: 318601
cagucauccgauggaagug

SEQ ID NO: 574940 - RNA, 19 nt, Artificial Sequence
  Description of Artificial Sequence: Synthetic oligonucleotide
  Antisense strand to SEQ ID NO: 574939
cacuuccaucggaugacug

SEQ ID NO: 574941 - RNA, 19 nt, Artificial Sequence
  Description of Artificial Sequence: Synthetic oligonucleotide
  Sense strand starting at position 2310 of SEQ ID NO: 318601
gcgguaaugcgccugggaa

SEQ ID NO: 574942 - RNA, 19 nt, Artificial Sequence
  Description of Artificial Sequence: Synthetic oligonucleotide
  Antisense strand to SEQ ID NO: 574941
uucccaggcgcauuaccgc

SEQ ID NO: 574943 - RNA, 19 nt, Artificial Sequence
  Description of Artificial Sequence: Synthetic oligonucleotide
  Sense strand starting at position 2312 of SEQ ID NO: 318601
gguaaugcgccugggaagu

SEQ ID NO: 574944 - RNA, 19 nt, Artificial Sequence
  Description of Artificial Sequence: Synthetic oligonucleotide
  Antisense strand to SEQ ID NO: 574943
acuucccaggcgcauuacc

SEQ ID NO: 574945 - RNA, 19 nt, Artificial Sequence
  Description of Artificial Sequence: Synthetic oligonucleotide
  Sense strand starting at position 2576 of SEQ ID NO: 318601
cgagcucuccugagucgga

SEQ ID NO: 574946 - RNA, 19 nt, Artificial Sequence
  Description of Artificial Sequence: Synthetic oligonucleotide
  Antisense strand to SEQ ID NO: 574945
uccgacucaggagagcucg

SEQ ID NO: 574947 - RNA, 19 nt, Artificial Sequence
  Description of Artificial Sequence: Synthetic oligonucleotide
  Sense strand starting at position 2577 of SEQ ID NO: 318601
gagcucuccugagucggaa

SEQ ID NO: 574948 - RNA, 19 nt, Artificial Sequence
  Description of Artificial Sequence: Synthetic oligonucleotide
  Antisense strand to SEQ ID NO: 574947
uuccgacucaggagagcuc

SEQ ID NO: 574949 - RNA, 19 nt, Artificial Sequence
  Description of Artificial Sequence: Synthetic oligonucleotide
  Sense strand starting at position 2822 of SEQ ID NO: 318601
guguuugcauaguuaacuu

SEQ ID NO: 574950 - RNA, 19 nt, Artificial Sequence
  Description of Artificial Sequence: Synthetic oligonucleotide
  Antisense strand to SEQ ID NO: 574949
aaguuaacuaugcaaacac

SEQ ID NO: 574951 - RNA, 19 nt, Artificial Sequence
  Description of Artificial Sequence: Synthetic oligonucleotide
  Sense strand starting at position 2942 of SEQ ID NO: 318601
cucugaauuuccugagaac

SEQ ID NO: 574952 - RNA, 19 nt, Artificial Sequence
  Description of Artificial Sequence: Synthetic oligonucleotide
  Antisense strand to SEQ ID NO: 574951
guucucaggaaauucagag

SEQ ID NO: 574953 - RNA, 19 nt, Artificial Sequence
  Description of Artificial Sequence: Synthetic oligonucleotide
  Sense strand starting at position 2945 of SEQ ID NO: 318601
ugaauuuccugagaacaag

SEQ ID NO: 574954 - RNA, 19 nt, Artificial Sequence
  Description of Artificial Sequence: Synthetic oligonucleotide
  Antisense strand to SEQ ID NO: 574953
cuuguucucaggaaauuca

SEQ ID NO: 574955 - RNA, 19 nt, Artificial Sequence
  Description of Artificial Sequence: Synthetic oligonucleotide
  Sense strand starting at position 3000 of SEQ ID NO: 318601
uggguagacuuucuuucua

SEQ ID NO: 574956 - RNA, 19 nt, Artificial Sequence
  Description of Artificial Sequence: Synthetic oligonucleotide
  Antisense strand to SEQ ID NO: 574955
uagaaagaaagucuaccca

SEQ ID NO: 574957 - RNA, 19 nt, Artificial Sequence
  Description of Artificial Sequence: Synthetic oligonucleotide
  Sense strand starting at position 3002 of SEQ ID NO: 318601
gguagacuuucuuucuaug

SEQ ID NO: 574958 - RNA, 19 nt, Artificial Sequence
  Description of Artificial Sequence: Synthetic oligonucleotide
  Antisense strand to SEQ ID NO: 574957
cauagaaagaaagucuacc

SEQ ID NO: 574959 - RNA, 19 nt, Artificial Sequence
  Description of Artificial Sequence: Synthetic oligonucleotide
  Sense strand starting at position 3181 of SEQ ID NO: 318601
ccaggauaccuggagcgau

SEQ ID NO: 574960 - RNA, 19 nt, Artificial Sequence
  Description of Artificial Sequence: Synthetic oligonucleotide
  Antisense strand to SEQ ID NO: 574959
aucgcuccagguauccugg

SEQ ID NO: 574961 - RNA, 19 nt, Artificial Sequence
  Description of Artificial Sequence: Synthetic oligonucleotide
  Sense strand starting at position 3450 of SEQ ID NO: 318601
aggguuuaucucugggcca

SEQ ID NO: 574962 - RNA, 19 nt, Artificial Sequence
  Description of Artificial Sequence: Synthetic oligonucleotide
  Antisense strand to SEQ ID NO: 574961
uggcccagagauaaacccu

SEQ ID NO: 574963 - RNA, 19 nt, Artificial Sequence
  Description of Artificial Sequence: Synthetic oligonucleotide
  Sense strand starting at position 3452 of SEQ ID NO: 318601
gguuuaucucugggccacu

SEQ ID NO: 574964 - RNA, 19 nt, Artificial Sequence
  Description of Artificial Sequence: Synthetic oligonucleotide
  Antisense strand to SEQ ID NO: 574963
aguggcccagagauaaacc

SEQ ID NO: 574965 - RNA, 19 nt, Artificial Sequence
  Description of Artificial Sequence: Synthetic oligonucleotide
  Sense strand starting at position 3543 of SEQ ID NO: 318601
gcagaaucacuaggcaguu

SEQ ID NO: 574966 - RNA, 19 nt, Artificial Sequence
  Description of Artificial Sequence: Synthetic oligonucleotide
  Antisense strand to SEQ ID NO: 574965
aacugccuagugauucugc

SEQ ID NO: 574967 - RNA, 19 nt, Artificial Sequence
  Description of Artificial Sequence: Synthetic oligonucleotide
  Sense strand starting at position 3552 of SEQ ID NO: 318601
cuaggcaguuugcugaaau

SEQ ID NO: 574968 - RNA, 19 nt, Artificial Sequence
  Description of Artificial Sequence: Synthetic oligonucleotide
  Antisense strand to SEQ ID NO: 574967
auuucagcaaacugccuag

SEQ ID NO: 574969 - RNA, 19 nt, Artificial Sequence
  Description of Artificial Sequence: Synthetic oligonucleotide
  Sense strand starting at position 3562 of SEQ ID NO: 318601
ugcugaaauggccagucua

SEQ ID NO: 574970 - RNA, 19 nt, Artificial Sequence
  Description of Artificial Sequence: Synthetic oligonucleotide
  Antisense strand to SEQ ID NO: 574969
uagacuggccauuucagca

SEQ ID NO: 574971 - RNA, 19 nt, Artificial Sequence
  Description of Artificial Sequence: Synthetic oligonucleotide
  Sense strand starting at position 3651 of SEQ ID NO: 318601
ggcugauuccuuuagcuuu

SEQ ID NO: 574972 - RNA, 19 nt, Artificial Sequence
  Description of Artificial Sequence: Synthetic oligonucleotide
  Antisense strand to SEQ ID NO: 574971
aaagcuaaaggaaucagcc

SEQ ID NO: 574973 - RNA, 19 nt, Artificial Sequence
  Description of Artificial Sequence: Synthetic oligonucleotide
  Sense strand starting at position 45 of SEQ ID NO: 318602
gcugaaacgagcugauuuc

SEQ ID NO: 574974 - RNA, 19 nt, Artificial Sequence
  Description of Artificial Sequence: Synthetic oligonucleotide
  Antisense strand to SEQ ID NO: 574973
gaaaucagcucguuucagc

SEQ ID NO: 574975 - RNA, 19 nt, Artificial Sequence
  Description of Artificial Sequence: Synthetic oligonucleotide
  Sense strand starting at position 452 of SEQ ID NO: 318602
cuauuauaacaccggucau

SEQ ID NO: 574976 - RNA, 19 nt, Artificial Sequence
  Description of Artificial Sequence: Synthetic oligonucleotide
  Antisense strand to SEQ ID NO: 574975
augaccgguguuauaauag

SEQ ID NO: 574977 - RNA, 19 nt, Artificial Sequence
  Description of Artificial Sequence: Synthetic oligonucleotide
  Sense strand starting at position 462 of SEQ ID NO: 318602
accggucaucuaggaacua

SEQ ID NO: 574978 - RNA, 19 nt, Artificial Sequence
  Description of Artificial Sequence: Synthetic oligonucleotide
  Antisense strand to SEQ ID NO: 574977
uaguuccuagaugaccggu

SEQ ID NO: 574979 - RNA, 19 nt, Artificial Sequence
  Description of Artificial Sequence: Synthetic oligonucleotide
  Sense strand starting at position 474 of SEQ ID NO: 318602
ggaacuacuucgguaacua

SEQ ID NO: 574980 - RNA, 19 nt, Artificial Sequence
  Description of Artificial Sequence: Synthetic oligonucleotide
  Antisense strand to SEQ ID NO: 574979
uaguuaccgaaguaguucc

SEQ ID NO: 574981 - RNA, 19 nt, Artificial Sequence
  Description of Artificial Sequence: Synthetic oligonucleotide
  Sense strand starting at position 475 of SEQ ID NO: 318602
gaacuacuucgguaacuag

SEQ ID NO: 574982 - RNA, 19 nt, Artificial Sequence
  Description of Artificial Sequence: Synthetic oligonucleotide
  Antisense strand to SEQ ID NO: 574981
cuaguuaccgaaguaguuc

SEQ ID NO: 574983 - RNA, 19 nt, Artificial Sequence
  Description of Artificial Sequence: Synthetic oligonucleotide
  Sense strand starting at position 483 of SEQ ID NO: 318602
ucgguaacuaggcgauaga

SEQ ID NO: 574984 - RNA, 19 nt, Artificial Sequence
  Description of Artificial Sequence: Synthetic oligonucleotide
  Antisense strand to SEQ ID NO: 574983
ucuaucgccuaguuaccga

SEQ ID NO: 574985 - RNA, 19 nt, Artificial Sequence
  Description of Artificial Sequence: Synthetic oligonucleotide
  Sense strand starting at position 544 of SEQ ID NO: 318602
gugguccagccucauagaa

SEQ ID NO: 574986 - RNA, 19 nt, Artificial Sequence
  Description of Artificial Sequence: Synthetic oligonucleotide
  Antisense strand to SEQ ID NO: 574985
uucuaugaggcuggaccac

SEQ ID NO: 574987 - RNA, 19 nt, Artificial Sequence
  Description of Artificial Sequence: Synthetic oligonucleotide
  Sense strand starting at position 574 of SEQ ID NO: 318602
gggucagagugcccuacaa

SEQ ID NO: 574988 - RNA, 19 nt, Artificial Sequence
  Description of Artificial Sequence: Synthetic oligonucleotide
  Antisense strand to SEQ ID NO: 574987
uuguagggcacucugaccc

SEQ ID NO: 574989 - RNA, 19 nt, Artificial Sequence
  Description of Artificial Sequence: Synthetic oligonucleotide
  Sense strand starting at position 612 of SEQ ID NO: 318602
ggaggauaguggcuuagaa

SEQ ID NO: 574990 - RNA, 19 nt, Artificial Sequence
  Description of Artificial Sequence: Synthetic oligonucleotide
  Antisense strand to SEQ ID NO: 574989
uucuaagccacuauccucc

SEQ ID NO: 574991 - RNA, 19 nt, Artificial Sequence
  Description of Artificial Sequence: Synthetic oligonucleotide
  Sense strand starting at position 634 of SEQ ID NO: 318602
aggugcucuccuggaggua

SEQ ID NO: 574992 - RNA, 19 nt, Artificial Sequence
  Description of Artificial Sequence: Synthetic oligonucleotide
  Antisense strand to SEQ ID NO: 574991
uaccuccaggagagcaccu

SEQ ID NO: 574993 - RNA, 19 nt, Artificial Sequence
  Description of Artificial Sequence: Synthetic oligonucleotide
  Sense strand starting at position 635 of SEQ ID NO: 318602
ggugcucuccuggagguau

SEQ ID NO: 574994 - RNA, 19 nt, Artificial Sequence
  Description of Artificial Sequence: Synthetic oligonucleotide
  Antisense strand to SEQ ID NO: 574993
auaccuccaggagagcacc

SEQ ID NO: 574995 - RNA, 19 nt, Artificial Sequence
  Description of Artificial Sequence: Synthetic oligonucleotide
  Sense strand starting at position 1122 of SEQ ID NO: 318602
ucgauauucccacagcauc

SEQ ID NO: 574996 - RNA, 19 nt, Artificial Sequence
  Description of Artificial Sequence: Synthetic oligonucleotide
  Antisense strand to SEQ ID NO: 574995
gaugcugugggaauaucga

SEQ ID NO: 574997 - RNA, 19 nt, Artificial Sequence
  Description of Artificial Sequence: Synthetic oligonucleotide
  Sense strand starting at position 1289 of SEQ ID NO: 318602
caggaagugcuccgaaaca

SEQ ID NO: 574998 - RNA, 19 nt, Artificial Sequence
  Description of Artificial Sequence: Synthetic oligonucleotide
  Antisense strand to SEQ ID NO: 574997
uguuucggagcacuuccug

SEQ ID NO: 574999 - RNA, 19 nt, Artificial Sequence
  Description of Artificial Sequence: Synthetic oligonucleotide
  Sense strand starting at position 1393 of SEQ ID NO: 318602
aaacaagagucaucgggau

SEQ ID NO: 575000 - RNA, 19 nt, Artificial Sequence
  Description of Artificial Sequence: Synthetic oligonucleotide
  Antisense strand to SEQ ID NO: 574999
aucccgaugacucuuguuu

SEQ ID NO: 575001 - RNA, 19 nt, Artificial Sequence
  Description of Artificial Sequence: Synthetic oligonucleotide
  Sense strand starting at position 1395 of SEQ ID NO: 318602
acaagagucaucgggauga

SEQ ID NO: 575002 - RNA, 19 nt, Artificial Sequence
  Description of Artificial Sequence: Synthetic oligonucleotide
  Antisense strand to SEQ ID NO: 575001
ucaucccgaugacucuugu

SEQ ID NO: 575003 - RNA, 19 nt, Artificial Sequence
  Description of Artificial Sequence: Synthetic oligonucleotide
  Sense strand starting at position 1640 of SEQ ID NO: 318602
gggacuuucucuucucgaa

SEQ ID NO: 575004 - RNA, 19 nt, Artificial Sequence
  Description of Artificial Sequence: Synthetic oligonucleotide
  Antisense strand to SEQ ID NO: 575003
uucgagaagagaaaguccc

SEQ ID NO: 575005 - RNA, 19 nt, Artificial Sequence
  Description of Artificial Sequence: Synthetic oligonucleotide
  Sense strand starting at position 1644 of SEQ ID NO: 318602
cuuucucuucucgaaggua

SEQ ID NO: 575006 - RNA, 19 nt, Artificial Sequence
  Description of Artificial Sequence: Synthetic oligonucleotide
  Antisense strand to SEQ ID NO: 575005
uaccuucgagaagagaaag

SEQ ID NO: 575007 - RNA, 19 nt, Artificial Sequence
  Description of Artificial Sequence: Synthetic oligonucleotide
  Sense strand starting at position 2372 of SEQ ID NO: 318602
gcagcuauuccgcuaggcu

SEQ ID NO: 575008 - RNA, 19 nt, Artificial Sequence
  Description of Artificial Sequence: Synthetic oligonucleotide
  Antisense strand to SEQ ID NO: 575007
agccuagcggaauagcugc

SEQ ID NO: 575009 - RNA, 19 nt, Artificial Sequence
  Description of Artificial Sequence: Synthetic oligonucleotide
  Sense strand starting at position 2651 of SEQ ID NO: 318602
ucucuuauguuuccugaug

SEQ ID NO: 575010 - RNA, 19 nt, Artificial Sequence
  Description of Artificial Sequence: Synthetic oligonucleotide
  Antisense strand to SEQ ID NO: 575009
caucaggaaacauaagaga

SEQ ID NO: 575011 - RNA, 19 nt, Artificial Sequence
  Description of Artificial Sequence: Synthetic oligonucleotide
  Sense strand starting at position 2668 of SEQ ID NO: 318602
uggguuugcggauguauuu

SEQ ID NO: 575012 - RNA, 19 nt, Artificial Sequence
  Description of Artificial Sequence: Synthetic oligonucleotide
  Antisense strand to SEQ ID NO: 575011
aaauacauccgcaaaccca

SEQ ID NO: 575013 - RNA, 19 nt, Artificial Sequence
  Description of Artificial Sequence: Synthetic oligonucleotide
  Sense strand starting at position 2674 of SEQ ID NO: 318602
ugcggauguauuugcauau

SEQ ID NO: 575014 - RNA, 19 nt, Artificial Sequence
  Description of Artificial Sequence: Synthetic oligonucleotide
  Antisense strand to SEQ ID NO: 575013
auaugcaaauacauccgca

SEQ ID NO: 575015 - RNA, 19 nt, Artificial Sequence
  Description of Artificial Sequence: Synthetic oligonucleotide
  Sense strand starting at position 2675 of SEQ ID NO: 318602
gcggauguauuugcauauu

SEQ ID NO: 575016 - RNA, 19 nt, Artificial Sequence
  Description of Artificial Sequence: Synthetic oligonucleotide
  Antisense strand to SEQ ID NO: 575015
aauaugcaaauacauccgc

SEQ ID NO: 575017 - RNA, 19 nt, Artificial Sequence
  Description of Artificial Sequence: Synthetic oligonucleotide
  Sense strand starting at position 2838 of SEQ ID NO: 318602
uguccuauagacgguuaua

SEQ ID NO: 575018 - RNA, 19 nt, Artificial Sequence
  Description of Artificial Sequence: Synthetic oligonucleotide
  Antisense strand to SEQ ID NO: 575017
uauaaccgucuauaggaca

SEQ ID NO: 575019 - RNA, 19 nt, Artificial Sequence
  Description of Artificial Sequence: Synthetic oligonucleotide
  Sense strand starting at position 2841 of SEQ ID NO: 318602
ccuauagacgguuauaaca

SEQ ID NO: 575020 - RNA, 19 nt, Artificial Sequence
  Description of Artificial Sequence: Synthetic oligonucleotide
  Antisense strand to SEQ ID NO: 575019
uguuauaaccgucuauagg

SEQ ID NO: 575021 - RNA, 19 nt, Artificial Sequence
  Description of Artificial Sequence: Synthetic oligonucleotide
  Sense strand starting at position 2913 of SEQ ID NO: 318602
gucugcaaggguuauuauu

SEQ ID NO: 575022 - RNA, 19 nt, Artificial Sequence
  Description of Artificial Sequence: Synthetic oligonucleotide
  Antisense strand to SEQ ID NO: 575021
aauaauaacccuugcagac

SEQ ID NO: 575023 - RNA, 19 nt, Artificial Sequence
  Description of Artificial Sequence: Synthetic oligonucleotide
  Sense strand starting at position 2925 of SEQ ID NO: 318602
uauuauuuggaccguguca

SEQ ID NO: 575024 - RNA, 19 nt, Artificial Sequence
  Description of Artificial Sequence: Synthetic oligonucleotide
  Antisense strand to SEQ ID NO: 575023
ugacacgguccaaauaaua

SEQ ID NO: 575025 - RNA, 19 nt, Artificial Sequence
  Description of Artificial Sequence: Synthetic oligonucleotide
  Sense strand starting at position 2927 of SEQ ID NO: 318602
uuauuuggaccgugucaua

SEQ ID NO: 575026 - RNA, 19 nt, Artificial Sequence
  Description of Artificial Sequence: Synthetic oligonucleotide
  Antisense strand to SEQ ID NO: 575025
uaugacacgguccaaauaa

SEQ ID NO: 575027 - RNA, 19 nt, Artificial Sequence
  Description of Artificial Sequence: Synthetic oligonucleotide
  Sense strand starting at position 3050 of SEQ ID NO: 318602
uccuuugaacagugugcaa

SEQ ID NO: 575028 - RNA, 19 nt, Artificial Sequence
  Description of Artificial Sequence: Synthetic oligonucleotide
  Antisense strand to SEQ ID NO: 575027
uugcacacuguucaaagga

SEQ ID NO: 575029 - RNA, 19 nt, Artificial Sequence
  Description of Artificial Sequence: Synthetic oligonucleotide
  Sense strand starting at position 3150 of SEQ ID NO: 318602
guugcuaagccguucggaa

SEQ ID NO: 575030 - RNA, 19 nt, Artificial Sequence
  Description of Artificial Sequence: Synthetic oligonucleotide
  Antisense strand to SEQ ID NO: 575029
uuccgaacggcuuagcaac

SEQ ID NO: 575031 - RNA, 19 nt, Artificial Sequence
  Description of Artificial Sequence: Synthetic oligonucleotide
  Sense strand starting at position 3151 of SEQ ID NO: 318602
uugcuaagccguucggaau

SEQ ID NO: 575032 - RNA, 19 nt, Artificial Sequence
  Description of Artificial Sequence: Synthetic oligonucleotide
  Antisense strand to SEQ ID NO: 575031
auuccgaacggcuuagcaa

SEQ ID NO: 575033 - RNA, 19 nt, Artificial Sequence
  Description of Artificial Sequence: Synthetic oligonucleotide
  Sense strand starting at position 3182 of SEQ ID NO: 318602
gcaggagugccuggaauug

SEQ ID NO: 575034 - RNA, 19 nt, Artificial Sequence
  Description of Artificial Sequence: Synthetic oligonucleotide
  Antisense strand to SEQ ID NO: 575033
caauuccaggcacuccugc

SEQ ID NO: 575035 - RNA, 19 nt, Artificial Sequence
  Description of Artificial Sequence: Synthetic oligonucleotide
  Sense strand starting at position 3194 of SEQ ID NO: 318602
ggaauuguagagggucuuu

SEQ ID NO: 575036 - RNA, 19 nt, Artificial Sequence
  Description of Artificial Sequence: Synthetic oligonucleotide
  Antisense strand to SEQ ID NO: 575035
aaagacccucuacaauucc

SEQ ID NO: 575037 - RNA, 19 nt, Artificial Sequence
  Description of Artificial Sequence: Synthetic oligonucleotide
  Sense strand starting at position 3233 of SEQ ID NO: 318602
gucgcugaccguucucauu

SEQ ID NO: 575038 - RNA, 19 nt, Artificial Sequence
  Description of Artificial Sequence: Synthetic oligonucleotide
  Antisense strand to SEQ ID NO: 575037
aaugagaacggucagcgac

SEQ ID NO: 575039 - RNA, 19 nt, Artificial Sequence
  Description of Artificial Sequence: Synthetic oligonucleotide
  Sense strand starting at position 3239 of SEQ ID NO: 318602
gaccguucucauugaguca

SEQ ID NO: 575040 - RNA, 19 nt, Artificial Sequence
  Description of Artificial Sequence: Synthetic oligonucleotide
  Antisense strand to SEQ ID NO: 575039
ugacucaaugagaacgguc

SEQ ID NO: 575041 - RNA, 19 nt, Artificial Sequence
  Description of Artificial Sequence: Synthetic oligonucleotide
  Sense strand starting at position 3349 of SEQ ID NO: 318602
ccaagaggguugcuuccau

SEQ ID NO: 575042 - RNA, 19 nt, Artificial Sequence
  Description of Artificial Sequence: Synthetic oligonucleotide
  Antisense strand to SEQ ID NO: 575041
auggaagcaacccucuugg

SEQ ID NO: 575043 - RNA, 19 nt, Artificial Sequence
  Description of Artificial Sequence: Synthetic oligonucleotide
  Sense strand starting at position 3739 of SEQ ID NO: 318602
aaggcccuguguucuauaa

SEQ ID NO: 575044 - RNA, 19 nt, Artificial Sequence
  Description of Artificial Sequence: Synthetic oligonucleotide
  Antisense strand to SEQ ID NO: 575043
uuauagaacacagggccuu

SEQ ID NO: 575045 - RNA, 19 nt, Artificial Sequence
  Description of Artificial Sequence: Synthetic oligonucleotide
  Sense strand starting at position 3824 of SEQ ID NO: 318602
ccuggagcugggugugaaa

SEQ ID NO: 575046 - RNA, 19 nt, Artificial Sequence
  Description of Artificial Sequence: Synthetic oligonucleotide
  Antisense strand to SEQ ID NO: 575045
uuucacacccagcuccagg

SEQ ID NO: 575047 - RNA, 19 nt, Artificial Sequence
  Description of Artificial Sequence: Synthetic oligonucleotide
  Sense strand starting at position 3831 of SEQ ID NO: 318602
cugggugugaaaugggaau

SEQ ID NO: 575048 - RNA, 19 nt, Artificial Sequence
  Description of Artificial Sequence: Synthetic oligonucleotide
  Antisense strand to SEQ ID NO: 575047
auucccauuucacacccag

SEQ ID NO: 575049 - RNA, 19 nt, Artificial Sequence
  Description of Artificial Sequence: Synthetic oligonucleotide
  Sense strand starting at position 3833 of SEQ ID NO: 318602
gggugugaaaugggaauua

SEQ ID NO: 575050 - RNA, 19 nt, Artificial Sequence
  Description of Artificial Sequence: Synthetic oligonucleotide
  Antisense strand to SEQ ID NO: 575049
uaauucccauuucacaccc

SEQ ID NO: 575051 - RNA, 19 nt, Artificial Sequence
  Description of Artificial Sequence: Synthetic oligonucleotide
  Sense strand starting at position 3906 of SEQ ID NO: 318602
gcacaauggugacaauuuc

SEQ ID NO: 575052 - RNA, 19 nt, Artificial Sequence
  Description of Artificial Sequence: Synthetic oligonucleotide
  Antisense strand to SEQ ID NO: 575051
gaaauugucaccauugugc

SEQ ID NO: 575053 - RNA, 19 nt, Artificial Sequence
  Description of Artificial Sequence: Synthetic oligonucleotide
  Sense strand starting at position 151 of SEQ ID NO: 318603
gucauccugcaacauaaga

SEQ ID NO: 575054 - RNA, 19 nt, Artificial Sequence
  Description of Artificial Sequence: Synthetic oligonucleotide
  Antisense strand to SEQ ID NO: 575053
ucuuauguugcaggaugac

SEQ ID NO: 575055 - RNA, 19 nt, Artificial Sequence
  Description of Artificial Sequence: Synthetic oligonucleotide
  Sense strand starting at position 218 of SEQ ID NO: 318603
gaaggaauauuaucgcaau

SEQ ID NO: 575056 - RNA, 19 nt, Artificial Sequence
  Description of Artificial Sequence: Synthetic oligonucleotide
  Antisense strand to SEQ ID NO: 575055
auugcgauaauauuccuuc

SEQ ID NO: 575057 - RNA, 19 nt, Artificial Sequence
  Description of Artificial Sequence: Synthetic oligonucleotide
  Sense strand starting at position 258 of SEQ ID NO: 318603
uucugaugugcacacaauu

SEQ ID NO: 575058 - RNA, 19 nt, Artificial Sequence
  Description of Artificial Sequence: Synthetic oligonucleotide
  Antisense strand to SEQ ID NO: 575057
aauugugugcacaucagaa

SEQ ID NO: 575059 - RNA, 19 nt, Artificial Sequence
  Description of Artificial Sequence: Synthetic oligonucleotide
  Sense strand starting at position 525 of SEQ ID NO: 318603
ggagacauguccuuuccau

SEQ ID NO: 575060 - RNA, 19 nt, Artificial Sequence
  Description of Artificial Sequence: Synthetic oligonucleotide
  Antisense strand to SEQ ID NO: 575059
auggaaaggacaugucucc

SEQ ID NO: 575061 - RNA, 19 nt, Artificial Sequence
  Description of Artificial Sequence: Synthetic oligonucleotide
  Sense strand starting at position 557 of SEQ ID NO: 318603
ccaguagagcuguaggacu

SEQ ID NO: 575062 - RNA, 19 nt, Artificial Sequence
  Description of Artificial Sequence: Synthetic oligonucleotide
  Antisense strand to SEQ ID NO: 575061
aguccuacagcucuacugg

SEQ ID NO: 575063 - RNA, 19 nt, Artificial Sequence
  Description of Artificial Sequence: Synthetic oligonucleotide
  Sense strand starting at position 600 of SEQ ID NO: 318603
uccugaucuccaggcacua

SEQ ID NO: 575064 - RNA, 19 nt, Artificial Sequence
  Description of Artificial Sequence: Synthetic oligonucleotide
  Antisense strand to SEQ ID NO: 575063
uagugccuggagaucagga

SEQ ID NO: 575065 - RNA, 19 nt, Artificial Sequence
  Description of Artificial Sequence: Synthetic oligonucleotide
  Sense strand starting at position 790 of SEQ ID NO: 318603
gggaaauaguucccuaaua

SEQ ID NO: 575066 - RNA, 19 nt, Artificial Sequence
  Description of Artificial Sequence: Synthetic oligonucleotide
  Antisense strand to SEQ ID NO: 575065
uauuagggaacuauuuccc

SEQ ID NO: 575067 - RNA, 19 nt, Artificial Sequence
  Description of Artificial Sequence: Synthetic oligonucleotide
  Sense strand starting at position 791 of SEQ ID NO: 318603
ggaaauaguucccuaauac

SEQ ID NO: 575068 - RNA, 19 nt, Artificial Sequence
  Description of Artificial Sequence: Synthetic oligonucleotide
  Antisense strand to SEQ ID NO: 575067
guauuagggaacuauuucc

SEQ ID NO: 575069 - RNA, 19 nt, Artificial Sequence
  Description of Artificial Sequence: Synthetic oligonucleotide
  Sense strand starting at position 850 of SEQ ID NO: 318603
agguaagcuucucuaacca

SEQ ID NO: 575070 - RNA, 19 nt, Artificial Sequence
  Description of Artificial Sequence: Synthetic oligonucleotide
  Antisense strand to SEQ ID NO: 575069
ugguuagagaagcuuaccu

SEQ ID NO: 575071 - RNA, 19 nt, Artificial Sequence
  Description of Artificial Sequence: Synthetic oligonucleotide
  Sense strand starting at position 882 of SEQ ID NO: 318603
gauaaagagguguggucuu

SEQ ID NO: 575072 - RNA, 19 nt, Artificial Sequence
  Description of Artificial Sequence: Synthetic oligonucleotide
  Antisense strand to SEQ ID NO: 575071
aagaccacaccucuuuauc

SEQ ID NO: 575073 - RNA, 19 nt, Artificial Sequence
  Description of Artificial Sequence: Synthetic oligonucleotide
  Sense strand starting at position 1020 of SEQ ID NO: 318603
agaacuucuuaguuuaaga

SEQ ID NO: 575074 - RNA, 19 nt, Artificial Sequence
  Description of Artificial Sequence: Synthetic oligonucleotide
  Antisense strand to SEQ ID NO: 575073
ucuuaaacuaagaaguucu

SEQ ID NO: 575075 - RNA, 19 nt, Artificial Sequence
  Description of Artificial Sequence: Synthetic oligonucleotide
  Sense strand starting at position 1106 of SEQ ID NO: 318603
uguuuauauuuggucaucu

SEQ ID NO: 575076 - RNA, 19 nt, Artificial Sequence
  Description of Artificial Sequence: Synthetic oligonucleotide
  Antisense strand to SEQ ID NO: 575075
agaugaccaaauauaaaca

SEQ ID NO: 575077 - RNA, 19 nt, Artificial Sequence
  Description of Artificial Sequence: Synthetic oligonucleotide
  Sense strand starting at position 1107 of SEQ ID NO: 318603
guuuauauuuggucaucuu

SEQ ID NO: 575078 - RNA, 19 nt, Artificial Sequence
  Description of Artificial Sequence: Synthetic oligonucleotide
  Antisense strand to SEQ ID NO: 575077
aagaugaccaaauauaaac

SEQ ID NO: 575079 - RNA, 19 nt, Artificial Sequence
  Description of Artificial Sequence: Synthetic oligonucleotide
  Sense strand starting at position 1114 of SEQ ID NO: 318603
uuuggucaucuuuauauca

SEQ ID NO: 575080 - RNA, 19 nt, Artificial Sequence
  Description of Artificial Sequence: Synthetic oligonucleotide
  Antisense strand to SEQ ID NO: 575079
ugauauaaagaugaccaaa

SEQ ID NO: 575081 - RNA, 19 nt, Artificial Sequence
  Description of Artificial Sequence: Synthetic oligonucleotide
  Sense strand starting at position 1224 of SEQ ID NO: 318603
gccacaaucacggauguga

SEQ ID NO: 575082 - RNA, 19 nt, Artificial Sequence
  Description of Artificial Sequence: Synthetic oligonucleotide
  Antisense strand to SEQ ID NO: 575081
ucacauccgugauuguggc

SEQ ID NO: 575083 - RNA, 19 nt, Artificial Sequence
  Description of Artificial Sequence: Synthetic oligonucleotide
  Sense strand starting at position 1226 of SEQ ID NO: 318603
cacaaucacggaugugaua

SEQ ID NO: 575084 - RNA, 19 nt, Artificial Sequence
  Description of Artificial Sequence: Synthetic oligonucleotide
  Antisense strand to SEQ ID NO: 575083
uaucacauccgugauugug

SEQ ID NO: 575085 - RNA, 19 nt, Artificial Sequence
  Description of Artificial Sequence: Synthetic oligonucleotide
  Sense strand starting at position 1314 of SEQ ID NO: 318603
gcaugagagaguggauaua

SEQ ID NO: 575086 - RNA, 19 nt, Artificial Sequence
  Description of Artificial Sequence: Synthetic oligonucleotide
  Antisense strand to SEQ ID NO: 575085
uauauccacucucucaugc

SEQ ID NO: 575087 - RNA, 19 nt, Artificial Sequence
  Description of Artificial Sequence: Synthetic oligonucleotide
  Sense strand starting at position 1534 of SEQ ID NO: 318603
uguuuagaugcuggagaac

SEQ ID NO: 575088 - RNA, 19 nt, Artificial Sequence
  Description of Artificial Sequence: Synthetic oligonucleotide
  Antisense strand to SEQ ID NO: 575087
guucuccagcaucuaaaca

SEQ ID NO: 575089 - RNA, 19 nt, Artificial Sequence
  Description of Artificial Sequence: Synthetic oligonucleotide
  Sense strand starting at position 1698 of SEQ ID NO: 318603
gugaguuaucuugaucagc

SEQ ID NO: 575090 - RNA, 19 nt, Artificial Sequence
  Description of Artificial Sequence: Synthetic oligonucleotide
  Antisense strand to SEQ ID NO: 575089
gcugaucaagauaacucac

SEQ ID NO: 575091 - RNA, 19 nt, Artificial Sequence
  Description of Artificial Sequence: Synthetic oligonucleotide
  Sense strand starting at position 1700 of SEQ ID NO: 318603
gaguuaucuugaucagcag

SEQ ID NO: 575092 - RNA, 19 nt, Artificial Sequence
  Description of Artificial Sequence: Synthetic oligonucleotide
  Antisense strand to SEQ ID NO: 575091
cugcugaucaagauaacuc

SEQ ID NO: 575093 - RNA, 19 nt, Artificial Sequence
  Description of Artificial Sequence: Synthetic oligonucleotide
  Sense strand starting at position 1814 of SEQ ID NO: 318603
ucaccuagucucgauucuu

SEQ ID NO: 575094 - RNA, 19 nt, Artificial Sequence
  Description of Artificial Sequence: Synthetic oligonucleotide
  Antisense strand to SEQ ID NO: 575093
aagaaucgagacuagguga

SEQ ID NO: 575095 - RNA, 19 nt, Artificial Sequence
  Description of Artificial Sequence: Synthetic oligonucleotide
  Sense strand starting at position 2600 of SEQ ID NO: 318603
cagcgauguggcucguagu

SEQ ID NO: 575096 - RNA, 19 nt, Artificial Sequence
  Description of Artificial Sequence: Synthetic oligonucleotide
  Antisense strand to SEQ ID NO: 575095
acuacgagccacaucgcug

SEQ ID NO: 575097 - RNA, 19 nt, Artificial Sequence
  Description of Artificial Sequence: Synthetic oligonucleotide
  Sense strand starting at position 2839 of SEQ ID NO: 318603
uggaguucuaucgugcugu

SEQ ID NO: 575098 - RNA, 19 nt, Artificial Sequence
  Description of Artificial Sequence: Synthetic oligonucleotide
  Antisense strand to SEQ ID NO: 575097
acagcacgauagaacucca

SEQ ID NO: 575099 - RNA, 19 nt, Artificial Sequence
  Description of Artificial Sequence: Synthetic oligonucleotide
  Sense strand starting at position 2841 of SEQ ID NO: 318603
gaguucuaucgugcugugu

SEQ ID NO: 575100 - RNA, 19 nt, Artificial Sequence
  Description of Artificial Sequence: Synthetic oligonucleotide
  Antisense strand to SEQ ID NO: 575099
acacagcacgauagaacuc

SEQ ID NO: 575101 - RNA, 19 nt, Artificial Sequence
  Description of Artificial Sequence: Synthetic oligonucleotide
  Sense strand starting at position 2842 of SEQ ID NO: 318603
aguucuaucgugcuguguu

SEQ ID NO: 575102 - RNA, 19 nt, Artificial Sequence
  Description of Artificial Sequence: Synthetic oligonucleotide
  Antisense strand to SEQ ID NO: 575101
aacacagcacgauagaacu

SEQ ID NO: 575103 - RNA, 19 nt, Artificial Sequence
  Description of Artificial Sequence: Synthetic oligonucleotide
  Sense strand starting at position 2860 of SEQ ID NO: 318603
uucccugaauauucguaga

SEQ ID NO: 575104 - RNA, 19 nt, Artificial Sequence
  Description of Artificial Sequence: Synthetic oligonucleotide
  Antisense strand to SEQ ID NO: 575103
ucuacgaauauucagggaa

SEQ ID NO: 575105 - RNA, 19 nt, Artificial Sequence
  Description of Artificial Sequence: Synthetic oligonucleotide
  Sense strand starting at position 2862 of SEQ ID NO: 318603
cccugaauauucguagaaa

SEQ ID NO: 575106 - RNA, 19 nt, Artificial Sequence
  Description of Artificial Sequence: Synthetic oligonucleotide
  Antisense strand to SEQ ID NO: 575105
uuucuacgaauauucaggg

SEQ ID NO: 575107 - RNA, 19 nt, Artificial Sequence
  Description of Artificial Sequence: Synthetic oligonucleotide
  Sense strand starting at position 2865 of SEQ ID NO: 318603
ugaauauucguagaaaugu

SEQ ID NO: 575108 - RNA, 19 nt, Artificial Sequence
  Description of Artificial Sequence: Synthetic oligonucleotide
  Antisense strand to SEQ ID NO: 575107
acauuucuacgaauauuca

SEQ ID NO: 575109 - RNA, 19 nt, Artificial Sequence
  Description of Artificial Sequence: Synthetic oligonucleotide
  Sense strand starting at position 3004 of SEQ ID NO: 318603
gcccucacccacuaguuau

SEQ ID NO: 575110 - RNA, 19 nt, Artificial Sequence
  Description of Artificial Sequence: Synthetic oligonucleotide
  Antisense strand to SEQ ID NO: 575109
auaacuagugggugagggc

SEQ ID NO: 575111 - RNA, 19 nt, Artificial Sequence
  Description of Artificial Sequence: Synthetic oligonucleotide
  Sense strand starting at position 3010 of SEQ ID NO: 318603
acccacuaguuauuaggaa

SEQ ID NO: 575112 - RNA, 19 nt, Artificial Sequence
  Description of Artificial Sequence: Synthetic oligonucleotide
  Antisense strand to SEQ ID NO: 575111
uuccuaauaacuagugggu

SEQ ID NO: 575113 - RNA, 19 nt, Artificial Sequence
  Description of Artificial Sequence: Synthetic oligonucleotide
  Sense strand starting at position 3046 of SEQ ID NO: 318603
guauaccuucuacaguauu

SEQ ID NO: 575114 - RNA, 19 nt, Artificial Sequence
  Description of Artificial Sequence: Synthetic oligonucleotide
  Antisense strand to SEQ ID NO: 575113
aauacuguagaagguauac

SEQ ID NO: 575115 - RNA, 19 nt, Artificial Sequence
  Description of Artificial Sequence: Synthetic oligonucleotide
  Sense strand starting at position 3195 of SEQ ID NO: 318603
guguaccacccuuauuaua

SEQ ID NO: 575116 - RNA, 19 nt, Artificial Sequence
  Description of Artificial Sequence: Synthetic oligonucleotide
  Antisense strand to SEQ ID NO: 575115
uauaauaagggugguacac

SEQ ID NO: 575117 - RNA, 19 nt, Artificial Sequence
  Description of Artificial Sequence: Synthetic oligonucleotide
  Sense strand starting at position 3232 of SEQ ID NO: 318603
ccuuucgaccuggauauua

SEQ ID NO: 575118 - RNA, 19 nt, Artificial Sequence
  Description of Artificial Sequence: Synthetic oligonucleotide
  Antisense strand to SEQ ID NO: 575117
uaauauccaggucgaaagg

SEQ ID NO: 575119 - RNA, 19 nt, Artificial Sequence
  Description of Artificial Sequence: Synthetic oligonucleotide
  Sense strand starting at position 3280 of SEQ ID NO: 318603
cuuugaauauugguaguaa

SEQ ID NO: 575120 - RNA, 19 nt, Artificial Sequence
  Description of Artificial Sequence: Synthetic oligonucleotide
  Antisense strand to SEQ ID NO: 575119
uuacuaccaauauucaaag

SEQ ID NO: 575121 - RNA, 19 nt, Artificial Sequence
  Description of Artificial Sequence: Synthetic oligonucleotide
  Sense strand starting at position 3435 of SEQ ID NO: 318603
cguuauuaagaguaauauc

SEQ ID NO: 575122 - RNA, 19 nt, Artificial Sequence
  Description of Artificial Sequence: Synthetic oligonucleotide
  Antisense strand to SEQ ID NO: 575121
gauauuacucuuaauaacg

SEQ ID NO: 575123 - RNA, 19 nt, Artificial Sequence
  Description of Artificial Sequence: Synthetic oligonucleotide
  Sense strand starting at position 3510 of SEQ ID NO: 318603
gugauauugucaguaauau

SEQ ID NO: 575124 - RNA, 19 nt, Artificial Sequence
  Description of Artificial Sequence: Synthetic oligonucleotide
  Antisense strand to SEQ ID NO: 575123
auauuacugacaauaucac

SEQ ID NO: 575125 - RNA, 19 nt, Artificial Sequence
  Description of Artificial Sequence: Synthetic oligonucleotide
  Sense strand starting at position 3511 of SEQ ID NO: 318603
ugauauugucaguaauauc

SEQ ID NO: 575126 - RNA, 19 nt, Artificial Sequence
  Description of Artificial Sequence: Synthetic oligonucleotide
  Antisense strand to SEQ ID NO: 575125
gauauuacugacaauauca

SEQ ID NO: 575127 - RNA, 19 nt, Artificial Sequence
  Description of Artificial Sequence: Synthetic oligonucleotide
  Sense strand starting at position 3742 of SEQ ID NO: 318603
ugcgacauugggcauaaua

SEQ ID NO: 575128 - RNA, 19 nt, Artificial Sequence
  Description of Artificial Sequence: Synthetic oligonucleotide
  Antisense strand to SEQ ID NO: 575127
uauuaugcccaaugucgca

SEQ ID NO: 575129 - RNA, 19 nt, Artificial Sequence
  Description of Artificial Sequence: Synthetic oligonucleotide
  Sense strand starting at position 3744 of SEQ ID NO: 318603
cgacauugggcauaauauu

SEQ ID NO: 575130 - RNA, 19 nt, Artificial Sequence
  Description of Artificial Sequence: Synthetic oligonucleotide
  Antisense strand to SEQ ID NO: 575129
aauauuaugcccaaugucg

SEQ ID NO: 575131 - RNA, 19 nt, Artificial Sequence
  Description of Artificial Sequence: Synthetic oligonucleotide
  Sense strand starting at position 3964 of SEQ ID NO: 318603
ugcgcuguugggaguaaca

SEQ ID NO: 575132 - RNA, 19 nt, Artificial Sequence
  Description of Artificial Sequence: Synthetic oligonucleotide
  Antisense strand to SEQ ID NO: 575131
uguuacucccaacagcgca

SEQ ID NO: 575133 - RNA, 19 nt, Artificial Sequence
  Description of Artificial Sequence: Synthetic oligonucleotide
  Sense strand starting at position 126 of SEQ ID NO: 318604
gcaaacuaucaguaagccu

SEQ ID NO: 575134 - RNA, 19 nt, Artificial Sequence
  Description of Artificial Sequence: Synthetic oligonucleotide
  Antisense strand to SEQ ID NO: 575133
aggcuuacugauaguuugc

SEQ ID NO: 575135 - RNA, 19 nt, Artificial Sequence
  Description of Artificial Sequence: Synthetic oligonucleotide
  Sense strand starting at position 164 of SEQ ID NO: 318604
auuccaagauacguggaua

SEQ ID NO: 575136 - RNA, 19 nt, Artificial Sequence
  Description of Artificial Sequence: Synthetic oligonucleotide
  Antisense strand to SEQ ID NO: 575135
uauccacguaucuuggaau

SEQ ID NO: 575137 - RNA, 19 nt, Artificial Sequence
  Description of Artificial Sequence: Synthetic oligonucleotide
  Sense strand starting at position 167 of SEQ ID NO: 318604
ccaagauacguggauaccu

SEQ ID NO: 575138 - RNA, 19 nt, Artificial Sequence
  Description of Artificial Sequence: Synthetic oligonucleotide
  Antisense strand to SEQ ID NO: 575137
agguauccacguaucuugg

SEQ ID NO: 575139 - RNA, 19 nt, Artificial Sequence
  Description of Artificial Sequence: Synthetic oligonucleotide
  Sense strand starting at position 335 of SEQ ID NO: 318604
gaucuugagcaguagcaca

SEQ ID NO: 575140 - RNA, 19 nt, Artificial Sequence
  Description of Artificial Sequence: Synthetic oligonucleotide
  Antisense strand to SEQ ID NO: 575139
ugugcuacugcucaagauc

SEQ ID NO: 575141 - RNA, 19 nt, Artificial Sequence
  Description of Artificial Sequence: Synthetic oligonucleotide
  Sense strand starting at position 340 of SEQ ID NO: 318604
ugagcaguagcacauaaau

SEQ ID NO: 575142 - RNA, 19 nt, Artificial Sequence
  Description of Artificial Sequence: Synthetic oligonucleotide
  Antisense strand to SEQ ID NO: 575141
auuuaugugcuacugcuca

SEQ ID NO: 575143 - RNA, 19 nt, Artificial Sequence
  Description of Artificial Sequence: Synthetic oligonucleotide
  Sense strand starting at position 396 of SEQ ID NO: 318604
aggcauaaauuagcuaauu

SEQ ID NO: 575144 - RNA, 19 nt, Artificial Sequence
  Description of Artificial Sequence: Synthetic oligonucleotide
  Antisense strand to SEQ ID NO: 575143
aauuagcuaauuuaugccu

SEQ ID NO: 575145 - RNA, 19 nt, Artificial Sequence
  Description of Artificial Sequence: Synthetic oligonucleotide
  Sense strand starting at position 407 of SEQ ID NO: 318604
agcuaauuucuguaugcgu

SEQ ID NO: 575146 - RNA, 19 nt, Artificial Sequence
  Description of Artificial Sequence: Synthetic oligonucleotide
  Antisense strand to SEQ ID NO: 575145
acgcauacagaaauuagcu

SEQ ID NO: 575147 - RNA, 19 nt, Artificial Sequence
  Description of Artificial Sequence: Synthetic oligonucleotide
  Sense strand starting at position 409 of SEQ ID NO: 318604
cuaauuucuguaugcguua

SEQ ID NO: 575148 - RNA, 19 nt, Artificial Sequence
  Description of Artificial Sequence: Synthetic oligonucleotide
  Antisense strand to SEQ ID NO: 575147
uaacgcauacagaaauuag

SEQ ID NO: 575149 - RNA, 19 nt, Artificial Sequence
  Description of Artificial Sequence: Synthetic oligonucleotide
  Sense strand starting at position 410 of SEQ ID NO: 318604
uaauuucuguaugcguuaa

SEQ ID NO: 575150 - RNA, 19 nt, Artificial Sequence
  Description of Artificial Sequence: Synthetic oligonucleotide
  Antisense strand to SEQ ID NO: 575149
uuaacgcauacagaaauua

SEQ ID NO: 575151 - RNA, 19 nt, Artificial Sequence
  Description of Artificial Sequence: Synthetic oligonucleotide
  Sense strand starting at position 412 of SEQ ID NO: 318604
auuucuguaugcguuaaag

SEQ ID NO: 575152 - RNA, 19 nt, Artificial Sequence
  Description of Artificial Sequence: Synthetic oligonucleotide
  Antisense strand to SEQ ID NO: 575151
cuuuaacgcauacagaaau

SEQ ID NO: 575153 - RNA, 19 nt, Artificial Sequence
  Description of Artificial Sequence: Synthetic oligonucleotide
  Sense strand starting at position 423 of SEQ ID NO: 318604
cguuaaagggccuaauaaa

SEQ ID NO: 575154 - RNA, 19 nt, Artificial Sequence
  Description of Artificial Sequence: Synthetic oligonucleotide
  Antisense strand to SEQ ID NO: 575153
uuuauuaggcccuuuaacg

SEQ ID NO: 575155 - RNA, 19 nt, Artificial Sequence
  Description of Artificial Sequence: Synthetic oligonucleotide
  Sense strand starting at position 517 of SEQ ID NO: 318604
ucuagcucucuagaugaaa

SEQ ID NO: 575156 - RNA, 19 nt, Artificial Sequence
  Description of Artificial Sequence: Synthetic oligonucleotide
  Antisense strand to SEQ ID NO: 575155
uuucaucuagagagcuaga

SEQ ID NO: 575157 - RNA, 19 nt, Artificial Sequence
  Description of Artificial Sequence: Synthetic oligonucleotide
  Sense strand starting at position 520 of SEQ ID NO: 318604
agcucucuagaugaaacuu

SEQ ID NO: 575158 - RNA, 19 nt, Artificial Sequence
  Description of Artificial Sequence: Synthetic oligonucleotide
  Antisense strand to SEQ ID NO: 575157
aaguuucaucuagagagcu

SEQ ID NO: 575159 - RNA, 19 nt, Artificial Sequence
  Description of Artificial Sequence: Synthetic oligonucleotide
  Sense strand starting at position 531 of SEQ ID NO: 318604
ugaaacuugcauuagcacu

SEQ ID NO: 575160 - RNA, 19 nt, Artificial Sequence
  Description of Artificial Sequence: Synthetic oligonucleotide
  Antisense strand to SEQ ID NO: 575159
agugcuaaugcaaguuuca

SEQ ID NO: 575161 - RNA, 19 nt, Artificial Sequence
  Description of Artificial Sequence: Synthetic oligonucleotide
  Sense strand starting at position 646 of SEQ ID NO: 318604
ugguaaugucuucaagggu

SEQ ID NO: 575162 - RNA, 19 nt, Artificial Sequence
  Description of Artificial Sequence: Synthetic oligonucleotide
  Antisense strand to SEQ ID NO: 575161
acccuugaagacauuacca

SEQ ID NO: 575163 - RNA, 19 nt, Artificial Sequence
  Description of Artificial Sequence: Synthetic oligonucleotide
  Sense strand starting at position 836 of SEQ ID NO: 318604
uuugaaacugucgaucaua

SEQ ID NO: 575164 - RNA, 19 nt, Artificial Sequence
  Description of Artificial Sequence: Synthetic oligonucleotide
  Antisense strand to SEQ ID NO: 575163
uaugaucgacaguuucaaa

SEQ ID NO: 575165 - RNA, 19 nt, Artificial Sequence
  Description of Artificial Sequence: Synthetic oligonucleotide
  Sense strand starting at position 839 of SEQ ID NO: 318604
gaaacugucgaucauaacu

SEQ ID NO: 575166 - RNA, 19 nt, Artificial Sequence
  Description of Artificial Sequence: Synthetic oligonucleotide
  Antisense strand to SEQ ID NO: 575165
aguuaugaucgacaguuuc

SEQ ID NO: 575167 - RNA, 19 nt, Artificial Sequence
  Description of Artificial Sequence: Synthetic oligonucleotide
  Sense strand starting at position 1001 of SEQ ID NO: 318604
uaaugagccuguuccaaug

SEQ ID NO: 575168 - RNA, 19 nt, Artificial Sequence
  Description of Artificial Sequence: Synthetic oligonucleotide
  Antisense strand to SEQ ID NO: 575167
cauuggaacaggcucauua

SEQ ID NO: 575169 - RNA, 19 nt, Artificial Sequence
  Description of Artificial Sequence: Synthetic oligonucleotide
  Sense strand starting at position 1189 of SEQ ID NO: 318604
acacgacuucgguauaaca

SEQ ID NO: 575170 - RNA, 19 nt, Artificial Sequence
  Description of Artificial Sequence: Synthetic oligonucleotide
  Antisense strand to SEQ ID NO: 575169
uguuauaccgaagucgugu

SEQ ID NO: 575171 - RNA, 19 nt, Artificial Sequence
  Description of Artificial Sequence: Synthetic oligonucleotide
  Sense strand starting at position 2084 of SEQ ID NO: 318604
aagucagauguuggaagau

SEQ ID NO: 575172 - RNA, 19 nt, Artificial Sequence
  Description of Artificial Sequence: Synthetic oligonucleotide
  Antisense strand to SEQ ID NO: 575171
aucuuccaacaucugacuu

SEQ ID NO: 575173 - RNA, 19 nt, Artificial Sequence
  Description of Artificial Sequence: Synthetic oligonucleotide
  Sense strand starting at position 2384 of SEQ ID NO: 318604
cguuuaauuccagaaagug

SEQ ID NO: 575174 - RNA, 19 nt, Artificial Sequence
  Description of Artificial Sequence: Synthetic oligonucleotide
  Antisense strand to SEQ ID NO: 575173
cacuuucuggaauuaaacg

SEQ ID NO: 575175 - RNA, 19 nt, Artificial Sequence
  Description of Artificial Sequence: Synthetic oligonucleotide
  Sense strand starting at position 2402 of SEQ ID NO: 318604
gcaagaaaucuuuggagua

SEQ ID NO: 575176 - RNA, 19 nt, Artificial Sequence
  Description of Artificial Sequence: Synthetic oligonucleotide
  Antisense strand to SEQ ID NO: 575175
uacuccaaagauuucuugc

SEQ ID NO: 575177 - RNA, 19 nt, Artificial Sequence
  Description of Artificial Sequence: Synthetic oligonucleotide
  Sense strand starting at position 2414 of SEQ ID NO: 318604
uggaguacuccuuauuccu

SEQ ID NO: 575178 - RNA, 19 nt, Artificial Sequence
  Description of Artificial Sequence: Synthetic oligonucleotide
  Antisense strand to SEQ ID NO: 575177
aggaauaaggaguacucca

SEQ ID NO: 575179 - RNA, 19 nt, Artificial Sequence
  Description of Artificial Sequence: Synthetic oligonucleotide
  Sense strand starting at position 2435 of SEQ ID NO: 318604
auugaaguccuggagaugu

SEQ ID NO: 575180 - RNA, 19 nt, Artificial Sequence
  Description of Artificial Sequence: Synthetic oligonucleotide
  Antisense strand to SEQ ID NO: 575179
acaucuccaggacuucaau

SEQ ID NO: 575181 - RNA, 19 nt, Artificial Sequence
  Description of Artificial Sequence: Synthetic oligonucleotide
  Sense strand starting at position 2747 of SEQ ID NO: 318604
gcgugaauuguccuuaugu

SEQ ID NO: 575182 - RNA, 19 nt, Artificial Sequence
  Description of Artificial Sequence: Synthetic oligonucleotide
  Antisense strand to SEQ ID NO: 575181
acauaaggacaauucacgc

SEQ ID NO: 575183 - RNA, 19 nt, Artificial Sequence
  Description of Artificial Sequence: Synthetic oligonucleotide
  Sense strand starting at position 2802 of SEQ ID NO: 318604
gaggaaugguaugggauuu

SEQ ID NO: 575184 - RNA, 19 nt, Artificial Sequence
  Description of Artificial Sequence: Synthetic oligonucleotide
  Antisense strand to SEQ ID NO: 575183
aaaucccauaccauuccuc

SEQ ID NO: 575185 - RNA, 19 nt, Artificial Sequence
  Description of Artificial Sequence: Synthetic oligonucleotide
  Sense strand starting at position 2841 of SEQ ID NO: 318604
ccugucgaagcucagaauu

SEQ ID NO: 575186 - RNA, 19 nt, Artificial Sequence
  Description of Artificial Sequence: Synthetic oligonucleotide
  Antisense strand to SEQ ID NO: 575185
aauucugagcuucgacagg

SEQ ID NO: 575187 - RNA, 19 nt, Artificial Sequence
  Description of Artificial Sequence: Synthetic oligonucleotide
  Sense strand starting at position 2851 of SEQ ID NO: 318604
cucagaauugcacaucgga

SEQ ID NO: 575188 - RNA, 19 nt, Artificial Sequence
  Description of Artificial Sequence: Synthetic oligonucleotide
  Antisense strand to SEQ ID NO: 575187
uccgaugugcaauucugag

SEQ ID NO: 575189 - RNA, 19 nt, Artificial Sequence
  Description of Artificial Sequence: Synthetic oligonucleotide
  Sense strand starting at position 2854 of SEQ ID NO: 318604
agaauugcacaucggagau

SEQ ID NO: 575190 - RNA, 19 nt, Artificial Sequence
  Description of Artificial Sequence: Synthetic oligonucleotide
  Antisense strand to SEQ ID NO: 575189
aucuccgaugugcaauucu

SEQ ID NO: 575191 - RNA, 19 nt, Artificial Sequence
  Description of Artificial Sequence: Synthetic oligonucleotide
  Sense strand starting at position 2910 of SEQ ID NO: 318604
gggaggaguguuuggaucu

SEQ ID NO: 575192 - RNA, 19 nt, Artificial Sequence
  Description of Artificial Sequence: Synthetic oligonucleotide
  Antisense strand to SEQ ID NO: 575191
agauccaaacacuccuccc

SEQ ID NO: 575193 - RNA, 19 nt, Artificial Sequence
  Description of Artificial Sequence: Synthetic oligonucleotide
  Sense strand starting at position 3102 of SEQ ID NO: 318604
acacgucccuuucuagaau

SEQ ID NO: 575194 - RNA, 19 nt, Artificial Sequence
  Description of Artificial Sequence: Synthetic oligonucleotide
  Antisense strand to SEQ ID NO: 575193
auucuagaaagggacgugu

SEQ ID NO: 575195 - RNA, 19 nt, Artificial Sequence
  Description of Artificial Sequence: Synthetic oligonucleotide
  Sense strand starting at position 3419 of SEQ ID NO: 318604
ucauaugaaccugggaagu

SEQ ID NO: 575196 - RNA, 19 nt, Artificial Sequence
  Description of Artificial Sequence: Synthetic oligonucleotide
  Antisense strand to SEQ ID NO: 575195
acuucccagguucauauga

SEQ ID NO: 575197 - RNA, 19 nt, Artificial Sequence
  Description of Artificial Sequence: Synthetic oligonucleotide
  Sense strand starting at position 3448 of SEQ ID NO: 318604
gugagcugaaauuguacua

SEQ ID NO: 575198 - RNA, 19 nt, Artificial Sequence
  Description of Artificial Sequence: Synthetic oligonucleotide
  Antisense strand to SEQ ID NO: 575197
uaguacaauuucagcucac

SEQ ID NO: 575199 - RNA, 19 nt, Artificial Sequence
  Description of Artificial Sequence: Synthetic oligonucleotide
  Sense strand starting at position 3530 of SEQ ID NO: 318604
gacauuaugcauugucaug

SEQ ID NO: 575200 - RNA, 19 nt, Artificial Sequence
  Description of Artificial Sequence: Synthetic oligonucleotide
  Antisense strand to SEQ ID NO: 575199
caugacaaugcauaauguc

SEQ ID NO: 575201 - RNA, 19 nt, Artificial Sequence
  Description of Artificial Sequence: Synthetic oligonucleotide
  Sense strand starting at position 3752 of SEQ ID NO: 318604
agagcuguuaaggagguau

SEQ ID NO: 575202 - RNA, 19 nt, Artificial Sequence
  Description of Artificial Sequence: Synthetic oligonucleotide
  Antisense strand to SEQ ID NO: 575201
auaccuccuuaacagcucu

SEQ ID NO: 575203 - RNA, 19 nt, Artificial Sequence
  Description of Artificial Sequence: Synthetic oligonucleotide
  Sense strand starting at position 3756 of SEQ ID NO: 318604
cuguuaaggagguaugcau

SEQ ID NO: 575204 - RNA, 19 nt, Artificial Sequence
  Description of Artificial Sequence: Synthetic oligonucleotide
  Antisense strand to SEQ ID NO: 575203
augcauaccuccuuaacag

SEQ ID NO: 575205 - RNA, 19 nt, Artificial Sequence
  Description of Artificial Sequence: Synthetic oligonucleotide
  Sense strand starting at position 3791 of SEQ ID NO: 318604
accugaaacuuugcaugca

SEQ ID NO: 575206 - RNA, 19 nt, Artificial Sequence
  Description of Artificial Sequence: Synthetic oligonucleotide
  Antisense strand to SEQ ID NO: 575205
ugcaugcaaaguuucaggu

SEQ ID NO: 575207 - RNA, 19 nt, Artificial Sequence
  Description of Artificial Sequence: Synthetic oligonucleotide
  Sense strand starting at position 3794 of SEQ ID NO: 318604
ugaaacuuugcaugcaaau

SEQ ID NO: 575208 - RNA, 19 nt, Artificial Sequence
  Description of Artificial Sequence: Synthetic oligonucleotide
  Antisense strand to SEQ ID NO: 575207
auuugcaugcaaaguuuca

SEQ ID NO: 575209 - RNA, 19 nt, Artificial Sequence
  Description of Artificial Sequence: Synthetic oligonucleotide
  Sense strand starting at position 3806 of SEQ ID NO: 318604
ugcaaauuuguuggcucaa

SEQ ID NO: 575210 - RNA, 19 nt, Artificial Sequence
  Description of Artificial Sequence: Synthetic oligonucleotide
  Antisense strand to SEQ ID NO: 575209
uugagccaacaaauuugca

SEQ ID NO: 575211 - RNA, 19 nt, Artificial Sequence
  Description of Artificial Sequence: Synthetic oligonucleotide
  Sense strand starting at position 3807 of SEQ ID NO: 318604
gcaaauuuguuggcucaau

SEQ ID NO: 575212 - RNA, 19 nt, Artificial Sequence
  Description of Artificial Sequence: Synthetic oligonucleotide
  Antisense strand to SEQ ID NO: 575211
auugagccaacaaauuugc

SEQ ID NO: 575213 - RNA, 19 nt, Artificial Sequence
  Description of Artificial Sequence: Synthetic oligonucleotide
  Sense strand starting at position 1 of SEQ ID NO: 318605
gaucguggauuugauuuau

SEQ ID NO: 575214 - RNA, 19 nt, Artificial Sequence
  Description of Artificial Sequence: Synthetic oligonucleotide
  Antisense strand to SEQ ID NO: 575213
auaaaucaaauccacgauc

SEQ ID NO: 575215 - RNA, 19 nt, Artificial Sequence
  Description of Artificial Sequence: Synthetic oligonucleotide
  Sense strand starting at position 28 of SEQ ID NO: 318605
accagagaaugcguuauca

SEQ ID NO: 575216 - RNA, 19 nt, Artificial Sequence
  Description of Artificial Sequence: Synthetic oligonucleotide
  Antisense strand to SEQ ID NO: 575215
ugauaacgcauucucuggu

SEQ ID NO: 575217 - RNA, 19 nt, Artificial Sequence
  Description of Artificial Sequence: Synthetic oligonucleotide
  Sense strand starting at position 30 of SEQ ID NO: 318605
cagagaaugcguuaucagu

SEQ ID NO: 575218 - RNA, 19 nt, Artificial Sequence
  Description of Artificial Sequence: Synthetic oligonucleotide
  Antisense strand to SEQ ID NO: 575217
acugauaacgcauucucug

SEQ ID NO: 575219 - RNA, 19 nt, Artificial Sequence
  Description of Artificial Sequence: Synthetic oligonucleotide
  Sense strand starting at position 32 of SEQ ID NO: 318605
gagaaugcguuaucaguag

SEQ ID NO: 575220 - RNA, 19 nt, Artificial Sequence
  Description of Artificial Sequence: Synthetic oligonucleotide
  Antisense strand to SEQ ID NO: 575219
cuacugauaacgcauucuc

SEQ ID NO: 575221 - RNA, 19 nt, Artificial Sequence
  Description of Artificial Sequence: Synthetic oligonucleotide
  Sense strand starting at position 82 of SEQ ID NO: 318605
agaggaaugcggcauauug

SEQ ID NO: 575222 - RNA, 19 nt, Artificial Sequence
  Description of Artificial Sequence: Synthetic oligonucleotide
  Antisense strand to SEQ ID NO: 575221
caauaugccgcauuccucu

SEQ ID NO: 575223 - RNA, 19 nt, Artificial Sequence
  Description of Artificial Sequence: Synthetic oligonucleotide
  Sense strand starting at position 173 of SEQ ID NO: 318605
acggguuggcacuacagaa

SEQ ID NO: 575224 - RNA, 19 nt, Artificial Sequence
  Description of Artificial Sequence: Synthetic oligonucleotide
  Antisense strand to SEQ ID NO: 575223
uucuguagugccaacccgu

SEQ ID NO: 575225 - RNA, 19 nt, Artificial Sequence
  Description of Artificial Sequence: Synthetic oligonucleotide
  Sense strand starting at position 272 of SEQ ID NO: 318605
gagugaacgccugagagau

SEQ ID NO: 575226 - RNA, 19 nt, Artificial Sequence
  Description of Artificial Sequence: Synthetic oligonucleotide
  Antisense strand to SEQ ID NO: 575225
aucucucaggcguucacuc

SEQ ID NO: 575227 - RNA, 19 nt, Artificial Sequence
  Description of Artificial Sequence: Synthetic oligonucleotide
  Sense strand starting at position 346 of SEQ ID NO: 318605
gcagucagcuaaguaugaa

SEQ ID NO: 575228 - RNA, 19 nt, Artificial Sequence
  Description of Artificial Sequence: Synthetic oligonucleotide
  Antisense strand to SEQ ID NO: 575227
uucauacuuagcugacugc

SEQ ID NO: 575229 - RNA, 19 nt, Artificial Sequence
  Description of Artificial Sequence: Synthetic oligonucleotide
  Sense strand starting at position 407 of SEQ ID NO: 318605
gucucaucuccuuaaggcu

SEQ ID NO: 575230 - RNA, 19 nt, Artificial Sequence
  Description of Artificial Sequence: Synthetic oligonucleotide
  Antisense strand to SEQ ID NO: 575229
agccuuaaggagaugagac

SEQ ID NO: 575231 - RNA, 19 nt, Artificial Sequence
  Description of Artificial Sequence: Synthetic oligonucleotide
  Sense strand starting at position 874 of SEQ ID NO: 318605
agaucugcucccgauuguu

SEQ ID NO: 575232 - RNA, 19 nt, Artificial Sequence
  Description of Artificial Sequence: Synthetic oligonucleotide
  Antisense strand to SEQ ID NO: 575231
aacaaucgggagcagaucu

SEQ ID NO: 575233 - RNA, 19 nt, Artificial Sequence
  Description of Artificial Sequence: Synthetic oligonucleotide
  Sense strand starting at position 1090 of SEQ ID NO: 318605
aucuaagauuaccucggua

SEQ ID NO: 575234 - RNA, 19 nt, Artificial Sequence
  Description of Artificial Sequence: Synthetic oligonucleotide
  Antisense strand to SEQ ID NO: 575233
uaccgagguaaucuuagau

SEQ ID NO: 575235 - RNA, 19 nt, Artificial Sequence
  Description of Artificial Sequence: Synthetic oligonucleotide
  Sense strand starting at position 1093 of SEQ ID NO: 318605
uaagauuaccucgguagcu

SEQ ID NO: 575236 - RNA, 19 nt, Artificial Sequence
  Description of Artificial Sequence: Synthetic oligonucleotide
  Antisense strand to SEQ ID NO: 575235
agcuaccgagguaaucuua

SEQ ID NO: 575237 - RNA, 19 nt, Artificial Sequence
  Description of Artificial Sequence: Synthetic oligonucleotide
  Sense strand starting at position 1094 of SEQ ID NO: 318605
aagauuaccucgguagcuu

SEQ ID NO: 575238 - RNA, 19 nt, Artificial Sequence
  Description of Artificial Sequence: Synthetic oligonucleotide
  Antisense strand to SEQ ID NO: 575237
aagcuaccgagguaaucuu

SEQ ID NO: 575239 - RNA, 19 nt, Artificial Sequence
  Description of Artificial Sequence: Synthetic oligonucleotide
  Sense strand starting at position 1095 of SEQ ID NO: 318605
agauuaccucgguagcuua

SEQ ID NO: 575240 - RNA, 19 nt, Artificial Sequence
  Description of Artificial Sequence: Synthetic oligonucleotide
  Antisense strand to SEQ ID NO: 575239
uaagcuaccgagguaaucu

SEQ ID NO: 575241 - RNA, 19 nt, Artificial Sequence
  Description of Artificial Sequence: Synthetic oligonucleotide
  Sense strand starting at position 1106 of SEQ ID NO: 318605
guagcuuauuuacugcgau

SEQ ID NO: 575242 - RNA, 19 nt, Artificial Sequence
  Description of Artificial Sequence: Synthetic oligonucleotide
  Antisense strand to SEQ ID NO: 575241
aucgcaguaaauaagcuac

SEQ ID NO: 575243 - RNA, 19 nt, Artificial Sequence
  Description of Artificial Sequence: Synthetic oligonucleotide
  Sense strand starting at position 1216 of SEQ ID NO: 318605
ggcguuguaacguaggaag

SEQ ID NO: 575244 - RNA, 19 nt, Artificial Sequence
  Description of Artificial Sequence: Synthetic oligonucleotide
  Antisense strand to SEQ ID NO: 575243
cuuccuacguuacaacgcc

SEQ ID NO: 575245 - RNA, 19 nt, Artificial Sequence
  Description of Artificial Sequence: Synthetic oligonucleotide
  Sense strand starting at position 1323 of SEQ ID NO: 318605
cgggaauguaugugggaga

SEQ ID NO: 575246 - RNA, 19 nt, Artificial Sequence
  Description of Artificial Sequence: Synthetic oligonucleotide
  Antisense strand to SEQ ID NO: 575245
ucucccacauacauucccg

SEQ ID NO: 575247 - RNA, 19 nt, Artificial Sequence
  Description of Artificial Sequence: Synthetic oligonucleotide
  Sense strand starting at position 1325 of SEQ ID NO: 318605
ggaauguaugugggagagu

SEQ ID NO: 575248 - RNA, 19 nt, Artificial Sequence
  Description of Artificial Sequence: Synthetic oligonucleotide
  Antisense strand to SEQ ID NO: 575247
acucucccacauacauucc

SEQ ID NO: 575249 - RNA, 19 nt, Artificial Sequence
  Description of Artificial Sequence: Synthetic oligonucleotide
  Sense strand starting at position 2314 of SEQ ID NO: 318605
uagguacuucuggagaagu

SEQ ID NO: 575250 - RNA, 19 nt, Artificial Sequence
  Description of Artificial Sequence: Synthetic oligonucleotide
  Antisense strand to SEQ ID NO: 575249
acuucuccagaaguaccua

SEQ ID NO: 575251 - RNA, 19 nt, Artificial Sequence
  Description of Artificial Sequence: Synthetic oligonucleotide
  Sense strand starting at position 2344 of SEQ ID NO: 318605
guuuguagcaggugaagga

SEQ ID NO: 575252 - RNA, 19 nt, Artificial Sequence
  Description of Artificial Sequence: Synthetic oligonucleotide
  Antisense strand to SEQ ID NO: 575251
uccuucaccugcuacaaac

SEQ ID NO: 575253 - RNA, 19 nt, Artificial Sequence
  Description of Artificial Sequence: Synthetic oligonucleotide
  Sense strand starting at position 2370 of SEQ ID NO: 318605
ggcaguccuuaauuaguca

SEQ ID NO: 575254 - RNA, 19 nt, Artificial Sequence
  Description of Artificial Sequence: Synthetic oligonucleotide
  Antisense strand to SEQ ID NO: 575253
ugacuaauuaaggacugcc

SEQ ID NO: 575255 - RNA, 19 nt, Artificial Sequence
  Description of Artificial Sequence: Synthetic oligonucleotide
  Sense strand starting at position 2374 of SEQ ID NO: 318605
guccuuaauuagucaccaa

SEQ ID NO: 575256 - RNA, 19 nt, Artificial Sequence
  Description of Artificial Sequence: Synthetic oligonucleotide
  Antisense strand to SEQ ID NO: 575255
uuggugacuaauuaaggac

SEQ ID NO: 575257 - RNA, 19 nt, Artificial Sequence
  Description of Artificial Sequence: Synthetic oligonucleotide
  Sense strand starting at position 2378 of SEQ ID NO: 318605
uuaauuagucaccaacugu

SEQ ID NO: 575258 - RNA, 19 nt, Artificial Sequence
  Description of Artificial Sequence: Synthetic oligonucleotide
  Antisense strand to SEQ ID NO: 575257
acaguuggugacuaauuaa

SEQ ID NO: 575259 - RNA, 19 nt, Artificial Sequence
  Description of Artificial Sequence: Synthetic oligonucleotide
  Sense strand starting at position 2452 of SEQ ID NO: 318605
gggaguucugacugcugga

SEQ ID NO: 575260 - RNA, 19 nt, Artificial Sequence
  Description of Artificial Sequence: Synthetic oligonucleotide
  Antisense strand to SEQ ID NO: 575259
uccagcagucagaacuccc

SEQ ID NO: 575261 - RNA, 19 nt, Artificial Sequence
  Description of Artificial Sequence: Synthetic oligonucleotide
  Sense strand starting at position 2471 of SEQ ID NO: 318605
cucuguuagcaccggacaa

SEQ ID NO: 575262 - RNA, 19 nt, Artificial Sequence
  Description of Artificial Sequence: Synthetic oligonucleotide
  Antisense strand to SEQ ID NO: 575261
uuguccggugcuaacagag

SEQ ID NO: 575263 - RNA, 19 nt, Artificial Sequence
  Description of Artificial Sequence: Synthetic oligonucleotide
  Sense strand starting at position 2472 of SEQ ID NO: 318605
ucuguuagcaccggacaaa

SEQ ID NO: 575264 - RNA, 19 nt, Artificial Sequence
  Description of Artificial Sequence: Synthetic oligonucleotide
  Antisense strand to SEQ ID NO: 575263
uuuguccggugcuaacaga

SEQ ID NO: 575265 - RNA, 19 nt, Artificial Sequence
  Description of Artificial Sequence: Synthetic oligonucleotide
  Sense strand starting at position 2658 of SEQ ID NO: 318605
aaacuucgcuggguuaagu

SEQ ID NO: 575266 - RNA, 19 nt, Artificial Sequence
  Description of Artificial Sequence: Synthetic oligonucleotide
  Antisense strand to SEQ ID NO: 575265
acuuaacccagcgaaguuu

SEQ ID NO: 575267 - RNA, 19 nt, Artificial Sequence
  Description of Artificial Sequence: Synthetic oligonucleotide
  Sense strand starting at position 2713 of SEQ ID NO: 318605
ugggcucacaggcagauau

SEQ ID NO: 575268 - RNA, 19 nt, Artificial Sequence
  Description of Artificial Sequence: Synthetic oligonucleotide
  Antisense strand to SEQ ID NO: 575267
auaucugccugugagccca

SEQ ID NO: 575269 - RNA, 19 nt, Artificial Sequence
  Description of Artificial Sequence: Synthetic oligonucleotide
  Sense strand starting at position 3368 of SEQ ID NO: 318605
acacaucucuccgcgaaug

SEQ ID NO: 575270 - RNA, 19 nt, Artificial Sequence
  Description of Artificial Sequence: Synthetic oligonucleotide
  Antisense strand to SEQ ID NO: 575269
cauucgcggagagaugugu

SEQ ID NO: 575271 - RNA, 19 nt, Artificial Sequence
  Description of Artificial Sequence: Synthetic oligonucleotide
  Sense strand starting at position 3388 of SEQ ID NO: 318605
guuccauccguguaaauau

SEQ ID NO: 575272 - RNA, 19 nt, Artificial Sequence
  Description of Artificial Sequence: Synthetic oligonucleotide
  Antisense strand to SEQ ID NO: 575271
auauuuacacggauggaac

SEQ ID NO: 575273 - RNA, 19 nt, Artificial Sequence
  Description of Artificial Sequence: Synthetic oligonucleotide
  Sense strand starting at position 3398 of SEQ ID NO: 318605
uguaaauaugccuggguga

SEQ ID NO: 575274 - RNA, 19 nt, Artificial Sequence
  Description of Artificial Sequence: Synthetic oligonucleotide
  Antisense strand to SEQ ID NO: 575273
ucacccaggcauauuuaca

SEQ ID NO: 575275 - RNA, 19 nt, Artificial Sequence
  Description of Artificial Sequence: Synthetic oligonucleotide
  Sense strand starting at position 3399 of SEQ ID NO: 318605
guaaauaugccugggugau

SEQ ID NO: 575276 - RNA, 19 nt, Artificial Sequence
  Description of Artificial Sequence: Synthetic oligonucleotide
  Antisense strand to SEQ ID NO: 575275
aucacccaggcauauuuac

SEQ ID NO: 575277 - RNA, 19 nt, Artificial Sequence
  Description of Artificial Sequence: Synthetic oligonucleotide
  Sense strand starting at position 3400 of SEQ ID NO: 318605
uaaauaugccugggugauu

SEQ ID NO: 575278 - RNA, 19 nt, Artificial Sequence
  Description of Artificial Sequence: Synthetic oligonucleotide
  Antisense strand to SEQ ID NO: 575277
aaucacccaggcauauuua

SEQ ID NO: 575279 - RNA, 19 nt, Artificial Sequence
  Description of Artificial Sequence: Synthetic oligonucleotide
  Sense strand starting at position 3431 of SEQ ID NO: 318605
gaaugaacgcuguguggau

SEQ ID NO: 575280 - RNA, 19 nt, Artificial Sequence
  Description of Artificial Sequence: Synthetic oligonucleotide
  Antisense strand to SEQ ID NO: 575279
auccacacagcguucauuc

SEQ ID NO: 575281 - RNA, 19 nt, Artificial Sequence
  Description of Artificial Sequence: Synthetic oligonucleotide
  Sense strand starting at position 3432 of SEQ ID NO: 318605
aaugaacgcuguguggaua

SEQ ID NO: 575282 - RNA, 19 nt, Artificial Sequence
  Description of Artificial Sequence: Synthetic oligonucleotide
  Antisense strand to SEQ ID NO: 575281
uauccacacagcguucauu

SEQ ID NO: 575283 - RNA, 19 nt, Artificial Sequence
  Description of Artificial Sequence: Synthetic oligonucleotide
  Sense strand starting at position 3435 of SEQ ID NO: 318605
gaacgcuguguggauagaa

SEQ ID NO: 575284 - RNA, 19 nt, Artificial Sequence
  Description of Artificial Sequence: Synthetic oligonucleotide
  Antisense strand to SEQ ID NO: 575283
uucuauccacacagcguuc

SEQ ID NO: 575285 - RNA, 19 nt, Artificial Sequence
  Description of Artificial Sequence: Synthetic oligonucleotide
  Sense strand starting at position 3587 of SEQ ID NO: 318605
uccaguucgauuugugcca

SEQ ID NO: 575286 - RNA, 19 nt, Artificial Sequence
  Description of Artificial Sequence: Synthetic oligonucleotide
  Antisense strand to SEQ ID NO: 575285
uggcacaaaucgaacugga

SEQ ID NO: 575287 - RNA, 19 nt, Artificial Sequence
  Description of Artificial Sequence: Synthetic oligonucleotide
  Sense strand starting at position 3695 of SEQ ID NO: 318605
aaguuaugauucucaugug

SEQ ID NO: 575288 - RNA, 19 nt, Artificial Sequence
  Description of Artificial Sequence: Synthetic oligonucleotide
  Antisense strand to SEQ ID NO: 575287
cacaugagaaucauaacuu

SEQ ID NO: 575289 - RNA, 19 nt, Artificial Sequence
  Description of Artificial Sequence: Synthetic oligonucleotide
  Sense strand starting at position 3837 of SEQ ID NO: 318605
cguggauucuucuuaguaa

SEQ ID NO: 575290 - RNA, 19 nt, Artificial Sequence
  Description of Artificial Sequence: Synthetic oligonucleotide
  Antisense strand to SEQ ID NO: 575289
uuacuaagaagaauccacg

SEQ ID NO: 575291 - RNA, 19 nt, Artificial Sequence
  Description of Artificial Sequence: Synthetic oligonucleotide
  Sense strand starting at position 3956 of SEQ ID NO: 318605
ugaauccagcauuggaaau

SEQ ID NO: 575292 - RNA, 19 nt, Artificial Sequence
  Description of Artificial Sequence: Synthetic oligonucleotide
  Antisense strand to SEQ ID NO: 575291
auuuccaaugcuggauuca

SEQ ID NO: 575293 - RNA, 19 nt, Artificial Sequence
  Description of Artificial Sequence: Synthetic oligonucleotide
  Sense strand starting at position 103 of SEQ ID NO: 318606
ugcucuuggugucaaaggu

SEQ ID NO: 575294 - RNA, 19 nt, Artificial Sequence
  Description of Artificial Sequence: Synthetic oligonucleotide
  Antisense strand to SEQ ID NO: 575293
accuuugacaccaagagca

SEQ ID NO: 575295 - RNA, 19 nt, Artificial Sequence
  Description of Artificial Sequence: Synthetic oligonucleotide
  Sense strand starting at position 261 of SEQ ID NO: 318606
gugcuagcccuuuaaagac

SEQ ID NO: 575296 - RNA, 19 nt, Artificial Sequence
  Description of Artificial Sequence: Synthetic oligonucleotide
  Antisense strand to SEQ ID NO: 575295
gucuuuaaagggcuagcac

SEQ ID NO: 575297 - RNA, 19 nt, Artificial Sequence
  Description of Artificial Sequence: Synthetic oligonucleotide
  Sense strand starting at position 388 of SEQ ID NO: 318606
caggguaaauccugaagug

SEQ ID NO: 575298 - RNA, 19 nt, Artificial Sequence
  Description of Artificial Sequence: Synthetic oligonucleotide
  Antisense strand to SEQ ID NO: 575297
cacuucaggauuuacccug

SEQ ID NO: 575299 - RNA, 19 nt, Artificial Sequence
  Description of Artificial Sequence: Synthetic oligonucleotide
  Sense strand starting at position 492 of SEQ ID NO: 318606
ggcucagugcugugcacuu

SEQ ID NO: 575300 - RNA, 19 nt, Artificial Sequence
  Description of Artificial Sequence: Synthetic oligonucleotide
  Antisense strand to SEQ ID NO: 575299
aagugcacagcacugagcc

SEQ ID NO: 575301 - RNA, 19 nt, Artificial Sequence
  Description of Artificial Sequence: Synthetic oligonucleotide
  Sense strand starting at position 549 of SEQ ID NO: 318606
agacauaaguccugugauu

SEQ ID NO: 575302 - RNA, 19 nt, Artificial Sequence
  Description of Artificial Sequence: Synthetic oligonucleotide
  Antisense strand to SEQ ID NO: 575301
aaucacaggacuuaugucu

SEQ ID NO: 575303 - RNA, 19 nt, Artificial Sequence
  Description of Artificial Sequence: Synthetic oligonucleotide
  Sense strand starting at position 551 of SEQ ID NO: 318606
acauaaguccugugauucu

SEQ ID NO: 575304 - RNA, 19 nt, Artificial Sequence
  Description of Artificial Sequence: Synthetic oligonucleotide
  Antisense strand to SEQ ID NO: 575303
agaaucacaggacuuaugu

SEQ ID NO: 575305 - RNA, 19 nt, Artificial Sequence
  Description of Artificial Sequence: Synthetic oligonucleotide
  Sense strand starting at position 558 of SEQ ID NO: 318606
uccugugauucuucucauu

SEQ ID NO: 575306 - RNA, 19 nt, Artificial Sequence
  Description of Artificial Sequence: Synthetic oligonucleotide
  Antisense strand to SEQ ID NO: 575305
aaugagaagaaucacagga

SEQ ID NO: 575307 - RNA, 19 nt, Artificial Sequence
  Description of Artificial Sequence: Synthetic oligonucleotide
  Sense strand starting at position 560 of SEQ ID NO: 318606
cugugauucuucucauucu

SEQ ID NO: 575308 - RNA, 19 nt, Artificial Sequence
  Description of Artificial Sequence: Synthetic oligonucleotide
  Antisense strand to SEQ ID NO: 575307
agaaugagaagaaucacag

SEQ ID NO: 575309 - RNA, 19 nt, Artificial Sequence
  Description of Artificial Sequence: Synthetic oligonucleotide
  Sense strand starting at position 568 of SEQ ID NO: 318606
cuucucauucugcagauga

SEQ ID NO: 575310 - RNA, 19 nt, Artificial Sequence
  Description of Artificial Sequence: Synthetic oligonucleotide
  Antisense strand to SEQ ID NO: 575309
ucaucugcagaaugagaag

SEQ ID NO: 575311 - RNA, 19 nt, Artificial Sequence
  Description of Artificial Sequence: Synthetic oligonucleotide
  Sense strand starting at position 570 of SEQ ID NO: 318606
ucucauucugcagaugaaa

SEQ ID NO: 575312 - RNA, 19 nt, Artificial Sequence
  Description of Artificial Sequence: Synthetic oligonucleotide
  Antisense strand to SEQ ID NO: 575311
uuucaucugcagaaugaga

SEQ ID NO: 575313 - RNA, 19 nt, Artificial Sequence
  Description of Artificial Sequence: Synthetic oligonucleotide
  Sense strand starting at position 620 of SEQ ID NO: 318606
acaacuuaugaguggcaga

SEQ ID NO: 575314 - RNA, 19 nt, Artificial Sequence
  Description of Artificial Sequence: Synthetic oligonucleotide
  Antisense strand to SEQ ID NO: 575313
ucugccacucauaaguugu

SEQ ID NO: 575315 - RNA, 19 nt, Artificial Sequence
  Description of Artificial Sequence: Synthetic oligonucleotide
  Sense strand starting at position 737 of SEQ ID NO: 318606
uccagugcucuuggaugau

SEQ ID NO: 575316 - RNA, 19 nt, Artificial Sequence
  Description of Artificial Sequence: Synthetic oligonucleotide
  Antisense strand to SEQ ID NO: 575315
aucauccaagagcacugga

SEQ ID NO: 575317 - RNA, 19 nt, Artificial Sequence
  Description of Artificial Sequence: Synthetic oligonucleotide
  Sense strand starting at position 746 of SEQ ID NO: 318606
cuuggaugauggucugcaa

SEQ ID NO: 575318 - RNA, 19 nt, Artificial Sequence
  Description of Artificial Sequence: Synthetic oligonucleotide
  Antisense strand to SEQ ID NO: 575317
uugcagaccaucauccaag

SEQ ID NO: 575319 - RNA, 19 nt, Artificial Sequence
  Description of Artificial Sequence: Synthetic oligonucleotide
  Sense strand starting at position 940 of SEQ ID NO: 318606
gugggaagaucacuauguu

SEQ ID NO: 575320 - RNA, 19 nt, Artificial Sequence
  Description of Artificial Sequence: Synthetic oligonucleotide
  Antisense strand to SEQ ID NO: 575319
aacauagugaucuucccac

SEQ ID NO: 575321 - RNA, 19 nt, Artificial Sequence
  Description of Artificial Sequence: Synthetic oligonucleotide
  Sense strand starting at position 946 of SEQ ID NO: 318606
agaucacuauguugggagu

SEQ ID NO: 575322 - RNA, 19 nt, Artificial Sequence
  Description of Artificial Sequence: Synthetic oligonucleotide
  Antisense strand to SEQ ID NO: 575321
acucccaacauagugaucu

SEQ ID NO: 575323 - RNA, 19 nt, Artificial Sequence
  Description of Artificial Sequence: Synthetic oligonucleotide
  Sense strand starting at position 948 of SEQ ID NO: 318606
aucacuauguugggaguca

SEQ ID NO: 575324 - RNA, 19 nt, Artificial Sequence
  Description of Artificial Sequence: Synthetic oligonucleotide
  Antisense strand to SEQ ID NO: 575323
ugacucccaacauagugau

SEQ ID NO: 575325 - RNA, 19 nt, Artificial Sequence
  Description of Artificial Sequence: Synthetic oligonucleotide
  Sense strand starting at position 974 of SEQ ID NO: 318606
ccaguucuuguuuggcgua

SEQ ID NO: 575326 - RNA, 19 nt, Artificial Sequence
  Description of Artificial Sequence: Synthetic oligonucleotide
  Antisense strand to SEQ ID NO: 575325
uacgccaaacaagaacugg

SEQ ID NO: 575327 - RNA, 19 nt, Artificial Sequence
  Description of Artificial Sequence: Synthetic oligonucleotide
  Sense strand starting at position 976 of SEQ ID NO: 318606
aguucuuguuuggcguaga

SEQ ID NO: 575328 - RNA, 19 nt, Artificial Sequence
  Description of Artificial Sequence: Synthetic oligonucleotide
  Antisense strand to SEQ ID NO: 575327
ucuacgccaaacaagaacu

SEQ ID NO: 575329 - RNA, 19 nt, Artificial Sequence
  Description of Artificial Sequence: Synthetic oligonucleotide
  Sense strand starting at position 979 of SEQ ID NO: 318606
ucuuguuuggcguagaaag

SEQ ID NO: 575330 - RNA, 19 nt, Artificial Sequence
  Description of Artificial Sequence: Synthetic oligonucleotide
  Antisense strand to SEQ ID NO: 575329
cuuucuacgccaaacaaga

SEQ ID NO: 575331 - RNA, 19 nt, Artificial Sequence
  Description of Artificial Sequence: Synthetic oligonucleotide
  Sense strand starting at position 1237 of SEQ ID NO: 318606
uagagauuggcucaaggca

SEQ ID NO: 575332 - RNA, 19 nt, Artificial Sequence
  Description of Artificial Sequence: Synthetic oligonucleotide
  Antisense strand to SEQ ID NO: 575331
ugccuugagccaaucucua

SEQ ID NO: 575333 - RNA, 19 nt, Artificial Sequence
  Description of Artificial Sequence: Synthetic oligonucleotide
  Sense strand starting at position 1388 of SEQ ID NO: 318606
aauggagaggccugaguaa

SEQ ID NO: 575334 - RNA, 19 nt, Artificial Sequence
  Description of Artificial Sequence: Synthetic oligonucleotide
  Antisense strand to SEQ ID NO: 575333
uuacucaggccucuccauu

SEQ ID NO: 575335 - RNA, 19 nt, Artificial Sequence
  Description of Artificial Sequence: Synthetic oligonucleotide
  Sense strand starting at position 1400 of SEQ ID NO: 318606
ugaguaauggccuggcuac

SEQ ID NO: 575336 - RNA, 19 nt, Artificial Sequence
  Description of Artificial Sequence: Synthetic oligonucleotide
  Antisense strand to SEQ ID NO: 575335
guagccaggccauuacuca

SEQ ID NO: 575337 - RNA, 19 nt, Artificial Sequence
  Description of Artificial Sequence: Synthetic oligonucleotide
  Sense strand starting at position 1468 of SEQ ID NO: 318606
ggcuccaugcccuggagaa

SEQ ID NO: 575338 - RNA, 19 nt, Artificial Sequence
  Description of Artificial Sequence: Synthetic oligonucleotide
  Antisense strand to SEQ ID NO: 575337
uucuccagggcauggagcc

SEQ ID NO: 575339 - RNA, 19 nt, Artificial Sequence
  Description of Artificial Sequence: Synthetic oligonucleotide
  Sense strand starting at position 1469 of SEQ ID NO: 318606
gcuccaugcccuggagaau

SEQ ID NO: 575340 - RNA, 19 nt, Artificial Sequence
  Description of Artificial Sequence: Synthetic oligonucleotide
  Antisense strand to SEQ ID NO: 575339
auucuccagggcauggagc

SEQ ID NO: 575341 - RNA, 19 nt, Artificial Sequence
  Description of Artificial Sequence: Synthetic oligonucleotide
  Sense strand starting at position 1470 of SEQ ID NO: 318606
cuccaugcccuggagaauu

SEQ ID NO: 575342 - RNA, 19 nt, Artificial Sequence
  Description of Artificial Sequence: Synthetic oligonucleotide
  Antisense strand to SEQ ID NO: 575341
aauucuccagggcauggag

SEQ ID NO: 575343 - RNA, 19 nt, Artificial Sequence
  Description of Artificial Sequence: Synthetic oligonucleotide
  Sense strand starting at position 1499 of SEQ ID NO: 318606
agagucauggcgagcgcaa

SEQ ID NO: 575344 - RNA, 19 nt, Artificial Sequence
  Description of Artificial Sequence: Synthetic oligonucleotide
  Antisense strand to SEQ ID NO: 575343
uugcgcucgccaugacucu

SEQ ID NO: 575345 - RNA, 19 nt, Artificial Sequence
  Description of Artificial Sequence: Synthetic oligonucleotide
  Sense strand starting at position 1500 of SEQ ID NO: 318606
gagucauggcgagcgcaau

SEQ ID NO: 575346 - RNA, 19 nt, Artificial Sequence
  Description of Artificial Sequence: Synthetic oligonucleotide
  Antisense strand to SEQ ID NO: 575345
auugcgcucgccaugacuc

SEQ ID NO: 575347 - RNA, 19 nt, Artificial Sequence
  Description of Artificial Sequence: Synthetic oligonucleotide
  Sense strand starting at position 2156 of SEQ ID NO: 318606
agaggagaguccucauccu

SEQ ID NO: 575348 - RNA, 19 nt, Artificial Sequence
  Description of Artificial Sequence: Synthetic oligonucleotide
  Antisense strand to SEQ ID NO: 575347
aggaugaggacucuccucu

SEQ ID NO: 575349 - RNA, 19 nt, Artificial Sequence
  Description of Artificial Sequence: Synthetic oligonucleotide
  Sense strand starting at position 2286 of SEQ ID NO: 318606
augaauuccugccugcaaa

SEQ ID NO: 575350 - RNA, 19 nt, Artificial Sequence
  Description of Artificial Sequence: Synthetic oligonucleotide
  Antisense strand to SEQ ID NO: 575349
uuugcaggcaggaauucau

SEQ ID NO: 575351 - RNA, 19 nt, Artificial Sequence
  Description of Artificial Sequence: Synthetic oligonucleotide
  Sense strand starting at position 2287 of SEQ ID NO: 318606
ugaauuccugccugcaaag

SEQ ID NO: 575352 - RNA, 19 nt, Artificial Sequence
  Description of Artificial Sequence: Synthetic oligonucleotide
  Antisense strand to SEQ ID NO: 575351
cuuugcaggcaggaauuca

SEQ ID NO: 575353 - RNA, 19 nt, Artificial Sequence
  Description of Artificial Sequence: Synthetic oligonucleotide
  Sense strand starting at position 2455 of SEQ ID NO: 318606
accaccaccuuguguauua

SEQ ID NO: 575354 - RNA, 19 nt, Artificial Sequence
  Description of Artificial Sequence: Synthetic oligonucleotide
  Antisense strand to SEQ ID NO: 575353
uaauacacaaggugguggu

SEQ ID NO: 575355 - RNA, 19 nt, Artificial Sequence
  Description of Artificial Sequence: Synthetic oligonucleotide
  Sense strand starting at position 2456 of SEQ ID NO: 318606
ccaccaccuuguguauuau

SEQ ID NO: 575356 - RNA, 19 nt, Artificial Sequence
  Description of Artificial Sequence: Synthetic oligonucleotide
  Antisense strand to SEQ ID NO: 575355
auaauacacaagguggugg

SEQ ID NO: 575357 - RNA, 19 nt, Artificial Sequence
  Description of Artificial Sequence: Synthetic oligonucleotide
  Sense strand starting at position 2499 of SEQ ID NO: 318606
aggguauacucaccacaug

SEQ ID NO: 575358 - RNA, 19 nt, Artificial Sequence
  Description of Artificial Sequence: Synthetic oligonucleotide
  Antisense strand to SEQ ID NO: 575357
cauguggugaguauacccu

SEQ ID NO: 575359 - RNA, 19 nt, Artificial Sequence
  Description of Artificial Sequence: Synthetic oligonucleotide
  Sense strand starting at position 2863 of SEQ ID NO: 318606
gcacuugcagaauaaacau

SEQ ID NO: 575360 - RNA, 19 nt, Artificial Sequence
  Description of Artificial Sequence: Synthetic oligonucleotide
  Antisense strand to SEQ ID NO: 575359
auguuuauucugcaagugc

SEQ ID NO: 575361 - RNA, 19 nt, Artificial Sequence
  Description of Artificial Sequence: Synthetic oligonucleotide
  Sense strand starting at position 2881 of SEQ ID NO: 318606
ugaaaucuaugagaaugac

SEQ ID NO: 575362 - RNA, 19 nt, Artificial Sequence
  Description of Artificial Sequence: Synthetic oligonucleotide
  Antisense strand to SEQ ID NO: 575361
gucauucucauagauuuca

SEQ ID NO: 575363 - RNA, 19 nt, Artificial Sequence
  Description of Artificial Sequence: Synthetic oligonucleotide
  Sense strand starting at position 3084 of SEQ ID NO: 318606
cggucugacugaucucaag

SEQ ID NO: 575364 - RNA, 19 nt, Artificial Sequence
  Description of Artificial Sequence: Synthetic oligonucleotide
  Antisense strand to SEQ ID NO: 575363
cuugagaucagucagaccg

SEQ ID NO: 575365 - RNA, 19 nt, Artificial Sequence
  Description of Artificial Sequence: Synthetic oligonucleotide
  Sense strand starting at position 3192 of SEQ ID NO: 318606
guaggaagcccucaucaau

SEQ ID NO: 575366 - RNA, 19 nt, Artificial Sequence
  Description of Artificial Sequence: Synthetic oligonucleotide
  Antisense strand to SEQ ID NO: 575365
auugaugagggcuuccuac

SEQ ID NO: 575367 - RNA, 19 nt, Artificial Sequence
  Description of Artificial Sequence: Synthetic oligonucleotide
  Sense strand starting at position 3389 of SEQ ID NO: 318606
ggcagagauggauggguaa

SEQ ID NO: 575368 - RNA, 19 nt, Artificial Sequence
  Description of Artificial Sequence: Synthetic oligonucleotide
  Antisense strand to SEQ ID NO: 575367
uuacccauccaucucugcc

SEQ ID NO: 575369 - RNA, 19 nt, Artificial Sequence
  Description of Artificial Sequence: Synthetic oligonucleotide
  Sense strand starting at position 3584 of SEQ ID NO: 318606
uagaaacuuugagauggua

SEQ ID NO: 575370 - RNA, 19 nt, Artificial Sequence
  Description of Artificial Sequence: Synthetic oligonucleotide
  Antisense strand to SEQ ID NO: 575369
uaccaucucaaaguuucua

SEQ ID NO: 575371 - RNA, 19 nt, Artificial Sequence
  Description of Artificial Sequence: Synthetic oligonucleotide
  Sense strand starting at position 3777 of SEQ ID NO: 318606
ccuggaagccuugggagua

SEQ ID NO: 575372 - RNA, 19 nt, Artificial Sequence
  Description of Artificial Sequence: Synthetic oligonucleotide
  Antisense strand to SEQ ID NO: 575371
uacucccaaggcuuccagg

SEQ ID NO: 575373 - RNA, 19 nt, Artificial Sequence
  Description of Artificial Sequence: Synthetic oligonucleotide
  Sense strand starting at position 100 of SEQ ID NO: 318607
ggcuuuccacucuguaauc

SEQ ID NO: 575374 - RNA, 19 nt, Artificial Sequence
  Description of Artificial Sequence: Synthetic oligonucleotide
  Antisense strand to SEQ ID NO: 575373
gauuacagaguggaaagcc

SEQ ID NO: 575375 - RNA, 19 nt, Artificial Sequence
  Description of Artificial Sequence: Synthetic oligonucleotide
  Sense strand starting at position 385 of SEQ ID NO: 318607
aagaguuaugaucaugcua

SEQ ID NO: 575376 - RNA, 19 nt, Artificial Sequence
  Description of Artificial Sequence: Synthetic oligonucleotide
  Antisense strand to SEQ ID NO: 575375
uagcaugaucauaacucuu

SEQ ID NO: 575377 - RNA, 19 nt, Artificial Sequence
  Description of Artificial Sequence: Synthetic oligonucleotide
  Sense strand starting at position 569 of SEQ ID NO: 318607
gguccauuauuccuuuauu

SEQ ID NO: 575378 - RNA, 19 nt, Artificial Sequence
  Description of Artificial Sequence: Synthetic oligonucleotide
  Antisense strand to SEQ ID NO: 575377
aauaaaggaauaauggacc

SEQ ID NO: 575379 - RNA, 19 nt, Artificial Sequence
  Description of Artificial Sequence: Synthetic oligonucleotide
  Sense strand starting at position 599 of SEQ ID NO: 318607
gcuggcuugauaugcuauu

SEQ ID NO: 575380 - RNA, 19 nt, Artificial Sequence
  Description of Artificial Sequence: Synthetic oligonucleotide
  Antisense strand to SEQ ID NO: 575379
aauagcauaucaagccagc

SEQ ID NO: 575381 - RNA, 19 nt, Artificial Sequence
  Description of Artificial Sequence: Synthetic oligonucleotide
  Sense strand starting at position 1120 of SEQ ID NO: 318607
ggaggugacugcucugaaa

SEQ ID NO: 575382 - RNA, 19 nt, Artificial Sequence
  Description of Artificial Sequence: Synthetic oligonucleotide
  Antisense strand to SEQ ID NO: 575381
uuucagagcagucaccucc

SEQ ID NO: 575383 - RNA, 19 nt, Artificial Sequence
  Description of Artificial Sequence: Synthetic oligonucleotide
  Sense strand starting at position 1150 of SEQ ID NO: 318607
agaugugggagccgagauu

SEQ ID NO: 575384 - RNA, 19 nt, Artificial Sequence
  Description of Artificial Sequence: Synthetic oligonucleotide
  Antisense strand to SEQ ID NO: 575383
aaucucggcucccacaucu

SEQ ID NO: 575385 - RNA, 19 nt, Artificial Sequence
  Description of Artificial Sequence: Synthetic oligonucleotide
  Sense strand starting at position 1161 of SEQ ID NO: 318607
ccgagauuguuaucaccuc

SEQ ID NO: 575386 - RNA, 19 nt, Artificial Sequence
  Description of Artificial Sequence: Synthetic oligonucleotide
  Antisense strand to SEQ ID NO: 575385
gaggugauaacaaucucgg

SEQ ID NO: 575387 - RNA, 19 nt, Artificial Sequence
  Description of Artificial Sequence: Synthetic oligonucleotide
  Sense strand starting at position 1272 of SEQ ID NO: 318607
ggaggaugguggucacaag

SEQ ID NO: 575388 - RNA, 19 nt, Artificial Sequence
  Description of Artificial Sequence: Synthetic oligonucleotide
  Antisense strand to SEQ ID NO: 575387
cuugugaccaccauccucc

SEQ ID NO: 575389 - RNA, 19 nt, Artificial Sequence
  Description of Artificial Sequence: Synthetic oligonucleotide
  Sense strand starting at position 1554 of SEQ ID NO: 318607
cucacuuguacggaugcaa

SEQ ID NO: 575390 - RNA, 19 nt, Artificial Sequence
  Description of Artificial Sequence: Synthetic oligonucleotide
  Antisense strand to SEQ ID NO: 575389
uugcauccguacaagugag

SEQ ID NO: 575391 - RNA, 19 nt, Artificial Sequence
  Description of Artificial Sequence: Synthetic oligonucleotide
  Sense strand starting at position 1691 of SEQ ID NO: 318607
cugggagacacaugugguu

SEQ ID NO: 575392 - RNA, 19 nt, Artificial Sequence
  Description of Artificial Sequence: Synthetic oligonucleotide
  Antisense strand to SEQ ID NO: 575391
aaccacaugugucucccag

SEQ ID NO: 575393 - RNA, 19 nt, Artificial Sequence
  Description of Artificial Sequence: Synthetic oligonucleotide
  Sense strand starting at position 2073 of SEQ ID NO: 318607
gcguguggaaaugaaacuu

SEQ ID NO: 575394 - RNA, 19 nt, Artificial Sequence
  Description of Artificial Sequence: Synthetic oligonucleotide
  Antisense strand to SEQ ID NO: 575393
aaguuucauuuccacacgc

SEQ ID NO: 575395 - RNA, 19 nt, Artificial Sequence
  Description of Artificial Sequence: Synthetic oligonucleotide
  Sense strand starting at position 2115 of SEQ ID NO: 318607
ccgagcauaugggauauuu

SEQ ID NO: 575396 - RNA, 19 nt, Artificial Sequence
  Description of Artificial Sequence: Synthetic oligonucleotide
  Antisense strand to SEQ ID NO: 575395
aaauaucccauaugcucgg

SEQ ID NO: 575397 - RNA, 19 nt, Artificial Sequence
  Description of Artificial Sequence: Synthetic oligonucleotide
  Sense strand starting at position 2143 of SEQ ID NO: 318607
ugaagacauuagccgucua

SEQ ID NO: 575398 - RNA, 19 nt, Artificial Sequence
  Description of Artificial Sequence: Synthetic oligonucleotide
  Antisense strand to SEQ ID NO: 575397
uagacggcuaaugucuuca

SEQ ID NO: 575399 - RNA, 19 nt, Artificial Sequence
  Description of Artificial Sequence: Synthetic oligonucleotide
  Sense strand starting at position 2398 of SEQ ID NO: 318607
cuauaccuucugugcuauu

SEQ ID NO: 575400 - RNA, 19 nt, Artificial Sequence
  Description of Artificial Sequence: Synthetic oligonucleotide
  Antisense strand to SEQ ID NO: 575399
aauagcacagaagguauag

SEQ ID NO: 575401 - RNA, 19 nt, Artificial Sequence
  Description of Artificial Sequence: Synthetic oligonucleotide
  Sense strand starting at position 2483 of SEQ ID NO: 318607
cagccagaucccugagugu

SEQ ID NO: 575402 - RNA, 19 nt, Artificial Sequence
  Description of Artificial Sequence: Synthetic oligonucleotide
  Antisense strand to SEQ ID NO: 575401
acacucagggaucuggcug

SEQ ID NO: 575403 - RNA, 19 nt, Artificial Sequence
  Description of Artificial Sequence: Synthetic oligonucleotide
  Sense strand starting at position 2486 of SEQ ID NO: 318607
ccagaucccugaguguuaa

SEQ ID NO: 575404 - RNA, 19 nt, Artificial Sequence
  Description of Artificial Sequence: Synthetic oligonucleotide
  Antisense strand to SEQ ID NO: 575403
uuaacacucagggaucugg

SEQ ID NO: 575405 - RNA, 19 nt, Artificial Sequence
  Description of Artificial Sequence: Synthetic oligonucleotide
  Sense strand starting at position 2529 of SEQ ID NO: 318607
cugcuauccucauugcaga

SEQ ID NO: 575406 - RNA, 19 nt, Artificial Sequence
  Description of Artificial Sequence: Synthetic oligonucleotide
  Antisense strand to SEQ ID NO: 575405
ucugcaaugaggauagcag

SEQ ID NO: 575407 - RNA, 19 nt, Artificial Sequence
  Description of Artificial Sequence: Synthetic oligonucleotide
  Sense strand starting at position 2935 of SEQ ID NO: 318607
uccaucuguucucuaggaa

SEQ ID NO: 575408 - RNA, 19 nt, Artificial Sequence
  Description of Artificial Sequence: Synthetic oligonucleotide
  Antisense strand to SEQ ID NO: 575407
uuccuagagaacagaugga

SEQ ID NO: 575409 - RNA, 19 nt, Artificial Sequence
  Description of Artificial Sequence: Synthetic oligonucleotide
  Sense strand starting at position 2936 of SEQ ID NO: 318607
ccaucuguucucuaggaac

SEQ ID NO: 575410 - RNA, 19 nt, Artificial Sequence
  Description of Artificial Sequence: Synthetic oligonucleotide
  Antisense strand to SEQ ID NO: 575409
guuccuagagaacagaugg

SEQ ID NO: 575411 - RNA, 19 nt, Artificial Sequence
  Description of Artificial Sequence: Synthetic oligonucleotide
  Sense strand starting at position 2938 of SEQ ID NO: 318607
aucuguucucuaggaacaa

SEQ ID NO: 575412 - RNA, 19 nt, Artificial Sequence
  Description of Artificial Sequence: Synthetic oligonucleotide
  Antisense strand to SEQ ID NO: 575411
uuguuccuagagaacagau

SEQ ID NO: 575413 - RNA, 19 nt, Artificial Sequence
  Description of Artificial Sequence: Synthetic oligonucleotide
  Sense strand starting at position 2966 of SEQ ID NO: 318607
cccagagaggucugagguu

SEQ ID NO: 575414 - RNA, 19 nt, Artificial Sequence
  Description of Artificial Sequence: Synthetic oligonucleotide
  Antisense strand to SEQ ID NO: 575413
aaccucagaccucucuggg

SEQ ID NO: 575415 - RNA, 19 nt, Artificial Sequence
  Description of Artificial Sequence: Synthetic oligonucleotide
  Sense strand starting at position 3034 of SEQ ID NO: 318607
gcucuucugagcuuguguu

SEQ ID NO: 575416 - RNA, 19 nt, Artificial Sequence
  Description of Artificial Sequence: Synthetic oligonucleotide
  Antisense strand to SEQ ID NO: 575415
aacacaagcucagaagagc

SEQ ID NO: 575417 - RNA, 19 nt, Artificial Sequence
  Description of Artificial Sequence: Synthetic oligonucleotide
  Sense strand starting at position 3046 of SEQ ID NO: 318607
uuguguuugcuggcaaggu

SEQ ID NO: 575418 - RNA, 19 nt, Artificial Sequence
  Description of Artificial Sequence: Synthetic oligonucleotide
  Antisense strand to SEQ ID NO: 575417
accuugccagcaaacacaa

SEQ ID NO: 575419 - RNA, 19 nt, Artificial Sequence
  Description of Artificial Sequence: Synthetic oligonucleotide
  Sense strand starting at position 3231 of SEQ ID NO: 318607
caguuaacacagugcuuga

SEQ ID NO: 575420 - RNA, 19 nt, Artificial Sequence
  Description of Artificial Sequence: Synthetic oligonucleotide
  Antisense strand to SEQ ID NO: 575419
ucaagcacuguguuaacug

SEQ ID NO: 575421 - RNA, 19 nt, Artificial Sequence
  Description of Artificial Sequence: Synthetic oligonucleotide
  Sense strand starting at position 3253 of SEQ ID NO: 318607
uuacuaagugcccaugaua

SEQ ID NO: 575422 - RNA, 19 nt, Artificial Sequence
  Description of Artificial Sequence: Synthetic oligonucleotide
  Antisense strand to SEQ ID NO: 575421
uaucaugggcacuuaguaa

SEQ ID NO: 575423 - RNA, 19 nt, Artificial Sequence
  Description of Artificial Sequence: Synthetic oligonucleotide
  Sense strand starting at position 3256 of SEQ ID NO: 318607
cuaagugcccaugauaaau

SEQ ID NO: 575424 - RNA, 19 nt, Artificial Sequence
  Description of Artificial Sequence: Synthetic oligonucleotide
  Antisense strand to SEQ ID NO: 575423
auuuaucaugggcacuuag

SEQ ID NO: 575425 - RNA, 19 nt, Artificial Sequence
  Description of Artificial Sequence: Synthetic oligonucleotide
  Sense strand starting at position 3290 of SEQ ID NO: 318607
ugaugauauugauugaguc

SEQ ID NO: 575426 - RNA, 19 nt, Artificial Sequence
  Description of Artificial Sequence: Synthetic oligonucleotide
  Antisense strand to SEQ ID NO: 575425
gacucaaucaauaucauca

SEQ ID NO: 575427 - RNA, 19 nt, Artificial Sequence
  Description of Artificial Sequence: Synthetic oligonucleotide
  Sense strand starting at position 3417 of SEQ ID NO: 318607
gcagaugucuucucaggga

SEQ ID NO: 575428 - RNA, 19 nt, Artificial Sequence
  Description of Artificial Sequence: Synthetic oligonucleotide
  Antisense strand to SEQ ID NO: 575427
ucccugagaagacaucugc

SEQ ID NO: 575429 - RNA, 19 nt, Artificial Sequence
  Description of Artificial Sequence: Synthetic oligonucleotide
  Sense strand starting at position 3430 of SEQ ID NO: 318607
cagggacucuucuccgaua

SEQ ID NO: 575430 - RNA, 19 nt, Artificial Sequence
  Description of Artificial Sequence: Synthetic oligonucleotide
  Antisense strand to SEQ ID NO: 575429
uaucggagaagagucccug

SEQ ID NO: 575431 - RNA, 19 nt, Artificial Sequence
  Description of Artificial Sequence: Synthetic oligonucleotide
  Sense strand starting at position 3432 of SEQ ID NO: 318607
gggacucuucuccgauaca

SEQ ID NO: 575432 - RNA, 19 nt, Artificial Sequence
  Description of Artificial Sequence: Synthetic oligonucleotide
  Antisense strand to SEQ ID NO: 575431
uguaucggagaagaguccc

SEQ ID NO: 575433 - RNA, 19 nt, Artificial Sequence
  Description of Artificial Sequence: Synthetic oligonucleotide
  Sense strand starting at position 3442 of SEQ ID NO: 318607
uccgauacacuuugcagua

SEQ ID NO: 575434 - RNA, 19 nt, Artificial Sequence
  Description of Artificial Sequence: Synthetic oligonucleotide
  Antisense strand to SEQ ID NO: 575433
uacugcaaaguguaucgga

SEQ ID NO: 575435 - RNA, 19 nt, Artificial Sequence
  Description of Artificial Sequence: Synthetic oligonucleotide
  Sense strand starting at position 3497 of SEQ ID NO: 318607
cucagagagguuuagaugu

SEQ ID NO: 575436 - RNA, 19 nt, Artificial Sequence
  Description of Artificial Sequence: Synthetic oligonucleotide
  Antisense strand to SEQ ID NO: 575435
acaucuaaaccucucugag

SEQ ID NO: 575437 - RNA, 19 nt, Artificial Sequence
  Description of Artificial Sequence: Synthetic oligonucleotide
  Sense strand starting at position 3504 of SEQ ID NO: 318607
agguuuagaugucucccua

SEQ ID NO: 575438 - RNA, 19 nt, Artificial Sequence
  Description of Artificial Sequence: Synthetic oligonucleotide
  Antisense strand to SEQ ID NO: 575437
uagggagacaucuaaaccu

SEQ ID NO: 575439 - RNA, 19 nt, Artificial Sequence
  Description of Artificial Sequence: Synthetic oligonucleotide
  Sense strand starting at position 3822 of SEQ ID NO: 318607
cugguucuuuaccugugaa

SEQ ID NO: 575440 - RNA, 19 nt, Artificial Sequence
  Description of Artificial Sequence: Synthetic oligonucleotide
  Antisense strand to SEQ ID NO: 575439
uucacagguaaagaaccag

SEQ ID NO: 575441 - RNA, 19 nt, Artificial Sequence
  Description of Artificial Sequence: Synthetic oligonucleotide
  Sense strand starting at position 3823 of SEQ ID NO: 318607
ugguucuuuaccugugaag

SEQ ID NO: 575442 - RNA, 19 nt, Artificial Sequence
  Description of Artificial Sequence: Synthetic oligonucleotide
  Antisense strand to SEQ ID NO: 575441
cuucacagguaaagaacca

SEQ ID NO: 575443 - RNA, 19 nt, Artificial Sequence
  Description of Artificial Sequence: Synthetic oligonucleotide
  Sense strand starting at position 3825 of SEQ ID NO: 318607
guucuuuaccugugaagca

SEQ ID NO: 575444 - RNA, 19 nt, Artificial Sequence
  Description of Artificial Sequence: Synthetic oligonucleotide
  Antisense strand to SEQ ID NO: 575443
ugcuucacagguaaagaac

SEQ ID NO: 575445 - RNA, 19 nt, Artificial Sequence
  Description of Artificial Sequence: Synthetic oligonucleotide
  Sense strand starting at position 3866 of SEQ ID NO: 318607
gugagcaucacgugauauu

SEQ ID NO: 575446 - RNA, 19 nt, Artificial Sequence
  Description of Artificial Sequence: Synthetic oligonucleotide
  Antisense strand to SEQ ID NO: 575445
aauaucacgugaugcucac

SEQ ID NO: 575447 - RNA, 19 nt, Artificial Sequence
  Description of Artificial Sequence: Synthetic oligonucleotide
  Sense strand starting at position 3867 of SEQ ID NO: 318607
ugagcaucacgugauauua

SEQ ID NO: 575448 - RNA, 19 nt, Artificial Sequence
  Description of Artificial Sequence: Synthetic oligonucleotide
  Antisense strand to SEQ ID NO: 575447
uaauaucacgugaugcuca

SEQ ID NO: 575449 - RNA, 19 nt, Artificial Sequence
  Description of Artificial Sequence: Synthetic oligonucleotide
  Sense strand starting at position 3962 of SEQ ID NO: 318607
auuaaauccugucuggguu

SEQ ID NO: 575450 - RNA, 19 nt, Artificial Sequence
  Description of Artificial Sequence: Synthetic oligonucleotide
  Antisense strand to SEQ ID NO: 575449
aacccagacaggauuuaau

SEQ ID NO: 575451 - RNA, 19 nt, Artificial Sequence
  Description of Artificial Sequence: Synthetic oligonucleotide
  Sense strand starting at position 3966 of SEQ ID NO: 318607
aauccugucuggguugcaa

SEQ ID NO: 575452 - RNA, 19 nt, Artificial Sequence
  Description of Artificial Sequence: Synthetic oligonucleotide
  Antisense strand to SEQ ID NO: 575451
uugcaacccagacaggauu

SEQ ID NO: 575453 - RNA, 19 nt, Artificial Sequence
  Description of Artificial Sequence: Synthetic oligonucleotide
  Sense strand starting at position 315 of SEQ ID NO: 318608
cugagugaccucuagcugu

SEQ ID NO: 575454 - RNA, 19 nt, Artificial Sequence
  Description of Artificial Sequence: Synthetic oligonucleotide
  Antisense strand to SEQ ID NO: 575453
acagcuagaggucacucag

SEQ ID NO: 575455 - RNA, 19 nt, Artificial Sequence
  Description of Artificial Sequence: Synthetic oligonucleotide
  Sense strand starting at position 495 of SEQ ID NO: 318608
uccauuuaaugagaggguu

SEQ ID NO: 575456 - RNA, 19 nt, Artificial Sequence
  Description of Artificial Sequence: Synthetic oligonucleotide
  Antisense strand to SEQ ID NO: 575455
aacccucucauuaaaugga

SEQ ID NO: 575457 - RNA, 19 nt, Artificial Sequence
  Description of Artificial Sequence: Synthetic oligonucleotide
  Sense strand starting at position 542 of SEQ ID NO: 318608
agugauuuguugccgcuaa

SEQ ID NO: 575458 - RNA, 19 nt, Artificial Sequence
  Description of Artificial Sequence: Synthetic oligonucleotide
  Antisense strand to SEQ ID NO: 575457
uuagcggcaacaaaucacu

SEQ ID NO: 575459 - RNA, 19 nt, Artificial Sequence
  Description of Artificial Sequence: Synthetic oligonucleotide
  Sense strand starting at position 546 of SEQ ID NO: 318608
auuuguugccgcuaaugau

SEQ ID NO: 575460 - RNA, 19 nt, Artificial Sequence
  Description of Artificial Sequence: Synthetic oligonucleotide
  Antisense strand to SEQ ID NO: 575459
aucauuagcggcaacaaau

SEQ ID NO: 575461 - RNA, 19 nt, Artificial Sequence
  Description of Artificial Sequence: Synthetic oligonucleotide
  Sense strand starting at position 550 of SEQ ID NO: 318608
guugccgcuaaugauuaaa

SEQ ID NO: 575462 - RNA, 19 nt, Artificial Sequence
  Description of Artificial Sequence: Synthetic oligonucleotide
  Antisense strand to SEQ ID NO: 575461
uuuaaucauuagcggcaac

SEQ ID NO: 575463 - RNA, 19 nt, Artificial Sequence
  Description of Artificial Sequence: Synthetic oligonucleotide
  Sense strand starting at position 651 of SEQ ID NO: 318608
gugcccucuuuggcagaga

SEQ ID NO: 575464 - RNA, 19 nt, Artificial Sequence
  Description of Artificial Sequence: Synthetic oligonucleotide
  Antisense strand to SEQ ID NO: 575463
ucucugccaaagagggcac

SEQ ID NO: 575465 - RNA, 19 nt, Artificial Sequence
  Description of Artificial Sequence: Synthetic oligonucleotide
  Sense strand starting at position 769 of SEQ ID NO: 318608
gaugaauuacuguggauca

SEQ ID NO: 575466 - RNA, 19 nt, Artificial Sequence
  Description of Artificial Sequence: Synthetic oligonucleotide
  Antisense strand to SEQ ID NO: 575465
ugauccacaguaauucauc

SEQ ID NO: 575467 - RNA, 19 nt, Artificial Sequence
  Description of Artificial Sequence: Synthetic oligonucleotide
  Sense strand starting at position 1536 of SEQ ID NO: 318608
gggcaaucuaucggcauag

SEQ ID NO: 575468 - RNA, 19 nt, Artificial Sequence
  Description of Artificial Sequence: Synthetic oligonucleotide
  Antisense strand to SEQ ID NO: 575467
cuaugccgauagauugccc

SEQ ID NO: 575469 - RNA, 19 nt, Artificial Sequence
  Description of Artificial Sequence: Synthetic oligonucleotide
  Sense strand starting at position 1635 of SEQ ID NO: 318608
cugagaacuggucggcauu

SEQ ID NO: 575470 - RNA, 19 nt, Artificial Sequence
  Description of Artificial Sequence: Synthetic oligonucleotide
  Antisense strand to SEQ ID NO: 575469
aaugccgaccaguucucag

SEQ ID NO: 575471 - RNA, 19 nt, Artificial Sequence
  Description of Artificial Sequence: Synthetic oligonucleotide
  Sense strand starting at position 1636 of SEQ ID NO: 318608
ugagaacuggucggcauuu

SEQ ID NO: 575472 - RNA, 19 nt, Artificial Sequence
  Description of Artificial Sequence: Synthetic oligonucleotide
  Antisense strand to SEQ ID NO: 575471
aaaugccgaccaguucuca

SEQ ID NO: 575473 - RNA, 19 nt, Artificial Sequence
  Description of Artificial Sequence: Synthetic oligonucleotide
  Sense strand starting at position 1688 of SEQ ID NO: 318608
uuucgaaagcuccagucau

SEQ ID NO: 575474 - RNA, 19 nt, Artificial Sequence
  Description of Artificial Sequence: Synthetic oligonucleotide
  Antisense strand to SEQ ID NO: 575473
augacuggagcuuucgaaa

SEQ ID NO: 575475 - RNA, 19 nt, Artificial Sequence
  Description of Artificial Sequence: Synthetic oligonucleotide
  Sense strand starting at position 1935 of SEQ ID NO: 318608
cucauaucccagcaaaggu

SEQ ID NO: 575476 - RNA, 19 nt, Artificial Sequence
  Description of Artificial Sequence: Synthetic oligonucleotide
  Antisense strand to SEQ ID NO: 575475
accuuugcugggauaugag

SEQ ID NO: 575477 - RNA, 19 nt, Artificial Sequence
  Description of Artificial Sequence: Synthetic oligonucleotide
  Sense strand starting at position 2018 of SEQ ID NO: 318608
ggaggagauugugcaacaa

SEQ ID NO: 575478 - RNA, 19 nt, Artificial Sequence
  Description of Artificial Sequence: Synthetic oligonucleotide
  Antisense strand to SEQ ID NO: 575477
uuguugcacaaucuccucc

SEQ ID NO: 575479 - RNA, 19 nt, Artificial Sequence
  Description of Artificial Sequence: Synthetic oligonucleotide
  Sense strand starting at position 2355 of SEQ ID NO: 318608
aguggugugcuuucaguuu

SEQ ID NO: 575480 - RNA, 19 nt, Artificial Sequence
  Description of Artificial Sequence: Synthetic oligonucleotide
  Antisense strand to SEQ ID NO: 575479
aaacugaaagcacaccacu

SEQ ID NO: 575481 - RNA, 19 nt, Artificial Sequence
  Description of Artificial Sequence: Synthetic oligonucleotide
  Sense strand starting at position 2359 of SEQ ID NO: 318608
gugugcuuucaguuucugu

SEQ ID NO: 575482 - RNA, 19 nt, Artificial Sequence
  Description of Artificial Sequence: Synthetic oligonucleotide
  Antisense strand to SEQ ID NO: 575481
acagaaacugaaagcacac

SEQ ID NO: 575483 - RNA, 19 nt, Artificial Sequence
  Description of Artificial Sequence: Synthetic oligonucleotide
  Sense strand starting at position 2406 of SEQ ID NO: 318608
cugccauuugugugacgau

SEQ ID NO: 575484 - RNA, 19 nt, Artificial Sequence
  Description of Artificial Sequence: Synthetic oligonucleotide
  Antisense strand to SEQ ID NO: 575483
aucgucacacaaauggcag

SEQ ID NO: 575485 - RNA, 19 nt, Artificial Sequence
  Description of Artificial Sequence: Synthetic oligonucleotide
  Sense strand starting at position 2477 of SEQ ID NO: 318608
uggguauuguaauauuucu

SEQ ID NO: 575486 - RNA, 19 nt, Artificial Sequence
  Description of Artificial Sequence: Synthetic oligonucleotide
  Antisense strand to SEQ ID NO: 575485
agaaauauuacaauaccca

SEQ ID NO: 575487 - RNA, 19 nt, Artificial Sequence
  Description of Artificial Sequence: Synthetic oligonucleotide
  Sense strand starting at position 2499 of SEQ ID NO: 318608
uucgcauugcauugaggau

SEQ ID NO: 575488 - RNA, 19 nt, Artificial Sequence
  Description of Artificial Sequence: Synthetic oligonucleotide
  Antisense strand to SEQ ID NO: 575487
auccucaaugcaaugcgaa

SEQ ID NO: 575489 - RNA, 19 nt, Artificial Sequence
  Description of Artificial Sequence: Synthetic oligonucleotide
  Sense strand starting at position 2500 of SEQ ID NO: 318608
ucgcauugcauugaggauu

SEQ ID NO: 575490 - RNA, 19 nt, Artificial Sequence
  Description of Artificial Sequence: Synthetic oligonucleotide
  Antisense strand to SEQ ID NO: 575489
aauccucaaugcaaugcga

SEQ ID NO: 575491 - RNA, 19 nt, Artificial Sequence
  Description of Artificial Sequence: Synthetic oligonucleotide
  Sense strand starting at position 2686 of SEQ ID NO: 318608
ugaggagagcugugaauga

SEQ ID NO: 575492 - RNA, 19 nt, Artificial Sequence
  Description of Artificial Sequence: Synthetic oligonucleotide
  Antisense strand to SEQ ID NO: 575491
ucauucacagcucuccuca

SEQ ID NO: 575493 - RNA, 19 nt, Artificial Sequence
  Description of Artificial Sequence: Synthetic oligonucleotide
  Sense strand starting at position 2779 of SEQ ID NO: 318608
aauggaggcuuucuguaag

SEQ ID NO: 575494 - RNA, 19 nt, Artificial Sequence
  Description of Artificial Sequence: Synthetic oligonucleotide
  Antisense strand to SEQ ID NO: 575493
cuuacagaaagccuccauu

SEQ ID NO: 575495 - RNA, 19 nt, Artificial Sequence
  Description of Artificial Sequence: Synthetic oligonucleotide
  Sense strand starting at position 2983 of SEQ ID NO: 318608
ggagcagggagaugaguua

SEQ ID NO: 575496 - RNA, 19 nt, Artificial Sequence
  Description of Artificial Sequence: Synthetic oligonucleotide
  Antisense strand to SEQ ID NO: 575495
uaacucaucucccugcucc

SEQ ID NO: 575497 - RNA, 19 nt, Artificial Sequence
  Description of Artificial Sequence: Synthetic oligonucleotide
  Sense strand starting at position 3094 of SEQ ID NO: 318608
gaaaucauuuguggaggca

SEQ ID NO: 575498 - RNA, 19 nt, Artificial Sequence
  Description of Artificial Sequence: Synthetic oligonucleotide
  Antisense strand to SEQ ID NO: 575497
ugccuccacaaaugauuuc

SEQ ID NO: 575499 - RNA, 19 nt, Artificial Sequence
  Description of Artificial Sequence: Synthetic oligonucleotide
  Sense strand starting at position 3145 of SEQ ID NO: 318608
gcagguagugcguaagaca

SEQ ID NO: 575500 - RNA, 19 nt, Artificial Sequence
  Description of Artificial Sequence: Synthetic oligonucleotide
  Antisense strand to SEQ ID NO: 575499
ugucuuacgcacuaccugc

SEQ ID NO: 575501 - RNA, 19 nt, Artificial Sequence
  Description of Artificial Sequence: Synthetic oligonucleotide
  Sense strand starting at position 3176 of SEQ ID NO: 318608
aauuacacuugggaggaaa

SEQ ID NO: 575502 - RNA, 19 nt, Artificial Sequence
  Description of Artificial Sequence: Synthetic oligonucleotide
  Antisense strand to SEQ ID NO: 575501
uuuccucccaaguguaauu

SEQ ID NO: 575503 - RNA, 19 nt, Artificial Sequence
  Description of Artificial Sequence: Synthetic oligonucleotide
  Sense strand starting at position 3205 of SEQ ID NO: 318608
aagggaucuugcuuaaaga

SEQ ID NO: 575504 - RNA, 19 nt, Artificial Sequence
  Description of Artificial Sequence: Synthetic oligonucleotide
  Antisense strand to SEQ ID NO: 575503
ucuuuaagcaagaucccuu

SEQ ID NO: 575505 - RNA, 19 nt, Artificial Sequence
  Description of Artificial Sequence: Synthetic oligonucleotide
  Sense strand starting at position 3237 of SEQ ID NO: 318608
cuacuuagcugugugaacu

SEQ ID NO: 575506 - RNA, 19 nt, Artificial Sequence
  Description of Artificial Sequence: Synthetic oligonucleotide
  Antisense strand to SEQ ID NO: 575505
aguucacacagcuaaguag

SEQ ID NO: 575507 - RNA, 19 nt, Artificial Sequence
  Description of Artificial Sequence: Synthetic oligonucleotide
  Sense strand starting at position 3238 of SEQ ID NO: 318608
uacuuagcugugugaacuc

SEQ ID NO: 575508 - RNA, 19 nt, Artificial Sequence
  Description of Artificial Sequence: Synthetic oligonucleotide
  Antisense strand to SEQ ID NO: 575507
gaguucacacagcuaagua

SEQ ID NO: 575509 - RNA, 19 nt, Artificial Sequence
  Description of Artificial Sequence: Synthetic oligonucleotide
  Sense strand starting at position 3326 of SEQ ID NO: 318608
uugugagagucuguggaca

SEQ ID NO: 575510 - RNA, 19 nt, Artificial Sequence
  Description of Artificial Sequence: Synthetic oligonucleotide
  Antisense strand to SEQ ID NO: 575509
uguccacagacucucacaa

SEQ ID NO: 575511 - RNA, 19 nt, Artificial Sequence
  Description of Artificial Sequence: Synthetic oligonucleotide
  Sense strand starting at position 3331 of SEQ ID NO: 318608
agagucuguggacaugagu

SEQ ID NO: 575512 - RNA, 19 nt, Artificial Sequence
  Description of Artificial Sequence: Synthetic oligonucleotide
  Antisense strand to SEQ ID NO: 575511
acucauguccacagacucu

SEQ ID NO: 575513 - RNA, 19 nt, Artificial Sequence
  Description of Artificial Sequence: Synthetic oligonucleotide
  Sense strand starting at position 3596 of SEQ ID NO: 318608
gccucaguggcagggaaau

SEQ ID NO: 575514 - RNA, 19 nt, Artificial Sequence
  Description of Artificial Sequence: Synthetic oligonucleotide
  Antisense strand to SEQ ID NO: 575513
auuucccugccacugaggc

SEQ ID NO: 575515 - RNA, 19 nt, Artificial Sequence
  Description of Artificial Sequence: Synthetic oligonucleotide
  Sense strand starting at position 3663 of SEQ ID NO: 318608
cucuucuaucuugggucau

SEQ ID NO: 575516 - RNA, 19 nt, Artificial Sequence
  Description of Artificial Sequence: Synthetic oligonucleotide
  Antisense strand to SEQ ID NO: 575515
augacccaagauagaagag

SEQ ID NO: 575517 - RNA, 19 nt, Artificial Sequence
  Description of Artificial Sequence: Synthetic oligonucleotide
  Sense strand starting at position 3688 of SEQ ID NO: 318608
agguuauugccguaauuuc

SEQ ID NO: 575518 - RNA, 19 nt, Artificial Sequence
  Description of Artificial Sequence: Synthetic oligonucleotide
  Antisense strand to SEQ ID NO: 575517
gaaauuacggcaauaaccu

SEQ ID NO: 575519 - RNA, 19 nt, Artificial Sequence
  Description of Artificial Sequence: Synthetic oligonucleotide
  Sense strand starting at position 3695 of SEQ ID NO: 318608
ugccguaauuucucacauc

SEQ ID NO: 575520 - RNA, 19 nt, Artificial Sequence
  Description of Artificial Sequence: Synthetic oligonucleotide
  Antisense strand to SEQ ID NO: 575519
gaugugagaaauuacggca

SEQ ID NO: 575521 - RNA, 19 nt, Artificial Sequence
  Description of Artificial Sequence: Synthetic oligonucleotide
  Sense strand starting at position 3712 of SEQ ID NO: 318608
ucaacccuaugagagaauu

SEQ ID NO: 575522 - RNA, 19 nt, Artificial Sequence
  Description of Artificial Sequence: Synthetic oligonucleotide
  Antisense strand to SEQ ID NO: 575521
aauucucucauaggguuga

SEQ ID NO: 575523 - RNA, 19 nt, Artificial Sequence
  Description of Artificial Sequence: Synthetic oligonucleotide
  Sense strand starting at position 3781 of SEQ ID NO: 318608
ugaagugacuucuugccua

SEQ ID NO: 575524 - RNA, 19 nt, Artificial Sequence
  Description of Artificial Sequence: Synthetic oligonucleotide
  Antisense strand to SEQ ID NO: 575523
uaggcaagaagucacuuca

SEQ ID NO: 575525 - RNA, 19 nt, Artificial Sequence
  Description of Artificial Sequence: Synthetic oligonucleotide
  Sense strand starting at position 3786 of SEQ ID NO: 318608
ugacuucuugccuaaggca

SEQ ID NO: 575526 - RNA, 19 nt, Artificial Sequence
  Description of Artificial Sequence: Synthetic oligonucleotide
  Antisense strand to SEQ ID NO: 575525
ugccuuaggcaagaaguca

SEQ ID NO: 575527 - RNA, 19 nt, Artificial Sequence
  Description of Artificial Sequence: Synthetic oligonucleotide
  Sense strand starting at position 3911 of SEQ ID NO: 318608
ccaggugcuuucucacuca

SEQ ID NO: 575528 - RNA, 19 nt, Artificial Sequence
  Description of Artificial Sequence: Synthetic oligonucleotide
  Antisense strand to SEQ ID NO: 575527
ugagugagaaagcaccugg

SEQ ID NO: 575529 - RNA, 19 nt, Artificial Sequence
  Description of Artificial Sequence: Synthetic oligonucleotide
  Sense strand starting at position 3914 of SEQ ID NO: 318608
ggugcuuucucacucacca

SEQ ID NO: 575530 - RNA, 19 nt, Artificial Sequence
  Description of Artificial Sequence: Synthetic oligonucleotide
  Antisense strand to SEQ ID NO: 575529
uggugagugagaaagcacc

SEQ ID NO: 575531 - RNA, 19 nt, Artificial Sequence
  Description of Artificial Sequence: Synthetic oligonucleotide
  Sense strand starting at position 3940 of SEQ ID NO: 318608
ccagauuucugccauuuga

SEQ ID NO: 575532 - RNA, 19 nt, Artificial Sequence
  Description of Artificial Sequence: Synthetic oligonucleotide
  Antisense strand to SEQ ID NO: 575531
ucaaauggcagaaaucugg

SEQ ID NO: 575533 - RNA, 19 nt, Artificial Sequence
  Description of Artificial Sequence: Synthetic oligonucleotide
  Sense strand starting at position 177 of SEQ ID NO: 318609
cagucugaagacugaaauu

SEQ ID NO: 575534 - RNA, 19 nt, Artificial Sequence
  Description of Artificial Sequence: Synthetic oligonucleotide
  Antisense strand to SEQ ID NO: 575533
aauuucagucuucagacug

SEQ ID NO: 575535 - RNA, 19 nt, Artificial Sequence
  Description of Artificial Sequence: Synthetic oligonucleotide
  Sense strand starting at position 210 of SEQ ID NO: 318609
uuuacuucucuaggaguga

SEQ ID NO: 575536 - RNA, 19 nt, Artificial Sequence
  Description of Artificial Sequence: Synthetic oligonucleotide
  Antisense strand to SEQ ID NO: 575535
ucacuccuagagaaguaaa

SEQ ID NO: 575537 - RNA, 19 nt, Artificial Sequence
  Description of Artificial Sequence: Synthetic oligonucleotide
  Sense strand starting at position 294 of SEQ ID NO: 318609
ccaguacagccugaaaucu

SEQ ID NO: 575538 - RNA, 19 nt, Artificial Sequence
  Description of Artificial Sequence: Synthetic oligonucleotide
  Antisense strand to SEQ ID NO: 575537
agauuucaggcuguacugg

SEQ ID NO: 575539 - RNA, 19 nt, Artificial Sequence
  Description of Artificial Sequence: Synthetic oligonucleotide
  Sense strand starting at position 303 of SEQ ID NO: 318609
ccugaaaucuguucuugag

SEQ ID NO: 575540 - RNA, 19 nt, Artificial Sequence
  Description of Artificial Sequence: Synthetic oligonucleotide
  Antisense strand to SEQ ID NO: 575539
cucaagaacagauuucagg

SEQ ID NO: 575541 - RNA, 19 nt, Artificial Sequence
  Description of Artificial Sequence: Synthetic oligonucleotide
  Sense strand starting at position 305 of SEQ ID NO: 318609
ugaaaucuguucuugagag

SEQ ID NO: 575542 - RNA, 19 nt, Artificial Sequence
  Description of Artificial Sequence: Synthetic oligonucleotide
  Antisense strand to SEQ ID NO: 575541
cucucaagaacagauuuca

SEQ ID NO: 575543 - RNA, 19 nt, Artificial Sequence
  Description of Artificial Sequence: Synthetic oligonucleotide
  Sense strand starting at position 473 of SEQ ID NO: 318609
ucauuuagcuuguccugua

SEQ ID NO: 575544 - RNA, 19 nt, Artificial Sequence
  Description of Artificial Sequence: Synthetic oligonucleotide
  Antisense strand to SEQ ID NO: 575543
uacaggacaagcuaaauga

SEQ ID NO: 575545 - RNA, 19 nt, Artificial Sequence
  Description of Artificial Sequence: Synthetic oligonucleotide
  Sense strand starting at position 517 of SEQ ID NO: 318609
gucaaugauguuuauaucu

SEQ ID NO: 575546 - RNA, 19 nt, Artificial Sequence
  Description of Artificial Sequence: Synthetic oligonucleotide
  Antisense strand to SEQ ID NO: 575545
agauauaaacaucauugac

SEQ ID NO: 575547 - RNA, 19 nt, Artificial Sequence
  Description of Artificial Sequence: Synthetic oligonucleotide
  Sense strand starting at position 591 of SEQ ID NO: 318609
ugaauaucucccgaagcuc

SEQ ID NO: 575548 - RNA, 19 nt, Artificial Sequence
  Description of Artificial Sequence: Synthetic oligonucleotide
  Antisense strand to SEQ ID NO: 575547
gagcuucgggagauauuca

SEQ ID NO: 575549 - RNA, 19 nt, Artificial Sequence
  Description of Artificial Sequence: Synthetic oligonucleotide
  Sense strand starting at position 660 of SEQ ID NO: 318609
aagagauauccaggccuug

SEQ ID NO: 575550 - RNA, 19 nt, Artificial Sequence
  Description of Artificial Sequence: Synthetic oligonucleotide
  Antisense strand to SEQ ID NO: 575549
caaggccuggauaucucuu

SEQ ID NO: 575551 - RNA, 19 nt, Artificial Sequence
  Description of Artificial Sequence: Synthetic oligonucleotide
  Sense strand starting at position 835 of SEQ ID NO: 318609
auucuuuagaggcagagua

SEQ ID NO: 575552 - RNA, 19 nt, Artificial Sequence
  Description of Artificial Sequence: Synthetic oligonucleotide
  Antisense strand to SEQ ID NO: 575551
uacucugccucuaaagaau

SEQ ID NO: 575553 - RNA, 19 nt, Artificial Sequence
  Description of Artificial Sequence: Synthetic oligonucleotide
  Sense strand starting at position 837 of SEQ ID NO: 318609
ucuuuagaggcagaguaau

SEQ ID NO: 575554 - RNA, 19 nt, Artificial Sequence
  Description of Artificial Sequence: Synthetic oligonucleotide
  Antisense strand to SEQ ID NO: 575553
auuacucugccucuaaaga

SEQ ID NO: 575555 - RNA, 19 nt, Artificial Sequence
  Description of Artificial Sequence: Synthetic oligonucleotide
  Sense strand starting at position 1289 of SEQ ID NO: 318609
auaaaugcugguuacacua

SEQ ID NO: 575556 - RNA, 19 nt, Artificial Sequence
  Description of Artificial Sequence: Synthetic oligonucleotide
  Antisense strand to SEQ ID NO: 575555
uaguguaaccagcauuuau

SEQ ID NO: 575557 - RNA, 19 nt, Artificial Sequence
  Description of Artificial Sequence: Synthetic oligonucleotide
  Sense strand starting at position 1371 of SEQ ID NO: 318609
acaagaaguucucuguaga

SEQ ID NO: 575558 - RNA, 19 nt, Artificial Sequence
  Description of Artificial Sequence: Synthetic oligonucleotide
  Antisense strand to SEQ ID NO: 575557
ucuacagagaacuucuugu

SEQ ID NO: 575559 - RNA, 19 nt, Artificial Sequence
  Description of Artificial Sequence: Synthetic oligonucleotide
  Sense strand starting at position 1372 of SEQ ID NO: 318609
caagaaguucucuguagau

SEQ ID NO: 575560 - RNA, 19 nt, Artificial Sequence
  Description of Artificial Sequence: Synthetic oligonucleotide
  Antisense strand to SEQ ID NO: 575559
aucuacagagaacuucuug

SEQ ID NO: 575561 - RNA, 19 nt, Artificial Sequence
  Description of Artificial Sequence: Synthetic oligonucleotide
  Sense strand starting at position 1374 of SEQ ID NO: 318609
agaaguucucuguagauca

SEQ ID NO: 575562 - RNA, 19 nt, Artificial Sequence
  Description of Artificial Sequence: Synthetic oligonucleotide
  Antisense strand to SEQ ID NO: 575561
ugaucuacagagaacuucu

SEQ ID NO: 575563 - RNA, 19 nt, Artificial Sequence
  Description of Artificial Sequence: Synthetic oligonucleotide
  Sense strand starting at position 1663 of SEQ ID NO: 318609
acaaacucucccggaacaa

SEQ ID NO: 575564 - RNA, 19 nt, Artificial Sequence
  Description of Artificial Sequence: Synthetic oligonucleotide
  Antisense strand to SEQ ID NO: 575563
uuguuccgggagaguuugu

SEQ ID NO: 575565 - RNA, 19 nt, Artificial Sequence
  Description of Artificial Sequence: Synthetic oligonucleotide
  Sense strand starting at position 1733 of SEQ ID NO: 318609
caauccagugacgauuaua

SEQ ID NO: 575566 - RNA, 19 nt, Artificial Sequence
  Description of Artificial Sequence: Synthetic oligonucleotide
  Antisense strand to SEQ ID NO: 575565
uauaaucgucacuggauug

SEQ ID NO: 575567 - RNA, 19 nt, Artificial Sequence
  Description of Artificial Sequence: Synthetic oligonucleotide
  Sense strand starting at position 1736 of SEQ ID NO: 318609
uccagugacgauuauaagu

SEQ ID NO: 575568 - RNA, 19 nt, Artificial Sequence
  Description of Artificial Sequence: Synthetic oligonucleotide
  Antisense strand to SEQ ID NO: 575567
acuuauaaucgucacugga

SEQ ID NO: 575569 - RNA, 19 nt, Artificial Sequence
  Description of Artificial Sequence: Synthetic oligonucleotide
  Sense strand starting at position 1907 of SEQ ID NO: 318609
gcgcgaaaucuugccgaga

SEQ ID NO: 575570 - RNA, 19 nt, Artificial Sequence
  Description of Artificial Sequence: Synthetic oligonucleotide
  Antisense strand to SEQ ID NO: 575569
ucucggcaagauuucgcgc

SEQ ID NO: 575571 - RNA, 19 nt, Artificial Sequence
  Description of Artificial Sequence: Synthetic oligonucleotide
  Sense strand starting at position 2151 of SEQ ID NO: 318609
aaaugacaguguuucggaa

SEQ ID NO: 575572 - RNA, 19 nt, Artificial Sequence
  Description of Artificial Sequence: Synthetic oligonucleotide
  Antisense strand to SEQ ID NO: 575571
uuccgaaacacugucauuu

SEQ ID NO: 575573 - RNA, 19 nt, Artificial Sequence
  Description of Artificial Sequence: Synthetic oligonucleotide
  Sense strand starting at position 2349 of SEQ ID NO: 318609
ggauguucccuagagucua

SEQ ID NO: 575574 - RNA, 19 nt, Artificial Sequence
  Description of Artificial Sequence: Synthetic oligonucleotide
  Antisense strand to SEQ ID NO: 575573
uagacucuagggaacaucc

SEQ ID NO: 575575 - RNA, 19 nt, Artificial Sequence
  Description of Artificial Sequence: Synthetic oligonucleotide
  Sense strand starting at position 2445 of SEQ ID NO: 318609
ggacaugcagcuuacuaua

SEQ ID NO: 575576 - RNA, 19 nt, Artificial Sequence
  Description of Artificial Sequence: Synthetic oligonucleotide
  Antisense strand to SEQ ID NO: 575575
uauaguaagcugcaugucc

SEQ ID NO: 575577 - RNA, 19 nt, Artificial Sequence
  Description of Artificial Sequence: Synthetic oligonucleotide
  Sense strand starting at position 2839 of SEQ ID NO: 318609
acuuguguucuauaauacu

SEQ ID NO: 575578 - RNA, 19 nt, Artificial Sequence
  Description of Artificial Sequence: Synthetic oligonucleotide
  Antisense strand to SEQ ID NO: 575577
aguauuauagaacacaagu

SEQ ID NO: 575579 - RNA, 19 nt, Artificial Sequence
  Description of Artificial Sequence: Synthetic oligonucleotide
  Sense strand starting at position 2932 of SEQ ID NO: 318609
uuuggacagaauugucuga

SEQ ID NO: 575580 - RNA, 19 nt, Artificial Sequence
  Description of Artificial Sequence: Synthetic oligonucleotide
  Antisense strand to SEQ ID NO: 575579
ucagacaauucuguccaaa

SEQ ID NO: 575581 - RNA, 19 nt, Artificial Sequence
  Description of Artificial Sequence: Synthetic oligonucleotide
  Sense strand starting at position 2934 of SEQ ID NO: 318609
uggacagaauugucugaua

SEQ ID NO: 575582 - RNA, 19 nt, Artificial Sequence
  Description of Artificial Sequence: Synthetic oligonucleotide
  Antisense strand to SEQ ID NO: 575581
uaucagacaauucugucca

SEQ ID NO: 575583 - RNA, 19 nt, Artificial Sequence
  Description of Artificial Sequence: Synthetic oligonucleotide
  Sense strand starting at position 2945 of SEQ ID NO: 318609
gucugauagacugagcauc

SEQ ID NO: 575584 - RNA, 19 nt, Artificial Sequence
  Description of Artificial Sequence: Synthetic oligonucleotide
  Antisense strand to SEQ ID NO: 575583
gaugcucagucuaucagac

SEQ ID NO: 575585 - RNA, 19 nt, Artificial Sequence
  Description of Artificial Sequence: Synthetic oligonucleotide
  Sense strand starting at position 2956 of SEQ ID NO: 318609
ugagcaucugguuaaagua

SEQ ID NO: 575586 - RNA, 19 nt, Artificial Sequence
  Description of Artificial Sequence: Synthetic oligonucleotide
  Antisense strand to SEQ ID NO: 575585
uacuuuaaccagaugcuca

SEQ ID NO: 575587 - RNA, 19 nt, Artificial Sequence
  Description of Artificial Sequence: Synthetic oligonucleotide
  Sense strand starting at position 2999 of SEQ ID NO: 318609
gucucucauguacaaguaa

SEQ ID NO: 575588 - RNA, 19 nt, Artificial Sequence
  Description of Artificial Sequence: Synthetic oligonucleotide
  Antisense strand to SEQ ID NO: 575587
uuacuuguacaugagagac

SEQ ID NO: 575589 - RNA, 19 nt, Artificial Sequence
  Description of Artificial Sequence: Synthetic oligonucleotide
  Sense strand starting at position 3146 of SEQ ID NO: 318609
guugguacuuauuucuauu

SEQ ID NO: 575590 - RNA, 19 nt, Artificial Sequence
  Description of Artificial Sequence: Synthetic oligonucleotide
  Antisense strand to SEQ ID NO: 575589
aauagaaauaaguaccaac

SEQ ID NO: 575591 - RNA, 19 nt, Artificial Sequence
  Description of Artificial Sequence: Synthetic oligonucleotide
  Sense strand starting at position 3305 of SEQ ID NO: 318609
auucuuguaugauugaaag

SEQ ID NO: 575592 - RNA, 19 nt, Artificial Sequence
  Description of Artificial Sequence: Synthetic oligonucleotide
  Antisense strand to SEQ ID NO: 575591
cuuucaaucauacaagaau

SEQ ID NO: 575593 - RNA, 19 nt, Artificial Sequence
  Description of Artificial Sequence: Synthetic oligonucleotide
  Sense strand starting at position 3450 of SEQ ID NO: 318609
ucucaaauccuguagugau

SEQ ID NO: 575594 - RNA, 19 nt, Artificial Sequence
  Description of Artificial Sequence: Synthetic oligonucleotide
  Antisense strand to SEQ ID NO: 575593
aucacuacaggauuugaga

SEQ ID NO: 575595 - RNA, 19 nt, Artificial Sequence
  Description of Artificial Sequence: Synthetic oligonucleotide
  Sense strand starting at position 3532 of SEQ ID NO: 318609
cuuucuagucaaggacaau

SEQ ID NO: 575596 - RNA, 19 nt, Artificial Sequence
  Description of Artificial Sequence: Synthetic oligonucleotide
  Antisense strand to SEQ ID NO: 575595
auuguccuugacuagaaag

SEQ ID NO: 575597 - RNA, 19 nt, Artificial Sequence
  Description of Artificial Sequence: Synthetic oligonucleotide
  Sense strand starting at position 3597 of SEQ ID NO: 318609
gugguuuagcuagaaugag

SEQ ID NO: 575598 - RNA, 19 nt, Artificial Sequence
  Description of Artificial Sequence: Synthetic oligonucleotide
  Antisense strand to SEQ ID NO: 575597
cucauucuagcuaaaccac

SEQ ID NO: 575599 - RNA, 19 nt, Artificial Sequence
  Description of Artificial Sequence: Synthetic oligonucleotide
  Sense strand starting at position 3605 of SEQ ID NO: 318609
gcuagaaugagauacuguu

SEQ ID NO: 575600 - RNA, 19 nt, Artificial Sequence
  Description of Artificial Sequence: Synthetic oligonucleotide
  Antisense strand to SEQ ID NO: 575599
aacaguaucucauucuagc

SEQ ID NO: 575601 - RNA, 19 nt, Artificial Sequence
  Description of Artificial Sequence: Synthetic oligonucleotide
  Sense strand starting at position 3615 of SEQ ID NO: 318609
gauacuguugugggaggaa

SEQ ID NO: 575602 - RNA, 19 nt, Artificial Sequence
  Description of Artificial Sequence: Synthetic oligonucleotide
  Antisense strand to SEQ ID NO: 575601
uuccucccacaacaguauc

SEQ ID NO: 575603 - RNA, 19 nt, Artificial Sequence
  Description of Artificial Sequence: Synthetic oligonucleotide
  Sense strand starting at position 3618 of SEQ ID NO: 318609
acuguugugggaggaaauu

SEQ ID NO: 575604 - RNA, 19 nt, Artificial Sequence
  Description of Artificial Sequence: Synthetic oligonucleotide
  Antisense strand to SEQ ID NO: 575603
aauuuccucccacaacagu

SEQ ID NO: 575605 - RNA, 19 nt, Artificial Sequence
  Description of Artificial Sequence: Synthetic oligonucleotide
  Sense strand starting at position 3729 of SEQ ID NO: 318609
uaauguguugaagaauguu

SEQ ID NO: 575606 - RNA, 19 nt, Artificial Sequence
  Description of Artificial Sequence: Synthetic oligonucleotide
  Antisense strand to SEQ ID NO: 575605
aacauucuucaacacauua

SEQ ID NO: 575607 - RNA, 19 nt, Artificial Sequence
  Description of Artificial Sequence: Synthetic oligonucleotide
  Sense strand starting at position 3737 of SEQ ID NO: 318609
ugaagaauguuagcugacu

SEQ ID NO: 575608 - RNA, 19 nt, Artificial Sequence
  Description of Artificial Sequence: Synthetic oligonucleotide
  Antisense strand to SEQ ID NO: 575607
agucagcuaacauucuuca

SEQ ID NO: 575609 - RNA, 19 nt, Artificial Sequence
  Description of Artificial Sequence: Synthetic oligonucleotide
  Sense strand starting at position 3738 of SEQ ID NO: 318609
gaagaauguuagcugacuu

SEQ ID NO: 575610 - RNA, 19 nt, Artificial Sequence
  Description of Artificial Sequence: Synthetic oligonucleotide
  Antisense strand to SEQ ID NO: 575609
aagucagcuaacauucuuc

SEQ ID NO: 575611 - RNA, 19 nt, Artificial Sequence
  Description of Artificial Sequence: Synthetic oligonucleotide
  Sense strand starting at position 3863 of SEQ ID NO: 318609
augugaggucauuauacau

SEQ ID NO: 575612 - RNA, 19 nt, Artificial Sequence
  Description of Artificial Sequence: Synthetic oligonucleotide
  Antisense strand to SEQ ID NO: 575611
auguauaaugaccucacau

SEQ ID NO: 575613 - RNA, 19 nt, Artificial Sequence
  Description of Artificial Sequence: Synthetic oligonucleotide
  Sense strand starting at position 69 of SEQ ID NO: 318610
cgcccuucccuagagauaa

SEQ ID NO: 575614 - RNA, 19 nt, Artificial Sequence
  Description of Artificial Sequence: Synthetic oligonucleotide
  Antisense strand to SEQ ID NO: 575613
uuaucucuagggaagggcg

SEQ ID NO: 575615 - RNA, 19 nt, Artificial Sequence
  Description of Artificial Sequence: Synthetic oligonucleotide
  Sense strand starting at position 121 of SEQ ID NO: 318610
ccuauuuauguuugcaugu

SEQ ID NO: 575616 - RNA, 19 nt, Artificial Sequence
  Description of Artificial Sequence: Synthetic oligonucleotide
  Antisense strand to SEQ ID NO: 575615
acaugcaaacauaaauagg

SEQ ID NO: 575617 - RNA, 19 nt, Artificial Sequence
  Description of Artificial Sequence: Synthetic oligonucleotide
  Sense strand starting at position 122 of SEQ ID NO: 318610
cuauuuauguuugcaugua

SEQ ID NO: 575618 - RNA, 19 nt, Artificial Sequence
  Description of Artificial Sequence: Synthetic oligonucleotide
  Antisense strand to SEQ ID NO: 575617
uacaugcaaacauaaauag

SEQ ID NO: 575619 - RNA, 19 nt, Artificial Sequence
  Description of Artificial Sequence: Synthetic oligonucleotide
  Sense strand starting at position 153 of SEQ ID NO: 318610
uguacauacucuuuguuau

SEQ ID NO: 575620 - RNA, 19 nt, Artificial Sequence
  Description of Artificial Sequence: Synthetic oligonucleotide
  Antisense strand to SEQ ID NO: 575619
auaacaaagaguauguaca

SEQ ID NO: 575621 - RNA, 19 nt, Artificial Sequence
  Description of Artificial Sequence: Synthetic oligonucleotide
  Sense strand starting at position 154 of SEQ ID NO: 318610
guacauacucuuuguuaua

SEQ ID NO: 575622 - RNA, 19 nt, Artificial Sequence
  Description of Artificial Sequence: Synthetic oligonucleotide
  Antisense strand to SEQ ID NO: 575621
uauaacaaagaguauguac

SEQ ID NO: 575623 - RNA, 19 nt, Artificial Sequence
  Description of Artificial Sequence: Synthetic oligonucleotide
  Sense strand starting at position 353 of SEQ ID NO: 318610
uucccauacccaggagaau

SEQ ID NO: 575624 - RNA, 19 nt, Artificial Sequence
  Description of Artificial Sequence: Synthetic oligonucleotide
  Antisense strand to SEQ ID NO: 575623
auucuccuggguaugggaa

SEQ ID NO: 575625 - RNA, 19 nt, Artificial Sequence
  Description of Artificial Sequence: Synthetic oligonucleotide
  Sense strand starting at position 477 of SEQ ID NO: 318610
gggcacuauguuugaucca

SEQ ID NO: 575626 - RNA, 19 nt, Artificial Sequence
  Description of Artificial Sequence: Synthetic oligonucleotide
  Antisense strand to SEQ ID NO: 575625
uggaucaaacauagugccc

SEQ ID NO: 575627 - RNA, 19 nt, Artificial Sequence
  Description of Artificial Sequence: Synthetic oligonucleotide
  Sense strand starting at position 586 of SEQ ID NO: 318610
augucuugugcgcugccaa

SEQ ID NO: 575628 - RNA, 19 nt, Artificial Sequence
  Description of Artificial Sequence: Synthetic oligonucleotide
  Antisense strand to SEQ ID NO: 575627
uuggcagcgcacaagacau

SEQ ID NO: 575629 - RNA, 19 nt, Artificial Sequence
  Description of Artificial Sequence: Synthetic oligonucleotide
  Sense strand starting at position 609 of SEQ ID NO: 318610
uuuaccuuugggugaauga

SEQ ID NO: 575630 - RNA, 19 nt, Artificial Sequence
  Description of Artificial Sequence: Synthetic oligonucleotide
  Antisense strand to SEQ ID NO: 575629
ucauucacccaaagguaaa

SEQ ID NO: 575631 - RNA, 19 nt, Artificial Sequence
  Description of Artificial Sequence: Synthetic oligonucleotide
  Sense strand starting at position 618 of SEQ ID NO: 318610
gggugaaugauguaacuuu

SEQ ID NO: 575632 - RNA, 19 nt, Artificial Sequence
  Description of Artificial Sequence: Synthetic oligonucleotide
  Antisense strand to SEQ ID NO: 575631
aaaguuacaucauucaccc

SEQ ID NO: 575633 - RNA, 19 nt, Artificial Sequence
  Description of Artificial Sequence: Synthetic oligonucleotide
  Sense strand starting at position 703 of SEQ ID NO: 318610
ccacgaauggccuacaauu

SEQ ID NO: 575634 - RNA, 19 nt, Artificial Sequence
  Description of Artificial Sequence: Synthetic oligonucleotide
  Antisense strand to SEQ ID NO: 575633
aauuguaggccauucgugg

SEQ ID NO: 575635 - RNA, 19 nt, Artificial Sequence
  Description of Artificial Sequence: Synthetic oligonucleotide
  Sense strand starting at position 711 of SEQ ID NO: 318610
ggccuacaauuugauaaac

SEQ ID NO: 575636 - RNA, 19 nt, Artificial Sequence
  Description of Artificial Sequence: Synthetic oligonucleotide
  Antisense strand to SEQ ID NO: 575635
guuuaucaaauuguaggcc

SEQ ID NO: 575637 - RNA, 19 nt, Artificial Sequence
  Description of Artificial Sequence: Synthetic oligonucleotide
  Sense strand starting at position 737 of SEQ ID NO: 318610
ggacuaaacggcuagcaaa

SEQ ID NO: 575638 - RNA, 19 nt, Artificial Sequence
  Description of Artificial Sequence: Synthetic oligonucleotide
  Antisense strand to SEQ ID NO: 575637
uuugcuagccguuuagucc

SEQ ID NO: 575639 - RNA, 19 nt, Artificial Sequence
  Description of Artificial Sequence: Synthetic oligonucleotide
  Sense strand starting at position 856 of SEQ ID NO: 318610
cgaaaugcucuauaugccu

SEQ ID NO: 575640 - RNA, 19 nt, Artificial Sequence
  Description of Artificial Sequence: Synthetic oligonucleotide
  Antisense strand to SEQ ID NO: 575639
aggcauauagagcauuucg

SEQ ID NO: 575641 - RNA, 19 nt, Artificial Sequence
  Description of Artificial Sequence: Synthetic oligonucleotide
  Sense strand starting at position 924 of SEQ ID NO: 318610
cagcaauuucgucacguca

SEQ ID NO: 575642 - RNA, 19 nt, Artificial Sequence
  Description of Artificial Sequence: Synthetic oligonucleotide
  Antisense strand to SEQ ID NO: 575641
ugacgugacgaaauugcug

SEQ ID NO: 575643 - RNA, 19 nt, Artificial Sequence
  Description of Artificial Sequence: Synthetic oligonucleotide
  Sense strand starting at position 949 of SEQ ID NO: 318610
ucugaacucguuuaccgaa

SEQ ID NO: 575644 - RNA, 19 nt, Artificial Sequence
  Description of Artificial Sequence: Synthetic oligonucleotide
  Antisense strand to SEQ ID NO: 575643
uucgguaaacgaguucaga

SEQ ID NO: 575645 - RNA, 19 nt, Artificial Sequence
  Description of Artificial Sequence: Synthetic oligonucleotide
  Sense strand starting at position 951 of SEQ ID NO: 318610
ugaacucguuuaccgaaau

SEQ ID NO: 575646 - RNA, 19 nt, Artificial Sequence
  Description of Artificial Sequence: Synthetic oligonucleotide
  Antisense strand to SEQ ID NO: 575645
auuucgguaaacgaguuca

SEQ ID NO: 575647 - RNA, 19 nt, Artificial Sequence
  Description of Artificial Sequence: Synthetic oligonucleotide
  Sense strand starting at position 973 of SEQ ID NO: 318610
aucugaggcguuuaucaga

SEQ ID NO: 575648 - RNA, 19 nt, Artificial Sequence
  Description of Artificial Sequence: Synthetic oligonucleotide
  Antisense strand to SEQ ID NO: 575647
ucugauaaacgccucagau

SEQ ID NO: 575649 - RNA, 19 nt, Artificial Sequence
  Description of Artificial Sequence: Synthetic oligonucleotide
  Sense strand starting at position 1034 of SEQ ID NO: 318610
ugaggcauccaccauuaau

SEQ ID NO: 575650 - RNA, 19 nt, Artificial Sequence
  Description of Artificial Sequence: Synthetic oligonucleotide
  Antisense strand to SEQ ID NO: 575649
auuaaugguggaugccuca

SEQ ID NO: 575651 - RNA, 19 nt, Artificial Sequence
  Description of Artificial Sequence: Synthetic oligonucleotide
  Sense strand starting at position 1068 of SEQ ID NO: 318610
cagauauggccuuacguua

SEQ ID NO: 575652 - RNA, 19 nt, Artificial Sequence
  Description of Artificial Sequence: Synthetic oligonucleotide
  Antisense strand to SEQ ID NO: 575651
uaacguaaggccauaucug

SEQ ID NO: 575653 - RNA, 19 nt, Artificial Sequence
  Description of Artificial Sequence: Synthetic oligonucleotide
  Sense strand starting at position 1643 of SEQ ID NO: 318610
ccuggcuuucgaugacaca

SEQ ID NO: 575654 - RNA, 19 nt, Artificial Sequence
  Description of Artificial Sequence: Synthetic oligonucleotide
  Antisense strand to SEQ ID NO: 575653
ugugucaucgaaagccagg

SEQ ID NO: 575655 - RNA, 19 nt, Artificial Sequence
  Description of Artificial Sequence: Synthetic oligonucleotide
  Sense strand starting at position 1644 of SEQ ID NO: 318610
cuggcuuucgaugacacau

SEQ ID NO: 575656 - RNA, 19 nt, Artificial Sequence
  Description of Artificial Sequence: Synthetic oligonucleotide
  Antisense strand to SEQ ID NO: 575655
augugucaucgaaagccag

SEQ ID NO: 575657 - RNA, 19 nt, Artificial Sequence
  Description of Artificial Sequence: Synthetic oligonucleotide
  Sense strand starting at position 1655 of SEQ ID NO: 318610
ugacacauuuccgucgcaa

SEQ ID NO: 575658 - RNA, 19 nt, Artificial Sequence
  Description of Artificial Sequence: Synthetic oligonucleotide
  Antisense strand to SEQ ID NO: 575657
uugcgacggaaauguguca

SEQ ID NO: 575659 - RNA, 19 nt, Artificial Sequence
  Description of Artificial Sequence: Synthetic oligonucleotide
  Sense strand starting at position 1657 of SEQ ID NO: 318610
acacauuuccgucgcaaag

SEQ ID NO: 575660 - RNA, 19 nt, Artificial Sequence
  Description of Artificial Sequence: Synthetic oligonucleotide
  Antisense strand to SEQ ID NO: 575659
cuuugcgacggaaaugugu

SEQ ID NO: 575661 - RNA, 19 nt, Artificial Sequence
  Description of Artificial Sequence: Synthetic oligonucleotide
  Sense strand starting at position 1947 of SEQ ID NO: 318610
uuauguauaugucuuagag

SEQ ID NO: 575662 - RNA, 19 nt, Artificial Sequence
  Description of Artificial Sequence: Synthetic oligonucleotide
  Antisense strand to SEQ ID NO: 575661
cucuaagacauauacauaa

SEQ ID NO: 575663 - RNA, 19 nt, Artificial Sequence
  Description of Artificial Sequence: Synthetic oligonucleotide
  Sense strand starting at position 1953 of SEQ ID NO: 318610
auaugucuuagagacguga

SEQ ID NO: 575664 - RNA, 19 nt, Artificial Sequence
  Description of Artificial Sequence: Synthetic oligonucleotide
  Antisense strand to SEQ ID NO: 575663
ucacgucucuaagacauau

SEQ ID NO: 575665 - RNA, 19 nt, Artificial Sequence
  Description of Artificial Sequence: Synthetic oligonucleotide
  Sense strand starting at position 3242 of SEQ ID NO: 318610
aguagauuauuugauacag

SEQ ID NO: 575666 - RNA, 19 nt, Artificial Sequence
  Description of Artificial Sequence: Synthetic oligonucleotide
  Antisense strand to SEQ ID NO: 575665
cuguaucaaauaaucuacu

SEQ ID NO: 575667 - RNA, 19 nt, Artificial Sequence
  Description of Artificial Sequence: Synthetic oligonucleotide
  Sense strand starting at position 3325 of SEQ ID NO: 318610
ucacuaguucuugagccuu

SEQ ID NO: 575668 - RNA, 19 nt, Artificial Sequence
  Description of Artificial Sequence: Synthetic oligonucleotide
  Antisense strand to SEQ ID NO: 575667
aaggcucaagaacuaguga

SEQ ID NO: 575669 - RNA, 19 nt, Artificial Sequence
  Description of Artificial Sequence: Synthetic oligonucleotide
  Sense strand starting at position 3327 of SEQ ID NO: 318610
acuaguucuugagccuuua

SEQ ID NO: 575670 - RNA, 19 nt, Artificial Sequence
  Description of Artificial Sequence: Synthetic oligonucleotide
  Antisense strand to SEQ ID NO: 575669
uaaaggcucaagaacuagu

SEQ ID NO: 575671 - RNA, 19 nt, Artificial Sequence
  Description of Artificial Sequence: Synthetic oligonucleotide
  Sense strand starting at position 3555 of SEQ ID NO: 318610
cuggaauggccauguaaua

SEQ ID NO: 575672 - RNA, 19 nt, Artificial Sequence
  Description of Artificial Sequence: Synthetic oligonucleotide
  Antisense strand to SEQ ID NO: 575671
uauuacauggccauuccag

SEQ ID NO: 575673 - RNA, 19 nt, Artificial Sequence
  Description of Artificial Sequence: Synthetic oligonucleotide
  Sense strand starting at position 3638 of SEQ ID NO: 318610
aauagagccgaguaucuau

SEQ ID NO: 575674 - RNA, 19 nt, Artificial Sequence
  Description of Artificial Sequence: Synthetic oligonucleotide
  Antisense strand to SEQ ID NO: 575673
auagauacucggcucuauu

SEQ ID NO: 575675 - RNA, 19 nt, Artificial Sequence
  Description of Artificial Sequence: Synthetic oligonucleotide
  Sense strand starting at position 3680 of SEQ ID NO: 318610
cugguaauaaguugugaaa

SEQ ID NO: 575676 - RNA, 19 nt, Artificial Sequence
  Description of Artificial Sequence: Synthetic oligonucleotide
  Antisense strand to SEQ ID NO: 575675
uuucacaacuuauuaccag

SEQ ID NO: 575677 - RNA, 19 nt, Artificial Sequence
  Description of Artificial Sequence: Synthetic oligonucleotide
  Sense strand starting at position 3694 of SEQ ID NO: 318610
ugaaacaaguguucucuaa

SEQ ID NO: 575678 - RNA, 19 nt, Artificial Sequence
  Description of Artificial Sequence: Synthetic oligonucleotide
  Antisense strand to SEQ ID NO: 575677
uuagagaacacuuguuuca

SEQ ID NO: 575679 - RNA, 19 nt, Artificial Sequence
  Description of Artificial Sequence: Synthetic oligonucleotide
  Sense strand starting at position 3795 of SEQ ID NO: 318610
gagaaauaugagugguagu

SEQ ID NO: 575680 - RNA, 19 nt, Artificial Sequence
  Description of Artificial Sequence: Synthetic oligonucleotide
  Antisense strand to SEQ ID NO: 575679
acuaccacucauauuucuc

SEQ ID NO: 575681 - RNA, 19 nt, Artificial Sequence
  Description of Artificial Sequence: Synthetic oligonucleotide
  Sense strand starting at position 3796 of SEQ ID NO: 318610
agaaauaugagugguaguu

SEQ ID NO: 575682 - RNA, 19 nt, Artificial Sequence
  Description of Artificial Sequence: Synthetic oligonucleotide
  Antisense strand to SEQ ID NO: 575681
aacuaccacucauauuucu

SEQ ID NO: 575683 - RNA, 19 nt, Artificial Sequence
  Description of Artificial Sequence: Synthetic oligonucleotide
  Sense strand starting at position 3815 of SEQ ID NO: 318610
gguguuauagcuuaaccaa

SEQ ID NO: 575684 - RNA, 19 nt, Artificial Sequence
  Description of Artificial Sequence: Synthetic oligonucleotide
  Antisense strand to SEQ ID NO: 575683
uugguuaagcuauaacacc

SEQ ID NO: 575685 - RNA, 19 nt, Artificial Sequence
  Description of Artificial Sequence: Synthetic oligonucleotide
  Sense strand starting at position 3869 of SEQ ID NO: 318610
gugaguucucagcaagaua

SEQ ID NO: 575686 - RNA, 19 nt, Artificial Sequence
  Description of Artificial Sequence: Synthetic oligonucleotide
  Antisense strand to SEQ ID NO: 575685
uaucuugcugagaacucac

SEQ ID NO: 575687 - RNA, 19 nt, Artificial Sequence
  Description of Artificial Sequence: Synthetic oligonucleotide
  Sense strand starting at position 3931 of SEQ ID NO: 318610
gguagcuauuucccuaagu

SEQ ID NO: 575688 - RNA, 19 nt, Artificial Sequence
  Description of Artificial Sequence: Synthetic oligonucleotide
  Antisense strand to SEQ ID NO: 575687
acuuagggaaauagcuacc

SEQ ID NO: 575689 - RNA, 19 nt, Artificial Sequence
  Description of Artificial Sequence: Synthetic oligonucleotide
  Sense strand starting at position 3932 of SEQ ID NO: 318610
guagcuauuucccuaagug

SEQ ID NO: 575690 - RNA, 19 nt, Artificial Sequence
  Description of Artificial Sequence: Synthetic oligonucleotide
  Antisense strand to SEQ ID NO: 575689
cacuuagggaaauagcuac

SEQ ID NO: 575691 - RNA, 19 nt, Artificial Sequence
  Description of Artificial Sequence: Synthetic oligonucleotide
  Sense strand starting at position 3966 of SEQ ID NO: 318610
cuuugauguuaaguaaguu

SEQ ID NO: 575692 - RNA, 19 nt, Artificial Sequence
  Description of Artificial Sequence: Synthetic oligonucleotide
  Antisense strand to SEQ ID NO: 575691
aacuuacuuaacaucaaag

SEQ ID NO: 575693 - RNA, 19 nt, Artificial Sequence
  Description of Artificial Sequence: Synthetic oligonucleotide
  Sense strand starting at position 258 of SEQ ID NO: 318611
uggccuauuugcuuuaacu

SEQ ID NO: 575694 - RNA, 19 nt, Artificial Sequence
  Description of Artificial Sequence: Synthetic oligonucleotide
  Antisense strand to SEQ ID NO: 575693
aguuaaagcaaauaggcca

SEQ ID NO: 575695 - RNA, 19 nt, Artificial Sequence
  Description of Artificial Sequence: Synthetic oligonucleotide
  Sense strand starting at position 319 of SEQ ID NO: 318611
gcgcguguaaucccagcaa

SEQ ID NO: 575696 - RNA, 19 nt, Artificial Sequence
  Description of Artificial Sequence: Synthetic oligonucleotide
  Antisense strand to SEQ ID NO: 575695
uugcugggauuacacgcgc

SEQ ID NO: 575697 - RNA, 19 nt, Artificial Sequence
  Description of Artificial Sequence: Synthetic oligonucleotide
  Sense strand starting at position 498 of SEQ ID NO: 318611
ugcgcccuucccuagagau

SEQ ID NO: 575698 - RNA, 19 nt, Artificial Sequence
  Description of Artificial Sequence: Synthetic oligonucleotide
  Antisense strand to SEQ ID NO: 575697
aucucuagggaagggcgca

SEQ ID NO: 575699 - RNA, 19 nt, Artificial Sequence
  Description of Artificial Sequence: Synthetic oligonucleotide
  Sense strand starting at position 500 of SEQ ID NO: 318611
cgcccuucccuagagauaa

SEQ ID NO: 575700 - RNA, 19 nt, Artificial Sequence
  Description of Artificial Sequence: Synthetic oligonucleotide
  Antisense strand to SEQ ID NO: 575699
uuaucucuagggaagggcg

SEQ ID NO: 575701 - RNA, 19 nt, Artificial Sequence
  Description of Artificial Sequence: Synthetic oligonucleotide
  Sense strand starting at position 552 of SEQ ID NO: 318611
ccuauuuauguuugcaugu

SEQ ID NO: 575702 - RNA, 19 nt, Artificial Sequence
  Description of Artificial Sequence: Synthetic oligonucleotide
  Antisense strand to SEQ ID NO: 575701
acaugcaaacauaaauagg

SEQ ID NO: 575703 - RNA, 19 nt, Artificial Sequence
  Description of Artificial Sequence: Synthetic oligonucleotide
  Sense strand starting at position 553 of SEQ ID NO: 318611
cuauuuauguuugcaugua

SEQ ID NO: 575704 - RNA, 19 nt, Artificial Sequence
  Description of Artificial Sequence: Synthetic oligonucleotide
  Antisense strand to SEQ ID NO: 575703
uacaugcaaacauaaauag

SEQ ID NO: 575705 - RNA, 19 nt, Artificial Sequence
  Description of Artificial Sequence: Synthetic oligonucleotide
  Sense strand starting at position 584 of SEQ ID NO: 318611
uguacauacucuuuguuau

SEQ ID NO: 575706 - RNA, 19 nt, Artificial Sequence
  Description of Artificial Sequence: Synthetic oligonucleotide
  Antisense strand to SEQ ID NO: 575705
auaacaaagaguauguaca

SEQ ID NO: 575707 - RNA, 19 nt, Artificial Sequence
  Description of Artificial Sequence: Synthetic oligonucleotide
  Sense strand starting at position 585 of SEQ ID NO: 318611
guacauacucuuuguuaua

SEQ ID NO: 575708 - RNA, 19 nt, Artificial Sequence
  Description of Artificial Sequence: Synthetic oligonucleotide
  Antisense strand to SEQ ID NO: 575707
uauaacaaagaguauguac

SEQ ID NO: 575709 - RNA, 19 nt, Artificial Sequence
  Description of Artificial Sequence: Synthetic oligonucleotide
  Sense strand starting at position 784 of SEQ ID NO: 318611
uucccauacccaggagaau

SEQ ID NO: 575710 - RNA, 19 nt, Artificial Sequence
  Description of Artificial Sequence: Synthetic oligonucleotide
  Antisense strand to SEQ ID NO: 575709
auucuccuggguaugggaa

SEQ ID NO: 575711 - RNA, 19 nt, Artificial Sequence
  Description of Artificial Sequence: Synthetic oligonucleotide
  Sense strand starting at position 908 of SEQ ID NO: 318611
gggcacuauguuugaucca

SEQ ID NO: 575712 - RNA, 19 nt, Artificial Sequence
  Description of Artificial Sequence: Synthetic oligonucleotide
  Antisense strand to SEQ ID NO: 575711
uggaucaaacauagugccc

SEQ ID NO: 575713 - RNA, 19 nt, Artificial Sequence
  Description of Artificial Sequence: Synthetic oligonucleotide
  Sense strand starting at position 1017 of SEQ ID NO: 318611
augucuugugcgcugccaa

SEQ ID NO: 575714 - RNA, 19 nt, Artificial Sequence
  Description of Artificial Sequence: Synthetic oligonucleotide
  Antisense strand to SEQ ID NO: 575713
uuggcagcgcacaagacau

SEQ ID NO: 575715 - RNA, 19 nt, Artificial Sequence
  Description of Artificial Sequence: Synthetic oligonucleotide
  Sense strand starting at position 1040 of SEQ ID NO: 318611
uuuaccuuugggugaauga

SEQ ID NO: 575716 - RNA, 19 nt, Artificial Sequence
  Description of Artificial Sequence: Synthetic oligonucleotide
  Antisense strand to SEQ ID NO: 575715
ucauucacccaaagguaaa

SEQ ID NO: 575717 - RNA, 19 nt, Artificial Sequence
  Description of Artificial Sequence: Synthetic oligonucleotide
  Sense strand starting at position 1049 of SEQ ID NO: 318611
gggugaaugauguaacuuu

SEQ ID NO: 575718 - RNA, 19 nt, Artificial Sequence
  Description of Artificial Sequence: Synthetic oligonucleotide
  Antisense strand to SEQ ID NO: 575717
aaaguuacaucauucaccc

SEQ ID NO: 575719 - RNA, 19 nt, Artificial Sequence
  Description of Artificial Sequence: Synthetic oligonucleotide
  Sense strand starting at position 1134 of SEQ ID NO: 318611
ccacgaauggccuacaauu

SEQ ID NO: 575720 - RNA, 19 nt, Artificial Sequence
  Description of Artificial Sequence: Synthetic oligonucleotide
  Antisense strand to SEQ ID NO: 575719
aauuguaggccauucgugg

SEQ ID NO: 575721 - RNA, 19 nt, Artificial Sequence
  Description of Artificial Sequence: Synthetic oligonucleotide
  Sense strand starting at position 1142 of SEQ ID NO: 318611
ggccuacaauuugauaaac

SEQ ID NO: 575722 - RNA, 19 nt, Artificial Sequence
  Description of Artificial Sequence: Synthetic oligonucleotide
  Antisense strand to SEQ ID NO: 575721
guuuaucaaauuguaggcc

SEQ ID NO: 575723 - RNA, 19 nt, Artificial Sequence
  Description of Artificial Sequence: Synthetic oligonucleotide
  Sense strand starting at position 1168 of SEQ ID NO: 318611
ggacuaaacggcuagcaaa

SEQ ID NO: 575724 - RNA, 19 nt, Artificial Sequence
  Description of Artificial Sequence: Synthetic oligonucleotide
  Antisense strand to SEQ ID NO: 575723
uuugcuagccguuuagucc

SEQ ID NO: 575725 - RNA, 19 nt, Artificial Sequence
  Description of Artificial Sequence: Synthetic oligonucleotide
  Sense strand starting at position 1263 of SEQ ID NO: 318611
cccacuccuacgcgagaaa

SEQ ID NO: 575726 - RNA, 19 nt, Artificial Sequence
  Description of Artificial Sequence: Synthetic oligonucleotide
  Antisense strand to SEQ ID NO: 575725
uuucucgcguaggaguggg

SEQ ID NO: 575727 - RNA, 19 nt, Artificial Sequence
  Description of Artificial Sequence: Synthetic oligonucleotide
  Sense strand starting at position 1287 of SEQ ID NO: 318611
cgaaaugcucuauaugccu

SEQ ID NO: 575728 - RNA, 19 nt, Artificial Sequence
  Description of Artificial Sequence: Synthetic oligonucleotide
  Antisense strand to SEQ ID NO: 575727
aggcauauagagcauuucg

SEQ ID NO: 575729 - RNA, 19 nt, Artificial Sequence
  Description of Artificial Sequence: Synthetic oligonucleotide
  Sense strand starting at position 1355 of SEQ ID NO: 318611
cagcaauuucgucacguca

SEQ ID NO: 575730 - RNA, 19 nt, Artificial Sequence
  Description of Artificial Sequence: Synthetic oligonucleotide
  Antisense strand to SEQ ID NO: 575729
ugacgugacgaaauugcug

SEQ ID NO: 575731 - RNA, 19 nt, Artificial Sequence
  Description of Artificial Sequence: Synthetic oligonucleotide
  Sense strand starting at position 1380 of SEQ ID NO: 318611
ucugaacucguuuaccgaa

SEQ ID NO: 575732 - RNA, 19 nt, Artificial Sequence
  Description of Artificial Sequence: Synthetic oligonucleotide
  Antisense strand to SEQ ID NO: 575731
uucgguaaacgaguucaga

SEQ ID NO: 575733 - RNA, 19 nt, Artificial Sequence
  Description of Artificial Sequence: Synthetic oligonucleotide
  Sense strand starting at position 1382 of SEQ ID NO: 318611
ugaacucguuuaccgaaau

SEQ ID NO: 575734 - RNA, 19 nt, Artificial Sequence
  Description of Artificial Sequence: Synthetic oligonucleotide
  Antisense strand to SEQ ID NO: 575733
auuucgguaaacgaguuca

SEQ ID NO: 575735 - RNA, 19 nt, Artificial Sequence
  Description of Artificial Sequence: Synthetic oligonucleotide
  Sense strand starting at position 1400 of SEQ ID NO: 318611
ucuaaucugaggcguuuau

SEQ ID NO: 575736 - RNA, 19 nt, Artificial Sequence
  Description of Artificial Sequence: Synthetic oligonucleotide
  Antisense strand to SEQ ID NO: 575735
auaaacgccucagauuaga

SEQ ID NO: 575737 - RNA, 19 nt, Artificial Sequence
  Description of Artificial Sequence: Synthetic oligonucleotide
  Sense strand starting at position 1404 of SEQ ID NO: 318611
aucugaggcguuuaucaga

SEQ ID NO: 575738 - RNA, 19 nt, Artificial Sequence
  Description of Artificial Sequence: Synthetic oligonucleotide
  Antisense strand to SEQ ID NO: 575737
ucugauaaacgccucagau

SEQ ID NO: 575739 - RNA, 19 nt, Artificial Sequence
  Description of Artificial Sequence: Synthetic oligonucleotide
  Sense strand starting at position 1465 of SEQ ID NO: 318611
ugaggcauccaccauuaau

SEQ ID NO: 575740 - RNA, 19 nt, Artificial Sequence
  Description of Artificial Sequence: Synthetic oligonucleotide
  Antisense strand to SEQ ID NO: 575739
auuaaugguggaugccuca

SEQ ID NO: 575741 - RNA, 19 nt, Artificial Sequence
  Description of Artificial Sequence: Synthetic oligonucleotide
  Sense strand starting at position 1499 of SEQ ID NO: 318611
cagauauggccuuacguua

SEQ ID NO: 575742 - RNA, 19 nt, Artificial Sequence
  Description of Artificial Sequence: Synthetic oligonucleotide
  Antisense strand to SEQ ID NO: 575741
uaacguaaggccauaucug

SEQ ID NO: 575743 - RNA, 19 nt, Artificial Sequence
  Description of Artificial Sequence: Synthetic oligonucleotide
  Sense strand starting at position 1507 of SEQ ID NO: 318611
gccuuacguuauuucgcua

SEQ ID NO: 575744 - RNA, 19 nt, Artificial Sequence
  Description of Artificial Sequence: Synthetic oligonucleotide
  Antisense strand to SEQ ID NO: 575743
uagcgaaauaacguaaggc

SEQ ID NO: 575745 - RNA, 19 nt, Artificial Sequence
  Description of Artificial Sequence: Synthetic oligonucleotide
  Sense strand starting at position 2074 of SEQ ID NO: 318611
ccuggcuuucgaugacaca

SEQ ID NO: 575746 - RNA, 19 nt, Artificial Sequence
  Description of Artificial Sequence: Synthetic oligonucleotide
  Antisense strand to SEQ ID NO: 575745
ugugucaucgaaagccagg

SEQ ID NO: 575747 - RNA, 19 nt, Artificial Sequence
  Description of Artificial Sequence: Synthetic oligonucleotide
  Sense strand starting at position 2075 of SEQ ID NO: 318611
cuggcuuucgaugacacau

SEQ ID NO: 575748 - RNA, 19 nt, Artificial Sequence
  Description of Artificial Sequence: Synthetic oligonucleotide
  Antisense strand to SEQ ID NO: 575747
augugucaucgaaagccag

SEQ ID NO: 575749 - RNA, 19 nt, Artificial Sequence
  Description of Artificial Sequence: Synthetic oligonucleotide
  Sense strand starting at position 2086 of SEQ ID NO: 318611
ugacacauuuccgucgcaa

SEQ ID NO: 575750 - RNA, 19 nt, Artificial Sequence
  Description of Artificial Sequence: Synthetic oligonucleotide
  Antisense strand to SEQ ID NO: 575749
uugcgacggaaauguguca

SEQ ID NO: 575751 - RNA, 19 nt, Artificial Sequence
  Description of Artificial Sequence: Synthetic oligonucleotide
  Sense strand starting at position 2088 of SEQ ID NO: 318611
acacauuuccgucgcaaag

SEQ ID NO: 575752 - RNA, 19 nt, Artificial Sequence
  Description of Artificial Sequence: Synthetic oligonucleotide
  Antisense strand to SEQ ID NO: 575751
cuuugcgacggaaaugugu

SEQ ID NO: 575753 - RNA, 19 nt, Artificial Sequence
  Description of Artificial Sequence: Synthetic oligonucleotide
  Sense strand starting at position 2335 of SEQ ID NO: 318611
gaugcagcuccgggaaagu

SEQ ID NO: 575754 - RNA, 19 nt, Artificial Sequence
  Description of Artificial Sequence: Synthetic oligonucleotide
  Antisense strand to SEQ ID NO: 575753
acuuucccggagcugcauc

SEQ ID NO: 575755 - RNA, 19 nt, Artificial Sequence
  Description of Artificial Sequence: Synthetic oligonucleotide
  Sense strand starting at position 2370 of SEQ ID NO: 318611
cggcuauauuauguauaug

SEQ ID NO: 575756 - RNA, 19 nt, Artificial Sequence
  Description of Artificial Sequence: Synthetic oligonucleotide
  Antisense strand to SEQ ID NO: 575755
cauauacauaauauagccg

SEQ ID NO: 575757 - RNA, 19 nt, Artificial Sequence
  Description of Artificial Sequence: Synthetic oligonucleotide
  Sense strand starting at position 2378 of SEQ ID NO: 318611
uuauguauaugucuuagag

SEQ ID NO: 575758 - RNA, 19 nt, Artificial Sequence
  Description of Artificial Sequence: Synthetic oligonucleotide
  Antisense strand to SEQ ID NO: 575757
cucuaagacauauacauaa

SEQ ID NO: 575759 - RNA, 19 nt, Artificial Sequence
  Description of Artificial Sequence: Synthetic oligonucleotide
  Sense strand starting at position 2384 of SEQ ID NO: 318611
auaugucuuagagacguga

SEQ ID NO: 575760 - RNA, 19 nt, Artificial Sequence
  Description of Artificial Sequence: Synthetic oligonucleotide
  Antisense strand to SEQ ID NO: 575759
ucacgucucuaagacauau

SEQ ID NO: 575761 - RNA, 19 nt, Artificial Sequence
  Description of Artificial Sequence: Synthetic oligonucleotide
  Sense strand starting at position 2386 of SEQ ID NO: 318611
augucuuagagacgugagu

SEQ ID NO: 575762 - RNA, 19 nt, Artificial Sequence
  Description of Artificial Sequence: Synthetic oligonucleotide
  Antisense strand to SEQ ID NO: 575761
acucacgucucuaagacau

SEQ ID NO: 575763 - RNA, 19 nt, Artificial Sequence
  Description of Artificial Sequence: Synthetic oligonucleotide
  Sense strand starting at position 2388 of SEQ ID NO: 318611
gucuuagagacgugagucu

SEQ ID NO: 575764 - RNA, 19 nt, Artificial Sequence
  Description of Artificial Sequence: Synthetic oligonucleotide
  Antisense strand to SEQ ID NO: 575763
agacucacgucucuaagac

SEQ ID NO: 575765 - RNA, 19 nt, Artificial Sequence
  Description of Artificial Sequence: Synthetic oligonucleotide
  Sense strand starting at position 3673 of SEQ ID NO: 318611
aguagauuauuugauacag

SEQ ID NO: 575766 - RNA, 19 nt, Artificial Sequence
  Description of Artificial Sequence: Synthetic oligonucleotide
  Antisense strand to SEQ ID NO: 575765
cuguaucaaauaaucuacu

SEQ ID NO: 575767 - RNA, 19 nt, Artificial Sequence
  Description of Artificial Sequence: Synthetic oligonucleotide
  Sense strand starting at position 3719 of SEQ ID NO: 318611
uuugauuucuuguaucacu

SEQ ID NO: 575768 - RNA, 19 nt, Artificial Sequence
  Description of Artificial Sequence: Synthetic oligonucleotide
  Antisense strand to SEQ ID NO: 575767
agugauacaagaaaucaaa

SEQ ID NO: 575769 - RNA, 19 nt, Artificial Sequence
  Description of Artificial Sequence: Synthetic oligonucleotide
  Sense strand starting at position 3756 of SEQ ID NO: 318611
ucacuaguucuugagccuu

SEQ ID NO: 575770 - RNA, 19 nt, Artificial Sequence
  Description of Artificial Sequence: Synthetic oligonucleotide
  Antisense strand to SEQ ID NO: 575769
aaggcucaagaacuaguga

SEQ ID NO: 575771 - RNA, 19 nt, Artificial Sequence
  Description of Artificial Sequence: Synthetic oligonucleotide
  Sense strand starting at position 3758 of SEQ ID NO: 318611
acuaguucuugagccuuua

SEQ ID NO: 575772 - RNA, 19 nt, Artificial Sequence
  Description of Artificial Sequence: Synthetic oligonucleotide
  Antisense strand to SEQ ID NO: 575771
uaaaggcucaagaacuagu

SEQ ID NO: 575773 - RNA, 19 nt, Artificial Sequence
  Description of Artificial Sequence: Synthetic oligonucleotide
  Sense strand starting at position 265 of SEQ ID NO: 318612
auguguuaaccauacauau

SEQ ID NO: 575774 - RNA, 19 nt, Artificial Sequence
  Description of Artificial Sequence: Synthetic oligonucleotide
  Antisense strand to SEQ ID NO: 575773
auauguaugguuaacacau

SEQ ID NO: 575775 - RNA, 19 nt, Artificial Sequence
  Description of Artificial Sequence: Synthetic oligonucleotide
  Sense strand starting at position 307 of SEQ ID NO: 318612
ggagaauauuuauggacau

SEQ ID NO: 575776 - RNA, 19 nt, Artificial Sequence
  Description of Artificial Sequence: Synthetic oligonucleotide
  Antisense strand to SEQ ID NO: 575775
auguccauaaauauucucc

SEQ ID NO: 575777 - RNA, 19 nt, Artificial Sequence
  Description of Artificial Sequence: Synthetic oligonucleotide
  Sense strand starting at position 308 of SEQ ID NO: 318612
gagaauauuuauggacaug

SEQ ID NO: 575778 - RNA, 19 nt, Artificial Sequence
  Description of Artificial Sequence: Synthetic oligonucleotide
  Antisense strand to SEQ ID NO: 575777
cauguccauaaauauucuc

SEQ ID NO: 575779 - RNA, 19 nt, Artificial Sequence
  Description of Artificial Sequence: Synthetic oligonucleotide
  Sense strand starting at position 323 of SEQ ID NO: 318612
cauggaaaguuguugacca

SEQ ID NO: 575780 - RNA, 19 nt, Artificial Sequence
  Description of Artificial Sequence: Synthetic oligonucleotide
  Antisense strand to SEQ ID NO: 575779
uggucaacaacuuuccaug

SEQ ID NO: 575781 - RNA, 19 nt, Artificial Sequence
  Description of Artificial Sequence: Synthetic oligonucleotide
  Sense strand starting at position 327 of SEQ ID NO: 318612
gaaaguuguugaccacauu

SEQ ID NO: 575782 - RNA, 19 nt, Artificial Sequence
  Description of Artificial Sequence: Synthetic oligonucleotide
  Antisense strand to SEQ ID NO: 575781
aauguggucaacaacuuuc

SEQ ID NO: 575783 - RNA, 19 nt, Artificial Sequence
  Description of Artificial Sequence: Synthetic oligonucleotide
  Sense strand starting at position 330 of SEQ ID NO: 318612
aguuguugaccacauucua

SEQ ID NO: 575784 - RNA, 19 nt, Artificial Sequence
  Description of Artificial Sequence: Synthetic oligonucleotide
  Antisense strand to SEQ ID NO: 575783
uagaauguggucaacaacu

SEQ ID NO: 575785 - RNA, 19 nt, Artificial Sequence
  Description of Artificial Sequence: Synthetic oligonucleotide
  Sense strand starting at position 491 of SEQ ID NO: 318612
ucaaucucgaguggacaau

SEQ ID NO: 575786 - RNA, 19 nt, Artificial Sequence
  Description of Artificial Sequence: Synthetic oligonucleotide
  Antisense strand to SEQ ID NO: 575785
auuguccacucgagauuga

SEQ ID NO: 575787 - RNA, 19 nt, Artificial Sequence
  Description of Artificial Sequence: Synthetic oligonucleotide
  Sense strand starting at position 543 of SEQ ID NO: 318612
cugucacagacuugggaua

SEQ ID NO: 575788 - RNA, 19 nt, Artificial Sequence
  Description of Artificial Sequence: Synthetic oligonucleotide
  Antisense strand to SEQ ID NO: 575787
uaucccaagucugugacag

SEQ ID NO: 575789 - RNA, 19 nt, Artificial Sequence
  Description of Artificial Sequence: Synthetic oligonucleotide
  Sense strand starting at position 718 of SEQ ID NO: 318612
auccuuguugccuaagauc

SEQ ID NO: 575790 - RNA, 19 nt, Artificial Sequence
  Description of Artificial Sequence: Synthetic oligonucleotide
  Antisense strand to SEQ ID NO: 575789
gaucuuaggcaacaaggau

SEQ ID NO: 575791 - RNA, 19 nt, Artificial Sequence
  Description of Artificial Sequence: Synthetic oligonucleotide
  Sense strand starting at position 726 of SEQ ID NO: 318612
ugccuaagauccuucugau

SEQ ID NO: 575792 - RNA, 19 nt, Artificial Sequence
  Description of Artificial Sequence: Synthetic oligonucleotide
  Antisense strand to SEQ ID NO: 575791
aucagaaggaucuuaggca

SEQ ID NO: 575793 - RNA, 19 nt, Artificial Sequence
  Description of Artificial Sequence: Synthetic oligonucleotide
  Sense strand starting at position 732 of SEQ ID NO: 318612
agauccuucugauuacugu

SEQ ID NO: 575794 - RNA, 19 nt, Artificial Sequence
  Description of Artificial Sequence: Synthetic oligonucleotide
  Antisense strand to SEQ ID NO: 575793
acaguaaucagaaggaucu

SEQ ID NO: 575795 - RNA, 19 nt, Artificial Sequence
  Description of Artificial Sequence: Synthetic oligonucleotide
  Sense strand starting at position 859 of SEQ ID NO: 318612
uguuuaccuggugaaauca

SEQ ID NO: 575796 - RNA, 19 nt, Artificial Sequence
  Description of Artificial Sequence: Synthetic oligonucleotide
  Antisense strand to SEQ ID NO: 575795
ugauuucaccagguaaaca

SEQ ID NO: 575797 - RNA, 19 nt, Artificial Sequence
  Description of Artificial Sequence: Synthetic oligonucleotide
  Sense strand starting at position 921 of SEQ ID NO: 318612
ucuguaauaccacaagguu

SEQ ID NO: 575798 - RNA, 19 nt, Artificial Sequence
  Description of Artificial Sequence: Synthetic oligonucleotide
  Antisense strand to SEQ ID NO: 575797
aaccuugugguauuacaga

SEQ ID NO: 575799 - RNA, 19 nt, Artificial Sequence
  Description of Artificial Sequence: Synthetic oligonucleotide
  Sense strand starting at position 924 of SEQ ID NO: 318612
guaauaccacaagguugau

SEQ ID NO: 575800 - RNA, 19 nt, Artificial Sequence
  Description of Artificial Sequence: Synthetic oligonucleotide
  Antisense strand to SEQ ID NO: 575799
aucaaccuugugguauuac

SEQ ID NO: 575801 - RNA, 19 nt, Artificial Sequence
  Description of Artificial Sequence: Synthetic oligonucleotide
  Sense strand starting at position 1189 of SEQ ID NO: 318612
uguguuucccgcuuacagu

SEQ ID NO: 575802 - RNA, 19 nt, Artificial Sequence
  Description of Artificial Sequence: Synthetic oligonucleotide
  Antisense strand to SEQ ID NO: 575801
acuguaagcgggaaacaca

SEQ ID NO: 575803 - RNA, 19 nt, Artificial Sequence
  Description of Artificial Sequence: Synthetic oligonucleotide
  Sense strand starting at position 1240 of SEQ ID NO: 318612
cuaagauucugauucuguc

SEQ ID NO: 575804 - RNA, 19 nt, Artificial Sequence
  Description of Artificial Sequence: Synthetic oligonucleotide
  Antisense strand to SEQ ID NO: 575803
gacagaaucagaaucuuag

SEQ ID NO: 575805 - RNA, 19 nt, Artificial Sequence
  Description of Artificial Sequence: Synthetic oligonucleotide
  Sense strand starting at position 1264 of SEQ ID NO: 318612
gucuaacuacuguagaugu

SEQ ID NO: 575806 - RNA, 19 nt, Artificial Sequence
  Description of Artificial Sequence: Synthetic oligonucleotide
  Antisense strand to SEQ ID NO: 575805
acaucuacaguaguuagac

SEQ ID NO: 575807 - RNA, 19 nt, Artificial Sequence
  Description of Artificial Sequence: Synthetic oligonucleotide
  Sense strand starting at position 1365 of SEQ ID NO: 318612
acccuaauuuaugaaugga

SEQ ID NO: 575808 - RNA, 19 nt, Artificial Sequence
  Description of Artificial Sequence: Synthetic oligonucleotide
  Antisense strand to SEQ ID NO: 575807
uccauucauaaauuagggu

SEQ ID NO: 575809 - RNA, 19 nt, Artificial Sequence
  Description of Artificial Sequence: Synthetic oligonucleotide
  Sense strand starting at position 2010 of SEQ ID NO: 318612
ccggacaccguagauaaua

SEQ ID NO: 575810 - RNA, 19 nt, Artificial Sequence
  Description of Artificial Sequence: Synthetic oligonucleotide
  Antisense strand to SEQ ID NO: 575809
uauuaucuacgguguccgg

SEQ ID NO: 575811 - RNA, 19 nt, Artificial Sequence
  Description of Artificial Sequence: Synthetic oligonucleotide
  Sense strand starting at position 2031 of SEQ ID NO: 318612
uaggucuuggucuaaacuu

SEQ ID NO: 575812 - RNA, 19 nt, Artificial Sequence
  Description of Artificial Sequence: Synthetic oligonucleotide
  Antisense strand to SEQ ID NO: 575811
aaguuuagaccaagaccua

SEQ ID NO: 575813 - RNA, 19 nt, Artificial Sequence
  Description of Artificial Sequence: Synthetic oligonucleotide
  Sense strand starting at position 2041 of SEQ ID NO: 318612
ucuaaacuuccgggaaguu

SEQ ID NO: 575814 - RNA, 19 nt, Artificial Sequence
  Description of Artificial Sequence: Synthetic oligonucleotide
  Antisense strand to SEQ ID NO: 575813
aacuucccggaaguuuaga

SEQ ID NO: 575815 - RNA, 19 nt, Artificial Sequence
  Description of Artificial Sequence: Synthetic oligonucleotide
  Sense strand starting at position 2042 of SEQ ID NO: 318612
cuaaacuuccgggaaguuu

SEQ ID NO: 575816 - RNA, 19 nt, Artificial Sequence
  Description of Artificial Sequence: Synthetic oligonucleotide
  Antisense strand to SEQ ID NO: 575815
aaacuucccggaaguuuag

SEQ ID NO: 575817 - RNA, 19 nt, Artificial Sequence
  Description of Artificial Sequence: Synthetic oligonucleotide
  Sense strand starting at position 2250 of SEQ ID NO: 318612
ccuguugauccgggacaaa

SEQ ID NO: 575818 - RNA, 19 nt, Artificial Sequence
  Description of Artificial Sequence: Synthetic oligonucleotide
  Antisense strand to SEQ ID NO: 575817
uuugucccggaucaacagg

SEQ ID NO: 575819 - RNA, 19 nt, Artificial Sequence
  Description of Artificial Sequence: Synthetic oligonucleotide
  Sense strand starting at position 2261 of SEQ ID NO: 318612
gggacaaacucuuccuuga

SEQ ID NO: 575820 - RNA, 19 nt, Artificial Sequence
  Description of Artificial Sequence: Synthetic oligonucleotide
  Antisense strand to SEQ ID NO: 575819
ucaaggaagaguuuguccc

SEQ ID NO: 575821 - RNA, 19 nt, Artificial Sequence
  Description of Artificial Sequence: Synthetic oligonucleotide
  Sense strand starting at position 2426 of SEQ ID NO: 318612
uuauguuaguaggcaauuu

SEQ ID NO: 575822 - RNA, 19 nt, Artificial Sequence
  Description of Artificial Sequence: Synthetic oligonucleotide
  Antisense strand to SEQ ID NO: 575821
aaauugccuacuaacauaa

SEQ ID NO: 575823 - RNA, 19 nt, Artificial Sequence
  Description of Artificial Sequence: Synthetic oligonucleotide
  Sense strand starting at position 2540 of SEQ ID NO: 318612
aguucuguucucuacaacu

SEQ ID NO: 575824 - RNA, 19 nt, Artificial Sequence
  Description of Artificial Sequence: Synthetic oligonucleotide
  Antisense strand to SEQ ID NO: 575823
aguuguagagaacagaacu

SEQ ID NO: 575825 - RNA, 19 nt, Artificial Sequence
  Description of Artificial Sequence: Synthetic oligonucleotide
  Sense strand starting at position 2570 of SEQ ID NO: 318612
ggguuauacuuuccaggaa

SEQ ID NO: 575826 - RNA, 19 nt, Artificial Sequence
  Description of Artificial Sequence: Synthetic oligonucleotide
  Antisense strand to SEQ ID NO: 575825
uuccuggaaaguauaaccc

SEQ ID NO: 575827 - RNA, 19 nt, Artificial Sequence
  Description of Artificial Sequence: Synthetic oligonucleotide
  Sense strand starting at position 2707 of SEQ ID NO: 318612
uuggacaaucccugauugu

SEQ ID NO: 575828 - RNA, 19 nt, Artificial Sequence
  Description of Artificial Sequence: Synthetic oligonucleotide
  Antisense strand to SEQ ID NO: 575827
acaaucagggauuguccaa

SEQ ID NO: 575829 - RNA, 19 nt, Artificial Sequence
  Description of Artificial Sequence: Synthetic oligonucleotide
  Sense strand starting at position 2708 of SEQ ID NO: 318612
uggacaaucccugauuguc

SEQ ID NO: 575830 - RNA, 19 nt, Artificial Sequence
  Description of Artificial Sequence: Synthetic oligonucleotide
  Antisense strand to SEQ ID NO: 575829
gacaaucagggauugucca

SEQ ID NO: 575831 - RNA, 19 nt, Artificial Sequence
  Description of Artificial Sequence: Synthetic oligonucleotide
  Sense strand starting at position 2882 of SEQ ID NO: 318612
cucauuuauugucagauuu

SEQ ID NO: 575832 - RNA, 19 nt, Artificial Sequence
  Description of Artificial Sequence: Synthetic oligonucleotide
  Antisense strand to SEQ ID NO: 575831
aaaucugacaauaaaugag

SEQ ID NO: 575833 - RNA, 19 nt, Artificial Sequence
  Description of Artificial Sequence: Synthetic oligonucleotide
  Sense strand starting at position 2936 of SEQ ID NO: 318612
ucccuuacuggaugaaaca

SEQ ID NO: 575834 - RNA, 19 nt, Artificial Sequence
  Description of Artificial Sequence: Synthetic oligonucleotide
  Antisense strand to SEQ ID NO: 575833
uguuucauccaguaaggga

SEQ ID NO: 575835 - RNA, 19 nt, Artificial Sequence
  Description of Artificial Sequence: Synthetic oligonucleotide
  Sense strand starting at position 3274 of SEQ ID NO: 318612
cugggauuguauccacaag

SEQ ID NO: 575836 - RNA, 19 nt, Artificial Sequence
  Description of Artificial Sequence: Synthetic oligonucleotide
  Antisense strand to SEQ ID NO: 575835
cuuguggauacaaucccag

SEQ ID NO: 575837 - RNA, 19 nt, Artificial Sequence
  Description of Artificial Sequence: Synthetic oligonucleotide
  Sense strand starting at position 3376 of SEQ ID NO: 318612
auuaauguuccucauguua

SEQ ID NO: 575838 - RNA, 19 nt, Artificial Sequence
  Description of Artificial Sequence: Synthetic oligonucleotide
  Antisense strand to SEQ ID NO: 575837
uaacaugaggaacauuaau

SEQ ID NO: 575839 - RNA, 19 nt, Artificial Sequence
  Description of Artificial Sequence: Synthetic oligonucleotide
  Sense strand starting at position 3383 of SEQ ID NO: 318612
uuccucauguuagugauuu

SEQ ID NO: 575840 - RNA, 19 nt, Artificial Sequence
  Description of Artificial Sequence: Synthetic oligonucleotide
  Antisense strand to SEQ ID NO: 575839
aaaucacuaacaugaggaa

SEQ ID NO: 575841 - RNA, 19 nt, Artificial Sequence
  Description of Artificial Sequence: Synthetic oligonucleotide
  Sense strand starting at position 3452 of SEQ ID NO: 318612
uagugucugcugguaguuu

SEQ ID NO: 575842 - RNA, 19 nt, Artificial Sequence
  Description of Artificial Sequence: Synthetic oligonucleotide
  Antisense strand to SEQ ID NO: 575841
aaacuaccagcagacacua

SEQ ID NO: 575843 - RNA, 19 nt, Artificial Sequence
  Description of Artificial Sequence: Synthetic oligonucleotide
  Sense strand starting at position 3475 of SEQ ID NO: 318612
ugguucuugguagaacuua

SEQ ID NO: 575844 - RNA, 19 nt, Artificial Sequence
  Description of Artificial Sequence: Synthetic oligonucleotide
  Antisense strand to SEQ ID NO: 575843
uaaguucuaccaagaacca

SEQ ID NO: 575845 - RNA, 19 nt, Artificial Sequence
  Description of Artificial Sequence: Synthetic oligonucleotide
  Sense strand starting at position 3537 of SEQ ID NO: 318612
gcaaguuuacuauauaugu

SEQ ID NO: 575846 - RNA, 19 nt, Artificial Sequence
  Description of Artificial Sequence: Synthetic oligonucleotide
  Antisense strand to SEQ ID NO: 575845
acauauauaguaaacuugc

SEQ ID NO: 575847 - RNA, 19 nt, Artificial Sequence
  Description of Artificial Sequence: Synthetic oligonucleotide
  Sense strand starting at position 3649 of SEQ ID NO: 318612
cugaucaguuggccuaaga

SEQ ID NO: 575848 - RNA, 19 nt, Artificial Sequence
  Description of Artificial Sequence: Synthetic oligonucleotide
  Antisense strand to SEQ ID NO: 575847
ucuuaggccaacugaucag

SEQ ID NO: 575849 - RNA, 19 nt, Artificial Sequence
  Description of Artificial Sequence: Synthetic oligonucleotide
  Sense strand starting at position 3728 of SEQ ID NO: 318612
uucuguccagagugauuga

SEQ ID NO: 575850 - RNA, 19 nt, Artificial Sequence
  Description of Artificial Sequence: Synthetic oligonucleotide
  Antisense strand to SEQ ID NO: 575849
ucaaucacucuggacagaa

SEQ ID NO: 575851 - RNA, 19 nt, Artificial Sequence
  Description of Artificial Sequence: Synthetic oligonucleotide
  Sense strand starting at position 3955 of SEQ ID NO: 318612
ggcuaaggguaacuugaaa

SEQ ID NO: 575852 - RNA, 19 nt, Artificial Sequence
  Description of Artificial Sequence: Synthetic oligonucleotide
  Antisense strand to SEQ ID NO: 575851
uuucaaguuacccuuagcc

SEQ ID NO: 575853 - RNA, 19 nt, Artificial Sequence
  Description of Artificial Sequence: Synthetic oligonucleotide
  Sense strand starting at position 345 of SEQ ID NO: 318613
auguguuaaccauacauau

SEQ ID NO: 575854 - RNA, 19 nt, Artificial Sequence
  Description of Artificial Sequence: Synthetic oligonucleotide
  Antisense strand to SEQ ID NO: 575853
auauguaugguuaacacau

SEQ ID NO: 575855 - RNA, 19 nt, Artificial Sequence
  Description of Artificial Sequence: Synthetic oligonucleotide
  Sense strand starting at position 387 of SEQ ID NO: 318613
ggagaauauuuauggacau

SEQ ID NO: 575856 - RNA, 19 nt, Artificial Sequence
  Description of Artificial Sequence: Synthetic oligonucleotide
  Antisense strand to SEQ ID NO: 575855
auguccauaaauauucucc

SEQ ID NO: 575857 - RNA, 19 nt, Artificial Sequence
  Description of Artificial Sequence: Synthetic oligonucleotide
  Sense strand starting at position 388 of SEQ ID NO: 318613
gagaauauuuauggacaug

SEQ ID NO: 575858 - RNA, 19 nt, Artificial Sequence
  Description of Artificial Sequence: Synthetic oligonucleotide
  Antisense strand to SEQ ID NO: 575857
cauguccauaaauauucuc

SEQ ID NO: 575859 - RNA, 19 nt, Artificial Sequence
  Description of Artificial Sequence: Synthetic oligonucleotide
  Sense strand starting at position 403 of SEQ ID NO: 318613
cauggaaaguuguugacca

SEQ ID NO: 575860 - RNA, 19 nt, Artificial Sequence
  Description of Artificial Sequence: Synthetic oligonucleotide
  Antisense strand to SEQ ID NO: 575859
uggucaacaacuuuccaug

SEQ ID NO: 575861 - RNA, 19 nt, Artificial Sequence
  Description of Artificial Sequence: Synthetic oligonucleotide
  Sense strand starting at position 407 of SEQ ID NO: 318613
gaaaguuguugaccacauu

SEQ ID NO: 575862 - RNA, 19 nt, Artificial Sequence
  Description of Artificial Sequence: Synthetic oligonucleotide
  Antisense strand to SEQ ID NO: 575861
aauguggucaacaacuuuc

SEQ ID NO: 575863 - RNA, 19 nt, Artificial Sequence
  Description of Artificial Sequence: Synthetic oligonucleotide
  Sense strand starting at position 410 of SEQ ID NO: 318613
aguuguugaccacauucua

SEQ ID NO: 575864 - RNA, 19 nt, Artificial Sequence
  Description of Artificial Sequence: Synthetic oligonucleotide
  Antisense strand to SEQ ID NO: 575863
uagaauguggucaacaacu

SEQ ID NO: 575865 - RNA, 19 nt, Artificial Sequence
  Description of Artificial Sequence: Synthetic oligonucleotide
  Sense strand starting at position 571 of SEQ ID NO: 318613
ucaaucucgaguggacaau

SEQ ID NO: 575866 - RNA, 19 nt, Artificial Sequence
  Description of Artificial Sequence: Synthetic oligonucleotide
  Antisense strand to SEQ ID NO: 575865
auuguccacucgagauuga

SEQ ID NO: 575867 - RNA, 19 nt, Artificial Sequence
  Description of Artificial Sequence: Synthetic oligonucleotide
  Sense strand starting at position 623 of SEQ ID NO: 318613
cugucacagacuugggaua

SEQ ID NO: 575868 - RNA, 19 nt, Artificial Sequence
  Description of Artificial Sequence: Synthetic oligonucleotide
  Antisense strand to SEQ ID NO: 575867
uaucccaagucugugacag

SEQ ID NO: 575869 - RNA, 19 nt, Artificial Sequence
  Description of Artificial Sequence: Synthetic oligonucleotide
  Sense strand starting at position 798 of SEQ ID NO: 318613
auccuuguugccuaagauc

SEQ ID NO: 575870 - RNA, 19 nt, Artificial Sequence
  Description of Artificial Sequence: Synthetic oligonucleotide
  Antisense strand to SEQ ID NO: 575869
gaucuuaggcaacaaggau

SEQ ID NO: 575871 - RNA, 19 nt, Artificial Sequence
  Description of Artificial Sequence: Synthetic oligonucleotide
  Sense strand starting at position 806 of SEQ ID NO: 318613
ugccuaagauccuucugau

SEQ ID NO: 575872 - RNA, 19 nt, Artificial Sequence
  Description of Artificial Sequence: Synthetic oligonucleotide
  Antisense strand to SEQ ID NO: 575871
aucagaaggaucuuaggca

SEQ ID NO: 575873 - RNA, 19 nt, Artificial Sequence
  Description of Artificial Sequence: Synthetic oligonucleotide
  Sense strand starting at position 812 of SEQ ID NO: 318613
agauccuucugauuacugu

SEQ ID NO: 575874 - RNA, 19 nt, Artificial Sequence
  Description of Artificial Sequence: Synthetic oligonucleotide
  Antisense strand to SEQ ID NO: 575873
acaguaaucagaaggaucu

SEQ ID NO: 575875 - RNA, 19 nt, Artificial Sequence
  Description of Artificial Sequence: Synthetic oligonucleotide
  Sense strand starting at position 939 of SEQ ID NO: 318613
uguuuaccuggugaaauca

SEQ ID NO: 575876 - RNA, 19 nt, Artificial Sequence
  Description of Artificial Sequence: Synthetic oligonucleotide
  Antisense strand to SEQ ID NO: 575875
ugauuucaccagguaaaca

SEQ ID NO: 575877 - RNA, 19 nt, Artificial Sequence
  Description of Artificial Sequence: Synthetic oligonucleotide
  Sense strand starting at position 1001 of SEQ ID NO: 318613
ucuguaauaccacaagguu

SEQ ID NO: 575878 - RNA, 19 nt, Artificial Sequence
  Description of Artificial Sequence: Synthetic oligonucleotide
  Antisense strand to SEQ ID NO: 575877
aaccuugugguauuacaga

SEQ ID NO: 575879 - RNA, 19 nt, Artificial Sequence
  Description of Artificial Sequence: Synthetic oligonucleotide
  Sense strand starting at position 1004 of SEQ ID NO: 318613
guaauaccacaagguugau

SEQ ID NO: 575880 - RNA, 19 nt, Artificial Sequence
  Description of Artificial Sequence: Synthetic oligonucleotide
  Antisense strand to SEQ ID NO: 575879
aucaaccuugugguauuac

SEQ ID NO: 575881 - RNA, 19 nt, Artificial Sequence
  Description of Artificial Sequence: Synthetic oligonucleotide
  Sense strand starting at position 1269 of SEQ ID NO: 318613
uguguuucccgcuuacagu

SEQ ID NO: 575882 - RNA, 19 nt, Artificial Sequence
  Description of Artificial Sequence: Synthetic oligonucleotide
  Antisense strand to SEQ ID NO: 575881
acuguaagcgggaaacaca

SEQ ID NO: 575883 - RNA, 19 nt, Artificial Sequence
  Description of Artificial Sequence: Synthetic oligonucleotide
  Sense strand starting at position 1320 of SEQ ID NO: 318613
cuaagauucugauucuguc

SEQ ID NO: 575884 - RNA, 19 nt, Artificial Sequence
  Description of Artificial Sequence: Synthetic oligonucleotide
  Antisense strand to SEQ ID NO: 575883
gacagaaucagaaucuuag

SEQ ID NO: 575885 - RNA, 19 nt, Artificial Sequence
  Description of Artificial Sequence: Synthetic oligonucleotide
  Sense strand starting at position 1344 of SEQ ID NO: 318613
gucuaacuacuguagaugu

SEQ ID NO: 575886 - RNA, 19 nt, Artificial Sequence
  Description of Artificial Sequence: Synthetic oligonucleotide
  Antisense strand to SEQ ID NO: 575885
acaucuacaguaguuagac

SEQ ID NO: 575887 - RNA, 19 nt, Artificial Sequence
  Description of Artificial Sequence: Synthetic oligonucleotide
  Sense strand starting at position 1445 of SEQ ID NO: 318613
acccuaauuuaugaaugga

SEQ ID NO: 575888 - RNA, 19 nt, Artificial Sequence
  Description of Artificial Sequence: Synthetic oligonucleotide
  Antisense strand to SEQ ID NO: 575887
uccauucauaaauuagggu

SEQ ID NO: 575889 - RNA, 19 nt, Artificial Sequence
  Description of Artificial Sequence: Synthetic oligonucleotide
  Sense strand starting at position 2090 of SEQ ID NO: 318613
ccggacaccguagauaaua

SEQ ID NO: 575890 - RNA, 19 nt, Artificial Sequence
  Description of Artificial Sequence: Synthetic oligonucleotide
  Antisense strand to SEQ ID NO: 575889
uauuaucuacgguguccgg

SEQ ID NO: 575891 - RNA, 19 nt, Artificial Sequence
  Description of Artificial Sequence: Synthetic oligonucleotide
  Sense strand starting at position 2111 of SEQ ID NO: 318613
uaggucuuggucuaaacuu

SEQ ID NO: 575892 - RNA, 19 nt, Artificial Sequence
  Description of Artificial Sequence: Synthetic oligonucleotide
  Antisense strand to SEQ ID NO: 575891
aaguuuagaccaagaccua

SEQ ID NO: 575893 - RNA, 19 nt, Artificial Sequence
  Description of Artificial Sequence: Synthetic oligonucleotide
  Sense strand starting at position 2121 of SEQ ID NO: 318613
ucuaaacuuccgggaaguu

SEQ ID NO: 575894 - RNA, 19 nt, Artificial Sequence
  Description of Artificial Sequence: Synthetic oligonucleotide
  Antisense strand to SEQ ID NO: 575893
aacuucccggaaguuuaga

SEQ ID NO: 575895 - RNA, 19 nt, Artificial Sequence
  Description of Artificial Sequence: Synthetic oligonucleotide
  Sense strand starting at position 2122 of SEQ ID NO: 318613
cuaaacuuccgggaaguuu

SEQ ID NO: 575896 - RNA, 19 nt, Artificial Sequence
  Description of Artificial Sequence: Synthetic oligonucleotide
  Antisense strand to SEQ ID NO: 575895
aaacuucccggaaguuuag

SEQ ID NO: 575897 - RNA, 19 nt, Artificial Sequence
  Description of Artificial Sequence: Synthetic oligonucleotide
  Sense strand starting at position 2330 of SEQ ID NO: 318613
ccuguugauccgggacaaa

SEQ ID NO: 575898 - RNA, 19 nt, Artificial Sequence
  Description of Artificial Sequence: Synthetic oligonucleotide
  Antisense strand to SEQ ID NO: 575897
uuugucccggaucaacagg

SEQ ID NO: 575899 - RNA, 19 nt, Artificial Sequence
  Description of Artificial Sequence: Synthetic oligonucleotide
  Sense strand starting at position 2341 of SEQ ID NO: 318613
gggacaaacucuuccuuga

SEQ ID NO: 575900 - RNA, 19 nt, Artificial Sequence
  Description of Artificial Sequence: Synthetic oligonucleotide
  Antisense strand to SEQ ID NO: 575899
ucaaggaagaguuuguccc

SEQ ID NO: 575901 - RNA, 19 nt, Artificial Sequence
  Description of Artificial Sequence: Synthetic oligonucleotide
  Sense strand starting at position 2506 of SEQ ID NO: 318613
uuauguuaguaggcaauuu

SEQ ID NO: 575902 - RNA, 19 nt, Artificial Sequence
  Description of Artificial Sequence: Synthetic oligonucleotide
  Antisense strand to SEQ ID NO: 575901
aaauugccuacuaacauaa

SEQ ID NO: 575903 - RNA, 19 nt, Artificial Sequence
  Description of Artificial Sequence: Synthetic oligonucleotide
  Sense strand starting at position 2620 of SEQ ID NO: 318613
aguucuguucucuacaacu

SEQ ID NO: 575904 - RNA, 19 nt, Artificial Sequence
  Description of Artificial Sequence: Synthetic oligonucleotide
  Antisense strand to SEQ ID NO: 575903
aguuguagagaacagaacu

SEQ ID NO: 575905 - RNA, 19 nt, Artificial Sequence
  Description of Artificial Sequence: Synthetic oligonucleotide
  Sense strand starting at position 2650 of SEQ ID NO: 318613
ggguuauacuuuccaggaa

SEQ ID NO: 575906 - RNA, 19 nt, Artificial Sequence
  Description of Artificial Sequence: Synthetic oligonucleotide
  Antisense strand to SEQ ID NO: 575905
uuccuggaaaguauaaccc

SEQ ID NO: 575907 - RNA, 19 nt, Artificial Sequence
  Description of Artificial Sequence: Synthetic oligonucleotide
  Sense strand starting at position 2787 of SEQ ID NO: 318613
uuggacaaucccugauugu

SEQ ID NO: 575908 - RNA, 19 nt, Artificial Sequence
  Description of Artificial Sequence: Synthetic oligonucleotide
  Antisense strand to SEQ ID NO: 575907
acaaucagggauuguccaa

SEQ ID NO: 575909 - RNA, 19 nt, Artificial Sequence
  Description of Artificial Sequence: Synthetic oligonucleotide
  Sense strand starting at position 2788 of SEQ ID NO: 318613
uggacaaucccugauuguc

SEQ ID NO: 575910 - RNA, 19 nt, Artificial Sequence
  Description of Artificial Sequence: Synthetic oligonucleotide
  Antisense strand to SEQ ID NO: 575909
gacaaucagggauugucca

SEQ ID NO: 575911 - RNA, 19 nt, Artificial Sequence
  Description of Artificial Sequence: Synthetic oligonucleotide
  Sense strand starting at position 2962 of SEQ ID NO: 318613
cucauuuauugucagauuu

SEQ ID NO: 575912 - RNA, 19 nt, Artificial Sequence
  Description of Artificial Sequence: Synthetic oligonucleotide
  Antisense strand to SEQ ID NO: 575911
aaaucugacaauaaaugag

SEQ ID NO: 575913 - RNA, 19 nt, Artificial Sequence
  Description of Artificial Sequence: Synthetic oligonucleotide
  Sense strand starting at position 3016 of SEQ ID NO: 318613
ucccuuacuggaugaaaca

SEQ ID NO: 575914 - RNA, 19 nt, Artificial Sequence
  Description of Artificial Sequence: Synthetic oligonucleotide
  Antisense strand to SEQ ID NO: 575913
uguuucauccaguaaggga

SEQ ID NO: 575915 - RNA, 19 nt, Artificial Sequence
  Description of Artificial Sequence: Synthetic oligonucleotide
  Sense strand starting at position 3274 of SEQ ID NO: 318613
auuaauguguuccugauac

SEQ ID NO: 575916 - RNA, 19 nt, Artificial Sequence
  Description of Artificial Sequence: Synthetic oligonucleotide
  Antisense strand to SEQ ID NO: 575915
guaucaggaacacauuaau

SEQ ID NO: 575917 - RNA, 19 nt, Artificial Sequence
  Description of Artificial Sequence: Synthetic oligonucleotide
  Sense strand starting at position 3354 of SEQ ID NO: 318613
cugggauuguauccacaag

SEQ ID NO: 575918 - RNA, 19 nt, Artificial Sequence
  Description of Artificial Sequence: Synthetic oligonucleotide
  Antisense strand to SEQ ID NO: 575917
cuuguggauacaaucccag

SEQ ID NO: 575919 - RNA, 19 nt, Artificial Sequence
  Description of Artificial Sequence: Synthetic oligonucleotide
  Sense strand starting at position 3456 of SEQ ID NO: 318613
auuaauguuccucauguua

SEQ ID NO: 575920 - RNA, 19 nt, Artificial Sequence
  Description of Artificial Sequence: Synthetic oligonucleotide
  Antisense strand to SEQ ID NO: 575919
uaacaugaggaacauuaau

SEQ ID NO: 575921 - RNA, 19 nt, Artificial Sequence
  Description of Artificial Sequence: Synthetic oligonucleotide
  Sense strand starting at position 3463 of SEQ ID NO: 318613
uuccucauguuagugauuu

SEQ ID NO: 575922 - RNA, 19 nt, Artificial Sequence
  Description of Artificial Sequence: Synthetic oligonucleotide
  Antisense strand to SEQ ID NO: 575921
aaaucacuaacaugaggaa

SEQ ID NO: 575923 - RNA, 19 nt, Artificial Sequence
  Description of Artificial Sequence: Synthetic oligonucleotide
  Sense strand starting at position 3532 of SEQ ID NO: 318613
uagugucugcugguaguuu

SEQ ID NO: 575924 - RNA, 19 nt, Artificial Sequence
  Description of Artificial Sequence: Synthetic oligonucleotide
  Antisense strand to SEQ ID NO: 575923
aaacuaccagcagacacua

SEQ ID NO: 575925 - RNA, 19 nt, Artificial Sequence
  Description of Artificial Sequence: Synthetic oligonucleotide
  Sense strand starting at position 3555 of SEQ ID NO: 318613
ugguucuugguagaacuua

SEQ ID NO: 575926 - RNA, 19 nt, Artificial Sequence
  Description of Artificial Sequence: Synthetic oligonucleotide
  Antisense strand to SEQ ID NO: 575925
uaaguucuaccaagaacca

SEQ ID NO: 575927 - RNA, 19 nt, Artificial Sequence
  Description of Artificial Sequence: Synthetic oligonucleotide
  Sense strand starting at position 3617 of SEQ ID NO: 318613
gcaaguuuacuauauaugu

SEQ ID NO: 575928 - RNA, 19 nt, Artificial Sequence
  Description of Artificial Sequence: Synthetic oligonucleotide
  Antisense strand to SEQ ID NO: 575927
acauauauaguaaacuugc

SEQ ID NO: 575929 - RNA, 19 nt, Artificial Sequence
  Description of Artificial Sequence: Synthetic oligonucleotide
  Sense strand starting at position 3729 of SEQ ID NO: 318613
cugaucaguuggccuaaga

SEQ ID NO: 575930 - RNA, 19 nt, Artificial Sequence
  Description of Artificial Sequence: Synthetic oligonucleotide
  Antisense strand to SEQ ID NO: 575929
ucuuaggccaacugaucag

SEQ ID NO: 575931 - RNA, 19 nt, Artificial Sequence
  Description of Artificial Sequence: Synthetic oligonucleotide
  Sense strand starting at position 3808 of SEQ ID NO: 318613
uucuguccagagugauuga

SEQ ID NO: 575932 - RNA, 19 nt, Artificial Sequence
  Description of Artificial Sequence: Synthetic oligonucleotide
  Antisense strand to SEQ ID NO: 575931
ucaaucacucuggacagaa

SEQ ID NO: 575933 - RNA, 19 nt, Artificial Sequence
  Description of Artificial Sequence: Synthetic oligonucleotide
  Sense strand starting at position 166 of SEQ ID NO: 318614
guaggagaauaugcuuaua

SEQ ID NO: 575934 - RNA, 19 nt, Artificial Sequence
  Description of Artificial Sequence: Synthetic oligonucleotide
  Antisense strand to SEQ ID NO: 575933
uauaagcauauucuccuac

SEQ ID NO: 575935 - RNA, 19 nt, Artificial Sequence
  Description of Artificial Sequence: Synthetic oligonucleotide
  Sense strand starting at position 214 of SEQ ID NO: 318614
uccuuugugaucugaggag

SEQ ID NO: 575936 - RNA, 19 nt, Artificial Sequence
  Description of Artificial Sequence: Synthetic oligonucleotide
  Antisense strand to SEQ ID NO: 575935
cuccucagaucacaaagga

SEQ ID NO: 575937 - RNA, 19 nt, Artificial Sequence
  Description of Artificial Sequence: Synthetic oligonucleotide
  Sense strand starting at position 337 of SEQ ID NO: 318614
aagacaaggcgucagauau

SEQ ID NO: 575938 - RNA, 19 nt, Artificial Sequence
  Description of Artificial Sequence: Synthetic oligonucleotide
  Antisense strand to SEQ ID NO: 575937
auaucugacgccuugucuu

SEQ ID NO: 575939 - RNA, 19 nt, Artificial Sequence
  Description of Artificial Sequence: Synthetic oligonucleotide
  Sense strand starting at position 459 of SEQ ID NO: 318614
augcauuuguaagaaggaa

SEQ ID NO: 575940 - RNA, 19 nt, Artificial Sequence
  Description of Artificial Sequence: Synthetic oligonucleotide
  Antisense strand to SEQ ID NO: 575939
uuccuucuuacaaaugcau

SEQ ID NO: 575941 - RNA, 19 nt, Artificial Sequence
  Description of Artificial Sequence: Synthetic oligonucleotide
  Sense strand starting at position 572 of SEQ ID NO: 318614
guaauccaucaacauaugu

SEQ ID NO: 575942 - RNA, 19 nt, Artificial Sequence
  Description of Artificial Sequence: Synthetic oligonucleotide
  Antisense strand to SEQ ID NO: 575941
acauauguugauggauuac

SEQ ID NO: 575943 - RNA, 19 nt, Artificial Sequence
  Description of Artificial Sequence: Synthetic oligonucleotide
  Sense strand starting at position 625 of SEQ ID NO: 318614
guagcauauccacagaaau

SEQ ID NO: 575944 - RNA, 19 nt, Artificial Sequence
  Description of Artificial Sequence: Synthetic oligonucleotide
  Antisense strand to SEQ ID NO: 575943
auuucuguggauaugcuac

SEQ ID NO: 575945 - RNA, 19 nt, Artificial Sequence
  Description of Artificial Sequence: Synthetic oligonucleotide
  Sense strand starting at position 642 of SEQ ID NO: 318614
auaccucaggcuggauaaa

SEQ ID NO: 575946 - RNA, 19 nt, Artificial Sequence
  Description of Artificial Sequence: Synthetic oligonucleotide
  Antisense strand to SEQ ID NO: 575945
uuuauccagccugagguau

SEQ ID NO: 575947 - RNA, 19 nt, Artificial Sequence
  Description of Artificial Sequence: Synthetic oligonucleotide
  Sense strand starting at position 702 of SEQ ID NO: 318614
cuuugucuggcugagggaa

SEQ ID NO: 575948 - RNA, 19 nt, Artificial Sequence
  Description of Artificial Sequence: Synthetic oligonucleotide
  Antisense strand to SEQ ID NO: 575947
uucccucagccagacaaag

SEQ ID NO: 575949 - RNA, 19 nt, Artificial Sequence
  Description of Artificial Sequence: Synthetic oligonucleotide
  Sense strand starting at position 732 of SEQ ID NO: 318614
auggguaaaucauugaauc

SEQ ID NO: 575950 - RNA, 19 nt, Artificial Sequence
  Description of Artificial Sequence: Synthetic oligonucleotide
  Antisense strand to SEQ ID NO: 575949
gauucaaugauuuacccau

SEQ ID NO: 575951 - RNA, 19 nt, Artificial Sequence
  Description of Artificial Sequence: Synthetic oligonucleotide
  Sense strand starting at position 733 of SEQ ID NO: 318614
uggguaaaucauugaauca

SEQ ID NO: 575952 - RNA, 19 nt, Artificial Sequence
  Description of Artificial Sequence: Synthetic oligonucleotide
  Antisense strand to SEQ ID NO: 575951
ugauucaaugauuuaccca

SEQ ID NO: 575953 - RNA, 19 nt, Artificial Sequence
  Description of Artificial Sequence: Synthetic oligonucleotide
  Sense strand starting at position 743 of SEQ ID NO: 318614
auugaaucauggguucuuu

SEQ ID NO: 575954 - RNA, 19 nt, Artificial Sequence
  Description of Artificial Sequence: Synthetic oligonucleotide
  Antisense strand to SEQ ID NO: 575953
aaagaacccaugauucaau

SEQ ID NO: 575955 - RNA, 19 nt, Artificial Sequence
  Description of Artificial Sequence: Synthetic oligonucleotide
  Sense strand starting at position 747 of SEQ ID NO: 318614
aaucauggguucuuugaac

SEQ ID NO: 575956 - RNA, 19 nt, Artificial Sequence
  Description of Artificial Sequence: Synthetic oligonucleotide
  Antisense strand to SEQ ID NO: 575955
guucaaagaacccaugauu

SEQ ID NO: 575957 - RNA, 19 nt, Artificial Sequence
  Description of Artificial Sequence: Synthetic oligonucleotide
  Sense strand starting at position 861 of SEQ ID NO: 318614
gaguguccagaaggguaua

SEQ ID NO: 575958 - RNA, 19 nt, Artificial Sequence
  Description of Artificial Sequence: Synthetic oligonucleotide
  Antisense strand to SEQ ID NO: 575957
uauacccuucuggacacuc

SEQ ID NO: 575959 - RNA, 19 nt, Artificial Sequence
  Description of Artificial Sequence: Synthetic oligonucleotide
  Sense strand starting at position 952 of SEQ ID NO: 318614
uuaucaugcagugggagaa

SEQ ID NO: 575960 - RNA, 19 nt, Artificial Sequence
  Description of Artificial Sequence: Synthetic oligonucleotide
  Antisense strand to SEQ ID NO: 575959
uucucccacugcaugauaa

SEQ ID NO: 575961 - RNA, 19 nt, Artificial Sequence
  Description of Artificial Sequence: Synthetic oligonucleotide
  Sense strand starting at position 1118 of SEQ ID NO: 318614
aagcaauggcacugagaac

SEQ ID NO: 575962 - RNA, 19 nt, Artificial Sequence
  Description of Artificial Sequence: Synthetic oligonucleotide
  Antisense strand to SEQ ID NO: 575961
guucucagugccauugcuu

SEQ ID NO: 575963 - RNA, 19 nt, Artificial Sequence
  Description of Artificial Sequence: Synthetic oligonucleotide
  Sense strand starting at position 1236 of SEQ ID NO: 318614
ccugcauauuugcuaugga

SEQ ID NO: 575964 - RNA, 19 nt, Artificial Sequence
  Description of Artificial Sequence: Synthetic oligonucleotide
  Antisense strand to SEQ ID NO: 575963
uccauagcaaauaugcagg

SEQ ID NO: 575965 - RNA, 19 nt, Artificial Sequence
  Description of Artificial Sequence: Synthetic oligonucleotide
  Sense strand starting at position 1359 of SEQ ID NO: 318614
gcaaccuuggcacaauaga

SEQ ID NO: 575966 - RNA, 19 nt, Artificial Sequence
  Description of Artificial Sequence: Synthetic oligonucleotide
  Antisense strand to SEQ ID NO: 575965
ucuauugugccaagguugc

SEQ ID NO: 575967 - RNA, 19 nt, Artificial Sequence
  Description of Artificial Sequence: Synthetic oligonucleotide
  Sense strand starting at position 1434 of SEQ ID NO: 318614
gcacaauucgcagaacaca

SEQ ID NO: 575968 - RNA, 19 nt, Artificial Sequence
  Description of Artificial Sequence: Synthetic oligonucleotide
  Antisense strand to SEQ ID NO: 575967
uguguucugcgaauugugc

SEQ ID NO: 575969 - RNA, 19 nt, Artificial Sequence
  Description of Artificial Sequence: Synthetic oligonucleotide
  Sense strand starting at position 1630 of SEQ ID NO: 318614
gaaauuguaucacugcaag

SEQ ID NO: 575970 - RNA, 19 nt, Artificial Sequence
  Description of Artificial Sequence: Synthetic oligonucleotide
  Antisense strand to SEQ ID NO: 575969
cuugcagugauacaauuuc

SEQ ID NO: 575971 - RNA, 19 nt, Artificial Sequence
  Description of Artificial Sequence: Synthetic oligonucleotide
  Sense strand starting at position 1633 of SEQ ID NO: 318614
auuguaucacugcaagaag

SEQ ID NO: 575972 - RNA, 19 nt, Artificial Sequence
  Description of Artificial Sequence: Synthetic oligonucleotide
  Antisense strand to SEQ ID NO: 575971
cuucuugcagugauacaau

SEQ ID NO: 575973 - RNA, 19 nt, Artificial Sequence
  Description of Artificial Sequence: Synthetic oligonucleotide
  Sense strand starting at position 1820 of SEQ ID NO: 318614
gguguacauuuguuuaugu

SEQ ID NO: 575974 - RNA, 19 nt, Artificial Sequence
  Description of Artificial Sequence: Synthetic oligonucleotide
  Antisense strand to SEQ ID NO: 575973
acauaaacaaauguacacc

SEQ ID NO: 575975 - RNA, 19 nt, Artificial Sequence
  Description of Artificial Sequence: Synthetic oligonucleotide
  Sense strand starting at position 1837 of SEQ ID NO: 318614
gucacugcuuucucuauuu

SEQ ID NO: 575976 - RNA, 19 nt, Artificial Sequence
  Description of Artificial Sequence: Synthetic oligonucleotide
  Antisense strand to SEQ ID NO: 575975
aaauagagaaagcagugac

SEQ ID NO: 575977 - RNA, 19 nt, Artificial Sequence
  Description of Artificial Sequence: Synthetic oligonucleotide
  Sense strand starting at position 2178 of SEQ ID NO: 318614
ugaguaguucuccaauaug

SEQ ID NO: 575978 - RNA, 19 nt, Artificial Sequence
  Description of Artificial Sequence: Synthetic oligonucleotide
  Antisense strand to SEQ ID NO: 575977
cauauuggagaacuacuca

SEQ ID NO: 575979 - RNA, 19 nt, Artificial Sequence
  Description of Artificial Sequence: Synthetic oligonucleotide
  Sense strand starting at position 2193 of SEQ ID NO: 318614
uaugcaaugguugagcaau

SEQ ID NO: 575980 - RNA, 19 nt, Artificial Sequence
  Description of Artificial Sequence: Synthetic oligonucleotide
  Antisense strand to SEQ ID NO: 575979
auugcucaaccauugcaua

SEQ ID NO: 575981 - RNA, 19 nt, Artificial Sequence
  Description of Artificial Sequence: Synthetic oligonucleotide
  Sense strand starting at position 2524 of SEQ ID NO: 318614
ucuguaaugcacuaugaaa

SEQ ID NO: 575982 - RNA, 19 nt, Artificial Sequence
  Description of Artificial Sequence: Synthetic oligonucleotide
  Antisense strand to SEQ ID NO: 575981
uuucauagugcauuacaga

SEQ ID NO: 575983 - RNA, 19 nt, Artificial Sequence
  Description of Artificial Sequence: Synthetic oligonucleotide
  Sense strand starting at position 2607 of SEQ ID NO: 318614
gucuuuacauuauugacau

SEQ ID NO: 575984 - RNA, 19 nt, Artificial Sequence
  Description of Artificial Sequence: Synthetic oligonucleotide
  Antisense strand to SEQ ID NO: 575983
augucaauaauguaaagac

SEQ ID NO: 575985 - RNA, 19 nt, Artificial Sequence
  Description of Artificial Sequence: Synthetic oligonucleotide
  Sense strand starting at position 2653 of SEQ ID NO: 318614
acgggcuguccugugcaau

SEQ ID NO: 575986 - RNA, 19 nt, Artificial Sequence
  Description of Artificial Sequence: Synthetic oligonucleotide
  Antisense strand to SEQ ID NO: 575985
auugcacaggacagcccgu

SEQ ID NO: 575987 - RNA, 19 nt, Artificial Sequence
  Description of Artificial Sequence: Synthetic oligonucleotide
  Sense strand starting at position 2663 of SEQ ID NO: 318614
cugugcaaucuaggaaaug

SEQ ID NO: 575988 - RNA, 19 nt, Artificial Sequence
  Description of Artificial Sequence: Synthetic oligonucleotide
  Antisense strand to SEQ ID NO: 575987
cauuuccuagauugcacag

SEQ ID NO: 575989 - RNA, 19 nt, Artificial Sequence
  Description of Artificial Sequence: Synthetic oligonucleotide
  Sense strand starting at position 2850 of SEQ ID NO: 318614
ggcagaaugagccacauau

SEQ ID NO: 575990 - RNA, 19 nt, Artificial Sequence
  Description of Artificial Sequence: Synthetic oligonucleotide
  Antisense strand to SEQ ID NO: 575989
auauguggcucauucugcc

SEQ ID NO: 575991 - RNA, 19 nt, Artificial Sequence
  Description of Artificial Sequence: Synthetic oligonucleotide
  Sense strand starting at position 3334 of SEQ ID NO: 318614
acguguguuacuuugucua

SEQ ID NO: 575992 - RNA, 19 nt, Artificial Sequence
  Description of Artificial Sequence: Synthetic oligonucleotide
  Antisense strand to SEQ ID NO: 575991
uagacaaaguaacacacgu

SEQ ID NO: 575993 - RNA, 19 nt, Artificial Sequence
  Description of Artificial Sequence: Synthetic oligonucleotide
  Sense strand starting at position 3433 of SEQ ID NO: 318614
gagaguaaaucuguagguu

SEQ ID NO: 575994 - RNA, 19 nt, Artificial Sequence
  Description of Artificial Sequence: Synthetic oligonucleotide
  Antisense strand to SEQ ID NO: 575993
aaccuacagauuuacucuc

SEQ ID NO: 575995 - RNA, 19 nt, Artificial Sequence
  Description of Artificial Sequence: Synthetic oligonucleotide
  Sense strand starting at position 3434 of SEQ ID NO: 318614
agaguaaaucuguagguuc

SEQ ID NO: 575996 - RNA, 19 nt, Artificial Sequence
  Description of Artificial Sequence: Synthetic oligonucleotide
  Antisense strand to SEQ ID NO: 575995
gaaccuacagauuuacucu

SEQ ID NO: 575997 - RNA, 19 nt, Artificial Sequence
  Description of Artificial Sequence: Synthetic oligonucleotide
  Sense strand starting at position 3572 of SEQ ID NO: 318614
ggagguguucaugagcaga

SEQ ID NO: 575998 - RNA, 19 nt, Artificial Sequence
  Description of Artificial Sequence: Synthetic oligonucleotide
  Antisense strand to SEQ ID NO: 575997
ucugcucaugaacaccucc

SEQ ID NO: 575999 - RNA, 19 nt, Artificial Sequence
  Description of Artificial Sequence: Synthetic oligonucleotide
  Sense strand starting at position 3585 of SEQ ID NO: 318614
agcagaugccaucagaaug

SEQ ID NO: 576000 - RNA, 19 nt, Artificial Sequence
  Description of Artificial Sequence: Synthetic oligonucleotide
  Antisense strand to SEQ ID NO: 575999
cauucugauggcaucugcu

SEQ ID NO: 576001 - RNA, 19 nt, Artificial Sequence
  Description of Artificial Sequence: Synthetic oligonucleotide
  Sense strand starting at position 3660 of SEQ ID NO: 318614
agaagaaacuuugcaacuu

SEQ ID NO: 576002 - RNA, 19 nt, Artificial Sequence
  Description of Artificial Sequence: Synthetic oligonucleotide
  Antisense strand to SEQ ID NO: 576001
aaguugcaaaguuucuucu

SEQ ID NO: 576003 - RNA, 19 nt, Artificial Sequence
  Description of Artificial Sequence: Synthetic oligonucleotide
  Sense strand starting at position 3682 of SEQ ID NO: 318614
agaaacauucugcagcuua

SEQ ID NO: 576004 - RNA, 19 nt, Artificial Sequence
  Description of Artificial Sequence: Synthetic oligonucleotide
  Antisense strand to SEQ ID NO: 576003
uaagcugcagaauguuucu

SEQ ID NO: 576005 - RNA, 19 nt, Artificial Sequence
  Description of Artificial Sequence: Synthetic oligonucleotide
  Sense strand starting at position 3717 of SEQ ID NO: 318614
agggcaugcagcuaugaaa

SEQ ID NO: 576006 - RNA, 19 nt, Artificial Sequence
  Description of Artificial Sequence: Synthetic oligonucleotide
  Antisense strand to SEQ ID NO: 576005
uuucauagcugcaugcccu

SEQ ID NO: 576007 - RNA, 19 nt, Artificial Sequence
  Description of Artificial Sequence: Synthetic oligonucleotide
  Sense strand starting at position 3854 of SEQ ID NO: 318614
gauacuaaacuguggucua

SEQ ID NO: 576008 - RNA, 19 nt, Artificial Sequence
  Description of Artificial Sequence: Synthetic oligonucleotide
  Antisense strand to SEQ ID NO: 576007
uagaccacaguuuaguauc

SEQ ID NO: 576009 - RNA, 19 nt, Artificial Sequence
  Description of Artificial Sequence: Synthetic oligonucleotide
  Sense strand starting at position 3857 of SEQ ID NO: 318614
acuaaacuguggucuauua

SEQ ID NO: 576010 - RNA, 19 nt, Artificial Sequence
  Description of Artificial Sequence: Synthetic oligonucleotide
  Antisense strand to SEQ ID NO: 576009
uaauagaccacaguuuagu

SEQ ID NO: 576011 - RNA, 19 nt, Artificial Sequence
  Description of Artificial Sequence: Synthetic oligonucleotide
  Sense strand starting at position 3859 of SEQ ID NO: 318614
uaaacuguggucuauuaag

SEQ ID NO: 576012 - RNA, 19 nt, Artificial Sequence
  Description of Artificial Sequence: Synthetic oligonucleotide
  Antisense strand to SEQ ID NO: 576011
cuuaauagaccacaguuua

SEQ ID NO: 576013 - RNA, 19 nt, Artificial Sequence
  Description of Artificial Sequence: Synthetic oligonucleotide
  Sense strand starting at position 280 of SEQ ID NO: 318615
uuuaauagauggcuuggau

SEQ ID NO: 576014 - RNA, 19 nt, Artificial Sequence
  Description of Artificial Sequence: Synthetic oligonucleotide
  Antisense strand to SEQ ID NO: 576013
auccaagccaucuauuaaa

SEQ ID NO: 576015 - RNA, 19 nt, Artificial Sequence
  Description of Artificial Sequence: Synthetic oligonucleotide
  Sense strand starting at position 369 of SEQ ID NO: 318615
cagggaaggcccugucaga

SEQ ID NO: 576016 - RNA, 19 nt, Artificial Sequence
  Description of Artificial Sequence: Synthetic oligonucleotide
  Antisense strand to SEQ ID NO: 576015
ucugacagggccuucccug

SEQ ID NO: 576017 - RNA, 19 nt, Artificial Sequence
  Description of Artificial Sequence: Synthetic oligonucleotide
  Sense strand starting at position 615 of SEQ ID NO: 318615
caaguacaccagcgaauau

SEQ ID NO: 576018 - RNA, 19 nt, Artificial Sequence
  Description of Artificial Sequence: Synthetic oligonucleotide
  Antisense strand to SEQ ID NO: 576017
auauucgcugguguacuug

SEQ ID NO: 576019 - RNA, 19 nt, Artificial Sequence
  Description of Artificial Sequence: Synthetic oligonucleotide
  Sense strand starting at position 746 of SEQ ID NO: 318615
gacugaacagcuggaucua

SEQ ID NO: 576020 - RNA, 19 nt, Artificial Sequence
  Description of Artificial Sequence: Synthetic oligonucleotide
  Antisense strand to SEQ ID NO: 576019
uagauccagcuguucaguc

SEQ ID NO: 576021 - RNA, 19 nt, Artificial Sequence
  Description of Artificial Sequence: Synthetic oligonucleotide
  Sense strand starting at position 830 of SEQ ID NO: 318615
gggaacacugaguguuucu

SEQ ID NO: 576022 - RNA, 19 nt, Artificial Sequence
  Description of Artificial Sequence: Synthetic oligonucleotide
  Antisense strand to SEQ ID NO: 576021
agaaacacucaguguuccc

SEQ ID NO: 576023 - RNA, 19 nt, Artificial Sequence
  Description of Artificial Sequence: Synthetic oligonucleotide
  Sense strand starting at position 835 of SEQ ID NO: 318615
cacugaguguuucugggaa

SEQ ID NO: 576024 - RNA, 19 nt, Artificial Sequence
  Description of Artificial Sequence: Synthetic oligonucleotide
  Antisense strand to SEQ ID NO: 576023
uucccagaaacacucagug

SEQ ID NO: 576025 - RNA, 19 nt, Artificial Sequence
  Description of Artificial Sequence: Synthetic oligonucleotide
  Sense strand starting at position 913 of SEQ ID NO: 318615
gcuauuagcugcucacacu

SEQ ID NO: 576026 - RNA, 19 nt, Artificial Sequence
  Description of Artificial Sequence: Synthetic oligonucleotide
  Antisense strand to SEQ ID NO: 576025
agugugagcagcuaauagc

SEQ ID NO: 576027 - RNA, 19 nt, Artificial Sequence
  Description of Artificial Sequence: Synthetic oligonucleotide
  Sense strand starting at position 1376 of SEQ ID NO: 318615
ggcgauacuuuggugagau

SEQ ID NO: 576028 - RNA, 19 nt, Artificial Sequence
  Description of Artificial Sequence: Synthetic oligonucleotide
  Antisense strand to SEQ ID NO: 576027
aucucaccaaaguaucgcc

SEQ ID NO: 576029 - RNA, 19 nt, Artificial Sequence
  Description of Artificial Sequence: Synthetic oligonucleotide
  Sense strand starting at position 1388 of SEQ ID NO: 318615
gugagaugggcacgaagaa

SEQ ID NO: 576030 - RNA, 19 nt, Artificial Sequence
  Description of Artificial Sequence: Synthetic oligonucleotide
  Antisense strand to SEQ ID NO: 576029
uucuucgugcccaucucac

SEQ ID NO: 576031 - RNA, 19 nt, Artificial Sequence
  Description of Artificial Sequence: Synthetic oligonucleotide
  Sense strand starting at position 1497 of SEQ ID NO: 318615
ccaacuuucggcggugaga

SEQ ID NO: 576032 - RNA, 19 nt, Artificial Sequence
  Description of Artificial Sequence: Synthetic oligonucleotide
  Antisense strand to SEQ ID NO: 576031
ucucaccgccgaaaguugg

SEQ ID NO: 576033 - RNA, 19 nt, Artificial Sequence
  Description of Artificial Sequence: Synthetic oligonucleotide
  Sense strand starting at position 1499 of SEQ ID NO: 318615
aacuuucggcggugagauc

SEQ ID NO: 576034 - RNA, 19 nt, Artificial Sequence
  Description of Artificial Sequence: Synthetic oligonucleotide
  Antisense strand to SEQ ID NO: 576033
gaucucaccgccgaaaguu

SEQ ID NO: 576035 - RNA, 19 nt, Artificial Sequence
  Description of Artificial Sequence: Synthetic oligonucleotide
  Sense strand starting at position 2289 of SEQ ID NO: 318615
aaagcugugcagugugaga

SEQ ID NO: 576036 - RNA, 19 nt, Artificial Sequence
  Description of Artificial Sequence: Synthetic oligonucleotide
  Antisense strand to SEQ ID NO: 576035
ucucacacugcacagcuuu

SEQ ID NO: 576037 - RNA, 19 nt, Artificial Sequence
  Description of Artificial Sequence: Synthetic oligonucleotide
  Sense strand starting at position 2296 of SEQ ID NO: 318615
ugcagugugagagaaggau

SEQ ID NO: 576038 - RNA, 19 nt, Artificial Sequence
  Description of Artificial Sequence: Synthetic oligonucleotide
  Antisense strand to SEQ ID NO: 576037
auccuucucucacacugca

SEQ ID NO: 576039 - RNA, 19 nt, Artificial Sequence
  Description of Artificial Sequence: Synthetic oligonucleotide
  Sense strand starting at position 2399 of SEQ ID NO: 318615
guuugcaguuccuccuaau

SEQ ID NO: 576040 - RNA, 19 nt, Artificial Sequence
  Description of Artificial Sequence: Synthetic oligonucleotide
  Antisense strand to SEQ ID NO: 576039
auuaggaggaacugcaaac

SEQ ID NO: 576041 - RNA, 19 nt, Artificial Sequence
  Description of Artificial Sequence: Synthetic oligonucleotide
  Sense strand starting at position 2660 of SEQ ID NO: 318615
gggugauccgccuacauug

SEQ ID NO: 576042 - RNA, 19 nt, Artificial Sequence
  Description of Artificial Sequence: Synthetic oligonucleotide
  Antisense strand to SEQ ID NO: 576041
caauguaggcggaucaccc

SEQ ID NO: 576043 - RNA, 19 nt, Artificial Sequence
  Description of Artificial Sequence: Synthetic oligonucleotide
  Sense strand starting at position 2718 of SEQ ID NO: 318615
cccggccaguucucagaau

SEQ ID NO: 576044 - RNA, 19 nt, Artificial Sequence
  Description of Artificial Sequence: Synthetic oligonucleotide
  Antisense strand to SEQ ID NO: 576043
auucugagaacuggccggg

SEQ ID NO: 576045 - RNA, 19 nt, Artificial Sequence
  Description of Artificial Sequence: Synthetic oligonucleotide
  Sense strand starting at position 2804 of SEQ ID NO: 318615
cgggcugcauccuuggaaa

SEQ ID NO: 576046 - RNA, 19 nt, Artificial Sequence
  Description of Artificial Sequence: Synthetic oligonucleotide
  Antisense strand to SEQ ID NO: 576045
uuuccaaggaugcagcccg

SEQ ID NO: 576047 - RNA, 19 nt, Artificial Sequence
  Description of Artificial Sequence: Synthetic oligonucleotide
  Sense strand starting at position 2806 of SEQ ID NO: 318615
ggcugcauccuuggaaauc

SEQ ID NO: 576048 - RNA, 19 nt, Artificial Sequence
  Description of Artificial Sequence: Synthetic oligonucleotide
  Antisense strand to SEQ ID NO: 576047
gauuuccaaggaugcagcc

SEQ ID NO: 576049 - RNA, 19 nt, Artificial Sequence
  Description of Artificial Sequence: Synthetic oligonucleotide
  Sense strand starting at position 2909 of SEQ ID NO: 318615
ggcuucugcgcaaguguga

SEQ ID NO: 576050 - RNA, 19 nt, Artificial Sequence
  Description of Artificial Sequence: Synthetic oligonucleotide
  Antisense strand to SEQ ID NO: 576049
ucacacuugcgcagaagcc

SEQ ID NO: 576051 - RNA, 19 nt, Artificial Sequence
  Description of Artificial Sequence: Synthetic oligonucleotide
  Sense strand starting at position 3170 of SEQ ID NO: 318615
ccagguggguuucugugau

SEQ ID NO: 576052 - RNA, 19 nt, Artificial Sequence
  Description of Artificial Sequence: Synthetic oligonucleotide
  Antisense strand to SEQ ID NO: 576051
aucacagaaacccaccugg

SEQ ID NO: 576053 - RNA, 19 nt, Artificial Sequence
  Description of Artificial Sequence: Synthetic oligonucleotide
  Sense strand starting at position 3177 of SEQ ID NO: 318615
gguuucugugauuggcacu

SEQ ID NO: 576054 - RNA, 19 nt, Artificial Sequence
  Description of Artificial Sequence: Synthetic oligonucleotide
  Antisense strand to SEQ ID NO: 576053
agugccaaucacagaaacc

SEQ ID NO: 576055 - RNA, 19 nt, Artificial Sequence
  Description of Artificial Sequence: Synthetic oligonucleotide
  Sense strand starting at position 3184 of SEQ ID NO: 318615
gugauuggcacucaagaau

SEQ ID NO: 576056 - RNA, 19 nt, Artificial Sequence
  Description of Artificial Sequence: Synthetic oligonucleotide
  Antisense strand to SEQ ID NO: 576055
auucuugagugccaaucac

SEQ ID NO: 576057 - RNA, 19 nt, Artificial Sequence
  Description of Artificial Sequence: Synthetic oligonucleotide
  Sense strand starting at position 3195 of SEQ ID NO: 318615
ucaagaaucuuggugcgau

SEQ ID NO: 576058 - RNA, 19 nt, Artificial Sequence
  Description of Artificial Sequence: Synthetic oligonucleotide
  Antisense strand to SEQ ID NO: 576057
aucgcaccaagauucuuga

SEQ ID NO: 576059 - RNA, 19 nt, Artificial Sequence
  Description of Artificial Sequence: Synthetic oligonucleotide
  Sense strand starting at position 3198 of SEQ ID NO: 318615
agaaucuuggugcgaugga

SEQ ID NO: 576060 - RNA, 19 nt, Artificial Sequence
  Description of Artificial Sequence: Synthetic oligonucleotide
  Antisense strand to SEQ ID NO: 576059
uccaucgcaccaagauucu

SEQ ID NO: 576061 - RNA, 19 nt, Artificial Sequence
  Description of Artificial Sequence: Synthetic oligonucleotide
  Sense strand starting at position 3240 of SEQ ID NO: 318615
cagagugaucugcagucuu

SEQ ID NO: 576062 - RNA, 19 nt, Artificial Sequence
  Description of Artificial Sequence: Synthetic oligonucleotide
  Antisense strand to SEQ ID NO: 576061
aagacugcagaucacucug

SEQ ID NO: 576063 - RNA, 19 nt, Artificial Sequence
  Description of Artificial Sequence: Synthetic oligonucleotide
  Sense strand starting at position 3265 of SEQ ID NO: 318615
uguugcuggauauaggaau

SEQ ID NO: 576064 - RNA, 19 nt, Artificial Sequence
  Description of Artificial Sequence: Synthetic oligonucleotide
  Antisense strand to SEQ ID NO: 576063
auuccuauauccagcaaca

SEQ ID NO: 576065 - RNA, 19 nt, Artificial Sequence
  Description of Artificial Sequence: Synthetic oligonucleotide
  Sense strand starting at position 3335 of SEQ ID NO: 318615
cuaauauugucauugugcu

SEQ ID NO: 576066 - RNA, 19 nt, Artificial Sequence
  Description of Artificial Sequence: Synthetic oligonucleotide
  Antisense strand to SEQ ID NO: 576065
agcacaaugacaauauuag

SEQ ID NO: 576067 - RNA, 19 nt, Artificial Sequence
  Description of Artificial Sequence: Synthetic oligonucleotide
  Sense strand starting at position 3341 of SEQ ID NO: 318615
uugucauugugcucucuag

SEQ ID NO: 576068 - RNA, 19 nt, Artificial Sequence
  Description of Artificial Sequence: Synthetic oligonucleotide
  Antisense strand to SEQ ID NO: 576067
cuagagagcacaaugacaa

SEQ ID NO: 576069 - RNA, 19 nt, Artificial Sequence
  Description of Artificial Sequence: Synthetic oligonucleotide
  Sense strand starting at position 3347 of SEQ ID NO: 318615
uugugcucucuagagggaa

SEQ ID NO: 576070 - RNA, 19 nt, Artificial Sequence
  Description of Artificial Sequence: Synthetic oligonucleotide
  Antisense strand to SEQ ID NO: 576069
uucccucuagagagcacaa

SEQ ID NO: 576071 - RNA, 19 nt, Artificial Sequence
  Description of Artificial Sequence: Synthetic oligonucleotide
  Sense strand starting at position 3404 of SEQ ID NO: 318615
gagguaaagagucgucuug

SEQ ID NO: 576072 - RNA, 19 nt, Artificial Sequence
  Description of Artificial Sequence: Synthetic oligonucleotide
  Antisense strand to SEQ ID NO: 576071
caagacgacucuuuaccuc

SEQ ID NO: 576073 - RNA, 19 nt, Artificial Sequence
  Description of Artificial Sequence: Synthetic oligonucleotide
  Sense strand starting at position 3406 of SEQ ID NO: 318615
gguaaagagucgucuuguu

SEQ ID NO: 576074 - RNA, 19 nt, Artificial Sequence
  Description of Artificial Sequence: Synthetic oligonucleotide
  Antisense strand to SEQ ID NO: 576073
aacaagacgacucuuuacc

SEQ ID NO: 576075 - RNA, 19 nt, Artificial Sequence
  Description of Artificial Sequence: Synthetic oligonucleotide
  Sense strand starting at position 3411 of SEQ ID NO: 318615
agagucgucuuguuccuua

SEQ ID NO: 576076 - RNA, 19 nt, Artificial Sequence
  Description of Artificial Sequence: Synthetic oligonucleotide
  Antisense strand to SEQ ID NO: 576075
uaaggaacaagacgacucu

SEQ ID NO: 576077 - RNA, 19 nt, Artificial Sequence
  Description of Artificial Sequence: Synthetic oligonucleotide
  Sense strand starting at position 3425 of SEQ ID NO: 318615
ccuuaaucccagugguucu

SEQ ID NO: 576078 - RNA, 19 nt, Artificial Sequence
  Description of Artificial Sequence: Synthetic oligonucleotide
  Antisense strand to SEQ ID NO: 576077
agaaccacugggauuaagg

SEQ ID NO: 576079 - RNA, 19 nt, Artificial Sequence
  Description of Artificial Sequence: Synthetic oligonucleotide
  Sense strand starting at position 3438 of SEQ ID NO: 318615
gguucucaaauuggguaua

SEQ ID NO: 576080 - RNA, 19 nt, Artificial Sequence
  Description of Artificial Sequence: Synthetic oligonucleotide
  Antisense strand to SEQ ID NO: 576079
uauacccaauuugagaacc

SEQ ID NO: 576081 - RNA, 19 nt, Artificial Sequence
  Description of Artificial Sequence: Synthetic oligonucleotide
  Sense strand starting at position 3440 of SEQ ID NO: 318615
uucucaaauuggguauaca

SEQ ID NO: 576082 - RNA, 19 nt, Artificial Sequence
  Description of Artificial Sequence: Synthetic oligonucleotide
  Antisense strand to SEQ ID NO: 576081
uguauacccaauuugagaa

SEQ ID NO: 576083 - RNA, 19 nt, Artificial Sequence
  Description of Artificial Sequence: Synthetic oligonucleotide
  Sense strand starting at position 3692 of SEQ ID NO: 318615
ggagaccacuccucgagaa

SEQ ID NO: 576084 - RNA, 19 nt, Artificial Sequence
  Description of Artificial Sequence: Synthetic oligonucleotide
  Antisense strand to SEQ ID NO: 576083
uucucgaggaguggucucc

SEQ ID NO: 576085 - RNA, 19 nt, Artificial Sequence
  Description of Artificial Sequence: Synthetic oligonucleotide
  Sense strand starting at position 3693 of SEQ ID NO: 318615
gagaccacuccucgagaau

SEQ ID NO: 576086 - RNA, 19 nt, Artificial Sequence
  Description of Artificial Sequence: Synthetic oligonucleotide
  Antisense strand to SEQ ID NO: 576085
auucucgaggaguggucuc

SEQ ID NO: 576087 - RNA, 19 nt, Artificial Sequence
  Description of Artificial Sequence: Synthetic oligonucleotide
  Sense strand starting at position 3765 of SEQ ID NO: 318615
gugcuaagcuuacuucuuu

SEQ ID NO: 576088 - RNA, 19 nt, Artificial Sequence
  Description of Artificial Sequence: Synthetic oligonucleotide
  Antisense strand to SEQ ID NO: 576087
aaagaaguaagcuuagcac

SEQ ID NO: 576089 - RNA, 19 nt, Artificial Sequence
  Description of Artificial Sequence: Synthetic oligonucleotide
  Sense strand starting at position 3802 of SEQ ID NO: 318615
agucacauuccguaacguu

SEQ ID NO: 576090 - RNA, 19 nt, Artificial Sequence
  Description of Artificial Sequence: Synthetic oligonucleotide
  Antisense strand to SEQ ID NO: 576089
aacguuacggaaugugacu

SEQ ID NO: 576091 - RNA, 19 nt, Artificial Sequence
  Description of Artificial Sequence: Synthetic oligonucleotide
  Sense strand starting at position 3871 of SEQ ID NO: 318615
gggcauccaucaucacuaa

SEQ ID NO: 576092 - RNA, 19 nt, Artificial Sequence
  Description of Artificial Sequence: Synthetic oligonucleotide
  Antisense strand to SEQ ID NO: 576091
uuagugaugauggaugccc

SEQ ID NO: 576093 - RNA, 19 nt, Artificial Sequence
  Description of Artificial Sequence: Synthetic oligonucleotide
  Sense strand starting at position 437 of SEQ ID NO: 318616
gguacuuucuugguuuaca

SEQ ID NO: 576094 - RNA, 19 nt, Artificial Sequence
  Description of Artificial Sequence: Synthetic oligonucleotide
  Antisense strand to SEQ ID NO: 576093
uguaaaccaagaaaguacc

SEQ ID NO: 576095 - RNA, 19 nt, Artificial Sequence
  Description of Artificial Sequence: Synthetic oligonucleotide
  Sense strand starting at position 438 of SEQ ID NO: 318616
guacuuucuugguuuacag

SEQ ID NO: 576096 - RNA, 19 nt, Artificial Sequence
  Description of Artificial Sequence: Synthetic oligonucleotide
  Antisense strand to SEQ ID NO: 576095
cuguaaaccaagaaaguac

SEQ ID NO: 576097 - RNA, 19 nt, Artificial Sequence
  Description of Artificial Sequence: Synthetic oligonucleotide
  Sense strand starting at position 478 of SEQ ID NO: 318616
cugcacuacccaugaguuu

SEQ ID NO: 576098 - RNA, 19 nt, Artificial Sequence
  Description of Artificial Sequence: Synthetic oligonucleotide
  Antisense strand to SEQ ID NO: 576097
aaacucauggguagugcag

SEQ ID NO: 576099 - RNA, 19 nt, Artificial Sequence
  Description of Artificial Sequence: Synthetic oligonucleotide
  Sense strand starting at position 484 of SEQ ID NO: 318616
uacccaugaguuugugaaa

SEQ ID NO: 576100 - RNA, 19 nt, Artificial Sequence
  Description of Artificial Sequence: Synthetic oligonucleotide
  Antisense strand to SEQ ID NO: 576099
uuucacaaacucaugggua

SEQ ID NO: 576101 - RNA, 19 nt, Artificial Sequence
  Description of Artificial Sequence: Synthetic oligonucleotide
  Sense strand starting at position 485 of SEQ ID NO: 318616
acccaugaguuugugaaag

SEQ ID NO: 576102 - RNA, 19 nt, Artificial Sequence
  Description of Artificial Sequence: Synthetic oligonucleotide
  Antisense strand to SEQ ID NO: 576101
cuuucacaaacucaugggu

SEQ ID NO: 576103 - RNA, 19 nt, Artificial Sequence
  Description of Artificial Sequence: Synthetic oligonucleotide
  Sense strand starting at position 557 of SEQ ID NO: 318616
ugggaauugcaucgagcaa

SEQ ID NO: 576104 - RNA, 19 nt, Artificial Sequence
  Description of Artificial Sequence: Synthetic oligonucleotide
  Antisense strand to SEQ ID NO: 576103
uugcucgaugcaauuccca

SEQ ID NO: 576105 - RNA, 19 nt, Artificial Sequence
  Description of Artificial Sequence: Synthetic oligonucleotide
  Sense strand starting at position 558 of SEQ ID NO: 318616
gggaauugcaucgagcaaa

SEQ ID NO: 576106 - RNA, 19 nt, Artificial Sequence
  Description of Artificial Sequence: Synthetic oligonucleotide
  Antisense strand to SEQ ID NO: 576105
uuugcucgaugcaauuccc

SEQ ID NO: 576107 - RNA, 19 nt, Artificial Sequence
  Description of Artificial Sequence: Synthetic oligonucleotide
  Sense strand starting at position 801 of SEQ ID NO: 318616
accugagacaaaugcguaa

SEQ ID NO: 576108 - RNA, 19 nt, Artificial Sequence
  Description of Artificial Sequence: Synthetic oligonucleotide
  Antisense strand to SEQ ID NO: 576107
uuacgcauuugucucaggu

SEQ ID NO: 576109 - RNA, 19 nt, Artificial Sequence
  Description of Artificial Sequence: Synthetic oligonucleotide
  Sense strand starting at position 805 of SEQ ID NO: 318616
gagacaaaugcguaacuga

SEQ ID NO: 576110 - RNA, 19 nt, Artificial Sequence
  Description of Artificial Sequence: Synthetic oligonucleotide
  Antisense strand to SEQ ID NO: 576109
ucaguuacgcauuugucuc

SEQ ID NO: 576111 - RNA, 19 nt, Artificial Sequence
  Description of Artificial Sequence: Synthetic oligonucleotide
  Sense strand starting at position 834 of SEQ ID NO: 318616
ugcccuacuguguauguaa

SEQ ID NO: 576112 - RNA, 19 nt, Artificial Sequence
  Description of Artificial Sequence: Synthetic oligonucleotide
  Antisense strand to SEQ ID NO: 576111
uuacauacacaguagggca

SEQ ID NO: 576113 - RNA, 19 nt, Artificial Sequence
  Description of Artificial Sequence: Synthetic oligonucleotide
  Sense strand starting at position 871 of SEQ ID NO: 318616
ccgacuaaggcauaaguga

SEQ ID NO: 576114 - RNA, 19 nt, Artificial Sequence
  Description of Artificial Sequence: Synthetic oligonucleotide
  Antisense strand to SEQ ID NO: 576113
ucacuuaugccuuagucgg

SEQ ID NO: 576115 - RNA, 19 nt, Artificial Sequence
  Description of Artificial Sequence: Synthetic oligonucleotide
  Sense strand starting at position 974 of SEQ ID NO: 318616
ucuuaucuaugaccuggau

SEQ ID NO: 576116 - RNA, 19 nt, Artificial Sequence
  Description of Artificial Sequence: Synthetic oligonucleotide
  Antisense strand to SEQ ID NO: 576115
auccaggucauagauaaga

SEQ ID NO: 576117 - RNA, 19 nt, Artificial Sequence
  Description of Artificial Sequence: Synthetic oligonucleotide
  Sense strand starting at position 1280 of SEQ ID NO: 318616
ccacauaaguuugcugagu

SEQ ID NO: 576118 - RNA, 19 nt, Artificial Sequence
  Description of Artificial Sequence: Synthetic oligonucleotide
  Antisense strand to SEQ ID NO: 576117
acucagcaaacuuaugugg

SEQ ID NO: 576119 - RNA, 19 nt, Artificial Sequence
  Description of Artificial Sequence: Synthetic oligonucleotide
  Sense strand starting at position 1293 of SEQ ID NO: 318616
cugagugugcuagaaguuc

SEQ ID NO: 576120 - RNA, 19 nt, Artificial Sequence
  Description of Artificial Sequence: Synthetic oligonucleotide
  Antisense strand to SEQ ID NO: 576119
gaacuucuagcacacucag

SEQ ID NO: 576121 - RNA, 19 nt, Artificial Sequence
  Description of Artificial Sequence: Synthetic oligonucleotide
  Sense strand starting at position 1596 of SEQ ID NO: 318616
cgacucuuccggcaaauca

SEQ ID NO: 576122 - RNA, 19 nt, Artificial Sequence
  Description of Artificial Sequence: Synthetic oligonucleotide
  Antisense strand to SEQ ID NO: 576121
ugauuugccggaagagucg

SEQ ID NO: 576123 - RNA, 19 nt, Artificial Sequence
  Description of Artificial Sequence: Synthetic oligonucleotide
  Sense strand starting at position 1858 of SEQ ID NO: 318616
ggucuugaucuugaucugu

SEQ ID NO: 576124 - RNA, 19 nt, Artificial Sequence
  Description of Artificial Sequence: Synthetic oligonucleotide
  Antisense strand to SEQ ID NO: 576123
acagaucaagaucaagacc

SEQ ID NO: 576125 - RNA, 19 nt, Artificial Sequence
  Description of Artificial Sequence: Synthetic oligonucleotide
  Sense strand starting at position 2238 of SEQ ID NO: 318616
gggauuaucugcuuaaugg

SEQ ID NO: 576126 - RNA, 19 nt, Artificial Sequence
  Description of Artificial Sequence: Synthetic oligonucleotide
  Antisense strand to SEQ ID NO: 576125
ccauuaagcagauaauccc

SEQ ID NO: 576127 - RNA, 19 nt, Artificial Sequence
  Description of Artificial Sequence: Synthetic oligonucleotide
  Sense strand starting at position 2303 of SEQ ID NO: 318616
ucuggugucagaugaggca

SEQ ID NO: 576128 - RNA, 19 nt, Artificial Sequence
  Description of Artificial Sequence: Synthetic oligonucleotide
  Antisense strand to SEQ ID NO: 576127
ugccucaucugacaccaga

SEQ ID NO: 576129 - RNA, 19 nt, Artificial Sequence
  Description of Artificial Sequence: Synthetic oligonucleotide
  Sense strand starting at position 2318 of SEQ ID NO: 318616
ggcagagugaugcaugugu

SEQ ID NO: 576130 - RNA, 19 nt, Artificial Sequence
  Description of Artificial Sequence: Synthetic oligonucleotide
  Antisense strand to SEQ ID NO: 576129
acacaugcaucacucugcc

SEQ ID NO: 576131 - RNA, 19 nt, Artificial Sequence
  Description of Artificial Sequence: Synthetic oligonucleotide
  Sense strand starting at position 2320 of SEQ ID NO: 318616
cagagugaugcauguguag

SEQ ID NO: 576132 - RNA, 19 nt, Artificial Sequence
  Description of Artificial Sequence: Synthetic oligonucleotide
  Antisense strand to SEQ ID NO: 576131
cuacacaugcaucacucug

SEQ ID NO: 576133 - RNA, 19 nt, Artificial Sequence
  Description of Artificial Sequence: Synthetic oligonucleotide
  Sense strand starting at position 2400 of SEQ ID NO: 318616
gcaagaagguuuguagaua

SEQ ID NO: 576134 - RNA, 19 nt, Artificial Sequence
  Description of Artificial Sequence: Synthetic oligonucleotide
  Antisense strand to SEQ ID NO: 576133
uaucuacaaaccuucuugc

SEQ ID NO: 576135 - RNA, 19 nt, Artificial Sequence
  Description of Artificial Sequence: Synthetic oligonucleotide
  Sense strand starting at position 2433 of SEQ ID NO: 318616
ggaaaugacuaacagaacu

SEQ ID NO: 576136 - RNA, 19 nt, Artificial Sequence
  Description of Artificial Sequence: Synthetic oligonucleotide
  Antisense strand to SEQ ID NO: 576135
aguucuguuagucauuucc

SEQ ID NO: 576137 - RNA, 19 nt, Artificial Sequence
  Description of Artificial Sequence: Synthetic oligonucleotide
  Sense strand starting at position 2463 of SEQ ID NO: 318616
ucacuuauaguguauccua

SEQ ID NO: 576138 - RNA, 19 nt, Artificial Sequence
  Description of Artificial Sequence: Synthetic oligonucleotide
  Antisense strand to SEQ ID NO: 576137
uaggauacacuauaaguga

SEQ ID NO: 576139 - RNA, 19 nt, Artificial Sequence
  Description of Artificial Sequence: Synthetic oligonucleotide
  Sense strand starting at position 2466 of SEQ ID NO: 318616
cuuauaguguauccuaaau

SEQ ID NO: 576140 - RNA, 19 nt, Artificial Sequence
  Description of Artificial Sequence: Synthetic oligonucleotide
  Antisense strand to SEQ ID NO: 576139
auuuaggauacacuauaag

SEQ ID NO: 576141 - RNA, 19 nt, Artificial Sequence
  Description of Artificial Sequence: Synthetic oligonucleotide
  Sense strand starting at position 2522 of SEQ ID NO: 318616
ugggcuuccuaaucagaca

SEQ ID NO: 576142 - RNA, 19 nt, Artificial Sequence
  Description of Artificial Sequence: Synthetic oligonucleotide
  Antisense strand to SEQ ID NO: 576141
ugucugauuaggaagccca

SEQ ID NO: 576143 - RNA, 19 nt, Artificial Sequence
  Description of Artificial Sequence: Synthetic oligonucleotide
  Sense strand starting at position 2576 of SEQ ID NO: 318616
cuagacuauuagcuagaca

SEQ ID NO: 576144 - RNA, 19 nt, Artificial Sequence
  Description of Artificial Sequence: Synthetic oligonucleotide
  Antisense strand to SEQ ID NO: 576143
ugucuagcuaauagucuag

SEQ ID NO: 576145 - RNA, 19 nt, Artificial Sequence
  Description of Artificial Sequence: Synthetic oligonucleotide
  Sense strand starting at position 2698 of SEQ ID NO: 318616
cauugucugacgcauggua

SEQ ID NO: 576146 - RNA, 19 nt, Artificial Sequence
  Description of Artificial Sequence: Synthetic oligonucleotide
  Antisense strand to SEQ ID NO: 576145
uaccaugcgucagacaaug

SEQ ID NO: 576147 - RNA, 19 nt, Artificial Sequence
  Description of Artificial Sequence: Synthetic oligonucleotide
  Sense strand starting at position 2714 of SEQ ID NO: 318616
guagaugcugaacaacauu

SEQ ID NO: 576148 - RNA, 19 nt, Artificial Sequence
  Description of Artificial Sequence: Synthetic oligonucleotide
  Antisense strand to SEQ ID NO: 576147
aauguuguucagcaucuac

SEQ ID NO: 576149 - RNA, 19 nt, Artificial Sequence
  Description of Artificial Sequence: Synthetic oligonucleotide
  Sense strand starting at position 2785 of SEQ ID NO: 318616
uacagugagcucuagcagu

SEQ ID NO: 576150 - RNA, 19 nt, Artificial Sequence
  Description of Artificial Sequence: Synthetic oligonucleotide
  Antisense strand to SEQ ID NO: 576149
acugcuagagcucacugua

SEQ ID NO: 576151 - RNA, 19 nt, Artificial Sequence
  Description of Artificial Sequence: Synthetic oligonucleotide
  Sense strand starting at position 3386 of SEQ ID NO: 318616
uuuggagucacccaguagu

SEQ ID NO: 576152 - RNA, 19 nt, Artificial Sequence
  Description of Artificial Sequence: Synthetic oligonucleotide
  Antisense strand to SEQ ID NO: 576151
acuacugggugacuccaaa

SEQ ID NO: 576153 - RNA, 19 nt, Artificial Sequence
  Description of Artificial Sequence: Synthetic oligonucleotide
  Sense strand starting at position 3396 of SEQ ID NO: 318616
cccaguagucaucauuauu

SEQ ID NO: 576154 - RNA, 19 nt, Artificial Sequence
  Description of Artificial Sequence: Synthetic oligonucleotide
  Antisense strand to SEQ ID NO: 576153
aauaaugaugacuacuggg

SEQ ID NO: 576155 - RNA, 19 nt, Artificial Sequence
  Description of Artificial Sequence: Synthetic oligonucleotide
  Sense strand starting at position 3508 of SEQ ID NO: 318616
gaggcaagauucuugucuu

SEQ ID NO: 576156 - RNA, 19 nt, Artificial Sequence
  Description of Artificial Sequence: Synthetic oligonucleotide
  Antisense strand to SEQ ID NO: 576155
aagacaagaaucuugccuc

SEQ ID NO: 576157 - RNA, 19 nt, Artificial Sequence
  Description of Artificial Sequence: Synthetic oligonucleotide
  Sense strand starting at position 3511 of SEQ ID NO: 318616
gcaagauucuugucuucca

SEQ ID NO: 576158 - RNA, 19 nt, Artificial Sequence
  Description of Artificial Sequence: Synthetic oligonucleotide
  Antisense strand to SEQ ID NO: 576157
uggaagacaagaaucuugc

SEQ ID NO: 576159 - RNA, 19 nt, Artificial Sequence
  Description of Artificial Sequence: Synthetic oligonucleotide
  Sense strand starting at position 3569 of SEQ ID NO: 318616
gcacaaugggcacagaauu

SEQ ID NO: 576160 - RNA, 19 nt, Artificial Sequence
  Description of Artificial Sequence: Synthetic oligonucleotide
  Antisense strand to SEQ ID NO: 576159
aauucugugcccauugugc

SEQ ID NO: 576161 - RNA, 19 nt, Artificial Sequence
  Description of Artificial Sequence: Synthetic oligonucleotide
  Sense strand starting at position 3614 of SEQ ID NO: 318616
gguauacugaugugcaauu

SEQ ID NO: 576162 - RNA, 19 nt, Artificial Sequence
  Description of Artificial Sequence: Synthetic oligonucleotide
  Antisense strand to SEQ ID NO: 576161
aauugcacaucaguauacc

SEQ ID NO: 576163 - RNA, 19 nt, Artificial Sequence
  Description of Artificial Sequence: Synthetic oligonucleotide
  Sense strand starting at position 3812 of SEQ ID NO: 318616
aggucuuuccuuugauuag

SEQ ID NO: 576164 - RNA, 19 nt, Artificial Sequence
  Description of Artificial Sequence: Synthetic oligonucleotide
  Antisense strand to SEQ ID NO: 576163
cuaaucaaaggaaagaccu

SEQ ID NO: 576165 - RNA, 19 nt, Artificial Sequence
  Description of Artificial Sequence: Synthetic oligonucleotide
  Sense strand starting at position 3815 of SEQ ID NO: 318616
ucuuuccuuugauuaggua

SEQ ID NO: 576166 - RNA, 19 nt, Artificial Sequence
  Description of Artificial Sequence: Synthetic oligonucleotide
  Antisense strand to SEQ ID NO: 576165
uaccuaaucaaaggaaaga

SEQ ID NO: 576167 - RNA, 19 nt, Artificial Sequence
  Description of Artificial Sequence: Synthetic oligonucleotide
  Sense strand starting at position 3819 of SEQ ID NO: 318616
uccuuugauuagguagcaa

SEQ ID NO: 576168 - RNA, 19 nt, Artificial Sequence
  Description of Artificial Sequence: Synthetic oligonucleotide
  Antisense strand to SEQ ID NO: 576167
uugcuaccuaaucaaagga

SEQ ID NO: 576169 - RNA, 19 nt, Artificial Sequence
  Description of Artificial Sequence: Synthetic oligonucleotide
  Sense strand starting at position 3904 of SEQ ID NO: 318616
ugcuaauuugcaggaguuu

SEQ ID NO: 576170 - RNA, 19 nt, Artificial Sequence
  Description of Artificial Sequence: Synthetic oligonucleotide
  Antisense strand to SEQ ID NO: 576169
aaacuccugcaaauuagca

SEQ ID NO: 576171 - RNA, 19 nt, Artificial Sequence
  Description of Artificial Sequence: Synthetic oligonucleotide
  Sense strand starting at position 3913 of SEQ ID NO: 318616
gcaggaguuucucucaaac

SEQ ID NO: 576172 - RNA, 19 nt, Artificial Sequence
  Description of Artificial Sequence: Synthetic oligonucleotide
  Antisense strand to SEQ ID NO: 576171
guuugagagaaacuccugc

SEQ ID NO: 576173 - RNA, 19 nt, Artificial Sequence
  Description of Artificial Sequence: Synthetic oligonucleotide
  Sense strand starting at position 5 of SEQ ID NO: 318617
ugucauguagcacacaaua

SEQ ID NO: 576174 - RNA, 19 nt, Artificial Sequence
  Description of Artificial Sequence: Synthetic oligonucleotide
  Antisense strand to SEQ ID NO: 576173
uauugugugcuacaugaca

SEQ ID NO: 576175 - RNA, 19 nt, Artificial Sequence
  Description of Artificial Sequence: Synthetic oligonucleotide
  Sense strand starting at position 29 of SEQ ID NO: 318617
cggcccaauaagugaagua

SEQ ID NO: 576176 - RNA, 19 nt, Artificial Sequence
  Description of Artificial Sequence: Synthetic oligonucleotide
  Antisense strand to SEQ ID NO: 576175
uacuucacuuauugggccg

SEQ ID NO: 576177 - RNA, 19 nt, Artificial Sequence
  Description of Artificial Sequence: Synthetic oligonucleotide
  Sense strand starting at position 30 of SEQ ID NO: 318617
ggcccaauaagugaaguau

SEQ ID NO: 576178 - RNA, 19 nt, Artificial Sequence
  Description of Artificial Sequence: Synthetic oligonucleotide
  Antisense strand to SEQ ID NO: 576177
auacuucacuuauugggcc

SEQ ID NO: 576179 - RNA, 19 nt, Artificial Sequence
  Description of Artificial Sequence: Synthetic oligonucleotide
  Sense strand starting at position 39 of SEQ ID NO: 318617
agugaaguaucuuuaaauc

SEQ ID NO: 576180 - RNA, 19 nt, Artificial Sequence
  Description of Artificial Sequence: Synthetic oligonucleotide
  Antisense strand to SEQ ID NO: 576179
gauuuaaagauacuucacu

SEQ ID NO: 576181 - RNA, 19 nt, Artificial Sequence
  Description of Artificial Sequence: Synthetic oligonucleotide
  Sense strand starting at position 333 of SEQ ID NO: 318617
aaaucaguugugcaacagu

SEQ ID NO: 576182 - RNA, 19 nt, Artificial Sequence
  Description of Artificial Sequence: Synthetic oligonucleotide
  Antisense strand to SEQ ID NO: 576181
acuguugcacaacugauuu

SEQ ID NO: 576183 - RNA, 19 nt, Artificial Sequence
  Description of Artificial Sequence: Synthetic oligonucleotide
  Sense strand starting at position 343 of SEQ ID NO: 318617
ugcaacagugucuagacua

SEQ ID NO: 576184 - RNA, 19 nt, Artificial Sequence
  Description of Artificial Sequence: Synthetic oligonucleotide
  Antisense strand to SEQ ID NO: 576183
uagucuagacacuguugca

SEQ ID NO: 576185 - RNA, 19 nt, Artificial Sequence
  Description of Artificial Sequence: Synthetic oligonucleotide
  Sense strand starting at position 441 of SEQ ID NO: 318617
aucugaaacuagcuaagua

SEQ ID NO: 576186 - RNA, 19 nt, Artificial Sequence
  Description of Artificial Sequence: Synthetic oligonucleotide
  Antisense strand to SEQ ID NO: 576185
uacuuagcuaguuucagau

SEQ ID NO: 576187 - RNA, 19 nt, Artificial Sequence
  Description of Artificial Sequence: Synthetic oligonucleotide
  Sense strand starting at position 463 of SEQ ID NO: 318617
ucccuuuaagaucgaaauc

SEQ ID NO: 576188 - RNA, 19 nt, Artificial Sequence
  Description of Artificial Sequence: Synthetic oligonucleotide
  Antisense strand to SEQ ID NO: 576187
gauuucgaucuuaaaggga

SEQ ID NO: 576189 - RNA, 19 nt, Artificial Sequence
  Description of Artificial Sequence: Synthetic oligonucleotide
  Sense strand starting at position 506 of SEQ ID NO: 318617
auuuaaagaugcugacaau

SEQ ID NO: 576190 - RNA, 19 nt, Artificial Sequence
  Description of Artificial Sequence: Synthetic oligonucleotide
  Antisense strand to SEQ ID NO: 576189
auugucagcaucuuuaaau

SEQ ID NO: 576191 - RNA, 19 nt, Artificial Sequence
  Description of Artificial Sequence: Synthetic oligonucleotide
  Sense strand starting at position 1000 of SEQ ID NO: 318617
aggaaauggcaugaguagu

SEQ ID NO: 576192 - RNA, 19 nt, Artificial Sequence
  Description of Artificial Sequence: Synthetic oligonucleotide
  Antisense strand to SEQ ID NO: 576191
acuacucaugccauuuccu

SEQ ID NO: 576193 - RNA, 19 nt, Artificial Sequence
  Description of Artificial Sequence: Synthetic oligonucleotide
  Sense strand starting at position 1008 of SEQ ID NO: 318617
gcaugaguaguagacgaau

SEQ ID NO: 576194 - RNA, 19 nt, Artificial Sequence
  Description of Artificial Sequence: Synthetic oligonucleotide
  Antisense strand to SEQ ID NO: 576193
auucgucuacuacucaugc

SEQ ID NO: 576195 - RNA, 19 nt, Artificial Sequence
  Description of Artificial Sequence: Synthetic oligonucleotide
  Sense strand starting at position 1153 of SEQ ID NO: 318617
cuguaagaugggcgaguaa

SEQ ID NO: 576196 - RNA, 19 nt, Artificial Sequence
  Description of Artificial Sequence: Synthetic oligonucleotide
  Antisense strand to SEQ ID NO: 576195
uuacucgcccaucuuacag

SEQ ID NO: 576197 - RNA, 19 nt, Artificial Sequence
  Description of Artificial Sequence: Synthetic oligonucleotide
  Sense strand starting at position 1240 of SEQ ID NO: 318617
aggauuaaaugagacaaac

SEQ ID NO: 576198 - RNA, 19 nt, Artificial Sequence
  Description of Artificial Sequence: Synthetic oligonucleotide
  Antisense strand to SEQ ID NO: 576197
guuugucucauuuaauccu

SEQ ID NO: 576199 - RNA, 19 nt, Artificial Sequence
  Description of Artificial Sequence: Synthetic oligonucleotide
  Sense strand starting at position 1282 of SEQ ID NO: 318617
acgguaagugccuaauaag

SEQ ID NO: 576200 - RNA, 19 nt, Artificial Sequence
  Description of Artificial Sequence: Synthetic oligonucleotide
  Antisense strand to SEQ ID NO: 576199
cuuauuaggcacuuaccgu

SEQ ID NO: 576201 - RNA, 19 nt, Artificial Sequence
  Description of Artificial Sequence: Synthetic oligonucleotide
  Sense strand starting at position 1331 of SEQ ID NO: 318617
acaggauaauaaggaauaa

SEQ ID NO: 576202 - RNA, 19 nt, Artificial Sequence
  Description of Artificial Sequence: Synthetic oligonucleotide
  Antisense strand to SEQ ID NO: 576201
uuauuccuuauuauccugu

SEQ ID NO: 576203 - RNA, 19 nt, Artificial Sequence
  Description of Artificial Sequence: Synthetic oligonucleotide
  Sense strand starting at position 1456 of SEQ ID NO: 318617
ggagaaggcuuagccagaa

SEQ ID NO: 576204 - RNA, 19 nt, Artificial Sequence
  Description of Artificial Sequence: Synthetic oligonucleotide
  Antisense strand to SEQ ID NO: 576203
uucuggcuaagccuucucc

SEQ ID NO: 576205 - RNA, 19 nt, Artificial Sequence
  Description of Artificial Sequence: Synthetic oligonucleotide
  Sense strand starting at position 1510 of SEQ ID NO: 318617
cagagacgucgaugaggaa

SEQ ID NO: 576206 - RNA, 19 nt, Artificial Sequence
  Description of Artificial Sequence: Synthetic oligonucleotide
  Antisense strand to SEQ ID NO: 576205
uuccucaucgacgucucug

SEQ ID NO: 576207 - RNA, 19 nt, Artificial Sequence
  Description of Artificial Sequence: Synthetic oligonucleotide
  Sense strand starting at position 1860 of SEQ ID NO: 318617
ggcucucgugagcagagau

SEQ ID NO: 576208 - RNA, 19 nt, Artificial Sequence
  Description of Artificial Sequence: Synthetic oligonucleotide
  Antisense strand to SEQ ID NO: 576207
aucucugcucacgagagcc

SEQ ID NO: 576209 - RNA, 19 nt, Artificial Sequence
  Description of Artificial Sequence: Synthetic oligonucleotide
  Sense strand starting at position 1998 of SEQ ID NO: 318617
gucuccuauuggcuagaaa

SEQ ID NO: 576210 - RNA, 19 nt, Artificial Sequence
  Description of Artificial Sequence: Synthetic oligonucleotide
  Antisense strand to SEQ ID NO: 576209
uuucuagccaauaggagac

SEQ ID NO: 576211 - RNA, 19 nt, Artificial Sequence
  Description of Artificial Sequence: Synthetic oligonucleotide
  Sense strand starting at position 2047 of SEQ ID NO: 318617
acagcagaagucugagaug

SEQ ID NO: 576212 - RNA, 19 nt, Artificial Sequence
  Description of Artificial Sequence: Synthetic oligonucleotide
  Antisense strand to SEQ ID NO: 576211
caucucagacuucugcugu

SEQ ID NO: 576213 - RNA, 19 nt, Artificial Sequence
  Description of Artificial Sequence: Synthetic oligonucleotide
  Sense strand starting at position 2081 of SEQ ID NO: 318617
uccaucaaucuucgaaaug

SEQ ID NO: 576214 - RNA, 19 nt, Artificial Sequence
  Description of Artificial Sequence: Synthetic oligonucleotide
  Antisense strand to SEQ ID NO: 576213
cauuucgaagauugaugga

SEQ ID NO: 576215 - RNA, 19 nt, Artificial Sequence
  Description of Artificial Sequence: Synthetic oligonucleotide
  Sense strand starting at position 2139 of SEQ ID NO: 318617
gacuuugaaagcgguauga

SEQ ID NO: 576216 - RNA, 19 nt, Artificial Sequence
  Description of Artificial Sequence: Synthetic oligonucleotide
  Antisense strand to SEQ ID NO: 576215
ucauaccgcuuucaaaguc

SEQ ID NO: 576217 - RNA, 19 nt, Artificial Sequence
  Description of Artificial Sequence: Synthetic oligonucleotide
  Sense strand starting at position 2141 of SEQ ID NO: 318617
cuuugaaagcgguaugaag

SEQ ID NO: 576218 - RNA, 19 nt, Artificial Sequence
  Description of Artificial Sequence: Synthetic oligonucleotide
  Antisense strand to SEQ ID NO: 576217
cuucauaccgcuuucaaag

SEQ ID NO: 576219 - RNA, 19 nt, Artificial Sequence
  Description of Artificial Sequence: Synthetic oligonucleotide
  Sense strand starting at position 2321 of SEQ ID NO: 318617
agccauauuggccaguagu

SEQ ID NO: 576220 - RNA, 19 nt, Artificial Sequence
  Description of Artificial Sequence: Synthetic oligonucleotide
  Antisense strand to SEQ ID NO: 576219
acuacuggccaauauggcu

SEQ ID NO: 576221 - RNA, 19 nt, Artificial Sequence
  Description of Artificial Sequence: Synthetic oligonucleotide
  Sense strand starting at position 2457 of SEQ ID NO: 318617
agucuuaagucaccacuca

SEQ ID NO: 576222 - RNA, 19 nt, Artificial Sequence
  Description of Artificial Sequence: Synthetic oligonucleotide
  Antisense strand to SEQ ID NO: 576221
ugaguggugacuuaagacu

SEQ ID NO: 576223 - RNA, 19 nt, Artificial Sequence
  Description of Artificial Sequence: Synthetic oligonucleotide
  Sense strand starting at position 2559 of SEQ ID NO: 318617
guguuauaaguugcugcau

SEQ ID NO: 576224 - RNA, 19 nt, Artificial Sequence
  Description of Artificial Sequence: Synthetic oligonucleotide
  Antisense strand to SEQ ID NO: 576223
augcagcaacuuauaacac

SEQ ID NO: 576225 - RNA, 19 nt, Artificial Sequence
  Description of Artificial Sequence: Synthetic oligonucleotide
  Sense strand starting at position 2600 of SEQ ID NO: 318617
gcaagccucuuugcaauuu

SEQ ID NO: 576226 - RNA, 19 nt, Artificial Sequence
  Description of Artificial Sequence: Synthetic oligonucleotide
  Antisense strand to SEQ ID NO: 576225
aaauugcaaagaggcuugc

SEQ ID NO: 576227 - RNA, 19 nt, Artificial Sequence
  Description of Artificial Sequence: Synthetic oligonucleotide
  Sense strand starting at position 2648 of SEQ ID NO: 318617
aaaugugcuugucugaaau

SEQ ID NO: 576228 - RNA, 19 nt, Artificial Sequence
  Description of Artificial Sequence: Synthetic oligonucleotide
  Antisense strand to SEQ ID NO: 576227
auuucagacaagcacauuu

SEQ ID NO: 576229 - RNA, 19 nt, Artificial Sequence
  Description of Artificial Sequence: Synthetic oligonucleotide
  Sense strand starting at position 2840 of SEQ ID NO: 318617
guagcaaacccggaucuaa

SEQ ID NO: 576230 - RNA, 19 nt, Artificial Sequence
  Description of Artificial Sequence: Synthetic oligonucleotide
  Antisense strand to SEQ ID NO: 576229
uuagauccggguuugcuac

SEQ ID NO: 576231 - RNA, 19 nt, Artificial Sequence
  Description of Artificial Sequence: Synthetic oligonucleotide
  Sense strand starting at position 2848 of SEQ ID NO: 318617
cccggaucuaaguauguca

SEQ ID NO: 576232 - RNA, 19 nt, Artificial Sequence
  Description of Artificial Sequence: Synthetic oligonucleotide
  Antisense strand to SEQ ID NO: 576231
ugacauacuuagauccggg

SEQ ID NO: 576233 - RNA, 19 nt, Artificial Sequence
  Description of Artificial Sequence: Synthetic oligonucleotide
  Sense strand starting at position 2857 of SEQ ID NO: 318617
aaguaugucagguacguua

SEQ ID NO: 576234 - RNA, 19 nt, Artificial Sequence
  Description of Artificial Sequence: Synthetic oligonucleotide
  Antisense strand to SEQ ID NO: 576233
uaacguaccugacauacuu

SEQ ID NO: 576235 - RNA, 19 nt, Artificial Sequence
  Description of Artificial Sequence: Synthetic oligonucleotide
  Sense strand starting at position 2908 of SEQ ID NO: 318617
ggguaacauagucacuguu

SEQ ID NO: 576236 - RNA, 19 nt, Artificial Sequence
  Description of Artificial Sequence: Synthetic oligonucleotide
  Antisense strand to SEQ ID NO: 576235
aacagugacuauguuaccc

SEQ ID NO: 576237 - RNA, 19 nt, Artificial Sequence
  Description of Artificial Sequence: Synthetic oligonucleotide
  Sense strand starting at position 2914 of SEQ ID NO: 318617
cauagucacuguuuguaga

SEQ ID NO: 576238 - RNA, 19 nt, Artificial Sequence
  Description of Artificial Sequence: Synthetic oligonucleotide
  Antisense strand to SEQ ID NO: 576237
ucuacaaacagugacuaug

SEQ ID NO: 576239 - RNA, 19 nt, Artificial Sequence
  Description of Artificial Sequence: Synthetic oligonucleotide
  Sense strand starting at position 2915 of SEQ ID NO: 318617
auagucacuguuuguagau

SEQ ID NO: 576240 - RNA, 19 nt, Artificial Sequence
  Description of Artificial Sequence: Synthetic oligonucleotide
  Antisense strand to SEQ ID NO: 576239
aucuacaaacagugacuau

SEQ ID NO: 576241 - RNA, 19 nt, Artificial Sequence
  Description of Artificial Sequence: Synthetic oligonucleotide
  Sense strand starting at position 3151 of SEQ ID NO: 318617
gcugaugcaugguuaagaa

SEQ ID NO: 576242 - RNA, 19 nt, Artificial Sequence
  Description of Artificial Sequence: Synthetic oligonucleotide
  Antisense strand to SEQ ID NO: 576241
uucuuaaccaugcaucagc

SEQ ID NO: 576243 - RNA, 19 nt, Artificial Sequence
  Description of Artificial Sequence: Synthetic oligonucleotide
  Sense strand starting at position 3159 of SEQ ID NO: 318617
augguuaagaagcauggua

SEQ ID NO: 576244 - RNA, 19 nt, Artificial Sequence
  Description of Artificial Sequence: Synthetic oligonucleotide
  Antisense strand to SEQ ID NO: 576243
uaccaugcuucuuaaccau

SEQ ID NO: 576245 - RNA, 19 nt, Artificial Sequence
  Description of Artificial Sequence: Synthetic oligonucleotide
  Sense strand starting at position 3161 of SEQ ID NO: 318617
gguuaagaagcaugguaua

SEQ ID NO: 576246 - RNA, 19 nt, Artificial Sequence
  Description of Artificial Sequence: Synthetic oligonucleotide
  Antisense strand to SEQ ID NO: 576245
uauaccaugcuucuuaacc

SEQ ID NO: 576247 - RNA, 19 nt, Artificial Sequence
  Description of Artificial Sequence: Synthetic oligonucleotide
  Sense strand starting at position 3644 of SEQ ID NO: 318617
auuggaagugacugcugau

SEQ ID NO: 576248 - RNA, 19 nt, Artificial Sequence
  Description of Artificial Sequence: Synthetic oligonucleotide
  Antisense strand to SEQ ID NO: 576247
aucagcagucacuuccaau

SEQ ID NO: 576249 - RNA, 19 nt, Artificial Sequence
  Description of Artificial Sequence: Synthetic oligonucleotide
  Sense strand starting at position 3661 of SEQ ID NO: 318617
auggauauggaaugucuuu

SEQ ID NO: 576250 - RNA, 19 nt, Artificial Sequence
  Description of Artificial Sequence: Synthetic oligonucleotide
  Antisense strand to SEQ ID NO: 576249
aaagacauuccauauccau

SEQ ID NO: 576251 - RNA, 19 nt, Artificial Sequence
  Description of Artificial Sequence: Synthetic oligonucleotide
  Sense strand starting at position 3700 of SEQ ID NO: 318617
ggaauuggcgcugaugguu

SEQ ID NO: 576252 - RNA, 19 nt, Artificial Sequence
  Description of Artificial Sequence: Synthetic oligonucleotide
  Antisense strand to SEQ ID NO: 576251
aaccaucagcgccaauucc

SEQ ID NO: 576253 - RNA, 19 nt, Artificial Sequence
  Description of Artificial Sequence: Synthetic oligonucleotide
  Sense strand starting at position 119 of SEQ ID NO: 318618
uugucuaaucaugguucca

SEQ ID NO: 576254 - RNA, 19 nt, Artificial Sequence
  Description of Artificial Sequence: Synthetic oligonucleotide
  Antisense strand to SEQ ID NO: 576253
uggaaccaugauuagacaa

SEQ ID NO: 576255 - RNA, 19 nt, Artificial Sequence
  Description of Artificial Sequence: Synthetic oligonucleotide
  Sense strand starting at position 209 of SEQ ID NO: 318618
ucccaaaucuaaggguuua

SEQ ID NO: 576256 - RNA, 19 nt, Artificial Sequence
  Description of Artificial Sequence: Synthetic oligonucleotide
  Antisense strand to SEQ ID NO: 576255
uaaacccuuagauuuggga

SEQ ID NO: 576257 - RNA, 19 nt, Artificial Sequence
  Description of Artificial Sequence: Synthetic oligonucleotide
  Sense strand starting at position 227 of SEQ ID NO: 318618
auuuacaucuuguagggau

SEQ ID NO: 576258 - RNA, 19 nt, Artificial Sequence
  Description of Artificial Sequence: Synthetic oligonucleotide
  Antisense strand to SEQ ID NO: 576257
aucccuacaagauguaaau

SEQ ID NO: 576259 - RNA, 19 nt, Artificial Sequence
  Description of Artificial Sequence: Synthetic oligonucleotide
  Sense strand starting at position 250 of SEQ ID NO: 318618
aacgcaucuuuguuaagca

SEQ ID NO: 576260 - RNA, 19 nt, Artificial Sequence
  Description of Artificial Sequence: Synthetic oligonucleotide
  Antisense strand to SEQ ID NO: 576259
ugcuuaacaaagaugcguu

SEQ ID NO: 576261 - RNA, 19 nt, Artificial Sequence
  Description of Artificial Sequence: Synthetic oligonucleotide
  Sense strand starting at position 251 of SEQ ID NO: 318618
acgcaucuuuguuaagcau

SEQ ID NO: 576262 - RNA, 19 nt, Artificial Sequence
  Description of Artificial Sequence: Synthetic oligonucleotide
  Antisense strand to SEQ ID NO: 576261
augcuuaacaaagaugcgu

SEQ ID NO: 576263 - RNA, 19 nt, Artificial Sequence
  Description of Artificial Sequence: Synthetic oligonucleotide
  Sense strand starting at position 279 of SEQ ID NO: 318618
cagggugaguucucuggau

SEQ ID NO: 576264 - RNA, 19 nt, Artificial Sequence
  Description of Artificial Sequence: Synthetic oligonucleotide
  Antisense strand to SEQ ID NO: 576263
auccagagaacucacccug

SEQ ID NO: 576265 - RNA, 19 nt, Artificial Sequence
  Description of Artificial Sequence: Synthetic oligonucleotide
  Sense strand starting at position 281 of SEQ ID NO: 318618
gggugaguucucuggaugu

SEQ ID NO: 576266 - RNA, 19 nt, Artificial Sequence
  Description of Artificial Sequence: Synthetic oligonucleotide
  Antisense strand to SEQ ID NO: 576265
acauccagagaacucaccc

SEQ ID NO: 576267 - RNA, 19 nt, Artificial Sequence
  Description of Artificial Sequence: Synthetic oligonucleotide
  Sense strand starting at position 285 of SEQ ID NO: 318618
gaguucucuggauguaguc

SEQ ID NO: 576268 - RNA, 19 nt, Artificial Sequence
  Description of Artificial Sequence: Synthetic oligonucleotide
  Antisense strand to SEQ ID NO: 576267
gacuacauccagagaacuc

SEQ ID NO: 576269 - RNA, 19 nt, Artificial Sequence
  Description of Artificial Sequence: Synthetic oligonucleotide
  Sense strand starting at position 294 of SEQ ID NO: 318618
ggauguagucacuacauca

SEQ ID NO: 576270 - RNA, 19 nt, Artificial Sequence
  Description of Artificial Sequence: Synthetic oligonucleotide
  Antisense strand to SEQ ID NO: 576269
ugauguagugacuacaucc

SEQ ID NO: 576271 - RNA, 19 nt, Artificial Sequence
  Description of Artificial Sequence: Synthetic oligonucleotide
  Sense strand starting at position 463 of SEQ ID NO: 318618
ggagcucauuucuagagcu

SEQ ID NO: 576272 - RNA, 19 nt, Artificial Sequence
  Description of Artificial Sequence: Synthetic oligonucleotide
  Antisense strand to SEQ ID NO: 576271
agcucuagaaaugagcucc

SEQ ID NO: 576273 - RNA, 19 nt, Artificial Sequence
  Description of Artificial Sequence: Synthetic oligonucleotide
  Sense strand starting at position 502 of SEQ ID NO: 318618
agccuaggcuucuggaaag

SEQ ID NO: 576274 - RNA, 19 nt, Artificial Sequence
  Description of Artificial Sequence: Synthetic oligonucleotide
  Antisense strand to SEQ ID NO: 576273
cuuuccagaagccuaggcu

SEQ ID NO: 576275 - RNA, 19 nt, Artificial Sequence
  Description of Artificial Sequence: Synthetic oligonucleotide
  Sense strand starting at position 516 of SEQ ID NO: 318618
gaaagaagccuauaugucu

SEQ ID NO: 576276 - RNA, 19 nt, Artificial Sequence
  Description of Artificial Sequence: Synthetic oligonucleotide
  Antisense strand to SEQ ID NO: 576275
agacauauaggcuucuuuc

SEQ ID NO: 576277 - RNA, 19 nt, Artificial Sequence
  Description of Artificial Sequence: Synthetic oligonucleotide
  Sense strand starting at position 523 of SEQ ID NO: 318618
gccuauaugucuucucauu

SEQ ID NO: 576278 - RNA, 19 nt, Artificial Sequence
  Description of Artificial Sequence: Synthetic oligonucleotide
  Antisense strand to SEQ ID NO: 576277
aaugagaagacauauaggc

SEQ ID NO: 576279 - RNA, 19 nt, Artificial Sequence
  Description of Artificial Sequence: Synthetic oligonucleotide
  Sense strand starting at position 583 of SEQ ID NO: 318618
ucacuccuggucugaaaua

SEQ ID NO: 576280 - RNA, 19 nt, Artificial Sequence
  Description of Artificial Sequence: Synthetic oligonucleotide
  Antisense strand to SEQ ID NO: 576279
uauuucagaccaggaguga

SEQ ID NO: 576281 - RNA, 19 nt, Artificial Sequence
  Description of Artificial Sequence: Synthetic oligonucleotide
  Sense strand starting at position 593 of SEQ ID NO: 318618
ucugaaauagccuagcacu

SEQ ID NO: 576282 - RNA, 19 nt, Artificial Sequence
  Description of Artificial Sequence: Synthetic oligonucleotide
  Antisense strand to SEQ ID NO: 576281
agugcuaggcuauuucaga

SEQ ID NO: 576283 - RNA, 19 nt, Artificial Sequence
  Description of Artificial Sequence: Synthetic oligonucleotide
  Sense strand starting at position 845 of SEQ ID NO: 318618
uuaggucaucuguaccaau

SEQ ID NO: 576284 - RNA, 19 nt, Artificial Sequence
  Description of Artificial Sequence: Synthetic oligonucleotide
  Antisense strand to SEQ ID NO: 576283
auugguacagaugaccuaa

SEQ ID NO: 576285 - RNA, 19 nt, Artificial Sequence
  Description of Artificial Sequence: Synthetic oligonucleotide
  Sense strand starting at position 863 of SEQ ID NO: 318618
ugggcaugguuuguaaaga

SEQ ID NO: 576286 - RNA, 19 nt, Artificial Sequence
  Description of Artificial Sequence: Synthetic oligonucleotide
  Antisense strand to SEQ ID NO: 576285
ucuuuacaaaccaugccca

SEQ ID NO: 576287 - RNA, 19 nt, Artificial Sequence
  Description of Artificial Sequence: Synthetic oligonucleotide
  Sense strand starting at position 864 of SEQ ID NO: 318618
gggcaugguuuguaaagau

SEQ ID NO: 576288 - RNA, 19 nt, Artificial Sequence
  Description of Artificial Sequence: Synthetic oligonucleotide
  Antisense strand to SEQ ID NO: 576287
aucuuuacaaaccaugccc

SEQ ID NO: 576289 - RNA, 19 nt, Artificial Sequence
  Description of Artificial Sequence: Synthetic oligonucleotide
  Sense strand starting at position 873 of SEQ ID NO: 318618
uuguaaagaucaugaaauc

SEQ ID NO: 576290 - RNA, 19 nt, Artificial Sequence
  Description of Artificial Sequence: Synthetic oligonucleotide
  Antisense strand to SEQ ID NO: 576289
gauuucaugaucuuuacaa

SEQ ID NO: 576291 - RNA, 19 nt, Artificial Sequence
  Description of Artificial Sequence: Synthetic oligonucleotide
  Sense strand starting at position 989 of SEQ ID NO: 318618
ccugguaugucugagacca

SEQ ID NO: 576292 - RNA, 19 nt, Artificial Sequence
  Description of Artificial Sequence: Synthetic oligonucleotide
  Antisense strand to SEQ ID NO: 576291
uggucucagacauaccagg

SEQ ID NO: 576293 - RNA, 19 nt, Artificial Sequence
  Description of Artificial Sequence: Synthetic oligonucleotide
  Sense strand starting at position 991 of SEQ ID NO: 318618
ugguaugucugagaccaag

SEQ ID NO: 576294 - RNA, 19 nt, Artificial Sequence
  Description of Artificial Sequence: Synthetic oligonucleotide
  Antisense strand to SEQ ID NO: 576293
cuuggucucagacauacca

SEQ ID NO: 576295 - RNA, 19 nt, Artificial Sequence
  Description of Artificial Sequence: Synthetic oligonucleotide
  Sense strand starting at position 1107 of SEQ ID NO: 318618
gcacguuucuccugcacaa

SEQ ID NO: 576296 - RNA, 19 nt, Artificial Sequence
  Description of Artificial Sequence: Synthetic oligonucleotide
  Antisense strand to SEQ ID NO: 576295
uugugcaggagaaacgugc

SEQ ID NO: 576297 - RNA, 19 nt, Artificial Sequence
  Description of Artificial Sequence: Synthetic oligonucleotide
  Sense strand starting at position 1183 of SEQ ID NO: 318618
caggguuuccugggcuagu

SEQ ID NO: 576298 - RNA, 19 nt, Artificial Sequence
  Description of Artificial Sequence: Synthetic oligonucleotide
  Antisense strand to SEQ ID NO: 576297
acuagcccaggaaacccug

SEQ ID NO: 576299 - RNA, 19 nt, Artificial Sequence
  Description of Artificial Sequence: Synthetic oligonucleotide
  Sense strand starting at position 1184 of SEQ ID NO: 318618
aggguuuccugggcuaguu

SEQ ID NO: 576300 - RNA, 19 nt, Artificial Sequence
  Description of Artificial Sequence: Synthetic oligonucleotide
  Antisense strand to SEQ ID NO: 576299
aacuagcccaggaaacccu

SEQ ID NO: 576301 - RNA, 19 nt, Artificial Sequence
  Description of Artificial Sequence: Synthetic oligonucleotide
  Sense strand starting at position 1192 of SEQ ID NO: 318618
cugggcuaguuagaaaguu

SEQ ID NO: 576302 - RNA, 19 nt, Artificial Sequence
  Description of Artificial Sequence: Synthetic oligonucleotide
  Antisense strand to SEQ ID NO: 576301
aacuuucuaacuagcccag

SEQ ID NO: 576303 - RNA, 19 nt, Artificial Sequence
  Description of Artificial Sequence: Synthetic oligonucleotide
  Sense strand starting at position 1465 of SEQ ID NO: 318618
acaggagucucgucuauuu

SEQ ID NO: 576304 - RNA, 19 nt, Artificial Sequence
  Description of Artificial Sequence: Synthetic oligonucleotide
  Antisense strand to SEQ ID NO: 576303
aaauagacgagacuccugu

SEQ ID NO: 576305 - RNA, 19 nt, Artificial Sequence
  Description of Artificial Sequence: Synthetic oligonucleotide
  Sense strand starting at position 2007 of SEQ ID NO: 318618
gggucuguuuacuccuaua

SEQ ID NO: 576306 - RNA, 19 nt, Artificial Sequence
  Description of Artificial Sequence: Synthetic oligonucleotide
  Antisense strand to SEQ ID NO: 576305
uauaggaguaaacagaccc

SEQ ID NO: 576307 - RNA, 19 nt, Artificial Sequence
  Description of Artificial Sequence: Synthetic oligonucleotide
  Sense strand starting at position 2012 of SEQ ID NO: 318618
uguuuacuccuauaaaggu

SEQ ID NO: 576308 - RNA, 19 nt, Artificial Sequence
  Description of Artificial Sequence: Synthetic oligonucleotide
  Antisense strand to SEQ ID NO: 576307
accuuuauaggaguaaaca

SEQ ID NO: 576309 - RNA, 19 nt, Artificial Sequence
  Description of Artificial Sequence: Synthetic oligonucleotide
  Sense strand starting at position 3077 of SEQ ID NO: 318618
gucggacaagccugggaau

SEQ ID NO: 576310 - RNA, 19 nt, Artificial Sequence
  Description of Artificial Sequence: Synthetic oligonucleotide
  Antisense strand to SEQ ID NO: 576309
auucccaggcuuguccgac

SEQ ID NO: 576311 - RNA, 19 nt, Artificial Sequence
  Description of Artificial Sequence: Synthetic oligonucleotide
  Sense strand starting at position 3080 of SEQ ID NO: 318618
ggacaagccugggaaugau

SEQ ID NO: 576312 - RNA, 19 nt, Artificial Sequence
  Description of Artificial Sequence: Synthetic oligonucleotide
  Antisense strand to SEQ ID NO: 576311
aucauucccaggcuugucc

SEQ ID NO: 576313 - RNA, 19 nt, Artificial Sequence
  Description of Artificial Sequence: Synthetic oligonucleotide
  Sense strand starting at position 3261 of SEQ ID NO: 318618
agccguggugugaacugua

SEQ ID NO: 576314 - RNA, 19 nt, Artificial Sequence
  Description of Artificial Sequence: Synthetic oligonucleotide
  Antisense strand to SEQ ID NO: 576313
uacaguucacaccacggcu

SEQ ID NO: 576315 - RNA, 19 nt, Artificial Sequence
  Description of Artificial Sequence: Synthetic oligonucleotide
  Sense strand starting at position 3514 of SEQ ID NO: 318618
gcgugcagagcuuauacau

SEQ ID NO: 576316 - RNA, 19 nt, Artificial Sequence
  Description of Artificial Sequence: Synthetic oligonucleotide
  Antisense strand to SEQ ID NO: 576315
auguauaagcucugcacgc

SEQ ID NO: 576317 - RNA, 19 nt, Artificial Sequence
  Description of Artificial Sequence: Synthetic oligonucleotide
  Sense strand starting at position 3671 of SEQ ID NO: 318618
cccggagacucggaacuuu

SEQ ID NO: 576318 - RNA, 19 nt, Artificial Sequence
  Description of Artificial Sequence: Synthetic oligonucleotide
  Antisense strand to SEQ ID NO: 576317
aaaguuccgagucuccggg

SEQ ID NO: 576319 - RNA, 19 nt, Artificial Sequence
  Description of Artificial Sequence: Synthetic oligonucleotide
  Sense strand starting at position 3706 of SEQ ID NO: 318618
gcgggauuccgacaugggu

SEQ ID NO: 576320 - RNA, 19 nt, Artificial Sequence
  Description of Artificial Sequence: Synthetic oligonucleotide
  Antisense strand to SEQ ID NO: 576319
acccaugucggaaucccgc

SEQ ID NO: 576321 - RNA, 19 nt, Artificial Sequence
  Description of Artificial Sequence: Synthetic oligonucleotide
  Sense strand starting at position 3737 of SEQ ID NO: 318618
gcaacucaacccuagaagu

SEQ ID NO: 576322 - RNA, 19 nt, Artificial Sequence
  Description of Artificial Sequence: Synthetic oligonucleotide
  Antisense strand to SEQ ID NO: 576321
acuucuaggguugaguugc

SEQ ID NO: 576323 - RNA, 19 nt, Artificial Sequence
  Description of Artificial Sequence: Synthetic oligonucleotide
  Sense strand starting at position 3767 of SEQ ID NO: 318618
agcccaugacucugaaguu

SEQ ID NO: 576324 - RNA, 19 nt, Artificial Sequence
  Description of Artificial Sequence: Synthetic oligonucleotide
  Antisense strand to SEQ ID NO: 576323
aacuucagagucaugggcu

SEQ ID NO: 576325 - RNA, 19 nt, Artificial Sequence
  Description of Artificial Sequence: Synthetic oligonucleotide
  Sense strand starting at position 3852 of SEQ ID NO: 318618
gcgggaaagugccuggauu

SEQ ID NO: 576326 - RNA, 19 nt, Artificial Sequence
  Description of Artificial Sequence: Synthetic oligonucleotide
  Antisense strand to SEQ ID NO: 576325
aauccaggcacuuucccgc

SEQ ID NO: 576327 - RNA, 19 nt, Artificial Sequence
  Description of Artificial Sequence: Synthetic oligonucleotide
  Sense strand starting at position 93 of SEQ ID NO: 318619
ccugguaugucugagacca

SEQ ID NO: 576328 - RNA, 19 nt, Artificial Sequence
  Description of Artificial Sequence: Synthetic oligonucleotide
  Antisense strand to SEQ ID NO: 576327
uggucucagacauaccagg

SEQ ID NO: 576329 - RNA, 19 nt, Artificial Sequence
  Description of Artificial Sequence: Synthetic oligonucleotide
  Sense strand starting at position 95 of SEQ ID NO: 318619
ugguaugucugagaccaag

SEQ ID NO: 576330 - RNA, 19 nt, Artificial Sequence
  Description of Artificial Sequence: Synthetic oligonucleotide
  Antisense strand to SEQ ID NO: 576329
cuuggucucagacauacca

SEQ ID NO: 576331 - RNA, 19 nt, Artificial Sequence
  Description of Artificial Sequence: Synthetic oligonucleotide
  Sense strand starting at position 211 of SEQ ID NO: 318619
gcacguuucuccugcacaa

SEQ ID NO: 576332 - RNA, 19 nt, Artificial Sequence
  Description of Artificial Sequence: Synthetic oligonucleotide
  Antisense strand to SEQ ID NO: 576331
uugugcaggagaaacgugc

SEQ ID NO: 576333 - RNA, 19 nt, Artificial Sequence
  Description of Artificial Sequence: Synthetic oligonucleotide
  Sense strand starting at position 287 of SEQ ID NO: 318619
caggguuuccugggcuagu

SEQ ID NO: 576334 - RNA, 19 nt, Artificial Sequence
  Description of Artificial Sequence: Synthetic oligonucleotide
  Antisense strand to SEQ ID NO: 576333
acuagcccaggaaacccug

SEQ ID NO: 576335 - RNA, 19 nt, Artificial Sequence
  Description of Artificial Sequence: Synthetic oligonucleotide
  Sense strand starting at position 288 of SEQ ID NO: 318619
aggguuuccugggcuaguu

SEQ ID NO: 576336 - RNA, 19 nt, Artificial Sequence
  Description of Artificial Sequence: Synthetic oligonucleotide
  Antisense strand to SEQ ID NO: 576335
aacuagcccaggaaacccu

SEQ ID NO: 576337 - RNA, 19 nt, Artificial Sequence
  Description of Artificial Sequence: Synthetic oligonucleotide
  Sense strand starting at position 296 of SEQ ID NO: 318619
cugggcuaguuagaaaguu

SEQ ID NO: 576338 - RNA, 19 nt, Artificial Sequence
  Description of Artificial Sequence: Synthetic oligonucleotide
  Antisense strand to SEQ ID NO: 576337
aacuuucuaacuagcccag

SEQ ID NO: 576339 - RNA, 19 nt, Artificial Sequence
  Description of Artificial Sequence: Synthetic oligonucleotide
  Sense strand starting at position 569 of SEQ ID NO: 318619
acaggagucucgucuauuu

SEQ ID NO: 576340 - RNA, 19 nt, Artificial Sequence
  Description of Artificial Sequence: Synthetic oligonucleotide
  Antisense strand to SEQ ID NO: 576339
aaauagacgagacuccugu

SEQ ID NO: 576341 - RNA, 19 nt, Artificial Sequence
  Description of Artificial Sequence: Synthetic oligonucleotide
  Sense strand starting at position 1111 of SEQ ID NO: 318619
gggucuguuuacuccuaua

SEQ ID NO: 576342 - RNA, 19 nt, Artificial Sequence
  Description of Artificial Sequence: Synthetic oligonucleotide
  Antisense strand to SEQ ID NO: 576341
uauaggaguaaacagaccc

SEQ ID NO: 576343 - RNA, 19 nt, Artificial Sequence
  Description of Artificial Sequence: Synthetic oligonucleotide
  Sense strand starting at position 1116 of SEQ ID NO: 318619
uguuuacuccuauaaaggu

SEQ ID NO: 576344 - RNA, 19 nt, Artificial Sequence
  Description of Artificial Sequence: Synthetic oligonucleotide
  Antisense strand to SEQ ID NO: 576343
accuuuauaggaguaaaca

SEQ ID NO: 576345 - RNA, 19 nt, Artificial Sequence
  Description of Artificial Sequence: Synthetic oligonucleotide
  Sense strand starting at position 2181 of SEQ ID NO: 318619
gucggacaagccugggaau

SEQ ID NO: 576346 - RNA, 19 nt, Artificial Sequence
  Description of Artificial Sequence: Synthetic oligonucleotide
  Antisense strand to SEQ ID NO: 576345
auucccaggcuuguccgac

SEQ ID NO: 576347 - RNA, 19 nt, Artificial Sequence
  Description of Artificial Sequence: Synthetic oligonucleotide
  Sense strand starting at position 2184 of SEQ ID NO: 318619
ggacaagccugggaaugau

SEQ ID NO: 576348 - RNA, 19 nt, Artificial Sequence
  Description of Artificial Sequence: Synthetic oligonucleotide
  Antisense strand to SEQ ID NO: 576347
aucauucccaggcuugucc

SEQ ID NO: 576349 - RNA, 19 nt, Artificial Sequence
  Description of Artificial Sequence: Synthetic oligonucleotide
  Sense strand starting at position 2365 of SEQ ID NO: 318619
agccguggugugaacugua

SEQ ID NO: 576350 - RNA, 19 nt, Artificial Sequence
  Description of Artificial Sequence: Synthetic oligonucleotide
  Antisense strand to SEQ ID NO: 576349
uacaguucacaccacggcu

SEQ ID NO: 576351 - RNA, 19 nt, Artificial Sequence
  Description of Artificial Sequence: Synthetic oligonucleotide
  Sense strand starting at position 2618 of SEQ ID NO: 318619
gcgugcagagcuuauacau

SEQ ID NO: 576352 - RNA, 19 nt, Artificial Sequence
  Description of Artificial Sequence: Synthetic oligonucleotide
  Antisense strand to SEQ ID NO: 576351
auguauaagcucugcacgc

SEQ ID NO: 576353 - RNA, 19 nt, Artificial Sequence
  Description of Artificial Sequence: Synthetic oligonucleotide
  Sense strand starting at position 2775 of SEQ ID NO: 318619
cccggagacucggaacuuu

SEQ ID NO: 576354 - RNA, 19 nt, Artificial Sequence
  Description of Artificial Sequence: Synthetic oligonucleotide
  Antisense strand to SEQ ID NO: 576353
aaaguuccgagucuccggg

SEQ ID NO: 576355 - RNA, 19 nt, Artificial Sequence
  Description of Artificial Sequence: Synthetic oligonucleotide
  Sense strand starting at position 2810 of SEQ ID NO: 318619
gcgggauuccgacaugggu

SEQ ID NO: 576356 - RNA, 19 nt, Artificial Sequence
  Description of Artificial Sequence: Synthetic oligonucleotide
  Antisense strand to SEQ ID NO: 576355
acccaugucggaaucccgc

SEQ ID NO: 576357 - RNA, 19 nt, Artificial Sequence
  Description of Artificial Sequence: Synthetic oligonucleotide
  Sense strand starting at position 2841 of SEQ ID NO: 318619
gcaacucaacccuagaagu

SEQ ID NO: 576358 - RNA, 19 nt, Artificial Sequence
  Description of Artificial Sequence: Synthetic oligonucleotide
  Antisense strand to SEQ ID NO: 576357
acuucuaggguugaguugc

SEQ ID NO: 576359 - RNA, 19 nt, Artificial Sequence
  Description of Artificial Sequence: Synthetic oligonucleotide
  Sense strand starting at position 2871 of SEQ ID NO: 318619
agcccaugacucugaaguu

SEQ ID NO: 576360 - RNA, 19 nt, Artificial Sequence
  Description of Artificial Sequence: Synthetic oligonucleotide
  Antisense strand to SEQ ID NO: 576359
aacuucagagucaugggcu

SEQ ID NO: 576361 - RNA, 19 nt, Artificial Sequence
  Description of Artificial Sequence: Synthetic oligonucleotide
  Sense strand starting at position 2956 of SEQ ID NO: 318619
gcgggaaagugccuggauu

SEQ ID NO: 576362 - RNA, 19 nt, Artificial Sequence
  Description of Artificial Sequence: Synthetic oligonucleotide
  Antisense strand to SEQ ID NO: 576361
aauccaggcacuuucccgc

SEQ ID NO: 576363 - RNA, 19 nt, Artificial Sequence
  Description of Artificial Sequence: Synthetic oligonucleotide
  Sense strand starting at position 3142 of SEQ ID NO: 318619
cgccucuucugagagcagu

SEQ ID NO: 576364 - RNA, 19 nt, Artificial Sequence
  Description of Artificial Sequence: Synthetic oligonucleotide
  Antisense strand to SEQ ID NO: 576363
acugcucucagaagaggcg

SEQ ID NO: 576365 - RNA, 19 nt, Artificial Sequence
  Description of Artificial Sequence: Synthetic oligonucleotide
  Sense strand starting at position 3471 of SEQ ID NO: 318619
gagugcucagcuuggugau

SEQ ID NO: 576366 - RNA, 19 nt, Artificial Sequence
  Description of Artificial Sequence: Synthetic oligonucleotide
  Antisense strand to SEQ ID NO: 576365
aucaccaagcugagcacuc

SEQ ID NO: 576367 - RNA, 19 nt, Artificial Sequence
  Description of Artificial Sequence: Synthetic oligonucleotide
  Sense strand starting at position 3477 of SEQ ID NO: 318619
ucagcuuggugauggagau

SEQ ID NO: 576368 - RNA, 19 nt, Artificial Sequence
  Description of Artificial Sequence: Synthetic oligonucleotide
  Antisense strand to SEQ ID NO: 576367
aucuccaucaccaagcuga

SEQ ID NO: 576369 - RNA, 19 nt, Artificial Sequence
  Description of Artificial Sequence: Synthetic oligonucleotide
  Sense strand starting at position 3649 of SEQ ID NO: 318619
accucaacuccugagguua

SEQ ID NO: 576370 - RNA, 19 nt, Artificial Sequence
  Description of Artificial Sequence: Synthetic oligonucleotide
  Antisense strand to SEQ ID NO: 576369
uaaccucaggaguugaggu

SEQ ID NO: 576371 - RNA, 19 nt, Artificial Sequence
  Description of Artificial Sequence: Synthetic oligonucleotide
  Sense strand starting at position 3651 of SEQ ID NO: 318619
cucaacuccugagguuaua

SEQ ID NO: 576372 - RNA, 19 nt, Artificial Sequence
  Description of Artificial Sequence: Synthetic oligonucleotide
  Antisense strand to SEQ ID NO: 576371
uauaaccucaggaguugag

SEQ ID NO: 576373 - RNA, 19 nt, Artificial Sequence
  Description of Artificial Sequence: Synthetic oligonucleotide
  Sense strand starting at position 3667 of SEQ ID NO: 318619
auagguagggucuggcaua

SEQ ID NO: 576374 - RNA, 19 nt, Artificial Sequence
  Description of Artificial Sequence: Synthetic oligonucleotide
  Antisense strand to SEQ ID NO: 576373
uaugccagacccuaccuau

SEQ ID NO: 576375 - RNA, 19 nt, Artificial Sequence
  Description of Artificial Sequence: Synthetic oligonucleotide
  Sense strand starting at position 3748 of SEQ ID NO: 318619
ggguccucauguguuugua

SEQ ID NO: 576376 - RNA, 19 nt, Artificial Sequence
  Description of Artificial Sequence: Synthetic oligonucleotide
  Antisense strand to SEQ ID NO: 576375
uacaaacacaugaggaccc

SEQ ID NO: 576377 - RNA, 19 nt, Artificial Sequence
  Description of Artificial Sequence: Synthetic oligonucleotide
  Sense strand starting at position 3752 of SEQ ID NO: 318619
ccucauguguuuguaggga

SEQ ID NO: 576378 - RNA, 19 nt, Artificial Sequence
  Description of Artificial Sequence: Synthetic oligonucleotide
  Antisense strand to SEQ ID NO: 576377
ucccuacaaacacaugagg

SEQ ID NO: 576379 - RNA, 19 nt, Artificial Sequence
  Description of Artificial Sequence: Synthetic oligonucleotide
  Sense strand starting at position 3782 of SEQ ID NO: 318619
gcaggaacguccuccagaa

SEQ ID NO: 576380 - RNA, 19 nt, Artificial Sequence
  Description of Artificial Sequence: Synthetic oligonucleotide
  Antisense strand to SEQ ID NO: 576379
uucuggaggacguuccugc

SEQ ID NO: 576381 - RNA, 19 nt, Artificial Sequence
  Description of Artificial Sequence: Synthetic oligonucleotide
  Sense strand starting at position 3847 of SEQ ID NO: 318619
gcugaaguguucuccaguc

SEQ ID NO: 576382 - RNA, 19 nt, Artificial Sequence
  Description of Artificial Sequence: Synthetic oligonucleotide
  Antisense strand to SEQ ID NO: 576381
gacuggagaacacuucagc

SEQ ID NO: 576383 - RNA, 19 nt, Artificial Sequence
  Description of Artificial Sequence: Synthetic oligonucleotide
  Sense strand starting at position 3855 of SEQ ID NO: 318619
guucuccaguccuuggaga

SEQ ID NO: 576384 - RNA, 19 nt, Artificial Sequence
  Description of Artificial Sequence: Synthetic oligonucleotide
  Antisense strand to SEQ ID NO: 576383
ucuccaaggacuggagaac

SEQ ID NO: 576385 - RNA, 19 nt, Artificial Sequence
  Description of Artificial Sequence: Synthetic oligonucleotide
  Sense strand starting at position 3856 of SEQ ID NO: 318619
uucuccaguccuuggagaa

SEQ ID NO: 576386 - RNA, 19 nt, Artificial Sequence
  Description of Artificial Sequence: Synthetic oligonucleotide
  Antisense strand to SEQ ID NO: 576385
uucuccaaggacuggagaa

SEQ ID NO: 576387 - RNA, 19 nt, Artificial Sequence
  Description of Artificial Sequence: Synthetic oligonucleotide
  Sense strand starting at position 3857 of SEQ ID NO: 318619
ucuccaguccuuggagaaa

SEQ ID NO: 576388 - RNA, 19 nt, Artificial Sequence
  Description of Artificial Sequence: Synthetic oligonucleotide
  Antisense strand to SEQ ID NO: 576387
uuucuccaaggacuggaga

SEQ ID NO: 576389 - RNA, 19 nt, Artificial Sequence
  Description of Artificial Sequence: Synthetic oligonucleotide
  Sense strand starting at position 3940 of SEQ ID NO: 318619
acuuuccagcuucguauua

SEQ ID NO: 576390 - RNA, 19 nt, Artificial Sequence
  Description of Artificial Sequence: Synthetic oligonucleotide
  Antisense strand to SEQ ID NO: 576389
uaauacgaagcuggaaagu

SEQ ID NO: 576391 - RNA, 19 nt, Artificial Sequence
  Description of Artificial Sequence: Synthetic oligonucleotide
  Sense strand starting at position 3952 of SEQ ID NO: 318619
cguauuagccuuuaaucaa

SEQ ID NO: 576392 - RNA, 19 nt, Artificial Sequence
  Description of Artificial Sequence: Synthetic oligonucleotide
  Antisense strand to SEQ ID NO: 576391
uugauuaaaggcuaauacg

SEQ ID NO: 576393 - RNA, 19 nt, Artificial Sequence
  Description of Artificial Sequence: Synthetic oligonucleotide
  Sense strand starting at position 3959 of SEQ ID NO: 318619
gccuuuaaucaaggauuau

SEQ ID NO: 576394 - RNA, 19 nt, Artificial Sequence
  Description of Artificial Sequence: Synthetic oligonucleotide
  Antisense strand to SEQ ID NO: 576393
auaauccuugauuaaaggc

SEQ ID NO: 576395 - RNA, 19 nt, Artificial Sequence
  Description of Artificial Sequence: Synthetic oligonucleotide
  Sense strand starting at position 3971 of SEQ ID NO: 318619
ggauuaugcccuuacugcu

SEQ ID NO: 576396 - RNA, 19 nt, Artificial Sequence
  Description of Artificial Sequence: Synthetic oligonucleotide
  Antisense strand to SEQ ID NO: 576395
agcaguaagggcauaaucc

SEQ ID NO: 576397 - RNA, 19 nt, Artificial Sequence
  Description of Artificial Sequence: Synthetic oligonucleotide
  Sense strand starting at position 168 of SEQ ID NO: 318620
cugcucuuccaaggaagau

SEQ ID NO: 576398 - RNA, 19 nt, Artificial Sequence
  Description of Artificial Sequence: Synthetic oligonucleotide
  Antisense strand to SEQ ID NO: 576397
aucuuccuuggaagagcag

SEQ ID NO: 576399 - RNA, 19 nt, Artificial Sequence
  Description of Artificial Sequence: Synthetic oligonucleotide
  Sense strand starting at position 646 of SEQ ID NO: 318620
gcaugaucauggcucauac

SEQ ID NO: 576400 - RNA, 19 nt, Artificial Sequence
  Description of Artificial Sequence: Synthetic oligonucleotide
  Antisense strand to SEQ ID NO: 576399
guaugagccaugaucaugc

SEQ ID NO: 576401 - RNA, 19 nt, Artificial Sequence
  Description of Artificial Sequence: Synthetic oligonucleotide
  Sense strand starting at position 684 of SEQ ID NO: 318620
gcucaagagaguggacuuu

SEQ ID NO: 576402 - RNA, 19 nt, Artificial Sequence
  Description of Artificial Sequence: Synthetic oligonucleotide
  Antisense strand to SEQ ID NO: 576401
aaaguccacucucuugagc

SEQ ID NO: 576403 - RNA, 19 nt, Artificial Sequence
  Description of Artificial Sequence: Synthetic oligonucleotide
  Sense strand starting at position 1138 of SEQ ID NO: 318620
gugauucuuugauuugucu

SEQ ID NO: 576404 - RNA, 19 nt, Artificial Sequence
  Description of Artificial Sequence: Synthetic oligonucleotide
  Antisense strand to SEQ ID NO: 576403
agacaaaucaaagaaucac

SEQ ID NO: 576405 - RNA, 19 nt, Artificial Sequence
  Description of Artificial Sequence: Synthetic oligonucleotide
  Sense strand starting at position 1189 of SEQ ID NO: 318620
agagauggugcucaccauu

SEQ ID NO: 576406 - RNA, 19 nt, Artificial Sequence
  Description of Artificial Sequence: Synthetic oligonucleotide
  Antisense strand to SEQ ID NO: 576405
aauggugagcaccaucucu

SEQ ID NO: 576407 - RNA, 19 nt, Artificial Sequence
  Description of Artificial Sequence: Synthetic oligonucleotide
  Sense strand starting at position 1224 of SEQ ID NO: 318620
cccugaguaccggauuaac

SEQ ID NO: 576408 - RNA, 19 nt, Artificial Sequence
  Description of Artificial Sequence: Synthetic oligonucleotide
  Antisense strand to SEQ ID NO: 576407
guuaauccgguacucaggg

SEQ ID NO: 576409 - RNA, 19 nt, Artificial Sequence
  Description of Artificial Sequence: Synthetic oligonucleotide
  Sense strand starting at position 1227 of SEQ ID NO: 318620
ugaguaccggauuaacagu

SEQ ID NO: 576410 - RNA, 19 nt, Artificial Sequence
  Description of Artificial Sequence: Synthetic oligonucleotide
  Antisense strand to SEQ ID NO: 576409
acuguuaauccgguacuca

SEQ ID NO: 576411 - RNA, 19 nt, Artificial Sequence
  Description of Artificial Sequence: Synthetic oligonucleotide
  Sense strand starting at position 1234 of SEQ ID NO: 318620
cggauuaacaguugaauua

SEQ ID NO: 576412 - RNA, 19 nt, Artificial Sequence
  Description of Artificial Sequence: Synthetic oligonucleotide
  Antisense strand to SEQ ID NO: 576411
uaauucaacuguuaauccg

SEQ ID NO: 576413 - RNA, 19 nt, Artificial Sequence
  Description of Artificial Sequence: Synthetic oligonucleotide
  Sense strand starting at position 1258 of SEQ ID NO: 318620
guaagaaaugacuguacca

SEQ ID NO: 576414 - RNA, 19 nt, Artificial Sequence
  Description of Artificial Sequence: Synthetic oligonucleotide
  Antisense strand to SEQ ID NO: 576413
ugguacagucauuucuuac

SEQ ID NO: 576415 - RNA, 19 nt, Artificial Sequence
  Description of Artificial Sequence: Synthetic oligonucleotide
  Sense strand starting at position 1329 of SEQ ID NO: 318620
ugaguuccagcucaacuaa

SEQ ID NO: 576416 - RNA, 19 nt, Artificial Sequence
  Description of Artificial Sequence: Synthetic oligonucleotide
  Antisense strand to SEQ ID NO: 576415
uuaguugagcuggaacuca

SEQ ID NO: 576417 - RNA, 19 nt, Artificial Sequence
  Description of Artificial Sequence: Synthetic oligonucleotide
  Sense strand starting at position 2081 of SEQ ID NO: 318620
ggagacucgugaucaacaa

SEQ ID NO: 576418 - RNA, 19 nt, Artificial Sequence
  Description of Artificial Sequence: Synthetic oligonucleotide
  Antisense strand to SEQ ID NO: 576417
uuguugaucacgagucucc

SEQ ID NO: 576419 - RNA, 19 nt, Artificial Sequence
  Description of Artificial Sequence: Synthetic oligonucleotide
  Sense strand starting at position 2217 of SEQ ID NO: 318620
ccuuguuaauucucugaug

SEQ ID NO: 576420 - RNA, 19 nt, Artificial Sequence
  Description of Artificial Sequence: Synthetic oligonucleotide
  Antisense strand to SEQ ID NO: 576419
caucagagaauuaacaagg

SEQ ID NO: 576421 - RNA, 19 nt, Artificial Sequence
  Description of Artificial Sequence: Synthetic oligonucleotide
  Sense strand starting at position 2273 of SEQ ID NO: 318620
ucuggaucuuucucuagau

SEQ ID NO: 576422 - RNA, 19 nt, Artificial Sequence
  Description of Artificial Sequence: Synthetic oligonucleotide
  Antisense strand to SEQ ID NO: 576421
aucuagagaaagauccaga

SEQ ID NO: 576423 - RNA, 19 nt, Artificial Sequence
  Description of Artificial Sequence: Synthetic oligonucleotide
  Sense strand starting at position 2274 of SEQ ID NO: 318620
cuggaucuuucucuagauc

SEQ ID NO: 576424 - RNA, 19 nt, Artificial Sequence
  Description of Artificial Sequence: Synthetic oligonucleotide
  Antisense strand to SEQ ID NO: 576423
gaucuagagaaagauccag

SEQ ID NO: 576425 - RNA, 19 nt, Artificial Sequence
  Description of Artificial Sequence: Synthetic oligonucleotide
  Sense strand starting at position 2277 of SEQ ID NO: 318620
gaucuuucucuagauccga

SEQ ID NO: 576426 - RNA, 19 nt, Artificial Sequence
  Description of Artificial Sequence: Synthetic oligonucleotide
  Antisense strand to SEQ ID NO: 576425
ucggaucuagagaaagauc

SEQ ID NO: 576427 - RNA, 19 nt, Artificial Sequence
  Description of Artificial Sequence: Synthetic oligonucleotide
  Sense strand starting at position 2502 of SEQ ID NO: 318620
gacgacuguccguaaccaa

SEQ ID NO: 576428 - RNA, 19 nt, Artificial Sequence
  Description of Artificial Sequence: Synthetic oligonucleotide
  Antisense strand to SEQ ID NO: 576427
uugguuacggacagucguc

SEQ ID NO: 576429 - RNA, 19 nt, Artificial Sequence
  Description of Artificial Sequence: Synthetic oligonucleotide
  Sense strand starting at position 2545 of SEQ ID NO: 318620
ugccuugucagggacagau

SEQ ID NO: 576430 - RNA, 19 nt, Artificial Sequence
  Description of Artificial Sequence: Synthetic oligonucleotide
  Antisense strand to SEQ ID NO: 576429
aucugucccugacaaggca

SEQ ID NO: 576431 - RNA, 19 nt, Artificial Sequence
  Description of Artificial Sequence: Synthetic oligonucleotide
  Sense strand starting at position 2636 of SEQ ID NO: 318620
gaaauugcugggugcaaag

SEQ ID NO: 576432 - RNA, 19 nt, Artificial Sequence
  Description of Artificial Sequence: Synthetic oligonucleotide
  Antisense strand to SEQ ID NO: 576431
cuuugcacccagcaauuuc

SEQ ID NO: 576433 - RNA, 19 nt, Artificial Sequence
  Description of Artificial Sequence: Synthetic oligonucleotide
  Sense strand starting at position 2674 of SEQ ID NO: 318620
acugcaugagucuaggcau

SEQ ID NO: 576434 - RNA, 19 nt, Artificial Sequence
  Description of Artificial Sequence: Synthetic oligonucleotide
  Antisense strand to SEQ ID NO: 576433
augccuagacucaugcagu

SEQ ID NO: 576435 - RNA, 19 nt, Artificial Sequence
  Description of Artificial Sequence: Synthetic oligonucleotide
  Sense strand starting at position 2677 of SEQ ID NO: 318620
gcaugagucuaggcaugag

SEQ ID NO: 576436 - RNA, 19 nt, Artificial Sequence
  Description of Artificial Sequence: Synthetic oligonucleotide
  Antisense strand to SEQ ID NO: 576435
cucaugccuagacucaugc

SEQ ID NO: 576437 - RNA, 19 nt, Artificial Sequence
  Description of Artificial Sequence: Synthetic oligonucleotide
  Sense strand starting at position 2680 of SEQ ID NO: 318620
ugagucuaggcaugagaaa

SEQ ID NO: 576438 - RNA, 19 nt, Artificial Sequence
  Description of Artificial Sequence: Synthetic oligonucleotide
  Antisense strand to SEQ ID NO: 576437
uuucucaugccuagacuca

SEQ ID NO: 576439 - RNA, 19 nt, Artificial Sequence
  Description of Artificial Sequence: Synthetic oligonucleotide
  Sense strand starting at position 2876 of SEQ ID NO: 318620
ggcauuagauagucucuga

SEQ ID NO: 576440 - RNA, 19 nt, Artificial Sequence
  Description of Artificial Sequence: Synthetic oligonucleotide
  Antisense strand to SEQ ID NO: 576439
ucagagacuaucuaaugcc

SEQ ID NO: 576441 - RNA, 19 nt, Artificial Sequence
  Description of Artificial Sequence: Synthetic oligonucleotide
  Sense strand starting at position 2879 of SEQ ID NO: 318620
auuagauagucucugacug

SEQ ID NO: 576442 - RNA, 19 nt, Artificial Sequence
  Description of Artificial Sequence: Synthetic oligonucleotide
  Antisense strand to SEQ ID NO: 576441
cagucagagacuaucuaau

SEQ ID NO: 576443 - RNA, 19 nt, Artificial Sequence
  Description of Artificial Sequence: Synthetic oligonucleotide
  Sense strand starting at position 2984 of SEQ ID NO: 318620
guuguaguuguugagggaa

SEQ ID NO: 576444 - RNA, 19 nt, Artificial Sequence
  Description of Artificial Sequence: Synthetic oligonucleotide
  Antisense strand to SEQ ID NO: 576443
uucccucaacaacuacaac

SEQ ID NO: 576445 - RNA, 19 nt, Artificial Sequence
  Description of Artificial Sequence: Synthetic oligonucleotide
  Sense strand starting at position 2987 of SEQ ID NO: 318620
guaguuguugagggaagga

SEQ ID NO: 576446 - RNA, 19 nt, Artificial Sequence
  Description of Artificial Sequence: Synthetic oligonucleotide
  Antisense strand to SEQ ID NO: 576445
uccuucccucaacaacuac

SEQ ID NO: 576447 - RNA, 19 nt, Artificial Sequence
  Description of Artificial Sequence: Synthetic oligonucleotide
  Sense strand starting at position 3019 of SEQ ID NO: 318620
gugagguaggcuggagaau

SEQ ID NO: 576448 - RNA, 19 nt, Artificial Sequence
  Description of Artificial Sequence: Synthetic oligonucleotide
  Antisense strand to SEQ ID NO: 576447
auucuccagccuaccucac

SEQ ID NO: 576449 - RNA, 19 nt, Artificial Sequence
  Description of Artificial Sequence: Synthetic oligonucleotide
  Sense strand starting at position 3034 of SEQ ID NO: 318620
gaauguuagagugagcugu

SEQ ID NO: 576450 - RNA, 19 nt, Artificial Sequence
  Description of Artificial Sequence: Synthetic oligonucleotide
  Antisense strand to SEQ ID NO: 576449
acagcucacucuaacauuc

SEQ ID NO: 576451 - RNA, 19 nt, Artificial Sequence
  Description of Artificial Sequence: Synthetic oligonucleotide
  Sense strand starting at position 3132 of SEQ ID NO: 318620
cagguaugugguuaucuuu

SEQ ID NO: 576452 - RNA, 19 nt, Artificial Sequence
  Description of Artificial Sequence: Synthetic oligonucleotide
  Antisense strand to SEQ ID NO: 576451
aaagauaaccacauaccug

SEQ ID NO: 576453 - RNA, 19 nt, Artificial Sequence
  Description of Artificial Sequence: Synthetic oligonucleotide
  Sense strand starting at position 3246 of SEQ ID NO: 318620
uggaauagucucuacuccu

SEQ ID NO: 576454 - RNA, 19 nt, Artificial Sequence
  Description of Artificial Sequence: Synthetic oligonucleotide
  Antisense strand to SEQ ID NO: 576453
aggaguagagacuauucca

SEQ ID NO: 576455 - RNA, 19 nt, Artificial Sequence
  Description of Artificial Sequence: Synthetic oligonucleotide
  Sense strand starting at position 3276 of SEQ ID NO: 318620
agucuagugauggaauugu

SEQ ID NO: 576456 - RNA, 19 nt, Artificial Sequence
  Description of Artificial Sequence: Synthetic oligonucleotide
  Antisense strand to SEQ ID NO: 576455
acaauuccaucacuagacu

SEQ ID NO: 576457 - RNA, 19 nt, Artificial Sequence
  Description of Artificial Sequence: Synthetic oligonucleotide
  Sense strand starting at position 3286 of SEQ ID NO: 318620
uggaauugucucuacucca

SEQ ID NO: 576458 - RNA, 19 nt, Artificial Sequence
  Description of Artificial Sequence: Synthetic oligonucleotide
  Antisense strand to SEQ ID NO: 576457
uggaguagagacaauucca

SEQ ID NO: 576459 - RNA, 19 nt, Artificial Sequence
  Description of Artificial Sequence: Synthetic oligonucleotide
  Sense strand starting at position 3478 of SEQ ID NO: 318620
ccucauuaacuaggugacu

SEQ ID NO: 576460 - RNA, 19 nt, Artificial Sequence
  Description of Artificial Sequence: Synthetic oligonucleotide
  Antisense strand to SEQ ID NO: 576459
agucaccuaguuaaugagg

SEQ ID NO: 576461 - RNA, 19 nt, Artificial Sequence
  Description of Artificial Sequence: Synthetic oligonucleotide
  Sense strand starting at position 3479 of SEQ ID NO: 318620
cucauuaacuaggugacuu

SEQ ID NO: 576462 - RNA, 19 nt, Artificial Sequence
  Description of Artificial Sequence: Synthetic oligonucleotide
  Antisense strand to SEQ ID NO: 576461
aagucaccuaguuaaugag

SEQ ID NO: 576463 - RNA, 19 nt, Artificial Sequence
  Description of Artificial Sequence: Synthetic oligonucleotide
  Sense strand starting at position 3522 of SEQ ID NO: 318620
ucuuuaucuguacaaugga

SEQ ID NO: 576464 - RNA, 19 nt, Artificial Sequence
  Description of Artificial Sequence: Synthetic oligonucleotide
  Antisense strand to SEQ ID NO: 576463
uccauuguacagauaaaga

SEQ ID NO: 576465 - RNA, 19 nt, Artificial Sequence
  Description of Artificial Sequence: Synthetic oligonucleotide
  Sense strand starting at position 3557 of SEQ ID NO: 318620
accucacuggguugucaua

SEQ ID NO: 576466 - RNA, 19 nt, Artificial Sequence
  Description of Artificial Sequence: Synthetic oligonucleotide
  Antisense strand to SEQ ID NO: 576465
uaugacaacccagugaggu

SEQ ID NO: 576467 - RNA, 19 nt, Artificial Sequence
  Description of Artificial Sequence: Synthetic oligonucleotide
  Sense strand starting at position 3566 of SEQ ID NO: 318620
gguugucauaaggaguaaa

SEQ ID NO: 576468 - RNA, 19 nt, Artificial Sequence
  Description of Artificial Sequence: Synthetic oligonucleotide
  Antisense strand to SEQ ID NO: 576467
uuuacuccuuaugacaacc

SEQ ID NO: 576469 - RNA, 19 nt, Artificial Sequence
  Description of Artificial Sequence: Synthetic oligonucleotide
  Sense strand starting at position 3639 of SEQ ID NO: 318620
gcgugugugcuauuauugu

SEQ ID NO: 576470 - RNA, 19 nt, Artificial Sequence
  Description of Artificial Sequence: Synthetic oligonucleotide
  Antisense strand to SEQ ID NO: 576469
acaauaauagcacacacgc

SEQ ID NO: 576471 - RNA, 19 nt, Artificial Sequence
  Description of Artificial Sequence: Synthetic oligonucleotide
  Sense strand starting at position 3788 of SEQ ID NO: 318620
gagggaagaaccugugcaa

SEQ ID NO: 576472 - RNA, 19 nt, Artificial Sequence
  Description of Artificial Sequence: Synthetic oligonucleotide
  Antisense strand to SEQ ID NO: 576471
uugcacagguucuucccuc

SEQ ID NO: 576473 - RNA, 19 nt, Artificial Sequence
  Description of Artificial Sequence: Synthetic oligonucleotide
  Sense strand starting at position 3915 of SEQ ID NO: 318620
gcagacuccaugugaagga

SEQ ID NO: 576474 - RNA, 19 nt, Artificial Sequence
  Description of Artificial Sequence: Synthetic oligonucleotide
  Antisense strand to SEQ ID NO: 576473
uccuucacauggagucugc

SEQ ID NO: 576475 - RNA, 19 nt, Artificial Sequence
  Description of Artificial Sequence: Synthetic oligonucleotide
  Sense strand starting at position 3925 of SEQ ID NO: 318620
ugugaaggauuggccacau

SEQ ID NO: 576476 - RNA, 19 nt, Artificial Sequence
  Description of Artificial Sequence: Synthetic oligonucleotide
  Antisense strand to SEQ ID NO: 576475
auguggccaauccuucaca

SEQ ID NO: 576477 - RNA, 19 nt, Artificial Sequence
  Description of Artificial Sequence: Synthetic oligonucleotide
  Sense strand starting at position 72 of SEQ ID NO: 318621
caugucagugcacaaugau

SEQ ID NO: 576478 - RNA, 19 nt, Artificial Sequence
  Description of Artificial Sequence: Synthetic oligonucleotide
  Antisense strand to SEQ ID NO: 576477
aucauugugcacugacaug

SEQ ID NO: 576479 - RNA, 19 nt, Artificial Sequence
  Description of Artificial Sequence: Synthetic oligonucleotide
  Sense strand starting at position 574 of SEQ ID NO: 318621
aauuguauccugcaagagu

SEQ ID NO: 576480 - RNA, 19 nt, Artificial Sequence
  Description of Artificial Sequence: Synthetic oligonucleotide
  Antisense strand to SEQ ID NO: 576479
acucuugcaggauacaauu

SEQ ID NO: 576481 - RNA, 19 nt, Artificial Sequence
  Description of Artificial Sequence: Synthetic oligonucleotide
  Sense strand starting at position 577 of SEQ ID NO: 318621
uguauccugcaagaguuau

SEQ ID NO: 576482 - RNA, 19 nt, Artificial Sequence
  Description of Artificial Sequence: Synthetic oligonucleotide
  Antisense strand to SEQ ID NO: 576481
auaacucuugcaggauaca

SEQ ID NO: 576483 - RNA, 19 nt, Artificial Sequence
  Description of Artificial Sequence: Synthetic oligonucleotide
  Sense strand starting at position 592 of SEQ ID NO: 318621
uuauaauggcaauggaaac

SEQ ID NO: 576484 - RNA, 19 nt, Artificial Sequence
  Description of Artificial Sequence: Synthetic oligonucleotide
  Antisense strand to SEQ ID NO: 576483
guuuccauugccauuauaa

SEQ ID NO: 576485 - RNA, 19 nt, Artificial Sequence
  Description of Artificial Sequence: Synthetic oligonucleotide
  Sense strand starting at position 617 of SEQ ID NO: 318621
cuaacaguuucucuguuga

SEQ ID NO: 576486 - RNA, 19 nt, Artificial Sequence
  Description of Artificial Sequence: Synthetic oligonucleotide
  Antisense strand to SEQ ID NO: 576485
ucaacagagaaacuguuag

SEQ ID NO: 576487 - RNA, 19 nt, Artificial Sequence
  Description of Artificial Sequence: Synthetic oligonucleotide
  Sense strand starting at position 680 of SEQ ID NO: 318621
guaaaccaggaguguauaa

SEQ ID NO: 576488 - RNA, 19 nt, Artificial Sequence
  Description of Artificial Sequence: Synthetic oligonucleotide
  Antisense strand to SEQ ID NO: 576487
uuauacacuccugguuuac

SEQ ID NO: 576489 - RNA, 19 nt, Artificial Sequence
  Description of Artificial Sequence: Synthetic oligonucleotide
  Sense strand starting at position 716 of SEQ ID NO: 318621
caaccucuggauuguagau

SEQ ID NO: 576490 - RNA, 19 nt, Artificial Sequence
  Description of Artificial Sequence: Synthetic oligonucleotide
  Antisense strand to SEQ ID NO: 576489
aucuacaauccagagguug

SEQ ID NO: 576491 - RNA, 19 nt, Artificial Sequence
  Description of Artificial Sequence: Synthetic oligonucleotide
  Sense strand starting at position 734 of SEQ ID NO: 318621
uuuauaaaccgugggcaua

SEQ ID NO: 576492 - RNA, 19 nt, Artificial Sequence
  Description of Artificial Sequence: Synthetic oligonucleotide
  Antisense strand to SEQ ID NO: 576491
uaugcccacgguuuauaaa

SEQ ID NO: 576493 - RNA, 19 nt, Artificial Sequence
  Description of Artificial Sequence: Synthetic oligonucleotide
  Sense strand starting at position 814 of SEQ ID NO: 318621
guuuaaggaagcugagaaa

SEQ ID NO: 576494 - RNA, 19 nt, Artificial Sequence
  Description of Artificial Sequence: Synthetic oligonucleotide
  Antisense strand to SEQ ID NO: 576493
uuucucagcuuccuuaaac

SEQ ID NO: 576495 - RNA, 19 nt, Artificial Sequence
  Description of Artificial Sequence: Synthetic oligonucleotide
  Sense strand starting at position 1085 of SEQ ID NO: 318621
cuaguaagacauggagcua

SEQ ID NO: 576496 - RNA, 19 nt, Artificial Sequence
  Description of Artificial Sequence: Synthetic oligonucleotide
  Antisense strand to SEQ ID NO: 576495
uagcuccaugucuuacuag

SEQ ID NO: 576497 - RNA, 19 nt, Artificial Sequence
  Description of Artificial Sequence: Synthetic oligonucleotide
  Sense strand starting at position 1104 of SEQ ID NO: 318621
gagagugagcuuugucaca

SEQ ID NO: 576498 - RNA, 19 nt, Artificial Sequence
  Description of Artificial Sequence: Synthetic oligonucleotide
  Antisense strand to SEQ ID NO: 576497
ugugacaaagcucacucuc

SEQ ID NO: 576499 - RNA, 19 nt, Artificial Sequence
  Description of Artificial Sequence: Synthetic oligonucleotide
  Sense strand starting at position 1232 of SEQ ID NO: 318621
acuguuagugcuugggaga

SEQ ID NO: 576500 - RNA, 19 nt, Artificial Sequence
  Description of Artificial Sequence: Synthetic oligonucleotide
  Antisense strand to SEQ ID NO: 576499
ucucccaagcacuaacagu

SEQ ID NO: 576501 - RNA, 19 nt, Artificial Sequence
  Description of Artificial Sequence: Synthetic oligonucleotide
  Sense strand starting at position 1233 of SEQ ID NO: 318621
cuguuagugcuugggagaa

SEQ ID NO: 576502 - RNA, 19 nt, Artificial Sequence
  Description of Artificial Sequence: Synthetic oligonucleotide
  Antisense strand to SEQ ID NO: 576501
uucucccaagcacuaacag

SEQ ID NO: 576503 - RNA, 19 nt, Artificial Sequence
  Description of Artificial Sequence: Synthetic oligonucleotide
  Sense strand starting at position 1436 of SEQ ID NO: 318621
aagggcguauuauuauaca

SEQ ID NO: 576504 - RNA, 19 nt, Artificial Sequence
  Description of Artificial Sequence: Synthetic oligonucleotide
  Antisense strand to SEQ ID NO: 576503
uguauaauaauacgcccuu

SEQ ID NO: 576505 - RNA, 19 nt, Artificial Sequence
  Description of Artificial Sequence: Synthetic oligonucleotide
  Sense strand starting at position 1542 of SEQ ID NO: 318621
gaggcuuguaaguggacua

SEQ ID NO: 576506 - RNA, 19 nt, Artificial Sequence
  Description of Artificial Sequence: Synthetic oligonucleotide
  Antisense strand to SEQ ID NO: 576505
uaguccacuuacaagccuc

SEQ ID NO: 576507 - RNA, 19 nt, Artificial Sequence
  Description of Artificial Sequence: Synthetic oligonucleotide
  Sense strand starting at position 1543 of SEQ ID NO: 318621
aggcuuguaaguggacuau

SEQ ID NO: 576508 - RNA, 19 nt, Artificial Sequence
  Description of Artificial Sequence: Synthetic oligonucleotide
  Antisense strand to SEQ ID NO: 576507
auaguccacuuacaagccu

SEQ ID NO: 576509 - RNA, 19 nt, Artificial Sequence
  Description of Artificial Sequence: Synthetic oligonucleotide
  Sense strand starting at position 1591 of SEQ ID NO: 318621
aaucuuagguuucucagga

SEQ ID NO: 576510 - RNA, 19 nt, Artificial Sequence
  Description of Artificial Sequence: Synthetic oligonucleotide
  Antisense strand to SEQ ID NO: 576509
uccugagaaaccuaagauu

SEQ ID NO: 576511 - RNA, 19 nt, Artificial Sequence
  Description of Artificial Sequence: Synthetic oligonucleotide
  Sense strand starting at position 1592 of SEQ ID NO: 318621
aucuuagguuucucaggau

SEQ ID NO: 576512 - RNA, 19 nt, Artificial Sequence
  Description of Artificial Sequence: Synthetic oligonucleotide
  Antisense strand to SEQ ID NO: 576511
auccugagaaaccuaagau

SEQ ID NO: 576513 - RNA, 19 nt, Artificial Sequence
  Description of Artificial Sequence: Synthetic oligonucleotide
  Sense strand starting at position 1768 of SEQ ID NO: 318621
cuacaaaccuugucuagga

SEQ ID NO: 576514 - RNA, 19 nt, Artificial Sequence
  Description of Artificial Sequence: Synthetic oligonucleotide
  Antisense strand to SEQ ID NO: 576513
uccuagacaagguuuguag

SEQ ID NO: 576515 - RNA, 19 nt, Artificial Sequence
  Description of Artificial Sequence: Synthetic oligonucleotide
  Sense strand starting at position 2006 of SEQ ID NO: 318621
ccagauauggcagaaugcu

SEQ ID NO: 576516 - RNA, 19 nt, Artificial Sequence
  Description of Artificial Sequence: Synthetic oligonucleotide
  Antisense strand to SEQ ID NO: 576515
agcauucugccauaucugg

SEQ ID NO: 576517 - RNA, 19 nt, Artificial Sequence
  Description of Artificial Sequence: Synthetic oligonucleotide
  Sense strand starting at position 2098 of SEQ ID NO: 318621
ccaagacugugauuacaag

SEQ ID NO: 576518 - RNA, 19 nt, Artificial Sequence
  Description of Artificial Sequence: Synthetic oligonucleotide
  Antisense strand to SEQ ID NO: 576517
cuuguaaucacagucuugg

SEQ ID NO: 576519 - RNA, 19 nt, Artificial Sequence
  Description of Artificial Sequence: Synthetic oligonucleotide
  Sense strand starting at position 2348 of SEQ ID NO: 318621
acaugaucagucugucacu

SEQ ID NO: 576520 - RNA, 19 nt, Artificial Sequence
  Description of Artificial Sequence: Synthetic oligonucleotide
  Antisense strand to SEQ ID NO: 576519
agugacagacugaucaugu

SEQ ID NO: 576521 - RNA, 19 nt, Artificial Sequence
  Description of Artificial Sequence: Synthetic oligonucleotide
  Sense strand starting at position 2353 of SEQ ID NO: 318621
aucagucugucacucuaau

SEQ ID NO: 576522 - RNA, 19 nt, Artificial Sequence
  Description of Artificial Sequence: Synthetic oligonucleotide
  Antisense strand to SEQ ID NO: 576521
auuagagugacagacugau

SEQ ID NO: 576523 - RNA, 19 nt, Artificial Sequence
  Description of Artificial Sequence: Synthetic oligonucleotide
  Sense strand starting at position 2374 of SEQ ID NO: 318621
aagaucuuacugugaagca

SEQ ID NO: 576524 - RNA, 19 nt, Artificial Sequence
  Description of Artificial Sequence: Synthetic oligonucleotide
  Antisense strand to SEQ ID NO: 576523
ugcuucacaguaagaucuu

SEQ ID NO: 576525 - RNA, 19 nt, Artificial Sequence
  Description of Artificial Sequence: Synthetic oligonucleotide
  Sense strand starting at position 2443 of SEQ ID NO: 318621
uauagaaggcuuggguaga

SEQ ID NO: 576526 - RNA, 19 nt, Artificial Sequence
  Description of Artificial Sequence: Synthetic oligonucleotide
  Antisense strand to SEQ ID NO: 576525
ucuacccaagccuucuaua

SEQ ID NO: 576527 - RNA, 19 nt, Artificial Sequence
  Description of Artificial Sequence: Synthetic oligonucleotide
  Sense strand starting at position 2540 of SEQ ID NO: 318621
gcauaaauaugugcuauua

SEQ ID NO: 576528 - RNA, 19 nt, Artificial Sequence
  Description of Artificial Sequence: Synthetic oligonucleotide
  Antisense strand to SEQ ID NO: 576527
uaauagcacauauuuaugc

SEQ ID NO: 576529 - RNA, 19 nt, Artificial Sequence
  Description of Artificial Sequence: Synthetic oligonucleotide
  Sense strand starting at position 2553 of SEQ ID NO: 318621
cuauuaauacuuuguagug

SEQ ID NO: 576530 - RNA, 19 nt, Artificial Sequence
  Description of Artificial Sequence: Synthetic oligonucleotide
  Antisense strand to SEQ ID NO: 576529
cacuacaaaguauuaauag

SEQ ID NO: 576531 - RNA, 19 nt, Artificial Sequence
  Description of Artificial Sequence: Synthetic oligonucleotide
  Sense strand starting at position 2604 of SEQ ID NO: 318621
ccuagcuuugucuggagaa

SEQ ID NO: 576532 - RNA, 19 nt, Artificial Sequence
  Description of Artificial Sequence: Synthetic oligonucleotide
  Antisense strand to SEQ ID NO: 576531
uucuccagacaaagcuagg

SEQ ID NO: 576533 - RNA, 19 nt, Artificial Sequence
  Description of Artificial Sequence: Synthetic oligonucleotide
  Sense strand starting at position 2606 of SEQ ID NO: 318621
uagcuuugucuggagaaua

SEQ ID NO: 576534 - RNA, 19 nt, Artificial Sequence
  Description of Artificial Sequence: Synthetic oligonucleotide
  Antisense strand to SEQ ID NO: 576533
uauucuccagacaaagcua

SEQ ID NO: 576535 - RNA, 19 nt, Artificial Sequence
  Description of Artificial Sequence: Synthetic oligonucleotide
  Sense strand starting at position 2614 of SEQ ID NO: 318621
ucuggagaauaagaauaaa

SEQ ID NO: 576536 - RNA, 19 nt, Artificial Sequence
  Description of Artificial Sequence: Synthetic oligonucleotide
  Antisense strand to SEQ ID NO: 576535
uuuauucuuauucuccaga

SEQ ID NO: 576537 - RNA, 19 nt, Artificial Sequence
  Description of Artificial Sequence: Synthetic oligonucleotide
  Sense strand starting at position 2960 of SEQ ID NO: 318621
acuggaaguguaugccaaa

SEQ ID NO: 576538 - RNA, 19 nt, Artificial Sequence
  Description of Artificial Sequence: Synthetic oligonucleotide
  Antisense strand to SEQ ID NO: 576537
uuuggcauacacuuccagu

SEQ ID NO: 576539 - RNA, 19 nt, Artificial Sequence
  Description of Artificial Sequence: Synthetic oligonucleotide
  Sense strand starting at position 3290 of SEQ ID NO: 318621
auaauaagauagcuaugca

SEQ ID NO: 576540 - RNA, 19 nt, Artificial Sequence
  Description of Artificial Sequence: Synthetic oligonucleotide
  Antisense strand to SEQ ID NO: 576539
ugcauagcuaucuuauuau

SEQ ID NO: 576541 - RNA, 19 nt, Artificial Sequence
  Description of Artificial Sequence: Synthetic oligonucleotide
  Sense strand starting at position 3309 of SEQ ID NO: 318621
cagcaauguggaugacauu

SEQ ID NO: 576542 - RNA, 19 nt, Artificial Sequence
  Description of Artificial Sequence: Synthetic oligonucleotide
  Antisense strand to SEQ ID NO: 576541
aaugucauccacauugcug

SEQ ID NO: 576543 - RNA, 19 nt, Artificial Sequence
  Description of Artificial Sequence: Synthetic oligonucleotide
  Sense strand starting at position 3379 of SEQ ID NO: 318621
ggaguucuucuagaucuca

SEQ ID NO: 576544 - RNA, 19 nt, Artificial Sequence
  Description of Artificial Sequence: Synthetic oligonucleotide
  Antisense strand to SEQ ID NO: 576543
ugagaucuagaagaacucc

SEQ ID NO: 576545 - RNA, 19 nt, Artificial Sequence
  Description of Artificial Sequence: Synthetic oligonucleotide
  Sense strand starting at position 3423 of SEQ ID NO: 318621
acguguacacuguaucaaa

SEQ ID NO: 576546 - RNA, 19 nt, Artificial Sequence
  Description of Artificial Sequence: Synthetic oligonucleotide
  Antisense strand to SEQ ID NO: 576545
uuugauacaguguacacgu

SEQ ID NO: 576547 - RNA, 19 nt, Artificial Sequence
  Description of Artificial Sequence: Synthetic oligonucleotide
  Sense strand starting at position 3447 of SEQ ID NO: 318621
ccuguaauuguggacaauu

SEQ ID NO: 576548 - RNA, 19 nt, Artificial Sequence
  Description of Artificial Sequence: Synthetic oligonucleotide
  Antisense strand to SEQ ID NO: 576547
aauuguccacaauuacagg

SEQ ID NO: 576549 - RNA, 19 nt, Artificial Sequence
  Description of Artificial Sequence: Synthetic oligonucleotide
  Sense strand starting at position 3468 of SEQ ID NO: 318621
guuugacacuuggcaauga

SEQ ID NO: 576550 - RNA, 19 nt, Artificial Sequence
  Description of Artificial Sequence: Synthetic oligonucleotide
  Antisense strand to SEQ ID NO: 576549
ucauugccaagugucaaac

SEQ ID NO: 576551 - RNA, 19 nt, Artificial Sequence
  Description of Artificial Sequence: Synthetic oligonucleotide
  Sense strand starting at position 3550 of SEQ ID NO: 318621
guggauugagguuaggagu

SEQ ID NO: 576552 - RNA, 19 nt, Artificial Sequence
  Description of Artificial Sequence: Synthetic oligonucleotide
  Antisense strand to SEQ ID NO: 576551
acuccuaaccucaauccac

SEQ ID NO: 576553 - RNA, 19 nt, Artificial Sequence
  Description of Artificial Sequence: Synthetic oligonucleotide
  Sense strand starting at position 3836 of SEQ ID NO: 318621
gccucaguugcucauaaga

SEQ ID NO: 576554 - RNA, 19 nt, Artificial Sequence
  Description of Artificial Sequence: Synthetic oligonucleotide
  Antisense strand to SEQ ID NO: 576553
ucuuaugagcaacugaggc

SEQ ID NO: 576555 - RNA, 19 nt, Artificial Sequence
  Description of Artificial Sequence: Synthetic oligonucleotide
  Sense strand starting at position 3949 of SEQ ID NO: 318621
gaggacauuaaguaguguu

SEQ ID NO: 576556 - RNA, 19 nt, Artificial Sequence
  Description of Artificial Sequence: Synthetic oligonucleotide
  Antisense strand to SEQ ID NO: 576555
aacacuacuuaauguccuc

SEQ ID NO: 576557 - RNA, 19 nt, Artificial Sequence
  Description of Artificial Sequence: Synthetic oligonucleotide
  Sense strand starting at position 30 of SEQ ID NO: 318622
cuggaaaccgcguguccau

SEQ ID NO: 576558 - RNA, 19 nt, Artificial Sequence
  Description of Artificial Sequence: Synthetic oligonucleotide
  Antisense strand to SEQ ID NO: 576557
auggacacgcgguuuccag

SEQ ID NO: 576559 - RNA, 19 nt, Artificial Sequence
  Description of Artificial Sequence: Synthetic oligonucleotide
  Sense strand starting at position 57 of SEQ ID NO: 318622
gaaggugaaccucguaagu

SEQ ID NO: 576560 - RNA, 19 nt, Artificial Sequence
  Description of Artificial Sequence: Synthetic oligonucleotide
  Antisense strand to SEQ ID NO: 576559
acuuacgagguucaccuuc

SEQ ID NO: 576561 - RNA, 19 nt, Artificial Sequence
  Description of Artificial Sequence: Synthetic oligonucleotide
  Sense strand starting at position 68 of SEQ ID NO: 318622
ucguaaguuuaugcaaacu

SEQ ID NO: 576562 - RNA, 19 nt, Artificial Sequence
  Description of Artificial Sequence: Synthetic oligonucleotide
  Antisense strand to SEQ ID NO: 576561
aguuugcauaaacuuacga

SEQ ID NO: 576563 - RNA, 19 nt, Artificial Sequence
  Description of Artificial Sequence: Synthetic oligonucleotide
  Sense strand starting at position 108 of SEQ ID NO: 318622
cagagaucaccguguccac

SEQ ID NO: 576564 - RNA, 19 nt, Artificial Sequence
  Description of Artificial Sequence: Synthetic oligonucleotide
  Antisense strand to SEQ ID NO: 576563
guggacacggugaucucug

SEQ ID NO: 576565 - RNA, 19 nt, Artificial Sequence
  Description of Artificial Sequence: Synthetic oligonucleotide
  Sense strand starting at position 363 of SEQ ID NO: 318622
cuugguguuccugaggaag

SEQ ID NO: 576566 - RNA, 19 nt, Artificial Sequence
  Description of Artificial Sequence: Synthetic oligonucleotide
  Antisense strand to SEQ ID NO: 576565
cuuccucaggaacaccaag

SEQ ID NO: 576567 - RNA, 19 nt, Artificial Sequence
  Description of Artificial Sequence: Synthetic oligonucleotide
  Sense strand starting at position 743 of SEQ ID NO: 318622
gaaagauggucuccacgag

SEQ ID NO: 576568 - RNA, 19 nt, Artificial Sequence
  Description of Artificial Sequence: Synthetic oligonucleotide
  Antisense strand to SEQ ID NO: 576567
cucguggagaccaucuuuc

SEQ ID NO: 576569 - RNA, 19 nt, Artificial Sequence
  Description of Artificial Sequence: Synthetic oligonucleotide
  Sense strand starting at position 2660 of SEQ ID NO: 318622
cccgucauuucucuuugca

SEQ ID NO: 576570 - RNA, 19 nt, Artificial Sequence
  Description of Artificial Sequence: Synthetic oligonucleotide
  Antisense strand to SEQ ID NO: 576569
ugcaaagagaaaugacggg

SEQ ID NO: 576571 - RNA, 19 nt, Artificial Sequence
  Description of Artificial Sequence: Synthetic oligonucleotide
  Sense strand starting at position 2663 of SEQ ID NO: 318622
gucauuucucuuugcaggu

SEQ ID NO: 576572 - RNA, 19 nt, Artificial Sequence
  Description of Artificial Sequence: Synthetic oligonucleotide
  Antisense strand to SEQ ID NO: 576571
accugcaaagagaaaugac

SEQ ID NO: 576573 - RNA, 19 nt, Artificial Sequence
  Description of Artificial Sequence: Synthetic oligonucleotide
  Sense strand starting at position 2744 of SEQ ID NO: 318622
gggcggucccgucgagaaa

SEQ ID NO: 576574 - RNA, 19 nt, Artificial Sequence
  Description of Artificial Sequence: Synthetic oligonucleotide
  Antisense strand to SEQ ID NO: 576573
uuucucgacgggaccgccc

SEQ ID NO: 576575 - RNA, 19 nt, Artificial Sequence
  Description of Artificial Sequence: Synthetic oligonucleotide
  Sense strand starting at position 3212 of SEQ ID NO: 318622
gccggaggaaauugcuuua

SEQ ID NO: 576576 - RNA, 19 nt, Artificial Sequence
  Description of Artificial Sequence: Synthetic oligonucleotide
  Antisense strand to SEQ ID NO: 576575
uaaagcaauuuccuccggc

SEQ ID NO: 576577 - RNA, 19 nt, Artificial Sequence
  Description of Artificial Sequence: Synthetic oligonucleotide
  Sense strand starting at position 3224 of SEQ ID NO: 318622
ugcuuuauuuauggagcua

SEQ ID NO: 576578 - RNA, 19 nt, Artificial Sequence
  Description of Artificial Sequence: Synthetic oligonucleotide
  Antisense strand to SEQ ID NO: 576577
uagcuccauaaauaaagca

SEQ ID NO: 576579 - RNA, 19 nt, Artificial Sequence
  Description of Artificial Sequence: Synthetic oligonucleotide
  Sense strand starting at position 3290 of SEQ ID NO: 318622
agguuagccucgucuugua

SEQ ID NO: 576580 - RNA, 19 nt, Artificial Sequence
  Description of Artificial Sequence: Synthetic oligonucleotide
  Antisense strand to SEQ ID NO: 576579
uacaagacgaggcuaaccu

SEQ ID NO: 576581 - RNA, 19 nt, Artificial Sequence
  Description of Artificial Sequence: Synthetic oligonucleotide
  Sense strand starting at position 3292 of SEQ ID NO: 318622
guuagccucgucuuguaaa

SEQ ID NO: 576582 - RNA, 19 nt, Artificial Sequence
  Description of Artificial Sequence: Synthetic oligonucleotide
  Antisense strand to SEQ ID NO: 576581
uuuacaagacgaggcuaac

SEQ ID NO: 576583 - RNA, 19 nt, Artificial Sequence
  Description of Artificial Sequence: Synthetic oligonucleotide
  Sense strand starting at position 3302 of SEQ ID NO: 318622
ucuuguaaauacuuaggau

SEQ ID NO: 576584 - RNA, 19 nt, Artificial Sequence
  Description of Artificial Sequence: Synthetic oligonucleotide
  Antisense strand to SEQ ID NO: 576583
auccuaaguauuuacaaga

SEQ ID NO: 576585 - RNA, 19 nt, Artificial Sequence
  Description of Artificial Sequence: Synthetic oligonucleotide
  Sense strand starting at position 3305 of SEQ ID NO: 318622
uguaaauacuuaggauuac

SEQ ID NO: 576586 - RNA, 19 nt, Artificial Sequence
  Description of Artificial Sequence: Synthetic oligonucleotide
  Antisense strand to SEQ ID NO: 576585
guaauccuaaguauuuaca

SEQ ID NO: 576587 - RNA, 19 nt, Artificial Sequence
  Description of Artificial Sequence: Synthetic oligonucleotide
  Sense strand starting at position 3306 of SEQ ID NO: 318622
guaaauacuuaggauuaca

SEQ ID NO: 576588 - RNA, 19 nt, Artificial Sequence
  Description of Artificial Sequence: Synthetic oligonucleotide
  Antisense strand to SEQ ID NO: 576587
uguaauccuaaguauuuac

SEQ ID NO: 576589 - RNA, 19 nt, Artificial Sequence
  Description of Artificial Sequence: Synthetic oligonucleotide
  Sense strand starting at position 3322 of SEQ ID NO: 318622
acaggucgcucuucuagaa

SEQ ID NO: 576590 - RNA, 19 nt, Artificial Sequence
  Description of Artificial Sequence: Synthetic oligonucleotide
  Antisense strand to SEQ ID NO: 576589
uucuagaagagcgaccugu

SEQ ID NO: 576591 - RNA, 19 nt, Artificial Sequence
  Description of Artificial Sequence: Synthetic oligonucleotide
  Sense strand starting at position 3346 of SEQ ID NO: 318622
cuuagugaucccuaagccu

SEQ ID NO: 576592 - RNA, 19 nt, Artificial Sequence
  Description of Artificial Sequence: Synthetic oligonucleotide
  Antisense strand to SEQ ID NO: 576591
aggcuuagggaucacuaag

SEQ ID NO: 576593 - RNA, 19 nt, Artificial Sequence
  Description of Artificial Sequence: Synthetic oligonucleotide
  Sense strand starting at position 3370 of SEQ ID NO: 318622
aagggcuguguuugugaau

SEQ ID NO: 576594 - RNA, 19 nt, Artificial Sequence
  Description of Artificial Sequence: Synthetic oligonucleotide
  Antisense strand to SEQ ID NO: 576593
auucacaaacacagcccuu

SEQ ID NO: 576595 - RNA, 19 nt, Artificial Sequence
  Description of Artificial Sequence: Synthetic oligonucleotide
  Sense strand starting at position 3371 of SEQ ID NO: 318622
agggcuguguuugugaauu

SEQ ID NO: 576596 - RNA, 19 nt, Artificial Sequence
  Description of Artificial Sequence: Synthetic oligonucleotide
  Antisense strand to SEQ ID NO: 576595
aauucacaaacacagcccu

SEQ ID NO: 576597 - RNA, 19 nt, Artificial Sequence
  Description of Artificial Sequence: Synthetic oligonucleotide
  Sense strand starting at position 3377 of SEQ ID NO: 318622
guguuugugaauugucucu

SEQ ID NO: 576598 - RNA, 19 nt, Artificial Sequence
  Description of Artificial Sequence: Synthetic oligonucleotide
  Antisense strand to SEQ ID NO: 576597
agagacaauucacaaacac

SEQ ID NO: 576599 - RNA, 19 nt, Artificial Sequence
  Description of Artificial Sequence: Synthetic oligonucleotide
  Sense strand starting at position 3382 of SEQ ID NO: 318622
ugugaauugucucugccac

SEQ ID NO: 576600 - RNA, 19 nt, Artificial Sequence
  Description of Artificial Sequence: Synthetic oligonucleotide
  Antisense strand to SEQ ID NO: 576599
guggcagagacaauucaca

SEQ ID NO: 576601 - RNA, 19 nt, Artificial Sequence
  Description of Artificial Sequence: Synthetic oligonucleotide
  Sense strand starting at position 3383 of SEQ ID NO: 318622
gugaauugucucugccacu

SEQ ID NO: 576602 - RNA, 19 nt, Artificial Sequence
  Description of Artificial Sequence: Synthetic oligonucleotide
  Antisense strand to SEQ ID NO: 576601
aguggcagagacaauucac

SEQ ID NO: 576603 - RNA, 19 nt, Artificial Sequence
  Description of Artificial Sequence: Synthetic oligonucleotide
  Sense strand starting at position 3384 of SEQ ID NO: 318622
ugaauugucucugccacua

SEQ ID NO: 576604 - RNA, 19 nt, Artificial Sequence
  Description of Artificial Sequence: Synthetic oligonucleotide
  Antisense strand to SEQ ID NO: 576603
uaguggcagagacaauuca

SEQ ID NO: 576605 - RNA, 19 nt, Artificial Sequence
  Description of Artificial Sequence: Synthetic oligonucleotide
  Sense strand starting at position 3458 of SEQ ID NO: 318622
acugguucucugcagagaa

SEQ ID NO: 576606 - RNA, 19 nt, Artificial Sequence
  Description of Artificial Sequence: Synthetic oligonucleotide
  Antisense strand to SEQ ID NO: 576605
uucucugcagagaaccagu

SEQ ID NO: 576607 - RNA, 19 nt, Artificial Sequence
  Description of Artificial Sequence: Synthetic oligonucleotide
  Sense strand starting at position 3527 of SEQ ID NO: 318622
agaagauuaugcuggagua

SEQ ID NO: 576608 - RNA, 19 nt, Artificial Sequence
  Description of Artificial Sequence: Synthetic oligonucleotide
  Antisense strand to SEQ ID NO: 576607
uacuccagcauaaucuucu

SEQ ID NO: 576609 - RNA, 19 nt, Artificial Sequence
  Description of Artificial Sequence: Synthetic oligonucleotide
  Sense strand starting at position 3528 of SEQ ID NO: 318622
gaagauuaugcuggaguaa

SEQ ID NO: 576610 - RNA, 19 nt, Artificial Sequence
  Description of Artificial Sequence: Synthetic oligonucleotide
  Antisense strand to SEQ ID NO: 576609
uuacuccagcauaaucuuc

SEQ ID NO: 576611 - RNA, 19 nt, Artificial Sequence
  Description of Artificial Sequence: Synthetic oligonucleotide
  Sense strand starting at position 3587 of SEQ ID NO: 318622
caaugaagaucgcugauac

SEQ ID NO: 576612 - RNA, 19 nt, Artificial Sequence
  Description of Artificial Sequence: Synthetic oligonucleotide
  Antisense strand to SEQ ID NO: 576611
guaucagcgaucuucauug

SEQ ID NO: 576613 - RNA, 19 nt, Artificial Sequence
  Description of Artificial Sequence: Synthetic oligonucleotide
  Sense strand starting at position 3595 of SEQ ID NO: 318622
aucgcugauacccagaaga

SEQ ID NO: 576614 - RNA, 19 nt, Artificial Sequence
  Description of Artificial Sequence: Synthetic oligonucleotide
  Antisense strand to SEQ ID NO: 576613
ucuucuggguaucagcgau

SEQ ID NO: 576615 - RNA, 19 nt, Artificial Sequence
  Description of Artificial Sequence: Synthetic oligonucleotide
  Sense strand starting at position 3597 of SEQ ID NO: 318622
cgcugauacccagaagaca

SEQ ID NO: 576616 - RNA, 19 nt, Artificial Sequence
  Description of Artificial Sequence: Synthetic oligonucleotide
  Antisense strand to SEQ ID NO: 576615
ugucuucuggguaucagcg

SEQ ID NO: 576617 - RNA, 19 nt, Artificial Sequence
  Description of Artificial Sequence: Synthetic oligonucleotide
  Sense strand starting at position 3618 of SEQ ID NO: 318622
ccaguauuaugggugcagu

SEQ ID NO: 576618 - RNA, 19 nt, Artificial Sequence
  Description of Artificial Sequence: Synthetic oligonucleotide
  Antisense strand to SEQ ID NO: 576617
acugcacccauaauacugg

SEQ ID NO: 576619 - RNA, 19 nt, Artificial Sequence
  Description of Artificial Sequence: Synthetic oligonucleotide
  Sense strand starting at position 3619 of SEQ ID NO: 318622
caguauuaugggugcaguu

SEQ ID NO: 576620 - RNA, 19 nt, Artificial Sequence
  Description of Artificial Sequence: Synthetic oligonucleotide
  Antisense strand to SEQ ID NO: 576619
aacugcacccauaauacug

SEQ ID NO: 576621 - RNA, 19 nt, Artificial Sequence
  Description of Artificial Sequence: Synthetic oligonucleotide
  Sense strand starting at position 3621 of SEQ ID NO: 318622
guauuaugggugcaguuag

SEQ ID NO: 576622 - RNA, 19 nt, Artificial Sequence
  Description of Artificial Sequence: Synthetic oligonucleotide
  Antisense strand to SEQ ID NO: 576621
cuaacugcacccauaauac

SEQ ID NO: 576623 - RNA, 19 nt, Artificial Sequence
  Description of Artificial Sequence: Synthetic oligonucleotide
  Sense strand starting at position 3633 of SEQ ID NO: 318622
caguuagugugucuuugaa

SEQ ID NO: 576624 - RNA, 19 nt, Artificial Sequence
  Description of Artificial Sequence: Synthetic oligonucleotide
  Antisense strand to SEQ ID NO: 576623
uucaaagacacacuaacug

SEQ ID NO: 576625 - RNA, 19 nt, Artificial Sequence
  Description of Artificial Sequence: Synthetic oligonucleotide
  Sense strand starting at position 3657 of SEQ ID NO: 318622
gaugaugucuuagucauca

SEQ ID NO: 576626 - RNA, 19 nt, Artificial Sequence
  Description of Artificial Sequence: Synthetic oligonucleotide
  Antisense strand to SEQ ID NO: 576625
ugaugacuaagacaucauc

SEQ ID NO: 576627 - RNA, 19 nt, Artificial Sequence
  Description of Artificial Sequence: Synthetic oligonucleotide
  Sense strand starting at position 3661 of SEQ ID NO: 318622
augucuuagucaucacagu

SEQ ID NO: 576628 - RNA, 19 nt, Artificial Sequence
  Description of Artificial Sequence: Synthetic oligonucleotide
  Antisense strand to SEQ ID NO: 576627
acugugaugacuaagacau

SEQ ID NO: 576629 - RNA, 19 nt, Artificial Sequence
  Description of Artificial Sequence: Synthetic oligonucleotide
  Sense strand starting at position 3688 of SEQ ID NO: 318622
ucaagaguguucuaacaac

SEQ ID NO: 576630 - RNA, 19 nt, Artificial Sequence
  Description of Artificial Sequence: Synthetic oligonucleotide
  Antisense strand to SEQ ID NO: 576629
guuguuagaacacucuuga

SEQ ID NO: 576631 - RNA, 19 nt, Artificial Sequence
  Description of Artificial Sequence: Synthetic oligonucleotide
  Sense strand starting at position 3767 of SEQ ID NO: 318622
accucagacccagauguuu

SEQ ID NO: 576632 - RNA, 19 nt, Artificial Sequence
  Description of Artificial Sequence: Synthetic oligonucleotide
  Antisense strand to SEQ ID NO: 576631
aaacaucugggucugaggu

SEQ ID NO: 576633 - RNA, 19 nt, Artificial Sequence
  Description of Artificial Sequence: Synthetic oligonucleotide
  Sense strand starting at position 3772 of SEQ ID NO: 318622
agacccagauguuucuaaa

SEQ ID NO: 576634 - RNA, 19 nt, Artificial Sequence
  Description of Artificial Sequence: Synthetic oligonucleotide
  Antisense strand to SEQ ID NO: 576633
uuuagaaacaucugggucu

SEQ ID NO: 576635 - RNA, 19 nt, Artificial Sequence
  Description of Artificial Sequence: Synthetic oligonucleotide
  Sense strand starting at position 3775 of SEQ ID NO: 318622
cccagauguuucuaaacag

SEQ ID NO: 576636 - RNA, 19 nt, Artificial Sequence
  Description of Artificial Sequence: Synthetic oligonucleotide
  Antisense strand to SEQ ID NO: 576635
cuguuuagaaacaucuggg

SEQ ID NO: 576637 - RNA, 19 nt, Artificial Sequence
  Description of Artificial Sequence: Synthetic oligonucleotide
  Sense strand starting at position 258 of SEQ ID NO: 318623
aucaauugagcucagcaga

SEQ ID NO: 576638 - RNA, 19 nt, Artificial Sequence
  Description of Artificial Sequence: Synthetic oligonucleotide
  Antisense strand to SEQ ID NO: 576637
ucugcugagcucaauugau

SEQ ID NO: 576639 - RNA, 19 nt, Artificial Sequence
  Description of Artificial Sequence: Synthetic oligonucleotide
  Sense strand starting at position 261 of SEQ ID NO: 318623
aauugagcucagcagauga

SEQ ID NO: 576640 - RNA, 19 nt, Artificial Sequence
  Description of Artificial Sequence: Synthetic oligonucleotide
  Antisense strand to SEQ ID NO: 576639
ucaucugcugagcucaauu

SEQ ID NO: 576641 - RNA, 19 nt, Artificial Sequence
  Description of Artificial Sequence: Synthetic oligonucleotide
  Sense strand starting at position 389 of SEQ ID NO: 318623
aggagcauugaauggguaa

SEQ ID NO: 576642 - RNA, 19 nt, Artificial Sequence
  Description of Artificial Sequence: Synthetic oligonucleotide
  Antisense strand to SEQ ID NO: 576641
uuacccauucaaugcuccu

SEQ ID NO: 576643 - RNA, 19 nt, Artificial Sequence
  Description of Artificial Sequence: Synthetic oligonucleotide
  Sense strand starting at position 390 of SEQ ID NO: 318623
ggagcauugaauggguaaa

SEQ ID NO: 576644 - RNA, 19 nt, Artificial Sequence
  Description of Artificial Sequence: Synthetic oligonucleotide
  Antisense strand to SEQ ID NO: 576643
uuuacccauucaaugcucc

SEQ ID NO: 576645 - RNA, 19 nt, Artificial Sequence
  Description of Artificial Sequence: Synthetic oligonucleotide
  Sense strand starting at position 402 of SEQ ID NO: 318623
ggguaaaucauguguaaac

SEQ ID NO: 576646 - RNA, 19 nt, Artificial Sequence
  Description of Artificial Sequence: Synthetic oligonucleotide
  Antisense strand to SEQ ID NO: 576645
guuuacacaugauuuaccc

SEQ ID NO: 576647 - RNA, 19 nt, Artificial Sequence
  Description of Artificial Sequence: Synthetic oligonucleotide
  Sense strand starting at position 403 of SEQ ID NO: 318623
gguaaaucauguguaaacu

SEQ ID NO: 576648 - RNA, 19 nt, Artificial Sequence
  Description of Artificial Sequence: Synthetic oligonucleotide
  Antisense strand to SEQ ID NO: 576647
aguuuacacaugauuuacc

SEQ ID NO: 576649 - RNA, 19 nt, Artificial Sequence
  Description of Artificial Sequence: Synthetic oligonucleotide
  Sense strand starting at position 404 of SEQ ID NO: 318623
guaaaucauguguaaacua

SEQ ID NO: 576650 - RNA, 19 nt, Artificial Sequence
  Description of Artificial Sequence: Synthetic oligonucleotide
  Antisense strand to SEQ ID NO: 576649
uaguuuacacaugauuuac

SEQ ID NO: 576651 - RNA, 19 nt, Artificial Sequence
  Description of Artificial Sequence: Synthetic oligonucleotide
  Sense strand starting at position 449 of SEQ ID NO: 318623
cugaauaugcaguauaauc

SEQ ID NO: 576652 - RNA, 19 nt, Artificial Sequence
  Description of Artificial Sequence: Synthetic oligonucleotide
  Antisense strand to SEQ ID NO: 576651
gauuauacugcauauucag

SEQ ID NO: 576653 - RNA, 19 nt, Artificial Sequence
  Description of Artificial Sequence: Synthetic oligonucleotide
  Sense strand starting at position 472 of SEQ ID NO: 318623
aaauauaugcuuuguagug

SEQ ID NO: 576654 - RNA, 19 nt, Artificial Sequence
  Description of Artificial Sequence: Synthetic oligonucleotide
  Antisense strand to SEQ ID NO: 576653
cacuacaaagcauauauuu

SEQ ID NO: 576655 - RNA, 19 nt, Artificial Sequence
  Description of Artificial Sequence: Synthetic oligonucleotide
  Sense strand starting at position 482 of SEQ ID NO: 318623
uuuguaguguaccuuuaau

SEQ ID NO: 576656 - RNA, 19 nt, Artificial Sequence
  Description of Artificial Sequence: Synthetic oligonucleotide
  Antisense strand to SEQ ID NO: 576655
auuaaagguacacuacaaa

SEQ ID NO: 576657 - RNA, 19 nt, Artificial Sequence
  Description of Artificial Sequence: Synthetic oligonucleotide
  Sense strand starting at position 508 of SEQ ID NO: 318623
gcaucuucugaugaugagu

SEQ ID NO: 576658 - RNA, 19 nt, Artificial Sequence
  Description of Artificial Sequence: Synthetic oligonucleotide
  Antisense strand to SEQ ID NO: 576657
acucaucaucagaagaugc

SEQ ID NO: 576659 - RNA, 19 nt, Artificial Sequence
  Description of Artificial Sequence: Synthetic oligonucleotide
  Sense strand starting at position 511 of SEQ ID NO: 318623
ucuucugaugaugaguuua

SEQ ID NO: 576660 - RNA, 19 nt, Artificial Sequence
  Description of Artificial Sequence: Synthetic oligonucleotide
  Antisense strand to SEQ ID NO: 576659
uaaacucaucaucagaaga

SEQ ID NO: 576661 - RNA, 19 nt, Artificial Sequence
  Description of Artificial Sequence: Synthetic oligonucleotide
  Sense strand starting at position 513 of SEQ ID NO: 318623
uucugaugaugaguuuaac

SEQ ID NO: 576662 - RNA, 19 nt, Artificial Sequence
  Description of Artificial Sequence: Synthetic oligonucleotide
  Antisense strand to SEQ ID NO: 576661
guuaaacucaucaucagaa

SEQ ID NO: 576663 - RNA, 19 nt, Artificial Sequence
  Description of Artificial Sequence: Synthetic oligonucleotide
  Sense strand starting at position 525 of SEQ ID NO: 318623
guuuaacaacugcaagaua

SEQ ID NO: 576664 - RNA, 19 nt, Artificial Sequence
  Description of Artificial Sequence: Synthetic oligonucleotide
  Antisense strand to SEQ ID NO: 576663
uaucuugcaguuguuaaac

SEQ ID NO: 576665 - RNA, 19 nt, Artificial Sequence
  Description of Artificial Sequence: Synthetic oligonucleotide
  Sense strand starting at position 536 of SEQ ID NO: 318623
gcaagauagcaugauguag

SEQ ID NO: 576666 - RNA, 19 nt, Artificial Sequence
  Description of Artificial Sequence: Synthetic oligonucleotide
  Antisense strand to SEQ ID NO: 576665
cuacaucaugcuaucuugc

SEQ ID NO: 576667 - RNA, 19 nt, Artificial Sequence
  Description of Artificial Sequence: Synthetic oligonucleotide
  Sense strand starting at position 540 of SEQ ID NO: 318623
gauagcaugauguagaguu

SEQ ID NO: 576668 - RNA, 19 nt, Artificial Sequence
  Description of Artificial Sequence: Synthetic oligonucleotide
  Antisense strand to SEQ ID NO: 576667
aacucuacaucaugcuauc

SEQ ID NO: 576669 - RNA, 19 nt, Artificial Sequence
  Description of Artificial Sequence: Synthetic oligonucleotide
  Sense strand starting at position 548 of SEQ ID NO: 318623
gauguagaguuucugaaau

SEQ ID NO: 576670 - RNA, 19 nt, Artificial Sequence
  Description of Artificial Sequence: Synthetic oligonucleotide
  Antisense strand to SEQ ID NO: 576669
auuucagaaacucuacauc

SEQ ID NO: 576671 - RNA, 19 nt, Artificial Sequence
  Description of Artificial Sequence: Synthetic oligonucleotide
  Sense strand starting at position 558 of SEQ ID NO: 318623
uucugaaauucuucgguau

SEQ ID NO: 576672 - RNA, 19 nt, Artificial Sequence
  Description of Artificial Sequence: Synthetic oligonucleotide
  Antisense strand to SEQ ID NO: 576671
auaccgaagaauuucagaa

SEQ ID NO: 576673 - RNA, 19 nt, Artificial Sequence
  Description of Artificial Sequence: Synthetic oligonucleotide
  Sense strand starting at position 559 of SEQ ID NO: 318623
ucugaaauucuucgguaua

SEQ ID NO: 576674 - RNA, 19 nt, Artificial Sequence
  Description of Artificial Sequence: Synthetic oligonucleotide
  Antisense strand to SEQ ID NO: 576673
uauaccgaagaauuucaga

SEQ ID NO: 576675 - RNA, 19 nt, Artificial Sequence
  Description of Artificial Sequence: Synthetic oligonucleotide
  Sense strand starting at position 561 of SEQ ID NO: 318623
ugaaauucuucgguauaua

SEQ ID NO: 576676 - RNA, 19 nt, Artificial Sequence
  Description of Artificial Sequence: Synthetic oligonucleotide
  Antisense strand to SEQ ID NO: 576675
uauauaccgaagaauuuca

SEQ ID NO: 576677 - RNA, 19 nt, Artificial Sequence
  Description of Artificial Sequence: Synthetic oligonucleotide
  Sense strand starting at position 562 of SEQ ID NO: 318623
gaaauucuucgguauauaa

SEQ ID NO: 576678 - RNA, 19 nt, Artificial Sequence
  Description of Artificial Sequence: Synthetic oligonucleotide
  Antisense strand to SEQ ID NO: 576677
uuauauaccgaagaauuuc

SEQ ID NO: 576679 - RNA, 19 nt, Artificial Sequence
  Description of Artificial Sequence: Synthetic oligonucleotide
  Sense strand starting at position 570 of SEQ ID NO: 318623
ucgguauauaauuagguua

SEQ ID NO: 576680 - RNA, 19 nt, Artificial Sequence
  Description of Artificial Sequence: Synthetic oligonucleotide
  Antisense strand to SEQ ID NO: 576679
uaaccuaauuauauaccga

SEQ ID NO: 576681 - RNA, 19 nt, Artificial Sequence
  Description of Artificial Sequence: Synthetic oligonucleotide
  Sense strand starting at position 659 of SEQ ID NO: 318623
guuacacacgucuaucaca

SEQ ID NO: 576682 - RNA, 19 nt, Artificial Sequence
  Description of Artificial Sequence: Synthetic oligonucleotide
  Antisense strand to SEQ ID NO: 576681
ugugauagacguguguaac

SEQ ID NO: 576683 - RNA, 19 nt, Artificial Sequence
  Description of Artificial Sequence: Synthetic oligonucleotide
  Sense strand starting at position 984 of SEQ ID NO: 318623
cuaggauuauuggcacaag

SEQ ID NO: 576684 - RNA, 19 nt, Artificial Sequence
  Description of Artificial Sequence: Synthetic oligonucleotide
  Antisense strand to SEQ ID NO: 576683
cuugugccaauaauccuag

SEQ ID NO: 576685 - RNA, 19 nt, Artificial Sequence
  Description of Artificial Sequence: Synthetic oligonucleotide
  Sense strand starting at position 987 of SEQ ID NO: 318623
ggauuauuggcacaaguca

SEQ ID NO: 576686 - RNA, 19 nt, Artificial Sequence
  Description of Artificial Sequence: Synthetic oligonucleotide
  Antisense strand to SEQ ID NO: 576685
ugacuugugccaauaaucc

SEQ ID NO: 576687 - RNA, 19 nt, Artificial Sequence
  Description of Artificial Sequence: Synthetic oligonucleotide
  Sense strand starting at position 1200 of SEQ ID NO: 318623
gacaucuugugagccaaau

SEQ ID NO: 576688 - RNA, 19 nt, Artificial Sequence
  Description of Artificial Sequence: Synthetic oligonucleotide
  Antisense strand to SEQ ID NO: 576687
auuuggcucacaagauguc

SEQ ID NO: 576689 - RNA, 19 nt, Artificial Sequence
  Description of Artificial Sequence: Synthetic oligonucleotide
  Sense strand starting at position 1251 of SEQ ID NO: 318623
ggcaguugugcauucaugu

SEQ ID NO: 576690 - RNA, 19 nt, Artificial Sequence
  Description of Artificial Sequence: Synthetic oligonucleotide
  Antisense strand to SEQ ID NO: 576689
acaugaaugcacaacugcc

SEQ ID NO: 576691 - RNA, 19 nt, Artificial Sequence
  Description of Artificial Sequence: Synthetic oligonucleotide
  Sense strand starting at position 1339 of SEQ ID NO: 318623
acccauguaucagcaagau

SEQ ID NO: 576692 - RNA, 19 nt, Artificial Sequence
  Description of Artificial Sequence: Synthetic oligonucleotide
  Antisense strand to SEQ ID NO: 576691
aucuugcugauacaugggu

SEQ ID NO: 576693 - RNA, 19 nt, Artificial Sequence
  Description of Artificial Sequence: Synthetic oligonucleotide
  Sense strand starting at position 1365 of SEQ ID NO: 318623
gggccagguaucuguaauu

SEQ ID NO: 576694 - RNA, 19 nt, Artificial Sequence
  Description of Artificial Sequence: Synthetic oligonucleotide
  Antisense strand to SEQ ID NO: 576693
aauuacagauaccuggccc

SEQ ID NO: 576695 - RNA, 19 nt, Artificial Sequence
  Description of Artificial Sequence: Synthetic oligonucleotide
  Sense strand starting at position 1370 of SEQ ID NO: 318623
agguaucuguaauucuaac

SEQ ID NO: 576696 - RNA, 19 nt, Artificial Sequence
  Description of Artificial Sequence: Synthetic oligonucleotide
  Antisense strand to SEQ ID NO: 576695
guuagaauuacagauaccu

SEQ ID NO: 576697 - RNA, 19 nt, Artificial Sequence
  Description of Artificial Sequence: Synthetic oligonucleotide
  Sense strand starting at position 1376 of SEQ ID NO: 318623
cuguaauucuaacugcaug

SEQ ID NO: 576698 - RNA, 19 nt, Artificial Sequence
  Description of Artificial Sequence: Synthetic oligonucleotide
  Antisense strand to SEQ ID NO: 576697
caugcaguuagaauuacag

SEQ ID NO: 576699 - RNA, 19 nt, Artificial Sequence
  Description of Artificial Sequence: Synthetic oligonucleotide
  Sense strand starting at position 1470 of SEQ ID NO: 318623
gauggagugcauuaucaug

SEQ ID NO: 576700 - RNA, 19 nt, Artificial Sequence
  Description of Artificial Sequence: Synthetic oligonucleotide
  Antisense strand to SEQ ID NO: 576699
caugauaaugcacuccauc

SEQ ID NO: 576701 - RNA, 19 nt, Artificial Sequence
  Description of Artificial Sequence: Synthetic oligonucleotide
  Sense strand starting at position 1676 of SEQ ID NO: 318623
ggaaaugucuggccagcca

SEQ ID NO: 576702 - RNA, 19 nt, Artificial Sequence
  Description of Artificial Sequence: Synthetic oligonucleotide
  Antisense strand to SEQ ID NO: 576701
uggcuggccagacauuucc

SEQ ID NO: 576703 - RNA, 19 nt, Artificial Sequence
  Description of Artificial Sequence: Synthetic oligonucleotide
  Sense strand starting at position 1726 of SEQ ID NO: 318623
uuauguaugcucuacacuc

SEQ ID NO: 576704 - RNA, 19 nt, Artificial Sequence
  Description of Artificial Sequence: Synthetic oligonucleotide
  Antisense strand to SEQ ID NO: 576703
gaguguagagcauacauaa

SEQ ID NO: 576705 - RNA, 19 nt, Artificial Sequence
  Description of Artificial Sequence: Synthetic oligonucleotide
  Sense strand starting at position 1822 of SEQ ID NO: 318623
caaaguuauugaccguauc

SEQ ID NO: 576706 - RNA, 19 nt, Artificial Sequence
  Description of Artificial Sequence: Synthetic oligonucleotide
  Antisense strand to SEQ ID NO: 576705
gauacggucaauaacuuug

SEQ ID NO: 576707 - RNA, 19 nt, Artificial Sequence
  Description of Artificial Sequence: Synthetic oligonucleotide
  Sense strand starting at position 1823 of SEQ ID NO: 318623
aaaguuauugaccguaucu

SEQ ID NO: 576708 - RNA, 19 nt, Artificial Sequence
  Description of Artificial Sequence: Synthetic oligonucleotide
  Antisense strand to SEQ ID NO: 576707
agauacggucaauaacuuu

SEQ ID NO: 576709 - RNA, 19 nt, Artificial Sequence
  Description of Artificial Sequence: Synthetic oligonucleotide
  Sense strand starting at position 1825 of SEQ ID NO: 318623
aguuauugaccguaucuuu

SEQ ID NO: 576710 - RNA, 19 nt, Artificial Sequence
  Description of Artificial Sequence: Synthetic oligonucleotide
  Antisense strand to SEQ ID NO: 576709
aaagauacggucaauaacu

SEQ ID NO: 576711 - RNA, 19 nt, Artificial Sequence
  Description of Artificial Sequence: Synthetic oligonucleotide
  Sense strand starting at position 3029 of SEQ ID NO: 318623
aaugaagauguuugugaca

SEQ ID NO: 576712 - RNA, 19 nt, Artificial Sequence
  Description of Artificial Sequence: Synthetic oligonucleotide
  Antisense strand to SEQ ID NO: 576711
ugucacaaacaucuucauu

SEQ ID NO: 576713 - RNA, 19 nt, Artificial Sequence
  Description of Artificial Sequence: Synthetic oligonucleotide
  Sense strand starting at position 3073 of SEQ ID NO: 318623
cguugaacugaacaauuau

SEQ ID NO: 576714 - RNA, 19 nt, Artificial Sequence
  Description of Artificial Sequence: Synthetic oligonucleotide
  Antisense strand to SEQ ID NO: 576713
auaauuguucaguucaacg

SEQ ID NO: 576715 - RNA, 19 nt, Artificial Sequence
  Description of Artificial Sequence: Synthetic oligonucleotide
  Sense strand starting at position 3275 of SEQ ID NO: 318623
gaagaagaaugagacuaga

SEQ ID NO: 576716 - RNA, 19 nt, Artificial Sequence
  Description of Artificial Sequence: Synthetic oligonucleotide
  Antisense strand to SEQ ID NO: 576715
ucuagucucauucuucuuc

SEQ ID NO: 576717 - RNA, 19 nt, Artificial Sequence
  Description of Artificial Sequence: Synthetic oligonucleotide
  Sense strand starting at position 35 of SEQ ID NO: 318624
gagagaugcccuuacaggu

SEQ ID NO: 576718 - RNA, 19 nt, Artificial Sequence
  Description of Artificial Sequence: Synthetic oligonucleotide
  Antisense strand to SEQ ID NO: 576717
accuguaagggcaucucuc

SEQ ID NO: 576719 - RNA, 19 nt, Artificial Sequence
  Description of Artificial Sequence: Synthetic oligonucleotide
  Sense strand starting at position 64 of SEQ ID NO: 318624
cagggcaugcuauaaggau

SEQ ID NO: 576720 - RNA, 19 nt, Artificial Sequence
  Description of Artificial Sequence: Synthetic oligonucleotide
  Antisense strand to SEQ ID NO: 576719
auccuuauagcaugcccug

SEQ ID NO: 576721 - RNA, 19 nt, Artificial Sequence
  Description of Artificial Sequence: Synthetic oligonucleotide
  Sense strand starting at position 90 of SEQ ID NO: 318624
ugacuuaguggcgaagaua

SEQ ID NO: 576722 - RNA, 19 nt, Artificial Sequence
  Description of Artificial Sequence: Synthetic oligonucleotide
  Antisense strand to SEQ ID NO: 576721
uaucuucgccacuaaguca

SEQ ID NO: 576723 - RNA, 19 nt, Artificial Sequence
  Description of Artificial Sequence: Synthetic oligonucleotide
  Sense strand starting at position 801 of SEQ ID NO: 318624
cagcaaagccuggguauuu

SEQ ID NO: 576724 - RNA, 19 nt, Artificial Sequence
  Description of Artificial Sequence: Synthetic oligonucleotide
  Antisense strand to SEQ ID NO: 576723
aaauacccaggcuuugcug

SEQ ID NO: 576725 - RNA, 19 nt, Artificial Sequence
  Description of Artificial Sequence: Synthetic oligonucleotide
  Sense strand starting at position 814 of SEQ ID NO: 318624
guauuugugacgcagguau

SEQ ID NO: 576726 - RNA, 19 nt, Artificial Sequence
  Description of Artificial Sequence: Synthetic oligonucleotide
  Antisense strand to SEQ ID NO: 576725
auaccugcgucacaaauac

SEQ ID NO: 576727 - RNA, 19 nt, Artificial Sequence
  Description of Artificial Sequence: Synthetic oligonucleotide
  Sense strand starting at position 956 of SEQ ID NO: 318624
gaauuccugcaaugauagu

SEQ ID NO: 576728 - RNA, 19 nt, Artificial Sequence
  Description of Artificial Sequence: Synthetic oligonucleotide
  Antisense strand to SEQ ID NO: 576727
acuaucauugcaggaauuc

SEQ ID NO: 576729 - RNA, 19 nt, Artificial Sequence
  Description of Artificial Sequence: Synthetic oligonucleotide
  Sense strand starting at position 1356 of SEQ ID NO: 318624
cggugauuauggccaaaga

SEQ ID NO: 576730 - RNA, 19 nt, Artificial Sequence
  Description of Artificial Sequence: Synthetic oligonucleotide
  Antisense strand to SEQ ID NO: 576729
ucuuuggccauaaucaccg

SEQ ID NO: 576731 - RNA, 19 nt, Artificial Sequence
  Description of Artificial Sequence: Synthetic oligonucleotide
  Sense strand starting at position 2144 of SEQ ID NO: 318624
uccucaaaccaaggguaua

SEQ ID NO: 576732 - RNA, 19 nt, Artificial Sequence
  Description of Artificial Sequence: Synthetic oligonucleotide
  Antisense strand to SEQ ID NO: 576731
uauacccuugguuugagga

SEQ ID NO: 576733 - RNA, 19 nt, Artificial Sequence
  Description of Artificial Sequence: Synthetic oligonucleotide
  Sense strand starting at position 2256 of SEQ ID NO: 318624
cgaagauucccucacugau

SEQ ID NO: 576734 - RNA, 19 nt, Artificial Sequence
  Description of Artificial Sequence: Synthetic oligonucleotide
  Antisense strand to SEQ ID NO: 576733
aucagugagggaaucuucg

SEQ ID NO: 576735 - RNA, 19 nt, Artificial Sequence
  Description of Artificial Sequence: Synthetic oligonucleotide
  Sense strand starting at position 2266 of SEQ ID NO: 318624
cucacugaucuugaggcua

SEQ ID NO: 576736 - RNA, 19 nt, Artificial Sequence
  Description of Artificial Sequence: Synthetic oligonucleotide
  Antisense strand to SEQ ID NO: 576735
uagccucaagaucagugag

SEQ ID NO: 576737 - RNA, 19 nt, Artificial Sequence
  Description of Artificial Sequence: Synthetic oligonucleotide
  Sense strand starting at position 2421 of SEQ ID NO: 318624
accugucaugcucauugaa

SEQ ID NO: 576738 - RNA, 19 nt, Artificial Sequence
  Description of Artificial Sequence: Synthetic oligonucleotide
  Antisense strand to SEQ ID NO: 576737
uucaaugagcaugacaggu

SEQ ID NO: 576739 - RNA, 19 nt, Artificial Sequence
  Description of Artificial Sequence: Synthetic oligonucleotide
  Sense strand starting at position 2424 of SEQ ID NO: 318624
ugucaugcucauugaaaga

SEQ ID NO: 576740 - RNA, 19 nt, Artificial Sequence
  Description of Artificial Sequence: Synthetic oligonucleotide
  Antisense strand to SEQ ID NO: 576739
ucuuucaaugagcaugaca

SEQ ID NO: 576741 - RNA, 19 nt, Artificial Sequence
  Description of Artificial Sequence: Synthetic oligonucleotide
  Sense strand starting at position 2444 of SEQ ID NO: 318624
agaugaguaaaucguguga

SEQ ID NO: 576742 - RNA, 19 nt, Artificial Sequence
  Description of Artificial Sequence: Synthetic oligonucleotide
  Antisense strand to SEQ ID NO: 576741
ucacacgauuuacucaucu

SEQ ID NO: 576743 - RNA, 19 nt, Artificial Sequence
  Description of Artificial Sequence: Synthetic oligonucleotide
  Sense strand starting at position 2455 of SEQ ID NO: 318624
ucgugugauccacagaaac

SEQ ID NO: 576744 - RNA, 19 nt, Artificial Sequence
  Description of Artificial Sequence: Synthetic oligonucleotide
  Antisense strand to SEQ ID NO: 576743
guuucuguggaucacacga

SEQ ID NO: 576745 - RNA, 19 nt, Artificial Sequence
  Description of Artificial Sequence: Synthetic oligonucleotide
  Sense strand starting at position 2591 of SEQ ID NO: 318624
caguaccugccagauagau

SEQ ID NO: 576746 - RNA, 19 nt, Artificial Sequence
  Description of Artificial Sequence: Synthetic oligonucleotide
  Antisense strand to SEQ ID NO: 576745
aucuaucuggcagguacug

SEQ ID NO: 576747 - RNA, 19 nt, Artificial Sequence
  Description of Artificial Sequence: Synthetic oligonucleotide
  Sense strand starting at position 2601 of SEQ ID NO: 318624
cagauagauucugcaaagg

SEQ ID NO: 576748 - RNA, 19 nt, Artificial Sequence
  Description of Artificial Sequence: Synthetic oligonucleotide
  Antisense strand to SEQ ID NO: 576747
ccuuugcagaaucuaucug

SEQ ID NO: 576749 - RNA, 19 nt, Artificial Sequence
  Description of Artificial Sequence: Synthetic oligonucleotide
  Sense strand starting at position 2668 of SEQ ID NO: 318624
augguaaagaggugauacu

SEQ ID NO: 576750 - RNA, 19 nt, Artificial Sequence
  Description of Artificial Sequence: Synthetic oligonucleotide
  Antisense strand to SEQ ID NO: 576749
aguaucaccucuuuaccau

SEQ ID NO: 576751 - RNA, 19 nt, Artificial Sequence
  Description of Artificial Sequence: Synthetic oligonucleotide
  Sense strand starting at position 2678 of SEQ ID NO: 318624
ggugauacuuacccaagca

SEQ ID NO: 576752 - RNA, 19 nt, Artificial Sequence
  Description of Artificial Sequence: Synthetic oligonucleotide
  Antisense strand to SEQ ID NO: 576751
ugcuuggguaaguaucacc

SEQ ID NO: 576753 - RNA, 19 nt, Artificial Sequence
  Description of Artificial Sequence: Synthetic oligonucleotide
  Sense strand starting at position 2771 of SEQ ID NO: 318624
accuaagcccuuugugaaa

SEQ ID NO: 576754 - RNA, 19 nt, Artificial Sequence
  Description of Artificial Sequence: Synthetic oligonucleotide
  Antisense strand to SEQ ID NO: 576753
uuucacaaagggcuuaggu

SEQ ID NO: 576755 - RNA, 19 nt, Artificial Sequence
  Description of Artificial Sequence: Synthetic oligonucleotide
  Sense strand starting at position 2792 of SEQ ID NO: 318624
gcuccaauuugggaagauc

SEQ ID NO: 576756 - RNA, 19 nt, Artificial Sequence
  Description of Artificial Sequence: Synthetic oligonucleotide
  Antisense strand to SEQ ID NO: 576755
gaucuucccaaauuggagc

SEQ ID NO: 576757 - RNA, 19 nt, Artificial Sequence
  Description of Artificial Sequence: Synthetic oligonucleotide
  Sense strand starting at position 2820 of SEQ ID NO: 318624
agccaaugauguuccauga

SEQ ID NO: 576758 - RNA, 19 nt, Artificial Sequence
  Description of Artificial Sequence: Synthetic oligonucleotide
  Antisense strand to SEQ ID NO: 576757
ucauggaacaucauuggcu

SEQ ID NO: 576759 - RNA, 19 nt, Artificial Sequence
  Description of Artificial Sequence: Synthetic oligonucleotide
  Sense strand starting at position 2897 of SEQ ID NO: 318624
ugcucugaggccugaaaga

SEQ ID NO: 576760 - RNA, 19 nt, Artificial Sequence
  Description of Artificial Sequence: Synthetic oligonucleotide
  Antisense strand to SEQ ID NO: 576759
ucuuucaggccucagagca

SEQ ID NO: 576761 - RNA, 19 nt, Artificial Sequence
  Description of Artificial Sequence: Synthetic oligonucleotide
  Sense strand starting at position 2933 of SEQ ID NO: 318624
gguaaacugaggcaugcau

SEQ ID NO: 576762 - RNA, 19 nt, Artificial Sequence
  Description of Artificial Sequence: Synthetic oligonucleotide
  Antisense strand to SEQ ID NO: 576761
augcaugccucaguuuacc

SEQ ID NO: 576763 - RNA, 19 nt, Artificial Sequence
  Description of Artificial Sequence: Synthetic oligonucleotide
  Sense strand starting at position 3090 of SEQ ID NO: 318624
agugucaugagaggcuuaa

SEQ ID NO: 576764 - RNA, 19 nt, Artificial Sequence
  Description of Artificial Sequence: Synthetic oligonucleotide
  Antisense strand to SEQ ID NO: 576763
uuaagccucucaugacacu

SEQ ID NO: 576765 - RNA, 19 nt, Artificial Sequence
  Description of Artificial Sequence: Synthetic oligonucleotide
  Sense strand starting at position 3203 of SEQ ID NO: 318624
ggguguaggagguaauagu

SEQ ID NO: 576766 - RNA, 19 nt, Artificial Sequence
  Description of Artificial Sequence: Synthetic oligonucleotide
  Antisense strand to SEQ ID NO: 576765
acuauuaccuccuacaccc

SEQ ID NO: 576767 - RNA, 19 nt, Artificial Sequence
  Description of Artificial Sequence: Synthetic oligonucleotide
  Sense strand starting at position 3354 of SEQ ID NO: 318624
aggcuugccagguagauga

SEQ ID NO: 576768 - RNA, 19 nt, Artificial Sequence
  Description of Artificial Sequence: Synthetic oligonucleotide
  Antisense strand to SEQ ID NO: 576767
ucaucuaccuggcaagccu

SEQ ID NO: 576769 - RNA, 19 nt, Artificial Sequence
  Description of Artificial Sequence: Synthetic oligonucleotide
  Sense strand starting at position 3365 of SEQ ID NO: 318624
guagaugagugguuuggga

SEQ ID NO: 576770 - RNA, 19 nt, Artificial Sequence
  Description of Artificial Sequence: Synthetic oligonucleotide
  Antisense strand to SEQ ID NO: 576769
ucccaaaccacucaucuac

SEQ ID NO: 576771 - RNA, 19 nt, Artificial Sequence
  Description of Artificial Sequence: Synthetic oligonucleotide
  Sense strand starting at position 3367 of SEQ ID NO: 318624
agaugagugguuugggaca

SEQ ID NO: 576772 - RNA, 19 nt, Artificial Sequence
  Description of Artificial Sequence: Synthetic oligonucleotide
  Antisense strand to SEQ ID NO: 576771
ugucccaaaccacucaucu

SEQ ID NO: 576773 - RNA, 19 nt, Artificial Sequence
  Description of Artificial Sequence: Synthetic oligonucleotide
  Sense strand starting at position 3405 of SEQ ID NO: 318624
augacucauccuggugaag

SEQ ID NO: 576774 - RNA, 19 nt, Artificial Sequence
  Description of Artificial Sequence: Synthetic oligonucleotide
  Antisense strand to SEQ ID NO: 576773
cuucaccaggaugagucau

SEQ ID NO: 576775 - RNA, 19 nt, Artificial Sequence
  Description of Artificial Sequence: Synthetic oligonucleotide
  Sense strand starting at position 3498 of SEQ ID NO: 318624
ggagucauccuccagugac

SEQ ID NO: 576776 - RNA, 19 nt, Artificial Sequence
  Description of Artificial Sequence: Synthetic oligonucleotide
  Antisense strand to SEQ ID NO: 576775
gucacuggaggaugacucc

SEQ ID NO: 576777 - RNA, 19 nt, Artificial Sequence
  Description of Artificial Sequence: Synthetic oligonucleotide
  Sense strand starting at position 3501 of SEQ ID NO: 318624
gucauccuccagugacaga

SEQ ID NO: 576778 - RNA, 19 nt, Artificial Sequence
  Description of Artificial Sequence: Synthetic oligonucleotide
  Antisense strand to SEQ ID NO: 576777
ucugucacuggaggaugac

SEQ ID NO: 576779 - RNA, 19 nt, Artificial Sequence
  Description of Artificial Sequence: Synthetic oligonucleotide
  Sense strand starting at position 3611 of SEQ ID NO: 318624
gacagaucugaauggcuuu

SEQ ID NO: 576780 - RNA, 19 nt, Artificial Sequence
  Description of Artificial Sequence: Synthetic oligonucleotide
  Antisense strand to SEQ ID NO: 576779
aaagccauucagaucuguc

SEQ ID NO: 576781 - RNA, 19 nt, Artificial Sequence
  Description of Artificial Sequence: Synthetic oligonucleotide
  Sense strand starting at position 3698 of SEQ ID NO: 318624
uggugguuugauggagaga

SEQ ID NO: 576782 - RNA, 19 nt, Artificial Sequence
  Description of Artificial Sequence: Synthetic oligonucleotide
  Antisense strand to SEQ ID NO: 576781
ucucuccaucaaaccacca

SEQ ID NO: 576783 - RNA, 19 nt, Artificial Sequence
  Description of Artificial Sequence: Synthetic oligonucleotide
  Sense strand starting at position 3714 of SEQ ID NO: 318624
agaugaguagcauguagaa

SEQ ID NO: 576784 - RNA, 19 nt, Artificial Sequence
  Description of Artificial Sequence: Synthetic oligonucleotide
  Antisense strand to SEQ ID NO: 576783
uucuacaugcuacucaucu

SEQ ID NO: 576785 - RNA, 19 nt, Artificial Sequence
  Description of Artificial Sequence: Synthetic oligonucleotide
  Sense strand starting at position 3727 of SEQ ID NO: 318624
guagaagcuugucugagaa

SEQ ID NO: 576786 - RNA, 19 nt, Artificial Sequence
  Description of Artificial Sequence: Synthetic oligonucleotide
  Antisense strand to SEQ ID NO: 576785
uucucagacaagcuucuac

SEQ ID NO: 576787 - RNA, 19 nt, Artificial Sequence
  Description of Artificial Sequence: Synthetic oligonucleotide
  Sense strand starting at position 3804 of SEQ ID NO: 318624
agguuagaacucugguaga

SEQ ID NO: 576788 - RNA, 19 nt, Artificial Sequence
  Description of Artificial Sequence: Synthetic oligonucleotide
  Antisense strand to SEQ ID NO: 576787
ucuaccagaguucuaaccu

SEQ ID NO: 576789 - RNA, 19 nt, Artificial Sequence
  Description of Artificial Sequence: Synthetic oligonucleotide
  Sense strand starting at position 3908 of SEQ ID NO: 318624
gagugaucaagcuagugga

SEQ ID NO: 576790 - RNA, 19 nt, Artificial Sequence
  Description of Artificial Sequence: Synthetic oligonucleotide
  Antisense strand to SEQ ID NO: 576789
uccacuagcuugaucacuc

SEQ ID NO: 576791 - RNA, 19 nt, Artificial Sequence
  Description of Artificial Sequence: Synthetic oligonucleotide
  Sense strand starting at position 3936 of SEQ ID NO: 318624
acagguguaugggagauuu

SEQ ID NO: 576792 - RNA, 19 nt, Artificial Sequence
  Description of Artificial Sequence: Synthetic oligonucleotide
  Antisense strand to SEQ ID NO: 576791
aaaucucccauacaccugu

SEQ ID NO: 576793 - RNA, 19 nt, Artificial Sequence
  Description of Artificial Sequence: Synthetic oligonucleotide
  Sense strand starting at position 3956 of SEQ ID NO: 318624
agugguagcauugauuaga

SEQ ID NO: 576794 - RNA, 19 nt, Artificial Sequence
  Description of Artificial Sequence: Synthetic oligonucleotide
  Antisense strand to SEQ ID NO: 576793
ucuaaucaaugcuaccacu

SEQ ID NO: 576795 - RNA, 19 nt, Artificial Sequence
  Description of Artificial Sequence: Synthetic oligonucleotide
  Sense strand starting at position 3959 of SEQ ID NO: 318624
gguagcauugauuagacuu

SEQ ID NO: 576796 - RNA, 19 nt, Artificial Sequence
  Description of Artificial Sequence: Synthetic oligonucleotide
  Antisense strand to SEQ ID NO: 576795
aagucuaaucaaugcuacc

SEQ ID NO: 576797 - RNA, 19 nt, Artificial Sequence
  Description of Artificial Sequence: Synthetic oligonucleotide
  Sense strand starting at position 387 of SEQ ID NO: 318625
uugucuggucuggaaugaa

SEQ ID NO: 576798 - RNA, 19 nt, Artificial Sequence
  Description of Artificial Sequence: Synthetic oligonucleotide
  Antisense strand to SEQ ID NO: 576797
uucauuccagaccagacaa

SEQ ID NO: 576799 - RNA, 19 nt, Artificial Sequence
  Description of Artificial Sequence: Synthetic oligonucleotide
  Sense strand starting at position 429 of SEQ ID NO: 318625
guuuaaaugggugauucca

SEQ ID NO: 576800 - RNA, 19 nt, Artificial Sequence
  Description of Artificial Sequence: Synthetic oligonucleotide
  Antisense strand to SEQ ID NO: 576799
uggaaucacccauuuaaac

SEQ ID NO: 576801 - RNA, 19 nt, Artificial Sequence
  Description of Artificial Sequence: Synthetic oligonucleotide
  Sense strand starting at position 485 of SEQ ID NO: 318625
gcagucuuugcucuggcua

SEQ ID NO: 576802 - RNA, 19 nt, Artificial Sequence
  Description of Artificial Sequence: Synthetic oligonucleotide
  Antisense strand to SEQ ID NO: 576801
uagccagagcaaagacugc

SEQ ID NO: 576803 - RNA, 19 nt, Artificial Sequence
  Description of Artificial Sequence: Synthetic oligonucleotide
  Sense strand starting at position 490 of SEQ ID NO: 318625
cuuugcucuggcuacaaga

SEQ ID NO: 576804 - RNA, 19 nt, Artificial Sequence
  Description of Artificial Sequence: Synthetic oligonucleotide
  Antisense strand to SEQ ID NO: 576803
ucuuguagccagagcaaag

SEQ ID NO: 576805 - RNA, 19 nt, Artificial Sequence
  Description of Artificial Sequence: Synthetic oligonucleotide
  Sense strand starting at position 554 of SEQ ID NO: 318625
cuuccacagucaguaauaa

SEQ ID NO: 576806 - RNA, 19 nt, Artificial Sequence
  Description of Artificial Sequence: Synthetic oligonucleotide
  Antisense strand to SEQ ID NO: 576805
uuauuacugacuguggaag

SEQ ID NO: 576807 - RNA, 19 nt, Artificial Sequence
  Description of Artificial Sequence: Synthetic oligonucleotide
  Sense strand starting at position 616 of SEQ ID NO: 318625
accaguuagggccaguuau

SEQ ID NO: 576808 - RNA, 19 nt, Artificial Sequence
  Description of Artificial Sequence: Synthetic oligonucleotide
  Antisense strand to SEQ ID NO: 576807
auaacuggcccuaacuggu

SEQ ID NO: 576809 - RNA, 19 nt, Artificial Sequence
  Description of Artificial Sequence: Synthetic oligonucleotide
  Sense strand starting at position 636 of SEQ ID NO: 318625
gcccuaagaucuuucuuug

SEQ ID NO: 576810 - RNA, 19 nt, Artificial Sequence
  Description of Artificial Sequence: Synthetic oligonucleotide
  Antisense strand to SEQ ID NO: 576809
caaagaaagaucuuagggc

SEQ ID NO: 576811 - RNA, 19 nt, Artificial Sequence
  Description of Artificial Sequence: Synthetic oligonucleotide
  Sense strand starting at position 742 of SEQ ID NO: 318625
ggguuugaggauuguccaa

SEQ ID NO: 576812 - RNA, 19 nt, Artificial Sequence
  Description of Artificial Sequence: Synthetic oligonucleotide
  Antisense strand to SEQ ID NO: 576811
uuggacaauccucaaaccc

SEQ ID NO: 576813 - RNA, 19 nt, Artificial Sequence
  Description of Artificial Sequence: Synthetic oligonucleotide
  Sense strand starting at position 744 of SEQ ID NO: 318625
guuugaggauuguccaagu

SEQ ID NO: 576814 - RNA, 19 nt, Artificial Sequence
  Description of Artificial Sequence: Synthetic oligonucleotide
  Antisense strand to SEQ ID NO: 576813
acuuggacaauccucaaac

SEQ ID NO: 576815 - RNA, 19 nt, Artificial Sequence
  Description of Artificial Sequence: Synthetic oligonucleotide
  Sense strand starting at position 883 of SEQ ID NO: 318625
ugcauaaggugggauuuga

SEQ ID NO: 576816 - RNA, 19 nt, Artificial Sequence
  Description of Artificial Sequence: Synthetic oligonucleotide
  Antisense strand to SEQ ID NO: 576815
ucaaaucccaccuuaugca

SEQ ID NO: 576817 - RNA, 19 nt, Artificial Sequence
  Description of Artificial Sequence: Synthetic oligonucleotide
  Sense strand starting at position 1258 of SEQ ID NO: 318625
gggcaaguagaguaauucu

SEQ ID NO: 576818 - RNA, 19 nt, Artificial Sequence
  Description of Artificial Sequence: Synthetic oligonucleotide
  Antisense strand to SEQ ID NO: 576817
agaauuacucuacuugccc

SEQ ID NO: 576819 - RNA, 19 nt, Artificial Sequence
  Description of Artificial Sequence: Synthetic oligonucleotide
  Sense strand starting at position 1279 of SEQ ID NO: 318625
gucuuucucagggauguca

SEQ ID NO: 576820 - RNA, 19 nt, Artificial Sequence
  Description of Artificial Sequence: Synthetic oligonucleotide
  Antisense strand to SEQ ID NO: 576819
ugacaucccugagaaagac

SEQ ID NO: 576821 - RNA, 19 nt, Artificial Sequence
  Description of Artificial Sequence: Synthetic oligonucleotide
  Sense strand starting at position 1301 of SEQ ID NO: 318625
gcagacucugggcauacau

SEQ ID NO: 576822 - RNA, 19 nt, Artificial Sequence
  Description of Artificial Sequence: Synthetic oligonucleotide
  Antisense strand to SEQ ID NO: 576821
auguaugcccagagucugc

SEQ ID NO: 576823 - RNA, 19 nt, Artificial Sequence
  Description of Artificial Sequence: Synthetic oligonucleotide
  Sense strand starting at position 1468 of SEQ ID NO: 318625
aucuuugcauagucugaaa

SEQ ID NO: 576824 - RNA, 19 nt, Artificial Sequence
  Description of Artificial Sequence: Synthetic oligonucleotide
  Antisense strand to SEQ ID NO: 576823
uuucagacuaugcaaagau

SEQ ID NO: 576825 - RNA, 19 nt, Artificial Sequence
  Description of Artificial Sequence: Synthetic oligonucleotide
  Sense strand starting at position 1470 of SEQ ID NO: 318625
cuuugcauagucugaaaca

SEQ ID NO: 576826 - RNA, 19 nt, Artificial Sequence
  Description of Artificial Sequence: Synthetic oligonucleotide
  Antisense strand to SEQ ID NO: 576825
uguuucagacuaugcaaag

SEQ ID NO: 576827 - RNA, 19 nt, Artificial Sequence
  Description of Artificial Sequence: Synthetic oligonucleotide
  Sense strand starting at position 1511 of SEQ ID NO: 318625
aggcaauuguucucaucau

SEQ ID NO: 576828 - RNA, 19 nt, Artificial Sequence
  Description of Artificial Sequence: Synthetic oligonucleotide
  Antisense strand to SEQ ID NO: 576827
augaugagaacaauugccu

SEQ ID NO: 576829 - RNA, 19 nt, Artificial Sequence
  Description of Artificial Sequence: Synthetic oligonucleotide
  Sense strand starting at position 1517 of SEQ ID NO: 318625
uuguucucaucauuggaua

SEQ ID NO: 576830 - RNA, 19 nt, Artificial Sequence
  Description of Artificial Sequence: Synthetic oligonucleotide
  Antisense strand to SEQ ID NO: 576829
uauccaaugaugagaacaa

SEQ ID NO: 576831 - RNA, 19 nt, Artificial Sequence
  Description of Artificial Sequence: Synthetic oligonucleotide
  Sense strand starting at position 1518 of SEQ ID NO: 318625
uguucucaucauuggauaa

SEQ ID NO: 576832 - RNA, 19 nt, Artificial Sequence
  Description of Artificial Sequence: Synthetic oligonucleotide
  Antisense strand to SEQ ID NO: 576831
uuauccaaugaugagaaca

SEQ ID NO: 576833 - RNA, 19 nt, Artificial Sequence
  Description of Artificial Sequence: Synthetic oligonucleotide
  Sense strand starting at position 1525 of SEQ ID NO: 318625
aucauuggauaaucgaauu

SEQ ID NO: 576834 - RNA, 19 nt, Artificial Sequence
  Description of Artificial Sequence: Synthetic oligonucleotide
  Antisense strand to SEQ ID NO: 576833
aauucgauuauccaaugau

SEQ ID NO: 576835 - RNA, 19 nt, Artificial Sequence
  Description of Artificial Sequence: Synthetic oligonucleotide
  Sense strand starting at position 2450 of SEQ ID NO: 318625
uccugaaguucuccaggaa

SEQ ID NO: 576836 - RNA, 19 nt, Artificial Sequence
  Description of Artificial Sequence: Synthetic oligonucleotide
  Antisense strand to SEQ ID NO: 576835
uuccuggagaacuucagga

SEQ ID NO: 576837 - RNA, 19 nt, Artificial Sequence
  Description of Artificial Sequence: Synthetic oligonucleotide
  Sense strand starting at position 2664 of SEQ ID NO: 318625
gaaucugugcuuuauggau

SEQ ID NO: 576838 - RNA, 19 nt, Artificial Sequence
  Description of Artificial Sequence: Synthetic oligonucleotide
  Antisense strand to SEQ ID NO: 576837
auccauaaagcacagauuc

SEQ ID NO: 576839 - RNA, 19 nt, Artificial Sequence
  Description of Artificial Sequence: Synthetic oligonucleotide
  Sense strand starting at position 2743 of SEQ ID NO: 318625
aaagauuccgugugacagu

SEQ ID NO: 576840 - RNA, 19 nt, Artificial Sequence
  Description of Artificial Sequence: Synthetic oligonucleotide
  Antisense strand to SEQ ID NO: 576839
acugucacacggaaucuuu

SEQ ID NO: 576841 - RNA, 19 nt, Artificial Sequence
  Description of Artificial Sequence: Synthetic oligonucleotide
  Sense strand starting at position 2826 of SEQ ID NO: 318625
ggcaaagcucccggaauga

SEQ ID NO: 576842 - RNA, 19 nt, Artificial Sequence
  Description of Artificial Sequence: Synthetic oligonucleotide
  Antisense strand to SEQ ID NO: 576841
ucauuccgggagcuuugcc

SEQ ID NO: 576843 - RNA, 19 nt, Artificial Sequence
  Description of Artificial Sequence: Synthetic oligonucleotide
  Sense strand starting at position 2835 of SEQ ID NO: 318625
cccggaaugauauggauua

SEQ ID NO: 576844 - RNA, 19 nt, Artificial Sequence
  Description of Artificial Sequence: Synthetic oligonucleotide
  Antisense strand to SEQ ID NO: 576843
uaauccauaucauuccggg

SEQ ID NO: 576845 - RNA, 19 nt, Artificial Sequence
  Description of Artificial Sequence: Synthetic oligonucleotide
  Sense strand starting at position 2870 of SEQ ID NO: 318625
uuugauaaacaguggcaaa

SEQ ID NO: 576846 - RNA, 19 nt, Artificial Sequence
  Description of Artificial Sequence: Synthetic oligonucleotide
  Antisense strand to SEQ ID NO: 576845
uuugccacuguuuaucaaa

SEQ ID NO: 576847 - RNA, 19 nt, Artificial Sequence
  Description of Artificial Sequence: Synthetic oligonucleotide
  Sense strand starting at position 2900 of SEQ ID NO: 318625
uguaacaaucucgacuaau

SEQ ID NO: 576848 - RNA, 19 nt, Artificial Sequence
  Description of Artificial Sequence: Synthetic oligonucleotide
  Antisense strand to SEQ ID NO: 576847
auuagucgagauuguuaca

SEQ ID NO: 576849 - RNA, 19 nt, Artificial Sequence
  Description of Artificial Sequence: Synthetic oligonucleotide
  Sense strand starting at position 3090 of SEQ ID NO: 318625
gagcuaucugcagagcucu

SEQ ID NO: 576850 - RNA, 19 nt, Artificial Sequence
  Description of Artificial Sequence: Synthetic oligonucleotide
  Antisense strand to SEQ ID NO: 576849
agagcucugcagauagcuc

SEQ ID NO: 576851 - RNA, 19 nt, Artificial Sequence
  Description of Artificial Sequence: Synthetic oligonucleotide
  Sense strand starting at position 3098 of SEQ ID NO: 318625
ugcagagcucucuaauaug

SEQ ID NO: 576852 - RNA, 19 nt, Artificial Sequence
  Description of Artificial Sequence: Synthetic oligonucleotide
  Antisense strand to SEQ ID NO: 576851
cauauuagagagcucugca

SEQ ID NO: 576853 - RNA, 19 nt, Artificial Sequence
  Description of Artificial Sequence: Synthetic oligonucleotide
  Sense strand starting at position 3187 of SEQ ID NO: 318625
ggcauaugucuacacauga

SEQ ID NO: 576854 - RNA, 19 nt, Artificial Sequence
  Description of Artificial Sequence: Synthetic oligonucleotide
  Antisense strand to SEQ ID NO: 576853
ucauguguagacauaugcc

SEQ ID NO: 576855 - RNA, 19 nt, Artificial Sequence
  Description of Artificial Sequence: Synthetic oligonucleotide
  Sense strand starting at position 3307 of SEQ ID NO: 318625
cuggguuugagaggaaucu

SEQ ID NO: 576856 - RNA, 19 nt, Artificial Sequence
  Description of Artificial Sequence: Synthetic oligonucleotide
  Antisense strand to SEQ ID NO: 576855
agauuccucucaaacccag

SEQ ID NO: 576857 - RNA, 19 nt, Artificial Sequence
  Description of Artificial Sequence: Synthetic oligonucleotide
  Sense strand starting at position 3462 of SEQ ID NO: 318625
gcugauuggguauaccaga

SEQ ID NO: 576858 - RNA, 19 nt, Artificial Sequence
  Description of Artificial Sequence: Synthetic oligonucleotide
  Antisense strand to SEQ ID NO: 576857
ucugguauacccaaucagc

SEQ ID NO: 576859 - RNA, 19 nt, Artificial Sequence
  Description of Artificial Sequence: Synthetic oligonucleotide
  Sense strand starting at position 3595 of SEQ ID NO: 318625
uaggguuacuccuuaaaug

SEQ ID NO: 576860 - RNA, 19 nt, Artificial Sequence
  Description of Artificial Sequence: Synthetic oligonucleotide
  Antisense strand to SEQ ID NO: 576859
cauuuaaggaguaacccua

SEQ ID NO: 576861 - RNA, 19 nt, Artificial Sequence
  Description of Artificial Sequence: Synthetic oligonucleotide
  Sense strand starting at position 3607 of SEQ ID NO: 318625
uuaaaugagucaccaagca

SEQ ID NO: 576862 - RNA, 19 nt, Artificial Sequence
  Description of Artificial Sequence: Synthetic oligonucleotide
  Antisense strand to SEQ ID NO: 576861
ugcuuggugacucauuuaa

SEQ ID NO: 576863 - RNA, 19 nt, Artificial Sequence
  Description of Artificial Sequence: Synthetic oligonucleotide
  Sense strand starting at position 3719 of SEQ ID NO: 318625
uugucagcagucuagauaa

SEQ ID NO: 576864 - RNA, 19 nt, Artificial Sequence
  Description of Artificial Sequence: Synthetic oligonucleotide
  Antisense strand to SEQ ID NO: 576863
uuaucuagacugcugacaa

SEQ ID NO: 576865 - RNA, 19 nt, Artificial Sequence
  Description of Artificial Sequence: Synthetic oligonucleotide
  Sense strand starting at position 3784 of SEQ ID NO: 318625
guauuuacuucucugugac

SEQ ID NO: 576866 - RNA, 19 nt, Artificial Sequence
  Description of Artificial Sequence: Synthetic oligonucleotide
  Antisense strand to SEQ ID NO: 576865
gucacagagaaguaaauac

SEQ ID NO: 576867 - RNA, 19 nt, Artificial Sequence
  Description of Artificial Sequence: Synthetic oligonucleotide
  Sense strand starting at position 3790 of SEQ ID NO: 318625
acuucucugugaccugaau

SEQ ID NO: 576868 - RNA, 19 nt, Artificial Sequence
  Description of Artificial Sequence: Synthetic oligonucleotide
  Antisense strand to SEQ ID NO: 576867
auucaggucacagagaagu

SEQ ID NO: 576869 - RNA, 19 nt, Artificial Sequence
  Description of Artificial Sequence: Synthetic oligonucleotide
  Sense strand starting at position 3809 of SEQ ID NO: 318625
ggaugcaucuucuuuguga

SEQ ID NO: 576870 - RNA, 19 nt, Artificial Sequence
  Description of Artificial Sequence: Synthetic oligonucleotide
  Antisense strand to SEQ ID NO: 576869
ucacaaagaagaugcaucc

SEQ ID NO: 576871 - RNA, 19 nt, Artificial Sequence
  Description of Artificial Sequence: Synthetic oligonucleotide
  Sense strand starting at position 3927 of SEQ ID NO: 318625
uguggauugccucacucuu

SEQ ID NO: 576872 - RNA, 19 nt, Artificial Sequence
  Description of Artificial Sequence: Synthetic oligonucleotide
  Antisense strand to SEQ ID NO: 576871
aagagugaggcaauccaca

SEQ ID NO: 576873 - RNA, 19 nt, Artificial Sequence
  Description of Artificial Sequence: Synthetic oligonucleotide
  Sense strand starting at position 3938 of SEQ ID NO: 318625
ucacucuucuguuugacau

SEQ ID NO: 576874 - RNA, 19 nt, Artificial Sequence
  Description of Artificial Sequence: Synthetic oligonucleotide
  Antisense strand to SEQ ID NO: 576873
augucaaacagaagaguga

SEQ ID NO: 576875 - RNA, 19 nt, Artificial Sequence
  Description of Artificial Sequence: Synthetic oligonucleotide
  Sense strand starting at position 3961 of SEQ ID NO: 318625
guucuucuacuauauaugu

SEQ ID NO: 576876 - RNA, 19 nt, Artificial Sequence
  Description of Artificial Sequence: Synthetic oligonucleotide
  Antisense strand to SEQ ID NO: 576875
acauauauaguagaagaac

SEQ ID NO: 576877 - RNA, 19 nt, Artificial Sequence
  Description of Artificial Sequence: Synthetic oligonucleotide
  Sense strand starting at position 103 of SEQ ID NO: 318626
ucggcuaucagauggaagu

SEQ ID NO: 576878 - RNA, 19 nt, Artificial Sequence
  Description of Artificial Sequence: Synthetic oligonucleotide
  Antisense strand to SEQ ID NO: 576877
acuuccaucugauagccga

SEQ ID NO: 576879 - RNA, 19 nt, Artificial Sequence
  Description of Artificial Sequence: Synthetic oligonucleotide
  Sense strand starting at position 104 of SEQ ID NO: 318626
cggcuaucagauggaagua

SEQ ID NO: 576880 - RNA, 19 nt, Artificial Sequence
  Description of Artificial Sequence: Synthetic oligonucleotide
  Antisense strand to SEQ ID NO: 576879
uacuuccaucugauagccg

SEQ ID NO: 576881 - RNA, 19 nt, Artificial Sequence
  Description of Artificial Sequence: Synthetic oligonucleotide
  Sense strand starting at position 192 of SEQ ID NO: 318626
uaagucugcgauuaagaua

SEQ ID NO: 576882 - RNA, 19 nt, Artificial Sequence
  Description of Artificial Sequence: Synthetic oligonucleotide
  Antisense strand to SEQ ID NO: 576881
uaucuuaaucgcagacuua

SEQ ID NO: 576883 - RNA, 19 nt, Artificial Sequence
  Description of Artificial Sequence: Synthetic oligonucleotide
  Sense strand starting at position 252 of SEQ ID NO: 318626
gaguuaggucauggaauua

SEQ ID NO: 576884 - RNA, 19 nt, Artificial Sequence
  Description of Artificial Sequence: Synthetic oligonucleotide
  Antisense strand to SEQ ID NO: 576883
uaauuccaugaccuaacuc

SEQ ID NO: 576885 - RNA, 19 nt, Artificial Sequence
  Description of Artificial Sequence: Synthetic oligonucleotide
  Sense strand starting at position 262 of SEQ ID NO: 318626
auggaauuaccuggcucuu

SEQ ID NO: 576886 - RNA, 19 nt, Artificial Sequence
  Description of Artificial Sequence: Synthetic oligonucleotide
  Antisense strand to SEQ ID NO: 576885
aagagccagguaauuccau

SEQ ID NO: 576887 - RNA, 19 nt, Artificial Sequence
  Description of Artificial Sequence: Synthetic oligonucleotide
  Sense strand starting at position 264 of SEQ ID NO: 318626
ggaauuaccuggcucuucu

SEQ ID NO: 576888 - RNA, 19 nt, Artificial Sequence
  Description of Artificial Sequence: Synthetic oligonucleotide
  Antisense strand to SEQ ID NO: 576887
agaagagccagguaauucc

SEQ ID NO: 576889 - RNA, 19 nt, Artificial Sequence
  Description of Artificial Sequence: Synthetic oligonucleotide
  Sense strand starting at position 482 of SEQ ID NO: 318626
ggaagccugucauuaacaa

SEQ ID NO: 576890 - RNA, 19 nt, Artificial Sequence
  Description of Artificial Sequence: Synthetic oligonucleotide
  Antisense strand to SEQ ID NO: 576889
uuguuaaugacaggcuucc

SEQ ID NO: 576891 - RNA, 19 nt, Artificial Sequence
  Description of Artificial Sequence: Synthetic oligonucleotide
  Sense strand starting at position 544 of SEQ ID NO: 318626
auguaauagcacugugaac

SEQ ID NO: 576892 - RNA, 19 nt, Artificial Sequence
  Description of Artificial Sequence: Synthetic oligonucleotide
  Antisense strand to SEQ ID NO: 576891
guucacagugcuauuacau

SEQ ID NO: 576893 - RNA, 19 nt, Artificial Sequence
  Description of Artificial Sequence: Synthetic oligonucleotide
  Sense strand starting at position 663 of SEQ ID NO: 318626
cucuccuuucugugaaaug

SEQ ID NO: 576894 - RNA, 19 nt, Artificial Sequence
  Description of Artificial Sequence: Synthetic oligonucleotide
  Antisense strand to SEQ ID NO: 576893
cauuucacagaaaggagag

SEQ ID NO: 576895 - RNA, 19 nt, Artificial Sequence
  Description of Artificial Sequence: Synthetic oligonucleotide
  Sense strand starting at position 668 of SEQ ID NO: 318626
cuuucugugaaaugggaau

SEQ ID NO: 576896 - RNA, 19 nt, Artificial Sequence
  Description of Artificial Sequence: Synthetic oligonucleotide
  Antisense strand to SEQ ID NO: 576895
auucccauuucacagaaag

SEQ ID NO: 576897 - RNA, 19 nt, Artificial Sequence
  Description of Artificial Sequence: Synthetic oligonucleotide
  Sense strand starting at position 701 of SEQ ID NO: 318626
cucauuggguuguccugaa

SEQ ID NO: 576898 - RNA, 19 nt, Artificial Sequence
  Description of Artificial Sequence: Synthetic oligonucleotide
  Antisense strand to SEQ ID NO: 576897
uucaggacaacccaaugag

SEQ ID NO: 576899 - RNA, 19 nt, Artificial Sequence
  Description of Artificial Sequence: Synthetic oligonucleotide
  Sense strand starting at position 705 of SEQ ID NO: 318626
uuggguuguccugaagauu

SEQ ID NO: 576900 - RNA, 19 nt, Artificial Sequence
  Description of Artificial Sequence: Synthetic oligonucleotide
  Antisense strand to SEQ ID NO: 576899
aaucuucaggacaacccaa

SEQ ID NO: 576901 - RNA, 19 nt, Artificial Sequence
  Description of Artificial Sequence: Synthetic oligonucleotide
  Sense strand starting at position 1220 of SEQ ID NO: 318626
uucugacucucuguugaau

SEQ ID NO: 576902 - RNA, 19 nt, Artificial Sequence
  Description of Artificial Sequence: Synthetic oligonucleotide
  Antisense strand to SEQ ID NO: 576901
auucaacagagagucagaa

SEQ ID NO: 576903 - RNA, 19 nt, Artificial Sequence
  Description of Artificial Sequence: Synthetic oligonucleotide
  Sense strand starting at position 1223 of SEQ ID NO: 318626
ugacucucuguugaaucua

SEQ ID NO: 576904 - RNA, 19 nt, Artificial Sequence
  Description of Artificial Sequence: Synthetic oligonucleotide
  Antisense strand to SEQ ID NO: 576903
uagauucaacagagaguca

SEQ ID NO: 576905 - RNA, 19 nt, Artificial Sequence
  Description of Artificial Sequence: Synthetic oligonucleotide
  Sense strand starting at position 1249 of SEQ ID NO: 318626
uggccuguuacugauaaug

SEQ ID NO: 576906 - RNA, 19 nt, Artificial Sequence
  Description of Artificial Sequence: Synthetic oligonucleotide
  Antisense strand to SEQ ID NO: 576905
cauuaucaguaacaggcca

SEQ ID NO: 576907 - RNA, 19 nt, Artificial Sequence
  Description of Artificial Sequence: Synthetic oligonucleotide
  Sense strand starting at position 1268 of SEQ ID NO: 318626
aagcacagacguuaaguau

SEQ ID NO: 576908 - RNA, 19 nt, Artificial Sequence
  Description of Artificial Sequence: Synthetic oligonucleotide
  Antisense strand to SEQ ID NO: 576907
auacuuaacgucugugcuu

SEQ ID NO: 576909 - RNA, 19 nt, Artificial Sequence
  Description of Artificial Sequence: Synthetic oligonucleotide
  Sense strand starting at position 1343 of SEQ ID NO: 318626
acagaauagcuaggcaauu

SEQ ID NO: 576910 - RNA, 19 nt, Artificial Sequence
  Description of Artificial Sequence: Synthetic oligonucleotide
  Antisense strand to SEQ ID NO: 576909
aauugccuagcuauucugu

SEQ ID NO: 576911 - RNA, 19 nt, Artificial Sequence
  Description of Artificial Sequence: Synthetic oligonucleotide
  Sense strand starting at position 1352 of SEQ ID NO: 318626
cuaggcaauuggcuuaaga

SEQ ID NO: 576912 - RNA, 19 nt, Artificial Sequence
  Description of Artificial Sequence: Synthetic oligonucleotide
  Antisense strand to SEQ ID NO: 576911
ucuuaagccaauugccuag

SEQ ID NO: 576913 - RNA, 19 nt, Artificial Sequence
  Description of Artificial Sequence: Synthetic oligonucleotide
  Sense strand starting at position 1362 of SEQ ID NO: 318626
ggcuuaagagcuuaaauau

SEQ ID NO: 576914 - RNA, 19 nt, Artificial Sequence
  Description of Artificial Sequence: Synthetic oligonucleotide
  Antisense strand to SEQ ID NO: 576913
auauuuaagcucuuaagcc

SEQ ID NO: 576915 - RNA, 19 nt, Artificial Sequence
  Description of Artificial Sequence: Synthetic oligonucleotide
  Sense strand starting at position 1373 of SEQ ID NO: 318626
uuaaauauugugcaugaga

SEQ ID NO: 576916 - RNA, 19 nt, Artificial Sequence
  Description of Artificial Sequence: Synthetic oligonucleotide
  Antisense strand to SEQ ID NO: 576915
ucucaugcacaauauuuaa

SEQ ID NO: 576917 - RNA, 19 nt, Artificial Sequence
  Description of Artificial Sequence: Synthetic oligonucleotide
  Sense strand starting at position 2114 of SEQ ID NO: 318626
ggucuugacuuacuggcaa

SEQ ID NO: 576918 - RNA, 19 nt, Artificial Sequence
  Description of Artificial Sequence: Synthetic oligonucleotide
  Antisense strand to SEQ ID NO: 576917
uugccaguaagucaagacc

SEQ ID NO: 576919 - RNA, 19 nt, Artificial Sequence
  Description of Artificial Sequence: Synthetic oligonucleotide
  Sense strand starting at position 2338 of SEQ ID NO: 318626
ccaucaaagcauuguggau

SEQ ID NO: 576920 - RNA, 19 nt, Artificial Sequence
  Description of Artificial Sequence: Synthetic oligonucleotide
  Antisense strand to SEQ ID NO: 576919
auccacaaugcuuugaugg

SEQ ID NO: 576921 - RNA, 19 nt, Artificial Sequence
  Description of Artificial Sequence: Synthetic oligonucleotide
  Sense strand starting at position 2416 of SEQ ID NO: 318626
uuggaauuauucgccuaua

SEQ ID NO: 576922 - RNA, 19 nt, Artificial Sequence
  Description of Artificial Sequence: Synthetic oligonucleotide
  Antisense strand to SEQ ID NO: 576921
uauaggcgaauaauuccaa

SEQ ID NO: 576923 - RNA, 19 nt, Artificial Sequence
  Description of Artificial Sequence: Synthetic oligonucleotide
  Sense strand starting at position 2417 of SEQ ID NO: 318626
uggaauuauucgccuauac

SEQ ID NO: 576924 - RNA, 19 nt, Artificial Sequence
  Description of Artificial Sequence: Synthetic oligonucleotide
  Antisense strand to SEQ ID NO: 576923
guauaggcgaauaauucca

SEQ ID NO: 576925 - RNA, 19 nt, Artificial Sequence
  Description of Artificial Sequence: Synthetic oligonucleotide
  Sense strand starting at position 2421 of SEQ ID NO: 318626
auuauucgccuauacaaug

SEQ ID NO: 576926 - RNA, 19 nt, Artificial Sequence
  Description of Artificial Sequence: Synthetic oligonucleotide
  Antisense strand to SEQ ID NO: 576925
cauuguauaggcgaauaau

SEQ ID NO: 576927 - RNA, 19 nt, Artificial Sequence
  Description of Artificial Sequence: Synthetic oligonucleotide
  Sense strand starting at position 2460 of SEQ ID NO: 318626
gcuugagcauuugccagua

SEQ ID NO: 576928 - RNA, 19 nt, Artificial Sequence
  Description of Artificial Sequence: Synthetic oligonucleotide
  Antisense strand to SEQ ID NO: 576927
uacuggcaaaugcucaagc

SEQ ID NO: 576929 - RNA, 19 nt, Artificial Sequence
  Description of Artificial Sequence: Synthetic oligonucleotide
  Sense strand starting at position 2586 of SEQ ID NO: 318626
cagaaccaguguuugauau

SEQ ID NO: 576930 - RNA, 19 nt, Artificial Sequence
  Description of Artificial Sequence: Synthetic oligonucleotide
  Antisense strand to SEQ ID NO: 576929
auaucaaacacugguucug

SEQ ID NO: 576931 - RNA, 19 nt, Artificial Sequence
  Description of Artificial Sequence: Synthetic oligonucleotide
  Sense strand starting at position 2648 of SEQ ID NO: 318626
gugucauacuuugugauuu

SEQ ID NO: 576932 - RNA, 19 nt, Artificial Sequence
  Description of Artificial Sequence: Synthetic oligonucleotide
  Antisense strand to SEQ ID NO: 576931
aaaucacaaaguaugacac

SEQ ID NO: 576933 - RNA, 19 nt, Artificial Sequence
  Description of Artificial Sequence: Synthetic oligonucleotide
  Sense strand starting at position 2800 of SEQ ID NO: 318626
gcuugaguucaggagauuc

SEQ ID NO: 576934 - RNA, 19 nt, Artificial Sequence
  Description of Artificial Sequence: Synthetic oligonucleotide
  Antisense strand to SEQ ID NO: 576933
gaaucuccugaacucaagc

SEQ ID NO: 576935 - RNA, 19 nt, Artificial Sequence
  Description of Artificial Sequence: Synthetic oligonucleotide
  Sense strand starting at position 3126 of SEQ ID NO: 318626
uguguauccauacagggau

SEQ ID NO: 576936 - RNA, 19 nt, Artificial Sequence
  Description of Artificial Sequence: Synthetic oligonucleotide
  Antisense strand to SEQ ID NO: 576935
aucccuguauggauacaca

SEQ ID NO: 576937 - RNA, 19 nt, Artificial Sequence
  Description of Artificial Sequence: Synthetic oligonucleotide
  Sense strand starting at position 3129 of SEQ ID NO: 318626
guauccauacagggaucua

SEQ ID NO: 576938 - RNA, 19 nt, Artificial Sequence
  Description of Artificial Sequence: Synthetic oligonucleotide
  Antisense strand to SEQ ID NO: 576937
uagaucccuguauggauac

SEQ ID NO: 576939 - RNA, 19 nt, Artificial Sequence
  Description of Artificial Sequence: Synthetic oligonucleotide
  Sense strand starting at position 3142 of SEQ ID NO: 318626
gaucuauaucaguaugugu

SEQ ID NO: 576940 - RNA, 19 nt, Artificial Sequence
  Description of Artificial Sequence: Synthetic oligonucleotide
  Antisense strand to SEQ ID NO: 576939
acacauacugauauagauc

SEQ ID NO: 576941 - RNA, 19 nt, Artificial Sequence
  Description of Artificial Sequence: Synthetic oligonucleotide
  Sense strand starting at position 3158 of SEQ ID NO: 318626
uguguauauccucauaaua

SEQ ID NO: 576942 - RNA, 19 nt, Artificial Sequence
  Description of Artificial Sequence: Synthetic oligonucleotide
  Antisense strand to SEQ ID NO: 576941
uauuaugaggauauacaca

SEQ ID NO: 576943 - RNA, 19 nt, Artificial Sequence
  Description of Artificial Sequence: Synthetic oligonucleotide
  Sense strand starting at position 3191 of SEQ ID NO: 318626
agucaucacuccuuugaug

SEQ ID NO: 576944 - RNA, 19 nt, Artificial Sequence
  Description of Artificial Sequence: Synthetic oligonucleotide
  Antisense strand to SEQ ID NO: 576943
caucaaaggagugaugacu

SEQ ID NO: 576945 - RNA, 19 nt, Artificial Sequence
  Description of Artificial Sequence: Synthetic oligonucleotide
  Sense strand starting at position 3200 of SEQ ID NO: 318626
uccuuugaugcucagagua

SEQ ID NO: 576946 - RNA, 19 nt, Artificial Sequence
  Description of Artificial Sequence: Synthetic oligonucleotide
  Antisense strand to SEQ ID NO: 576945
uacucugagcaucaaagga

SEQ ID NO: 576947 - RNA, 19 nt, Artificial Sequence
  Description of Artificial Sequence: Synthetic oligonucleotide
  Sense strand starting at position 3363 of SEQ ID NO: 318626
guuucuguugcugugaagu

SEQ ID NO: 576948 - RNA, 19 nt, Artificial Sequence
  Description of Artificial Sequence: Synthetic oligonucleotide
  Antisense strand to SEQ ID NO: 576947
acuucacagcaacagaaac

SEQ ID NO: 576949 - RNA, 19 nt, Artificial Sequence
  Description of Artificial Sequence: Synthetic oligonucleotide
  Sense strand starting at position 3394 of SEQ ID NO: 318626
gguuaucauuccucaccuu

SEQ ID NO: 576950 - RNA, 19 nt, Artificial Sequence
  Description of Artificial Sequence: Synthetic oligonucleotide
  Antisense strand to SEQ ID NO: 576949
aaggugaggaaugauaacc

SEQ ID NO: 576951 - RNA, 19 nt, Artificial Sequence
  Description of Artificial Sequence: Synthetic oligonucleotide
  Sense strand starting at position 3822 of SEQ ID NO: 318626
ugcagugaaaugcauagua

SEQ ID NO: 576952 - RNA, 19 nt, Artificial Sequence
  Description of Artificial Sequence: Synthetic oligonucleotide
  Antisense strand to SEQ ID NO: 576951
uacuaugcauuucacugca

SEQ ID NO: 576953 - RNA, 19 nt, Artificial Sequence
  Description of Artificial Sequence: Synthetic oligonucleotide
  Sense strand starting at position 3824 of SEQ ID NO: 318626
cagugaaaugcauaguaga

SEQ ID NO: 576954 - RNA, 19 nt, Artificial Sequence
  Description of Artificial Sequence: Synthetic oligonucleotide
  Antisense strand to SEQ ID NO: 576953
ucuacuaugcauuucacug

SEQ ID NO: 576955 - RNA, 19 nt, Artificial Sequence
  Description of Artificial Sequence: Synthetic oligonucleotide
  Sense strand starting at position 3870 of SEQ ID NO: 318626
ucuauauggucuuuacaua

SEQ ID NO: 576956 - RNA, 19 nt, Artificial Sequence
  Description of Artificial Sequence: Synthetic oligonucleotide
  Antisense strand to SEQ ID NO: 576955
uauguaaagaccauauaga

SEQ ID NO: 576957 - RNA, 19 nt, Artificial Sequence
  Description of Artificial Sequence: Synthetic oligonucleotide
  Sense strand starting at position 49 of SEQ ID NO: 318627
ccauuccgccuccagagau

SEQ ID NO: 576958 - RNA, 19 nt, Artificial Sequence
  Description of Artificial Sequence: Synthetic oligonucleotide
  Antisense strand to SEQ ID NO: 576957
aucucuggaggcggaaugg

SEQ ID NO: 576959 - RNA, 19 nt, Artificial Sequence
  Description of Artificial Sequence: Synthetic oligonucleotide
  Sense strand starting at position 64 of SEQ ID NO: 318627
agauaagucuugucaacaa

SEQ ID NO: 576960 - RNA, 19 nt, Artificial Sequence
  Description of Artificial Sequence: Synthetic oligonucleotide
  Antisense strand to SEQ ID NO: 576959
uuguugacaagacuuaucu

SEQ ID NO: 576961 - RNA, 19 nt, Artificial Sequence
  Description of Artificial Sequence: Synthetic oligonucleotide
  Sense strand starting at position 166 of SEQ ID NO: 318627
guaucuacacuguaucuua

SEQ ID NO: 576962 - RNA, 19 nt, Artificial Sequence
  Description of Artificial Sequence: Synthetic oligonucleotide
  Antisense strand to SEQ ID NO: 576961
uaagauacaguguagauac

SEQ ID NO: 576963 - RNA, 19 nt, Artificial Sequence
  Description of Artificial Sequence: Synthetic oligonucleotide
  Sense strand starting at position 555 of SEQ ID NO: 318627
uuucuauucuggguaucca

SEQ ID NO: 576964 - RNA, 19 nt, Artificial Sequence
  Description of Artificial Sequence: Synthetic oligonucleotide
  Antisense strand to SEQ ID NO: 576963
uggauacccagaauagaaa

SEQ ID NO: 576965 - RNA, 19 nt, Artificial Sequence
  Description of Artificial Sequence: Synthetic oligonucleotide
  Sense strand starting at position 609 of SEQ ID NO: 318627
cuugcuauguuauuuguau

SEQ ID NO: 576966 - RNA, 19 nt, Artificial Sequence
  Description of Artificial Sequence: Synthetic oligonucleotide
  Antisense strand to SEQ ID NO: 576965
auacaaauaacauagcaag

SEQ ID NO: 576967 - RNA, 19 nt, Artificial Sequence
  Description of Artificial Sequence: Synthetic oligonucleotide
  Sense strand starting at position 783 of SEQ ID NO: 318627
ucugaauagucaccuuuag

SEQ ID NO: 576968 - RNA, 19 nt, Artificial Sequence
  Description of Artificial Sequence: Synthetic oligonucleotide
  Antisense strand to SEQ ID NO: 576967
cuaaaggugacuauucaga

SEQ ID NO: 576969 - RNA, 19 nt, Artificial Sequence
  Description of Artificial Sequence: Synthetic oligonucleotide
  Sense strand starting at position 885 of SEQ ID NO: 318627
ggauuacuuggaugccaac

SEQ ID NO: 576970 - RNA, 19 nt, Artificial Sequence
  Description of Artificial Sequence: Synthetic oligonucleotide
  Antisense strand to SEQ ID NO: 576969
guuggcauccaaguaaucc

SEQ ID NO: 576971 - RNA, 19 nt, Artificial Sequence
  Description of Artificial Sequence: Synthetic oligonucleotide
  Sense strand starting at position 998 of SEQ ID NO: 318627
cuccgcauguaacuuuaua

SEQ ID NO: 576972 - RNA, 19 nt, Artificial Sequence
  Description of Artificial Sequence: Synthetic oligonucleotide
  Antisense strand to SEQ ID NO: 576971
uauaaaguuacaugcggag

SEQ ID NO: 576973 - RNA, 19 nt, Artificial Sequence
  Description of Artificial Sequence: Synthetic oligonucleotide
  Sense strand starting at position 1034 of SEQ ID NO: 318627
guaugcugggaccaguaaa

SEQ ID NO: 576974 - RNA, 19 nt, Artificial Sequence
  Description of Artificial Sequence: Synthetic oligonucleotide
  Antisense strand to SEQ ID NO: 576973
uuuacuggucccagcauac

SEQ ID NO: 576975 - RNA, 19 nt, Artificial Sequence
  Description of Artificial Sequence: Synthetic oligonucleotide
  Sense strand starting at position 1045 of SEQ ID NO: 318627
ccaguaaagaucuggguaa

SEQ ID NO: 576976 - RNA, 19 nt, Artificial Sequence
  Description of Artificial Sequence: Synthetic oligonucleotide
  Antisense strand to SEQ ID NO: 576975
uuacccagaucuuuacugg

SEQ ID NO: 576977 - RNA, 19 nt, Artificial Sequence
  Description of Artificial Sequence: Synthetic oligonucleotide
  Sense strand starting at position 1047 of SEQ ID NO: 318627
aguaaagaucuggguaauu

SEQ ID NO: 576978 - RNA, 19 nt, Artificial Sequence
  Description of Artificial Sequence: Synthetic oligonucleotide
  Antisense strand to SEQ ID NO: 576977
aauuacccagaucuuuacu

SEQ ID NO: 576979 - RNA, 19 nt, Artificial Sequence
  Description of Artificial Sequence: Synthetic oligonucleotide
  Sense strand starting at position 1284 of SEQ ID NO: 318627
acuucuuaucagcacagga

SEQ ID NO: 576980 - RNA, 19 nt, Artificial Sequence
  Description of Artificial Sequence: Synthetic oligonucleotide
  Antisense strand to SEQ ID NO: 576979
uccugugcugauaagaagu

SEQ ID NO: 576981 - RNA, 19 nt, Artificial Sequence
  Description of Artificial Sequence: Synthetic oligonucleotide
  Sense strand starting at position 1286 of SEQ ID NO: 318627
uucuuaucagcacaggauu

SEQ ID NO: 576982 - RNA, 19 nt, Artificial Sequence
  Description of Artificial Sequence: Synthetic oligonucleotide
  Antisense strand to SEQ ID NO: 576981
aauccugugcugauaagaa

SEQ ID NO: 576983 - RNA, 19 nt, Artificial Sequence
  Description of Artificial Sequence: Synthetic oligonucleotide
  Sense strand starting at position 1633 of SEQ ID NO: 318627
guccuucuccagcaagaag

SEQ ID NO: 576984 - RNA, 19 nt, Artificial Sequence
  Description of Artificial Sequence: Synthetic oligonucleotide
  Antisense strand to SEQ ID NO: 576983
cuucuugcuggagaaggac

SEQ ID NO: 576985 - RNA, 19 nt, Artificial Sequence
  Description of Artificial Sequence: Synthetic oligonucleotide
  Sense strand starting at position 2156 of SEQ ID NO: 318627
uuaccuauucuuugguaga

SEQ ID NO: 576986 - RNA, 19 nt, Artificial Sequence
  Description of Artificial Sequence: Synthetic oligonucleotide
  Antisense strand to SEQ ID NO: 576985
ucuaccaaagaauagguaa

SEQ ID NO: 576987 - RNA, 19 nt, Artificial Sequence
  Description of Artificial Sequence: Synthetic oligonucleotide
  Sense strand starting at position 2158 of SEQ ID NO: 318627
accuauucuuugguagaua

SEQ ID NO: 576988 - RNA, 19 nt, Artificial Sequence
  Description of Artificial Sequence: Synthetic oligonucleotide
  Antisense strand to SEQ ID NO: 576987
uaucuaccaaagaauaggu

SEQ ID NO: 576989 - RNA, 19 nt, Artificial Sequence
  Description of Artificial Sequence: Synthetic oligonucleotide
  Sense strand starting at position 2167 of SEQ ID NO: 318627
uugguagauauauguguau

SEQ ID NO: 576990 - RNA, 19 nt, Artificial Sequence
  Description of Artificial Sequence: Synthetic oligonucleotide
  Antisense strand to SEQ ID NO: 576989
auacacauauaucuaccaa

SEQ ID NO: 576991 - RNA, 19 nt, Artificial Sequence
  Description of Artificial Sequence: Synthetic oligonucleotide
  Sense strand starting at position 2169 of SEQ ID NO: 318627
gguagauauauguguauuc

SEQ ID NO: 576992 - RNA, 19 nt, Artificial Sequence
  Description of Artificial Sequence: Synthetic oligonucleotide
  Antisense strand to SEQ ID NO: 576991
gaauacacauauaucuacc

SEQ ID NO: 576993 - RNA, 19 nt, Artificial Sequence
  Description of Artificial Sequence: Synthetic oligonucleotide
  Sense strand starting at position 2174 of SEQ ID NO: 318627
auauauguguauuccuguu

SEQ ID NO: 576994 - RNA, 19 nt, Artificial Sequence
  Description of Artificial Sequence: Synthetic oligonucleotide
  Antisense strand to SEQ ID NO: 576993
aacaggaauacacauauau

SEQ ID NO: 576995 - RNA, 19 nt, Artificial Sequence
  Description of Artificial Sequence: Synthetic oligonucleotide
  Sense strand starting at position 2176 of SEQ ID NO: 318627
auauguguauuccuguuua

SEQ ID NO: 576996 - RNA, 19 nt, Artificial Sequence
  Description of Artificial Sequence: Synthetic oligonucleotide
  Antisense strand to SEQ ID NO: 576995
uaaacaggaauacacauau

SEQ ID NO: 576997 - RNA, 19 nt, Artificial Sequence
  Description of Artificial Sequence: Synthetic oligonucleotide
  Sense strand starting at position 2181 of SEQ ID NO: 318627
uguauuccuguuuaaucga

SEQ ID NO: 576998 - RNA, 19 nt, Artificial Sequence
  Description of Artificial Sequence: Synthetic oligonucleotide
  Antisense strand to SEQ ID NO: 576997
ucgauuaaacaggaauaca

SEQ ID NO: 576999 - RNA, 19 nt, Artificial Sequence
  Description of Artificial Sequence: Synthetic oligonucleotide
  Sense strand starting at position 2184 of SEQ ID NO: 318627
auuccuguuuaaucgaaua

SEQ ID NO: 577000 - RNA, 19 nt, Artificial Sequence
  Description of Artificial Sequence: Synthetic oligonucleotide
  Antisense strand to SEQ ID NO: 576999
uauucgauuaaacaggaau

SEQ ID NO: 577001 - RNA, 19 nt, Artificial Sequence
  Description of Artificial Sequence: Synthetic oligonucleotide
  Sense strand starting at position 2327 of SEQ ID NO: 318627
uggugagcuugucccauga

SEQ ID NO: 577002 - RNA, 19 nt, Artificial Sequence
  Description of Artificial Sequence: Synthetic oligonucleotide
  Antisense strand to SEQ ID NO: 577001
ucaugggacaagcucacca

SEQ ID NO: 577003 - RNA, 19 nt, Artificial Sequence
  Description of Artificial Sequence: Synthetic oligonucleotide
  Sense strand starting at position 2710 of SEQ ID NO: 318627
ccaggacaguuuguaaaug

SEQ ID NO: 577004 - RNA, 19 nt, Artificial Sequence
  Description of Artificial Sequence: Synthetic oligonucleotide
  Antisense strand to SEQ ID NO: 577003
cauuuacaaacuguccugg

SEQ ID NO: 577005 - RNA, 19 nt, Artificial Sequence
  Description of Artificial Sequence: Synthetic oligonucleotide
  Sense strand starting at position 2932 of SEQ ID NO: 318627
ccugaauucuuuccugagu

SEQ ID NO: 577006 - RNA, 19 nt, Artificial Sequence
  Description of Artificial Sequence: Synthetic oligonucleotide
  Antisense strand to SEQ ID NO: 577005
acucaggaaagaauucagg

SEQ ID NO: 577007 - RNA, 19 nt, Artificial Sequence
  Description of Artificial Sequence: Synthetic oligonucleotide
  Sense strand starting at position 2937 of SEQ ID NO: 318627
auucuuuccugagugagau

SEQ ID NO: 577008 - RNA, 19 nt, Artificial Sequence
  Description of Artificial Sequence: Synthetic oligonucleotide
  Antisense strand to SEQ ID NO: 577007
aucucacucaggaaagaau

SEQ ID NO: 577009 - RNA, 19 nt, Artificial Sequence
  Description of Artificial Sequence: Synthetic oligonucleotide
  Sense strand starting at position 2938 of SEQ ID NO: 318627
uucuuuccugagugagauc

SEQ ID NO: 577010 - RNA, 19 nt, Artificial Sequence
  Description of Artificial Sequence: Synthetic oligonucleotide
  Antisense strand to SEQ ID NO: 577009
gaucucacucaggaaagaa

SEQ ID NO: 577011 - RNA, 19 nt, Artificial Sequence
  Description of Artificial Sequence: Synthetic oligonucleotide
  Sense strand starting at position 3106 of SEQ ID NO: 318627
aguggcuucuugcuggaga

SEQ ID NO: 577012 - RNA, 19 nt, Artificial Sequence
  Description of Artificial Sequence: Synthetic oligonucleotide
  Antisense strand to SEQ ID NO: 577011
ucuccagcaagaagccacu

SEQ ID NO: 577013 - RNA, 19 nt, Artificial Sequence
  Description of Artificial Sequence: Synthetic oligonucleotide
  Sense strand starting at position 3108 of SEQ ID NO: 318627
uggcuucuugcuggagaaa

SEQ ID NO: 577014 - RNA, 19 nt, Artificial Sequence
  Description of Artificial Sequence: Synthetic oligonucleotide
  Antisense strand to SEQ ID NO: 577013
uuucuccagcaagaagcca

SEQ ID NO: 577015 - RNA, 19 nt, Artificial Sequence
  Description of Artificial Sequence: Synthetic oligonucleotide
  Sense strand starting at position 3195 of SEQ ID NO: 318627
gugaguaguagugguaaau

SEQ ID NO: 577016 - RNA, 19 nt, Artificial Sequence
  Description of Artificial Sequence: Synthetic oligonucleotide
  Antisense strand to SEQ ID NO: 577015
auuuaccacuacuacucac

SEQ ID NO: 577017 - RNA, 19 nt, Artificial Sequence
  Description of Artificial Sequence: Synthetic oligonucleotide
  Sense strand starting at position 3201 of SEQ ID NO: 318627
aguagugguaaauguguuu

SEQ ID NO: 577018 - RNA, 19 nt, Artificial Sequence
  Description of Artificial Sequence: Synthetic oligonucleotide
  Antisense strand to SEQ ID NO: 577017
aaacacauuuaccacuacu

SEQ ID NO: 577019 - RNA, 19 nt, Artificial Sequence
  Description of Artificial Sequence: Synthetic oligonucleotide
  Sense strand starting at position 3204 of SEQ ID NO: 318627
agugguaaauguguuuaaa

SEQ ID NO: 577020 - RNA, 19 nt, Artificial Sequence
  Description of Artificial Sequence: Synthetic oligonucleotide
  Antisense strand to SEQ ID NO: 577019
uuuaaacacauuuaccacu

SEQ ID NO: 577021 - RNA, 19 nt, Artificial Sequence
  Description of Artificial Sequence: Synthetic oligonucleotide
  Sense strand starting at position 3392 of SEQ ID NO: 318627
guagauaggugugugcaua

SEQ ID NO: 577022 - RNA, 19 nt, Artificial Sequence
  Description of Artificial Sequence: Synthetic oligonucleotide
  Antisense strand to SEQ ID NO: 577021
uaugcacacaccuaucuac

SEQ ID NO: 577023 - RNA, 19 nt, Artificial Sequence
  Description of Artificial Sequence: Synthetic oligonucleotide
  Sense strand starting at position 3393 of SEQ ID NO: 318627
uagauaggugugugcauaa

SEQ ID NO: 577024 - RNA, 19 nt, Artificial Sequence
  Description of Artificial Sequence: Synthetic oligonucleotide
  Antisense strand to SEQ ID NO: 577023
uuaugcacacaccuaucua

SEQ ID NO: 577025 - RNA, 19 nt, Artificial Sequence
  Description of Artificial Sequence: Synthetic oligonucleotide
  Sense strand starting at position 3436 of SEQ ID NO: 318627
gguagcauuccuuacacaa

SEQ ID NO: 577026 - RNA, 19 nt, Artificial Sequence
  Description of Artificial Sequence: Synthetic oligonucleotide
  Antisense strand to SEQ ID NO: 577025
uuguguaaggaaugcuacc

SEQ ID NO: 577027 - RNA, 19 nt, Artificial Sequence
  Description of Artificial Sequence: Synthetic oligonucleotide
  Sense strand starting at position 3454 of SEQ ID NO: 318627
acuugcuuccuaugguaaa

SEQ ID NO: 577028 - RNA, 19 nt, Artificial Sequence
  Description of Artificial Sequence: Synthetic oligonucleotide
  Antisense strand to SEQ ID NO: 577027
uuuaccauaggaagcaagu

SEQ ID NO: 577029 - RNA, 19 nt, Artificial Sequence
  Description of Artificial Sequence: Synthetic oligonucleotide
  Sense strand starting at position 3528 of SEQ ID NO: 318627
gguggcagucuuuauauga

SEQ ID NO: 577030 - RNA, 19 nt, Artificial Sequence
  Description of Artificial Sequence: Synthetic oligonucleotide
  Antisense strand to SEQ ID NO: 577029
ucauauaaagacugccacc

SEQ ID NO: 577031 - RNA, 19 nt, Artificial Sequence
  Description of Artificial Sequence: Synthetic oligonucleotide
  Sense strand starting at position 3608 of SEQ ID NO: 318627
ugcagugaauaucccuaua

SEQ ID NO: 577032 - RNA, 19 nt, Artificial Sequence
  Description of Artificial Sequence: Synthetic oligonucleotide
  Antisense strand to SEQ ID NO: 577031
uauagggauauucacugca

SEQ ID NO: 577033 - RNA, 19 nt, Artificial Sequence
  Description of Artificial Sequence: Synthetic oligonucleotide
  Sense strand starting at position 3746 of SEQ ID NO: 318627
gguacuaaaugaguacaca

SEQ ID NO: 577034 - RNA, 19 nt, Artificial Sequence
  Description of Artificial Sequence: Synthetic oligonucleotide
  Antisense strand to SEQ ID NO: 577033
uguguacucauuuaguacc

SEQ ID NO: 577035 - RNA, 19 nt, Artificial Sequence
  Description of Artificial Sequence: Synthetic oligonucleotide
  Sense strand starting at position 3919 of SEQ ID NO: 318627
gaaacuauuuggugucuag

SEQ ID NO: 577036 - RNA, 19 nt, Artificial Sequence
  Description of Artificial Sequence: Synthetic oligonucleotide
  Antisense strand to SEQ ID NO: 577035
cuagacaccaaauaguuuc

SEQ ID NO: 577037 - RNA, 19 nt, Artificial Sequence
  Description of Artificial Sequence: Synthetic oligonucleotide
  Sense strand starting at position 204 of SEQ ID NO: 318628
acaagacagucauuggcaa

SEQ ID NO: 577038 - RNA, 19 nt, Artificial Sequence
  Description of Artificial Sequence: Synthetic oligonucleotide
  Antisense strand to SEQ ID NO: 577037
uugccaaugacugucuugu

SEQ ID NO: 577039 - RNA, 19 nt, Artificial Sequence
  Description of Artificial Sequence: Synthetic oligonucleotide
  Sense strand starting at position 424 of SEQ ID NO: 318628
gcagauauuuguuaaauga

SEQ ID NO: 577040 - RNA, 19 nt, Artificial Sequence
  Description of Artificial Sequence: Synthetic oligonucleotide
  Antisense strand to SEQ ID NO: 577039
ucauuuaacaaauaucugc

SEQ ID NO: 577041 - RNA, 19 nt, Artificial Sequence
  Description of Artificial Sequence: Synthetic oligonucleotide
  Sense strand starting at position 501 of SEQ ID NO: 318628
caguguaaacaugguuuau

SEQ ID NO: 577042 - RNA, 19 nt, Artificial Sequence
  Description of Artificial Sequence: Synthetic oligonucleotide
  Antisense strand to SEQ ID NO: 577041
auaaaccauguuuacacug

SEQ ID NO: 577043 - RNA, 19 nt, Artificial Sequence
  Description of Artificial Sequence: Synthetic oligonucleotide
  Sense strand starting at position 503 of SEQ ID NO: 318628
guguaaacaugguuuauac

SEQ ID NO: 577044 - RNA, 19 nt, Artificial Sequence
  Description of Artificial Sequence: Synthetic oligonucleotide
  Antisense strand to SEQ ID NO: 577043
guauaaaccauguuuacac

SEQ ID NO: 577045 - RNA, 19 nt, Artificial Sequence
  Description of Artificial Sequence: Synthetic oligonucleotide
  Sense strand starting at position 505 of SEQ ID NO: 318628
guaaacaugguuuauacuu

SEQ ID NO: 577046 - RNA, 19 nt, Artificial Sequence
  Description of Artificial Sequence: Synthetic oligonucleotide
  Antisense strand to SEQ ID NO: 577045
aaguauaaaccauguuuac

SEQ ID NO: 577047 - RNA, 19 nt, Artificial Sequence
  Description of Artificial Sequence: Synthetic oligonucleotide
  Sense strand starting at position 619 of SEQ ID NO: 318628
ugagauauaaaguggaguu

SEQ ID NO: 577048 - RNA, 19 nt, Artificial Sequence
  Description of Artificial Sequence: Synthetic oligonucleotide
  Antisense strand to SEQ ID NO: 577047
aacuccacuuuauaucuca

SEQ ID NO: 577049 - RNA, 19 nt, Artificial Sequence
  Description of Artificial Sequence: Synthetic oligonucleotide
  Sense strand starting at position 620 of SEQ ID NO: 318628
gagauauaaaguggaguug

SEQ ID NO: 577050 - RNA, 19 nt, Artificial Sequence
  Description of Artificial Sequence: Synthetic oligonucleotide
  Antisense strand to SEQ ID NO: 577049
caacuccacuuuauaucuc

SEQ ID NO: 577051 - RNA, 19 nt, Artificial Sequence
  Description of Artificial Sequence: Synthetic oligonucleotide
  Sense strand starting at position 685 of SEQ ID NO: 318628
uaaggauugaugggcugau

SEQ ID NO: 577052 - RNA, 19 nt, Artificial Sequence
  Description of Artificial Sequence: Synthetic oligonucleotide
  Antisense strand to SEQ ID NO: 577051
aucagcccaucaauccuua

SEQ ID NO: 577053 - RNA, 19 nt, Artificial Sequence
  Description of Artificial Sequence: Synthetic oligonucleotide
  Sense strand starting at position 689 of SEQ ID NO: 318628
gauugaugggcugauaggu

SEQ ID NO: 577054 - RNA, 19 nt, Artificial Sequence
  Description of Artificial Sequence: Synthetic oligonucleotide
  Antisense strand to SEQ ID NO: 577053
accuaucagcccaucaauc

SEQ ID NO: 577055 - RNA, 19 nt, Artificial Sequence
  Description of Artificial Sequence: Synthetic oligonucleotide
  Sense strand starting at position 896 of SEQ ID NO: 318628
ccaucaggcuuguuugaaa

SEQ ID NO: 577056 - RNA, 19 nt, Artificial Sequence
  Description of Artificial Sequence: Synthetic oligonucleotide
  Antisense strand to SEQ ID NO: 577055
uuucaaacaagccugaugg

SEQ ID NO: 577057 - RNA, 19 nt, Artificial Sequence
  Description of Artificial Sequence: Synthetic oligonucleotide
  Sense strand starting at position 1134 of SEQ ID NO: 318628
aguuuacuaccguggaaag

SEQ ID NO: 577058 - RNA, 19 nt, Artificial Sequence
  Description of Artificial Sequence: Synthetic oligonucleotide
  Antisense strand to SEQ ID NO: 577057
cuuuccacgguaguaaacu

SEQ ID NO: 577059 - RNA, 19 nt, Artificial Sequence
  Description of Artificial Sequence: Synthetic oligonucleotide
  Sense strand starting at position 1326 of SEQ ID NO: 318628
gggcuauuugcuuaugguu

SEQ ID NO: 577060 - RNA, 19 nt, Artificial Sequence
  Description of Artificial Sequence: Synthetic oligonucleotide
  Antisense strand to SEQ ID NO: 577059
aaccauaagcaaauagccc

SEQ ID NO: 577061 - RNA, 19 nt, Artificial Sequence
  Description of Artificial Sequence: Synthetic oligonucleotide
  Sense strand starting at position 1396 of SEQ ID NO: 318628
cagacagcuguguggauuu

SEQ ID NO: 577062 - RNA, 19 nt, Artificial Sequence
  Description of Artificial Sequence: Synthetic oligonucleotide
  Antisense strand to SEQ ID NO: 577061
aaauccacacagcugucug

SEQ ID NO: 577063 - RNA, 19 nt, Artificial Sequence
  Description of Artificial Sequence: Synthetic oligonucleotide
  Sense strand starting at position 2003 of SEQ ID NO: 318628
cgggauaacucucugcaga

SEQ ID NO: 577064 - RNA, 19 nt, Artificial Sequence
  Description of Artificial Sequence: Synthetic oligonucleotide
  Antisense strand to SEQ ID NO: 577063
ucugcagagaguuaucccg

SEQ ID NO: 577065 - RNA, 19 nt, Artificial Sequence
  Description of Artificial Sequence: Synthetic oligonucleotide
  Sense strand starting at position 2004 of SEQ ID NO: 318628
gggauaacucucugcagag

SEQ ID NO: 577066 - RNA, 19 nt, Artificial Sequence
  Description of Artificial Sequence: Synthetic oligonucleotide
  Antisense strand to SEQ ID NO: 577065
cucugcagagaguuauccc

SEQ ID NO: 577067 - RNA, 19 nt, Artificial Sequence
  Description of Artificial Sequence: Synthetic oligonucleotide
  Sense strand starting at position 2068 of SEQ ID NO: 318628
ggaacugucaccgaggcua

SEQ ID NO: 577068 - RNA, 19 nt, Artificial Sequence
  Description of Artificial Sequence: Synthetic oligonucleotide
  Antisense strand to SEQ ID NO: 577067
uagccucggugacaguucc

SEQ ID NO: 577069 - RNA, 19 nt, Artificial Sequence
  Description of Artificial Sequence: Synthetic oligonucleotide
  Sense strand starting at position 2205 of SEQ ID NO: 318628
agacaaaccguagaucuuu

SEQ ID NO: 577070 - RNA, 19 nt, Artificial Sequence
  Description of Artificial Sequence: Synthetic oligonucleotide
  Antisense strand to SEQ ID NO: 577069
aaagaucuacgguuugucu

SEQ ID NO: 577071 - RNA, 19 nt, Artificial Sequence
  Description of Artificial Sequence: Synthetic oligonucleotide
  Sense strand starting at position 2239 of SEQ ID NO: 318628
ucuccugguucccuaagau

SEQ ID NO: 577072 - RNA, 19 nt, Artificial Sequence
  Description of Artificial Sequence: Synthetic oligonucleotide
  Antisense strand to SEQ ID NO: 577071
aucuuagggaaccaggaga

SEQ ID NO: 577073 - RNA, 19 nt, Artificial Sequence
  Description of Artificial Sequence: Synthetic oligonucleotide
  Sense strand starting at position 2452 of SEQ ID NO: 318628
aguuaaaugaagcguaaag

SEQ ID NO: 577074 - RNA, 19 nt, Artificial Sequence
  Description of Artificial Sequence: Synthetic oligonucleotide
  Antisense strand to SEQ ID NO: 577073
cuuuacgcuucauuuaacu

SEQ ID NO: 577075 - RNA, 19 nt, Artificial Sequence
  Description of Artificial Sequence: Synthetic oligonucleotide
  Sense strand starting at position 2725 of SEQ ID NO: 318628
ggaugccuuacugaaggua

SEQ ID NO: 577076 - RNA, 19 nt, Artificial Sequence
  Description of Artificial Sequence: Synthetic oligonucleotide
  Antisense strand to SEQ ID NO: 577075
uaccuucaguaaggcaucc

SEQ ID NO: 577077 - RNA, 19 nt, Artificial Sequence
  Description of Artificial Sequence: Synthetic oligonucleotide
  Sense strand starting at position 2753 of SEQ ID NO: 318628
gguaguaauuacuuaguga

SEQ ID NO: 577078 - RNA, 19 nt, Artificial Sequence
  Description of Artificial Sequence: Synthetic oligonucleotide
  Antisense strand to SEQ ID NO: 577077
ucacuaaguaauuacuacc

SEQ ID NO: 577079 - RNA, 19 nt, Artificial Sequence
  Description of Artificial Sequence: Synthetic oligonucleotide
  Sense strand starting at position 2777 of SEQ ID NO: 318628
cgccaauguagucagaaau

SEQ ID NO: 577080 - RNA, 19 nt, Artificial Sequence
  Description of Artificial Sequence: Synthetic oligonucleotide
  Antisense strand to SEQ ID NO: 577079
auuucugacuacauuggcg

SEQ ID NO: 577081 - RNA, 19 nt, Artificial Sequence
  Description of Artificial Sequence: Synthetic oligonucleotide
  Sense strand starting at position 2783 of SEQ ID NO: 318628
uguagucagaaauaccgua

SEQ ID NO: 577082 - RNA, 19 nt, Artificial Sequence
  Description of Artificial Sequence: Synthetic oligonucleotide
  Antisense strand to SEQ ID NO: 577081
uacgguauuucugacuaca

SEQ ID NO: 577083 - RNA, 19 nt, Artificial Sequence
  Description of Artificial Sequence: Synthetic oligonucleotide
  Sense strand starting at position 2788 of SEQ ID NO: 318628
ucagaaauaccguauuaug

SEQ ID NO: 577084 - RNA, 19 nt, Artificial Sequence
  Description of Artificial Sequence: Synthetic oligonucleotide
  Antisense strand to SEQ ID NO: 577083
cauaauacgguauuucuga

SEQ ID NO: 577085 - RNA, 19 nt, Artificial Sequence
  Description of Artificial Sequence: Synthetic oligonucleotide
  Sense strand starting at position 2835 of SEQ ID NO: 318628
ggaguugauucuccaacca

SEQ ID NO: 577086 - RNA, 19 nt, Artificial Sequence
  Description of Artificial Sequence: Synthetic oligonucleotide
  Antisense strand to SEQ ID NO: 577085
ugguuggagaaucaacucc

SEQ ID NO: 577087 - RNA, 19 nt, Artificial Sequence
  Description of Artificial Sequence: Synthetic oligonucleotide
  Sense strand starting at position 2874 of SEQ ID NO: 318628
accugaacucuuuggguaa

SEQ ID NO: 577088 - RNA, 19 nt, Artificial Sequence
  Description of Artificial Sequence: Synthetic oligonucleotide
  Antisense strand to SEQ ID NO: 577087
uuacccaaagaguucaggu

SEQ ID NO: 577089 - RNA, 19 nt, Artificial Sequence
  Description of Artificial Sequence: Synthetic oligonucleotide
  Sense strand starting at position 2877 of SEQ ID NO: 318628
ugaacucuuuggguaagca

SEQ ID NO: 577090 - RNA, 19 nt, Artificial Sequence
  Description of Artificial Sequence: Synthetic oligonucleotide
  Antisense strand to SEQ ID NO: 577089
ugcuuacccaaagaguuca

SEQ ID NO: 577091 - RNA, 19 nt, Artificial Sequence
  Description of Artificial Sequence: Synthetic oligonucleotide
  Sense strand starting at position 2949 of SEQ ID NO: 318628
cucuuuggcgauugacaaa

SEQ ID NO: 577092 - RNA, 19 nt, Artificial Sequence
  Description of Artificial Sequence: Synthetic oligonucleotide
  Antisense strand to SEQ ID NO: 577091
uuugucaaucgccaaagag

SEQ ID NO: 577093 - RNA, 19 nt, Artificial Sequence
  Description of Artificial Sequence: Synthetic oligonucleotide
  Sense strand starting at position 2962 of SEQ ID NO: 318628
gacaaagucgaccauuguu

SEQ ID NO: 577094 - RNA, 19 nt, Artificial Sequence
  Description of Artificial Sequence: Synthetic oligonucleotide
  Antisense strand to SEQ ID NO: 577093
aacaauggucgacuuuguc

SEQ ID NO: 577095 - RNA, 19 nt, Artificial Sequence
  Description of Artificial Sequence: Synthetic oligonucleotide
  Sense strand starting at position 3592 of SEQ ID NO: 318628
aucuuaaauugguuacaag

SEQ ID NO: 577096 - RNA, 19 nt, Artificial Sequence
  Description of Artificial Sequence: Synthetic oligonucleotide
  Antisense strand to SEQ ID NO: 577095
cuuguaaccaauuuaagau

SEQ ID NO: 577097 - RNA, 19 nt, Artificial Sequence
  Description of Artificial Sequence: Synthetic oligonucleotide
  Sense strand starting at position 3593 of SEQ ID NO: 318628
ucuuaaauugguuacaagu

SEQ ID NO: 577098 - RNA, 19 nt, Artificial Sequence
  Description of Artificial Sequence: Synthetic oligonucleotide
  Antisense strand to SEQ ID NO: 577097
acuuguaaccaauuuaaga

SEQ ID NO: 577099 - RNA, 19 nt, Artificial Sequence
  Description of Artificial Sequence: Synthetic oligonucleotide
  Sense strand starting at position 3667 of SEQ ID NO: 318628
gccacauauguuuagaaua

SEQ ID NO: 577100 - RNA, 19 nt, Artificial Sequence
  Description of Artificial Sequence: Synthetic oligonucleotide
  Antisense strand to SEQ ID NO: 577099
uauucuaaacauauguggc

SEQ ID NO: 577101 - RNA, 19 nt, Artificial Sequence
  Description of Artificial Sequence: Synthetic oligonucleotide
  Sense strand starting at position 3688 of SEQ ID NO: 318628
uucuaugugcuagacauua

SEQ ID NO: 577102 - RNA, 19 nt, Artificial Sequence
  Description of Artificial Sequence: Synthetic oligonucleotide
  Antisense strand to SEQ ID NO: 577101
uaaugucuagcacauagaa

SEQ ID NO: 577103 - RNA, 19 nt, Artificial Sequence
  Description of Artificial Sequence: Synthetic oligonucleotide
  Sense strand starting at position 3693 of SEQ ID NO: 318628
ugugcuagacauuagggau

SEQ ID NO: 577104 - RNA, 19 nt, Artificial Sequence
  Description of Artificial Sequence: Synthetic oligonucleotide
  Antisense strand to SEQ ID NO: 577103
aucccuaaugucuagcaca

SEQ ID NO: 577105 - RNA, 19 nt, Artificial Sequence
  Description of Artificial Sequence: Synthetic oligonucleotide
  Sense strand starting at position 3705 of SEQ ID NO: 318628
uagggauauugugcgaaca

SEQ ID NO: 577106 - RNA, 19 nt, Artificial Sequence
  Description of Artificial Sequence: Synthetic oligonucleotide
  Antisense strand to SEQ ID NO: 577105
uguucgcacaauaucccua

SEQ ID NO: 577107 - RNA, 19 nt, Artificial Sequence
  Description of Artificial Sequence: Synthetic oligonucleotide
  Sense strand starting at position 3706 of SEQ ID NO: 318628
agggauauugugcgaacag

SEQ ID NO: 577108 - RNA, 19 nt, Artificial Sequence
  Description of Artificial Sequence: Synthetic oligonucleotide
  Antisense strand to SEQ ID NO: 577107
cuguucgcacaauaucccu

SEQ ID NO: 577109 - RNA, 19 nt, Artificial Sequence
  Description of Artificial Sequence: Synthetic oligonucleotide
  Sense strand starting at position 3731 of SEQ ID NO: 318628
caguccuaguucucaugga

SEQ ID NO: 577110 - RNA, 19 nt, Artificial Sequence
  Description of Artificial Sequence: Synthetic oligonucleotide
  Antisense strand to SEQ ID NO: 577109
uccaugagaacuaggacug

SEQ ID NO: 577111 - RNA, 19 nt, Artificial Sequence
  Description of Artificial Sequence: Synthetic oligonucleotide
  Sense strand starting at position 3735 of SEQ ID NO: 318628
ccuaguucucauggagauu

SEQ ID NO: 577112 - RNA, 19 nt, Artificial Sequence
  Description of Artificial Sequence: Synthetic oligonucleotide
  Antisense strand to SEQ ID NO: 577111
aaucuccaugagaacuagg

SEQ ID NO: 577113 - RNA, 19 nt, Artificial Sequence
  Description of Artificial Sequence: Synthetic oligonucleotide
  Sense strand starting at position 3753 of SEQ ID NO: 318628
uuuauagucuaaucuggga

SEQ ID NO: 577114 - RNA, 19 nt, Artificial Sequence
  Description of Artificial Sequence: Synthetic oligonucleotide
  Antisense strand to SEQ ID NO: 577113
ucccagauuagacuauaaa

SEQ ID NO: 577115 - RNA, 19 nt, Artificial Sequence
  Description of Artificial Sequence: Synthetic oligonucleotide
  Sense strand starting at position 3757 of SEQ ID NO: 318628
uagucuaaucugggagaca

SEQ ID NO: 577116 - RNA, 19 nt, Artificial Sequence
  Description of Artificial Sequence: Synthetic oligonucleotide
  Antisense strand to SEQ ID NO: 577115
ugucucccagauuagacua

SEQ ID NO: 577117 - RNA, 19 nt, Artificial Sequence
  Description of Artificial Sequence: Synthetic oligonucleotide
  Sense strand starting at position 130 of SEQ ID NO: 318629
cagaaaggcugccuagaaa

SEQ ID NO: 577118 - RNA, 19 nt, Artificial Sequence
  Description of Artificial Sequence: Synthetic oligonucleotide
  Antisense strand to SEQ ID NO: 577117
uuucuaggcagccuuucug

SEQ ID NO: 577119 - RNA, 19 nt, Artificial Sequence
  Description of Artificial Sequence: Synthetic oligonucleotide
  Sense strand starting at position 141 of SEQ ID NO: 318629
ccuagaaacccuggugaag

SEQ ID NO: 577120 - RNA, 19 nt, Artificial Sequence
  Description of Artificial Sequence: Synthetic oligonucleotide
  Antisense strand to SEQ ID NO: 577119
cuucaccaggguuucuagg

SEQ ID NO: 577121 - RNA, 19 nt, Artificial Sequence
  Description of Artificial Sequence: Synthetic oligonucleotide
  Sense strand starting at position 235 of SEQ ID NO: 318629
ccugcauggguuugaggaa

SEQ ID NO: 577122 - RNA, 19 nt, Artificial Sequence
  Description of Artificial Sequence: Synthetic oligonucleotide
  Antisense strand to SEQ ID NO: 577121
uuccucaaacccaugcagg

SEQ ID NO: 577123 - RNA, 19 nt, Artificial Sequence
  Description of Artificial Sequence: Synthetic oligonucleotide
  Sense strand starting at position 346 of SEQ ID NO: 318629
auuauacauucucugggua

SEQ ID NO: 577124 - RNA, 19 nt, Artificial Sequence
  Description of Artificial Sequence: Synthetic oligonucleotide
  Antisense strand to SEQ ID NO: 577123
uacccagagaauguauaau

SEQ ID NO: 577125 - RNA, 19 nt, Artificial Sequence
  Description of Artificial Sequence: Synthetic oligonucleotide
  Sense strand starting at position 349 of SEQ ID NO: 318629
auacauucucuggguacca

SEQ ID NO: 577126 - RNA, 19 nt, Artificial Sequence
  Description of Artificial Sequence: Synthetic oligonucleotide
  Antisense strand to SEQ ID NO: 577125
ugguacccagagaauguau

SEQ ID NO: 577127 - RNA, 19 nt, Artificial Sequence
  Description of Artificial Sequence: Synthetic oligonucleotide
  Sense strand starting at position 411 of SEQ ID NO: 318629
ucccaaacucuguguccaa

SEQ ID NO: 577128 - RNA, 19 nt, Artificial Sequence
  Description of Artificial Sequence: Synthetic oligonucleotide
  Antisense strand to SEQ ID NO: 577127
uuggacacagaguuuggga

SEQ ID NO: 577129 - RNA, 19 nt, Artificial Sequence
  Description of Artificial Sequence: Synthetic oligonucleotide
  Sense strand starting at position 412 of SEQ ID NO: 318629
cccaaacucuguguccaaa

SEQ ID NO: 577130 - RNA, 19 nt, Artificial Sequence
  Description of Artificial Sequence: Synthetic oligonucleotide
  Antisense strand to SEQ ID NO: 577129
uuuggacacagaguuuggg

SEQ ID NO: 577131 - RNA, 19 nt, Artificial Sequence
  Description of Artificial Sequence: Synthetic oligonucleotide
  Sense strand starting at position 725 of SEQ ID NO: 318629
gggccuggccaccauaaau

SEQ ID NO: 577132 - RNA, 19 nt, Artificial Sequence
  Description of Artificial Sequence: Synthetic oligonucleotide
  Antisense strand to SEQ ID NO: 577131
auuuaugguggccaggccc

SEQ ID NO: 577133 - RNA, 19 nt, Artificial Sequence
  Description of Artificial Sequence: Synthetic oligonucleotide
  Sense strand starting at position 754 of SEQ ID NO: 318629
acauuugccgaguggcuaa

SEQ ID NO: 577134 - RNA, 19 nt, Artificial Sequence
  Description of Artificial Sequence: Synthetic oligonucleotide
  Antisense strand to SEQ ID NO: 577133
uuagccacucggcaaaugu

SEQ ID NO: 577135 - RNA, 19 nt, Artificial Sequence
  Description of Artificial Sequence: Synthetic oligonucleotide
  Sense strand starting at position 822 of SEQ ID NO: 318629
augggaucaugucucaaag

SEQ ID NO: 577136 - RNA, 19 nt, Artificial Sequence
  Description of Artificial Sequence: Synthetic oligonucleotide
  Antisense strand to SEQ ID NO: 577135
cuuugagacaugaucccau

SEQ ID NO: 577137 - RNA, 19 nt, Artificial Sequence
  Description of Artificial Sequence: Synthetic oligonucleotide
  Sense strand starting at position 932 of SEQ ID NO: 318629
agguuaauggcugagaccu

SEQ ID NO: 577138 - RNA, 19 nt, Artificial Sequence
  Description of Artificial Sequence: Synthetic oligonucleotide
  Antisense strand to SEQ ID NO: 577137
aggucucagccauuaaccu

SEQ ID NO: 577139 - RNA, 19 nt, Artificial Sequence
  Description of Artificial Sequence: Synthetic oligonucleotide
  Sense strand starting at position 1850 of SEQ ID NO: 318629
gagcucuugagagggagua

SEQ ID NO: 577140 - RNA, 19 nt, Artificial Sequence
  Description of Artificial Sequence: Synthetic oligonucleotide
  Antisense strand to SEQ ID NO: 577139
uacucccucucaagagcuc

SEQ ID NO: 577141 - RNA, 19 nt, Artificial Sequence
  Description of Artificial Sequence: Synthetic oligonucleotide
  Sense strand starting at position 2376 of SEQ ID NO: 318629
gcaguaaauggccacucau

SEQ ID NO: 577142 - RNA, 19 nt, Artificial Sequence
  Description of Artificial Sequence: Synthetic oligonucleotide
  Antisense strand to SEQ ID NO: 577141
augaguggccauuuacugc

SEQ ID NO: 577143 - RNA, 19 nt, Artificial Sequence
  Description of Artificial Sequence: Synthetic oligonucleotide
  Sense strand starting at position 2401 of SEQ ID NO: 318629
ugaucucuccugcagaaca

SEQ ID NO: 577144 - RNA, 19 nt, Artificial Sequence
  Description of Artificial Sequence: Synthetic oligonucleotide
  Antisense strand to SEQ ID NO: 577143
uguucugcaggagagauca

SEQ ID NO: 577145 - RNA, 19 nt, Artificial Sequence
  Description of Artificial Sequence: Synthetic oligonucleotide
  Sense strand starting at position 2420 of SEQ ID NO: 318629
gugagaagguggucucuca

SEQ ID NO: 577146 - RNA, 19 nt, Artificial Sequence
  Description of Artificial Sequence: Synthetic oligonucleotide
  Antisense strand to SEQ ID NO: 577145
ugagagaccaccuucucac

SEQ ID NO: 577147 - RNA, 19 nt, Artificial Sequence
  Description of Artificial Sequence: Synthetic oligonucleotide
  Sense strand starting at position 2464 of SEQ ID NO: 318629
ugccuauuugcaugcaguu

SEQ ID NO: 577148 - RNA, 19 nt, Artificial Sequence
  Description of Artificial Sequence: Synthetic oligonucleotide
  Antisense strand to SEQ ID NO: 577147
aacugcaugcaaauaggca

SEQ ID NO: 577149 - RNA, 19 nt, Artificial Sequence
  Description of Artificial Sequence: Synthetic oligonucleotide
  Sense strand starting at position 2622 of SEQ ID NO: 318629
uuuauaguucuauacguac

SEQ ID NO: 577150 - RNA, 19 nt, Artificial Sequence
  Description of Artificial Sequence: Synthetic oligonucleotide
  Antisense strand to SEQ ID NO: 577149
guacguauagaacuauaaa

SEQ ID NO: 577151 - RNA, 19 nt, Artificial Sequence
  Description of Artificial Sequence: Synthetic oligonucleotide
  Sense strand starting at position 2625 of SEQ ID NO: 318629
auaguucuauacguacauu

SEQ ID NO: 577152 - RNA, 19 nt, Artificial Sequence
  Description of Artificial Sequence: Synthetic oligonucleotide
  Antisense strand to SEQ ID NO: 577151
aauguacguauagaacuau

SEQ ID NO: 577153 - RNA, 19 nt, Artificial Sequence
  Description of Artificial Sequence: Synthetic oligonucleotide
  Sense strand starting at position 2651 of SEQ ID NO: 318629
uucugacauguguaagguu

SEQ ID NO: 577154 - RNA, 19 nt, Artificial Sequence
  Description of Artificial Sequence: Synthetic oligonucleotide
  Antisense strand to SEQ ID NO: 577153
aaccuuacacaugucagaa

SEQ ID NO: 577155 - RNA, 19 nt, Artificial Sequence
  Description of Artificial Sequence: Synthetic oligonucleotide
  Sense strand starting at position 2727 of SEQ ID NO: 318629
uuccgaaaugaccauguuu

SEQ ID NO: 577156 - RNA, 19 nt, Artificial Sequence
  Description of Artificial Sequence: Synthetic oligonucleotide
  Antisense strand to SEQ ID NO: 577155
aaacauggucauuucggaa

SEQ ID NO: 577157 - RNA, 19 nt, Artificial Sequence
  Description of Artificial Sequence: Synthetic oligonucleotide
  Sense strand starting at position 2972 of SEQ ID NO: 318629
guugucugucuauauaaau

SEQ ID NO: 577158 - RNA, 19 nt, Artificial Sequence
  Description of Artificial Sequence: Synthetic oligonucleotide
  Antisense strand to SEQ ID NO: 577157
auuuauauagacagacaac

SEQ ID NO: 577159 - RNA, 19 nt, Artificial Sequence
  Description of Artificial Sequence: Synthetic oligonucleotide
  Sense strand starting at position 2989 of SEQ ID NO: 318629
auguuagaaucaguuuguu

SEQ ID NO: 577160 - RNA, 19 nt, Artificial Sequence
  Description of Artificial Sequence: Synthetic oligonucleotide
  Antisense strand to SEQ ID NO: 577159
aacaaacugauucuaacau

SEQ ID NO: 577161 - RNA, 19 nt, Artificial Sequence
  Description of Artificial Sequence: Synthetic oligonucleotide
  Sense strand starting at position 3001 of SEQ ID NO: 318629
guuuguuaauagccacaaa

SEQ ID NO: 577162 - RNA, 19 nt, Artificial Sequence
  Description of Artificial Sequence: Synthetic oligonucleotide
  Antisense strand to SEQ ID NO: 577161
uuuguggcuauuaacaaac

SEQ ID NO: 577163 - RNA, 19 nt, Artificial Sequence
  Description of Artificial Sequence: Synthetic oligonucleotide
  Sense strand starting at position 3331 of SEQ ID NO: 318629
uccugcaaucguccguuaa

SEQ ID NO: 577164 - RNA, 19 nt, Artificial Sequence
  Description of Artificial Sequence: Synthetic oligonucleotide
  Antisense strand to SEQ ID NO: 577163
uuaacggacgauugcagga

SEQ ID NO: 577165 - RNA, 19 nt, Artificial Sequence
  Description of Artificial Sequence: Synthetic oligonucleotide
  Sense strand starting at position 3374 of SEQ ID NO: 318629
uuugucaauuccuuuggau

SEQ ID NO: 577166 - RNA, 19 nt, Artificial Sequence
  Description of Artificial Sequence: Synthetic oligonucleotide
  Antisense strand to SEQ ID NO: 577165
auccaaaggaauugacaaa

SEQ ID NO: 577167 - RNA, 19 nt, Artificial Sequence
  Description of Artificial Sequence: Synthetic oligonucleotide
  Sense strand starting at position 3408 of SEQ ID NO: 318629
uuacgucaucugcaaauaa

SEQ ID NO: 577168 - RNA, 19 nt, Artificial Sequence
  Description of Artificial Sequence: Synthetic oligonucleotide
  Antisense strand to SEQ ID NO: 577167
uuauuugcagaugacguaa

SEQ ID NO: 577169 - RNA, 19 nt, Artificial Sequence
  Description of Artificial Sequence: Synthetic oligonucleotide
  Sense strand starting at position 3502 of SEQ ID NO: 318629
uugguuaaacgauguugaa

SEQ ID NO: 577170 - RNA, 19 nt, Artificial Sequence
  Description of Artificial Sequence: Synthetic oligonucleotide
  Antisense strand to SEQ ID NO: 577169
uucaacaucguuuaaccaa

SEQ ID NO: 577171 - RNA, 19 nt, Artificial Sequence
  Description of Artificial Sequence: Synthetic oligonucleotide
  Sense strand starting at position 3533 of SEQ ID NO: 318629
gaggaaauguccuugucuu

SEQ ID NO: 577172 - RNA, 19 nt, Artificial Sequence
  Description of Artificial Sequence: Synthetic oligonucleotide
  Antisense strand to SEQ ID NO: 577171
aagacaaggacauuuccuc

SEQ ID NO: 577173 - RNA, 19 nt, Artificial Sequence
  Description of Artificial Sequence: Synthetic oligonucleotide
  Sense strand starting at position 3534 of SEQ ID NO: 318629
aggaaauguccuugucuug

SEQ ID NO: 577174 - RNA, 19 nt, Artificial Sequence
  Description of Artificial Sequence: Synthetic oligonucleotide
  Antisense strand to SEQ ID NO: 577173
caagacaaggacauuuccu

SEQ ID NO: 577175 - RNA, 19 nt, Artificial Sequence
  Description of Artificial Sequence: Synthetic oligonucleotide
  Sense strand starting at position 3576 of SEQ ID NO: 318629
ucugguuucuuaucaguaa

SEQ ID NO: 577176 - RNA, 19 nt, Artificial Sequence
  Description of Artificial Sequence: Synthetic oligonucleotide
  Antisense strand to SEQ ID NO: 577175
uuacugauaagaaaccaga

SEQ ID NO: 577177 - RNA, 19 nt, Artificial Sequence
  Description of Artificial Sequence: Synthetic oligonucleotide
  Sense strand starting at position 3579 of SEQ ID NO: 318629
gguuucuuaucaguaagua

SEQ ID NO: 577178 - RNA, 19 nt, Artificial Sequence
  Description of Artificial Sequence: Synthetic oligonucleotide
  Antisense strand to SEQ ID NO: 577177
uacuuacugauaagaaacc

SEQ ID NO: 577179 - RNA, 19 nt, Artificial Sequence
  Description of Artificial Sequence: Synthetic oligonucleotide
  Sense strand starting at position 3580 of SEQ ID NO: 318629
guuucuuaucaguaaguau

SEQ ID NO: 577180 - RNA, 19 nt, Artificial Sequence
  Description of Artificial Sequence: Synthetic oligonucleotide
  Antisense strand to SEQ ID NO: 577179
auacuuacugauaagaaac

SEQ ID NO: 577181 - RNA, 19 nt, Artificial Sequence
  Description of Artificial Sequence: Synthetic oligonucleotide
  Sense strand starting at position 3583 of SEQ ID NO: 318629
ucuuaucaguaaguaugau

SEQ ID NO: 577182 - RNA, 19 nt, Artificial Sequence
  Description of Artificial Sequence: Synthetic oligonucleotide
  Antisense strand to SEQ ID NO: 577181
aucauacuuacugauaaga

SEQ ID NO: 577183 - RNA, 19 nt, Artificial Sequence
  Description of Artificial Sequence: Synthetic oligonucleotide
  Sense strand starting at position 3598 of SEQ ID NO: 318629
ugauguuaacugcaggauu

SEQ ID NO: 577184 - RNA, 19 nt, Artificial Sequence
  Description of Artificial Sequence: Synthetic oligonucleotide
  Antisense strand to SEQ ID NO: 577183
aauccugcaguuaacauca

SEQ ID NO: 577185 - RNA, 19 nt, Artificial Sequence
  Description of Artificial Sequence: Synthetic oligonucleotide
  Sense strand starting at position 3651 of SEQ ID NO: 318629
ucauuuauuccugguuugu

SEQ ID NO: 577186 - RNA, 19 nt, Artificial Sequence
  Description of Artificial Sequence: Synthetic oligonucleotide
  Antisense strand to SEQ ID NO: 577185
acaaaccaggaauaaauga

SEQ ID NO: 577187 - RNA, 19 nt, Artificial Sequence
  Description of Artificial Sequence: Synthetic oligonucleotide
  Sense strand starting at position 3655 of SEQ ID NO: 318629
uuauuccugguuuguugaa

SEQ ID NO: 577188 - RNA, 19 nt, Artificial Sequence
  Description of Artificial Sequence: Synthetic oligonucleotide
  Antisense strand to SEQ ID NO: 577187
uucaacaaaccaggaauaa

SEQ ID NO: 577189 - RNA, 19 nt, Artificial Sequence
  Description of Artificial Sequence: Synthetic oligonucleotide
  Sense strand starting at position 3657 of SEQ ID NO: 318629
auuccugguuuguugaaga

SEQ ID NO: 577190 - RNA, 19 nt, Artificial Sequence
  Description of Artificial Sequence: Synthetic oligonucleotide
  Antisense strand to SEQ ID NO: 577189
ucuucaacaaaccaggaau

SEQ ID NO: 577191 - RNA, 19 nt, Artificial Sequence
  Description of Artificial Sequence: Synthetic oligonucleotide
  Sense strand starting at position 3704 of SEQ ID NO: 318629
agaauuccaugcccagaua

SEQ ID NO: 577192 - RNA, 19 nt, Artificial Sequence
  Description of Artificial Sequence: Synthetic oligonucleotide
  Antisense strand to SEQ ID NO: 577191
uaucugggcauggaauucu

SEQ ID NO: 577193 - RNA, 19 nt, Artificial Sequence
  Description of Artificial Sequence: Synthetic oligonucleotide
  Sense strand starting at position 3773 of SEQ ID NO: 318629
ugaagaauuugccaacagu

SEQ ID NO: 577194 - RNA, 19 nt, Artificial Sequence
  Description of Artificial Sequence: Synthetic oligonucleotide
  Antisense strand to SEQ ID NO: 577193
acuguuggcaaauucuuca

SEQ ID NO: 577195 - RNA, 19 nt, Artificial Sequence
  Description of Artificial Sequence: Synthetic oligonucleotide
  Sense strand starting at position 3790 of SEQ ID NO: 318629
guacaccuacucuaaagua

SEQ ID NO: 577196 - RNA, 19 nt, Artificial Sequence
  Description of Artificial Sequence: Synthetic oligonucleotide
  Antisense strand to SEQ ID NO: 577195
uacuuuagaguagguguac

SEQ ID NO: 577197 - RNA, 19 nt, Artificial Sequence
  Description of Artificial Sequence: Synthetic oligonucleotide
  Sense strand starting at position 96 of SEQ ID NO: 318630
gucccuucucaaggguaga

SEQ ID NO: 577198 - RNA, 19 nt, Artificial Sequence
  Description of Artificial Sequence: Synthetic oligonucleotide
  Antisense strand to SEQ ID NO: 577197
ucuacccuugagaagggac

SEQ ID NO: 577199 - RNA, 19 nt, Artificial Sequence
  Description of Artificial Sequence: Synthetic oligonucleotide
  Sense strand starting at position 153 of SEQ ID NO: 318630
ugacauguacuauguauua

SEQ ID NO: 577200 - RNA, 19 nt, Artificial Sequence
  Description of Artificial Sequence: Synthetic oligonucleotide
  Antisense strand to SEQ ID NO: 577199
uaauacauaguacauguca

SEQ ID NO: 577201 - RNA, 19 nt, Artificial Sequence
  Description of Artificial Sequence: Synthetic oligonucleotide
  Sense strand starting at position 278 of SEQ ID NO: 318630
gagguuacggaguacuacu

SEQ ID NO: 577202 - RNA, 19 nt, Artificial Sequence
  Description of Artificial Sequence: Synthetic oligonucleotide
  Antisense strand to SEQ ID NO: 577201
aguaguacuccguaaccuc

SEQ ID NO: 577203 - RNA, 19 nt, Artificial Sequence
  Description of Artificial Sequence: Synthetic oligonucleotide
  Sense strand starting at position 285 of SEQ ID NO: 318630
cggaguacuacuggaacau

SEQ ID NO: 577204 - RNA, 19 nt, Artificial Sequence
  Description of Artificial Sequence: Synthetic oligonucleotide
  Antisense strand to SEQ ID NO: 577203
auguuccaguaguacuccg

SEQ ID NO: 577205 - RNA, 19 nt, Artificial Sequence
  Description of Artificial Sequence: Synthetic oligonucleotide
  Sense strand starting at position 297 of SEQ ID NO: 318630
ggaacauaaaugugcagau

SEQ ID NO: 577206 - RNA, 19 nt, Artificial Sequence
  Description of Artificial Sequence: Synthetic oligonucleotide
  Antisense strand to SEQ ID NO: 577205
aucugcacauuuauguucc

SEQ ID NO: 577207 - RNA, 19 nt, Artificial Sequence
  Description of Artificial Sequence: Synthetic oligonucleotide
  Sense strand starting at position 298 of SEQ ID NO: 318630
gaacauaaaugugcagaua

SEQ ID NO: 577208 - RNA, 19 nt, Artificial Sequence
  Description of Artificial Sequence: Synthetic oligonucleotide
  Antisense strand to SEQ ID NO: 577207
uaucugcacauuuauguuc

SEQ ID NO: 577209 - RNA, 19 nt, Artificial Sequence
  Description of Artificial Sequence: Synthetic oligonucleotide
  Sense strand starting at position 361 of SEQ ID NO: 318630
gaauaauauggugggccuu

SEQ ID NO: 577210 - RNA, 19 nt, Artificial Sequence
  Description of Artificial Sequence: Synthetic oligonucleotide
  Antisense strand to SEQ ID NO: 577209
aaggcccaccauauuauuc

SEQ ID NO: 577211 - RNA, 19 nt, Artificial Sequence
  Description of Artificial Sequence: Synthetic oligonucleotide
  Sense strand starting at position 363 of SEQ ID NO: 318630
auaauauggugggccuuaa

SEQ ID NO: 577212 - RNA, 19 nt, Artificial Sequence
  Description of Artificial Sequence: Synthetic oligonucleotide
  Antisense strand to SEQ ID NO: 577211
uuaaggcccaccauauuau

SEQ ID NO: 577213 - RNA, 19 nt, Artificial Sequence
  Description of Artificial Sequence: Synthetic oligonucleotide
  Sense strand starting at position 395 of SEQ ID NO: 318630
aggaacucaugagaugaaa

SEQ ID NO: 577214 - RNA, 19 nt, Artificial Sequence
  Description of Artificial Sequence: Synthetic oligonucleotide
  Antisense strand to SEQ ID NO: 577213
uuucaucucaugaguuccu

SEQ ID NO: 577215 - RNA, 19 nt, Artificial Sequence
  Description of Artificial Sequence: Synthetic oligonucleotide
  Sense strand starting at position 517 of SEQ ID NO: 318630
ggaaguccuagucagguuu

SEQ ID NO: 577216 - RNA, 19 nt, Artificial Sequence
  Description of Artificial Sequence: Synthetic oligonucleotide
  Antisense strand to SEQ ID NO: 577215
aaaccugacuaggacuucc

SEQ ID NO: 577217 - RNA, 19 nt, Artificial Sequence
  Description of Artificial Sequence: Synthetic oligonucleotide
  Sense strand starting at position 596 of SEQ ID NO: 318630
augacaugaucagauuuac

SEQ ID NO: 577218 - RNA, 19 nt, Artificial Sequence
  Description of Artificial Sequence: Synthetic oligonucleotide
  Antisense strand to SEQ ID NO: 577217
guaaaucugaucaugucau

SEQ ID NO: 577219 - RNA, 19 nt, Artificial Sequence
  Description of Artificial Sequence: Synthetic oligonucleotide
  Sense strand starting at position 665 of SEQ ID NO: 318630
uuccuaagagauggccuua

SEQ ID NO: 577220 - RNA, 19 nt, Artificial Sequence
  Description of Artificial Sequence: Synthetic oligonucleotide
  Antisense strand to SEQ ID NO: 577219
uaaggccaucucuuaggaa

SEQ ID NO: 577221 - RNA, 19 nt, Artificial Sequence
  Description of Artificial Sequence: Synthetic oligonucleotide
  Sense strand starting at position 782 of SEQ ID NO: 318630
agaugacugcuguguaaag

SEQ ID NO: 577222 - RNA, 19 nt, Artificial Sequence
  Description of Artificial Sequence: Synthetic oligonucleotide
  Antisense strand to SEQ ID NO: 577221
cuuuacacagcagucaucu

SEQ ID NO: 577223 - RNA, 19 nt, Artificial Sequence
  Description of Artificial Sequence: Synthetic oligonucleotide
  Sense strand starting at position 783 of SEQ ID NO: 318630
gaugacugcuguguaaaga

SEQ ID NO: 577224 - RNA, 19 nt, Artificial Sequence
  Description of Artificial Sequence: Synthetic oligonucleotide
  Antisense strand to SEQ ID NO: 577223
ucuuuacacagcagucauc

SEQ ID NO: 577225 - RNA, 19 nt, Artificial Sequence
  Description of Artificial Sequence: Synthetic oligonucleotide
  Sense strand starting at position 784 of SEQ ID NO: 318630
augacugcuguguaaagaa

SEQ ID NO: 577226 - RNA, 19 nt, Artificial Sequence
  Description of Artificial Sequence: Synthetic oligonucleotide
  Antisense strand to SEQ ID NO: 577225
uucuuuacacagcagucau

SEQ ID NO: 577227 - RNA, 19 nt, Artificial Sequence
  Description of Artificial Sequence: Synthetic oligonucleotide
  Sense strand starting at position 847 of SEQ ID NO: 318630
gguggcuuggauuagagua

SEQ ID NO: 577228 - RNA, 19 nt, Artificial Sequence
  Description of Artificial Sequence: Synthetic oligonucleotide
  Antisense strand to SEQ ID NO: 577227
uacucuaauccaagccacc

SEQ ID NO: 577229 - RNA, 19 nt, Artificial Sequence
  Description of Artificial Sequence: Synthetic oligonucleotide
  Sense strand starting at position 873 of SEQ ID NO: 318630
agagauggugaguaguagu

SEQ ID NO: 577230 - RNA, 19 nt, Artificial Sequence
  Description of Artificial Sequence: Synthetic oligonucleotide
  Antisense strand to SEQ ID NO: 577229
acuacuacucaccaucucu

SEQ ID NO: 577231 - RNA, 19 nt, Artificial Sequence
  Description of Artificial Sequence: Synthetic oligonucleotide
  Sense strand starting at position 974 of SEQ ID NO: 318630
ugguuugagcacugaggaa

SEQ ID NO: 577232 - RNA, 19 nt, Artificial Sequence
  Description of Artificial Sequence: Synthetic oligonucleotide
  Antisense strand to SEQ ID NO: 577231
uuccucagugcucaaacca

SEQ ID NO: 577233 - RNA, 19 nt, Artificial Sequence
  Description of Artificial Sequence: Synthetic oligonucleotide
  Sense strand starting at position 1028 of SEQ ID NO: 318630
ggaucuacugcguaaaccu

SEQ ID NO: 577234 - RNA, 19 nt, Artificial Sequence
  Description of Artificial Sequence: Synthetic oligonucleotide
  Antisense strand to SEQ ID NO: 577233
agguuuacgcaguagaucc

SEQ ID NO: 577235 - RNA, 19 nt, Artificial Sequence
  Description of Artificial Sequence: Synthetic oligonucleotide
  Sense strand starting at position 1035 of SEQ ID NO: 318630
cugcguaaaccucauuugu

SEQ ID NO: 577236 - RNA, 19 nt, Artificial Sequence
  Description of Artificial Sequence: Synthetic oligonucleotide
  Antisense strand to SEQ ID NO: 577235
acaaaugagguuuacgcag

SEQ ID NO: 577237 - RNA, 19 nt, Artificial Sequence
  Description of Artificial Sequence: Synthetic oligonucleotide
  Sense strand starting at position 1037 of SEQ ID NO: 318630
gcguaaaccucauuuguua

SEQ ID NO: 577238 - RNA, 19 nt, Artificial Sequence
  Description of Artificial Sequence: Synthetic oligonucleotide
  Antisense strand to SEQ ID NO: 577237
uaacaaaugagguuuacgc

SEQ ID NO: 577239 - RNA, 19 nt, Artificial Sequence
  Description of Artificial Sequence: Synthetic oligonucleotide
  Sense strand starting at position 1144 of SEQ ID NO: 318630
uacagagugcuauauagcu

SEQ ID NO: 577240 - RNA, 19 nt, Artificial Sequence
  Description of Artificial Sequence: Synthetic oligonucleotide
  Antisense strand to SEQ ID NO: 577239
agcuauauagcacucugua

SEQ ID NO: 577241 - RNA, 19 nt, Artificial Sequence
  Description of Artificial Sequence: Synthetic oligonucleotide
  Sense strand starting at position 1224 of SEQ ID NO: 318630
cagacaagucuuggucaag

SEQ ID NO: 577242 - RNA, 19 nt, Artificial Sequence
  Description of Artificial Sequence: Synthetic oligonucleotide
  Antisense strand to SEQ ID NO: 577241
cuugaccaagacuugucug

SEQ ID NO: 577243 - RNA, 19 nt, Artificial Sequence
  Description of Artificial Sequence: Synthetic oligonucleotide
  Sense strand starting at position 1227 of SEQ ID NO: 318630
acaagucuuggucaagcua

SEQ ID NO: 577244 - RNA, 19 nt, Artificial Sequence
  Description of Artificial Sequence: Synthetic oligonucleotide
  Antisense strand to SEQ ID NO: 577243
uagcuugaccaagacuugu

SEQ ID NO: 577245 - RNA, 19 nt, Artificial Sequence
  Description of Artificial Sequence: Synthetic oligonucleotide
  Sense strand starting at position 1339 of SEQ ID NO: 318630
gacugcuucguggagaaug

SEQ ID NO: 577246 - RNA, 19 nt, Artificial Sequence
  Description of Artificial Sequence: Synthetic oligonucleotide
  Antisense strand to SEQ ID NO: 577245
cauucuccacgaagcaguc

SEQ ID NO: 577247 - RNA, 19 nt, Artificial Sequence
  Description of Artificial Sequence: Synthetic oligonucleotide
  Sense strand starting at position 1479 of SEQ ID NO: 318630
cgggaacuuguacaaaugu

SEQ ID NO: 577248 - RNA, 19 nt, Artificial Sequence
  Description of Artificial Sequence: Synthetic oligonucleotide
  Antisense strand to SEQ ID NO: 577247
acauuuguacaaguucccg

SEQ ID NO: 577249 - RNA, 19 nt, Artificial Sequence
  Description of Artificial Sequence: Synthetic oligonucleotide
  Sense strand starting at position 2648 of SEQ ID NO: 318630
cugagucuuccacaaagua

SEQ ID NO: 577250 - RNA, 19 nt, Artificial Sequence
  Description of Artificial Sequence: Synthetic oligonucleotide
  Antisense strand to SEQ ID NO: 577249
uacuuuguggaagacucag

SEQ ID NO: 577251 - RNA, 19 nt, Artificial Sequence
  Description of Artificial Sequence: Synthetic oligonucleotide
  Sense strand starting at position 2707 of SEQ ID NO: 318630
gggacauucggauguccca

SEQ ID NO: 577252 - RNA, 19 nt, Artificial Sequence
  Description of Artificial Sequence: Synthetic oligonucleotide
  Antisense strand to SEQ ID NO: 577251
ugggacauccgaauguccc

SEQ ID NO: 577253 - RNA, 19 nt, Artificial Sequence
  Description of Artificial Sequence: Synthetic oligonucleotide
  Sense strand starting at position 2796 of SEQ ID NO: 318630
ggagcuagcccagagucaa

SEQ ID NO: 577254 - RNA, 19 nt, Artificial Sequence
  Description of Artificial Sequence: Synthetic oligonucleotide
  Antisense strand to SEQ ID NO: 577253
uugacucugggcuagcucc

SEQ ID NO: 577255 - RNA, 19 nt, Artificial Sequence
  Description of Artificial Sequence: Synthetic oligonucleotide
  Sense strand starting at position 2841 of SEQ ID NO: 318630
aggcaaucucgugagauuc

SEQ ID NO: 577256 - RNA, 19 nt, Artificial Sequence
  Description of Artificial Sequence: Synthetic oligonucleotide
  Antisense strand to SEQ ID NO: 577255
gaaucucacgagauugccu

SEQ ID NO: 577257 - RNA, 19 nt, Artificial Sequence
  Description of Artificial Sequence: Synthetic oligonucleotide
  Sense strand starting at position 2903 of SEQ ID NO: 318630
agguauugaccuuaacucu

SEQ ID NO: 577258 - RNA, 19 nt, Artificial Sequence
  Description of Artificial Sequence: Synthetic oligonucleotide
  Antisense strand to SEQ ID NO: 577257
agaguuaaggucaauaccu

SEQ ID NO: 577259 - RNA, 19 nt, Artificial Sequence
  Description of Artificial Sequence: Synthetic oligonucleotide
  Sense strand starting at position 2944 of SEQ ID NO: 318630
gacuuaggguaaguagauu

SEQ ID NO: 577260 - RNA, 19 nt, Artificial Sequence
  Description of Artificial Sequence: Synthetic oligonucleotide
  Antisense strand to SEQ ID NO: 577259
aaucuacuuacccuaaguc

SEQ ID NO: 577261 - RNA, 19 nt, Artificial Sequence
  Description of Artificial Sequence: Synthetic oligonucleotide
  Sense strand starting at position 2950 of SEQ ID NO: 318630
ggguaaguagauugcuuaa

SEQ ID NO: 577262 - RNA, 19 nt, Artificial Sequence
  Description of Artificial Sequence: Synthetic oligonucleotide
  Antisense strand to SEQ ID NO: 577261
uuaagcaaucuacuuaccc

SEQ ID NO: 577263 - RNA, 19 nt, Artificial Sequence
  Description of Artificial Sequence: Synthetic oligonucleotide
  Sense strand starting at position 3115 of SEQ ID NO: 318630
uguacucaggcuuagaaca

SEQ ID NO: 577264 - RNA, 19 nt, Artificial Sequence
  Description of Artificial Sequence: Synthetic oligonucleotide
  Antisense strand to SEQ ID NO: 577263
uguucuaagccugaguaca

SEQ ID NO: 577265 - RNA, 19 nt, Artificial Sequence
  Description of Artificial Sequence: Synthetic oligonucleotide
  Sense strand starting at position 3122 of SEQ ID NO: 318630
aggcuuagaacaggguaau

SEQ ID NO: 577266 - RNA, 19 nt, Artificial Sequence
  Description of Artificial Sequence: Synthetic oligonucleotide
  Antisense strand to SEQ ID NO: 577265
auuacccuguucuaagccu

SEQ ID NO: 577267 - RNA, 19 nt, Artificial Sequence
  Description of Artificial Sequence: Synthetic oligonucleotide
  Sense strand starting at position 3123 of SEQ ID NO: 318630
ggcuuagaacaggguaaua

SEQ ID NO: 577268 - RNA, 19 nt, Artificial Sequence
  Description of Artificial Sequence: Synthetic oligonucleotide
  Antisense strand to SEQ ID NO: 577267
uauuacccuguucuaagcc

SEQ ID NO: 577269 - RNA, 19 nt, Artificial Sequence
  Description of Artificial Sequence: Synthetic oligonucleotide
  Sense strand starting at position 3441 of SEQ ID NO: 318630
gcaguuagaauguagguuu

SEQ ID NO: 577270 - RNA, 19 nt, Artificial Sequence
  Description of Artificial Sequence: Synthetic oligonucleotide
  Antisense strand to SEQ ID NO: 577269
aaaccuacauucuaacugc

SEQ ID NO: 577271 - RNA, 19 nt, Artificial Sequence
  Description of Artificial Sequence: Synthetic oligonucleotide
  Sense strand starting at position 3598 of SEQ ID NO: 318630
uacagugugucugcaauuu

SEQ ID NO: 577272 - RNA, 19 nt, Artificial Sequence
  Description of Artificial Sequence: Synthetic oligonucleotide
  Antisense strand to SEQ ID NO: 577271
aaauugcagacacacugua

SEQ ID NO: 577273 - RNA, 19 nt, Artificial Sequence
  Description of Artificial Sequence: Synthetic oligonucleotide
  Sense strand starting at position 3809 of SEQ ID NO: 318630
acaugcagugcucauuaua

SEQ ID NO: 577274 - RNA, 19 nt, Artificial Sequence
  Description of Artificial Sequence: Synthetic oligonucleotide
  Antisense strand to SEQ ID NO: 577273
uauaaugagcacugcaugu

SEQ ID NO: 577275 - RNA, 19 nt, Artificial Sequence
  Description of Artificial Sequence: Synthetic oligonucleotide
  Sense strand starting at position 3865 of SEQ ID NO: 318630
gggcuuuguacugcacgua

SEQ ID NO: 577276 - RNA, 19 nt, Artificial Sequence
  Description of Artificial Sequence: Synthetic oligonucleotide
  Antisense strand to SEQ ID NO: 577275
uacgugcaguacaaagccc

SEQ ID NO: 577277 - RNA, 19 nt, Artificial Sequence
  Description of Artificial Sequence: Synthetic oligonucleotide
  Sense strand starting at position 37 of SEQ ID NO: 318631
augacaugaucagauuuac

SEQ ID NO: 577278 - RNA, 19 nt, Artificial Sequence
  Description of Artificial Sequence: Synthetic oligonucleotide
  Antisense strand to SEQ ID NO: 577277
guaaaucugaucaugucau

SEQ ID NO: 577279 - RNA, 19 nt, Artificial Sequence
  Description of Artificial Sequence: Synthetic oligonucleotide
  Sense strand starting at position 106 of SEQ ID NO: 318631
uuccuaagagauggccuua

SEQ ID NO: 577280 - RNA, 19 nt, Artificial Sequence
  Description of Artificial Sequence: Synthetic oligonucleotide
  Antisense strand to SEQ ID NO: 577279
uaaggccaucucuuaggaa

SEQ ID NO: 577281 - RNA, 19 nt, Artificial Sequence
  Description of Artificial Sequence: Synthetic oligonucleotide
  Sense strand starting at position 223 of SEQ ID NO: 318631
agaugacugcuguguaaag

SEQ ID NO: 577282 - RNA, 19 nt, Artificial Sequence
  Description of Artificial Sequence: Synthetic oligonucleotide
  Antisense strand to SEQ ID NO: 577281
cuuuacacagcagucaucu

SEQ ID NO: 577283 - RNA, 19 nt, Artificial Sequence
  Description of Artificial Sequence: Synthetic oligonucleotide
  Sense strand starting at position 224 of SEQ ID NO: 318631
gaugacugcuguguaaaga

SEQ ID NO: 577284 - RNA, 19 nt, Artificial Sequence
  Description of Artificial Sequence: Synthetic oligonucleotide
  Antisense strand to SEQ ID NO: 577283
ucuuuacacagcagucauc

SEQ ID NO: 577285 - RNA, 19 nt, Artificial Sequence
  Description of Artificial Sequence: Synthetic oligonucleotide
  Sense strand starting at position 225 of SEQ ID NO: 318631
augacugcuguguaaagaa

SEQ ID NO: 577286 - RNA, 19 nt, Artificial Sequence
  Description of Artificial Sequence: Synthetic oligonucleotide
  Antisense strand to SEQ ID NO: 577285
uucuuuacacagcagucau

SEQ ID NO: 577287 - RNA, 19 nt, Artificial Sequence
  Description of Artificial Sequence: Synthetic oligonucleotide
  Sense strand starting at position 288 of SEQ ID NO: 318631
gguggcuuggauuagagua

SEQ ID NO: 577288 - RNA, 19 nt, Artificial Sequence
  Description of Artificial Sequence: Synthetic oligonucleotide
  Antisense strand to SEQ ID NO: 577287
uacucuaauccaagccacc

SEQ ID NO: 577289 - RNA, 19 nt, Artificial Sequence
  Description of Artificial Sequence: Synthetic oligonucleotide
  Sense strand starting at position 314 of SEQ ID NO: 318631
agagauggugaguaguagu

SEQ ID NO: 577290 - RNA, 19 nt, Artificial Sequence
  Description of Artificial Sequence: Synthetic oligonucleotide
  Antisense strand to SEQ ID NO: 577289
acuacuacucaccaucucu

SEQ ID NO: 577291 - RNA, 19 nt, Artificial Sequence
  Description of Artificial Sequence: Synthetic oligonucleotide
  Sense strand starting at position 415 of SEQ ID NO: 318631
ugguuugagcacugaggaa

SEQ ID NO: 577292 - RNA, 19 nt, Artificial Sequence
  Description of Artificial Sequence: Synthetic oligonucleotide
  Antisense strand to SEQ ID NO: 577291
uuccucagugcucaaacca

SEQ ID NO: 577293 - RNA, 19 nt, Artificial Sequence
  Description of Artificial Sequence: Synthetic oligonucleotide
  Sense strand starting at position 469 of SEQ ID NO: 318631
ggaucuacugcguaaaccu

SEQ ID NO: 577294 - RNA, 19 nt, Artificial Sequence
  Description of Artificial Sequence: Synthetic oligonucleotide
  Antisense strand to SEQ ID NO: 577293
agguuuacgcaguagaucc

SEQ ID NO: 577295 - RNA, 19 nt, Artificial Sequence
  Description of Artificial Sequence: Synthetic oligonucleotide
  Sense strand starting at position 476 of SEQ ID NO: 318631
cugcguaaaccucauuugu

SEQ ID NO: 577296 - RNA, 19 nt, Artificial Sequence
  Description of Artificial Sequence: Synthetic oligonucleotide
  Antisense strand to SEQ ID NO: 577295
acaaaugagguuuacgcag

SEQ ID NO: 577297 - RNA, 19 nt, Artificial Sequence
  Description of Artificial Sequence: Synthetic oligonucleotide
  Sense strand starting at position 478 of SEQ ID NO: 318631
gcguaaaccucauuuguua

SEQ ID NO: 577298 - RNA, 19 nt, Artificial Sequence
  Description of Artificial Sequence: Synthetic oligonucleotide
  Antisense strand to SEQ ID NO: 577297
uaacaaaugagguuuacgc

SEQ ID NO: 577299 - RNA, 19 nt, Artificial Sequence
  Description of Artificial Sequence: Synthetic oligonucleotide
  Sense strand starting at position 585 of SEQ ID NO: 318631
uacagagugcuauauagcu

SEQ ID NO: 577300 - RNA, 19 nt, Artificial Sequence
  Description of Artificial Sequence: Synthetic oligonucleotide
  Antisense strand to SEQ ID NO: 577299
agcuauauagcacucugua

SEQ ID NO: 577301 - RNA, 19 nt, Artificial Sequence
  Description of Artificial Sequence: Synthetic oligonucleotide
  Sense strand starting at position 665 of SEQ ID NO: 318631
cagacaagucuuggucaag

SEQ ID NO: 577302 - RNA, 19 nt, Artificial Sequence
  Description of Artificial Sequence: Synthetic oligonucleotide
  Antisense strand to SEQ ID NO: 577301
cuugaccaagacuugucug

SEQ ID NO: 577303 - RNA, 19 nt, Artificial Sequence
  Description of Artificial Sequence: Synthetic oligonucleotide
  Sense strand starting at position 668 of SEQ ID NO: 318631
acaagucuuggucaagcua

SEQ ID NO: 577304 - RNA, 19 nt, Artificial Sequence
  Description of Artificial Sequence: Synthetic oligonucleotide
  Antisense strand to SEQ ID NO: 577303
uagcuugaccaagacuugu

SEQ ID NO: 577305 - RNA, 19 nt, Artificial Sequence
  Description of Artificial Sequence: Synthetic oligonucleotide
  Sense strand starting at position 780 of SEQ ID NO: 318631
gacugcuucguggagaaug

SEQ ID NO: 577306 - RNA, 19 nt, Artificial Sequence
  Description of Artificial Sequence: Synthetic oligonucleotide
  Antisense strand to SEQ ID NO: 577305
cauucuccacgaagcaguc

SEQ ID NO: 577307 - RNA, 19 nt, Artificial Sequence
  Description of Artificial Sequence: Synthetic oligonucleotide
  Sense strand starting at position 872 of SEQ ID NO: 318631
gcgguagaugcagagaagu

SEQ ID NO: 577308 - RNA, 19 nt, Artificial Sequence
  Description of Artificial Sequence: Synthetic oligonucleotide
  Antisense strand to SEQ ID NO: 577307
acuucucugcaucuaccgc

SEQ ID NO: 577309 - RNA, 19 nt, Artificial Sequence
  Description of Artificial Sequence: Synthetic oligonucleotide
  Sense strand starting at position 920 of SEQ ID NO: 318631
cgggaacuuguacaaaugu

SEQ ID NO: 577310 - RNA, 19 nt, Artificial Sequence
  Description of Artificial Sequence: Synthetic oligonucleotide
  Antisense strand to SEQ ID NO: 577309
acauuuguacaaguucccg

SEQ ID NO: 577311 - RNA, 19 nt, Artificial Sequence
  Description of Artificial Sequence: Synthetic oligonucleotide
  Sense strand starting at position 2089 of SEQ ID NO: 318631
cugagucuuccacaaagua

SEQ ID NO: 577312 - RNA, 19 nt, Artificial Sequence
  Description of Artificial Sequence: Synthetic oligonucleotide
  Antisense strand to SEQ ID NO: 577311
uacuuuguggaagacucag

SEQ ID NO: 577313 - RNA, 19 nt, Artificial Sequence
  Description of Artificial Sequence: Synthetic oligonucleotide
  Sense strand starting at position 2148 of SEQ ID NO: 318631
gggacauucggauguccca

SEQ ID NO: 577314 - RNA, 19 nt, Artificial Sequence
  Description of Artificial Sequence: Synthetic oligonucleotide
  Antisense strand to SEQ ID NO: 577313
ugggacauccgaauguccc

SEQ ID NO: 577315 - RNA, 19 nt, Artificial Sequence
  Description of Artificial Sequence: Synthetic oligonucleotide
  Sense strand starting at position 2237 of SEQ ID NO: 318631
ggagcuagcccagagucaa

SEQ ID NO: 577316 - RNA, 19 nt, Artificial Sequence
  Description of Artificial Sequence: Synthetic oligonucleotide
  Antisense strand to SEQ ID NO: 577315
uugacucugggcuagcucc

SEQ ID NO: 577317 - RNA, 19 nt, Artificial Sequence
  Description of Artificial Sequence: Synthetic oligonucleotide
  Sense strand starting at position 2282 of SEQ ID NO: 318631
aggcaaucucgugagauuc

SEQ ID NO: 577318 - RNA, 19 nt, Artificial Sequence
  Description of Artificial Sequence: Synthetic oligonucleotide
  Antisense strand to SEQ ID NO: 577317
gaaucucacgagauugccu

SEQ ID NO: 577319 - RNA, 19 nt, Artificial Sequence
  Description of Artificial Sequence: Synthetic oligonucleotide
  Sense strand starting at position 2344 of SEQ ID NO: 318631
agguauugaccuuaacucu

SEQ ID NO: 577320 - RNA, 19 nt, Artificial Sequence
  Description of Artificial Sequence: Synthetic oligonucleotide
  Antisense strand to SEQ ID NO: 577319
agaguuaaggucaauaccu

SEQ ID NO: 577321 - RNA, 19 nt, Artificial Sequence
  Description of Artificial Sequence: Synthetic oligonucleotide
  Sense strand starting at position 2385 of SEQ ID NO: 318631
gacuuaggguaaguagauu

SEQ ID NO: 577322 - RNA, 19 nt, Artificial Sequence
  Description of Artificial Sequence: Synthetic oligonucleotide
  Antisense strand to SEQ ID NO: 577321
aaucuacuuacccuaaguc

SEQ ID NO: 577323 - RNA, 19 nt, Artificial Sequence
  Description of Artificial Sequence: Synthetic oligonucleotide
  Sense strand starting at position 2391 of SEQ ID NO: 318631
ggguaaguagauugcuuaa

SEQ ID NO: 577324 - RNA, 19 nt, Artificial Sequence
  Description of Artificial Sequence: Synthetic oligonucleotide
  Antisense strand to SEQ ID NO: 577323
uuaagcaaucuacuuaccc

SEQ ID NO: 577325 - RNA, 19 nt, Artificial Sequence
  Description of Artificial Sequence: Synthetic oligonucleotide
  Sense strand starting at position 2394 of SEQ ID NO: 318631
uaaguagauugcuuaaggu

SEQ ID NO: 577326 - RNA, 19 nt, Artificial Sequence
  Description of Artificial Sequence: Synthetic oligonucleotide
  Antisense strand to SEQ ID NO: 577325
accuuaagcaaucuacuua

SEQ ID NO: 577327 - RNA, 19 nt, Artificial Sequence
  Description of Artificial Sequence: Synthetic oligonucleotide
  Sense strand starting at position 2437 of SEQ ID NO: 318631
ugguguagucuguacuaga

SEQ ID NO: 577328 - RNA, 19 nt, Artificial Sequence
  Description of Artificial Sequence: Synthetic oligonucleotide
  Antisense strand to SEQ ID NO: 577327
ucuaguacagacuacacca

SEQ ID NO: 577329 - RNA, 19 nt, Artificial Sequence
  Description of Artificial Sequence: Synthetic oligonucleotide
  Sense strand starting at position 2556 of SEQ ID NO: 318631
uguacucaggcuuagaaca

SEQ ID NO: 577330 - RNA, 19 nt, Artificial Sequence
  Description of Artificial Sequence: Synthetic oligonucleotide
  Antisense strand to SEQ ID NO: 577329
uguucuaagccugaguaca

SEQ ID NO: 577331 - RNA, 19 nt, Artificial Sequence
  Description of Artificial Sequence: Synthetic oligonucleotide
  Sense strand starting at position 2563 of SEQ ID NO: 318631
aggcuuagaacaggguaau

SEQ ID NO: 577332 - RNA, 19 nt, Artificial Sequence
  Description of Artificial Sequence: Synthetic oligonucleotide
  Antisense strand to SEQ ID NO: 577331
auuacccuguucuaagccu

SEQ ID NO: 577333 - RNA, 19 nt, Artificial Sequence
  Description of Artificial Sequence: Synthetic oligonucleotide
  Sense strand starting at position 2564 of SEQ ID NO: 318631
ggcuuagaacaggguaaua

SEQ ID NO: 577334 - RNA, 19 nt, Artificial Sequence
  Description of Artificial Sequence: Synthetic oligonucleotide
  Antisense strand to SEQ ID NO: 577333
uauuacccuguucuaagcc

SEQ ID NO: 577335 - RNA, 19 nt, Artificial Sequence
  Description of Artificial Sequence: Synthetic oligonucleotide
  Sense strand starting at position 2882 of SEQ ID NO: 318631
gcaguuagaauguagguuu

SEQ ID NO: 577336 - RNA, 19 nt, Artificial Sequence
  Description of Artificial Sequence: Synthetic oligonucleotide
  Antisense strand to SEQ ID NO: 577335
aaaccuacauucuaacugc

SEQ ID NO: 577337 - RNA, 19 nt, Artificial Sequence
  Description of Artificial Sequence: Synthetic oligonucleotide
  Sense strand starting at position 2987 of SEQ ID NO: 318631
aaggaauaaugugugcuuu

SEQ ID NO: 577338 - RNA, 19 nt, Artificial Sequence
  Description of Artificial Sequence: Synthetic oligonucleotide
  Antisense strand to SEQ ID NO: 577337
aaagcacacauuauuccuu

SEQ ID NO: 577339 - RNA, 19 nt, Artificial Sequence
  Description of Artificial Sequence: Synthetic oligonucleotide
  Sense strand starting at position 3039 of SEQ ID NO: 318631
uacagugugucugcaauuu

SEQ ID NO: 577340 - RNA, 19 nt, Artificial Sequence
  Description of Artificial Sequence: Synthetic oligonucleotide
  Antisense strand to SEQ ID NO: 577339
aaauugcagacacacugua

SEQ ID NO: 577341 - RNA, 19 nt, Artificial Sequence
  Description of Artificial Sequence: Synthetic oligonucleotide
  Sense strand starting at position 3250 of SEQ ID NO: 318631
acaugcagugcucauuaua

SEQ ID NO: 577342 - RNA, 19 nt, Artificial Sequence
  Description of Artificial Sequence: Synthetic oligonucleotide
  Antisense strand to SEQ ID NO: 577341
uauaaugagcacugcaugu

SEQ ID NO: 577343 - RNA, 19 nt, Artificial Sequence
  Description of Artificial Sequence: Synthetic oligonucleotide
  Sense strand starting at position 3306 of SEQ ID NO: 318631
gggcuuuguacugcacgua

SEQ ID NO: 577344 - RNA, 19 nt, Artificial Sequence
  Description of Artificial Sequence: Synthetic oligonucleotide
  Antisense strand to SEQ ID NO: 577343
uacgugcaguacaaagccc

SEQ ID NO: 577345 - RNA, 19 nt, Artificial Sequence
  Description of Artificial Sequence: Synthetic oligonucleotide
  Sense strand starting at position 3456 of SEQ ID NO: 318631
aggauugagacuuguggua

SEQ ID NO: 577346 - RNA, 19 nt, Artificial Sequence
  Description of Artificial Sequence: Synthetic oligonucleotide
  Antisense strand to SEQ ID NO: 577345
uaccacaagucucaauccu

SEQ ID NO: 577347 - RNA, 19 nt, Artificial Sequence
  Description of Artificial Sequence: Synthetic oligonucleotide
  Sense strand starting at position 3484 of SEQ ID NO: 318631
uuuagaacuuggcuacaaa

SEQ ID NO: 577348 - RNA, 19 nt, Artificial Sequence
  Description of Artificial Sequence: Synthetic oligonucleotide
  Antisense strand to SEQ ID NO: 577347
uuuguagccaaguucuaaa

SEQ ID NO: 577349 - RNA, 19 nt, Artificial Sequence
  Description of Artificial Sequence: Synthetic oligonucleotide
  Sense strand starting at position 3609 of SEQ ID NO: 318631
gauguugguuggucagaug

SEQ ID NO: 577350 - RNA, 19 nt, Artificial Sequence
  Description of Artificial Sequence: Synthetic oligonucleotide
  Antisense strand to SEQ ID NO: 577349
caucugaccaaccaacauc

SEQ ID NO: 577351 - RNA, 19 nt, Artificial Sequence
  Description of Artificial Sequence: Synthetic oligonucleotide
  Sense strand starting at position 3617 of SEQ ID NO: 318631
uuggucagaugacuguuua

SEQ ID NO: 577352 - RNA, 19 nt, Artificial Sequence
  Description of Artificial Sequence: Synthetic oligonucleotide
  Antisense strand to SEQ ID NO: 577351
uaaacagucaucugaccaa

SEQ ID NO: 577353 - RNA, 19 nt, Artificial Sequence
  Description of Artificial Sequence: Synthetic oligonucleotide
  Sense strand starting at position 3618 of SEQ ID NO: 318631
uggucagaugacuguuuag

SEQ ID NO: 577354 - RNA, 19 nt, Artificial Sequence
  Description of Artificial Sequence: Synthetic oligonucleotide
  Antisense strand to SEQ ID NO: 577353
cuaaacagucaucugacca

SEQ ID NO: 577355 - RNA, 19 nt, Artificial Sequence
  Description of Artificial Sequence: Synthetic oligonucleotide
  Sense strand starting at position 3621 of SEQ ID NO: 318631
ucagaugacuguuuagauc

SEQ ID NO: 577356 - RNA, 19 nt, Artificial Sequence
  Description of Artificial Sequence: Synthetic oligonucleotide
  Antisense strand to SEQ ID NO: 577355
gaucuaaacagucaucuga

SEQ ID NO: 577357 - RNA, 19 nt, Artificial Sequence
  Description of Artificial Sequence: Synthetic oligonucleotide
  Sense strand starting at position 604 of SEQ ID NO: 318632
gugguauauaaacacagua

SEQ ID NO: 577358 - RNA, 19 nt, Artificial Sequence
  Description of Artificial Sequence: Synthetic oligonucleotide
  Antisense strand to SEQ ID NO: 577357
uacuguguuuauauaccac

SEQ ID NO: 577359 - RNA, 19 nt, Artificial Sequence
  Description of Artificial Sequence: Synthetic oligonucleotide
  Sense strand starting at position 793 of SEQ ID NO: 318632
gaaugauagucacuggagu

SEQ ID NO: 577360 - RNA, 19 nt, Artificial Sequence
  Description of Artificial Sequence: Synthetic oligonucleotide
  Antisense strand to SEQ ID NO: 577359
acuccagugacuaucauuc

SEQ ID NO: 577361 - RNA, 19 nt, Artificial Sequence
  Description of Artificial Sequence: Synthetic oligonucleotide
  Sense strand starting at position 838 of SEQ ID NO: 318632
ugaagaaaggcagguuaau

SEQ ID NO: 577362 - RNA, 19 nt, Artificial Sequence
  Description of Artificial Sequence: Synthetic oligonucleotide
  Antisense strand to SEQ ID NO: 577361
auuaaccugccuuucuuca

SEQ ID NO: 577363 - RNA, 19 nt, Artificial Sequence
  Description of Artificial Sequence: Synthetic oligonucleotide
  Sense strand starting at position 1073 of SEQ ID NO: 318632
ucgaucauuguacauugua

SEQ ID NO: 577364 - RNA, 19 nt, Artificial Sequence
  Description of Artificial Sequence: Synthetic oligonucleotide
  Antisense strand to SEQ ID NO: 577363
uacaauguacaaugaucga

SEQ ID NO: 577365 - RNA, 19 nt, Artificial Sequence
  Description of Artificial Sequence: Synthetic oligonucleotide
  Sense strand starting at position 1119 of SEQ ID NO: 318632
gcccauaaauauguauagu

SEQ ID NO: 577366 - RNA, 19 nt, Artificial Sequence
  Description of Artificial Sequence: Synthetic oligonucleotide
  Antisense strand to SEQ ID NO: 577365
acuauacauauuuaugggc

SEQ ID NO: 577367 - RNA, 19 nt, Artificial Sequence
  Description of Artificial Sequence: Synthetic oligonucleotide
  Sense strand starting at position 1289 of SEQ ID NO: 318632
acauauucccagugucaac

SEQ ID NO: 577368 - RNA, 19 nt, Artificial Sequence
  Description of Artificial Sequence: Synthetic oligonucleotide
  Antisense strand to SEQ ID NO: 577367
guugacacugggaauaugu

SEQ ID NO: 577369 - RNA, 19 nt, Artificial Sequence
  Description of Artificial Sequence: Synthetic oligonucleotide
  Sense strand starting at position 1340 of SEQ ID NO: 318632
ccagaacacuuggcucuau

SEQ ID NO: 577370 - RNA, 19 nt, Artificial Sequence
  Description of Artificial Sequence: Synthetic oligonucleotide
  Antisense strand to SEQ ID NO: 577369
auagagccaaguguucugg

SEQ ID NO: 577371 - RNA, 19 nt, Artificial Sequence
  Description of Artificial Sequence: Synthetic oligonucleotide
  Sense strand starting at position 1507 of SEQ ID NO: 318632
agggaaugauaagaauuau

SEQ ID NO: 577372 - RNA, 19 nt, Artificial Sequence
  Description of Artificial Sequence: Synthetic oligonucleotide
  Antisense strand to SEQ ID NO: 577371
auaauucuuaucauucccu

SEQ ID NO: 577373 - RNA, 19 nt, Artificial Sequence
  Description of Artificial Sequence: Synthetic oligonucleotide
  Sense strand starting at position 1552 of SEQ ID NO: 318632
cuggcuuauugauuauaug

SEQ ID NO: 577374 - RNA, 19 nt, Artificial Sequence
  Description of Artificial Sequence: Synthetic oligonucleotide
  Antisense strand to SEQ ID NO: 577373
cauauaaucaauaagccag

SEQ ID NO: 577375 - RNA, 19 nt, Artificial Sequence
  Description of Artificial Sequence: Synthetic oligonucleotide
  Sense strand starting at position 1553 of SEQ ID NO: 318632
uggcuuauugauuauauga

SEQ ID NO: 577376 - RNA, 19 nt, Artificial Sequence
  Description of Artificial Sequence: Synthetic oligonucleotide
  Antisense strand to SEQ ID NO: 577375
ucauauaaucaauaagcca

SEQ ID NO: 577377 - RNA, 19 nt, Artificial Sequence
  Description of Artificial Sequence: Synthetic oligonucleotide
  Sense strand starting at position 1685 of SEQ ID NO: 318632
ccagaccagucucuggaua

SEQ ID NO: 577378 - RNA, 19 nt, Artificial Sequence
  Description of Artificial Sequence: Synthetic oligonucleotide
  Antisense strand to SEQ ID NO: 577377
uauccagagacuggucugg

SEQ ID NO: 577379 - RNA, 19 nt, Artificial Sequence
  Description of Artificial Sequence: Synthetic oligonucleotide
  Sense strand starting at position 1686 of SEQ ID NO: 318632
cagaccagucucuggauaa

SEQ ID NO: 577380 - RNA, 19 nt, Artificial Sequence
  Description of Artificial Sequence: Synthetic oligonucleotide
  Antisense strand to SEQ ID NO: 577379
uuauccagagacuggucug

SEQ ID NO: 577381 - RNA, 19 nt, Artificial Sequence
  Description of Artificial Sequence: Synthetic oligonucleotide
  Sense strand starting at position 1698 of SEQ ID NO: 318632
uggauaaaccucuguguaa

SEQ ID NO: 577382 - RNA, 19 nt, Artificial Sequence
  Description of Artificial Sequence: Synthetic oligonucleotide
  Antisense strand to SEQ ID NO: 577381
uuacacagagguuuaucca

SEQ ID NO: 577383 - RNA, 19 nt, Artificial Sequence
  Description of Artificial Sequence: Synthetic oligonucleotide
  Sense strand starting at position 1699 of SEQ ID NO: 318632
ggauaaaccucuguguaac

SEQ ID NO: 577384 - RNA, 19 nt, Artificial Sequence
  Description of Artificial Sequence: Synthetic oligonucleotide
  Antisense strand to SEQ ID NO: 577383
guuacacagagguuuaucc

SEQ ID NO: 577385 - RNA, 19 nt, Artificial Sequence
  Description of Artificial Sequence: Synthetic oligonucleotide
  Sense strand starting at position 1808 of SEQ ID NO: 318632
caaaccagugcauggaaau

SEQ ID NO: 577386 - RNA, 19 nt, Artificial Sequence
  Description of Artificial Sequence: Synthetic oligonucleotide
  Antisense strand to SEQ ID NO: 577385
auuuccaugcacugguuug

SEQ ID NO: 577387 - RNA, 19 nt, Artificial Sequence
  Description of Artificial Sequence: Synthetic oligonucleotide
  Sense strand starting at position 1838 of SEQ ID NO: 318632
uagcaaguccucuggaaac

SEQ ID NO: 577388 - RNA, 19 nt, Artificial Sequence
  Description of Artificial Sequence: Synthetic oligonucleotide
  Antisense strand to SEQ ID NO: 577387
guuuccagaggacuugcua

SEQ ID NO: 577389 - RNA, 19 nt, Artificial Sequence
  Description of Artificial Sequence: Synthetic oligonucleotide
  Sense strand starting at position 1924 of SEQ ID NO: 318632
augagagguucuuuggaca

SEQ ID NO: 577390 - RNA, 19 nt, Artificial Sequence
  Description of Artificial Sequence: Synthetic oligonucleotide
  Antisense strand to SEQ ID NO: 577389
uguccaaagaaccucucau

SEQ ID NO: 577391 - RNA, 19 nt, Artificial Sequence
  Description of Artificial Sequence: Synthetic oligonucleotide
  Sense strand starting at position 1927 of SEQ ID NO: 318632
agagguucuuuggacauuu

SEQ ID NO: 577392 - RNA, 19 nt, Artificial Sequence
  Description of Artificial Sequence: Synthetic oligonucleotide
  Antisense strand to SEQ ID NO: 577391
aaauguccaaagaaccucu

SEQ ID NO: 577393 - RNA, 19 nt, Artificial Sequence
  Description of Artificial Sequence: Synthetic oligonucleotide
  Sense strand starting at position 1959 of SEQ ID NO: 318632
gacccaggagucugucuau

SEQ ID NO: 577394 - RNA, 19 nt, Artificial Sequence
  Description of Artificial Sequence: Synthetic oligonucleotide
  Antisense strand to SEQ ID NO: 577393
auagacagacuccuggguc

SEQ ID NO: 577395 - RNA, 19 nt, Artificial Sequence
  Description of Artificial Sequence: Synthetic oligonucleotide
  Sense strand starting at position 1962 of SEQ ID NO: 318632
ccaggagucugucuaucua

SEQ ID NO: 577396 - RNA, 19 nt, Artificial Sequence
  Description of Artificial Sequence: Synthetic oligonucleotide
  Antisense strand to SEQ ID NO: 577395
uagauagacagacuccugg

SEQ ID NO: 577397 - RNA, 19 nt, Artificial Sequence
  Description of Artificial Sequence: Synthetic oligonucleotide
  Sense strand starting at position 2155 of SEQ ID NO: 318632
ggagggauggcguggacau

SEQ ID NO: 577398 - RNA, 19 nt, Artificial Sequence
  Description of Artificial Sequence: Synthetic oligonucleotide
  Antisense strand to SEQ ID NO: 577397
auguccacgccaucccucc

SEQ ID NO: 577399 - RNA, 19 nt, Artificial Sequence
  Description of Artificial Sequence: Synthetic oligonucleotide
  Sense strand starting at position 2156 of SEQ ID NO: 318632
gagggauggcguggacaua

SEQ ID NO: 577400 - RNA, 19 nt, Artificial Sequence
  Description of Artificial Sequence: Synthetic oligonucleotide
  Antisense strand to SEQ ID NO: 577399
uauguccacgccaucccuc

SEQ ID NO: 577401 - RNA, 19 nt, Artificial Sequence
  Description of Artificial Sequence: Synthetic oligonucleotide
  Sense strand starting at position 2197 of SEQ ID NO: 318632
uauaguggguuuccuauau

SEQ ID NO: 577402 - RNA, 19 nt, Artificial Sequence
  Description of Artificial Sequence: Synthetic oligonucleotide
  Antisense strand to SEQ ID NO: 577401
auauaggaaacccacuaua

SEQ ID NO: 577403 - RNA, 19 nt, Artificial Sequence
  Description of Artificial Sequence: Synthetic oligonucleotide
  Sense strand starting at position 2209 of SEQ ID NO: 318632
ccuauaugugcacaagcau

SEQ ID NO: 577404 - RNA, 19 nt, Artificial Sequence
  Description of Artificial Sequence: Synthetic oligonucleotide
  Antisense strand to SEQ ID NO: 577403
augcuugugcacauauagg

SEQ ID NO: 577405 - RNA, 19 nt, Artificial Sequence
  Description of Artificial Sequence: Synthetic oligonucleotide
  Sense strand starting at position 2336 of SEQ ID NO: 318632
aguguuuacauguagauuc

SEQ ID NO: 577406 - RNA, 19 nt, Artificial Sequence
  Description of Artificial Sequence: Synthetic oligonucleotide
  Antisense strand to SEQ ID NO: 577405
gaaucuacauguaaacacu

SEQ ID NO: 577407 - RNA, 19 nt, Artificial Sequence
  Description of Artificial Sequence: Synthetic oligonucleotide
  Sense strand starting at position 2378 of SEQ ID NO: 318632
gacugaaaguugccuccau

SEQ ID NO: 577408 - RNA, 19 nt, Artificial Sequence
  Description of Artificial Sequence: Synthetic oligonucleotide
  Antisense strand to SEQ ID NO: 577407
auggaggcaacuuucaguc

SEQ ID NO: 577409 - RNA, 19 nt, Artificial Sequence
  Description of Artificial Sequence: Synthetic oligonucleotide
  Sense strand starting at position 2379 of SEQ ID NO: 318632
acugaaaguugccuccauu

SEQ ID NO: 577410 - RNA, 19 nt, Artificial Sequence
  Description of Artificial Sequence: Synthetic oligonucleotide
  Antisense strand to SEQ ID NO: 577409
aauggaggcaacuuucagu

SEQ ID NO: 577411 - RNA, 19 nt, Artificial Sequence
  Description of Artificial Sequence: Synthetic oligonucleotide
  Sense strand starting at position 2717 of SEQ ID NO: 318632
uggguaauguauccauaug

SEQ ID NO: 577412 - RNA, 19 nt, Artificial Sequence
  Description of Artificial Sequence: Synthetic oligonucleotide
  Antisense strand to SEQ ID NO: 577411
cauauggauacauuaccca

SEQ ID NO: 577413 - RNA, 19 nt, Artificial Sequence
  Description of Artificial Sequence: Synthetic oligonucleotide
  Sense strand starting at position 2864 of SEQ ID NO: 318632
gcuucuacugaagguauca

SEQ ID NO: 577414 - RNA, 19 nt, Artificial Sequence
  Description of Artificial Sequence: Synthetic oligonucleotide
  Antisense strand to SEQ ID NO: 577413
ugauaccuucaguagaagc

SEQ ID NO: 577415 - RNA, 19 nt, Artificial Sequence
  Description of Artificial Sequence: Synthetic oligonucleotide
  Sense strand starting at position 2892 of SEQ ID NO: 318632
cuaaauaucaggugagguu

SEQ ID NO: 577416 - RNA, 19 nt, Artificial Sequence
  Description of Artificial Sequence: Synthetic oligonucleotide
  Antisense strand to SEQ ID NO: 577415
aaccucaccugauauuuag

SEQ ID NO: 577417 - RNA, 19 nt, Artificial Sequence
  Description of Artificial Sequence: Synthetic oligonucleotide
  Sense strand starting at position 2956 of SEQ ID NO: 318632
cgggauucagagugaaucu

SEQ ID NO: 577418 - RNA, 19 nt, Artificial Sequence
  Description of Artificial Sequence: Synthetic oligonucleotide
  Antisense strand to SEQ ID NO: 577417
agauucacucugaaucccg

SEQ ID NO: 577419 - RNA, 19 nt, Artificial Sequence
  Description of Artificial Sequence: Synthetic oligonucleotide
  Sense strand starting at position 2965 of SEQ ID NO: 318632
gagugaaucuucccacuga

SEQ ID NO: 577420 - RNA, 19 nt, Artificial Sequence
  Description of Artificial Sequence: Synthetic oligonucleotide
  Antisense strand to SEQ ID NO: 577419
ucagugggaagauucacuc

SEQ ID NO: 577421 - RNA, 19 nt, Artificial Sequence
  Description of Artificial Sequence: Synthetic oligonucleotide
  Sense strand starting at position 3219 of SEQ ID NO: 318632
cagggaucaucagacauuu

SEQ ID NO: 577422 - RNA, 19 nt, Artificial Sequence
  Description of Artificial Sequence: Synthetic oligonucleotide
  Antisense strand to SEQ ID NO: 577421
aaaugucugaugaucccug

SEQ ID NO: 577423 - RNA, 19 nt, Artificial Sequence
  Description of Artificial Sequence: Synthetic oligonucleotide
  Sense strand starting at position 3455 of SEQ ID NO: 318632
ggacuaggauuguuucaga

SEQ ID NO: 577424 - RNA, 19 nt, Artificial Sequence
  Description of Artificial Sequence: Synthetic oligonucleotide
  Antisense strand to SEQ ID NO: 577423
ucugaaacaauccuagucc

SEQ ID NO: 577425 - RNA, 19 nt, Artificial Sequence
  Description of Artificial Sequence: Synthetic oligonucleotide
  Sense strand starting at position 3496 of SEQ ID NO: 318632
agaggaaauuacuaaagaa

SEQ ID NO: 577426 - RNA, 19 nt, Artificial Sequence
  Description of Artificial Sequence: Synthetic oligonucleotide
  Antisense strand to SEQ ID NO: 577425
uucuuuaguaauuuccucu

SEQ ID NO: 577427 - RNA, 19 nt, Artificial Sequence
  Description of Artificial Sequence: Synthetic oligonucleotide
  Sense strand starting at position 3546 of SEQ ID NO: 318632
agaugacucucaguauuga

SEQ ID NO: 577428 - RNA, 19 nt, Artificial Sequence
  Description of Artificial Sequence: Synthetic oligonucleotide
  Antisense strand to SEQ ID NO: 577427
ucaauacugagagucaucu

SEQ ID NO: 577429 - RNA, 19 nt, Artificial Sequence
  Description of Artificial Sequence: Synthetic oligonucleotide
  Sense strand starting at position 3559 of SEQ ID NO: 318632
uauugagcgggucaaucaa

SEQ ID NO: 577430 - RNA, 19 nt, Artificial Sequence
  Description of Artificial Sequence: Synthetic oligonucleotide
  Antisense strand to SEQ ID NO: 577429
uugauugacccgcucaaua

SEQ ID NO: 577431 - RNA, 19 nt, Artificial Sequence
  Description of Artificial Sequence: Synthetic oligonucleotide
  Sense strand starting at position 3633 of SEQ ID NO: 318632
augagaacaucagacauaa

SEQ ID NO: 577432 - RNA, 19 nt, Artificial Sequence
  Description of Artificial Sequence: Synthetic oligonucleotide
  Antisense strand to SEQ ID NO: 577431
uuaugucugauguucucau

SEQ ID NO: 577433 - RNA, 19 nt, Artificial Sequence
  Description of Artificial Sequence: Synthetic oligonucleotide
  Sense strand starting at position 3698 of SEQ ID NO: 318632
cugaauggauuuggaaaua

SEQ ID NO: 577434 - RNA, 19 nt, Artificial Sequence
  Description of Artificial Sequence: Synthetic oligonucleotide
  Antisense strand to SEQ ID NO: 577433
uauuuccaaauccauucag

SEQ ID NO: 577435 - RNA, 19 nt, Artificial Sequence
  Description of Artificial Sequence: Synthetic oligonucleotide
  Sense strand starting at position 3708 of SEQ ID NO: 318632
uuggaaauagaauggcauu

SEQ ID NO: 577436 - RNA, 19 nt, Artificial Sequence
  Description of Artificial Sequence: Synthetic oligonucleotide
  Antisense strand to SEQ ID NO: 577435
aaugccauucuauuuccaa

SEQ ID NO: 577437 - RNA, 19 nt, Artificial Sequence
  Description of Artificial Sequence: Synthetic oligonucleotide
  Sense strand starting at position 66 of SEQ ID NO: 318633
cgguuaggaucauuuguuu

SEQ ID NO: 577438 - RNA, 19 nt, Artificial Sequence
  Description of Artificial Sequence: Synthetic oligonucleotide
  Antisense strand to SEQ ID NO: 577437
aaacaaaugauccuaaccg

SEQ ID NO: 577439 - RNA, 19 nt, Artificial Sequence
  Description of Artificial Sequence: Synthetic oligonucleotide
  Sense strand starting at position 172 of SEQ ID NO: 318633
auuguuccuuucgccagau

SEQ ID NO: 577440 - RNA, 19 nt, Artificial Sequence
  Description of Artificial Sequence: Synthetic oligonucleotide
  Antisense strand to SEQ ID NO: 577439
aucuggcgaaaggaacaau

SEQ ID NO: 577441 - RNA, 19 nt, Artificial Sequence
  Description of Artificial Sequence: Synthetic oligonucleotide
  Sense strand starting at position 173 of SEQ ID NO: 318633
uuguuccuuucgccagaua

SEQ ID NO: 577442 - RNA, 19 nt, Artificial Sequence
  Description of Artificial Sequence: Synthetic oligonucleotide
  Antisense strand to SEQ ID NO: 577441
uaucuggcgaaaggaacaa

SEQ ID NO: 577443 - RNA, 19 nt, Artificial Sequence
  Description of Artificial Sequence: Synthetic oligonucleotide
  Sense strand starting at position 176 of SEQ ID NO: 318633
uuccuuucgccagauagca

SEQ ID NO: 577444 - RNA, 19 nt, Artificial Sequence
  Description of Artificial Sequence: Synthetic oligonucleotide
  Antisense strand to SEQ ID NO: 577443
ugcuaucuggcgaaaggaa

SEQ ID NO: 577445 - RNA, 19 nt, Artificial Sequence
  Description of Artificial Sequence: Synthetic oligonucleotide
  Sense strand starting at position 203 of SEQ ID NO: 318633
gccuauguguaacugacuu

SEQ ID NO: 577446 - RNA, 19 nt, Artificial Sequence
  Description of Artificial Sequence: Synthetic oligonucleotide
  Antisense strand to SEQ ID NO: 577445
aagucaguuacacauaggc

SEQ ID NO: 577447 - RNA, 19 nt, Artificial Sequence
  Description of Artificial Sequence: Synthetic oligonucleotide
  Sense strand starting at position 301 of SEQ ID NO: 318633
gggucagucucauccaguu

SEQ ID NO: 577448 - RNA, 19 nt, Artificial Sequence
  Description of Artificial Sequence: Synthetic oligonucleotide
  Antisense strand to SEQ ID NO: 577447
aacuggaugagacugaccc

SEQ ID NO: 577449 - RNA, 19 nt, Artificial Sequence
  Description of Artificial Sequence: Synthetic oligonucleotide
  Sense strand starting at position 363 of SEQ ID NO: 318633
cgccguuuacggguugaau

SEQ ID NO: 577450 - RNA, 19 nt, Artificial Sequence
  Description of Artificial Sequence: Synthetic oligonucleotide
  Antisense strand to SEQ ID NO: 577449
auucaacccguaaacggcg

SEQ ID NO: 577451 - RNA, 19 nt, Artificial Sequence
  Description of Artificial Sequence: Synthetic oligonucleotide
  Sense strand starting at position 365 of SEQ ID NO: 318633
ccguuuacggguugaauca

SEQ ID NO: 577452 - RNA, 19 nt, Artificial Sequence
  Description of Artificial Sequence: Synthetic oligonucleotide
  Antisense strand to SEQ ID NO: 577451
ugauucaacccguaaacgg

SEQ ID NO: 577453 - RNA, 19 nt, Artificial Sequence
  Description of Artificial Sequence: Synthetic oligonucleotide
  Sense strand starting at position 366 of SEQ ID NO: 318633
cguuuacggguugaaucaa

SEQ ID NO: 577454 - RNA, 19 nt, Artificial Sequence
  Description of Artificial Sequence: Synthetic oligonucleotide
  Antisense strand to SEQ ID NO: 577453
uugauucaacccguaaacg

SEQ ID NO: 577455 - RNA, 19 nt, Artificial Sequence
  Description of Artificial Sequence: Synthetic oligonucleotide
  Sense strand starting at position 792 of SEQ ID NO: 318633
gguaguggauagccuuaaa

SEQ ID NO: 577456 - RNA, 19 nt, Artificial Sequence
  Description of Artificial Sequence: Synthetic oligonucleotide
  Antisense strand to SEQ ID NO: 577455
uuuaaggcuauccacuacc

SEQ ID NO: 577457 - RNA, 19 nt, Artificial Sequence
  Description of Artificial Sequence: Synthetic oligonucleotide
  Sense strand starting at position 1222 of SEQ ID NO: 318633
cacggagagcuccgcuauu

SEQ ID NO: 577458 - RNA, 19 nt, Artificial Sequence
  Description of Artificial Sequence: Synthetic oligonucleotide
  Antisense strand to SEQ ID NO: 577457
aauagcggagcucuccgug

SEQ ID NO: 577459 - RNA, 19 nt, Artificial Sequence
  Description of Artificial Sequence: Synthetic oligonucleotide
  Sense strand starting at position 1328 of SEQ ID NO: 318633
uccugcaacucuccgauua

SEQ ID NO: 577460 - RNA, 19 nt, Artificial Sequence
  Description of Artificial Sequence: Synthetic oligonucleotide
  Antisense strand to SEQ ID NO: 577459
uaaucggagaguugcagga

SEQ ID NO: 577461 - RNA, 19 nt, Artificial Sequence
  Description of Artificial Sequence: Synthetic oligonucleotide
  Sense strand starting at position 1393 of SEQ ID NO: 318633
cgcgcuugggccucugaaa

SEQ ID NO: 577462 - RNA, 19 nt, Artificial Sequence
  Description of Artificial Sequence: Synthetic oligonucleotide
  Antisense strand to SEQ ID NO: 577461
uuucagaggcccaagcgcg

SEQ ID NO: 577463 - RNA, 19 nt, Artificial Sequence
  Description of Artificial Sequence: Synthetic oligonucleotide
  Sense strand starting at position 1410 of SEQ ID NO: 318633
aaugguuuccgggagugga

SEQ ID NO: 577464 - RNA, 19 nt, Artificial Sequence
  Description of Artificial Sequence: Synthetic oligonucleotide
  Antisense strand to SEQ ID NO: 577463
uccacucccggaaaccauu

SEQ ID NO: 577465 - RNA, 19 nt, Artificial Sequence
  Description of Artificial Sequence: Synthetic oligonucleotide
  Sense strand starting at position 2005 of SEQ ID NO: 318633
ucucgucgcacugaaacuu

SEQ ID NO: 577466 - RNA, 19 nt, Artificial Sequence
  Description of Artificial Sequence: Synthetic oligonucleotide
  Antisense strand to SEQ ID NO: 577465
aaguuucagugcgacgaga

SEQ ID NO: 577467 - RNA, 19 nt, Artificial Sequence
  Description of Artificial Sequence: Synthetic oligonucleotide
  Sense strand starting at position 2042 of SEQ ID NO: 318633
ccgacaggcucugugucau

SEQ ID NO: 577468 - RNA, 19 nt, Artificial Sequence
  Description of Artificial Sequence: Synthetic oligonucleotide
  Antisense strand to SEQ ID NO: 577467
augacacagagccugucgg

SEQ ID NO: 577469 - RNA, 19 nt, Artificial Sequence
  Description of Artificial Sequence: Synthetic oligonucleotide
  Sense strand starting at position 2053 of SEQ ID NO: 318633
ugugucaucuuucuugaac

SEQ ID NO: 577470 - RNA, 19 nt, Artificial Sequence
  Description of Artificial Sequence: Synthetic oligonucleotide
  Antisense strand to SEQ ID NO: 577469
guucaagaaagaugacaca

SEQ ID NO: 577471 - RNA, 19 nt, Artificial Sequence
  Description of Artificial Sequence: Synthetic oligonucleotide
  Sense strand starting at position 2054 of SEQ ID NO: 318633
gugucaucuuucuugaacc

SEQ ID NO: 577472 - RNA, 19 nt, Artificial Sequence
  Description of Artificial Sequence: Synthetic oligonucleotide
  Antisense strand to SEQ ID NO: 577471
gguucaagaaagaugacac

SEQ ID NO: 577473 - RNA, 19 nt, Artificial Sequence
  Description of Artificial Sequence: Synthetic oligonucleotide
  Sense strand starting at position 2056 of SEQ ID NO: 318633
gucaucuuucuugaaccga

SEQ ID NO: 577474 - RNA, 19 nt, Artificial Sequence
  Description of Artificial Sequence: Synthetic oligonucleotide
  Antisense strand to SEQ ID NO: 577473
ucgguucaagaaagaugac

SEQ ID NO: 577475 - RNA, 19 nt, Artificial Sequence
  Description of Artificial Sequence: Synthetic oligonucleotide
  Sense strand starting at position 2078 of SEQ ID NO: 318633
uggaguuuccgcugcuaau

SEQ ID NO: 577476 - RNA, 19 nt, Artificial Sequence
  Description of Artificial Sequence: Synthetic oligonucleotide
  Antisense strand to SEQ ID NO: 577475
auuagcagcggaaacucca

SEQ ID NO: 577477 - RNA, 19 nt, Artificial Sequence
  Description of Artificial Sequence: Synthetic oligonucleotide
  Sense strand starting at position 2080 of SEQ ID NO: 318633
gaguuuccgcugcuaauuc

SEQ ID NO: 577478 - RNA, 19 nt, Artificial Sequence
  Description of Artificial Sequence: Synthetic oligonucleotide
  Antisense strand to SEQ ID NO: 577477
gaauuagcagcggaaacuc

SEQ ID NO: 577479 - RNA, 19 nt, Artificial Sequence
  Description of Artificial Sequence: Synthetic oligonucleotide
  Sense strand starting at position 2111 of SEQ ID NO: 318633
agccauuggcugcgaucaa

SEQ ID NO: 577480 - RNA, 19 nt, Artificial Sequence
  Description of Artificial Sequence: Synthetic oligonucleotide
  Antisense strand to SEQ ID NO: 577479
uugaucgcagccaauggcu

SEQ ID NO: 577481 - RNA, 19 nt, Artificial Sequence
  Description of Artificial Sequence: Synthetic oligonucleotide
  Sense strand starting at position 2272 of SEQ ID NO: 318633
gauauuagagcccgaacca

SEQ ID NO: 577482 - RNA, 19 nt, Artificial Sequence
  Description of Artificial Sequence: Synthetic oligonucleotide
  Antisense strand to SEQ ID NO: 577481
ugguucgggcucuaauauc

SEQ ID NO: 577483 - RNA, 19 nt, Artificial Sequence
  Description of Artificial Sequence: Synthetic oligonucleotide
  Sense strand starting at position 2389 of SEQ ID NO: 318633
agcgcuccgcuugugaaau

SEQ ID NO: 577484 - RNA, 19 nt, Artificial Sequence
  Description of Artificial Sequence: Synthetic oligonucleotide
  Antisense strand to SEQ ID NO: 577483
auuucacaagcggagcgcu

SEQ ID NO: 577485 - RNA, 19 nt, Artificial Sequence
  Description of Artificial Sequence: Synthetic oligonucleotide
  Sense strand starting at position 2920 of SEQ ID NO: 318633
cggguuccugaaugucaaa

SEQ ID NO: 577486 - RNA, 19 nt, Artificial Sequence
  Description of Artificial Sequence: Synthetic oligonucleotide
  Antisense strand to SEQ ID NO: 577485
uuugacauucaggaacccg

SEQ ID NO: 577487 - RNA, 19 nt, Artificial Sequence
  Description of Artificial Sequence: Synthetic oligonucleotide
  Sense strand starting at position 2955 of SEQ ID NO: 318633
agagcaaauugcgggauuu

SEQ ID NO: 577488 - RNA, 19 nt, Artificial Sequence
  Description of Artificial Sequence: Synthetic oligonucleotide
  Antisense strand to SEQ ID NO: 577487
aaaucccgcaauuugcucu

SEQ ID NO: 577489 - RNA, 19 nt, Artificial Sequence
  Description of Artificial Sequence: Synthetic oligonucleotide
  Sense strand starting at position 2966 of SEQ ID NO: 318633
cgggauuucuuugggaaac

SEQ ID NO: 577490 - RNA, 19 nt, Artificial Sequence
  Description of Artificial Sequence: Synthetic oligonucleotide
  Antisense strand to SEQ ID NO: 577489
guuucccaaagaaaucccg

SEQ ID NO: 577491 - RNA, 19 nt, Artificial Sequence
  Description of Artificial Sequence: Synthetic oligonucleotide
  Sense strand starting at position 2967 of SEQ ID NO: 318633
gggauuucuuugggaaacg

SEQ ID NO: 577492 - RNA, 19 nt, Artificial Sequence
  Description of Artificial Sequence: Synthetic oligonucleotide
  Antisense strand to SEQ ID NO: 577491
cguuucccaaagaaauccc

SEQ ID NO: 577493 - RNA, 19 nt, Artificial Sequence
  Description of Artificial Sequence: Synthetic oligonucleotide
  Sense strand starting at position 3178 of SEQ ID NO: 318633
ggugcaaacucuuugagug

SEQ ID NO: 577494 - RNA, 19 nt, Artificial Sequence
  Description of Artificial Sequence: Synthetic oligonucleotide
  Antisense strand to SEQ ID NO: 577493
cacucaaagaguuugcacc

SEQ ID NO: 577495 - RNA, 19 nt, Artificial Sequence
  Description of Artificial Sequence: Synthetic oligonucleotide
  Sense strand starting at position 3179 of SEQ ID NO: 318633
gugcaaacucuuugagugu

SEQ ID NO: 577496 - RNA, 19 nt, Artificial Sequence
  Description of Artificial Sequence: Synthetic oligonucleotide
  Antisense strand to SEQ ID NO: 577495
acacucaaagaguuugcac

SEQ ID NO: 577497 - RNA, 19 nt, Artificial Sequence
  Description of Artificial Sequence: Synthetic oligonucleotide
  Sense strand starting at position 3264 of SEQ ID NO: 318633
gcuguuguuggccagaagu

SEQ ID NO: 577498 - RNA, 19 nt, Artificial Sequence
  Description of Artificial Sequence: Synthetic oligonucleotide
  Antisense strand to SEQ ID NO: 577497
acuucuggccaacaacagc

SEQ ID NO: 577499 - RNA, 19 nt, Artificial Sequence
  Description of Artificial Sequence: Synthetic oligonucleotide
  Sense strand starting at position 3266 of SEQ ID NO: 318633
uguuguuggccagaagugu

SEQ ID NO: 577500 - RNA, 19 nt, Artificial Sequence
  Description of Artificial Sequence: Synthetic oligonucleotide
  Antisense strand to SEQ ID NO: 577499
acacuucuggccaacaaca

SEQ ID NO: 577501 - RNA, 19 nt, Artificial Sequence
  Description of Artificial Sequence: Synthetic oligonucleotide
  Sense strand starting at position 3272 of SEQ ID NO: 318633
uggccagaaguguguucaa

SEQ ID NO: 577502 - RNA, 19 nt, Artificial Sequence
  Description of Artificial Sequence: Synthetic oligonucleotide
  Antisense strand to SEQ ID NO: 577501
uugaacacacuucuggcca

SEQ ID NO: 577503 - RNA, 19 nt, Artificial Sequence
  Description of Artificial Sequence: Synthetic oligonucleotide
  Sense strand starting at position 3302 of SEQ ID NO: 318633
ccauuuccucgcugaguga

SEQ ID NO: 577504 - RNA, 19 nt, Artificial Sequence
  Description of Artificial Sequence: Synthetic oligonucleotide
  Antisense strand to SEQ ID NO: 577503
ucacucagcgaggaaaugg

SEQ ID NO: 577505 - RNA, 19 nt, Artificial Sequence
  Description of Artificial Sequence: Synthetic oligonucleotide
  Sense strand starting at position 3315 of SEQ ID NO: 318633
gagugaccuugagaaauug

SEQ ID NO: 577506 - RNA, 19 nt, Artificial Sequence
  Description of Artificial Sequence: Synthetic oligonucleotide
  Antisense strand to SEQ ID NO: 577505
caauuucucaaggucacuc

SEQ ID NO: 577507 - RNA, 19 nt, Artificial Sequence
  Description of Artificial Sequence: Synthetic oligonucleotide
  Sense strand starting at position 3499 of SEQ ID NO: 318633
cagaguaauggcugaugua

SEQ ID NO: 577508 - RNA, 19 nt, Artificial Sequence
  Description of Artificial Sequence: Synthetic oligonucleotide
  Antisense strand to SEQ ID NO: 577507
uacaucagccauuacucug

SEQ ID NO: 577509 - RNA, 19 nt, Artificial Sequence
  Description of Artificial Sequence: Synthetic oligonucleotide
  Sense strand starting at position 3500 of SEQ ID NO: 318633
agaguaauggcugauguau

SEQ ID NO: 577510 - RNA, 19 nt, Artificial Sequence
  Description of Artificial Sequence: Synthetic oligonucleotide
  Antisense strand to SEQ ID NO: 577509
auacaucagccauuacucu

SEQ ID NO: 577511 - RNA, 19 nt, Artificial Sequence
  Description of Artificial Sequence: Synthetic oligonucleotide
  Sense strand starting at position 3512 of SEQ ID NO: 318633
gauguauuauuguugugac

SEQ ID NO: 577512 - RNA, 19 nt, Artificial Sequence
  Description of Artificial Sequence: Synthetic oligonucleotide
  Antisense strand to SEQ ID NO: 577511
gucacaacaauaauacauc

SEQ ID NO: 577513 - RNA, 19 nt, Artificial Sequence
  Description of Artificial Sequence: Synthetic oligonucleotide
  Sense strand starting at position 3592 of SEQ ID NO: 318633
gguguauuugucuaccagu

SEQ ID NO: 577514 - RNA, 19 nt, Artificial Sequence
  Description of Artificial Sequence: Synthetic oligonucleotide
  Antisense strand to SEQ ID NO: 577513
acugguagacaaauacacc

SEQ ID NO: 577515 - RNA, 19 nt, Artificial Sequence
  Description of Artificial Sequence: Synthetic oligonucleotide
  Sense strand starting at position 3681 of SEQ ID NO: 318633
auccaaaggcgucaggauu

SEQ ID NO: 577516 - RNA, 19 nt, Artificial Sequence
  Description of Artificial Sequence: Synthetic oligonucleotide
  Antisense strand to SEQ ID NO: 577515
aauccugacgccuuuggau

SEQ ID NO: 577517 - RNA, 19 nt, Artificial Sequence
  Description of Artificial Sequence: Synthetic oligonucleotide
  Sense strand starting at position 281 of SEQ ID NO: 318634
uuaggaguuucucuuguuc

SEQ ID NO: 577518 - RNA, 19 nt, Artificial Sequence
  Description of Artificial Sequence: Synthetic oligonucleotide
  Antisense strand to SEQ ID NO: 577517
gaacaagagaaacuccuaa

SEQ ID NO: 577519 - RNA, 19 nt, Artificial Sequence
  Description of Artificial Sequence: Synthetic oligonucleotide
  Sense strand starting at position 290 of SEQ ID NO: 318634
ucucuuguuccucauguuu

SEQ ID NO: 577520 - RNA, 19 nt, Artificial Sequence
  Description of Artificial Sequence: Synthetic oligonucleotide
  Antisense strand to SEQ ID NO: 577519
aaacaugaggaacaagaga

SEQ ID NO: 577521 - RNA, 19 nt, Artificial Sequence
  Description of Artificial Sequence: Synthetic oligonucleotide
  Sense strand starting at position 305 of SEQ ID NO: 318634
guuuccuucccuugugaca

SEQ ID NO: 577522 - RNA, 19 nt, Artificial Sequence
  Description of Artificial Sequence: Synthetic oligonucleotide
  Antisense strand to SEQ ID NO: 577521
ugucacaagggaaggaaac

SEQ ID NO: 577523 - RNA, 19 nt, Artificial Sequence
  Description of Artificial Sequence: Synthetic oligonucleotide
  Sense strand starting at position 342 of SEQ ID NO: 318634
cugugagcaccucaaagaa

SEQ ID NO: 577524 - RNA, 19 nt, Artificial Sequence
  Description of Artificial Sequence: Synthetic oligonucleotide
  Antisense strand to SEQ ID NO: 577523
uucuuugaggugcucacag

SEQ ID NO: 577525 - RNA, 19 nt, Artificial Sequence
  Description of Artificial Sequence: Synthetic oligonucleotide
  Sense strand starting at position 405 of SEQ ID NO: 318634
aguguccuggcauaaagua

SEQ ID NO: 577526 - RNA, 19 nt, Artificial Sequence
  Description of Artificial Sequence: Synthetic oligonucleotide
  Antisense strand to SEQ ID NO: 577525
uacuuuaugccaggacacu

SEQ ID NO: 577527 - RNA, 19 nt, Artificial Sequence
  Description of Artificial Sequence: Synthetic oligonucleotide
  Sense strand starting at position 479 of SEQ ID NO: 318634
ugguauguacgguaaacua

SEQ ID NO: 577528 - RNA, 19 nt, Artificial Sequence
  Description of Artificial Sequence: Synthetic oligonucleotide
  Antisense strand to SEQ ID NO: 577527
uaguuuaccguacauacca

SEQ ID NO: 577529 - RNA, 19 nt, Artificial Sequence
  Description of Artificial Sequence: Synthetic oligonucleotide
  Sense strand starting at position 487 of SEQ ID NO: 318634
acgguaaacuauguacgua

SEQ ID NO: 577530 - RNA, 19 nt, Artificial Sequence
  Description of Artificial Sequence: Synthetic oligonucleotide
  Antisense strand to SEQ ID NO: 577529
uacguacauaguuuaccgu

SEQ ID NO: 577531 - RNA, 19 nt, Artificial Sequence
  Description of Artificial Sequence: Synthetic oligonucleotide
  Sense strand starting at position 488 of SEQ ID NO: 318634
cgguaaacuauguacguaa

SEQ ID NO: 577532 - RNA, 19 nt, Artificial Sequence
  Description of Artificial Sequence: Synthetic oligonucleotide
  Antisense strand to SEQ ID NO: 577531
uuacguacauaguuuaccg

SEQ ID NO: 577533 - RNA, 19 nt, Artificial Sequence
  Description of Artificial Sequence: Synthetic oligonucleotide
  Sense strand starting at position 577 of SEQ ID NO: 318634
cugaguacuuaacuauaug

SEQ ID NO: 577534 - RNA, 19 nt, Artificial Sequence
  Description of Artificial Sequence: Synthetic oligonucleotide
  Antisense strand to SEQ ID NO: 577533
cauauaguuaaguacucag

SEQ ID NO: 577535 - RNA, 19 nt, Artificial Sequence
  Description of Artificial Sequence: Synthetic oligonucleotide
  Sense strand starting at position 656 of SEQ ID NO: 318634
auuaaagucuaguuggaga

SEQ ID NO: 577536 - RNA, 19 nt, Artificial Sequence
  Description of Artificial Sequence: Synthetic oligonucleotide
  Antisense strand to SEQ ID NO: 577535
ucuccaacuagacuuuaau

SEQ ID NO: 577537 - RNA, 19 nt, Artificial Sequence
  Description of Artificial Sequence: Synthetic oligonucleotide
  Sense strand starting at position 658 of SEQ ID NO: 318634
uaaagucuaguuggagaaa

SEQ ID NO: 577538 - RNA, 19 nt, Artificial Sequence
  Description of Artificial Sequence: Synthetic oligonucleotide
  Antisense strand to SEQ ID NO: 577537
uuucuccaacuagacuuua

SEQ ID NO: 577539 - RNA, 19 nt, Artificial Sequence
  Description of Artificial Sequence: Synthetic oligonucleotide
  Sense strand starting at position 1063 of SEQ ID NO: 318634
gaacguuagacguagcgaa

SEQ ID NO: 577540 - RNA, 19 nt, Artificial Sequence
  Description of Artificial Sequence: Synthetic oligonucleotide
  Antisense strand to SEQ ID NO: 577539
uucgcuacgucuaacguuc

SEQ ID NO: 577541 - RNA, 19 nt, Artificial Sequence
  Description of Artificial Sequence: Synthetic oligonucleotide
  Sense strand starting at position 1163 of SEQ ID NO: 318634
aaauuugaguuaggaagag

SEQ ID NO: 577542 - RNA, 19 nt, Artificial Sequence
  Description of Artificial Sequence: Synthetic oligonucleotide
  Antisense strand to SEQ ID NO: 577541
cucuuccuaacucaaauuu

SEQ ID NO: 577543 - RNA, 19 nt, Artificial Sequence
  Description of Artificial Sequence: Synthetic oligonucleotide
  Sense strand starting at position 1252 of SEQ ID NO: 318634
gacggugacaagcauagau

SEQ ID NO: 577544 - RNA, 19 nt, Artificial Sequence
  Description of Artificial Sequence: Synthetic oligonucleotide
  Antisense strand to SEQ ID NO: 577543
aucuaugcuugucaccguc

SEQ ID NO: 577545 - RNA, 19 nt, Artificial Sequence
  Description of Artificial Sequence: Synthetic oligonucleotide
  Sense strand starting at position 1332 of SEQ ID NO: 318634
gauggugaggcauguaaag

SEQ ID NO: 577546 - RNA, 19 nt, Artificial Sequence
  Description of Artificial Sequence: Synthetic oligonucleotide
  Antisense strand to SEQ ID NO: 577545
cuuuacaugccucaccauc

SEQ ID NO: 577547 - RNA, 19 nt, Artificial Sequence
  Description of Artificial Sequence: Synthetic oligonucleotide
  Sense strand starting at position 1382 of SEQ ID NO: 318634
ggacuugaugauggaucga

SEQ ID NO: 577548 - RNA, 19 nt, Artificial Sequence
  Description of Artificial Sequence: Synthetic oligonucleotide
  Antisense strand to SEQ ID NO: 577547
ucgauccaucaucaagucc

SEQ ID NO: 577549 - RNA, 19 nt, Artificial Sequence
  Description of Artificial Sequence: Synthetic oligonucleotide
  Sense strand starting at position 1406 of SEQ ID NO: 318634
gguugugggucaaagaguu

SEQ ID NO: 577550 - RNA, 19 nt, Artificial Sequence
  Description of Artificial Sequence: Synthetic oligonucleotide
  Antisense strand to SEQ ID NO: 577549
aacucuuugacccacaacc

SEQ ID NO: 577551 - RNA, 19 nt, Artificial Sequence
  Description of Artificial Sequence: Synthetic oligonucleotide
  Sense strand starting at position 1416 of SEQ ID NO: 318634
caaagaguugugcaggaug

SEQ ID NO: 577552 - RNA, 19 nt, Artificial Sequence
  Description of Artificial Sequence: Synthetic oligonucleotide
  Antisense strand to SEQ ID NO: 577551
cauccugcacaacucuuug

SEQ ID NO: 577553 - RNA, 19 nt, Artificial Sequence
  Description of Artificial Sequence: Synthetic oligonucleotide
  Sense strand starting at position 1418 of SEQ ID NO: 318634
aagaguugugcaggaugau

SEQ ID NO: 577554 - RNA, 19 nt, Artificial Sequence
  Description of Artificial Sequence: Synthetic oligonucleotide
  Antisense strand to SEQ ID NO: 577553
aucauccugcacaacucuu

SEQ ID NO: 577555 - RNA, 19 nt, Artificial Sequence
  Description of Artificial Sequence: Synthetic oligonucleotide
  Sense strand starting at position 1419 of SEQ ID NO: 318634
agaguugugcaggaugauu

SEQ ID NO: 577556 - RNA, 19 nt, Artificial Sequence
  Description of Artificial Sequence: Synthetic oligonucleotide
  Antisense strand to SEQ ID NO: 577555
aaucauccugcacaacucu

SEQ ID NO: 577557 - RNA, 19 nt, Artificial Sequence
  Description of Artificial Sequence: Synthetic oligonucleotide
  Sense strand starting at position 2129 of SEQ ID NO: 318634
cgucgcucugccucugauu

SEQ ID NO: 577558 - RNA, 19 nt, Artificial Sequence
  Description of Artificial Sequence: Synthetic oligonucleotide
  Antisense strand to SEQ ID NO: 577557
aaucagaggcagagcgacg

SEQ ID NO: 577559 - RNA, 19 nt, Artificial Sequence
  Description of Artificial Sequence: Synthetic oligonucleotide
  Sense strand starting at position 2134 of SEQ ID NO: 318634
cucugccucugauugauuu

SEQ ID NO: 577560 - RNA, 19 nt, Artificial Sequence
  Description of Artificial Sequence: Synthetic oligonucleotide
  Antisense strand to SEQ ID NO: 577559
aaaucaaucagaggcagag

SEQ ID NO: 577561 - RNA, 19 nt, Artificial Sequence
  Description of Artificial Sequence: Synthetic oligonucleotide
  Sense strand starting at position 2258 of SEQ ID NO: 318634
auacgcucuagaugaaagu

SEQ ID NO: 577562 - RNA, 19 nt, Artificial Sequence
  Description of Artificial Sequence: Synthetic oligonucleotide
  Antisense strand to SEQ ID NO: 577561
acuuucaucuagagcguau

SEQ ID NO: 577563 - RNA, 19 nt, Artificial Sequence
  Description of Artificial Sequence: Synthetic oligonucleotide
  Sense strand starting at position 2259 of SEQ ID NO: 318634
uacgcucuagaugaaaguu

SEQ ID NO: 577564 - RNA, 19 nt, Artificial Sequence
  Description of Artificial Sequence: Synthetic oligonucleotide
  Antisense strand to SEQ ID NO: 577563
aacuuucaucuagagcgua

SEQ ID NO: 577565 - RNA, 19 nt, Artificial Sequence
  Description of Artificial Sequence: Synthetic oligonucleotide
  Sense strand starting at position 2320 of SEQ ID NO: 318634
acuauuaaugcggauccca

SEQ ID NO: 577566 - RNA, 19 nt, Artificial Sequence
  Description of Artificial Sequence: Synthetic oligonucleotide
  Antisense strand to SEQ ID NO: 577565
ugggauccgcauuaauagu

SEQ ID NO: 577567 - RNA, 19 nt, Artificial Sequence
  Description of Artificial Sequence: Synthetic oligonucleotide
  Sense strand starting at position 2329 of SEQ ID NO: 318634
gcggaucccacugaugaga

SEQ ID NO: 577568 - RNA, 19 nt, Artificial Sequence
  Description of Artificial Sequence: Synthetic oligonucleotide
  Antisense strand to SEQ ID NO: 577567
ucucaucagugggauccgc

SEQ ID NO: 577569 - RNA, 19 nt, Artificial Sequence
  Description of Artificial Sequence: Synthetic oligonucleotide
  Sense strand starting at position 2338 of SEQ ID NO: 318634
acugaugagagcugccaaa

SEQ ID NO: 577570 - RNA, 19 nt, Artificial Sequence
  Description of Artificial Sequence: Synthetic oligonucleotide
  Antisense strand to SEQ ID NO: 577569
uuuggcagcucucaucagu

SEQ ID NO: 577571 - RNA, 19 nt, Artificial Sequence
  Description of Artificial Sequence: Synthetic oligonucleotide
  Sense strand starting at position 2361 of SEQ ID NO: 318634
cuugaagcgucauugaauu

SEQ ID NO: 577572 - RNA, 19 nt, Artificial Sequence
  Description of Artificial Sequence: Synthetic oligonucleotide
  Antisense strand to SEQ ID NO: 577571
aauucaaugacgcuucaag

SEQ ID NO: 577573 - RNA, 19 nt, Artificial Sequence
  Description of Artificial Sequence: Synthetic oligonucleotide
  Sense strand starting at position 2363 of SEQ ID NO: 318634
ugaagcgucauugaauugu

SEQ ID NO: 577574 - RNA, 19 nt, Artificial Sequence
  Description of Artificial Sequence: Synthetic oligonucleotide
  Antisense strand to SEQ ID NO: 577573
acaauucaaugacgcuuca

SEQ ID NO: 577575 - RNA, 19 nt, Artificial Sequence
  Description of Artificial Sequence: Synthetic oligonucleotide
  Sense strand starting at position 2369 of SEQ ID NO: 318634
gucauugaauugucaacga

SEQ ID NO: 577576 - RNA, 19 nt, Artificial Sequence
  Description of Artificial Sequence: Synthetic oligonucleotide
  Antisense strand to SEQ ID NO: 577575
ucguugacaauucaaugac

SEQ ID NO: 577577 - RNA, 19 nt, Artificial Sequence
  Description of Artificial Sequence: Synthetic oligonucleotide
  Sense strand starting at position 2876 of SEQ ID NO: 318634
aaagaaaucugggauauga

SEQ ID NO: 577578 - RNA, 19 nt, Artificial Sequence
  Description of Artificial Sequence: Synthetic oligonucleotide
  Antisense strand to SEQ ID NO: 577577
ucauaucccagauuucuuu

SEQ ID NO: 577579 - RNA, 19 nt, Artificial Sequence
  Description of Artificial Sequence: Synthetic oligonucleotide
  Sense strand starting at position 3018 of SEQ ID NO: 318634
aguacaagacguuaucagu

SEQ ID NO: 577580 - RNA, 19 nt, Artificial Sequence
  Description of Artificial Sequence: Synthetic oligonucleotide
  Antisense strand to SEQ ID NO: 577579
acugauaacgucuuguacu

SEQ ID NO: 577581 - RNA, 19 nt, Artificial Sequence
  Description of Artificial Sequence: Synthetic oligonucleotide
  Sense strand starting at position 3024 of SEQ ID NO: 318634
agacguuaucaguaccaga

SEQ ID NO: 577582 - RNA, 19 nt, Artificial Sequence
  Description of Artificial Sequence: Synthetic oligonucleotide
  Antisense strand to SEQ ID NO: 577581
ucugguacugauaacgucu

SEQ ID NO: 577583 - RNA, 19 nt, Artificial Sequence
  Description of Artificial Sequence: Synthetic oligonucleotide
  Sense strand starting at position 3029 of SEQ ID NO: 318634
uuaucaguaccagacguua

SEQ ID NO: 577584 - RNA, 19 nt, Artificial Sequence
  Description of Artificial Sequence: Synthetic oligonucleotide
  Antisense strand to SEQ ID NO: 577583
uaacgucugguacugauaa

SEQ ID NO: 577585 - RNA, 19 nt, Artificial Sequence
  Description of Artificial Sequence: Synthetic oligonucleotide
  Sense strand starting at position 3348 of SEQ ID NO: 318634
cuaauaauccuuuguucga

SEQ ID NO: 577586 - RNA, 19 nt, Artificial Sequence
  Description of Artificial Sequence: Synthetic oligonucleotide
  Antisense strand to SEQ ID NO: 577585
ucgaacaaaggauuauuag

SEQ ID NO: 577587 - RNA, 19 nt, Artificial Sequence
  Description of Artificial Sequence: Synthetic oligonucleotide
  Sense strand starting at position 3349 of SEQ ID NO: 318634
uaauaauccuuuguucgag

SEQ ID NO: 577588 - RNA, 19 nt, Artificial Sequence
  Description of Artificial Sequence: Synthetic oligonucleotide
  Antisense strand to SEQ ID NO: 577587
cucgaacaaaggauuauua

SEQ ID NO: 577589 - RNA, 19 nt, Artificial Sequence
  Description of Artificial Sequence: Synthetic oligonucleotide
  Sense strand starting at position 3350 of SEQ ID NO: 318634
aauaauccuuuguucgagu

SEQ ID NO: 577590 - RNA, 19 nt, Artificial Sequence
  Description of Artificial Sequence: Synthetic oligonucleotide
  Antisense strand to SEQ ID NO: 577589
acucgaacaaaggauuauu

SEQ ID NO: 577591 - RNA, 19 nt, Artificial Sequence
  Description of Artificial Sequence: Synthetic oligonucleotide
  Sense strand starting at position 3522 of SEQ ID NO: 318634
aagacauugguuuguggga

SEQ ID NO: 577592 - RNA, 19 nt, Artificial Sequence
  Description of Artificial Sequence: Synthetic oligonucleotide
  Antisense strand to SEQ ID NO: 577591
ucccacaaaccaaugucuu

SEQ ID NO: 577593 - RNA, 19 nt, Artificial Sequence
  Description of Artificial Sequence: Synthetic oligonucleotide
  Sense strand starting at position 3772 of SEQ ID NO: 318634
aacuuaaagucuguguuga

SEQ ID NO: 577594 - RNA, 19 nt, Artificial Sequence
  Description of Artificial Sequence: Synthetic oligonucleotide
  Antisense strand to SEQ ID NO: 577593
ucaacacagacuuuaaguu

SEQ ID NO: 577595 - RNA, 19 nt, Artificial Sequence
  Description of Artificial Sequence: Synthetic oligonucleotide
  Sense strand starting at position 3788 of SEQ ID NO: 318634
ugauguuaacgguagagag

SEQ ID NO: 577596 - RNA, 19 nt, Artificial Sequence
  Description of Artificial Sequence: Synthetic oligonucleotide
  Antisense strand to SEQ ID NO: 577595
cucucuaccguuaacauca

SEQ ID NO: 577597 - RNA, 19 nt, Artificial Sequence
  Description of Artificial Sequence: Synthetic oligonucleotide
  Sense strand starting at position 59 of SEQ ID NO: 318635
ggugcuaauccaugaaggu

SEQ ID NO: 577598 - RNA, 19 nt, Artificial Sequence
  Description of Artificial Sequence: Synthetic oligonucleotide
  Antisense strand to SEQ ID NO: 577597
accuucauggauuagcacc

SEQ ID NO: 577599 - RNA, 19 nt, Artificial Sequence
  Description of Artificial Sequence: Synthetic oligonucleotide
  Sense strand starting at position 60 of SEQ ID NO: 318635
gugcuaauccaugaaggua

SEQ ID NO: 577600 - RNA, 19 nt, Artificial Sequence
  Description of Artificial Sequence: Synthetic oligonucleotide
  Antisense strand to SEQ ID NO: 577599
uaccuucauggauuagcac

SEQ ID NO: 577601 - RNA, 19 nt, Artificial Sequence
  Description of Artificial Sequence: Synthetic oligonucleotide
  Sense strand starting at position 146 of SEQ ID NO: 318635
uguugauucuaccuacuac

SEQ ID NO: 577602 - RNA, 19 nt, Artificial Sequence
  Description of Artificial Sequence: Synthetic oligonucleotide
  Antisense strand to SEQ ID NO: 577601
guaguagguagaaucaaca

SEQ ID NO: 577603 - RNA, 19 nt, Artificial Sequence
  Description of Artificial Sequence: Synthetic oligonucleotide
  Sense strand starting at position 329 of SEQ ID NO: 318635
ugcagcuaccaagaauauu

SEQ ID NO: 577604 - RNA, 19 nt, Artificial Sequence
  Description of Artificial Sequence: Synthetic oligonucleotide
  Antisense strand to SEQ ID NO: 577603
aauauucuugguagcugca

SEQ ID NO: 577605 - RNA, 19 nt, Artificial Sequence
  Description of Artificial Sequence: Synthetic oligonucleotide
  Sense strand starting at position 337 of SEQ ID NO: 318635
ccaagaauauucucgucau

SEQ ID NO: 577606 - RNA, 19 nt, Artificial Sequence
  Description of Artificial Sequence: Synthetic oligonucleotide
  Antisense strand to SEQ ID NO: 577605
augacgagaauauucuugg

SEQ ID NO: 577607 - RNA, 19 nt, Artificial Sequence
  Description of Artificial Sequence: Synthetic oligonucleotide
  Sense strand starting at position 340 of SEQ ID NO: 318635
agaauauucucgucauauc

SEQ ID NO: 577608 - RNA, 19 nt, Artificial Sequence
  Description of Artificial Sequence: Synthetic oligonucleotide
  Antisense strand to SEQ ID NO: 577607
gauaugacgagaauauucu

SEQ ID NO: 577609 - RNA, 19 nt, Artificial Sequence
  Description of Artificial Sequence: Synthetic oligonucleotide
  Sense strand starting at position 348 of SEQ ID NO: 318635
cucgucauaucacugaacu

SEQ ID NO: 577610 - RNA, 19 nt, Artificial Sequence
  Description of Artificial Sequence: Synthetic oligonucleotide
  Antisense strand to SEQ ID NO: 577609
aguucagugauaugacgag

SEQ ID NO: 577611 - RNA, 19 nt, Artificial Sequence
  Description of Artificial Sequence: Synthetic oligonucleotide
  Sense strand starting at position 412 of SEQ ID NO: 318635
uccuuaacauggucagcaa

SEQ ID NO: 577612 - RNA, 19 nt, Artificial Sequence
  Description of Artificial Sequence: Synthetic oligonucleotide
  Antisense strand to SEQ ID NO: 577611
uugcugaccauguuaagga

SEQ ID NO: 577613 - RNA, 19 nt, Artificial Sequence
  Description of Artificial Sequence: Synthetic oligonucleotide
  Sense strand starting at position 499 of SEQ ID NO: 318635
ucucuauggcccugaaauu

SEQ ID NO: 577614 - RNA, 19 nt, Artificial Sequence
  Description of Artificial Sequence: Synthetic oligonucleotide
  Antisense strand to SEQ ID NO: 577613
aauuucagggccauagaga

SEQ ID NO: 577615 - RNA, 19 nt, Artificial Sequence
  Description of Artificial Sequence: Synthetic oligonucleotide
  Sense strand starting at position 819 of SEQ ID NO: 318635
cucaguaaagacuguucua

SEQ ID NO: 577616 - RNA, 19 nt, Artificial Sequence
  Description of Artificial Sequence: Synthetic oligonucleotide
  Antisense strand to SEQ ID NO: 577615
uagaacagucuuuacugag

SEQ ID NO: 577617 - RNA, 19 nt, Artificial Sequence
  Description of Artificial Sequence: Synthetic oligonucleotide
  Sense strand starting at position 822 of SEQ ID NO: 318635
aguaaagacuguucuaacc

SEQ ID NO: 577618 - RNA, 19 nt, Artificial Sequence
  Description of Artificial Sequence: Synthetic oligonucleotide
  Antisense strand to SEQ ID NO: 577617
gguuagaacagucuuuacu

SEQ ID NO: 577619 - RNA, 19 nt, Artificial Sequence
  Description of Artificial Sequence: Synthetic oligonucleotide
  Sense strand starting at position 1066 of SEQ ID NO: 318635
uuaaauuggagguguggau

SEQ ID NO: 577620 - RNA, 19 nt, Artificial Sequence
  Description of Artificial Sequence: Synthetic oligonucleotide
  Antisense strand to SEQ ID NO: 577619
auccacaccuccaauuuaa

SEQ ID NO: 577621 - RNA, 19 nt, Artificial Sequence
  Description of Artificial Sequence: Synthetic oligonucleotide
  Sense strand starting at position 1257 of SEQ ID NO: 318635
agguuuauuagaggaaagu

SEQ ID NO: 577622 - RNA, 19 nt, Artificial Sequence
  Description of Artificial Sequence: Synthetic oligonucleotide
  Antisense strand to SEQ ID NO: 577621
acuuuccucuaauaaaccu

SEQ ID NO: 577623 - RNA, 19 nt, Artificial Sequence
  Description of Artificial Sequence: Synthetic oligonucleotide
  Sense strand starting at position 1347 of SEQ ID NO: 318635
agugccaucccucaaguua

SEQ ID NO: 577624 - RNA, 19 nt, Artificial Sequence
  Description of Artificial Sequence: Synthetic oligonucleotide
  Antisense strand to SEQ ID NO: 577623
uaacuugagggauggcacu

SEQ ID NO: 577625 - RNA, 19 nt, Artificial Sequence
  Description of Artificial Sequence: Synthetic oligonucleotide
  Sense strand starting at position 1493 of SEQ ID NO: 318635
gcucgaaggugaucucaga

SEQ ID NO: 577626 - RNA, 19 nt, Artificial Sequence
  Description of Artificial Sequence: Synthetic oligonucleotide
  Antisense strand to SEQ ID NO: 577625
ucugagaucaccuucgagc

SEQ ID NO: 577627 - RNA, 19 nt, Artificial Sequence
  Description of Artificial Sequence: Synthetic oligonucleotide
  Sense strand starting at position 2081 of SEQ ID NO: 318635
gaggguaauuacgcuccaa

SEQ ID NO: 577628 - RNA, 19 nt, Artificial Sequence
  Description of Artificial Sequence: Synthetic oligonucleotide
  Antisense strand to SEQ ID NO: 577627
uuggagcguaauuacccuc

SEQ ID NO: 577629 - RNA, 19 nt, Artificial Sequence
  Description of Artificial Sequence: Synthetic oligonucleotide
  Sense strand starting at position 2229 of SEQ ID NO: 318635
gcaucuagggagugguaaa

SEQ ID NO: 577630 - RNA, 19 nt, Artificial Sequence
  Description of Artificial Sequence: Synthetic oligonucleotide
  Antisense strand to SEQ ID NO: 577629
uuuaccacucccuagaugc

SEQ ID NO: 577631 - RNA, 19 nt, Artificial Sequence
  Description of Artificial Sequence: Synthetic oligonucleotide
  Sense strand starting at position 2280 of SEQ ID NO: 318635
gugguagagcgcuuugcaa

SEQ ID NO: 577632 - RNA, 19 nt, Artificial Sequence
  Description of Artificial Sequence: Synthetic oligonucleotide
  Antisense strand to SEQ ID NO: 577631
uugcaaagcgcucuaccac

SEQ ID NO: 577633 - RNA, 19 nt, Artificial Sequence
  Description of Artificial Sequence: Synthetic oligonucleotide
  Sense strand starting at position 2456 of SEQ ID NO: 318635
uguguaucuguagaaugga

SEQ ID NO: 577634 - RNA, 19 nt, Artificial Sequence
  Description of Artificial Sequence: Synthetic oligonucleotide
  Antisense strand to SEQ ID NO: 577633
uccauucuacagauacaca

SEQ ID NO: 577635 - RNA, 19 nt, Artificial Sequence
  Description of Artificial Sequence: Synthetic oligonucleotide
  Sense strand starting at position 2459 of SEQ ID NO: 318635
guaucuguagaauggagau

SEQ ID NO: 577636 - RNA, 19 nt, Artificial Sequence
  Description of Artificial Sequence: Synthetic oligonucleotide
  Antisense strand to SEQ ID NO: 577635
aucuccauucuacagauac

SEQ ID NO: 577637 - RNA, 19 nt, Artificial Sequence
  Description of Artificial Sequence: Synthetic oligonucleotide
  Sense strand starting at position 2531 of SEQ ID NO: 318635
ccuagaagugguugguaca

SEQ ID NO: 577638 - RNA, 19 nt, Artificial Sequence
  Description of Artificial Sequence: Synthetic oligonucleotide
  Antisense strand to SEQ ID NO: 577637
uguaccaaccacuucuagg

SEQ ID NO: 577639 - RNA, 19 nt, Artificial Sequence
  Description of Artificial Sequence: Synthetic oligonucleotide
  Sense strand starting at position 2532 of SEQ ID NO: 318635
cuagaagugguugguacau

SEQ ID NO: 577640 - RNA, 19 nt, Artificial Sequence
  Description of Artificial Sequence: Synthetic oligonucleotide
  Antisense strand to SEQ ID NO: 577639
auguaccaaccacuucuag

SEQ ID NO: 577641 - RNA, 19 nt, Artificial Sequence
  Description of Artificial Sequence: Synthetic oligonucleotide
  Sense strand starting at position 2646 of SEQ ID NO: 318635
aacagauauuggucgacuu

SEQ ID NO: 577642 - RNA, 19 nt, Artificial Sequence
  Description of Artificial Sequence: Synthetic oligonucleotide
  Antisense strand to SEQ ID NO: 577641
aagucgaccaauaucuguu

SEQ ID NO: 577643 - RNA, 19 nt, Artificial Sequence
  Description of Artificial Sequence: Synthetic oligonucleotide
  Sense strand starting at position 2647 of SEQ ID NO: 318635
acagauauuggucgacuua

SEQ ID NO: 577644 - RNA, 19 nt, Artificial Sequence
  Description of Artificial Sequence: Synthetic oligonucleotide
  Antisense strand to SEQ ID NO: 577643
uaagucgaccaauaucugu

SEQ ID NO: 577645 - RNA, 19 nt, Artificial Sequence
  Description of Artificial Sequence: Synthetic oligonucleotide
  Sense strand starting at position 2648 of SEQ ID NO: 318635
cagauauuggucgacuuau

SEQ ID NO: 577646 - RNA, 19 nt, Artificial Sequence
  Description of Artificial Sequence: Synthetic oligonucleotide
  Antisense strand to SEQ ID NO: 577645
auaagucgaccaauaucug

SEQ ID NO: 577647 - RNA, 19 nt, Artificial Sequence
  Description of Artificial Sequence: Synthetic oligonucleotide
  Sense strand starting at position 2895 of SEQ ID NO: 318635
uggaguauaugcuuuagag

SEQ ID NO: 577648 - RNA, 19 nt, Artificial Sequence
  Description of Artificial Sequence: Synthetic oligonucleotide
  Antisense strand to SEQ ID NO: 577647
cucuaaagcauauacucca

SEQ ID NO: 577649 - RNA, 19 nt, Artificial Sequence
  Description of Artificial Sequence: Synthetic oligonucleotide
  Sense strand starting at position 2897 of SEQ ID NO: 318635
gaguauaugcuuuagagca

SEQ ID NO: 577650 - RNA, 19 nt, Artificial Sequence
  Description of Artificial Sequence: Synthetic oligonucleotide
  Antisense strand to SEQ ID NO: 577649
ugcucuaaagcauauacuc

SEQ ID NO: 577651 - RNA, 19 nt, Artificial Sequence
  Description of Artificial Sequence: Synthetic oligonucleotide
  Sense strand starting at position 2975 of SEQ ID NO: 318635
auguaaugaucuguaugaa

SEQ ID NO: 577652 - RNA, 19 nt, Artificial Sequence
  Description of Artificial Sequence: Synthetic oligonucleotide
  Antisense strand to SEQ ID NO: 577651
uucauacagaucauuacau

SEQ ID NO: 577653 - RNA, 19 nt, Artificial Sequence
  Description of Artificial Sequence: Synthetic oligonucleotide
  Sense strand starting at position 2978 of SEQ ID NO: 318635
uaaugaucuguaugaagcu

SEQ ID NO: 577654 - RNA, 19 nt, Artificial Sequence
  Description of Artificial Sequence: Synthetic oligonucleotide
  Antisense strand to SEQ ID NO: 577653
agcuucauacagaucauua

SEQ ID NO: 577655 - RNA, 19 nt, Artificial Sequence
  Description of Artificial Sequence: Synthetic oligonucleotide
  Sense strand starting at position 3105 of SEQ ID NO: 318635
aggucacucuucuugcuaa

SEQ ID NO: 577656 - RNA, 19 nt, Artificial Sequence
  Description of Artificial Sequence: Synthetic oligonucleotide
  Antisense strand to SEQ ID NO: 577655
uuagcaagaagagugaccu

SEQ ID NO: 577657 - RNA, 19 nt, Artificial Sequence
  Description of Artificial Sequence: Synthetic oligonucleotide
  Sense strand starting at position 3172 of SEQ ID NO: 318635
augugugcagugaguugaa

SEQ ID NO: 577658 - RNA, 19 nt, Artificial Sequence
  Description of Artificial Sequence: Synthetic oligonucleotide
  Antisense strand to SEQ ID NO: 577657
uucaacucacugcacacau

SEQ ID NO: 577659 - RNA, 19 nt, Artificial Sequence
  Description of Artificial Sequence: Synthetic oligonucleotide
  Sense strand starting at position 3286 of SEQ ID NO: 318635
aguuaaggcccucaagaug

SEQ ID NO: 577660 - RNA, 19 nt, Artificial Sequence
  Description of Artificial Sequence: Synthetic oligonucleotide
  Antisense strand to SEQ ID NO: 577659
caucuugagggccuuaacu

SEQ ID NO: 577661 - RNA, 19 nt, Artificial Sequence
  Description of Artificial Sequence: Synthetic oligonucleotide
  Sense strand starting at position 3303 of SEQ ID NO: 318635
ugaggucauccugggacuu

SEQ ID NO: 577662 - RNA, 19 nt, Artificial Sequence
  Description of Artificial Sequence: Synthetic oligonucleotide
  Antisense strand to SEQ ID NO: 577661
aagucccaggaugaccuca

SEQ ID NO: 577663 - RNA, 19 nt, Artificial Sequence
  Description of Artificial Sequence: Synthetic oligonucleotide
  Sense strand starting at position 3304 of SEQ ID NO: 318635
gaggucauccugggacuua

SEQ ID NO: 577664 - RNA, 19 nt, Artificial Sequence
  Description of Artificial Sequence: Synthetic oligonucleotide
  Antisense strand to SEQ ID NO: 577663
uaagucccaggaugaccuc

SEQ ID NO: 577665 - RNA, 19 nt, Artificial Sequence
  Description of Artificial Sequence: Synthetic oligonucleotide
  Sense strand starting at position 3343 of SEQ ID NO: 318635
gacuguuauccuuauggua

SEQ ID NO: 577666 - RNA, 19 nt, Artificial Sequence
  Description of Artificial Sequence: Synthetic oligonucleotide
  Antisense strand to SEQ ID NO: 577665
uaccauaaggauaacaguc

SEQ ID NO: 577667 - RNA, 19 nt, Artificial Sequence
  Description of Artificial Sequence: Synthetic oligonucleotide
  Sense strand starting at position 3627 of SEQ ID NO: 318635
caguauuguguuuauaaug

SEQ ID NO: 577668 - RNA, 19 nt, Artificial Sequence
  Description of Artificial Sequence: Synthetic oligonucleotide
  Antisense strand to SEQ ID NO: 577667
cauuauaaacacaauacug

SEQ ID NO: 577669 - RNA, 19 nt, Artificial Sequence
  Description of Artificial Sequence: Synthetic oligonucleotide
  Sense strand starting at position 3664 of SEQ ID NO: 318635
acauauaaugcacguauaa

SEQ ID NO: 577670 - RNA, 19 nt, Artificial Sequence
  Description of Artificial Sequence: Synthetic oligonucleotide
  Antisense strand to SEQ ID NO: 577669
uuauacgugcauuauaugu

SEQ ID NO: 577671 - RNA, 19 nt, Artificial Sequence
  Description of Artificial Sequence: Synthetic oligonucleotide
  Sense strand starting at position 3725 of SEQ ID NO: 318635
gguaguuagcuacaugaga

SEQ ID NO: 577672 - RNA, 19 nt, Artificial Sequence
  Description of Artificial Sequence: Synthetic oligonucleotide
  Antisense strand to SEQ ID NO: 577671
ucucauguagcuaacuacc

SEQ ID NO: 577673 - RNA, 19 nt, Artificial Sequence
  Description of Artificial Sequence: Synthetic oligonucleotide
  Sense strand starting at position 3892 of SEQ ID NO: 318635
uguaaauuacccugucuug

SEQ ID NO: 577674 - RNA, 19 nt, Artificial Sequence
  Description of Artificial Sequence: Synthetic oligonucleotide
  Antisense strand to SEQ ID NO: 577673
caagacaggguaauuuaca

SEQ ID NO: 577675 - RNA, 19 nt, Artificial Sequence
  Description of Artificial Sequence: Synthetic oligonucleotide
  Sense strand starting at position 3925 of SEQ ID NO: 318635
gcaguaugaacauggacua

SEQ ID NO: 577676 - RNA, 19 nt, Artificial Sequence
  Description of Artificial Sequence: Synthetic oligonucleotide
  Antisense strand to SEQ ID NO: 577675
uaguccauguucauacugc

SEQ ID NO: 577677 - RNA, 19 nt, Artificial Sequence
  Description of Artificial Sequence: Synthetic oligonucleotide
  Sense strand starting at position 59 of SEQ ID NO: 318636
ggugcuaauccaugaaggu

SEQ ID NO: 577678 - RNA, 19 nt, Artificial Sequence
  Description of Artificial Sequence: Synthetic oligonucleotide
  Antisense strand to SEQ ID NO: 577677
accuucauggauuagcacc

SEQ ID NO: 577679 - RNA, 19 nt, Artificial Sequence
  Description of Artificial Sequence: Synthetic oligonucleotide
  Sense strand starting at position 60 of SEQ ID NO: 318636
gugcuaauccaugaaggua

SEQ ID NO: 577680 - RNA, 19 nt, Artificial Sequence
  Description of Artificial Sequence: Synthetic oligonucleotide
  Antisense strand to SEQ ID NO: 577679
uaccuucauggauuagcac

SEQ ID NO: 577681 - RNA, 19 nt, Artificial Sequence
  Description of Artificial Sequence: Synthetic oligonucleotide
  Sense strand starting at position 146 of SEQ ID NO: 318636
uguugauucuaccuacuac

SEQ ID NO: 577682 - RNA, 19 nt, Artificial Sequence
  Description of Artificial Sequence: Synthetic oligonucleotide
  Antisense strand to SEQ ID NO: 577681
guaguagguagaaucaaca

SEQ ID NO: 577683 - RNA, 19 nt, Artificial Sequence
  Description of Artificial Sequence: Synthetic oligonucleotide
  Sense strand starting at position 329 of SEQ ID NO: 318636
ugcagcuaccaagaauauu

SEQ ID NO: 577684 - RNA, 19 nt, Artificial Sequence
  Description of Artificial Sequence: Synthetic oligonucleotide
  Antisense strand to SEQ ID NO: 577683
aauauucuugguagcugca

SEQ ID NO: 577685 - RNA, 19 nt, Artificial Sequence
  Description of Artificial Sequence: Synthetic oligonucleotide
  Sense strand starting at position 337 of SEQ ID NO: 318636
ccaagaauauucucgucau

SEQ ID NO: 577686 - RNA, 19 nt, Artificial Sequence
  Description of Artificial Sequence: Synthetic oligonucleotide
  Antisense strand to SEQ ID NO: 577685
augacgagaauauucuugg

SEQ ID NO: 577687 - RNA, 19 nt, Artificial Sequence
  Description of Artificial Sequence: Synthetic oligonucleotide
  Sense strand starting at position 340 of SEQ ID NO: 318636
agaauauucucgucauauc

SEQ ID NO: 577688 - RNA, 19 nt, Artificial Sequence
  Description of Artificial Sequence: Synthetic oligonucleotide
  Antisense strand to SEQ ID NO: 577687
gauaugacgagaauauucu

SEQ ID NO: 577689 - RNA, 19 nt, Artificial Sequence
  Description of Artificial Sequence: Synthetic oligonucleotide
  Sense strand starting at position 348 of SEQ ID NO: 318636
cucgucauaucacugaacu

SEQ ID NO: 577690 - RNA, 19 nt, Artificial Sequence
  Description of Artificial Sequence: Synthetic oligonucleotide
  Antisense strand to SEQ ID NO: 577689
aguucagugauaugacgag

SEQ ID NO: 577691 - RNA, 19 nt, Artificial Sequence
  Description of Artificial Sequence: Synthetic oligonucleotide
  Sense strand starting at position 412 of SEQ ID NO: 318636
uccuuaacauggucagcaa

SEQ ID NO: 577692 - RNA, 19 nt, Artificial Sequence
  Description of Artificial Sequence: Synthetic oligonucleotide
  Antisense strand to SEQ ID NO: 577691
uugcugaccauguuaagga

SEQ ID NO: 577693 - RNA, 19 nt, Artificial Sequence
  Description of Artificial Sequence: Synthetic oligonucleotide
  Sense strand starting at position 499 of SEQ ID NO: 318636
ucucuauggcccugaaauu

SEQ ID NO: 577694 - RNA, 19 nt, Artificial Sequence
  Description of Artificial Sequence: Synthetic oligonucleotide
  Antisense strand to SEQ ID NO: 577693
aauuucagggccauagaga

SEQ ID NO: 577695 - RNA, 19 nt, Artificial Sequence
  Description of Artificial Sequence: Synthetic oligonucleotide
  Sense strand starting at position 819 of SEQ ID NO: 318636
cucaguaaagacuguucua

SEQ ID NO: 577696 - RNA, 19 nt, Artificial Sequence
  Description of Artificial Sequence: Synthetic oligonucleotide
  Antisense strand to SEQ ID NO: 577695
uagaacagucuuuacugag

SEQ ID NO: 577697 - RNA, 19 nt, Artificial Sequence
  Description of Artificial Sequence: Synthetic oligonucleotide
  Sense strand starting at position 822 of SEQ ID NO: 318636
aguaaagacuguucuaacc

SEQ ID NO: 577698 - RNA, 19 nt, Artificial Sequence
  Description of Artificial Sequence: Synthetic oligonucleotide
  Antisense strand to SEQ ID NO: 577697
gguuagaacagucuuuacu

SEQ ID NO: 577699 - RNA, 19 nt, Artificial Sequence
  Description of Artificial Sequence: Synthetic oligonucleotide
  Sense strand starting at position 1066 of SEQ ID NO: 318636
uuaaauuggagguguggau

SEQ ID NO: 577700 - RNA, 19 nt, Artificial Sequence
  Description of Artificial Sequence: Synthetic oligonucleotide
  Antisense strand to SEQ ID NO: 577699
auccacaccuccaauuuaa

SEQ ID NO: 577701 - RNA, 19 nt, Artificial Sequence
  Description of Artificial Sequence: Synthetic oligonucleotide
  Sense strand starting at position 1257 of SEQ ID NO: 318636
agguuuauuagaggaaagu

SEQ ID NO: 577702 - RNA, 19 nt, Artificial Sequence
  Description of Artificial Sequence: Synthetic oligonucleotide
  Antisense strand to SEQ ID NO: 577701
acuuuccucuaauaaaccu

SEQ ID NO: 577703 - RNA, 19 nt, Artificial Sequence
  Description of Artificial Sequence: Synthetic oligonucleotide
  Sense strand starting at position 1347 of SEQ ID NO: 318636
agugccaucccucaaguua

SEQ ID NO: 577704 - RNA, 19 nt, Artificial Sequence
  Description of Artificial Sequence: Synthetic oligonucleotide
  Antisense strand to SEQ ID NO: 577703
uaacuugagggauggcacu

SEQ ID NO: 577705 - RNA, 19 nt, Artificial Sequence
  Description of Artificial Sequence: Synthetic oligonucleotide
  Sense strand starting at position 1493 of SEQ ID NO: 318636
gcucgaaggugaucucaga

SEQ ID NO: 577706 - RNA, 19 nt, Artificial Sequence
  Description of Artificial Sequence: Synthetic oligonucleotide
  Antisense strand to SEQ ID NO: 577705
ucugagaucaccuucgagc

SEQ ID NO: 577707 - RNA, 19 nt, Artificial Sequence
  Description of Artificial Sequence: Synthetic oligonucleotide
  Sense strand starting at position 2081 of SEQ ID NO: 318636
gaggguaauuacgcuccaa

SEQ ID NO: 577708 - RNA, 19 nt, Artificial Sequence
  Description of Artificial Sequence: Synthetic oligonucleotide
  Antisense strand to SEQ ID NO: 577707
uuggagcguaauuacccuc

SEQ ID NO: 577709 - RNA, 19 nt, Artificial Sequence
  Description of Artificial Sequence: Synthetic oligonucleotide
  Sense strand starting at position 2229 of SEQ ID NO: 318636
gcaucuagggagugguaaa

SEQ ID NO: 577710 - RNA, 19 nt, Artificial Sequence
  Description of Artificial Sequence: Synthetic oligonucleotide
  Antisense strand to SEQ ID NO: 577709
uuuaccacucccuagaugc

SEQ ID NO: 577711 - RNA, 19 nt, Artificial Sequence
  Description of Artificial Sequence: Synthetic oligonucleotide
  Sense strand starting at position 2280 of SEQ ID NO: 318636
gugguagagcgcuuugcaa

SEQ ID NO: 577712 - RNA, 19 nt, Artificial Sequence
  Description of Artificial Sequence: Synthetic oligonucleotide
  Antisense strand to SEQ ID NO: 577711
uugcaaagcgcucuaccac

SEQ ID NO: 577713 - RNA, 19 nt, Artificial Sequence
  Description of Artificial Sequence: Synthetic oligonucleotide
  Sense strand starting at position 2456 of SEQ ID NO: 318636
uguguaucuguagaaugga

SEQ ID NO: 577714 - RNA, 19 nt, Artificial Sequence
  Description of Artificial Sequence: Synthetic oligonucleotide
  Antisense strand to SEQ ID NO: 577713
uccauucuacagauacaca

SEQ ID NO: 577715 - RNA, 19 nt, Artificial Sequence
  Description of Artificial Sequence: Synthetic oligonucleotide
  Sense strand starting at position 2459 of SEQ ID NO: 318636
guaucuguagaauggagau

SEQ ID NO: 577716 - RNA, 19 nt, Artificial Sequence
  Description of Artificial Sequence: Synthetic oligonucleotide
  Antisense strand to SEQ ID NO: 577715
aucuccauucuacagauac

SEQ ID NO: 577717 - RNA, 19 nt, Artificial Sequence
  Description of Artificial Sequence: Synthetic oligonucleotide
  Sense strand starting at position 2531 of SEQ ID NO: 318636
ccuagaagugguugguaca

SEQ ID NO: 577718 - RNA, 19 nt, Artificial Sequence
  Description of Artificial Sequence: Synthetic oligonucleotide
  Antisense strand to SEQ ID NO: 577717
uguaccaaccacuucuagg

SEQ ID NO: 577719 - RNA, 19 nt, Artificial Sequence
  Description of Artificial Sequence: Synthetic oligonucleotide
  Sense strand starting at position 2532 of SEQ ID NO: 318636
cuagaagugguugguacau

SEQ ID NO: 577720 - RNA, 19 nt, Artificial Sequence
  Description of Artificial Sequence: Synthetic oligonucleotide
  Antisense strand to SEQ ID NO: 577719
auguaccaaccacuucuag

SEQ ID NO: 577721 - RNA, 19 nt, Artificial Sequence
  Description of Artificial Sequence: Synthetic oligonucleotide
  Sense strand starting at position 2646 of SEQ ID NO: 318636
aacagauauuggucgacuu

SEQ ID NO: 577722 - RNA, 19 nt, Artificial Sequence
  Description of Artificial Sequence: Synthetic oligonucleotide
  Antisense strand to SEQ ID NO: 577721
aagucgaccaauaucuguu

SEQ ID NO: 577723 - RNA, 19 nt, Artificial Sequence
  Description of Artificial Sequence: Synthetic oligonucleotide
  Sense strand starting at position 2647 of SEQ ID NO: 318636
acagauauuggucgacuua

SEQ ID NO: 577724 - RNA, 19 nt, Artificial Sequence
  Description of Artificial Sequence: Synthetic oligonucleotide
  Antisense strand to SEQ ID NO: 577723
uaagucgaccaauaucugu

SEQ ID NO: 577725 - RNA, 19 nt, Artificial Sequence
  Description of Artificial Sequence: Synthetic oligonucleotide
  Sense strand starting at position 2648 of SEQ ID NO: 318636
cagauauuggucgacuuau

SEQ ID NO: 577726 - RNA, 19 nt, Artificial Sequence
  Description of Artificial Sequence: Synthetic oligonucleotide
  Antisense strand to SEQ ID NO: 577725
auaagucgaccaauaucug

SEQ ID NO: 577727 - RNA, 19 nt, Artificial Sequence
  Description of Artificial Sequence: Synthetic oligonucleotide
  Sense strand starting at position 2895 of SEQ ID NO: 318636
uggaguauaugcuuuagag

SEQ ID NO: 577728 - RNA, 19 nt, Artificial Sequence
  Description of Artificial Sequence: Synthetic oligonucleotide
  Antisense strand to SEQ ID NO: 577727
cucuaaagcauauacucca

SEQ ID NO: 577729 - RNA, 19 nt, Artificial Sequence
  Description of Artificial Sequence: Synthetic oligonucleotide
  Sense strand starting at position 2897 of SEQ ID NO: 318636
gaguauaugcuuuagagca

SEQ ID NO: 577730 - RNA, 19 nt, Artificial Sequence
  Description of Artificial Sequence: Synthetic oligonucleotide
  Antisense strand to SEQ ID NO: 577729
ugcucuaaagcauauacuc

SEQ ID NO: 577731 - RNA, 19 nt, Artificial Sequence
  Description of Artificial Sequence: Synthetic oligonucleotide
  Sense strand starting at position 2975 of SEQ ID NO: 318636
auguaaugaucuguaugaa

SEQ ID NO: 577732 - RNA, 19 nt, Artificial Sequence
  Description of Artificial Sequence: Synthetic oligonucleotide
  Antisense strand to SEQ ID NO: 577731
uucauacagaucauuacau

SEQ ID NO: 577733 - RNA, 19 nt, Artificial Sequence
  Description of Artificial Sequence: Synthetic oligonucleotide
  Sense strand starting at position 2978 of SEQ ID NO: 318636
uaaugaucuguaugaagcu

SEQ ID NO: 577734 - RNA, 19 nt, Artificial Sequence
  Description of Artificial Sequence: Synthetic oligonucleotide
  Antisense strand to SEQ ID NO: 577733
agcuucauacagaucauua

SEQ ID NO: 577735 - RNA, 19 nt, Artificial Sequence
  Description of Artificial Sequence: Synthetic oligonucleotide
  Sense strand starting at position 3105 of SEQ ID NO: 318636
aggucacucuucuugcuaa

SEQ ID NO: 577736 - RNA, 19 nt, Artificial Sequence
  Description of Artificial Sequence: Synthetic oligonucleotide
  Antisense strand to SEQ ID NO: 577735
uuagcaagaagagugaccu

SEQ ID NO: 577737 - RNA, 19 nt, Artificial Sequence
  Description of Artificial Sequence: Synthetic oligonucleotide
  Sense strand starting at position 3172 of SEQ ID NO: 318636
augugugcagugaguugaa

SEQ ID NO: 577738 - RNA, 19 nt, Artificial Sequence
  Description of Artificial Sequence: Synthetic oligonucleotide
  Antisense strand to SEQ ID NO: 577737
uucaacucacugcacacau

SEQ ID NO: 577739 - RNA, 19 nt, Artificial Sequence
  Description of Artificial Sequence: Synthetic oligonucleotide
  Sense strand starting at position 3286 of SEQ ID NO: 318636
aguuaaggcccucaagaug

SEQ ID NO: 577740 - RNA, 19 nt, Artificial Sequence
  Description of Artificial Sequence: Synthetic oligonucleotide
  Antisense strand to SEQ ID NO: 577739
caucuugagggccuuaacu

SEQ ID NO: 577741 - RNA, 19 nt, Artificial Sequence
  Description of Artificial Sequence: Synthetic oligonucleotide
  Sense strand starting at position 3303 of SEQ ID NO: 318636
ugaggucauccugggacuu

SEQ ID NO: 577742 - RNA, 19 nt, Artificial Sequence
  Description of Artificial Sequence: Synthetic oligonucleotide
  Antisense strand to SEQ ID NO: 577741
aagucccaggaugaccuca

SEQ ID NO: 577743 - RNA, 19 nt, Artificial Sequence
  Description of Artificial Sequence: Synthetic oligonucleotide
  Sense strand starting at position 3304 of SEQ ID NO: 318636
gaggucauccugggacuua

SEQ ID NO: 577744 - RNA, 19 nt, Artificial Sequence
  Description of Artificial Sequence: Synthetic oligonucleotide
  Antisense strand to SEQ ID NO: 577743
uaagucccaggaugaccuc

SEQ ID NO: 577745 - RNA, 19 nt, Artificial Sequence
  Description of Artificial Sequence: Synthetic oligonucleotide
  Sense strand starting at position 3343 of SEQ ID NO: 318636
gacuguuauccuuauggua

SEQ ID NO: 577746 - RNA, 19 nt, Artificial Sequence
  Description of Artificial Sequence: Synthetic oligonucleotide
  Antisense strand to SEQ ID NO: 577745
uaccauaaggauaacaguc

SEQ ID NO: 577747 - RNA, 19 nt, Artificial Sequence
  Description of Artificial Sequence: Synthetic oligonucleotide
  Sense strand starting at position 3627 of SEQ ID NO: 318636
caguauuguguuuauaaug

SEQ ID NO: 577748 - RNA, 19 nt, Artificial Sequence
  Description of Artificial Sequence: Synthetic oligonucleotide
  Antisense strand to SEQ ID NO: 577747
cauuauaaacacaauacug

SEQ ID NO: 577749 - RNA, 19 nt, Artificial Sequence
  Description of Artificial Sequence: Synthetic oligonucleotide
  Sense strand starting at position 3664 of SEQ ID NO: 318636
acauauaaugcacguauaa

SEQ ID NO: 577750 - RNA, 19 nt, Artificial Sequence
  Description of Artificial Sequence: Synthetic oligonucleotide
  Antisense strand to SEQ ID NO: 577749
uuauacgugcauuauaugu

SEQ ID NO: 577751 - RNA, 19 nt, Artificial Sequence
  Description of Artificial Sequence: Synthetic oligonucleotide
  Sense strand starting at position 3725 of SEQ ID NO: 318636
gguaguuagcuacaugaga

SEQ ID NO: 577752 - RNA, 19 nt, Artificial Sequence
  Description of Artificial Sequence: Synthetic oligonucleotide
  Antisense strand to SEQ ID NO: 577751
ucucauguagcuaacuacc

SEQ ID NO: 577753 - RNA, 19 nt, Artificial Sequence
  Description of Artificial Sequence: Synthetic oligonucleotide
  Sense strand starting at position 3892 of SEQ ID NO: 318636
uguaaauuacccugucuug

SEQ ID NO: 577754 - RNA, 19 nt, Artificial Sequence
  Description of Artificial Sequence: Synthetic oligonucleotide
  Antisense strand to SEQ ID NO: 577753
caagacaggguaauuuaca

SEQ ID NO: 577755 - RNA, 19 nt, Artificial Sequence
  Description of Artificial Sequence: Synthetic oligonucleotide
  Sense strand starting at position 3925 of SEQ ID NO: 318636
gcaguaugaacauggacua

SEQ ID NO: 577756 - RNA, 19 nt, Artificial Sequence
  Description of Artificial Sequence: Synthetic oligonucleotide
  Antisense strand to SEQ ID NO: 577755
uaguccauguucauacugc

SEQ ID NO: 577757 - RNA, 19 nt, Artificial Sequence
  Description of Artificial Sequence: Synthetic oligonucleotide
  Sense strand starting at position 64 of SEQ ID NO: 318637
aggugaacucucugaggac

SEQ ID NO: 577758 - RNA, 19 nt, Artificial Sequence
  Description of Artificial Sequence: Synthetic oligonucleotide
  Antisense strand to SEQ ID NO: 577757
guccucagagaguucaccu

SEQ ID NO: 577759 - RNA, 19 nt, Artificial Sequence
  Description of Artificial Sequence: Synthetic oligonucleotide
  Sense strand starting at position 65 of SEQ ID NO: 318637
ggugaacucucugaggaca

SEQ ID NO: 577760 - RNA, 19 nt, Artificial Sequence
  Description of Artificial Sequence: Synthetic oligonucleotide
  Antisense strand to SEQ ID NO: 577759
uguccucagagaguucacc

SEQ ID NO: 577761 - RNA, 19 nt, Artificial Sequence
  Description of Artificial Sequence: Synthetic oligonucleotide
  Sense strand starting at position 67 of SEQ ID NO: 318637
ugaacucucugaggacaga

SEQ ID NO: 577762 - RNA, 19 nt, Artificial Sequence
  Description of Artificial Sequence: Synthetic oligonucleotide
  Antisense strand to SEQ ID NO: 577761
ucuguccucagagaguuca

SEQ ID NO: 577763 - RNA, 19 nt, Artificial Sequence
  Description of Artificial Sequence: Synthetic oligonucleotide
  Sense strand starting at position 97 of SEQ ID NO: 318637
agggaaaucugguagcccu

SEQ ID NO: 577764 - RNA, 19 nt, Artificial Sequence
  Description of Artificial Sequence: Synthetic oligonucleotide
  Antisense strand to SEQ ID NO: 577763
agggcuaccagauuucccu

SEQ ID NO: 577765 - RNA, 19 nt, Artificial Sequence
  Description of Artificial Sequence: Synthetic oligonucleotide
  Sense strand starting at position 248 of SEQ ID NO: 318637
gggcuggugcucugaguga

SEQ ID NO: 577766 - RNA, 19 nt, Artificial Sequence
  Description of Artificial Sequence: Synthetic oligonucleotide
  Antisense strand to SEQ ID NO: 577765
ucacucagagcaccagccc

SEQ ID NO: 577767 - RNA, 19 nt, Artificial Sequence
  Description of Artificial Sequence: Synthetic oligonucleotide
  Sense strand starting at position 253 of SEQ ID NO: 318637
ggugcucugagugaggcau

SEQ ID NO: 577768 - RNA, 19 nt, Artificial Sequence
  Description of Artificial Sequence: Synthetic oligonucleotide
  Antisense strand to SEQ ID NO: 577767
augccucacucagagcacc

SEQ ID NO: 577769 - RNA, 19 nt, Artificial Sequence
  Description of Artificial Sequence: Synthetic oligonucleotide
  Sense strand starting at position 259 of SEQ ID NO: 318637
cugagugaggcauguacaa

SEQ ID NO: 577770 - RNA, 19 nt, Artificial Sequence
  Description of Artificial Sequence: Synthetic oligonucleotide
  Antisense strand to SEQ ID NO: 577769
uuguacaugccucacucag

SEQ ID NO: 577771 - RNA, 19 nt, Artificial Sequence
  Description of Artificial Sequence: Synthetic oligonucleotide
  Sense strand starting at position 261 of SEQ ID NO: 318637
gagugaggcauguacaaag

SEQ ID NO: 577772 - RNA, 19 nt, Artificial Sequence
  Description of Artificial Sequence: Synthetic oligonucleotide
  Antisense strand to SEQ ID NO: 577771
cuuuguacaugccucacuc

SEQ ID NO: 577773 - RNA, 19 nt, Artificial Sequence
  Description of Artificial Sequence: Synthetic oligonucleotide
  Sense strand starting at position 308 of SEQ ID NO: 318637
guggaaacccaguguucuu

SEQ ID NO: 577774 - RNA, 19 nt, Artificial Sequence
  Description of Artificial Sequence: Synthetic oligonucleotide
  Antisense strand to SEQ ID NO: 577773
aagaacacuggguuuccac

SEQ ID NO: 577775 - RNA, 19 nt, Artificial Sequence
  Description of Artificial Sequence: Synthetic oligonucleotide
  Sense strand starting at position 317 of SEQ ID NO: 318637
caguguucuuaggagacac

SEQ ID NO: 577776 - RNA, 19 nt, Artificial Sequence
  Description of Artificial Sequence: Synthetic oligonucleotide
  Antisense strand to SEQ ID NO: 577775
gugucuccuaagaacacug

SEQ ID NO: 577777 - RNA, 19 nt, Artificial Sequence
  Description of Artificial Sequence: Synthetic oligonucleotide
  Sense strand starting at position 402 of SEQ ID NO: 318637
ggcugaaaccugcaagucu

SEQ ID NO: 577778 - RNA, 19 nt, Artificial Sequence
  Description of Artificial Sequence: Synthetic oligonucleotide
  Antisense strand to SEQ ID NO: 577777
agacuugcagguuucagcc

SEQ ID NO: 577779 - RNA, 19 nt, Artificial Sequence
  Description of Artificial Sequence: Synthetic oligonucleotide
  Sense strand starting at position 588 of SEQ ID NO: 318637
ucaguauuaugguagggau

SEQ ID NO: 577780 - RNA, 19 nt, Artificial Sequence
  Description of Artificial Sequence: Synthetic oligonucleotide
  Antisense strand to SEQ ID NO: 577779
aucccuaccauaauacuga

SEQ ID NO: 577781 - RNA, 19 nt, Artificial Sequence
  Description of Artificial Sequence: Synthetic oligonucleotide
  Sense strand starting at position 713 of SEQ ID NO: 318637
uugccauaugcuuguguga

SEQ ID NO: 577782 - RNA, 19 nt, Artificial Sequence
  Description of Artificial Sequence: Synthetic oligonucleotide
  Antisense strand to SEQ ID NO: 577781
ucacacaagcauauggcaa

SEQ ID NO: 577783 - RNA, 19 nt, Artificial Sequence
  Description of Artificial Sequence: Synthetic oligonucleotide
  Sense strand starting at position 716 of SEQ ID NO: 318637
ccauaugcuugugugagaa

SEQ ID NO: 577784 - RNA, 19 nt, Artificial Sequence
  Description of Artificial Sequence: Synthetic oligonucleotide
  Antisense strand to SEQ ID NO: 577783
uucucacacaagcauaugg

SEQ ID NO: 577785 - RNA, 19 nt, Artificial Sequence
  Description of Artificial Sequence: Synthetic oligonucleotide
  Sense strand starting at position 757 of SEQ ID NO: 318637
cucugagagucugacauua

SEQ ID NO: 577786 - RNA, 19 nt, Artificial Sequence
  Description of Artificial Sequence: Synthetic oligonucleotide
  Antisense strand to SEQ ID NO: 577785
uaaugucagacucucagag

SEQ ID NO: 577787 - RNA, 19 nt, Artificial Sequence
  Description of Artificial Sequence: Synthetic oligonucleotide
  Sense strand starting at position 805 of SEQ ID NO: 318637
agggcuuuccuuuauagcu

SEQ ID NO: 577788 - RNA, 19 nt, Artificial Sequence
  Description of Artificial Sequence: Synthetic oligonucleotide
  Antisense strand to SEQ ID NO: 577787
agcuauaaaggaaagcccu

SEQ ID NO: 577789 - RNA, 19 nt, Artificial Sequence
  Description of Artificial Sequence: Synthetic oligonucleotide
  Sense strand starting at position 993 of SEQ ID NO: 318637
ccaaguaucugguauuaga

SEQ ID NO: 577790 - RNA, 19 nt, Artificial Sequence
  Description of Artificial Sequence: Synthetic oligonucleotide
  Antisense strand to SEQ ID NO: 577789
ucuaauaccagauacuugg

SEQ ID NO: 577791 - RNA, 19 nt, Artificial Sequence
  Description of Artificial Sequence: Synthetic oligonucleotide
  Sense strand starting at position 1249 of SEQ ID NO: 318637
uuaauauccuuacuuggga

SEQ ID NO: 577792 - RNA, 19 nt, Artificial Sequence
  Description of Artificial Sequence: Synthetic oligonucleotide
  Antisense strand to SEQ ID NO: 577791
ucccaaguaaggauauuaa

SEQ ID NO: 577793 - RNA, 19 nt, Artificial Sequence
  Description of Artificial Sequence: Synthetic oligonucleotide
  Sense strand starting at position 1254 of SEQ ID NO: 318637
auccuuacuugggaagauu

SEQ ID NO: 577794 - RNA, 19 nt, Artificial Sequence
  Description of Artificial Sequence: Synthetic oligonucleotide
  Antisense strand to SEQ ID NO: 577793
aaucuucccaaguaaggau

SEQ ID NO: 577795 - RNA, 19 nt, Artificial Sequence
  Description of Artificial Sequence: Synthetic oligonucleotide
  Sense strand starting at position 1295 of SEQ ID NO: 318637
aaaguaucauguucuguga

SEQ ID NO: 577796 - RNA, 19 nt, Artificial Sequence
  Description of Artificial Sequence: Synthetic oligonucleotide
  Antisense strand to SEQ ID NO: 577795
ucacagaacaugauacuuu

SEQ ID NO: 577797 - RNA, 19 nt, Artificial Sequence
  Description of Artificial Sequence: Synthetic oligonucleotide
  Sense strand starting at position 1298 of SEQ ID NO: 318637
guaucauguucugugaaau

SEQ ID NO: 577798 - RNA, 19 nt, Artificial Sequence
  Description of Artificial Sequence: Synthetic oligonucleotide
  Antisense strand to SEQ ID NO: 577797
auuucacagaacaugauac

SEQ ID NO: 577799 - RNA, 19 nt, Artificial Sequence
  Description of Artificial Sequence: Synthetic oligonucleotide
  Sense strand starting at position 1416 of SEQ ID NO: 318637
gcaggauauucccacaaca

SEQ ID NO: 577800 - RNA, 19 nt, Artificial Sequence
  Description of Artificial Sequence: Synthetic oligonucleotide
  Antisense strand to SEQ ID NO: 577799
uguugugggaauauccugc

SEQ ID NO: 577801 - RNA, 19 nt, Artificial Sequence
  Description of Artificial Sequence: Synthetic oligonucleotide
  Sense strand starting at position 1630 of SEQ ID NO: 318637
gguaguuuccuugagggaa

SEQ ID NO: 577802 - RNA, 19 nt, Artificial Sequence
  Description of Artificial Sequence: Synthetic oligonucleotide
  Antisense strand to SEQ ID NO: 577801
uucccucaaggaaacuacc

SEQ ID NO: 577803 - RNA, 19 nt, Artificial Sequence
  Description of Artificial Sequence: Synthetic oligonucleotide
  Sense strand starting at position 2093 of SEQ ID NO: 318637
accacaaaucccgagaugu

SEQ ID NO: 577804 - RNA, 19 nt, Artificial Sequence
  Description of Artificial Sequence: Synthetic oligonucleotide
  Antisense strand to SEQ ID NO: 577803
acaucucgggauuuguggu

SEQ ID NO: 577805 - RNA, 19 nt, Artificial Sequence
  Description of Artificial Sequence: Synthetic oligonucleotide
  Sense strand starting at position 2168 of SEQ ID NO: 318637
gcgggugcccuagaauaaa

SEQ ID NO: 577806 - RNA, 19 nt, Artificial Sequence
  Description of Artificial Sequence: Synthetic oligonucleotide
  Antisense strand to SEQ ID NO: 577805
uuuauucuagggcacccgc

SEQ ID NO: 577807 - RNA, 19 nt, Artificial Sequence
  Description of Artificial Sequence: Synthetic oligonucleotide
  Sense strand starting at position 2188 of SEQ ID NO: 318637
acuuauuuccguugacucu

SEQ ID NO: 577808 - RNA, 19 nt, Artificial Sequence
  Description of Artificial Sequence: Synthetic oligonucleotide
  Antisense strand to SEQ ID NO: 577807
agagucaacggaaauaagu

SEQ ID NO: 577809 - RNA, 19 nt, Artificial Sequence
  Description of Artificial Sequence: Synthetic oligonucleotide
  Sense strand starting at position 2321 of SEQ ID NO: 318637
ccugacuuuccuuggcaca

SEQ ID NO: 577810 - RNA, 19 nt, Artificial Sequence
  Description of Artificial Sequence: Synthetic oligonucleotide
  Antisense strand to SEQ ID NO: 577809
ugugccaaggaaagucagg

SEQ ID NO: 577811 - RNA, 19 nt, Artificial Sequence
  Description of Artificial Sequence: Synthetic oligonucleotide
  Sense strand starting at position 2441 of SEQ ID NO: 318637
aaggcaaggucucccauua

SEQ ID NO: 577812 - RNA, 19 nt, Artificial Sequence
  Description of Artificial Sequence: Synthetic oligonucleotide
  Antisense strand to SEQ ID NO: 577811
uaaugggagaccuugccuu

SEQ ID NO: 577813 - RNA, 19 nt, Artificial Sequence
  Description of Artificial Sequence: Synthetic oligonucleotide
  Sense strand starting at position 2574 of SEQ ID NO: 318637
acugcaauggcucguuacu

SEQ ID NO: 577814 - RNA, 19 nt, Artificial Sequence
  Description of Artificial Sequence: Synthetic oligonucleotide
  Antisense strand to SEQ ID NO: 577813
aguaacgagccauugcagu

SEQ ID NO: 577815 - RNA, 19 nt, Artificial Sequence
  Description of Artificial Sequence: Synthetic oligonucleotide
  Sense strand starting at position 2625 of SEQ ID NO: 318637
agaguacuaugagcaaaua

SEQ ID NO: 577816 - RNA, 19 nt, Artificial Sequence
  Description of Artificial Sequence: Synthetic oligonucleotide
  Antisense strand to SEQ ID NO: 577815
uauuugcucauaguacucu

SEQ ID NO: 577817 - RNA, 19 nt, Artificial Sequence
  Description of Artificial Sequence: Synthetic oligonucleotide
  Sense strand starting at position 3011 of SEQ ID NO: 318637
cagugugguacuggcauau

SEQ ID NO: 577818 - RNA, 19 nt, Artificial Sequence
  Description of Artificial Sequence: Synthetic oligonucleotide
  Antisense strand to SEQ ID NO: 577817
auaugccaguaccacacug

SEQ ID NO: 577819 - RNA, 19 nt, Artificial Sequence
  Description of Artificial Sequence: Synthetic oligonucleotide
  Sense strand starting at position 3139 of SEQ ID NO: 318637
gagggacagucuuucuaac

SEQ ID NO: 577820 - RNA, 19 nt, Artificial Sequence
  Description of Artificial Sequence: Synthetic oligonucleotide
  Antisense strand to SEQ ID NO: 577819
guuagaaagacugucccuc

SEQ ID NO: 577821 - RNA, 19 nt, Artificial Sequence
  Description of Artificial Sequence: Synthetic oligonucleotide
  Sense strand starting at position 3141 of SEQ ID NO: 318637
gggacagucuuucuaacaa

SEQ ID NO: 577822 - RNA, 19 nt, Artificial Sequence
  Description of Artificial Sequence: Synthetic oligonucleotide
  Antisense strand to SEQ ID NO: 577821
uuguuagaaagacuguccc

SEQ ID NO: 577823 - RNA, 19 nt, Artificial Sequence
  Description of Artificial Sequence: Synthetic oligonucleotide
  Sense strand starting at position 3199 of SEQ ID NO: 318637
gaaggugguuccuucucua

SEQ ID NO: 577824 - RNA, 19 nt, Artificial Sequence
  Description of Artificial Sequence: Synthetic oligonucleotide
  Antisense strand to SEQ ID NO: 577823
uagagaaggaaccaccuuc

SEQ ID NO: 577825 - RNA, 19 nt, Artificial Sequence
  Description of Artificial Sequence: Synthetic oligonucleotide
  Sense strand starting at position 3202 of SEQ ID NO: 318637
ggugguuccuucucuaaca

SEQ ID NO: 577826 - RNA, 19 nt, Artificial Sequence
  Description of Artificial Sequence: Synthetic oligonucleotide
  Antisense strand to SEQ ID NO: 577825
uguuagagaaggaaccacc

SEQ ID NO: 577827 - RNA, 19 nt, Artificial Sequence
  Description of Artificial Sequence: Synthetic oligonucleotide
  Sense strand starting at position 3322 of SEQ ID NO: 318637
gcaacagacuuccuggaua

SEQ ID NO: 577828 - RNA, 19 nt, Artificial Sequence
  Description of Artificial Sequence: Synthetic oligonucleotide
  Antisense strand to SEQ ID NO: 577827
uauccaggaagucuguugc

SEQ ID NO: 577829 - RNA, 19 nt, Artificial Sequence
  Description of Artificial Sequence: Synthetic oligonucleotide
  Sense strand starting at position 3421 of SEQ ID NO: 318637
gacucuguagcagaguaaa

SEQ ID NO: 577830 - RNA, 19 nt, Artificial Sequence
  Description of Artificial Sequence: Synthetic oligonucleotide
  Antisense strand to SEQ ID NO: 577829
uuuacucugcuacagaguc

SEQ ID NO: 577831 - RNA, 19 nt, Artificial Sequence
  Description of Artificial Sequence: Synthetic oligonucleotide
  Sense strand starting at position 3684 of SEQ ID NO: 318637
augagauacuacgucauau

SEQ ID NO: 577832 - RNA, 19 nt, Artificial Sequence
  Description of Artificial Sequence: Synthetic oligonucleotide
  Antisense strand to SEQ ID NO: 577831
auaugacguaguaucucau

SEQ ID NO: 577833 - RNA, 19 nt, Artificial Sequence
  Description of Artificial Sequence: Synthetic oligonucleotide
  Sense strand starting at position 3686 of SEQ ID NO: 318637
gagauacuacgucauauac

SEQ ID NO: 577834 - RNA, 19 nt, Artificial Sequence
  Description of Artificial Sequence: Synthetic oligonucleotide
  Antisense strand to SEQ ID NO: 577833
guauaugacguaguaucuc

SEQ ID NO: 577835 - RNA, 19 nt, Artificial Sequence
  Description of Artificial Sequence: Synthetic oligonucleotide
  Sense strand starting at position 3833 of SEQ ID NO: 318637
accguauaaugauuccuca

SEQ ID NO: 577836 - RNA, 19 nt, Artificial Sequence
  Description of Artificial Sequence: Synthetic oligonucleotide
  Antisense strand to SEQ ID NO: 577835
ugaggaaucauuauacggu

SEQ ID NO: 577837 - RNA, 19 nt, Artificial Sequence
  Description of Artificial Sequence: Synthetic oligonucleotide
  Sense strand starting at position 6 of SEQ ID NO: 318638
ccaacuaguuaguuccaaa

SEQ ID NO: 577838 - RNA, 19 nt, Artificial Sequence
  Description of Artificial Sequence: Synthetic oligonucleotide
  Antisense strand to SEQ ID NO: 577837
uuuggaacuaacuaguugg

SEQ ID NO: 577839 - RNA, 19 nt, Artificial Sequence
  Description of Artificial Sequence: Synthetic oligonucleotide
  Sense strand starting at position 353 of SEQ ID NO: 318638
gagugauuacuaggcuuug

SEQ ID NO: 577840 - RNA, 19 nt, Artificial Sequence
  Description of Artificial Sequence: Synthetic oligonucleotide
  Antisense strand to SEQ ID NO: 577839
caaagccuaguaaucacuc

SEQ ID NO: 577841 - RNA, 19 nt, Artificial Sequence
  Description of Artificial Sequence: Synthetic oligonucleotide
  Sense strand starting at position 486 of SEQ ID NO: 318638
agagauagguuaucuggua

SEQ ID NO: 577842 - RNA, 19 nt, Artificial Sequence
  Description of Artificial Sequence: Synthetic oligonucleotide
  Antisense strand to SEQ ID NO: 577841
uaccagauaaccuaucucu

SEQ ID NO: 577843 - RNA, 19 nt, Artificial Sequence
  Description of Artificial Sequence: Synthetic oligonucleotide
  Sense strand starting at position 487 of SEQ ID NO: 318638
gagauagguuaucugguaa

SEQ ID NO: 577844 - RNA, 19 nt, Artificial Sequence
  Description of Artificial Sequence: Synthetic oligonucleotide
  Antisense strand to SEQ ID NO: 577843
uuaccagauaaccuaucuc

SEQ ID NO: 577845 - RNA, 19 nt, Artificial Sequence
  Description of Artificial Sequence: Synthetic oligonucleotide
  Sense strand starting at position 645 of SEQ ID NO: 318638
agcuaaauuccaggacaga

SEQ ID NO: 577846 - RNA, 19 nt, Artificial Sequence
  Description of Artificial Sequence: Synthetic oligonucleotide
  Antisense strand to SEQ ID NO: 577845
ucuguccuggaauuuagcu

SEQ ID NO: 577847 - RNA, 19 nt, Artificial Sequence
  Description of Artificial Sequence: Synthetic oligonucleotide
  Sense strand starting at position 689 of SEQ ID NO: 318638
ucuuguauacggugaagaa

SEQ ID NO: 577848 - RNA, 19 nt, Artificial Sequence
  Description of Artificial Sequence: Synthetic oligonucleotide
  Antisense strand to SEQ ID NO: 577847
uucuucaccguauacaaga

SEQ ID NO: 577849 - RNA, 19 nt, Artificial Sequence
  Description of Artificial Sequence: Synthetic oligonucleotide
  Sense strand starting at position 690 of SEQ ID NO: 318638
cuuguauacggugaagaaa

SEQ ID NO: 577850 - RNA, 19 nt, Artificial Sequence
  Description of Artificial Sequence: Synthetic oligonucleotide
  Antisense strand to SEQ ID NO: 577849
uuucuucaccguauacaag

SEQ ID NO: 577851 - RNA, 19 nt, Artificial Sequence
  Description of Artificial Sequence: Synthetic oligonucleotide
  Sense strand starting at position 698 of SEQ ID NO: 318638
cggugaagaaacugacaau

SEQ ID NO: 577852 - RNA, 19 nt, Artificial Sequence
  Description of Artificial Sequence: Synthetic oligonucleotide
  Antisense strand to SEQ ID NO: 577851
auugucaguuucuucaccg

SEQ ID NO: 577853 - RNA, 19 nt, Artificial Sequence
  Description of Artificial Sequence: Synthetic oligonucleotide
  Sense strand starting at position 790 of SEQ ID NO: 318638
cugagaaauuggcuuacug

SEQ ID NO: 577854 - RNA, 19 nt, Artificial Sequence
  Description of Artificial Sequence: Synthetic oligonucleotide
  Antisense strand to SEQ ID NO: 577853
caguaagccaauuucucag

SEQ ID NO: 577855 - RNA, 19 nt, Artificial Sequence
  Description of Artificial Sequence: Synthetic oligonucleotide
  Sense strand starting at position 792 of SEQ ID NO: 318638
gagaaauuggcuuacugca

SEQ ID NO: 577856 - RNA, 19 nt, Artificial Sequence
  Description of Artificial Sequence: Synthetic oligonucleotide
  Antisense strand to SEQ ID NO: 577855
ugcaguaagccaauuucuc

SEQ ID NO: 577857 - RNA, 19 nt, Artificial Sequence
  Description of Artificial Sequence: Synthetic oligonucleotide
  Sense strand starting at position 797 of SEQ ID NO: 318638
auuggcuuacugcaaagaa

SEQ ID NO: 577858 - RNA, 19 nt, Artificial Sequence
  Description of Artificial Sequence: Synthetic oligonucleotide
  Antisense strand to SEQ ID NO: 577857
uucuuugcaguaagccaau

SEQ ID NO: 577859 - RNA, 19 nt, Artificial Sequence
  Description of Artificial Sequence: Synthetic oligonucleotide
  Sense strand starting at position 946 of SEQ ID NO: 318638
guaccugucccacagauca

SEQ ID NO: 577860 - RNA, 19 nt, Artificial Sequence
  Description of Artificial Sequence: Synthetic oligonucleotide
  Antisense strand to SEQ ID NO: 577859
ugaucugugggacagguac

SEQ ID NO: 577861 - RNA, 19 nt, Artificial Sequence
  Description of Artificial Sequence: Synthetic oligonucleotide
  Sense strand starting at position 1113 of SEQ ID NO: 318638
ugguuacugccggaucaua

SEQ ID NO: 577862 - RNA, 19 nt, Artificial Sequence
  Description of Artificial Sequence: Synthetic oligonucleotide
  Antisense strand to SEQ ID NO: 577861
uaugauccggcaguaacca

SEQ ID NO: 577863 - RNA, 19 nt, Artificial Sequence
  Description of Artificial Sequence: Synthetic oligonucleotide
  Sense strand starting at position 1282 of SEQ ID NO: 318638
auuccuuucgaauaaaguc

SEQ ID NO: 577864 - RNA, 19 nt, Artificial Sequence
  Description of Artificial Sequence: Synthetic oligonucleotide
  Antisense strand to SEQ ID NO: 577863
gacuuuauucgaaaggaau

SEQ ID NO: 577865 - RNA, 19 nt, Artificial Sequence
  Description of Artificial Sequence: Synthetic oligonucleotide
  Sense strand starting at position 1344 of SEQ ID NO: 318638
uuaugaaauggcuaagugu

SEQ ID NO: 577866 - RNA, 19 nt, Artificial Sequence
  Description of Artificial Sequence: Synthetic oligonucleotide
  Antisense strand to SEQ ID NO: 577865
acacuuagccauuucauaa

SEQ ID NO: 577867 - RNA, 19 nt, Artificial Sequence
  Description of Artificial Sequence: Synthetic oligonucleotide
  Sense strand starting at position 1347 of SEQ ID NO: 318638
ugaaauggcuaaguguaaa

SEQ ID NO: 577868 - RNA, 19 nt, Artificial Sequence
  Description of Artificial Sequence: Synthetic oligonucleotide
  Antisense strand to SEQ ID NO: 577867
uuuacacuuagccauuuca

SEQ ID NO: 577869 - RNA, 19 nt, Artificial Sequence
  Description of Artificial Sequence: Synthetic oligonucleotide
  Sense strand starting at position 1374 of SEQ ID NO: 318638
ggacuaccguuucuuuaaa

SEQ ID NO: 577870 - RNA, 19 nt, Artificial Sequence
  Description of Artificial Sequence: Synthetic oligonucleotide
  Antisense strand to SEQ ID NO: 577869
uuuaaagaaacgguagucc

SEQ ID NO: 577871 - RNA, 19 nt, Artificial Sequence
  Description of Artificial Sequence: Synthetic oligonucleotide
  Sense strand starting at position 1388 of SEQ ID NO: 318638
uuaaaugacagguguugau

SEQ ID NO: 577872 - RNA, 19 nt, Artificial Sequence
  Description of Artificial Sequence: Synthetic oligonucleotide
  Antisense strand to SEQ ID NO: 577871
aucaacaccugucauuuaa

SEQ ID NO: 577873 - RNA, 19 nt, Artificial Sequence
  Description of Artificial Sequence: Synthetic oligonucleotide
  Sense strand starting at position 1392 of SEQ ID NO: 318638
augacagguguugaucuua

SEQ ID NO: 577874 - RNA, 19 nt, Artificial Sequence
  Description of Artificial Sequence: Synthetic oligonucleotide
  Antisense strand to SEQ ID NO: 577873
uaagaucaacaccugucau

SEQ ID NO: 577875 - RNA, 19 nt, Artificial Sequence
  Description of Artificial Sequence: Synthetic oligonucleotide
  Sense strand starting at position 1600 of SEQ ID NO: 318638
guccauacucccugacaga

SEQ ID NO: 577876 - RNA, 19 nt, Artificial Sequence
  Description of Artificial Sequence: Synthetic oligonucleotide
  Antisense strand to SEQ ID NO: 577875
ucugucagggaguauggac

SEQ ID NO: 577877 - RNA, 19 nt, Artificial Sequence
  Description of Artificial Sequence: Synthetic oligonucleotide
  Sense strand starting at position 1853 of SEQ ID NO: 318638
ggauaggucguggaccaga

SEQ ID NO: 577878 - RNA, 19 nt, Artificial Sequence
  Description of Artificial Sequence: Synthetic oligonucleotide
  Antisense strand to SEQ ID NO: 577877
ucugguccacgaccuaucc

SEQ ID NO: 577879 - RNA, 19 nt, Artificial Sequence
  Description of Artificial Sequence: Synthetic oligonucleotide
  Sense strand starting at position 2592 of SEQ ID NO: 318638
gcaauugaagccggaagaa

SEQ ID NO: 577880 - RNA, 19 nt, Artificial Sequence
  Description of Artificial Sequence: Synthetic oligonucleotide
  Antisense strand to SEQ ID NO: 577879
uucuuccggcuucaauugc

SEQ ID NO: 577881 - RNA, 19 nt, Artificial Sequence
  Description of Artificial Sequence: Synthetic oligonucleotide
  Sense strand starting at position 2700 of SEQ ID NO: 318638
auagauagaugcucuggga

SEQ ID NO: 577882 - RNA, 19 nt, Artificial Sequence
  Description of Artificial Sequence: Synthetic oligonucleotide
  Antisense strand to SEQ ID NO: 577881
ucccagagcaucuaucuau

SEQ ID NO: 577883 - RNA, 19 nt, Artificial Sequence
  Description of Artificial Sequence: Synthetic oligonucleotide
  Sense strand starting at position 2899 of SEQ ID NO: 318638
auagauaucgaucgauaga

SEQ ID NO: 577884 - RNA, 19 nt, Artificial Sequence
  Description of Artificial Sequence: Synthetic oligonucleotide
  Antisense strand to SEQ ID NO: 577883
ucuaucgaucgauaucuau

SEQ ID NO: 577885 - RNA, 19 nt, Artificial Sequence
  Description of Artificial Sequence: Synthetic oligonucleotide
  Sense strand starting at position 2972 of SEQ ID NO: 318638
uuuggauagauauguagac

SEQ ID NO: 577886 - RNA, 19 nt, Artificial Sequence
  Description of Artificial Sequence: Synthetic oligonucleotide
  Antisense strand to SEQ ID NO: 577885
gucuacauaucuauccaaa

SEQ ID NO: 577887 - RNA, 19 nt, Artificial Sequence
  Description of Artificial Sequence: Synthetic oligonucleotide
  Sense strand starting at position 2976 of SEQ ID NO: 318638
gauagauauguagacgucu

SEQ ID NO: 577888 - RNA, 19 nt, Artificial Sequence
  Description of Artificial Sequence: Synthetic oligonucleotide
  Antisense strand to SEQ ID NO: 577887
agacgucuacauaucuauc

SEQ ID NO: 577889 - RNA, 19 nt, Artificial Sequence
  Description of Artificial Sequence: Synthetic oligonucleotide
  Sense strand starting at position 2982 of SEQ ID NO: 318638
uauguagacgucuaucuau

SEQ ID NO: 577890 - RNA, 19 nt, Artificial Sequence
  Description of Artificial Sequence: Synthetic oligonucleotide
  Antisense strand to SEQ ID NO: 577889
auagauagacgucuacaua

SEQ ID NO: 577891 - RNA, 19 nt, Artificial Sequence
  Description of Artificial Sequence: Synthetic oligonucleotide
  Sense strand starting at position 2985 of SEQ ID NO: 318638
guagacgucuaucuauaaa

SEQ ID NO: 577892 - RNA, 19 nt, Artificial Sequence
  Description of Artificial Sequence: Synthetic oligonucleotide
  Antisense strand to SEQ ID NO: 577891
uuuauagauagacgucuac

SEQ ID NO: 577893 - RNA, 19 nt, Artificial Sequence
  Description of Artificial Sequence: Synthetic oligonucleotide
  Sense strand starting at position 3252 of SEQ ID NO: 318638
gcaggcuugaaauggauau

SEQ ID NO: 577894 - RNA, 19 nt, Artificial Sequence
  Description of Artificial Sequence: Synthetic oligonucleotide
  Antisense strand to SEQ ID NO: 577893
auauccauuucaagccugc

SEQ ID NO: 577895 - RNA, 19 nt, Artificial Sequence
  Description of Artificial Sequence: Synthetic oligonucleotide
  Sense strand starting at position 3380 of SEQ ID NO: 318638
uuguuaugaaguuggaauu

SEQ ID NO: 577896 - RNA, 19 nt, Artificial Sequence
  Description of Artificial Sequence: Synthetic oligonucleotide
  Antisense strand to SEQ ID NO: 577895
aauuccaacuucauaacaa

SEQ ID NO: 577897 - RNA, 19 nt, Artificial Sequence
  Description of Artificial Sequence: Synthetic oligonucleotide
  Sense strand starting at position 3694 of SEQ ID NO: 318638
agaucugggaaucguaagu

SEQ ID NO: 577898 - RNA, 19 nt, Artificial Sequence
  Description of Artificial Sequence: Synthetic oligonucleotide
  Antisense strand to SEQ ID NO: 577897
acuuacgauucccagaucu

SEQ ID NO: 577899 - RNA, 19 nt, Artificial Sequence
  Description of Artificial Sequence: Synthetic oligonucleotide
  Sense strand starting at position 3699 of SEQ ID NO: 318638
ugggaaucguaaguacuga

SEQ ID NO: 577900 - RNA, 19 nt, Artificial Sequence
  Description of Artificial Sequence: Synthetic oligonucleotide
  Antisense strand to SEQ ID NO: 577899
ucaguacuuacgauuccca

SEQ ID NO: 577901 - RNA, 19 nt, Artificial Sequence
  Description of Artificial Sequence: Synthetic oligonucleotide
  Sense strand starting at position 3704 of SEQ ID NO: 318638
aucguaaguacugacagaa

SEQ ID NO: 577902 - RNA, 19 nt, Artificial Sequence
  Description of Artificial Sequence: Synthetic oligonucleotide
  Antisense strand to SEQ ID NO: 577901
uucugucaguacuuacgau

SEQ ID NO: 577903 - RNA, 19 nt, Artificial Sequence
  Description of Artificial Sequence: Synthetic oligonucleotide
  Sense strand starting at position 3742 of SEQ ID NO: 318638
acuggagaauaguuuguga

SEQ ID NO: 577904 - RNA, 19 nt, Artificial Sequence
  Description of Artificial Sequence: Synthetic oligonucleotide
  Antisense strand to SEQ ID NO: 577903
ucacaaacuauucuccagu

SEQ ID NO: 577905 - RNA, 19 nt, Artificial Sequence
  Description of Artificial Sequence: Synthetic oligonucleotide
  Sense strand starting at position 3744 of SEQ ID NO: 318638
uggagaauaguuugugaaa

SEQ ID NO: 577906 - RNA, 19 nt, Artificial Sequence
  Description of Artificial Sequence: Synthetic oligonucleotide
  Antisense strand to SEQ ID NO: 577905
uuucacaaacuauucucca

SEQ ID NO: 577907 - RNA, 19 nt, Artificial Sequence
  Description of Artificial Sequence: Synthetic oligonucleotide
  Sense strand starting at position 3745 of SEQ ID NO: 318638
ggagaauaguuugugaaac

SEQ ID NO: 577908 - RNA, 19 nt, Artificial Sequence
  Description of Artificial Sequence: Synthetic oligonucleotide
  Antisense strand to SEQ ID NO: 577907
guuucacaaacuauucucc

SEQ ID NO: 577909 - RNA, 19 nt, Artificial Sequence
  Description of Artificial Sequence: Synthetic oligonucleotide
  Sense strand starting at position 3818 of SEQ ID NO: 318638
uagggacaagguuguaaau

SEQ ID NO: 577910 - RNA, 19 nt, Artificial Sequence
  Description of Artificial Sequence: Synthetic oligonucleotide
  Antisense strand to SEQ ID NO: 577909
auuuacaaccuugucccua

SEQ ID NO: 577911 - RNA, 19 nt, Artificial Sequence
  Description of Artificial Sequence: Synthetic oligonucleotide
  Sense strand starting at position 3917 of SEQ ID NO: 318638
gcugcuauccuugaggaag

SEQ ID NO: 577912 - RNA, 19 nt, Artificial Sequence
  Description of Artificial Sequence: Synthetic oligonucleotide
  Antisense strand to SEQ ID NO: 577911
cuuccucaaggauagcagc

SEQ ID NO: 577913 - RNA, 19 nt, Artificial Sequence
  Description of Artificial Sequence: Synthetic oligonucleotide
  Sense strand starting at position 3946 of SEQ ID NO: 318638
gaagguaaguggcuaucaa

SEQ ID NO: 577914 - RNA, 19 nt, Artificial Sequence
  Description of Artificial Sequence: Synthetic oligonucleotide
  Antisense strand to SEQ ID NO: 577913
uugauagccacuuaccuuc

SEQ ID NO: 577915 - RNA, 19 nt, Artificial Sequence
  Description of Artificial Sequence: Synthetic oligonucleotide
  Sense strand starting at position 3975 of SEQ ID NO: 318638
acaacacauucugugaagu

SEQ ID NO: 577916 - RNA, 19 nt, Artificial Sequence
  Description of Artificial Sequence: Synthetic oligonucleotide
  Antisense strand to SEQ ID NO: 577915
acuucacagaauguguugu

SEQ ID NO: 577917 - RNA, 19 nt, Artificial Sequence
  Description of Artificial Sequence: Synthetic oligonucleotide
  Sense strand starting at position 336 of SEQ ID NO: 318639
agucauuaccauuggguua

SEQ ID NO: 577918 - RNA, 19 nt, Artificial Sequence
  Description of Artificial Sequence: Synthetic oligonucleotide
  Antisense strand to SEQ ID NO: 577917
uaacccaaugguaaugacu

SEQ ID NO: 577919 - RNA, 19 nt, Artificial Sequence
  Description of Artificial Sequence: Synthetic oligonucleotide
  Sense strand starting at position 613 of SEQ ID NO: 318639
ucgauaacagcaugaagau

SEQ ID NO: 577920 - RNA, 19 nt, Artificial Sequence
  Description of Artificial Sequence: Synthetic oligonucleotide
  Antisense strand to SEQ ID NO: 577919
aucuucaugcuguuaucga

SEQ ID NO: 577921 - RNA, 19 nt, Artificial Sequence
  Description of Artificial Sequence: Synthetic oligonucleotide
  Sense strand starting at position 661 of SEQ ID NO: 318639
gaguacuggcuuuacaauc

SEQ ID NO: 577922 - RNA, 19 nt, Artificial Sequence
  Description of Artificial Sequence: Synthetic oligonucleotide
  Antisense strand to SEQ ID NO: 577921
gauuguaaagccaguacuc

SEQ ID NO: 577923 - RNA, 19 nt, Artificial Sequence
  Description of Artificial Sequence: Synthetic oligonucleotide
  Sense strand starting at position 674 of SEQ ID NO: 318639
acaaucuacuaggugugau

SEQ ID NO: 577924 - RNA, 19 nt, Artificial Sequence
  Description of Artificial Sequence: Synthetic oligonucleotide
  Antisense strand to SEQ ID NO: 577923
aucacaccuaguagauugu

SEQ ID NO: 577925 - RNA, 19 nt, Artificial Sequence
  Description of Artificial Sequence: Synthetic oligonucleotide
  Sense strand starting at position 806 of SEQ ID NO: 318639
ugguacauaggacgugaua

SEQ ID NO: 577926 - RNA, 19 nt, Artificial Sequence
  Description of Artificial Sequence: Synthetic oligonucleotide
  Antisense strand to SEQ ID NO: 577925
uaucacguccuauguacca

SEQ ID NO: 577927 - RNA, 19 nt, Artificial Sequence
  Description of Artificial Sequence: Synthetic oligonucleotide
  Sense strand starting at position 808 of SEQ ID NO: 318639
guacauaggacgugauaau

SEQ ID NO: 577928 - RNA, 19 nt, Artificial Sequence
  Description of Artificial Sequence: Synthetic oligonucleotide
  Antisense strand to SEQ ID NO: 577927
auuaucacguccuauguac

SEQ ID NO: 577929 - RNA, 19 nt, Artificial Sequence
  Description of Artificial Sequence: Synthetic oligonucleotide
  Sense strand starting at position 886 of SEQ ID NO: 318639
ugaucuuaagcacaguaua

SEQ ID NO: 577930 - RNA, 19 nt, Artificial Sequence
  Description of Artificial Sequence: Synthetic oligonucleotide
  Antisense strand to SEQ ID NO: 577929
uauacugugcuuaagauca

SEQ ID NO: 577931 - RNA, 19 nt, Artificial Sequence
  Description of Artificial Sequence: Synthetic oligonucleotide
  Sense strand starting at position 921 of SEQ ID NO: 318639
cuagucugacagugagaua

SEQ ID NO: 577932 - RNA, 19 nt, Artificial Sequence
  Description of Artificial Sequence: Synthetic oligonucleotide
  Antisense strand to SEQ ID NO: 577931
uaucucacugucagacuag

SEQ ID NO: 577933 - RNA, 19 nt, Artificial Sequence
  Description of Artificial Sequence: Synthetic oligonucleotide
  Sense strand starting at position 945 of SEQ ID NO: 318639
aagaguuaucuuugacuug

SEQ ID NO: 577934 - RNA, 19 nt, Artificial Sequence
  Description of Artificial Sequence: Synthetic oligonucleotide
  Antisense strand to SEQ ID NO: 577933
caagucaaagauaacucuu

SEQ ID NO: 577935 - RNA, 19 nt, Artificial Sequence
  Description of Artificial Sequence: Synthetic oligonucleotide
  Sense strand starting at position 963 of SEQ ID NO: 318639
gcacuacgaguagaagaau

SEQ ID NO: 577936 - RNA, 19 nt, Artificial Sequence
  Description of Artificial Sequence: Synthetic oligonucleotide
  Antisense strand to SEQ ID NO: 577935
auucuucuacucguagugc

SEQ ID NO: 577937 - RNA, 19 nt, Artificial Sequence
  Description of Artificial Sequence: Synthetic oligonucleotide
  Sense strand starting at position 1062 of SEQ ID NO: 318639
gguaaauucguccagagaa

SEQ ID NO: 577938 - RNA, 19 nt, Artificial Sequence
  Description of Artificial Sequence: Synthetic oligonucleotide
  Antisense strand to SEQ ID NO: 577937
uucucuggacgaauuuacc

SEQ ID NO: 577939 - RNA, 19 nt, Artificial Sequence
  Description of Artificial Sequence: Synthetic oligonucleotide
  Sense strand starting at position 1120 of SEQ ID NO: 318639
cugugaacauaggcucaua

SEQ ID NO: 577940 - RNA, 19 nt, Artificial Sequence
  Description of Artificial Sequence: Synthetic oligonucleotide
  Antisense strand to SEQ ID NO: 577939
uaugagccuauguucacag

SEQ ID NO: 577941 - RNA, 19 nt, Artificial Sequence
  Description of Artificial Sequence: Synthetic oligonucleotide
  Sense strand starting at position 1204 of SEQ ID NO: 318639
gcauccuuuguccagaaau

SEQ ID NO: 577942 - RNA, 19 nt, Artificial Sequence
  Description of Artificial Sequence: Synthetic oligonucleotide
  Antisense strand to SEQ ID NO: 577941
auuucuggacaaaggaugc

SEQ ID NO: 577943 - RNA, 19 nt, Artificial Sequence
  Description of Artificial Sequence: Synthetic oligonucleotide
  Sense strand starting at position 2390 of SEQ ID NO: 318639
ucaguuucuccguuugcau

SEQ ID NO: 577944 - RNA, 19 nt, Artificial Sequence
  Description of Artificial Sequence: Synthetic oligonucleotide
  Antisense strand to SEQ ID NO: 577943
augcaaacggagaaacuga

SEQ ID NO: 577945 - RNA, 19 nt, Artificial Sequence
  Description of Artificial Sequence: Synthetic oligonucleotide
  Sense strand starting at position 2402 of SEQ ID NO: 318639
uuugcaucugagggauucu

SEQ ID NO: 577946 - RNA, 19 nt, Artificial Sequence
  Description of Artificial Sequence: Synthetic oligonucleotide
  Antisense strand to SEQ ID NO: 577945
agaaucccucagaugcaaa

SEQ ID NO: 577947 - RNA, 19 nt, Artificial Sequence
  Description of Artificial Sequence: Synthetic oligonucleotide
  Sense strand starting at position 2403 of SEQ ID NO: 318639
uugcaucugagggauucuu

SEQ ID NO: 577948 - RNA, 19 nt, Artificial Sequence
  Description of Artificial Sequence: Synthetic oligonucleotide
  Antisense strand to SEQ ID NO: 577947
aagaaucccucagaugcaa

SEQ ID NO: 577949 - RNA, 19 nt, Artificial Sequence
  Description of Artificial Sequence: Synthetic oligonucleotide
  Sense strand starting at position 2477 of SEQ ID NO: 318639
guugaauccagaggguagu

SEQ ID NO: 577950 - RNA, 19 nt, Artificial Sequence
  Description of Artificial Sequence: Synthetic oligonucleotide
  Antisense strand to SEQ ID NO: 577949
acuacccucuggauucaac

SEQ ID NO: 577951 - RNA, 19 nt, Artificial Sequence
  Description of Artificial Sequence: Synthetic oligonucleotide
  Sense strand starting at position 2557 of SEQ ID NO: 318639
gguaaacuguggguuccaa

SEQ ID NO: 577952 - RNA, 19 nt, Artificial Sequence
  Description of Artificial Sequence: Synthetic oligonucleotide
  Antisense strand to SEQ ID NO: 577951
uuggaacccacaguuuacc

SEQ ID NO: 577953 - RNA, 19 nt, Artificial Sequence
  Description of Artificial Sequence: Synthetic oligonucleotide
  Sense strand starting at position 2848 of SEQ ID NO: 318639
uuugaauuugcguaguucu

SEQ ID NO: 577954 - RNA, 19 nt, Artificial Sequence
  Description of Artificial Sequence: Synthetic oligonucleotide
  Antisense strand to SEQ ID NO: 577953
agaacuacgcaaauucaaa

SEQ ID NO: 577955 - RNA, 19 nt, Artificial Sequence
  Description of Artificial Sequence: Synthetic oligonucleotide
  Sense strand starting at position 3035 of SEQ ID NO: 318639
agguaacucacgugagauu

SEQ ID NO: 577956 - RNA, 19 nt, Artificial Sequence
  Description of Artificial Sequence: Synthetic oligonucleotide
  Antisense strand to SEQ ID NO: 577955
aaucucacgugaguuaccu

SEQ ID NO: 577957 - RNA, 19 nt, Artificial Sequence
  Description of Artificial Sequence: Synthetic oligonucleotide
  Sense strand starting at position 3066 of SEQ ID NO: 318639
cuguauucggccuaugaga

SEQ ID NO: 577958 - RNA, 19 nt, Artificial Sequence
  Description of Artificial Sequence: Synthetic oligonucleotide
  Antisense strand to SEQ ID NO: 577957
ucucauaggccgaauacag

SEQ ID NO: 577959 - RNA, 19 nt, Artificial Sequence
  Description of Artificial Sequence: Synthetic oligonucleotide
  Sense strand starting at position 3113 of SEQ ID NO: 318639
uuagaagauuugggauucu

SEQ ID NO: 577960 - RNA, 19 nt, Artificial Sequence
  Description of Artificial Sequence: Synthetic oligonucleotide
  Antisense strand to SEQ ID NO: 577959
agaaucccaaaucuucuaa

SEQ ID NO: 577961 - RNA, 19 nt, Artificial Sequence
  Description of Artificial Sequence: Synthetic oligonucleotide
  Sense strand starting at position 3125 of SEQ ID NO: 318639
ggauucugcuauuuguguu

SEQ ID NO: 577962 - RNA, 19 nt, Artificial Sequence
  Description of Artificial Sequence: Synthetic oligonucleotide
  Antisense strand to SEQ ID NO: 577961
aacacaaauagcagaaucc

SEQ ID NO: 577963 - RNA, 19 nt, Artificial Sequence
  Description of Artificial Sequence: Synthetic oligonucleotide
  Sense strand starting at position 3129 of SEQ ID NO: 318639
ucugcuauuuguguuuaca

SEQ ID NO: 577964 - RNA, 19 nt, Artificial Sequence
  Description of Artificial Sequence: Synthetic oligonucleotide
  Antisense strand to SEQ ID NO: 577963
uguaaacacaaauagcaga

SEQ ID NO: 577965 - RNA, 19 nt, Artificial Sequence
  Description of Artificial Sequence: Synthetic oligonucleotide
  Sense strand starting at position 3131 of SEQ ID NO: 318639
ugcuauuuguguuuacauu

SEQ ID NO: 577966 - RNA, 19 nt, Artificial Sequence
  Description of Artificial Sequence: Synthetic oligonucleotide
  Antisense strand to SEQ ID NO: 577965
aauguaaacacaaauagca

SEQ ID NO: 577967 - RNA, 19 nt, Artificial Sequence
  Description of Artificial Sequence: Synthetic oligonucleotide
  Sense strand starting at position 3205 of SEQ ID NO: 318639
gucuguuauauugaauugu

SEQ ID NO: 577968 - RNA, 19 nt, Artificial Sequence
  Description of Artificial Sequence: Synthetic oligonucleotide
  Antisense strand to SEQ ID NO: 577967
acaauucaauauaacagac

SEQ ID NO: 577969 - RNA, 19 nt, Artificial Sequence
  Description of Artificial Sequence: Synthetic oligonucleotide
  Sense strand starting at position 3211 of SEQ ID NO: 318639
uauauugaauugucaagag

SEQ ID NO: 577970 - RNA, 19 nt, Artificial Sequence
  Description of Artificial Sequence: Synthetic oligonucleotide
  Antisense strand to SEQ ID NO: 577969
cucuugacaauucaauaua

SEQ ID NO: 577971 - RNA, 19 nt, Artificial Sequence
  Description of Artificial Sequence: Synthetic oligonucleotide
  Sense strand starting at position 3219 of SEQ ID NO: 318639
auugucaagaguuggucaa

SEQ ID NO: 577972 - RNA, 19 nt, Artificial Sequence
  Description of Artificial Sequence: Synthetic oligonucleotide
  Antisense strand to SEQ ID NO: 577971
uugaccaacucuugacaau

SEQ ID NO: 577973 - RNA, 19 nt, Artificial Sequence
  Description of Artificial Sequence: Synthetic oligonucleotide
  Sense strand starting at position 3220 of SEQ ID NO: 318639
uugucaagaguuggucaaa

SEQ ID NO: 577974 - RNA, 19 nt, Artificial Sequence
  Description of Artificial Sequence: Synthetic oligonucleotide
  Antisense strand to SEQ ID NO: 577973
uuugaccaacucuugacaa

SEQ ID NO: 577975 - RNA, 19 nt, Artificial Sequence
  Description of Artificial Sequence: Synthetic oligonucleotide
  Sense strand starting at position 3221 of SEQ ID NO: 318639
ugucaagaguuggucaaau

SEQ ID NO: 577976 - RNA, 19 nt, Artificial Sequence
  Description of Artificial Sequence: Synthetic oligonucleotide
  Antisense strand to SEQ ID NO: 577975
auuugaccaacucuugaca

SEQ ID NO: 577977 - RNA, 19 nt, Artificial Sequence
  Description of Artificial Sequence: Synthetic oligonucleotide
  Sense strand starting at position 3304 of SEQ ID NO: 318639
gaacaaagauggucuguuc

SEQ ID NO: 577978 - RNA, 19 nt, Artificial Sequence
  Description of Artificial Sequence: Synthetic oligonucleotide
  Antisense strand to SEQ ID NO: 577977
gaacagaccaucuuuguuc

SEQ ID NO: 577979 - RNA, 19 nt, Artificial Sequence
  Description of Artificial Sequence: Synthetic oligonucleotide
  Sense strand starting at position 3506 of SEQ ID NO: 318639
gugcaauuuaucgagcuug

SEQ ID NO: 577980 - RNA, 19 nt, Artificial Sequence
  Description of Artificial Sequence: Synthetic oligonucleotide
  Antisense strand to SEQ ID NO: 577979
caagcucgauaaauugcac

SEQ ID NO: 577981 - RNA, 19 nt, Artificial Sequence
  Description of Artificial Sequence: Synthetic oligonucleotide
  Sense strand starting at position 3542 of SEQ ID NO: 318639
ugugucuguagacauaacu

SEQ ID NO: 577982 - RNA, 19 nt, Artificial Sequence
  Description of Artificial Sequence: Synthetic oligonucleotide
  Antisense strand to SEQ ID NO: 577981
aguuaugucuacagacaca

SEQ ID NO: 577983 - RNA, 19 nt, Artificial Sequence
  Description of Artificial Sequence: Synthetic oligonucleotide
  Sense strand starting at position 3573 of SEQ ID NO: 318639
augugaagauugucuugau

SEQ ID NO: 577984 - RNA, 19 nt, Artificial Sequence
  Description of Artificial Sequence: Synthetic oligonucleotide
  Antisense strand to SEQ ID NO: 577983
aucaagacaaucuucacau

SEQ ID NO: 577985 - RNA, 19 nt, Artificial Sequence
  Description of Artificial Sequence: Synthetic oligonucleotide
  Sense strand starting at position 3574 of SEQ ID NO: 318639
ugugaagauugucuugauc

SEQ ID NO: 577986 - RNA, 19 nt, Artificial Sequence
  Description of Artificial Sequence: Synthetic oligonucleotide
  Antisense strand to SEQ ID NO: 577985
gaucaagacaaucuucaca

SEQ ID NO: 577987 - RNA, 19 nt, Artificial Sequence
  Description of Artificial Sequence: Synthetic oligonucleotide
  Sense strand starting at position 3577 of SEQ ID NO: 318639
gaagauugucuugaucuuu

SEQ ID NO: 577988 - RNA, 19 nt, Artificial Sequence
  Description of Artificial Sequence: Synthetic oligonucleotide
  Antisense strand to SEQ ID NO: 577987
aaagaucaagacaaucuuc

SEQ ID NO: 577989 - RNA, 19 nt, Artificial Sequence
  Description of Artificial Sequence: Synthetic oligonucleotide
  Sense strand starting at position 3585 of SEQ ID NO: 318639
ucuugaucuuuguuacaua

SEQ ID NO: 577990 - RNA, 19 nt, Artificial Sequence
  Description of Artificial Sequence: Synthetic oligonucleotide
  Antisense strand to SEQ ID NO: 577989
uauguaacaaagaucaaga

SEQ ID NO: 577991 - RNA, 19 nt, Artificial Sequence
  Description of Artificial Sequence: Synthetic oligonucleotide
  Sense strand starting at position 3608 of SEQ ID NO: 318639
gguaauacuucuguaugaa

SEQ ID NO: 577992 - RNA, 19 nt, Artificial Sequence
  Description of Artificial Sequence: Synthetic oligonucleotide
  Antisense strand to SEQ ID NO: 577991
uucauacagaaguauuacc

SEQ ID NO: 577993 - RNA, 19 nt, Artificial Sequence
  Description of Artificial Sequence: Synthetic oligonucleotide
  Sense strand starting at position 3609 of SEQ ID NO: 318639
guaauacuucuguaugaag

SEQ ID NO: 577994 - RNA, 19 nt, Artificial Sequence
  Description of Artificial Sequence: Synthetic oligonucleotide
  Antisense strand to SEQ ID NO: 577993
cuucauacagaaguauuac

SEQ ID NO: 577995 - RNA, 19 nt, Artificial Sequence
  Description of Artificial Sequence: Synthetic oligonucleotide
  Sense strand starting at position 3661 of SEQ ID NO: 318639
aagcuuaacuuguuagaga

SEQ ID NO: 577996 - RNA, 19 nt, Artificial Sequence
  Description of Artificial Sequence: Synthetic oligonucleotide
  Antisense strand to SEQ ID NO: 577995
ucucuaacaaguuaagcuu

SEQ ID NO: 577997 - RNA, 19 nt, Artificial Sequence
  Description of Artificial Sequence: Synthetic oligonucleotide
  Sense strand starting at position 164 of SEQ ID NO: 318640
guucuuggguucucaacaa

SEQ ID NO: 577998 - RNA, 19 nt, Artificial Sequence
  Description of Artificial Sequence: Synthetic oligonucleotide
  Antisense strand to SEQ ID NO: 577997
uuguugagaacccaagaac

SEQ ID NO: 577999 - RNA, 19 nt, Artificial Sequence
  Description of Artificial Sequence: Synthetic oligonucleotide
  Sense strand starting at position 213 of SEQ ID NO: 318640
ugggaugacccuggaaagu

SEQ ID NO: 578000 - RNA, 19 nt, Artificial Sequence
  Description of Artificial Sequence: Synthetic oligonucleotide
  Antisense strand to SEQ ID NO: 577999
acuuuccagggucauccca

SEQ ID NO: 578001 - RNA, 19 nt, Artificial Sequence
  Description of Artificial Sequence: Synthetic oligonucleotide
  Sense strand starting at position 413 of SEQ ID NO: 318640
ggaacuuggcuuugaaaga

SEQ ID NO: 578002 - RNA, 19 nt, Artificial Sequence
  Description of Artificial Sequence: Synthetic oligonucleotide
  Antisense strand to SEQ ID NO: 578001
ucuuucaaagccaaguucc

SEQ ID NO: 578003 - RNA, 19 nt, Artificial Sequence
  Description of Artificial Sequence: Synthetic oligonucleotide
  Sense strand starting at position 418 of SEQ ID NO: 318640
uuggcuuugaaagaauagu

SEQ ID NO: 578004 - RNA, 19 nt, Artificial Sequence
  Description of Artificial Sequence: Synthetic oligonucleotide
  Antisense strand to SEQ ID NO: 578003
acuauucuuucaaagccaa

SEQ ID NO: 578005 - RNA, 19 nt, Artificial Sequence
  Description of Artificial Sequence: Synthetic oligonucleotide
  Sense strand starting at position 529 of SEQ ID NO: 318640
uaaagaguugucuagcuua

SEQ ID NO: 578006 - RNA, 19 nt, Artificial Sequence
  Description of Artificial Sequence: Synthetic oligonucleotide
  Antisense strand to SEQ ID NO: 578005
uaagcuagacaacucuuua

SEQ ID NO: 578007 - RNA, 19 nt, Artificial Sequence
  Description of Artificial Sequence: Synthetic oligonucleotide
  Sense strand starting at position 556 of SEQ ID NO: 318640
ugaccuaauuaucucguua

SEQ ID NO: 578008 - RNA, 19 nt, Artificial Sequence
  Description of Artificial Sequence: Synthetic oligonucleotide
  Antisense strand to SEQ ID NO: 578007
uaacgagauaauuagguca

SEQ ID NO: 578009 - RNA, 19 nt, Artificial Sequence
  Description of Artificial Sequence: Synthetic oligonucleotide
  Sense strand starting at position 586 of SEQ ID NO: 318640
uccaaugaaugggauauuu

SEQ ID NO: 578010 - RNA, 19 nt, Artificial Sequence
  Description of Artificial Sequence: Synthetic oligonucleotide
  Antisense strand to SEQ ID NO: 578009
aaauaucccauucauugga

SEQ ID NO: 578011 - RNA, 19 nt, Artificial Sequence
  Description of Artificial Sequence: Synthetic oligonucleotide
  Sense strand starting at position 797 of SEQ ID NO: 318640
aggucaguuuagguaaaga

SEQ ID NO: 578012 - RNA, 19 nt, Artificial Sequence
  Description of Artificial Sequence: Synthetic oligonucleotide
  Antisense strand to SEQ ID NO: 578011
ucuuuaccuaaacugaccu

SEQ ID NO: 578013 - RNA, 19 nt, Artificial Sequence
  Description of Artificial Sequence: Synthetic oligonucleotide
  Sense strand starting at position 826 of SEQ ID NO: 318640
gcaaucuuacacugggaaa

SEQ ID NO: 578014 - RNA, 19 nt, Artificial Sequence
  Description of Artificial Sequence: Synthetic oligonucleotide
  Antisense strand to SEQ ID NO: 578013
uuucccaguguaagauugc

SEQ ID NO: 578015 - RNA, 19 nt, Artificial Sequence
  Description of Artificial Sequence: Synthetic oligonucleotide
  Sense strand starting at position 864 of SEQ ID NO: 318640
augauagaaucagaaggaa

SEQ ID NO: 578016 - RNA, 19 nt, Artificial Sequence
  Description of Artificial Sequence: Synthetic oligonucleotide
  Antisense strand to SEQ ID NO: 578015
uuccuucugauucuaucau

SEQ ID NO: 578017 - RNA, 19 nt, Artificial Sequence
  Description of Artificial Sequence: Synthetic oligonucleotide
  Sense strand starting at position 955 of SEQ ID NO: 318640
ugcaguuaagcugagacaa

SEQ ID NO: 578018 - RNA, 19 nt, Artificial Sequence
  Description of Artificial Sequence: Synthetic oligonucleotide
  Antisense strand to SEQ ID NO: 578017
uugucucagcuuaacugca

SEQ ID NO: 578019 - RNA, 19 nt, Artificial Sequence
  Description of Artificial Sequence: Synthetic oligonucleotide
  Sense strand starting at position 1007 of SEQ ID NO: 318640
uuauuaagucaguaacauc

SEQ ID NO: 578020 - RNA, 19 nt, Artificial Sequence
  Description of Artificial Sequence: Synthetic oligonucleotide
  Antisense strand to SEQ ID NO: 578019
gauguuacugacuuaauaa

SEQ ID NO: 578021 - RNA, 19 nt, Artificial Sequence
  Description of Artificial Sequence: Synthetic oligonucleotide
  Sense strand starting at position 1017 of SEQ ID NO: 318640
aguaacauccugcagugaa

SEQ ID NO: 578022 - RNA, 19 nt, Artificial Sequence
  Description of Artificial Sequence: Synthetic oligonucleotide
  Antisense strand to SEQ ID NO: 578021
uucacugcaggauguuacu

SEQ ID NO: 578023 - RNA, 19 nt, Artificial Sequence
  Description of Artificial Sequence: Synthetic oligonucleotide
  Sense strand starting at position 1024 of SEQ ID NO: 318640
uccugcagugaauaagaau

SEQ ID NO: 578024 - RNA, 19 nt, Artificial Sequence
  Description of Artificial Sequence: Synthetic oligonucleotide
  Antisense strand to SEQ ID NO: 578023
auucuuauucacugcagga

SEQ ID NO: 578025 - RNA, 19 nt, Artificial Sequence
  Description of Artificial Sequence: Synthetic oligonucleotide
  Sense strand starting at position 1044 of SEQ ID NO: 318640
ucauauugaguauacagua

SEQ ID NO: 578026 - RNA, 19 nt, Artificial Sequence
  Description of Artificial Sequence: Synthetic oligonucleotide
  Antisense strand to SEQ ID NO: 578025
uacuguauacucaauauga

SEQ ID NO: 578027 - RNA, 19 nt, Artificial Sequence
  Description of Artificial Sequence: Synthetic oligonucleotide
  Sense strand starting at position 1200 of SEQ ID NO: 318640
ugcgguuucggagacaaga

SEQ ID NO: 578028 - RNA, 19 nt, Artificial Sequence
  Description of Artificial Sequence: Synthetic oligonucleotide
  Antisense strand to SEQ ID NO: 578027
ucuugucuccgaaaccgca

SEQ ID NO: 578029 - RNA, 19 nt, Artificial Sequence
  Description of Artificial Sequence: Synthetic oligonucleotide
  Sense strand starting at position 1202 of SEQ ID NO: 318640
cgguuucggagacaagaaa

SEQ ID NO: 578030 - RNA, 19 nt, Artificial Sequence
  Description of Artificial Sequence: Synthetic oligonucleotide
  Antisense strand to SEQ ID NO: 578029
uuucuugucuccgaaaccg

SEQ ID NO: 578031 - RNA, 19 nt, Artificial Sequence
  Description of Artificial Sequence: Synthetic oligonucleotide
  Sense strand starting at position 1420 of SEQ ID NO: 318640
uccauaauaguguggaaau

SEQ ID NO: 578032 - RNA, 19 nt, Artificial Sequence
  Description of Artificial Sequence: Synthetic oligonucleotide
  Antisense strand to SEQ ID NO: 578031
auuuccacacuauuaugga

SEQ ID NO: 578033 - RNA, 19 nt, Artificial Sequence
  Description of Artificial Sequence: Synthetic oligonucleotide
  Sense strand starting at position 1671 of SEQ ID NO: 318640
uucugugcgaaaucgguuu

SEQ ID NO: 578034 - RNA, 19 nt, Artificial Sequence
  Description of Artificial Sequence: Synthetic oligonucleotide
  Antisense strand to SEQ ID NO: 578033
aaaccgauuucgcacagaa

SEQ ID NO: 578035 - RNA, 19 nt, Artificial Sequence
  Description of Artificial Sequence: Synthetic oligonucleotide
  Sense strand starting at position 2625 of SEQ ID NO: 318640
cgcucuacagaaugugaga

SEQ ID NO: 578036 - RNA, 19 nt, Artificial Sequence
  Description of Artificial Sequence: Synthetic oligonucleotide
  Antisense strand to SEQ ID NO: 578035
ucucacauucuguagagcg

SEQ ID NO: 578037 - RNA, 19 nt, Artificial Sequence
  Description of Artificial Sequence: Synthetic oligonucleotide
  Sense strand starting at position 2803 of SEQ ID NO: 318640
ccacuaaugaucugccgga

SEQ ID NO: 578038 - RNA, 19 nt, Artificial Sequence
  Description of Artificial Sequence: Synthetic oligonucleotide
  Antisense strand to SEQ ID NO: 578037
uccggcagaucauuagugg

SEQ ID NO: 578039 - RNA, 19 nt, Artificial Sequence
  Description of Artificial Sequence: Synthetic oligonucleotide
  Sense strand starting at position 2804 of SEQ ID NO: 318640
cacuaaugaucugccggaa

SEQ ID NO: 578040 - RNA, 19 nt, Artificial Sequence
  Description of Artificial Sequence: Synthetic oligonucleotide
  Antisense strand to SEQ ID NO: 578039
uuccggcagaucauuagug

SEQ ID NO: 578041 - RNA, 19 nt, Artificial Sequence
  Description of Artificial Sequence: Synthetic oligonucleotide
  Sense strand starting at position 2807 of SEQ ID NO: 318640
uaaugaucugccggaauua

SEQ ID NO: 578042 - RNA, 19 nt, Artificial Sequence
  Description of Artificial Sequence: Synthetic oligonucleotide
  Antisense strand to SEQ ID NO: 578041
uaauuccggcagaucauua

SEQ ID NO: 578043 - RNA, 19 nt, Artificial Sequence
  Description of Artificial Sequence: Synthetic oligonucleotide
  Sense strand starting at position 2808 of SEQ ID NO: 318640
aaugaucugccggaauuaa

SEQ ID NO: 578044 - RNA, 19 nt, Artificial Sequence
  Description of Artificial Sequence: Synthetic oligonucleotide
  Antisense strand to SEQ ID NO: 578043
uuaauuccggcagaucauu

SEQ ID NO: 578045 - RNA, 19 nt, Artificial Sequence
  Description of Artificial Sequence: Synthetic oligonucleotide
  Sense strand starting at position 2817 of SEQ ID NO: 318640
ccggaauuaaacugguaac

SEQ ID NO: 578046 - RNA, 19 nt, Artificial Sequence
  Description of Artificial Sequence: Synthetic oligonucleotide
  Antisense strand to SEQ ID NO: 578045
guuaccaguuuaauuccgg

SEQ ID NO: 578047 - RNA, 19 nt, Artificial Sequence
  Description of Artificial Sequence: Synthetic oligonucleotide
  Sense strand starting at position 2818 of SEQ ID NO: 318640
cggaauuaaacugguaacu

SEQ ID NO: 578048 - RNA, 19 nt, Artificial Sequence
  Description of Artificial Sequence: Synthetic oligonucleotide
  Antisense strand to SEQ ID NO: 578047
aguuaccaguuuaauuccg

SEQ ID NO: 578049 - RNA, 19 nt, Artificial Sequence
  Description of Artificial Sequence: Synthetic oligonucleotide
  Sense strand starting at position 2853 of SEQ ID NO: 318640
cgggaguuucgggaugagu

SEQ ID NO: 578050 - RNA, 19 nt, Artificial Sequence
  Description of Artificial Sequence: Synthetic oligonucleotide
  Antisense strand to SEQ ID NO: 578049
acucaucccgaaacucccg

SEQ ID NO: 578051 - RNA, 19 nt, Artificial Sequence
  Description of Artificial Sequence: Synthetic oligonucleotide
  Sense strand starting at position 2855 of SEQ ID NO: 318640
ggaguuucgggaugaguuu

SEQ ID NO: 578052 - RNA, 19 nt, Artificial Sequence
  Description of Artificial Sequence: Synthetic oligonucleotide
  Antisense strand to SEQ ID NO: 578051
aaacucaucccgaaacucc

SEQ ID NO: 578053 - RNA, 19 nt, Artificial Sequence
  Description of Artificial Sequence: Synthetic oligonucleotide
  Sense strand starting at position 2874 of SEQ ID NO: 318640
gccaaucccugugcuauuu

SEQ ID NO: 578054 - RNA, 19 nt, Artificial Sequence
  Description of Artificial Sequence: Synthetic oligonucleotide
  Antisense strand to SEQ ID NO: 578053
aaauagcacagggauuggc

SEQ ID NO: 578055 - RNA, 19 nt, Artificial Sequence
  Description of Artificial Sequence: Synthetic oligonucleotide
  Sense strand starting at position 2908 of SEQ ID NO: 318640
acacgugauacggauccaa

SEQ ID NO: 578056 - RNA, 19 nt, Artificial Sequence
  Description of Artificial Sequence: Synthetic oligonucleotide
  Antisense strand to SEQ ID NO: 578055
uuggauccguaucacgugu

SEQ ID NO: 578057 - RNA, 19 nt, Artificial Sequence
  Description of Artificial Sequence: Synthetic oligonucleotide
  Sense strand starting at position 3143 of SEQ ID NO: 318640
agagauuccuggucaugcu

SEQ ID NO: 578058 - RNA, 19 nt, Artificial Sequence
  Description of Artificial Sequence: Synthetic oligonucleotide
  Antisense strand to SEQ ID NO: 578057
agcaugaccaggaaucucu

SEQ ID NO: 578059 - RNA, 19 nt, Artificial Sequence
  Description of Artificial Sequence: Synthetic oligonucleotide
  Sense strand starting at position 3150 of SEQ ID NO: 318640
ccuggucaugcucacugaa

SEQ ID NO: 578060 - RNA, 19 nt, Artificial Sequence
  Description of Artificial Sequence: Synthetic oligonucleotide
  Antisense strand to SEQ ID NO: 578059
uucagugagcaugaccagg

SEQ ID NO: 578061 - RNA, 19 nt, Artificial Sequence
  Description of Artificial Sequence: Synthetic oligonucleotide
  Sense strand starting at position 3159 of SEQ ID NO: 318640
gcucacugaagguaaagua

SEQ ID NO: 578062 - RNA, 19 nt, Artificial Sequence
  Description of Artificial Sequence: Synthetic oligonucleotide
  Antisense strand to SEQ ID NO: 578061
uacuuuaccuucagugagc

SEQ ID NO: 578063 - RNA, 19 nt, Artificial Sequence
  Description of Artificial Sequence: Synthetic oligonucleotide
  Sense strand starting at position 3403 of SEQ ID NO: 318640
cugauuacugucgaaauga

SEQ ID NO: 578064 - RNA, 19 nt, Artificial Sequence
  Description of Artificial Sequence: Synthetic oligonucleotide
  Antisense strand to SEQ ID NO: 578063
ucauuucgacaguaaucag

SEQ ID NO: 578065 - RNA, 19 nt, Artificial Sequence
  Description of Artificial Sequence: Synthetic oligonucleotide
  Sense strand starting at position 3558 of SEQ ID NO: 318640
ggcugacagagguaaagua

SEQ ID NO: 578066 - RNA, 19 nt, Artificial Sequence
  Description of Artificial Sequence: Synthetic oligonucleotide
  Antisense strand to SEQ ID NO: 578065
uacuuuaccucugucagcc

SEQ ID NO: 578067 - RNA, 19 nt, Artificial Sequence
  Description of Artificial Sequence: Synthetic oligonucleotide
  Sense strand starting at position 3725 of SEQ ID NO: 318640
gcacguuuagauuauuaua

SEQ ID NO: 578068 - RNA, 19 nt, Artificial Sequence
  Description of Artificial Sequence: Synthetic oligonucleotide
  Antisense strand to SEQ ID NO: 578067
uauaauaaucuaaacgugc

SEQ ID NO: 578069 - RNA, 19 nt, Artificial Sequence
  Description of Artificial Sequence: Synthetic oligonucleotide
  Sense strand starting at position 3766 of SEQ ID NO: 318640
aggacauugcaguaaucua

SEQ ID NO: 578070 - RNA, 19 nt, Artificial Sequence
  Description of Artificial Sequence: Synthetic oligonucleotide
  Antisense strand to SEQ ID NO: 578069
uagauuacugcaauguccu

SEQ ID NO: 578071 - RNA, 19 nt, Artificial Sequence
  Description of Artificial Sequence: Synthetic oligonucleotide
  Sense strand starting at position 3878 of SEQ ID NO: 318640
ccaagaguggauuguacaa

SEQ ID NO: 578072 - RNA, 19 nt, Artificial Sequence
  Description of Artificial Sequence: Synthetic oligonucleotide
  Antisense strand to SEQ ID NO: 578071
uuguacaauccacucuugg

SEQ ID NO: 578073 - RNA, 19 nt, Artificial Sequence
  Description of Artificial Sequence: Synthetic oligonucleotide
  Sense strand starting at position 3902 of SEQ ID NO: 318640
ggcacuggcuuucuaagaa

SEQ ID NO: 578074 - RNA, 19 nt, Artificial Sequence
  Description of Artificial Sequence: Synthetic oligonucleotide
  Antisense strand to SEQ ID NO: 578073
uucuuagaaagccagugcc

SEQ ID NO: 578075 - RNA, 19 nt, Artificial Sequence
  Description of Artificial Sequence: Synthetic oligonucleotide
  Sense strand starting at position 3953 of SEQ ID NO: 318640
gacacaggccugugaacaa

SEQ ID NO: 578076 - RNA, 19 nt, Artificial Sequence
  Description of Artificial Sequence: Synthetic oligonucleotide
  Antisense strand to SEQ ID NO: 578075
uuguucacaggccuguguc

SEQ ID NO: 578077 - RNA, 19 nt, Artificial Sequence
  Description of Artificial Sequence: Synthetic oligonucleotide
  Sense strand starting at position 139 of SEQ ID NO: 318641
gaaccugagccaggauaau

SEQ ID NO: 578078 - RNA, 19 nt, Artificial Sequence
  Description of Artificial Sequence: Synthetic oligonucleotide
  Antisense strand to SEQ ID NO: 578077
auuauccuggcucagguuc

SEQ ID NO: 578079 - RNA, 19 nt, Artificial Sequence
  Description of Artificial Sequence: Synthetic oligonucleotide
  Sense strand starting at position 182 of SEQ ID NO: 318641
ugcaguagccgagauggua

SEQ ID NO: 578080 - RNA, 19 nt, Artificial Sequence
  Description of Artificial Sequence: Synthetic oligonucleotide
  Antisense strand to SEQ ID NO: 578079
uaccaucucggcuacugca

SEQ ID NO: 578081 - RNA, 19 nt, Artificial Sequence
  Description of Artificial Sequence: Synthetic oligonucleotide
  Sense strand starting at position 398 of SEQ ID NO: 318641
gugaguucuguguguuuag

SEQ ID NO: 578082 - RNA, 19 nt, Artificial Sequence
  Description of Artificial Sequence: Synthetic oligonucleotide
  Antisense strand to SEQ ID NO: 578081
cuaaacacacagaacucac

SEQ ID NO: 578083 - RNA, 19 nt, Artificial Sequence
  Description of Artificial Sequence: Synthetic oligonucleotide
  Sense strand starting at position 399 of SEQ ID NO: 318641
ugaguucuguguguuuaga

SEQ ID NO: 578084 - RNA, 19 nt, Artificial Sequence
  Description of Artificial Sequence: Synthetic oligonucleotide
  Antisense strand to SEQ ID NO: 578083
ucuaaacacacagaacuca

SEQ ID NO: 578085 - RNA, 19 nt, Artificial Sequence
  Description of Artificial Sequence: Synthetic oligonucleotide
  Sense strand starting at position 401 of SEQ ID NO: 318641
aguucuguguguuuagaaa

SEQ ID NO: 578086 - RNA, 19 nt, Artificial Sequence
  Description of Artificial Sequence: Synthetic oligonucleotide
  Antisense strand to SEQ ID NO: 578085
uuucuaaacacacagaacu

SEQ ID NO: 578087 - RNA, 19 nt, Artificial Sequence
  Description of Artificial Sequence: Synthetic oligonucleotide
  Sense strand starting at position 492 of SEQ ID NO: 318641
caggaucagccgcagauau

SEQ ID NO: 578088 - RNA, 19 nt, Artificial Sequence
  Description of Artificial Sequence: Synthetic oligonucleotide
  Antisense strand to SEQ ID NO: 578087
auaucugcggcugauccug

SEQ ID NO: 578089 - RNA, 19 nt, Artificial Sequence
  Description of Artificial Sequence: Synthetic oligonucleotide
  Sense strand starting at position 500 of SEQ ID NO: 318641
gccgcagauauccgaugua

SEQ ID NO: 578090 - RNA, 19 nt, Artificial Sequence
  Description of Artificial Sequence: Synthetic oligonucleotide
  Antisense strand to SEQ ID NO: 578089
uacaucggauaucugcggc

SEQ ID NO: 578091 - RNA, 19 nt, Artificial Sequence
  Description of Artificial Sequence: Synthetic oligonucleotide
  Sense strand starting at position 503 of SEQ ID NO: 318641
gcagauauccgauguaaua

SEQ ID NO: 578092 - RNA, 19 nt, Artificial Sequence
  Description of Artificial Sequence: Synthetic oligonucleotide
  Antisense strand to SEQ ID NO: 578091
uauuacaucggauaucugc

SEQ ID NO: 578093 - RNA, 19 nt, Artificial Sequence
  Description of Artificial Sequence: Synthetic oligonucleotide
  Sense strand starting at position 939 of SEQ ID NO: 318641
gggagggaguaguagaaau

SEQ ID NO: 578094 - RNA, 19 nt, Artificial Sequence
  Description of Artificial Sequence: Synthetic oligonucleotide
  Antisense strand to SEQ ID NO: 578093
auuucuacuacucccuccc

SEQ ID NO: 578095 - RNA, 19 nt, Artificial Sequence
  Description of Artificial Sequence: Synthetic oligonucleotide
  Sense strand starting at position 1517 of SEQ ID NO: 318641
cccagaggcugcucuuaga

SEQ ID NO: 578096 - RNA, 19 nt, Artificial Sequence
  Description of Artificial Sequence: Synthetic oligonucleotide
  Antisense strand to SEQ ID NO: 578095
ucuaagagcagccucuggg

SEQ ID NO: 578097 - RNA, 19 nt, Artificial Sequence
  Description of Artificial Sequence: Synthetic oligonucleotide
  Sense strand starting at position 1578 of SEQ ID NO: 318641
uccugucucagcgagguuu

SEQ ID NO: 578098 - RNA, 19 nt, Artificial Sequence
  Description of Artificial Sequence: Synthetic oligonucleotide
  Antisense strand to SEQ ID NO: 578097
aaaccucgcugagacagga

SEQ ID NO: 578099 - RNA, 19 nt, Artificial Sequence
  Description of Artificial Sequence: Synthetic oligonucleotide
  Sense strand starting at position 2007 of SEQ ID NO: 318641
augagauguuaacaacgau

SEQ ID NO: 578100 - RNA, 19 nt, Artificial Sequence
  Description of Artificial Sequence: Synthetic oligonucleotide
  Antisense strand to SEQ ID NO: 578099
aucguuguuaacaucucau

SEQ ID NO: 578101 - RNA, 19 nt, Artificial Sequence
  Description of Artificial Sequence: Synthetic oligonucleotide
  Sense strand starting at position 2020 of SEQ ID NO: 318641
aacgauugguuucuccaca

SEQ ID NO: 578102 - RNA, 19 nt, Artificial Sequence
  Description of Artificial Sequence: Synthetic oligonucleotide
  Antisense strand to SEQ ID NO: 578101
uguggagaaaccaaucguu

SEQ ID NO: 578103 - RNA, 19 nt, Artificial Sequence
  Description of Artificial Sequence: Synthetic oligonucleotide
  Sense strand starting at position 2021 of SEQ ID NO: 318641
acgauugguuucuccacaa

SEQ ID NO: 578104 - RNA, 19 nt, Artificial Sequence
  Description of Artificial Sequence: Synthetic oligonucleotide
  Antisense strand to SEQ ID NO: 578103
uuguggagaaaccaaucgu

SEQ ID NO: 578105 - RNA, 19 nt, Artificial Sequence
  Description of Artificial Sequence: Synthetic oligonucleotide
  Sense strand starting at position 2091 of SEQ ID NO: 318641
gaggguauuuccuguuccu

SEQ ID NO: 578106 - RNA, 19 nt, Artificial Sequence
  Description of Artificial Sequence: Synthetic oligonucleotide
  Antisense strand to SEQ ID NO: 578105
aggaacaggaaauacccuc

SEQ ID NO: 578107 - RNA, 19 nt, Artificial Sequence
  Description of Artificial Sequence: Synthetic oligonucleotide
  Sense strand starting at position 2121 of SEQ ID NO: 318641
guaggaaccuucccucaaa

SEQ ID NO: 578108 - RNA, 19 nt, Artificial Sequence
  Description of Artificial Sequence: Synthetic oligonucleotide
  Antisense strand to SEQ ID NO: 578107
uuugagggaagguuccuac

SEQ ID NO: 578109 - RNA, 19 nt, Artificial Sequence
  Description of Artificial Sequence: Synthetic oligonucleotide
  Sense strand starting at position 2184 of SEQ ID NO: 318641
ugagaaagccuccauucca

SEQ ID NO: 578110 - RNA, 19 nt, Artificial Sequence
  Description of Artificial Sequence: Synthetic oligonucleotide
  Antisense strand to SEQ ID NO: 578109
uggaauggaggcuuucuca

SEQ ID NO: 578111 - RNA, 19 nt, Artificial Sequence
  Description of Artificial Sequence: Synthetic oligonucleotide
  Sense strand starting at position 2222 of SEQ ID NO: 318641
aaccaaggguguuuagaaa

SEQ ID NO: 578112 - RNA, 19 nt, Artificial Sequence
  Description of Artificial Sequence: Synthetic oligonucleotide
  Antisense strand to SEQ ID NO: 578111
uuucuaaacacccuugguu

SEQ ID NO: 578113 - RNA, 19 nt, Artificial Sequence
  Description of Artificial Sequence: Synthetic oligonucleotide
  Sense strand starting at position 2454 of SEQ ID NO: 318641
aacaguuauuuccgguaac

SEQ ID NO: 578114 - RNA, 19 nt, Artificial Sequence
  Description of Artificial Sequence: Synthetic oligonucleotide
  Antisense strand to SEQ ID NO: 578113
guuaccggaaauaacuguu

SEQ ID NO: 578115 - RNA, 19 nt, Artificial Sequence
  Description of Artificial Sequence: Synthetic oligonucleotide
  Sense strand starting at position 2455 of SEQ ID NO: 318641
acaguuauuuccgguaaca

SEQ ID NO: 578116 - RNA, 19 nt, Artificial Sequence
  Description of Artificial Sequence: Synthetic oligonucleotide
  Antisense strand to SEQ ID NO: 578115
uguuaccggaaauaacugu

SEQ ID NO: 578117 - RNA, 19 nt, Artificial Sequence
  Description of Artificial Sequence: Synthetic oligonucleotide
  Sense strand starting at position 2531 of SEQ ID NO: 318641
uggcucuuugcaggaaaug

SEQ ID NO: 578118 - RNA, 19 nt, Artificial Sequence
  Description of Artificial Sequence: Synthetic oligonucleotide
  Antisense strand to SEQ ID NO: 578117
cauuuccugcaaagagcca

SEQ ID NO: 578119 - RNA, 19 nt, Artificial Sequence
  Description of Artificial Sequence: Synthetic oligonucleotide
  Sense strand starting at position 2580 of SEQ ID NO: 318641
gccgguuucugcccagaag

SEQ ID NO: 578120 - RNA, 19 nt, Artificial Sequence
  Description of Artificial Sequence: Synthetic oligonucleotide
  Antisense strand to SEQ ID NO: 578119
cuucugggcagaaaccggc

SEQ ID NO: 578121 - RNA, 19 nt, Artificial Sequence
  Description of Artificial Sequence: Synthetic oligonucleotide
  Sense strand starting at position 2612 of SEQ ID NO: 318641
ugauauuagguaggagcaa

SEQ ID NO: 578122 - RNA, 19 nt, Artificial Sequence
  Description of Artificial Sequence: Synthetic oligonucleotide
  Antisense strand to SEQ ID NO: 578121
uugcuccuaccuaauauca

SEQ ID NO: 578123 - RNA, 19 nt, Artificial Sequence
  Description of Artificial Sequence: Synthetic oligonucleotide
  Sense strand starting at position 2613 of SEQ ID NO: 318641
gauauuagguaggagcaaa

SEQ ID NO: 578124 - RNA, 19 nt, Artificial Sequence
  Description of Artificial Sequence: Synthetic oligonucleotide
  Antisense strand to SEQ ID NO: 578123
uuugcuccuaccuaauauc

SEQ ID NO: 578125 - RNA, 19 nt, Artificial Sequence
  Description of Artificial Sequence: Synthetic oligonucleotide
  Sense strand starting at position 2951 of SEQ ID NO: 318641
ugaucugaccuacauuguu

SEQ ID NO: 578126 - RNA, 19 nt, Artificial Sequence
  Description of Artificial Sequence: Synthetic oligonucleotide
  Antisense strand to SEQ ID NO: 578125
aacaauguaggucagauca

SEQ ID NO: 578127 - RNA, 19 nt, Artificial Sequence
  Description of Artificial Sequence: Synthetic oligonucleotide
  Sense strand starting at position 2964 of SEQ ID NO: 318641
auuguuugaguguagguua

SEQ ID NO: 578128 - RNA, 19 nt, Artificial Sequence
  Description of Artificial Sequence: Synthetic oligonucleotide
  Antisense strand to SEQ ID NO: 578127
uaaccuacacucaaacaau

SEQ ID NO: 578129 - RNA, 19 nt, Artificial Sequence
  Description of Artificial Sequence: Synthetic oligonucleotide
  Sense strand starting at position 2967 of SEQ ID NO: 318641
guuugaguguagguuauaa

SEQ ID NO: 578130 - RNA, 19 nt, Artificial Sequence
  Description of Artificial Sequence: Synthetic oligonucleotide
  Antisense strand to SEQ ID NO: 578129
uuauaaccuacacucaaac

SEQ ID NO: 578131 - RNA, 19 nt, Artificial Sequence
  Description of Artificial Sequence: Synthetic oligonucleotide
  Sense strand starting at position 3033 of SEQ ID NO: 318641
guguuuaccuuguuccaga

SEQ ID NO: 578132 - RNA, 19 nt, Artificial Sequence
  Description of Artificial Sequence: Synthetic oligonucleotide
  Antisense strand to SEQ ID NO: 578131
ucuggaacaagguaaacac

SEQ ID NO: 578133 - RNA, 19 nt, Artificial Sequence
  Description of Artificial Sequence: Synthetic oligonucleotide
  Sense strand starting at position 3059 of SEQ ID NO: 318641
ccaaguguugcauauauca

SEQ ID NO: 578134 - RNA, 19 nt, Artificial Sequence
  Description of Artificial Sequence: Synthetic oligonucleotide
  Antisense strand to SEQ ID NO: 578133
ugauauaugcaacacuugg

SEQ ID NO: 578135 - RNA, 19 nt, Artificial Sequence
  Description of Artificial Sequence: Synthetic oligonucleotide
  Sense strand starting at position 3106 of SEQ ID NO: 318641
cccugucagguagguauaa

SEQ ID NO: 578136 - RNA, 19 nt, Artificial Sequence
  Description of Artificial Sequence: Synthetic oligonucleotide
  Antisense strand to SEQ ID NO: 578135
uuauaccuaccugacaggg

SEQ ID NO: 578137 - RNA, 19 nt, Artificial Sequence
  Description of Artificial Sequence: Synthetic oligonucleotide
  Sense strand starting at position 3107 of SEQ ID NO: 318641
ccugucagguagguauaau

SEQ ID NO: 578138 - RNA, 19 nt, Artificial Sequence
  Description of Artificial Sequence: Synthetic oligonucleotide
  Antisense strand to SEQ ID NO: 578137
auuauaccuaccugacagg

SEQ ID NO: 578139 - RNA, 19 nt, Artificial Sequence
  Description of Artificial Sequence: Synthetic oligonucleotide
  Sense strand starting at position 3108 of SEQ ID NO: 318641
cugucagguagguauaauu

SEQ ID NO: 578140 - RNA, 19 nt, Artificial Sequence
  Description of Artificial Sequence: Synthetic oligonucleotide
  Antisense strand to SEQ ID NO: 578139
aauuauaccuaccugacag

SEQ ID NO: 578141 - RNA, 19 nt, Artificial Sequence
  Description of Artificial Sequence: Synthetic oligonucleotide
  Sense strand starting at position 3157 of SEQ ID NO: 318641
ggcucagggaggugaaaua

SEQ ID NO: 578142 - RNA, 19 nt, Artificial Sequence
  Description of Artificial Sequence: Synthetic oligonucleotide
  Antisense strand to SEQ ID NO: 578141
uauuucaccucccugagcc

SEQ ID NO: 578143 - RNA, 19 nt, Artificial Sequence
  Description of Artificial Sequence: Synthetic oligonucleotide
  Sense strand starting at position 3166 of SEQ ID NO: 318641
aggugaaauaacugguuua

SEQ ID NO: 578144 - RNA, 19 nt, Artificial Sequence
  Description of Artificial Sequence: Synthetic oligonucleotide
  Antisense strand to SEQ ID NO: 578143
uaaaccaguuauuucaccu

SEQ ID NO: 578145 - RNA, 19 nt, Artificial Sequence
  Description of Artificial Sequence: Synthetic oligonucleotide
  Sense strand starting at position 3167 of SEQ ID NO: 318641
ggugaaauaacugguuuaa

SEQ ID NO: 578146 - RNA, 19 nt, Artificial Sequence
  Description of Artificial Sequence: Synthetic oligonucleotide
  Antisense strand to SEQ ID NO: 578145
uuaaaccaguuauuucacc

SEQ ID NO: 578147 - RNA, 19 nt, Artificial Sequence
  Description of Artificial Sequence: Synthetic oligonucleotide
  Sense strand starting at position 3169 of SEQ ID NO: 318641
ugaaauaacugguuuaagu

SEQ ID NO: 578148 - RNA, 19 nt, Artificial Sequence
  Description of Artificial Sequence: Synthetic oligonucleotide
  Antisense strand to SEQ ID NO: 578147
acuuaaaccaguuauuuca

SEQ ID NO: 578149 - RNA, 19 nt, Artificial Sequence
  Description of Artificial Sequence: Synthetic oligonucleotide
  Sense strand starting at position 3178 of SEQ ID NO: 318641
ugguuuaaguaauugagag

SEQ ID NO: 578150 - RNA, 19 nt, Artificial Sequence
  Description of Artificial Sequence: Synthetic oligonucleotide
  Antisense strand to SEQ ID NO: 578149
cucucaauuacuuaaacca

SEQ ID NO: 578151 - RNA, 19 nt, Artificial Sequence
  Description of Artificial Sequence: Synthetic oligonucleotide
  Sense strand starting at position 3179 of SEQ ID NO: 318641
gguuuaaguaauugagagu

SEQ ID NO: 578152 - RNA, 19 nt, Artificial Sequence
  Description of Artificial Sequence: Synthetic oligonucleotide
  Antisense strand to SEQ ID NO: 578151
acucucaauuacuuaaacc

SEQ ID NO: 578153 - RNA, 19 nt, Artificial Sequence
  Description of Artificial Sequence: Synthetic oligonucleotide
  Sense strand starting at position 3180 of SEQ ID NO: 318641
guuuaaguaauugagagug

SEQ ID NO: 578154 - RNA, 19 nt, Artificial Sequence
  Description of Artificial Sequence: Synthetic oligonucleotide
  Antisense strand to SEQ ID NO: 578153
cacucucaauuacuuaaac

SEQ ID NO: 578155 - RNA, 19 nt, Artificial Sequence
  Description of Artificial Sequence: Synthetic oligonucleotide
  Sense strand starting at position 3565 of SEQ ID NO: 318641
ccuuguaauccucgcacuu

SEQ ID NO: 578156 - RNA, 19 nt, Artificial Sequence
  Description of Artificial Sequence: Synthetic oligonucleotide
  Antisense strand to SEQ ID NO: 578155
aagugcgaggauuacaagg

SEQ ID NO: 578157 - RNA, 19 nt, Artificial Sequence
  Description of Artificial Sequence: Synthetic oligonucleotide
  Sense strand starting at position 4 of SEQ ID NO: 318642
caggaucagccgcagauau

SEQ ID NO: 578158 - RNA, 19 nt, Artificial Sequence
  Description of Artificial Sequence: Synthetic oligonucleotide
  Antisense strand to SEQ ID NO: 578157
auaucugcggcugauccug

SEQ ID NO: 578159 - RNA, 19 nt, Artificial Sequence
  Description of Artificial Sequence: Synthetic oligonucleotide
  Sense strand starting at position 15 of SEQ ID NO: 318642
gcagauauccgauguaaua

SEQ ID NO: 578160 - RNA, 19 nt, Artificial Sequence
  Description of Artificial Sequence: Synthetic oligonucleotide
  Antisense strand to SEQ ID NO: 578159
uauuacaucggauaucugc

SEQ ID NO: 578161 - RNA, 19 nt, Artificial Sequence
  Description of Artificial Sequence: Synthetic oligonucleotide
  Sense strand starting at position 451 of SEQ ID NO: 318642
gggagggaguaguagaaau

SEQ ID NO: 578162 - RNA, 19 nt, Artificial Sequence
  Description of Artificial Sequence: Synthetic oligonucleotide
  Antisense strand to SEQ ID NO: 578161
auuucuacuacucccuccc

SEQ ID NO: 578163 - RNA, 19 nt, Artificial Sequence
  Description of Artificial Sequence: Synthetic oligonucleotide
  Sense strand starting at position 1029 of SEQ ID NO: 318642
cccagaggcugcucuuaga

SEQ ID NO: 578164 - RNA, 19 nt, Artificial Sequence
  Description of Artificial Sequence: Synthetic oligonucleotide
  Antisense strand to SEQ ID NO: 578163
ucuaagagcagccucuggg

SEQ ID NO: 578165 - RNA, 19 nt, Artificial Sequence
  Description of Artificial Sequence: Synthetic oligonucleotide
  Sense strand starting at position 1090 of SEQ ID NO: 318642
uccugucucagcgagguuu

SEQ ID NO: 578166 - RNA, 19 nt, Artificial Sequence
  Description of Artificial Sequence: Synthetic oligonucleotide
  Antisense strand to SEQ ID NO: 578165
aaaccucgcugagacagga

SEQ ID NO: 578167 - RNA, 19 nt, Artificial Sequence
  Description of Artificial Sequence: Synthetic oligonucleotide
  Sense strand starting at position 1519 of SEQ ID NO: 318642
augagauguuaacaacgau

SEQ ID NO: 578168 - RNA, 19 nt, Artificial Sequence
  Description of Artificial Sequence: Synthetic oligonucleotide
  Antisense strand to SEQ ID NO: 578167
aucguuguuaacaucucau

SEQ ID NO: 578169 - RNA, 19 nt, Artificial Sequence
  Description of Artificial Sequence: Synthetic oligonucleotide
  Sense strand starting at position 1532 of SEQ ID NO: 318642
aacgauugguuucuccaca

SEQ ID NO: 578170 - RNA, 19 nt, Artificial Sequence
  Description of Artificial Sequence: Synthetic oligonucleotide
  Antisense strand to SEQ ID NO: 578169
uguggagaaaccaaucguu

SEQ ID NO: 578171 - RNA, 19 nt, Artificial Sequence
  Description of Artificial Sequence: Synthetic oligonucleotide
  Sense strand starting at position 1533 of SEQ ID NO: 318642
acgauugguuucuccacaa

SEQ ID NO: 578172 - RNA, 19 nt, Artificial Sequence
  Description of Artificial Sequence: Synthetic oligonucleotide
  Antisense strand to SEQ ID NO: 578171
uuguggagaaaccaaucgu

SEQ ID NO: 578173 - RNA, 19 nt, Artificial Sequence
  Description of Artificial Sequence: Synthetic oligonucleotide
  Sense strand starting at position 1633 of SEQ ID NO: 318642
guaggaaccuucccucaaa

SEQ ID NO: 578174 - RNA, 19 nt, Artificial Sequence
  Description of Artificial Sequence: Synthetic oligonucleotide
  Antisense strand to SEQ ID NO: 578173
uuugagggaagguuccuac

SEQ ID NO: 578175 - RNA, 19 nt, Artificial Sequence
  Description of Artificial Sequence: Synthetic oligonucleotide
  Sense strand starting at position 1696 of SEQ ID NO: 318642
ugagaaagccuccauucca

SEQ ID NO: 578176 - RNA, 19 nt, Artificial Sequence
  Description of Artificial Sequence: Synthetic oligonucleotide
  Antisense strand to SEQ ID NO: 578175
uggaauggaggcuuucuca

SEQ ID NO: 578177 - RNA, 19 nt, Artificial Sequence
  Description of Artificial Sequence: Synthetic oligonucleotide
  Sense strand starting at position 1734 of SEQ ID NO: 318642
aaccaaggguguuuagaaa

SEQ ID NO: 578178 - RNA, 19 nt, Artificial Sequence
  Description of Artificial Sequence: Synthetic oligonucleotide
  Antisense strand to SEQ ID NO: 578177
uuucuaaacacccuugguu

SEQ ID NO: 578179 - RNA, 19 nt, Artificial Sequence
  Description of Artificial Sequence: Synthetic oligonucleotide
  Sense strand starting at position 1966 of SEQ ID NO: 318642
aacaguuauuuccgguaac

SEQ ID NO: 578180 - RNA, 19 nt, Artificial Sequence
  Description of Artificial Sequence: Synthetic oligonucleotide
  Antisense strand to SEQ ID NO: 578179
guuaccggaaauaacuguu

SEQ ID NO: 578181 - RNA, 19 nt, Artificial Sequence
  Description of Artificial Sequence: Synthetic oligonucleotide
  Sense strand starting at position 2043 of SEQ ID NO: 318642
uggcucuuugcaggaaaug

SEQ ID NO: 578182 - RNA, 19 nt, Artificial Sequence
  Description of Artificial Sequence: Synthetic oligonucleotide
  Antisense strand to SEQ ID NO: 578181
cauuuccugcaaagagcca

SEQ ID NO: 578183 - RNA, 19 nt, Artificial Sequence
  Description of Artificial Sequence: Synthetic oligonucleotide
  Sense strand starting at position 2092 of SEQ ID NO: 318642
gccgguuucugcccagaag

SEQ ID NO: 578184 - RNA, 19 nt, Artificial Sequence
  Description of Artificial Sequence: Synthetic oligonucleotide
  Antisense strand to SEQ ID NO: 578183
cuucugggcagaaaccggc

SEQ ID NO: 578185 - RNA, 19 nt, Artificial Sequence
  Description of Artificial Sequence: Synthetic oligonucleotide
  Sense strand starting at position 2124 of SEQ ID NO: 318642
ugauauuagguaggagcaa

SEQ ID NO: 578186 - RNA, 19 nt, Artificial Sequence
  Description of Artificial Sequence: Synthetic oligonucleotide
  Antisense strand to SEQ ID NO: 578185
uugcuccuaccuaauauca

SEQ ID NO: 578187 - RNA, 19 nt, Artificial Sequence
  Description of Artificial Sequence: Synthetic oligonucleotide
  Sense strand starting at position 2125 of SEQ ID NO: 318642
gauauuagguaggagcaaa

SEQ ID NO: 578188 - RNA, 19 nt, Artificial Sequence
  Description of Artificial Sequence: Synthetic oligonucleotide
  Antisense strand to SEQ ID NO: 578187
uuugcuccuaccuaauauc

SEQ ID NO: 578189 - RNA, 19 nt, Artificial Sequence
  Description of Artificial Sequence: Synthetic oligonucleotide
  Sense strand starting at position 2463 of SEQ ID NO: 318642
ugaucugaccuacauuguu

SEQ ID NO: 578190 - RNA, 19 nt, Artificial Sequence
  Description of Artificial Sequence: Synthetic oligonucleotide
  Antisense strand to SEQ ID NO: 578189
aacaauguaggucagauca

SEQ ID NO: 578191 - RNA, 19 nt, Artificial Sequence
  Description of Artificial Sequence: Synthetic oligonucleotide
  Sense strand starting at position 2468 of SEQ ID NO: 318642
ugaccuacauuguuugagu

SEQ ID NO: 578192 - RNA, 19 nt, Artificial Sequence
  Description of Artificial Sequence: Synthetic oligonucleotide
  Antisense strand to SEQ ID NO: 578191
acucaaacaauguagguca

SEQ ID NO: 578193 - RNA, 19 nt, Artificial Sequence
  Description of Artificial Sequence: Synthetic oligonucleotide
  Sense strand starting at position 2476 of SEQ ID NO: 318642
auuguuugaguguagguua

SEQ ID NO: 578194 - RNA, 19 nt, Artificial Sequence
  Description of Artificial Sequence: Synthetic oligonucleotide
  Antisense strand to SEQ ID NO: 578193
uaaccuacacucaaacaau

SEQ ID NO: 578195 - RNA, 19 nt, Artificial Sequence
  Description of Artificial Sequence: Synthetic oligonucleotide
  Sense strand starting at position 2479 of SEQ ID NO: 318642
guuugaguguagguuauaa

SEQ ID NO: 578196 - RNA, 19 nt, Artificial Sequence
  Description of Artificial Sequence: Synthetic oligonucleotide
  Antisense strand to SEQ ID NO: 578195
uuauaaccuacacucaaac

SEQ ID NO: 578197 - RNA, 19 nt, Artificial Sequence
  Description of Artificial Sequence: Synthetic oligonucleotide
  Sense strand starting at position 2545 of SEQ ID NO: 318642
guguuuaccuuguuccaga

SEQ ID NO: 578198 - RNA, 19 nt, Artificial Sequence
  Description of Artificial Sequence: Synthetic oligonucleotide
  Antisense strand to SEQ ID NO: 578197
ucuggaacaagguaaacac

SEQ ID NO: 578199 - RNA, 19 nt, Artificial Sequence
  Description of Artificial Sequence: Synthetic oligonucleotide
  Sense strand starting at position 2571 of SEQ ID NO: 318642
ccaaguguugcauauauca

SEQ ID NO: 578200 - RNA, 19 nt, Artificial Sequence
  Description of Artificial Sequence: Synthetic oligonucleotide
  Antisense strand to SEQ ID NO: 578199
ugauauaugcaacacuugg

SEQ ID NO: 578201 - RNA, 19 nt, Artificial Sequence
  Description of Artificial Sequence: Synthetic oligonucleotide
  Sense strand starting at position 2618 of SEQ ID NO: 318642
cccugucagguagguauaa

SEQ ID NO: 578202 - RNA, 19 nt, Artificial Sequence
  Description of Artificial Sequence: Synthetic oligonucleotide
  Antisense strand to SEQ ID NO: 578201
uuauaccuaccugacaggg

SEQ ID NO: 578203 - RNA, 19 nt, Artificial Sequence
  Description of Artificial Sequence: Synthetic oligonucleotide
  Sense strand starting at position 2619 of SEQ ID NO: 318642
ccugucagguagguauaau

SEQ ID NO: 578204 - RNA, 19 nt, Artificial Sequence
  Description of Artificial Sequence: Synthetic oligonucleotide
  Antisense strand to SEQ ID NO: 578203
auuauaccuaccugacagg

SEQ ID NO: 578205 - RNA, 19 nt, Artificial Sequence
  Description of Artificial Sequence: Synthetic oligonucleotide
  Sense strand starting at position 2620 of SEQ ID NO: 318642
cugucagguagguauaauu

SEQ ID NO: 578206 - RNA, 19 nt, Artificial Sequence
  Description of Artificial Sequence: Synthetic oligonucleotide
  Antisense strand to SEQ ID NO: 578205
aauuauaccuaccugacag

SEQ ID NO: 578207 - RNA, 19 nt, Artificial Sequence
  Description of Artificial Sequence: Synthetic oligonucleotide
  Sense strand starting at position 2669 of SEQ ID NO: 318642
ggcucagggaggugaaaua

SEQ ID NO: 578208 - RNA, 19 nt, Artificial Sequence
  Description of Artificial Sequence: Synthetic oligonucleotide
  Antisense strand to SEQ ID NO: 578207
uauuucaccucccugagcc

SEQ ID NO: 578209 - RNA, 19 nt, Artificial Sequence
  Description of Artificial Sequence: Synthetic oligonucleotide
  Sense strand starting at position 2678 of SEQ ID NO: 318642
aggugaaauaacugguuua

SEQ ID NO: 578210 - RNA, 19 nt, Artificial Sequence
  Description of Artificial Sequence: Synthetic oligonucleotide
  Antisense strand to SEQ ID NO: 578209
uaaaccaguuauuucaccu

SEQ ID NO: 578211 - RNA, 19 nt, Artificial Sequence
  Description of Artificial Sequence: Synthetic oligonucleotide
  Sense strand starting at position 2679 of SEQ ID NO: 318642
ggugaaauaacugguuuaa

SEQ ID NO: 578212 - RNA, 19 nt, Artificial Sequence
  Description of Artificial Sequence: Synthetic oligonucleotide
  Antisense strand to SEQ ID NO: 578211
uuaaaccaguuauuucacc

SEQ ID NO: 578213 - RNA, 19 nt, Artificial Sequence
  Description of Artificial Sequence: Synthetic oligonucleotide
  Sense strand starting at position 2681 of SEQ ID NO: 318642
ugaaauaacugguuuaagu

SEQ ID NO: 578214 - RNA, 19 nt, Artificial Sequence
  Description of Artificial Sequence: Synthetic oligonucleotide
  Antisense strand to SEQ ID NO: 578213
acuuaaaccaguuauuuca

SEQ ID NO: 578215 - RNA, 19 nt, Artificial Sequence
  Description of Artificial Sequence: Synthetic oligonucleotide
  Sense strand starting at position 2690 of SEQ ID NO: 318642
ugguuuaaguaauugagag

SEQ ID NO: 578216 - RNA, 19 nt, Artificial Sequence
  Description of Artificial Sequence: Synthetic oligonucleotide
  Antisense strand to SEQ ID NO: 578215
cucucaauuacuuaaacca

SEQ ID NO: 578217 - RNA, 19 nt, Artificial Sequence
  Description of Artificial Sequence: Synthetic oligonucleotide
  Sense strand starting at position 2691 of SEQ ID NO: 318642
gguuuaaguaauugagagu

SEQ ID NO: 578218 - RNA, 19 nt, Artificial Sequence
  Description of Artificial Sequence: Synthetic oligonucleotide
  Antisense strand to SEQ ID NO: 578217
acucucaauuacuuaaacc

SEQ ID NO: 578219 - RNA, 19 nt, Artificial Sequence
  Description of Artificial Sequence: Synthetic oligonucleotide
  Sense strand starting at position 2692 of SEQ ID NO: 318642
guuuaaguaauugagagug

SEQ ID NO: 578220 - RNA, 19 nt, Artificial Sequence
  Description of Artificial Sequence: Synthetic oligonucleotide
  Antisense strand to SEQ ID NO: 578219
cacucucaauuacuuaaac

SEQ ID NO: 578221 - RNA, 19 nt, Artificial Sequence
  Description of Artificial Sequence: Synthetic oligonucleotide
  Sense strand starting at position 3077 of SEQ ID NO: 318642
ccuuguaauccucgcacuu

SEQ ID NO: 578222 - RNA, 19 nt, Artificial Sequence
  Description of Artificial Sequence: Synthetic oligonucleotide
  Antisense strand to SEQ ID NO: 578221
aagugcgaggauuacaagg

SEQ ID NO: 578223 - RNA, 19 nt, Artificial Sequence
  Description of Artificial Sequence: Synthetic oligonucleotide
  Sense strand starting at position 3722 of SEQ ID NO: 318642
aggucugaccuacauuguu

SEQ ID NO: 578224 - RNA, 19 nt, Artificial Sequence
  Description of Artificial Sequence: Synthetic oligonucleotide
  Antisense strand to SEQ ID NO: 578223
aacaauguaggucagaccu

SEQ ID NO: 578225 - RNA, 19 nt, Artificial Sequence
  Description of Artificial Sequence: Synthetic oligonucleotide
  Sense strand starting at position 3732 of SEQ ID NO: 318642
uacauuguuugaguguaga

SEQ ID NO: 578226 - RNA, 19 nt, Artificial Sequence
  Description of Artificial Sequence: Synthetic oligonucleotide
  Antisense strand to SEQ ID NO: 578225
ucuacacucaaacaaugua

SEQ ID NO: 578227 - RNA, 19 nt, Artificial Sequence
  Description of Artificial Sequence: Synthetic oligonucleotide
  Sense strand starting at position 3735 of SEQ ID NO: 318642
auuguuugaguguagauua

SEQ ID NO: 578228 - RNA, 19 nt, Artificial Sequence
  Description of Artificial Sequence: Synthetic oligonucleotide
  Antisense strand to SEQ ID NO: 578227
uaaucuacacucaaacaau

SEQ ID NO: 578229 - RNA, 19 nt, Artificial Sequence
  Description of Artificial Sequence: Synthetic oligonucleotide
  Sense strand starting at position 3866 of SEQ ID NO: 318642
uucuauuagcauuagagca

SEQ ID NO: 578230 - RNA, 19 nt, Artificial Sequence
  Description of Artificial Sequence: Synthetic oligonucleotide
  Antisense strand to SEQ ID NO: 578229
ugcucuaaugcuaauagaa

SEQ ID NO: 578231 - RNA, 19 nt, Artificial Sequence
  Description of Artificial Sequence: Synthetic oligonucleotide
  Sense strand starting at position 3915 of SEQ ID NO: 318642
ggguguccauacuuuaaug

SEQ ID NO: 578232 - RNA, 19 nt, Artificial Sequence
  Description of Artificial Sequence: Synthetic oligonucleotide
  Antisense strand to SEQ ID NO: 578231
cauuaaaguauggacaccc

SEQ ID NO: 578233 - RNA, 19 nt, Artificial Sequence
  Description of Artificial Sequence: Synthetic oligonucleotide
  Sense strand starting at position 3917 of SEQ ID NO: 318642
guguccauacuuuaaugaa

SEQ ID NO: 578234 - RNA, 19 nt, Artificial Sequence
  Description of Artificial Sequence: Synthetic oligonucleotide
  Antisense strand to SEQ ID NO: 578233
uucauuaaaguauggacac

SEQ ID NO: 578235 - RNA, 19 nt, Artificial Sequence
  Description of Artificial Sequence: Synthetic oligonucleotide
  Sense strand starting at position 3983 of SEQ ID NO: 318642
ucugaaggccucugugaca

SEQ ID NO: 578236 - RNA, 19 nt, Artificial Sequence
  Description of Artificial Sequence: Synthetic oligonucleotide
  Antisense strand to SEQ ID NO: 578235
ugucacagaggccuucaga

SEQ ID NO: 578237 - RNA, 19 nt, Artificial Sequence
  Description of Artificial Sequence: Synthetic oligonucleotide
  Sense strand starting at position 1 of SEQ ID NO: 318643
uaaagucugugagucaguu

SEQ ID NO: 578238 - RNA, 19 nt, Artificial Sequence
  Description of Artificial Sequence: Synthetic oligonucleotide
  Antisense strand to SEQ ID NO: 578237
aacugacucacagacuuua

SEQ ID NO: 578239 - RNA, 19 nt, Artificial Sequence
  Description of Artificial Sequence: Synthetic oligonucleotide
  Sense strand starting at position 13 of SEQ ID NO: 318643
gucaguuccaguuguuuau

SEQ ID NO: 578240 - RNA, 19 nt, Artificial Sequence
  Description of Artificial Sequence: Synthetic oligonucleotide
  Antisense strand to SEQ ID NO: 578239
auaaacaacuggaacugac

SEQ ID NO: 578241 - RNA, 19 nt, Artificial Sequence
  Description of Artificial Sequence: Synthetic oligonucleotide
  Sense strand starting at position 15 of SEQ ID NO: 318643
caguuccaguuguuuauua

SEQ ID NO: 578242 - RNA, 19 nt, Artificial Sequence
  Description of Artificial Sequence: Synthetic oligonucleotide
  Antisense strand to SEQ ID NO: 578241
uaauaaacaacuggaacug

SEQ ID NO: 578243 - RNA, 19 nt, Artificial Sequence
  Description of Artificial Sequence: Synthetic oligonucleotide
  Sense strand starting at position 17 of SEQ ID NO: 318643
guuccaguuguuuauuaca

SEQ ID NO: 578244 - RNA, 19 nt, Artificial Sequence
  Description of Artificial Sequence: Synthetic oligonucleotide
  Antisense strand to SEQ ID NO: 578243
uguaauaaacaacuggaac

SEQ ID NO: 578245 - RNA, 19 nt, Artificial Sequence
  Description of Artificial Sequence: Synthetic oligonucleotide
  Sense strand starting at position 19 of SEQ ID NO: 318643
uccaguuguuuauuacaca

SEQ ID NO: 578246 - RNA, 19 nt, Artificial Sequence
  Description of Artificial Sequence: Synthetic oligonucleotide
  Antisense strand to SEQ ID NO: 578245
uguguaauaaacaacugga

SEQ ID NO: 578247 - RNA, 19 nt, Artificial Sequence
  Description of Artificial Sequence: Synthetic oligonucleotide
  Sense strand starting at position 1127 of SEQ ID NO: 318643
caggauugggccugaaaug

SEQ ID NO: 578248 - RNA, 19 nt, Artificial Sequence
  Description of Artificial Sequence: Synthetic oligonucleotide
  Antisense strand to SEQ ID NO: 578247
cauuucaggcccaauccug

SEQ ID NO: 578249 - RNA, 19 nt, Artificial Sequence
  Description of Artificial Sequence: Synthetic oligonucleotide
  Sense strand starting at position 1128 of SEQ ID NO: 318643
aggauugggccugaaaugu

SEQ ID NO: 578250 - RNA, 19 nt, Artificial Sequence
  Description of Artificial Sequence: Synthetic oligonucleotide
  Antisense strand to SEQ ID NO: 578249
acauuucaggcccaauccu

SEQ ID NO: 578251 - RNA, 19 nt, Artificial Sequence
  Description of Artificial Sequence: Synthetic oligonucleotide
  Sense strand starting at position 1161 of SEQ ID NO: 318643
gguacauuaugguccaaag

SEQ ID NO: 578252 - RNA, 19 nt, Artificial Sequence
  Description of Artificial Sequence: Synthetic oligonucleotide
  Antisense strand to SEQ ID NO: 578251
cuuuggaccauaauguacc

SEQ ID NO: 578253 - RNA, 19 nt, Artificial Sequence
  Description of Artificial Sequence: Synthetic oligonucleotide
  Sense strand starting at position 1270 of SEQ ID NO: 318643
cacagaucaugacggagau

SEQ ID NO: 578254 - RNA, 19 nt, Artificial Sequence
  Description of Artificial Sequence: Synthetic oligonucleotide
  Antisense strand to SEQ ID NO: 578253
aucuccgucaugaucugug

SEQ ID NO: 578255 - RNA, 19 nt, Artificial Sequence
  Description of Artificial Sequence: Synthetic oligonucleotide
  Sense strand starting at position 1283 of SEQ ID NO: 318643
ggagauggcuagaaggagu

SEQ ID NO: 578256 - RNA, 19 nt, Artificial Sequence
  Description of Artificial Sequence: Synthetic oligonucleotide
  Antisense strand to SEQ ID NO: 578255
acuccuucuagccaucucc

SEQ ID NO: 578257 - RNA, 19 nt, Artificial Sequence
  Description of Artificial Sequence: Synthetic oligonucleotide
  Sense strand starting at position 1319 of SEQ ID NO: 318643
acgccauaccugugauuuc

SEQ ID NO: 578258 - RNA, 19 nt, Artificial Sequence
  Description of Artificial Sequence: Synthetic oligonucleotide
  Antisense strand to SEQ ID NO: 578257
gaaaucacagguauggcgu

SEQ ID NO: 578259 - RNA, 19 nt, Artificial Sequence
  Description of Artificial Sequence: Synthetic oligonucleotide
  Sense strand starting at position 1989 of SEQ ID NO: 318643
agaggauugugagaaccaa

SEQ ID NO: 578260 - RNA, 19 nt, Artificial Sequence
  Description of Artificial Sequence: Synthetic oligonucleotide
  Antisense strand to SEQ ID NO: 578259
uugguucucacaauccucu

SEQ ID NO: 578261 - RNA, 19 nt, Artificial Sequence
  Description of Artificial Sequence: Synthetic oligonucleotide
  Sense strand starting at position 2017 of SEQ ID NO: 318643
gguccaaauuaguuauaga

SEQ ID NO: 578262 - RNA, 19 nt, Artificial Sequence
  Description of Artificial Sequence: Synthetic oligonucleotide
  Antisense strand to SEQ ID NO: 578261
ucuauaacuaauuuggacc

SEQ ID NO: 578263 - RNA, 19 nt, Artificial Sequence
  Description of Artificial Sequence: Synthetic oligonucleotide
  Sense strand starting at position 2020 of SEQ ID NO: 318643
ccaaauuaguuauagaaga

SEQ ID NO: 578264 - RNA, 19 nt, Artificial Sequence
  Description of Artificial Sequence: Synthetic oligonucleotide
  Antisense strand to SEQ ID NO: 578263
ucuucuauaacuaauuugg

SEQ ID NO: 578265 - RNA, 19 nt, Artificial Sequence
  Description of Artificial Sequence: Synthetic oligonucleotide
  Sense strand starting at position 2049 of SEQ ID NO: 318643
ugugcuuaacaggguguaa

SEQ ID NO: 578266 - RNA, 19 nt, Artificial Sequence
  Description of Artificial Sequence: Synthetic oligonucleotide
  Antisense strand to SEQ ID NO: 578265
uuacacccuguuaagcaca

SEQ ID NO: 578267 - RNA, 19 nt, Artificial Sequence
  Description of Artificial Sequence: Synthetic oligonucleotide
  Sense strand starting at position 2081 of SEQ ID NO: 318643
ggaccuuguuuagaagaau

SEQ ID NO: 578268 - RNA, 19 nt, Artificial Sequence
  Description of Artificial Sequence: Synthetic oligonucleotide
  Antisense strand to SEQ ID NO: 578267
auucuucuaaacaaggucc

SEQ ID NO: 578269 - RNA, 19 nt, Artificial Sequence
  Description of Artificial Sequence: Synthetic oligonucleotide
  Sense strand starting at position 2096 of SEQ ID NO: 318643
gaauaaaggucugagaaau

SEQ ID NO: 578270 - RNA, 19 nt, Artificial Sequence
  Description of Artificial Sequence: Synthetic oligonucleotide
  Antisense strand to SEQ ID NO: 578269
auuucucagaccuuuauuc

SEQ ID NO: 578271 - RNA, 19 nt, Artificial Sequence
  Description of Artificial Sequence: Synthetic oligonucleotide
  Sense strand starting at position 2109 of SEQ ID NO: 318643
agaaaugaagccugaaguu

SEQ ID NO: 578272 - RNA, 19 nt, Artificial Sequence
  Description of Artificial Sequence: Synthetic oligonucleotide
  Antisense strand to SEQ ID NO: 578271
aacuucaggcuucauuucu

SEQ ID NO: 578273 - RNA, 19 nt, Artificial Sequence
  Description of Artificial Sequence: Synthetic oligonucleotide
  Sense strand starting at position 2129 of SEQ ID NO: 318643
ucucauguauugucaacaa

SEQ ID NO: 578274 - RNA, 19 nt, Artificial Sequence
  Description of Artificial Sequence: Synthetic oligonucleotide
  Antisense strand to SEQ ID NO: 578273
uuguugacaauacaugaga

SEQ ID NO: 578275 - RNA, 19 nt, Artificial Sequence
  Description of Artificial Sequence: Synthetic oligonucleotide
  Sense strand starting at position 2537 of SEQ ID NO: 318643
gagguacucuucuauagca

SEQ ID NO: 578276 - RNA, 19 nt, Artificial Sequence
  Description of Artificial Sequence: Synthetic oligonucleotide
  Antisense strand to SEQ ID NO: 578275
ugcuauagaagaguaccuc

SEQ ID NO: 578277 - RNA, 19 nt, Artificial Sequence
  Description of Artificial Sequence: Synthetic oligonucleotide
  Sense strand starting at position 2539 of SEQ ID NO: 318643
gguacucuucuauagcaau

SEQ ID NO: 578278 - RNA, 19 nt, Artificial Sequence
  Description of Artificial Sequence: Synthetic oligonucleotide
  Antisense strand to SEQ ID NO: 578277
auugcuauagaagaguacc

SEQ ID NO: 578279 - RNA, 19 nt, Artificial Sequence
  Description of Artificial Sequence: Synthetic oligonucleotide
  Sense strand starting at position 2624 of SEQ ID NO: 318643
aagggucuccagcagugaa

SEQ ID NO: 578280 - RNA, 19 nt, Artificial Sequence
  Description of Artificial Sequence: Synthetic oligonucleotide
  Antisense strand to SEQ ID NO: 578279
uucacugcuggagacccuu

SEQ ID NO: 578281 - RNA, 19 nt, Artificial Sequence
  Description of Artificial Sequence: Synthetic oligonucleotide
  Sense strand starting at position 2670 of SEQ ID NO: 318643
acaggagucuaaccugauu

SEQ ID NO: 578282 - RNA, 19 nt, Artificial Sequence
  Description of Artificial Sequence: Synthetic oligonucleotide
  Antisense strand to SEQ ID NO: 578281
aaucagguuagacuccugu

SEQ ID NO: 578283 - RNA, 19 nt, Artificial Sequence
  Description of Artificial Sequence: Synthetic oligonucleotide
  Sense strand starting at position 2731 of SEQ ID NO: 318643
ucuugacugcguguguauu

SEQ ID NO: 578284 - RNA, 19 nt, Artificial Sequence
  Description of Artificial Sequence: Synthetic oligonucleotide
  Antisense strand to SEQ ID NO: 578283
aauacacacgcagucaaga

SEQ ID NO: 578285 - RNA, 19 nt, Artificial Sequence
  Description of Artificial Sequence: Synthetic oligonucleotide
  Sense strand starting at position 2739 of SEQ ID NO: 318643
gcguguguauuccuaucua

SEQ ID NO: 578286 - RNA, 19 nt, Artificial Sequence
  Description of Artificial Sequence: Synthetic oligonucleotide
  Antisense strand to SEQ ID NO: 578285
uagauaggaauacacacgc

SEQ ID NO: 578287 - RNA, 19 nt, Artificial Sequence
  Description of Artificial Sequence: Synthetic oligonucleotide
  Sense strand starting at position 2743 of SEQ ID NO: 318643
guguauuccuaucuacuuc

SEQ ID NO: 578288 - RNA, 19 nt, Artificial Sequence
  Description of Artificial Sequence: Synthetic oligonucleotide
  Antisense strand to SEQ ID NO: 578287
gaaguagauaggaauacac

SEQ ID NO: 578289 - RNA, 19 nt, Artificial Sequence
  Description of Artificial Sequence: Synthetic oligonucleotide
  Sense strand starting at position 2774 of SEQ ID NO: 318643
cugugaugauacuuaaacu

SEQ ID NO: 578290 - RNA, 19 nt, Artificial Sequence
  Description of Artificial Sequence: Synthetic oligonucleotide
  Antisense strand to SEQ ID NO: 578289
aguuuaaguaucaucacag

SEQ ID NO: 578291 - RNA, 19 nt, Artificial Sequence
  Description of Artificial Sequence: Synthetic oligonucleotide
  Sense strand starting at position 2895 of SEQ ID NO: 318643
ggaacaacgucauaggaaa

SEQ ID NO: 578292 - RNA, 19 nt, Artificial Sequence
  Description of Artificial Sequence: Synthetic oligonucleotide
  Antisense strand to SEQ ID NO: 578291
uuuccuaugacguuguucc

SEQ ID NO: 578293 - RNA, 19 nt, Artificial Sequence
  Description of Artificial Sequence: Synthetic oligonucleotide
  Sense strand starting at position 2932 of SEQ ID NO: 318643
cacugccagugguugaaua

SEQ ID NO: 578294 - RNA, 19 nt, Artificial Sequence
  Description of Artificial Sequence: Synthetic oligonucleotide
  Antisense strand to SEQ ID NO: 578293
uauucaaccacuggcagug

SEQ ID NO: 578295 - RNA, 19 nt, Artificial Sequence
  Description of Artificial Sequence: Synthetic oligonucleotide
  Sense strand starting at position 2933 of SEQ ID NO: 318643
acugccagugguugaauaa

SEQ ID NO: 578296 - RNA, 19 nt, Artificial Sequence
  Description of Artificial Sequence: Synthetic oligonucleotide
  Antisense strand to SEQ ID NO: 578295
uuauucaaccacuggcagu

SEQ ID NO: 578297 - RNA, 19 nt, Artificial Sequence
  Description of Artificial Sequence: Synthetic oligonucleotide
  Sense strand starting at position 3160 of SEQ ID NO: 318643
ccaugaguuucuuccucca

SEQ ID NO: 578298 - RNA, 19 nt, Artificial Sequence
  Description of Artificial Sequence: Synthetic oligonucleotide
  Antisense strand to SEQ ID NO: 578297
uggaggaagaaacucaugg

SEQ ID NO: 578299 - RNA, 19 nt, Artificial Sequence
  Description of Artificial Sequence: Synthetic oligonucleotide
  Sense strand starting at position 3165 of SEQ ID NO: 318643
aguuucuuccuccacugau

SEQ ID NO: 578300 - RNA, 19 nt, Artificial Sequence
  Description of Artificial Sequence: Synthetic oligonucleotide
  Antisense strand to SEQ ID NO: 578299
aucaguggaggaagaaacu

SEQ ID NO: 578301 - RNA, 19 nt, Artificial Sequence
  Description of Artificial Sequence: Synthetic oligonucleotide
  Sense strand starting at position 3230 of SEQ ID NO: 318643
cgaugcucucugcaguaau

SEQ ID NO: 578302 - RNA, 19 nt, Artificial Sequence
  Description of Artificial Sequence: Synthetic oligonucleotide
  Antisense strand to SEQ ID NO: 578301
auuacugcagagagcaucg

SEQ ID NO: 578303 - RNA, 19 nt, Artificial Sequence
  Description of Artificial Sequence: Synthetic oligonucleotide
  Sense strand starting at position 3233 of SEQ ID NO: 318643
ugcucucugcaguaauuaa

SEQ ID NO: 578304 - RNA, 19 nt, Artificial Sequence
  Description of Artificial Sequence: Synthetic oligonucleotide
  Antisense strand to SEQ ID NO: 578303
uuaauuacugcagagagca

SEQ ID NO: 578305 - RNA, 19 nt, Artificial Sequence
  Description of Artificial Sequence: Synthetic oligonucleotide
  Sense strand starting at position 3468 of SEQ ID NO: 318643
cuuaaaugcuucuaggaga

SEQ ID NO: 578306 - RNA, 19 nt, Artificial Sequence
  Description of Artificial Sequence: Synthetic oligonucleotide
  Antisense strand to SEQ ID NO: 578305
ucuccuagaagcauuuaag

SEQ ID NO: 578307 - RNA, 19 nt, Artificial Sequence
  Description of Artificial Sequence: Synthetic oligonucleotide
  Sense strand starting at position 3528 of SEQ ID NO: 318643
caggacaaggcuuguaauc

SEQ ID NO: 578308 - RNA, 19 nt, Artificial Sequence
  Description of Artificial Sequence: Synthetic oligonucleotide
  Antisense strand to SEQ ID NO: 578307
gauuacaagccuuguccug

SEQ ID NO: 578309 - RNA, 19 nt, Artificial Sequence
  Description of Artificial Sequence: Synthetic oligonucleotide
  Sense strand starting at position 3530 of SEQ ID NO: 318643
ggacaaggcuuguaaucuc

SEQ ID NO: 578310 - RNA, 19 nt, Artificial Sequence
  Description of Artificial Sequence: Synthetic oligonucleotide
  Antisense strand to SEQ ID NO: 578309
gagauuacaagccuugucc

SEQ ID NO: 578311 - RNA, 19 nt, Artificial Sequence
  Description of Artificial Sequence: Synthetic oligonucleotide
  Sense strand starting at position 3592 of SEQ ID NO: 318643
ugagguaucuuccuggaug

SEQ ID NO: 578312 - RNA, 19 nt, Artificial Sequence
  Description of Artificial Sequence: Synthetic oligonucleotide
  Antisense strand to SEQ ID NO: 578311
cauccaggaagauaccuca

SEQ ID NO: 578313 - RNA, 19 nt, Artificial Sequence
  Description of Artificial Sequence: Synthetic oligonucleotide
  Sense strand starting at position 3715 of SEQ ID NO: 318643
cuauaaauuucugguaagu

SEQ ID NO: 578314 - RNA, 19 nt, Artificial Sequence
  Description of Artificial Sequence: Synthetic oligonucleotide
  Antisense strand to SEQ ID NO: 578313
acuuaccagaaauuuauag

SEQ ID NO: 578315 - RNA, 19 nt, Artificial Sequence
  Description of Artificial Sequence: Synthetic oligonucleotide
  Sense strand starting at position 3964 of SEQ ID NO: 318643
gcagaaagaucagaaaguu

SEQ ID NO: 578316 - RNA, 19 nt, Artificial Sequence
  Description of Artificial Sequence: Synthetic oligonucleotide
  Antisense strand to SEQ ID NO: 578315
aacuuucugaucuuucugc

SEQ ID NO: 578317 - RNA, 19 nt, Artificial Sequence
  Description of Artificial Sequence: Synthetic oligonucleotide
  Sense strand starting at position 140 of SEQ ID NO: 318644
agaagcuaguaauccuaaa

SEQ ID NO: 578318 - RNA, 19 nt, Artificial Sequence
  Description of Artificial Sequence: Synthetic oligonucleotide
  Antisense strand to SEQ ID NO: 578317
uuuaggauuacuagcuucu

SEQ ID NO: 578319 - RNA, 19 nt, Artificial Sequence
  Description of Artificial Sequence: Synthetic oligonucleotide
  Sense strand starting at position 152 of SEQ ID NO: 318644
uccuaaagucgauauagau

SEQ ID NO: 578320 - RNA, 19 nt, Artificial Sequence
  Description of Artificial Sequence: Synthetic oligonucleotide
  Antisense strand to SEQ ID NO: 578319
aucuauaucgacuuuagga

SEQ ID NO: 578321 - RNA, 19 nt, Artificial Sequence
  Description of Artificial Sequence: Synthetic oligonucleotide
  Sense strand starting at position 279 of SEQ ID NO: 318644
uguaaugaaucagcaggaa

SEQ ID NO: 578322 - RNA, 19 nt, Artificial Sequence
  Description of Artificial Sequence: Synthetic oligonucleotide
  Antisense strand to SEQ ID NO: 578321
uuccugcugauucauuaca

SEQ ID NO: 578323 - RNA, 19 nt, Artificial Sequence
  Description of Artificial Sequence: Synthetic oligonucleotide
  Sense strand starting at position 406 of SEQ ID NO: 318644
ugcuucuugggaugaaacu

SEQ ID NO: 578324 - RNA, 19 nt, Artificial Sequence
  Description of Artificial Sequence: Synthetic oligonucleotide
  Antisense strand to SEQ ID NO: 578323
aguuucaucccaagaagca

SEQ ID NO: 578325 - RNA, 19 nt, Artificial Sequence
  Description of Artificial Sequence: Synthetic oligonucleotide
  Sense strand starting at position 443 of SEQ ID NO: 318644
uugugaaauguuugagaaa

SEQ ID NO: 578326 - RNA, 19 nt, Artificial Sequence
  Description of Artificial Sequence: Synthetic oligonucleotide
  Antisense strand to SEQ ID NO: 578325
uuucucaaacauuucacaa

SEQ ID NO: 578327 - RNA, 19 nt, Artificial Sequence
  Description of Artificial Sequence: Synthetic oligonucleotide
  Sense strand starting at position 533 of SEQ ID NO: 318644
cucuacaucucucugagua

SEQ ID NO: 578328 - RNA, 19 nt, Artificial Sequence
  Description of Artificial Sequence: Synthetic oligonucleotide
  Antisense strand to SEQ ID NO: 578327
uacucagagagauguagag

SEQ ID NO: 578329 - RNA, 19 nt, Artificial Sequence
  Description of Artificial Sequence: Synthetic oligonucleotide
  Sense strand starting at position 534 of SEQ ID NO: 318644
ucuacaucucucugaguag

SEQ ID NO: 578330 - RNA, 19 nt, Artificial Sequence
  Description of Artificial Sequence: Synthetic oligonucleotide
  Antisense strand to SEQ ID NO: 578329
cuacucagagagauguaga

SEQ ID NO: 578331 - RNA, 19 nt, Artificial Sequence
  Description of Artificial Sequence: Synthetic oligonucleotide
  Sense strand starting at position 675 of SEQ ID NO: 318644
aggagcucuggauggacaa

SEQ ID NO: 578332 - RNA, 19 nt, Artificial Sequence
  Description of Artificial Sequence: Synthetic oligonucleotide
  Antisense strand to SEQ ID NO: 578331
uuguccauccagagcuccu

SEQ ID NO: 578333 - RNA, 19 nt, Artificial Sequence
  Description of Artificial Sequence: Synthetic oligonucleotide
  Sense strand starting at position 676 of SEQ ID NO: 318644
ggagcucuggauggacaau

SEQ ID NO: 578334 - RNA, 19 nt, Artificial Sequence
  Description of Artificial Sequence: Synthetic oligonucleotide
  Antisense strand to SEQ ID NO: 578333
auuguccauccagagcucc

SEQ ID NO: 578335 - RNA, 19 nt, Artificial Sequence
  Description of Artificial Sequence: Synthetic oligonucleotide
  Sense strand starting at position 849 of SEQ ID NO: 318644
ucaaguauguauguggauu

SEQ ID NO: 578336 - RNA, 19 nt, Artificial Sequence
  Description of Artificial Sequence: Synthetic oligonucleotide
  Antisense strand to SEQ ID NO: 578335
aauccacauacauacuuga

SEQ ID NO: 578337 - RNA, 19 nt, Artificial Sequence
  Description of Artificial Sequence: Synthetic oligonucleotide
  Sense strand starting at position 914 of SEQ ID NO: 318644
augaaauggcuccagcagu

SEQ ID NO: 578338 - RNA, 19 nt, Artificial Sequence
  Description of Artificial Sequence: Synthetic oligonucleotide
  Antisense strand to SEQ ID NO: 578337
acugcuggagccauuucau

SEQ ID NO: 578339 - RNA, 19 nt, Artificial Sequence
  Description of Artificial Sequence: Synthetic oligonucleotide
  Sense strand starting at position 1039 of SEQ ID NO: 318644
ugagguugaaacuguauac

SEQ ID NO: 578340 - RNA, 19 nt, Artificial Sequence
  Description of Artificial Sequence: Synthetic oligonucleotide
  Antisense strand to SEQ ID NO: 578339
guauacaguuucaaccuca

SEQ ID NO: 578341 - RNA, 19 nt, Artificial Sequence
  Description of Artificial Sequence: Synthetic oligonucleotide
  Sense strand starting at position 1043 of SEQ ID NO: 318644
guugaaacuguauacuuua

SEQ ID NO: 578342 - RNA, 19 nt, Artificial Sequence
  Description of Artificial Sequence: Synthetic oligonucleotide
  Antisense strand to SEQ ID NO: 578341
uaaaguauacaguuucaac

SEQ ID NO: 578343 - RNA, 19 nt, Artificial Sequence
  Description of Artificial Sequence: Synthetic oligonucleotide
  Sense strand starting at position 1274 of SEQ ID NO: 318644
auagacaacuuggauauuu

SEQ ID NO: 578344 - RNA, 19 nt, Artificial Sequence
  Description of Artificial Sequence: Synthetic oligonucleotide
  Antisense strand to SEQ ID NO: 578343
aaauauccaaguugucuau

SEQ ID NO: 578345 - RNA, 19 nt, Artificial Sequence
  Description of Artificial Sequence: Synthetic oligonucleotide
  Sense strand starting at position 1418 of SEQ ID NO: 318644
uuugaaguccaagagucuu

SEQ ID NO: 578346 - RNA, 19 nt, Artificial Sequence
  Description of Artificial Sequence: Synthetic oligonucleotide
  Antisense strand to SEQ ID NO: 578345
aagacucuuggacuucaaa

SEQ ID NO: 578347 - RNA, 19 nt, Artificial Sequence
  Description of Artificial Sequence: Synthetic oligonucleotide
  Sense strand starting at position 1499 of SEQ ID NO: 318644
augugugaagacuggucuu

SEQ ID NO: 578348 - RNA, 19 nt, Artificial Sequence
  Description of Artificial Sequence: Synthetic oligonucleotide
  Antisense strand to SEQ ID NO: 578347
aagaccagucuucacacau

SEQ ID NO: 578349 - RNA, 19 nt, Artificial Sequence
  Description of Artificial Sequence: Synthetic oligonucleotide
  Sense strand starting at position 1505 of SEQ ID NO: 318644
gaagacuggucuucugaau

SEQ ID NO: 578350 - RNA, 19 nt, Artificial Sequence
  Description of Artificial Sequence: Synthetic oligonucleotide
  Antisense strand to SEQ ID NO: 578349
auucagaagaccagucuuc

SEQ ID NO: 578351 - RNA, 19 nt, Artificial Sequence
  Description of Artificial Sequence: Synthetic oligonucleotide
  Sense strand starting at position 1717 of SEQ ID NO: 318644
gcgaguaguguuucuucua

SEQ ID NO: 578352 - RNA, 19 nt, Artificial Sequence
  Description of Artificial Sequence: Synthetic oligonucleotide
  Antisense strand to SEQ ID NO: 578351
uagaagaaacacuacucgc

SEQ ID NO: 578353 - RNA, 19 nt, Artificial Sequence
  Description of Artificial Sequence: Synthetic oligonucleotide
  Sense strand starting at position 1988 of SEQ ID NO: 318644
caggacuuauaagugaauu

SEQ ID NO: 578354 - RNA, 19 nt, Artificial Sequence
  Description of Artificial Sequence: Synthetic oligonucleotide
  Antisense strand to SEQ ID NO: 578353
aauucacuuauaaguccug

SEQ ID NO: 578355 - RNA, 19 nt, Artificial Sequence
  Description of Artificial Sequence: Synthetic oligonucleotide
  Sense strand starting at position 2055 of SEQ ID NO: 318644
gaauaaaugcaauguugug

SEQ ID NO: 578356 - RNA, 19 nt, Artificial Sequence
  Description of Artificial Sequence: Synthetic oligonucleotide
  Antisense strand to SEQ ID NO: 578355
cacaacauugcauuuauuc

SEQ ID NO: 578357 - RNA, 19 nt, Artificial Sequence
  Description of Artificial Sequence: Synthetic oligonucleotide
  Sense strand starting at position 2067 of SEQ ID NO: 318644
uguugugugaaagaccuuu

SEQ ID NO: 578358 - RNA, 19 nt, Artificial Sequence
  Description of Artificial Sequence: Synthetic oligonucleotide
  Antisense strand to SEQ ID NO: 578357
aaaggucuuucacacaaca

SEQ ID NO: 578359 - RNA, 19 nt, Artificial Sequence
  Description of Artificial Sequence: Synthetic oligonucleotide
  Sense strand starting at position 2073 of SEQ ID NO: 318644
gugaaagaccuuuauucgu

SEQ ID NO: 578360 - RNA, 19 nt, Artificial Sequence
  Description of Artificial Sequence: Synthetic oligonucleotide
  Antisense strand to SEQ ID NO: 578359
acgaauaaaggucuuucac

SEQ ID NO: 578361 - RNA, 19 nt, Artificial Sequence
  Description of Artificial Sequence: Synthetic oligonucleotide
  Sense strand starting at position 2075 of SEQ ID NO: 318644
gaaagaccuuuauucguuu

SEQ ID NO: 578362 - RNA, 19 nt, Artificial Sequence
  Description of Artificial Sequence: Synthetic oligonucleotide
  Antisense strand to SEQ ID NO: 578361
aaacgaauaaaggucuuuc

SEQ ID NO: 578363 - RNA, 19 nt, Artificial Sequence
  Description of Artificial Sequence: Synthetic oligonucleotide
  Sense strand starting at position 2119 of SEQ ID NO: 318644
ucgaauauuguacauacuu

SEQ ID NO: 578364 - RNA, 19 nt, Artificial Sequence
  Description of Artificial Sequence: Synthetic oligonucleotide
  Antisense strand to SEQ ID NO: 578363
aaguauguacaauauucga

SEQ ID NO: 578365 - RNA, 19 nt, Artificial Sequence
  Description of Artificial Sequence: Synthetic oligonucleotide
  Sense strand starting at position 2136 of SEQ ID NO: 318644
uugcauauccugcaagaag

SEQ ID NO: 578366 - RNA, 19 nt, Artificial Sequence
  Description of Artificial Sequence: Synthetic oligonucleotide
  Antisense strand to SEQ ID NO: 578365
cuucuugcaggauaugcaa

SEQ ID NO: 578367 - RNA, 19 nt, Artificial Sequence
  Description of Artificial Sequence: Synthetic oligonucleotide
  Sense strand starting at position 2327 of SEQ ID NO: 318644
acccgucagugaguaaaca

SEQ ID NO: 578368 - RNA, 19 nt, Artificial Sequence
  Description of Artificial Sequence: Synthetic oligonucleotide
  Antisense strand to SEQ ID NO: 578367
uguuuacucacugacgggu

SEQ ID NO: 578369 - RNA, 19 nt, Artificial Sequence
  Description of Artificial Sequence: Synthetic oligonucleotide
  Sense strand starting at position 2328 of SEQ ID NO: 318644
cccgucagugaguaaacaa

SEQ ID NO: 578370 - RNA, 19 nt, Artificial Sequence
  Description of Artificial Sequence: Synthetic oligonucleotide
  Antisense strand to SEQ ID NO: 578369
uuguuuacucacugacggg

SEQ ID NO: 578371 - RNA, 19 nt, Artificial Sequence
  Description of Artificial Sequence: Synthetic oligonucleotide
  Sense strand starting at position 2421 of SEQ ID NO: 318644
gguaguaugcaauagaauu

SEQ ID NO: 578372 - RNA, 19 nt, Artificial Sequence
  Description of Artificial Sequence: Synthetic oligonucleotide
  Antisense strand to SEQ ID NO: 578371
aauucuauugcauacuacc

SEQ ID NO: 578373 - RNA, 19 nt, Artificial Sequence
  Description of Artificial Sequence: Synthetic oligonucleotide
  Sense strand starting at position 2468 of SEQ ID NO: 318644
guagaauuccuaugucuac

SEQ ID NO: 578374 - RNA, 19 nt, Artificial Sequence
  Description of Artificial Sequence: Synthetic oligonucleotide
  Antisense strand to SEQ ID NO: 578373
guagacauaggaauucuac

SEQ ID NO: 578375 - RNA, 19 nt, Artificial Sequence
  Description of Artificial Sequence: Synthetic oligonucleotide
  Sense strand starting at position 2881 of SEQ ID NO: 318644
cguaauauacagggauugu

SEQ ID NO: 578376 - RNA, 19 nt, Artificial Sequence
  Description of Artificial Sequence: Synthetic oligonucleotide
  Antisense strand to SEQ ID NO: 578375
acaaucccuguauauuacg

SEQ ID NO: 578377 - RNA, 19 nt, Artificial Sequence
  Description of Artificial Sequence: Synthetic oligonucleotide
  Sense strand starting at position 2892 of SEQ ID NO: 318644
gggauuguccugugaaaug

SEQ ID NO: 578378 - RNA, 19 nt, Artificial Sequence
  Description of Artificial Sequence: Synthetic oligonucleotide
  Antisense strand to SEQ ID NO: 578377
cauuucacaggacaauccc

SEQ ID NO: 578379 - RNA, 19 nt, Artificial Sequence
  Description of Artificial Sequence: Synthetic oligonucleotide
  Sense strand starting at position 2955 of SEQ ID NO: 318644
acuacuucgauucggaauu

SEQ ID NO: 578380 - RNA, 19 nt, Artificial Sequence
  Description of Artificial Sequence: Synthetic oligonucleotide
  Antisense strand to SEQ ID NO: 578379
aauuccgaaucgaaguagu

SEQ ID NO: 578381 - RNA, 19 nt, Artificial Sequence
  Description of Artificial Sequence: Synthetic oligonucleotide
  Sense strand starting at position 2961 of SEQ ID NO: 318644
ucgauucggaauuaaguuu

SEQ ID NO: 578382 - RNA, 19 nt, Artificial Sequence
  Description of Artificial Sequence: Synthetic oligonucleotide
  Antisense strand to SEQ ID NO: 578381
aaacuuaauuccgaaucga

SEQ ID NO: 578383 - RNA, 19 nt, Artificial Sequence
  Description of Artificial Sequence: Synthetic oligonucleotide
  Sense strand starting at position 3057 of SEQ ID NO: 318644
ccuagaagaucaguaaguu

SEQ ID NO: 578384 - RNA, 19 nt, Artificial Sequence
  Description of Artificial Sequence: Synthetic oligonucleotide
  Antisense strand to SEQ ID NO: 578383
aacuuacugaucuucuagg

SEQ ID NO: 578385 - RNA, 19 nt, Artificial Sequence
  Description of Artificial Sequence: Synthetic oligonucleotide
  Sense strand starting at position 3376 of SEQ ID NO: 318644
gaaacuauagcauguuuag

SEQ ID NO: 578386 - RNA, 19 nt, Artificial Sequence
  Description of Artificial Sequence: Synthetic oligonucleotide
  Antisense strand to SEQ ID NO: 578385
cuaaacaugcuauaguuuc

SEQ ID NO: 578387 - RNA, 19 nt, Artificial Sequence
  Description of Artificial Sequence: Synthetic oligonucleotide
  Sense strand starting at position 3379 of SEQ ID NO: 318644
acuauagcauguuuagaga

SEQ ID NO: 578388 - RNA, 19 nt, Artificial Sequence
  Description of Artificial Sequence: Synthetic oligonucleotide
  Antisense strand to SEQ ID NO: 578387
ucucuaaacaugcuauagu

SEQ ID NO: 578389 - RNA, 19 nt, Artificial Sequence
  Description of Artificial Sequence: Synthetic oligonucleotide
  Sense strand starting at position 3413 of SEQ ID NO: 318644
ucgauucuacagugaagac

SEQ ID NO: 578390 - RNA, 19 nt, Artificial Sequence
  Description of Artificial Sequence: Synthetic oligonucleotide
  Antisense strand to SEQ ID NO: 578389
gucuucacuguagaaucga

SEQ ID NO: 578391 - RNA, 19 nt, Artificial Sequence
  Description of Artificial Sequence: Synthetic oligonucleotide
  Sense strand starting at position 3647 of SEQ ID NO: 318644
ugagcacaauuugaaagaa

SEQ ID NO: 578392 - RNA, 19 nt, Artificial Sequence
  Description of Artificial Sequence: Synthetic oligonucleotide
  Antisense strand to SEQ ID NO: 578391
uucuuucaaauugugcuca

SEQ ID NO: 578393 - RNA, 19 nt, Artificial Sequence
  Description of Artificial Sequence: Synthetic oligonucleotide
  Sense strand starting at position 3763 of SEQ ID NO: 318644
uugguauaaccuuagaguc

SEQ ID NO: 578394 - RNA, 19 nt, Artificial Sequence
  Description of Artificial Sequence: Synthetic oligonucleotide
  Antisense strand to SEQ ID NO: 578393
gacucuaagguuauaccaa

SEQ ID NO: 578395 - RNA, 19 nt, Artificial Sequence
  Description of Artificial Sequence: Synthetic oligonucleotide
  Sense strand starting at position 3903 of SEQ ID NO: 318644
agucaucuacauugaaguu

SEQ ID NO: 578396 - RNA, 19 nt, Artificial Sequence
  Description of Artificial Sequence: Synthetic oligonucleotide
  Antisense strand to SEQ ID NO: 578395
aacuucaauguagaugacu

SEQ ID NO: 578397 - RNA, 19 nt, Artificial Sequence
  Description of Artificial Sequence: Synthetic oligonucleotide
  Sense strand starting at position 58 of SEQ ID NO: 318645
gcaauuaauguguauggag

SEQ ID NO: 578398 - RNA, 19 nt, Artificial Sequence
  Description of Artificial Sequence: Synthetic oligonucleotide
  Antisense strand to SEQ ID NO: 578397
cuccauacacauuaauugc

SEQ ID NO: 578399 - RNA, 19 nt, Artificial Sequence
  Description of Artificial Sequence: Synthetic oligonucleotide
  Sense strand starting at position 116 of SEQ ID NO: 318645
uguuacuagcuagaauauu

SEQ ID NO: 578400 - RNA, 19 nt, Artificial Sequence
  Description of Artificial Sequence: Synthetic oligonucleotide
  Antisense strand to SEQ ID NO: 578399
aauauucuagcuaguaaca

SEQ ID NO: 578401 - RNA, 19 nt, Artificial Sequence
  Description of Artificial Sequence: Synthetic oligonucleotide
  Sense strand starting at position 274 of SEQ ID NO: 318645
ugacuuaacugcucaugac

SEQ ID NO: 578402 - RNA, 19 nt, Artificial Sequence
  Description of Artificial Sequence: Synthetic oligonucleotide
  Antisense strand to SEQ ID NO: 578401
gucaugagcaguuaaguca

SEQ ID NO: 578403 - RNA, 19 nt, Artificial Sequence
  Description of Artificial Sequence: Synthetic oligonucleotide
  Sense strand starting at position 278 of SEQ ID NO: 318645
uuaacugcucaugacagau

SEQ ID NO: 578404 - RNA, 19 nt, Artificial Sequence
  Description of Artificial Sequence: Synthetic oligonucleotide
  Antisense strand to SEQ ID NO: 578403
aucugucaugagcaguuaa

SEQ ID NO: 578405 - RNA, 19 nt, Artificial Sequence
  Description of Artificial Sequence: Synthetic oligonucleotide
  Sense strand starting at position 373 of SEQ ID NO: 318645
ggagucauauguuuacacu

SEQ ID NO: 578406 - RNA, 19 nt, Artificial Sequence
  Description of Artificial Sequence: Synthetic oligonucleotide
  Antisense strand to SEQ ID NO: 578405
aguguaaacauaugacucc

SEQ ID NO: 578407 - RNA, 19 nt, Artificial Sequence
  Description of Artificial Sequence: Synthetic oligonucleotide
  Sense strand starting at position 374 of SEQ ID NO: 318645
gagucauauguuuacacug

SEQ ID NO: 578408 - RNA, 19 nt, Artificial Sequence
  Description of Artificial Sequence: Synthetic oligonucleotide
  Antisense strand to SEQ ID NO: 578407
caguguaaacauaugacuc

SEQ ID NO: 578409 - RNA, 19 nt, Artificial Sequence
  Description of Artificial Sequence: Synthetic oligonucleotide
  Sense strand starting at position 379 of SEQ ID NO: 318645
auauguuuacacugcaaag

SEQ ID NO: 578410 - RNA, 19 nt, Artificial Sequence
  Description of Artificial Sequence: Synthetic oligonucleotide
  Antisense strand to SEQ ID NO: 578409
cuuugcaguguaaacauau

SEQ ID NO: 578411 - RNA, 19 nt, Artificial Sequence
  Description of Artificial Sequence: Synthetic oligonucleotide
  Sense strand starting at position 381 of SEQ ID NO: 318645
auguuuacacugcaaagua

SEQ ID NO: 578412 - RNA, 19 nt, Artificial Sequence
  Description of Artificial Sequence: Synthetic oligonucleotide
  Antisense strand to SEQ ID NO: 578411
uacuuugcaguguaaacau

SEQ ID NO: 578413 - RNA, 19 nt, Artificial Sequence
  Description of Artificial Sequence: Synthetic oligonucleotide
  Sense strand starting at position 613 of SEQ ID NO: 318645
uucuacucagaaugugauu

SEQ ID NO: 578414 - RNA, 19 nt, Artificial Sequence
  Description of Artificial Sequence: Synthetic oligonucleotide
  Antisense strand to SEQ ID NO: 578413
aaucacauucugaguagaa

SEQ ID NO: 578415 - RNA, 19 nt, Artificial Sequence
  Description of Artificial Sequence: Synthetic oligonucleotide
  Sense strand starting at position 850 of SEQ ID NO: 318645
aaauauguccugcauugag

SEQ ID NO: 578416 - RNA, 19 nt, Artificial Sequence
  Description of Artificial Sequence: Synthetic oligonucleotide
  Antisense strand to SEQ ID NO: 578415
cucaaugcaggacauauuu

SEQ ID NO: 578417 - RNA, 19 nt, Artificial Sequence
  Description of Artificial Sequence: Synthetic oligonucleotide
  Sense strand starting at position 858 of SEQ ID NO: 318645
ccugcauugagggaguacu

SEQ ID NO: 578418 - RNA, 19 nt, Artificial Sequence
  Description of Artificial Sequence: Synthetic oligonucleotide
  Antisense strand to SEQ ID NO: 578417
aguacucccucaaugcagg

SEQ ID NO: 578419 - RNA, 19 nt, Artificial Sequence
  Description of Artificial Sequence: Synthetic oligonucleotide
  Sense strand starting at position 914 of SEQ ID NO: 318645
auggaauuaucagucuuaa

SEQ ID NO: 578420 - RNA, 19 nt, Artificial Sequence
  Description of Artificial Sequence: Synthetic oligonucleotide
  Antisense strand to SEQ ID NO: 578419
uuaagacugauaauuccau

SEQ ID NO: 578421 - RNA, 19 nt, Artificial Sequence
  Description of Artificial Sequence: Synthetic oligonucleotide
  Sense strand starting at position 992 of SEQ ID NO: 318645
augauuccucuagggauac

SEQ ID NO: 578422 - RNA, 19 nt, Artificial Sequence
  Description of Artificial Sequence: Synthetic oligonucleotide
  Antisense strand to SEQ ID NO: 578421
guaucccuagaggaaucau

SEQ ID NO: 578423 - RNA, 19 nt, Artificial Sequence
  Description of Artificial Sequence: Synthetic oligonucleotide
  Sense strand starting at position 1056 of SEQ ID NO: 318645
uuagaaauacagugucacu

SEQ ID NO: 578424 - RNA, 19 nt, Artificial Sequence
  Description of Artificial Sequence: Synthetic oligonucleotide
  Antisense strand to SEQ ID NO: 578423
agugacacuguauuucuaa

SEQ ID NO: 578425 - RNA, 19 nt, Artificial Sequence
  Description of Artificial Sequence: Synthetic oligonucleotide
  Sense strand starting at position 1135 of SEQ ID NO: 318645
cuaucagucgcgaggaguc

SEQ ID NO: 578426 - RNA, 19 nt, Artificial Sequence
  Description of Artificial Sequence: Synthetic oligonucleotide
  Antisense strand to SEQ ID NO: 578425
gacuccucgcgacugauag

SEQ ID NO: 578427 - RNA, 19 nt, Artificial Sequence
  Description of Artificial Sequence: Synthetic oligonucleotide
  Sense strand starting at position 1209 of SEQ ID NO: 318645
gcgacaugugcagucaugu

SEQ ID NO: 578428 - RNA, 19 nt, Artificial Sequence
  Description of Artificial Sequence: Synthetic oligonucleotide
  Antisense strand to SEQ ID NO: 578427
acaugacugcacaugucgc

SEQ ID NO: 578429 - RNA, 19 nt, Artificial Sequence
  Description of Artificial Sequence: Synthetic oligonucleotide
  Sense strand starting at position 1273 of SEQ ID NO: 318645
ggaagucuccaccgaauga

SEQ ID NO: 578430 - RNA, 19 nt, Artificial Sequence
  Description of Artificial Sequence: Synthetic oligonucleotide
  Antisense strand to SEQ ID NO: 578429
ucauucgguggagacuucc

SEQ ID NO: 578431 - RNA, 19 nt, Artificial Sequence
  Description of Artificial Sequence: Synthetic oligonucleotide
  Sense strand starting at position 1280 of SEQ ID NO: 318645
uccaccgaaugaucucaaa

SEQ ID NO: 578432 - RNA, 19 nt, Artificial Sequence
  Description of Artificial Sequence: Synthetic oligonucleotide
  Antisense strand to SEQ ID NO: 578431
uuugagaucauucggugga

SEQ ID NO: 578433 - RNA, 19 nt, Artificial Sequence
  Description of Artificial Sequence: Synthetic oligonucleotide
  Sense strand starting at position 2360 of SEQ ID NO: 318645
uagugucugcugccaucau

SEQ ID NO: 578434 - RNA, 19 nt, Artificial Sequence
  Description of Artificial Sequence: Synthetic oligonucleotide
  Antisense strand to SEQ ID NO: 578433
augauggcagcagacacua

SEQ ID NO: 578435 - RNA, 19 nt, Artificial Sequence
  Description of Artificial Sequence: Synthetic oligonucleotide
  Sense strand starting at position 2388 of SEQ ID NO: 318645
uuaugaugaugauccguga

SEQ ID NO: 578436 - RNA, 19 nt, Artificial Sequence
  Description of Artificial Sequence: Synthetic oligonucleotide
  Antisense strand to SEQ ID NO: 578435
ucacggaucaucaucauaa

SEQ ID NO: 578437 - RNA, 19 nt, Artificial Sequence
  Description of Artificial Sequence: Synthetic oligonucleotide
  Sense strand starting at position 2391 of SEQ ID NO: 318645
ugaugaugauccgugaaag

SEQ ID NO: 578438 - RNA, 19 nt, Artificial Sequence
  Description of Artificial Sequence: Synthetic oligonucleotide
  Antisense strand to SEQ ID NO: 578437
cuuucacggaucaucauca

SEQ ID NO: 578439 - RNA, 19 nt, Artificial Sequence
  Description of Artificial Sequence: Synthetic oligonucleotide
  Sense strand starting at position 2450 of SEQ ID NO: 318645
gggccuuaagucuacccua

SEQ ID NO: 578440 - RNA, 19 nt, Artificial Sequence
  Description of Artificial Sequence: Synthetic oligonucleotide
  Antisense strand to SEQ ID NO: 578439
uaggguagacuuaaggccc

SEQ ID NO: 578441 - RNA, 19 nt, Artificial Sequence
  Description of Artificial Sequence: Synthetic oligonucleotide
  Sense strand starting at position 2455 of SEQ ID NO: 318645
uuaagucuacccuacgaua

SEQ ID NO: 578442 - RNA, 19 nt, Artificial Sequence
  Description of Artificial Sequence: Synthetic oligonucleotide
  Antisense strand to SEQ ID NO: 578441
uaucguaggguagacuuaa

SEQ ID NO: 578443 - RNA, 19 nt, Artificial Sequence
  Description of Artificial Sequence: Synthetic oligonucleotide
  Sense strand starting at position 2836 of SEQ ID NO: 318645
acuuaauauguguagguca

SEQ ID NO: 578444 - RNA, 19 nt, Artificial Sequence
  Description of Artificial Sequence: Synthetic oligonucleotide
  Antisense strand to SEQ ID NO: 578443
ugaccuacacauauuaagu

SEQ ID NO: 578445 - RNA, 19 nt, Artificial Sequence
  Description of Artificial Sequence: Synthetic oligonucleotide
  Sense strand starting at position 2956 of SEQ ID NO: 318645
aaguuacacguuugggaaa

SEQ ID NO: 578446 - RNA, 19 nt, Artificial Sequence
  Description of Artificial Sequence: Synthetic oligonucleotide
  Antisense strand to SEQ ID NO: 578445
uuucccaaacguguaacuu

SEQ ID NO: 578447 - RNA, 19 nt, Artificial Sequence
  Description of Artificial Sequence: Synthetic oligonucleotide
  Sense strand starting at position 2967 of SEQ ID NO: 318645
uugggaaauggcugaguuu

SEQ ID NO: 578448 - RNA, 19 nt, Artificial Sequence
  Description of Artificial Sequence: Synthetic oligonucleotide
  Antisense strand to SEQ ID NO: 578447
aaacucagccauuucccaa

SEQ ID NO: 578449 - RNA, 19 nt, Artificial Sequence
  Description of Artificial Sequence: Synthetic oligonucleotide
  Sense strand starting at position 2979 of SEQ ID NO: 318645
ugaguuuggcuuggagaga

SEQ ID NO: 578450 - RNA, 19 nt, Artificial Sequence
  Description of Artificial Sequence: Synthetic oligonucleotide
  Antisense strand to SEQ ID NO: 578449
ucucuccaagccaaacuca

SEQ ID NO: 578451 - RNA, 19 nt, Artificial Sequence
  Description of Artificial Sequence: Synthetic oligonucleotide
  Sense strand starting at position 3006 of SEQ ID NO: 318645
aacucuugauaggugaaau

SEQ ID NO: 578452 - RNA, 19 nt, Artificial Sequence
  Description of Artificial Sequence: Synthetic oligonucleotide
  Antisense strand to SEQ ID NO: 578451
auuucaccuaucaagaguu

SEQ ID NO: 578453 - RNA, 19 nt, Artificial Sequence
  Description of Artificial Sequence: Synthetic oligonucleotide
  Sense strand starting at position 3356 of SEQ ID NO: 318645
ugaccuuugauugguagga

SEQ ID NO: 578454 - RNA, 19 nt, Artificial Sequence
  Description of Artificial Sequence: Synthetic oligonucleotide
  Antisense strand to SEQ ID NO: 578453
uccuaccaaucaaagguca

SEQ ID NO: 578455 - RNA, 19 nt, Artificial Sequence
  Description of Artificial Sequence: Synthetic oligonucleotide
  Sense strand starting at position 3357 of SEQ ID NO: 318645
gaccuuugauugguaggaa

SEQ ID NO: 578456 - RNA, 19 nt, Artificial Sequence
  Description of Artificial Sequence: Synthetic oligonucleotide
  Antisense strand to SEQ ID NO: 578455
uuccuaccaaucaaagguc

SEQ ID NO: 578457 - RNA, 19 nt, Artificial Sequence
  Description of Artificial Sequence: Synthetic oligonucleotide
  Sense strand starting at position 3456 of SEQ ID NO: 318645
ccaagaaacuugcuuagga

SEQ ID NO: 578458 - RNA, 19 nt, Artificial Sequence
  Description of Artificial Sequence: Synthetic oligonucleotide
  Antisense strand to SEQ ID NO: 578457
uccuaagcaaguuucuugg

SEQ ID NO: 578459 - RNA, 19 nt, Artificial Sequence
  Description of Artificial Sequence: Synthetic oligonucleotide
  Sense strand starting at position 3481 of SEQ ID NO: 318645
gaaauaugucggugagaua

SEQ ID NO: 578460 - RNA, 19 nt, Artificial Sequence
  Description of Artificial Sequence: Synthetic oligonucleotide
  Antisense strand to SEQ ID NO: 578459
uaucucaccgacauauuuc

SEQ ID NO: 578461 - RNA, 19 nt, Artificial Sequence
  Description of Artificial Sequence: Synthetic oligonucleotide
  Sense strand starting at position 3482 of SEQ ID NO: 318645
aaauaugucggugagauac

SEQ ID NO: 578462 - RNA, 19 nt, Artificial Sequence
  Description of Artificial Sequence: Synthetic oligonucleotide
  Antisense strand to SEQ ID NO: 578461
guaucucaccgacauauuu

SEQ ID NO: 578463 - RNA, 19 nt, Artificial Sequence
  Description of Artificial Sequence: Synthetic oligonucleotide
  Sense strand starting at position 3608 of SEQ ID NO: 318645
uucucauucggucauggga

SEQ ID NO: 578464 - RNA, 19 nt, Artificial Sequence
  Description of Artificial Sequence: Synthetic oligonucleotide
  Antisense strand to SEQ ID NO: 578463
ucccaugaccgaaugagaa

SEQ ID NO: 578465 - RNA, 19 nt, Artificial Sequence
  Description of Artificial Sequence: Synthetic oligonucleotide
  Sense strand starting at position 3655 of SEQ ID NO: 318645
gugauuaagauugaugcca

SEQ ID NO: 578466 - RNA, 19 nt, Artificial Sequence
  Description of Artificial Sequence: Synthetic oligonucleotide
  Antisense strand to SEQ ID NO: 578465
uggcaucaaucuuaaucac

SEQ ID NO: 578467 - RNA, 19 nt, Artificial Sequence
  Description of Artificial Sequence: Synthetic oligonucleotide
  Sense strand starting at position 3663 of SEQ ID NO: 318645
gauugaugccauugagaug

SEQ ID NO: 578468 - RNA, 19 nt, Artificial Sequence
  Description of Artificial Sequence: Synthetic oligonucleotide
  Antisense strand to SEQ ID NO: 578467
caucucaauggcaucaauc

SEQ ID NO: 578469 - RNA, 19 nt, Artificial Sequence
  Description of Artificial Sequence: Synthetic oligonucleotide
  Sense strand starting at position 3869 of SEQ ID NO: 318645
cuuuaucuggucuagacuu

SEQ ID NO: 578470 - RNA, 19 nt, Artificial Sequence
  Description of Artificial Sequence: Synthetic oligonucleotide
  Antisense strand to SEQ ID NO: 578469
aagucuagaccagauaaag

SEQ ID NO: 578471 - RNA, 19 nt, Artificial Sequence
  Description of Artificial Sequence: Synthetic oligonucleotide
  Sense strand starting at position 3950 of SEQ ID NO: 318645
ggaaauggauccucccuua

SEQ ID NO: 578472 - RNA, 19 nt, Artificial Sequence
  Description of Artificial Sequence: Synthetic oligonucleotide
  Antisense strand to SEQ ID NO: 578471
uaagggaggauccauuucc

SEQ ID NO: 578473 - RNA, 19 nt, Artificial Sequence
  Description of Artificial Sequence: Synthetic oligonucleotide
  Sense strand starting at position 3978 of SEQ ID NO: 318645
gaaagugauugagcucuac

SEQ ID NO: 578474 - RNA, 19 nt, Artificial Sequence
  Description of Artificial Sequence: Synthetic oligonucleotide
  Antisense strand to SEQ ID NO: 578473
guagagcucaaucacuuuc

SEQ ID NO: 578475 - RNA, 19 nt, Artificial Sequence
  Description of Artificial Sequence: Synthetic oligonucleotide
  Sense strand starting at position 3982 of SEQ ID NO: 318645
gugauugagcucuacugac

SEQ ID NO: 578476 - RNA, 19 nt, Artificial Sequence
  Description of Artificial Sequence: Synthetic oligonucleotide
  Antisense strand to SEQ ID NO: 578475
gucaguagagcucaaucac

SEQ ID NO: 578477 - RNA, 19 nt, Artificial Sequence
  Description of Artificial Sequence: Synthetic oligonucleotide
  Sense strand starting at position 222 of SEQ ID NO: 318646
gccggaaacauauagcguu

SEQ ID NO: 578478 - RNA, 19 nt, Artificial Sequence
  Description of Artificial Sequence: Synthetic oligonucleotide
  Antisense strand to SEQ ID NO: 578477
aacgcuauauguuuccggc

SEQ ID NO: 578479 - RNA, 19 nt, Artificial Sequence
  Description of Artificial Sequence: Synthetic oligonucleotide
  Sense strand starting at position 377 of SEQ ID NO: 318646
uucguuuccagagaaagcu

SEQ ID NO: 578480 - RNA, 19 nt, Artificial Sequence
  Description of Artificial Sequence: Synthetic oligonucleotide
  Antisense strand to SEQ ID NO: 578479
agcuuucucuggaaacgaa

SEQ ID NO: 578481 - RNA, 19 nt, Artificial Sequence
  Description of Artificial Sequence: Synthetic oligonucleotide
  Sense strand starting at position 600 of SEQ ID NO: 318646
uccaaauuccuccgcagaa

SEQ ID NO: 578482 - RNA, 19 nt, Artificial Sequence
  Description of Artificial Sequence: Synthetic oligonucleotide
  Antisense strand to SEQ ID NO: 578481
uucugcggaggaauuugga

SEQ ID NO: 578483 - RNA, 19 nt, Artificial Sequence
  Description of Artificial Sequence: Synthetic oligonucleotide
  Sense strand starting at position 601 of SEQ ID NO: 318646
ccaaauuccuccgcagaac

SEQ ID NO: 578484 - RNA, 19 nt, Artificial Sequence
  Description of Artificial Sequence: Synthetic oligonucleotide
  Antisense strand to SEQ ID NO: 578483
guucugcggaggaauuugg

SEQ ID NO: 578485 - RNA, 19 nt, Artificial Sequence
  Description of Artificial Sequence: Synthetic oligonucleotide
  Sense strand starting at position 1197 of SEQ ID NO: 318646
ugacuuugucuuggagucu

SEQ ID NO: 578486 - RNA, 19 nt, Artificial Sequence
  Description of Artificial Sequence: Synthetic oligonucleotide
  Antisense strand to SEQ ID NO: 578485
agacuccaagacaaaguca

SEQ ID NO: 578487 - RNA, 19 nt, Artificial Sequence
  Description of Artificial Sequence: Synthetic oligonucleotide
  Sense strand starting at position 1244 of SEQ ID NO: 318646
cggcuuugguauguuauuu

SEQ ID NO: 578488 - RNA, 19 nt, Artificial Sequence
  Description of Artificial Sequence: Synthetic oligonucleotide
  Antisense strand to SEQ ID NO: 578487
aaauaacauaccaaagccg

SEQ ID NO: 578489 - RNA, 19 nt, Artificial Sequence
  Description of Artificial Sequence: Synthetic oligonucleotide
  Sense strand starting at position 1267 of SEQ ID NO: 318646
aggaaagucgcauggauau

SEQ ID NO: 578490 - RNA, 19 nt, Artificial Sequence
  Description of Artificial Sequence: Synthetic oligonucleotide
  Antisense strand to SEQ ID NO: 578489
auauccaugcgacuuuccu

SEQ ID NO: 578491 - RNA, 19 nt, Artificial Sequence
  Description of Artificial Sequence: Synthetic oligonucleotide
  Sense strand starting at position 1308 of SEQ ID NO: 318646
agcuuaagagagcacaauu

SEQ ID NO: 578492 - RNA, 19 nt, Artificial Sequence
  Description of Artificial Sequence: Synthetic oligonucleotide
  Antisense strand to SEQ ID NO: 578491
aauugugcucucuuaagcu

SEQ ID NO: 578493 - RNA, 19 nt, Artificial Sequence
  Description of Artificial Sequence: Synthetic oligonucleotide
  Sense strand starting at position 2019 of SEQ ID NO: 318646
ugccaucuaucauuuguau

SEQ ID NO: 578494 - RNA, 19 nt, Artificial Sequence
  Description of Artificial Sequence: Synthetic oligonucleotide
  Antisense strand to SEQ ID NO: 578493
auacaaaugauagauggca

SEQ ID NO: 578495 - RNA, 19 nt, Artificial Sequence
  Description of Artificial Sequence: Synthetic oligonucleotide
  Sense strand starting at position 2031 of SEQ ID NO: 318646
uuuguaugaccuuaugcaa

SEQ ID NO: 578496 - RNA, 19 nt, Artificial Sequence
  Description of Artificial Sequence: Synthetic oligonucleotide
  Antisense strand to SEQ ID NO: 578495
uugcauaaggucauacaaa

SEQ ID NO: 578497 - RNA, 19 nt, Artificial Sequence
  Description of Artificial Sequence: Synthetic oligonucleotide
  Sense strand starting at position 2034 of SEQ ID NO: 318646
guaugaccuuaugcaaauu

SEQ ID NO: 578498 - RNA, 19 nt, Artificial Sequence
  Description of Artificial Sequence: Synthetic oligonucleotide
  Antisense strand to SEQ ID NO: 578497
aauuugcauaaggucauac

SEQ ID NO: 578499 - RNA, 19 nt, Artificial Sequence
  Description of Artificial Sequence: Synthetic oligonucleotide
  Sense strand starting at position 2247 of SEQ ID NO: 318646
caguauugacuuugaacag

SEQ ID NO: 578500 - RNA, 19 nt, Artificial Sequence
  Description of Artificial Sequence: Synthetic oligonucleotide
  Antisense strand to SEQ ID NO: 578499
cuguucaaagucaauacug

SEQ ID NO: 578501 - RNA, 19 nt, Artificial Sequence
  Description of Artificial Sequence: Synthetic oligonucleotide
  Sense strand starting at position 2290 of SEQ ID NO: 318646
agcagugaaggcuauuaua

SEQ ID NO: 578502 - RNA, 19 nt, Artificial Sequence
  Description of Artificial Sequence: Synthetic oligonucleotide
  Antisense strand to SEQ ID NO: 578501
uauaauagccuucacugcu

SEQ ID NO: 578503 - RNA, 19 nt, Artificial Sequence
  Description of Artificial Sequence: Synthetic oligonucleotide
  Sense strand starting at position 2342 of SEQ ID NO: 318646
cauccuacugcugagagau

SEQ ID NO: 578504 - RNA, 19 nt, Artificial Sequence
  Description of Artificial Sequence: Synthetic oligonucleotide
  Antisense strand to SEQ ID NO: 578503
aucucucagcaguaggaug

SEQ ID NO: 578505 - RNA, 19 nt, Artificial Sequence
  Description of Artificial Sequence: Synthetic oligonucleotide
  Sense strand starting at position 2611 of SEQ ID NO: 318646
ugcacucaguaaucucaga

SEQ ID NO: 578506 - RNA, 19 nt, Artificial Sequence
  Description of Artificial Sequence: Synthetic oligonucleotide
  Antisense strand to SEQ ID NO: 578505
ucugagauuacugagugca

SEQ ID NO: 578507 - RNA, 19 nt, Artificial Sequence
  Description of Artificial Sequence: Synthetic oligonucleotide
  Sense strand starting at position 2829 of SEQ ID NO: 318646
ccgugugcuacacaagaga

SEQ ID NO: 578508 - RNA, 19 nt, Artificial Sequence
  Description of Artificial Sequence: Synthetic oligonucleotide
  Antisense strand to SEQ ID NO: 578507
ucucuuguguagcacacgg

SEQ ID NO: 578509 - RNA, 19 nt, Artificial Sequence
  Description of Artificial Sequence: Synthetic oligonucleotide
  Sense strand starting at position 2844 of SEQ ID NO: 318646
gagagcuuccacugaucua

SEQ ID NO: 578510 - RNA, 19 nt, Artificial Sequence
  Description of Artificial Sequence: Synthetic oligonucleotide
  Antisense strand to SEQ ID NO: 578509
uagaucaguggaagcucuc

SEQ ID NO: 578511 - RNA, 19 nt, Artificial Sequence
  Description of Artificial Sequence: Synthetic oligonucleotide
  Sense strand starting at position 2891 of SEQ ID NO: 318646
ggugaugauuaugcaaauc

SEQ ID NO: 578512 - RNA, 19 nt, Artificial Sequence
  Description of Artificial Sequence: Synthetic oligonucleotide
  Antisense strand to SEQ ID NO: 578511
gauuugcauaaucaucacc

SEQ ID NO: 578513 - RNA, 19 nt, Artificial Sequence
  Description of Artificial Sequence: Synthetic oligonucleotide
  Sense strand starting at position 3053 of SEQ ID NO: 318646
auacauguccuuuaaugug

SEQ ID NO: 578514 - RNA, 19 nt, Artificial Sequence
  Description of Artificial Sequence: Synthetic oligonucleotide
  Antisense strand to SEQ ID NO: 578513
cacauuaaaggacauguau

SEQ ID NO: 578515 - RNA, 19 nt, Artificial Sequence
  Description of Artificial Sequence: Synthetic oligonucleotide
  Sense strand starting at position 3107 of SEQ ID NO: 318646
gcgcuccgucagccuuaua

SEQ ID NO: 578516 - RNA, 19 nt, Artificial Sequence
  Description of Artificial Sequence: Synthetic oligonucleotide
  Antisense strand to SEQ ID NO: 578515
uauaaggcugacggagcgc

SEQ ID NO: 578517 - RNA, 19 nt, Artificial Sequence
  Description of Artificial Sequence: Synthetic oligonucleotide
  Sense strand starting at position 3108 of SEQ ID NO: 318646
cgcuccgucagccuuauaa

SEQ ID NO: 578518 - RNA, 19 nt, Artificial Sequence
  Description of Artificial Sequence: Synthetic oligonucleotide
  Antisense strand to SEQ ID NO: 578517
uuauaaggcugacggagcg

SEQ ID NO: 578519 - RNA, 19 nt, Artificial Sequence
  Description of Artificial Sequence: Synthetic oligonucleotide
  Sense strand starting at position 3110 of SEQ ID NO: 318646
cuccgucagccuuauaauu

SEQ ID NO: 578520 - RNA, 19 nt, Artificial Sequence
  Description of Artificial Sequence: Synthetic oligonucleotide
  Antisense strand to SEQ ID NO: 578519
aauuauaaggcugacggag

SEQ ID NO: 578521 - RNA, 19 nt, Artificial Sequence
  Description of Artificial Sequence: Synthetic oligonucleotide
  Sense strand starting at position 3148 of SEQ ID NO: 318646
cuucguugaucuuugaaca

SEQ ID NO: 578522 - RNA, 19 nt, Artificial Sequence
  Description of Artificial Sequence: Synthetic oligonucleotide
  Antisense strand to SEQ ID NO: 578521
uguucaaagaucaacgaag

SEQ ID NO: 578523 - RNA, 19 nt, Artificial Sequence
  Description of Artificial Sequence: Synthetic oligonucleotide
  Sense strand starting at position 3149 of SEQ ID NO: 318646
uucguugaucuuugaacau

SEQ ID NO: 578524 - RNA, 19 nt, Artificial Sequence
  Description of Artificial Sequence: Synthetic oligonucleotide
  Antisense strand to SEQ ID NO: 578523
auguucaaagaucaacgaa

SEQ ID NO: 578525 - RNA, 19 nt, Artificial Sequence
  Description of Artificial Sequence: Synthetic oligonucleotide
  Sense strand starting at position 3294 of SEQ ID NO: 318646
gcuuuaugugaauaaguac

SEQ ID NO: 578526 - RNA, 19 nt, Artificial Sequence
  Description of Artificial Sequence: Synthetic oligonucleotide
  Antisense strand to SEQ ID NO: 578525
guacuuauucacauaaagc

SEQ ID NO: 578527 - RNA, 19 nt, Artificial Sequence
  Description of Artificial Sequence: Synthetic oligonucleotide
  Sense strand starting at position 3446 of SEQ ID NO: 318646
agauauguacuaggucauu

SEQ ID NO: 578528 - RNA, 19 nt, Artificial Sequence
  Description of Artificial Sequence: Synthetic oligonucleotide
  Antisense strand to SEQ ID NO: 578527
aaugaccuaguacauaucu

SEQ ID NO: 578529 - RNA, 19 nt, Artificial Sequence
  Description of Artificial Sequence: Synthetic oligonucleotide
  Sense strand starting at position 3516 of SEQ ID NO: 318646
agugaauaaugguccagua

SEQ ID NO: 578530 - RNA, 19 nt, Artificial Sequence
  Description of Artificial Sequence: Synthetic oligonucleotide
  Antisense strand to SEQ ID NO: 578529
uacuggaccauuauucacu

SEQ ID NO: 578531 - RNA, 19 nt, Artificial Sequence
  Description of Artificial Sequence: Synthetic oligonucleotide
  Sense strand starting at position 3559 of SEQ ID NO: 318646
guaggugggacuuguugau

SEQ ID NO: 578532 - RNA, 19 nt, Artificial Sequence
  Description of Artificial Sequence: Synthetic oligonucleotide
  Antisense strand to SEQ ID NO: 578531
aucaacaagucccaccuac

SEQ ID NO: 578533 - RNA, 19 nt, Artificial Sequence
  Description of Artificial Sequence: Synthetic oligonucleotide
  Sense strand starting at position 3563 of SEQ ID NO: 318646
gugggacuuguugauucuu

SEQ ID NO: 578534 - RNA, 19 nt, Artificial Sequence
  Description of Artificial Sequence: Synthetic oligonucleotide
  Antisense strand to SEQ ID NO: 578533
aagaaucaacaagucccac

SEQ ID NO: 578535 - RNA, 19 nt, Artificial Sequence
  Description of Artificial Sequence: Synthetic oligonucleotide
  Sense strand starting at position 3565 of SEQ ID NO: 318646
gggacuuguugauucuugu

SEQ ID NO: 578536 - RNA, 19 nt, Artificial Sequence
  Description of Artificial Sequence: Synthetic oligonucleotide
  Antisense strand to SEQ ID NO: 578535
acaagaaucaacaaguccc

SEQ ID NO: 578537 - RNA, 19 nt, Artificial Sequence
  Description of Artificial Sequence: Synthetic oligonucleotide
  Sense strand starting at position 3618 of SEQ ID NO: 318646
gcaacauguauggaaguca

SEQ ID NO: 578538 - RNA, 19 nt, Artificial Sequence
  Description of Artificial Sequence: Synthetic oligonucleotide
  Antisense strand to SEQ ID NO: 578537
ugacuuccauacauguugc

SEQ ID NO: 578539 - RNA, 19 nt, Artificial Sequence
  Description of Artificial Sequence: Synthetic oligonucleotide
  Sense strand starting at position 3741 of SEQ ID NO: 318646
uccugcaagugucuaauaa

SEQ ID NO: 578540 - RNA, 19 nt, Artificial Sequence
  Description of Artificial Sequence: Synthetic oligonucleotide
  Antisense strand to SEQ ID NO: 578539
uuauuagacacuugcagga

SEQ ID NO: 578541 - RNA, 19 nt, Artificial Sequence
  Description of Artificial Sequence: Synthetic oligonucleotide
  Sense strand starting at position 3742 of SEQ ID NO: 318646
ccugcaagugucuaauaau

SEQ ID NO: 578542 - RNA, 19 nt, Artificial Sequence
  Description of Artificial Sequence: Synthetic oligonucleotide
  Antisense strand to SEQ ID NO: 578541
auuauuagacacuugcagg

SEQ ID NO: 578543 - RNA, 19 nt, Artificial Sequence
  Description of Artificial Sequence: Synthetic oligonucleotide
  Sense strand starting at position 3775 of SEQ ID NO: 318646
uugugucaagauggaagaa

SEQ ID NO: 578544 - RNA, 19 nt, Artificial Sequence
  Description of Artificial Sequence: Synthetic oligonucleotide
  Antisense strand to SEQ ID NO: 578543
uucuuccaucuugacacaa

SEQ ID NO: 578545 - RNA, 19 nt, Artificial Sequence
  Description of Artificial Sequence: Synthetic oligonucleotide
  Sense strand starting at position 3807 of SEQ ID NO: 318646
uaagauucugaagguuuau

SEQ ID NO: 578546 - RNA, 19 nt, Artificial Sequence
  Description of Artificial Sequence: Synthetic oligonucleotide
  Antisense strand to SEQ ID NO: 578545
auaaaccuucagaaucuua

SEQ ID NO: 578547 - RNA, 19 nt, Artificial Sequence
  Description of Artificial Sequence: Synthetic oligonucleotide
  Sense strand starting at position 3856 of SEQ ID NO: 318646
gugugucauauguaaauug

SEQ ID NO: 578548 - RNA, 19 nt, Artificial Sequence
  Description of Artificial Sequence: Synthetic oligonucleotide
  Antisense strand to SEQ ID NO: 578547
caauuuacauaugacacac

SEQ ID NO: 578549 - RNA, 19 nt, Artificial Sequence
  Description of Artificial Sequence: Synthetic oligonucleotide
  Sense strand starting at position 3944 of SEQ ID NO: 318646
ccaagucaccuugguucua

SEQ ID NO: 578550 - RNA, 19 nt, Artificial Sequence
  Description of Artificial Sequence: Synthetic oligonucleotide
  Antisense strand to SEQ ID NO: 578549
uagaaccaaggugacuugg

SEQ ID NO: 578551 - RNA, 19 nt, Artificial Sequence
  Description of Artificial Sequence: Synthetic oligonucleotide
  Sense strand starting at position 3953 of SEQ ID NO: 318646
cuugguucuaaggaagguu

SEQ ID NO: 578552 - RNA, 19 nt, Artificial Sequence
  Description of Artificial Sequence: Synthetic oligonucleotide
  Antisense strand to SEQ ID NO: 578551
aaccuuccuuagaaccaag

SEQ ID NO: 578553 - RNA, 19 nt, Artificial Sequence
  Description of Artificial Sequence: Synthetic oligonucleotide
  Sense strand starting at position 3956 of SEQ ID NO: 318646
gguucuaaggaagguuuau

SEQ ID NO: 578554 - RNA, 19 nt, Artificial Sequence
  Description of Artificial Sequence: Synthetic oligonucleotide
  Antisense strand to SEQ ID NO: 578553
auaaaccuuccuuagaacc

SEQ ID NO: 578555 - RNA, 19 nt, Artificial Sequence
  Description of Artificial Sequence: Synthetic oligonucleotide
  Sense strand starting at position 3980 of SEQ ID NO: 318646
ccaacucucgacugaacuu

SEQ ID NO: 578556 - RNA, 19 nt, Artificial Sequence
  Description of Artificial Sequence: Synthetic oligonucleotide
  Antisense strand to SEQ ID NO: 578555
aaguucagucgagaguugg

SEQ ID NO: 578557 - RNA, 19 nt, Artificial Sequence
  Description of Artificial Sequence: Synthetic oligonucleotide
  Sense strand starting at position 29 of SEQ ID NO: 318647
ugugcugauauccaagagu

SEQ ID NO: 578558 - RNA, 19 nt, Artificial Sequence
  Description of Artificial Sequence: Synthetic oligonucleotide
  Antisense strand to SEQ ID NO: 578557
acucuuggauaucagcaca

SEQ ID NO: 578559 - RNA, 19 nt, Artificial Sequence
  Description of Artificial Sequence: Synthetic oligonucleotide
  Sense strand starting at position 45 of SEQ ID NO: 318647
agugaaauuuaccaggaac

SEQ ID NO: 578560 - RNA, 19 nt, Artificial Sequence
  Description of Artificial Sequence: Synthetic oligonucleotide
  Antisense strand to SEQ ID NO: 578559
guuccugguaaauuucacu

SEQ ID NO: 578561 - RNA, 19 nt, Artificial Sequence
  Description of Artificial Sequence: Synthetic oligonucleotide
  Sense strand starting at position 168 of SEQ ID NO: 318647
auuuacaguucguucucaa

SEQ ID NO: 578562 - RNA, 19 nt, Artificial Sequence
  Description of Artificial Sequence: Synthetic oligonucleotide
  Antisense strand to SEQ ID NO: 578561
uugagaacgaacuguaaau

SEQ ID NO: 578563 - RNA, 19 nt, Artificial Sequence
  Description of Artificial Sequence: Synthetic oligonucleotide
  Sense strand starting at position 570 of SEQ ID NO: 318647
gcucuaggcaucuaguaga

SEQ ID NO: 578564 - RNA, 19 nt, Artificial Sequence
  Description of Artificial Sequence: Synthetic oligonucleotide
  Antisense strand to SEQ ID NO: 578563
ucuacuagaugccuagagc

SEQ ID NO: 578565 - RNA, 19 nt, Artificial Sequence
  Description of Artificial Sequence: Synthetic oligonucleotide
  Sense strand starting at position 575 of SEQ ID NO: 318647
aggcaucuaguagacgaau

SEQ ID NO: 578566 - RNA, 19 nt, Artificial Sequence
  Description of Artificial Sequence: Synthetic oligonucleotide
  Antisense strand to SEQ ID NO: 578565
auucgucuacuagaugccu

SEQ ID NO: 578567 - RNA, 19 nt, Artificial Sequence
  Description of Artificial Sequence: Synthetic oligonucleotide
  Sense strand starting at position 578 of SEQ ID NO: 318647
caucuaguagacgaaugua

SEQ ID NO: 578568 - RNA, 19 nt, Artificial Sequence
  Description of Artificial Sequence: Synthetic oligonucleotide
  Antisense strand to SEQ ID NO: 578567
uacauucgucuacuagaug

SEQ ID NO: 578569 - RNA, 19 nt, Artificial Sequence
  Description of Artificial Sequence: Synthetic oligonucleotide
  Sense strand starting at position 581 of SEQ ID NO: 318647
cuaguagacgaauguacau

SEQ ID NO: 578570 - RNA, 19 nt, Artificial Sequence
  Description of Artificial Sequence: Synthetic oligonucleotide
  Antisense strand to SEQ ID NO: 578569
auguacauucgucuacuag

SEQ ID NO: 578571 - RNA, 19 nt, Artificial Sequence
  Description of Artificial Sequence: Synthetic oligonucleotide
  Sense strand starting at position 777 of SEQ ID NO: 318647
aucuguugagcagaacaau

SEQ ID NO: 578572 - RNA, 19 nt, Artificial Sequence
  Description of Artificial Sequence: Synthetic oligonucleotide
  Antisense strand to SEQ ID NO: 578571
auuguucugcucaacagau

SEQ ID NO: 578573 - RNA, 19 nt, Artificial Sequence
  Description of Artificial Sequence: Synthetic oligonucleotide
  Sense strand starting at position 1161 of SEQ ID NO: 318647
agagguguccuacaguuaa

SEQ ID NO: 578574 - RNA, 19 nt, Artificial Sequence
  Description of Artificial Sequence: Synthetic oligonucleotide
  Antisense strand to SEQ ID NO: 578573
uuaacuguaggacaccucu

SEQ ID NO: 578575 - RNA, 19 nt, Artificial Sequence
  Description of Artificial Sequence: Synthetic oligonucleotide
  Sense strand starting at position 1174 of SEQ ID NO: 318647
aguuaauaaacgcauggaa

SEQ ID NO: 578576 - RNA, 19 nt, Artificial Sequence
  Description of Artificial Sequence: Synthetic oligonucleotide
  Antisense strand to SEQ ID NO: 578575
uuccaugcguuuauuaacu

SEQ ID NO: 578577 - RNA, 19 nt, Artificial Sequence
  Description of Artificial Sequence: Synthetic oligonucleotide
  Sense strand starting at position 1283 of SEQ ID NO: 318647
ugaaacugucuacaugcaa

SEQ ID NO: 578578 - RNA, 19 nt, Artificial Sequence
  Description of Artificial Sequence: Synthetic oligonucleotide
  Antisense strand to SEQ ID NO: 578577
uugcauguagacaguuuca

SEQ ID NO: 578579 - RNA, 19 nt, Artificial Sequence
  Description of Artificial Sequence: Synthetic oligonucleotide
  Sense strand starting at position 1463 of SEQ ID NO: 318647
cuauguuagucaucugaac

SEQ ID NO: 578580 - RNA, 19 nt, Artificial Sequence
  Description of Artificial Sequence: Synthetic oligonucleotide
  Antisense strand to SEQ ID NO: 578579
guucagaugacuaacauag

SEQ ID NO: 578581 - RNA, 19 nt, Artificial Sequence
  Description of Artificial Sequence: Synthetic oligonucleotide
  Sense strand starting at position 2193 of SEQ ID NO: 318647
uucuguucucaggagaacu

SEQ ID NO: 578582 - RNA, 19 nt, Artificial Sequence
  Description of Artificial Sequence: Synthetic oligonucleotide
  Antisense strand to SEQ ID NO: 578581
aguucuccugagaacagaa

SEQ ID NO: 578583 - RNA, 19 nt, Artificial Sequence
  Description of Artificial Sequence: Synthetic oligonucleotide
  Sense strand starting at position 2256 of SEQ ID NO: 318647
uuugcuuuggaagaguaua

SEQ ID NO: 578584 - RNA, 19 nt, Artificial Sequence
  Description of Artificial Sequence: Synthetic oligonucleotide
  Antisense strand to SEQ ID NO: 578583
uauacucuuccaaagcaaa

SEQ ID NO: 578585 - RNA, 19 nt, Artificial Sequence
  Description of Artificial Sequence: Synthetic oligonucleotide
  Sense strand starting at position 2363 of SEQ ID NO: 318647
ucuaauaguuucuuuagga

SEQ ID NO: 578586 - RNA, 19 nt, Artificial Sequence
  Description of Artificial Sequence: Synthetic oligonucleotide
  Antisense strand to SEQ ID NO: 578585
uccuaaagaaacuauuaga

SEQ ID NO: 578587 - RNA, 19 nt, Artificial Sequence
  Description of Artificial Sequence: Synthetic oligonucleotide
  Sense strand starting at position 2364 of SEQ ID NO: 318647
cuaauaguuucuuuaggag

SEQ ID NO: 578588 - RNA, 19 nt, Artificial Sequence
  Description of Artificial Sequence: Synthetic oligonucleotide
  Antisense strand to SEQ ID NO: 578587
cuccuaaagaaacuauuag

SEQ ID NO: 578589 - RNA, 19 nt, Artificial Sequence
  Description of Artificial Sequence: Synthetic oligonucleotide
  Sense strand starting at position 2385 of SEQ ID NO: 318647
uguuuauuuacgugggcau

SEQ ID NO: 578590 - RNA, 19 nt, Artificial Sequence
  Description of Artificial Sequence: Synthetic oligonucleotide
  Antisense strand to SEQ ID NO: 578589
augcccacguaaauaaaca

SEQ ID NO: 578591 - RNA, 19 nt, Artificial Sequence
  Description of Artificial Sequence: Synthetic oligonucleotide
  Sense strand starting at position 2386 of SEQ ID NO: 318647
guuuauuuacgugggcauu

SEQ ID NO: 578592 - RNA, 19 nt, Artificial Sequence
  Description of Artificial Sequence: Synthetic oligonucleotide
  Antisense strand to SEQ ID NO: 578591
aaugcccacguaaauaaac

SEQ ID NO: 578593 - RNA, 19 nt, Artificial Sequence
  Description of Artificial Sequence: Synthetic oligonucleotide
  Sense strand starting at position 2494 of SEQ ID NO: 318647
gaucccuauuagguaugua

SEQ ID NO: 578594 - RNA, 19 nt, Artificial Sequence
  Description of Artificial Sequence: Synthetic oligonucleotide
  Antisense strand to SEQ ID NO: 578593
uacauaccuaauagggauc

SEQ ID NO: 578595 - RNA, 19 nt, Artificial Sequence
  Description of Artificial Sequence: Synthetic oligonucleotide
  Sense strand starting at position 2497 of SEQ ID NO: 318647
cccuauuagguauguauga

SEQ ID NO: 578596 - RNA, 19 nt, Artificial Sequence
  Description of Artificial Sequence: Synthetic oligonucleotide
  Antisense strand to SEQ ID NO: 578595
ucauacauaccuaauaggg

SEQ ID NO: 578597 - RNA, 19 nt, Artificial Sequence
  Description of Artificial Sequence: Synthetic oligonucleotide
  Sense strand starting at position 2498 of SEQ ID NO: 318647
ccuauuagguauguaugau

SEQ ID NO: 578598 - RNA, 19 nt, Artificial Sequence
  Description of Artificial Sequence: Synthetic oligonucleotide
  Antisense strand to SEQ ID NO: 578597
aucauacauaccuaauagg

SEQ ID NO: 578599 - RNA, 19 nt, Artificial Sequence
  Description of Artificial Sequence: Synthetic oligonucleotide
  Sense strand starting at position 2504 of SEQ ID NO: 318647
agguauguaugaucucaau

SEQ ID NO: 578600 - RNA, 19 nt, Artificial Sequence
  Description of Artificial Sequence: Synthetic oligonucleotide
  Antisense strand to SEQ ID NO: 578599
auugagaucauacauaccu

SEQ ID NO: 578601 - RNA, 19 nt, Artificial Sequence
  Description of Artificial Sequence: Synthetic oligonucleotide
  Sense strand starting at position 2552 of SEQ ID NO: 318647
uugaccuuucuugguaaca

SEQ ID NO: 578602 - RNA, 19 nt, Artificial Sequence
  Description of Artificial Sequence: Synthetic oligonucleotide
  Antisense strand to SEQ ID NO: 578601
uguuaccaagaaaggucaa

SEQ ID NO: 578603 - RNA, 19 nt, Artificial Sequence
  Description of Artificial Sequence: Synthetic oligonucleotide
  Sense strand starting at position 2553 of SEQ ID NO: 318647
ugaccuuucuugguaacac

SEQ ID NO: 578604 - RNA, 19 nt, Artificial Sequence
  Description of Artificial Sequence: Synthetic oligonucleotide
  Antisense strand to SEQ ID NO: 578603
guguuaccaagaaagguca

SEQ ID NO: 578605 - RNA, 19 nt, Artificial Sequence
  Description of Artificial Sequence: Synthetic oligonucleotide
  Sense strand starting at position 2781 of SEQ ID NO: 318647
uuguguauacgugcaaguu

SEQ ID NO: 578606 - RNA, 19 nt, Artificial Sequence
  Description of Artificial Sequence: Synthetic oligonucleotide
  Antisense strand to SEQ ID NO: 578605
aacuugcacguauacacaa

SEQ ID NO: 578607 - RNA, 19 nt, Artificial Sequence
  Description of Artificial Sequence: Synthetic oligonucleotide
  Sense strand starting at position 2789 of SEQ ID NO: 318647
acgugcaaguuauuuaaca

SEQ ID NO: 578608 - RNA, 19 nt, Artificial Sequence
  Description of Artificial Sequence: Synthetic oligonucleotide
  Antisense strand to SEQ ID NO: 578607
uguuaaauaacuugcacgu

SEQ ID NO: 578609 - RNA, 19 nt, Artificial Sequence
  Description of Artificial Sequence: Synthetic oligonucleotide
  Sense strand starting at position 2790 of SEQ ID NO: 318647
cgugcaaguuauuuaacac

SEQ ID NO: 578610 - RNA, 19 nt, Artificial Sequence
  Description of Artificial Sequence: Synthetic oligonucleotide
  Antisense strand to SEQ ID NO: 578609
guguuaaauaacuugcacg

SEQ ID NO: 578611 - RNA, 19 nt, Artificial Sequence
  Description of Artificial Sequence: Synthetic oligonucleotide
  Sense strand starting at position 2825 of SEQ ID NO: 318647
acuuccguaagaugagaau

SEQ ID NO: 578612 - RNA, 19 nt, Artificial Sequence
  Description of Artificial Sequence: Synthetic oligonucleotide
  Antisense strand to SEQ ID NO: 578611
auucucaucuuacggaagu

SEQ ID NO: 578613 - RNA, 19 nt, Artificial Sequence
  Description of Artificial Sequence: Synthetic oligonucleotide
  Sense strand starting at position 2856 of SEQ ID NO: 318647
gucacagaauugcuauuaa

SEQ ID NO: 578614 - RNA, 19 nt, Artificial Sequence
  Description of Artificial Sequence: Synthetic oligonucleotide
  Antisense strand to SEQ ID NO: 578613
uuaauagcaauucugugac

SEQ ID NO: 578615 - RNA, 19 nt, Artificial Sequence
  Description of Artificial Sequence: Synthetic oligonucleotide
  Sense strand starting at position 2911 of SEQ ID NO: 318647
gccugaugcacauagaguu

SEQ ID NO: 578616 - RNA, 19 nt, Artificial Sequence
  Description of Artificial Sequence: Synthetic oligonucleotide
  Antisense strand to SEQ ID NO: 578615
aacucuaugugcaucaggc

SEQ ID NO: 578617 - RNA, 19 nt, Artificial Sequence
  Description of Artificial Sequence: Synthetic oligonucleotide
  Sense strand starting at position 2934 of SEQ ID NO: 318647
agcaguaaugagcauuauu

SEQ ID NO: 578618 - RNA, 19 nt, Artificial Sequence
  Description of Artificial Sequence: Synthetic oligonucleotide
  Antisense strand to SEQ ID NO: 578617
aauaaugcucauuacugcu

SEQ ID NO: 578619 - RNA, 19 nt, Artificial Sequence
  Description of Artificial Sequence: Synthetic oligonucleotide
  Sense strand starting at position 2980 of SEQ ID NO: 318647
aauacuaauuugggaagga

SEQ ID NO: 578620 - RNA, 19 nt, Artificial Sequence
  Description of Artificial Sequence: Synthetic oligonucleotide
  Antisense strand to SEQ ID NO: 578619
uccuucccaaauuaguauu

SEQ ID NO: 578621 - RNA, 19 nt, Artificial Sequence
  Description of Artificial Sequence: Synthetic oligonucleotide
  Sense strand starting at position 3213 of SEQ ID NO: 318647
agagaaagcucuuccugga

SEQ ID NO: 578622 - RNA, 19 nt, Artificial Sequence
  Description of Artificial Sequence: Synthetic oligonucleotide
  Antisense strand to SEQ ID NO: 578621
uccaggaagagcuuucucu

SEQ ID NO: 578623 - RNA, 19 nt, Artificial Sequence
  Description of Artificial Sequence: Synthetic oligonucleotide
  Sense strand starting at position 3277 of SEQ ID NO: 318647
uggcaauuccaaggguaag

SEQ ID NO: 578624 - RNA, 19 nt, Artificial Sequence
  Description of Artificial Sequence: Synthetic oligonucleotide
  Antisense strand to SEQ ID NO: 578623
cuuacccuuggaauugcca

SEQ ID NO: 578625 - RNA, 19 nt, Artificial Sequence
  Description of Artificial Sequence: Synthetic oligonucleotide
  Sense strand starting at position 3305 of SEQ ID NO: 318647
gcagaaauacugcaucuaa

SEQ ID NO: 578626 - RNA, 19 nt, Artificial Sequence
  Description of Artificial Sequence: Synthetic oligonucleotide
  Antisense strand to SEQ ID NO: 578625
uuagaugcaguauuucugc

SEQ ID NO: 578627 - RNA, 19 nt, Artificial Sequence
  Description of Artificial Sequence: Synthetic oligonucleotide
  Sense strand starting at position 3316 of SEQ ID NO: 318647
gcaucuaaacaguggaaca

SEQ ID NO: 578628 - RNA, 19 nt, Artificial Sequence
  Description of Artificial Sequence: Synthetic oligonucleotide
  Antisense strand to SEQ ID NO: 578627
uguuccacuguuuagaugc

SEQ ID NO: 578629 - RNA, 19 nt, Artificial Sequence
  Description of Artificial Sequence: Synthetic oligonucleotide
  Sense strand starting at position 3814 of SEQ ID NO: 318647
cuacuugauuugggaacaa

SEQ ID NO: 578630 - RNA, 19 nt, Artificial Sequence
  Description of Artificial Sequence: Synthetic oligonucleotide
  Antisense strand to SEQ ID NO: 578629
uuguucccaaaucaaguag

SEQ ID NO: 578631 - RNA, 19 nt, Artificial Sequence
  Description of Artificial Sequence: Synthetic oligonucleotide
  Sense strand starting at position 3894 of SEQ ID NO: 318647
gcagucaaaccuuacagaa

SEQ ID NO: 578632 - RNA, 19 nt, Artificial Sequence
  Description of Artificial Sequence: Synthetic oligonucleotide
  Antisense strand to SEQ ID NO: 578631
uucuguaagguuugacugc

SEQ ID NO: 578633 - RNA, 19 nt, Artificial Sequence
  Description of Artificial Sequence: Synthetic oligonucleotide
  Sense strand starting at position 3907 of SEQ ID NO: 318647
acagaauagccuuauguuu

SEQ ID NO: 578634 - RNA, 19 nt, Artificial Sequence
  Description of Artificial Sequence: Synthetic oligonucleotide
  Antisense strand to SEQ ID NO: 578633
aaacauaaggcuauucugu

SEQ ID NO: 578635 - RNA, 19 nt, Artificial Sequence
  Description of Artificial Sequence: Synthetic oligonucleotide
  Sense strand starting at position 3955 of SEQ ID NO: 318647
uguagauaugacuaugcac

SEQ ID NO: 578636 - RNA, 19 nt, Artificial Sequence
  Description of Artificial Sequence: Synthetic oligonucleotide
  Antisense strand to SEQ ID NO: 578635
gugcauagucauaucuaca

SEQ ID NO: 578637 - RNA, 19 nt, Artificial Sequence
  Description of Artificial Sequence: Synthetic oligonucleotide
  Sense strand starting at position 49 of SEQ ID NO: 318648
agcagagcgccauaucauu

SEQ ID NO: 578638 - RNA, 19 nt, Artificial Sequence
  Description of Artificial Sequence: Synthetic oligonucleotide
  Antisense strand to SEQ ID NO: 578637
aaugauauggcgcucugcu

SEQ ID NO: 578639 - RNA, 19 nt, Artificial Sequence
  Description of Artificial Sequence: Synthetic oligonucleotide
  Sense strand starting at position 71 of SEQ ID NO: 318648
ggccgaucugcagaaugua

SEQ ID NO: 578640 - RNA, 19 nt, Artificial Sequence
  Description of Artificial Sequence: Synthetic oligonucleotide
  Antisense strand to SEQ ID NO: 578639
uacauucugcagaucggcc

SEQ ID NO: 578641 - RNA, 19 nt, Artificial Sequence
  Description of Artificial Sequence: Synthetic oligonucleotide
  Sense strand starting at position 74 of SEQ ID NO: 318648
cgaucugcagaauguaaau

SEQ ID NO: 578642 - RNA, 19 nt, Artificial Sequence
  Description of Artificial Sequence: Synthetic oligonucleotide
  Antisense strand to SEQ ID NO: 578641
auuuacauucugcagaucg

SEQ ID NO: 578643 - RNA, 19 nt, Artificial Sequence
  Description of Artificial Sequence: Synthetic oligonucleotide
  Sense strand starting at position 80 of SEQ ID NO: 318648
gcagaauguaaaugaugac

SEQ ID NO: 578644 - RNA, 19 nt, Artificial Sequence
  Description of Artificial Sequence: Synthetic oligonucleotide
  Antisense strand to SEQ ID NO: 578643
gucaucauuuacauucugc

SEQ ID NO: 578645 - RNA, 19 nt, Artificial Sequence
  Description of Artificial Sequence: Synthetic oligonucleotide
  Sense strand starting at position 83 of SEQ ID NO: 318648
gaauguaaaugaugacaag

SEQ ID NO: 578646 - RNA, 19 nt, Artificial Sequence
  Description of Artificial Sequence: Synthetic oligonucleotide
  Antisense strand to SEQ ID NO: 578645
cuugucaucauuuacauuc

SEQ ID NO: 578647 - RNA, 19 nt, Artificial Sequence
  Description of Artificial Sequence: Synthetic oligonucleotide
  Sense strand starting at position 219 of SEQ ID NO: 318648
gauguugcuaugggaaugu

SEQ ID NO: 578648 - RNA, 19 nt, Artificial Sequence
  Description of Artificial Sequence: Synthetic oligonucleotide
  Antisense strand to SEQ ID NO: 578647
acauucccauagcaacauc

SEQ ID NO: 578649 - RNA, 19 nt, Artificial Sequence
  Description of Artificial Sequence: Synthetic oligonucleotide
  Sense strand starting at position 223 of SEQ ID NO: 318648
uugcuaugggaauguauaa

SEQ ID NO: 578650 - RNA, 19 nt, Artificial Sequence
  Description of Artificial Sequence: Synthetic oligonucleotide
  Antisense strand to SEQ ID NO: 578649
uuauacauucccauagcaa

SEQ ID NO: 578651 - RNA, 19 nt, Artificial Sequence
  Description of Artificial Sequence: Synthetic oligonucleotide
  Sense strand starting at position 654 of SEQ ID NO: 318648
aagacuacauggugaaaca

SEQ ID NO: 578652 - RNA, 19 nt, Artificial Sequence
  Description of Artificial Sequence: Synthetic oligonucleotide
  Antisense strand to SEQ ID NO: 578651
uguuucaccauguagucuu

SEQ ID NO: 578653 - RNA, 19 nt, Artificial Sequence
  Description of Artificial Sequence: Synthetic oligonucleotide
  Sense strand starting at position 737 of SEQ ID NO: 318648
cuaacuggugucuaccaaa

SEQ ID NO: 578654 - RNA, 19 nt, Artificial Sequence
  Description of Artificial Sequence: Synthetic oligonucleotide
  Antisense strand to SEQ ID NO: 578653
uuugguagacaccaguuag

SEQ ID NO: 578655 - RNA, 19 nt, Artificial Sequence
  Description of Artificial Sequence: Synthetic oligonucleotide
  Sense strand starting at position 744 of SEQ ID NO: 318648
gugucuaccaaauggagaa

SEQ ID NO: 578656 - RNA, 19 nt, Artificial Sequence
  Description of Artificial Sequence: Synthetic oligonucleotide
  Antisense strand to SEQ ID NO: 578655
uucuccauuugguagacac

SEQ ID NO: 578657 - RNA, 19 nt, Artificial Sequence
  Description of Artificial Sequence: Synthetic oligonucleotide
  Sense strand starting at position 783 of SEQ ID NO: 318648
ccagaacugcugugauuga

SEQ ID NO: 578658 - RNA, 19 nt, Artificial Sequence
  Description of Artificial Sequence: Synthetic oligonucleotide
  Antisense strand to SEQ ID NO: 578657
ucaaucacagcaguucugg

SEQ ID NO: 578659 - RNA, 19 nt, Artificial Sequence
  Description of Artificial Sequence: Synthetic oligonucleotide
  Sense strand starting at position 790 of SEQ ID NO: 318648
ugcugugauugacuugaaa

SEQ ID NO: 578660 - RNA, 19 nt, Artificial Sequence
  Description of Artificial Sequence: Synthetic oligonucleotide
  Antisense strand to SEQ ID NO: 578659
uuucaagucaaucacagca

SEQ ID NO: 578661 - RNA, 19 nt, Artificial Sequence
  Description of Artificial Sequence: Synthetic oligonucleotide
  Sense strand starting at position 813 of SEQ ID NO: 318648
ccagcuuuccaagagacua

SEQ ID NO: 578662 - RNA, 19 nt, Artificial Sequence
  Description of Artificial Sequence: Synthetic oligonucleotide
  Antisense strand to SEQ ID NO: 578661
uagucucuuggaaagcugg

SEQ ID NO: 578663 - RNA, 19 nt, Artificial Sequence
  Description of Artificial Sequence: Synthetic oligonucleotide
  Sense strand starting at position 998 of SEQ ID NO: 318648
cuaacaccagcguauaauu

SEQ ID NO: 578664 - RNA, 19 nt, Artificial Sequence
  Description of Artificial Sequence: Synthetic oligonucleotide
  Antisense strand to SEQ ID NO: 578663
aauuauacgcugguguuag

SEQ ID NO: 578665 - RNA, 19 nt, Artificial Sequence
  Description of Artificial Sequence: Synthetic oligonucleotide
  Sense strand starting at position 1044 of SEQ ID NO: 318648
ugucaccuguucucuguua

SEQ ID NO: 578666 - RNA, 19 nt, Artificial Sequence
  Description of Artificial Sequence: Synthetic oligonucleotide
  Antisense strand to SEQ ID NO: 578665
uaacagagaacaggugaca

SEQ ID NO: 578667 - RNA, 19 nt, Artificial Sequence
  Description of Artificial Sequence: Synthetic oligonucleotide
  Sense strand starting at position 1269 of SEQ ID NO: 318648
gccggaaacauauagcguu

SEQ ID NO: 578668 - RNA, 19 nt, Artificial Sequence
  Description of Artificial Sequence: Synthetic oligonucleotide
  Antisense strand to SEQ ID NO: 578667
aacgcuauauguuuccggc

SEQ ID NO: 578669 - RNA, 19 nt, Artificial Sequence
  Description of Artificial Sequence: Synthetic oligonucleotide
  Sense strand starting at position 1419 of SEQ ID NO: 318648
gcucuuucguuuccagaga

SEQ ID NO: 578670 - RNA, 19 nt, Artificial Sequence
  Description of Artificial Sequence: Synthetic oligonucleotide
  Antisense strand to SEQ ID NO: 578669
ucucuggaaacgaaagagc

SEQ ID NO: 578671 - RNA, 19 nt, Artificial Sequence
  Description of Artificial Sequence: Synthetic oligonucleotide
  Sense strand starting at position 1424 of SEQ ID NO: 318648
uucguuuccagagaaagcu

SEQ ID NO: 578672 - RNA, 19 nt, Artificial Sequence
  Description of Artificial Sequence: Synthetic oligonucleotide
  Antisense strand to SEQ ID NO: 578671
agcuuucucuggaaacgaa

SEQ ID NO: 578673 - RNA, 19 nt, Artificial Sequence
  Description of Artificial Sequence: Synthetic oligonucleotide
  Sense strand starting at position 1647 of SEQ ID NO: 318648
uccaaauuccuccgcagaa

SEQ ID NO: 578674 - RNA, 19 nt, Artificial Sequence
  Description of Artificial Sequence: Synthetic oligonucleotide
  Antisense strand to SEQ ID NO: 578673
uucugcggaggaauuugga

SEQ ID NO: 578675 - RNA, 19 nt, Artificial Sequence
  Description of Artificial Sequence: Synthetic oligonucleotide
  Sense strand starting at position 1648 of SEQ ID NO: 318648
ccaaauuccuccgcagaac

SEQ ID NO: 578676 - RNA, 19 nt, Artificial Sequence
  Description of Artificial Sequence: Synthetic oligonucleotide
  Antisense strand to SEQ ID NO: 578675
guucugcggaggaauuugg

SEQ ID NO: 578677 - RNA, 19 nt, Artificial Sequence
  Description of Artificial Sequence: Synthetic oligonucleotide
  Sense strand starting at position 2244 of SEQ ID NO: 318648
ugacuuugucuuggagucu

SEQ ID NO: 578678 - RNA, 19 nt, Artificial Sequence
  Description of Artificial Sequence: Synthetic oligonucleotide
  Antisense strand to SEQ ID NO: 578677
agacuccaagacaaaguca

SEQ ID NO: 578679 - RNA, 19 nt, Artificial Sequence
  Description of Artificial Sequence: Synthetic oligonucleotide
  Sense strand starting at position 2291 of SEQ ID NO: 318648
cggcuuugguauguuauuu

SEQ ID NO: 578680 - RNA, 19 nt, Artificial Sequence
  Description of Artificial Sequence: Synthetic oligonucleotide
  Antisense strand to SEQ ID NO: 578679
aaauaacauaccaaagccg

SEQ ID NO: 578681 - RNA, 19 nt, Artificial Sequence
  Description of Artificial Sequence: Synthetic oligonucleotide
  Sense strand starting at position 2314 of SEQ ID NO: 318648
aggaaagucgcauggauau

SEQ ID NO: 578682 - RNA, 19 nt, Artificial Sequence
  Description of Artificial Sequence: Synthetic oligonucleotide
  Antisense strand to SEQ ID NO: 578681
auauccaugcgacuuuccu

SEQ ID NO: 578683 - RNA, 19 nt, Artificial Sequence
  Description of Artificial Sequence: Synthetic oligonucleotide
  Sense strand starting at position 2355 of SEQ ID NO: 318648
agcuuaagagagcacaauu

SEQ ID NO: 578684 - RNA, 19 nt, Artificial Sequence
  Description of Artificial Sequence: Synthetic oligonucleotide
  Antisense strand to SEQ ID NO: 578683
aauugugcucucuuaagcu

SEQ ID NO: 578685 - RNA, 19 nt, Artificial Sequence
  Description of Artificial Sequence: Synthetic oligonucleotide
  Sense strand starting at position 3066 of SEQ ID NO: 318648
ugccaucuaucauuuguau

SEQ ID NO: 578686 - RNA, 19 nt, Artificial Sequence
  Description of Artificial Sequence: Synthetic oligonucleotide
  Antisense strand to SEQ ID NO: 578685
auacaaaugauagauggca

SEQ ID NO: 578687 - RNA, 19 nt, Artificial Sequence
  Description of Artificial Sequence: Synthetic oligonucleotide
  Sense strand starting at position 3078 of SEQ ID NO: 318648
uuuguaugaccuuaugcaa

SEQ ID NO: 578688 - RNA, 19 nt, Artificial Sequence
  Description of Artificial Sequence: Synthetic oligonucleotide
  Antisense strand to SEQ ID NO: 578687
uugcauaaggucauacaaa

SEQ ID NO: 578689 - RNA, 19 nt, Artificial Sequence
  Description of Artificial Sequence: Synthetic oligonucleotide
  Sense strand starting at position 3081 of SEQ ID NO: 318648
guaugaccuuaugcaaauu

SEQ ID NO: 578690 - RNA, 19 nt, Artificial Sequence
  Description of Artificial Sequence: Synthetic oligonucleotide
  Antisense strand to SEQ ID NO: 578689
aauuugcauaaggucauac

SEQ ID NO: 578691 - RNA, 19 nt, Artificial Sequence
  Description of Artificial Sequence: Synthetic oligonucleotide
  Sense strand starting at position 3294 of SEQ ID NO: 318648
caguauugacuuugaacag

SEQ ID NO: 578692 - RNA, 19 nt, Artificial Sequence
  Description of Artificial Sequence: Synthetic oligonucleotide
  Antisense strand to SEQ ID NO: 578691
cuguucaaagucaauacug

SEQ ID NO: 578693 - RNA, 19 nt, Artificial Sequence
  Description of Artificial Sequence: Synthetic oligonucleotide
  Sense strand starting at position 3295 of SEQ ID NO: 318648
aguauugacuuugaacaga

SEQ ID NO: 578694 - RNA, 19 nt, Artificial Sequence
  Description of Artificial Sequence: Synthetic oligonucleotide
  Antisense strand to SEQ ID NO: 578693
ucuguucaaagucaauacu

SEQ ID NO: 578695 - RNA, 19 nt, Artificial Sequence
  Description of Artificial Sequence: Synthetic oligonucleotide
  Sense strand starting at position 3337 of SEQ ID NO: 318648
agcagugaaggcuauuaua

SEQ ID NO: 578696 - RNA, 19 nt, Artificial Sequence
  Description of Artificial Sequence: Synthetic oligonucleotide
  Antisense strand to SEQ ID NO: 578695
uauaauagccuucacugcu

SEQ ID NO: 578697 - RNA, 19 nt, Artificial Sequence
  Description of Artificial Sequence: Synthetic oligonucleotide
  Sense strand starting at position 3340 of SEQ ID NO: 318648
agugaaggcuauuauaaau

SEQ ID NO: 578698 - RNA, 19 nt, Artificial Sequence
  Description of Artificial Sequence: Synthetic oligonucleotide
  Antisense strand to SEQ ID NO: 578697
auuuauaauagccuucacu

SEQ ID NO: 578699 - RNA, 19 nt, Artificial Sequence
  Description of Artificial Sequence: Synthetic oligonucleotide
  Sense strand starting at position 3370 of SEQ ID NO: 318648
aggucuagauauuaaauca

SEQ ID NO: 578700 - RNA, 19 nt, Artificial Sequence
  Description of Artificial Sequence: Synthetic oligonucleotide
  Antisense strand to SEQ ID NO: 578699
ugauuuaauaucuagaccu

SEQ ID NO: 578701 - RNA, 19 nt, Artificial Sequence
  Description of Artificial Sequence: Synthetic oligonucleotide
  Sense strand starting at position 3389 of SEQ ID NO: 318648
cauccuacugcugagagau

SEQ ID NO: 578702 - RNA, 19 nt, Artificial Sequence
  Description of Artificial Sequence: Synthetic oligonucleotide
  Antisense strand to SEQ ID NO: 578701
aucucucagcaguaggaug

SEQ ID NO: 578703 - RNA, 19 nt, Artificial Sequence
  Description of Artificial Sequence: Synthetic oligonucleotide
  Sense strand starting at position 3658 of SEQ ID NO: 318648
ugcacucaguaaucucaga

SEQ ID NO: 578704 - RNA, 19 nt, Artificial Sequence
  Description of Artificial Sequence: Synthetic oligonucleotide
  Antisense strand to SEQ ID NO: 578703
ucugagauuacugagugca

SEQ ID NO: 578705 - RNA, 19 nt, Artificial Sequence
  Description of Artificial Sequence: Synthetic oligonucleotide
  Sense strand starting at position 3700 of SEQ ID NO: 318648
gaggaugauucugaaccca

SEQ ID NO: 578706 - RNA, 19 nt, Artificial Sequence
  Description of Artificial Sequence: Synthetic oligonucleotide
  Antisense strand to SEQ ID NO: 578705
uggguucagaaucauccuc

SEQ ID NO: 578707 - RNA, 19 nt, Artificial Sequence
  Description of Artificial Sequence: Synthetic oligonucleotide
  Sense strand starting at position 3849 of SEQ ID NO: 318648
aagagaucuuaagggaucu

SEQ ID NO: 578708 - RNA, 19 nt, Artificial Sequence
  Description of Artificial Sequence: Synthetic oligonucleotide
  Antisense strand to SEQ ID NO: 578707
agaucccuuaagaucucuu

SEQ ID NO: 578709 - RNA, 19 nt, Artificial Sequence
  Description of Artificial Sequence: Synthetic oligonucleotide
  Sense strand starting at position 3874 of SEQ ID NO: 318648
ggccgugugcuacacaaga

SEQ ID NO: 578710 - RNA, 19 nt, Artificial Sequence
  Description of Artificial Sequence: Synthetic oligonucleotide
  Antisense strand to SEQ ID NO: 578709
ucuuguguagcacacggcc

SEQ ID NO: 578711 - RNA, 19 nt, Artificial Sequence
  Description of Artificial Sequence: Synthetic oligonucleotide
  Sense strand starting at position 3876 of SEQ ID NO: 318648
ccgugugcuacacaagaga

SEQ ID NO: 578712 - RNA, 19 nt, Artificial Sequence
  Description of Artificial Sequence: Synthetic oligonucleotide
  Antisense strand to SEQ ID NO: 578711
ucucuuguguagcacacgg

SEQ ID NO: 578713 - RNA, 19 nt, Artificial Sequence
  Description of Artificial Sequence: Synthetic oligonucleotide
  Sense strand starting at position 3891 of SEQ ID NO: 318648
gagagcuuccacugaucua

SEQ ID NO: 578714 - RNA, 19 nt, Artificial Sequence
  Description of Artificial Sequence: Synthetic oligonucleotide
  Antisense strand to SEQ ID NO: 578713
uagaucaguggaagcucuc

SEQ ID NO: 578715 - RNA, 19 nt, Artificial Sequence
  Description of Artificial Sequence: Synthetic oligonucleotide
  Sense strand starting at position 3938 of SEQ ID NO: 318648
ggugaugauuaugcaaauc

SEQ ID NO: 578716 - RNA, 19 nt, Artificial Sequence
  Description of Artificial Sequence: Synthetic oligonucleotide
  Antisense strand to SEQ ID NO: 578715
gauuugcauaaucaucacc

SEQ ID NO: 578717 - RNA, 19 nt, Artificial Sequence
  Description of Artificial Sequence: Synthetic oligonucleotide
  Sense strand starting at position 10 of SEQ ID NO: 318649
uacauaagcguguagaaca

SEQ ID NO: 578718 - RNA, 19 nt, Artificial Sequence
  Description of Artificial Sequence: Synthetic oligonucleotide
  Antisense strand to SEQ ID NO: 578717
uguucuacacgcuuaugua

SEQ ID NO: 578719 - RNA, 19 nt, Artificial Sequence
  Description of Artificial Sequence: Synthetic oligonucleotide
  Sense strand starting at position 83 of SEQ ID NO: 318649
gugccagucccugaucaca

SEQ ID NO: 578720 - RNA, 19 nt, Artificial Sequence
  Description of Artificial Sequence: Synthetic oligonucleotide
  Antisense strand to SEQ ID NO: 578719
ugugaucagggacuggcac

SEQ ID NO: 578721 - RNA, 19 nt, Artificial Sequence
  Description of Artificial Sequence: Synthetic oligonucleotide
  Sense strand starting at position 85 of SEQ ID NO: 318649
gccagucccugaucacauu

SEQ ID NO: 578722 - RNA, 19 nt, Artificial Sequence
  Description of Artificial Sequence: Synthetic oligonucleotide
  Antisense strand to SEQ ID NO: 578721
aaugugaucagggacuggc

SEQ ID NO: 578723 - RNA, 19 nt, Artificial Sequence
  Description of Artificial Sequence: Synthetic oligonucleotide
  Sense strand starting at position 173 of SEQ ID NO: 318649
guugcuagucuugggaaag

SEQ ID NO: 578724 - RNA, 19 nt, Artificial Sequence
  Description of Artificial Sequence: Synthetic oligonucleotide
  Antisense strand to SEQ ID NO: 578723
cuuucccaagacuagcaac

SEQ ID NO: 578725 - RNA, 19 nt, Artificial Sequence
  Description of Artificial Sequence: Synthetic oligonucleotide
  Sense strand starting at position 183 of SEQ ID NO: 318649
uugggaaagccuuaaccuu

SEQ ID NO: 578726 - RNA, 19 nt, Artificial Sequence
  Description of Artificial Sequence: Synthetic oligonucleotide
  Antisense strand to SEQ ID NO: 578725
aagguuaaggcuuucccaa

SEQ ID NO: 578727 - RNA, 19 nt, Artificial Sequence
  Description of Artificial Sequence: Synthetic oligonucleotide
  Sense strand starting at position 598 of SEQ ID NO: 318649
agcuauuagcauuaucagu

SEQ ID NO: 578728 - RNA, 19 nt, Artificial Sequence
  Description of Artificial Sequence: Synthetic oligonucleotide
  Antisense strand to SEQ ID NO: 578727
acugauaaugcuaauagcu

SEQ ID NO: 578729 - RNA, 19 nt, Artificial Sequence
  Description of Artificial Sequence: Synthetic oligonucleotide
  Sense strand starting at position 600 of SEQ ID NO: 318649
cuauuagcauuaucaguuu

SEQ ID NO: 578730 - RNA, 19 nt, Artificial Sequence
  Description of Artificial Sequence: Synthetic oligonucleotide
  Antisense strand to SEQ ID NO: 578729
aaacugauaaugcuaauag

SEQ ID NO: 578731 - RNA, 19 nt, Artificial Sequence
  Description of Artificial Sequence: Synthetic oligonucleotide
  Sense strand starting at position 665 of SEQ ID NO: 318649
ggaugcugaguuuguacua

SEQ ID NO: 578732 - RNA, 19 nt, Artificial Sequence
  Description of Artificial Sequence: Synthetic oligonucleotide
  Antisense strand to SEQ ID NO: 578731
uaguacaaacucagcaucc

SEQ ID NO: 578733 - RNA, 19 nt, Artificial Sequence
  Description of Artificial Sequence: Synthetic oligonucleotide
  Sense strand starting at position 666 of SEQ ID NO: 318649
gaugcugaguuuguacuaa

SEQ ID NO: 578734 - RNA, 19 nt, Artificial Sequence
  Description of Artificial Sequence: Synthetic oligonucleotide
  Antisense strand to SEQ ID NO: 578733
uuaguacaaacucagcauc

SEQ ID NO: 578735 - RNA, 19 nt, Artificial Sequence
  Description of Artificial Sequence: Synthetic oligonucleotide
  Sense strand starting at position 812 of SEQ ID NO: 318649
ugaguaagugcugauuaaa

SEQ ID NO: 578736 - RNA, 19 nt, Artificial Sequence
  Description of Artificial Sequence: Synthetic oligonucleotide
  Antisense strand to SEQ ID NO: 578735
uuuaaucagcacuuacuca

SEQ ID NO: 578737 - RNA, 19 nt, Artificial Sequence
  Description of Artificial Sequence: Synthetic oligonucleotide
  Sense strand starting at position 838 of SEQ ID NO: 318649
uugaccguacugugagaaa

SEQ ID NO: 578738 - RNA, 19 nt, Artificial Sequence
  Description of Artificial Sequence: Synthetic oligonucleotide
  Antisense strand to SEQ ID NO: 578737
uuucucacaguacggucaa

SEQ ID NO: 578739 - RNA, 19 nt, Artificial Sequence
  Description of Artificial Sequence: Synthetic oligonucleotide
  Sense strand starting at position 1097 of SEQ ID NO: 318649
agaagcacuccuggaaacu

SEQ ID NO: 578740 - RNA, 19 nt, Artificial Sequence
  Description of Artificial Sequence: Synthetic oligonucleotide
  Antisense strand to SEQ ID NO: 578739
aguuuccaggagugcuucu

SEQ ID NO: 578741 - RNA, 19 nt, Artificial Sequence
  Description of Artificial Sequence: Synthetic oligonucleotide
  Sense strand starting at position 1200 of SEQ ID NO: 318649
gagccaaaugccugaguuc

SEQ ID NO: 578742 - RNA, 19 nt, Artificial Sequence
  Description of Artificial Sequence: Synthetic oligonucleotide
  Antisense strand to SEQ ID NO: 578741
gaacucaggcauuuggcuc

SEQ ID NO: 578743 - RNA, 19 nt, Artificial Sequence
  Description of Artificial Sequence: Synthetic oligonucleotide
  Sense strand starting at position 1307 of SEQ ID NO: 318649
uaauguuuaggauggaagu

SEQ ID NO: 578744 - RNA, 19 nt, Artificial Sequence
  Description of Artificial Sequence: Synthetic oligonucleotide
  Antisense strand to SEQ ID NO: 578743
acuuccauccuaaacauua

SEQ ID NO: 578745 - RNA, 19 nt, Artificial Sequence
  Description of Artificial Sequence: Synthetic oligonucleotide
  Sense strand starting at position 1347 of SEQ ID NO: 318649
cacguacagcguuaagauc

SEQ ID NO: 578746 - RNA, 19 nt, Artificial Sequence
  Description of Artificial Sequence: Synthetic oligonucleotide
  Antisense strand to SEQ ID NO: 578745
gaucuuaacgcuguacgug

SEQ ID NO: 578747 - RNA, 19 nt, Artificial Sequence
  Description of Artificial Sequence: Synthetic oligonucleotide
  Sense strand starting at position 1371 of SEQ ID NO: 318649
uuggaaagcgcccaauaaa

SEQ ID NO: 578748 - RNA, 19 nt, Artificial Sequence
  Description of Artificial Sequence: Synthetic oligonucleotide
  Antisense strand to SEQ ID NO: 578747
uuuauugggcgcuuuccaa

SEQ ID NO: 578749 - RNA, 19 nt, Artificial Sequence
  Description of Artificial Sequence: Synthetic oligonucleotide
  Sense strand starting at position 1399 of SEQ ID NO: 318649
uuuccuccucgugacauau

SEQ ID NO: 578750 - RNA, 19 nt, Artificial Sequence
  Description of Artificial Sequence: Synthetic oligonucleotide
  Antisense strand to SEQ ID NO: 578749
auaugucacgaggaggaaa

SEQ ID NO: 578751 - RNA, 19 nt, Artificial Sequence
  Description of Artificial Sequence: Synthetic oligonucleotide
  Sense strand starting at position 2459 of SEQ ID NO: 318649
aagacucuaccgcgaacau

SEQ ID NO: 578752 - RNA, 19 nt, Artificial Sequence
  Description of Artificial Sequence: Synthetic oligonucleotide
  Antisense strand to SEQ ID NO: 578751
auguucgcgguagagucuu

SEQ ID NO: 578753 - RNA, 19 nt, Artificial Sequence
  Description of Artificial Sequence: Synthetic oligonucleotide
  Sense strand starting at position 2460 of SEQ ID NO: 318649
agacucuaccgcgaacauu

SEQ ID NO: 578754 - RNA, 19 nt, Artificial Sequence
  Description of Artificial Sequence: Synthetic oligonucleotide
  Antisense strand to SEQ ID NO: 578753
aauguucgcgguagagucu

SEQ ID NO: 578755 - RNA, 19 nt, Artificial Sequence
  Description of Artificial Sequence: Synthetic oligonucleotide
  Sense strand starting at position 2494 of SEQ ID NO: 318649
uguaaaggauucccagaca

SEQ ID NO: 578756 - RNA, 19 nt, Artificial Sequence
  Description of Artificial Sequence: Synthetic oligonucleotide
  Antisense strand to SEQ ID NO: 578755
ugucugggaauccuuuaca

SEQ ID NO: 578757 - RNA, 19 nt, Artificial Sequence
  Description of Artificial Sequence: Synthetic oligonucleotide
  Sense strand starting at position 2499 of SEQ ID NO: 318649
aggauucccagacaucgua

SEQ ID NO: 578758 - RNA, 19 nt, Artificial Sequence
  Description of Artificial Sequence: Synthetic oligonucleotide
  Antisense strand to SEQ ID NO: 578757
uacgaugucugggaauccu

SEQ ID NO: 578759 - RNA, 19 nt, Artificial Sequence
  Description of Artificial Sequence: Synthetic oligonucleotide
  Sense strand starting at position 2520 of SEQ ID NO: 318649
cgcuuugcuccagacauug

SEQ ID NO: 578760 - RNA, 19 nt, Artificial Sequence
  Description of Artificial Sequence: Synthetic oligonucleotide
  Antisense strand to SEQ ID NO: 578759
caaugucuggagcaaagcg

SEQ ID NO: 578761 - RNA, 19 nt, Artificial Sequence
  Description of Artificial Sequence: Synthetic oligonucleotide
  Sense strand starting at position 2525 of SEQ ID NO: 318649
ugcuccagacauuguagau

SEQ ID NO: 578762 - RNA, 19 nt, Artificial Sequence
  Description of Artificial Sequence: Synthetic oligonucleotide
  Antisense strand to SEQ ID NO: 578761
aucuacaaugucuggagca

SEQ ID NO: 578763 - RNA, 19 nt, Artificial Sequence
  Description of Artificial Sequence: Synthetic oligonucleotide
  Sense strand starting at position 2541 of SEQ ID NO: 318649
gaugcuuugcgugcauuau

SEQ ID NO: 578764 - RNA, 19 nt, Artificial Sequence
  Description of Artificial Sequence: Synthetic oligonucleotide
  Antisense strand to SEQ ID NO: 578763
auaaugcacgcaaagcauc

SEQ ID NO: 578765 - RNA, 19 nt, Artificial Sequence
  Description of Artificial Sequence: Synthetic oligonucleotide
  Sense strand starting at position 2629 of SEQ ID NO: 318649
aagguuagaugaccucagu

SEQ ID NO: 578766 - RNA, 19 nt, Artificial Sequence
  Description of Artificial Sequence: Synthetic oligonucleotide
  Antisense strand to SEQ ID NO: 578765
acugaggucaucuaaccuu

SEQ ID NO: 578767 - RNA, 19 nt, Artificial Sequence
  Description of Artificial Sequence: Synthetic oligonucleotide
  Sense strand starting at position 2710 of SEQ ID NO: 318649
uacuuauaugugggcuaga

SEQ ID NO: 578768 - RNA, 19 nt, Artificial Sequence
  Description of Artificial Sequence: Synthetic oligonucleotide
  Antisense strand to SEQ ID NO: 578767
ucuagcccacauauaagua

SEQ ID NO: 578769 - RNA, 19 nt, Artificial Sequence
  Description of Artificial Sequence: Synthetic oligonucleotide
  Sense strand starting at position 2711 of SEQ ID NO: 318649
acuuauaugugggcuagau

SEQ ID NO: 578770 - RNA, 19 nt, Artificial Sequence
  Description of Artificial Sequence: Synthetic oligonucleotide
  Antisense strand to SEQ ID NO: 578769
aucuagcccacauauaagu

SEQ ID NO: 578771 - RNA, 19 nt, Artificial Sequence
  Description of Artificial Sequence: Synthetic oligonucleotide
  Sense strand starting at position 2713 of SEQ ID NO: 318649
uuauaugugggcuagauaa

SEQ ID NO: 578772 - RNA, 19 nt, Artificial Sequence
  Description of Artificial Sequence: Synthetic oligonucleotide
  Antisense strand to SEQ ID NO: 578771
uuaucuagcccacauauaa

SEQ ID NO: 578773 - RNA, 19 nt, Artificial Sequence
  Description of Artificial Sequence: Synthetic oligonucleotide
  Sense strand starting at position 2715 of SEQ ID NO: 318649
auaugugggcuagauaauc

SEQ ID NO: 578774 - RNA, 19 nt, Artificial Sequence
  Description of Artificial Sequence: Synthetic oligonucleotide
  Antisense strand to SEQ ID NO: 578773
gauuaucuagcccacauau

SEQ ID NO: 578775 - RNA, 19 nt, Artificial Sequence
  Description of Artificial Sequence: Synthetic oligonucleotide
  Sense strand starting at position 2862 of SEQ ID NO: 318649
aggucuaaccuuggaauaa

SEQ ID NO: 578776 - RNA, 19 nt, Artificial Sequence
  Description of Artificial Sequence: Synthetic oligonucleotide
  Antisense strand to SEQ ID NO: 578775
uuauuccaagguuagaccu

SEQ ID NO: 578777 - RNA, 19 nt, Artificial Sequence
  Description of Artificial Sequence: Synthetic oligonucleotide
  Sense strand starting at position 3065 of SEQ ID NO: 318649
gugacuucgcaauaauaca

SEQ ID NO: 578778 - RNA, 19 nt, Artificial Sequence
  Description of Artificial Sequence: Synthetic oligonucleotide
  Antisense strand to SEQ ID NO: 578777
uguauuauugcgaagucac

SEQ ID NO: 578779 - RNA, 19 nt, Artificial Sequence
  Description of Artificial Sequence: Synthetic oligonucleotide
  Sense strand starting at position 3120 of SEQ ID NO: 318649
gggauucuccuauaaggcu

SEQ ID NO: 578780 - RNA, 19 nt, Artificial Sequence
  Description of Artificial Sequence: Synthetic oligonucleotide
  Antisense strand to SEQ ID NO: 578779
agccuuauaggagaauccc

SEQ ID NO: 578781 - RNA, 19 nt, Artificial Sequence
  Description of Artificial Sequence: Synthetic oligonucleotide
  Sense strand starting at position 3328 of SEQ ID NO: 318649
gaauccuggcccugguuua

SEQ ID NO: 578782 - RNA, 19 nt, Artificial Sequence
  Description of Artificial Sequence: Synthetic oligonucleotide
  Antisense strand to SEQ ID NO: 578781
uaaaccagggccaggauuc

SEQ ID NO: 578783 - RNA, 19 nt, Artificial Sequence
  Description of Artificial Sequence: Synthetic oligonucleotide
  Sense strand starting at position 3520 of SEQ ID NO: 318649
aauggcuggucucuaauua

SEQ ID NO: 578784 - RNA, 19 nt, Artificial Sequence
  Description of Artificial Sequence: Synthetic oligonucleotide
  Antisense strand to SEQ ID NO: 578783
uaauuagagaccagccauu

SEQ ID NO: 578785 - RNA, 19 nt, Artificial Sequence
  Description of Artificial Sequence: Synthetic oligonucleotide
  Sense strand starting at position 3712 of SEQ ID NO: 318649
aguuccaauuugugagaaa

SEQ ID NO: 578786 - RNA, 19 nt, Artificial Sequence
  Description of Artificial Sequence: Synthetic oligonucleotide
  Antisense strand to SEQ ID NO: 578785
uuucucacaaauuggaacu

SEQ ID NO: 578787 - RNA, 19 nt, Artificial Sequence
  Description of Artificial Sequence: Synthetic oligonucleotide
  Sense strand starting at position 3865 of SEQ ID NO: 318649
aacugaguccucugucuag

SEQ ID NO: 578788 - RNA, 19 nt, Artificial Sequence
  Description of Artificial Sequence: Synthetic oligonucleotide
  Antisense strand to SEQ ID NO: 578787
cuagacagaggacucaguu

SEQ ID NO: 578789 - RNA, 19 nt, Artificial Sequence
  Description of Artificial Sequence: Synthetic oligonucleotide
  Sense strand starting at position 3868 of SEQ ID NO: 318649
ugaguccucugucuagaaa

SEQ ID NO: 578790 - RNA, 19 nt, Artificial Sequence
  Description of Artificial Sequence: Synthetic oligonucleotide
  Antisense strand to SEQ ID NO: 578789
uuucuagacagaggacuca

SEQ ID NO: 578791 - RNA, 19 nt, Artificial Sequence
  Description of Artificial Sequence: Synthetic oligonucleotide
  Sense strand starting at position 3888 of SEQ ID NO: 318649
ggacuuacucuaggccaca

SEQ ID NO: 578792 - RNA, 19 nt, Artificial Sequence
  Description of Artificial Sequence: Synthetic oligonucleotide
  Antisense strand to SEQ ID NO: 578791
uguggccuagaguaagucc

SEQ ID NO: 578793 - RNA, 19 nt, Artificial Sequence
  Description of Artificial Sequence: Synthetic oligonucleotide
  Sense strand starting at position 3978 of SEQ ID NO: 318649
guaccaaguugucuuuaca

SEQ ID NO: 578794 - RNA, 19 nt, Artificial Sequence
  Description of Artificial Sequence: Synthetic oligonucleotide
  Antisense strand to SEQ ID NO: 578793
uguaaagacaacuugguac

SEQ ID NO: 578795 - RNA, 19 nt, Artificial Sequence
  Description of Artificial Sequence: Synthetic oligonucleotide
  Sense strand starting at position 3981 of SEQ ID NO: 318649
ccaaguugucuuuacaaug

SEQ ID NO: 578796 - RNA, 19 nt, Artificial Sequence
  Description of Artificial Sequence: Synthetic oligonucleotide
  Antisense strand to SEQ ID NO: 578795
cauuguaaagacaacuugg

SEQ ID NO: 578797 - RNA, 19 nt, Artificial Sequence
  Description of Artificial Sequence: Synthetic oligonucleotide
  Sense strand starting at position 848 of SEQ ID NO: 318650
cuuccuaucuagcuguaga

SEQ ID NO: 578798 - RNA, 19 nt, Artificial Sequence
  Description of Artificial Sequence: Synthetic oligonucleotide
  Antisense strand to SEQ ID NO: 578797
ucuacagcuagauaggaag

SEQ ID NO: 578799 - RNA, 19 nt, Artificial Sequence
  Description of Artificial Sequence: Synthetic oligonucleotide
  Sense strand starting at position 851 of SEQ ID NO: 318650
ccuaucuagcuguagacuu

SEQ ID NO: 578800 - RNA, 19 nt, Artificial Sequence
  Description of Artificial Sequence: Synthetic oligonucleotide
  Antisense strand to SEQ ID NO: 578799
aagucuacagcuagauagg

SEQ ID NO: 578801 - RNA, 19 nt, Artificial Sequence
  Description of Artificial Sequence: Synthetic oligonucleotide
  Sense strand starting at position 1495 of SEQ ID NO: 318650
cacugugcuucugcaggaa

SEQ ID NO: 578802 - RNA, 19 nt, Artificial Sequence
  Description of Artificial Sequence: Synthetic oligonucleotide
  Antisense strand to SEQ ID NO: 578801
uuccugcagaagcacagug

SEQ ID NO: 578803 - RNA, 19 nt, Artificial Sequence
  Description of Artificial Sequence: Synthetic oligonucleotide
  Sense strand starting at position 1686 of SEQ ID NO: 318650
cugugaauuccagggaguu

SEQ ID NO: 578804 - RNA, 19 nt, Artificial Sequence
  Description of Artificial Sequence: Synthetic oligonucleotide
  Antisense strand to SEQ ID NO: 578803
aacucccuggaauucacag

SEQ ID NO: 578805 - RNA, 19 nt, Artificial Sequence
  Description of Artificial Sequence: Synthetic oligonucleotide
  Sense strand starting at position 1687 of SEQ ID NO: 318650
ugugaauuccagggaguug

SEQ ID NO: 578806 - RNA, 19 nt, Artificial Sequence
  Description of Artificial Sequence: Synthetic oligonucleotide
  Antisense strand to SEQ ID NO: 578805
caacucccuggaauucaca

SEQ ID NO: 578807 - RNA, 19 nt, Artificial Sequence
  Description of Artificial Sequence: Synthetic oligonucleotide
  Sense strand starting at position 1806 of SEQ ID NO: 318650
cucccuagauuguccugaa

SEQ ID NO: 578808 - RNA, 19 nt, Artificial Sequence
  Description of Artificial Sequence: Synthetic oligonucleotide
  Antisense strand to SEQ ID NO: 578807
uucaggacaaucuagggag

SEQ ID NO: 578809 - RNA, 19 nt, Artificial Sequence
  Description of Artificial Sequence: Synthetic oligonucleotide
  Sense strand starting at position 1957 of SEQ ID NO: 318650
cuccauccauagugaagaa

SEQ ID NO: 578810 - RNA, 19 nt, Artificial Sequence
  Description of Artificial Sequence: Synthetic oligonucleotide
  Antisense strand to SEQ ID NO: 578809
uucuucacuauggauggag

SEQ ID NO: 578811 - RNA, 19 nt, Artificial Sequence
  Description of Artificial Sequence: Synthetic oligonucleotide
  Sense strand starting at position 1995 of SEQ ID NO: 318650
gugcaugccgagucacauu

SEQ ID NO: 578812 - RNA, 19 nt, Artificial Sequence
  Description of Artificial Sequence: Synthetic oligonucleotide
  Antisense strand to SEQ ID NO: 578811
aaugugacucggcaugcac

SEQ ID NO: 578813 - RNA, 19 nt, Artificial Sequence
  Description of Artificial Sequence: Synthetic oligonucleotide
  Sense strand starting at position 2002 of SEQ ID NO: 318650
ccgagucacauuuggaugu

SEQ ID NO: 578814 - RNA, 19 nt, Artificial Sequence
  Description of Artificial Sequence: Synthetic oligonucleotide
  Antisense strand to SEQ ID NO: 578813
acauccaaaugugacucgg

SEQ ID NO: 578815 - RNA, 19 nt, Artificial Sequence
  Description of Artificial Sequence: Synthetic oligonucleotide
  Sense strand starting at position 2004 of SEQ ID NO: 318650
gagucacauuuggauguca

SEQ ID NO: 578816 - RNA, 19 nt, Artificial Sequence
  Description of Artificial Sequence: Synthetic oligonucleotide
  Antisense strand to SEQ ID NO: 578815
ugacauccaaaugugacuc

SEQ ID NO: 578817 - RNA, 19 nt, Artificial Sequence
  Description of Artificial Sequence: Synthetic oligonucleotide
  Sense strand starting at position 2009 of SEQ ID NO: 318650
acauuuggaugucaaguaa

SEQ ID NO: 578818 - RNA, 19 nt, Artificial Sequence
  Description of Artificial Sequence: Synthetic oligonucleotide
  Antisense strand to SEQ ID NO: 578817
uuacuugacauccaaaugu

SEQ ID NO: 578819 - RNA, 19 nt, Artificial Sequence
  Description of Artificial Sequence: Synthetic oligonucleotide
  Sense strand starting at position 2050 of SEQ ID NO: 318650
ggaauucugcacugaccag

SEQ ID NO: 578820 - RNA, 19 nt, Artificial Sequence
  Description of Artificial Sequence: Synthetic oligonucleotide
  Antisense strand to SEQ ID NO: 578819
cuggucagugcagaauucc

SEQ ID NO: 578821 - RNA, 19 nt, Artificial Sequence
  Description of Artificial Sequence: Synthetic oligonucleotide
  Sense strand starting at position 2096 of SEQ ID NO: 318650
cauccugagcccuagugau

SEQ ID NO: 578822 - RNA, 19 nt, Artificial Sequence
  Description of Artificial Sequence: Synthetic oligonucleotide
  Antisense strand to SEQ ID NO: 578821
aucacuagggcucaggaug

SEQ ID NO: 578823 - RNA, 19 nt, Artificial Sequence
  Description of Artificial Sequence: Synthetic oligonucleotide
  Sense strand starting at position 2110 of SEQ ID NO: 318650
gugaucuccugcuuaauga

SEQ ID NO: 578824 - RNA, 19 nt, Artificial Sequence
  Description of Artificial Sequence: Synthetic oligonucleotide
  Antisense strand to SEQ ID NO: 578823
ucauuaagcaggagaucac

SEQ ID NO: 578825 - RNA, 19 nt, Artificial Sequence
  Description of Artificial Sequence: Synthetic oligonucleotide
  Sense strand starting at position 2147 of SEQ ID NO: 318650
ccugccauuuaaugguaau

SEQ ID NO: 578826 - RNA, 19 nt, Artificial Sequence
  Description of Artificial Sequence: Synthetic oligonucleotide
  Antisense strand to SEQ ID NO: 578825
auuaccauuaaauggcagg

SEQ ID NO: 578827 - RNA, 19 nt, Artificial Sequence
  Description of Artificial Sequence: Synthetic oligonucleotide
  Sense strand starting at position 2150 of SEQ ID NO: 318650
gccauuuaaugguaauuaa

SEQ ID NO: 578828 - RNA, 19 nt, Artificial Sequence
  Description of Artificial Sequence: Synthetic oligonucleotide
  Antisense strand to SEQ ID NO: 578827
uuaauuaccauuaaauggc

SEQ ID NO: 578829 - RNA, 19 nt, Artificial Sequence
  Description of Artificial Sequence: Synthetic oligonucleotide
  Sense strand starting at position 2190 of SEQ ID NO: 318650
cguggcucacgccuauuaa

SEQ ID NO: 578830 - RNA, 19 nt, Artificial Sequence
  Description of Artificial Sequence: Synthetic oligonucleotide
  Antisense strand to SEQ ID NO: 578829
uuaauaggcgugagccacg

SEQ ID NO: 578831 - RNA, 19 nt, Artificial Sequence
  Description of Artificial Sequence: Synthetic oligonucleotide
  Sense strand starting at position 2234 of SEQ ID NO: 318650
caggcuuaagccuaggagu

SEQ ID NO: 578832 - RNA, 19 nt, Artificial Sequence
  Description of Artificial Sequence: Synthetic oligonucleotide
  Antisense strand to SEQ ID NO: 578831
acuccuaggcuuaagccug

SEQ ID NO: 578833 - RNA, 19 nt, Artificial Sequence
  Description of Artificial Sequence: Synthetic oligonucleotide
  Sense strand starting at position 2496 of SEQ ID NO: 318650
guagacauccuuuguaaac

SEQ ID NO: 578834 - RNA, 19 nt, Artificial Sequence
  Description of Artificial Sequence: Synthetic oligonucleotide
  Antisense strand to SEQ ID NO: 578833
guuuacaaaggaugucuac

SEQ ID NO: 578835 - RNA, 19 nt, Artificial Sequence
  Description of Artificial Sequence: Synthetic oligonucleotide
  Sense strand starting at position 2532 of SEQ ID NO: 318650
acauaaagucuuuguuccu

SEQ ID NO: 578836 - RNA, 19 nt, Artificial Sequence
  Description of Artificial Sequence: Synthetic oligonucleotide
  Antisense strand to SEQ ID NO: 578835
aggaacaaagacuuuaugu

SEQ ID NO: 578837 - RNA, 19 nt, Artificial Sequence
  Description of Artificial Sequence: Synthetic oligonucleotide
  Sense strand starting at position 2628 of SEQ ID NO: 318650
guuccagaguuuccucauu

SEQ ID NO: 578838 - RNA, 19 nt, Artificial Sequence
  Description of Artificial Sequence: Synthetic oligonucleotide
  Antisense strand to SEQ ID NO: 578837
aaugaggaaacucuggaac

SEQ ID NO: 578839 - RNA, 19 nt, Artificial Sequence
  Description of Artificial Sequence: Synthetic oligonucleotide
  Sense strand starting at position 2630 of SEQ ID NO: 318650
uccagaguuuccucauucu

SEQ ID NO: 578840 - RNA, 19 nt, Artificial Sequence
  Description of Artificial Sequence: Synthetic oligonucleotide
  Antisense strand to SEQ ID NO: 578839
agaaugaggaaacucugga

SEQ ID NO: 578841 - RNA, 19 nt, Artificial Sequence
  Description of Artificial Sequence: Synthetic oligonucleotide
  Sense strand starting at position 2633 of SEQ ID NO: 318650
agaguuuccucauucuuau

SEQ ID NO: 578842 - RNA, 19 nt, Artificial Sequence
  Description of Artificial Sequence: Synthetic oligonucleotide
  Antisense strand to SEQ ID NO: 578841
auaagaaugaggaaacucu

SEQ ID NO: 578843 - RNA, 19 nt, Artificial Sequence
  Description of Artificial Sequence: Synthetic oligonucleotide
  Sense strand starting at position 2817 of SEQ ID NO: 318650
cugcauuucgagugcucaa

SEQ ID NO: 578844 - RNA, 19 nt, Artificial Sequence
  Description of Artificial Sequence: Synthetic oligonucleotide
  Antisense strand to SEQ ID NO: 578843
uugagcacucgaaaugcag

SEQ ID NO: 578845 - RNA, 19 nt, Artificial Sequence
  Description of Artificial Sequence: Synthetic oligonucleotide
  Sense strand starting at position 2859 of SEQ ID NO: 318650
agacuacaugcauguauga

SEQ ID NO: 578846 - RNA, 19 nt, Artificial Sequence
  Description of Artificial Sequence: Synthetic oligonucleotide
  Antisense strand to SEQ ID NO: 578845
ucauacaugcauguagucu

SEQ ID NO: 578847 - RNA, 19 nt, Artificial Sequence
  Description of Artificial Sequence: Synthetic oligonucleotide
  Sense strand starting at position 2872 of SEQ ID NO: 318650
guaugacauuuccauuauu

SEQ ID NO: 578848 - RNA, 19 nt, Artificial Sequence
  Description of Artificial Sequence: Synthetic oligonucleotide
  Antisense strand to SEQ ID NO: 578847
aauaauggaaaugucauac

SEQ ID NO: 578849 - RNA, 19 nt, Artificial Sequence
  Description of Artificial Sequence: Synthetic oligonucleotide
  Sense strand starting at position 3156 of SEQ ID NO: 318650
agaauauauucugagaaca

SEQ ID NO: 578850 - RNA, 19 nt, Artificial Sequence
  Description of Artificial Sequence: Synthetic oligonucleotide
  Antisense strand to SEQ ID NO: 578849
uguucucagaauauauucu

SEQ ID NO: 578851 - RNA, 19 nt, Artificial Sequence
  Description of Artificial Sequence: Synthetic oligonucleotide
  Sense strand starting at position 3424 of SEQ ID NO: 318650
gcccaauggccucacuuua

SEQ ID NO: 578852 - RNA, 19 nt, Artificial Sequence
  Description of Artificial Sequence: Synthetic oligonucleotide
  Antisense strand to SEQ ID NO: 578851
uaaagugaggccauugggc

SEQ ID NO: 578853 - RNA, 19 nt, Artificial Sequence
  Description of Artificial Sequence: Synthetic oligonucleotide
  Sense strand starting at position 3643 of SEQ ID NO: 318650
agugcaguuguaugaauga

SEQ ID NO: 578854 - RNA, 19 nt, Artificial Sequence
  Description of Artificial Sequence: Synthetic oligonucleotide
  Antisense strand to SEQ ID NO: 578853
ucauucauacaacugcacu

SEQ ID NO: 578855 - RNA, 19 nt, Artificial Sequence
  Description of Artificial Sequence: Synthetic oligonucleotide
  Sense strand starting at position 3660 of SEQ ID NO: 318650
gauacugacccuugagcua

SEQ ID NO: 578856 - RNA, 19 nt, Artificial Sequence
  Description of Artificial Sequence: Synthetic oligonucleotide
  Antisense strand to SEQ ID NO: 578855
uagcucaagggucaguauc

SEQ ID NO: 578857 - RNA, 19 nt, Artificial Sequence
  Description of Artificial Sequence: Synthetic oligonucleotide
  Sense strand starting at position 3693 of SEQ ID NO: 318650
agaugauguucuccuguac

SEQ ID NO: 578858 - RNA, 19 nt, Artificial Sequence
  Description of Artificial Sequence: Synthetic oligonucleotide
  Antisense strand to SEQ ID NO: 578857
guacaggagaacaucaucu

SEQ ID NO: 578859 - RNA, 19 nt, Artificial Sequence
  Description of Artificial Sequence: Synthetic oligonucleotide
  Sense strand starting at position 3697 of SEQ ID NO: 318650
gauguucuccuguacauag

SEQ ID NO: 578860 - RNA, 19 nt, Artificial Sequence
  Description of Artificial Sequence: Synthetic oligonucleotide
  Antisense strand to SEQ ID NO: 578859
cuauguacaggagaacauc

SEQ ID NO: 578861 - RNA, 19 nt, Artificial Sequence
  Description of Artificial Sequence: Synthetic oligonucleotide
  Sense strand starting at position 3747 of SEQ ID NO: 318650
guagcucagcccuaauguu

SEQ ID NO: 578862 - RNA, 19 nt, Artificial Sequence
  Description of Artificial Sequence: Synthetic oligonucleotide
  Antisense strand to SEQ ID NO: 578861
aacauuagggcugagcuac

SEQ ID NO: 578863 - RNA, 19 nt, Artificial Sequence
  Description of Artificial Sequence: Synthetic oligonucleotide
  Sense strand starting at position 3755 of SEQ ID NO: 318650
gcccuaauguuccuggauu

SEQ ID NO: 578864 - RNA, 19 nt, Artificial Sequence
  Description of Artificial Sequence: Synthetic oligonucleotide
  Antisense strand to SEQ ID NO: 578863
aauccaggaacauuagggc

SEQ ID NO: 578865 - RNA, 19 nt, Artificial Sequence
  Description of Artificial Sequence: Synthetic oligonucleotide
  Sense strand starting at position 3757 of SEQ ID NO: 318650
ccuaauguuccuggauuac

SEQ ID NO: 578866 - RNA, 19 nt, Artificial Sequence
  Description of Artificial Sequence: Synthetic oligonucleotide
  Antisense strand to SEQ ID NO: 578865
guaauccaggaacauuagg

SEQ ID NO: 578867 - RNA, 19 nt, Artificial Sequence
  Description of Artificial Sequence: Synthetic oligonucleotide
  Sense strand starting at position 3761 of SEQ ID NO: 318650
auguuccuggauuacaauu

SEQ ID NO: 578868 - RNA, 19 nt, Artificial Sequence
  Description of Artificial Sequence: Synthetic oligonucleotide
  Antisense strand to SEQ ID NO: 578867
aauuguaauccaggaacau

SEQ ID NO: 578869 - RNA, 19 nt, Artificial Sequence
  Description of Artificial Sequence: Synthetic oligonucleotide
  Sense strand starting at position 3872 of SEQ ID NO: 318650
cauggaaucuuagauggca

SEQ ID NO: 578870 - RNA, 19 nt, Artificial Sequence
  Description of Artificial Sequence: Synthetic oligonucleotide
  Antisense strand to SEQ ID NO: 578869
ugccaucuaagauuccaug

SEQ ID NO: 578871 - RNA, 19 nt, Artificial Sequence
  Description of Artificial Sequence: Synthetic oligonucleotide
  Sense strand starting at position 3930 of SEQ ID NO: 318650
gcgacaugagcugggauuu

SEQ ID NO: 578872 - RNA, 19 nt, Artificial Sequence
  Description of Artificial Sequence: Synthetic oligonucleotide
  Antisense strand to SEQ ID NO: 578871
aaaucccagcucaugucgc

SEQ ID NO: 578873 - RNA, 19 nt, Artificial Sequence
  Description of Artificial Sequence: Synthetic oligonucleotide
  Sense strand starting at position 3968 of SEQ ID NO: 318650
ggcacauccuaugaagaga

SEQ ID NO: 578874 - RNA, 19 nt, Artificial Sequence
  Description of Artificial Sequence: Synthetic oligonucleotide
  Antisense strand to SEQ ID NO: 578873
ucucuucauaggaugugcc

SEQ ID NO: 578875 - RNA, 19 nt, Artificial Sequence
  Description of Artificial Sequence: Synthetic oligonucleotide
  Sense strand starting at position 3982 of SEQ ID NO: 318650
agagaauggcucugagcuc

SEQ ID NO: 578876 - RNA, 19 nt, Artificial Sequence
  Description of Artificial Sequence: Synthetic oligonucleotide
  Antisense strand to SEQ ID NO: 578875
gagcucagagccauucucu

SEQ ID NO: 578877 - RNA, 19 nt, Artificial Sequence
  Description of Artificial Sequence: Synthetic oligonucleotide
  Sense strand starting at position 34 of SEQ ID NO: 318651
ugccuugguuucuuuauca

SEQ ID NO: 578878 - RNA, 19 nt, Artificial Sequence
  Description of Artificial Sequence: Synthetic oligonucleotide
  Antisense strand to SEQ ID NO: 578877
ugauaaagaaaccaaggca

SEQ ID NO: 578879 - RNA, 19 nt, Artificial Sequence
  Description of Artificial Sequence: Synthetic oligonucleotide
  Sense strand starting at position 38 of SEQ ID NO: 318651
uugguuucuuuaucaauga

SEQ ID NO: 578880 - RNA, 19 nt, Artificial Sequence
  Description of Artificial Sequence: Synthetic oligonucleotide
  Antisense strand to SEQ ID NO: 578879
ucauugauaaagaaaccaa

SEQ ID NO: 578881 - RNA, 19 nt, Artificial Sequence
  Description of Artificial Sequence: Synthetic oligonucleotide
  Sense strand starting at position 54 of SEQ ID NO: 318651
ugacaugaaggcuguaacu

SEQ ID NO: 578882 - RNA, 19 nt, Artificial Sequence
  Description of Artificial Sequence: Synthetic oligonucleotide
  Antisense strand to SEQ ID NO: 578881
aguuacagccuucauguca

SEQ ID NO: 578883 - RNA, 19 nt, Artificial Sequence
  Description of Artificial Sequence: Synthetic oligonucleotide
  Sense strand starting at position 56 of SEQ ID NO: 318651
acaugaaggcuguaacugu

SEQ ID NO: 578884 - RNA, 19 nt, Artificial Sequence
  Description of Artificial Sequence: Synthetic oligonucleotide
  Antisense strand to SEQ ID NO: 578883
acaguuacagccuucaugu

SEQ ID NO: 578885 - RNA, 19 nt, Artificial Sequence
  Description of Artificial Sequence: Synthetic oligonucleotide
  Sense strand starting at position 110 of SEQ ID NO: 318651
aaggcuuggccucagugaa

SEQ ID NO: 578886 - RNA, 19 nt, Artificial Sequence
  Description of Artificial Sequence: Synthetic oligonucleotide
  Antisense strand to SEQ ID NO: 578885
uucacugaggccaagccuu

SEQ ID NO: 578887 - RNA, 19 nt, Artificial Sequence
  Description of Artificial Sequence: Synthetic oligonucleotide
  Sense strand starting at position 124 of SEQ ID NO: 318651
gugaaagguagcgaugauc

SEQ ID NO: 578888 - RNA, 19 nt, Artificial Sequence
  Description of Artificial Sequence: Synthetic oligonucleotide
  Antisense strand to SEQ ID NO: 578887
gaucaucgcuaccuuucac

SEQ ID NO: 578889 - RNA, 19 nt, Artificial Sequence
  Description of Artificial Sequence: Synthetic oligonucleotide
  Sense strand starting at position 127 of SEQ ID NO: 318651
aaagguagcgaugaucauu

SEQ ID NO: 578890 - RNA, 19 nt, Artificial Sequence
  Description of Artificial Sequence: Synthetic oligonucleotide
  Antisense strand to SEQ ID NO: 578889
aaugaucaucgcuaccuuu

SEQ ID NO: 578891 - RNA, 19 nt, Artificial Sequence
  Description of Artificial Sequence: Synthetic oligonucleotide
  Sense strand starting at position 132 of SEQ ID NO: 318651
uagcgaugaucauuaugau

SEQ ID NO: 578892 - RNA, 19 nt, Artificial Sequence
  Description of Artificial Sequence: Synthetic oligonucleotide
  Antisense strand to SEQ ID NO: 578891
aucauaaugaucaucgcua

SEQ ID NO: 578893 - RNA, 19 nt, Artificial Sequence
  Description of Artificial Sequence: Synthetic oligonucleotide
  Sense strand starting at position 133 of SEQ ID NO: 318651
agcgaugaucauuaugauc

SEQ ID NO: 578894 - RNA, 19 nt, Artificial Sequence
  Description of Artificial Sequence: Synthetic oligonucleotide
  Antisense strand to SEQ ID NO: 578893
gaucauaaugaucaucgcu

SEQ ID NO: 578895 - RNA, 19 nt, Artificial Sequence
  Description of Artificial Sequence: Synthetic oligonucleotide
  Sense strand starting at position 150 of SEQ ID NO: 318651
ucaucaauucuaugaggca

SEQ ID NO: 578896 - RNA, 19 nt, Artificial Sequence
  Description of Artificial Sequence: Synthetic oligonucleotide
  Antisense strand to SEQ ID NO: 578895
ugccucauagaauugauga

SEQ ID NO: 578897 - RNA, 19 nt, Artificial Sequence
  Description of Artificial Sequence: Synthetic oligonucleotide
  Sense strand starting at position 171 of SEQ ID NO: 318651
agggauugcuucucuccuu

SEQ ID NO: 578898 - RNA, 19 nt, Artificial Sequence
  Description of Artificial Sequence: Synthetic oligonucleotide
  Antisense strand to SEQ ID NO: 578897
aaggagagaagcaaucccu

SEQ ID NO: 578899 - RNA, 19 nt, Artificial Sequence
  Description of Artificial Sequence: Synthetic oligonucleotide
  Sense strand starting at position 172 of SEQ ID NO: 318651
gggauugcuucucuccuuu

SEQ ID NO: 578900 - RNA, 19 nt, Artificial Sequence
  Description of Artificial Sequence: Synthetic oligonucleotide
  Antisense strand to SEQ ID NO: 578899
aaaggagagaagcaauccc

SEQ ID NO: 578901 - RNA, 19 nt, Artificial Sequence
  Description of Artificial Sequence: Synthetic oligonucleotide
  Sense strand starting at position 223 of SEQ ID NO: 318651
agcagcuugcccuagacau

SEQ ID NO: 578902 - RNA, 19 nt, Artificial Sequence
  Description of Artificial Sequence: Synthetic oligonucleotide
  Antisense strand to SEQ ID NO: 578901
augucuagggcaagcugcu

SEQ ID NO: 578903 - RNA, 19 nt, Artificial Sequence
  Description of Artificial Sequence: Synthetic oligonucleotide
  Sense strand starting at position 424 of SEQ ID NO: 318651
uucccagccucgucacaua

SEQ ID NO: 578904 - RNA, 19 nt, Artificial Sequence
  Description of Artificial Sequence: Synthetic oligonucleotide
  Antisense strand to SEQ ID NO: 578903
uaugugacgaggcugggaa

SEQ ID NO: 578905 - RNA, 19 nt, Artificial Sequence
  Description of Artificial Sequence: Synthetic oligonucleotide
  Sense strand starting at position 930 of SEQ ID NO: 318651
guuccagaguuuccucauu

SEQ ID NO: 578906 - RNA, 19 nt, Artificial Sequence
  Description of Artificial Sequence: Synthetic oligonucleotide
  Antisense strand to SEQ ID NO: 578905
aaugaggaaacucuggaac

SEQ ID NO: 578907 - RNA, 19 nt, Artificial Sequence
  Description of Artificial Sequence: Synthetic oligonucleotide
  Sense strand starting at position 932 of SEQ ID NO: 318651
uccagaguuuccucauucu

SEQ ID NO: 578908 - RNA, 19 nt, Artificial Sequence
  Description of Artificial Sequence: Synthetic oligonucleotide
  Antisense strand to SEQ ID NO: 578907
agaaugaggaaacucugga

SEQ ID NO: 578909 - RNA, 19 nt, Artificial Sequence
  Description of Artificial Sequence: Synthetic oligonucleotide
  Sense strand starting at position 935 of SEQ ID NO: 318651
agaguuuccucauucuuau

SEQ ID NO: 578910 - RNA, 19 nt, Artificial Sequence
  Description of Artificial Sequence: Synthetic oligonucleotide
  Antisense strand to SEQ ID NO: 578909
auaagaaugaggaaacucu

SEQ ID NO: 578911 - RNA, 19 nt, Artificial Sequence
  Description of Artificial Sequence: Synthetic oligonucleotide
  Sense strand starting at position 1322 of SEQ ID NO: 318651
cuuccuaucuagcuguaga

SEQ ID NO: 578912 - RNA, 19 nt, Artificial Sequence
  Description of Artificial Sequence: Synthetic oligonucleotide
  Antisense strand to SEQ ID NO: 578911
ucuacagcuagauaggaag

SEQ ID NO: 578913 - RNA, 19 nt, Artificial Sequence
  Description of Artificial Sequence: Synthetic oligonucleotide
  Sense strand starting at position 1325 of SEQ ID NO: 318651
ccuaucuagcuguagacuu

SEQ ID NO: 578914 - RNA, 19 nt, Artificial Sequence
  Description of Artificial Sequence: Synthetic oligonucleotide
  Antisense strand to SEQ ID NO: 578913
aagucuacagcuagauagg

SEQ ID NO: 578915 - RNA, 19 nt, Artificial Sequence
  Description of Artificial Sequence: Synthetic oligonucleotide
  Sense strand starting at position 1969 of SEQ ID NO: 318651
cacugugcuucugcaggaa

SEQ ID NO: 578916 - RNA, 19 nt, Artificial Sequence
  Description of Artificial Sequence: Synthetic oligonucleotide
  Antisense strand to SEQ ID NO: 578915
uuccugcagaagcacagug

SEQ ID NO: 578917 - RNA, 19 nt, Artificial Sequence
  Description of Artificial Sequence: Synthetic oligonucleotide
  Sense strand starting at position 2160 of SEQ ID NO: 318651
cugugaauuccagggaguu

SEQ ID NO: 578918 - RNA, 19 nt, Artificial Sequence
  Description of Artificial Sequence: Synthetic oligonucleotide
  Antisense strand to SEQ ID NO: 578917
aacucccuggaauucacag

SEQ ID NO: 578919 - RNA, 19 nt, Artificial Sequence
  Description of Artificial Sequence: Synthetic oligonucleotide
  Sense strand starting at position 2161 of SEQ ID NO: 318651
ugugaauuccagggaguug

SEQ ID NO: 578920 - RNA, 19 nt, Artificial Sequence
  Description of Artificial Sequence: Synthetic oligonucleotide
  Antisense strand to SEQ ID NO: 578919
caacucccuggaauucaca

SEQ ID NO: 578921 - RNA, 19 nt, Artificial Sequence
  Description of Artificial Sequence: Synthetic oligonucleotide
  Sense strand starting at position 2280 of SEQ ID NO: 318651
cucccuagauuguccugaa

SEQ ID NO: 578922 - RNA, 19 nt, Artificial Sequence
  Description of Artificial Sequence: Synthetic oligonucleotide
  Antisense strand to SEQ ID NO: 578921
uucaggacaaucuagggag

SEQ ID NO: 578923 - RNA, 19 nt, Artificial Sequence
  Description of Artificial Sequence: Synthetic oligonucleotide
  Sense strand starting at position 2469 of SEQ ID NO: 318651
gugcaugccgagucacauu

SEQ ID NO: 578924 - RNA, 19 nt, Artificial Sequence
  Description of Artificial Sequence: Synthetic oligonucleotide
  Antisense strand to SEQ ID NO: 578923
aaugugacucggcaugcac

SEQ ID NO: 578925 - RNA, 19 nt, Artificial Sequence
  Description of Artificial Sequence: Synthetic oligonucleotide
  Sense strand starting at position 2476 of SEQ ID NO: 318651
ccgagucacauuuggaugu

SEQ ID NO: 578926 - RNA, 19 nt, Artificial Sequence
  Description of Artificial Sequence: Synthetic oligonucleotide
  Antisense strand to SEQ ID NO: 578925
acauccaaaugugacucgg

SEQ ID NO: 578927 - RNA, 19 nt, Artificial Sequence
  Description of Artificial Sequence: Synthetic oligonucleotide
  Sense strand starting at position 2478 of SEQ ID NO: 318651
gagucacauuuggauguca

SEQ ID NO: 578928 - RNA, 19 nt, Artificial Sequence
  Description of Artificial Sequence: Synthetic oligonucleotide
  Antisense strand to SEQ ID NO: 578927
ugacauccaaaugugacuc

SEQ ID NO: 578929 - RNA, 19 nt, Artificial Sequence
  Description of Artificial Sequence: Synthetic oligonucleotide
  Sense strand starting at position 2483 of SEQ ID NO: 318651
acauuuggaugucaaguaa

SEQ ID NO: 578930 - RNA, 19 nt, Artificial Sequence
  Description of Artificial Sequence: Synthetic oligonucleotide
  Antisense strand to SEQ ID NO: 578929
uuacuugacauccaaaugu

SEQ ID NO: 578931 - RNA, 19 nt, Artificial Sequence
  Description of Artificial Sequence: Synthetic oligonucleotide
  Sense strand starting at position 2524 of SEQ ID NO: 318651
ggaauucugcacugaccag

SEQ ID NO: 578932 - RNA, 19 nt, Artificial Sequence
  Description of Artificial Sequence: Synthetic oligonucleotide
  Antisense strand to SEQ ID NO: 578931
cuggucagugcagaauucc

SEQ ID NO: 578933 - RNA, 19 nt, Artificial Sequence
  Description of Artificial Sequence: Synthetic oligonucleotide
  Sense strand starting at position 2570 of SEQ ID NO: 318651
cauccugagcccuagugau

SEQ ID NO: 578934 - RNA, 19 nt, Artificial Sequence
  Description of Artificial Sequence: Synthetic oligonucleotide
  Antisense strand to SEQ ID NO: 578933
aucacuagggcucaggaug

SEQ ID NO: 578935 - RNA, 19 nt, Artificial Sequence
  Description of Artificial Sequence: Synthetic oligonucleotide
  Sense strand starting at position 2584 of SEQ ID NO: 318651
gugaucuccugcuuaauga

SEQ ID NO: 578936 - RNA, 19 nt, Artificial Sequence
  Description of Artificial Sequence: Synthetic oligonucleotide
  Antisense strand to SEQ ID NO: 578935
ucauuaagcaggagaucac

SEQ ID NO: 578937 - RNA, 19 nt, Artificial Sequence
  Description of Artificial Sequence: Synthetic oligonucleotide
  Sense strand starting at position 2624 of SEQ ID NO: 318651
gccauuuaaugguaauuaa

SEQ ID NO: 578938 - RNA, 19 nt, Artificial Sequence
  Description of Artificial Sequence: Synthetic oligonucleotide
  Antisense strand to SEQ ID NO: 578937
uuaauuaccauuaaauggc

SEQ ID NO: 578939 - RNA, 19 nt, Artificial Sequence
  Description of Artificial Sequence: Synthetic oligonucleotide
  Sense strand starting at position 2664 of SEQ ID NO: 318651
cguggcucacgccuauuaa

SEQ ID NO: 578940 - RNA, 19 nt, Artificial Sequence
  Description of Artificial Sequence: Synthetic oligonucleotide
  Antisense strand to SEQ ID NO: 578939
uuaauaggcgugagccacg

SEQ ID NO: 578941 - RNA, 19 nt, Artificial Sequence
  Description of Artificial Sequence: Synthetic oligonucleotide
  Sense strand starting at position 2708 of SEQ ID NO: 318651
caggcuuaagccuaggagu

SEQ ID NO: 578942 - RNA, 19 nt, Artificial Sequence
  Description of Artificial Sequence: Synthetic oligonucleotide
  Antisense strand to SEQ ID NO: 578941
acuccuaggcuuaagccug

SEQ ID NO: 578943 - RNA, 19 nt, Artificial Sequence
  Description of Artificial Sequence: Synthetic oligonucleotide
  Sense strand starting at position 2970 of SEQ ID NO: 318651
guagacauccuuuguaaac

SEQ ID NO: 578944 - RNA, 19 nt, Artificial Sequence
  Description of Artificial Sequence: Synthetic oligonucleotide
  Antisense strand to SEQ ID NO: 578943
guuuacaaaggaugucuac

SEQ ID NO: 578945 - RNA, 19 nt, Artificial Sequence
  Description of Artificial Sequence: Synthetic oligonucleotide
  Sense strand starting at position 3006 of SEQ ID NO: 318651
acauaaagucuuuguuccu

SEQ ID NO: 578946 - RNA, 19 nt, Artificial Sequence
  Description of Artificial Sequence: Synthetic oligonucleotide
  Antisense strand to SEQ ID NO: 578945
aggaacaaagacuuuaugu

SEQ ID NO: 578947 - RNA, 19 nt, Artificial Sequence
  Description of Artificial Sequence: Synthetic oligonucleotide
  Sense strand starting at position 3291 of SEQ ID NO: 318651
cugcauuucgagugcucaa

SEQ ID NO: 578948 - RNA, 19 nt, Artificial Sequence
  Description of Artificial Sequence: Synthetic oligonucleotide
  Antisense strand to SEQ ID NO: 578947
uugagcacucgaaaugcag

SEQ ID NO: 578949 - RNA, 19 nt, Artificial Sequence
  Description of Artificial Sequence: Synthetic oligonucleotide
  Sense strand starting at position 3333 of SEQ ID NO: 318651
agacuacaugcauguauga

SEQ ID NO: 578950 - RNA, 19 nt, Artificial Sequence
  Description of Artificial Sequence: Synthetic oligonucleotide
  Antisense strand to SEQ ID NO: 578949
ucauacaugcauguagucu

SEQ ID NO: 578951 - RNA, 19 nt, Artificial Sequence
  Description of Artificial Sequence: Synthetic oligonucleotide
  Sense strand starting at position 3346 of SEQ ID NO: 318651
guaugacauuuccauuauu

SEQ ID NO: 578952 - RNA, 19 nt, Artificial Sequence
  Description of Artificial Sequence: Synthetic oligonucleotide
  Antisense strand to SEQ ID NO: 578951
aauaauggaaaugucauac

SEQ ID NO: 578953 - RNA, 19 nt, Artificial Sequence
  Description of Artificial Sequence: Synthetic oligonucleotide
  Sense strand starting at position 3630 of SEQ ID NO: 318651
agaauauauucugagaaca

SEQ ID NO: 578954 - RNA, 19 nt, Artificial Sequence
  Description of Artificial Sequence: Synthetic oligonucleotide
  Antisense strand to SEQ ID NO: 578953
uguucucagaauauauucu

SEQ ID NO: 578955 - RNA, 19 nt, Artificial Sequence
  Description of Artificial Sequence: Synthetic oligonucleotide
  Sense strand starting at position 3898 of SEQ ID NO: 318651
gcccaauggccucacuuua

SEQ ID NO: 578956 - RNA, 19 nt, Artificial Sequence
  Description of Artificial Sequence: Synthetic oligonucleotide
  Antisense strand to SEQ ID NO: 578955
uaaagugaggccauugggc

SEQ ID NO: 578957 - RNA, 19 nt, Artificial Sequence
  Description of Artificial Sequence: Synthetic oligonucleotide
  Sense strand starting at position 6 of SEQ ID NO: 318652
uacauaagcguguagaaca

SEQ ID NO: 578958 - RNA, 19 nt, Artificial Sequence
  Description of Artificial Sequence: Synthetic oligonucleotide
  Antisense strand to SEQ ID NO: 578957
uguucuacacgcuuaugua

SEQ ID NO: 578959 - RNA, 19 nt, Artificial Sequence
  Description of Artificial Sequence: Synthetic oligonucleotide
  Sense strand starting at position 79 of SEQ ID NO: 318652
gugccagucccugaucaca

SEQ ID NO: 578960 - RNA, 19 nt, Artificial Sequence
  Description of Artificial Sequence: Synthetic oligonucleotide
  Antisense strand to SEQ ID NO: 578959
ugugaucagggacuggcac

SEQ ID NO: 578961 - RNA, 19 nt, Artificial Sequence
  Description of Artificial Sequence: Synthetic oligonucleotide
  Sense strand starting at position 81 of SEQ ID NO: 318652
gccagucccugaucacauu

SEQ ID NO: 578962 - RNA, 19 nt, Artificial Sequence
  Description of Artificial Sequence: Synthetic oligonucleotide
  Antisense strand to SEQ ID NO: 578961
aaugugaucagggacuggc

SEQ ID NO: 578963 - RNA, 19 nt, Artificial Sequence
  Description of Artificial Sequence: Synthetic oligonucleotide
  Sense strand starting at position 169 of SEQ ID NO: 318652
guugcuagucuugggaaag

SEQ ID NO: 578964 - RNA, 19 nt, Artificial Sequence
  Description of Artificial Sequence: Synthetic oligonucleotide
  Antisense strand to SEQ ID NO: 578963
cuuucccaagacuagcaac

SEQ ID NO: 578965 - RNA, 19 nt, Artificial Sequence
  Description of Artificial Sequence: Synthetic oligonucleotide
  Sense strand starting at position 179 of SEQ ID NO: 318652
uugggaaagccuuaaccuu

SEQ ID NO: 578966 - RNA, 19 nt, Artificial Sequence
  Description of Artificial Sequence: Synthetic oligonucleotide
  Antisense strand to SEQ ID NO: 578965
aagguuaaggcuuucccaa

SEQ ID NO: 578967 - RNA, 19 nt, Artificial Sequence
  Description of Artificial Sequence: Synthetic oligonucleotide
  Sense strand starting at position 594 of SEQ ID NO: 318652
agcuauuagcauuaucagu

SEQ ID NO: 578968 - RNA, 19 nt, Artificial Sequence
  Description of Artificial Sequence: Synthetic oligonucleotide
  Antisense strand to SEQ ID NO: 578967
acugauaaugcuaauagcu

SEQ ID NO: 578969 - RNA, 19 nt, Artificial Sequence
  Description of Artificial Sequence: Synthetic oligonucleotide
  Sense strand starting at position 596 of SEQ ID NO: 318652
cuauuagcauuaucaguuu

SEQ ID NO: 578970 - RNA, 19 nt, Artificial Sequence
  Description of Artificial Sequence: Synthetic oligonucleotide
  Antisense strand to SEQ ID NO: 578969
aaacugauaaugcuaauag

SEQ ID NO: 578971 - RNA, 19 nt, Artificial Sequence
  Description of Artificial Sequence: Synthetic oligonucleotide
  Sense strand starting at position 661 of SEQ ID NO: 318652
ggaugcugaguuuguacua

SEQ ID NO: 578972 - RNA, 19 nt, Artificial Sequence
  Description of Artificial Sequence: Synthetic oligonucleotide
  Antisense strand to SEQ ID NO: 578971
uaguacaaacucagcaucc

SEQ ID NO: 578973 - RNA, 19 nt, Artificial Sequence
  Description of Artificial Sequence: Synthetic oligonucleotide
  Sense strand starting at position 662 of SEQ ID NO: 318652
gaugcugaguuuguacuaa

SEQ ID NO: 578974 - RNA, 19 nt, Artificial Sequence
  Description of Artificial Sequence: Synthetic oligonucleotide
  Antisense strand to SEQ ID NO: 578973
uuaguacaaacucagcauc

SEQ ID NO: 578975 - RNA, 19 nt, Artificial Sequence
  Description of Artificial Sequence: Synthetic oligonucleotide
  Sense strand starting at position 808 of SEQ ID NO: 318652
ugaguaagugcugauuaaa

SEQ ID NO: 578976 - RNA, 19 nt, Artificial Sequence
  Description of Artificial Sequence: Synthetic oligonucleotide
  Antisense strand to SEQ ID NO: 578975
uuuaaucagcacuuacuca

SEQ ID NO: 578977 - RNA, 19 nt, Artificial Sequence
  Description of Artificial Sequence: Synthetic oligonucleotide
  Sense strand starting at position 834 of SEQ ID NO: 318652
uugaccguacugugagaaa

SEQ ID NO: 578978 - RNA, 19 nt, Artificial Sequence
  Description of Artificial Sequence: Synthetic oligonucleotide
  Antisense strand to SEQ ID NO: 578977
uuucucacaguacggucaa

SEQ ID NO: 578979 - RNA, 19 nt, Artificial Sequence
  Description of Artificial Sequence: Synthetic oligonucleotide
  Sense strand starting at position 1093 of SEQ ID NO: 318652
agaagcacuccuggaaacu

SEQ ID NO: 578980 - RNA, 19 nt, Artificial Sequence
  Description of Artificial Sequence: Synthetic oligonucleotide
  Antisense strand to SEQ ID NO: 578979
aguuuccaggagugcuucu

SEQ ID NO: 578981 - RNA, 19 nt, Artificial Sequence
  Description of Artificial Sequence: Synthetic oligonucleotide
  Sense strand starting at position 1196 of SEQ ID NO: 318652
gagccaaaugccugaguuc

SEQ ID NO: 578982 - RNA, 19 nt, Artificial Sequence
  Description of Artificial Sequence: Synthetic oligonucleotide
  Antisense strand to SEQ ID NO: 578981
gaacucaggcauuuggcuc

SEQ ID NO: 578983 - RNA, 19 nt, Artificial Sequence
  Description of Artificial Sequence: Synthetic oligonucleotide
  Sense strand starting at position 1303 of SEQ ID NO: 318652
uaauguuuaggauggaagu

SEQ ID NO: 578984 - RNA, 19 nt, Artificial Sequence
  Description of Artificial Sequence: Synthetic oligonucleotide
  Antisense strand to SEQ ID NO: 578983
acuuccauccuaaacauua

SEQ ID NO: 578985 - RNA, 19 nt, Artificial Sequence
  Description of Artificial Sequence: Synthetic oligonucleotide
  Sense strand starting at position 1343 of SEQ ID NO: 318652
cacguacagcguuaagauc

SEQ ID NO: 578986 - RNA, 19 nt, Artificial Sequence
  Description of Artificial Sequence: Synthetic oligonucleotide
  Antisense strand to SEQ ID NO: 578985
gaucuuaacgcuguacgug

SEQ ID NO: 578987 - RNA, 19 nt, Artificial Sequence
  Description of Artificial Sequence: Synthetic oligonucleotide
  Sense strand starting at position 1367 of SEQ ID NO: 318652
uuggaaagcgcccaauaaa

SEQ ID NO: 578988 - RNA, 19 nt, Artificial Sequence
  Description of Artificial Sequence: Synthetic oligonucleotide
  Antisense strand to SEQ ID NO: 578987
uuuauugggcgcuuuccaa

SEQ ID NO: 578989 - RNA, 19 nt, Artificial Sequence
  Description of Artificial Sequence: Synthetic oligonucleotide
  Sense strand starting at position 1395 of SEQ ID NO: 318652
uuuccuccucgugacauau

SEQ ID NO: 578990 - RNA, 19 nt, Artificial Sequence
  Description of Artificial Sequence: Synthetic oligonucleotide
  Antisense strand to SEQ ID NO: 578989
auaugucacgaggaggaaa

SEQ ID NO: 578991 - RNA, 19 nt, Artificial Sequence
  Description of Artificial Sequence: Synthetic oligonucleotide
  Sense strand starting at position 2455 of SEQ ID NO: 318652
aagacucuaccgcgaacau

SEQ ID NO: 578992 - RNA, 19 nt, Artificial Sequence
  Description of Artificial Sequence: Synthetic oligonucleotide
  Antisense strand to SEQ ID NO: 578991
auguucgcgguagagucuu

SEQ ID NO: 578993 - RNA, 19 nt, Artificial Sequence
  Description of Artificial Sequence: Synthetic oligonucleotide
  Sense strand starting at position 2456 of SEQ ID NO: 318652
agacucuaccgcgaacauu

SEQ ID NO: 578994 - RNA, 19 nt, Artificial Sequence
  Description of Artificial Sequence: Synthetic oligonucleotide
  Antisense strand to SEQ ID NO: 578993
aauguucgcgguagagucu

SEQ ID NO: 578995 - RNA, 19 nt, Artificial Sequence
  Description of Artificial Sequence: Synthetic oligonucleotide
  Sense strand starting at position 2490 of SEQ ID NO: 318652
uguaaaggauucccagaca

SEQ ID NO: 578996 - RNA, 19 nt, Artificial Sequence
  Description of Artificial Sequence: Synthetic oligonucleotide
  Antisense strand to SEQ ID NO: 578995
ugucugggaauccuuuaca

SEQ ID NO: 578997 - RNA, 19 nt, Artificial Sequence
  Description of Artificial Sequence: Synthetic oligonucleotide
  Sense strand starting at position 2495 of SEQ ID NO: 318652
aggauucccagacaucgua

SEQ ID NO: 578998 - RNA, 19 nt, Artificial Sequence
  Description of Artificial Sequence: Synthetic oligonucleotide
  Antisense strand to SEQ ID NO: 578997
uacgaugucugggaauccu

SEQ ID NO: 578999 - RNA, 19 nt, Artificial Sequence
  Description of Artificial Sequence: Synthetic oligonucleotide
  Sense strand starting at position 2516 of SEQ ID NO: 318652
cgcuuugcuccagacauug

SEQ ID NO: 579000 - RNA, 19 nt, Artificial Sequence
  Description of Artificial Sequence: Synthetic oligonucleotide
  Antisense strand to SEQ ID NO: 578999
caaugucuggagcaaagcg

SEQ ID NO: 579001 - RNA, 19 nt, Artificial Sequence
  Description of Artificial Sequence: Synthetic oligonucleotide
  Sense strand starting at position 2521 of SEQ ID NO: 318652
ugcuccagacauuguagau

SEQ ID NO: 579002 - RNA, 19 nt, Artificial Sequence
  Description of Artificial Sequence: Synthetic oligonucleotide
  Antisense strand to SEQ ID NO: 579001
aucuacaaugucuggagca

SEQ ID NO: 579003 - RNA, 19 nt, Artificial Sequence
  Description of Artificial Sequence: Synthetic oligonucleotide
  Sense strand starting at position 2537 of SEQ ID NO: 318652
gaugcuuugcgugcauuau

SEQ ID NO: 579004 - RNA, 19 nt, Artificial Sequence
  Description of Artificial Sequence: Synthetic oligonucleotide
  Antisense strand to SEQ ID NO: 579003
auaaugcacgcaaagcauc

SEQ ID NO: 579005 - RNA, 19 nt, Artificial Sequence
  Description of Artificial Sequence: Synthetic oligonucleotide
  Sense strand starting at position 2625 of SEQ ID NO: 318652
aagguuagaugaccucagu

SEQ ID NO: 579006 - RNA, 19 nt, Artificial Sequence
  Description of Artificial Sequence: Synthetic oligonucleotide
  Antisense strand to SEQ ID NO: 579005
acugaggucaucuaaccuu

SEQ ID NO: 579007 - RNA, 19 nt, Artificial Sequence
  Description of Artificial Sequence: Synthetic oligonucleotide
  Sense strand starting at position 2706 of SEQ ID NO: 318652
uacuuauaugugggcuaga

SEQ ID NO: 579008 - RNA, 19 nt, Artificial Sequence
  Description of Artificial Sequence: Synthetic oligonucleotide
  Antisense strand to SEQ ID NO: 579007
ucuagcccacauauaagua

SEQ ID NO: 579009 - RNA, 19 nt, Artificial Sequence
  Description of Artificial Sequence: Synthetic oligonucleotide
  Sense strand starting at position 2707 of SEQ ID NO: 318652
acuuauaugugggcuagau

SEQ ID NO: 579010 - RNA, 19 nt, Artificial Sequence
  Description of Artificial Sequence: Synthetic oligonucleotide
  Antisense strand to SEQ ID NO: 579009
aucuagcccacauauaagu

SEQ ID NO: 579011 - RNA, 19 nt, Artificial Sequence
  Description of Artificial Sequence: Synthetic oligonucleotide
  Sense strand starting at position 2709 of SEQ ID NO: 318652
uuauaugugggcuagauaa

SEQ ID NO: 579012 - RNA, 19 nt, Artificial Sequence
  Description of Artificial Sequence: Synthetic oligonucleotide
  Antisense strand to SEQ ID NO: 579011
uuaucuagcccacauauaa

SEQ ID NO: 579013 - RNA, 19 nt, Artificial Sequence
  Description of Artificial Sequence: Synthetic oligonucleotide
  Sense strand starting at position 2711 of SEQ ID NO: 318652
auaugugggcuagauaauc

SEQ ID NO: 579014 - RNA, 19 nt, Artificial Sequence
  Description of Artificial Sequence: Synthetic oligonucleotide
  Antisense strand to SEQ ID NO: 579013
gauuaucuagcccacauau

SEQ ID NO: 579015 - RNA, 19 nt, Artificial Sequence
  Description of Artificial Sequence: Synthetic oligonucleotide
  Sense strand starting at position 2858 of SEQ ID NO: 318652
aggucuaaccuuggaauaa

SEQ ID NO: 579016 - RNA, 19 nt, Artificial Sequence
  Description of Artificial Sequence: Synthetic oligonucleotide
  Antisense strand to SEQ ID NO: 579015
uuauuccaagguuagaccu

SEQ ID NO: 579017 - RNA, 19 nt, Artificial Sequence
  Description of Artificial Sequence: Synthetic oligonucleotide
  Sense strand starting at position 3061 of SEQ ID NO: 318652
gugacuucgcaauaauaca

SEQ ID NO: 579018 - RNA, 19 nt, Artificial Sequence
  Description of Artificial Sequence: Synthetic oligonucleotide
  Antisense strand to SEQ ID NO: 579017
uguauuauugcgaagucac

SEQ ID NO: 579019 - RNA, 19 nt, Artificial Sequence
  Description of Artificial Sequence: Synthetic oligonucleotide
  Sense strand starting at position 3116 of SEQ ID NO: 318652
gggauucuccuauaaggcu

SEQ ID NO: 579020 - RNA, 19 nt, Artificial Sequence
  Description of Artificial Sequence: Synthetic oligonucleotide
  Antisense strand to SEQ ID NO: 579019
agccuuauaggagaauccc

SEQ ID NO: 579021 - RNA, 19 nt, Artificial Sequence
  Description of Artificial Sequence: Synthetic oligonucleotide
  Sense strand starting at position 3324 of SEQ ID NO: 318652
gaauccuggcccugguuua

SEQ ID NO: 579022 - RNA, 19 nt, Artificial Sequence
  Description of Artificial Sequence: Synthetic oligonucleotide
  Antisense strand to SEQ ID NO: 579021
uaaaccagggccaggauuc

SEQ ID NO: 579023 - RNA, 19 nt, Artificial Sequence
  Description of Artificial Sequence: Synthetic oligonucleotide
  Sense strand starting at position 3516 of SEQ ID NO: 318652
aauggcuggucucuaauua

SEQ ID NO: 579024 - RNA, 19 nt, Artificial Sequence
  Description of Artificial Sequence: Synthetic oligonucleotide
  Antisense strand to SEQ ID NO: 579023
uaauuagagaccagccauu

SEQ ID NO: 579025 - RNA, 19 nt, Artificial Sequence
  Description of Artificial Sequence: Synthetic oligonucleotide
  Sense strand starting at position 3861 of SEQ ID NO: 318652
aacugaguccucugucuag

SEQ ID NO: 579026 - RNA, 19 nt, Artificial Sequence
  Description of Artificial Sequence: Synthetic oligonucleotide
  Antisense strand to SEQ ID NO: 579025
cuagacagaggacucaguu

SEQ ID NO: 579027 - RNA, 19 nt, Artificial Sequence
  Description of Artificial Sequence: Synthetic oligonucleotide
  Sense strand starting at position 3864 of SEQ ID NO: 318652
ugaguccucugucuagaaa

SEQ ID NO: 579028 - RNA, 19 nt, Artificial Sequence
  Description of Artificial Sequence: Synthetic oligonucleotide
  Antisense strand to SEQ ID NO: 579027
uuucuagacagaggacuca

SEQ ID NO: 579029 - RNA, 19 nt, Artificial Sequence
  Description of Artificial Sequence: Synthetic oligonucleotide
  Sense strand starting at position 3884 of SEQ ID NO: 318652
ggacuuacucuaggccaca

SEQ ID NO: 579030 - RNA, 19 nt, Artificial Sequence
  Description of Artificial Sequence: Synthetic oligonucleotide
  Antisense strand to SEQ ID NO: 579029
uguggccuagaguaagucc

SEQ ID NO: 579031 - RNA, 19 nt, Artificial Sequence
  Description of Artificial Sequence: Synthetic oligonucleotide
  Sense strand starting at position 3974 of SEQ ID NO: 318652
guaccaaguugucuuuaca

SEQ ID NO: 579032 - RNA, 19 nt, Artificial Sequence
  Description of Artificial Sequence: Synthetic oligonucleotide
  Antisense strand to SEQ ID NO: 579031
uguaaagacaacuugguac

SEQ ID NO: 579033 - RNA, 19 nt, Artificial Sequence
  Description of Artificial Sequence: Synthetic oligonucleotide
  Sense strand starting at position 3977 of SEQ ID NO: 318652
ccaaguugucuuuacaaug

SEQ ID NO: 579034 - RNA, 19 nt, Artificial Sequence
  Description of Artificial Sequence: Synthetic oligonucleotide
  Antisense strand to SEQ ID NO: 579033
cauuguaaagacaacuugg

SEQ ID NO: 579035 - RNA, 19 nt, Artificial Sequence
  Description of Artificial Sequence: Synthetic oligonucleotide
  Sense strand starting at position 3982 of SEQ ID NO: 318652
uugucuuuacaaugacaug

SEQ ID NO: 579036 - RNA, 19 nt, Artificial Sequence
  Description of Artificial Sequence: Synthetic oligonucleotide
  Antisense strand to SEQ ID NO: 579035
caugucauuguaaagacaa

SEQ ID NO: 579037 - RNA, 19 nt, Artificial Sequence
  Description of Artificial Sequence: Synthetic oligonucleotide
  Sense strand starting at position 152 of SEQ ID NO: 318653
acaguagcugcucauuaaa

SEQ ID NO: 579038 - RNA, 19 nt, Artificial Sequence
  Description of Artificial Sequence: Synthetic oligonucleotide
  Antisense strand to SEQ ID NO: 579037
uuuaaugagcagcuacugu

SEQ ID NO: 579039 - RNA, 19 nt, Artificial Sequence
  Description of Artificial Sequence: Synthetic oligonucleotide
  Sense strand starting at position 354 of SEQ ID NO: 318653
aaggguagccugugaccua

SEQ ID NO: 579040 - RNA, 19 nt, Artificial Sequence
  Description of Artificial Sequence: Synthetic oligonucleotide
  Antisense strand to SEQ ID NO: 579039
uaggucacaggcuacccuu

SEQ ID NO: 579041 - RNA, 19 nt, Artificial Sequence
  Description of Artificial Sequence: Synthetic oligonucleotide
  Sense strand starting at position 409 of SEQ ID NO: 318653
gggaguucacugugaagga

SEQ ID NO: 579042 - RNA, 19 nt, Artificial Sequence
  Description of Artificial Sequence: Synthetic oligonucleotide
  Antisense strand to SEQ ID NO: 579041
uccuucacagugaacuccc

SEQ ID NO: 579043 - RNA, 19 nt, Artificial Sequence
  Description of Artificial Sequence: Synthetic oligonucleotide
  Sense strand starting at position 645 of SEQ ID NO: 318653
agcauuuacucggcucagu

SEQ ID NO: 579044 - RNA, 19 nt, Artificial Sequence
  Description of Artificial Sequence: Synthetic oligonucleotide
  Antisense strand to SEQ ID NO: 579043
acugagccgaguaaaugcu

SEQ ID NO: 579045 - RNA, 19 nt, Artificial Sequence
  Description of Artificial Sequence: Synthetic oligonucleotide
  Sense strand starting at position 779 of SEQ ID NO: 318653
gcugguccaccauaagaaa

SEQ ID NO: 579046 - RNA, 19 nt, Artificial Sequence
  Description of Artificial Sequence: Synthetic oligonucleotide
  Antisense strand to SEQ ID NO: 579045
uuucuuaugguggaccagc

SEQ ID NO: 579047 - RNA, 19 nt, Artificial Sequence
  Description of Artificial Sequence: Synthetic oligonucleotide
  Sense strand starting at position 846 of SEQ ID NO: 318653
gaaggaaucuaugagaaac

SEQ ID NO: 579048 - RNA, 19 nt, Artificial Sequence
  Description of Artificial Sequence: Synthetic oligonucleotide
  Antisense strand to SEQ ID NO: 579047
guuucucauagauuccuuc

SEQ ID NO: 579049 - RNA, 19 nt, Artificial Sequence
  Description of Artificial Sequence: Synthetic oligonucleotide
  Sense strand starting at position 848 of SEQ ID NO: 318653
aggaaucuaugagaaacuc

SEQ ID NO: 579050 - RNA, 19 nt, Artificial Sequence
  Description of Artificial Sequence: Synthetic oligonucleotide
  Antisense strand to SEQ ID NO: 579049
gaguuucucauagauuccu

SEQ ID NO: 579051 - RNA, 19 nt, Artificial Sequence
  Description of Artificial Sequence: Synthetic oligonucleotide
  Sense strand starting at position 1008 of SEQ ID NO: 318653
ggcggagaccuuggauaau

SEQ ID NO: 579052 - RNA, 19 nt, Artificial Sequence
  Description of Artificial Sequence: Synthetic oligonucleotide
  Antisense strand to SEQ ID NO: 579051
auuauccaaggucuccgcc

SEQ ID NO: 579053 - RNA, 19 nt, Artificial Sequence
  Description of Artificial Sequence: Synthetic oligonucleotide
  Sense strand starting at position 1214 of SEQ ID NO: 318653
gaguuucaggaguguggaa

SEQ ID NO: 579054 - RNA, 19 nt, Artificial Sequence
  Description of Artificial Sequence: Synthetic oligonucleotide
  Antisense strand to SEQ ID NO: 579053
uuccacacuccugaaacuc

SEQ ID NO: 579055 - RNA, 19 nt, Artificial Sequence
  Description of Artificial Sequence: Synthetic oligonucleotide
  Sense strand starting at position 1216 of SEQ ID NO: 318653
guuucaggaguguggaaga

SEQ ID NO: 579056 - RNA, 19 nt, Artificial Sequence
  Description of Artificial Sequence: Synthetic oligonucleotide
  Antisense strand to SEQ ID NO: 579055
ucuuccacacuccugaaac

SEQ ID NO: 579057 - RNA, 19 nt, Artificial Sequence
  Description of Artificial Sequence: Synthetic oligonucleotide
  Sense strand starting at position 1266 of SEQ ID NO: 318653
gaaagccuugucuggagga

SEQ ID NO: 579058 - RNA, 19 nt, Artificial Sequence
  Description of Artificial Sequence: Synthetic oligonucleotide
  Antisense strand to SEQ ID NO: 579057
uccuccagacaaggcuuuc

SEQ ID NO: 579059 - RNA, 19 nt, Artificial Sequence
  Description of Artificial Sequence: Synthetic oligonucleotide
  Sense strand starting at position 1268 of SEQ ID NO: 318653
aagccuugucuggaggaga

SEQ ID NO: 579060 - RNA, 19 nt, Artificial Sequence
  Description of Artificial Sequence: Synthetic oligonucleotide
  Antisense strand to SEQ ID NO: 579059
ucuccuccagacaaggcuu

SEQ ID NO: 579061 - RNA, 19 nt, Artificial Sequence
  Description of Artificial Sequence: Synthetic oligonucleotide
  Sense strand starting at position 1523 of SEQ ID NO: 318653
acucuaguuccauggccau

SEQ ID NO: 579062 - RNA, 19 nt, Artificial Sequence
  Description of Artificial Sequence: Synthetic oligonucleotide
  Antisense strand to SEQ ID NO: 579061
auggccauggaacuagagu

SEQ ID NO: 579063 - RNA, 19 nt, Artificial Sequence
  Description of Artificial Sequence: Synthetic oligonucleotide
  Sense strand starting at position 1639 of SEQ ID NO: 318653
ggaauacugucaccaugcu

SEQ ID NO: 579064 - RNA, 19 nt, Artificial Sequence
  Description of Artificial Sequence: Synthetic oligonucleotide
  Antisense strand to SEQ ID NO: 579063
agcauggugacaguauucc

SEQ ID NO: 579065 - RNA, 19 nt, Artificial Sequence
  Description of Artificial Sequence: Synthetic oligonucleotide
  Sense strand starting at position 1814 of SEQ ID NO: 318653
cagggucugcuuuaccuaa

SEQ ID NO: 579066 - RNA, 19 nt, Artificial Sequence
  Description of Artificial Sequence: Synthetic oligonucleotide
  Antisense strand to SEQ ID NO: 579065
uuagguaaagcagacccug

SEQ ID NO: 579067 - RNA, 19 nt, Artificial Sequence
  Description of Artificial Sequence: Synthetic oligonucleotide
  Sense strand starting at position 1816 of SEQ ID NO: 318653
gggucugcuuuaccuaaca

SEQ ID NO: 579068 - RNA, 19 nt, Artificial Sequence
  Description of Artificial Sequence: Synthetic oligonucleotide
  Antisense strand to SEQ ID NO: 579067
uguuagguaaagcagaccc

SEQ ID NO: 579069 - RNA, 19 nt, Artificial Sequence
  Description of Artificial Sequence: Synthetic oligonucleotide
  Sense strand starting at position 2062 of SEQ ID NO: 318653
gaagcucuagucugucaau

SEQ ID NO: 579070 - RNA, 19 nt, Artificial Sequence
  Description of Artificial Sequence: Synthetic oligonucleotide
  Antisense strand to SEQ ID NO: 579069
auugacagacuagagcuuc

SEQ ID NO: 579071 - RNA, 19 nt, Artificial Sequence
  Description of Artificial Sequence: Synthetic oligonucleotide
  Sense strand starting at position 2109 of SEQ ID NO: 318653
cuggucugaccauauuaua

SEQ ID NO: 579072 - RNA, 19 nt, Artificial Sequence
  Description of Artificial Sequence: Synthetic oligonucleotide
  Antisense strand to SEQ ID NO: 579071
uauaauauggucagaccag

SEQ ID NO: 579073 - RNA, 19 nt, Artificial Sequence
  Description of Artificial Sequence: Synthetic oligonucleotide
  Sense strand starting at position 2222 of SEQ ID NO: 318653
acuguuggcuuguuuggaa

SEQ ID NO: 579074 - RNA, 19 nt, Artificial Sequence
  Description of Artificial Sequence: Synthetic oligonucleotide
  Antisense strand to SEQ ID NO: 579073
uuccaaacaagccaacagu

SEQ ID NO: 579075 - RNA, 19 nt, Artificial Sequence
  Description of Artificial Sequence: Synthetic oligonucleotide
  Sense strand starting at position 2229 of SEQ ID NO: 318653
gcuuguuuggaacaggagu

SEQ ID NO: 579076 - RNA, 19 nt, Artificial Sequence
  Description of Artificial Sequence: Synthetic oligonucleotide
  Antisense strand to SEQ ID NO: 579075
acuccuguuccaaacaagc

SEQ ID NO: 579077 - RNA, 19 nt, Artificial Sequence
  Description of Artificial Sequence: Synthetic oligonucleotide
  Sense strand starting at position 2327 of SEQ ID NO: 318653
gucugugagguccagaaga

SEQ ID NO: 579078 - RNA, 19 nt, Artificial Sequence
  Description of Artificial Sequence: Synthetic oligonucleotide
  Antisense strand to SEQ ID NO: 579077
ucuucuggaccucacagac

SEQ ID NO: 579079 - RNA, 19 nt, Artificial Sequence
  Description of Artificial Sequence: Synthetic oligonucleotide
  Sense strand starting at position 2433 of SEQ ID NO: 318653
caauuaauggucuaggcau

SEQ ID NO: 579080 - RNA, 19 nt, Artificial Sequence
  Description of Artificial Sequence: Synthetic oligonucleotide
  Antisense strand to SEQ ID NO: 579079
augccuagaccauuaauug

SEQ ID NO: 579081 - RNA, 19 nt, Artificial Sequence
  Description of Artificial Sequence: Synthetic oligonucleotide
  Sense strand starting at position 2435 of SEQ ID NO: 318653
auuaauggucuaggcauua

SEQ ID NO: 579082 - RNA, 19 nt, Artificial Sequence
  Description of Artificial Sequence: Synthetic oligonucleotide
  Antisense strand to SEQ ID NO: 579081
uaaugccuagaccauuaau

SEQ ID NO: 579083 - RNA, 19 nt, Artificial Sequence
  Description of Artificial Sequence: Synthetic oligonucleotide
  Sense strand starting at position 2448 of SEQ ID NO: 318653
gcauuaauuuacuauggga

SEQ ID NO: 579084 - RNA, 19 nt, Artificial Sequence
  Description of Artificial Sequence: Synthetic oligonucleotide
  Antisense strand to SEQ ID NO: 579083
ucccauaguaaauuaaugc

SEQ ID NO: 579085 - RNA, 19 nt, Artificial Sequence
  Description of Artificial Sequence: Synthetic oligonucleotide
  Sense strand starting at position 2542 of SEQ ID NO: 318653
augcuuguacccuaaggga

SEQ ID NO: 579086 - RNA, 19 nt, Artificial Sequence
  Description of Artificial Sequence: Synthetic oligonucleotide
  Antisense strand to SEQ ID NO: 579085
ucccuuaggguacaagcau

SEQ ID NO: 579087 - RNA, 19 nt, Artificial Sequence
  Description of Artificial Sequence: Synthetic oligonucleotide
  Sense strand starting at position 2576 of SEQ ID NO: 318653
aguccaaaguuccauuuau

SEQ ID NO: 579088 - RNA, 19 nt, Artificial Sequence
  Description of Artificial Sequence: Synthetic oligonucleotide
  Antisense strand to SEQ ID NO: 579087
auaaauggaacuuuggacu

SEQ ID NO: 579089 - RNA, 19 nt, Artificial Sequence
  Description of Artificial Sequence: Synthetic oligonucleotide
  Sense strand starting at position 2593 of SEQ ID NO: 318653
auauguguaucaucuucuu

SEQ ID NO: 579090 - RNA, 19 nt, Artificial Sequence
  Description of Artificial Sequence: Synthetic oligonucleotide
  Antisense strand to SEQ ID NO: 579089
aagaagaugauacacauau

SEQ ID NO: 579091 - RNA, 19 nt, Artificial Sequence
  Description of Artificial Sequence: Synthetic oligonucleotide
  Sense strand starting at position 2791 of SEQ ID NO: 318653
ugcuuuaugucacugaaac

SEQ ID NO: 579092 - RNA, 19 nt, Artificial Sequence
  Description of Artificial Sequence: Synthetic oligonucleotide
  Antisense strand to SEQ ID NO: 579091
guuucagugacauaaagca

SEQ ID NO: 579093 - RNA, 19 nt, Artificial Sequence
  Description of Artificial Sequence: Synthetic oligonucleotide
  Sense strand starting at position 2792 of SEQ ID NO: 318653
gcuuuaugucacugaaacc

SEQ ID NO: 579094 - RNA, 19 nt, Artificial Sequence
  Description of Artificial Sequence: Synthetic oligonucleotide
  Antisense strand to SEQ ID NO: 579093
gguuucagugacauaaagc

SEQ ID NO: 579095 - RNA, 19 nt, Artificial Sequence
  Description of Artificial Sequence: Synthetic oligonucleotide
  Sense strand starting at position 2808 of SEQ ID NO: 318653
accaguuggaaaggugauu

SEQ ID NO: 579096 - RNA, 19 nt, Artificial Sequence
  Description of Artificial Sequence: Synthetic oligonucleotide
  Antisense strand to SEQ ID NO: 579095
aaucaccuuuccaacuggu

SEQ ID NO: 579097 - RNA, 19 nt, Artificial Sequence
  Description of Artificial Sequence: Synthetic oligonucleotide
  Sense strand starting at position 2837 of SEQ ID NO: 318653
aacucuguggcuuaguaga

SEQ ID NO: 579098 - RNA, 19 nt, Artificial Sequence
  Description of Artificial Sequence: Synthetic oligonucleotide
  Antisense strand to SEQ ID NO: 579097
ucuacuaagccacagaguu

SEQ ID NO: 579099 - RNA, 19 nt, Artificial Sequence
  Description of Artificial Sequence: Synthetic oligonucleotide
  Sense strand starting at position 2839 of SEQ ID NO: 318653
cucuguggcuuaguagaga

SEQ ID NO: 579100 - RNA, 19 nt, Artificial Sequence
  Description of Artificial Sequence: Synthetic oligonucleotide
  Antisense strand to SEQ ID NO: 579099
ucucuacuaagccacagag

SEQ ID NO: 579101 - RNA, 19 nt, Artificial Sequence
  Description of Artificial Sequence: Synthetic oligonucleotide
  Sense strand starting at position 2852 of SEQ ID NO: 318653
uagagaagcucucugucca

SEQ ID NO: 579102 - RNA, 19 nt, Artificial Sequence
  Description of Artificial Sequence: Synthetic oligonucleotide
  Antisense strand to SEQ ID NO: 579101
uggacagagagcuucucua

SEQ ID NO: 579103 - RNA, 19 nt, Artificial Sequence
  Description of Artificial Sequence: Synthetic oligonucleotide
  Sense strand starting at position 2853 of SEQ ID NO: 318653
agagaagcucucuguccau

SEQ ID NO: 579104 - RNA, 19 nt, Artificial Sequence
  Description of Artificial Sequence: Synthetic oligonucleotide
  Antisense strand to SEQ ID NO: 579103
auggacagagagcuucucu

SEQ ID NO: 579105 - RNA, 19 nt, Artificial Sequence
  Description of Artificial Sequence: Synthetic oligonucleotide
  Sense strand starting at position 2928 of SEQ ID NO: 318653
cugggugcugaggaauuau

SEQ ID NO: 579106 - RNA, 19 nt, Artificial Sequence
  Description of Artificial Sequence: Synthetic oligonucleotide
  Antisense strand to SEQ ID NO: 579105
auaauuccucagcacccag

SEQ ID NO: 579107 - RNA, 19 nt, Artificial Sequence
  Description of Artificial Sequence: Synthetic oligonucleotide
  Sense strand starting at position 3136 of SEQ ID NO: 318653
agaacauucuuugcagaga

SEQ ID NO: 579108 - RNA, 19 nt, Artificial Sequence
  Description of Artificial Sequence: Synthetic oligonucleotide
  Antisense strand to SEQ ID NO: 579107
ucucugcaaagaauguucu

SEQ ID NO: 579109 - RNA, 19 nt, Artificial Sequence
  Description of Artificial Sequence: Synthetic oligonucleotide
  Sense strand starting at position 3213 of SEQ ID NO: 318653
auagcucuccagcaugaaa

SEQ ID NO: 579110 - RNA, 19 nt, Artificial Sequence
  Description of Artificial Sequence: Synthetic oligonucleotide
  Antisense strand to SEQ ID NO: 579109
uuucaugcuggagagcuau

SEQ ID NO: 579111 - RNA, 19 nt, Artificial Sequence
  Description of Artificial Sequence: Synthetic oligonucleotide
  Sense strand starting at position 3468 of SEQ ID NO: 318653
gcuugaaucgccuccuugu

SEQ ID NO: 579112 - RNA, 19 nt, Artificial Sequence
  Description of Artificial Sequence: Synthetic oligonucleotide
  Antisense strand to SEQ ID NO: 579111
acaaggaggcgauucaagc

SEQ ID NO: 579113 - RNA, 19 nt, Artificial Sequence
  Description of Artificial Sequence: Synthetic oligonucleotide
  Sense strand starting at position 3860 of SEQ ID NO: 318653
aaacaaaguucugaugaga

SEQ ID NO: 579114 - RNA, 19 nt, Artificial Sequence
  Description of Artificial Sequence: Synthetic oligonucleotide
  Antisense strand to SEQ ID NO: 579113
ucucaucagaacuuuguuu

SEQ ID NO: 579115 - RNA, 19 nt, Artificial Sequence
  Description of Artificial Sequence: Synthetic oligonucleotide
  Sense strand starting at position 3913 of SEQ ID NO: 318653
augaauacaccguguggga

SEQ ID NO: 579116 - RNA, 19 nt, Artificial Sequence
  Description of Artificial Sequence: Synthetic oligonucleotide
  Antisense strand to SEQ ID NO: 579115
ucccacacgguguauucau

SEQ ID NO: 579117 - RNA, 19 nt, Artificial Sequence
  Description of Artificial Sequence: Synthetic oligonucleotide
  Sense strand starting at position 14 of SEQ ID NO: 318654
uugguuugacgucacuuua

SEQ ID NO: 579118 - RNA, 19 nt, Artificial Sequence
  Description of Artificial Sequence: Synthetic oligonucleotide
  Antisense strand to SEQ ID NO: 579117
uaaagugacgucaaaccaa

SEQ ID NO: 579119 - RNA, 19 nt, Artificial Sequence
  Description of Artificial Sequence: Synthetic oligonucleotide
  Sense strand starting at position 63 of SEQ ID NO: 318654
ugcagaauccaacaugguu

SEQ ID NO: 579120 - RNA, 19 nt, Artificial Sequence
  Description of Artificial Sequence: Synthetic oligonucleotide
  Antisense strand to SEQ ID NO: 579119
aaccauguuggauucugca

SEQ ID NO: 579121 - RNA, 19 nt, Artificial Sequence
  Description of Artificial Sequence: Synthetic oligonucleotide
  Sense strand starting at position 307 of SEQ ID NO: 318654
uaauaaagccacugagagu

SEQ ID NO: 579122 - RNA, 19 nt, Artificial Sequence
  Description of Artificial Sequence: Synthetic oligonucleotide
  Antisense strand to SEQ ID NO: 579121
acucucaguggcuuuauua

SEQ ID NO: 579123 - RNA, 19 nt, Artificial Sequence
  Description of Artificial Sequence: Synthetic oligonucleotide
  Sense strand starting at position 314 of SEQ ID NO: 318654
gccacugagaguugaggua

SEQ ID NO: 579124 - RNA, 19 nt, Artificial Sequence
  Description of Artificial Sequence: Synthetic oligonucleotide
  Antisense strand to SEQ ID NO: 579123
uaccucaacucucaguggc

SEQ ID NO: 579125 - RNA, 19 nt, Artificial Sequence
  Description of Artificial Sequence: Synthetic oligonucleotide
  Sense strand starting at position 357 of SEQ ID NO: 318654
auauuucagugggaggaau

SEQ ID NO: 579126 - RNA, 19 nt, Artificial Sequence
  Description of Artificial Sequence: Synthetic oligonucleotide
  Antisense strand to SEQ ID NO: 579125
auuccucccacugaaauau

SEQ ID NO: 579127 - RNA, 19 nt, Artificial Sequence
  Description of Artificial Sequence: Synthetic oligonucleotide
  Sense strand starting at position 474 of SEQ ID NO: 318654
guuaaauugcaugaaguaa

SEQ ID NO: 579128 - RNA, 19 nt, Artificial Sequence
  Description of Artificial Sequence: Synthetic oligonucleotide
  Antisense strand to SEQ ID NO: 579127
uuacuucaugcaauuuaac

SEQ ID NO: 579129 - RNA, 19 nt, Artificial Sequence
  Description of Artificial Sequence: Synthetic oligonucleotide
  Sense strand starting at position 724 of SEQ ID NO: 318654
acaugaaagcuuugauaua

SEQ ID NO: 579130 - RNA, 19 nt, Artificial Sequence
  Description of Artificial Sequence: Synthetic oligonucleotide
  Antisense strand to SEQ ID NO: 579129
uauaucaaagcuuucaugu

SEQ ID NO: 579131 - RNA, 19 nt, Artificial Sequence
  Description of Artificial Sequence: Synthetic oligonucleotide
  Sense strand starting at position 788 of SEQ ID NO: 318654
ugaguaguacgucaggaca

SEQ ID NO: 579132 - RNA, 19 nt, Artificial Sequence
  Description of Artificial Sequence: Synthetic oligonucleotide
  Antisense strand to SEQ ID NO: 579131
uguccugacguacuacuca

SEQ ID NO: 579133 - RNA, 19 nt, Artificial Sequence
  Description of Artificial Sequence: Synthetic oligonucleotide
  Sense strand starting at position 1023 of SEQ ID NO: 318654
agaccauccugauuagcga

SEQ ID NO: 579134 - RNA, 19 nt, Artificial Sequence
  Description of Artificial Sequence: Synthetic oligonucleotide
  Antisense strand to SEQ ID NO: 579133
ucgcuaaucaggauggucu

SEQ ID NO: 579135 - RNA, 19 nt, Artificial Sequence
  Description of Artificial Sequence: Synthetic oligonucleotide
  Sense strand starting at position 1031 of SEQ ID NO: 318654
cugauuagcgauuaagaua

SEQ ID NO: 579136 - RNA, 19 nt, Artificial Sequence
  Description of Artificial Sequence: Synthetic oligonucleotide
  Antisense strand to SEQ ID NO: 579135
uaucuuaaucgcuaaucag

SEQ ID NO: 579137 - RNA, 19 nt, Artificial Sequence
  Description of Artificial Sequence: Synthetic oligonucleotide
  Sense strand starting at position 1104 of SEQ ID NO: 318654
uaagcaacacgcgaucauu

SEQ ID NO: 579138 - RNA, 19 nt, Artificial Sequence
  Description of Artificial Sequence: Synthetic oligonucleotide
  Antisense strand to SEQ ID NO: 579137
aaugaucgcguguugcuua

SEQ ID NO: 579139 - RNA, 19 nt, Artificial Sequence
  Description of Artificial Sequence: Synthetic oligonucleotide
  Sense strand starting at position 2464 of SEQ ID NO: 318654
gcccgcuuagaacaagaua

SEQ ID NO: 579140 - RNA, 19 nt, Artificial Sequence
  Description of Artificial Sequence: Synthetic oligonucleotide
  Antisense strand to SEQ ID NO: 579139
uaucuuguucuaagcgggc

SEQ ID NO: 579141 - RNA, 19 nt, Artificial Sequence
  Description of Artificial Sequence: Synthetic oligonucleotide
  Sense strand starting at position 2498 of SEQ ID NO: 318654
uuguaucuggcguauaaac

SEQ ID NO: 579142 - RNA, 19 nt, Artificial Sequence
  Description of Artificial Sequence: Synthetic oligonucleotide
  Antisense strand to SEQ ID NO: 579141
guuuauacgccagauacaa

SEQ ID NO: 579143 - RNA, 19 nt, Artificial Sequence
  Description of Artificial Sequence: Synthetic oligonucleotide
  Sense strand starting at position 2500 of SEQ ID NO: 318654
guaucuggcguauaaacua

SEQ ID NO: 579144 - RNA, 19 nt, Artificial Sequence
  Description of Artificial Sequence: Synthetic oligonucleotide
  Antisense strand to SEQ ID NO: 579143
uaguuuauacgccagauac

SEQ ID NO: 579145 - RNA, 19 nt, Artificial Sequence
  Description of Artificial Sequence: Synthetic oligonucleotide
  Sense strand starting at position 2624 of SEQ ID NO: 318654
cuaaccugccaucaugaga

SEQ ID NO: 579146 - RNA, 19 nt, Artificial Sequence
  Description of Artificial Sequence: Synthetic oligonucleotide
  Antisense strand to SEQ ID NO: 579145
ucucaugauggcagguuag

SEQ ID NO: 579147 - RNA, 19 nt, Artificial Sequence
  Description of Artificial Sequence: Synthetic oligonucleotide
  Sense strand starting at position 2740 of SEQ ID NO: 318654
ucaguuuccuucccucaga

SEQ ID NO: 579148 - RNA, 19 nt, Artificial Sequence
  Description of Artificial Sequence: Synthetic oligonucleotide
  Antisense strand to SEQ ID NO: 579147
ucugagggaaggaaacuga

SEQ ID NO: 579149 - RNA, 19 nt, Artificial Sequence
  Description of Artificial Sequence: Synthetic oligonucleotide
  Sense strand starting at position 2743 of SEQ ID NO: 318654
guuuccuucccucagauua

SEQ ID NO: 579150 - RNA, 19 nt, Artificial Sequence
  Description of Artificial Sequence: Synthetic oligonucleotide
  Antisense strand to SEQ ID NO: 579149
uaaucugagggaaggaaac

SEQ ID NO: 579151 - RNA, 19 nt, Artificial Sequence
  Description of Artificial Sequence: Synthetic oligonucleotide
  Sense strand starting at position 2834 of SEQ ID NO: 318654
ugaugaugcccgugauaau

SEQ ID NO: 579152 - RNA, 19 nt, Artificial Sequence
  Description of Artificial Sequence: Synthetic oligonucleotide
  Antisense strand to SEQ ID NO: 579151
auuaucacgggcaucauca

SEQ ID NO: 579153 - RNA, 19 nt, Artificial Sequence
  Description of Artificial Sequence: Synthetic oligonucleotide
  Sense strand starting at position 2835 of SEQ ID NO: 318654
gaugaugcccgugauaaua

SEQ ID NO: 579154 - RNA, 19 nt, Artificial Sequence
  Description of Artificial Sequence: Synthetic oligonucleotide
  Antisense strand to SEQ ID NO: 579153
uauuaucacgggcaucauc

SEQ ID NO: 579155 - RNA, 19 nt, Artificial Sequence
  Description of Artificial Sequence: Synthetic oligonucleotide
  Sense strand starting at position 2858 of SEQ ID NO: 318654
ucacaugaucagugugagu

SEQ ID NO: 579156 - RNA, 19 nt, Artificial Sequence
  Description of Artificial Sequence: Synthetic oligonucleotide
  Antisense strand to SEQ ID NO: 579155
acucacacugaucauguga

SEQ ID NO: 579157 - RNA, 19 nt, Artificial Sequence
  Description of Artificial Sequence: Synthetic oligonucleotide
  Sense strand starting at position 2860 of SEQ ID NO: 318654
acaugaucagugugaguag

SEQ ID NO: 579158 - RNA, 19 nt, Artificial Sequence
  Description of Artificial Sequence: Synthetic oligonucleotide
  Antisense strand to SEQ ID NO: 579157
cuacucacacugaucaugu

SEQ ID NO: 579159 - RNA, 19 nt, Artificial Sequence
  Description of Artificial Sequence: Synthetic oligonucleotide
  Sense strand starting at position 2863 of SEQ ID NO: 318654
ugaucagugugaguagaaa

SEQ ID NO: 579160 - RNA, 19 nt, Artificial Sequence
  Description of Artificial Sequence: Synthetic oligonucleotide
  Antisense strand to SEQ ID NO: 579159
uuucuacucacacugauca

SEQ ID NO: 579161 - RNA, 19 nt, Artificial Sequence
  Description of Artificial Sequence: Synthetic oligonucleotide
  Sense strand starting at position 2886 of SEQ ID NO: 318654
agcaguuccgacuaucuua

SEQ ID NO: 579162 - RNA, 19 nt, Artificial Sequence
  Description of Artificial Sequence: Synthetic oligonucleotide
  Antisense strand to SEQ ID NO: 579161
uaagauagucggaacugcu

SEQ ID NO: 579163 - RNA, 19 nt, Artificial Sequence
  Description of Artificial Sequence: Synthetic oligonucleotide
  Sense strand starting at position 2905 of SEQ ID NO: 318654
cuggaagugcuguauauau

SEQ ID NO: 579164 - RNA, 19 nt, Artificial Sequence
  Description of Artificial Sequence: Synthetic oligonucleotide
  Antisense strand to SEQ ID NO: 579163
auauauacagcacuuccag

SEQ ID NO: 579165 - RNA, 19 nt, Artificial Sequence
  Description of Artificial Sequence: Synthetic oligonucleotide
  Sense strand starting at position 2940 of SEQ ID NO: 318654
aguuguugccuuccuguca

SEQ ID NO: 579166 - RNA, 19 nt, Artificial Sequence
  Description of Artificial Sequence: Synthetic oligonucleotide
  Antisense strand to SEQ ID NO: 579165
ugacaggaaggcaacaacu

SEQ ID NO: 579167 - RNA, 19 nt, Artificial Sequence
  Description of Artificial Sequence: Synthetic oligonucleotide
  Sense strand starting at position 2944 of SEQ ID NO: 318654
guugccuuccugucauagu

SEQ ID NO: 579168 - RNA, 19 nt, Artificial Sequence
  Description of Artificial Sequence: Synthetic oligonucleotide
  Antisense strand to SEQ ID NO: 579167
acuaugacaggaaggcaac

SEQ ID NO: 579169 - RNA, 19 nt, Artificial Sequence
  Description of Artificial Sequence: Synthetic oligonucleotide
  Sense strand starting at position 2952 of SEQ ID NO: 318654
ccugucauaguuuagguaa

SEQ ID NO: 579170 - RNA, 19 nt, Artificial Sequence
  Description of Artificial Sequence: Synthetic oligonucleotide
  Antisense strand to SEQ ID NO: 579169
uuaccuaaacuaugacagg

SEQ ID NO: 579171 - RNA, 19 nt, Artificial Sequence
  Description of Artificial Sequence: Synthetic oligonucleotide
  Sense strand starting at position 3221 of SEQ ID NO: 318654
gauacaguaguguauauca

SEQ ID NO: 579172 - RNA, 19 nt, Artificial Sequence
  Description of Artificial Sequence: Synthetic oligonucleotide
  Antisense strand to SEQ ID NO: 579171
ugauauacacuacuguauc

SEQ ID NO: 579173 - RNA, 19 nt, Artificial Sequence
  Description of Artificial Sequence: Synthetic oligonucleotide
  Sense strand starting at position 3263 of SEQ ID NO: 318654
ggaguagauuaccaagaaa

SEQ ID NO: 579174 - RNA, 19 nt, Artificial Sequence
  Description of Artificial Sequence: Synthetic oligonucleotide
  Antisense strand to SEQ ID NO: 579173
uuucuugguaaucuacucc

SEQ ID NO: 579175 - RNA, 19 nt, Artificial Sequence
  Description of Artificial Sequence: Synthetic oligonucleotide
  Sense strand starting at position 3301 of SEQ ID NO: 318654
ucugaaugguaguuuaucu

SEQ ID NO: 579176 - RNA, 19 nt, Artificial Sequence
  Description of Artificial Sequence: Synthetic oligonucleotide
  Antisense strand to SEQ ID NO: 579175
agauaaacuaccauucaga

SEQ ID NO: 579177 - RNA, 19 nt, Artificial Sequence
  Description of Artificial Sequence: Synthetic oligonucleotide
  Sense strand starting at position 3308 of SEQ ID NO: 318654
gguaguuuaucugcaggaa

SEQ ID NO: 579178 - RNA, 19 nt, Artificial Sequence
  Description of Artificial Sequence: Synthetic oligonucleotide
  Antisense strand to SEQ ID NO: 579177
uuccugcagauaaacuacc

SEQ ID NO: 579179 - RNA, 19 nt, Artificial Sequence
  Description of Artificial Sequence: Synthetic oligonucleotide
  Sense strand starting at position 3309 of SEQ ID NO: 318654
guaguuuaucugcaggaaa

SEQ ID NO: 579180 - RNA, 19 nt, Artificial Sequence
  Description of Artificial Sequence: Synthetic oligonucleotide
  Antisense strand to SEQ ID NO: 579179
uuuccugcagauaaacuac

SEQ ID NO: 579181 - RNA, 19 nt, Artificial Sequence
  Description of Artificial Sequence: Synthetic oligonucleotide
  Sense strand starting at position 3416 of SEQ ID NO: 318654
aucagaagauguguaguau

SEQ ID NO: 579182 - RNA, 19 nt, Artificial Sequence
  Description of Artificial Sequence: Synthetic oligonucleotide
  Antisense strand to SEQ ID NO: 579181
auacuacacaucuucugau

SEQ ID NO: 579183 - RNA, 19 nt, Artificial Sequence
  Description of Artificial Sequence: Synthetic oligonucleotide
  Sense strand starting at position 3417 of SEQ ID NO: 318654
ucagaagauguguaguauu

SEQ ID NO: 579184 - RNA, 19 nt, Artificial Sequence
  Description of Artificial Sequence: Synthetic oligonucleotide
  Antisense strand to SEQ ID NO: 579183
aauacuacacaucuucuga

SEQ ID NO: 579185 - RNA, 19 nt, Artificial Sequence
  Description of Artificial Sequence: Synthetic oligonucleotide
  Sense strand starting at position 3437 of SEQ ID NO: 318654
gcauucuacuuugcuaaag

SEQ ID NO: 579186 - RNA, 19 nt, Artificial Sequence
  Description of Artificial Sequence: Synthetic oligonucleotide
  Antisense strand to SEQ ID NO: 579185
cuuuagcaaaguagaaugc

SEQ ID NO: 579187 - RNA, 19 nt, Artificial Sequence
  Description of Artificial Sequence: Synthetic oligonucleotide
  Sense strand starting at position 3544 of SEQ ID NO: 318654
cuugauuaauaguuuggaa

SEQ ID NO: 579188 - RNA, 19 nt, Artificial Sequence
  Description of Artificial Sequence: Synthetic oligonucleotide
  Antisense strand to SEQ ID NO: 579187
uuccaaacuauuaaucaag

SEQ ID NO: 579189 - RNA, 19 nt, Artificial Sequence
  Description of Artificial Sequence: Synthetic oligonucleotide
  Sense strand starting at position 3643 of SEQ ID NO: 318654
aaauguugauuaucagaug

SEQ ID NO: 579190 - RNA, 19 nt, Artificial Sequence
  Description of Artificial Sequence: Synthetic oligonucleotide
  Antisense strand to SEQ ID NO: 579189
caucugauaaucaacauuu

SEQ ID NO: 579191 - RNA, 19 nt, Artificial Sequence
  Description of Artificial Sequence: Synthetic oligonucleotide
  Sense strand starting at position 3778 of SEQ ID NO: 318654
uugucucuucuaggucaaa

SEQ ID NO: 579192 - RNA, 19 nt, Artificial Sequence
  Description of Artificial Sequence: Synthetic oligonucleotide
  Antisense strand to SEQ ID NO: 579191
uuugaccuagaagagacaa

SEQ ID NO: 579193 - RNA, 19 nt, Artificial Sequence
  Description of Artificial Sequence: Synthetic oligonucleotide
  Sense strand starting at position 3779 of SEQ ID NO: 318654
ugucucuucuaggucaaau

SEQ ID NO: 579194 - RNA, 19 nt, Artificial Sequence
  Description of Artificial Sequence: Synthetic oligonucleotide
  Antisense strand to SEQ ID NO: 579193
auuugaccuagaagagaca

SEQ ID NO: 579195 - RNA, 19 nt, Artificial Sequence
  Description of Artificial Sequence: Synthetic oligonucleotide
  Sense strand starting at position 3866 of SEQ ID NO: 318654
cuuugacaguuugcacaua

SEQ ID NO: 579196 - RNA, 19 nt, Artificial Sequence
  Description of Artificial Sequence: Synthetic oligonucleotide
  Antisense strand to SEQ ID NO: 579195
uaugugcaaacugucaaag

SEQ ID NO: 579197 - RNA, 19 nt, Artificial Sequence
  Description of Artificial Sequence: Synthetic oligonucleotide
  Sense strand starting at position 39 of SEQ ID NO: 318655
acagaaaguuguucuuucu

SEQ ID NO: 579198 - RNA, 19 nt, Artificial Sequence
  Description of Artificial Sequence: Synthetic oligonucleotide
  Antisense strand to SEQ ID NO: 579197
agaaagaacaacuuucugu

SEQ ID NO: 579199 - RNA, 19 nt, Artificial Sequence
  Description of Artificial Sequence: Synthetic oligonucleotide
  Sense strand starting at position 42 of SEQ ID NO: 318655
gaaaguuguucuuucucag

SEQ ID NO: 579200 - RNA, 19 nt, Artificial Sequence
  Description of Artificial Sequence: Synthetic oligonucleotide
  Antisense strand to SEQ ID NO: 579199
cugagaaagaacaacuuuc

SEQ ID NO: 579201 - RNA, 19 nt, Artificial Sequence
  Description of Artificial Sequence: Synthetic oligonucleotide
  Sense strand starting at position 205 of SEQ ID NO: 318655
caggauugggcuuagcuaa

SEQ ID NO: 579202 - RNA, 19 nt, Artificial Sequence
  Description of Artificial Sequence: Synthetic oligonucleotide
  Antisense strand to SEQ ID NO: 579201
uuagcuaagcccaauccug

SEQ ID NO: 579203 - RNA, 19 nt, Artificial Sequence
  Description of Artificial Sequence: Synthetic oligonucleotide
  Sense strand starting at position 368 of SEQ ID NO: 318655
uucuuuccucaguacuaga

SEQ ID NO: 579204 - RNA, 19 nt, Artificial Sequence
  Description of Artificial Sequence: Synthetic oligonucleotide
  Antisense strand to SEQ ID NO: 579203
ucuaguacugaggaaagaa

SEQ ID NO: 579205 - RNA, 19 nt, Artificial Sequence
  Description of Artificial Sequence: Synthetic oligonucleotide
  Sense strand starting at position 373 of SEQ ID NO: 318655
uccucaguacuagaaguau

SEQ ID NO: 579206 - RNA, 19 nt, Artificial Sequence
  Description of Artificial Sequence: Synthetic oligonucleotide
  Antisense strand to SEQ ID NO: 579205
auacuucuaguacugagga

SEQ ID NO: 579207 - RNA, 19 nt, Artificial Sequence
  Description of Artificial Sequence: Synthetic oligonucleotide
  Sense strand starting at position 524 of SEQ ID NO: 318655
aaugcaguauuucugcgaa

SEQ ID NO: 579208 - RNA, 19 nt, Artificial Sequence
  Description of Artificial Sequence: Synthetic oligonucleotide
  Antisense strand to SEQ ID NO: 579207
uucgcagaaauacugcauu

SEQ ID NO: 579209 - RNA, 19 nt, Artificial Sequence
  Description of Artificial Sequence: Synthetic oligonucleotide
  Sense strand starting at position 526 of SEQ ID NO: 318655
ugcaguauuucugcgaaac

SEQ ID NO: 579210 - RNA, 19 nt, Artificial Sequence
  Description of Artificial Sequence: Synthetic oligonucleotide
  Antisense strand to SEQ ID NO: 579209
guuucgcagaaauacugca

SEQ ID NO: 579211 - RNA, 19 nt, Artificial Sequence
  Description of Artificial Sequence: Synthetic oligonucleotide
  Sense strand starting at position 527 of SEQ ID NO: 318655
gcaguauuucugcgaaacc

SEQ ID NO: 579212 - RNA, 19 nt, Artificial Sequence
  Description of Artificial Sequence: Synthetic oligonucleotide
  Antisense strand to SEQ ID NO: 579211
gguuucgcagaaauacugc

SEQ ID NO: 579213 - RNA, 19 nt, Artificial Sequence
  Description of Artificial Sequence: Synthetic oligonucleotide
  Sense strand starting at position 602 of SEQ ID NO: 318655
cgaagagcuuacuuaccaa

SEQ ID NO: 579214 - RNA, 19 nt, Artificial Sequence
  Description of Artificial Sequence: Synthetic oligonucleotide
  Antisense strand to SEQ ID NO: 579213
uugguaaguaagcucuucg

SEQ ID NO: 579215 - RNA, 19 nt, Artificial Sequence
  Description of Artificial Sequence: Synthetic oligonucleotide
  Sense strand starting at position 737 of SEQ ID NO: 318655
caugauauagagugaaugu

SEQ ID NO: 579216 - RNA, 19 nt, Artificial Sequence
  Description of Artificial Sequence: Synthetic oligonucleotide
  Antisense strand to SEQ ID NO: 579215
acauucacucuauaucaug

SEQ ID NO: 579217 - RNA, 19 nt, Artificial Sequence
  Description of Artificial Sequence: Synthetic oligonucleotide
  Sense strand starting at position 744 of SEQ ID NO: 318655
uagagugaauguuuccuuu

SEQ ID NO: 579218 - RNA, 19 nt, Artificial Sequence
  Description of Artificial Sequence: Synthetic oligonucleotide
  Antisense strand to SEQ ID NO: 579217
aaaggaaacauucacucua

SEQ ID NO: 579219 - RNA, 19 nt, Artificial Sequence
  Description of Artificial Sequence: Synthetic oligonucleotide
  Sense strand starting at position 746 of SEQ ID NO: 318655
gagugaauguuuccuuuac

SEQ ID NO: 579220 - RNA, 19 nt, Artificial Sequence
  Description of Artificial Sequence: Synthetic oligonucleotide
  Antisense strand to SEQ ID NO: 579219
guaaaggaaacauucacuc

SEQ ID NO: 579221 - RNA, 19 nt, Artificial Sequence
  Description of Artificial Sequence: Synthetic oligonucleotide
  Sense strand starting at position 747 of SEQ ID NO: 318655
agugaauguuuccuuuacu

SEQ ID NO: 579222 - RNA, 19 nt, Artificial Sequence
  Description of Artificial Sequence: Synthetic oligonucleotide
  Antisense strand to SEQ ID NO: 579221
aguaaaggaaacauucacu

SEQ ID NO: 579223 - RNA, 19 nt, Artificial Sequence
  Description of Artificial Sequence: Synthetic oligonucleotide
  Sense strand starting at position 748 of SEQ ID NO: 318655
gugaauguuuccuuuacug

SEQ ID NO: 579224 - RNA, 19 nt, Artificial Sequence
  Description of Artificial Sequence: Synthetic oligonucleotide
  Antisense strand to SEQ ID NO: 579223
caguaaaggaaacauucac

SEQ ID NO: 579225 - RNA, 19 nt, Artificial Sequence
  Description of Artificial Sequence: Synthetic oligonucleotide
  Sense strand starting at position 783 of SEQ ID NO: 318655
uccauuugagcacgguuua

SEQ ID NO: 579226 - RNA, 19 nt, Artificial Sequence
  Description of Artificial Sequence: Synthetic oligonucleotide
  Antisense strand to SEQ ID NO: 579225
uaaaccgugcucaaaugga

SEQ ID NO: 579227 - RNA, 19 nt, Artificial Sequence
  Description of Artificial Sequence: Synthetic oligonucleotide
  Sense strand starting at position 809 of SEQ ID NO: 318655
acagaaagcauacguggua

SEQ ID NO: 579228 - RNA, 19 nt, Artificial Sequence
  Description of Artificial Sequence: Synthetic oligonucleotide
  Antisense strand to SEQ ID NO: 579227
uaccacguaugcuuucugu

SEQ ID NO: 579229 - RNA, 19 nt, Artificial Sequence
  Description of Artificial Sequence: Synthetic oligonucleotide
  Sense strand starting at position 886 of SEQ ID NO: 318655
ccagcacacucgguaaaga

SEQ ID NO: 579230 - RNA, 19 nt, Artificial Sequence
  Description of Artificial Sequence: Synthetic oligonucleotide
  Antisense strand to SEQ ID NO: 579229
ucuuuaccgagugugcugg

SEQ ID NO: 579231 - RNA, 19 nt, Artificial Sequence
  Description of Artificial Sequence: Synthetic oligonucleotide
  Sense strand starting at position 1121 of SEQ ID NO: 318655
acccauuucuggccaguca

SEQ ID NO: 579232 - RNA, 19 nt, Artificial Sequence
  Description of Artificial Sequence: Synthetic oligonucleotide
  Antisense strand to SEQ ID NO: 579231
ugacuggccagaaaugggu

SEQ ID NO: 579233 - RNA, 19 nt, Artificial Sequence
  Description of Artificial Sequence: Synthetic oligonucleotide
  Sense strand starting at position 1711 of SEQ ID NO: 318655
cuugguuugcugcaaauaa

SEQ ID NO: 579234 - RNA, 19 nt, Artificial Sequence
  Description of Artificial Sequence: Synthetic oligonucleotide
  Antisense strand to SEQ ID NO: 579233
uuauuugcagcaaaccaag

SEQ ID NO: 579235 - RNA, 19 nt, Artificial Sequence
  Description of Artificial Sequence: Synthetic oligonucleotide
  Sense strand starting at position 2069 of SEQ ID NO: 318655
aucucuaauuccguccaga

SEQ ID NO: 579236 - RNA, 19 nt, Artificial Sequence
  Description of Artificial Sequence: Synthetic oligonucleotide
  Antisense strand to SEQ ID NO: 579235
ucuggacggaauuagagau

SEQ ID NO: 579237 - RNA, 19 nt, Artificial Sequence
  Description of Artificial Sequence: Synthetic oligonucleotide
  Sense strand starting at position 2072 of SEQ ID NO: 318655
ucuaauuccguccagauua

SEQ ID NO: 579238 - RNA, 19 nt, Artificial Sequence
  Description of Artificial Sequence: Synthetic oligonucleotide
  Antisense strand to SEQ ID NO: 579237
uaaucuggacggaauuaga

SEQ ID NO: 579239 - RNA, 19 nt, Artificial Sequence
  Description of Artificial Sequence: Synthetic oligonucleotide
  Sense strand starting at position 2177 of SEQ ID NO: 318655
uuacauacacauggugaau

SEQ ID NO: 579240 - RNA, 19 nt, Artificial Sequence
  Description of Artificial Sequence: Synthetic oligonucleotide
  Antisense strand to SEQ ID NO: 579239
auucaccauguguauguaa

SEQ ID NO: 579241 - RNA, 19 nt, Artificial Sequence
  Description of Artificial Sequence: Synthetic oligonucleotide
  Sense strand starting at position 2366 of SEQ ID NO: 318655
uuugcagaacuugacuuaa

SEQ ID NO: 579242 - RNA, 19 nt, Artificial Sequence
  Description of Artificial Sequence: Synthetic oligonucleotide
  Antisense strand to SEQ ID NO: 579241
uuaagucaaguucugcaaa

SEQ ID NO: 579243 - RNA, 19 nt, Artificial Sequence
  Description of Artificial Sequence: Synthetic oligonucleotide
  Sense strand starting at position 2474 of SEQ ID NO: 318655
aggacuuugggucgaagga

SEQ ID NO: 579244 - RNA, 19 nt, Artificial Sequence
  Description of Artificial Sequence: Synthetic oligonucleotide
  Antisense strand to SEQ ID NO: 579243
uccuucgacccaaaguccu

SEQ ID NO: 579245 - RNA, 19 nt, Artificial Sequence
  Description of Artificial Sequence: Synthetic oligonucleotide
  Sense strand starting at position 2597 of SEQ ID NO: 318655
agguauuauuugccuccau

SEQ ID NO: 579246 - RNA, 19 nt, Artificial Sequence
  Description of Artificial Sequence: Synthetic oligonucleotide
  Antisense strand to SEQ ID NO: 579245
auggaggcaaauaauaccu

SEQ ID NO: 579247 - RNA, 19 nt, Artificial Sequence
  Description of Artificial Sequence: Synthetic oligonucleotide
  Sense strand starting at position 2598 of SEQ ID NO: 318655
gguauuauuugccuccaug

SEQ ID NO: 579248 - RNA, 19 nt, Artificial Sequence
  Description of Artificial Sequence: Synthetic oligonucleotide
  Antisense strand to SEQ ID NO: 579247
cauggaggcaaauaauacc

SEQ ID NO: 579249 - RNA, 19 nt, Artificial Sequence
  Description of Artificial Sequence: Synthetic oligonucleotide
  Sense strand starting at position 2790 of SEQ ID NO: 318655
aguaucaagcaugacuuau

SEQ ID NO: 579250 - RNA, 19 nt, Artificial Sequence
  Description of Artificial Sequence: Synthetic oligonucleotide
  Antisense strand to SEQ ID NO: 579249
auaagucaugcuugauacu

SEQ ID NO: 579251 - RNA, 19 nt, Artificial Sequence
  Description of Artificial Sequence: Synthetic oligonucleotide
  Sense strand starting at position 2969 of SEQ ID NO: 318655
cuuaauagccuguaaucug

SEQ ID NO: 579252 - RNA, 19 nt, Artificial Sequence
  Description of Artificial Sequence: Synthetic oligonucleotide
  Antisense strand to SEQ ID NO: 579251
cagauuacaggcuauuaag

SEQ ID NO: 579253 - RNA, 19 nt, Artificial Sequence
  Description of Artificial Sequence: Synthetic oligonucleotide
  Sense strand starting at position 3000 of SEQ ID NO: 318655
aaguucuaaugacuucgua

SEQ ID NO: 579254 - RNA, 19 nt, Artificial Sequence
  Description of Artificial Sequence: Synthetic oligonucleotide
  Antisense strand to SEQ ID NO: 579253
uacgaagucauuagaacuu

SEQ ID NO: 579255 - RNA, 19 nt, Artificial Sequence
  Description of Artificial Sequence: Synthetic oligonucleotide
  Sense strand starting at position 3003 of SEQ ID NO: 318655
uucuaaugacuucguaaau

SEQ ID NO: 579256 - RNA, 19 nt, Artificial Sequence
  Description of Artificial Sequence: Synthetic oligonucleotide
  Antisense strand to SEQ ID NO: 579255
auuuacgaagucauuagaa

SEQ ID NO: 579257 - RNA, 19 nt, Artificial Sequence
  Description of Artificial Sequence: Synthetic oligonucleotide
  Sense strand starting at position 3004 of SEQ ID NO: 318655
ucuaaugacuucguaaaug

SEQ ID NO: 579258 - RNA, 19 nt, Artificial Sequence
  Description of Artificial Sequence: Synthetic oligonucleotide
  Antisense strand to SEQ ID NO: 579257
cauuuacgaagucauuaga

SEQ ID NO: 579259 - RNA, 19 nt, Artificial Sequence
  Description of Artificial Sequence: Synthetic oligonucleotide
  Sense strand starting at position 3014 of SEQ ID NO: 318655
ucguaaauggcccaaucua

SEQ ID NO: 579260 - RNA, 19 nt, Artificial Sequence
  Description of Artificial Sequence: Synthetic oligonucleotide
  Antisense strand to SEQ ID NO: 579259
uagauugggccauuuacga

SEQ ID NO: 579261 - RNA, 19 nt, Artificial Sequence
  Description of Artificial Sequence: Synthetic oligonucleotide
  Sense strand starting at position 3186 of SEQ ID NO: 318655
ccugacuucguauaucauu

SEQ ID NO: 579262 - RNA, 19 nt, Artificial Sequence
  Description of Artificial Sequence: Synthetic oligonucleotide
  Antisense strand to SEQ ID NO: 579261
aaugauauacgaagucagg

SEQ ID NO: 579263 - RNA, 19 nt, Artificial Sequence
  Description of Artificial Sequence: Synthetic oligonucleotide
  Sense strand starting at position 3239 of SEQ ID NO: 318655
auaguauuccauuguacca

SEQ ID NO: 579264 - RNA, 19 nt, Artificial Sequence
  Description of Artificial Sequence: Synthetic oligonucleotide
  Antisense strand to SEQ ID NO: 579263
ugguacaauggaauacuau

SEQ ID NO: 579265 - RNA, 19 nt, Artificial Sequence
  Description of Artificial Sequence: Synthetic oligonucleotide
  Sense strand starting at position 3382 of SEQ ID NO: 318655
gauagagaucgcugaguau

SEQ ID NO: 579266 - RNA, 19 nt, Artificial Sequence
  Description of Artificial Sequence: Synthetic oligonucleotide
  Antisense strand to SEQ ID NO: 579265
auacucagcgaucucuauc

SEQ ID NO: 579267 - RNA, 19 nt, Artificial Sequence
  Description of Artificial Sequence: Synthetic oligonucleotide
  Sense strand starting at position 3385 of SEQ ID NO: 318655
agagaucgcugaguaugaa

SEQ ID NO: 579268 - RNA, 19 nt, Artificial Sequence
  Description of Artificial Sequence: Synthetic oligonucleotide
  Antisense strand to SEQ ID NO: 579267
uucauacucagcgaucucu

SEQ ID NO: 579269 - RNA, 19 nt, Artificial Sequence
  Description of Artificial Sequence: Synthetic oligonucleotide
  Sense strand starting at position 3552 of SEQ ID NO: 318655
gguuguauaagacaaguua

SEQ ID NO: 579270 - RNA, 19 nt, Artificial Sequence
  Description of Artificial Sequence: Synthetic oligonucleotide
  Antisense strand to SEQ ID NO: 579269
uaacuugucuuauacaacc

SEQ ID NO: 579271 - RNA, 19 nt, Artificial Sequence
  Description of Artificial Sequence: Synthetic oligonucleotide
  Sense strand starting at position 3721 of SEQ ID NO: 318655
uuaauaugacauggccaua

SEQ ID NO: 579272 - RNA, 19 nt, Artificial Sequence
  Description of Artificial Sequence: Synthetic oligonucleotide
  Antisense strand to SEQ ID NO: 579271
uauggccaugucauauuaa

SEQ ID NO: 579273 - RNA, 19 nt, Artificial Sequence
  Description of Artificial Sequence: Synthetic oligonucleotide
  Sense strand starting at position 3790 of SEQ ID NO: 318655
uggucuugagaauggauag

SEQ ID NO: 579274 - RNA, 19 nt, Artificial Sequence
  Description of Artificial Sequence: Synthetic oligonucleotide
  Antisense strand to SEQ ID NO: 579273
cuauccauucucaagacca

SEQ ID NO: 579275 - RNA, 19 nt, Artificial Sequence
  Description of Artificial Sequence: Synthetic oligonucleotide
  Sense strand starting at position 3896 of SEQ ID NO: 318655
guaccaaugucccuacaua

SEQ ID NO: 579276 - RNA, 19 nt, Artificial Sequence
  Description of Artificial Sequence: Synthetic oligonucleotide
  Antisense strand to SEQ ID NO: 579275
uauguagggacauugguac

SEQ ID NO: 579277 - RNA, 19 nt, Artificial Sequence
  Description of Artificial Sequence: Synthetic oligonucleotide
  Sense strand starting at position 1365 of SEQ ID NO: 318656
gugucaggacccugagaug

SEQ ID NO: 579278 - RNA, 19 nt, Artificial Sequence
  Description of Artificial Sequence: Synthetic oligonucleotide
  Antisense strand to SEQ ID NO: 579277
caucucaggguccugacac

SEQ ID NO: 579279 - RNA, 19 nt, Artificial Sequence
  Description of Artificial Sequence: Synthetic oligonucleotide
  Sense strand starting at position 2130 of SEQ ID NO: 318656
caccgagaccucugccuua

SEQ ID NO: 579280 - RNA, 19 nt, Artificial Sequence
  Description of Artificial Sequence: Synthetic oligonucleotide
  Antisense strand to SEQ ID NO: 579279
uaaggcagaggucucggug

SEQ ID NO: 579281 - RNA, 19 nt, Artificial Sequence
  Description of Artificial Sequence: Synthetic oligonucleotide
  Sense strand starting at position 2133 of SEQ ID NO: 318656
cgagaccucugccuuacaa

SEQ ID NO: 579282 - RNA, 19 nt, Artificial Sequence
  Description of Artificial Sequence: Synthetic oligonucleotide
  Antisense strand to SEQ ID NO: 579281
uuguaaggcagaggucucg

SEQ ID NO: 579283 - RNA, 19 nt, Artificial Sequence
  Description of Artificial Sequence: Synthetic oligonucleotide
  Sense strand starting at position 317 of SEQ ID NO: 318657
acacguagcaguuaauaga

SEQ ID NO: 579284 - RNA, 19 nt, Artificial Sequence
  Description of Artificial Sequence: Synthetic oligonucleotide
  Antisense strand to SEQ ID NO: 579283
ucuauuaacugcuacgugu

SEQ ID NO: 579285 - RNA, 19 nt, Artificial Sequence
  Description of Artificial Sequence: Synthetic oligonucleotide
  Sense strand starting at position 584 of SEQ ID NO: 318657
cuucuccacgaguaacaau

SEQ ID NO: 579286 - RNA, 19 nt, Artificial Sequence
  Description of Artificial Sequence: Synthetic oligonucleotide
  Antisense strand to SEQ ID NO: 579285
auuguuacucguggagaag

SEQ ID NO: 579287 - RNA, 19 nt, Artificial Sequence
  Description of Artificial Sequence: Synthetic oligonucleotide
  Sense strand starting at position 655 of SEQ ID NO: 318657
gucccaucacuguaucacu

SEQ ID NO: 579288 - RNA, 19 nt, Artificial Sequence
  Description of Artificial Sequence: Synthetic oligonucleotide
  Antisense strand to SEQ ID NO: 579287
agugauacagugaugggac

SEQ ID NO: 579289 - RNA, 19 nt, Artificial Sequence
  Description of Artificial Sequence: Synthetic oligonucleotide
  Sense strand starting at position 699 of SEQ ID NO: 318657
agacaaucucgcuaacaca

SEQ ID NO: 579290 - RNA, 19 nt, Artificial Sequence
  Description of Artificial Sequence: Synthetic oligonucleotide
  Antisense strand to SEQ ID NO: 579289
uguguuagcgagauugucu

SEQ ID NO: 579291 - RNA, 19 nt, Artificial Sequence
  Description of Artificial Sequence: Synthetic oligonucleotide
  Sense strand starting at position 800 of SEQ ID NO: 318657
ggaugccauaaguaaagua

SEQ ID NO: 579292 - RNA, 19 nt, Artificial Sequence
  Description of Artificial Sequence: Synthetic oligonucleotide
  Antisense strand to SEQ ID NO: 579291
uacuuuacuuauggcaucc

SEQ ID NO: 579293 - RNA, 19 nt, Artificial Sequence
  Description of Artificial Sequence: Synthetic oligonucleotide
  Sense strand starting at position 827 of SEQ ID NO: 318657
ucaauugaacccgaauguu

SEQ ID NO: 579294 - RNA, 19 nt, Artificial Sequence
  Description of Artificial Sequence: Synthetic oligonucleotide
  Antisense strand to SEQ ID NO: 579293
aacauucggguucaauuga

SEQ ID NO: 579295 - RNA, 19 nt, Artificial Sequence
  Description of Artificial Sequence: Synthetic oligonucleotide
  Sense strand starting at position 869 of SEQ ID NO: 318657
ucaagaagucauuguuaac

SEQ ID NO: 579296 - RNA, 19 nt, Artificial Sequence
  Description of Artificial Sequence: Synthetic oligonucleotide
  Antisense strand to SEQ ID NO: 579295
guuaacaaugacuucuuga

SEQ ID NO: 579297 - RNA, 19 nt, Artificial Sequence
  Description of Artificial Sequence: Synthetic oligonucleotide
  Sense strand starting at position 875 of SEQ ID NO: 318657
agucauuguuaaccauaua

SEQ ID NO: 579298 - RNA, 19 nt, Artificial Sequence
  Description of Artificial Sequence: Synthetic oligonucleotide
  Antisense strand to SEQ ID NO: 579297
uauaugguuaacaaugacu

SEQ ID NO: 579299 - RNA, 19 nt, Artificial Sequence
  Description of Artificial Sequence: Synthetic oligonucleotide
  Sense strand starting at position 1101 of SEQ ID NO: 318657
acauuagaucucggacaua

SEQ ID NO: 579300 - RNA, 19 nt, Artificial Sequence
  Description of Artificial Sequence: Synthetic oligonucleotide
  Antisense strand to SEQ ID NO: 579299
uauguccgagaucuaaugu

SEQ ID NO: 579301 - RNA, 19 nt, Artificial Sequence
  Description of Artificial Sequence: Synthetic oligonucleotide
  Sense strand starting at position 1246 of SEQ ID NO: 318657
gaagcugaagccugauuaa

SEQ ID NO: 579302 - RNA, 19 nt, Artificial Sequence
  Description of Artificial Sequence: Synthetic oligonucleotide
  Antisense strand to SEQ ID NO: 579301
uuaaucaggcuucagcuuc

SEQ ID NO: 579303 - RNA, 19 nt, Artificial Sequence
  Description of Artificial Sequence: Synthetic oligonucleotide
  Sense strand starting at position 1332 of SEQ ID NO: 318657
cacagagaucuccacggua

SEQ ID NO: 579304 - RNA, 19 nt, Artificial Sequence
  Description of Artificial Sequence: Synthetic oligonucleotide
  Antisense strand to SEQ ID NO: 579303
uaccguggagaucucugug

SEQ ID NO: 579305 - RNA, 19 nt, Artificial Sequence
  Description of Artificial Sequence: Synthetic oligonucleotide
  Sense strand starting at position 1335 of SEQ ID NO: 318657
agagaucuccacgguagga

SEQ ID NO: 579306 - RNA, 19 nt, Artificial Sequence
  Description of Artificial Sequence: Synthetic oligonucleotide
  Antisense strand to SEQ ID NO: 579305
uccuaccguggagaucucu

SEQ ID NO: 579307 - RNA, 19 nt, Artificial Sequence
  Description of Artificial Sequence: Synthetic oligonucleotide
  Sense strand starting at position 1425 of SEQ ID NO: 318657
guaucuauuucguucuaga

SEQ ID NO: 579308 - RNA, 19 nt, Artificial Sequence
  Description of Artificial Sequence: Synthetic oligonucleotide
  Antisense strand to SEQ ID NO: 579307
ucuagaacgaaauagauac

SEQ ID NO: 579309 - RNA, 19 nt, Artificial Sequence
  Description of Artificial Sequence: Synthetic oligonucleotide
  Sense strand starting at position 1518 of SEQ ID NO: 318657
gggcgagcacugaguguuu

SEQ ID NO: 579310 - RNA, 19 nt, Artificial Sequence
  Description of Artificial Sequence: Synthetic oligonucleotide
  Antisense strand to SEQ ID NO: 579309
aaacacucagugcucgccc

SEQ ID NO: 579311 - RNA, 19 nt, Artificial Sequence
  Description of Artificial Sequence: Synthetic oligonucleotide
  Sense strand starting at position 1563 of SEQ ID NO: 318657
ggcuucgauaaguagggaa

SEQ ID NO: 579312 - RNA, 19 nt, Artificial Sequence
  Description of Artificial Sequence: Synthetic oligonucleotide
  Antisense strand to SEQ ID NO: 579311
uucccuacuuaucgaagcc

SEQ ID NO: 579313 - RNA, 19 nt, Artificial Sequence
  Description of Artificial Sequence: Synthetic oligonucleotide
  Sense strand starting at position 2544 of SEQ ID NO: 318657
ggaccuugcgugcucuauu

SEQ ID NO: 579314 - RNA, 19 nt, Artificial Sequence
  Description of Artificial Sequence: Synthetic oligonucleotide
  Antisense strand to SEQ ID NO: 579313
aauagagcacgcaaggucc

SEQ ID NO: 579315 - RNA, 19 nt, Artificial Sequence
  Description of Artificial Sequence: Synthetic oligonucleotide
  Sense strand starting at position 2700 of SEQ ID NO: 318657
cuccuauggccugaaauug

SEQ ID NO: 579316 - RNA, 19 nt, Artificial Sequence
  Description of Artificial Sequence: Synthetic oligonucleotide
  Antisense strand to SEQ ID NO: 579315
caauuucaggccauaggag

SEQ ID NO: 579317 - RNA, 19 nt, Artificial Sequence
  Description of Artificial Sequence: Synthetic oligonucleotide
  Sense strand starting at position 2737 of SEQ ID NO: 318657
acaugucaucaucgggaca

SEQ ID NO: 579318 - RNA, 19 nt, Artificial Sequence
  Description of Artificial Sequence: Synthetic oligonucleotide
  Antisense strand to SEQ ID NO: 579317
ugucccgaugaugacaugu

SEQ ID NO: 579319 - RNA, 19 nt, Artificial Sequence
  Description of Artificial Sequence: Synthetic oligonucleotide
  Sense strand starting at position 2839 of SEQ ID NO: 318657
agacauuaauuagcuuagu

SEQ ID NO: 579320 - RNA, 19 nt, Artificial Sequence
  Description of Artificial Sequence: Synthetic oligonucleotide
  Antisense strand to SEQ ID NO: 579319
acuaagcuaauuaaugucu

SEQ ID NO: 579321 - RNA, 19 nt, Artificial Sequence
  Description of Artificial Sequence: Synthetic oligonucleotide
  Sense strand starting at position 2926 of SEQ ID NO: 318657
uuaugaaguagaugugaau

SEQ ID NO: 579322 - RNA, 19 nt, Artificial Sequence
  Description of Artificial Sequence: Synthetic oligonucleotide
  Antisense strand to SEQ ID NO: 579321
auucacaucuacuucauaa

SEQ ID NO: 579323 - RNA, 19 nt, Artificial Sequence
  Description of Artificial Sequence: Synthetic oligonucleotide
  Sense strand starting at position 3034 of SEQ ID NO: 318657
ucuuguacugcgucuguaa

SEQ ID NO: 579324 - RNA, 19 nt, Artificial Sequence
  Description of Artificial Sequence: Synthetic oligonucleotide
  Antisense strand to SEQ ID NO: 579323
uuacagacgcaguacaaga

SEQ ID NO: 579325 - RNA, 19 nt, Artificial Sequence
  Description of Artificial Sequence: Synthetic oligonucleotide
  Sense strand starting at position 3035 of SEQ ID NO: 318657
cuuguacugcgucuguaau

SEQ ID NO: 579326 - RNA, 19 nt, Artificial Sequence
  Description of Artificial Sequence: Synthetic oligonucleotide
  Antisense strand to SEQ ID NO: 579325
auuacagacgcaguacaag

SEQ ID NO: 579327 - RNA, 19 nt, Artificial Sequence
  Description of Artificial Sequence: Synthetic oligonucleotide
  Sense strand starting at position 3093 of SEQ ID NO: 318657
aguaguacagucuauuaac

SEQ ID NO: 579328 - RNA, 19 nt, Artificial Sequence
  Description of Artificial Sequence: Synthetic oligonucleotide
  Antisense strand to SEQ ID NO: 579327
guuaauagacuguacuacu

SEQ ID NO: 579329 - RNA, 19 nt, Artificial Sequence
  Description of Artificial Sequence: Synthetic oligonucleotide
  Sense strand starting at position 3144 of SEQ ID NO: 318657
gggcauuaacgauagaguu

SEQ ID NO: 579330 - RNA, 19 nt, Artificial Sequence
  Description of Artificial Sequence: Synthetic oligonucleotide
  Antisense strand to SEQ ID NO: 579329
aacucuaucguuaaugccc

SEQ ID NO: 579331 - RNA, 19 nt, Artificial Sequence
  Description of Artificial Sequence: Synthetic oligonucleotide
  Sense strand starting at position 3146 of SEQ ID NO: 318657
gcauuaacgauagaguuua

SEQ ID NO: 579332 - RNA, 19 nt, Artificial Sequence
  Description of Artificial Sequence: Synthetic oligonucleotide
  Antisense strand to SEQ ID NO: 579331
uaaacucuaucguuaaugc

SEQ ID NO: 579333 - RNA, 19 nt, Artificial Sequence
  Description of Artificial Sequence: Synthetic oligonucleotide
  Sense strand starting at position 3200 of SEQ ID NO: 318657
auguauacaugcuccagaa

SEQ ID NO: 579334 - RNA, 19 nt, Artificial Sequence
  Description of Artificial Sequence: Synthetic oligonucleotide
  Antisense strand to SEQ ID NO: 579333
uucuggagcauguauacau

SEQ ID NO: 579335 - RNA, 19 nt, Artificial Sequence
  Description of Artificial Sequence: Synthetic oligonucleotide
  Sense strand starting at position 3202 of SEQ ID NO: 318657
guauacaugcuccagaauc

SEQ ID NO: 579336 - RNA, 19 nt, Artificial Sequence
  Description of Artificial Sequence: Synthetic oligonucleotide
  Antisense strand to SEQ ID NO: 579335
gauucuggagcauguauac

SEQ ID NO: 579337 - RNA, 19 nt, Artificial Sequence
  Description of Artificial Sequence: Synthetic oligonucleotide
  Sense strand starting at position 3303 of SEQ ID NO: 318657
cugaucccauugguuuaua

SEQ ID NO: 579338 - RNA, 19 nt, Artificial Sequence
  Description of Artificial Sequence: Synthetic oligonucleotide
  Antisense strand to SEQ ID NO: 579337
uauaaaccaaugggaucag

SEQ ID NO: 579339 - RNA, 19 nt, Artificial Sequence
  Description of Artificial Sequence: Synthetic oligonucleotide
  Sense strand starting at position 3313 of SEQ ID NO: 318657
ugguuuauagaguaaccuu

SEQ ID NO: 579340 - RNA, 19 nt, Artificial Sequence
  Description of Artificial Sequence: Synthetic oligonucleotide
  Antisense strand to SEQ ID NO: 579339
aagguuacucuauaaacca

SEQ ID NO: 579341 - RNA, 19 nt, Artificial Sequence
  Description of Artificial Sequence: Synthetic oligonucleotide
  Sense strand starting at position 3433 of SEQ ID NO: 318657
uucugaugagguugacauc

SEQ ID NO: 579342 - RNA, 19 nt, Artificial Sequence
  Description of Artificial Sequence: Synthetic oligonucleotide
  Antisense strand to SEQ ID NO: 579341
gaugucaaccucaucagaa

SEQ ID NO: 579343 - RNA, 19 nt, Artificial Sequence
  Description of Artificial Sequence: Synthetic oligonucleotide
  Sense strand starting at position 3488 of SEQ ID NO: 318657
ugcaaccaggguuaugaau

SEQ ID NO: 579344 - RNA, 19 nt, Artificial Sequence
  Description of Artificial Sequence: Synthetic oligonucleotide
  Antisense strand to SEQ ID NO: 579343
auucauaacccugguugca

SEQ ID NO: 579345 - RNA, 19 nt, Artificial Sequence
  Description of Artificial Sequence: Synthetic oligonucleotide
  Sense strand starting at position 3497 of SEQ ID NO: 318657
gguuaugaauuacugauca

SEQ ID NO: 579346 - RNA, 19 nt, Artificial Sequence
  Description of Artificial Sequence: Synthetic oligonucleotide
  Antisense strand to SEQ ID NO: 579345
ugaucaguaauucauaacc

SEQ ID NO: 579347 - RNA, 19 nt, Artificial Sequence
  Description of Artificial Sequence: Synthetic oligonucleotide
  Sense strand starting at position 3501 of SEQ ID NO: 318657
augaauuacugaucaaggu

SEQ ID NO: 579348 - RNA, 19 nt, Artificial Sequence
  Description of Artificial Sequence: Synthetic oligonucleotide
  Antisense strand to SEQ ID NO: 579347
accuugaucaguaauucau

SEQ ID NO: 579349 - RNA, 19 nt, Artificial Sequence
  Description of Artificial Sequence: Synthetic oligonucleotide
  Sense strand starting at position 3550 of SEQ ID NO: 318657
aguagacaccuaugauuau

SEQ ID NO: 579350 - RNA, 19 nt, Artificial Sequence
  Description of Artificial Sequence: Synthetic oligonucleotide
  Antisense strand to SEQ ID NO: 579349
auaaucauaggugucuacu

SEQ ID NO: 579351 - RNA, 19 nt, Artificial Sequence
  Description of Artificial Sequence: Synthetic oligonucleotide
  Sense strand starting at position 3675 of SEQ ID NO: 318657
gaaguuauucuacagguac

SEQ ID NO: 579352 - RNA, 19 nt, Artificial Sequence
  Description of Artificial Sequence: Synthetic oligonucleotide
  Antisense strand to SEQ ID NO: 579351
guaccuguagaauaacuuc

SEQ ID NO: 579353 - RNA, 19 nt, Artificial Sequence
  Description of Artificial Sequence: Synthetic oligonucleotide
  Sense strand starting at position 3805 of SEQ ID NO: 318657
gugaauuaacuugaaguuu

SEQ ID NO: 579354 - RNA, 19 nt, Artificial Sequence
  Description of Artificial Sequence: Synthetic oligonucleotide
  Antisense strand to SEQ ID NO: 579353
aaacuucaaguuaauucac

SEQ ID NO: 579355 - RNA, 19 nt, Artificial Sequence
  Description of Artificial Sequence: Synthetic oligonucleotide
  Sense strand starting at position 3834 of SEQ ID NO: 318657
ucauaauuggaauggguau

SEQ ID NO: 579356 - RNA, 19 nt, Artificial Sequence
  Description of Artificial Sequence: Synthetic oligonucleotide
  Antisense strand to SEQ ID NO: 579355
auacccauuccaauuauga

SEQ ID NO: 579357 - RNA, 19 nt, Artificial Sequence
  Description of Artificial Sequence: Synthetic oligonucleotide
  Sense strand starting at position 3905 of SEQ ID NO: 318657
guaccaaagccugauguaa

SEQ ID NO: 579358 - RNA, 19 nt, Artificial Sequence
  Description of Artificial Sequence: Synthetic oligonucleotide
  Antisense strand to SEQ ID NO: 579357
uuacaucaggcuuugguac

SEQ ID NO: 579359 - RNA, 19 nt, Artificial Sequence
  Description of Artificial Sequence: Synthetic oligonucleotide
  Sense strand starting at position 3928 of SEQ ID NO: 318657
aguuucuuacagcacagaa

SEQ ID NO: 579360 - RNA, 19 nt, Artificial Sequence
  Description of Artificial Sequence: Synthetic oligonucleotide
  Antisense strand to SEQ ID NO: 579359
uucugugcuguaagaaacu

SEQ ID NO: 579361 - RNA, 19 nt, Artificial Sequence
  Description of Artificial Sequence: Synthetic oligonucleotide
  Sense strand starting at position 3938 of SEQ ID NO: 318657
agcacagaauuugauacau

SEQ ID NO: 579362 - RNA, 19 nt, Artificial Sequence
  Description of Artificial Sequence: Synthetic oligonucleotide
  Antisense strand to SEQ ID NO: 579361
auguaucaaauucugugcu

SEQ ID NO: 579363 - RNA, 19 nt, Artificial Sequence
  Description of Artificial Sequence: Synthetic oligonucleotide
  Sense strand starting at position 424 of SEQ ID NO: 318658
aauucugugcuguaagaaa

SEQ ID NO: 579364 - RNA, 19 nt, Artificial Sequence
  Description of Artificial Sequence: Synthetic oligonucleotide
  Antisense strand to SEQ ID NO: 579363
uuucuuacagcacagaauu

SEQ ID NO: 579365 - RNA, 19 nt, Artificial Sequence
  Description of Artificial Sequence: Synthetic oligonucleotide
  Sense strand starting at position 433 of SEQ ID NO: 318658
cuguaagaaacuggaguua

SEQ ID NO: 579366 - RNA, 19 nt, Artificial Sequence
  Description of Artificial Sequence: Synthetic oligonucleotide
  Antisense strand to SEQ ID NO: 579365
uaacuccaguuucuuacag

SEQ ID NO: 579367 - RNA, 19 nt, Artificial Sequence
  Description of Artificial Sequence: Synthetic oligonucleotide
  Sense strand starting at position 702 of SEQ ID NO: 318658
guaccuaaaggucaucuga

SEQ ID NO: 579368 - RNA, 19 nt, Artificial Sequence
  Description of Artificial Sequence: Synthetic oligonucleotide
  Antisense strand to SEQ ID NO: 579367
ucagaugaccuuuagguac

SEQ ID NO: 579369 - RNA, 19 nt, Artificial Sequence
  Description of Artificial Sequence: Synthetic oligonucleotide
  Sense strand starting at position 704 of SEQ ID NO: 318658
accuaaaggucaucugaau

SEQ ID NO: 579370 - RNA, 19 nt, Artificial Sequence
  Description of Artificial Sequence: Synthetic oligonucleotide
  Antisense strand to SEQ ID NO: 579369
auucagaugaccuuuaggu

SEQ ID NO: 579371 - RNA, 19 nt, Artificial Sequence
  Description of Artificial Sequence: Synthetic oligonucleotide
  Sense strand starting at position 802 of SEQ ID NO: 318658
gaauaaucauaggugucua

SEQ ID NO: 579372 - RNA, 19 nt, Artificial Sequence
  Description of Artificial Sequence: Synthetic oligonucleotide
  Antisense strand to SEQ ID NO: 579371
uagacaccuaugauuauuc

SEQ ID NO: 579373 - RNA, 19 nt, Artificial Sequence
  Description of Artificial Sequence: Synthetic oligonucleotide
  Sense strand starting at position 945 of SEQ ID NO: 318658
ggaggagugcaucaguagu

SEQ ID NO: 579374 - RNA, 19 nt, Artificial Sequence
  Description of Artificial Sequence: Synthetic oligonucleotide
  Antisense strand to SEQ ID NO: 579373
acuacugaugcacuccucc

SEQ ID NO: 579375 - RNA, 19 nt, Artificial Sequence
  Description of Artificial Sequence: Synthetic oligonucleotide
  Sense strand starting at position 985 of SEQ ID NO: 318658
ccuaauauguagccaggaa

SEQ ID NO: 579376 - RNA, 19 nt, Artificial Sequence
  Description of Artificial Sequence: Synthetic oligonucleotide
  Antisense strand to SEQ ID NO: 579375
uuccuggcuacauauuagg

SEQ ID NO: 579377 - RNA, 19 nt, Artificial Sequence
  Description of Artificial Sequence: Synthetic oligonucleotide
  Sense strand starting at position 1028 of SEQ ID NO: 318658
agagaugcuccugaagguu

SEQ ID NO: 579378 - RNA, 19 nt, Artificial Sequence
  Description of Artificial Sequence: Synthetic oligonucleotide
  Antisense strand to SEQ ID NO: 579377
aaccuucaggagcaucucu

SEQ ID NO: 579379 - RNA, 19 nt, Artificial Sequence
  Description of Artificial Sequence: Synthetic oligonucleotide
  Sense strand starting at position 1036 of SEQ ID NO: 318658
uccugaagguuacucuaua

SEQ ID NO: 579380 - RNA, 19 nt, Artificial Sequence
  Description of Artificial Sequence: Synthetic oligonucleotide
  Antisense strand to SEQ ID NO: 579379
uauagaguaaccuucagga

SEQ ID NO: 579381 - RNA, 19 nt, Artificial Sequence
  Description of Artificial Sequence: Synthetic oligonucleotide
  Sense strand starting at position 1037 of SEQ ID NO: 318658
ccugaagguuacucuauaa

SEQ ID NO: 579382 - RNA, 19 nt, Artificial Sequence
  Description of Artificial Sequence: Synthetic oligonucleotide
  Antisense strand to SEQ ID NO: 579381
uuauagaguaaccuucagg

SEQ ID NO: 579383 - RNA, 19 nt, Artificial Sequence
  Description of Artificial Sequence: Synthetic oligonucleotide
  Sense strand starting at position 1150 of SEQ ID NO: 318658
uugauucuggagcauguau

SEQ ID NO: 579384 - RNA, 19 nt, Artificial Sequence
  Description of Artificial Sequence: Synthetic oligonucleotide
  Antisense strand to SEQ ID NO: 579383
auacaugcuccagaaucaa

SEQ ID NO: 579385 - RNA, 19 nt, Artificial Sequence
  Description of Artificial Sequence: Synthetic oligonucleotide
  Sense strand starting at position 1158 of SEQ ID NO: 318658
ggagcauguauacauggua

SEQ ID NO: 579386 - RNA, 19 nt, Artificial Sequence
  Description of Artificial Sequence: Synthetic oligonucleotide
  Antisense strand to SEQ ID NO: 579385
uaccauguauacaugcucc

SEQ ID NO: 579387 - RNA, 19 nt, Artificial Sequence
  Description of Artificial Sequence: Synthetic oligonucleotide
  Sense strand starting at position 1251 of SEQ ID NO: 318658
ugugcaaagaguuaauaga

SEQ ID NO: 579388 - RNA, 19 nt, Artificial Sequence
  Description of Artificial Sequence: Synthetic oligonucleotide
  Antisense strand to SEQ ID NO: 579387
ucuauuaacucuuugcaca

SEQ ID NO: 579389 - RNA, 19 nt, Artificial Sequence
  Description of Artificial Sequence: Synthetic oligonucleotide
  Sense strand starting at position 1259 of SEQ ID NO: 318658
gaguuaauagacuguacua

SEQ ID NO: 579390 - RNA, 19 nt, Artificial Sequence
  Description of Artificial Sequence: Synthetic oligonucleotide
  Antisense strand to SEQ ID NO: 579389
uaguacagucuauuaacuc

SEQ ID NO: 579391 - RNA, 19 nt, Artificial Sequence
  Description of Artificial Sequence: Synthetic oligonucleotide
  Sense strand starting at position 1261 of SEQ ID NO: 318658
guuaauagacuguacuacu

SEQ ID NO: 579392 - RNA, 19 nt, Artificial Sequence
  Description of Artificial Sequence: Synthetic oligonucleotide
  Antisense strand to SEQ ID NO: 579391
aguaguacagucuauuaac

SEQ ID NO: 579393 - RNA, 19 nt, Artificial Sequence
  Description of Artificial Sequence: Synthetic oligonucleotide
  Sense strand starting at position 1305 of SEQ ID NO: 318658
auaacagaugucugauuac

SEQ ID NO: 579394 - RNA, 19 nt, Artificial Sequence
  Description of Artificial Sequence: Synthetic oligonucleotide
  Antisense strand to SEQ ID NO: 579393
guaaucagacaucuguuau

SEQ ID NO: 579395 - RNA, 19 nt, Artificial Sequence
  Description of Artificial Sequence: Synthetic oligonucleotide
  Sense strand starting at position 1308 of SEQ ID NO: 318658
acagaugucugauuacaga

SEQ ID NO: 579396 - RNA, 19 nt, Artificial Sequence
  Description of Artificial Sequence: Synthetic oligonucleotide
  Antisense strand to SEQ ID NO: 579395
ucuguaaucagacaucugu

SEQ ID NO: 579397 - RNA, 19 nt, Artificial Sequence
  Description of Artificial Sequence: Synthetic oligonucleotide
  Sense strand starting at position 1447 of SEQ ID NO: 318658
guagauauuaacgagcuaa

SEQ ID NO: 579398 - RNA, 19 nt, Artificial Sequence
  Description of Artificial Sequence: Synthetic oligonucleotide
  Antisense strand to SEQ ID NO: 579397
uuagcucguuaauaucuac

SEQ ID NO: 579399 - RNA, 19 nt, Artificial Sequence
  Description of Artificial Sequence: Synthetic oligonucleotide
  Sense strand starting at position 1490 of SEQ ID NO: 318658
cgaugaugaugacucaauu

SEQ ID NO: 579400 - RNA, 19 nt, Artificial Sequence
  Description of Artificial Sequence: Synthetic oligonucleotide
  Antisense strand to SEQ ID NO: 579399
aauugagucaucaucaucg

SEQ ID NO: 579401 - RNA, 19 nt, Artificial Sequence
  Description of Artificial Sequence: Synthetic oligonucleotide
  Sense strand starting at position 1530 of SEQ ID NO: 318658
gucuguugaguuuaacuaa

SEQ ID NO: 579402 - RNA, 19 nt, Artificial Sequence
  Description of Artificial Sequence: Synthetic oligonucleotide
  Antisense strand to SEQ ID NO: 579401
uuaguuaaacucaacagac

SEQ ID NO: 579403 - RNA, 19 nt, Artificial Sequence
  Description of Artificial Sequence: Synthetic oligonucleotide
  Sense strand starting at position 1611 of SEQ ID NO: 318658
cacaaaugucccgaugaug

SEQ ID NO: 579404 - RNA, 19 nt, Artificial Sequence
  Description of Artificial Sequence: Synthetic oligonucleotide
  Antisense strand to SEQ ID NO: 579403
caucaucgggacauuugug

SEQ ID NO: 579405 - RNA, 19 nt, Artificial Sequence
  Description of Artificial Sequence: Synthetic oligonucleotide
  Sense strand starting at position 1690 of SEQ ID NO: 318658
caggacgagacuuguaaug

SEQ ID NO: 579406 - RNA, 19 nt, Artificial Sequence
  Description of Artificial Sequence: Synthetic oligonucleotide
  Antisense strand to SEQ ID NO: 579405
cauuacaagucucguccug

SEQ ID NO: 579407 - RNA, 19 nt, Artificial Sequence
  Description of Artificial Sequence: Synthetic oligonucleotide
  Sense strand starting at position 2039 of SEQ ID NO: 318658
cgcuuagccgacucuuacu

SEQ ID NO: 579408 - RNA, 19 nt, Artificial Sequence
  Description of Artificial Sequence: Synthetic oligonucleotide
  Antisense strand to SEQ ID NO: 579407
aguaagagucggcuaagcg

SEQ ID NO: 579409 - RNA, 19 nt, Artificial Sequence
  Description of Artificial Sequence: Synthetic oligonucleotide
  Sense strand starting at position 2067 of SEQ ID NO: 318658
cgcaaucgucgggugguua

SEQ ID NO: 579410 - RNA, 19 nt, Artificial Sequence
  Description of Artificial Sequence: Synthetic oligonucleotide
  Antisense strand to SEQ ID NO: 579409
uaaccacccgacgauugcg

SEQ ID NO: 579411 - RNA, 19 nt, Artificial Sequence
  Description of Artificial Sequence: Synthetic oligonucleotide
  Sense strand starting at position 2924 of SEQ ID NO: 318658
cccuuucuagaacgaaaua

SEQ ID NO: 579412 - RNA, 19 nt, Artificial Sequence
  Description of Artificial Sequence: Synthetic oligonucleotide
  Antisense strand to SEQ ID NO: 579411
uauuucguucuagaaaggg

SEQ ID NO: 579413 - RNA, 19 nt, Artificial Sequence
  Description of Artificial Sequence: Synthetic oligonucleotide
  Sense strand starting at position 2936 of SEQ ID NO: 318658
cgaaauagauaccugguaa

SEQ ID NO: 579414 - RNA, 19 nt, Artificial Sequence
  Description of Artificial Sequence: Synthetic oligonucleotide
  Antisense strand to SEQ ID NO: 579413
uuaccagguaucuauuucg

SEQ ID NO: 579415 - RNA, 19 nt, Artificial Sequence
  Description of Artificial Sequence: Synthetic oligonucleotide
  Sense strand starting at position 3027 of SEQ ID NO: 318658
uggagaucucugugaauua

SEQ ID NO: 579416 - RNA, 19 nt, Artificial Sequence
  Description of Artificial Sequence: Synthetic oligonucleotide
  Antisense strand to SEQ ID NO: 579415
uaauucacagagaucucca

SEQ ID NO: 579417 - RNA, 19 nt, Artificial Sequence
  Description of Artificial Sequence: Synthetic oligonucleotide
  Sense strand starting at position 3137 of SEQ ID NO: 318658
uuaguauugcaugacagua

SEQ ID NO: 579418 - RNA, 19 nt, Artificial Sequence
  Description of Artificial Sequence: Synthetic oligonucleotide
  Antisense strand to SEQ ID NO: 579417
uacugucaugcaauacuaa

SEQ ID NO: 579419 - RNA, 19 nt, Artificial Sequence
  Description of Artificial Sequence: Synthetic oligonucleotide
  Sense strand starting at position 3149 of SEQ ID NO: 318658
gacaguagugcagagaauu

SEQ ID NO: 579420 - RNA, 19 nt, Artificial Sequence
  Description of Artificial Sequence: Synthetic oligonucleotide
  Antisense strand to SEQ ID NO: 579419
aauucucugcacuacuguc

SEQ ID NO: 579421 - RNA, 19 nt, Artificial Sequence
  Description of Artificial Sequence: Synthetic oligonucleotide
  Sense strand starting at position 3246 of SEQ ID NO: 318658
ugggaaauauguccgagau

SEQ ID NO: 579422 - RNA, 19 nt, Artificial Sequence
  Description of Artificial Sequence: Synthetic oligonucleotide
  Antisense strand to SEQ ID NO: 579421
aucucggacauauuuccca

SEQ ID NO: 579423 - RNA, 19 nt, Artificial Sequence
  Description of Artificial Sequence: Synthetic oligonucleotide
  Sense strand starting at position 3247 of SEQ ID NO: 318658
gggaaauauguccgagauc

SEQ ID NO: 579424 - RNA, 19 nt, Artificial Sequence
  Description of Artificial Sequence: Synthetic oligonucleotide
  Antisense strand to SEQ ID NO: 579423
gaucucggacauauuuccc

SEQ ID NO: 579425 - RNA, 19 nt, Artificial Sequence
  Description of Artificial Sequence: Synthetic oligonucleotide
  Sense strand starting at position 3498 of SEQ ID NO: 318658
ucuugaaugagcugaggaa

SEQ ID NO: 579426 - RNA, 19 nt, Artificial Sequence
  Description of Artificial Sequence: Synthetic oligonucleotide
  Antisense strand to SEQ ID NO: 579425
uuccucagcucauucaaga

SEQ ID NO: 579427 - RNA, 19 nt, Artificial Sequence
  Description of Artificial Sequence: Synthetic oligonucleotide
  Sense strand starting at position 3577 of SEQ ID NO: 318658
ugaggaacgccuuauccuu

SEQ ID NO: 579428 - RNA, 19 nt, Artificial Sequence
  Description of Artificial Sequence: Synthetic oligonucleotide
  Antisense strand to SEQ ID NO: 579427
aaggauaaggcguuccuca

SEQ ID NO: 579429 - RNA, 19 nt, Artificial Sequence
  Description of Artificial Sequence: Synthetic oligonucleotide
  Sense strand starting at position 3603 of SEQ ID NO: 318658
ugauguagucaucagacuu

SEQ ID NO: 579430 - RNA, 19 nt, Artificial Sequence
  Description of Artificial Sequence: Synthetic oligonucleotide
  Antisense strand to SEQ ID NO: 579429
aagucugaugacuacauca

SEQ ID NO: 579431 - RNA, 19 nt, Artificial Sequence
  Description of Artificial Sequence: Synthetic oligonucleotide
  Sense strand starting at position 3694 of SEQ ID NO: 318658
uguuuagugauacagugau

SEQ ID NO: 579432 - RNA, 19 nt, Artificial Sequence
  Description of Artificial Sequence: Synthetic oligonucleotide
  Antisense strand to SEQ ID NO: 579431
aucacuguaucacuaaaca

SEQ ID NO: 579433 - RNA, 19 nt, Artificial Sequence
  Description of Artificial Sequence: Synthetic oligonucleotide
  Sense strand starting at position 3771 of SEQ ID NO: 318658
uuguuacucguggagaaga

SEQ ID NO: 579434 - RNA, 19 nt, Artificial Sequence
  Description of Artificial Sequence: Synthetic oligonucleotide
  Antisense strand to SEQ ID NO: 579433
ucuucuccacgaguaacaa

SEQ ID NO: 579435 - RNA, 19 nt, Artificial Sequence
  Description of Artificial Sequence: Synthetic oligonucleotide
  Sense strand starting at position 3866 of SEQ ID NO: 318658
auucucagaguuuaaguaa

SEQ ID NO: 579436 - RNA, 19 nt, Artificial Sequence
  Description of Artificial Sequence: Synthetic oligonucleotide
  Antisense strand to SEQ ID NO: 579435
uuacuuaaacucugagaau

SEQ ID NO: 579437 - RNA, 19 nt, Artificial Sequence
  Description of Artificial Sequence: Synthetic oligonucleotide
  Sense strand starting at position 3948 of SEQ ID NO: 318658
ccaagaguccguguugccu

SEQ ID NO: 579438 - RNA, 19 nt, Artificial Sequence
  Description of Artificial Sequence: Synthetic oligonucleotide
  Antisense strand to SEQ ID NO: 579437
aggcaacacggacucuugg

SEQ ID NO: 579439 - RNA, 19 nt, Artificial Sequence
  Description of Artificial Sequence: Synthetic oligonucleotide
  Sense strand starting at position 3954 of SEQ ID NO: 318658
guccguguugccuccuaaa

SEQ ID NO: 579440 - RNA, 19 nt, Artificial Sequence
  Description of Artificial Sequence: Synthetic oligonucleotide
  Antisense strand to SEQ ID NO: 579439
uuuaggaggcaacacggac

SEQ ID NO: 579441 - RNA, 19 nt, Artificial Sequence
  Description of Artificial Sequence: Synthetic oligonucleotide
  Sense strand starting at position 3977 of SEQ ID NO: 318658
gaagcagcauucucagaga

SEQ ID NO: 579442 - RNA, 19 nt, Artificial Sequence
  Description of Artificial Sequence: Synthetic oligonucleotide
  Antisense strand to SEQ ID NO: 579441
ucucugagaaugcugcuuc

SEQ ID NO: 579443 - RNA, 19 nt, Artificial Sequence
  Description of Artificial Sequence: Synthetic oligonucleotide
  Sense strand starting at position 46 of SEQ ID NO: 318659
cgacaaagagcucggauau

SEQ ID NO: 579444 - RNA, 19 nt, Artificial Sequence
  Description of Artificial Sequence: Synthetic oligonucleotide
  Antisense strand to SEQ ID NO: 579443
auauccgagcucuuugucg

SEQ ID NO: 579445 - RNA, 19 nt, Artificial Sequence
  Description of Artificial Sequence: Synthetic oligonucleotide
  Sense strand starting at position 47 of SEQ ID NO: 318659
gacaaagagcucggauaua

SEQ ID NO: 579446 - RNA, 19 nt, Artificial Sequence
  Description of Artificial Sequence: Synthetic oligonucleotide
  Antisense strand to SEQ ID NO: 579445
uauauccgagcucuuuguc

SEQ ID NO: 579447 - RNA, 19 nt, Artificial Sequence
  Description of Artificial Sequence: Synthetic oligonucleotide
  Sense strand starting at position 56 of SEQ ID NO: 318659
cucggauauacuggacagu

SEQ ID NO: 579448 - RNA, 19 nt, Artificial Sequence
  Description of Artificial Sequence: Synthetic oligonucleotide
  Antisense strand to SEQ ID NO: 579447
acuguccaguauauccgag

SEQ ID NO: 579449 - RNA, 19 nt, Artificial Sequence
  Description of Artificial Sequence: Synthetic oligonucleotide
  Sense strand starting at position 105 of SEQ ID NO: 318659
ggagucugggcuuggaaga

SEQ ID NO: 579450 - RNA, 19 nt, Artificial Sequence
  Description of Artificial Sequence: Synthetic oligonucleotide
  Antisense strand to SEQ ID NO: 579449
ucuuccaagcccagacucc

SEQ ID NO: 579451 - RNA, 19 nt, Artificial Sequence
  Description of Artificial Sequence: Synthetic oligonucleotide
  Sense strand starting at position 106 of SEQ ID NO: 318659
gagucugggcuuggaagaa

SEQ ID NO: 579452 - RNA, 19 nt, Artificial Sequence
  Description of Artificial Sequence: Synthetic oligonucleotide
  Antisense strand to SEQ ID NO: 579451
uucuuccaagcccagacuc

SEQ ID NO: 579453 - RNA, 19 nt, Artificial Sequence
  Description of Artificial Sequence: Synthetic oligonucleotide
  Sense strand starting at position 130 of SEQ ID NO: 318659
gaaggagaguucuccaauu

SEQ ID NO: 579454 - RNA, 19 nt, Artificial Sequence
  Description of Artificial Sequence: Synthetic oligonucleotide
  Antisense strand to SEQ ID NO: 579453
aauuggagaacucuccuuc

SEQ ID NO: 579455 - RNA, 19 nt, Artificial Sequence
  Description of Artificial Sequence: Synthetic oligonucleotide
  Sense strand starting at position 132 of SEQ ID NO: 318659
aggagaguucuccaauugu

SEQ ID NO: 579456 - RNA, 19 nt, Artificial Sequence
  Description of Artificial Sequence: Synthetic oligonucleotide
  Antisense strand to SEQ ID NO: 579455
acaauuggagaacucuccu

SEQ ID NO: 579457 - RNA, 19 nt, Artificial Sequence
  Description of Artificial Sequence: Synthetic oligonucleotide
  Sense strand starting at position 217 of SEQ ID NO: 318659
ugaauauucuguuucugau

SEQ ID NO: 579458 - RNA, 19 nt, Artificial Sequence
  Description of Artificial Sequence: Synthetic oligonucleotide
  Antisense strand to SEQ ID NO: 579457
aucagaaacagaauauuca

SEQ ID NO: 579459 - RNA, 19 nt, Artificial Sequence
  Description of Artificial Sequence: Synthetic oligonucleotide
  Sense strand starting at position 224 of SEQ ID NO: 318659
ucuguuucugaugaaugua

SEQ ID NO: 579460 - RNA, 19 nt, Artificial Sequence
  Description of Artificial Sequence: Synthetic oligonucleotide
  Antisense strand to SEQ ID NO: 579459
uacauucaucagaaacaga

SEQ ID NO: 579461 - RNA, 19 nt, Artificial Sequence
  Description of Artificial Sequence: Synthetic oligonucleotide
  Sense strand starting at position 301 of SEQ ID NO: 318659
aggcuaagagugcauuaaa

SEQ ID NO: 579462 - RNA, 19 nt, Artificial Sequence
  Description of Artificial Sequence: Synthetic oligonucleotide
  Antisense strand to SEQ ID NO: 579461
uuuaaugcacucuuagccu

SEQ ID NO: 579463 - RNA, 19 nt, Artificial Sequence
  Description of Artificial Sequence: Synthetic oligonucleotide
  Sense strand starting at position 304 of SEQ ID NO: 318659
cuaagagugcauuaaacca

SEQ ID NO: 579464 - RNA, 19 nt, Artificial Sequence
  Description of Artificial Sequence: Synthetic oligonucleotide
  Antisense strand to SEQ ID NO: 579463
ugguuuaaugcacucuuag

SEQ ID NO: 579465 - RNA, 19 nt, Artificial Sequence
  Description of Artificial Sequence: Synthetic oligonucleotide
  Sense strand starting at position 344 of SEQ ID NO: 318659
aggacugucgggcaugaau

SEQ ID NO: 579466 - RNA, 19 nt, Artificial Sequence
  Description of Artificial Sequence: Synthetic oligonucleotide
  Antisense strand to SEQ ID NO: 579465
auucaugcccgacaguccu

SEQ ID NO: 579467 - RNA, 19 nt, Artificial Sequence
  Description of Artificial Sequence: Synthetic oligonucleotide
  Sense strand starting at position 656 of SEQ ID NO: 318659
cggcaauuucucggaugca

SEQ ID NO: 579468 - RNA, 19 nt, Artificial Sequence
  Description of Artificial Sequence: Synthetic oligonucleotide
  Antisense strand to SEQ ID NO: 579467
ugcauccgagaaauugccg

SEQ ID NO: 579469 - RNA, 19 nt, Artificial Sequence
  Description of Artificial Sequence: Synthetic oligonucleotide
  Sense strand starting at position 758 of SEQ ID NO: 318659
gccagccugcguuccuaaa

SEQ ID NO: 579470 - RNA, 19 nt, Artificial Sequence
  Description of Artificial Sequence: Synthetic oligonucleotide
  Antisense strand to SEQ ID NO: 579469
uuuaggaacgcaggcuggc

SEQ ID NO: 579471 - RNA, 19 nt, Artificial Sequence
  Description of Artificial Sequence: Synthetic oligonucleotide
  Sense strand starting at position 1477 of SEQ ID NO: 318659
cccagacuccgacauguuu

SEQ ID NO: 579472 - RNA, 19 nt, Artificial Sequence
  Description of Artificial Sequence: Synthetic oligonucleotide
  Antisense strand to SEQ ID NO: 579471
aaacaugucggagucuggg

SEQ ID NO: 579473 - RNA, 19 nt, Artificial Sequence
  Description of Artificial Sequence: Synthetic oligonucleotide
  Sense strand starting at position 1535 of SEQ ID NO: 318659
ucgaauuuguccuuucuuu

SEQ ID NO: 579474 - RNA, 19 nt, Artificial Sequence
  Description of Artificial Sequence: Synthetic oligonucleotide
  Antisense strand to SEQ ID NO: 579473
aaagaaaggacaaauucga

SEQ ID NO: 579475 - RNA, 19 nt, Artificial Sequence
  Description of Artificial Sequence: Synthetic oligonucleotide
  Sense strand starting at position 1647 of SEQ ID NO: 318659
gcgggcuugggugaaauga

SEQ ID NO: 579476 - RNA, 19 nt, Artificial Sequence
  Description of Artificial Sequence: Synthetic oligonucleotide
  Antisense strand to SEQ ID NO: 579475
ucauuucacccaagcccgc

SEQ ID NO: 579477 - RNA, 19 nt, Artificial Sequence
  Description of Artificial Sequence: Synthetic oligonucleotide
  Sense strand starting at position 1649 of SEQ ID NO: 318659
gggcuugggugaaaugaag

SEQ ID NO: 579478 - RNA, 19 nt, Artificial Sequence
  Description of Artificial Sequence: Synthetic oligonucleotide
  Antisense strand to SEQ ID NO: 579477
cuucauuucacccaagccc

SEQ ID NO: 579479 - RNA, 19 nt, Artificial Sequence
  Description of Artificial Sequence: Synthetic oligonucleotide
  Sense strand starting at position 1733 of SEQ ID NO: 318659
cgcgaucuaacggaacaaa

SEQ ID NO: 579480 - RNA, 19 nt, Artificial Sequence
  Description of Artificial Sequence: Synthetic oligonucleotide
  Antisense strand to SEQ ID NO: 579479
uuuguuccguuagaucgcg

SEQ ID NO: 579481 - RNA, 19 nt, Artificial Sequence
  Description of Artificial Sequence: Synthetic oligonucleotide
  Sense strand starting at position 2237 of SEQ ID NO: 318659
guuguaucuccauauccuu

SEQ ID NO: 579482 - RNA, 19 nt, Artificial Sequence
  Description of Artificial Sequence: Synthetic oligonucleotide
  Antisense strand to SEQ ID NO: 579481
aaggauauggagauacaac

SEQ ID NO: 579483 - RNA, 19 nt, Artificial Sequence
  Description of Artificial Sequence: Synthetic oligonucleotide
  Sense strand starting at position 2612 of SEQ ID NO: 318659
gauuaaaggcuugauguuu

SEQ ID NO: 579484 - RNA, 19 nt, Artificial Sequence
  Description of Artificial Sequence: Synthetic oligonucleotide
  Antisense strand to SEQ ID NO: 579483
aaacaucaagccuuuaauc

SEQ ID NO: 579485 - RNA, 19 nt, Artificial Sequence
  Description of Artificial Sequence: Synthetic oligonucleotide
  Sense strand starting at position 2692 of SEQ ID NO: 318659
uacuacaaaguucgugaaa

SEQ ID NO: 579486 - RNA, 19 nt, Artificial Sequence
  Description of Artificial Sequence: Synthetic oligonucleotide
  Antisense strand to SEQ ID NO: 579485
uuucacgaacuuuguagua

SEQ ID NO: 579487 - RNA, 19 nt, Artificial Sequence
  Description of Artificial Sequence: Synthetic oligonucleotide
  Sense strand starting at position 2695 of SEQ ID NO: 318659
uacaaaguucgugaaacua

SEQ ID NO: 579488 - RNA, 19 nt, Artificial Sequence
  Description of Artificial Sequence: Synthetic oligonucleotide
  Antisense strand to SEQ ID NO: 579487
uaguuucacgaacuuugua

SEQ ID NO: 579489 - RNA, 19 nt, Artificial Sequence
  Description of Artificial Sequence: Synthetic oligonucleotide
  Sense strand starting at position 2874 of SEQ ID NO: 318659
ucuccacuuugguccagaa

SEQ ID NO: 579490 - RNA, 19 nt, Artificial Sequence
  Description of Artificial Sequence: Synthetic oligonucleotide
  Antisense strand to SEQ ID NO: 579489
uucuggaccaaaguggaga

SEQ ID NO: 579491 - RNA, 19 nt, Artificial Sequence
  Description of Artificial Sequence: Synthetic oligonucleotide
  Sense strand starting at position 2876 of SEQ ID NO: 318659
uccacuuugguccagaaau

SEQ ID NO: 579492 - RNA, 19 nt, Artificial Sequence
  Description of Artificial Sequence: Synthetic oligonucleotide
  Antisense strand to SEQ ID NO: 579491
auuucuggaccaaagugga

SEQ ID NO: 579493 - RNA, 19 nt, Artificial Sequence
  Description of Artificial Sequence: Synthetic oligonucleotide
  Sense strand starting at position 2968 of SEQ ID NO: 318659
guuguucuaccagaacuuu

SEQ ID NO: 579494 - RNA, 19 nt, Artificial Sequence
  Description of Artificial Sequence: Synthetic oligonucleotide
  Antisense strand to SEQ ID NO: 579493
aaaguucugguagaacaac

SEQ ID NO: 579495 - RNA, 19 nt, Artificial Sequence
  Description of Artificial Sequence: Synthetic oligonucleotide
  Sense strand starting at position 3072 of SEQ ID NO: 318659
caauuagggcucuguagga

SEQ ID NO: 579496 - RNA, 19 nt, Artificial Sequence
  Description of Artificial Sequence: Synthetic oligonucleotide
  Antisense strand to SEQ ID NO: 579495
uccuacagagcccuaauug

SEQ ID NO: 579497 - RNA, 19 nt, Artificial Sequence
  Description of Artificial Sequence: Synthetic oligonucleotide
  Sense strand starting at position 3103 of SEQ ID NO: 318659
ucauaaugcuucuuggaua

SEQ ID NO: 579498 - RNA, 19 nt, Artificial Sequence
  Description of Artificial Sequence: Synthetic oligonucleotide
  Antisense strand to SEQ ID NO: 579497
uauccaagaagcauuauga

SEQ ID NO: 579499 - RNA, 19 nt, Artificial Sequence
  Description of Artificial Sequence: Synthetic oligonucleotide
  Sense strand starting at position 3144 of SEQ ID NO: 318659
cucuuaaguucuguagaac

SEQ ID NO: 579500 - RNA, 19 nt, Artificial Sequence
  Description of Artificial Sequence: Synthetic oligonucleotide
  Antisense strand to SEQ ID NO: 579499
guucuacagaacuuaagag

SEQ ID NO: 579501 - RNA, 19 nt, Artificial Sequence
  Description of Artificial Sequence: Synthetic oligonucleotide
  Sense strand starting at position 3145 of SEQ ID NO: 318659
ucuuaaguucuguagaacu

SEQ ID NO: 579502 - RNA, 19 nt, Artificial Sequence
  Description of Artificial Sequence: Synthetic oligonucleotide
  Antisense strand to SEQ ID NO: 579501
aguucuacagaacuuaaga

SEQ ID NO: 579503 - RNA, 19 nt, Artificial Sequence
  Description of Artificial Sequence: Synthetic oligonucleotide
  Sense strand starting at position 3344 of SEQ ID NO: 318659
caguguuagagcugaacag

SEQ ID NO: 579504 - RNA, 19 nt, Artificial Sequence
  Description of Artificial Sequence: Synthetic oligonucleotide
  Antisense strand to SEQ ID NO: 579503
cuguucagcucuaacacug

SEQ ID NO: 579505 - RNA, 19 nt, Artificial Sequence
  Description of Artificial Sequence: Synthetic oligonucleotide
  Sense strand starting at position 3366 of SEQ ID NO: 318659
aucuuaugucugcauuaca

SEQ ID NO: 579506 - RNA, 19 nt, Artificial Sequence
  Description of Artificial Sequence: Synthetic oligonucleotide
  Antisense strand to SEQ ID NO: 579505
uguaaugcagacauaagau

SEQ ID NO: 579507 - RNA, 19 nt, Artificial Sequence
  Description of Artificial Sequence: Synthetic oligonucleotide
  Sense strand starting at position 3472 of SEQ ID NO: 318659
acuuacaccuuugugagaa

SEQ ID NO: 579508 - RNA, 19 nt, Artificial Sequence
  Description of Artificial Sequence: Synthetic oligonucleotide
  Antisense strand to SEQ ID NO: 579507
uucucacaaagguguaagu

SEQ ID NO: 579509 - RNA, 19 nt, Artificial Sequence
  Description of Artificial Sequence: Synthetic oligonucleotide
  Sense strand starting at position 3480 of SEQ ID NO: 318659
cuuugugagaaauggguaa

SEQ ID NO: 579510 - RNA, 19 nt, Artificial Sequence
  Description of Artificial Sequence: Synthetic oligonucleotide
  Antisense strand to SEQ ID NO: 579509
uuacccauuucucacaaag

SEQ ID NO: 579511 - RNA, 19 nt, Artificial Sequence
  Description of Artificial Sequence: Synthetic oligonucleotide
  Sense strand starting at position 3482 of SEQ ID NO: 318659
uugugagaaauggguaaua

SEQ ID NO: 579512 - RNA, 19 nt, Artificial Sequence
  Description of Artificial Sequence: Synthetic oligonucleotide
  Antisense strand to SEQ ID NO: 579511
uauuacccauuucucacaa

SEQ ID NO: 579513 - RNA, 19 nt, Artificial Sequence
  Description of Artificial Sequence: Synthetic oligonucleotide
  Sense strand starting at position 3577 of SEQ ID NO: 318659
aggauuuguuaguaaggaa

SEQ ID NO: 579514 - RNA, 19 nt, Artificial Sequence
  Description of Artificial Sequence: Synthetic oligonucleotide
  Antisense strand to SEQ ID NO: 579513
uuccuuacuaacaaauccu

SEQ ID NO: 579515 - RNA, 19 nt, Artificial Sequence
  Description of Artificial Sequence: Synthetic oligonucleotide
  Sense strand starting at position 3602 of SEQ ID NO: 318659
gagacagauaucggguaga

SEQ ID NO: 579516 - RNA, 19 nt, Artificial Sequence
  Description of Artificial Sequence: Synthetic oligonucleotide
  Antisense strand to SEQ ID NO: 579515
ucuacccgauaucugucuc

SEQ ID NO: 579517 - RNA, 19 nt, Artificial Sequence
  Description of Artificial Sequence: Synthetic oligonucleotide
  Sense strand starting at position 3607 of SEQ ID NO: 318659
agauaucggguagaaaguu

SEQ ID NO: 579518 - RNA, 19 nt, Artificial Sequence
  Description of Artificial Sequence: Synthetic oligonucleotide
  Antisense strand to SEQ ID NO: 579517
aacuuucuacccgauaucu

SEQ ID NO: 579519 - RNA, 19 nt, Artificial Sequence
  Description of Artificial Sequence: Synthetic oligonucleotide
  Sense strand starting at position 3702 of SEQ ID NO: 318659
uugacuaaauggucucuaa

SEQ ID NO: 579520 - RNA, 19 nt, Artificial Sequence
  Description of Artificial Sequence: Synthetic oligonucleotide
  Antisense strand to SEQ ID NO: 579519
uuagagaccauuuagucaa

SEQ ID NO: 579521 - RNA, 19 nt, Artificial Sequence
  Description of Artificial Sequence: Synthetic oligonucleotide
  Sense strand starting at position 3876 of SEQ ID NO: 318659
uuaucaguugccuagauuc

SEQ ID NO: 579522 - RNA, 19 nt, Artificial Sequence
  Description of Artificial Sequence: Synthetic oligonucleotide
  Antisense strand to SEQ ID NO: 579521
gaaucuaggcaacugauaa

SEQ ID NO: 579523 - RNA, 19 nt, Artificial Sequence
  Description of Artificial Sequence: Synthetic oligonucleotide
  Sense strand starting at position 40 of SEQ ID NO: 318660
agagaauacugccuuauaa

SEQ ID NO: 579524 - RNA, 19 nt, Artificial Sequence
  Description of Artificial Sequence: Synthetic oligonucleotide
  Antisense strand to SEQ ID NO: 579523
uuauaaggcaguauucucu

SEQ ID NO: 579525 - RNA, 19 nt, Artificial Sequence
  Description of Artificial Sequence: Synthetic oligonucleotide
  Sense strand starting at position 63 of SEQ ID NO: 318660
aucagauauugggagaauu

SEQ ID NO: 579526 - RNA, 19 nt, Artificial Sequence
  Description of Artificial Sequence: Synthetic oligonucleotide
  Antisense strand to SEQ ID NO: 579525
aauucucccaauaucugau

SEQ ID NO: 579527 - RNA, 19 nt, Artificial Sequence
  Description of Artificial Sequence: Synthetic oligonucleotide
  Sense strand starting at position 338 of SEQ ID NO: 318660
guuugaugaccucauacca

SEQ ID NO: 579528 - RNA, 19 nt, Artificial Sequence
  Description of Artificial Sequence: Synthetic oligonucleotide
  Antisense strand to SEQ ID NO: 579527
ugguaugaggucaucaaac

SEQ ID NO: 579529 - RNA, 19 nt, Artificial Sequence
  Description of Artificial Sequence: Synthetic oligonucleotide
  Sense strand starting at position 362 of SEQ ID NO: 318660
cccaucauuucucuacgua

SEQ ID NO: 579530 - RNA, 19 nt, Artificial Sequence
  Description of Artificial Sequence: Synthetic oligonucleotide
  Antisense strand to SEQ ID NO: 579529
uacguagagaaaugauggg

SEQ ID NO: 579531 - RNA, 19 nt, Artificial Sequence
  Description of Artificial Sequence: Synthetic oligonucleotide
  Sense strand starting at position 365 of SEQ ID NO: 318660
aucauuucucuacguaguu

SEQ ID NO: 579532 - RNA, 19 nt, Artificial Sequence
  Description of Artificial Sequence: Synthetic oligonucleotide
  Antisense strand to SEQ ID NO: 579531
aacuacguagagaaaugau

SEQ ID NO: 579533 - RNA, 19 nt, Artificial Sequence
  Description of Artificial Sequence: Synthetic oligonucleotide
  Sense strand starting at position 366 of SEQ ID NO: 318660
ucauuucucuacguaguuu

SEQ ID NO: 579534 - RNA, 19 nt, Artificial Sequence
  Description of Artificial Sequence: Synthetic oligonucleotide
  Antisense strand to SEQ ID NO: 579533
aaacuacguagagaaauga

SEQ ID NO: 579535 - RNA, 19 nt, Artificial Sequence
  Description of Artificial Sequence: Synthetic oligonucleotide
  Sense strand starting at position 647 of SEQ ID NO: 318660
guggguguuucgaugcagu

SEQ ID NO: 579536 - RNA, 19 nt, Artificial Sequence
  Description of Artificial Sequence: Synthetic oligonucleotide
  Antisense strand to SEQ ID NO: 579535
acugcaucgaaacacccac

SEQ ID NO: 579537 - RNA, 19 nt, Artificial Sequence
  Description of Artificial Sequence: Synthetic oligonucleotide
  Sense strand starting at position 649 of SEQ ID NO: 318660
ggguguuucgaugcagucu

SEQ ID NO: 579538 - RNA, 19 nt, Artificial Sequence
  Description of Artificial Sequence: Synthetic oligonucleotide
  Antisense strand to SEQ ID NO: 579537
agacugcaucgaaacaccc

SEQ ID NO: 579539 - RNA, 19 nt, Artificial Sequence
  Description of Artificial Sequence: Synthetic oligonucleotide
  Sense strand starting at position 828 of SEQ ID NO: 318660
aaaucuuguccgggauauc

SEQ ID NO: 579540 - RNA, 19 nt, Artificial Sequence
  Description of Artificial Sequence: Synthetic oligonucleotide
  Antisense strand to SEQ ID NO: 579539
gauaucccggacaagauuu

SEQ ID NO: 579541 - RNA, 19 nt, Artificial Sequence
  Description of Artificial Sequence: Synthetic oligonucleotide
  Sense strand starting at position 831 of SEQ ID NO: 318660
ucuuguccgggauauccaa

SEQ ID NO: 579542 - RNA, 19 nt, Artificial Sequence
  Description of Artificial Sequence: Synthetic oligonucleotide
  Antisense strand to SEQ ID NO: 579541
uuggauaucccggacaaga

SEQ ID NO: 579543 - RNA, 19 nt, Artificial Sequence
  Description of Artificial Sequence: Synthetic oligonucleotide
  Sense strand starting at position 875 of SEQ ID NO: 318660
guauaaauauggucaguuc

SEQ ID NO: 579544 - RNA, 19 nt, Artificial Sequence
  Description of Artificial Sequence: Synthetic oligonucleotide
  Antisense strand to SEQ ID NO: 579543
gaacugaccauauuuauac

SEQ ID NO: 579545 - RNA, 19 nt, Artificial Sequence
  Description of Artificial Sequence: Synthetic oligonucleotide
  Sense strand starting at position 1043 of SEQ ID NO: 318660
caaacugauuaagugugau

SEQ ID NO: 579546 - RNA, 19 nt, Artificial Sequence
  Description of Artificial Sequence: Synthetic oligonucleotide
  Antisense strand to SEQ ID NO: 579545
aucacacuuaaucaguuug

SEQ ID NO: 579547 - RNA, 19 nt, Artificial Sequence
  Description of Artificial Sequence: Synthetic oligonucleotide
  Sense strand starting at position 1078 of SEQ ID NO: 318660
uuaagcaguuccucgagaa

SEQ ID NO: 579548 - RNA, 19 nt, Artificial Sequence
  Description of Artificial Sequence: Synthetic oligonucleotide
  Antisense strand to SEQ ID NO: 579547
uucucgaggaacugcuuaa

SEQ ID NO: 579549 - RNA, 19 nt, Artificial Sequence
  Description of Artificial Sequence: Synthetic oligonucleotide
  Sense strand starting at position 1079 of SEQ ID NO: 318660
uaagcaguuccucgagaaa

SEQ ID NO: 579550 - RNA, 19 nt, Artificial Sequence
  Description of Artificial Sequence: Synthetic oligonucleotide
  Antisense strand to SEQ ID NO: 579549
uuucucgaggaacugcuua

SEQ ID NO: 579551 - RNA, 19 nt, Artificial Sequence
  Description of Artificial Sequence: Synthetic oligonucleotide
  Sense strand starting at position 1082 of SEQ ID NO: 318660
gcaguuccucgagaaacuu

SEQ ID NO: 579552 - RNA, 19 nt, Artificial Sequence
  Description of Artificial Sequence: Synthetic oligonucleotide
  Antisense strand to SEQ ID NO: 579551
aaguuucucgaggaacugc

SEQ ID NO: 579553 - RNA, 19 nt, Artificial Sequence
  Description of Artificial Sequence: Synthetic oligonucleotide
  Sense strand starting at position 1243 of SEQ ID NO: 318660
ggucaagacgccuagacaa

SEQ ID NO: 579554 - RNA, 19 nt, Artificial Sequence
  Description of Artificial Sequence: Synthetic oligonucleotide
  Antisense strand to SEQ ID NO: 579553
uugucuaggcgucuugacc

SEQ ID NO: 579555 - RNA, 19 nt, Artificial Sequence
  Description of Artificial Sequence: Synthetic oligonucleotide
  Sense strand starting at position 1338 of SEQ ID NO: 318660
cagccugagcuccauuaga

SEQ ID NO: 579556 - RNA, 19 nt, Artificial Sequence
  Description of Artificial Sequence: Synthetic oligonucleotide
  Antisense strand to SEQ ID NO: 579555
ucuaauggagcucaggcug

SEQ ID NO: 579557 - RNA, 19 nt, Artificial Sequence
  Description of Artificial Sequence: Synthetic oligonucleotide
  Sense strand starting at position 1676 of SEQ ID NO: 318660
gccuucugccaggugucau

SEQ ID NO: 579558 - RNA, 19 nt, Artificial Sequence
  Description of Artificial Sequence: Synthetic oligonucleotide
  Antisense strand to SEQ ID NO: 579557
augacaccuggcagaaggc

SEQ ID NO: 579559 - RNA, 19 nt, Artificial Sequence
  Description of Artificial Sequence: Synthetic oligonucleotide
  Sense strand starting at position 1872 of SEQ ID NO: 318660
cgagcuuugcucccagcga

SEQ ID NO: 579560 - RNA, 19 nt, Artificial Sequence
  Description of Artificial Sequence: Synthetic oligonucleotide
  Antisense strand to SEQ ID NO: 579559
ucgcugggagcaaagcucg

SEQ ID NO: 579561 - RNA, 19 nt, Artificial Sequence
  Description of Artificial Sequence: Synthetic oligonucleotide
  Sense strand starting at position 2742 of SEQ ID NO: 318660
ggagauuccucucccggau

SEQ ID NO: 579562 - RNA, 19 nt, Artificial Sequence
  Description of Artificial Sequence: Synthetic oligonucleotide
  Antisense strand to SEQ ID NO: 579561
auccgggagaggaaucucc

SEQ ID NO: 579563 - RNA, 19 nt, Artificial Sequence
  Description of Artificial Sequence: Synthetic oligonucleotide
  Sense strand starting at position 3012 of SEQ ID NO: 318660
ggauuauuagaucacgcac

SEQ ID NO: 579564 - RNA, 19 nt, Artificial Sequence
  Description of Artificial Sequence: Synthetic oligonucleotide
  Antisense strand to SEQ ID NO: 579563
gugcgugaucuaauaaucc

SEQ ID NO: 579565 - RNA, 19 nt, Artificial Sequence
  Description of Artificial Sequence: Synthetic oligonucleotide
  Sense strand starting at position 3064 of SEQ ID NO: 318660
uguauuaggcuuuaagaac

SEQ ID NO: 579566 - RNA, 19 nt, Artificial Sequence
  Description of Artificial Sequence: Synthetic oligonucleotide
  Antisense strand to SEQ ID NO: 579565
guucuuaaagccuaauaca

SEQ ID NO: 579567 - RNA, 19 nt, Artificial Sequence
  Description of Artificial Sequence: Synthetic oligonucleotide
  Sense strand starting at position 3089 of SEQ ID NO: 318660
ccuaaauugcuggguaagu

SEQ ID NO: 579568 - RNA, 19 nt, Artificial Sequence
  Description of Artificial Sequence: Synthetic oligonucleotide
  Antisense strand to SEQ ID NO: 579567
acuuacccagcaauuuagg

SEQ ID NO: 579569 - RNA, 19 nt, Artificial Sequence
  Description of Artificial Sequence: Synthetic oligonucleotide
  Sense strand starting at position 3090 of SEQ ID NO: 318660
cuaaauugcuggguaagua

SEQ ID NO: 579570 - RNA, 19 nt, Artificial Sequence
  Description of Artificial Sequence: Synthetic oligonucleotide
  Antisense strand to SEQ ID NO: 579569
uacuuacccagcaauuuag

SEQ ID NO: 579571 - RNA, 19 nt, Artificial Sequence
  Description of Artificial Sequence: Synthetic oligonucleotide
  Sense strand starting at position 3129 of SEQ ID NO: 318660
agacaucucguuuagguuu

SEQ ID NO: 579572 - RNA, 19 nt, Artificial Sequence
  Description of Artificial Sequence: Synthetic oligonucleotide
  Antisense strand to SEQ ID NO: 579571
aaaccuaaacgagaugucu

SEQ ID NO: 579573 - RNA, 19 nt, Artificial Sequence
  Description of Artificial Sequence: Synthetic oligonucleotide
  Sense strand starting at position 3170 of SEQ ID NO: 318660
uccuguuugggagaagucu

SEQ ID NO: 579574 - RNA, 19 nt, Artificial Sequence
  Description of Artificial Sequence: Synthetic oligonucleotide
  Antisense strand to SEQ ID NO: 579573
agacuucucccaaacagga

SEQ ID NO: 579575 - RNA, 19 nt, Artificial Sequence
  Description of Artificial Sequence: Synthetic oligonucleotide
  Sense strand starting at position 3196 of SEQ ID NO: 318660
uggcaaguuccgucgucuu

SEQ ID NO: 579576 - RNA, 19 nt, Artificial Sequence
  Description of Artificial Sequence: Synthetic oligonucleotide
  Antisense strand to SEQ ID NO: 579575
aagacgacggaacuugcca

SEQ ID NO: 579577 - RNA, 19 nt, Artificial Sequence
  Description of Artificial Sequence: Synthetic oligonucleotide
  Sense strand starting at position 3245 of SEQ ID NO: 318660
ucuccaauccggcaucuaa

SEQ ID NO: 579578 - RNA, 19 nt, Artificial Sequence
  Description of Artificial Sequence: Synthetic oligonucleotide
  Antisense strand to SEQ ID NO: 579577
uuagaugccggauuggaga

SEQ ID NO: 579579 - RNA, 19 nt, Artificial Sequence
  Description of Artificial Sequence: Synthetic oligonucleotide
  Sense strand starting at position 3352 of SEQ ID NO: 318660
acgaaagcuuugccaggua

SEQ ID NO: 579580 - RNA, 19 nt, Artificial Sequence
  Description of Artificial Sequence: Synthetic oligonucleotide
  Antisense strand to SEQ ID NO: 579579
uaccuggcaaagcuuucgu

SEQ ID NO: 579581 - RNA, 19 nt, Artificial Sequence
  Description of Artificial Sequence: Synthetic oligonucleotide
  Sense strand starting at position 3355 of SEQ ID NO: 318660
aaagcuuugccagguaaua

SEQ ID NO: 579582 - RNA, 19 nt, Artificial Sequence
  Description of Artificial Sequence: Synthetic oligonucleotide
  Antisense strand to SEQ ID NO: 579581
uauuaccuggcaaagcuuu

SEQ ID NO: 579583 - RNA, 19 nt, Artificial Sequence
  Description of Artificial Sequence: Synthetic oligonucleotide
  Sense strand starting at position 3384 of SEQ ID NO: 318660
uguucugauccggauuaau

SEQ ID NO: 579584 - RNA, 19 nt, Artificial Sequence
  Description of Artificial Sequence: Synthetic oligonucleotide
  Antisense strand to SEQ ID NO: 579583
auuaauccggaucagaaca

SEQ ID NO: 579585 - RNA, 19 nt, Artificial Sequence
  Description of Artificial Sequence: Synthetic oligonucleotide
  Sense strand starting at position 3395 of SEQ ID NO: 318660
ggauuaaugcccguugcgu

SEQ ID NO: 579586 - RNA, 19 nt, Artificial Sequence
  Description of Artificial Sequence: Synthetic oligonucleotide
  Antisense strand to SEQ ID NO: 579585
acgcaacgggcauuaaucc

SEQ ID NO: 579587 - RNA, 19 nt, Artificial Sequence
  Description of Artificial Sequence: Synthetic oligonucleotide
  Sense strand starting at position 3484 of SEQ ID NO: 318660
aacaaaugccugcgugaau

SEQ ID NO: 579588 - RNA, 19 nt, Artificial Sequence
  Description of Artificial Sequence: Synthetic oligonucleotide
  Antisense strand to SEQ ID NO: 579587
auucacgcaggcauuuguu

SEQ ID NO: 579589 - RNA, 19 nt, Artificial Sequence
  Description of Artificial Sequence: Synthetic oligonucleotide
  Sense strand starting at position 3498 of SEQ ID NO: 318660
ugaauuaggugccuauaua

SEQ ID NO: 579590 - RNA, 19 nt, Artificial Sequence
  Description of Artificial Sequence: Synthetic oligonucleotide
  Antisense strand to SEQ ID NO: 579589
uauauaggcaccuaauuca

SEQ ID NO: 579591 - RNA, 19 nt, Artificial Sequence
  Description of Artificial Sequence: Synthetic oligonucleotide
  Sense strand starting at position 3499 of SEQ ID NO: 318660
gaauuaggugccuauauau

SEQ ID NO: 579592 - RNA, 19 nt, Artificial Sequence
  Description of Artificial Sequence: Synthetic oligonucleotide
  Antisense strand to SEQ ID NO: 579591
auauauaggcaccuaauuc

SEQ ID NO: 579593 - RNA, 19 nt, Artificial Sequence
  Description of Artificial Sequence: Synthetic oligonucleotide
  Sense strand starting at position 3569 of SEQ ID NO: 318660
cauacuggccuuugagcua

SEQ ID NO: 579594 - RNA, 19 nt, Artificial Sequence
  Description of Artificial Sequence: Synthetic oligonucleotide
  Antisense strand to SEQ ID NO: 579593
uagcucaaaggccaguaug

SEQ ID NO: 579595 - RNA, 19 nt, Artificial Sequence
  Description of Artificial Sequence: Synthetic oligonucleotide
  Sense strand starting at position 3572 of SEQ ID NO: 318660
acuggccuuugagcuaaau

SEQ ID NO: 579596 - RNA, 19 nt, Artificial Sequence
  Description of Artificial Sequence: Synthetic oligonucleotide
  Antisense strand to SEQ ID NO: 579595
auuuagcucaaaggccagu

SEQ ID NO: 579597 - RNA, 19 nt, Artificial Sequence
  Description of Artificial Sequence: Synthetic oligonucleotide
  Sense strand starting at position 3811 of SEQ ID NO: 318660
auguuaauauacuuggcaa

SEQ ID NO: 579598 - RNA, 19 nt, Artificial Sequence
  Description of Artificial Sequence: Synthetic oligonucleotide
  Antisense strand to SEQ ID NO: 579597
uugccaaguauauuaacau

SEQ ID NO: 579599 - RNA, 19 nt, Artificial Sequence
  Description of Artificial Sequence: Synthetic oligonucleotide
  Sense strand starting at position 3813 of SEQ ID NO: 318660
guuaauauacuuggcaagu

SEQ ID NO: 579600 - RNA, 19 nt, Artificial Sequence
  Description of Artificial Sequence: Synthetic oligonucleotide
  Antisense strand to SEQ ID NO: 579599
acuugccaaguauauuaac

SEQ ID NO: 579601 - RNA, 19 nt, Artificial Sequence
  Description of Artificial Sequence: Synthetic oligonucleotide
  Sense strand starting at position 3958 of SEQ ID NO: 318660
aacagaucauuugguggua

SEQ ID NO: 579602 - RNA, 19 nt, Artificial Sequence
  Description of Artificial Sequence: Synthetic oligonucleotide
  Antisense strand to SEQ ID NO: 579601
uaccaccaaaugaucuguu

SEQ ID NO: 579603 - RNA, 19 nt, Artificial Sequence
  Description of Artificial Sequence: Synthetic oligonucleotide
  Sense strand starting at position 140 of SEQ ID NO: 318661
acuuaagacucacccgaaa

SEQ ID NO: 579604 - RNA, 19 nt, Artificial Sequence
  Description of Artificial Sequence: Synthetic oligonucleotide
  Antisense strand to SEQ ID NO: 579603
uuucgggugagucuuaagu

SEQ ID NO: 579605 - RNA, 19 nt, Artificial Sequence
  Description of Artificial Sequence: Synthetic oligonucleotide
  Sense strand starting at position 215 of SEQ ID NO: 318661
ucuauuugcuuugaggaag

SEQ ID NO: 579606 - RNA, 19 nt, Artificial Sequence
  Description of Artificial Sequence: Synthetic oligonucleotide
  Antisense strand to SEQ ID NO: 579605
cuuccucaaagcaaauaga

SEQ ID NO: 579607 - RNA, 19 nt, Artificial Sequence
  Description of Artificial Sequence: Synthetic oligonucleotide
  Sense strand starting at position 261 of SEQ ID NO: 318661
aucugcucuguguacagaa

SEQ ID NO: 579608 - RNA, 19 nt, Artificial Sequence
  Description of Artificial Sequence: Synthetic oligonucleotide
  Antisense strand to SEQ ID NO: 579607
uucuguacacagagcagau

SEQ ID NO: 579609 - RNA, 19 nt, Artificial Sequence
  Description of Artificial Sequence: Synthetic oligonucleotide
  Sense strand starting at position 307 of SEQ ID NO: 318661
gcaguaagugcuuagauaa

SEQ ID NO: 579610 - RNA, 19 nt, Artificial Sequence
  Description of Artificial Sequence: Synthetic oligonucleotide
  Antisense strand to SEQ ID NO: 579609
uuaucuaagcacuuacugc

SEQ ID NO: 579611 - RNA, 19 nt, Artificial Sequence
  Description of Artificial Sequence: Synthetic oligonucleotide
  Sense strand starting at position 314 of SEQ ID NO: 318661
gugcuuagauaagcaaacu

SEQ ID NO: 579612 - RNA, 19 nt, Artificial Sequence
  Description of Artificial Sequence: Synthetic oligonucleotide
  Antisense strand to SEQ ID NO: 579611
aguuugcuuaucuaagcac

SEQ ID NO: 579613 - RNA, 19 nt, Artificial Sequence
  Description of Artificial Sequence: Synthetic oligonucleotide
  Sense strand starting at position 326 of SEQ ID NO: 318661
gcaaacuuggcucaccaau

SEQ ID NO: 579614 - RNA, 19 nt, Artificial Sequence
  Description of Artificial Sequence: Synthetic oligonucleotide
  Antisense strand to SEQ ID NO: 579613
auuggugagccaaguuugc

SEQ ID NO: 579615 - RNA, 19 nt, Artificial Sequence
  Description of Artificial Sequence: Synthetic oligonucleotide
  Sense strand starting at position 337 of SEQ ID NO: 318661
ucaccaauaccaugagguu

SEQ ID NO: 579616 - RNA, 19 nt, Artificial Sequence
  Description of Artificial Sequence: Synthetic oligonucleotide
  Antisense strand to SEQ ID NO: 579615
aaccucaugguauugguga

SEQ ID NO: 579617 - RNA, 19 nt, Artificial Sequence
  Description of Artificial Sequence: Synthetic oligonucleotide
  Sense strand starting at position 351 of SEQ ID NO: 318661
agguucuuuggugggugaa

SEQ ID NO: 579618 - RNA, 19 nt, Artificial Sequence
  Description of Artificial Sequence: Synthetic oligonucleotide
  Antisense strand to SEQ ID NO: 579617
uucacccaccaaagaaccu

SEQ ID NO: 579619 - RNA, 19 nt, Artificial Sequence
  Description of Artificial Sequence: Synthetic oligonucleotide
  Sense strand starting at position 352 of SEQ ID NO: 318661
gguucuuuggugggugaag

SEQ ID NO: 579620 - RNA, 19 nt, Artificial Sequence
  Description of Artificial Sequence: Synthetic oligonucleotide
  Antisense strand to SEQ ID NO: 579619
cuucacccaccaaagaacc

SEQ ID NO: 579621 - RNA, 19 nt, Artificial Sequence
  Description of Artificial Sequence: Synthetic oligonucleotide
  Sense strand starting at position 353 of SEQ ID NO: 318661
guucuuuggugggugaaga

SEQ ID NO: 579622 - RNA, 19 nt, Artificial Sequence
  Description of Artificial Sequence: Synthetic oligonucleotide
  Antisense strand to SEQ ID NO: 579621
ucuucacccaccaaagaac

SEQ ID NO: 579623 - RNA, 19 nt, Artificial Sequence
  Description of Artificial Sequence: Synthetic oligonucleotide
  Sense strand starting at position 2187 of SEQ ID NO: 318661
acugucucaugguuuagau

SEQ ID NO: 579624 - RNA, 19 nt, Artificial Sequence
  Description of Artificial Sequence: Synthetic oligonucleotide
  Antisense strand to SEQ ID NO: 579623
aucuaaaccaugagacagu

SEQ ID NO: 579625 - RNA, 19 nt, Artificial Sequence
  Description of Artificial Sequence: Synthetic oligonucleotide
  Sense strand starting at position 2189 of SEQ ID NO: 318661
ugucucaugguuuagauga

SEQ ID NO: 579626 - RNA, 19 nt, Artificial Sequence
  Description of Artificial Sequence: Synthetic oligonucleotide
  Antisense strand to SEQ ID NO: 579625
ucaucuaaaccaugagaca

SEQ ID NO: 579627 - RNA, 19 nt, Artificial Sequence
  Description of Artificial Sequence: Synthetic oligonucleotide
  Sense strand starting at position 2232 of SEQ ID NO: 318661
agaaguggugacgaaucau

SEQ ID NO: 579628 - RNA, 19 nt, Artificial Sequence
  Description of Artificial Sequence: Synthetic oligonucleotide
  Antisense strand to SEQ ID NO: 579627
augauucgucaccacuucu

SEQ ID NO: 579629 - RNA, 19 nt, Artificial Sequence
  Description of Artificial Sequence: Synthetic oligonucleotide
  Sense strand starting at position 2238 of SEQ ID NO: 318661
ggugacgaaucauuacauc

SEQ ID NO: 579630 - RNA, 19 nt, Artificial Sequence
  Description of Artificial Sequence: Synthetic oligonucleotide
  Antisense strand to SEQ ID NO: 579629
gauguaaugauucgucacc

SEQ ID NO: 579631 - RNA, 19 nt, Artificial Sequence
  Description of Artificial Sequence: Synthetic oligonucleotide
  Sense strand starting at position 2290 of SEQ ID NO: 318661
cuuugugcgguagaaauaa

SEQ ID NO: 579632 - RNA, 19 nt, Artificial Sequence
  Description of Artificial Sequence: Synthetic oligonucleotide
  Antisense strand to SEQ ID NO: 579631
uuauuucuaccgcacaaag

SEQ ID NO: 579633 - RNA, 19 nt, Artificial Sequence
  Description of Artificial Sequence: Synthetic oligonucleotide
  Sense strand starting at position 2548 of SEQ ID NO: 318661
ggccucugaguaugucaga

SEQ ID NO: 579634 - RNA, 19 nt, Artificial Sequence
  Description of Artificial Sequence: Synthetic oligonucleotide
  Antisense strand to SEQ ID NO: 579633
ucugacauacucagaggcc

SEQ ID NO: 579635 - RNA, 19 nt, Artificial Sequence
  Description of Artificial Sequence: Synthetic oligonucleotide
  Sense strand starting at position 2549 of SEQ ID NO: 318661
gccucugaguaugucagau

SEQ ID NO: 579636 - RNA, 19 nt, Artificial Sequence
  Description of Artificial Sequence: Synthetic oligonucleotide
  Antisense strand to SEQ ID NO: 579635
aucugacauacucagaggc

SEQ ID NO: 579637 - RNA, 19 nt, Artificial Sequence
  Description of Artificial Sequence: Synthetic oligonucleotide
  Sense strand starting at position 2600 of SEQ ID NO: 318661
ugaacuaugcuaggccauu

SEQ ID NO: 579638 - RNA, 19 nt, Artificial Sequence
  Description of Artificial Sequence: Synthetic oligonucleotide
  Antisense strand to SEQ ID NO: 579637
aauggccuagcauaguuca

SEQ ID NO: 579639 - RNA, 19 nt, Artificial Sequence
  Description of Artificial Sequence: Synthetic oligonucleotide
  Sense strand starting at position 2755 of SEQ ID NO: 318661
gugugucuucaggacgaug

SEQ ID NO: 579640 - RNA, 19 nt, Artificial Sequence
  Description of Artificial Sequence: Synthetic oligonucleotide
  Antisense strand to SEQ ID NO: 579639
caucguccugaagacacac

SEQ ID NO: 579641 - RNA, 19 nt, Artificial Sequence
  Description of Artificial Sequence: Synthetic oligonucleotide
  Sense strand starting at position 2793 of SEQ ID NO: 318661
ggugguuuccguaguguag

SEQ ID NO: 579642 - RNA, 19 nt, Artificial Sequence
  Description of Artificial Sequence: Synthetic oligonucleotide
  Antisense strand to SEQ ID NO: 579641
cuacacuacggaaaccacc

SEQ ID NO: 579643 - RNA, 19 nt, Artificial Sequence
  Description of Artificial Sequence: Synthetic oligonucleotide
  Sense strand starting at position 2875 of SEQ ID NO: 318661
uggucuguucgggagauuc

SEQ ID NO: 579644 - RNA, 19 nt, Artificial Sequence
  Description of Artificial Sequence: Synthetic oligonucleotide
  Antisense strand to SEQ ID NO: 579643
gaaucucccgaacagacca

SEQ ID NO: 579645 - RNA, 19 nt, Artificial Sequence
  Description of Artificial Sequence: Synthetic oligonucleotide
  Sense strand starting at position 3060 of SEQ ID NO: 318661
uguacaggaauccguagau

SEQ ID NO: 579646 - RNA, 19 nt, Artificial Sequence
  Description of Artificial Sequence: Synthetic oligonucleotide
  Antisense strand to SEQ ID NO: 579645
aucuacggauuccuguaca

SEQ ID NO: 579647 - RNA, 19 nt, Artificial Sequence
  Description of Artificial Sequence: Synthetic oligonucleotide
  Sense strand starting at position 3090 of SEQ ID NO: 318661
ggcucuagugccuagaaca

SEQ ID NO: 579648 - RNA, 19 nt, Artificial Sequence
  Description of Artificial Sequence: Synthetic oligonucleotide
  Antisense strand to SEQ ID NO: 579647
uguucuaggcacuagagcc

SEQ ID NO: 579649 - RNA, 19 nt, Artificial Sequence
  Description of Artificial Sequence: Synthetic oligonucleotide
  Sense strand starting at position 3124 of SEQ ID NO: 318661
gcuucuuaguauuugcaca

SEQ ID NO: 579650 - RNA, 19 nt, Artificial Sequence
  Description of Artificial Sequence: Synthetic oligonucleotide
  Antisense strand to SEQ ID NO: 579649
ugugcaaauacuaagaagc

SEQ ID NO: 579651 - RNA, 19 nt, Artificial Sequence
  Description of Artificial Sequence: Synthetic oligonucleotide
  Sense strand starting at position 3185 of SEQ ID NO: 318661
gagacaaaguuagaauaca

SEQ ID NO: 579652 - RNA, 19 nt, Artificial Sequence
  Description of Artificial Sequence: Synthetic oligonucleotide
  Antisense strand to SEQ ID NO: 579651
uguauucuaacuuugucuc

SEQ ID NO: 579653 - RNA, 19 nt, Artificial Sequence
  Description of Artificial Sequence: Synthetic oligonucleotide
  Sense strand starting at position 3338 of SEQ ID NO: 318661
augguauucucuguaccaa

SEQ ID NO: 579654 - RNA, 19 nt, Artificial Sequence
  Description of Artificial Sequence: Synthetic oligonucleotide
  Antisense strand to SEQ ID NO: 579653
uugguacagagaauaccau

SEQ ID NO: 579655 - RNA, 19 nt, Artificial Sequence
  Description of Artificial Sequence: Synthetic oligonucleotide
  Sense strand starting at position 3339 of SEQ ID NO: 318661
ugguauucucuguaccaag

SEQ ID NO: 579656 - RNA, 19 nt, Artificial Sequence
  Description of Artificial Sequence: Synthetic oligonucleotide
  Antisense strand to SEQ ID NO: 579655
cuugguacagagaauacca

SEQ ID NO: 579657 - RNA, 19 nt, Artificial Sequence
  Description of Artificial Sequence: Synthetic oligonucleotide
  Sense strand starting at position 3388 of SEQ ID NO: 318661
gguguuagaacuuggacua

SEQ ID NO: 579658 - RNA, 19 nt, Artificial Sequence
  Description of Artificial Sequence: Synthetic oligonucleotide
  Antisense strand to SEQ ID NO: 579657
uaguccaaguucuaacacc

SEQ ID NO: 579659 - RNA, 19 nt, Artificial Sequence
  Description of Artificial Sequence: Synthetic oligonucleotide
  Sense strand starting at position 3389 of SEQ ID NO: 318661
guguuagaacuuggacuaa

SEQ ID NO: 579660 - RNA, 19 nt, Artificial Sequence
  Description of Artificial Sequence: Synthetic oligonucleotide
  Antisense strand to SEQ ID NO: 579659
uuaguccaaguucuaacac

SEQ ID NO: 579661 - RNA, 19 nt, Artificial Sequence
  Description of Artificial Sequence: Synthetic oligonucleotide
  Sense strand starting at position 3441 of SEQ ID NO: 318661
cgagcagaauucucacaac

SEQ ID NO: 579662 - RNA, 19 nt, Artificial Sequence
  Description of Artificial Sequence: Synthetic oligonucleotide
  Antisense strand to SEQ ID NO: 579661
guugugagaauucugcucg

SEQ ID NO: 579663 - RNA, 19 nt, Artificial Sequence
  Description of Artificial Sequence: Synthetic oligonucleotide
  Sense strand starting at position 3537 of SEQ ID NO: 318661
gggcuaucgugcaugcaug

SEQ ID NO: 579664 - RNA, 19 nt, Artificial Sequence
  Description of Artificial Sequence: Synthetic oligonucleotide
  Antisense strand to SEQ ID NO: 579663
caugcaugcacgauagccc

SEQ ID NO: 579665 - RNA, 19 nt, Artificial Sequence
  Description of Artificial Sequence: Synthetic oligonucleotide
  Sense strand starting at position 3656 of SEQ ID NO: 318661
gagggaacaaugugguuua

SEQ ID NO: 579666 - RNA, 19 nt, Artificial Sequence
  Description of Artificial Sequence: Synthetic oligonucleotide
  Antisense strand to SEQ ID NO: 579665
uaaaccacauuguucccuc

SEQ ID NO: 579667 - RNA, 19 nt, Artificial Sequence
  Description of Artificial Sequence: Synthetic oligonucleotide
  Sense strand starting at position 3661 of SEQ ID NO: 318661
aacaaugugguuuaucgaa

SEQ ID NO: 579668 - RNA, 19 nt, Artificial Sequence
  Description of Artificial Sequence: Synthetic oligonucleotide
  Antisense strand to SEQ ID NO: 579667
uucgauaaaccacauuguu

SEQ ID NO: 579669 - RNA, 19 nt, Artificial Sequence
  Description of Artificial Sequence: Synthetic oligonucleotide
  Sense strand starting at position 3663 of SEQ ID NO: 318661
caaugugguuuaucgaaac

SEQ ID NO: 579670 - RNA, 19 nt, Artificial Sequence
  Description of Artificial Sequence: Synthetic oligonucleotide
  Antisense strand to SEQ ID NO: 579669
guuucgauaaaccacauug

SEQ ID NO: 579671 - RNA, 19 nt, Artificial Sequence
  Description of Artificial Sequence: Synthetic oligonucleotide
  Sense strand starting at position 3743 of SEQ ID NO: 318661
cccacuuuacugggagauu

SEQ ID NO: 579672 - RNA, 19 nt, Artificial Sequence
  Description of Artificial Sequence: Synthetic oligonucleotide
  Antisense strand to SEQ ID NO: 579671
aaucucccaguaaaguggg

SEQ ID NO: 579673 - RNA, 19 nt, Artificial Sequence
  Description of Artificial Sequence: Synthetic oligonucleotide
  Sense strand starting at position 3744 of SEQ ID NO: 318661
ccacuuuacugggagauuu

SEQ ID NO: 579674 - RNA, 19 nt, Artificial Sequence
  Description of Artificial Sequence: Synthetic oligonucleotide
  Antisense strand to SEQ ID NO: 579673
aaaucucccaguaaagugg

SEQ ID NO: 579675 - RNA, 19 nt, Artificial Sequence
  Description of Artificial Sequence: Synthetic oligonucleotide
  Sense strand starting at position 3815 of SEQ ID NO: 318661
caagaaagaugcuuugugu

SEQ ID NO: 579676 - RNA, 19 nt, Artificial Sequence
  Description of Artificial Sequence: Synthetic oligonucleotide
  Antisense strand to SEQ ID NO: 579675
acacaaagcaucuuucuug

SEQ ID NO: 579677 - RNA, 19 nt, Artificial Sequence
  Description of Artificial Sequence: Synthetic oligonucleotide
  Sense strand starting at position 3818 of SEQ ID NO: 318661
gaaagaugcuuugugucau

SEQ ID NO: 579678 - RNA, 19 nt, Artificial Sequence
  Description of Artificial Sequence: Synthetic oligonucleotide
  Antisense strand to SEQ ID NO: 579677
augacacaaagcaucuuuc

SEQ ID NO: 579679 - RNA, 19 nt, Artificial Sequence
  Description of Artificial Sequence: Synthetic oligonucleotide
  Sense strand starting at position 3844 of SEQ ID NO: 318661
acuugucuuccguauauuc

SEQ ID NO: 579680 - RNA, 19 nt, Artificial Sequence
  Description of Artificial Sequence: Synthetic oligonucleotide
  Antisense strand to SEQ ID NO: 579679
gaauauacggaagacaagu

SEQ ID NO: 579681 - RNA, 19 nt, Artificial Sequence
  Description of Artificial Sequence: Synthetic oligonucleotide
  Sense strand starting at position 3870 of SEQ ID NO: 318661
ugcucuugacuuuaagagu

SEQ ID NO: 579682 - RNA, 19 nt, Artificial Sequence
  Description of Artificial Sequence: Synthetic oligonucleotide
  Antisense strand to SEQ ID NO: 579681
acucuuaaagucaagagca

SEQ ID NO: 579683 - RNA, 19 nt, Artificial Sequence
  Description of Artificial Sequence: Synthetic oligonucleotide
  Sense strand starting at position 2 of SEQ ID NO: 318662
acuagaaagcaaggcauua

SEQ ID NO: 579684 - RNA, 19 nt, Artificial Sequence
  Description of Artificial Sequence: Synthetic oligonucleotide
  Antisense strand to SEQ ID NO: 579683
uaaugccuugcuuucuagu

SEQ ID NO: 579685 - RNA, 19 nt, Artificial Sequence
  Description of Artificial Sequence: Synthetic oligonucleotide
  Sense strand starting at position 90 of SEQ ID NO: 318662
agugcuuuaugguuaacau

SEQ ID NO: 579686 - RNA, 19 nt, Artificial Sequence
  Description of Artificial Sequence: Synthetic oligonucleotide
  Antisense strand to SEQ ID NO: 579685
auguuaaccauaaagcacu

SEQ ID NO: 579687 - RNA, 19 nt, Artificial Sequence
  Description of Artificial Sequence: Synthetic oligonucleotide
  Sense strand starting at position 91 of SEQ ID NO: 318662
gugcuuuaugguuaacaua

SEQ ID NO: 579688 - RNA, 19 nt, Artificial Sequence
  Description of Artificial Sequence: Synthetic oligonucleotide
  Antisense strand to SEQ ID NO: 579687
uauguuaaccauaaagcac

SEQ ID NO: 579689 - RNA, 19 nt, Artificial Sequence
  Description of Artificial Sequence: Synthetic oligonucleotide
  Sense strand starting at position 277 of SEQ ID NO: 318662
ggcacauucugauccauca

SEQ ID NO: 579690 - RNA, 19 nt, Artificial Sequence
  Description of Artificial Sequence: Synthetic oligonucleotide
  Antisense strand to SEQ ID NO: 579689
ugauggaucagaaugugcc

SEQ ID NO: 579691 - RNA, 19 nt, Artificial Sequence
  Description of Artificial Sequence: Synthetic oligonucleotide
  Sense strand starting at position 393 of SEQ ID NO: 318662
ugcuaucaguaguuuagga

SEQ ID NO: 579692 - RNA, 19 nt, Artificial Sequence
  Description of Artificial Sequence: Synthetic oligonucleotide
  Antisense strand to SEQ ID NO: 579691
uccuaaacuacugauagca

SEQ ID NO: 579693 - RNA, 19 nt, Artificial Sequence
  Description of Artificial Sequence: Synthetic oligonucleotide
  Sense strand starting at position 395 of SEQ ID NO: 318662
cuaucaguaguuuaggacu

SEQ ID NO: 579694 - RNA, 19 nt, Artificial Sequence
  Description of Artificial Sequence: Synthetic oligonucleotide
  Antisense strand to SEQ ID NO: 579693
aguccuaaacuacugauag

SEQ ID NO: 579695 - RNA, 19 nt, Artificial Sequence
  Description of Artificial Sequence: Synthetic oligonucleotide
  Sense strand starting at position 420 of SEQ ID NO: 318662
uggcauuucugucuaccaa

SEQ ID NO: 579696 - RNA, 19 nt, Artificial Sequence
  Description of Artificial Sequence: Synthetic oligonucleotide
  Antisense strand to SEQ ID NO: 579695
uugguagacagaaaugcca

SEQ ID NO: 579697 - RNA, 19 nt, Artificial Sequence
  Description of Artificial Sequence: Synthetic oligonucleotide
  Sense strand starting at position 468 of SEQ ID NO: 318662
ggucccaaaugucuauuau

SEQ ID NO: 579698 - RNA, 19 nt, Artificial Sequence
  Description of Artificial Sequence: Synthetic oligonucleotide
  Antisense strand to SEQ ID NO: 579697
auaauagacauuugggacc

SEQ ID NO: 579699 - RNA, 19 nt, Artificial Sequence
  Description of Artificial Sequence: Synthetic oligonucleotide
  Sense strand starting at position 469 of SEQ ID NO: 318662
gucccaaaugucuauuauc

SEQ ID NO: 579700 - RNA, 19 nt, Artificial Sequence
  Description of Artificial Sequence: Synthetic oligonucleotide
  Antisense strand to SEQ ID NO: 579699
gauaauagacauuugggac

SEQ ID NO: 579701 - RNA, 19 nt, Artificial Sequence
  Description of Artificial Sequence: Synthetic oligonucleotide
  Sense strand starting at position 477 of SEQ ID NO: 318662
ugucuauuaucuccaagua

SEQ ID NO: 579702 - RNA, 19 nt, Artificial Sequence
  Description of Artificial Sequence: Synthetic oligonucleotide
  Antisense strand to SEQ ID NO: 579701
uacuuggagauaauagaca

SEQ ID NO: 579703 - RNA, 19 nt, Artificial Sequence
  Description of Artificial Sequence: Synthetic oligonucleotide
  Sense strand starting at position 478 of SEQ ID NO: 318662
gucuauuaucuccaaguac

SEQ ID NO: 579704 - RNA, 19 nt, Artificial Sequence
  Description of Artificial Sequence: Synthetic oligonucleotide
  Antisense strand to SEQ ID NO: 579703
guacuuggagauaauagac

SEQ ID NO: 579705 - RNA, 19 nt, Artificial Sequence
  Description of Artificial Sequence: Synthetic oligonucleotide
  Sense strand starting at position 518 of SEQ ID NO: 318662
guaccugucccagggaauu

SEQ ID NO: 579706 - RNA, 19 nt, Artificial Sequence
  Description of Artificial Sequence: Synthetic oligonucleotide
  Antisense strand to SEQ ID NO: 579705
aauucccugggacagguac

SEQ ID NO: 579707 - RNA, 19 nt, Artificial Sequence
  Description of Artificial Sequence: Synthetic oligonucleotide
  Sense strand starting at position 637 of SEQ ID NO: 318662
uccagugaccgucauauua

SEQ ID NO: 579708 - RNA, 19 nt, Artificial Sequence
  Description of Artificial Sequence: Synthetic oligonucleotide
  Antisense strand to SEQ ID NO: 579707
uaauaugacggucacugga

SEQ ID NO: 579709 - RNA, 19 nt, Artificial Sequence
  Description of Artificial Sequence: Synthetic oligonucleotide
  Sense strand starting at position 744 of SEQ ID NO: 318662
ccgugucucccucaucaaa

SEQ ID NO: 579710 - RNA, 19 nt, Artificial Sequence
  Description of Artificial Sequence: Synthetic oligonucleotide
  Antisense strand to SEQ ID NO: 579709
uuugaugagggagacacgg

SEQ ID NO: 579711 - RNA, 19 nt, Artificial Sequence
  Description of Artificial Sequence: Synthetic oligonucleotide
  Sense strand starting at position 746 of SEQ ID NO: 318662
gugucucccucaucaaaua

SEQ ID NO: 579712 - RNA, 19 nt, Artificial Sequence
  Description of Artificial Sequence: Synthetic oligonucleotide
  Antisense strand to SEQ ID NO: 579711
uauuugaugagggagacac

SEQ ID NO: 579713 - RNA, 19 nt, Artificial Sequence
  Description of Artificial Sequence: Synthetic oligonucleotide
  Sense strand starting at position 1014 of SEQ ID NO: 318662
agcacaugcccugaucauu

SEQ ID NO: 579714 - RNA, 19 nt, Artificial Sequence
  Description of Artificial Sequence: Synthetic oligonucleotide
  Antisense strand to SEQ ID NO: 579713
aaugaucagggcaugugcu

SEQ ID NO: 579715 - RNA, 19 nt, Artificial Sequence
  Description of Artificial Sequence: Synthetic oligonucleotide
  Sense strand starting at position 1059 of SEQ ID NO: 318662
ggcacaucuggcgaauuau

SEQ ID NO: 579716 - RNA, 19 nt, Artificial Sequence
  Description of Artificial Sequence: Synthetic oligonucleotide
  Antisense strand to SEQ ID NO: 579715
auaauucgccagaugugcc

SEQ ID NO: 579717 - RNA, 19 nt, Artificial Sequence
  Description of Artificial Sequence: Synthetic oligonucleotide
  Sense strand starting at position 1067 of SEQ ID NO: 318662
uggcgaauuaucuggacca

SEQ ID NO: 579718 - RNA, 19 nt, Artificial Sequence
  Description of Artificial Sequence: Synthetic oligonucleotide
  Antisense strand to SEQ ID NO: 579717
ugguccagauaauucgcca

SEQ ID NO: 579719 - RNA, 19 nt, Artificial Sequence
  Description of Artificial Sequence: Synthetic oligonucleotide
  Sense strand starting at position 1069 of SEQ ID NO: 318662
gcgaauuaucuggaccaug

SEQ ID NO: 579720 - RNA, 19 nt, Artificial Sequence
  Description of Artificial Sequence: Synthetic oligonucleotide
  Antisense strand to SEQ ID NO: 579719
caugguccagauaauucgc

SEQ ID NO: 579721 - RNA, 19 nt, Artificial Sequence
  Description of Artificial Sequence: Synthetic oligonucleotide
  Sense strand starting at position 1240 of SEQ ID NO: 318662
uucuucuucucgguagaca

SEQ ID NO: 579722 - RNA, 19 nt, Artificial Sequence
  Description of Artificial Sequence: Synthetic oligonucleotide
  Antisense strand to SEQ ID NO: 579721
ugucuaccgagaagaagaa

SEQ ID NO: 579723 - RNA, 19 nt, Artificial Sequence
  Description of Artificial Sequence: Synthetic oligonucleotide
  Sense strand starting at position 1241 of SEQ ID NO: 318662
ucuucuucucgguagacau

SEQ ID NO: 579724 - RNA, 19 nt, Artificial Sequence
  Description of Artificial Sequence: Synthetic oligonucleotide
  Antisense strand to SEQ ID NO: 579723
augucuaccgagaagaaga

SEQ ID NO: 579725 - RNA, 19 nt, Artificial Sequence
  Description of Artificial Sequence: Synthetic oligonucleotide
  Sense strand starting at position 1278 of SEQ ID NO: 318662
ucaagccuccuagguaaua

SEQ ID NO: 579726 - RNA, 19 nt, Artificial Sequence
  Description of Artificial Sequence: Synthetic oligonucleotide
  Antisense strand to SEQ ID NO: 579725
uauuaccuaggaggcuuga

SEQ ID NO: 579727 - RNA, 19 nt, Artificial Sequence
  Description of Artificial Sequence: Synthetic oligonucleotide
  Sense strand starting at position 1290 of SEQ ID NO: 318662
gguaauaguccugaucuuc

SEQ ID NO: 579728 - RNA, 19 nt, Artificial Sequence
  Description of Artificial Sequence: Synthetic oligonucleotide
  Antisense strand to SEQ ID NO: 579727
gaagaucaggacuauuacc

SEQ ID NO: 579729 - RNA, 19 nt, Artificial Sequence
  Description of Artificial Sequence: Synthetic oligonucleotide
  Sense strand starting at position 1347 of SEQ ID NO: 318662
cguugucccaauuaguuau

SEQ ID NO: 579730 - RNA, 19 nt, Artificial Sequence
  Description of Artificial Sequence: Synthetic oligonucleotide
  Antisense strand to SEQ ID NO: 579729
auaacuaauugggacaacg

SEQ ID NO: 579731 - RNA, 19 nt, Artificial Sequence
  Description of Artificial Sequence: Synthetic oligonucleotide
  Sense strand starting at position 1395 of SEQ ID NO: 318662
caucuuggucuuggaacaa

SEQ ID NO: 579732 - RNA, 19 nt, Artificial Sequence
  Description of Artificial Sequence: Synthetic oligonucleotide
  Antisense strand to SEQ ID NO: 579731
uuguuccaagaccaagaug

SEQ ID NO: 579733 - RNA, 19 nt, Artificial Sequence
  Description of Artificial Sequence: Synthetic oligonucleotide
  Sense strand starting at position 1410 of SEQ ID NO: 318662
acaacucuucgucagcauu

SEQ ID NO: 579734 - RNA, 19 nt, Artificial Sequence
  Description of Artificial Sequence: Synthetic oligonucleotide
  Antisense strand to SEQ ID NO: 579733
aaugcugacgaagaguugu

SEQ ID NO: 579735 - RNA, 19 nt, Artificial Sequence
  Description of Artificial Sequence: Synthetic oligonucleotide
  Sense strand starting at position 1607 of SEQ ID NO: 318662
ggguccuugaaguaaucca

SEQ ID NO: 579736 - RNA, 19 nt, Artificial Sequence
  Description of Artificial Sequence: Synthetic oligonucleotide
  Antisense strand to SEQ ID NO: 579735
uggauuacuucaaggaccc

SEQ ID NO: 579737 - RNA, 19 nt, Artificial Sequence
  Description of Artificial Sequence: Synthetic oligonucleotide
  Sense strand starting at position 1673 of SEQ ID NO: 318662
ggaguaguggcauaaccag

SEQ ID NO: 579738 - RNA, 19 nt, Artificial Sequence
  Description of Artificial Sequence: Synthetic oligonucleotide
  Antisense strand to SEQ ID NO: 579737
cugguuaugccacuacucc

SEQ ID NO: 579739 - RNA, 19 nt, Artificial Sequence
  Description of Artificial Sequence: Synthetic oligonucleotide
  Sense strand starting at position 1716 of SEQ ID NO: 318662
guagauacgucagcuugga

SEQ ID NO: 579740 - RNA, 19 nt, Artificial Sequence
  Description of Artificial Sequence: Synthetic oligonucleotide
  Antisense strand to SEQ ID NO: 579739
uccaagcugacguaucuac

SEQ ID NO: 579741 - RNA, 19 nt, Artificial Sequence
  Description of Artificial Sequence: Synthetic oligonucleotide
  Sense strand starting at position 2316 of SEQ ID NO: 318662
uggguuggcugguucuaga

SEQ ID NO: 579742 - RNA, 19 nt, Artificial Sequence
  Description of Artificial Sequence: Synthetic oligonucleotide
  Antisense strand to SEQ ID NO: 579741
ucuagaaccagccaaccca

SEQ ID NO: 579743 - RNA, 19 nt, Artificial Sequence
  Description of Artificial Sequence: Synthetic oligonucleotide
  Sense strand starting at position 2423 of SEQ ID NO: 318662
ggauaaaucucuccggaag

SEQ ID NO: 579744 - RNA, 19 nt, Artificial Sequence
  Description of Artificial Sequence: Synthetic oligonucleotide
  Antisense strand to SEQ ID NO: 579743
cuuccggagagauuuaucc

SEQ ID NO: 579745 - RNA, 19 nt, Artificial Sequence
  Description of Artificial Sequence: Synthetic oligonucleotide
  Sense strand starting at position 2424 of SEQ ID NO: 318662
gauaaaucucuccggaagc

SEQ ID NO: 579746 - RNA, 19 nt, Artificial Sequence
  Description of Artificial Sequence: Synthetic oligonucleotide
  Antisense strand to SEQ ID NO: 579745
gcuuccggagagauuuauc

SEQ ID NO: 579747 - RNA, 19 nt, Artificial Sequence
  Description of Artificial Sequence: Synthetic oligonucleotide
  Sense strand starting at position 2882 of SEQ ID NO: 318662
gugguuuagacuuaguuug

SEQ ID NO: 579748 - RNA, 19 nt, Artificial Sequence
  Description of Artificial Sequence: Synthetic oligonucleotide
  Antisense strand to SEQ ID NO: 579747
caaacuaagucuaaaccac

SEQ ID NO: 579749 - RNA, 19 nt, Artificial Sequence
  Description of Artificial Sequence: Synthetic oligonucleotide
  Sense strand starting at position 2884 of SEQ ID NO: 318662
gguuuagacuuaguuugag

SEQ ID NO: 579750 - RNA, 19 nt, Artificial Sequence
  Description of Artificial Sequence: Synthetic oligonucleotide
  Antisense strand to SEQ ID NO: 579749
cucaaacuaagucuaaacc

SEQ ID NO: 579751 - RNA, 19 nt, Artificial Sequence
  Description of Artificial Sequence: Synthetic oligonucleotide
  Sense strand starting at position 3486 of SEQ ID NO: 318662
uuuguagucccagagaaca

SEQ ID NO: 579752 - RNA, 19 nt, Artificial Sequence
  Description of Artificial Sequence: Synthetic oligonucleotide
  Antisense strand to SEQ ID NO: 579751
uguucucugggacuacaaa

SEQ ID NO: 579753 - RNA, 19 nt, Artificial Sequence
  Description of Artificial Sequence: Synthetic oligonucleotide
  Sense strand starting at position 3580 of SEQ ID NO: 318662
ccugguucuguguacagau

SEQ ID NO: 579754 - RNA, 19 nt, Artificial Sequence
  Description of Artificial Sequence: Synthetic oligonucleotide
  Antisense strand to SEQ ID NO: 579753
aucuguacacagaaccagg

SEQ ID NO: 579755 - RNA, 19 nt, Artificial Sequence
  Description of Artificial Sequence: Synthetic oligonucleotide
  Sense strand starting at position 3673 of SEQ ID NO: 318662
ggcagaacuccucaacauu

SEQ ID NO: 579756 - RNA, 19 nt, Artificial Sequence
  Description of Artificial Sequence: Synthetic oligonucleotide
  Antisense strand to SEQ ID NO: 579755
aauguugaggaguucugcc

SEQ ID NO: 579757 - RNA, 19 nt, Artificial Sequence
  Description of Artificial Sequence: Synthetic oligonucleotide
  Sense strand starting at position 3681 of SEQ ID NO: 318662
uccucaacauuggagauuu

SEQ ID NO: 579758 - RNA, 19 nt, Artificial Sequence
  Description of Artificial Sequence: Synthetic oligonucleotide
  Antisense strand to SEQ ID NO: 579757
aaaucuccaauguugagga

SEQ ID NO: 579759 - RNA, 19 nt, Artificial Sequence
  Description of Artificial Sequence: Synthetic oligonucleotide
  Sense strand starting at position 3915 of SEQ ID NO: 318662
ggcuauuuauagucacgau

SEQ ID NO: 579760 - RNA, 19 nt, Artificial Sequence
  Description of Artificial Sequence: Synthetic oligonucleotide
  Antisense strand to SEQ ID NO: 579759
aucgugacuauaaauagcc

SEQ ID NO: 579761 - RNA, 19 nt, Artificial Sequence
  Description of Artificial Sequence: Synthetic oligonucleotide
  Sense strand starting at position 3922 of SEQ ID NO: 318662
uauagucacgauuauugca

SEQ ID NO: 579762 - RNA, 19 nt, Artificial Sequence
  Description of Artificial Sequence: Synthetic oligonucleotide
  Antisense strand to SEQ ID NO: 579761
ugcaauaaucgugacuaua

SEQ ID NO: 579763 - RNA, 19 nt, Artificial Sequence
  Description of Artificial Sequence: Synthetic oligonucleotide
  Sense strand starting at position 72 of SEQ ID NO: 318663
aaagcucugguuuguacaa

SEQ ID NO: 579764 - RNA, 19 nt, Artificial Sequence
  Description of Artificial Sequence: Synthetic oligonucleotide
  Antisense strand to SEQ ID NO: 579763
uuguacaaaccagagcuuu

SEQ ID NO: 579765 - RNA, 19 nt, Artificial Sequence
  Description of Artificial Sequence: Synthetic oligonucleotide
  Sense strand starting at position 79 of SEQ ID NO: 318663
ugguuuguacaacaauuau

SEQ ID NO: 579766 - RNA, 19 nt, Artificial Sequence
  Description of Artificial Sequence: Synthetic oligonucleotide
  Antisense strand to SEQ ID NO: 579765
auaauuguuguacaaacca

SEQ ID NO: 579767 - RNA, 19 nt, Artificial Sequence
  Description of Artificial Sequence: Synthetic oligonucleotide
  Sense strand starting at position 201 of SEQ ID NO: 318663
uucucaggccucuguaaug

SEQ ID NO: 579768 - RNA, 19 nt, Artificial Sequence
  Description of Artificial Sequence: Synthetic oligonucleotide
  Antisense strand to SEQ ID NO: 579767
cauuacagaggccugagaa

SEQ ID NO: 579769 - RNA, 19 nt, Artificial Sequence
  Description of Artificial Sequence: Synthetic oligonucleotide
  Sense strand starting at position 949 of SEQ ID NO: 318663
gagacuucccgcgggcaga

SEQ ID NO: 579770 - RNA, 19 nt, Artificial Sequence
  Description of Artificial Sequence: Synthetic oligonucleotide
  Antisense strand to SEQ ID NO: 579769
ucugcccgcgggaagucuc

SEQ ID NO: 579771 - RNA, 19 nt, Artificial Sequence
  Description of Artificial Sequence: Synthetic oligonucleotide
  Sense strand starting at position 1154 of SEQ ID NO: 318663
ggcuuccuggaauggagaa

SEQ ID NO: 579772 - RNA, 19 nt, Artificial Sequence
  Description of Artificial Sequence: Synthetic oligonucleotide
  Antisense strand to SEQ ID NO: 579771
uucuccauuccaggaagcc

SEQ ID NO: 579773 - RNA, 19 nt, Artificial Sequence
  Description of Artificial Sequence: Synthetic oligonucleotide
  Sense strand starting at position 1155 of SEQ ID NO: 318663
gcuuccuggaauggagaaa

SEQ ID NO: 579774 - RNA, 19 nt, Artificial Sequence
  Description of Artificial Sequence: Synthetic oligonucleotide
  Antisense strand to SEQ ID NO: 579773
uuucuccauuccaggaagc

SEQ ID NO: 579775 - RNA, 19 nt, Artificial Sequence
  Description of Artificial Sequence: Synthetic oligonucleotide
  Sense strand starting at position 1709 of SEQ ID NO: 318663
gaaagagcucuaggcagau

SEQ ID NO: 579776 - RNA, 19 nt, Artificial Sequence
  Description of Artificial Sequence: Synthetic oligonucleotide
  Antisense strand to SEQ ID NO: 579775
aucugccuagagcucuuuc

SEQ ID NO: 579777 - RNA, 19 nt, Artificial Sequence
  Description of Artificial Sequence: Synthetic oligonucleotide
  Sense strand starting at position 2275 of SEQ ID NO: 318663
cggcccugugcugaguuaa

SEQ ID NO: 579778 - RNA, 19 nt, Artificial Sequence
  Description of Artificial Sequence: Synthetic oligonucleotide
  Antisense strand to SEQ ID NO: 579777
uuaacucagcacagggccg

SEQ ID NO: 579779 - RNA, 19 nt, Artificial Sequence
  Description of Artificial Sequence: Synthetic oligonucleotide
  Sense strand starting at position 2287 of SEQ ID NO: 318663
gaguuaaauuuagagacug

SEQ ID NO: 579780 - RNA, 19 nt, Artificial Sequence
  Description of Artificial Sequence: Synthetic oligonucleotide
  Antisense strand to SEQ ID NO: 579779
cagucucuaaauuuaacuc

SEQ ID NO: 579781 - RNA, 19 nt, Artificial Sequence
  Description of Artificial Sequence: Synthetic oligonucleotide
  Sense strand starting at position 2390 of SEQ ID NO: 318663
cucuuuacuuaguauuuga

SEQ ID NO: 579782 - RNA, 19 nt, Artificial Sequence
  Description of Artificial Sequence: Synthetic oligonucleotide
  Antisense strand to SEQ ID NO: 579781
ucaaauacuaaguaaagag

SEQ ID NO: 579783 - RNA, 19 nt, Artificial Sequence
  Description of Artificial Sequence: Synthetic oligonucleotide
  Sense strand starting at position 2551 of SEQ ID NO: 318663
cuguguuauccgcuuccac

SEQ ID NO: 579784 - RNA, 19 nt, Artificial Sequence
  Description of Artificial Sequence: Synthetic oligonucleotide
  Antisense strand to SEQ ID NO: 579783
guggaagcggauaacacag

SEQ ID NO: 579785 - RNA, 19 nt, Artificial Sequence
  Description of Artificial Sequence: Synthetic oligonucleotide
  Sense strand starting at position 2644 of SEQ ID NO: 318663
gccaaugucaccgggaacu

SEQ ID NO: 579786 - RNA, 19 nt, Artificial Sequence
  Description of Artificial Sequence: Synthetic oligonucleotide
  Antisense strand to SEQ ID NO: 579785
aguucccggugacauuggc

SEQ ID NO: 579787 - RNA, 19 nt, Artificial Sequence
  Description of Artificial Sequence: Synthetic oligonucleotide
  Sense strand starting at position 2924 of SEQ ID NO: 318663
cuguguaaagucgucucuu

SEQ ID NO: 579788 - RNA, 19 nt, Artificial Sequence
  Description of Artificial Sequence: Synthetic oligonucleotide
  Antisense strand to SEQ ID NO: 579787
aagagacgacuuuacacag

SEQ ID NO: 579789 - RNA, 19 nt, Artificial Sequence
  Description of Artificial Sequence: Synthetic oligonucleotide
  Sense strand starting at position 3022 of SEQ ID NO: 318663
agguuuguucacggcugaa

SEQ ID NO: 579790 - RNA, 19 nt, Artificial Sequence
  Description of Artificial Sequence: Synthetic oligonucleotide
  Antisense strand to SEQ ID NO: 579789
uucagccgugaacaaaccu

SEQ ID NO: 579791 - RNA, 19 nt, Artificial Sequence
  Description of Artificial Sequence: Synthetic oligonucleotide
  Sense strand starting at position 3062 of SEQ ID NO: 318663
uggcaagcucaguaagguu

SEQ ID NO: 579792 - RNA, 19 nt, Artificial Sequence
  Description of Artificial Sequence: Synthetic oligonucleotide
  Antisense strand to SEQ ID NO: 579791
aaccuuacugagcuugcca

SEQ ID NO: 579793 - RNA, 19 nt, Artificial Sequence
  Description of Artificial Sequence: Synthetic oligonucleotide
  Sense strand starting at position 3085 of SEQ ID NO: 318663
uggauuaaacuugguucga

SEQ ID NO: 579794 - RNA, 19 nt, Artificial Sequence
  Description of Artificial Sequence: Synthetic oligonucleotide
  Antisense strand to SEQ ID NO: 579793
ucgaaccaaguuuaaucca

SEQ ID NO: 579795 - RNA, 19 nt, Artificial Sequence
  Description of Artificial Sequence: Synthetic oligonucleotide
  Sense strand starting at position 3086 of SEQ ID NO: 318663
ggauuaaacuugguucgaa

SEQ ID NO: 579796 - RNA, 19 nt, Artificial Sequence
  Description of Artificial Sequence: Synthetic oligonucleotide
  Antisense strand to SEQ ID NO: 579795
uucgaaccaaguuuaaucc

SEQ ID NO: 579797 - RNA, 19 nt, Artificial Sequence
  Description of Artificial Sequence: Synthetic oligonucleotide
  Sense strand starting at position 3087 of SEQ ID NO: 318663
gauuaaacuugguucgaaa

SEQ ID NO: 579798 - RNA, 19 nt, Artificial Sequence
  Description of Artificial Sequence: Synthetic oligonucleotide
  Antisense strand to SEQ ID NO: 579797
uuucgaaccaaguuuaauc

SEQ ID NO: 579799 - RNA, 19 nt, Artificial Sequence
  Description of Artificial Sequence: Synthetic oligonucleotide
  Sense strand starting at position 3089 of SEQ ID NO: 318663
uuaaacuugguucgaaauu

SEQ ID NO: 579800 - RNA, 19 nt, Artificial Sequence
  Description of Artificial Sequence: Synthetic oligonucleotide
  Antisense strand to SEQ ID NO: 579799
aauuucgaaccaaguuuaa

SEQ ID NO: 579801 - RNA, 19 nt, Artificial Sequence
  Description of Artificial Sequence: Synthetic oligonucleotide
  Sense strand starting at position 3121 of SEQ ID NO: 318663
gcaguucacgguggaaagu

SEQ ID NO: 579802 - RNA, 19 nt, Artificial Sequence
  Description of Artificial Sequence: Synthetic oligonucleotide
  Antisense strand to SEQ ID NO: 579801
acuuuccaccgugaacugc

SEQ ID NO: 579803 - RNA, 19 nt, Artificial Sequence
  Description of Artificial Sequence: Synthetic oligonucleotide
  Sense strand starting at position 3149 of SEQ ID NO: 318663
gccugugucccaguccuuu

SEQ ID NO: 579804 - RNA, 19 nt, Artificial Sequence
  Description of Artificial Sequence: Synthetic oligonucleotide
  Antisense strand to SEQ ID NO: 579803
aaaggacugggacacaggc

SEQ ID NO: 579805 - RNA, 19 nt, Artificial Sequence
  Description of Artificial Sequence: Synthetic oligonucleotide
  Sense strand starting at position 3165 of SEQ ID NO: 318663
uuucuuccucccgagcaau

SEQ ID NO: 579806 - RNA, 19 nt, Artificial Sequence
  Description of Artificial Sequence: Synthetic oligonucleotide
  Antisense strand to SEQ ID NO: 579805
auugcucgggaggaagaaa

SEQ ID NO: 579807 - RNA, 19 nt, Artificial Sequence
  Description of Artificial Sequence: Synthetic oligonucleotide
  Sense strand starting at position 3168 of SEQ ID NO: 318663
cuuccucccgagcaaucaa

SEQ ID NO: 579808 - RNA, 19 nt, Artificial Sequence
  Description of Artificial Sequence: Synthetic oligonucleotide
  Antisense strand to SEQ ID NO: 579807
uugauugcucgggaggaag

SEQ ID NO: 579809 - RNA, 19 nt, Artificial Sequence
  Description of Artificial Sequence: Synthetic oligonucleotide
  Sense strand starting at position 3191 of SEQ ID NO: 318663
acaauucuggauuacguua

SEQ ID NO: 579810 - RNA, 19 nt, Artificial Sequence
  Description of Artificial Sequence: Synthetic oligonucleotide
  Antisense strand to SEQ ID NO: 579809
uaacguaauccagaauugu

SEQ ID NO: 579811 - RNA, 19 nt, Artificial Sequence
  Description of Artificial Sequence: Synthetic oligonucleotide
  Sense strand starting at position 3196 of SEQ ID NO: 318663
ucuggauuacguuaaucaa

SEQ ID NO: 579812 - RNA, 19 nt, Artificial Sequence
  Description of Artificial Sequence: Synthetic oligonucleotide
  Antisense strand to SEQ ID NO: 579811
uugauuaacguaauccaga

SEQ ID NO: 579813 - RNA, 19 nt, Artificial Sequence
  Description of Artificial Sequence: Synthetic oligonucleotide
  Sense strand starting at position 3199 of SEQ ID NO: 318663
ggauuacguuaaucaaaua

SEQ ID NO: 579814 - RNA, 19 nt, Artificial Sequence
  Description of Artificial Sequence: Synthetic oligonucleotide
  Antisense strand to SEQ ID NO: 579813
uauuugauuaacguaaucc

SEQ ID NO: 579815 - RNA, 19 nt, Artificial Sequence
  Description of Artificial Sequence: Synthetic oligonucleotide
  Sense strand starting at position 3261 of SEQ ID NO: 318663
cguagcauccugcacaauu

SEQ ID NO: 579816 - RNA, 19 nt, Artificial Sequence
  Description of Artificial Sequence: Synthetic oligonucleotide
  Antisense strand to SEQ ID NO: 579815
aauugugcaggaugcuacg

SEQ ID NO: 579817 - RNA, 19 nt, Artificial Sequence
  Description of Artificial Sequence: Synthetic oligonucleotide
  Sense strand starting at position 3315 of SEQ ID NO: 318663
uuggcaucgugccugauga

SEQ ID NO: 579818 - RNA, 19 nt, Artificial Sequence
  Description of Artificial Sequence: Synthetic oligonucleotide
  Antisense strand to SEQ ID NO: 579817
ucaucaggcacgaugccaa

SEQ ID NO: 579819 - RNA, 19 nt, Artificial Sequence
  Description of Artificial Sequence: Synthetic oligonucleotide
  Sense strand starting at position 3316 of SEQ ID NO: 318663
uggcaucgugccugaugau

SEQ ID NO: 579820 - RNA, 19 nt, Artificial Sequence
  Description of Artificial Sequence: Synthetic oligonucleotide
  Antisense strand to SEQ ID NO: 579819
aucaucaggcacgaugcca

SEQ ID NO: 579821 - RNA, 19 nt, Artificial Sequence
  Description of Artificial Sequence: Synthetic oligonucleotide
  Sense strand starting at position 3317 of SEQ ID NO: 318663
ggcaucgugccugaugauu

SEQ ID NO: 579822 - RNA, 19 nt, Artificial Sequence
  Description of Artificial Sequence: Synthetic oligonucleotide
  Antisense strand to SEQ ID NO: 579821
aaucaucaggcacgaugcc

SEQ ID NO: 579823 - RNA, 19 nt, Artificial Sequence
  Description of Artificial Sequence: Synthetic oligonucleotide
  Sense strand starting at position 3328 of SEQ ID NO: 318663
ugaugauugucucuccuuu

SEQ ID NO: 579824 - RNA, 19 nt, Artificial Sequence
  Description of Artificial Sequence: Synthetic oligonucleotide
  Antisense strand to SEQ ID NO: 579823
aaaggagagacaaucauca

SEQ ID NO: 579825 - RNA, 19 nt, Artificial Sequence
  Description of Artificial Sequence: Synthetic oligonucleotide
  Sense strand starting at position 3365 of SEQ ID NO: 318663
gugcuuagccgggccuaau

SEQ ID NO: 579826 - RNA, 19 nt, Artificial Sequence
  Description of Artificial Sequence: Synthetic oligonucleotide
  Antisense strand to SEQ ID NO: 579825
auuaggcccggcuaagcac

SEQ ID NO: 579827 - RNA, 19 nt, Artificial Sequence
  Description of Artificial Sequence: Synthetic oligonucleotide
  Sense strand starting at position 3391 of SEQ ID NO: 318663
cuuggaaucccuuggucaa

SEQ ID NO: 579828 - RNA, 19 nt, Artificial Sequence
  Description of Artificial Sequence: Synthetic oligonucleotide
  Antisense strand to SEQ ID NO: 579827
uugaccaagggauuccaag

SEQ ID NO: 579829 - RNA, 19 nt, Artificial Sequence
  Description of Artificial Sequence: Synthetic oligonucleotide
  Sense strand starting at position 3392 of SEQ ID NO: 318663
uuggaaucccuuggucaag

SEQ ID NO: 579830 - RNA, 19 nt, Artificial Sequence
  Description of Artificial Sequence: Synthetic oligonucleotide
  Antisense strand to SEQ ID NO: 579829
cuugaccaagggauuccaa

SEQ ID NO: 579831 - RNA, 19 nt, Artificial Sequence
  Description of Artificial Sequence: Synthetic oligonucleotide
  Sense strand starting at position 3393 of SEQ ID NO: 318663
uggaaucccuuggucaaga

SEQ ID NO: 579832 - RNA, 19 nt, Artificial Sequence
  Description of Artificial Sequence: Synthetic oligonucleotide
  Antisense strand to SEQ ID NO: 579831
ucuugaccaagggauucca

SEQ ID NO: 579833 - RNA, 19 nt, Artificial Sequence
  Description of Artificial Sequence: Synthetic oligonucleotide
  Sense strand starting at position 3522 of SEQ ID NO: 318663
uccugaguuaagcgaccaa

SEQ ID NO: 579834 - RNA, 19 nt, Artificial Sequence
  Description of Artificial Sequence: Synthetic oligonucleotide
  Antisense strand to SEQ ID NO: 579833
uuggucgcuuaacucagga

SEQ ID NO: 579835 - RNA, 19 nt, Artificial Sequence
  Description of Artificial Sequence: Synthetic oligonucleotide
  Sense strand starting at position 3553 of SEQ ID NO: 318663
gggagagcugcugagagua

SEQ ID NO: 579836 - RNA, 19 nt, Artificial Sequence
  Description of Artificial Sequence: Synthetic oligonucleotide
  Antisense strand to SEQ ID NO: 579835
uacucucagcagcucuccc

SEQ ID NO: 579837 - RNA, 19 nt, Artificial Sequence
  Description of Artificial Sequence: Synthetic oligonucleotide
  Sense strand starting at position 3635 of SEQ ID NO: 318663
ccggcaucuccaguguagu

SEQ ID NO: 579838 - RNA, 19 nt, Artificial Sequence
  Description of Artificial Sequence: Synthetic oligonucleotide
  Antisense strand to SEQ ID NO: 579837
acuacacuggagaugccgg

SEQ ID NO: 579839 - RNA, 19 nt, Artificial Sequence
  Description of Artificial Sequence: Synthetic oligonucleotide
  Sense strand starting at position 3699 of SEQ ID NO: 318663
aauccagcauguuugaaga

SEQ ID NO: 579840 - RNA, 19 nt, Artificial Sequence
  Description of Artificial Sequence: Synthetic oligonucleotide
  Antisense strand to SEQ ID NO: 579839
ucuucaaacaugcuggauu

SEQ ID NO: 579841 - RNA, 19 nt, Artificial Sequence
  Description of Artificial Sequence: Synthetic oligonucleotide
  Sense strand starting at position 3740 of SEQ ID NO: 318663
guggagucugcggaguaga

SEQ ID NO: 579842 - RNA, 19 nt, Artificial Sequence
  Description of Artificial Sequence: Synthetic oligonucleotide
  Antisense strand to SEQ ID NO: 579841
ucuacuccgcagacuccac

SEQ ID NO: 579843 - RNA, 19 nt, Artificial Sequence
  Description of Artificial Sequence: Synthetic oligonucleotide
  Sense strand starting at position 202 of SEQ ID NO: 318664
gaccgauggugauucaugu

SEQ ID NO: 579844 - RNA, 19 nt, Artificial Sequence
  Description of Artificial Sequence: Synthetic oligonucleotide
  Antisense strand to SEQ ID NO: 579843
acaugaaucaccaucgguc

SEQ ID NO: 579845 - RNA, 19 nt, Artificial Sequence
  Description of Artificial Sequence: Synthetic oligonucleotide
  Sense strand starting at position 521 of SEQ ID NO: 318664
gccucauguuugcuuaucu

SEQ ID NO: 579846 - RNA, 19 nt, Artificial Sequence
  Description of Artificial Sequence: Synthetic oligonucleotide
  Antisense strand to SEQ ID NO: 579845
agauaagcaaacaugaggc

SEQ ID NO: 579847 - RNA, 19 nt, Artificial Sequence
  Description of Artificial Sequence: Synthetic oligonucleotide
  Sense strand starting at position 522 of SEQ ID NO: 318664
ccucauguuugcuuaucuu

SEQ ID NO: 579848 - RNA, 19 nt, Artificial Sequence
  Description of Artificial Sequence: Synthetic oligonucleotide
  Antisense strand to SEQ ID NO: 579847
aagauaagcaaacaugagg

SEQ ID NO: 579849 - RNA, 19 nt, Artificial Sequence
  Description of Artificial Sequence: Synthetic oligonucleotide
  Sense strand starting at position 568 of SEQ ID NO: 318664
ccuguucuacccuaaggaa

SEQ ID NO: 579850 - RNA, 19 nt, Artificial Sequence
  Description of Artificial Sequence: Synthetic oligonucleotide
  Antisense strand to SEQ ID NO: 579849
uuccuuaggguagaacagg

SEQ ID NO: 579851 - RNA, 19 nt, Artificial Sequence
  Description of Artificial Sequence: Synthetic oligonucleotide
  Sense strand starting at position 571 of SEQ ID NO: 318664
guucuacccuaaggaagau

SEQ ID NO: 579852 - RNA, 19 nt, Artificial Sequence
  Description of Artificial Sequence: Synthetic oligonucleotide
  Antisense strand to SEQ ID NO: 579851
aucuuccuuaggguagaac

SEQ ID NO: 579853 - RNA, 19 nt, Artificial Sequence
  Description of Artificial Sequence: Synthetic oligonucleotide
  Sense strand starting at position 811 of SEQ ID NO: 318664
ccaugaggcucuuuauugu

SEQ ID NO: 579854 - RNA, 19 nt, Artificial Sequence
  Description of Artificial Sequence: Synthetic oligonucleotide
  Antisense strand to SEQ ID NO: 579853
acaauaaagagccucaugg

SEQ ID NO: 579855 - RNA, 19 nt, Artificial Sequence
  Description of Artificial Sequence: Synthetic oligonucleotide
  Sense strand starting at position 814 of SEQ ID NO: 318664
ugaggcucuuuauuguauu

SEQ ID NO: 579856 - RNA, 19 nt, Artificial Sequence
  Description of Artificial Sequence: Synthetic oligonucleotide
  Antisense strand to SEQ ID NO: 579855
aauacaauaaagagccuca

SEQ ID NO: 579857 - RNA, 19 nt, Artificial Sequence
  Description of Artificial Sequence: Synthetic oligonucleotide
  Sense strand starting at position 817 of SEQ ID NO: 318664
ggcucuuuauuguauuaau

SEQ ID NO: 579858 - RNA, 19 nt, Artificial Sequence
  Description of Artificial Sequence: Synthetic oligonucleotide
  Antisense strand to SEQ ID NO: 579857
auuaauacaauaaagagcc

SEQ ID NO: 579859 - RNA, 19 nt, Artificial Sequence
  Description of Artificial Sequence: Synthetic oligonucleotide
  Sense strand starting at position 853 of SEQ ID NO: 318664
auccauguuucucugcaga

SEQ ID NO: 579860 - RNA, 19 nt, Artificial Sequence
  Description of Artificial Sequence: Synthetic oligonucleotide
  Antisense strand to SEQ ID NO: 579859
ucugcagagaaacauggau

SEQ ID NO: 579861 - RNA, 19 nt, Artificial Sequence
  Description of Artificial Sequence: Synthetic oligonucleotide
  Sense strand starting at position 855 of SEQ ID NO: 318664
ccauguuucucugcagaaa

SEQ ID NO: 579862 - RNA, 19 nt, Artificial Sequence
  Description of Artificial Sequence: Synthetic oligonucleotide
  Antisense strand to SEQ ID NO: 579861
uuucugcagagaaacaugg

SEQ ID NO: 579863 - RNA, 19 nt, Artificial Sequence
  Description of Artificial Sequence: Synthetic oligonucleotide
  Sense strand starting at position 858 of SEQ ID NO: 318664
uguuucucugcagaaauag

SEQ ID NO: 579864 - RNA, 19 nt, Artificial Sequence
  Description of Artificial Sequence: Synthetic oligonucleotide
  Antisense strand to SEQ ID NO: 579863
cuauuucugcagagaaaca

SEQ ID NO: 579865 - RNA, 19 nt, Artificial Sequence
  Description of Artificial Sequence: Synthetic oligonucleotide
  Sense strand starting at position 868 of SEQ ID NO: 318664
cagaaauaguaauguguuc

SEQ ID NO: 579866 - RNA, 19 nt, Artificial Sequence
  Description of Artificial Sequence: Synthetic oligonucleotide
  Antisense strand to SEQ ID NO: 579865
gaacacauuacuauuucug

SEQ ID NO: 579867 - RNA, 19 nt, Artificial Sequence
  Description of Artificial Sequence: Synthetic oligonucleotide
  Sense strand starting at position 873 of SEQ ID NO: 318664
auaguaauguguuccauua

SEQ ID NO: 579868 - RNA, 19 nt, Artificial Sequence
  Description of Artificial Sequence: Synthetic oligonucleotide
  Antisense strand to SEQ ID NO: 579867
uaauggaacacauuacuau

SEQ ID NO: 579869 - RNA, 19 nt, Artificial Sequence
  Description of Artificial Sequence: Synthetic oligonucleotide
  Sense strand starting at position 875 of SEQ ID NO: 318664
aguaauguguuccauuaca

SEQ ID NO: 579870 - RNA, 19 nt, Artificial Sequence
  Description of Artificial Sequence: Synthetic oligonucleotide
  Antisense strand to SEQ ID NO: 579869
uguaauggaacacauuacu

SEQ ID NO: 579871 - RNA, 19 nt, Artificial Sequence
  Description of Artificial Sequence: Synthetic oligonucleotide
  Sense strand starting at position 883 of SEQ ID NO: 318664
guuccauuacaagaugcuu

SEQ ID NO: 579872 - RNA, 19 nt, Artificial Sequence
  Description of Artificial Sequence: Synthetic oligonucleotide
  Antisense strand to SEQ ID NO: 579871
aagcaucuuguaauggaac

SEQ ID NO: 579873 - RNA, 19 nt, Artificial Sequence
  Description of Artificial Sequence: Synthetic oligonucleotide
  Sense strand starting at position 907 of SEQ ID NO: 318664
ggcccuaacugguauguua

SEQ ID NO: 579874 - RNA, 19 nt, Artificial Sequence
  Description of Artificial Sequence: Synthetic oligonucleotide
  Antisense strand to SEQ ID NO: 579873
uaacauaccaguuagggcc

SEQ ID NO: 579875 - RNA, 19 nt, Artificial Sequence
  Description of Artificial Sequence: Synthetic oligonucleotide
  Sense strand starting at position 915 of SEQ ID NO: 318664
cugguauguuacguaauau

SEQ ID NO: 579876 - RNA, 19 nt, Artificial Sequence
  Description of Artificial Sequence: Synthetic oligonucleotide
  Antisense strand to SEQ ID NO: 579875
auauuacguaacauaccag

SEQ ID NO: 579877 - RNA, 19 nt, Artificial Sequence
  Description of Artificial Sequence: Synthetic oligonucleotide
  Sense strand starting at position 916 of SEQ ID NO: 318664
ugguauguuacguaauauc

SEQ ID NO: 579878 - RNA, 19 nt, Artificial Sequence
  Description of Artificial Sequence: Synthetic oligonucleotide
  Antisense strand to SEQ ID NO: 579877
gauauuacguaacauacca

SEQ ID NO: 579879 - RNA, 19 nt, Artificial Sequence
  Description of Artificial Sequence: Synthetic oligonucleotide
  Sense strand starting at position 919 of SEQ ID NO: 318664
uauguuacguaauaucaga

SEQ ID NO: 579880 - RNA, 19 nt, Artificial Sequence
  Description of Artificial Sequence: Synthetic oligonucleotide
  Antisense strand to SEQ ID NO: 579879
ucugauauuacguaacaua

SEQ ID NO: 579881 - RNA, 19 nt, Artificial Sequence
  Description of Artificial Sequence: Synthetic oligonucleotide
  Sense strand starting at position 924 of SEQ ID NO: 318664
uacguaauaucagagugac

SEQ ID NO: 579882 - RNA, 19 nt, Artificial Sequence
  Description of Artificial Sequence: Synthetic oligonucleotide
  Antisense strand to SEQ ID NO: 579881
gucacucugauauuacgua

SEQ ID NO: 579883 - RNA, 19 nt, Artificial Sequence
  Description of Artificial Sequence: Synthetic oligonucleotide
  Sense strand starting at position 927 of SEQ ID NO: 318664
guaauaucagagugacuga

SEQ ID NO: 579884 - RNA, 19 nt, Artificial Sequence
  Description of Artificial Sequence: Synthetic oligonucleotide
  Antisense strand to SEQ ID NO: 579883
ucagucacucugauauuac

SEQ ID NO: 579885 - RNA, 19 nt, Artificial Sequence
  Description of Artificial Sequence: Synthetic oligonucleotide
  Sense strand starting at position 1025 of SEQ ID NO: 318664
aaagcucugguuuguacaa

SEQ ID NO: 579886 - RNA, 19 nt, Artificial Sequence
  Description of Artificial Sequence: Synthetic oligonucleotide
  Antisense strand to SEQ ID NO: 579885
uuguacaaaccagagcuuu

SEQ ID NO: 579887 - RNA, 19 nt, Artificial Sequence
  Description of Artificial Sequence: Synthetic oligonucleotide
  Sense strand starting at position 1027 of SEQ ID NO: 318664
agcucugguuuguacaaca

SEQ ID NO: 579888 - RNA, 19 nt, Artificial Sequence
  Description of Artificial Sequence: Synthetic oligonucleotide
  Antisense strand to SEQ ID NO: 579887
uguuguacaaaccagagcu

SEQ ID NO: 579889 - RNA, 19 nt, Artificial Sequence
  Description of Artificial Sequence: Synthetic oligonucleotide
  Sense strand starting at position 1032 of SEQ ID NO: 318664
ugguuuguacaacaauuau

SEQ ID NO: 579890 - RNA, 19 nt, Artificial Sequence
  Description of Artificial Sequence: Synthetic oligonucleotide
  Antisense strand to SEQ ID NO: 579889
auaauuguuguacaaacca

SEQ ID NO: 579891 - RNA, 19 nt, Artificial Sequence
  Description of Artificial Sequence: Synthetic oligonucleotide
  Sense strand starting at position 1154 of SEQ ID NO: 318664
uucucaggccucuguaaug

SEQ ID NO: 579892 - RNA, 19 nt, Artificial Sequence
  Description of Artificial Sequence: Synthetic oligonucleotide
  Antisense strand to SEQ ID NO: 579891
cauuacagaggccugagaa

SEQ ID NO: 579893 - RNA, 19 nt, Artificial Sequence
  Description of Artificial Sequence: Synthetic oligonucleotide
  Sense strand starting at position 1902 of SEQ ID NO: 318664
gagacuucccgcgggcaga

SEQ ID NO: 579894 - RNA, 19 nt, Artificial Sequence
  Description of Artificial Sequence: Synthetic oligonucleotide
  Antisense strand to SEQ ID NO: 579893
ucugcccgcgggaagucuc

SEQ ID NO: 579895 - RNA, 19 nt, Artificial Sequence
  Description of Artificial Sequence: Synthetic oligonucleotide
  Sense strand starting at position 2107 of SEQ ID NO: 318664
ggcuuccuggaauggagaa

SEQ ID NO: 579896 - RNA, 19 nt, Artificial Sequence
  Description of Artificial Sequence: Synthetic oligonucleotide
  Antisense strand to SEQ ID NO: 579895
uucuccauuccaggaagcc

SEQ ID NO: 579897 - RNA, 19 nt, Artificial Sequence
  Description of Artificial Sequence: Synthetic oligonucleotide
  Sense strand starting at position 2108 of SEQ ID NO: 318664
gcuuccuggaauggagaaa

SEQ ID NO: 579898 - RNA, 19 nt, Artificial Sequence
  Description of Artificial Sequence: Synthetic oligonucleotide
  Antisense strand to SEQ ID NO: 579897
uuucuccauuccaggaagc

SEQ ID NO: 579899 - RNA, 19 nt, Artificial Sequence
  Description of Artificial Sequence: Synthetic oligonucleotide
  Sense strand starting at position 2662 of SEQ ID NO: 318664
gaaagagcucuaggcagau

SEQ ID NO: 579900 - RNA, 19 nt, Artificial Sequence
  Description of Artificial Sequence: Synthetic oligonucleotide
  Antisense strand to SEQ ID NO: 579899
aucugccuagagcucuuuc

SEQ ID NO: 579901 - RNA, 19 nt, Artificial Sequence
  Description of Artificial Sequence: Synthetic oligonucleotide
  Sense strand starting at position 3228 of SEQ ID NO: 318664
cggcccugugcugaguuaa

SEQ ID NO: 579902 - RNA, 19 nt, Artificial Sequence
  Description of Artificial Sequence: Synthetic oligonucleotide
  Antisense strand to SEQ ID NO: 579901
uuaacucagcacagggccg

SEQ ID NO: 579903 - RNA, 19 nt, Artificial Sequence
  Description of Artificial Sequence: Synthetic oligonucleotide
  Sense strand starting at position 3240 of SEQ ID NO: 318664
gaguuaaauuuagagacug

SEQ ID NO: 579904 - RNA, 19 nt, Artificial Sequence
  Description of Artificial Sequence: Synthetic oligonucleotide
  Antisense strand to SEQ ID NO: 579903
cagucucuaaauuuaacuc

SEQ ID NO: 579905 - RNA, 19 nt, Artificial Sequence
  Description of Artificial Sequence: Synthetic oligonucleotide
  Sense strand starting at position 3343 of SEQ ID NO: 318664
cucuuuacuuaguauuuga

SEQ ID NO: 579906 - RNA, 19 nt, Artificial Sequence
  Description of Artificial Sequence: Synthetic oligonucleotide
  Antisense strand to SEQ ID NO: 579905
ucaaauacuaaguaaagag

SEQ ID NO: 579907 - RNA, 19 nt, Artificial Sequence
  Description of Artificial Sequence: Synthetic oligonucleotide
  Sense strand starting at position 3493 of SEQ ID NO: 318664
agcagagcugccuguguua

SEQ ID NO: 579908 - RNA, 19 nt, Artificial Sequence
  Description of Artificial Sequence: Synthetic oligonucleotide
  Antisense strand to SEQ ID NO: 579907
uaacacaggcagcucugcu

SEQ ID NO: 579909 - RNA, 19 nt, Artificial Sequence
  Description of Artificial Sequence: Synthetic oligonucleotide
  Sense strand starting at position 3504 of SEQ ID NO: 318664
cuguguuauccgcuuccac

SEQ ID NO: 579910 - RNA, 19 nt, Artificial Sequence
  Description of Artificial Sequence: Synthetic oligonucleotide
  Antisense strand to SEQ ID NO: 579909
guggaagcggauaacacag

SEQ ID NO: 579911 - RNA, 19 nt, Artificial Sequence
  Description of Artificial Sequence: Synthetic oligonucleotide
  Sense strand starting at position 3597 of SEQ ID NO: 318664
gccaaugucaccgggaacu

SEQ ID NO: 579912 - RNA, 19 nt, Artificial Sequence
  Description of Artificial Sequence: Synthetic oligonucleotide
  Antisense strand to SEQ ID NO: 579911
aguucccggugacauuggc

SEQ ID NO: 579913 - RNA, 19 nt, Artificial Sequence
  Description of Artificial Sequence: Synthetic oligonucleotide
  Sense strand starting at position 3877 of SEQ ID NO: 318664
cuguguaaagucgucucuu

SEQ ID NO: 579914 - RNA, 19 nt, Artificial Sequence
  Description of Artificial Sequence: Synthetic oligonucleotide
  Antisense strand to SEQ ID NO: 579913
aagagacgacuuuacacag

SEQ ID NO: 579915 - RNA, 19 nt, Artificial Sequence
  Description of Artificial Sequence: Synthetic oligonucleotide
  Sense strand starting at position 3878 of SEQ ID NO: 318664
uguguaaagucgucucuua

SEQ ID NO: 579916 - RNA, 19 nt, Artificial Sequence
  Description of Artificial Sequence: Synthetic oligonucleotide
  Antisense strand to SEQ ID NO: 579915
uaagagacgacuuuacaca

SEQ ID NO: 579917 - RNA, 19 nt, Artificial Sequence
  Description of Artificial Sequence: Synthetic oligonucleotide
  Sense strand starting at position 3934 of SEQ ID NO: 318664
ucuaucuccucuggaaugu

SEQ ID NO: 579918 - RNA, 19 nt, Artificial Sequence
  Description of Artificial Sequence: Synthetic oligonucleotide
  Antisense strand to SEQ ID NO: 579917
acauuccagaggagauaga

SEQ ID NO: 579919 - RNA, 19 nt, Artificial Sequence
  Description of Artificial Sequence: Synthetic oligonucleotide
  Sense strand starting at position 3962 of SEQ ID NO: 318664
gauggacuguacuagguuu

SEQ ID NO: 579920 - RNA, 19 nt, Artificial Sequence
  Description of Artificial Sequence: Synthetic oligonucleotide
  Antisense strand to SEQ ID NO: 579919
aaaccuaguacaguccauc

SEQ ID NO: 579921 - RNA, 19 nt, Artificial Sequence
  Description of Artificial Sequence: Synthetic oligonucleotide
  Sense strand starting at position 3975 of SEQ ID NO: 318664
agguuuguucacggcugaa

SEQ ID NO: 579922 - RNA, 19 nt, Artificial Sequence
  Description of Artificial Sequence: Synthetic oligonucleotide
  Antisense strand to SEQ ID NO: 579921
uucagccgugaacaaaccu

SEQ ID NO: 579923 - RNA, 19 nt, Artificial Sequence
  Description of Artificial Sequence: Synthetic oligonucleotide
  Sense strand starting at position 266 of SEQ ID NO: 318665
cugugccucccagauguaa

SEQ ID NO: 579924 - RNA, 19 nt, Artificial Sequence
  Description of Artificial Sequence: Synthetic oligonucleotide
  Antisense strand to SEQ ID NO: 579923
uuacaucugggaggcacag

SEQ ID NO: 579925 - RNA, 19 nt, Artificial Sequence
  Description of Artificial Sequence: Synthetic oligonucleotide
  Sense strand starting at position 569 of SEQ ID NO: 318665
ccaucuauggauugugaag

SEQ ID NO: 579926 - RNA, 19 nt, Artificial Sequence
  Description of Artificial Sequence: Synthetic oligonucleotide
  Antisense strand to SEQ ID NO: 579925
cuucacaauccauagaugg

SEQ ID NO: 579927 - RNA, 19 nt, Artificial Sequence
  Description of Artificial Sequence: Synthetic oligonucleotide
  Sense strand starting at position 578 of SEQ ID NO: 318665
gauugugaaguuuaucuag

SEQ ID NO: 579928 - RNA, 19 nt, Artificial Sequence
  Description of Artificial Sequence: Synthetic oligonucleotide
  Antisense strand to SEQ ID NO: 579927
cuagauaaacuucacaauc

SEQ ID NO: 579929 - RNA, 19 nt, Artificial Sequence
  Description of Artificial Sequence: Synthetic oligonucleotide
  Sense strand starting at position 580 of SEQ ID NO: 318665
uugugaaguuuaucuaguu

SEQ ID NO: 579930 - RNA, 19 nt, Artificial Sequence
  Description of Artificial Sequence: Synthetic oligonucleotide
  Antisense strand to SEQ ID NO: 579929
aacuagauaaacuucacaa

SEQ ID NO: 579931 - RNA, 19 nt, Artificial Sequence
  Description of Artificial Sequence: Synthetic oligonucleotide
  Sense strand starting at position 581 of SEQ ID NO: 318665
ugugaaguuuaucuaguug

SEQ ID NO: 579932 - RNA, 19 nt, Artificial Sequence
  Description of Artificial Sequence: Synthetic oligonucleotide
  Antisense strand to SEQ ID NO: 579931
caacuagauaaacuucaca

SEQ ID NO: 579933 - RNA, 19 nt, Artificial Sequence
  Description of Artificial Sequence: Synthetic oligonucleotide
  Sense strand starting at position 654 of SEQ ID NO: 318665
uagcaaaggugaguauuau

SEQ ID NO: 579934 - RNA, 19 nt, Artificial Sequence
  Description of Artificial Sequence: Synthetic oligonucleotide
  Antisense strand to SEQ ID NO: 579933
auaauacucaccuuugcua

SEQ ID NO: 579935 - RNA, 19 nt, Artificial Sequence
  Description of Artificial Sequence: Synthetic oligonucleotide
  Sense strand starting at position 655 of SEQ ID NO: 318665
agcaaaggugaguauuauu

SEQ ID NO: 579936 - RNA, 19 nt, Artificial Sequence
  Description of Artificial Sequence: Synthetic oligonucleotide
  Antisense strand to SEQ ID NO: 579935
aauaauacucaccuuugcu

SEQ ID NO: 579937 - RNA, 19 nt, Artificial Sequence
  Description of Artificial Sequence: Synthetic oligonucleotide
  Sense strand starting at position 690 of SEQ ID NO: 318665
ucaagcuugugauucugaa

SEQ ID NO: 579938 - RNA, 19 nt, Artificial Sequence
  Description of Artificial Sequence: Synthetic oligonucleotide
  Antisense strand to SEQ ID NO: 579937
uucagaaucacaagcuuga

SEQ ID NO: 579939 - RNA, 19 nt, Artificial Sequence
  Description of Artificial Sequence: Synthetic oligonucleotide
  Sense strand starting at position 718 of SEQ ID NO: 318665
auauuauuguggcucauag

SEQ ID NO: 579940 - RNA, 19 nt, Artificial Sequence
  Description of Artificial Sequence: Synthetic oligonucleotide
  Antisense strand to SEQ ID NO: 579939
cuaugagccacaauaauau

SEQ ID NO: 579941 - RNA, 19 nt, Artificial Sequence
  Description of Artificial Sequence: Synthetic oligonucleotide
  Sense strand starting at position 725 of SEQ ID NO: 318665
uguggcucauagucaagaa

SEQ ID NO: 579942 - RNA, 19 nt, Artificial Sequence
  Description of Artificial Sequence: Synthetic oligonucleotide
  Antisense strand to SEQ ID NO: 579941
uucuugacuaugagccaca

SEQ ID NO: 579943 - RNA, 19 nt, Artificial Sequence
  Description of Artificial Sequence: Synthetic oligonucleotide
  Sense strand starting at position 726 of SEQ ID NO: 318665
guggcucauagucaagaaa

SEQ ID NO: 579944 - RNA, 19 nt, Artificial Sequence
  Description of Artificial Sequence: Synthetic oligonucleotide
  Antisense strand to SEQ ID NO: 579943
uuucuugacuaugagccac

SEQ ID NO: 579945 - RNA, 19 nt, Artificial Sequence
  Description of Artificial Sequence: Synthetic oligonucleotide
  Sense strand starting at position 729 of SEQ ID NO: 318665
gcucauagucaagaaaguu

SEQ ID NO: 579946 - RNA, 19 nt, Artificial Sequence
  Description of Artificial Sequence: Synthetic oligonucleotide
  Antisense strand to SEQ ID NO: 579945
aacuuucuugacuaugagc

SEQ ID NO: 579947 - RNA, 19 nt, Artificial Sequence
  Description of Artificial Sequence: Synthetic oligonucleotide
  Sense strand starting at position 818 of SEQ ID NO: 318665
ucaugugauucuccuagac

SEQ ID NO: 579948 - RNA, 19 nt, Artificial Sequence
  Description of Artificial Sequence: Synthetic oligonucleotide
  Antisense strand to SEQ ID NO: 579947
gucuaggagaaucacauga

SEQ ID NO: 579949 - RNA, 19 nt, Artificial Sequence
  Description of Artificial Sequence: Synthetic oligonucleotide
  Sense strand starting at position 844 of SEQ ID NO: 318665
gacugacacuguucucuag

SEQ ID NO: 579950 - RNA, 19 nt, Artificial Sequence
  Description of Artificial Sequence: Synthetic oligonucleotide
  Antisense strand to SEQ ID NO: 579949
cuagagaacagugucaguc

SEQ ID NO: 579951 - RNA, 19 nt, Artificial Sequence
  Description of Artificial Sequence: Synthetic oligonucleotide
  Sense strand starting at position 910 of SEQ ID NO: 318665
gccagacuuaccuggagaa

SEQ ID NO: 579952 - RNA, 19 nt, Artificial Sequence
  Description of Artificial Sequence: Synthetic oligonucleotide
  Antisense strand to SEQ ID NO: 579951
uucuccagguaagucuggc

SEQ ID NO: 579953 - RNA, 19 nt, Artificial Sequence
  Description of Artificial Sequence: Synthetic oligonucleotide
  Sense strand starting at position 1144 of SEQ ID NO: 318665
aucuguuucugucccagga

SEQ ID NO: 579954 - RNA, 19 nt, Artificial Sequence
  Description of Artificial Sequence: Synthetic oligonucleotide
  Antisense strand to SEQ ID NO: 579953
uccugggacagaaacagau

SEQ ID NO: 579955 - RNA, 19 nt, Artificial Sequence
  Description of Artificial Sequence: Synthetic oligonucleotide
  Sense strand starting at position 1211 of SEQ ID NO: 318665
uggccugagucaucccaca

SEQ ID NO: 579956 - RNA, 19 nt, Artificial Sequence
  Description of Artificial Sequence: Synthetic oligonucleotide
  Antisense strand to SEQ ID NO: 579955
ugugggaugacucaggcca

SEQ ID NO: 579957 - RNA, 19 nt, Artificial Sequence
  Description of Artificial Sequence: Synthetic oligonucleotide
  Sense strand starting at position 1326 of SEQ ID NO: 318665
agcuguagucuggacacau

SEQ ID NO: 579958 - RNA, 19 nt, Artificial Sequence
  Description of Artificial Sequence: Synthetic oligonucleotide
  Antisense strand to SEQ ID NO: 579957
auguguccagacuacagcu

SEQ ID NO: 579959 - RNA, 19 nt, Artificial Sequence
  Description of Artificial Sequence: Synthetic oligonucleotide
  Sense strand starting at position 1450 of SEQ ID NO: 318665
gcagcuuccucacuugaaa

SEQ ID NO: 579960 - RNA, 19 nt, Artificial Sequence
  Description of Artificial Sequence: Synthetic oligonucleotide
  Antisense strand to SEQ ID NO: 579959
uuucaagugaggaagcugc

SEQ ID NO: 579961 - RNA, 19 nt, Artificial Sequence
  Description of Artificial Sequence: Synthetic oligonucleotide
  Sense strand starting at position 1590 of SEQ ID NO: 318665
aggccaucuuuccuguuua

SEQ ID NO: 579962 - RNA, 19 nt, Artificial Sequence
  Description of Artificial Sequence: Synthetic oligonucleotide
  Antisense strand to SEQ ID NO: 579961
uaaacaggaaagauggccu

SEQ ID NO: 579963 - RNA, 19 nt, Artificial Sequence
  Description of Artificial Sequence: Synthetic oligonucleotide
  Sense strand starting at position 1731 of SEQ ID NO: 318665
gagaauaugcggcaugcaa

SEQ ID NO: 579964 - RNA, 19 nt, Artificial Sequence
  Description of Artificial Sequence: Synthetic oligonucleotide
  Antisense strand to SEQ ID NO: 579963
uugcaugccgcauauucuc

SEQ ID NO: 579965 - RNA, 19 nt, Artificial Sequence
  Description of Artificial Sequence: Synthetic oligonucleotide
  Sense strand starting at position 1820 of SEQ ID NO: 318665
augcccugaucucuugauu

SEQ ID NO: 579966 - RNA, 19 nt, Artificial Sequence
  Description of Artificial Sequence: Synthetic oligonucleotide
  Antisense strand to SEQ ID NO: 579965
aaucaagagaucagggcau

SEQ ID NO: 579967 - RNA, 19 nt, Artificial Sequence
  Description of Artificial Sequence: Synthetic oligonucleotide
  Sense strand starting at position 1853 of SEQ ID NO: 318665
acguuuggcacucaauaug

SEQ ID NO: 579968 - RNA, 19 nt, Artificial Sequence
  Description of Artificial Sequence: Synthetic oligonucleotide
  Antisense strand to SEQ ID NO: 579967
cauauugagugccaaacgu

SEQ ID NO: 579969 - RNA, 19 nt, Artificial Sequence
  Description of Artificial Sequence: Synthetic oligonucleotide
  Sense strand starting at position 1880 of SEQ ID NO: 318665
ggaaguuccucuuccuuaa

SEQ ID NO: 579970 - RNA, 19 nt, Artificial Sequence
  Description of Artificial Sequence: Synthetic oligonucleotide
  Antisense strand to SEQ ID NO: 579969
uuaaggaagaggaacuucc

SEQ ID NO: 579971 - RNA, 19 nt, Artificial Sequence
  Description of Artificial Sequence: Synthetic oligonucleotide
  Sense strand starting at position 1915 of SEQ ID NO: 318665
aagggaguccugugaaguu

SEQ ID NO: 579972 - RNA, 19 nt, Artificial Sequence
  Description of Artificial Sequence: Synthetic oligonucleotide
  Antisense strand to SEQ ID NO: 579971
aacuucacaggacucccuu

SEQ ID NO: 579973 - RNA, 19 nt, Artificial Sequence
  Description of Artificial Sequence: Synthetic oligonucleotide
  Sense strand starting at position 2004 of SEQ ID NO: 318665
ccuggagcgccuuauggau

SEQ ID NO: 579974 - RNA, 19 nt, Artificial Sequence
  Description of Artificial Sequence: Synthetic oligonucleotide
  Antisense strand to SEQ ID NO: 579973
auccauaaggcgcuccagg

SEQ ID NO: 579975 - RNA, 19 nt, Artificial Sequence
  Description of Artificial Sequence: Synthetic oligonucleotide
  Sense strand starting at position 2010 of SEQ ID NO: 318665
gcgccuuauggauauuaac

SEQ ID NO: 579976 - RNA, 19 nt, Artificial Sequence
  Description of Artificial Sequence: Synthetic oligonucleotide
  Antisense strand to SEQ ID NO: 579975
guuaauauccauaaggcgc

SEQ ID NO: 579977 - RNA, 19 nt, Artificial Sequence
  Description of Artificial Sequence: Synthetic oligonucleotide
  Sense strand starting at position 2237 of SEQ ID NO: 318665
gccagauacuucuugguug

SEQ ID NO: 579978 - RNA, 19 nt, Artificial Sequence
  Description of Artificial Sequence: Synthetic oligonucleotide
  Antisense strand to SEQ ID NO: 579977
caaccaagaaguaucuggc

SEQ ID NO: 579979 - RNA, 19 nt, Artificial Sequence
  Description of Artificial Sequence: Synthetic oligonucleotide
  Sense strand starting at position 2356 of SEQ ID NO: 318665
auaguaucuccagacuuug

SEQ ID NO: 579980 - RNA, 19 nt, Artificial Sequence
  Description of Artificial Sequence: Synthetic oligonucleotide
  Antisense strand to SEQ ID NO: 579979
caaagucuggagauacuau

SEQ ID NO: 579981 - RNA, 19 nt, Artificial Sequence
  Description of Artificial Sequence: Synthetic oligonucleotide
  Sense strand starting at position 2448 of SEQ ID NO: 318665
gggcucuaccucugauguu

SEQ ID NO: 579982 - RNA, 19 nt, Artificial Sequence
  Description of Artificial Sequence: Synthetic oligonucleotide
  Antisense strand to SEQ ID NO: 579981
aacaucagagguagagccc

SEQ ID NO: 579983 - RNA, 19 nt, Artificial Sequence
  Description of Artificial Sequence: Synthetic oligonucleotide
  Sense strand starting at position 2477 of SEQ ID NO: 318665
ggguauuguaaaugagaca

SEQ ID NO: 579984 - RNA, 19 nt, Artificial Sequence
  Description of Artificial Sequence: Synthetic oligonucleotide
  Antisense strand to SEQ ID NO: 579983
ugucucauuuacaauaccc

SEQ ID NO: 579985 - RNA, 19 nt, Artificial Sequence
  Description of Artificial Sequence: Synthetic oligonucleotide
  Sense strand starting at position 2482 of SEQ ID NO: 318665
uuguaaaugagacaagugu

SEQ ID NO: 579986 - RNA, 19 nt, Artificial Sequence
  Description of Artificial Sequence: Synthetic oligonucleotide
  Antisense strand to SEQ ID NO: 579985
acacuugucucauuuacaa

SEQ ID NO: 579987 - RNA, 19 nt, Artificial Sequence
  Description of Artificial Sequence: Synthetic oligonucleotide
  Sense strand starting at position 2760 of SEQ ID NO: 318665
gacuccagccuuugugaca

SEQ ID NO: 579988 - RNA, 19 nt, Artificial Sequence
  Description of Artificial Sequence: Synthetic oligonucleotide
  Antisense strand to SEQ ID NO: 579987
ugucacaaaggcuggaguc

SEQ ID NO: 579989 - RNA, 19 nt, Artificial Sequence
  Description of Artificial Sequence: Synthetic oligonucleotide
  Sense strand starting at position 2845 of SEQ ID NO: 318665
gauggauguugggagagga

SEQ ID NO: 579990 - RNA, 19 nt, Artificial Sequence
  Description of Artificial Sequence: Synthetic oligonucleotide
  Antisense strand to SEQ ID NO: 579989
uccucucccaacauccauc

SEQ ID NO: 579991 - RNA, 19 nt, Artificial Sequence
  Description of Artificial Sequence: Synthetic oligonucleotide
  Sense strand starting at position 3009 of SEQ ID NO: 318665
ggaugaaggucuagagggu

SEQ ID NO: 579992 - RNA, 19 nt, Artificial Sequence
  Description of Artificial Sequence: Synthetic oligonucleotide
  Antisense strand to SEQ ID NO: 579991
acccucuagaccuucaucc

SEQ ID NO: 579993 - RNA, 19 nt, Artificial Sequence
  Description of Artificial Sequence: Synthetic oligonucleotide
  Sense strand starting at position 3026 of SEQ ID NO: 318665
gugagcucuuccucaugga

SEQ ID NO: 579994 - RNA, 19 nt, Artificial Sequence
  Description of Artificial Sequence: Synthetic oligonucleotide
  Antisense strand to SEQ ID NO: 579993
uccaugaggaagagcucac

SEQ ID NO: 579995 - RNA, 19 nt, Artificial Sequence
  Description of Artificial Sequence: Synthetic oligonucleotide
  Sense strand starting at position 3098 of SEQ ID NO: 318665
aacagauauaguugagggu

SEQ ID NO: 579996 - RNA, 19 nt, Artificial Sequence
  Description of Artificial Sequence: Synthetic oligonucleotide
  Antisense strand to SEQ ID NO: 579995
acccucaacuauaucuguu

SEQ ID NO: 579997 - RNA, 19 nt, Artificial Sequence
  Description of Artificial Sequence: Synthetic oligonucleotide
  Sense strand starting at position 3179 of SEQ ID NO: 318665
augggaggguccucuaguu

SEQ ID NO: 579998 - RNA, 19 nt, Artificial Sequence
  Description of Artificial Sequence: Synthetic oligonucleotide
  Antisense strand to SEQ ID NO: 579997
aacuagaggacccucccau

SEQ ID NO: 579999 - RNA, 19 nt, Artificial Sequence
  Description of Artificial Sequence: Synthetic oligonucleotide
  Sense strand starting at position 3612 of SEQ ID NO: 318665
gaccgauggugauucaugu

SEQ ID NO: 580000 - RNA, 19 nt, Artificial Sequence
  Description of Artificial Sequence: Synthetic oligonucleotide
  Antisense strand to SEQ ID NO: 579999
acaugaaucaccaucgguc

SEQ ID NO: 580001 - RNA, 19 nt, Artificial Sequence
  Description of Artificial Sequence: Synthetic oligonucleotide
  Sense strand starting at position 3978 of SEQ ID NO: 318665
ccuguucuacccuaaggaa

SEQ ID NO: 580002 - RNA, 19 nt, Artificial Sequence
  Description of Artificial Sequence: Synthetic oligonucleotide
  Antisense strand to SEQ ID NO: 580001
uuccuuaggguagaacagg

SEQ ID NO: 580003 - RNA, 19 nt, Artificial Sequence
  Description of Artificial Sequence: Synthetic oligonucleotide
  Sense strand starting at position 40 of SEQ ID NO: 318666
agaagagccuuucuaacag

SEQ ID NO: 580004 - RNA, 19 nt, Artificial Sequence
  Description of Artificial Sequence: Synthetic oligonucleotide
  Antisense strand to SEQ ID NO: 580003
cuguuagaaaggcucuucu

SEQ ID NO: 580005 - RNA, 19 nt, Artificial Sequence
  Description of Artificial Sequence: Synthetic oligonucleotide
  Sense strand starting at position 64 of SEQ ID NO: 318666
agcugaauucugcacagaa

SEQ ID NO: 580006 - RNA, 19 nt, Artificial Sequence
  Description of Artificial Sequence: Synthetic oligonucleotide
  Antisense strand to SEQ ID NO: 580005
uucugugcagaauucagcu

SEQ ID NO: 580007 - RNA, 19 nt, Artificial Sequence
  Description of Artificial Sequence: Synthetic oligonucleotide
  Sense strand starting at position 66 of SEQ ID NO: 318666
cugaauucugcacagaauc

SEQ ID NO: 580008 - RNA, 19 nt, Artificial Sequence
  Description of Artificial Sequence: Synthetic oligonucleotide
  Antisense strand to SEQ ID NO: 580007
gauucugugcagaauucag

SEQ ID NO: 580009 - RNA, 19 nt, Artificial Sequence
  Description of Artificial Sequence: Synthetic oligonucleotide
  Sense strand starting at position 79 of SEQ ID NO: 318666
agaaucuauuauucuguga

SEQ ID NO: 580010 - RNA, 19 nt, Artificial Sequence
  Description of Artificial Sequence: Synthetic oligonucleotide
  Antisense strand to SEQ ID NO: 580009
ucacagaauaauagauucu

SEQ ID NO: 580011 - RNA, 19 nt, Artificial Sequence
  Description of Artificial Sequence: Synthetic oligonucleotide
  Sense strand starting at position 82 of SEQ ID NO: 318666
aucuauuauucugugacag

SEQ ID NO: 580012 - RNA, 19 nt, Artificial Sequence
  Description of Artificial Sequence: Synthetic oligonucleotide
  Antisense strand to SEQ ID NO: 580011
cugucacagaauaauagau

SEQ ID NO: 580013 - RNA, 19 nt, Artificial Sequence
  Description of Artificial Sequence: Synthetic oligonucleotide
  Sense strand starting at position 83 of SEQ ID NO: 318666
ucuauuauucugugacagg

SEQ ID NO: 580014 - RNA, 19 nt, Artificial Sequence
  Description of Artificial Sequence: Synthetic oligonucleotide
  Antisense strand to SEQ ID NO: 580013
ccugucacagaauaauaga

SEQ ID NO: 580015 - RNA, 19 nt, Artificial Sequence
  Description of Artificial Sequence: Synthetic oligonucleotide
  Sense strand starting at position 158 of SEQ ID NO: 318666
cugcuauuaagagguaaga

SEQ ID NO: 580016 - RNA, 19 nt, Artificial Sequence
  Description of Artificial Sequence: Synthetic oligonucleotide
  Antisense strand to SEQ ID NO: 580015
ucuuaccucuuaauagcag

SEQ ID NO: 580017 - RNA, 19 nt, Artificial Sequence
  Description of Artificial Sequence: Synthetic oligonucleotide
  Sense strand starting at position 279 of SEQ ID NO: 318666
ggcacuucucaaggagagu

SEQ ID NO: 580018 - RNA, 19 nt, Artificial Sequence
  Description of Artificial Sequence: Synthetic oligonucleotide
  Antisense strand to SEQ ID NO: 580017
acucuccuugagaagugcc

SEQ ID NO: 580019 - RNA, 19 nt, Artificial Sequence
  Description of Artificial Sequence: Synthetic oligonucleotide
  Sense strand starting at position 280 of SEQ ID NO: 318666
gcacuucucaaggagagug

SEQ ID NO: 580020 - RNA, 19 nt, Artificial Sequence
  Description of Artificial Sequence: Synthetic oligonucleotide
  Antisense strand to SEQ ID NO: 580019
cacucuccuugagaagugc

SEQ ID NO: 580021 - RNA, 19 nt, Artificial Sequence
  Description of Artificial Sequence: Synthetic oligonucleotide
  Sense strand starting at position 430 of SEQ ID NO: 318666
aguacuaaaccagguaucu

SEQ ID NO: 580022 - RNA, 19 nt, Artificial Sequence
  Description of Artificial Sequence: Synthetic oligonucleotide
  Antisense strand to SEQ ID NO: 580021
agauaccugguuuaguacu

SEQ ID NO: 580023 - RNA, 19 nt, Artificial Sequence
  Description of Artificial Sequence: Synthetic oligonucleotide
  Sense strand starting at position 490 of SEQ ID NO: 318666
cugcaauugcuccucguga

SEQ ID NO: 580024 - RNA, 19 nt, Artificial Sequence
  Description of Artificial Sequence: Synthetic oligonucleotide
  Antisense strand to SEQ ID NO: 580023
ucacgaggagcaauugcag

SEQ ID NO: 580025 - RNA, 19 nt, Artificial Sequence
  Description of Artificial Sequence: Synthetic oligonucleotide
  Sense strand starting at position 2484 of SEQ ID NO: 318666
gguaauuuccggcgaacuu

SEQ ID NO: 580026 - RNA, 19 nt, Artificial Sequence
  Description of Artificial Sequence: Synthetic oligonucleotide
  Antisense strand to SEQ ID NO: 580025
aaguucgccggaaauuacc

SEQ ID NO: 580027 - RNA, 19 nt, Artificial Sequence
  Description of Artificial Sequence: Synthetic oligonucleotide
  Sense strand starting at position 2485 of SEQ ID NO: 318666
guaauuuccggcgaacuuc

SEQ ID NO: 580028 - RNA, 19 nt, Artificial Sequence
  Description of Artificial Sequence: Synthetic oligonucleotide
  Antisense strand to SEQ ID NO: 580027
gaaguucgccggaaauuac

SEQ ID NO: 580029 - RNA, 19 nt, Artificial Sequence
  Description of Artificial Sequence: Synthetic oligonucleotide
  Sense strand starting at position 2864 of SEQ ID NO: 318666
uuaauaguuguugagugaa

SEQ ID NO: 580030 - RNA, 19 nt, Artificial Sequence
  Description of Artificial Sequence: Synthetic oligonucleotide
  Antisense strand to SEQ ID NO: 580029
uucacucaacaacuauuaa

SEQ ID NO: 580031 - RNA, 19 nt, Artificial Sequence
  Description of Artificial Sequence: Synthetic oligonucleotide
  Sense strand starting at position 2867 of SEQ ID NO: 318666
auaguuguugagugaacau

SEQ ID NO: 580032 - RNA, 19 nt, Artificial Sequence
  Description of Artificial Sequence: Synthetic oligonucleotide
  Antisense strand to SEQ ID NO: 580031
auguucacucaacaacuau

SEQ ID NO: 580033 - RNA, 19 nt, Artificial Sequence
  Description of Artificial Sequence: Synthetic oligonucleotide
  Sense strand starting at position 2930 of SEQ ID NO: 318666
gguacuccuaaggguacaa

SEQ ID NO: 580034 - RNA, 19 nt, Artificial Sequence
  Description of Artificial Sequence: Synthetic oligonucleotide
  Antisense strand to SEQ ID NO: 580033
uuguacccuuaggaguacc

SEQ ID NO: 580035 - RNA, 19 nt, Artificial Sequence
  Description of Artificial Sequence: Synthetic oligonucleotide
  Sense strand starting at position 2943 of SEQ ID NO: 318666
guacaaagcucuccuguaa

SEQ ID NO: 580036 - RNA, 19 nt, Artificial Sequence
  Description of Artificial Sequence: Synthetic oligonucleotide
  Antisense strand to SEQ ID NO: 580035
uuacaggagagcuuuguac

SEQ ID NO: 580037 - RNA, 19 nt, Artificial Sequence
  Description of Artificial Sequence: Synthetic oligonucleotide
  Sense strand starting at position 3036 of SEQ ID NO: 318666
aguccuuacuccgccagaa

SEQ ID NO: 580038 - RNA, 19 nt, Artificial Sequence
  Description of Artificial Sequence: Synthetic oligonucleotide
  Antisense strand to SEQ ID NO: 580037
uucuggcggaguaaggacu

SEQ ID NO: 580039 - RNA, 19 nt, Artificial Sequence
  Description of Artificial Sequence: Synthetic oligonucleotide
  Sense strand starting at position 3038 of SEQ ID NO: 318666
uccuuacuccgccagaaug

SEQ ID NO: 580040 - RNA, 19 nt, Artificial Sequence
  Description of Artificial Sequence: Synthetic oligonucleotide
  Antisense strand to SEQ ID NO: 580039
cauucuggcggaguaagga

SEQ ID NO: 580041 - RNA, 19 nt, Artificial Sequence
  Description of Artificial Sequence: Synthetic oligonucleotide
  Sense strand starting at position 3040 of SEQ ID NO: 318666
cuuacuccgccagaaugaa

SEQ ID NO: 580042 - RNA, 19 nt, Artificial Sequence
  Description of Artificial Sequence: Synthetic oligonucleotide
  Antisense strand to SEQ ID NO: 580041
uucauucuggcggaguaag

SEQ ID NO: 580043 - RNA, 19 nt, Artificial Sequence
  Description of Artificial Sequence: Synthetic oligonucleotide
  Sense strand starting at position 3093 of SEQ ID NO: 318666
aaauguuccuuugcggaag

SEQ ID NO: 580044 - RNA, 19 nt, Artificial Sequence
  Description of Artificial Sequence: Synthetic oligonucleotide
  Antisense strand to SEQ ID NO: 580043
cuuccgcaaaggaacauuu

SEQ ID NO: 580045 - RNA, 19 nt, Artificial Sequence
  Description of Artificial Sequence: Synthetic oligonucleotide
  Sense strand starting at position 3286 of SEQ ID NO: 318666
guggaugguggccaucaaa

SEQ ID NO: 580046 - RNA, 19 nt, Artificial Sequence
  Description of Artificial Sequence: Synthetic oligonucleotide
  Antisense strand to SEQ ID NO: 580045
uuugauggccaccauccac

SEQ ID NO: 580047 - RNA, 19 nt, Artificial Sequence
  Description of Artificial Sequence: Synthetic oligonucleotide
  Sense strand starting at position 3335 of SEQ ID NO: 318666
ggaagaggcuagagugauc

SEQ ID NO: 580048 - RNA, 19 nt, Artificial Sequence
  Description of Artificial Sequence: Synthetic oligonucleotide
  Antisense strand to SEQ ID NO: 580047
gaucacucuagccucuucc

SEQ ID NO: 580049 - RNA, 19 nt, Artificial Sequence
  Description of Artificial Sequence: Synthetic oligonucleotide
  Sense strand starting at position 3340 of SEQ ID NO: 318666
aggcuagagugauccuugu

SEQ ID NO: 580050 - RNA, 19 nt, Artificial Sequence
  Description of Artificial Sequence: Synthetic oligonucleotide
  Antisense strand to SEQ ID NO: 580049
acaaggaucacucuagccu

SEQ ID NO: 580051 - RNA, 19 nt, Artificial Sequence
  Description of Artificial Sequence: Synthetic oligonucleotide
  Sense strand starting at position 3344 of SEQ ID NO: 318666
uagagugauccuuguggua

SEQ ID NO: 580052 - RNA, 19 nt, Artificial Sequence
  Description of Artificial Sequence: Synthetic oligonucleotide
  Antisense strand to SEQ ID NO: 580051
uaccacaaggaucacucua

SEQ ID NO: 580053 - RNA, 19 nt, Artificial Sequence
  Description of Artificial Sequence: Synthetic oligonucleotide
  Sense strand starting at position 3357 of SEQ ID NO: 318666
gugguacaggguuagaguu

SEQ ID NO: 580054 - RNA, 19 nt, Artificial Sequence
  Description of Artificial Sequence: Synthetic oligonucleotide
  Antisense strand to SEQ ID NO: 580053
aacucuaacccuguaccac

SEQ ID NO: 580055 - RNA, 19 nt, Artificial Sequence
  Description of Artificial Sequence: Synthetic oligonucleotide
  Sense strand starting at position 3364 of SEQ ID NO: 318666
aggguuagaguuggagaca

SEQ ID NO: 580056 - RNA, 19 nt, Artificial Sequence
  Description of Artificial Sequence: Synthetic oligonucleotide
  Antisense strand to SEQ ID NO: 580055
ugucuccaacucuaacccu

SEQ ID NO: 580057 - RNA, 19 nt, Artificial Sequence
  Description of Artificial Sequence: Synthetic oligonucleotide
  Sense strand starting at position 3369 of SEQ ID NO: 318666
uagaguuggagacaucguu

SEQ ID NO: 580058 - RNA, 19 nt, Artificial Sequence
  Description of Artificial Sequence: Synthetic oligonucleotide
  Antisense strand to SEQ ID NO: 580057
aacgaugucuccaacucua

SEQ ID NO: 580059 - RNA, 19 nt, Artificial Sequence
  Description of Artificial Sequence: Synthetic oligonucleotide
  Sense strand starting at position 3375 of SEQ ID NO: 318666
uggagacaucguuauggac

SEQ ID NO: 580060 - RNA, 19 nt, Artificial Sequence
  Description of Artificial Sequence: Synthetic oligonucleotide
  Antisense strand to SEQ ID NO: 580059
guccauaacgaugucucca

SEQ ID NO: 580061 - RNA, 19 nt, Artificial Sequence
  Description of Artificial Sequence: Synthetic oligonucleotide
  Sense strand starting at position 3383 of SEQ ID NO: 318666
ucguuauggacucauguuu

SEQ ID NO: 580062 - RNA, 19 nt, Artificial Sequence
  Description of Artificial Sequence: Synthetic oligonucleotide
  Antisense strand to SEQ ID NO: 580061
aaacaugaguccauaacga

SEQ ID NO: 580063 - RNA, 19 nt, Artificial Sequence
  Description of Artificial Sequence: Synthetic oligonucleotide
  Sense strand starting at position 3432 of SEQ ID NO: 318666
uguauauaaugggucugua

SEQ ID NO: 580064 - RNA, 19 nt, Artificial Sequence
  Description of Artificial Sequence: Synthetic oligonucleotide
  Antisense strand to SEQ ID NO: 580063
uacagacccauuauauaca

SEQ ID NO: 580065 - RNA, 19 nt, Artificial Sequence
  Description of Artificial Sequence: Synthetic oligonucleotide
  Sense strand starting at position 3435 of SEQ ID NO: 318666
auauaaugggucuguacag

SEQ ID NO: 580066 - RNA, 19 nt, Artificial Sequence
  Description of Artificial Sequence: Synthetic oligonucleotide
  Antisense strand to SEQ ID NO: 580065
cuguacagacccauuauau

SEQ ID NO: 580067 - RNA, 19 nt, Artificial Sequence
  Description of Artificial Sequence: Synthetic oligonucleotide
  Sense strand starting at position 3436 of SEQ ID NO: 318666
uauaaugggucuguacaga

SEQ ID NO: 580068 - RNA, 19 nt, Artificial Sequence
  Description of Artificial Sequence: Synthetic oligonucleotide
  Antisense strand to SEQ ID NO: 580067
ucuguacagacccauuaua

SEQ ID NO: 580069 - RNA, 19 nt, Artificial Sequence
  Description of Artificial Sequence: Synthetic oligonucleotide
  Sense strand starting at position 3449 of SEQ ID NO: 318666
uacagagauuuguagauaa

SEQ ID NO: 580070 - RNA, 19 nt, Artificial Sequence
  Description of Artificial Sequence: Synthetic oligonucleotide
  Antisense strand to SEQ ID NO: 580069
uuaucuacaaaucucugua

SEQ ID NO: 580071 - RNA, 19 nt, Artificial Sequence
  Description of Artificial Sequence: Synthetic oligonucleotide
  Sense strand starting at position 3593 of SEQ ID NO: 318666
gccagagcuccuugaggaa

SEQ ID NO: 580072 - RNA, 19 nt, Artificial Sequence
  Description of Artificial Sequence: Synthetic oligonucleotide
  Antisense strand to SEQ ID NO: 580071
uuccucaaggagcucuggc

SEQ ID NO: 580073 - RNA, 19 nt, Artificial Sequence
  Description of Artificial Sequence: Synthetic oligonucleotide
  Sense strand starting at position 3816 of SEQ ID NO: 318666
agcagaaugugauuauaac

SEQ ID NO: 580074 - RNA, 19 nt, Artificial Sequence
  Description of Artificial Sequence: Synthetic oligonucleotide
  Antisense strand to SEQ ID NO: 580073
guuauaaucacauucugcu

SEQ ID NO: 580075 - RNA, 19 nt, Artificial Sequence
  Description of Artificial Sequence: Synthetic oligonucleotide
  Sense strand starting at position 3817 of SEQ ID NO: 318666
gcagaaugugauuauaacc

SEQ ID NO: 580076 - RNA, 19 nt, Artificial Sequence
  Description of Artificial Sequence: Synthetic oligonucleotide
  Antisense strand to SEQ ID NO: 580075
gguuauaaucacauucugc

SEQ ID NO: 580077 - RNA, 19 nt, Artificial Sequence
  Description of Artificial Sequence: Synthetic oligonucleotide
  Sense strand starting at position 3889 of SEQ ID NO: 318666
agcaaauaagugggauuaa

SEQ ID NO: 580078 - RNA, 19 nt, Artificial Sequence
  Description of Artificial Sequence: Synthetic oligonucleotide
  Antisense strand to SEQ ID NO: 580077
uuaaucccacuuauuugcu

SEQ ID NO: 580079 - RNA, 19 nt, Artificial Sequence
  Description of Artificial Sequence: Synthetic oligonucleotide
  Sense strand starting at position 3939 of SEQ ID NO: 318666
guaaaucaaugggauuaag

SEQ ID NO: 580080 - RNA, 19 nt, Artificial Sequence
  Description of Artificial Sequence: Synthetic oligonucleotide
  Antisense strand to SEQ ID NO: 580079
cuuaaucccauugauuuac

SEQ ID NO: 580081 - RNA, 19 nt, Artificial Sequence
  Description of Artificial Sequence: Synthetic oligonucleotide
  Sense strand starting at position 3967 of SEQ ID NO: 318666
ugggaacaauucuaaauaa

SEQ ID NO: 580082 - RNA, 19 nt, Artificial Sequence
  Description of Artificial Sequence: Synthetic oligonucleotide
  Antisense strand to SEQ ID NO: 580081
uuauuuagaauuguuccca

SEQ ID NO: 580083 - RNA, 19 nt, Artificial Sequence
  Description of Artificial Sequence: Synthetic oligonucleotide
  Sense strand starting at position 55 of SEQ ID NO: 318667
cuuucuuugcagugcuaaa

SEQ ID NO: 580084 - RNA, 19 nt, Artificial Sequence
  Description of Artificial Sequence: Synthetic oligonucleotide
  Antisense strand to SEQ ID NO: 580083
uuuagcacugcaaagaaag

SEQ ID NO: 580085 - RNA, 19 nt, Artificial Sequence
  Description of Artificial Sequence: Synthetic oligonucleotide
  Sense strand starting at position 159 of SEQ ID NO: 318667
aagaaagcccaguaguuaa

SEQ ID NO: 580086 - RNA, 19 nt, Artificial Sequence
  Description of Artificial Sequence: Synthetic oligonucleotide
  Antisense strand to SEQ ID NO: 580085
uuaacuacugggcuuucuu

SEQ ID NO: 580087 - RNA, 19 nt, Artificial Sequence
  Description of Artificial Sequence: Synthetic oligonucleotide
  Sense strand starting at position 169 of SEQ ID NO: 318667
aguaguuaacaggguaagu

SEQ ID NO: 580088 - RNA, 19 nt, Artificial Sequence
  Description of Artificial Sequence: Synthetic oligonucleotide
  Antisense strand to SEQ ID NO: 580087
acuuacccuguuaacuacu

SEQ ID NO: 580089 - RNA, 19 nt, Artificial Sequence
  Description of Artificial Sequence: Synthetic oligonucleotide
  Sense strand starting at position 245 of SEQ ID NO: 318667
ccagcugugcccugaagaa

SEQ ID NO: 580090 - RNA, 19 nt, Artificial Sequence
  Description of Artificial Sequence: Synthetic oligonucleotide
  Antisense strand to SEQ ID NO: 580089
uucuucagggcacagcugg

SEQ ID NO: 580091 - RNA, 19 nt, Artificial Sequence
  Description of Artificial Sequence: Synthetic oligonucleotide
  Sense strand starting at position 300 of SEQ ID NO: 318667
caguaagaguucucgcuau

SEQ ID NO: 580092 - RNA, 19 nt, Artificial Sequence
  Description of Artificial Sequence: Synthetic oligonucleotide
  Antisense strand to SEQ ID NO: 580091
auagcgagaacucuuacug

SEQ ID NO: 580093 - RNA, 19 nt, Artificial Sequence
  Description of Artificial Sequence: Synthetic oligonucleotide
  Sense strand starting at position 302 of SEQ ID NO: 318667
guaagaguucucgcuaugc

SEQ ID NO: 580094 - RNA, 19 nt, Artificial Sequence
  Description of Artificial Sequence: Synthetic oligonucleotide
  Antisense strand to SEQ ID NO: 580093
gcauagcgagaacucuuac

SEQ ID NO: 580095 - RNA, 19 nt, Artificial Sequence
  Description of Artificial Sequence: Synthetic oligonucleotide
  Sense strand starting at position 304 of SEQ ID NO: 318667
aagaguucucgcuaugcug

SEQ ID NO: 580096 - RNA, 19 nt, Artificial Sequence
  Description of Artificial Sequence: Synthetic oligonucleotide
  Antisense strand to SEQ ID NO: 580095
cagcauagcgagaacucuu

SEQ ID NO: 580097 - RNA, 19 nt, Artificial Sequence
  Description of Artificial Sequence: Synthetic oligonucleotide
  Sense strand starting at position 328 of SEQ ID NO: 318667
cugugaagucauuaauaca

SEQ ID NO: 580098 - RNA, 19 nt, Artificial Sequence
  Description of Artificial Sequence: Synthetic oligonucleotide
  Antisense strand to SEQ ID NO: 580097
uguauuaaugacuucacag

SEQ ID NO: 580099 - RNA, 19 nt, Artificial Sequence
  Description of Artificial Sequence: Synthetic oligonucleotide
  Sense strand starting at position 349 of SEQ ID NO: 318667
caaaguguuuaggacgaua

SEQ ID NO: 580100 - RNA, 19 nt, Artificial Sequence
  Description of Artificial Sequence: Synthetic oligonucleotide
  Antisense strand to SEQ ID NO: 580099
uaucguccuaaacacuuug

SEQ ID NO: 580101 - RNA, 19 nt, Artificial Sequence
  Description of Artificial Sequence: Synthetic oligonucleotide
  Sense strand starting at position 379 of SEQ ID NO: 318667
guaagcacgcaauaauguu

SEQ ID NO: 580102 - RNA, 19 nt, Artificial Sequence
  Description of Artificial Sequence: Synthetic oligonucleotide
  Antisense strand to SEQ ID NO: 580101
aacauuauugcgugcuuac

SEQ ID NO: 580103 - RNA, 19 nt, Artificial Sequence
  Description of Artificial Sequence: Synthetic oligonucleotide
  Sense strand starting at position 464 of SEQ ID NO: 318667
gucuccaauagccgugauu

SEQ ID NO: 580104 - RNA, 19 nt, Artificial Sequence
  Description of Artificial Sequence: Synthetic oligonucleotide
  Antisense strand to SEQ ID NO: 580103
aaucacggcuauuggagac

SEQ ID NO: 580105 - RNA, 19 nt, Artificial Sequence
  Description of Artificial Sequence: Synthetic oligonucleotide
  Sense strand starting at position 474 of SEQ ID NO: 318667
gccgugauucgugcugaga

SEQ ID NO: 580106 - RNA, 19 nt, Artificial Sequence
  Description of Artificial Sequence: Synthetic oligonucleotide
  Antisense strand to SEQ ID NO: 580105
ucucagcacgaaucacggc

SEQ ID NO: 580107 - RNA, 19 nt, Artificial Sequence
  Description of Artificial Sequence: Synthetic oligonucleotide
  Sense strand starting at position 626 of SEQ ID NO: 318667
agcuuacuggccugaucaa

SEQ ID NO: 580108 - RNA, 19 nt, Artificial Sequence
  Description of Artificial Sequence: Synthetic oligonucleotide
  Antisense strand to SEQ ID NO: 580107
uugaucaggccaguaagcu

SEQ ID NO: 580109 - RNA, 19 nt, Artificial Sequence
  Description of Artificial Sequence: Synthetic oligonucleotide
  Sense strand starting at position 787 of SEQ ID NO: 318667
gguugugugcaggugucua

SEQ ID NO: 580110 - RNA, 19 nt, Artificial Sequence
  Description of Artificial Sequence: Synthetic oligonucleotide
  Antisense strand to SEQ ID NO: 580109
uagacaccugcacacaacc

SEQ ID NO: 580111 - RNA, 19 nt, Artificial Sequence
  Description of Artificial Sequence: Synthetic oligonucleotide
  Sense strand starting at position 791 of SEQ ID NO: 318667
gugugcaggugucuaugaa

SEQ ID NO: 580112 - RNA, 19 nt, Artificial Sequence
  Description of Artificial Sequence: Synthetic oligonucleotide
  Antisense strand to SEQ ID NO: 580111
uucauagacaccugcacac

SEQ ID NO: 580113 - RNA, 19 nt, Artificial Sequence
  Description of Artificial Sequence: Synthetic oligonucleotide
  Sense strand starting at position 850 of SEQ ID NO: 318667
agcugugcucuggugugau

SEQ ID NO: 580114 - RNA, 19 nt, Artificial Sequence
  Description of Artificial Sequence: Synthetic oligonucleotide
  Antisense strand to SEQ ID NO: 580113
aucacaccagagcacagcu

SEQ ID NO: 580115 - RNA, 19 nt, Artificial Sequence
  Description of Artificial Sequence: Synthetic oligonucleotide
  Sense strand starting at position 853 of SEQ ID NO: 318667
ugugcucuggugugauuau

SEQ ID NO: 580116 - RNA, 19 nt, Artificial Sequence
  Description of Artificial Sequence: Synthetic oligonucleotide
  Antisense strand to SEQ ID NO: 580115
auaaucacaccagagcaca

SEQ ID NO: 580117 - RNA, 19 nt, Artificial Sequence
  Description of Artificial Sequence: Synthetic oligonucleotide
  Sense strand starting at position 940 of SEQ ID NO: 318667
aggugucucugagcgcuaa

SEQ ID NO: 580118 - RNA, 19 nt, Artificial Sequence
  Description of Artificial Sequence: Synthetic oligonucleotide
  Antisense strand to SEQ ID NO: 580117
uuagcgcucagagacaccu

SEQ ID NO: 580119 - RNA, 19 nt, Artificial Sequence
  Description of Artificial Sequence: Synthetic oligonucleotide
  Sense strand starting at position 952 of SEQ ID NO: 318667
gcgcuaagguguuuacaca

SEQ ID NO: 580120 - RNA, 19 nt, Artificial Sequence
  Description of Artificial Sequence: Synthetic oligonucleotide
  Antisense strand to SEQ ID NO: 580119
uguguaaacaccuuagcgc

SEQ ID NO: 580121 - RNA, 19 nt, Artificial Sequence
  Description of Artificial Sequence: Synthetic oligonucleotide
  Sense strand starting at position 1068 of SEQ ID NO: 318667
gucaacagcuauucuguua

SEQ ID NO: 580122 - RNA, 19 nt, Artificial Sequence
  Description of Artificial Sequence: Synthetic oligonucleotide
  Antisense strand to SEQ ID NO: 580121
uaacagaauagcuguugac

SEQ ID NO: 580123 - RNA, 19 nt, Artificial Sequence
  Description of Artificial Sequence: Synthetic oligonucleotide
  Sense strand starting at position 1247 of SEQ ID NO: 318667
ugaacugacuuggucacaa

SEQ ID NO: 580124 - RNA, 19 nt, Artificial Sequence
  Description of Artificial Sequence: Synthetic oligonucleotide
  Antisense strand to SEQ ID NO: 580123
uugugaccaagucaguuca

SEQ ID NO: 580125 - RNA, 19 nt, Artificial Sequence
  Description of Artificial Sequence: Synthetic oligonucleotide
  Sense strand starting at position 1251 of SEQ ID NO: 318667
cugacuuggucacaaauga

SEQ ID NO: 580126 - RNA, 19 nt, Artificial Sequence
  Description of Artificial Sequence: Synthetic oligonucleotide
  Antisense strand to SEQ ID NO: 580125
ucauuugugaccaagucag

SEQ ID NO: 580127 - RNA, 19 nt, Artificial Sequence
  Description of Artificial Sequence: Synthetic oligonucleotide
  Sense strand starting at position 1260 of SEQ ID NO: 318667
ucacaaaugagugggaugu

SEQ ID NO: 580128 - RNA, 19 nt, Artificial Sequence
  Description of Artificial Sequence: Synthetic oligonucleotide
  Antisense strand to SEQ ID NO: 580127
acaucccacucauuuguga

SEQ ID NO: 580129 - RNA, 19 nt, Artificial Sequence
  Description of Artificial Sequence: Synthetic oligonucleotide
  Sense strand starting at position 1264 of SEQ ID NO: 318667
aaaugagugggaugugcuu

SEQ ID NO: 580130 - RNA, 19 nt, Artificial Sequence
  Description of Artificial Sequence: Synthetic oligonucleotide
  Antisense strand to SEQ ID NO: 580129
aagcacaucccacucauuu

SEQ ID NO: 580131 - RNA, 19 nt, Artificial Sequence
  Description of Artificial Sequence: Synthetic oligonucleotide
  Sense strand starting at position 1341 of SEQ ID NO: 318667
gaagcaguggcucaaagaa

SEQ ID NO: 580132 - RNA, 19 nt, Artificial Sequence
  Description of Artificial Sequence: Synthetic oligonucleotide
  Antisense strand to SEQ ID NO: 580131
uucuuugagccacugcuuc

SEQ ID NO: 580133 - RNA, 19 nt, Artificial Sequence
  Description of Artificial Sequence: Synthetic oligonucleotide
  Sense strand starting at position 1367 of SEQ ID NO: 318667
ccagcuuucggcugagacu

SEQ ID NO: 580134 - RNA, 19 nt, Artificial Sequence
  Description of Artificial Sequence: Synthetic oligonucleotide
  Antisense strand to SEQ ID NO: 580133
agucucagccgaaagcugg

SEQ ID NO: 580135 - RNA, 19 nt, Artificial Sequence
  Description of Artificial Sequence: Synthetic oligonucleotide
  Sense strand starting at position 1368 of SEQ ID NO: 318667
cagcuuucggcugagacua

SEQ ID NO: 580136 - RNA, 19 nt, Artificial Sequence
  Description of Artificial Sequence: Synthetic oligonucleotide
  Antisense strand to SEQ ID NO: 580135
uagucucagccgaaagcug

SEQ ID NO: 580137 - RNA, 19 nt, Artificial Sequence
  Description of Artificial Sequence: Synthetic oligonucleotide
  Sense strand starting at position 1383 of SEQ ID NO: 318667
acuagagcucucuguaaug

SEQ ID NO: 580138 - RNA, 19 nt, Artificial Sequence
  Description of Artificial Sequence: Synthetic oligonucleotide
  Antisense strand to SEQ ID NO: 580137
cauuacagagagcucuagu

SEQ ID NO: 580139 - RNA, 19 nt, Artificial Sequence
  Description of Artificial Sequence: Synthetic oligonucleotide
  Sense strand starting at position 1582 of SEQ ID NO: 318667
cgcgucauugcgcuaggau

SEQ ID NO: 580140 - RNA, 19 nt, Artificial Sequence
  Description of Artificial Sequence: Synthetic oligonucleotide
  Antisense strand to SEQ ID NO: 580139
auccuagcgcaaugacgcg

SEQ ID NO: 580141 - RNA, 19 nt, Artificial Sequence
  Description of Artificial Sequence: Synthetic oligonucleotide
  Sense strand starting at position 2723 of SEQ ID NO: 318667
caucuucuugaacgaguaa

SEQ ID NO: 580142 - RNA, 19 nt, Artificial Sequence
  Description of Artificial Sequence: Synthetic oligonucleotide
  Antisense strand to SEQ ID NO: 580141
uuacucguucaagaagaug

SEQ ID NO: 580143 - RNA, 19 nt, Artificial Sequence
  Description of Artificial Sequence: Synthetic oligonucleotide
  Sense strand starting at position 3019 of SEQ ID NO: 318667
uggagaagccucuaaagcu

SEQ ID NO: 580144 - RNA, 19 nt, Artificial Sequence
  Description of Artificial Sequence: Synthetic oligonucleotide
  Antisense strand to SEQ ID NO: 580143
agcuuuagaggcuucucca

SEQ ID NO: 580145 - RNA, 19 nt, Artificial Sequence
  Description of Artificial Sequence: Synthetic oligonucleotide
  Sense strand starting at position 3028 of SEQ ID NO: 318667
cucuaaagcuaguccugaa

SEQ ID NO: 580146 - RNA, 19 nt, Artificial Sequence
  Description of Artificial Sequence: Synthetic oligonucleotide
  Antisense strand to SEQ ID NO: 580145
uucaggacuagcuuuagag

SEQ ID NO: 580147 - RNA, 19 nt, Artificial Sequence
  Description of Artificial Sequence: Synthetic oligonucleotide
  Sense strand starting at position 3093 of SEQ ID NO: 318667
uccaguuacuaugaugaca

SEQ ID NO: 580148 - RNA, 19 nt, Artificial Sequence
  Description of Artificial Sequence: Synthetic oligonucleotide
  Antisense strand to SEQ ID NO: 580147
ugucaucauaguaacugga

SEQ ID NO: 580149 - RNA, 19 nt, Artificial Sequence
  Description of Artificial Sequence: Synthetic oligonucleotide
  Sense strand starting at position 3387 of SEQ ID NO: 318667
ugugcuguuccucagcaga

SEQ ID NO: 580150 - RNA, 19 nt, Artificial Sequence
  Description of Artificial Sequence: Synthetic oligonucleotide
  Antisense strand to SEQ ID NO: 580149
ucugcugaggaacagcaca

SEQ ID NO: 580151 - RNA, 19 nt, Artificial Sequence
  Description of Artificial Sequence: Synthetic oligonucleotide
  Sense strand starting at position 3627 of SEQ ID NO: 318667
cuuugauccugggaagaag

SEQ ID NO: 580152 - RNA, 19 nt, Artificial Sequence
  Description of Artificial Sequence: Synthetic oligonucleotide
  Antisense strand to SEQ ID NO: 580151
cuucuucccaggaucaaag

SEQ ID NO: 580153 - RNA, 19 nt, Artificial Sequence
  Description of Artificial Sequence: Synthetic oligonucleotide
  Sense strand starting at position 3735 of SEQ ID NO: 318667
cacagcucaucguuguaaa

SEQ ID NO: 580154 - RNA, 19 nt, Artificial Sequence
  Description of Artificial Sequence: Synthetic oligonucleotide
  Antisense strand to SEQ ID NO: 580153
uuuacaacgaugagcugug

SEQ ID NO: 580155 - RNA, 19 nt, Artificial Sequence
  Description of Artificial Sequence: Synthetic oligonucleotide
  Sense strand starting at position 3736 of SEQ ID NO: 318667
acagcucaucguuguaaau

SEQ ID NO: 580156 - RNA, 19 nt, Artificial Sequence
  Description of Artificial Sequence: Synthetic oligonucleotide
  Antisense strand to SEQ ID NO: 580155
auuuacaacgaugagcugu

SEQ ID NO: 580157 - RNA, 19 nt, Artificial Sequence
  Description of Artificial Sequence: Synthetic oligonucleotide
  Sense strand starting at position 3868 of SEQ ID NO: 318667
ucugaaugucuagagcaag

SEQ ID NO: 580158 - RNA, 19 nt, Artificial Sequence
  Description of Artificial Sequence: Synthetic oligonucleotide
  Antisense strand to SEQ ID NO: 580157
cuugcucuagacauucaga

SEQ ID NO: 580159 - RNA, 19 nt, Artificial Sequence
  Description of Artificial Sequence: Synthetic oligonucleotide
  Sense strand starting at position 3926 of SEQ ID NO: 318667
uuaacuuguuagcuaagga

SEQ ID NO: 580160 - RNA, 19 nt, Artificial Sequence
  Description of Artificial Sequence: Synthetic oligonucleotide
  Antisense strand to SEQ ID NO: 580159
uccuuagcuaacaaguuaa

SEQ ID NO: 580161 - RNA, 19 nt, Artificial Sequence
  Description of Artificial Sequence: Synthetic oligonucleotide
  Sense strand starting at position 3936 of SEQ ID NO: 318667
agcuaaggauggcuuauau

SEQ ID NO: 580162 - RNA, 19 nt, Artificial Sequence
  Description of Artificial Sequence: Synthetic oligonucleotide
  Antisense strand to SEQ ID NO: 580161
auauaagccauccuuagcu

SEQ ID NO: 580163 - RNA, 19 nt, Artificial Sequence
  Description of Artificial Sequence: Synthetic oligonucleotide
  Sense strand starting at position 265 of SEQ ID NO: 318668
agaagaaguuauccucagu

SEQ ID NO: 580164 - RNA, 19 nt, Artificial Sequence
  Description of Artificial Sequence: Synthetic oligonucleotide
  Antisense strand to SEQ ID NO: 580163
acugaggauaacuucuucu

SEQ ID NO: 580165 - RNA, 19 nt, Artificial Sequence
  Description of Artificial Sequence: Synthetic oligonucleotide
  Sense strand starting at position 397 of SEQ ID NO: 318668
uaugaaacuggaugucuau

SEQ ID NO: 580166 - RNA, 19 nt, Artificial Sequence
  Description of Artificial Sequence: Synthetic oligonucleotide
  Antisense strand to SEQ ID NO: 580165
auagacauccaguuucaua

SEQ ID NO: 580167 - RNA, 19 nt, Artificial Sequence
  Description of Artificial Sequence: Synthetic oligonucleotide
  Sense strand starting at position 403 of SEQ ID NO: 318668
acuggaugucuauaucuca

SEQ ID NO: 580168 - RNA, 19 nt, Artificial Sequence
  Description of Artificial Sequence: Synthetic oligonucleotide
  Antisense strand to SEQ ID NO: 580167
ugagauauagacauccagu

SEQ ID NO: 580169 - RNA, 19 nt, Artificial Sequence
  Description of Artificial Sequence: Synthetic oligonucleotide
  Sense strand starting at position 628 of SEQ ID NO: 318668
uaauauuuauauggaggga

SEQ ID NO: 580170 - RNA, 19 nt, Artificial Sequence
  Description of Artificial Sequence: Synthetic oligonucleotide
  Antisense strand to SEQ ID NO: 580169
ucccuccauauaaauauua

SEQ ID NO: 580171 - RNA, 19 nt, Artificial Sequence
  Description of Artificial Sequence: Synthetic oligonucleotide
  Sense strand starting at position 650 of SEQ ID NO: 318668
guugauugccuuuacuaag

SEQ ID NO: 580172 - RNA, 19 nt, Artificial Sequence
  Description of Artificial Sequence: Synthetic oligonucleotide
  Antisense strand to SEQ ID NO: 580171
cuuaguaaaggcaaucaac

SEQ ID NO: 580173 - RNA, 19 nt, Artificial Sequence
  Description of Artificial Sequence: Synthetic oligonucleotide
  Sense strand starting at position 769 of SEQ ID NO: 318668
gccuaaaggaguuaucuag

SEQ ID NO: 580174 - RNA, 19 nt, Artificial Sequence
  Description of Artificial Sequence: Synthetic oligonucleotide
  Antisense strand to SEQ ID NO: 580173
cuagauaacuccuuuaggc

SEQ ID NO: 580175 - RNA, 19 nt, Artificial Sequence
  Description of Artificial Sequence: Synthetic oligonucleotide
  Sense strand starting at position 776 of SEQ ID NO: 318668
ggaguuaucuagucuacau

SEQ ID NO: 580176 - RNA, 19 nt, Artificial Sequence
  Description of Artificial Sequence: Synthetic oligonucleotide
  Antisense strand to SEQ ID NO: 580175
auguagacuagauaacucc

SEQ ID NO: 580177 - RNA, 19 nt, Artificial Sequence
  Description of Artificial Sequence: Synthetic oligonucleotide
  Sense strand starting at position 845 of SEQ ID NO: 318668
guaauugugacauagaagu

SEQ ID NO: 580178 - RNA, 19 nt, Artificial Sequence
  Description of Artificial Sequence: Synthetic oligonucleotide
  Antisense strand to SEQ ID NO: 580177
acuucuaugucacaauuac

SEQ ID NO: 580179 - RNA, 19 nt, Artificial Sequence
  Description of Artificial Sequence: Synthetic oligonucleotide
  Sense strand starting at position 853 of SEQ ID NO: 318668
gacauagaaguuugguaag

SEQ ID NO: 580180 - RNA, 19 nt, Artificial Sequence
  Description of Artificial Sequence: Synthetic oligonucleotide
  Antisense strand to SEQ ID NO: 580179
cuuaccaaacuucuauguc

SEQ ID NO: 580181 - RNA, 19 nt, Artificial Sequence
  Description of Artificial Sequence: Synthetic oligonucleotide
  Sense strand starting at position 1081 of SEQ ID NO: 318668
uucugagucuacccugaau

SEQ ID NO: 580182 - RNA, 19 nt, Artificial Sequence
  Description of Artificial Sequence: Synthetic oligonucleotide
  Antisense strand to SEQ ID NO: 580181
auucaggguagacucagaa

SEQ ID NO: 580183 - RNA, 19 nt, Artificial Sequence
  Description of Artificial Sequence: Synthetic oligonucleotide
  Sense strand starting at position 1084 of SEQ ID NO: 318668
ugagucuacccugaaucca

SEQ ID NO: 580184 - RNA, 19 nt, Artificial Sequence
  Description of Artificial Sequence: Synthetic oligonucleotide
  Antisense strand to SEQ ID NO: 580183
uggauucaggguagacuca

SEQ ID NO: 580185 - RNA, 19 nt, Artificial Sequence
  Description of Artificial Sequence: Synthetic oligonucleotide
  Sense strand starting at position 1362 of SEQ ID NO: 318668
aguggcuacuuauuagaau

SEQ ID NO: 580186 - RNA, 19 nt, Artificial Sequence
  Description of Artificial Sequence: Synthetic oligonucleotide
  Antisense strand to SEQ ID NO: 580185
auucuaauaaguagccacu

SEQ ID NO: 580187 - RNA, 19 nt, Artificial Sequence
  Description of Artificial Sequence: Synthetic oligonucleotide
  Sense strand starting at position 1447 of SEQ ID NO: 318668
gaaagcugucaguagugaa

SEQ ID NO: 580188 - RNA, 19 nt, Artificial Sequence
  Description of Artificial Sequence: Synthetic oligonucleotide
  Antisense strand to SEQ ID NO: 580187
uucacuacugacagcuuuc

SEQ ID NO: 580189 - RNA, 19 nt, Artificial Sequence
  Description of Artificial Sequence: Synthetic oligonucleotide
  Sense strand starting at position 1773 of SEQ ID NO: 318668
uuacauugaggguguaaua

SEQ ID NO: 580190 - RNA, 19 nt, Artificial Sequence
  Description of Artificial Sequence: Synthetic oligonucleotide
  Antisense strand to SEQ ID NO: 580189
uauuacacccucaauguaa

SEQ ID NO: 580191 - RNA, 19 nt, Artificial Sequence
  Description of Artificial Sequence: Synthetic oligonucleotide
  Sense strand starting at position 1799 of SEQ ID NO: 318668
uuguuccuccucuagauga

SEQ ID NO: 580192 - RNA, 19 nt, Artificial Sequence
  Description of Artificial Sequence: Synthetic oligonucleotide
  Antisense strand to SEQ ID NO: 580191
ucaucuagaggaggaacaa

SEQ ID NO: 580193 - RNA, 19 nt, Artificial Sequence
  Description of Artificial Sequence: Synthetic oligonucleotide
  Sense strand starting at position 1826 of SEQ ID NO: 318668
cgguguugagucgccagaa

SEQ ID NO: 580194 - RNA, 19 nt, Artificial Sequence
  Description of Artificial Sequence: Synthetic oligonucleotide
  Antisense strand to SEQ ID NO: 580193
uucuggcgacucaacaccg

SEQ ID NO: 580195 - RNA, 19 nt, Artificial Sequence
  Description of Artificial Sequence: Synthetic oligonucleotide
  Sense strand starting at position 1899 of SEQ ID NO: 318668
uauagagcuggucaaguga

SEQ ID NO: 580196 - RNA, 19 nt, Artificial Sequence
  Description of Artificial Sequence: Synthetic oligonucleotide
  Antisense strand to SEQ ID NO: 580195
ucacuugaccagcucuaua

SEQ ID NO: 580197 - RNA, 19 nt, Artificial Sequence
  Description of Artificial Sequence: Synthetic oligonucleotide
  Sense strand starting at position 1908 of SEQ ID NO: 318668
ggucaagugaguuaaguug

SEQ ID NO: 580198 - RNA, 19 nt, Artificial Sequence
  Description of Artificial Sequence: Synthetic oligonucleotide
  Antisense strand to SEQ ID NO: 580197
caacuuaacucacuugacc

SEQ ID NO: 580199 - RNA, 19 nt, Artificial Sequence
  Description of Artificial Sequence: Synthetic oligonucleotide
  Sense strand starting at position 1989 of SEQ ID NO: 318668
ggcagaaccguguuaccgu

SEQ ID NO: 580200 - RNA, 19 nt, Artificial Sequence
  Description of Artificial Sequence: Synthetic oligonucleotide
  Antisense strand to SEQ ID NO: 580199
acgguaacacgguucugcc

SEQ ID NO: 580201 - RNA, 19 nt, Artificial Sequence
  Description of Artificial Sequence: Synthetic oligonucleotide
  Sense strand starting at position 2412 of SEQ ID NO: 318668
agccuaaagagcgauagaa

SEQ ID NO: 580202 - RNA, 19 nt, Artificial Sequence
  Description of Artificial Sequence: Synthetic oligonucleotide
  Antisense strand to SEQ ID NO: 580201
uucuaucgcucuuuaggcu

SEQ ID NO: 580203 - RNA, 19 nt, Artificial Sequence
  Description of Artificial Sequence: Synthetic oligonucleotide
  Sense strand starting at position 2414 of SEQ ID NO: 318668
ccuaaagagcgauagaagu

SEQ ID NO: 580204 - RNA, 19 nt, Artificial Sequence
  Description of Artificial Sequence: Synthetic oligonucleotide
  Antisense strand to SEQ ID NO: 580203
acuucuaucgcucuuuagg

SEQ ID NO: 580205 - RNA, 19 nt, Artificial Sequence
  Description of Artificial Sequence: Synthetic oligonucleotide
  Sense strand starting at position 2547 of SEQ ID NO: 318668
aggucagugguguagaaca

SEQ ID NO: 580206 - RNA, 19 nt, Artificial Sequence
  Description of Artificial Sequence: Synthetic oligonucleotide
  Antisense strand to SEQ ID NO: 580205
uguucuacaccacugaccu

SEQ ID NO: 580207 - RNA, 19 nt, Artificial Sequence
  Description of Artificial Sequence: Synthetic oligonucleotide
  Sense strand starting at position 2689 of SEQ ID NO: 318668
guaaccaaauggucuauga

SEQ ID NO: 580208 - RNA, 19 nt, Artificial Sequence
  Description of Artificial Sequence: Synthetic oligonucleotide
  Antisense strand to SEQ ID NO: 580207
ucauagaccauuugguuac

SEQ ID NO: 580209 - RNA, 19 nt, Artificial Sequence
  Description of Artificial Sequence: Synthetic oligonucleotide
  Sense strand starting at position 2693 of SEQ ID NO: 318668
ccaaauggucuaugauucu

SEQ ID NO: 580210 - RNA, 19 nt, Artificial Sequence
  Description of Artificial Sequence: Synthetic oligonucleotide
  Antisense strand to SEQ ID NO: 580209
agaaucauagaccauuugg

SEQ ID NO: 580211 - RNA, 19 nt, Artificial Sequence
  Description of Artificial Sequence: Synthetic oligonucleotide
  Sense strand starting at position 2699 of SEQ ID NO: 318668
ggucuaugauucuuaaaca

SEQ ID NO: 580212 - RNA, 19 nt, Artificial Sequence
  Description of Artificial Sequence: Synthetic oligonucleotide
  Antisense strand to SEQ ID NO: 580211
uguuuaagaaucauagacc

SEQ ID NO: 580213 - RNA, 19 nt, Artificial Sequence
  Description of Artificial Sequence: Synthetic oligonucleotide
  Sense strand starting at position 2707 of SEQ ID NO: 318668
auucuuaaacacugaggua

SEQ ID NO: 580214 - RNA, 19 nt, Artificial Sequence
  Description of Artificial Sequence: Synthetic oligonucleotide
  Antisense strand to SEQ ID NO: 580213
uaccucaguguuuaagaau

SEQ ID NO: 580215 - RNA, 19 nt, Artificial Sequence
  Description of Artificial Sequence: Synthetic oligonucleotide
  Sense strand starting at position 2740 of SEQ ID NO: 318668
uuggaaagaaaccgucuua

SEQ ID NO: 580216 - RNA, 19 nt, Artificial Sequence
  Description of Artificial Sequence: Synthetic oligonucleotide
  Antisense strand to SEQ ID NO: 580215
uaagacgguuucuuuccaa

SEQ ID NO: 580217 - RNA, 19 nt, Artificial Sequence
  Description of Artificial Sequence: Synthetic oligonucleotide
  Sense strand starting at position 2809 of SEQ ID NO: 318668
cuggguuacuuaccaauaa

SEQ ID NO: 580218 - RNA, 19 nt, Artificial Sequence
  Description of Artificial Sequence: Synthetic oligonucleotide
  Antisense strand to SEQ ID NO: 580217
uuauugguaaguaacccag

SEQ ID NO: 580219 - RNA, 19 nt, Artificial Sequence
  Description of Artificial Sequence: Synthetic oligonucleotide
  Sense strand starting at position 2823 of SEQ ID NO: 318668
aauaaaucagagugguuau

SEQ ID NO: 580220 - RNA, 19 nt, Artificial Sequence
  Description of Artificial Sequence: Synthetic oligonucleotide
  Antisense strand to SEQ ID NO: 580219
auaaccacucugauuuauu

SEQ ID NO: 580221 - RNA, 19 nt, Artificial Sequence
  Description of Artificial Sequence: Synthetic oligonucleotide
  Sense strand starting at position 2890 of SEQ ID NO: 318668
ugcugugugcacuugcaau

SEQ ID NO: 580222 - RNA, 19 nt, Artificial Sequence
  Description of Artificial Sequence: Synthetic oligonucleotide
  Antisense strand to SEQ ID NO: 580221
auugcaagugcacacagca

SEQ ID NO: 580223 - RNA, 19 nt, Artificial Sequence
  Description of Artificial Sequence: Synthetic oligonucleotide
  Sense strand starting at position 2918 of SEQ ID NO: 318668
uaaggaguugcuuauaaug

SEQ ID NO: 580224 - RNA, 19 nt, Artificial Sequence
  Description of Artificial Sequence: Synthetic oligonucleotide
  Antisense strand to SEQ ID NO: 580223
cauuauaagcaacuccuua

SEQ ID NO: 580225 - RNA, 19 nt, Artificial Sequence
  Description of Artificial Sequence: Synthetic oligonucleotide
  Sense strand starting at position 3118 of SEQ ID NO: 318668
auaugugaaugguugguaa

SEQ ID NO: 580226 - RNA, 19 nt, Artificial Sequence
  Description of Artificial Sequence: Synthetic oligonucleotide
  Antisense strand to SEQ ID NO: 580225
uuaccaaccauucacauau

SEQ ID NO: 580227 - RNA, 19 nt, Artificial Sequence
  Description of Artificial Sequence: Synthetic oligonucleotide
  Sense strand starting at position 3120 of SEQ ID NO: 318668
augugaaugguugguaaua

SEQ ID NO: 580228 - RNA, 19 nt, Artificial Sequence
  Description of Artificial Sequence: Synthetic oligonucleotide
  Antisense strand to SEQ ID NO: 580227
uauuaccaaccauucacau

SEQ ID NO: 580229 - RNA, 19 nt, Artificial Sequence
  Description of Artificial Sequence: Synthetic oligonucleotide
  Sense strand starting at position 3121 of SEQ ID NO: 318668
ugugaaugguugguaauaa

SEQ ID NO: 580230 - RNA, 19 nt, Artificial Sequence
  Description of Artificial Sequence: Synthetic oligonucleotide
  Antisense strand to SEQ ID NO: 580229
uuauuaccaaccauucaca

SEQ ID NO: 580231 - RNA, 19 nt, Artificial Sequence
  Description of Artificial Sequence: Synthetic oligonucleotide
  Sense strand starting at position 3130 of SEQ ID NO: 318668
uugguaauaauaggguuua

SEQ ID NO: 580232 - RNA, 19 nt, Artificial Sequence
  Description of Artificial Sequence: Synthetic oligonucleotide
  Antisense strand to SEQ ID NO: 580231
uaaacccuauuauuaccaa

SEQ ID NO: 580233 - RNA, 19 nt, Artificial Sequence
  Description of Artificial Sequence: Synthetic oligonucleotide
  Sense strand starting at position 3169 of SEQ ID NO: 318668
cguggugauaauuaauuga

SEQ ID NO: 580234 - RNA, 19 nt, Artificial Sequence
  Description of Artificial Sequence: Synthetic oligonucleotide
  Antisense strand to SEQ ID NO: 580233
ucaauuaauuaucaccacg

SEQ ID NO: 580235 - RNA, 19 nt, Artificial Sequence
  Description of Artificial Sequence: Synthetic oligonucleotide
  Sense strand starting at position 3217 of SEQ ID NO: 318668
uggcauuuaaggugugcau

SEQ ID NO: 580236 - RNA, 19 nt, Artificial Sequence
  Description of Artificial Sequence: Synthetic oligonucleotide
  Antisense strand to SEQ ID NO: 580235
augcacaccuuaaaugcca

SEQ ID NO: 580237 - RNA, 19 nt, Artificial Sequence
  Description of Artificial Sequence: Synthetic oligonucleotide
  Sense strand starting at position 3219 of SEQ ID NO: 318668
gcauuuaaggugugcauga

SEQ ID NO: 580238 - RNA, 19 nt, Artificial Sequence
  Description of Artificial Sequence: Synthetic oligonucleotide
  Antisense strand to SEQ ID NO: 580237
ucaugcacaccuuaaaugc

SEQ ID NO: 580239 - RNA, 19 nt, Artificial Sequence
  Description of Artificial Sequence: Synthetic oligonucleotide
  Sense strand starting at position 3224 of SEQ ID NO: 318668
uaaggugugcaugauaagu

SEQ ID NO: 580240 - RNA, 19 nt, Artificial Sequence
  Description of Artificial Sequence: Synthetic oligonucleotide
  Antisense strand to SEQ ID NO: 580239
acuuaucaugcacaccuua

SEQ ID NO: 580241 - RNA, 19 nt, Artificial Sequence
  Description of Artificial Sequence: Synthetic oligonucleotide
  Sense strand starting at position 3723 of SEQ ID NO: 318668
gugaaauccugucuugaaa

SEQ ID NO: 580242 - RNA, 19 nt, Artificial Sequence
  Description of Artificial Sequence: Synthetic oligonucleotide
  Antisense strand to SEQ ID NO: 580241
uuucaagacaggauuucac

SEQ ID NO: 580243 - RNA, 19 nt, Artificial Sequence
  Description of Artificial Sequence: Synthetic oligonucleotide
  Sense strand starting at position 384 of SEQ ID NO: 318669
gagggcacucgucgcgaaa

SEQ ID NO: 580244 - RNA, 19 nt, Artificial Sequence
  Description of Artificial Sequence: Synthetic oligonucleotide
  Antisense strand to SEQ ID NO: 580243
uuucgcgacgagugcccuc

SEQ ID NO: 580245 - RNA, 19 nt, Artificial Sequence
  Description of Artificial Sequence: Synthetic oligonucleotide
  Sense strand starting at position 538 of SEQ ID NO: 318669
gccuuuccuccggauagag

SEQ ID NO: 580246 - RNA, 19 nt, Artificial Sequence
  Description of Artificial Sequence: Synthetic oligonucleotide
  Antisense strand to SEQ ID NO: 580245
cucuauccggaggaaaggc

SEQ ID NO: 580247 - RNA, 19 nt, Artificial Sequence
  Description of Artificial Sequence: Synthetic oligonucleotide
  Sense strand starting at position 578 of SEQ ID NO: 318669
acagaaguguugucccaag

SEQ ID NO: 580248 - RNA, 19 nt, Artificial Sequence
  Description of Artificial Sequence: Synthetic oligonucleotide
  Antisense strand to SEQ ID NO: 580247
cuugggacaacacuucugu

SEQ ID NO: 580249 - RNA, 19 nt, Artificial Sequence
  Description of Artificial Sequence: Synthetic oligonucleotide
  Sense strand starting at position 715 of SEQ ID NO: 318669
uggcgucucccuggagaaa

SEQ ID NO: 580250 - RNA, 19 nt, Artificial Sequence
  Description of Artificial Sequence: Synthetic oligonucleotide
  Antisense strand to SEQ ID NO: 580249
uuucuccagggagacgcca

SEQ ID NO: 580251 - RNA, 19 nt, Artificial Sequence
  Description of Artificial Sequence: Synthetic oligonucleotide
  Sense strand starting at position 759 of SEQ ID NO: 318669
acccgauugcuacaagaga

SEQ ID NO: 580252 - RNA, 19 nt, Artificial Sequence
  Description of Artificial Sequence: Synthetic oligonucleotide
  Antisense strand to SEQ ID NO: 580251
ucucuuguagcaaucgggu

SEQ ID NO: 580253 - RNA, 19 nt, Artificial Sequence
  Description of Artificial Sequence: Synthetic oligonucleotide
  Sense strand starting at position 889 of SEQ ID NO: 318669
cuuuaaaggugcccugaaa

SEQ ID NO: 580254 - RNA, 19 nt, Artificial Sequence
  Description of Artificial Sequence: Synthetic oligonucleotide
  Antisense strand to SEQ ID NO: 580253
uuucagggcaccuuuaaag

SEQ ID NO: 580255 - RNA, 19 nt, Artificial Sequence
  Description of Artificial Sequence: Synthetic oligonucleotide
  Sense strand starting at position 931 of SEQ ID NO: 318669
uuccuaugucauugacaag

SEQ ID NO: 580256 - RNA, 19 nt, Artificial Sequence
  Description of Artificial Sequence: Synthetic oligonucleotide
  Antisense strand to SEQ ID NO: 580255
cuugucaaugacauaggaa

SEQ ID NO: 580257 - RNA, 19 nt, Artificial Sequence
  Description of Artificial Sequence: Synthetic oligonucleotide
  Sense strand starting at position 965 of SEQ ID NO: 318669
uuagauagugcugguuagu

SEQ ID NO: 580258 - RNA, 19 nt, Artificial Sequence
  Description of Artificial Sequence: Synthetic oligonucleotide
  Antisense strand to SEQ ID NO: 580257
acuaaccagcacuaucuaa

SEQ ID NO: 580259 - RNA, 19 nt, Artificial Sequence
  Description of Artificial Sequence: Synthetic oligonucleotide
  Sense strand starting at position 974 of SEQ ID NO: 318669
gcugguuagugcuugaaac

SEQ ID NO: 580260 - RNA, 19 nt, Artificial Sequence
  Description of Artificial Sequence: Synthetic oligonucleotide
  Antisense strand to SEQ ID NO: 580259
guuucaagcacuaaccagc

SEQ ID NO: 580261 - RNA, 19 nt, Artificial Sequence
  Description of Artificial Sequence: Synthetic oligonucleotide
  Sense strand starting at position 976 of SEQ ID NO: 318669
ugguuagugcuugaaacca

SEQ ID NO: 580262 - RNA, 19 nt, Artificial Sequence
  Description of Artificial Sequence: Synthetic oligonucleotide
  Antisense strand to SEQ ID NO: 580261
ugguuucaagcacuaacca

SEQ ID NO: 580263 - RNA, 19 nt, Artificial Sequence
  Description of Artificial Sequence: Synthetic oligonucleotide
  Sense strand starting at position 1060 of SEQ ID NO: 318669
uagcacuaugcuugugagu

SEQ ID NO: 580264 - RNA, 19 nt, Artificial Sequence
  Description of Artificial Sequence: Synthetic oligonucleotide
  Antisense strand to SEQ ID NO: 580263
acucacaagcauagugcua

SEQ ID NO: 580265 - RNA, 19 nt, Artificial Sequence
  Description of Artificial Sequence: Synthetic oligonucleotide
  Sense strand starting at position 1065 of SEQ ID NO: 318669
cuaugcuugugaguaauaa

SEQ ID NO: 580266 - RNA, 19 nt, Artificial Sequence
  Description of Artificial Sequence: Synthetic oligonucleotide
  Antisense strand to SEQ ID NO: 580265
uuauuacucacaagcauag

SEQ ID NO: 580267 - RNA, 19 nt, Artificial Sequence
  Description of Artificial Sequence: Synthetic oligonucleotide
  Sense strand starting at position 1066 of SEQ ID NO: 318669
uaugcuugugaguaauaau

SEQ ID NO: 580268 - RNA, 19 nt, Artificial Sequence
  Description of Artificial Sequence: Synthetic oligonucleotide
  Antisense strand to SEQ ID NO: 580267
auuauuacucacaagcaua

SEQ ID NO: 580269 - RNA, 19 nt, Artificial Sequence
  Description of Artificial Sequence: Synthetic oligonucleotide
  Sense strand starting at position 1129 of SEQ ID NO: 318669
ugcaaacucugucuagaaa

SEQ ID NO: 580270 - RNA, 19 nt, Artificial Sequence
  Description of Artificial Sequence: Synthetic oligonucleotide
  Antisense strand to SEQ ID NO: 580269
uuucuagacagaguuugca

SEQ ID NO: 580271 - RNA, 19 nt, Artificial Sequence
  Description of Artificial Sequence: Synthetic oligonucleotide
  Sense strand starting at position 1130 of SEQ ID NO: 318669
gcaaacucugucuagaaau

SEQ ID NO: 580272 - RNA, 19 nt, Artificial Sequence
  Description of Artificial Sequence: Synthetic oligonucleotide
  Antisense strand to SEQ ID NO: 580271
auuucuagacagaguuugc

SEQ ID NO: 580273 - RNA, 19 nt, Artificial Sequence
  Description of Artificial Sequence: Synthetic oligonucleotide
  Sense strand starting at position 1140 of SEQ ID NO: 318669
ucuagaaauuagguuaauc

SEQ ID NO: 580274 - RNA, 19 nt, Artificial Sequence
  Description of Artificial Sequence: Synthetic oligonucleotide
  Antisense strand to SEQ ID NO: 580273
gauuaaccuaauuucuaga

SEQ ID NO: 580275 - RNA, 19 nt, Artificial Sequence
  Description of Artificial Sequence: Synthetic oligonucleotide
  Sense strand starting at position 1166 of SEQ ID NO: 318669
ugauuacuacuguauguua

SEQ ID NO: 580276 - RNA, 19 nt, Artificial Sequence
  Description of Artificial Sequence: Synthetic oligonucleotide
  Antisense strand to SEQ ID NO: 580275
uaacauacaguaguaauca

SEQ ID NO: 580277 - RNA, 19 nt, Artificial Sequence
  Description of Artificial Sequence: Synthetic oligonucleotide
  Sense strand starting at position 1263 of SEQ ID NO: 318669
agcaucaauccuuagaguu

SEQ ID NO: 580278 - RNA, 19 nt, Artificial Sequence
  Description of Artificial Sequence: Synthetic oligonucleotide
  Antisense strand to SEQ ID NO: 580277
aacucuaaggauugaugcu

SEQ ID NO: 580279 - RNA, 19 nt, Artificial Sequence
  Description of Artificial Sequence: Synthetic oligonucleotide
  Sense strand starting at position 1341 of SEQ ID NO: 318669
acagcauagucagaguaac

SEQ ID NO: 580280 - RNA, 19 nt, Artificial Sequence
  Description of Artificial Sequence: Synthetic oligonucleotide
  Antisense strand to SEQ ID NO: 580279
guuacucugacuaugcugu

SEQ ID NO: 580281 - RNA, 19 nt, Artificial Sequence
  Description of Artificial Sequence: Synthetic oligonucleotide
  Sense strand starting at position 1373 of SEQ ID NO: 318669
auagacauccuuugacgca

SEQ ID NO: 580282 - RNA, 19 nt, Artificial Sequence
  Description of Artificial Sequence: Synthetic oligonucleotide
  Antisense strand to SEQ ID NO: 580281
ugcgucaaaggaugucuau

SEQ ID NO: 580283 - RNA, 19 nt, Artificial Sequence
  Description of Artificial Sequence: Synthetic oligonucleotide
  Sense strand starting at position 1392 of SEQ ID NO: 318669
uaacgcgcugucuaucaau

SEQ ID NO: 580284 - RNA, 19 nt, Artificial Sequence
  Description of Artificial Sequence: Synthetic oligonucleotide
  Antisense strand to SEQ ID NO: 580283
auugauagacagcgcguua

SEQ ID NO: 580285 - RNA, 19 nt, Artificial Sequence
  Description of Artificial Sequence: Synthetic oligonucleotide
  Sense strand starting at position 1437 of SEQ ID NO: 318669
cuuagaaugugccaauuuc

SEQ ID NO: 580286 - RNA, 19 nt, Artificial Sequence
  Description of Artificial Sequence: Synthetic oligonucleotide
  Antisense strand to SEQ ID NO: 580285
gaaauuggcacauucuaag

SEQ ID NO: 580287 - RNA, 19 nt, Artificial Sequence
  Description of Artificial Sequence: Synthetic oligonucleotide
  Sense strand starting at position 1444 of SEQ ID NO: 318669
ugugccaauuucuagauaa

SEQ ID NO: 580288 - RNA, 19 nt, Artificial Sequence
  Description of Artificial Sequence: Synthetic oligonucleotide
  Antisense strand to SEQ ID NO: 580287
uuaucuagaaauuggcaca

SEQ ID NO: 580289 - RNA, 19 nt, Artificial Sequence
  Description of Artificial Sequence: Synthetic oligonucleotide
  Sense strand starting at position 1492 of SEQ ID NO: 318669
uuguaagaauccuugacaa

SEQ ID NO: 580290 - RNA, 19 nt, Artificial Sequence
  Description of Artificial Sequence: Synthetic oligonucleotide
  Antisense strand to SEQ ID NO: 580289
uugucaaggauucuuacaa

SEQ ID NO: 580291 - RNA, 19 nt, Artificial Sequence
  Description of Artificial Sequence: Synthetic oligonucleotide
  Sense strand starting at position 1579 of SEQ ID NO: 318669
ugccgacuccucugaugaa

SEQ ID NO: 580292 - RNA, 19 nt, Artificial Sequence
  Description of Artificial Sequence: Synthetic oligonucleotide
  Antisense strand to SEQ ID NO: 580291
uucaucagaggagucggca

SEQ ID NO: 580293 - RNA, 19 nt, Artificial Sequence
  Description of Artificial Sequence: Synthetic oligonucleotide
  Sense strand starting at position 1986 of SEQ ID NO: 318669
agagcuuucuggcugcacu

SEQ ID NO: 580294 - RNA, 19 nt, Artificial Sequence
  Description of Artificial Sequence: Synthetic oligonucleotide
  Antisense strand to SEQ ID NO: 580293
agugcagccagaaagcucu

SEQ ID NO: 580295 - RNA, 19 nt, Artificial Sequence
  Description of Artificial Sequence: Synthetic oligonucleotide
  Sense strand starting at position 1987 of SEQ ID NO: 318669
gagcuuucuggcugcacua

SEQ ID NO: 580296 - RNA, 19 nt, Artificial Sequence
  Description of Artificial Sequence: Synthetic oligonucleotide
  Antisense strand to SEQ ID NO: 580295
uagugcagccagaaagcuc

SEQ ID NO: 580297 - RNA, 19 nt, Artificial Sequence
  Description of Artificial Sequence: Synthetic oligonucleotide
  Sense strand starting at position 1989 of SEQ ID NO: 318669
gcuuucuggcugcacuaua

SEQ ID NO: 580298 - RNA, 19 nt, Artificial Sequence
  Description of Artificial Sequence: Synthetic oligonucleotide
  Antisense strand to SEQ ID NO: 580297
uauagugcagccagaaagc

SEQ ID NO: 580299 - RNA, 19 nt, Artificial Sequence
  Description of Artificial Sequence: Synthetic oligonucleotide
  Sense strand starting at position 2086 of SEQ ID NO: 318669
cugaauugaugaugugaaa

SEQ ID NO: 580300 - RNA, 19 nt, Artificial Sequence
  Description of Artificial Sequence: Synthetic oligonucleotide
  Antisense strand to SEQ ID NO: 580299
uuucacaucaucaauucag

SEQ ID NO: 580301 - RNA, 19 nt, Artificial Sequence
  Description of Artificial Sequence: Synthetic oligonucleotide
  Sense strand starting at position 2089 of SEQ ID NO: 318669
aauugaugaugugaaagga

SEQ ID NO: 580302 - RNA, 19 nt, Artificial Sequence
  Description of Artificial Sequence: Synthetic oligonucleotide
  Antisense strand to SEQ ID NO: 580301
uccuuucacaucaucaauu

SEQ ID NO: 580303 - RNA, 19 nt, Artificial Sequence
  Description of Artificial Sequence: Synthetic oligonucleotide
  Sense strand starting at position 2123 of SEQ ID NO: 318669
agcuaaaucuauggaauuu

SEQ ID NO: 580304 - RNA, 19 nt, Artificial Sequence
  Description of Artificial Sequence: Synthetic oligonucleotide
  Antisense strand to SEQ ID NO: 580303
aaauuccauagauuuagcu

SEQ ID NO: 580305 - RNA, 19 nt, Artificial Sequence
  Description of Artificial Sequence: Synthetic oligonucleotide
  Sense strand starting at position 2147 of SEQ ID NO: 318669
ucaguaaagucaucaggaa

SEQ ID NO: 580306 - RNA, 19 nt, Artificial Sequence
  Description of Artificial Sequence: Synthetic oligonucleotide
  Antisense strand to SEQ ID NO: 580305
uuccugaugacuuuacuga

SEQ ID NO: 580307 - RNA, 19 nt, Artificial Sequence
  Description of Artificial Sequence: Synthetic oligonucleotide
  Sense strand starting at position 3621 of SEQ ID NO: 318669
ucaccaacuucucagggua

SEQ ID NO: 580308 - RNA, 19 nt, Artificial Sequence
  Description of Artificial Sequence: Synthetic oligonucleotide
  Antisense strand to SEQ ID NO: 580307
uacccugagaaguugguga

SEQ ID NO: 580309 - RNA, 19 nt, Artificial Sequence
  Description of Artificial Sequence: Synthetic oligonucleotide
  Sense strand starting at position 3633 of SEQ ID NO: 318669
caggguauugugggaugau

SEQ ID NO: 580310 - RNA, 19 nt, Artificial Sequence
  Description of Artificial Sequence: Synthetic oligonucleotide
  Antisense strand to SEQ ID NO: 580309
aucaucccacaauacccug

SEQ ID NO: 580311 - RNA, 19 nt, Artificial Sequence
  Description of Artificial Sequence: Synthetic oligonucleotide
  Sense strand starting at position 3634 of SEQ ID NO: 318669
aggguauugugggaugaug

SEQ ID NO: 580312 - RNA, 19 nt, Artificial Sequence
  Description of Artificial Sequence: Synthetic oligonucleotide
  Antisense strand to SEQ ID NO: 580311
caucaucccacaauacccu

SEQ ID NO: 580313 - RNA, 19 nt, Artificial Sequence
  Description of Artificial Sequence: Synthetic oligonucleotide
  Sense strand starting at position 3684 of SEQ ID NO: 318669
agauuauucuggucggcag

SEQ ID NO: 580314 - RNA, 19 nt, Artificial Sequence
  Description of Artificial Sequence: Synthetic oligonucleotide
  Antisense strand to SEQ ID NO: 580313
cugccgaccagaauaaucu

SEQ ID NO: 580315 - RNA, 19 nt, Artificial Sequence
  Description of Artificial Sequence: Synthetic oligonucleotide
  Sense strand starting at position 3702 of SEQ ID NO: 318669
gcuggacauuauuauauag

SEQ ID NO: 580316 - RNA, 19 nt, Artificial Sequence
  Description of Artificial Sequence: Synthetic oligonucleotide
  Antisense strand to SEQ ID NO: 580315
cuauauaauaauguccagc

SEQ ID NO: 580317 - RNA, 19 nt, Artificial Sequence
  Description of Artificial Sequence: Synthetic oligonucleotide
  Sense strand starting at position 3709 of SEQ ID NO: 318669
auuauuauauaggcagaca

SEQ ID NO: 580318 - RNA, 19 nt, Artificial Sequence
  Description of Artificial Sequence: Synthetic oligonucleotide
  Antisense strand to SEQ ID NO: 580317
ugucugccuauauaauaau

SEQ ID NO: 580319 - RNA, 19 nt, Artificial Sequence
  Description of Artificial Sequence: Synthetic oligonucleotide
  Sense strand starting at position 3947 of SEQ ID NO: 318669
ugcauucuucuggagguau

SEQ ID NO: 580320 - RNA, 19 nt, Artificial Sequence
  Description of Artificial Sequence: Synthetic oligonucleotide
  Antisense strand to SEQ ID NO: 580319
auaccuccagaagaaugca

SEQ ID NO: 580321 - RNA, 19 nt, Artificial Sequence
  Description of Artificial Sequence: Synthetic oligonucleotide
  Sense strand starting at position 3949 of SEQ ID NO: 318669
cauucuucuggagguauaa

SEQ ID NO: 580322 - RNA, 19 nt, Artificial Sequence
  Description of Artificial Sequence: Synthetic oligonucleotide
  Antisense strand to SEQ ID NO: 580321
uuauaccuccagaagaaug

SEQ ID NO: 580323 - RNA, 19 nt, Artificial Sequence
  Description of Artificial Sequence: Synthetic oligonucleotide
  Sense strand starting at position 1 of SEQ ID NO: 318670
cugaauuaccuuugaguag

SEQ ID NO: 580324 - RNA, 19 nt, Artificial Sequence
  Description of Artificial Sequence: Synthetic oligonucleotide
  Antisense strand to SEQ ID NO: 580323
cuacucaaagguaauucag

SEQ ID NO: 580325 - RNA, 19 nt, Artificial Sequence
  Description of Artificial Sequence: Synthetic oligonucleotide
  Sense strand starting at position 5 of SEQ ID NO: 318670
auuaccuuugaguaguaca

SEQ ID NO: 580326 - RNA, 19 nt, Artificial Sequence
  Description of Artificial Sequence: Synthetic oligonucleotide
  Antisense strand to SEQ ID NO: 580325
uguacuacucaaagguaau

SEQ ID NO: 580327 - RNA, 19 nt, Artificial Sequence
  Description of Artificial Sequence: Synthetic oligonucleotide
  Sense strand starting at position 35 of SEQ ID NO: 318670
agacacaugguaugcaaau

SEQ ID NO: 580328 - RNA, 19 nt, Artificial Sequence
  Description of Artificial Sequence: Synthetic oligonucleotide
  Antisense strand to SEQ ID NO: 580327
auuugcauaccaugugucu

SEQ ID NO: 580329 - RNA, 19 nt, Artificial Sequence
  Description of Artificial Sequence: Synthetic oligonucleotide
  Sense strand starting at position 36 of SEQ ID NO: 318670
gacacaugguaugcaaauu

SEQ ID NO: 580330 - RNA, 19 nt, Artificial Sequence
  Description of Artificial Sequence: Synthetic oligonucleotide
  Antisense strand to SEQ ID NO: 580329
aauuugcauaccauguguc

SEQ ID NO: 580331 - RNA, 19 nt, Artificial Sequence
  Description of Artificial Sequence: Synthetic oligonucleotide
  Sense strand starting at position 65 of SEQ ID NO: 318670
caggguuauuaagcacaaa

SEQ ID NO: 580332 - RNA, 19 nt, Artificial Sequence
  Description of Artificial Sequence: Synthetic oligonucleotide
  Antisense strand to SEQ ID NO: 580331
uuugugcuuaauaacccug

SEQ ID NO: 580333 - RNA, 19 nt, Artificial Sequence
  Description of Artificial Sequence: Synthetic oligonucleotide
  Sense strand starting at position 68 of SEQ ID NO: 318670
gguuauuaagcacaaaucu

SEQ ID NO: 580334 - RNA, 19 nt, Artificial Sequence
  Description of Artificial Sequence: Synthetic oligonucleotide
  Antisense strand to SEQ ID NO: 580333
agauuugugcuuaauaacc

SEQ ID NO: 580335 - RNA, 19 nt, Artificial Sequence
  Description of Artificial Sequence: Synthetic oligonucleotide
  Sense strand starting at position 178 of SEQ ID NO: 318670
cucacaugcuguccaagaa

SEQ ID NO: 580336 - RNA, 19 nt, Artificial Sequence
  Description of Artificial Sequence: Synthetic oligonucleotide
  Antisense strand to SEQ ID NO: 580335
uucuuggacagcaugugag

SEQ ID NO: 580337 - RNA, 19 nt, Artificial Sequence
  Description of Artificial Sequence: Synthetic oligonucleotide
  Sense strand starting at position 190 of SEQ ID NO: 318670
ccaagaacuugaucuagcu

SEQ ID NO: 580338 - RNA, 19 nt, Artificial Sequence
  Description of Artificial Sequence: Synthetic oligonucleotide
  Antisense strand to SEQ ID NO: 580337
agcuagaucaaguucuugg

SEQ ID NO: 580339 - RNA, 19 nt, Artificial Sequence
  Description of Artificial Sequence: Synthetic oligonucleotide
  Sense strand starting at position 215 of SEQ ID NO: 318670
uugugcucuuauuuaaaug

SEQ ID NO: 580340 - RNA, 19 nt, Artificial Sequence
  Description of Artificial Sequence: Synthetic oligonucleotide
  Antisense strand to SEQ ID NO: 580339
cauuuaaauaagagcacaa

SEQ ID NO: 580341 - RNA, 19 nt, Artificial Sequence
  Description of Artificial Sequence: Synthetic oligonucleotide
  Sense strand starting at position 296 of SEQ ID NO: 318670
auagguuucccauauggcu

SEQ ID NO: 580342 - RNA, 19 nt, Artificial Sequence
  Description of Artificial Sequence: Synthetic oligonucleotide
  Antisense strand to SEQ ID NO: 580341
agccauaugggaaaccuau

SEQ ID NO: 580343 - RNA, 19 nt, Artificial Sequence
  Description of Artificial Sequence: Synthetic oligonucleotide
  Sense strand starting at position 319 of SEQ ID NO: 318670
gguauugaguuucuaauuc

SEQ ID NO: 580344 - RNA, 19 nt, Artificial Sequence
  Description of Artificial Sequence: Synthetic oligonucleotide
  Antisense strand to SEQ ID NO: 580343
gaauuagaaacucaauacc

SEQ ID NO: 580345 - RNA, 19 nt, Artificial Sequence
  Description of Artificial Sequence: Synthetic oligonucleotide
  Sense strand starting at position 812 of SEQ ID NO: 318670
ccucuacuugcugacugaa

SEQ ID NO: 580346 - RNA, 19 nt, Artificial Sequence
  Description of Artificial Sequence: Synthetic oligonucleotide
  Antisense strand to SEQ ID NO: 580345
uucagucagcaaguagagg

SEQ ID NO: 580347 - RNA, 19 nt, Artificial Sequence
  Description of Artificial Sequence: Synthetic oligonucleotide
  Sense strand starting at position 815 of SEQ ID NO: 318670
cuacuugcugacugaaaua

SEQ ID NO: 580348 - RNA, 19 nt, Artificial Sequence
  Description of Artificial Sequence: Synthetic oligonucleotide
  Antisense strand to SEQ ID NO: 580347
uauuucagucagcaaguag

SEQ ID NO: 580349 - RNA, 19 nt, Artificial Sequence
  Description of Artificial Sequence: Synthetic oligonucleotide
  Sense strand starting at position 874 of SEQ ID NO: 318670
gcauuuacauguguugacu

SEQ ID NO: 580350 - RNA, 19 nt, Artificial Sequence
  Description of Artificial Sequence: Synthetic oligonucleotide
  Antisense strand to SEQ ID NO: 580349
agucaacacauguaaaugc

SEQ ID NO: 580351 - RNA, 19 nt, Artificial Sequence
  Description of Artificial Sequence: Synthetic oligonucleotide
  Sense strand starting at position 1250 of SEQ ID NO: 318670
agagguguugcucaaacuu

SEQ ID NO: 580352 - RNA, 19 nt, Artificial Sequence
  Description of Artificial Sequence: Synthetic oligonucleotide
  Antisense strand to SEQ ID NO: 580351
aaguuugagcaacaccucu

SEQ ID NO: 580353 - RNA, 19 nt, Artificial Sequence
  Description of Artificial Sequence: Synthetic oligonucleotide
  Sense strand starting at position 1277 of SEQ ID NO: 318670
acaagaaucucuuaaggag

SEQ ID NO: 580354 - RNA, 19 nt, Artificial Sequence
  Description of Artificial Sequence: Synthetic oligonucleotide
  Antisense strand to SEQ ID NO: 580353
cuccuuaagagauucuugu

SEQ ID NO: 580355 - RNA, 19 nt, Artificial Sequence
  Description of Artificial Sequence: Synthetic oligonucleotide
  Sense strand starting at position 1330 of SEQ ID NO: 318670
gguugaguaccugggaauu

SEQ ID NO: 580356 - RNA, 19 nt, Artificial Sequence
  Description of Artificial Sequence: Synthetic oligonucleotide
  Antisense strand to SEQ ID NO: 580355
aauucccagguacucaacc

SEQ ID NO: 580357 - RNA, 19 nt, Artificial Sequence
  Description of Artificial Sequence: Synthetic oligonucleotide
  Sense strand starting at position 1425 of SEQ ID NO: 318670
gaaacauugcccuaagguu

SEQ ID NO: 580358 - RNA, 19 nt, Artificial Sequence
  Description of Artificial Sequence: Synthetic oligonucleotide
  Antisense strand to SEQ ID NO: 580357
aaccuuagggcaauguuuc

SEQ ID NO: 580359 - RNA, 19 nt, Artificial Sequence
  Description of Artificial Sequence: Synthetic oligonucleotide
  Sense strand starting at position 1468 of SEQ ID NO: 318670
guaucagaaccguagaaau

SEQ ID NO: 580360 - RNA, 19 nt, Artificial Sequence
  Description of Artificial Sequence: Synthetic oligonucleotide
  Antisense strand to SEQ ID NO: 580359
auuucuacgguucugauac

SEQ ID NO: 580361 - RNA, 19 nt, Artificial Sequence
  Description of Artificial Sequence: Synthetic oligonucleotide
  Sense strand starting at position 1478 of SEQ ID NO: 318670
cguagaaauaggugaguuu

SEQ ID NO: 580362 - RNA, 19 nt, Artificial Sequence
  Description of Artificial Sequence: Synthetic oligonucleotide
  Antisense strand to SEQ ID NO: 580361
aaacucaccuauuucuacg

SEQ ID NO: 580363 - RNA, 19 nt, Artificial Sequence
  Description of Artificial Sequence: Synthetic oligonucleotide
  Sense strand starting at position 1481 of SEQ ID NO: 318670
agaaauaggugaguuugau

SEQ ID NO: 580364 - RNA, 19 nt, Artificial Sequence
  Description of Artificial Sequence: Synthetic oligonucleotide
  Antisense strand to SEQ ID NO: 580363
aucaaacucaccuauuucu

SEQ ID NO: 580365 - RNA, 19 nt, Artificial Sequence
  Description of Artificial Sequence: Synthetic oligonucleotide
  Sense strand starting at position 1494 of SEQ ID NO: 318670
uuugauuccggguaucaac

SEQ ID NO: 580366 - RNA, 19 nt, Artificial Sequence
  Description of Artificial Sequence: Synthetic oligonucleotide
  Antisense strand to SEQ ID NO: 580365
guugauacccggaaucaaa

SEQ ID NO: 580367 - RNA, 19 nt, Artificial Sequence
  Description of Artificial Sequence: Synthetic oligonucleotide
  Sense strand starting at position 1547 of SEQ ID NO: 318670
gcucguuugcucuucgaaa

SEQ ID NO: 580368 - RNA, 19 nt, Artificial Sequence
  Description of Artificial Sequence: Synthetic oligonucleotide
  Antisense strand to SEQ ID NO: 580367
uuucgaagagcaaacgagc

SEQ ID NO: 580369 - RNA, 19 nt, Artificial Sequence
  Description of Artificial Sequence: Synthetic oligonucleotide
  Sense strand starting at position 2160 of SEQ ID NO: 318670
gccuuuccuccggauagag

SEQ ID NO: 580370 - RNA, 19 nt, Artificial Sequence
  Description of Artificial Sequence: Synthetic oligonucleotide
  Antisense strand to SEQ ID NO: 580369
cucuauccggaggaaaggc

SEQ ID NO: 580371 - RNA, 19 nt, Artificial Sequence
  Description of Artificial Sequence: Synthetic oligonucleotide
  Sense strand starting at position 2200 of SEQ ID NO: 318670
acagaaguguugucccaag

SEQ ID NO: 580372 - RNA, 19 nt, Artificial Sequence
  Description of Artificial Sequence: Synthetic oligonucleotide
  Antisense strand to SEQ ID NO: 580371
cuugggacaacacuucugu

SEQ ID NO: 580373 - RNA, 19 nt, Artificial Sequence
  Description of Artificial Sequence: Synthetic oligonucleotide
  Sense strand starting at position 2381 of SEQ ID NO: 318670
acccgauugcuacaagaga

SEQ ID NO: 580374 - RNA, 19 nt, Artificial Sequence
  Description of Artificial Sequence: Synthetic oligonucleotide
  Antisense strand to SEQ ID NO: 580373
ucucuuguagcaaucgggu

SEQ ID NO: 580375 - RNA, 19 nt, Artificial Sequence
  Description of Artificial Sequence: Synthetic oligonucleotide
  Sense strand starting at position 2511 of SEQ ID NO: 318670
cuuuaaaggugcccugaaa

SEQ ID NO: 580376 - RNA, 19 nt, Artificial Sequence
  Description of Artificial Sequence: Synthetic oligonucleotide
  Antisense strand to SEQ ID NO: 580375
uuucagggcaccuuuaaag

SEQ ID NO: 580377 - RNA, 19 nt, Artificial Sequence
  Description of Artificial Sequence: Synthetic oligonucleotide
  Sense strand starting at position 2553 of SEQ ID NO: 318670
uuccuaugucauugacaag

SEQ ID NO: 580378 - RNA, 19 nt, Artificial Sequence
  Description of Artificial Sequence: Synthetic oligonucleotide
  Antisense strand to SEQ ID NO: 580377
cuugucaaugacauaggaa

SEQ ID NO: 580379 - RNA, 19 nt, Artificial Sequence
  Description of Artificial Sequence: Synthetic oligonucleotide
  Sense strand starting at position 2598 of SEQ ID NO: 318670
ugguuagugcuugaaacca

SEQ ID NO: 580380 - RNA, 19 nt, Artificial Sequence
  Description of Artificial Sequence: Synthetic oligonucleotide
  Antisense strand to SEQ ID NO: 580379
ugguuucaagcacuaacca

SEQ ID NO: 580381 - RNA, 19 nt, Artificial Sequence
  Description of Artificial Sequence: Synthetic oligonucleotide
  Sense strand starting at position 2687 of SEQ ID NO: 318670
cuaugcuugugaguaauaa

SEQ ID NO: 580382 - RNA, 19 nt, Artificial Sequence
  Description of Artificial Sequence: Synthetic oligonucleotide
  Antisense strand to SEQ ID NO: 580381
uuauuacucacaagcauag

SEQ ID NO: 580383 - RNA, 19 nt, Artificial Sequence
  Description of Artificial Sequence: Synthetic oligonucleotide
  Sense strand starting at position 2688 of SEQ ID NO: 318670
uaugcuugugaguaauaau

SEQ ID NO: 580384 - RNA, 19 nt, Artificial Sequence
  Description of Artificial Sequence: Synthetic oligonucleotide
  Antisense strand to SEQ ID NO: 580383
auuauuacucacaagcaua

SEQ ID NO: 580385 - RNA, 19 nt, Artificial Sequence
  Description of Artificial Sequence: Synthetic oligonucleotide
  Sense strand starting at position 2751 of SEQ ID NO: 318670
ugcaaacucugucuagaaa

SEQ ID NO: 580386 - RNA, 19 nt, Artificial Sequence
  Description of Artificial Sequence: Synthetic oligonucleotide
  Antisense strand to SEQ ID NO: 580385
uuucuagacagaguuugca

SEQ ID NO: 580387 - RNA, 19 nt, Artificial Sequence
  Description of Artificial Sequence: Synthetic oligonucleotide
  Sense strand starting at position 2752 of SEQ ID NO: 318670
gcaaacucugucuagaaau

SEQ ID NO: 580388 - RNA, 19 nt, Artificial Sequence
  Description of Artificial Sequence: Synthetic oligonucleotide
  Antisense strand to SEQ ID NO: 580387
auuucuagacagaguuugc

SEQ ID NO: 580389 - RNA, 19 nt, Artificial Sequence
  Description of Artificial Sequence: Synthetic oligonucleotide
  Sense strand starting at position 2762 of SEQ ID NO: 318670
ucuagaaauuagguuaauc

SEQ ID NO: 580390 - RNA, 19 nt, Artificial Sequence
  Description of Artificial Sequence: Synthetic oligonucleotide
  Antisense strand to SEQ ID NO: 580389
gauuaaccuaauuucuaga

SEQ ID NO: 580391 - RNA, 19 nt, Artificial Sequence
  Description of Artificial Sequence: Synthetic oligonucleotide
  Sense strand starting at position 2788 of SEQ ID NO: 318670
ugauuacuacuguauguua

SEQ ID NO: 580392 - RNA, 19 nt, Artificial Sequence
  Description of Artificial Sequence: Synthetic oligonucleotide
  Antisense strand to SEQ ID NO: 580391
uaacauacaguaguaauca

SEQ ID NO: 580393 - RNA, 19 nt, Artificial Sequence
  Description of Artificial Sequence: Synthetic oligonucleotide
  Sense strand starting at position 2885 of SEQ ID NO: 318670
agcaucaauccuuagaguu

SEQ ID NO: 580394 - RNA, 19 nt, Artificial Sequence
  Description of Artificial Sequence: Synthetic oligonucleotide
  Antisense strand to SEQ ID NO: 580393
aacucuaaggauugaugcu

SEQ ID NO: 580395 - RNA, 19 nt, Artificial Sequence
  Description of Artificial Sequence: Synthetic oligonucleotide
  Sense strand starting at position 2995 of SEQ ID NO: 318670
auagacauccuuugacgca

SEQ ID NO: 580396 - RNA, 19 nt, Artificial Sequence
  Description of Artificial Sequence: Synthetic oligonucleotide
  Antisense strand to SEQ ID NO: 580395
ugcgucaaaggaugucuau

SEQ ID NO: 580397 - RNA, 19 nt, Artificial Sequence
  Description of Artificial Sequence: Synthetic oligonucleotide
  Sense strand starting at position 3114 of SEQ ID NO: 318670
uuguaagaauccuugacaa

SEQ ID NO: 580398 - RNA, 19 nt, Artificial Sequence
  Description of Artificial Sequence: Synthetic oligonucleotide
  Antisense strand to SEQ ID NO: 580397
uugucaaggauucuuacaa

SEQ ID NO: 580399 - RNA, 19 nt, Artificial Sequence
  Description of Artificial Sequence: Synthetic oligonucleotide
  Sense strand starting at position 3201 of SEQ ID NO: 318670
ugccgacuccucugaugaa

SEQ ID NO: 580400 - RNA, 19 nt, Artificial Sequence
  Description of Artificial Sequence: Synthetic oligonucleotide
  Antisense strand to SEQ ID NO: 580399
uucaucagaggagucggca

SEQ ID NO: 580401 - RNA, 19 nt, Artificial Sequence
  Description of Artificial Sequence: Synthetic oligonucleotide
  Sense strand starting at position 3769 of SEQ ID NO: 318670
ucaguaaagucaucaggaa

SEQ ID NO: 580402 - RNA, 19 nt, Artificial Sequence
  Description of Artificial Sequence: Synthetic oligonucleotide
  Antisense strand to SEQ ID NO: 580401
uuccugaugacuuuacuga

SEQ ID NO: 580403 - RNA, 19 nt, Artificial Sequence
  Description of Artificial Sequence: Synthetic oligonucleotide
  Sense strand starting at position 4 of SEQ ID NO: 318671
cagggucugccugacauua

SEQ ID NO: 580404 - RNA, 19 nt, Artificial Sequence
  Description of Artificial Sequence: Synthetic oligonucleotide
  Antisense strand to SEQ ID NO: 580403
uaaugucaggcagacccug

SEQ ID NO: 580405 - RNA, 19 nt, Artificial Sequence
  Description of Artificial Sequence: Synthetic oligonucleotide
  Sense strand starting at position 6 of SEQ ID NO: 318671
gggucugccugacauuaaa

SEQ ID NO: 580406 - RNA, 19 nt, Artificial Sequence
  Description of Artificial Sequence: Synthetic oligonucleotide
  Antisense strand to SEQ ID NO: 580405
uuuaaugucaggcagaccc

SEQ ID NO: 580407 - RNA, 19 nt, Artificial Sequence
  Description of Artificial Sequence: Synthetic oligonucleotide
  Sense strand starting at position 256 of SEQ ID NO: 318671
gcaagcggucuccagaaca

SEQ ID NO: 580408 - RNA, 19 nt, Artificial Sequence
  Description of Artificial Sequence: Synthetic oligonucleotide
  Antisense strand to SEQ ID NO: 580407
uguucuggagaccgcuugc

SEQ ID NO: 580409 - RNA, 19 nt, Artificial Sequence
  Description of Artificial Sequence: Synthetic oligonucleotide
  Sense strand starting at position 385 of SEQ ID NO: 318671
cucgguauuugagguuacu

SEQ ID NO: 580410 - RNA, 19 nt, Artificial Sequence
  Description of Artificial Sequence: Synthetic oligonucleotide
  Antisense strand to SEQ ID NO: 580409
aguaaccucaaauaccgag

SEQ ID NO: 580411 - RNA, 19 nt, Artificial Sequence
  Description of Artificial Sequence: Synthetic oligonucleotide
  Sense strand starting at position 395 of SEQ ID NO: 318671
gagguuacuucugcucaca

SEQ ID NO: 580412 - RNA, 19 nt, Artificial Sequence
  Description of Artificial Sequence: Synthetic oligonucleotide
  Antisense strand to SEQ ID NO: 580411
ugugagcagaaguaaccuc

SEQ ID NO: 580413 - RNA, 19 nt, Artificial Sequence
  Description of Artificial Sequence: Synthetic oligonucleotide
  Sense strand starting at position 463 of SEQ ID NO: 318671
guacuuucuggcuguguga

SEQ ID NO: 580414 - RNA, 19 nt, Artificial Sequence
  Description of Artificial Sequence: Synthetic oligonucleotide
  Antisense strand to SEQ ID NO: 580413
ucacacagccagaaaguac

SEQ ID NO: 580415 - RNA, 19 nt, Artificial Sequence
  Description of Artificial Sequence: Synthetic oligonucleotide
  Sense strand starting at position 484 of SEQ ID NO: 318671
cuagguaagugacuuaauu

SEQ ID NO: 580416 - RNA, 19 nt, Artificial Sequence
  Description of Artificial Sequence: Synthetic oligonucleotide
  Antisense strand to SEQ ID NO: 580415
aauuaagucacuuaccuag

SEQ ID NO: 580417 - RNA, 19 nt, Artificial Sequence
  Description of Artificial Sequence: Synthetic oligonucleotide
  Sense strand starting at position 496 of SEQ ID NO: 318671
cuuaauuucucugugucua

SEQ ID NO: 580418 - RNA, 19 nt, Artificial Sequence
  Description of Artificial Sequence: Synthetic oligonucleotide
  Antisense strand to SEQ ID NO: 580417
uagacacagagaaauuaag

SEQ ID NO: 580419 - RNA, 19 nt, Artificial Sequence
  Description of Artificial Sequence: Synthetic oligonucleotide
  Sense strand starting at position 550 of SEQ ID NO: 318671
uaaggcaguugugagaaua

SEQ ID NO: 580420 - RNA, 19 nt, Artificial Sequence
  Description of Artificial Sequence: Synthetic oligonucleotide
  Antisense strand to SEQ ID NO: 580419
uauucucacaacugccuua

SEQ ID NO: 580421 - RNA, 19 nt, Artificial Sequence
  Description of Artificial Sequence: Synthetic oligonucleotide
  Sense strand starting at position 608 of SEQ ID NO: 318671
caggcagauucuuuaucgu

SEQ ID NO: 580422 - RNA, 19 nt, Artificial Sequence
  Description of Artificial Sequence: Synthetic oligonucleotide
  Antisense strand to SEQ ID NO: 580421
acgauaaagaaucugccug

SEQ ID NO: 580423 - RNA, 19 nt, Artificial Sequence
  Description of Artificial Sequence: Synthetic oligonucleotide
  Sense strand starting at position 711 of SEQ ID NO: 318671
uucugacuucuuugccagu

SEQ ID NO: 580424 - RNA, 19 nt, Artificial Sequence
  Description of Artificial Sequence: Synthetic oligonucleotide
  Antisense strand to SEQ ID NO: 580423
acuggcaaagaagucagaa

SEQ ID NO: 580425 - RNA, 19 nt, Artificial Sequence
  Description of Artificial Sequence: Synthetic oligonucleotide
  Sense strand starting at position 791 of SEQ ID NO: 318671
accagugagcucggugaca

SEQ ID NO: 580426 - RNA, 19 nt, Artificial Sequence
  Description of Artificial Sequence: Synthetic oligonucleotide
  Antisense strand to SEQ ID NO: 580425
ugucaccgagcucacuggu

SEQ ID NO: 580427 - RNA, 19 nt, Artificial Sequence
  Description of Artificial Sequence: Synthetic oligonucleotide
  Sense strand starting at position 827 of SEQ ID NO: 318671
gccacugagucuugcugaa

SEQ ID NO: 580428 - RNA, 19 nt, Artificial Sequence
  Description of Artificial Sequence: Synthetic oligonucleotide
  Antisense strand to SEQ ID NO: 580427
uucagcaagacucaguggc

SEQ ID NO: 580429 - RNA, 19 nt, Artificial Sequence
  Description of Artificial Sequence: Synthetic oligonucleotide
  Sense strand starting at position 829 of SEQ ID NO: 318671
cacugagucuugcugaaca

SEQ ID NO: 580430 - RNA, 19 nt, Artificial Sequence
  Description of Artificial Sequence: Synthetic oligonucleotide
  Antisense strand to SEQ ID NO: 580429
uguucagcaagacucagug

SEQ ID NO: 580431 - RNA, 19 nt, Artificial Sequence
  Description of Artificial Sequence: Synthetic oligonucleotide
  Sense strand starting at position 831 of SEQ ID NO: 318671
cugagucuugcugaacaca

SEQ ID NO: 580432 - RNA, 19 nt, Artificial Sequence
  Description of Artificial Sequence: Synthetic oligonucleotide
  Antisense strand to SEQ ID NO: 580431
uguguucagcaagacucag

SEQ ID NO: 580433 - RNA, 19 nt, Artificial Sequence
  Description of Artificial Sequence: Synthetic oligonucleotide
  Sense strand starting at position 1022 of SEQ ID NO: 318671
cagcuugucagcuguggaa

SEQ ID NO: 580434 - RNA, 19 nt, Artificial Sequence
  Description of Artificial Sequence: Synthetic oligonucleotide
  Antisense strand to SEQ ID NO: 580433
uuccacagcugacaagcug

SEQ ID NO: 580435 - RNA, 19 nt, Artificial Sequence
  Description of Artificial Sequence: Synthetic oligonucleotide
  Sense strand starting at position 1024 of SEQ ID NO: 318671
gcuugucagcuguggaaug

SEQ ID NO: 580436 - RNA, 19 nt, Artificial Sequence
  Description of Artificial Sequence: Synthetic oligonucleotide
  Antisense strand to SEQ ID NO: 580435
cauuccacagcugacaagc

SEQ ID NO: 580437 - RNA, 19 nt, Artificial Sequence
  Description of Artificial Sequence: Synthetic oligonucleotide
  Sense strand starting at position 1029 of SEQ ID NO: 318671
ucagcuguggaauguugaa

SEQ ID NO: 580438 - RNA, 19 nt, Artificial Sequence
  Description of Artificial Sequence: Synthetic oligonucleotide
  Antisense strand to SEQ ID NO: 580437
uucaacauuccacagcuga

SEQ ID NO: 580439 - RNA, 19 nt, Artificial Sequence
  Description of Artificial Sequence: Synthetic oligonucleotide
  Sense strand starting at position 1439 of SEQ ID NO: 318671
gggauuauuuagggagacu

SEQ ID NO: 580440 - RNA, 19 nt, Artificial Sequence
  Description of Artificial Sequence: Synthetic oligonucleotide
  Antisense strand to SEQ ID NO: 580439
agucucccuaaauaauccc

SEQ ID NO: 580441 - RNA, 19 nt, Artificial Sequence
  Description of Artificial Sequence: Synthetic oligonucleotide
  Sense strand starting at position 2366 of SEQ ID NO: 318671
gcugguccggauugaguuu

SEQ ID NO: 580442 - RNA, 19 nt, Artificial Sequence
  Description of Artificial Sequence: Synthetic oligonucleotide
  Antisense strand to SEQ ID NO: 580441
aaacucaauccggaccagc

SEQ ID NO: 580443 - RNA, 19 nt, Artificial Sequence
  Description of Artificial Sequence: Synthetic oligonucleotide
  Sense strand starting at position 2633 of SEQ ID NO: 318671
gguacccagugaucucaca

SEQ ID NO: 580444 - RNA, 19 nt, Artificial Sequence
  Description of Artificial Sequence: Synthetic oligonucleotide
  Antisense strand to SEQ ID NO: 580443
ugugagaucacuggguacc

SEQ ID NO: 580445 - RNA, 19 nt, Artificial Sequence
  Description of Artificial Sequence: Synthetic oligonucleotide
  Sense strand starting at position 3561 of SEQ ID NO: 318671
uagucaucagaggguccua

SEQ ID NO: 580446 - RNA, 19 nt, Artificial Sequence
  Description of Artificial Sequence: Synthetic oligonucleotide
  Antisense strand to SEQ ID NO: 580445
uaggacccucugaugacua

SEQ ID NO: 580447 - RNA, 19 nt, Artificial Sequence
  Description of Artificial Sequence: Synthetic oligonucleotide
  Sense strand starting at position 3566 of SEQ ID NO: 318671
aucagaggguccuagagau

SEQ ID NO: 580448 - RNA, 19 nt, Artificial Sequence
  Description of Artificial Sequence: Synthetic oligonucleotide
  Antisense strand to SEQ ID NO: 580447
aucucuaggacccucugau

SEQ ID NO: 580449 - RNA, 19 nt, Artificial Sequence
  Description of Artificial Sequence: Synthetic oligonucleotide
  Sense strand starting at position 3630 of SEQ ID NO: 318671
ccuguugugucuuacccau

SEQ ID NO: 580450 - RNA, 19 nt, Artificial Sequence
  Description of Artificial Sequence: Synthetic oligonucleotide
  Antisense strand to SEQ ID NO: 580449
auggguaagacacaacagg

SEQ ID NO: 580451 - RNA, 19 nt, Artificial Sequence
  Description of Artificial Sequence: Synthetic oligonucleotide
  Sense strand starting at position 3636 of SEQ ID NO: 318671
gugucuuacccauguggaa

SEQ ID NO: 580452 - RNA, 19 nt, Artificial Sequence
  Description of Artificial Sequence: Synthetic oligonucleotide
  Antisense strand to SEQ ID NO: 580451
uuccacauggguaagacac

SEQ ID NO: 580453 - RNA, 19 nt, Artificial Sequence
  Description of Artificial Sequence: Synthetic oligonucleotide
  Sense strand starting at position 3689 of SEQ ID NO: 318671
gcugcacugccguaagaga

SEQ ID NO: 580454 - RNA, 19 nt, Artificial Sequence
  Description of Artificial Sequence: Synthetic oligonucleotide
  Antisense strand to SEQ ID NO: 580453
ucucuuacggcagugcagc

SEQ ID NO: 580455 - RNA, 19 nt, Artificial Sequence
  Description of Artificial Sequence: Synthetic oligonucleotide
  Sense strand starting at position 3712 of SEQ ID NO: 318671
uagaaaucugaacgccaga

SEQ ID NO: 580456 - RNA, 19 nt, Artificial Sequence
  Description of Artificial Sequence: Synthetic oligonucleotide
  Antisense strand to SEQ ID NO: 580455
ucuggcguucagauuucua

SEQ ID NO: 580457 - RNA, 19 nt, Artificial Sequence
  Description of Artificial Sequence: Synthetic oligonucleotide
  Sense strand starting at position 3771 of SEQ ID NO: 318671
uggagacuuucagaggucu

SEQ ID NO: 580458 - RNA, 19 nt, Artificial Sequence
  Description of Artificial Sequence: Synthetic oligonucleotide
  Antisense strand to SEQ ID NO: 580457
agaccucugaaagucucca

SEQ ID NO: 580459 - RNA, 19 nt, Artificial Sequence
  Description of Artificial Sequence: Synthetic oligonucleotide
  Sense strand starting at position 18 of SEQ ID NO: 318672
cuaggauaauacugaaaga

SEQ ID NO: 580460 - RNA, 19 nt, Artificial Sequence
  Description of Artificial Sequence: Synthetic oligonucleotide
  Antisense strand to SEQ ID NO: 580459
ucuuucaguauuauccuag

SEQ ID NO: 580461 - RNA, 19 nt, Artificial Sequence
  Description of Artificial Sequence: Synthetic oligonucleotide
  Sense strand starting at position 49 of SEQ ID NO: 318672
gcacaagauuucuagcacu

SEQ ID NO: 580462 - RNA, 19 nt, Artificial Sequence
  Description of Artificial Sequence: Synthetic oligonucleotide
  Antisense strand to SEQ ID NO: 580461
agugcuagaaaucuugugc

SEQ ID NO: 580463 - RNA, 19 nt, Artificial Sequence
  Description of Artificial Sequence: Synthetic oligonucleotide
  Sense strand starting at position 495 of SEQ ID NO: 318672
cugucucagccuuggauuu

SEQ ID NO: 580464 - RNA, 19 nt, Artificial Sequence
  Description of Artificial Sequence: Synthetic oligonucleotide
  Antisense strand to SEQ ID NO: 580463
aaauccaaggcugagacag

SEQ ID NO: 580465 - RNA, 19 nt, Artificial Sequence
  Description of Artificial Sequence: Synthetic oligonucleotide
  Sense strand starting at position 543 of SEQ ID NO: 318672
gggagaaccauguggguua

SEQ ID NO: 580466 - RNA, 19 nt, Artificial Sequence
  Description of Artificial Sequence: Synthetic oligonucleotide
  Antisense strand to SEQ ID NO: 580465
uaacccacaugguucuccc

SEQ ID NO: 580467 - RNA, 19 nt, Artificial Sequence
  Description of Artificial Sequence: Synthetic oligonucleotide
  Sense strand starting at position 1376 of SEQ ID NO: 318672
caaggagaagguugucaca

SEQ ID NO: 580468 - RNA, 19 nt, Artificial Sequence
  Description of Artificial Sequence: Synthetic oligonucleotide
  Antisense strand to SEQ ID NO: 580467
ugugacaaccuucuccuug

SEQ ID NO: 580469 - RNA, 19 nt, Artificial Sequence
  Description of Artificial Sequence: Synthetic oligonucleotide
  Sense strand starting at position 1378 of SEQ ID NO: 318672
aggagaagguugucacacu

SEQ ID NO: 580470 - RNA, 19 nt, Artificial Sequence
  Description of Artificial Sequence: Synthetic oligonucleotide
  Antisense strand to SEQ ID NO: 580469
agugugacaaccuucuccu

SEQ ID NO: 580471 - RNA, 19 nt, Artificial Sequence
  Description of Artificial Sequence: Synthetic oligonucleotide
  Sense strand starting at position 1572 of SEQ ID NO: 318672
aaagaucucguaggucuua

SEQ ID NO: 580472 - RNA, 19 nt, Artificial Sequence
  Description of Artificial Sequence: Synthetic oligonucleotide
  Antisense strand to SEQ ID NO: 580471
uaagaccuacgagaucuuu

SEQ ID NO: 580473 - RNA, 19 nt, Artificial Sequence
  Description of Artificial Sequence: Synthetic oligonucleotide
  Sense strand starting at position 1573 of SEQ ID NO: 318672
aagaucucguaggucuuaa

SEQ ID NO: 580474 - RNA, 19 nt, Artificial Sequence
  Description of Artificial Sequence: Synthetic oligonucleotide
  Antisense strand to SEQ ID NO: 580473
uuaagaccuacgagaucuu

SEQ ID NO: 580475 - RNA, 19 nt, Artificial Sequence
  Description of Artificial Sequence: Synthetic oligonucleotide
  Sense strand starting at position 1585 of SEQ ID NO: 318672
gucuuaaugauggagcagu

SEQ ID NO: 580476 - RNA, 19 nt, Artificial Sequence
  Description of Artificial Sequence: Synthetic oligonucleotide
  Antisense strand to SEQ ID NO: 580475
acugcuccaucauuaagac

SEQ ID NO: 580477 - RNA, 19 nt, Artificial Sequence
  Description of Artificial Sequence: Synthetic oligonucleotide
  Sense strand starting at position 1596 of SEQ ID NO: 318672
ggagcagugguuuaacaug

SEQ ID NO: 580478 - RNA, 19 nt, Artificial Sequence
  Description of Artificial Sequence: Synthetic oligonucleotide
  Antisense strand to SEQ ID NO: 580477
cauguuaaaccacugcucc

SEQ ID NO: 580479 - RNA, 19 nt, Artificial Sequence
  Description of Artificial Sequence: Synthetic oligonucleotide
  Sense strand starting at position 1602 of SEQ ID NO: 318672
gugguuuaacauggccaga

SEQ ID NO: 580480 - RNA, 19 nt, Artificial Sequence
  Description of Artificial Sequence: Synthetic oligonucleotide
  Antisense strand to SEQ ID NO: 580479
ucuggccauguuaaaccac

SEQ ID NO: 580481 - RNA, 19 nt, Artificial Sequence
  Description of Artificial Sequence: Synthetic oligonucleotide
  Sense strand starting at position 1604 of SEQ ID NO: 318672
gguuuaacauggccagaau

SEQ ID NO: 580482 - RNA, 19 nt, Artificial Sequence
  Description of Artificial Sequence: Synthetic oligonucleotide
  Antisense strand to SEQ ID NO: 580481
auucuggccauguuaaacc

SEQ ID NO: 580483 - RNA, 19 nt, Artificial Sequence
  Description of Artificial Sequence: Synthetic oligonucleotide
  Sense strand starting at position 1666 of SEQ ID NO: 318672
gccuucuugcggucgauga

SEQ ID NO: 580484 - RNA, 19 nt, Artificial Sequence
  Description of Artificial Sequence: Synthetic oligonucleotide
  Antisense strand to SEQ ID NO: 580483
ucaucgaccgcaagaaggc

SEQ ID NO: 580485 - RNA, 19 nt, Artificial Sequence
  Description of Artificial Sequence: Synthetic oligonucleotide
  Sense strand starting at position 1680 of SEQ ID NO: 318672
gaugaucuugaucgccaca

SEQ ID NO: 580486 - RNA, 19 nt, Artificial Sequence
  Description of Artificial Sequence: Synthetic oligonucleotide
  Antisense strand to SEQ ID NO: 580485
uguggcgaucaagaucauc

SEQ ID NO: 580487 - RNA, 19 nt, Artificial Sequence
  Description of Artificial Sequence: Synthetic oligonucleotide
  Sense strand starting at position 1682 of SEQ ID NO: 318672
ugaucuugaucgccacauu

SEQ ID NO: 580488 - RNA, 19 nt, Artificial Sequence
  Description of Artificial Sequence: Synthetic oligonucleotide
  Antisense strand to SEQ ID NO: 580487
aauguggcgaucaagauca

SEQ ID NO: 580489 - RNA, 19 nt, Artificial Sequence
  Description of Artificial Sequence: Synthetic oligonucleotide
  Sense strand starting at position 1685 of SEQ ID NO: 318672
ucuugaucgccacauugaa

SEQ ID NO: 580490 - RNA, 19 nt, Artificial Sequence
  Description of Artificial Sequence: Synthetic oligonucleotide
  Antisense strand to SEQ ID NO: 580489
uucaauguggcgaucaaga

SEQ ID NO: 580491 - RNA, 19 nt, Artificial Sequence
  Description of Artificial Sequence: Synthetic oligonucleotide
  Sense strand starting at position 1743 of SEQ ID NO: 318672
ggagcccucuccuaaauuu

SEQ ID NO: 580492 - RNA, 19 nt, Artificial Sequence
  Description of Artificial Sequence: Synthetic oligonucleotide
  Antisense strand to SEQ ID NO: 580491
aaauuuaggagagggcucc

SEQ ID NO: 580493 - RNA, 19 nt, Artificial Sequence
  Description of Artificial Sequence: Synthetic oligonucleotide
  Sense strand starting at position 1867 of SEQ ID NO: 318672
ccagcagugugcucauuua

SEQ ID NO: 580494 - RNA, 19 nt, Artificial Sequence
  Description of Artificial Sequence: Synthetic oligonucleotide
  Antisense strand to SEQ ID NO: 580493
uaaaugagcacacugcugg

SEQ ID NO: 580495 - RNA, 19 nt, Artificial Sequence
  Description of Artificial Sequence: Synthetic oligonucleotide
  Sense strand starting at position 1879 of SEQ ID NO: 318672
ucauuuacauccuggauag

SEQ ID NO: 580496 - RNA, 19 nt, Artificial Sequence
  Description of Artificial Sequence: Synthetic oligonucleotide
  Antisense strand to SEQ ID NO: 580495
cuauccaggauguaaauga

SEQ ID NO: 580497 - RNA, 19 nt, Artificial Sequence
  Description of Artificial Sequence: Synthetic oligonucleotide
  Sense strand starting at position 1981 of SEQ ID NO: 318672
agaugacuucagcgaguga

SEQ ID NO: 580498 - RNA, 19 nt, Artificial Sequence
  Description of Artificial Sequence: Synthetic oligonucleotide
  Antisense strand to SEQ ID NO: 580497
ucacucgcugaagucaucu

SEQ ID NO: 580499 - RNA, 19 nt, Artificial Sequence
  Description of Artificial Sequence: Synthetic oligonucleotide
  Sense strand starting at position 2055 of SEQ ID NO: 318672
cuuggaauccuggaaggcu

SEQ ID NO: 580500 - RNA, 19 nt, Artificial Sequence
  Description of Artificial Sequence: Synthetic oligonucleotide
  Antisense strand to SEQ ID NO: 580499
agccuuccaggauuccaag

SEQ ID NO: 580501 - RNA, 19 nt, Artificial Sequence
  Description of Artificial Sequence: Synthetic oligonucleotide
  Sense strand starting at position 2193 of SEQ ID NO: 318672
aggcauacuugugcagaau

SEQ ID NO: 580502 - RNA, 19 nt, Artificial Sequence
  Description of Artificial Sequence: Synthetic oligonucleotide
  Antisense strand to SEQ ID NO: 580501
auucugcacaaguaugccu

SEQ ID NO: 580503 - RNA, 19 nt, Artificial Sequence
  Description of Artificial Sequence: Synthetic oligonucleotide
  Sense strand starting at position 2194 of SEQ ID NO: 318672
ggcauacuugugcagaauu

SEQ ID NO: 580504 - RNA, 19 nt, Artificial Sequence
  Description of Artificial Sequence: Synthetic oligonucleotide
  Antisense strand to SEQ ID NO: 580503
aauucugcacaaguaugcc

SEQ ID NO: 580505 - RNA, 19 nt, Artificial Sequence
  Description of Artificial Sequence: Synthetic oligonucleotide
  Sense strand starting at position 2196 of SEQ ID NO: 318672
cauacuugugcagaauuga

SEQ ID NO: 580506 - RNA, 19 nt, Artificial Sequence
  Description of Artificial Sequence: Synthetic oligonucleotide
  Antisense strand to SEQ ID NO: 580505
ucaauucugcacaaguaug

SEQ ID NO: 580507 - RNA, 19 nt, Artificial Sequence
  Description of Artificial Sequence: Synthetic oligonucleotide
  Sense strand starting at position 2212 of SEQ ID NO: 318672
ugaggccaauucuugcaaa

SEQ ID NO: 580508 - RNA, 19 nt, Artificial Sequence
  Description of Artificial Sequence: Synthetic oligonucleotide
  Antisense strand to SEQ ID NO: 580507
uuugcaagaauuggccuca

SEQ ID NO: 580509 - RNA, 19 nt, Artificial Sequence
  Description of Artificial Sequence: Synthetic oligonucleotide
  Sense strand starting at position 2357 of SEQ ID NO: 318672
ugggaauggucccuggaac

SEQ ID NO: 580510 - RNA, 19 nt, Artificial Sequence
  Description of Artificial Sequence: Synthetic oligonucleotide
  Antisense strand to SEQ ID NO: 580509
guuccagggaccauuccca

SEQ ID NO: 580511 - RNA, 19 nt, Artificial Sequence
  Description of Artificial Sequence: Synthetic oligonucleotide
  Sense strand starting at position 2515 of SEQ ID NO: 318672
ccuugaugcuguccacaca

SEQ ID NO: 580512 - RNA, 19 nt, Artificial Sequence
  Description of Artificial Sequence: Synthetic oligonucleotide
  Antisense strand to SEQ ID NO: 580511
uguguggacagcaucaagg

SEQ ID NO: 580513 - RNA, 19 nt, Artificial Sequence
  Description of Artificial Sequence: Synthetic oligonucleotide
  Sense strand starting at position 2564 of SEQ ID NO: 318672
agaagaguggugugucaag

SEQ ID NO: 580514 - RNA, 19 nt, Artificial Sequence
  Description of Artificial Sequence: Synthetic oligonucleotide
  Antisense strand to SEQ ID NO: 580513
cuugacacaccacucuucu

SEQ ID NO: 580515 - RNA, 19 nt, Artificial Sequence
  Description of Artificial Sequence: Synthetic oligonucleotide
  Sense strand starting at position 2617 of SEQ ID NO: 318672
guuugagaugccuggauuc

SEQ ID NO: 580516 - RNA, 19 nt, Artificial Sequence
  Description of Artificial Sequence: Synthetic oligonucleotide
  Antisense strand to SEQ ID NO: 580515
gaauccaggcaucucaaac

SEQ ID NO: 580517 - RNA, 19 nt, Artificial Sequence
  Description of Artificial Sequence: Synthetic oligonucleotide
  Sense strand starting at position 2619 of SEQ ID NO: 318672
uugagaugccuggauucug

SEQ ID NO: 580518 - RNA, 19 nt, Artificial Sequence
  Description of Artificial Sequence: Synthetic oligonucleotide
  Antisense strand to SEQ ID NO: 580517
cagaauccaggcaucucaa

SEQ ID NO: 580519 - RNA, 19 nt, Artificial Sequence
  Description of Artificial Sequence: Synthetic oligonucleotide
  Sense strand starting at position 2844 of SEQ ID NO: 318672
agcugcucugaggacauua

SEQ ID NO: 580520 - RNA, 19 nt, Artificial Sequence
  Description of Artificial Sequence: Synthetic oligonucleotide
  Antisense strand to SEQ ID NO: 580519
uaauguccucagagcagcu

SEQ ID NO: 580521 - RNA, 19 nt, Artificial Sequence
  Description of Artificial Sequence: Synthetic oligonucleotide
  Sense strand starting at position 2968 of SEQ ID NO: 318672
ggaagaaggaguugcauga

SEQ ID NO: 580522 - RNA, 19 nt, Artificial Sequence
  Description of Artificial Sequence: Synthetic oligonucleotide
  Antisense strand to SEQ ID NO: 580521
ucaugcaacuccuucuucc

SEQ ID NO: 580523 - RNA, 19 nt, Artificial Sequence
  Description of Artificial Sequence: Synthetic oligonucleotide
  Sense strand starting at position 2972 of SEQ ID NO: 318672
gaaggaguugcaugacugu

SEQ ID NO: 580524 - RNA, 19 nt, Artificial Sequence
  Description of Artificial Sequence: Synthetic oligonucleotide
  Antisense strand to SEQ ID NO: 580523
acagucaugcaacuccuuc

SEQ ID NO: 580525 - RNA, 19 nt, Artificial Sequence
  Description of Artificial Sequence: Synthetic oligonucleotide
  Sense strand starting at position 3073 of SEQ ID NO: 318672
gcccuucaggagugaguua

SEQ ID NO: 580526 - RNA, 19 nt, Artificial Sequence
  Description of Artificial Sequence: Synthetic oligonucleotide
  Antisense strand to SEQ ID NO: 580525
uaacucacuccugaagggc

SEQ ID NO: 580527 - RNA, 19 nt, Artificial Sequence
  Description of Artificial Sequence: Synthetic oligonucleotide
  Sense strand starting at position 3078 of SEQ ID NO: 318672
ucaggagugaguuaguaga

SEQ ID NO: 580528 - RNA, 19 nt, Artificial Sequence
  Description of Artificial Sequence: Synthetic oligonucleotide
  Antisense strand to SEQ ID NO: 580527
ucuacuaacucacuccuga

SEQ ID NO: 580529 - RNA, 19 nt, Artificial Sequence
  Description of Artificial Sequence: Synthetic oligonucleotide
  Sense strand starting at position 3603 of SEQ ID NO: 318672
aucuacauucugugaagaa

SEQ ID NO: 580530 - RNA, 19 nt, Artificial Sequence
  Description of Artificial Sequence: Synthetic oligonucleotide
  Antisense strand to SEQ ID NO: 580529
uucuucacagaauguagau

SEQ ID NO: 580531 - RNA, 19 nt, Artificial Sequence
  Description of Artificial Sequence: Synthetic oligonucleotide
  Sense strand starting at position 3658 of SEQ ID NO: 318672
uuaacuagagucugauaag

SEQ ID NO: 580532 - RNA, 19 nt, Artificial Sequence
  Description of Artificial Sequence: Synthetic oligonucleotide
  Antisense strand to SEQ ID NO: 580531
cuuaucagacucuaguuaa

SEQ ID NO: 580533 - RNA, 19 nt, Artificial Sequence
  Description of Artificial Sequence: Synthetic oligonucleotide
  Sense strand starting at position 3664 of SEQ ID NO: 318672
agagucugauaagaaacau

SEQ ID NO: 580534 - RNA, 19 nt, Artificial Sequence
  Description of Artificial Sequence: Synthetic oligonucleotide
  Antisense strand to SEQ ID NO: 580533
auguuucuuaucagacucu

SEQ ID NO: 580535 - RNA, 19 nt, Artificial Sequence
  Description of Artificial Sequence: Synthetic oligonucleotide
  Sense strand starting at position 3797 of SEQ ID NO: 318672
agauaaacucucugagcca

SEQ ID NO: 580536 - RNA, 19 nt, Artificial Sequence
  Description of Artificial Sequence: Synthetic oligonucleotide
  Antisense strand to SEQ ID NO: 580535
uggcucagagaguuuaucu

SEQ ID NO: 580537 - RNA, 19 nt, Artificial Sequence
  Description of Artificial Sequence: Synthetic oligonucleotide
  Sense strand starting at position 3980 of SEQ ID NO: 318672
gggcacuuguugucaggau

SEQ ID NO: 580538 - RNA, 19 nt, Artificial Sequence
  Description of Artificial Sequence: Synthetic oligonucleotide
  Antisense strand to SEQ ID NO: 580537
auccugacaacaagugccc

SEQ ID NO: 580539 - RNA, 19 nt, Artificial Sequence
  Description of Artificial Sequence: Synthetic oligonucleotide
  Sense strand starting at position 90 of SEQ ID NO: 318673
cgauuuaucucagauccaa

SEQ ID NO: 580540 - RNA, 19 nt, Artificial Sequence
  Description of Artificial Sequence: Synthetic oligonucleotide
  Antisense strand to SEQ ID NO: 580539
uuggaucugagauaaaucg

SEQ ID NO: 580541 - RNA, 19 nt, Artificial Sequence
  Description of Artificial Sequence: Synthetic oligonucleotide
  Sense strand starting at position 141 of SEQ ID NO: 318673
aguuauucuuuaccacaga

SEQ ID NO: 580542 - RNA, 19 nt, Artificial Sequence
  Description of Artificial Sequence: Synthetic oligonucleotide
  Antisense strand to SEQ ID NO: 580541
ucugugguaaagaauaacu

SEQ ID NO: 580543 - RNA, 19 nt, Artificial Sequence
  Description of Artificial Sequence: Synthetic oligonucleotide
  Sense strand starting at position 154 of SEQ ID NO: 318673
cacagaugagguggucuau

SEQ ID NO: 580544 - RNA, 19 nt, Artificial Sequence
  Description of Artificial Sequence: Synthetic oligonucleotide
  Antisense strand to SEQ ID NO: 580543
auagaccaccucaucugug

SEQ ID NO: 580545 - RNA, 19 nt, Artificial Sequence
  Description of Artificial Sequence: Synthetic oligonucleotide
  Sense strand starting at position 160 of SEQ ID NO: 318673
ugagguggucuaugauaca

SEQ ID NO: 580546 - RNA, 19 nt, Artificial Sequence
  Description of Artificial Sequence: Synthetic oligonucleotide
  Antisense strand to SEQ ID NO: 580545
uguaucauagaccaccuca

SEQ ID NO: 580547 - RNA, 19 nt, Artificial Sequence
  Description of Artificial Sequence: Synthetic oligonucleotide
  Sense strand starting at position 629 of SEQ ID NO: 318673
uauaauggugcuuguauuu

SEQ ID NO: 580548 - RNA, 19 nt, Artificial Sequence
  Description of Artificial Sequence: Synthetic oligonucleotide
  Antisense strand to SEQ ID NO: 580547
aaauacaagcaccauuaua

SEQ ID NO: 580549 - RNA, 19 nt, Artificial Sequence
  Description of Artificial Sequence: Synthetic oligonucleotide
  Sense strand starting at position 1051 of SEQ ID NO: 318673
guucguguucuguuuggau

SEQ ID NO: 580550 - RNA, 19 nt, Artificial Sequence
  Description of Artificial Sequence: Synthetic oligonucleotide
  Antisense strand to SEQ ID NO: 580549
auccaaacagaacacgaac

SEQ ID NO: 580551 - RNA, 19 nt, Artificial Sequence
  Description of Artificial Sequence: Synthetic oligonucleotide
  Sense strand starting at position 1200 of SEQ ID NO: 318673
aagaauacguuucuaguag

SEQ ID NO: 580552 - RNA, 19 nt, Artificial Sequence
  Description of Artificial Sequence: Synthetic oligonucleotide
  Antisense strand to SEQ ID NO: 580551
cuacuagaaacguauucuu

SEQ ID NO: 580553 - RNA, 19 nt, Artificial Sequence
  Description of Artificial Sequence: Synthetic oligonucleotide
  Sense strand starting at position 1316 of SEQ ID NO: 318673
aggugacccuaaucaggau

SEQ ID NO: 580554 - RNA, 19 nt, Artificial Sequence
  Description of Artificial Sequence: Synthetic oligonucleotide
  Antisense strand to SEQ ID NO: 580553
auccugauuagggucaccu

SEQ ID NO: 580555 - RNA, 19 nt, Artificial Sequence
  Description of Artificial Sequence: Synthetic oligonucleotide
  Sense strand starting at position 1345 of SEQ ID NO: 318673
gccagagucaggcauuaga

SEQ ID NO: 580556 - RNA, 19 nt, Artificial Sequence
  Description of Artificial Sequence: Synthetic oligonucleotide
  Antisense strand to SEQ ID NO: 580555
ucuaaugccugacucuggc

SEQ ID NO: 580557 - RNA, 19 nt, Artificial Sequence
  Description of Artificial Sequence: Synthetic oligonucleotide
  Sense strand starting at position 1450 of SEQ ID NO: 318673
uuuauuagugucgcgucaa

SEQ ID NO: 580558 - RNA, 19 nt, Artificial Sequence
  Description of Artificial Sequence: Synthetic oligonucleotide
  Antisense strand to SEQ ID NO: 580557
uugacgcgacacuaauaaa

SEQ ID NO: 580559 - RNA, 19 nt, Artificial Sequence
  Description of Artificial Sequence: Synthetic oligonucleotide
  Sense strand starting at position 1453 of SEQ ID NO: 318673
auuagugucgcgucaagca

SEQ ID NO: 580560 - RNA, 19 nt, Artificial Sequence
  Description of Artificial Sequence: Synthetic oligonucleotide
  Antisense strand to SEQ ID NO: 580559
ugcuugacgcgacacuaau

SEQ ID NO: 580561 - RNA, 19 nt, Artificial Sequence
  Description of Artificial Sequence: Synthetic oligonucleotide
  Sense strand starting at position 1659 of SEQ ID NO: 318673
cuuguaucacgacaagagu

SEQ ID NO: 580562 - RNA, 19 nt, Artificial Sequence
  Description of Artificial Sequence: Synthetic oligonucleotide
  Antisense strand to SEQ ID NO: 580561
acucuugucgugauacaag

SEQ ID NO: 580563 - RNA, 19 nt, Artificial Sequence
  Description of Artificial Sequence: Synthetic oligonucleotide
  Sense strand starting at position 1668 of SEQ ID NO: 318673
cgacaagagucugaauuug

SEQ ID NO: 580564 - RNA, 19 nt, Artificial Sequence
  Description of Artificial Sequence: Synthetic oligonucleotide
  Antisense strand to SEQ ID NO: 580563
caaauucagacucuugucg

SEQ ID NO: 580565 - RNA, 19 nt, Artificial Sequence
  Description of Artificial Sequence: Synthetic oligonucleotide
  Sense strand starting at position 1676 of SEQ ID NO: 318673
gucugaauuugcccuagua

SEQ ID NO: 580566 - RNA, 19 nt, Artificial Sequence
  Description of Artificial Sequence: Synthetic oligonucleotide
  Antisense strand to SEQ ID NO: 580565
uacuagggcaaauucagac

SEQ ID NO: 580567 - RNA, 19 nt, Artificial Sequence
  Description of Artificial Sequence: Synthetic oligonucleotide
  Sense strand starting at position 1796 of SEQ ID NO: 318673
acaggaguuugagcuccua

SEQ ID NO: 580568 - RNA, 19 nt, Artificial Sequence
  Description of Artificial Sequence: Synthetic oligonucleotide
  Antisense strand to SEQ ID NO: 580567
uaggagcucaaacuccugu

SEQ ID NO: 580569 - RNA, 19 nt, Artificial Sequence
  Description of Artificial Sequence: Synthetic oligonucleotide
  Sense strand starting at position 1834 of SEQ ID NO: 318673
ucgcgcuucccagcagauu

SEQ ID NO: 580570 - RNA, 19 nt, Artificial Sequence
  Description of Artificial Sequence: Synthetic oligonucleotide
  Antisense strand to SEQ ID NO: 580569
aaucugcugggaagcgcga

SEQ ID NO: 580571 - RNA, 19 nt, Artificial Sequence
  Description of Artificial Sequence: Synthetic oligonucleotide
  Sense strand starting at position 1991 of SEQ ID NO: 318673
cgacuaauagcgucgcuau

SEQ ID NO: 580572 - RNA, 19 nt, Artificial Sequence
  Description of Artificial Sequence: Synthetic oligonucleotide
  Antisense strand to SEQ ID NO: 580571
auagcgacgcuauuagucg

SEQ ID NO: 580573 - RNA, 19 nt, Artificial Sequence
  Description of Artificial Sequence: Synthetic oligonucleotide
  Sense strand starting at position 2013 of SEQ ID NO: 318673
caaagcauccugggaaaug

SEQ ID NO: 580574 - RNA, 19 nt, Artificial Sequence
  Description of Artificial Sequence: Synthetic oligonucleotide
  Antisense strand to SEQ ID NO: 580573
cauuucccaggaugcuuug

SEQ ID NO: 580575 - RNA, 19 nt, Artificial Sequence
  Description of Artificial Sequence: Synthetic oligonucleotide
  Sense strand starting at position 2024 of SEQ ID NO: 318673
gggaaauguagcgaaacuc

SEQ ID NO: 580576 - RNA, 19 nt, Artificial Sequence
  Description of Artificial Sequence: Synthetic oligonucleotide
  Antisense strand to SEQ ID NO: 580575
gaguuucgcuacauuuccc

SEQ ID NO: 580577 - RNA, 19 nt, Artificial Sequence
  Description of Artificial Sequence: Synthetic oligonucleotide
  Sense strand starting at position 2063 of SEQ ID NO: 318673
cgcugugugacgucauugu

SEQ ID NO: 580578 - RNA, 19 nt, Artificial Sequence
  Description of Artificial Sequence: Synthetic oligonucleotide
  Antisense strand to SEQ ID NO: 580577
acaaugacgucacacagcg

SEQ ID NO: 580579 - RNA, 19 nt, Artificial Sequence
  Description of Artificial Sequence: Synthetic oligonucleotide
  Sense strand starting at position 2083 of SEQ ID NO: 318673
cggcgugacauuugagaga

SEQ ID NO: 580580 - RNA, 19 nt, Artificial Sequence
  Description of Artificial Sequence: Synthetic oligonucleotide
  Antisense strand to SEQ ID NO: 580579
ucucucaaaugucacgccg

SEQ ID NO: 580581 - RNA, 19 nt, Artificial Sequence
  Description of Artificial Sequence: Synthetic oligonucleotide
  Sense strand starting at position 2085 of SEQ ID NO: 318673
gcgugacauuugagagaug

SEQ ID NO: 580582 - RNA, 19 nt, Artificial Sequence
  Description of Artificial Sequence: Synthetic oligonucleotide
  Antisense strand to SEQ ID NO: 580581
caucucucaaaugucacgc

SEQ ID NO: 580583 - RNA, 19 nt, Artificial Sequence
  Description of Artificial Sequence: Synthetic oligonucleotide
  Sense strand starting at position 2094 of SEQ ID NO: 318673
uugagagaugguugccauc

SEQ ID NO: 580584 - RNA, 19 nt, Artificial Sequence
  Description of Artificial Sequence: Synthetic oligonucleotide
  Antisense strand to SEQ ID NO: 580583
gauggcaaccaucucucaa

SEQ ID NO: 580585 - RNA, 19 nt, Artificial Sequence
  Description of Artificial Sequence: Synthetic oligonucleotide
  Sense strand starting at position 2096 of SEQ ID NO: 318673
gagagaugguugccaucuu

SEQ ID NO: 580586 - RNA, 19 nt, Artificial Sequence
  Description of Artificial Sequence: Synthetic oligonucleotide
  Antisense strand to SEQ ID NO: 580585
aagauggcaaccaucucuc

SEQ ID NO: 580587 - RNA, 19 nt, Artificial Sequence
  Description of Artificial Sequence: Synthetic oligonucleotide
  Sense strand starting at position 2123 of SEQ ID NO: 318673
gcaagacuccgcguuacuc

SEQ ID NO: 580588 - RNA, 19 nt, Artificial Sequence
  Description of Artificial Sequence: Synthetic oligonucleotide
  Antisense strand to SEQ ID NO: 580587
gaguaacgcggagucuugc

SEQ ID NO: 580589 - RNA, 19 nt, Artificial Sequence
  Description of Artificial Sequence: Synthetic oligonucleotide
  Sense strand starting at position 2135 of SEQ ID NO: 318673
guuacucugcacgaagaga

SEQ ID NO: 580590 - RNA, 19 nt, Artificial Sequence
  Description of Artificial Sequence: Synthetic oligonucleotide
  Antisense strand to SEQ ID NO: 580589
ucucuucgugcagaguaac

SEQ ID NO: 580591 - RNA, 19 nt, Artificial Sequence
  Description of Artificial Sequence: Synthetic oligonucleotide
  Sense strand starting at position 2180 of SEQ ID NO: 318673
ugugguguucguuucacua

SEQ ID NO: 580592 - RNA, 19 nt, Artificial Sequence
  Description of Artificial Sequence: Synthetic oligonucleotide
  Antisense strand to SEQ ID NO: 580591
uagugaaacgaacaccaca

SEQ ID NO: 580593 - RNA, 19 nt, Artificial Sequence
  Description of Artificial Sequence: Synthetic oligonucleotide
  Sense strand starting at position 2740 of SEQ ID NO: 318673
uuuauuagacccugggcau

SEQ ID NO: 580594 - RNA, 19 nt, Artificial Sequence
  Description of Artificial Sequence: Synthetic oligonucleotide
  Antisense strand to SEQ ID NO: 580593
augcccagggucuaauaaa

SEQ ID NO: 580595 - RNA, 19 nt, Artificial Sequence
  Description of Artificial Sequence: Synthetic oligonucleotide
  Sense strand starting at position 2741 of SEQ ID NO: 318673
uuauuagacccugggcauu

SEQ ID NO: 580596 - RNA, 19 nt, Artificial Sequence
  Description of Artificial Sequence: Synthetic oligonucleotide
  Antisense strand to SEQ ID NO: 580595
aaugcccagggucuaauaa

SEQ ID NO: 580597 - RNA, 19 nt, Artificial Sequence
  Description of Artificial Sequence: Synthetic oligonucleotide
  Sense strand starting at position 2938 of SEQ ID NO: 318673
ugagauuaugcauacaguu

SEQ ID NO: 580598 - RNA, 19 nt, Artificial Sequence
  Description of Artificial Sequence: Synthetic oligonucleotide
  Antisense strand to SEQ ID NO: 580597
aacuguaugcauaaucuca

SEQ ID NO: 580599 - RNA, 19 nt, Artificial Sequence
  Description of Artificial Sequence: Synthetic oligonucleotide
  Sense strand starting at position 2969 of SEQ ID NO: 318673
aguugaaagcuuuauaugc

SEQ ID NO: 580600 - RNA, 19 nt, Artificial Sequence
  Description of Artificial Sequence: Synthetic oligonucleotide
  Antisense strand to SEQ ID NO: 580599
gcauauaaagcuuucaacu

SEQ ID NO: 580601 - RNA, 19 nt, Artificial Sequence
  Description of Artificial Sequence: Synthetic oligonucleotide
  Sense strand starting at position 3344 of SEQ ID NO: 318673
gcacuuuggccugaacaac

SEQ ID NO: 580602 - RNA, 19 nt, Artificial Sequence
  Description of Artificial Sequence: Synthetic oligonucleotide
  Antisense strand to SEQ ID NO: 580601
guuguucaggccaaagugc

SEQ ID NO: 580603 - RNA, 19 nt, Artificial Sequence
  Description of Artificial Sequence: Synthetic oligonucleotide
  Sense strand starting at position 3364 of SEQ ID NO: 318673
gagggagacugucuauauu

SEQ ID NO: 580604 - RNA, 19 nt, Artificial Sequence
  Description of Artificial Sequence: Synthetic oligonucleotide
  Antisense strand to SEQ ID NO: 580603
aauauagacagucucccuc

SEQ ID NO: 580605 - RNA, 19 nt, Artificial Sequence
  Description of Artificial Sequence: Synthetic oligonucleotide
  Sense strand starting at position 3442 of SEQ ID NO: 318673
ucaauucugguguaaugga

SEQ ID NO: 580606 - RNA, 19 nt, Artificial Sequence
  Description of Artificial Sequence: Synthetic oligonucleotide
  Antisense strand to SEQ ID NO: 580605
uccauuacaccagaauuga

SEQ ID NO: 580607 - RNA, 19 nt, Artificial Sequence
  Description of Artificial Sequence: Synthetic oligonucleotide
  Sense strand starting at position 3451 of SEQ ID NO: 318673
guguaauggaaagacugua

SEQ ID NO: 580608 - RNA, 19 nt, Artificial Sequence
  Description of Artificial Sequence: Synthetic oligonucleotide
  Antisense strand to SEQ ID NO: 580607
uacagucuuuccauuacac

SEQ ID NO: 580609 - RNA, 19 nt, Artificial Sequence
  Description of Artificial Sequence: Synthetic oligonucleotide
  Sense strand starting at position 3582 of SEQ ID NO: 318673
agacuauacgcuuauuaag

SEQ ID NO: 580610 - RNA, 19 nt, Artificial Sequence
  Description of Artificial Sequence: Synthetic oligonucleotide
  Antisense strand to SEQ ID NO: 580609
cuuaauaagcguauagucu

SEQ ID NO: 580611 - RNA, 19 nt, Artificial Sequence
  Description of Artificial Sequence: Synthetic oligonucleotide
  Sense strand starting at position 3636 of SEQ ID NO: 318673
uuugauuacugaguucuaa

SEQ ID NO: 580612 - RNA, 19 nt, Artificial Sequence
  Description of Artificial Sequence: Synthetic oligonucleotide
  Antisense strand to SEQ ID NO: 580611
uuagaacucaguaaucaaa

SEQ ID NO: 580613 - RNA, 19 nt, Artificial Sequence
  Description of Artificial Sequence: Synthetic oligonucleotide
  Sense strand starting at position 3741 of SEQ ID NO: 318673
agagacaaguucucacauu

SEQ ID NO: 580614 - RNA, 19 nt, Artificial Sequence
  Description of Artificial Sequence: Synthetic oligonucleotide
  Antisense strand to SEQ ID NO: 580613
aaugugagaacuugucucu

SEQ ID NO: 580615 - RNA, 19 nt, Artificial Sequence
  Description of Artificial Sequence: Synthetic oligonucleotide
  Sense strand starting at position 3753 of SEQ ID NO: 318673
ucacauuucccaggcuagu

SEQ ID NO: 580616 - RNA, 19 nt, Artificial Sequence
  Description of Artificial Sequence: Synthetic oligonucleotide
  Antisense strand to SEQ ID NO: 580615
acuagccugggaaauguga

SEQ ID NO: 580617 - RNA, 19 nt, Artificial Sequence
  Description of Artificial Sequence: Synthetic oligonucleotide
  Sense strand starting at position 3811 of SEQ ID NO: 318673
uccuaacaugcagggauua

SEQ ID NO: 580618 - RNA, 19 nt, Artificial Sequence
  Description of Artificial Sequence: Synthetic oligonucleotide
  Antisense strand to SEQ ID NO: 580617
uaaucccugcauguuagga

SEQ ID NO: 580619 - RNA, 19 nt, Artificial Sequence
  Description of Artificial Sequence: Synthetic oligonucleotide
  Sense strand starting at position 59 of SEQ ID NO: 318674
gcagaaucauuauuaaagc

SEQ ID NO: 580620 - RNA, 19 nt, Artificial Sequence
  Description of Artificial Sequence: Synthetic oligonucleotide
  Antisense strand to SEQ ID NO: 580619
gcuuuaauaaugauucugc

SEQ ID NO: 580621 - RNA, 19 nt, Artificial Sequence
  Description of Artificial Sequence: Synthetic oligonucleotide
  Sense strand starting at position 315 of SEQ ID NO: 318674
ggucgugaacgcuucucau

SEQ ID NO: 580622 - RNA, 19 nt, Artificial Sequence
  Description of Artificial Sequence: Synthetic oligonucleotide
  Antisense strand to SEQ ID NO: 580621
augagaagcguucacgacc

SEQ ID NO: 580623 - RNA, 19 nt, Artificial Sequence
  Description of Artificial Sequence: Synthetic oligonucleotide
  Sense strand starting at position 516 of SEQ ID NO: 318674
uaaggucagcuuugagaga

SEQ ID NO: 580624 - RNA, 19 nt, Artificial Sequence
  Description of Artificial Sequence: Synthetic oligonucleotide
  Antisense strand to SEQ ID NO: 580623
ucucucaaagcugaccuua

SEQ ID NO: 580625 - RNA, 19 nt, Artificial Sequence
  Description of Artificial Sequence: Synthetic oligonucleotide
  Sense strand starting at position 540 of SEQ ID NO: 318674
cugggugucuguucuauuu

SEQ ID NO: 580626 - RNA, 19 nt, Artificial Sequence
  Description of Artificial Sequence: Synthetic oligonucleotide
  Antisense strand to SEQ ID NO: 580625
aaauagaacagacacccag

SEQ ID NO: 580627 - RNA, 19 nt, Artificial Sequence
  Description of Artificial Sequence: Synthetic oligonucleotide
  Sense strand starting at position 627 of SEQ ID NO: 318674
gacuacgcauacuuagaua

SEQ ID NO: 580628 - RNA, 19 nt, Artificial Sequence
  Description of Artificial Sequence: Synthetic oligonucleotide
  Antisense strand to SEQ ID NO: 580627
uaucuaaguaugcguaguc

SEQ ID NO: 580629 - RNA, 19 nt, Artificial Sequence
  Description of Artificial Sequence: Synthetic oligonucleotide
  Sense strand starting at position 632 of SEQ ID NO: 318674
cgcauacuuagauauggag

SEQ ID NO: 580630 - RNA, 19 nt, Artificial Sequence
  Description of Artificial Sequence: Synthetic oligonucleotide
  Antisense strand to SEQ ID NO: 580629
cuccauaucuaaguaugcg

SEQ ID NO: 580631 - RNA, 19 nt, Artificial Sequence
  Description of Artificial Sequence: Synthetic oligonucleotide
  Sense strand starting at position 770 of SEQ ID NO: 318674
uacaguuccugggucauca

SEQ ID NO: 580632 - RNA, 19 nt, Artificial Sequence
  Description of Artificial Sequence: Synthetic oligonucleotide
  Antisense strand to SEQ ID NO: 580631
ugaugacccaggaacugua

SEQ ID NO: 580633 - RNA, 19 nt, Artificial Sequence
  Description of Artificial Sequence: Synthetic oligonucleotide
  Sense strand starting at position 772 of SEQ ID NO: 318674
caguuccugggucaucaaa

SEQ ID NO: 580634 - RNA, 19 nt, Artificial Sequence
  Description of Artificial Sequence: Synthetic oligonucleotide
  Antisense strand to SEQ ID NO: 580633
uuugaugacccaggaacug

SEQ ID NO: 580635 - RNA, 19 nt, Artificial Sequence
  Description of Artificial Sequence: Synthetic oligonucleotide
  Sense strand starting at position 838 of SEQ ID NO: 318674
gcguguuggauuuaagcaa

SEQ ID NO: 580636 - RNA, 19 nt, Artificial Sequence
  Description of Artificial Sequence: Synthetic oligonucleotide
  Antisense strand to SEQ ID NO: 580635
uugcuuaaauccaacacgc

SEQ ID NO: 580637 - RNA, 19 nt, Artificial Sequence
  Description of Artificial Sequence: Synthetic oligonucleotide
  Sense strand starting at position 861 of SEQ ID NO: 318674
accaacucucagugguaaa

SEQ ID NO: 580638 - RNA, 19 nt, Artificial Sequence
  Description of Artificial Sequence: Synthetic oligonucleotide
  Antisense strand to SEQ ID NO: 580637
uuuaccacugagaguuggu

SEQ ID NO: 580639 - RNA, 19 nt, Artificial Sequence
  Description of Artificial Sequence: Synthetic oligonucleotide
  Sense strand starting at position 891 of SEQ ID NO: 318674
caguguauugguuaauucu

SEQ ID NO: 580640 - RNA, 19 nt, Artificial Sequence
  Description of Artificial Sequence: Synthetic oligonucleotide
  Antisense strand to SEQ ID NO: 580639
agaauuaaccaauacacug

SEQ ID NO: 580641 - RNA, 19 nt, Artificial Sequence
  Description of Artificial Sequence: Synthetic oligonucleotide
  Sense strand starting at position 1303 of SEQ ID NO: 318674
aggagaaaccucggaagca

SEQ ID NO: 580642 - RNA, 19 nt, Artificial Sequence
  Description of Artificial Sequence: Synthetic oligonucleotide
  Antisense strand to SEQ ID NO: 580641
ugcuuccgagguuucuccu

SEQ ID NO: 580643 - RNA, 19 nt, Artificial Sequence
  Description of Artificial Sequence: Synthetic oligonucleotide
  Sense strand starting at position 1378 of SEQ ID NO: 318674
aggcuaugccagucgcuua

SEQ ID NO: 580644 - RNA, 19 nt, Artificial Sequence
  Description of Artificial Sequence: Synthetic oligonucleotide
  Antisense strand to SEQ ID NO: 580643
uaagcgacuggcauagccu

SEQ ID NO: 580645 - RNA, 19 nt, Artificial Sequence
  Description of Artificial Sequence: Synthetic oligonucleotide
  Sense strand starting at position 1519 of SEQ ID NO: 318674
cagagcauccauuauccga

SEQ ID NO: 580646 - RNA, 19 nt, Artificial Sequence
  Description of Artificial Sequence: Synthetic oligonucleotide
  Antisense strand to SEQ ID NO: 580645
ucggauaauggaugcucug

SEQ ID NO: 580647 - RNA, 19 nt, Artificial Sequence
  Description of Artificial Sequence: Synthetic oligonucleotide
  Sense strand starting at position 2195 of SEQ ID NO: 318674
auuguaucucacgagaccu

SEQ ID NO: 580648 - RNA, 19 nt, Artificial Sequence
  Description of Artificial Sequence: Synthetic oligonucleotide
  Antisense strand to SEQ ID NO: 580647
aggucucgugagauacaau

SEQ ID NO: 580649 - RNA, 19 nt, Artificial Sequence
  Description of Artificial Sequence: Synthetic oligonucleotide
  Sense strand starting at position 2197 of SEQ ID NO: 318674
uguaucucacgagaccuua

SEQ ID NO: 580650 - RNA, 19 nt, Artificial Sequence
  Description of Artificial Sequence: Synthetic oligonucleotide
  Antisense strand to SEQ ID NO: 580649
uaaggucucgugagauaca

SEQ ID NO: 580651 - RNA, 19 nt, Artificial Sequence
  Description of Artificial Sequence: Synthetic oligonucleotide
  Sense strand starting at position 2247 of SEQ ID NO: 318674
auacauuccguccaaggau

SEQ ID NO: 580652 - RNA, 19 nt, Artificial Sequence
  Description of Artificial Sequence: Synthetic oligonucleotide
  Antisense strand to SEQ ID NO: 580651
auccuuggacggaauguau

SEQ ID NO: 580653 - RNA, 19 nt, Artificial Sequence
  Description of Artificial Sequence: Synthetic oligonucleotide
  Sense strand starting at position 2437 of SEQ ID NO: 318674
uguguuacccaguaagauu

SEQ ID NO: 580654 - RNA, 19 nt, Artificial Sequence
  Description of Artificial Sequence: Synthetic oligonucleotide
  Antisense strand to SEQ ID NO: 580653
aaucuuacuggguaacaca

SEQ ID NO: 580655 - RNA, 19 nt, Artificial Sequence
  Description of Artificial Sequence: Synthetic oligonucleotide
  Sense strand starting at position 2444 of SEQ ID NO: 318674
cccaguaagauuggagcua

SEQ ID NO: 580656 - RNA, 19 nt, Artificial Sequence
  Description of Artificial Sequence: Synthetic oligonucleotide
  Antisense strand to SEQ ID NO: 580655
uagcuccaaucuuacuggg

SEQ ID NO: 580657 - RNA, 19 nt, Artificial Sequence
  Description of Artificial Sequence: Synthetic oligonucleotide
  Sense strand starting at position 2512 of SEQ ID NO: 318674
acuacuagaucugcuaaug

SEQ ID NO: 580658 - RNA, 19 nt, Artificial Sequence
  Description of Artificial Sequence: Synthetic oligonucleotide
  Antisense strand to SEQ ID NO: 580657
cauuagcagaucuaguagu

SEQ ID NO: 580659 - RNA, 19 nt, Artificial Sequence
  Description of Artificial Sequence: Synthetic oligonucleotide
  Sense strand starting at position 2678 of SEQ ID NO: 318674
caacgcuauguugaaggau

SEQ ID NO: 580660 - RNA, 19 nt, Artificial Sequence
  Description of Artificial Sequence: Synthetic oligonucleotide
  Antisense strand to SEQ ID NO: 580659
auccuucaacauagcguug

SEQ ID NO: 580661 - RNA, 19 nt, Artificial Sequence
  Description of Artificial Sequence: Synthetic oligonucleotide
  Sense strand starting at position 2684 of SEQ ID NO: 318674
uauguugaaggauguuauu

SEQ ID NO: 580662 - RNA, 19 nt, Artificial Sequence
  Description of Artificial Sequence: Synthetic oligonucleotide
  Antisense strand to SEQ ID NO: 580661
aauaacauccuucaacaua

SEQ ID NO: 580663 - RNA, 19 nt, Artificial Sequence
  Description of Artificial Sequence: Synthetic oligonucleotide
  Sense strand starting at position 2810 of SEQ ID NO: 318674
gaaugugaaagaugguguu

SEQ ID NO: 580664 - RNA, 19 nt, Artificial Sequence
  Description of Artificial Sequence: Synthetic oligonucleotide
  Antisense strand to SEQ ID NO: 580663
aacaccaucuuucacauuc

SEQ ID NO: 580665 - RNA, 19 nt, Artificial Sequence
  Description of Artificial Sequence: Synthetic oligonucleotide
  Sense strand starting at position 2828 of SEQ ID NO: 318674
uuacguuugguguuuguua

SEQ ID NO: 580666 - RNA, 19 nt, Artificial Sequence
  Description of Artificial Sequence: Synthetic oligonucleotide
  Antisense strand to SEQ ID NO: 580665
uaacaaacaccaaacguaa

SEQ ID NO: 580667 - RNA, 19 nt, Artificial Sequence
  Description of Artificial Sequence: Synthetic oligonucleotide
  Sense strand starting at position 2861 of SEQ ID NO: 318674
cuggaaguuuaauugccau

SEQ ID NO: 580668 - RNA, 19 nt, Artificial Sequence
  Description of Artificial Sequence: Synthetic oligonucleotide
  Antisense strand to SEQ ID NO: 580667
auggcaauuaaacuuccag

SEQ ID NO: 580669 - RNA, 19 nt, Artificial Sequence
  Description of Artificial Sequence: Synthetic oligonucleotide
  Sense strand starting at position 2864 of SEQ ID NO: 318674
gaaguuuaauugccauuga

SEQ ID NO: 580670 - RNA, 19 nt, Artificial Sequence
  Description of Artificial Sequence: Synthetic oligonucleotide
  Antisense strand to SEQ ID NO: 580669
ucaauggcaauuaaacuuc

SEQ ID NO: 580671 - RNA, 19 nt, Artificial Sequence
  Description of Artificial Sequence: Synthetic oligonucleotide
  Sense strand starting at position 2930 of SEQ ID NO: 318674
uuuaaaugaguuugcuuga

SEQ ID NO: 580672 - RNA, 19 nt, Artificial Sequence
  Description of Artificial Sequence: Synthetic oligonucleotide
  Antisense strand to SEQ ID NO: 580671
ucaagcaaacucauuuaaa

SEQ ID NO: 580673 - RNA, 19 nt, Artificial Sequence
  Description of Artificial Sequence: Synthetic oligonucleotide
  Sense strand starting at position 2931 of SEQ ID NO: 318674
uuaaaugaguuugcuugaa

SEQ ID NO: 580674 - RNA, 19 nt, Artificial Sequence
  Description of Artificial Sequence: Synthetic oligonucleotide
  Antisense strand to SEQ ID NO: 580673
uucaagcaaacucauuuaa

SEQ ID NO: 580675 - RNA, 19 nt, Artificial Sequence
  Description of Artificial Sequence: Synthetic oligonucleotide
  Sense strand starting at position 2933 of SEQ ID NO: 318674
aaaugaguuugcuugaaua

SEQ ID NO: 580676 - RNA, 19 nt, Artificial Sequence
  Description of Artificial Sequence: Synthetic oligonucleotide
  Antisense strand to SEQ ID NO: 580675
uauucaagcaaacucauuu

SEQ ID NO: 580677 - RNA, 19 nt, Artificial Sequence
  Description of Artificial Sequence: Synthetic oligonucleotide
  Sense strand starting at position 2935 of SEQ ID NO: 318674
augaguuugcuugaauauc

SEQ ID NO: 580678 - RNA, 19 nt, Artificial Sequence
  Description of Artificial Sequence: Synthetic oligonucleotide
  Antisense strand to SEQ ID NO: 580677
gauauucaagcaaacucau

SEQ ID NO: 580679 - RNA, 19 nt, Artificial Sequence
  Description of Artificial Sequence: Synthetic oligonucleotide
  Sense strand starting at position 2971 of SEQ ID NO: 318674
auggucuguuaacucaaga

SEQ ID NO: 580680 - RNA, 19 nt, Artificial Sequence
  Description of Artificial Sequence: Synthetic oligonucleotide
  Antisense strand to SEQ ID NO: 580679
ucuugaguuaacagaccau

SEQ ID NO: 580681 - RNA, 19 nt, Artificial Sequence
  Description of Artificial Sequence: Synthetic oligonucleotide
  Sense strand starting at position 3280 of SEQ ID NO: 318674
uuaacauguaugggaguaa

SEQ ID NO: 580682 - RNA, 19 nt, Artificial Sequence
  Description of Artificial Sequence: Synthetic oligonucleotide
  Antisense strand to SEQ ID NO: 580681
uuacucccauacauguuaa

SEQ ID NO: 580683 - RNA, 19 nt, Artificial Sequence
  Description of Artificial Sequence: Synthetic oligonucleotide
  Sense strand starting at position 3302 of SEQ ID NO: 318674
ggaagaaccuguuuccugu

SEQ ID NO: 580684 - RNA, 19 nt, Artificial Sequence
  Description of Artificial Sequence: Synthetic oligonucleotide
  Antisense strand to SEQ ID NO: 580683
acaggaaacagguucuucc

SEQ ID NO: 580685 - RNA, 19 nt, Artificial Sequence
  Description of Artificial Sequence: Synthetic oligonucleotide
  Sense strand starting at position 3348 of SEQ ID NO: 318674
uguuaaguuggucaucaaa

SEQ ID NO: 580686 - RNA, 19 nt, Artificial Sequence
  Description of Artificial Sequence: Synthetic oligonucleotide
  Antisense strand to SEQ ID NO: 580685
uuugaugaccaacuuaaca

SEQ ID NO: 580687 - RNA, 19 nt, Artificial Sequence
  Description of Artificial Sequence: Synthetic oligonucleotide
  Sense strand starting at position 3350 of SEQ ID NO: 318674
uuaaguuggucaucaaauu

SEQ ID NO: 580688 - RNA, 19 nt, Artificial Sequence
  Description of Artificial Sequence: Synthetic oligonucleotide
  Antisense strand to SEQ ID NO: 580687
aauuugaugaccaacuuaa

SEQ ID NO: 580689 - RNA, 19 nt, Artificial Sequence
  Description of Artificial Sequence: Synthetic oligonucleotide
  Sense strand starting at position 3393 of SEQ ID NO: 318674
cuaggaaauggcugugaga

SEQ ID NO: 580690 - RNA, 19 nt, Artificial Sequence
  Description of Artificial Sequence: Synthetic oligonucleotide
  Antisense strand to SEQ ID NO: 580689
ucucacagccauuuccuag

SEQ ID NO: 580691 - RNA, 19 nt, Artificial Sequence
  Description of Artificial Sequence: Synthetic oligonucleotide
  Sense strand starting at position 3395 of SEQ ID NO: 318674
aggaaauggcugugagauu

SEQ ID NO: 580692 - RNA, 19 nt, Artificial Sequence
  Description of Artificial Sequence: Synthetic oligonucleotide
  Antisense strand to SEQ ID NO: 580691
aaucucacagccauuuccu

SEQ ID NO: 580693 - RNA, 19 nt, Artificial Sequence
  Description of Artificial Sequence: Synthetic oligonucleotide
  Sense strand starting at position 3404 of SEQ ID NO: 318674
cugugagauuguuucuaag

SEQ ID NO: 580694 - RNA, 19 nt, Artificial Sequence
  Description of Artificial Sequence: Synthetic oligonucleotide
  Antisense strand to SEQ ID NO: 580693
cuuagaaacaaucucacag

SEQ ID NO: 580695 - RNA, 19 nt, Artificial Sequence
  Description of Artificial Sequence: Synthetic oligonucleotide
  Sense strand starting at position 3944 of SEQ ID NO: 318674
gguauuucuuuccuuguca

SEQ ID NO: 580696 - RNA, 19 nt, Artificial Sequence
  Description of Artificial Sequence: Synthetic oligonucleotide
  Antisense strand to SEQ ID NO: 580695
ugacaaggaaagaaauacc

SEQ ID NO: 580697 - RNA, 19 nt, Artificial Sequence
  Description of Artificial Sequence: Synthetic oligonucleotide
  Sense strand starting at position 3945 of SEQ ID NO: 318674
guauuucuuuccuugucau

SEQ ID NO: 580698 - RNA, 19 nt, Artificial Sequence
  Description of Artificial Sequence: Synthetic oligonucleotide
  Antisense strand to SEQ ID NO: 580697
augacaaggaaagaaauac

SEQ ID NO: 580699 - RNA, 19 nt, Artificial Sequence
  Description of Artificial Sequence: Synthetic oligonucleotide
  Sense strand starting at position 149 of SEQ ID NO: 318675
ggcucucaaccauauguga

SEQ ID NO: 580700 - RNA, 19 nt, Artificial Sequence
  Description of Artificial Sequence: Synthetic oligonucleotide
  Antisense strand to SEQ ID NO: 580699
ucacauaugguugagagcc

SEQ ID NO: 580701 - RNA, 19 nt, Artificial Sequence
  Description of Artificial Sequence: Synthetic oligonucleotide
  Sense strand starting at position 296 of SEQ ID NO: 318675
acuagcaaucgacaaguuu

SEQ ID NO: 580702 - RNA, 19 nt, Artificial Sequence
  Description of Artificial Sequence: Synthetic oligonucleotide
  Antisense strand to SEQ ID NO: 580701
aaacuugucgauugcuagu

SEQ ID NO: 580703 - RNA, 19 nt, Artificial Sequence
  Description of Artificial Sequence: Synthetic oligonucleotide
  Sense strand starting at position 305 of SEQ ID NO: 318675
cgacaaguuuaaccugaaa

SEQ ID NO: 580704 - RNA, 19 nt, Artificial Sequence
  Description of Artificial Sequence: Synthetic oligonucleotide
  Antisense strand to SEQ ID NO: 580703
uuucagguuaaacuugucg

SEQ ID NO: 580705 - RNA, 19 nt, Artificial Sequence
  Description of Artificial Sequence: Synthetic oligonucleotide
  Sense strand starting at position 363 of SEQ ID NO: 318675
aguuaauauugagugaaac

SEQ ID NO: 580706 - RNA, 19 nt, Artificial Sequence
  Description of Artificial Sequence: Synthetic oligonucleotide
  Antisense strand to SEQ ID NO: 580705
guuucacucaauauuaacu

SEQ ID NO: 580707 - RNA, 19 nt, Artificial Sequence
  Description of Artificial Sequence: Synthetic oligonucleotide
  Sense strand starting at position 364 of SEQ ID NO: 318675
guuaauauugagugaaaca

SEQ ID NO: 580708 - RNA, 19 nt, Artificial Sequence
  Description of Artificial Sequence: Synthetic oligonucleotide
  Antisense strand to SEQ ID NO: 580707
uguuucacucaauauuaac

SEQ ID NO: 580709 - RNA, 19 nt, Artificial Sequence
  Description of Artificial Sequence: Synthetic oligonucleotide
  Sense strand starting at position 460 of SEQ ID NO: 318675
gcggcuagucaucugcuca

SEQ ID NO: 580710 - RNA, 19 nt, Artificial Sequence
  Description of Artificial Sequence: Synthetic oligonucleotide
  Antisense strand to SEQ ID NO: 580709
ugagcagaugacuagccgc

SEQ ID NO: 580711 - RNA, 19 nt, Artificial Sequence
  Description of Artificial Sequence: Synthetic oligonucleotide
  Sense strand starting at position 624 of SEQ ID NO: 318675
aucuguuaucaaggccauu

SEQ ID NO: 580712 - RNA, 19 nt, Artificial Sequence
  Description of Artificial Sequence: Synthetic oligonucleotide
  Antisense strand to SEQ ID NO: 580711
aauggccuugauaacagau

SEQ ID NO: 580713 - RNA, 19 nt, Artificial Sequence
  Description of Artificial Sequence: Synthetic oligonucleotide
  Sense strand starting at position 706 of SEQ ID NO: 318675
cgauaugugcuacaagaga

SEQ ID NO: 580714 - RNA, 19 nt, Artificial Sequence
  Description of Artificial Sequence: Synthetic oligonucleotide
  Antisense strand to SEQ ID NO: 580713
ucucuuguagcacauaucg

SEQ ID NO: 580715 - RNA, 19 nt, Artificial Sequence
  Description of Artificial Sequence: Synthetic oligonucleotide
  Sense strand starting at position 763 of SEQ ID NO: 318675
ugaggcuuucuggaggacu

SEQ ID NO: 580716 - RNA, 19 nt, Artificial Sequence
  Description of Artificial Sequence: Synthetic oligonucleotide
  Antisense strand to SEQ ID NO: 580715
aguccuccagaaagccuca

SEQ ID NO: 580717 - RNA, 19 nt, Artificial Sequence
  Description of Artificial Sequence: Synthetic oligonucleotide
  Sense strand starting at position 765 of SEQ ID NO: 318675
aggcuuucuggaggacuua

SEQ ID NO: 580718 - RNA, 19 nt, Artificial Sequence
  Description of Artificial Sequence: Synthetic oligonucleotide
  Antisense strand to SEQ ID NO: 580717
uaaguccuccagaaagccu

SEQ ID NO: 580719 - RNA, 19 nt, Artificial Sequence
  Description of Artificial Sequence: Synthetic oligonucleotide
  Sense strand starting at position 777 of SEQ ID NO: 318675
ggacuuaagcuuugaagaa

SEQ ID NO: 580720 - RNA, 19 nt, Artificial Sequence
  Description of Artificial Sequence: Synthetic oligonucleotide
  Antisense strand to SEQ ID NO: 580719
uucuucaaagcuuaagucc

SEQ ID NO: 580721 - RNA, 19 nt, Artificial Sequence
  Description of Artificial Sequence: Synthetic oligonucleotide
  Sense strand starting at position 819 of SEQ ID NO: 318675
augugaauccuagagcaug

SEQ ID NO: 580722 - RNA, 19 nt, Artificial Sequence
  Description of Artificial Sequence: Synthetic oligonucleotide
  Antisense strand to SEQ ID NO: 580721
caugcucuaggauucacau

SEQ ID NO: 580723 - RNA, 19 nt, Artificial Sequence
  Description of Artificial Sequence: Synthetic oligonucleotide
  Sense strand starting at position 907 of SEQ ID NO: 318675
auuguuccucuaugacuau

SEQ ID NO: 580724 - RNA, 19 nt, Artificial Sequence
  Description of Artificial Sequence: Synthetic oligonucleotide
  Antisense strand to SEQ ID NO: 580723
auagucauagaggaacaau

SEQ ID NO: 580725 - RNA, 19 nt, Artificial Sequence
  Description of Artificial Sequence: Synthetic oligonucleotide
  Sense strand starting at position 952 of SEQ ID NO: 318675
gaaggaggcuuuccugagu

SEQ ID NO: 580726 - RNA, 19 nt, Artificial Sequence
  Description of Artificial Sequence: Synthetic oligonucleotide
  Antisense strand to SEQ ID NO: 580725
acucaggaaagccuccuuc

SEQ ID NO: 580727 - RNA, 19 nt, Artificial Sequence
  Description of Artificial Sequence: Synthetic oligonucleotide
  Sense strand starting at position 955 of SEQ ID NO: 318675
ggaggcuuuccugagucua

SEQ ID NO: 580728 - RNA, 19 nt, Artificial Sequence
  Description of Artificial Sequence: Synthetic oligonucleotide
  Antisense strand to SEQ ID NO: 580727
uagacucaggaaagccucc

SEQ ID NO: 580729 - RNA, 19 nt, Artificial Sequence
  Description of Artificial Sequence: Synthetic oligonucleotide
  Sense strand starting at position 963 of SEQ ID NO: 318675
uccugagucuaguuagaag

SEQ ID NO: 580730 - RNA, 19 nt, Artificial Sequence
  Description of Artificial Sequence: Synthetic oligonucleotide
  Antisense strand to SEQ ID NO: 580729
cuucuaacuagacucagga

SEQ ID NO: 580731 - RNA, 19 nt, Artificial Sequence
  Description of Artificial Sequence: Synthetic oligonucleotide
  Sense strand starting at position 1156 of SEQ ID NO: 318675
ucuaaauuccuguacuguu

SEQ ID NO: 580732 - RNA, 19 nt, Artificial Sequence
  Description of Artificial Sequence: Synthetic oligonucleotide
  Antisense strand to SEQ ID NO: 580731
aacaguacaggaauuuaga

SEQ ID NO: 580733 - RNA, 19 nt, Artificial Sequence
  Description of Artificial Sequence: Synthetic oligonucleotide
  Sense strand starting at position 1866 of SEQ ID NO: 318675
gauuccugguuuccuaaga

SEQ ID NO: 580734 - RNA, 19 nt, Artificial Sequence
  Description of Artificial Sequence: Synthetic oligonucleotide
  Antisense strand to SEQ ID NO: 580733
ucuuaggaaaccaggaauc

SEQ ID NO: 580735 - RNA, 19 nt, Artificial Sequence
  Description of Artificial Sequence: Synthetic oligonucleotide
  Sense strand starting at position 1867 of SEQ ID NO: 318675
auuccugguuuccuaagaa

SEQ ID NO: 580736 - RNA, 19 nt, Artificial Sequence
  Description of Artificial Sequence: Synthetic oligonucleotide
  Antisense strand to SEQ ID NO: 580735
uucuuaggaaaccaggaau

SEQ ID NO: 580737 - RNA, 19 nt, Artificial Sequence
  Description of Artificial Sequence: Synthetic oligonucleotide
  Sense strand starting at position 1909 of SEQ ID NO: 318675
guucgaacaguccacagaa

SEQ ID NO: 580738 - RNA, 19 nt, Artificial Sequence
  Description of Artificial Sequence: Synthetic oligonucleotide
  Antisense strand to SEQ ID NO: 580737
uucuguggacuguucgaac

SEQ ID NO: 580739 - RNA, 19 nt, Artificial Sequence
  Description of Artificial Sequence: Synthetic oligonucleotide
  Sense strand starting at position 2260 of SEQ ID NO: 318675
ggguuuauagccuagcuga

SEQ ID NO: 580740 - RNA, 19 nt, Artificial Sequence
  Description of Artificial Sequence: Synthetic oligonucleotide
  Antisense strand to SEQ ID NO: 580739
ucagcuaggcuauaaaccc

SEQ ID NO: 580741 - RNA, 19 nt, Artificial Sequence
  Description of Artificial Sequence: Synthetic oligonucleotide
  Sense strand starting at position 2425 of SEQ ID NO: 318675
gaauuacagccagaacgua

SEQ ID NO: 580742 - RNA, 19 nt, Artificial Sequence
  Description of Artificial Sequence: Synthetic oligonucleotide
  Antisense strand to SEQ ID NO: 580741
uacguucuggcuguaauuc

SEQ ID NO: 580743 - RNA, 19 nt, Artificial Sequence
  Description of Artificial Sequence: Synthetic oligonucleotide
  Sense strand starting at position 2487 of SEQ ID NO: 318675
gguaaucaagauuguuaau

SEQ ID NO: 580744 - RNA, 19 nt, Artificial Sequence
  Description of Artificial Sequence: Synthetic oligonucleotide
  Antisense strand to SEQ ID NO: 580743
auuaacaaucuugauuacc

SEQ ID NO: 580745 - RNA, 19 nt, Artificial Sequence
  Description of Artificial Sequence: Synthetic oligonucleotide
  Sense strand starting at position 2658 of SEQ ID NO: 318675
acgggaugucaccaccagu

SEQ ID NO: 580746 - RNA, 19 nt, Artificial Sequence
  Description of Artificial Sequence: Synthetic oligonucleotide
  Antisense strand to SEQ ID NO: 580745
acugguggugacaucccgu

SEQ ID NO: 580747 - RNA, 19 nt, Artificial Sequence
  Description of Artificial Sequence: Synthetic oligonucleotide
  Sense strand starting at position 2759 of SEQ ID NO: 318675
acugaugucgaccaacgau

SEQ ID NO: 580748 - RNA, 19 nt, Artificial Sequence
  Description of Artificial Sequence: Synthetic oligonucleotide
  Antisense strand to SEQ ID NO: 580747
aucguuggucgacaucagu

SEQ ID NO: 580749 - RNA, 19 nt, Artificial Sequence
  Description of Artificial Sequence: Synthetic oligonucleotide
  Sense strand starting at position 2775 of SEQ ID NO: 318675
gauuguccugagggucaau

SEQ ID NO: 580750 - RNA, 19 nt, Artificial Sequence
  Description of Artificial Sequence: Synthetic oligonucleotide
  Antisense strand to SEQ ID NO: 580749
auugacccucaggacaauc

SEQ ID NO: 580751 - RNA, 19 nt, Artificial Sequence
  Description of Artificial Sequence: Synthetic oligonucleotide
  Sense strand starting at position 2826 of SEQ ID NO: 318675
cuaauaugaagacgugauu

SEQ ID NO: 580752 - RNA, 19 nt, Artificial Sequence
  Description of Artificial Sequence: Synthetic oligonucleotide
  Antisense strand to SEQ ID NO: 580751
aaucacgucuucauauuag

SEQ ID NO: 580753 - RNA, 19 nt, Artificial Sequence
  Description of Artificial Sequence: Synthetic oligonucleotide
  Sense strand starting at position 2840 of SEQ ID NO: 318675
ugauuugcccuuugcacaa

SEQ ID NO: 580754 - RNA, 19 nt, Artificial Sequence
  Description of Artificial Sequence: Synthetic oligonucleotide
  Antisense strand to SEQ ID NO: 580753
uugugcaaagggcaaauca

SEQ ID NO: 580755 - RNA, 19 nt, Artificial Sequence
  Description of Artificial Sequence: Synthetic oligonucleotide
  Sense strand starting at position 2966 of SEQ ID NO: 318675
acacgcucacaguaagaaa

SEQ ID NO: 580756 - RNA, 19 nt, Artificial Sequence
  Description of Artificial Sequence: Synthetic oligonucleotide
  Antisense strand to SEQ ID NO: 580755
uuucuuacugugagcgugu

SEQ ID NO: 580757 - RNA, 19 nt, Artificial Sequence
  Description of Artificial Sequence: Synthetic oligonucleotide
  Sense strand starting at position 3272 of SEQ ID NO: 318675
gaacgcugucaccagagaa

SEQ ID NO: 580758 - RNA, 19 nt, Artificial Sequence
  Description of Artificial Sequence: Synthetic oligonucleotide
  Antisense strand to SEQ ID NO: 580757
uucucuggugacagcguuc

SEQ ID NO: 580759 - RNA, 19 nt, Artificial Sequence
  Description of Artificial Sequence: Synthetic oligonucleotide
  Sense strand starting at position 3389 of SEQ ID NO: 318675
cauauugaaguaugacgua

SEQ ID NO: 580760 - RNA, 19 nt, Artificial Sequence
  Description of Artificial Sequence: Synthetic oligonucleotide
  Antisense strand to SEQ ID NO: 580759
uacgucauacuucaauaug

SEQ ID NO: 580761 - RNA, 19 nt, Artificial Sequence
  Description of Artificial Sequence: Synthetic oligonucleotide
  Sense strand starting at position 3394 of SEQ ID NO: 318675
ugaaguaugacguaucaaa

SEQ ID NO: 580762 - RNA, 19 nt, Artificial Sequence
  Description of Artificial Sequence: Synthetic oligonucleotide
  Antisense strand to SEQ ID NO: 580761
uuugauacgucauacuuca

SEQ ID NO: 580763 - RNA, 19 nt, Artificial Sequence
  Description of Artificial Sequence: Synthetic oligonucleotide
  Sense strand starting at position 3488 of SEQ ID NO: 318675
gagugacaaaccgguuauu

SEQ ID NO: 580764 - RNA, 19 nt, Artificial Sequence
  Description of Artificial Sequence: Synthetic oligonucleotide
  Antisense strand to SEQ ID NO: 580763
aauaaccgguuugucacuc

SEQ ID NO: 580765 - RNA, 19 nt, Artificial Sequence
  Description of Artificial Sequence: Synthetic oligonucleotide
  Sense strand starting at position 3512 of SEQ ID NO: 318675
uuggguauuugacaaaccu

SEQ ID NO: 580766 - RNA, 19 nt, Artificial Sequence
  Description of Artificial Sequence: Synthetic oligonucleotide
  Antisense strand to SEQ ID NO: 580765
agguuugucaaauacccaa

SEQ ID NO: 580767 - RNA, 19 nt, Artificial Sequence
  Description of Artificial Sequence: Synthetic oligonucleotide
  Sense strand starting at position 3764 of SEQ ID NO: 318675
ugauauaagugauuaucag

SEQ ID NO: 580768 - RNA, 19 nt, Artificial Sequence
  Description of Artificial Sequence: Synthetic oligonucleotide
  Antisense strand to SEQ ID NO: 580767
cugauaaucacuuauauca

SEQ ID NO: 580769 - RNA, 19 nt, Artificial Sequence
  Description of Artificial Sequence: Synthetic oligonucleotide
  Sense strand starting at position 3770 of SEQ ID NO: 318675
aagugauuaucaguuguga

SEQ ID NO: 580770 - RNA, 19 nt, Artificial Sequence
  Description of Artificial Sequence: Synthetic oligonucleotide
  Antisense strand to SEQ ID NO: 580769
ucacaacugauaaucacuu

SEQ ID NO: 580771 - RNA, 19 nt, Artificial Sequence
  Description of Artificial Sequence: Synthetic oligonucleotide
  Sense strand starting at position 3836 of SEQ ID NO: 318675
gcauaagugaaccaguagu

SEQ ID NO: 580772 - RNA, 19 nt, Artificial Sequence
  Description of Artificial Sequence: Synthetic oligonucleotide
  Antisense strand to SEQ ID NO: 580771
acuacugguucacuuaugc

SEQ ID NO: 580773 - RNA, 19 nt, Artificial Sequence
  Description of Artificial Sequence: Synthetic oligonucleotide
  Sense strand starting at position 3933 of SEQ ID NO: 318675
acugccuuccuauauugua

SEQ ID NO: 580774 - RNA, 19 nt, Artificial Sequence
  Description of Artificial Sequence: Synthetic oligonucleotide
  Antisense strand to SEQ ID NO: 580773
uacaauauaggaaggcagu

SEQ ID NO: 580775 - RNA, 19 nt, Artificial Sequence
  Description of Artificial Sequence: Synthetic oligonucleotide
  Sense strand starting at position 3961 of SEQ ID NO: 318675
gucuguguuaccuacagaa

SEQ ID NO: 580776 - RNA, 19 nt, Artificial Sequence
  Description of Artificial Sequence: Synthetic oligonucleotide
  Antisense strand to SEQ ID NO: 580775
uucuguagguaacacagac

SEQ ID NO: 580777 - RNA, 19 nt, Artificial Sequence
  Description of Artificial Sequence: Synthetic oligonucleotide
  Sense strand starting at position 3963 of SEQ ID NO: 318675
cuguguuaccuacagaaga

SEQ ID NO: 580778 - RNA, 19 nt, Artificial Sequence
  Description of Artificial Sequence: Synthetic oligonucleotide
  Antisense strand to SEQ ID NO: 580777
ucuucuguagguaacacag

SEQ ID NO: 580779 - RNA, 19 nt, Artificial Sequence
  Description of Artificial Sequence: Synthetic oligonucleotide
  Sense strand starting at position 18 of SEQ ID NO: 318676
ugagguacucaauggaagu

SEQ ID NO: 580780 - RNA, 19 nt, Artificial Sequence
  Description of Artificial Sequence: Synthetic oligonucleotide
  Antisense strand to SEQ ID NO: 580779
acuuccauugaguaccuca

SEQ ID NO: 580781 - RNA, 19 nt, Artificial Sequence
  Description of Artificial Sequence: Synthetic oligonucleotide
  Sense strand starting at position 29 of SEQ ID NO: 318676
auggaaguguuucccauca

SEQ ID NO: 580782 - RNA, 19 nt, Artificial Sequence
  Description of Artificial Sequence: Synthetic oligonucleotide
  Antisense strand to SEQ ID NO: 580781
ugaugggaaacacuuccau

SEQ ID NO: 580783 - RNA, 19 nt, Artificial Sequence
  Description of Artificial Sequence: Synthetic oligonucleotide
  Sense strand starting at position 34 of SEQ ID NO: 318676
aguguuucccaucacugga

SEQ ID NO: 580784 - RNA, 19 nt, Artificial Sequence
  Description of Artificial Sequence: Synthetic oligonucleotide
  Antisense strand to SEQ ID NO: 580783
uccagugaugggaaacacu

SEQ ID NO: 580785 - RNA, 19 nt, Artificial Sequence
  Description of Artificial Sequence: Synthetic oligonucleotide
  Sense strand starting at position 108 of SEQ ID NO: 318676
gaaugucagaugggaagua

SEQ ID NO: 580786 - RNA, 19 nt, Artificial Sequence
  Description of Artificial Sequence: Synthetic oligonucleotide
  Antisense strand to SEQ ID NO: 580785
uacuucccaucugacauuc

SEQ ID NO: 580787 - RNA, 19 nt, Artificial Sequence
  Description of Artificial Sequence: Synthetic oligonucleotide
  Sense strand starting at position 246 of SEQ ID NO: 318676
aaagauguauucuuguaag

SEQ ID NO: 580788 - RNA, 19 nt, Artificial Sequence
  Description of Artificial Sequence: Synthetic oligonucleotide
  Antisense strand to SEQ ID NO: 580787
cuuacaagaauacaucuuu

SEQ ID NO: 580789 - RNA, 19 nt, Artificial Sequence
  Description of Artificial Sequence: Synthetic oligonucleotide
  Sense strand starting at position 261 of SEQ ID NO: 318676
uaagccugucaucagagua

SEQ ID NO: 580790 - RNA, 19 nt, Artificial Sequence
  Description of Artificial Sequence: Synthetic oligonucleotide
  Antisense strand to SEQ ID NO: 580789
uacucugaugacaggcuua

SEQ ID NO: 580791 - RNA, 19 nt, Artificial Sequence
  Description of Artificial Sequence: Synthetic oligonucleotide
  Sense strand starting at position 266 of SEQ ID NO: 318676
cugucaucagaguacaugu

SEQ ID NO: 580792 - RNA, 19 nt, Artificial Sequence
  Description of Artificial Sequence: Synthetic oligonucleotide
  Antisense strand to SEQ ID NO: 580791
acauguacucugaugacag

SEQ ID NO: 580793 - RNA, 19 nt, Artificial Sequence
  Description of Artificial Sequence: Synthetic oligonucleotide
  Sense strand starting at position 458 of SEQ ID NO: 318676
uuaccuuccgugcuguauu

SEQ ID NO: 580794 - RNA, 19 nt, Artificial Sequence
  Description of Artificial Sequence: Synthetic oligonucleotide
  Antisense strand to SEQ ID NO: 580793
aauacagcacggaagguaa

SEQ ID NO: 580795 - RNA, 19 nt, Artificial Sequence
  Description of Artificial Sequence: Synthetic oligonucleotide
  Sense strand starting at position 524 of SEQ ID NO: 318676
guaaacugagacuauuguu

SEQ ID NO: 580796 - RNA, 19 nt, Artificial Sequence
  Description of Artificial Sequence: Synthetic oligonucleotide
  Antisense strand to SEQ ID NO: 580795
aacaauagucucaguuuac

SEQ ID NO: 580797 - RNA, 19 nt, Artificial Sequence
  Description of Artificial Sequence: Synthetic oligonucleotide
  Sense strand starting at position 875 of SEQ ID NO: 318676
cccgcagaucuuuaucaug

SEQ ID NO: 580798 - RNA, 19 nt, Artificial Sequence
  Description of Artificial Sequence: Synthetic oligonucleotide
  Antisense strand to SEQ ID NO: 580797
caugauaaagaucugcggg

SEQ ID NO: 580799 - RNA, 19 nt, Artificial Sequence
  Description of Artificial Sequence: Synthetic oligonucleotide
  Sense strand starting at position 1123 of SEQ ID NO: 318676
ucaguaaaugcuuaguaua

SEQ ID NO: 580800 - RNA, 19 nt, Artificial Sequence
  Description of Artificial Sequence: Synthetic oligonucleotide
  Antisense strand to SEQ ID NO: 580799
uauacuaagcauuuacuga

SEQ ID NO: 580801 - RNA, 19 nt, Artificial Sequence
  Description of Artificial Sequence: Synthetic oligonucleotide
  Sense strand starting at position 1244 of SEQ ID NO: 318676
ugacuuaaguaaguaguau

SEQ ID NO: 580802 - RNA, 19 nt, Artificial Sequence
  Description of Artificial Sequence: Synthetic oligonucleotide
  Antisense strand to SEQ ID NO: 580801
auacuacuuacuuaaguca

SEQ ID NO: 580803 - RNA, 19 nt, Artificial Sequence
  Description of Artificial Sequence: Synthetic oligonucleotide
  Sense strand starting at position 1551 of SEQ ID NO: 318676
ugccuacagccugaaacuu

SEQ ID NO: 580804 - RNA, 19 nt, Artificial Sequence
  Description of Artificial Sequence: Synthetic oligonucleotide
  Antisense strand to SEQ ID NO: 580803
aaguuucaggcuguaggca

SEQ ID NO: 580805 - RNA, 19 nt, Artificial Sequence
  Description of Artificial Sequence: Synthetic oligonucleotide
  Sense strand starting at position 1559 of SEQ ID NO: 318676
gccugaaacuucuuacuag

SEQ ID NO: 580806 - RNA, 19 nt, Artificial Sequence
  Description of Artificial Sequence: Synthetic oligonucleotide
  Antisense strand to SEQ ID NO: 580805
cuaguaagaaguuucaggc

SEQ ID NO: 580807 - RNA, 19 nt, Artificial Sequence
  Description of Artificial Sequence: Synthetic oligonucleotide
  Sense strand starting at position 1603 of SEQ ID NO: 318676
acaguaaauccugacugca

SEQ ID NO: 580808 - RNA, 19 nt, Artificial Sequence
  Description of Artificial Sequence: Synthetic oligonucleotide
  Antisense strand to SEQ ID NO: 580807
ugcagucaggauuuacugu

SEQ ID NO: 580809 - RNA, 19 nt, Artificial Sequence
  Description of Artificial Sequence: Synthetic oligonucleotide
  Sense strand starting at position 1657 of SEQ ID NO: 318676
agauuucccugggaaggua

SEQ ID NO: 580810 - RNA, 19 nt, Artificial Sequence
  Description of Artificial Sequence: Synthetic oligonucleotide
  Antisense strand to SEQ ID NO: 580809
uaccuucccagggaaaucu

SEQ ID NO: 580811 - RNA, 19 nt, Artificial Sequence
  Description of Artificial Sequence: Synthetic oligonucleotide
  Sense strand starting at position 2024 of SEQ ID NO: 318676
gguucugauuugcucggua

SEQ ID NO: 580812 - RNA, 19 nt, Artificial Sequence
  Description of Artificial Sequence: Synthetic oligonucleotide
  Antisense strand to SEQ ID NO: 580811
uaccgagcaaaucagaacc

SEQ ID NO: 580813 - RNA, 19 nt, Artificial Sequence
  Description of Artificial Sequence: Synthetic oligonucleotide
  Sense strand starting at position 2026 of SEQ ID NO: 318676
uucugauuugcucgguauu

SEQ ID NO: 580814 - RNA, 19 nt, Artificial Sequence
  Description of Artificial Sequence: Synthetic oligonucleotide
  Antisense strand to SEQ ID NO: 580813
aauaccgagcaaaucagaa

SEQ ID NO: 580815 - RNA, 19 nt, Artificial Sequence
  Description of Artificial Sequence: Synthetic oligonucleotide
  Sense strand starting at position 2032 of SEQ ID NO: 318676
uuugcucgguauuugauua

SEQ ID NO: 580816 - RNA, 19 nt, Artificial Sequence
  Description of Artificial Sequence: Synthetic oligonucleotide
  Antisense strand to SEQ ID NO: 580815
uaaucaaauaccgagcaaa

SEQ ID NO: 580817 - RNA, 19 nt, Artificial Sequence
  Description of Artificial Sequence: Synthetic oligonucleotide
  Sense strand starting at position 2033 of SEQ ID NO: 318676
uugcucgguauuugauuaa

SEQ ID NO: 580818 - RNA, 19 nt, Artificial Sequence
  Description of Artificial Sequence: Synthetic oligonucleotide
  Antisense strand to SEQ ID NO: 580817
uuaaucaaauaccgagcaa

SEQ ID NO: 580819 - RNA, 19 nt, Artificial Sequence
  Description of Artificial Sequence: Synthetic oligonucleotide
  Sense strand starting at position 2800 of SEQ ID NO: 318676
ggaauucauguuuggguga

SEQ ID NO: 580820 - RNA, 19 nt, Artificial Sequence
  Description of Artificial Sequence: Synthetic oligonucleotide
  Antisense strand to SEQ ID NO: 580819
ucacccaaacaugaauucc

SEQ ID NO: 580821 - RNA, 19 nt, Artificial Sequence
  Description of Artificial Sequence: Synthetic oligonucleotide
  Sense strand starting at position 2803 of SEQ ID NO: 318676
auucauguuugggugagaa

SEQ ID NO: 580822 - RNA, 19 nt, Artificial Sequence
  Description of Artificial Sequence: Synthetic oligonucleotide
  Antisense strand to SEQ ID NO: 580821
uucucacccaaacaugaau

SEQ ID NO: 580823 - RNA, 19 nt, Artificial Sequence
  Description of Artificial Sequence: Synthetic oligonucleotide
  Sense strand starting at position 2805 of SEQ ID NO: 318676
ucauguuugggugagaagu

SEQ ID NO: 580824 - RNA, 19 nt, Artificial Sequence
  Description of Artificial Sequence: Synthetic oligonucleotide
  Antisense strand to SEQ ID NO: 580823
acuucucacccaaacauga

SEQ ID NO: 580825 - RNA, 19 nt, Artificial Sequence
  Description of Artificial Sequence: Synthetic oligonucleotide
  Sense strand starting at position 2841 of SEQ ID NO: 318676
auuacccaggucugugaua

SEQ ID NO: 580826 - RNA, 19 nt, Artificial Sequence
  Description of Artificial Sequence: Synthetic oligonucleotide
  Antisense strand to SEQ ID NO: 580825
uaucacagaccuggguaau

SEQ ID NO: 580827 - RNA, 19 nt, Artificial Sequence
  Description of Artificial Sequence: Synthetic oligonucleotide
  Sense strand starting at position 2842 of SEQ ID NO: 318676
uuacccaggucugugauaa

SEQ ID NO: 580828 - RNA, 19 nt, Artificial Sequence
  Description of Artificial Sequence: Synthetic oligonucleotide
  Antisense strand to SEQ ID NO: 580827
uuaucacagaccuggguaa

SEQ ID NO: 580829 - RNA, 19 nt, Artificial Sequence
  Description of Artificial Sequence: Synthetic oligonucleotide
  Sense strand starting at position 2843 of SEQ ID NO: 318676
uacccaggucugugauaau

SEQ ID NO: 580830 - RNA, 19 nt, Artificial Sequence
  Description of Artificial Sequence: Synthetic oligonucleotide
  Antisense strand to SEQ ID NO: 580829
auuaucacagaccugggua

SEQ ID NO: 580831 - RNA, 19 nt, Artificial Sequence
  Description of Artificial Sequence: Synthetic oligonucleotide
  Sense strand starting at position 2880 of SEQ ID NO: 318676
aauggaaucguugguauaa

SEQ ID NO: 580832 - RNA, 19 nt, Artificial Sequence
  Description of Artificial Sequence: Synthetic oligonucleotide
  Antisense strand to SEQ ID NO: 580831
uuauaccaacgauuccauu

SEQ ID NO: 580833 - RNA, 19 nt, Artificial Sequence
  Description of Artificial Sequence: Synthetic oligonucleotide
  Sense strand starting at position 2881 of SEQ ID NO: 318676
auggaaucguugguauaac

SEQ ID NO: 580834 - RNA, 19 nt, Artificial Sequence
  Description of Artificial Sequence: Synthetic oligonucleotide
  Antisense strand to SEQ ID NO: 580833
guuauaccaacgauuccau

SEQ ID NO: 580835 - RNA, 19 nt, Artificial Sequence
  Description of Artificial Sequence: Synthetic oligonucleotide
  Sense strand starting at position 2913 of SEQ ID NO: 318676
ccguauuccagagaaauug

SEQ ID NO: 580836 - RNA, 19 nt, Artificial Sequence
  Description of Artificial Sequence: Synthetic oligonucleotide
  Antisense strand to SEQ ID NO: 580835
caauuucucuggaauacgg

SEQ ID NO: 580837 - RNA, 19 nt, Artificial Sequence
  Description of Artificial Sequence: Synthetic oligonucleotide
  Sense strand starting at position 3065 of SEQ ID NO: 318676
uuagacaauuguuugguua

SEQ ID NO: 580838 - RNA, 19 nt, Artificial Sequence
  Description of Artificial Sequence: Synthetic oligonucleotide
  Antisense strand to SEQ ID NO: 580837
uaaccaaacaauugucuaa

SEQ ID NO: 580839 - RNA, 19 nt, Artificial Sequence
  Description of Artificial Sequence: Synthetic oligonucleotide
  Sense strand starting at position 3066 of SEQ ID NO: 318676
uagacaauuguuugguuau

SEQ ID NO: 580840 - RNA, 19 nt, Artificial Sequence
  Description of Artificial Sequence: Synthetic oligonucleotide
  Antisense strand to SEQ ID NO: 580839
auaaccaaacaauugucua

SEQ ID NO: 580841 - RNA, 19 nt, Artificial Sequence
  Description of Artificial Sequence: Synthetic oligonucleotide
  Sense strand starting at position 3158 of SEQ ID NO: 318676
acuaaagaguguuuguaau

SEQ ID NO: 580842 - RNA, 19 nt, Artificial Sequence
  Description of Artificial Sequence: Synthetic oligonucleotide
  Antisense strand to SEQ ID NO: 580841
auuacaaacacucuuuagu

SEQ ID NO: 580843 - RNA, 19 nt, Artificial Sequence
  Description of Artificial Sequence: Synthetic oligonucleotide
  Sense strand starting at position 3160 of SEQ ID NO: 318676
uaaagaguguuuguaauca

SEQ ID NO: 580844 - RNA, 19 nt, Artificial Sequence
  Description of Artificial Sequence: Synthetic oligonucleotide
  Antisense strand to SEQ ID NO: 580843
ugauuacaaacacucuuua

SEQ ID NO: 580845 - RNA, 19 nt, Artificial Sequence
  Description of Artificial Sequence: Synthetic oligonucleotide
  Sense strand starting at position 3185 of SEQ ID NO: 318676
guauuuccuuucucguaga

SEQ ID NO: 580846 - RNA, 19 nt, Artificial Sequence
  Description of Artificial Sequence: Synthetic oligonucleotide
  Antisense strand to SEQ ID NO: 580845
ucuacgagaaaggaaauac

SEQ ID NO: 580847 - RNA, 19 nt, Artificial Sequence
  Description of Artificial Sequence: Synthetic oligonucleotide
  Sense strand starting at position 3296 of SEQ ID NO: 318676
augggcaguacuggaaauu

SEQ ID NO: 580848 - RNA, 19 nt, Artificial Sequence
  Description of Artificial Sequence: Synthetic oligonucleotide
  Antisense strand to SEQ ID NO: 580847
aauuuccaguacugcccau

SEQ ID NO: 580849 - RNA, 19 nt, Artificial Sequence
  Description of Artificial Sequence: Synthetic oligonucleotide
  Sense strand starting at position 3405 of SEQ ID NO: 318676
ccaucuuaugaaugacagu

SEQ ID NO: 580850 - RNA, 19 nt, Artificial Sequence
  Description of Artificial Sequence: Synthetic oligonucleotide
  Antisense strand to SEQ ID NO: 580849
acugucauucauaagaugg

SEQ ID NO: 580851 - RNA, 19 nt, Artificial Sequence
  Description of Artificial Sequence: Synthetic oligonucleotide
  Sense strand starting at position 3589 of SEQ ID NO: 318676
agggaauccgaauguggau

SEQ ID NO: 580852 - RNA, 19 nt, Artificial Sequence
  Description of Artificial Sequence: Synthetic oligonucleotide
  Antisense strand to SEQ ID NO: 580851
auccacauucggauucccu

SEQ ID NO: 580853 - RNA, 19 nt, Artificial Sequence
  Description of Artificial Sequence: Synthetic oligonucleotide
  Sense strand starting at position 3637 of SEQ ID NO: 318676
cugagauauauagguuugu

SEQ ID NO: 580854 - RNA, 19 nt, Artificial Sequence
  Description of Artificial Sequence: Synthetic oligonucleotide
  Antisense strand to SEQ ID NO: 580853
acaaaccuauauaucucag

SEQ ID NO: 580855 - RNA, 19 nt, Artificial Sequence
  Description of Artificial Sequence: Synthetic oligonucleotide
  Sense strand starting at position 3638 of SEQ ID NO: 318676
ugagauauauagguuuguu

SEQ ID NO: 580856 - RNA, 19 nt, Artificial Sequence
  Description of Artificial Sequence: Synthetic oligonucleotide
  Antisense strand to SEQ ID NO: 580855
aacaaaccuauauaucuca

SEQ ID NO: 580857 - RNA, 19 nt, Artificial Sequence
  Description of Artificial Sequence: Synthetic oligonucleotide
  Sense strand starting at position 3669 of SEQ ID NO: 318676
guaguaugaaugcauagau

SEQ ID NO: 580858 - RNA, 19 nt, Artificial Sequence
  Description of Artificial Sequence: Synthetic oligonucleotide
  Antisense strand to SEQ ID NO: 580857
aucuaugcauucauacuac

SEQ ID NO: 580859 - RNA, 19 nt, Artificial Sequence
  Description of Artificial Sequence: Synthetic oligonucleotide
  Sense strand starting at position 290 of SEQ ID NO: 318677
aaagaugaugcucguaaag

SEQ ID NO: 580860 - RNA, 19 nt, Artificial Sequence
  Description of Artificial Sequence: Synthetic oligonucleotide
  Antisense strand to SEQ ID NO: 580859
cuuuacgagcaucaucuuu

SEQ ID NO: 580861 - RNA, 19 nt, Artificial Sequence
  Description of Artificial Sequence: Synthetic oligonucleotide
  Sense strand starting at position 349 of SEQ ID NO: 318677
caugguaauuguguuacua

SEQ ID NO: 580862 - RNA, 19 nt, Artificial Sequence
  Description of Artificial Sequence: Synthetic oligonucleotide
  Antisense strand to SEQ ID NO: 580861
uaguaacacaauuaccaug

SEQ ID NO: 580863 - RNA, 19 nt, Artificial Sequence
  Description of Artificial Sequence: Synthetic oligonucleotide
  Sense strand starting at position 353 of SEQ ID NO: 318677
guaauuguguuacuaugac

SEQ ID NO: 580864 - RNA, 19 nt, Artificial Sequence
  Description of Artificial Sequence: Synthetic oligonucleotide
  Antisense strand to SEQ ID NO: 580863
gucauaguaacacaauuac

SEQ ID NO: 580865 - RNA, 19 nt, Artificial Sequence
  Description of Artificial Sequence: Synthetic oligonucleotide
  Sense strand starting at position 446 of SEQ ID NO: 318677
ccuguuaaggucuaaauga

SEQ ID NO: 580866 - RNA, 19 nt, Artificial Sequence
  Description of Artificial Sequence: Synthetic oligonucleotide
  Antisense strand to SEQ ID NO: 580865
ucauuuagaccuuaacagg

SEQ ID NO: 580867 - RNA, 19 nt, Artificial Sequence
  Description of Artificial Sequence: Synthetic oligonucleotide
  Sense strand starting at position 511 of SEQ ID NO: 318677
ggugaaggagcaugaaagu

SEQ ID NO: 580868 - RNA, 19 nt, Artificial Sequence
  Description of Artificial Sequence: Synthetic oligonucleotide
  Antisense strand to SEQ ID NO: 580867
acuuucaugcuccuucacc

SEQ ID NO: 580869 - RNA, 19 nt, Artificial Sequence
  Description of Artificial Sequence: Synthetic oligonucleotide
  Sense strand starting at position 731 of SEQ ID NO: 318677
guaucagaagcgcaaacuu

SEQ ID NO: 580870 - RNA, 19 nt, Artificial Sequence
  Description of Artificial Sequence: Synthetic oligonucleotide
  Antisense strand to SEQ ID NO: 580869
aaguuugcgcuucugauac

SEQ ID NO: 580871 - RNA, 19 nt, Artificial Sequence
  Description of Artificial Sequence: Synthetic oligonucleotide
  Sense strand starting at position 2084 of SEQ ID NO: 318677
ccaccucgagcauaaagua

SEQ ID NO: 580872 - RNA, 19 nt, Artificial Sequence
  Description of Artificial Sequence: Synthetic oligonucleotide
  Antisense strand to SEQ ID NO: 580871
uacuuuaugcucgaggugg

SEQ ID NO: 580873 - RNA, 19 nt, Artificial Sequence
  Description of Artificial Sequence: Synthetic oligonucleotide
  Sense strand starting at position 2298 of SEQ ID NO: 318677
agugcuaaaucagugcaga

SEQ ID NO: 580874 - RNA, 19 nt, Artificial Sequence
  Description of Artificial Sequence: Synthetic oligonucleotide
  Antisense strand to SEQ ID NO: 580873
ucugcacugauuuagcacu

SEQ ID NO: 580875 - RNA, 19 nt, Artificial Sequence
  Description of Artificial Sequence: Synthetic oligonucleotide
  Sense strand starting at position 2370 of SEQ ID NO: 318677
aucagucuauugguuaaca

SEQ ID NO: 580876 - RNA, 19 nt, Artificial Sequence
  Description of Artificial Sequence: Synthetic oligonucleotide
  Antisense strand to SEQ ID NO: 580875
uguuaaccaauagacugau

SEQ ID NO: 580877 - RNA, 19 nt, Artificial Sequence
  Description of Artificial Sequence: Synthetic oligonucleotide
  Sense strand starting at position 2371 of SEQ ID NO: 318677
ucagucuauugguuaacau

SEQ ID NO: 580878 - RNA, 19 nt, Artificial Sequence
  Description of Artificial Sequence: Synthetic oligonucleotide
  Antisense strand to SEQ ID NO: 580877
auguuaaccaauagacuga

SEQ ID NO: 580879 - RNA, 19 nt, Artificial Sequence
  Description of Artificial Sequence: Synthetic oligonucleotide
  Sense strand starting at position 2461 of SEQ ID NO: 318677
cagucagcagguuauguaa

SEQ ID NO: 580880 - RNA, 19 nt, Artificial Sequence
  Description of Artificial Sequence: Synthetic oligonucleotide
  Antisense strand to SEQ ID NO: 580879
uuacauaaccugcugacug

SEQ ID NO: 580881 - RNA, 19 nt, Artificial Sequence
  Description of Artificial Sequence: Synthetic oligonucleotide
  Sense strand starting at position 2468 of SEQ ID NO: 318677
cagguuauguaacuuaaag

SEQ ID NO: 580882 - RNA, 19 nt, Artificial Sequence
  Description of Artificial Sequence: Synthetic oligonucleotide
  Antisense strand to SEQ ID NO: 580881
cuuuaaguuacauaaccug

SEQ ID NO: 580883 - RNA, 19 nt, Artificial Sequence
  Description of Artificial Sequence: Synthetic oligonucleotide
  Sense strand starting at position 2497 of SEQ ID NO: 318677
ucagcuguaaaguggaaau

SEQ ID NO: 580884 - RNA, 19 nt, Artificial Sequence
  Description of Artificial Sequence: Synthetic oligonucleotide
  Antisense strand to SEQ ID NO: 580883
auuuccacuuuacagcuga

SEQ ID NO: 580885 - RNA, 19 nt, Artificial Sequence
  Description of Artificial Sequence: Synthetic oligonucleotide
  Sense strand starting at position 2515 of SEQ ID NO: 318677
ugacguuauauagagucuu

SEQ ID NO: 580886 - RNA, 19 nt, Artificial Sequence
  Description of Artificial Sequence: Synthetic oligonucleotide
  Antisense strand to SEQ ID NO: 580885
aagacucuauauaacguca

SEQ ID NO: 580887 - RNA, 19 nt, Artificial Sequence
  Description of Artificial Sequence: Synthetic oligonucleotide
  Sense strand starting at position 2595 of SEQ ID NO: 318677
agugguaggcauuauuaau

SEQ ID NO: 580888 - RNA, 19 nt, Artificial Sequence
  Description of Artificial Sequence: Synthetic oligonucleotide
  Antisense strand to SEQ ID NO: 580887
auuaauaaugccuaccacu

SEQ ID NO: 580889 - RNA, 19 nt, Artificial Sequence
  Description of Artificial Sequence: Synthetic oligonucleotide
  Sense strand starting at position 2701 of SEQ ID NO: 318677
uuaaucugucccuguggau

SEQ ID NO: 580890 - RNA, 19 nt, Artificial Sequence
  Description of Artificial Sequence: Synthetic oligonucleotide
  Antisense strand to SEQ ID NO: 580889
auccacagggacagauuaa

SEQ ID NO: 580891 - RNA, 19 nt, Artificial Sequence
  Description of Artificial Sequence: Synthetic oligonucleotide
  Sense strand starting at position 2730 of SEQ ID NO: 318677
uucuaaauacguugguaug

SEQ ID NO: 580892 - RNA, 19 nt, Artificial Sequence
  Description of Artificial Sequence: Synthetic oligonucleotide
  Antisense strand to SEQ ID NO: 580891
cauaccaacguauuuagaa

SEQ ID NO: 580893 - RNA, 19 nt, Artificial Sequence
  Description of Artificial Sequence: Synthetic oligonucleotide
  Sense strand starting at position 2788 of SEQ ID NO: 318677
ccagaagaauaugaaacaa

SEQ ID NO: 580894 - RNA, 19 nt, Artificial Sequence
  Description of Artificial Sequence: Synthetic oligonucleotide
  Antisense strand to SEQ ID NO: 580893
uuguuucauauucuucugg

SEQ ID NO: 580895 - RNA, 19 nt, Artificial Sequence
  Description of Artificial Sequence: Synthetic oligonucleotide
  Sense strand starting at position 2825 of SEQ ID NO: 318677
cccacaguucuagagcuua

SEQ ID NO: 580896 - RNA, 19 nt, Artificial Sequence
  Description of Artificial Sequence: Synthetic oligonucleotide
  Antisense strand to SEQ ID NO: 580895
uaagcucuagaacuguggg

SEQ ID NO: 580897 - RNA, 19 nt, Artificial Sequence
  Description of Artificial Sequence: Synthetic oligonucleotide
  Sense strand starting at position 2830 of SEQ ID NO: 318677
aguucuagagcuuauuacu

SEQ ID NO: 580898 - RNA, 19 nt, Artificial Sequence
  Description of Artificial Sequence: Synthetic oligonucleotide
  Antisense strand to SEQ ID NO: 580897
aguaauaagcucuagaacu

SEQ ID NO: 580899 - RNA, 19 nt, Artificial Sequence
  Description of Artificial Sequence: Synthetic oligonucleotide
  Sense strand starting at position 2839 of SEQ ID NO: 318677
gcuuauuacuagucaucau

SEQ ID NO: 580900 - RNA, 19 nt, Artificial Sequence
  Description of Artificial Sequence: Synthetic oligonucleotide
  Antisense strand to SEQ ID NO: 580899
augaugacuaguaauaagc

SEQ ID NO: 580901 - RNA, 19 nt, Artificial Sequence
  Description of Artificial Sequence: Synthetic oligonucleotide
  Sense strand starting at position 2849 of SEQ ID NO: 318677
agucaucauuucgcuaagu

SEQ ID NO: 580902 - RNA, 19 nt, Artificial Sequence
  Description of Artificial Sequence: Synthetic oligonucleotide
  Antisense strand to SEQ ID NO: 580901
acuuagcgaaaugaugacu

SEQ ID NO: 580903 - RNA, 19 nt, Artificial Sequence
  Description of Artificial Sequence: Synthetic oligonucleotide
  Sense strand starting at position 2850 of SEQ ID NO: 318677
gucaucauuucgcuaagua

SEQ ID NO: 580904 - RNA, 19 nt, Artificial Sequence
  Description of Artificial Sequence: Synthetic oligonucleotide
  Antisense strand to SEQ ID NO: 580903
uacuuagcgaaaugaugac

SEQ ID NO: 580905 - RNA, 19 nt, Artificial Sequence
  Description of Artificial Sequence: Synthetic oligonucleotide
  Sense strand starting at position 3078 of SEQ ID NO: 318677
ccuguauguguguuuguuu

SEQ ID NO: 580906 - RNA, 19 nt, Artificial Sequence
  Description of Artificial Sequence: Synthetic oligonucleotide
  Antisense strand to SEQ ID NO: 580905
aaacaaacacacauacagg

SEQ ID NO: 580907 - RNA, 19 nt, Artificial Sequence
  Description of Artificial Sequence: Synthetic oligonucleotide
  Sense strand starting at position 3083 of SEQ ID NO: 318677
auguguguuuguuugauuu

SEQ ID NO: 580908 - RNA, 19 nt, Artificial Sequence
  Description of Artificial Sequence: Synthetic oligonucleotide
  Antisense strand to SEQ ID NO: 580907
aaaucaaacaaacacacau

SEQ ID NO: 580909 - RNA, 19 nt, Artificial Sequence
  Description of Artificial Sequence: Synthetic oligonucleotide
  Sense strand starting at position 3421 of SEQ ID NO: 318677
cuguguuugggacagauac

SEQ ID NO: 580910 - RNA, 19 nt, Artificial Sequence
  Description of Artificial Sequence: Synthetic oligonucleotide
  Antisense strand to SEQ ID NO: 580909
guaucugucccaaacacag

SEQ ID NO: 580911 - RNA, 19 nt, Artificial Sequence
  Description of Artificial Sequence: Synthetic oligonucleotide
  Sense strand starting at position 3431 of SEQ ID NO: 318677
gacagauacgcuuacagau

SEQ ID NO: 580912 - RNA, 19 nt, Artificial Sequence
  Description of Artificial Sequence: Synthetic oligonucleotide
  Antisense strand to SEQ ID NO: 580911
aucuguaagcguaucuguc

SEQ ID NO: 580913 - RNA, 19 nt, Artificial Sequence
  Description of Artificial Sequence: Synthetic oligonucleotide
  Sense strand starting at position 3459 of SEQ ID NO: 318677
agauguuagaauuggaugu

SEQ ID NO: 580914 - RNA, 19 nt, Artificial Sequence
  Description of Artificial Sequence: Synthetic oligonucleotide
  Antisense strand to SEQ ID NO: 580913
acauccaauucuaacaucu

SEQ ID NO: 580915 - RNA, 19 nt, Artificial Sequence
  Description of Artificial Sequence: Synthetic oligonucleotide
  Sense strand starting at position 3460 of SEQ ID NO: 318677
gauguuagaauuggauguu

SEQ ID NO: 580916 - RNA, 19 nt, Artificial Sequence
  Description of Artificial Sequence: Synthetic oligonucleotide
  Antisense strand to SEQ ID NO: 580915
aacauccaauucuaacauc

SEQ ID NO: 580917 - RNA, 19 nt, Artificial Sequence
  Description of Artificial Sequence: Synthetic oligonucleotide
  Sense strand starting at position 3463 of SEQ ID NO: 318677
guuagaauuggauguuaga

SEQ ID NO: 580918 - RNA, 19 nt, Artificial Sequence
  Description of Artificial Sequence: Synthetic oligonucleotide
  Antisense strand to SEQ ID NO: 580917
ucuaacauccaauucuaac

SEQ ID NO: 580919 - RNA, 19 nt, Artificial Sequence
  Description of Artificial Sequence: Synthetic oligonucleotide
  Sense strand starting at position 3472 of SEQ ID NO: 318677
ggauguuagaauugucuuu

SEQ ID NO: 580920 - RNA, 19 nt, Artificial Sequence
  Description of Artificial Sequence: Synthetic oligonucleotide
  Antisense strand to SEQ ID NO: 580919
aaagacaauucuaacaucc

SEQ ID NO: 580921 - RNA, 19 nt, Artificial Sequence
  Description of Artificial Sequence: Synthetic oligonucleotide
  Sense strand starting at position 3543 of SEQ ID NO: 318677
ucaguuauggcucauugca

SEQ ID NO: 580922 - RNA, 19 nt, Artificial Sequence
  Description of Artificial Sequence: Synthetic oligonucleotide
  Antisense strand to SEQ ID NO: 580921
ugcaaugagccauaacuga

SEQ ID NO: 580923 - RNA, 19 nt, Artificial Sequence
  Description of Artificial Sequence: Synthetic oligonucleotide
  Sense strand starting at position 3717 of SEQ ID NO: 318677
agcgucuuugaauaaauac

SEQ ID NO: 580924 - RNA, 19 nt, Artificial Sequence
  Description of Artificial Sequence: Synthetic oligonucleotide
  Antisense strand to SEQ ID NO: 580923
guauuuauucaaagacgcu

SEQ ID NO: 580925 - RNA, 19 nt, Artificial Sequence
  Description of Artificial Sequence: Synthetic oligonucleotide
  Sense strand starting at position 3761 of SEQ ID NO: 318677
aaauguaguccacagguua

SEQ ID NO: 580926 - RNA, 19 nt, Artificial Sequence
  Description of Artificial Sequence: Synthetic oligonucleotide
  Antisense strand to SEQ ID NO: 580925
uaaccuguggacuacauuu

SEQ ID NO: 580927 - RNA, 19 nt, Artificial Sequence
  Description of Artificial Sequence: Synthetic oligonucleotide
  Sense strand starting at position 3900 of SEQ ID NO: 318677
ucucuuccuuuggcugaaa

SEQ ID NO: 580928 - RNA, 19 nt, Artificial Sequence
  Description of Artificial Sequence: Synthetic oligonucleotide
  Antisense strand to SEQ ID NO: 580927
uuucagccaaaggaagaga

SEQ ID NO: 580929 - RNA, 19 nt, Artificial Sequence
  Description of Artificial Sequence: Synthetic oligonucleotide
  Sense strand starting at position 3901 of SEQ ID NO: 318677
cucuuccuuuggcugaaau

SEQ ID NO: 580930 - RNA, 19 nt, Artificial Sequence
  Description of Artificial Sequence: Synthetic oligonucleotide
  Antisense strand to SEQ ID NO: 580929
auuucagccaaaggaagag

SEQ ID NO: 580931 - RNA, 19 nt, Artificial Sequence
  Description of Artificial Sequence: Synthetic oligonucleotide
  Sense strand starting at position 3902 of SEQ ID NO: 318677
ucuuccuuuggcugaaauu

SEQ ID NO: 580932 - RNA, 19 nt, Artificial Sequence
  Description of Artificial Sequence: Synthetic oligonucleotide
  Antisense strand to SEQ ID NO: 580931
aauuucagccaaaggaaga

SEQ ID NO: 580933 - RNA, 19 nt, Artificial Sequence
  Description of Artificial Sequence: Synthetic oligonucleotide
  Sense strand starting at position 3903 of SEQ ID NO: 318677
cuuccuuuggcugaaauua

SEQ ID NO: 580934 - RNA, 19 nt, Artificial Sequence
  Description of Artificial Sequence: Synthetic oligonucleotide
  Antisense strand to SEQ ID NO: 580933
uaauuucagccaaaggaag

SEQ ID NO: 580935 - RNA, 19 nt, Artificial Sequence
  Description of Artificial Sequence: Synthetic oligonucleotide
  Sense strand starting at position 3926 of SEQ ID NO: 318677
cgccaaauuugucuugcua

SEQ ID NO: 580936 - RNA, 19 nt, Artificial Sequence
  Description of Artificial Sequence: Synthetic oligonucleotide
  Antisense strand to SEQ ID NO: 580935
uagcaagacaaauuuggcg

SEQ ID NO: 580937 - RNA, 19 nt, Artificial Sequence
  Description of Artificial Sequence: Synthetic oligonucleotide
  Sense strand starting at position 3962 of SEQ ID NO: 318677
gugagucugggacaucuua

SEQ ID NO: 580938 - RNA, 19 nt, Artificial Sequence
  Description of Artificial Sequence: Synthetic oligonucleotide
  Antisense strand to SEQ ID NO: 580937
uaagaugucccagacucac

SEQ ID NO: 580939 - RNA, 19 nt, Artificial Sequence
  Description of Artificial Sequence: Synthetic oligonucleotide
  Sense strand starting at position 98 of SEQ ID NO: 318678
ucuuguaaccugcagaucu

SEQ ID NO: 580940 - RNA, 19 nt, Artificial Sequence
  Description of Artificial Sequence: Synthetic oligonucleotide
  Antisense strand to SEQ ID NO: 580939
agaucugcagguuacaaga

SEQ ID NO: 580941 - RNA, 19 nt, Artificial Sequence
  Description of Artificial Sequence: Synthetic oligonucleotide
  Sense strand starting at position 105 of SEQ ID NO: 318678
accugcagaucucuggaaa

SEQ ID NO: 580942 - RNA, 19 nt, Artificial Sequence
  Description of Artificial Sequence: Synthetic oligonucleotide
  Antisense strand to SEQ ID NO: 580941
uuuccagagaucugcaggu

SEQ ID NO: 580943 - RNA, 19 nt, Artificial Sequence
  Description of Artificial Sequence: Synthetic oligonucleotide
  Sense strand starting at position 106 of SEQ ID NO: 318678
ccugcagaucucuggaaac

SEQ ID NO: 580944 - RNA, 19 nt, Artificial Sequence
  Description of Artificial Sequence: Synthetic oligonucleotide
  Antisense strand to SEQ ID NO: 580943
guuuccagagaucugcagg

SEQ ID NO: 580945 - RNA, 19 nt, Artificial Sequence
  Description of Artificial Sequence: Synthetic oligonucleotide
  Sense strand starting at position 156 of SEQ ID NO: 318678
uaagcagagcauuacagua

SEQ ID NO: 580946 - RNA, 19 nt, Artificial Sequence
  Description of Artificial Sequence: Synthetic oligonucleotide
  Antisense strand to SEQ ID NO: 580945
uacuguaaugcucugcuua

SEQ ID NO: 580947 - RNA, 19 nt, Artificial Sequence
  Description of Artificial Sequence: Synthetic oligonucleotide
  Sense strand starting at position 203 of SEQ ID NO: 318678
aguuuacuaucugaauuug

SEQ ID NO: 580948 - RNA, 19 nt, Artificial Sequence
  Description of Artificial Sequence: Synthetic oligonucleotide
  Antisense strand to SEQ ID NO: 580947
caaauucagauaguaaacu

SEQ ID NO: 580949 - RNA, 19 nt, Artificial Sequence
  Description of Artificial Sequence: Synthetic oligonucleotide
  Sense strand starting at position 217 of SEQ ID NO: 318678
auuugucaugagugcuaau

SEQ ID NO: 580950 - RNA, 19 nt, Artificial Sequence
  Description of Artificial Sequence: Synthetic oligonucleotide
  Antisense strand to SEQ ID NO: 580949
auuagcacucaugacaaau

SEQ ID NO: 580951 - RNA, 19 nt, Artificial Sequence
  Description of Artificial Sequence: Synthetic oligonucleotide
  Sense strand starting at position 498 of SEQ ID NO: 318678
agaagcuacgaaugaauua

SEQ ID NO: 580952 - RNA, 19 nt, Artificial Sequence
  Description of Artificial Sequence: Synthetic oligonucleotide
  Antisense strand to SEQ ID NO: 580951
uaauucauucguagcuucu

SEQ ID NO: 580953 - RNA, 19 nt, Artificial Sequence
  Description of Artificial Sequence: Synthetic oligonucleotide
  Sense strand starting at position 514 of SEQ ID NO: 318678
uuaaauaaguuggccaaau

SEQ ID NO: 580954 - RNA, 19 nt, Artificial Sequence
  Description of Artificial Sequence: Synthetic oligonucleotide
  Antisense strand to SEQ ID NO: 580953
auuuggccaacuuauuuaa

SEQ ID NO: 580955 - RNA, 19 nt, Artificial Sequence
  Description of Artificial Sequence: Synthetic oligonucleotide
  Sense strand starting at position 550 of SEQ ID NO: 318678
gcuuuauaauagcugagag

SEQ ID NO: 580956 - RNA, 19 nt, Artificial Sequence
  Description of Artificial Sequence: Synthetic oligonucleotide
  Antisense strand to SEQ ID NO: 580955
cucucagcuauuauaaagc

SEQ ID NO: 580957 - RNA, 19 nt, Artificial Sequence
  Description of Artificial Sequence: Synthetic oligonucleotide
  Sense strand starting at position 552 of SEQ ID NO: 318678
uuuauaauagcugagaggu

SEQ ID NO: 580958 - RNA, 19 nt, Artificial Sequence
  Description of Artificial Sequence: Synthetic oligonucleotide
  Antisense strand to SEQ ID NO: 580957
accucucagcuauuauaaa

SEQ ID NO: 580959 - RNA, 19 nt, Artificial Sequence
  Description of Artificial Sequence: Synthetic oligonucleotide
  Sense strand starting at position 570 of SEQ ID NO: 318678
ugacuuccugagcgacaaa

SEQ ID NO: 580960 - RNA, 19 nt, Artificial Sequence
  Description of Artificial Sequence: Synthetic oligonucleotide
  Antisense strand to SEQ ID NO: 580959
uuugucgcucaggaaguca

SEQ ID NO: 580961 - RNA, 19 nt, Artificial Sequence
  Description of Artificial Sequence: Synthetic oligonucleotide
  Sense strand starting at position 573 of SEQ ID NO: 318678
cuuccugagcgacaaaucu

SEQ ID NO: 580962 - RNA, 19 nt, Artificial Sequence
  Description of Artificial Sequence: Synthetic oligonucleotide
  Antisense strand to SEQ ID NO: 580961
agauuugucgcucaggaag

SEQ ID NO: 580963 - RNA, 19 nt, Artificial Sequence
  Description of Artificial Sequence: Synthetic oligonucleotide
  Sense strand starting at position 654 of SEQ ID NO: 318678
aaaugugcagaguaucaaa

SEQ ID NO: 580964 - RNA, 19 nt, Artificial Sequence
  Description of Artificial Sequence: Synthetic oligonucleotide
  Antisense strand to SEQ ID NO: 580963
uuugauacucugcacauuu

SEQ ID NO: 580965 - RNA, 19 nt, Artificial Sequence
  Description of Artificial Sequence: Synthetic oligonucleotide
  Sense strand starting at position 694 of SEQ ID NO: 318678
uuucuaugucucuaaguau

SEQ ID NO: 580966 - RNA, 19 nt, Artificial Sequence
  Description of Artificial Sequence: Synthetic oligonucleotide
  Antisense strand to SEQ ID NO: 580965
auacuuagagacauagaaa

SEQ ID NO: 580967 - RNA, 19 nt, Artificial Sequence
  Description of Artificial Sequence: Synthetic oligonucleotide
  Sense strand starting at position 697 of SEQ ID NO: 318678
cuaugucucuaaguaucca

SEQ ID NO: 580968 - RNA, 19 nt, Artificial Sequence
  Description of Artificial Sequence: Synthetic oligonucleotide
  Antisense strand to SEQ ID NO: 580967
uggauacuuagagacauag

SEQ ID NO: 580969 - RNA, 19 nt, Artificial Sequence
  Description of Artificial Sequence: Synthetic oligonucleotide
  Sense strand starting at position 937 of SEQ ID NO: 318678
gucccagaucucuaaguca

SEQ ID NO: 580970 - RNA, 19 nt, Artificial Sequence
  Description of Artificial Sequence: Synthetic oligonucleotide
  Antisense strand to SEQ ID NO: 580969
ugacuuagagaucugggac

SEQ ID NO: 580971 - RNA, 19 nt, Artificial Sequence
  Description of Artificial Sequence: Synthetic oligonucleotide
  Sense strand starting at position 940 of SEQ ID NO: 318678
ccagaucucuaagucaguu

SEQ ID NO: 580972 - RNA, 19 nt, Artificial Sequence
  Description of Artificial Sequence: Synthetic oligonucleotide
  Antisense strand to SEQ ID NO: 580971
aacugacuuagagaucugg

SEQ ID NO: 580973 - RNA, 19 nt, Artificial Sequence
  Description of Artificial Sequence: Synthetic oligonucleotide
  Sense strand starting at position 1345 of SEQ ID NO: 318678
aauuucuucgggcgccaga

SEQ ID NO: 580974 - RNA, 19 nt, Artificial Sequence
  Description of Artificial Sequence: Synthetic oligonucleotide
  Antisense strand to SEQ ID NO: 580973
ucuggcgcccgaagaaauu

SEQ ID NO: 580975 - RNA, 19 nt, Artificial Sequence
  Description of Artificial Sequence: Synthetic oligonucleotide
  Sense strand starting at position 2060 of SEQ ID NO: 318678
cggccuugucaacaaucca

SEQ ID NO: 580976 - RNA, 19 nt, Artificial Sequence
  Description of Artificial Sequence: Synthetic oligonucleotide
  Antisense strand to SEQ ID NO: 580975
uggauuguugacaaggccg

SEQ ID NO: 580977 - RNA, 19 nt, Artificial Sequence
  Description of Artificial Sequence: Synthetic oligonucleotide
  Sense strand starting at position 2267 of SEQ ID NO: 318678
ccaagaggucauggcagaa

SEQ ID NO: 580978 - RNA, 19 nt, Artificial Sequence
  Description of Artificial Sequence: Synthetic oligonucleotide
  Antisense strand to SEQ ID NO: 580977
uucugccaugaccucuugg

SEQ ID NO: 580979 - RNA, 19 nt, Artificial Sequence
  Description of Artificial Sequence: Synthetic oligonucleotide
  Sense strand starting at position 2304 of SEQ ID NO: 318678
uucuuuaaaccgggaccaa

SEQ ID NO: 580980 - RNA, 19 nt, Artificial Sequence
  Description of Artificial Sequence: Synthetic oligonucleotide
  Antisense strand to SEQ ID NO: 580979
uuggucccgguuuaaagaa

SEQ ID NO: 580981 - RNA, 19 nt, Artificial Sequence
  Description of Artificial Sequence: Synthetic oligonucleotide
  Sense strand starting at position 2444 of SEQ ID NO: 318678
cugaaaugguuccuugaag

SEQ ID NO: 580982 - RNA, 19 nt, Artificial Sequence
  Description of Artificial Sequence: Synthetic oligonucleotide
  Antisense strand to SEQ ID NO: 580981
cuucaaggaaccauuucag

SEQ ID NO: 580983 - RNA, 19 nt, Artificial Sequence
  Description of Artificial Sequence: Synthetic oligonucleotide
  Sense strand starting at position 2505 of SEQ ID NO: 318678
uggaaauucugggcaaaua

SEQ ID NO: 580984 - RNA, 19 nt, Artificial Sequence
  Description of Artificial Sequence: Synthetic oligonucleotide
  Antisense strand to SEQ ID NO: 580983
uauuugcccagaauuucca

SEQ ID NO: 580985 - RNA, 19 nt, Artificial Sequence
  Description of Artificial Sequence: Synthetic oligonucleotide
  Sense strand starting at position 2520 of SEQ ID NO: 318678
aauauuaaaggauggugua

SEQ ID NO: 580986 - RNA, 19 nt, Artificial Sequence
  Description of Artificial Sequence: Synthetic oligonucleotide
  Antisense strand to SEQ ID NO: 580985
uacaccauccuuuaauauu

SEQ ID NO: 580987 - RNA, 19 nt, Artificial Sequence
  Description of Artificial Sequence: Synthetic oligonucleotide
  Sense strand starting at position 2521 of SEQ ID NO: 318678
auauuaaaggaugguguau

SEQ ID NO: 580988 - RNA, 19 nt, Artificial Sequence
  Description of Artificial Sequence: Synthetic oligonucleotide
  Antisense strand to SEQ ID NO: 580987
auacaccauccuuuaauau

SEQ ID NO: 580989 - RNA, 19 nt, Artificial Sequence
  Description of Artificial Sequence: Synthetic oligonucleotide
  Sense strand starting at position 2572 of SEQ ID NO: 318678
auugaagauaugugucaga

SEQ ID NO: 580990 - RNA, 19 nt, Artificial Sequence
  Description of Artificial Sequence: Synthetic oligonucleotide
  Antisense strand to SEQ ID NO: 580989
ucugacacauaucuucaau

SEQ ID NO: 580991 - RNA, 19 nt, Artificial Sequence
  Description of Artificial Sequence: Synthetic oligonucleotide
  Sense strand starting at position 2672 of SEQ ID NO: 318678
agugguugguugucaaaga

SEQ ID NO: 580992 - RNA, 19 nt, Artificial Sequence
  Description of Artificial Sequence: Synthetic oligonucleotide
  Antisense strand to SEQ ID NO: 580991
ucuuugacaaccaaccacu

SEQ ID NO: 580993 - RNA, 19 nt, Artificial Sequence
  Description of Artificial Sequence: Synthetic oligonucleotide
  Sense strand starting at position 2744 of SEQ ID NO: 318678
ggguuauauaucuagccug

SEQ ID NO: 580994 - RNA, 19 nt, Artificial Sequence
  Description of Artificial Sequence: Synthetic oligonucleotide
  Antisense strand to SEQ ID NO: 580993
caggcuagauauauaaccc

SEQ ID NO: 580995 - RNA, 19 nt, Artificial Sequence
  Description of Artificial Sequence: Synthetic oligonucleotide
  Sense strand starting at position 2747 of SEQ ID NO: 318678
uuauauaucuagccugaga

SEQ ID NO: 580996 - RNA, 19 nt, Artificial Sequence
  Description of Artificial Sequence: Synthetic oligonucleotide
  Antisense strand to SEQ ID NO: 580995
ucucaggcuagauauauaa

SEQ ID NO: 580997 - RNA, 19 nt, Artificial Sequence
  Description of Artificial Sequence: Synthetic oligonucleotide
  Sense strand starting at position 2749 of SEQ ID NO: 318678
auauaucuagccugagaua

SEQ ID NO: 580998 - RNA, 19 nt, Artificial Sequence
  Description of Artificial Sequence: Synthetic oligonucleotide
  Antisense strand to SEQ ID NO: 580997
uaucucaggcuagauauau

SEQ ID NO: 580999 - RNA, 19 nt, Artificial Sequence
  Description of Artificial Sequence: Synthetic oligonucleotide
  Sense strand starting at position 2933 of SEQ ID NO: 318678
uaaggacucugaguacuuu

SEQ ID NO: 581000 - RNA, 19 nt, Artificial Sequence
  Description of Artificial Sequence: Synthetic oligonucleotide
  Antisense strand to SEQ ID NO: 580999
aaaguacucagaguccuua

SEQ ID NO: 581001 - RNA, 19 nt, Artificial Sequence
  Description of Artificial Sequence: Synthetic oligonucleotide
  Sense strand starting at position 3031 of SEQ ID NO: 318678
cccugauuccauggaagca

SEQ ID NO: 581002 - RNA, 19 nt, Artificial Sequence
  Description of Artificial Sequence: Synthetic oligonucleotide
  Antisense strand to SEQ ID NO: 581001
ugcuuccauggaaucaggg

SEQ ID NO: 581003 - RNA, 19 nt, Artificial Sequence
  Description of Artificial Sequence: Synthetic oligonucleotide
  Sense strand starting at position 3120 of SEQ ID NO: 318678
ugccuuggugaucagguua

SEQ ID NO: 581004 - RNA, 19 nt, Artificial Sequence
  Description of Artificial Sequence: Synthetic oligonucleotide
  Antisense strand to SEQ ID NO: 581003
uaaccugaucaccaaggca

SEQ ID NO: 581005 - RNA, 19 nt, Artificial Sequence
  Description of Artificial Sequence: Synthetic oligonucleotide
  Sense strand starting at position 3143 of SEQ ID NO: 318678
ggccuaacucuugauaggu

SEQ ID NO: 581006 - RNA, 19 nt, Artificial Sequence
  Description of Artificial Sequence: Synthetic oligonucleotide
  Antisense strand to SEQ ID NO: 581005
accuaucaagaguuaggcc

SEQ ID NO: 581007 - RNA, 19 nt, Artificial Sequence
  Description of Artificial Sequence: Synthetic oligonucleotide
  Sense strand starting at position 3495 of SEQ ID NO: 318678
agaagaaucgcuugagacg

SEQ ID NO: 581008 - RNA, 19 nt, Artificial Sequence
  Description of Artificial Sequence: Synthetic oligonucleotide
  Antisense strand to SEQ ID NO: 581007
cgucucaagcgauucuucu

SEQ ID NO: 581009 - RNA, 19 nt, Artificial Sequence
  Description of Artificial Sequence: Synthetic oligonucleotide
  Sense strand starting at position 3496 of SEQ ID NO: 318678
gaagaaucgcuugagacga

SEQ ID NO: 581010 - RNA, 19 nt, Artificial Sequence
  Description of Artificial Sequence: Synthetic oligonucleotide
  Antisense strand to SEQ ID NO: 581009
ucgucucaagcgauucuuc

SEQ ID NO: 581011 - RNA, 19 nt, Artificial Sequence
  Description of Artificial Sequence: Synthetic oligonucleotide
  Sense strand starting at position 3712 of SEQ ID NO: 318678
gcaagauuagggcaaugcu

SEQ ID NO: 581012 - RNA, 19 nt, Artificial Sequence
  Description of Artificial Sequence: Synthetic oligonucleotide
  Antisense strand to SEQ ID NO: 581011
agcauugcccuaaucuugc

SEQ ID NO: 581013 - RNA, 19 nt, Artificial Sequence
  Description of Artificial Sequence: Synthetic oligonucleotide
  Sense strand starting at position 3756 of SEQ ID NO: 318678
cccuguugagcugacgaau

SEQ ID NO: 581014 - RNA, 19 nt, Artificial Sequence
  Description of Artificial Sequence: Synthetic oligonucleotide
  Antisense strand to SEQ ID NO: 581013
auucgucagcucaacaggg

SEQ ID NO: 581015 - RNA, 19 nt, Artificial Sequence
  Description of Artificial Sequence: Synthetic oligonucleotide
  Sense strand starting at position 3936 of SEQ ID NO: 318678
gugaaugugcaucauaaag

SEQ ID NO: 581016 - RNA, 19 nt, Artificial Sequence
  Description of Artificial Sequence: Synthetic oligonucleotide
  Antisense strand to SEQ ID NO: 581015
cuuuaugaugcacauucac

SEQ ID NO: 581017 - RNA, 19 nt, Artificial Sequence
  Description of Artificial Sequence: Synthetic oligonucleotide
  Sense strand starting at position 3965 of SEQ ID NO: 318678
guguauuagcaagaaucac

SEQ ID NO: 581018 - RNA, 19 nt, Artificial Sequence
  Description of Artificial Sequence: Synthetic oligonucleotide
  Antisense strand to SEQ ID NO: 581017
gugauucuugcuaauacac

SEQ ID NO: 581019 - RNA, 19 nt, Artificial Sequence
  Description of Artificial Sequence: Synthetic oligonucleotide
  Sense strand starting at position 90 of SEQ ID NO: 318679
ugugcaguggcugauugau

SEQ ID NO: 581020 - RNA, 19 nt, Artificial Sequence
  Description of Artificial Sequence: Synthetic oligonucleotide
  Antisense strand to SEQ ID NO: 581019
aucaaucagccacugcaca

SEQ ID NO: 581021 - RNA, 19 nt, Artificial Sequence
  Description of Artificial Sequence: Synthetic oligonucleotide
  Sense strand starting at position 99 of SEQ ID NO: 318679
gcugauugaugccuguaau

SEQ ID NO: 581022 - RNA, 19 nt, Artificial Sequence
  Description of Artificial Sequence: Synthetic oligonucleotide
  Antisense strand to SEQ ID NO: 581021
auuacaggcaucaaucagc

SEQ ID NO: 581023 - RNA, 19 nt, Artificial Sequence
  Description of Artificial Sequence: Synthetic oligonucleotide
  Sense strand starting at position 100 of SEQ ID NO: 318679
cugauugaugccuguaauu

SEQ ID NO: 581024 - RNA, 19 nt, Artificial Sequence
  Description of Artificial Sequence: Synthetic oligonucleotide
  Antisense strand to SEQ ID NO: 581023
aauuacaggcaucaaucag

SEQ ID NO: 581025 - RNA, 19 nt, Artificial Sequence
  Description of Artificial Sequence: Synthetic oligonucleotide
  Sense strand starting at position 102 of SEQ ID NO: 318679
gauugaugccuguaauucc

SEQ ID NO: 581026 - RNA, 19 nt, Artificial Sequence
  Description of Artificial Sequence: Synthetic oligonucleotide
  Antisense strand to SEQ ID NO: 581025
ggaauuacaggcaucaauc

SEQ ID NO: 581027 - RNA, 19 nt, Artificial Sequence
  Description of Artificial Sequence: Synthetic oligonucleotide
  Sense strand starting at position 241 of SEQ ID NO: 318679
uagcuaccgguuuaauaua

SEQ ID NO: 581028 - RNA, 19 nt, Artificial Sequence
  Description of Artificial Sequence: Synthetic oligonucleotide
  Antisense strand to SEQ ID NO: 581027
uauauuaaaccgguagcua

SEQ ID NO: 581029 - RNA, 19 nt, Artificial Sequence
  Description of Artificial Sequence: Synthetic oligonucleotide
  Sense strand starting at position 249 of SEQ ID NO: 318679
gguuuaauauagccaaucu

SEQ ID NO: 581030 - RNA, 19 nt, Artificial Sequence
  Description of Artificial Sequence: Synthetic oligonucleotide
  Antisense strand to SEQ ID NO: 581029
agauuggcuauauuaaacc

SEQ ID NO: 581031 - RNA, 19 nt, Artificial Sequence
  Description of Artificial Sequence: Synthetic oligonucleotide
  Sense strand starting at position 267 of SEQ ID NO: 318679
ugaguagccaagugaaaca

SEQ ID NO: 581032 - RNA, 19 nt, Artificial Sequence
  Description of Artificial Sequence: Synthetic oligonucleotide
  Antisense strand to SEQ ID NO: 581031
uguuucacuuggcuacuca

SEQ ID NO: 581033 - RNA, 19 nt, Artificial Sequence
  Description of Artificial Sequence: Synthetic oligonucleotide
  Sense strand starting at position 395 of SEQ ID NO: 318679
ucuuauagucuagauguau

SEQ ID NO: 581034 - RNA, 19 nt, Artificial Sequence
  Description of Artificial Sequence: Synthetic oligonucleotide
  Antisense strand to SEQ ID NO: 581033
auacaucuagacuauaaga

SEQ ID NO: 581035 - RNA, 19 nt, Artificial Sequence
  Description of Artificial Sequence: Synthetic oligonucleotide
  Sense strand starting at position 404 of SEQ ID NO: 318679
cuagauguauuauuaggaa

SEQ ID NO: 581036 - RNA, 19 nt, Artificial Sequence
  Description of Artificial Sequence: Synthetic oligonucleotide
  Antisense strand to SEQ ID NO: 581035
uuccuaauaauacaucuag

SEQ ID NO: 581037 - RNA, 19 nt, Artificial Sequence
  Description of Artificial Sequence: Synthetic oligonucleotide
  Sense strand starting at position 511 of SEQ ID NO: 318679
uuaagagucucgguaaaca

SEQ ID NO: 581038 - RNA, 19 nt, Artificial Sequence
  Description of Artificial Sequence: Synthetic oligonucleotide
  Antisense strand to SEQ ID NO: 581037
uguuuaccgagacucuuaa

SEQ ID NO: 581039 - RNA, 19 nt, Artificial Sequence
  Description of Artificial Sequence: Synthetic oligonucleotide
  Sense strand starting at position 556 of SEQ ID NO: 318679
uugcgaagaggcugugaaa

SEQ ID NO: 581040 - RNA, 19 nt, Artificial Sequence
  Description of Artificial Sequence: Synthetic oligonucleotide
  Antisense strand to SEQ ID NO: 581039
uuucacagccucuucgcaa

SEQ ID NO: 581041 - RNA, 19 nt, Artificial Sequence
  Description of Artificial Sequence: Synthetic oligonucleotide
  Sense strand starting at position 584 of SEQ ID NO: 318679
guauaauuucucugguggu

SEQ ID NO: 581042 - RNA, 19 nt, Artificial Sequence
  Description of Artificial Sequence: Synthetic oligonucleotide
  Antisense strand to SEQ ID NO: 581041
accaccagagaaauuauac

SEQ ID NO: 581043 - RNA, 19 nt, Artificial Sequence
  Description of Artificial Sequence: Synthetic oligonucleotide
  Sense strand starting at position 585 of SEQ ID NO: 318679
uauaauuucucuggugguu

SEQ ID NO: 581044 - RNA, 19 nt, Artificial Sequence
  Description of Artificial Sequence: Synthetic oligonucleotide
  Antisense strand to SEQ ID NO: 581043
aaccaccagagaaauuaua

SEQ ID NO: 581045 - RNA, 19 nt, Artificial Sequence
  Description of Artificial Sequence: Synthetic oligonucleotide
  Sense strand starting at position 673 of SEQ ID NO: 318679
acggaaguguuaguuucua

SEQ ID NO: 581046 - RNA, 19 nt, Artificial Sequence
  Description of Artificial Sequence: Synthetic oligonucleotide
  Antisense strand to SEQ ID NO: 581045
uagaaacuaacacuuccgu

SEQ ID NO: 581047 - RNA, 19 nt, Artificial Sequence
  Description of Artificial Sequence: Synthetic oligonucleotide
  Sense strand starting at position 681 of SEQ ID NO: 318679
guuaguuucuaacuacaua

SEQ ID NO: 581048 - RNA, 19 nt, Artificial Sequence
  Description of Artificial Sequence: Synthetic oligonucleotide
  Antisense strand to SEQ ID NO: 581047
uauguaguuagaaacuaac

SEQ ID NO: 581049 - RNA, 19 nt, Artificial Sequence
  Description of Artificial Sequence: Synthetic oligonucleotide
  Sense strand starting at position 1343 of SEQ ID NO: 318679
gccgcuuaccuuguggauu

SEQ ID NO: 581050 - RNA, 19 nt, Artificial Sequence
  Description of Artificial Sequence: Synthetic oligonucleotide
  Antisense strand to SEQ ID NO: 581049
aauccacaagguaagcggc

SEQ ID NO: 581051 - RNA, 19 nt, Artificial Sequence
  Description of Artificial Sequence: Synthetic oligonucleotide
  Sense strand starting at position 2008 of SEQ ID NO: 318679
cggagaucucgcgagaucu

SEQ ID NO: 581052 - RNA, 19 nt, Artificial Sequence
  Description of Artificial Sequence: Synthetic oligonucleotide
  Antisense strand to SEQ ID NO: 581051
agaucucgcgagaucuccg

SEQ ID NO: 581053 - RNA, 19 nt, Artificial Sequence
  Description of Artificial Sequence: Synthetic oligonucleotide
  Sense strand starting at position 2122 of SEQ ID NO: 318679
aggcgaauguuguccagau

SEQ ID NO: 581054 - RNA, 19 nt, Artificial Sequence
  Description of Artificial Sequence: Synthetic oligonucleotide
  Antisense strand to SEQ ID NO: 581053
aucuggacaacauucgccu

SEQ ID NO: 581055 - RNA, 19 nt, Artificial Sequence
  Description of Artificial Sequence: Synthetic oligonucleotide
  Sense strand starting at position 2123 of SEQ ID NO: 318679
ggcgaauguuguccagauc

SEQ ID NO: 581056 - RNA, 19 nt, Artificial Sequence
  Description of Artificial Sequence: Synthetic oligonucleotide
  Antisense strand to SEQ ID NO: 581055
gaucuggacaacauucgcc

SEQ ID NO: 581057 - RNA, 19 nt, Artificial Sequence
  Description of Artificial Sequence: Synthetic oligonucleotide
  Sense strand starting at position 2124 of SEQ ID NO: 318679
gcgaauguuguccagaucu

SEQ ID NO: 581058 - RNA, 19 nt, Artificial Sequence
  Description of Artificial Sequence: Synthetic oligonucleotide
  Antisense strand to SEQ ID NO: 581057
agaucuggacaacauucgc

SEQ ID NO: 581059 - RNA, 19 nt, Artificial Sequence
  Description of Artificial Sequence: Synthetic oligonucleotide
  Sense strand starting at position 2126 of SEQ ID NO: 318679
gaauguuguccagaucuca

SEQ ID NO: 581060 - RNA, 19 nt, Artificial Sequence
  Description of Artificial Sequence: Synthetic oligonucleotide
  Antisense strand to SEQ ID NO: 581059
ugagaucuggacaacauuc

SEQ ID NO: 581061 - RNA, 19 nt, Artificial Sequence
  Description of Artificial Sequence: Synthetic oligonucleotide
  Sense strand starting at position 2155 of SEQ ID NO: 318679
cguacuagucccgggagga

SEQ ID NO: 581062 - RNA, 19 nt, Artificial Sequence
  Description of Artificial Sequence: Synthetic oligonucleotide
  Antisense strand to SEQ ID NO: 581061
uccucccgggacuaguacg

SEQ ID NO: 581063 - RNA, 19 nt, Artificial Sequence
  Description of Artificial Sequence: Synthetic oligonucleotide
  Sense strand starting at position 2156 of SEQ ID NO: 318679
guacuagucccgggaggag

SEQ ID NO: 581064 - RNA, 19 nt, Artificial Sequence
  Description of Artificial Sequence: Synthetic oligonucleotide
  Antisense strand to SEQ ID NO: 581063
cuccucccgggacuaguac

SEQ ID NO: 581065 - RNA, 19 nt, Artificial Sequence
  Description of Artificial Sequence: Synthetic oligonucleotide
  Sense strand starting at position 2370 of SEQ ID NO: 318679
uggagaggauuugaauguu

SEQ ID NO: 581066 - RNA, 19 nt, Artificial Sequence
  Description of Artificial Sequence: Synthetic oligonucleotide
  Antisense strand to SEQ ID NO: 581065
aacauucaaauccucucca

SEQ ID NO: 581067 - RNA, 19 nt, Artificial Sequence
  Description of Artificial Sequence: Synthetic oligonucleotide
  Sense strand starting at position 2379 of SEQ ID NO: 318679
uuugaauguuguguucuca

SEQ ID NO: 581068 - RNA, 19 nt, Artificial Sequence
  Description of Artificial Sequence: Synthetic oligonucleotide
  Antisense strand to SEQ ID NO: 581067
ugagaacacaacauucaaa

SEQ ID NO: 581069 - RNA, 19 nt, Artificial Sequence
  Description of Artificial Sequence: Synthetic oligonucleotide
  Sense strand starting at position 2383 of SEQ ID NO: 318679
aauguuguguucucagcca

SEQ ID NO: 581070 - RNA, 19 nt, Artificial Sequence
  Description of Artificial Sequence: Synthetic oligonucleotide
  Antisense strand to SEQ ID NO: 581069
uggcugagaacacaacauu

SEQ ID NO: 581071 - RNA, 19 nt, Artificial Sequence
  Description of Artificial Sequence: Synthetic oligonucleotide
  Sense strand starting at position 2409 of SEQ ID NO: 318679
guaugugugccuucgaggu

SEQ ID NO: 581072 - RNA, 19 nt, Artificial Sequence
  Description of Artificial Sequence: Synthetic oligonucleotide
  Antisense strand to SEQ ID NO: 581071
accucgaaggcacacauac

SEQ ID NO: 581073 - RNA, 19 nt, Artificial Sequence
  Description of Artificial Sequence: Synthetic oligonucleotide
  Sense strand starting at position 2435 of SEQ ID NO: 318679
cucugcucagcuuagugaa

SEQ ID NO: 581074 - RNA, 19 nt, Artificial Sequence
  Description of Artificial Sequence: Synthetic oligonucleotide
  Antisense strand to SEQ ID NO: 581073
uucacuaagcugagcagag

SEQ ID NO: 581075 - RNA, 19 nt, Artificial Sequence
  Description of Artificial Sequence: Synthetic oligonucleotide
  Sense strand starting at position 2437 of SEQ ID NO: 318679
cugcucagcuuagugaauu

SEQ ID NO: 581076 - RNA, 19 nt, Artificial Sequence
  Description of Artificial Sequence: Synthetic oligonucleotide
  Antisense strand to SEQ ID NO: 581075
aauucacuaagcugagcag

SEQ ID NO: 581077 - RNA, 19 nt, Artificial Sequence
  Description of Artificial Sequence: Synthetic oligonucleotide
  Sense strand starting at position 2933 of SEQ ID NO: 318679
cagcaagaaugcgucucaa

SEQ ID NO: 581078 - RNA, 19 nt, Artificial Sequence
  Description of Artificial Sequence: Synthetic oligonucleotide
  Antisense strand to SEQ ID NO: 581077
uugagacgcauucuugcug

SEQ ID NO: 581079 - RNA, 19 nt, Artificial Sequence
  Description of Artificial Sequence: Synthetic oligonucleotide
  Sense strand starting at position 2979 of SEQ ID NO: 318679
gguggcagguuccuguaaa

SEQ ID NO: 581080 - RNA, 19 nt, Artificial Sequence
  Description of Artificial Sequence: Synthetic oligonucleotide
  Antisense strand to SEQ ID NO: 581079
uuuacaggaaccugccacc

SEQ ID NO: 581081 - RNA, 19 nt, Artificial Sequence
  Description of Artificial Sequence: Synthetic oligonucleotide
  Sense strand starting at position 3181 of SEQ ID NO: 318679
ccuagaauauuuggaauug

SEQ ID NO: 581082 - RNA, 19 nt, Artificial Sequence
  Description of Artificial Sequence: Synthetic oligonucleotide
  Antisense strand to SEQ ID NO: 581081
caauuccaaauauucuagg

SEQ ID NO: 581083 - RNA, 19 nt, Artificial Sequence
  Description of Artificial Sequence: Synthetic oligonucleotide
  Sense strand starting at position 3182 of SEQ ID NO: 318679
cuagaauauuuggaauugu

SEQ ID NO: 581084 - RNA, 19 nt, Artificial Sequence
  Description of Artificial Sequence: Synthetic oligonucleotide
  Antisense strand to SEQ ID NO: 581083
acaauuccaaauauucuag

SEQ ID NO: 581085 - RNA, 19 nt, Artificial Sequence
  Description of Artificial Sequence: Synthetic oligonucleotide
  Sense strand starting at position 3263 of SEQ ID NO: 318679
ccaugacuggugugagaua

SEQ ID NO: 581086 - RNA, 19 nt, Artificial Sequence
  Description of Artificial Sequence: Synthetic oligonucleotide
  Antisense strand to SEQ ID NO: 581085
uaucucacaccagucaugg

SEQ ID NO: 581087 - RNA, 19 nt, Artificial Sequence
  Description of Artificial Sequence: Synthetic oligonucleotide
  Sense strand starting at position 3302 of SEQ ID NO: 318679
aggccuuacacaggagaau

SEQ ID NO: 581088 - RNA, 19 nt, Artificial Sequence
  Description of Artificial Sequence: Synthetic oligonucleotide
  Antisense strand to SEQ ID NO: 581087
auucuccuguguaaggccu

SEQ ID NO: 581089 - RNA, 19 nt, Artificial Sequence
  Description of Artificial Sequence: Synthetic oligonucleotide
  Sense strand starting at position 3311 of SEQ ID NO: 318679
acaggagaauaguaaagaa

SEQ ID NO: 581090 - RNA, 19 nt, Artificial Sequence
  Description of Artificial Sequence: Synthetic oligonucleotide
  Antisense strand to SEQ ID NO: 581089
uucuuuacuauucuccugu

SEQ ID NO: 581091 - RNA, 19 nt, Artificial Sequence
  Description of Artificial Sequence: Synthetic oligonucleotide
  Sense strand starting at position 3402 of SEQ ID NO: 318679
ucgcuacauccagaaagga

SEQ ID NO: 581092 - RNA, 19 nt, Artificial Sequence
  Description of Artificial Sequence: Synthetic oligonucleotide
  Antisense strand to SEQ ID NO: 581091
uccuuucuggauguagcga

SEQ ID NO: 581093 - RNA, 19 nt, Artificial Sequence
  Description of Artificial Sequence: Synthetic oligonucleotide
  Sense strand starting at position 3412 of SEQ ID NO: 318679
cagaaaggaccuugcagau

SEQ ID NO: 581094 - RNA, 19 nt, Artificial Sequence
  Description of Artificial Sequence: Synthetic oligonucleotide
  Antisense strand to SEQ ID NO: 581093
aucugcaagguccuuucug

SEQ ID NO: 581095 - RNA, 19 nt, Artificial Sequence
  Description of Artificial Sequence: Synthetic oligonucleotide
  Sense strand starting at position 3546 of SEQ ID NO: 318679
cugagaagguuggaccauu

SEQ ID NO: 581096 - RNA, 19 nt, Artificial Sequence
  Description of Artificial Sequence: Synthetic oligonucleotide
  Antisense strand to SEQ ID NO: 581095
aaugguccaaccuucucag

SEQ ID NO: 581097 - RNA, 19 nt, Artificial Sequence
  Description of Artificial Sequence: Synthetic oligonucleotide
  Sense strand starting at position 3619 of SEQ ID NO: 318679
uggguauaguugagguuga

SEQ ID NO: 581098 - RNA, 19 nt, Artificial Sequence
  Description of Artificial Sequence: Synthetic oligonucleotide
  Antisense strand to SEQ ID NO: 581097
ucaaccucaacuauaccca

SEQ ID NO: 581099 - RNA, 19 nt, Artificial Sequence
  Description of Artificial Sequence: Synthetic oligonucleotide
  Sense strand starting at position 62 of SEQ ID NO: 318680
agaucaagccgaggucauu

SEQ ID NO: 581100 - RNA, 19 nt, Artificial Sequence
  Description of Artificial Sequence: Synthetic oligonucleotide
  Antisense strand to SEQ ID NO: 581099
aaugaccucggcuugaucu

SEQ ID NO: 581101 - RNA, 19 nt, Artificial Sequence
  Description of Artificial Sequence: Synthetic oligonucleotide
  Sense strand starting at position 198 of SEQ ID NO: 318680
cgcagucgacagcauauaa

SEQ ID NO: 581102 - RNA, 19 nt, Artificial Sequence
  Description of Artificial Sequence: Synthetic oligonucleotide
  Antisense strand to SEQ ID NO: 581101
uuauaugcugucgacugcg

SEQ ID NO: 581103 - RNA, 19 nt, Artificial Sequence
  Description of Artificial Sequence: Synthetic oligonucleotide
  Sense strand starting at position 267 of SEQ ID NO: 318680
gguuucuuugcguaaagcu

SEQ ID NO: 581104 - RNA, 19 nt, Artificial Sequence
  Description of Artificial Sequence: Synthetic oligonucleotide
  Antisense strand to SEQ ID NO: 581103
agcuuuacgcaaagaaacc

SEQ ID NO: 581105 - RNA, 19 nt, Artificial Sequence
  Description of Artificial Sequence: Synthetic oligonucleotide
  Sense strand starting at position 333 of SEQ ID NO: 318680
uucguuucguauuucguua

SEQ ID NO: 581106 - RNA, 19 nt, Artificial Sequence
  Description of Artificial Sequence: Synthetic oligonucleotide
  Antisense strand to SEQ ID NO: 581105
uaacgaaauacgaaacgaa

SEQ ID NO: 581107 - RNA, 19 nt, Artificial Sequence
  Description of Artificial Sequence: Synthetic oligonucleotide
  Sense strand starting at position 354 of SEQ ID NO: 318680
aucuuuagcccugauaaag

SEQ ID NO: 581108 - RNA, 19 nt, Artificial Sequence
  Description of Artificial Sequence: Synthetic oligonucleotide
  Antisense strand to SEQ ID NO: 581107
cuuuaucagggcuaaagau

SEQ ID NO: 581109 - RNA, 19 nt, Artificial Sequence
  Description of Artificial Sequence: Synthetic oligonucleotide
  Sense strand starting at position 590 of SEQ ID NO: 318680
gugaguucccaagagcaaa

SEQ ID NO: 581110 - RNA, 19 nt, Artificial Sequence
  Description of Artificial Sequence: Synthetic oligonucleotide
  Antisense strand to SEQ ID NO: 581109
uuugcucuugggaacucac

SEQ ID NO: 581111 - RNA, 19 nt, Artificial Sequence
  Description of Artificial Sequence: Synthetic oligonucleotide
  Sense strand starting at position 2073 of SEQ ID NO: 318680
guauguauggugugagugu

SEQ ID NO: 581112 - RNA, 19 nt, Artificial Sequence
  Description of Artificial Sequence: Synthetic oligonucleotide
  Antisense strand to SEQ ID NO: 581111
acacucacaccauacauac

SEQ ID NO: 581113 - RNA, 19 nt, Artificial Sequence
  Description of Artificial Sequence: Synthetic oligonucleotide
  Sense strand starting at position 2122 of SEQ ID NO: 318680
uagugugugguguuugcau

SEQ ID NO: 581114 - RNA, 19 nt, Artificial Sequence
  Description of Artificial Sequence: Synthetic oligonucleotide
  Antisense strand to SEQ ID NO: 581113
augcaaacaccacacacua

SEQ ID NO: 581115 - RNA, 19 nt, Artificial Sequence
  Description of Artificial Sequence: Synthetic oligonucleotide
  Sense strand starting at position 2144 of SEQ ID NO: 318680
gugugugagcauaguguau

SEQ ID NO: 581116 - RNA, 19 nt, Artificial Sequence
  Description of Artificial Sequence: Synthetic oligonucleotide
  Antisense strand to SEQ ID NO: 581115
auacacuaugcucacacac

SEQ ID NO: 581117 - RNA, 19 nt, Artificial Sequence
  Description of Artificial Sequence: Synthetic oligonucleotide
  Sense strand starting at position 2148 of SEQ ID NO: 318680
gugagcauaguguaugagu

SEQ ID NO: 581118 - RNA, 19 nt, Artificial Sequence
  Description of Artificial Sequence: Synthetic oligonucleotide
  Antisense strand to SEQ ID NO: 581117
acucauacacuaugcucac

SEQ ID NO: 581119 - RNA, 19 nt, Artificial Sequence
  Description of Artificial Sequence: Synthetic oligonucleotide
  Sense strand starting at position 2162 of SEQ ID NO: 318680
ugagugugucgugugugaa

SEQ ID NO: 581120 - RNA, 19 nt, Artificial Sequence
  Description of Artificial Sequence: Synthetic oligonucleotide
  Antisense strand to SEQ ID NO: 581119
uucacacacgacacacuca

SEQ ID NO: 581121 - RNA, 19 nt, Artificial Sequence
  Description of Artificial Sequence: Synthetic oligonucleotide
  Sense strand starting at position 2170 of SEQ ID NO: 318680
ucgugugugaaugugugau

SEQ ID NO: 581122 - RNA, 19 nt, Artificial Sequence
  Description of Artificial Sequence: Synthetic oligonucleotide
  Antisense strand to SEQ ID NO: 581121
aucacacauucacacacga

SEQ ID NO: 581123 - RNA, 19 nt, Artificial Sequence
  Description of Artificial Sequence: Synthetic oligonucleotide
  Sense strand starting at position 2211 of SEQ ID NO: 318680
gugaguaugguguaugagu

SEQ ID NO: 581124 - RNA, 19 nt, Artificial Sequence
  Description of Artificial Sequence: Synthetic oligonucleotide
  Antisense strand to SEQ ID NO: 581123
acucauacaccauacucac

SEQ ID NO: 581125 - RNA, 19 nt, Artificial Sequence
  Description of Artificial Sequence: Synthetic oligonucleotide
  Sense strand starting at position 2213 of SEQ ID NO: 318680
gaguaugguguaugagugu

SEQ ID NO: 581126 - RNA, 19 nt, Artificial Sequence
  Description of Artificial Sequence: Synthetic oligonucleotide
  Antisense strand to SEQ ID NO: 581125
acacucauacaccauacuc

SEQ ID NO: 581127 - RNA, 19 nt, Artificial Sequence
  Description of Artificial Sequence: Synthetic oligonucleotide
  Sense strand starting at position 2253 of SEQ ID NO: 318680
gcuugugugaugugugaau

SEQ ID NO: 581128 - RNA, 19 nt, Artificial Sequence
  Description of Artificial Sequence: Synthetic oligonucleotide
  Antisense strand to SEQ ID NO: 581127
auucacacaucacacaagc

SEQ ID NO: 581129 - RNA, 19 nt, Artificial Sequence
  Description of Artificial Sequence: Synthetic oligonucleotide
  Sense strand starting at position 2255 of SEQ ID NO: 318680
uugugugaugugugaaugu

SEQ ID NO: 581130 - RNA, 19 nt, Artificial Sequence
  Description of Artificial Sequence: Synthetic oligonucleotide
  Antisense strand to SEQ ID NO: 581129
acauucacacaucacacaa

SEQ ID NO: 581131 - RNA, 19 nt, Artificial Sequence
  Description of Artificial Sequence: Synthetic oligonucleotide
  Sense strand starting at position 2257 of SEQ ID NO: 318680
gugugaugugugaaugugu

SEQ ID NO: 581132 - RNA, 19 nt, Artificial Sequence
  Description of Artificial Sequence: Synthetic oligonucleotide
  Antisense strand to SEQ ID NO: 581131
acacauucacacaucacac

SEQ ID NO: 581133 - RNA, 19 nt, Artificial Sequence
  Description of Artificial Sequence: Synthetic oligonucleotide
  Sense strand starting at position 2259 of SEQ ID NO: 318680
gugaugugugaauguguga

SEQ ID NO: 581134 - RNA, 19 nt, Artificial Sequence
  Description of Artificial Sequence: Synthetic oligonucleotide
  Antisense strand to SEQ ID NO: 581133
ucacacauucacacaucac

SEQ ID NO: 581135 - RNA, 19 nt, Artificial Sequence
  Description of Artificial Sequence: Synthetic oligonucleotide
  Sense strand starting at position 2262 of SEQ ID NO: 318680
augugugaaugugugauau

SEQ ID NO: 581136 - RNA, 19 nt, Artificial Sequence
  Description of Artificial Sequence: Synthetic oligonucleotide
  Antisense strand to SEQ ID NO: 581135
auaucacacauucacacau

SEQ ID NO: 581137 - RNA, 19 nt, Artificial Sequence
  Description of Artificial Sequence: Synthetic oligonucleotide
  Sense strand starting at position 2416 of SEQ ID NO: 318680
uauguaauguguguauggu

SEQ ID NO: 581138 - RNA, 19 nt, Artificial Sequence
  Description of Artificial Sequence: Synthetic oligonucleotide
  Antisense strand to SEQ ID NO: 581137
accauacacacauuacaua

SEQ ID NO: 581139 - RNA, 19 nt, Artificial Sequence
  Description of Artificial Sequence: Synthetic oligonucleotide
  Sense strand starting at position 2441 of SEQ ID NO: 318680
gagagugaugugugagugu

SEQ ID NO: 581140 - RNA, 19 nt, Artificial Sequence
  Description of Artificial Sequence: Synthetic oligonucleotide
  Antisense strand to SEQ ID NO: 581139
acacucacacaucacucuc

SEQ ID NO: 581141 - RNA, 19 nt, Artificial Sequence
  Description of Artificial Sequence: Synthetic oligonucleotide
  Sense strand starting at position 2443 of SEQ ID NO: 318680
gagugaugugugagugugu

SEQ ID NO: 581142 - RNA, 19 nt, Artificial Sequence
  Description of Artificial Sequence: Synthetic oligonucleotide
  Antisense strand to SEQ ID NO: 581141
acacacucacacaucacuc

SEQ ID NO: 581143 - RNA, 19 nt, Artificial Sequence
  Description of Artificial Sequence: Synthetic oligonucleotide
  Sense strand starting at position 2598 of SEQ ID NO: 318680
gugcuuugugugaaugugu

SEQ ID NO: 581144 - RNA, 19 nt, Artificial Sequence
  Description of Artificial Sequence: Synthetic oligonucleotide
  Antisense strand to SEQ ID NO: 581143
acacauucacacaaagcac

SEQ ID NO: 581145 - RNA, 19 nt, Artificial Sequence
  Description of Artificial Sequence: Synthetic oligonucleotide
  Sense strand starting at position 2649 of SEQ ID NO: 318680
guuugcaugguguauguga

SEQ ID NO: 581146 - RNA, 19 nt, Artificial Sequence
  Description of Artificial Sequence: Synthetic oligonucleotide
  Antisense strand to SEQ ID NO: 581145
ucacauacaccaugcaaac

SEQ ID NO: 581147 - RNA, 19 nt, Artificial Sequence
  Description of Artificial Sequence: Synthetic oligonucleotide
  Sense strand starting at position 2656 of SEQ ID NO: 318680
ugguguaugugagcauagu

SEQ ID NO: 581148 - RNA, 19 nt, Artificial Sequence
  Description of Artificial Sequence: Synthetic oligonucleotide
  Antisense strand to SEQ ID NO: 581147
acuaugcucacauacacca

SEQ ID NO: 581149 - RNA, 19 nt, Artificial Sequence
  Description of Artificial Sequence: Synthetic oligonucleotide
  Sense strand starting at position 2669 of SEQ ID NO: 318680
cauaguguaugagugugua

SEQ ID NO: 581150 - RNA, 19 nt, Artificial Sequence
  Description of Artificial Sequence: Synthetic oligonucleotide
  Antisense strand to SEQ ID NO: 581149
uacacacucauacacuaug

SEQ ID NO: 581151 - RNA, 19 nt, Artificial Sequence
  Description of Artificial Sequence: Synthetic oligonucleotide
  Sense strand starting at position 2679 of SEQ ID NO: 318680
gaguguguagugugugaau

SEQ ID NO: 581152 - RNA, 19 nt, Artificial Sequence
  Description of Artificial Sequence: Synthetic oligonucleotide
  Antisense strand to SEQ ID NO: 581151
auucacacacuacacacuc

SEQ ID NO: 581153 - RNA, 19 nt, Artificial Sequence
  Description of Artificial Sequence: Synthetic oligonucleotide
  Sense strand starting at position 2787 of SEQ ID NO: 318680
gugugaaugcaugauaugu

SEQ ID NO: 581154 - RNA, 19 nt, Artificial Sequence
  Description of Artificial Sequence: Synthetic oligonucleotide
  Antisense strand to SEQ ID NO: 581153
acauaucaugcauucacac

SEQ ID NO: 581155 - RNA, 19 nt, Artificial Sequence
  Description of Artificial Sequence: Synthetic oligonucleotide
  Sense strand starting at position 2795 of SEQ ID NO: 318680
gcaugauauguguggugug

SEQ ID NO: 581156 - RNA, 19 nt, Artificial Sequence
  Description of Artificial Sequence: Synthetic oligonucleotide
  Antisense strand to SEQ ID NO: 581155
cacaccacacauaucaugc

SEQ ID NO: 581157 - RNA, 19 nt, Artificial Sequence
  Description of Artificial Sequence: Synthetic oligonucleotide
  Sense strand starting at position 2954 of SEQ ID NO: 318680
gguguaugaguguguggga

SEQ ID NO: 581158 - RNA, 19 nt, Artificial Sequence
  Description of Artificial Sequence: Synthetic oligonucleotide
  Antisense strand to SEQ ID NO: 581157
ucccacacacucauacacc

SEQ ID NO: 581159 - RNA, 19 nt, Artificial Sequence
  Description of Artificial Sequence: Synthetic oligonucleotide
  Sense strand starting at position 2967 of SEQ ID NO: 318680
gugggaauguguguagugu

SEQ ID NO: 581160 - RNA, 19 nt, Artificial Sequence
  Description of Artificial Sequence: Synthetic oligonucleotide
  Antisense strand to SEQ ID NO: 581159
acacuacacacauucccac

SEQ ID NO: 581161 - RNA, 19 nt, Artificial Sequence
  Description of Artificial Sequence: Synthetic oligonucleotide
  Sense strand starting at position 3023 of SEQ ID NO: 318680
gugugguaugaguguaaug

SEQ ID NO: 581162 - RNA, 19 nt, Artificial Sequence
  Description of Artificial Sequence: Synthetic oligonucleotide
  Antisense strand to SEQ ID NO: 581161
cauuacacucauaccacac

SEQ ID NO: 581163 - RNA, 19 nt, Artificial Sequence
  Description of Artificial Sequence: Synthetic oligonucleotide
  Sense strand starting at position 3025 of SEQ ID NO: 318680
gugguaugaguguaauguu

SEQ ID NO: 581164 - RNA, 19 nt, Artificial Sequence
  Description of Artificial Sequence: Synthetic oligonucleotide
  Antisense strand to SEQ ID NO: 581163
aacauuacacucauaccac

SEQ ID NO: 581165 - RNA, 19 nt, Artificial Sequence
  Description of Artificial Sequence: Synthetic oligonucleotide
  Sense strand starting at position 3032 of SEQ ID NO: 318680
gaguguaauguuuguggug

SEQ ID NO: 581166 - RNA, 19 nt, Artificial Sequence
  Description of Artificial Sequence: Synthetic oligonucleotide
  Antisense strand to SEQ ID NO: 581165
caccacaaacauuacacuc

SEQ ID NO: 581167 - RNA, 19 nt, Artificial Sequence
  Description of Artificial Sequence: Synthetic oligonucleotide
  Sense strand starting at position 3506 of SEQ ID NO: 318680
gccugcaugguuuaggauu

SEQ ID NO: 581168 - RNA, 19 nt, Artificial Sequence
  Description of Artificial Sequence: Synthetic oligonucleotide
  Antisense strand to SEQ ID NO: 581167
aauccuaaaccaugcaggc

SEQ ID NO: 581169 - RNA, 19 nt, Artificial Sequence
  Description of Artificial Sequence: Synthetic oligonucleotide
  Sense strand starting at position 3512 of SEQ ID NO: 318680
augguuuaggauuguaaac

SEQ ID NO: 581170 - RNA, 19 nt, Artificial Sequence
  Description of Artificial Sequence: Synthetic oligonucleotide
  Antisense strand to SEQ ID NO: 581169
guuuacaauccuaaaccau

SEQ ID NO: 581171 - RNA, 19 nt, Artificial Sequence
  Description of Artificial Sequence: Synthetic oligonucleotide
  Sense strand starting at position 3550 of SEQ ID NO: 318680
gugguuuggcuuugaacuu

SEQ ID NO: 581172 - RNA, 19 nt, Artificial Sequence
  Description of Artificial Sequence: Synthetic oligonucleotide
  Antisense strand to SEQ ID NO: 581171
aaguucaaagccaaaccac

SEQ ID NO: 581173 - RNA, 19 nt, Artificial Sequence
  Description of Artificial Sequence: Synthetic oligonucleotide
  Sense strand starting at position 3576 of SEQ ID NO: 318680
guccgaguucuccaggaaa

SEQ ID NO: 581174 - RNA, 19 nt, Artificial Sequence
  Description of Artificial Sequence: Synthetic oligonucleotide
  Antisense strand to SEQ ID NO: 581173
uuuccuggagaacucggac

SEQ ID NO: 581175 - RNA, 19 nt, Artificial Sequence
  Description of Artificial Sequence: Synthetic oligonucleotide
  Sense strand starting at position 3716 of SEQ ID NO: 318680
aguuucaggccugaaaggu

SEQ ID NO: 581176 - RNA, 19 nt, Artificial Sequence
  Description of Artificial Sequence: Synthetic oligonucleotide
  Antisense strand to SEQ ID NO: 581175
accuuucaggccugaaacu

SEQ ID NO: 581177 - RNA, 19 nt, Artificial Sequence
  Description of Artificial Sequence: Synthetic oligonucleotide
  Sense strand starting at position 3895 of SEQ ID NO: 318680
gugggaaucucagcugcga

SEQ ID NO: 581178 - RNA, 19 nt, Artificial Sequence
  Description of Artificial Sequence: Synthetic oligonucleotide
  Antisense strand to SEQ ID NO: 581177
ucgcagcugagauucccac

SEQ ID NO: 581179 - RNA, 19 nt, Artificial Sequence
  Description of Artificial Sequence: Synthetic oligonucleotide
  Sense strand starting at position 166 of SEQ ID NO: 318681
acuaauaucgcauauauug

SEQ ID NO: 581180 - RNA, 19 nt, Artificial Sequence
  Description of Artificial Sequence: Synthetic oligonucleotide
  Antisense strand to SEQ ID NO: 581179
caauauaugcgauauuagu

SEQ ID NO: 581181 - RNA, 19 nt, Artificial Sequence
  Description of Artificial Sequence: Synthetic oligonucleotide
  Sense strand starting at position 200 of SEQ ID NO: 318681
cagaguuuggagugaaauc

SEQ ID NO: 581182 - RNA, 19 nt, Artificial Sequence
  Description of Artificial Sequence: Synthetic oligonucleotide
  Antisense strand to SEQ ID NO: 581181
gauuucacuccaaacucug

SEQ ID NO: 581183 - RNA, 19 nt, Artificial Sequence
  Description of Artificial Sequence: Synthetic oligonucleotide
  Sense strand starting at position 213 of SEQ ID NO: 318681
gaaaucaucugaguuccag

SEQ ID NO: 581184 - RNA, 19 nt, Artificial Sequence
  Description of Artificial Sequence: Synthetic oligonucleotide
  Antisense strand to SEQ ID NO: 581183
cuggaacucagaugauuuc

SEQ ID NO: 581185 - RNA, 19 nt, Artificial Sequence
  Description of Artificial Sequence: Synthetic oligonucleotide
  Sense strand starting at position 305 of SEQ ID NO: 318681
uugaccucacuugguaauu

SEQ ID NO: 581186 - RNA, 19 nt, Artificial Sequence
  Description of Artificial Sequence: Synthetic oligonucleotide
  Antisense strand to SEQ ID NO: 581185
aauuaccaagugaggucaa

SEQ ID NO: 581187 - RNA, 19 nt, Artificial Sequence
  Description of Artificial Sequence: Synthetic oligonucleotide
  Sense strand starting at position 394 of SEQ ID NO: 318681
accucugaugaaugcucaa

SEQ ID NO: 581188 - RNA, 19 nt, Artificial Sequence
  Description of Artificial Sequence: Synthetic oligonucleotide
  Antisense strand to SEQ ID NO: 581187
uugagcauucaucagaggu

SEQ ID NO: 581189 - RNA, 19 nt, Artificial Sequence
  Description of Artificial Sequence: Synthetic oligonucleotide
  Sense strand starting at position 397 of SEQ ID NO: 318681
ucugaugaaugcucaaauu

SEQ ID NO: 581190 - RNA, 19 nt, Artificial Sequence
  Description of Artificial Sequence: Synthetic oligonucleotide
  Antisense strand to SEQ ID NO: 581189
aauuugagcauucaucaga

SEQ ID NO: 581191 - RNA, 19 nt, Artificial Sequence
  Description of Artificial Sequence: Synthetic oligonucleotide
  Sense strand starting at position 477 of SEQ ID NO: 318681
augggcucuauaugguuaa

SEQ ID NO: 581192 - RNA, 19 nt, Artificial Sequence
  Description of Artificial Sequence: Synthetic oligonucleotide
  Antisense strand to SEQ ID NO: 581191
uuaaccauauagagcccau

SEQ ID NO: 581193 - RNA, 19 nt, Artificial Sequence
  Description of Artificial Sequence: Synthetic oligonucleotide
  Sense strand starting at position 480 of SEQ ID NO: 318681
ggcucuauaugguuaauaa

SEQ ID NO: 581194 - RNA, 19 nt, Artificial Sequence
  Description of Artificial Sequence: Synthetic oligonucleotide
  Antisense strand to SEQ ID NO: 581193
uuauuaaccauauagagcc

SEQ ID NO: 581195 - RNA, 19 nt, Artificial Sequence
  Description of Artificial Sequence: Synthetic oligonucleotide
  Sense strand starting at position 481 of SEQ ID NO: 318681
gcucuauaugguuaauaaa

SEQ ID NO: 581196 - RNA, 19 nt, Artificial Sequence
  Description of Artificial Sequence: Synthetic oligonucleotide
  Antisense strand to SEQ ID NO: 581195
uuuauuaaccauauagagc

SEQ ID NO: 581197 - RNA, 19 nt, Artificial Sequence
  Description of Artificial Sequence: Synthetic oligonucleotide
  Sense strand starting at position 602 of SEQ ID NO: 318681
ugcauaugucuuuaagauu

SEQ ID NO: 581198 - RNA, 19 nt, Artificial Sequence
  Description of Artificial Sequence: Synthetic oligonucleotide
  Antisense strand to SEQ ID NO: 581197
aaucuuaaagacauaugca

SEQ ID NO: 581199 - RNA, 19 nt, Artificial Sequence
  Description of Artificial Sequence: Synthetic oligonucleotide
  Sense strand starting at position 669 of SEQ ID NO: 318681
aaugaagcagugugauaua

SEQ ID NO: 581200 - RNA, 19 nt, Artificial Sequence
  Description of Artificial Sequence: Synthetic oligonucleotide
  Antisense strand to SEQ ID NO: 581199
uauaucacacugcuucauu

SEQ ID NO: 581201 - RNA, 19 nt, Artificial Sequence
  Description of Artificial Sequence: Synthetic oligonucleotide
  Sense strand starting at position 678 of SEQ ID NO: 318681
gugugauauaaaugcauga

SEQ ID NO: 581202 - RNA, 19 nt, Artificial Sequence
  Description of Artificial Sequence: Synthetic oligonucleotide
  Antisense strand to SEQ ID NO: 581201
ucaugcauuuauaucacac

SEQ ID NO: 581203 - RNA, 19 nt, Artificial Sequence
  Description of Artificial Sequence: Synthetic oligonucleotide
  Sense strand starting at position 683 of SEQ ID NO: 318681
auauaaaugcaugagcuau

SEQ ID NO: 581204 - RNA, 19 nt, Artificial Sequence
  Description of Artificial Sequence: Synthetic oligonucleotide
  Antisense strand to SEQ ID NO: 581203
auagcucaugcauuuauau

SEQ ID NO: 581205 - RNA, 19 nt, Artificial Sequence
  Description of Artificial Sequence: Synthetic oligonucleotide
  Sense strand starting at position 890 of SEQ ID NO: 318681
cuaacauacuguguugacu

SEQ ID NO: 581206 - RNA, 19 nt, Artificial Sequence
  Description of Artificial Sequence: Synthetic oligonucleotide
  Antisense strand to SEQ ID NO: 581205
agucaacacaguauguuag

SEQ ID NO: 581207 - RNA, 19 nt, Artificial Sequence
  Description of Artificial Sequence: Synthetic oligonucleotide
  Sense strand starting at position 983 of SEQ ID NO: 318681
aguguuaagguaugaagua

SEQ ID NO: 581208 - RNA, 19 nt, Artificial Sequence
  Description of Artificial Sequence: Synthetic oligonucleotide
  Antisense strand to SEQ ID NO: 581207
uacuucauaccuuaacacu

SEQ ID NO: 581209 - RNA, 19 nt, Artificial Sequence
  Description of Artificial Sequence: Synthetic oligonucleotide
  Sense strand starting at position 1046 of SEQ ID NO: 318681
gguguucaugauggaauaa

SEQ ID NO: 581210 - RNA, 19 nt, Artificial Sequence
  Description of Artificial Sequence: Synthetic oligonucleotide
  Antisense strand to SEQ ID NO: 581209
uuauuccaucaugaacacc

SEQ ID NO: 581211 - RNA, 19 nt, Artificial Sequence
  Description of Artificial Sequence: Synthetic oligonucleotide
  Sense strand starting at position 1117 of SEQ ID NO: 318681
uguuguccucauuauacaa

SEQ ID NO: 581212 - RNA, 19 nt, Artificial Sequence
  Description of Artificial Sequence: Synthetic oligonucleotide
  Antisense strand to SEQ ID NO: 581211
uuguauaaugaggacaaca

SEQ ID NO: 581213 - RNA, 19 nt, Artificial Sequence
  Description of Artificial Sequence: Synthetic oligonucleotide
  Sense strand starting at position 1233 of SEQ ID NO: 318681
ugggaauuaacgggagguu

SEQ ID NO: 581214 - RNA, 19 nt, Artificial Sequence
  Description of Artificial Sequence: Synthetic oligonucleotide
  Antisense strand to SEQ ID NO: 581213
aaccucccguuaauuccca

SEQ ID NO: 581215 - RNA, 19 nt, Artificial Sequence
  Description of Artificial Sequence: Synthetic oligonucleotide
  Sense strand starting at position 1236 of SEQ ID NO: 318681
gaauuaacgggagguuaac

SEQ ID NO: 581216 - RNA, 19 nt, Artificial Sequence
  Description of Artificial Sequence: Synthetic oligonucleotide
  Antisense strand to SEQ ID NO: 581215
guuaaccucccguuaauuc

SEQ ID NO: 581217 - RNA, 19 nt, Artificial Sequence
  Description of Artificial Sequence: Synthetic oligonucleotide
  Sense strand starting at position 1291 of SEQ ID NO: 318681
uaagaacuccggcgagaac

SEQ ID NO: 581218 - RNA, 19 nt, Artificial Sequence
  Description of Artificial Sequence: Synthetic oligonucleotide
  Antisense strand to SEQ ID NO: 581217
guucucgccggaguucuua

SEQ ID NO: 581219 - RNA, 19 nt, Artificial Sequence
  Description of Artificial Sequence: Synthetic oligonucleotide
  Sense strand starting at position 2051 of SEQ ID NO: 318681
ggcgugugacgucucuagu

SEQ ID NO: 581220 - RNA, 19 nt, Artificial Sequence
  Description of Artificial Sequence: Synthetic oligonucleotide
  Antisense strand to SEQ ID NO: 581219
acuagagacgucacacgcc

SEQ ID NO: 581221 - RNA, 19 nt, Artificial Sequence
  Description of Artificial Sequence: Synthetic oligonucleotide
  Sense strand starting at position 2052 of SEQ ID NO: 318681
gcgugugacgucucuagua

SEQ ID NO: 581222 - RNA, 19 nt, Artificial Sequence
  Description of Artificial Sequence: Synthetic oligonucleotide
  Antisense strand to SEQ ID NO: 581221
uacuagagacgucacacgc

SEQ ID NO: 581223 - RNA, 19 nt, Artificial Sequence
  Description of Artificial Sequence: Synthetic oligonucleotide
  Sense strand starting at position 2061 of SEQ ID NO: 318681
gucucuaguagugucguaa

SEQ ID NO: 581224 - RNA, 19 nt, Artificial Sequence
  Description of Artificial Sequence: Synthetic oligonucleotide
  Antisense strand to SEQ ID NO: 581223
uuacgacacuacuagagac

SEQ ID NO: 581225 - RNA, 19 nt, Artificial Sequence
  Description of Artificial Sequence: Synthetic oligonucleotide
  Sense strand starting at position 2108 of SEQ ID NO: 318681
ugaggucuucgugagauuc

SEQ ID NO: 581226 - RNA, 19 nt, Artificial Sequence
  Description of Artificial Sequence: Synthetic oligonucleotide
  Antisense strand to SEQ ID NO: 581225
gaaucucacgaagaccuca

SEQ ID NO: 581227 - RNA, 19 nt, Artificial Sequence
  Description of Artificial Sequence: Synthetic oligonucleotide
  Sense strand starting at position 2222 of SEQ ID NO: 318681
ggcugccaacacuaauaau

SEQ ID NO: 581228 - RNA, 19 nt, Artificial Sequence
  Description of Artificial Sequence: Synthetic oligonucleotide
  Antisense strand to SEQ ID NO: 581227
auuauuaguguuggcagcc

SEQ ID NO: 581229 - RNA, 19 nt, Artificial Sequence
  Description of Artificial Sequence: Synthetic oligonucleotide
  Sense strand starting at position 2617 of SEQ ID NO: 318681
acaguucuuuaguuaagag

SEQ ID NO: 581230 - RNA, 19 nt, Artificial Sequence
  Description of Artificial Sequence: Synthetic oligonucleotide
  Antisense strand to SEQ ID NO: 581229
cucuuaacuaaagaacugu

SEQ ID NO: 581231 - RNA, 19 nt, Artificial Sequence
  Description of Artificial Sequence: Synthetic oligonucleotide
  Sense strand starting at position 2684 of SEQ ID NO: 318681
acuaguaaugcaugaguau

SEQ ID NO: 581232 - RNA, 19 nt, Artificial Sequence
  Description of Artificial Sequence: Synthetic oligonucleotide
  Antisense strand to SEQ ID NO: 581231
auacucaugcauuacuagu

SEQ ID NO: 581233 - RNA, 19 nt, Artificial Sequence
  Description of Artificial Sequence: Synthetic oligonucleotide
  Sense strand starting at position 2685 of SEQ ID NO: 318681
cuaguaaugcaugaguauc

SEQ ID NO: 581234 - RNA, 19 nt, Artificial Sequence
  Description of Artificial Sequence: Synthetic oligonucleotide
  Antisense strand to SEQ ID NO: 581233
gauacucaugcauuacuag

SEQ ID NO: 581235 - RNA, 19 nt, Artificial Sequence
  Description of Artificial Sequence: Synthetic oligonucleotide
  Sense strand starting at position 2832 of SEQ ID NO: 318681
uuggaauagcugcauaguu

SEQ ID NO: 581236 - RNA, 19 nt, Artificial Sequence
  Description of Artificial Sequence: Synthetic oligonucleotide
  Antisense strand to SEQ ID NO: 581235
aacuaugcagcuauuccaa

SEQ ID NO: 581237 - RNA, 19 nt, Artificial Sequence
  Description of Artificial Sequence: Synthetic oligonucleotide
  Sense strand starting at position 2852 of SEQ ID NO: 318681
ugggucuuacauugaaguu

SEQ ID NO: 581238 - RNA, 19 nt, Artificial Sequence
  Description of Artificial Sequence: Synthetic oligonucleotide
  Antisense strand to SEQ ID NO: 581237
aacuucaauguaagaccca

SEQ ID NO: 581239 - RNA, 19 nt, Artificial Sequence
  Description of Artificial Sequence: Synthetic oligonucleotide
  Sense strand starting at position 2853 of SEQ ID NO: 318681
gggucuuacauugaaguuu

SEQ ID NO: 581240 - RNA, 19 nt, Artificial Sequence
  Description of Artificial Sequence: Synthetic oligonucleotide
  Antisense strand to SEQ ID NO: 581239
aaacuucaauguaagaccc

SEQ ID NO: 581241 - RNA, 19 nt, Artificial Sequence
  Description of Artificial Sequence: Synthetic oligonucleotide
  Sense strand starting at position 2899 of SEQ ID NO: 318681
aguugacuccauggagaua

SEQ ID NO: 581242 - RNA, 19 nt, Artificial Sequence
  Description of Artificial Sequence: Synthetic oligonucleotide
  Antisense strand to SEQ ID NO: 581241
uaucuccauggagucaacu

SEQ ID NO: 581243 - RNA, 19 nt, Artificial Sequence
  Description of Artificial Sequence: Synthetic oligonucleotide
  Sense strand starting at position 3475 of SEQ ID NO: 318681
ucuucuaauguguggagga

SEQ ID NO: 581244 - RNA, 19 nt, Artificial Sequence
  Description of Artificial Sequence: Synthetic oligonucleotide
  Antisense strand to SEQ ID NO: 581243
uccuccacacauuagaaga

SEQ ID NO: 581245 - RNA, 19 nt, Artificial Sequence
  Description of Artificial Sequence: Synthetic oligonucleotide
  Sense strand starting at position 3477 of SEQ ID NO: 318681
uucuaauguguggaggaua

SEQ ID NO: 581246 - RNA, 19 nt, Artificial Sequence
  Description of Artificial Sequence: Synthetic oligonucleotide
  Antisense strand to SEQ ID NO: 581245
uauccuccacacauuagaa

SEQ ID NO: 581247 - RNA, 19 nt, Artificial Sequence
  Description of Artificial Sequence: Synthetic oligonucleotide
  Sense strand starting at position 3531 of SEQ ID NO: 318681
gcuaaagaugccugggaau

SEQ ID NO: 581248 - RNA, 19 nt, Artificial Sequence
  Description of Artificial Sequence: Synthetic oligonucleotide
  Antisense strand to SEQ ID NO: 581247
auucccaggcaucuuuagc

SEQ ID NO: 581249 - RNA, 19 nt, Artificial Sequence
  Description of Artificial Sequence: Synthetic oligonucleotide
  Sense strand starting at position 3533 of SEQ ID NO: 318681
uaaagaugccugggaauuc

SEQ ID NO: 581250 - RNA, 19 nt, Artificial Sequence
  Description of Artificial Sequence: Synthetic oligonucleotide
  Antisense strand to SEQ ID NO: 581249
gaauucccaggcaucuuua

SEQ ID NO: 581251 - RNA, 19 nt, Artificial Sequence
  Description of Artificial Sequence: Synthetic oligonucleotide
  Sense strand starting at position 3627 of SEQ ID NO: 318681
auauuacugugaccacauu

SEQ ID NO: 581252 - RNA, 19 nt, Artificial Sequence
  Description of Artificial Sequence: Synthetic oligonucleotide
  Antisense strand to SEQ ID NO: 581251
aauguggucacaguaauau

SEQ ID NO: 581253 - RNA, 19 nt, Artificial Sequence
  Description of Artificial Sequence: Synthetic oligonucleotide
  Sense strand starting at position 3641 of SEQ ID NO: 318681
acauuuacuuuggaagaua

SEQ ID NO: 581254 - RNA, 19 nt, Artificial Sequence
  Description of Artificial Sequence: Synthetic oligonucleotide
  Antisense strand to SEQ ID NO: 581253
uaucuuccaaaguaaaugu

SEQ ID NO: 581255 - RNA, 19 nt, Artificial Sequence
  Description of Artificial Sequence: Synthetic oligonucleotide
  Sense strand starting at position 3858 of SEQ ID NO: 318681
uuuaguucccucuagaagu

SEQ ID NO: 581256 - RNA, 19 nt, Artificial Sequence
  Description of Artificial Sequence: Synthetic oligonucleotide
  Antisense strand to SEQ ID NO: 581255
acuucuagagggaacuaaa

SEQ ID NO: 581257 - RNA, 19 nt, Artificial Sequence
  Description of Artificial Sequence: Synthetic oligonucleotide
  Sense strand starting at position 3966 of SEQ ID NO: 318681
gaauacagguucuuaauga

SEQ ID NO: 581258 - RNA, 19 nt, Artificial Sequence
  Description of Artificial Sequence: Synthetic oligonucleotide
  Antisense strand to SEQ ID NO: 581257
ucauuaagaaccuguauuc

SEQ ID NO: 581259 - RNA, 19 nt, Artificial Sequence
  Description of Artificial Sequence: Synthetic oligonucleotide
  Sense strand starting at position 84 of SEQ ID NO: 318682
gagcuuacgguccagagaa

SEQ ID NO: 581260 - RNA, 19 nt, Artificial Sequence
  Description of Artificial Sequence: Synthetic oligonucleotide
  Antisense strand to SEQ ID NO: 581259
uucucuggaccguaagcuc

SEQ ID NO: 581261 - RNA, 19 nt, Artificial Sequence
  Description of Artificial Sequence: Synthetic oligonucleotide
  Sense strand starting at position 86 of SEQ ID NO: 318682
gcuuacgguccagagaacu

SEQ ID NO: 581262 - RNA, 19 nt, Artificial Sequence
  Description of Artificial Sequence: Synthetic oligonucleotide
  Antisense strand to SEQ ID NO: 581261
aguucucuggaccguaagc

SEQ ID NO: 581263 - RNA, 19 nt, Artificial Sequence
  Description of Artificial Sequence: Synthetic oligonucleotide
  Sense strand starting at position 128 of SEQ ID NO: 318682
auagcuaucuaacuggaua

SEQ ID NO: 581264 - RNA, 19 nt, Artificial Sequence
  Description of Artificial Sequence: Synthetic oligonucleotide
  Antisense strand to SEQ ID NO: 581263
uauccaguuagauagcuau

SEQ ID NO: 581265 - RNA, 19 nt, Artificial Sequence
  Description of Artificial Sequence: Synthetic oligonucleotide
  Sense strand starting at position 139 of SEQ ID NO: 318682
acuggauaccaccgguaau

SEQ ID NO: 581266 - RNA, 19 nt, Artificial Sequence
  Description of Artificial Sequence: Synthetic oligonucleotide
  Antisense strand to SEQ ID NO: 581265
auuaccggugguauccagu

SEQ ID NO: 581267 - RNA, 19 nt, Artificial Sequence
  Description of Artificial Sequence: Synthetic oligonucleotide
  Sense strand starting at position 140 of SEQ ID NO: 318682
cuggauaccaccgguaaua

SEQ ID NO: 581268 - RNA, 19 nt, Artificial Sequence
  Description of Artificial Sequence: Synthetic oligonucleotide
  Antisense strand to SEQ ID NO: 581267
uauuaccggugguauccag

SEQ ID NO: 581269 - RNA, 19 nt, Artificial Sequence
  Description of Artificial Sequence: Synthetic oligonucleotide
  Sense strand starting at position 467 of SEQ ID NO: 318682
uuuguugucacugaggauc

SEQ ID NO: 581270 - RNA, 19 nt, Artificial Sequence
  Description of Artificial Sequence: Synthetic oligonucleotide
  Antisense strand to SEQ ID NO: 581269
gauccucagugacaacaaa

SEQ ID NO: 581271 - RNA, 19 nt, Artificial Sequence
  Description of Artificial Sequence: Synthetic oligonucleotide
  Sense strand starting at position 497 of SEQ ID NO: 318682
guaauaaugcuacgacaua

SEQ ID NO: 581272 - RNA, 19 nt, Artificial Sequence
  Description of Artificial Sequence: Synthetic oligonucleotide
  Antisense strand to SEQ ID NO: 581271
uaugucguagcauuauuac

SEQ ID NO: 581273 - RNA, 19 nt, Artificial Sequence
  Description of Artificial Sequence: Synthetic oligonucleotide
  Sense strand starting at position 589 of SEQ ID NO: 318682
aggauuuagucauacagga

SEQ ID NO: 581274 - RNA, 19 nt, Artificial Sequence
  Description of Artificial Sequence: Synthetic oligonucleotide
  Antisense strand to SEQ ID NO: 581273
uccuguaugacuaaauccu

SEQ ID NO: 581275 - RNA, 19 nt, Artificial Sequence
  Description of Artificial Sequence: Synthetic oligonucleotide
  Sense strand starting at position 622 of SEQ ID NO: 318682
aauaaaguggcauggcuaa

SEQ ID NO: 581276 - RNA, 19 nt, Artificial Sequence
  Description of Artificial Sequence: Synthetic oligonucleotide
  Antisense strand to SEQ ID NO: 581275
uuagccaugccacuuuauu

SEQ ID NO: 581277 - RNA, 19 nt, Artificial Sequence
  Description of Artificial Sequence: Synthetic oligonucleotide
  Sense strand starting at position 683 of SEQ ID NO: 318682
uguacaugguuugugaaga

SEQ ID NO: 581278 - RNA, 19 nt, Artificial Sequence
  Description of Artificial Sequence: Synthetic oligonucleotide
  Antisense strand to SEQ ID NO: 581277
ucuucacaaaccauguaca

SEQ ID NO: 581279 - RNA, 19 nt, Artificial Sequence
  Description of Artificial Sequence: Synthetic oligonucleotide
  Sense strand starting at position 718 of SEQ ID NO: 318682
gcaagcaacuggucuaaau

SEQ ID NO: 581280 - RNA, 19 nt, Artificial Sequence
  Description of Artificial Sequence: Synthetic oligonucleotide
  Antisense strand to SEQ ID NO: 581279
auuuagaccaguugcuugc

SEQ ID NO: 581281 - RNA, 19 nt, Artificial Sequence
  Description of Artificial Sequence: Synthetic oligonucleotide
  Sense strand starting at position 720 of SEQ ID NO: 318682
aagcaacuggucuaaaugu

SEQ ID NO: 581282 - RNA, 19 nt, Artificial Sequence
  Description of Artificial Sequence: Synthetic oligonucleotide
  Antisense strand to SEQ ID NO: 581281
acauuuagaccaguugcuu

SEQ ID NO: 581283 - RNA, 19 nt, Artificial Sequence
  Description of Artificial Sequence: Synthetic oligonucleotide
  Sense strand starting at position 1019 of SEQ ID NO: 318682
gugcguucccguguuagaa

SEQ ID NO: 581284 - RNA, 19 nt, Artificial Sequence
  Description of Artificial Sequence: Synthetic oligonucleotide
  Antisense strand to SEQ ID NO: 581283
uucuaacacgggaacgcac

SEQ ID NO: 581285 - RNA, 19 nt, Artificial Sequence
  Description of Artificial Sequence: Synthetic oligonucleotide
  Sense strand starting at position 1020 of SEQ ID NO: 318682
ugcguucccguguuagaaa

SEQ ID NO: 581286 - RNA, 19 nt, Artificial Sequence
  Description of Artificial Sequence: Synthetic oligonucleotide
  Antisense strand to SEQ ID NO: 581285
uuucuaacacgggaacgca

SEQ ID NO: 581287 - RNA, 19 nt, Artificial Sequence
  Description of Artificial Sequence: Synthetic oligonucleotide
  Sense strand starting at position 1280 of SEQ ID NO: 318682
cagaaacucgcagguuuaa

SEQ ID NO: 581288 - RNA, 19 nt, Artificial Sequence
  Description of Artificial Sequence: Synthetic oligonucleotide
  Antisense strand to SEQ ID NO: 581287
uuaaaccugcgaguuucug

SEQ ID NO: 581289 - RNA, 19 nt, Artificial Sequence
  Description of Artificial Sequence: Synthetic oligonucleotide
  Sense strand starting at position 1752 of SEQ ID NO: 318682
gggccuggccgggaacaau

SEQ ID NO: 581290 - RNA, 19 nt, Artificial Sequence
  Description of Artificial Sequence: Synthetic oligonucleotide
  Antisense strand to SEQ ID NO: 581289
auuguucccggccaggccc

SEQ ID NO: 581291 - RNA, 19 nt, Artificial Sequence
  Description of Artificial Sequence: Synthetic oligonucleotide
  Sense strand starting at position 2650 of SEQ ID NO: 318682
agaaguagucguggaagac

SEQ ID NO: 581292 - RNA, 19 nt, Artificial Sequence
  Description of Artificial Sequence: Synthetic oligonucleotide
  Antisense strand to SEQ ID NO: 581291
gucuuccacgacuacuucu

SEQ ID NO: 581293 - RNA, 19 nt, Artificial Sequence
  Description of Artificial Sequence: Synthetic oligonucleotide
  Sense strand starting at position 2651 of SEQ ID NO: 318682
gaaguagucguggaagacu

SEQ ID NO: 581294 - RNA, 19 nt, Artificial Sequence
  Description of Artificial Sequence: Synthetic oligonucleotide
  Antisense strand to SEQ ID NO: 581293
agucuuccacgacuacuuc

SEQ ID NO: 581295 - RNA, 19 nt, Artificial Sequence
  Description of Artificial Sequence: Synthetic oligonucleotide
  Sense strand starting at position 2740 of SEQ ID NO: 318682
gucccagcgcccuuugaau

SEQ ID NO: 581296 - RNA, 19 nt, Artificial Sequence
  Description of Artificial Sequence: Synthetic oligonucleotide
  Antisense strand to SEQ ID NO: 581295
auucaaagggcgcugggac

SEQ ID NO: 581297 - RNA, 19 nt, Artificial Sequence
  Description of Artificial Sequence: Synthetic oligonucleotide
  Sense strand starting at position 2926 of SEQ ID NO: 318682
agagauaaacgcugaccuu

SEQ ID NO: 581298 - RNA, 19 nt, Artificial Sequence
  Description of Artificial Sequence: Synthetic oligonucleotide
  Antisense strand to SEQ ID NO: 581297
aaggucagcguuuaucucu

SEQ ID NO: 581299 - RNA, 19 nt, Artificial Sequence
  Description of Artificial Sequence: Synthetic oligonucleotide
  Sense strand starting at position 2927 of SEQ ID NO: 318682
gagauaaacgcugaccuua

SEQ ID NO: 581300 - RNA, 19 nt, Artificial Sequence
  Description of Artificial Sequence: Synthetic oligonucleotide
  Antisense strand to SEQ ID NO: 581299
uaaggucagcguuuaucuc

SEQ ID NO: 581301 - RNA, 19 nt, Artificial Sequence
  Description of Artificial Sequence: Synthetic oligonucleotide
  Sense strand starting at position 3045 of SEQ ID NO: 318682
gccaaagugaaguguaaau

SEQ ID NO: 581302 - RNA, 19 nt, Artificial Sequence
  Description of Artificial Sequence: Synthetic oligonucleotide
  Antisense strand to SEQ ID NO: 581301
auuuacacuucacuuuggc

SEQ ID NO: 581303 - RNA, 19 nt, Artificial Sequence
  Description of Artificial Sequence: Synthetic oligonucleotide
  Sense strand starting at position 3055 of SEQ ID NO: 318682
aguguaaaugagugaaaca

SEQ ID NO: 581304 - RNA, 19 nt, Artificial Sequence
  Description of Artificial Sequence: Synthetic oligonucleotide
  Antisense strand to SEQ ID NO: 581303
uguuucacucauuuacacu

SEQ ID NO: 581305 - RNA, 19 nt, Artificial Sequence
  Description of Artificial Sequence: Synthetic oligonucleotide
  Sense strand starting at position 3089 of SEQ ID NO: 318682
ucuagaauuugggacauug

SEQ ID NO: 581306 - RNA, 19 nt, Artificial Sequence
  Description of Artificial Sequence: Synthetic oligonucleotide
  Antisense strand to SEQ ID NO: 581305
caaugucccaaauucuaga

SEQ ID NO: 581307 - RNA, 19 nt, Artificial Sequence
  Description of Artificial Sequence: Synthetic oligonucleotide
  Sense strand starting at position 3155 of SEQ ID NO: 318682
uguuaauggucccuuuaga

SEQ ID NO: 581308 - RNA, 19 nt, Artificial Sequence
  Description of Artificial Sequence: Synthetic oligonucleotide
  Antisense strand to SEQ ID NO: 581307
ucuaaagggaccauuaaca

SEQ ID NO: 581309 - RNA, 19 nt, Artificial Sequence
  Description of Artificial Sequence: Synthetic oligonucleotide
  Sense strand starting at position 3175 of SEQ ID NO: 318682
uugugcuucgugcuaugau

SEQ ID NO: 581310 - RNA, 19 nt, Artificial Sequence
  Description of Artificial Sequence: Synthetic oligonucleotide
  Antisense strand to SEQ ID NO: 581309
aucauagcacgaagcacaa

SEQ ID NO: 581311 - RNA, 19 nt, Artificial Sequence
  Description of Artificial Sequence: Synthetic oligonucleotide
  Sense strand starting at position 3451 of SEQ ID NO: 318682
gcaauuuggcaaugcagau

SEQ ID NO: 581312 - RNA, 19 nt, Artificial Sequence
  Description of Artificial Sequence: Synthetic oligonucleotide
  Antisense strand to SEQ ID NO: 581311
aucugcauugccaaauugc

SEQ ID NO: 581313 - RNA, 19 nt, Artificial Sequence
  Description of Artificial Sequence: Synthetic oligonucleotide
  Sense strand starting at position 3492 of SEQ ID NO: 318682
auccuuugacucgggauua

SEQ ID NO: 581314 - RNA, 19 nt, Artificial Sequence
  Description of Artificial Sequence: Synthetic oligonucleotide
  Antisense strand to SEQ ID NO: 581313
uaaucccgagucaaaggau

SEQ ID NO: 581315 - RNA, 19 nt, Artificial Sequence
  Description of Artificial Sequence: Synthetic oligonucleotide
  Sense strand starting at position 3631 of SEQ ID NO: 318682
cagaaaugucgugagauau

SEQ ID NO: 581316 - RNA, 19 nt, Artificial Sequence
  Description of Artificial Sequence: Synthetic oligonucleotide
  Antisense strand to SEQ ID NO: 581315
auaucucacgacauuucug

SEQ ID NO: 581317 - RNA, 19 nt, Artificial Sequence
  Description of Artificial Sequence: Synthetic oligonucleotide
  Sense strand starting at position 3637 of SEQ ID NO: 318682
ugucgugagauauagaaau

SEQ ID NO: 581318 - RNA, 19 nt, Artificial Sequence
  Description of Artificial Sequence: Synthetic oligonucleotide
  Antisense strand to SEQ ID NO: 581317
auuucuauaucucacgaca

SEQ ID NO: 581319 - RNA, 19 nt, Artificial Sequence
  Description of Artificial Sequence: Synthetic oligonucleotide
  Sense strand starting at position 3680 of SEQ ID NO: 318682
gaauuaguauuguccucag

SEQ ID NO: 581320 - RNA, 19 nt, Artificial Sequence
  Description of Artificial Sequence: Synthetic oligonucleotide
  Antisense strand to SEQ ID NO: 581319
cugaggacaauacuaauuc

SEQ ID NO: 581321 - RNA, 19 nt, Artificial Sequence
  Description of Artificial Sequence: Synthetic oligonucleotide
  Sense strand starting at position 3697 of SEQ ID NO: 318682
aguugugguccugaacauu

SEQ ID NO: 581322 - RNA, 19 nt, Artificial Sequence
  Description of Artificial Sequence: Synthetic oligonucleotide
  Antisense strand to SEQ ID NO: 581321
aauguucaggaccacaacu

SEQ ID NO: 581323 - RNA, 19 nt, Artificial Sequence
  Description of Artificial Sequence: Synthetic oligonucleotide
  Sense strand starting at position 3889 of SEQ ID NO: 318682
aagagauugcuuuguccug

SEQ ID NO: 581324 - RNA, 19 nt, Artificial Sequence
  Description of Artificial Sequence: Synthetic oligonucleotide
  Antisense strand to SEQ ID NO: 581323
caggacaaagcaaucucuu

SEQ ID NO: 581325 - RNA, 19 nt, Artificial Sequence
  Description of Artificial Sequence: Synthetic oligonucleotide
  Sense strand starting at position 3890 of SEQ ID NO: 318682
agagauugcuuuguccuga

SEQ ID NO: 581326 - RNA, 19 nt, Artificial Sequence
  Description of Artificial Sequence: Synthetic oligonucleotide
  Antisense strand to SEQ ID NO: 581325
ucaggacaaagcaaucucu

SEQ ID NO: 581327 - RNA, 19 nt, Artificial Sequence
  Description of Artificial Sequence: Synthetic oligonucleotide
  Sense strand starting at position 3891 of SEQ ID NO: 318682
gagauugcuuuguccugaa

SEQ ID NO: 581328 - RNA, 19 nt, Artificial Sequence
  Description of Artificial Sequence: Synthetic oligonucleotide
  Antisense strand to SEQ ID NO: 581327
uucaggacaaagcaaucuc

SEQ ID NO: 581329 - RNA, 19 nt, Artificial Sequence
  Description of Artificial Sequence: Synthetic oligonucleotide
  Sense strand starting at position 3933 of SEQ ID NO: 318682
ccaagacuuccacgauguc

SEQ ID NO: 581330 - RNA, 19 nt, Artificial Sequence
  Description of Artificial Sequence: Synthetic oligonucleotide
  Antisense strand to SEQ ID NO: 581329
gacaucguggaagucuugg

SEQ ID NO: 581331 - RNA, 19 nt, Artificial Sequence
  Description of Artificial Sequence: Synthetic oligonucleotide
  Sense strand starting at position 3934 of SEQ ID NO: 318682
caagacuuccacgaugucu

SEQ ID NO: 581332 - RNA, 19 nt, Artificial Sequence
  Description of Artificial Sequence: Synthetic oligonucleotide
  Antisense strand to SEQ ID NO: 581331
agacaucguggaagucuug

SEQ ID NO: 581333 - RNA, 19 nt, Artificial Sequence
  Description of Artificial Sequence: Synthetic oligonucleotide
  Sense strand starting at position 3936 of SEQ ID NO: 318682
agacuuccacgaugucuau

SEQ ID NO: 581334 - RNA, 19 nt, Artificial Sequence
  Description of Artificial Sequence: Synthetic oligonucleotide
  Antisense strand to SEQ ID NO: 581333
auagacaucguggaagucu

SEQ ID NO: 581335 - RNA, 19 nt, Artificial Sequence
  Description of Artificial Sequence: Synthetic oligonucleotide
  Sense strand starting at position 3939 of SEQ ID NO: 318682
cuuccacgaugucuauuaa

SEQ ID NO: 581336 - RNA, 19 nt, Artificial Sequence
  Description of Artificial Sequence: Synthetic oligonucleotide
  Antisense strand to SEQ ID NO: 581335
uuaauagacaucguggaag

SEQ ID NO: 581337 - RNA, 19 nt, Artificial Sequence
  Description of Artificial Sequence: Synthetic oligonucleotide
  Sense strand starting at position 3940 of SEQ ID NO: 318682
uuccacgaugucuauuaaa

SEQ ID NO: 581338 - RNA, 19 nt, Artificial Sequence
  Description of Artificial Sequence: Synthetic oligonucleotide
  Antisense strand to SEQ ID NO: 581337
uuuaauagacaucguggaa

SEQ ID NO: 581339 - RNA, 19 nt, Artificial Sequence
  Description of Artificial Sequence: Synthetic oligonucleotide
  Sense strand starting at position 244 of SEQ ID NO: 318683
gcuguuaggaguuauucua

SEQ ID NO: 581340 - RNA, 19 nt, Artificial Sequence
  Description of Artificial Sequence: Synthetic oligonucleotide
  Antisense strand to SEQ ID NO: 581339
uagaauaacuccuaacagc

SEQ ID NO: 581341 - RNA, 19 nt, Artificial Sequence
  Description of Artificial Sequence: Synthetic oligonucleotide
  Sense strand starting at position 484 of SEQ ID NO: 318683
gggaauacuugacucccga

SEQ ID NO: 581342 - RNA, 19 nt, Artificial Sequence
  Description of Artificial Sequence: Synthetic oligonucleotide
  Antisense strand to SEQ ID NO: 581341
ucgggagucaaguauuccc

SEQ ID NO: 581343 - RNA, 19 nt, Artificial Sequence
  Description of Artificial Sequence: Synthetic oligonucleotide
  Sense strand starting at position 557 of SEQ ID NO: 318683
ggugcccuuauggaauaua

SEQ ID NO: 581344 - RNA, 19 nt, Artificial Sequence
  Description of Artificial Sequence: Synthetic oligonucleotide
  Antisense strand to SEQ ID NO: 581343
uauauuccauaagggcacc

SEQ ID NO: 581345 - RNA, 19 nt, Artificial Sequence
  Description of Artificial Sequence: Synthetic oligonucleotide
  Sense strand starting at position 606 of SEQ ID NO: 318683
aaaugaaacccugguguaa

SEQ ID NO: 581346 - RNA, 19 nt, Artificial Sequence
  Description of Artificial Sequence: Synthetic oligonucleotide
  Antisense strand to SEQ ID NO: 581345
uuacaccaggguuucauuu

SEQ ID NO: 581347 - RNA, 19 nt, Artificial Sequence
  Description of Artificial Sequence: Synthetic oligonucleotide
  Sense strand starting at position 657 of SEQ ID NO: 318683
gcaaauaguuuacucuuga

SEQ ID NO: 581348 - RNA, 19 nt, Artificial Sequence
  Description of Artificial Sequence: Synthetic oligonucleotide
  Antisense strand to SEQ ID NO: 581347
ucaagaguaaacuauuugc

SEQ ID NO: 581349 - RNA, 19 nt, Artificial Sequence
  Description of Artificial Sequence: Synthetic oligonucleotide
  Sense strand starting at position 662 of SEQ ID NO: 318683
uaguuuacucuugauguga

SEQ ID NO: 581350 - RNA, 19 nt, Artificial Sequence
  Description of Artificial Sequence: Synthetic oligonucleotide
  Antisense strand to SEQ ID NO: 581349
ucacaucaagaguaaacua

SEQ ID NO: 581351 - RNA, 19 nt, Artificial Sequence
  Description of Artificial Sequence: Synthetic oligonucleotide
  Sense strand starting at position 861 of SEQ ID NO: 318683
gcaaguaacagcuauggca

SEQ ID NO: 581352 - RNA, 19 nt, Artificial Sequence
  Description of Artificial Sequence: Synthetic oligonucleotide
  Antisense strand to SEQ ID NO: 581351
ugccauagcuguuacuugc

SEQ ID NO: 581353 - RNA, 19 nt, Artificial Sequence
  Description of Artificial Sequence: Synthetic oligonucleotide
  Sense strand starting at position 1151 of SEQ ID NO: 318683
ccaccacuuucgguaaaca

SEQ ID NO: 581354 - RNA, 19 nt, Artificial Sequence
  Description of Artificial Sequence: Synthetic oligonucleotide
  Antisense strand to SEQ ID NO: 581353
uguuuaccgaaaguggugg

SEQ ID NO: 581355 - RNA, 19 nt, Artificial Sequence
  Description of Artificial Sequence: Synthetic oligonucleotide
  Sense strand starting at position 1195 of SEQ ID NO: 318683
acaggaaggccauguguau

SEQ ID NO: 581356 - RNA, 19 nt, Artificial Sequence
  Description of Artificial Sequence: Synthetic oligonucleotide
  Antisense strand to SEQ ID NO: 581355
auacacauggccuuccugu

SEQ ID NO: 581357 - RNA, 19 nt, Artificial Sequence
  Description of Artificial Sequence: Synthetic oligonucleotide
  Sense strand starting at position 1201 of SEQ ID NO: 318683
aggccauguguauggaaau

SEQ ID NO: 581358 - RNA, 19 nt, Artificial Sequence
  Description of Artificial Sequence: Synthetic oligonucleotide
  Antisense strand to SEQ ID NO: 581357
auuuccauacacauggccu

SEQ ID NO: 581359 - RNA, 19 nt, Artificial Sequence
  Description of Artificial Sequence: Synthetic oligonucleotide
  Sense strand starting at position 1207 of SEQ ID NO: 318683
uguguauggaaaugaagau

SEQ ID NO: 581360 - RNA, 19 nt, Artificial Sequence
  Description of Artificial Sequence: Synthetic oligonucleotide
  Antisense strand to SEQ ID NO: 581359
aucuucauuuccauacaca

SEQ ID NO: 581361 - RNA, 19 nt, Artificial Sequence
  Description of Artificial Sequence: Synthetic oligonucleotide
  Sense strand starting at position 1344 of SEQ ID NO: 318683
ugagaugccucaucaugau

SEQ ID NO: 581362 - RNA, 19 nt, Artificial Sequence
  Description of Artificial Sequence: Synthetic oligonucleotide
  Antisense strand to SEQ ID NO: 581361
aucaugaugaggcaucuca

SEQ ID NO: 581363 - RNA, 19 nt, Artificial Sequence
  Description of Artificial Sequence: Synthetic oligonucleotide
  Sense strand starting at position 1450 of SEQ ID NO: 318683
uugacaaauccaugugcug

SEQ ID NO: 581364 - RNA, 19 nt, Artificial Sequence
  Description of Artificial Sequence: Synthetic oligonucleotide
  Antisense strand to SEQ ID NO: 581363
cagcacauggauuugucaa

SEQ ID NO: 581365 - RNA, 19 nt, Artificial Sequence
  Description of Artificial Sequence: Synthetic oligonucleotide
  Sense strand starting at position 1736 of SEQ ID NO: 318683
agcaacuccugucuuagaa

SEQ ID NO: 581366 - RNA, 19 nt, Artificial Sequence
  Description of Artificial Sequence: Synthetic oligonucleotide
  Antisense strand to SEQ ID NO: 581365
uucuaagacaggaguugcu

SEQ ID NO: 581367 - RNA, 19 nt, Artificial Sequence
  Description of Artificial Sequence: Synthetic oligonucleotide
  Sense strand starting at position 2064 of SEQ ID NO: 318683
uuaguaacggcauaacaaa

SEQ ID NO: 581368 - RNA, 19 nt, Artificial Sequence
  Description of Artificial Sequence: Synthetic oligonucleotide
  Antisense strand to SEQ ID NO: 581367
uuuguuaugccguuacuaa

SEQ ID NO: 581369 - RNA, 19 nt, Artificial Sequence
  Description of Artificial Sequence: Synthetic oligonucleotide
  Sense strand starting at position 2157 of SEQ ID NO: 318683
ggaucaucucauuagcucu

SEQ ID NO: 581370 - RNA, 19 nt, Artificial Sequence
  Description of Artificial Sequence: Synthetic oligonucleotide
  Antisense strand to SEQ ID NO: 581369
agagcuaaugagaugaucc

SEQ ID NO: 581371 - RNA, 19 nt, Artificial Sequence
  Description of Artificial Sequence: Synthetic oligonucleotide
  Sense strand starting at position 2314 of SEQ ID NO: 318683
uucuuuguacugggagcaa

SEQ ID NO: 581372 - RNA, 19 nt, Artificial Sequence
  Description of Artificial Sequence: Synthetic oligonucleotide
  Antisense strand to SEQ ID NO: 581371
uugcucccaguacaaagaa

SEQ ID NO: 581373 - RNA, 19 nt, Artificial Sequence
  Description of Artificial Sequence: Synthetic oligonucleotide
  Sense strand starting at position 2462 of SEQ ID NO: 318683
gguauuuauugaguagcuc

SEQ ID NO: 581374 - RNA, 19 nt, Artificial Sequence
  Description of Artificial Sequence: Synthetic oligonucleotide
  Antisense strand to SEQ ID NO: 581373
gagcuacucaauaaauacc

SEQ ID NO: 581375 - RNA, 19 nt, Artificial Sequence
  Description of Artificial Sequence: Synthetic oligonucleotide
  Sense strand starting at position 2508 of SEQ ID NO: 318683
cuaauuuauggcugugguu

SEQ ID NO: 581376 - RNA, 19 nt, Artificial Sequence
  Description of Artificial Sequence: Synthetic oligonucleotide
  Antisense strand to SEQ ID NO: 581375
aaccacagccauaaauuag

SEQ ID NO: 581377 - RNA, 19 nt, Artificial Sequence
  Description of Artificial Sequence: Synthetic oligonucleotide
  Sense strand starting at position 2510 of SEQ ID NO: 318683
aauuuauggcugugguuac

SEQ ID NO: 581378 - RNA, 19 nt, Artificial Sequence
  Description of Artificial Sequence: Synthetic oligonucleotide
  Antisense strand to SEQ ID NO: 581377
guaaccacagccauaaauu

SEQ ID NO: 581379 - RNA, 19 nt, Artificial Sequence
  Description of Artificial Sequence: Synthetic oligonucleotide
  Sense strand starting at position 2534 of SEQ ID NO: 318683
gggugguuaggaugauguu

SEQ ID NO: 581380 - RNA, 19 nt, Artificial Sequence
  Description of Artificial Sequence: Synthetic oligonucleotide
  Antisense strand to SEQ ID NO: 581379
aacaucauccuaaccaccc

SEQ ID NO: 581381 - RNA, 19 nt, Artificial Sequence
  Description of Artificial Sequence: Synthetic oligonucleotide
  Sense strand starting at position 2535 of SEQ ID NO: 318683
ggugguuaggaugauguuu

SEQ ID NO: 581382 - RNA, 19 nt, Artificial Sequence
  Description of Artificial Sequence: Synthetic oligonucleotide
  Antisense strand to SEQ ID NO: 581381
aaacaucauccuaaccacc

SEQ ID NO: 581383 - RNA, 19 nt, Artificial Sequence
  Description of Artificial Sequence: Synthetic oligonucleotide
  Sense strand starting at position 2558 of SEQ ID NO: 318683
gguuaugcuuggguacaag

SEQ ID NO: 581384 - RNA, 19 nt, Artificial Sequence
  Description of Artificial Sequence: Synthetic oligonucleotide
  Antisense strand to SEQ ID NO: 581383
cuuguacccaagcauaacc

SEQ ID NO: 581385 - RNA, 19 nt, Artificial Sequence
  Description of Artificial Sequence: Synthetic oligonucleotide
  Sense strand starting at position 2619 of SEQ ID NO: 318683
cuuuaaaucuuguuggaua

SEQ ID NO: 581386 - RNA, 19 nt, Artificial Sequence
  Description of Artificial Sequence: Synthetic oligonucleotide
  Antisense strand to SEQ ID NO: 581385
uauccaacaagauuuaaag

SEQ ID NO: 581387 - RNA, 19 nt, Artificial Sequence
  Description of Artificial Sequence: Synthetic oligonucleotide
  Sense strand starting at position 2621 of SEQ ID NO: 318683
uuaaaucuuguuggauaca

SEQ ID NO: 581388 - RNA, 19 nt, Artificial Sequence
  Description of Artificial Sequence: Synthetic oligonucleotide
  Antisense strand to SEQ ID NO: 581387
uguauccaacaagauuuaa

SEQ ID NO: 581389 - RNA, 19 nt, Artificial Sequence
  Description of Artificial Sequence: Synthetic oligonucleotide
  Sense strand starting at position 2641 of SEQ ID NO: 318683
ucaguauuccgaugauaug

SEQ ID NO: 581390 - RNA, 19 nt, Artificial Sequence
  Description of Artificial Sequence: Synthetic oligonucleotide
  Antisense strand to SEQ ID NO: 581389
cauaucaucggaauacuga

SEQ ID NO: 581391 - RNA, 19 nt, Artificial Sequence
  Description of Artificial Sequence: Synthetic oligonucleotide
  Sense strand starting at position 2642 of SEQ ID NO: 318683
caguauuccgaugauauga

SEQ ID NO: 581392 - RNA, 19 nt, Artificial Sequence
  Description of Artificial Sequence: Synthetic oligonucleotide
  Antisense strand to SEQ ID NO: 581391
ucauaucaucggaauacug

SEQ ID NO: 581393 - RNA, 19 nt, Artificial Sequence
  Description of Artificial Sequence: Synthetic oligonucleotide
  Sense strand starting at position 2652 of SEQ ID NO: 318683
augauaugaucacuuagcu

SEQ ID NO: 581394 - RNA, 19 nt, Artificial Sequence
  Description of Artificial Sequence: Synthetic oligonucleotide
  Antisense strand to SEQ ID NO: 581393
agcuaagugaucauaucau

SEQ ID NO: 581395 - RNA, 19 nt, Artificial Sequence
  Description of Artificial Sequence: Synthetic oligonucleotide
  Sense strand starting at position 2707 of SEQ ID NO: 318683
uuaaccaauugauuaguga

SEQ ID NO: 581396 - RNA, 19 nt, Artificial Sequence
  Description of Artificial Sequence: Synthetic oligonucleotide
  Antisense strand to SEQ ID NO: 581395
ucacuaaucaauugguuaa

SEQ ID NO: 581397 - RNA, 19 nt, Artificial Sequence
  Description of Artificial Sequence: Synthetic oligonucleotide
  Sense strand starting at position 2766 of SEQ ID NO: 318683
uuagucauaaguuagguua

SEQ ID NO: 581398 - RNA, 19 nt, Artificial Sequence
  Description of Artificial Sequence: Synthetic oligonucleotide
  Antisense strand to SEQ ID NO: 581397
uaaccuaacuuaugacuaa

SEQ ID NO: 581399 - RNA, 19 nt, Artificial Sequence
  Description of Artificial Sequence: Synthetic oligonucleotide
  Sense strand starting at position 2774 of SEQ ID NO: 318683
aaguuagguuauguucuua

SEQ ID NO: 581400 - RNA, 19 nt, Artificial Sequence
  Description of Artificial Sequence: Synthetic oligonucleotide
  Antisense strand to SEQ ID NO: 581399
uaagaacauaaccuaacuu

SEQ ID NO: 581401 - RNA, 19 nt, Artificial Sequence
  Description of Artificial Sequence: Synthetic oligonucleotide
  Sense strand starting at position 2778 of SEQ ID NO: 318683
uagguuauguucuuagauu

SEQ ID NO: 581402 - RNA, 19 nt, Artificial Sequence
  Description of Artificial Sequence: Synthetic oligonucleotide
  Antisense strand to SEQ ID NO: 581401
aaucuaagaacauaaccua

SEQ ID NO: 581403 - RNA, 19 nt, Artificial Sequence
  Description of Artificial Sequence: Synthetic oligonucleotide
  Sense strand starting at position 2963 of SEQ ID NO: 318683
uuggguguaguuuauuaau

SEQ ID NO: 581404 - RNA, 19 nt, Artificial Sequence
  Description of Artificial Sequence: Synthetic oligonucleotide
  Antisense strand to SEQ ID NO: 581403
auuaauaaacuacacccaa

SEQ ID NO: 581405 - RNA, 19 nt, Artificial Sequence
  Description of Artificial Sequence: Synthetic oligonucleotide
  Sense strand starting at position 3013 of SEQ ID NO: 318683
uuaucugugguacaaagau

SEQ ID NO: 581406 - RNA, 19 nt, Artificial Sequence
  Description of Artificial Sequence: Synthetic oligonucleotide
  Antisense strand to SEQ ID NO: 581405
aucuuuguaccacagauaa

SEQ ID NO: 581407 - RNA, 19 nt, Artificial Sequence
  Description of Artificial Sequence: Synthetic oligonucleotide
  Sense strand starting at position 3041 of SEQ ID NO: 318683
gugaucauaccaugggaau

SEQ ID NO: 581408 - RNA, 19 nt, Artificial Sequence
  Description of Artificial Sequence: Synthetic oligonucleotide
  Antisense strand to SEQ ID NO: 581407
auucccaugguaugaucac

SEQ ID NO: 581409 - RNA, 19 nt, Artificial Sequence
  Description of Artificial Sequence: Synthetic oligonucleotide
  Sense strand starting at position 3165 of SEQ ID NO: 318683
ggcuuugucaccuagacug

SEQ ID NO: 581410 - RNA, 19 nt, Artificial Sequence
  Description of Artificial Sequence: Synthetic oligonucleotide
  Antisense strand to SEQ ID NO: 581409
cagucuaggugacaaagcc

SEQ ID NO: 581411 - RNA, 19 nt, Artificial Sequence
  Description of Artificial Sequence: Synthetic oligonucleotide
  Sense strand starting at position 3491 of SEQ ID NO: 318683
cccaaugcuugcuuagaua

SEQ ID NO: 581412 - RNA, 19 nt, Artificial Sequence
  Description of Artificial Sequence: Synthetic oligonucleotide
  Antisense strand to SEQ ID NO: 581411
uaucuaagcaagcauuggg

SEQ ID NO: 581413 - RNA, 19 nt, Artificial Sequence
  Description of Artificial Sequence: Synthetic oligonucleotide
  Sense strand starting at position 3637 of SEQ ID NO: 318683
ucccaaguaccuggaauau

SEQ ID NO: 581414 - RNA, 19 nt, Artificial Sequence
  Description of Artificial Sequence: Synthetic oligonucleotide
  Antisense strand to SEQ ID NO: 581413
auauuccagguacuuggga

SEQ ID NO: 581415 - RNA, 19 nt, Artificial Sequence
  Description of Artificial Sequence: Synthetic oligonucleotide
  Sense strand starting at position 3693 of SEQ ID NO: 318683
guauguucaguagagaugu

SEQ ID NO: 581416 - RNA, 19 nt, Artificial Sequence
  Description of Artificial Sequence: Synthetic oligonucleotide
  Antisense strand to SEQ ID NO: 581415
acaucucuacugaacauac

SEQ ID NO: 581417 - RNA, 19 nt, Artificial Sequence
  Description of Artificial Sequence: Synthetic oligonucleotide
  Sense strand starting at position 3824 of SEQ ID NO: 318683
ccuguuguucuuuguauuu

SEQ ID NO: 581418 - RNA, 19 nt, Artificial Sequence
  Description of Artificial Sequence: Synthetic oligonucleotide
  Antisense strand to SEQ ID NO: 581417
aaauacaaagaacaacagg

SEQ ID NO: 581419 - RNA, 19 nt, Artificial Sequence
  Description of Artificial Sequence: Synthetic oligonucleotide
  Sense strand starting at position 84 of SEQ ID NO: 318684
acuugaauagucuaaagca

SEQ ID NO: 581420 - RNA, 19 nt, Artificial Sequence
  Description of Artificial Sequence: Synthetic oligonucleotide
  Antisense strand to SEQ ID NO: 581419
ugcuuuagacuauucaagu

SEQ ID NO: 581421 - RNA, 19 nt, Artificial Sequence
  Description of Artificial Sequence: Synthetic oligonucleotide
  Sense strand starting at position 99 of SEQ ID NO: 318684
agcaacaagggauguauaa

SEQ ID NO: 581422 - RNA, 19 nt, Artificial Sequence
  Description of Artificial Sequence: Synthetic oligonucleotide
  Antisense strand to SEQ ID NO: 581421
uuauacaucccuuguugcu

SEQ ID NO: 581423 - RNA, 19 nt, Artificial Sequence
  Description of Artificial Sequence: Synthetic oligonucleotide
  Sense strand starting at position 201 of SEQ ID NO: 318684
ccacucauagugggucuua

SEQ ID NO: 581424 - RNA, 19 nt, Artificial Sequence
  Description of Artificial Sequence: Synthetic oligonucleotide
  Antisense strand to SEQ ID NO: 581423
uaagacccacuaugagugg

SEQ ID NO: 581425 - RNA, 19 nt, Artificial Sequence
  Description of Artificial Sequence: Synthetic oligonucleotide
  Sense strand starting at position 202 of SEQ ID NO: 318684
cacucauagugggucuuaa

SEQ ID NO: 581426 - RNA, 19 nt, Artificial Sequence
  Description of Artificial Sequence: Synthetic oligonucleotide
  Antisense strand to SEQ ID NO: 581425
uuaagacccacuaugagug

SEQ ID NO: 581427 - RNA, 19 nt, Artificial Sequence
  Description of Artificial Sequence: Synthetic oligonucleotide
  Sense strand starting at position 210 of SEQ ID NO: 318684
gugggucuuaaggacucaa

SEQ ID NO: 581428 - RNA, 19 nt, Artificial Sequence
  Description of Artificial Sequence: Synthetic oligonucleotide
  Antisense strand to SEQ ID NO: 581427
uugaguccuuaagacccac

SEQ ID NO: 581429 - RNA, 19 nt, Artificial Sequence
  Description of Artificial Sequence: Synthetic oligonucleotide
  Sense strand starting at position 289 of SEQ ID NO: 318684
ccucuugaagucugaggaa

SEQ ID NO: 581430 - RNA, 19 nt, Artificial Sequence
  Description of Artificial Sequence: Synthetic oligonucleotide
  Antisense strand to SEQ ID NO: 581429
uuccucagacuucaagagg

SEQ ID NO: 581431 - RNA, 19 nt, Artificial Sequence
  Description of Artificial Sequence: Synthetic oligonucleotide
  Sense strand starting at position 316 of SEQ ID NO: 318684
guguacuuccaagaaguua

SEQ ID NO: 581432 - RNA, 19 nt, Artificial Sequence
  Description of Artificial Sequence: Synthetic oligonucleotide
  Antisense strand to SEQ ID NO: 581431
uaacuucuuggaaguacac

SEQ ID NO: 581433 - RNA, 19 nt, Artificial Sequence
  Description of Artificial Sequence: Synthetic oligonucleotide
  Sense strand starting at position 400 of SEQ ID NO: 318684
cacaguuucuuagugauug

SEQ ID NO: 581434 - RNA, 19 nt, Artificial Sequence
  Description of Artificial Sequence: Synthetic oligonucleotide
  Antisense strand to SEQ ID NO: 581433
caaucacuaagaaacugug

SEQ ID NO: 581435 - RNA, 19 nt, Artificial Sequence
  Description of Artificial Sequence: Synthetic oligonucleotide
  Sense strand starting at position 881 of SEQ ID NO: 318684
cucuaagagcccugauucu

SEQ ID NO: 581436 - RNA, 19 nt, Artificial Sequence
  Description of Artificial Sequence: Synthetic oligonucleotide
  Antisense strand to SEQ ID NO: 581435
agaaucagggcucuuagag

SEQ ID NO: 581437 - RNA, 19 nt, Artificial Sequence
  Description of Artificial Sequence: Synthetic oligonucleotide
  Sense strand starting at position 890 of SEQ ID NO: 318684
cccugauucuccgugaucu

SEQ ID NO: 581438 - RNA, 19 nt, Artificial Sequence
  Description of Artificial Sequence: Synthetic oligonucleotide
  Antisense strand to SEQ ID NO: 581437
agaucacggagaaucaggg

SEQ ID NO: 581439 - RNA, 19 nt, Artificial Sequence
  Description of Artificial Sequence: Synthetic oligonucleotide
  Sense strand starting at position 891 of SEQ ID NO: 318684
ccugauucuccgugaucua

SEQ ID NO: 581440 - RNA, 19 nt, Artificial Sequence
  Description of Artificial Sequence: Synthetic oligonucleotide
  Antisense strand to SEQ ID NO: 581439
uagaucacggagaaucagg

SEQ ID NO: 581441 - RNA, 19 nt, Artificial Sequence
  Description of Artificial Sequence: Synthetic oligonucleotide
  Sense strand starting at position 892 of SEQ ID NO: 318684
cugauucuccgugaucuaa

SEQ ID NO: 581442 - RNA, 19 nt, Artificial Sequence
  Description of Artificial Sequence: Synthetic oligonucleotide
  Antisense strand to SEQ ID NO: 581441
uuagaucacggagaaucag

SEQ ID NO: 581443 - RNA, 19 nt, Artificial Sequence
  Description of Artificial Sequence: Synthetic oligonucleotide
  Sense strand starting at position 924 of SEQ ID NO: 318684
gcgcccacuacggauuaaa

SEQ ID NO: 581444 - RNA, 19 nt, Artificial Sequence
  Description of Artificial Sequence: Synthetic oligonucleotide
  Antisense strand to SEQ ID NO: 581443
uuuaauccguagugggcgc

SEQ ID NO: 581445 - RNA, 19 nt, Artificial Sequence
  Description of Artificial Sequence: Synthetic oligonucleotide
  Sense strand starting at position 968 of SEQ ID NO: 318684
ugggaucgagcucauauau

SEQ ID NO: 581446 - RNA, 19 nt, Artificial Sequence
  Description of Artificial Sequence: Synthetic oligonucleotide
  Antisense strand to SEQ ID NO: 581445
auauaugagcucgauccca

SEQ ID NO: 581447 - RNA, 19 nt, Artificial Sequence
  Description of Artificial Sequence: Synthetic oligonucleotide
  Sense strand starting at position 1151 of SEQ ID NO: 318684
ugggcaguucuccagguuu

SEQ ID NO: 581448 - RNA, 19 nt, Artificial Sequence
  Description of Artificial Sequence: Synthetic oligonucleotide
  Antisense strand to SEQ ID NO: 581447
aaaccuggagaacugccca

SEQ ID NO: 581449 - RNA, 19 nt, Artificial Sequence
  Description of Artificial Sequence: Synthetic oligonucleotide
  Sense strand starting at position 1192 of SEQ ID NO: 318684
uggcauugcagucaugaaa

SEQ ID NO: 581450 - RNA, 19 nt, Artificial Sequence
  Description of Artificial Sequence: Synthetic oligonucleotide
  Antisense strand to SEQ ID NO: 581449
uuucaugacugcaaugcca

SEQ ID NO: 581451 - RNA, 19 nt, Artificial Sequence
  Description of Artificial Sequence: Synthetic oligonucleotide
  Sense strand starting at position 1382 of SEQ ID NO: 318684
cccacugcgcucuagagaa

SEQ ID NO: 581452 - RNA, 19 nt, Artificial Sequence
  Description of Artificial Sequence: Synthetic oligonucleotide
  Antisense strand to SEQ ID NO: 581451
uucucuagagcgcaguggg

SEQ ID NO: 581453 - RNA, 19 nt, Artificial Sequence
  Description of Artificial Sequence: Synthetic oligonucleotide
  Sense strand starting at position 1619 of SEQ ID NO: 318684
ccuggauaacucugaucaa

SEQ ID NO: 581454 - RNA, 19 nt, Artificial Sequence
  Description of Artificial Sequence: Synthetic oligonucleotide
  Antisense strand to SEQ ID NO: 581453
uugaucagaguuauccagg

SEQ ID NO: 581455 - RNA, 19 nt, Artificial Sequence
  Description of Artificial Sequence: Synthetic oligonucleotide
  Sense strand starting at position 1622 of SEQ ID NO: 318684
ggauaacucugaucaaucg

SEQ ID NO: 581456 - RNA, 19 nt, Artificial Sequence
  Description of Artificial Sequence: Synthetic oligonucleotide
  Antisense strand to SEQ ID NO: 581455
cgauugaucagaguuaucc

SEQ ID NO: 581457 - RNA, 19 nt, Artificial Sequence
  Description of Artificial Sequence: Synthetic oligonucleotide
  Sense strand starting at position 1706 of SEQ ID NO: 318684
gcacucacccaguguagau

SEQ ID NO: 581458 - RNA, 19 nt, Artificial Sequence
  Description of Artificial Sequence: Synthetic oligonucleotide
  Antisense strand to SEQ ID NO: 581457
aucuacacugggugagugc

SEQ ID NO: 581459 - RNA, 19 nt, Artificial Sequence
  Description of Artificial Sequence: Synthetic oligonucleotide
  Sense strand starting at position 1992 of SEQ ID NO: 318684
gugcaugcuccaugggaua

SEQ ID NO: 581460 - RNA, 19 nt, Artificial Sequence
  Description of Artificial Sequence: Synthetic oligonucleotide
  Antisense strand to SEQ ID NO: 581459
uaucccauggagcaugcac

SEQ ID NO: 581461 - RNA, 19 nt, Artificial Sequence
  Description of Artificial Sequence: Synthetic oligonucleotide
  Sense strand starting at position 1994 of SEQ ID NO: 318684
gcaugcuccaugggauaau

SEQ ID NO: 581462 - RNA, 19 nt, Artificial Sequence
  Description of Artificial Sequence: Synthetic oligonucleotide
  Antisense strand to SEQ ID NO: 581461
auuaucccauggagcaugc

SEQ ID NO: 581463 - RNA, 19 nt, Artificial Sequence
  Description of Artificial Sequence: Synthetic oligonucleotide
  Sense strand starting at position 2003 of SEQ ID NO: 318684
augggauaaucugcccuca

SEQ ID NO: 581464 - RNA, 19 nt, Artificial Sequence
  Description of Artificial Sequence: Synthetic oligonucleotide
  Antisense strand to SEQ ID NO: 581463
ugagggcagauuaucccau

SEQ ID NO: 581465 - RNA, 19 nt, Artificial Sequence
  Description of Artificial Sequence: Synthetic oligonucleotide
  Sense strand starting at position 2056 of SEQ ID NO: 318684
uugguaaccugaucuguaa

SEQ ID NO: 581466 - RNA, 19 nt, Artificial Sequence
  Description of Artificial Sequence: Synthetic oligonucleotide
  Antisense strand to SEQ ID NO: 581465
uuacagaucagguuaccaa

SEQ ID NO: 581467 - RNA, 19 nt, Artificial Sequence
  Description of Artificial Sequence: Synthetic oligonucleotide
  Sense strand starting at position 2076 of SEQ ID NO: 318684
cuuucucugccugcguaau

SEQ ID NO: 581468 - RNA, 19 nt, Artificial Sequence
  Description of Artificial Sequence: Synthetic oligonucleotide
  Antisense strand to SEQ ID NO: 581467
auuacgcaggcagagaaag

SEQ ID NO: 581469 - RNA, 19 nt, Artificial Sequence
  Description of Artificial Sequence: Synthetic oligonucleotide
  Sense strand starting at position 2150 of SEQ ID NO: 318684
aguaaaucacguuaaugaa

SEQ ID NO: 581470 - RNA, 19 nt, Artificial Sequence
  Description of Artificial Sequence: Synthetic oligonucleotide
  Antisense strand to SEQ ID NO: 581469
uucauuaacgugauuuacu

SEQ ID NO: 581471 - RNA, 19 nt, Artificial Sequence
  Description of Artificial Sequence: Synthetic oligonucleotide
  Sense strand starting at position 2326 of SEQ ID NO: 318684
ucaagaugucccugagagg

SEQ ID NO: 581472 - RNA, 19 nt, Artificial Sequence
  Description of Artificial Sequence: Synthetic oligonucleotide
  Antisense strand to SEQ ID NO: 581471
ccucucagggacaucuuga

SEQ ID NO: 581473 - RNA, 19 nt, Artificial Sequence
  Description of Artificial Sequence: Synthetic oligonucleotide
  Sense strand starting at position 2445 of SEQ ID NO: 318684
gggucuguaccuggagacu

SEQ ID NO: 581474 - RNA, 19 nt, Artificial Sequence
  Description of Artificial Sequence: Synthetic oligonucleotide
  Antisense strand to SEQ ID NO: 581473
agucuccagguacagaccc

SEQ ID NO: 581475 - RNA, 19 nt, Artificial Sequence
  Description of Artificial Sequence: Synthetic oligonucleotide
  Sense strand starting at position 2451 of SEQ ID NO: 318684
guaccuggagacugaaauu

SEQ ID NO: 581476 - RNA, 19 nt, Artificial Sequence
  Description of Artificial Sequence: Synthetic oligonucleotide
  Antisense strand to SEQ ID NO: 581475
aauuucagucuccagguac

SEQ ID NO: 581477 - RNA, 19 nt, Artificial Sequence
  Description of Artificial Sequence: Synthetic oligonucleotide
  Sense strand starting at position 2483 of SEQ ID NO: 318684
uaugauucugaauguguau

SEQ ID NO: 581478 - RNA, 19 nt, Artificial Sequence
  Description of Artificial Sequence: Synthetic oligonucleotide
  Antisense strand to SEQ ID NO: 581477
auacacauucagaaucaua

SEQ ID NO: 581479 - RNA, 19 nt, Artificial Sequence
  Description of Artificial Sequence: Synthetic oligonucleotide
  Sense strand starting at position 2486 of SEQ ID NO: 318684
gauucugaauguguaucau

SEQ ID NO: 581480 - RNA, 19 nt, Artificial Sequence
  Description of Artificial Sequence: Synthetic oligonucleotide
  Antisense strand to SEQ ID NO: 581479
augauacacauucagaauc

SEQ ID NO: 581481 - RNA, 19 nt, Artificial Sequence
  Description of Artificial Sequence: Synthetic oligonucleotide
  Sense strand starting at position 2549 of SEQ ID NO: 318684
cugagaauagcuuguaauu

SEQ ID NO: 581482 - RNA, 19 nt, Artificial Sequence
  Description of Artificial Sequence: Synthetic oligonucleotide
  Antisense strand to SEQ ID NO: 581481
aauuacaagcuauucucag

SEQ ID NO: 581483 - RNA, 19 nt, Artificial Sequence
  Description of Artificial Sequence: Synthetic oligonucleotide
  Sense strand starting at position 2713 of SEQ ID NO: 318684
auaucuaccggcuguaaua

SEQ ID NO: 581484 - RNA, 19 nt, Artificial Sequence
  Description of Artificial Sequence: Synthetic oligonucleotide
  Antisense strand to SEQ ID NO: 581483
uauuacagccgguagauau

SEQ ID NO: 581485 - RNA, 19 nt, Artificial Sequence
  Description of Artificial Sequence: Synthetic oligonucleotide
  Sense strand starting at position 2726 of SEQ ID NO: 318684
guaauaggcccuugaauuc

SEQ ID NO: 581486 - RNA, 19 nt, Artificial Sequence
  Description of Artificial Sequence: Synthetic oligonucleotide
  Antisense strand to SEQ ID NO: 581485
gaauucaagggccuauuac

SEQ ID NO: 581487 - RNA, 19 nt, Artificial Sequence
  Description of Artificial Sequence: Synthetic oligonucleotide
  Sense strand starting at position 2737 of SEQ ID NO: 318684
uugaauucugcuuguacua

SEQ ID NO: 581488 - RNA, 19 nt, Artificial Sequence
  Description of Artificial Sequence: Synthetic oligonucleotide
  Antisense strand to SEQ ID NO: 581487
uaguacaagcagaauucaa

SEQ ID NO: 581489 - RNA, 19 nt, Artificial Sequence
  Description of Artificial Sequence: Synthetic oligonucleotide
  Sense strand starting at position 2848 of SEQ ID NO: 318684
agacauguucauuguggag

SEQ ID NO: 581490 - RNA, 19 nt, Artificial Sequence
  Description of Artificial Sequence: Synthetic oligonucleotide
  Antisense strand to SEQ ID NO: 581489
cuccacaaugaacaugucu

SEQ ID NO: 581491 - RNA, 19 nt, Artificial Sequence
  Description of Artificial Sequence: Synthetic oligonucleotide
  Sense strand starting at position 3133 of SEQ ID NO: 318684
accagauauguuugcugga

SEQ ID NO: 581492 - RNA, 19 nt, Artificial Sequence
  Description of Artificial Sequence: Synthetic oligonucleotide
  Antisense strand to SEQ ID NO: 581491
uccagcaaacauaucuggu

SEQ ID NO: 581493 - RNA, 19 nt, Artificial Sequence
  Description of Artificial Sequence: Synthetic oligonucleotide
  Sense strand starting at position 3135 of SEQ ID NO: 318684
cagauauguuugcuggaca

SEQ ID NO: 581494 - RNA, 19 nt, Artificial Sequence
  Description of Artificial Sequence: Synthetic oligonucleotide
  Antisense strand to SEQ ID NO: 581493
uguccagcaaacauaucug

SEQ ID NO: 581495 - RNA, 19 nt, Artificial Sequence
  Description of Artificial Sequence: Synthetic oligonucleotide
  Sense strand starting at position 3138 of SEQ ID NO: 318684
auauguuugcuggacagac

SEQ ID NO: 581496 - RNA, 19 nt, Artificial Sequence
  Description of Artificial Sequence: Synthetic oligonucleotide
  Antisense strand to SEQ ID NO: 581495
gucuguccagcaaacauau

SEQ ID NO: 581497 - RNA, 19 nt, Artificial Sequence
  Description of Artificial Sequence: Synthetic oligonucleotide
  Sense strand starting at position 3249 of SEQ ID NO: 318684
agguauuagaaguguuaac

SEQ ID NO: 581498 - RNA, 19 nt, Artificial Sequence
  Description of Artificial Sequence: Synthetic oligonucleotide
  Antisense strand to SEQ ID NO: 581497
guuaacacuucuaauaccu

SEQ ID NO: 581499 - RNA, 19 nt, Artificial Sequence
  Description of Artificial Sequence: Synthetic oligonucleotide
  Sense strand starting at position 152 of SEQ ID NO: 318685
agagaagcuugauccucaa

SEQ ID NO: 581500 - RNA, 19 nt, Artificial Sequence
  Description of Artificial Sequence: Synthetic oligonucleotide
  Antisense strand to SEQ ID NO: 581499
uugaggaucaagcuucucu

SEQ ID NO: 581501 - RNA, 19 nt, Artificial Sequence
  Description of Artificial Sequence: Synthetic oligonucleotide
  Sense strand starting at position 261 of SEQ ID NO: 318685
aaaggaagaucagaagaga

SEQ ID NO: 581502 - RNA, 19 nt, Artificial Sequence
  Description of Artificial Sequence: Synthetic oligonucleotide
  Antisense strand to SEQ ID NO: 581501
ucucuucugaucuuccuuu

SEQ ID NO: 581503 - RNA, 19 nt, Artificial Sequence
  Description of Artificial Sequence: Synthetic oligonucleotide
  Sense strand starting at position 328 of SEQ ID NO: 318685
ggaguagagaaguaguguu

SEQ ID NO: 581504 - RNA, 19 nt, Artificial Sequence
  Description of Artificial Sequence: Synthetic oligonucleotide
  Antisense strand to SEQ ID NO: 581503
aacacuacuucucuacucc

SEQ ID NO: 581505 - RNA, 19 nt, Artificial Sequence
  Description of Artificial Sequence: Synthetic oligonucleotide
  Sense strand starting at position 354 of SEQ ID NO: 318685
cugaaugacucaguuuacu

SEQ ID NO: 581506 - RNA, 19 nt, Artificial Sequence
  Description of Artificial Sequence: Synthetic oligonucleotide
  Antisense strand to SEQ ID NO: 581505
aguaaacugagucauucag

SEQ ID NO: 581507 - RNA, 19 nt, Artificial Sequence
  Description of Artificial Sequence: Synthetic oligonucleotide
  Sense strand starting at position 583 of SEQ ID NO: 318685
cuucuuggagccugaggaa

SEQ ID NO: 581508 - RNA, 19 nt, Artificial Sequence
  Description of Artificial Sequence: Synthetic oligonucleotide
  Antisense strand to SEQ ID NO: 581507
uuccucaggcuccaagaag

SEQ ID NO: 581509 - RNA, 19 nt, Artificial Sequence
  Description of Artificial Sequence: Synthetic oligonucleotide
  Sense strand starting at position 738 of SEQ ID NO: 318685
agggcuucagaguggaagu

SEQ ID NO: 581510 - RNA, 19 nt, Artificial Sequence
  Description of Artificial Sequence: Synthetic oligonucleotide
  Antisense strand to SEQ ID NO: 581509
acuuccacucugaagcccu

SEQ ID NO: 581511 - RNA, 19 nt, Artificial Sequence
  Description of Artificial Sequence: Synthetic oligonucleotide
  Sense strand starting at position 794 of SEQ ID NO: 318685
uuaauuccucaugggacau

SEQ ID NO: 581512 - RNA, 19 nt, Artificial Sequence
  Description of Artificial Sequence: Synthetic oligonucleotide
  Antisense strand to SEQ ID NO: 581511
augucccaugaggaauuaa

SEQ ID NO: 581513 - RNA, 19 nt, Artificial Sequence
  Description of Artificial Sequence: Synthetic oligonucleotide
  Sense strand starting at position 865 of SEQ ID NO: 318685
uugcccucucaggaaauga

SEQ ID NO: 581514 - RNA, 19 nt, Artificial Sequence
  Description of Artificial Sequence: Synthetic oligonucleotide
  Antisense strand to SEQ ID NO: 581513
ucauuuccugagagggcaa

SEQ ID NO: 581515 - RNA, 19 nt, Artificial Sequence
  Description of Artificial Sequence: Synthetic oligonucleotide
  Sense strand starting at position 967 of SEQ ID NO: 318685
aacccacuauggguugaaa

SEQ ID NO: 581516 - RNA, 19 nt, Artificial Sequence
  Description of Artificial Sequence: Synthetic oligonucleotide
  Antisense strand to SEQ ID NO: 581515
uuucaacccauaguggguu

SEQ ID NO: 581517 - RNA, 19 nt, Artificial Sequence
  Description of Artificial Sequence: Synthetic oligonucleotide
  Sense strand starting at position 969 of SEQ ID NO: 318685
cccacuauggguugaaaua

SEQ ID NO: 581518 - RNA, 19 nt, Artificial Sequence
  Description of Artificial Sequence: Synthetic oligonucleotide
  Antisense strand to SEQ ID NO: 581517
uauuucaacccauaguggg

SEQ ID NO: 581519 - RNA, 19 nt, Artificial Sequence
  Description of Artificial Sequence: Synthetic oligonucleotide
  Sense strand starting at position 999 of SEQ ID NO: 318685
aagcucgauccugagauga

SEQ ID NO: 581520 - RNA, 19 nt, Artificial Sequence
  Description of Artificial Sequence: Synthetic oligonucleotide
  Antisense strand to SEQ ID NO: 581519
ucaucucaggaucgagcuu

SEQ ID NO: 581521 - RNA, 19 nt, Artificial Sequence
  Description of Artificial Sequence: Synthetic oligonucleotide
  Sense strand starting at position 1009 of SEQ ID NO: 318685
cugagaugaucccuuuaug

SEQ ID NO: 581522 - RNA, 19 nt, Artificial Sequence
  Description of Artificial Sequence: Synthetic oligonucleotide
  Antisense strand to SEQ ID NO: 581521
cauaaagggaucaucucag

SEQ ID NO: 581523 - RNA, 19 nt, Artificial Sequence
  Description of Artificial Sequence: Synthetic oligonucleotide
  Sense strand starting at position 1012 of SEQ ID NO: 318685
agaugaucccuuuauguuc

SEQ ID NO: 581524 - RNA, 19 nt, Artificial Sequence
  Description of Artificial Sequence: Synthetic oligonucleotide
  Antisense strand to SEQ ID NO: 581523
gaacauaaagggaucaucu

SEQ ID NO: 581525 - RNA, 19 nt, Artificial Sequence
  Description of Artificial Sequence: Synthetic oligonucleotide
  Sense strand starting at position 1247 of SEQ ID NO: 318685
uggcauugcagccaugaaa

SEQ ID NO: 581526 - RNA, 19 nt, Artificial Sequence
  Description of Artificial Sequence: Synthetic oligonucleotide
  Antisense strand to SEQ ID NO: 581525
uuucauggcugcaaugcca

SEQ ID NO: 581527 - RNA, 19 nt, Artificial Sequence
  Description of Artificial Sequence: Synthetic oligonucleotide
  Sense strand starting at position 1371 of SEQ ID NO: 318685
cuguuucuacuggaagcua

SEQ ID NO: 581528 - RNA, 19 nt, Artificial Sequence
  Description of Artificial Sequence: Synthetic oligonucleotide
  Antisense strand to SEQ ID NO: 581527
uagcuuccaguagaaacag

SEQ ID NO: 581529 - RNA, 19 nt, Artificial Sequence
  Description of Artificial Sequence: Synthetic oligonucleotide
  Sense strand starting at position 1484 of SEQ ID NO: 318685
ugggaugagucucaaauuu

SEQ ID NO: 581530 - RNA, 19 nt, Artificial Sequence
  Description of Artificial Sequence: Synthetic oligonucleotide
  Antisense strand to SEQ ID NO: 581529
aaauuugagacucauccca

SEQ ID NO: 581531 - RNA, 19 nt, Artificial Sequence
  Description of Artificial Sequence: Synthetic oligonucleotide
  Sense strand starting at position 1680 of SEQ ID NO: 318685
cguggaugacucugaucaa

SEQ ID NO: 581532 - RNA, 19 nt, Artificial Sequence
  Description of Artificial Sequence: Synthetic oligonucleotide
  Antisense strand to SEQ ID NO: 581531
uugaucagagucauccacg

SEQ ID NO: 581533 - RNA, 19 nt, Artificial Sequence
  Description of Artificial Sequence: Synthetic oligonucleotide
  Sense strand starting at position 2045 of SEQ ID NO: 318685
ugcuccauuggauaaucua

SEQ ID NO: 581534 - RNA, 19 nt, Artificial Sequence
  Description of Artificial Sequence: Synthetic oligonucleotide
  Antisense strand to SEQ ID NO: 581533
uagauuauccaauggagca

SEQ ID NO: 581535 - RNA, 19 nt, Artificial Sequence
  Description of Artificial Sequence: Synthetic oligonucleotide
  Sense strand starting at position 2161 of SEQ ID NO: 318685
aaauccuuacugugaguga

SEQ ID NO: 581536 - RNA, 19 nt, Artificial Sequence
  Description of Artificial Sequence: Synthetic oligonucleotide
  Antisense strand to SEQ ID NO: 581535
ucacucacaguaaggauuu

SEQ ID NO: 581537 - RNA, 19 nt, Artificial Sequence
  Description of Artificial Sequence: Synthetic oligonucleotide
  Sense strand starting at position 2165 of SEQ ID NO: 318685
ccuuacugugagugaggaa

SEQ ID NO: 581538 - RNA, 19 nt, Artificial Sequence
  Description of Artificial Sequence: Synthetic oligonucleotide
  Antisense strand to SEQ ID NO: 581537
uuccucacucacaguaagg

SEQ ID NO: 581539 - RNA, 19 nt, Artificial Sequence
  Description of Artificial Sequence: Synthetic oligonucleotide
  Sense strand starting at position 2166 of SEQ ID NO: 318685
cuuacugugagugaggaau

SEQ ID NO: 581540 - RNA, 19 nt, Artificial Sequence
  Description of Artificial Sequence: Synthetic oligonucleotide
  Antisense strand to SEQ ID NO: 581539
auuccucacucacaguaag

SEQ ID NO: 581541 - RNA, 19 nt, Artificial Sequence
  Description of Artificial Sequence: Synthetic oligonucleotide
  Sense strand starting at position 2197 of SEQ ID NO: 318685
aguaaaucgagcugaugaa

SEQ ID NO: 581542 - RNA, 19 nt, Artificial Sequence
  Description of Artificial Sequence: Synthetic oligonucleotide
  Antisense strand to SEQ ID NO: 581541
uucaucagcucgauuuacu

SEQ ID NO: 581543 - RNA, 19 nt, Artificial Sequence
  Description of Artificial Sequence: Synthetic oligonucleotide
  Sense strand starting at position 2198 of SEQ ID NO: 318685
guaaaucgagcugaugaaa

SEQ ID NO: 581544 - RNA, 19 nt, Artificial Sequence
  Description of Artificial Sequence: Synthetic oligonucleotide
  Antisense strand to SEQ ID NO: 581543
uuucaucagcucgauuuac

SEQ ID NO: 581545 - RNA, 19 nt, Artificial Sequence
  Description of Artificial Sequence: Synthetic oligonucleotide
  Sense strand starting at position 2318 of SEQ ID NO: 318685
cgcgaucuauuuccugaga

SEQ ID NO: 581546 - RNA, 19 nt, Artificial Sequence
  Description of Artificial Sequence: Synthetic oligonucleotide
  Antisense strand to SEQ ID NO: 581545
ucucaggaaauagaucgcg

SEQ ID NO: 581547 - RNA, 19 nt, Artificial Sequence
  Description of Artificial Sequence: Synthetic oligonucleotide
  Sense strand starting at position 2323 of SEQ ID NO: 318685
ucuauuuccugagagacuu

SEQ ID NO: 581548 - RNA, 19 nt, Artificial Sequence
  Description of Artificial Sequence: Synthetic oligonucleotide
  Antisense strand to SEQ ID NO: 581547
aagucucucaggaaauaga

SEQ ID NO: 581549 - RNA, 19 nt, Artificial Sequence
  Description of Artificial Sequence: Synthetic oligonucleotide
  Sense strand starting at position 2439 of SEQ ID NO: 318685
gucucuuuagaagguaaca

SEQ ID NO: 581550 - RNA, 19 nt, Artificial Sequence
  Description of Artificial Sequence: Synthetic oligonucleotide
  Antisense strand to SEQ ID NO: 581549
uguuaccuucuaaagagac

SEQ ID NO: 581551 - RNA, 19 nt, Artificial Sequence
  Description of Artificial Sequence: Synthetic oligonucleotide
  Sense strand starting at position 2495 of SEQ ID NO: 318685
caggucugucccuggagga

SEQ ID NO: 581552 - RNA, 19 nt, Artificial Sequence
  Description of Artificial Sequence: Synthetic oligonucleotide
  Antisense strand to SEQ ID NO: 581551
uccuccagggacagaccug

SEQ ID NO: 581553 - RNA, 19 nt, Artificial Sequence
  Description of Artificial Sequence: Synthetic oligonucleotide
  Sense strand starting at position 2542 of SEQ ID NO: 318685
cugaaugaguauccugaaa

SEQ ID NO: 581554 - RNA, 19 nt, Artificial Sequence
  Description of Artificial Sequence: Synthetic oligonucleotide
  Antisense strand to SEQ ID NO: 581553
uuucaggauacucauucag

SEQ ID NO: 581555 - RNA, 19 nt, Artificial Sequence
  Description of Artificial Sequence: Synthetic oligonucleotide
  Sense strand starting at position 2565 of SEQ ID NO: 318685
acuggugaaucuuuccaua

SEQ ID NO: 581556 - RNA, 19 nt, Artificial Sequence
  Description of Artificial Sequence: Synthetic oligonucleotide
  Antisense strand to SEQ ID NO: 581555
uauggaaagauucaccagu

SEQ ID NO: 581557 - RNA, 19 nt, Artificial Sequence
  Description of Artificial Sequence: Synthetic oligonucleotide
  Sense strand starting at position 2567 of SEQ ID NO: 318685
uggugaaucuuuccauaau

SEQ ID NO: 581558 - RNA, 19 nt, Artificial Sequence
  Description of Artificial Sequence: Synthetic oligonucleotide
  Antisense strand to SEQ ID NO: 581557
auuauggaaagauucacca

SEQ ID NO: 581559 - RNA, 19 nt, Artificial Sequence
  Description of Artificial Sequence: Synthetic oligonucleotide
  Sense strand starting at position 2744 of SEQ ID NO: 318685
agagaaauccuugguugca

SEQ ID NO: 581560 - RNA, 19 nt, Artificial Sequence
  Description of Artificial Sequence: Synthetic oligonucleotide
  Antisense strand to SEQ ID NO: 581559
ugcaaccaaggauuucucu

SEQ ID NO: 581561 - RNA, 19 nt, Artificial Sequence
  Description of Artificial Sequence: Synthetic oligonucleotide
  Sense strand starting at position 2745 of SEQ ID NO: 318685
gagaaauccuugguugcag

SEQ ID NO: 581562 - RNA, 19 nt, Artificial Sequence
  Description of Artificial Sequence: Synthetic oligonucleotide
  Antisense strand to SEQ ID NO: 581561
cugcaaccaaggauuucuc

SEQ ID NO: 581563 - RNA, 19 nt, Artificial Sequence
  Description of Artificial Sequence: Synthetic oligonucleotide
  Sense strand starting at position 2965 of SEQ ID NO: 318685
cgagguuuaccagacauca

SEQ ID NO: 581564 - RNA, 19 nt, Artificial Sequence
  Description of Artificial Sequence: Synthetic oligonucleotide
  Antisense strand to SEQ ID NO: 581563
ugaugucugguaaaccucg

SEQ ID NO: 581565 - RNA, 19 nt, Artificial Sequence
  Description of Artificial Sequence: Synthetic oligonucleotide
  Sense strand starting at position 3038 of SEQ ID NO: 318685
aggauuuguuaucaaacuc

SEQ ID NO: 581566 - RNA, 19 nt, Artificial Sequence
  Description of Artificial Sequence: Synthetic oligonucleotide
  Antisense strand to SEQ ID NO: 581565
gaguuugauaacaaauccu

SEQ ID NO: 581567 - RNA, 19 nt, Artificial Sequence
  Description of Artificial Sequence: Synthetic oligonucleotide
  Sense strand starting at position 3383 of SEQ ID NO: 318685
ccuggcugauagcuauuua

SEQ ID NO: 581568 - RNA, 19 nt, Artificial Sequence
  Description of Artificial Sequence: Synthetic oligonucleotide
  Antisense strand to SEQ ID NO: 581567
uaaauagcuaucagccagg

SEQ ID NO: 581569 - RNA, 19 nt, Artificial Sequence
  Description of Artificial Sequence: Synthetic oligonucleotide
  Sense strand starting at position 3474 of SEQ ID NO: 318685
uggcaaauguuacuaagaa

SEQ ID NO: 581570 - RNA, 19 nt, Artificial Sequence
  Description of Artificial Sequence: Synthetic oligonucleotide
  Antisense strand to SEQ ID NO: 581569
uucuuaguaacauuugcca

SEQ ID NO: 581571 - RNA, 19 nt, Artificial Sequence
  Description of Artificial Sequence: Synthetic oligonucleotide
  Sense strand starting at position 3551 of SEQ ID NO: 318685
gcaugauuccaauggacuc

SEQ ID NO: 581572 - RNA, 19 nt, Artificial Sequence
  Description of Artificial Sequence: Synthetic oligonucleotide
  Antisense strand to SEQ ID NO: 581571
gaguccauuggaaucaugc

SEQ ID NO: 581573 - RNA, 19 nt, Artificial Sequence
  Description of Artificial Sequence: Synthetic oligonucleotide
  Sense strand starting at position 3632 of SEQ ID NO: 318685
uguugcuuuggagaagagu

SEQ ID NO: 581574 - RNA, 19 nt, Artificial Sequence
  Description of Artificial Sequence: Synthetic oligonucleotide
  Antisense strand to SEQ ID NO: 581573
acucuucuccaaagcaaca

SEQ ID NO: 581575 - RNA, 19 nt, Artificial Sequence
  Description of Artificial Sequence: Synthetic oligonucleotide
  Sense strand starting at position 3643 of SEQ ID NO: 318685
agaagaguucuauguaauu

SEQ ID NO: 581576 - RNA, 19 nt, Artificial Sequence
  Description of Artificial Sequence: Synthetic oligonucleotide
  Antisense strand to SEQ ID NO: 581575
aauuacauagaacucuucu

SEQ ID NO: 581577 - RNA, 19 nt, Artificial Sequence
  Description of Artificial Sequence: Synthetic oligonucleotide
  Sense strand starting at position 3770 of SEQ ID NO: 318685
ggccauccuggccaauaua

SEQ ID NO: 581578 - RNA, 19 nt, Artificial Sequence
  Description of Artificial Sequence: Synthetic oligonucleotide
  Antisense strand to SEQ ID NO: 581577
uauauuggccaggauggcc

SEQ ID NO: 581579 - RNA, 19 nt, Artificial Sequence
  Description of Artificial Sequence: Synthetic oligonucleotide
  Sense strand starting at position 130 of SEQ ID NO: 318686
uuucuuuauuuggagacaa

SEQ ID NO: 581580 - RNA, 19 nt, Artificial Sequence
  Description of Artificial Sequence: Synthetic oligonucleotide
  Antisense strand to SEQ ID NO: 581579
uugucuccaaauaaagaaa

SEQ ID NO: 581581 - RNA, 19 nt, Artificial Sequence
  Description of Artificial Sequence: Synthetic oligonucleotide
  Sense strand starting at position 512 of SEQ ID NO: 318686
cuugauacuccuggacuca

SEQ ID NO: 581582 - RNA, 19 nt, Artificial Sequence
  Description of Artificial Sequence: Synthetic oligonucleotide
  Antisense strand to SEQ ID NO: 581581
ugaguccaggaguaucaag

SEQ ID NO: 581583 - RNA, 19 nt, Artificial Sequence
  Description of Artificial Sequence: Synthetic oligonucleotide
  Sense strand starting at position 601 of SEQ ID NO: 318686
gcgcucuaauaacuaaaua

SEQ ID NO: 581584 - RNA, 19 nt, Artificial Sequence
  Description of Artificial Sequence: Synthetic oligonucleotide
  Antisense strand to SEQ ID NO: 581583
uauuuaguuauuagagcgc

SEQ ID NO: 581585 - RNA, 19 nt, Artificial Sequence
  Description of Artificial Sequence: Synthetic oligonucleotide
  Sense strand starting at position 728 of SEQ ID NO: 318686
uuaggacaaguguguaaca

SEQ ID NO: 581586 - RNA, 19 nt, Artificial Sequence
  Description of Artificial Sequence: Synthetic oligonucleotide
  Antisense strand to SEQ ID NO: 581585
uguuacacacuuguccuaa

SEQ ID NO: 581587 - RNA, 19 nt, Artificial Sequence
  Description of Artificial Sequence: Synthetic oligonucleotide
  Sense strand starting at position 758 of SEQ ID NO: 318686
acacuuuaguaucuaguau

SEQ ID NO: 581588 - RNA, 19 nt, Artificial Sequence
  Description of Artificial Sequence: Synthetic oligonucleotide
  Antisense strand to SEQ ID NO: 581587
auacuagauacuaaagugu

SEQ ID NO: 581589 - RNA, 19 nt, Artificial Sequence
  Description of Artificial Sequence: Synthetic oligonucleotide
  Sense strand starting at position 810 of SEQ ID NO: 318686
cgauguuccacaugaggaa

SEQ ID NO: 581590 - RNA, 19 nt, Artificial Sequence
  Description of Artificial Sequence: Synthetic oligonucleotide
  Antisense strand to SEQ ID NO: 581589
uuccucauguggaacaucg

SEQ ID NO: 581591 - RNA, 19 nt, Artificial Sequence
  Description of Artificial Sequence: Synthetic oligonucleotide
  Sense strand starting at position 852 of SEQ ID NO: 318686
cugguaaagggcugagagu

SEQ ID NO: 581592 - RNA, 19 nt, Artificial Sequence
  Description of Artificial Sequence: Synthetic oligonucleotide
  Antisense strand to SEQ ID NO: 581591
acucucagcccuuuaccag

SEQ ID NO: 581593 - RNA, 19 nt, Artificial Sequence
  Description of Artificial Sequence: Synthetic oligonucleotide
  Sense strand starting at position 853 of SEQ ID NO: 318686
ugguaaagggcugagaguu

SEQ ID NO: 581594 - RNA, 19 nt, Artificial Sequence
  Description of Artificial Sequence: Synthetic oligonucleotide
  Antisense strand to SEQ ID NO: 581593
aacucucagcccuuuacca

SEQ ID NO: 581595 - RNA, 19 nt, Artificial Sequence
  Description of Artificial Sequence: Synthetic oligonucleotide
  Sense strand starting at position 865 of SEQ ID NO: 318686
gagaguugaagcugaaugu

SEQ ID NO: 581596 - RNA, 19 nt, Artificial Sequence
  Description of Artificial Sequence: Synthetic oligonucleotide
  Antisense strand to SEQ ID NO: 581595
acauucagcuucaacucuc

SEQ ID NO: 581597 - RNA, 19 nt, Artificial Sequence
  Description of Artificial Sequence: Synthetic oligonucleotide
  Sense strand starting at position 866 of SEQ ID NO: 318686
agaguugaagcugaaugua

SEQ ID NO: 581598 - RNA, 19 nt, Artificial Sequence
  Description of Artificial Sequence: Synthetic oligonucleotide
  Antisense strand to SEQ ID NO: 581597
uacauucagcuucaacucu

SEQ ID NO: 581599 - RNA, 19 nt, Artificial Sequence
  Description of Artificial Sequence: Synthetic oligonucleotide
  Sense strand starting at position 874 of SEQ ID NO: 318686
agcugaauguaucugauuc

SEQ ID NO: 581600 - RNA, 19 nt, Artificial Sequence
  Description of Artificial Sequence: Synthetic oligonucleotide
  Antisense strand to SEQ ID NO: 581599
gaaucagauacauucagcu

SEQ ID NO: 581601 - RNA, 19 nt, Artificial Sequence
  Description of Artificial Sequence: Synthetic oligonucleotide
  Sense strand starting at position 1000 of SEQ ID NO: 318686
cggugcgauguagugauua

SEQ ID NO: 581602 - RNA, 19 nt, Artificial Sequence
  Description of Artificial Sequence: Synthetic oligonucleotide
  Antisense strand to SEQ ID NO: 581601
uaaucacuacaucgcaccg

SEQ ID NO: 581603 - RNA, 19 nt, Artificial Sequence
  Description of Artificial Sequence: Synthetic oligonucleotide
  Sense strand starting at position 1002 of SEQ ID NO: 318686
gugcgauguagugauuaaa

SEQ ID NO: 581604 - RNA, 19 nt, Artificial Sequence
  Description of Artificial Sequence: Synthetic oligonucleotide
  Antisense strand to SEQ ID NO: 581603
uuuaaucacuacaucgcac

SEQ ID NO: 581605 - RNA, 19 nt, Artificial Sequence
  Description of Artificial Sequence: Synthetic oligonucleotide
  Sense strand starting at position 1005 of SEQ ID NO: 318686
cgauguagugauuaaauga

SEQ ID NO: 581606 - RNA, 19 nt, Artificial Sequence
  Description of Artificial Sequence: Synthetic oligonucleotide
  Antisense strand to SEQ ID NO: 581605
ucauuuaaucacuacaucg

SEQ ID NO: 581607 - RNA, 19 nt, Artificial Sequence
  Description of Artificial Sequence: Synthetic oligonucleotide
  Sense strand starting at position 1119 of SEQ ID NO: 318686
cggcuguggcgcucgagaa

SEQ ID NO: 581608 - RNA, 19 nt, Artificial Sequence
  Description of Artificial Sequence: Synthetic oligonucleotide
  Antisense strand to SEQ ID NO: 581607
uucucgagcgccacagccg

SEQ ID NO: 581609 - RNA, 19 nt, Artificial Sequence
  Description of Artificial Sequence: Synthetic oligonucleotide
  Sense strand starting at position 1192 of SEQ ID NO: 318686
cgucuaggacgauagggau

SEQ ID NO: 581610 - RNA, 19 nt, Artificial Sequence
  Description of Artificial Sequence: Synthetic oligonucleotide
  Antisense strand to SEQ ID NO: 581609
aucccuaucguccuagacg

SEQ ID NO: 581611 - RNA, 19 nt, Artificial Sequence
  Description of Artificial Sequence: Synthetic oligonucleotide
  Sense strand starting at position 2203 of SEQ ID NO: 318686
gaggacaauuccgugugau

SEQ ID NO: 581612 - RNA, 19 nt, Artificial Sequence
  Description of Artificial Sequence: Synthetic oligonucleotide
  Antisense strand to SEQ ID NO: 581611
aucacacggaauuguccuc

SEQ ID NO: 581613 - RNA, 19 nt, Artificial Sequence
  Description of Artificial Sequence: Synthetic oligonucleotide
  Sense strand starting at position 2204 of SEQ ID NO: 318686
aggacaauuccgugugaug

SEQ ID NO: 581614 - RNA, 19 nt, Artificial Sequence
  Description of Artificial Sequence: Synthetic oligonucleotide
  Antisense strand to SEQ ID NO: 581613
caucacacggaauuguccu

SEQ ID NO: 581615 - RNA, 19 nt, Artificial Sequence
  Description of Artificial Sequence: Synthetic oligonucleotide
  Sense strand starting at position 2206 of SEQ ID NO: 318686
gacaauuccgugugaugaa

SEQ ID NO: 581616 - RNA, 19 nt, Artificial Sequence
  Description of Artificial Sequence: Synthetic oligonucleotide
  Antisense strand to SEQ ID NO: 581615
uucaucacacggaauuguc

SEQ ID NO: 581617 - RNA, 19 nt, Artificial Sequence
  Description of Artificial Sequence: Synthetic oligonucleotide
  Sense strand starting at position 2687 of SEQ ID NO: 318686
auaagucucgcauaaauaa

SEQ ID NO: 581618 - RNA, 19 nt, Artificial Sequence
  Description of Artificial Sequence: Synthetic oligonucleotide
  Antisense strand to SEQ ID NO: 581617
uuauuuaugcgagacuuau

SEQ ID NO: 581619 - RNA, 19 nt, Artificial Sequence
  Description of Artificial Sequence: Synthetic oligonucleotide
  Sense strand starting at position 2714 of SEQ ID NO: 318686
augucccuacagugauaua

SEQ ID NO: 581620 - RNA, 19 nt, Artificial Sequence
  Description of Artificial Sequence: Synthetic oligonucleotide
  Antisense strand to SEQ ID NO: 581619
uauaucacuguagggacau

SEQ ID NO: 581621 - RNA, 19 nt, Artificial Sequence
  Description of Artificial Sequence: Synthetic oligonucleotide
  Sense strand starting at position 2752 of SEQ ID NO: 318686
ggaauccuauaugugucaa

SEQ ID NO: 581622 - RNA, 19 nt, Artificial Sequence
  Description of Artificial Sequence: Synthetic oligonucleotide
  Antisense strand to SEQ ID NO: 581621
uugacacauauaggauucc

SEQ ID NO: 581623 - RNA, 19 nt, Artificial Sequence
  Description of Artificial Sequence: Synthetic oligonucleotide
  Sense strand starting at position 2780 of SEQ ID NO: 318686
ggucacaacuacuuaaguu

SEQ ID NO: 581624 - RNA, 19 nt, Artificial Sequence
  Description of Artificial Sequence: Synthetic oligonucleotide
  Antisense strand to SEQ ID NO: 581623
aacuuaaguaguugugacc

SEQ ID NO: 581625 - RNA, 19 nt, Artificial Sequence
  Description of Artificial Sequence: Synthetic oligonucleotide
  Sense strand starting at position 2808 of SEQ ID NO: 318686
gcgacaugccaacaaauau

SEQ ID NO: 581626 - RNA, 19 nt, Artificial Sequence
  Description of Artificial Sequence: Synthetic oligonucleotide
  Antisense strand to SEQ ID NO: 581625
auauuuguuggcaugucgc

SEQ ID NO: 581627 - RNA, 19 nt, Artificial Sequence
  Description of Artificial Sequence: Synthetic oligonucleotide
  Sense strand starting at position 2823 of SEQ ID NO: 318686
auauguacacugugaaaug

SEQ ID NO: 581628 - RNA, 19 nt, Artificial Sequence
  Description of Artificial Sequence: Synthetic oligonucleotide
  Antisense strand to SEQ ID NO: 581627
cauuucacaguguacauau

SEQ ID NO: 581629 - RNA, 19 nt, Artificial Sequence
  Description of Artificial Sequence: Synthetic oligonucleotide
  Sense strand starting at position 2876 of SEQ ID NO: 318686
aguauauacuguuuacaga

SEQ ID NO: 581630 - RNA, 19 nt, Artificial Sequence
  Description of Artificial Sequence: Synthetic oligonucleotide
  Antisense strand to SEQ ID NO: 581629
ucuguaaacaguauauacu

SEQ ID NO: 581631 - RNA, 19 nt, Artificial Sequence
  Description of Artificial Sequence: Synthetic oligonucleotide
  Sense strand starting at position 2877 of SEQ ID NO: 318686
guauauacuguuuacagaa

SEQ ID NO: 581632 - RNA, 19 nt, Artificial Sequence
  Description of Artificial Sequence: Synthetic oligonucleotide
  Antisense strand to SEQ ID NO: 581631
uucuguaaacaguauauac

SEQ ID NO: 581633 - RNA, 19 nt, Artificial Sequence
  Description of Artificial Sequence: Synthetic oligonucleotide
  Sense strand starting at position 3003 of SEQ ID NO: 318686
ucagauagaucugucauga

SEQ ID NO: 581634 - RNA, 19 nt, Artificial Sequence
  Description of Artificial Sequence: Synthetic oligonucleotide
  Antisense strand to SEQ ID NO: 581633
ucaugacagaucuaucuga

SEQ ID NO: 581635 - RNA, 19 nt, Artificial Sequence
  Description of Artificial Sequence: Synthetic oligonucleotide
  Sense strand starting at position 3373 of SEQ ID NO: 318686
auguuaacaguaggguaau

SEQ ID NO: 581636 - RNA, 19 nt, Artificial Sequence
  Description of Artificial Sequence: Synthetic oligonucleotide
  Antisense strand to SEQ ID NO: 581635
auuacccuacuguuaacau

SEQ ID NO: 581637 - RNA, 19 nt, Artificial Sequence
  Description of Artificial Sequence: Synthetic oligonucleotide
  Sense strand starting at position 3384 of SEQ ID NO: 318686
aggguaaucgaacguggaa

SEQ ID NO: 581638 - RNA, 19 nt, Artificial Sequence
  Description of Artificial Sequence: Synthetic oligonucleotide
  Antisense strand to SEQ ID NO: 581637
uuccacguucgauuacccu

SEQ ID NO: 581639 - RNA, 19 nt, Artificial Sequence
  Description of Artificial Sequence: Synthetic oligonucleotide
  Sense strand starting at position 3386 of SEQ ID NO: 318686
gguaaucgaacguggaacu

SEQ ID NO: 581640 - RNA, 19 nt, Artificial Sequence
  Description of Artificial Sequence: Synthetic oligonucleotide
  Antisense strand to SEQ ID NO: 581639
aguuccacguucgauuacc

SEQ ID NO: 581641 - RNA, 19 nt, Artificial Sequence
  Description of Artificial Sequence: Synthetic oligonucleotide
  Sense strand starting at position 3583 of SEQ ID NO: 318686
uucgaucucccacaguaua

SEQ ID NO: 581642 - RNA, 19 nt, Artificial Sequence
  Description of Artificial Sequence: Synthetic oligonucleotide
  Antisense strand to SEQ ID NO: 581641
uauacugugggagaucgaa

SEQ ID NO: 581643 - RNA, 19 nt, Artificial Sequence
  Description of Artificial Sequence: Synthetic oligonucleotide
  Sense strand starting at position 3614 of SEQ ID NO: 318686
gcucuaugagucuauaucu

SEQ ID NO: 581644 - RNA, 19 nt, Artificial Sequence
  Description of Artificial Sequence: Synthetic oligonucleotide
  Antisense strand to SEQ ID NO: 581643
agauauagacucauagagc

SEQ ID NO: 581645 - RNA, 19 nt, Artificial Sequence
  Description of Artificial Sequence: Synthetic oligonucleotide
  Sense strand starting at position 3639 of SEQ ID NO: 318686
uaagacuugugagcucuau

SEQ ID NO: 581646 - RNA, 19 nt, Artificial Sequence
  Description of Artificial Sequence: Synthetic oligonucleotide
  Antisense strand to SEQ ID NO: 581645
auagagcucacaagucuua

SEQ ID NO: 581647 - RNA, 19 nt, Artificial Sequence
  Description of Artificial Sequence: Synthetic oligonucleotide
  Sense strand starting at position 3643 of SEQ ID NO: 318686
acuugugagcucuaugaag

SEQ ID NO: 581648 - RNA, 19 nt, Artificial Sequence
  Description of Artificial Sequence: Synthetic oligonucleotide
  Antisense strand to SEQ ID NO: 581647
cuucauagagcucacaagu

SEQ ID NO: 581649 - RNA, 19 nt, Artificial Sequence
  Description of Artificial Sequence: Synthetic oligonucleotide
  Sense strand starting at position 3645 of SEQ ID NO: 318686
uugugagcucuaugaagac

SEQ ID NO: 581650 - RNA, 19 nt, Artificial Sequence
  Description of Artificial Sequence: Synthetic oligonucleotide
  Antisense strand to SEQ ID NO: 581649
gucuucauagagcucacaa

SEQ ID NO: 581651 - RNA, 19 nt, Artificial Sequence
  Description of Artificial Sequence: Synthetic oligonucleotide
  Sense strand starting at position 3660 of SEQ ID NO: 318686
agacaugauccauguaauc

SEQ ID NO: 581652 - RNA, 19 nt, Artificial Sequence
  Description of Artificial Sequence: Synthetic oligonucleotide
  Antisense strand to SEQ ID NO: 581651
gauuacauggaucaugucu

SEQ ID NO: 581653 - RNA, 19 nt, Artificial Sequence
  Description of Artificial Sequence: Synthetic oligonucleotide
  Sense strand starting at position 3669 of SEQ ID NO: 318686
ccauguaauccucacaagu

SEQ ID NO: 581654 - RNA, 19 nt, Artificial Sequence
  Description of Artificial Sequence: Synthetic oligonucleotide
  Antisense strand to SEQ ID NO: 581653
acuugugaggauuacaugg

SEQ ID NO: 581655 - RNA, 19 nt, Artificial Sequence
  Description of Artificial Sequence: Synthetic oligonucleotide
  Sense strand starting at position 3724 of SEQ ID NO: 318686
uguugauugaauugaauug

SEQ ID NO: 581656 - RNA, 19 nt, Artificial Sequence
  Description of Artificial Sequence: Synthetic oligonucleotide
  Antisense strand to SEQ ID NO: 581655
caauucaauucaaucaaca

SEQ ID NO: 581657 - RNA, 19 nt, Artificial Sequence
  Description of Artificial Sequence: Synthetic oligonucleotide
  Sense strand starting at position 3949 of SEQ ID NO: 318686
gugggcuaugcuuaauaac

SEQ ID NO: 581658 - RNA, 19 nt, Artificial Sequence
  Description of Artificial Sequence: Synthetic oligonucleotide
  Antisense strand to SEQ ID NO: 581657
guuauuaagcauagcccac

SEQ ID NO: 581659 - RNA, 19 nt, Artificial Sequence
  Description of Artificial Sequence: Synthetic oligonucleotide
  Sense strand starting at position 115 of SEQ ID NO: 318687
uuucuuuauuuggagacaa

SEQ ID NO: 581660 - RNA, 19 nt, Artificial Sequence
  Description of Artificial Sequence: Synthetic oligonucleotide
  Antisense strand to SEQ ID NO: 581659
uugucuccaaauaaagaaa

SEQ ID NO: 581661 - RNA, 19 nt, Artificial Sequence
  Description of Artificial Sequence: Synthetic oligonucleotide
  Sense strand starting at position 497 of SEQ ID NO: 318687
cuugauacuccuggacuca

SEQ ID NO: 581662 - RNA, 19 nt, Artificial Sequence
  Description of Artificial Sequence: Synthetic oligonucleotide
  Antisense strand to SEQ ID NO: 581661
ugaguccaggaguaucaag

SEQ ID NO: 581663 - RNA, 19 nt, Artificial Sequence
  Description of Artificial Sequence: Synthetic oligonucleotide
  Sense strand starting at position 586 of SEQ ID NO: 318687
gcgcucuaauaacuaaaua

SEQ ID NO: 581664 - RNA, 19 nt, Artificial Sequence
  Description of Artificial Sequence: Synthetic oligonucleotide
  Antisense strand to SEQ ID NO: 581663
uauuuaguuauuagagcgc

SEQ ID NO: 581665 - RNA, 19 nt, Artificial Sequence
  Description of Artificial Sequence: Synthetic oligonucleotide
  Sense strand starting at position 713 of SEQ ID NO: 318687
uuaggacaaguguguaaca

SEQ ID NO: 581666 - RNA, 19 nt, Artificial Sequence
  Description of Artificial Sequence: Synthetic oligonucleotide
  Antisense strand to SEQ ID NO: 581665
uguuacacacuuguccuaa

SEQ ID NO: 581667 - RNA, 19 nt, Artificial Sequence
  Description of Artificial Sequence: Synthetic oligonucleotide
  Sense strand starting at position 743 of SEQ ID NO: 318687
acacuuuaguaucuaguau

SEQ ID NO: 581668 - RNA, 19 nt, Artificial Sequence
  Description of Artificial Sequence: Synthetic oligonucleotide
  Antisense strand to SEQ ID NO: 581667
auacuagauacuaaagugu

SEQ ID NO: 581669 - RNA, 19 nt, Artificial Sequence
  Description of Artificial Sequence: Synthetic oligonucleotide
  Sense strand starting at position 795 of SEQ ID NO: 318687
cgauguuccacaugaggaa

SEQ ID NO: 581670 - RNA, 19 nt, Artificial Sequence
  Description of Artificial Sequence: Synthetic oligonucleotide
  Antisense strand to SEQ ID NO: 581669
uuccucauguggaacaucg

SEQ ID NO: 581671 - RNA, 19 nt, Artificial Sequence
  Description of Artificial Sequence: Synthetic oligonucleotide
  Sense strand starting at position 837 of SEQ ID NO: 318687
cugguaaagggcugagagu

SEQ ID NO: 581672 - RNA, 19 nt, Artificial Sequence
  Description of Artificial Sequence: Synthetic oligonucleotide
  Antisense strand to SEQ ID NO: 581671
acucucagcccuuuaccag

SEQ ID NO: 581673 - RNA, 19 nt, Artificial Sequence
  Description of Artificial Sequence: Synthetic oligonucleotide
  Sense strand starting at position 838 of SEQ ID NO: 318687
ugguaaagggcugagaguu

SEQ ID NO: 581674 - RNA, 19 nt, Artificial Sequence
  Description of Artificial Sequence: Synthetic oligonucleotide
  Antisense strand to SEQ ID NO: 581673
aacucucagcccuuuacca

SEQ ID NO: 581675 - RNA, 19 nt, Artificial Sequence
  Description of Artificial Sequence: Synthetic oligonucleotide
  Sense strand starting at position 850 of SEQ ID NO: 318687
gagaguugaagcugaaugu

SEQ ID NO: 581676 - RNA, 19 nt, Artificial Sequence
  Description of Artificial Sequence: Synthetic oligonucleotide
  Antisense strand to SEQ ID NO: 581675
acauucagcuucaacucuc

SEQ ID NO: 581677 - RNA, 19 nt, Artificial Sequence
  Description of Artificial Sequence: Synthetic oligonucleotide
  Sense strand starting at position 851 of SEQ ID NO: 318687
agaguugaagcugaaugua

SEQ ID NO: 581678 - RNA, 19 nt, Artificial Sequence
  Description of Artificial Sequence: Synthetic oligonucleotide
  Antisense strand to SEQ ID NO: 581677
uacauucagcuucaacucu

SEQ ID NO: 581679 - RNA, 19 nt, Artificial Sequence
  Description of Artificial Sequence: Synthetic oligonucleotide
  Sense strand starting at position 859 of SEQ ID NO: 318687
agcugaauguaucugauuc

SEQ ID NO: 581680 - RNA, 19 nt, Artificial Sequence
  Description of Artificial Sequence: Synthetic oligonucleotide
  Antisense strand to SEQ ID NO: 581679
gaaucagauacauucagcu

SEQ ID NO: 581681 - RNA, 19 nt, Artificial Sequence
  Description of Artificial Sequence: Synthetic oligonucleotide
  Sense strand starting at position 985 of SEQ ID NO: 318687
cggugcgauguagugauua

SEQ ID NO: 581682 - RNA, 19 nt, Artificial Sequence
  Description of Artificial Sequence: Synthetic oligonucleotide
  Antisense strand to SEQ ID NO: 581681
uaaucacuacaucgcaccg

SEQ ID NO: 581683 - RNA, 19 nt, Artificial Sequence
  Description of Artificial Sequence: Synthetic oligonucleotide
  Sense strand starting at position 987 of SEQ ID NO: 318687
gugcgauguagugauuaaa

SEQ ID NO: 581684 - RNA, 19 nt, Artificial Sequence
  Description of Artificial Sequence: Synthetic oligonucleotide
  Antisense strand to SEQ ID NO: 581683
uuuaaucacuacaucgcac

SEQ ID NO: 581685 - RNA, 19 nt, Artificial Sequence
  Description of Artificial Sequence: Synthetic oligonucleotide
  Sense strand starting at position 990 of SEQ ID NO: 318687
cgauguagugauuaaauga

SEQ ID NO: 581686 - RNA, 19 nt, Artificial Sequence
  Description of Artificial Sequence: Synthetic oligonucleotide
  Antisense strand to SEQ ID NO: 581685
ucauuuaaucacuacaucg

SEQ ID NO: 581687 - RNA, 19 nt, Artificial Sequence
  Description of Artificial Sequence: Synthetic oligonucleotide
  Sense strand starting at position 1104 of SEQ ID NO: 318687
cggcuguggcgcucgagaa

SEQ ID NO: 581688 - RNA, 19 nt, Artificial Sequence
  Description of Artificial Sequence: Synthetic oligonucleotide
  Antisense strand to SEQ ID NO: 581687
uucucgagcgccacagccg

SEQ ID NO: 581689 - RNA, 19 nt, Artificial Sequence
  Description of Artificial Sequence: Synthetic oligonucleotide
  Sense strand starting at position 1177 of SEQ ID NO: 318687
cgucuaggacgauagggau

SEQ ID NO: 581690 - RNA, 19 nt, Artificial Sequence
  Description of Artificial Sequence: Synthetic oligonucleotide
  Antisense strand to SEQ ID NO: 581689
aucccuaucguccuagacg

SEQ ID NO: 581691 - RNA, 19 nt, Artificial Sequence
  Description of Artificial Sequence: Synthetic oligonucleotide
  Sense strand starting at position 2188 of SEQ ID NO: 318687
gaggacaauuccgugugau

SEQ ID NO: 581692 - RNA, 19 nt, Artificial Sequence
  Description of Artificial Sequence: Synthetic oligonucleotide
  Antisense strand to SEQ ID NO: 581691
aucacacggaauuguccuc

SEQ ID NO: 581693 - RNA, 19 nt, Artificial Sequence
  Description of Artificial Sequence: Synthetic oligonucleotide
  Sense strand starting at position 2189 of SEQ ID NO: 318687
aggacaauuccgugugaug

SEQ ID NO: 581694 - RNA, 19 nt, Artificial Sequence
  Description of Artificial Sequence: Synthetic oligonucleotide
  Antisense strand to SEQ ID NO: 581693
caucacacggaauuguccu

SEQ ID NO: 581695 - RNA, 19 nt, Artificial Sequence
  Description of Artificial Sequence: Synthetic oligonucleotide
  Sense strand starting at position 2191 of SEQ ID NO: 318687
gacaauuccgugugaugaa

SEQ ID NO: 581696 - RNA, 19 nt, Artificial Sequence
  Description of Artificial Sequence: Synthetic oligonucleotide
  Antisense strand to SEQ ID NO: 581695
uucaucacacggaauuguc

SEQ ID NO: 581697 - RNA, 19 nt, Artificial Sequence
  Description of Artificial Sequence: Synthetic oligonucleotide
  Sense strand starting at position 2672 of SEQ ID NO: 318687
auaagucucgcauaaauaa

SEQ ID NO: 581698 - RNA, 19 nt, Artificial Sequence
  Description of Artificial Sequence: Synthetic oligonucleotide
  Antisense strand to SEQ ID NO: 581697
uuauuuaugcgagacuuau

SEQ ID NO: 581699 - RNA, 19 nt, Artificial Sequence
  Description of Artificial Sequence: Synthetic oligonucleotide
  Sense strand starting at position 2699 of SEQ ID NO: 318687
augucccuacagugauaua

SEQ ID NO: 581700 - RNA, 19 nt, Artificial Sequence
  Description of Artificial Sequence: Synthetic oligonucleotide
  Antisense strand to SEQ ID NO: 581699
uauaucacuguagggacau

SEQ ID NO: 581701 - RNA, 19 nt, Artificial Sequence
  Description of Artificial Sequence: Synthetic oligonucleotide
  Sense strand starting at position 2737 of SEQ ID NO: 318687
ggaauccuauaugugucaa

SEQ ID NO: 581702 - RNA, 19 nt, Artificial Sequence
  Description of Artificial Sequence: Synthetic oligonucleotide
  Antisense strand to SEQ ID NO: 581701
uugacacauauaggauucc

SEQ ID NO: 581703 - RNA, 19 nt, Artificial Sequence
  Description of Artificial Sequence: Synthetic oligonucleotide
  Sense strand starting at position 2765 of SEQ ID NO: 318687
ggucacaacuacuuaaguu

SEQ ID NO: 581704 - RNA, 19 nt, Artificial Sequence
  Description of Artificial Sequence: Synthetic oligonucleotide
  Antisense strand to SEQ ID NO: 581703
aacuuaaguaguugugacc

SEQ ID NO: 581705 - RNA, 19 nt, Artificial Sequence
  Description of Artificial Sequence: Synthetic oligonucleotide
  Sense strand starting at position 2793 of SEQ ID NO: 318687
gcgacaugccaacaaauau

SEQ ID NO: 581706 - RNA, 19 nt, Artificial Sequence
  Description of Artificial Sequence: Synthetic oligonucleotide
  Antisense strand to SEQ ID NO: 581705
auauuuguuggcaugucgc

SEQ ID NO: 581707 - RNA, 19 nt, Artificial Sequence
  Description of Artificial Sequence: Synthetic oligonucleotide
  Sense strand starting at position 2808 of SEQ ID NO: 318687
auauguacacugugaaaug

SEQ ID NO: 581708 - RNA, 19 nt, Artificial Sequence
  Description of Artificial Sequence: Synthetic oligonucleotide
  Antisense strand to SEQ ID NO: 581707
cauuucacaguguacauau

SEQ ID NO: 581709 - RNA, 19 nt, Artificial Sequence
  Description of Artificial Sequence: Synthetic oligonucleotide
  Sense strand starting at position 2861 of SEQ ID NO: 318687
aguauauacuguuuacaga

SEQ ID NO: 581710 - RNA, 19 nt, Artificial Sequence
  Description of Artificial Sequence: Synthetic oligonucleotide
  Antisense strand to SEQ ID NO: 581709
ucuguaaacaguauauacu

SEQ ID NO: 581711 - RNA, 19 nt, Artificial Sequence
  Description of Artificial Sequence: Synthetic oligonucleotide
  Sense strand starting at position 2862 of SEQ ID NO: 318687
guauauacuguuuacagaa

SEQ ID NO: 581712 - RNA, 19 nt, Artificial Sequence
  Description of Artificial Sequence: Synthetic oligonucleotide
  Antisense strand to SEQ ID NO: 581711
uucuguaaacaguauauac

SEQ ID NO: 581713 - RNA, 19 nt, Artificial Sequence
  Description of Artificial Sequence: Synthetic oligonucleotide
  Sense strand starting at position 2988 of SEQ ID NO: 318687
ucagauagaucugucauga

SEQ ID NO: 581714 - RNA, 19 nt, Artificial Sequence
  Description of Artificial Sequence: Synthetic oligonucleotide
  Antisense strand to SEQ ID NO: 581713
ucaugacagaucuaucuga

SEQ ID NO: 581715 - RNA, 19 nt, Artificial Sequence
  Description of Artificial Sequence: Synthetic oligonucleotide
  Sense strand starting at position 3358 of SEQ ID NO: 318687
auguuaacaguaggguaau

SEQ ID NO: 581716 - RNA, 19 nt, Artificial Sequence
  Description of Artificial Sequence: Synthetic oligonucleotide
  Antisense strand to SEQ ID NO: 581715
auuacccuacuguuaacau

SEQ ID NO: 581717 - RNA, 19 nt, Artificial Sequence
  Description of Artificial Sequence: Synthetic oligonucleotide
  Sense strand starting at position 3369 of SEQ ID NO: 318687
aggguaaucgaacguggaa

SEQ ID NO: 581718 - RNA, 19 nt, Artificial Sequence
  Description of Artificial Sequence: Synthetic oligonucleotide
  Antisense strand to SEQ ID NO: 581717
uuccacguucgauuacccu

SEQ ID NO: 581719 - RNA, 19 nt, Artificial Sequence
  Description of Artificial Sequence: Synthetic oligonucleotide
  Sense strand starting at position 3371 of SEQ ID NO: 318687
gguaaucgaacguggaacu

SEQ ID NO: 581720 - RNA, 19 nt, Artificial Sequence
  Description of Artificial Sequence: Synthetic oligonucleotide
  Antisense strand to SEQ ID NO: 581719
aguuccacguucgauuacc

SEQ ID NO: 581721 - RNA, 19 nt, Artificial Sequence
  Description of Artificial Sequence: Synthetic oligonucleotide
  Sense strand starting at position 3568 of SEQ ID NO: 318687
uucgaucucccacaguaua

SEQ ID NO: 581722 - RNA, 19 nt, Artificial Sequence
  Description of Artificial Sequence: Synthetic oligonucleotide
  Antisense strand to SEQ ID NO: 581721
uauacugugggagaucgaa

SEQ ID NO: 581723 - RNA, 19 nt, Artificial Sequence
  Description of Artificial Sequence: Synthetic oligonucleotide
  Sense strand starting at position 3599 of SEQ ID NO: 318687
gcucuaugagucuauaucu

SEQ ID NO: 581724 - RNA, 19 nt, Artificial Sequence
  Description of Artificial Sequence: Synthetic oligonucleotide
  Antisense strand to SEQ ID NO: 581723
agauauagacucauagagc

SEQ ID NO: 581725 - RNA, 19 nt, Artificial Sequence
  Description of Artificial Sequence: Synthetic oligonucleotide
  Sense strand starting at position 3624 of SEQ ID NO: 318687
uaagacuugugagcucuau

SEQ ID NO: 581726 - RNA, 19 nt, Artificial Sequence
  Description of Artificial Sequence: Synthetic oligonucleotide
  Antisense strand to SEQ ID NO: 581725
auagagcucacaagucuua

SEQ ID NO: 581727 - RNA, 19 nt, Artificial Sequence
  Description of Artificial Sequence: Synthetic oligonucleotide
  Sense strand starting at position 3628 of SEQ ID NO: 318687
acuugugagcucuaugaag

SEQ ID NO: 581728 - RNA, 19 nt, Artificial Sequence
  Description of Artificial Sequence: Synthetic oligonucleotide
  Antisense strand to SEQ ID NO: 581727
cuucauagagcucacaagu

SEQ ID NO: 581729 - RNA, 19 nt, Artificial Sequence
  Description of Artificial Sequence: Synthetic oligonucleotide
  Sense strand starting at position 3630 of SEQ ID NO: 318687
uugugagcucuaugaagac

SEQ ID NO: 581730 - RNA, 19 nt, Artificial Sequence
  Description of Artificial Sequence: Synthetic oligonucleotide
  Antisense strand to SEQ ID NO: 581729
gucuucauagagcucacaa

SEQ ID NO: 581731 - RNA, 19 nt, Artificial Sequence
  Description of Artificial Sequence: Synthetic oligonucleotide
  Sense strand starting at position 3645 of SEQ ID NO: 318687
agacaugauccauguaauc

SEQ ID NO: 581732 - RNA, 19 nt, Artificial Sequence
  Description of Artificial Sequence: Synthetic oligonucleotide
  Antisense strand to SEQ ID NO: 581731
gauuacauggaucaugucu

SEQ ID NO: 581733 - RNA, 19 nt, Artificial Sequence
  Description of Artificial Sequence: Synthetic oligonucleotide
  Sense strand starting at position 3654 of SEQ ID NO: 318687
ccauguaauccucacaagu

SEQ ID NO: 581734 - RNA, 19 nt, Artificial Sequence
  Description of Artificial Sequence: Synthetic oligonucleotide
  Antisense strand to SEQ ID NO: 581733
acuugugaggauuacaugg

SEQ ID NO: 581735 - RNA, 19 nt, Artificial Sequence
  Description of Artificial Sequence: Synthetic oligonucleotide
  Sense strand starting at position 3709 of SEQ ID NO: 318687
uguugauugaauugaauug

SEQ ID NO: 581736 - RNA, 19 nt, Artificial Sequence
  Description of Artificial Sequence: Synthetic oligonucleotide
  Antisense strand to SEQ ID NO: 581735
caauucaauucaaucaaca

SEQ ID NO: 581737 - RNA, 19 nt, Artificial Sequence
  Description of Artificial Sequence: Synthetic oligonucleotide
  Sense strand starting at position 3934 of SEQ ID NO: 318687
gugggcuaugcuuaauaac

SEQ ID NO: 581738 - RNA, 19 nt, Artificial Sequence
  Description of Artificial Sequence: Synthetic oligonucleotide
  Antisense strand to SEQ ID NO: 581737
guuauuaagcauagcccac

SEQ ID NO: 581739 - RNA, 19 nt, Artificial Sequence
  Description of Artificial Sequence: Synthetic oligonucleotide
  Sense strand starting at position 113 of SEQ ID NO: 318688
gaaucaagucuggaugcca

SEQ ID NO: 581740 - RNA, 19 nt, Artificial Sequence
  Description of Artificial Sequence: Synthetic oligonucleotide
  Antisense strand to SEQ ID NO: 581739
uggcauccagacuugauuc

SEQ ID NO: 581741 - RNA, 19 nt, Artificial Sequence
  Description of Artificial Sequence: Synthetic oligonucleotide
  Sense strand starting at position 297 of SEQ ID NO: 318688
auccaucgucuugaucuau

SEQ ID NO: 581742 - RNA, 19 nt, Artificial Sequence
  Description of Artificial Sequence: Synthetic oligonucleotide
  Antisense strand to SEQ ID NO: 581741
auagaucaagacgauggau

SEQ ID NO: 581743 - RNA, 19 nt, Artificial Sequence
  Description of Artificial Sequence: Synthetic oligonucleotide
  Sense strand starting at position 467 of SEQ ID NO: 318688
uuucuuuauuuggagacaa

SEQ ID NO: 581744 - RNA, 19 nt, Artificial Sequence
  Description of Artificial Sequence: Synthetic oligonucleotide
  Antisense strand to SEQ ID NO: 581743
uugucuccaaauaaagaaa

SEQ ID NO: 581745 - RNA, 19 nt, Artificial Sequence
  Description of Artificial Sequence: Synthetic oligonucleotide
  Sense strand starting at position 849 of SEQ ID NO: 318688
cuugauacuccuggacuca

SEQ ID NO: 581746 - RNA, 19 nt, Artificial Sequence
  Description of Artificial Sequence: Synthetic oligonucleotide
  Antisense strand to SEQ ID NO: 581745
ugaguccaggaguaucaag

SEQ ID NO: 581747 - RNA, 19 nt, Artificial Sequence
  Description of Artificial Sequence: Synthetic oligonucleotide
  Sense strand starting at position 938 of SEQ ID NO: 318688
gcgcucuaauaacuaaaua

SEQ ID NO: 581748 - RNA, 19 nt, Artificial Sequence
  Description of Artificial Sequence: Synthetic oligonucleotide
  Antisense strand to SEQ ID NO: 581747
uauuuaguuauuagagcgc

SEQ ID NO: 581749 - RNA, 19 nt, Artificial Sequence
  Description of Artificial Sequence: Synthetic oligonucleotide
  Sense strand starting at position 1009 of SEQ ID NO: 318688
cgcauacaucccugauacu

SEQ ID NO: 581750 - RNA, 19 nt, Artificial Sequence
  Description of Artificial Sequence: Synthetic oligonucleotide
  Antisense strand to SEQ ID NO: 581749
aguaucagggauguaugcg

SEQ ID NO: 581751 - RNA, 19 nt, Artificial Sequence
  Description of Artificial Sequence: Synthetic oligonucleotide
  Sense strand starting at position 1065 of SEQ ID NO: 318688
uuaggacaaguguguaaca

SEQ ID NO: 581752 - RNA, 19 nt, Artificial Sequence
  Description of Artificial Sequence: Synthetic oligonucleotide
  Antisense strand to SEQ ID NO: 581751
uguuacacacuuguccuaa

SEQ ID NO: 581753 - RNA, 19 nt, Artificial Sequence
  Description of Artificial Sequence: Synthetic oligonucleotide
  Sense strand starting at position 1095 of SEQ ID NO: 318688
acacuuuaguaucuaguau

SEQ ID NO: 581754 - RNA, 19 nt, Artificial Sequence
  Description of Artificial Sequence: Synthetic oligonucleotide
  Antisense strand to SEQ ID NO: 581753
auacuagauacuaaagugu

SEQ ID NO: 581755 - RNA, 19 nt, Artificial Sequence
  Description of Artificial Sequence: Synthetic oligonucleotide
  Sense strand starting at position 1147 of SEQ ID NO: 318688
cgauguuccacaugaggaa

SEQ ID NO: 581756 - RNA, 19 nt, Artificial Sequence
  Description of Artificial Sequence: Synthetic oligonucleotide
  Antisense strand to SEQ ID NO: 581755
uuccucauguggaacaucg

SEQ ID NO: 581757 - RNA, 19 nt, Artificial Sequence
  Description of Artificial Sequence: Synthetic oligonucleotide
  Sense strand starting at position 1189 of SEQ ID NO: 318688
cugguaaagggcugagagu

SEQ ID NO: 581758 - RNA, 19 nt, Artificial Sequence
  Description of Artificial Sequence: Synthetic oligonucleotide
  Antisense strand to SEQ ID NO: 581757
acucucagcccuuuaccag

SEQ ID NO: 581759 - RNA, 19 nt, Artificial Sequence
  Description of Artificial Sequence: Synthetic oligonucleotide
  Sense strand starting at position 1190 of SEQ ID NO: 318688
ugguaaagggcugagaguu

SEQ ID NO: 581760 - RNA, 19 nt, Artificial Sequence
  Description of Artificial Sequence: Synthetic oligonucleotide
  Antisense strand to SEQ ID NO: 581759
aacucucagcccuuuacca

SEQ ID NO: 581761 - RNA, 19 nt, Artificial Sequence
  Description of Artificial Sequence: Synthetic oligonucleotide
  Sense strand starting at position 1202 of SEQ ID NO: 318688
gagaguugaagcugaaugu

SEQ ID NO: 581762 - RNA, 19 nt, Artificial Sequence
  Description of Artificial Sequence: Synthetic oligonucleotide
  Antisense strand to SEQ ID NO: 581761
acauucagcuucaacucuc

SEQ ID NO: 581763 - RNA, 19 nt, Artificial Sequence
  Description of Artificial Sequence: Synthetic oligonucleotide
  Sense strand starting at position 1203 of SEQ ID NO: 318688
agaguugaagcugaaugua

SEQ ID NO: 581764 - RNA, 19 nt, Artificial Sequence
  Description of Artificial Sequence: Synthetic oligonucleotide
  Antisense strand to SEQ ID NO: 581763
uacauucagcuucaacucu

SEQ ID NO: 581765 - RNA, 19 nt, Artificial Sequence
  Description of Artificial Sequence: Synthetic oligonucleotide
  Sense strand starting at position 1211 of SEQ ID NO: 318688
agcugaauguaucugauuc

SEQ ID NO: 581766 - RNA, 19 nt, Artificial Sequence
  Description of Artificial Sequence: Synthetic oligonucleotide
  Antisense strand to SEQ ID NO: 581765
gaaucagauacauucagcu

SEQ ID NO: 581767 - RNA, 19 nt, Artificial Sequence
  Description of Artificial Sequence: Synthetic oligonucleotide
  Sense strand starting at position 1337 of SEQ ID NO: 318688
cggugcgauguagugauua

SEQ ID NO: 581768 - RNA, 19 nt, Artificial Sequence
  Description of Artificial Sequence: Synthetic oligonucleotide
  Antisense strand to SEQ ID NO: 581767
uaaucacuacaucgcaccg

SEQ ID NO: 581769 - RNA, 19 nt, Artificial Sequence
  Description of Artificial Sequence: Synthetic oligonucleotide
  Sense strand starting at position 1339 of SEQ ID NO: 318688
gugcgauguagugauuaaa

SEQ ID NO: 581770 - RNA, 19 nt, Artificial Sequence
  Description of Artificial Sequence: Synthetic oligonucleotide
  Antisense strand to SEQ ID NO: 581769
uuuaaucacuacaucgcac

SEQ ID NO: 581771 - RNA, 19 nt, Artificial Sequence
  Description of Artificial Sequence: Synthetic oligonucleotide
  Sense strand starting at position 1342 of SEQ ID NO: 318688
cgauguagugauuaaauga

SEQ ID NO: 581772 - RNA, 19 nt, Artificial Sequence
  Description of Artificial Sequence: Synthetic oligonucleotide
  Antisense strand to SEQ ID NO: 581771
ucauuuaaucacuacaucg

SEQ ID NO: 581773 - RNA, 19 nt, Artificial Sequence
  Description of Artificial Sequence: Synthetic oligonucleotide
  Sense strand starting at position 1456 of SEQ ID NO: 318688
cggcuguggcgcucgagaa

SEQ ID NO: 581774 - RNA, 19 nt, Artificial Sequence
  Description of Artificial Sequence: Synthetic oligonucleotide
  Antisense strand to SEQ ID NO: 581773
uucucgagcgccacagccg

SEQ ID NO: 581775 - RNA, 19 nt, Artificial Sequence
  Description of Artificial Sequence: Synthetic oligonucleotide
  Sense strand starting at position 1523 of SEQ ID NO: 318688
cgaaaucgucuaggacgau

SEQ ID NO: 581776 - RNA, 19 nt, Artificial Sequence
  Description of Artificial Sequence: Synthetic oligonucleotide
  Antisense strand to SEQ ID NO: 581775
aucguccuagacgauuucg

SEQ ID NO: 581777 - RNA, 19 nt, Artificial Sequence
  Description of Artificial Sequence: Synthetic oligonucleotide
  Sense strand starting at position 1529 of SEQ ID NO: 318688
cgucuaggacgauagggau

SEQ ID NO: 581778 - RNA, 19 nt, Artificial Sequence
  Description of Artificial Sequence: Synthetic oligonucleotide
  Antisense strand to SEQ ID NO: 581777
aucccuaucguccuagacg

SEQ ID NO: 581779 - RNA, 19 nt, Artificial Sequence
  Description of Artificial Sequence: Synthetic oligonucleotide
  Sense strand starting at position 2540 of SEQ ID NO: 318688
gaggacaauuccgugugau

SEQ ID NO: 581780 - RNA, 19 nt, Artificial Sequence
  Description of Artificial Sequence: Synthetic oligonucleotide
  Antisense strand to SEQ ID NO: 581779
aucacacggaauuguccuc

SEQ ID NO: 581781 - RNA, 19 nt, Artificial Sequence
  Description of Artificial Sequence: Synthetic oligonucleotide
  Sense strand starting at position 2541 of SEQ ID NO: 318688
aggacaauuccgugugaug

SEQ ID NO: 581782 - RNA, 19 nt, Artificial Sequence
  Description of Artificial Sequence: Synthetic oligonucleotide
  Antisense strand to SEQ ID NO: 581781
caucacacggaauuguccu

SEQ ID NO: 581783 - RNA, 19 nt, Artificial Sequence
  Description of Artificial Sequence: Synthetic oligonucleotide
  Sense strand starting at position 2543 of SEQ ID NO: 318688
gacaauuccgugugaugaa

SEQ ID NO: 581784 - RNA, 19 nt, Artificial Sequence
  Description of Artificial Sequence: Synthetic oligonucleotide
  Antisense strand to SEQ ID NO: 581783
uucaucacacggaauuguc

SEQ ID NO: 581785 - RNA, 19 nt, Artificial Sequence
  Description of Artificial Sequence: Synthetic oligonucleotide
  Sense strand starting at position 3024 of SEQ ID NO: 318688
auaagucucgcauaaauaa

SEQ ID NO: 581786 - RNA, 19 nt, Artificial Sequence
  Description of Artificial Sequence: Synthetic oligonucleotide
  Antisense strand to SEQ ID NO: 581785
uuauuuaugcgagacuuau

SEQ ID NO: 581787 - RNA, 19 nt, Artificial Sequence
  Description of Artificial Sequence: Synthetic oligonucleotide
  Sense strand starting at position 3051 of SEQ ID NO: 318688
augucccuacagugauaua

SEQ ID NO: 581788 - RNA, 19 nt, Artificial Sequence
  Description of Artificial Sequence: Synthetic oligonucleotide
  Antisense strand to SEQ ID NO: 581787
uauaucacuguagggacau

SEQ ID NO: 581789 - RNA, 19 nt, Artificial Sequence
  Description of Artificial Sequence: Synthetic oligonucleotide
  Sense strand starting at position 3089 of SEQ ID NO: 318688
ggaauccuauaugugucaa

SEQ ID NO: 581790 - RNA, 19 nt, Artificial Sequence
  Description of Artificial Sequence: Synthetic oligonucleotide
  Antisense strand to SEQ ID NO: 581789
uugacacauauaggauucc

SEQ ID NO: 581791 - RNA, 19 nt, Artificial Sequence
  Description of Artificial Sequence: Synthetic oligonucleotide
  Sense strand starting at position 3117 of SEQ ID NO: 318688
ggucacaacuacuuaaguu

SEQ ID NO: 581792 - RNA, 19 nt, Artificial Sequence
  Description of Artificial Sequence: Synthetic oligonucleotide
  Antisense strand to SEQ ID NO: 581791
aacuuaaguaguugugacc

SEQ ID NO: 581793 - RNA, 19 nt, Artificial Sequence
  Description of Artificial Sequence: Synthetic oligonucleotide
  Sense strand starting at position 3145 of SEQ ID NO: 318688
gcgacaugccaacaaauau

SEQ ID NO: 581794 - RNA, 19 nt, Artificial Sequence
  Description of Artificial Sequence: Synthetic oligonucleotide
  Antisense strand to SEQ ID NO: 581793
auauuuguuggcaugucgc

SEQ ID NO: 581795 - RNA, 19 nt, Artificial Sequence
  Description of Artificial Sequence: Synthetic oligonucleotide
  Sense strand starting at position 3160 of SEQ ID NO: 318688
auauguacacugugaaaug

SEQ ID NO: 581796 - RNA, 19 nt, Artificial Sequence
  Description of Artificial Sequence: Synthetic oligonucleotide
  Antisense strand to SEQ ID NO: 581795
cauuucacaguguacauau

SEQ ID NO: 581797 - RNA, 19 nt, Artificial Sequence
  Description of Artificial Sequence: Synthetic oligonucleotide
  Sense strand starting at position 3213 of SEQ ID NO: 318688
aguauauacuguuuacaga

SEQ ID NO: 581798 - RNA, 19 nt, Artificial Sequence
  Description of Artificial Sequence: Synthetic oligonucleotide
  Antisense strand to SEQ ID NO: 581797
ucuguaaacaguauauacu

SEQ ID NO: 581799 - RNA, 19 nt, Artificial Sequence
  Description of Artificial Sequence: Synthetic oligonucleotide
  Sense strand starting at position 3214 of SEQ ID NO: 318688
guauauacuguuuacagaa

SEQ ID NO: 581800 - RNA, 19 nt, Artificial Sequence
  Description of Artificial Sequence: Synthetic oligonucleotide
  Antisense strand to SEQ ID NO: 581799
uucuguaaacaguauauac

SEQ ID NO: 581801 - RNA, 19 nt, Artificial Sequence
  Description of Artificial Sequence: Synthetic oligonucleotide
  Sense strand starting at position 3340 of SEQ ID NO: 318688
ucagauagaucugucauga

SEQ ID NO: 581802 - RNA, 19 nt, Artificial Sequence
  Description of Artificial Sequence: Synthetic oligonucleotide
  Antisense strand to SEQ ID NO: 581801
ucaugacagaucuaucuga

SEQ ID NO: 581803 - RNA, 19 nt, Artificial Sequence
  Description of Artificial Sequence: Synthetic oligonucleotide
  Sense strand starting at position 3710 of SEQ ID NO: 318688
auguuaacaguaggguaau

SEQ ID NO: 581804 - RNA, 19 nt, Artificial Sequence
  Description of Artificial Sequence: Synthetic oligonucleotide
  Antisense strand to SEQ ID NO: 581803
auuacccuacuguuaacau

SEQ ID NO: 581805 - RNA, 19 nt, Artificial Sequence
  Description of Artificial Sequence: Synthetic oligonucleotide
  Sense strand starting at position 3721 of SEQ ID NO: 318688
aggguaaucgaacguggaa

SEQ ID NO: 581806 - RNA, 19 nt, Artificial Sequence
  Description of Artificial Sequence: Synthetic oligonucleotide
  Antisense strand to SEQ ID NO: 581805
uuccacguucgauuacccu

SEQ ID NO: 581807 - RNA, 19 nt, Artificial Sequence
  Description of Artificial Sequence: Synthetic oligonucleotide
  Sense strand starting at position 3723 of SEQ ID NO: 318688
gguaaucgaacguggaacu

SEQ ID NO: 581808 - RNA, 19 nt, Artificial Sequence
  Description of Artificial Sequence: Synthetic oligonucleotide
  Antisense strand to SEQ ID NO: 581807
aguuccacguucgauuacc

SEQ ID NO: 581809 - RNA, 19 nt, Artificial Sequence
  Description of Artificial Sequence: Synthetic oligonucleotide
  Sense strand starting at position 3920 of SEQ ID NO: 318688
uucgaucucccacaguaua

SEQ ID NO: 581810 - RNA, 19 nt, Artificial Sequence
  Description of Artificial Sequence: Synthetic oligonucleotide
  Antisense strand to SEQ ID NO: 581809
uauacugugggagaucgaa

SEQ ID NO: 581811 - RNA, 19 nt, Artificial Sequence
  Description of Artificial Sequence: Synthetic oligonucleotide
  Sense strand starting at position 3951 of SEQ ID NO: 318688
gcucuaugagucuauaucu

SEQ ID NO: 581812 - RNA, 19 nt, Artificial Sequence
  Description of Artificial Sequence: Synthetic oligonucleotide
  Antisense strand to SEQ ID NO: 581811
agauauagacucauagagc

SEQ ID NO: 581813 - RNA, 19 nt, Artificial Sequence
  Description of Artificial Sequence: Synthetic oligonucleotide
  Sense strand starting at position 3976 of SEQ ID NO: 318688
uaagacuugugagcucuau

SEQ ID NO: 581814 - RNA, 19 nt, Artificial Sequence
  Description of Artificial Sequence: Synthetic oligonucleotide
  Antisense strand to SEQ ID NO: 581813
auagagcucacaagucuua

SEQ ID NO: 581815 - RNA, 19 nt, Artificial Sequence
  Description of Artificial Sequence: Synthetic oligonucleotide
  Sense strand starting at position 3980 of SEQ ID NO: 318688
acuugugagcucuaugaag

SEQ ID NO: 581816 - RNA, 19 nt, Artificial Sequence
  Description of Artificial Sequence: Synthetic oligonucleotide
  Antisense strand to SEQ ID NO: 581815
cuucauagagcucacaagu

SEQ ID NO: 581817 - RNA, 19 nt, Artificial Sequence
  Description of Artificial Sequence: Synthetic oligonucleotide
  Sense strand starting at position 3982 of SEQ ID NO: 318688
uugugagcucuaugaagac

SEQ ID NO: 581818 - RNA, 19 nt, Artificial Sequence
  Description of Artificial Sequence: Synthetic oligonucleotide
  Antisense strand to SEQ ID NO: 581817
gucuucauagagcucacaa

SEQ ID NO: 581819 - RNA, 19 nt, Artificial Sequence
  Description of Artificial Sequence: Synthetic oligonucleotide
  Sense strand starting at position 57 of SEQ ID NO: 318689
gcaugcuggucaucacaca

SEQ ID NO: 581820 - RNA, 19 nt, Artificial Sequence
  Description of Artificial Sequence: Synthetic oligonucleotide
  Antisense strand to SEQ ID NO: 581819
ugugugaugaccagcaugc

SEQ ID NO: 581821 - RNA, 19 nt, Artificial Sequence
  Description of Artificial Sequence: Synthetic oligonucleotide
  Sense strand starting at position 410 of SEQ ID NO: 318689
cucucagcuuggucaggau

SEQ ID NO: 581822 - RNA, 19 nt, Artificial Sequence
  Description of Artificial Sequence: Synthetic oligonucleotide
  Antisense strand to SEQ ID NO: 581821
auccugaccaagcugagag

SEQ ID NO: 581823 - RNA, 19 nt, Artificial Sequence
  Description of Artificial Sequence: Synthetic oligonucleotide
  Sense strand starting at position 414 of SEQ ID NO: 318689
cagcuuggucaggauuaga

SEQ ID NO: 581824 - RNA, 19 nt, Artificial Sequence
  Description of Artificial Sequence: Synthetic oligonucleotide
  Antisense strand to SEQ ID NO: 581823
ucuaauccugaccaagcug

SEQ ID NO: 581825 - RNA, 19 nt, Artificial Sequence
  Description of Artificial Sequence: Synthetic oligonucleotide
  Sense strand starting at position 642 of SEQ ID NO: 318689
ugaucaaucugguuuggca

SEQ ID NO: 581826 - RNA, 19 nt, Artificial Sequence
  Description of Artificial Sequence: Synthetic oligonucleotide
  Antisense strand to SEQ ID NO: 581825
ugccaaaccagauugauca

SEQ ID NO: 581827 - RNA, 19 nt, Artificial Sequence
  Description of Artificial Sequence: Synthetic oligonucleotide
  Sense strand starting at position 747 of SEQ ID NO: 318689
ggcagcaagaaucgagaau

SEQ ID NO: 581828 - RNA, 19 nt, Artificial Sequence
  Description of Artificial Sequence: Synthetic oligonucleotide
  Antisense strand to SEQ ID NO: 581827
auucucgauucuugcugcc

SEQ ID NO: 581829 - RNA, 19 nt, Artificial Sequence
  Description of Artificial Sequence: Synthetic oligonucleotide
  Sense strand starting at position 748 of SEQ ID NO: 318689
gcagcaagaaucgagaauu

SEQ ID NO: 581830 - RNA, 19 nt, Artificial Sequence
  Description of Artificial Sequence: Synthetic oligonucleotide
  Antisense strand to SEQ ID NO: 581829
aauucucgauucuugcugc

SEQ ID NO: 581831 - RNA, 19 nt, Artificial Sequence
  Description of Artificial Sequence: Synthetic oligonucleotide
  Sense strand starting at position 759 of SEQ ID NO: 318689
cgagaauugccaggguaag

SEQ ID NO: 581832 - RNA, 19 nt, Artificial Sequence
  Description of Artificial Sequence: Synthetic oligonucleotide
  Antisense strand to SEQ ID NO: 581831
cuuacccuggcaauucucg

SEQ ID NO: 581833 - RNA, 19 nt, Artificial Sequence
  Description of Artificial Sequence: Synthetic oligonucleotide
  Sense strand starting at position 981 of SEQ ID NO: 318689
cugaguuagcaguggguua

SEQ ID NO: 581834 - RNA, 19 nt, Artificial Sequence
  Description of Artificial Sequence: Synthetic oligonucleotide
  Antisense strand to SEQ ID NO: 581833
uaacccacugcuaacucag

SEQ ID NO: 581835 - RNA, 19 nt, Artificial Sequence
  Description of Artificial Sequence: Synthetic oligonucleotide
  Sense strand starting at position 992 of SEQ ID NO: 318689
guggguuagggugaccaau

SEQ ID NO: 581836 - RNA, 19 nt, Artificial Sequence
  Description of Artificial Sequence: Synthetic oligonucleotide
  Antisense strand to SEQ ID NO: 581835
auuggucacccuaacccac

SEQ ID NO: 581837 - RNA, 19 nt, Artificial Sequence
  Description of Artificial Sequence: Synthetic oligonucleotide
  Sense strand starting at position 1026 of SEQ ID NO: 318689
caagaaaggcuauggaguu

SEQ ID NO: 581838 - RNA, 19 nt, Artificial Sequence
  Description of Artificial Sequence: Synthetic oligonucleotide
  Antisense strand to SEQ ID NO: 581837
aacuccauagccuuucuug

SEQ ID NO: 581839 - RNA, 19 nt, Artificial Sequence
  Description of Artificial Sequence: Synthetic oligonucleotide
  Sense strand starting at position 1036 of SEQ ID NO: 318689
uauggaguuuaaggaagaa

SEQ ID NO: 581840 - RNA, 19 nt, Artificial Sequence
  Description of Artificial Sequence: Synthetic oligonucleotide
  Antisense strand to SEQ ID NO: 581839
uucuuccuuaaacuccaua

SEQ ID NO: 581841 - RNA, 19 nt, Artificial Sequence
  Description of Artificial Sequence: Synthetic oligonucleotide
  Sense strand starting at position 1197 of SEQ ID NO: 318689
ugagugugugcgugugaga

SEQ ID NO: 581842 - RNA, 19 nt, Artificial Sequence
  Description of Artificial Sequence: Synthetic oligonucleotide
  Antisense strand to SEQ ID NO: 581841
ucucacacgcacacacuca

SEQ ID NO: 581843 - RNA, 19 nt, Artificial Sequence
  Description of Artificial Sequence: Synthetic oligonucleotide
  Sense strand starting at position 1286 of SEQ ID NO: 318689
gauugugaguggcuguuua

SEQ ID NO: 581844 - RNA, 19 nt, Artificial Sequence
  Description of Artificial Sequence: Synthetic oligonucleotide
  Antisense strand to SEQ ID NO: 581843
uaaacagccacucacaauc

SEQ ID NO: 581845 - RNA, 19 nt, Artificial Sequence
  Description of Artificial Sequence: Synthetic oligonucleotide
  Sense strand starting at position 1307 of SEQ ID NO: 318689
gcagaugcuaccgggaaga

SEQ ID NO: 581846 - RNA, 19 nt, Artificial Sequence
  Description of Artificial Sequence: Synthetic oligonucleotide
  Antisense strand to SEQ ID NO: 581845
ucuucccgguagcaucugc

SEQ ID NO: 581847 - RNA, 19 nt, Artificial Sequence
  Description of Artificial Sequence: Synthetic oligonucleotide
  Sense strand starting at position 1390 of SEQ ID NO: 318689
aucuucgaauccucaaagu

SEQ ID NO: 581848 - RNA, 19 nt, Artificial Sequence
  Description of Artificial Sequence: Synthetic oligonucleotide
  Antisense strand to SEQ ID NO: 581847
acuuugaggauucgaagau

SEQ ID NO: 581849 - RNA, 19 nt, Artificial Sequence
  Description of Artificial Sequence: Synthetic oligonucleotide
  Sense strand starting at position 2717 of SEQ ID NO: 318689
cgccguucgccgaaggaaa

SEQ ID NO: 581850 - RNA, 19 nt, Artificial Sequence
  Description of Artificial Sequence: Synthetic oligonucleotide
  Antisense strand to SEQ ID NO: 581849
uuuccuucggcgaacggcg

SEQ ID NO: 581851 - RNA, 19 nt, Artificial Sequence
  Description of Artificial Sequence: Synthetic oligonucleotide
  Sense strand starting at position 2965 of SEQ ID NO: 318689
auucccuaaucggguuaaa

SEQ ID NO: 581852 - RNA, 19 nt, Artificial Sequence
  Description of Artificial Sequence: Synthetic oligonucleotide
  Antisense strand to SEQ ID NO: 581851
uuuaacccgauuagggaau

SEQ ID NO: 581853 - RNA, 19 nt, Artificial Sequence
  Description of Artificial Sequence: Synthetic oligonucleotide
  Sense strand starting at position 3135 of SEQ ID NO: 318689
gccggucgauaauauaaau

SEQ ID NO: 581854 - RNA, 19 nt, Artificial Sequence
  Description of Artificial Sequence: Synthetic oligonucleotide
  Antisense strand to SEQ ID NO: 581853
auuuauauuaucgaccggc

SEQ ID NO: 581855 - RNA, 19 nt, Artificial Sequence
  Description of Artificial Sequence: Synthetic oligonucleotide
  Sense strand starting at position 3171 of SEQ ID NO: 318689
cgauguaagggauggucuu

SEQ ID NO: 581856 - RNA, 19 nt, Artificial Sequence
  Description of Artificial Sequence: Synthetic oligonucleotide
  Antisense strand to SEQ ID NO: 581855
aagaccaucccuuacaucg

SEQ ID NO: 581857 - RNA, 19 nt, Artificial Sequence
  Description of Artificial Sequence: Synthetic oligonucleotide
  Sense strand starting at position 3217 of SEQ ID NO: 318689
uauauuucuugagacacga

SEQ ID NO: 581858 - RNA, 19 nt, Artificial Sequence
  Description of Artificial Sequence: Synthetic oligonucleotide
  Antisense strand to SEQ ID NO: 581857
ucgugucucaagaaauaua

SEQ ID NO: 581859 - RNA, 19 nt, Artificial Sequence
  Description of Artificial Sequence: Synthetic oligonucleotide
  Sense strand starting at position 3489 of SEQ ID NO: 318689
agccgcaucuuccaaauuu

SEQ ID NO: 581860 - RNA, 19 nt, Artificial Sequence
  Description of Artificial Sequence: Synthetic oligonucleotide
  Antisense strand to SEQ ID NO: 581859
aaauuuggaagaugcggcu

SEQ ID NO: 581861 - RNA, 19 nt, Artificial Sequence
  Description of Artificial Sequence: Synthetic oligonucleotide
  Sense strand starting at position 3510 of SEQ ID NO: 318689
aacagaagccgucguaugu

SEQ ID NO: 581862 - RNA, 19 nt, Artificial Sequence
  Description of Artificial Sequence: Synthetic oligonucleotide
  Antisense strand to SEQ ID NO: 581861
acauacgacggcuucuguu

SEQ ID NO: 581863 - RNA, 19 nt, Artificial Sequence
  Description of Artificial Sequence: Synthetic oligonucleotide
  Sense strand starting at position 3514 of SEQ ID NO: 318689
gaagccgucguaugugaaa

SEQ ID NO: 581864 - RNA, 19 nt, Artificial Sequence
  Description of Artificial Sequence: Synthetic oligonucleotide
  Antisense strand to SEQ ID NO: 581863
uuucacauacgacggcuuc

SEQ ID NO: 581865 - RNA, 19 nt, Artificial Sequence
  Description of Artificial Sequence: Synthetic oligonucleotide
  Sense strand starting at position 3516 of SEQ ID NO: 318689
agccgucguaugugaaaua

SEQ ID NO: 581866 - RNA, 19 nt, Artificial Sequence
  Description of Artificial Sequence: Synthetic oligonucleotide
  Antisense strand to SEQ ID NO: 581865
uauuucacauacgacggcu

SEQ ID NO: 581867 - RNA, 19 nt, Artificial Sequence
  Description of Artificial Sequence: Synthetic oligonucleotide
  Sense strand starting at position 3517 of SEQ ID NO: 318689
gccgucguaugugaaauau

SEQ ID NO: 581868 - RNA, 19 nt, Artificial Sequence
  Description of Artificial Sequence: Synthetic oligonucleotide
  Antisense strand to SEQ ID NO: 581867
auauuucacauacgacggc

SEQ ID NO: 581869 - RNA, 19 nt, Artificial Sequence
  Description of Artificial Sequence: Synthetic oligonucleotide
  Sense strand starting at position 3656 of SEQ ID NO: 318689
ggugucagggccugaucaa

SEQ ID NO: 581870 - RNA, 19 nt, Artificial Sequence
  Description of Artificial Sequence: Synthetic oligonucleotide
  Antisense strand to SEQ ID NO: 581869
uugaucaggcccugacacc

SEQ ID NO: 581871 - RNA, 19 nt, Artificial Sequence
  Description of Artificial Sequence: Synthetic oligonucleotide
  Sense strand starting at position 3747 of SEQ ID NO: 318689
uccuguuggcaccauaaca

SEQ ID NO: 581872 - RNA, 19 nt, Artificial Sequence
  Description of Artificial Sequence: Synthetic oligonucleotide
  Antisense strand to SEQ ID NO: 581871
uguuauggugccaacagga

SEQ ID NO: 581873 - RNA, 19 nt, Artificial Sequence
  Description of Artificial Sequence: Synthetic oligonucleotide
  Sense strand starting at position 3899 of SEQ ID NO: 318689
gguauaagaugacauuaua

SEQ ID NO: 581874 - RNA, 19 nt, Artificial Sequence
  Description of Artificial Sequence: Synthetic oligonucleotide
  Antisense strand to SEQ ID NO: 581873
uauaaugucaucuuauacc

SEQ ID NO: 581875 - RNA, 19 nt, Artificial Sequence
  Description of Artificial Sequence: Synthetic oligonucleotide
  Sense strand starting at position 3919 of SEQ ID NO: 318689
uaguguaugcucugucuaa

SEQ ID NO: 581876 - RNA, 19 nt, Artificial Sequence
  Description of Artificial Sequence: Synthetic oligonucleotide
  Antisense strand to SEQ ID NO: 581875
uuagacagagcauacacua

SEQ ID NO: 581877 - RNA, 19 nt, Artificial Sequence
  Description of Artificial Sequence: Synthetic oligonucleotide
  Sense strand starting at position 3920 of SEQ ID NO: 318689
aguguaugcucugucuaaa

SEQ ID NO: 581878 - RNA, 19 nt, Artificial Sequence
  Description of Artificial Sequence: Synthetic oligonucleotide
  Antisense strand to SEQ ID NO: 581877
uuuagacagagcauacacu

SEQ ID NO: 581879 - RNA, 19 nt, Artificial Sequence
  Description of Artificial Sequence: Synthetic oligonucleotide
  Sense strand starting at position 1209 of SEQ ID NO: 318690
guccucuugucuucuuuaa

SEQ ID NO: 581880 - RNA, 19 nt, Artificial Sequence
  Description of Artificial Sequence: Synthetic oligonucleotide
  Antisense strand to SEQ ID NO: 581879
uuaaagaagacaagaggac

SEQ ID NO: 581881 - RNA, 19 nt, Artificial Sequence
  Description of Artificial Sequence: Synthetic oligonucleotide
  Sense strand starting at position 1354 of SEQ ID NO: 318690
gcuggaaucacccgaguga

SEQ ID NO: 581882 - RNA, 19 nt, Artificial Sequence
  Description of Artificial Sequence: Synthetic oligonucleotide
  Antisense strand to SEQ ID NO: 581881
ucacucgggugauuccagc

SEQ ID NO: 581883 - RNA, 19 nt, Artificial Sequence
  Description of Artificial Sequence: Synthetic oligonucleotide
  Sense strand starting at position 1358 of SEQ ID NO: 318690
gaaucacccgagugaccuu

SEQ ID NO: 581884 - RNA, 19 nt, Artificial Sequence
  Description of Artificial Sequence: Synthetic oligonucleotide
  Antisense strand to SEQ ID NO: 581883
aaggucacucgggugauuc

SEQ ID NO: 581885 - RNA, 19 nt, Artificial Sequence
  Description of Artificial Sequence: Synthetic oligonucleotide
  Sense strand starting at position 1427 of SEQ ID NO: 318690
aggauaauaugaccagcuu

SEQ ID NO: 581886 - RNA, 19 nt, Artificial Sequence
  Description of Artificial Sequence: Synthetic oligonucleotide
  Antisense strand to SEQ ID NO: 581885
aagcuggucauauuauccu

SEQ ID NO: 581887 - RNA, 19 nt, Artificial Sequence
  Description of Artificial Sequence: Synthetic oligonucleotide
  Sense strand starting at position 1446 of SEQ ID NO: 318690
aagggcggucaggaauauu

SEQ ID NO: 581888 - RNA, 19 nt, Artificial Sequence
  Description of Artificial Sequence: Synthetic oligonucleotide
  Antisense strand to SEQ ID NO: 581887
aauauuccugaccgcccuu

SEQ ID NO: 581889 - RNA, 19 nt, Artificial Sequence
  Description of Artificial Sequence: Synthetic oligonucleotide
  Sense strand starting at position 1449 of SEQ ID NO: 318690
ggcggucaggaauauucaa

SEQ ID NO: 581890 - RNA, 19 nt, Artificial Sequence
  Description of Artificial Sequence: Synthetic oligonucleotide
  Antisense strand to SEQ ID NO: 581889
uugaauauuccugaccgcc

SEQ ID NO: 581891 - RNA, 19 nt, Artificial Sequence
  Description of Artificial Sequence: Synthetic oligonucleotide
  Sense strand starting at position 1474 of SEQ ID NO: 318690
agguguguacggcaaguua

SEQ ID NO: 581892 - RNA, 19 nt, Artificial Sequence
  Description of Artificial Sequence: Synthetic oligonucleotide
  Antisense strand to SEQ ID NO: 581891
uaacuugccguacacaccu

SEQ ID NO: 581893 - RNA, 19 nt, Artificial Sequence
  Description of Artificial Sequence: Synthetic oligonucleotide
  Sense strand starting at position 1476 of SEQ ID NO: 318690
guguguacggcaaguuaca

SEQ ID NO: 581894 - RNA, 19 nt, Artificial Sequence
  Description of Artificial Sequence: Synthetic oligonucleotide
  Antisense strand to SEQ ID NO: 581893
uguaacuugccguacacac

SEQ ID NO: 581895 - RNA, 19 nt, Artificial Sequence
  Description of Artificial Sequence: Synthetic oligonucleotide
  Sense strand starting at position 1986 of SEQ ID NO: 318690
cgucauuuccggcaagguu

SEQ ID NO: 581896 - RNA, 19 nt, Artificial Sequence
  Description of Artificial Sequence: Synthetic oligonucleotide
  Antisense strand to SEQ ID NO: 581895
aaccuugccggaaaugacg

SEQ ID NO: 581897 - RNA, 19 nt, Artificial Sequence
  Description of Artificial Sequence: Synthetic oligonucleotide
  Sense strand starting at position 2015 of SEQ ID NO: 318690
cuuggaggucgugagguaa

SEQ ID NO: 581898 - RNA, 19 nt, Artificial Sequence
  Description of Artificial Sequence: Synthetic oligonucleotide
  Antisense strand to SEQ ID NO: 581897
uuaccucacgaccuccaag

SEQ ID NO: 581899 - RNA, 19 nt, Artificial Sequence
  Description of Artificial Sequence: Synthetic oligonucleotide
  Sense strand starting at position 2028 of SEQ ID NO: 318690
agguaacuuccgggagaua

SEQ ID NO: 581900 - RNA, 19 nt, Artificial Sequence
  Description of Artificial Sequence: Synthetic oligonucleotide
  Antisense strand to SEQ ID NO: 581899
uaucucccggaaguuaccu

SEQ ID NO: 581901 - RNA, 19 nt, Artificial Sequence
  Description of Artificial Sequence: Synthetic oligonucleotide
  Sense strand starting at position 2029 of SEQ ID NO: 318690
gguaacuuccgggagauac

SEQ ID NO: 581902 - RNA, 19 nt, Artificial Sequence
  Description of Artificial Sequence: Synthetic oligonucleotide
  Antisense strand to SEQ ID NO: 581901
guaucucccggaaguuacc

SEQ ID NO: 581903 - RNA, 19 nt, Artificial Sequence
  Description of Artificial Sequence: Synthetic oligonucleotide
  Sense strand starting at position 2053 of SEQ ID NO: 318690
uccuacugucucuaaggga

SEQ ID NO: 581904 - RNA, 19 nt, Artificial Sequence
  Description of Artificial Sequence: Synthetic oligonucleotide
  Antisense strand to SEQ ID NO: 581903
ucccuuagagacaguagga

SEQ ID NO: 581905 - RNA, 19 nt, Artificial Sequence
  Description of Artificial Sequence: Synthetic oligonucleotide
  Sense strand starting at position 2629 of SEQ ID NO: 318690
aucaaauaaucgucaauug

SEQ ID NO: 581906 - RNA, 19 nt, Artificial Sequence
  Description of Artificial Sequence: Synthetic oligonucleotide
  Antisense strand to SEQ ID NO: 581905
caauugacgauuauuugau

SEQ ID NO: 581907 - RNA, 19 nt, Artificial Sequence
  Description of Artificial Sequence: Synthetic oligonucleotide
  Sense strand starting at position 2796 of SEQ ID NO: 318690
agugcauucugcuugacga

SEQ ID NO: 581908 - RNA, 19 nt, Artificial Sequence
  Description of Artificial Sequence: Synthetic oligonucleotide
  Antisense strand to SEQ ID NO: 581907
ucgucaagcagaaugcacu

SEQ ID NO: 581909 - RNA, 19 nt, Artificial Sequence
  Description of Artificial Sequence: Synthetic oligonucleotide
  Sense strand starting at position 2815 of SEQ ID NO: 318690
ugcuguugucaauguacag

SEQ ID NO: 581910 - RNA, 19 nt, Artificial Sequence
  Description of Artificial Sequence: Synthetic oligonucleotide
  Antisense strand to SEQ ID NO: 581909
cuguacauugacaacagca

SEQ ID NO: 581911 - RNA, 19 nt, Artificial Sequence
  Description of Artificial Sequence: Synthetic oligonucleotide
  Sense strand starting at position 2866 of SEQ ID NO: 318690
aauggaauugcuggccaua

SEQ ID NO: 581912 - RNA, 19 nt, Artificial Sequence
  Description of Artificial Sequence: Synthetic oligonucleotide
  Antisense strand to SEQ ID NO: 581911
uauggccagcaauuccauu

SEQ ID NO: 581913 - RNA, 19 nt, Artificial Sequence
  Description of Artificial Sequence: Synthetic oligonucleotide
  Sense strand starting at position 2868 of SEQ ID NO: 318690
uggaauugcuggccauauu

SEQ ID NO: 581914 - RNA, 19 nt, Artificial Sequence
  Description of Artificial Sequence: Synthetic oligonucleotide
  Antisense strand to SEQ ID NO: 581913
aauauggccagcaauucca

SEQ ID NO: 581915 - RNA, 19 nt, Artificial Sequence
  Description of Artificial Sequence: Synthetic oligonucleotide
  Sense strand starting at position 2909 of SEQ ID NO: 318690
ucaacaguuggcuguguuu

SEQ ID NO: 581916 - RNA, 19 nt, Artificial Sequence
  Description of Artificial Sequence: Synthetic oligonucleotide
  Antisense strand to SEQ ID NO: 581915
aaacacagccaacuguuga

SEQ ID NO: 581917 - RNA, 19 nt, Artificial Sequence
  Description of Artificial Sequence: Synthetic oligonucleotide
  Sense strand starting at position 3028 of SEQ ID NO: 318690
cguaucuugcacuaugagu

SEQ ID NO: 581918 - RNA, 19 nt, Artificial Sequence
  Description of Artificial Sequence: Synthetic oligonucleotide
  Antisense strand to SEQ ID NO: 581917
acucauagugcaagauacg

SEQ ID NO: 581919 - RNA, 19 nt, Artificial Sequence
  Description of Artificial Sequence: Synthetic oligonucleotide
  Sense strand starting at position 3331 of SEQ ID NO: 318690
aggacaucaguauguuaca

SEQ ID NO: 581920 - RNA, 19 nt, Artificial Sequence
  Description of Artificial Sequence: Synthetic oligonucleotide
  Antisense strand to SEQ ID NO: 581919
uguaacauacugauguccu

SEQ ID NO: 581921 - RNA, 19 nt, Artificial Sequence
  Description of Artificial Sequence: Synthetic oligonucleotide
  Sense strand starting at position 3332 of SEQ ID NO: 318690
ggacaucaguauguuacau

SEQ ID NO: 581922 - RNA, 19 nt, Artificial Sequence
  Description of Artificial Sequence: Synthetic oligonucleotide
  Antisense strand to SEQ ID NO: 581921
auguaacauacugaugucc

SEQ ID NO: 581923 - RNA, 19 nt, Artificial Sequence
  Description of Artificial Sequence: Synthetic oligonucleotide
  Sense strand starting at position 3334 of SEQ ID NO: 318690
acaucaguauguuacauuu

SEQ ID NO: 581924 - RNA, 19 nt, Artificial Sequence
  Description of Artificial Sequence: Synthetic oligonucleotide
  Antisense strand to SEQ ID NO: 581923
aaauguaacauacugaugu

SEQ ID NO: 581925 - RNA, 19 nt, Artificial Sequence
  Description of Artificial Sequence: Synthetic oligonucleotide
  Sense strand starting at position 3481 of SEQ ID NO: 318690
cuggaacuucuaugccaau

SEQ ID NO: 581926 - RNA, 19 nt, Artificial Sequence
  Description of Artificial Sequence: Synthetic oligonucleotide
  Antisense strand to SEQ ID NO: 581925
auuggcauagaaguuccag

SEQ ID NO: 581927 - RNA, 19 nt, Artificial Sequence
  Description of Artificial Sequence: Synthetic oligonucleotide
  Sense strand starting at position 3482 of SEQ ID NO: 318690
uggaacuucuaugccaauu

SEQ ID NO: 581928 - RNA, 19 nt, Artificial Sequence
  Description of Artificial Sequence: Synthetic oligonucleotide
  Antisense strand to SEQ ID NO: 581927
aauuggcauagaaguucca

SEQ ID NO: 581929 - RNA, 19 nt, Artificial Sequence
  Description of Artificial Sequence: Synthetic oligonucleotide
  Sense strand starting at position 3643 of SEQ ID NO: 318690
aucugaguaucgucaugaa

SEQ ID NO: 581930 - RNA, 19 nt, Artificial Sequence
  Description of Artificial Sequence: Synthetic oligonucleotide
  Antisense strand to SEQ ID NO: 581929
uucaugacgauacucagau

SEQ ID NO: 581931 - RNA, 19 nt, Artificial Sequence
  Description of Artificial Sequence: Synthetic oligonucleotide
  Sense strand starting at position 3647 of SEQ ID NO: 318690
gaguaucgucaugaauaau

SEQ ID NO: 581932 - RNA, 19 nt, Artificial Sequence
  Description of Artificial Sequence: Synthetic oligonucleotide
  Antisense strand to SEQ ID NO: 581931
auuauucaugacgauacuc

SEQ ID NO: 581933 - RNA, 19 nt, Artificial Sequence
  Description of Artificial Sequence: Synthetic oligonucleotide
  Sense strand starting at position 3653 of SEQ ID NO: 318690
cgucaugaauaauugguua

SEQ ID NO: 581934 - RNA, 19 nt, Artificial Sequence
  Description of Artificial Sequence: Synthetic oligonucleotide
  Antisense strand to SEQ ID NO: 581933
uaaccaauuauucaugacg

SEQ ID NO: 581935 - RNA, 19 nt, Artificial Sequence
  Description of Artificial Sequence: Synthetic oligonucleotide
  Sense strand starting at position 3657 of SEQ ID NO: 318690
augaauaauugguuagcuu

SEQ ID NO: 581936 - RNA, 19 nt, Artificial Sequence
  Description of Artificial Sequence: Synthetic oligonucleotide
  Antisense strand to SEQ ID NO: 581935
aagcuaaccaauuauucau

SEQ ID NO: 581937 - RNA, 19 nt, Artificial Sequence
  Description of Artificial Sequence: Synthetic oligonucleotide
  Sense strand starting at position 3658 of SEQ ID NO: 318690
ugaauaauugguuagcuuu

SEQ ID NO: 581938 - RNA, 19 nt, Artificial Sequence
  Description of Artificial Sequence: Synthetic oligonucleotide
  Antisense strand to SEQ ID NO: 581937
aaagcuaaccaauuauuca

SEQ ID NO: 581939 - RNA, 19 nt, Artificial Sequence
  Description of Artificial Sequence: Synthetic oligonucleotide
  Sense strand starting at position 3676 of SEQ ID NO: 318690
uuccacaugccuuagaagu

SEQ ID NO: 581940 - RNA, 19 nt, Artificial Sequence
  Description of Artificial Sequence: Synthetic oligonucleotide
  Antisense strand to SEQ ID NO: 581939
acuucuaaggcauguggaa

SEQ ID NO: 581941 - RNA, 19 nt, Artificial Sequence
  Description of Artificial Sequence: Synthetic oligonucleotide
  Sense strand starting at position 3703 of SEQ ID NO: 318690
gcaccuagcgaacaucuua

SEQ ID NO: 581942 - RNA, 19 nt, Artificial Sequence
  Description of Artificial Sequence: Synthetic oligonucleotide
  Antisense strand to SEQ ID NO: 581941
uaagauguucgcuaggugc

SEQ ID NO: 581943 - RNA, 19 nt, Artificial Sequence
  Description of Artificial Sequence: Synthetic oligonucleotide
  Sense strand starting at position 3789 of SEQ ID NO: 318690
cuacauaguuaguccggua

SEQ ID NO: 581944 - RNA, 19 nt, Artificial Sequence
  Description of Artificial Sequence: Synthetic oligonucleotide
  Antisense strand to SEQ ID NO: 581943
uaccggacuaacuauguag

SEQ ID NO: 581945 - RNA, 19 nt, Artificial Sequence
  Description of Artificial Sequence: Synthetic oligonucleotide
  Sense strand starting at position 3794 of SEQ ID NO: 318690
uaguuaguccgguagugua

SEQ ID NO: 581946 - RNA, 19 nt, Artificial Sequence
  Description of Artificial Sequence: Synthetic oligonucleotide
  Antisense strand to SEQ ID NO: 581945
uacacuaccggacuaacua

SEQ ID NO: 581947 - RNA, 19 nt, Artificial Sequence
  Description of Artificial Sequence: Synthetic oligonucleotide
  Sense strand starting at position 3866 of SEQ ID NO: 318690
ccaaguaaaucuguaucua

SEQ ID NO: 581948 - RNA, 19 nt, Artificial Sequence
  Description of Artificial Sequence: Synthetic oligonucleotide
  Antisense strand to SEQ ID NO: 581947
uagauacagauuuacuugg

SEQ ID NO: 581949 - RNA, 19 nt, Artificial Sequence
  Description of Artificial Sequence: Synthetic oligonucleotide
  Sense strand starting at position 3896 of SEQ ID NO: 318690
ggcuaaauaagguguuauc

SEQ ID NO: 581950 - RNA, 19 nt, Artificial Sequence
  Description of Artificial Sequence: Synthetic oligonucleotide
  Antisense strand to SEQ ID NO: 581949
gauaacaccuuauuuagcc

SEQ ID NO: 581951 - RNA, 19 nt, Artificial Sequence
  Description of Artificial Sequence: Synthetic oligonucleotide
  Sense strand starting at position 3906 of SEQ ID NO: 318690
gguguuaucagcugcuuga

SEQ ID NO: 581952 - RNA, 19 nt, Artificial Sequence
  Description of Artificial Sequence: Synthetic oligonucleotide
  Antisense strand to SEQ ID NO: 581951
ucaagcagcugauaacacc

SEQ ID NO: 581953 - RNA, 19 nt, Artificial Sequence
  Description of Artificial Sequence: Synthetic oligonucleotide
  Sense strand starting at position 3909 of SEQ ID NO: 318690
guuaucagcugcuugauau

SEQ ID NO: 581954 - RNA, 19 nt, Artificial Sequence
  Description of Artificial Sequence: Synthetic oligonucleotide
  Antisense strand to SEQ ID NO: 581953
auaucaagcagcugauaac

SEQ ID NO: 581955 - RNA, 19 nt, Artificial Sequence
  Description of Artificial Sequence: Synthetic oligonucleotide
  Sense strand starting at position 3910 of SEQ ID NO: 318690
uuaucagcugcuugauaua

SEQ ID NO: 581956 - RNA, 19 nt, Artificial Sequence
  Description of Artificial Sequence: Synthetic oligonucleotide
  Antisense strand to SEQ ID NO: 581955
uauaucaagcagcugauaa

SEQ ID NO: 581957 - RNA, 19 nt, Artificial Sequence
  Description of Artificial Sequence: Synthetic oligonucleotide
  Sense strand starting at position 3954 of SEQ ID NO: 318690
auacuugaggccugauuac

SEQ ID NO: 581958 - RNA, 19 nt, Artificial Sequence
  Description of Artificial Sequence: Synthetic oligonucleotide
  Antisense strand to SEQ ID NO: 581957
guaaucaggccucaaguau

SEQ ID NO: 581959 - RNA, 19 nt, Artificial Sequence
  Description of Artificial Sequence: Synthetic oligonucleotide
  Sense strand starting at position 66 of SEQ ID NO: 318691
uuuggcauugauugaucau

SEQ ID NO: 581960 - RNA, 19 nt, Artificial Sequence
  Description of Artificial Sequence: Synthetic oligonucleotide
  Antisense strand to SEQ ID NO: 581959
augaucaaucaaugccaaa

SEQ ID NO: 581961 - RNA, 19 nt, Artificial Sequence
  Description of Artificial Sequence: Synthetic oligonucleotide
  Sense strand starting at position 69 of SEQ ID NO: 318691
ggcauugauugaucaucug

SEQ ID NO: 581962 - RNA, 19 nt, Artificial Sequence
  Description of Artificial Sequence: Synthetic oligonucleotide
  Antisense strand to SEQ ID NO: 581961
cagaugaucaaucaaugcc

SEQ ID NO: 581963 - RNA, 19 nt, Artificial Sequence
  Description of Artificial Sequence: Synthetic oligonucleotide
  Sense strand starting at position 99 of SEQ ID NO: 318691
gcauuuguaugguuaaucu

SEQ ID NO: 581964 - RNA, 19 nt, Artificial Sequence
  Description of Artificial Sequence: Synthetic oligonucleotide
  Antisense strand to SEQ ID NO: 581963
agauuaaccauacaaaugc

SEQ ID NO: 581965 - RNA, 19 nt, Artificial Sequence
  Description of Artificial Sequence: Synthetic oligonucleotide
  Sense strand starting at position 108 of SEQ ID NO: 318691
ugguuaaucugauuaagca

SEQ ID NO: 581966 - RNA, 19 nt, Artificial Sequence
  Description of Artificial Sequence: Synthetic oligonucleotide
  Antisense strand to SEQ ID NO: 581965
ugcuuaaucagauuaacca

SEQ ID NO: 581967 - RNA, 19 nt, Artificial Sequence
  Description of Artificial Sequence: Synthetic oligonucleotide
  Sense strand starting at position 109 of SEQ ID NO: 318691
gguuaaucugauuaagcag

SEQ ID NO: 581968 - RNA, 19 nt, Artificial Sequence
  Description of Artificial Sequence: Synthetic oligonucleotide
  Antisense strand to SEQ ID NO: 581967
cugcuuaaucagauuaacc

SEQ ID NO: 581969 - RNA, 19 nt, Artificial Sequence
  Description of Artificial Sequence: Synthetic oligonucleotide
  Sense strand starting at position 184 of SEQ ID NO: 318691
cuauaagcugcugauagau

SEQ ID NO: 581970 - RNA, 19 nt, Artificial Sequence
  Description of Artificial Sequence: Synthetic oligonucleotide
  Antisense strand to SEQ ID NO: 581969
aucuaucagcagcuuauag

SEQ ID NO: 581971 - RNA, 19 nt, Artificial Sequence
  Description of Artificial Sequence: Synthetic oligonucleotide
  Sense strand starting at position 231 of SEQ ID NO: 318691
gcauccagaguauaacaua

SEQ ID NO: 581972 - RNA, 19 nt, Artificial Sequence
  Description of Artificial Sequence: Synthetic oligonucleotide
  Antisense strand to SEQ ID NO: 581971
uauguuauacucuggaugc

SEQ ID NO: 581973 - RNA, 19 nt, Artificial Sequence
  Description of Artificial Sequence: Synthetic oligonucleotide
  Sense strand starting at position 554 of SEQ ID NO: 318691
aaagucuguguggaaguau

SEQ ID NO: 581974 - RNA, 19 nt, Artificial Sequence
  Description of Artificial Sequence: Synthetic oligonucleotide
  Antisense strand to SEQ ID NO: 581973
auacuuccacacagacuuu

SEQ ID NO: 581975 - RNA, 19 nt, Artificial Sequence
  Description of Artificial Sequence: Synthetic oligonucleotide
  Sense strand starting at position 871 of SEQ ID NO: 318691
uaacaauuauaguuacgga

SEQ ID NO: 581976 - RNA, 19 nt, Artificial Sequence
  Description of Artificial Sequence: Synthetic oligonucleotide
  Antisense strand to SEQ ID NO: 581975
uccguaacuauaauuguua

SEQ ID NO: 581977 - RNA, 19 nt, Artificial Sequence
  Description of Artificial Sequence: Synthetic oligonucleotide
  Sense strand starting at position 1135 of SEQ ID NO: 318691
ucagguaaaugauuccaga

SEQ ID NO: 581978 - RNA, 19 nt, Artificial Sequence
  Description of Artificial Sequence: Synthetic oligonucleotide
  Antisense strand to SEQ ID NO: 581977
ucuggaaucauuuaccuga

SEQ ID NO: 581979 - RNA, 19 nt, Artificial Sequence
  Description of Artificial Sequence: Synthetic oligonucleotide
  Sense strand starting at position 1197 of SEQ ID NO: 318691
uuaguaacaccacgauaaa

SEQ ID NO: 581980 - RNA, 19 nt, Artificial Sequence
  Description of Artificial Sequence: Synthetic oligonucleotide
  Antisense strand to SEQ ID NO: 581979
uuuaucgugguguuacuaa

SEQ ID NO: 581981 - RNA, 19 nt, Artificial Sequence
  Description of Artificial Sequence: Synthetic oligonucleotide
  Sense strand starting at position 1206 of SEQ ID NO: 318691
ccacgauaaauagguguaa

SEQ ID NO: 581982 - RNA, 19 nt, Artificial Sequence
  Description of Artificial Sequence: Synthetic oligonucleotide
  Antisense strand to SEQ ID NO: 581981
uuacaccuauuuaucgugg

SEQ ID NO: 581983 - RNA, 19 nt, Artificial Sequence
  Description of Artificial Sequence: Synthetic oligonucleotide
  Sense strand starting at position 1208 of SEQ ID NO: 318691
acgauaaauagguguaaca

SEQ ID NO: 581984 - RNA, 19 nt, Artificial Sequence
  Description of Artificial Sequence: Synthetic oligonucleotide
  Antisense strand to SEQ ID NO: 581983
uguuacaccuauuuaucgu

SEQ ID NO: 581985 - RNA, 19 nt, Artificial Sequence
  Description of Artificial Sequence: Synthetic oligonucleotide
  Sense strand starting at position 1377 of SEQ ID NO: 318691
uggucugugccuuugcuua

SEQ ID NO: 581986 - RNA, 19 nt, Artificial Sequence
  Description of Artificial Sequence: Synthetic oligonucleotide
  Antisense strand to SEQ ID NO: 581985
uaagcaaaggcacagacca

SEQ ID NO: 581987 - RNA, 19 nt, Artificial Sequence
  Description of Artificial Sequence: Synthetic oligonucleotide
  Sense strand starting at position 1419 of SEQ ID NO: 318691
ggugacuggcaccagauau

SEQ ID NO: 581988 - RNA, 19 nt, Artificial Sequence
  Description of Artificial Sequence: Synthetic oligonucleotide
  Antisense strand to SEQ ID NO: 581987
auaucuggugccagucacc

SEQ ID NO: 581989 - RNA, 19 nt, Artificial Sequence
  Description of Artificial Sequence: Synthetic oligonucleotide
  Sense strand starting at position 1495 of SEQ ID NO: 318691
uuaacaagaucugcugauu

SEQ ID NO: 581990 - RNA, 19 nt, Artificial Sequence
  Description of Artificial Sequence: Synthetic oligonucleotide
  Antisense strand to SEQ ID NO: 581989
aaucagcagaucuuguuaa

SEQ ID NO: 581991 - RNA, 19 nt, Artificial Sequence
  Description of Artificial Sequence: Synthetic oligonucleotide
  Sense strand starting at position 1606 of SEQ ID NO: 318691
uggagaguugcugauuacu

SEQ ID NO: 581992 - RNA, 19 nt, Artificial Sequence
  Description of Artificial Sequence: Synthetic oligonucleotide
  Antisense strand to SEQ ID NO: 581991
aguaaucagcaacucucca

SEQ ID NO: 581993 - RNA, 19 nt, Artificial Sequence
  Description of Artificial Sequence: Synthetic oligonucleotide
  Sense strand starting at position 1616 of SEQ ID NO: 318691
cugauuacuccgggaacua

SEQ ID NO: 581994 - RNA, 19 nt, Artificial Sequence
  Description of Artificial Sequence: Synthetic oligonucleotide
  Antisense strand to SEQ ID NO: 581993
uaguucccggaguaaucag

SEQ ID NO: 581995 - RNA, 19 nt, Artificial Sequence
  Description of Artificial Sequence: Synthetic oligonucleotide
  Sense strand starting at position 1654 of SEQ ID NO: 318691
gguguaaucgcagagaaga

SEQ ID NO: 581996 - RNA, 19 nt, Artificial Sequence
  Description of Artificial Sequence: Synthetic oligonucleotide
  Antisense strand to SEQ ID NO: 581995
ucuucucugcgauuacacc

SEQ ID NO: 581997 - RNA, 19 nt, Artificial Sequence
  Description of Artificial Sequence: Synthetic oligonucleotide
  Sense strand starting at position 1700 of SEQ ID NO: 318691
acuugagccgguuaaagaa

SEQ ID NO: 581998 - RNA, 19 nt, Artificial Sequence
  Description of Artificial Sequence: Synthetic oligonucleotide
  Antisense strand to SEQ ID NO: 581997
uucuuuaaccggcucaagu

SEQ ID NO: 581999 - RNA, 19 nt, Artificial Sequence
  Description of Artificial Sequence: Synthetic oligonucleotide
  Sense strand starting at position 2338 of SEQ ID NO: 318691
cuuggaggccuguacugaa

SEQ ID NO: 582000 - RNA, 19 nt, Artificial Sequence
  Description of Artificial Sequence: Synthetic oligonucleotide
  Antisense strand to SEQ ID NO: 581999
uucaguacaggccuccaag

SEQ ID NO: 582001 - RNA, 19 nt, Artificial Sequence
  Description of Artificial Sequence: Synthetic oligonucleotide
  Sense strand starting at position 2467 of SEQ ID NO: 318691
cgcggaugagcgagaguuu

SEQ ID NO: 582002 - RNA, 19 nt, Artificial Sequence
  Description of Artificial Sequence: Synthetic oligonucleotide
  Antisense strand to SEQ ID NO: 582001
aaacucucgcucauccgcg

SEQ ID NO: 582003 - RNA, 19 nt, Artificial Sequence
  Description of Artificial Sequence: Synthetic oligonucleotide
  Sense strand starting at position 2478 of SEQ ID NO: 318691
gagaguuucuuccugggac

SEQ ID NO: 582004 - RNA, 19 nt, Artificial Sequence
  Description of Artificial Sequence: Synthetic oligonucleotide
  Antisense strand to SEQ ID NO: 582003
gucccaggaagaaacucuc

SEQ ID NO: 582005 - RNA, 19 nt, Artificial Sequence
  Description of Artificial Sequence: Synthetic oligonucleotide
  Sense strand starting at position 2725 of SEQ ID NO: 318691
acuuuaucuccguagacuc

SEQ ID NO: 582006 - RNA, 19 nt, Artificial Sequence
  Description of Artificial Sequence: Synthetic oligonucleotide
  Antisense strand to SEQ ID NO: 582005
gagucuacggagauaaagu

SEQ ID NO: 582007 - RNA, 19 nt, Artificial Sequence
  Description of Artificial Sequence: Synthetic oligonucleotide
  Sense strand starting at position 2768 of SEQ ID NO: 318691
gacagaucgaggugaaccu

SEQ ID NO: 582008 - RNA, 19 nt, Artificial Sequence
  Description of Artificial Sequence: Synthetic oligonucleotide
  Antisense strand to SEQ ID NO: 582007
agguucaccucgaucuguc

SEQ ID NO: 582009 - RNA, 19 nt, Artificial Sequence
  Description of Artificial Sequence: Synthetic oligonucleotide
  Sense strand starting at position 2778 of SEQ ID NO: 318691
ggugaaccuagcuaucgau

SEQ ID NO: 582010 - RNA, 19 nt, Artificial Sequence
  Description of Artificial Sequence: Synthetic oligonucleotide
  Antisense strand to SEQ ID NO: 582009
aucgauagcuagguucacc

SEQ ID NO: 582011 - RNA, 19 nt, Artificial Sequence
  Description of Artificial Sequence: Synthetic oligonucleotide
  Sense strand starting at position 2919 of SEQ ID NO: 318691
cguuaaacugcugugccaa

SEQ ID NO: 582012 - RNA, 19 nt, Artificial Sequence
  Description of Artificial Sequence: Synthetic oligonucleotide
  Antisense strand to SEQ ID NO: 582011
uuggcacagcaguuuaacg

SEQ ID NO: 582013 - RNA, 19 nt, Artificial Sequence
  Description of Artificial Sequence: Synthetic oligonucleotide
  Sense strand starting at position 3023 of SEQ ID NO: 318691
ccugauuuguaacauggaa

SEQ ID NO: 582014 - RNA, 19 nt, Artificial Sequence
  Description of Artificial Sequence: Synthetic oligonucleotide
  Antisense strand to SEQ ID NO: 582013
uuccauguuacaaaucagg

SEQ ID NO: 582015 - RNA, 19 nt, Artificial Sequence
  Description of Artificial Sequence: Synthetic oligonucleotide
  Sense strand starting at position 3043 of SEQ ID NO: 318691
cuguuuagagcuggaaaga

SEQ ID NO: 582016 - RNA, 19 nt, Artificial Sequence
  Description of Artificial Sequence: Synthetic oligonucleotide
  Antisense strand to SEQ ID NO: 582015
ucuuuccagcucuaaacag

SEQ ID NO: 582017 - RNA, 19 nt, Artificial Sequence
  Description of Artificial Sequence: Synthetic oligonucleotide
  Sense strand starting at position 3054 of SEQ ID NO: 318691
uggaaagaauauuagaaag

SEQ ID NO: 582018 - RNA, 19 nt, Artificial Sequence
  Description of Artificial Sequence: Synthetic oligonucleotide
  Antisense strand to SEQ ID NO: 582017
cuuucuaauauucuuucca

SEQ ID NO: 582019 - RNA, 19 nt, Artificial Sequence
  Description of Artificial Sequence: Synthetic oligonucleotide
  Sense strand starting at position 3168 of SEQ ID NO: 318691
aguggaaagccaggucuaa

SEQ ID NO: 582020 - RNA, 19 nt, Artificial Sequence
  Description of Artificial Sequence: Synthetic oligonucleotide
  Antisense strand to SEQ ID NO: 582019
uuagaccuggcuuuccacu

SEQ ID NO: 582021 - RNA, 19 nt, Artificial Sequence
  Description of Artificial Sequence: Synthetic oligonucleotide
  Sense strand starting at position 3179 of SEQ ID NO: 318691
aggucuaaucagcaaaugu

SEQ ID NO: 582022 - RNA, 19 nt, Artificial Sequence
  Description of Artificial Sequence: Synthetic oligonucleotide
  Antisense strand to SEQ ID NO: 582021
acauuugcugauuagaccu

SEQ ID NO: 582023 - RNA, 19 nt, Artificial Sequence
  Description of Artificial Sequence: Synthetic oligonucleotide
  Sense strand starting at position 3363 of SEQ ID NO: 318691
aaggauggugaaugcuaaa

SEQ ID NO: 582024 - RNA, 19 nt, Artificial Sequence
  Description of Artificial Sequence: Synthetic oligonucleotide
  Antisense strand to SEQ ID NO: 582023
uuuagcauucaccauccuu

SEQ ID NO: 582025 - RNA, 19 nt, Artificial Sequence
  Description of Artificial Sequence: Synthetic oligonucleotide
  Sense strand starting at position 3416 of SEQ ID NO: 318691
gggaguugcacuuagccaa

SEQ ID NO: 582026 - RNA, 19 nt, Artificial Sequence
  Description of Artificial Sequence: Synthetic oligonucleotide
  Antisense strand to SEQ ID NO: 582025
uuggcuaagugcaacuccc

SEQ ID NO: 582027 - RNA, 19 nt, Artificial Sequence
  Description of Artificial Sequence: Synthetic oligonucleotide
  Sense strand starting at position 3455 of SEQ ID NO: 318691
ggagaugguucuucccuca

SEQ ID NO: 582028 - RNA, 19 nt, Artificial Sequence
  Description of Artificial Sequence: Synthetic oligonucleotide
  Antisense strand to SEQ ID NO: 582027
ugagggaagaaccaucucc

SEQ ID NO: 582029 - RNA, 19 nt, Artificial Sequence
  Description of Artificial Sequence: Synthetic oligonucleotide
  Sense strand starting at position 3458 of SEQ ID NO: 318691
gaugguucuucccucagga

SEQ ID NO: 582030 - RNA, 19 nt, Artificial Sequence
  Description of Artificial Sequence: Synthetic oligonucleotide
  Antisense strand to SEQ ID NO: 582029
uccugagggaagaaccauc

SEQ ID NO: 582031 - RNA, 19 nt, Artificial Sequence
  Description of Artificial Sequence: Synthetic oligonucleotide
  Sense strand starting at position 3460 of SEQ ID NO: 318691
ugguucuucccucaggaaa

SEQ ID NO: 582032 - RNA, 19 nt, Artificial Sequence
  Description of Artificial Sequence: Synthetic oligonucleotide
  Antisense strand to SEQ ID NO: 582031
uuuccugagggaagaacca

SEQ ID NO: 582033 - RNA, 19 nt, Artificial Sequence
  Description of Artificial Sequence: Synthetic oligonucleotide
  Sense strand starting at position 3733 of SEQ ID NO: 318691
ugaguaagcccucauaauu

SEQ ID NO: 582034 - RNA, 19 nt, Artificial Sequence
  Description of Artificial Sequence: Synthetic oligonucleotide
  Antisense strand to SEQ ID NO: 582033
aauuaugagggcuuacuca

SEQ ID NO: 582035 - RNA, 19 nt, Artificial Sequence
  Description of Artificial Sequence: Synthetic oligonucleotide
  Sense strand starting at position 3852 of SEQ ID NO: 318691
aauuguagaaggugguuau

SEQ ID NO: 582036 - RNA, 19 nt, Artificial Sequence
  Description of Artificial Sequence: Synthetic oligonucleotide
  Antisense strand to SEQ ID NO: 582035
auaaccaccuucuacaauu

SEQ ID NO: 582037 - RNA, 19 nt, Artificial Sequence
  Description of Artificial Sequence: Synthetic oligonucleotide
  Sense strand starting at position 3859 of SEQ ID NO: 318691
gaaggugguuaucuguaaa

SEQ ID NO: 582038 - RNA, 19 nt, Artificial Sequence
  Description of Artificial Sequence: Synthetic oligonucleotide
  Antisense strand to SEQ ID NO: 582037
uuuacagauaaccaccuuc

SEQ ID NO: 582039 - RNA, 19 nt, Artificial Sequence
  Description of Artificial Sequence: Synthetic oligonucleotide
  Sense strand starting at position 308 of SEQ ID NO: 318692
cagcaucucccagggacau

SEQ ID NO: 582040 - RNA, 19 nt, Artificial Sequence
  Description of Artificial Sequence: Synthetic oligonucleotide
  Antisense strand to SEQ ID NO: 582039
augucccugggagaugcug

SEQ ID NO: 582041 - RNA, 19 nt, Artificial Sequence
  Description of Artificial Sequence: Synthetic oligonucleotide
  Sense strand starting at position 358 of SEQ ID NO: 318692
gagcaaauaguuuaggcua

SEQ ID NO: 582042 - RNA, 19 nt, Artificial Sequence
  Description of Artificial Sequence: Synthetic oligonucleotide
  Antisense strand to SEQ ID NO: 582041
uagccuaaacuauuugcuc

SEQ ID NO: 582043 - RNA, 19 nt, Artificial Sequence
  Description of Artificial Sequence: Synthetic oligonucleotide
  Sense strand starting at position 361 of SEQ ID NO: 318692
caaauaguuuaggcuauga

SEQ ID NO: 582044 - RNA, 19 nt, Artificial Sequence
  Description of Artificial Sequence: Synthetic oligonucleotide
  Antisense strand to SEQ ID NO: 582043
ucauagccuaaacuauuug

SEQ ID NO: 582045 - RNA, 19 nt, Artificial Sequence
  Description of Artificial Sequence: Synthetic oligonucleotide
  Sense strand starting at position 363 of SEQ ID NO: 318692
aauaguuuaggcuaugaca

SEQ ID NO: 582046 - RNA, 19 nt, Artificial Sequence
  Description of Artificial Sequence: Synthetic oligonucleotide
  Antisense strand to SEQ ID NO: 582045
ugucauagccuaaacuauu

SEQ ID NO: 582047 - RNA, 19 nt, Artificial Sequence
  Description of Artificial Sequence: Synthetic oligonucleotide
  Sense strand starting at position 589 of SEQ ID NO: 318692
uagaccugccaguaaaguu

SEQ ID NO: 582048 - RNA, 19 nt, Artificial Sequence
  Description of Artificial Sequence: Synthetic oligonucleotide
  Antisense strand to SEQ ID NO: 582047
aacuuuacuggcaggucua

SEQ ID NO: 582049 - RNA, 19 nt, Artificial Sequence
  Description of Artificial Sequence: Synthetic oligonucleotide
  Sense strand starting at position 599 of SEQ ID NO: 318692
aguaaaguugcucaacuag

SEQ ID NO: 582050 - RNA, 19 nt, Artificial Sequence
  Description of Artificial Sequence: Synthetic oligonucleotide
  Antisense strand to SEQ ID NO: 582049
cuaguugagcaacuuuacu

SEQ ID NO: 582051 - RNA, 19 nt, Artificial Sequence
  Description of Artificial Sequence: Synthetic oligonucleotide
  Sense strand starting at position 658 of SEQ ID NO: 318692
ggaggacuccuguagucug

SEQ ID NO: 582052 - RNA, 19 nt, Artificial Sequence
  Description of Artificial Sequence: Synthetic oligonucleotide
  Antisense strand to SEQ ID NO: 582051
cagacuacaggaguccucc

SEQ ID NO: 582053 - RNA, 19 nt, Artificial Sequence
  Description of Artificial Sequence: Synthetic oligonucleotide
  Sense strand starting at position 748 of SEQ ID NO: 318692
gccgguuugcuuguugaga

SEQ ID NO: 582054 - RNA, 19 nt, Artificial Sequence
  Description of Artificial Sequence: Synthetic oligonucleotide
  Antisense strand to SEQ ID NO: 582053
ucucaacaagcaaaccggc

SEQ ID NO: 582055 - RNA, 19 nt, Artificial Sequence
  Description of Artificial Sequence: Synthetic oligonucleotide
  Sense strand starting at position 962 of SEQ ID NO: 318692
gggagagaaccgugacagu

SEQ ID NO: 582056 - RNA, 19 nt, Artificial Sequence
  Description of Artificial Sequence: Synthetic oligonucleotide
  Antisense strand to SEQ ID NO: 582055
acugucacgguucucuccc

SEQ ID NO: 582057 - RNA, 19 nt, Artificial Sequence
  Description of Artificial Sequence: Synthetic oligonucleotide
  Sense strand starting at position 1125 of SEQ ID NO: 318692
gggaguggcuuuccaggaa

SEQ ID NO: 582058 - RNA, 19 nt, Artificial Sequence
  Description of Artificial Sequence: Synthetic oligonucleotide
  Antisense strand to SEQ ID NO: 582057
uuccuggaaagccacuccc

SEQ ID NO: 582059 - RNA, 19 nt, Artificial Sequence
  Description of Artificial Sequence: Synthetic oligonucleotide
  Sense strand starting at position 1251 of SEQ ID NO: 318692
ugccucgagcguguuaaga

SEQ ID NO: 582060 - RNA, 19 nt, Artificial Sequence
  Description of Artificial Sequence: Synthetic oligonucleotide
  Antisense strand to SEQ ID NO: 582059
ucuuaacacgcucgaggca

SEQ ID NO: 582061 - RNA, 19 nt, Artificial Sequence
  Description of Artificial Sequence: Synthetic oligonucleotide
  Sense strand starting at position 1376 of SEQ ID NO: 318692
ccaauuccguuagucauuu

SEQ ID NO: 582062 - RNA, 19 nt, Artificial Sequence
  Description of Artificial Sequence: Synthetic oligonucleotide
  Antisense strand to SEQ ID NO: 582061
aaaugacuaacggaauugg

SEQ ID NO: 582063 - RNA, 19 nt, Artificial Sequence
  Description of Artificial Sequence: Synthetic oligonucleotide
  Sense strand starting at position 1478 of SEQ ID NO: 318692
uuaugaaaguuaccugcau

SEQ ID NO: 582064 - RNA, 19 nt, Artificial Sequence
  Description of Artificial Sequence: Synthetic oligonucleotide
  Antisense strand to SEQ ID NO: 582063
augcagguaacuuucauaa

SEQ ID NO: 582065 - RNA, 19 nt, Artificial Sequence
  Description of Artificial Sequence: Synthetic oligonucleotide
  Sense strand starting at position 1636 of SEQ ID NO: 318692
aaagaaacgugauuaccuu

SEQ ID NO: 582066 - RNA, 19 nt, Artificial Sequence
  Description of Artificial Sequence: Synthetic oligonucleotide
  Antisense strand to SEQ ID NO: 582065
aagguaaucacguuucuuu

SEQ ID NO: 582067 - RNA, 19 nt, Artificial Sequence
  Description of Artificial Sequence: Synthetic oligonucleotide
  Sense strand starting at position 1640 of SEQ ID NO: 318692
aaacgugauuaccuuggaa

SEQ ID NO: 582068 - RNA, 19 nt, Artificial Sequence
  Description of Artificial Sequence: Synthetic oligonucleotide
  Antisense strand to SEQ ID NO: 582067
uuccaagguaaucacguuu

SEQ ID NO: 582069 - RNA, 19 nt, Artificial Sequence
  Description of Artificial Sequence: Synthetic oligonucleotide
  Sense strand starting at position 1642 of SEQ ID NO: 318692
acgugauuaccuuggaagg

SEQ ID NO: 582070 - RNA, 19 nt, Artificial Sequence
  Description of Artificial Sequence: Synthetic oligonucleotide
  Antisense strand to SEQ ID NO: 582069
ccuuccaagguaaucacgu

SEQ ID NO: 582071 - RNA, 19 nt, Artificial Sequence
  Description of Artificial Sequence: Synthetic oligonucleotide
  Sense strand starting at position 2226 of SEQ ID NO: 318692
gggacucacucaguaacau

SEQ ID NO: 582072 - RNA, 19 nt, Artificial Sequence
  Description of Artificial Sequence: Synthetic oligonucleotide
  Antisense strand to SEQ ID NO: 582071
auguuacugagugaguccc

SEQ ID NO: 582073 - RNA, 19 nt, Artificial Sequence
  Description of Artificial Sequence: Synthetic oligonucleotide
  Sense strand starting at position 2243 of SEQ ID NO: 318692
aucgcucugcucgcggaaa

SEQ ID NO: 582074 - RNA, 19 nt, Artificial Sequence
  Description of Artificial Sequence: Synthetic oligonucleotide
  Antisense strand to SEQ ID NO: 582073
uuuccgcgagcagagcgau

SEQ ID NO: 582075 - RNA, 19 nt, Artificial Sequence
  Description of Artificial Sequence: Synthetic oligonucleotide
  Sense strand starting at position 2387 of SEQ ID NO: 318692
acuucuucucgggagcaca

SEQ ID NO: 582076 - RNA, 19 nt, Artificial Sequence
  Description of Artificial Sequence: Synthetic oligonucleotide
  Antisense strand to SEQ ID NO: 582075
ugugcucccgagaagaagu

SEQ ID NO: 582077 - RNA, 19 nt, Artificial Sequence
  Description of Artificial Sequence: Synthetic oligonucleotide
  Sense strand starting at position 2421 of SEQ ID NO: 318692
agcaaagaacuugguuaca

SEQ ID NO: 582078 - RNA, 19 nt, Artificial Sequence
  Description of Artificial Sequence: Synthetic oligonucleotide
  Antisense strand to SEQ ID NO: 582077
uguaaccaaguucuuugcu

SEQ ID NO: 582079 - RNA, 19 nt, Artificial Sequence
  Description of Artificial Sequence: Synthetic oligonucleotide
  Sense strand starting at position 2430 of SEQ ID NO: 318692
cuugguuacagcguguuua

SEQ ID NO: 582080 - RNA, 19 nt, Artificial Sequence
  Description of Artificial Sequence: Synthetic oligonucleotide
  Antisense strand to SEQ ID NO: 582079
uaaacacgcuguaaccaag

SEQ ID NO: 582081 - RNA, 19 nt, Artificial Sequence
  Description of Artificial Sequence: Synthetic oligonucleotide
  Sense strand starting at position 2442 of SEQ ID NO: 318692
guguuuacgcgcccacaga

SEQ ID NO: 582082 - RNA, 19 nt, Artificial Sequence
  Description of Artificial Sequence: Synthetic oligonucleotide
  Antisense strand to SEQ ID NO: 582081
ucugugggcgcguaaacac

SEQ ID NO: 582083 - RNA, 19 nt, Artificial Sequence
  Description of Artificial Sequence: Synthetic oligonucleotide
  Sense strand starting at position 2767 of SEQ ID NO: 318692
aaguaucucugaguagaau

SEQ ID NO: 582084 - RNA, 19 nt, Artificial Sequence
  Description of Artificial Sequence: Synthetic oligonucleotide
  Antisense strand to SEQ ID NO: 582083
auucuacucagagauacuu

SEQ ID NO: 582085 - RNA, 19 nt, Artificial Sequence
  Description of Artificial Sequence: Synthetic oligonucleotide
  Sense strand starting at position 2808 of SEQ ID NO: 318692
cagggacuucuuggaagua

SEQ ID NO: 582086 - RNA, 19 nt, Artificial Sequence
  Description of Artificial Sequence: Synthetic oligonucleotide
  Antisense strand to SEQ ID NO: 582085
uacuuccaagaagucccug

SEQ ID NO: 582087 - RNA, 19 nt, Artificial Sequence
  Description of Artificial Sequence: Synthetic oligonucleotide
  Sense strand starting at position 2838 of SEQ ID NO: 318692
ucaugcuuuccggaaauaa

SEQ ID NO: 582088 - RNA, 19 nt, Artificial Sequence
  Description of Artificial Sequence: Synthetic oligonucleotide
  Antisense strand to SEQ ID NO: 582087
uuauuuccggaaagcauga

SEQ ID NO: 582089 - RNA, 19 nt, Artificial Sequence
  Description of Artificial Sequence: Synthetic oligonucleotide
  Sense strand starting at position 2993 of SEQ ID NO: 318692
gggucaaacaguugacaca

SEQ ID NO: 582090 - RNA, 19 nt, Artificial Sequence
  Description of Artificial Sequence: Synthetic oligonucleotide
  Antisense strand to SEQ ID NO: 582089
ugugucaacuguuugaccc

SEQ ID NO: 582091 - RNA, 19 nt, Artificial Sequence
  Description of Artificial Sequence: Synthetic oligonucleotide
  Sense strand starting at position 3060 of SEQ ID NO: 318692
uuugaagucaaguaugagu

SEQ ID NO: 582092 - RNA, 19 nt, Artificial Sequence
  Description of Artificial Sequence: Synthetic oligonucleotide
  Antisense strand to SEQ ID NO: 582091
acucauacuugacuucaaa

SEQ ID NO: 582093 - RNA, 19 nt, Artificial Sequence
  Description of Artificial Sequence: Synthetic oligonucleotide
  Sense strand starting at position 3065 of SEQ ID NO: 318692
agucaaguaugaguuuaua

SEQ ID NO: 582094 - RNA, 19 nt, Artificial Sequence
  Description of Artificial Sequence: Synthetic oligonucleotide
  Antisense strand to SEQ ID NO: 582093
uauaaacucauacuugacu

SEQ ID NO: 582095 - RNA, 19 nt, Artificial Sequence
  Description of Artificial Sequence: Synthetic oligonucleotide
  Sense strand starting at position 3104 of SEQ ID NO: 318692
caaggugcacaucaguaua

SEQ ID NO: 582096 - RNA, 19 nt, Artificial Sequence
  Description of Artificial Sequence: Synthetic oligonucleotide
  Antisense strand to SEQ ID NO: 582095
uauacugaugugcaccuug

SEQ ID NO: 582097 - RNA, 19 nt, Artificial Sequence
  Description of Artificial Sequence: Synthetic oligonucleotide
  Sense strand starting at position 3107 of SEQ ID NO: 318692
ggugcacaucaguauaaca

SEQ ID NO: 582098 - RNA, 19 nt, Artificial Sequence
  Description of Artificial Sequence: Synthetic oligonucleotide
  Antisense strand to SEQ ID NO: 582097
uguuauacugaugugcacc

SEQ ID NO: 582099 - RNA, 19 nt, Artificial Sequence
  Description of Artificial Sequence: Synthetic oligonucleotide
  Sense strand starting at position 3199 of SEQ ID NO: 318692
ugaagccucuacuuagaaa

SEQ ID NO: 582100 - RNA, 19 nt, Artificial Sequence
  Description of Artificial Sequence: Synthetic oligonucleotide
  Antisense strand to SEQ ID NO: 582099
uuucuaaguagaggcuuca

SEQ ID NO: 582101 - RNA, 19 nt, Artificial Sequence
  Description of Artificial Sequence: Synthetic oligonucleotide
  Sense strand starting at position 3289 of SEQ ID NO: 318692
ugauuaguuugguuuaaac

SEQ ID NO: 582102 - RNA, 19 nt, Artificial Sequence
  Description of Artificial Sequence: Synthetic oligonucleotide
  Antisense strand to SEQ ID NO: 582101
guuuaaaccaaacuaauca

SEQ ID NO: 582103 - RNA, 19 nt, Artificial Sequence
  Description of Artificial Sequence: Synthetic oligonucleotide
  Sense strand starting at position 3339 of SEQ ID NO: 318692
ccuguacaugcgcauuuau

SEQ ID NO: 582104 - RNA, 19 nt, Artificial Sequence
  Description of Artificial Sequence: Synthetic oligonucleotide
  Antisense strand to SEQ ID NO: 582103
auaaaugcgcauguacagg

SEQ ID NO: 582105 - RNA, 19 nt, Artificial Sequence
  Description of Artificial Sequence: Synthetic oligonucleotide
  Sense strand starting at position 3348 of SEQ ID NO: 318692
gcgcauuuauaagauuucu

SEQ ID NO: 582106 - RNA, 19 nt, Artificial Sequence
  Description of Artificial Sequence: Synthetic oligonucleotide
  Antisense strand to SEQ ID NO: 582105
agaaaucuuauaaaugcgc

SEQ ID NO: 582107 - RNA, 19 nt, Artificial Sequence
  Description of Artificial Sequence: Synthetic oligonucleotide
  Sense strand starting at position 3425 of SEQ ID NO: 318692
guagaagacuugucaggau

SEQ ID NO: 582108 - RNA, 19 nt, Artificial Sequence
  Description of Artificial Sequence: Synthetic oligonucleotide
  Antisense strand to SEQ ID NO: 582107
auccugacaagucuucuac

SEQ ID NO: 582109 - RNA, 19 nt, Artificial Sequence
  Description of Artificial Sequence: Synthetic oligonucleotide
  Sense strand starting at position 3506 of SEQ ID NO: 318692
auauaacugucaguuacau

SEQ ID NO: 582110 - RNA, 19 nt, Artificial Sequence
  Description of Artificial Sequence: Synthetic oligonucleotide
  Antisense strand to SEQ ID NO: 582109
auguaacugacaguuauau

SEQ ID NO: 582111 - RNA, 19 nt, Artificial Sequence
  Description of Artificial Sequence: Synthetic oligonucleotide
  Sense strand starting at position 3616 of SEQ ID NO: 318692
agauguuuagaaugauagu

SEQ ID NO: 582112 - RNA, 19 nt, Artificial Sequence
  Description of Artificial Sequence: Synthetic oligonucleotide
  Antisense strand to SEQ ID NO: 582111
acuaucauucuaaacaucu

SEQ ID NO: 582113 - RNA, 19 nt, Artificial Sequence
  Description of Artificial Sequence: Synthetic oligonucleotide
  Sense strand starting at position 3693 of SEQ ID NO: 318692
gaaaguuacugucccaaag

SEQ ID NO: 582114 - RNA, 19 nt, Artificial Sequence
  Description of Artificial Sequence: Synthetic oligonucleotide
  Antisense strand to SEQ ID NO: 582113
cuuugggacaguaacuuuc

SEQ ID NO: 582115 - RNA, 19 nt, Artificial Sequence
  Description of Artificial Sequence: Synthetic oligonucleotide
  Sense strand starting at position 3845 of SEQ ID NO: 318692
auagaccuuucugugaaac

SEQ ID NO: 582116 - RNA, 19 nt, Artificial Sequence
  Description of Artificial Sequence: Synthetic oligonucleotide
  Antisense strand to SEQ ID NO: 582115
guuucacagaaaggucuau

SEQ ID NO: 582117 - RNA, 19 nt, Artificial Sequence
  Description of Artificial Sequence: Synthetic oligonucleotide
  Sense strand starting at position 3902 of SEQ ID NO: 318692
gaguaaaucuaguugaguu

SEQ ID NO: 582118 - RNA, 19 nt, Artificial Sequence
  Description of Artificial Sequence: Synthetic oligonucleotide
  Antisense strand to SEQ ID NO: 582117
aacucaacuagauuuacuc

SEQ ID NO: 582119 - RNA, 19 nt, Artificial Sequence
  Description of Artificial Sequence: Synthetic oligonucleotide
  Sense strand starting at position 185 of SEQ ID NO: 318693
aguggagaaguuuaggcaa

SEQ ID NO: 582120 - RNA, 19 nt, Artificial Sequence
  Description of Artificial Sequence: Synthetic oligonucleotide
  Antisense strand to SEQ ID NO: 582119
uugccuaaacuucuccacu

SEQ ID NO: 582121 - RNA, 19 nt, Artificial Sequence
  Description of Artificial Sequence: Synthetic oligonucleotide
  Sense strand starting at position 187 of SEQ ID NO: 318693
uggagaaguuuaggcaaca

SEQ ID NO: 582122 - RNA, 19 nt, Artificial Sequence
  Description of Artificial Sequence: Synthetic oligonucleotide
  Antisense strand to SEQ ID NO: 582121
uguugccuaaacuucucca

SEQ ID NO: 582123 - RNA, 19 nt, Artificial Sequence
  Description of Artificial Sequence: Synthetic oligonucleotide
  Sense strand starting at position 328 of SEQ ID NO: 318693
acugcuccagcuugacaau

SEQ ID NO: 582124 - RNA, 19 nt, Artificial Sequence
  Description of Artificial Sequence: Synthetic oligonucleotide
  Antisense strand to SEQ ID NO: 582123
auugucaagcuggagcagu

SEQ ID NO: 582125 - RNA, 19 nt, Artificial Sequence
  Description of Artificial Sequence: Synthetic oligonucleotide
  Sense strand starting at position 383 of SEQ ID NO: 318693
agcugaaaguuacucaaua

SEQ ID NO: 582126 - RNA, 19 nt, Artificial Sequence
  Description of Artificial Sequence: Synthetic oligonucleotide
  Antisense strand to SEQ ID NO: 582125
uauugaguaacuuucagcu

SEQ ID NO: 582127 - RNA, 19 nt, Artificial Sequence
  Description of Artificial Sequence: Synthetic oligonucleotide
  Sense strand starting at position 384 of SEQ ID NO: 318693
gcugaaaguuacucaauac

SEQ ID NO: 582128 - RNA, 19 nt, Artificial Sequence
  Description of Artificial Sequence: Synthetic oligonucleotide
  Antisense strand to SEQ ID NO: 582127
guauugaguaacuuucagc

SEQ ID NO: 582129 - RNA, 19 nt, Artificial Sequence
  Description of Artificial Sequence: Synthetic oligonucleotide
  Sense strand starting at position 406 of SEQ ID NO: 318693
guauacaaaugcuugucaa

SEQ ID NO: 582130 - RNA, 19 nt, Artificial Sequence
  Description of Artificial Sequence: Synthetic oligonucleotide
  Antisense strand to SEQ ID NO: 582129
uugacaagcauuuguauac

SEQ ID NO: 582131 - RNA, 19 nt, Artificial Sequence
  Description of Artificial Sequence: Synthetic oligonucleotide
  Sense strand starting at position 416 of SEQ ID NO: 318693
gcuugucaauaauagugaa

SEQ ID NO: 582132 - RNA, 19 nt, Artificial Sequence
  Description of Artificial Sequence: Synthetic oligonucleotide
  Antisense strand to SEQ ID NO: 582131
uucacuauuauugacaagc

SEQ ID NO: 582133 - RNA, 19 nt, Artificial Sequence
  Description of Artificial Sequence: Synthetic oligonucleotide
  Sense strand starting at position 419 of SEQ ID NO: 318693
ugucaauaauagugaaaga

SEQ ID NO: 582134 - RNA, 19 nt, Artificial Sequence
  Description of Artificial Sequence: Synthetic oligonucleotide
  Antisense strand to SEQ ID NO: 582133
ucuuucacuauuauugaca

SEQ ID NO: 582135 - RNA, 19 nt, Artificial Sequence
  Description of Artificial Sequence: Synthetic oligonucleotide
  Sense strand starting at position 542 of SEQ ID NO: 318693
gugucaggguuucuacuua

SEQ ID NO: 582136 - RNA, 19 nt, Artificial Sequence
  Description of Artificial Sequence: Synthetic oligonucleotide
  Antisense strand to SEQ ID NO: 582135
uaaguagaaacccugacac

SEQ ID NO: 582137 - RNA, 19 nt, Artificial Sequence
  Description of Artificial Sequence: Synthetic oligonucleotide
  Sense strand starting at position 574 of SEQ ID NO: 318693
ccggcacuguucuaaaggu

SEQ ID NO: 582138 - RNA, 19 nt, Artificial Sequence
  Description of Artificial Sequence: Synthetic oligonucleotide
  Antisense strand to SEQ ID NO: 582137
accuuuagaacagugccgg

SEQ ID NO: 582139 - RNA, 19 nt, Artificial Sequence
  Description of Artificial Sequence: Synthetic oligonucleotide
  Sense strand starting at position 652 of SEQ ID NO: 318693
gcucccguccuauagauga

SEQ ID NO: 582140 - RNA, 19 nt, Artificial Sequence
  Description of Artificial Sequence: Synthetic oligonucleotide
  Antisense strand to SEQ ID NO: 582139
ucaucuauaggacgggagc

SEQ ID NO: 582141 - RNA, 19 nt, Artificial Sequence
  Description of Artificial Sequence: Synthetic oligonucleotide
  Sense strand starting at position 654 of SEQ ID NO: 318693
ucccguccuauagaugaga

SEQ ID NO: 582142 - RNA, 19 nt, Artificial Sequence
  Description of Artificial Sequence: Synthetic oligonucleotide
  Antisense strand to SEQ ID NO: 582141
ucucaucuauaggacggga

SEQ ID NO: 582143 - RNA, 19 nt, Artificial Sequence
  Description of Artificial Sequence: Synthetic oligonucleotide
  Sense strand starting at position 656 of SEQ ID NO: 318693
ccguccuauagaugagaaa

SEQ ID NO: 582144 - RNA, 19 nt, Artificial Sequence
  Description of Artificial Sequence: Synthetic oligonucleotide
  Antisense strand to SEQ ID NO: 582143
uuucucaucuauaggacgg

SEQ ID NO: 582145 - RNA, 19 nt, Artificial Sequence
  Description of Artificial Sequence: Synthetic oligonucleotide
  Sense strand starting at position 687 of SEQ ID NO: 318693
ggacuucccagcuguguga

SEQ ID NO: 582146 - RNA, 19 nt, Artificial Sequence
  Description of Artificial Sequence: Synthetic oligonucleotide
  Antisense strand to SEQ ID NO: 582145
ucacacagcugggaagucc

SEQ ID NO: 582147 - RNA, 19 nt, Artificial Sequence
  Description of Artificial Sequence: Synthetic oligonucleotide
  Sense strand starting at position 754 of SEQ ID NO: 318693
ccgaaacaguuuccagaau

SEQ ID NO: 582148 - RNA, 19 nt, Artificial Sequence
  Description of Artificial Sequence: Synthetic oligonucleotide
  Antisense strand to SEQ ID NO: 582147
auucuggaaacuguuucgg

SEQ ID NO: 582149 - RNA, 19 nt, Artificial Sequence
  Description of Artificial Sequence: Synthetic oligonucleotide
  Sense strand starting at position 778 of SEQ ID NO: 318693
gccgcauuuggcgaaugaa

SEQ ID NO: 582150 - RNA, 19 nt, Artificial Sequence
  Description of Artificial Sequence: Synthetic oligonucleotide
  Antisense strand to SEQ ID NO: 582149
uucauucgccaaaugcggc

SEQ ID NO: 582151 - RNA, 19 nt, Artificial Sequence
  Description of Artificial Sequence: Synthetic oligonucleotide
  Sense strand starting at position 931 of SEQ ID NO: 318693
gcgcguuccgcucuagaag

SEQ ID NO: 582152 - RNA, 19 nt, Artificial Sequence
  Description of Artificial Sequence: Synthetic oligonucleotide
  Antisense strand to SEQ ID NO: 582151
cuucuagagcggaacgcgc

SEQ ID NO: 582153 - RNA, 19 nt, Artificial Sequence
  Description of Artificial Sequence: Synthetic oligonucleotide
  Sense strand starting at position 942 of SEQ ID NO: 318693
ucuagaaggcucuggcaca

SEQ ID NO: 582154 - RNA, 19 nt, Artificial Sequence
  Description of Artificial Sequence: Synthetic oligonucleotide
  Antisense strand to SEQ ID NO: 582153
ugugccagagccuucuaga

SEQ ID NO: 582155 - RNA, 19 nt, Artificial Sequence
  Description of Artificial Sequence: Synthetic oligonucleotide
  Sense strand starting at position 1902 of SEQ ID NO: 318693
ggguucuugcuggaaaccu

SEQ ID NO: 582156 - RNA, 19 nt, Artificial Sequence
  Description of Artificial Sequence: Synthetic oligonucleotide
  Antisense strand to SEQ ID NO: 582155
agguuuccagcaagaaccc

SEQ ID NO: 582157 - RNA, 19 nt, Artificial Sequence
  Description of Artificial Sequence: Synthetic oligonucleotide
  Sense strand starting at position 2289 of SEQ ID NO: 318693
ucuagacaaucucagagaa

SEQ ID NO: 582158 - RNA, 19 nt, Artificial Sequence
  Description of Artificial Sequence: Synthetic oligonucleotide
  Antisense strand to SEQ ID NO: 582157
uucucugagauugucuaga

SEQ ID NO: 582159 - RNA, 19 nt, Artificial Sequence
  Description of Artificial Sequence: Synthetic oligonucleotide
  Sense strand starting at position 2380 of SEQ ID NO: 318693
ccaugcauuugagaggcaa

SEQ ID NO: 582160 - RNA, 19 nt, Artificial Sequence
  Description of Artificial Sequence: Synthetic oligonucleotide
  Antisense strand to SEQ ID NO: 582159
uugccucucaaaugcaugg

SEQ ID NO: 582161 - RNA, 19 nt, Artificial Sequence
  Description of Artificial Sequence: Synthetic oligonucleotide
  Sense strand starting at position 2463 of SEQ ID NO: 318693
aggagaucacgccgguuau

SEQ ID NO: 582162 - RNA, 19 nt, Artificial Sequence
  Description of Artificial Sequence: Synthetic oligonucleotide
  Antisense strand to SEQ ID NO: 582161
auaaccggcgugaucuccu

SEQ ID NO: 582163 - RNA, 19 nt, Artificial Sequence
  Description of Artificial Sequence: Synthetic oligonucleotide
  Sense strand starting at position 2464 of SEQ ID NO: 318693
ggagaucacgccgguuaug

SEQ ID NO: 582164 - RNA, 19 nt, Artificial Sequence
  Description of Artificial Sequence: Synthetic oligonucleotide
  Antisense strand to SEQ ID NO: 582163
cauaaccggcgugaucucc

SEQ ID NO: 582165 - RNA, 19 nt, Artificial Sequence
  Description of Artificial Sequence: Synthetic oligonucleotide
  Sense strand starting at position 2594 of SEQ ID NO: 318693
aagcgaguggucucguuca

SEQ ID NO: 582166 - RNA, 19 nt, Artificial Sequence
  Description of Artificial Sequence: Synthetic oligonucleotide
  Antisense strand to SEQ ID NO: 582165
ugaacgagaccacucgcuu

SEQ ID NO: 582167 - RNA, 19 nt, Artificial Sequence
  Description of Artificial Sequence: Synthetic oligonucleotide
  Sense strand starting at position 2650 of SEQ ID NO: 318693
cgaagcagguuucgagaau

SEQ ID NO: 582168 - RNA, 19 nt, Artificial Sequence
  Description of Artificial Sequence: Synthetic oligonucleotide
  Antisense strand to SEQ ID NO: 582167
auucucgaaaccugcuucg

SEQ ID NO: 582169 - RNA, 19 nt, Artificial Sequence
  Description of Artificial Sequence: Synthetic oligonucleotide
  Sense strand starting at position 2651 of SEQ ID NO: 318693
gaagcagguuucgagaauu

SEQ ID NO: 582170 - RNA, 19 nt, Artificial Sequence
  Description of Artificial Sequence: Synthetic oligonucleotide
  Antisense strand to SEQ ID NO: 582169
aauucucgaaaccugcuuc

SEQ ID NO: 582171 - RNA, 19 nt, Artificial Sequence
  Description of Artificial Sequence: Synthetic oligonucleotide
  Sense strand starting at position 2662 of SEQ ID NO: 318693
cgagaauuaauucguagau

SEQ ID NO: 582172 - RNA, 19 nt, Artificial Sequence
  Description of Artificial Sequence: Synthetic oligonucleotide
  Antisense strand to SEQ ID NO: 582171
aucuacgaauuaauucucg

SEQ ID NO: 582173 - RNA, 19 nt, Artificial Sequence
  Description of Artificial Sequence: Synthetic oligonucleotide
  Sense strand starting at position 2663 of SEQ ID NO: 318693
gagaauuaauucguagaug

SEQ ID NO: 582174 - RNA, 19 nt, Artificial Sequence
  Description of Artificial Sequence: Synthetic oligonucleotide
  Antisense strand to SEQ ID NO: 582173
caucuacgaauuaauucuc

SEQ ID NO: 582175 - RNA, 19 nt, Artificial Sequence
  Description of Artificial Sequence: Synthetic oligonucleotide
  Sense strand starting at position 2664 of SEQ ID NO: 318693
agaauuaauucguagaugg

SEQ ID NO: 582176 - RNA, 19 nt, Artificial Sequence
  Description of Artificial Sequence: Synthetic oligonucleotide
  Antisense strand to SEQ ID NO: 582175
ccaucuacgaauuaauucu

SEQ ID NO: 582177 - RNA, 19 nt, Artificial Sequence
  Description of Artificial Sequence: Synthetic oligonucleotide
  Sense strand starting at position 2681 of SEQ ID NO: 318693
ggacgaagauucuacacau

SEQ ID NO: 582178 - RNA, 19 nt, Artificial Sequence
  Description of Artificial Sequence: Synthetic oligonucleotide
  Antisense strand to SEQ ID NO: 582177
auguguagaaucuucgucc

SEQ ID NO: 582179 - RNA, 19 nt, Artificial Sequence
  Description of Artificial Sequence: Synthetic oligonucleotide
  Sense strand starting at position 2698 of SEQ ID NO: 318693
auccuucgccuuugaucaa

SEQ ID NO: 582180 - RNA, 19 nt, Artificial Sequence
  Description of Artificial Sequence: Synthetic oligonucleotide
  Antisense strand to SEQ ID NO: 582179
uugaucaaaggcgaaggau

SEQ ID NO: 582181 - RNA, 19 nt, Artificial Sequence
  Description of Artificial Sequence: Synthetic oligonucleotide
  Sense strand starting at position 2701 of SEQ ID NO: 318693
cuucgccuuugaucaacaa

SEQ ID NO: 582182 - RNA, 19 nt, Artificial Sequence
  Description of Artificial Sequence: Synthetic oligonucleotide
  Antisense strand to SEQ ID NO: 582181
uuguugaucaaaggcgaag

SEQ ID NO: 582183 - RNA, 19 nt, Artificial Sequence
  Description of Artificial Sequence: Synthetic oligonucleotide
  Sense strand starting at position 2702 of SEQ ID NO: 318693
uucgccuuugaucaacaaa

SEQ ID NO: 582184 - RNA, 19 nt, Artificial Sequence
  Description of Artificial Sequence: Synthetic oligonucleotide
  Antisense strand to SEQ ID NO: 582183
uuuguugaucaaaggcgaa

SEQ ID NO: 582185 - RNA, 19 nt, Artificial Sequence
  Description of Artificial Sequence: Synthetic oligonucleotide
  Sense strand starting at position 2705 of SEQ ID NO: 318693
gccuuugaucaacaaacgu

SEQ ID NO: 582186 - RNA, 19 nt, Artificial Sequence
  Description of Artificial Sequence: Synthetic oligonucleotide
  Antisense strand to SEQ ID NO: 582185
acguuuguugaucaaaggc

SEQ ID NO: 582187 - RNA, 19 nt, Artificial Sequence
  Description of Artificial Sequence: Synthetic oligonucleotide
  Sense strand starting at position 3039 of SEQ ID NO: 318693
ucaagauccugaggagugu

SEQ ID NO: 582188 - RNA, 19 nt, Artificial Sequence
  Description of Artificial Sequence: Synthetic oligonucleotide
  Antisense strand to SEQ ID NO: 582187
acacuccucaggaucuuga

SEQ ID NO: 582189 - RNA, 19 nt, Artificial Sequence
  Description of Artificial Sequence: Synthetic oligonucleotide
  Sense strand starting at position 3052 of SEQ ID NO: 318693
gaguguaggacggauucua

SEQ ID NO: 582190 - RNA, 19 nt, Artificial Sequence
  Description of Artificial Sequence: Synthetic oligonucleotide
  Antisense strand to SEQ ID NO: 582189
uagaauccguccuacacuc

SEQ ID NO: 582191 - RNA, 19 nt, Artificial Sequence
  Description of Artificial Sequence: Synthetic oligonucleotide
  Sense strand starting at position 3085 of SEQ ID NO: 318693
gcacgaguugccugggaac

SEQ ID NO: 582192 - RNA, 19 nt, Artificial Sequence
  Description of Artificial Sequence: Synthetic oligonucleotide
  Antisense strand to SEQ ID NO: 582191
guucccaggcaacucgugc

SEQ ID NO: 582193 - RNA, 19 nt, Artificial Sequence
  Description of Artificial Sequence: Synthetic oligonucleotide
  Sense strand starting at position 3301 of SEQ ID NO: 318693
ucaacuccgcuuuaaagaa

SEQ ID NO: 582194 - RNA, 19 nt, Artificial Sequence
  Description of Artificial Sequence: Synthetic oligonucleotide
  Antisense strand to SEQ ID NO: 582193
uucuuuaaagcggaguuga

SEQ ID NO: 582195 - RNA, 19 nt, Artificial Sequence
  Description of Artificial Sequence: Synthetic oligonucleotide
  Sense strand starting at position 3546 of SEQ ID NO: 318693
gcuggagucagcugagauu

SEQ ID NO: 582196 - RNA, 19 nt, Artificial Sequence
  Description of Artificial Sequence: Synthetic oligonucleotide
  Antisense strand to SEQ ID NO: 582195
aaucucagcugacuccagc

SEQ ID NO: 582197 - RNA, 19 nt, Artificial Sequence
  Description of Artificial Sequence: Synthetic oligonucleotide
  Sense strand starting at position 3778 of SEQ ID NO: 318693
uucagaguguugguguaag

SEQ ID NO: 582198 - RNA, 19 nt, Artificial Sequence
  Description of Artificial Sequence: Synthetic oligonucleotide
  Antisense strand to SEQ ID NO: 582197
cuuacaccaacacucugaa

SEQ ID NO: 582199 - RNA, 19 nt, Artificial Sequence
  Description of Artificial Sequence: Synthetic oligonucleotide
  Sense strand starting at position 70 of SEQ ID NO: 318694
agccauagucaugggauag

SEQ ID NO: 582200 - RNA, 19 nt, Artificial Sequence
  Description of Artificial Sequence: Synthetic oligonucleotide
  Antisense strand to SEQ ID NO: 582199
cuaucccaugacuauggcu

SEQ ID NO: 582201 - RNA, 19 nt, Artificial Sequence
  Description of Artificial Sequence: Synthetic oligonucleotide
  Sense strand starting at position 71 of SEQ ID NO: 318694
gccauagucaugggauaga

SEQ ID NO: 582202 - RNA, 19 nt, Artificial Sequence
  Description of Artificial Sequence: Synthetic oligonucleotide
  Antisense strand to SEQ ID NO: 582201
ucuaucccaugacuauggc

SEQ ID NO: 582203 - RNA, 19 nt, Artificial Sequence
  Description of Artificial Sequence: Synthetic oligonucleotide
  Sense strand starting at position 191 of SEQ ID NO: 318694
gguuaaucugagcagugua

SEQ ID NO: 582204 - RNA, 19 nt, Artificial Sequence
  Description of Artificial Sequence: Synthetic oligonucleotide
  Antisense strand to SEQ ID NO: 582203
uacacugcucagauuaacc

SEQ ID NO: 582205 - RNA, 19 nt, Artificial Sequence
  Description of Artificial Sequence: Synthetic oligonucleotide
  Sense strand starting at position 206 of SEQ ID NO: 318694
uguacagucuggguaaaga

SEQ ID NO: 582206 - RNA, 19 nt, Artificial Sequence
  Description of Artificial Sequence: Synthetic oligonucleotide
  Antisense strand to SEQ ID NO: 582205
ucuuuacccagacuguaca

SEQ ID NO: 582207 - RNA, 19 nt, Artificial Sequence
  Description of Artificial Sequence: Synthetic oligonucleotide
  Sense strand starting at position 228 of SEQ ID NO: 318694
uuuacaugccaugauguua

SEQ ID NO: 582208 - RNA, 19 nt, Artificial Sequence
  Description of Artificial Sequence: Synthetic oligonucleotide
  Antisense strand to SEQ ID NO: 582207
uaacaucauggcauguaaa

SEQ ID NO: 582209 - RNA, 19 nt, Artificial Sequence
  Description of Artificial Sequence: Synthetic oligonucleotide
  Sense strand starting at position 249 of SEQ ID NO: 318694
aauguaucaucaguguuag

SEQ ID NO: 582210 - RNA, 19 nt, Artificial Sequence
  Description of Artificial Sequence: Synthetic oligonucleotide
  Antisense strand to SEQ ID NO: 582209
cuaacacugaugauacauu

SEQ ID NO: 582211 - RNA, 19 nt, Artificial Sequence
  Description of Artificial Sequence: Synthetic oligonucleotide
  Sense strand starting at position 250 of SEQ ID NO: 318694
auguaucaucaguguuaga

SEQ ID NO: 582212 - RNA, 19 nt, Artificial Sequence
  Description of Artificial Sequence: Synthetic oligonucleotide
  Antisense strand to SEQ ID NO: 582211
ucuaacacugaugauacau

SEQ ID NO: 582213 - RNA, 19 nt, Artificial Sequence
  Description of Artificial Sequence: Synthetic oligonucleotide
  Sense strand starting at position 591 of SEQ ID NO: 318694
ugauuaauaugguucuaac

SEQ ID NO: 582214 - RNA, 19 nt, Artificial Sequence
  Description of Artificial Sequence: Synthetic oligonucleotide
  Antisense strand to SEQ ID NO: 582213
guuagaaccauauuaauca

SEQ ID NO: 582215 - RNA, 19 nt, Artificial Sequence
  Description of Artificial Sequence: Synthetic oligonucleotide
  Sense strand starting at position 834 of SEQ ID NO: 318694
agguuucuguucucacaga

SEQ ID NO: 582216 - RNA, 19 nt, Artificial Sequence
  Description of Artificial Sequence: Synthetic oligonucleotide
  Antisense strand to SEQ ID NO: 582215
ucugugagaacagaaaccu

SEQ ID NO: 582217 - RNA, 19 nt, Artificial Sequence
  Description of Artificial Sequence: Synthetic oligonucleotide
  Sense strand starting at position 851 of SEQ ID NO: 318694
gagguuacauucuuucgga

SEQ ID NO: 582218 - RNA, 19 nt, Artificial Sequence
  Description of Artificial Sequence: Synthetic oligonucleotide
  Antisense strand to SEQ ID NO: 582217
uccgaaagaauguaaccuc

SEQ ID NO: 582219 - RNA, 19 nt, Artificial Sequence
  Description of Artificial Sequence: Synthetic oligonucleotide
  Sense strand starting at position 898 of SEQ ID NO: 318694
acacuauuacaaugaucga

SEQ ID NO: 582220 - RNA, 19 nt, Artificial Sequence
  Description of Artificial Sequence: Synthetic oligonucleotide
  Antisense strand to SEQ ID NO: 582219
ucgaucauuguaauagugu

SEQ ID NO: 582221 - RNA, 19 nt, Artificial Sequence
  Description of Artificial Sequence: Synthetic oligonucleotide
  Sense strand starting at position 901 of SEQ ID NO: 318694
cuauuacaaugaucgauga

SEQ ID NO: 582222 - RNA, 19 nt, Artificial Sequence
  Description of Artificial Sequence: Synthetic oligonucleotide
  Antisense strand to SEQ ID NO: 582221
ucaucgaucauuguaauag

SEQ ID NO: 582223 - RNA, 19 nt, Artificial Sequence
  Description of Artificial Sequence: Synthetic oligonucleotide
  Sense strand starting at position 1033 of SEQ ID NO: 318694
caaggcuuagagugacagu

SEQ ID NO: 582224 - RNA, 19 nt, Artificial Sequence
  Description of Artificial Sequence: Synthetic oligonucleotide
  Antisense strand to SEQ ID NO: 582223
acugucacucuaagccuug

SEQ ID NO: 582225 - RNA, 19 nt, Artificial Sequence
  Description of Artificial Sequence: Synthetic oligonucleotide
  Sense strand starting at position 1099 of SEQ ID NO: 318694
uuucccuaacgguaauuaa

SEQ ID NO: 582226 - RNA, 19 nt, Artificial Sequence
  Description of Artificial Sequence: Synthetic oligonucleotide
  Antisense strand to SEQ ID NO: 582225
uuaauuaccguuagggaaa

SEQ ID NO: 582227 - RNA, 19 nt, Artificial Sequence
  Description of Artificial Sequence: Synthetic oligonucleotide
  Sense strand starting at position 1143 of SEQ ID NO: 318694
guauucuaccuagagugaa

SEQ ID NO: 582228 - RNA, 19 nt, Artificial Sequence
  Description of Artificial Sequence: Synthetic oligonucleotide
  Antisense strand to SEQ ID NO: 582227
uucacucuagguagaauac

SEQ ID NO: 582229 - RNA, 19 nt, Artificial Sequence
  Description of Artificial Sequence: Synthetic oligonucleotide
  Sense strand starting at position 1189 of SEQ ID NO: 318694
acguaauagcgugcauguu

SEQ ID NO: 582230 - RNA, 19 nt, Artificial Sequence
  Description of Artificial Sequence: Synthetic oligonucleotide
  Antisense strand to SEQ ID NO: 582229
aacaugcacgcuauuacgu

SEQ ID NO: 582231 - RNA, 19 nt, Artificial Sequence
  Description of Artificial Sequence: Synthetic oligonucleotide
  Sense strand starting at position 1214 of SEQ ID NO: 318694
ucucauuaagaaugcaaga

SEQ ID NO: 582232 - RNA, 19 nt, Artificial Sequence
  Description of Artificial Sequence: Synthetic oligonucleotide
  Antisense strand to SEQ ID NO: 582231
ucuugcauucuuaaugaga

SEQ ID NO: 582233 - RNA, 19 nt, Artificial Sequence
  Description of Artificial Sequence: Synthetic oligonucleotide
  Sense strand starting at position 1231 of SEQ ID NO: 318694
gagguagagguuugucuua

SEQ ID NO: 582234 - RNA, 19 nt, Artificial Sequence
  Description of Artificial Sequence: Synthetic oligonucleotide
  Antisense strand to SEQ ID NO: 582233
uaagacaaaccucuaccuc

SEQ ID NO: 582235 - RNA, 19 nt, Artificial Sequence
  Description of Artificial Sequence: Synthetic oligonucleotide
  Sense strand starting at position 1315 of SEQ ID NO: 318694
cugagauguucucuagcag

SEQ ID NO: 582236 - RNA, 19 nt, Artificial Sequence
  Description of Artificial Sequence: Synthetic oligonucleotide
  Antisense strand to SEQ ID NO: 582235
cugcuagagaacaucucag

SEQ ID NO: 582237 - RNA, 19 nt, Artificial Sequence
  Description of Artificial Sequence: Synthetic oligonucleotide
  Sense strand starting at position 1316 of SEQ ID NO: 318694
ugagauguucucuagcagu

SEQ ID NO: 582238 - RNA, 19 nt, Artificial Sequence
  Description of Artificial Sequence: Synthetic oligonucleotide
  Antisense strand to SEQ ID NO: 582237
acugcuagagaacaucuca

SEQ ID NO: 582239 - RNA, 19 nt, Artificial Sequence
  Description of Artificial Sequence: Synthetic oligonucleotide
  Sense strand starting at position 1448 of SEQ ID NO: 318694
aagggaagcccgugguaaa

SEQ ID NO: 582240 - RNA, 19 nt, Artificial Sequence
  Description of Artificial Sequence: Synthetic oligonucleotide
  Antisense strand to SEQ ID NO: 582239
uuuaccacgggcuucccuu

SEQ ID NO: 582241 - RNA, 19 nt, Artificial Sequence
  Description of Artificial Sequence: Synthetic oligonucleotide
  Sense strand starting at position 1481 of SEQ ID NO: 318694
cggacugcuccaggacaga

SEQ ID NO: 582242 - RNA, 19 nt, Artificial Sequence
  Description of Artificial Sequence: Synthetic oligonucleotide
  Antisense strand to SEQ ID NO: 582241
ucuguccuggagcaguccg

SEQ ID NO: 582243 - RNA, 19 nt, Artificial Sequence
  Description of Artificial Sequence: Synthetic oligonucleotide
  Sense strand starting at position 2204 of SEQ ID NO: 318694
uagcauuaugauuacguuu

SEQ ID NO: 582244 - RNA, 19 nt, Artificial Sequence
  Description of Artificial Sequence: Synthetic oligonucleotide
  Antisense strand to SEQ ID NO: 582243
aaacguaaucauaaugcua

SEQ ID NO: 582245 - RNA, 19 nt, Artificial Sequence
  Description of Artificial Sequence: Synthetic oligonucleotide
  Sense strand starting at position 2367 of SEQ ID NO: 318694
gggcaacuuggauaagugu

SEQ ID NO: 582246 - RNA, 19 nt, Artificial Sequence
  Description of Artificial Sequence: Synthetic oligonucleotide
  Antisense strand to SEQ ID NO: 582245
acacuuauccaaguugccc

SEQ ID NO: 582247 - RNA, 19 nt, Artificial Sequence
  Description of Artificial Sequence: Synthetic oligonucleotide
  Sense strand starting at position 2381 of SEQ ID NO: 318694
aguguagauuccucccaga

SEQ ID NO: 582248 - RNA, 19 nt, Artificial Sequence
  Description of Artificial Sequence: Synthetic oligonucleotide
  Antisense strand to SEQ ID NO: 582247
ucugggaggaaucuacacu

SEQ ID NO: 582249 - RNA, 19 nt, Artificial Sequence
  Description of Artificial Sequence: Synthetic oligonucleotide
  Sense strand starting at position 2436 of SEQ ID NO: 318694
ggauuaagucaguauuccu

SEQ ID NO: 582250 - RNA, 19 nt, Artificial Sequence
  Description of Artificial Sequence: Synthetic oligonucleotide
  Antisense strand to SEQ ID NO: 582249
aggaauacugacuuaaucc

SEQ ID NO: 582251 - RNA, 19 nt, Artificial Sequence
  Description of Artificial Sequence: Synthetic oligonucleotide
  Sense strand starting at position 2439 of SEQ ID NO: 318694
uuaagucaguauuccuuga

SEQ ID NO: 582252 - RNA, 19 nt, Artificial Sequence
  Description of Artificial Sequence: Synthetic oligonucleotide
  Antisense strand to SEQ ID NO: 582251
ucaaggaauacugacuuaa

SEQ ID NO: 582253 - RNA, 19 nt, Artificial Sequence
  Description of Artificial Sequence: Synthetic oligonucleotide
  Sense strand starting at position 2539 of SEQ ID NO: 318694
agcugagugccuuaggaug

SEQ ID NO: 582254 - RNA, 19 nt, Artificial Sequence
  Description of Artificial Sequence: Synthetic oligonucleotide
  Antisense strand to SEQ ID NO: 582253
cauccuaaggcacucagcu

SEQ ID NO: 582255 - RNA, 19 nt, Artificial Sequence
  Description of Artificial Sequence: Synthetic oligonucleotide
  Sense strand starting at position 2566 of SEQ ID NO: 318694
gacugauuccagugaagug

SEQ ID NO: 582256 - RNA, 19 nt, Artificial Sequence
  Description of Artificial Sequence: Synthetic oligonucleotide
  Antisense strand to SEQ ID NO: 582255
cacuucacuggaaucaguc

SEQ ID NO: 582257 - RNA, 19 nt, Artificial Sequence
  Description of Artificial Sequence: Synthetic oligonucleotide
  Sense strand starting at position 2641 of SEQ ID NO: 318694
gggaacaaucucugagcau

SEQ ID NO: 582258 - RNA, 19 nt, Artificial Sequence
  Description of Artificial Sequence: Synthetic oligonucleotide
  Antisense strand to SEQ ID NO: 582257
augcucagagauuguuccc

SEQ ID NO: 582259 - RNA, 19 nt, Artificial Sequence
  Description of Artificial Sequence: Synthetic oligonucleotide
  Sense strand starting at position 2653 of SEQ ID NO: 318694
ugagcaugugaacauuaac

SEQ ID NO: 582260 - RNA, 19 nt, Artificial Sequence
  Description of Artificial Sequence: Synthetic oligonucleotide
  Antisense strand to SEQ ID NO: 582259
guuaauguucacaugcuca

SEQ ID NO: 582261 - RNA, 19 nt, Artificial Sequence
  Description of Artificial Sequence: Synthetic oligonucleotide
  Sense strand starting at position 2656 of SEQ ID NO: 318694
gcaugugaacauuaacuaa

SEQ ID NO: 582262 - RNA, 19 nt, Artificial Sequence
  Description of Artificial Sequence: Synthetic oligonucleotide
  Antisense strand to SEQ ID NO: 582261
uuaguuaauguucacaugc

SEQ ID NO: 582263 - RNA, 19 nt, Artificial Sequence
  Description of Artificial Sequence: Synthetic oligonucleotide
  Sense strand starting at position 2802 of SEQ ID NO: 318694
ugacuaacguaacuauacu

SEQ ID NO: 582264 - RNA, 19 nt, Artificial Sequence
  Description of Artificial Sequence: Synthetic oligonucleotide
  Antisense strand to SEQ ID NO: 582263
aguauaguuacguuaguca

SEQ ID NO: 582265 - RNA, 19 nt, Artificial Sequence
  Description of Artificial Sequence: Synthetic oligonucleotide
  Sense strand starting at position 2856 of SEQ ID NO: 318694
auguaaauguacuugaaag

SEQ ID NO: 582266 - RNA, 19 nt, Artificial Sequence
  Description of Artificial Sequence: Synthetic oligonucleotide
  Antisense strand to SEQ ID NO: 582265
cuuucaaguacauuuacau

SEQ ID NO: 582267 - RNA, 19 nt, Artificial Sequence
  Description of Artificial Sequence: Synthetic oligonucleotide
  Sense strand starting at position 2878 of SEQ ID NO: 318694
uaaagagggucugucucua

SEQ ID NO: 582268 - RNA, 19 nt, Artificial Sequence
  Description of Artificial Sequence: Synthetic oligonucleotide
  Antisense strand to SEQ ID NO: 582267
uagagacagacccucuuua

SEQ ID NO: 582269 - RNA, 19 nt, Artificial Sequence
  Description of Artificial Sequence: Synthetic oligonucleotide
  Sense strand starting at position 2882 of SEQ ID NO: 318694
gagggucugucucuacaca

SEQ ID NO: 582270 - RNA, 19 nt, Artificial Sequence
  Description of Artificial Sequence: Synthetic oligonucleotide
  Antisense strand to SEQ ID NO: 582269
uguguagagacagacccuc

SEQ ID NO: 582271 - RNA, 19 nt, Artificial Sequence
  Description of Artificial Sequence: Synthetic oligonucleotide
  Sense strand starting at position 2960 of SEQ ID NO: 318694
gucacuuguuagcuaauuu

SEQ ID NO: 582272 - RNA, 19 nt, Artificial Sequence
  Description of Artificial Sequence: Synthetic oligonucleotide
  Antisense strand to SEQ ID NO: 582271
aaauuagcuaacaagugac

SEQ ID NO: 582273 - RNA, 19 nt, Artificial Sequence
  Description of Artificial Sequence: Synthetic oligonucleotide
  Sense strand starting at position 3097 of SEQ ID NO: 318694
gagagcuuguuauuuaguc

SEQ ID NO: 582274 - RNA, 19 nt, Artificial Sequence
  Description of Artificial Sequence: Synthetic oligonucleotide
  Antisense strand to SEQ ID NO: 582273
gacuaaauaacaagcucuc

SEQ ID NO: 582275 - RNA, 19 nt, Artificial Sequence
  Description of Artificial Sequence: Synthetic oligonucleotide
  Sense strand starting at position 3102 of SEQ ID NO: 318694
cuuguuauuuaguccuuga

SEQ ID NO: 582276 - RNA, 19 nt, Artificial Sequence
  Description of Artificial Sequence: Synthetic oligonucleotide
  Antisense strand to SEQ ID NO: 582275
ucaaggacuaaauaacaag

SEQ ID NO: 582277 - RNA, 19 nt, Artificial Sequence
  Description of Artificial Sequence: Synthetic oligonucleotide
  Sense strand starting at position 3210 of SEQ ID NO: 318694
gugaacaaguugcuaauua

SEQ ID NO: 582278 - RNA, 19 nt, Artificial Sequence
  Description of Artificial Sequence: Synthetic oligonucleotide
  Antisense strand to SEQ ID NO: 582277
uaauuagcaacuuguucac

SEQ ID NO: 582279 - RNA, 19 nt, Artificial Sequence
  Description of Artificial Sequence: Synthetic oligonucleotide
  Sense strand starting at position 216 of SEQ ID NO: 318695
agaccugguuaagcaaaua

SEQ ID NO: 582280 - RNA, 19 nt, Artificial Sequence
  Description of Artificial Sequence: Synthetic oligonucleotide
  Antisense strand to SEQ ID NO: 582279
uauuugcuuaaccaggucu

SEQ ID NO: 582281 - RNA, 19 nt, Artificial Sequence
  Description of Artificial Sequence: Synthetic oligonucleotide
  Sense strand starting at position 381 of SEQ ID NO: 318695
caaagacaugcggaaguua

SEQ ID NO: 582282 - RNA, 19 nt, Artificial Sequence
  Description of Artificial Sequence: Synthetic oligonucleotide
  Antisense strand to SEQ ID NO: 582281
uaacuuccgcaugucuuug

SEQ ID NO: 582283 - RNA, 19 nt, Artificial Sequence
  Description of Artificial Sequence: Synthetic oligonucleotide
  Sense strand starting at position 948 of SEQ ID NO: 318695
ucuuguguggcauacgaaa

SEQ ID NO: 582284 - RNA, 19 nt, Artificial Sequence
  Description of Artificial Sequence: Synthetic oligonucleotide
  Antisense strand to SEQ ID NO: 582283
uuucguaugccacacaaga

SEQ ID NO: 582285 - RNA, 19 nt, Artificial Sequence
  Description of Artificial Sequence: Synthetic oligonucleotide
  Sense strand starting at position 1065 of SEQ ID NO: 318695
ccaugaagaaagugugacu

SEQ ID NO: 582286 - RNA, 19 nt, Artificial Sequence
  Description of Artificial Sequence: Synthetic oligonucleotide
  Antisense strand to SEQ ID NO: 582285
agucacacuuucuucaugg

SEQ ID NO: 582287 - RNA, 19 nt, Artificial Sequence
  Description of Artificial Sequence: Synthetic oligonucleotide
  Sense strand starting at position 1115 of SEQ ID NO: 318695
ucauguucuugaccuugaa

SEQ ID NO: 582288 - RNA, 19 nt, Artificial Sequence
  Description of Artificial Sequence: Synthetic oligonucleotide
  Antisense strand to SEQ ID NO: 582287
uucaaggucaagaacauga

SEQ ID NO: 582289 - RNA, 19 nt, Artificial Sequence
  Description of Artificial Sequence: Synthetic oligonucleotide
  Sense strand starting at position 1118 of SEQ ID NO: 318695
uguucuugaccuugaagca

SEQ ID NO: 582290 - RNA, 19 nt, Artificial Sequence
  Description of Artificial Sequence: Synthetic oligonucleotide
  Antisense strand to SEQ ID NO: 582289
ugcuucaaggucaagaaca

SEQ ID NO: 582291 - RNA, 19 nt, Artificial Sequence
  Description of Artificial Sequence: Synthetic oligonucleotide
  Sense strand starting at position 1168 of SEQ ID NO: 318695
ucgguuguuggauaaguaa

SEQ ID NO: 582292 - RNA, 19 nt, Artificial Sequence
  Description of Artificial Sequence: Synthetic oligonucleotide
  Antisense strand to SEQ ID NO: 582291
uuacuuauccaacaaccga

SEQ ID NO: 582293 - RNA, 19 nt, Artificial Sequence
  Description of Artificial Sequence: Synthetic oligonucleotide
  Sense strand starting at position 1171 of SEQ ID NO: 318695
guuguuggauaaguaaauu

SEQ ID NO: 582294 - RNA, 19 nt, Artificial Sequence
  Description of Artificial Sequence: Synthetic oligonucleotide
  Antisense strand to SEQ ID NO: 582293
aauuuacuuauccaacaac

SEQ ID NO: 582295 - RNA, 19 nt, Artificial Sequence
  Description of Artificial Sequence: Synthetic oligonucleotide
  Sense strand starting at position 1321 of SEQ ID NO: 318695
aagauaguuucgguagcca

SEQ ID NO: 582296 - RNA, 19 nt, Artificial Sequence
  Description of Artificial Sequence: Synthetic oligonucleotide
  Antisense strand to SEQ ID NO: 582295
uggcuaccgaaacuaucuu

SEQ ID NO: 582297 - RNA, 19 nt, Artificial Sequence
  Description of Artificial Sequence: Synthetic oligonucleotide
  Sense strand starting at position 2130 of SEQ ID NO: 318695
gugacauggcuuuaguauc

SEQ ID NO: 582298 - RNA, 19 nt, Artificial Sequence
  Description of Artificial Sequence: Synthetic oligonucleotide
  Antisense strand to SEQ ID NO: 582297
gauacuaaagccaugucac

SEQ ID NO: 582299 - RNA, 19 nt, Artificial Sequence
  Description of Artificial Sequence: Synthetic oligonucleotide
  Sense strand starting at position 2185 of SEQ ID NO: 318695
uucccaagagcuugcugaa

SEQ ID NO: 582300 - RNA, 19 nt, Artificial Sequence
  Description of Artificial Sequence: Synthetic oligonucleotide
  Antisense strand to SEQ ID NO: 582299
uucagcaagcucuugggaa

SEQ ID NO: 582301 - RNA, 19 nt, Artificial Sequence
  Description of Artificial Sequence: Synthetic oligonucleotide
  Sense strand starting at position 2204 of SEQ ID NO: 318695
gaagguguaccgcaguaga

SEQ ID NO: 582302 - RNA, 19 nt, Artificial Sequence
  Description of Artificial Sequence: Synthetic oligonucleotide
  Antisense strand to SEQ ID NO: 582301
ucuacugcgguacaccuuc

SEQ ID NO: 582303 - RNA, 19 nt, Artificial Sequence
  Description of Artificial Sequence: Synthetic oligonucleotide
  Sense strand starting at position 2234 of SEQ ID NO: 318695
agacaaauccaguggcuca

SEQ ID NO: 582304 - RNA, 19 nt, Artificial Sequence
  Description of Artificial Sequence: Synthetic oligonucleotide
  Antisense strand to SEQ ID NO: 582303
ugagccacuggauuugucu

SEQ ID NO: 582305 - RNA, 19 nt, Artificial Sequence
  Description of Artificial Sequence: Synthetic oligonucleotide
  Sense strand starting at position 2252 of SEQ ID NO: 318695
auguguacagccgaauaaa

SEQ ID NO: 582306 - RNA, 19 nt, Artificial Sequence
  Description of Artificial Sequence: Synthetic oligonucleotide
  Antisense strand to SEQ ID NO: 582305
uuuauucggcuguacacau

SEQ ID NO: 582307 - RNA, 19 nt, Artificial Sequence
  Description of Artificial Sequence: Synthetic oligonucleotide
  Sense strand starting at position 2279 of SEQ ID NO: 318695
acauuuacugugugcuaua

SEQ ID NO: 582308 - RNA, 19 nt, Artificial Sequence
  Description of Artificial Sequence: Synthetic oligonucleotide
  Antisense strand to SEQ ID NO: 582307
uauagcacacaguaaaugu

SEQ ID NO: 582309 - RNA, 19 nt, Artificial Sequence
  Description of Artificial Sequence: Synthetic oligonucleotide
  Sense strand starting at position 2284 of SEQ ID NO: 318695
uacugugugcuauaguaca

SEQ ID NO: 582310 - RNA, 19 nt, Artificial Sequence
  Description of Artificial Sequence: Synthetic oligonucleotide
  Antisense strand to SEQ ID NO: 582309
uguacuauagcacacagua

SEQ ID NO: 582311 - RNA, 19 nt, Artificial Sequence
  Description of Artificial Sequence: Synthetic oligonucleotide
  Sense strand starting at position 2309 of SEQ ID NO: 318695
gugcuaaggcuuuacauaa

SEQ ID NO: 582312 - RNA, 19 nt, Artificial Sequence
  Description of Artificial Sequence: Synthetic oligonucleotide
  Antisense strand to SEQ ID NO: 582311
uuauguaaagccuuagcac

SEQ ID NO: 582313 - RNA, 19 nt, Artificial Sequence
  Description of Artificial Sequence: Synthetic oligonucleotide
  Sense strand starting at position 2376 of SEQ ID NO: 318695
agcucugaaugauuaggua

SEQ ID NO: 582314 - RNA, 19 nt, Artificial Sequence
  Description of Artificial Sequence: Synthetic oligonucleotide
  Antisense strand to SEQ ID NO: 582313
uaccuaaucauucagagcu

SEQ ID NO: 582315 - RNA, 19 nt, Artificial Sequence
  Description of Artificial Sequence: Synthetic oligonucleotide
  Sense strand starting at position 2444 of SEQ ID NO: 318695
gaccguaugcuauauuaac

SEQ ID NO: 582316 - RNA, 19 nt, Artificial Sequence
  Description of Artificial Sequence: Synthetic oligonucleotide
  Antisense strand to SEQ ID NO: 582315
guuaauauagcauacgguc

SEQ ID NO: 582317 - RNA, 19 nt, Artificial Sequence
  Description of Artificial Sequence: Synthetic oligonucleotide
  Sense strand starting at position 2535 of SEQ ID NO: 318695
aagggcugugguuaucuau

SEQ ID NO: 582318 - RNA, 19 nt, Artificial Sequence
  Description of Artificial Sequence: Synthetic oligonucleotide
  Antisense strand to SEQ ID NO: 582317
auagauaaccacagcccuu

SEQ ID NO: 582319 - RNA, 19 nt, Artificial Sequence
  Description of Artificial Sequence: Synthetic oligonucleotide
  Sense strand starting at position 2565 of SEQ ID NO: 318695
aucagaauuaccuggguag

SEQ ID NO: 582320 - RNA, 19 nt, Artificial Sequence
  Description of Artificial Sequence: Synthetic oligonucleotide
  Antisense strand to SEQ ID NO: 582319
cuacccagguaauucugau

SEQ ID NO: 582321 - RNA, 19 nt, Artificial Sequence
  Description of Artificial Sequence: Synthetic oligonucleotide
  Sense strand starting at position 2638 of SEQ ID NO: 318695
gugguugggacguaggaau

SEQ ID NO: 582322 - RNA, 19 nt, Artificial Sequence
  Description of Artificial Sequence: Synthetic oligonucleotide
  Antisense strand to SEQ ID NO: 582321
auuccuacgucccaaccac

SEQ ID NO: 582323 - RNA, 19 nt, Artificial Sequence
  Description of Artificial Sequence: Synthetic oligonucleotide
  Sense strand starting at position 2682 of SEQ ID NO: 318695
ugauucugaugaguagcaa

SEQ ID NO: 582324 - RNA, 19 nt, Artificial Sequence
  Description of Artificial Sequence: Synthetic oligonucleotide
  Antisense strand to SEQ ID NO: 582323
uugcuacucaucagaauca

SEQ ID NO: 582325 - RNA, 19 nt, Artificial Sequence
  Description of Artificial Sequence: Synthetic oligonucleotide
  Sense strand starting at position 2710 of SEQ ID NO: 318695
aucacuggucuaggaacua

SEQ ID NO: 582326 - RNA, 19 nt, Artificial Sequence
  Description of Artificial Sequence: Synthetic oligonucleotide
  Antisense strand to SEQ ID NO: 582325
uaguuccuagaccagugau

SEQ ID NO: 582327 - RNA, 19 nt, Artificial Sequence
  Description of Artificial Sequence: Synthetic oligonucleotide
  Sense strand starting at position 2806 of SEQ ID NO: 318695
uaaauuguuguagggaauc

SEQ ID NO: 582328 - RNA, 19 nt, Artificial Sequence
  Description of Artificial Sequence: Synthetic oligonucleotide
  Antisense strand to SEQ ID NO: 582327
gauucccuacaacaauuua

SEQ ID NO: 582329 - RNA, 19 nt, Artificial Sequence
  Description of Artificial Sequence: Synthetic oligonucleotide
  Sense strand starting at position 3186 of SEQ ID NO: 318695
agggacuuaucuuuaagua

SEQ ID NO: 582330 - RNA, 19 nt, Artificial Sequence
  Description of Artificial Sequence: Synthetic oligonucleotide
  Antisense strand to SEQ ID NO: 582329
uacuuaaagauaagucccu

SEQ ID NO: 582331 - RNA, 19 nt, Artificial Sequence
  Description of Artificial Sequence: Synthetic oligonucleotide
  Sense strand starting at position 3231 of SEQ ID NO: 318695
ucaguucuggaaggaauau

SEQ ID NO: 582332 - RNA, 19 nt, Artificial Sequence
  Description of Artificial Sequence: Synthetic oligonucleotide
  Antisense strand to SEQ ID NO: 582331
auauuccuuccagaacuga

SEQ ID NO: 582333 - RNA, 19 nt, Artificial Sequence
  Description of Artificial Sequence: Synthetic oligonucleotide
  Sense strand starting at position 3259 of SEQ ID NO: 318695
agacaaugugguugcccaa

SEQ ID NO: 582334 - RNA, 19 nt, Artificial Sequence
  Description of Artificial Sequence: Synthetic oligonucleotide
  Antisense strand to SEQ ID NO: 582333
uugggcaaccacauugucu

SEQ ID NO: 582335 - RNA, 19 nt, Artificial Sequence
  Description of Artificial Sequence: Synthetic oligonucleotide
  Sense strand starting at position 3262 of SEQ ID NO: 318695
caaugugguugcccaaaua

SEQ ID NO: 582336 - RNA, 19 nt, Artificial Sequence
  Description of Artificial Sequence: Synthetic oligonucleotide
  Antisense strand to SEQ ID NO: 582335
uauuugggcaaccacauug

SEQ ID NO: 582337 - RNA, 19 nt, Artificial Sequence
  Description of Artificial Sequence: Synthetic oligonucleotide
  Sense strand starting at position 3352 of SEQ ID NO: 318695
gccacauuacucugaugua

SEQ ID NO: 582338 - RNA, 19 nt, Artificial Sequence
  Description of Artificial Sequence: Synthetic oligonucleotide
  Antisense strand to SEQ ID NO: 582337
uacaucagaguaauguggc

SEQ ID NO: 582339 - RNA, 19 nt, Artificial Sequence
  Description of Artificial Sequence: Synthetic oligonucleotide
  Sense strand starting at position 3361 of SEQ ID NO: 318695
cucugauguaagggacauu

SEQ ID NO: 582340 - RNA, 19 nt, Artificial Sequence
  Description of Artificial Sequence: Synthetic oligonucleotide
  Antisense strand to SEQ ID NO: 582339
aaugucccuuacaucagag

SEQ ID NO: 582341 - RNA, 19 nt, Artificial Sequence
  Description of Artificial Sequence: Synthetic oligonucleotide
  Sense strand starting at position 3471 of SEQ ID NO: 318695
guauauuauugggcacaca

SEQ ID NO: 582342 - RNA, 19 nt, Artificial Sequence
  Description of Artificial Sequence: Synthetic oligonucleotide
  Antisense strand to SEQ ID NO: 582341
ugugugcccaauaauauac

SEQ ID NO: 582343 - RNA, 19 nt, Artificial Sequence
  Description of Artificial Sequence: Synthetic oligonucleotide
  Sense strand starting at position 3546 of SEQ ID NO: 318695
ggagcagagucuuuguaug

SEQ ID NO: 582344 - RNA, 19 nt, Artificial Sequence
  Description of Artificial Sequence: Synthetic oligonucleotide
  Antisense strand to SEQ ID NO: 582343
cauacaaagacucugcucc

SEQ ID NO: 582345 - RNA, 19 nt, Artificial Sequence
  Description of Artificial Sequence: Synthetic oligonucleotide
  Sense strand starting at position 3569 of SEQ ID NO: 318695
ugaaguuacguugguauaa

SEQ ID NO: 582346 - RNA, 19 nt, Artificial Sequence
  Description of Artificial Sequence: Synthetic oligonucleotide
  Antisense strand to SEQ ID NO: 582345
uuauaccaacguaacuuca

SEQ ID NO: 582347 - RNA, 19 nt, Artificial Sequence
  Description of Artificial Sequence: Synthetic oligonucleotide
  Sense strand starting at position 3570 of SEQ ID NO: 318695
gaaguuacguugguauaaa

SEQ ID NO: 582348 - RNA, 19 nt, Artificial Sequence
  Description of Artificial Sequence: Synthetic oligonucleotide
  Antisense strand to SEQ ID NO: 582347
uuuauaccaacguaacuuc

SEQ ID NO: 582349 - RNA, 19 nt, Artificial Sequence
  Description of Artificial Sequence: Synthetic oligonucleotide
  Sense strand starting at position 3600 of SEQ ID NO: 318695
uuguuauaacguuaggaug

SEQ ID NO: 582350 - RNA, 19 nt, Artificial Sequence
  Description of Artificial Sequence: Synthetic oligonucleotide
  Antisense strand to SEQ ID NO: 582349
cauccuaacguuauaacaa

SEQ ID NO: 582351 - RNA, 19 nt, Artificial Sequence
  Description of Artificial Sequence: Synthetic oligonucleotide
  Sense strand starting at position 3624 of SEQ ID NO: 318695
uguaauucucaugguaaac

SEQ ID NO: 582352 - RNA, 19 nt, Artificial Sequence
  Description of Artificial Sequence: Synthetic oligonucleotide
  Antisense strand to SEQ ID NO: 582351
guuuaccaugagaauuaca

SEQ ID NO: 582353 - RNA, 19 nt, Artificial Sequence
  Description of Artificial Sequence: Synthetic oligonucleotide
  Sense strand starting at position 3891 of SEQ ID NO: 318695
acuauaugcugucuaugaa

SEQ ID NO: 582354 - RNA, 19 nt, Artificial Sequence
  Description of Artificial Sequence: Synthetic oligonucleotide
  Antisense strand to SEQ ID NO: 582353
uucauagacagcauauagu

SEQ ID NO: 582355 - RNA, 19 nt, Artificial Sequence
  Description of Artificial Sequence: Synthetic oligonucleotide
  Sense strand starting at position 3892 of SEQ ID NO: 318695
cuauaugcugucuaugaaa

SEQ ID NO: 582356 - RNA, 19 nt, Artificial Sequence
  Description of Artificial Sequence: Synthetic oligonucleotide
  Antisense strand to SEQ ID NO: 582355
uuucauagacagcauauag

SEQ ID NO: 582357 - RNA, 19 nt, Artificial Sequence
  Description of Artificial Sequence: Synthetic oligonucleotide
  Sense strand starting at position 3894 of SEQ ID NO: 318695
auaugcugucuaugaaaga

SEQ ID NO: 582358 - RNA, 19 nt, Artificial Sequence
  Description of Artificial Sequence: Synthetic oligonucleotide
  Antisense strand to SEQ ID NO: 582357
ucuuucauagacagcauau

SEQ ID NO: 582359 - RNA, 19 nt, Artificial Sequence
  Description of Artificial Sequence: Synthetic oligonucleotide
  Sense strand starting at position 5 of SEQ ID NO: 318696
agucauauaacggacuagu

SEQ ID NO: 582360 - RNA, 19 nt, Artificial Sequence
  Description of Artificial Sequence: Synthetic oligonucleotide
  Antisense strand to SEQ ID NO: 582359
acuaguccguuauaugacu

SEQ ID NO: 582361 - RNA, 19 nt, Artificial Sequence
  Description of Artificial Sequence: Synthetic oligonucleotide
  Sense strand starting at position 16 of SEQ ID NO: 318696
ggacuaguaagcuacgauc

SEQ ID NO: 582362 - RNA, 19 nt, Artificial Sequence
  Description of Artificial Sequence: Synthetic oligonucleotide
  Antisense strand to SEQ ID NO: 582361
gaucguagcuuacuagucc

SEQ ID NO: 582363 - RNA, 19 nt, Artificial Sequence
  Description of Artificial Sequence: Synthetic oligonucleotide
  Sense strand starting at position 22 of SEQ ID NO: 318696
guaagcuacgaucagcauu

SEQ ID NO: 582364 - RNA, 19 nt, Artificial Sequence
  Description of Artificial Sequence: Synthetic oligonucleotide
  Antisense strand to SEQ ID NO: 582363
aaugcugaucguagcuuac

SEQ ID NO: 582365 - RNA, 19 nt, Artificial Sequence
  Description of Artificial Sequence: Synthetic oligonucleotide
  Sense strand starting at position 42 of SEQ ID NO: 318696
uguguacauguacacaaua

SEQ ID NO: 582366 - RNA, 19 nt, Artificial Sequence
  Description of Artificial Sequence: Synthetic oligonucleotide
  Antisense strand to SEQ ID NO: 582365
uauuguguacauguacaca

SEQ ID NO: 582367 - RNA, 19 nt, Artificial Sequence
  Description of Artificial Sequence: Synthetic oligonucleotide
  Sense strand starting at position 80 of SEQ ID NO: 318696
uguaucacagagcaucaua

SEQ ID NO: 582368 - RNA, 19 nt, Artificial Sequence
  Description of Artificial Sequence: Synthetic oligonucleotide
  Antisense strand to SEQ ID NO: 582367
uaugaugcucugugauaca

SEQ ID NO: 582369 - RNA, 19 nt, Artificial Sequence
  Description of Artificial Sequence: Synthetic oligonucleotide
  Sense strand starting at position 111 of SEQ ID NO: 318696
gguauuucucugugaggca

SEQ ID NO: 582370 - RNA, 19 nt, Artificial Sequence
  Description of Artificial Sequence: Synthetic oligonucleotide
  Antisense strand to SEQ ID NO: 582369
ugccucacagagaaauacc

SEQ ID NO: 582371 - RNA, 19 nt, Artificial Sequence
  Description of Artificial Sequence: Synthetic oligonucleotide
  Sense strand starting at position 188 of SEQ ID NO: 318696
auggacauaugguuaccaa

SEQ ID NO: 582372 - RNA, 19 nt, Artificial Sequence
  Description of Artificial Sequence: Synthetic oligonucleotide
  Antisense strand to SEQ ID NO: 582371
uugguaaccauauguccau

SEQ ID NO: 582373 - RNA, 19 nt, Artificial Sequence
  Description of Artificial Sequence: Synthetic oligonucleotide
  Sense strand starting at position 307 of SEQ ID NO: 318696
ccuggaaacucagagauag

SEQ ID NO: 582374 - RNA, 19 nt, Artificial Sequence
  Description of Artificial Sequence: Synthetic oligonucleotide
  Antisense strand to SEQ ID NO: 582373
cuaucucugaguuuccagg

SEQ ID NO: 582375 - RNA, 19 nt, Artificial Sequence
  Description of Artificial Sequence: Synthetic oligonucleotide
  Sense strand starting at position 802 of SEQ ID NO: 318696
gggagugucucacucuauu

SEQ ID NO: 582376 - RNA, 19 nt, Artificial Sequence
  Description of Artificial Sequence: Synthetic oligonucleotide
  Antisense strand to SEQ ID NO: 582375
aauagagugagacacuccc

SEQ ID NO: 582377 - RNA, 19 nt, Artificial Sequence
  Description of Artificial Sequence: Synthetic oligonucleotide
  Sense strand starting at position 1109 of SEQ ID NO: 318696
gccugucucgggcacaaua

SEQ ID NO: 582378 - RNA, 19 nt, Artificial Sequence
  Description of Artificial Sequence: Synthetic oligonucleotide
  Antisense strand to SEQ ID NO: 582377
uauugugcccgagacaggc

SEQ ID NO: 582379 - RNA, 19 nt, Artificial Sequence
  Description of Artificial Sequence: Synthetic oligonucleotide
  Sense strand starting at position 1111 of SEQ ID NO: 318696
cugucucgggcacaauaua

SEQ ID NO: 582380 - RNA, 19 nt, Artificial Sequence
  Description of Artificial Sequence: Synthetic oligonucleotide
  Antisense strand to SEQ ID NO: 582379
uauauugugcccgagacag

SEQ ID NO: 582381 - RNA, 19 nt, Artificial Sequence
  Description of Artificial Sequence: Synthetic oligonucleotide
  Sense strand starting at position 1122 of SEQ ID NO: 318696
acaauauaauaauccggua

SEQ ID NO: 582382 - RNA, 19 nt, Artificial Sequence
  Description of Artificial Sequence: Synthetic oligonucleotide
  Antisense strand to SEQ ID NO: 582381
uaccggauuauuauauugu

SEQ ID NO: 582383 - RNA, 19 nt, Artificial Sequence
  Description of Artificial Sequence: Synthetic oligonucleotide
  Sense strand starting at position 1127 of SEQ ID NO: 318696
auaauaauccgguaggagu

SEQ ID NO: 582384 - RNA, 19 nt, Artificial Sequence
  Description of Artificial Sequence: Synthetic oligonucleotide
  Antisense strand to SEQ ID NO: 582383
acuccuaccggauuauuau

SEQ ID NO: 582385 - RNA, 19 nt, Artificial Sequence
  Description of Artificial Sequence: Synthetic oligonucleotide
  Sense strand starting at position 1448 of SEQ ID NO: 318696
auaauaaucggugggaaau

SEQ ID NO: 582386 - RNA, 19 nt, Artificial Sequence
  Description of Artificial Sequence: Synthetic oligonucleotide
  Antisense strand to SEQ ID NO: 582385
auuucccaccgauuauuau

SEQ ID NO: 582387 - RNA, 19 nt, Artificial Sequence
  Description of Artificial Sequence: Synthetic oligonucleotide
  Sense strand starting at position 1449 of SEQ ID NO: 318696
uaauaaucggugggaaaua

SEQ ID NO: 582388 - RNA, 19 nt, Artificial Sequence
  Description of Artificial Sequence: Synthetic oligonucleotide
  Antisense strand to SEQ ID NO: 582387
uauuucccaccgauuauua

SEQ ID NO: 582389 - RNA, 19 nt, Artificial Sequence
  Description of Artificial Sequence: Synthetic oligonucleotide
  Sense strand starting at position 1536 of SEQ ID NO: 318696
aacagauuggugugauaga

SEQ ID NO: 582390 - RNA, 19 nt, Artificial Sequence
  Description of Artificial Sequence: Synthetic oligonucleotide
  Antisense strand to SEQ ID NO: 582389
ucuaucacaccaaucuguu

SEQ ID NO: 582391 - RNA, 19 nt, Artificial Sequence
  Description of Artificial Sequence: Synthetic oligonucleotide
  Sense strand starting at position 1549 of SEQ ID NO: 318696
gauagaagagccgaauguu

SEQ ID NO: 582392 - RNA, 19 nt, Artificial Sequence
  Description of Artificial Sequence: Synthetic oligonucleotide
  Antisense strand to SEQ ID NO: 582391
aacauucggcucuucuauc

SEQ ID NO: 582393 - RNA, 19 nt, Artificial Sequence
  Description of Artificial Sequence: Synthetic oligonucleotide
  Sense strand starting at position 1552 of SEQ ID NO: 318696
agaagagccgaauguuacu

SEQ ID NO: 582394 - RNA, 19 nt, Artificial Sequence
  Description of Artificial Sequence: Synthetic oligonucleotide
  Antisense strand to SEQ ID NO: 582393
aguaacauucggcucuucu

SEQ ID NO: 582395 - RNA, 19 nt, Artificial Sequence
  Description of Artificial Sequence: Synthetic oligonucleotide
  Sense strand starting at position 1557 of SEQ ID NO: 318696
agccgaauguuacugaaua

SEQ ID NO: 582396 - RNA, 19 nt, Artificial Sequence
  Description of Artificial Sequence: Synthetic oligonucleotide
  Antisense strand to SEQ ID NO: 582395
uauucaguaacauucggcu

SEQ ID NO: 582397 - RNA, 19 nt, Artificial Sequence
  Description of Artificial Sequence: Synthetic oligonucleotide
  Sense strand starting at position 2009 of SEQ ID NO: 318696
ggacguucuuccucuuaca

SEQ ID NO: 582398 - RNA, 19 nt, Artificial Sequence
  Description of Artificial Sequence: Synthetic oligonucleotide
  Antisense strand to SEQ ID NO: 582397
uguaagaggaagaacgucc

SEQ ID NO: 582399 - RNA, 19 nt, Artificial Sequence
  Description of Artificial Sequence: Synthetic oligonucleotide
  Sense strand starting at position 2118 of SEQ ID NO: 318696
cccguuugggcuagguaga

SEQ ID NO: 582400 - RNA, 19 nt, Artificial Sequence
  Description of Artificial Sequence: Synthetic oligonucleotide
  Antisense strand to SEQ ID NO: 582399
ucuaccuagcccaaacggg

SEQ ID NO: 582401 - RNA, 19 nt, Artificial Sequence
  Description of Artificial Sequence: Synthetic oligonucleotide
  Sense strand starting at position 2135 of SEQ ID NO: 318696
gacggugcgaccgucaauu

SEQ ID NO: 582402 - RNA, 19 nt, Artificial Sequence
  Description of Artificial Sequence: Synthetic oligonucleotide
  Antisense strand to SEQ ID NO: 582401
aauugacggucgcaccguc

SEQ ID NO: 582403 - RNA, 19 nt, Artificial Sequence
  Description of Artificial Sequence: Synthetic oligonucleotide
  Sense strand starting at position 2157 of SEQ ID NO: 318696
ucccuagucacgucacgua

SEQ ID NO: 582404 - RNA, 19 nt, Artificial Sequence
  Description of Artificial Sequence: Synthetic oligonucleotide
  Antisense strand to SEQ ID NO: 582403
uacgugacgugacuaggga

SEQ ID NO: 582405 - RNA, 19 nt, Artificial Sequence
  Description of Artificial Sequence: Synthetic oligonucleotide
  Sense strand starting at position 2169 of SEQ ID NO: 318696
ucacguaaaguugagaacu

SEQ ID NO: 582406 - RNA, 19 nt, Artificial Sequence
  Description of Artificial Sequence: Synthetic oligonucleotide
  Antisense strand to SEQ ID NO: 582405
aguucucaacuuuacguga

SEQ ID NO: 582407 - RNA, 19 nt, Artificial Sequence
  Description of Artificial Sequence: Synthetic oligonucleotide
  Sense strand starting at position 2179 of SEQ ID NO: 318696
uugagaacugcguguaaau

SEQ ID NO: 582408 - RNA, 19 nt, Artificial Sequence
  Description of Artificial Sequence: Synthetic oligonucleotide
  Antisense strand to SEQ ID NO: 582407
auuuacacgcaguucucaa

SEQ ID NO: 582409 - RNA, 19 nt, Artificial Sequence
  Description of Artificial Sequence: Synthetic oligonucleotide
  Sense strand starting at position 2181 of SEQ ID NO: 318696
gagaacugcguguaaaucu

SEQ ID NO: 582410 - RNA, 19 nt, Artificial Sequence
  Description of Artificial Sequence: Synthetic oligonucleotide
  Antisense strand to SEQ ID NO: 582409
agauuuacacgcaguucuc

SEQ ID NO: 582411 - RNA, 19 nt, Artificial Sequence
  Description of Artificial Sequence: Synthetic oligonucleotide
  Sense strand starting at position 2225 of SEQ ID NO: 318696
gcuuaaugcccuugggaua

SEQ ID NO: 582412 - RNA, 19 nt, Artificial Sequence
  Description of Artificial Sequence: Synthetic oligonucleotide
  Antisense strand to SEQ ID NO: 582411
uaucccaagggcauuaagc

SEQ ID NO: 582413 - RNA, 19 nt, Artificial Sequence
  Description of Artificial Sequence: Synthetic oligonucleotide
  Sense strand starting at position 2472 of SEQ ID NO: 318696
agugcucaguuaccaagaa

SEQ ID NO: 582414 - RNA, 19 nt, Artificial Sequence
  Description of Artificial Sequence: Synthetic oligonucleotide
  Antisense strand to SEQ ID NO: 582413
uucuugguaacugagcacu

SEQ ID NO: 582415 - RNA, 19 nt, Artificial Sequence
  Description of Artificial Sequence: Synthetic oligonucleotide
  Sense strand starting at position 2977 of SEQ ID NO: 318696
ccuugaacucuugacgugu

SEQ ID NO: 582416 - RNA, 19 nt, Artificial Sequence
  Description of Artificial Sequence: Synthetic oligonucleotide
  Antisense strand to SEQ ID NO: 582415
acacgucaagaguucaagg

SEQ ID NO: 582417 - RNA, 19 nt, Artificial Sequence
  Description of Artificial Sequence: Synthetic oligonucleotide
  Sense strand starting at position 3302 of SEQ ID NO: 318696
uuuagugacucuccagaug

SEQ ID NO: 582418 - RNA, 19 nt, Artificial Sequence
  Description of Artificial Sequence: Synthetic oligonucleotide
  Antisense strand to SEQ ID NO: 582417
caucuggagagucacuaaa

SEQ ID NO: 582419 - RNA, 19 nt, Artificial Sequence
  Description of Artificial Sequence: Synthetic oligonucleotide
  Sense strand starting at position 3393 of SEQ ID NO: 318696
gugucauuugucugaaauu

SEQ ID NO: 582420 - RNA, 19 nt, Artificial Sequence
  Description of Artificial Sequence: Synthetic oligonucleotide
  Antisense strand to SEQ ID NO: 582419
aauuucagacaaaugacac

SEQ ID NO: 582421 - RNA, 19 nt, Artificial Sequence
  Description of Artificial Sequence: Synthetic oligonucleotide
  Sense strand starting at position 3394 of SEQ ID NO: 318696
ugucauuugucugaaauua

SEQ ID NO: 582422 - RNA, 19 nt, Artificial Sequence
  Description of Artificial Sequence: Synthetic oligonucleotide
  Antisense strand to SEQ ID NO: 582421
uaauuucagacaaaugaca

SEQ ID NO: 582423 - RNA, 19 nt, Artificial Sequence
  Description of Artificial Sequence: Synthetic oligonucleotide
  Sense strand starting at position 3402 of SEQ ID NO: 318696
gucugaaauuagccauucu

SEQ ID NO: 582424 - RNA, 19 nt, Artificial Sequence
  Description of Artificial Sequence: Synthetic oligonucleotide
  Antisense strand to SEQ ID NO: 582423
agaauggcuaauuucagac

SEQ ID NO: 582425 - RNA, 19 nt, Artificial Sequence
  Description of Artificial Sequence: Synthetic oligonucleotide
  Sense strand starting at position 3493 of SEQ ID NO: 318696
cuguccuaccaaggugaau

SEQ ID NO: 582426 - RNA, 19 nt, Artificial Sequence
  Description of Artificial Sequence: Synthetic oligonucleotide
  Antisense strand to SEQ ID NO: 582425
auucaccuugguaggacag

SEQ ID NO: 582427 - RNA, 19 nt, Artificial Sequence
  Description of Artificial Sequence: Synthetic oligonucleotide
  Sense strand starting at position 3531 of SEQ ID NO: 318696
uggcuaaggugacuuucua

SEQ ID NO: 582428 - RNA, 19 nt, Artificial Sequence
  Description of Artificial Sequence: Synthetic oligonucleotide
  Antisense strand to SEQ ID NO: 582427
uagaaagucaccuuagcca

SEQ ID NO: 582429 - RNA, 19 nt, Artificial Sequence
  Description of Artificial Sequence: Synthetic oligonucleotide
  Sense strand starting at position 3535 of SEQ ID NO: 318696
uaaggugacuuucuagcuu

SEQ ID NO: 582430 - RNA, 19 nt, Artificial Sequence
  Description of Artificial Sequence: Synthetic oligonucleotide
  Antisense strand to SEQ ID NO: 582429
aagcuagaaagucaccuua

SEQ ID NO: 582431 - RNA, 19 nt, Artificial Sequence
  Description of Artificial Sequence: Synthetic oligonucleotide
  Sense strand starting at position 3725 of SEQ ID NO: 318696
uauucugggccuuggcaaa

SEQ ID NO: 582432 - RNA, 19 nt, Artificial Sequence
  Description of Artificial Sequence: Synthetic oligonucleotide
  Antisense strand to SEQ ID NO: 582431
uuugccaaggcccagaaua

SEQ ID NO: 582433 - RNA, 19 nt, Artificial Sequence
  Description of Artificial Sequence: Synthetic oligonucleotide
  Sense strand starting at position 3770 of SEQ ID NO: 318696
acccuucuggucuaggaua

SEQ ID NO: 582434 - RNA, 19 nt, Artificial Sequence
  Description of Artificial Sequence: Synthetic oligonucleotide
  Antisense strand to SEQ ID NO: 582433
uauccuagaccagaagggu

SEQ ID NO: 582435 - RNA, 19 nt, Artificial Sequence
  Description of Artificial Sequence: Synthetic oligonucleotide
  Sense strand starting at position 3855 of SEQ ID NO: 318696
accuuuagccaaggagaca

SEQ ID NO: 582436 - RNA, 19 nt, Artificial Sequence
  Description of Artificial Sequence: Synthetic oligonucleotide
  Antisense strand to SEQ ID NO: 582435
ugucuccuuggcuaaaggu

SEQ ID NO: 582437 - RNA, 19 nt, Artificial Sequence
  Description of Artificial Sequence: Synthetic oligonucleotide
  Sense strand starting at position 3870 of SEQ ID NO: 318696
gacagugauuuguacucaa

SEQ ID NO: 582438 - RNA, 19 nt, Artificial Sequence
  Description of Artificial Sequence: Synthetic oligonucleotide
  Antisense strand to SEQ ID NO: 582437
uugaguacaaaucacuguc

SEQ ID NO: 582439 - RNA, 19 nt, Artificial Sequence
  Description of Artificial Sequence: Synthetic oligonucleotide
  Sense strand starting at position 103 of SEQ ID NO: 318697
gauccaaugucugagaaga

SEQ ID NO: 582440 - RNA, 19 nt, Artificial Sequence
  Description of Artificial Sequence: Synthetic oligonucleotide
  Antisense strand to SEQ ID NO: 582439
ucuucucagacauuggauc

SEQ ID NO: 582441 - RNA, 19 nt, Artificial Sequence
  Description of Artificial Sequence: Synthetic oligonucleotide
  Sense strand starting at position 105 of SEQ ID NO: 318697
uccaaugucugagaagaau

SEQ ID NO: 582442 - RNA, 19 nt, Artificial Sequence
  Description of Artificial Sequence: Synthetic oligonucleotide
  Antisense strand to SEQ ID NO: 582441
auucuucucagacauugga

SEQ ID NO: 582443 - RNA, 19 nt, Artificial Sequence
  Description of Artificial Sequence: Synthetic oligonucleotide
  Sense strand starting at position 116 of SEQ ID NO: 318697
agaagaauuugaggcauua

SEQ ID NO: 582444 - RNA, 19 nt, Artificial Sequence
  Description of Artificial Sequence: Synthetic oligonucleotide
  Antisense strand to SEQ ID NO: 582443
uaaugccucaaauucuucu

SEQ ID NO: 582445 - RNA, 19 nt, Artificial Sequence
  Description of Artificial Sequence: Synthetic oligonucleotide
  Sense strand starting at position 126 of SEQ ID NO: 318697
gaggcauuauaguuggcuu

SEQ ID NO: 582446 - RNA, 19 nt, Artificial Sequence
  Description of Artificial Sequence: Synthetic oligonucleotide
  Antisense strand to SEQ ID NO: 582445
aagccaacuauaaugccuc

SEQ ID NO: 582447 - RNA, 19 nt, Artificial Sequence
  Description of Artificial Sequence: Synthetic oligonucleotide
  Sense strand starting at position 128 of SEQ ID NO: 318697
ggcauuauaguuggcuuga

SEQ ID NO: 582448 - RNA, 19 nt, Artificial Sequence
  Description of Artificial Sequence: Synthetic oligonucleotide
  Antisense strand to SEQ ID NO: 582447
ucaagccaacuauaaugcc

SEQ ID NO: 582449 - RNA, 19 nt, Artificial Sequence
  Description of Artificial Sequence: Synthetic oligonucleotide
  Sense strand starting at position 129 of SEQ ID NO: 318697
gcauuauaguuggcuugaa

SEQ ID NO: 582450 - RNA, 19 nt, Artificial Sequence
  Description of Artificial Sequence: Synthetic oligonucleotide
  Antisense strand to SEQ ID NO: 582449
uucaagccaacuauaaugc

SEQ ID NO: 582451 - RNA, 19 nt, Artificial Sequence
  Description of Artificial Sequence: Synthetic oligonucleotide
  Sense strand starting at position 130 of SEQ ID NO: 318697
cauuauaguuggcuugaag

SEQ ID NO: 582452 - RNA, 19 nt, Artificial Sequence
  Description of Artificial Sequence: Synthetic oligonucleotide
  Antisense strand to SEQ ID NO: 582451
cuucaagccaacuauaaug

SEQ ID NO: 582453 - RNA, 19 nt, Artificial Sequence
  Description of Artificial Sequence: Synthetic oligonucleotide
  Sense strand starting at position 441 of SEQ ID NO: 318697
gauugaucagccugggcaa

SEQ ID NO: 582454 - RNA, 19 nt, Artificial Sequence
  Description of Artificial Sequence: Synthetic oligonucleotide
  Antisense strand to SEQ ID NO: 582453
uugcccaggcugaucaauc

SEQ ID NO: 582455 - RNA, 19 nt, Artificial Sequence
  Description of Artificial Sequence: Synthetic oligonucleotide
  Sense strand starting at position 590 of SEQ ID NO: 318697
gagcgaagaucgcacuagu

SEQ ID NO: 582456 - RNA, 19 nt, Artificial Sequence
  Description of Artificial Sequence: Synthetic oligonucleotide
  Antisense strand to SEQ ID NO: 582455
acuagugcgaucuucgcuc

SEQ ID NO: 582457 - RNA, 19 nt, Artificial Sequence
  Description of Artificial Sequence: Synthetic oligonucleotide
  Sense strand starting at position 593 of SEQ ID NO: 318697
cgaagaucgcacuaguaca

SEQ ID NO: 582458 - RNA, 19 nt, Artificial Sequence
  Description of Artificial Sequence: Synthetic oligonucleotide
  Antisense strand to SEQ ID NO: 582457
uguacuagugcgaucuucg

SEQ ID NO: 582459 - RNA, 19 nt, Artificial Sequence
  Description of Artificial Sequence: Synthetic oligonucleotide
  Sense strand starting at position 859 of SEQ ID NO: 318697
accggagaauggcgugaau

SEQ ID NO: 582460 - RNA, 19 nt, Artificial Sequence
  Description of Artificial Sequence: Synthetic oligonucleotide
  Antisense strand to SEQ ID NO: 582459
auucacgccauucuccggu

SEQ ID NO: 582461 - RNA, 19 nt, Artificial Sequence
  Description of Artificial Sequence: Synthetic oligonucleotide
  Sense strand starting at position 989 of SEQ ID NO: 318697
acuaguaugugugaacaca

SEQ ID NO: 582462 - RNA, 19 nt, Artificial Sequence
  Description of Artificial Sequence: Synthetic oligonucleotide
  Antisense strand to SEQ ID NO: 582461
uguguucacacauacuagu

SEQ ID NO: 582463 - RNA, 19 nt, Artificial Sequence
  Description of Artificial Sequence: Synthetic oligonucleotide
  Sense strand starting at position 1184 of SEQ ID NO: 318697
guaucagucuacuaaguuu

SEQ ID NO: 582464 - RNA, 19 nt, Artificial Sequence
  Description of Artificial Sequence: Synthetic oligonucleotide
  Antisense strand to SEQ ID NO: 582463
aaacuuaguagacugauac

SEQ ID NO: 582465 - RNA, 19 nt, Artificial Sequence
  Description of Artificial Sequence: Synthetic oligonucleotide
  Sense strand starting at position 1250 of SEQ ID NO: 318697
cuguguugguagggauaug

SEQ ID NO: 582466 - RNA, 19 nt, Artificial Sequence
  Description of Artificial Sequence: Synthetic oligonucleotide
  Antisense strand to SEQ ID NO: 582465
cauaucccuaccaacacag

SEQ ID NO: 582467 - RNA, 19 nt, Artificial Sequence
  Description of Artificial Sequence: Synthetic oligonucleotide
  Sense strand starting at position 1255 of SEQ ID NO: 318697
uugguagggauaugguaaa

SEQ ID NO: 582468 - RNA, 19 nt, Artificial Sequence
  Description of Artificial Sequence: Synthetic oligonucleotide
  Antisense strand to SEQ ID NO: 582467
uuuaccauaucccuaccaa

SEQ ID NO: 582469 - RNA, 19 nt, Artificial Sequence
  Description of Artificial Sequence: Synthetic oligonucleotide
  Sense strand starting at position 1299 of SEQ ID NO: 318697
uugguauaaccuggaacaa

SEQ ID NO: 582470 - RNA, 19 nt, Artificial Sequence
  Description of Artificial Sequence: Synthetic oligonucleotide
  Antisense strand to SEQ ID NO: 582469
uuguuccagguuauaccaa

SEQ ID NO: 582471 - RNA, 19 nt, Artificial Sequence
  Description of Artificial Sequence: Synthetic oligonucleotide
  Sense strand starting at position 1327 of SEQ ID NO: 318697
uggguauuacggcaauaag

SEQ ID NO: 582472 - RNA, 19 nt, Artificial Sequence
  Description of Artificial Sequence: Synthetic oligonucleotide
  Antisense strand to SEQ ID NO: 582471
cuuauugccguaauaccca

SEQ ID NO: 582473 - RNA, 19 nt, Artificial Sequence
  Description of Artificial Sequence: Synthetic oligonucleotide
  Sense strand starting at position 1330 of SEQ ID NO: 318697
guauuacggcaauaagcau

SEQ ID NO: 582474 - RNA, 19 nt, Artificial Sequence
  Description of Artificial Sequence: Synthetic oligonucleotide
  Antisense strand to SEQ ID NO: 582473
augcuuauugccguaauac

SEQ ID NO: 582475 - RNA, 19 nt, Artificial Sequence
  Description of Artificial Sequence: Synthetic oligonucleotide
  Sense strand starting at position 1562 of SEQ ID NO: 318697
ucauaacugucaucugagu

SEQ ID NO: 582476 - RNA, 19 nt, Artificial Sequence
  Description of Artificial Sequence: Synthetic oligonucleotide
  Antisense strand to SEQ ID NO: 582475
acucagaugacaguuauga

SEQ ID NO: 582477 - RNA, 19 nt, Artificial Sequence
  Description of Artificial Sequence: Synthetic oligonucleotide
  Sense strand starting at position 1567 of SEQ ID NO: 318697
acugucaucugaguugguu

SEQ ID NO: 582478 - RNA, 19 nt, Artificial Sequence
  Description of Artificial Sequence: Synthetic oligonucleotide
  Antisense strand to SEQ ID NO: 582477
aaccaacucagaugacagu

SEQ ID NO: 582479 - RNA, 19 nt, Artificial Sequence
  Description of Artificial Sequence: Synthetic oligonucleotide
  Sense strand starting at position 1571 of SEQ ID NO: 318697
ucaucugaguugguuccaa

SEQ ID NO: 582480 - RNA, 19 nt, Artificial Sequence
  Description of Artificial Sequence: Synthetic oligonucleotide
  Antisense strand to SEQ ID NO: 582479
uuggaaccaacucagauga

SEQ ID NO: 582481 - RNA, 19 nt, Artificial Sequence
  Description of Artificial Sequence: Synthetic oligonucleotide
  Sense strand starting at position 1579 of SEQ ID NO: 318697
guugguuccaacggauaac

SEQ ID NO: 582482 - RNA, 19 nt, Artificial Sequence
  Description of Artificial Sequence: Synthetic oligonucleotide
  Antisense strand to SEQ ID NO: 582481
guuauccguuggaaccaac

SEQ ID NO: 582483 - RNA, 19 nt, Artificial Sequence
  Description of Artificial Sequence: Synthetic oligonucleotide
  Sense strand starting at position 1656 of SEQ ID NO: 318697
cuacaauaauuccgaguug

SEQ ID NO: 582484 - RNA, 19 nt, Artificial Sequence
  Description of Artificial Sequence: Synthetic oligonucleotide
  Antisense strand to SEQ ID NO: 582483
caacucggaauuauuguag

SEQ ID NO: 582485 - RNA, 19 nt, Artificial Sequence
  Description of Artificial Sequence: Synthetic oligonucleotide
  Sense strand starting at position 1657 of SEQ ID NO: 318697
uacaauaauuccgaguuga

SEQ ID NO: 582486 - RNA, 19 nt, Artificial Sequence
  Description of Artificial Sequence: Synthetic oligonucleotide
  Antisense strand to SEQ ID NO: 582485
ucaacucggaauuauugua

SEQ ID NO: 582487 - RNA, 19 nt, Artificial Sequence
  Description of Artificial Sequence: Synthetic oligonucleotide
  Sense strand starting at position 1895 of SEQ ID NO: 318697
ccggacucgccucaugaaa

SEQ ID NO: 582488 - RNA, 19 nt, Artificial Sequence
  Description of Artificial Sequence: Synthetic oligonucleotide
  Antisense strand to SEQ ID NO: 582487
uuucaugaggcgaguccgg

SEQ ID NO: 582489 - RNA, 19 nt, Artificial Sequence
  Description of Artificial Sequence: Synthetic oligonucleotide
  Sense strand starting at position 2168 of SEQ ID NO: 318697
agaaguaguaucuggaguu

SEQ ID NO: 582490 - RNA, 19 nt, Artificial Sequence
  Description of Artificial Sequence: Synthetic oligonucleotide
  Antisense strand to SEQ ID NO: 582489
aacuccagauacuacuucu

SEQ ID NO: 582491 - RNA, 19 nt, Artificial Sequence
  Description of Artificial Sequence: Synthetic oligonucleotide
  Sense strand starting at position 2169 of SEQ ID NO: 318697
gaaguaguaucuggaguuu

SEQ ID NO: 582492 - RNA, 19 nt, Artificial Sequence
  Description of Artificial Sequence: Synthetic oligonucleotide
  Antisense strand to SEQ ID NO: 582491
aaacuccagauacuacuuc

SEQ ID NO: 582493 - RNA, 19 nt, Artificial Sequence
  Description of Artificial Sequence: Synthetic oligonucleotide
  Sense strand starting at position 3151 of SEQ ID NO: 318697
ccggcuauuuaguauuuga

SEQ ID NO: 582494 - RNA, 19 nt, Artificial Sequence
  Description of Artificial Sequence: Synthetic oligonucleotide
  Antisense strand to SEQ ID NO: 582493
ucaaauacuaaauagccgg

SEQ ID NO: 582495 - RNA, 19 nt, Artificial Sequence
  Description of Artificial Sequence: Synthetic oligonucleotide
  Sense strand starting at position 3158 of SEQ ID NO: 318697
uuuaguauuugagacuaca

SEQ ID NO: 582496 - RNA, 19 nt, Artificial Sequence
  Description of Artificial Sequence: Synthetic oligonucleotide
  Antisense strand to SEQ ID NO: 582495
uguagucucaaauacuaaa

SEQ ID NO: 582497 - RNA, 19 nt, Artificial Sequence
  Description of Artificial Sequence: Synthetic oligonucleotide
  Sense strand starting at position 3224 of SEQ ID NO: 318697
caggguuuacaccguguua

SEQ ID NO: 582498 - RNA, 19 nt, Artificial Sequence
  Description of Artificial Sequence: Synthetic oligonucleotide
  Antisense strand to SEQ ID NO: 582497
uaacacgguguaaacccug

SEQ ID NO: 582499 - RNA, 19 nt, Artificial Sequence
  Description of Artificial Sequence: Synthetic oligonucleotide
  Sense strand starting at position 3292 of SEQ ID NO: 318697
cccaaaguucugcgauuaa

SEQ ID NO: 582500 - RNA, 19 nt, Artificial Sequence
  Description of Artificial Sequence: Synthetic oligonucleotide
  Antisense strand to SEQ ID NO: 582499
uuaaucgcagaacuuuggg

SEQ ID NO: 582501 - RNA, 19 nt, Artificial Sequence
  Description of Artificial Sequence: Synthetic oligonucleotide
  Sense strand starting at position 3328 of SEQ ID NO: 318697
ccuggccugucagucuaaa

SEQ ID NO: 582502 - RNA, 19 nt, Artificial Sequence
  Description of Artificial Sequence: Synthetic oligonucleotide
  Antisense strand to SEQ ID NO: 582501
uuuagacugacaggccagg

SEQ ID NO: 582503 - RNA, 19 nt, Artificial Sequence
  Description of Artificial Sequence: Synthetic oligonucleotide
  Sense strand starting at position 3354 of SEQ ID NO: 318697
aggcuaaucgugugcucag

SEQ ID NO: 582504 - RNA, 19 nt, Artificial Sequence
  Description of Artificial Sequence: Synthetic oligonucleotide
  Antisense strand to SEQ ID NO: 582503
cugagcacacgauuagccu

SEQ ID NO: 582505 - RNA, 19 nt, Artificial Sequence
  Description of Artificial Sequence: Synthetic oligonucleotide
  Sense strand starting at position 3369 of SEQ ID NO: 318697
ucaggauuguccuucuuaa

SEQ ID NO: 582506 - RNA, 19 nt, Artificial Sequence
  Description of Artificial Sequence: Synthetic oligonucleotide
  Antisense strand to SEQ ID NO: 582505
uuaagaaggacaauccuga

SEQ ID NO: 582507 - RNA, 19 nt, Artificial Sequence
  Description of Artificial Sequence: Synthetic oligonucleotide
  Sense strand starting at position 3414 of SEQ ID NO: 318697
acguuuagaagguggagaa

SEQ ID NO: 582508 - RNA, 19 nt, Artificial Sequence
  Description of Artificial Sequence: Synthetic oligonucleotide
  Antisense strand to SEQ ID NO: 582507
uucuccaccuucuaaacgu

SEQ ID NO: 582509 - RNA, 19 nt, Artificial Sequence
  Description of Artificial Sequence: Synthetic oligonucleotide
  Sense strand starting at position 3427 of SEQ ID NO: 318697
ggagaagaaucucuuucuu

SEQ ID NO: 582510 - RNA, 19 nt, Artificial Sequence
  Description of Artificial Sequence: Synthetic oligonucleotide
  Antisense strand to SEQ ID NO: 582509
aagaaagagauucuucucc

SEQ ID NO: 582511 - RNA, 19 nt, Artificial Sequence
  Description of Artificial Sequence: Synthetic oligonucleotide
  Sense strand starting at position 297 of SEQ ID NO: 318698
gauuauaggcaugguucca

SEQ ID NO: 582512 - RNA, 19 nt, Artificial Sequence
  Description of Artificial Sequence: Synthetic oligonucleotide
  Antisense strand to SEQ ID NO: 582511
uggaaccaugccuauaauc

SEQ ID NO: 582513 - RNA, 19 nt, Artificial Sequence
  Description of Artificial Sequence: Synthetic oligonucleotide
  Sense strand starting at position 364 of SEQ ID NO: 318698
cuauucucaggugaauguu

SEQ ID NO: 582514 - RNA, 19 nt, Artificial Sequence
  Description of Artificial Sequence: Synthetic oligonucleotide
  Antisense strand to SEQ ID NO: 582513
aacauucaccugagaauag

SEQ ID NO: 582515 - RNA, 19 nt, Artificial Sequence
  Description of Artificial Sequence: Synthetic oligonucleotide
  Sense strand starting at position 520 of SEQ ID NO: 318698
ggcaguuagccaugugaaa

SEQ ID NO: 582516 - RNA, 19 nt, Artificial Sequence
  Description of Artificial Sequence: Synthetic oligonucleotide
  Antisense strand to SEQ ID NO: 582515
uuucacauggcuaacugcc

SEQ ID NO: 582517 - RNA, 19 nt, Artificial Sequence
  Description of Artificial Sequence: Synthetic oligonucleotide
  Sense strand starting at position 531 of SEQ ID NO: 318698
augugaaacuuccucagga

SEQ ID NO: 582518 - RNA, 19 nt, Artificial Sequence
  Description of Artificial Sequence: Synthetic oligonucleotide
  Antisense strand to SEQ ID NO: 582517
uccugaggaaguuucacau

SEQ ID NO: 582519 - RNA, 19 nt, Artificial Sequence
  Description of Artificial Sequence: Synthetic oligonucleotide
  Sense strand starting at position 532 of SEQ ID NO: 318698
ugugaaacuuccucaggag

SEQ ID NO: 582520 - RNA, 19 nt, Artificial Sequence
  Description of Artificial Sequence: Synthetic oligonucleotide
  Antisense strand to SEQ ID NO: 582519
cuccugaggaaguuucaca

SEQ ID NO: 582521 - RNA, 19 nt, Artificial Sequence
  Description of Artificial Sequence: Synthetic oligonucleotide
  Sense strand starting at position 585 of SEQ ID NO: 318698
caugcaacucagugcaaga

SEQ ID NO: 582522 - RNA, 19 nt, Artificial Sequence
  Description of Artificial Sequence: Synthetic oligonucleotide
  Antisense strand to SEQ ID NO: 582521
ucuugcacugaguugcaug

SEQ ID NO: 582523 - RNA, 19 nt, Artificial Sequence
  Description of Artificial Sequence: Synthetic oligonucleotide
  Sense strand starting at position 595 of SEQ ID NO: 318698
agugcaagaucagugugua

SEQ ID NO: 582524 - RNA, 19 nt, Artificial Sequence
  Description of Artificial Sequence: Synthetic oligonucleotide
  Antisense strand to SEQ ID NO: 582523
uacacacugaucuugcacu

SEQ ID NO: 582525 - RNA, 19 nt, Artificial Sequence
  Description of Artificial Sequence: Synthetic oligonucleotide
  Sense strand starting at position 596 of SEQ ID NO: 318698
gugcaagaucaguguguac

SEQ ID NO: 582526 - RNA, 19 nt, Artificial Sequence
  Description of Artificial Sequence: Synthetic oligonucleotide
  Antisense strand to SEQ ID NO: 582525
guacacacugaucuugcac

SEQ ID NO: 582527 - RNA, 19 nt, Artificial Sequence
  Description of Artificial Sequence: Synthetic oligonucleotide
  Sense strand starting at position 598 of SEQ ID NO: 318698
gcaagaucaguguguacaa

SEQ ID NO: 582528 - RNA, 19 nt, Artificial Sequence
  Description of Artificial Sequence: Synthetic oligonucleotide
  Antisense strand to SEQ ID NO: 582527
uuguacacacugaucuugc

SEQ ID NO: 582529 - RNA, 19 nt, Artificial Sequence
  Description of Artificial Sequence: Synthetic oligonucleotide
  Sense strand starting at position 599 of SEQ ID NO: 318698
caagaucaguguguacaaa

SEQ ID NO: 582530 - RNA, 19 nt, Artificial Sequence
  Description of Artificial Sequence: Synthetic oligonucleotide
  Antisense strand to SEQ ID NO: 582529
uuuguacacacugaucuug

SEQ ID NO: 582531 - RNA, 19 nt, Artificial Sequence
  Description of Artificial Sequence: Synthetic oligonucleotide
  Sense strand starting at position 1016 of SEQ ID NO: 318698
cccauaggauacuucugau

SEQ ID NO: 582532 - RNA, 19 nt, Artificial Sequence
  Description of Artificial Sequence: Synthetic oligonucleotide
  Antisense strand to SEQ ID NO: 582531
aucagaaguauccuauggg

SEQ ID NO: 582533 - RNA, 19 nt, Artificial Sequence
  Description of Artificial Sequence: Synthetic oligonucleotide
  Sense strand starting at position 1019 of SEQ ID NO: 318698
auaggauacuucugaugaa

SEQ ID NO: 582534 - RNA, 19 nt, Artificial Sequence
  Description of Artificial Sequence: Synthetic oligonucleotide
  Antisense strand to SEQ ID NO: 582533
uucaucagaaguauccuau

SEQ ID NO: 582535 - RNA, 19 nt, Artificial Sequence
  Description of Artificial Sequence: Synthetic oligonucleotide
  Sense strand starting at position 1022 of SEQ ID NO: 318698
ggauacuucugaugaacua

SEQ ID NO: 582536 - RNA, 19 nt, Artificial Sequence
  Description of Artificial Sequence: Synthetic oligonucleotide
  Antisense strand to SEQ ID NO: 582535
uaguucaucagaaguaucc

SEQ ID NO: 582537 - RNA, 19 nt, Artificial Sequence
  Description of Artificial Sequence: Synthetic oligonucleotide
  Sense strand starting at position 1049 of SEQ ID NO: 318698
uggccuuacugacccaaau

SEQ ID NO: 582538 - RNA, 19 nt, Artificial Sequence
  Description of Artificial Sequence: Synthetic oligonucleotide
  Antisense strand to SEQ ID NO: 582537
auuugggucaguaaggcca

SEQ ID NO: 582539 - RNA, 19 nt, Artificial Sequence
  Description of Artificial Sequence: Synthetic oligonucleotide
  Sense strand starting at position 1232 of SEQ ID NO: 318698
acaggugagucccacacaa

SEQ ID NO: 582540 - RNA, 19 nt, Artificial Sequence
  Description of Artificial Sequence: Synthetic oligonucleotide
  Antisense strand to SEQ ID NO: 582539
uugugugggacucaccugu

SEQ ID NO: 582541 - RNA, 19 nt, Artificial Sequence
  Description of Artificial Sequence: Synthetic oligonucleotide
  Sense strand starting at position 1385 of SEQ ID NO: 318698
gucagauaggccuggcaaa

SEQ ID NO: 582542 - RNA, 19 nt, Artificial Sequence
  Description of Artificial Sequence: Synthetic oligonucleotide
  Antisense strand to SEQ ID NO: 582541
uuugccaggccuaucugac

SEQ ID NO: 582543 - RNA, 19 nt, Artificial Sequence
  Description of Artificial Sequence: Synthetic oligonucleotide
  Sense strand starting at position 1472 of SEQ ID NO: 318698
ugggccagcucuccauuaa

SEQ ID NO: 582544 - RNA, 19 nt, Artificial Sequence
  Description of Artificial Sequence: Synthetic oligonucleotide
  Antisense strand to SEQ ID NO: 582543
uuaauggagagcuggccca

SEQ ID NO: 582545 - RNA, 19 nt, Artificial Sequence
  Description of Artificial Sequence: Synthetic oligonucleotide
  Sense strand starting at position 1473 of SEQ ID NO: 318698
gggccagcucuccauuaag

SEQ ID NO: 582546 - RNA, 19 nt, Artificial Sequence
  Description of Artificial Sequence: Synthetic oligonucleotide
  Antisense strand to SEQ ID NO: 582545
cuuaauggagagcuggccc

SEQ ID NO: 582547 - RNA, 19 nt, Artificial Sequence
  Description of Artificial Sequence: Synthetic oligonucleotide
  Sense strand starting at position 2081 of SEQ ID NO: 318698
uccuauacgugagauuucu

SEQ ID NO: 582548 - RNA, 19 nt, Artificial Sequence
  Description of Artificial Sequence: Synthetic oligonucleotide
  Antisense strand to SEQ ID NO: 582547
agaaaucucacguauagga

SEQ ID NO: 582549 - RNA, 19 nt, Artificial Sequence
  Description of Artificial Sequence: Synthetic oligonucleotide
  Sense strand starting at position 2087 of SEQ ID NO: 318698
acgugagauuucuuucuuc

SEQ ID NO: 582550 - RNA, 19 nt, Artificial Sequence
  Description of Artificial Sequence: Synthetic oligonucleotide
  Antisense strand to SEQ ID NO: 582549
gaagaaagaaaucucacgu

SEQ ID NO: 582551 - RNA, 19 nt, Artificial Sequence
  Description of Artificial Sequence: Synthetic oligonucleotide
  Sense strand starting at position 2198 of SEQ ID NO: 318698
ucaccuauucuuggagcua

SEQ ID NO: 582552 - RNA, 19 nt, Artificial Sequence
  Description of Artificial Sequence: Synthetic oligonucleotide
  Antisense strand to SEQ ID NO: 582551
uagcuccaagaauagguga

SEQ ID NO: 582553 - RNA, 19 nt, Artificial Sequence
  Description of Artificial Sequence: Synthetic oligonucleotide
  Sense strand starting at position 2223 of SEQ ID NO: 318698
ccucaucugucagugagag

SEQ ID NO: 582554 - RNA, 19 nt, Artificial Sequence
  Description of Artificial Sequence: Synthetic oligonucleotide
  Antisense strand to SEQ ID NO: 582553
cucucacugacagaugagg

SEQ ID NO: 582555 - RNA, 19 nt, Artificial Sequence
  Description of Artificial Sequence: Synthetic oligonucleotide
  Sense strand starting at position 2411 of SEQ ID NO: 318698
aguccaucucugcaacagu

SEQ ID NO: 582556 - RNA, 19 nt, Artificial Sequence
  Description of Artificial Sequence: Synthetic oligonucleotide
  Antisense strand to SEQ ID NO: 582555
acuguugcagagauggacu

SEQ ID NO: 582557 - RNA, 19 nt, Artificial Sequence
  Description of Artificial Sequence: Synthetic oligonucleotide
  Sense strand starting at position 2445 of SEQ ID NO: 318698
cuagcaacugcugggaaau

SEQ ID NO: 582558 - RNA, 19 nt, Artificial Sequence
  Description of Artificial Sequence: Synthetic oligonucleotide
  Antisense strand to SEQ ID NO: 582557
auuucccagcaguugcuag

SEQ ID NO: 582559 - RNA, 19 nt, Artificial Sequence
  Description of Artificial Sequence: Synthetic oligonucleotide
  Sense strand starting at position 2446 of SEQ ID NO: 318698
uagcaacugcugggaaauu

SEQ ID NO: 582560 - RNA, 19 nt, Artificial Sequence
  Description of Artificial Sequence: Synthetic oligonucleotide
  Antisense strand to SEQ ID NO: 582559
aauuucccagcaguugcua

SEQ ID NO: 582561 - RNA, 19 nt, Artificial Sequence
  Description of Artificial Sequence: Synthetic oligonucleotide
  Sense strand starting at position 2447 of SEQ ID NO: 318698
agcaacugcugggaaauuu

SEQ ID NO: 582562 - RNA, 19 nt, Artificial Sequence
  Description of Artificial Sequence: Synthetic oligonucleotide
  Antisense strand to SEQ ID NO: 582561
aaauuucccagcaguugcu

SEQ ID NO: 582563 - RNA, 19 nt, Artificial Sequence
  Description of Artificial Sequence: Synthetic oligonucleotide
  Sense strand starting at position 2491 of SEQ ID NO: 318698
uuuauaucugaggguuaca

SEQ ID NO: 582564 - RNA, 19 nt, Artificial Sequence
  Description of Artificial Sequence: Synthetic oligonucleotide
  Antisense strand to SEQ ID NO: 582563
uguaacccucagauauaaa

SEQ ID NO: 582565 - RNA, 19 nt, Artificial Sequence
  Description of Artificial Sequence: Synthetic oligonucleotide
  Sense strand starting at position 2562 of SEQ ID NO: 318698
aggguuauauuugggaaga

SEQ ID NO: 582566 - RNA, 19 nt, Artificial Sequence
  Description of Artificial Sequence: Synthetic oligonucleotide
  Antisense strand to SEQ ID NO: 582565
ucuucccaaauauaacccu

SEQ ID NO: 582567 - RNA, 19 nt, Artificial Sequence
  Description of Artificial Sequence: Synthetic oligonucleotide
  Sense strand starting at position 2563 of SEQ ID NO: 318698
ggguuauauuugggaagac

SEQ ID NO: 582568 - RNA, 19 nt, Artificial Sequence
  Description of Artificial Sequence: Synthetic oligonucleotide
  Antisense strand to SEQ ID NO: 582567
gucuucccaaauauaaccc

SEQ ID NO: 582569 - RNA, 19 nt, Artificial Sequence
  Description of Artificial Sequence: Synthetic oligonucleotide
  Sense strand starting at position 2564 of SEQ ID NO: 318698
gguuauauuugggaagacu

SEQ ID NO: 582570 - RNA, 19 nt, Artificial Sequence
  Description of Artificial Sequence: Synthetic oligonucleotide
  Antisense strand to SEQ ID NO: 582569
agucuucccaaauauaacc

SEQ ID NO: 582571 - RNA, 19 nt, Artificial Sequence
  Description of Artificial Sequence: Synthetic oligonucleotide
  Sense strand starting at position 2907 of SEQ ID NO: 318698
uucugauacuacuuuguua

SEQ ID NO: 582572 - RNA, 19 nt, Artificial Sequence
  Description of Artificial Sequence: Synthetic oligonucleotide
  Antisense strand to SEQ ID NO: 582571
uaacaaaguaguaucagaa

SEQ ID NO: 582573 - RNA, 19 nt, Artificial Sequence
  Description of Artificial Sequence: Synthetic oligonucleotide
  Sense strand starting at position 2909 of SEQ ID NO: 318698
cugauacuacuuuguuacu

SEQ ID NO: 582574 - RNA, 19 nt, Artificial Sequence
  Description of Artificial Sequence: Synthetic oligonucleotide
  Antisense strand to SEQ ID NO: 582573
aguaacaaaguaguaucag

SEQ ID NO: 582575 - RNA, 19 nt, Artificial Sequence
  Description of Artificial Sequence: Synthetic oligonucleotide
  Sense strand starting at position 2910 of SEQ ID NO: 318698
ugauacuacuuuguuacua

SEQ ID NO: 582576 - RNA, 19 nt, Artificial Sequence
  Description of Artificial Sequence: Synthetic oligonucleotide
  Antisense strand to SEQ ID NO: 582575
uaguaacaaaguaguauca

SEQ ID NO: 582577 - RNA, 19 nt, Artificial Sequence
  Description of Artificial Sequence: Synthetic oligonucleotide
  Sense strand starting at position 3086 of SEQ ID NO: 318698
cuuccugggaucgagcaau

SEQ ID NO: 582578 - RNA, 19 nt, Artificial Sequence
  Description of Artificial Sequence: Synthetic oligonucleotide
  Antisense strand to SEQ ID NO: 582577
auugcucgaucccaggaag

SEQ ID NO: 582579 - RNA, 19 nt, Artificial Sequence
  Description of Artificial Sequence: Synthetic oligonucleotide
  Sense strand starting at position 3222 of SEQ ID NO: 318698
ucuuaaucucgugauccac

SEQ ID NO: 582580 - RNA, 19 nt, Artificial Sequence
  Description of Artificial Sequence: Synthetic oligonucleotide
  Antisense strand to SEQ ID NO: 582579
guggaucacgagauuaaga

SEQ ID NO: 582581 - RNA, 19 nt, Artificial Sequence
  Description of Artificial Sequence: Synthetic oligonucleotide
  Sense strand starting at position 3623 of SEQ ID NO: 318698
guucuuagagcuuaagaag

SEQ ID NO: 582582 - RNA, 19 nt, Artificial Sequence
  Description of Artificial Sequence: Synthetic oligonucleotide
  Antisense strand to SEQ ID NO: 582581
cuucuuaagcucuaagaac

SEQ ID NO: 582583 - RNA, 19 nt, Artificial Sequence
  Description of Artificial Sequence: Synthetic oligonucleotide
  Sense strand starting at position 3739 of SEQ ID NO: 318698
ugcugaagcucuuuccuaa

SEQ ID NO: 582584 - RNA, 19 nt, Artificial Sequence
  Description of Artificial Sequence: Synthetic oligonucleotide
  Antisense strand to SEQ ID NO: 582583
uuaggaaagagcuucagca

SEQ ID NO: 582585 - RNA, 19 nt, Artificial Sequence
  Description of Artificial Sequence: Synthetic oligonucleotide
  Sense strand starting at position 3799 of SEQ ID NO: 318698
gauggaaagucacaguucu

SEQ ID NO: 582586 - RNA, 19 nt, Artificial Sequence
  Description of Artificial Sequence: Synthetic oligonucleotide
  Antisense strand to SEQ ID NO: 582585
agaacugugacuuuccauc

SEQ ID NO: 582587 - RNA, 19 nt, Artificial Sequence
  Description of Artificial Sequence: Synthetic oligonucleotide
  Sense strand starting at position 3822 of SEQ ID NO: 318698
ccauccugugaccauuaca

SEQ ID NO: 582588 - RNA, 19 nt, Artificial Sequence
  Description of Artificial Sequence: Synthetic oligonucleotide
  Antisense strand to SEQ ID NO: 582587
uguaauggucacaggaugg

SEQ ID NO: 582589 - RNA, 19 nt, Artificial Sequence
  Description of Artificial Sequence: Synthetic oligonucleotide
  Sense strand starting at position 3949 of SEQ ID NO: 318698
uagggcauacuccaaguau

SEQ ID NO: 582590 - RNA, 19 nt, Artificial Sequence
  Description of Artificial Sequence: Synthetic oligonucleotide
  Antisense strand to SEQ ID NO: 582589
auacuuggaguaugcccua

SEQ ID NO: 582591 - RNA, 19 nt, Artificial Sequence
  Description of Artificial Sequence: Synthetic oligonucleotide
  Sense strand starting at position 40 of SEQ ID NO: 318699
gcaggucacauauguuuga

SEQ ID NO: 582592 - RNA, 19 nt, Artificial Sequence
  Description of Artificial Sequence: Synthetic oligonucleotide
  Antisense strand to SEQ ID NO: 582591
ucaaacauaugugaccugc

SEQ ID NO: 582593 - RNA, 19 nt, Artificial Sequence
  Description of Artificial Sequence: Synthetic oligonucleotide
  Sense strand starting at position 41 of SEQ ID NO: 318699
caggucacauauguuugaa

SEQ ID NO: 582594 - RNA, 19 nt, Artificial Sequence
  Description of Artificial Sequence: Synthetic oligonucleotide
  Antisense strand to SEQ ID NO: 582593
uucaaacauaugugaccug

SEQ ID NO: 582595 - RNA, 19 nt, Artificial Sequence
  Description of Artificial Sequence: Synthetic oligonucleotide
  Sense strand starting at position 43 of SEQ ID NO: 318699
ggucacauauguuugaacu

SEQ ID NO: 582596 - RNA, 19 nt, Artificial Sequence
  Description of Artificial Sequence: Synthetic oligonucleotide
  Antisense strand to SEQ ID NO: 582595
aguucaaacauaugugacc

SEQ ID NO: 582597 - RNA, 19 nt, Artificial Sequence
  Description of Artificial Sequence: Synthetic oligonucleotide
  Sense strand starting at position 44 of SEQ ID NO: 318699
gucacauauguuugaacuu

SEQ ID NO: 582598 - RNA, 19 nt, Artificial Sequence
  Description of Artificial Sequence: Synthetic oligonucleotide
  Antisense strand to SEQ ID NO: 582597
aaguucaaacauaugugac

SEQ ID NO: 582599 - RNA, 19 nt, Artificial Sequence
  Description of Artificial Sequence: Synthetic oligonucleotide
  Sense strand starting at position 53 of SEQ ID NO: 318699
guuugaacuugugucuguu

SEQ ID NO: 582600 - RNA, 19 nt, Artificial Sequence
  Description of Artificial Sequence: Synthetic oligonucleotide
  Antisense strand to SEQ ID NO: 582599
aacagacacaaguucaaac

SEQ ID NO: 582601 - RNA, 19 nt, Artificial Sequence
  Description of Artificial Sequence: Synthetic oligonucleotide
  Sense strand starting at position 57 of SEQ ID NO: 318699
gaacuugugucuguucuga

SEQ ID NO: 582602 - RNA, 19 nt, Artificial Sequence
  Description of Artificial Sequence: Synthetic oligonucleotide
  Antisense strand to SEQ ID NO: 582601
ucagaacagacacaaguuc

SEQ ID NO: 582603 - RNA, 19 nt, Artificial Sequence
  Description of Artificial Sequence: Synthetic oligonucleotide
  Sense strand starting at position 59 of SEQ ID NO: 318699
acuugugucuguucugaga

SEQ ID NO: 582604 - RNA, 19 nt, Artificial Sequence
  Description of Artificial Sequence: Synthetic oligonucleotide
  Antisense strand to SEQ ID NO: 582603
ucucagaacagacacaagu

SEQ ID NO: 582605 - RNA, 19 nt, Artificial Sequence
  Description of Artificial Sequence: Synthetic oligonucleotide
  Sense strand starting at position 441 of SEQ ID NO: 318699
agagaugcucucuagcacu

SEQ ID NO: 582606 - RNA, 19 nt, Artificial Sequence
  Description of Artificial Sequence: Synthetic oligonucleotide
  Antisense strand to SEQ ID NO: 582605
agugcuagagagcaucucu

SEQ ID NO: 582607 - RNA, 19 nt, Artificial Sequence
  Description of Artificial Sequence: Synthetic oligonucleotide
  Sense strand starting at position 525 of SEQ ID NO: 318699
ccaggaagcgcugaaugaa

SEQ ID NO: 582608 - RNA, 19 nt, Artificial Sequence
  Description of Artificial Sequence: Synthetic oligonucleotide
  Antisense strand to SEQ ID NO: 582607
uucauucagcgcuuccugg

SEQ ID NO: 582609 - RNA, 19 nt, Artificial Sequence
  Description of Artificial Sequence: Synthetic oligonucleotide
  Sense strand starting at position 533 of SEQ ID NO: 318699
cgcugaaugaacgaaugaa

SEQ ID NO: 582610 - RNA, 19 nt, Artificial Sequence
  Description of Artificial Sequence: Synthetic oligonucleotide
  Antisense strand to SEQ ID NO: 582609
uucauucguucauucagcg

SEQ ID NO: 582611 - RNA, 19 nt, Artificial Sequence
  Description of Artificial Sequence: Synthetic oligonucleotide
  Sense strand starting at position 561 of SEQ ID NO: 318699
gaaaguaagugcucccaga

SEQ ID NO: 582612 - RNA, 19 nt, Artificial Sequence
  Description of Artificial Sequence: Synthetic oligonucleotide
  Antisense strand to SEQ ID NO: 582611
ucugggagcacuuacuuuc

SEQ ID NO: 582613 - RNA, 19 nt, Artificial Sequence
  Description of Artificial Sequence: Synthetic oligonucleotide
  Sense strand starting at position 860 of SEQ ID NO: 318699
gcagcaugugagcaaagaa

SEQ ID NO: 582614 - RNA, 19 nt, Artificial Sequence
  Description of Artificial Sequence: Synthetic oligonucleotide
  Antisense strand to SEQ ID NO: 582613
uucuuugcucacaugcugc

SEQ ID NO: 582615 - RNA, 19 nt, Artificial Sequence
  Description of Artificial Sequence: Synthetic oligonucleotide
  Sense strand starting at position 1131 of SEQ ID NO: 318699
gcugccagauuccuggaua

SEQ ID NO: 582616 - RNA, 19 nt, Artificial Sequence
  Description of Artificial Sequence: Synthetic oligonucleotide
  Antisense strand to SEQ ID NO: 582615
uauccaggaaucuggcagc

SEQ ID NO: 582617 - RNA, 19 nt, Artificial Sequence
  Description of Artificial Sequence: Synthetic oligonucleotide
  Sense strand starting at position 1134 of SEQ ID NO: 318699
gccagauuccuggauaacc

SEQ ID NO: 582618 - RNA, 19 nt, Artificial Sequence
  Description of Artificial Sequence: Synthetic oligonucleotide
  Antisense strand to SEQ ID NO: 582617
gguuauccaggaaucuggc

SEQ ID NO: 582619 - RNA, 19 nt, Artificial Sequence
  Description of Artificial Sequence: Synthetic oligonucleotide
  Sense strand starting at position 1534 of SEQ ID NO: 318699
gggccuaaguccuccaacu

SEQ ID NO: 582620 - RNA, 19 nt, Artificial Sequence
  Description of Artificial Sequence: Synthetic oligonucleotide
  Antisense strand to SEQ ID NO: 582619
aguuggaggacuuaggccc

SEQ ID NO: 582621 - RNA, 19 nt, Artificial Sequence
  Description of Artificial Sequence: Synthetic oligonucleotide
  Sense strand starting at position 2612 of SEQ ID NO: 318699
ccgcucugccuguacuuaa

SEQ ID NO: 582622 - RNA, 19 nt, Artificial Sequence
  Description of Artificial Sequence: Synthetic oligonucleotide
  Antisense strand to SEQ ID NO: 582621
uuaaguacaggcagagcgg

SEQ ID NO: 582623 - RNA, 19 nt, Artificial Sequence
  Description of Artificial Sequence: Synthetic oligonucleotide
  Sense strand starting at position 2749 of SEQ ID NO: 318699
auggaaacauucuugcgaa

SEQ ID NO: 582624 - RNA, 19 nt, Artificial Sequence
  Description of Artificial Sequence: Synthetic oligonucleotide
  Antisense strand to SEQ ID NO: 582623
uucgcaagaauguuuccau

SEQ ID NO: 582625 - RNA, 19 nt, Artificial Sequence
  Description of Artificial Sequence: Synthetic oligonucleotide
  Sense strand starting at position 2757 of SEQ ID NO: 318699
auucuugcgaauugggaaa

SEQ ID NO: 582626 - RNA, 19 nt, Artificial Sequence
  Description of Artificial Sequence: Synthetic oligonucleotide
  Antisense strand to SEQ ID NO: 582625
uuucccaauucgcaagaau

SEQ ID NO: 582627 - RNA, 19 nt, Artificial Sequence
  Description of Artificial Sequence: Synthetic oligonucleotide
  Sense strand starting at position 3026 of SEQ ID NO: 318699
ugaggacuuacuugugaca

SEQ ID NO: 582628 - RNA, 19 nt, Artificial Sequence
  Description of Artificial Sequence: Synthetic oligonucleotide
  Antisense strand to SEQ ID NO: 582627
ugucacaaguaaguccuca

SEQ ID NO: 582629 - RNA, 19 nt, Artificial Sequence
  Description of Artificial Sequence: Synthetic oligonucleotide
  Sense strand starting at position 3065 of SEQ ID NO: 318699
caggcuuucuuuccuguga

SEQ ID NO: 582630 - RNA, 19 nt, Artificial Sequence
  Description of Artificial Sequence: Synthetic oligonucleotide
  Antisense strand to SEQ ID NO: 582629
ucacaggaaagaaagccug

SEQ ID NO: 582631 - RNA, 19 nt, Artificial Sequence
  Description of Artificial Sequence: Synthetic oligonucleotide
  Sense strand starting at position 3066 of SEQ ID NO: 318699
aggcuuucuuuccugugau

SEQ ID NO: 582632 - RNA, 19 nt, Artificial Sequence
  Description of Artificial Sequence: Synthetic oligonucleotide
  Antisense strand to SEQ ID NO: 582631
aucacaggaaagaaagccu

SEQ ID NO: 582633 - RNA, 19 nt, Artificial Sequence
  Description of Artificial Sequence: Synthetic oligonucleotide
  Sense strand starting at position 3069 of SEQ ID NO: 318699
cuuucuuuccugugauacu
